United States Patent Application Publication US 2011/0177960 A1 - sequence listing, part 15

SEQ ID NO: 247589 - DNA, 25 bp, Artificial
  probe
  misc_feature (1)..(25): SEQ ID NO: 5161; WAN024GJ6_at; Start 146; Stop 170
cgcgttctgggttagcacctggttt

SEQ ID NO: 247590 - DNA, 25 bp, Artificial
  probe
  misc_feature (1)..(25): SEQ ID NO: 5161; WAN024GJ6_at; Start 82; Stop 106
acaaattcagaatctccaccccaag

SEQ ID NO: 247591 - DNA, 25 bp, Artificial
  probe
  misc_feature (1)..(25): SEQ ID NO: 5161; WAN024GJ6_at; Start 157; Stop 181
ttagcacctggtttatcaatcttgt

SEQ ID NO: 247592 - DNA, 25 bp, Artificial
  probe
  misc_feature (1)..(25): SEQ ID NO: 5161; WAN024GJ6_at; Start 77; Stop 101
tttcaacaaattcagaatctccacc

SEQ ID NO: 247593 - DNA, 25 bp, Artificial
  probe
  misc_feature (1)..(25): SEQ ID NO: 5161; WAN024GJ6_at; Start 40; Stop 64
aacaattcttcgatattttggttga

SEQ ID NO: 247594 - DNA, 25 bp, Artificial
  probe
  misc_feature (1)..(25): SEQ ID NO: 5161; WAN024GJ6_at; Start 132; Stop 156
caattcaccgataacgcgttctggg

SEQ ID NO: 247595 - DNA, 25 bp, Artificial
  probe
  misc_feature (1)..(25): SEQ ID NO: 5161; WAN024GJ6_at; Start 133; Stop 157
aattcaccgataacgcgttctgggt

SEQ ID NO: 247596 - DNA, 25 bp, Artificial
  probe
  misc_feature (1)..(25): SEQ ID NO: 5161; WAN024GJ6_at; Start 191; Stop 215
cgatgattggaacgttagctgcttt

SEQ ID NO: 247597 - DNA, 25 bp, Artificial
  probe
  misc_feature (1)..(25): SEQ ID NO: 5161; WAN024GJ6_at; Start 189; Stop 213
tacgatgattggaacgttagctgct

SEQ ID NO: 247598 - DNA, 25 bp, Artificial
  probe
  misc_feature (1)..(25): SEQ ID NO: 5161; WAN024GJ6_at; Start 195; Stop 219
gattggaacgttagctgcttttgag

SEQ ID NO: 247599 - DNA, 25 bp, Artificial
  probe
  misc_feature (1)..(25): SEQ ID NO: 5161; WAN024GJ6_at; Start 30; Stop 54
gactgtttccaacaattcttcgata

SEQ ID NO: 247600 - DNA, 25 bp, Artificial
  probe
  misc_feature (1)..(25): SEQ ID NO: 5161; WAN024GJ6_at; Start 203; Stop 227
cgttagctgcttttgagtggttgat

SEQ ID NO: 247601 - DNA, 25 bp, Artificial
  probe
  misc_feature (1)..(25): SEQ ID NO: 5161; WAN024GJ6_at; Start 198; Stop 222
tggaacgttagctgcttttgagtgg

SEQ ID NO: 247602 - DNA, 25 bp, Artificial
  probe
  misc_feature (1)..(25): SEQ ID NO: 5161; WAN024GJ6_at; Start 23; Stop 47
caagaaggactgtttccaacaattc

SEQ ID NO: 247603 - DNA, 25 bp, Artificial
  probe
  misc_feature (1)..(25): SEQ ID NO: 5161; WAN024GJ6_at; Start 151; Stop 175
tctgggttagcacctggtttatcaa

SEQ ID NO: 247604 - DNA, 25 bp, Artificial
  probe
  misc_feature (1)..(25): SEQ ID NO: 5161; WAN024GJ6_at; Start 148; Stop 172
cgttctgggttagcacctggtttat

SEQ ID NO: 247605 - DNA, 25 bp, Artificial
  probe
  misc_feature (1)..(25): SEQ ID NO: 5161; WAN024GJ6_at; Start 109; Stop 133
gttgacatcacaccatgctctgcca

SEQ ID NO: 247606 - DNA, 25 bp, Artificial
  probe
  misc_feature (1)..(25): SEQ ID NO: 5161; WAN024GJ6_at; Start 154; Stop 178
gggttagcacctggtttatcaatct

SEQ ID NO: 247607 - DNA, 25 bp, Artificial
  probe
  misc_feature (1)..(25): SEQ ID NO: 5161; WAN024GJ6_at; Start 188; Stop 212
ctacgatgattggaacgttagctgc

SEQ ID NO: 247608 - DNA, 25 bp, Artificial
  probe
  misc_feature (1)..(25): SEQ ID NO: 5161; WAN024GJ6_at; Start 144; Stop 168
aacgcgttctgggttagcacctggt

SEQ ID NO: 247609 - DNA, 25 bp, Artificial
  probe
  misc_feature (1)..(25): SEQ ID NO: 5402; WAN024GJ7_at; Start 226; Stop 250
gctttgcggtttcgctgctactttt

SEQ ID NO: 247610 - DNA, 25 bp, Artificial
  probe
  misc_feature (1)..(25): SEQ ID NO: 5402; WAN024GJ7_at; Start 223; Stop 247
acggctttgcggtttcgctgctact

SEQ ID NO: 247611 - DNA, 25 bp, Artificial
  probe
  misc_feature (1)..(25): SEQ ID NO: 5402; WAN024GJ7_at; Start 221; Stop 245
ttacggctttgcggtttcgctgcta

SEQ ID NO: 247612 - DNA, 25 bp, Artificial
  probe
  misc_feature (1)..(25): SEQ ID NO: 5402; WAN024GJ7_at; Start 224; Stop 248
cggctttgcggtttcgctgctactt

SEQ ID NO: 247613 - DNA, 25 bp, Artificial
  probe
  misc_feature (1)..(25): SEQ ID NO: 5402; WAN024GJ7_at; Start 260; Stop 284
ggagcaactggctcagccggttttg

SEQ ID NO: 247614 - DNA, 25 bp, Artificial
  probe
  misc_feature (1)..(25): SEQ ID NO: 5402; WAN024GJ7_at; Start 261; Stop 285
gagcaactggctcagccggttttgc

SEQ ID NO: 247615 - DNA, 25 bp, Artificial
  probe
  misc_feature (1)..(25): SEQ ID NO: 5402; WAN024GJ7_at; Start 218; Stop 242
aaattacggctttgcggtttcgctg

SEQ ID NO: 247616 - DNA, 25 bp, Artificial
  probe
  misc_feature (1)..(25): SEQ ID NO: 5402; WAN024GJ7_at; Start 257; Stop 281
ttcggagcaactggctcagccggtt

SEQ ID NO: 247617 - DNA, 25 bp, Artificial
  probe
  misc_feature (1)..(25): SEQ ID NO: 5402; WAN024GJ7_at; Start 262; Stop 286
agcaactggctcagccggttttgcc

SEQ ID NO: 247618 - DNA, 25 bp, Artificial
  probe
  misc_feature (1)..(25): SEQ ID NO: 5402; WAN024GJ7_at; Start 254; Stop 278
gttttcggagcaactggctcagccg

SEQ ID NO: 247619 - DNA, 25 bp, Artificial
  probe
  misc_feature (1)..(25): SEQ ID NO: 5402; WAN024GJ7_at; Start 219; Stop 243
aattacggctttgcggtttcgctgc

SEQ ID NO: 247620 - DNA, 25 bp, Artificial
  probe
  misc_feature (1)..(25): SEQ ID NO: 5402; WAN024GJ7_at; Start 225; Stop 249
ggctttgcggtttcgctgctacttt

SEQ ID NO: 247621 - DNA, 25 bp, Artificial
  probe
  misc_feature (1)..(25): SEQ ID NO: 5402; WAN024GJ7_at; Start 258; Stop 282
tcggagcaactggctcagccggttt

SEQ ID NO: 247622 - DNA, 25 bp, Artificial
  probe
  misc_feature (1)..(25): SEQ ID NO: 5402; WAN024GJ7_at; Start 253; Stop 277
tgttttcggagcaactggctcagcc

SEQ ID NO: 247623 - DNA, 25 bp, Artificial
  probe
  misc_feature (1)..(25): SEQ ID NO: 5402; WAN024GJ7_at; Start 264; Stop 288
caactggctcagccggttttgcctc

SEQ ID NO: 247624 - DNA, 25 bp, Artificial
  probe
  misc_feature (1)..(25): SEQ ID NO: 5402; WAN024GJ7_at; Start 256; Stop 280
tttcggagcaactggctcagccggt

SEQ ID NO: 247625 - DNA, 25 bp, Artificial
  probe
  misc_feature (1)..(25): SEQ ID NO: 5402; WAN024GJ7_at; Start 222; Stop 246
tacggctttgcggtttcgctgctac

SEQ ID NO: 247626 - DNA, 25 bp, Artificial
  probe
  misc_feature (1)..(25): SEQ ID NO: 5402; WAN024GJ7_at; Start 259; Stop 283
cggagcaactggctcagccggtttt

SEQ ID NO: 247627 - DNA, 25 bp, Artificial
  probe
  misc_feature (1)..(25): SEQ ID NO: 5402; WAN024GJ7_at; Start 255; Stop 279
ttttcggagcaactggctcagccgg

SEQ ID NO: 247628 - DNA, 25 bp, Artificial
  probe
  misc_feature (1)..(25): SEQ ID NO: 5402; WAN024GJ7_at; Start 263; Stop 287
gcaactggctcagccggttttgcct

SEQ ID NO: 247629 - DNA, 25 bp, Artificial
  probe
  misc_feature (1)..(25): SEQ ID NO: 5402; WAN024GJ7_at; Start 220; Stop 244
attacggctttgcggtttcgctgct

SEQ ID NO: 247630 - DNA, 25 bp, Artificial
  probe
  misc_feature (1)..(25): SEQ ID NO: 4210; WAN024GJ8_at; Start 558; Stop 582
caaccactgcttgaacttgctgtgc

SEQ ID NO: 247631 - DNA, 25 bp, Artificial
  probe
  misc_feature (1)..(25): SEQ ID NO: 4210; WAN024GJ8_at; Start 480; Stop 504
cgtcacgatttttgtctggtcgagc

SEQ ID NO: 247632 - DNA, 25 bp, Artificial
  probe
  misc_feature (1)..(25): SEQ ID NO: 4210; WAN024GJ8_at; Start 16; Stop 40
catgatagtaacaactggtggacgc

SEQ ID NO: 247633 - DNA, 25 bp, Artificial
  probe
  misc_feature (1)..(25): SEQ ID NO: 4210; WAN024GJ8_at; Start 68; Stop 92
ccatcttcgacaaagaaacgttcga

SEQ ID NO: 247634 - DNA, 25 bp, Artificial
  probe
  misc_feature (1)..(25): SEQ ID NO: 4210; WAN024GJ8_at; Start 415; Stop 439
cacttgattttgactacttcgattc

SEQ ID NO: 247635 - DNA, 25 bp, Artificial
  probe
  misc_feature (1)..(25): SEQ ID NO: 4210; WAN024GJ8_at; Start 438; Stop 462
tcttttgttgttttctaggaccatc

SEQ ID NO: 247636 - DNA, 25 bp, Artificial
  probe
  misc_feature (1)..(25): SEQ ID NO: 4210; WAN024GJ8_at; Start 287; Stop 311
tcaaattctgttggcaattcatgga

SEQ ID NO: 247637 - DNA, 25 bp, Artificial
  probe
  misc_feature (1)..(25): SEQ ID NO: 4210; WAN024GJ8_at; Start 185; Stop 209
tgtgtggccatgacacccatcatga

SEQ ID NO: 247638 - DNA, 25 bp, Artificial
  probe
  misc_feature (1)..(25): SEQ ID NO: 4210; WAN024GJ8_at; Start 106; Stop 130
cacttcaaccttttgtttggcttcg

SEQ ID NO: 247639 - DNA, 25 bp, Artificial
  probe
  misc_feature (1)..(25): SEQ ID NO: 4210; WAN024GJ8_at; Start 157; Stop 181
aattgtttccccatccaaggattgg

SEQ ID NO: 247640 - DNA, 25 bp, Artificial
  probe
  misc_feature (1)..(25): SEQ ID NO: 4210; WAN024GJ8_at; Start 196; Stop 220
gacacccatcatgaaaagtttctta

SEQ ID NO: 247641 - DNA, 25 bp, Artificial
  probe
  misc_feature (1)..(25): SEQ ID NO: 4210; WAN024GJ8_at; Start 225; Stop 249
tttcagctggttcacgtttgatacg

SEQ ID NO: 247642 - DNA, 25 bp, Artificial
  probe
  misc_feature (1)..(25): SEQ ID NO: 4210; WAN024GJ8_at; Start 130; Stop 154
gataccgtaatccaccatgaggagt

SEQ ID NO: 247643 - DNA, 25 bp, Artificial
  probe
  misc_feature (1)..(25): SEQ ID NO: 4210; WAN024GJ8_at; Start 145; Stop 169
catgaggagttcaattgtttcccca

SEQ ID NO: 247644 - DNA, 25 bp, Artificial
  probe
  misc_feature (1)..(25): SEQ ID NO: 4210; WAN024GJ8_at; Start 171; Stop 195
ccaaggattggttttgtgtggccat

SEQ ID NO: 247645 - DNA, 25 bp, Artificial
  probe
  misc_feature (1)..(25): SEQ ID NO: 4210; WAN024GJ8_at; Start 451; Stop 475
tctaggaccatcttcttcatgatca

SEQ ID NO: 247646 - DNA, 25 bp, Artificial
  probe
  misc_feature (1)..(25): SEQ ID NO: 4210; WAN024GJ8_at; Start 119; Stop 143
tgtttggcttcgataccgtaatcca

SEQ ID NO: 247647 - DNA, 25 bp, Artificial
  probe
  misc_feature (1)..(25): SEQ ID NO: 4210; WAN024GJ8_at; Start 464; Stop 488
tcttcatgatcataatcgtcacgat

SEQ ID NO: 247648 - DNA, 25 bp, Artificial
  probe
  misc_feature (1)..(25): SEQ ID NO: 4210; WAN024GJ8_at; Start 1; Stop 25
gtggtcaacgtgtcccatgatagta

SEQ ID NO: 247649 - DNA, 25 bp, Artificial
  probe
  misc_feature (1)..(25): SEQ ID NO: 4210; WAN024GJ8_at; Start 53; Stop 77
tcttcattgagataaccatcttcga

SEQ ID NO: 247650 - DNA, 25 bp, Artificial
  probe
  misc_feature (1)..(25): SEQ ID NO: 4210; WAN024GJ8_at; Start 500; Stop 524
cgagcttgttttttacgacgtgtat

SEQ ID NO: 247651 - DNA, 25 bp, Artificial
  probe
  misc_feature (1)..(25): SEQ ID NO: 4210; WAN024GJ8_at; Start 320; Stop 344
tccgtaacaggttttggagtctgat

SEQ ID NO: 247652 - DNA, 25 bp, Artificial
  probe
  misc_feature (1)..(25): SEQ ID NO: 4210; WAN024GJ8_at; Start 258; Stop 282
tttccgcaacggtcataccatctgt

SEQ ID NO: 247653 - DNA, 25 bp, Artificial
  probe
  misc_feature (1)..(25): SEQ ID NO: 4210; WAN024GJ8_at; Start 210; Stop 234
aaagtttcttaacaatttcagctgg

SEQ ID NO: 247654 - DNA, 25 bp, Artificial
  probe
  misc_feature (1)..(25): SEQ ID NO: 4210; WAN024GJ8_at; Start 301; Stop 325
caattcatggaatttacgctccgta

SEQ ID NO: 247655 - DNA, 25 bp, Artificial
  probe
  misc_feature (1)..(25): SEQ ID NO: 4210; WAN024GJ8_at; Start 530; Stop 554
gcaggttcttttttctcagggacga

SEQ ID NO: 247656 - DNA, 25 bp, Artificial
  probe
  misc_feature (1)..(25): SEQ ID NO: 4210; WAN024GJ8_at; Start 570; Stop 594
gaacttgctgtgcttgttcagctaa

SEQ ID NO: 247657 - DNA, 25 bp, Artificial
  probe
  misc_feature (1)..(25): SEQ ID NO: 4210; WAN024GJ8_at; Start 545; Stop 569
tcagggacgacttcaaccactgctt

SEQ ID NO: 247658 - DNA, 25 bp, Artificial
  probe
  misc_feature (1)..(25): SEQ ID NO: 4210; WAN024GJ8_at; Start 240; Stop 264
gtttgatacgttttgcgatttccgc

SEQ ID NO: 247659 - DNA, 25 bp, Artificial
  probe
  misc_feature (1)..(25): SEQ ID NO: 4210; WAN024GJ8_at; Start 32; Stop 56
ggtggacgctcaaccaattcatctt

SEQ ID NO: 247660 - DNA, 25 bp, Artificial
  probe
  misc_feature (1)..(25): SEQ ID NO: 4210; WAN024GJ8_at; Start 342; Stop 366
gattacggttgttcttgttattgcc

SEQ ID NO: 247661 - DNA, 25 bp, Artificial
  probe
  misc_feature (1)..(25): SEQ ID NO: 4210; WAN024GJ8_at; Start 82; Stop 106
gaaacgttcgatgtcagcattatcc

SEQ ID NO: 247662 - DNA, 25 bp, Artificial
  probe
  misc_feature (1)..(25): SEQ ID NO: 4210; WAN024GJ8_at; Start 513; Stop 537
tacgacgtgtatccactgcaggttc

SEQ ID NO: 247663 - DNA, 25 bp, Artificial
  probe
  misc_feature (1)..(25): SEQ ID NO: 4210; WAN024GJ8_at; Start 91; Stop 115
gatgtcagcattatccacttcaacc

SEQ ID NO: 247664 - DNA, 25 bp, Artificial
  probe
  misc_feature (1)..(25): SEQ ID NO: 4980; WAN024GJ9_at; Start 67; Stop 91
gaagaattggtggtcaaggccattc

SEQ ID NO: 247665 - DNA, 25 bp, Artificial
  probe
  misc_feature (1)..(25): SEQ ID NO: 4980; WAN024GJ9_at; Start 206; Stop 230
cactggaattaagcatagcagtcgg

SEQ ID NO: 247666 - DNA, 25 bp, Artificial
  probe
  misc_feature (1)..(25): SEQ ID NO: 4980; WAN024GJ9_at; Start 33; Stop 57
gcttgctcagcgagcagggcgcatc

SEQ ID NO: 247667 - DNA, 25 bp, Artificial
  probe
  misc_feature (1)..(25): SEQ ID NO: 4980; WAN024GJ9_at; Start 90; Stop 114
tcaagacggcaaggccaagttggtc

SEQ ID NO: 247668 - DNA, 25 bp, Artificial
  probe
  misc_feature (1)..(25): SEQ ID NO: 4980; WAN024GJ9_at; Start 112; Stop 136
gtctttctagctcatgatgctggac

SEQ ID NO: 247669 - DNA, 25 bp, Artificial
  probe
  misc_feature (1)..(25): SEQ ID NO: 4980; WAN024GJ9_at; Start 239; Stop 263
gaaaggttttggctgtaacagatgc

SEQ ID NO: 247670 - DNA, 25 bp, Artificial
  probe
  misc_feature (1)..(25): SEQ ID NO: 4980; WAN024GJ9_at; Start 202; Stop 226
tcaacactggaattaagcatagcag

SEQ ID NO: 247671 - DNA, 25 bp, Artificial
  probe
  misc_feature (1)..(25): SEQ ID NO: 4980; WAN024GJ9_at; Start 87; Stop 111
cattcaagacggcaaggccaagttg

SEQ ID NO: 247672 - DNA, 25 bp, Artificial
  probe
  misc_feature (1)..(25): SEQ ID NO: 4980; WAN024GJ9_at; Start 80; Stop 104
tcaaggccattcaagacggcaaggc

SEQ ID NO: 247673 - DNA, 25 bp, Artificial
  probe
  misc_feature (1)..(25): SEQ ID NO: 4980; WAN024GJ9_at; Start 71; Stop 95
aattggtggtcaaggccattcaaga

SEQ ID NO: 247674 - DNA, 25 bp, Artificial
  probe
  misc_feature (1)..(25): SEQ ID NO: 4980; WAN024GJ9_at; Start 37; Stop 61
gctcagcgagcagggcgcatcatat

SEQ ID NO: 247675 - DNA, 25 bp, Artificial
  probe
  misc_feature (1)..(25): SEQ ID NO: 4980; WAN024GJ9_at; Start 105; Stop 129
caagttggtctttctagctcatgat

SEQ ID NO: 247676 - DNA, 25 bp, Artificial
  probe
  misc_feature (1)..(25): SEQ ID NO: 4980; WAN024GJ9_at; Start 254; Stop 278
taacagatgctggatttacaaagaa

SEQ ID NO: 247677 - DNA, 25 bp, Artificial
  probe
  misc_feature (1)..(25): SEQ ID NO: 4980; WAN024GJ9_at; Start 94; Stop 118
gacggcaaggccaagttggtctttc

SEQ ID NO: 247678 - DNA, 25 bp, Artificial
  probe
  misc_feature (1)..(25): SEQ ID NO: 4980; WAN024GJ9_at; Start 49; Stop 73
gggcgcatcatatcgggtgaagaat

SEQ ID NO: 247679 - DNA, 25 bp, Artificial
  probe
  misc_feature (1)..(25): SEQ ID NO: 4980; WAN024GJ9_at; Start 231; Stop 255
gaaatcgagaaaggttttggctgta

SEQ ID NO: 247680 - DNA, 25 bp, Artificial
  probe
  misc_feature (1)..(25): SEQ ID NO: 4980; WAN024GJ9_at; Start 146; Stop 170
ccaagaagattcaagataaaagtca

SEQ ID NO: 247681 - DNA, 25 bp, Artificial
  probe
  misc_feature (1)..(25): SEQ ID NO: 4980; WAN024GJ9_at; Start 221; Stop 245
tagcagtcgggaaatcgagaaaggt

SEQ ID NO: 247682 - DNA, 25 bp, Artificial
  probe
  misc_feature (1)..(25): SEQ ID NO: 4980; WAN024GJ9_at; Start 248; Stop 272
tggctgtaacagatgctggatttac

SEQ ID NO: 247683 - DNA, 25 bp, Artificial
  probe
  misc_feature (1)..(25): SEQ ID NO: 4980; WAN024GJ9_at; Start 22; Stop 46
aatctcttggggcttgctcagcgag

SEQ ID NO: 247684 - DNA, 25 bp, Artificial
  probe
  misc_feature (1)..(25): SEQ ID NO: 4980; WAN024GJ9_at; Start 272; Stop 296
caaagaaaatgaggtctcttatgga

SEQ ID NO: 247685 - DNA, 25 bp, Artificial
  probe
  misc_feature (1)..(25): SEQ ID NO: 4980; WAN024GJ9_at; Start 266; Stop 290
gatttacaaagaaaatgaggtctct

SEQ ID NO: 247686 - DNA, 25 bp, Artificial
  probe
  misc_feature (1)..(25): SEQ ID NO: 4980; WAN024GJ9_at; Start 57; Stop 81
catatcgggtgaagaattggtggtc

SEQ ID NO: 247687 - DNA, 25 bp, Artificial
  probe
  misc_feature (1)..(25): SEQ ID NO: 4980; WAN024GJ9_at; Start 162; Stop 186
taaaagtcattattatcaagtagaa

SEQ ID NO: 247688 - DNA, 25 bp, Artificial
  probe
  misc_feature (1)..(25): SEQ ID NO: 4980; WAN024GJ9_at; Start 174; Stop 198
ttatcaagtagaaattgtaaccgtg

SEQ ID NO: 247689 - DNA, 25 bp, Artificial
  probe
  misc_feature (1)..(25): SEQ ID NO: 4980; WAN024GJ9_at; Start 215; Stop 239
taagcatagcagtcgggaaatcgag

SEQ ID NO: 247690 - DNA, 25 bp, Artificial
  probe
  misc_feature (1)..(25): SEQ ID NO: 4980; WAN024GJ9_at; Start 235; Stop 259
tcgagaaaggttttggctgtaacag

SEQ ID NO: 247691 - DNA, 25 bp, Artificial
  probe
  misc_feature (1)..(25): SEQ ID NO: 4980; WAN024GJ9_at; Start 275; Stop 299
agaaaatgaggtctcttatggaata

SEQ ID NO: 247692 - DNA, 25 bp, Artificial
  probe
  misc_feature (1)..(25): SEQ ID NO: 4980; WAN024GJ9_at; Start 101; Stop 125
aggccaagttggtctttctagctca

SEQ ID NO: 247693 - DNA, 25 bp, Artificial
  probe
  misc_feature (1)..(25): SEQ ID NO: 4980; WAN024GJ9_at; Start 47; Stop 71
cagggcgcatcatatcgggtgaaga

SEQ ID NO: 247694 - DNA, 25 bp, Artificial
  probe
  misc_feature (1)..(25): SEQ ID NO: 4980; WAN024GJ9_at; Start 189; Stop 213
tgtaaccgtgttttcaacactggaa

SEQ ID NO: 247695 - DNA, 25 bp, Artificial
  probe
  misc_feature (1)..(25): SEQ ID NO: 4980; WAN024GJ9_at; Start 77; Stop 101
tggtcaaggccattcaagacggcaa

SEQ ID NO: 247696 - DNA, 25 bp, Artificial
  probe
  misc_feature (1)..(25): SEQ ID NO: 4980; WAN024GJ9_at; Start 243; Stop 267
ggttttggctgtaacagatgctgga

SEQ ID NO: 247697 - DNA, 25 bp, Artificial
  probe
  misc_feature (1)..(25): SEQ ID NO: 4980; WAN024GJ9_at; Start 210; Stop 234
ggaattaagcatagcagtcgggaaa

SEQ ID NO: 247698 - DNA, 25 bp, Artificial
  probe
  misc_feature (1)..(25): SEQ ID NO: 5732; WAN024GJA_at; Start 2282; Stop 2306
tgactatcgtccactcagcggtcgg

SEQ ID NO: 247699 - DNA, 25 bp, Artificial
  probe
  misc_feature (1)..(25): SEQ ID NO: 5732; WAN024GJA_at; Start 517; Stop 541
caaaaacgtagaaatgagcgccgtc

SEQ ID NO: 247700 - DNA, 25 bp, Artificial
  probe
  misc_feature (1)..(25): SEQ ID NO: 5732; WAN024GJA_at; Start 2297; Stop 2321
cagcggtcggtgctatcaacgaatc

SEQ ID NO: 247701 - DNA, 25 bp, Artificial
  probe
  misc_feature (1)..(25): SEQ ID NO: 5732; WAN024GJA_at; Start 146; Stop 170
gctttaagcctgcagctgctccgaa

SEQ ID NO: 247702 - DNA, 25 bp, Artificial
  probe
  misc_feature (1)..(25): SEQ ID NO: 5732; WAN024GJA_at; Start 17; Stop 41
tgtacgaaatcgcaaaagaacttgg

SEQ ID NO: 247703 - DNA, 25 bp, Artificial
  probe
  misc_feature (1)..(25): SEQ ID NO: 5732; WAN024GJA_at; Start 2589; Stop 2613
taaggttgcccgtgactctaaagtc

SEQ ID NO: 247704 - DNA, 25 bp, Artificial
  probe
  misc_feature (1)..(25): SEQ ID NO: 5732; WAN024GJA_at; Start 1362; Stop 1386
tcgtaactcacgtgttgcgacaggt

SEQ ID NO: 247705 - DNA, 25 bp, Artificial
  probe
  misc_feature (1)..(25): SEQ ID NO: 5732; WAN024GJA_at; Start 799; Stop 823
gaacctgcagtggatacacgtcgta

SEQ ID NO: 247706 - DNA, 25 bp, Artificial
  probe
  misc_feature (1)..(25): SEQ ID NO: 5732; WAN024GJA_at; Start 248; Stop 272
tagctaaggaagaggcaaaaccggc

SEQ ID NO: 247707 - DNA, 25 bp, Artificial
  probe
  misc_feature (1)..(25): SEQ ID NO: 5732; WAN024GJA_at; Start 1410; Stop 1434
tatcggtgcctaccaaatcgtggaa

SEQ ID NO: 247708 - DNA, 25 bp, Artificial
  probe
  misc_feature (1)..(25): SEQ ID NO: 5732; WAN024GJA_at; Start 104; Stop 128
catcaagtgtggaagaagctgtcgc

SEQ ID NO: 247709 - DNA, 25 bp, Artificial
  probe
  misc_feature (1)..(25): SEQ ID NO: 5732; WAN024GJA_at; Start 2215; Stop 2239
gatgtacaaggttctgttgaagccc

SEQ ID NO: 247710 - DNA, 25 bp, Artificial
  probe
  misc_feature (1)..(25): SEQ ID NO: 5732; WAN024GJA_at; Start 1639; Stop 1663
ggtgctaacccagaacgcgttatcg

SEQ ID NO: 247711 - DNA, 25 bp, Artificial
  probe
  misc_feature (1)..(25): SEQ ID NO: 5732; WAN024GJA_at; Start 765; Stop 789
tcaagcagtggttgaagtcgtccct

SEQ ID NO: 247712 - DNA, 25 bp, Artificial
  probe
  misc_feature (1)..(25): SEQ ID NO: 5732; WAN024GJA_at; Start 1928; Stop 1952
gaaataccttcggtcgtgtccgtgc

SEQ ID NO: 247713 - DNA, 25 bp, Artificial
  probe
  misc_feature (1)..(25): SEQ ID NO: 5732; WAN024GJA_at; Start 782; Stop 806
tcgtccctgagaaaaaagaacctgc

SEQ ID NO: 247714 - DNA, 25 bp, Artificial
  probe
  misc_feature (1)..(25): SEQ ID NO: 5732; WAN024GJA_at; Start 2019; Stop 2043
tttgaacgaagcaccgatggcgggt

SEQ ID NO: 247715 - DNA, 25 bp, Artificial
  probe
  misc_feature (1)..(25): SEQ ID NO: 5732; WAN024GJA_at; Start 164; Stop 188
ctccgaaagtagaagcaaaacctgc

SEQ ID NO: 247716 - DNA, 25 bp, Artificial
  probe
  misc_feature (1)..(25): SEQ ID NO: 5732; WAN024GJA_at; Start 1171; Stop 1195
gaaacaattgaactcctcatggtgg

SEQ ID NO: 247717 - DNA, 25 bp, Artificial
  probe
  misc_feature (1)..(25): SEQ ID NO: 5732; WAN024GJA_at; Start 579; Stop 603
tattgactttaaagcccgtgcagca

SEQ ID NO: 247718 - DNA, 25 bp, Artificial
  probe
  misc_feature (1)..(25): SEQ ID NO: 5732; WAN024GJA_at; Start 1282; Stop 1306
gatgaattggttgagcgtccaccag

SEQ ID NO: 247719 - DNA, 25 bp, Artificial
  probe
  misc_feature (1)..(25): SEQ ID NO: 5732; WAN024GJA_at; Start 1051; Stop 1075
tatacagatggtatgaccgttgcgg

SEQ ID NO: 247720 - DNA, 25 bp, Artificial
  probe
  misc_feature (1)..(25): SEQ ID NO: 5732; WAN024GJA_at; Start 2402; Stop 2426
cagaagctgacgatgtggaaatccg

SEQ ID NO: 247721 - DNA, 25 bp, Artificial
  probe
  misc_feature (1)..(25): SEQ ID NO: 5732; WAN024GJA_at; Start 1852; Stop 1876
gataaaggaaaaggtgcggtcgcaa

SEQ ID NO: 247722 - DNA, 25 bp, Artificial
  probe
  misc_feature (1)..(25): SEQ ID NO: 5732; WAN024GJA_at; Start 1826; Stop 1850
tcggtacggttatcgaagcgcgctt

SEQ ID NO: 247723 - DNA, 25 bp, Artificial
  probe
  misc_feature (1)..(25): SEQ ID NO: 5732; WAN024GJA_at; Start 1478; Stop 1502
cctttacatcaatgcgtgcgcgtgg

SEQ ID NO: 247724 - DNA, 25 bp, Artificial
  probe
  misc_feature (1)..(25): SEQ ID NO: 5732; WAN024GJA_at; Start 51; Stop 75
taaagaagttgtagcgcgtgcaaaa

SEQ ID NO: 247725 - DNA, 25 bp, Artificial
  probe
  misc_feature (1)..(25): SEQ ID NO: 5732; WAN024GJA_at; Start 694; Stop 718
gctaacaaacgcaaggaaccagagg

SEQ ID NO: 247726 - DNA, 25 bp, Artificial
  probe
  misc_feature (1)..(25): SEQ ID NO: 5732; WAN024GJA_at; Start 2084; Stop 2108
cagcaggtgaagagcgtgccaaacg

SEQ ID NO: 247727 - DNA, 25 bp, Artificial
  probe
  misc_feature (1)..(25): SEQ ID NO: 5732; WAN024GJA_at; Start 2057; Stop 2081
tttacgaggatgaaaaatctgcgcg

SEQ ID NO: 247728 - DNA, 25 bp, Artificial
  probe
  misc_feature (1)..(25): SEQ ID NO: 5732; WAN024GJA_at; Start 1131; Stop 1155
gatgggtgtcatggccacacaaaac

SEQ ID NO: 247729 - DNA, 25 bp, Artificial
  probe
  misc_feature (1)..(25): SEQ ID NO: 5732; WAN024GJA_at; Start 649; Stop 673
gaacgcttcaagcagtatcaggctg

SEQ ID NO: 247730 - DNA, 25 bp, Artificial
  probe
  misc_feature (1)..(25): SEQ ID NO: 5732; WAN024GJA_at; Start 626; Stop 650
cagagtacgctcgttcaagtgagga

SEQ ID NO: 247731 - DNA, 25 bp, Artificial
  probe
  misc_feature (1)..(25): SEQ ID NO: 5732; WAN024GJA_at; Start 274; Stop 298
gagccagttgctccgaaaacagaaa

SEQ ID NO: 247732 - DNA, 25 bp, Artificial
  probe
  misc_feature (1)..(25): SEQ ID NO: 4989; WAN024GJB_at; Start 336; Stop 360
tgaaggaaccatgccacaaactcgt

SEQ ID NO: 247733 - DNA, 25 bp, Artificial
  probe
  misc_feature (1)..(25): SEQ ID NO: 4989; WAN024GJB_at; Start 1473; Stop 1497
aattggtggacgtcaccgtggtgcc

SEQ ID NO: 247734 - DNA, 25 bp, Artificial
  probe
  misc_feature (1)..(25): SEQ ID NO: 4989; WAN024GJB_at; Start 671; Stop 695
tggactacaatgacttcgttggacg

SEQ ID NO: 247735 - DNA, 25 bp, Artificial
  probe
  misc_feature (1)..(25): SEQ ID NO: 4989; WAN024GJB_at; Start 490; Stop 514
gatgacgaccagcttgatttcccag

SEQ ID NO: 247736 - DNA, 25 bp, Artificial
  probe
  misc_feature (1)..(25): SEQ ID NO: 4989; WAN024GJB_at; Start 382; Stop 406
gaacaagaccttgtcccaatcgtgg

SEQ ID NO: 247737 - DNA, 25 bp, Artificial
  probe
  misc_feature (1)..(25): SEQ ID NO: 4989; WAN024GJB_at; Start 1018; Stop 1042
tctcgtaaggtggaagaacgcttgc

SEQ ID NO: 247738 - DNA, 25 bp, Artificial
  probe
  misc_feature (1)..(25): SEQ ID NO: 4989; WAN024GJB_at; Start 1098; Stop 1122
taaatggactgtttcaggacgtgga

SEQ ID NO: 247739 - DNA, 25 bp, Artificial
  probe
  misc_feature (1)..(25): SEQ ID NO: 4989; WAN024GJB_at; Start 510; Stop 534
cccagtggtttatgcttcagcgatc

SEQ ID NO: 247740 - DNA, 25 bp, Artificial
  probe
  misc_feature (1)..(25): SEQ ID NO: 4989; WAN024GJB_at; Start 1325; Stop 1349
tttcaactggtaatggtcaaactcg

SEQ ID NO: 247741 - DNA, 25 bp, Artificial
  probe
  misc_feature (1)..(25): SEQ ID NO: 4989; WAN024GJB_at; Start 57; Stop 81
gattatcgcccacgttgaccacggt

SEQ ID NO: 247742 - DNA, 25 bp, Artificial
  probe
  misc_feature (1)..(25): SEQ ID NO: 4989; WAN024GJB_at; Start 1250; Stop 1274
tcgacactccagaagaataccaagg

SEQ ID NO: 247743 - DNA, 25 bp, Artificial
  probe
  misc_feature (1)..(25): SEQ ID NO: 4989; WAN024GJB_at; Start 197; Stop 221
tccttgctaaaaatactgccgttgc

SEQ ID NO: 247744 - DNA, 25 bp, Artificial
  probe
  misc_feature (1)..(25): SEQ ID NO: 4989; WAN024GJB_at; Start 1367; Stop 1391
cagcgcgtggtttgattggatactc

SEQ ID NO: 247745 - DNA, 25 bp, Artificial
  probe
  misc_feature (1)..(25): SEQ ID NO: 4989; WAN024GJB_at; Start 1710; Stop 1734
gacgcctcgtatcttgacacttgaa

SEQ ID NO: 247746 - DNA, 25 bp, Artificial
  probe
  misc_feature (1)..(25): SEQ ID NO: 4989; WAN024GJB_at; Start 556; Stop 580
gatgatccagctgaccaagaagcga

SEQ ID NO: 247747 - DNA, 25 bp, Artificial
  probe
  misc_feature (1)..(25): SEQ ID NO: 4989; WAN024GJB_at; Start 1667; Stop 1691
ccaacgttcgttcagctactaagga

SEQ ID NO: 247748 - DNA, 25 bp, Artificial
  probe
  misc_feature (1)..(25): SEQ ID NO: 4989; WAN024GJB_at; Start 1563; Stop 1587
gatctttgtcaacccaggtactgag

SEQ ID NO: 247749 - DNA, 25 bp, Artificial
  probe
  misc_feature (1)..(25): SEQ ID NO: 4989; WAN024GJB_at; Start 1779; Stop 1803
gcctgagtctatccgtttgcgtaaa

SEQ ID NO: 247750 - DNA, 25 bp, Artificial
  probe
  misc_feature (1)..(25): SEQ ID NO: 4989; WAN024GJB_at; Start 825; Stop 849
tgaaatccaagaagccaaagcgggt

SEQ ID NO: 247751 - DNA, 25 bp, Artificial
  probe
  misc_feature (1)..(25): SEQ ID NO: 4989; WAN024GJB_at; Start 1504; Stop 1528
tctatcgatgctggtaaggctacaa

SEQ ID NO: 247752 - DNA, 25 bp, Artificial
  probe
  misc_feature (1)..(25): SEQ ID NO: 4989; WAN024GJB_at; Start 1630; Stop 1654
gacttgacagttaacatcacgaagg

SEQ ID NO: 247753 - DNA, 25 bp, Artificial
  probe
  misc_feature (1)..(25): SEQ ID NO: 4989; WAN024GJB_at; Start 1151; Stop 1175
caatgcgtcgtgagggctatgaact

SEQ ID NO: 247754 - DNA, 25 bp, Artificial
  probe
  misc_feature (1)..(25): SEQ ID NO: 4989; WAN024GJB_at; Start 145; Stop 169
gcagagcgtgctatggactcaaacg

SEQ ID NO: 247755 - DNA, 25 bp, Artificial
  probe
  misc_feature (1)..(25): SEQ ID NO: 4989; WAN024GJB_at; Start 1681; Stop 1705
gctactaaggaccaaacagctgtta

SEQ ID NO: 247756 - DNA, 25 bp, Artificial
  probe
  misc_feature (1)..(25): SEQ ID NO: 4989; WAN024GJB_at; Start 1267; Stop 1291
taccaagggtctgttatccaaagcc

SEQ ID NO: 247757 - DNA, 25 bp, Artificial
  probe
  misc_feature (1)..(25): SEQ ID NO: 4989; WAN024GJB_at; Start 466; Stop 490
gaacttttcatcgagcttggtgcag

SEQ ID NO: 247758 - DNA, 25 bp, Artificial
  probe
  misc_feature (1)..(25): SEQ ID NO: 4989; WAN024GJB_at; Start 638; Stop 662
cagatgagcctttgcagttccaagt

SEQ ID NO: 247759 - DNA, 25 bp, Artificial
  probe
  misc_feature (1)..(25): SEQ ID NO: 4989; WAN024GJB_at; Start 571; Stop 595
caagaagcgactatggcaccaatct

SEQ ID NO: 247760 - DNA, 25 bp, Artificial
  probe
  misc_feature (1)..(25): SEQ ID NO: 4989; WAN024GJB_at; Start 1806; Stop 1830
aatccttaacaaagcagagcgtgag

SEQ ID NO: 247761 - DNA, 25 bp, Artificial
  probe
  misc_feature (1)..(25): SEQ ID NO: 4989; WAN024GJB_at; Start 1352; Stop 1376
tggtcttccttgttccagcgcgtgg

SEQ ID NO: 247762 - DNA, 25 bp, Artificial
  probe
  misc_feature (1)..(25): SEQ ID NO: 4989; WAN024GJB_at; Start 1761; Stop 1785
tgagtacatggaagtaacgcctgag

SEQ ID NO: 247763 - DNA, 25 bp, Artificial
  probe
  misc_feature (1)..(25): SEQ ID NO: 4989; WAN024GJB_at; Start 906; Stop 930
gacagatgcagtagaagctcttcca

SEQ ID NO: 247764 - DNA, 25 bp, Artificial
  probe
  misc_feature (1)..(25): SEQ ID NO: 4989; WAN024GJB_at; Start 702; Stop 726
tatcggtcgtgtcttccgtggtaca

SEQ ID NO: 247765 - DNA, 25 bp, Artificial
  probe
  misc_feature (1)..(25): SEQ ID NO: 4989; WAN024GJB_at; Start 1539; Stop 1563
catgtctatcgaagaacgtggtacg

SEQ ID NO: 247766 - DNA, 25 bp, Artificial
  probe
  misc_feature (1)..(25): SEQ ID NO: 4831; WAN024GJC-3_at; Start 287; Stop 311
tgacaatcgacgttgagttgattca

SEQ ID NO: 247767 - DNA, 25 bp, Artificial
  probe
  misc_feature (1)..(25): SEQ ID NO: 4831; WAN024GJC-3_at; Start 123; Stop 147
cactaaattcaaaggtgaagtctac

SEQ ID NO: 247768 - DNA, 25 bp, Artificial
  probe
  misc_feature (1)..(25): SEQ ID NO: 4831; WAN024GJC-3_at; Start 51; Stop 75
tcttcgtggtgttcaacgtgatgaa

SEQ ID NO: 247769 - DNA, 25 bp, Artificial
  probe
  misc_feature (1)..(25): SEQ ID NO: 4831; WAN024GJC-3_at; Start 147; Stop 171
catccttactaaagaagaaggtgga

SEQ ID NO: 247770 - DNA, 25 bp, Artificial
  probe
  misc_feature (1)..(25): SEQ ID NO: 4831; WAN024GJC-3_at; Start 16; Stop 40
gacgaaggtcttgctggagataacg

SEQ ID NO: 247771 - DNA, 25 bp, Artificial
  probe
  misc_feature (1)..(25): SEQ ID NO: 4831; WAN024GJC-3_at; Start 136; Stop 160
ggtgaagtctacatccttactaaag

SEQ ID NO: 247772 - DNA, 25 bp, Artificial
  probe
  misc_feature (1)..(25): SEQ ID NO: 4831; WAN024GJC-3_at; Start 196; Stop 220
taccgtccacaattctacttccgta

SEQ ID NO: 247773 - DNA, 25 bp, Artificial
  probe
  misc_feature (1)..(25): SEQ ID NO: 4831; WAN024GJC-3_at; Start 88; Stop 112
caagttatcgctaaaccaggttcaa

SEQ ID NO: 247774 - DNA, 25 bp, Artificial
  probe
  misc_feature (1)..(25): SEQ ID NO: 4831; WAN024GJC-3_at; Start 10; Stop 34
caacttgacgaaggtcttgctggag

SEQ ID NO: 247775 - DNA, 25 bp, Artificial
  probe
  misc_feature (1)..(25): SEQ ID NO: 4831; WAN024GJC-3_at; Start 99; Stop 123
taaaccaggttcaatcaacccacac

SEQ ID NO: 247776 - DNA, 25 bp, Artificial
  probe
  misc_feature (1)..(25): SEQ ID NO: 4831; WAN024GJC-3_at; Start 374; Stop 398
caggtatggttacagaaatcgaagc

SEQ ID NO: 247777 - DNA, 25 bp, Artificial
  probe
  misc_feature (1)..(25): SEQ ID NO: 4831; WAN024GJC-3_at; Start 163; Stop 187
gaaggtggacgtcacactccattct

SEQ ID NO: 247778 - DNA, 25 bp, Artificial
  probe
  misc_feature (1)..(25): SEQ ID NO: 4831; WAN024GJC-3_at; Start 185; Stop 209
tcttcaacaactaccgtccacaatt

SEQ ID NO: 247779 - DNA, 25 bp, Artificial
  probe
  misc_feature (1)..(25): SEQ ID NO: 4831; WAN024GJC-3_at; Start 363; Stop 387
tactgttggttcaggtatggttaca

SEQ ID NO: 247780 - DNA, 25 bp, Artificial
  probe
  misc_feature (1)..(25): SEQ ID NO: 4831; WAN024GJC-3_at; Start 222; Stop 246
tactgacgttacaggttcaatcgaa

SEQ ID NO: 247781 - DNA, 25 bp, Artificial
  probe
  misc_feature (1)..(25): SEQ ID NO: 4831; WAN024GJC-3_at; Start 170; Stop 194
gacgtcacactccattcttcaacaa

SEQ ID NO: 247782 - DNA, 25 bp, Artificial
  probe
  misc_feature (1)..(25): SEQ ID NO: 4831; WAN024GJC-3_at; Start 344; Stop 368
ctatccgtgagggtggacgtactgt

SEQ ID NO: 247783 - DNA, 25 bp, Artificial
  probe
  misc_feature (1)..(25): SEQ ID NO: 4831; WAN024GJC-3_at; Start 24; Stop 48
tcttgctggagataacgtaggtgtc

SEQ ID NO: 247784 - DNA, 25 bp, Artificial
  probe
  misc_feature (1)..(25): SEQ ID NO: 4831; WAN024GJC-3_at; Start 74; Stop 98
aaatcgaacgtggacaagttatcgc

SEQ ID NO: 247785 - DNA, 25 bp, Artificial
  probe
  misc_feature (1)..(25): SEQ ID NO: 4831; WAN024GJC-3_at; Start 251; Stop 275
cagcaggtactgaaatggtaatgcc

SEQ ID NO: 247786 - DNA, 25 bp, Artificial
  probe
  misc_feature (1)..(25): SEQ ID NO: 4831; WAN024GJC-3_at; Start 34; Stop 58
gataacgtaggtgtccttcttcgtg

SEQ ID NO: 247787 - DNA, 25 bp, Artificial
  probe
  misc_feature (1)..(25): SEQ ID NO: 4831; WAN024GJC-3_at; Start 235; Stop 259
ggttcaatcgaacttccagcaggta

SEQ ID NO: 247788 - DNA, 25 bp, Artificial
  probe
  misc_feature (1)..(25): SEQ ID NO: 4831; WAN024GJC-3_at; Start 113; Stop 137
tcaacccacacactaaattcaaagg

SEQ ID NO: 247789 - DNA, 25 bp, Artificial
  probe
  misc_feature (1)..(25): SEQ ID NO: 4831; WAN024GJC-3_at; Start 357; Stop 381
tggacgtactgttggttcaggtatg

SEQ ID NO: 247790 - DNA, 25 bp, Artificial
  probe
  misc_feature (1)..(25): SEQ ID NO: 4831; WAN024GJC-3_at; Start 211; Stop 235
tacttccgtactactgacgttacag

SEQ ID NO: 247791 - DNA, 25 bp, Artificial
  probe
  misc_feature (1)..(25): SEQ ID NO: 4831; WAN024GJC-3_at; Start 4; Stop 28
cgtaaacaacttgacgaaggtcttg

SEQ ID NO: 247792 - DNA, 25 bp, Artificial
  probe
  misc_feature (1)..(25): SEQ ID NO: 4831; WAN024GJC-3_at; Start 156; Stop 180
taaagaagaaggtggacgtcacact

SEQ ID NO: 247793 - DNA, 25 bp, Artificial
  probe
  misc_feature (1)..(25): SEQ ID NO: 4831; WAN024GJC-3_at; Start 64; Stop 88
caacgtgatgaaatcgaacgtggac

SEQ ID NO: 247794 - DNA, 25 bp, Artificial
  probe
  misc_feature (1)..(25): SEQ ID NO: 4831; WAN024GJC-3_at; Start 79; Stop 103
gaacgtggacaagttatcgctaaac

SEQ ID NO: 247795 - DNA, 25 bp, Artificial
  probe
  misc_feature (1)..(25): SEQ ID NO: 4831; WAN024GJC-3_at; Start 266; Stop 290
tggtaatgcctggtgataacgtgac

SEQ ID NO: 247796 - DNA, 25 bp, Artificial
  probe
  misc_feature (1)..(25): SEQ ID NO: 4831; WAN024GJC-3_at; Start 244; Stop 268
gaacttccagcaggtactgaaatgg

SEQ ID NO: 247797 - DNA, 25 bp, Artificial
  probe
  misc_feature (1)..(25): SEQ ID NO: 4831; WAN024GJC-3_at; Start 381; Stop 405
ggttacagaaatcgaagcttaacta

SEQ ID NO: 247798 - DNA, 25 bp, Artificial
  probe
  misc_feature (1)..(25): SEQ ID NO: 4831; WAN024GJC-3_at; Start 273; Stop 297
gcctggtgataacgtgacaatcgac

SEQ ID NO: 247799 - DNA, 25 bp, Artificial
  probe
  misc_feature (1)..(25): SEQ ID NO: 4831; WAN024GJC-3_at; Start 43; Stop 67
ggtgtccttcttcgtggtgttcaac

SEQ ID NO: 247800 - DNA, 25 bp, Artificial
  probe
  misc_feature (1)..(25): SEQ ID NO: 5472; WAN024GJC-5_at; Start 166; Stop 190
tatgcgtctatcgatgctgctccag

SEQ ID NO: 247801 - DNA, 25 bp, Artificial
  probe
  misc_feature (1)..(25): SEQ ID NO: 5472; WAN024GJC-5_at; Start 263; Stop 287
acatcgacgctccaggacacgcgga

SEQ ID NO: 247802 - DNA, 25 bp, Artificial
  probe
  misc_feature (1)..(25): SEQ ID NO: 5472; WAN024GJC-5_at; Start 366; Stop 390
gccacaaactcgtgagcacatcctt

SEQ ID NO: 247803 - DNA, 25 bp, Artificial
  probe
  misc_feature (1)..(25): SEQ ID NO: 5472; WAN024GJC-5_at; Start 205; Stop 229
ggtatcactatcaacactgcgcacg

SEQ ID NO: 247804 - DNA, 25 bp, Artificial
  probe
  misc_feature (1)..(25): SEQ ID NO: 5472; WAN024GJC-5_at; Start 128; Stop 152
cacgtcgcttgccttcatcagttaa

SEQ ID NO: 247805 - DNA, 25 bp, Artificial
  probe
  misc_feature (1)..(25): SEQ ID NO: 5472; WAN024GJC-5_at; Start 55; Stop 79
gttaacattggtactatcggacacg

SEQ ID NO: 247806 - DNA, 25 bp, Artificial
  probe
  misc_feature (1)..(25): SEQ ID NO: 5472; WAN024GJC-5_at; Start 88; Stop 112
ggtaaaactaccctaactgcagcta

SEQ ID NO: 247807 - DNA, 25 bp, Artificial
  probe
  misc_feature (1)..(25): SEQ ID NO: 5472; WAN024GJC-5_at; Start 379; Stop 403
gagcacatccttctttcacgtcagg

SEQ ID NO: 247808 - DNA, 25 bp, Artificial
  probe
  misc_feature (1)..(25): SEQ ID NO: 5472; WAN024GJC-5_at; Start 114; Stop 138
cacaactgttttggcacgtcgcttg

SEQ ID NO: 247809 - DNA, 25 bp, Artificial
  probe
  misc_feature (1)..(25): SEQ ID NO: 5472; WAN024GJC-5_at; Start 237; Stop 261
cgaaactgaaaaacgtcactacgct

SEQ ID NO: 247810 - DNA, 25 bp, Artificial
  probe
  misc_feature (1)..(25): SEQ ID NO: 5472; WAN024GJC-5_at; Start 357; Stop 381
cggaccaatgccacaaactcgtgag

SEQ ID NO: 247811 - DNA, 25 bp, Artificial
  probe
  misc_feature (1)..(25): SEQ ID NO: 5472; WAN024GJC-5_at; Start 196; Stop 220
cgcgaacgcggtatcactatcaaca

SEQ ID NO: 247812 - DNA, 25 bp, Artificial
  probe
  misc_feature (1)..(25): SEQ ID NO: 5472; WAN024GJC-5_at; Start 336; Stop 360
ccttgtagtagcttcaactgacgga

SEQ ID NO: 247813 - DNA, 25 bp, Artificial
  probe
  misc_feature (1)..(25): SEQ ID NO: 5472; WAN024GJC-5_at; Start 344; Stop 368
tagcttcaactgacggaccaatgcc

SEQ ID NO: 247814 - DNA, 25 bp, Artificial
  probe
  misc_feature (1)..(25): SEQ ID NO: 5472; WAN024GJC-5_at; Start 315; Stop 339
tgctcaaatggacggagctatcctt

SEQ ID NO: 247815 - DNA, 25 bp, Artificial
  probe
  misc_feature (1)..(25): SEQ ID NO: 5472; WAN024GJC-5_at; Start 4; Stop 28
gaggcttttactcaaatggcaaaag

SEQ ID NO: 247816 - DNA, 25 bp, Artificial
  probe
  misc_feature (1)..(25): SEQ ID NO: 5472; WAN024GJC-5_at; Start 293; Stop 317
ttaaaaacatgatcactggtgctgc

SEQ ID NO: 247817 - DNA, 25 bp, Artificial
  probe
  misc_feature (1)..(25): SEQ ID NO: 5472; WAN024GJC-5_at; Start 31; Stop 55
aaatacgatcgtagtaaaccacacg

SEQ ID NO: 247818 - DNA, 25 bp, Artificial
  probe
  misc_feature (1)..(25): SEQ ID NO: 5472; WAN024GJC-5_at; Start 20; Stop 44
tggcaaaagaaaaatacgatcgtag

SEQ ID NO: 247819 - DNA, 25 bp, Artificial
  probe
  misc_feature (1)..(25): SEQ ID NO: 5472; WAN024GJC-5_at; Start 279; Stop 303
acacgcggactacgttaaaaacatg

SEQ ID NO: 247820 - DNA, 25 bp, Artificial
  probe
  misc_feature (1)..(25): SEQ ID NO: 5472; WAN024GJC-5_at; Start 323; Stop 347
tggacggagctatccttgtagtagc

SEQ ID NO: 247821 - DNA, 25 bp, Artificial
  probe
  misc_feature (1)..(25): SEQ ID NO: 5472; WAN024GJC-5_at; Start 184; Stop 208
gctccagaagaacgcgaacgcggta

SEQ ID NO: 247822 - DNA, 25 bp, Artificial
  probe
  misc_feature (1)..(25): SEQ ID NO: 5472; WAN024GJC-5_at; Start 306; Stop 330
cactggtgctgctcaaatggacgga

SEQ ID NO: 247823 - DNA, 25 bp, Artificial
  probe
  misc_feature (1)..(25): SEQ ID NO: 5472; WAN024GJC-5_at; Start 383; Stop 407
acatccttctttcacgtcaggttgg

SEQ ID NO: 247824 - DNA, 25 bp, Artificial
  probe
  misc_feature (1)..(25): SEQ ID NO: 5472; WAN024GJC-5_at; Start 157; Stop 181
cctaaagactatgcgtctatcgatg

SEQ ID NO: 247825 - DNA, 25 bp, Artificial
  probe
  misc_feature (1)..(25): SEQ ID NO: 5472; WAN024GJC-5_at; Start 40; Stop 64
cgtagtaaaccacacgttaacattg

SEQ ID NO: 247826 - DNA, 25 bp, Artificial
  probe
  misc_feature (1)..(25): SEQ ID NO: 5472; WAN024GJC-5_at; Start 147; Stop 171
agttaaccaacctaaagactatgcg

SEQ ID NO: 247827 - DNA, 25 bp, Artificial
  probe
  misc_feature (1)..(25): SEQ ID NO: 5472; WAN024GJC-5_at; Start 223; Stop 247
gcgcacgttgagtacgaaactgaaa

SEQ ID NO: 247828 - DNA, 25 bp, Artificial
  probe
  misc_feature (1)..(25): SEQ ID NO: 5472; WAN024GJC-5_at; Start 174; Stop 198
tatcgatgctgctccagaagaacgc

SEQ ID NO: 247829 - DNA, 25 bp, Artificial
  probe
  misc_feature (1)..(25): SEQ ID NO: 5472; WAN024GJC-5_at; Start 137; Stop 161
tgccttcatcagttaaccaacctaa

SEQ ID NO: 247830 - DNA, 25 bp, Artificial
  probe
  misc_feature (1)..(25): SEQ ID NO: 5472; WAN024GJC-5_at; Start 66; Stop 90
tactatcggacacgttgaccacggt

SEQ ID NO: 247831 - DNA, 25 bp, Artificial
  probe
  misc_feature (1)..(25): SEQ ID NO: 5472; WAN024GJC-5_at; Start 217; Stop 241
aacactgcgcacgttgagtacgaaa

SEQ ID NO: 247832 - DNA, 25 bp, Artificial
  probe
  misc_feature (1)..(25): SEQ ID NO: 5472; WAN024GJC-5_at; Start 103; Stop 127
actgcagctatcacaactgttttgg

SEQ ID NO: 247833 - DNA, 25 bp, Artificial
  probe
  misc_feature (1)..(25): SEQ ID NO: 5472; WAN024GJC-5_at; Start 246; Stop 270
aaaacgtcactacgctcacatcgac

SEQ ID NO: 247834 - DNA, 25 bp, Artificial
  probe
  misc_feature (1)..(25): SEQ ID NO: 4287; WAN024GJC-M_at; Start 174; Stop 198
tacgaagacatcgttatggaattga

SEQ ID NO: 247835 - DNA, 25 bp, Artificial
  probe
  misc_feature (1)..(25): SEQ ID NO: 4287; WAN024GJC-M_at; Start 231; Stop 255
gaacgtgacactgacaaaccattgc

SEQ ID NO: 247836 - DNA, 25 bp, Artificial
  probe
  misc_feature (1)..(25): SEQ ID NO: 4287; WAN024GJC-M_at; Start 91; Stop 115
tattgtcagaatacgacttcccagg

SEQ ID NO: 247837 - DNA, 25 bp, Artificial
  probe
  misc_feature (1)..(25): SEQ ID NO: 4287; WAN024GJC-M_at; Start 162; Stop 186
ggtgactctaaatacgaagacatcg

SEQ ID NO: 247838 - DNA, 25 bp, Artificial
  probe
  misc_feature (1)..(25): SEQ ID NO: 4287; WAN024GJC-M_at; Start 120; Stop 144
gatcttccagttatccaaggttcag

SEQ ID NO: 247839 - DNA, 25 bp, Artificial
  probe
  misc_feature (1)..(25): SEQ ID NO: 4287; WAN024GJC-M_at; Start 328; Stop 352
tcgttaaagtcaacgacgaaatcga

SEQ ID NO: 247840 - DNA, 25 bp, Artificial
  probe
  misc_feature (1)..(25): SEQ ID NO: 4287; WAN024GJC-M_at; Start 145; Stop 169
cacttaaagctcttgaaggtgactc

SEQ ID NO: 247841 - DNA, 25 bp, Artificial
  probe
  misc_feature (1)..(25): SEQ ID NO: 4287; WAN024GJC-M_at; Start 14; Stop 38
tatcgtcttcatgaacaaagttgac

SEQ ID NO: 247842 - DNA, 25 bp, Artificial
  probe
  misc_feature (1)..(25): SEQ ID NO: 4287; WAN024GJC-M_at; Start 96; Stop 120
tcagaatacgacttcccaggtgacg

SEQ ID NO: 247843 - DNA, 25 bp, Artificial
  probe
  misc_feature (1)..(25): SEQ ID NO: 4287; WAN024GJC-M_at; Start 114; Stop 138
ggtgacgatcttccagttatccaag

SEQ ID NO: 247844 - DNA, 25 bp, Artificial
  probe
  misc_feature (1)..(25): SEQ ID NO: 4287; WAN024GJC-M_at; Start 288; Stop 312
ggacgtggtacagttgcttcaggac

SEQ ID NO: 247845 - DNA, 25 bp, Artificial
  probe
  misc_feature (1)..(25): SEQ ID NO: 4287; WAN024GJC-M_at; Start 380; Stop 404
aaaagcagttgttactggtgttgaa

SEQ ID NO: 247846 - DNA, 25 bp, Artificial
  probe
  misc_feature (1)..(25): SEQ ID NO: 4287; WAN024GJC-M_at; Start 105; Stop 129
gacttcccaggtgacgatcttccag

SEQ ID NO: 247847 - DNA, 25 bp, Artificial
  probe
  misc_feature (1)..(25): SEQ ID NO: 4287; WAN024GJC-M_at; Start 192; Stop 216
gaattgatgaacacagttgatgagt

SEQ ID NO: 247848 - DNA, 25 bp, Artificial
  probe
  misc_feature (1)..(25): SEQ ID NO: 4287; WAN024GJC-M_at; Start 298; Stop 322
cagttgcttcaggacgtatcgaccg

SEQ ID NO: 247849 - DNA, 25 bp, Artificial
  probe
  misc_feature (1)..(25): SEQ ID NO: 4287; WAN024GJC-M_at; Start 67; Stop 91
tggttgaaatggaaatccgtgacct

SEQ ID NO: 247850 - DNA, 25 bp, Artificial
  probe
  misc_feature (1)..(25): SEQ ID NO: 4287; WAN024GJC-M_at; Start 267; Stop 291
gaggacgtattctcaatcactggac

SEQ ID NO: 247851 - DNA, 25 bp, Artificial
  probe
  misc_feature (1)..(25): SEQ ID NO: 4287; WAN024GJC-M_at; Start 126; Stop 150
ccagttatccaaggttcagcactta

SEQ ID NO: 247852 - DNA, 25 bp, Artificial
  probe
  misc_feature (1)..(25): SEQ ID NO: 4287; WAN024GJC-M_at; Start 29; Stop 53
caaagttgacttggttgacgacgaa

SEQ ID NO: 247853 - DNA, 25 bp, Artificial
  probe
  misc_feature (1)..(25): SEQ ID NO: 4287; WAN024GJC-M_at; Start 184; Stop 208
tcgttatggaattgatgaacacagt

SEQ ID NO: 247854 - DNA, 25 bp, Artificial
  probe
  misc_feature (1)..(25): SEQ ID NO: 4287; WAN024GJC-M_at; Start 245; Stop 269
caaaccattgcttcttccagtcgag

SEQ ID NO: 247855 - DNA, 25 bp, Artificial
  probe
  misc_feature (1)..(25): SEQ ID NO: 4287; WAN024GJC-M_at; Start 250; Stop 274
cattgcttcttccagtcgaggacgt

SEQ ID NO: 247856 - DNA, 25 bp, Artificial
  probe
  misc_feature (1)..(25): SEQ ID NO: 4287; WAN024GJC-M_at; Start 222; Stop 246
ccagaaccagaacgtgacactgaca

SEQ ID NO: 247857 - DNA, 25 bp, Artificial
  probe
  misc_feature (1)..(25): SEQ ID NO: 4287; WAN024GJC-M_at; Start 77; Stop 101
ggaaatccgtgacctattgtcagaa

SEQ ID NO: 247858 - DNA, 25 bp, Artificial
  probe
  misc_feature (1)..(25): SEQ ID NO: 4287; WAN024GJC-M_at; Start 306; Stop 330
tcaggacgtatcgaccgtggtatcg

SEQ ID NO: 247859 - DNA, 25 bp, Artificial
  probe
  misc_feature (1)..(25): SEQ ID NO: 4287; WAN024GJC-M_at; Start 274; Stop 298
tattctcaatcactggacgtggtac

SEQ ID NO: 247860 - DNA, 25 bp, Artificial
  probe
  misc_feature (1)..(25): SEQ ID NO: 4287; WAN024GJC-M_at; Start 257; Stop 281
tcttccagtcgaggacgtattctca

SEQ ID NO: 247861 - DNA, 25 bp, Artificial
  probe
  misc_feature (1)..(25): SEQ ID NO: 4287; WAN024GJC-M_at; Start 36; Stop 60
gacttggttgacgacgaagaattgc

SEQ ID NO: 247862 - DNA, 25 bp, Artificial
  probe
  misc_feature (1)..(25): SEQ ID NO: 4287; WAN024GJC-M_at; Start 280; Stop 304
caatcactggacgtggtacagttgc

SEQ ID NO: 247863 - DNA, 25 bp, Artificial
  probe
  misc_feature (1)..(25): SEQ ID NO: 4287; WAN024GJC-M_at; Start 133; Stop 157
tccaaggttcagcacttaaagctct

SEQ ID NO: 247864 - DNA, 25 bp, Artificial
  probe
  misc_feature (1)..(25): SEQ ID NO: 4287; WAN024GJC-M_at; Start 316; Stop 340
tcgaccgtggtatcgttaaagtcaa

SEQ ID NO: 247865 - DNA, 25 bp, Artificial
  probe
  misc_feature (1)..(25): SEQ ID NO: 4287; WAN024GJC-M_at; Start 41; Stop 65
ggttgacgacgaagaattgcttgaa

SEQ ID NO: 247866 - DNA, 25 bp, Artificial
  probe
  misc_feature (1)..(25): SEQ ID NO: 4287; WAN024GJC-M_at; Start 153; Stop 177
gctcttgaaggtgactctaaatacg

SEQ ID NO: 247867 - DNA, 25 bp, Artificial
  probe
  misc_feature (1)..(25): SEQ ID NO: 4287; WAN024GJC-M_at; Start 60; Stop 84
cttgaattggttgaaatggaaatcc

SEQ ID NO: 247868 - DNA, 25 bp, Artificial
  probe
  misc_feature (1)..(25): SEQ ID NO: 1672; WAN024GJD_at; Start 323; Stop 347
tccaagccaaagacataaaagtaat

SEQ ID NO: 247869 - DNA, 25 bp, Artificial
  probe
  misc_feature (1)..(25): SEQ ID NO: 1672; WAN024GJD_at; Start 294; Stop 318
caaagaaagcaaaaactatgaaata

SEQ ID NO: 247870 - DNA, 25 bp, Artificial
  probe
  misc_feature (1)..(25): SEQ ID NO: 1672; WAN024GJD_at; Start 267; Stop 291
tggagtaagtttctcagtaatgaaa

SEQ ID NO: 247871 - DNA, 25 bp, Artificial
  probe
  misc_feature (1)..(25): SEQ ID NO: 1672; WAN024GJD_at; Start 55; Stop 79
tcatacacaataaaggcaacaaaag

SEQ ID NO: 247872 - DNA, 25 bp, Artificial
  probe
  misc_feature (1)..(25): SEQ ID NO: 1672; WAN024GJD_at; Start 165; Stop 189
cgatgaaatgaaaataaaagacctc

SEQ ID NO: 247873 - DNA, 25 bp, Artificial
  probe
  misc_feature (1)..(25): SEQ ID NO: 1672; WAN024GJD_at; Start 341; Stop 365
aagtaatggaatatgcctttaagca

SEQ ID NO: 247874 - DNA, 25 bp, Artificial
  probe
  misc_feature (1)..(25): SEQ ID NO: 1672; WAN024GJD_at; Start 34; Stop 58
caagcagcacaaaccataatatcat

SEQ ID NO: 247875 - DNA, 25 bp, Artificial
  probe
  misc_feature (1)..(25): SEQ ID NO: 1672; WAN024GJD_at; Start 120; Stop 144
tgaaactttagaaaaagcaaatgga

SEQ ID NO: 247876 - DNA, 25 bp, Artificial
  probe
  misc_feature (1)..(25): SEQ ID NO: 1672; WAN024GJD_at; Start 280; Stop 304
tcagtaatgaaaaacaaagaaagca

SEQ ID NO: 247877 - DNA, 25 bp, Artificial
  probe
  misc_feature (1)..(25): SEQ ID NO: 1672; WAN024GJD_at; Start 430; Stop 454
gacctatccaaaaacaaagataaga

SEQ ID NO: 247878 - DNA, 25 bp, Artificial
  probe
  misc_feature (1)..(25): SEQ ID NO: 1672; WAN024GJD_at; Start 354; Stop 378
tgcctttaagcaagtcatagccaag

SEQ ID NO: 247879 - DNA, 25 bp, Artificial
  probe
  misc_feature (1)..(25): SEQ ID NO: 1672; WAN024GJD_at; Start 510; Stop 534
tatgaccagagaaatcctaactaat

SEQ ID NO: 247880 - DNA, 25 bp, Artificial
  probe
  misc_feature (1)..(25): SEQ ID NO: 1672; WAN024GJD_at; Start 195; Stop 219
gaaaggacaactagaaaatataagc

SEQ ID NO: 247881 - DNA, 25 bp, Artificial
  probe
  misc_feature (1)..(25): SEQ ID NO: 1672; WAN024GJD_at; Start 17; Stop 41
taagcaaggaagcaggtcaagcagc

SEQ ID NO: 247882 - DNA, 25 bp, Artificial
  probe
  misc_feature (1)..(25): SEQ ID NO: 1672; WAN024GJD_at; Start 5; Stop 29
taaacgaagaaataagcaaggaagc

SEQ ID NO: 247883 - DNA, 25 bp, Artificial
  probe
  misc_feature (1)..(25): SEQ ID NO: 1672; WAN024GJD_at; Start 310; Stop 334
tatgaaatattcttccaagccaaag

SEQ ID NO: 247884 - DNA, 25 bp, Artificial
  probe
  misc_feature (1)..(25): SEQ ID NO: 1672; WAN024GJD_at; Start 496; Stop 520
ccaaacaaaaaagatatgaccagag

SEQ ID NO: 247885 - DNA, 25 bp, Artificial
  probe
  misc_feature (1)..(25): SEQ ID NO: 1672; WAN024GJD_at; Start 65; Stop 89
taaaggcaacaaaagaatcaatcaa

SEQ ID NO: 247886 - DNA, 25 bp, Artificial
  probe
  misc_feature (1)..(25): SEQ ID NO: 1672; WAN024GJD_at; Start 334; Stop 358
gacataaaagtaatggaatatgcct

SEQ ID NO: 247887 - DNA, 25 bp, Artificial
  probe
  misc_feature (1)..(25): SEQ ID NO: 1672; WAN024GJD_at; Start 184; Stop 208
gacctctacaagaaaggacaactag

SEQ ID NO: 247888 - DNA, 25 bp, Artificial
  probe
  misc_feature (1)..(25): SEQ ID NO: 1672; WAN024GJD_at; Start 79; Stop 103
gaatcaatcaatttagaaaaagaaa

SEQ ID NO: 247889 - DNA, 25 bp, Artificial
  probe
  misc_feature (1)..(25): SEQ ID NO: 1672; WAN024GJD_at; Start 213; Stop 237
tataagcatagatcaaatcgacctc

SEQ ID NO: 247890 - DNA, 25 bp, Artificial
  probe
  misc_feature (1)..(25): SEQ ID NO: 1672; WAN024GJD_at; Start 24; Stop 48
ggaagcaggtcaagcagcacaaacc

SEQ ID NO: 247891 - DNA, 25 bp, Artificial
  probe
  misc_feature (1)..(25): SEQ ID NO: 1672; WAN024GJD_at; Start 154; Stop 178
agtcttatgggcgatgaaatgaaaa

SEQ ID NO: 247892 - DNA, 25 bp, Artificial
  probe
  misc_feature (1)..(25): SEQ ID NO: 1672; WAN024GJD_at; Start 28; Stop 52
gcaggtcaagcagcacaaaccataa

SEQ ID NO: 247893 - DNA, 25 bp, Artificial
  probe
  misc_feature (1)..(25): SEQ ID NO: 1672; WAN024GJD_at; Start 221; Stop 245
tagatcaaatcgacctcaaagactt

SEQ ID NO: 247894 - DNA, 25 bp, Artificial
  probe
  misc_feature (1)..(25): SEQ ID NO: 1672; WAN024GJD_at; Start 50; Stop 74
taatatcatacacaataaaggcaac

SEQ ID NO: 247895 - DNA, 25 bp, Artificial
  probe
  misc_feature (1)..(25): SEQ ID NO: 1672; WAN024GJD_at; Start 145; Stop 169
aacttaaaaagtcttatgggcgatg

SEQ ID NO: 247896 - DNA, 25 bp, Artificial
  probe
  misc_feature (1)..(25): SEQ ID NO: 1672; WAN024GJD_at; Start 416; Stop 440
taaagaaatacaaagacctatccaa

SEQ ID NO: 247897 - DNA, 25 bp, Artificial
  probe
  misc_feature (1)..(25): SEQ ID NO: 1672; WAN024GJD_at; Start 225; Stop 249
tcaaatcgacctcaaagacttaaaa

SEQ ID NO: 247898 - DNA, 25 bp, Artificial
  probe
  misc_feature (1)..(25): SEQ ID NO: 1672; WAN024GJD_at; Start 360; Stop 384
taagcaagtcatagccaaggaaaat

SEQ ID NO: 247899 - DNA, 25 bp, Artificial
  probe
  misc_feature (1)..(25): SEQ ID NO: 1672; WAN024GJD_at; Start 259; Stop 283
aacaaacttggagtaagtttctcag

SEQ ID NO: 247900 - DNA, 25 bp, Artificial
  probe
  misc_feature (1)..(25): SEQ ID NO: 1672; WAN024GJD_at; Start 179; Stop 203
taaaagacctctacaagaaaggaca

SEQ ID NO: 247901 - DNA, 25 bp, Artificial
  probe
  misc_feature (1)..(25): SEQ ID NO: 1672; WAN024GJD_at; Start 107; Stop 131
gaaaaaagatgaatgaaactttaga

SEQ ID NO: 247902 - DNA, 25 bp, Artificial
  probe
  misc_feature (1)..(25): SEQ ID NO: 6954; WAN024GJE_at; Start 129; Stop 153
gataatttctgtcaagtctgccgtg

SEQ ID NO: 247903 - DNA, 25 bp, Artificial
  probe
  misc_feature (1)..(25): SEQ ID NO: 6954; WAN024GJE_at; Start 276; Stop 300
tctgactaattctacgattgttgcg

SEQ ID NO: 247904 - DNA, 25 bp, Artificial
  probe
  misc_feature (1)..(25): SEQ ID NO: 6954; WAN024GJE_at; Start 282; Stop 306
taattctacgattgttgcgattgcg

SEQ ID NO: 247905 - DNA, 25 bp, Artificial
  probe
  misc_feature (1)..(25): SEQ ID NO: 6954; WAN024GJE_at; Start 233; Stop 257
ccacgagttcaaaaggagcttctat

SEQ ID NO: 247906 - DNA, 25 bp, Artificial
  probe
  misc_feature (1)..(25): SEQ ID NO: 6954; WAN024GJE_at; Start 145; Stop 169
tctgccgtgtcgttcaaggtaattc

SEQ ID NO: 247907 - DNA, 25 bp, Artificial
  probe
  misc_feature (1)..(25): SEQ ID NO: 6954; WAN024GJE_at; Start 204; Stop 228
gtcactgccaatctttccatactcg

SEQ ID NO: 247908 - DNA, 25 bp, Artificial
  probe
  misc_feature (1)..(25): SEQ ID NO: 6954; WAN024GJE_at; Start 99; Stop 123
atctggcttgatggtgtctaggaca

SEQ ID NO: 247909 - DNA, 25 bp, Artificial
  probe
  misc_feature (1)..(25): SEQ ID NO: 6954; WAN024GJE_at; Start 43; Stop 67
aaaggacgttccaagcctggactgg

SEQ ID NO: 247910 - DNA, 25 bp, Artificial
  probe
  misc_feature (1)..(25): SEQ ID NO: 6954; WAN024GJE_at; Start 58; Stop 82
cctggactggtaatttctaggaaat

SEQ ID NO: 247911 - DNA, 25 bp, Artificial
  probe
  misc_feature (1)..(25): SEQ ID NO: 6954; WAN024GJE_at; Start 262; Stop 286
ggttctacaacttctctgactaatt

SEQ ID NO: 247912 - DNA, 25 bp, Artificial
  probe
  misc_feature (1)..(25): SEQ ID NO: 6954; WAN024GJE_at; Start 136; Stop 160
tctgtcaagtctgccgtgtcgttca

SEQ ID NO: 247913 - DNA, 25 bp, Artificial
  probe
  misc_feature (1)..(25): SEQ ID NO: 6954; WAN024GJE_at; Start 173; Stop 197
cgggtttatctacaaaaatactgag

SEQ ID NO: 247914 - DNA, 25 bp, Artificial
  probe
  misc_feature (1)..(25): SEQ ID NO: 6954; WAN024GJE_at; Start 247; Stop 271
ggagcttctatgacaggttctacaa

SEQ ID NO: 247915 - DNA, 25 bp, Artificial
  probe
  misc_feature (1)..(25): SEQ ID NO: 6954; WAN024GJE_at; Start 288; Stop 312
tacgattgttgcgattgcgtccacc

SEQ ID NO: 247916 - DNA, 25 bp, Artificial
  probe
  misc_feature (1)..(25): SEQ ID NO: 6954; WAN024GJE_at; Start 141; Stop 165
caagtctgccgtgtcgttcaaggta

SEQ ID NO: 247917 - DNA, 25 bp, Artificial
  probe
  misc_feature (1)..(25): SEQ ID NO: 6954; WAN024GJE_at; Start 150; Stop 174
cgtgtcgttcaaggtaattccttcg

SEQ ID NO: 247918 - DNA, 25 bp, Artificial
  probe
  misc_feature (1)..(25): SEQ ID NO: 6954; WAN024GJE_at; Start 2; Stop 26
tgtattttccaaccgctccagcgac

SEQ ID NO: 247919 - DNA, 25 bp, Artificial
  probe
  misc_feature (1)..(25): SEQ ID NO: 6954; WAN024GJE_at; Start 20; Stop 44
cagcgacggcatccttggttttcaa

SEQ ID NO: 247920 - DNA, 25 bp, Artificial
  probe
  misc_feature (1)..(25): SEQ ID NO: 6954; WAN024GJE_at; Start 73; Stop 97
tctaggaaatattgttctgggaagg

SEQ ID NO: 247921 - DNA, 25 bp, Artificial
  probe
  misc_feature (1)..(25): SEQ ID NO: 6954; WAN024GJE_at; Start 39; Stop 63
tttcaaaggacgttccaagcctgga

SEQ ID NO: 247922 - DNA, 25 bp, Artificial
  probe
  misc_feature (1)..(25): SEQ ID NO: 6954; WAN024GJE_at; Start 213; Stop 237
aatctttccatactcgatatccacg

SEQ ID NO: 247923 - DNA, 25 bp, Artificial
  probe
  misc_feature (1)..(25): SEQ ID NO: 6954; WAN024GJE_at; Start 115; Stop 139
tctaggacaggactgataatttctg

SEQ ID NO: 247924 - DNA, 25 bp, Artificial
  probe
  misc_feature (1)..(25): SEQ ID NO: 6954; WAN024GJE_at; Start 188; Stop 212
aaatactgagaatcatgtcactgcc

SEQ ID NO: 247925 - DNA, 25 bp, Artificial
  probe
  misc_feature (1)..(25): SEQ ID NO: 6954; WAN024GJE_at; Start 255; Stop 279
tatgacaggttctacaacttctctg

SEQ ID NO: 247926 - DNA, 25 bp, Artificial
  probe
  misc_feature (1)..(25): SEQ ID NO: 6954; WAN024GJE_at; Start 228; Stop 252
gatatccacgagttcaaaaggagct

SEQ ID NO: 247927 - DNA, 25 bp, Artificial
  probe
  misc_feature (1)..(25): SEQ ID NO: 6954; WAN024GJE_at; Start 195; Stop 219
gagaatcatgtcactgccaatcttt

SEQ ID NO: 247928 - DNA, 25 bp, Artificial
  probe
  misc_feature (1)..(25): SEQ ID NO: 6954; WAN024GJE_at; Start 291; Stop 315
gattgttgcgattgcgtccacctcc

SEQ ID NO: 247929 - DNA, 25 bp, Artificial
  probe
  misc_feature (1)..(25): SEQ ID NO: 6954; WAN024GJE_at; Start 54; Stop 78
caagcctggactggtaatttctagg

SEQ ID NO: 247930 - DNA, 25 bp, Artificial
  probe
  misc_feature (1)..(25): SEQ ID NO: 6954; WAN024GJE_at; Start 24; Stop 48
gacggcatccttggttttcaaagga

SEQ ID NO: 247931 - DNA, 25 bp, Artificial
  probe
  misc_feature (1)..(25): SEQ ID NO: 6954; WAN024GJE_at; Start 242; Stop 266
caaaaggagcttctatgacaggttc

SEQ ID NO: 247932 - DNA, 25 bp, Artificial
  probe
  misc_feature (1)..(25): SEQ ID NO: 6954; WAN024GJE_at; Start 297; Stop 321
tgcgattgcgtccacctcctcataa

SEQ ID NO: 247933 - DNA, 25 bp, Artificial
  probe
  misc_feature (1)..(25): SEQ ID NO: 6954; WAN024GJE_at; Start 107; Stop 131
tgatggtgtctaggacaggactgat

SEQ ID NO: 247934 - DNA, 25 bp, Artificial
  probe
  misc_feature (1)..(25): SEQ ID NO: 6954; WAN024GJE_at; Start 94; Stop 118
aagggatctggcttgatggtgtcta

SEQ ID NO: 247935 - DNA, 25 bp, Artificial
  probe
  misc_feature (1)..(25): SEQ ID NO: 6954; WAN024GJE_at; Start 82; Stop 106
tattgttctgggaagggatctggct

SEQ ID NO: 247936 - DNA, 25 bp, Artificial
  probe
  misc_feature (1)..(25): SEQ ID NO: 3977; WAN024GJF_at; Start 65; Stop 89
aattagtcagagaagttgtagaacc

SEQ ID NO: 247937 - DNA, 25 bp, Artificial
  probe
  misc_feature (1)..(25): SEQ ID NO: 3977; WAN024GJF_at; Start 52; Stop 76
gcaacaatcgtagaattagtcagag

SEQ ID NO: 247938 - DNA, 25 bp, Artificial
  probe
  misc_feature (1)..(25): SEQ ID NO: 3977; WAN024GJF_at; Start 254; Stop 278
ccttcccagaacaatatttcctaga

SEQ ID NO: 247939 - DNA, 25 bp, Artificial
  probe
  misc_feature (1)..(25): SEQ ID NO: 3977; WAN024GJF_at; Start 39; Stop 63
ggtggacgcaatcgcaacaatcgta

SEQ ID NO: 247940 - DNA, 25 bp, Artificial
  probe
  misc_feature (1)..(25): SEQ ID NO: 3977; WAN024GJF_at; Start 335; Stop 359
cggttggaaaatacatccatgtcgg

SEQ ID NO: 247941 - DNA, 25 bp, Artificial
  probe
  misc_feature (1)..(25): SEQ ID NO: 3977; WAN024GJF_at; Start 29; Stop 53
cttatgaggaggtggacgcaatcgc

SEQ ID NO: 247942 - DNA, 25 bp, Artificial
  probe
  misc_feature (1)..(25): SEQ ID NO: 3977; WAN024GJF_at; Start 24; Stop 48
tcttgcttatgaggaggtggacgca

SEQ ID NO: 247943 - DNA, 25 bp, Artificial
  probe
  misc_feature (1)..(25): SEQ ID NO: 3977; WAN024GJF_at; Start 310; Stop 334
aaaaccaaggatgccgtcgctggag

SEQ ID NO: 247944 - DNA, 25 bp, Artificial
  probe
  misc_feature (1)..(25): SEQ ID NO: 3977; WAN024GJF_at; Start 233; Stop 257
tagacaccatcaagccagatccctt

SEQ ID NO: 247945 - DNA, 25 bp, Artificial
  probe
  misc_feature (1)..(25): SEQ ID NO: 3977; WAN024GJF_at; Start 268; Stop 292
tatttcctagaaattaccagtccag

SEQ ID NO: 247946 - DNA, 25 bp, Artificial
  probe
  misc_feature (1)..(25): SEQ ID NO: 3977; WAN024GJF_at; Start 154; Stop 178
ctcagtatttttgtagataaacccg

SEQ ID NO: 247947 - DNA, 25 bp, Artificial
  probe
  misc_feature (1)..(25): SEQ ID NO: 3977; WAN024GJF_at; Start 364; Stop 388
taccaagccatcgataagcaaaagg

SEQ ID NO: 247948 - DNA, 25 bp, Artificial
  probe
  misc_feature (1)..(25): SEQ ID NO: 3977; WAN024GJF_at; Start 423; Stop 447
cgagttgactatggaatatatggac

SEQ ID NO: 247949 - DNA, 25 bp, Artificial
  probe
  misc_feature (1)..(25): SEQ ID NO: 3977; WAN024GJF_at; Start 214; Stop 238
gaaattatcagtcctgtcctagaca

SEQ ID NO: 247950 - DNA, 25 bp, Artificial
  probe
  misc_feature (1)..(25): SEQ ID NO: 3977; WAN024GJF_at; Start 490; Stop 514
tcaaaagcacgtttagcagttaaat

SEQ ID NO: 247951 - DNA, 25 bp, Artificial
  probe
  misc_feature (1)..(25): SEQ ID NO: 3977; WAN024GJF_at; Start 85; Stop 109
gaacctgtcatagaagctccttttg

SEQ ID NO: 247952 - DNA, 25 bp, Artificial
  probe
  misc_feature (1)..(25): SEQ ID NO: 3977; WAN024GJF_at; Start 228; Stop 252
tgtcctagacaccatcaagccagat

SEQ ID NO: 247953 - DNA, 25 bp, Artificial
  probe
  misc_feature (1)..(25): SEQ ID NO: 3977; WAN024GJF_at; Start 123; Stop 147
cgagtatggaaagattggcagtgac

SEQ ID NO: 247954 - DNA, 25 bp, Artificial
  probe
  misc_feature (1)..(25): SEQ ID NO: 3977; WAN024GJF_at; Start 200; Stop 224
cggcagacttgacagaaattatcag

SEQ ID NO: 247955 - DNA, 25 bp, Artificial
  probe
  misc_feature (1)..(25): SEQ ID NO: 3977; WAN024GJF_at; Start 80; Stop 104
ttgtagaacctgtcatagaagctcc

SEQ ID NO: 247956 - DNA, 25 bp, Artificial
  probe
  misc_feature (1)..(25): SEQ ID NO: 3977; WAN024GJF_at; Start 97; Stop 121
gaagctccttttgaactcgtggata

SEQ ID NO: 247957 - DNA, 25 bp, Artificial
  probe
  misc_feature (1)..(25): SEQ ID NO: 3977; WAN024GJF_at; Start 440; Stop 464
atatggacaagacgcgtaagaaaac

SEQ ID NO: 247958 - DNA, 25 bp, Artificial
  probe
  misc_feature (1)..(25): SEQ ID NO: 3977; WAN024GJF_at; Start 370; Stop 394
gccatcgataagcaaaaggtctttg

SEQ ID NO: 247959 - DNA, 25 bp, Artificial
  probe
  misc_feature (1)..(25): SEQ ID NO: 3977; WAN024GJF_at; Start 403; Stop 427
ttgttggccttcgaagaggacgagt

SEQ ID NO: 247960 - DNA, 25 bp, Artificial
  probe
  misc_feature (1)..(25): SEQ ID NO: 3977; WAN024GJF_at; Start 325; Stop 349
gtcgctggagcggttggaaaataca

SEQ ID NO: 247961 - DNA, 25 bp, Artificial
  probe
  misc_feature (1)..(25): SEQ ID NO: 3977; WAN024GJF_at; Start 11; Stop 35
gaatatcttcgcctcttgcttatga

SEQ ID NO: 247962 - DNA, 25 bp, Artificial
  probe
  misc_feature (1)..(25): SEQ ID NO: 3977; WAN024GJF_at; Start 410; Stop 434
ccttcgaagaggacgagttgactat

SEQ ID NO: 247963 - DNA, 25 bp, Artificial
  probe
  misc_feature (1)..(25): SEQ ID NO: 3977; WAN024GJF_at; Start 109; Stop 133
gaactcgtggatatcgagtatggaa

SEQ ID NO: 247964 - DNA, 25 bp, Artificial
  probe
  misc_feature (1)..(25): SEQ ID NO: 3977; WAN024GJF_at; Start 476; Stop 500
catacagtttagtatcaaaagcacg

SEQ ID NO: 247965 - DNA, 25 bp, Artificial
  probe
  misc_feature (1)..(25): SEQ ID NO: 3977; WAN024GJF_at; Start 135; Stop 159
gattggcagtgacatgattctcagt

SEQ ID NO: 247966 - DNA, 25 bp, Artificial
  probe
  misc_feature (1)..(25): SEQ ID NO: 3977; WAN024GJF_at; Start 306; Stop 330
tttgaaaaccaaggatgccgtcgct

SEQ ID NO: 247967 - DNA, 25 bp, Artificial
  probe
  misc_feature (1)..(25): SEQ ID NO: 3977; WAN024GJF_at; Start 432; Stop 456
tatggaatatatggacaagacgcgt

SEQ ID NO: 247968 - DNA, 25 bp, Artificial
  probe
  misc_feature (1)..(25): SEQ ID NO: 3977; WAN024GJF_at; Start 244; Stop 268
aagccagatcccttcccagaacaat

SEQ ID NO: 247969 - DNA, 25 bp, Artificial
  probe
  misc_feature (1)..(25): SEQ ID NO: 3977; WAN024GJF_at; Start 376; Stop 400
gataagcaaaaggtctttgaaggaa

SEQ ID NO: 247970 - DNA, 25 bp, Artificial
  probe
  misc_feature (1)..(25): SEQ ID NO: 7723; WAN024GJG_at; Start 52; Stop 76
ctttatggggttgatagctgggttt

SEQ ID NO: 247971 - DNA, 25 bp, Artificial
  probe
  misc_feature (1)..(25): SEQ ID NO: 7723; WAN024GJG_at; Start 8; Stop 32
aaaatcagaggaaggaagcttgctt

SEQ ID NO: 247972 - DNA, 25 bp, Artificial
  probe
  misc_feature (1)..(25): SEQ ID NO: 7723; WAN024GJG_at; Start 11; Stop 35
atcagaggaaggaagcttgcttagt

SEQ ID NO: 247973 - DNA, 25 bp, Artificial
  probe
  misc_feature (1)..(25): SEQ ID NO: 7723; WAN024GJG_at; Start 19; Stop 43
aaggaagcttgcttagtagaccatt

SEQ ID NO: 247974 - DNA, 25 bp, Artificial
  probe
  misc_feature (1)..(25): SEQ ID NO: 7723; WAN024GJG_at; Start 24; Stop 48
agcttgcttagtagaccattctttt

SEQ ID NO: 247975 - DNA, 25 bp, Artificial
  probe
  misc_feature (1)..(25): SEQ ID NO: 7723; WAN024GJG_at; Start 4; Stop 28
tttgaaaatcagaggaaggaagctt

SEQ ID NO: 247976 - DNA, 25 bp, Artificial
  probe
  misc_feature (1)..(25): SEQ ID NO: 7723; WAN024GJG_at; Start 3; Stop 27
gtttgaaaatcagaggaaggaagct

SEQ ID NO: 247977 - DNA, 25 bp, Artificial
  probe
  misc_feature (1)..(25): SEQ ID NO: 7723; WAN024GJG_at; Start 6; Stop 30
tgaaaatcagaggaaggaagcttgc

SEQ ID NO: 247978 - DNA, 25 bp, Artificial
  probe
  misc_feature (1)..(25): SEQ ID NO: 7723; WAN024GJG_at; Start 23; Stop 47
aagcttgcttagtagaccattcttt

SEQ ID NO: 247979 - DNA, 25 bp, Artificial
  probe
  misc_feature (1)..(25): SEQ ID NO: 7723; WAN024GJG_at; Start 15; Stop 39
gaggaaggaagcttgcttagtagac

SEQ ID NO: 247980 - DNA, 25 bp, Artificial
  probe
  misc_feature (1)..(25): SEQ ID NO: 7723; WAN024GJG_at; Start 35; Stop 59
tagaccattctttttatctttatgg

SEQ ID NO: 247981 - DNA, 25 bp, Artificial
  probe
  misc_feature (1)..(25): SEQ ID NO: 7723; WAN024GJG_at; Start 7; Stop 31
gaaaatcagaggaaggaagcttgct

SEQ ID NO: 247982 - DNA, 25 bp, Artificial
  probe
  misc_feature (1)..(25): SEQ ID NO: 7723; WAN024GJG_at; Start 36; Stop 60
agaccattctttttatctttatggg

SEQ ID NO: 247983 - DNA, 25 bp, Artificial
  probe
  misc_feature (1)..(25): SEQ ID NO: 7723; WAN024GJG_at; Start 20; Stop 44
aggaagcttgcttagtagaccattc

SEQ ID NO: 247984 - DNA, 25 bp, Artificial
  probe
  misc_feature (1)..(25): SEQ ID NO: 7723; WAN024GJG_at; Start 17; Stop 41
ggaaggaagcttgcttagtagacca

SEQ ID NO: 247985 - DNA, 25 bp, Artificial
  probe
  misc_feature (1)..(25): SEQ ID NO: 7723; WAN024GJG_at; Start 12; Stop 36
tcagaggaaggaagcttgcttagta

SEQ ID NO: 247986 - DNA, 25 bp, Artificial
  probe
  misc_feature (1)..(25): SEQ ID NO: 7723; WAN024GJG_at; Start 2; Stop 26
tgtttgaaaatcagaggaaggaagc

SEQ ID NO: 247987 - DNA, 25 bp, Artificial
  probe
  misc_feature (1)..(25): SEQ ID NO: 7723; WAN024GJG_at; Start 18; Stop 42
gaaggaagcttgcttagtagaccat

SEQ ID NO: 247988 - DNA, 25 bp, Artificial
  probe
  misc_feature (1)..(25): SEQ ID NO: 7723; WAN024GJG_at; Start 21; Stop 45
ggaagcttgcttagtagaccattct

SEQ ID NO: 247989 - DNA, 25 bp, Artificial
  probe
  misc_feature (1)..(25): SEQ ID NO: 7723; WAN024GJG_at; Start 13; Stop 37
cagaggaaggaagcttgcttagtag

SEQ ID NO: 247990 - DNA, 25 bp, Artificial
  probe
  misc_feature (1)..(25): SEQ ID NO: 7723; WAN024GJG_at; Start 28; Stop 52
tgcttagtagaccattctttttatc

SEQ ID NO: 247991 - DNA, 25 bp, Artificial
  probe
  misc_feature (1)..(25): SEQ ID NO: 7723; WAN024GJG_at; Start 10; Stop 34
aatcagaggaaggaagcttgcttag

SEQ ID NO: 247992 - DNA, 25 bp, Artificial
  probe
  misc_feature (1)..(25): SEQ ID NO: 7723; WAN024GJG_at; Start 29; Stop 53
gcttagtagaccattctttttatct

SEQ ID NO: 247993 - DNA, 25 bp, Artificial
  probe
  misc_feature (1)..(25): SEQ ID NO: 7723; WAN024GJG_at; Start 22; Stop 46
gaagcttgcttagtagaccattctt

SEQ ID NO: 247994 - DNA, 25 bp, Artificial
  probe
  misc_feature (1)..(25): SEQ ID NO: 7723; WAN024GJG_at; Start 5; Stop 29
ttgaaaatcagaggaaggaagcttg

SEQ ID NO: 247995 - DNA, 25 bp, Artificial
  probe
  misc_feature (1)..(25): SEQ ID NO: 7723; WAN024GJG_at; Start 27; Stop 51
ttgcttagtagaccattctttttat

SEQ ID NO: 247996 - DNA, 25 bp, Artificial
  probe
  misc_feature (1)..(25): SEQ ID NO: 7723; WAN024GJG_at; Start 26; Stop 50
cttgcttagtagaccattcttttta

SEQ ID NO: 247997 - DNA, 25 bp, Artificial
  probe
  misc_feature (1)..(25): SEQ ID NO: 7723; WAN024GJG_at; Start 30; Stop 54
cttagtagaccattctttttatctt

SEQ ID NO: 247998 - DNA, 25 bp, Artificial
  probe
  misc_feature (1)..(25): SEQ ID NO: 7723; WAN024GJG_at; Start 16; Stop 40
aggaaggaagcttgcttagtagacc

SEQ ID NO: 247999 - DNA, 25 bp, Artificial
  probe
  misc_feature (1)..(25): SEQ ID NO: 7723; WAN024GJG_at; Start 32; Stop 56
tagtagaccattctttttatcttta

SEQ ID NO: 248000 - DNA, 25 bp, Artificial
  probe
  misc_feature (1)..(25): SEQ ID NO: 7723; WAN024GJG_at; Start 49; Stop 73
tatctttatggggttgatagctggg

SEQ ID NO: 248001 - DNA, 25 bp, Artificial
  probe
  misc_feature (1)..(25): SEQ ID NO: 7723; WAN024GJG_at; Start 9; Stop 33
aaatcagaggaaggaagcttgctta

SEQ ID NO: 248002 - DNA, 25 bp, Artificial
  probe
  misc_feature (1)..(25): SEQ ID NO: 7723; WAN024GJG_at; Start 34; Stop 58
gtagaccattctttttatctttatg

SEQ ID NO: 248003 - DNA, 25 bp, Artificial
  probe
  misc_feature (1)..(25): SEQ ID NO: 7723; WAN024GJG_at; Start 25; Stop 49
gcttgcttagtagaccattcttttt

SEQ ID NO: 248004 - DNA, 25 bp, Artificial
  probe
  misc_feature (1)..(25): SEQ ID NO: 7439; WAN024GJH_at; Start 38; Stop 62
cactaactccaactaggctaacctt

SEQ ID NO: 248005 - DNA, 25 bp, Artificial
  probe
  misc_feature (1)..(25): SEQ ID NO: 7439; WAN024GJH_at; Start 60; Stop 84
cttatctccttgtttaatcgtgaga

SEQ ID NO: 248006 - DNA, 25 bp, Artificial
  probe
  misc_feature (1)..(25): SEQ ID NO: 7439; WAN024GJH_at; Start 59; Stop 83
ccttatctccttgtttaatcgtgag

SEQ ID NO: 248007 - DNA, 25 bp, Artificial
  probe
  misc_feature (1)..(25): SEQ ID NO: 7439; WAN024GJH_at; Start 94; Stop 118
gttaaggtatctcatccaaaaccat

SEQ ID NO: 248008 - DNA, 25 bp, Artificial
  probe
  misc_feature (1)..(25): SEQ ID NO: 7439; WAN024GJH_at; Start 88; Stop 112
atatctgttaaggtatctcatccaa

SEQ ID NO: 248009 - DNA, 25 bp, Artificial
  probe
  misc_feature (1)..(25): SEQ ID NO: 7439; WAN024GJH_at; Start 34; Stop 58
gaaccactaactccaactaggctaa

SEQ ID NO: 248010 - DNA, 25 bp, Artificial
  probe
  misc_feature (1)..(25): SEQ ID NO: 7439; WAN024GJH_at; Start 83; Stop 107
gattaatatctgttaaggtatctca

SEQ ID NO: 248011 - DNA, 25 bp, Artificial
  probe
  misc_feature (1)..(25): SEQ ID NO: 7439; WAN024GJH_at; Start 51; Stop 75
taggctaaccttatctccttgttta

SEQ ID NO: 248012 - DNA, 25 bp, Artificial
  probe
  misc_feature (1)..(25): SEQ ID NO: 7439; WAN024GJH_at; Start 92; Stop 116
ctgttaaggtatctcatccaaaacc

SEQ ID NO: 248013 - DNA, 25 bp, Artificial
  probe
  misc_feature (1)..(25): SEQ ID NO: 7439; WAN024GJH_at; Start 3; Stop 27
gacaatcattttggctaaagttgtt

SEQ ID NO: 248014 - DNA, 25 bp, Artificial
  probe
  misc_feature (1)..(25): SEQ ID NO: 7439; WAN024GJH_at; Start 99; Stop 123
ggtatctcatccaaaaccatactta

SEQ ID NO: 248015 - DNA, 25 bp, Artificial
  probe
  misc_feature (1)..(25): SEQ ID NO: 7439; WAN024GJH_at; Start 41; Stop 65
taactccaactaggctaaccttatc

SEQ ID NO: 248016 - DNA, 25 bp, Artificial
  probe
  misc_feature (1)..(25): SEQ ID NO: 7439; WAN024GJH_at; Start 43; Stop 67
actccaactaggctaaccttatctc

SEQ ID NO: 248017 - DNA, 25 bp, Artificial
  probe
  misc_feature (1)..(25): SEQ ID NO: 7439; WAN024GJH_at; Start 93; Stop 117
tgttaaggtatctcatccaaaacca

SEQ ID NO: 248018 - DNA, 25 bp, Artificial
  probe
  misc_feature (1)..(25): SEQ ID NO: 7439; WAN024GJH_at; Start 1; Stop 25
ttgacaatcattttggctaaagttg

SEQ ID NO: 248019 - DNA, 25 bp, Artificial
  probe
  misc_feature (1)..(25): SEQ ID NO: 7439; WAN024GJH_at; Start 45; Stop 69
tccaactaggctaaccttatctcct

SEQ ID NO: 248020 - DNA, 25 bp, Artificial
  probe
  misc_feature (1)..(25): SEQ ID NO: 7439; WAN024GJH_at; Start 47; Stop 71
caactaggctaaccttatctccttg

SEQ ID NO: 248021 - DNA, 25 bp, Artificial
  probe
  misc_feature (1)..(25): SEQ ID NO: 7439; WAN024GJH_at; Start 30; Stop 54
accagaaccactaactccaactagg

SEQ ID NO: 248022 - DNA, 25 bp, Artificial
  probe
  misc_feature (1)..(25): SEQ ID NO: 7439; WAN024GJH_at; Start 24; Stop 48
tgttttaccagaaccactaactcca

SEQ ID NO: 248023 - DNA, 25 bp, Artificial
  probe
  misc_feature (1)..(25): SEQ ID NO: 7439; WAN024GJH_at; Start 57; Stop 81
aaccttatctccttgtttaatcgtg

SEQ ID NO: 248024 - DNA, 25 bp, Artificial
  probe
  misc_feature (1)..(25): SEQ ID NO: 7439; WAN024GJH_at; Start 54; Stop 78
gctaaccttatctccttgtttaatc

SEQ ID NO: 248025 - DNA, 25 bp, Artificial
  probe
  misc_feature (1)..(25): SEQ ID NO: 7439; WAN024GJH_at; Start 32; Stop 56
cagaaccactaactccaactaggct

SEQ ID NO: 248026 - DNA, 25 bp, Artificial
  probe
  misc_feature (1)..(25): SEQ ID NO: 7439; WAN024GJH_at; Start 29; Stop 53
taccagaaccactaactccaactag

SEQ ID NO: 248027 - DNA, 25 bp, Artificial
  probe
  misc_feature (1)..(25): SEQ ID NO: 7439; WAN024GJH_at; Start 78; Stop 102
cgtgagattaatatctgttaaggta

SEQ ID NO: 248028 - DNA, 25 bp, Artificial
  probe
  misc_feature (1)..(25): SEQ ID NO: 7439; WAN024GJH_at; Start 87; Stop 111
aatatctgttaaggtatctcatcca

SEQ ID NO: 248029 - DNA, 25 bp, Artificial
  probe
  misc_feature (1)..(25): SEQ ID NO: 7439; WAN024GJH_at; Start 64; Stop 88
tctccttgtttaatcgtgagattaa

SEQ ID NO: 248030 - DNA, 25 bp, Artificial
  probe
  misc_feature (1)..(25): SEQ ID NO: 7439; WAN024GJH_at; Start 86; Stop 110
taatatctgttaaggtatctcatcc

SEQ ID NO: 248031 - DNA, 25 bp, Artificial
  probe
  misc_feature (1)..(25): SEQ ID NO: 7439; WAN024GJH_at; Start 48; Stop 72
aactaggctaaccttatctccttgt

SEQ ID NO: 248032 - DNA, 25 bp, Artificial
  probe
  misc_feature (1)..(25): SEQ ID NO: 7439; WAN024GJH_at; Start 5; Stop 29
caatcattttggctaaagttgtttt

SEQ ID NO: 248033 - DNA, 25 bp, Artificial
  probe
  misc_feature (1)..(25): SEQ ID NO: 7439; WAN024GJH_at; Start 76; Stop 100
atcgtgagattaatatctgttaagg

SEQ ID NO: 248034 - DNA, 25 bp, Artificial
  probe
  misc_feature (1)..(25): SEQ ID NO: 7439; WAN024GJH_at; Start 89; Stop 113
tatctgttaaggtatctcatccaaa

SEQ ID NO: 248035 - DNA, 25 bp, Artificial
  probe
  misc_feature (1)..(25): SEQ ID NO: 7439; WAN024GJH_at; Start 95; Stop 119
ttaaggtatctcatccaaaaccata

SEQ ID NO: 248036 - DNA, 25 bp, Artificial
  probe
  misc_feature (1)..(25): SEQ ID NO: 7439; WAN024GJH_at; Start 91; Stop 115
tctgttaaggtatctcatccaaaac

SEQ ID NO: 248037 - DNA, 25 bp, Artificial
  probe
  misc_feature (1)..(25): SEQ ID NO: 7439; WAN024GJH_at; Start 96; Stop 120
taaggtatctcatccaaaaccatac

SEQ ID NO: 248038 - DNA, 25 bp, Artificial
  probe
  misc_feature (1)..(25): SEQ ID NO: 1874; WAN024GJI_at; Start 117; Stop 141
tttctcagtcaagacatcaagaccg

SEQ ID NO: 248039 - DNA, 25 bp, Artificial
  probe
  misc_feature (1)..(25): SEQ ID NO: 1874; WAN024GJI_at; Start 37; Stop 61
gttcgttcggctatactgagacgat

SEQ ID NO: 248040 - DNA, 25 bp, Artificial
  probe
  misc_feature (1)..(25): SEQ ID NO: 1874; WAN024GJI_at; Start 50; Stop 74
tactgagacgatgggctacaaagag

SEQ ID NO: 248041 - DNA, 25 bp, Artificial
  probe
  misc_feature (1)..(25): SEQ ID NO: 1874; WAN024GJI_at; Start 44; Stop 68
cggctatactgagacgatgggctac

SEQ ID NO: 248042 - DNA, 25 bp, Artificial
  probe
  misc_feature (1)..(25): SEQ ID NO: 1874; WAN024GJI_at; Start 113; Stop 137
cctttttctcagtcaagacatcaag

SEQ ID NO: 248043 - DNA, 25 bp, Artificial
  probe
  misc_feature (1)..(25): SEQ ID NO: 1874; WAN024GJI_at; Start 42; Stop 66
ttcggctatactgagacgatgggct

SEQ ID NO: 248044 - DNA, 25 bp, Artificial
  probe
  misc_feature (1)..(25): SEQ ID NO: 1874; WAN024GJI_at; Start 3; Stop 27
gattttcccctggtcaagaacaatg

SEQ ID NO: 248045 - DNA, 25 bp, Artificial
  probe
  misc_feature (1)..(25): SEQ ID NO: 1874; WAN024GJI_at; Start 127; Stop 151
aagacatcaagaccgctagtagctt

SEQ ID NO: 248046 - DNA, 25 bp, Artificial
  probe
  misc_feature (1)..(25): SEQ ID NO: 1874; WAN024GJI_at; Start 181; Stop 205
aaaagagcacgagcgagagcgattc

SEQ ID NO: 248047 - DNA, 25 bp, Artificial
  probe
  misc_feature (1)..(25): SEQ ID NO: 1874; WAN024GJI_at; Start 179; Stop 203
ttaaaagagcacgagcgagagcgat

SEQ ID NO: 248048 - DNA, 25 bp, Artificial
  probe
  misc_feature (1)..(25): SEQ ID NO: 1874; WAN024GJI_at; Start 8; Stop 32
tcccctggtcaagaacaatgacacg

SEQ ID NO: 248049 - DNA, 25 bp, Artificial
  probe
  misc_feature (1)..(25): SEQ ID NO: 1874; WAN024GJI_at; Start 167; Stop 191
caggagatttagttaaaagagcacg

SEQ ID NO: 248050 - DNA, 25 bp, Artificial
  probe
  misc_feature (1)..(25): SEQ ID NO: 1874; WAN024GJI_at; Start 154; Stop 178
tctagtattaaaacaggagatttag

SEQ ID NO: 248051 - DNA, 25 bp, Artificial
  probe
  misc_feature (1)..(25): SEQ ID NO: 1874; WAN024GJI_at; Start 176; Stop 200
tagttaaaagagcacgagcgagagc

SEQ ID NO: 248052 - DNA, 25 bp, Artificial
  probe
  misc_feature (1)..(25): SEQ ID NO: 1874; WAN024GJI_at; Start 58; Stop 82
cgatgggctacaaagagaatggttt

SEQ ID NO: 248053 - DNA, 25 bp, Artificial
  probe
  misc_feature (1)..(25): SEQ ID NO: 1874; WAN024GJI_at; Start 101; Stop 125
gattatctataacctttttctcagt

SEQ ID NO: 248054 - DNA, 25 bp, Artificial
  probe
  misc_feature (1)..(25): SEQ ID NO: 1874; WAN024GJI_at; Start 219; Stop 243
tcctgatagaccagctccatcagag

SEQ ID NO: 248055 - DNA, 25 bp, Artificial
  probe
  misc_feature (1)..(25): SEQ ID NO: 1874; WAN024GJI_at; Start 48; Stop 72
tatactgagacgatgggctacaaag

SEQ ID NO: 248056 - DNA, 25 bp, Artificial
  probe
  misc_feature (1)..(25): SEQ ID NO: 1874; WAN024GJI_at; Start 68; Stop 92
caaagagaatggttttatcagttag

SEQ ID NO: 248057 - DNA, 25 bp, Artificial
  probe
  misc_feature (1)..(25): SEQ ID NO: 1874; WAN024GJI_at; Start 172; Stop 196
gatttagttaaaagagcacgagcga

SEQ ID NO: 248058 - DNA, 25 bp, Artificial
  probe
  misc_feature (1)..(25): SEQ ID NO: 1874; WAN024GJI_at; Start 54; Stop 78
gagacgatgggctacaaagagaatg

SEQ ID NO: 248059 - DNA, 25 bp, Artificial
  probe
  misc_feature (1)..(25): SEQ ID NO: 1874; WAN024GJI_at; Start 39; Stop 63
tcgttcggctatactgagacgatgg

SEQ ID NO: 248060 - DNA, 25 bp, Artificial
  probe
  misc_feature (1)..(25): SEQ ID NO: 1874; WAN024GJI_at; Start 11; Stop 35
cctggtcaagaacaatgacacggtt

SEQ ID NO: 248061 - DNA, 25 bp, Artificial
  probe
  misc_feature (1)..(25): SEQ ID NO: 1874; WAN024GJI_at; Start 223; Stop 247
gatagaccagctccatcagagagct

SEQ ID NO: 248062 - DNA, 25 bp, Artificial
  probe
  misc_feature (1)..(25): SEQ ID NO: 1874; WAN024GJI_at; Start 121; Stop 145
tcagtcaagacatcaagaccgctag

SEQ ID NO: 248063 - DNA, 25 bp, Artificial
  probe
  misc_feature (1)..(25): SEQ ID NO: 1874; WAN024GJI_at; Start 225; Stop 249
tagaccagctccatcagagagctga

SEQ ID NO: 248064 - DNA, 25 bp, Artificial
  probe
  misc_feature (1)..(25): SEQ ID NO: 1874; WAN024GJI_at; Start 184; Stop 208
agagcacgagcgagagcgattcgtt

SEQ ID NO: 248065 - DNA, 25 bp, Artificial
  probe
  misc_feature (1)..(25): SEQ ID NO: 1874; WAN024GJI_at; Start 46; Stop 70
gctatactgagacgatgggctacaa

SEQ ID NO: 248066 - DNA, 25 bp, Artificial
  probe
  misc_feature (1)..(25): SEQ ID NO: 1874; WAN024GJI_at; Start 108; Stop 132
tataacctttttctcagtcaagaca

SEQ ID NO: 248067 - DNA, 25 bp, Artificial
  probe
  misc_feature (1)..(25): SEQ ID NO: 1874; WAN024GJI_at; Start 6; Stop 30
tttcccctggtcaagaacaatgaca

SEQ ID NO: 248068 - DNA, 25 bp, Artificial
  probe
  misc_feature (1)..(25): SEQ ID NO: 1874; WAN024GJI_at; Start 214; Stop 238
tgtcctcctgatagaccagctccat

SEQ ID NO: 248069 - DNA, 25 bp, Artificial
  probe
  misc_feature (1)..(25): SEQ ID NO: 1874; WAN024GJI_at; Start 63; Stop 87
ggctacaaagagaatggttttatca

SEQ ID NO: 248070 - DNA, 25 bp, Artificial
  probe
  misc_feature (1)..(25): SEQ ID NO: 1874; WAN024GJI_at; Start 125; Stop 149
tcaagacatcaagaccgctagtagc

SEQ ID NO: 248071 - DNA, 25 bp, Artificial
  probe
  misc_feature (1)..(25): SEQ ID NO: 1874; WAN024GJI_at; Start 187; Stop 211
gcacgagcgagagcgattcgttgct

SEQ ID NO: 248072 - DNA, 25 bp, Artificial
  probe
  misc_feature (1)..(25): SEQ ID NO: 5189; WAN024GJJ_at; Start 179; Stop 203
aggaagagattagggttttgtgcca

SEQ ID NO: 248073 - DNA, 25 bp, Artificial
  probe
  misc_feature (1)..(25): SEQ ID NO: 5189; WAN024GJJ_at; Start 217; Stop 241
tacaagaatcagaatagaaacatcc

SEQ ID NO: 248074 - DNA, 25 bp, Artificial
  probe
  misc_feature (1)..(25): SEQ ID NO: 5189; WAN024GJJ_at; Start 38; Stop 62
gtttcaatcccgttgatatcttcga

SEQ ID NO: 248075 - DNA, 25 bp, Artificial
  probe
  misc_feature (1)..(25): SEQ ID NO: 5189; WAN024GJJ_at; Start 7; Stop 31
gcgattttcttcactcgtgagcgac

SEQ ID NO: 248076 - DNA, 25 bp, Artificial
  probe
  misc_feature (1)..(25): SEQ ID NO: 5189; WAN024GJJ_at; Start 59; Stop 83
tcgataatggcagagctaaccatag

SEQ ID NO: 248077 - DNA, 25 bp, Artificial
  probe
  misc_feature (1)..(25): SEQ ID NO: 5189; WAN024GJJ_at; Start 54; Stop 78
tatcttcgataatggcagagctaac

SEQ ID NO: 248078 - DNA, 25 bp, Artificial
  probe
  misc_feature (1)..(25): SEQ ID NO: 5189; WAN024GJJ_at; Start 46; Stop 70
cccgttgatatcttcgataatggca

SEQ ID NO: 248079 - DNA, 25 bp, Artificial
  probe
  misc_feature (1)..(25): SEQ ID NO: 5189; WAN024GJJ_at; Start 310; Stop 334
gatttctcctgtacgacgtgtcgca

SEQ ID NO: 248080 - DNA, 25 bp, Artificial
  probe
  misc_feature (1)..(25): SEQ ID NO: 5189; WAN024GJJ_at; Start 324; Stop 348
gacgtgtcgcaaagaaagacatggg

SEQ ID NO: 248081 - DNA, 25 bp, Artificial
  probe
  misc_feature (1)..(25): SEQ ID NO: 5189; WAN024GJJ_at; Start 249; Stop 273
gagaaagaatggtagaagccaaggc

SEQ ID NO: 248082 - DNA, 25 bp, Artificial
  probe
  misc_feature (1)..(25): SEQ ID NO: 5189; WAN024GJJ_at; Start 330; Stop 354
tcgcaaagaaagacatgggaagttc

SEQ ID NO: 248083 - DNA, 25 bp, Artificial
  probe
  misc_feature (1)..(25): SEQ ID NO: 5189; WAN024GJJ_at; Start 81; Stop 105
tagaattactttgcatgacatcatg

SEQ ID NO: 248084 - DNA, 25 bp, Artificial
  probe
  misc_feature (1)..(25): SEQ ID NO: 5189; WAN024GJJ_at; Start 93; Stop 117
gcatgacatcatggttcattttttc

SEQ ID NO: 248085 - DNA, 25 bp, Artificial
  probe
  misc_feature (1)..(25): SEQ ID NO: 5189; WAN024GJJ_at; Start 3; Stop 27
gatagcgattttcttcactcgtgag

SEQ ID NO: 248086 - DNA, 25 bp, Artificial
  probe
  misc_feature (1)..(25): SEQ ID NO: 5189; WAN024GJJ_at; Start 253; Stop 277
aagaatggtagaagccaaggcatct

SEQ ID NO: 248087 - DNA, 25 bp, Artificial
  probe
  misc_feature (1)..(25): SEQ ID NO: 5189; WAN024GJJ_at; Start 343; Stop 367
catgggaagttcaaaaatatggcga

SEQ ID NO: 248088 - DNA, 25 bp, Artificial
  probe
  misc_feature (1)..(25): SEQ ID NO: 5189; WAN024GJJ_at; Start 275; Stop 299
tctataatagagttagcatctgtga

SEQ ID NO: 248089 - DNA, 25 bp, Artificial
  probe
  misc_feature (1)..(25): SEQ ID NO: 5189; WAN024GJJ_at; Start 87; Stop 111
tactttgcatgacatcatggttcat

SEQ ID NO: 248090 - DNA, 25 bp, Artificial
  probe
  misc_feature (1)..(25): SEQ ID NO: 5189; WAN024GJJ_at; Start 347; Stop 371
ggaagttcaaaaatatggcgaatat

SEQ ID NO: 248091 - DNA, 25 bp, Artificial
  probe
  misc_feature (1)..(25): SEQ ID NO: 5189; WAN024GJJ_at; Start 305; Stop 329
gaaatgatttctcctgtacgacgtg

SEQ ID NO: 248092 - DNA, 25 bp, Artificial
  probe
  misc_feature (1)..(25): SEQ ID NO: 5189; WAN024GJJ_at; Start 142; Stop 166
gatgaacatgtatataggaatggaa

SEQ ID NO: 248093 - DNA, 25 bp, Artificial
  probe
  misc_feature (1)..(25): SEQ ID NO: 5189; WAN024GJJ_at; Start 122; Stop 146
ggtttcataaaagaaaagatgatga

SEQ ID NO: 248094 - DNA, 25 bp, Artificial
  probe
  misc_feature (1)..(25): SEQ ID NO: 5189; WAN024GJJ_at; Start 25; Stop 49
gagcgactttatagtttcaatcccg

SEQ ID NO: 248095 - DNA, 25 bp, Artificial
  probe
  misc_feature (1)..(25): SEQ ID NO: 5189; WAN024GJJ_at; Start 127; Stop 151
cataaaagaaaagatgatgaacatg

SEQ ID NO: 248096 - DNA, 25 bp, Artificial
  probe
  misc_feature (1)..(25): SEQ ID NO: 5189; WAN024GJJ_at; Start 222; Stop 246
gaatcagaatagaaacatccagaaa

SEQ ID NO: 248097 - DNA, 25 bp, Artificial
  probe
  misc_feature (1)..(25): SEQ ID NO: 5189; WAN024GJJ_at; Start 263; Stop 287
gaagccaaggcatctataatagagt

SEQ ID NO: 248098 - DNA, 25 bp, Artificial
  probe
  misc_feature (1)..(25): SEQ ID NO: 5189; WAN024GJJ_at; Start 231; Stop 255
tagaaacatccagaaaaagagaaag

SEQ ID NO: 248099 - DNA, 25 bp, Artificial
  probe
  misc_feature (1)..(25): SEQ ID NO: 5189; WAN024GJJ_at; Start 71; Stop 95
gagctaaccatagaattactttgca

SEQ ID NO: 248100 - DNA, 25 bp, Artificial
  probe
  misc_feature (1)..(25): SEQ ID NO: 5189; WAN024GJJ_at; Start 237; Stop 261
catccagaaaaagagaaagaatggt

SEQ ID NO: 248101 - DNA, 25 bp, Artificial
  probe
  misc_feature (1)..(25): SEQ ID NO: 5189; WAN024GJJ_at; Start 66; Stop 90
tggcagagctaaccatagaattact

SEQ ID NO: 248102 - DNA, 25 bp, Artificial
  probe
  misc_feature (1)..(25): SEQ ID NO: 5189; WAN024GJJ_at; Start 319; Stop 343
tgtacgacgtgtcgcaaagaaagac

SEQ ID NO: 248103 - DNA, 25 bp, Artificial
  probe
  misc_feature (1)..(25): SEQ ID NO: 5189; WAN024GJJ_at; Start 14; Stop 38
tcttcactcgtgagcgactttatag

SEQ ID NO: 248104 - DNA, 25 bp, Artificial
  probe
  misc_feature (1)..(25): SEQ ID NO: 5189; WAN024GJJ_at; Start 18; Stop 42
cactcgtgagcgactttatagtttc

SEQ ID NO: 248105 - DNA, 25 bp, Artificial
  probe
  misc_feature (1)..(25): SEQ ID NO: 5189; WAN024GJJ_at; Start 29; Stop 53
gactttatagtttcaatcccgttga

SEQ ID NO: 248106 - DNA, 25 bp, Artificial
  probe
  misc_feature (1)..(25): SEQ ID NO: 5330; WAN024GJK_at; Start 782; Stop 806
gcgacacgtcgtacaggagaaatca

SEQ ID NO: 248107 - DNA, 25 bp, Artificial
  probe
  misc_feature (1)..(25): SEQ ID NO: 5330; WAN024GJK_at; Start 1949; Stop 1973
gctactagcggtcttgatgtcttga

SEQ ID NO: 248108 - DNA, 25 bp, Artificial
  probe
  misc_feature (1)..(25): SEQ ID NO: 5330; WAN024GJK_at; Start 1343; Stop 1367
caaaccaaactccaatctgcgaagg

SEQ ID NO: 248109 - DNA, 25 bp, Artificial
  probe
  misc_feature (1)..(25): SEQ ID NO: 5330; WAN024GJK_at; Start 110; Stop 134
tagctcacttgagagaacttgcaaa

SEQ ID NO: 248110 - DNA, 25 bp, Artificial
  probe
  misc_feature (1)..(25): SEQ ID NO: 5330; WAN024GJK_at; Start 258; Stop 282
tatcgttcacgttaacaaagaagga

SEQ ID NO: 248111 - DNA, 25 bp, Artificial
  probe
  misc_feature (1)..(25): SEQ ID NO: 5330; WAN024GJK_at; Start 1233; Stop 1257
ggtttggcgctcaattagtcatgtc

SEQ ID NO: 248112 - DNA, 25 bp, Artificial
  probe
  misc_feature (1)..(25): SEQ ID NO: 5330; WAN024GJK_at; Start 1436; Stop 1460
cattcacattttttgatgggcgata

SEQ ID NO: 248113 - DNA, 25 bp, Artificial
  probe
  misc_feature (1)..(25): SEQ ID NO: 5330; WAN024GJK_at; Start 1045; Stop 1069
tgccattatcgaagatatcaacggg

SEQ ID NO: 248114 - DNA, 25 bp, Artificial
  probe
  misc_feature (1)..(25): SEQ ID NO: 5330; WAN024GJK_at; Start 2112; Stop 2136
accaagagttaatgcaggcgcaagg

SEQ ID NO: 248115 - DNA, 25 bp, Artificial
  probe
  misc_feature (1)..(25): SEQ ID NO: 5330; WAN024GJK_at; Start 2063; Stop 2087
aaccgtgtcattgttcttgaccagg

SEQ ID NO: 248116 - DNA, 25 bp, Artificial
  probe
  misc_feature (1)..(25): SEQ ID NO: 5330; WAN024GJK_at; Start 1086; Stop 1110
cgctcacgagtgaagaaaatcgcta

SEQ ID NO: 248117 - DNA, 25 bp, Artificial
  probe
  misc_feature (1)..(25): SEQ ID NO: 5330; WAN024GJK_at; Start 656; Stop 680
tatatcctccaacaagtcatgagct

SEQ ID NO: 248118 - DNA, 25 bp, Artificial
  probe
  misc_feature (1)..(25): SEQ ID NO: 5330; WAN024GJK_at; Start 1219; Stop 1243
tatccttatcctatggtttggcgct

SEQ ID NO: 248119 - DNA, 25 bp, Artificial
  probe
  misc_feature (1)..(25): SEQ ID NO: 5330; WAN024GJK_at; Start 761; Stop 785
gaacttcccatgtctttctttgcga

SEQ ID NO: 248120 - DNA, 25 bp, Artificial
  probe
  misc_feature (1)..(25): SEQ ID NO: 5330; WAN024GJK_at; Start 2016; Stop 2040
aaaccattctctttgtagcccatcg

SEQ ID NO: 248121 - DNA, 25 bp, Artificial
  probe
  misc_feature (1)..(25): SEQ ID NO: 5330; WAN024GJK_at; Start 336; Stop 360
tggtgatcctgacccttctgtaaaa

SEQ ID NO: 248122 - DNA, 25 bp, Artificial
  probe
  misc_feature (1)..(25): SEQ ID NO: 5330; WAN024GJK_at; Start 1073; Stop 1097
gaaactataaagtcgctcacgagtg

SEQ ID NO: 248123 - DNA, 25 bp, Artificial
  probe
  misc_feature (1)..(25): SEQ ID NO: 5330; WAN024GJK_at; Start 1025; Stop 1049
agtaattctatggttagctctgcca

SEQ ID NO: 248124 - DNA, 25 bp, Artificial
  probe
  misc_feature (1)..(25): SEQ ID NO: 5330; WAN024GJK_at; Start 1831; Stop 1855
gcctatgggctatcaaactcagctc

SEQ ID NO: 248125 - DNA, 25 bp, Artificial
  probe
  misc_feature (1)..(25): SEQ ID NO: 5330; WAN024GJK_at; Start 362; Stop 386
tcactaaaatgtcaaaagaacgctt

SEQ ID NO: 248126 - DNA, 25 bp, Artificial
  probe
  misc_feature (1)..(25): SEQ ID NO: 5330; WAN024GJK_at; Start 1677; Stop 1701
tgcgccgtcatattaattacctacc

SEQ ID NO: 248127 - DNA, 25 bp, Artificial
  probe
  misc_feature (1)..(25): SEQ ID NO: 5330; WAN024GJK_at; Start 2031; Stop 2055
tagcccatcgtctcagtatagccga

SEQ ID NO: 248128 - DNA, 25 bp, Artificial
  probe
  misc_feature (1)..(25): SEQ ID NO: 5330; WAN024GJK_at; Start 459; Stop 483
gaatggtctactaagcaagcttcct

SEQ ID NO: 248129 - DNA, 25 bp, Artificial
  probe
  misc_feature (1)..(25): SEQ ID NO: 5330; WAN024GJK_at; Start 1010; Stop 1034
catgatgtcatgcaaagtaattcta

SEQ ID NO: 248130 - DNA, 25 bp, Artificial
  probe
  misc_feature (1)..(25): SEQ ID NO: 5330; WAN024GJK_at; Start 1524; Stop 1548
tcacgattaaacaaggagataaggt

SEQ ID NO: 248131 - DNA, 25 bp, Artificial
  probe
  misc_feature (1)..(25): SEQ ID NO: 5330; WAN024GJK_at; Start 1860; Stop 1884
atggagctggtctatcaggaggaca

SEQ ID NO: 248132 - DNA, 25 bp, Artificial
  probe
  misc_feature (1)..(25): SEQ ID NO: 5330; WAN024GJK_at; Start 1817; Stop 1841
gacattgaaagaatgcctatgggct

SEQ ID NO: 248133 - DNA, 25 bp, Artificial
  probe
  misc_feature (1)..(25): SEQ ID NO: 5330; WAN024GJK_at; Start 474; Stop 498
caagcttccttcctctgattttcaa

SEQ ID NO: 248134 - DNA, 25 bp, Artificial
  probe
  misc_feature (1)..(25): SEQ ID NO: 5330; WAN024GJK_at; Start 1259; Stop 1283
agtaaaatttctatcggtcagctga

SEQ ID NO: 248135 - DNA, 25 bp, Artificial
  probe
  misc_feature (1)..(25): SEQ ID NO: 5330; WAN024GJK_at; Start 687; Stop 711
gagattatctcctaaccgttctgag

SEQ ID NO: 248136 - DNA, 25 bp, Artificial
  probe
  misc_feature (1)..(25): SEQ ID NO: 5330; WAN024GJK_at; Start 1378; Stop 1402
ccgtttgaacgaagtctatctagtc

SEQ ID NO: 248137 - DNA, 25 bp, Artificial
  probe
  misc_feature (1)..(25): SEQ ID NO: 5330; WAN024GJK_at; Start 623; Stop 647
ttaggaatcatctcagttggtctgg

SEQ ID NO: 248138 - DNA, 25 bp, Artificial
  probe
  misc_feature (1)..(25): SEQ ID NO: 5330; WAN024GJK_at; Start 1660; Stop 1684
cattgataaaaaagtcttgcgccgt

SEQ ID NO: 248139 - DNA, 25 bp, Artificial
  probe
  misc_feature (1)..(25): SEQ ID NO: 5330; WAN024GJK_at; Start 832; Stop 856
tattatagatgccttggcttctacc

SEQ ID NO: 248140 - DNA, 25 bp, Artificial
  probe
  misc_feature (1)..(25): SEQ ID NO: 7085; WAN024GJL_at; Start 67; Stop 91
gcaacaagggagaaaatcaagatga

SEQ ID NO: 248141 - DNA, 25 bp, Artificial
  probe
  misc_feature (1)..(25): SEQ ID NO: 7085; WAN024GJL_at; Start 1; Stop 25
ctgaatggaggcaatgacactgtag

SEQ ID NO: 248142 - DNA, 25 bp, Artificial
  probe
  misc_feature (1)..(25): SEQ ID NO: 7085; WAN024GJL_at; Start 84; Stop 108
caagatgaaagtaaatagtaatgaa

SEQ ID NO: 248143 - DNA, 25 bp, Artificial
  probe
  misc_feature (1)..(25): SEQ ID NO: 7085; WAN024GJL_at; Start 54; Stop 78
aatttcttttgtggcaacaagggag

SEQ ID NO: 248144 - DNA, 25 bp, Artificial
  probe
  misc_feature (1)..(25): SEQ ID NO: 7085; WAN024GJL_at; Start 56; Stop 80
tttcttttgtggcaacaagggagaa

SEQ ID NO: 248145 - DNA, 25 bp, Artificial
  probe
  misc_feature (1)..(25): SEQ ID NO: 7085; WAN024GJL_at; Start 29; Stop 53
cgatttctccttgggaagtaacagt

SEQ ID NO: 248146 - DNA, 25 bp, Artificial
  probe
  misc_feature (1)..(25): SEQ ID NO: 7085; WAN024GJL_at; Start 71; Stop 95
caagggagaaaatcaagatgaaagt

SEQ ID NO: 248147 - DNA, 25 bp, Artificial
  probe
  misc_feature (1)..(25): SEQ ID NO: 7085; WAN024GJL_at; Start 74; Stop 98
gggagaaaatcaagatgaaagtaaa

SEQ ID NO: 248148 - DNA, 25 bp, Artificial
  probe
  misc_feature (1)..(25): SEQ ID NO: 7085; WAN024GJL_at; Start 50; Stop 74
cagtaatttcttttgtggcaacaag

SEQ ID NO: 248149 - DNA, 25 bp, Artificial
  probe
  misc_feature (1)..(25): SEQ ID NO: 7085; WAN024GJL_at; Start 51; Stop 75
agtaatttcttttgtggcaacaagg

SEQ ID NO: 248150 - DNA, 25 bp, Artificial
  probe
  misc_feature (1)..(25): SEQ ID NO: 7085; WAN024GJL_at; Start 68; Stop 92
caacaagggagaaaatcaagatgaa

SEQ ID NO: 248151 - DNA, 25 bp, Artificial
  probe
  misc_feature (1)..(25): SEQ ID NO: 7085; WAN024GJL_at; Start 108; Stop 132
aagaggtataattaacactgtcgca

SEQ ID NO: 248152 - DNA, 25 bp, Artificial
  probe
  misc_feature (1)..(25): SEQ ID NO: 7085; WAN024GJL_at; Start 66; Stop 90
ggcaacaagggagaaaatcaagatg

SEQ ID NO: 248153 - DNA, 25 bp, Artificial
  probe
  misc_feature (1)..(25): SEQ ID NO: 7085; WAN024GJL_at; Start 64; Stop 88
gtggcaacaagggagaaaatcaaga

SEQ ID NO: 248154 - DNA, 25 bp, Artificial
  probe
  misc_feature (1)..(25): SEQ ID NO: 7085; WAN024GJL_at; Start 89; Stop 113
tgaaagtaaatagtaatgaaagagg

SEQ ID NO: 248155 - DNA, 25 bp, Artificial
  probe
  misc_feature (1)..(25): SEQ ID NO: 7085; WAN024GJL_at; Start 48; Stop 72
aacagtaatttcttttgtggcaaca

SEQ ID NO: 248156 - DNA, 25 bp, Artificial
  probe
  misc_feature (1)..(25): SEQ ID NO: 7085; WAN024GJL_at; Start 53; Stop 77
taatttcttttgtggcaacaaggga

SEQ ID NO: 248157 - DNA, 25 bp, Artificial
  probe
  misc_feature (1)..(25): SEQ ID NO: 7085; WAN024GJL_at; Start 58; Stop 82
tcttttgtggcaacaagggagaaaa

SEQ ID NO: 248158 - DNA, 25 bp, Artificial
  probe
  misc_feature (1)..(25): SEQ ID NO: 7085; WAN024GJL_at; Start 78; Stop 102
gaaaatcaagatgaaagtaaatagt

SEQ ID NO: 248159 - DNA, 25 bp, Artificial
  probe
  misc_feature (1)..(25): SEQ ID NO: 7085; WAN024GJL_at; Start 107; Stop 131
aaagaggtataattaacactgtcgc

SEQ ID NO: 248160 - DNA, 25 bp, Artificial
  probe
  misc_feature (1)..(25): SEQ ID NO: 7085; WAN024GJL_at; Start 12; Stop 36
caatgacactgtaggggcgatttct

SEQ ID NO: 248161 - DNA, 25 bp, Artificial
  probe
  misc_feature (1)..(25): SEQ ID NO: 7085; WAN024GJL_at; Start 59; Stop 83
cttttgtggcaacaagggagaaaat

SEQ ID NO: 248162 - DNA, 25 bp, Artificial
  probe
  misc_feature (1)..(25): SEQ ID NO: 7085; WAN024GJL_at; Start 3; Stop 27
gaatggaggcaatgacactgtaggg

SEQ ID NO: 248163 - DNA, 25 bp, Artificial
  probe
  misc_feature (1)..(25): SEQ ID NO: 7085; WAN024GJL_at; Start 106; Stop 130
gaaagaggtataattaacactgtcg

SEQ ID NO: 248164 - DNA, 25 bp, Artificial
  probe
  misc_feature (1)..(25): SEQ ID NO: 7085; WAN024GJL_at; Start 61; Stop 85
tttgtggcaacaagggagaaaatca

SEQ ID NO: 248165 - DNA, 25 bp, Artificial
  probe
  misc_feature (1)..(25): SEQ ID NO: 7085; WAN024GJL_at; Start 30; Stop 54
gatttctccttgggaagtaacagta

SEQ ID NO: 248166 - DNA, 25 bp, Artificial
  probe
  misc_feature (1)..(25): SEQ ID NO: 7085; WAN024GJL_at; Start 47; Stop 71
taacagtaatttcttttgtggcaac

SEQ ID NO: 248167 - DNA, 25 bp, Artificial
  probe
  misc_feature (1)..(25): SEQ ID NO: 7085; WAN024GJL_at; Start 27; Stop 51
ggcgatttctccttgggaagtaaca

SEQ ID NO: 248168 - DNA, 25 bp, Artificial
  probe
  misc_feature (1)..(25): SEQ ID NO: 7085; WAN024GJL_at; Start 62; Stop 86
ttgtggcaacaagggagaaaatcaa

SEQ ID NO: 248169 - DNA, 25 bp, Artificial
  probe
  misc_feature (1)..(25): SEQ ID NO: 7085; WAN024GJL_at; Start 65; Stop 89
tggcaacaagggagaaaatcaagat

SEQ ID NO: 248170 - DNA, 25 bp, Artificial
  probe
  misc_feature (1)..(25): SEQ ID NO: 7085; WAN024GJL_at; Start 28; Stop 52
gcgatttctccttgggaagtaacag

SEQ ID NO: 248171 - DNA, 25 bp, Artificial
  probe
  misc_feature (1)..(25): SEQ ID NO: 7085; WAN024GJL_at; Start 2; Stop 26
tgaatggaggcaatgacactgtagg

SEQ ID NO: 248172 - DNA, 25 bp, Artificial
  probe
  misc_feature (1)..(25): SEQ ID NO: 7085; WAN024GJL_at; Start 105; Stop 129
tgaaagaggtataattaacactgtc

SEQ ID NO: 248173 - DNA, 25 bp, Artificial
  probe
  misc_feature (1)..(25): SEQ ID NO: 7085; WAN024GJL_at; Start 60; Stop 84
ttttgtggcaacaagggagaaaatc

SEQ ID NO: 248174 - DNA, 25 bp, Artificial
  probe
  misc_feature (1)..(25): SEQ ID NO: 7593; WAN024GJM_at; Start 24; Stop 48
gatcaatactctgaagttggccgat

SEQ ID NO: 248175 - DNA, 25 bp, Artificial
  probe
  misc_feature (1)..(25): SEQ ID NO: 7593; WAN024GJM_at; Start 28; Stop 52
aatactctgaagttggccgatgatg

SEQ ID NO: 248176 - DNA, 25 bp, Artificial
  probe
  misc_feature (1)..(25): SEQ ID NO: 7593; WAN024GJM_at; Start 55; Stop 79
ggtgccgtgatttccaatcttctcc

SEQ ID NO: 248177 - DNA, 25 bp, Artificial
  probe
  misc_feature (1)..(25): SEQ ID NO: 7593; WAN024GJM_at; Start 29; Stop 53
atactctgaagttggccgatgatgg

SEQ ID NO: 248178 - DNA, 25 bp, Artificial
  probe
  misc_feature (1)..(25): SEQ ID NO: 7593; WAN024GJM_at; Start 57; Stop 81
tgccgtgatttccaatcttctccag

SEQ ID NO: 248179 - DNA, 25 bp, Artificial
  probe
  misc_feature (1)..(25): SEQ ID NO: 7593; WAN024GJM_at; Start 58; Stop 82
gccgtgatttccaatcttctccagt

SEQ ID NO: 248180 - DNA, 25 bp, Artificial
  probe
  misc_feature (1)..(25): SEQ ID NO: 7593; WAN024GJM_at; Start 6; Stop 30
ctgttctggtaggagtttgatcaat

SEQ ID NO: 248181 - DNA, 25 bp, Artificial
  probe
  misc_feature (1)..(25): SEQ ID NO: 7593; WAN024GJM_at; Start 13; Stop 37
ggtaggagtttgatcaatactctga

SEQ ID NO: 248182 - DNA, 25 bp, Artificial
  probe
  misc_feature (1)..(25): SEQ ID NO: 7593; WAN024GJM_at; Start 8; Stop 32
gttctggtaggagtttgatcaatac

SEQ ID NO: 248183 - DNA, 25 bp, Artificial
  probe
  misc_feature (1)..(25): SEQ ID NO: 7593; WAN024GJM_at; Start 46; Stop 70
gatgatggtggtgccgtgatttcca

SEQ ID NO: 248184 - DNA, 25 bp, Artificial
  probe
  misc_feature (1)..(25): SEQ ID NO: 7593; WAN024GJM_at; Start 60; Stop 84
cgtgatttccaatcttctccagttt

SEQ ID NO: 248185 - DNA, 25 bp, Artificial
  probe
  misc_feature (1)..(25): SEQ ID NO: 7593; WAN024GJM_at; Start 20; Stop 44
gtttgatcaatactctgaagttggc

SEQ ID NO: 248186 - DNA, 25 bp, Artificial
  probe
  misc_feature (1)..(25): SEQ ID NO: 7593; WAN024GJM_at; Start 3; Stop 27
gctctgttctggtaggagtttgatc

SEQ ID NO: 248187 - DNA, 25 bp, Artificial
  probe
  misc_feature (1)..(25): SEQ ID NO: 7593; WAN024GJM_at; Start 10; Stop 34
tctggtaggagtttgatcaatactc

SEQ ID NO: 248188 - DNA, 25 bp, Artificial
  probe
  misc_feature (1)..(25): SEQ ID NO: 7593; WAN024GJM_at; Start 27; Stop 51
caatactctgaagttggccgatgat

SEQ ID NO: 248189 - DNA, 25 bp, Artificial
  probe
  misc_feature (1)..(25): SEQ ID NO: 7593; WAN024GJM_at; Start 21; Stop 45
tttgatcaatactctgaagttggcc

SEQ ID NO: 248190 - DNA, 25 bp, Artificial
  probe
  misc_feature (1)..(25): SEQ ID NO: 7593; WAN024GJM_at; Start 26; Stop 50
tcaatactctgaagttggccgatga

SEQ ID NO: 248191 - DNA, 25 bp, Artificial
  probe
  misc_feature (1)..(25): SEQ ID NO: 7593; WAN024GJM_at; Start 1; Stop 25
ttgctctgttctggtaggagtttga

SEQ ID NO: 248192 - DNA, 25 bp, Artificial
  probe
  misc_feature (1)..(25): SEQ ID NO: 7593; WAN024GJM_at; Start 52; Stop 76
ggtggtgccgtgatttccaatcttc

SEQ ID NO: 248193 - DNA, 25 bp, Artificial
  probe
  misc_feature (1)..(25): SEQ ID NO: 7593; WAN024GJM_at; Start 54; Stop 78
tggtgccgtgatttccaatcttctc

SEQ ID NO: 248194 - DNA, 25 bp, Artificial
  probe
  misc_feature (1)..(25): SEQ ID NO: 7593; WAN024GJM_at; Start 30; Stop 54
tactctgaagttggccgatgatggt

SEQ ID NO: 248195 - DNA, 25 bp, Artificial
  probe
  misc_feature (1)..(25): SEQ ID NO: 7593; WAN024GJM_at; Start 12; Stop 36
tggtaggagtttgatcaatactctg

SEQ ID NO: 248196 - DNA, 25 bp, Artificial
  probe
  misc_feature (1)..(25): SEQ ID NO: 7593; WAN024GJM_at; Start 17; Stop 41
ggagtttgatcaatactctgaagtt

SEQ ID NO: 248197 - DNA, 25 bp, Artificial
  probe
  misc_feature (1)..(25): SEQ ID NO: 7593; WAN024GJM_at; Start 45; Stop 69
cgatgatggtggtgccgtgatttcc

SEQ ID NO: 248198 - DNA, 25 bp, Artificial
  probe
  misc_feature (1)..(25): SEQ ID NO: 7593; WAN024GJM_at; Start 25; Stop 49
atcaatactctgaagttggccgatg

SEQ ID NO: 248199 - DNA, 25 bp, Artificial
  probe
  misc_feature (1)..(25): SEQ ID NO: 7593; WAN024GJM_at; Start 50; Stop 74
atggtggtgccgtgatttccaatct

SEQ ID NO: 248200 - DNA, 25 bp, Artificial
  probe
  misc_feature (1)..(25): SEQ ID NO: 7593; WAN024GJM_at; Start 5; Stop 29
tctgttctggtaggagtttgatcaa

SEQ ID NO: 248201 - DNA, 25 bp, Artificial
  probe
  misc_feature (1)..(25): SEQ ID NO: 7593; WAN024GJM_at; Start 44; Stop 68
ccgatgatggtggtgccgtgatttc

SEQ ID NO: 248202 - DNA, 25 bp, Artificial
  probe
  misc_feature (1)..(25): SEQ ID NO: 7593; WAN024GJM_at; Start 53; Stop 77
gtggtgccgtgatttccaatcttct

SEQ ID NO: 248203 - DNA, 25 bp, Artificial
  probe
  misc_feature (1)..(25): SEQ ID NO: 7593; WAN024GJM_at; Start 51; Stop 75
tggtggtgccgtgatttccaatctt

SEQ ID NO: 248204 - DNA, 25 bp, Artificial
  probe
  misc_feature (1)..(25): SEQ ID NO: 7593; WAN024GJM_at; Start 49; Stop 73
gatggtggtgccgtgatttccaatc

SEQ ID NO: 248205 - DNA, 25 bp, Artificial
  probe
  misc_feature (1)..(25): SEQ ID NO: 7593; WAN024GJM_at; Start 15; Stop 39
taggagtttgatcaatactctgaag

SEQ ID NO: 248206 - DNA, 25 bp, Artificial
  probe
  misc_feature (1)..(25): SEQ ID NO: 7593; WAN024GJM_at; Start 22; Stop 46
ttgatcaatactctgaagttggccg

SEQ ID NO: 248207 - DNA, 25 bp, Artificial
  probe
  misc_feature (1)..(25): SEQ ID NO: 7593; WAN024GJM_at; Start 23; Stop 47
tgatcaatactctgaagttggccga

SEQ ID NO: 248208 - DNA, 25 bp, Artificial
  probe
  misc_feature (1)..(25): SEQ ID NO: 5449; WAN024GJN_at; Start 18; Stop 42
ccttcaaattcgctgttcagatgaa

SEQ ID NO: 248209 - DNA, 25 bp, Artificial
  probe
  misc_feature (1)..(25): SEQ ID NO: 5449; WAN024GJN_at; Start 208; Stop 232
tatcataagttgctacacttccgat

SEQ ID NO: 248210 - DNA, 25 bp, Artificial
  probe
  misc_feature (1)..(25): SEQ ID NO: 5449; WAN024GJN_at; Start 97; Stop 121
gatctagttgtacttttaattctgt

SEQ ID NO: 248211 - DNA, 25 bp, Artificial
  probe
  misc_feature (1)..(25): SEQ ID NO: 5449; WAN024GJN_at; Start 13; Stop 37
ttttaccttcaaattcgctgttcag

SEQ ID NO: 248212 - DNA, 25 bp, Artificial
  probe
  misc_feature (1)..(25): SEQ ID NO: 5449; WAN024GJN_at; Start 22; Stop 46
caaattcgctgttcagatgaacgat

SEQ ID NO: 248213 - DNA, 25 bp, Artificial
  probe
  misc_feature (1)..(25): SEQ ID NO: 5449; WAN024GJN_at; Start 228; Stop 252
ccgataccagcttgctgaattttga

SEQ ID NO: 248214 - DNA, 25 bp, Artificial
  probe
  misc_feature (1)..(25): SEQ ID NO: 5449; WAN024GJN_at; Start 221; Stop 245
tacacttccgataccagcttgctga

SEQ ID NO: 248215 - DNA, 25 bp, Artificial
  probe
  misc_feature (1)..(25): SEQ ID NO: 5449; WAN024GJN_at; Start 171; Stop 195
tgagtgcggagtacttcaattttgg

SEQ ID NO: 248216 - DNA, 25 bp, Artificial
  probe
  misc_feature (1)..(25): SEQ ID NO: 5449; WAN024GJN_at; Start 210; Stop 234
tcataagttgctacacttccgatac

SEQ ID NO: 248217 - DNA, 25 bp, Artificial
  probe
  misc_feature (1)..(25): SEQ ID NO: 5449; WAN024GJN_at; Start 28; Stop 52
cgctgttcagatgaacgataccttt

SEQ ID NO: 248218 - DNA, 25 bp, Artificial
  probe
  misc_feature (1)..(25): SEQ ID NO: 5449; WAN024GJN_at; Start 215; Stop 239
agttgctacacttccgataccagct

SEQ ID NO: 248219 - DNA, 25 bp, Artificial
  probe
  misc_feature (1)..(25): SEQ ID NO: 5449; WAN024GJN_at; Start 20; Stop 44
ttcaaattcgctgttcagatgaacg

SEQ ID NO: 248220 - DNA, 25 bp, Artificial
  probe
  misc_feature (1)..(25): SEQ ID NO: 5449; WAN024GJN_at; Start 16; Stop 40
taccttcaaattcgctgttcagatg

SEQ ID NO: 248221 - DNA, 25 bp, Artificial
  probe
  misc_feature (1)..(25): SEQ ID NO: 5449; WAN024GJN_at; Start 222; Stop 246
acacttccgataccagcttgctgaa

SEQ ID NO: 248222 - DNA, 25 bp, Artificial
  probe
  misc_feature (1)..(25): SEQ ID NO: 5449; WAN024GJN_at; Start 14; Stop 38
tttaccttcaaattcgctgttcaga

SEQ ID NO: 248223 - DNA, 25 bp, Artificial
  probe
  misc_feature (1)..(25): SEQ ID NO: 5449; WAN024GJN_at; Start 34; Stop 58
tcagatgaacgatacctttacttgg

SEQ ID NO: 248224 - DNA, 25 bp, Artificial
  probe
  misc_feature (1)..(25): SEQ ID NO: 5449; WAN024GJN_at; Start 219; Stop 243
gctacacttccgataccagcttgct

SEQ ID NO: 248225 - DNA, 25 bp, Artificial
  probe
  misc_feature (1)..(25): SEQ ID NO: 5449; WAN024GJN_at; Start 24; Stop 48
aattcgctgttcagatgaacgatac

SEQ ID NO: 248226 - DNA, 25 bp, Artificial
  probe
  misc_feature (1)..(25): SEQ ID NO: 5449; WAN024GJN_at; Start 31; Stop 55
tgttcagatgaacgatacctttact

SEQ ID NO: 248227 - DNA, 25 bp, Artificial
  probe
  misc_feature (1)..(25): SEQ ID NO: 5449; WAN024GJN_at; Start 214; Stop 238
aagttgctacacttccgataccagc

SEQ ID NO: 248228 - DNA, 25 bp, Artificial
  probe
  misc_feature (1)..(25): SEQ ID NO: 5449; WAN024GJN_at; Start 225; Stop 249
cttccgataccagcttgctgaattt

SEQ ID NO: 248229 - DNA, 25 bp, Artificial
  probe
  misc_feature (1)..(25): SEQ ID NO: 5449; WAN024GJN_at; Start 21; Stop 45
tcaaattcgctgttcagatgaacga

SEQ ID NO: 248230 - DNA, 25 bp, Artificial
  probe
  misc_feature (1)..(25): SEQ ID NO: 5449; WAN024GJN_at; Start 29; Stop 53
gctgttcagatgaacgataccttta

SEQ ID NO: 248231 - DNA, 25 bp, Artificial
  probe
  misc_feature (1)..(25): SEQ ID NO: 5449; WAN024GJN_at; Start 27; Stop 51
tcgctgttcagatgaacgatacctt

SEQ ID NO: 248232 - DNA, 25 bp, Artificial
  probe
  misc_feature (1)..(25): SEQ ID NO: 5449; WAN024GJN_at; Start 216; Stop 240
gttgctacacttccgataccagctt

SEQ ID NO: 248233 - DNA, 25 bp, Artificial
  probe
  misc_feature (1)..(25): SEQ ID NO: 5449; WAN024GJN_at; Start 8; Stop 32
tctatttttaccttcaaattcgctg

SEQ ID NO: 248234 - DNA, 25 bp, Artificial
  probe
  misc_feature (1)..(25): SEQ ID NO: 5449; WAN024GJN_at; Start 32; Stop 56
gttcagatgaacgatacctttactt

SEQ ID NO: 248235 - DNA, 25 bp, Artificial
  probe
  misc_feature (1)..(25): SEQ ID NO: 5449; WAN024GJN_at; Start 211; Stop 235
cataagttgctacacttccgatacc

SEQ ID NO: 248236 - DNA, 25 bp, Artificial
  probe
  misc_feature (1)..(25): SEQ ID NO: 5449; WAN024GJN_at; Start 207; Stop 231
ttatcataagttgctacacttccga

SEQ ID NO: 248237 - DNA, 25 bp, Artificial
  probe
  misc_feature (1)..(25): SEQ ID NO: 5449; WAN024GJN_at; Start 93; Stop 117
gcttgatctagttgtacttttaatt

SEQ ID NO: 248238 - DNA, 25 bp, Artificial
  probe
  misc_feature (1)..(25): SEQ ID NO: 5449; WAN024GJN_at; Start 213; Stop 237
taagttgctacacttccgataccag

SEQ ID NO: 248239 - DNA, 25 bp, Artificial
  probe
  misc_feature (1)..(25): SEQ ID NO: 5449; WAN024GJN_at; Start 26; Stop 50
ttcgctgttcagatgaacgatacct

SEQ ID NO: 248240 - DNA, 25 bp, Artificial
  probe
  misc_feature (1)..(25): SEQ ID NO: 5449; WAN024GJN_at; Start 223; Stop 247
cacttccgataccagcttgctgaat

SEQ ID NO: 248241 - DNA, 25 bp, Artificial
  probe
  misc_feature (1)..(25): SEQ ID NO: 5449; WAN024GJN_at; Start 227; Stop 251
tccgataccagcttgctgaattttg

SEQ ID NO: 248242 - DNA, 25 bp, Artificial
  probe
  misc_feature (1)..(25): SEQ ID NO: 1233; WAN024GJO_at; Start 39; Stop 63
gagacgttaccataactatgcgaca

SEQ ID NO: 248243 - DNA, 25 bp, Artificial
  probe
  misc_feature (1)..(25): SEQ ID NO: 1233; WAN024GJO_at; Start 1111; Stop 1135
caaactgtaagattaaaactggaga

SEQ ID NO: 248244 - DNA, 25 bp, Artificial
  probe
  misc_feature (1)..(25): SEQ ID NO: 1233; WAN024GJO_at; Start 890; Stop 914
aattaaaagtacaactagatcaagc

SEQ ID NO: 248245 - DNA, 25 bp, Artificial
  probe
  misc_feature (1)..(25): SEQ ID NO: 1233; WAN024GJO_at; Start 967; Stop 991
catctgaacagcgaatttgaaggta

SEQ ID NO: 248246 - DNA, 25 bp, Artificial
  probe
  misc_feature (1)..(25): SEQ ID NO: 1233; WAN024GJO_at; Start 776; Stop 800
tcggaagtgtagcaacttatgataa

SEQ ID NO: 248247 - DNA, 25 bp, Artificial
  probe
  misc_feature (1)..(25): SEQ ID NO: 1233; WAN024GJO_at; Start 361; Stop 385
caaagcttagaaaaagcgactgatc

SEQ ID NO: 248248 - DNA, 25 bp, Artificial
  probe
  misc_feature (1)..(25): SEQ ID NO: 1233; WAN024GJO_at; Start 26; Stop 50
tcgagttttatcagagacgttacca

SEQ ID NO: 248249 - DNA, 25 bp, Artificial
  probe
  misc_feature (1)..(25): SEQ ID NO: 1233; WAN024GJO_at; Start 1255; Stop 1279
gatagtaaactcatccaatatggct

SEQ ID NO: 248250 - DNA, 25 bp, Artificial
  probe
  misc_feature (1)..(25): SEQ ID NO: 1233; WAN024GJO_at; Start 1281; Stop 1305
acaaggtcgcgtcactagtgtaact

SEQ ID NO: 248251 - DNA, 25 bp, Artificial
  probe
  misc_feature (1)..(25): SEQ ID NO: 1233; WAN024GJO_at; Start 1052; Stop 1076
gagaagtactaatcacttactacgt

SEQ ID NO: 248252 - DNA, 25 bp, Artificial
  probe
  misc_feature (1)..(25): SEQ ID NO: 1233; WAN024GJO_at; Start 429; Stop 453
gaattttactaaacaatcccatgat

SEQ ID NO: 248253 - DNA, 25 bp, Artificial
  probe
  misc_feature (1)..(25): SEQ ID NO: 1233; WAN024GJO_at; Start 104; Stop 128
tgattttctcccttgttgccacaaa

SEQ ID NO: 248254 - DNA, 25 bp, Artificial
  probe
  misc_feature (1)..(25): SEQ ID NO: 1233; WAN024GJO_at; Start 746; Stop 770
tcgcaagcctcaaaattcagcaagc

SEQ ID NO: 248255 - DNA, 25 bp, Artificial
  probe
  misc_feature (1)..(25): SEQ ID NO: 1233; WAN024GJO_at; Start 709; Stop 733
caaattaatcaaagtattgcaggtc

SEQ ID NO: 248256 - DNA, 25 bp, Artificial
  probe
  misc_feature (1)..(25): SEQ ID NO: 1233; WAN024GJO_at; Start 949; Stop 973
ccaagtaaaggtatcgttcatctga

SEQ ID NO: 248257 - DNA, 25 bp, Artificial
  probe
  misc_feature (1)..(25): SEQ ID NO: 1233; WAN024GJO_at; Start 553; Stop 577
caacaacaaattggagaatatcaag

SEQ ID NO: 248258 - DNA, 25 bp, Artificial
  probe
  misc_feature (1)..(25): SEQ ID NO: 1233; WAN024GJO_at; Start 990; Stop 1014
taaaaatagaattccaactggtaca

SEQ ID NO: 248259 - DNA, 25 bp, Artificial
  probe
  misc_feature (1)..(25): SEQ ID NO: 1233; WAN024GJO_at; Start 593; Stop 617
tcataaataacagagcacgcttacc

SEQ ID NO: 248260 - DNA, 25 bp, Artificial
  probe
  misc_feature (1)..(25): SEQ ID NO: 1233; WAN024GJO_at; Start 1003; Stop 1027
ccaactggtacagaaattgctcaaa

SEQ ID NO: 248261 - DNA, 25 bp, Artificial
  probe
  misc_feature (1)..(25): SEQ ID NO: 1233; WAN024GJO_at; Start 812; Stop 836
ccaaaattgaagtactccgcactca

SEQ ID NO: 248262 - DNA, 25 bp, Artificial
  probe
  misc_feature (1)..(25): SEQ ID NO: 1233; WAN024GJO_at; Start 1182; Stop 1206
tgatcaaactcctaccagaacagag

SEQ ID NO: 248263 - DNA, 25 bp, Artificial
  probe
  misc_feature (1)..(25): SEQ ID NO: 1233; WAN024GJO_at; Start 1226; Stop 1250
taaccgctcttgcaaaactatctaa

SEQ ID NO: 248264 - DNA, 25 bp, Artificial
  probe
  misc_feature (1)..(25): SEQ ID NO: 1233; WAN024GJO_at; Start 214; Stop 238
gctaatcatttagtggcaaatcaag

SEQ ID NO: 248265 - DNA, 25 bp, Artificial
  probe
  misc_feature (1)..(25): SEQ ID NO: 1233; WAN024GJO_at; Start 117; Stop 141
tgttgccacaaaagaaattactgtt

SEQ ID NO: 248266 - DNA, 25 bp, Artificial
  probe
  misc_feature (1)..(25): SEQ ID NO: 1233; WAN024GJO_at; Start 1097; Stop 1121
tactagataaaggacaaactgtaag

SEQ ID NO: 248267 - DNA, 25 bp, Artificial
  probe
  misc_feature (1)..(25): SEQ ID NO: 1233; WAN024GJO_at; Start 442; Stop 466
caatcccatgatattgaactgggta

SEQ ID NO: 248268 - DNA, 25 bp, Artificial
  probe
  misc_feature (1)..(25): SEQ ID NO: 1233; WAN024GJO_at; Start 688; Stop 712
gcagaggagccatttttatctcaaa

SEQ ID NO: 248269 - DNA, 25 bp, Artificial
  probe
  misc_feature (1)..(25): SEQ ID NO: 1233; WAN024GJO_at; Start 1216; Stop 1240
ctctttaaattaaccgctcttgcaa

SEQ ID NO: 248270 - DNA, 25 bp, Artificial
  probe
  misc_feature (1)..(25): SEQ ID NO: 1233; WAN024GJO_at; Start 581; Stop 605
tgagagatgctatcataaataacag

SEQ ID NO: 248271 - DNA, 25 bp, Artificial
  probe
  misc_feature (1)..(25): SEQ ID NO: 1233; WAN024GJO_at; Start 1128; Stop 1152
actggagaagattggaaatcacggc

SEQ ID NO: 248272 - DNA, 25 bp, Artificial
  probe
  misc_feature (1)..(25): SEQ ID NO: 1233; WAN024GJO_at; Start 1270; Stop 1294
caatatggcttacaaggtcgcgtca

SEQ ID NO: 248273 - DNA, 25 bp, Artificial
  probe
  misc_feature (1)..(25): SEQ ID NO: 1233; WAN024GJO_at; Start 1037; Stop 1061
tcatcacagatacaagagaagtact

SEQ ID NO: 248274 - DNA, 25 bp, Artificial
  probe
  misc_feature (1)..(25): SEQ ID NO: 1233; WAN024GJO_at; Start 154; Stop 178
gaaatcgcccctacaagtgtcattg

SEQ ID NO: 248275 - DNA, 25 bp, Artificial
  probe
  misc_feature (1)..(25): SEQ ID NO: 1233; WAN024GJO_at; Start 762; Stop 786
tcagcaagctggtatcggaagtgta

SEQ ID NO: 248276 - DNA, 25 bp, Artificial
  probe
  misc_feature (1)..(25): SEQ ID NO: 7564; WAN024GJP_at; Start 56; Stop 80
tagagggccagcaactggaagagca

SEQ ID NO: 248277 - DNA, 25 bp, Artificial
  probe
  misc_feature (1)..(25): SEQ ID NO: 7564; WAN024GJP_at; Start 63; Stop 87
ccagcaactggaagagcaagaggta

SEQ ID NO: 248278 - DNA, 25 bp, Artificial
  probe
  misc_feature (1)..(25): SEQ ID NO: 7564; WAN024GJP_at; Start 31; Stop 55
caaatactggtagtcaaaggcatga

SEQ ID NO: 248279 - DNA, 25 bp, Artificial
  probe
  misc_feature (1)..(25): SEQ ID NO: 7564; WAN024GJP_at; Start 22; Stop 46
gagttgggtcaaatactggtagtca

SEQ ID NO: 248280 - DNA, 25 bp, Artificial
  probe
  misc_feature (1)..(25): SEQ ID NO: 7564; WAN024GJP_at; Start 135; Stop 159
aaacctgcgccagcaaggaaagcaa

SEQ ID NO: 248281 - DNA, 25 bp, Artificial
  probe
  misc_feature (1)..(25): SEQ ID NO: 7564; WAN024GJP_at; Start 174; Stop 198
tgagagcaaagaggtcgccatttcg

SEQ ID NO: 248282 - DNA, 25 bp, Artificial
  probe
  misc_feature (1)..(25): SEQ ID NO: 7564; WAN024GJP_at; Start 89; Stop 113
ttaaagagaactaccactgctgtcg

SEQ ID NO: 248283 - DNA, 25 bp, Artificial
  probe
  misc_feature (1)..(25): SEQ ID NO: 7564; WAN024GJP_at; Start 92; Stop 116
aagagaactaccactgctgtcgcaa

SEQ ID NO: 248284 - DNA, 25 bp, Artificial
  probe
  misc_feature (1)..(25): SEQ ID NO: 7564; WAN024GJP_at; Start 206; Stop 230
gaacgcagatagagattttgccaaa

SEQ ID NO: 248285 - DNA, 25 bp, Artificial
  probe
  misc_feature (1)..(25): SEQ ID NO: 7564; WAN024GJP_at; Start 41; Stop 65
tagtcaaaggcatgatagagggcca

SEQ ID NO: 248286 - DNA, 25 bp, Artificial
  probe
  misc_feature (1)..(25): SEQ ID NO: 7564; WAN024GJP_at; Start 197; Stop 221
cgcagataagaacgcagatagagat

SEQ ID NO: 248287 - DNA, 25 bp, Artificial
  probe
  misc_feature (1)..(25): SEQ ID NO: 7564; WAN024GJP_at; Start 67; Stop 91
caactggaagagcaagaggtagtta

SEQ ID NO: 248288 - DNA, 25 bp, Artificial
  probe
  misc_feature (1)..(25): SEQ ID NO: 7564; WAN024GJP_at; Start 100; Stop 124
taccactgctgtcgcaatccaagct

SEQ ID NO: 248289 - DNA, 25 bp, Artificial
  probe
  misc_feature (1)..(25): SEQ ID NO: 7564; WAN024GJP_at; Start 45; Stop 69
caaaggcatgatagagggccagcaa

SEQ ID NO: 248290 - DNA, 25 bp, Artificial
  probe
  misc_feature (1)..(25): SEQ ID NO: 7564; WAN024GJP_at; Start 162; Stop 186
gaagacgaagactgagagcaaagag

SEQ ID NO: 248291 - DNA, 25 bp, Artificial
  probe
  misc_feature (1)..(25): SEQ ID NO: 7564; WAN024GJP_at; Start 107; Stop 131
gctgtcgcaatccaagcttgctcga

SEQ ID NO: 248292 - DNA, 25 bp, Artificial
  probe
  misc_feature (1)..(25): SEQ ID NO: 7564; WAN024GJP_at; Start 157; Stop 181
caagagaagacgaagactgagagca

SEQ ID NO: 248293 - DNA, 25 bp, Artificial
  probe
  misc_feature (1)..(25): SEQ ID NO: 7564; WAN024GJP_at; Start 229; Stop 253
aatcttcccaggcaccttctgaaca

SEQ ID NO: 248294 - DNA, 25 bp, Artificial
  probe
  misc_feature (1)..(25): SEQ ID NO: 7564; WAN024GJP_at; Start 169; Stop 193
aagactgagagcaaagaggtcgcca

SEQ ID NO: 248295 - DNA, 25 bp, Artificial
  probe
  misc_feature (1)..(25): SEQ ID NO: 7564; WAN024GJP_at; Start 1; Stop 25
ttgccccttgtccagcggaaagagt

SEQ ID NO: 248296 - DNA, 25 bp, Artificial
  probe
  misc_feature (1)..(25): SEQ ID NO: 7564; WAN024GJP_at; Start 147; Stop 171
gcaaggaaagcaagagaagacgaag

SEQ ID NO: 248297 - DNA, 25 bp, Artificial
  probe
  misc_feature (1)..(25): SEQ ID NO: 7564; WAN024GJP_at; Start 28; Stop 52
ggtcaaatactggtagtcaaaggca

SEQ ID NO: 248298 - DNA, 25 bp, Artificial
  probe
  misc_feature (1)..(25): SEQ ID NO: 7564; WAN024GJP_at; Start 7; Stop 31
cttgtccagcggaaagagttgggtc

SEQ ID NO: 248299 - DNA, 25 bp, Artificial
  probe
  misc_feature (1)..(25): SEQ ID NO: 7564; WAN024GJP_at; Start 75; Stop 99
agagcaagaggtagttaaagagaac

SEQ ID NO: 248300 - DNA, 25 bp, Artificial
  probe
  misc_feature (1)..(25): SEQ ID NO: 7564; WAN024GJP_at; Start 184; Stop 208
gaggtcgccatttcgcagataagaa

SEQ ID NO: 248301 - DNA, 25 bp, Artificial
  probe
  misc_feature (1)..(25): SEQ ID NO: 7564; WAN024GJP_at; Start 117; Stop 141
tccaagcttgctcgataaaaacctg

SEQ ID NO: 248302 - DNA, 25 bp, Artificial
  probe
  misc_feature (1)..(25): SEQ ID NO: 7564; WAN024GJP_at; Start 219; Stop 243
gattttgccaaatcttcccaggcac

SEQ ID NO: 248303 - DNA, 25 bp, Artificial
  probe
  misc_feature (1)..(25): SEQ ID NO: 7564; WAN024GJP_at; Start 122; Stop 146
gcttgctcgataaaaacctgcgcca

SEQ ID NO: 248304 - DNA, 25 bp, Artificial
  probe
  misc_feature (1)..(25): SEQ ID NO: 7564; WAN024GJP_at; Start 237; Stop 261
caggcaccttctgaacagcctttaa

SEQ ID NO: 248305 - DNA, 25 bp, Artificial
  probe
  misc_feature (1)..(25): SEQ ID NO: 7564; WAN024GJP_at; Start 13; Stop 37
cagcggaaagagttgggtcaaatac

SEQ ID NO: 248306 - DNA, 25 bp, Artificial
  probe
  misc_feature (1)..(25): SEQ ID NO: 7564; WAN024GJP_at; Start 180; Stop 204
caaagaggtcgccatttcgcagata

SEQ ID NO: 248307 - DNA, 25 bp, Artificial
  probe
  misc_feature (1)..(25): SEQ ID NO: 7564; WAN024GJP_at; Start 190; Stop 214
gccatttcgcagataagaacgcaga

SEQ ID NO: 248308 - DNA, 25 bp, Artificial
  probe
  misc_feature (1)..(25): SEQ ID NO: 7564; WAN024GJP_at; Start 128; Stop 152
tcgataaaaacctgcgccagcaagg

SEQ ID NO: 248309 - DNA, 25 bp, Artificial
  probe
  misc_feature (1)..(25): SEQ ID NO: 7564; WAN024GJP_at; Start 203; Stop 227
taagaacgcagatagagattttgcc

SEQ ID NO: 248310 - DNA, 25 bp, Artificial
  probe
  misc_feature (1)..(25): SEQ ID NO: 882; WAN024GJQ_at; Start 508; Stop 532
gaaagcaagcgtaagcaagtcttgc

SEQ ID NO: 248311 - DNA, 25 bp, Artificial
  probe
  misc_feature (1)..(25): SEQ ID NO: 882; WAN024GJQ_at; Start 150; Stop 174
tcctgaaaatcattggcctatcctt

SEQ ID NO: 248312 - DNA, 25 bp, Artificial
  probe
  misc_feature (1)..(25): SEQ ID NO: 882; WAN024GJQ_at; Start 1014; Stop 1038
tttgccttatcaggtaaaacgtcag

SEQ ID NO: 248313 - DNA, 25 bp, Artificial
  probe
  misc_feature (1)..(25): SEQ ID NO: 882; WAN024GJQ_at; Start 639; Stop 663
gatttggcaaaatctctatctgcgt

SEQ ID NO: 248314 - DNA, 25 bp, Artificial
  probe
  misc_feature (1)..(25): SEQ ID NO: 882; WAN024GJQ_at; Start 93; Stop 117
cctgcttgtcctgttgggctttcta

SEQ ID NO: 248315 - DNA, 25 bp, Artificial
  probe
  misc_feature (1)..(25): SEQ ID NO: 882; WAN024GJQ_at; Start 23; Stop 47
gaaagcaggcctttcgtaaggagtg

SEQ ID NO: 248316 - DNA, 25 bp, Artificial
  probe
  misc_feature (1)..(25): SEQ ID NO: 882; WAN024GJQ_at; Start 758; Stop 782
cgacagcagtggtagttctctttaa

SEQ ID NO: 248317 - DNA, 25 bp, Artificial
  probe
  misc_feature (1)..(25): SEQ ID NO: 882; WAN024GJQ_at; Start 799; Stop 823
cagttgctggccctctatcatgcct

SEQ ID NO: 248318 - DNA, 25 bp, Artificial
  probe
  misc_feature (1)..(25): SEQ ID NO: 882; WAN024GJQ_at; Start 932; Stop 956
tagttgttgggttgattaccttcca

SEQ ID NO: 248319 - DNA, 25 bp, Artificial
  probe
  misc_feature (1)..(25): SEQ ID NO: 882; WAN024GJQ_at; Start 1028; Stop 1052
taaaacgtcagatgcaggactaact

SEQ ID NO: 248320 - DNA, 25 bp, Artificial
  probe
  misc_feature (1)..(25): SEQ ID NO: 882; WAN024GJQ_at; Start 819; Stop 843
tgcctttgactaccagtatttgacc

SEQ ID NO: 248321 - DNA, 25 bp, Artificial
  probe
  misc_feature (1)..(25): SEQ ID NO: 882; WAN024GJQ_at; Start 973; Stop 997
ctagccttactaggagctggtttgg

SEQ ID NO: 248322 - DNA, 25 bp, Artificial
  probe
  misc_feature (1)..(25): SEQ ID NO: 882; WAN024GJQ_at; Start 370; Stop 394
ttagcaatgggttatggcttgccag

SEQ ID NO: 248323 - DNA, 25 bp, Artificial
  probe
  misc_feature (1)..(25): SEQ ID NO: 882; WAN024GJQ_at; Start 301; Stop 325
actggcatttccctagtcttttggc

SEQ ID NO: 248324 - DNA, 25 bp, Artificial
  probe
  misc_feature (1)..(25): SEQ ID NO: 882; WAN024GJQ_at; Start 336; Stop 360
gacccttttcttgctgttatttgcg

SEQ ID NO: 248325 - DNA, 25 bp, Artificial
  probe
  misc_feature (1)..(25): SEQ ID NO: 882; WAN024GJQ_at; Start 286; Stop 310
catctcaagcgtcaaactggcattt

SEQ ID NO: 248326 - DNA, 25 bp, Artificial
  probe
  misc_feature (1)..(25): SEQ ID NO: 882; WAN024GJQ_at; Start 76; Stop 100
gaccactttgtcttgttcctgcttg

SEQ ID NO: 248327 - DNA, 25 bp, Artificial
  probe
  misc_feature (1)..(25): SEQ ID NO: 882; WAN024GJQ_at; Start 835; Stop 859
tatttgacccaactctttccgctgg

SEQ ID NO: 248328 - DNA, 25 bp, Artificial
  probe
  misc_feature (1)..(25): SEQ ID NO: 882; WAN024GJQ_at; Start 667; Stop 691
tatctgcgaaatggcgacctctttg

SEQ ID NO: 248329 - DNA, 25 bp, Artificial
  probe
  misc_feature (1)..(25): SEQ ID NO: 882; WAN024GJQ_at; Start 385; Stop 409
ggcttgccagtttttctgctctatg

SEQ ID NO: 248330 - DNA, 25 bp, Artificial
  probe
  misc_feature (1)..(25): SEQ ID NO: 882; WAN024GJQ_at; Start 252; Stop 276
ctttctcttagttggagaagaggaa

SEQ ID NO: 248331 - DNA, 25 bp, Artificial
  probe
  misc_feature (1)..(25): SEQ ID NO: 882; WAN024GJQ_at; Start 726; Stop 750
ggcgcaggtttttatcgagcaagct

SEQ ID NO: 248332 - DNA, 25 bp, Artificial
  probe
  misc_feature (1)..(25): SEQ ID NO: 882; WAN024GJQ_at; Start 784; Stop 808
tacctcttgctcttccagttgctgg

SEQ ID NO: 248333 - DNA, 25 bp, Artificial
  probe
  misc_feature (1)..(25): SEQ ID NO: 882; WAN024GJQ_at; Start 317; Stop 341
tcttttggctctttgtacagaccct

SEQ ID NO: 248334 - DNA, 25 bp, Artificial
  probe
  misc_feature (1)..(25): SEQ ID NO: 882; WAN024GJQ_at; Start 892; Stop 916
gtagttcgaggattgaccagttttg

SEQ ID NO: 248335 - DNA, 25 bp, Artificial
  probe
  misc_feature (1)..(25): SEQ ID NO: 882; WAN024GJQ_at; Start 657; Stop 681
tctgcgttcttatctgcgaaatggc

SEQ ID NO: 248336 - DNA, 25 bp, Artificial
  probe
  misc_feature (1)..(25): SEQ ID NO: 882; WAN024GJQ_at; Start 877; Stop 901
aaaggcttacaggaggtagttcgag

SEQ ID NO: 248337 - DNA, 25 bp, Artificial
  probe
  misc_feature (1)..(25): SEQ ID NO: 882; WAN024GJQ_at; Start 121; Stop 145
taccagtacagtcaactcttacaac

SEQ ID NO: 248338 - DNA, 25 bp, Artificial
  probe
  misc_feature (1)..(25): SEQ ID NO: 882; WAN024GJQ_at; Start 55; Stop 79
tatctgcgctatgtgctcaatgacc

SEQ ID NO: 248339 - DNA, 25 bp, Artificial
  probe
  misc_feature (1)..(25): SEQ ID NO: 882; WAN024GJQ_at; Start 108; Stop 132
gggctttctagcctaccagtacagt

SEQ ID NO: 248340 - DNA, 25 bp, Artificial
  probe
  misc_feature (1)..(25): SEQ ID NO: 882; WAN024GJQ_at; Start 535; Stop 559
cgtttctttgccctctttacgcagg

SEQ ID NO: 248341 - DNA, 25 bp, Artificial
  probe
  misc_feature (1)..(25): SEQ ID NO: 882; WAN024GJQ_at; Start 222; Stop 246
tgccacctatatggaggctccagac

SEQ ID NO: 248342 - DNA, 25 bp, Artificial
  probe
  misc_feature (1)..(25): SEQ ID NO: 882; WAN024GJQ_at; Start 741; Stop 765
cgagcaagcttggattgcgacagca

SEQ ID NO: 248343 - DNA, 25 bp, Artificial
  probe
  misc_feature (1)..(25): SEQ ID NO: 882; WAN024GJQ_at; Start 233; Stop 257
tggaggctccagacaagctctttct

SEQ ID NO: 248344 - DNA, 25 bp, Artificial
  probe
  misc_feature (1)..(25): SEQ ID NO: 5311; WAN024GJR_at; Start 201; Stop 225
ttggatccaccacaaaagcacagat

SEQ ID NO: 248345 - DNA, 25 bp, Artificial
  probe
  misc_feature (1)..(25): SEQ ID NO: 5311; WAN024GJR_at; Start 203; Stop 227
ggatccaccacaaaagcacagataa

SEQ ID NO: 248346 - DNA, 25 bp, Artificial
  probe
  misc_feature (1)..(25): SEQ ID NO: 5311; WAN024GJR_at; Start 210; Stop 234
ccacaaaagcacagataatcatgac

SEQ ID NO: 248347 - DNA, 25 bp, Artificial
  probe
  misc_feature (1)..(25): SEQ ID NO: 5311; WAN024GJR_at; Start 45; Stop 69
tgacaaaggcatcacacatcttctc

SEQ ID NO: 248348 - DNA, 25 bp, Artificial
  probe
  misc_feature (1)..(25): SEQ ID NO: 5311; WAN024GJR_at; Start 31; Stop 55
tcccttgtgaagaatgacaaaggca

SEQ ID NO: 248349 - DNA, 25 bp, Artificial
  probe
  misc_feature (1)..(25): SEQ ID NO: 5311; WAN024GJR_at; Start 170; Stop 194
ccaaggaaaggctcatccacgatga

SEQ ID NO: 248350 - DNA, 25 bp, Artificial
  probe
  misc_feature (1)..(25): SEQ ID NO: 5311; WAN024GJR_at; Start 23; Stop 47
cgcacctctcccttgtgaagaatga

SEQ ID NO: 248351 - DNA, 25 bp, Artificial
  probe
  misc_feature (1)..(25): SEQ ID NO: 5311; WAN024GJR_at; Start 153; Stop 177
tagccagcggatcaagaccaaggaa

SEQ ID NO: 248352 - DNA, 25 bp, Artificial
  probe
  misc_feature (1)..(25): SEQ ID NO: 5311; WAN024GJR_at; Start 97; Stop 121
gagaatagacttgcccttttgcttc

SEQ ID NO: 248353 - DNA, 25 bp, Artificial
  probe
  misc_feature (1)..(25): SEQ ID NO: 5311; WAN024GJR_at; Start 71; Stop 95
gccgaatccagcacgtgggtactca

SEQ ID NO: 248354 - DNA, 25 bp, Artificial
  probe
  misc_feature (1)..(25): SEQ ID NO: 5311; WAN024GJR_at; Start 82; Stop 106
cacgtgggtactcatgagaatagac

SEQ ID NO: 248355 - DNA, 25 bp, Artificial
  probe
  misc_feature (1)..(25): SEQ ID NO: 5311; WAN024GJR_at; Start 157; Stop 181
cagcggatcaagaccaaggaaaggc

SEQ ID NO: 248356 - DNA, 25 bp, Artificial
  probe
  misc_feature (1)..(25): SEQ ID NO: 5311; WAN024GJR_at; Start 187; Stop 211
cacgatgaaaagacttggatccacc

SEQ ID NO: 248357 - DNA, 25 bp, Artificial
  probe
  misc_feature (1)..(25): SEQ ID NO: 5311; WAN024GJR_at; Start 79; Stop 103
cagcacgtgggtactcatgagaata

SEQ ID NO: 248358 - DNA, 25 bp, Artificial
  probe
  misc_feature (1)..(25): SEQ ID NO: 5311; WAN024GJR_at; Start 104; Stop 128
gacttgcccttttgcttctccactt

SEQ ID NO: 248359 - DNA, 25 bp, Artificial
  probe
  misc_feature (1)..(25): SEQ ID NO: 5311; WAN024GJR_at; Start 193; Stop 217
gaaaagacttggatccaccacaaaa

SEQ ID NO: 248360 - DNA, 25 bp, Artificial
  probe
  misc_feature (1)..(25): SEQ ID NO: 5311; WAN024GJR_at; Start 137; Stop 161
tgaatcaaatcagaaatagccagcg

SEQ ID NO: 248361 - DNA, 25 bp, Artificial
  probe
  misc_feature (1)..(25): SEQ ID NO: 5311; WAN024GJR_at; Start 218; Stop 242
gcacagataatcatgaccttctgct

SEQ ID NO: 248362 - DNA, 25 bp, Artificial
  probe
  misc_feature (1)..(25): SEQ ID NO: 5311; WAN024GJR_at; Start 47; Stop 71
acaaaggcatcacacatcttctccg

SEQ ID NO: 248363 - DNA, 25 bp, Artificial
  probe
  misc_feature (1)..(25): SEQ ID NO: 5311; WAN024GJR_at; Start 141; Stop 165
tcaaatcagaaatagccagcggatc

SEQ ID NO: 248364 - DNA, 25 bp, Artificial
  probe
  misc_feature (1)..(25): SEQ ID NO: 5311; WAN024GJR_at; Start 74; Stop 98
gaatccagcacgtgggtactcatga

SEQ ID NO: 248365 - DNA, 25 bp, Artificial
  probe
  misc_feature (1)..(25): SEQ ID NO: 5311; WAN024GJR_at; Start 190; Stop 214
gatgaaaagacttggatccaccaca

SEQ ID NO: 248366 - DNA, 25 bp, Artificial
  probe
  misc_feature (1)..(25): SEQ ID NO: 5311; WAN024GJR_at; Start 65; Stop 89
ttctccgccgaatccagcacgtggg

SEQ ID NO: 248367 - DNA, 25 bp, Artificial
  probe
  misc_feature (1)..(25): SEQ ID NO: 5311; WAN024GJR_at; Start 160; Stop 184
cggatcaagaccaaggaaaggctca

SEQ ID NO: 248368 - DNA, 25 bp, Artificial
  probe
  misc_feature (1)..(25): SEQ ID NO: 5311; WAN024GJR_at; Start 88; Stop 112
ggtactcatgagaatagacttgccc

SEQ ID NO: 248369 - DNA, 25 bp, Artificial
  probe
  misc_feature (1)..(25): SEQ ID NO: 5311; WAN024GJR_at; Start 27; Stop 51
cctctcccttgtgaagaatgacaaa

SEQ ID NO: 248370 - DNA, 25 bp, Artificial
  probe
  misc_feature (1)..(25): SEQ ID NO: 5311; WAN024GJR_at; Start 175; Stop 199
gaaaggctcatccacgatgaaaaga

SEQ ID NO: 248371 - DNA, 25 bp, Artificial
  probe
  misc_feature (1)..(25): SEQ ID NO: 5311; WAN024GJR_at; Start 147; Stop 171
cagaaatagccagcggatcaagacc

SEQ ID NO: 248372 - DNA, 25 bp, Artificial
  probe
  misc_feature (1)..(25): SEQ ID NO: 5311; WAN024GJR_at; Start 164; Stop 188
tcaagaccaaggaaaggctcatcca

SEQ ID NO: 248373 - DNA, 25 bp, Artificial
  probe
  misc_feature (1)..(25): SEQ ID NO: 5311; WAN024GJR_at; Start 150; Stop 174
aaatagccagcggatcaagaccaag

SEQ ID NO: 248374 - DNA, 25 bp, Artificial
  probe
  misc_feature (1)..(25): SEQ ID NO: 5311; WAN024GJR_at; Start 120; Stop 144
tctccacttccaaaagctgaatcaa

SEQ ID NO: 248375 - DNA, 25 bp, Artificial
  probe
  misc_feature (1)..(25): SEQ ID NO: 5311; WAN024GJR_at; Start 180; Stop 204
gctcatccacgatgaaaagacttgg

SEQ ID NO: 248376 - DNA, 25 bp, Artificial
  probe
  misc_feature (1)..(25): SEQ ID NO: 5311; WAN024GJR_at; Start 231; Stop 255
tgaccttctgcttcatcccttttga

SEQ ID NO: 248377 - DNA, 25 bp, Artificial
  probe
  misc_feature (1)..(25): SEQ ID NO: 5311; WAN024GJR_at; Start 94; Stop 118
catgagaatagacttgcccttttgc

SEQ ID NO: 248378 - DNA, 25 bp, Artificial
  probe
  misc_feature (1)..(25): SEQ ID NO: 3005; WAN024GJS_at; Start 271; Stop 295
ctcagagagcatatcgaaacggttg

SEQ ID NO: 248379 - DNA, 25 bp, Artificial
  probe
  misc_feature (1)..(25): SEQ ID NO: 3005; WAN024GJS_at; Start 245; Stop 269
cgcctagtctgtatgaggaattgac

SEQ ID NO: 248380 - DNA, 25 bp, Artificial
  probe
  misc_feature (1)..(25): SEQ ID NO: 3005; WAN024GJS_at; Start 1; Stop 25
atgttagaaattaaaaacctgacag

SEQ ID NO: 248381 - DNA, 25 bp, Artificial
  probe
  misc_feature (1)..(25): SEQ ID NO: 3005; WAN024GJS_at; Start 674; Stop 698
tgcctgaggctagtttgaatgatat

SEQ ID NO: 248382 - DNA, 25 bp, Artificial
  probe
  misc_feature (1)..(25): SEQ ID NO: 3005; WAN024GJS_at; Start 552; Stop 576
tattctcatgagtacccacgtgctg

SEQ ID NO: 248383 - DNA, 25 bp, Artificial
  probe
  misc_feature (1)..(25): SEQ ID NO: 3005; WAN024GJS_at; Start 647; Stop 671
tcctgcaactacgtgaagcctttga

SEQ ID NO: 248384 - DNA, 25 bp, Artificial
  probe
  misc_feature (1)..(25): SEQ ID NO: 3005; WAN024GJS_at; Start 444; Stop 468
ggtggatccaagtcttttcatcgtg

SEQ ID NO: 248385 - DNA, 25 bp, Artificial
  probe
  misc_feature (1)..(25): SEQ ID NO: 3005; WAN024GJS_at; Start 326; Stop 350
ctttcgaacgagtagagcccttgtt

SEQ ID NO: 248386 - DNA, 25 bp, Artificial
  probe
  misc_feature (1)..(25): SEQ ID NO: 3005; WAN024GJS_at; Start 227; Stop 251
ttggctacattcctgagacgcctag

SEQ ID NO: 248387 - DNA, 25 bp, Artificial
  probe
  misc_feature (1)..(25): SEQ ID NO: 3005; WAN024GJS_at; Start 400; Stop 424
tcaaaagggatgaagcagaaggtca

SEQ ID NO: 248388 - DNA, 25 bp, Artificial
  probe
  misc_feature (1)..(25): SEQ ID NO: 3005; WAN024GJS_at; Start 601; Stop 625
gcctttgtcattcttcacaagggag

SEQ ID NO: 248389 - DNA, 25 bp, Artificial
  probe
  misc_feature (1)..(25): SEQ ID NO: 3005; WAN024GJS_at; Start 16; Stop 40
aacctgacaggtggctatgttcatg

SEQ ID NO: 248390 - DNA, 25 bp, Artificial
  probe
  misc_feature (1)..(25): SEQ ID NO: 3005; WAN024GJS_at; Start 461; Stop 485
tcatcgtggatgagcctttccttgg

SEQ ID NO: 248391 - DNA, 25 bp, Artificial
  probe
  misc_feature (1)..(25): SEQ ID NO: 3005; WAN024GJS_at; Start 508; Stop 532
gatttgattcagcttttggaagtgg

SEQ ID NO: 248392 - DNA, 25 bp, Artificial
  probe
  misc_feature (1)..(25): SEQ ID NO: 3005; WAN024GJS_at; Start 429; Stop 453
tatctgtgcttttgtggtggatcca

SEQ ID NO: 248393 - DNA, 25 bp, Artificial
  probe
  misc_feature (1)..(25): SEQ ID NO: 3005; WAN024GJS_at; Start 705; Stop 729
ggctctgaccaaagaggaggatcta

SEQ ID NO: 248394 - DNA, 25 bp, Artificial
  probe
  misc_feature (1)..(25): SEQ ID NO: 3005; WAN024GJS_at; Start 537; Stop 561
gcaaaagggcaagtctattctcatg

SEQ ID NO: 248395 - DNA, 25 bp, Artificial
  probe
  misc_feature (1)..(25): SEQ ID NO: 3005; WAN024GJS_at; Start 658; Stop 682
cgtgaagcctttgatatgcctgagg

SEQ ID NO: 248396 - DNA, 25 bp, Artificial
  probe
  misc_feature (1)..(25): SEQ ID NO: 3005; WAN024GJS_at; Start 638; Stop 662
aaggcaatctcctgcaactacgtga

SEQ ID NO: 248397 - DNA, 25 bp, Artificial
  probe
  misc_feature (1)..(25): SEQ ID NO: 3005; WAN024GJS_at; Start 297; Stop 321
tatggcttacggtattgagcaaaaa

SEQ ID NO: 248398 - DNA, 25 bp, Artificial
  probe
  misc_feature (1)..(25): SEQ ID NO: 3005; WAN024GJS_at; Start 494; Stop 518
cgctggctatttctgatttgattca

SEQ ID NO: 248399 - DNA, 25 bp, Artificial
  probe
  misc_feature (1)..(25): SEQ ID NO: 3005; WAN024GJS_at; Start 379; Stop 403
gactggttccctgttcatttttcaa

SEQ ID NO: 248400 - DNA, 25 bp, Artificial
  probe
  misc_feature (1)..(25): SEQ ID NO: 3005; WAN024GJS_at; Start 484; Stop 508
ggtcttgatccgctggctatttctg

SEQ ID NO: 248401 - DNA, 25 bp, Artificial
  probe
  misc_feature (1)..(25): SEQ ID NO: 3005; WAN024GJS_at; Start 690; Stop 714
gaatgatatttacttggctctgacc

SEQ ID NO: 248402 - DNA, 25 bp, Artificial
  probe
  misc_feature (1)..(25): SEQ ID NO: 3005; WAN024GJS_at; Start 414; Stop 438
gcagaaggtcatgattatctgtgct

SEQ ID NO: 248403 - DNA, 25 bp, Artificial
  probe
  misc_feature (1)..(25): SEQ ID NO: 3005; WAN024GJS_at; Start 284; Stop 308
tcgaaacggttgctatggcttacgg

SEQ ID NO: 248404 - DNA, 25 bp, Artificial
  probe
  misc_feature (1)..(25): SEQ ID NO: 3005; WAN024GJS_at; Start 563; Stop 587
gtacccacgtgctggattcggcgga

SEQ ID NO: 248405 - DNA, 25 bp, Artificial
  probe
  misc_feature (1)..(25): SEQ ID NO: 3005; WAN024GJS_at; Start 527; Stop 551
aagtggagaagcaaaagggcaagtc

SEQ ID NO: 248406 - DNA, 25 bp, Artificial
  probe
  misc_feature (1)..(25): SEQ ID NO: 3005; WAN024GJS_at; Start 370; Stop 394
cagaaattagactggttccctgttc

SEQ ID NO: 248407 - DNA, 25 bp, Artificial
  probe
  misc_feature (1)..(25): SEQ ID NO: 3005; WAN024GJS_at; Start 394; Stop 418
catttttcaaaagggatgaagcaga

SEQ ID NO: 248408 - DNA, 25 bp, Artificial
  probe
  misc_feature (1)..(25): SEQ ID NO: 3005; WAN024GJS_at; Start 237; Stop 261
tcctgagacgcctagtctgtatgag

SEQ ID NO: 248409 - DNA, 25 bp, Artificial
  probe
  misc_feature (1)..(25): SEQ ID NO: 3005; WAN024GJS_at; Start 609; Stop 633
cattcttcacaagggagaggtgcgt

SEQ ID NO: 248410 - DNA, 25 bp, Artificial
  probe
  misc_feature (1)..(25): SEQ ID NO: 3005; WAN024GJS_at; Start 472; Stop 496
gagcctttccttggtcttgatccgc

SEQ ID NO: 248411 - DNA, 25 bp, Artificial
  probe
  misc_feature (1)..(25): SEQ ID NO: 3005; WAN024GJS_at; Start 43; Stop 67
cctgttttgaaagatgtgtccttta

SEQ ID NO: 248412 - DNA, 25 bp, Artificial
  probe
  misc_feature (1)..(25): SEQ ID NO: 5102; WAN024GJT_at; Start 177; Stop 201
gagctacttttggtacttgggcaaa

SEQ ID NO: 248413 - DNA, 25 bp, Artificial
  probe
  misc_feature (1)..(25): SEQ ID NO: 5102; WAN024GJT_at; Start 65; Stop 89
ctgtagcgaggcacaaggtgaacgt

SEQ ID NO: 248414 - DNA, 25 bp, Artificial
  probe
  misc_feature (1)..(25): SEQ ID NO: 5102; WAN024GJT_at; Start 203; Stop 227
agttggctggcgctcgtagcatcca

SEQ ID NO: 248415 - DNA, 25 bp, Artificial
  probe
  misc_feature (1)..(25): SEQ ID NO: 5102; WAN024GJT_at; Start 71; Stop 95
cgaggcacaaggtgaacgtgagtat

SEQ ID NO: 248416 - DNA, 25 bp, Artificial
  probe
  misc_feature (1)..(25): SEQ ID NO: 5102; WAN024GJT_at; Start 96; Stop 120
gaaaaactgtttgaccagcgacttc

SEQ ID NO: 248417 - DNA, 25 bp, Artificial
  probe
  misc_feature (1)..(25): SEQ ID NO: 5102; WAN024GJT_at; Start 183; Stop 207
cttttggtacttgggcaaagagttg

SEQ ID NO: 248418 - DNA, 25 bp, Artificial
  probe
  misc_feature (1)..(25): SEQ ID NO: 5102; WAN024GJT_at; Start 242; Stop 266
cgatagtgttcttttggcacgacca

SEQ ID NO: 248419 - DNA, 25 bp, Artificial
  probe
  misc_feature (1)..(25): SEQ ID NO: 5102; WAN024GJT_at; Start 255; Stop 279
ttggcacgaccaaggtgtgtcctag

SEQ ID NO: 248420 - DNA, 25 bp, Artificial
  probe
  misc_feature (1)..(25): SEQ ID NO: 5102; WAN024GJT_at; Start 87; Stop 111
cgtgagtatgaaaaactgtttgacc

SEQ ID NO: 248421 - DNA, 25 bp, Artificial
  probe
  misc_feature (1)..(25): SEQ ID NO: 5102; WAN024GJT_at; Start 53; Stop 77
tcatcgtcagcactgtagcgaggca

SEQ ID NO: 248422 - DNA, 25 bp, Artificial
  probe
  misc_feature (1)..(25): SEQ ID NO: 5102; WAN024GJT_at; Start 119; Stop 143
tcttcacagttggaaatgatattca

SEQ ID NO: 248423 - DNA, 25 bp, Artificial
  probe
  misc_feature (1)..(25): SEQ ID NO: 5102; WAN024GJT_at; Start 103; Stop 127
tgtttgaccagcgacttcttcacag

SEQ ID NO: 248424 - DNA, 25 bp, Artificial
  probe
  misc_feature (1)..(25): SEQ ID NO: 5102; WAN024GJT_at; Start 39; Stop 63
aatcaatcttgaggtcatcgtcagc

SEQ ID NO: 248425 - DNA, 25 bp, Artificial
  probe
  misc_feature (1)..(25): SEQ ID NO: 5102; WAN024GJT_at; Start 78; Stop 102
caaggtgaacgtgagtatgaaaaac

SEQ ID NO: 248426 - DNA, 25 bp, Artificial
  probe
  misc_feature (1)..(25): SEQ ID NO: 5102; WAN024GJT_at; Start 22; Stop 46
tggttcgtgggcgataaaatcaatc

SEQ ID NO: 248427 - DNA, 25 bp, Artificial
  probe
  misc_feature (1)..(25): SEQ ID NO: 5102; WAN024GJT_at; Start 1; Stop 25
ttgagcaagtttgtcaaagtctggt

SEQ ID NO: 248428 - DNA, 25 bp, Artificial
  probe
  misc_feature (1)..(25): SEQ ID NO: 5102; WAN024GJT_at; Start 136; Stop 160
gatattcataccagcagccttagtg

SEQ ID NO: 248429 - DNA, 25 bp, Artificial
  probe
  misc_feature (1)..(25): SEQ ID NO: 5102; WAN024GJT_at; Start 198; Stop 222
caaagagttggctggcgctcgtagc

SEQ ID NO: 248430 - DNA, 25 bp, Artificial
  probe
  misc_feature (1)..(25): SEQ ID NO: 5102; WAN024GJT_at; Start 113; Stop 137
gcgacttcttcacagttggaaatga

SEQ ID NO: 248431 - DNA, 25 bp, Artificial
  probe
  misc_feature (1)..(25): SEQ ID NO: 5102; WAN024GJT_at; Start 10; Stop 34
tttgtcaaagtctggttcgtgggcg

SEQ ID NO: 248432 - DNA, 25 bp, Artificial
  probe
  misc_feature (1)..(25): SEQ ID NO: 5102; WAN024GJT_at; Start 58; Stop 82
gtcagcactgtagcgaggcacaagg

SEQ ID NO: 248433 - DNA, 25 bp, Artificial
  probe
  misc_feature (1)..(25): SEQ ID NO: 5102; WAN024GJT_at; Start 144; Stop 168
taccagcagccttagtgactttcat

SEQ ID NO: 248434 - DNA, 25 bp, Artificial
  probe
  misc_feature (1)..(25): SEQ ID NO: 5102; WAN024GJT_at; Start 15; Stop 39
caaagtctggttcgtgggcgataaa

SEQ ID NO: 248435 - DNA, 25 bp, Artificial
  probe
  misc_feature (1)..(25): SEQ ID NO: 5102; WAN024GJT_at; Start 108; Stop 132
gaccagcgacttcttcacagttgga

SEQ ID NO: 248436 - DNA, 25 bp, Artificial
  probe
  misc_feature (1)..(25): SEQ ID NO: 5102; WAN024GJT_at; Start 219; Stop 243
tagcatccatctccaaaagattgcg

SEQ ID NO: 248437 - DNA, 25 bp, Artificial
  probe
  misc_feature (1)..(25): SEQ ID NO: 5102; WAN024GJT_at; Start 168; Stop 192
tgactttttgagctacttttggtac

SEQ ID NO: 248438 - DNA, 25 bp, Artificial
  probe
  misc_feature (1)..(25): SEQ ID NO: 5102; WAN024GJT_at; Start 228; Stop 252
tctccaaaagattgcgatagtgttc

SEQ ID NO: 248439 - DNA, 25 bp, Artificial
  probe
  misc_feature (1)..(25): SEQ ID NO: 5102; WAN024GJT_at; Start 156; Stop 180
tagtgactttcatgactttttgagc

SEQ ID NO: 248440 - DNA, 25 bp, Artificial
  probe
  misc_feature (1)..(25): SEQ ID NO: 5102; WAN024GJT_at; Start 149; Stop 173
gcagccttagtgactttcatgactt

SEQ ID NO: 248441 - DNA, 25 bp, Artificial
  probe
  misc_feature (1)..(25): SEQ ID NO: 5102; WAN024GJT_at; Start 212; Stop 236
gcgctcgtagcatccatctccaaaa

SEQ ID NO: 248442 - DNA, 25 bp, Artificial
  probe
  misc_feature (1)..(25): SEQ ID NO: 5102; WAN024GJT_at; Start 27; Stop 51
cgtgggcgataaaatcaatcttgag

SEQ ID NO: 248443 - DNA, 25 bp, Artificial
  probe
  misc_feature (1)..(25): SEQ ID NO: 5102; WAN024GJT_at; Start 131; Stop 155
gaaatgatattcataccagcagcct

SEQ ID NO: 248444 - DNA, 25 bp, Artificial
  probe
  misc_feature (1)..(25): SEQ ID NO: 5102; WAN024GJT_at; Start 248; Stop 272
tgttcttttggcacgaccaaggtgt

SEQ ID NO: 248445 - DNA, 25 bp, Artificial
  probe
  misc_feature (1)..(25): SEQ ID NO: 5102; WAN024GJT_at; Start 48; Stop 72
tgaggtcatcgtcagcactgtagcg

SEQ ID NO: 248446 - DNA, 25 bp, Artificial
  probe
  misc_feature (1)..(25): SEQ ID NO: 2868; WAN024GJU_at; Start 87; Stop 111
tgatatctctcaagtaacactagga

SEQ ID NO: 248447 - DNA, 25 bp, Artificial
  probe
  misc_feature (1)..(25): SEQ ID NO: 2868; WAN024GJU_at; Start 242; Stop 266
tgaatatcatttccaactgtgaaga

SEQ ID NO: 248448 - DNA, 25 bp, Artificial
  probe
  misc_feature (1)..(25): SEQ ID NO: 2868; WAN024GJU_at; Start 162; Stop 186
tgctacgagcgccagccaactcttt

SEQ ID NO: 248449 - DNA, 25 bp, Artificial
  probe
  misc_feature (1)..(25): SEQ ID NO: 2868; WAN024GJU_at; Start 251; Stop 275
tttccaactgtgaagaagtcgctgg

SEQ ID NO: 248450 - DNA, 25 bp, Artificial
  probe
  misc_feature (1)..(25): SEQ ID NO: 2868; WAN024GJU_at; Start 110; Stop 134
gacacaccttggtcgtgccaaaaga

SEQ ID NO: 248451 - DNA, 25 bp, Artificial
  probe
  misc_feature (1)..(25): SEQ ID NO: 2868; WAN024GJU_at; Start 274; Stop 298
ggtcaaacagtttttcatactcacg

SEQ ID NO: 248452 - DNA, 25 bp, Artificial
  probe
  misc_feature (1)..(25): SEQ ID NO: 2868; WAN024GJU_at; Start 355; Stop 379
cacgaaccagactttgacaaacttg

SEQ ID NO: 248453 - DNA, 25 bp, Artificial
  probe
  misc_feature (1)..(25): SEQ ID NO: 2868; WAN024GJU_at; Start 316; Stop 340
tacagtgctgacgatgacctcaaga

SEQ ID NO: 248454 - DNA, 25 bp, Artificial
  probe
  misc_feature (1)..(25): SEQ ID NO: 2868; WAN024GJU_at; Start 261; Stop 285
tgaagaagtcgctggtcaaacagtt

SEQ ID NO: 248455 - DNA, 25 bp, Artificial
  probe
  misc_feature (1)..(25): SEQ ID NO: 2868; WAN024GJU_at; Start 98; Stop 122
aagtaacactaggacacaccttggt

SEQ ID NO: 248456 - DNA, 25 bp, Artificial
  probe
  misc_feature (1)..(25): SEQ ID NO: 2868; WAN024GJU_at; Start 12; Stop 36
cattttttgtaaaatcatcgcaggg

SEQ ID NO: 248457 - DNA, 25 bp, Artificial
  probe
  misc_feature (1)..(25): SEQ ID NO: 2868; WAN024GJU_at; Start 322; Stop 346
gctgacgatgacctcaagattgatt

SEQ ID NO: 248458 - DNA, 25 bp, Artificial
  probe
  misc_feature (1)..(25): SEQ ID NO: 2868; WAN024GJU_at; Start 203; Stop 227
tagctcaaaaagtcatgaaagtcac

SEQ ID NO: 248459 - DNA, 25 bp, Artificial
  probe
  misc_feature (1)..(25): SEQ ID NO: 2868; WAN024GJU_at; Start 343; Stop 367
gattttatcgcccacgaaccagact

SEQ ID NO: 248460 - DNA, 25 bp, Artificial
  probe
  misc_feature (1)..(25): SEQ ID NO: 2868; WAN024GJU_at; Start 336; Stop 360
caagattgattttatcgcccacgaa

SEQ ID NO: 248461 - DNA, 25 bp, Artificial
  probe
  misc_feature (1)..(25): SEQ ID NO: 2868; WAN024GJU_at; Start 347; Stop 371
ttatcgcccacgaaccagactttga

SEQ ID NO: 248462 - DNA, 25 bp, Artificial
  probe
  misc_feature (1)..(25): SEQ ID NO: 2868; WAN024GJU_at; Start 390; Stop 414
tgaaaccatcaaaaacgcttaacta

SEQ ID NO: 248463 - DNA, 25 bp, Artificial
  probe
  misc_feature (1)..(25): SEQ ID NO: 2868; WAN024GJU_at; Start 255; Stop 279
caactgtgaagaagtcgctggtcaa

SEQ ID NO: 248464 - DNA, 25 bp, Artificial
  probe
  misc_feature (1)..(25): SEQ ID NO: 2868; WAN024GJU_at; Start 114; Stop 138
caccttggtcgtgccaaaagaacac

SEQ ID NO: 248465 - DNA, 25 bp, Artificial
  probe
  misc_feature (1)..(25): SEQ ID NO: 2868; WAN024GJU_at; Start 119; Stop 143
tggtcgtgccaaaagaacactatcg

SEQ ID NO: 248466 - DNA, 25 bp, Artificial
  probe
  misc_feature (1)..(25): SEQ ID NO: 2868; WAN024GJU_at; Start 133; Stop 157
gaacactatcgcaatcttttggaga

SEQ ID NO: 248467 - DNA, 25 bp, Artificial
  probe
  misc_feature (1)..(25): SEQ ID NO: 2868; WAN024GJU_at; Start 339; Stop 363
gattgattttatcgcccacgaacca

SEQ ID NO: 248468 - DNA, 25 bp, Artificial
  probe
  misc_feature (1)..(25): SEQ ID NO: 2868; WAN024GJU_at; Start 312; Stop 336
tcgctacagtgctgacgatgacctc

SEQ ID NO: 248469 - DNA, 25 bp, Artificial
  probe
  misc_feature (1)..(25): SEQ ID NO: 2868; WAN024GJU_at; Start 283; Stop 307
gtttttcatactcacgttcaccttg

SEQ ID NO: 248470 - DNA, 25 bp, Artificial
  probe
  misc_feature (1)..(25): SEQ ID NO: 2868; WAN024GJU_at; Start 266; Stop 290
aagtcgctggtcaaacagtttttca

SEQ ID NO: 248471 - DNA, 25 bp, Artificial
  probe
  misc_feature (1)..(25): SEQ ID NO: 2868; WAN024GJU_at; Start 385; Stop 409
gtcgctgaaaccatcaaaaacgctt

SEQ ID NO: 248472 - DNA, 25 bp, Artificial
  probe
  misc_feature (1)..(25): SEQ ID NO: 2868; WAN024GJU_at; Start 72; Stop 96
ggtccttgcctttcttgatatctct

SEQ ID NO: 248473 - DNA, 25 bp, Artificial
  probe
  misc_feature (1)..(25): SEQ ID NO: 2868; WAN024GJU_at; Start 231; Stop 255
ggctgctggtatgaatatcatttcc

SEQ ID NO: 248474 - DNA, 25 bp, Artificial
  probe
  misc_feature (1)..(25): SEQ ID NO: 2868; WAN024GJU_at; Start 67; Stop 91
gagcaggtccttgcctttcttgata

SEQ ID NO: 248475 - DNA, 25 bp, Artificial
  probe
  misc_feature (1)..(25): SEQ ID NO: 2868; WAN024GJU_at; Start 370; Stop 394
gacaaacttgctcaagtcgctgaaa

SEQ ID NO: 248476 - DNA, 25 bp, Artificial
  probe
  misc_feature (1)..(25): SEQ ID NO: 2868; WAN024GJU_at; Start 361; Stop 385
ccagactttgacaaacttgctcaag

SEQ ID NO: 248477 - DNA, 25 bp, Artificial
  probe
  misc_feature (1)..(25): SEQ ID NO: 2868; WAN024GJU_at; Start 378; Stop 402
tgctcaagtcgctgaaaccatcaaa

SEQ ID NO: 248478 - DNA, 25 bp, Artificial
  probe
  misc_feature (1)..(25): SEQ ID NO: 2868; WAN024GJU_at; Start 174; Stop 198
cagccaactctttgcccaagtacca

SEQ ID NO: 248479 - DNA, 25 bp, Artificial
  probe
  misc_feature (1)..(25): SEQ ID NO: 2868; WAN024GJU_at; Start 123; Stop 147
cgtgccaaaagaacactatcgcaat

SEQ ID NO: 248480 - DNA, 25 bp, Artificial
  probe
  misc_feature (1)..(25): SEQ ID NO: 7494; WAN024GJV_at; Start 35; Stop 59
taccaattatgaacggtattacaaa

SEQ ID NO: 248481 - DNA, 25 bp, Artificial
  probe
  misc_feature (1)..(25): SEQ ID NO: 7494; WAN024GJV_at; Start 114; Stop 138
tgcagacaacaatactgaggtaaca

SEQ ID NO: 248482 - DNA, 25 bp, Artificial
  probe
  misc_feature (1)..(25): SEQ ID NO: 7494; WAN024GJV_at; Start 84; Stop 108
tatcatagctggtaccatcgccgat

SEQ ID NO: 248483 - DNA, 25 bp, Artificial
  probe
  misc_feature (1)..(25): SEQ ID NO: 7494; WAN024GJV_at; Start 110; Stop 134
caaatgcagacaacaatactgaggt

SEQ ID NO: 248484 - DNA, 25 bp, Artificial
  probe
  misc_feature (1)..(25): SEQ ID NO: 7494; WAN024GJV_at; Start 44; Stop 68
tgaacggtattacaaatttatatgt

SEQ ID NO: 248485 - DNA, 25 bp, Artificial
  probe
  misc_feature (1)..(25): SEQ ID NO: 7494; WAN024GJV_at; Start 89; Stop 113
tagctggtaccatcgccgatacaaa

SEQ ID NO: 248486 - DNA, 25 bp, Artificial
  probe
  misc_feature (1)..(25): SEQ ID NO: 7494; WAN024GJV_at; Start 87; Stop 111
catagctggtaccatcgccgataca

SEQ ID NO: 248487 - DNA, 25 bp, Artificial
  probe
  misc_feature (1)..(25): SEQ ID NO: 7494; WAN024GJV_at; Start 79; Stop 103
aatgatatcatagctggtaccatcg

SEQ ID NO: 248488 - DNA, 25 bp, Artificial
  probe
  misc_feature (1)..(25): SEQ ID NO: 7494; WAN024GJV_at; Start 15; Stop 39
tacaactactgtccaaatcatacca

SEQ ID NO: 248489 - DNA, 25 bp, Artificial
  probe
  misc_feature (1)..(25): SEQ ID NO: 7494; WAN024GJV_at; Start 135; Stop 159
aacaaaattccttaccgcttcatca

SEQ ID NO: 248490 - DNA, 25 bp, Artificial
  probe
  misc_feature (1)..(25): SEQ ID NO: 7494; WAN024GJV_at; Start 223; Stop 247
ggaatattatcaataaaatcttttg

SEQ ID NO: 248491 - DNA, 25 bp, Artificial
  probe
  misc_feature (1)..(25): SEQ ID NO: 7494; WAN024GJV_at; Start 75; Stop 99
ttctaatgatatcatagctggtacc

SEQ ID NO: 248492 - DNA, 25 bp, Artificial
  probe
  misc_feature (1)..(25): SEQ ID NO: 7494; WAN024GJV_at; Start 120; Stop 144
caacaatactgaggtaacaaaattc

SEQ ID NO: 248493 - DNA, 25 bp, Artificial
  probe
  misc_feature (1)..(25): SEQ ID NO: 7494; WAN024GJV_at; Start 176; Stop 200
catgttcagctaatataatttctct

SEQ ID NO: 248494 - DNA, 25 bp, Artificial
  probe
  misc_feature (1)..(25): SEQ ID NO: 7494; WAN024GJV_at; Start 2; Stop 26
tgatcataagaaatacaactactgt

SEQ ID NO: 248495 - DNA, 25 bp, Artificial
  probe
  misc_feature (1)..(25): SEQ ID NO: 7494; WAN024GJV_at; Start 169; Stop 193
caactatcatgttcagctaatataa

SEQ ID NO: 248496 - DNA, 25 bp, Artificial
  probe
  misc_feature (1)..(25): SEQ ID NO: 7494; WAN024GJV_at; Start 143; Stop 167
tccttaccgcttcatcatttttgat

SEQ ID NO: 248497 - DNA, 25 bp, Artificial
  probe
  misc_feature (1)..(25): SEQ ID NO: 7494; WAN024GJV_at; Start 11; Stop 35
gaaatacaactactgtccaaatcat

SEQ ID NO: 248498 - DNA, 25 bp, Artificial
  probe
  misc_feature (1)..(25): SEQ ID NO: 7494; WAN024GJV_at; Start 234; Stop 258
aataaaatcttttgatgttctatag

SEQ ID NO: 248499 - DNA, 25 bp, Artificial
  probe
  misc_feature (1)..(25): SEQ ID NO: 7494; WAN024GJV_at; Start 28; Stop 52
caaatcataccaattatgaacggta

SEQ ID NO: 248500 - DNA, 25 bp, Artificial
  probe
  misc_feature (1)..(25): SEQ ID NO: 7494; WAN024GJV_at; Start 6; Stop 30
cataagaaatacaactactgtccaa

SEQ ID NO: 248501 - DNA, 25 bp, Artificial
  probe
  misc_feature (1)..(25): SEQ ID NO: 7494; WAN024GJV_at; Start 150; Stop 174
cgcttcatcatttttgatacaacta

SEQ ID NO: 248502 - DNA, 25 bp, Artificial
  probe
  misc_feature (1)..(25): SEQ ID NO: 7494; WAN024GJV_at; Start 71; Stop 95
gtatttctaatgatatcatagctgg

SEQ ID NO: 248503 - DNA, 25 bp, Artificial
  probe
  misc_feature (1)..(25): SEQ ID NO: 7494; WAN024GJV_at; Start 99; Stop 123
catcgccgatacaaatgcagacaac

SEQ ID NO: 248504 - DNA, 25 bp, Artificial
  probe
  misc_feature (1)..(25): SEQ ID NO: 7494; WAN024GJV_at; Start 189; Stop 213
tataatttctctatatctagctaaa

SEQ ID NO: 248505 - DNA, 25 bp, Artificial
  probe
  misc_feature (1)..(25): SEQ ID NO: 7494; WAN024GJV_at; Start 96; Stop 120
taccatcgccgatacaaatgcagac

SEQ ID NO: 248506 - DNA, 25 bp, Artificial
  probe
  misc_feature (1)..(25): SEQ ID NO: 7494; WAN024GJV_at; Start 82; Stop 106
gatatcatagctggtaccatcgccg

SEQ ID NO: 248507 - DNA, 25 bp, Artificial
  probe
  misc_feature (1)..(25): SEQ ID NO: 7494; WAN024GJV_at; Start 21; Stop 45
tactgtccaaatcataccaattatg

SEQ ID NO: 248508 - DNA, 25 bp, Artificial
  probe
  misc_feature (1)..(25): SEQ ID NO: 7494; WAN024GJV_at; Start 101; Stop 125
tcgccgatacaaatgcagacaacaa

SEQ ID NO: 248509 - DNA, 25 bp, Artificial
  probe
  misc_feature (1)..(25): SEQ ID NO: 7494; WAN024GJV_at; Start 94; Stop 118
ggtaccatcgccgatacaaatgcag

SEQ ID NO: 248510 - DNA, 25 bp, Artificial
  probe
  misc_feature (1)..(25): SEQ ID NO: 7494; WAN024GJV_at; Start 103; Stop 127
gccgatacaaatgcagacaacaata

SEQ ID NO: 248511 - DNA, 25 bp, Artificial
  probe
  misc_feature (1)..(25): SEQ ID NO: 7494; WAN024GJV_at; Start 106; Stop 130
gatacaaatgcagacaacaatactg

SEQ ID NO: 248512 - DNA, 25 bp, Artificial
  probe
  misc_feature (1)..(25): SEQ ID NO: 7494; WAN024GJV_at; Start 123; Stop 147
caatactgaggtaacaaaattcctt

SEQ ID NO: 248513 - DNA, 25 bp, Artificial
  probe
  misc_feature (1)..(25): SEQ ID NO: 7494; WAN024GJV_at; Start 165; Stop 189
gatacaactatcatgttcagctaat

SEQ ID NO: 248514 - DNA, 25 bp, Artificial
  probe
  misc_feature (1)..(25): SEQ ID NO: 1639; WAN024GJW_at; Start 76; Stop 100
tatagaacatcaaaagattttattg

SEQ ID NO: 248515 - DNA, 25 bp, Artificial
  probe
  misc_feature (1)..(25): SEQ ID NO: 1639; WAN024GJW_at; Start 8; Stop 32
tattggatgaagagtatctaaaaaa

SEQ ID NO: 248516 - DNA, 25 bp, Artificial
  probe
  misc_feature (1)..(25): SEQ ID NO: 1639; WAN024GJW_at; Start 58; Stop 82
tgtaatcaagctgataactatagaa

SEQ ID NO: 248517 - DNA, 25 bp, Artificial
  probe
  misc_feature (1)..(25): SEQ ID NO: 1639; WAN024GJW_at; Start 60; Stop 84
taatcaagctgataactatagaaca

SEQ ID NO: 248518 - DNA, 25 bp, Artificial
  probe
  misc_feature (1)..(25): SEQ ID NO: 1639; WAN024GJW_at; Start 48; Stop 72
taatgatttttgtaatcaagctgat

SEQ ID NO: 248519 - DNA, 25 bp, Artificial
  probe
  misc_feature (1)..(25): SEQ ID NO: 1639; WAN024GJW_at; Start 5; Stop 29
gtgtattggatgaagagtatctaaa

SEQ ID NO: 248520 - DNA, 25 bp, Artificial
  probe
  misc_feature (1)..(25): SEQ ID NO: 1639; WAN024GJW_at; Start 46; Stop 70
tataatgatttttgtaatcaagctg

SEQ ID NO: 248521 - DNA, 25 bp, Artificial
  probe
  misc_feature (1)..(25): SEQ ID NO: 1639; WAN024GJW_at; Start 35; Stop 59
cacgaaaagtttataatgatttttg

SEQ ID NO: 248522 - DNA, 25 bp, Artificial
  probe
  misc_feature (1)..(25): SEQ ID NO: 1639; WAN024GJW_at; Start 67; Stop 91
gctgataactatagaacatcaaaag

SEQ ID NO: 248523 - DNA, 25 bp, Artificial
  probe
  misc_feature (1)..(25): SEQ ID NO: 1639; WAN024GJW_at; Start 2; Stop 26
tgagtgtattggatgaagagtatct

SEQ ID NO: 248524 - DNA, 25 bp, Artificial
  probe
  misc_feature (1)..(25): SEQ ID NO: 1639; WAN024GJW_at; Start 72; Stop 96
taactatagaacatcaaaagatttt

SEQ ID NO: 248525 - DNA, 25 bp, Artificial
  probe
  misc_feature (1)..(25): SEQ ID NO: 1639; WAN024GJW_at; Start 70; Stop 94
gataactatagaacatcaaaagatt

SEQ ID NO: 248526 - DNA, 25 bp, Artificial
  probe
  misc_feature (1)..(25): SEQ ID NO: 1639; WAN024GJW_at; Start 122; Stop 146
tagctagatatagagaattatatta

SEQ ID NO: 248527 - DNA, 25 bp, Artificial
  probe
  misc_feature (1)..(25): SEQ ID NO: 1639; WAN024GJW_at; Start 6; Stop 30
tgtattggatgaagagtatctaaaa

SEQ ID NO: 248528 - DNA, 25 bp, Artificial
  probe
  misc_feature (1)..(25): SEQ ID NO: 1639; WAN024GJW_at; Start 52; Stop 76
gatttttgtaatcaagctgataact

SEQ ID NO: 248529 - DNA, 25 bp, Artificial
  probe
  misc_feature (1)..(25): SEQ ID NO: 1639; WAN024GJW_at; Start 13; Stop 37
gatgaagagtatctaaaaaatacac

SEQ ID NO: 248530 - DNA, 25 bp, Artificial
  probe
  misc_feature (1)..(25): SEQ ID NO: 1639; WAN024GJW_at; Start 51; Stop 75
tgatttttgtaatcaagctgataac

SEQ ID NO: 248531 - DNA, 25 bp, Artificial
  probe
  misc_feature (1)..(25): SEQ ID NO: 1639; WAN024GJW_at; Start 62; Stop 86
atcaagctgataactatagaacatc

SEQ ID NO: 248532 - DNA, 25 bp, Artificial
  probe
  misc_feature (1)..(25): SEQ ID NO: 1639; WAN024GJW_at; Start 91; Stop 115
gattttattgataatattccaatag

SEQ ID NO: 248533 - DNA, 25 bp, Artificial
  probe
  misc_feature (1)..(25): SEQ ID NO: 1639; WAN024GJW_at; Start 4; Stop 28
agtgtattggatgaagagtatctaa

SEQ ID NO: 248534 - DNA, 25 bp, Artificial
  probe
  misc_feature (1)..(25): SEQ ID NO: 1639; WAN024GJW_at; Start 59; Stop 83
gtaatcaagctgataactatagaac

SEQ ID NO: 248535 - DNA, 25 bp, Artificial
  probe
  misc_feature (1)..(25): SEQ ID NO: 1639; WAN024GJW_at; Start 16; Stop 40
gaagagtatctaaaaaatacacgaa

SEQ ID NO: 248536 - DNA, 25 bp, Artificial
  probe
  misc_feature (1)..(25): SEQ ID NO: 1639; WAN024GJW_at; Start 30; Stop 54
aaatacacgaaaagtttataatgat

SEQ ID NO: 248537 - DNA, 25 bp, Artificial
  probe
  misc_feature (1)..(25): SEQ ID NO: 1639; WAN024GJW_at; Start 3; Stop 27
gagtgtattggatgaagagtatcta

SEQ ID NO: 248538 - DNA, 25 bp, Artificial
  probe
  misc_feature (1)..(25): SEQ ID NO: 1639; WAN024GJW_at; Start 68; Stop 92
ctgataactatagaacatcaaaaga

SEQ ID NO: 248539 - DNA, 25 bp, Artificial
  probe
  misc_feature (1)..(25): SEQ ID NO: 1639; WAN024GJW_at; Start 15; Stop 39
tgaagagtatctaaaaaatacacga

SEQ ID NO: 248540 - DNA, 25 bp, Artificial
  probe
  misc_feature (1)..(25): SEQ ID NO: 1639; WAN024GJW_at; Start 63; Stop 87
tcaagctgataactatagaacatca

SEQ ID NO: 248541 - DNA, 25 bp, Artificial
  probe
  misc_feature (1)..(25): SEQ ID NO: 1639; WAN024GJW_at; Start 118; Stop 142
tatttagctagatatagagaattat

SEQ ID NO: 248542 - DNA, 25 bp, Artificial
  probe
  misc_feature (1)..(25): SEQ ID NO: 1639; WAN024GJW_at; Start 11; Stop 35
tggatgaagagtatctaaaaaatac

SEQ ID NO: 248543 - DNA, 25 bp, Artificial
  probe
  misc_feature (1)..(25): SEQ ID NO: 1639; WAN024GJW_at; Start 115; Stop 139
gaatatttagctagatatagagaat

SEQ ID NO: 248544 - DNA, 25 bp, Artificial
  probe
  misc_feature (1)..(25): SEQ ID NO: 1639; WAN024GJW_at; Start 64; Stop 88
caagctgataactatagaacatcaa

SEQ ID NO: 248545 - DNA, 25 bp, Artificial
  probe
  misc_feature (1)..(25): SEQ ID NO: 1639; WAN024GJW_at; Start 61; Stop 85
aatcaagctgataactatagaacat

SEQ ID NO: 248546 - DNA, 25 bp, Artificial
  probe
  misc_feature (1)..(25): SEQ ID NO: 1639; WAN024GJW_at; Start 56; Stop 80
tttgtaatcaagctgataactatag

SEQ ID NO: 248547 - DNA, 25 bp, Artificial
  probe
  misc_feature (1)..(25): SEQ ID NO: 1639; WAN024GJW_at; Start 113; Stop 137
tagaatatttagctagatatagaga

SEQ ID NO: 248548 - DNA, 25 bp, Artificial
  probe
  misc_feature (1)..(25): SEQ ID NO: 7088; WAN024GJX_at; Start 21; Stop 45
gaagagtatcaaaaagaaaaataga

SEQ ID NO: 248549 - DNA, 25 bp, Artificial
  probe
  misc_feature (1)..(25): SEQ ID NO: 7088; WAN024GJX_at; Start 14; Stop 38
cacttaagaagagtatcaaaaagaa

SEQ ID NO: 248550 - DNA, 25 bp, Artificial
  probe
  misc_feature (1)..(25): SEQ ID NO: 7088; WAN024GJX_at; Start 6; Stop 30
ggcgtcgccacttaagaagagtatc

SEQ ID NO: 248551 - DNA, 25 bp, Artificial
  probe
  misc_feature (1)..(25): SEQ ID NO: 7088; WAN024GJX_at; Start 7; Stop 31
gcgtcgccacttaagaagagtatca

SEQ ID NO: 248552 - DNA, 25 bp, Artificial
  probe
  misc_feature (1)..(25): SEQ ID NO: 7088; WAN024GJX_at; Start 62; Stop 86
agaaaaacacatgtctaaaattatc

SEQ ID NO: 248553 - DNA, 25 bp, Artificial
  probe
  misc_feature (1)..(25): SEQ ID NO: 7088; WAN024GJX_at; Start 5; Stop 29
cggcgtcgccacttaagaagagtat

SEQ ID NO: 248554 - DNA, 25 bp, Artificial
  probe
  misc_feature (1)..(25): SEQ ID NO: 7088; WAN024GJX_at; Start 11; Stop 35
cgccacttaagaagagtatcaaaaa

SEQ ID NO: 248555 - DNA, 25 bp, Artificial
  probe
  misc_feature (1)..(25): SEQ ID NO: 7088; WAN024GJX_at; Start 57; Stop 81
caaggagaaaaacacatgtctaaaa

SEQ ID NO: 248556 - DNA, 25 bp, Artificial
  probe
  misc_feature (1)..(25): SEQ ID NO: 7088; WAN024GJX_at; Start 60; Stop 84
ggagaaaaacacatgtctaaaatta

SEQ ID NO: 248557 - DNA, 25 bp, Artificial
  probe
  misc_feature (1)..(25): SEQ ID NO: 7088; WAN024GJX_at; Start 13; Stop 37
ccacttaagaagagtatcaaaaaga

SEQ ID NO: 248558 - DNA, 25 bp, Artificial
  probe
  misc_feature (1)..(25): SEQ ID NO: 7088; WAN024GJX_at; Start 61; Stop 85
gagaaaaacacatgtctaaaattat

SEQ ID NO: 248559 - DNA, 25 bp, Artificial
  probe
  misc_feature (1)..(25): SEQ ID NO: 7088; WAN024GJX_at; Start 10; Stop 34
tcgccacttaagaagagtatcaaaa

SEQ ID NO: 248560 - DNA, 25 bp, Artificial
  probe
  misc_feature (1)..(25): SEQ ID NO: 7088; WAN024GJX_at; Start 59; Stop 83
aggagaaaaacacatgtctaaaatt

SEQ ID NO: 248561 - DNA, 25 bp, Artificial
  probe
  misc_feature (1)..(25): SEQ ID NO: 7088; WAN024GJX_at; Start 20; Stop 44
agaagagtatcaaaaagaaaaatag

SEQ ID NO: 248562 - DNA, 25 bp, Artificial
  probe
  misc_feature (1)..(25): SEQ ID NO: 7088; WAN024GJX_at; Start 8; Stop 32
cgtcgccacttaagaagagtatcaa

SEQ ID NO: 248563 - DNA, 25 bp, Artificial
  probe
  misc_feature (1)..(25): SEQ ID NO: 7088; WAN024GJX_at; Start 9; Stop 33
gtcgccacttaagaagagtatcaaa

SEQ ID NO: 248564 - DNA, 25 bp, Artificial
  probe
  misc_feature (1)..(25): SEQ ID NO: 7088; WAN024GJX_at; Start 3; Stop 27
gacggcgtcgccacttaagaagagt

SEQ ID NO: 248565 - DNA, 25 bp, Artificial
  probe
  misc_feature (1)..(25): SEQ ID NO: 7088; WAN024GJX_at; Start 4; Stop 28
acggcgtcgccacttaagaagagta

SEQ ID NO: 248566 - DNA, 25 bp, Artificial
  probe
  misc_feature (1)..(25): SEQ ID NO: 7088; WAN024GJX_at; Start 58; Stop 82
aaggagaaaaacacatgtctaaaat

SEQ ID NO: 248567 - DNA, 25 bp, Artificial
  probe
  misc_feature (1)..(25): SEQ ID NO: 7088; WAN024GJX_at; Start 12; Stop 36
gccacttaagaagagtatcaaaaag

SEQ ID NO: 248568 - DNA, 25 bp, Artificial
  probe
  misc_feature (1)..(25): SEQ ID NO: 3989; WAN024GJY_at; Start 260; Stop 284
caccaaggtcaaataccaagatttt

SEQ ID NO: 248569 - DNA, 25 bp, Artificial
  probe
  misc_feature (1)..(25): SEQ ID NO: 3989; WAN024GJY_at; Start 246; Stop 270
gtcgaatgtaccaccaccaaggtca

SEQ ID NO: 248570 - DNA, 25 bp, Artificial
  probe
  misc_feature (1)..(25): SEQ ID NO: 3989; WAN024GJY_at; Start 12; Stop 36
caagctgatttgtgttgaagttaca

SEQ ID NO: 248571 - DNA, 25 bp, Artificial
  probe
  misc_feature (1)..(25): SEQ ID NO: 3989; WAN024GJY_at; Start 290; Stop 314
ctttgtcagtcttgtccaaaccata

SEQ ID NO: 248572 - DNA, 25 bp, Artificial
  probe
  misc_feature (1)..(25): SEQ ID NO: 3989; WAN024GJY_at; Start 189; Stop 213
gtcccctgcagttgacaatacgtcg

SEQ ID NO: 248573 - DNA, 25 bp, Artificial
  probe
  misc_feature (1)..(25): SEQ ID NO: 3989; WAN024GJY_at; Start 175; Stop 199
ccaccaagtttgttgtcccctgcag

SEQ ID NO: 248574 - DNA, 25 bp, Artificial
  probe
  misc_feature (1)..(25): SEQ ID NO: 3989; WAN024GJY_at; Start 82; Stop 106
tgcattgccatcttgtcagtagaca

SEQ ID NO: 248575 - DNA, 25 bp, Artificial
  probe
  misc_feature (1)..(25): SEQ ID NO: 3989; WAN024GJY_at; Start 24; Stop 48
tgttgaagttacaccagaaaggtct

SEQ ID NO: 248576 - DNA, 25 bp, Artificial
  probe
  misc_feature (1)..(25): SEQ ID NO: 3989; WAN024GJY_at; Start 202; Stop 226
gacaatacgtcgaagacaccgtcac

SEQ ID NO: 248577 - DNA, 25 bp, Artificial
  probe
  misc_feature (1)..(25): SEQ ID NO: 3989; WAN024GJY_at; Start 67; Stop 91
gcatctttcaaacgttgcattgcca

SEQ ID NO: 248578 - DNA, 25 bp, Artificial
  probe
  misc_feature (1)..(25): SEQ ID NO: 3989; WAN024GJY_at; Start 197; Stop 221
cagttgacaatacgtcgaagacacc

SEQ ID NO: 248579 - DNA, 25 bp, Artificial
  probe
  misc_feature (1)..(25): SEQ ID NO: 3989; WAN024GJY_at; Start 2; Stop 26
tgataaatggcaagctgatttgtgt

SEQ ID NO: 248580 - DNA, 25 bp, Artificial
  probe
  misc_feature (1)..(25): SEQ ID NO: 3989; WAN024GJY_at; Start 179; Stop 203
caagtttgttgtcccctgcagttga

SEQ ID NO: 248581 - DNA, 25 bp, Artificial
  probe
  misc_feature (1)..(25): SEQ ID NO: 3989; WAN024GJY_at; Start 113; Stop 137
taccgttttctttcttgaattctgc

SEQ ID NO: 248582 - DNA, 25 bp, Artificial
  probe
  misc_feature (1)..(25): SEQ ID NO: 3989; WAN024GJY_at; Start 98; Stop 122
cagtagacaagtcgataccgttttc

SEQ ID NO: 248583 - DNA, 25 bp, Artificial
  probe
  misc_feature (1)..(25): SEQ ID NO: 3989; WAN024GJY_at; Start 233; Stop 257
caaggatagagacgtcgaatgtacc

SEQ ID NO: 248584 - DNA, 25 bp, Artificial
  probe
  misc_feature (1)..(25): SEQ ID NO: 3989; WAN024GJY_at; Start 59; Stop 83
tttcagccgcatctttcaaacgttg

SEQ ID NO: 248585 - DNA, 25 bp, Artificial
  probe
  misc_feature (1)..(25): SEQ ID NO: 3989; WAN024GJY_at; Start 95; Stop 119
tgtcagtagacaagtcgataccgtt

SEQ ID NO: 248586 - DNA, 25 bp, Artificial
  probe
  misc_feature (1)..(25): SEQ ID NO: 3989; WAN024GJY_at; Start 45; Stop 69
gtctttcttcgctttttcagccgca

SEQ ID NO: 248587 - DNA, 25 bp, Artificial
  probe
  misc_feature (1)..(25): SEQ ID NO: 3989; WAN024GJY_at; Start 226; Stop 250
cccaattcaaggatagagacgtcga

SEQ ID NO: 248588 - DNA, 25 bp, Artificial
  probe
  misc_feature (1)..(25): SEQ ID NO: 3989; WAN024GJY_at; Start 213; Stop 237
gaagacaccgtcacccaattcaagg

SEQ ID NO: 248589 - DNA, 25 bp, Artificial
  probe
  misc_feature (1)..(25): SEQ ID NO: 3989; WAN024GJY_at; Start 75; Stop 99
caaacgttgcattgccatcttgtca

SEQ ID NO: 248590 - DNA, 25 bp, Artificial
  probe
  misc_feature (1)..(25): SEQ ID NO: 3989; WAN024GJY_at; Start 216; Stop 240
gacaccgtcacccaattcaaggata

SEQ ID NO: 248591 - DNA, 25 bp, Artificial
  probe
  misc_feature (1)..(25): SEQ ID NO: 3989; WAN024GJY_at; Start 276; Stop 300
caagattttttcttctttgtcagtc

SEQ ID NO: 248592 - DNA, 25 bp, Artificial
  probe
  misc_feature (1)..(25): SEQ ID NO: 3989; WAN024GJY_at; Start 237; Stop 261
gatagagacgtcgaatgtaccacca

SEQ ID NO: 248593 - DNA, 25 bp, Artificial
  probe
  misc_feature (1)..(25): SEQ ID NO: 3989; WAN024GJY_at; Start 153; Stop 177
gattttttggtcaaagtcgtcacca

SEQ ID NO: 248594 - DNA, 25 bp, Artificial
  probe
  misc_feature (1)..(25): SEQ ID NO: 3989; WAN024GJY_at; Start 160; Stop 184
tggtcaaagtcgtcaccaccaagtt

SEQ ID NO: 248595 - DNA, 25 bp, Artificial
  probe
  misc_feature (1)..(25): SEQ ID NO: 3989; WAN024GJY_at; Start 249; Stop 273
gaatgtaccaccaccaaggtcaaat

SEQ ID NO: 248596 - DNA, 25 bp, Artificial
  probe
  misc_feature (1)..(25): SEQ ID NO: 3989; WAN024GJY_at; Start 129; Stop 153
gaattctgctaccaagtggtcaatg

SEQ ID NO: 248597 - DNA, 25 bp, Artificial
  probe
  misc_feature (1)..(25): SEQ ID NO: 3989; WAN024GJY_at; Start 165; Stop 189
aaagtcgtcaccaccaagtttgttg

SEQ ID NO: 248598 - DNA, 25 bp, Artificial
  probe
  misc_feature (1)..(25): SEQ ID NO: 3989; WAN024GJY_at; Start 33; Stop 57
tacaccagaaaggtctttcttcgct

SEQ ID NO: 248599 - DNA, 25 bp, Artificial
  probe
  misc_feature (1)..(25): SEQ ID NO: 3989; WAN024GJY_at; Start 27; Stop 51
tgaagttacaccagaaaggtctttc

SEQ ID NO: 248600 - DNA, 25 bp, Artificial
  probe
  misc_feature (1)..(25): SEQ ID NO: 3989; WAN024GJY_at; Start 125; Stop 149
tcttgaattctgctaccaagtggtc

SEQ ID NO: 248601 - DNA, 25 bp, Artificial
  probe
  misc_feature (1)..(25): SEQ ID NO: 3989; WAN024GJY_at; Start 141; Stop 165
caagtggtcaatgattttttggtca

SEQ ID NO: 248602 - DNA, 25 bp, Artificial
  probe
  misc_feature (1)..(25): SEQ ID NO: 5757; WAN024GJZ_at; Start 181; Stop 205
tgcgtcgaagcctttaccttcagtt

SEQ ID NO: 248603 - DNA, 25 bp, Artificial
  probe
  misc_feature (1)..(25): SEQ ID NO: 5757; WAN024GJZ_at; Start 114; Stop 138
cgtccaagttgttgtcttcttgagc

SEQ ID NO: 248604 - DNA, 25 bp, Artificial
  probe
  misc_feature (1)..(25): SEQ ID NO: 5757; WAN024GJZ_at; Start 240; Stop 264
ggtctacttcattacgaaggtctac

SEQ ID NO: 248605 - DNA, 25 bp, Artificial
  probe
  misc_feature (1)..(25): SEQ ID NO: 5757; WAN024GJZ_at; Start 157; Stop 181
ggcagcttgggcagcgtcacgttct

SEQ ID NO: 248606 - DNA, 25 bp, Artificial
  probe
  misc_feature (1)..(25): SEQ ID NO: 5757; WAN024GJZ_at; Start 302; Stop 326
tctgcatctttcatcatgcggtcga

SEQ ID NO: 248607 - DNA, 25 bp, Artificial
  probe
  misc_feature (1)..(25): SEQ ID NO: 5757; WAN024GJZ_at; Start 219; Stop 243
tttcagtcgcaaagattgcttggtc

SEQ ID NO: 248608 - DNA, 25 bp, Artificial
  probe
  misc_feature (1)..(25): SEQ ID NO: 5757; WAN024GJZ_at; Start 249; Stop 273
cattacgaaggtctacttcttcttt

SEQ ID NO: 248609 - DNA, 25 bp, Artificial
  probe
  misc_feature (1)..(25): SEQ ID NO: 5757; WAN024GJZ_at; Start 54; Stop 78
agagtttaacagcaagtccttgagc

SEQ ID NO: 248610 - DNA, 25 bp, Artificial
  probe
  misc_feature (1)..(25): SEQ ID NO: 5757; WAN024GJZ_at; Start 141; Stop 165
tcttaaggtcatcaagggcagcttg

SEQ ID NO: 248611 - DNA, 25 bp, Artificial
  probe
  misc_feature (1)..(25): SEQ ID NO: 5757; WAN024GJZ_at; Start 80; Stop 104
ttttcgttcaatgcttcaagttttg

SEQ ID NO: 248612 - DNA, 25 bp, Artificial
  probe
  misc_feature (1)..(25): SEQ ID NO: 5757; WAN024GJZ_at; Start 2; Stop 26
tgtgcgccttctgctccttcttgag

SEQ ID NO: 248613 - DNA, 25 bp, Artificial
  probe
  misc_feature (1)..(25): SEQ ID NO: 5757; WAN024GJZ_at; Start 271; Stop 295
tttacgtttcttatcggcttcagcg

SEQ ID NO: 248614 - DNA, 25 bp, Artificial
  probe
  misc_feature (1)..(25): SEQ ID NO: 5757; WAN024GJZ_at; Start 226; Stop 250
cgcaaagattgcttggtctacttca

SEQ ID NO: 248615 - DNA, 25 bp, Artificial
  probe
  misc_feature (1)..(25): SEQ ID NO: 5757; WAN024GJZ_at; Start 21; Stop 45
cttgagcttgttgcgctgctgcggc

SEQ ID NO: 248616 - DNA, 25 bp, Artificial
  probe
  misc_feature (1)..(25): SEQ ID NO: 5757; WAN024GJZ_at; Start 34; Stop 58
cgctgctgcggcttgttcgtagagt

SEQ ID NO: 248617 - DNA, 25 bp, Artificial
  probe
  misc_feature (1)..(25): SEQ ID NO: 5757; WAN024GJZ_at; Start 108; Stop 132
tcatgtcgtccaagttgttgtcttc

SEQ ID NO: 248618 - DNA, 25 bp, Artificial
  probe
  misc_feature (1)..(25): SEQ ID NO: 5757; WAN024GJZ_at; Start 65; Stop 89
gcaagtccttgagctttttcgttca

SEQ ID NO: 248619 - DNA, 25 bp, Artificial
  probe
  misc_feature (1)..(25): SEQ ID NO: 5757; WAN024GJZ_at; Start 207; Stop 231
ccttgattgtcttttcagtcgcaaa

SEQ ID NO: 248620 - DNA, 25 bp, Artificial
  probe
  misc_feature (1)..(25): SEQ ID NO: 5757; WAN024GJZ_at; Start 161; Stop 185
gcttgggcagcgtcacgttctgcgt

SEQ ID NO: 248621 - DNA, 25 bp, Artificial
  probe
  misc_feature (1)..(25): SEQ ID NO: 5757; WAN024GJZ_at; Start 324; Stop 348
cgatttcttcgtcagtcaaacctga

SEQ ID NO: 248622 - DNA, 25 bp, Artificial
  probe
  misc_feature (1)..(25): SEQ ID NO: 5757; WAN024GJZ_at; Start 135; Stop 159
gagctttcttaaggtcatcaagggc

SEQ ID NO: 248623 - DNA, 25 bp, Artificial
  probe
  misc_feature (1)..(25): SEQ ID NO: 5757; WAN024GJZ_at; Start 174; Stop 198
cacgttctgcgtcgaagcctttacc

SEQ ID NO: 248624 - DNA, 25 bp, Artificial
  probe
  misc_feature (1)..(25): SEQ ID NO: 5757; WAN024GJZ_at; Start 149; Stop 173
tcatcaagggcagcttgggcagcgt

SEQ ID NO: 248625 - DNA, 25 bp, Artificial
  probe
  misc_feature (1)..(25): SEQ ID NO: 5757; WAN024GJZ_at; Start 16; Stop 40
tccttcttgagcttgttgcgctgct

SEQ ID NO: 248626 - DNA, 25 bp, Artificial
  probe
  misc_feature (1)..(25): SEQ ID NO: 5757; WAN024GJZ_at; Start 290; Stop 314
tcagcgtttgcttctgcatctttca

SEQ ID NO: 248627 - DNA, 25 bp, Artificial
  probe
  misc_feature (1)..(25): SEQ ID NO: 5757; WAN024GJZ_at; Start 50; Stop 74
tcgtagagtttaacagcaagtcctt

SEQ ID NO: 248628 - DNA, 25 bp, Artificial
  probe
  misc_feature (1)..(25): SEQ ID NO: 5757; WAN024GJZ_at; Start 232; Stop 256
gattgcttggtctacttcattacga

SEQ ID NO: 248629 - DNA, 25 bp, Artificial
  probe
  misc_feature (1)..(25): SEQ ID NO: 5757; WAN024GJZ_at; Start 38; Stop 62
gctgcggcttgttcgtagagtttaa

SEQ ID NO: 248630 - DNA, 25 bp, Artificial
  probe
  misc_feature (1)..(25): SEQ ID NO: 5757; WAN024GJZ_at; Start 283; Stop 307
atcggcttcagcgtttgcttctgca

SEQ ID NO: 248631 - DNA, 25 bp, Artificial
  probe
  misc_feature (1)..(25): SEQ ID NO: 5757; WAN024GJZ_at; Start 189; Stop 213
agcctttaccttcagtttccttgat

SEQ ID NO: 248632 - DNA, 25 bp, Artificial
  probe
  misc_feature (1)..(25): SEQ ID NO: 5757; WAN024GJZ_at; Start 319; Stop 343
gcggtcgatttcttcgtcagtcaaa

SEQ ID NO: 248633 - DNA, 25 bp, Artificial
  probe
  misc_feature (1)..(25): SEQ ID NO: 5757; WAN024GJZ_at; Start 127; Stop 151
gtcttcttgagctttcttaaggtca

SEQ ID NO: 248634 - DNA, 25 bp, Artificial
  probe
  misc_feature (1)..(25): SEQ ID NO: 5757; WAN024GJZ_at; Start 75; Stop 99
gagctttttcgttcaatgcttcaag

SEQ ID NO: 248635 - DNA, 25 bp, Artificial
  probe
  misc_feature (1)..(25): SEQ ID NO: 5757; WAN024GJZ_at; Start 313; Stop 337
catcatgcggtcgatttcttcgtca

SEQ ID NO: 248636 - DNA, 25 bp, Artificial
  probe
  misc_feature (1)..(25): SEQ ID NO: 4313; WAN024GK2_at; Start 54; Stop 78
tgacaatggcgttacatcaagaagg

SEQ ID NO: 248637 - DNA, 25 bp, Artificial
  probe
  misc_feature (1)..(25): SEQ ID NO: 4313; WAN024GK2_at; Start 153; Stop 177
tactgatttgtttggttctttacca

SEQ ID NO: 248638 - DNA, 25 bp, Artificial
  probe
  misc_feature (1)..(25): SEQ ID NO: 4313; WAN024GK2_at; Start 200; Stop 224
caacggcagggatacgagttgaacc

SEQ ID NO: 248639 - DNA, 25 bp, Artificial
  probe
  misc_feature (1)..(25): SEQ ID NO: 4313; WAN024GK2_at; Start 175; Stop 199
ccagtttcagctttaacagcttcaa

SEQ ID NO: 248640 - DNA, 25 bp, Artificial
  probe
  misc_feature (1)..(25): SEQ ID NO: 4313; WAN024GK2_at; Start 219; Stop 243
tgaaccaccaacaaggataacttcg

SEQ ID NO: 248641 - DNA, 25 bp, Artificial
  probe
  misc_feature (1)..(25): SEQ ID NO: 4313; WAN024GK2_at; Start 133; Stop 157
gcaactacttcatcagggtttactg

SEQ ID NO: 248642 - DNA, 25 bp, Artificial
  probe
  misc_feature (1)..(25): SEQ ID NO: 4313; WAN024GK2_at; Start 246; Stop 270
gatttctgacaagctcaaacctgca

SEQ ID NO: 248643 - DNA, 25 bp, Artificial
  probe
  misc_feature (1)..(25): SEQ ID NO: 4313; WAN024GK2_at; Start 40; Stop 64
gtttcgataccaagtgacaatggcg

SEQ ID NO: 248644 - DNA, 25 bp, Artificial
  probe
  misc_feature (1)..(25): SEQ ID NO: 4313; WAN024GK2_at; Start 204; Stop 228
ggcagggatacgagttgaaccacca

SEQ ID NO: 248645 - DNA, 25 bp, Artificial
  probe
  misc_feature (1)..(25): SEQ ID NO: 4313; WAN024GK2_at; Start 248; Stop 272
tttctgacaagctcaaacctgcatc

SEQ ID NO: 248646 - DNA, 25 bp, Artificial
  probe
  misc_feature (1)..(25): SEQ ID NO: 4313; WAN024GK2_at; Start 84; Stop 108
gtccttgacatcaccagtaatcaca

SEQ ID NO: 248647 - DNA, 25 bp, Artificial
  probe
  misc_feature (1)..(25): SEQ ID NO: 4313; WAN024GK2_at; Start 22; Stop 46
gtaaatactccacccattgtttcga

SEQ ID NO: 248648 - DNA, 25 bp, Artificial
  probe
  misc_feature (1)..(25): SEQ ID NO: 4313; WAN024GK2_at; Start 16; Stop 40
agttttgtaaatactccacccattg

SEQ ID NO: 248649 - DNA, 25 bp, Artificial
  probe
  misc_feature (1)..(25): SEQ ID NO: 4313; WAN024GK2_at; Start 114; Stop 138
ttggatagccgcacccatagcaact

SEQ ID NO: 248650 - DNA, 25 bp, Artificial
  probe
  misc_feature (1)..(25): SEQ ID NO: 4313; WAN024GK2_at; Start 234; Stop 258
gataacttcgtcgatttctgacaag

SEQ ID NO: 248651 - DNA, 25 bp, Artificial
  probe
  misc_feature (1)..(25): SEQ ID NO: 4313; WAN024GK2_at; Start 227; Stop 251
caacaaggataacttcgtcgatttc

SEQ ID NO: 248652 - DNA, 25 bp, Artificial
  probe
  misc_feature (1)..(25): SEQ ID NO: 4313; WAN024GK2_at; Start 94; Stop 118
tcaccagtaatcacaccaccttgga

SEQ ID NO: 248653 - DNA, 25 bp, Artificial
  probe
  misc_feature (1)..(25): SEQ ID NO: 4313; WAN024GK2_at; Start 188; Stop 212
taacagcttcaacaacggcagggat

SEQ ID NO: 248654 - DNA, 25 bp, Artificial
  probe
  misc_feature (1)..(25): SEQ ID NO: 4313; WAN024GK2_at; Start 161; Stop 185
tgtttggttctttaccagtttcagc

SEQ ID NO: 248655 - DNA, 25 bp, Artificial
  probe
  misc_feature (1)..(25): SEQ ID NO: 4313; WAN024GK2_at; Start 117; Stop 141
gatagccgcacccatagcaactact

SEQ ID NO: 248656 - DNA, 25 bp, Artificial
  probe
  misc_feature (1)..(25): SEQ ID NO: 4313; WAN024GK2_at; Start 128; Stop 152
ccatagcaactacttcatcagggtt

SEQ ID NO: 248657 - DNA, 25 bp, Artificial
  probe
  misc_feature (1)..(25): SEQ ID NO: 4313; WAN024GK2_at; Start 64; Stop 88
gttacatcaagaaggacaacgtcct

SEQ ID NO: 248658 - DNA, 25 bp, Artificial
  probe
  misc_feature (1)..(25): SEQ ID NO: 4313; WAN024GK2_at; Start 214; Stop 238
cgagttgaaccaccaacaaggataa

SEQ ID NO: 248659 - DNA, 25 bp, Artificial
  probe
  misc_feature (1)..(25): SEQ ID NO: 4313; WAN024GK2_at; Start 195; Stop 219
ttcaacaacggcagggatacgagtt

SEQ ID NO: 248660 - DNA, 25 bp, Artificial
  probe
  misc_feature (1)..(25): SEQ ID NO: 4313; WAN024GK2_at; Start 57; Stop 81
caatggcgttacatcaagaaggaca

SEQ ID NO: 248661 - DNA, 25 bp, Artificial
  probe
  misc_feature (1)..(25): SEQ ID NO: 4313; WAN024GK2_at; Start 186; Stop 210
tttaacagcttcaacaacggcaggg

SEQ ID NO: 248662 - DNA, 25 bp, Artificial
  probe
  misc_feature (1)..(25): SEQ ID NO: 4313; WAN024GK2_at; Start 34; Stop 58
cccattgtttcgataccaagtgaca

SEQ ID NO: 248663 - DNA, 25 bp, Artificial
  probe
  misc_feature (1)..(25): SEQ ID NO: 4313; WAN024GK2_at; Start 138; Stop 162
tacttcatcagggtttactgatttg

SEQ ID NO: 248664 - DNA, 25 bp, Artificial
  probe
  misc_feature (1)..(25): SEQ ID NO: 4313; WAN024GK2_at; Start 1; Stop 25
gtgttgcgatcgataagttttgtaa

SEQ ID NO: 248665 - DNA, 25 bp, Artificial
  probe
  misc_feature (1)..(25): SEQ ID NO: 4313; WAN024GK2_at; Start 78; Stop 102
gacaacgtccttgacatcaccagta

SEQ ID NO: 248666 - DNA, 25 bp, Artificial
  probe
  misc_feature (1)..(25): SEQ ID NO: 4313; WAN024GK2_at; Start 101; Stop 125
taatcacaccaccttggatagccgc

SEQ ID NO: 248667 - DNA, 25 bp, Artificial
  probe
  misc_feature (1)..(25): SEQ ID NO: 4313; WAN024GK2_at; Start 210; Stop 234
gatacgagttgaaccaccaacaagg

SEQ ID NO: 248668 - DNA, 25 bp, Artificial
  probe
  misc_feature (1)..(25): SEQ ID NO: 4313; WAN024GK2_at; Start 45; Stop 69
gataccaagtgacaatggcgttaca

SEQ ID NO: 248669 - DNA, 25 bp, Artificial
  probe
  misc_feature (1)..(25): SEQ ID NO: 4313; WAN024GK2_at; Start 49; Stop 73
ccaagtgacaatggcgttacatcaa

SEQ ID NO: 248670 - DNA, 25 bp, Artificial
  probe
  misc_feature (1)..(25): SEQ ID NO: 5496; WAN024GK3_at; Start 187; Stop 211
aacgtggatatcaacggctggttgg

SEQ ID NO: 248671 - DNA, 25 bp, Artificial
  probe
  misc_feature (1)..(25): SEQ ID NO: 5496; WAN024GK3_at; Start 103; Stop 127
tccacgaggtgcagctgggatatca

SEQ ID NO: 248672 - DNA, 25 bp, Artificial
  probe
  misc_feature (1)..(25): SEQ ID NO: 5496; WAN024GK3_at; Start 129; Stop 153
tcaattggaagcgtccaagagtctt

SEQ ID NO: 248673 - DNA, 25 bp, Artificial
  probe
  misc_feature (1)..(25): SEQ ID NO: 5496; WAN024GK3_at; Start 156; Stop 180
tatctgctgccattgggcgttcacc

SEQ ID NO: 248674 - DNA, 25 bp, Artificial
  probe
  misc_feature (1)..(25): SEQ ID NO: 5496; WAN024GK3_at; Start 31; Stop 55
tccaaggtctttggccttaacagac

SEQ ID NO: 248675 - DNA, 25 bp, Artificial
  probe
  misc_feature (1)..(25): SEQ ID NO: 5496; WAN024GK3_at; Start 166; Stop 190
cattgggcgttcaccttgaagaacg

SEQ ID NO: 248676 - DNA, 25 bp, Artificial
  probe
  misc_feature (1)..(25): SEQ ID NO: 5496; WAN024GK3_at; Start 163; Stop 187
tgccattgggcgttcaccttgaaga

SEQ ID NO: 248677 - DNA, 25 bp, Artificial
  probe
  misc_feature (1)..(25): SEQ ID NO: 5496; WAN024GK3_at; Start 107; Stop 131
cgaggtgcagctgggatatcagtca

SEQ ID NO: 248678 - DNA, 25 bp, Artificial
  probe
  misc_feature (1)..(25): SEQ ID NO: 5496; WAN024GK3_at; Start 143; Stop 167
ccaagagtcttgttatctgctgcca

SEQ ID NO: 248679 - DNA, 25 bp, Artificial
  probe
  misc_feature (1)..(25): SEQ ID NO: 5496; WAN024GK3_at; Start 171; Stop 195
ggcgttcaccttgaagaacgtggat

SEQ ID NO: 248680 - DNA, 25 bp, Artificial
  probe
  misc_feature (1)..(25): SEQ ID NO: 5496; WAN024GK3_at; Start 199; Stop 223
aacggctggttggttgtctgctgct

SEQ ID NO: 248681 - DNA, 25 bp, Artificial
  probe
  misc_feature (1)..(25): SEQ ID NO: 5496; WAN024GK3_at; Start 40; Stop 64
tttggccttaacagacacgataccg

SEQ ID NO: 248682 - DNA, 25 bp, Artificial
  probe
  misc_feature (1)..(25): SEQ ID NO: 5496; WAN024GK3_at; Start 133; Stop 157
ttggaagcgtccaagagtcttgtta

SEQ ID NO: 248683 - DNA, 25 bp, Artificial
  probe
  misc_feature (1)..(25): SEQ ID NO: 5496; WAN024GK3_at; Start 90; Stop 114
cgatttgaggaattccacgaggtgc

SEQ ID NO: 248684 - DNA, 25 bp, Artificial
  probe
  misc_feature (1)..(25): SEQ ID NO: 5496; WAN024GK3_at; Start 123; Stop 147
tatcagtcaattggaagcgtccaag

SEQ ID NO: 248685 - DNA, 25 bp, Artificial
  probe
  misc_feature (1)..(25): SEQ ID NO: 5496; WAN024GK3_at; Start 34; Stop 58
aaggtctttggccttaacagacacg

SEQ ID NO: 248686 - DNA, 25 bp, Artificial
  probe
  misc_feature (1)..(25): SEQ ID NO: 5496; WAN024GK3_at; Start 117; Stop 141
ctgggatatcagtcaattggaagcg

SEQ ID NO: 248687 - DNA, 25 bp, Artificial
  probe
  misc_feature (1)..(25): SEQ ID NO: 5496; WAN024GK3_at; Start 26; Stop 50
tgagttccaaggtctttggccttaa

SEQ ID NO: 248688 - DNA, 25 bp, Artificial
  probe
  misc_feature (1)..(25): SEQ ID NO: 5496; WAN024GK3_at; Start 113; Stop 137
gcagctgggatatcagtcaattgga

SEQ ID NO: 248689 - DNA, 25 bp, Artificial
  probe
  misc_feature (1)..(25): SEQ ID NO: 5496; WAN024GK3_at; Start 55; Stop 79
cacgataccgttcttgtcgatgtca

SEQ ID NO: 248690 - DNA, 25 bp, Artificial
  probe
  misc_feature (1)..(25): SEQ ID NO: 5496; WAN024GK3_at; Start 4; Stop 28
gatgacaatagtttgttctttttga

SEQ ID NO: 248691 - DNA, 25 bp, Artificial
  probe
  misc_feature (1)..(25): SEQ ID NO: 5496; WAN024GK3_at; Start 99; Stop 123
gaattccacgaggtgcagctgggat

SEQ ID NO: 248692 - DNA, 25 bp, Artificial
  probe
  misc_feature (1)..(25): SEQ ID NO: 5496; WAN024GK3_at; Start 42; Stop 66
tggccttaacagacacgataccgtt

SEQ ID NO: 248693 - DNA, 25 bp, Artificial
  probe
  misc_feature (1)..(25): SEQ ID NO: 5496; WAN024GK3_at; Start 182; Stop 206
tgaagaacgtggatatcaacggctg

SEQ ID NO: 248694 - DNA, 25 bp, Artificial
  probe
  misc_feature (1)..(25): SEQ ID NO: 5496; WAN024GK3_at; Start 121; Stop 145
gatatcagtcaattggaagcgtcca

SEQ ID NO: 248695 - DNA, 25 bp, Artificial
  probe
  misc_feature (1)..(25): SEQ ID NO: 5496; WAN024GK3_at; Start 147; Stop 171
gagtcttgttatctgctgccattgg

SEQ ID NO: 248696 - DNA, 25 bp, Artificial
  probe
  misc_feature (1)..(25): SEQ ID NO: 5496; WAN024GK3_at; Start 195; Stop 219
tatcaacggctggttggttgtctgc

SEQ ID NO: 248697 - DNA, 25 bp, Artificial
  probe
  misc_feature (1)..(25): SEQ ID NO: 5496; WAN024GK3_at; Start 176; Stop 200
tcaccttgaagaacgtggatatcaa

SEQ ID NO: 248698 - DNA, 25 bp, Artificial
  probe
  misc_feature (1)..(25): SEQ ID NO: 5496; WAN024GK3_at; Start 150; Stop 174
tcttgttatctgctgccattgggcg

SEQ ID NO: 248699 - DNA, 25 bp, Artificial
  probe
  misc_feature (1)..(25): SEQ ID NO: 5496; WAN024GK3_at; Start 94; Stop 118
ttgaggaattccacgaggtgcagct

SEQ ID NO: 248700 - DNA, 25 bp, Artificial
  probe
  misc_feature (1)..(25): SEQ ID NO: 5496; WAN024GK3_at; Start 83; Stop 107
gttacttcgatttgaggaattccac

SEQ ID NO: 248701 - DNA, 25 bp, Artificial
  probe
  misc_feature (1)..(25): SEQ ID NO: 5496; WAN024GK3_at; Start 48; Stop 72
taacagacacgataccgttcttgtc

SEQ ID NO: 248702 - DNA, 25 bp, Artificial
  probe
  misc_feature (1)..(25): SEQ ID NO: 5496; WAN024GK3_at; Start 60; Stop 84
taccgttcttgtcgatgtcaaatgt

SEQ ID NO: 248703 - DNA, 25 bp, Artificial
  probe
  misc_feature (1)..(25): SEQ ID NO: 5496; WAN024GK3_at; Start 67; Stop 91
cttgtcgatgtcaaatgttacttcg

SEQ ID NO: 248704 - DNA, 25 bp, Artificial
  probe
  misc_feature (1)..(25): SEQ ID NO: 2904; WAN024GK4_at; Start 1291; Stop 1315
gatatcccagctgcacctcgtggaa

SEQ ID NO: 248705 - DNA, 25 bp, Artificial
  probe
  misc_feature (1)..(25): SEQ ID NO: 2904; WAN024GK4_at; Start 1606; Stop 1630
caagctgcccttgatgaccttaaga

SEQ ID NO: 248706 - DNA, 25 bp, Artificial
  probe
  misc_feature (1)..(25): SEQ ID NO: 2904; WAN024GK4_at; Start 688; Stop 712
caacgtttgaaagatgcggctgaaa

SEQ ID NO: 248707 - DNA, 25 bp, Artificial
  probe
  misc_feature (1)..(25): SEQ ID NO: 2904; WAN024GK4_at; Start 445; Stop 469
gcagctcttgcttatggtttggaca

SEQ ID NO: 248708 - DNA, 25 bp, Artificial
  probe
  misc_feature (1)..(25): SEQ ID NO: 2904; WAN024GK4_at; Start 283; Stop 307
caatacttgaaaggctacgctgaag

SEQ ID NO: 248709 - DNA, 25 bp, Artificial
  probe
  misc_feature (1)..(25): SEQ ID NO: 2904; WAN024GK4_at; Start 1001; Stop 1025
cagtaaaccctgatgaagtagttgc

SEQ ID NO: 248710 - DNA, 25 bp, Artificial
  probe
  misc_feature (1)..(25): SEQ ID NO: 2904; WAN024GK4_at; Start 947; Stop 971
tccctgccgttgttgaagctgttaa

SEQ ID NO: 248711 - DNA, 25 bp, Artificial
  probe
  misc_feature (1)..(25): SEQ ID NO: 2904; WAN024GK4_at; Start 298; Stop 322
tacgctgaagactaccttggtgaga

SEQ ID NO: 248712 - DNA, 25 bp, Artificial
  probe
  misc_feature (1)..(25): SEQ ID NO: 2904; WAN024GK4_at; Start 22; Stop 46
gacttaggtacaacaaactcagcag

SEQ ID NO: 248713 - DNA, 25 bp, Artificial
  probe
  misc_feature (1)..(25): SEQ ID NO: 2904; WAN024GK4_at; Start 1708; Stop 1732
gttaaactctacgaacaagccgcag

SEQ ID NO: 248714 - DNA, 25 bp, Artificial
  probe
  misc_feature (1)..(25): SEQ ID NO: 2904; WAN024GK4_at; Start 1100; Stop 1124
tgtcacttggtatcgaaacaatggg

SEQ ID NO: 248715 - DNA, 25 bp, Artificial
  probe
  misc_feature (1)..(25): SEQ ID NO: 2904; WAN024GK4_at; Start 1245; Stop 1269
cccaatggcagcagataacaagact

SEQ ID NO: 248716 - DNA, 25 bp, Artificial
  probe
  misc_feature (1)..(25): SEQ ID NO: 2904; WAN024GK4_at; Start 1352; Stop 1376
acggtatcgtgtctgttaaggccaa

SEQ ID NO: 248717 - DNA, 25 bp, Artificial
  probe
  misc_feature (1)..(25): SEQ ID NO: 2904; WAN024GK4_at; Start 834; Stop 858
gactcgtgaccttgttgaacgtaca

SEQ ID NO: 248718 - DNA, 25 bp, Artificial
  probe
  misc_feature (1)..(25): SEQ ID NO: 2904; WAN024GK4_at; Start 531; Stop 555
tatccttgaattgggtgacggtgtc

SEQ ID NO: 248719 - DNA, 25 bp, Artificial
  probe
  misc_feature (1)..(25): SEQ ID NO: 2904; WAN024GK4_at; Start 71; Stop 95
gcaaaatcatcgcaaacccagaagg

SEQ ID NO: 248720 - DNA, 25 bp, Artificial
  probe
  misc_feature (1)..(25): SEQ ID NO: 2904; WAN024GK4_at; Start 669; Stop 693
tactgacaagatggcaatgcaacgt

SEQ ID NO: 248721 - DNA, 25 bp, Artificial
  probe
  misc_feature (1)..(25): SEQ ID NO: 2904; WAN024GK4_at; Start 1177; Stop 1201
tcacaagtcttctcaacagcagcag

SEQ ID NO: 248722 - DNA, 25 bp, Artificial
  probe
  misc_feature (1)..(25): SEQ ID NO: 2904; WAN024GK4_at; Start 1732; Stop 1756
gcagcgcaacaagctcaagaaggag

SEQ ID NO: 248723 - DNA, 25 bp, Artificial
  probe
  misc_feature (1)..(25): SEQ ID NO: 2904; WAN024GK4_at; Start 1336; Stop 1360
tttgacatcgacaagaacggtatcg

SEQ ID NO: 248724 - DNA, 25 bp, Artificial
  probe
  misc_feature (1)..(25): SEQ ID NO: 2904; WAN024GK4_at; Start 1230; Stop 1254
tcttcaaggtgaacgcccaatggca

SEQ ID NO: 248725 - DNA, 25 bp, Artificial
  probe
  misc_feature (1)..(25): SEQ ID NO: 2904; WAN024GK4_at; Start 582; Stop 606
caacaaacttggtggtgacgacttt

SEQ ID NO: 248726 - DNA, 25 bp, Artificial
  probe
  misc_feature (1)..(25): SEQ ID NO: 2904; WAN024GK4_at; Start 1639; Stop 1663
gaagacaacaacttggacgacatga

SEQ ID NO: 248727 - DNA, 25 bp, Artificial
  probe
  misc_feature (1)..(25): SEQ ID NO: 2904; WAN024GK4_at; Start 390; Stop 414
cgctggtaaaattgctggtcttgaa

SEQ ID NO: 248728 - DNA, 25 bp, Artificial
  probe
  misc_feature (1)..(25): SEQ ID NO: 2904; WAN024GK4_at; Start 1428; Stop 1452
tttgactgacgaagaaatcgaccgc

SEQ ID NO: 248729 - DNA, 25 bp, Artificial
  probe
  misc_feature (1)..(25): SEQ ID NO: 2904; WAN024GK4_at; Start 426; Stop 450
tgttaacgaaccaactgcagcagct

SEQ ID NO: 248730 - DNA, 25 bp, Artificial
  probe
  misc_feature (1)..(25): SEQ ID NO: 2904; WAN024GK4_at; Start 778; Stop 802
gaggctggacctcttcacttggaaa

SEQ ID NO: 248731 - DNA, 25 bp, Artificial
  probe
  misc_feature (1)..(25): SEQ ID NO: 2904; WAN024GK4_at; Start 504; Stop 528
ccttggtggtggtacattcgacgtc

SEQ ID NO: 248732 - DNA, 25 bp, Artificial
  probe
  misc_feature (1)..(25): SEQ ID NO: 2904; WAN024GK4_at; Start 764; Stop 788
ttatcactgcaggtgaggctggacc

SEQ ID NO: 248733 - DNA, 25 bp, Artificial
  probe
  misc_feature (1)..(25): SEQ ID NO: 2904; WAN024GK4_at; Start 1682; Stop 1706
tgaacgaaaaagctcaaggacttgc

SEQ ID NO: 248734 - DNA, 25 bp, Artificial
  probe
  misc_feature (1)..(25): SEQ ID NO: 2904; WAN024GK4_at; Start 1019; Stop 1043
tagttgctatgggtgcggctatcca

SEQ ID NO: 248735 - DNA, 25 bp, Artificial
  probe
  misc_feature (1)..(25): SEQ ID NO: 2904; WAN024GK4_at; Start 931; Stop 955
ggtggttcaactcgtatccctgccg

SEQ ID NO: 248736 - DNA, 25 bp, Artificial
  probe
  misc_feature (1)..(25): SEQ ID NO: 2904; WAN024GK4_at; Start 855; Stop 879
tacaaaagttccagttcgtcaagcc

SEQ ID NO: 248737 - DNA, 25 bp, Artificial
  probe
  misc_feature (1)..(25): SEQ ID NO: 2904; WAN024GK4_at; Start 554; Stop 578
tcttcgacgtattgtcaactgcagg

SEQ ID NO: 248738 - DNA, 25 bp, Artificial
  probe
  misc_feature (1)..(25): SEQ ID NO: 5648; WAN024GK5_at; Start 28; Stop 52
gccaaacatattttatctttcttca

SEQ ID NO: 248739 - DNA, 25 bp, Artificial
  probe
  misc_feature (1)..(25): SEQ ID NO: 5648; WAN024GK5_at; Start 182; Stop 206
cgagttgctttagctaccgtcagaa

SEQ ID NO: 248740 - DNA, 25 bp, Artificial
  probe
  misc_feature (1)..(25): SEQ ID NO: 5648; WAN024GK5_at; Start 80; Stop 104
tctattatgtaaattgcgacacgag

SEQ ID NO: 248741 - DNA, 25 bp, Artificial
  probe
  misc_feature (1)..(25): SEQ ID NO: 5648; WAN024GK5_at; Start 134; Stop 158
agttagtaaggaagctaggcaaacg

SEQ ID NO: 248742 - DNA, 25 bp, Artificial
  probe
  misc_feature (1)..(25): SEQ ID NO: 5648; WAN024GK5_at; Start 115; Stop 139
cgattttatttcgacgacgagttag

SEQ ID NO: 248743 - DNA, 25 bp, Artificial
  probe
  misc_feature (1)..(25): SEQ ID NO: 5648; WAN024GK5_at; Start 190; Stop 214
tttagctaccgtcagaattgccgaa

SEQ ID NO: 248744 - DNA, 25 bp, Artificial
  probe
  misc_feature (1)..(25): SEQ ID NO: 5648; WAN024GK5_at; Start 111; Stop 135
aaatcgattttatttcgacgacgag

SEQ ID NO: 248745 - DNA, 25 bp, Artificial
  probe
  misc_feature (1)..(25): SEQ ID NO: 5648; WAN024GK5_at; Start 64; Stop 88
cgtttcggacaagttttctattatg

SEQ ID NO: 248746 - DNA, 25 bp, Artificial
  probe
  misc_feature (1)..(25): SEQ ID NO: 5648; WAN024GK5_at; Start 94; Stop 118
tgcgacacgaggagtcgaaatcgat

SEQ ID NO: 248747 - DNA, 25 bp, Artificial
  probe
  misc_feature (1)..(25): SEQ ID NO: 5648; WAN024GK5_at; Start 3; Stop 27
ggttcgcttcgctcactattacaaa

SEQ ID NO: 248748 - DNA, 25 bp, Artificial
  probe
  misc_feature (1)..(25): SEQ ID NO: 5648; WAN024GK5_at; Start 206; Stop 230
attgccgaatcgaacacgccctaag

SEQ ID NO: 248749 - DNA, 25 bp, Artificial
  probe
  misc_feature (1)..(25): SEQ ID NO: 5648; WAN024GK5_at; Start 216; Stop 240
cgaacacgccctaagctctgagtaa

SEQ ID NO: 248750 - DNA, 25 bp, Artificial
  probe
  misc_feature (1)..(25): SEQ ID NO: 5648; WAN024GK5_at; Start 85; Stop 109
tatgtaaattgcgacacgaggagtc

SEQ ID NO: 248751 - DNA, 25 bp, Artificial
  probe
  misc_feature (1)..(25): SEQ ID NO: 5648; WAN024GK5_at; Start 51; Stop 75
catagtttattgtcgtttcggacaa

SEQ ID NO: 248752 - DNA, 25 bp, Artificial
  probe
  misc_feature (1)..(25): SEQ ID NO: 5648; WAN024GK5_at; Start 194; Stop 218
gctaccgtcagaattgccgaatcga

SEQ ID NO: 248753 - DNA, 25 bp, Artificial
  probe
  misc_feature (1)..(25): SEQ ID NO: 5648; WAN024GK5_at; Start 99; Stop 123
cacgaggagtcgaaatcgattttat

SEQ ID NO: 248754 - DNA, 25 bp, Artificial
  probe
  misc_feature (1)..(25): SEQ ID NO: 5648; WAN024GK5_at; Start 176; Stop 200
ttctgacgagttgctttagctaccg

SEQ ID NO: 248755 - DNA, 25 bp, Artificial
  probe
  misc_feature (1)..(25): SEQ ID NO: 5648; WAN024GK5_at; Start 132; Stop 156
cgagttagtaaggaagctaggcaaa

SEQ ID NO: 248756 - DNA, 25 bp, Artificial
  probe
  misc_feature (1)..(25): SEQ ID NO: 5648; WAN024GK5_at; Start 13; Stop 37
gctcactattacaaagccaaacata

SEQ ID NO: 248757 - DNA, 25 bp, Artificial
  probe
  misc_feature (1)..(25): SEQ ID NO: 5648; WAN024GK5_at; Start 8; Stop 32
gcttcgctcactattacaaagccaa

SEQ ID NO: 248758 - DNA, 25 bp, Artificial
  probe
  misc_feature (1)..(25): SEQ ID NO: 5648; WAN024GK5_at; Start 47; Stop 71
tcttcatagtttattgtcgtttcgg

SEQ ID NO: 248759 - DNA, 25 bp, Artificial
  probe
  misc_feature (1)..(25): SEQ ID NO: 5648; WAN024GK5_at; Start 129; Stop 153
cgacgagttagtaaggaagctaggc

SEQ ID NO: 248760 - DNA, 25 bp, Artificial
  probe
  misc_feature (1)..(25): SEQ ID NO: 5648; WAN024GK5_at; Start 192; Stop 216
tagctaccgtcagaattgccgaatc

SEQ ID NO: 248761 - DNA, 25 bp, Artificial
  probe
  misc_feature (1)..(25): SEQ ID NO: 5648; WAN024GK5_at; Start 201; Stop 225
tcagaattgccgaatcgaacacgcc

SEQ ID NO: 248762 - DNA, 25 bp, Artificial
  probe
  misc_feature (1)..(25): SEQ ID NO: 5648; WAN024GK5_at; Start 170; Stop 194
gccgttttctgacgagttgctttag

SEQ ID NO: 248763 - DNA, 25 bp, Artificial
  probe
  misc_feature (1)..(25): SEQ ID NO: 5648; WAN024GK5_at; Start 89; Stop 113
taaattgcgacacgaggagtcgaaa

SEQ ID NO: 248764 - DNA, 25 bp, Artificial
  probe
  misc_feature (1)..(25): SEQ ID NO: 5648; WAN024GK5_at; Start 165; Stop 189
cgattgccgttttctgacgagttgc

SEQ ID NO: 248765 - DNA, 25 bp, Artificial
  probe
  misc_feature (1)..(25): SEQ ID NO: 5648; WAN024GK5_at; Start 121; Stop 145
tatttcgacgacgagttagtaagga

SEQ ID NO: 248766 - DNA, 25 bp, Artificial
  probe
  misc_feature (1)..(25): SEQ ID NO: 5648; WAN024GK5_at; Start 185; Stop 209
gttgctttagctaccgtcagaattg

SEQ ID NO: 248767 - DNA, 25 bp, Artificial
  probe
  misc_feature (1)..(25): SEQ ID NO: 5648; WAN024GK5_at; Start 125; Stop 149
tcgacgacgagttagtaaggaagct

SEQ ID NO: 248768 - DNA, 25 bp, Artificial
  probe
  misc_feature (1)..(25): SEQ ID NO: 5648; WAN024GK5_at; Start 204; Stop 228
gaattgccgaatcgaacacgcccta

SEQ ID NO: 248769 - DNA, 25 bp, Artificial
  probe
  misc_feature (1)..(25): SEQ ID NO: 5648; WAN024GK5_at; Start 188; Stop 212
gctttagctaccgtcagaattgccg

SEQ ID NO: 248770 - DNA, 25 bp, Artificial
  probe
  misc_feature (1)..(25): SEQ ID NO: 5648; WAN024GK5_at; Start 196; Stop 220
taccgtcagaattgccgaatcgaac

SEQ ID NO: 248771 - DNA, 25 bp, Artificial
  probe
  misc_feature (1)..(25): SEQ ID NO: 5648; WAN024GK5_at; Start 161; Stop 185
atagcgattgccgttttctgacgag

SEQ ID NO: 248772 - DNA, 25 bp, Artificial
  probe
  misc_feature (1)..(25): SEQ ID NO: 7139; WAN024GK6_at; Start 82; Stop 106
ctcagcagtactcatcagcattttc

SEQ ID NO: 248773 - DNA, 25 bp, Artificial
  probe
  misc_feature (1)..(25): SEQ ID NO: 7139; WAN024GK6_at; Start 92; Stop 116
ctcatcagcattttctatcaaaaat

SEQ ID NO: 248774 - DNA, 25 bp, Artificial
  probe
  misc_feature (1)..(25): SEQ ID NO: 7139; WAN024GK6_at; Start 90; Stop 114
tactcatcagcattttctatcaaaa

SEQ ID NO: 248775 - DNA, 25 bp, Artificial
  probe
  misc_feature (1)..(25): SEQ ID NO: 7139; WAN024GK6_at; Start 91; Stop 115
actcatcagcattttctatcaaaaa

SEQ ID NO: 248776 - DNA, 25 bp, Artificial
  probe
  misc_feature (1)..(25): SEQ ID NO: 7139; WAN024GK6_at; Start 84; Stop 108
cagcagtactcatcagcattttcta

SEQ ID NO: 248777 - DNA, 25 bp, Artificial
  probe
  misc_feature (1)..(25): SEQ ID NO: 7139; WAN024GK6_at; Start 89; Stop 113
gtactcatcagcattttctatcaaa

SEQ ID NO: 248778 - DNA, 25 bp, Artificial
  probe
  misc_feature (1)..(25): SEQ ID NO: 7139; WAN024GK6_at; Start 88; Stop 112
agtactcatcagcattttctatcaa

SEQ ID NO: 248779 - DNA, 25 bp, Artificial
  probe
  misc_feature (1)..(25): SEQ ID NO: 7139; WAN024GK6_at; Start 87; Stop 111
cagtactcatcagcattttctatca

SEQ ID NO: 248780 - DNA, 25 bp, Artificial
  probe
  misc_feature (1)..(25): SEQ ID NO: 7139; WAN024GK6_at; Start 93; Stop 117
tcatcagcattttctatcaaaaata

SEQ ID NO: 248781 - DNA, 25 bp, Artificial
  probe
  misc_feature (1)..(25): SEQ ID NO: 7139; WAN024GK6_at; Start 83; Stop 107
tcagcagtactcatcagcattttct

SEQ ID NO: 248782 - DNA, 25 bp, Artificial
  probe
  misc_feature (1)..(25): SEQ ID NO: 7139; WAN024GK6_at; Start 79; Stop 103
tacctcagcagtactcatcagcatt

SEQ ID NO: 248783 - DNA, 25 bp, Artificial
  probe
  misc_feature (1)..(25): SEQ ID NO: 7139; WAN024GK6_at; Start 78; Stop 102
ctacctcagcagtactcatcagcat

SEQ ID NO: 248784 - DNA, 25 bp, Artificial
  probe
  misc_feature (1)..(25): SEQ ID NO: 7139; WAN024GK6_at; Start 80; Stop 104
acctcagcagtactcatcagcattt

SEQ ID NO: 248785 - DNA, 25 bp, Artificial
  probe
  misc_feature (1)..(25): SEQ ID NO: 7139; WAN024GK6_at; Start 86; Stop 110
gcagtactcatcagcattttctatc

SEQ ID NO: 248786 - DNA, 25 bp, Artificial
  probe
  misc_feature (1)..(25): SEQ ID NO: 7139; WAN024GK6_at; Start 77; Stop 101
gctacctcagcagtactcatcagca

SEQ ID NO: 248787 - DNA, 25 bp, Artificial
  probe
  misc_feature (1)..(25): SEQ ID NO: 7139; WAN024GK6_at; Start 81; Stop 105
cctcagcagtactcatcagcatttt

SEQ ID NO: 248788 - DNA, 25 bp, Artificial
  probe
  misc_feature (1)..(25): SEQ ID NO: 7139; WAN024GK6_at; Start 85; Stop 109
agcagtactcatcagcattttctat

SEQ ID NO: 248789 - DNA, 25 bp, Artificial
  probe
  misc_feature (1)..(25): SEQ ID NO: 5372; WAN024GK7_at; Start 61; Stop 85
gaccgtagattgagataccatttga

SEQ ID NO: 248790 - DNA, 25 bp, Artificial
  probe
  misc_feature (1)..(25): SEQ ID NO: 5372; WAN024GK7_at; Start 48; Stop 72
gaaaccatgtgaagaccgtagattg

SEQ ID NO: 248791 - DNA, 25 bp, Artificial
  probe
  misc_feature (1)..(25): SEQ ID NO: 5372; WAN024GK7_at; Start 21; Stop 45
ttcgctttttcaagagtcaaaccag

SEQ ID NO: 248792 - DNA, 25 bp, Artificial
  probe
  misc_feature (1)..(25): SEQ ID NO: 5372; WAN024GK7_at; Start 140; Stop 164
gataccagtgcgaacagcatttgaa

SEQ ID NO: 248793 - DNA, 25 bp, Artificial
  probe
  misc_feature (1)..(25): SEQ ID NO: 5372; WAN024GK7_at; Start 190; Stop 214
tacgagcattgtcataaacagtcgc

SEQ ID NO: 248794 - DNA, 25 bp, Artificial
  probe
  misc_feature (1)..(25): SEQ ID NO: 5372; WAN024GK7_at; Start 4; Stop 28
cgttgtaaccagcagctttcgcttt

SEQ ID NO: 248795 - DNA, 25 bp, Artificial
  probe
  misc_feature (1)..(25): SEQ ID NO: 5372; WAN024GK7_at; Start 135; Stop 159
ccaacgataccagtgcgaacagcat

SEQ ID NO: 248796 - DNA, 25 bp, Artificial
  probe
  misc_feature (1)..(25): SEQ ID NO: 5372; WAN024GK7_at; Start 100; Stop 124
ttccttccaattcatgtccacaagc

SEQ ID NO: 248797 - DNA, 25 bp, Artificial
  probe
  misc_feature (1)..(25): SEQ ID NO: 5372; WAN024GK7_at; Start 195; Stop 219
gcattgtcataaacagtcgcacagt

SEQ ID NO: 248798 - DNA, 25 bp, Artificial
  probe
  misc_feature (1)..(25): SEQ ID NO: 5372; WAN024GK7_at; Start 150; Stop 174
cgaacagcatttgaagcaagagcga

SEQ ID NO: 248799 - DNA, 25 bp, Artificial
  probe
  misc_feature (1)..(25): SEQ ID NO: 5372; WAN024GK7_at; Start 84; Stop 108
gaaccttgaacaccgattccttcca

SEQ ID NO: 248800 - DNA, 25 bp, Artificial
  probe
  misc_feature (1)..(25): SEQ ID NO: 5372; WAN024GK7_at; Start 157; Stop 181
catttgaagcaagagcgatatagct

SEQ ID NO: 248801 - DNA, 25 bp, Artificial
  probe
  misc_feature (1)..(25): SEQ ID NO: 5372; WAN024GK7_at; Start 165; Stop 189
gcaagagcgatatagcttgtatctt

SEQ ID NO: 248802 - DNA, 25 bp, Artificial
  probe
  misc_feature (1)..(25): SEQ ID NO: 5372; WAN024GK7_at; Start 208; Stop 232
cagtcgcacagtcaccaacagcgta

SEQ ID NO: 248803 - DNA, 25 bp, Artificial
  probe
  misc_feature (1)..(25): SEQ ID NO: 5372; WAN024GK7_at; Start 24; Stop 48
gctttttcaagagtcaaaccagttg

SEQ ID NO: 248804 - DNA, 25 bp, Artificial
  probe
  misc_feature (1)..(25): SEQ ID NO: 5372; WAN024GK7_at; Start 1; Stop 25
ttgcgttgtaaccagcagctttcgc

SEQ ID NO: 248805 - DNA, 25 bp, Artificial
  probe
  misc_feature (1)..(25): SEQ ID NO: 5372; WAN024GK7_at; Start 10; Stop 34
aaccagcagctttcgctttttcaag

SEQ ID NO: 248806 - DNA, 25 bp, Artificial
  probe
  misc_feature (1)..(25): SEQ ID NO: 5372; WAN024GK7_at; Start 144; Stop 168
ccagtgcgaacagcatttgaagcaa

SEQ ID NO: 248807 - DNA, 25 bp, Artificial
  probe
  misc_feature (1)..(25): SEQ ID NO: 5372; WAN024GK7_at; Start 42; Stop 66
ccagttgaaaccatgtgaagaccgt

SEQ ID NO: 248808 - DNA, 25 bp, Artificial
  probe
  misc_feature (1)..(25): SEQ ID NO: 5372; WAN024GK7_at; Start 68; Stop 92
gattgagataccatttgaaccttga

SEQ ID NO: 248809 - DNA, 25 bp, Artificial
  probe
  misc_feature (1)..(25): SEQ ID NO: 5372; WAN024GK7_at; Start 15; Stop 39
gcagctttcgctttttcaagagtca

SEQ ID NO: 248810 - DNA, 25 bp, Artificial
  probe
  misc_feature (1)..(25): SEQ ID NO: 5372; WAN024GK7_at; Start 74; Stop 98
gataccatttgaaccttgaacaccg

SEQ ID NO: 248811 - DNA, 25 bp, Artificial
  probe
  misc_feature (1)..(25): SEQ ID NO: 5372; WAN024GK7_at; Start 34; Stop 58
gagtcaaaccagttgaaaccatgtg

SEQ ID NO: 248812 - DNA, 25 bp, Artificial
  probe
  misc_feature (1)..(25): SEQ ID NO: 5372; WAN024GK7_at; Start 98; Stop 122
gattccttccaattcatgtccacaa

SEQ ID NO: 248813 - DNA, 25 bp, Artificial
  probe
  misc_feature (1)..(25): SEQ ID NO: 5372; WAN024GK7_at; Start 129; Stop 153
taggcaccaacgataccagtgcgaa

SEQ ID NO: 248814 - DNA, 25 bp, Artificial
  probe
  misc_feature (1)..(25): SEQ ID NO: 5372; WAN024GK7_at; Start 79; Stop 103
catttgaaccttgaacaccgattcc

SEQ ID NO: 248815 - DNA, 25 bp, Artificial
  probe
  misc_feature (1)..(25): SEQ ID NO: 5372; WAN024GK7_at; Start 126; Stop 150
ttgtaggcaccaacgataccagtgc

SEQ ID NO: 248816 - DNA, 25 bp, Artificial
  probe
  misc_feature (1)..(25): SEQ ID NO: 5372; WAN024GK7_at; Start 55; Stop 79
tgtgaagaccgtagattgagatacc

SEQ ID NO: 248817 - DNA, 25 bp, Artificial
  probe
  misc_feature (1)..(25): SEQ ID NO: 5372; WAN024GK7_at; Start 91; Stop 115
gaacaccgattccttccaattcatg

SEQ ID NO: 248818 - DNA, 25 bp, Artificial
  probe
  misc_feature (1)..(25): SEQ ID NO: 5372; WAN024GK7_at; Start 212; Stop 236
cgcacagtcaccaacagcgtaaacg

SEQ ID NO: 248819 - DNA, 25 bp, Artificial
  probe
  misc_feature (1)..(25): SEQ ID NO: 5372; WAN024GK7_at; Start 45; Stop 69
gttgaaaccatgtgaagaccgtaga

SEQ ID NO: 248820 - DNA, 25 bp, Artificial
  probe
  misc_feature (1)..(25): SEQ ID NO: 5372; WAN024GK7_at; Start 179; Stop 203
gcttgtatctttacgagcattgtca

SEQ ID NO: 248821 - DNA, 25 bp, Artificial
  probe
  misc_feature (1)..(25): SEQ ID NO: 5372; WAN024GK7_at; Start 173; Stop 197
gatatagcttgtatctttacgagca

SEQ ID NO: 248822 - DNA, 25 bp, Artificial
  probe
  misc_feature (1)..(25): SEQ ID NO: 5372; WAN024GK7_at; Start 200; Stop 224
gtcataaacagtcgcacagtcacca

SEQ ID NO: 248823 - DNA, 25 bp, Artificial
  probe
  misc_feature (1)..(25): SEQ ID NO: 3013; WAN024GK8_at; Start 50; Stop 74
tatccaacatggtattgatacatgc

SEQ ID NO: 248824 - DNA, 25 bp, Artificial
  probe
  misc_feature (1)..(25): SEQ ID NO: 3013; WAN024GK8_at; Start 73; Stop 97
gctgtaccagcgtggttagcaccga

SEQ ID NO: 248825 - DNA, 25 bp, Artificial
  probe
  misc_feature (1)..(25): SEQ ID NO: 3013; WAN024GK8_at; Start 95; Stop 119
cgactacaacgattttactcataaa

SEQ ID NO: 248826 - DNA, 25 bp, Artificial
  probe
  misc_feature (1)..(25): SEQ ID NO: 3013; WAN024GK8_at; Start 110; Stop 134
tactcataaaaatttcctgccttca

SEQ ID NO: 248827 - DNA, 25 bp, Artificial
  probe
  misc_feature (1)..(25): SEQ ID NO: 3013; WAN024GK8_at; Start 85; Stop 109
tggttagcaccgactacaacgattt

SEQ ID NO: 248828 - DNA, 25 bp, Artificial
  probe
  misc_feature (1)..(25): SEQ ID NO: 3013; WAN024GK8_at; Start 186; Stop 210
ggtactattatttcagcatttttta

SEQ ID NO: 248829 - DNA, 25 bp, Artificial
  probe
  misc_feature (1)..(25): SEQ ID NO: 3013; WAN024GK8_at; Start 2; Stop 26
tgttagagttttggtcaaatacaac

SEQ ID NO: 248830 - DNA, 25 bp, Artificial
  probe
  misc_feature (1)..(25): SEQ ID NO: 3013; WAN024GK8_at; Start 37; Stop 61
tcatttccaaaattatccaacatgg

SEQ ID NO: 248831 - DNA, 25 bp, Artificial
  probe
  misc_feature (1)..(25): SEQ ID NO: 3013; WAN024GK8_at; Start 127; Stop 151
tgccttcattctaaatttaccttac

SEQ ID NO: 248832 - DNA, 25 bp, Artificial
  probe
  misc_feature (1)..(25): SEQ ID NO: 3013; WAN024GK8_at; Start 23; Stop 47
caacaatttcgttctcatttccaaa

SEQ ID NO: 248833 - DNA, 25 bp, Artificial
  probe
  misc_feature (1)..(25): SEQ ID NO: 3013; WAN024GK8_at; Start 53; Stop 77
ccaacatggtattgatacatgctgt

SEQ ID NO: 248834 - DNA, 25 bp, Artificial
  probe
  misc_feature (1)..(25): SEQ ID NO: 3013; WAN024GK8_at; Start 60; Stop 84
ggtattgatacatgctgtaccagcg

SEQ ID NO: 248835 - DNA, 25 bp, Artificial
  probe
  misc_feature (1)..(25): SEQ ID NO: 3013; WAN024GK8_at; Start 12; Stop 36
ttggtcaaatacaacaatttcgttc

SEQ ID NO: 248836 - DNA, 25 bp, Artificial
  probe
  misc_feature (1)..(25): SEQ ID NO: 3013; WAN024GK8_at; Start 70; Stop 94
catgctgtaccagcgtggttagcac

SEQ ID NO: 248837 - DNA, 25 bp, Artificial
  probe
  misc_feature (1)..(25): SEQ ID NO: 3013; WAN024GK8_at; Start 64; Stop 88
ttgatacatgctgtaccagcgtggt

SEQ ID NO: 248838 - DNA, 25 bp, Artificial
  probe
  misc_feature (1)..(25): SEQ ID NO: 3013; WAN024GK8_at; Start 66; Stop 90
gatacatgctgtaccagcgtggtta

SEQ ID NO: 248839 - DNA, 25 bp, Artificial
  probe
  misc_feature (1)..(25): SEQ ID NO: 3013; WAN024GK8_at; Start 62; Stop 86
tattgatacatgctgtaccagcgtg

SEQ ID NO: 248840 - DNA, 25 bp, Artificial
  probe
  misc_feature (1)..(25): SEQ ID NO: 3013; WAN024GK8_at; Start 82; Stop 106
gcgtggttagcaccgactacaacga

SEQ ID NO: 248841 - DNA, 25 bp, Artificial
  probe
  misc_feature (1)..(25): SEQ ID NO: 3013; WAN024GK8_at; Start 57; Stop 81
catggtattgatacatgctgtacca

SEQ ID NO: 248842 - DNA, 25 bp, Artificial
  probe
  misc_feature (1)..(25): SEQ ID NO: 3013; WAN024GK8_at; Start 89; Stop 113
tagcaccgactacaacgattttact

SEQ ID NO: 248843 - DNA, 25 bp, Artificial
  probe
  misc_feature (1)..(25): SEQ ID NO: 3013; WAN024GK8_at; Start 42; Stop 66
tccaaaattatccaacatggtattg

SEQ ID NO: 248844 - DNA, 25 bp, Artificial
  probe
  misc_feature (1)..(25): SEQ ID NO: 3013; WAN024GK8_at; Start 124; Stop 148
tcctgccttcattctaaatttacct

SEQ ID NO: 248845 - DNA, 25 bp, Artificial
  probe
  misc_feature (1)..(25): SEQ ID NO: 3013; WAN024GK8_at; Start 179; Stop 203
caaggggggtactattatttcagca

SEQ ID NO: 248846 - DNA, 25 bp, Artificial
  probe
  misc_feature (1)..(25): SEQ ID NO: 3013; WAN024GK8_at; Start 91; Stop 115
gcaccgactacaacgattttactca

SEQ ID NO: 248847 - DNA, 25 bp, Artificial
  probe
  misc_feature (1)..(25): SEQ ID NO: 3013; WAN024GK8_at; Start 68; Stop 92
tacatgctgtaccagcgtggttagc

SEQ ID NO: 248848 - DNA, 25 bp, Artificial
  probe
  misc_feature (1)..(25): SEQ ID NO: 3013; WAN024GK8_at; Start 79; Stop 103
ccagcgtggttagcaccgactacaa

SEQ ID NO: 248849 - DNA, 25 bp, Artificial
  probe
  misc_feature (1)..(25): SEQ ID NO: 3013; WAN024GK8_at; Start 149; Stop 173
tactagtataccatttaccgttagc

SEQ ID NO: 248850 - DNA, 25 bp, Artificial
  probe
  misc_feature (1)..(25): SEQ ID NO: 3013; WAN024GK8_at; Start 151; Stop 175
ctagtataccatttaccgttagcgt

SEQ ID NO: 248851 - DNA, 25 bp, Artificial
  probe
  misc_feature (1)..(25): SEQ ID NO: 3013; WAN024GK8_at; Start 77; Stop 101
taccagcgtggttagcaccgactac

SEQ ID NO: 248852 - DNA, 25 bp, Artificial
  probe
  misc_feature (1)..(25): SEQ ID NO: 3013; WAN024GK8_at; Start 75; Stop 99
tgtaccagcgtggttagcaccgact

SEQ ID NO: 248853 - DNA, 25 bp, Artificial
  probe
  misc_feature (1)..(25): SEQ ID NO: 3013; WAN024GK8_at; Start 133; Stop 157
cattctaaatttaccttactagtat

SEQ ID NO: 248854 - DNA, 25 bp, Artificial
  probe
  misc_feature (1)..(25): SEQ ID NO: 3013; WAN024GK8_at; Start 116; Stop 140
taaaaatttcctgccttcattctaa

SEQ ID NO: 248855 - DNA, 25 bp, Artificial
  probe
  misc_feature (1)..(25): SEQ ID NO: 3013; WAN024GK8_at; Start 87; Stop 111
gttagcaccgactacaacgatttta

SEQ ID NO: 248856 - DNA, 25 bp, Artificial
  probe
  misc_feature (1)..(25): SEQ ID NO: 3013; WAN024GK8_at; Start 14; Stop 38
ggtcaaatacaacaatttcgttctc

SEQ ID NO: 248857 - DNA, 25 bp, Artificial
  probe
  misc_feature (1)..(25): SEQ ID NO: 4002; WAN024GK9_at; Start 196; Stop 220
gataacttcttcagcattttggtac

SEQ ID NO: 248858 - DNA, 25 bp, Artificial
  probe
  misc_feature (1)..(25): SEQ ID NO: 4002; WAN024GK9_at; Start 156; Stop 180
cgatacggtcgaggtgttggctctt

SEQ ID NO: 248859 - DNA, 25 bp, Artificial
  probe
  misc_feature (1)..(25): SEQ ID NO: 4002; WAN024GK9_at; Start 19; Stop 43
cgccatcatttgtgtgaagtctttg

SEQ ID NO: 248860 - DNA, 25 bp, Artificial
  probe
  misc_feature (1)..(25): SEQ ID NO: 4002; WAN024GK9_at; Start 224; Stop 248
ttcacgaattgtacgttttcaagag

SEQ ID NO: 248861 - DNA, 25 bp, Artificial
  probe
  misc_feature (1)..(25): SEQ ID NO: 4002; WAN024GK9_at; Start 11; Stop 35
aagttcttcgccatcatttgtgtga

SEQ ID NO: 248862 - DNA, 25 bp, Artificial
  probe
  misc_feature (1)..(25): SEQ ID NO: 4002; WAN024GK9_at; Start 207; Stop 231
cagcattttggtacaatttcacgaa

SEQ ID NO: 248863 - DNA, 25 bp, Artificial
  probe
  misc_feature (1)..(25): SEQ ID NO: 4002; WAN024GK9_at; Start 146; Stop 170
ccaacaacggcgatacggtcgaggt

SEQ ID NO: 248864 - DNA, 25 bp, Artificial
  probe
  misc_feature (1)..(25): SEQ ID NO: 4002; WAN024GK9_at; Start 107; Stop 131
tcaaaggcttcagcaagttcaacac

SEQ ID NO: 248865 - DNA, 25 bp, Artificial
  probe
  misc_feature (1)..(25): SEQ ID NO: 4002; WAN024GK9_at; Start 37; Stop 61
gtctttgtcatagtaaccgttcaag

SEQ ID NO: 248866 - DNA, 25 bp, Artificial
  probe
  misc_feature (1)..(25): SEQ ID NO: 4002; WAN024GK9_at; Start 116; Stop 140
tcagcaagttcaacaccgatgtaac

SEQ ID NO: 248867 - DNA, 25 bp, Artificial
  probe
  misc_feature (1)..(25): SEQ ID NO: 4002; WAN024GK9_at; Start 61; Stop 85
gacagtatcaacgatatcaacaagg

SEQ ID NO: 248868 - DNA, 25 bp, Artificial
  probe
  misc_feature (1)..(25): SEQ ID NO: 4002; WAN024GK9_at; Start 187; Stop 211
aagtttattgataacttcttcagca

SEQ ID NO: 248869 - DNA, 25 bp, Artificial
  probe
  misc_feature (1)..(25): SEQ ID NO: 4002; WAN024GK9_at; Start 81; Stop 105
caaggacaacttcttttccaagacg

SEQ ID NO: 248870 - DNA, 25 bp, Artificial
  probe
  misc_feature (1)..(25): SEQ ID NO: 4002; WAN024GK9_at; Start 242; Stop 266
tcaagagttgctttaaattcgcggt

SEQ ID NO: 248871 - DNA, 25 bp, Artificial
  probe
  misc_feature (1)..(25): SEQ ID NO: 4002; WAN024GK9_at; Start 317; Stop 341
cctgtagcgaaaatcaatttttcgt

SEQ ID NO: 248872 - DNA, 25 bp, Artificial
  probe
  misc_feature (1)..(25): SEQ ID NO: 4002; WAN024GK9_at; Start 164; Stop 188
tcgaggtgttggctcttgtcagaaa

SEQ ID NO: 248873 - DNA, 25 bp, Artificial
  probe
  misc_feature (1)..(25): SEQ ID NO: 4002; WAN024GK9_at; Start 1; Stop 25
gtgatcttccaagttcttcgccatc

SEQ ID NO: 248874 - DNA, 25 bp, Artificial
  probe
  misc_feature (1)..(25): SEQ ID NO: 4002; WAN024GK9_at; Start 47; Stop 71
tagtaaccgttcaagacagtatcaa

SEQ ID NO: 248875 - DNA, 25 bp, Artificial
  probe
  misc_feature (1)..(25): SEQ ID NO: 4002; WAN024GK9_at; Start 148; Stop 172
aacaacggcgatacggtcgaggtgt

SEQ ID NO: 248876 - DNA, 25 bp, Artificial
  probe
  misc_feature (1)..(25): SEQ ID NO: 4002; WAN024GK9_at; Start 277; Stop 301
aatttcaacaccttcgattggtggc

SEQ ID NO: 248877 - DNA, 25 bp, Artificial
  probe
  misc_feature (1)..(25): SEQ ID NO: 4002; WAN024GK9_at; Start 112; Stop 136
ggcttcagcaagttcaacaccgatg

SEQ ID NO: 248878 - DNA, 25 bp, Artificial
  probe
  misc_feature (1)..(25): SEQ ID NO: 4002; WAN024GK9_at; Start 31; Stop 55
tgtgaagtctttgtcatagtaaccg

SEQ ID NO: 248879 - DNA, 25 bp, Artificial
  probe
  misc_feature (1)..(25): SEQ ID NO: 4002; WAN024GK9_at; Start 174; Stop 198
ggctcttgtcagaaagtttattgat

SEQ ID NO: 248880 - DNA, 25 bp, Artificial
  probe
  misc_feature (1)..(25): SEQ ID NO: 4002; WAN024GK9_at; Start 95; Stop 119
tttccaagacgttcaaaggcttcag

SEQ ID NO: 248881 - DNA, 25 bp, Artificial
  probe
  misc_feature (1)..(25): SEQ ID NO: 4002; WAN024GK9_at; Start 287; Stop 311
ccttcgattggtggcaagattggtg

SEQ ID NO: 248882 - DNA, 25 bp, Artificial
  probe
  misc_feature (1)..(25): SEQ ID NO: 4002; WAN024GK9_at; Start 168; Stop 192
ggtgttggctcttgtcagaaagttt

SEQ ID NO: 248883 - DNA, 25 bp, Artificial
  probe
  misc_feature (1)..(25): SEQ ID NO: 4002; WAN024GK9_at; Start 68; Stop 92
tcaacgatatcaacaaggacaactt

SEQ ID NO: 248884 - DNA, 25 bp, Artificial
  probe
  misc_feature (1)..(25): SEQ ID NO: 4002; WAN024GK9_at; Start 282; Stop 306
caacaccttcgattggtggcaagat

SEQ ID NO: 248885 - DNA, 25 bp, Artificial
  probe
  misc_feature (1)..(25): SEQ ID NO: 4002; WAN024GK9_at; Start 159; Stop 183
tacggtcgaggtgttggctcttgtc

SEQ ID NO: 248886 - DNA, 25 bp, Artificial
  probe
  misc_feature (1)..(25): SEQ ID NO: 4002; WAN024GK9_at; Start 228; Stop 252
cgaattgtacgttttcaagagttgc

SEQ ID NO: 248887 - DNA, 25 bp, Artificial
  probe
  misc_feature (1)..(25): SEQ ID NO: 4002; WAN024GK9_at; Start 54; Stop 78
cgttcaagacagtatcaacgatatc

SEQ ID NO: 248888 - DNA, 25 bp, Artificial
  probe
  misc_feature (1)..(25): SEQ ID NO: 4002; WAN024GK9_at; Start 273; Stop 297
taacaatttcaacaccttcgattgg

SEQ ID NO: 248889 - DNA, 25 bp, Artificial
  probe
  misc_feature (1)..(25): SEQ ID NO: 4002; WAN024GK9_at; Start 134; Stop 158
atgtaaccaccaccaacaacggcga

SEQ ID NO: 248890 - DNA, 25 bp, Artificial
  probe
  misc_feature (1)..(25): SEQ ID NO: 4002; WAN024GK9_at; Start 121; Stop 145
aagttcaacaccgatgtaaccacca

SEQ ID NO: 248891 - DNA, 25 bp, Artificial
  probe
  misc_feature (1)..(25): SEQ ID NO: 4910; WAN024GKA_at; Start 290; Stop 314
cacttgcagttgaaggtttgacaga

SEQ ID NO: 248892 - DNA, 25 bp, Artificial
  probe
  misc_feature (1)..(25): SEQ ID NO: 4910; WAN024GKA_at; Start 162; Stop 186
tcttcgcgctcatgcagaaatgcaa

SEQ ID NO: 248893 - DNA, 25 bp, Artificial
  probe
  misc_feature (1)..(25): SEQ ID NO: 4910; WAN024GKA_at; Start 512; Stop 536
gcatcctacgcccagcaatggtagt

SEQ ID NO: 248894 - DNA, 25 bp, Artificial
  probe
  misc_feature (1)..(25): SEQ ID NO: 4910; WAN024GKA_at; Start 224; Stop 248
tgcaacgttatcgtagccaggactt

SEQ ID NO: 248895 - DNA, 25 bp, Artificial
  probe
  misc_feature (1)..(25): SEQ ID NO: 4910; WAN024GKA_at; Start 83; Stop 107
aaacagctgaagaaacaactcctga

SEQ ID NO: 248896 - DNA, 25 bp, Artificial
  probe
  misc_feature (1)..(25): SEQ ID NO: 4910; WAN024GKA_at; Start 414; Stop 438
taactaccatatggccatccaaact

SEQ ID NO: 248897 - DNA, 25 bp, Artificial
  probe
  misc_feature (1)..(25): SEQ ID NO: 4910; WAN024GKA_at; Start 263; Stop 287
taccatctcttgacaaccttgagcg

SEQ ID NO: 248898 - DNA, 25 bp, Artificial
  probe
  misc_feature (1)..(25): SEQ ID NO: 4910; WAN024GKA_at; Start 275; Stop 299
acaaccttgagcgtgcacttgcagt

SEQ ID NO: 248899 - DNA, 25 bp, Artificial
  probe
  misc_feature (1)..(25): SEQ ID NO: 4910; WAN024GKA_at; Start 136; Stop 160
cgtgcagatgagttcgaaaacaaat

SEQ ID NO: 248900 - DNA, 25 bp, Artificial
  probe
  misc_feature (1)..(25): SEQ ID NO: 4910; WAN024GKA_at; Start 11; Stop 35
taaaggaggcgaacatggcccaaga

SEQ ID NO: 248901 - DNA, 25 bp, Artificial
  probe
  misc_feature (1)..(25): SEQ ID NO: 4910; WAN024GKA_at; Start 178; Stop 202
gaaatgcaaaatatccaacgccgtg

SEQ ID NO: 248902 - DNA, 25 bp, Artificial
  probe
  misc_feature (1)..(25): SEQ ID NO: 4910; WAN024GKA_at; Start 112; Stop 136
tctgagttggacttggcaaatgaac

SEQ ID NO: 248903 - DNA, 25 bp, Artificial
  probe
  misc_feature (1)..(25): SEQ ID NO: 4910; WAN024GKA_at; Start 491; Stop 515
aaggctacaaactccatgaccgcat

SEQ ID NO: 248904 - DNA, 25 bp, Artificial
  probe
  misc_feature (1)..(25): SEQ ID NO: 4910; WAN024GKA_at; Start 358; Stop 382
cacgctttgaaagaagaaggaattg

SEQ ID NO: 248905 - DNA, 25 bp, Artificial
  probe
  misc_feature (1)..(25): SEQ ID NO: 4910; WAN024GKA_at; Start 151; Stop 175
gaaaacaaatatcttcgcgctcatg

SEQ ID NO: 248906 - DNA, 25 bp, Artificial
  probe
  misc_feature (1)..(25): SEQ ID NO: 4910; WAN024GKA_at; Start 308; Stop 332
tgacagatgatgtgaagaagggctt

SEQ ID NO: 248907 - DNA, 25 bp, Artificial
  probe
  misc_feature (1)..(25): SEQ ID NO: 4910; WAN024GKA_at; Start 57; Stop 81
agaagttcaagaagaggaagttgtg

SEQ ID NO: 248908 - DNA, 25 bp, Artificial
  probe
  misc_feature (1)..(25): SEQ ID NO: 4910; WAN024GKA_at; Start 388; Stop 412
atcgcagcagatggcgaatttgacc

SEQ ID NO: 248909 - DNA, 25 bp, Artificial
  probe
  misc_feature (1)..(25): SEQ ID NO: 4910; WAN024GKA_at; Start 99; Stop 123
aactcctgaaaagtctgagttggac

SEQ ID NO: 248910 - DNA, 25 bp, Artificial
  probe
  misc_feature (1)..(25): SEQ ID NO: 4910; WAN024GKA_at; Start 447; Stop 471
agacgatgaacacccagtagatacc

SEQ ID NO: 248911 - DNA, 25 bp, Artificial
  probe
  misc_feature (1)..(25): SEQ ID NO: 4910; WAN024GKA_at; Start 400; Stop 424
ggcgaatttgaccataactaccata

SEQ ID NO: 248912 - DNA, 25 bp, Artificial
  probe
  misc_feature (1)..(25): SEQ ID NO: 4910; WAN024GKA_at; Start 484; Stop 508
tttcaaaaaggctacaaactccatg

SEQ ID NO: 248913 - DNA, 25 bp, Artificial
  probe
  misc_feature (1)..(25): SEQ ID NO: 4910; WAN024GKA_at; Start 2; Stop 26
tgaaatcattaaaggaggcgaacat

SEQ ID NO: 248914 - DNA, 25 bp, Artificial
  probe
  misc_feature (1)..(25): SEQ ID NO: 4910; WAN024GKA_at; Start 452; Stop 476
atgaacacccagtagataccatcgc

SEQ ID NO: 248915 - DNA, 25 bp, Artificial
  probe
  misc_feature (1)..(25): SEQ ID NO: 4910; WAN024GKA_at; Start 193; Stop 217
caacgccgtgccaatgaagaacgtc

SEQ ID NO: 248916 - DNA, 25 bp, Artificial
  probe
  misc_feature (1)..(25): SEQ ID NO: 4910; WAN024GKA_at; Start 336; Stop 360
gatggtgcaagaaagcttgattcac

SEQ ID NO: 248917 - DNA, 25 bp, Artificial
  probe
  misc_feature (1)..(25): SEQ ID NO: 4910; WAN024GKA_at; Start 207; Stop 231
tgaagaacgtcaaaacttgcaacgt

SEQ ID NO: 248918 - DNA, 25 bp, Artificial
  probe
  misc_feature (1)..(25): SEQ ID NO: 4910; WAN024GKA_at; Start 522; Stop 546
cccagcaatggtagtggtgtataac

SEQ ID NO: 248919 - DNA, 25 bp, Artificial
  probe
  misc_feature (1)..(25): SEQ ID NO: 4910; WAN024GKA_at; Start 373; Stop 397
gaaggaattgaagaaatcgcagcag

SEQ ID NO: 248920 - DNA, 25 bp, Artificial
  probe
  misc_feature (1)..(25): SEQ ID NO: 4910; WAN024GKA_at; Start 24; Stop 48
catggcccaagatataaaaaatgaa

SEQ ID NO: 248921 - DNA, 25 bp, Artificial
  probe
  misc_feature (1)..(25): SEQ ID NO: 4910; WAN024GKA_at; Start 121; Stop 145
gacttggcaaatgaacgtgcagatg

SEQ ID NO: 248922 - DNA, 25 bp, Artificial
  probe
  misc_feature (1)..(25): SEQ ID NO: 4910; WAN024GKA_at; Start 350; Stop 374
gcttgattcacgctttgaaagaaga

SEQ ID NO: 248923 - DNA, 25 bp, Artificial
  probe
  misc_feature (1)..(25): SEQ ID NO: 4910; WAN024GKA_at; Start 237; Stop 261
tagccaggacttggcaaaagcaatc

SEQ ID NO: 248924 - DNA, 25 bp, Artificial
  probe
  misc_feature (1)..(25): SEQ ID NO: 4910; WAN024GKA_at; Start 248; Stop 272
tggcaaaagcaatcttaccatctct

SEQ ID NO: 248925 - DNA, 25 bp, Artificial
  probe
  misc_feature (1)..(25): SEQ ID NO: 3354; WAN024GKB_at; Start 276; Stop 300
gcgtgaatcaagctttcttgcacca

SEQ ID NO: 248926 - DNA, 25 bp, Artificial
  probe
  misc_feature (1)..(25): SEQ ID NO: 3354; WAN024GKB_at; Start 306; Stop 330
aagcccttcttcacatcatctgtca

SEQ ID NO: 248927 - DNA, 25 bp, Artificial
  probe
  misc_feature (1)..(25): SEQ ID NO: 3354; WAN024GKB_at; Start 608; Stop 632
ggccatgttcgcctcctttaatgat

SEQ ID NO: 248928 - DNA, 25 bp, Artificial
  probe
  misc_feature (1)..(25): SEQ ID NO: 3354; WAN024GKB_at; Start 599; Stop 623
tatatcttgggccatgttcgcctcc

SEQ ID NO: 248929 - DNA, 25 bp, Artificial
  probe
  misc_feature (1)..(25): SEQ ID NO: 3354; WAN024GKB_at; Start 13; Stop 37
gatagattttcttgtgttcatcgaa

SEQ ID NO: 248930 - DNA, 25 bp, Artificial
  probe
  misc_feature (1)..(25): SEQ ID NO: 3354; WAN024GKB_at; Start 264; Stop 288
tcttctttcaaagcgtgaatcaagc

SEQ ID NO: 248931 - DNA, 25 bp, Artificial
  probe
  misc_feature (1)..(25): SEQ ID NO: 3354; WAN024GKB_at; Start 355; Stop 379
caaggttgtcaagagatggtaagat

SEQ ID NO: 248932 - DNA, 25 bp, Artificial
  probe
  misc_feature (1)..(25): SEQ ID NO: 3354; WAN024GKB_at; Start 497; Stop 521
tgcacgttcatttgccaagtccaac

SEQ ID NO: 248933 - DNA, 25 bp, Artificial
  probe
  misc_feature (1)..(25): SEQ ID NO: 3354; WAN024GKB_at; Start 433; Stop 457
tggcacggcgttggatattttgcat

SEQ ID NO: 248934 - DNA, 25 bp, Artificial
  probe
  misc_feature (1)..(25): SEQ ID NO: 3354; WAN024GKB_at; Start 418; Stop 442
tttgacgttcttcattggcacggcg

SEQ ID NO: 248935 - DNA, 25 bp, Artificial
  probe
  misc_feature (1)..(25): SEQ ID NO: 3354; WAN024GKB_at; Start 374; Stop 398
taagattgcttttgccaagtcctgg

SEQ ID NO: 248936 - DNA, 25 bp, Artificial
  probe
  misc_feature (1)..(25): SEQ ID NO: 3354; WAN024GKB_at; Start 226; Stop 250
ggtcaaattcgccatctgctgcgat

SEQ ID NO: 248937 - DNA, 25 bp, Artificial
  probe
  misc_feature (1)..(25): SEQ ID NO: 3354; WAN024GKB_at; Start 478; Stop 502
atttgttttcgaactcatctgcacg

SEQ ID NO: 248938 - DNA, 25 bp, Artificial
  probe
  misc_feature (1)..(25): SEQ ID NO: 3354; WAN024GKB_at; Start 686; Stop 710
gtcaacttcatggtcaaaacacggt

SEQ ID NO: 248939 - DNA, 25 bp, Artificial
  probe
  misc_feature (1)..(25): SEQ ID NO: 3354; WAN024GKB_at; Start 27; Stop 51
tgttcatcgaacacttcgtcaatct

SEQ ID NO: 248940 - DNA, 25 bp, Artificial
  probe
  misc_feature (1)..(25): SEQ ID NO: 3354; WAN024GKB_at; Start 44; Stop 68
gtcaatctcctatttttactgcgag

SEQ ID NO: 248941 - DNA, 25 bp, Artificial
  probe
  misc_feature (1)..(25): SEQ ID NO: 3354; WAN024GKB_at; Start 400; Stop 424
tacgataacgttgcaagttttgacg

SEQ ID NO: 248942 - DNA, 25 bp, Artificial
  probe
  misc_feature (1)..(25): SEQ ID NO: 3354; WAN024GKB_at; Start 460; Stop 484
ctgcatgagcgcgaagatatttgtt

SEQ ID NO: 248943 - DNA, 25 bp, Artificial
  probe
  misc_feature (1)..(25): SEQ ID NO: 3354; WAN024GKB_at; Start 653; Stop 677
taatgattactgctgaggtagcggt

SEQ ID NO: 248944 - DNA, 25 bp, Artificial
  probe
  misc_feature (1)..(25): SEQ ID NO: 3354; WAN024GKB_at; Start 122; Stop 146
gatgcggtcatggagtttgtagcct

SEQ ID NO: 248945 - DNA, 25 bp, Artificial
  probe
  misc_feature (1)..(25): SEQ ID NO: 3354; WAN024GKB_at; Start 102; Stop 126
actaccattgctgggcgtaggatgc

SEQ ID NO: 248946 - DNA, 25 bp, Artificial
  probe
  misc_feature (1)..(25): SEQ ID NO: 3354; WAN024GKB_at; Start 240; Stop 264
tctgctgcgatttcttcaattcctt

SEQ ID NO: 248947 - DNA, 25 bp, Artificial
  probe
  misc_feature (1)..(25): SEQ ID NO: 3354; WAN024GKB_at; Start 390; Stop 414
aagtcctggctacgataacgttgca

SEQ ID NO: 248948 - DNA, 25 bp, Artificial
  probe
  misc_feature (1)..(25): SEQ ID NO: 3354; WAN024GKB_at; Start 698; Stop 722
gtcaaaacacggttgaccacattga

SEQ ID NO: 248949 - DNA, 25 bp, Artificial
  probe
  misc_feature (1)..(25): SEQ ID NO: 3354; WAN024GKB_at; Start 526; Stop 550
acttttcaggagttgtttcttcagc

SEQ ID NO: 248950 - DNA, 25 bp, Artificial
  probe
  misc_feature (1)..(25): SEQ ID NO: 3354; WAN024GKB_at; Start 341; Stop 365
tgcaagtgcacgctcaaggttgtca

SEQ ID NO: 248951 - DNA, 25 bp, Artificial
  probe
  misc_feature (1)..(25): SEQ ID NO: 3354; WAN024GKB_at; Start 92; Stop 116
gttatacaccactaccattgctggg

SEQ ID NO: 248952 - DNA, 25 bp, Artificial
  probe
  misc_feature (1)..(25): SEQ ID NO: 3354; WAN024GKB_at; Start 324; Stop 348
tctgtcaaaccttcaactgcaagtg

SEQ ID NO: 248953 - DNA, 25 bp, Artificial
  probe
  misc_feature (1)..(25): SEQ ID NO: 3354; WAN024GKB_at; Start 167; Stop 191
ggtatctactgggtgttcatcgtct

SEQ ID NO: 248954 - DNA, 25 bp, Artificial
  probe
  misc_feature (1)..(25): SEQ ID NO: 3354; WAN024GKB_at; Start 214; Stop 238
tatggtagttatggtcaaattcgcc

SEQ ID NO: 248955 - DNA, 25 bp, Artificial
  probe
  misc_feature (1)..(25): SEQ ID NO: 3354; WAN024GKB_at; Start 448; Stop 472
tattttgcatttctgcatgagcgcg

SEQ ID NO: 248956 - DNA, 25 bp, Artificial
  probe
  misc_feature (1)..(25): SEQ ID NO: 3354; WAN024GKB_at; Start 200; Stop 224
agtttggatggccatatggtagtta

SEQ ID NO: 248957 - DNA, 25 bp, Artificial
  probe
  misc_feature (1)..(25): SEQ ID NO: 3354; WAN024GKB_at; Start 667; Stop 691
gaggtagcggtaaaaatctgtcaac

SEQ ID NO: 248958 - DNA, 25 bp, Artificial
  probe
  misc_feature (1)..(25): SEQ ID NO: 3354; WAN024GKB_at; Start 512; Stop 536
caagtccaactcagacttttcagga

SEQ ID NO: 248959 - DNA, 25 bp, Artificial
  probe
  misc_feature (1)..(25): SEQ ID NO: 4084; WAN024GKC_at; Start 821; Stop 845
tgcgtgaggatcagatgcaaaatgt

SEQ ID NO: 248960 - DNA, 25 bp, Artificial
  probe
  misc_feature (1)..(25): SEQ ID NO: 4084; WAN024GKC_at; Start 780; Stop 804
tgaccaaccgcaaaaggtggccttg

SEQ ID NO: 248961 - DNA, 25 bp, Artificial
  probe
  misc_feature (1)..(25): SEQ ID NO: 4084; WAN024GKC_at; Start 222; Stop 246
gccaagtgttgctggttttcagtac

SEQ ID NO: 248962 - DNA, 25 bp, Artificial
  probe
  misc_feature (1)..(25): SEQ ID NO: 4084; WAN024GKC_at; Start 306; Stop 330
caaagcctttgatcaggaattcttc

SEQ ID NO: 248963 - DNA, 25 bp, Artificial
  probe
  misc_feature (1)..(25): SEQ ID NO: 4084; WAN024GKC_at; Start 571; Stop 595
caggaacgtttcctcggtcacaccg

SEQ ID NO: 248964 - DNA, 25 bp, Artificial
  probe
  misc_feature (1)..(25): SEQ ID NO: 4084; WAN024GKC_at; Start 586; Stop 610
ggtcacaccgttttagatattcact

SEQ ID NO: 248965 - DNA, 25 bp, Artificial
  probe
  misc_feature (1)..(25): SEQ ID NO: 4084; WAN024GKC_at; Start 146; Stop 170
caaccattcgtaatgacatggcgga

SEQ ID NO: 248966 - DNA, 25 bp, Artificial
  probe
  misc_feature (1)..(25): SEQ ID NO: 4084; WAN024GKC_at; Start 98; Stop 122
aacctgtcggatcaaaagccttgca

SEQ ID NO: 248967 - DNA, 25 bp, Artificial
  probe
  misc_feature (1)..(25): SEQ ID NO: 4084; WAN024GKC_at; Start 84; Stop 108
taccaaaacgcacgaacctgtcgga

SEQ ID NO: 248968 - DNA, 25 bp, Artificial
  probe
  misc_feature (1)..(25): SEQ ID NO: 4084; WAN024GKC_at; Start 132; Stop 156
taactctagcagtgcaaccattcgt

SEQ ID NO: 248969 - DNA, 25 bp, Artificial
  probe
  misc_feature (1)..(25): SEQ ID NO: 4084; WAN024GKC_at; Start 28; Stop 52
gatgagatggttacagagcgtcagc

SEQ ID NO: 248970 - DNA, 25 bp, Artificial
  probe
  misc_feature (1)..(25): SEQ ID NO: 4084; WAN024GKC_at; Start 558; Stop 582
gaagagcatcattcaggaacgtttc

SEQ ID NO: 248971 - DNA, 25 bp, Artificial
  probe
  misc_feature (1)..(25): SEQ ID NO: 4084; WAN024GKC_at; Start 747; Stop 771
gaattttgccaatctagcagcctat

SEQ ID NO: 248972 - DNA, 25 bp, Artificial
  probe
  misc_feature (1)..(25): SEQ ID NO: 4084; WAN024GKC_at; Start 523; Stop 547
ccaaggaacttcttgcaggaggatt

SEQ ID NO: 248973 - DNA, 25 bp, Artificial
  probe
  misc_feature (1)..(25): SEQ ID NO: 4084; WAN024GKC_at; Start 711; Stop 735
cgaaaacattgtgatggcgggcaag

SEQ ID NO: 248974 - DNA, 25 bp, Artificial
  probe
  misc_feature (1)..(25): SEQ ID NO: 4084; WAN024GKC_at; Start 656; Stop 680
caacaacggataatgtcatcgatct

SEQ ID NO: 248975 - DNA, 25 bp, Artificial
  probe
  misc_feature (1)..(25): SEQ ID NO: 4084; WAN024GKC_at; Start 3; Stop 27
gctaattgatcagacagagaggagt

SEQ ID NO: 248976 - DNA, 25 bp, Artificial
  probe
  misc_feature (1)..(25): SEQ ID NO: 4084; WAN024GKC_at; Start 407; Stop 431
ttgagccgagcaggcaacgtttgac

SEQ ID NO: 248977 - DNA, 25 bp, Artificial
  probe
  misc_feature (1)..(25): SEQ ID NO: 4084; WAN024GKC_at; Start 898; Stop 922
agtaagttcctcattccttatcggg

SEQ ID NO: 248978 - DNA, 25 bp, Artificial
  probe
  misc_feature (1)..(25): SEQ ID NO: 4084; WAN024GKC_at; Start 763; Stop 787
gcagcctatcagttctttgaccaac

SEQ ID NO: 248979 - DNA, 25 bp, Artificial
  probe
  misc_feature (1)..(25): SEQ ID NO: 4084; WAN024GKC_at; Start 41; Stop 65
cagagcgtcagcaggatattttaaa

SEQ ID NO: 248980 - DNA, 25 bp, Artificial
  probe
  misc_feature (1)..(25): SEQ ID NO: 4084; WAN024GKC_at; Start 326; Stop 350
tcttcaaattggaggatattctgca

SEQ ID NO: 248981 - DNA, 25 bp, Artificial
  probe
  misc_feature (1)..(25): SEQ ID NO: 4084; WAN024GKC_at; Start 507; Stop 531
tagtcagtttctgattccaaggaac

SEQ ID NO: 248982 - DNA, 25 bp, Artificial
  probe
  misc_feature (1)..(25): SEQ ID NO: 4084; WAN024GKC_at; Start 340; Stop 364
gatattctgcaagaggctgctaact

SEQ ID NO: 248983 - DNA, 25 bp, Artificial
  probe
  misc_feature (1)..(25): SEQ ID NO: 4084; WAN024GKC_at; Start 251; Stop 275
tgaaacactcactggattttgaccg

SEQ ID NO: 248984 - DNA, 25 bp, Artificial
  probe
  misc_feature (1)..(25): SEQ ID NO: 4084; WAN024GKC_at; Start 421; Stop 445
caacgtttgacagcctttgatatcg

SEQ ID NO: 248985 - DNA, 25 bp, Artificial
  probe
  misc_feature (1)..(25): SEQ ID NO: 4084; WAN024GKC_at; Start 624; Stop 648
ggagattccgcagattatccagcgt

SEQ ID NO: 248986 - DNA, 25 bp, Artificial
  probe
  misc_feature (1)..(25): SEQ ID NO: 4084; WAN024GKC_at; Start 639; Stop 663
tatccagcgttactttacaacaacg

SEQ ID NO: 248987 - DNA, 25 bp, Artificial
  probe
  misc_feature (1)..(25): SEQ ID NO: 4084; WAN024GKC_at; Start 490; Stop 514
gagtcgcgaacggttactagtcagt

SEQ ID NO: 248988 - DNA, 25 bp, Artificial
  probe
  misc_feature (1)..(25): SEQ ID NO: 4084; WAN024GKC_at; Start 368; Stop 392
taacagacctgagtggctgtacggt

SEQ ID NO: 248989 - DNA, 25 bp, Artificial
  probe
  misc_feature (1)..(25): SEQ ID NO: 4084; WAN024GKC_at; Start 474; Stop 498
ggtatttaccctagacgagtcgcga

SEQ ID NO: 248990 - DNA, 25 bp, Artificial
  probe
  misc_feature (1)..(25): SEQ ID NO: 4084; WAN024GKC_at; Start 179; Stop 203
aacaagggttgcttgagaaggctca

SEQ ID NO: 248991 - DNA, 25 bp, Artificial
  probe
  misc_feature (1)..(25): SEQ ID NO: 4084; WAN024GKC_at; Start 162; Stop 186
catggcggaactagaaaaacaaggg

SEQ ID NO: 248992 - DNA, 25 bp, Artificial
  probe
  misc_feature (1)..(25): SEQ ID NO: 4084; WAN024GKC_at; Start 454; Stop 478
gggcaacatacagccttggcggtat

SEQ ID NO: 248993 - DNA, 25 bp, Artificial
  probe
  misc_feature (1)..(25): SEQ ID NO: 1594; WAN024GKD_at; Start 898; Stop 922
gacaatgctcgtaaagatacaagct

SEQ ID NO: 248994 - DNA, 25 bp, Artificial
  probe
  misc_feature (1)..(25): SEQ ID NO: 1594; WAN024GKD_at; Start 798; Stop 822
taagatcgaactcttccgcaacggt

SEQ ID NO: 248995 - DNA, 25 bp, Artificial
  probe
  misc_feature (1)..(25): SEQ ID NO: 1594; WAN024GKD_at; Start 530; Stop 554
ttgctgaagcctttgaacgtcttgg

SEQ ID NO: 248996 - DNA, 25 bp, Artificial
  probe
  misc_feature (1)..(25): SEQ ID NO: 1594; WAN024GKD_at; Start 347; Stop 371
tcttgccaccaatcgaaggtgttga

SEQ ID NO: 248997 - DNA, 25 bp, Artificial
  probe
  misc_feature (1)..(25): SEQ ID NO: 1594; WAN024GKD_at; Start 134; Stop 158
gaatggctctttggattggtgaaca

SEQ ID NO: 248998 - DNA, 25 bp, Artificial
  probe
  misc_feature (1)..(25): SEQ ID NO: 1594; WAN024GKD_at; Start 1337; Stop 1361
catacaactacatcacaatggctgc

SEQ ID NO: 248999 - DNA, 25 bp, Artificial
  probe
  misc_feature (1)..(25): SEQ ID NO: 1594; WAN024GKD_at; Start 423; Stop 447
cgtgaaattgtaccaaaatgctgaa

SEQ ID NO: 249000 - DNA, 25 bp, Artificial
  probe
  misc_feature (1)..(25): SEQ ID NO: 1594; WAN024GKD_at; Start 985; Stop 1009
catgaattggaaggaatcggtgttc

SEQ ID NO: 249001 - DNA, 25 bp, Artificial
  probe
  misc_feature (1)..(25): SEQ ID NO: 1594; WAN024GKD_at; Start 1015; Stop 1039
tcaaatggtatctcaatctacggtc

SEQ ID NO: 249002 - DNA, 25 bp, Artificial
  probe
  misc_feature (1)..(25): SEQ ID NO: 1594; WAN024GKD_at; Start 703; Stop 727
aaagttgaacgcttgattactgaca

SEQ ID NO: 249003 - DNA, 25 bp, Artificial
  probe
  misc_feature (1)..(25): SEQ ID NO: 1594; WAN024GKD_at; Start 15; Stop 39
tgtagtcggtgctaaccacgctggt

SEQ ID NO: 249004 - DNA, 25 bp, Artificial
  probe
  misc_feature (1)..(25): SEQ ID NO: 1594; WAN024GKD_at; Start 1186; Stop 1210
gatagccgtgaaattcttggtgccc

SEQ ID NO: 249005 - DNA, 25 bp, Artificial
  probe
  misc_feature (1)..(25): SEQ ID NO: 1594; WAN024GKD_at; Start 1033; Stop 1057
tacggtcttcacatggtttcaactg

SEQ ID NO: 249006 - DNA, 25 bp, Artificial
  probe
  misc_feature (1)..(25): SEQ ID NO: 1594; WAN024GKD_at; Start 1243; Stop 1267
ggaatccacatgttctcacttgcta

SEQ ID NO: 249007 - DNA, 25 bp, Artificial
  probe
  misc_feature (1)..(25): SEQ ID NO: 1594; WAN024GKD_at; Start 385; Stop 409
aaccgcgaatttaaagcaactcttg

SEQ ID NO: 249008 - DNA, 25 bp, Artificial
  probe
  misc_feature (1)..(25): SEQ ID NO: 1594; WAN024GKD_at; Start 516; Stop 540
catcggtgttgaacttgctgaagcc

SEQ ID NO: 249009 - DNA, 25 bp, Artificial
  probe
  misc_feature (1)..(25): SEQ ID NO: 1594; WAN024GKD_at; Start 609; Stop 633
caaagacttcacacaaatgatggcg

SEQ ID NO: 249010 - DNA, 25 bp, Artificial
  probe
  misc_feature (1)..(25): SEQ ID NO: 1594; WAN024GKD_at; Start 1352; Stop 1376
caatggctgcccttacggctgaaaa

SEQ ID NO: 249011 - DNA, 25 bp, Artificial
  probe
  misc_feature (1)..(25): SEQ ID NO: 1594; WAN024GKD_at; Start 277; Stop 301
gcggaagttgaaggaaaagagcaca

SEQ ID NO: 249012 - DNA, 25 bp, Artificial
  probe
  misc_feature (1)..(25): SEQ ID NO: 1594; WAN024GKD_at; Start 1264; Stop 1288
gctatccaagagcatgtgacaattg

SEQ ID NO: 249013 - DNA, 25 bp, Artificial
  probe
  misc_feature (1)..(25): SEQ ID NO: 1594; WAN024GKD_at; Start 678; Stop 702
tgttaaagcaatcgaaggtgacggt

SEQ ID NO: 249014 - DNA, 25 bp, Artificial
  probe
  misc_feature (1)..(25): SEQ ID NO: 1594; WAN024GKD_at; Start 753; Stop 777
tatccttgcagttggtttccgtcca

SEQ ID NO: 249015 - DNA, 25 bp, Artificial
  probe
  misc_feature (1)..(25): SEQ ID NO: 1594; WAN024GKD_at; Start 1146; Stop 1170
tgacaaccatgaagtagcaattaag

SEQ ID NO: 249016 - DNA, 25 bp, Artificial
  probe
  misc_feature (1)..(25): SEQ ID NO: 1594; WAN024GKD_at; Start 118; Stop 142
tctttcctaggatgtggaatggctc

SEQ ID NO: 249017 - DNA, 25 bp, Artificial
  probe
  misc_feature (1)..(25): SEQ ID NO: 1594; WAN024GKD_at; Start 1086; Stop 1110
tggttacaacgcaactgaaacaggc

SEQ ID NO: 249018 - DNA, 25 bp, Artificial
  probe
  misc_feature (1)..(25): SEQ ID NO: 1594; WAN024GKD_at; Start 641; Stop 665
tggaagatcacaacatccgcttggc

SEQ ID NO: 249019 - DNA, 25 bp, Artificial
  probe
  misc_feature (1)..(25): SEQ ID NO: 1594; WAN024GKD_at; Start 868; Stop 892
tacgctgttggtgactgtgcgactg

SEQ ID NO: 249020 - DNA, 25 bp, Artificial
  probe
  misc_feature (1)..(25): SEQ ID NO: 1594; WAN024GKD_at; Start 1065; Stop 1089
tcttgaaaaagcgaaagctgctggt

SEQ ID NO: 249021 - DNA, 25 bp, Artificial
  probe
  misc_feature (1)..(25): SEQ ID NO: 1594; WAN024GKD_at; Start 492; Stop 516
tatcgccgttgttggtggtggttac

SEQ ID NO: 249022 - DNA, 25 bp, Artificial
  probe
  misc_feature (1)..(25): SEQ ID NO: 1594; WAN024GKD_at; Start 816; Stop 840
caacggtgccttccttgtagacaag

SEQ ID NO: 249023 - DNA, 25 bp, Artificial
  probe
  misc_feature (1)..(25): SEQ ID NO: 1594; WAN024GKD_at; Start 627; Stop 651
gatggcgaagaacttggaagatcac

SEQ ID NO: 249024 - DNA, 25 bp, Artificial
  probe
  misc_feature (1)..(25): SEQ ID NO: 1594; WAN024GKD_at; Start 153; Stop 177
tgaacaaattgacggtgctgaaggc

SEQ ID NO: 249025 - DNA, 25 bp, Artificial
  probe
  misc_feature (1)..(25): SEQ ID NO: 1594; WAN024GKD_at; Start 1288; Stop 1312
gataaattggcattgacagacctct

SEQ ID NO: 249026 - DNA, 25 bp, Artificial
  probe
  misc_feature (1)..(25): SEQ ID NO: 1594; WAN024GKD_at; Start 1227; Stop 1251
tattgcaattagcatgggaatccac

SEQ ID NO: 249027 - DNA, 25 bp, Artificial
  probe
  misc_feature (1)..(25): SEQ ID NO: 7416; WAN024GKE_at; Start 212; Stop 236
ttttgaggataaagacgtgtgccac

SEQ ID NO: 249028 - DNA, 25 bp, Artificial
  probe
  misc_feature (1)..(25): SEQ ID NO: 7416; WAN024GKE_at; Start 18; Stop 42
gaatggtaacctgcttgtctgtaac

SEQ ID NO: 249029 - DNA, 25 bp, Artificial
  probe
  misc_feature (1)..(25): SEQ ID NO: 7416; WAN024GKE_at; Start 170; Stop 194
gtaacatttcgaaaatcaataatcg

SEQ ID NO: 249030 - DNA, 25 bp, Artificial
  probe
  misc_feature (1)..(25): SEQ ID NO: 7416; WAN024GKE_at; Start 150; Stop 174
cagggtcagcaaacaaattggtaac

SEQ ID NO: 249031 - DNA, 25 bp, Artificial
  probe
  misc_feature (1)..(25): SEQ ID NO: 7416; WAN024GKE_at; Start 55; Stop 79
tactgggtcaccttcctcacttacg

SEQ ID NO: 249032 - DNA, 25 bp, Artificial
  probe
  misc_feature (1)..(25): SEQ ID NO: 7416; WAN024GKE_at; Start 3; Stop 27
gaacagtagaattaagaatggtaac

SEQ ID NO: 249033 - DNA, 25 bp, Artificial
  probe
  misc_feature (1)..(25): SEQ ID NO: 7416; WAN024GKE_at; Start 81; Stop 105
aaccgggcgtagaaccactgactgt

SEQ ID NO: 249034 - DNA, 25 bp, Artificial
  probe
  misc_feature (1)..(25): SEQ ID NO: 7416; WAN024GKE_at; Start 103; Stop 127
tgttttcgcacctgtttccagcacc

SEQ ID NO: 249035 - DNA, 25 bp, Artificial
  probe
  misc_feature (1)..(25): SEQ ID NO: 7416; WAN024GKE_at; Start 258; Stop 282
cagtcatggattggatattagagtc

SEQ ID NO: 249036 - DNA, 25 bp, Artificial
  probe
  misc_feature (1)..(25): SEQ ID NO: 7416; WAN024GKE_at; Start 45; Stop 69
tatatttttctactgggtcaccttc

SEQ ID NO: 249037 - DNA, 25 bp, Artificial
  probe
  misc_feature (1)..(25): SEQ ID NO: 7416; WAN024GKE_at; Start 115; Stop 139
tgtttccagcaccttcactggatca

SEQ ID NO: 249038 - DNA, 25 bp, Artificial
  probe
  misc_feature (1)..(25): SEQ ID NO: 7416; WAN024GKE_at; Start 225; Stop 249
gacgtgtgccacgaccaataatttg

SEQ ID NO: 249039 - DNA, 25 bp, Artificial
  probe
  misc_feature (1)..(25): SEQ ID NO: 7416; WAN024GKE_at; Start 112; Stop 136
acctgtttccagcaccttcactgga

SEQ ID NO: 249040 - DNA, 25 bp, Artificial
  probe
  misc_feature (1)..(25): SEQ ID NO: 7416; WAN024GKE_at; Start 27; Stop 51
cctgcttgtctgtaacgatatattt

SEQ ID NO: 249041 - DNA, 25 bp, Artificial
  probe
  misc_feature (1)..(25): SEQ ID NO: 7416; WAN024GKE_at; Start 208; Stop 232
ccccttttgaggataaagacgtgtg

SEQ ID NO: 249042 - DNA, 25 bp, Artificial
  probe
  misc_feature (1)..(25): SEQ ID NO: 7416; WAN024GKE_at; Start 248; Stop 272
tgtttaaattcagtcatggattgga

SEQ ID NO: 249043 - DNA, 25 bp, Artificial
  probe
  misc_feature (1)..(25): SEQ ID NO: 7416; WAN024GKE_at; Start 140; Stop 164
ccatcaaaatcagggtcagcaaaca

SEQ ID NO: 249044 - DNA, 25 bp, Artificial
  probe
  misc_feature (1)..(25): SEQ ID NO: 7416; WAN024GKE_at; Start 130; Stop 154
cactggatcaccatcaaaatcaggg

SEQ ID NO: 249045 - DNA, 25 bp, Artificial
  probe
  misc_feature (1)..(25): SEQ ID NO: 7416; WAN024GKE_at; Start 22; Stop 46
ggtaacctgcttgtctgtaacgata

SEQ ID NO: 249046 - DNA, 25 bp, Artificial
  probe
  misc_feature (1)..(25): SEQ ID NO: 7416; WAN024GKE_at; Start 88; Stop 112
cgtagaaccactgactgttttcgca

SEQ ID NO: 249047 - DNA, 25 bp, Artificial
  probe
  misc_feature (1)..(25): SEQ ID NO: 7416; WAN024GKE_at; Start 42; Stop 66
cgatatatttttctactgggtcacc

SEQ ID NO: 249048 - DNA, 25 bp, Artificial
  probe
  misc_feature (1)..(25): SEQ ID NO: 7416; WAN024GKE_at; Start 58; Stop 82
tgggtcaccttcctcacttacgaaa

SEQ ID NO: 249049 - DNA, 25 bp, Artificial
  probe
  misc_feature (1)..(25): SEQ ID NO: 7416; WAN024GKE_at; Start 158; Stop 182
gcaaacaaattggtaacatttcgaa

SEQ ID NO: 249050 - DNA, 25 bp, Artificial
  probe
  misc_feature (1)..(25): SEQ ID NO: 7416; WAN024GKE_at; Start 231; Stop 255
tgccacgaccaataatttgtttaaa

SEQ ID NO: 249051 - DNA, 25 bp, Artificial
  probe
  misc_feature (1)..(25): SEQ ID NO: 7416; WAN024GKE_at; Start 84; Stop 108
cgggcgtagaaccactgactgtttt

SEQ ID NO: 249052 - DNA, 25 bp, Artificial
  probe
  misc_feature (1)..(25): SEQ ID NO: 7416; WAN024GKE_at; Start 134; Stop 158
ggatcaccatcaaaatcagggtcag

SEQ ID NO: 249053 - DNA, 25 bp, Artificial
  probe
  misc_feature (1)..(25): SEQ ID NO: 7416; WAN024GKE_at; Start 215; Stop 239
tgaggataaagacgtgtgccacgac

SEQ ID NO: 249054 - DNA, 25 bp, Artificial
  probe
  misc_feature (1)..(25): SEQ ID NO: 7416; WAN024GKE_at; Start 146; Stop 170
aaatcagggtcagcaaacaaattgg

SEQ ID NO: 249055 - DNA, 25 bp, Artificial
  probe
  misc_feature (1)..(25): SEQ ID NO: 7416; WAN024GKE_at; Start 218; Stop 242
ggataaagacgtgtgccacgaccaa

SEQ ID NO: 249056 - DNA, 25 bp, Artificial
  probe
  misc_feature (1)..(25): SEQ ID NO: 7416; WAN024GKE_at; Start 92; Stop 116
gaaccactgactgttttcgcacctg

SEQ ID NO: 249057 - DNA, 25 bp, Artificial
  probe
  misc_feature (1)..(25): SEQ ID NO: 7416; WAN024GKE_at; Start 99; Stop 123
tgactgttttcgcacctgtttccag

SEQ ID NO: 249058 - DNA, 25 bp, Artificial
  probe
  misc_feature (1)..(25): SEQ ID NO: 7416; WAN024GKE_at; Start 227; Stop 251
cgtgtgccacgaccaataatttgtt

SEQ ID NO: 249059 - DNA, 25 bp, Artificial
  probe
  misc_feature (1)..(25): SEQ ID NO: 7416; WAN024GKE_at; Start 261; Stop 285
tcatggattggatattagagtctaa

SEQ ID NO: 249060 - DNA, 25 bp, Artificial
  probe
  misc_feature (1)..(25): SEQ ID NO: 7416; WAN024GKE_at; Start 8; Stop 32
gtagaattaagaatggtaacctgct

SEQ ID NO: 249061 - DNA, 25 bp, Artificial
  probe
  misc_feature (1)..(25): SEQ ID NO: 2712; WAN024GKF_at; Start 1393; Stop 1417
caagtaactggtgacaacgctgaag

SEQ ID NO: 249062 - DNA, 25 bp, Artificial
  probe
  misc_feature (1)..(25): SEQ ID NO: 2712; WAN024GKF_at; Start 878; Stop 902
taatcgtaattgatgaagcgcaccg

SEQ ID NO: 249063 - DNA, 25 bp, Artificial
  probe
  misc_feature (1)..(25): SEQ ID NO: 2712; WAN024GKF_at; Start 480; Stop 504
tacagacgccttctcaatgaaaacg

SEQ ID NO: 249064 - DNA, 25 bp, Artificial
  probe
  misc_feature (1)..(25): SEQ ID NO: 2712; WAN024GKF_at; Start 540; Stop 564
tattgaaacagttgccagaggacaa

SEQ ID NO: 249065 - DNA, 25 bp, Artificial
  probe
  misc_feature (1)..(25): SEQ ID NO: 2712; WAN024GKF_at; Start 991; Stop 1015
gaaaccaagaatgcttccaatacgg

SEQ ID NO: 249066 - DNA, 25 bp, Artificial
  probe
  misc_feature (1)..(25): SEQ ID NO: 2712; WAN024GKF_at; Start 152; Stop 176
gagataaggctcgtcgtaaagaagg

SEQ ID NO: 249067 - DNA, 25 bp, Artificial
  probe
  misc_feature (1)..(25): SEQ ID NO: 2712; WAN024GKF_at; Start 420; Stop 444
tatgacgaaggaaaaaggattgacg

SEQ ID NO: 249068 - DNA, 25 bp, Artificial
  probe
  misc_feature (1)..(25): SEQ ID NO: 2712; WAN024GKF_at; Start 1567; Stop 1591
caaattattggtcgtggcacacgtc

SEQ ID NO: 249069 - DNA, 25 bp, Artificial
  probe
  misc_feature (1)..(25): SEQ ID NO: 2712; WAN024GKF_at; Start 331; Stop 355
gatggctttattgaacacgaccgta

SEQ ID NO: 249070 - DNA, 25 bp, Artificial
  probe
  misc_feature (1)..(25): SEQ ID NO: 2712; WAN024GKF_at; Start 1169; Stop 1193
tagaagataggtactacggcaggaa

SEQ ID NO: 249071 - DNA, 25 bp, Artificial
  probe
  misc_feature (1)..(25): SEQ ID NO: 2712; WAN024GKF_at; Start 624; Stop 648
tattcatcgccttcgaaaagctggt

SEQ ID NO: 249072 - DNA, 25 bp, Artificial
  probe
  misc_feature (1)..(25): SEQ ID NO: 2712; WAN024GKF_at; Start 960; Stop 984
gacacagattgggatgaccgctact

SEQ ID NO: 249073 - DNA, 25 bp, Artificial
  probe
  misc_feature (1)..(25): SEQ ID NO: 2712; WAN024GKF_at; Start 1008; Stop 1032
caatacggaatactttggtgagcca

SEQ ID NO: 249074 - DNA, 25 bp, Artificial
  probe
  misc_feature (1)..(25): SEQ ID NO: 2712; WAN024GKF_at; Start 234; Stop 258
ggcaaaggataataaacacagcgtt

SEQ ID NO: 249075 - DNA, 25 bp, Artificial
  probe
  misc_feature (1)..(25): SEQ ID NO: 2712; WAN024GKF_at; Start 115; Stop 139
gaagaatacttcactgatggtcgaa

SEQ ID NO: 249076 - DNA, 25 bp, Artificial
  probe
  misc_feature (1)..(25): SEQ ID NO: 2712; WAN024GKF_at; Start 1058; Stop 1082
gaatcgaggatggttttttggctcc

SEQ ID NO: 249077 - DNA, 25 bp, Artificial
  probe
  misc_feature (1)..(25): SEQ ID NO: 2712; WAN024GKF_at; Start 943; Stop 967
gattatttcagttctgcgacacaga

SEQ ID NO: 249078 - DNA, 25 bp, Artificial
  probe
  misc_feature (1)..(25): SEQ ID NO: 2712; WAN024GKF_at; Start 346; Stop 370
cacgaccgtatcacgagagaagaac

SEQ ID NO: 249079 - DNA, 25 bp, Artificial
  probe
  misc_feature (1)..(25): SEQ ID NO: 2712; WAN024GKF_at; Start 1410; Stop 1434
cgctgaaggaaaagctcaactggat

SEQ ID NO: 249080 - DNA, 25 bp, Artificial
  probe
  misc_feature (1)..(25): SEQ ID NO: 2712; WAN024GKF_at; Start 1320; Stop 1344
tgccgagcgaatgcgtgctgcactt

SEQ ID NO: 249081 - DNA, 25 bp, Artificial
  probe
  misc_feature (1)..(25): SEQ ID NO: 2712; WAN024GKF_at; Start 1770; Stop 1794
tatcgttacagacaagcaggttacc

SEQ ID NO: 249082 - DNA, 25 bp, Artificial
  probe
  misc_feature (1)..(25): SEQ ID NO: 2712; WAN024GKF_at; Start 1872; Stop 1896
gaatatcttaggtagctacgccact

SEQ ID NO: 249083 - DNA, 25 bp, Artificial
  probe
  misc_feature (1)..(25): SEQ ID NO: 2712; WAN024GKF_at; Start 1305; Stop 1329
tgttgatattgaccatgccgagcga

SEQ ID NO: 249084 - DNA, 25 bp, Artificial
  probe
  misc_feature (1)..(25): SEQ ID NO: 2712; WAN024GKF_at; Start 1119; Stop 1143
ggatggttatcgtccagaaactgga

SEQ ID NO: 249085 - DNA, 25 bp, Artificial
  probe
  misc_feature (1)..(25): SEQ ID NO: 2712; WAN024GKF_at; Start 686; Stop 710
tcttagtagaccaaacgatggctga

SEQ ID NO: 249086 - DNA, 25 bp, Artificial
  probe
  misc_feature (1)..(25): SEQ ID NO: 2712; WAN024GKF_at; Start 370; Stop 394
cgtgagctggagttagacgaattcc

SEQ ID NO: 249087 - DNA, 25 bp, Artificial
  probe
  misc_feature (1)..(25): SEQ ID NO: 2712; WAN024GKF_at; Start 803; Stop 827
ggctttatcagcaactaactggtga

SEQ ID NO: 249088 - DNA, 25 bp, Artificial
  probe
  misc_feature (1)..(25): SEQ ID NO: 2712; WAN024GKF_at; Start 818; Stop 842
taactggtgaagatggaactgaaac

SEQ ID NO: 249089 - DNA, 25 bp, Artificial
  probe
  misc_feature (1)..(25): SEQ ID NO: 2712; WAN024GKF_at; Start 2118; Stop 2142
taaatatagtgaggaagcgcgtgct

SEQ ID NO: 249090 - DNA, 25 bp, Artificial
  probe
  misc_feature (1)..(25): SEQ ID NO: 2712; WAN024GKF_at; Start 892; Stop 916
gaagcgcaccgtggttcagctaagg

SEQ ID NO: 249091 - DNA, 25 bp, Artificial
  probe
  misc_feature (1)..(25): SEQ ID NO: 2712; WAN024GKF_at; Start 250; Stop 274
cacagcgttcgagcaggattacaac

SEQ ID NO: 249092 - DNA, 25 bp, Artificial
  probe
  misc_feature (1)..(25): SEQ ID NO: 2712; WAN024GKF_at; Start 1975; Stop 1999
tatctagatgctattcgagagtcgg

SEQ ID NO: 249093 - DNA, 25 bp, Artificial
  probe
  misc_feature (1)..(25): SEQ ID NO: 2712; WAN024GKF_at; Start 1696; Stop 1720
gaaacaggtgcgaaaacagtcagtg

SEQ ID NO: 249094 - DNA, 25 bp, Artificial
  probe
  misc_feature (1)..(25): SEQ ID NO: 2712; WAN024GKF_at; Start 1838; Stop 1862
tgattaccgaaagcctgaccgacta

SEQ ID NO: 249095 - DNA, 25 bp, Artificial
  probe
  misc_feature (1)..(25): SEQ ID NO: 4900; WAN024GKG_at; Start 260; Stop 284
tagaagatgtcattagccatgctga

SEQ ID NO: 249096 - DNA, 25 bp, Artificial
  probe
  misc_feature (1)..(25): SEQ ID NO: 4900; WAN024GKG_at; Start 623; Stop 647
taatttaccctcattcttttaggca

SEQ ID NO: 249097 - DNA, 25 bp, Artificial
  probe
  misc_feature (1)..(25): SEQ ID NO: 4900; WAN024GKG_at; Start 594; Stop 618
tgctgataaatacaaaatgaatcct

SEQ ID NO: 249098 - DNA, 25 bp, Artificial
  probe
  misc_feature (1)..(25): SEQ ID NO: 4900; WAN024GKG_at; Start 54; Stop 78
gcgttcgtacctttatggtgttcga

SEQ ID NO: 249099 - DNA, 25 bp, Artificial
  probe
  misc_feature (1)..(25): SEQ ID NO: 4900; WAN024GKG_at; Start 365; Stop 389
gggctcgtgtaagtgaacttattaa

SEQ ID NO: 249100 - DNA, 25 bp, Artificial
  probe
  misc_feature (1)..(25): SEQ ID NO: 4900; WAN024GKG_at; Start 739; Stop 763
tatctaaggaaaacagctactgaac

SEQ ID NO: 249101 - DNA, 25 bp, Artificial
  probe
  misc_feature (1)..(25): SEQ ID NO: 4900; WAN024GKG_at; Start 724; Stop 748
gaaactactcgaatttatctaagga

SEQ ID NO: 249102 - DNA, 25 bp, Artificial
  probe
  misc_feature (1)..(25): SEQ ID NO: 4900; WAN024GKG_at; Start 676; Stop 700
tataatgatattgccttgcttgcag

SEQ ID NO: 249103 - DNA, 25 bp, Artificial
  probe
  misc_feature (1)..(25): SEQ ID NO: 4900; WAN024GKG_at; Start 162; Stop 186
tgtcaatttgcgactacaaggagta

SEQ ID NO: 249104 - DNA, 25 bp, Artificial
  probe
  misc_feature (1)..(25): SEQ ID NO: 4900; WAN024GKG_at; Start 666; Stop 690
tttagcgaagtataatgatattgcc

SEQ ID NO: 249105 - DNA, 25 bp, Artificial
  probe
  misc_feature (1)..(25): SEQ ID NO: 4900; WAN024GKG_at; Start 479; Stop 503
gaaatagttgtcttagttggttaga

SEQ ID NO: 249106 - DNA, 25 bp, Artificial
  probe
  misc_feature (1)..(25): SEQ ID NO: 4900; WAN024GKG_at; Start 275; Stop 299
gccatgctgattacctttttcttaa

SEQ ID NO: 249107 - DNA, 25 bp, Artificial
  probe
  misc_feature (1)..(25): SEQ ID NO: 4900; WAN024GKG_at; Start 574; Stop 598
gctcaacagttaaaaaattatgctg

SEQ ID NO: 249108 - DNA, 25 bp, Artificial
  probe
  misc_feature (1)..(25): SEQ ID NO: 4900; WAN024GKG_at; Start 545; Stop 569
ttaacgaaccaattacagcaagagg

SEQ ID NO: 249109 - DNA, 25 bp, Artificial
  probe
  misc_feature (1)..(25): SEQ ID NO: 4900; WAN024GKG_at; Start 40; Stop 64
gctgaaaatactgtgcgttcgtacc

SEQ ID NO: 249110 - DNA, 25 bp, Artificial
  probe
  misc_feature (1)..(25): SEQ ID NO: 4900; WAN024GKG_at; Start 451; Stop 475
cgtagactgtacattcctaaaaaat

SEQ ID NO: 249111 - DNA, 25 bp, Artificial
  probe
  misc_feature (1)..(25): SEQ ID NO: 4900; WAN024GKG_at; Start 692; Stop 716
tgcttgcagatttgatgggacacga

SEQ ID NO: 249112 - DNA, 25 bp, Artificial
  probe
  misc_feature (1)..(25): SEQ ID NO: 4900; WAN024GKG_at; Start 17; Stop 41
tacatttgaagaaagctggtttagc

SEQ ID NO: 249113 - DNA, 25 bp, Artificial
  probe
  misc_feature (1)..(25): SEQ ID NO: 4900; WAN024GKG_at; Start 108; Stop 132
ggaagatttatttgaatacaaagga

SEQ ID NO: 249114 - DNA, 25 bp, Artificial
  probe
  misc_feature (1)..(25): SEQ ID NO: 4900; WAN024GKG_at; Start 500; Stop 524
tagaatcagaaaatcgccgaagtgg

SEQ ID NO: 249115 - DNA, 25 bp, Artificial
  probe
  misc_feature (1)..(25): SEQ ID NO: 4900; WAN024GKG_at; Start 176; Stop 200
tacaaggagtaaataaatatctggc

SEQ ID NO: 249116 - DNA, 25 bp, Artificial
  probe
  misc_feature (1)..(25): SEQ ID NO: 4900; WAN024GKG_at; Start 707; Stop 731
tgggacacgaaagtatagaaactac

SEQ ID NO: 249117 - DNA, 25 bp, Artificial
  probe
  misc_feature (1)..(25): SEQ ID NO: 4900; WAN024GKG_at; Start 494; Stop 518
gttggttagaatcagaaaatcgccg

SEQ ID NO: 249118 - DNA, 25 bp, Artificial
  probe
  misc_feature (1)..(25): SEQ ID NO: 4900; WAN024GKG_at; Start 752; Stop 776
cagctactgaacaacaaaatattgt

SEQ ID NO: 249119 - DNA, 25 bp, Artificial
  probe
  misc_feature (1)..(25): SEQ ID NO: 4900; WAN024GKG_at; Start 506; Stop 530
cagaaaatcgccgaagtggttattt

SEQ ID NO: 249120 - DNA, 25 bp, Artificial
  probe
  misc_feature (1)..(25): SEQ ID NO: 4900; WAN024GKG_at; Start 67; Stop 91
tatggtgttcgatttttcttggaga

SEQ ID NO: 249121 - DNA, 25 bp, Artificial
  probe
  misc_feature (1)..(25): SEQ ID NO: 4900; WAN024GKG_at; Start 31; Stop 55
gctggtttagctgaaaatactgtgc

SEQ ID NO: 249122 - DNA, 25 bp, Artificial
  probe
  misc_feature (1)..(25): SEQ ID NO: 4900; WAN024GKG_at; Start 392; Stop 416
taaaagtagagcatgtagaaatcgg

SEQ ID NO: 249123 - DNA, 25 bp, Artificial
  probe
  misc_feature (1)..(25): SEQ ID NO: 4900; WAN024GKG_at; Start 191; Stop 215
aatatctggcttttattggtcatga

SEQ ID NO: 249124 - DNA, 25 bp, Artificial
  probe
  misc_feature (1)..(25): SEQ ID NO: 4900; WAN024GKG_at; Start 439; Stop 463
ggtggtaaaattcgtagactgtaca

SEQ ID NO: 249125 - DNA, 25 bp, Artificial
  probe
  misc_feature (1)..(25): SEQ ID NO: 4900; WAN024GKG_at; Start 150; Stop 174
taaacctaaaactgtcaatttgcga

SEQ ID NO: 249126 - DNA, 25 bp, Artificial
  probe
  misc_feature (1)..(25): SEQ ID NO: 4900; WAN024GKG_at; Start 227; Stop 251
taaaatttgtcaaagtacagcaaaa

SEQ ID NO: 249127 - DNA, 25 bp, Artificial
  probe
  misc_feature (1)..(25): SEQ ID NO: 4900; WAN024GKG_at; Start 558; Stop 582
tacagcaagaggagttgctcaacag

SEQ ID NO: 249128 - DNA, 25 bp, Artificial
  probe
  misc_feature (1)..(25): SEQ ID NO: 4900; WAN024GKG_at; Start 423; Stop 447
tgacatttactcaaaaggtggtaaa

SEQ ID NO: 249129 - DNA, 25 bp, Artificial
  probe
  misc_feature (1)..(25): SEQ ID NO: 4866; WAN024GKH_at; Start 43; Stop 67
tgcgtcaagaaattagaagacaaac

SEQ ID NO: 249130 - DNA, 25 bp, Artificial
  probe
  misc_feature (1)..(25): SEQ ID NO: 4866; WAN024GKH_at; Start 47; Stop 71
tcaagaaattagaagacaaactcgt

SEQ ID NO: 249131 - DNA, 25 bp, Artificial
  probe
  misc_feature (1)..(25): SEQ ID NO: 4866; WAN024GKH_at; Start 6; Stop 30
aaagcttgctagagcgcatttcaaa

SEQ ID NO: 249132 - DNA, 25 bp, Artificial
  probe
  misc_feature (1)..(25): SEQ ID NO: 4866; WAN024GKH_at; Start 13; Stop 37
gctagagcgcatttcaaaccaggca

SEQ ID NO: 249133 - DNA, 25 bp, Artificial
  probe
  misc_feature (1)..(25): SEQ ID NO: 4866; WAN024GKH_at; Start 46; Stop 70
gtcaagaaattagaagacaaactcg

SEQ ID NO: 249134 - DNA, 25 bp, Artificial
  probe
  misc_feature (1)..(25): SEQ ID NO: 4866; WAN024GKH_at; Start 11; Stop 35
ttgctagagcgcatttcaaaccagg

SEQ ID NO: 249135 - DNA, 25 bp, Artificial
  probe
  misc_feature (1)..(25): SEQ ID NO: 4866; WAN024GKH_at; Start 12; Stop 36
tgctagagcgcatttcaaaccaggc

SEQ ID NO: 249136 - DNA, 25 bp, Artificial
  probe
  misc_feature (1)..(25): SEQ ID NO: 4866; WAN024GKH_at; Start 4; Stop 28
aaaaagcttgctagagcgcatttca

SEQ ID NO: 249137 - DNA, 25 bp, Artificial
  probe
  misc_feature (1)..(25): SEQ ID NO: 4866; WAN024GKH_at; Start 14; Stop 38
ctagagcgcatttcaaaccaggcag

SEQ ID NO: 249138 - DNA, 25 bp, Artificial
  probe
  misc_feature (1)..(25): SEQ ID NO: 4866; WAN024GKH_at; Start 2; Stop 26
tgaaaaagcttgctagagcgcattt

SEQ ID NO: 249139 - DNA, 25 bp, Artificial
  probe
  misc_feature (1)..(25): SEQ ID NO: 4866; WAN024GKH_at; Start 10; Stop 34
cttgctagagcgcatttcaaaccag

SEQ ID NO: 249140 - DNA, 25 bp, Artificial
  probe
  misc_feature (1)..(25): SEQ ID NO: 4866; WAN024GKH_at; Start 15; Stop 39
tagagcgcatttcaaaccaggcagc

SEQ ID NO: 249141 - DNA, 25 bp, Artificial
  probe
  misc_feature (1)..(25): SEQ ID NO: 4866; WAN024GKH_at; Start 7; Stop 31
aagcttgctagagcgcatttcaaac

SEQ ID NO: 249142 - DNA, 25 bp, Artificial
  probe
  misc_feature (1)..(25): SEQ ID NO: 4866; WAN024GKH_at; Start 41; Stop 65
actgcgtcaagaaattagaagacaa

SEQ ID NO: 249143 - DNA, 25 bp, Artificial
  probe
  misc_feature (1)..(25): SEQ ID NO: 4866; WAN024GKH_at; Start 9; Stop 33
gcttgctagagcgcatttcaaacca

SEQ ID NO: 249144 - DNA, 25 bp, Artificial
  probe
  misc_feature (1)..(25): SEQ ID NO: 4866; WAN024GKH_at; Start 8; Stop 32
agcttgctagagcgcatttcaaacc

SEQ ID NO: 249145 - DNA, 25 bp, Artificial
  probe
  misc_feature (1)..(25): SEQ ID NO: 4866; WAN024GKH_at; Start 45; Stop 69
cgtcaagaaattagaagacaaactc

SEQ ID NO: 249146 - DNA, 25 bp, Artificial
  probe
  misc_feature (1)..(25): SEQ ID NO: 4866; WAN024GKH_at; Start 3; Stop 27
gaaaaagcttgctagagcgcatttc

SEQ ID NO: 249147 - DNA, 25 bp, Artificial
  probe
  misc_feature (1)..(25): SEQ ID NO: 4866; WAN024GKH_at; Start 44; Stop 68
gcgtcaagaaattagaagacaaact

SEQ ID NO: 249148 - DNA, 25 bp, Artificial
  probe
  misc_feature (1)..(25): SEQ ID NO: 4866; WAN024GKH_at; Start 48; Stop 72
caagaaattagaagacaaactcgtt

SEQ ID NO: 249149 - DNA, 25 bp, Artificial
  probe
  misc_feature (1)..(25): SEQ ID NO: 4866; WAN024GKH_at; Start 1; Stop 25
ttgaaaaagcttgctagagcgcatt

SEQ ID NO: 249150 - DNA, 25 bp, Artificial
  probe
  misc_feature (1)..(25): SEQ ID NO: 4866; WAN024GKH_at; Start 42; Stop 66
ctgcgtcaagaaattagaagacaaa

SEQ ID NO: 249151 - DNA, 25 bp, Artificial
  probe
  misc_feature (1)..(25): SEQ ID NO: 4866; WAN024GKH_at; Start 5; Stop 29
aaaagcttgctagagcgcatttcaa

SEQ ID NO: 249152 - DNA, 25 bp, Artificial
  probe
  misc_feature (1)..(25): SEQ ID NO: 5277; WAN024GKI_at; Start 93; Stop 117
taatttcccttccatcgctctttgg

SEQ ID NO: 249153 - DNA, 25 bp, Artificial
  probe
  misc_feature (1)..(25): SEQ ID NO: 5277; WAN024GKI_at; Start 283; Stop 307
cacactggtctaaattataattcaa

SEQ ID NO: 249154 - DNA, 25 bp, Artificial
  probe
  misc_feature (1)..(25): SEQ ID NO: 5277; WAN024GKI_at; Start 147; Stop 171
cattatttgtcctccaacaactgca

SEQ ID NO: 249155 - DNA, 25 bp, Artificial
  probe
  misc_feature (1)..(25): SEQ ID NO: 5277; WAN024GKI_at; Start 65; Stop 89
caggttcgtcattgggattttgcgg

SEQ ID NO: 249156 - DNA, 25 bp, Artificial
  probe
  misc_feature (1)..(25): SEQ ID NO: 5277; WAN024GKI_at; Start 14; Stop 38
cactgataagtttttctttttcagc

SEQ ID NO: 249157 - DNA, 25 bp, Artificial
  probe
  misc_feature (1)..(25): SEQ ID NO: 5277; WAN024GKI_at; Start 193; Stop 217
caatcttatgatttaaagttgctct

SEQ ID NO: 249158 - DNA, 25 bp, Artificial
  probe
  misc_feature (1)..(25): SEQ ID NO: 5277; WAN024GKI_at; Start 206; Stop 230
taaagttgctctttccgcttgataa

SEQ ID NO: 249159 - DNA, 25 bp, Artificial
  probe
  misc_feature (1)..(25): SEQ ID NO: 5277; WAN024GKI_at; Start 55; Stop 79
aattcacttgcaggttcgtcattgg

SEQ ID NO: 249160 - DNA, 25 bp, Artificial
  probe
  misc_feature (1)..(25): SEQ ID NO: 5277; WAN024GKI_at; Start 238; Stop 262
tcaactcaaagggatttaagatttc

SEQ ID NO: 249161 - DNA, 25 bp, Artificial
  probe
  misc_feature (1)..(25): SEQ ID NO: 5277; WAN024GKI_at; Start 71; Stop 95
cgtcattgggattttgcggcactaa

SEQ ID NO: 249162 - DNA, 25 bp, Artificial
  probe
  misc_feature (1)..(25): SEQ ID NO: 5277; WAN024GKI_at; Start 1; Stop 25
ttgatttttccttcactgataagtt

SEQ ID NO: 249163 - DNA, 25 bp, Artificial
  probe
  misc_feature (1)..(25): SEQ ID NO: 5277; WAN024GKI_at; Start 80; Stop 104
gattttgcggcactaatttcccttc

SEQ ID NO: 249164 - DNA, 25 bp, Artificial
  probe
  misc_feature (1)..(25): SEQ ID NO: 5277; WAN024GKI_at; Start 160; Stop 184
ccaacaactgcaaaatatcagctaa

SEQ ID NO: 249165 - DNA, 25 bp, Artificial
  probe
  misc_feature (1)..(25): SEQ ID NO: 5277; WAN024GKI_at; Start 44; Stop 68
ttctctttaataattcacttgcagg

SEQ ID NO: 249166 - DNA, 25 bp, Artificial
  probe
  misc_feature (1)..(25): SEQ ID NO: 5277; WAN024GKI_at; Start 226; Stop 250
gataattctgaatcaactcaaaggg

SEQ ID NO: 249167 - DNA, 25 bp, Artificial
  probe
  misc_feature (1)..(25): SEQ ID NO: 5277; WAN024GKI_at; Start 59; Stop 83
cacttgcaggttcgtcattgggatt

SEQ ID NO: 249168 - DNA, 25 bp, Artificial
  probe
  misc_feature (1)..(25): SEQ ID NO: 5277; WAN024GKI_at; Start 231; Stop 255
ttctgaatcaactcaaagggattta

SEQ ID NO: 249169 - DNA, 25 bp, Artificial
  probe
  misc_feature (1)..(25): SEQ ID NO: 5277; WAN024GKI_at; Start 212; Stop 236
tgctctttccgcttgataattctga

SEQ ID NO: 249170 - DNA, 25 bp, Artificial
  probe
  misc_feature (1)..(25): SEQ ID NO: 5277; WAN024GKI_at; Start 254; Stop 278
taagatttcctcttcctcttttgga

SEQ ID NO: 249171 - DNA, 25 bp, Artificial
  probe
  misc_feature (1)..(25): SEQ ID NO: 5277; WAN024GKI_at; Start 51; Stop 75
taataattcacttgcaggttcgtca

SEQ ID NO: 249172 - DNA, 25 bp, Artificial
  probe
  misc_feature (1)..(25): SEQ ID NO: 5277; WAN024GKI_at; Start 105; Stop 129
catcgctctttggagaatacttgct

SEQ ID NO: 249173 - DNA, 25 bp, Artificial
  probe
  misc_feature (1)..(25): SEQ ID NO: 5277; WAN024GKI_at; Start 119; Stop 143
gaatacttgctttaagttgttctgg

SEQ ID NO: 249174 - DNA, 25 bp, Artificial
  probe
  misc_feature (1)..(25): SEQ ID NO: 5277; WAN024GKI_at; Start 154; Stop 178
tgtcctccaacaactgcaaaatatc

SEQ ID NO: 249175 - DNA, 25 bp, Artificial
  probe
  misc_feature (1)..(25): SEQ ID NO: 5277; WAN024GKI_at; Start 293; Stop 317
taaattataattcaactcagccaat

SEQ ID NO: 249176 - DNA, 25 bp, Artificial
  probe
  misc_feature (1)..(25): SEQ ID NO: 5277; WAN024GKI_at; Start 124; Stop 148
cttgctttaagttgttctggtgtca

SEQ ID NO: 249177 - DNA, 25 bp, Artificial
  probe
  misc_feature (1)..(25): SEQ ID NO: 5277; WAN024GKI_at; Start 127; Stop 151
gctttaagttgttctggtgtcatta

SEQ ID NO: 249178 - DNA, 25 bp, Artificial
  probe
  misc_feature (1)..(25): SEQ ID NO: 5277; WAN024GKI_at; Start 28; Stop 52
tctttttcagctttaattctcttta

SEQ ID NO: 249179 - DNA, 25 bp, Artificial
  probe
  misc_feature (1)..(25): SEQ ID NO: 5277; WAN024GKI_at; Start 178; Stop 202
cagctaatacattatcaatcttatg

SEQ ID NO: 249180 - DNA, 25 bp, Artificial
  probe
  misc_feature (1)..(25): SEQ ID NO: 5277; WAN024GKI_at; Start 85; Stop 109
tgcggcactaatttcccttccatcg

SEQ ID NO: 249181 - DNA, 25 bp, Artificial
  probe
  misc_feature (1)..(25): SEQ ID NO: 5277; WAN024GKI_at; Start 99; Stop 123
cccttccatcgctctttggagaata

SEQ ID NO: 249182 - DNA, 25 bp, Artificial
  probe
  misc_feature (1)..(25): SEQ ID NO: 5277; WAN024GKI_at; Start 169; Stop 193
gcaaaatatcagctaatacattatc

SEQ ID NO: 249183 - DNA, 25 bp, Artificial
  probe
  misc_feature (1)..(25): SEQ ID NO: 5277; WAN024GKI_at; Start 142; Stop 166
ggtgtcattatttgtcctccaacaa

SEQ ID NO: 249184 - DNA, 25 bp, Artificial
  probe
  misc_feature (1)..(25): SEQ ID NO: 5277; WAN024GKI_at; Start 68; Stop 92
gttcgtcattgggattttgcggcac

SEQ ID NO: 249185 - DNA, 25 bp, Artificial
  probe
  misc_feature (1)..(25): SEQ ID NO: 5277; WAN024GKI_at; Start 109; Stop 133
gctctttggagaatacttgctttaa

SEQ ID NO: 249186 - DNA, 25 bp, Artificial
  probe
  misc_feature (1)..(25): SEQ ID NO: 4935; WAN024GKJ_at; Start 47; Stop 71
caccaaatagaaaaccatcaggtaa

SEQ ID NO: 249187 - DNA, 25 bp, Artificial
  probe
  misc_feature (1)..(25): SEQ ID NO: 4935; WAN024GKJ_at; Start 142; Stop 166
gaactccgtaattctgctggaaagt

SEQ ID NO: 249188 - DNA, 25 bp, Artificial
  probe
  misc_feature (1)..(25): SEQ ID NO: 4935; WAN024GKJ_at; Start 39; Stop 63
tacaccttcaccaaatagaaaacca

SEQ ID NO: 249189 - DNA, 25 bp, Artificial
  probe
  misc_feature (1)..(25): SEQ ID NO: 4935; WAN024GKJ_at; Start 131; Stop 155
cagctgtttcagaactccgtaattc

SEQ ID NO: 249190 - DNA, 25 bp, Artificial
  probe
  misc_feature (1)..(25): SEQ ID NO: 4935; WAN024GKJ_at; Start 11; Stop 35
ctaccagtttttgtttcaagcgagt

SEQ ID NO: 249191 - DNA, 25 bp, Artificial
  probe
  misc_feature (1)..(25): SEQ ID NO: 4935; WAN024GKJ_at; Start 118; Stop 142
gccataaataaatcagctgtttcag

SEQ ID NO: 249192 - DNA, 25 bp, Artificial
  probe
  misc_feature (1)..(25): SEQ ID NO: 4935; WAN024GKJ_at; Start 1; Stop 25
ttgaactcatctaccagtttttgtt

SEQ ID NO: 249193 - DNA, 25 bp, Artificial
  probe
  misc_feature (1)..(25): SEQ ID NO: 4935; WAN024GKJ_at; Start 174; Stop 198
tattgtttctaattctgaccctcca

SEQ ID NO: 249194 - DNA, 25 bp, Artificial
  probe
  misc_feature (1)..(25): SEQ ID NO: 4935; WAN024GKJ_at; Start 183; Stop 207
taattctgaccctccaaaaggtgga

SEQ ID NO: 249195 - DNA, 25 bp, Artificial
  probe
  misc_feature (1)..(25): SEQ ID NO: 4935; WAN024GKJ_at; Start 8; Stop 32
catctaccagtttttgtttcaagcg

SEQ ID NO: 249196 - DNA, 25 bp, Artificial
  probe
  misc_feature (1)..(25): SEQ ID NO: 4935; WAN024GKJ_at; Start 247; Stop 271
tcacgaacatttttctccaaagtat

SEQ ID NO: 249197 - DNA, 25 bp, Artificial
  probe
  misc_feature (1)..(25): SEQ ID NO: 4935; WAN024GKJ_at; Start 83; Stop 107
cacgaccattttctttcaaacgata

SEQ ID NO: 249198 - DNA, 25 bp, Artificial
  probe
  misc_feature (1)..(25): SEQ ID NO: 4935; WAN024GKJ_at; Start 126; Stop 150
taaatcagctgtttcagaactccgt

SEQ ID NO: 249199 - DNA, 25 bp, Artificial
  probe
  misc_feature (1)..(25): SEQ ID NO: 4935; WAN024GKJ_at; Start 72; Stop 96
aataactccaacacgaccattttct

SEQ ID NO: 249200 - DNA, 25 bp, Artificial
  probe
  misc_feature (1)..(25): SEQ ID NO: 4935; WAN024GKJ_at; Start 154; Stop 178
tctgctggaaagttattttttattg

SEQ ID NO: 249201 - DNA, 25 bp, Artificial
  probe
  misc_feature (1)..(25): SEQ ID NO: 4935; WAN024GKJ_at; Start 196; Stop 220
ccaaaaggtggattcatcataataa

SEQ ID NO: 249202 - DNA, 25 bp, Artificial
  probe
  misc_feature (1)..(25): SEQ ID NO: 4935; WAN024GKJ_at; Start 64; Stop 88
tcaggtaaaataactccaacacgac

SEQ ID NO: 249203 - DNA, 25 bp, Artificial
  probe
  misc_feature (1)..(25): SEQ ID NO: 4935; WAN024GKJ_at; Start 61; Stop 85
ccatcaggtaaaataactccaacac

SEQ ID NO: 249204 - DNA, 25 bp, Artificial
  probe
  misc_feature (1)..(25): SEQ ID NO: 4935; WAN024GKJ_at; Start 128; Stop 152
aatcagctgtttcagaactccgtaa

SEQ ID NO: 249205 - DNA, 25 bp, Artificial
  probe
  misc_feature (1)..(25): SEQ ID NO: 4935; WAN024GKJ_at; Start 193; Stop 217
cctccaaaaggtggattcatcataa

SEQ ID NO: 249206 - DNA, 25 bp, Artificial
  probe
  misc_feature (1)..(25): SEQ ID NO: 4935; WAN024GKJ_at; Start 190; Stop 214
gaccctccaaaaggtggattcatca

SEQ ID NO: 249207 - DNA, 25 bp, Artificial
  probe
  misc_feature (1)..(25): SEQ ID NO: 4935; WAN024GKJ_at; Start 240; Stop 264
cgtatattcacgaacatttttctcc

SEQ ID NO: 249208 - DNA, 25 bp, Artificial
  probe
  misc_feature (1)..(25): SEQ ID NO: 4935; WAN024GKJ_at; Start 96; Stop 120
tttcaaacgatacataatgacagcc

SEQ ID NO: 249209 - DNA, 25 bp, Artificial
  probe
  misc_feature (1)..(25): SEQ ID NO: 4935; WAN024GKJ_at; Start 221; Stop 245
tgtcaaatttttcatcatccgtata

SEQ ID NO: 249210 - DNA, 25 bp, Artificial
  probe
  misc_feature (1)..(25): SEQ ID NO: 4935; WAN024GKJ_at; Start 255; Stop 279
atttttctccaaagtatttccatga

SEQ ID NO: 249211 - DNA, 25 bp, Artificial
  probe
  misc_feature (1)..(25): SEQ ID NO: 4935; WAN024GKJ_at; Start 232; Stop 256
tcatcatccgtatattcacgaacat

SEQ ID NO: 249212 - DNA, 25 bp, Artificial
  probe
  misc_feature (1)..(25): SEQ ID NO: 4935; WAN024GKJ_at; Start 27; Stop 51
caagcgagtttttacaccttcacca

SEQ ID NO: 249213 - DNA, 25 bp, Artificial
  probe
  misc_feature (1)..(25): SEQ ID NO: 4935; WAN024GKJ_at; Start 44; Stop 68
cttcaccaaatagaaaaccatcagg

SEQ ID NO: 249214 - DNA, 25 bp, Artificial
  probe
  misc_feature (1)..(25): SEQ ID NO: 4935; WAN024GKJ_at; Start 147; Stop 171
ccgtaattctgctggaaagttattt

SEQ ID NO: 249215 - DNA, 25 bp, Artificial
  probe
  misc_feature (1)..(25): SEQ ID NO: 4935; WAN024GKJ_at; Start 110; Stop 134
taatgacagccataaataaatcagc

SEQ ID NO: 249216 - DNA, 25 bp, Artificial
  probe
  misc_feature (1)..(25): SEQ ID NO: 4935; WAN024GKJ_at; Start 202; Stop 226
ggtggattcatcataataatgtcaa

SEQ ID NO: 249217 - DNA, 25 bp, Artificial
  probe
  misc_feature (1)..(25): SEQ ID NO: 4935; WAN024GKJ_at; Start 187; Stop 211
tctgaccctccaaaaggtggattca

SEQ ID NO: 249218 - DNA, 25 bp, Artificial
  probe
  misc_feature (1)..(25): SEQ ID NO: 4935; WAN024GKJ_at; Start 140; Stop 164
cagaactccgtaattctgctggaaa

SEQ ID NO: 249219 - DNA, 25 bp, Artificial
  probe
  misc_feature (1)..(25): SEQ ID NO: 4935; WAN024GKJ_at; Start 99; Stop 123
caaacgatacataatgacagccata

SEQ ID NO: 249220 - DNA, 25 bp, Artificial
  probe
  misc_feature (1)..(25): SEQ ID NO: 5251; WAN024GKK_at; Start 8; Stop 32
gtcgtggagagccacctctgacaat

SEQ ID NO: 249221 - DNA, 25 bp, Artificial
  probe
  misc_feature (1)..(25): SEQ ID NO: 5251; WAN024GKK_at; Start 29; Stop 53
caatttcaaccaatgtagaaaacct

SEQ ID NO: 249222 - DNA, 25 bp, Artificial
  probe
  misc_feature (1)..(25): SEQ ID NO: 5251; WAN024GKK_at; Start 16; Stop 40
gagccacctctgacaatttcaacca

SEQ ID NO: 249223 - DNA, 25 bp, Artificial
  probe
  misc_feature (1)..(25): SEQ ID NO: 5251; WAN024GKK_at; Start 35; Stop 59
caaccaatgtagaaaacctcaccca

SEQ ID NO: 249224 - DNA, 25 bp, Artificial
  probe
  misc_feature (1)..(25): SEQ ID NO: 5251; WAN024GKK_at; Start 56; Stop 80
cccactcccaagtatcaggaatatc

SEQ ID NO: 249225 - DNA, 25 bp, Artificial
  probe
  misc_feature (1)..(25): SEQ ID NO: 5251; WAN024GKK_at; Start 33; Stop 57
ttcaaccaatgtagaaaacctcacc

SEQ ID NO: 249226 - DNA, 25 bp, Artificial
  probe
  misc_feature (1)..(25): SEQ ID NO: 5251; WAN024GKK_at; Start 27; Stop 51
gacaatttcaaccaatgtagaaaac

SEQ ID NO: 249227 - DNA, 25 bp, Artificial
  probe
  misc_feature (1)..(25): SEQ ID NO: 5251; WAN024GKK_at; Start 53; Stop 77
tcacccactcccaagtatcaggaat

SEQ ID NO: 249228 - DNA, 25 bp, Artificial
  probe
  misc_feature (1)..(25): SEQ ID NO: 5251; WAN024GKK_at; Start 22; Stop 46
cctctgacaatttcaaccaatgtag

SEQ ID NO: 249229 - DNA, 25 bp, Artificial
  probe
  misc_feature (1)..(25): SEQ ID NO: 5251; WAN024GKK_at; Start 9; Stop 33
tcgtggagagccacctctgacaatt

SEQ ID NO: 249230 - DNA, 25 bp, Artificial
  probe
  misc_feature (1)..(25): SEQ ID NO: 5251; WAN024GKK_at; Start 17; Stop 41
agccacctctgacaatttcaaccaa

SEQ ID NO: 249231 - DNA, 25 bp, Artificial
  probe
  misc_feature (1)..(25): SEQ ID NO: 5251; WAN024GKK_at; Start 32; Stop 56
tttcaaccaatgtagaaaacctcac

SEQ ID NO: 249232 - DNA, 25 bp, Artificial
  probe
  misc_feature (1)..(25): SEQ ID NO: 5251; WAN024GKK_at; Start 5; Stop 29
ttggtcgtggagagccacctctgac

SEQ ID NO: 249233 - DNA, 25 bp, Artificial
  probe
  misc_feature (1)..(25): SEQ ID NO: 5251; WAN024GKK_at; Start 13; Stop 37
ggagagccacctctgacaatttcaa

SEQ ID NO: 249234 - DNA, 25 bp, Artificial
  probe
  misc_feature (1)..(25): SEQ ID NO: 5251; WAN024GKK_at; Start 55; Stop 79
acccactcccaagtatcaggaatat

SEQ ID NO: 249235 - DNA, 25 bp, Artificial
  probe
  misc_feature (1)..(25): SEQ ID NO: 5251; WAN024GKK_at; Start 12; Stop 36
tggagagccacctctgacaatttca

SEQ ID NO: 249236 - DNA, 25 bp, Artificial
  probe
  misc_feature (1)..(25): SEQ ID NO: 5251; WAN024GKK_at; Start 2; Stop 26
tgattggtcgtggagagccacctct

SEQ ID NO: 249237 - DNA, 25 bp, Artificial
  probe
  misc_feature (1)..(25): SEQ ID NO: 5251; WAN024GKK_at; Start 20; Stop 44
cacctctgacaatttcaaccaatgt

SEQ ID NO: 249238 - DNA, 25 bp, Artificial
  probe
  misc_feature (1)..(25): SEQ ID NO: 5251; WAN024GKK_at; Start 19; Stop 43
ccacctctgacaatttcaaccaatg

SEQ ID NO: 249239 - DNA, 25 bp, Artificial
  probe
  misc_feature (1)..(25): SEQ ID NO: 5251; WAN024GKK_at; Start 18; Stop 42
gccacctctgacaatttcaaccaat

SEQ ID NO: 249240 - DNA, 25 bp, Artificial
  probe
  misc_feature (1)..(25): SEQ ID NO: 5251; WAN024GKK_at; Start 39; Stop 63
caatgtagaaaacctcacccactcc

SEQ ID NO: 249241 - DNA, 25 bp, Artificial
  probe
  misc_feature (1)..(25): SEQ ID NO: 5251; WAN024GKK_at; Start 6; Stop 30
tggtcgtggagagccacctctgaca

SEQ ID NO: 249242 - DNA, 25 bp, Artificial
  probe
  misc_feature (1)..(25): SEQ ID NO: 5251; WAN024GKK_at; Start 14; Stop 38
gagagccacctctgacaatttcaac

SEQ ID NO: 249243 - DNA, 25 bp, Artificial
  probe
  misc_feature (1)..(25): SEQ ID NO: 5251; WAN024GKK_at; Start 37; Stop 61
accaatgtagaaaacctcacccact

SEQ ID NO: 249244 - DNA, 25 bp, Artificial
  probe
  misc_feature (1)..(25): SEQ ID NO: 5251; WAN024GKK_at; Start 54; Stop 78
cacccactcccaagtatcaggaata

SEQ ID NO: 249245 - DNA, 25 bp, Artificial
  probe
  misc_feature (1)..(25): SEQ ID NO: 5251; WAN024GKK_at; Start 1; Stop 25
ttgattggtcgtggagagccacctc

SEQ ID NO: 249246 - DNA, 25 bp, Artificial
  probe
  misc_feature (1)..(25): SEQ ID NO: 5251; WAN024GKK_at; Start 25; Stop 49
ctgacaatttcaaccaatgtagaaa

SEQ ID NO: 249247 - DNA, 25 bp, Artificial
  probe
  misc_feature (1)..(25): SEQ ID NO: 5251; WAN024GKK_at; Start 3; Stop 27
gattggtcgtggagagccacctctg

SEQ ID NO: 249248 - DNA, 25 bp, Artificial
  probe
  misc_feature (1)..(25): SEQ ID NO: 5251; WAN024GKK_at; Start 24; Stop 48
tctgacaatttcaaccaatgtagaa

SEQ ID NO: 249249 - DNA, 25 bp, Artificial
  probe
  misc_feature (1)..(25): SEQ ID NO: 5251; WAN024GKK_at; Start 4; Stop 28
attggtcgtggagagccacctctga

SEQ ID NO: 249250 - DNA, 25 bp, Artificial
  probe
  misc_feature (1)..(25): SEQ ID NO: 5251; WAN024GKK_at; Start 23; Stop 47
ctctgacaatttcaaccaatgtaga

SEQ ID NO: 249251 - DNA, 25 bp, Artificial
  probe
  misc_feature (1)..(25): SEQ ID NO: 5251; WAN024GKK_at; Start 10; Stop 34
cgtggagagccacctctgacaattt

SEQ ID NO: 249252 - DNA, 25 bp, Artificial
  probe
  misc_feature (1)..(25): SEQ ID NO: 5251; WAN024GKK_at; Start 11; Stop 35
gtggagagccacctctgacaatttc

SEQ ID NO: 249253 - DNA, 25 bp, Artificial
  probe
  misc_feature (1)..(25): SEQ ID NO: 5251; WAN024GKK_at; Start 21; Stop 45
acctctgacaatttcaaccaatgta

SEQ ID NO: 249254 - DNA, 25 bp, Artificial
  probe
  misc_feature (1)..(25): SEQ ID NO: 3974; WAN024GKL_at; Start 708; Stop 732
taactcttattatgggaacaaagac

SEQ ID NO: 249255 - DNA, 25 bp, Artificial
  probe
  misc_feature (1)..(25): SEQ ID NO: 3974; WAN024GKL_at; Start 707; Stop 731
ataactcttattatgggaacaaaga

SEQ ID NO: 249256 - DNA, 25 bp, Artificial
  probe
  misc_feature (1)..(25): SEQ ID NO: 3974; WAN024GKL_at; Start 709; Stop 733
aactcttattatgggaacaaagacg

SEQ ID NO: 249257 - DNA, 25 bp, Artificial
  probe
  misc_feature (1)..(25): SEQ ID NO: 1343; WAN024GKN_s_at; Start 1363; Stop 1387
tataattttctttcctctcctattg

SEQ ID NO: 249258 - DNA, 25 bp, Artificial
  probe
  misc_feature (1)..(25): SEQ ID NO: 1343; WAN024GKN_s_at; Start 1232; Stop 1256
caacaggtctaggtacgttaggacg

SEQ ID NO: 249259 - DNA, 25 bp, Artificial
  probe
  misc_feature (1)..(25): SEQ ID NO: 1343; WAN024GKN_s_at; Start 1153; Stop 1177
gcaagatttattgatcccgaaacag

SEQ ID NO: 249260 - DNA, 25 bp, Artificial
  probe
  misc_feature (1)..(25): SEQ ID NO: 1343; WAN024GKN_s_at; Start 1110; Stop 1134
tgctcagaaatgtaatcaatggtct

SEQ ID NO: 249261 - DNA, 25 bp, Artificial
  probe
  misc_feature (1)..(25): SEQ ID NO: 1343; WAN024GKN_s_at; Start 1097; Stop 1121
tataccctgtgattgctcagaaatg

SEQ ID NO: 249262 - DNA, 25 bp, Artificial
  probe
  misc_feature (1)..(25): SEQ ID NO: 1343; WAN024GKN_s_at; Start 1161; Stop 1185
tattgatcccgaaacagttcatagt

SEQ ID NO: 249263 - DNA, 25 bp, Artificial
  probe
  misc_feature (1)..(25): SEQ ID NO: 1343; WAN024GKN_s_at; Start 1483; Stop 1507
cttcctgaacaatccagaatcgttg

SEQ ID NO: 249264 - DNA, 25 bp, Artificial
  probe
  misc_feature (1)..(25): SEQ ID NO: 1343; WAN024GKN_s_at; Start 978; Stop 1002
taactcttattatgaggaagtacct

SEQ ID NO: 249265 - DNA, 25 bp, Artificial
  probe
  misc_feature (1)..(25): SEQ ID NO: 1343; WAN024GKN_s_at; Start 1308; Stop 1332
tagccatgttacagttataagagtc

SEQ ID NO: 249266 - DNA, 25 bp, Artificial
  probe
  misc_feature (1)..(25): SEQ ID NO: 1343; WAN024GKN_s_at; Start 1118; Stop 1142
aatgtaatcaatggtctggcttttc

SEQ ID NO: 249267 - DNA, 25 bp, Artificial
  probe
  misc_feature (1)..(25): SEQ ID NO: 1343; WAN024GKN_s_at; Start 1054; Stop 1078
tacattcaaagagggaagtctccaa

SEQ ID NO: 249268 - DNA, 25 bp, Artificial
  probe
  misc_feature (1)..(25): SEQ ID NO: 1343; WAN024GKN_s_at; Start 1316; Stop 1340
ttacagttataagagtcttatcggg

SEQ ID NO: 249269 - DNA, 25 bp, Artificial
  probe
  misc_feature (1)..(25): SEQ ID NO: 1343; WAN024GKN_s_at; Start 1495; Stop 1519
tccagaatcgttgataaaatcgaac

SEQ ID NO: 249270 - DNA, 25 bp, Artificial
  probe
  misc_feature (1)..(25): SEQ ID NO: 1343; WAN024GKN_s_at; Start 1133; Stop 1157
ctggcttttctattgacttagcaag

SEQ ID NO: 249271 - DNA, 25 bp, Artificial
  probe
  misc_feature (1)..(25): SEQ ID NO: 1343; WAN024GKN_s_at; Start 1300; Stop 1324
gttgcagatagccatgttacagtta

SEQ ID NO: 249272 - DNA, 25 bp, Artificial
  probe
  misc_feature (1)..(25): SEQ ID NO: 1343; WAN024GKN_s_at; Start 1044; Stop 1068
tataacctcctacattcaaagaggg

SEQ ID NO: 249273 - DNA, 25 bp, Artificial
  probe
  misc_feature (1)..(25): SEQ ID NO: 1343; WAN024GKN_s_at; Start 1175; Stop 1199
cagttcatagttaccagaaagaaag

SEQ ID NO: 249274 - DNA, 25 bp, Artificial
  probe
  misc_feature (1)..(25): SEQ ID NO: 1343; WAN024GKN_s_at; Start 1506; Stop 1530
tgataaaatcgaacaatttttcgcc

SEQ ID NO: 249275 - DNA, 25 bp, Artificial
  probe
  misc_feature (1)..(25): SEQ ID NO: 1343; WAN024GKN_s_at; Start 1520; Stop 1544
aatttttcgcccatattgacgcact

SEQ ID NO: 249276 - DNA, 25 bp, Artificial
  probe
  misc_feature (1)..(25): SEQ ID NO: 1343; WAN024GKN_s_at; Start 1031; Stop 1055
tgaggttaaacgatataacctccta

SEQ ID NO: 249277 - DNA, 25 bp, Artificial
  probe
  misc_feature (1)..(25): SEQ ID NO: 1343; WAN024GKN_s_at; Start 1294; Stop 1318
tgggctgttgcagatagccatgtta

SEQ ID NO: 249278 - DNA, 25 bp, Artificial
  probe
  misc_feature (1)..(25): SEQ ID NO: 1343; WAN024GKN_s_at; Start 1064; Stop 1088
gagggaagtctccaaaatattcaaa

SEQ ID NO: 249279 - DNA, 25 bp, Artificial
  probe
  misc_feature (1)..(25): SEQ ID NO: 1343; WAN024GKN_s_at; Start 1084; Stop 1108
tcaaatattcctatataccctgtga

SEQ ID NO: 249280 - DNA, 25 bp, Artificial
  probe
  misc_feature (1)..(25): SEQ ID NO: 1343; WAN024GKN_s_at; Start 1239; Stop 1263
tctaggtacgttaggacgattagct

SEQ ID NO: 249281 - DNA, 25 bp, Artificial
  probe
  misc_feature (1)..(25): SEQ ID NO: 1343; WAN024GKN_s_at; Start 1147; Stop 1171
gacttagcaagatttattgatcccg

SEQ ID NO: 249282 - DNA, 25 bp, Artificial
  probe
  misc_feature (1)..(25): SEQ ID NO: 1343; WAN024GKN_s_at; Start 1180; Stop 1204
catagttaccagaaagaaagattac

SEQ ID NO: 249283 - DNA, 25 bp, Artificial
  probe
  misc_feature (1)..(25): SEQ ID NO: 1343; WAN024GKN_s_at; Start 1401; Stop 1425
tgaagaaaaagcgtcgggtagtaca

SEQ ID NO: 249284 - DNA, 25 bp, Artificial
  probe
  misc_feature (1)..(25): SEQ ID NO: 1343; WAN024GKN_s_at; Start 991; Stop 1015
gaggaagtaccttgtgaaataccag

SEQ ID NO: 249285 - DNA, 25 bp, Artificial
  probe
  misc_feature (1)..(25): SEQ ID NO: 1343; WAN024GKN_s_at; Start 1247; Stop 1271
cgttaggacgattagctatttacca

SEQ ID NO: 249286 - DNA, 25 bp, Artificial
  probe
  misc_feature (1)..(25): SEQ ID NO: 1343; WAN024GKN_s_at; Start 1393; Stop 1417
tcagttattgaagaaaaagcgtcgg

SEQ ID NO: 249287 - DNA, 25 bp, Artificial
  probe
  misc_feature (1)..(25): SEQ ID NO: 1343; WAN024GKN_s_at; Start 1376; Stop 1400
cctctcctattgttcagtcagttat

SEQ ID NO: 249288 - DNA, 25 bp, Artificial
  probe
  misc_feature (1)..(25): SEQ ID NO: 1343; WAN024GKN_s_at; Start 1210; Stop 1234
gatggtgatttaatgtggaattcaa

SEQ ID NO: 249289 - DNA, 25 bp, Artificial
  probe
  misc_feature (1)..(25): SEQ ID NO: 1343; WAN024GKN_s_at; Start 1524; Stop 1548
tttcgcccatattgacgcactaatt

SEQ ID NO: 249290 - DNA, 25 bp, Artificial
  probe
  misc_feature (1)..(25): SEQ ID NO: 1343; WAN024GKN_s_at; Start 1225; Stop 1249
tggaattcaacaggtctaggtacgt

SEQ ID NO: 249291 - DNA, 25 bp, Artificial
  probe
  misc_feature (1)..(25): SEQ ID NO: 1344; WAN024GKO_s_at; Start 1018; Stop 1042
gacgaaacaacctcttatcctatat

SEQ ID NO: 249292 - DNA, 25 bp, Artificial
  probe
  misc_feature (1)..(25): SEQ ID NO: 1344; WAN024GKO_s_at; Start 1349; Stop 1373
tcccctatgctaataaagaaaatat

SEQ ID NO: 249293 - DNA, 25 bp, Artificial
  probe
  misc_feature (1)..(25): SEQ ID NO: 1344; WAN024GKO_s_at; Start 1102; Stop 1126
ggaaaaactcctccacgcagtgaag

SEQ ID NO: 249294 - DNA, 25 bp, Artificial
  probe
  misc_feature (1)..(25): SEQ ID NO: 1344; WAN024GKO_s_at; Start 1482; Stop 1506
aatccctatttctaatcatgaagag

SEQ ID NO: 249295 - DNA, 25 bp, Artificial
  probe
  misc_feature (1)..(25): SEQ ID NO: 1344; WAN024GKO_s_at; Start 1150; Stop 1174
ccttgggtatctatatcagatatgc

SEQ ID NO: 249296 - DNA, 25 bp, Artificial
  probe
  misc_feature (1)..(25): SEQ ID NO: 1344; WAN024GKO_s_at; Start 1464; Stop 1488
cagtatctccgaattattaatccct

SEQ ID NO: 249297 - DNA, 25 bp, Artificial
  probe
  misc_feature (1)..(25): SEQ ID NO: 1344; WAN024GKO_s_at; Start 1236; Stop 1260
gaaaatagacatttcacctaaagga

SEQ ID NO: 249298 - DNA, 25 bp, Artificial
  probe
  misc_feature (1)..(25): SEQ ID NO: 1344; WAN024GKO_s_at; Start 1114; Stop 1138
ccacgcagtgaagctactttttggg

SEQ ID NO: 249299 - DNA, 25 bp, Artificial
  probe
  misc_feature (1)..(25): SEQ ID NO: 1344; WAN024GKO_s_at; Start 1342; Stop 1366
tcgatattcccctatgctaataaag

SEQ ID NO: 249300 - DNA, 25 bp, Artificial
  probe
  misc_feature (1)..(25): SEQ ID NO: 1344; WAN024GKO_s_at; Start 1042; Stop 1066
tatgaaatcccagaagcatggagat

SEQ ID NO: 249301 - DNA, 25 bp, Artificial
  probe
  misc_feature (1)..(25): SEQ ID NO: 1344; WAN024GKO_s_at; Start 1278; Stop 1302
taaattatctattggaaaagttgcc

SEQ ID NO: 249302 - DNA, 25 bp, Artificial
  probe
  misc_feature (1)..(25): SEQ ID NO: 1344; WAN024GKO_s_at; Start 1415; Stop 1439
ctttaggtgattcaaaagatgctat

SEQ ID NO: 249303 - DNA, 25 bp, Artificial
  probe
  misc_feature (1)..(25): SEQ ID NO: 1344; WAN024GKO_s_at; Start 1285; Stop 1309
tctattggaaaagttgccatattgg

SEQ ID NO: 249304 - DNA, 25 bp, Artificial
  probe
  misc_feature (1)..(25): SEQ ID NO: 1344; WAN024GKO_s_at; Start 1309; Stop 1333
gatattcctgccactcataatgaag

SEQ ID NO: 249305 - DNA, 25 bp, Artificial
  probe
  misc_feature (1)..(25): SEQ ID NO: 1344; WAN024GKO_s_at; Start 1330; Stop 1354
gaagccattatatcgatattcccct

SEQ ID NO: 249306 - DNA, 25 bp, Artificial
  probe
  misc_feature (1)..(25): SEQ ID NO: 1344; WAN024GKO_s_at; Start 1154; Stop 1178
gggtatctatatcagatatgcctat

SEQ ID NO: 249307 - DNA, 25 bp, Artificial
  probe
  misc_feature (1)..(25): SEQ ID NO: 1344; WAN024GKO_s_at; Start 1315; Stop 1339
cctgccactcataatgaagccatta

SEQ ID NO: 249308 - DNA, 25 bp, Artificial
  probe
  misc_feature (1)..(25): SEQ ID NO: 1344; WAN024GKO_s_at; Start 1064; Stop 1088
gatatattaaatttgctagcctagt

SEQ ID NO: 249309 - DNA, 25 bp, Artificial
  probe
  misc_feature (1)..(25): SEQ ID NO: 1344; WAN024GKO_s_at; Start 1094; Stop 1118
tcagaataggaaaaactcctccacg

SEQ ID NO: 249310 - DNA, 25 bp, Artificial
  probe
  misc_feature (1)..(25): SEQ ID NO: 1344; WAN024GKO_s_at; Start 1497; Stop 1521
tcatgaagagatgaaaagaatcatt

SEQ ID NO: 249311 - DNA, 25 bp, Artificial
  probe
  misc_feature (1)..(25): SEQ ID NO: 1344; WAN024GKO_s_at; Start 1050; Stop 1074
cccagaagcatggagatatattaaa

SEQ ID NO: 249312 - DNA, 25 bp, Artificial
  probe
  misc_feature (1)..(25): SEQ ID NO: 1344; WAN024GKO_s_at; Start 1222; Stop 1246
gcattaaaatcaaagaaaatagaca

SEQ ID NO: 249313 - DNA, 25 bp, Artificial
  probe
  misc_feature (1)..(25): SEQ ID NO: 1344; WAN024GKO_s_at; Start 1296; Stop 1320
agttgccatattggatattcctgcc

SEQ ID NO: 249314 - DNA, 25 bp, Artificial
  probe
  misc_feature (1)..(25): SEQ ID NO: 1344; WAN024GKO_s_at; Start 1250; Stop 1274
cacctaaaggaactttattaatgag

SEQ ID NO: 249315 - DNA, 25 bp, Artificial
  probe
  misc_feature (1)..(25): SEQ ID NO: 1344; WAN024GKO_s_at; Start 1038; Stop 1062
tatatatgaaatcccagaagcatgg

SEQ ID NO: 249316 - DNA, 25 bp, Artificial
  probe
  misc_feature (1)..(25): SEQ ID NO: 1344; WAN024GKO_s_at; Start 1397; Stop 1421
ttttgccacttatctctactttagg

SEQ ID NO: 249317 - DNA, 25 bp, Artificial
  probe
  misc_feature (1)..(25): SEQ ID NO: 1344; WAN024GKO_s_at; Start 1407; Stop 1431
tatctctactttaggtgattcaaaa

SEQ ID NO: 249318 - DNA, 25 bp, Artificial
  probe
  misc_feature (1)..(25): SEQ ID NO: 1344; WAN024GKO_s_at; Start 1030; Stop 1054
tcttatcctatatatgaaatcccag

SEQ ID NO: 249319 - DNA, 25 bp, Artificial
  probe
  misc_feature (1)..(25): SEQ ID NO: 1344; WAN024GKO_s_at; Start 1138; Stop 1162
ggaactgaaataccttgggtatcta

SEQ ID NO: 249320 - DNA, 25 bp, Artificial
  probe
  misc_feature (1)..(25): SEQ ID NO: 1344; WAN024GKO_s_at; Start 1170; Stop 1194
tatgcctatatctggttatgtaact

SEQ ID NO: 249321 - DNA, 25 bp, Artificial
  probe
  misc_feature (1)..(25): SEQ ID NO: 1344; WAN024GKO_s_at; Start 1366; Stop 1390
gaaaatattatcagagattacttaa

SEQ ID NO: 249322 - DNA, 25 bp, Artificial
  probe
  misc_feature (1)..(25): SEQ ID NO: 1344; WAN024GKO_s_at; Start 1381; Stop 1405
gattacttaatgatatttttgccac

SEQ ID NO: 249323 - DNA, 25 bp, Artificial
  probe
  misc_feature (1)..(25): SEQ ID NO: 1344; WAN024GKO_s_at; Start 1078; Stop 1102
gctagcctagttaacttcagaatag

SEQ ID NO: 249324 - DNA, 25 bp, Artificial
  probe
  misc_feature (1)..(25): SEQ ID NO: 1344; WAN024GKO_s_at; Start 1451; Stop 1475
cattaaatagtaccagtatctccga

SEQ ID NO: 249325 - DNA, 25 bp, Artificial
  probe
  misc_feature (1)..(25): SEQ ID NO: 3212; WAN024GKP_at; Start 389; Stop 413
ttgatacacaattcatctcctctga

SEQ ID NO: 249326 - DNA, 25 bp, Artificial
  probe
  misc_feature (1)..(25): SEQ ID NO: 3212; WAN024GKP_at; Start 319; Stop 343
ggtgttagaattatacgtggtggta

SEQ ID NO: 249327 - DNA, 25 bp, Artificial
  probe
  misc_feature (1)..(25): SEQ ID NO: 3212; WAN024GKP_at; Start 282; Stop 306
ttcttacaagaagggcgatttaagc

SEQ ID NO: 249328 - DNA, 25 bp, Artificial
  probe
  misc_feature (1)..(25): SEQ ID NO: 3212; WAN024GKP_at; Start 334; Stop 358
cgtggtggtaatattaagcctttag

SEQ ID NO: 249329 - DNA, 25 bp, Artificial
  probe
  misc_feature (1)..(25): SEQ ID NO: 3212; WAN024GKP_at; Start 286; Stop 310
tacaagaagggcgatttaagcatta

SEQ ID NO: 249330 - DNA, 25 bp, Artificial
  probe
  misc_feature (1)..(25): SEQ ID NO: 3212; WAN024GKP_at; Start 429; Stop 453
acataatcagctaataacacctgta

SEQ ID NO: 249331 - DNA, 25 bp, Artificial
  probe
  misc_feature (1)..(25): SEQ ID NO: 3212; WAN024GKP_at; Start 703; Stop 727
tttgaggaacaggaacttattactc

SEQ ID NO: 249332 - DNA, 25 bp, Artificial
  probe
  misc_feature (1)..(25): SEQ ID NO: 3212; WAN024GKP_at; Start 496; Stop 520
aaagactatgatggtgttgtggctg

SEQ ID NO: 249333 - DNA, 25 bp, Artificial
  probe
  misc_feature (1)..(25): SEQ ID NO: 3212; WAN024GKP_at; Start 650; Stop 674
tatataatattcctaaaactacact

SEQ ID NO: 249334 - DNA, 25 bp, Artificial
  probe
  misc_feature (1)..(25): SEQ ID NO: 3212; WAN024GKP_at; Start 214; Stop 238
tatgggaatatacctatgaattggg

SEQ ID NO: 249335 - DNA, 25 bp, Artificial
  probe
  misc_feature (1)..(25): SEQ ID NO: 3212; WAN024GKP_at; Start 706; Stop 730
gaggaacaggaacttattactcaaa

SEQ ID NO: 249336 - DNA, 25 bp, Artificial
  probe
  misc_feature (1)..(25): SEQ ID NO: 3212; WAN024GKP_at; Start 676; Stop 700
agcgagctattaattccgttagctc

SEQ ID NO: 249337 - DNA, 25 bp, Artificial
  probe
  misc_feature (1)..(25): SEQ ID NO: 3212; WAN024GKP_at; Start 469; Stop 493
catattggaaagtttgcaagaatcg

SEQ ID NO: 249338 - DNA, 25 bp, Artificial
  probe
  misc_feature (1)..(25): SEQ ID NO: 3212; WAN024GKP_at; Start 224; Stop 248
tacctatgaattgggttgttataaa

SEQ ID NO: 249339 - DNA, 25 bp, Artificial
  probe
  misc_feature (1)..(25): SEQ ID NO: 3212; WAN024GKP_at; Start 686; Stop 710
taattccgttagctccttttgagga

SEQ ID NO: 249340 - DNA, 25 bp, Artificial
  probe
  misc_feature (1)..(25): SEQ ID NO: 3212; WAN024GKP_at; Start 692; Stop 716
cgttagctccttttgaggaacagga

SEQ ID NO: 249341 - DNA, 25 bp, Artificial
  probe
  misc_feature (1)..(25): SEQ ID NO: 3212; WAN024GKP_at; Start 600; Stop 624
gttattttataaacaattgaaagca

SEQ ID NO: 249342 - DNA, 25 bp, Artificial
  probe
  misc_feature (1)..(25): SEQ ID NO: 3212; WAN024GKP_at; Start 715; Stop 739
gaacttattactcaaaaagttgaga

SEQ ID NO: 249343 - DNA, 25 bp, Artificial
  probe
  misc_feature (1)..(25): SEQ ID NO: 3212; WAN024GKP_at; Start 305; Stop 329
gcattaataataaaggtgttagaat

SEQ ID NO: 249344 - DNA, 25 bp, Artificial
  probe
  misc_feature (1)..(25): SEQ ID NO: 3212; WAN024GKP_at; Start 345; Stop 369
tattaagcctttagaattttctctg

SEQ ID NO: 249345 - DNA, 25 bp, Artificial
  probe
  misc_feature (1)..(25): SEQ ID NO: 3212; WAN024GKP_at; Start 275; Stop 299
caggtctttcttacaagaagggcga

SEQ ID NO: 249346 - DNA, 25 bp, Artificial
  probe
  misc_feature (1)..(25): SEQ ID NO: 3212; WAN024GKP_at; Start 352; Stop 376
cctttagaattttctctgttggata

SEQ ID NO: 249347 - DNA, 25 bp, Artificial
  probe
  misc_feature (1)..(25): SEQ ID NO: 3212; WAN024GKP_at; Start 207; Stop 231
ctcttattatgggaatatacctatg

SEQ ID NO: 249348 - DNA, 25 bp, Artificial
  probe
  misc_feature (1)..(25): SEQ ID NO: 3212; WAN024GKP_at; Start 638; Stop 662
caggtcaagctttatataatattcc

SEQ ID NO: 249349 - DNA, 25 bp, Artificial
  probe
  misc_feature (1)..(25): SEQ ID NO: 3212; WAN024GKP_at; Start 379; Stop 403
gattactacattgatacacaattca

SEQ ID NO: 249350 - DNA, 25 bp, Artificial
  probe
  misc_feature (1)..(25): SEQ ID NO: 3212; WAN024GKP_at; Start 590; Stop 614
tgtcctctccgttattttataaaca

SEQ ID NO: 249351 - DNA, 25 bp, Artificial
  probe
  misc_feature (1)..(25): SEQ ID NO: 3212; WAN024GKP_at; Start 425; Stop 449
taaaacataatcagctaataacacc

SEQ ID NO: 249352 - DNA, 25 bp, Artificial
  probe
  misc_feature (1)..(25): SEQ ID NO: 3212; WAN024GKP_at; Start 697; Stop 721
gctccttttgaggaacaggaactta

SEQ ID NO: 249353 - DNA, 25 bp, Artificial
  probe
  misc_feature (1)..(25): SEQ ID NO: 3212; WAN024GKP_at; Start 455; Stop 479
caacctctttagaacatattggaaa

SEQ ID NO: 249354 - DNA, 25 bp, Artificial
  probe
  misc_feature (1)..(25): SEQ ID NO: 3212; WAN024GKP_at; Start 501; Stop 525
ctatgatggtgttgtggctggtgga

SEQ ID NO: 249355 - DNA, 25 bp, Artificial
  probe
  misc_feature (1)..(25): SEQ ID NO: 3212; WAN024GKP_at; Start 629; Stop 653
ctaaactatcaggtcaagctttata

SEQ ID NO: 249356 - DNA, 25 bp, Artificial
  probe
  misc_feature (1)..(25): SEQ ID NO: 3212; WAN024GKP_at; Start 271; Stop 295
aatacaggtctttcttacaagaagg

SEQ ID NO: 249357 - DNA, 25 bp, Artificial
  probe
  misc_feature (1)..(25): SEQ ID NO: 3212; WAN024GKP_at; Start 330; Stop 354
tatacgtggtggtaatattaagcct

SEQ ID NO: 249358 - DNA, 25 bp, Artificial
  probe
  misc_feature (1)..(25): SEQ ID NO: 3212; WAN024GKP_at; Start 291; Stop 315
gaagggcgatttaagcattaataat

SEQ ID NO: 249359 - DNA, 25 bp, Artificial
  probe
  misc_feature (1)..(25): SEQ ID NO: 2839; WAN024GKQ_at; Start 1144; Stop 1168
tatcgtttagatatgccagatggtt

SEQ ID NO: 249360 - DNA, 25 bp, Artificial
  probe
  misc_feature (1)..(25): SEQ ID NO: 2839; WAN024GKQ_at; Start 217; Stop 241
gaacgggtattgacaggcgatgaat

SEQ ID NO: 249361 - DNA, 25 bp, Artificial
  probe
  misc_feature (1)..(25): SEQ ID NO: 2839; WAN024GKQ_at; Start 182; Stop 206
taaaatggcgaaattgggctcatgc

SEQ ID NO: 249362 - DNA, 25 bp, Artificial
  probe
  misc_feature (1)..(25): SEQ ID NO: 2839; WAN024GKQ_at; Start 1284; Stop 1308
tacacctagtgaattggctgagttg

SEQ ID NO: 249363 - DNA, 25 bp, Artificial
  probe
  misc_feature (1)..(25): SEQ ID NO: 2839; WAN024GKQ_at; Start 494; Stop 518
gagaattttatacgccacgtgcagc

SEQ ID NO: 249364 - DNA, 25 bp, Artificial
  probe
  misc_feature (1)..(25): SEQ ID NO: 2839; WAN024GKQ_at; Start 1435; Stop 1459
gatattttgcagttgttggaggaca

SEQ ID NO: 249365 - DNA, 25 bp, Artificial
  probe
  misc_feature (1)..(25): SEQ ID NO: 2839; WAN024GKQ_at; Start 115; Stop 139
tatgatagccgtgaaatggtttggg

SEQ ID NO: 249366 - DNA, 25 bp, Artificial
  probe
  misc_feature (1)..(25): SEQ ID NO: 2839; WAN024GKQ_at; Start 627; Stop 651
tcaacgtaaaactagtgaagatacc

SEQ ID NO: 249367 - DNA, 25 bp, Artificial
  probe
  misc_feature (1)..(25): SEQ ID NO: 2839; WAN024GKQ_at; Start 303; Stop 327
tatgcctattcgaaaaacgattgtt

SEQ ID NO: 249368 - DNA, 25 bp, Artificial
  probe
  misc_feature (1)..(25): SEQ ID NO: 2839; WAN024GKQ_at; Start 374; Stop 398
tgttacgccaagtcatcaatgttat

SEQ ID NO: 249369 - DNA, 25 bp, Artificial
  probe
  misc_feature (1)..(25): SEQ ID NO: 2839; WAN024GKQ_at; Start 34; Stop 58
gatatcactcgaaacgatgctggtg

SEQ ID NO: 249370 - DNA, 25 bp, Artificial
  probe
  misc_feature (1)..(25): SEQ ID NO: 2839; WAN024GKQ_at; Start 584; Stop 608
gaacaggaggcttcttgacttcgac

SEQ ID NO: 249371 - DNA, 25 bp, Artificial
  probe
  misc_feature (1)..(25): SEQ ID NO: 2839; WAN024GKQ_at; Start 148; Stop 172
gaagacgagtatgagtcaattatcc

SEQ ID NO: 249372 - DNA, 25 bp, Artificial
  probe
  misc_feature (1)..(25): SEQ ID NO: 2839; WAN024GKQ_at; Start 984; Stop 1008
tggtgaaggtgtaaaaactcgcttg

SEQ ID NO: 249373 - DNA, 25 bp, Artificial
  probe
  misc_feature (1)..(25): SEQ ID NO: 2839; WAN024GKQ_at; Start 514; Stop 538
gcagcgactgattttattgccgaag

SEQ ID NO: 249374 - DNA, 25 bp, Artificial
  probe
  misc_feature (1)..(25): SEQ ID NO: 2839; WAN024GKQ_at; Start 567; Stop 591
ggcagaccttgcttgcggaacagga

SEQ ID NO: 249375 - DNA, 25 bp, Artificial
  probe
  misc_feature (1)..(25): SEQ ID NO: 2839; WAN024GKQ_at; Start 880; Stop 904
gaattacggagttctgaaacagctg

SEQ ID NO: 249376 - DNA, 25 bp, Artificial
  probe
  misc_feature (1)..(25): SEQ ID NO: 2839; WAN024GKQ_at; Start 1212; Stop 1236
caatcctgttcgtgactggtgggaa

SEQ ID NO: 249377 - DNA, 25 bp, Artificial
  probe
  misc_feature (1)..(25): SEQ ID NO: 2839; WAN024GKQ_at; Start 1067; Stop 1091
tctttgcaccgtatacaggaatcca

SEQ ID NO: 249378 - DNA, 25 bp, Artificial
  probe
  misc_feature (1)..(25): SEQ ID NO: 2839; WAN024GKQ_at; Start 348; Stop 372
gaacaactatatgaaaaatggcgtc

SEQ ID NO: 249379 - DNA, 25 bp, Artificial
  probe
  misc_feature (1)..(25): SEQ ID NO: 2839; WAN024GKQ_at; Start 331; Stop 355
tcagcttttgaagatgcgaacaact

SEQ ID NO: 249380 - DNA, 25 bp, Artificial
  probe
  misc_feature (1)..(25): SEQ ID NO: 2839; WAN024GKQ_at; Start 825; Stop 849
gaatccaccttttggagggtcagaa

SEQ ID NO: 249381 - DNA, 25 bp, Artificial
  probe
  misc_feature (1)..(25): SEQ ID NO: 2839; WAN024GKQ_at; Start 867; Stop 891
taactttccagcagaattacggagt

SEQ ID NO: 249382 - DNA, 25 bp, Artificial
  probe
  misc_feature (1)..(25): SEQ ID NO: 2839; WAN024GKQ_at; Start 400; Stop 424
gatgaagttgatttcaatagccctg

SEQ ID NO: 249383 - DNA, 25 bp, Artificial
  probe
  misc_feature (1)..(25): SEQ ID NO: 2839; WAN024GKQ_at; Start 415; Stop 439
aatagccctgaagatcgtcattcgt

SEQ ID NO: 249384 - DNA, 25 bp, Artificial
  probe
  misc_feature (1)..(25): SEQ ID NO: 2839; WAN024GKQ_at; Start 51; Stop 75
tgctggtgttaatggtgatgctcaa

SEQ ID NO: 249385 - DNA, 25 bp, Artificial
  probe
  misc_feature (1)..(25): SEQ ID NO: 2839; WAN024GKQ_at; Start 599; Stop 623
tgacttcgactctgaaccgtttaag

SEQ ID NO: 249386 - DNA, 25 bp, Artificial
  probe
  misc_feature (1)..(25): SEQ ID NO: 2839; WAN024GKQ_at; Start 1347; Stop 1371
agaggaaatcttaaatccctttgag

SEQ ID NO: 249387 - DNA, 25 bp, Artificial
  probe
  misc_feature (1)..(25): SEQ ID NO: 2839; WAN024GKQ_at; Start 1377; Stop 1401
tcagaattatcaagcggaaagagca

SEQ ID NO: 249388 - DNA, 25 bp, Artificial
  probe
  misc_feature (1)..(25): SEQ ID NO: 2839; WAN024GKQ_at; Start 550; Stop 574
aaacttggagaatcaatggcagacc

SEQ ID NO: 249389 - DNA, 25 bp, Artificial
  probe
  misc_feature (1)..(25): SEQ ID NO: 2839; WAN024GKQ_at; Start 1050; Stop 1074
taggttgcctcatagtgtctttgca

SEQ ID NO: 249390 - DNA, 25 bp, Artificial
  probe
  misc_feature (1)..(25): SEQ ID NO: 2839; WAN024GKQ_at; Start 1173; Stop 1197
aaatttctcgaaaactaagccgatg

SEQ ID NO: 249391 - DNA, 25 bp, Artificial
  probe
  misc_feature (1)..(25): SEQ ID NO: 2839; WAN024GKQ_at; Start 1003; Stop 1027
cgcttgaaacaaaaactggtagatg

SEQ ID NO: 249392 - DNA, 25 bp, Artificial
  probe
  misc_feature (1)..(25): SEQ ID NO: 2839; WAN024GKQ_at; Start 1188; Stop 1212
taagccgatgaagtcagaacacttc

SEQ ID NO: 249393 - DNA, 25 bp, Artificial
  probe
  misc_feature (1)..(25): SEQ ID NO: 3897; WAN024GKR_at; Start 60; Stop 84
cagcatattttttcttaatggcagc

SEQ ID NO: 249394 - DNA, 25 bp, Artificial
  probe
  misc_feature (1)..(25): SEQ ID NO: 3897; WAN024GKR_at; Start 92; Stop 116
taaccttcagagatataatctttga

SEQ ID NO: 249395 - DNA, 25 bp, Artificial
  probe
  misc_feature (1)..(25): SEQ ID NO: 3897; WAN024GKR_at; Start 158; Stop 182
cgatttccttcgtttcgatcgggct

SEQ ID NO: 249396 - DNA, 25 bp, Artificial
  probe
  misc_feature (1)..(25): SEQ ID NO: 3897; WAN024GKR_at; Start 30; Stop 54
taaccgctttcttggatttcgcttc

SEQ ID NO: 249397 - DNA, 25 bp, Artificial
  probe
  misc_feature (1)..(25): SEQ ID NO: 3897; WAN024GKR_at; Start 12; Stop 36
gacgtacttcagtctgactaaccgc

SEQ ID NO: 249398 - DNA, 25 bp, Artificial
  probe
  misc_feature (1)..(25): SEQ ID NO: 3897; WAN024GKR_at; Start 33; Stop 57
ccgctttcttggatttcgcttcacg

SEQ ID NO: 249399 - DNA, 25 bp, Artificial
  probe
  misc_feature (1)..(25): SEQ ID NO: 3897; WAN024GKR_at; Start 21; Stop 45
cagtctgactaaccgctttcttgga

SEQ ID NO: 249400 - DNA, 25 bp, Artificial
  probe
  misc_feature (1)..(25): SEQ ID NO: 3897; WAN024GKR_at; Start 172; Stop 196
tcgatcgggcttgatcaactcttga

SEQ ID NO: 249401 - DNA, 25 bp, Artificial
  probe
  misc_feature (1)..(25): SEQ ID NO: 3897; WAN024GKR_at; Start 39; Stop 63
tcttggatttcgcttcacgttcagc

SEQ ID NO: 249402 - DNA, 25 bp, Artificial
  probe
  misc_feature (1)..(25): SEQ ID NO: 3897; WAN024GKR_at; Start 63; Stop 87
catattttttcttaatggcagcgat

SEQ ID NO: 249403 - DNA, 25 bp, Artificial
  probe
  misc_feature (1)..(25): SEQ ID NO: 3897; WAN024GKR_at; Start 75; Stop 99
taatggcagcgatattataaccttc

SEQ ID NO: 249404 - DNA, 25 bp, Artificial
  probe
  misc_feature (1)..(25): SEQ ID NO: 3897; WAN024GKR_at; Start 145; Stop 169
ggaatacatgcgacgatttccttcg

SEQ ID NO: 249405 - DNA, 25 bp, Artificial
  probe
  misc_feature (1)..(25): SEQ ID NO: 3897; WAN024GKR_at; Start 186; Stop 210
tcaactcttgatcttcataataacg

SEQ ID NO: 249406 - DNA, 25 bp, Artificial
  probe
  misc_feature (1)..(25): SEQ ID NO: 3897; WAN024GKR_at; Start 8; Stop 32
gcacgacgtacttcagtctgactaa

SEQ ID NO: 249407 - DNA, 25 bp, Artificial
  probe
  misc_feature (1)..(25): SEQ ID NO: 3897; WAN024GKR_at; Start 49; Stop 73
cgcttcacgttcagcatattttttc

SEQ ID NO: 249408 - DNA, 25 bp, Artificial
  probe
  misc_feature (1)..(25): SEQ ID NO: 3897; WAN024GKR_at; Start 123; Stop 147
gcagacgatccatgtcattcaagga

SEQ ID NO: 249409 - DNA, 25 bp, Artificial
  probe
  misc_feature (1)..(25): SEQ ID NO: 3897; WAN024GKR_at; Start 81; Stop 105
cagcgatattataaccttcagagat

SEQ ID NO: 249410 - DNA, 25 bp, Artificial
  probe
  misc_feature (1)..(25): SEQ ID NO: 3897; WAN024GKR_at; Start 178; Stop 202
gggcttgatcaactcttgatcttca

SEQ ID NO: 249411 - DNA, 25 bp, Artificial
  probe
  misc_feature (1)..(25): SEQ ID NO: 3897; WAN024GKR_at; Start 43; Stop 67
ggatttcgcttcacgttcagcatat

SEQ ID NO: 249412 - DNA, 25 bp, Artificial
  probe
  misc_feature (1)..(25): SEQ ID NO: 3897; WAN024GKR_at; Start 79; Stop 103
ggcagcgatattataaccttcagag

SEQ ID NO: 249413 - DNA, 25 bp, Artificial
  probe
  misc_feature (1)..(25): SEQ ID NO: 3897; WAN024GKR_at; Start 151; Stop 175
catgcgacgatttccttcgtttcga

SEQ ID NO: 249414 - DNA, 25 bp, Artificial
  probe
  misc_feature (1)..(25): SEQ ID NO: 3897; WAN024GKR_at; Start 201; Stop 225
cataataacgaatctgacgcgccga

SEQ ID NO: 249415 - DNA, 25 bp, Artificial
  probe
  misc_feature (1)..(25): SEQ ID NO: 3897; WAN024GKR_at; Start 107; Stop 131
taatctttgatttcaagcagacgat

SEQ ID NO: 249416 - DNA, 25 bp, Artificial
  probe
  misc_feature (1)..(25): SEQ ID NO: 3897; WAN024GKR_at; Start 135; Stop 159
tgtcattcaaggaatacatgcgacg

SEQ ID NO: 249417 - DNA, 25 bp, Artificial
  probe
  misc_feature (1)..(25): SEQ ID NO: 3897; WAN024GKR_at; Start 204; Stop 228
aataacgaatctgacgcgccgatag

SEQ ID NO: 249418 - DNA, 25 bp, Artificial
  probe
  misc_feature (1)..(25): SEQ ID NO: 3897; WAN024GKR_at; Start 110; Stop 134
tctttgatttcaagcagacgatcca

SEQ ID NO: 249419 - DNA, 25 bp, Artificial
  probe
  misc_feature (1)..(25): SEQ ID NO: 3897; WAN024GKR_at; Start 119; Stop 143
tcaagcagacgatccatgtcattca

SEQ ID NO: 249420 - DNA, 25 bp, Artificial
  probe
  misc_feature (1)..(25): SEQ ID NO: 3897; WAN024GKR_at; Start 115; Stop 139
gatttcaagcagacgatccatgtca

SEQ ID NO: 249421 - DNA, 25 bp, Artificial
  probe
  misc_feature (1)..(25): SEQ ID NO: 3897; WAN024GKR_at; Start 197; Stop 221
tcttcataataacgaatctgacgcg

SEQ ID NO: 249422 - DNA, 25 bp, Artificial
  probe
  misc_feature (1)..(25): SEQ ID NO: 3897; WAN024GKR_at; Start 138; Stop 162
cattcaaggaatacatgcgacgatt

SEQ ID NO: 249423 - DNA, 25 bp, Artificial
  probe
  misc_feature (1)..(25): SEQ ID NO: 3897; WAN024GKR_at; Start 126; Stop 150
gacgatccatgtcattcaaggaata

SEQ ID NO: 249424 - DNA, 25 bp, Artificial
  probe
  misc_feature (1)..(25): SEQ ID NO: 3897; WAN024GKR_at; Start 141; Stop 165
tcaaggaatacatgcgacgatttcc

SEQ ID NO: 249425 - DNA, 25 bp, Artificial
  probe
  misc_feature (1)..(25): SEQ ID NO: 3897; WAN024GKR_at; Start 3; Stop 27
gaagtgcacgacgtacttcagtctg

SEQ ID NO: 249426 - DNA, 25 bp, Artificial
  probe
  misc_feature (1)..(25): SEQ ID NO: 3897; WAN024GKR_at; Start 164; Stop 188
ccttcgtttcgatcgggcttgatca

SEQ ID NO: 249427 - DNA, 25 bp, Artificial
  probe
  misc_feature (1)..(25): SEQ ID NO: 3537; WAN024GKS_at; Start 104; Stop 128
taaagacggaaatcaacgcatgtat

SEQ ID NO: 249428 - DNA, 25 bp, Artificial
  probe
  misc_feature (1)..(25): SEQ ID NO: 3537; WAN024GKS_at; Start 49; Stop 73
tatcggcgcgtacgaacagaaaatc

SEQ ID NO: 249429 - DNA, 25 bp, Artificial
  probe
  misc_feature (1)..(25): SEQ ID NO: 3537; WAN024GKS_at; Start 14; Stop 38
ttttcctatcggctatgatcagaga

SEQ ID NO: 249430 - DNA, 25 bp, Artificial
  probe
  misc_feature (1)..(25): SEQ ID NO: 3537; WAN024GKS_at; Start 331; Stop 355
gttaggcaaccgcaagtagtcatag

SEQ ID NO: 249431 - DNA, 25 bp, Artificial
  probe
  misc_feature (1)..(25): SEQ ID NO: 3537; WAN024GKS_at; Start 77; Stop 101
caataatgagtagaacaagcccgat

SEQ ID NO: 249432 - DNA, 25 bp, Artificial
  probe
  misc_feature (1)..(25): SEQ ID NO: 3537; WAN024GKS_at; Start 333; Stop 357
taggcaaccgcaagtagtcatagat

SEQ ID NO: 249433 - DNA, 25 bp, Artificial
  probe
  misc_feature (1)..(25): SEQ ID NO: 3537; WAN024GKS_at; Start 25; Stop 49
gctatgatcagagatagaccaatct

SEQ ID NO: 249434 - DNA, 25 bp, Artificial
  probe
  misc_feature (1)..(25): SEQ ID NO: 3537; WAN024GKS_at; Start 65; Stop 89
cagaaaatctgccaataatgagtag

SEQ ID NO: 249435 - DNA, 25 bp, Artificial
  probe
  misc_feature (1)..(25): SEQ ID NO: 3537; WAN024GKS_at; Start 8; Stop 32
ggctgtttttcctatcggctatgat

SEQ ID NO: 249436 - DNA, 25 bp, Artificial
  probe
  misc_feature (1)..(25): SEQ ID NO: 3537; WAN024GKS_at; Start 80; Stop 104
taatgagtagaacaagcccgatcgt

SEQ ID NO: 249437 - DNA, 25 bp, Artificial
  probe
  misc_feature (1)..(25): SEQ ID NO: 3537; WAN024GKS_at; Start 89; Stop 113
gaacaagcccgatcgtaaagacgga

SEQ ID NO: 249438 - DNA, 25 bp, Artificial
  probe
  misc_feature (1)..(25): SEQ ID NO: 3537; WAN024GKS_at; Start 56; Stop 80
gcgtacgaacagaaaatctgccaat

SEQ ID NO: 249439 - DNA, 25 bp, Artificial
  probe
  misc_feature (1)..(25): SEQ ID NO: 3537; WAN024GKS_at; Start 72; Stop 96
tctgccaataatgagtagaacaagc

SEQ ID NO: 249440 - DNA, 25 bp, Artificial
  probe
  misc_feature (1)..(25): SEQ ID NO: 3537; WAN024GKS_at; Start 320; Stop 344
ttttggtcgcggttaggcaaccgca

SEQ ID NO: 249441 - DNA, 25 bp, Artificial
  probe
  misc_feature (1)..(25): SEQ ID NO: 3537; WAN024GKS_at; Start 112; Stop 136
gaaatcaacgcatgtattcattaca

SEQ ID NO: 249442 - DNA, 25 bp, Artificial
  probe
  misc_feature (1)..(25): SEQ ID NO: 3537; WAN024GKS_at; Start 323; Stop 347
tggtcgcggttaggcaaccgcaagt

SEQ ID NO: 249443 - DNA, 25 bp, Artificial
  probe
  misc_feature (1)..(25): SEQ ID NO: 3537; WAN024GKS_at; Start 39; Stop 63
tagaccaatctatcggcgcgtacga

SEQ ID NO: 249444 - DNA, 25 bp, Artificial
  probe
  misc_feature (1)..(25): SEQ ID NO: 3537; WAN024GKS_at; Start 40; Stop 64
agaccaatctatcggcgcgtacgaa

SEQ ID NO: 249445 - DNA, 25 bp, Artificial
  probe
  misc_feature (1)..(25): SEQ ID NO: 3537; WAN024GKS_at; Start 75; Stop 99
gccaataatgagtagaacaagcccg

SEQ ID NO: 249446 - DNA, 25 bp, Artificial
  probe
  misc_feature (1)..(25): SEQ ID NO: 3537; WAN024GKS_at; Start 35; Stop 59
gagatagaccaatctatcggcgcgt

SEQ ID NO: 249447 - DNA, 25 bp, Artificial
  probe
  misc_feature (1)..(25): SEQ ID NO: 3537; WAN024GKS_at; Start 95; Stop 119
gcccgatcgtaaagacggaaatcaa

SEQ ID NO: 249448 - DNA, 25 bp, Artificial
  probe
  misc_feature (1)..(25): SEQ ID NO: 3537; WAN024GKS_at; Start 92; Stop 116
caagcccgatcgtaaagacggaaat

SEQ ID NO: 249449 - DNA, 25 bp, Artificial
  probe
  misc_feature (1)..(25): SEQ ID NO: 3537; WAN024GKS_at; Start 52; Stop 76
cggcgcgtacgaacagaaaatctgc

SEQ ID NO: 249450 - DNA, 25 bp, Artificial
  probe
  misc_feature (1)..(25): SEQ ID NO: 3537; WAN024GKS_at; Start 47; Stop 71
tctatcggcgcgtacgaacagaaaa

SEQ ID NO: 249451 - DNA, 25 bp, Artificial
  probe
  misc_feature (1)..(25): SEQ ID NO: 3537; WAN024GKS_at; Start 20; Stop 44
tatcggctatgatcagagatagacc

SEQ ID NO: 249452 - DNA, 25 bp, Artificial
  probe
  misc_feature (1)..(25): SEQ ID NO: 3537; WAN024GKS_at; Start 328; Stop 352
gcggttaggcaaccgcaagtagtca

SEQ ID NO: 249453 - DNA, 25 bp, Artificial
  probe
  misc_feature (1)..(25): SEQ ID NO: 3537; WAN024GKS_at; Start 87; Stop 111
tagaacaagcccgatcgtaaagacg

SEQ ID NO: 249454 - DNA, 25 bp, Artificial
  probe
  misc_feature (1)..(25): SEQ ID NO: 3537; WAN024GKS_at; Start 83; Stop 107
tgagtagaacaagcccgatcgtaaa

SEQ ID NO: 249455 - DNA, 25 bp, Artificial
  probe
  misc_feature (1)..(25): SEQ ID NO: 3537; WAN024GKS_at; Start 54; Stop 78
gcgcgtacgaacagaaaatctgcca

SEQ ID NO: 249456 - DNA, 25 bp, Artificial
  probe
  misc_feature (1)..(25): SEQ ID NO: 3537; WAN024GKS_at; Start 98; Stop 122
cgatcgtaaagacggaaatcaacgc

SEQ ID NO: 249457 - DNA, 25 bp, Artificial
  probe
  misc_feature (1)..(25): SEQ ID NO: 3537; WAN024GKS_at; Start 32; Stop 56
tcagagatagaccaatctatcggcg

SEQ ID NO: 249458 - DNA, 25 bp, Artificial
  probe
  misc_feature (1)..(25): SEQ ID NO: 3537; WAN024GKS_at; Start 336; Stop 360
gcaaccgcaagtagtcatagattaa

SEQ ID NO: 249459 - DNA, 25 bp, Artificial
  probe
  misc_feature (1)..(25): SEQ ID NO: 3537; WAN024GKS_at; Start 101; Stop 125
tcgtaaagacggaaatcaacgcatg

SEQ ID NO: 249460 - DNA, 25 bp, Artificial
  probe
  misc_feature (1)..(25): SEQ ID NO: 3537; WAN024GKS_at; Start 108; Stop 132
gacggaaatcaacgcatgtattcat

SEQ ID NO: 249461 - DNA, 25 bp, Artificial
  probe
  misc_feature (1)..(25): SEQ ID NO: 1120; WAN024GKT_at; Start 103; Stop 127
caagagttgatcaagcccgatcgaa

SEQ ID NO: 249462 - DNA, 25 bp, Artificial
  probe
  misc_feature (1)..(25): SEQ ID NO: 1120; WAN024GKT_at; Start 110; Stop 134
tgatcaagcccgatcgaaacgaagg

SEQ ID NO: 249463 - DNA, 25 bp, Artificial
  probe
  misc_feature (1)..(25): SEQ ID NO: 1120; WAN024GKT_at; Start 169; Stop 193
cgtctgcttgaaatcaaagattata

SEQ ID NO: 249464 - DNA, 25 bp, Artificial
  probe
  misc_feature (1)..(25): SEQ ID NO: 1120; WAN024GKT_at; Start 46; Stop 70
ggcagtgttatgaagttgaccgatc

SEQ ID NO: 249465 - DNA, 25 bp, Artificial
  probe
  misc_feature (1)..(25): SEQ ID NO: 1120; WAN024GKT_at; Start 116; Stop 140
agcccgatcgaaacgaaggaaatcg

SEQ ID NO: 249466 - DNA, 25 bp, Artificial
  probe
  misc_feature (1)..(25): SEQ ID NO: 1120; WAN024GKT_at; Start 162; Stop 186
catggatcgtctgcttgaaatcaaa

SEQ ID NO: 249467 - DNA, 25 bp, Artificial
  probe
  misc_feature (1)..(25): SEQ ID NO: 1120; WAN024GKT_at; Start 59; Stop 83
agttgaccgatctatcggcgcgtca

SEQ ID NO: 249468 - DNA, 25 bp, Artificial
  probe
  misc_feature (1)..(25): SEQ ID NO: 1120; WAN024GKT_at; Start 73; Stop 97
tcggcgcgtcagattcgttattatg

SEQ ID NO: 249469 - DNA, 25 bp, Artificial
  probe
  misc_feature (1)..(25): SEQ ID NO: 1120; WAN024GKT_at; Start 125; Stop 149
gaaacgaaggaaatcgtcgcatgta

SEQ ID NO: 249470 - DNA, 25 bp, Artificial
  probe
  misc_feature (1)..(25): SEQ ID NO: 1120; WAN024GKT_at; Start 152; Stop 176
ccttgaatgacatggatcgtctgct

SEQ ID NO: 249471 - DNA, 25 bp, Artificial
  probe
  misc_feature (1)..(25): SEQ ID NO: 1120; WAN024GKT_at; Start 164; Stop 188
tggatcgtctgcttgaaatcaaaga

SEQ ID NO: 249472 - DNA, 25 bp, Artificial
  probe
  misc_feature (1)..(25): SEQ ID NO: 1120; WAN024GKT_at; Start 113; Stop 137
tcaagcccgatcgaaacgaaggaaa

SEQ ID NO: 249473 - DNA, 25 bp, Artificial
  probe
  misc_feature (1)..(25): SEQ ID NO: 1120; WAN024GKT_at; Start 195; Stop 219
ctctgaaggttataatatcgctgcc

SEQ ID NO: 249474 - DNA, 25 bp, Artificial
  probe
  misc_feature (1)..(25): SEQ ID NO: 1120; WAN024GKT_at; Start 139; Stop 163
cgtcgcatgtattccttgaatgaca

SEQ ID NO: 249475 - DNA, 25 bp, Artificial
  probe
  misc_feature (1)..(25): SEQ ID NO: 1120; WAN024GKT_at; Start 56; Stop 80
tgaagttgaccgatctatcggcgcg

SEQ ID NO: 249476 - DNA, 25 bp, Artificial
  probe
  misc_feature (1)..(25): SEQ ID NO: 1120; WAN024GKT_at; Start 123; Stop 147
tcgaaacgaaggaaatcgtcgcatg

SEQ ID NO: 249477 - DNA, 25 bp, Artificial
  probe
  misc_feature (1)..(25): SEQ ID NO: 1120; WAN024GKT_at; Start 13; Stop 37
gaatttcgccgaaatatggctgttt

SEQ ID NO: 249478 - DNA, 25 bp, Artificial
  probe
  misc_feature (1)..(25): SEQ ID NO: 1120; WAN024GKT_at; Start 129; Stop 153
cgaaggaaatcgtcgcatgtattcc

SEQ ID NO: 249479 - DNA, 25 bp, Artificial
  probe
  misc_feature (1)..(25): SEQ ID NO: 1120; WAN024GKT_at; Start 156; Stop 180
gaatgacatggatcgtctgcttgaa

SEQ ID NO: 249480 - DNA, 25 bp, Artificial
  probe
  misc_feature (1)..(25): SEQ ID NO: 1120; WAN024GKT_at; Start 62; Stop 86
tgaccgatctatcggcgcgtcagat

SEQ ID NO: 249481 - DNA, 25 bp, Artificial
  probe
  misc_feature (1)..(25): SEQ ID NO: 1120; WAN024GKT_at; Start 160; Stop 184
gacatggatcgtctgcttgaaatca

SEQ ID NO: 249482 - DNA, 25 bp, Artificial
  probe
  misc_feature (1)..(25): SEQ ID NO: 1120; WAN024GKT_at; Start 194; Stop 218
tctctgaaggttataatatcgctgc

SEQ ID NO: 249483 - DNA, 25 bp, Artificial
  probe
  misc_feature (1)..(25): SEQ ID NO: 1120; WAN024GKT_at; Start 120; Stop 144
cgatcgaaacgaaggaaatcgtcgc

SEQ ID NO: 249484 - DNA, 25 bp, Artificial
  probe
  misc_feature (1)..(25): SEQ ID NO: 1120; WAN024GKT_at; Start 179; Stop 203
aaatcaaagattatatctctgaagg

SEQ ID NO: 249485 - DNA, 25 bp, Artificial
  probe
  misc_feature (1)..(25): SEQ ID NO: 1120; WAN024GKT_at; Start 134; Stop 158
gaaatcgtcgcatgtattccttgaa

SEQ ID NO: 249486 - DNA, 25 bp, Artificial
  probe
  misc_feature (1)..(25): SEQ ID NO: 1120; WAN024GKT_at; Start 75; Stop 99
ggcgcgtcagattcgttattatgaa

SEQ ID NO: 249487 - DNA, 25 bp, Artificial
  probe
  misc_feature (1)..(25): SEQ ID NO: 1120; WAN024GKT_at; Start 105; Stop 129
agagttgatcaagcccgatcgaaac

SEQ ID NO: 249488 - DNA, 25 bp, Artificial
  probe
  misc_feature (1)..(25): SEQ ID NO: 1120; WAN024GKT_at; Start 69; Stop 93
tctatcggcgcgtcagattcgttat

SEQ ID NO: 249489 - DNA, 25 bp, Artificial
  probe
  misc_feature (1)..(25): SEQ ID NO: 1120; WAN024GKT_at; Start 101; Stop 125
atcaagagttgatcaagcccgatcg

SEQ ID NO: 249490 - DNA, 25 bp, Artificial
  probe
  misc_feature (1)..(25): SEQ ID NO: 1120; WAN024GKT_at; Start 148; Stop 172
tattccttgaatgacatggatcgtc

SEQ ID NO: 249491 - DNA, 25 bp, Artificial
  probe
  misc_feature (1)..(25): SEQ ID NO: 1120; WAN024GKT_at; Start 53; Stop 77
ttatgaagttgaccgatctatcggc

SEQ ID NO: 249492 - DNA, 25 bp, Artificial
  probe
  misc_feature (1)..(25): SEQ ID NO: 1120; WAN024GKT_at; Start 51; Stop 75
tgttatgaagttgaccgatctatcg

SEQ ID NO: 249493 - DNA, 25 bp, Artificial
  probe
  misc_feature (1)..(25): SEQ ID NO: 1120; WAN024GKT_at; Start 48; Stop 72
cagtgttatgaagttgaccgatcta

SEQ ID NO: 249494 - DNA, 25 bp, Artificial
  probe
  misc_feature (1)..(25): SEQ ID NO: 1120; WAN024GKT_at; Start 71; Stop 95
tatcggcgcgtcagattcgttatta

SEQ ID NO: 249495 - DNA, 25 bp, Artificial
  probe
  misc_feature (1)..(25): SEQ ID NO: 4162; WAN024GKU_at; Start 297; Stop 321
tactaatttcatgcacctatgtggt

SEQ ID NO: 249496 - DNA, 25 bp, Artificial
  probe
  misc_feature (1)..(25): SEQ ID NO: 4162; WAN024GKU_at; Start 451; Stop 475
gagttattgggaaagcatgttcatc

SEQ ID NO: 249497 - DNA, 25 bp, Artificial
  probe
  misc_feature (1)..(25): SEQ ID NO: 4162; WAN024GKU_at; Start 1; Stop 25
gtggcggacaccagaacgaaatccg

SEQ ID NO: 249498 - DNA, 25 bp, Artificial
  probe
  misc_feature (1)..(25): SEQ ID NO: 4162; WAN024GKU_at; Start 424; Stop 448
aagttacaagttttaggatccattg

SEQ ID NO: 249499 - DNA, 25 bp, Artificial
  probe
  misc_feature (1)..(25): SEQ ID NO: 4162; WAN024GKU_at; Start 47; Stop 71
gccaagcggtggcagacaccagaat

SEQ ID NO: 249500 - DNA, 25 bp, Artificial
  probe
  misc_feature (1)..(25): SEQ ID NO: 4162; WAN024GKU_at; Start 419; Stop 443
tgcaaaagttacaagttttaggatc

SEQ ID NO: 249501 - DNA, 25 bp, Artificial
  probe
  misc_feature (1)..(25): SEQ ID NO: 4162; WAN024GKU_at; Start 373; Stop 397
catgtcataattgatgagttgaaaa

SEQ ID NO: 249502 - DNA, 25 bp, Artificial
  probe
  misc_feature (1)..(25): SEQ ID NO: 4162; WAN024GKU_at; Start 310; Stop 334
cacctatgtggtgttgattaccgaa

SEQ ID NO: 249503 - DNA, 25 bp, Artificial
  probe
  misc_feature (1)..(25): SEQ ID NO: 4162; WAN024GKU_at; Start 124; Stop 148
gaaaatatggcaaattctagagatt

SEQ ID NO: 249504 - DNA, 25 bp, Artificial
  probe
  misc_feature (1)..(25): SEQ ID NO: 4162; WAN024GKU_at; Start 68; Stop 92
gaataaaccgactgactaggtggct

SEQ ID NO: 249505 - DNA, 25 bp, Artificial
  probe
  misc_feature (1)..(25): SEQ ID NO: 4162; WAN024GKU_at; Start 640; Stop 664
tcaatttactcaaaacatttacaaa

SEQ ID NO: 249506 - DNA, 25 bp, Artificial
  probe
  misc_feature (1)..(25): SEQ ID NO: 4162; WAN024GKU_at; Start 465; Stop 489
gcatgttcatctaactggttcagga

SEQ ID NO: 249507 - DNA, 25 bp, Artificial
  probe
  misc_feature (1)..(25): SEQ ID NO: 4162; WAN024GKU_at; Start 289; Stop 313
ttttcacctactaatttcatgcacc

SEQ ID NO: 249508 - DNA, 25 bp, Artificial
  probe
  misc_feature (1)..(25): SEQ ID NO: 4162; WAN024GKU_at; Start 590; Stop 614
tattagatttgaagagaaagacagt

SEQ ID NO: 249509 - DNA, 25 bp, Artificial
  probe
  misc_feature (1)..(25): SEQ ID NO: 4162; WAN024GKU_at; Start 7; Stop 31
gacaccagaacgaaatccgatagca

SEQ ID NO: 249510 - DNA, 25 bp, Artificial
  probe
  misc_feature (1)..(25): SEQ ID NO: 4162; WAN024GKU_at; Start 25; Stop 49
gatagcaatcttggacgtaagggcc

SEQ ID NO: 249511 - DNA, 25 bp, Artificial
  probe
  misc_feature (1)..(25): SEQ ID NO: 4162; WAN024GKU_at; Start 321; Stop 345
tgttgattaccgaaaaggtgcaggc

SEQ ID NO: 249512 - DNA, 25 bp, Artificial
  probe
  misc_feature (1)..(25): SEQ ID NO: 4162; WAN024GKU_at; Start 75; Stop 99
ccgactgactaggtggcttacagac

SEQ ID NO: 249513 - DNA, 25 bp, Artificial
  probe
  misc_feature (1)..(25): SEQ ID NO: 4162; WAN024GKU_at; Start 271; Stop 295
gaaagtgttgaacttcatttttcac

SEQ ID NO: 249514 - DNA, 25 bp, Artificial
  probe
  misc_feature (1)..(25): SEQ ID NO: 4162; WAN024GKU_at; Start 458; Stop 482
tgggaaagcatgttcatctaactgg

SEQ ID NO: 249515 - DNA, 25 bp, Artificial
  probe
  misc_feature (1)..(25): SEQ ID NO: 4162; WAN024GKU_at; Start 337; Stop 361
ggtgcaggcagtttctttgacgatt

SEQ ID NO: 249516 - DNA, 25 bp, Artificial
  probe
  misc_feature (1)..(25): SEQ ID NO: 4162; WAN024GKU_at; Start 328; Stop 352
taccgaaaaggtgcaggcagtttct

SEQ ID NO: 249517 - DNA, 25 bp, Artificial
  probe
  misc_feature (1)..(25): SEQ ID NO: 4162; WAN024GKU_at; Start 572; Stop 596
aaattgttcctcaatctttattaga

SEQ ID NO: 249518 - DNA, 25 bp, Artificial
  probe
  misc_feature (1)..(25): SEQ ID NO: 4162; WAN024GKU_at; Start 95; Stop 119
cagactctgtaaaccaccttttttg

SEQ ID NO: 249519 - DNA, 25 bp, Artificial
  probe
  misc_feature (1)..(25): SEQ ID NO: 4162; WAN024GKU_at; Start 145; Stop 169
gattatcgtaatccaaattacaccg

SEQ ID NO: 249520 - DNA, 25 bp, Artificial
  probe
  misc_feature (1)..(25): SEQ ID NO: 4162; WAN024GKU_at; Start 484; Stop 508
tcaggacgttatttgtatttggagt

SEQ ID NO: 249521 - DNA, 25 bp, Artificial
  probe
  misc_feature (1)..(25): SEQ ID NO: 4162; WAN024GKU_at; Start 56; Stop 80
tggcagacaccagaataaaccgact

SEQ ID NO: 249522 - DNA, 25 bp, Artificial
  probe
  misc_feature (1)..(25): SEQ ID NO: 4162; WAN024GKU_at; Start 14; Stop 38
gaacgaaatccgatagcaatcttgg

SEQ ID NO: 249523 - DNA, 25 bp, Artificial
  probe
  misc_feature (1)..(25): SEQ ID NO: 4162; WAN024GKU_at; Start 81; Stop 105
gactaggtggcttacagactctgta

SEQ ID NO: 249524 - DNA, 25 bp, Artificial
  probe
  misc_feature (1)..(25): SEQ ID NO: 4162; WAN024GKU_at; Start 31; Stop 55
aatcttggacgtaagggccaagcgg

SEQ ID NO: 249525 - DNA, 25 bp, Artificial
  probe
  misc_feature (1)..(25): SEQ ID NO: 4162; WAN024GKU_at; Start 605; Stop 629
gaaagacagtatttccaaaaggtca

SEQ ID NO: 249526 - DNA, 25 bp, Artificial
  probe
  misc_feature (1)..(25): SEQ ID NO: 4162; WAN024GKU_at; Start 134; Stop 158
caaattctagagattatcgtaatcc

SEQ ID NO: 249527 - DNA, 25 bp, Artificial
  probe
  misc_feature (1)..(25): SEQ ID NO: 4162; WAN024GKU_at; Start 471; Stop 495
tcatctaactggttcaggacgttat

SEQ ID NO: 249528 - DNA, 25 bp, Artificial
  probe
  misc_feature (1)..(25): SEQ ID NO: 4162; WAN024GKU_at; Start 109; Stop 133
caccttttttgtgaggaaaatatgg

SEQ ID NO: 249529 - DNA, 25 bp, Artificial
  probe
  misc_feature (1)..(25): SEQ ID NO: 6838; WAN024GKV_s_at; Start 167; Stop 191
ttctaggaccatggggcgctgcaat

SEQ ID NO: 249530 - DNA, 25 bp, Artificial
  probe
  misc_feature (1)..(25): SEQ ID NO: 6838; WAN024GKV_s_at; Start 119; Stop 143
tagttgctgctttaggttgtgcagc

SEQ ID NO: 249531 - DNA, 25 bp, Artificial
  probe
  misc_feature (1)..(25): SEQ ID NO: 6838; WAN024GKV_s_at; Start 185; Stop 209
ctgcaataggaggaattggaggagc

SEQ ID NO: 249532 - DNA, 25 bp, Artificial
  probe
  misc_feature (1)..(25): SEQ ID NO: 6838; WAN024GKV_s_at; Start 212; Stop 236
tggtttgtggatatttagcctatac

SEQ ID NO: 249533 - DNA, 25 bp, Artificial
  probe
  misc_feature (1)..(25): SEQ ID NO: 6838; WAN024GKV_s_at; Start 219; Stop 243
tggatatttagcctataccgctaca

SEQ ID NO: 249534 - DNA, 25 bp, Artificial
  probe
  misc_feature (1)..(25): SEQ ID NO: 6838; WAN024GKV_s_at; Start 136; Stop 160
tgtgcagcgggtggagtgaaatatg

SEQ ID NO: 249535 - DNA, 25 bp, Artificial
  probe
  misc_feature (1)..(25): SEQ ID NO: 6838; WAN024GKV_s_at; Start 126; Stop 150
tgctttaggttgtgcagcgggtgga

SEQ ID NO: 249536 - DNA, 25 bp, Artificial
  probe
  misc_feature (1)..(25): SEQ ID NO: 6838; WAN024GKV_s_at; Start 117; Stop 141
tgtagttgctgctttaggttgtgca

SEQ ID NO: 249537 - DNA, 25 bp, Artificial
  probe
  misc_feature (1)..(25): SEQ ID NO: 6838; WAN024GKV_s_at; Start 191; Stop 215
taggaggaattggaggagcagtggt

SEQ ID NO: 249538 - DNA, 25 bp, Artificial
  probe
  misc_feature (1)..(25): SEQ ID NO: 6838; WAN024GKV_s_at; Start 115; Stop 139
gctgtagttgctgctttaggttgtg

SEQ ID NO: 249539 - DNA, 25 bp, Artificial
  probe
  misc_feature (1)..(25): SEQ ID NO: 6838; WAN024GKV_s_at; Start 220; Stop 244
ggatatttagcctataccgctacat

SEQ ID NO: 249540 - DNA, 25 bp, Artificial
  probe
  misc_feature (1)..(25): SEQ ID NO: 6838; WAN024GKV_s_at; Start 215; Stop 239
tttgtggatatttagcctataccgc

SEQ ID NO: 249541 - DNA, 25 bp, Artificial
  probe
  misc_feature (1)..(25): SEQ ID NO: 6838; WAN024GKV_s_at; Start 107; Stop 131
gaggagcagctgtagttgctgcttt

SEQ ID NO: 249542 - DNA, 25 bp, Artificial
  probe
  misc_feature (1)..(25): SEQ ID NO: 6838; WAN024GKV_s_at; Start 180; Stop 204
gggcgctgcaataggaggaattgga

SEQ ID NO: 249543 - DNA, 25 bp, Artificial
  probe
  misc_feature (1)..(25): SEQ ID NO: 6838; WAN024GKV_s_at; Start 139; Stop 163
gcagcgggtggagtgaaatatggga

SEQ ID NO: 249544 - DNA, 25 bp, Artificial
  probe
  misc_feature (1)..(25): SEQ ID NO: 6838; WAN024GKV_s_at; Start 217; Stop 241
tgtggatatttagcctataccgcta

SEQ ID NO: 249545 - DNA, 25 bp, Artificial
  probe
  misc_feature (1)..(25): SEQ ID NO: 6838; WAN024GKV_s_at; Start 222; Stop 246
atatttagcctataccgctacatca

SEQ ID NO: 249546 - DNA, 25 bp, Artificial
  probe
  misc_feature (1)..(25): SEQ ID NO: 6838; WAN024GKV_s_at; Start 216; Stop 240
ttgtggatatttagcctataccgct

SEQ ID NO: 249547 - DNA, 25 bp, Artificial
  probe
  misc_feature (1)..(25): SEQ ID NO: 6838; WAN024GKV_s_at; Start 213; Stop 237
ggtttgtggatatttagcctatacc

SEQ ID NO: 249548 - DNA, 25 bp, Artificial
  probe
  misc_feature (1)..(25): SEQ ID NO: 6838; WAN024GKV_s_at; Start 128; Stop 152
ctttaggttgtgcagcgggtggagt

SEQ ID NO: 249549 - DNA, 25 bp, Artificial
  probe
  misc_feature (1)..(25): SEQ ID NO: 6838; WAN024GKV_s_at; Start 116; Stop 140
ctgtagttgctgctttaggttgtgc

SEQ ID NO: 249550 - DNA, 25 bp, Artificial
  probe
  misc_feature (1)..(25): SEQ ID NO: 6838; WAN024GKV_s_at; Start 207; Stop 231
agcagtggtttgtggatatttagcc

SEQ ID NO: 249551 - DNA, 25 bp, Artificial
  probe
  misc_feature (1)..(25): SEQ ID NO: 6838; WAN024GKV_s_at; Start 188; Stop 212
caataggaggaattggaggagcagt

SEQ ID NO: 249552 - DNA, 25 bp, Artificial
  probe
  misc_feature (1)..(25): SEQ ID NO: 6838; WAN024GKV_s_at; Start 120; Stop 144
agttgctgctttaggttgtgcagcg

SEQ ID NO: 249553 - DNA, 25 bp, Artificial
  probe
  misc_feature (1)..(25): SEQ ID NO: 6838; WAN024GKV_s_at; Start 206; Stop 230
gagcagtggtttgtggatatttagc

SEQ ID NO: 249554 - DNA, 25 bp, Artificial
  probe
  misc_feature (1)..(25): SEQ ID NO: 6838; WAN024GKV_s_at; Start 113; Stop 137
cagctgtagttgctgctttaggttg

SEQ ID NO: 249555 - DNA, 25 bp, Artificial
  probe
  misc_feature (1)..(25): SEQ ID NO: 6838; WAN024GKV_s_at; Start 221; Stop 245
gatatttagcctataccgctacatc

SEQ ID NO: 249556 - DNA, 25 bp, Artificial
  probe
  misc_feature (1)..(25): SEQ ID NO: 6838; WAN024GKV_s_at; Start 209; Stop 233
cagtggtttgtggatatttagccta

SEQ ID NO: 249557 - DNA, 25 bp, Artificial
  probe
  misc_feature (1)..(25): SEQ ID NO: 6838; WAN024GKV_s_at; Start 214; Stop 238
gtttgtggatatttagcctataccg

SEQ ID NO: 249558 - DNA, 25 bp, Artificial
  probe
  misc_feature (1)..(25): SEQ ID NO: 6838; WAN024GKV_s_at; Start 110; Stop 134
gagcagctgtagttgctgctttagg

SEQ ID NO: 249559 - DNA, 25 bp, Artificial
  probe
  misc_feature (1)..(25): SEQ ID NO: 6838; WAN024GKV_s_at; Start 112; Stop 136
gcagctgtagttgctgctttaggtt

SEQ ID NO: 249560 - DNA, 25 bp, Artificial
  probe
  misc_feature (1)..(25): SEQ ID NO: 6838; WAN024GKV_s_at; Start 208; Stop 232
gcagtggtttgtggatatttagcct

SEQ ID NO: 249561 - DNA, 25 bp, Artificial
  probe
  misc_feature (1)..(25): SEQ ID NO: 6838; WAN024GKV_s_at; Start 118; Stop 142
gtagttgctgctttaggttgtgcag

SEQ ID NO: 249562 - DNA, 25 bp, Artificial
  probe
  misc_feature (1)..(25): SEQ ID NO: 6838; WAN024GKV_s_at; Start 109; Stop 133
ggagcagctgtagttgctgctttag

SEQ ID NO: 249563 - DNA, 25 bp, Artificial
  probe
  misc_feature (1)..(25): SEQ ID NO: 3998; WAN024GKW_at; Start 190; Stop 214
cgtggttatcatgaccgtggttata

SEQ ID NO: 249564 - DNA, 25 bp, Artificial
  probe
  misc_feature (1)..(25): SEQ ID NO: 3998; WAN024GKW_at; Start 215; Stop 239
taggagcaggttttcatttatgtgg

SEQ ID NO: 249565 - DNA, 25 bp, Artificial
  probe
  misc_feature (1)..(25): SEQ ID NO: 3998; WAN024GKW_at; Start 101; Stop 125
gagggtacgctaatcagagaagtcc

SEQ ID NO: 249566 - DNA, 25 bp, Artificial
  probe
  misc_feature (1)..(25): SEQ ID NO: 3998; WAN024GKW_at; Start 154; Stop 178
aattcaggtccttttccagtaagtg

SEQ ID NO: 249567 - DNA, 25 bp, Artificial
  probe
  misc_feature (1)..(25): SEQ ID NO: 3998; WAN024GKW_at; Start 93; Stop 117
tatttatagagggtacgctaatcag

SEQ ID NO: 249568 - DNA, 25 bp, Artificial
  probe
  misc_feature (1)..(25): SEQ ID NO: 3998; WAN024GKW_at; Start 89; Stop 113
ctgatatttatagagggtacgctaa

SEQ ID NO: 249569 - DNA, 25 bp, Artificial
  probe
  misc_feature (1)..(25): SEQ ID NO: 3998; WAN024GKW_at; Start 55; Stop 79
gaaatgcttgttcgtacagaggatg

SEQ ID NO: 249570 - DNA, 25 bp, Artificial
  probe
  misc_feature (1)..(25): SEQ ID NO: 3998; WAN024GKW_at; Start 176; Stop 200
gtgggtactgcctgcgtggttatca

SEQ ID NO: 249571 - DNA, 25 bp, Artificial
  probe
  misc_feature (1)..(25): SEQ ID NO: 3998; WAN024GKW_at; Start 111; Stop 135
taatcagagaagtccattcgcttct

SEQ ID NO: 249572 - DNA, 25 bp, Artificial
  probe
  misc_feature (1)..(25): SEQ ID NO: 3998; WAN024GKW_at; Start 66; Stop 90
tcgtacagaggatggggatgtctct

SEQ ID NO: 249573 - DNA, 25 bp, Artificial
  probe
  misc_feature (1)..(25): SEQ ID NO: 3998; WAN024GKW_at; Start 221; Stop 245
caggttttcatttatgtggaatata

SEQ ID NO: 249574 - DNA, 25 bp, Artificial
  probe
  misc_feature (1)..(25): SEQ ID NO: 3998; WAN024GKW_at; Start 51; Stop 75
taatgaaatgcttgttcgtacagag

SEQ ID NO: 249575 - DNA, 25 bp, Artificial
  probe
  misc_feature (1)..(25): SEQ ID NO: 3998; WAN024GKW_at; Start 99; Stop 123
tagagggtacgctaatcagagaagt

SEQ ID NO: 249576 - DNA, 25 bp, Artificial
  probe
  misc_feature (1)..(25): SEQ ID NO: 3998; WAN024GKW_at; Start 106; Stop 130
tacgctaatcagagaagtccattcg

SEQ ID NO: 249577 - DNA, 25 bp, Artificial
  probe
  misc_feature (1)..(25): SEQ ID NO: 3998; WAN024GKW_at; Start 128; Stop 152
tcgcttcttacccttctatattaaa

SEQ ID NO: 249578 - DNA, 25 bp, Artificial
  probe
  misc_feature (1)..(25): SEQ ID NO: 3998; WAN024GKW_at; Start 57; Stop 81
aatgcttgttcgtacagaggatggg

SEQ ID NO: 249579 - DNA, 25 bp, Artificial
  probe
  misc_feature (1)..(25): SEQ ID NO: 3998; WAN024GKW_at; Start 186; Stop 210
cctgcgtggttatcatgaccgtggt

SEQ ID NO: 249580 - DNA, 25 bp, Artificial
  probe
  misc_feature (1)..(25): SEQ ID NO: 3998; WAN024GKW_at; Start 81; Stop 105
ggatgtctctgatatttatagaggg

SEQ ID NO: 249581 - DNA, 25 bp, Artificial
  probe
  misc_feature (1)..(25): SEQ ID NO: 3998; WAN024GKW_at; Start 162; Stop 186
tccttttccagtaagtgggtactgc

SEQ ID NO: 249582 - DNA, 25 bp, Artificial
  probe
  misc_feature (1)..(25): SEQ ID NO: 3998; WAN024GKW_at; Start 109; Stop 133
gctaatcagagaagtccattcgctt

SEQ ID NO: 249583 - DNA, 25 bp, Artificial
  probe
  misc_feature (1)..(25): SEQ ID NO: 3998; WAN024GKW_at; Start 198; Stop 222
tcatgaccgtggttatataggagca

SEQ ID NO: 249584 - DNA, 25 bp, Artificial
  probe
  misc_feature (1)..(25): SEQ ID NO: 3998; WAN024GKW_at; Start 169; Stop 193
ccagtaagtgggtactgcctgcgtg

SEQ ID NO: 249585 - DNA, 25 bp, Artificial
  probe
  misc_feature (1)..(25): SEQ ID NO: 3998; WAN024GKW_at; Start 209; Stop 233
gttatataggagcaggttttcattt

SEQ ID NO: 249586 - DNA, 25 bp, Artificial
  probe
  misc_feature (1)..(25): SEQ ID NO: 3998; WAN024GKW_at; Start 103; Stop 127
gggtacgctaatcagagaagtccat

SEQ ID NO: 249587 - DNA, 25 bp, Artificial
  probe
  misc_feature (1)..(25): SEQ ID NO: 3998; WAN024GKW_at; Start 173; Stop 197
taagtgggtactgcctgcgtggtta

SEQ ID NO: 249588 - DNA, 25 bp, Artificial
  probe
  misc_feature (1)..(25): SEQ ID NO: 3998; WAN024GKW_at; Start 122; Stop 146
gtccattcgcttcttacccttctat

SEQ ID NO: 249589 - DNA, 25 bp, Artificial
  probe
  misc_feature (1)..(25): SEQ ID NO: 3998; WAN024GKW_at; Start 86; Stop 110
tctctgatatttatagagggtacgc

SEQ ID NO: 249590 - DNA, 25 bp, Artificial
  probe
  misc_feature (1)..(25): SEQ ID NO: 3998; WAN024GKW_at; Start 117; Stop 141
gagaagtccattcgcttcttaccct

SEQ ID NO: 249591 - DNA, 25 bp, Artificial
  probe
  misc_feature (1)..(25): SEQ ID NO: 3998; WAN024GKW_at; Start 181; Stop 205
tactgcctgcgtggttatcatgacc

SEQ ID NO: 249592 - DNA, 25 bp, Artificial
  probe
  misc_feature (1)..(25): SEQ ID NO: 3998; WAN024GKW_at; Start 179; Stop 203
ggtactgcctgcgtggttatcatga

SEQ ID NO: 249593 - DNA, 25 bp, Artificial
  probe
  misc_feature (1)..(25): SEQ ID NO: 3998; WAN024GKW_at; Start 217; Stop 241
ggagcaggttttcatttatgtggaa

SEQ ID NO: 249594 - DNA, 25 bp, Artificial
  probe
  misc_feature (1)..(25): SEQ ID NO: 3998; WAN024GKW_at; Start 184; Stop 208
tgcctgcgtggttatcatgaccgtg

SEQ ID NO: 249595 - DNA, 25 bp, Artificial
  probe
  misc_feature (1)..(25): SEQ ID NO: 3998; WAN024GKW_at; Start 166; Stop 190
tttccagtaagtgggtactgcctgc

SEQ ID NO: 249596 - DNA, 25 bp, Artificial
  probe
  misc_feature (1)..(25): SEQ ID NO: 3998; WAN024GKW_at; Start 96; Stop 120
ttatagagggtacgctaatcagaga

SEQ ID NO: 249597 - DNA, 25 bp, Artificial
  probe
  misc_feature (1)..(25): SEQ ID NO: 1192; WAN024GKX_at; Start 148; Stop 172
gattttacgaatcaatgccggaaaa

SEQ ID NO: 249598 - DNA, 25 bp, Artificial
  probe
  misc_feature (1)..(25): SEQ ID NO: 1192; WAN024GKX_at; Start 75; Stop 99
tggagttgacgatgctttgttttgg

SEQ ID NO: 249599 - DNA, 25 bp, Artificial
  probe
  misc_feature (1)..(25): SEQ ID NO: 1192; WAN024GKX_at; Start 116; Stop 140
ttgcaggtagcattgttgatacagc

SEQ ID NO: 249600 - DNA, 25 bp, Artificial
  probe
  misc_feature (1)..(25): SEQ ID NO: 1192; WAN024GKX_at; Start 110; Stop 134
gctatgttgcaggtagcattgttga

SEQ ID NO: 249601 - DNA, 25 bp, Artificial
  probe
  misc_feature (1)..(25): SEQ ID NO: 1192; WAN024GKX_at; Start 78; Stop 102
agttgacgatgctttgttttgggca

SEQ ID NO: 249602 - DNA, 25 bp, Artificial
  probe
  misc_feature (1)..(25): SEQ ID NO: 1192; WAN024GKX_at; Start 145; Stop 169
gatgattttacgaatcaatgccgga

SEQ ID NO: 249603 - DNA, 25 bp, Artificial
  probe
  misc_feature (1)..(25): SEQ ID NO: 1192; WAN024GKX_at; Start 67; Stop 91
ggaatatttggagttgacgatgctt

SEQ ID NO: 249604 - DNA, 25 bp, Artificial
  probe
  misc_feature (1)..(25): SEQ ID NO: 1192; WAN024GKX_at; Start 80; Stop 104
ttgacgatgctttgttttgggcagg

SEQ ID NO: 249605 - DNA, 25 bp, Artificial
  probe
  misc_feature (1)..(25): SEQ ID NO: 1192; WAN024GKX_at; Start 39; Stop 63
taatgaaatgcttgataggatagag

SEQ ID NO: 249606 - DNA, 25 bp, Artificial
  probe
  misc_feature (1)..(25): SEQ ID NO: 1192; WAN024GKX_at; Start 161; Stop 185
aatgccggaaaaatcctcatcagtg

SEQ ID NO: 249607 - DNA, 25 bp, Artificial
  probe
  misc_feature (1)..(25): SEQ ID NO: 1192; WAN024GKX_at; Start 164; Stop 188
gccggaaaaatcctcatcagtggtt

SEQ ID NO: 249608 - DNA, 25 bp, Artificial
  probe
  misc_feature (1)..(25): SEQ ID NO: 1192; WAN024GKX_at; Start 168; Stop 192
gaaaaatcctcatcagtggttctgt

SEQ ID NO: 249609 - DNA, 25 bp, Artificial
  probe
  misc_feature (1)..(25): SEQ ID NO: 1192; WAN024GKX_at; Start 84; Stop 108
cgatgctttgttttgggcagggtta

SEQ ID NO: 249610 - DNA, 25 bp, Artificial
  probe
  misc_feature (1)..(25): SEQ ID NO: 1192; WAN024GKX_at; Start 49; Stop 73
cttgataggatagagggaggaatat

SEQ ID NO: 249611 - DNA, 25 bp, Artificial
  probe
  misc_feature (1)..(25): SEQ ID NO: 1192; WAN024GKX_at; Start 159; Stop 183
tcaatgccggaaaaatcctcatcag

SEQ ID NO: 249612 - DNA, 25 bp, Artificial
  probe
  misc_feature (1)..(25): SEQ ID NO: 1192; WAN024GKX_at; Start 69; Stop 93
aatatttggagttgacgatgctttg

SEQ ID NO: 249613 - DNA, 25 bp, Artificial
  probe
  misc_feature (1)..(25): SEQ ID NO: 1192; WAN024GKX_at; Start 132; Stop 156
tgatacagcaattgatgattttacg

SEQ ID NO: 249614 - DNA, 25 bp, Artificial
  probe
  misc_feature (1)..(25): SEQ ID NO: 1192; WAN024GKX_at; Start 91; Stop 115
ttgttttgggcagggttaggctatg

SEQ ID NO: 249615 - DNA, 25 bp, Artificial
  probe
  misc_feature (1)..(25): SEQ ID NO: 1192; WAN024GKX_at; Start 156; Stop 180
gaatcaatgccggaaaaatcctcat

SEQ ID NO: 249616 - DNA, 25 bp, Artificial
  probe
  misc_feature (1)..(25): SEQ ID NO: 1192; WAN024GKX_at; Start 104; Stop 128
ggttaggctatgttgcaggtagcat

SEQ ID NO: 249617 - DNA, 25 bp, Artificial
  probe
  misc_feature (1)..(25): SEQ ID NO: 1192; WAN024GKX_at; Start 167; Stop 191
ggaaaaatcctcatcagtggttctg

SEQ ID NO: 249618 - DNA, 25 bp, Artificial
  probe
  misc_feature (1)..(25): SEQ ID NO: 1192; WAN024GKX_at; Start 71; Stop 95
tatttggagttgacgatgctttgtt

SEQ ID NO: 249619 - DNA, 25 bp, Artificial
  probe
  misc_feature (1)..(25): SEQ ID NO: 1192; WAN024GKX_at; Start 51; Stop 75
tgataggatagagggaggaatattt

SEQ ID NO: 249620 - DNA, 25 bp, Artificial
  probe
  misc_feature (1)..(25): SEQ ID NO: 1192; WAN024GKX_at; Start 177; Stop 201
tcatcagtggttctgtgttcgtgta

SEQ ID NO: 249621 - DNA, 25 bp, Artificial
  probe
  misc_feature (1)..(25): SEQ ID NO: 1192; WAN024GKX_at; Start 173; Stop 197
atcctcatcagtggttctgtgttcg

SEQ ID NO: 249622 - DNA, 25 bp, Artificial
  probe
  misc_feature (1)..(25): SEQ ID NO: 1192; WAN024GKX_at; Start 136; Stop 160
acagcaattgatgattttacgaatc

SEQ ID NO: 249623 - DNA, 25 bp, Artificial
  probe
  misc_feature (1)..(25): SEQ ID NO: 1192; WAN024GKX_at; Start 170; Stop 194
aaaatcctcatcagtggttctgtgt

SEQ ID NO: 249624 - DNA, 25 bp, Artificial
  probe
  misc_feature (1)..(25): SEQ ID NO: 1192; WAN024GKX_at; Start 175; Stop 199
cctcatcagtggttctgtgttcgtg

SEQ ID NO: 249625 - DNA, 25 bp, Artificial
  probe
  misc_feature (1)..(25): SEQ ID NO: 1192; WAN024GKX_at; Start 42; Stop 66
tgaaatgcttgataggatagaggga

SEQ ID NO: 249626 - DNA, 25 bp, Artificial
  probe
  misc_feature (1)..(25): SEQ ID NO: 1192; WAN024GKX_at; Start 163; Stop 187
tgccggaaaaatcctcatcagtggt

SEQ ID NO: 249627 - DNA, 25 bp, Artificial
  probe
  misc_feature (1)..(25): SEQ ID NO: 1192; WAN024GKX_at; Start 107; Stop 131
taggctatgttgcaggtagcattgt

SEQ ID NO: 249628 - DNA, 25 bp, Artificial
  probe
  misc_feature (1)..(25): SEQ ID NO: 1192; WAN024GKX_at; Start 152; Stop 176
ttacgaatcaatgccggaaaaatcc

SEQ ID NO: 249629 - DNA, 25 bp, Artificial
  probe
  misc_feature (1)..(25): SEQ ID NO: 1192; WAN024GKX_at; Start 65; Stop 89
gaggaatatttggagttgacgatgc

SEQ ID NO: 249630 - DNA, 25 bp, Artificial
  probe
  misc_feature (1)..(25): SEQ ID NO: 1192; WAN024GKX_at; Start 165; Stop 189
ccggaaaaatcctcatcagtggttc

SEQ ID NO: 249631 - DNA, 25 bp, Artificial
  probe
  misc_feature (1)..(25): SEQ ID NO: 1202; WAN024GKY_at; Start 18; Stop 42
tataaatgaaacaatgctgagtgag

SEQ ID NO: 249632 - DNA, 25 bp, Artificial
  probe
  misc_feature (1)..(25): SEQ ID NO: 1202; WAN024GKY_at; Start 39; Stop 63
tgaggtttatggaggtaattccgga

SEQ ID NO: 249633 - DNA, 25 bp, Artificial
  probe
  misc_feature (1)..(25): SEQ ID NO: 1202; WAN024GKY_at; Start 51; Stop 75
aggtaattccggaggagcagctgta

SEQ ID NO: 249634 - DNA, 25 bp, Artificial
  probe
  misc_feature (1)..(25): SEQ ID NO: 1202; WAN024GKY_at; Start 29; Stop 53
caatgctgagtgaggtttatggagg

SEQ ID NO: 249635 - DNA, 25 bp, Artificial
  probe
  misc_feature (1)..(25): SEQ ID NO: 1202; WAN024GKY_at; Start 32; Stop 56
tgctgagtgaggtttatggaggtaa

SEQ ID NO: 249636 - DNA, 25 bp, Artificial
  probe
  misc_feature (1)..(25): SEQ ID NO: 1202; WAN024GKY_at; Start 13; Stop 37
tgtaatataaatgaaacaatgctga

SEQ ID NO: 249637 - DNA, 25 bp, Artificial
  probe
  misc_feature (1)..(25): SEQ ID NO: 1202; WAN024GKY_at; Start 15; Stop 39
taatataaatgaaacaatgctgagt

SEQ ID NO: 249638 - DNA, 25 bp, Artificial
  probe
  misc_feature (1)..(25): SEQ ID NO: 1202; WAN024GKY_at; Start 36; Stop 60
gagtgaggtttatggaggtaattcc

SEQ ID NO: 249639 - DNA, 25 bp, Artificial
  probe
  misc_feature (1)..(25): SEQ ID NO: 1202; WAN024GKY_at; Start 26; Stop 50
aaacaatgctgagtgaggtttatgg

SEQ ID NO: 249640 - DNA, 25 bp, Artificial
  probe
  misc_feature (1)..(25): SEQ ID NO: 1202; WAN024GKY_at; Start 3; Stop 27
gaatacttattgtaatataaatgaa

SEQ ID NO: 249641 - DNA, 25 bp, Artificial
  probe
  misc_feature (1)..(25): SEQ ID NO: 1202; WAN024GKY_at; Start 22; Stop 46
aatgaaacaatgctgagtgaggttt

SEQ ID NO: 249642 - DNA, 25 bp, Artificial
  probe
  misc_feature (1)..(25): SEQ ID NO: 1202; WAN024GKY_at; Start 45; Stop 69
ttatggaggtaattccggaggagca

SEQ ID NO: 249643 - DNA, 25 bp, Artificial
  probe
  misc_feature (1)..(25): SEQ ID NO: 1202; WAN024GKY_at; Start 19; Stop 43
ataaatgaaacaatgctgagtgagg

SEQ ID NO: 249644 - DNA, 25 bp, Artificial
  probe
  misc_feature (1)..(25): SEQ ID NO: 1202; WAN024GKY_at; Start 28; Stop 52
acaatgctgagtgaggtttatggag

SEQ ID NO: 249645 - DNA, 25 bp, Artificial
  probe
  misc_feature (1)..(25): SEQ ID NO: 1202; WAN024GKY_at; Start 23; Stop 47
atgaaacaatgctgagtgaggttta

SEQ ID NO: 249646 - DNA, 25 bp, Artificial
  probe
  misc_feature (1)..(25): SEQ ID NO: 1202; WAN024GKY_at; Start 14; Stop 38
gtaatataaatgaaacaatgctgag

SEQ ID NO: 249647 - DNA, 25 bp, Artificial
  probe
  misc_feature (1)..(25): SEQ ID NO: 1202; WAN024GKY_at; Start 6; Stop 30
tacttattgtaatataaatgaaaca

SEQ ID NO: 249648 - DNA, 25 bp, Artificial
  probe
  misc_feature (1)..(25): SEQ ID NO: 1202; WAN024GKY_at; Start 17; Stop 41
atataaatgaaacaatgctgagtga

SEQ ID NO: 249649 - DNA, 25 bp, Artificial
  probe
  misc_feature (1)..(25): SEQ ID NO: 1202; WAN024GKY_at; Start 35; Stop 59
tgagtgaggtttatggaggtaattc

SEQ ID NO: 249650 - DNA, 25 bp, Artificial
  probe
  misc_feature (1)..(25): SEQ ID NO: 1202; WAN024GKY_at; Start 30; Stop 54
aatgctgagtgaggtttatggaggt

SEQ ID NO: 249651 - DNA, 25 bp, Artificial
  probe
  misc_feature (1)..(25): SEQ ID NO: 1202; WAN024GKY_at; Start 27; Stop 51
aacaatgctgagtgaggtttatgga

SEQ ID NO: 249652 - DNA, 25 bp, Artificial
  probe
  misc_feature (1)..(25): SEQ ID NO: 1202; WAN024GKY_at; Start 46; Stop 70
tatggaggtaattccggaggagcag

SEQ ID NO: 249653 - DNA, 25 bp, Artificial
  probe
  misc_feature (1)..(25): SEQ ID NO: 1202; WAN024GKY_at; Start 25; Stop 49
gaaacaatgctgagtgaggtttatg

SEQ ID NO: 249654 - DNA, 25 bp, Artificial
  probe
  misc_feature (1)..(25): SEQ ID NO: 1202; WAN024GKY_at; Start 12; Stop 36
ttgtaatataaatgaaacaatgctg

SEQ ID NO: 249655 - DNA, 25 bp, Artificial
  probe
  misc_feature (1)..(25): SEQ ID NO: 1202; WAN024GKY_at; Start 37; Stop 61
agtgaggtttatggaggtaattccg

SEQ ID NO: 249656 - DNA, 25 bp, Artificial
  probe
  misc_feature (1)..(25): SEQ ID NO: 1202; WAN024GKY_at; Start 24; Stop 48
tgaaacaatgctgagtgaggtttat

SEQ ID NO: 249657 - DNA, 25 bp, Artificial
  probe
  misc_feature (1)..(25): SEQ ID NO: 1202; WAN024GKY_at; Start 31; Stop 55
atgctgagtgaggtttatggaggta

SEQ ID NO: 249658 - DNA, 25 bp, Artificial
  probe
  misc_feature (1)..(25): SEQ ID NO: 1202; WAN024GKY_at; Start 16; Stop 40
aatataaatgaaacaatgctgagtg

SEQ ID NO: 249659 - DNA, 25 bp, Artificial
  probe
  misc_feature (1)..(25): SEQ ID NO: 1202; WAN024GKY_at; Start 21; Stop 45
aaatgaaacaatgctgagtgaggtt

SEQ ID NO: 249660 - DNA, 25 bp, Artificial
  probe
  misc_feature (1)..(25): SEQ ID NO: 1202; WAN024GKY_at; Start 44; Stop 68
tttatggaggtaattccggaggagc

SEQ ID NO: 249661 - DNA, 25 bp, Artificial
  probe
  misc_feature (1)..(25): SEQ ID NO: 1202; WAN024GKY_at; Start 47; Stop 71
atggaggtaattccggaggagcagc

SEQ ID NO: 249662 - DNA, 25 bp, Artificial
  probe
  misc_feature (1)..(25): SEQ ID NO: 1202; WAN024GKY_at; Start 10; Stop 34
tattgtaatataaatgaaacaatgc

SEQ ID NO: 249663 - DNA, 25 bp, Artificial
  probe
  misc_feature (1)..(25): SEQ ID NO: 1202; WAN024GKY_at; Start 20; Stop 44
taaatgaaacaatgctgagtgaggt

SEQ ID NO: 249664 - DNA, 25 bp, Artificial
  probe
  misc_feature (1)..(25): SEQ ID NO: 1202; WAN024GKY_at; Start 34; Stop 58
ctgagtgaggtttatggaggtaatt

SEQ ID NO: 249665 - DNA, 25 bp, Artificial
  probe
  misc_feature (1)..(25): SEQ ID NO: 1193; WAN024GKZ_at; Start 2; Stop 26
tgaatacaaaaatgttgtcacagtt

SEQ ID NO: 249666 - DNA, 25 bp, Artificial
  probe
  misc_feature (1)..(25): SEQ ID NO: 1193; WAN024GKZ_at; Start 242; Stop 266
ttggtgataaattgggactaagttg

SEQ ID NO: 249667 - DNA, 25 bp, Artificial
  probe
  misc_feature (1)..(25): SEQ ID NO: 1193; WAN024GKZ_at; Start 95; Stop 119
cactgattacaggagtcactacggg

SEQ ID NO: 249668 - DNA, 25 bp, Artificial
  probe
  misc_feature (1)..(25): SEQ ID NO: 1193; WAN024GKZ_at; Start 119; Stop 143
gaattataactggtggaactggagc

SEQ ID NO: 249669 - DNA, 25 bp, Artificial
  probe
  misc_feature (1)..(25): SEQ ID NO: 1193; WAN024GKZ_at; Start 152; Stop 176
ccactttaggagtagctggacttgc

SEQ ID NO: 249670 - DNA, 25 bp, Artificial
  probe
  misc_feature (1)..(25): SEQ ID NO: 1193; WAN024GKZ_at; Start 40; Stop 64
actgaaatgcttgcgaaagttgaag

SEQ ID NO: 249671 - DNA, 25 bp, Artificial
  probe
  misc_feature (1)..(25): SEQ ID NO: 1193; WAN024GKZ_at; Start 93; Stop 117
tgcactgattacaggagtcactacg

SEQ ID NO: 249672 - DNA, 25 bp, Artificial
  probe
  misc_feature (1)..(25): SEQ ID NO: 1193; WAN024GKZ_at; Start 132; Stop 156
tggaactggagcaggtttggccact

SEQ ID NO: 249673 - DNA, 25 bp, Artificial
  probe
  misc_feature (1)..(25): SEQ ID NO: 1193; WAN024GKZ_at; Start 123; Stop 147
tataactggtggaactggagcaggt

SEQ ID NO: 249674 - DNA, 25 bp, Artificial
  probe
  misc_feature (1)..(25): SEQ ID NO: 1193; WAN024GKZ_at; Start 98; Stop 122
tgattacaggagtcactacgggaat

SEQ ID NO: 249675 - DNA, 25 bp, Artificial
  probe
  misc_feature (1)..(25): SEQ ID NO: 1193; WAN024GKZ_at; Start 67; Stop 91
gggtatagctccactgattgtcaaa

SEQ ID NO: 249676 - DNA, 25 bp, Artificial
  probe
  misc_feature (1)..(25): SEQ ID NO: 1193; WAN024GKZ_at; Start 161; Stop 185
gagtagctggacttgctggtgcatt

SEQ ID NO: 249677 - DNA, 25 bp, Artificial
  probe
  misc_feature (1)..(25): SEQ ID NO: 1193; WAN024GKZ_at; Start 111; Stop 135
cactacgggaattataactggtgga

SEQ ID NO: 249678 - DNA, 25 bp, Artificial
  probe
  misc_feature (1)..(25): SEQ ID NO: 1193; WAN024GKZ_at; Start 8; Stop 32
caaaaatgttgtcacagttagaggt

SEQ ID NO: 249679 - DNA, 25 bp, Artificial
  probe
  misc_feature (1)..(25): SEQ ID NO: 1193; WAN024GKZ_at; Start 189; Stop 213
tggagcacacattggtgcaattggg

SEQ ID NO: 249680 - DNA, 25 bp, Artificial
  probe
  misc_feature (1)..(25): SEQ ID NO: 1193; WAN024GKZ_at; Start 172; Stop 196
cttgctggtgcatttgttggagcac

SEQ ID NO: 249681 - DNA, 25 bp, Artificial
  probe
  misc_feature (1)..(25): SEQ ID NO: 1193; WAN024GKZ_at; Start 237; Stop 261
tatggttggtgataaattgggacta

SEQ ID NO: 249682 - DNA, 25 bp, Artificial
  probe
  misc_feature (1)..(25): SEQ ID NO: 1193; WAN024GKZ_at; Start 184; Stop 208
tttgttggagcacacattggtgcaa

SEQ ID NO: 249683 - DNA, 25 bp, Artificial
  probe
  misc_feature (1)..(25): SEQ ID NO: 1193; WAN024GKZ_at; Start 221; Stop 245
taacatgcttaggaggtatggttgg

SEQ ID NO: 249684 - DNA, 25 bp, Artificial
  probe
  misc_feature (1)..(25): SEQ ID NO: 1193; WAN024GKZ_at; Start 76; Stop 100
tccactgattgtcaaaatgcactga

SEQ ID NO: 249685 - DNA, 25 bp, Artificial
  probe
  misc_feature (1)..(25): SEQ ID NO: 1193; WAN024GKZ_at; Start 107; Stop 131
gagtcactacgggaattataactgg

SEQ ID NO: 249686 - DNA, 25 bp, Artificial
  probe
  misc_feature (1)..(25): SEQ ID NO: 1193; WAN024GKZ_at; Start 228; Stop 252
cttaggaggtatggttggtgataaa

SEQ ID NO: 249687 - DNA, 25 bp, Artificial
  probe
  misc_feature (1)..(25): SEQ ID NO: 1193; WAN024GKZ_at; Start 102; Stop 126
tacaggagtcactacgggaattata

SEQ ID NO: 249688 - DNA, 25 bp, Artificial
  probe
  misc_feature (1)..(25): SEQ ID NO: 1193; WAN024GKZ_at; Start 164; Stop 188
tagctggacttgctggtgcatttgt

SEQ ID NO: 249689 - DNA, 25 bp, Artificial
  probe
  misc_feature (1)..(25): SEQ ID NO: 1193; WAN024GKZ_at; Start 138; Stop 162
tggagcaggtttggccactttagga

SEQ ID NO: 249690 - DNA, 25 bp, Artificial
  probe
  misc_feature (1)..(25): SEQ ID NO: 1193; WAN024GKZ_at; Start 20; Stop 44
cacagttagaggttatggatactga

SEQ ID NO: 249691 - DNA, 25 bp, Artificial
  probe
  misc_feature (1)..(25): SEQ ID NO: 1193; WAN024GKZ_at; Start 72; Stop 96
tagctccactgattgtcaaaatgca

SEQ ID NO: 249692 - DNA, 25 bp, Artificial
  probe
  misc_feature (1)..(25): SEQ ID NO: 1193; WAN024GKZ_at; Start 80; Stop 104
ctgattgtcaaaatgcactgattac

SEQ ID NO: 249693 - DNA, 25 bp, Artificial
  probe
  misc_feature (1)..(25): SEQ ID NO: 1193; WAN024GKZ_at; Start 14; Stop 38
tgttgtcacagttagaggttatgga

SEQ ID NO: 249694 - DNA, 25 bp, Artificial
  probe
  misc_feature (1)..(25): SEQ ID NO: 1193; WAN024GKZ_at; Start 143; Stop 167
caggtttggccactttaggagtagc

SEQ ID NO: 249695 - DNA, 25 bp, Artificial
  probe
  misc_feature (1)..(25): SEQ ID NO: 1193; WAN024GKZ_at; Start 214; Stop 238
ggtggattaacatgcttaggaggta

SEQ ID NO: 249696 - DNA, 25 bp, Artificial
  probe
  misc_feature (1)..(25): SEQ ID NO: 1193; WAN024GKZ_at; Start 156; Stop 180
tttaggagtagctggacttgctggt

SEQ ID NO: 249697 - DNA, 25 bp, Artificial
  probe
  misc_feature (1)..(25): SEQ ID NO: 1193; WAN024GKZ_at; Start 148; Stop 172
ttggccactttaggagtagctggac

SEQ ID NO: 249698 - DNA, 25 bp, Artificial
  probe
  misc_feature (1)..(25): SEQ ID NO: 1193; WAN024GKZ_at; Start 134; Stop 158
gaactggagcaggtttggccacttt

SEQ ID NO: 249699 - DNA, 25 bp, Artificial
  probe
  misc_feature (1)..(25): SEQ ID NO: 4274; WAN024GL2_at; Start 42; Stop 66
tataggaataggtgtaactggtgct

SEQ ID NO: 249700 - DNA, 25 bp, Artificial
  probe
  misc_feature (1)..(25): SEQ ID NO: 4274; WAN024GL2_at; Start 26; Stop 50
tattgggaccatttgctataggaat

SEQ ID NO: 249701 - DNA, 25 bp, Artificial
  probe
  misc_feature (1)..(25): SEQ ID NO: 4274; WAN024GL2_at; Start 37; Stop 61
tttgctataggaataggtgtaactg

SEQ ID NO: 249702 - DNA, 25 bp, Artificial
  probe
  misc_feature (1)..(25): SEQ ID NO: 4274; WAN024GL2_at; Start 18; Stop 42
gacatttctattgggaccatttgct

SEQ ID NO: 249703 - DNA, 25 bp, Artificial
  probe
  misc_feature (1)..(25): SEQ ID NO: 4274; WAN024GL2_at; Start 14; Stop 38
gtttgacatttctattgggaccatt

SEQ ID NO: 249704 - DNA, 25 bp, Artificial
  probe
  misc_feature (1)..(25): SEQ ID NO: 4274; WAN024GL2_at; Start 8; Stop 32
acaacggtttgacatttctattggg

SEQ ID NO: 249705 - DNA, 25 bp, Artificial
  probe
  misc_feature (1)..(25): SEQ ID NO: 4274; WAN024GL2_at; Start 6; Stop 30
caacaacggtttgacatttctattg

SEQ ID NO: 249706 - DNA, 25 bp, Artificial
  probe
  misc_feature (1)..(25): SEQ ID NO: 4274; WAN024GL2_at; Start 58; Stop 82
actggtgctgcaggtggagctatac

SEQ ID NO: 249707 - DNA, 25 bp, Artificial
  probe
  misc_feature (1)..(25): SEQ ID NO: 4274; WAN024GL2_at; Start 32; Stop 56
gaccatttgctataggaataggtgt

SEQ ID NO: 249708 - DNA, 25 bp, Artificial
  probe
  misc_feature (1)..(25): SEQ ID NO: 4274; WAN024GL2_at; Start 28; Stop 52
ttgggaccatttgctataggaatag

SEQ ID NO: 249709 - DNA, 25 bp, Artificial
  probe
  misc_feature (1)..(25): SEQ ID NO: 4274; WAN024GL2_at; Start 13; Stop 37
ggtttgacatttctattgggaccat

SEQ ID NO: 249710 - DNA, 25 bp, Artificial
  probe
  misc_feature (1)..(25): SEQ ID NO: 4274; WAN024GL2_at; Start 35; Stop 59
catttgctataggaataggtgtaac

SEQ ID NO: 249711 - DNA, 25 bp, Artificial
  probe
  misc_feature (1)..(25): SEQ ID NO: 4274; WAN024GL2_at; Start 63; Stop 87
tgctgcaggtggagctatacttgga

SEQ ID NO: 249712 - DNA, 25 bp, Artificial
  probe
  misc_feature (1)..(25): SEQ ID NO: 4274; WAN024GL2_at; Start 12; Stop 36
cggtttgacatttctattgggacca

SEQ ID NO: 249713 - DNA, 25 bp, Artificial
  probe
  misc_feature (1)..(25): SEQ ID NO: 4274; WAN024GL2_at; Start 16; Stop 40
ttgacatttctattgggaccatttg

SEQ ID NO: 249714 - DNA, 25 bp, Artificial
  probe
  misc_feature (1)..(25): SEQ ID NO: 4274; WAN024GL2_at; Start 5; Stop 29
gcaacaacggtttgacatttctatt

SEQ ID NO: 249715 - DNA, 25 bp, Artificial
  probe
  misc_feature (1)..(25): SEQ ID NO: 4274; WAN024GL2_at; Start 39; Stop 63
tgctataggaataggtgtaactggt

SEQ ID NO: 249716 - DNA, 25 bp, Artificial
  probe
  misc_feature (1)..(25): SEQ ID NO: 4274; WAN024GL2_at; Start 41; Stop 65
ctataggaataggtgtaactggtgc

SEQ ID NO: 249717 - DNA, 25 bp, Artificial
  probe
  misc_feature (1)..(25): SEQ ID NO: 4274; WAN024GL2_at; Start 31; Stop 55
ggaccatttgctataggaataggtg

SEQ ID NO: 249718 - DNA, 25 bp, Artificial
  probe
  misc_feature (1)..(25): SEQ ID NO: 4274; WAN024GL2_at; Start 57; Stop 81
aactggtgctgcaggtggagctata

SEQ ID NO: 249719 - DNA, 25 bp, Artificial
  probe
  misc_feature (1)..(25): SEQ ID NO: 4274; WAN024GL2_at; Start 24; Stop 48
tctattgggaccatttgctatagga

SEQ ID NO: 249720 - DNA, 25 bp, Artificial
  probe
  misc_feature (1)..(25): SEQ ID NO: 4274; WAN024GL2_at; Start 17; Stop 41
tgacatttctattgggaccatttgc

SEQ ID NO: 249721 - DNA, 25 bp, Artificial
  probe
  misc_feature (1)..(25): SEQ ID NO: 4274; WAN024GL2_at; Start 59; Stop 83
ctggtgctgcaggtggagctatact

SEQ ID NO: 249722 - DNA, 25 bp, Artificial
  probe
  misc_feature (1)..(25): SEQ ID NO: 4274; WAN024GL2_at; Start 48; Stop 72
aataggtgtaactggtgctgcaggt

SEQ ID NO: 249723 - DNA, 25 bp, Artificial
  probe
  misc_feature (1)..(25): SEQ ID NO: 4274; WAN024GL2_at; Start 2; Stop 26
tgtgcaacaacggtttgacatttct

SEQ ID NO: 249724 - DNA, 25 bp, Artificial
  probe
  misc_feature (1)..(25): SEQ ID NO: 4274; WAN024GL2_at; Start 45; Stop 69
aggaataggtgtaactggtgctgca

SEQ ID NO: 249725 - DNA, 25 bp, Artificial
  probe
  misc_feature (1)..(25): SEQ ID NO: 4274; WAN024GL2_at; Start 44; Stop 68
taggaataggtgtaactggtgctgc

SEQ ID NO: 249726 - DNA, 25 bp, Artificial
  probe
  misc_feature (1)..(25): SEQ ID NO: 4274; WAN024GL2_at; Start 34; Stop 58
ccatttgctataggaataggtgtaa

SEQ ID NO: 249727 - DNA, 25 bp, Artificial
  probe
  misc_feature (1)..(25): SEQ ID NO: 4274; WAN024GL2_at; Start 23; Stop 47
ttctattgggaccatttgctatagg

SEQ ID NO: 249728 - DNA, 25 bp, Artificial
  probe
  misc_feature (1)..(25): SEQ ID NO: 4274; WAN024GL2_at; Start 25; Stop 49
ctattgggaccatttgctataggaa

SEQ ID NO: 249729 - DNA, 25 bp, Artificial
  probe
  misc_feature (1)..(25): SEQ ID NO: 4274; WAN024GL2_at; Start 3; Stop 27
gtgcaacaacggtttgacatttcta

SEQ ID NO: 249730 - DNA, 25 bp, Artificial
  probe
  misc_feature (1)..(25): SEQ ID NO: 4274; WAN024GL2_at; Start 9; Stop 33
caacggtttgacatttctattggga

SEQ ID NO: 249731 - DNA, 25 bp, Artificial
  probe
  misc_feature (1)..(25): SEQ ID NO: 4274; WAN024GL2_at; Start 29; Stop 53
tgggaccatttgctataggaatagg

SEQ ID NO: 249732 - DNA, 25 bp, Artificial
  probe
  misc_feature (1)..(25): SEQ ID NO: 4274; WAN024GL2_at; Start 20; Stop 44
catttctattgggaccatttgctat

SEQ ID NO: 249733 - DNA, 25 bp, Artificial
  probe
  misc_feature (1)..(25): SEQ ID NO: 1191; WAN024GL3_at; Start 119; Stop 143
tagctgctgcgactggtccgataac

SEQ ID NO: 249734 - DNA, 25 bp, Artificial
  probe
  misc_feature (1)..(25): SEQ ID NO: 1191; WAN024GL3_at; Start 80; Stop 104
taggatctgcaatcggtggttgtat

SEQ ID NO: 249735 - DNA, 25 bp, Artificial
  probe
  misc_feature (1)..(25): SEQ ID NO: 1191; WAN024GL3_at; Start 137; Stop 161
cgataactgggggagcagcaacact

SEQ ID NO: 249736 - DNA, 25 bp, Artificial
  probe
  misc_feature (1)..(25): SEQ ID NO: 1191; WAN024GL3_at; Start 109; Stop 133
gcagtactattagctgctgcgactg

SEQ ID NO: 249737 - DNA, 25 bp, Artificial
  probe
  misc_feature (1)..(25): SEQ ID NO: 1191; WAN024GL3_at; Start 75; Stop 99
caatttaggatctgcaatcggtggt

SEQ ID NO: 249738 - DNA, 25 bp, Artificial
  probe
  misc_feature (1)..(25): SEQ ID NO: 1191; WAN024GL3_at; Start 46; Stop 70
gaactcgaaatagttagtggaggaa

SEQ ID NO: 249739 - DNA, 25 bp, Artificial
  probe
  misc_feature (1)..(25): SEQ ID NO: 1191; WAN024GL3_at; Start 43; Stop 67
gaagaactcgaaatagttagtggag

SEQ ID NO: 249740 - DNA, 25 bp, Artificial
  probe
  misc_feature (1)..(25): SEQ ID NO: 1191; WAN024GL3_at; Start 89; Stop 113
caatcggtggttgtattggagcagt

SEQ ID NO: 249741 - DNA, 25 bp, Artificial
  probe
  misc_feature (1)..(25): SEQ ID NO: 1191; WAN024GL3_at; Start 68; Stop 92
gaagaggcaatttaggatctgcaat

SEQ ID NO: 249742 - DNA, 25 bp, Artificial
  probe
  misc_feature (1)..(25): SEQ ID NO: 1191; WAN024GL3_at; Start 65; Stop 89
gaggaagaggcaatttaggatctgc

SEQ ID NO: 249743 - DNA, 25 bp, Artificial
  probe
  misc_feature (1)..(25): SEQ ID NO: 1191; WAN024GL3_at; Start 35; Stop 59
tggataatgaagaactcgaaatagt

SEQ ID NO: 249744 - DNA, 25 bp, Artificial
  probe
  misc_feature (1)..(25): SEQ ID NO: 1191; WAN024GL3_at; Start 165; Stop 189
ttgtgtaggttcaggaattatgtcc

SEQ ID NO: 249745 - DNA, 25 bp, Artificial
  probe
  misc_feature (1)..(25): SEQ ID NO: 1191; WAN024GL3_at; Start 149; Stop 173
gagcagcaacacttatttgtgtagg

SEQ ID NO: 249746 - DNA, 25 bp, Artificial
  probe
  misc_feature (1)..(25): SEQ ID NO: 1191; WAN024GL3_at; Start 31; Stop 55
gttatggataatgaagaactcgaaa

SEQ ID NO: 249747 - DNA, 25 bp, Artificial
  probe
  misc_feature (1)..(25): SEQ ID NO: 1191; WAN024GL3_at; Start 73; Stop 97
ggcaatttaggatctgcaatcggtg

SEQ ID NO: 249748 - DNA, 25 bp, Artificial
  probe
  misc_feature (1)..(25): SEQ ID NO: 1191; WAN024GL3_at; Start 78; Stop 102
tttaggatctgcaatcggtggttgt

SEQ ID NO: 249749 - DNA, 25 bp, Artificial
  probe
  misc_feature (1)..(25): SEQ ID NO: 1191; WAN024GL3_at; Start 155; Stop 179
caacacttatttgtgtaggttcagg

SEQ ID NO: 249750 - DNA, 25 bp, Artificial
  probe
  misc_feature (1)..(25): SEQ ID NO: 1191; WAN024GL3_at; Start 115; Stop 139
ctattagctgctgcgactggtccga

SEQ ID NO: 249751 - DNA, 25 bp, Artificial
  probe
  misc_feature (1)..(25): SEQ ID NO: 1191; WAN024GL3_at; Start 158; Stop 182
cacttatttgtgtaggttcaggaat

SEQ ID NO: 249752 - DNA, 25 bp, Artificial
  probe
  misc_feature (1)..(25): SEQ ID NO: 1191; WAN024GL3_at; Start 100; Stop 124
tgtattggagcagtactattagctg

SEQ ID NO: 249753 - DNA, 25 bp, Artificial
  probe
  misc_feature (1)..(25): SEQ ID NO: 1191; WAN024GL3_at; Start 87; Stop 111
tgcaatcggtggttgtattggagca

SEQ ID NO: 249754 - DNA, 25 bp, Artificial
  probe
  misc_feature (1)..(25): SEQ ID NO: 1191; WAN024GL3_at; Start 117; Stop 141
attagctgctgcgactggtccgata

SEQ ID NO: 249755 - DNA, 25 bp, Artificial
  probe
  misc_feature (1)..(25): SEQ ID NO: 1191; WAN024GL3_at; Start 168; Stop 192
tgtaggttcaggaattatgtcctct

SEQ ID NO: 249756 - DNA, 25 bp, Artificial
  probe
  misc_feature (1)..(25): SEQ ID NO: 1191; WAN024GL3_at; Start 105; Stop 129
tggagcagtactattagctgctgcg

SEQ ID NO: 249757 - DNA, 25 bp, Artificial
  probe
  misc_feature (1)..(25): SEQ ID NO: 1191; WAN024GL3_at; Start 172; Stop 196
ggttcaggaattatgtcctctttgt

SEQ ID NO: 249758 - DNA, 25 bp, Artificial
  probe
  misc_feature (1)..(25): SEQ ID NO: 1191; WAN024GL3_at; Start 121; Stop 145
gctgctgcgactggtccgataactg

SEQ ID NO: 249759 - DNA, 25 bp, Artificial
  probe
  misc_feature (1)..(25): SEQ ID NO: 1191; WAN024GL3_at; Start 56; Stop 80
tagttagtggaggaagaggcaattt

SEQ ID NO: 249760 - DNA, 25 bp, Artificial
  probe
  misc_feature (1)..(25): SEQ ID NO: 1191; WAN024GL3_at; Start 83; Stop 107
gatctgcaatcggtggttgtattgg

SEQ ID NO: 249761 - DNA, 25 bp, Artificial
  probe
  misc_feature (1)..(25): SEQ ID NO: 1191; WAN024GL3_at; Start 71; Stop 95
gaggcaatttaggatctgcaatcgg

SEQ ID NO: 249762 - DNA, 25 bp, Artificial
  probe
  misc_feature (1)..(25): SEQ ID NO: 1191; WAN024GL3_at; Start 113; Stop 137
tactattagctgctgcgactggtcc

SEQ ID NO: 249763 - DNA, 25 bp, Artificial
  probe
  misc_feature (1)..(25): SEQ ID NO: 1191; WAN024GL3_at; Start 123; Stop 147
tgctgcgactggtccgataactggg

SEQ ID NO: 249764 - DNA, 25 bp, Artificial
  probe
  misc_feature (1)..(25): SEQ ID NO: 1191; WAN024GL3_at; Start 53; Stop 77
aaatagttagtggaggaagaggcaa

SEQ ID NO: 249765 - DNA, 25 bp, Artificial
  probe
  misc_feature (1)..(25): SEQ ID NO: 1191; WAN024GL3_at; Start 93; Stop 117
cggtggttgtattggagcagtacta

SEQ ID NO: 249766 - DNA, 25 bp, Artificial
  probe
  misc_feature (1)..(25): SEQ ID NO: 1191; WAN024GL3_at; Start 147; Stop 171
gggagcagcaacacttatttgtgta

SEQ ID NO: 249767 - DNA, 25 bp, Artificial
  probe
  misc_feature (1)..(25): SEQ ID NO: 4041; WAN024GL4_at; Start 116; Stop 140
caggggttgcatatggcgcaattga

SEQ ID NO: 249768 - DNA, 25 bp, Artificial
  probe
  misc_feature (1)..(25): SEQ ID NO: 4041; WAN024GL4_at; Start 119; Stop 143
gggttgcatatggcgcaattgatgg

SEQ ID NO: 249769 - DNA, 25 bp, Artificial
  probe
  misc_feature (1)..(25): SEQ ID NO: 4041; WAN024GL4_at; Start 110; Stop 134
gtgcagcaggggttgcatatggcgc

SEQ ID NO: 249770 - DNA, 25 bp, Artificial
  probe
  misc_feature (1)..(25): SEQ ID NO: 4041; WAN024GL4_at; Start 132; Stop 156
cgcaattgatgggtgtgcaacaacg

SEQ ID NO: 249771 - DNA, 25 bp, Artificial
  probe
  misc_feature (1)..(25): SEQ ID NO: 4041; WAN024GL4_at; Start 126; Stop 150
atatggcgcaattgatgggtgtgca

SEQ ID NO: 249772 - DNA, 25 bp, Artificial
  probe
  misc_feature (1)..(25): SEQ ID NO: 4041; WAN024GL4_at; Start 120; Stop 144
ggttgcatatggcgcaattgatggg

SEQ ID NO: 249773 - DNA, 25 bp, Artificial
  probe
  misc_feature (1)..(25): SEQ ID NO: 4041; WAN024GL4_at; Start 123; Stop 147
tgcatatggcgcaattgatgggtgt

SEQ ID NO: 249774 - DNA, 25 bp, Artificial
  probe
  misc_feature (1)..(25): SEQ ID NO: 4041; WAN024GL4_at; Start 113; Stop 137
cagcaggggttgcatatggcgcaat

SEQ ID NO: 249775 - DNA, 25 bp, Artificial
  probe
  misc_feature (1)..(25): SEQ ID NO: 4041; WAN024GL4_at; Start 131; Stop 155
gcgcaattgatgggtgtgcaacaac

SEQ ID NO: 249776 - DNA, 25 bp, Artificial
  probe
  misc_feature (1)..(25): SEQ ID NO: 4041; WAN024GL4_at; Start 107; Stop 131
gttgtgcagcaggggttgcatatgg

SEQ ID NO: 249777 - DNA, 25 bp, Artificial
  probe
  misc_feature (1)..(25): SEQ ID NO: 4041; WAN024GL4_at; Start 101; Stop 125
aaattagttgtgcagcaggggttgc

SEQ ID NO: 249778 - DNA, 25 bp, Artificial
  probe
  misc_feature (1)..(25): SEQ ID NO: 4041; WAN024GL4_at; Start 121; Stop 145
gttgcatatggcgcaattgatgggt

SEQ ID NO: 249779 - DNA, 25 bp, Artificial
  probe
  misc_feature (1)..(25): SEQ ID NO: 4041; WAN024GL4_at; Start 130; Stop 154
ggcgcaattgatgggtgtgcaacaa

SEQ ID NO: 249780 - DNA, 25 bp, Artificial
  probe
  misc_feature (1)..(25): SEQ ID NO: 4041; WAN024GL4_at; Start 125; Stop 149
catatggcgcaattgatgggtgtgc

SEQ ID NO: 249781 - DNA, 25 bp, Artificial
  probe
  misc_feature (1)..(25): SEQ ID NO: 4041; WAN024GL4_at; Start 103; Stop 127
attagttgtgcagcaggggttgcat

SEQ ID NO: 249782 - DNA, 25 bp, Artificial
  probe
  misc_feature (1)..(25): SEQ ID NO: 4041; WAN024GL4_at; Start 129; Stop 153
tggcgcaattgatgggtgtgcaaca

SEQ ID NO: 249783 - DNA, 25 bp, Artificial
  probe
  misc_feature (1)..(25): SEQ ID NO: 4041; WAN024GL4_at; Start 112; Stop 136
gcagcaggggttgcatatggcgcaa

SEQ ID NO: 249784 - DNA, 25 bp, Artificial
  probe
  misc_feature (1)..(25): SEQ ID NO: 4041; WAN024GL4_at; Start 124; Stop 148
gcatatggcgcaattgatgggtgtg

SEQ ID NO: 249785 - DNA, 25 bp, Artificial
  probe
  misc_feature (1)..(25): SEQ ID NO: 4041; WAN024GL4_at; Start 109; Stop 133
tgtgcagcaggggttgcatatggcg

SEQ ID NO: 249786 - DNA, 25 bp, Artificial
  probe
  misc_feature (1)..(25): SEQ ID NO: 4041; WAN024GL4_at; Start 114; Stop 138
agcaggggttgcatatggcgcaatt

SEQ ID NO: 249787 - DNA, 25 bp, Artificial
  probe
  misc_feature (1)..(25): SEQ ID NO: 4041; WAN024GL4_at; Start 102; Stop 126
aattagttgtgcagcaggggttgca

SEQ ID NO: 249788 - DNA, 25 bp, Artificial
  probe
  misc_feature (1)..(25): SEQ ID NO: 4041; WAN024GL4_at; Start 117; Stop 141
aggggttgcatatggcgcaattgat

SEQ ID NO: 249789 - DNA, 25 bp, Artificial
  probe
  misc_feature (1)..(25): SEQ ID NO: 4041; WAN024GL4_at; Start 133; Stop 157
gcaattgatgggtgtgcaacaacgg

SEQ ID NO: 249790 - DNA, 25 bp, Artificial
  probe
  misc_feature (1)..(25): SEQ ID NO: 4041; WAN024GL4_at; Start 106; Stop 130
agttgtgcagcaggggttgcatatg

SEQ ID NO: 249791 - DNA, 25 bp, Artificial
  probe
  misc_feature (1)..(25): SEQ ID NO: 4041; WAN024GL4_at; Start 122; Stop 146
ttgcatatggcgcaattgatgggtg

SEQ ID NO: 249792 - DNA, 25 bp, Artificial
  probe
  misc_feature (1)..(25): SEQ ID NO: 4041; WAN024GL4_at; Start 127; Stop 151
tatggcgcaattgatgggtgtgcaa

SEQ ID NO: 249793 - DNA, 25 bp, Artificial
  probe
  misc_feature (1)..(25): SEQ ID NO: 4041; WAN024GL4_at; Start 115; Stop 139
gcaggggttgcatatggcgcaattg

SEQ ID NO: 249794 - DNA, 25 bp, Artificial
  probe
  misc_feature (1)..(25): SEQ ID NO: 4041; WAN024GL4_at; Start 105; Stop 129
tagttgtgcagcaggggttgcatat

SEQ ID NO: 249795 - DNA, 25 bp, Artificial
  probe
  misc_feature (1)..(25): SEQ ID NO: 4041; WAN024GL4_at; Start 128; Stop 152
atggcgcaattgatgggtgtgcaac

SEQ ID NO: 249796 - DNA, 25 bp, Artificial
  probe
  misc_feature (1)..(25): SEQ ID NO: 4041; WAN024GL4_at; Start 118; Stop 142
ggggttgcatatggcgcaattgatg

SEQ ID NO: 249797 - DNA, 25 bp, Artificial
  probe
  misc_feature (1)..(25): SEQ ID NO: 4041; WAN024GL4_at; Start 111; Stop 135
tgcagcaggggttgcatatggcgca

SEQ ID NO: 249798 - DNA, 25 bp, Artificial
  probe
  misc_feature (1)..(25): SEQ ID NO: 4041; WAN024GL4_at; Start 104; Stop 128
ttagttgtgcagcaggggttgcata

SEQ ID NO: 249799 - DNA, 25 bp, Artificial
  probe
  misc_feature (1)..(25): SEQ ID NO: 4041; WAN024GL4_at; Start 134; Stop 158
caattgatgggtgtgcaacaacggt

SEQ ID NO: 249800 - DNA, 25 bp, Artificial
  probe
  misc_feature (1)..(25): SEQ ID NO: 4041; WAN024GL4_at; Start 108; Stop 132
ttgtgcagcaggggttgcatatggc

SEQ ID NO: 249801 - DNA, 25 bp, Artificial
  probe
  misc_feature (1)..(25): SEQ ID NO: 2746; WAN024GL5_at; Start 154; Stop 178
tggcaaggtgcagcaactggtgctg

SEQ ID NO: 249802 - DNA, 25 bp, Artificial
  probe
  misc_feature (1)..(25): SEQ ID NO: 2746; WAN024GL5_at; Start 152; Stop 176
catggcaaggtgcagcaactggtgc

SEQ ID NO: 249803 - DNA, 25 bp, Artificial
  probe
  misc_feature (1)..(25): SEQ ID NO: 2746; WAN024GL5_at; Start 151; Stop 175
acatggcaaggtgcagcaactggtg

SEQ ID NO: 249804 - DNA, 25 bp, Artificial
  probe
  misc_feature (1)..(25): SEQ ID NO: 2746; WAN024GL5_at; Start 150; Stop 174
aacatggcaaggtgcagcaactggt

SEQ ID NO: 249805 - DNA, 25 bp, Artificial
  probe
  misc_feature (1)..(25): SEQ ID NO: 2746; WAN024GL5_at; Start 149; Stop 173
gaacatggcaaggtgcagcaactgg

SEQ ID NO: 249806 - DNA, 25 bp, Artificial
  probe
  misc_feature (1)..(25): SEQ ID NO: 2746; WAN024GL5_at; Start 153; Stop 177
atggcaaggtgcagcaactggtgct

SEQ ID NO: 249807 - DNA, 25 bp, Artificial
  probe
  misc_feature (1)..(25): SEQ ID NO: 5261; WAN024GL6_at; Start 392; Stop 416
tattagctccgctattttcaggaac

SEQ ID NO: 249808 - DNA, 25 bp, Artificial
  probe
  misc_feature (1)..(25): SEQ ID NO: 5261; WAN024GL6_at; Start 53; Stop 77
ggacttctttttcagtcttattagc

SEQ ID NO: 249809 - DNA, 25 bp, Artificial
  probe
  misc_feature (1)..(25): SEQ ID NO: 5261; WAN024GL6_at; Start 207; Stop 231
tttagctgcgctagctgcttctgca

SEQ ID NO: 249810 - DNA, 25 bp, Artificial
  probe
  misc_feature (1)..(25): SEQ ID NO: 5261; WAN024GL6_at; Start 312; Stop 336
gttttctctagcatgttccccttca

SEQ ID NO: 249811 - DNA, 25 bp, Artificial
  probe
  misc_feature (1)..(25): SEQ ID NO: 5261; WAN024GL6_at; Start 215; Stop 239
cgctagctgcttctgcagtttcagt

SEQ ID NO: 249812 - DNA, 25 bp, Artificial
  probe
  misc_feature (1)..(25): SEQ ID NO: 5261; WAN024GL6_at; Start 422; Stop 446
tttcttcagccaaggctggaccagc

SEQ ID NO: 249813 - DNA, 25 bp, Artificial
  probe
  misc_feature (1)..(25): SEQ ID NO: 5261; WAN024GL6_at; Start 127; Stop 151
gcttctgtttccttgtcagacttag

SEQ ID NO: 249814 - DNA, 25 bp, Artificial
  probe
  misc_feature (1)..(25): SEQ ID NO: 5261; WAN024GL6_at; Start 379; Stop 403
gaaacaagctctgtattagctccgc

SEQ ID NO: 249815 - DNA, 25 bp, Artificial
  probe
  misc_feature (1)..(25): SEQ ID NO: 5261; WAN024GL6_at; Start 368; Stop 392
cactctctcctgaaacaagctctgt

SEQ ID NO: 249816 - DNA, 25 bp, Artificial
  probe
  misc_feature (1)..(25): SEQ ID NO: 5261; WAN024GL6_at; Start 450; Stop 474
taaaacagcaccaatcatcagcgag

SEQ ID NO: 249817 - DNA, 25 bp, Artificial
  probe
  misc_feature (1)..(25): SEQ ID NO: 5261; WAN024GL6_at; Start 325; Stop 349
tgttccccttcattctgcttatcag

SEQ ID NO: 249818 - DNA, 25 bp, Artificial
  probe
  misc_feature (1)..(25): SEQ ID NO: 5261; WAN024GL6_at; Start 399; Stop 423
tccgctattttcaggaactgcagtt

SEQ ID NO: 249819 - DNA, 25 bp, Artificial
  probe
  misc_feature (1)..(25): SEQ ID NO: 5261; WAN024GL6_at; Start 103; Stop 127
ccttggttagttgcttcgggctttg

SEQ ID NO: 249820 - DNA, 25 bp, Artificial
  probe
  misc_feature (1)..(25): SEQ ID NO: 5261; WAN024GL6_at; Start 357; Stop 381
ggtcgaatgctcactctctcctgaa

SEQ ID NO: 249821 - DNA, 25 bp, Artificial
  probe
  misc_feature (1)..(25): SEQ ID NO: 5261; WAN024GL6_at; Start 474; Stop 498
gcaggctcctactgataacttacga

SEQ ID NO: 249822 - DNA, 25 bp, Artificial
  probe
  misc_feature (1)..(25): SEQ ID NO: 5261; WAN024GL6_at; Start 183; Stop 207
cacctcacttgctttttcctctggt

SEQ ID NO: 249823 - DNA, 25 bp, Artificial
  probe
  misc_feature (1)..(25): SEQ ID NO: 5261; WAN024GL6_at; Start 114; Stop 138
tgcttcgggctttgcttctgtttcc

SEQ ID NO: 249824 - DNA, 25 bp, Artificial
  probe
  misc_feature (1)..(25): SEQ ID NO: 5261; WAN024GL6_at; Start 143; Stop 167
cagacttaggttttgcttctgcaga

SEQ ID NO: 249825 - DNA, 25 bp, Artificial
  probe
  misc_feature (1)..(25): SEQ ID NO: 5261; WAN024GL6_at; Start 258; Stop 282
tgctggcgaagcagtttcagatgct

SEQ ID NO: 249826 - DNA, 25 bp, Artificial
  probe
  misc_feature (1)..(25): SEQ ID NO: 5261; WAN024GL6_at; Start 244; Stop 268
gcagcttcattgcttgctggcgaag

SEQ ID NO: 249827 - DNA, 25 bp, Artificial
  probe
  misc_feature (1)..(25): SEQ ID NO: 5261; WAN024GL6_at; Start 288; Stop 312
tactccttctgccttttctagcttg

SEQ ID NO: 249828 - DNA, 25 bp, Artificial
  probe
  misc_feature (1)..(25): SEQ ID NO: 5261; WAN024GL6_at; Start 461; Stop 485
caatcatcagcgagcaggctcctac

SEQ ID NO: 249829 - DNA, 25 bp, Artificial
  probe
  misc_feature (1)..(25): SEQ ID NO: 5261; WAN024GL6_at; Start 435; Stop 459
ggctggaccagcaaataaaacagca

SEQ ID NO: 249830 - DNA, 25 bp, Artificial
  probe
  misc_feature (1)..(25): SEQ ID NO: 5261; WAN024GL6_at; Start 42; Stop 66
gacatctggctggacttctttttca

SEQ ID NO: 249831 - DNA, 25 bp, Artificial
  probe
  misc_feature (1)..(25): SEQ ID NO: 5261; WAN024GL6_at; Start 481; Stop 505
cctactgataacttacgaatactgt

SEQ ID NO: 249832 - DNA, 25 bp, Artificial
  probe
  misc_feature (1)..(25): SEQ ID NO: 5261; WAN024GL6_at; Start 413; Stop 437
gaactgcagtttcttcagccaaggc

SEQ ID NO: 249833 - DNA, 25 bp, Artificial
  probe
  misc_feature (1)..(25): SEQ ID NO: 5261; WAN024GL6_at; Start 197; Stop 221
tttcctctggtttagctgcgctagc

SEQ ID NO: 249834 - DNA, 25 bp, Artificial
  probe
  misc_feature (1)..(25): SEQ ID NO: 5261; WAN024GL6_at; Start 230; Stop 254
cagtttcagtagttgcagcttcatt

SEQ ID NO: 249835 - DNA, 25 bp, Artificial
  probe
  misc_feature (1)..(25): SEQ ID NO: 5261; WAN024GL6_at; Start 346; Stop 370
tcagcttcattggtcgaatgctcac

SEQ ID NO: 249836 - DNA, 25 bp, Artificial
  probe
  misc_feature (1)..(25): SEQ ID NO: 5261; WAN024GL6_at; Start 32; Stop 56
tatttttagggacatctggctggac

SEQ ID NO: 249837 - DNA, 25 bp, Artificial
  probe
  misc_feature (1)..(25): SEQ ID NO: 5261; WAN024GL6_at; Start 169; Stop 193
ggtgtttctgcaaccacctcacttg

SEQ ID NO: 249838 - DNA, 25 bp, Artificial
  probe
  misc_feature (1)..(25): SEQ ID NO: 5261; WAN024GL6_at; Start 339; Stop 363
ctgcttatcagcttcattggtcgaa

SEQ ID NO: 249839 - DNA, 25 bp, Artificial
  probe
  misc_feature (1)..(25): SEQ ID NO: 5261; WAN024GL6_at; Start 92; Stop 116
tagactcatccccttggttagttgc

SEQ ID NO: 249840 - DNA, 25 bp, Artificial
  probe
  misc_feature (1)..(25): SEQ ID NO: 5261; WAN024GL6_at; Start 160; Stop 184
tctgcagatggtgtttctgcaacca

SEQ ID NO: 249841 - DNA, 25 bp, Artificial
  probe
  misc_feature (1)..(25): SEQ ID NO: 2087; WAN024GL7_at; Start 140; Stop 164
gcagattcataaacaaaggcataat

SEQ ID NO: 249842 - DNA, 25 bp, Artificial
  probe
  misc_feature (1)..(25): SEQ ID NO: 2087; WAN024GL7_at; Start 179; Stop 203
gctgtaaagataacatgactatccg

SEQ ID NO: 249843 - DNA, 25 bp, Artificial
  probe
  misc_feature (1)..(25): SEQ ID NO: 2087; WAN024GL7_at; Start 12; Stop 36
gatgaaaggcaaccttttcctcttg

SEQ ID NO: 249844 - DNA, 25 bp, Artificial
  probe
  misc_feature (1)..(25): SEQ ID NO: 2087; WAN024GL7_at; Start 183; Stop 207
taaagataacatgactatccgtttg

SEQ ID NO: 249845 - DNA, 25 bp, Artificial
  probe
  misc_feature (1)..(25): SEQ ID NO: 2087; WAN024GL7_at; Start 138; Stop 162
cagcagattcataaacaaaggcata

SEQ ID NO: 249846 - DNA, 25 bp, Artificial
  probe
  misc_feature (1)..(25): SEQ ID NO: 2087; WAN024GL7_at; Start 20; Stop 44
gcaaccttttcctcttgaacttcca

SEQ ID NO: 249847 - DNA, 25 bp, Artificial
  probe
  misc_feature (1)..(25): SEQ ID NO: 2087; WAN024GL7_at; Start 187; Stop 211
gataacatgactatccgtttgttca

SEQ ID NO: 249848 - DNA, 25 bp, Artificial
  probe
  misc_feature (1)..(25): SEQ ID NO: 2087; WAN024GL7_at; Start 198; Stop 222
tatccgtttgttcaaaagccaattc

SEQ ID NO: 249849 - DNA, 25 bp, Artificial
  probe
  misc_feature (1)..(25): SEQ ID NO: 2087; WAN024GL7_at; Start 137; Stop 161
tcagcagattcataaacaaaggcat

SEQ ID NO: 249850 - DNA, 25 bp, Artificial
  probe
  misc_feature (1)..(25): SEQ ID NO: 2087; WAN024GL7_at; Start 118; Stop 142
tttagcaggttgtggtttttcagca

SEQ ID NO: 249851 - DNA, 25 bp, Artificial
  probe
  misc_feature (1)..(25): SEQ ID NO: 2087; WAN024GL7_at; Start 128; Stop 152
tgtggtttttcagcagattcataaa

SEQ ID NO: 249852 - DNA, 25 bp, Artificial
  probe
  misc_feature (1)..(25): SEQ ID NO: 2087; WAN024GL7_at; Start 14; Stop 38
tgaaaggcaaccttttcctcttgaa

SEQ ID NO: 249853 - DNA, 25 bp, Artificial
  probe
  misc_feature (1)..(25): SEQ ID NO: 2087; WAN024GL7_at; Start 104; Stop 128
ttttgtggtgctggtttagcaggtt

SEQ ID NO: 249854 - DNA, 25 bp, Artificial
  probe
  misc_feature (1)..(25): SEQ ID NO: 2087; WAN024GL7_at; Start 120; Stop 144
tagcaggttgtggtttttcagcaga

SEQ ID NO: 249855 - DNA, 25 bp, Artificial
  probe
  misc_feature (1)..(25): SEQ ID NO: 2087; WAN024GL7_at; Start 123; Stop 147
caggttgtggtttttcagcagattc

SEQ ID NO: 249856 - DNA, 25 bp, Artificial
  probe
  misc_feature (1)..(25): SEQ ID NO: 2087; WAN024GL7_at; Start 32; Stop 56
tcttgaacttccaatttaggagcct

SEQ ID NO: 249857 - DNA, 25 bp, Artificial
  probe
  misc_feature (1)..(25): SEQ ID NO: 2087; WAN024GL7_at; Start 150; Stop 174
aaacaaaggcataatgagtaaagtg

SEQ ID NO: 249858 - DNA, 25 bp, Artificial
  probe
  misc_feature (1)..(25): SEQ ID NO: 2087; WAN024GL7_at; Start 202; Stop 226
cgtttgttcaaaagccaattctact

SEQ ID NO: 249859 - DNA, 25 bp, Artificial
  probe
  misc_feature (1)..(25): SEQ ID NO: 2087; WAN024GL7_at; Start 39; Stop 63
cttccaatttaggagccttttgttg

SEQ ID NO: 249860 - DNA, 25 bp, Artificial
  probe
  misc_feature (1)..(25): SEQ ID NO: 2087; WAN024GL7_at; Start 1; Stop 25
atgctcttgacgatgaaaggcaacc

SEQ ID NO: 249861 - DNA, 25 bp, Artificial
  probe
  misc_feature (1)..(25): SEQ ID NO: 2087; WAN024GL7_at; Start 195; Stop 219
gactatccgtttgttcaaaagccaa

SEQ ID NO: 249862 - DNA, 25 bp, Artificial
  probe
  misc_feature (1)..(25): SEQ ID NO: 2087; WAN024GL7_at; Start 125; Stop 149
ggttgtggtttttcagcagattcat

SEQ ID NO: 249863 - DNA, 25 bp, Artificial
  probe
  misc_feature (1)..(25): SEQ ID NO: 2087; WAN024GL7_at; Start 135; Stop 159
tttcagcagattcataaacaaaggc

SEQ ID NO: 249864 - DNA, 25 bp, Artificial
  probe
  misc_feature (1)..(25): SEQ ID NO: 2087; WAN024GL7_at; Start 176; Stop 200
ggtgctgtaaagataacatgactat

SEQ ID NO: 249865 - DNA, 25 bp, Artificial
  probe
  misc_feature (1)..(25): SEQ ID NO: 2087; WAN024GL7_at; Start 30; Stop 54
cctcttgaacttccaatttaggagc

SEQ ID NO: 249866 - DNA, 25 bp, Artificial
  probe
  misc_feature (1)..(25): SEQ ID NO: 2087; WAN024GL7_at; Start 47; Stop 71
ttaggagccttttgttgatcagaag

SEQ ID NO: 249867 - DNA, 25 bp, Artificial
  probe
  misc_feature (1)..(25): SEQ ID NO: 2087; WAN024GL7_at; Start 43; Stop 67
caatttaggagccttttgttgatca

SEQ ID NO: 249868 - DNA, 25 bp, Artificial
  probe
  misc_feature (1)..(25): SEQ ID NO: 2087; WAN024GL7_at; Start 205; Stop 229
ttgttcaaaagccaattctactgcc

SEQ ID NO: 249869 - DNA, 25 bp, Artificial
  probe
  misc_feature (1)..(25): SEQ ID NO: 2087; WAN024GL7_at; Start 192; Stop 216
catgactatccgtttgttcaaaagc

SEQ ID NO: 249870 - DNA, 25 bp, Artificial
  probe
  misc_feature (1)..(25): SEQ ID NO: 2087; WAN024GL7_at; Start 9; Stop 33
gacgatgaaaggcaaccttttcctc

SEQ ID NO: 249871 - DNA, 25 bp, Artificial
  probe
  misc_feature (1)..(25): SEQ ID NO: 2087; WAN024GL7_at; Start 7; Stop 31
ttgacgatgaaaggcaaccttttcc

SEQ ID NO: 249872 - DNA, 25 bp, Artificial
  probe
  misc_feature (1)..(25): SEQ ID NO: 2087; WAN024GL7_at; Start 5; Stop 29
tcttgacgatgaaaggcaacctttt

SEQ ID NO: 249873 - DNA, 25 bp, Artificial
  probe
  misc_feature (1)..(25): SEQ ID NO: 2087; WAN024GL7_at; Start 3; Stop 27
gctcttgacgatgaaaggcaacctt

SEQ ID NO: 249874 - DNA, 25 bp, Artificial
  probe
  misc_feature (1)..(25): SEQ ID NO: 2087; WAN024GL7_at; Start 143; Stop 167
gattcataaacaaaggcataatgag

SEQ ID NO: 249875 - DNA, 25 bp, Artificial
  probe
  misc_feature (1)..(25): SEQ ID NO: 2757; WAN024GL8_at; Start 34; Stop 58
gtaccaagaatacttgattggatgg

SEQ ID NO: 249876 - DNA, 25 bp, Artificial
  probe
  misc_feature (1)..(25): SEQ ID NO: 2757; WAN024GL8_at; Start 14; Stop 38
tagttataggtcatggcatcgtacc

SEQ ID NO: 249877 - DNA, 25 bp, Artificial
  probe
  misc_feature (1)..(25): SEQ ID NO: 2757; WAN024GL8_at; Start 308; Stop 332
accccgttacggtgacctgcatcaa

SEQ ID NO: 249878 - DNA, 25 bp, Artificial
  probe
  misc_feature (1)..(25): SEQ ID NO: 2757; WAN024GL8_at; Start 260; Stop 284
tctgcaatactattagaccagttga

SEQ ID NO: 249879 - DNA, 25 bp, Artificial
  probe
  misc_feature (1)..(25): SEQ ID NO: 2757; WAN024GL8_at; Start 58; Stop 82
gtttaccttagcagcatattccttg

SEQ ID NO: 249880 - DNA, 25 bp, Artificial
  probe
  misc_feature (1)..(25): SEQ ID NO: 2757; WAN024GL8_at; Start 273; Stop 297
tagaccagttgaagaagagtgtacc

SEQ ID NO: 249881 - DNA, 25 bp, Artificial
  probe
  misc_feature (1)..(25): SEQ ID NO: 2757; WAN024GL8_at; Start 102; Stop 126
gcatcttttctccaagaggtttaac

SEQ ID NO: 249882 - DNA, 25 bp, Artificial
  probe
  misc_feature (1)..(25): SEQ ID NO: 2757; WAN024GL8_at; Start 25; Stop 49
catggcatcgtaccaagaatacttg

SEQ ID NO: 249883 - DNA, 25 bp, Artificial
  probe
  misc_feature (1)..(25): SEQ ID NO: 2757; WAN024GL8_at; Start 245; Stop 269
gcaaatctttcttgatctgcaatac

SEQ ID NO: 249884 - DNA, 25 bp, Artificial
  probe
  misc_feature (1)..(25): SEQ ID NO: 2757; WAN024GL8_at; Start 154; Stop 178
gaaatagccatcatagccataatac

SEQ ID NO: 249885 - DNA, 25 bp, Artificial
  probe
  misc_feature (1)..(25): SEQ ID NO: 2757; WAN024GL8_at; Start 315; Stop 339
tacggtgacctgcatcaataacgtc

SEQ ID NO: 249886 - DNA, 25 bp, Artificial
  probe
  misc_feature (1)..(25): SEQ ID NO: 2757; WAN024GL8_at; Start 235; Stop 259
caaagcttcagcaaatctttcttga

SEQ ID NO: 249887 - DNA, 25 bp, Artificial
  probe
  misc_feature (1)..(25): SEQ ID NO: 2757; WAN024GL8_at; Start 5; Stop 29
taacgtccatagttataggtcatgg

SEQ ID NO: 249888 - DNA, 25 bp, Artificial
  probe
  misc_feature (1)..(25): SEQ ID NO: 2757; WAN024GL8_at; Start 216; Stop 240
taccatctgcgtcttgcttcaaagc

SEQ ID NO: 249889 - DNA, 25 bp, Artificial
  probe
  misc_feature (1)..(25): SEQ ID NO: 2757; WAN024GL8_at; Start 339; Stop 363
caggagttggtacgagaccttccca

SEQ ID NO: 249890 - DNA, 25 bp, Artificial
  probe
  misc_feature (1)..(25): SEQ ID NO: 2757; WAN024GL8_at; Start 82; Stop 106
gctatagagcataaactggcgcatc

SEQ ID NO: 249891 - DNA, 25 bp, Artificial
  probe
  misc_feature (1)..(25): SEQ ID NO: 2757; WAN024GL8_at; Start 49; Stop 73
gattggatggtttaccttagcagca

SEQ ID NO: 249892 - DNA, 25 bp, Artificial
  probe
  misc_feature (1)..(25): SEQ ID NO: 2757; WAN024GL8_at; Start 208; Stop 232
tgggaagctaccatctgcgtcttgc

SEQ ID NO: 249893 - DNA, 25 bp, Artificial
  probe
  misc_feature (1)..(25): SEQ ID NO: 2757; WAN024GL8_at; Start 351; Stop 375
cgagaccttcccagaagaccattga

SEQ ID NO: 249894 - DNA, 25 bp, Artificial
  probe
  misc_feature (1)..(25): SEQ ID NO: 2757; WAN024GL8_at; Start 116; Stop 140
agaggtttaaccaaatctccagttg

SEQ ID NO: 249895 - DNA, 25 bp, Artificial
  probe
  misc_feature (1)..(25): SEQ ID NO: 2757; WAN024GL8_at; Start 277; Stop 301
ccagttgaagaagagtgtaccgtat

SEQ ID NO: 249896 - DNA, 25 bp, Artificial
  probe
  misc_feature (1)..(25): SEQ ID NO: 2757; WAN024GL8_at; Start 169; Stop 193
gccataatacttggccatgtctacc

SEQ ID NO: 249897 - DNA, 25 bp, Artificial
  probe
  misc_feature (1)..(25): SEQ ID NO: 2757; WAN024GL8_at; Start 141; Stop 165
tttcttggttgatgaaatagccatc

SEQ ID NO: 249898 - DNA, 25 bp, Artificial
  probe
  misc_feature (1)..(25): SEQ ID NO: 2757; WAN024GL8_at; Start 345; Stop 369
ttggtacgagaccttcccagaagac

SEQ ID NO: 249899 - DNA, 25 bp, Artificial
  probe
  misc_feature (1)..(25): SEQ ID NO: 2757; WAN024GL8_at; Start 286; Stop 310
gaagagtgtaccgtatacaggaacc

SEQ ID NO: 249900 - DNA, 25 bp, Artificial
  probe
  misc_feature (1)..(25): SEQ ID NO: 2757; WAN024GL8_at; Start 181; Stop 205
ggccatgtctaccaatttacgggca

SEQ ID NO: 249901 - DNA, 25 bp, Artificial
  probe
  misc_feature (1)..(25): SEQ ID NO: 2757; WAN024GL8_at; Start 224; Stop 248
gcgtcttgcttcaaagcttcagcaa

SEQ ID NO: 249902 - DNA, 25 bp, Artificial
  probe
  misc_feature (1)..(25): SEQ ID NO: 2757; WAN024GL8_at; Start 68; Stop 92
gcagcatattccttgctatagagca

SEQ ID NO: 249903 - DNA, 25 bp, Artificial
  probe
  misc_feature (1)..(25): SEQ ID NO: 2757; WAN024GL8_at; Start 196; Stop 220
tttacgggcaattgggaagctacca

SEQ ID NO: 249904 - DNA, 25 bp, Artificial
  probe
  misc_feature (1)..(25): SEQ ID NO: 2757; WAN024GL8_at; Start 333; Stop 357
taacgtcaggagttggtacgagacc

SEQ ID NO: 249905 - DNA, 25 bp, Artificial
  probe
  misc_feature (1)..(25): SEQ ID NO: 2757; WAN024GL8_at; Start 93; Stop 117
taaactggcgcatcttttctccaag

SEQ ID NO: 249906 - DNA, 25 bp, Artificial
  probe
  misc_feature (1)..(25): SEQ ID NO: 2757; WAN024GL8_at; Start 127; Stop 151
caaatctccagttgtttcttggttg

SEQ ID NO: 249907 - DNA, 25 bp, Artificial
  probe
  misc_feature (1)..(25): SEQ ID NO: 2757; WAN024GL8_at; Start 204; Stop 228
caattgggaagctaccatctgcgtc

SEQ ID NO: 249908 - DNA, 25 bp, Artificial
  probe
  misc_feature (1)..(25): SEQ ID NO: 2757; WAN024GL8_at; Start 324; Stop 348
ctgcatcaataacgtcaggagttgg

SEQ ID NO: 249909 - DNA, 25 bp, Artificial
  probe
  misc_feature (1)..(25): SEQ ID NO: 3194; WAN024GL9-3_at; Start 16; Stop 40
ccaagacctctagcagaaaacatcg

SEQ ID NO: 249910 - DNA, 25 bp, Artificial
  probe
  misc_feature (1)..(25): SEQ ID NO: 3194; WAN024GL9-3_at; Start 1226; Stop 1250
accaaggtcatgaagtcaactttga

SEQ ID NO: 249911 - DNA, 25 bp, Artificial
  probe
  misc_feature (1)..(25): SEQ ID NO: 3194; WAN024GL9-3_at; Start 15; Stop 39
tccaagacctctagcagaaaacatc

SEQ ID NO: 249912 - DNA, 25 bp, Artificial
  probe
  misc_feature (1)..(25): SEQ ID NO: 3194; WAN024GL9-3_at; Start 51; Stop 75
tactgttatcggaagtaccttccca

SEQ ID NO: 249913 - DNA, 25 bp, Artificial
  probe
  misc_feature (1)..(25): SEQ ID NO: 3194; WAN024GL9-3_at; Start 19; Stop 43
agacctctagcagaaaacatcgttc

SEQ ID NO: 249914 - DNA, 25 bp, Artificial
  probe
  misc_feature (1)..(25): SEQ ID NO: 3194; WAN024GL9-3_at; Start 48; Stop 72
ggctactgttatcggaagtaccttc

SEQ ID NO: 249915 - DNA, 25 bp, Artificial
  probe
  misc_feature (1)..(25): SEQ ID NO: 3194; WAN024GL9-3_at; Start 62; Stop 86
gaagtaccttcccagatacagaagg

SEQ ID NO: 249916 - DNA, 25 bp, Artificial
  probe
  misc_feature (1)..(25): SEQ ID NO: 3194; WAN024GL9-3_at; Start 22; Stop 46
cctctagcagaaaacatcgttccag

SEQ ID NO: 249917 - DNA, 25 bp, Artificial
  probe
  misc_feature (1)..(25): SEQ ID NO: 3194; WAN024GL9-3_at; Start 68; Stop 92
ccttcccagatacagaaggtggaga

SEQ ID NO: 249918 - DNA, 25 bp, Artificial
  probe
  misc_feature (1)..(25): SEQ ID NO: 3194; WAN024GL9-3_at; Start 69; Stop 93
cttcccagatacagaaggtggagaa

SEQ ID NO: 249919 - DNA, 25 bp, Artificial
  probe
  misc_feature (1)..(25): SEQ ID NO: 3194; WAN024GL9-3_at; Start 1225; Stop 1249
taccaaggtcatgaagtcaactttg

SEQ ID NO: 249920 - DNA, 25 bp, Artificial
  probe
  misc_feature (1)..(25): SEQ ID NO: 3194; WAN024GL9-3_at; Start 64; Stop 88
agtaccttcccagatacagaaggtg

SEQ ID NO: 249921 - DNA, 25 bp, Artificial
  probe
  misc_feature (1)..(25): SEQ ID NO: 3194; WAN024GL9-3_at; Start 59; Stop 83
tcggaagtaccttcccagatacaga

SEQ ID NO: 249922 - DNA, 25 bp, Artificial
  probe
  misc_feature (1)..(25): SEQ ID NO: 3194; WAN024GL9-3_at; Start 72; Stop 96
cccagatacagaaggtggagaaggt

SEQ ID NO: 249923 - DNA, 25 bp, Artificial
  probe
  misc_feature (1)..(25): SEQ ID NO: 3194; WAN024GL9-3_at; Start 31; Stop 55
gaaaacatcgttccaggggctactg

SEQ ID NO: 249924 - DNA, 25 bp, Artificial
  probe
  misc_feature (1)..(25): SEQ ID NO: 3194; WAN024GL9-3_at; Start 71; Stop 95
tcccagatacagaaggtggagaagg

SEQ ID NO: 249925 - DNA, 25 bp, Artificial
  probe
  misc_feature (1)..(25): SEQ ID NO: 3194; WAN024GL9-3_at; Start 1218; Stop 1242
gcttcgttaccaaggtcatgaagtc

SEQ ID NO: 249926 - DNA, 25 bp, Artificial
  probe
  misc_feature (1)..(25): SEQ ID NO: 3194; WAN024GL9-3_at; Start 54; Stop 78
tgttatcggaagtaccttcccagat

SEQ ID NO: 249927 - DNA, 25 bp, Artificial
  probe
  misc_feature (1)..(25): SEQ ID NO: 3194; WAN024GL9-3_at; Start 65; Stop 89
gtaccttcccagatacagaaggtgg

SEQ ID NO: 249928 - DNA, 25 bp, Artificial
  probe
  misc_feature (1)..(25): SEQ ID NO: 3194; WAN024GL9-3_at; Start 60; Stop 84
cggaagtaccttcccagatacagaa

SEQ ID NO: 249929 - DNA, 25 bp, Artificial
  probe
  misc_feature (1)..(25): SEQ ID NO: 3194; WAN024GL9-3_at; Start 1222; Stop 1246
cgttaccaaggtcatgaagtcaact

SEQ ID NO: 249930 - DNA, 25 bp, Artificial
  probe
  misc_feature (1)..(25): SEQ ID NO: 3194; WAN024GL9-3_at; Start 1; Stop 25
caagacacaagtcttccaagacctc

SEQ ID NO: 249931 - DNA, 25 bp, Artificial
  probe
  misc_feature (1)..(25): SEQ ID NO: 3194; WAN024GL9-3_at; Start 1221; Stop 1245
tcgttaccaaggtcatgaagtcaac

SEQ ID NO: 249932 - DNA, 25 bp, Artificial
  probe
  misc_feature (1)..(25): SEQ ID NO: 3194; WAN024GL9-3_at; Start 17; Stop 41
caagacctctagcagaaaacatcgt

SEQ ID NO: 249933 - DNA, 25 bp, Artificial
  probe
  misc_feature (1)..(25): SEQ ID NO: 3194; WAN024GL9-3_at; Start 1220; Stop 1244
ttcgttaccaaggtcatgaagtcaa

SEQ ID NO: 249934 - DNA, 25 bp, Artificial
  probe
  misc_feature (1)..(25): SEQ ID NO: 3194; WAN024GL9-3_at; Start 1228; Stop 1252
caaggtcatgaagtcaactttgatg

SEQ ID NO: 249935 - DNA, 25 bp, Artificial
  probe
  misc_feature (1)..(25): SEQ ID NO: 3194; WAN024GL9-3_at; Start 13; Stop 37
cttccaagacctctagcagaaaaca

SEQ ID NO: 249936 - DNA, 25 bp, Artificial
  probe
  misc_feature (1)..(25): SEQ ID NO: 3194; WAN024GL9-3_at; Start 1231; Stop 1255
ggtcatgaagtcaactttgatgttt

SEQ ID NO: 249937 - DNA, 25 bp, Artificial
  probe
  misc_feature (1)..(25): SEQ ID NO: 3194; WAN024GL9-3_at; Start 66; Stop 90
taccttcccagatacagaaggtgga

SEQ ID NO: 249938 - DNA, 25 bp, Artificial
  probe
  misc_feature (1)..(25): SEQ ID NO: 3194; WAN024GL9-3_at; Start 52; Stop 76
actgttatcggaagtaccttcccag

SEQ ID NO: 249939 - DNA, 25 bp, Artificial
  probe
  misc_feature (1)..(25): SEQ ID NO: 3194; WAN024GL9-3_at; Start 20; Stop 44
gacctctagcagaaaacatcgttcc

SEQ ID NO: 249940 - DNA, 25 bp, Artificial
  probe
  misc_feature (1)..(25): SEQ ID NO: 3194; WAN024GL9-3_at; Start 24; Stop 48
tctagcagaaaacatcgttccaggg

SEQ ID NO: 249941 - DNA, 25 bp, Artificial
  probe
  misc_feature (1)..(25): SEQ ID NO: 3194; WAN024GL9-3_at; Start 1223; Stop 1247
gttaccaaggtcatgaagtcaactt

SEQ ID NO: 249942 - DNA, 25 bp, Artificial
  probe
  misc_feature (1)..(25): SEQ ID NO: 3194; WAN024GL9-3_at; Start 57; Stop 81
tatcggaagtaccttcccagataca

SEQ ID NO: 249943 - DNA, 25 bp, Artificial
  probe
  misc_feature (1)..(25): SEQ ID NO: 1080; WAN024GL9-5_at; Start 2324; Stop 2348
cctttgagtgggggatgactgtcca

SEQ ID NO: 249944 - DNA, 25 bp, Artificial
  probe
  misc_feature (1)..(25): SEQ ID NO: 1080; WAN024GL9-5_at; Start 2322; Stop 2346
aacctttgagtgggggatgactgtc

SEQ ID NO: 249945 - DNA, 25 bp, Artificial
  probe
  misc_feature (1)..(25): SEQ ID NO: 1080; WAN024GL9-5_at; Start 2323; Stop 2347
acctttgagtgggggatgactgtcc

SEQ ID NO: 249946 - DNA, 25 bp, Artificial
  probe
  misc_feature (1)..(25): SEQ ID NO: 1080; WAN024GL9-5_at; Start 2325; Stop 2349
ctttgagtgggggatgactgtccaa

SEQ ID NO: 249947 - DNA, 25 bp, Artificial
  probe
  misc_feature (1)..(25): SEQ ID NO: 1379; WAN024GLA_at; Start 76; Stop 100
tctttcaataaagcaaccagatctt

SEQ ID NO: 249948 - DNA, 25 bp, Artificial
  probe
  misc_feature (1)..(25): SEQ ID NO: 1379; WAN024GLA_at; Start 233; Stop 257
gagcctcacctgttaagcgatcaag

SEQ ID NO: 249949 - DNA, 25 bp, Artificial
  probe
  misc_feature (1)..(25): SEQ ID NO: 1379; WAN024GLA_at; Start 141; Stop 165
atctactttttcaaccaaggccttg

SEQ ID NO: 249950 - DNA, 25 bp, Artificial
  probe
  misc_feature (1)..(25): SEQ ID NO: 1379; WAN024GLA_at; Start 71; Stop 95
tgtcttctttcaataaagcaaccag

SEQ ID NO: 249951 - DNA, 25 bp, Artificial
  probe
  misc_feature (1)..(25): SEQ ID NO: 1379; WAN024GLA_at; Start 43; Stop 67
gttttactatcagaaaagactgctg

SEQ ID NO: 249952 - DNA, 25 bp, Artificial
  probe
  misc_feature (1)..(25): SEQ ID NO: 1379; WAN024GLA_at; Start 195; Stop 219
acctgaaggatggtttggtttggca

SEQ ID NO: 249953 - DNA, 25 bp, Artificial
  probe
  misc_feature (1)..(25): SEQ ID NO: 1379; WAN024GLA_at; Start 253; Stop 277
tcaagctctgtcttttcttccgtaa

SEQ ID NO: 249954 - DNA, 25 bp, Artificial
  probe
  misc_feature (1)..(25): SEQ ID NO: 1379; WAN024GLA_at; Start 24; Stop 48
gaagtgtacttcaacacctgtttta

SEQ ID NO: 249955 - DNA, 25 bp, Artificial
  probe
  misc_feature (1)..(25): SEQ ID NO: 1379; WAN024GLA_at; Start 239; Stop 263
cacctgttaagcgatcaagctctgt

SEQ ID NO: 249956 - DNA, 25 bp, Artificial
  probe
  misc_feature (1)..(25): SEQ ID NO: 1379; WAN024GLA_at; Start 167; Stop 191
ttttctcaagaagcggagctagggc

SEQ ID NO: 249957 - DNA, 25 bp, Artificial
  probe
  misc_feature (1)..(25): SEQ ID NO: 1379; WAN024GLA_at; Start 241; Stop 265
cctgttaagcgatcaagctctgtct

SEQ ID NO: 249958 - DNA, 25 bp, Artificial
  probe
  misc_feature (1)..(25): SEQ ID NO: 1379; WAN024GLA_at; Start 161; Stop 185
ccttgtttttctcaagaagcggagc

SEQ ID NO: 249959 - DNA, 25 bp, Artificial
  probe
  misc_feature (1)..(25): SEQ ID NO: 1379; WAN024GLA_at; Start 97; Stop 121
tcttttagactctgtttcgctgttg

SEQ ID NO: 249960 - DNA, 25 bp, Artificial
  probe
  misc_feature (1)..(25): SEQ ID NO: 1379; WAN024GLA_at; Start 1; Stop 25
atgacagtcttctctttatttgaga

SEQ ID NO: 249961 - DNA, 25 bp, Artificial
  probe
  misc_feature (1)..(25): SEQ ID NO: 1379; WAN024GLA_at; Start 172; Stop 196
tcaagaagcggagctagggcagaac

SEQ ID NO: 249962 - DNA, 25 bp, Artificial
  probe
  misc_feature (1)..(25): SEQ ID NO: 1379; WAN024GLA_at; Start 123; Stop 147
aagctcttctggactcaaatctact

SEQ ID NO: 249963 - DNA, 25 bp, Artificial
  probe
  misc_feature (1)..(25): SEQ ID NO: 1379; WAN024GLA_at; Start 200; Stop 224
aaggatggtttggtttggcagccaa

SEQ ID NO: 249964 - DNA, 25 bp, Artificial
  probe
  misc_feature (1)..(25): SEQ ID NO: 1379; WAN024GLA_at; Start 229; Stop 253
tcttgagcctcacctgttaagcgat

SEQ ID NO: 249965 - DNA, 25 bp, Artificial
  probe
  misc_feature (1)..(25): SEQ ID NO: 1379; WAN024GLA_at; Start 84; Stop 108
taaagcaaccagatcttttagactc

SEQ ID NO: 249966 - DNA, 25 bp, Artificial
  probe
  misc_feature (1)..(25): SEQ ID NO: 1379; WAN024GLA_at; Start 174; Stop 198
aagaagcggagctagggcagaacct

SEQ ID NO: 249967 - DNA, 25 bp, Artificial
  probe
  misc_feature (1)..(25): SEQ ID NO: 1379; WAN024GLA_at; Start 186; Stop 210
tagggcagaacctgaaggatggttt

SEQ ID NO: 249968 - DNA, 25 bp, Artificial
  probe
  misc_feature (1)..(25): SEQ ID NO: 1379; WAN024GLA_at; Start 155; Stop 179
ccaaggccttgtttttctcaagaag

SEQ ID NO: 249969 - DNA, 25 bp, Artificial
  probe
  misc_feature (1)..(25): SEQ ID NO: 1379; WAN024GLA_at; Start 12; Stop 36
ctctttatttgagaagtgtacttca

SEQ ID NO: 249970 - DNA, 25 bp, Artificial
  probe
  misc_feature (1)..(25): SEQ ID NO: 1379; WAN024GLA_at; Start 20; Stop 44
ttgagaagtgtacttcaacacctgt

SEQ ID NO: 249971 - DNA, 25 bp, Artificial
  probe
  misc_feature (1)..(25): SEQ ID NO: 1379; WAN024GLA_at; Start 235; Stop 259
gcctcacctgttaagcgatcaagct

SEQ ID NO: 249972 - DNA, 25 bp, Artificial
  probe
  misc_feature (1)..(25): SEQ ID NO: 1379; WAN024GLA_at; Start 95; Stop 119
gatcttttagactctgtttcgctgt

SEQ ID NO: 249973 - DNA, 25 bp, Artificial
  probe
  misc_feature (1)..(25): SEQ ID NO: 1379; WAN024GLA_at; Start 246; Stop 270
taagcgatcaagctctgtcttttct

SEQ ID NO: 249974 - DNA, 25 bp, Artificial
  probe
  misc_feature (1)..(25): SEQ ID NO: 1379; WAN024GLA_at; Start 137; Stop 161
tcaaatctactttttcaaccaaggc

SEQ ID NO: 249975 - DNA, 25 bp, Artificial
  probe
  misc_feature (1)..(25): SEQ ID NO: 1379; WAN024GLA_at; Start 225; Stop 249
gagttcttgagcctcacctgttaag

SEQ ID NO: 249976 - DNA, 25 bp, Artificial
  probe
  misc_feature (1)..(25): SEQ ID NO: 1379; WAN024GLA_at; Start 220; Stop 244
gccaagagttcttgagcctcacctg

SEQ ID NO: 249977 - DNA, 25 bp, Artificial
  probe
  misc_feature (1)..(25): SEQ ID NO: 1379; WAN024GLA_at; Start 34; Stop 58
tcaacacctgttttactatcagaaa

SEQ ID NO: 249978 - DNA, 25 bp, Artificial
  probe
  misc_feature (1)..(25): SEQ ID NO: 1379; WAN024GLA_at; Start 216; Stop 240
ggcagccaagagttcttgagcctca

SEQ ID NO: 249979 - DNA, 25 bp, Artificial
  probe
  misc_feature (1)..(25): SEQ ID NO: 1379; WAN024GLA_at; Start 170; Stop 194
tctcaagaagcggagctagggcaga

SEQ ID NO: 249980 - DNA, 25 bp, Artificial
  probe
  misc_feature (1)..(25): SEQ ID NO: 1379; WAN024GLA_at; Start 211; Stop 235
ggtttggcagccaagagttcttgag

SEQ ID NO: 249981 - DNA, 25 bp, Artificial
  probe
  misc_feature (1)..(25): SEQ ID NO: 3763; WAN024GLB-3_s_at; Start 2339; Stop 2363
cagaagaagcaagcaaacaattgcc

SEQ ID NO: 249982 - DNA, 25 bp, Artificial
  probe
  misc_feature (1)..(25): SEQ ID NO: 3763; WAN024GLB-3_s_at; Start 2441; Stop 2465
ccttgagacggaaaagagaagataa

SEQ ID NO: 249983 - DNA, 25 bp, Artificial
  probe
  misc_feature (1)..(25): SEQ ID NO: 3763; WAN024GLB-3_s_at; Start 2285; Stop 2309
taccagcagtagtagctacacagga

SEQ ID NO: 249984 - DNA, 25 bp, Artificial
  probe
  misc_feature (1)..(25): SEQ ID NO: 3763; WAN024GLB-3_s_at; Start 2333; Stop 2357
ttaaatcagaagaagcaagcaaaca

SEQ ID NO: 249985 - DNA, 25 bp, Artificial
  probe
  misc_feature (1)..(25): SEQ ID NO: 3763; WAN024GLB-3_s_at; Start 2363; Stop 2387
caaatacaggaacagctgatgctaa

SEQ ID NO: 249986 - DNA, 25 bp, Artificial
  probe
  misc_feature (1)..(25): SEQ ID NO: 3763; WAN024GLB-3_s_at; Start 2447; Stop 2471
gacggaaaagagaagataaagatta

SEQ ID NO: 249987 - DNA, 25 bp, Artificial
  probe
  misc_feature (1)..(25): SEQ ID NO: 3763; WAN024GLB-3_s_at; Start 2356; Stop 2380
caattgccaaatacaggaacagctg

SEQ ID NO: 249988 - DNA, 25 bp, Artificial
  probe
  misc_feature (1)..(25): SEQ ID NO: 3763; WAN024GLB-3_s_at; Start 2308; Stop 2332
gaaaaaccagctcaaaatacagcag

SEQ ID NO: 249989 - DNA, 25 bp, Artificial
  probe
  misc_feature (1)..(25): SEQ ID NO: 3763; WAN024GLB-3_s_at; Start 2427; Stop 2451
tagtttagccttgaccttgagacgg

SEQ ID NO: 249990 - DNA, 25 bp, Artificial
  probe
  misc_feature (1)..(25): SEQ ID NO: 3763; WAN024GLB-3_s_at; Start 2388; Stop 2412
tgaagccctaatagcaggcttagcc

SEQ ID NO: 249991 - DNA, 25 bp, Artificial
  probe
  misc_feature (1)..(25): SEQ ID NO: 3763; WAN024GLB-3_s_at; Start 2369; Stop 2393
caggaacagctgatgctaatgaagc

SEQ ID NO: 249992 - DNA, 25 bp, Artificial
  probe
  misc_feature (1)..(25): SEQ ID NO: 3763; WAN024GLB-3_s_at; Start 2314; Stop 2338
ccagctcaaaatacagcagttaaat

SEQ ID NO: 249993 - DNA, 25 bp, Artificial
  probe
  misc_feature (1)..(25): SEQ ID NO: 3763; WAN024GLB-3_s_at; Start 2435; Stop 2459
ccttgaccttgagacggaaaagaga

SEQ ID NO: 249994 - DNA, 25 bp, Artificial
  probe
  misc_feature (1)..(25): SEQ ID NO: 3763; WAN024GLB-3_s_at; Start 2280; Stop 2304
aacagtaccagcagtagtagctaca

SEQ ID NO: 249995 - DNA, 25 bp, Artificial
  probe
  misc_feature (1)..(25): SEQ ID NO: 3763; WAN024GLB-3_s_at; Start 2242; Stop 2266
gcgattccagaaattgttgaaattg

SEQ ID NO: 249996 - DNA, 25 bp, Artificial
  probe
  misc_feature (1)..(25): SEQ ID NO: 3763; WAN024GLB-3_s_at; Start 2424; Stop 2448
tgctagtttagccttgaccttgaga

SEQ ID NO: 249997 - DNA, 25 bp, Artificial
  probe
  misc_feature (1)..(25): SEQ ID NO: 3763; WAN024GLB-3_s_at; Start 2383; Stop 2407
gctaatgaagccctaatagcaggct

SEQ ID NO: 249998 - DNA, 25 bp, Artificial
  probe
  misc_feature (1)..(25): SEQ ID NO: 3763; WAN024GLB-3_s_at; Start 2299; Stop 2323
gctacacaggaaaaaccagctcaaa

SEQ ID NO: 249999 - DNA, 25 bp, Artificial
  probe
  misc_feature (1)..(25): SEQ ID NO: 3763; WAN024GLB-3_s_at; Start 2276; Stop 2300
taaaaacagtaccagcagtagtagc

SEQ ID NO: 250000 - DNA, 25 bp, Artificial
  probe
  misc_feature (1)..(25): SEQ ID NO: 3763; WAN024GLB-3_s_at; Start 2291; Stop 2315
cagtagtagctacacaggaaaaacc

SEQ ID NO: 250001 - DNA, 25 bp, Artificial
  probe
  misc_feature (1)..(25): SEQ ID NO: 3763; WAN024GLB-3_s_at; Start 2329; Stop 2353
gcagttaaatcagaagaagcaagca

SEQ ID NO: 250002 - DNA, 25 bp, Artificial
  probe
  misc_feature (1)..(25): SEQ ID NO: 3763; WAN024GLB-3_s_at; Start 2375; Stop 2399
cagctgatgctaatgaagccctaat

SEQ ID NO: 250003 - DNA, 25 bp, Artificial
  probe
  misc_feature (1)..(25): SEQ ID NO: 3763; WAN024GLB-3_s_at; Start 2270; Stop 2294
caaaagtaaaaacagtaccagcagt

SEQ ID NO: 250004 - DNA, 25 bp, Artificial
  probe
  misc_feature (1)..(25): SEQ ID NO: 3763; WAN024GLB-3_s_at; Start 2348; Stop 2372
caagcaaacaattgccaaatacagg

SEQ ID NO: 250005 - DNA, 25 bp, Artificial
  probe
  misc_feature (1)..(25): SEQ ID NO: 3763; WAN024GLB-3_s_at; Start 2432; Stop 2456
tagccttgaccttgagacggaaaag

SEQ ID NO: 250006 - DNA, 25 bp, Artificial
  probe
  misc_feature (1)..(25): SEQ ID NO: 3763; WAN024GLB-3_s_at; Start 2360; Stop 2384
tgccaaatacaggaacagctgatgc

SEQ ID NO: 250007 - DNA, 25 bp, Artificial
  probe
  misc_feature (1)..(25): SEQ ID NO: 3763; WAN024GLB-3_s_at; Start 2248; Stop 2272
ccagaaattgttgaaattggaacaa

SEQ ID NO: 250008 - DNA, 25 bp, Artificial
  probe
  misc_feature (1)..(25): SEQ ID NO: 3763; WAN024GLB-3_s_at; Start 2294; Stop 2318
tagtagctacacaggaaaaaccagc

SEQ ID NO: 250009 - DNA, 25 bp, Artificial
  probe
  misc_feature (1)..(25): SEQ ID NO: 3763; WAN024GLB-3_s_at; Start 2305; Stop 2329
caggaaaaaccagctcaaaatacag

SEQ ID NO: 250010 - DNA, 25 bp, Artificial
  probe
  misc_feature (1)..(25): SEQ ID NO: 3763; WAN024GLB-3_s_at; Start 2396; Stop 2420
taatagcaggcttagccagccttgg

SEQ ID NO: 250011 - DNA, 25 bp, Artificial
  probe
  misc_feature (1)..(25): SEQ ID NO: 3763; WAN024GLB-3_s_at; Start 2391; Stop 2415
agccctaatagcaggcttagccagc

SEQ ID NO: 250012 - DNA, 25 bp, Artificial
  probe
  misc_feature (1)..(25): SEQ ID NO: 3763; WAN024GLB-3_s_at; Start 2429; Stop 2453
gtttagccttgaccttgagacggaa

SEQ ID NO: 250013 - DNA, 25 bp, Artificial
  probe
  misc_feature (1)..(25): SEQ ID NO: 3763; WAN024GLB-3_s_at; Start 2372; Stop 2396
gaacagctgatgctaatgaagccct

SEQ ID NO: 250014 - DNA, 25 bp, Artificial
  probe
  misc_feature (1)..(25): SEQ ID NO: 3763; WAN024GLB-3_s_at; Start 2325; Stop 2349
tacagcagttaaatcagaagaagca

SEQ ID NO: 250015 - DNA, 25 bp, Artificial
  probe
  misc_feature (1)..(25): SEQ ID NO: 1081; WAN024GLB-5_at; Start 2444; Stop 2468
ctttccctaagactgaaggtggaga

SEQ ID NO: 250016 - DNA, 25 bp, Artificial
  probe
  misc_feature (1)..(25): SEQ ID NO: 1081; WAN024GLB-5_at; Start 250; Stop 274
gtagcgacagcatctgaaactgcag

SEQ ID NO: 250017 - DNA, 25 bp, Artificial
  probe
  misc_feature (1)..(25): SEQ ID NO: 1081; WAN024GLB-5_at; Start 2440; Stop 2464
agtactttccctaagactgaaggtg

SEQ ID NO: 250018 - DNA, 25 bp, Artificial
  probe
  misc_feature (1)..(25): SEQ ID NO: 1081; WAN024GLB-5_at; Start 2442; Stop 2466
tactttccctaagactgaaggtgga

SEQ ID NO: 250019 - DNA, 25 bp, Artificial
  probe
  misc_feature (1)..(25): SEQ ID NO: 1081; WAN024GLB-5_at; Start 252; Stop 276
agcgacagcatctgaaactgcagaa

SEQ ID NO: 250020 - DNA, 25 bp, Artificial
  probe
  misc_feature (1)..(25): SEQ ID NO: 1081; WAN024GLB-5_at; Start 2443; Stop 2467
actttccctaagactgaaggtggag

SEQ ID NO: 250021 - DNA, 25 bp, Artificial
  probe
  misc_feature (1)..(25): SEQ ID NO: 1081; WAN024GLB-5_at; Start 253; Stop 277
gcgacagcatctgaaactgcagaag

SEQ ID NO: 250022 - DNA, 25 bp, Artificial
  probe
  misc_feature (1)..(25): SEQ ID NO: 1081; WAN024GLB-5_at; Start 251; Stop 275
tagcgacagcatctgaaactgcaga

SEQ ID NO: 250023 - DNA, 25 bp, Artificial
  probe
  misc_feature (1)..(25): SEQ ID NO: 3586; WAN024GLC-3_s_at; Start 2355; Stop 2379
cagaagaagcaagcaaacaattgcc

SEQ ID NO: 250024 - DNA, 25 bp, Artificial
  probe
  misc_feature (1)..(25): SEQ ID NO: 3586; WAN024GLC-3_s_at; Start 2301; Stop 2325
taccagcagtagtagctacacagga

SEQ ID NO: 250025 - DNA, 25 bp, Artificial
  probe
  misc_feature (1)..(25): SEQ ID NO: 3586; WAN024GLC-3_s_at; Start 2457; Stop 2481
ccttgagacggaaaagagaagataa

SEQ ID NO: 250026 - DNA, 25 bp, Artificial
  probe
  misc_feature (1)..(25): SEQ ID NO: 3586; WAN024GLC-3_s_at; Start 2349; Stop 2373
ttaaatcagaagaagcaagcaaaca

SEQ ID NO: 250027 - DNA, 25 bp, Artificial
  probe
  misc_feature (1)..(25): SEQ ID NO: 3586; WAN024GLC-3_s_at; Start 2379; Stop 2403
caaatacaggaacagctgatgctaa

SEQ ID NO: 250028 - DNA, 25 bp, Artificial
  probe
  misc_feature (1)..(25): SEQ ID NO: 3586; WAN024GLC-3_s_at; Start 2463; Stop 2487
gacggaaaagagaagataaagatta

SEQ ID NO: 250029 - DNA, 25 bp, Artificial
  probe
  misc_feature (1)..(25): SEQ ID NO: 3586; WAN024GLC-3_s_at; Start 2372; Stop 2396
caattgccaaatacaggaacagctg

SEQ ID NO: 250030 - DNA, 25 bp, Artificial
  probe
  misc_feature (1)..(25): SEQ ID NO: 3586; WAN024GLC-3_s_at; Start 2324; Stop 2348
gaaaaaccagctcaaaatacagcag

SEQ ID NO: 250031 - DNA, 25 bp, Artificial
  probe
  misc_feature (1)..(25): SEQ ID NO: 3586; WAN024GLC-3_s_at; Start 2443; Stop 2467
tagtttagccttgaccttgagacgg

SEQ ID NO: 250032 - DNA, 25 bp, Artificial
  probe
  misc_feature (1)..(25): SEQ ID NO: 3586; WAN024GLC-3_s_at; Start 2404; Stop 2428
tgaagccctaatagcaggcttagcc

SEQ ID NO: 250033 - DNA, 25 bp, Artificial
  probe
  misc_feature (1)..(25): SEQ ID NO: 3586; WAN024GLC-3_s_at; Start 2385; Stop 2409
caggaacagctgatgctaatgaagc

SEQ ID NO: 250034 - DNA, 25 bp, Artificial
  probe
  misc_feature (1)..(25): SEQ ID NO: 3586; WAN024GLC-3_s_at; Start 2330; Stop 2354
ccagctcaaaatacagcagttaaat

SEQ ID NO: 250035 - DNA, 25 bp, Artificial
  probe
  misc_feature (1)..(25): SEQ ID NO: 3586; WAN024GLC-3_s_at; Start 2451; Stop 2475
ccttgaccttgagacggaaaagaga

SEQ ID NO: 250036 - DNA, 25 bp, Artificial
  probe
  misc_feature (1)..(25): SEQ ID NO: 3586; WAN024GLC-3_s_at; Start 2296; Stop 2320
aacagtaccagcagtagtagctaca

SEQ ID NO: 250037 - DNA, 25 bp, Artificial
  probe
  misc_feature (1)..(25): SEQ ID NO: 3586; WAN024GLC-3_s_at; Start 2258; Stop 2282
gcgattccagaaattgttgaaattg

SEQ ID NO: 250038 - DNA, 25 bp, Artificial
  probe
  misc_feature (1)..(25): SEQ ID NO: 3586; WAN024GLC-3_s_at; Start 2440; Stop 2464
tgctagtttagccttgaccttgaga

SEQ ID NO: 250039 - DNA, 25 bp, Artificial
  probe
  misc_feature (1)..(25): SEQ ID NO: 3586; WAN024GLC-3_s_at; Start 2399; Stop 2423
gctaatgaagccctaatagcaggct

SEQ ID NO: 250040 - DNA, 25 bp, Artificial
  probe
  misc_feature (1)..(25): SEQ ID NO: 3586; WAN024GLC-3_s_at; Start 2315; Stop 2339
gctacacaggaaaaaccagctcaaa

SEQ ID NO: 250041 - DNA, 25 bp, Artificial
  probe
  misc_feature (1)..(25): SEQ ID NO: 3586; WAN024GLC-3_s_at; Start 2292; Stop 2316
taaaaacagtaccagcagtagtagc

SEQ ID NO: 250042 - DNA, 25 bp, Artificial
  probe
  misc_feature (1)..(25): SEQ ID NO: 3586; WAN024GLC-3_s_at; Start 2307; Stop 2331
cagtagtagctacacaggaaaaacc

SEQ ID NO: 250043 - DNA, 25 bp, Artificial
  probe
  misc_feature (1)..(25): SEQ ID NO: 3586; WAN024GLC-3_s_at; Start 2345; Stop 2369
gcagttaaatcagaagaagcaagca

SEQ ID NO: 250044 - DNA, 25 bp, Artificial
  probe
  misc_feature (1)..(25): SEQ ID NO: 3586; WAN024GLC-3_s_at; Start 2391; Stop 2415
cagctgatgctaatgaagccctaat

SEQ ID NO: 250045 - DNA, 25 bp, Artificial
  probe
  misc_feature (1)..(25): SEQ ID NO: 3586; WAN024GLC-3_s_at; Start 2286; Stop 2310
caaaagtaaaaacagtaccagcagt

SEQ ID NO: 250046 - DNA, 25 bp, Artificial
  probe
  misc_feature (1)..(25): SEQ ID NO: 3586; WAN024GLC-3_s_at; Start 2448; Stop 2472
tagccttgaccttgagacggaaaag

SEQ ID NO: 250047 - DNA, 25 bp, Artificial
  probe
  misc_feature (1)..(25): SEQ ID NO: 3586; WAN024GLC-3_s_at; Start 2376; Stop 2400
tgccaaatacaggaacagctgatgc

SEQ ID NO: 250048 - DNA, 25 bp, Artificial
  probe
  misc_feature (1)..(25): SEQ ID NO: 3586; WAN024GLC-3_s_at; Start 2364; Stop 2388
caagcaaacaattgccaaatacagg

SEQ ID NO: 250049 - DNA, 25 bp, Artificial
  probe
  misc_feature (1)..(25): SEQ ID NO: 3586; WAN024GLC-3_s_at; Start 2264; Stop 2288
ccagaaattgttgaaattggaacaa

SEQ ID NO: 250050 - DNA, 25 bp, Artificial
  probe
  misc_feature (1)..(25): SEQ ID NO: 3586; WAN024GLC-3_s_at; Start 2310; Stop 2334
tagtagctacacaggaaaaaccagc

SEQ ID NO: 250051 - DNA, 25 bp, Artificial
  probe
  misc_feature (1)..(25): SEQ ID NO: 3586; WAN024GLC-3_s_at; Start 2321; Stop 2345
caggaaaaaccagctcaaaatacag

SEQ ID NO: 250052 - DNA, 25 bp, Artificial
  probe
  misc_feature (1)..(25): SEQ ID NO: 3586; WAN024GLC-3_s_at; Start 2412; Stop 2436
taatagcaggcttagccagccttgg

SEQ ID NO: 250053 - DNA, 25 bp, Artificial
  probe
  misc_feature (1)..(25): SEQ ID NO: 3586; WAN024GLC-3_s_at; Start 2407; Stop 2431
agccctaatagcaggcttagccagc

SEQ ID NO: 250054 - DNA, 25 bp, Artificial
  probe
  misc_feature (1)..(25): SEQ ID NO: 3586; WAN024GLC-3_s_at; Start 2445; Stop 2469
gtttagccttgaccttgagacggaa

SEQ ID NO: 250055 - DNA, 25 bp, Artificial
  probe
  misc_feature (1)..(25): SEQ ID NO: 3586; WAN024GLC-3_s_at; Start 2388; Stop 2412
gaacagctgatgctaatgaagccct

SEQ ID NO: 250056 - DNA, 25 bp, Artificial
  probe
  misc_feature (1)..(25): SEQ ID NO: 3586; WAN024GLC-3_s_at; Start 2341; Stop 2365
tacagcagttaaatcagaagaagca

SEQ ID NO: 250057 - DNA, 25 bp, Artificial
  probe
  misc_feature (1)..(25): SEQ ID NO: 1079; WAN024GLC-5_at; Start 258; Stop 282
agcatctgaaactgcttcgccagca

SEQ ID NO: 250058 - DNA, 25 bp, Artificial
  probe
  misc_feature (1)..(25): SEQ ID NO: 1079; WAN024GLC-5_at; Start 264; Stop 288
tgaaactgcttcgccagcaagcaat

SEQ ID NO: 250059 - DNA, 25 bp, Artificial
  probe
  misc_feature (1)..(25): SEQ ID NO: 1079; WAN024GLC-5_at; Start 270; Stop 294
tgcttcgccagcaagcaatgaagct

SEQ ID NO: 250060 - DNA, 25 bp, Artificial
  probe
  misc_feature (1)..(25): SEQ ID NO: 1079; WAN024GLC-5_at; Start 266; Stop 290
aaactgcttcgccagcaagcaatga

SEQ ID NO: 250061 - DNA, 25 bp, Artificial
  probe
  misc_feature (1)..(25): SEQ ID NO: 1079; WAN024GLC-5_at; Start 281; Stop 305
caagcaatgaagctgcaactactga

SEQ ID NO: 250062 - DNA, 25 bp, Artificial
  probe
  misc_feature (1)..(25): SEQ ID NO: 1079; WAN024GLC-5_at; Start 261; Stop 285
atctgaaactgcttcgccagcaagc

SEQ ID NO: 250063 - DNA, 25 bp, Artificial
  probe
  misc_feature (1)..(25): SEQ ID NO: 1079; WAN024GLC-5_at; Start 288; Stop 312
tgaagctgcaactactgaaactgca

SEQ ID NO: 250064 - DNA, 25 bp, Artificial
  probe
  misc_feature (1)..(25): SEQ ID NO: 1079; WAN024GLC-5_at; Start 263; Stop 287
ctgaaactgcttcgccagcaagcaa

SEQ ID NO: 250065 - DNA, 25 bp, Artificial
  probe
  misc_feature (1)..(25): SEQ ID NO: 1079; WAN024GLC-5_at; Start 259; Stop 283
gcatctgaaactgcttcgccagcaa

SEQ ID NO: 250066 - DNA, 25 bp, Artificial
  probe
  misc_feature (1)..(25): SEQ ID NO: 1079; WAN024GLC-5_at; Start 276; Stop 300
gccagcaagcaatgaagctgcaact

SEQ ID NO: 250067 - DNA, 25 bp, Artificial
  probe
  misc_feature (1)..(25): SEQ ID NO: 1079; WAN024GLC-5_at; Start 285; Stop 309
caatgaagctgcaactactgaaact

SEQ ID NO: 250068 - DNA, 25 bp, Artificial
  probe
  misc_feature (1)..(25): SEQ ID NO: 1079; WAN024GLC-5_at; Start 286; Stop 310
aatgaagctgcaactactgaaactg

SEQ ID NO: 250069 - DNA, 25 bp, Artificial
  probe
  misc_feature (1)..(25): SEQ ID NO: 1079; WAN024GLC-5_at; Start 280; Stop 304
gcaagcaatgaagctgcaactactg

SEQ ID NO: 250070 - DNA, 25 bp, Artificial
  probe
  misc_feature (1)..(25): SEQ ID NO: 1079; WAN024GLC-5_at; Start 268; Stop 292
actgcttcgccagcaagcaatgaag

SEQ ID NO: 250071 - DNA, 25 bp, Artificial
  probe
  misc_feature (1)..(25): SEQ ID NO: 1079; WAN024GLC-5_at; Start 291; Stop 315
agctgcaactactgaaactgcagaa

SEQ ID NO: 250072 - DNA, 25 bp, Artificial
  probe
  misc_feature (1)..(25): SEQ ID NO: 1079; WAN024GLC-5_at; Start 275; Stop 299
cgccagcaagcaatgaagctgcaac

SEQ ID NO: 250073 - DNA, 25 bp, Artificial
  probe
  misc_feature (1)..(25): SEQ ID NO: 1079; WAN024GLC-5_at; Start 262; Stop 286
tctgaaactgcttcgccagcaagca

SEQ ID NO: 250074 - DNA, 25 bp, Artificial
  probe
  misc_feature (1)..(25): SEQ ID NO: 1079; WAN024GLC-5_at; Start 278; Stop 302
cagcaagcaatgaagctgcaactac

SEQ ID NO: 250075 - DNA, 25 bp, Artificial
  probe
  misc_feature (1)..(25): SEQ ID NO: 1079; WAN024GLC-5_at; Start 273; Stop 297
ttcgccagcaagcaatgaagctgca

SEQ ID NO: 250076 - DNA, 25 bp, Artificial
  probe
  misc_feature (1)..(25): SEQ ID NO: 1079; WAN024GLC-5_at; Start 272; Stop 296
cttcgccagcaagcaatgaagctgc

SEQ ID NO: 250077 - DNA, 25 bp, Artificial
  probe
  misc_feature (1)..(25): SEQ ID NO: 1079; WAN024GLC-5_at; Start 271; Stop 295
gcttcgccagcaagcaatgaagctg

SEQ ID NO: 250078 - DNA, 25 bp, Artificial
  probe
  misc_feature (1)..(25): SEQ ID NO: 1079; WAN024GLC-5_at; Start 290; Stop 314
aagctgcaactactgaaactgcaga

SEQ ID NO: 250079 - DNA, 25 bp, Artificial
  probe
  misc_feature (1)..(25): SEQ ID NO: 1079; WAN024GLC-5_at; Start 277; Stop 301
ccagcaagcaatgaagctgcaacta

SEQ ID NO: 250080 - DNA, 25 bp, Artificial
  probe
  misc_feature (1)..(25): SEQ ID NO: 1079; WAN024GLC-5_at; Start 267; Stop 291
aactgcttcgccagcaagcaatgaa

SEQ ID NO: 250081 - DNA, 25 bp, Artificial
  probe
  misc_feature (1)..(25): SEQ ID NO: 1079; WAN024GLC-5_at; Start 284; Stop 308
gcaatgaagctgcaactactgaaac

SEQ ID NO: 250082 - DNA, 25 bp, Artificial
  probe
  misc_feature (1)..(25): SEQ ID NO: 1079; WAN024GLC-5_at; Start 269; Stop 293
ctgcttcgccagcaagcaatgaagc

SEQ ID NO: 250083 - DNA, 25 bp, Artificial
  probe
  misc_feature (1)..(25): SEQ ID NO: 1079; WAN024GLC-5_at; Start 289; Stop 313
gaagctgcaactactgaaactgcag

SEQ ID NO: 250084 - DNA, 25 bp, Artificial
  probe
  misc_feature (1)..(25): SEQ ID NO: 1079; WAN024GLC-5_at; Start 274; Stop 298
tcgccagcaagcaatgaagctgcaa

SEQ ID NO: 250085 - DNA, 25 bp, Artificial
  probe
  misc_feature (1)..(25): SEQ ID NO: 1079; WAN024GLC-5_at; Start 287; Stop 311
atgaagctgcaactactgaaactgc

SEQ ID NO: 250086 - DNA, 25 bp, Artificial
  probe
  misc_feature (1)..(25): SEQ ID NO: 1079; WAN024GLC-5_at; Start 283; Stop 307
agcaatgaagctgcaactactgaaa

SEQ ID NO: 250087 - DNA, 25 bp, Artificial
  probe
  misc_feature (1)..(25): SEQ ID NO: 1079; WAN024GLC-5_at; Start 260; Stop 284
catctgaaactgcttcgccagcaag

SEQ ID NO: 250088 - DNA, 25 bp, Artificial
  probe
  misc_feature (1)..(25): SEQ ID NO: 1079; WAN024GLC-5_at; Start 279; Stop 303
agcaagcaatgaagctgcaactact

SEQ ID NO: 250089 - DNA, 25 bp, Artificial
  probe
  misc_feature (1)..(25): SEQ ID NO: 1079; WAN024GLC-5_at; Start 282; Stop 306
aagcaatgaagctgcaactactgaa

SEQ ID NO: 250090 - DNA, 25 bp, Artificial
  probe
  misc_feature (1)..(25): SEQ ID NO: 1079; WAN024GLC-5_at; Start 292; Stop 316
gctgcaactactgaaactgcagaag

SEQ ID NO: 250091 - DNA, 25 bp, Artificial
  probe
  misc_feature (1)..(25): SEQ ID NO: 2886; WAN024GLD_at; Start 446; Stop 470
tcaatctcatgagcggcgcaatggc

SEQ ID NO: 250092 - DNA, 25 bp, Artificial
  probe
  misc_feature (1)..(25): SEQ ID NO: 2886; WAN024GLD_at; Start 402; Stop 426
tatcggacgcatcctctttggtgtc

SEQ ID NO: 250093 - DNA, 25 bp, Artificial
  probe
  misc_feature (1)..(25): SEQ ID NO: 2886; WAN024GLD_at; Start 260; Stop 284
ctatcgggattgtcatgggtgctaa

SEQ ID NO: 250094 - DNA, 25 bp, Artificial
  probe
  misc_feature (1)..(25): SEQ ID NO: 2886; WAN024GLD_at; Start 230; Stop 254
tcagtgccggtctcttaaccttacg

SEQ ID NO: 250095 - DNA, 25 bp, Artificial
  probe
  misc_feature (1)..(25): SEQ ID NO: 2886; WAN024GLD_at; Start 1180; Stop 1204
tatctcattgccctttcaagcgaag

SEQ ID NO: 250096 - DNA, 25 bp, Artificial
  probe
  misc_feature (1)..(25): SEQ ID NO: 2886; WAN024GLD_at; Start 829; Stop 853
aatctagcaccggaaatgaccatcg

SEQ ID NO: 250097 - DNA, 25 bp, Artificial
  probe
  misc_feature (1)..(25): SEQ ID NO: 2886; WAN024GLD_at; Start 460; Stop 484
ggcgcaatggctccactcaaggatt

SEQ ID NO: 250098 - DNA, 25 bp, Artificial
  probe
  misc_feature (1)..(25): SEQ ID NO: 2886; WAN024GLD_at; Start 1299; Stop 1323
tctgactgactatcttcaacggaaa

SEQ ID NO: 250099 - DNA, 25 bp, Artificial
  probe
  misc_feature (1)..(25): SEQ ID NO: 2886; WAN024GLD_at; Start 1585; Stop 1609
gaccacgctatgaaccttgctgaaa

SEQ ID NO: 250100 - DNA, 25 bp, Artificial
  probe
  misc_feature (1)..(25): SEQ ID NO: 2886; WAN024GLD_at; Start 91; Stop 115
caacaagctgctggagatcgccttc

SEQ ID NO: 250101 - DNA, 25 bp, Artificial
  probe
  misc_feature (1)..(25): SEQ ID NO: 2886; WAN024GLD_at; Start 245; Stop 269
taaccttacgtcaggctatcgggat

SEQ ID NO: 250102 - DNA, 25 bp, Artificial
  probe
  misc_feature (1)..(25): SEQ ID NO: 2886; WAN024GLD_at; Start 1144; Stop 1168
gaagcaattaacaccatcgatgagc

SEQ ID NO: 250103 - DNA, 25 bp, Artificial
  probe
  misc_feature (1)..(25): SEQ ID NO: 2886; WAN024GLD_at; Start 1423; Stop 1447
gatattgaaaaagcacgcagtcttg

SEQ ID NO: 250104 - DNA, 25 bp, Artificial
  probe
  misc_feature (1)..(25): SEQ ID NO: 2886; WAN024GLD_at; Start 845; Stop 869
tgaccatcgcctttgctcacggaac

SEQ ID NO: 250105 - DNA, 25 bp, Artificial
  probe
  misc_feature (1)..(25): SEQ ID NO: 2886; WAN024GLD_at; Start 387; Stop 411
tcggacagtcaataatatcggacgc

SEQ ID NO: 250106 - DNA, 25 bp, Artificial
  probe
  misc_feature (1)..(25): SEQ ID NO: 2886; WAN024GLD_at; Start 1477; Stop 1501
gaacgtgttctcagaaaaacccaca

SEQ ID NO: 250107 - DNA, 25 bp, Artificial
  probe
  misc_feature (1)..(25): SEQ ID NO: 2886; WAN024GLD_at; Start 681; Stop 705
tacagccatcattgcctctttaggg

SEQ ID NO: 250108 - DNA, 25 bp, Artificial
  probe
  misc_feature (1)..(25): SEQ ID NO: 2886; WAN024GLD_at; Start 901; Stop 925
ccatttatcggagctctggcttact

SEQ ID NO: 250109 - DNA, 25 bp, Artificial
  probe
  misc_feature (1)..(25): SEQ ID NO: 2886; WAN024GLD_at; Start 572; Stop 596
aagcttcttcggctaccattgggat

SEQ ID NO: 250110 - DNA, 25 bp, Artificial
  probe
  misc_feature (1)..(25): SEQ ID NO: 2886; WAN024GLD_at; Start 1039; Stop 1063
gagctcttgcacttaggaaactacg

SEQ ID NO: 250111 - DNA, 25 bp, Artificial
  probe
  misc_feature (1)..(25): SEQ ID NO: 2886; WAN024GLD_at; Start 939; Stop 963
tattcctggagaggacgaggttgtc

SEQ ID NO: 250112 - DNA, 25 bp, Artificial
  probe
  misc_feature (1)..(25): SEQ ID NO: 2886; WAN024GLD_at; Start 1268; Stop 1292
ggattggagaccacacggaggctct

SEQ ID NO: 250113 - DNA, 25 bp, Artificial
  probe
  misc_feature (1)..(25): SEQ ID NO: 2886; WAN024GLD_at; Start 1201; Stop 1225
gaagctctcagccaaaaagaaagtg

SEQ ID NO: 250114 - DNA, 25 bp, Artificial
  probe
  misc_feature (1)..(25): SEQ ID NO: 2886; WAN024GLD_at; Start 277; Stop 301
ggtgctaatattgggacaactgtca

SEQ ID NO: 250115 - DNA, 25 bp, Artificial
  probe
  misc_feature (1)..(25): SEQ ID NO: 2886; WAN024GLD_at; Start 1440; Stop 1464
cagtcttgtagaacgtcatgaagca

SEQ ID NO: 250116 - DNA, 25 bp, Artificial
  probe
  misc_feature (1)..(25): SEQ ID NO: 2886; WAN024GLD_at; Start 1055; Stop 1079
gaaactacgctgctaaagcctttga

SEQ ID NO: 250117 - DNA, 25 bp, Artificial
  probe
  misc_feature (1)..(25): SEQ ID NO: 2886; WAN024GLD_at; Start 61; Stop 85
tatagcatcaagaccatgggagacg

SEQ ID NO: 250118 - DNA, 25 bp, Artificial
  probe
  misc_feature (1)..(25): SEQ ID NO: 2886; WAN024GLD_at; Start 716; Stop 740
cagctaaacgggtagcaggagctca

SEQ ID NO: 250119 - DNA, 25 bp, Artificial
  probe
  misc_feature (1)..(25): SEQ ID NO: 2886; WAN024GLD_at; Start 1396; Stop 1420
gatgctctggatagtgtggaaaaca

SEQ ID NO: 250120 - DNA, 25 bp, Artificial
  probe
  misc_feature (1)..(25): SEQ ID NO: 2886; WAN024GLD_at; Start 1283; Stop 1307
cggaggctctactcaatctgactga

SEQ ID NO: 250121 - DNA, 25 bp, Artificial
  probe
  misc_feature (1)..(25): SEQ ID NO: 2886; WAN024GLD_at; Start 1246; Stop 1270
gattcctcccgtgatttggaacgga

SEQ ID NO: 250122 - DNA, 25 bp, Artificial
  probe
  misc_feature (1)..(25): SEQ ID NO: 2886; WAN024GLD_at; Start 666; Stop 690
tatcgggacaaccattacagccatc

SEQ ID NO: 250123 - DNA, 25 bp, Artificial
  probe
  misc_feature (1)..(25): SEQ ID NO: 2886; WAN024GLD_at; Start 1338; Stop 1362
tgatgccgccttgaaagaattagag

SEQ ID NO: 250124 - DNA, 25 bp, Artificial
  probe
  misc_feature (1)..(25): SEQ ID NO: 2886; WAN024GLD_at; Start 1323; Stop 1347
aaatgttgaattttctgatgccgcc

SEQ ID NO: 250125 - DNA, 25 bp, Artificial
  probe
  misc_feature (1)..(25): SEQ ID NO: 1719; WAN024GLE_at; Start 123; Stop 147
tatttttaattccttgaccagctgg

SEQ ID NO: 250126 - DNA, 25 bp, Artificial
  probe
  misc_feature (1)..(25): SEQ ID NO: 1719; WAN024GLE_at; Start 239; Stop 263
ccagcagccttgaggtaaggaagca

SEQ ID NO: 250127 - DNA, 25 bp, Artificial
  probe
  misc_feature (1)..(25): SEQ ID NO: 1719; WAN024GLE_at; Start 60; Stop 84
ggtgttcaacatccaacgattcgat

SEQ ID NO: 250128 - DNA, 25 bp, Artificial
  probe
  misc_feature (1)..(25): SEQ ID NO: 1719; WAN024GLE_at; Start 26; Stop 50
ccttgtgcctgcaagttcagtggaa

SEQ ID NO: 250129 - DNA, 25 bp, Artificial
  probe
  misc_feature (1)..(25): SEQ ID NO: 1719; WAN024GLE_at; Start 187; Stop 211
caagccacgcaattctttgacagag

SEQ ID NO: 250130 - DNA, 25 bp, Artificial
  probe
  misc_feature (1)..(25): SEQ ID NO: 1719; WAN024GLE_at; Start 98; Stop 122
gccacatcacagaactgggccagtt

SEQ ID NO: 250131 - DNA, 25 bp, Artificial
  probe
  misc_feature (1)..(25): SEQ ID NO: 1719; WAN024GLE_at; Start 262; Stop 286
caaggttgtatggatatacatgaca

SEQ ID NO: 250132 - DNA, 25 bp, Artificial
  probe
  misc_feature (1)..(25): SEQ ID NO: 1719; WAN024GLE_at; Start 146; Stop 170
ggctcttctgtacgaataaccaaca

SEQ ID NO: 250133 - DNA, 25 bp, Artificial
  probe
  misc_feature (1)..(25): SEQ ID NO: 1719; WAN024GLE_at; Start 13; Stop 37
aatttggtccatcccttgtgcctgc

SEQ ID NO: 250134 - DNA, 25 bp, Artificial
  probe
  misc_feature (1)..(25): SEQ ID NO: 1719; WAN024GLE_at; Start 42; Stop 66
tcagtggaatttggtaaaggtgttc

SEQ ID NO: 250135 - DNA, 25 bp, Artificial
  probe
  misc_feature (1)..(25): SEQ ID NO: 1719; WAN024GLE_at; Start 297; Stop 321
ccacatctgccttcatctgacgaag

SEQ ID NO: 250136 - DNA, 25 bp, Artificial
  probe
  misc_feature (1)..(25): SEQ ID NO: 1719; WAN024GLE_at; Start 92; Stop 116
tctggtgccacatcacagaactggg

SEQ ID NO: 250137 - DNA, 25 bp, Artificial
  probe
  misc_feature (1)..(25): SEQ ID NO: 1719; WAN024GLE_at; Start 177; Stop 201
gttggattcccaagccacgcaattc

SEQ ID NO: 250138 - DNA, 25 bp, Artificial
  probe
  misc_feature (1)..(25): SEQ ID NO: 1719; WAN024GLE_at; Start 221; Stop 245
ggtttggttttcatttcaccagcag

SEQ ID NO: 250139 - DNA, 25 bp, Artificial
  probe
  misc_feature (1)..(25): SEQ ID NO: 1719; WAN024GLE_at; Start 127; Stop 151
tttaattccttgaccagctggctct

SEQ ID NO: 250140 - DNA, 25 bp, Artificial
  probe
  misc_feature (1)..(25): SEQ ID NO: 1719; WAN024GLE_at; Start 153; Stop 177
ctgtacgaataaccaacatatttgg

SEQ ID NO: 250141 - DNA, 25 bp, Artificial
  probe
  misc_feature (1)..(25): SEQ ID NO: 1719; WAN024GLE_at; Start 229; Stop 253
tttcatttcaccagcagccttgagg

SEQ ID NO: 250142 - DNA, 25 bp, Artificial
  probe
  misc_feature (1)..(25): SEQ ID NO: 1719; WAN024GLE_at; Start 138; Stop 162
gaccagctggctcttctgtacgaat

SEQ ID NO: 250143 - DNA, 25 bp, Artificial
  probe
  misc_feature (1)..(25): SEQ ID NO: 1719; WAN024GLE_at; Start 102; Stop 126
catcacagaactgggccagtttatt

SEQ ID NO: 250144 - DNA, 25 bp, Artificial
  probe
  misc_feature (1)..(25): SEQ ID NO: 1719; WAN024GLE_at; Start 53; Stop 77
tggtaaaggtgttcaacatccaacg

SEQ ID NO: 250145 - DNA, 25 bp, Artificial
  probe
  misc_feature (1)..(25): SEQ ID NO: 1719; WAN024GLE_at; Start 84; Stop 108
taacggcttctggtgccacatcaca

SEQ ID NO: 250146 - DNA, 25 bp, Artificial
  probe
  misc_feature (1)..(25): SEQ ID NO: 1719; WAN024GLE_at; Start 65; Stop 89
tcaacatccaacgattcgataacgg

SEQ ID NO: 250147 - DNA, 25 bp, Artificial
  probe
  misc_feature (1)..(25): SEQ ID NO: 1719; WAN024GLE_at; Start 300; Stop 324
catctgccttcatctgacgaagagc

SEQ ID NO: 250148 - DNA, 25 bp, Artificial
  probe
  misc_feature (1)..(25): SEQ ID NO: 1719; WAN024GLE_at; Start 17; Stop 41
tggtccatcccttgtgcctgcaagt

SEQ ID NO: 250149 - DNA, 25 bp, Artificial
  probe
  misc_feature (1)..(25): SEQ ID NO: 1719; WAN024GLE_at; Start 73; Stop 97
caacgattcgataacggcttctggt

SEQ ID NO: 250150 - DNA, 25 bp, Artificial
  probe
  misc_feature (1)..(25): SEQ ID NO: 1719; WAN024GLE_at; Start 2; Stop 26
tgatcacaaacaatttggtccatcc

SEQ ID NO: 250151 - DNA, 25 bp, Artificial
  probe
  misc_feature (1)..(25): SEQ ID NO: 1719; WAN024GLE_at; Start 247; Stop 271
cttgaggtaaggaagcaaggttgta

SEQ ID NO: 250152 - DNA, 25 bp, Artificial
  probe
  misc_feature (1)..(25): SEQ ID NO: 1719; WAN024GLE_at; Start 171; Stop 195
tatttggttggattcccaagccacg

SEQ ID NO: 250153 - DNA, 25 bp, Artificial
  probe
  misc_feature (1)..(25): SEQ ID NO: 1719; WAN024GLE_at; Start 276; Stop 300
tatacatgacattatccgcacccac

SEQ ID NO: 250154 - DNA, 25 bp, Artificial
  probe
  misc_feature (1)..(25): SEQ ID NO: 1719; WAN024GLE_at; Start 79; Stop 103
ttcgataacggcttctggtgccaca

SEQ ID NO: 250155 - DNA, 25 bp, Artificial
  probe
  misc_feature (1)..(25): SEQ ID NO: 1719; WAN024GLE_at; Start 194; Stop 218
cgcaattctttgacagagtgttggg

SEQ ID NO: 250156 - DNA, 25 bp, Artificial
  probe
  misc_feature (1)..(25): SEQ ID NO: 1719; WAN024GLE_at; Start 33; Stop 57
cctgcaagttcagtggaatttggta

SEQ ID NO: 250157 - DNA, 25 bp, Artificial
  probe
  misc_feature (1)..(25): SEQ ID NO: 1719; WAN024GLE_at; Start 166; Stop 190
caacatatttggttggattcccaag

SEQ ID NO: 250158 - DNA, 25 bp, Artificial
  probe
  misc_feature (1)..(25): SEQ ID NO: 1719; WAN024GLE_at; Start 200; Stop 224
tctttgacagagtgttgggttggtt

SEQ ID NO: 250159 - DNA, 25 bp, Artificial
  probe
  misc_feature (1)..(25): SEQ ID NO: 3935; WAN024GLF_at; Start 95; Stop 119
ttcccttctgtaccacgttgaccaa

SEQ ID NO: 250160 - DNA, 25 bp, Artificial
  probe
  misc_feature (1)..(25): SEQ ID NO: 3935; WAN024GLF_at; Start 112; Stop 136
ttgaccaaaaccacctggtacgatg

SEQ ID NO: 250161 - DNA, 25 bp, Artificial
  probe
  misc_feature (1)..(25): SEQ ID NO: 3935; WAN024GLF_at; Start 22; Stop 46
tgtcaactgcattcccaagcagact

SEQ ID NO: 250162 - DNA, 25 bp, Artificial
  probe
  misc_feature (1)..(25): SEQ ID NO: 3935; WAN024GLF_at; Start 118; Stop 142
aaaaccacctggtacgatgatcccg

SEQ ID NO: 250163 - DNA, 25 bp, Artificial
  probe
  misc_feature (1)..(25): SEQ ID NO: 3935; WAN024GLF_at; Start 6; Stop 30
gagcaaactcgatacatgtcaactg

SEQ ID NO: 250164 - DNA, 25 bp, Artificial
  probe
  misc_feature (1)..(25): SEQ ID NO: 3935; WAN024GLF_at; Start 158; Stop 182
agttctgctacattctctgctgtca

SEQ ID NO: 250165 - DNA, 25 bp, Artificial
  probe
  misc_feature (1)..(25): SEQ ID NO: 3935; WAN024GLF_at; Start 226; Stop 250
gacatagccagagtgtttcaaggct

SEQ ID NO: 250166 - DNA, 25 bp, Artificial
  probe
  misc_feature (1)..(25): SEQ ID NO: 3935; WAN024GLF_at; Start 75; Stop 99
catagcggatggcttggattttccc

SEQ ID NO: 250167 - DNA, 25 bp, Artificial
  probe
  misc_feature (1)..(25): SEQ ID NO: 3935; WAN024GLF_at; Start 85; Stop 109
ggcttggattttcccttctgtacca

SEQ ID NO: 250168 - DNA, 25 bp, Artificial
  probe
  misc_feature (1)..(25): SEQ ID NO: 3935; WAN024GLF_at; Start 16; Stop 40
gatacatgtcaactgcattcccaag

SEQ ID NO: 250169 - DNA, 25 bp, Artificial
  probe
  misc_feature (1)..(25): SEQ ID NO: 3935; WAN024GLF_at; Start 63; Stop 87
cattttcacgcgcatagcggatggc

SEQ ID NO: 250170 - DNA, 25 bp, Artificial
  probe
  misc_feature (1)..(25): SEQ ID NO: 3935; WAN024GLF_at; Start 233; Stop 257
ccagagtgtttcaaggcttcgacca

SEQ ID NO: 250171 - DNA, 25 bp, Artificial
  probe
  misc_feature (1)..(25): SEQ ID NO: 3935; WAN024GLF_at; Start 58; Stop 82
aacatcattttcacgcgcatagcgg

SEQ ID NO: 250172 - DNA, 25 bp, Artificial
  probe
  misc_feature (1)..(25): SEQ ID NO: 3935; WAN024GLF_at; Start 1; Stop 25
gtgacgagcaaactcgatacatgtc

SEQ ID NO: 250173 - DNA, 25 bp, Artificial
  probe
  misc_feature (1)..(25): SEQ ID NO: 3935; WAN024GLF_at; Start 120; Stop 144
aaccacctggtacgatgatcccgtc

SEQ ID NO: 250174 - DNA, 25 bp, Artificial
  probe
  misc_feature (1)..(25): SEQ ID NO: 3935; WAN024GLF_at; Start 91; Stop 115
gattttcccttctgtaccacgttga

SEQ ID NO: 250175 - DNA, 25 bp, Artificial
  probe
  misc_feature (1)..(25): SEQ ID NO: 3935; WAN024GLF_at; Start 135; Stop 159
tgatcccgtccgcatcagacaagag

SEQ ID NO: 250176 - DNA, 25 bp, Artificial
  probe
  misc_feature (1)..(25): SEQ ID NO: 3935; WAN024GLF_at; Start 37; Stop 61
caagcagactcccaacattggaaca

SEQ ID NO: 250177 - DNA, 25 bp, Artificial
  probe
  misc_feature (1)..(25): SEQ ID NO: 3935; WAN024GLF_at; Start 173; Stop 197
tctgctgtcacatcattggcattga

SEQ ID NO: 250178 - DNA, 25 bp, Artificial
  probe
  misc_feature (1)..(25): SEQ ID NO: 3935; WAN024GLF_at; Start 189; Stop 213
tggcattgacccaattgattttaac

SEQ ID NO: 250179 - DNA, 25 bp, Artificial
  probe
  misc_feature (1)..(25): SEQ ID NO: 3935; WAN024GLF_at; Start 52; Stop 76
cattggaacatcattttcacgcgca

SEQ ID NO: 250180 - DNA, 25 bp, Artificial
  probe
  misc_feature (1)..(25): SEQ ID NO: 3935; WAN024GLF_at; Start 101; Stop 125
tctgtaccacgttgaccaaaaccac

SEQ ID NO: 250181 - DNA, 25 bp, Artificial
  probe
  misc_feature (1)..(25): SEQ ID NO: 3935; WAN024GLF_at; Start 127; Stop 151
tggtacgatgatcccgtccgcatca

SEQ ID NO: 250182 - DNA, 25 bp, Artificial
  probe
  misc_feature (1)..(25): SEQ ID NO: 3935; WAN024GLF_at; Start 168; Stop 192
cattctctgctgtcacatcattggc

SEQ ID NO: 250183 - DNA, 25 bp, Artificial
  probe
  misc_feature (1)..(25): SEQ ID NO: 3935; WAN024GLF_at; Start 67; Stop 91
ttcacgcgcatagcggatggcttgg

SEQ ID NO: 250184 - DNA, 25 bp, Artificial
  probe
  misc_feature (1)..(25): SEQ ID NO: 3935; WAN024GLF_at; Start 178; Stop 202
tgtcacatcattggcattgacccaa

SEQ ID NO: 250185 - DNA, 25 bp, Artificial
  probe
  misc_feature (1)..(25): SEQ ID NO: 3935; WAN024GLF_at; Start 143; Stop 167
tccgcatcagacaagagttctgcta

SEQ ID NO: 250186 - DNA, 25 bp, Artificial
  probe
  misc_feature (1)..(25): SEQ ID NO: 3935; WAN024GLF_at; Start 33; Stop 57
ttcccaagcagactcccaacattgg

SEQ ID NO: 250187 - DNA, 25 bp, Artificial
  probe
  misc_feature (1)..(25): SEQ ID NO: 3935; WAN024GLF_at; Start 219; Stop 243
catcattgacatagccagagtgttt

SEQ ID NO: 250188 - DNA, 25 bp, Artificial
  probe
  misc_feature (1)..(25): SEQ ID NO: 3935; WAN024GLF_at; Start 79; Stop 103
gcggatggcttggattttcccttct

SEQ ID NO: 250189 - DNA, 25 bp, Artificial
  probe
  misc_feature (1)..(25): SEQ ID NO: 3935; WAN024GLF_at; Start 192; Stop 216
cattgacccaattgattttaacttc

SEQ ID NO: 250190 - DNA, 25 bp, Artificial
  probe
  misc_feature (1)..(25): SEQ ID NO: 3935; WAN024GLF_at; Start 237; Stop 261
agtgtttcaaggcttcgaccactga

SEQ ID NO: 250191 - DNA, 25 bp, Artificial
  probe
  misc_feature (1)..(25): SEQ ID NO: 3935; WAN024GLF_at; Start 152; Stop 176
gacaagagttctgctacattctctg

SEQ ID NO: 250192 - DNA, 25 bp, Artificial
  probe
  misc_feature (1)..(25): SEQ ID NO: 3935; WAN024GLF_at; Start 138; Stop 162
tcccgtccgcatcagacaagagttc

SEQ ID NO: 250193 - DNA, 25 bp, Artificial
  probe
  misc_feature (1)..(25): SEQ ID NO: 1580; WAN024GLG_at; Start 76; Stop 100
cccagttgtcacgttggaatatttg

SEQ ID NO: 250194 - DNA, 25 bp, Artificial
  probe
  misc_feature (1)..(25): SEQ ID NO: 1580; WAN024GLG_at; Start 56; Stop 80
agaacttcactgtaaattttcccag

SEQ ID NO: 250195 - DNA, 25 bp, Artificial
  probe
  misc_feature (1)..(25): SEQ ID NO: 1580; WAN024GLG_at; Start 152; Stop 176
tcagctccgtcatctgtcacaaaaa

SEQ ID NO: 250196 - DNA, 25 bp, Artificial
  probe
  misc_feature (1)..(25): SEQ ID NO: 1580; WAN024GLG_at; Start 6; Stop 30
gaatgacttgaacagttgccccaag

SEQ ID NO: 250197 - DNA, 25 bp, Artificial
  probe
  misc_feature (1)..(25): SEQ ID NO: 1580; WAN024GLG_at; Start 199; Stop 223
catggttcccggatcaatattgata

SEQ ID NO: 250198 - DNA, 25 bp, Artificial
  probe
  misc_feature (1)..(25): SEQ ID NO: 1580; WAN024GLG_at; Start 143; Stop 167
aaatctgtctcagctccgtcatctg

SEQ ID NO: 250199 - DNA, 25 bp, Artificial
  probe
  misc_feature (1)..(25): SEQ ID NO: 1580; WAN024GLG_at; Start 237; Stop 261
tttgaatggttactttgagaccacg

SEQ ID NO: 250200 - DNA, 25 bp, Artificial
  probe
  misc_feature (1)..(25): SEQ ID NO: 1580; WAN024GLG_at; Start 220; Stop 244
gatataagggtcaaacttttgaatg

SEQ ID NO: 250201 - DNA, 25 bp, Artificial
  probe
  misc_feature (1)..(25): SEQ ID NO: 1580; WAN024GLG_at; Start 252; Stop 276
tgagaccacgatttttcaagagacg

SEQ ID NO: 250202 - DNA, 25 bp, Artificial
  probe
  misc_feature (1)..(25): SEQ ID NO: 1580; WAN024GLG_at; Start 125; Stop 149
tcatagtgacccaagtccaaatctg

SEQ ID NO: 250203 - DNA, 25 bp, Artificial
  probe
  misc_feature (1)..(25): SEQ ID NO: 1580; WAN024GLG_at; Start 185; Stop 209
tgctggtaaggactcatggttcccg

SEQ ID NO: 250204 - DNA, 25 bp, Artificial
  probe
  misc_feature (1)..(25): SEQ ID NO: 1580; WAN024GLG_at; Start 131; Stop 155
tgacccaagtccaaatctgtctcag

SEQ ID NO: 250205 - DNA, 25 bp, Artificial
  probe
  misc_feature (1)..(25): SEQ ID NO: 1580; WAN024GLG_at; Start 19; Stop 43
agttgccccaaggtattctccacgg

SEQ ID NO: 250206 - DNA, 25 bp, Artificial
  probe
  misc_feature (1)..(25): SEQ ID NO: 1580; WAN024GLG_at; Start 118; Stop 142
gaaacgttcatagtgacccaagtcc

SEQ ID NO: 250207 - DNA, 25 bp, Artificial
  probe
  misc_feature (1)..(25): SEQ ID NO: 1580; WAN024GLG_at; Start 255; Stop 279
gaccacgatttttcaagagacggcc

SEQ ID NO: 250208 - DNA, 25 bp, Artificial
  probe
  misc_feature (1)..(25): SEQ ID NO: 1580; WAN024GLG_at; Start 10; Stop 34
gacttgaacagttgccccaaggtat

SEQ ID NO: 250209 - DNA, 25 bp, Artificial
  probe
  misc_feature (1)..(25): SEQ ID NO: 1580; WAN024GLG_at; Start 176; Stop 200
acttccccgtgctggtaaggactca

SEQ ID NO: 250210 - DNA, 25 bp, Artificial
  probe
  misc_feature (1)..(25): SEQ ID NO: 1580; WAN024GLG_at; Start 180; Stop 204
ccccgtgctggtaaggactcatggt

SEQ ID NO: 250211 - DNA, 25 bp, Artificial
  probe
  misc_feature (1)..(25): SEQ ID NO: 1580; WAN024GLG_at; Start 258; Stop 282
cacgatttttcaagagacggcctag

SEQ ID NO: 250212 - DNA, 25 bp, Artificial
  probe
  misc_feature (1)..(25): SEQ ID NO: 1580; WAN024GLG_at; Start 207; Stop 231
ccggatcaatattgatataagggtc

SEQ ID NO: 250213 - DNA, 25 bp, Artificial
  probe
  misc_feature (1)..(25): SEQ ID NO: 1580; WAN024GLG_at; Start 15; Stop 39
gaacagttgccccaaggtattctcc

SEQ ID NO: 250214 - DNA, 25 bp, Artificial
  probe
  misc_feature (1)..(25): SEQ ID NO: 1580; WAN024GLG_at; Start 64; Stop 88
actgtaaattttcccagttgtcacg

SEQ ID NO: 250215 - DNA, 25 bp, Artificial
  probe
  misc_feature (1)..(25): SEQ ID NO: 1580; WAN024GLG_at; Start 191; Stop 215
taaggactcatggttcccggatcaa

SEQ ID NO: 250216 - DNA, 25 bp, Artificial
  probe
  misc_feature (1)..(25): SEQ ID NO: 1580; WAN024GLG_at; Start 115; Stop 139
gatgaaacgttcatagtgacccaag

SEQ ID NO: 250217 - DNA, 25 bp, Artificial
  probe
  misc_feature (1)..(25): SEQ ID NO: 1580; WAN024GLG_at; Start 27; Stop 51
caaggtattctccacggcgttcttt

SEQ ID NO: 250218 - DNA, 25 bp, Artificial
  probe
  misc_feature (1)..(25): SEQ ID NO: 1580; WAN024GLG_at; Start 102; Stop 126
tgagattgatatcgatgaaacgttc

SEQ ID NO: 250219 - DNA, 25 bp, Artificial
  probe
  misc_feature (1)..(25): SEQ ID NO: 1580; WAN024GLG_at; Start 85; Stop 109
cacgttggaatatttgttgagattg

SEQ ID NO: 250220 - DNA, 25 bp, Artificial
  probe
  misc_feature (1)..(25): SEQ ID NO: 1580; WAN024GLG_at; Start 43; Stop 67
gcgttctttacgaagaacttcactg

SEQ ID NO: 250221 - DNA, 25 bp, Artificial
  probe
  misc_feature (1)..(25): SEQ ID NO: 1580; WAN024GLG_at; Start 166; Stop 190
tgtcacaaaaacttccccgtgctgg

SEQ ID NO: 250222 - DNA, 25 bp, Artificial
  probe
  misc_feature (1)..(25): SEQ ID NO: 1580; WAN024GLG_at; Start 35; Stop 59
tctccacggcgttctttacgaagaa

SEQ ID NO: 250223 - DNA, 25 bp, Artificial
  probe
  misc_feature (1)..(25): SEQ ID NO: 1580; WAN024GLG_at; Start 2; Stop 26
tgaggaatgacttgaacagttgccc

SEQ ID NO: 250224 - DNA, 25 bp, Artificial
  probe
  misc_feature (1)..(25): SEQ ID NO: 1580; WAN024GLG_at; Start 161; Stop 185
tcatctgtcacaaaaacttccccgt

SEQ ID NO: 250225 - DNA, 25 bp, Artificial
  probe
  misc_feature (1)..(25): SEQ ID NO: 1580; WAN024GLG_at; Start 22; Stop 46
tgccccaaggtattctccacggcgt

SEQ ID NO: 250226 - DNA, 25 bp, Artificial
  probe
  misc_feature (1)..(25): SEQ ID NO: 1580; WAN024GLG_at; Start 136; Stop 160
caagtccaaatctgtctcagctccg

SEQ ID NO: 250227 - DNA, 25 bp, Artificial
  probe
  misc_feature (1)..(25): SEQ ID NO: 4025; WAN024GLH_at; Start 284; Stop 308
gataaccagtactggaattgagtac

SEQ ID NO: 250228 - DNA, 25 bp, Artificial
  probe
  misc_feature (1)..(25): SEQ ID NO: 4025; WAN024GLH_at; Start 241; Stop 265
tgacaatgacaatcataacgatagc

SEQ ID NO: 250229 - DNA, 25 bp, Artificial
  probe
  misc_feature (1)..(25): SEQ ID NO: 4025; WAN024GLH_at; Start 298; Stop 322
gaattgagtacttgataatcgcatc

SEQ ID NO: 250230 - DNA, 25 bp, Artificial
  probe
  misc_feature (1)..(25): SEQ ID NO: 4025; WAN024GLH_at; Start 340; Stop 364
tagcaaatccaatcaaggtaaaggc

SEQ ID NO: 250231 - DNA, 25 bp, Artificial
  probe
  misc_feature (1)..(25): SEQ ID NO: 4025; WAN024GLH_at; Start 187; Stop 211
taaccacagcaattgtcaactgcat

SEQ ID NO: 250232 - DNA, 25 bp, Artificial
  probe
  misc_feature (1)..(25): SEQ ID NO: 4025; WAN024GLH_at; Start 141; Stop 165
tcaaccttaaacgagcttcctagta

SEQ ID NO: 250233 - DNA, 25 bp, Artificial
  probe
  misc_feature (1)..(25): SEQ ID NO: 4025; WAN024GLH_at; Start 264; Stop 288
gcaatcgtgattgggtacaagataa

SEQ ID NO: 250234 - DNA, 25 bp, Artificial
  probe
  misc_feature (1)..(25): SEQ ID NO: 4025; WAN024GLH_at; Start 22; Stop 46
catcgctttcttgcttgtttggtag

SEQ ID NO: 250235 - DNA, 25 bp, Artificial
  probe
  misc_feature (1)..(25): SEQ ID NO: 4025; WAN024GLH_at; Start 46; Stop 70
gaaccaatgagagcaagattccaac

SEQ ID NO: 250236 - DNA, 25 bp, Artificial
  probe
  misc_feature (1)..(25): SEQ ID NO: 4025; WAN024GLH_at; Start 345; Stop 369
aatccaatcaaggtaaaggctgtcg

SEQ ID NO: 250237 - DNA, 25 bp, Artificial
  probe
  misc_feature (1)..(25): SEQ ID NO: 4025; WAN024GLH_at; Start 248; Stop 272
gacaatcataacgatagcaatcgtg

SEQ ID NO: 250238 - DNA, 25 bp, Artificial
  probe
  misc_feature (1)..(25): SEQ ID NO: 4025; WAN024GLH_at; Start 322; Stop 346
caagacccaaattggcaatagcaaa

SEQ ID NO: 250239 - DNA, 25 bp, Artificial
  probe
  misc_feature (1)..(25): SEQ ID NO: 4025; WAN024GLH_at; Start 96; Stop 120
gatgccttggcaaaaggaagaacgc

SEQ ID NO: 250240 - DNA, 25 bp, Artificial
  probe
  misc_feature (1)..(25): SEQ ID NO: 4025; WAN024GLH_at; Start 254; Stop 278
cataacgatagcaatcgtgattggg

SEQ ID NO: 250241 - DNA, 25 bp, Artificial
  probe
  misc_feature (1)..(25): SEQ ID NO: 4025; WAN024GLH_at; Start 349; Stop 373
caatcaaggtaaaggctgtcgcata

SEQ ID NO: 250242 - DNA, 25 bp, Artificial
  probe
  misc_feature (1)..(25): SEQ ID NO: 4025; WAN024GLH_at; Start 83; Stop 107
caaccatgggagagatgccttggca

SEQ ID NO: 250243 - DNA, 25 bp, Artificial
  probe
  misc_feature (1)..(25): SEQ ID NO: 4025; WAN024GLH_at; Start 73; Stop 97
tggctggcaccaaccatgggagaga

SEQ ID NO: 250244 - DNA, 25 bp, Artificial
  probe
  misc_feature (1)..(25): SEQ ID NO: 4025; WAN024GLH_at; Start 268; Stop 292
tcgtgattgggtacaagataaccag

SEQ ID NO: 250245 - DNA, 25 bp, Artificial
  probe
  misc_feature (1)..(25): SEQ ID NO: 4025; WAN024GLH_at; Start 228; Stop 252
gcaacaaatttgttgacaatgacaa

SEQ ID NO: 250246 - DNA, 25 bp, Artificial
  probe
  misc_feature (1)..(25): SEQ ID NO: 4025; WAN024GLH_at; Start 86; Stop 110
ccatgggagagatgccttggcaaaa

SEQ ID NO: 250247 - DNA, 25 bp, Artificial
  probe
  misc_feature (1)..(25): SEQ ID NO: 4025; WAN024GLH_at; Start 195; Stop 219
gcaattgtcaactgcatacctggtt

SEQ ID NO: 250248 - DNA, 25 bp, Artificial
  probe
  misc_feature (1)..(25): SEQ ID NO: 4025; WAN024GLH_at; Start 313; Stop 337
taatcgcatcaagacccaaattggc

SEQ ID NO: 250249 - DNA, 25 bp, Artificial
  probe
  misc_feature (1)..(25): SEQ ID NO: 4025; WAN024GLH_at; Start 62; Stop 86
gattccaacaatggctggcaccaac

SEQ ID NO: 250250 - DNA, 25 bp, Artificial
  probe
  misc_feature (1)..(25): SEQ ID NO: 4025; WAN024GLH_at; Start 27; Stop 51
ctttcttgcttgtttggtagaacca

SEQ ID NO: 250251 - DNA, 25 bp, Artificial
  probe
  misc_feature (1)..(25): SEQ ID NO: 4025; WAN024GLH_at; Start 220; Stop 244
ttgaaagggcaacaaatttgttgac

SEQ ID NO: 250252 - DNA, 25 bp, Artificial
  probe
  misc_feature (1)..(25): SEQ ID NO: 4025; WAN024GLH_at; Start 3; Stop 27
gattattccatttcaaaaacatcgc

SEQ ID NO: 250253 - DNA, 25 bp, Artificial
  probe
  misc_feature (1)..(25): SEQ ID NO: 4025; WAN024GLH_at; Start 51; Stop 75
aatgagagcaagattccaacaatgg

SEQ ID NO: 250254 - DNA, 25 bp, Artificial
  probe
  misc_feature (1)..(25): SEQ ID NO: 4025; WAN024GLH_at; Start 70; Stop 94
caatggctggcaccaaccatgggag

SEQ ID NO: 250255 - DNA, 25 bp, Artificial
  probe
  misc_feature (1)..(25): SEQ ID NO: 4025; WAN024GLH_at; Start 42; Stop 66
ggtagaaccaatgagagcaagattc

SEQ ID NO: 250256 - DNA, 25 bp, Artificial
  probe
  misc_feature (1)..(25): SEQ ID NO: 4025; WAN024GLH_at; Start 209; Stop 233
catacctggttttgaaagggcaaca

SEQ ID NO: 250257 - DNA, 25 bp, Artificial
  probe
  misc_feature (1)..(25): SEQ ID NO: 4025; WAN024GLH_at; Start 275; Stop 299
tgggtacaagataaccagtactgga

SEQ ID NO: 250258 - DNA, 25 bp, Artificial
  probe
  misc_feature (1)..(25): SEQ ID NO: 4025; WAN024GLH_at; Start 15; Stop 39
tcaaaaacatcgctttcttgcttgt

SEQ ID NO: 250259 - DNA, 25 bp, Artificial
  probe
  misc_feature (1)..(25): SEQ ID NO: 4025; WAN024GLH_at; Start 80; Stop 104
caccaaccatgggagagatgccttg

SEQ ID NO: 250260 - DNA, 25 bp, Artificial
  probe
  misc_feature (1)..(25): SEQ ID NO: 4025; WAN024GLH_at; Start 318; Stop 342
gcatcaagacccaaattggcaatag

SEQ ID NO: 250261 - DNA, 25 bp, Artificial
  probe
  misc_feature (1)..(25): SEQ ID NO: 1122; WAN024GLI_at; Start 1113; Stop 1137
tgttgccctttcaaaaccaggtatg

SEQ ID NO: 250262 - DNA, 25 bp, Artificial
  probe
  misc_feature (1)..(25): SEQ ID NO: 1122; WAN024GLI_at; Start 887; Stop 911
taacctgcttcacaacgactgttgg

SEQ ID NO: 250263 - DNA, 25 bp, Artificial
  probe
  misc_feature (1)..(25): SEQ ID NO: 1122; WAN024GLI_at; Start 384; Stop 408
tacggttctgtattttgcggcagcc

SEQ ID NO: 250264 - DNA, 25 bp, Artificial
  probe
  misc_feature (1)..(25): SEQ ID NO: 1122; WAN024GLI_at; Start 1009; Stop 1033
gccaatttgggtcttgatgcgatta

SEQ ID NO: 250265 - DNA, 25 bp, Artificial
  probe
  misc_feature (1)..(25): SEQ ID NO: 1122; WAN024GLI_at; Start 1137; Stop 1161
gcagttgacaattgctgtggttaca

SEQ ID NO: 250266 - DNA, 25 bp, Artificial
  probe
  misc_feature (1)..(25): SEQ ID NO: 1122; WAN024GLI_at; Start 939; Stop 963
taatgagcgcttcccacaaatcagc

SEQ ID NO: 250267 - DNA, 25 bp, Artificial
  probe
  misc_feature (1)..(25): SEQ ID NO: 1122; WAN024GLI_at; Start 1221; Stop 1245
tgttagcgttcttccttttgccaag

SEQ ID NO: 250268 - DNA, 25 bp, Artificial
  probe
  misc_feature (1)..(25): SEQ ID NO: 1122; WAN024GLI_at; Start 728; Stop 752
tcagcgctctttacatcggtttagg

SEQ ID NO: 250269 - DNA, 25 bp, Artificial
  probe
  misc_feature (1)..(25): SEQ ID NO: 1122; WAN024GLI_at; Start 349; Stop 373
tcggatgcaaataaaggacttggct

SEQ ID NO: 250270 - DNA, 25 bp, Artificial
  probe
  misc_feature (1)..(25): SEQ ID NO: 1122; WAN024GLI_at; Start 503; Stop 527
tgggagctatcaaatatggtggaac

SEQ ID NO: 250271 - DNA, 25 bp, Artificial
  probe
  misc_feature (1)..(25): SEQ ID NO: 1122; WAN024GLI_at; Start 866; Stop 890
tccttgcagctatggttaccgtaac

SEQ ID NO: 250272 - DNA, 25 bp, Artificial
  probe
  misc_feature (1)..(25): SEQ ID NO: 1122; WAN024GLI_at; Start 1242; Stop 1266
caaggcatctctcccatggttggtg

SEQ ID NO: 250273 - DNA, 25 bp, Artificial
  probe
  misc_feature (1)..(25): SEQ ID NO: 1122; WAN024GLI_at; Start 616; Stop 640
tcagtggcctttagcgtaatcgcag

SEQ ID NO: 250274 - DNA, 25 bp, Artificial
  probe
  misc_feature (1)..(25): SEQ ID NO: 1122; WAN024GLI_at; Start 960; Stop 984
cagctacaaggtttatgcgacagcc

SEQ ID NO: 250275 - DNA, 25 bp, Artificial
  probe
  misc_feature (1)..(25): SEQ ID NO: 1122; WAN024GLI_at; Start 219; Stop 243
gatttcaacgaagatagcgccttgg

SEQ ID NO: 250276 - DNA, 25 bp, Artificial
  probe
  misc_feature (1)..(25): SEQ ID NO: 1122; WAN024GLI_at; Start 166; Stop 190
gccgtcttgacccttattattggaa

SEQ ID NO: 250277 - DNA, 25 bp, Artificial
  probe
  misc_feature (1)..(25): SEQ ID NO: 1122; WAN024GLI_at; Start 115; Stop 139
gaacattttcttcctgccatcgcag

SEQ ID NO: 250278 - DNA, 25 bp, Artificial
  probe
  misc_feature (1)..(25): SEQ ID NO: 1122; WAN024GLI_at; Start 1295; Stop 1319
tggttctaccaaacaagcaagaaag

SEQ ID NO: 250279 - DNA, 25 bp, Artificial
  probe
  misc_feature (1)..(25): SEQ ID NO: 1122; WAN024GLI_at; Start 975; Stop 999
tgcgacagcctttaccttgattgga

SEQ ID NO: 250280 - DNA, 25 bp, Artificial
  probe
  misc_feature (1)..(25): SEQ ID NO: 1122; WAN024GLI_at; Start 81; Stop 105
gatttttccgccttctctaggtgct

SEQ ID NO: 250281 - DNA, 25 bp, Artificial
  probe
  misc_feature (1)..(25): SEQ ID NO: 1122; WAN024GLI_at; Start 629; Stop 653
gcgtaatcgcagttcaaaccttgaa

SEQ ID NO: 250282 - DNA, 25 bp, Artificial
  probe
  misc_feature (1)..(25): SEQ ID NO: 1122; WAN024GLI_at; Start 242; Stop 266
ggtttgcgactctttacctctcagt

SEQ ID NO: 250283 - DNA, 25 bp, Artificial
  probe
  misc_feature (1)..(25): SEQ ID NO: 1122; WAN024GLI_at; Start 519; Stop 543
tggtggaacaagtcctcaagctgct

SEQ ID NO: 250284 - DNA, 25 bp, Artificial
  probe
  misc_feature (1)..(25): SEQ ID NO: 1122; WAN024GLI_at; Start 431; Stop 455
caaaaatcttagaccgcattggacg

SEQ ID NO: 250285 - DNA, 25 bp, Artificial
  probe
  misc_feature (1)..(25): SEQ ID NO: 1122; WAN024GLI_at; Start 806; Stop 830
caggtgtttacatcttgtcacaagc

SEQ ID NO: 250286 - DNA, 25 bp, Artificial
  probe
  misc_feature (1)..(25): SEQ ID NO: 1122; WAN024GLI_at; Start 706; Stop 730
ggtatcgttgttgcccttgccttca

SEQ ID NO: 250287 - DNA, 25 bp, Artificial
  probe
  misc_feature (1)..(25): SEQ ID NO: 1122; WAN024GLI_at; Start 1056; Stop 1080
ggttatcttgtacccaatcacgatt

SEQ ID NO: 250288 - DNA, 25 bp, Artificial
  probe
  misc_feature (1)..(25): SEQ ID NO: 1122; WAN024GLI_at; Start 782; Stop 806
ctgaagcgatgaagggtggaacacc

SEQ ID NO: 250289 - DNA, 25 bp, Artificial
  probe
  misc_feature (1)..(25): SEQ ID NO: 1122; WAN024GLI_at; Start 317; Stop 341
cagcttacgaagtagggattagccc

SEQ ID NO: 250290 - DNA, 25 bp, Artificial
  probe
  misc_feature (1)..(25): SEQ ID NO: 1122; WAN024GLI_at; Start 766; Stop 790
catttcccagtaccagctgaagcga

SEQ ID NO: 250291 - DNA, 25 bp, Artificial
  probe
  misc_feature (1)..(25): SEQ ID NO: 1122; WAN024GLI_at; Start 489; Stop 513
tatcttggtcgttctgggagctatc

SEQ ID NO: 250292 - DNA, 25 bp, Artificial
  probe
  misc_feature (1)..(25): SEQ ID NO: 1122; WAN024GLI_at; Start 838; Stop 862
gaaatctttggctcaacagctcaac

SEQ ID NO: 250293 - DNA, 25 bp, Artificial
  probe
  misc_feature (1)..(25): SEQ ID NO: 1122; WAN024GLI_at; Start 96; Stop 120
tctaggtgctctatctggagaacat

SEQ ID NO: 250294 - DNA, 25 bp, Artificial
  probe
  misc_feature (1)..(25): SEQ ID NO: 1122; WAN024GLI_at; Start 555; Stop 579
tcaagcttctgcctttggtacaggt

SEQ ID NO: 250295 - DNA, 25 bp, Artificial
  probe
  misc_feature (1)..(25): SEQ ID NO: 2916; WAN024GLJ_at; Start 1338; Stop 1362
ggctgctgctgcttatcacaatcaa

SEQ ID NO: 250296 - DNA, 25 bp, Artificial
  probe
  misc_feature (1)..(25): SEQ ID NO: 2916; WAN024GLJ_at; Start 74; Stop 98
taggccgtctcttgaaaaatcgtgg

SEQ ID NO: 250297 - DNA, 25 bp, Artificial
  probe
  misc_feature (1)..(25): SEQ ID NO: 2916; WAN024GLJ_at; Start 754; Stop 778
aacttgcaggcacaagggatggacc

SEQ ID NO: 250298 - DNA, 25 bp, Artificial
  probe
  misc_feature (1)..(25): SEQ ID NO: 2916; WAN024GLJ_at; Start 913; Stop 937
gatgcctatatctcagtggtcgaag

SEQ ID NO: 250299 - DNA, 25 bp, Artificial
  probe
  misc_feature (1)..(25): SEQ ID NO: 2916; WAN024GLJ_at; Start 929; Stop 953
tggtcgaagccttgaaacactctgg

SEQ ID NO: 250300 - DNA, 25 bp, Artificial
  probe
  misc_feature (1)..(25): SEQ ID NO: 2916; WAN024GLJ_at; Start 306; Stop 330
agaacgccgtggagaataccttggg

SEQ ID NO: 250301 - DNA, 25 bp, Artificial
  probe
  misc_feature (1)..(25): SEQ ID NO: 2916; WAN024GLJ_at; Start 822; Stop 846
tatgacagaatggtcagccatggtg

SEQ ID NO: 250302 - DNA, 25 bp, Artificial
  probe
  misc_feature (1)..(25): SEQ ID NO: 2916; WAN024GLJ_at; Start 1042; Stop 1066
gacgggatcatcgtaccaggtggtt

SEQ ID NO: 250303 - DNA, 25 bp, Artificial
  probe
  misc_feature (1)..(25): SEQ ID NO: 2916; WAN024GLJ_at; Start 1395; Stop 1419
tgagtttaataatgccttccgtgag

SEQ ID NO: 250304 - DNA, 25 bp, Artificial
  probe
  misc_feature (1)..(25): SEQ ID NO: 2916; WAN024GLJ_at; Start 59; Stop 83
ttgtggcagcgagtctaggccgtct

SEQ ID NO: 250305 - DNA, 25 bp, Artificial
  probe
  misc_feature (1)..(25): SEQ ID NO: 2916; WAN024GLJ_at; Start 1190; Stop 1214
taggtcttgaaggtgccaattctgc

SEQ ID NO: 250306 - DNA, 25 bp, Artificial
  probe
  misc_feature (1)..(25): SEQ ID NO: 2916; WAN024GLJ_at; Start 138; Stop 162
tattgatccgggaaccatgagtcct

SEQ ID NO: 250307 - DNA, 25 bp, Artificial
  probe
  misc_feature (1)..(25): SEQ ID NO: 2916; WAN024GLJ_at; Start 388; Stop 412
gccgctctaacgaccgactctgatg

SEQ ID NO: 250308 - DNA, 25 bp, Artificial
  probe
  misc_feature (1)..(25): SEQ ID NO: 2916; WAN024GLJ_at; Start 1410; Stop 1434
cttccgtgagcagtttgaggcagca

SEQ ID NO: 250309 - DNA, 25 bp, Artificial
  probe
  misc_feature (1)..(25): SEQ ID NO: 2916; WAN024GLJ_at; Start 686; Stop 710
tctgtgatgtggcaccagaagccgt

SEQ ID NO: 250310 - DNA, 25 bp, Artificial
  probe
  misc_feature (1)..(25): SEQ ID NO: 2916; WAN024GLJ_at; Start 795; Stop 819
tttgaaattagacgcaccagcagcg

SEQ ID NO: 250311 - DNA, 25 bp, Artificial
  probe
  misc_feature (1)..(25): SEQ ID NO: 2916; WAN024GLJ_at; Start 464; Stop 488
tcctagaggctcttcgtcagatgaa

SEQ ID NO: 250312 - DNA, 25 bp, Artificial
  probe
  misc_feature (1)..(25): SEQ ID NO: 2916; WAN024GLJ_at; Start 894; Stop 918
taagtatgtggagttgcaagatgcc

SEQ ID NO: 250313 - DNA, 25 bp, Artificial
  probe
  misc_feature (1)..(25): SEQ ID NO: 2916; WAN024GLJ_at; Start 1156; Stop 1180
cagttgacatgtatcgagtttgctc

SEQ ID NO: 250314 - DNA, 25 bp, Artificial
  probe
  misc_feature (1)..(25): SEQ ID NO: 2916; WAN024GLJ_at; Start 701; Stop 725
cagaagccgttatcgaatcgttgga

SEQ ID NO: 250315 - DNA, 25 bp, Artificial
  probe
  misc_feature (1)..(25): SEQ ID NO: 2916; WAN024GLJ_at; Start 633; Stop 657
tattcgtacagaagagccagctggt

SEQ ID NO: 250316 - DNA, 25 bp, Artificial
  probe
  misc_feature (1)..(25): SEQ ID NO: 2916; WAN024GLJ_at; Start 595; Stop 619
gaattgcgtggcttgggaatccaac

SEQ ID NO: 250317 - DNA, 25 bp, Artificial
  probe
  misc_feature (1)..(25): SEQ ID NO: 2916; WAN024GLJ_at; Start 1270; Stop 1294
gatattgaggatatgggtggaaccc

SEQ ID NO: 250318 - DNA, 25 bp, Artificial
  probe
  misc_feature (1)..(25): SEQ ID NO: 2916; WAN024GLJ_at; Start 1323; Stop 1347
gaaacgtggctctaaggctgctgct

SEQ ID NO: 250319 - DNA, 25 bp, Artificial
  probe
  misc_feature (1)..(25): SEQ ID NO: 2916; WAN024GLJ_at; Start 1213; Stop 1237
gcagagcttgcaccagaaacaaaat

SEQ ID NO: 250320 - DNA, 25 bp, Artificial
  probe
  misc_feature (1)..(25): SEQ ID NO: 2916; WAN024GLJ_at; Start 546; Stop 570
caaggctgctggtgaaatgaaaacc

SEQ ID NO: 250321 - DNA, 25 bp, Artificial
  probe
  misc_feature (1)..(25): SEQ ID NO: 2916; WAN024GLJ_at; Start 192; Stop 216
tgacggagctgagacagatttggac

SEQ ID NO: 250322 - DNA, 25 bp, Artificial
  probe
  misc_feature (1)..(25): SEQ ID NO: 2916; WAN024GLJ_at; Start 369; Stop 393
gaaagaaaaaatcaagcgtgccgct

SEQ ID NO: 250323 - DNA, 25 bp, Artificial
  probe
  misc_feature (1)..(25): SEQ ID NO: 2916; WAN024GLJ_at; Start 1520; Stop 1544
agtatcaccctgaactgtcaagccg

SEQ ID NO: 250324 - DNA, 25 bp, Artificial
  probe
  misc_feature (1)..(25): SEQ ID NO: 2916; WAN024GLJ_at; Start 1356; Stop 1380
caatcaagaagtggtgcaacgccgt

SEQ ID NO: 250325 - DNA, 25 bp, Artificial
  probe
  misc_feature (1)..(25): SEQ ID NO: 2916; WAN024GLJ_at; Start 1089; Stop 1113
gaaaatccaagccatccgctatgcg

SEQ ID NO: 250326 - DNA, 25 bp, Artificial
  probe
  misc_feature (1)..(25): SEQ ID NO: 2916; WAN024GLJ_at; Start 255; Stop 279
caaatattccaacgtgacaactggg

SEQ ID NO: 250327 - DNA, 25 bp, Artificial
  probe
  misc_feature (1)..(25): SEQ ID NO: 2916; WAN024GLJ_at; Start 447; Stop 471
tatcgagtccttgccattcctagag

SEQ ID NO: 250328 - DNA, 25 bp, Artificial
  probe
  misc_feature (1)..(25): SEQ ID NO: 2916; WAN024GLJ_at; Start 1104; Stop 1128
ccgctatgcgcgtgaaaatgatgtt

SEQ ID NO: 250329 - DNA, 25 bp, Artificial
  probe
  misc_feature (1)..(25): SEQ ID NO: 43; WAN024GLK_at; Start 122; Stop 146
gcgatcttgtaaacgaaattcaaaa

SEQ ID NO: 250330 - DNA, 25 bp, Artificial
  probe
  misc_feature (1)..(25): SEQ ID NO: 43; WAN024GLK_at; Start 58; Stop 82
tctatgattgaggtagcgcgtgcta

SEQ ID NO: 250331 - DNA, 25 bp, Artificial
  probe
  misc_feature (1)..(25): SEQ ID NO: 43; WAN024GLK_at; Start 114; Stop 138
gcattttagcgatcttgtaaacgaa

SEQ ID NO: 250332 - DNA, 25 bp, Artificial
  probe
  misc_feature (1)..(25): SEQ ID NO: 43; WAN024GLK_at; Start 101; Stop 125
gcgatcatgagatgcattttagcga

SEQ ID NO: 250333 - DNA, 25 bp, Artificial
  probe
  misc_feature (1)..(25): SEQ ID NO: 43; WAN024GLK_at; Start 270; Stop 294
tgtggacgaaatcgacgaagaaatc

SEQ ID NO: 250334 - DNA, 25 bp, Artificial
  probe
  misc_feature (1)..(25): SEQ ID NO: 43; WAN024GLK_at; Start 448; Stop 472
tacgatgatgaaaatccagatgatg

SEQ ID NO: 250335 - DNA, 25 bp, Artificial
  probe
  misc_feature (1)..(25): SEQ ID NO: 43; WAN024GLK_at; Start 298; Stop 322
gctcttgaagaaaatgacgacgatg

SEQ ID NO: 250336 - DNA, 25 bp, Artificial
  probe
  misc_feature (1)..(25): SEQ ID NO: 43; WAN024GLK_at; Start 373; Stop 397
gattcagatgccattgactacaatg

SEQ ID NO: 250337 - DNA, 25 bp, Artificial
  probe
  misc_feature (1)..(25): SEQ ID NO: 43; WAN024GLK_at; Start 546; Stop 570
tctcaacgaagacgacgacgagttt

SEQ ID NO: 250338 - DNA, 25 bp, Artificial
  probe
  misc_feature (1)..(25): SEQ ID NO: 43; WAN024GLK_at; Start 418; Stop 442
gatgcatacgaagcagatccagctc

SEQ ID NO: 250339 - DNA, 25 bp, Artificial
  probe
  misc_feature (1)..(25): SEQ ID NO: 43; WAN024GLK_at; Start 19; Stop 43
gaattagaagtatttgctgggcaag

SEQ ID NO: 250340 - DNA, 25 bp, Artificial
  probe
  misc_feature (1)..(25): SEQ ID NO: 43; WAN024GLK_at; Start 52; Stop 76
gaactatctatgattgaggtagcgc

SEQ ID NO: 250341 - DNA, 25 bp, Artificial
  probe
  misc_feature (1)..(25): SEQ ID NO: 43; WAN024GLK_at; Start 433; Stop 457
gatccagctctttcatacgatgatg

SEQ ID NO: 250342 - DNA, 25 bp, Artificial
  probe
  misc_feature (1)..(25): SEQ ID NO: 43; WAN024GLK_at; Start 481; Stop 505
gaagtggaagcttatgatgcagaaa

SEQ ID NO: 250343 - DNA, 25 bp, Artificial
  probe
  misc_feature (1)..(25): SEQ ID NO: 43; WAN024GLK_at; Start 3; Stop 27
gaggagaaacgctttggaattagaa

SEQ ID NO: 250344 - DNA, 25 bp, Artificial
  probe
  misc_feature (1)..(25): SEQ ID NO: 43; WAN024GLK_at; Start 93; Stop 117
tcgtggtcgcgatcatgagatgcat

SEQ ID NO: 250345 - DNA, 25 bp, Artificial
  probe
  misc_feature (1)..(25): SEQ ID NO: 43; WAN024GLK_at; Start 359; Stop 383
cctttatggatggtgattcagatgc

SEQ ID NO: 250346 - DNA, 25 bp, Artificial
  probe
  misc_feature (1)..(25): SEQ ID NO: 43; WAN024GLK_at; Start 510; Stop 534
cgaaatcgctccagatgacttggga

SEQ ID NO: 250347 - DNA, 25 bp, Artificial
  probe
  misc_feature (1)..(25): SEQ ID NO: 43; WAN024GLK_at; Start 319; Stop 343
gatgaagtagcaccaaaagctaaga

SEQ ID NO: 250348 - DNA, 25 bp, Artificial
  probe
  misc_feature (1)..(25): SEQ ID NO: 43; WAN024GLK_at; Start 525; Stop 549
tgacttgggagaagatgtggatctc

SEQ ID NO: 250349 - DNA, 25 bp, Artificial
  probe
  misc_feature (1)..(25): SEQ ID NO: 43; WAN024GLK_at; Start 213; Stop 237
tgacggtagcttcatctcacttggg

SEQ ID NO: 250350 - DNA, 25 bp, Artificial
  probe
  misc_feature (1)..(25): SEQ ID NO: 43; WAN024GLK_at; Start 403; Stop 427
gatccagaagacgaagatgcatacg

SEQ ID NO: 250351 - DNA, 25 bp, Artificial
  probe
  misc_feature (1)..(25): SEQ ID NO: 43; WAN024GLK_at; Start 160; Stop 184
tcaaacagcgatatccgcgaagctt

SEQ ID NO: 250352 - DNA, 25 bp, Artificial
  probe
  misc_feature (1)..(25): SEQ ID NO: 43; WAN024GLK_at; Start 283; Stop 307
gacgaagaaatcatcgctcttgaag

SEQ ID NO: 250353 - DNA, 25 bp, Artificial
  probe
  misc_feature (1)..(25): SEQ ID NO: 43; WAN024GLK_at; Start 198; Stop 222
cacagagttgaactttgacggtagc

SEQ ID NO: 250354 - DNA, 25 bp, Artificial
  probe
  misc_feature (1)..(25): SEQ ID NO: 43; WAN024GLK_at; Start 391; Stop 415
tacaatgcagatgatccagaagacg

SEQ ID NO: 250355 - DNA, 25 bp, Artificial
  probe
  misc_feature (1)..(25): SEQ ID NO: 43; WAN024GLK_at; Start 34; Stop 58
gctgggcaagaaaaaagtgaactat

SEQ ID NO: 250356 - DNA, 25 bp, Artificial
  probe
  misc_feature (1)..(25): SEQ ID NO: 43; WAN024GLK_at; Start 260; Stop 284
catggtatggtgtggacgaaatcga

SEQ ID NO: 250357 - DNA, 25 bp, Artificial
  probe
  misc_feature (1)..(25): SEQ ID NO: 43; WAN024GLK_at; Start 496; Stop 520
gatgcagaaatcaacgaaatcgctc

SEQ ID NO: 250358 - DNA, 25 bp, Artificial
  probe
  misc_feature (1)..(25): SEQ ID NO: 43; WAN024GLK_at; Start 538; Stop 562
gatgtggatctcaacgaagacgacg

SEQ ID NO: 250359 - DNA, 25 bp, Artificial
  probe
  misc_feature (1)..(25): SEQ ID NO: 43; WAN024GLK_at; Start 252; Stop 276
tcttcgttcatggtatggtgtggac

SEQ ID NO: 250360 - DNA, 25 bp, Artificial
  probe
  misc_feature (1)..(25): SEQ ID NO: 43; WAN024GLK_at; Start 145; Stop 169
aactaccttggaacatcaaacagcg

SEQ ID NO: 250361 - DNA, 25 bp, Artificial
  probe
  misc_feature (1)..(25): SEQ ID NO: 43; WAN024GLK_at; Start 309; Stop 333
aaatgacgacgatgaagtagcacca

SEQ ID NO: 250362 - DNA, 25 bp, Artificial
  probe
  misc_feature (1)..(25): SEQ ID NO: 43; WAN024GLK_at; Start 557; Stop 581
acgacgacgagttttcagatgacga

SEQ ID NO: 250363 - DNA, 25 bp, Artificial
  probe
  misc_feature (1)..(25): SEQ ID NO: 6528; WAN024GLL_at; Start 157; Stop 181
tgggattttgcagcacatagcctac

SEQ ID NO: 250364 - DNA, 25 bp, Artificial
  probe
  misc_feature (1)..(25): SEQ ID NO: 6528; WAN024GLL_at; Start 227; Stop 251
ttcccaaagatagcggccttcagtc

SEQ ID NO: 250365 - DNA, 25 bp, Artificial
  probe
  misc_feature (1)..(25): SEQ ID NO: 6528; WAN024GLL_at; Start 117; Stop 141
gccacctcatcaaaaatcatattgg

SEQ ID NO: 250366 - DNA, 25 bp, Artificial
  probe
  misc_feature (1)..(25): SEQ ID NO: 6528; WAN024GLL_at; Start 232; Stop 256
aaagatagcggccttcagtctggat

SEQ ID NO: 250367 - DNA, 25 bp, Artificial
  probe
  misc_feature (1)..(25): SEQ ID NO: 6528; WAN024GLL_at; Start 12; Stop 36
gaaatgggccaattacggaattcat

SEQ ID NO: 250368 - DNA, 25 bp, Artificial
  probe
  misc_feature (1)..(25): SEQ ID NO: 6528; WAN024GLL_at; Start 225; Stop 249
ccttcccaaagatagcggccttcag

SEQ ID NO: 250369 - DNA, 25 bp, Artificial
  probe
  misc_feature (1)..(25): SEQ ID NO: 6528; WAN024GLL_at; Start 127; Stop 151
caaaaatcatattggttgaaatcat

SEQ ID NO: 250370 - DNA, 25 bp, Artificial
  probe
  misc_feature (1)..(25): SEQ ID NO: 6528; WAN024GLL_at; Start 217; Stop 241
tatcctgtccttcccaaagatagcg

SEQ ID NO: 250371 - DNA, 25 bp, Artificial
  probe
  misc_feature (1)..(25): SEQ ID NO: 6528; WAN024GLL_at; Start 43; Stop 67
cacagattttcaaggtttcatagac

SEQ ID NO: 250372 - DNA, 25 bp, Artificial
  probe
  misc_feature (1)..(25): SEQ ID NO: 6528; WAN024GLL_at; Start 234; Stop 258
agatagcggccttcagtctggataa

SEQ ID NO: 250373 - DNA, 25 bp, Artificial
  probe
  misc_feature (1)..(25): SEQ ID NO: 6528; WAN024GLL_at; Start 47; Stop 71
gattttcaaggtttcatagactctc

SEQ ID NO: 250374 - DNA, 25 bp, Artificial
  probe
  misc_feature (1)..(25): SEQ ID NO: 6528; WAN024GLL_at; Start 53; Stop 77
caaggtttcatagactctcgtttca

SEQ ID NO: 250375 - DNA, 25 bp, Artificial
  probe
  misc_feature (1)..(25): SEQ ID NO: 6528; WAN024GLL_at; Start 1; Stop 25
atgacagggcagaaatgggccaatt

SEQ ID NO: 250376 - DNA, 25 bp, Artificial
  probe
  misc_feature (1)..(25): SEQ ID NO: 6528; WAN024GLL_at; Start 33; Stop 57
tcatagagaccacagattttcaagg

SEQ ID NO: 250377 - DNA, 25 bp, Artificial
  probe
  misc_feature (1)..(25): SEQ ID NO: 6528; WAN024GLL_at; Start 65; Stop 89
gactctcgtttcaatttcctgctcg

SEQ ID NO: 250378 - DNA, 25 bp, Artificial
  probe
  misc_feature (1)..(25): SEQ ID NO: 6528; WAN024GLL_at; Start 222; Stop 246
tgtccttcccaaagatagcggcctt

SEQ ID NO: 250379 - DNA, 25 bp, Artificial
  probe
  misc_feature (1)..(25): SEQ ID NO: 6528; WAN024GLL_at; Start 102; Stop 126
aaacggagtcccagagccacctcat

SEQ ID NO: 250380 - DNA, 25 bp, Artificial
  probe
  misc_feature (1)..(25): SEQ ID NO: 6528; WAN024GLL_at; Start 107; Stop 131
gagtcccagagccacctcatcaaaa

SEQ ID NO: 250381 - DNA, 25 bp, Artificial
  probe
  misc_feature (1)..(25): SEQ ID NO: 6528; WAN024GLL_at; Start 163; Stop 187
tttgcagcacatagcctactcgttc

SEQ ID NO: 250382 - DNA, 25 bp, Artificial
  probe
  misc_feature (1)..(25): SEQ ID NO: 6528; WAN024GLL_at; Start 25; Stop 49
tacggaattcatagagaccacagat

SEQ ID NO: 250383 - DNA, 25 bp, Artificial
  probe
  misc_feature (1)..(25): SEQ ID NO: 6528; WAN024GLL_at; Start 5; Stop 29
cagggcagaaatgggccaattacgg

SEQ ID NO: 250384 - DNA, 25 bp, Artificial
  probe
  misc_feature (1)..(25): SEQ ID NO: 6528; WAN024GLL_at; Start 144; Stop 168
gaaatcatttgattgggattttgca

SEQ ID NO: 250385 - DNA, 25 bp, Artificial
  probe
  misc_feature (1)..(25): SEQ ID NO: 6528; WAN024GLL_at; Start 61; Stop 85
catagactctcgtttcaatttcctg

SEQ ID NO: 250386 - DNA, 25 bp, Artificial
  probe
  misc_feature (1)..(25): SEQ ID NO: 6528; WAN024GLL_at; Start 21; Stop 45
caattacggaattcatagagaccac

SEQ ID NO: 250387 - DNA, 25 bp, Artificial
  probe
  misc_feature (1)..(25): SEQ ID NO: 6528; WAN024GLL_at; Start 204; Stop 228
gaatctccttttatatcctgtcctt

SEQ ID NO: 250388 - DNA, 25 bp, Artificial
  probe
  misc_feature (1)..(25): SEQ ID NO: 6528; WAN024GLL_at; Start 198; Stop 222
gcaacagaatctccttttatatcct

SEQ ID NO: 250389 - DNA, 25 bp, Artificial
  probe
  misc_feature (1)..(25): SEQ ID NO: 6528; WAN024GLL_at; Start 93; Stop 117
acacctcgcaaacggagtcccagag

SEQ ID NO: 250390 - DNA, 25 bp, Artificial
  probe
  misc_feature (1)..(25): SEQ ID NO: 6528; WAN024GLL_at; Start 38; Stop 62
gagaccacagattttcaaggtttca

SEQ ID NO: 250391 - DNA, 25 bp, Artificial
  probe
  misc_feature (1)..(25): SEQ ID NO: 6528; WAN024GLL_at; Start 174; Stop 198
tagcctactcgttccgcccgctctg

SEQ ID NO: 250392 - DNA, 25 bp, Artificial
  probe
  misc_feature (1)..(25): SEQ ID NO: 6528; WAN024GLL_at; Start 160; Stop 184
gattttgcagcacatagcctactcg

SEQ ID NO: 250393 - DNA, 25 bp, Artificial
  probe
  misc_feature (1)..(25): SEQ ID NO: 6528; WAN024GLL_at; Start 10; Stop 34
cagaaatgggccaattacggaattc

SEQ ID NO: 250394 - DNA, 25 bp, Artificial
  probe
  misc_feature (1)..(25): SEQ ID NO: 6528; WAN024GLL_at; Start 113; Stop 137
cagagccacctcatcaaaaatcata

SEQ ID NO: 250395 - DNA, 25 bp, Artificial
  probe
  misc_feature (1)..(25): SEQ ID NO: 6528; WAN024GLL_at; Start 191; Stop 215
ccgctctgcaacagaatctcctttt

SEQ ID NO: 250396 - DNA, 25 bp, Artificial
  probe
  misc_feature (1)..(25): SEQ ID NO: 6528; WAN024GLL_at; Start 71; Stop 95
cgtttcaatttcctgctcgtccaca

SEQ ID NO: 250397 - DNA, 25 bp, Artificial
  probe
  misc_feature (1)..(25): SEQ ID NO: 878; WAN024GLM_at; Start 292; Stop 316
cagtttattggcttgtctgtggcag

SEQ ID NO: 250398 - DNA, 25 bp, Artificial
  probe
  misc_feature (1)..(25): SEQ ID NO: 878; WAN024GLM_at; Start 277; Stop 301
caggatacagatgggcagtttattg

SEQ ID NO: 250399 - DNA, 25 bp, Artificial
  probe
  misc_feature (1)..(25): SEQ ID NO: 878; WAN024GLM_at; Start 532; Stop 556
cccaagtcaggtcaggatattatcg

SEQ ID NO: 250400 - DNA, 25 bp, Artificial
  probe
  misc_feature (1)..(25): SEQ ID NO: 878; WAN024GLM_at; Start 1433; Stop 1457
ggcataccattgtcatgattaccca

SEQ ID NO: 250401 - DNA, 25 bp, Artificial
  probe
  misc_feature (1)..(25): SEQ ID NO: 878; WAN024GLM_at; Start 232; Stop 256
gatatgagcatctatgataagtctc

SEQ ID NO: 250402 - DNA, 25 bp, Artificial
  probe
  misc_feature (1)..(25): SEQ ID NO: 878; WAN024GLM_at; Start 675; Stop 699
cctttttaatgggagccctgaccag

SEQ ID NO: 250403 - DNA, 25 bp, Artificial
  probe
  misc_feature (1)..(25): SEQ ID NO: 878; WAN024GLM_at; Start 663; Stop 687
cgatggtcgtatcctttttaatggg

SEQ ID NO: 250404 - DNA, 25 bp, Artificial
  probe
  misc_feature (1)..(25): SEQ ID NO: 878; WAN024GLM_at; Start 556; Stop 580
gaattgattgaccagattcataagg

SEQ ID NO: 250405 - DNA, 25 bp, Artificial
  probe
  misc_feature (1)..(25): SEQ ID NO: 878; WAN024GLM_at; Start 1553; Stop 1577
atcctgagctgttagtaaaagccaa

SEQ ID NO: 250406 - DNA, 25 bp, Artificial
  probe
  misc_feature (1)..(25): SEQ ID NO: 878; WAN024GLM_at; Start 86; Stop 110
ccatttacaagggagagaaagtctt

SEQ ID NO: 250407 - DNA, 25 bp, Artificial
  probe
  misc_feature (1)..(25): SEQ ID NO: 878; WAN024GLM_at; Start 399; Stop 423
ggaccttcttcctttactggatcag

SEQ ID NO: 250408 - DNA, 25 bp, Artificial
  probe
  misc_feature (1)..(25): SEQ ID NO: 878; WAN024GLM_at; Start 1286; Stop 1310
tgtcatttggtcagaaaaaacgtgt

SEQ ID NO: 250409 - DNA, 25 bp, Artificial
  probe
  misc_feature (1)..(25): SEQ ID NO: 878; WAN024GLM_at; Start 1452; Stop 1476
tacccatgatatgcaattgatgctg

SEQ ID NO: 250410 - DNA, 25 bp, Artificial
  probe
  misc_feature (1)..(25): SEQ ID NO: 878; WAN024GLM_at; Start 1151; Stop 1175
ccaatatgatttttgatgaggtggc

SEQ ID NO: 250411 - DNA, 25 bp, Artificial
  probe
  misc_feature (1)..(25): SEQ ID NO: 878; WAN024GLM_at; Start 307; Stop 331
tctgtggcagaagatttggcgtttg

SEQ ID NO: 250412 - DNA, 25 bp, Artificial
  probe
  misc_feature (1)..(25): SEQ ID NO: 878; WAN024GLM_at; Start 980; Stop 1004
ttgtcggaaaaaatggagcagggaa

SEQ ID NO: 250413 - DNA, 25 bp, Artificial
  probe
  misc_feature (1)..(25): SEQ ID NO: 878; WAN024GLM_at; Start 43; Stop 67
tatgaaacacaacaagaaccgacct

SEQ ID NO: 250414 - DNA, 25 bp, Artificial
  probe
  misc_feature (1)..(25): SEQ ID NO: 878; WAN024GLM_at; Start 340; Stop 364
aatgatgtgacagccctagatgaga

SEQ ID NO: 250415 - DNA, 25 bp, Artificial
  probe
  misc_feature (1)..(25): SEQ ID NO: 878; WAN024GLM_at; Start 167; Stop 191
ttattcccaatatttacaagggtca

SEQ ID NO: 250416 - DNA, 25 bp, Artificial
  probe
  misc_feature (1)..(25): SEQ ID NO: 878; WAN024GLM_at; Start 151; Stop 175
cagtgtttgaatgggattattccca

SEQ ID NO: 250417 - DNA, 25 bp, Artificial
  probe
  misc_feature (1)..(25): SEQ ID NO: 878; WAN024GLM_at; Start 326; Stop 350
cgtttgctctggaaaatgatgtgac

SEQ ID NO: 250418 - DNA, 25 bp, Artificial
  probe
  misc_feature (1)..(25): SEQ ID NO: 878; WAN024GLM_at; Start 58; Stop 82
gaaccgaccttgcaagggatagact

SEQ ID NO: 250419 - DNA, 25 bp, Artificial
  probe
  misc_feature (1)..(25): SEQ ID NO: 878; WAN024GLM_at; Start 74; Stop 98
ggatagacttgaccatttacaaggg

SEQ ID NO: 250420 - DNA, 25 bp, Artificial
  probe
  misc_feature (1)..(25): SEQ ID NO: 878; WAN024GLM_at; Start 24; Stop 48
gaaggatttctctttccggtatgaa

SEQ ID NO: 250421 - DNA, 25 bp, Artificial
  probe
  misc_feature (1)..(25): SEQ ID NO: 878; WAN024GLM_at; Start 365; Stop 389
tgaaaggtcgtgtttataaatgggc

SEQ ID NO: 250422 - DNA, 25 bp, Artificial
  probe
  misc_feature (1)..(25): SEQ ID NO: 878; WAN024GLM_at; Start 1640; Stop 1664
cggcattttacaaagaaaggagaga

SEQ ID NO: 250423 - DNA, 25 bp, Artificial
  probe
  misc_feature (1)..(25): SEQ ID NO: 878; WAN024GLM_at; Start 493; Stop 517
ccgattctcttgtttgatgagccac

SEQ ID NO: 250424 - DNA, 25 bp, Artificial
  probe
  misc_feature (1)..(25): SEQ ID NO: 878; WAN024GLM_at; Start 247; Stop 271
gataagtctcatctggttagcacag

SEQ ID NO: 250425 - DNA, 25 bp, Artificial
  probe
  misc_feature (1)..(25): SEQ ID NO: 878; WAN024GLM_at; Start 379; Stop 403
tataaatgggctgaaaagctggacc

SEQ ID NO: 250426 - DNA, 25 bp, Artificial
  probe
  misc_feature (1)..(25): SEQ ID NO: 878; WAN024GLM_at; Start 1383; Stop 1407
gaagaactatactgagattatggaa

SEQ ID NO: 250427 - DNA, 25 bp, Artificial
  probe
  misc_feature (1)..(25): SEQ ID NO: 878; WAN024GLM_at; Start 104; Stop 128
aagtcttaattgttggaccatctgg

SEQ ID NO: 250428 - DNA, 25 bp, Artificial
  probe
  misc_feature (1)..(25): SEQ ID NO: 878; WAN024GLM_at; Start 131; Stop 155
caggtaaatctaccttgggtcagtg

SEQ ID NO: 250429 - DNA, 25 bp, Artificial
  probe
  misc_feature (1)..(25): SEQ ID NO: 878; WAN024GLM_at; Start 353; Stop 377
ccctagatgagatgaaaggtcgtgt

SEQ ID NO: 250430 - DNA, 25 bp, Artificial
  probe
  misc_feature (1)..(25): SEQ ID NO: 878; WAN024GLM_at; Start 503; Stop 527
tgtttgatgagccactcgccaatct

SEQ ID NO: 250431 - DNA, 25 bp, Artificial
  probe
  misc_feature (1)..(25): SEQ ID NO: 7520; WAN024GLN_at; Start 16; Stop 40
caactagaacgaattgcccagctaa

SEQ ID NO: 250432 - DNA, 25 bp, Artificial
  probe
  misc_feature (1)..(25): SEQ ID NO: 7520; WAN024GLN_at; Start 21; Stop 45
agaacgaattgcccagctaatcgaa

SEQ ID NO: 250433 - DNA, 25 bp, Artificial
  probe
  misc_feature (1)..(25): SEQ ID NO: 7520; WAN024GLN_at; Start 18; Stop 42
actagaacgaattgcccagctaatc

SEQ ID NO: 250434 - DNA, 25 bp, Artificial
  probe
  misc_feature (1)..(25): SEQ ID NO: 7520; WAN024GLN_at; Start 17; Stop 41
aactagaacgaattgcccagctaat

SEQ ID NO: 250435 - DNA, 25 bp, Artificial
  probe
  misc_feature (1)..(25): SEQ ID NO: 7520; WAN024GLN_at; Start 23; Stop 47
aacgaattgcccagctaatcgaaga

SEQ ID NO: 250436 - DNA, 25 bp, Artificial
  probe
  misc_feature (1)..(25): SEQ ID NO: 7520; WAN024GLN_at; Start 14; Stop 38
tccaactagaacgaattgcccagct

SEQ ID NO: 250437 - DNA, 25 bp, Artificial
  probe
  misc_feature (1)..(25): SEQ ID NO: 7520; WAN024GLN_at; Start 15; Stop 39
ccaactagaacgaattgcccagcta

SEQ ID NO: 250438 - DNA, 25 bp, Artificial
  probe
  misc_feature (1)..(25): SEQ ID NO: 7520; WAN024GLN_at; Start 65; Stop 89
ggttgcccaattctcacatctgcaa

SEQ ID NO: 250439 - DNA, 25 bp, Artificial
  probe
  misc_feature (1)..(25): SEQ ID NO: 7520; WAN024GLN_at; Start 20; Stop 44
tagaacgaattgcccagctaatcga

SEQ ID NO: 250440 - DNA, 25 bp, Artificial
  probe
  misc_feature (1)..(25): SEQ ID NO: 7520; WAN024GLN_at; Start 12; Stop 36
aatccaactagaacgaattgcccag

SEQ ID NO: 250441 - DNA, 25 bp, Artificial
  probe
  misc_feature (1)..(25): SEQ ID NO: 7520; WAN024GLN_at; Start 24; Stop 48
acgaattgcccagctaatcgaagat

SEQ ID NO: 250442 - DNA, 25 bp, Artificial
  probe
  misc_feature (1)..(25): SEQ ID NO: 7520; WAN024GLN_at; Start 22; Stop 46
gaacgaattgcccagctaatcgaag

SEQ ID NO: 250443 - DNA, 25 bp, Artificial
  probe
  misc_feature (1)..(25): SEQ ID NO: 7520; WAN024GLN_at; Start 19; Stop 43
ctagaacgaattgcccagctaatcg

SEQ ID NO: 250444 - DNA, 25 bp, Artificial
  probe
  misc_feature (1)..(25): SEQ ID NO: 7520; WAN024GLN_at; Start 13; Stop 37
atccaactagaacgaattgcccagc

SEQ ID NO: 250445 - DNA, 25 bp, Artificial
  probe
  misc_feature (1)..(25): SEQ ID NO: 7520; WAN024GLN_at; Start 66; Stop 90
gttgcccaattctcacatctgcaaa

SEQ ID NO: 250446 - DNA, 25 bp, Artificial
  probe
  misc_feature (1)..(25): SEQ ID NO: 5734; WAN024GLO_at; Start 120; Stop 144
gaagttgagcggatattcgttggat

SEQ ID NO: 250447 - DNA, 25 bp, Artificial
  probe
  misc_feature (1)..(25): SEQ ID NO: 5734; WAN024GLO_at; Start 96; Stop 120
tcaaatcgataaagaagagcatagg

SEQ ID NO: 250448 - DNA, 25 bp, Artificial
  probe
  misc_feature (1)..(25): SEQ ID NO: 5734; WAN024GLO_at; Start 49; Stop 73
gattttttccttgctttcgcgattg

SEQ ID NO: 250449 - DNA, 25 bp, Artificial
  probe
  misc_feature (1)..(25): SEQ ID NO: 5734; WAN024GLO_at; Start 126; Stop 150
gagcggatattcgttggatatagga

SEQ ID NO: 250450 - DNA, 25 bp, Artificial
  probe
  misc_feature (1)..(25): SEQ ID NO: 5734; WAN024GLO_at; Start 26; Stop 50
ttattttcccagtagctattaaaga

SEQ ID NO: 250451 - DNA, 25 bp, Artificial
  probe
  misc_feature (1)..(25): SEQ ID NO: 5734; WAN024GLO_at; Start 154; Stop 178
ttggctgtgggtggctacaagaaca

SEQ ID NO: 250452 - DNA, 25 bp, Artificial
  probe
  misc_feature (1)..(25): SEQ ID NO: 5734; WAN024GLO_at; Start 66; Stop 90
cgcgattgatttccaaaaagtaggc

SEQ ID NO: 250453 - DNA, 25 bp, Artificial
  probe
  misc_feature (1)..(25): SEQ ID NO: 5734; WAN024GLO_at; Start 169; Stop 193
tacaagaacagtctctgtataggtc

SEQ ID NO: 250454 - DNA, 25 bp, Artificial
  probe
  misc_feature (1)..(25): SEQ ID NO: 5734; WAN024GLO_at; Start 162; Stop 186
gggtggctacaagaacagtctctgt

SEQ ID NO: 250455 - DNA, 25 bp, Artificial
  probe
  misc_feature (1)..(25): SEQ ID NO: 5734; WAN024GLO_at; Start 115; Stop 139
cataggaagttgagcggatattcgt

SEQ ID NO: 250456 - DNA, 25 bp, Artificial
  probe
  misc_feature (1)..(25): SEQ ID NO: 5734; WAN024GLO_at; Start 61; Stop 85
gctttcgcgattgatttccaaaaag

SEQ ID NO: 250457 - DNA, 25 bp, Artificial
  probe
  misc_feature (1)..(25): SEQ ID NO: 5734; WAN024GLO_at; Start 1; Stop 25
ttgtctacgatagccgttgagtttt

SEQ ID NO: 250458 - DNA, 25 bp, Artificial
  probe
  misc_feature (1)..(25): SEQ ID NO: 5734; WAN024GLO_at; Start 69; Stop 93
gattgatttccaaaaagtaggcata

SEQ ID NO: 250459 - DNA, 25 bp, Artificial
  probe
  misc_feature (1)..(25): SEQ ID NO: 5734; WAN024GLO_at; Start 82; Stop 106
aaagtaggcataaatcaaatcgata

SEQ ID NO: 250460 - DNA, 25 bp, Artificial
  probe
  misc_feature (1)..(25): SEQ ID NO: 5734; WAN024GLO_at; Start 110; Stop 134
aagagcataggaagttgagcggata

SEQ ID NO: 250461 - DNA, 25 bp, Artificial
  probe
  misc_feature (1)..(25): SEQ ID NO: 5734; WAN024GLO_at; Start 79; Stop 103
caaaaagtaggcataaatcaaatcg

SEQ ID NO: 250462 - DNA, 25 bp, Artificial
  probe
  misc_feature (1)..(25): SEQ ID NO: 5734; WAN024GLO_at; Start 167; Stop 191
gctacaagaacagtctctgtatagg

SEQ ID NO: 250463 - DNA, 25 bp, Artificial
  probe
  misc_feature (1)..(25): SEQ ID NO: 5734; WAN024GLO_at; Start 85; Stop 109
gtaggcataaatcaaatcgataaag

SEQ ID NO: 250464 - DNA, 25 bp, Artificial
  probe
  misc_feature (1)..(25): SEQ ID NO: 5734; WAN024GLO_at; Start 174; Stop 198
gaacagtctctgtataggtctggct

SEQ ID NO: 250465 - DNA, 25 bp, Artificial
  probe
  misc_feature (1)..(25): SEQ ID NO: 5734; WAN024GLO_at; Start 5; Stop 29
ctacgatagccgttgagttttttat

SEQ ID NO: 250466 - DNA, 25 bp, Artificial
  probe
  misc_feature (1)..(25): SEQ ID NO: 5734; WAN024GLO_at; Start 164; Stop 188
gtggctacaagaacagtctctgtat

SEQ ID NO: 250467 - DNA, 25 bp, Artificial
  probe
  misc_feature (1)..(25): SEQ ID NO: 5734; WAN024GLO_at; Start 57; Stop 81
ccttgctttcgcgattgatttccaa

SEQ ID NO: 250468 - DNA, 25 bp, Artificial
  probe
  misc_feature (1)..(25): SEQ ID NO: 5734; WAN024GLO_at; Start 97; Stop 121
caaatcgataaagaagagcatagga

SEQ ID NO: 250469 - DNA, 25 bp, Artificial
  probe
  misc_feature (1)..(25): SEQ ID NO: 5734; WAN024GLO_at; Start 47; Stop 71
aagattttttccttgctttcgcgat

SEQ ID NO: 250470 - DNA, 25 bp, Artificial
  probe
  misc_feature (1)..(25): SEQ ID NO: 5734; WAN024GLO_at; Start 131; Stop 155
gatattcgttggatataggagggtt

SEQ ID NO: 250471 - DNA, 25 bp, Artificial
  probe
  misc_feature (1)..(25): SEQ ID NO: 5734; WAN024GLO_at; Start 28; Stop 52
attttcccagtagctattaaagatt

SEQ ID NO: 250472 - DNA, 25 bp, Artificial
  probe
  misc_feature (1)..(25): SEQ ID NO: 5734; WAN024GLO_at; Start 137; Stop 161
cgttggatataggagggttggctgt

SEQ ID NO: 250473 - DNA, 25 bp, Artificial
  probe
  misc_feature (1)..(25): SEQ ID NO: 5734; WAN024GLO_at; Start 171; Stop 195
caagaacagtctctgtataggtctg

SEQ ID NO: 250474 - DNA, 25 bp, Artificial
  probe
  misc_feature (1)..(25): SEQ ID NO: 5734; WAN024GLO_at; Start 159; Stop 183
tgtgggtggctacaagaacagtctc

SEQ ID NO: 250475 - DNA, 25 bp, Artificial
  probe
  misc_feature (1)..(25): SEQ ID NO: 5734; WAN024GLO_at; Start 176; Stop 200
acagtctctgtataggtctggctat

SEQ ID NO: 250476 - DNA, 25 bp, Artificial
  probe
  misc_feature (1)..(25): SEQ ID NO: 5734; WAN024GLO_at; Start 105; Stop 129
taaagaagagcataggaagttgagc

SEQ ID NO: 250477 - DNA, 25 bp, Artificial
  probe
  misc_feature (1)..(25): SEQ ID NO: 5734; WAN024GLO_at; Start 75; Stop 99
tttccaaaaagtaggcataaatcaa

SEQ ID NO: 250478 - DNA, 25 bp, Artificial
  probe
  misc_feature (1)..(25): SEQ ID NO: 5734; WAN024GLO_at; Start 101; Stop 125
tcgataaagaagagcataggaagtt

SEQ ID NO: 250479 - DNA, 25 bp, Artificial
  probe
  misc_feature (1)..(25): SEQ ID NO: 5734; WAN024GLO_at; Start 161; Stop 185
tgggtggctacaagaacagtctctg

SEQ ID NO: 250480 - DNA, 25 bp, Artificial
  probe
  misc_feature (1)..(25): SEQ ID NO: 5553; WAN024GLP_at; Start 89; Stop 113
gtgagaagcccagtactagacaatt

SEQ ID NO: 250481 - DNA, 25 bp, Artificial
  probe
  misc_feature (1)..(25): SEQ ID NO: 5553; WAN024GLP_at; Start 144; Stop 168
gccgtcttggtctgtcaaagcttcg

SEQ ID NO: 250482 - DNA, 25 bp, Artificial
  probe
  misc_feature (1)..(25): SEQ ID NO: 5553; WAN024GLP_at; Start 107; Stop 131
gacaattttcatccatgatgctggt

SEQ ID NO: 250483 - DNA, 25 bp, Artificial
  probe
  misc_feature (1)..(25): SEQ ID NO: 5553; WAN024GLP_at; Start 118; Stop 142
tccatgatgctggttgtccaggcaa

SEQ ID NO: 250484 - DNA, 25 bp, Artificial
  probe
  misc_feature (1)..(25): SEQ ID NO: 5553; WAN024GLP_at; Start 148; Stop 172
tcttggtctgtcaaagcttcgcaga

SEQ ID NO: 250485 - DNA, 25 bp, Artificial
  probe
  misc_feature (1)..(25): SEQ ID NO: 5553; WAN024GLP_at; Start 203; Stop 227
tttcacgggcgacgaggccagaact

SEQ ID NO: 250486 - DNA, 25 bp, Artificial
  probe
  misc_feature (1)..(25): SEQ ID NO: 5553; WAN024GLP_at; Start 210; Stop 234
ggcgacgaggccagaactccctgtt

SEQ ID NO: 250487 - DNA, 25 bp, Artificial
  probe
  misc_feature (1)..(25): SEQ ID NO: 5553; WAN024GLP_at; Start 219; Stop 243
gccagaactccctgttccaaagaag

SEQ ID NO: 250488 - DNA, 25 bp, Artificial
  probe
  misc_feature (1)..(25): SEQ ID NO: 5553; WAN024GLP_at; Start 122; Stop 146
tgatgctggttgtccaggcaaagcc

SEQ ID NO: 250489 - DNA, 25 bp, Artificial
  probe
  misc_feature (1)..(25): SEQ ID NO: 5553; WAN024GLP_at; Start 146; Stop 170
cgtcttggtctgtcaaagcttcgca

SEQ ID NO: 250490 - DNA, 25 bp, Artificial
  probe
  misc_feature (1)..(25): SEQ ID NO: 5553; WAN024GLP_at; Start 46; Stop 70
gcatctaatagactatctaaaatag

SEQ ID NO: 250491 - DNA, 25 bp, Artificial
  probe
  misc_feature (1)..(25): SEQ ID NO: 5553; WAN024GLP_at; Start 115; Stop 139
tcatccatgatgctggttgtccagg

SEQ ID NO: 250492 - DNA, 25 bp, Artificial
  probe
  misc_feature (1)..(25): SEQ ID NO: 5553; WAN024GLP_at; Start 185; Stop 209
gcataaaacgtaatttcatttcacg

SEQ ID NO: 250493 - DNA, 25 bp, Artificial
  probe
  misc_feature (1)..(25): SEQ ID NO: 5553; WAN024GLP_at; Start 76; Stop 100
gttgagcctgaaagtgagaagccca

SEQ ID NO: 250494 - DNA, 25 bp, Artificial
  probe
  misc_feature (1)..(25): SEQ ID NO: 5553; WAN024GLP_at; Start 140; Stop 164
caaagccgtcttggtctgtcaaagc

SEQ ID NO: 250495 - DNA, 25 bp, Artificial
  probe
  misc_feature (1)..(25): SEQ ID NO: 5553; WAN024GLP_at; Start 157; Stop 181
gtcaaagcttcgcagaccacaccta

SEQ ID NO: 250496 - DNA, 25 bp, Artificial
  probe
  misc_feature (1)..(25): SEQ ID NO: 5553; WAN024GLP_at; Start 132; Stop 156
tgtccaggcaaagccgtcttggtct

SEQ ID NO: 250497 - DNA, 25 bp, Artificial
  probe
  misc_feature (1)..(25): SEQ ID NO: 5553; WAN024GLP_at; Start 68; Stop 92
tagaaggagttgagcctgaaagtga

SEQ ID NO: 250498 - DNA, 25 bp, Artificial
  probe
  misc_feature (1)..(25): SEQ ID NO: 5553; WAN024GLP_at; Start 193; Stop 217
cgtaatttcatttcacgggcgacga

SEQ ID NO: 250499 - DNA, 25 bp, Artificial
  probe
  misc_feature (1)..(25): SEQ ID NO: 5553; WAN024GLP_at; Start 84; Stop 108
tgaaagtgagaagcccagtactaga

SEQ ID NO: 250500 - DNA, 25 bp, Artificial
  probe
  misc_feature (1)..(25): SEQ ID NO: 5553; WAN024GLP_at; Start 78; Stop 102
tgagcctgaaagtgagaagcccagt

SEQ ID NO: 250501 - DNA, 25 bp, Artificial
  probe
  misc_feature (1)..(25): SEQ ID NO: 5553; WAN024GLP_at; Start 136; Stop 160
caggcaaagccgtcttggtctgtca

SEQ ID NO: 250502 - DNA, 25 bp, Artificial
  probe
  misc_feature (1)..(25): SEQ ID NO: 5553; WAN024GLP_at; Start 74; Stop 98
gagttgagcctgaaagtgagaagcc

SEQ ID NO: 250503 - DNA, 25 bp, Artificial
  probe
  misc_feature (1)..(25): SEQ ID NO: 5553; WAN024GLP_at; Start 81; Stop 105
gcctgaaagtgagaagcccagtact

SEQ ID NO: 250504 - DNA, 25 bp, Artificial
  probe
  misc_feature (1)..(25): SEQ ID NO: 5553; WAN024GLP_at; Start 129; Stop 153
ggttgtccaggcaaagccgtcttgg

SEQ ID NO: 250505 - DNA, 25 bp, Artificial
  probe
  misc_feature (1)..(25): SEQ ID NO: 5553; WAN024GLP_at; Start 222; Stop 246
agaactccctgttccaaagaagtag

SEQ ID NO: 250506 - DNA, 25 bp, Artificial
  probe
  misc_feature (1)..(25): SEQ ID NO: 5553; WAN024GLP_at; Start 195; Stop 219
taatttcatttcacgggcgacgagg

SEQ ID NO: 250507 - DNA, 25 bp, Artificial
  probe
  misc_feature (1)..(25): SEQ ID NO: 5553; WAN024GLP_at; Start 216; Stop 240
gaggccagaactccctgttccaaag

SEQ ID NO: 250508 - DNA, 25 bp, Artificial
  probe
  misc_feature (1)..(25): SEQ ID NO: 5553; WAN024GLP_at; Start 126; Stop 150
gctggttgtccaggcaaagccgtct

SEQ ID NO: 250509 - DNA, 25 bp, Artificial
  probe
  misc_feature (1)..(25): SEQ ID NO: 5553; WAN024GLP_at; Start 154; Stop 178
tctgtcaaagcttcgcagaccacac

SEQ ID NO: 250510 - DNA, 25 bp, Artificial
  probe
  misc_feature (1)..(25): SEQ ID NO: 5553; WAN024GLP_at; Start 61; Stop 85
tctaaaatagaaggagttgagcctg

SEQ ID NO: 250511 - DNA, 25 bp, Artificial
  probe
  misc_feature (1)..(25): SEQ ID NO: 5553; WAN024GLP_at; Start 93; Stop 117
gaagcccagtactagacaattttca

SEQ ID NO: 250512 - DNA, 25 bp, Artificial
  probe
  misc_feature (1)..(25): SEQ ID NO: 5553; WAN024GLP_at; Start 102; Stop 126
tactagacaattttcatccatgatg

SEQ ID NO: 250513 - DNA, 25 bp, Artificial
  probe
  misc_feature (1)..(25): SEQ ID NO: 5553; WAN024GLP_at; Start 96; Stop 120
gcccagtactagacaattttcatcc

SEQ ID NO: 250514 - DNA, 25 bp, Artificial
  probe
  misc_feature (1)..(25): SEQ ID NO: 3379; WAN024GLQ_at; Start 281; Stop 305
cgaccgtggaaggtataagaatgct

SEQ ID NO: 250515 - DNA, 25 bp, Artificial
  probe
  misc_feature (1)..(25): SEQ ID NO: 3379; WAN024GLQ_at; Start 393; Stop 417
tatctggcgtgacaatgtattgatt

SEQ ID NO: 250516 - DNA, 25 bp, Artificial
  probe
  misc_feature (1)..(25): SEQ ID NO: 3379; WAN024GLQ_at; Start 321; Stop 345
tattggccacctcagaaatctcacg

SEQ ID NO: 250517 - DNA, 25 bp, Artificial
  probe
  misc_feature (1)..(25): SEQ ID NO: 3379; WAN024GLQ_at; Start 464; Stop 488
ggatcgacaaccgatacaaacgtcg

SEQ ID NO: 250518 - DNA, 25 bp, Artificial
  probe
  misc_feature (1)..(25): SEQ ID NO: 3379; WAN024GLQ_at; Start 350; Stop 374
gctacaatgccaacgtgtttcttga

SEQ ID NO: 250519 - DNA, 25 bp, Artificial
  probe
  misc_feature (1)..(25): SEQ ID NO: 3379; WAN024GLQ_at; Start 68; Stop 92
tccagcttgtaaaattcttcccgtg

SEQ ID NO: 250520 - DNA, 25 bp, Artificial
  probe
  misc_feature (1)..(25): SEQ ID NO: 3379; WAN024GLQ_at; Start 249; Stop 273
ccagtttagcaccagtataggcata

SEQ ID NO: 250521 - DNA, 25 bp, Artificial
  probe
  misc_feature (1)..(25): SEQ ID NO: 3379; WAN024GLQ_at; Start 3; Stop 27
gattttgatagaccagcatatcagc

SEQ ID NO: 250522 - DNA, 25 bp, Artificial
  probe
  misc_feature (1)..(25): SEQ ID NO: 3379; WAN024GLQ_at; Start 163; Stop 187
tatgatggtcgctacgactggaagc

SEQ ID NO: 250523 - DNA, 25 bp, Artificial
  probe
  misc_feature (1)..(25): SEQ ID NO: 3379; WAN024GLQ_at; Start 305; Stop 329
tctgtgttttgacgcctattggcca

SEQ ID NO: 250524 - DNA, 25 bp, Artificial
  probe
  misc_feature (1)..(25): SEQ ID NO: 3379; WAN024GLQ_at; Start 482; Stop 506
aacgtcgttccctcaggccagtaat

SEQ ID NO: 250525 - DNA, 25 bp, Artificial
  probe
  misc_feature (1)..(25): SEQ ID NO: 3379; WAN024GLQ_at; Start 380; Stop 404
gaaagcgtcccattatctggcgtga

SEQ ID NO: 250526 - DNA, 25 bp, Artificial
  probe
  misc_feature (1)..(25): SEQ ID NO: 3379; WAN024GLQ_at; Start 296; Stop 320
taagaatgctctgtgttttgacgcc

SEQ ID NO: 250527 - DNA, 25 bp, Artificial
  probe
  misc_feature (1)..(25): SEQ ID NO: 3379; WAN024GLQ_at; Start 546; Stop 570
tataaggcgtgatatcgtgcgtcaa

SEQ ID NO: 250528 - DNA, 25 bp, Artificial
  probe
  misc_feature (1)..(25): SEQ ID NO: 3379; WAN024GLQ_at; Start 34; Stop 58
gatggtcacttcaaaacgatcacca

SEQ ID NO: 250529 - DNA, 25 bp, Artificial
  probe
  misc_feature (1)..(25): SEQ ID NO: 3379; WAN024GLQ_at; Start 86; Stop 110
tcccgtgtgatagaggtccaaagcg

SEQ ID NO: 250530 - DNA, 25 bp, Artificial
  probe
  misc_feature (1)..(25): SEQ ID NO: 3379; WAN024GLQ_at; Start 335; Stop 359
gaaatctcacgaatggctacaatgc

SEQ ID NO: 250531 - DNA, 25 bp, Artificial
  probe
  misc_feature (1)..(25): SEQ ID NO: 3379; WAN024GLQ_at; Start 497; Stop 521
ggccagtaatccaccgtctgaaaga

SEQ ID NO: 250532 - DNA, 25 bp, Artificial
  probe
  misc_feature (1)..(25): SEQ ID NO: 3379; WAN024GLQ_at; Start 208; Stop 232
gagctctggccctacttcctcaaaa

SEQ ID NO: 250533 - DNA, 25 bp, Artificial
  probe
  misc_feature (1)..(25): SEQ ID NO: 3379; WAN024GLQ_at; Start 448; Stop 472
tttcgaaccgacacctggatcgaca

SEQ ID NO: 250534 - DNA, 25 bp, Artificial
  probe
  misc_feature (1)..(25): SEQ ID NO: 3379; WAN024GLQ_at; Start 174; Stop 198
ctacgactggaagctctacaatctg

SEQ ID NO: 250535 - DNA, 25 bp, Artificial
  probe
  misc_feature (1)..(25): SEQ ID NO: 3379; WAN024GLQ_at; Start 115; Stop 139
gaaacgcacatccagaatatcaatg

SEQ ID NO: 250536 - DNA, 25 bp, Artificial
  probe
  misc_feature (1)..(25): SEQ ID NO: 3379; WAN024GLQ_at; Start 512; Stop 536
gtctgaaagagacgatagctcccct

SEQ ID NO: 250537 - DNA, 25 bp, Artificial
  probe
  misc_feature (1)..(25): SEQ ID NO: 3379; WAN024GLQ_at; Start 264; Stop 288
tataggcatagacatcacgaccgtg

SEQ ID NO: 250538 - DNA, 25 bp, Artificial
  probe
  misc_feature (1)..(25): SEQ ID NO: 3379; WAN024GLQ_at; Start 51; Stop 75
gatcaccaaattctggttccagctt

SEQ ID NO: 250539 - DNA, 25 bp, Artificial
  probe
  misc_feature (1)..(25): SEQ ID NO: 3379; WAN024GLQ_at; Start 525; Stop 549
gatagctcccctcaaaaatattata

SEQ ID NO: 250540 - DNA, 25 bp, Artificial
  probe
  misc_feature (1)..(25): SEQ ID NO: 3379; WAN024GLQ_at; Start 368; Stop 392
ttcttgataaaggaaagcgtcccat

SEQ ID NO: 250541 - DNA, 25 bp, Artificial
  probe
  misc_feature (1)..(25): SEQ ID NO: 3379; WAN024GLQ_at; Start 129; Stop 153
gaatatcaatggctcccttcaccag

SEQ ID NO: 250542 - DNA, 25 bp, Artificial
  probe
  misc_feature (1)..(25): SEQ ID NO: 3379; WAN024GLQ_at; Start 436; Stop 460
tacactcttacgtttcgaaccgaca

SEQ ID NO: 250543 - DNA, 25 bp, Artificial
  probe
  misc_feature (1)..(25): SEQ ID NO: 3379; WAN024GLQ_at; Start 100; Stop 124
ggtccaaagcgaaccgaaacgcaca

SEQ ID NO: 250544 - DNA, 25 bp, Artificial
  probe
  misc_feature (1)..(25): SEQ ID NO: 3379; WAN024GLQ_at; Start 423; Stop 447
cagtcttggcaactacactcttacg

SEQ ID NO: 250545 - DNA, 25 bp, Artificial
  probe
  misc_feature (1)..(25): SEQ ID NO: 3379; WAN024GLQ_at; Start 21; Stop 45
tatcagcatgatagatggtcacttc

SEQ ID NO: 250546 - DNA, 25 bp, Artificial
  probe
  misc_feature (1)..(25): SEQ ID NO: 3379; WAN024GLQ_at; Start 150; Stop 174
ccagatgatcttctatgatggtcgc

SEQ ID NO: 250547 - DNA, 25 bp, Artificial
  probe
  misc_feature (1)..(25): SEQ ID NO: 3379; WAN024GLQ_at; Start 228; Stop 252
caaaagtaatgtgaccactggccag

SEQ ID NO: 250548 - DNA, 25 bp, Artificial
  probe
  misc_feature (1)..(25): SEQ ID NO: 2248; WAN024GLR_at; Start 808; Stop 832
aaactcaacggctatcgtagacaaa

SEQ ID NO: 250549 - DNA, 25 bp, Artificial
  probe
  misc_feature (1)..(25): SEQ ID NO: 2248; WAN024GLR_at; Start 164; Stop 188
cccgctttgctaaaaagtgtggctt

SEQ ID NO: 250550 - DNA, 25 bp, Artificial
  probe
  misc_feature (1)..(25): SEQ ID NO: 2248; WAN024GLR_at; Start 535; Stop 559
tcactttcaggctcaactccttcta

SEQ ID NO: 250551 - DNA, 25 bp, Artificial
  probe
  misc_feature (1)..(25): SEQ ID NO: 2248; WAN024GLR_at; Start 176; Stop 200
aaaagtgtggctttactggctaccg

SEQ ID NO: 250552 - DNA, 25 bp, Artificial
  probe
  misc_feature (1)..(25): SEQ ID NO: 2248; WAN024GLR_at; Start 172; Stop 196
gctaaaaagtgtggctttactggct

SEQ ID NO: 250553 - DNA, 25 bp, Artificial
  probe
  misc_feature (1)..(25): SEQ ID NO: 2248; WAN024GLR_at; Start 477; Stop 501
agacggctttgcctggacaaccagc

SEQ ID NO: 250554 - DNA, 25 bp, Artificial
  probe
  misc_feature (1)..(25): SEQ ID NO: 2248; WAN024GLR_at; Start 161; Stop 185
tgacccgctttgctaaaaagtgtgg

SEQ ID NO: 250555 - DNA, 25 bp, Artificial
  probe
  misc_feature (1)..(25): SEQ ID NO: 2248; WAN024GLR_at; Start 812; Stop 836
tcaacggctatcgtagacaaaaacg

SEQ ID NO: 250556 - DNA, 25 bp, Artificial
  probe
  misc_feature (1)..(25): SEQ ID NO: 2248; WAN024GLR_at; Start 167; Stop 191
gctttgctaaaaagtgtggctttac

SEQ ID NO: 250557 - DNA, 25 bp, Artificial
  probe
  misc_feature (1)..(25): SEQ ID NO: 2248; WAN024GLR_at; Start 475; Stop 499
caagacggctttgcctggacaacca

SEQ ID NO: 250558 - DNA, 25 bp, Artificial
  probe
  misc_feature (1)..(25): SEQ ID NO: 2248; WAN024GLR_at; Start 298; Stop 322
aatatgagggaacaaacacaagact

SEQ ID NO: 250559 - DNA, 25 bp, Artificial
  probe
  misc_feature (1)..(25): SEQ ID NO: 2248; WAN024GLR_at; Start 185; Stop 209
gctttactggctaccgagaatttat

SEQ ID NO: 250560 - DNA, 25 bp, Artificial
  probe
  misc_feature (1)..(25): SEQ ID NO: 2248; WAN024GLR_at; Start 307; Stop 331
gaacaaacacaagacttgattgacg

SEQ ID NO: 250561 - DNA, 25 bp, Artificial
  probe
  misc_feature (1)..(25): SEQ ID NO: 2248; WAN024GLR_at; Start 547; Stop 571
tcaactccttctattttagatagtc

SEQ ID NO: 250562 - DNA, 25 bp, Artificial
  probe
  misc_feature (1)..(25): SEQ ID NO: 2248; WAN024GLR_at; Start 730; Stop 754
gatttgatttatgcctactttttgg

SEQ ID NO: 250563 - DNA, 25 bp, Artificial
  probe
  misc_feature (1)..(25): SEQ ID NO: 2248; WAN024GLR_at; Start 30; Stop 54
tgattcacattttgaagaaatgaca

SEQ ID NO: 250564 - DNA, 25 bp, Artificial
  probe
  misc_feature (1)..(25): SEQ ID NO: 2248; WAN024GLR_at; Start 262; Stop 286
agtccactgaccaaacgagtcctca

SEQ ID NO: 250565 - DNA, 25 bp, Artificial
  probe
  misc_feature (1)..(25): SEQ ID NO: 2248; WAN024GLR_at; Start 189; Stop 213
tactggctaccgagaatttattttc

SEQ ID NO: 250566 - DNA, 25 bp, Artificial
  probe
  misc_feature (1)..(25): SEQ ID NO: 2248; WAN024GLR_at; Start 698; Stop 722
tatccgctcaacttcctatgctctt

SEQ ID NO: 250567 - DNA, 25 bp, Artificial
  probe
  misc_feature (1)..(25): SEQ ID NO: 2248; WAN024GLR_at; Start 300; Stop 324
tatgagggaacaaacacaagacttg

SEQ ID NO: 250568 - DNA, 25 bp, Artificial
  probe
  misc_feature (1)..(25): SEQ ID NO: 2248; WAN024GLR_at; Start 181; Stop 205
tgtggctttactggctaccgagaat

SEQ ID NO: 250569 - DNA, 25 bp, Artificial
  probe
  misc_feature (1)..(25): SEQ ID NO: 2248; WAN024GLR_at; Start 479; Stop 503
acggctttgcctggacaaccagcat

SEQ ID NO: 250570 - DNA, 25 bp, Artificial
  probe
  misc_feature (1)..(25): SEQ ID NO: 2248; WAN024GLR_at; Start 227; Stop 251
aggcagaaaatcaagccaaccaagt

SEQ ID NO: 250571 - DNA, 25 bp, Artificial
  probe
  misc_feature (1)..(25): SEQ ID NO: 2248; WAN024GLR_at; Start 302; Stop 326
tgagggaacaaacacaagacttgat

SEQ ID NO: 250572 - DNA, 25 bp, Artificial
  probe
  misc_feature (1)..(25): SEQ ID NO: 2248; WAN024GLR_at; Start 183; Stop 207
tggctttactggctaccgagaattt

SEQ ID NO: 250573 - DNA, 25 bp, Artificial
  probe
  misc_feature (1)..(25): SEQ ID NO: 2248; WAN024GLR_at; Start 542; Stop 566
caggctcaactccttctattttaga

SEQ ID NO: 250574 - DNA, 25 bp, Artificial
  probe
  misc_feature (1)..(25): SEQ ID NO: 2248; WAN024GLR_at; Start 703; Stop 727
gctcaacttcctatgctcttcttta

SEQ ID NO: 250575 - DNA, 25 bp, Artificial
  probe
  misc_feature (1)..(25): SEQ ID NO: 2248; WAN024GLR_at; Start 723; Stop 747
ctttatcgatttgatttatgcctac

SEQ ID NO: 250576 - DNA, 25 bp, Artificial
  probe
  misc_feature (1)..(25): SEQ ID NO: 2248; WAN024GLR_at; Start 712; Stop 736
cctatgctcttctttatcgatttga

SEQ ID NO: 250577 - DNA, 25 bp, Artificial
  probe
  misc_feature (1)..(25): SEQ ID NO: 2248; WAN024GLR_at; Start 706; Stop 730
caacttcctatgctcttctttatcg

SEQ ID NO: 250578 - DNA, 25 bp, Artificial
  probe
  misc_feature (1)..(25): SEQ ID NO: 2248; WAN024GLR_at; Start 815; Stop 839
acggctatcgtagacaaaaacgtgt

SEQ ID NO: 250579 - DNA, 25 bp, Artificial
  probe
  misc_feature (1)..(25): SEQ ID NO: 2248; WAN024GLR_at; Start 178; Stop 202
aagtgtggctttactggctaccgag

SEQ ID NO: 250580 - DNA, 25 bp, Artificial
  probe
  misc_feature (1)..(25): SEQ ID NO: 2248; WAN024GLR_at; Start 740; Stop 764
atgcctactttttggaaatcaatcg

SEQ ID NO: 250581 - DNA, 25 bp, Artificial
  probe
  misc_feature (1)..(25): SEQ ID NO: 2248; WAN024GLR_at; Start 309; Stop 333
acaaacacaagacttgattgacgaa

SEQ ID NO: 250582 - DNA, 25 bp, Artificial
  probe
  misc_feature (1)..(25): SEQ ID NO: 1674; WAN024GLS_at; Start 369; Stop 393
gatttctgaggtggccaataggcgt

SEQ ID NO: 250583 - DNA, 25 bp, Artificial
  probe
  misc_feature (1)..(25): SEQ ID NO: 1674; WAN024GLS_at; Start 56; Stop 80
cagactttggtctggttgatggtgc

SEQ ID NO: 250584 - DNA, 25 bp, Artificial
  probe
  misc_feature (1)..(25): SEQ ID NO: 1674; WAN024GLS_at; Start 316; Stop 340
aatgggacgctttcctttatcaaga

SEQ ID NO: 250585 - DNA, 25 bp, Artificial
  probe
  misc_feature (1)..(25): SEQ ID NO: 1674; WAN024GLS_at; Start 566; Stop 590
gagccattgatattctggatgtgcg

SEQ ID NO: 250586 - DNA, 25 bp, Artificial
  probe
  misc_feature (1)..(25): SEQ ID NO: 1674; WAN024GLS_at; Start 652; Stop 676
ggtgatcgttttgaagtgaccatct

SEQ ID NO: 250587 - DNA, 25 bp, Artificial
  probe
  misc_feature (1)..(25): SEQ ID NO: 1674; WAN024GLS_at; Start 442; Stop 466
tatactggtgctaaactggccagtg

SEQ ID NO: 250588 - DNA, 25 bp, Artificial
  probe
  misc_feature (1)..(25): SEQ ID NO: 1674; WAN024GLS_at; Start 354; Stop 378
tgtagccattcgtgagatttctgag

SEQ ID NO: 250589 - DNA, 25 bp, Artificial
  probe
  misc_feature (1)..(25): SEQ ID NO: 1674; WAN024GLS_at; Start 827; Stop 851
taggtgtcggttcatcttggaccat

SEQ ID NO: 250590 - DNA, 25 bp, Artificial
  probe
  misc_feature (1)..(25): SEQ ID NO: 1674; WAN024GLS_at; Start 141; Stop 165
gacgcacgatatcacgccttataat

SEQ ID NO: 250591 - DNA, 25 bp, Artificial
  probe
  misc_feature (1)..(25): SEQ ID NO: 1674; WAN024GLS_at; Start 724; Stop 748
tcatttgcagatgtgagaattgggc

SEQ ID NO: 250592 - DNA, 25 bp, Artificial
  probe
  misc_feature (1)..(25): SEQ ID NO: 1674; WAN024GLS_at; Start 264; Stop 288
taagagtgtagttgccaagactgca

SEQ ID NO: 250593 - DNA, 25 bp, Artificial
  probe
  misc_feature (1)..(25): SEQ ID NO: 1674; WAN024GLS_at; Start 300; Stop 324
cattgtcacgccagataatgggacg

SEQ ID NO: 250594 - DNA, 25 bp, Artificial
  probe
  misc_feature (1)..(25): SEQ ID NO: 1674; WAN024GLS_at; Start 545; Stop 569
tagaagatcatctggtgaagggagc

SEQ ID NO: 250595 - DNA, 25 bp, Artificial
  probe
  misc_feature (1)..(25): SEQ ID NO: 1674; WAN024GLS_at; Start 631; Stop 655
tacaagctggaaccagaatttggtg

SEQ ID NO: 250596 - DNA, 25 bp, Artificial
  probe
  misc_feature (1)..(25): SEQ ID NO: 1674; WAN024GLS_at; Start 794; Stop 818
tcaaccaaggttcctttgccaaggc

SEQ ID NO: 250597 - DNA, 25 bp, Artificial
  probe
  misc_feature (1)..(25): SEQ ID NO: 1674; WAN024GLS_at; Start 249; Stop 273
tgtcggttcgaaacgtaagagtgta

SEQ ID NO: 250598 - DNA, 25 bp, Artificial
  probe
  misc_feature (1)..(25): SEQ ID NO: 1674; WAN024GLS_at; Start 336; Stop 360
caagaaacacgttggcattgtagcc

SEQ ID NO: 250599 - DNA, 25 bp, Artificial
  probe
  misc_feature (1)..(25): SEQ ID NO: 1674; WAN024GLS_at; Start 41; Stop 65
tactggtattacaatcagactttgg

SEQ ID NO: 250600 - DNA, 25 bp, Artificial
  probe
  misc_feature (1)..(25): SEQ ID NO: 1674; WAN024GLS_at; Start 175; Stop 199
gggagctatcgtctctttcagacgg

SEQ ID NO: 250601 - DNA, 25 bp, Artificial
  probe
  misc_feature (1)..(25): SEQ ID NO: 1674; WAN024GLS_at; Start 530; Stop 554
tcgtagcgaccatcatagaagatca

SEQ ID NO: 250602 - DNA, 25 bp, Artificial
  probe
  misc_feature (1)..(25): SEQ ID NO: 1674; WAN024GLS_at; Start 98; Stop 122
gagtggctttagaagagtctccaac

SEQ ID NO: 250603 - DNA, 25 bp, Artificial
  probe
  misc_feature (1)..(25): SEQ ID NO: 1674; WAN024GLS_at; Start 600; Stop 624
gctttggacctctatcacacgggaa

SEQ ID NO: 250604 - DNA, 25 bp, Artificial
  probe
  misc_feature (1)..(25): SEQ ID NO: 1674; WAN024GLS_at; Start 461; Stop 485
ccagtggtcacattacttttgagga

SEQ ID NO: 250605 - DNA, 25 bp, Artificial
  probe
  misc_feature (1)..(25): SEQ ID NO: 1674; WAN024GLS_at; Start 513; Stop 537
gattgtagagcttccagtcgtagcg

SEQ ID NO: 250606 - DNA, 25 bp, Artificial
  probe
  misc_feature (1)..(25): SEQ ID NO: 1674; WAN024GLS_at; Start 476; Stop 500
cttttgaggaagtagggccagagct

SEQ ID NO: 250607 - DNA, 25 bp, Artificial
  probe
  misc_feature (1)..(25): SEQ ID NO: 1674; WAN024GLS_at; Start 416; Stop 440
ccttccacggtcgtgatgtctatgc

SEQ ID NO: 250608 - DNA, 25 bp, Artificial
  probe
  misc_feature (1)..(25): SEQ ID NO: 1674; WAN024GLS_at; Start 387; Stop 411
taggcgtcaaaacacagagcattct

SEQ ID NO: 250609 - DNA, 25 bp, Artificial
  probe
  misc_feature (1)..(25): SEQ ID NO: 1674; WAN024GLS_at; Start 700; Stop 724
caaaatcaggttgtctatggcaaat

SEQ ID NO: 250610 - DNA, 25 bp, Artificial
  probe
  misc_feature (1)..(25): SEQ ID NO: 1674; WAN024GLS_at; Start 782; Stop 806
taggtttggctatcaaccaaggttc

SEQ ID NO: 250611 - DNA, 25 bp, Artificial
  probe
  misc_feature (1)..(25): SEQ ID NO: 1674; WAN024GLS_at; Start 615; Stop 639
cacacgggaagaattttacaagctg

SEQ ID NO: 250612 - DNA, 25 bp, Artificial
  probe
  misc_feature (1)..(25): SEQ ID NO: 1674; WAN024GLS_at; Start 811; Stop 835
gccaaggcctataatgtaggtgtcg

SEQ ID NO: 250613 - DNA, 25 bp, Artificial
  probe
  misc_feature (1)..(25): SEQ ID NO: 1674; WAN024GLS_at; Start 401; Stop 425
cagagcattcttataccttccacgg

SEQ ID NO: 250614 - DNA, 25 bp, Artificial
  probe
  misc_feature (1)..(25): SEQ ID NO: 1674; WAN024GLS_at; Start 585; Stop 609
tgtgcgtttcggttcgctttggacc

SEQ ID NO: 250615 - DNA, 25 bp, Artificial
  probe
  misc_feature (1)..(25): SEQ ID NO: 1674; WAN024GLS_at; Start 230; Stop 254
tatcggttgtcgatccaggtgtcgg

SEQ ID NO: 250616 - DNA, 25 bp, Artificial
  probe
  misc_feature (1)..(25): SEQ ID NO: 4092; WAN024GLT_at; Start 228; Stop 252
taaaacctactttttcatgatgtaa

SEQ ID NO: 250617 - DNA, 25 bp, Artificial
  probe
  misc_feature (1)..(25): SEQ ID NO: 4092; WAN024GLT_at; Start 68; Stop 92
gccccgttaccaaggataccaatga

SEQ ID NO: 250618 - DNA, 25 bp, Artificial
  probe
  misc_feature (1)..(25): SEQ ID NO: 4092; WAN024GLT_at; Start 120; Stop 144
gaacagcttcgtcttgctcaatcag

SEQ ID NO: 250619 - DNA, 25 bp, Artificial
  probe
  misc_feature (1)..(25): SEQ ID NO: 4092; WAN024GLT_at; Start 159; Stop 183
tttctgcaaccaaggagcgacagag

SEQ ID NO: 250620 - DNA, 25 bp, Artificial
  probe
  misc_feature (1)..(25): SEQ ID NO: 4092; WAN024GLT_at; Start 35; Stop 59
tggacgctggcttgctcaagaatgg

SEQ ID NO: 250621 - DNA, 25 bp, Artificial
  probe
  misc_feature (1)..(25): SEQ ID NO: 4092; WAN024GLT_at; Start 166; Stop 190
aaccaaggagcgacagagggcaaaa

SEQ ID NO: 250622 - DNA, 25 bp, Artificial
  probe
  misc_feature (1)..(25): SEQ ID NO: 4092; WAN024GLT_at; Start 71; Stop 95
ccgttaccaaggataccaatgatat

SEQ ID NO: 250623 - DNA, 25 bp, Artificial
  probe
  misc_feature (1)..(25): SEQ ID NO: 4092; WAN024GLT_at; Start 96; Stop 120
caaagcgactgacaatatgattgag

SEQ ID NO: 250624 - DNA, 25 bp, Artificial
  probe
  misc_feature (1)..(25): SEQ ID NO: 4092; WAN024GLT_at; Start 156; Stop 180
gcttttctgcaaccaaggagcgaca

SEQ ID NO: 250625 - DNA, 25 bp, Artificial
  probe
  misc_feature (1)..(25): SEQ ID NO: 4092; WAN024GLT_at; Start 42; Stop 66
tggcttgctcaagaatggcaaaatc

SEQ ID NO: 250626 - DNA, 25 bp, Artificial
  probe
  misc_feature (1)..(25): SEQ ID NO: 4092; WAN024GLT_at; Start 91; Stop 115
gatatcaaagcgactgacaatatga

SEQ ID NO: 250627 - DNA, 25 bp, Artificial
  probe
  misc_feature (1)..(25): SEQ ID NO: 4092; WAN024GLT_at; Start 149; Stop 173
acatcatgcttttctgcaaccaagg

SEQ ID NO: 250628 - DNA, 25 bp, Artificial
  probe
  misc_feature (1)..(25): SEQ ID NO: 4092; WAN024GLT_at; Start 108; Stop 132
caatatgattgagaacagcttcgtc

SEQ ID NO: 250629 - DNA, 25 bp, Artificial
  probe
  misc_feature (1)..(25): SEQ ID NO: 4092; WAN024GLT_at; Start 6; Stop 30
cagtcagggcgataaagatatcaca

SEQ ID NO: 250630 - DNA, 25 bp, Artificial
  probe
  misc_feature (1)..(25): SEQ ID NO: 4092; WAN024GLT_at; Start 114; Stop 138
gattgagaacagcttcgtcttgctc

SEQ ID NO: 250631 - DNA, 25 bp, Artificial
  probe
  misc_feature (1)..(25): SEQ ID NO: 4092; WAN024GLT_at; Start 125; Stop 149
gcttcgtcttgctcaatcagcaaaa

SEQ ID NO: 250632 - DNA, 25 bp, Artificial
  probe
  misc_feature (1)..(25): SEQ ID NO: 4092; WAN024GLT_at; Start 206; Stop 230
ccgacaaggataattttcataataa

SEQ ID NO: 250633 - DNA, 25 bp, Artificial
  probe
  misc_feature (1)..(25): SEQ ID NO: 4092; WAN024GLT_at; Start 9; Stop 33
tcagggcgataaagatatcacaatc

SEQ ID NO: 250634 - DNA, 25 bp, Artificial
  probe
  misc_feature (1)..(25): SEQ ID NO: 4092; WAN024GLT_at; Start 106; Stop 130
gacaatatgattgagaacagcttcg

SEQ ID NO: 250635 - DNA, 25 bp, Artificial
  probe
  misc_feature (1)..(25): SEQ ID NO: 4092; WAN024GLT_at; Start 78; Stop 102
caaggataccaatgatatcaaagcg

SEQ ID NO: 250636 - DNA, 25 bp, Artificial
  probe
  misc_feature (1)..(25): SEQ ID NO: 4092; WAN024GLT_at; Start 24; Stop 48
tatcacaatcttggacgctggcttg

SEQ ID NO: 250637 - DNA, 25 bp, Artificial
  probe
  misc_feature (1)..(25): SEQ ID NO: 4092; WAN024GLT_at; Start 134; Stop 158
tgctcaatcagcaaaacatcatgct

SEQ ID NO: 250638 - DNA, 25 bp, Artificial
  probe
  misc_feature (1)..(25): SEQ ID NO: 4092; WAN024GLT_at; Start 86; Stop 110
ccaatgatatcaaagcgactgacaa

SEQ ID NO: 250639 - DNA, 25 bp, Artificial
  probe
  misc_feature (1)..(25): SEQ ID NO: 4092; WAN024GLT_at; Start 82; Stop 106
gataccaatgatatcaaagcgactg

SEQ ID NO: 250640 - DNA, 25 bp, Artificial
  probe
  misc_feature (1)..(25): SEQ ID NO: 4092; WAN024GLT_at; Start 29; Stop 53
caatcttggacgctggcttgctcaa

SEQ ID NO: 250641 - DNA, 25 bp, Artificial
  probe
  misc_feature (1)..(25): SEQ ID NO: 4092; WAN024GLT_at; Start 201; Stop 225
cccctccgacaaggataattttcat

SEQ ID NO: 250642 - DNA, 25 bp, Artificial
  probe
  misc_feature (1)..(25): SEQ ID NO: 4092; WAN024GLT_at; Start 26; Stop 50
tcacaatcttggacgctggcttgct

SEQ ID NO: 250643 - DNA, 25 bp, Artificial
  probe
  misc_feature (1)..(25): SEQ ID NO: 4092; WAN024GLT_at; Start 4; Stop 28
ctcagtcagggcgataaagatatca

SEQ ID NO: 250644 - DNA, 25 bp, Artificial
  probe
  misc_feature (1)..(25): SEQ ID NO: 4092; WAN024GLT_at; Start 100; Stop 124
gcgactgacaatatgattgagaaca

SEQ ID NO: 250645 - DNA, 25 bp, Artificial
  probe
  misc_feature (1)..(25): SEQ ID NO: 4092; WAN024GLT_at; Start 39; Stop 63
cgctggcttgctcaagaatggcaaa

SEQ ID NO: 250646 - DNA, 25 bp, Artificial
  probe
  misc_feature (1)..(25): SEQ ID NO: 4092; WAN024GLT_at; Start 171; Stop 195
aggagcgacagagggcaaaaccaac

SEQ ID NO: 250647 - DNA, 25 bp, Artificial
  probe
  misc_feature (1)..(25): SEQ ID NO: 4092; WAN024GLT_at; Start 153; Stop 177
catgcttttctgcaaccaaggagcg

SEQ ID NO: 250648 - DNA, 25 bp, Artificial
  probe
  misc_feature (1)..(25): SEQ ID NO: 4092; WAN024GLT_at; Start 22; Stop 46
gatatcacaatcttggacgctggct

SEQ ID NO: 250649 - DNA, 25 bp, Artificial
  probe
  misc_feature (1)..(25): SEQ ID NO: 4092; WAN024GLT_at; Start 162; Stop 186
ctgcaaccaaggagcgacagagggc

SEQ ID NO: 250650 - DNA, 25 bp, Artificial
  probe
  misc_feature (1)..(25): SEQ ID NO: 2210; WAN024GLU_at; Start 346; Stop 370
ttcagggttccgcacccgaacgata

SEQ ID NO: 250651 - DNA, 25 bp, Artificial
  probe
  misc_feature (1)..(25): SEQ ID NO: 2210; WAN024GLU_at; Start 212; Stop 236
ccagcaaagcgttcgacagacaggg

SEQ ID NO: 250652 - DNA, 25 bp, Artificial
  probe
  misc_feature (1)..(25): SEQ ID NO: 2210; WAN024GLU_at; Start 131; Stop 155
tttttacgaaaatcagaaatgggca

SEQ ID NO: 250653 - DNA, 25 bp, Artificial
  probe
  misc_feature (1)..(25): SEQ ID NO: 2210; WAN024GLU_at; Start 275; Stop 299
gccaagagctcaggattaacgataa

SEQ ID NO: 250654 - DNA, 25 bp, Artificial
  probe
  misc_feature (1)..(25): SEQ ID NO: 2210; WAN024GLU_at; Start 332; Stop 356
taagagttagaatattcagggttcc

SEQ ID NO: 250655 - DNA, 25 bp, Artificial
  probe
  misc_feature (1)..(25): SEQ ID NO: 2210; WAN024GLU_at; Start 284; Stop 308
tcaggattaacgataagagaaaaac

SEQ ID NO: 250656 - DNA, 25 bp, Artificial
  probe
  misc_feature (1)..(25): SEQ ID NO: 2210; WAN024GLU_at; Start 244; Stop 268
gaagtcaatgatattcgcgatagcg

SEQ ID NO: 250657 - DNA, 25 bp, Artificial
  probe
  misc_feature (1)..(25): SEQ ID NO: 2210; WAN024GLU_at; Start 78; Stop 102
gaatgataatttgatgatccctctc

SEQ ID NO: 250658 - DNA, 25 bp, Artificial
  probe
  misc_feature (1)..(25): SEQ ID NO: 2210; WAN024GLU_at; Start 89; Stop 113
tgatgatccctctctatcgcacaga

SEQ ID NO: 250659 - DNA, 25 bp, Artificial
  probe
  misc_feature (1)..(25): SEQ ID NO: 2210; WAN024GLU_at; Start 154; Stop 178
catttggcaaagaccgctggtggac

SEQ ID NO: 250660 - DNA, 25 bp, Artificial
  probe
  misc_feature (1)..(25): SEQ ID NO: 2210; WAN024GLU_at; Start 375; Stop 399
ctttagctcccattttcttggctag

SEQ ID NO: 250661 - DNA, 25 bp, Artificial
  probe
  misc_feature (1)..(25): SEQ ID NO: 2210; WAN024GLU_at; Start 114; Stop 138
caatgacattaccaaattttttacg

SEQ ID NO: 250662 - DNA, 25 bp, Artificial
  probe
  misc_feature (1)..(25): SEQ ID NO: 2210; WAN024GLU_at; Start 356; Stop 380
cgcacccgaacgatagtttctttag

SEQ ID NO: 250663 - DNA, 25 bp, Artificial
  probe
  misc_feature (1)..(25): SEQ ID NO: 2210; WAN024GLU_at; Start 217; Stop 241
aaagcgttcgacagacagggcgttg

SEQ ID NO: 250664 - DNA, 25 bp, Artificial
  probe
  misc_feature (1)..(25): SEQ ID NO: 2210; WAN024GLU_at; Start 308; Stop 332
ccgagaatattcttttccttgaaat

SEQ ID NO: 250665 - DNA, 25 bp, Artificial
  probe
  misc_feature (1)..(25): SEQ ID NO: 2210; WAN024GLU_at; Start 103; Stop 127
tatcgcacagacaatgacattacca

SEQ ID NO: 250666 - DNA, 25 bp, Artificial
  probe
  misc_feature (1)..(25): SEQ ID NO: 2210; WAN024GLU_at; Start 164; Stop 188
agaccgctggtggacttgacgacaa

SEQ ID NO: 250667 - DNA, 25 bp, Artificial
  probe
  misc_feature (1)..(25): SEQ ID NO: 2210; WAN024GLU_at; Start 7; Stop 31
gagtatcatatcgacacggttacca

SEQ ID NO: 250668 - DNA, 25 bp, Artificial
  probe
  misc_feature (1)..(25): SEQ ID NO: 2210; WAN024GLU_at; Start 268; Stop 292
gcgggcagccaagagctcaggatta

SEQ ID NO: 250669 - DNA, 25 bp, Artificial
  probe
  misc_feature (1)..(25): SEQ ID NO: 2210; WAN024GLU_at; Start 180; Stop 204
tgacgacaaattccatgaggctaac

SEQ ID NO: 250670 - DNA, 25 bp, Artificial
  probe
  misc_feature (1)..(25): SEQ ID NO: 2210; WAN024GLU_at; Start 253; Stop 277
gatattcgcgatagcgcgggcagcc

SEQ ID NO: 250671 - DNA, 25 bp, Artificial
  probe
  misc_feature (1)..(25): SEQ ID NO: 2210; WAN024GLU_at; Start 13; Stop 37
catatcgacacggttaccagtgaca

SEQ ID NO: 250672 - DNA, 25 bp, Artificial
  probe
  misc_feature (1)..(25): SEQ ID NO: 2210; WAN024GLU_at; Start 199; Stop 223
gctaacgcgtccaccagcaaagcgt

SEQ ID NO: 250673 - DNA, 25 bp, Artificial
  probe
  misc_feature (1)..(25): SEQ ID NO: 2210; WAN024GLU_at; Start 169; Stop 193
gctggtggacttgacgacaaattcc

SEQ ID NO: 250674 - DNA, 25 bp, Artificial
  probe
  misc_feature (1)..(25): SEQ ID NO: 2210; WAN024GLU_at; Start 146; Stop 170
gaaatgggcatttggcaaagaccgc

SEQ ID NO: 250675 - DNA, 25 bp, Artificial
  probe
  misc_feature (1)..(25): SEQ ID NO: 2210; WAN024GLU_at; Start 69; Stop 93
caccgcttggaatgataatttgatg

SEQ ID NO: 250676 - DNA, 25 bp, Artificial
  probe
  misc_feature (1)..(25): SEQ ID NO: 2210; WAN024GLU_at; Start 58; Stop 82
tacagtcatgtcaccgcttggaatg

SEQ ID NO: 250677 - DNA, 25 bp, Artificial
  probe
  misc_feature (1)..(25): SEQ ID NO: 2210; WAN024GLU_at; Start 188; Stop 212
aattccatgaggctaacgcgtccac

SEQ ID NO: 250678 - DNA, 25 bp, Artificial
  probe
  misc_feature (1)..(25): SEQ ID NO: 2210; WAN024GLU_at; Start 363; Stop 387
gaacgatagtttctttagctcccat

SEQ ID NO: 250679 - DNA, 25 bp, Artificial
  probe
  misc_feature (1)..(25): SEQ ID NO: 2210; WAN024GLU_at; Start 24; Stop 48
ggttaccagtgacaaagattctatc

SEQ ID NO: 250680 - DNA, 25 bp, Artificial
  probe
  misc_feature (1)..(25): SEQ ID NO: 2210; WAN024GLU_at; Start 2; Stop 26
tggaagagtatcatatcgacacggt

SEQ ID NO: 250681 - DNA, 25 bp, Artificial
  probe
  misc_feature (1)..(25): SEQ ID NO: 2210; WAN024GLU_at; Start 318; Stop 342
tcttttccttgaaataagagttaga

SEQ ID NO: 250682 - DNA, 25 bp, Artificial
  probe
  misc_feature (1)..(25): SEQ ID NO: 2210; WAN024GLU_at; Start 294; Stop 318
cgataagagaaaaaccgagaatatt

SEQ ID NO: 250683 - DNA, 25 bp, Artificial
  probe
  misc_feature (1)..(25): SEQ ID NO: 2210; WAN024GLU_at; Start 338; Stop 362
ttagaatattcagggttccgcaccc

SEQ ID NO: 250684 - DNA, 25 bp, Artificial
  probe
  misc_feature (1)..(25): SEQ ID NO: 780; WAN024GLV_at; Start 1154; Stop 1178
tcaaggaagccaataaaatgactgc

SEQ ID NO: 250685 - DNA, 25 bp, Artificial
  probe
  misc_feature (1)..(25): SEQ ID NO: 780; WAN024GLV_at; Start 460; Stop 484
gaatttgtcgtcaagtccaccagcg

SEQ ID NO: 250686 - DNA, 25 bp, Artificial
  probe
  misc_feature (1)..(25): SEQ ID NO: 780; WAN024GLV_at; Start 233; Stop 257
tcaacatgattgcagcagttctagc

SEQ ID NO: 250687 - DNA, 25 bp, Artificial
  probe
  misc_feature (1)..(25): SEQ ID NO: 780; WAN024GLV_at; Start 359; Stop 383
ttaatcctgagctcttggctgcccg

SEQ ID NO: 250688 - DNA, 25 bp, Artificial
  probe
  misc_feature (1)..(25): SEQ ID NO: 780; WAN024GLV_at; Start 775; Stop 799
gaaatcgccagcttctttagcgaga

SEQ ID NO: 250689 - DNA, 25 bp, Artificial
  probe
  misc_feature (1)..(25): SEQ ID NO: 780; WAN024GLV_at; Start 475; Stop 499
tccaccagcggtctttgccaaatgc

SEQ ID NO: 250690 - DNA, 25 bp, Artificial
  probe
  misc_feature (1)..(25): SEQ ID NO: 780; WAN024GLV_at; Start 266; Stop 290
tgggagctaaagaaactatcgttcg

SEQ ID NO: 250691 - DNA, 25 bp, Artificial
  probe
  misc_feature (1)..(25): SEQ ID NO: 780; WAN024GLV_at; Start 986; Stop 1010
tcctcgagattatcaatgcgcctga

SEQ ID NO: 250692 - DNA, 25 bp, Artificial
  probe
  misc_feature (1)..(25): SEQ ID NO: 780; WAN024GLV_at; Start 163; Stop 187
tttgccattcttgagcaagccagcg

SEQ ID NO: 250693 - DNA, 25 bp, Artificial
  probe
  misc_feature (1)..(25): SEQ ID NO: 780; WAN024GLV_at; Start 209; Stop 233
tcgccctgactgagcacgatgaagt

SEQ ID NO: 250694 - DNA, 25 bp, Artificial
  probe
  misc_feature (1)..(25): SEQ ID NO: 780; WAN024GLV_at; Start 248; Stop 272
cagttctagccaagaaaatgggagc

SEQ ID NO: 250695 - DNA, 25 bp, Artificial
  probe
  misc_feature (1)..(25): SEQ ID NO: 780; WAN024GLV_at; Start 178; Stop 202
caagccagcgtccaagattgtgata

SEQ ID NO: 250696 - DNA, 25 bp, Artificial
  probe
  misc_feature (1)..(25): SEQ ID NO: 780; WAN024GLV_at; Start 652; Stop 676
aattattttaaatcacgcgccgtga

SEQ ID NO: 250697 - DNA, 25 bp, Artificial
  probe
  misc_feature (1)..(25): SEQ ID NO: 780; WAN024GLV_at; Start 831; Stop 855
tggaaccgcaaaagatatcctgctg

SEQ ID NO: 250698 - DNA, 25 bp, Artificial
  probe
  misc_feature (1)..(25): SEQ ID NO: 780; WAN024GLV_at; Start 570; Stop 594
cattccaagcggtgacatgactgta

SEQ ID NO: 250699 - DNA, 25 bp, Artificial
  probe
  misc_feature (1)..(25): SEQ ID NO: 780; WAN024GLV_at; Start 1122; Stop 1146
caatggccaaatcgaaaccctgcaa

SEQ ID NO: 250700 - DNA, 25 bp, Artificial
  probe
  misc_feature (1)..(25): SEQ ID NO: 780; WAN024GLV_at; Start 846; Stop 870
tatcctgctggaagaaagtgctcaa

SEQ ID NO: 250701 - DNA, 25 bp, Artificial
  probe
  misc_feature (1)..(25): SEQ ID NO: 780; WAN024GLV_at; Start 80; Stop 104
tgctgattgagcaagacgaagctgt

SEQ ID NO: 250702 - DNA, 25 bp, Artificial
  probe
  misc_feature (1)..(25): SEQ ID NO: 780; WAN024GLV_at; Start 439; Stop 463
ggtggacgcgttagcctcatggaat

SEQ ID NO: 250703 - DNA, 25 bp, Artificial
  probe
  misc_feature (1)..(25): SEQ ID NO: 780; WAN024GLV_at; Start 621; Stop 645
tggtaaccgtgtcgatatgatactc

SEQ ID NO: 250704 - DNA, 25 bp, Artificial
  probe
  misc_feature (1)..(25): SEQ ID NO: 780; WAN024GLV_at; Start 1081; Stop 1105
aatgcccagtattcagaccttcaag

SEQ ID NO: 250705 - DNA, 25 bp, Artificial
  probe
  misc_feature (1)..(25): SEQ ID NO: 780; WAN024GLV_at; Start 28; Stop 52
aaagttggttttgccctctgtcgct

SEQ ID NO: 250706 - DNA, 25 bp, Artificial
  probe
  misc_feature (1)..(25): SEQ ID NO: 780; WAN024GLV_at; Start 46; Stop 70
tgtcgctccttggttgcagaaaagc

SEQ ID NO: 250707 - DNA, 25 bp, Artificial
  probe
  misc_feature (1)..(25): SEQ ID NO: 780; WAN024GLV_at; Start 969; Stop 993
ggtcaatcgtaccagtctcctcgag

SEQ ID NO: 250708 - DNA, 25 bp, Artificial
  probe
  misc_feature (1)..(25): SEQ ID NO: 780; WAN024GLV_at; Start 874; Stop 898
tatgatgccgttgcgactctaacag

SEQ ID NO: 250709 - DNA, 25 bp, Artificial
  probe
  misc_feature (1)..(25): SEQ ID NO: 780; WAN024GLV_at; Start 1065; Stop 1089
tattcgtggtcgagttaatgcccag

SEQ ID NO: 250710 - DNA, 25 bp, Artificial
  probe
  misc_feature (1)..(25): SEQ ID NO: 780; WAN024GLV_at; Start 816; Stop 840
catcgttcaaggagatggaaccgca

SEQ ID NO: 250711 - DNA, 25 bp, Artificial
  probe
  misc_feature (1)..(25): SEQ ID NO: 780; WAN024GLV_at; Start 1226; Stop 1250
ccattattcgaaagggcaagactat

SEQ ID NO: 250712 - DNA, 25 bp, Artificial
  probe
  misc_feature (1)..(25): SEQ ID NO: 780; WAN024GLV_at; Start 132; Stop 156
tatcattggtatccttggtaacggg

SEQ ID NO: 250713 - DNA, 25 bp, Artificial
  probe
  misc_feature (1)..(25): SEQ ID NO: 780; WAN024GLV_at; Start 382; Stop 406
cgcgctatcgcgaatatcattgact

SEQ ID NO: 250714 - DNA, 25 bp, Artificial
  probe
  misc_feature (1)..(25): SEQ ID NO: 780; WAN024GLV_at; Start 423; Stop 447
tgtcgaacgctttgctggtggacgc

SEQ ID NO: 250715 - DNA, 25 bp, Artificial
  probe
  misc_feature (1)..(25): SEQ ID NO: 780; WAN024GLV_at; Start 282; Stop 306
tatcgttcgggtgcggaaccctgaa

SEQ ID NO: 250716 - DNA, 25 bp, Artificial
  probe
  misc_feature (1)..(25): SEQ ID NO: 780; WAN024GLV_at; Start 604; Stop 628
gatagaatctttgtcactggtaacc

SEQ ID NO: 250717 - DNA, 25 bp, Artificial
  probe
  misc_feature (1)..(25): SEQ ID NO: 780; WAN024GLV_at; Start 933; Stop 957
ccttgacagggtaggtgtacagaaa

SEQ ID NO: 250718 - DNA, 25 bp, Artificial
  probe
  misc_feature (1)..(25): SEQ ID NO: 2971; WAN024GLW_at; Start 29; Stop 53
cagcttcttggttttctgtagtaaa

SEQ ID NO: 250719 - DNA, 25 bp, Artificial
  probe
  misc_feature (1)..(25): SEQ ID NO: 2971; WAN024GLW_at; Start 44; Stop 68
ctgtagtaaattgtaaccaaactgg

SEQ ID NO: 250720 - DNA, 25 bp, Artificial
  probe
  misc_feature (1)..(25): SEQ ID NO: 2971; WAN024GLW_at; Start 149; Stop 173
tacctggaagcgttcctgcaattaa

SEQ ID NO: 250721 - DNA, 25 bp, Artificial
  probe
  misc_feature (1)..(25): SEQ ID NO: 2971; WAN024GLW_at; Start 204; Stop 228
gagtccgttgagacctcctgcaact

SEQ ID NO: 250722 - DNA, 25 bp, Artificial
  probe
  misc_feature (1)..(25): SEQ ID NO: 2971; WAN024GLW_at; Start 336; Stop 360
catttttatcgtaattccgcgctgg

SEQ ID NO: 250723 - DNA, 25 bp, Artificial
  probe
  misc_feature (1)..(25): SEQ ID NO: 2971; WAN024GLW_at; Start 70; Stop 94
tctacaaaagcatttaaaacttgtc

SEQ ID NO: 250724 - DNA, 25 bp, Artificial
  probe
  misc_feature (1)..(25): SEQ ID NO: 2971; WAN024GLW_at; Start 120; Stop 144
gaatgagtttacaataacacataga

SEQ ID NO: 250725 - DNA, 25 bp, Artificial
  probe
  misc_feature (1)..(25): SEQ ID NO: 2971; WAN024GLW_at; Start 187; Stop 211
ccaacaattgcacctaggagtccgt

SEQ ID NO: 250726 - DNA, 25 bp, Artificial
  probe
  misc_feature (1)..(25): SEQ ID NO: 2971; WAN024GLW_at; Start 201; Stop 225
taggagtccgttgagacctcctgca

SEQ ID NO: 250727 - DNA, 25 bp, Artificial
  probe
  misc_feature (1)..(25): SEQ ID NO: 2971; WAN024GLW_at; Start 131; Stop 155
caataacacatagaatcatacctgg

SEQ ID NO: 250728 - DNA, 25 bp, Artificial
  probe
  misc_feature (1)..(25): SEQ ID NO: 2971; WAN024GLW_at; Start 137; Stop 161
cacatagaatcatacctggaagcgt

SEQ ID NO: 250729 - DNA, 25 bp, Artificial
  probe
  misc_feature (1)..(25): SEQ ID NO: 2971; WAN024GLW_at; Start 4; Stop 28
tgttggagtgtttgtcctgcagcca

SEQ ID NO: 250730 - DNA, 25 bp, Artificial
  probe
  misc_feature (1)..(25): SEQ ID NO: 2971; WAN024GLW_at; Start 166; Stop 190
gcaattaacttaagcggtgttccaa

SEQ ID NO: 250731 - DNA, 25 bp, Artificial
  probe
  misc_feature (1)..(25): SEQ ID NO: 2971; WAN024GLW_at; Start 22; Stop 46
gcagccacagcttcttggttttctg

SEQ ID NO: 250732 - DNA, 25 bp, Artificial
  probe
  misc_feature (1)..(25): SEQ ID NO: 2971; WAN024GLW_at; Start 143; Stop 167
gaatcatacctggaagcgttcctgc

SEQ ID NO: 250733 - DNA, 25 bp, Artificial
  probe
  misc_feature (1)..(25): SEQ ID NO: 2971; WAN024GLW_at; Start 351; Stop 375
tccgcgctggataaacatacgataa

SEQ ID NO: 250734 - DNA, 25 bp, Artificial
  probe
  misc_feature (1)..(25): SEQ ID NO: 2971; WAN024GLW_at; Start 176; Stop 200
taagcggtgttccaacaattgcacc

SEQ ID NO: 250735 - DNA, 25 bp, Artificial
  probe
  misc_feature (1)..(25): SEQ ID NO: 2971; WAN024GLW_at; Start 12; Stop 36
tgtttgtcctgcagccacagcttct

SEQ ID NO: 250736 - DNA, 25 bp, Artificial
  probe
  misc_feature (1)..(25): SEQ ID NO: 2971; WAN024GLW_at; Start 191; Stop 215
caattgcacctaggagtccgttgag

SEQ ID NO: 250737 - DNA, 25 bp, Artificial
  probe
  misc_feature (1)..(25): SEQ ID NO: 2971; WAN024GLW_at; Start 317; Stop 341
catctgggacaccacttggcatttt

SEQ ID NO: 250738 - DNA, 25 bp, Artificial
  probe
  misc_feature (1)..(25): SEQ ID NO: 2971; WAN024GLW_at; Start 324; Stop 348
gacaccacttggcatttttatcgta

SEQ ID NO: 250739 - DNA, 25 bp, Artificial
  probe
  misc_feature (1)..(25): SEQ ID NO: 2971; WAN024GLW_at; Start 290; Stop 314
aaagagctgaaaatgatttacttac

SEQ ID NO: 250740 - DNA, 25 bp, Artificial
  probe
  misc_feature (1)..(25): SEQ ID NO: 2971; WAN024GLW_at; Start 101; Stop 125
taactccacagaaccaaaagaatga

SEQ ID NO: 250741 - DNA, 25 bp, Artificial
  probe
  misc_feature (1)..(25): SEQ ID NO: 2971; WAN024GLW_at; Start 155; Stop 179
gaagcgttcctgcaattaacttaag

SEQ ID NO: 250742 - DNA, 25 bp, Artificial
  probe
  misc_feature (1)..(25): SEQ ID NO: 2971; WAN024GLW_at; Start 225; Stop 249
aactcctgccgcttcaagacctttt

SEQ ID NO: 250743 - DNA, 25 bp, Artificial
  probe
  misc_feature (1)..(25): SEQ ID NO: 2971; WAN024GLW_at; Start 16; Stop 40
tgtcctgcagccacagcttcttggt

SEQ ID NO: 250744 - DNA, 25 bp, Artificial
  probe
  misc_feature (1)..(25): SEQ ID NO: 2971; WAN024GLW_at; Start 232; Stop 256
gccgcttcaagaccttttaagacca

SEQ ID NO: 250745 - DNA, 25 bp, Artificial
  probe
  misc_feature (1)..(25): SEQ ID NO: 2971; WAN024GLW_at; Start 96; Stop 120
cccattaactccacagaaccaaaag

SEQ ID NO: 250746 - DNA, 25 bp, Artificial
  probe
  misc_feature (1)..(25): SEQ ID NO: 2971; WAN024GLW_at; Start 107; Stop 131
cacagaaccaaaagaatgagtttac

SEQ ID NO: 250747 - DNA, 25 bp, Artificial
  probe
  misc_feature (1)..(25): SEQ ID NO: 2971; WAN024GLW_at; Start 182; Stop 206
gtgttccaacaattgcacctaggag

SEQ ID NO: 250748 - DNA, 25 bp, Artificial
  probe
  misc_feature (1)..(25): SEQ ID NO: 2971; WAN024GLW_at; Start 195; Stop 219
tgcacctaggagtccgttgagacct

SEQ ID NO: 250749 - DNA, 25 bp, Artificial
  probe
  misc_feature (1)..(25): SEQ ID NO: 2971; WAN024GLW_at; Start 347; Stop 371
taattccgcgctggataaacatacg

SEQ ID NO: 250750 - DNA, 25 bp, Artificial
  probe
  misc_feature (1)..(25): SEQ ID NO: 2971; WAN024GLW_at; Start 8; Stop 32
ggagtgtttgtcctgcagccacagc

SEQ ID NO: 250751 - DNA, 25 bp, Artificial
  probe
  misc_feature (1)..(25): SEQ ID NO: 2971; WAN024GLW_at; Start 158; Stop 182
gcgttcctgcaattaacttaagcgg

SEQ ID NO: 250752 - DNA, 25 bp, Artificial
  probe
  misc_feature (1)..(25): SEQ ID NO: 4010; WAN024GLX_at; Start 938; Stop 962
tcctatttagtaagagtcgtgcgaa

SEQ ID NO: 250753 - DNA, 25 bp, Artificial
  probe
  misc_feature (1)..(25): SEQ ID NO: 4010; WAN024GLX_at; Start 143; Stop 167
ttctaatcagttggcctcaagaggc

SEQ ID NO: 250754 - DNA, 25 bp, Artificial
  probe
  misc_feature (1)..(25): SEQ ID NO: 4010; WAN024GLX_at; Start 1156; Stop 1180
tggacaatgccaccgattataggag

SEQ ID NO: 250755 - DNA, 25 bp, Artificial
  probe
  misc_feature (1)..(25): SEQ ID NO: 4010; WAN024GLX_at; Start 88; Stop 112
cgtgaaggatttatgatggcaatgc

SEQ ID NO: 250756 - DNA, 25 bp, Artificial
  probe
  misc_feature (1)..(25): SEQ ID NO: 4010; WAN024GLX_at; Start 1108; Stop 1132
tcaatggctgtaggattagtaccct

SEQ ID NO: 250757 - DNA, 25 bp, Artificial
  probe
  misc_feature (1)..(25): SEQ ID NO: 4010; WAN024GLX_at; Start 405; Stop 429
tggcggcgcaataccattttctagc

SEQ ID NO: 250758 - DNA, 25 bp, Artificial
  probe
  misc_feature (1)..(25): SEQ ID NO: 4010; WAN024GLX_at; Start 61; Stop 85
ggcaaccaacggcatttgaaagcta

SEQ ID NO: 250759 - DNA, 25 bp, Artificial
  probe
  misc_feature (1)..(25): SEQ ID NO: 4010; WAN024GLX_at; Start 459; Stop 483
tactattggattggttacagcagag

SEQ ID NO: 250760 - DNA, 25 bp, Artificial
  probe
  misc_feature (1)..(25): SEQ ID NO: 4010; WAN024GLX_at; Start 663; Stop 687
tgcaattgttggaacaccgcttaag

SEQ ID NO: 250761 - DNA, 25 bp, Artificial
  probe
  misc_feature (1)..(25): SEQ ID NO: 4010; WAN024GLX_at; Start 249; Stop 273
ggtcgcttgtttcggtattgcctac

SEQ ID NO: 250762 - DNA, 25 bp, Artificial
  probe
  misc_feature (1)..(25): SEQ ID NO: 4010; WAN024GLX_at; Start 684; Stop 708
taagttaattgcaggaacgcttcca

SEQ ID NO: 250763 - DNA, 25 bp, Artificial
  probe
  misc_feature (1)..(25): SEQ ID NO: 4010; WAN024GLX_at; Start 1121; Stop 1145
gattagtaccctatacaacaggtgt

SEQ ID NO: 250764 - DNA, 25 bp, Artificial
  probe
  misc_feature (1)..(25): SEQ ID NO: 4010; WAN024GLX_at; Start 608; Stop 632
tcttaaaaggtcttgaagcggcagg

SEQ ID NO: 250765 - DNA, 25 bp, Artificial
  probe
  misc_feature (1)..(25): SEQ ID NO: 4010; WAN024GLX_at; Start 432; Stop 456
gaatgcatcttctttgtttatggcg

SEQ ID NO: 250766 - DNA, 25 bp, Artificial
  probe
  misc_feature (1)..(25): SEQ ID NO: 4010; WAN024GLX_at; Start 391; Stop 415
gtcaagcagttatttggcggcgcaa

SEQ ID NO: 250767 - DNA, 25 bp, Artificial
  probe
  misc_feature (1)..(25): SEQ ID NO: 4010; WAN024GLX_at; Start 289; Stop 313
tatggtacagatggtccgtcggcag

SEQ ID NO: 250768 - DNA, 25 bp, Artificial
  probe
  misc_feature (1)..(25): SEQ ID NO: 4010; WAN024GLX_at; Start 1059; Stop 1083
gattccgtttattgctactcctaca

SEQ ID NO: 250769 - DNA, 25 bp, Artificial
  probe
  misc_feature (1)..(25): SEQ ID NO: 4010; WAN024GLX_at; Start 104; Stop 128
tggcaatgcctttgattttagtcgg

SEQ ID NO: 250770 - DNA, 25 bp, Artificial
  probe
  misc_feature (1)..(25): SEQ ID NO: 4010; WAN024GLX_at; Start 303; Stop 327
tccgtcggcagggatcatagcctta

SEQ ID NO: 250771 - DNA, 25 bp, Artificial
  probe
  misc_feature (1)..(25): SEQ ID NO: 4010; WAN024GLX_at; Start 338; Stop 362
tattgatggcacctcgtttttcgag

SEQ ID NO: 250772 - DNA, 25 bp, Artificial
  probe
  misc_feature (1)..(25): SEQ ID NO: 4010; WAN024GLX_at; Start 831; Stop 855
tgtggctgcaggacaaacactccaa

SEQ ID NO: 250773 - DNA, 25 bp, Artificial
  probe
  misc_feature (1)..(25): SEQ ID NO: 4010; WAN024GLX_at; Start 501; Stop 525
ccagcgcggaattacgataaaaatg

SEQ ID NO: 250774 - DNA, 25 bp, Artificial
  probe
  misc_feature (1)..(25): SEQ ID NO: 4010; WAN024GLX_at; Start 1173; Stop 1197
tataggaggcttccttgcaacaggg

SEQ ID NO: 250775 - DNA, 25 bp, Artificial
  probe
  misc_feature (1)..(25): SEQ ID NO: 4010; WAN024GLX_at; Start 1198; Stop 1222
gctagttggcgaggagctctattac

SEQ ID NO: 250776 - DNA, 25 bp, Artificial
  probe
  misc_feature (1)..(25): SEQ ID NO: 4010; WAN024GLX_at; Start 516; Stop 540
gataaaaatgccaagtggtgtccca

SEQ ID NO: 250777 - DNA, 25 bp, Artificial
  probe
  misc_feature (1)..(25): SEQ ID NO: 4010; WAN024GLX_at; Start 642; Stop 666
aggtctcaacggactcctaggtgca

SEQ ID NO: 250778 - DNA, 25 bp, Artificial
  probe
  misc_feature (1)..(25): SEQ ID NO: 4010; WAN024GLX_at; Start 487; Stop 511
tatcgtatgtttatccagcgcggaa

SEQ ID NO: 250779 - DNA, 25 bp, Artificial
  probe
  misc_feature (1)..(25): SEQ ID NO: 4010; WAN024GLX_at; Start 1137; Stop 1161
aacaggtgtaatccttccgtggaca

SEQ ID NO: 250780 - DNA, 25 bp, Artificial
  probe
  misc_feature (1)..(25): SEQ ID NO: 4010; WAN024GLX_at; Start 160; Stop 184
caagaggcttttacaaattggctga

SEQ ID NO: 250781 - DNA, 25 bp, Artificial
  probe
  misc_feature (1)..(25): SEQ ID NO: 4010; WAN024GLX_at; Start 698; Stop 722
gaacgcttccaggtatgattctatg

SEQ ID NO: 250782 - DNA, 25 bp, Artificial
  probe
  misc_feature (1)..(25): SEQ ID NO: 4010; WAN024GLX_at; Start 955; Stop 979
cgtgcgaataaaacattaggtaagc

SEQ ID NO: 250783 - DNA, 25 bp, Artificial
  probe
  misc_feature (1)..(25): SEQ ID NO: 4010; WAN024GLX_at; Start 817; Stop 841
gaaaaccaagaagctgtggctgcag

SEQ ID NO: 250784 - DNA, 25 bp, Artificial
  probe
  misc_feature (1)..(25): SEQ ID NO: 4010; WAN024GLX_at; Start 264; Stop 288
tattgcctacaggttgtcggaagga

SEQ ID NO: 250785 - DNA, 25 bp, Artificial
  probe
  misc_feature (1)..(25): SEQ ID NO: 4010; WAN024GLX_at; Start 222; Stop 246
tcagtcaacagtagcgattatctcc

SEQ ID NO: 250786 - DNA, 25 bp, Artificial
  probe
  misc_feature (1)..(25): SEQ ID NO: 5309; WAN024GLY_at; Start 731; Stop 755
caggtcttagtatttcagaggagaa

SEQ ID NO: 250787 - DNA, 25 bp, Artificial
  probe
  misc_feature (1)..(25): SEQ ID NO: 5309; WAN024GLY_at; Start 227; Stop 251
ttatctcattagacaagggtaaggg

SEQ ID NO: 250788 - DNA, 25 bp, Artificial
  probe
  misc_feature (1)..(25): SEQ ID NO: 5309; WAN024GLY_at; Start 1722; Stop 1746
tcaaaaggatgaatggaaacagctc

SEQ ID NO: 250789 - DNA, 25 bp, Artificial
  probe
  misc_feature (1)..(25): SEQ ID NO: 5309; WAN024GLY_at; Start 1310; Stop 1334
ctttagggcgtgctcattatggcga

SEQ ID NO: 250790 - DNA, 25 bp, Artificial
  probe
  misc_feature (1)..(25): SEQ ID NO: 5309; WAN024GLY_at; Start 1171; Stop 1195
gattttgacaattccatacctacgc

SEQ ID NO: 250791 - DNA, 25 bp, Artificial
  probe
  misc_feature (1)..(25): SEQ ID NO: 5309; WAN024GLY_at; Start 1019; Stop 1043
taacgagtgagggattagatacaaa

SEQ ID NO: 250792 - DNA, 25 bp, Artificial
  probe
  misc_feature (1)..(25): SEQ ID NO: 5309; WAN024GLY_at; Start 763; Stop 787
tatgtcgctgaaataaacgggaaac

SEQ ID NO: 250793 - DNA, 25 bp, Artificial
  probe
  misc_feature (1)..(25): SEQ ID NO: 5309; WAN024GLY_at; Start 1910; Stop 1934
tagcaaaaaattacgctggtttcca

SEQ ID NO: 250794 - DNA, 25 bp, Artificial
  probe
  misc_feature (1)..(25): SEQ ID NO: 5309; WAN024GLY_at; Start 1118; Stop 1142
ccatgatgtttgcaccgattacaag

SEQ ID NO: 250795 - DNA, 25 bp, Artificial
  probe
  misc_feature (1)..(25): SEQ ID NO: 5309; WAN024GLY_at; Start 393; Stop 417
gctatctatagatgaaacagccagt

SEQ ID NO: 250796 - DNA, 25 bp, Artificial
  probe
  misc_feature (1)..(25): SEQ ID NO: 5309; WAN024GLY_at; Start 344; Stop 368
gacatgactttgttccagagttacg

SEQ ID NO: 250797 - DNA, 25 bp, Artificial
  probe
  misc_feature (1)..(25): SEQ ID NO: 5309; WAN024GLY_at; Start 332; Stop 356
gaccagggcgcagacatgactttgt

SEQ ID NO: 250798 - DNA, 25 bp, Artificial
  probe
  misc_feature (1)..(25): SEQ ID NO: 5309; WAN024GLY_at; Start 1295; Stop 1319
tcgtatatgactatcctttagggcg

SEQ ID NO: 250799 - DNA, 25 bp, Artificial
  probe
  misc_feature (1)..(25): SEQ ID NO: 5309; WAN024GLY_at; Start 666; Stop 690
tcatcgtgttggtcatggatggaca

SEQ ID NO: 250800 - DNA, 25 bp, Artificial
  probe
  misc_feature (1)..(25): SEQ ID NO: 5309; WAN024GLY_at; Start 999; Stop 1023
caatcaattggatagggctttaacg

SEQ ID NO: 250801 - DNA, 25 bp, Artificial
  probe
  misc_feature (1)..(25): SEQ ID NO: 5309; WAN024GLY_at; Start 943; Stop 967
tgtgaatgcgaaaactgtagacaag

SEQ ID NO: 250802 - DNA, 25 bp, Artificial
  probe
  misc_feature (1)..(25): SEQ ID NO: 5309; WAN024GLY_at; Start 649; Stop 673
aaaagaggtcttattcatcatcgtg

SEQ ID NO: 250803 - DNA, 25 bp, Artificial
  probe
  misc_feature (1)..(25): SEQ ID NO: 5309; WAN024GLY_at; Start 712; Stop 736
tcaaaatttggctgggaatcaggtc

SEQ ID NO: 250804 - DNA, 25 bp, Artificial
  probe
  misc_feature (1)..(25): SEQ ID NO: 5309; WAN024GLY_at; Start 1760; Stop 1784
aatatgttgttaagatggcgaaggc

SEQ ID NO: 250805 - DNA, 25 bp, Artificial
  probe
  misc_feature (1)..(25): SEQ ID NO: 5309; WAN024GLY_at; Start 147; Stop 171
taacatagagcttgtcgaggagaag

SEQ ID NO: 250806 - DNA, 25 bp, Artificial
  probe
  misc_feature (1)..(25): SEQ ID NO: 5309; WAN024GLY_at; Start 962; Stop 986
gacaagaattggtttcggatcagta

SEQ ID NO: 250807 - DNA, 25 bp, Artificial
  probe
  misc_feature (1)..(25): SEQ ID NO: 5309; WAN024GLY_at; Start 914; Stop 938
tatggttgtcggatgctcgtaataa

SEQ ID NO: 250808 - DNA, 25 bp, Artificial
  probe
  misc_feature (1)..(25): SEQ ID NO: 5309; WAN024GLY_at; Start 874; Stop 898
gattatgccaagaaaagacctgatg

SEQ ID NO: 250809 - DNA, 25 bp, Artificial
  probe
  misc_feature (1)..(25): SEQ ID NO: 5309; WAN024GLY_at; Start 440; Stop 464
tagagggagcggattcatttgaaaa

SEQ ID NO: 250810 - DNA, 25 bp, Artificial
  probe
  misc_feature (1)..(25): SEQ ID NO: 5309; WAN024GLY_at; Start 1475; Stop 1499
tgctctggaagaagacaagaagtta

SEQ ID NO: 250811 - DNA, 25 bp, Artificial
  probe
  misc_feature (1)..(25): SEQ ID NO: 5309; WAN024GLY_at; Start 197; Stop 221
tcaataaagaggacagaaaagacca

SEQ ID NO: 250812 - DNA, 25 bp, Artificial
  probe
  misc_feature (1)..(25): SEQ ID NO: 5309; WAN024GLY_at; Start 406; Stop 430
gaaacagccagttactatcataggg

SEQ ID NO: 250813 - DNA, 25 bp, Artificial
  probe
  misc_feature (1)..(25): SEQ ID NO: 5309; WAN024GLY_at; Start 1419; Stop 1443
tcaagaattacgtgccggattccct

SEQ ID NO: 250814 - DNA, 25 bp, Artificial
  probe
  misc_feature (1)..(25): SEQ ID NO: 5309; WAN024GLY_at; Start 486; Stop 510
gctacctaagattgggatgaacagt

SEQ ID NO: 250815 - DNA, 25 bp, Artificial
  probe
  misc_feature (1)..(25): SEQ ID NO: 5309; WAN024GLY_at; Start 1737; Stop 1761
gaaacagctcagttatcatcgtgaa

SEQ ID NO: 250816 - DNA, 25 bp, Artificial
  probe
  misc_feature (1)..(25): SEQ ID NO: 5309; WAN024GLY_at; Start 471; Stop 495
agatttcattgattggctacctaag

SEQ ID NO: 250817 - DNA, 25 bp, Artificial
  probe
  misc_feature (1)..(25): SEQ ID NO: 5309; WAN024GLY_at; Start 1842; Stop 1866
gttgaattatatccgtgggcacgaa

SEQ ID NO: 250818 - DNA, 25 bp, Artificial
  probe
  misc_feature (1)..(25): SEQ ID NO: 5309; WAN024GLY_at; Start 1099; Stop 1123
gataatcctgaacgctttaccatga

SEQ ID NO: 250819 - DNA, 25 bp, Artificial
  probe
  misc_feature (1)..(25): SEQ ID NO: 5309; WAN024GLY_at; Start 1811; Stop 1835
caaggcaagctcaagatgaatggag

SEQ ID NO: 250820 - DNA, 25 bp, Artificial
  probe
  misc_feature (1)..(25): SEQ ID NO: 3994; WAN024GLZ_at; Start 172; Stop 196
tatagaaactccagtatagtggctc

SEQ ID NO: 250821 - DNA, 25 bp, Artificial
  probe
  misc_feature (1)..(25): SEQ ID NO: 3994; WAN024GLZ_at; Start 18; Stop 42
tctacgtcttccagatccggaaaac

SEQ ID NO: 250822 - DNA, 25 bp, Artificial
  probe
  misc_feature (1)..(25): SEQ ID NO: 3994; WAN024GLZ_at; Start 188; Stop 212
tagtggctctattttgtaaaaaggc

SEQ ID NO: 250823 - DNA, 25 bp, Artificial
  probe
  misc_feature (1)..(25): SEQ ID NO: 3994; WAN024GLZ_at; Start 130; Stop 154
gtttcattaacaatatctgtacggg

SEQ ID NO: 250824 - DNA, 25 bp, Artificial
  probe
  misc_feature (1)..(25): SEQ ID NO: 3994; WAN024GLZ_at; Start 56; Stop 80
caccagtttcgtatatgagggactg

SEQ ID NO: 250825 - DNA, 25 bp, Artificial
  probe
  misc_feature (1)..(25): SEQ ID NO: 3994; WAN024GLZ_at; Start 9; Stop 33
aatagtttttctacgtcttccagat

SEQ ID NO: 250826 - DNA, 25 bp, Artificial
  probe
  misc_feature (1)..(25): SEQ ID NO: 3994; WAN024GLZ_at; Start 104; Stop 128
tagtcgttgttgctggagtaagtcc

SEQ ID NO: 250827 - DNA, 25 bp, Artificial
  probe
  misc_feature (1)..(25): SEQ ID NO: 3994; WAN024GLZ_at; Start 22; Stop 46
cgtcttccagatccggaaaactcgc

SEQ ID NO: 250828 - DNA, 25 bp, Artificial
  probe
  misc_feature (1)..(25): SEQ ID NO: 3994; WAN024GLZ_at; Start 53; Stop 77
catcaccagtttcgtatatgaggga

SEQ ID NO: 250829 - DNA, 25 bp, Artificial
  probe
  misc_feature (1)..(25): SEQ ID NO: 3994; WAN024GLZ_at; Start 96; Stop 120
tatgatgttagtcgttgttgctgga

SEQ ID NO: 250830 - DNA, 25 bp, Artificial
  probe
  misc_feature (1)..(25): SEQ ID NO: 3994; WAN024GLZ_at; Start 149; Stop 173
tacgggatgttgctggatttcgata

SEQ ID NO: 250831 - DNA, 25 bp, Artificial
  probe
  misc_feature (1)..(25): SEQ ID NO: 3994; WAN024GLZ_at; Start 14; Stop 38
tttttctacgtcttccagatccgga

SEQ ID NO: 250832 - DNA, 25 bp, Artificial
  probe
  misc_feature (1)..(25): SEQ ID NO: 3994; WAN024GLZ_at; Start 82; Stop 106
tcgcttagctcttttatgatgttag

SEQ ID NO: 250833 - DNA, 25 bp, Artificial
  probe
  misc_feature (1)..(25): SEQ ID NO: 3994; WAN024GLZ_at; Start 45; Stop 69
gctaaattcatcaccagtttcgtat

SEQ ID NO: 250834 - DNA, 25 bp, Artificial
  probe
  misc_feature (1)..(25): SEQ ID NO: 3994; WAN024GLZ_at; Start 182; Stop 206
ccagtatagtggctctattttgtaa

SEQ ID NO: 250835 - DNA, 25 bp, Artificial
  probe
  misc_feature (1)..(25): SEQ ID NO: 3994; WAN024GLZ_at; Start 62; Stop 86
tttcgtatatgagggactgttcgct

SEQ ID NO: 250836 - DNA, 25 bp, Artificial
  probe
  misc_feature (1)..(25): SEQ ID NO: 3994; WAN024GLZ_at; Start 71; Stop 95
tgagggactgttcgcttagctcttt

SEQ ID NO: 250837 - DNA, 25 bp, Artificial
  probe
  misc_feature (1)..(25): SEQ ID NO: 3994; WAN024GLZ_at; Start 163; Stop 187
ggatttcgatatagaaactccagta

SEQ ID NO: 250838 - DNA, 25 bp, Artificial
  probe
  misc_feature (1)..(25): SEQ ID NO: 3994; WAN024GLZ_at; Start 67; Stop 91
tatatgagggactgttcgcttagct

SEQ ID NO: 250839 - DNA, 25 bp, Artificial
  probe
  misc_feature (1)..(25): SEQ ID NO: 3994; WAN024GLZ_at; Start 76; Stop 100
gactgttcgcttagctcttttatga

SEQ ID NO: 250840 - DNA, 25 bp, Artificial
  probe
  misc_feature (1)..(25): SEQ ID NO: 3994; WAN024GLZ_at; Start 159; Stop 183
tgctggatttcgatatagaaactcc

SEQ ID NO: 250841 - DNA, 25 bp, Artificial
  probe
  misc_feature (1)..(25): SEQ ID NO: 3994; WAN024GLZ_at; Start 206; Stop 230
aaaaggctgattgttttgtaatcat

SEQ ID NO: 250842 - DNA, 25 bp, Artificial
  probe
  misc_feature (1)..(25): SEQ ID NO: 3994; WAN024GLZ_at; Start 107; Stop 131
tcgttgttgctggagtaagtcctgt

SEQ ID NO: 250843 - DNA, 25 bp, Artificial
  probe
  misc_feature (1)..(25): SEQ ID NO: 3994; WAN024GLZ_at; Start 176; Stop 200
gaaactccagtatagtggctctatt

SEQ ID NO: 250844 - DNA, 25 bp, Artificial
  probe
  misc_feature (1)..(25): SEQ ID NO: 3994; WAN024GLZ_at; Start 192; Stop 216
ggctctattttgtaaaaaggctgat

SEQ ID NO: 250845 - DNA, 25 bp, Artificial
  probe
  misc_feature (1)..(25): SEQ ID NO: 3994; WAN024GLZ_at; Start 31; Stop 55
gatccggaaaactcgctaaattcat

SEQ ID NO: 250846 - DNA, 25 bp, Artificial
  probe
  misc_feature (1)..(25): SEQ ID NO: 3994; WAN024GLZ_at; Start 37; Stop 61
gaaaactcgctaaattcatcaccag

SEQ ID NO: 250847 - DNA, 25 bp, Artificial
  probe
  misc_feature (1)..(25): SEQ ID NO: 3994; WAN024GLZ_at; Start 118; Stop 142
ggagtaagtcctgtttcattaacaa

SEQ ID NO: 250848 - DNA, 25 bp, Artificial
  probe
  misc_feature (1)..(25): SEQ ID NO: 3994; WAN024GLZ_at; Start 111; Stop 135
tgttgctggagtaagtcctgtttca

SEQ ID NO: 250849 - DNA, 25 bp, Artificial
  probe
  misc_feature (1)..(25): SEQ ID NO: 3994; WAN024GLZ_at; Start 222; Stop 246
tgtaatcatttgtttcctcctttgg

SEQ ID NO: 250850 - DNA, 25 bp, Artificial
  probe
  misc_feature (1)..(25): SEQ ID NO: 3994; WAN024GLZ_at; Start 153; Stop 177
ggatgttgctggatttcgatataga

SEQ ID NO: 250851 - DNA, 25 bp, Artificial
  probe
  misc_feature (1)..(25): SEQ ID NO: 3994; WAN024GLZ_at; Start 137; Stop 161
taacaatatctgtacgggatgttgc

SEQ ID NO: 250852 - DNA, 25 bp, Artificial
  probe
  misc_feature (1)..(25): SEQ ID NO: 3994; WAN024GLZ_at; Start 145; Stop 169
tctgtacgggatgttgctggatttc

SEQ ID NO: 250853 - DNA, 25 bp, Artificial
  probe
  misc_feature (1)..(25): SEQ ID NO: 3994; WAN024GLZ_at; Start 27; Stop 51
tccagatccggaaaactcgctaaat

SEQ ID NO: 250854 - DNA, 25 bp, Artificial
  probe
  misc_feature (1)..(25): SEQ ID NO: 1791; WAN024GM2_at; Start 180; Stop 204
atttagcgagttttccggatctgga

SEQ ID NO: 250855 - DNA, 25 bp, Artificial
  probe
  misc_feature (1)..(25): SEQ ID NO: 1791; WAN024GM2_at; Start 108; Stop 132
tactccagcaacaacgactaacatc

SEQ ID NO: 250856 - DNA, 25 bp, Artificial
  probe
  misc_feature (1)..(25): SEQ ID NO: 1791; WAN024GM2_at; Start 1131; Stop 1155
caaacatcgtggaagtataggagct

SEQ ID NO: 250857 - DNA, 25 bp, Artificial
  probe
  misc_feature (1)..(25): SEQ ID NO: 1791; WAN024GM2_at; Start 195; Stop 219
cggatctggaagacgtagaaaaact

SEQ ID NO: 250858 - DNA, 25 bp, Artificial
  probe
  misc_feature (1)..(25): SEQ ID NO: 1791; WAN024GM2_at; Start 293; Stop 317
tatgtgacttacaagggaaaactct

SEQ ID NO: 250859 - DNA, 25 bp, Artificial
  probe
  misc_feature (1)..(25): SEQ ID NO: 1791; WAN024GM2_at; Start 479; Stop 503
tcattacaaacaaccccatatggga

SEQ ID NO: 250860 - DNA, 25 bp, Artificial
  probe
  misc_feature (1)..(25): SEQ ID NO: 1791; WAN024GM2_at; Start 775; Stop 799
caaacatatatttcggatgcttggt

SEQ ID NO: 250861 - DNA, 25 bp, Artificial
  probe
  misc_feature (1)..(25): SEQ ID NO: 1791; WAN024GM2_at; Start 396; Stop 420
tatagagtacgtccctttggaaaca

SEQ ID NO: 250862 - DNA, 25 bp, Artificial
  probe
  misc_feature (1)..(25): SEQ ID NO: 1791; WAN024GM2_at; Start 562; Stop 586
aatatcgattgtatggctataggac

SEQ ID NO: 250863 - DNA, 25 bp, Artificial
  probe
  misc_feature (1)..(25): SEQ ID NO: 1791; WAN024GM2_at; Start 735; Stop 759
gaatgggcaatattgtgaatgcgga

SEQ ID NO: 250864 - DNA, 25 bp, Artificial
  probe
  misc_feature (1)..(25): SEQ ID NO: 1791; WAN024GM2_at; Start 134; Stop 158
taaaagagctaagcgaacagtccct

SEQ ID NO: 250865 - DNA, 25 bp, Artificial
  probe
  misc_feature (1)..(25): SEQ ID NO: 1791; WAN024GM2_at; Start 386; Stop 410
taaaaacagctatagagtacgtccc

SEQ ID NO: 250866 - DNA, 25 bp, Artificial
  probe
  misc_feature (1)..(25): SEQ ID NO: 1791; WAN024GM2_at; Start 718; Stop 742
cacaccattgtcgaattgaatgggc

SEQ ID NO: 250867 - DNA, 25 bp, Artificial
  probe
  misc_feature (1)..(25): SEQ ID NO: 1791; WAN024GM2_at; Start 466; Stop 490
gactccggaagtatcattacaaaca

SEQ ID NO: 250868 - DNA, 25 bp, Artificial
  probe
  misc_feature (1)..(25): SEQ ID NO: 1791; WAN024GM2_at; Start 452; Stop 476
gacattataacaaagactccggaag

SEQ ID NO: 250869 - DNA, 25 bp, Artificial
  probe
  misc_feature (1)..(25): SEQ ID NO: 1791; WAN024GM2_at; Start 28; Stop 52
caaaatagagccactatactggagt

SEQ ID NO: 250870 - DNA, 25 bp, Artificial
  probe
  misc_feature (1)..(25): SEQ ID NO: 1791; WAN024GM2_at; Start 700; Stop 724
tatatcggagaaattggacacacca

SEQ ID NO: 250871 - DNA, 25 bp, Artificial
  probe
  misc_feature (1)..(25): SEQ ID NO: 1791; WAN024GM2_at; Start 151; Stop 175
cagtccctcatatacgaaactggtg

SEQ ID NO: 250872 - DNA, 25 bp, Artificial
  probe
  misc_feature (1)..(25): SEQ ID NO: 1791; WAN024GM2_at; Start 93; Stop 117
taatgaaacaggacttactccagca

SEQ ID NO: 250873 - DNA, 25 bp, Artificial
  probe
  misc_feature (1)..(25): SEQ ID NO: 1791; WAN024GM2_at; Start 275; Stop 299
taggtatctttctcagtctatgtga

SEQ ID NO: 250874 - DNA, 25 bp, Artificial
  probe
  misc_feature (1)..(25): SEQ ID NO: 1791; WAN024GM2_at; Start 165; Stop 189
cgaaactggtgatgaatttagcgag

SEQ ID NO: 250875 - DNA, 25 bp, Artificial
  probe
  misc_feature (1)..(25): SEQ ID NO: 1791; WAN024GM2_at; Start 616; Stop 640
gataactttattttcctacacgctg

SEQ ID NO: 250876 - DNA, 25 bp, Artificial
  probe
  misc_feature (1)..(25): SEQ ID NO: 1791; WAN024GM2_at; Start 1046; Stop 1070
ctcatgaagtcagggataaaatcca

SEQ ID NO: 250877 - DNA, 25 bp, Artificial
  probe
  misc_feature (1)..(25): SEQ ID NO: 1791; WAN024GM2_at; Start 683; Stop 707
gagcctctaaaaatccttatatcgg

SEQ ID NO: 250878 - DNA, 25 bp, Artificial
  probe
  misc_feature (1)..(25): SEQ ID NO: 1791; WAN024GM2_at; Start 62; Stop 86
gaaatccagcaacatcccgtacaga

SEQ ID NO: 250879 - DNA, 25 bp, Artificial
  probe
  misc_feature (1)..(25): SEQ ID NO: 1791; WAN024GM2_at; Start 48; Stop 72
ggagtttctatatcgaaatccagca

SEQ ID NO: 250880 - DNA, 25 bp, Artificial
  probe
  misc_feature (1)..(25): SEQ ID NO: 1791; WAN024GM2_at; Start 431; Stop 455
gatttggcttatcaatacctggaca

SEQ ID NO: 250881 - DNA, 25 bp, Artificial
  probe
  misc_feature (1)..(25): SEQ ID NO: 1791; WAN024GM2_at; Start 1119; Stop 1143
tttaccttacaacaaacatcgtgga

SEQ ID NO: 250882 - DNA, 25 bp, Artificial
  probe
  misc_feature (1)..(25): SEQ ID NO: 1791; WAN024GM2_at; Start 258; Stop 282
tattgaaataaacgtcctaggtatc

SEQ ID NO: 250883 - DNA, 25 bp, Artificial
  probe
  misc_feature (1)..(25): SEQ ID NO: 1791; WAN024GM2_at; Start 1151; Stop 1175
gagcttgtgcattagctatcgtcgc

SEQ ID NO: 250884 - DNA, 25 bp, Artificial
  probe
  misc_feature (1)..(25): SEQ ID NO: 1791; WAN024GM2_at; Start 790; Stop 814
gatgcttggttaatcaaacacgccc

SEQ ID NO: 250885 - DNA, 25 bp, Artificial
  probe
  misc_feature (1)..(25): SEQ ID NO: 1791; WAN024GM2_at; Start 241; Stop 265
ccgtatgttgttggaggtattgaaa

SEQ ID NO: 250886 - DNA, 25 bp, Artificial
  probe
  misc_feature (1)..(25): SEQ ID NO: 1791; WAN024GM2_at; Start 665; Stop 689
tcacaaaagaaaaaataggagcctc

SEQ ID NO: 250887 - DNA, 25 bp, Artificial
  probe
  misc_feature (1)..(25): SEQ ID NO: 1791; WAN024GM2_at; Start 632; Stop 656
tacacgctggattaggtatttacac

SEQ ID NO: 250888 - DNA, 25 bp, Artificial
  probe
  misc_feature (1)..(25): SEQ ID NO: 7224; WAN024GM3_at; Start 96; Stop 120
catcgttttggataccgaagataac

SEQ ID NO: 250889 - DNA, 25 bp, Artificial
  probe
  misc_feature (1)..(25): SEQ ID NO: 7224; WAN024GM3_at; Start 191; Stop 215
cgagtttcttcgtagtgtgctttag

SEQ ID NO: 250890 - DNA, 25 bp, Artificial
  probe
  misc_feature (1)..(25): SEQ ID NO: 7224; WAN024GM3_at; Start 115; Stop 139
gataacttcattttctttgtcgata

SEQ ID NO: 250891 - DNA, 25 bp, Artificial
  probe
  misc_feature (1)..(25): SEQ ID NO: 7224; WAN024GM3_at; Start 37; Stop 61
caaagtagtttcagccatacggata

SEQ ID NO: 250892 - DNA, 25 bp, Artificial
  probe
  misc_feature (1)..(25): SEQ ID NO: 7224; WAN024GM3_at; Start 42; Stop 66
tagtttcagccatacggataccacc

SEQ ID NO: 250893 - DNA, 25 bp, Artificial
  probe
  misc_feature (1)..(25): SEQ ID NO: 7224; WAN024GM3_at; Start 151; Stop 175
gatatcagcgatagatgttggacga

SEQ ID NO: 250894 - DNA, 25 bp, Artificial
  probe
  misc_feature (1)..(25): SEQ ID NO: 7224; WAN024GM3_at; Start 65; Stop 89
ccttttggcatgaagttcaatttga

SEQ ID NO: 250895 - DNA, 25 bp, Artificial
  probe
  misc_feature (1)..(25): SEQ ID NO: 7224; WAN024GM3_at; Start 187; Stop 211
gaaacgagtttcttcgtagtgtgct

SEQ ID NO: 250896 - DNA, 25 bp, Artificial
  probe
  misc_feature (1)..(25): SEQ ID NO: 7224; WAN024GM3_at; Start 77; Stop 101
aagttcaatttgaagagttcatcgt

SEQ ID NO: 250897 - DNA, 25 bp, Artificial
  probe
  misc_feature (1)..(25): SEQ ID NO: 7224; WAN024GM3_at; Start 44; Stop 68
gtttcagccatacggataccacctt

SEQ ID NO: 250898 - DNA, 25 bp, Artificial
  probe
  misc_feature (1)..(25): SEQ ID NO: 7224; WAN024GM3_at; Start 203; Stop 227
tagtgtgctttagtttcttctacaa

SEQ ID NO: 250899 - DNA, 25 bp, Artificial
  probe
  misc_feature (1)..(25): SEQ ID NO: 7224; WAN024GM3_at; Start 181; Stop 205
cattgggaaacgagtttcttcgtag

SEQ ID NO: 250900 - DNA, 25 bp, Artificial
  probe
  misc_feature (1)..(25): SEQ ID NO: 7224; WAN024GM3_at; Start 156; Stop 180
cagcgatagatgttggacgagtgtc

SEQ ID NO: 250901 - DNA, 25 bp, Artificial
  probe
  misc_feature (1)..(25): SEQ ID NO: 7224; WAN024GM3_at; Start 34; Stop 58
tttcaaagtagtttcagccatacgg

SEQ ID NO: 250902 - DNA, 25 bp, Artificial
  probe
  misc_feature (1)..(25): SEQ ID NO: 7224; WAN024GM3_at; Start 91; Stop 115
gagttcatcgttttggataccgaag

SEQ ID NO: 250903 - DNA, 25 bp, Artificial
  probe
  misc_feature (1)..(25): SEQ ID NO: 7224; WAN024GM3_at; Start 132; Stop 156
tgtcgataaatccagcagggatatc

SEQ ID NO: 250904 - DNA, 25 bp, Artificial
  probe
  misc_feature (1)..(25): SEQ ID NO: 7224; WAN024GM3_at; Start 56; Stop 80
cggataccaccttttggcatgaagt

SEQ ID NO: 250905 - DNA, 25 bp, Artificial
  probe
  misc_feature (1)..(25): SEQ ID NO: 7224; WAN024GM3_at; Start 62; Stop 86
ccaccttttggcatgaagttcaatt

SEQ ID NO: 250906 - DNA, 25 bp, Artificial
  probe
  misc_feature (1)..(25): SEQ ID NO: 7224; WAN024GM3_at; Start 4; Stop 28
aacagctgggtctggttcgtatcca

SEQ ID NO: 250907 - DNA, 25 bp, Artificial
  probe
  misc_feature (1)..(25): SEQ ID NO: 7224; WAN024GM3_at; Start 143; Stop 167
ccagcagggatatcagcgatagatg

SEQ ID NO: 250908 - DNA, 25 bp, Artificial
  probe
  misc_feature (1)..(25): SEQ ID NO: 7224; WAN024GM3_at; Start 105; Stop 129
ggataccgaagataacttcattttc

SEQ ID NO: 250909 - DNA, 25 bp, Artificial
  probe
  misc_feature (1)..(25): SEQ ID NO: 7224; WAN024GM3_at; Start 100; Stop 124
gttttggataccgaagataacttca

SEQ ID NO: 250910 - DNA, 25 bp, Artificial
  probe
  misc_feature (1)..(25): SEQ ID NO: 7224; WAN024GM3_at; Start 128; Stop 152
tctttgtcgataaatccagcaggga

SEQ ID NO: 250911 - DNA, 25 bp, Artificial
  probe
  misc_feature (1)..(25): SEQ ID NO: 7224; WAN024GM3_at; Start 52; Stop 76
catacggataccaccttttggcatg

SEQ ID NO: 250912 - DNA, 25 bp, Artificial
  probe
  misc_feature (1)..(25): SEQ ID NO: 7224; WAN024GM3_at; Start 48; Stop 72
cagccatacggataccaccttttgg

SEQ ID NO: 250913 - DNA, 25 bp, Artificial
  probe
  misc_feature (1)..(25): SEQ ID NO: 7224; WAN024GM3_at; Start 171; Stop 195
gacgagtgtccattgggaaacgagt

SEQ ID NO: 250914 - DNA, 25 bp, Artificial
  probe
  misc_feature (1)..(25): SEQ ID NO: 7224; WAN024GM3_at; Start 159; Stop 183
cgatagatgttggacgagtgtccat

SEQ ID NO: 250915 - DNA, 25 bp, Artificial
  probe
  misc_feature (1)..(25): SEQ ID NO: 7224; WAN024GM3_at; Start 20; Stop 44
tcgtatccattttctttcaaagtag

SEQ ID NO: 250916 - DNA, 25 bp, Artificial
  probe
  misc_feature (1)..(25): SEQ ID NO: 7224; WAN024GM3_at; Start 88; Stop 112
gaagagttcatcgttttggataccg

SEQ ID NO: 250917 - DNA, 25 bp, Artificial
  probe
  misc_feature (1)..(25): SEQ ID NO: 7224; WAN024GM3_at; Start 175; Stop 199
agtgtccattgggaaacgagtttct

SEQ ID NO: 250918 - DNA, 25 bp, Artificial
  probe
  misc_feature (1)..(25): SEQ ID NO: 7224; WAN024GM3_at; Start 140; Stop 164
aatccagcagggatatcagcgatag

SEQ ID NO: 250919 - DNA, 25 bp, Artificial
  probe
  misc_feature (1)..(25): SEQ ID NO: 7224; WAN024GM3_at; Start 222; Stop 246
ctacaattttcttgatgtgaagtga

SEQ ID NO: 250920 - DNA, 25 bp, Artificial
  probe
  misc_feature (1)..(25): SEQ ID NO: 7224; WAN024GM3_at; Start 136; Stop 160
gataaatccagcagggatatcagcg

SEQ ID NO: 250921 - DNA, 25 bp, Artificial
  probe
  misc_feature (1)..(25): SEQ ID NO: 7224; WAN024GM3_at; Start 9; Stop 33
ctgggtctggttcgtatccattttc

SEQ ID NO: 250922 - DNA, 25 bp, Artificial
  probe
  misc_feature (1)..(25): SEQ ID NO: 5499; WAN024GM4_at; Start 56; Stop 80
tcacccaggcgaacaacttgttgca

SEQ ID NO: 250923 - DNA, 25 bp, Artificial
  probe
  misc_feature (1)..(25): SEQ ID NO: 5499; WAN024GM4_at; Start 141; Stop 165
tgattgcattccagtcatttacttt

SEQ ID NO: 250924 - DNA, 25 bp, Artificial
  probe
  misc_feature (1)..(25): SEQ ID NO: 5499; WAN024GM4_at; Start 110; Stop 134
cgaagacggattgtttcttcatcga

SEQ ID NO: 250925 - DNA, 25 bp, Artificial
  probe
  misc_feature (1)..(25): SEQ ID NO: 5499; WAN024GM4_at; Start 16; Stop 40
cacgttcatcgctggtttgcgaaca

SEQ ID NO: 250926 - DNA, 25 bp, Artificial
  probe
  misc_feature (1)..(25): SEQ ID NO: 5499; WAN024GM4_at; Start 186; Stop 210
caccgtaaagagcaagacgtgcgta

SEQ ID NO: 250927 - DNA, 25 bp, Artificial
  probe
  misc_feature (1)..(25): SEQ ID NO: 5499; WAN024GM4_at; Start 70; Stop 94
aacttgttgcaatgcttggtattga

SEQ ID NO: 250928 - DNA, 25 bp, Artificial
  probe
  misc_feature (1)..(25): SEQ ID NO: 5499; WAN024GM4_at; Start 174; Stop 198
tcaagtagtctgcaccgtaaagagc

SEQ ID NO: 250929 - DNA, 25 bp, Artificial
  probe
  misc_feature (1)..(25): SEQ ID NO: 5499; WAN024GM4_at; Start 22; Stop 46
catcgctggtttgcgaacatcaacc

SEQ ID NO: 250930 - DNA, 25 bp, Artificial
  probe
  misc_feature (1)..(25): SEQ ID NO: 5499; WAN024GM4_at; Start 129; Stop 153
catcgatttctttgattgcattcca

SEQ ID NO: 250931 - DNA, 25 bp, Artificial
  probe
  misc_feature (1)..(25): SEQ ID NO: 5499; WAN024GM4_at; Start 103; Stop 127
ttcttcacgaagacggattgtttct

SEQ ID NO: 250932 - DNA, 25 bp, Artificial
  probe
  misc_feature (1)..(25): SEQ ID NO: 5499; WAN024GM4_at; Start 114; Stop 138
gacggattgtttcttcatcgatttc

SEQ ID NO: 250933 - DNA, 25 bp, Artificial
  probe
  misc_feature (1)..(25): SEQ ID NO: 5499; WAN024GM4_at; Start 188; Stop 212
ccgtaaagagcaagacgtgcgtaaa

SEQ ID NO: 250934 - DNA, 25 bp, Artificial
  probe
  misc_feature (1)..(25): SEQ ID NO: 5499; WAN024GM4_at; Start 54; Stop 78
ggtcacccaggcgaacaacttgttg

SEQ ID NO: 250935 - DNA, 25 bp, Artificial
  probe
  misc_feature (1)..(25): SEQ ID NO: 5499; WAN024GM4_at; Start 66; Stop 90
gaacaacttgttgcaatgcttggta

SEQ ID NO: 250936 - DNA, 25 bp, Artificial
  probe
  misc_feature (1)..(25): SEQ ID NO: 5499; WAN024GM4_at; Start 61; Stop 85
caggcgaacaacttgttgcaatgct

SEQ ID NO: 250937 - DNA, 25 bp, Artificial
  probe
  misc_feature (1)..(25): SEQ ID NO: 5499; WAN024GM4_at; Start 79; Stop 103
caatgcttggtattgaaggtttact

SEQ ID NO: 250938 - DNA, 25 bp, Artificial
  probe
  misc_feature (1)..(25): SEQ ID NO: 5499; WAN024GM4_at; Start 2; Stop 26
tggattgcttctttcacgttcatcg

SEQ ID NO: 250939 - DNA, 25 bp, Artificial
  probe
  misc_feature (1)..(25): SEQ ID NO: 5499; WAN024GM4_at; Start 19; Stop 43
gttcatcgctggtttgcgaacatca

SEQ ID NO: 250940 - DNA, 25 bp, Artificial
  probe
  misc_feature (1)..(25): SEQ ID NO: 5499; WAN024GM4_at; Start 167; Stop 191
tcttgcatcaagtagtctgcaccgt

SEQ ID NO: 250941 - DNA, 25 bp, Artificial
  probe
  misc_feature (1)..(25): SEQ ID NO: 5499; WAN024GM4_at; Start 178; Stop 202
gtagtctgcaccgtaaagagcaaga

SEQ ID NO: 250942 - DNA, 25 bp, Artificial
  probe
  misc_feature (1)..(25): SEQ ID NO: 5499; WAN024GM4_at; Start 51; Stop 75
aaaggtcacccaggcgaacaacttg

SEQ ID NO: 250943 - DNA, 25 bp, Artificial
  probe
  misc_feature (1)..(25): SEQ ID NO: 5499; WAN024GM4_at; Start 98; Stop 122
tttacttcttcacgaagacggattg

SEQ ID NO: 250944 - DNA, 25 bp, Artificial
  probe
  misc_feature (1)..(25): SEQ ID NO: 5499; WAN024GM4_at; Start 152; Stop 176
cagtcatttactttttcttgcatca

SEQ ID NO: 250945 - DNA, 25 bp, Artificial
  probe
  misc_feature (1)..(25): SEQ ID NO: 5499; WAN024GM4_at; Start 12; Stop 36
ctttcacgttcatcgctggtttgcg

SEQ ID NO: 250946 - DNA, 25 bp, Artificial
  probe
  misc_feature (1)..(25): SEQ ID NO: 5499; WAN024GM4_at; Start 28; Stop 52
tggtttgcgaacatcaaccccgtaa

SEQ ID NO: 250947 - DNA, 25 bp, Artificial
  probe
  misc_feature (1)..(25): SEQ ID NO: 5499; WAN024GM4_at; Start 192; Stop 216
aaagagcaagacgtgcgtaaacacc

SEQ ID NO: 250948 - DNA, 25 bp, Artificial
  probe
  misc_feature (1)..(25): SEQ ID NO: 5499; WAN024GM4_at; Start 164; Stop 188
ttttcttgcatcaagtagtctgcac

SEQ ID NO: 250949 - DNA, 25 bp, Artificial
  probe
  misc_feature (1)..(25): SEQ ID NO: 5499; WAN024GM4_at; Start 92; Stop 116
tgaaggtttacttcttcacgaagac

SEQ ID NO: 250950 - DNA, 25 bp, Artificial
  probe
  misc_feature (1)..(25): SEQ ID NO: 5499; WAN024GM4_at; Start 26; Stop 50
gctggtttgcgaacatcaaccccgt

SEQ ID NO: 250951 - DNA, 25 bp, Artificial
  probe
  misc_feature (1)..(25): SEQ ID NO: 5499; WAN024GM4_at; Start 133; Stop 157
gatttctttgattgcattccagtca

SEQ ID NO: 250952 - DNA, 25 bp, Artificial
  probe
  misc_feature (1)..(25): SEQ ID NO: 5499; WAN024GM4_at; Start 7; Stop 31
tgcttctttcacgttcatcgctggt

SEQ ID NO: 250953 - DNA, 25 bp, Artificial
  probe
  misc_feature (1)..(25): SEQ ID NO: 5499; WAN024GM4_at; Start 33; Stop 57
tgcgaacatcaaccccgtaaaggtc

SEQ ID NO: 250954 - DNA, 25 bp, Artificial
  probe
  misc_feature (1)..(25): SEQ ID NO: 5499; WAN024GM4_at; Start 171; Stop 195
gcatcaagtagtctgcaccgtaaag

SEQ ID NO: 250955 - DNA, 25 bp, Artificial
  probe
  misc_feature (1)..(25): SEQ ID NO: 5499; WAN024GM4_at; Start 182; Stop 206
tctgcaccgtaaagagcaagacgtg

SEQ ID NO: 250956 - DNA, 25 bp, Artificial
  probe
  misc_feature (1)..(25): SEQ ID NO: 2717; WAN024GM5_at; Start 467; Stop 491
cttcaaatattcgtcgcgctcgtca

SEQ ID NO: 250957 - DNA, 25 bp, Artificial
  probe
  misc_feature (1)..(25): SEQ ID NO: 2717; WAN024GM5_at; Start 714; Stop 738
ggttgatgttcgcaaaccagcgatg

SEQ ID NO: 250958 - DNA, 25 bp, Artificial
  probe
  misc_feature (1)..(25): SEQ ID NO: 2717; WAN024GM5_at; Start 1030; Stop 1054
caccgtgttactaagatggactacc

SEQ ID NO: 250959 - DNA, 25 bp, Artificial
  probe
  misc_feature (1)..(25): SEQ ID NO: 2717; WAN024GM5_at; Start 1261; Stop 1285
gatccagaaaatgaagaacaacgcc

SEQ ID NO: 250960 - DNA, 25 bp, Artificial
  probe
  misc_feature (1)..(25): SEQ ID NO: 2717; WAN024GM5_at; Start 1000; Stop 1024
tctatggctggtatgggtaacgacg

SEQ ID NO: 250961 - DNA, 25 bp, Artificial
  probe
  misc_feature (1)..(25): SEQ ID NO: 2717; WAN024GM5_at; Start 2045; Stop 2069
tatcacctcgcgctcttggtaagac

SEQ ID NO: 250962 - DNA, 25 bp, Artificial
  probe
  misc_feature (1)..(25): SEQ ID NO: 2717; WAN024GM5_at; Start 117; Stop 141
cacaccttatgatggagacgaaagc

SEQ ID NO: 250963 - DNA, 25 bp, Artificial
  probe
  misc_feature (1)..(25): SEQ ID NO: 2717; WAN024GM5_at; Start 156; Stop 180
aacagagcgttcacttcacatcaag

SEQ ID NO: 250964 - DNA, 25 bp, Artificial
  probe
  misc_feature (1)..(25): SEQ ID NO: 2717; WAN024GM5_at; Start 341; Stop 365
caaaaggtggtatccgtatggctga

SEQ ID NO: 250965 - DNA, 25 bp, Artificial
  probe
  misc_feature (1)..(25): SEQ ID NO: 2717; WAN024GM5_at; Start 33; Stop 57
tatttttgacaaagcttgggaaggc

SEQ ID NO: 250966 - DNA, 25 bp, Artificial
  probe
  misc_feature (1)..(25): SEQ ID NO: 2717; WAN024GM5_at; Start 1678; Stop 1702
gaaacaatcggtgactacccacgct

SEQ ID NO: 250967 - DNA, 25 bp, Artificial
  probe
  misc_feature (1)..(25): SEQ ID NO: 2717; WAN024GM5_at; Start 136; Stop 160
gaaagcttccttgcaggaccaacag

SEQ ID NO: 250968 - DNA, 25 bp, Artificial
  probe
  misc_feature (1)..(25): SEQ ID NO: 2717; WAN024GM5_at; Start 1350; Stop 1374
tggttacgacgatgttcacaaagac

SEQ ID NO: 250969 - DNA, 25 bp, Artificial
  probe
  misc_feature (1)..(25): SEQ ID NO: 2717; WAN024GM5_at; Start 1288; Stop 1312
aacatccagtacttcggtgctcgtg

SEQ ID NO: 250970 - DNA, 25 bp, Artificial
  probe
  misc_feature (1)..(25): SEQ ID NO: 2717; WAN024GM5_at; Start 1510; Stop 1534
gataggtacaactacgaagctgttc

SEQ ID NO: 250971 - DNA, 25 bp, Artificial
  probe
  misc_feature (1)..(25): SEQ ID NO: 2717; WAN024GM5_at; Start 1384; Stop 1408
tttgatatcgaaccaatccgtgacg

SEQ ID NO: 250972 - DNA, 25 bp, Artificial
  probe
  misc_feature (1)..(25): SEQ ID NO: 2717; WAN024GM5_at; Start 508; Stop 532
ggtcttccagatgcatactcacgcg

SEQ ID NO: 250973 - DNA, 25 bp, Artificial
  probe
  misc_feature (1)..(25): SEQ ID NO: 2717; WAN024GM5_at; Start 384; Stop 408
tggatacgaaccagacccagctgtt

SEQ ID NO: 250974 - DNA, 25 bp, Artificial
  probe
  misc_feature (1)..(25): SEQ ID NO: 2717; WAN024GM5_at; Start 738; Stop 762
gaacgtgaaagaagcaatccaatgg

SEQ ID NO: 250975 - DNA, 25 bp, Artificial
  probe
  misc_feature (1)..(25): SEQ ID NO: 2717; WAN024GM5_at; Start 1708; Stop 1732
gaagatgacccacgttcaaacgaat

SEQ ID NO: 250976 - DNA, 25 bp, Artificial
  probe
  misc_feature (1)..(25): SEQ ID NO: 2717; WAN024GM5_at; Start 1246; Stop 1270
tgtgtgtctccacttgatccagaaa

SEQ ID NO: 250977 - DNA, 25 bp, Artificial
  probe
  misc_feature (1)..(25): SEQ ID NO: 2717; WAN024GM5_at; Start 634; Stop 658
gaaacaatccgtcttcgtgaagaag

SEQ ID NO: 250978 - DNA, 25 bp, Artificial
  probe
  misc_feature (1)..(25): SEQ ID NO: 2717; WAN024GM5_at; Start 961; Stop 985
gaccaattgtactcaggtgacccaa

SEQ ID NO: 250979 - DNA, 25 bp, Artificial
  probe
  misc_feature (1)..(25): SEQ ID NO: 2717; WAN024GM5_at; Start 841; Stop 865
gacatctttgcagaacgtgaccttg

SEQ ID NO: 250980 - DNA, 25 bp, Artificial
  probe
  misc_feature (1)..(25): SEQ ID NO: 2717; WAN024GM5_at; Start 1145; Stop 1169
gctactgtatgcacatgagccacaa

SEQ ID NO: 250981 - DNA, 25 bp, Artificial
  probe
  misc_feature (1)..(25): SEQ ID NO: 2717; WAN024GM5_at; Start 2007; Stop 2031
tagttatgcagctgacggtatctca

SEQ ID NO: 250982 - DNA, 25 bp, Artificial
  probe
  misc_feature (1)..(25): SEQ ID NO: 2717; WAN024GM5_at; Start 1784; Stop 1808
tatacaaagacgcagaagctacagt

SEQ ID NO: 250983 - DNA, 25 bp, Artificial
  probe
  misc_feature (1)..(25): SEQ ID NO: 2717; WAN024GM5_at; Start 1736; Stop 1760
cagaatggttgatcgaagcttacac

SEQ ID NO: 250984 - DNA, 25 bp, Artificial
  probe
  misc_feature (1)..(25): SEQ ID NO: 2717; WAN024GM5_at; Start 802; Stop 826
ggtgctgctacatctctaggtcgtg

SEQ ID NO: 250985 - DNA, 25 bp, Artificial
  probe
  misc_feature (1)..(25): SEQ ID NO: 2717; WAN024GM5_at; Start 682; Stop 706
caacaagttgttcgcctgggtgacc

SEQ ID NO: 250986 - DNA, 25 bp, Artificial
  probe
  misc_feature (1)..(25): SEQ ID NO: 2717; WAN024GM5_at; Start 1558; Stop 1582
caacgtgccaacatgggattcggta

SEQ ID NO: 250987 - DNA, 25 bp, Artificial
  probe
  misc_feature (1)..(25): SEQ ID NO: 2717; WAN024GM5_at; Start 1448; Stop 1472
aatctcttgactggttgactgacac

SEQ ID NO: 250988 - DNA, 25 bp, Artificial
  probe
  misc_feature (1)..(25): SEQ ID NO: 2717; WAN024GM5_at; Start 1464; Stop 1488
gactgacacttacgtagatgccttg

SEQ ID NO: 250989 - DNA, 25 bp, Artificial
  probe
  misc_feature (1)..(25): SEQ ID NO: 2717; WAN024GM5_at; Start 554; Stop 578
cacgtcttgctctttacggtgcaga

SEQ ID NO: 250990 - DNA, 25 bp, Artificial
  probe
  misc_feature (1)..(25): SEQ ID NO: 7552; WAN024GM6_at; Start 111; Stop 135
tcagctcccgcttcatttagaacac

SEQ ID NO: 250991 - DNA, 25 bp, Artificial
  probe
  misc_feature (1)..(25): SEQ ID NO: 7552; WAN024GM6_at; Start 104; Stop 128
gtagacctcagctcccgcttcattt

SEQ ID NO: 250992 - DNA, 25 bp, Artificial
  probe
  misc_feature (1)..(25): SEQ ID NO: 7552; WAN024GM6_at; Start 199; Stop 223
caagtattggcaaagggaggtaaag

SEQ ID NO: 250993 - DNA, 25 bp, Artificial
  probe
  misc_feature (1)..(25): SEQ ID NO: 7552; WAN024GM6_at; Start 189; Stop 213
cctagaaaaccaagtattggcaaag

SEQ ID NO: 250994 - DNA, 25 bp, Artificial
  probe
  misc_feature (1)..(25): SEQ ID NO: 7552; WAN024GM6_at; Start 130; Stop 154
gaacaccatcacgattatctagtcg

SEQ ID NO: 250995 - DNA, 25 bp, Artificial
  probe
  misc_feature (1)..(25): SEQ ID NO: 7552; WAN024GM6_at; Start 86; Stop 110
aaaactggtccagagatagtagacc

SEQ ID NO: 250996 - DNA, 25 bp, Artificial
  probe
  misc_feature (1)..(25): SEQ ID NO: 7552; WAN024GM6_at; Start 77; Stop 101
catattttcaaaactggtccagaga

SEQ ID NO: 250997 - DNA, 25 bp, Artificial
  probe
  misc_feature (1)..(25): SEQ ID NO: 7552; WAN024GM6_at; Start 227; Stop 251
gccatgaacgtctaaactgtacaag

SEQ ID NO: 250998 - DNA, 25 bp, Artificial
  probe
  misc_feature (1)..(25): SEQ ID NO: 7552; WAN024GM6_at; Start 4; Stop 28
catagaccaagagacgattccaaac

SEQ ID NO: 250999 - DNA, 25 bp, Artificial
  probe
  misc_feature (1)..(25): SEQ ID NO: 7552; WAN024GM6_at; Start 149; Stop 173
tagtcgaagcttccaataatagaaa

SEQ ID NO: 251000 - DNA, 25 bp, Artificial
  probe
  misc_feature (1)..(25): SEQ ID NO: 7552; WAN024GM6_at; Start 1; Stop 25
ttgcatagaccaagagacgattcca

SEQ ID NO: 251001 - DNA, 25 bp, Artificial
  probe
  misc_feature (1)..(25): SEQ ID NO: 7552; WAN024GM6_at; Start 120; Stop 144
gcttcatttagaacaccatcacgat

SEQ ID NO: 251002 - DNA, 25 bp, Artificial
  probe
  misc_feature (1)..(25): SEQ ID NO: 7552; WAN024GM6_at; Start 209; Stop 233
caaagggaggtaaagatagccatga

SEQ ID NO: 251003 - DNA, 25 bp, Artificial
  probe
  misc_feature (1)..(25): SEQ ID NO: 7552; WAN024GM6_at; Start 91; Stop 115
tggtccagagatagtagacctcagc

SEQ ID NO: 251004 - DNA, 25 bp, Artificial
  probe
  misc_feature (1)..(25): SEQ ID NO: 7552; WAN024GM6_at; Start 52; Stop 76
tatccagtcgtgcaatctcacgtaa

SEQ ID NO: 251005 - DNA, 25 bp, Artificial
  probe
  misc_feature (1)..(25): SEQ ID NO: 7552; WAN024GM6_at; Start 8; Stop 32
gaccaagagacgattccaaacaaca

SEQ ID NO: 251006 - DNA, 25 bp, Artificial
  probe
  misc_feature (1)..(25): SEQ ID NO: 7552; WAN024GM6_at; Start 139; Stop 163
cacgattatctagtcgaagcttcca

SEQ ID NO: 251007 - DNA, 25 bp, Artificial
  probe
  misc_feature (1)..(25): SEQ ID NO: 7552; WAN024GM6_at; Start 154; Stop 178
gaagcttccaataatagaaaacaga

SEQ ID NO: 251008 - DNA, 25 bp, Artificial
  probe
  misc_feature (1)..(25): SEQ ID NO: 7552; WAN024GM6_at; Start 223; Stop 247
gatagccatgaacgtctaaactgta

SEQ ID NO: 251009 - DNA, 25 bp, Artificial
  probe
  misc_feature (1)..(25): SEQ ID NO: 7552; WAN024GM6_at; Start 124; Stop 148
catttagaacaccatcacgattatc

SEQ ID NO: 251010 - DNA, 25 bp, Artificial
  probe
  misc_feature (1)..(25): SEQ ID NO: 7552; WAN024GM6_at; Start 232; Stop 256
gaacgtctaaactgtacaagaacaa

SEQ ID NO: 251011 - DNA, 25 bp, Artificial
  probe
  misc_feature (1)..(25): SEQ ID NO: 7552; WAN024GM6_at; Start 47; Stop 71
agccttatccagtcgtgcaatctca

SEQ ID NO: 251012 - DNA, 25 bp, Artificial
  probe
  misc_feature (1)..(25): SEQ ID NO: 7552; WAN024GM6_at; Start 205; Stop 229
ttggcaaagggaggtaaagatagcc

SEQ ID NO: 251013 - DNA, 25 bp, Artificial
  probe
  misc_feature (1)..(25): SEQ ID NO: 7552; WAN024GM6_at; Start 142; Stop 166
gattatctagtcgaagcttccaata

SEQ ID NO: 251014 - DNA, 25 bp, Artificial
  probe
  misc_feature (1)..(25): SEQ ID NO: 7552; WAN024GM6_at; Start 14; Stop 38
gagacgattccaaacaacaatactt

SEQ ID NO: 251015 - DNA, 25 bp, Artificial
  probe
  misc_feature (1)..(25): SEQ ID NO: 7552; WAN024GM6_at; Start 41; Stop 65
caattcagccttatccagtcgtgca

SEQ ID NO: 251016 - DNA, 25 bp, Artificial
  probe
  misc_feature (1)..(25): SEQ ID NO: 7552; WAN024GM6_at; Start 19; Stop 43
gattccaaacaacaatactttccaa

SEQ ID NO: 251017 - DNA, 25 bp, Artificial
  probe
  misc_feature (1)..(25): SEQ ID NO: 7552; WAN024GM6_at; Start 69; Stop 93
tcacgtaacatattttcaaaactgg

SEQ ID NO: 251018 - DNA, 25 bp, Artificial
  probe
  misc_feature (1)..(25): SEQ ID NO: 7552; WAN024GM6_at; Start 244; Stop 268
tgtacaagaacaaaccaaatccgat

SEQ ID NO: 251019 - DNA, 25 bp, Artificial
  probe
  misc_feature (1)..(25): SEQ ID NO: 7552; WAN024GM6_at; Start 34; Stop 58
tactttccaattcagccttatccag

SEQ ID NO: 251020 - DNA, 25 bp, Artificial
  probe
  misc_feature (1)..(25): SEQ ID NO: 7552; WAN024GM6_at; Start 215; Stop 239
gaggtaaagatagccatgaacgtct

SEQ ID NO: 251021 - DNA, 25 bp, Artificial
  probe
  misc_feature (1)..(25): SEQ ID NO: 7552; WAN024GM6_at; Start 98; Stop 122
gagatagtagacctcagctcccgct

SEQ ID NO: 251022 - DNA, 25 bp, Artificial
  probe
  misc_feature (1)..(25): SEQ ID NO: 7552; WAN024GM6_at; Start 56; Stop 80
cagtcgtgcaatctcacgtaacata

SEQ ID NO: 251023 - DNA, 25 bp, Artificial
  probe
  misc_feature (1)..(25): SEQ ID NO: 7552; WAN024GM6_at; Start 160; Stop 184
tccaataatagaaaacagacaaaac

SEQ ID NO: 251024 - DNA, 25 bp, Artificial
  probe
  misc_feature (1)..(25): SEQ ID NO: 4864; WAN024GM7_at; Start 187; Stop 211
gaccaatcaatcgtccttgatttag

SEQ ID NO: 251025 - DNA, 25 bp, Artificial
  probe
  misc_feature (1)..(25): SEQ ID NO: 4864; WAN024GM7_at; Start 146; Stop 170
gtaaacggcattgttggcaaccaag

SEQ ID NO: 251026 - DNA, 25 bp, Artificial
  probe
  misc_feature (1)..(25): SEQ ID NO: 4864; WAN024GM7_at; Start 130; Stop 154
tttcatagatttcacggtaaacggc

SEQ ID NO: 251027 - DNA, 25 bp, Artificial
  probe
  misc_feature (1)..(25): SEQ ID NO: 4864; WAN024GM7_at; Start 222; Stop 246
ttgtctgcatggacaaccgagctaa

SEQ ID NO: 251028 - DNA, 25 bp, Artificial
  probe
  misc_feature (1)..(25): SEQ ID NO: 4864; WAN024GM7_at; Start 154; Stop 178
cattgttggcaaccaagtctgcatg

SEQ ID NO: 251029 - DNA, 25 bp, Artificial
  probe
  misc_feature (1)..(25): SEQ ID NO: 4864; WAN024GM7_at; Start 125; Stop 149
ctgtgtttcatagatttcacggtaa

SEQ ID NO: 251030 - DNA, 25 bp, Artificial
  probe
  misc_feature (1)..(25): SEQ ID NO: 4864; WAN024GM7_at; Start 147; Stop 171
taaacggcattgttggcaaccaagt

SEQ ID NO: 251031 - DNA, 25 bp, Artificial
  probe
  misc_feature (1)..(25): SEQ ID NO: 4864; WAN024GM7_at; Start 152; Stop 176
ggcattgttggcaaccaagtctgca

SEQ ID NO: 251032 - DNA, 25 bp, Artificial
  probe
  misc_feature (1)..(25): SEQ ID NO: 4864; WAN024GM7_at; Start 135; Stop 159
tagatttcacggtaaacggcattgt

SEQ ID NO: 251033 - DNA, 25 bp, Artificial
  probe
  misc_feature (1)..(25): SEQ ID NO: 4864; WAN024GM7_at; Start 183; Stop 207
ccttgaccaatcaatcgtccttgat

SEQ ID NO: 251034 - DNA, 25 bp, Artificial
  probe
  misc_feature (1)..(25): SEQ ID NO: 4864; WAN024GM7_at; Start 211; Stop 235
gaaccaagatcttgtctgcatggac

SEQ ID NO: 251035 - DNA, 25 bp, Artificial
  probe
  misc_feature (1)..(25): SEQ ID NO: 4864; WAN024GM7_at; Start 106; Stop 130
tatagtttgtctttcatttctgtgt

SEQ ID NO: 251036 - DNA, 25 bp, Artificial
  probe
  misc_feature (1)..(25): SEQ ID NO: 4864; WAN024GM7_at; Start 157; Stop 181
tgttggcaaccaagtctgcatgcgt

SEQ ID NO: 251037 - DNA, 25 bp, Artificial
  probe
  misc_feature (1)..(25): SEQ ID NO: 4864; WAN024GM7_at; Start 200; Stop 224
tccttgatttagaaccaagatcttg

SEQ ID NO: 251038 - DNA, 25 bp, Artificial
  probe
  misc_feature (1)..(25): SEQ ID NO: 4864; WAN024GM7_at; Start 218; Stop 242
gatcttgtctgcatggacaaccgag

SEQ ID NO: 251039 - DNA, 25 bp, Artificial
  probe
  misc_feature (1)..(25): SEQ ID NO: 4864; WAN024GM7_at; Start 216; Stop 240
aagatcttgtctgcatggacaaccg

SEQ ID NO: 251040 - DNA, 25 bp, Artificial
  probe
  misc_feature (1)..(25): SEQ ID NO: 4864; WAN024GM7_at; Start 156; Stop 180
ttgttggcaaccaagtctgcatgcg

SEQ ID NO: 251041 - DNA, 25 bp, Artificial
  probe
  misc_feature (1)..(25): SEQ ID NO: 4864; WAN024GM7_at; Start 205; Stop 229
gatttagaaccaagatcttgtctgc

SEQ ID NO: 251042 - DNA, 25 bp, Artificial
  probe
  misc_feature (1)..(25): SEQ ID NO: 4864; WAN024GM7_at; Start 203; Stop 227
ttgatttagaaccaagatcttgtct

SEQ ID NO: 251043 - DNA, 25 bp, Artificial
  probe
  misc_feature (1)..(25): SEQ ID NO: 4864; WAN024GM7_at; Start 214; Stop 238
ccaagatcttgtctgcatggacaac

SEQ ID NO: 251044 - DNA, 25 bp, Artificial
  probe
  misc_feature (1)..(25): SEQ ID NO: 4864; WAN024GM7_at; Start 209; Stop 233
tagaaccaagatcttgtctgcatgg

SEQ ID NO: 251045 - DNA, 25 bp, Artificial
  probe
  misc_feature (1)..(25): SEQ ID NO: 4864; WAN024GM7_at; Start 113; Stop 137
tgtctttcatttctgtgtttcatag

SEQ ID NO: 251046 - DNA, 25 bp, Artificial
  probe
  misc_feature (1)..(25): SEQ ID NO: 4864; WAN024GM7_at; Start 144; Stop 168
cggtaaacggcattgttggcaacca

SEQ ID NO: 251047 - DNA, 25 bp, Artificial
  probe
  misc_feature (1)..(25): SEQ ID NO: 4864; WAN024GM7_at; Start 194; Stop 218
caatcgtccttgatttagaaccaag

SEQ ID NO: 251048 - DNA, 25 bp, Artificial
  probe
  misc_feature (1)..(25): SEQ ID NO: 4864; WAN024GM7_at; Start 132; Stop 156
tcatagatttcacggtaaacggcat

SEQ ID NO: 251049 - DNA, 25 bp, Artificial
  probe
  misc_feature (1)..(25): SEQ ID NO: 4864; WAN024GM7_at; Start 145; Stop 169
ggtaaacggcattgttggcaaccaa

SEQ ID NO: 251050 - DNA, 25 bp, Artificial
  probe
  misc_feature (1)..(25): SEQ ID NO: 4864; WAN024GM7_at; Start 220; Stop 244
tcttgtctgcatggacaaccgagct

SEQ ID NO: 251051 - DNA, 25 bp, Artificial
  probe
  misc_feature (1)..(25): SEQ ID NO: 4864; WAN024GM7_at; Start 149; Stop 173
aacggcattgttggcaaccaagtct

SEQ ID NO: 251052 - DNA, 25 bp, Artificial
  probe
  misc_feature (1)..(25): SEQ ID NO: 4864; WAN024GM7_at; Start 137; Stop 161
gatttcacggtaaacggcattgttg

SEQ ID NO: 251053 - DNA, 25 bp, Artificial
  probe
  misc_feature (1)..(25): SEQ ID NO: 4864; WAN024GM7_at; Start 139; Stop 163
tttcacggtaaacggcattgttggc

SEQ ID NO: 251054 - DNA, 25 bp, Artificial
  probe
  misc_feature (1)..(25): SEQ ID NO: 4864; WAN024GM7_at; Start 120; Stop 144
catttctgtgtttcatagatttcac

SEQ ID NO: 251055 - DNA, 25 bp, Artificial
  probe
  misc_feature (1)..(25): SEQ ID NO: 4864; WAN024GM7_at; Start 197; Stop 221
tcgtccttgatttagaaccaagatc

SEQ ID NO: 251056 - DNA, 25 bp, Artificial
  probe
  misc_feature (1)..(25): SEQ ID NO: 4864; WAN024GM7_at; Start 212; Stop 236
aaccaagatcttgtctgcatggaca

SEQ ID NO: 251057 - DNA, 25 bp, Artificial
  probe
  misc_feature (1)..(25): SEQ ID NO: 4864; WAN024GM7_at; Start 142; Stop 166
cacggtaaacggcattgttggcaac

SEQ ID NO: 251058 - DNA, 25 bp, Artificial
  probe
  misc_feature (1)..(25): SEQ ID NO: 4291; WAN024GM8_at; Start 23; Stop 47
cactttttgttcgtcaaatggcagc

SEQ ID NO: 251059 - DNA, 25 bp, Artificial
  probe
  misc_feature (1)..(25): SEQ ID NO: 4291; WAN024GM8_at; Start 15; Stop 39
aattacatcactttttgttcgtcaa

SEQ ID NO: 251060 - DNA, 25 bp, Artificial
  probe
  misc_feature (1)..(25): SEQ ID NO: 4291; WAN024GM8_at; Start 30; Stop 54
tgttcgtcaaatggcagctcttttt

SEQ ID NO: 251061 - DNA, 25 bp, Artificial
  probe
  misc_feature (1)..(25): SEQ ID NO: 4291; WAN024GM8_at; Start 29; Stop 53
ttgttcgtcaaatggcagctctttt

SEQ ID NO: 251062 - DNA, 25 bp, Artificial
  probe
  misc_feature (1)..(25): SEQ ID NO: 4291; WAN024GM8_at; Start 18; Stop 42
tacatcactttttgttcgtcaaatg

SEQ ID NO: 251063 - DNA, 25 bp, Artificial
  probe
  misc_feature (1)..(25): SEQ ID NO: 4291; WAN024GM8_at; Start 42; Stop 66
ggcagctctttttttaggatataaa

SEQ ID NO: 251064 - DNA, 25 bp, Artificial
  probe
  misc_feature (1)..(25): SEQ ID NO: 4291; WAN024GM8_at; Start 10; Stop 34
tcagaaattacatcactttttgttc

SEQ ID NO: 251065 - DNA, 25 bp, Artificial
  probe
  misc_feature (1)..(25): SEQ ID NO: 4291; WAN024GM8_at; Start 7; Stop 31
atttcagaaattacatcactttttg

SEQ ID NO: 251066 - DNA, 25 bp, Artificial
  probe
  misc_feature (1)..(25): SEQ ID NO: 4291; WAN024GM8_at; Start 11; Stop 35
cagaaattacatcactttttgttcg

SEQ ID NO: 251067 - DNA, 25 bp, Artificial
  probe
  misc_feature (1)..(25): SEQ ID NO: 4291; WAN024GM8_at; Start 35; Stop 59
gtcaaatggcagctctttttttagg

SEQ ID NO: 251068 - DNA, 25 bp, Artificial
  probe
  misc_feature (1)..(25): SEQ ID NO: 4291; WAN024GM8_at; Start 19; Stop 43
acatcactttttgttcgtcaaatgg

SEQ ID NO: 251069 - DNA, 25 bp, Artificial
  probe
  misc_feature (1)..(25): SEQ ID NO: 4291; WAN024GM8_at; Start 33; Stop 57
tcgtcaaatggcagctcttttttta

SEQ ID NO: 251070 - DNA, 25 bp, Artificial
  probe
  misc_feature (1)..(25): SEQ ID NO: 4291; WAN024GM8_at; Start 5; Stop 29
taatttcagaaattacatcactttt

SEQ ID NO: 251071 - DNA, 25 bp, Artificial
  probe
  misc_feature (1)..(25): SEQ ID NO: 4291; WAN024GM8_at; Start 43; Stop 67
gcagctctttttttaggatataaaa

SEQ ID NO: 251072 - DNA, 25 bp, Artificial
  probe
  misc_feature (1)..(25): SEQ ID NO: 4291; WAN024GM8_at; Start 36; Stop 60
tcaaatggcagctctttttttagga

SEQ ID NO: 251073 - DNA, 25 bp, Artificial
  probe
  misc_feature (1)..(25): SEQ ID NO: 4291; WAN024GM8_at; Start 1; Stop 25
gtgttaatttcagaaattacatcac

SEQ ID NO: 251074 - DNA, 25 bp, Artificial
  probe
  misc_feature (1)..(25): SEQ ID NO: 4291; WAN024GM8_at; Start 14; Stop 38
aaattacatcactttttgttcgtca

SEQ ID NO: 251075 - DNA, 25 bp, Artificial
  probe
  misc_feature (1)..(25): SEQ ID NO: 4291; WAN024GM8_at; Start 41; Stop 65
tggcagctctttttttaggatataa

SEQ ID NO: 251076 - DNA, 25 bp, Artificial
  probe
  misc_feature (1)..(25): SEQ ID NO: 4291; WAN024GM8_at; Start 28; Stop 52
tttgttcgtcaaatggcagctcttt

SEQ ID NO: 251077 - DNA, 25 bp, Artificial
  probe
  misc_feature (1)..(25): SEQ ID NO: 4291; WAN024GM8_at; Start 34; Stop 58
cgtcaaatggcagctctttttttag

SEQ ID NO: 251078 - DNA, 25 bp, Artificial
  probe
  misc_feature (1)..(25): SEQ ID NO: 4291; WAN024GM8_at; Start 13; Stop 37
gaaattacatcactttttgttcgtc

SEQ ID NO: 251079 - DNA, 25 bp, Artificial
  probe
  misc_feature (1)..(25): SEQ ID NO: 4291; WAN024GM8_at; Start 8; Stop 32
tttcagaaattacatcactttttgt

SEQ ID NO: 251080 - DNA, 25 bp, Artificial
  probe
  misc_feature (1)..(25): SEQ ID NO: 4291; WAN024GM8_at; Start 39; Stop 63
aatggcagctctttttttaggatat

SEQ ID NO: 251081 - DNA, 25 bp, Artificial
  probe
  misc_feature (1)..(25): SEQ ID NO: 4291; WAN024GM8_at; Start 27; Stop 51
ttttgttcgtcaaatggcagctctt

SEQ ID NO: 251082 - DNA, 25 bp, Artificial
  probe
  misc_feature (1)..(25): SEQ ID NO: 4291; WAN024GM8_at; Start 16; Stop 40
attacatcactttttgttcgtcaaa

SEQ ID NO: 251083 - DNA, 25 bp, Artificial
  probe
  misc_feature (1)..(25): SEQ ID NO: 4291; WAN024GM8_at; Start 22; Stop 46
tcactttttgttcgtcaaatggcag

SEQ ID NO: 251084 - DNA, 25 bp, Artificial
  probe
  misc_feature (1)..(25): SEQ ID NO: 4291; WAN024GM8_at; Start 31; Stop 55
gttcgtcaaatggcagctctttttt

SEQ ID NO: 251085 - DNA, 25 bp, Artificial
  probe
  misc_feature (1)..(25): SEQ ID NO: 4291; WAN024GM8_at; Start 26; Stop 50
tttttgttcgtcaaatggcagctct

SEQ ID NO: 251086 - DNA, 25 bp, Artificial
  probe
  misc_feature (1)..(25): SEQ ID NO: 4291; WAN024GM8_at; Start 38; Stop 62
aaatggcagctctttttttaggata

SEQ ID NO: 251087 - DNA, 25 bp, Artificial
  probe
  misc_feature (1)..(25): SEQ ID NO: 4291; WAN024GM8_at; Start 21; Stop 45
atcactttttgttcgtcaaatggca

SEQ ID NO: 251088 - DNA, 25 bp, Artificial
  probe
  misc_feature (1)..(25): SEQ ID NO: 4291; WAN024GM8_at; Start 20; Stop 44
catcactttttgttcgtcaaatggc

SEQ ID NO: 251089 - DNA, 25 bp, Artificial
  probe
  misc_feature (1)..(25): SEQ ID NO: 4291; WAN024GM8_at; Start 24; Stop 48
actttttgttcgtcaaatggcagct

SEQ ID NO: 251090 - DNA, 25 bp, Artificial
  probe
  misc_feature (1)..(25): SEQ ID NO: 4291; WAN024GM8_at; Start 25; Stop 49
ctttttgttcgtcaaatggcagctc

SEQ ID NO: 251091 - DNA, 25 bp, Artificial
  probe
  misc_feature (1)..(25): SEQ ID NO: 4291; WAN024GM8_at; Start 37; Stop 61
caaatggcagctctttttttaggat

SEQ ID NO: 251092 - DNA, 25 bp, Artificial
  probe
  misc_feature (1)..(25): SEQ ID NO: 4163; WAN024GM9_at; Start 23; Stop 47
ttaaagagagctaccatagactgaa

SEQ ID NO: 251093 - DNA, 25 bp, Artificial
  probe
  misc_feature (1)..(25): SEQ ID NO: 4163; WAN024GM9_at; Start 21; Stop 45
ttttaaagagagctaccatagactg

SEQ ID NO: 251094 - DNA, 25 bp, Artificial
  probe
  misc_feature (1)..(25): SEQ ID NO: 4163; WAN024GM9_at; Start 57; Stop 81
tataatggaagatagaagaaagaca

SEQ ID NO: 251095 - DNA, 25 bp, Artificial
  probe
  misc_feature (1)..(25): SEQ ID NO: 4163; WAN024GM9_at; Start 34; Stop 58
taccatagactgaaaaagtatgata

SEQ ID NO: 251096 - DNA, 25 bp, Artificial
  probe
  misc_feature (1)..(25): SEQ ID NO: 4163; WAN024GM9_at; Start 29; Stop 53
agagctaccatagactgaaaaagta

SEQ ID NO: 251097 - DNA, 25 bp, Artificial
  probe
  misc_feature (1)..(25): SEQ ID NO: 4163; WAN024GM9_at; Start 26; Stop 50
aagagagctaccatagactgaaaaa

SEQ ID NO: 251098 - DNA, 25 bp, Artificial
  probe
  misc_feature (1)..(25): SEQ ID NO: 4163; WAN024GM9_at; Start 30; Stop 54
gagctaccatagactgaaaaagtat

SEQ ID NO: 251099 - DNA, 25 bp, Artificial
  probe
  misc_feature (1)..(25): SEQ ID NO: 4163; WAN024GM9_at; Start 14; Stop 38
cggagccttttaaagagagctacca

SEQ ID NO: 251100 - DNA, 25 bp, Artificial
  probe
  misc_feature (1)..(25): SEQ ID NO: 4163; WAN024GM9_at; Start 18; Stop 42
gccttttaaagagagctaccataga

SEQ ID NO: 251101 - DNA, 25 bp, Artificial
  probe
  misc_feature (1)..(25): SEQ ID NO: 4163; WAN024GM9_at; Start 22; Stop 46
tttaaagagagctaccatagactga

SEQ ID NO: 251102 - DNA, 25 bp, Artificial
  probe
  misc_feature (1)..(25): SEQ ID NO: 4163; WAN024GM9_at; Start 36; Stop 60
ccatagactgaaaaagtatgatata

SEQ ID NO: 251103 - DNA, 25 bp, Artificial
  probe
  misc_feature (1)..(25): SEQ ID NO: 4163; WAN024GM9_at; Start 19; Stop 43
ccttttaaagagagctaccatagac

SEQ ID NO: 251104 - DNA, 25 bp, Artificial
  probe
  misc_feature (1)..(25): SEQ ID NO: 4163; WAN024GM9_at; Start 39; Stop 63
tagactgaaaaagtatgatataatg

SEQ ID NO: 251105 - DNA, 25 bp, Artificial
  probe
  misc_feature (1)..(25): SEQ ID NO: 4163; WAN024GM9_at; Start 8; Stop 32
cagtatcggagccttttaaagagag

SEQ ID NO: 251106 - DNA, 25 bp, Artificial
  probe
  misc_feature (1)..(25): SEQ ID NO: 4163; WAN024GM9_at; Start 60; Stop 84
aatggaagatagaagaaagacaaac

SEQ ID NO: 251107 - DNA, 25 bp, Artificial
  probe
  misc_feature (1)..(25): SEQ ID NO: 4163; WAN024GM9_at; Start 16; Stop 40
gagccttttaaagagagctaccata

SEQ ID NO: 251108 - DNA, 25 bp, Artificial
  probe
  misc_feature (1)..(25): SEQ ID NO: 4163; WAN024GM9_at; Start 28; Stop 52
gagagctaccatagactgaaaaagt

SEQ ID NO: 251109 - DNA, 25 bp, Artificial
  probe
  misc_feature (1)..(25): SEQ ID NO: 4163; WAN024GM9_at; Start 25; Stop 49
aaagagagctaccatagactgaaaa

SEQ ID NO: 251110 - DNA, 25 bp, Artificial
  probe
  misc_feature (1)..(25): SEQ ID NO: 4163; WAN024GM9_at; Start 44; Stop 68
tgaaaaagtatgatataatggaaga

SEQ ID NO: 251111 - DNA, 25 bp, Artificial
  probe
  misc_feature (1)..(25): SEQ ID NO: 4163; WAN024GM9_at; Start 15; Stop 39
ggagccttttaaagagagctaccat

SEQ ID NO: 251112 - DNA, 25 bp, Artificial
  probe
  misc_feature (1)..(25): SEQ ID NO: 4163; WAN024GM9_at; Start 10; Stop 34
gtatcggagccttttaaagagagct

SEQ ID NO: 251113 - DNA, 25 bp, Artificial
  probe
  misc_feature (1)..(25): SEQ ID NO: 4163; WAN024GM9_at; Start 9; Stop 33
agtatcggagccttttaaagagagc

SEQ ID NO: 251114 - DNA, 25 bp, Artificial
  probe
  misc_feature (1)..(25): SEQ ID NO: 4163; WAN024GM9_at; Start 11; Stop 35
tatcggagccttttaaagagagcta

SEQ ID NO: 251115 - DNA, 25 bp, Artificial
  probe
  misc_feature (1)..(25): SEQ ID NO: 4163; WAN024GM9_at; Start 62; Stop 86
tggaagatagaagaaagacaaacta

SEQ ID NO: 251116 - DNA, 25 bp, Artificial
  probe
  misc_feature (1)..(25): SEQ ID NO: 4163; WAN024GM9_at; Start 32; Stop 56
gctaccatagactgaaaaagtatga

SEQ ID NO: 251117 - DNA, 25 bp, Artificial
  probe
  misc_feature (1)..(25): SEQ ID NO: 4163; WAN024GM9_at; Start 13; Stop 37
tcggagccttttaaagagagctacc

SEQ ID NO: 251118 - DNA, 25 bp, Artificial
  probe
  misc_feature (1)..(25): SEQ ID NO: 4163; WAN024GM9_at; Start 12; Stop 36
atcggagccttttaaagagagctac

SEQ ID NO: 251119 - DNA, 25 bp, Artificial
  probe
  misc_feature (1)..(25): SEQ ID NO: 4163; WAN024GM9_at; Start 20; Stop 44
cttttaaagagagctaccatagact

SEQ ID NO: 251120 - DNA, 25 bp, Artificial
  probe
  misc_feature (1)..(25): SEQ ID NO: 4163; WAN024GM9_at; Start 24; Stop 48
taaagagagctaccatagactgaaa

SEQ ID NO: 251121 - DNA, 25 bp, Artificial
  probe
  misc_feature (1)..(25): SEQ ID NO: 4163; WAN024GM9_at; Start 63; Stop 87
ggaagatagaagaaagacaaactat

SEQ ID NO: 251122 - DNA, 25 bp, Artificial
  probe
  misc_feature (1)..(25): SEQ ID NO: 4163; WAN024GM9_at; Start 33; Stop 57
ctaccatagactgaaaaagtatgat

SEQ ID NO: 251123 - DNA, 25 bp, Artificial
  probe
  misc_feature (1)..(25): SEQ ID NO: 4163; WAN024GM9_at; Start 6; Stop 30
ggcagtatcggagccttttaaagag

SEQ ID NO: 251124 - DNA, 25 bp, Artificial
  probe
  misc_feature (1)..(25): SEQ ID NO: 4163; WAN024GM9_at; Start 27; Stop 51
agagagctaccatagactgaaaaag

SEQ ID NO: 251125 - DNA, 25 bp, Artificial
  probe
  misc_feature (1)..(25): SEQ ID NO: 4163; WAN024GM9_at; Start 17; Stop 41
agccttttaaagagagctaccatag

SEQ ID NO: 251126 - DNA, 25 bp, Artificial
  probe
  misc_feature (1)..(25): SEQ ID NO: 1269; WAN024GMA_at; Start 112; Stop 136
cgttggagaacgatggaaactgttt

SEQ ID NO: 251127 - DNA, 25 bp, Artificial
  probe
  misc_feature (1)..(25): SEQ ID NO: 1269; WAN024GMA_at; Start 98; Stop 122
taaaaagaatggcacgttggagaac

SEQ ID NO: 251128 - DNA, 25 bp, Artificial
  probe
  misc_feature (1)..(25): SEQ ID NO: 1269; WAN024GMA_at; Start 192; Stop 216
cccgtcctgtggatcaaagagacgt

SEQ ID NO: 251129 - DNA, 25 bp, Artificial
  probe
  misc_feature (1)..(25): SEQ ID NO: 1269; WAN024GMA_at; Start 43; Stop 67
tcaaatagagtagcattccccttcc

SEQ ID NO: 251130 - DNA, 25 bp, Artificial
  probe
  misc_feature (1)..(25): SEQ ID NO: 1269; WAN024GMA_at; Start 95; Stop 119
cactaaaaagaatggcacgttggag

SEQ ID NO: 251131 - DNA, 25 bp, Artificial
  probe
  misc_feature (1)..(25): SEQ ID NO: 1269; WAN024GMA_at; Start 189; Stop 213
ggccccgtcctgtggatcaaagaga

SEQ ID NO: 251132 - DNA, 25 bp, Artificial
  probe
  misc_feature (1)..(25): SEQ ID NO: 1269; WAN024GMA_at; Start 107; Stop 131
tggcacgttggagaacgatggaaac

SEQ ID NO: 251133 - DNA, 25 bp, Artificial
  probe
  misc_feature (1)..(25): SEQ ID NO: 1269; WAN024GMA_at; Start 27; Stop 51
ggctgcgcgctccatttcaaataga

SEQ ID NO: 251134 - DNA, 25 bp, Artificial
  probe
  misc_feature (1)..(25): SEQ ID NO: 1269; WAN024GMA_at; Start 18; Stop 42
ggcaatattggctgcgcgctccatt

SEQ ID NO: 251135 - DNA, 25 bp, Artificial
  probe
  misc_feature (1)..(25): SEQ ID NO: 1269; WAN024GMA_at; Start 3; Stop 27
gaattcactagcctgggcaatattg

SEQ ID NO: 251136 - DNA, 25 bp, Artificial
  probe
  misc_feature (1)..(25): SEQ ID NO: 1269; WAN024GMA_at; Start 169; Stop 193
tccttgccaccgattttaatggccc

SEQ ID NO: 251137 - DNA, 25 bp, Artificial
  probe
  misc_feature (1)..(25): SEQ ID NO: 1269; WAN024GMA_at; Start 157; Stop 181
acttctcgaatatccttgccaccga

SEQ ID NO: 251138 - DNA, 25 bp, Artificial
  probe
  misc_feature (1)..(25): SEQ ID NO: 1269; WAN024GMA_at; Start 64; Stop 88
ttcccctgtctcaagttatctgcaa

SEQ ID NO: 251139 - DNA, 25 bp, Artificial
  probe
  misc_feature (1)..(25): SEQ ID NO: 1269; WAN024GMA_at; Start 203; Stop 227
gatcaaagagacgtggaatcaattg

SEQ ID NO: 251140 - DNA, 25 bp, Artificial
  probe
  misc_feature (1)..(25): SEQ ID NO: 1269; WAN024GMA_at; Start 31; Stop 55
gcgcgctccatttcaaatagagtag

SEQ ID NO: 251141 - DNA, 25 bp, Artificial
  probe
  misc_feature (1)..(25): SEQ ID NO: 1269; WAN024GMA_at; Start 133; Stop 157
gttttacgcagggttccttcactca

SEQ ID NO: 251142 - DNA, 25 bp, Artificial
  probe
  misc_feature (1)..(25): SEQ ID NO: 1269; WAN024GMA_at; Start 86; Stop 110
caatcgttccactaaaaagaatggc

SEQ ID NO: 251143 - DNA, 25 bp, Artificial
  probe
  misc_feature (1)..(25): SEQ ID NO: 1269; WAN024GMA_at; Start 39; Stop 63
catttcaaatagagtagcattcccc

SEQ ID NO: 251144 - DNA, 25 bp, Artificial
  probe
  misc_feature (1)..(25): SEQ ID NO: 1269; WAN024GMA_at; Start 48; Stop 72
tagagtagcattccccttcccctgt

SEQ ID NO: 251145 - DNA, 25 bp, Artificial
  probe
  misc_feature (1)..(25): SEQ ID NO: 1269; WAN024GMA_at; Start 11; Stop 35
tagcctgggcaatattggctgcgcg

SEQ ID NO: 251146 - DNA, 25 bp, Artificial
  probe
  misc_feature (1)..(25): SEQ ID NO: 1269; WAN024GMA_at; Start 75; Stop 99
caagttatctgcaatcgttccacta

SEQ ID NO: 251147 - DNA, 25 bp, Artificial
  probe
  misc_feature (1)..(25): SEQ ID NO: 1269; WAN024GMA_at; Start 80; Stop 104
tatctgcaatcgttccactaaaaag

SEQ ID NO: 251148 - DNA, 25 bp, Artificial
  probe
  misc_feature (1)..(25): SEQ ID NO: 1269; WAN024GMA_at; Start 176; Stop 200
caccgattttaatggccccgtcctg

SEQ ID NO: 251149 - DNA, 25 bp, Artificial
  probe
  misc_feature (1)..(25): SEQ ID NO: 1269; WAN024GMA_at; Start 164; Stop 188
gaatatccttgccaccgattttaat

SEQ ID NO: 251150 - DNA, 25 bp, Artificial
  probe
  misc_feature (1)..(25): SEQ ID NO: 1269; WAN024GMA_at; Start 185; Stop 209
taatggccccgtcctgtggatcaaa

SEQ ID NO: 251151 - DNA, 25 bp, Artificial
  probe
  misc_feature (1)..(25): SEQ ID NO: 1269; WAN024GMA_at; Start 70; Stop 94
tgtctcaagttatctgcaatcgttc

SEQ ID NO: 251152 - DNA, 25 bp, Artificial
  probe
  misc_feature (1)..(25): SEQ ID NO: 1269; WAN024GMA_at; Start 197; Stop 221
cctgtggatcaaagagacgtggaat

SEQ ID NO: 251153 - DNA, 25 bp, Artificial
  probe
  misc_feature (1)..(25): SEQ ID NO: 1269; WAN024GMA_at; Start 14; Stop 38
cctgggcaatattggctgcgcgctc

SEQ ID NO: 251154 - DNA, 25 bp, Artificial
  probe
  misc_feature (1)..(25): SEQ ID NO: 1269; WAN024GMA_at; Start 102; Stop 126
aagaatggcacgttggagaacgatg

SEQ ID NO: 251155 - DNA, 25 bp, Artificial
  probe
  misc_feature (1)..(25): SEQ ID NO: 1269; WAN024GMA_at; Start 89; Stop 113
tcgttccactaaaaagaatggcacg

SEQ ID NO: 251156 - DNA, 25 bp, Artificial
  probe
  misc_feature (1)..(25): SEQ ID NO: 1269; WAN024GMA_at; Start 143; Stop 167
gggttccttcactcacttctcgaat

SEQ ID NO: 251157 - DNA, 25 bp, Artificial
  probe
  misc_feature (1)..(25): SEQ ID NO: 1269; WAN024GMA_at; Start 140; Stop 164
gcagggttccttcactcacttctcg

SEQ ID NO: 251158 - DNA, 25 bp, Artificial
  probe
  misc_feature (1)..(25): SEQ ID NO: 1269; WAN024GMA_at; Start 122; Stop 146
cgatggaaactgttttacgcagggt

SEQ ID NO: 251159 - DNA, 25 bp, Artificial
  probe
  misc_feature (1)..(25): SEQ ID NO: 1269; WAN024GMA_at; Start 119; Stop 143
gaacgatggaaactgttttacgcag

SEQ ID NO: 251160 - DNA, 25 bp, Artificial
  probe
  misc_feature (1)..(25): SEQ ID NO: 5038; WAN024GMB_at; Start 166; Stop 190
catggaaatcatggcacggctgaca

SEQ ID NO: 251161 - DNA, 25 bp, Artificial
  probe
  misc_feature (1)..(25): SEQ ID NO: 5038; WAN024GMB_at; Start 6; Stop 30
caggttcaatagtaaagctcacatc

SEQ ID NO: 251162 - DNA, 25 bp, Artificial
  probe
  misc_feature (1)..(25): SEQ ID NO: 5038; WAN024GMB_at; Start 33; Stop 57
tcagcatcggttccttgtccattgg

SEQ ID NO: 251163 - DNA, 25 bp, Artificial
  probe
  misc_feature (1)..(25): SEQ ID NO: 5038; WAN024GMB_at; Start 37; Stop 61
catcggttccttgtccattggatag

SEQ ID NO: 251164 - DNA, 25 bp, Artificial
  probe
  misc_feature (1)..(25): SEQ ID NO: 5038; WAN024GMB_at; Start 87; Stop 111
gacttccaaccaactcttcatctgg

SEQ ID NO: 251165 - DNA, 25 bp, Artificial
  probe
  misc_feature (1)..(25): SEQ ID NO: 5038; WAN024GMB_at; Start 159; Stop 183
tacgacgcatggaaatcatggcacg

SEQ ID NO: 251166 - DNA, 25 bp, Artificial
  probe
  misc_feature (1)..(25): SEQ ID NO: 5038; WAN024GMB_at; Start 175; Stop 199
catggcacggctgacagaatttccc

SEQ ID NO: 251167 - DNA, 25 bp, Artificial
  probe
  misc_feature (1)..(25): SEQ ID NO: 5038; WAN024GMB_at; Start 216; Stop 240
caatggtaaagataatctggcttag

SEQ ID NO: 251168 - DNA, 25 bp, Artificial
  probe
  misc_feature (1)..(25): SEQ ID NO: 5038; WAN024GMB_at; Start 147; Stop 171
gaatttctcgaatacgacgcatgga

SEQ ID NO: 251169 - DNA, 25 bp, Artificial
  probe
  misc_feature (1)..(25): SEQ ID NO: 5038; WAN024GMB_at; Start 156; Stop 180
gaatacgacgcatggaaatcatggc

SEQ ID NO: 251170 - DNA, 25 bp, Artificial
  probe
  misc_feature (1)..(25): SEQ ID NO: 5038; WAN024GMB_at; Start 152; Stop 176
tctcgaatacgacgcatggaaatca

SEQ ID NO: 251171 - DNA, 25 bp, Artificial
  probe
  misc_feature (1)..(25): SEQ ID NO: 5038; WAN024GMB_at; Start 131; Stop 155
gctggctctgcgtcaagaatttctc

SEQ ID NO: 251172 - DNA, 25 bp, Artificial
  probe
  misc_feature (1)..(25): SEQ ID NO: 5038; WAN024GMB_at; Start 48; Stop 72
tgtccattggataggtaaaggtcac

SEQ ID NO: 251173 - DNA, 25 bp, Artificial
  probe
  misc_feature (1)..(25): SEQ ID NO: 5038; WAN024GMB_at; Start 77; Stop 101
tcaaagctaagacttccaaccaact

SEQ ID NO: 251174 - DNA, 25 bp, Artificial
  probe
  misc_feature (1)..(25): SEQ ID NO: 5038; WAN024GMB_at; Start 143; Stop 167
tcaagaatttctcgaatacgacgca

SEQ ID NO: 251175 - DNA, 25 bp, Artificial
  probe
  misc_feature (1)..(25): SEQ ID NO: 5038; WAN024GMB_at; Start 114; Stop 138
tatccttgaaggtcatagctggctc

SEQ ID NO: 251176 - DNA, 25 bp, Artificial
  probe
  misc_feature (1)..(25): SEQ ID NO: 5038; WAN024GMB_at; Start 169; Stop 193
ggaaatcatggcacggctgacagaa

SEQ ID NO: 251177 - DNA, 25 bp, Artificial
  probe
  misc_feature (1)..(25): SEQ ID NO: 5038; WAN024GMB_at; Start 126; Stop 150
tcatagctggctctgcgtcaagaat

SEQ ID NO: 251178 - DNA, 25 bp, Artificial
  probe
  misc_feature (1)..(25): SEQ ID NO: 5038; WAN024GMB_at; Start 96; Stop 120
ccaactcttcatctgggatatcctt

SEQ ID NO: 251179 - DNA, 25 bp, Artificial
  probe
  misc_feature (1)..(25): SEQ ID NO: 5038; WAN024GMB_at; Start 196; Stop 220
tcccaaaaatccaaccataacaatg

SEQ ID NO: 251180 - DNA, 25 bp, Artificial
  probe
  misc_feature (1)..(25): SEQ ID NO: 5038; WAN024GMB_at; Start 117; Stop 141
ccttgaaggtcatagctggctctgc

SEQ ID NO: 251181 - DNA, 25 bp, Artificial
  probe
  misc_feature (1)..(25): SEQ ID NO: 5038; WAN024GMB_at; Start 18; Stop 42
taaagctcacatctttcagcatcgg

SEQ ID NO: 251182 - DNA, 25 bp, Artificial
  probe
  misc_feature (1)..(25): SEQ ID NO: 5038; WAN024GMB_at; Start 134; Stop 158
ggctctgcgtcaagaatttctcgaa

SEQ ID NO: 251183 - DNA, 25 bp, Artificial
  probe
  misc_feature (1)..(25): SEQ ID NO: 5038; WAN024GMB_at; Start 178; Stop 202
ggcacggctgacagaatttcccaaa

SEQ ID NO: 251184 - DNA, 25 bp, Artificial
  probe
  misc_feature (1)..(25): SEQ ID NO: 5038; WAN024GMB_at; Start 51; Stop 75
ccattggataggtaaaggtcacatt

SEQ ID NO: 251185 - DNA, 25 bp, Artificial
  probe
  misc_feature (1)..(25): SEQ ID NO: 5038; WAN024GMB_at; Start 70; Stop 94
cacattttcaaagctaagacttcca

SEQ ID NO: 251186 - DNA, 25 bp, Artificial
  probe
  misc_feature (1)..(25): SEQ ID NO: 5038; WAN024GMB_at; Start 59; Stop 83
taggtaaaggtcacattttcaaagc

SEQ ID NO: 251187 - DNA, 25 bp, Artificial
  probe
  misc_feature (1)..(25): SEQ ID NO: 5038; WAN024GMB_at; Start 63; Stop 87
taaaggtcacattttcaaagctaag

SEQ ID NO: 251188 - DNA, 25 bp, Artificial
  probe
  misc_feature (1)..(25): SEQ ID NO: 5038; WAN024GMB_at; Start 3; Stop 27
gaccaggttcaatagtaaagctcac

SEQ ID NO: 251189 - DNA, 25 bp, Artificial
  probe
  misc_feature (1)..(25): SEQ ID NO: 5038; WAN024GMB_at; Start 183; Stop 207
ggctgacagaatttcccaaaaatcc

SEQ ID NO: 251190 - DNA, 25 bp, Artificial
  probe
  misc_feature (1)..(25): SEQ ID NO: 5038; WAN024GMB_at; Start 121; Stop 145
gaaggtcatagctggctctgcgtca

SEQ ID NO: 251191 - DNA, 25 bp, Artificial
  probe
  misc_feature (1)..(25): SEQ ID NO: 5038; WAN024GMB_at; Start 211; Stop 235
cataacaatggtaaagataatctgg

SEQ ID NO: 251192 - DNA, 25 bp, Artificial
  probe
  misc_feature (1)..(25): SEQ ID NO: 5038; WAN024GMB_at; Start 91; Stop 115
tccaaccaactcttcatctgggata

SEQ ID NO: 251193 - DNA, 25 bp, Artificial
  probe
  misc_feature (1)..(25): SEQ ID NO: 5038; WAN024GMB_at; Start 25; Stop 49
cacatctttcagcatcggttccttg

SEQ ID NO: 251194 - DNA, 25 bp, Artificial
  probe
  misc_feature (1)..(25): SEQ ID NO: 2536; WAN024GMC_at; Start 46; Stop 70
tggacatttcgtggcagaataatct

SEQ ID NO: 251195 - DNA, 25 bp, Artificial
  probe
  misc_feature (1)..(25): SEQ ID NO: 2536; WAN024GMC_at; Start 2; Stop 26
tgggaatggcaccacatagaaccaa

SEQ ID NO: 251196 - DNA, 25 bp, Artificial
  probe
  misc_feature (1)..(25): SEQ ID NO: 2536; WAN024GMC_at; Start 50; Stop 74
catttcgtggcagaataatcttatc

SEQ ID NO: 251197 - DNA, 25 bp, Artificial
  probe
  misc_feature (1)..(25): SEQ ID NO: 2536; WAN024GMC_at; Start 107; Stop 131
gcaccgatgaagttgttccaccaat

SEQ ID NO: 251198 - DNA, 25 bp, Artificial
  probe
  misc_feature (1)..(25): SEQ ID NO: 2536; WAN024GMC_at; Start 62; Stop 86
gaataatcttatctcctgccttgca

SEQ ID NO: 251199 - DNA, 25 bp, Artificial
  probe
  misc_feature (1)..(25): SEQ ID NO: 2536; WAN024GMC_at; Start 259; Stop 283
tctcctaagagttcgacaagttctg

SEQ ID NO: 251200 - DNA, 25 bp, Artificial
  probe
  misc_feature (1)..(25): SEQ ID NO: 2536; WAN024GMC_at; Start 188; Stop 212
gaataatcgaaataggatggcctaa

SEQ ID NO: 251201 - DNA, 25 bp, Artificial
  probe
  misc_feature (1)..(25): SEQ ID NO: 2536; WAN024GMC_at; Start 173; Stop 197
gctcctctgcatcacgaataatcga

SEQ ID NO: 251202 - DNA, 25 bp, Artificial
  probe
  misc_feature (1)..(25): SEQ ID NO: 2536; WAN024GMC_at; Start 137; Stop 161
gaaaggcatggctagctccaaaagc

SEQ ID NO: 251203 - DNA, 25 bp, Artificial
  probe
  misc_feature (1)..(25): SEQ ID NO: 2536; WAN024GMC_at; Start 156; Stop 180
aaaagcatctgcagccagctcctct

SEQ ID NO: 251204 - DNA, 25 bp, Artificial
  probe
  misc_feature (1)..(25): SEQ ID NO: 2536; WAN024GMC_at; Start 282; Stop 306
tggatttccccgtccacgcttgtga

SEQ ID NO: 251205 - DNA, 25 bp, Artificial
  probe
  misc_feature (1)..(25): SEQ ID NO: 2536; WAN024GMC_at; Start 9; Stop 33
ggcaccacatagaaccaacgcattg

SEQ ID NO: 251206 - DNA, 25 bp, Artificial
  probe
  misc_feature (1)..(25): SEQ ID NO: 2536; WAN024GMC_at; Start 223; Stop 247
ggtttcatcgaattgacatcaatgc

SEQ ID NO: 251207 - DNA, 25 bp, Artificial
  probe
  misc_feature (1)..(25): SEQ ID NO: 2536; WAN024GMC_at; Start 123; Stop 147
tccaccaatcattagaaaggcatgg

SEQ ID NO: 251208 - DNA, 25 bp, Artificial
  probe
  misc_feature (1)..(25): SEQ ID NO: 2536; WAN024GMC_at; Start 185; Stop 209
cacgaataatcgaaataggatggcc

SEQ ID NO: 251209 - DNA, 25 bp, Artificial
  probe
  misc_feature (1)..(25): SEQ ID NO: 2536; WAN024GMC_at; Start 145; Stop 169
tggctagctccaaaagcatctgcag

SEQ ID NO: 251210 - DNA, 25 bp, Artificial
  probe
  misc_feature (1)..(25): SEQ ID NO: 2536; WAN024GMC_at; Start 18; Stop 42
tagaaccaacgcattgatagcagat

SEQ ID NO: 251211 - DNA, 25 bp, Artificial
  probe
  misc_feature (1)..(25): SEQ ID NO: 2536; WAN024GMC_at; Start 230; Stop 254
tcgaattgacatcaatgcctacaca

SEQ ID NO: 251212 - DNA, 25 bp, Artificial
  probe
  misc_feature (1)..(25): SEQ ID NO: 2536; WAN024GMC_at; Start 71; Stop 95
tatctcctgccttgcaggttgccag

SEQ ID NO: 251213 - DNA, 25 bp, Artificial
  probe
  misc_feature (1)..(25): SEQ ID NO: 2536; WAN024GMC_at; Start 101; Stop 125
tagtctgcaccgatgaagttgttcc

SEQ ID NO: 251214 - DNA, 25 bp, Artificial
  probe
  misc_feature (1)..(25): SEQ ID NO: 2536; WAN024GMC_at; Start 273; Stop 297
gacaagttctggatttccccgtcca

SEQ ID NO: 251215 - DNA, 25 bp, Artificial
  probe
  misc_feature (1)..(25): SEQ ID NO: 2536; WAN024GMC_at; Start 91; Stop 115
gccagaatcatagtctgcaccgatg

SEQ ID NO: 251216 - DNA, 25 bp, Artificial
  probe
  misc_feature (1)..(25): SEQ ID NO: 2536; WAN024GMC_at; Start 142; Stop 166
gcatggctagctccaaaagcatctg

SEQ ID NO: 251217 - DNA, 25 bp, Artificial
  probe
  misc_feature (1)..(25): SEQ ID NO: 2536; WAN024GMC_at; Start 168; Stop 192
agccagctcctctgcatcacgaata

SEQ ID NO: 251218 - DNA, 25 bp, Artificial
  probe
  misc_feature (1)..(25): SEQ ID NO: 2536; WAN024GMC_at; Start 115; Stop 139
gaagttgttccaccaatcattagaa

SEQ ID NO: 251219 - DNA, 25 bp, Artificial
  probe
  misc_feature (1)..(25): SEQ ID NO: 2536; WAN024GMC_at; Start 197; Stop 221
aaataggatggcctaaattatccaa

SEQ ID NO: 251220 - DNA, 25 bp, Artificial
  probe
  misc_feature (1)..(25): SEQ ID NO: 2536; WAN024GMC_at; Start 131; Stop 155
tcattagaaaggcatggctagctcc

SEQ ID NO: 251221 - DNA, 25 bp, Artificial
  probe
  misc_feature (1)..(25): SEQ ID NO: 2536; WAN024GMC_at; Start 27; Stop 51
cgcattgatagcagatttatggaca

SEQ ID NO: 251222 - DNA, 25 bp, Artificial
  probe
  misc_feature (1)..(25): SEQ ID NO: 2536; WAN024GMC_at; Start 267; Stop 291
gagttcgacaagttctggatttccc

SEQ ID NO: 251223 - DNA, 25 bp, Artificial
  probe
  misc_feature (1)..(25): SEQ ID NO: 2536; WAN024GMC_at; Start 38; Stop 62
cagatttatggacatttcgtggcag

SEQ ID NO: 251224 - DNA, 25 bp, Artificial
  probe
  misc_feature (1)..(25): SEQ ID NO: 2536; WAN024GMC_at; Start 149; Stop 173
tagctccaaaagcatctgcagccag

SEQ ID NO: 251225 - DNA, 25 bp, Artificial
  probe
  misc_feature (1)..(25): SEQ ID NO: 2536; WAN024GMC_at; Start 245; Stop 269
tgcctacacatttttctcctaagag

SEQ ID NO: 251226 - DNA, 25 bp, Artificial
  probe
  misc_feature (1)..(25): SEQ ID NO: 2536; WAN024GMC_at; Start 83; Stop 107
tgcaggttgccagaatcatagtctg

SEQ ID NO: 251227 - DNA, 25 bp, Artificial
  probe
  misc_feature (1)..(25): SEQ ID NO: 2536; WAN024GMC_at; Start 78; Stop 102
tgccttgcaggttgccagaatcata

SEQ ID NO: 251228 - DNA, 25 bp, Artificial
  probe
  misc_feature (1)..(25): SEQ ID NO: 5971; WAN024GMD_at; Start 33; Stop 57
gcatactttctccttaaaaaataga

SEQ ID NO: 251229 - DNA, 25 bp, Artificial
  probe
  misc_feature (1)..(25): SEQ ID NO: 5971; WAN024GMD_at; Start 22; Stop 46
tttctgaatcagcatactttctcct

SEQ ID NO: 251230 - DNA, 25 bp, Artificial
  probe
  misc_feature (1)..(25): SEQ ID NO: 5971; WAN024GMD_at; Start 26; Stop 50
tgaatcagcatactttctccttaaa

SEQ ID NO: 251231 - DNA, 25 bp, Artificial
  probe
  misc_feature (1)..(25): SEQ ID NO: 5971; WAN024GMD_at; Start 58; Stop 82
caaaagggagcgacaatgcgtcagc

SEQ ID NO: 251232 - DNA, 25 bp, Artificial
  probe
  misc_feature (1)..(25): SEQ ID NO: 5971; WAN024GMD_at; Start 60; Stop 84
aaagggagcgacaatgcgtcagctc

SEQ ID NO: 251233 - DNA, 25 bp, Artificial
  probe
  misc_feature (1)..(25): SEQ ID NO: 5971; WAN024GMD_at; Start 55; Stop 79
agacaaaagggagcgacaatgcgtc

SEQ ID NO: 251234 - DNA, 25 bp, Artificial
  probe
  misc_feature (1)..(25): SEQ ID NO: 5971; WAN024GMD_at; Start 66; Stop 90
agcgacaatgcgtcagctccttttc

SEQ ID NO: 251235 - DNA, 25 bp, Artificial
  probe
  misc_feature (1)..(25): SEQ ID NO: 5971; WAN024GMD_at; Start 74; Stop 98
tgcgtcagctccttttcattctgtt

SEQ ID NO: 251236 - DNA, 25 bp, Artificial
  probe
  misc_feature (1)..(25): SEQ ID NO: 5971; WAN024GMD_at; Start 65; Stop 89
gagcgacaatgcgtcagctcctttt

SEQ ID NO: 251237 - DNA, 25 bp, Artificial
  probe
  misc_feature (1)..(25): SEQ ID NO: 5971; WAN024GMD_at; Start 53; Stop 77
atagacaaaagggagcgacaatgcg

SEQ ID NO: 251238 - DNA, 25 bp, Artificial
  probe
  misc_feature (1)..(25): SEQ ID NO: 5971; WAN024GMD_at; Start 76; Stop 100
cgtcagctccttttcattctgtttg

SEQ ID NO: 251239 - DNA, 25 bp, Artificial
  probe
  misc_feature (1)..(25): SEQ ID NO: 5971; WAN024GMD_at; Start 51; Stop 75
aaatagacaaaagggagcgacaatg

SEQ ID NO: 251240 - DNA, 25 bp, Artificial
  probe
  misc_feature (1)..(25): SEQ ID NO: 5971; WAN024GMD_at; Start 61; Stop 85
aagggagcgacaatgcgtcagctcc

SEQ ID NO: 251241 - DNA, 25 bp, Artificial
  probe
  misc_feature (1)..(25): SEQ ID NO: 5971; WAN024GMD_at; Start 50; Stop 74
aaaatagacaaaagggagcgacaat

SEQ ID NO: 251242 - DNA, 25 bp, Artificial
  probe
  misc_feature (1)..(25): SEQ ID NO: 5971; WAN024GMD_at; Start 69; Stop 93
gacaatgcgtcagctccttttcatt

SEQ ID NO: 251243 - DNA, 25 bp, Artificial
  probe
  misc_feature (1)..(25): SEQ ID NO: 5971; WAN024GMD_at; Start 21; Stop 45
ttttctgaatcagcatactttctcc

SEQ ID NO: 251244 - DNA, 25 bp, Artificial
  probe
  misc_feature (1)..(25): SEQ ID NO: 5971; WAN024GMD_at; Start 11; Stop 35
taggtttttattttctgaatcagca

SEQ ID NO: 251245 - DNA, 25 bp, Artificial
  probe
  misc_feature (1)..(25): SEQ ID NO: 5971; WAN024GMD_at; Start 27; Stop 51
gaatcagcatactttctccttaaaa

SEQ ID NO: 251246 - DNA, 25 bp, Artificial
  probe
  misc_feature (1)..(25): SEQ ID NO: 5971; WAN024GMD_at; Start 67; Stop 91
gcgacaatgcgtcagctccttttca

SEQ ID NO: 251247 - DNA, 25 bp, Artificial
  probe
  misc_feature (1)..(25): SEQ ID NO: 5971; WAN024GMD_at; Start 71; Stop 95
caatgcgtcagctccttttcattct

SEQ ID NO: 251248 - DNA, 25 bp, Artificial
  probe
  misc_feature (1)..(25): SEQ ID NO: 5971; WAN024GMD_at; Start 59; Stop 83
aaaagggagcgacaatgcgtcagct

SEQ ID NO: 251249 - DNA, 25 bp, Artificial
  probe
  misc_feature (1)..(25): SEQ ID NO: 5971; WAN024GMD_at; Start 72; Stop 96
aatgcgtcagctccttttcattctg

SEQ ID NO: 251250 - DNA, 25 bp, Artificial
  probe
  misc_feature (1)..(25): SEQ ID NO: 5971; WAN024GMD_at; Start 31; Stop 55
cagcatactttctccttaaaaaata

SEQ ID NO: 251251 - DNA, 25 bp, Artificial
  probe
  misc_feature (1)..(25): SEQ ID NO: 5971; WAN024GMD_at; Start 30; Stop 54
tcagcatactttctccttaaaaaat

SEQ ID NO: 251252 - DNA, 25 bp, Artificial
  probe
  misc_feature (1)..(25): SEQ ID NO: 5971; WAN024GMD_at; Start 54; Stop 78
tagacaaaagggagcgacaatgcgt

SEQ ID NO: 251253 - DNA, 25 bp, Artificial
  probe
  misc_feature (1)..(25): SEQ ID NO: 5971; WAN024GMD_at; Start 24; Stop 48
tctgaatcagcatactttctcctta

SEQ ID NO: 251254 - DNA, 25 bp, Artificial
  probe
  misc_feature (1)..(25): SEQ ID NO: 5971; WAN024GMD_at; Start 78; Stop 102
tcagctccttttcattctgtttgtg

SEQ ID NO: 251255 - DNA, 25 bp, Artificial
  probe
  misc_feature (1)..(25): SEQ ID NO: 5971; WAN024GMD_at; Start 70; Stop 94
acaatgcgtcagctccttttcattc

SEQ ID NO: 251256 - DNA, 25 bp, Artificial
  probe
  misc_feature (1)..(25): SEQ ID NO: 5971; WAN024GMD_at; Start 68; Stop 92
cgacaatgcgtcagctccttttcat

SEQ ID NO: 251257 - DNA, 25 bp, Artificial
  probe
  misc_feature (1)..(25): SEQ ID NO: 5971; WAN024GMD_at; Start 10; Stop 34
gtaggtttttattttctgaatcagc

SEQ ID NO: 251258 - DNA, 25 bp, Artificial
  probe
  misc_feature (1)..(25): SEQ ID NO: 5971; WAN024GMD_at; Start 13; Stop 37
ggtttttattttctgaatcagcata

SEQ ID NO: 251259 - DNA, 25 bp, Artificial
  probe
  misc_feature (1)..(25): SEQ ID NO: 5971; WAN024GMD_at; Start 57; Stop 81
acaaaagggagcgacaatgcgtcag

SEQ ID NO: 251260 - DNA, 25 bp, Artificial
  probe
  misc_feature (1)..(25): SEQ ID NO: 5971; WAN024GMD_at; Start 62; Stop 86
agggagcgacaatgcgtcagctcct

SEQ ID NO: 251261 - DNA, 25 bp, Artificial
  probe
  misc_feature (1)..(25): SEQ ID NO: 5971; WAN024GMD_at; Start 63; Stop 87
gggagcgacaatgcgtcagctcctt

SEQ ID NO: 251262 - DNA, 25 bp, Artificial
  probe
  misc_feature (1)..(25): SEQ ID NO: 2126; WAN024GME_at; Start 481; Stop 505
tctatcgaaacaacatctcctgctc

SEQ ID NO: 251263 - DNA, 25 bp, Artificial
  probe
  misc_feature (1)..(25): SEQ ID NO: 2126; WAN024GME_at; Start 590; Stop 614
agttcaactcagtcatcacgacggt

SEQ ID NO: 251264 - DNA, 25 bp, Artificial
  probe
  misc_feature (1)..(25): SEQ ID NO: 2126; WAN024GME_at; Start 476; Stop 500
ctcgttctatcgaaacaacatctcc

SEQ ID NO: 251265 - DNA, 25 bp, Artificial
  probe
  misc_feature (1)..(25): SEQ ID NO: 2126; WAN024GME_at; Start 480; Stop 504
ttctatcgaaacaacatctcctgct

SEQ ID NO: 251266 - DNA, 25 bp, Artificial
  probe
  misc_feature (1)..(25): SEQ ID NO: 2126; WAN024GME_at; Start 504; Stop 528
tcgtgaattcgaaatcatcgaaatc

SEQ ID NO: 251267 - DNA, 25 bp, Artificial
  probe
  misc_feature (1)..(25): SEQ ID NO: 2126; WAN024GME_at; Start 494; Stop 518
catctcctgctcgtgaattcgaaat

SEQ ID NO: 251268 - DNA, 25 bp, Artificial
  probe
  misc_feature (1)..(25): SEQ ID NO: 2126; WAN024GME_at; Start 471; Stop 495
cgcacctcgttctatcgaaacaaca

SEQ ID NO: 251269 - DNA, 25 bp, Artificial
  probe
  misc_feature (1)..(25): SEQ ID NO: 2126; WAN024GME_at; Start 493; Stop 517
acatctcctgctcgtgaattcgaaa

SEQ ID NO: 251270 - DNA, 25 bp, Artificial
  probe
  misc_feature (1)..(25): SEQ ID NO: 2126; WAN024GME_at; Start 496; Stop 520
tctcctgctcgtgaattcgaaatca

SEQ ID NO: 251271 - DNA, 25 bp, Artificial
  probe
  misc_feature (1)..(25): SEQ ID NO: 2126; WAN024GME_at; Start 500; Stop 524
ctgctcgtgaattcgaaatcatcga

SEQ ID NO: 251272 - DNA, 25 bp, Artificial
  probe
  misc_feature (1)..(25): SEQ ID NO: 2126; WAN024GME_at; Start 593; Stop 617
tcaactcagtcatcacgacggttac

SEQ ID NO: 251273 - DNA, 25 bp, Artificial
  probe
  misc_feature (1)..(25): SEQ ID NO: 2126; WAN024GME_at; Start 472; Stop 496
gcacctcgttctatcgaaacaacat

SEQ ID NO: 251274 - DNA, 25 bp, Artificial
  probe
  misc_feature (1)..(25): SEQ ID NO: 2126; WAN024GME_at; Start 488; Stop 512
aaacaacatctcctgctcgtgaatt

SEQ ID NO: 251275 - DNA, 25 bp, Artificial
  probe
  misc_feature (1)..(25): SEQ ID NO: 2126; WAN024GME_at; Start 479; Stop 503
gttctatcgaaacaacatctcctgc

SEQ ID NO: 251276 - DNA, 25 bp, Artificial
  probe
  misc_feature (1)..(25): SEQ ID NO: 2126; WAN024GME_at; Start 511; Stop 535
ttcgaaatcatcgaaatcatcaaac

SEQ ID NO: 251277 - DNA, 25 bp, Artificial
  probe
  misc_feature (1)..(25): SEQ ID NO: 2126; WAN024GME_at; Start 485; Stop 509
tcgaaacaacatctcctgctcgtga

SEQ ID NO: 251278 - DNA, 25 bp, Artificial
  probe
  misc_feature (1)..(25): SEQ ID NO: 2126; WAN024GME_at; Start 594; Stop 618
caactcagtcatcacgacggttact

SEQ ID NO: 251279 - DNA, 25 bp, Artificial
  probe
  misc_feature (1)..(25): SEQ ID NO: 2126; WAN024GME_at; Start 508; Stop 532
gaattcgaaatcatcgaaatcatca

SEQ ID NO: 251280 - DNA, 25 bp, Artificial
  probe
  misc_feature (1)..(25): SEQ ID NO: 2126; WAN024GME_at; Start 492; Stop 516
aacatctcctgctcgtgaattcgaa

SEQ ID NO: 251281 - DNA, 25 bp, Artificial
  probe
  misc_feature (1)..(25): SEQ ID NO: 2126; WAN024GME_at; Start 597; Stop 621
ctcagtcatcacgacggttactggg

SEQ ID NO: 251282 - DNA, 25 bp, Artificial
  probe
  misc_feature (1)..(25): SEQ ID NO: 2126; WAN024GME_at; Start 499; Stop 523
cctgctcgtgaattcgaaatcatcg

SEQ ID NO: 251283 - DNA, 25 bp, Artificial
  probe
  misc_feature (1)..(25): SEQ ID NO: 2126; WAN024GME_at; Start 502; Stop 526
gctcgtgaattcgaaatcatcgaaa

SEQ ID NO: 251284 - DNA, 25 bp, Artificial
  probe
  misc_feature (1)..(25): SEQ ID NO: 2126; WAN024GME_at; Start 486; Stop 510
cgaaacaacatctcctgctcgtgaa

SEQ ID NO: 251285 - DNA, 25 bp, Artificial
  probe
  misc_feature (1)..(25): SEQ ID NO: 2126; WAN024GME_at; Start 589; Stop 613
gagttcaactcagtcatcacgacgg

SEQ ID NO: 251286 - DNA, 25 bp, Artificial
  probe
  misc_feature (1)..(25): SEQ ID NO: 2126; WAN024GME_at; Start 498; Stop 522
tcctgctcgtgaattcgaaatcatc

SEQ ID NO: 251287 - DNA, 25 bp, Artificial
  probe
  misc_feature (1)..(25): SEQ ID NO: 2126; WAN024GME_at; Start 591; Stop 615
gttcaactcagtcatcacgacggtt

SEQ ID NO: 251288 - DNA, 25 bp, Artificial
  probe
  misc_feature (1)..(25): SEQ ID NO: 2126; WAN024GME_at; Start 588; Stop 612
tgagttcaactcagtcatcacgacg

SEQ ID NO: 251289 - DNA, 25 bp, Artificial
  probe
  misc_feature (1)..(25): SEQ ID NO: 2126; WAN024GME_at; Start 595; Stop 619
aactcagtcatcacgacggttactg

SEQ ID NO: 251290 - DNA, 25 bp, Artificial
  probe
  misc_feature (1)..(25): SEQ ID NO: 2126; WAN024GME_at; Start 478; Stop 502
cgttctatcgaaacaacatctcctg

SEQ ID NO: 251291 - DNA, 25 bp, Artificial
  probe
  misc_feature (1)..(25): SEQ ID NO: 2126; WAN024GME_at; Start 487; Stop 511
gaaacaacatctcctgctcgtgaat

SEQ ID NO: 251292 - DNA, 25 bp, Artificial
  probe
  misc_feature (1)..(25): SEQ ID NO: 2126; WAN024GME_at; Start 483; Stop 507
tatcgaaacaacatctcctgctcgt

SEQ ID NO: 251293 - DNA, 25 bp, Artificial
  probe
  misc_feature (1)..(25): SEQ ID NO: 2126; WAN024GME_at; Start 490; Stop 514
acaacatctcctgctcgtgaattcg

SEQ ID NO: 251294 - DNA, 25 bp, Artificial
  probe
  misc_feature (1)..(25): SEQ ID NO: 2126; WAN024GME_at; Start 474; Stop 498
acctcgttctatcgaaacaacatct

SEQ ID NO: 251295 - DNA, 25 bp, Artificial
  probe
  misc_feature (1)..(25): SEQ ID NO: 2126; WAN024GME_at; Start 491; Stop 515
caacatctcctgctcgtgaattcga

SEQ ID NO: 251296 - DNA, 25 bp, Artificial
  probe
  misc_feature (1)..(25): SEQ ID NO: 5855; WAN024GMF_at; Start 10; Stop 34
ttggtaatgagtttgataacgcata

SEQ ID NO: 251297 - DNA, 25 bp, Artificial
  probe
  misc_feature (1)..(25): SEQ ID NO: 5855; WAN024GMF_at; Start 3; Stop 27
gtttcaattggtaatgagtttgata

SEQ ID NO: 251298 - DNA, 25 bp, Artificial
  probe
  misc_feature (1)..(25): SEQ ID NO: 5855; WAN024GMF_at; Start 7; Stop 31
caattggtaatgagtttgataacgc

SEQ ID NO: 251299 - DNA, 25 bp, Artificial
  probe
  misc_feature (1)..(25): SEQ ID NO: 5855; WAN024GMF_at; Start 1; Stop 25
ttgtttcaattggtaatgagtttga

SEQ ID NO: 251300 - DNA, 25 bp, Artificial
  probe
  misc_feature (1)..(25): SEQ ID NO: 5855; WAN024GMF_at; Start 2; Stop 26
tgtttcaattggtaatgagtttgat

SEQ ID NO: 251301 - DNA, 25 bp, Artificial
  probe
  misc_feature (1)..(25): SEQ ID NO: 5855; WAN024GMF_at; Start 9; Stop 33
attggtaatgagtttgataacgcat

SEQ ID NO: 251302 - DNA, 25 bp, Artificial
  probe
  misc_feature (1)..(25): SEQ ID NO: 5855; WAN024GMF_at; Start 4; Stop 28
tttcaattggtaatgagtttgataa

SEQ ID NO: 251303 - DNA, 25 bp, Artificial
  probe
  misc_feature (1)..(25): SEQ ID NO: 5855; WAN024GMF_at; Start 6; Stop 30
tcaattggtaatgagtttgataacg

SEQ ID NO: 251304 - DNA, 25 bp, Artificial
  probe
  misc_feature (1)..(25): SEQ ID NO: 5855; WAN024GMF_at; Start 49; Stop 73
tgtaatgaaaacatcaaacattaca

SEQ ID NO: 251305 - DNA, 25 bp, Artificial
  probe
  misc_feature (1)..(25): SEQ ID NO: 5855; WAN024GMF_at; Start 8; Stop 32
aattggtaatgagtttgataacgca

SEQ ID NO: 251306 - DNA, 25 bp, Artificial
  probe
  misc_feature (1)..(25): SEQ ID NO: 5855; WAN024GMF_at; Start 50; Stop 74
gtaatgaaaacatcaaacattacaa

SEQ ID NO: 251307 - DNA, 25 bp, Artificial
  probe
  misc_feature (1)..(25): SEQ ID NO: 5855; WAN024GMF_at; Start 5; Stop 29
ttcaattggtaatgagtttgataac

SEQ ID NO: 251308 - DNA, 25 bp, Artificial
  probe
  misc_feature (1)..(25): SEQ ID NO: 2127; WAN024GMG_at; Start 277; Stop 301
tcacttcgcaaaactaaaacggata

SEQ ID NO: 251309 - DNA, 25 bp, Artificial
  probe
  misc_feature (1)..(25): SEQ ID NO: 2127; WAN024GMG_at; Start 302; Stop 326
agaaagacgctcatggcatcgctct

SEQ ID NO: 251310 - DNA, 25 bp, Artificial
  probe
  misc_feature (1)..(25): SEQ ID NO: 2127; WAN024GMG_at; Start 296; Stop 320
cggataagaaagacgctcatggcat

SEQ ID NO: 251311 - DNA, 25 bp, Artificial
  probe
  misc_feature (1)..(25): SEQ ID NO: 2127; WAN024GMG_at; Start 271; Stop 295
tcattatcacttcgcaaaactaaaa

SEQ ID NO: 251312 - DNA, 25 bp, Artificial
  probe
  misc_feature (1)..(25): SEQ ID NO: 2127; WAN024GMG_at; Start 270; Stop 294
atcattatcacttcgcaaaactaaa

SEQ ID NO: 251313 - DNA, 25 bp, Artificial
  probe
  misc_feature (1)..(25): SEQ ID NO: 2127; WAN024GMG_at; Start 275; Stop 299
tatcacttcgcaaaactaaaacgga

SEQ ID NO: 251314 - DNA, 25 bp, Artificial
  probe
  misc_feature (1)..(25): SEQ ID NO: 2127; WAN024GMG_at; Start 273; Stop 297
attatcacttcgcaaaactaaaacg

SEQ ID NO: 251315 - DNA, 25 bp, Artificial
  probe
  misc_feature (1)..(25): SEQ ID NO: 2127; WAN024GMG_at; Start 294; Stop 318
aacggataagaaagacgctcatggc

SEQ ID NO: 251316 - DNA, 25 bp, Artificial
  probe
  misc_feature (1)..(25): SEQ ID NO: 2127; WAN024GMG_at; Start 293; Stop 317
aaacggataagaaagacgctcatgg

SEQ ID NO: 251317 - DNA, 25 bp, Artificial
  probe
  misc_feature (1)..(25): SEQ ID NO: 2127; WAN024GMG_at; Start 297; Stop 321
ggataagaaagacgctcatggcatc

SEQ ID NO: 251318 - DNA, 25 bp, Artificial
  probe
  misc_feature (1)..(25): SEQ ID NO: 2127; WAN024GMG_at; Start 295; Stop 319
acggataagaaagacgctcatggca

SEQ ID NO: 251319 - DNA, 25 bp, Artificial
  probe
  misc_feature (1)..(25): SEQ ID NO: 2127; WAN024GMG_at; Start 300; Stop 324
taagaaagacgctcatggcatcgct

SEQ ID NO: 251320 - DNA, 25 bp, Artificial
  probe
  misc_feature (1)..(25): SEQ ID NO: 2127; WAN024GMG_at; Start 698; Stop 722
atagtttgtctttctcttaactaat

SEQ ID NO: 251321 - DNA, 25 bp, Artificial
  probe
  misc_feature (1)..(25): SEQ ID NO: 2127; WAN024GMG_at; Start 298; Stop 322
gataagaaagacgctcatggcatcg

SEQ ID NO: 251322 - DNA, 25 bp, Artificial
  probe
  misc_feature (1)..(25): SEQ ID NO: 2127; WAN024GMG_at; Start 301; Stop 325
aagaaagacgctcatggcatcgctc

SEQ ID NO: 251323 - DNA, 25 bp, Artificial
  probe
  misc_feature (1)..(25): SEQ ID NO: 2127; WAN024GMG_at; Start 299; Stop 323
ataagaaagacgctcatggcatcgc

SEQ ID NO: 251324 - DNA, 25 bp, Artificial
  probe
  misc_feature (1)..(25): SEQ ID NO: 2127; WAN024GMG_at; Start 272; Stop 296
cattatcacttcgcaaaactaaaac

SEQ ID NO: 251325 - DNA, 25 bp, Artificial
  probe
  misc_feature (1)..(25): SEQ ID NO: 2127; WAN024GMG_at; Start 697; Stop 721
tatagtttgtctttctcttaactaa

SEQ ID NO: 251326 - DNA, 25 bp, Artificial
  probe
  misc_feature (1)..(25): SEQ ID NO: 2127; WAN024GMG_at; Start 269; Stop 293
aatcattatcacttcgcaaaactaa

SEQ ID NO: 251327 - DNA, 25 bp, Artificial
  probe
  misc_feature (1)..(25): SEQ ID NO: 2127; WAN024GMG_at; Start 291; Stop 315
taaaacggataagaaagacgctcat

SEQ ID NO: 251328 - DNA, 25 bp, Artificial
  probe
  misc_feature (1)..(25): SEQ ID NO: 2127; WAN024GMG_at; Start 276; Stop 300
atcacttcgcaaaactaaaacggat

SEQ ID NO: 251329 - DNA, 25 bp, Artificial
  probe
  misc_feature (1)..(25): SEQ ID NO: 2127; WAN024GMG_at; Start 292; Stop 316
aaaacggataagaaagacgctcatg

SEQ ID NO: 251330 - DNA, 25 bp, Artificial
  probe
  misc_feature (1)..(25): SEQ ID NO: 2127; WAN024GMG_at; Start 290; Stop 314
ctaaaacggataagaaagacgctca

SEQ ID NO: 251331 - DNA, 25 bp, Artificial
  probe
  misc_feature (1)..(25): SEQ ID NO: 4899; WAN024GMH_at; Start 270; Stop 294
tggaacaacttcatcggtgcagact

SEQ ID NO: 251332 - DNA, 25 bp, Artificial
  probe
  misc_feature (1)..(25): SEQ ID NO: 4899; WAN024GMH_at; Start 399; Stop 423
tatcgagatgagtgtagatcctaag

SEQ ID NO: 251333 - DNA, 25 bp, Artificial
  probe
  misc_feature (1)..(25): SEQ ID NO: 4899; WAN024GMH_at; Start 573; Stop 597
catgatggttttagtagatgaagcc

SEQ ID NO: 251334 - DNA, 25 bp, Artificial
  probe
  misc_feature (1)..(25): SEQ ID NO: 4899; WAN024GMH_at; Start 500; Stop 524
taatcaacaatcctacttactacgg

SEQ ID NO: 251335 - DNA, 25 bp, Artificial
  probe
  misc_feature (1)..(25): SEQ ID NO: 4899; WAN024GMH_at; Start 204; Stop 228
tattcgtgatgcagaggagctggct

SEQ ID NO: 251336 - DNA, 25 bp, Artificial
  probe
  misc_feature (1)..(25): SEQ ID NO: 4899; WAN024GMH_at; Start 1084; Stop 1108
gcctatatttccatcggcgaccgca

SEQ ID NO: 251337 - DNA, 25 bp, Artificial
  probe
  misc_feature (1)..(25): SEQ ID NO: 4899; WAN024GMH_at; Start 475; Stop 499
gaccatccagatgctaaggctatcc

SEQ ID NO: 251338 - DNA, 25 bp, Artificial
  probe
  misc_feature (1)..(25): SEQ ID NO: 4899; WAN024GMH_at; Start 308; Stop 332
cctgcaaggcaggagataagattat

SEQ ID NO: 251339 - DNA, 25 bp, Artificial
  probe
  misc_feature (1)..(25): SEQ ID NO: 4899; WAN024GMH_at; Start 809; Stop 833
tggatatttcacgtcgcaacttggc

SEQ ID NO: 251340 - DNA, 25 bp, Artificial
  probe
  misc_feature (1)..(25): SEQ ID NO: 4899; WAN024GMH_at; Start 1017; Stop 1041
ggtttatgacctcttgcgagacgaa

SEQ ID NO: 251341 - DNA, 25 bp, Artificial
  probe
  misc_feature (1)..(25): SEQ ID NO: 4899; WAN024GMH_at; Start 127; Stop 151
ctcttaggagaaaaatgtgtaggca

SEQ ID NO: 251342 - DNA, 25 bp, Artificial
  probe
  misc_feature (1)..(25): SEQ ID NO: 4899; WAN024GMH_at; Start 226; Stop 250
gctgcagatgcttttggagctagcc

SEQ ID NO: 251343 - DNA, 25 bp, Artificial
  probe
  misc_feature (1)..(25): SEQ ID NO: 4899; WAN024GMH_at; Start 105; Stop 129
gggaaatccagaacttgtcgaactc

SEQ ID NO: 251344 - DNA, 25 bp, Artificial
  probe
  misc_feature (1)..(25): SEQ ID NO: 4899; WAN024GMH_at; Start 1002; Stop 1026
cttaacaggtatcgaggtttatgac

SEQ ID NO: 251345 - DNA, 25 bp, Artificial
  probe
  misc_feature (1)..(25): SEQ ID NO: 4899; WAN024GMH_at; Start 1381; Stop 1405
aaggaacgtggttgctccctccaag

SEQ ID NO: 251346 - DNA, 25 bp, Artificial
  probe
  misc_feature (1)..(25): SEQ ID NO: 4899; WAN024GMH_at; Start 327; Stop 351
gattattctgccacgaaatgtccat

SEQ ID NO: 251347 - DNA, 25 bp, Artificial
  probe
  misc_feature (1)..(25): SEQ ID NO: 4899; WAN024GMH_at; Start 294; Stop 318
tatgattctggcaacctgcaaggca

SEQ ID NO: 251348 - DNA, 25 bp, Artificial
  probe
  misc_feature (1)..(25): SEQ ID NO: 4899; WAN024GMH_at; Start 1051; Stop 1075
cagatcgagtttggtgatatcggca

SEQ ID NO: 251349 - DNA, 25 bp, Artificial
  probe
  misc_feature (1)..(25): SEQ ID NO: 4899; WAN024GMH_at; Start 549; Stop 573
gacagaaatggctcatgaagctggc

SEQ ID NO: 251350 - DNA, 25 bp, Artificial
  probe
  misc_feature (1)..(25): SEQ ID NO: 4899; WAN024GMH_at; Start 458; Stop 482
tagcacaggccataaaggaccatcc

SEQ ID NO: 251351 - DNA, 25 bp, Artificial
  probe
  misc_feature (1)..(25): SEQ ID NO: 4899; WAN024GMH_at; Start 79; Stop 103
gatgttccaggtcacaagcgtggac

SEQ ID NO: 251352 - DNA, 25 bp, Artificial
  probe
  misc_feature (1)..(25): SEQ ID NO: 4899; WAN024GMH_at; Start 444; Stop 468
tgaaaatgaccgagtagcacaggcc

SEQ ID NO: 251353 - DNA, 25 bp, Artificial
  probe
  misc_feature (1)..(25): SEQ ID NO: 4899; WAN024GMH_at; Start 7; Stop 31
gagttagatcaaaaccaagccccaa

SEQ ID NO: 251354 - DNA, 25 bp, Artificial
  probe
  misc_feature (1)..(25): SEQ ID NO: 4899; WAN024GMH_at; Start 1400; Stop 1424
tccaagggacggaagatccagaggt

SEQ ID NO: 251355 - DNA, 25 bp, Artificial
  probe
  misc_feature (1)..(25): SEQ ID NO: 4899; WAN024GMH_at; Start 1036; Stop 1060
gacgaatacgacattcagatcgagt

SEQ ID NO: 251356 - DNA, 25 bp, Artificial
  probe
  misc_feature (1)..(25): SEQ ID NO: 4899; WAN024GMH_at; Start 1105; Stop 1129
cgcatccaagacatcgagcgcttgg

SEQ ID NO: 251357 - DNA, 25 bp, Artificial
  probe
  misc_feature (1)..(25): SEQ ID NO: 4899; WAN024GMH_at; Start 241; Stop 265
ggagctagccatgcctttctaatga

SEQ ID NO: 251358 - DNA, 25 bp, Artificial
  probe
  misc_feature (1)..(25): SEQ ID NO: 4899; WAN024GMH_at; Start 349; Stop 373
cataaatctgctatcaatgcgttgg

SEQ ID NO: 251359 - DNA, 25 bp, Artificial
  probe
  misc_feature (1)..(25): SEQ ID NO: 4899; WAN024GMH_at; Start 662; Stop 686
tggcagcagtttccatgcataagtc

SEQ ID NO: 251360 - DNA, 25 bp, Artificial
  probe
  misc_feature (1)..(25): SEQ ID NO: 4899; WAN024GMH_at; Start 65; Stop 89
ggattgttccctttgatgttccagg

SEQ ID NO: 251361 - DNA, 25 bp, Artificial
  probe
  misc_feature (1)..(25): SEQ ID NO: 4899; WAN024GMH_at; Start 382; Stop 406
ggtgccattcccatctatatcgaga

SEQ ID NO: 251362 - DNA, 25 bp, Artificial
  probe
  misc_feature (1)..(25): SEQ ID NO: 4899; WAN024GMH_at; Start 824; Stop 848
gcaacttggcccttcgtggtaaaga

SEQ ID NO: 251363 - DNA, 25 bp, Artificial
  probe
  misc_feature (1)..(25): SEQ ID NO: 4899; WAN024GMH_at; Start 364; Stop 388
aatgcgttggttctatgtggtgcca

SEQ ID NO: 251364 - DNA, 25 bp, Artificial
  probe
  misc_feature (1)..(25): SEQ ID NO: 4899; WAN024GMH_at; Start 1123; Stop 1147
cgcttggttggtgctctggctgata

SEQ ID NO: 251365 - DNA, 25 bp, Artificial
  probe
  misc_feature (1)..(25): SEQ ID NO: 3326; WAN024GMI_at; Start 162; Stop 186
atcatactttttcagtctatggtag

SEQ ID NO: 251366 - DNA, 25 bp, Artificial
  probe
  misc_feature (1)..(25): SEQ ID NO: 3326; WAN024GMI_at; Start 169; Stop 193
tttttcagtctatggtagctctctt

SEQ ID NO: 251367 - DNA, 25 bp, Artificial
  probe
  misc_feature (1)..(25): SEQ ID NO: 3326; WAN024GMI_at; Start 172; Stop 196
ttcagtctatggtagctctctttaa

SEQ ID NO: 251368 - DNA, 25 bp, Artificial
  probe
  misc_feature (1)..(25): SEQ ID NO: 3326; WAN024GMI_at; Start 1; Stop 25
ctgaaattaaccacagggattacct

SEQ ID NO: 251369 - DNA, 25 bp, Artificial
  probe
  misc_feature (1)..(25): SEQ ID NO: 3326; WAN024GMI_at; Start 156; Stop 180
cattatatcatactttttcagtcta

SEQ ID NO: 251370 - DNA, 25 bp, Artificial
  probe
  misc_feature (1)..(25): SEQ ID NO: 3326; WAN024GMI_at; Start 158; Stop 182
ttatatcatactttttcagtctatg

SEQ ID NO: 251371 - DNA, 25 bp, Artificial
  probe
  misc_feature (1)..(25): SEQ ID NO: 3326; WAN024GMI_at; Start 148; Stop 172
ctatcttccattatatcatactttt

SEQ ID NO: 251372 - DNA, 25 bp, Artificial
  probe
  misc_feature (1)..(25): SEQ ID NO: 3326; WAN024GMI_at; Start 171; Stop 195
tttcagtctatggtagctctcttta

SEQ ID NO: 251373 - DNA, 25 bp, Artificial
  probe
  misc_feature (1)..(25): SEQ ID NO: 3326; WAN024GMI_at; Start 149; Stop 173
tatcttccattatatcatacttttt

SEQ ID NO: 251374 - DNA, 25 bp, Artificial
  probe
  misc_feature (1)..(25): SEQ ID NO: 3326; WAN024GMI_at; Start 175; Stop 199
agtctatggtagctctctttaacta

SEQ ID NO: 251375 - DNA, 25 bp, Artificial
  probe
  misc_feature (1)..(25): SEQ ID NO: 3326; WAN024GMI_at; Start 12; Stop 36
cacagggattacctttgaaaaaatg

SEQ ID NO: 251376 - DNA, 25 bp, Artificial
  probe
  misc_feature (1)..(25): SEQ ID NO: 3326; WAN024GMI_at; Start 167; Stop 191
actttttcagtctatggtagctctc

SEQ ID NO: 251377 - DNA, 25 bp, Artificial
  probe
  misc_feature (1)..(25): SEQ ID NO: 3326; WAN024GMI_at; Start 146; Stop 170
ttctatcttccattatatcatactt

SEQ ID NO: 251378 - DNA, 25 bp, Artificial
  probe
  misc_feature (1)..(25): SEQ ID NO: 3326; WAN024GMI_at; Start 150; Stop 174
atcttccattatatcatactttttc

SEQ ID NO: 251379 - DNA, 25 bp, Artificial
  probe
  misc_feature (1)..(25): SEQ ID NO: 3326; WAN024GMI_at; Start 161; Stop 185
tatcatactttttcagtctatggta

SEQ ID NO: 251380 - DNA, 25 bp, Artificial
  probe
  misc_feature (1)..(25): SEQ ID NO: 3326; WAN024GMI_at; Start 177; Stop 201
tctatggtagctctctttaactaat

SEQ ID NO: 251381 - DNA, 25 bp, Artificial
  probe
  misc_feature (1)..(25): SEQ ID NO: 3326; WAN024GMI_at; Start 165; Stop 189
atactttttcagtctatggtagctc

SEQ ID NO: 251382 - DNA, 25 bp, Artificial
  probe
  misc_feature (1)..(25): SEQ ID NO: 3326; WAN024GMI_at; Start 166; Stop 190
tactttttcagtctatggtagctct

SEQ ID NO: 251383 - DNA, 25 bp, Artificial
  probe
  misc_feature (1)..(25): SEQ ID NO: 3326; WAN024GMI_at; Start 160; Stop 184
atatcatactttttcagtctatggt

SEQ ID NO: 251384 - DNA, 25 bp, Artificial
  probe
  misc_feature (1)..(25): SEQ ID NO: 3326; WAN024GMI_at; Start 173; Stop 197
tcagtctatggtagctctctttaac

SEQ ID NO: 251385 - DNA, 25 bp, Artificial
  probe
  misc_feature (1)..(25): SEQ ID NO: 3326; WAN024GMI_at; Start 163; Stop 187
tcatactttttcagtctatggtagc

SEQ ID NO: 251386 - DNA, 25 bp, Artificial
  probe
  misc_feature (1)..(25): SEQ ID NO: 3326; WAN024GMI_at; Start 157; Stop 181
attatatcatactttttcagtctat

SEQ ID NO: 251387 - DNA, 25 bp, Artificial
  probe
  misc_feature (1)..(25): SEQ ID NO: 3326; WAN024GMI_at; Start 159; Stop 183
tatatcatactttttcagtctatgg

SEQ ID NO: 251388 - DNA, 25 bp, Artificial
  probe
  misc_feature (1)..(25): SEQ ID NO: 3326; WAN024GMI_at; Start 147; Stop 171
tctatcttccattatatcatacttt

SEQ ID NO: 251389 - DNA, 25 bp, Artificial
  probe
  misc_feature (1)..(25): SEQ ID NO: 3326; WAN024GMI_at; Start 176; Stop 200
gtctatggtagctctctttaactaa

SEQ ID NO: 251390 - DNA, 25 bp, Artificial
  probe
  misc_feature (1)..(25): SEQ ID NO: 3326; WAN024GMI_at; Start 174; Stop 198
cagtctatggtagctctctttaact

SEQ ID NO: 251391 - DNA, 25 bp, Artificial
  probe
  misc_feature (1)..(25): SEQ ID NO: 3326; WAN024GMI_at; Start 168; Stop 192
ctttttcagtctatggtagctctct

SEQ ID NO: 251392 - DNA, 25 bp, Artificial
  probe
  misc_feature (1)..(25): SEQ ID NO: 3326; WAN024GMI_at; Start 164; Stop 188
catactttttcagtctatggtagct

SEQ ID NO: 251393 - DNA, 25 bp, Artificial
  probe
  misc_feature (1)..(25): SEQ ID NO: 3326; WAN024GMI_at; Start 170; Stop 194
ttttcagtctatggtagctctcttt

SEQ ID NO: 251394 - DNA, 25 bp, Artificial
  probe
  misc_feature (1)..(25): SEQ ID NO: 5202; WAN024GMJ_at; Start 908; Stop 932
cctccttggaggaagtgagtccctt

SEQ ID NO: 251395 - DNA, 25 bp, Artificial
  probe
  misc_feature (1)..(25): SEQ ID NO: 5202; WAN024GMJ_at; Start 1159; Stop 1183
gatagtctttatcgtagagccaaag

SEQ ID NO: 251396 - DNA, 25 bp, Artificial
  probe
  misc_feature (1)..(25): SEQ ID NO: 5202; WAN024GMJ_at; Start 1399; Stop 1423
tacagtttagacgttcatggctatc

SEQ ID NO: 251397 - DNA, 25 bp, Artificial
  probe
  misc_feature (1)..(25): SEQ ID NO: 5202; WAN024GMJ_at; Start 192; Stop 216
tggacgtgctggtaagatgcctagc

SEQ ID NO: 251398 - DNA, 25 bp, Artificial
  probe
  misc_feature (1)..(25): SEQ ID NO: 5202; WAN024GMJ_at; Start 144; Stop 168
gatagtttaccagtttgaggaggac

SEQ ID NO: 251399 - DNA, 25 bp, Artificial
  probe
  misc_feature (1)..(25): SEQ ID NO: 5202; WAN024GMJ_at; Start 207; Stop 231
gatgcctagcgggtttgacattgac

SEQ ID NO: 251400 - DNA, 25 bp, Artificial
  probe
  misc_feature (1)..(25): SEQ ID NO: 5202; WAN024GMJ_at; Start 1244; Stop 1268
tattgaaccagatgcaagaaggagt

SEQ ID NO: 251401 - DNA, 25 bp, Artificial
  probe
  misc_feature (1)..(25): SEQ ID NO: 5202; WAN024GMJ_at; Start 254; Stop 278
cgaaaaacggtgcagaactagcaga

SEQ ID NO: 251402 - DNA, 25 bp, Artificial
  probe
  misc_feature (1)..(25): SEQ ID NO: 5202; WAN024GMJ_at; Start 1820; Stop 1844
tatcttctggaagtggaagttctgg

SEQ ID NO: 251403 - DNA, 25 bp, Artificial
  probe
  misc_feature (1)..(25): SEQ ID NO: 5202; WAN024GMJ_at; Start 874; Stop 898
gagcctatggttttatcagaagcag

SEQ ID NO: 251404 - DNA, 25 bp, Artificial
  probe
  misc_feature (1)..(25): SEQ ID NO: 5202; WAN024GMJ_at; Start 932; Stop 956
tggtcaagggagctggaaaattcac

SEQ ID NO: 251405 - DNA, 25 bp, Artificial
  probe
  misc_feature (1)..(25): SEQ ID NO: 5202; WAN024GMJ_at; Start 415; Stop 439
gaattaaattggcaacctctgacag

SEQ ID NO: 251406 - DNA, 25 bp, Artificial
  probe
  misc_feature (1)..(25): SEQ ID NO: 5202; WAN024GMJ_at; Start 973; Stop 997
caagctaccttgctagatgtgatag

SEQ ID NO: 251407 - DNA, 25 bp, Artificial
  probe
  misc_feature (1)..(25): SEQ ID NO: 5202; WAN024GMJ_at; Start 1529; Stop 1553
gagctgaggtctactatctctggac

SEQ ID NO: 251408 - DNA, 25 bp, Artificial
  probe
  misc_feature (1)..(25): SEQ ID NO: 5202; WAN024GMJ_at; Start 351; Stop 375
catagttgaagttgacctcgtctgg

SEQ ID NO: 251409 - DNA, 25 bp, Artificial
  probe
  misc_feature (1)..(25): SEQ ID NO: 5202; WAN024GMJ_at; Start 123; Stop 147
tacggcagagtttagacagaagata

SEQ ID NO: 251410 - DNA, 25 bp, Artificial
  probe
  misc_feature (1)..(25): SEQ ID NO: 5202; WAN024GMJ_at; Start 1208; Stop 1232
caagagggcttcaactcaaatcttc

SEQ ID NO: 251411 - DNA, 25 bp, Artificial
  probe
  misc_feature (1)..(25): SEQ ID NO: 5202; WAN024GMJ_at; Start 272; Stop 296
tagcagatgtgactagcgaagtaac

SEQ ID NO: 251412 - DNA, 25 bp, Artificial
  probe
  misc_feature (1)..(25): SEQ ID NO: 5202; WAN024GMJ_at; Start 1775; Stop 1799
tgagccattatgctagtgtcgcaaa

SEQ ID NO: 251413 - DNA, 25 bp, Artificial
  probe
  misc_feature (1)..(25): SEQ ID NO: 5202; WAN024GMJ_at; Start 1724; Stop 1748
tctatgtagcttatggctggcacag

SEQ ID NO: 251414 - DNA, 25 bp, Artificial
  probe
  misc_feature (1)..(25): SEQ ID NO: 5202; WAN024GMJ_at; Start 990; Stop 1014
tgtgatagaccgtgggaatgtctct

SEQ ID NO: 251415 - DNA, 25 bp, Artificial
  probe
  misc_feature (1)..(25): SEQ ID NO: 5202; WAN024GMJ_at; Start 1647; Stop 1671
cttatttggctatgcggacaaggtt

SEQ ID NO: 251416 - DNA, 25 bp, Artificial
  probe
  misc_feature (1)..(25): SEQ ID NO: 5202; WAN024GMJ_at; Start 159; Stop 183
tgaggaggactttaagggccaaatc

SEQ ID NO: 251417 - DNA, 25 bp, Artificial
  probe
  misc_feature (1)..(25): SEQ ID NO: 5202; WAN024GMJ_at; Start 1193; Stop 1217
aaaaacggattcaagcaagagggct

SEQ ID NO: 251418 - DNA, 25 bp, Artificial
  probe
  misc_feature (1)..(25): SEQ ID NO: 5202; WAN024GMJ_at; Start 313; Stop 337
tatactgtgagagtctataatccag

SEQ ID NO: 251419 - DNA, 25 bp, Artificial
  probe
  misc_feature (1)..(25): SEQ ID NO: 5202; WAN024GMJ_at; Start 1484; Stop 1508
ggaagcttcgactagataatcgtga

SEQ ID NO: 251420 - DNA, 25 bp, Artificial
  probe
  misc_feature (1)..(25): SEQ ID NO: 5202; WAN024GMJ_at; Start 1512; Stop 1536
tgttctaaatgaagcgggagctgag

SEQ ID NO: 251421 - DNA, 25 bp, Artificial
  probe
  misc_feature (1)..(25): SEQ ID NO: 5202; WAN024GMJ_at; Start 177; Stop 201
ccaaatcgtgggacttggacgtgct

SEQ ID NO: 251422 - DNA, 25 bp, Artificial
  probe
  misc_feature (1)..(25): SEQ ID NO: 5202; WAN024GMJ_at; Start 1141; Stop 1165
gcggattacaaggtatctgatagtc

SEQ ID NO: 251423 - DNA, 25 bp, Artificial
  probe
  misc_feature (1)..(25): SEQ ID NO: 5202; WAN024GMJ_at; Start 510; Stop 534
ccatacagggaaactttttagagag

SEQ ID NO: 251424 - DNA, 25 bp, Artificial
  probe
  misc_feature (1)..(25): SEQ ID NO: 5202; WAN024GMJ_at; Start 892; Stop 916
gaagcagtctactcgacctccttgg

SEQ ID NO: 251425 - DNA, 25 bp, Artificial
  probe
  misc_feature (1)..(25): SEQ ID NO: 5202; WAN024GMJ_at; Start 328; Stop 352
tataatccaggtcaggagggcgaca

SEQ ID NO: 251426 - DNA, 25 bp, Artificial
  probe
  misc_feature (1)..(25): SEQ ID NO: 5202; WAN024GMJ_at; Start 574; Stop 598
ttagacaatcttccggctaagcgtg

SEQ ID NO: 251427 - DNA, 25 bp, Artificial
  probe
  misc_feature (1)..(25): SEQ ID NO: 5202; WAN024GMJ_at; Start 298; Stop 322
gaagaagcggatggttatactgtga

SEQ ID NO: 251428 - DNA, 25 bp, Artificial
  probe
  misc_feature (1)..(25): SEQ ID NO: 5729; WAN024GMK_at; Start 1284; Stop 1308
gaacgattgcagataacttgagaca

SEQ ID NO: 251429 - DNA, 25 bp, Artificial
  probe
  misc_feature (1)..(25): SEQ ID NO: 5729; WAN024GMK_at; Start 56; Stop 80
aaaacctacaagtggcaggccctgg

SEQ ID NO: 251430 - DNA, 25 bp, Artificial
  probe
  misc_feature (1)..(25): SEQ ID NO: 5729; WAN024GMK_at; Start 1356; Stop 1380
ttgcccaggctagtgaattcattca

SEQ ID NO: 251431 - DNA, 25 bp, Artificial
  probe
  misc_feature (1)..(25): SEQ ID NO: 5729; WAN024GMK_at; Start 1327; Stop 1351
tctatttgaaatggagcgcgcagcc

SEQ ID NO: 251432 - DNA, 25 bp, Artificial
  probe
  misc_feature (1)..(25): SEQ ID NO: 5729; WAN024GMK_at; Start 1685; Stop 1709
gttgccaacaatgccgtttaccgtg

SEQ ID NO: 251433 - DNA, 25 bp, Artificial
  probe
  misc_feature (1)..(25): SEQ ID NO: 5729; WAN024GMK_at; Start 904; Stop 928
gggaaattctgtcagccgtgccatg

SEQ ID NO: 251434 - DNA, 25 bp, Artificial
  probe
  misc_feature (1)..(25): SEQ ID NO: 5729; WAN024GMK_at; Start 1058; Stop 1082
gaaccgatgctgaaagatgtgagct

SEQ ID NO: 251435 - DNA, 25 bp, Artificial
  probe
  misc_feature (1)..(25): SEQ ID NO: 5729; WAN024GMK_at; Start 255; Stop 279
tcgcagcctatattgcccaaggagt

SEQ ID NO: 251436 - DNA, 25 bp, Artificial
  probe
  misc_feature (1)..(25): SEQ ID NO: 5729; WAN024GMK_at; Start 287; Stop 311
gaccttcgggaggatgccttccgta

SEQ ID NO: 251437 - DNA, 25 bp, Artificial
  probe
  misc_feature (1)..(25): SEQ ID NO: 5729; WAN024GMK_at; Start 589; Stop 613
tcttgagcgcatcaatgccattgcc

SEQ ID NO: 251438 - DNA, 25 bp, Artificial
  probe
  misc_feature (1)..(25): SEQ ID NO: 5729; WAN024GMK_at; Start 1457; Stop 1481
tcgattgcgcgtgggattgtcagca

SEQ ID NO: 251439 - DNA, 25 bp, Artificial
  probe
  misc_feature (1)..(25): SEQ ID NO: 5729; WAN024GMK_at; Start 1670; Stop 1694
acgcatgcagacttggttgccaaca

SEQ ID NO: 251440 - DNA, 25 bp, Artificial
  probe
  misc_feature (1)..(25): SEQ ID NO: 5729; WAN024GMK_at; Start 1043; Stop 1067
tatccaatggacaaggaaccgatgc

SEQ ID NO: 251441 - DNA, 25 bp, Artificial
  probe
  misc_feature (1)..(25): SEQ ID NO: 5729; WAN024GMK_at; Start 1126; Stop 1150
tggtgcaggaaagtcaaccttggct

SEQ ID NO: 251442 - DNA, 25 bp, Artificial
  probe
  misc_feature (1)..(25): SEQ ID NO: 5729; WAN024GMK_at; Start 394; Stop 418
gattcagaacgttgtcatgatgacc

SEQ ID NO: 251443 - DNA, 25 bp, Artificial
  probe
  misc_feature (1)..(25): SEQ ID NO: 5729; WAN024GMK_at; Start 1156; Stop 1180
gattccacgtctctttgatccacag

SEQ ID NO: 251444 - DNA, 25 bp, Artificial
  probe
  misc_feature (1)..(25): SEQ ID NO: 5729; WAN024GMK_at; Start 240; Stop 264
gactcaatgttgtcctcgcagccta

SEQ ID NO: 251445 - DNA, 25 bp, Artificial
  probe
  misc_feature (1)..(25): SEQ ID NO: 5729; WAN024GMK_at; Start 1599; Stop 1623
aaaaaattagctcggttgtccatgc

SEQ ID NO: 251446 - DNA, 25 bp, Artificial
  probe
  misc_feature (1)..(25): SEQ ID NO: 5729; WAN024GMK_at; Start 785; Stop 809
ctctctatttggctggtcgcgggaa

SEQ ID NO: 251447 - DNA, 25 bp, Artificial
  probe
  misc_feature (1)..(25): SEQ ID NO: 5729; WAN024GMK_at; Start 927; Stop 951
tgatttccatgcgtcgtattcgaga

SEQ ID NO: 251448 - DNA, 25 bp, Artificial
  probe
  misc_feature (1)..(25): SEQ ID NO: 5729; WAN024GMK_at; Start 88; Stop 112
cctgatgacaggcttgatggttgct

SEQ ID NO: 251449 - DNA, 25 bp, Artificial
  probe
  misc_feature (1)..(25): SEQ ID NO: 5729; WAN024GMK_at; Start 476; Stop 500
caaaccttaccttctctgtggtggg

SEQ ID NO: 251450 - DNA, 25 bp, Artificial
  probe
  misc_feature (1)..(25): SEQ ID NO: 5729; WAN024GMK_at; Start 962; Stop 986
gcagagccagctatgaccttcaagg

SEQ ID NO: 251451 - DNA, 25 bp, Artificial
  probe
  misc_feature (1)..(25): SEQ ID NO: 5729; WAN024GMK_at; Start 223; Stop 247
cggtctagttgctggtggactcaat

SEQ ID NO: 251452 - DNA, 25 bp, Artificial
  probe
  misc_feature (1)..(25): SEQ ID NO: 5729; WAN024GMK_at; Start 134; Stop 158
tatctgcaggaagtcttaggcgccc

SEQ ID NO: 251453 - DNA, 25 bp, Artificial
  probe
  misc_feature (1)..(25): SEQ ID NO: 5729; WAN024GMK_at; Start 1442; Stop 1466
caaaaacaaaggatgtcgattgcgc

SEQ ID NO: 251454 - DNA, 25 bp, Artificial
  probe
  misc_feature (1)..(25): SEQ ID NO: 5729; WAN024GMK_at; Start 272; Stop 296
caaggagtttcatccgaccttcggg

SEQ ID NO: 251455 - DNA, 25 bp, Artificial
  probe
  misc_feature (1)..(25): SEQ ID NO: 5729; WAN024GMK_at; Start 948; Stop 972
gagaaattcttgacgcagagccagc

SEQ ID NO: 251456 - DNA, 25 bp, Artificial
  probe
  misc_feature (1)..(25): SEQ ID NO: 5729; WAN024GMK_at; Start 728; Stop 752
tatgccttttcagtagtggaaccct

SEQ ID NO: 251457 - DNA, 25 bp, Artificial
  probe
  misc_feature (1)..(25): SEQ ID NO: 5729; WAN024GMK_at; Start 1214; Stop 1238
cgagaagtgagtgaaggaaccctgc

SEQ ID NO: 251458 - DNA, 25 bp, Artificial
  probe
  misc_feature (1)..(25): SEQ ID NO: 5729; WAN024GMK_at; Start 1505; Stop 1529
gattcgacctcagccttggatgcca

SEQ ID NO: 251459 - DNA, 25 bp, Artificial
  probe
  misc_feature (1)..(25): SEQ ID NO: 5729; WAN024GMK_at; Start 626; Stop 650
cgtggcgttcgtgtggtcaagtcct

SEQ ID NO: 251460 - DNA, 25 bp, Artificial
  probe
  misc_feature (1)..(25): SEQ ID NO: 5729; WAN024GMK_at; Start 1528; Stop 1552
caaatcagagcgcttggtgcaagaa

SEQ ID NO: 251461 - DNA, 25 bp, Artificial
  probe
  misc_feature (1)..(25): SEQ ID NO: 5729; WAN024GMK_at; Start 801; Stop 825
tcgcgggaatggttcagtcggatcc

SEQ ID NO: 251462 - DNA, 25 bp, Artificial
  probe
  misc_feature (1)..(25): SEQ ID NO: 2128; WAN024GML_s_at; Start 1034; Stop 1058
acattacaatgtagccatcatccac

SEQ ID NO: 251463 - DNA, 25 bp, Artificial
  probe
  misc_feature (1)..(25): SEQ ID NO: 2128; WAN024GML_s_at; Start 598; Stop 622
ccgcttctaaaattcaggatatcct

SEQ ID NO: 251464 - DNA, 25 bp, Artificial
  probe
  misc_feature (1)..(25): SEQ ID NO: 2128; WAN024GML_s_at; Start 1100; Stop 1124
aaagagctgccatttgacgaacaaa

SEQ ID NO: 251465 - DNA, 25 bp, Artificial
  probe
  misc_feature (1)..(25): SEQ ID NO: 2128; WAN024GML_s_at; Start 1096; Stop 1120
taaaaaagagctgccatttgacgaa

SEQ ID NO: 251466 - DNA, 25 bp, Artificial
  probe
  misc_feature (1)..(25): SEQ ID NO: 2128; WAN024GML_s_at; Start 1093; Stop 1117
tcctaaaaaagagctgccatttgac

SEQ ID NO: 251467 - DNA, 25 bp, Artificial
  probe
  misc_feature (1)..(25): SEQ ID NO: 2128; WAN024GML_s_at; Start 600; Stop 624
gcttctaaaattcaggatatcctct

SEQ ID NO: 251468 - DNA, 25 bp, Artificial
  probe
  misc_feature (1)..(25): SEQ ID NO: 2128; WAN024GML_s_at; Start 603; Stop 627
tctaaaattcaggatatcctctcag

SEQ ID NO: 251469 - DNA, 25 bp, Artificial
  probe
  misc_feature (1)..(25): SEQ ID NO: 2128; WAN024GML_s_at; Start 1098; Stop 1122
aaaaagagctgccatttgacgaaca

SEQ ID NO: 251470 - DNA, 25 bp, Artificial
  probe
  misc_feature (1)..(25): SEQ ID NO: 2128; WAN024GML_s_at; Start 592; Stop 616
gattgaccgcttctaaaattcagga

SEQ ID NO: 251471 - DNA, 25 bp, Artificial
  probe
  misc_feature (1)..(25): SEQ ID NO: 2128; WAN024GML_s_at; Start 1073; Stop 1097
tatccgaaccctgttttatatccta

SEQ ID NO: 251472 - DNA, 25 bp, Artificial
  probe
  misc_feature (1)..(25): SEQ ID NO: 2128; WAN024GML_s_at; Start 619; Stop 643
tcctctcagtcgcacctcgttctat

SEQ ID NO: 251473 - DNA, 25 bp, Artificial
  probe
  misc_feature (1)..(25): SEQ ID NO: 2128; WAN024GML_s_at; Start 594; Stop 618
ttgaccgcttctaaaattcaggata

SEQ ID NO: 251474 - DNA, 25 bp, Artificial
  probe
  misc_feature (1)..(25): SEQ ID NO: 2128; WAN024GML_s_at; Start 1087; Stop 1111
tttatatcctaaaaaagagctgcca

SEQ ID NO: 251475 - DNA, 25 bp, Artificial
  probe
  misc_feature (1)..(25): SEQ ID NO: 2128; WAN024GML_s_at; Start 606; Stop 630
aaaattcaggatatcctctcagtcg

SEQ ID NO: 251476 - DNA, 25 bp, Artificial
  probe
  misc_feature (1)..(25): SEQ ID NO: 2128; WAN024GML_s_at; Start 1043; Stop 1067
tgtagccatcatccaccttgcaaaa

SEQ ID NO: 251477 - DNA, 25 bp, Artificial
  probe
  misc_feature (1)..(25): SEQ ID NO: 2128; WAN024GML_s_at; Start 1089; Stop 1113
tatatcctaaaaaagagctgccatt

SEQ ID NO: 251478 - DNA, 25 bp, Artificial
  probe
  misc_feature (1)..(25): SEQ ID NO: 2128; WAN024GML_s_at; Start 1091; Stop 1115
tatcctaaaaaagagctgccatttg

SEQ ID NO: 251479 - DNA, 25 bp, Artificial
  probe
  misc_feature (1)..(25): SEQ ID NO: 2128; WAN024GML_s_at; Start 953; Stop 977
actcatacaagctgccaaagcatgc

SEQ ID NO: 251480 - DNA, 25 bp, Artificial
  probe
  misc_feature (1)..(25): SEQ ID NO: 2128; WAN024GML_s_at; Start 1029; Stop 1053
ggaaaacattacaatgtagccatca

SEQ ID NO: 251481 - DNA, 25 bp, Artificial
  probe
  misc_feature (1)..(25): SEQ ID NO: 2128; WAN024GML_s_at; Start 590; Stop 614
gcgattgaccgcttctaaaattcag

SEQ ID NO: 251482 - DNA, 25 bp, Artificial
  probe
  misc_feature (1)..(25): SEQ ID NO: 2128; WAN024GML_s_at; Start 1094; Stop 1118
cctaaaaaagagctgccatttgacg

SEQ ID NO: 251483 - DNA, 25 bp, Artificial
  probe
  misc_feature (1)..(25): SEQ ID NO: 2128; WAN024GML_s_at; Start 1101; Stop 1125
aagagctgccatttgacgaacaaaa

SEQ ID NO: 251484 - DNA, 25 bp, Artificial
  probe
  misc_feature (1)..(25): SEQ ID NO: 2128; WAN024GML_s_at; Start 583; Stop 607
aaattaagcgattgaccgcttctaa

SEQ ID NO: 251485 - DNA, 25 bp, Artificial
  probe
  misc_feature (1)..(25): SEQ ID NO: 2128; WAN024GML_s_at; Start 1038; Stop 1062
tacaatgtagccatcatccaccttg

SEQ ID NO: 251486 - DNA, 25 bp, Artificial
  probe
  misc_feature (1)..(25): SEQ ID NO: 2128; WAN024GML_s_at; Start 1099; Stop 1123
aaaagagctgccatttgacgaacaa

SEQ ID NO: 251487 - DNA, 25 bp, Artificial
  probe
  misc_feature (1)..(25): SEQ ID NO: 2128; WAN024GML_s_at; Start 611; Stop 635
tcaggatatcctctcagtcgcacct

SEQ ID NO: 251488 - DNA, 25 bp, Artificial
  probe
  misc_feature (1)..(25): SEQ ID NO: 2128; WAN024GML_s_at; Start 596; Stop 620
gaccgcttctaaaattcaggatatc

SEQ ID NO: 251489 - DNA, 25 bp, Artificial
  probe
  misc_feature (1)..(25): SEQ ID NO: 2128; WAN024GML_s_at; Start 1103; Stop 1127
gagctgccatttgacgaacaaaaag

SEQ ID NO: 251490 - DNA, 25 bp, Artificial
  probe
  misc_feature (1)..(25): SEQ ID NO: 2128; WAN024GML_s_at; Start 1041; Stop 1065
aatgtagccatcatccaccttgcaa

SEQ ID NO: 251491 - DNA, 25 bp, Artificial
  probe
  misc_feature (1)..(25): SEQ ID NO: 2128; WAN024GML_s_at; Start 613; Stop 637
aggatatcctctcagtcgcacctcg

SEQ ID NO: 251492 - DNA, 25 bp, Artificial
  probe
  misc_feature (1)..(25): SEQ ID NO: 2128; WAN024GML_s_at; Start 610; Stop 634
ttcaggatatcctctcagtcgcacc

SEQ ID NO: 251493 - DNA, 25 bp, Artificial
  probe
  misc_feature (1)..(25): SEQ ID NO: 2128; WAN024GML_s_at; Start 1044; Stop 1068
gtagccatcatccaccttgcaaaaa

SEQ ID NO: 251494 - DNA, 25 bp, Artificial
  probe
  misc_feature (1)..(25): SEQ ID NO: 2128; WAN024GML_s_at; Start 608; Stop 632
aattcaggatatcctctcagtcgca

SEQ ID NO: 251495 - DNA, 25 bp, Artificial
  probe
  misc_feature (1)..(25): SEQ ID NO: 2128; WAN024GML_s_at; Start 614; Stop 638
ggatatcctctcagtcgcacctcgt

SEQ ID NO: 251496 - DNA, 25 bp, Artificial
  probe
  misc_feature (1)..(25): SEQ ID NO: 1488; WAN024GMM_at; Start 196; Stop 220
tcggcaggttgttccttgatcatac

SEQ ID NO: 251497 - DNA, 25 bp, Artificial
  probe
  misc_feature (1)..(25): SEQ ID NO: 1488; WAN024GMM_at; Start 117; Stop 141
gagttgttgccagttttcagaaaga

SEQ ID NO: 251498 - DNA, 25 bp, Artificial
  probe
  misc_feature (1)..(25): SEQ ID NO: 1488; WAN024GMM_at; Start 391; Stop 415
gcagtcagtgcttctggacgttcag

SEQ ID NO: 251499 - DNA, 25 bp, Artificial
  probe
  misc_feature (1)..(25): SEQ ID NO: 1488; WAN024GMM_at; Start 591; Stop 615
ggcagaatcttttttgacaagcaaa

SEQ ID NO: 251500 - DNA, 25 bp, Artificial
  probe
  misc_feature (1)..(25): SEQ ID NO: 1488; WAN024GMM_at; Start 424; Stop 448
gcatcaatgacaccagcctcaagag

SEQ ID NO: 251501 - DNA, 25 bp, Artificial
  probe
  misc_feature (1)..(25): SEQ ID NO: 1488; WAN024GMM_at; Start 213; Stop 237
gatcatacgatccatcaaggcaact

SEQ ID NO: 251502 - DNA, 25 bp, Artificial
  probe
  misc_feature (1)..(25): SEQ ID NO: 1488; WAN024GMM_at; Start 60; Stop 84
gagacctatgatggttccgacgata

SEQ ID NO: 251503 - DNA, 25 bp, Artificial
  probe
  misc_feature (1)..(25): SEQ ID NO: 1488; WAN024GMM_at; Start 149; Stop 173
caacttggctaaagaaactactgct

SEQ ID NO: 251504 - DNA, 25 bp, Artificial
  probe
  misc_feature (1)..(25): SEQ ID NO: 1488; WAN024GMM_at; Start 374; Stop 398
tagagttcgcagcttcagcagtcag

SEQ ID NO: 251505 - DNA, 25 bp, Artificial
  probe
  misc_feature (1)..(25): SEQ ID NO: 1488; WAN024GMM_at; Start 313; Stop 337
gcgatagctgtatcttcttccccag

SEQ ID NO: 251506 - DNA, 25 bp, Artificial
  probe
  misc_feature (1)..(25): SEQ ID NO: 1488; WAN024GMM_at; Start 41; Stop 65
caatggcaagtccaataatgagacc

SEQ ID NO: 251507 - DNA, 25 bp, Artificial
  probe
  misc_feature (1)..(25): SEQ ID NO: 1488; WAN024GMM_at; Start 299; Stop 323
tacgaagcccgatagcgatagctgt

SEQ ID NO: 251508 - DNA, 25 bp, Artificial
  probe
  misc_feature (1)..(25): SEQ ID NO: 1488; WAN024GMM_at; Start 99; Stop 123
gataccagcaccacgcaagagttgt

SEQ ID NO: 251509 - DNA, 25 bp, Artificial
  probe
  misc_feature (1)..(25): SEQ ID NO: 1488; WAN024GMM_at; Start 264; Stop 288
gctggcattgatttggctaatacga

SEQ ID NO: 251510 - DNA, 25 bp, Artificial
  probe
  misc_feature (1)..(25): SEQ ID NO: 1488; WAN024GMM_at; Start 10; Stop 34
ttttcagagagaggagcagtacgga

SEQ ID NO: 251511 - DNA, 25 bp, Artificial
  probe
  misc_feature (1)..(25): SEQ ID NO: 1488; WAN024GMM_at; Start 658; Stop 682
tgtttgcgttctgcagttggactca

SEQ ID NO: 251512 - DNA, 25 bp, Artificial
  probe
  misc_feature (1)..(25): SEQ ID NO: 1488; WAN024GMM_at; Start 491; Stop 515
tagcacctgggatttgtgcaatcaa

SEQ ID NO: 251513 - DNA, 25 bp, Artificial
  probe
  misc_feature (1)..(25): SEQ ID NO: 1488; WAN024GMM_at; Start 442; Stop 466
tcaagagcttgtcgcatttgagcga

SEQ ID NO: 251514 - DNA, 25 bp, Artificial
  probe
  misc_feature (1)..(25): SEQ ID NO: 1488; WAN024GMM_at; Start 524; Stop 548
ggtagaccccttgttgagaagtgat

SEQ ID NO: 251515 - DNA, 25 bp, Artificial
  probe
  misc_feature (1)..(25): SEQ ID NO: 1488; WAN024GMM_at; Start 284; Stop 308
tacgattgtcatttttacgaagccc

SEQ ID NO: 251516 - DNA, 25 bp, Artificial
  probe
  misc_feature (1)..(25): SEQ ID NO: 1488; WAN024GMM_at; Start 406; Stop 430
ggacgttcagaaacataagcatcaa

SEQ ID NO: 251517 - DNA, 25 bp, Artificial
  probe
  misc_feature (1)..(25): SEQ ID NO: 1488; WAN024GMM_at; Start 508; Stop 532
gcaatcaagttataaaggtagaccc

SEQ ID NO: 251518 - DNA, 25 bp, Artificial
  probe
  misc_feature (1)..(25): SEQ ID NO: 1488; WAN024GMM_at; Start 133; Stop 157
tcagaaagaattttagcaacttggc

SEQ ID NO: 251519 - DNA, 25 bp, Artificial
  probe
  misc_feature (1)..(25): SEQ ID NO: 1488; WAN024GMM_at; Start 26; Stop 50
cagtacggaagacaccaatggcaag

SEQ ID NO: 251520 - DNA, 25 bp, Artificial
  probe
  misc_feature (1)..(25): SEQ ID NO: 1488; WAN024GMM_at; Start 342; Stop 366
gaaaccaggttctacttgaatcatc

SEQ ID NO: 251521 - DNA, 25 bp, Artificial
  probe
  misc_feature (1)..(25): SEQ ID NO: 1488; WAN024GMM_at; Start 83; Stop 107
tagagattaaaagagtgataccagc

SEQ ID NO: 251522 - DNA, 25 bp, Artificial
  probe
  misc_feature (1)..(25): SEQ ID NO: 1488; WAN024GMM_at; Start 178; Stop 202
tcttcagttgttgtagcttcggcag

SEQ ID NO: 251523 - DNA, 25 bp, Artificial
  probe
  misc_feature (1)..(25): SEQ ID NO: 1488; WAN024GMM_at; Start 570; Stop 594
caaagatttagcacttgcgtaggca

SEQ ID NO: 251524 - DNA, 25 bp, Artificial
  probe
  misc_feature (1)..(25): SEQ ID NO: 1488; WAN024GMM_at; Start 673; Stop 697
gttggactcatacctgcgataatca

SEQ ID NO: 251525 - DNA, 25 bp, Artificial
  probe
  misc_feature (1)..(25): SEQ ID NO: 1488; WAN024GMM_at; Start 458; Stop 482
tttgagcgaagtctcccatggctgt

SEQ ID NO: 251526 - DNA, 25 bp, Artificial
  probe
  misc_feature (1)..(25): SEQ ID NO: 1488; WAN024GMM_at; Start 707; Stop 731
taccagaagtaagggcagggactag

SEQ ID NO: 251527 - DNA, 25 bp, Artificial
  probe
  misc_feature (1)..(25): SEQ ID NO: 1488; WAN024GMM_at; Start 552; Stop 576
tgcaccgttaaagtcatccaaagat

SEQ ID NO: 251528 - DNA, 25 bp, Artificial
  probe
  misc_feature (1)..(25): SEQ ID NO: 1488; WAN024GMM_at; Start 626; Stop 650
tagtatagtaactgctcgaaaaggc

SEQ ID NO: 251529 - DNA, 25 bp, Artificial
  probe
  misc_feature (1)..(25): SEQ ID NO: 1488; WAN024GMM_at; Start 228; Stop 252
caaggcaacttggtcatcttttgaa

SEQ ID NO: 251530 - DNA, 25 bp, Artificial
  probe
  misc_feature (1)..(25): SEQ ID NO: 1592; WAN024GMN_at; Start 568; Stop 592
gatgcttatgtttctgaacgtccag

SEQ ID NO: 251531 - DNA, 25 bp, Artificial
  probe
  misc_feature (1)..(25): SEQ ID NO: 1592; WAN024GMN_at; Start 1426; Stop 1450
cagacatttacaatcatcgccgtga

SEQ ID NO: 251532 - DNA, 25 bp, Artificial
  probe
  misc_feature (1)..(25): SEQ ID NO: 1592; WAN024GMN_at; Start 160; Stop 184
gatgggaccaatcagtatgccaacg

SEQ ID NO: 251533 - DNA, 25 bp, Artificial
  probe
  misc_feature (1)..(25): SEQ ID NO: 1592; WAN024GMN_at; Start 582; Stop 606
tgaacgtccagaagcactgactgct

SEQ ID NO: 251534 - DNA, 25 bp, Artificial
  probe
  misc_feature (1)..(25): SEQ ID NO: 1592; WAN024GMN_at; Start 1209; Stop 1233
tgacaagggacaatttgaagctgcg

SEQ ID NO: 251535 - DNA, 25 bp, Artificial
  probe
  misc_feature (1)..(25): SEQ ID NO: 1592; WAN024GMN_at; Start 912; Stop 936
tatcgtcggaaccatcataggtctc

SEQ ID NO: 251536 - DNA, 25 bp, Artificial
  probe
  misc_feature (1)..(25): SEQ ID NO: 1592; WAN024GMN_at; Start 512; Stop 536
aaacagccatgggagacttcgctca

SEQ ID NO: 251537 - DNA, 25 bp, Artificial
  probe
  misc_feature (1)..(25): SEQ ID NO: 1592; WAN024GMN_at; Start 494; Stop 518
tcccaggtgctaaaaaagaaacagc

SEQ ID NO: 251538 - DNA, 25 bp, Artificial
  probe
  misc_feature (1)..(25): SEQ ID NO: 1592; WAN024GMN_at; Start 754; Stop 778
gaccaagttgccttgatggatcgta

SEQ ID NO: 251539 - DNA, 25 bp, Artificial
  probe
  misc_feature (1)..(25): SEQ ID NO: 1592; WAN024GMN_at; Start 1015; Stop 1039
gtcggctgggttctcaatgtctaca

SEQ ID NO: 251540 - DNA, 25 bp, Artificial
  probe
  misc_feature (1)..(25): SEQ ID NO: 1592; WAN024GMN_at; Start 300; Stop 324
gattatcgcaggtatgagtccaact

SEQ ID NO: 251541 - DNA, 25 bp, Artificial
  probe
  misc_feature (1)..(25): SEQ ID NO: 1592; WAN024GMN_at; Start 682; Stop 706
gctatcgggcttcgtaaaaatgaca

SEQ ID NO: 251542 - DNA, 25 bp, Artificial
  probe
  misc_feature (1)..(25): SEQ ID NO: 1592; WAN024GMN_at; Start 1385; Stop 1409
tctcaggaaataccgtggcaacaca

SEQ ID NO: 251543 - DNA, 25 bp, Artificial
  probe
  misc_feature (1)..(25): SEQ ID NO: 1592; WAN024GMN_at; Start 776; Stop 800
gtatgatcaaggaacaacctgccga

SEQ ID NO: 251544 - DNA, 25 bp, Artificial
  probe
  misc_feature (1)..(25): SEQ ID NO: 1592; WAN024GMN_at; Start 795; Stop 819
tgccgaagctacaacaactgaagag

SEQ ID NO: 251545 - DNA, 25 bp, Artificial
  probe
  misc_feature (1)..(25): SEQ ID NO: 1592; WAN024GMN_at; Start 1038; Stop 1062
cattgaaattttccgtggtacgcca

SEQ ID NO: 251546 - DNA, 25 bp, Artificial
  probe
  misc_feature (1)..(25): SEQ ID NO: 1592; WAN024GMN_at; Start 600; Stop 624
gactgctgaagctgcgaactctaag

SEQ ID NO: 251547 - DNA, 25 bp, Artificial
  probe
  misc_feature (1)..(25): SEQ ID NO: 1592; WAN024GMN_at; Start 667; Stop 691
gaagatacagctatcgctatcgggc

SEQ ID NO: 251548 - DNA, 25 bp, Artificial
  probe
  misc_feature (1)..(25): SEQ ID NO: 1592; WAN024GMN_at; Start 106; Stop 130
tatgctccctttaactggacccagg

SEQ ID NO: 251549 - DNA, 25 bp, Artificial
  probe
  misc_feature (1)..(25): SEQ ID NO: 1592; WAN024GMN_at; Start 192; Stop 216
tgttcaaatcgccaagaaaatcgct

SEQ ID NO: 251550 - DNA, 25 bp, Artificial
  probe
  misc_feature (1)..(25): SEQ ID NO: 1592; WAN024GMN_at; Start 1225; Stop 1249
gaagctgcgactgctcttggtatga

SEQ ID NO: 251551 - DNA, 25 bp, Artificial
  probe
  misc_feature (1)..(25): SEQ ID NO: 1592; WAN024GMN_at; Start 874; Stop 898
caactcttgcgtggtgctggtatca

SEQ ID NO: 251552 - DNA, 25 bp, Artificial
  probe
  misc_feature (1)..(25): SEQ ID NO: 1592; WAN024GMN_at; Start 1531; Stop 1555
ggtgctaaccaaatgcaaacggagg

SEQ ID NO: 251553 - DNA, 25 bp, Artificial
  probe
  misc_feature (1)..(25): SEQ ID NO: 1592; WAN024GMN_at; Start 121; Stop 145
tggacccaggatgatgatagcaacg

SEQ ID NO: 251554 - DNA, 25 bp, Artificial
  probe
  misc_feature (1)..(25): SEQ ID NO: 1592; WAN024GMN_at; Start 314; Stop 338
tgagtccaactgcagaacgcaaaca

SEQ ID NO: 251555 - DNA, 25 bp, Artificial
  probe
  misc_feature (1)..(25): SEQ ID NO: 1592; WAN024GMN_at; Start 27; Stop 51
cacaagtctcttgctgatgctagga

SEQ ID NO: 251556 - DNA, 25 bp, Artificial
  probe
  misc_feature (1)..(25): SEQ ID NO: 1592; WAN024GMN_at; Start 50; Stop 74
gacttgtcaatgttgctcaagccga

SEQ ID NO: 251557 - DNA, 25 bp, Artificial
  probe
  misc_feature (1)..(25): SEQ ID NO: 1592; WAN024GMN_at; Start 389; Stop 413
tcaaaaaagattctgcctacgcaag

SEQ ID NO: 251558 - DNA, 25 bp, Artificial
  probe
  misc_feature (1)..(25): SEQ ID NO: 1592; WAN024GMN_at; Start 855; Stop 879
tctttctgaaaactggcaacaactc

SEQ ID NO: 251559 - DNA, 25 bp, Artificial
  probe
  misc_feature (1)..(25): SEQ ID NO: 1592; WAN024GMN_at; Start 252; Stop 276
caagtgggaaggtctagtccctgcc

SEQ ID NO: 251560 - DNA, 25 bp, Artificial
  probe
  misc_feature (1)..(25): SEQ ID NO: 1592; WAN024GMN_at; Start 1159; Stop 1183
aataccggtgcctacatgactgaaa

SEQ ID NO: 251561 - DNA, 25 bp, Artificial
  probe
  misc_feature (1)..(25): SEQ ID NO: 1592; WAN024GMN_at; Start 175; Stop 199
tatgccaacggatacgatgttcaaa

SEQ ID NO: 251562 - DNA, 25 bp, Artificial
  probe
  misc_feature (1)..(25): SEQ ID NO: 1592; WAN024GMN_at; Start 1087; Stop 1111
tactatggaactgcccaagctttcg

SEQ ID NO: 251563 - DNA, 25 bp, Artificial
  probe
  misc_feature (1)..(25): SEQ ID NO: 1592; WAN024GMN_at; Start 141; Stop 165
caacggagctgtcaaaatcgatggg

SEQ ID NO: 251564 - DNA, 25 bp, Artificial
  probe
  misc_feature (1)..(25): SEQ ID NO: 5836; WAN024GMO_at; Start 51; Stop 75
cattacaagtataggctactccctg

SEQ ID NO: 251565 - DNA, 25 bp, Artificial
  probe
  misc_feature (1)..(25): SEQ ID NO: 5836; WAN024GMO_at; Start 81; Stop 105
gatttcccgcagaagcgcagactac

SEQ ID NO: 251566 - DNA, 25 bp, Artificial
  probe
  misc_feature (1)..(25): SEQ ID NO: 5836; WAN024GMO_at; Start 123; Stop 147
ccttgctgagctgggaaatggcata

SEQ ID NO: 251567 - DNA, 25 bp, Artificial
  probe
  misc_feature (1)..(25): SEQ ID NO: 5836; WAN024GMO_at; Start 35; Stop 59
gcaggaattttcatttcattacaag

SEQ ID NO: 251568 - DNA, 25 bp, Artificial
  probe
  misc_feature (1)..(25): SEQ ID NO: 5836; WAN024GMO_at; Start 15; Stop 39
taatgggcataaagatagtagcagg

SEQ ID NO: 251569 - DNA, 25 bp, Artificial
  probe
  misc_feature (1)..(25): SEQ ID NO: 5836; WAN024GMO_at; Start 114; Stop 138
cacgttcttccttgctgagctggga

SEQ ID NO: 251570 - DNA, 25 bp, Artificial
  probe
  misc_feature (1)..(25): SEQ ID NO: 5836; WAN024GMO_at; Start 54; Stop 78
tacaagtataggctactccctgcgc

SEQ ID NO: 251571 - DNA, 25 bp, Artificial
  probe
  misc_feature (1)..(25): SEQ ID NO: 5836; WAN024GMO_at; Start 1; Stop 25
ttgttgtggcgtagtaatgggcata

SEQ ID NO: 251572 - DNA, 25 bp, Artificial
  probe
  misc_feature (1)..(25): SEQ ID NO: 5836; WAN024GMO_at; Start 142; Stop 166
ggcataataggcaccacgaatttta

SEQ ID NO: 251573 - DNA, 25 bp, Artificial
  probe
  misc_feature (1)..(25): SEQ ID NO: 5836; WAN024GMO_at; Start 74; Stop 98
tgcgcatgatttcccgcagaagcgc

SEQ ID NO: 251574 - DNA, 25 bp, Artificial
  probe
  misc_feature (1)..(25): SEQ ID NO: 5836; WAN024GMO_at; Start 165; Stop 189
taaaggagcgaacacgctgggcatt

SEQ ID NO: 251575 - DNA, 25 bp, Artificial
  probe
  misc_feature (1)..(25): SEQ ID NO: 5836; WAN024GMO_at; Start 91; Stop 115
agaagcgcagactaccccacgttca

SEQ ID NO: 251576 - DNA, 25 bp, Artificial
  probe
  misc_feature (1)..(25): SEQ ID NO: 5836; WAN024GMO_at; Start 149; Stop 173
taggcaccacgaattttaaaggagc

SEQ ID NO: 251577 - DNA, 25 bp, Artificial
  probe
  misc_feature (1)..(25): SEQ ID NO: 5836; WAN024GMO_at; Start 59; Stop 83
gtataggctactccctgcgcatgat

SEQ ID NO: 251578 - DNA, 25 bp, Artificial
  probe
  misc_feature (1)..(25): SEQ ID NO: 5836; WAN024GMO_at; Start 162; Stop 186
ttttaaaggagcgaacacgctgggc

SEQ ID NO: 251579 - DNA, 25 bp, Artificial
  probe
  misc_feature (1)..(25): SEQ ID NO: 5836; WAN024GMO_at; Start 119; Stop 143
tcttccttgctgagctgggaaatgg

SEQ ID NO: 251580 - DNA, 25 bp, Artificial
  probe
  misc_feature (1)..(25): SEQ ID NO: 5836; WAN024GMO_at; Start 62; Stop 86
taggctactccctgcgcatgatttc

SEQ ID NO: 251581 - DNA, 25 bp, Artificial
  probe
  misc_feature (1)..(25): SEQ ID NO: 5836; WAN024GMO_at; Start 127; Stop 151
gctgagctgggaaatggcataatag

SEQ ID NO: 251582 - DNA, 25 bp, Artificial
  probe
  misc_feature (1)..(25): SEQ ID NO: 5836; WAN024GMO_at; Start 159; Stop 183
gaattttaaaggagcgaacacgctg

SEQ ID NO: 251583 - DNA, 25 bp, Artificial
  probe
  misc_feature (1)..(25): SEQ ID NO: 5836; WAN024GMO_at; Start 207; Stop 231
tcttagcaccatacttctccgataa

SEQ ID NO: 251584 - DNA, 25 bp, Artificial
  probe
  misc_feature (1)..(25): SEQ ID NO: 5836; WAN024GMO_at; Start 45; Stop 69
tcatttcattacaagtataggctac

SEQ ID NO: 251585 - DNA, 25 bp, Artificial
  probe
  misc_feature (1)..(25): SEQ ID NO: 5836; WAN024GMO_at; Start 108; Stop 132
cacgttcacgttcttccttgctgag

SEQ ID NO: 251586 - DNA, 25 bp, Artificial
  probe
  misc_feature (1)..(25): SEQ ID NO: 5836; WAN024GMO_at; Start 22; Stop 46
cataaagatagtagcaggaattttc

SEQ ID NO: 251587 - DNA, 25 bp, Artificial
  probe
  misc_feature (1)..(25): SEQ ID NO: 5836; WAN024GMO_at; Start 136; Stop 160
ggaaatggcataataggcaccacga

SEQ ID NO: 251588 - DNA, 25 bp, Artificial
  probe
  misc_feature (1)..(25): SEQ ID NO: 5836; WAN024GMO_at; Start 78; Stop 102
catgatttcccgcagaagcgcagac

SEQ ID NO: 251589 - DNA, 25 bp, Artificial
  probe
  misc_feature (1)..(25): SEQ ID NO: 5836; WAN024GMO_at; Start 156; Stop 180
cacgaattttaaaggagcgaacacg

SEQ ID NO: 251590 - DNA, 25 bp, Artificial
  probe
  misc_feature (1)..(25): SEQ ID NO: 5836; WAN024GMO_at; Start 152; Stop 176
gcaccacgaattttaaaggagcgaa

SEQ ID NO: 251591 - DNA, 25 bp, Artificial
  probe
  misc_feature (1)..(25): SEQ ID NO: 5836; WAN024GMO_at; Start 5; Stop 29
tgtggcgtagtaatgggcataaaga

SEQ ID NO: 251592 - DNA, 25 bp, Artificial
  probe
  misc_feature (1)..(25): SEQ ID NO: 5836; WAN024GMO_at; Start 132; Stop 156
gctgggaaatggcataataggcacc

SEQ ID NO: 251593 - DNA, 25 bp, Artificial
  probe
  misc_feature (1)..(25): SEQ ID NO: 5836; WAN024GMO_at; Start 193; Stop 217
ttttttcaaataaatcttagcacca

SEQ ID NO: 251594 - DNA, 25 bp, Artificial
  probe
  misc_feature (1)..(25): SEQ ID NO: 5836; WAN024GMO_at; Start 203; Stop 227
taaatcttagcaccatacttctccg

SEQ ID NO: 251595 - DNA, 25 bp, Artificial
  probe
  misc_feature (1)..(25): SEQ ID NO: 5836; WAN024GMO_at; Start 57; Stop 81
aagtataggctactccctgcgcatg

SEQ ID NO: 251596 - DNA, 25 bp, Artificial
  probe
  misc_feature (1)..(25): SEQ ID NO: 5836; WAN024GMO_at; Start 170; Stop 194
gagcgaacacgctgggcattttctt

SEQ ID NO: 251597 - DNA, 25 bp, Artificial
  probe
  misc_feature (1)..(25): SEQ ID NO: 5836; WAN024GMO_at; Start 18; Stop 42
tgggcataaagatagtagcaggaat

SEQ ID NO: 251598 - DNA, 25 bp, Artificial
  probe
  misc_feature (1)..(25): SEQ ID NO: 3053; WAN024GMP_at; Start 158; Stop 182
tctggacttgtttccttgatatagg

SEQ ID NO: 251599 - DNA, 25 bp, Artificial
  probe
  misc_feature (1)..(25): SEQ ID NO: 3053; WAN024GMP_at; Start 9; Stop 33
gagttgcttcataggtcaactgacc

SEQ ID NO: 251600 - DNA, 25 bp, Artificial
  probe
  misc_feature (1)..(25): SEQ ID NO: 3053; WAN024GMP_at; Start 68; Stop 92
tcaatttccttgagttttactggac

SEQ ID NO: 251601 - DNA, 25 bp, Artificial
  probe
  misc_feature (1)..(25): SEQ ID NO: 3053; WAN024GMP_at; Start 243; Stop 267
tcgattcttttcgagcttcttctaa

SEQ ID NO: 251602 - DNA, 25 bp, Artificial
  probe
  misc_feature (1)..(25): SEQ ID NO: 3053; WAN024GMP_at; Start 106; Stop 130
ggcagctttcatggaacgcgctcca

SEQ ID NO: 251603 - DNA, 25 bp, Artificial
  probe
  misc_feature (1)..(25): SEQ ID NO: 3053; WAN024GMP_at; Start 57; Stop 81
cagcaaatttatcaatttccttgag

SEQ ID NO: 251604 - DNA, 25 bp, Artificial
  probe
  misc_feature (1)..(25): SEQ ID NO: 3053; WAN024GMP_at; Start 38; Stop 62
ttttgcacagcaatcccatcagcaa

SEQ ID NO: 251605 - DNA, 25 bp, Artificial
  probe
  misc_feature (1)..(25): SEQ ID NO: 3053; WAN024GMP_at; Start 2; Stop 26
tgttgacgagttgcttcataggtca

SEQ ID NO: 251606 - DNA, 25 bp, Artificial
  probe
  misc_feature (1)..(25): SEQ ID NO: 3053; WAN024GMP_at; Start 42; Stop 66
gcacagcaatcccatcagcaaattt

SEQ ID NO: 251607 - DNA, 25 bp, Artificial
  probe
  misc_feature (1)..(25): SEQ ID NO: 3053; WAN024GMP_at; Start 79; Stop 103
gagttttactggacctccagcctca

SEQ ID NO: 251608 - DNA, 25 bp, Artificial
  probe
  misc_feature (1)..(25): SEQ ID NO: 3053; WAN024GMP_at; Start 216; Stop 240
caggaaccaagacagcatcaaaatc

SEQ ID NO: 251609 - DNA, 25 bp, Artificial
  probe
  misc_feature (1)..(25): SEQ ID NO: 3053; WAN024GMP_at; Start 110; Stop 134
gctttcatggaacgcgctccattcg

SEQ ID NO: 251610 - DNA, 25 bp, Artificial
  probe
  misc_feature (1)..(25): SEQ ID NO: 3053; WAN024GMP_at; Start 125; Stop 149
gctccattcgcctctactccgataa

SEQ ID NO: 251611 - DNA, 25 bp, Artificial
  probe
  misc_feature (1)..(25): SEQ ID NO: 3053; WAN024GMP_at; Start 102; Stop 126
caaaggcagctttcatggaacgcgc

SEQ ID NO: 251612 - DNA, 25 bp, Artificial
  probe
  misc_feature (1)..(25): SEQ ID NO: 3053; WAN024GMP_at; Start 197; Stop 221
atgagaccgccaccaccaacaggaa

SEQ ID NO: 251613 - DNA, 25 bp, Artificial
  probe
  misc_feature (1)..(25): SEQ ID NO: 3053; WAN024GMP_at; Start 74; Stop 98
tccttgagttttactggacctccag

SEQ ID NO: 251614 - DNA, 25 bp, Artificial
  probe
  misc_feature (1)..(25): SEQ ID NO: 3053; WAN024GMP_at; Start 183; Stop 207
tagaaaccccggcaatgagaccgcc

SEQ ID NO: 251615 - DNA, 25 bp, Artificial
  probe
  misc_feature (1)..(25): SEQ ID NO: 3053; WAN024GMP_at; Start 85; Stop 109
tactggacctccagcctcaaaggca

SEQ ID NO: 251616 - DNA, 25 bp, Artificial
  probe
  misc_feature (1)..(25): SEQ ID NO: 3053; WAN024GMP_at; Start 29; Stop 53
tgacctaccttttgcacagcaatcc

SEQ ID NO: 251617 - DNA, 25 bp, Artificial
  probe
  misc_feature (1)..(25): SEQ ID NO: 3053; WAN024GMP_at; Start 222; Stop 246
ccaagacagcatcaaaatcaatcga

SEQ ID NO: 251618 - DNA, 25 bp, Artificial
  probe
  misc_feature (1)..(25): SEQ ID NO: 3053; WAN024GMP_at; Start 212; Stop 236
ccaacaggaaccaagacagcatcaa

SEQ ID NO: 251619 - DNA, 25 bp, Artificial
  probe
  misc_feature (1)..(25): SEQ ID NO: 3053; WAN024GMP_at; Start 26; Stop 50
aactgacctaccttttgcacagcaa

SEQ ID NO: 251620 - DNA, 25 bp, Artificial
  probe
  misc_feature (1)..(25): SEQ ID NO: 3053; WAN024GMP_at; Start 172; Stop 196
cttgatataggtagaaaccccggca

SEQ ID NO: 251621 - DNA, 25 bp, Artificial
  probe
  misc_feature (1)..(25): SEQ ID NO: 3053; WAN024GMP_at; Start 22; Stop 46
ggtcaactgacctaccttttgcaca

SEQ ID NO: 251622 - DNA, 25 bp, Artificial
  probe
  misc_feature (1)..(25): SEQ ID NO: 3053; WAN024GMP_at; Start 96; Stop 120
cagcctcaaaggcagctttcatgga

SEQ ID NO: 251623 - DNA, 25 bp, Artificial
  probe
  misc_feature (1)..(25): SEQ ID NO: 3053; WAN024GMP_at; Start 226; Stop 250
gacagcatcaaaatcaatcgattct

SEQ ID NO: 251624 - DNA, 25 bp, Artificial
  probe
  misc_feature (1)..(25): SEQ ID NO: 3053; WAN024GMP_at; Start 89; Stop 113
ggacctccagcctcaaaggcagctt

SEQ ID NO: 251625 - DNA, 25 bp, Artificial
  probe
  misc_feature (1)..(25): SEQ ID NO: 3053; WAN024GMP_at; Start 144; Stop 168
cgataacctcaatctctggacttgt

SEQ ID NO: 251626 - DNA, 25 bp, Artificial
  probe
  misc_feature (1)..(25): SEQ ID NO: 3053; WAN024GMP_at; Start 153; Stop 177
caatctctggacttgtttccttgat

SEQ ID NO: 251627 - DNA, 25 bp, Artificial
  probe
  misc_feature (1)..(25): SEQ ID NO: 3053; WAN024GMP_at; Start 47; Stop 71
gcaatcccatcagcaaatttatcaa

SEQ ID NO: 251628 - DNA, 25 bp, Artificial
  probe
  misc_feature (1)..(25): SEQ ID NO: 3053; WAN024GMP_at; Start 139; Stop 163
tactccgataacctcaatctctgga

SEQ ID NO: 251629 - DNA, 25 bp, Artificial
  probe
  misc_feature (1)..(25): SEQ ID NO: 3053; WAN024GMP_at; Start 116; Stop 140
atggaacgcgctccattcgcctcta

SEQ ID NO: 251630 - DNA, 25 bp, Artificial
  probe
  misc_feature (1)..(25): SEQ ID NO: 3053; WAN024GMP_at; Start 234; Stop 258
caaaatcaatcgattcttttcgagc

SEQ ID NO: 251631 - DNA, 25 bp, Artificial
  probe
  misc_feature (1)..(25): SEQ ID NO: 3053; WAN024GMP_at; Start 177; Stop 201
tataggtagaaaccccggcaatgag

SEQ ID NO: 251632 - DNA, 25 bp, Artificial
  probe
  misc_feature (1)..(25): SEQ ID NO: 2996; WAN024GMQ_at; Start 235; Stop 259
catgcgcagggagtagcctatactt

SEQ ID NO: 251633 - DNA, 25 bp, Artificial
  probe
  misc_feature (1)..(25): SEQ ID NO: 2996; WAN024GMQ_at; Start 833; Stop 857
ggatagtcgcagaacctgctggagc

SEQ ID NO: 251634 - DNA, 25 bp, Artificial
  probe
  misc_feature (1)..(25): SEQ ID NO: 2996; WAN024GMQ_at; Start 818; Stop 842
tttactctaagcaagggatagtcgc

SEQ ID NO: 251635 - DNA, 25 bp, Artificial
  probe
  misc_feature (1)..(25): SEQ ID NO: 2996; WAN024GMQ_at; Start 448; Stop 472
gatgatgctcatgttcaagcaggtc

SEQ ID NO: 251636 - DNA, 25 bp, Artificial
  probe
  misc_feature (1)..(25): SEQ ID NO: 2996; WAN024GMQ_at; Start 82; Stop 106
tatttatcggagaagtatggtgcta

SEQ ID NO: 251637 - DNA, 25 bp, Artificial
  probe
  misc_feature (1)..(25): SEQ ID NO: 2996; WAN024GMQ_at; Start 18; Stop 42
tataatcaaggctcacaaggtcttg

SEQ ID NO: 251638 - DNA, 25 bp, Artificial
  probe
  misc_feature (1)..(25): SEQ ID NO: 2996; WAN024GMQ_at; Start 623; Stop 647
tagaggcgaatggagcgcgttccat

SEQ ID NO: 251639 - DNA, 25 bp, Artificial
  probe
  misc_feature (1)..(25): SEQ ID NO: 2996; WAN024GMQ_at; Start 596; Stop 620
caagtccagagattgaggttatcgg

SEQ ID NO: 251640 - DNA, 25 bp, Artificial
  probe
  misc_feature (1)..(25): SEQ ID NO: 2996; WAN024GMQ_at; Start 495; Stop 519
tttagaagaagctcgaaaagaatcg

SEQ ID NO: 251641 - DNA, 25 bp, Artificial
  probe
  misc_feature (1)..(25): SEQ ID NO: 2996; WAN024GMQ_at; Start 738; Stop 762
gacctatgaagcaactcgtcaacat

SEQ ID NO: 251642 - DNA, 25 bp, Artificial
  probe
  misc_feature (1)..(25): SEQ ID NO: 2996; WAN024GMQ_at; Start 1024; Stop 1048
cgtccaggagctttgcgtgagtttg

SEQ ID NO: 251643 - DNA, 25 bp, Artificial
  probe
  misc_feature (1)..(25): SEQ ID NO: 2996; WAN024GMQ_at; Start 783; Stop 807
cgatgagggattgatttctgaaacc

SEQ ID NO: 251644 - DNA, 25 bp, Artificial
  probe
  misc_feature (1)..(25): SEQ ID NO: 2996; WAN024GMQ_at; Start 462; Stop 486
tcaagcaggtcaaggaacagttgct

SEQ ID NO: 251645 - DNA, 25 bp, Artificial
  probe
  misc_feature (1)..(25): SEQ ID NO: 2996; WAN024GMQ_at; Start 121; Stop 145
aaagaaaatgcccagcgtgttcgct

SEQ ID NO: 251646 - DNA, 25 bp, Artificial
  probe
  misc_feature (1)..(25): SEQ ID NO: 2996; WAN024GMQ_at; Start 581; Stop 605
cctatatcaaggaaacaagtccaga

SEQ ID NO: 251647 - DNA, 25 bp, Artificial
  probe
  misc_feature (1)..(25): SEQ ID NO: 2996; WAN024GMQ_at; Start 310; Stop 334
caacaaaagattggtcaggttcgct

SEQ ID NO: 251648 - DNA, 25 bp, Artificial
  probe
  misc_feature (1)..(25): SEQ ID NO: 2996; WAN024GMQ_at; Start 136; Stop 160
cgtgttcgctcctttaaaattcgtg

SEQ ID NO: 251649 - DNA, 25 bp, Artificial
  probe
  misc_feature (1)..(25): SEQ ID NO: 2996; WAN024GMQ_at; Start 951; Stop 975
tatgccagaaatggaagagcgtgcc

SEQ ID NO: 251650 - DNA, 25 bp, Artificial
  probe
  misc_feature (1)..(25): SEQ ID NO: 2996; WAN024GMQ_at; Start 370; Stop 394
ggagatacctttgatgcctcagcca

SEQ ID NO: 251651 - DNA, 25 bp, Artificial
  probe
  misc_feature (1)..(25): SEQ ID NO: 2996; WAN024GMQ_at; Start 391; Stop 415
gccaaagcagctcaagaatttacag

SEQ ID NO: 251652 - DNA, 25 bp, Artificial
  probe
  misc_feature (1)..(25): SEQ ID NO: 2996; WAN024GMQ_at; Start 909; Stop 933
catttgttgtatcatttctggagga

SEQ ID NO: 251653 - DNA, 25 bp, Artificial
  probe
  misc_feature (1)..(25): SEQ ID NO: 2996; WAN024GMQ_at; Start 169; Stop 193
tatgccatttcccagctcagcaagg

SEQ ID NO: 251654 - DNA, 25 bp, Artificial
  probe
  misc_feature (1)..(25): SEQ ID NO: 2996; WAN024GMQ_at; Start 150; Stop 174
taaaattcgtggtgcctattatgcc

SEQ ID NO: 251655 - DNA, 25 bp, Artificial
  probe
  misc_feature (1)..(25): SEQ ID NO: 2996; WAN024GMQ_at; Start 185; Stop 209
tcagcaaggaagaacgtgaacgtgg

SEQ ID NO: 251656 - DNA, 25 bp, Artificial
  probe
  misc_feature (1)..(25): SEQ ID NO: 2996; WAN024GMQ_at; Start 651; Stop 675
agctgcctttgaggctggaggtcca

SEQ ID NO: 251657 - DNA, 25 bp, Artificial
  probe
  misc_feature (1)..(25): SEQ ID NO: 2996; WAN024GMQ_at; Start 717; Stop 741
tgtgcaaaaggtaggtcagttgacc

SEQ ID NO: 251658 - DNA, 25 bp, Artificial
  probe
  misc_feature (1)..(25): SEQ ID NO: 2996; WAN024GMQ_at; Start 936; Stop 960
taatgatatcaaccgtatgccagaa

SEQ ID NO: 251659 - DNA, 25 bp, Artificial
  probe
  misc_feature (1)..(25): SEQ ID NO: 2996; WAN024GMQ_at; Start 1090; Stop 1114
gagtatatcaaacgagctagcaagg

SEQ ID NO: 251660 - DNA, 25 bp, Artificial
  probe
  misc_feature (1)..(25): SEQ ID NO: 2996; WAN024GMQ_at; Start 41; Stop 65
tgaacggtgtggttgtgaatactcc

SEQ ID NO: 251661 - DNA, 25 bp, Artificial
  probe
  misc_feature (1)..(25): SEQ ID NO: 2996; WAN024GMQ_at; Start 1105; Stop 1129
gctagcaagggaacaggcccagtat

SEQ ID NO: 251662 - DNA, 25 bp, Artificial
  probe
  misc_feature (1)..(25): SEQ ID NO: 2996; WAN024GMQ_at; Start 637; Stop 661
gcgcgttccatgaaagctgcctttg

SEQ ID NO: 251663 - DNA, 25 bp, Artificial
  probe
  misc_feature (1)..(25): SEQ ID NO: 2996; WAN024GMQ_at; Start 1063; Stop 1087
gggccaaatgatgatatcacacgtt

SEQ ID NO: 251664 - DNA, 25 bp, Artificial
  probe
  misc_feature (1)..(25): SEQ ID NO: 2996; WAN024GMQ_at; Start 218; Stop 242
gcgcttctgcgggaaatcatgcgca

SEQ ID NO: 251665 - DNA, 25 bp, Artificial
  probe
  misc_feature (1)..(25): SEQ ID NO: 2996; WAN024GMQ_at; Start 802; Stop 826
gaaaccttgattgacctttactcta

SEQ ID NO: 251666 - DNA, 25 bp, Artificial
  probe
  misc_feature (1)..(25): SEQ ID NO: 1856; WAN024GMR_at; Start 222; Stop 246
catacgaccaatctgctttattttg

SEQ ID NO: 251667 - DNA, 25 bp, Artificial
  probe
  misc_feature (1)..(25): SEQ ID NO: 1856; WAN024GMR_at; Start 111; Stop 135
gaccttcttctctagctatttgtgc

SEQ ID NO: 251668 - DNA, 25 bp, Artificial
  probe
  misc_feature (1)..(25): SEQ ID NO: 1856; WAN024GMR_at; Start 164; Stop 188
tgcaacctaccatcttcaaaattag

SEQ ID NO: 251669 - DNA, 25 bp, Artificial
  probe
  misc_feature (1)..(25): SEQ ID NO: 1856; WAN024GMR_at; Start 231; Stop 255
aatctgctttattttggtctgctag

SEQ ID NO: 251670 - DNA, 25 bp, Artificial
  probe
  misc_feature (1)..(25): SEQ ID NO: 1856; WAN024GMR_at; Start 80; Stop 104
ccagctctctcaaacggagaatgaa

SEQ ID NO: 251671 - DNA, 25 bp, Artificial
  probe
  misc_feature (1)..(25): SEQ ID NO: 1856; WAN024GMR_at; Start 94; Stop 118
cggagaatgaatttcaagaccttct

SEQ ID NO: 251672 - DNA, 25 bp, Artificial
  probe
  misc_feature (1)..(25): SEQ ID NO: 1856; WAN024GMR_at; Start 171; Stop 195
taccatcttcaaaattagcatcatc

SEQ ID NO: 251673 - DNA, 25 bp, Artificial
  probe
  misc_feature (1)..(25): SEQ ID NO: 1856; WAN024GMR_at; Start 59; Stop 83
taacgagcagatttagtcgcaccag

SEQ ID NO: 251674 - DNA, 25 bp, Artificial
  probe
  misc_feature (1)..(25): SEQ ID NO: 1856; WAN024GMR_at; Start 68; Stop 92
gatttagtcgcaccagctctctcaa

SEQ ID NO: 251675 - DNA, 25 bp, Artificial
  probe
  misc_feature (1)..(25): SEQ ID NO: 1856; WAN024GMR_at; Start 215; Stop 239
ttttcatcatacgaccaatctgctt

SEQ ID NO: 251676 - DNA, 25 bp, Artificial
  probe
  misc_feature (1)..(25): SEQ ID NO: 1856; WAN024GMR_at; Start 85; Stop 109
tctctcaaacggagaatgaatttca

SEQ ID NO: 251677 - DNA, 25 bp, Artificial
  probe
  misc_feature (1)..(25): SEQ ID NO: 1856; WAN024GMR_at; Start 133; Stop 157
tgccaatttgaagaattgttcaaag

SEQ ID NO: 251678 - DNA, 25 bp, Artificial
  probe
  misc_feature (1)..(25): SEQ ID NO: 1856; WAN024GMR_at; Start 42; Stop 66
aaatccatttcgctatataacgagc

SEQ ID NO: 251679 - DNA, 25 bp, Artificial
  probe
  misc_feature (1)..(25): SEQ ID NO: 1856; WAN024GMR_at; Start 74; Stop 98
gtcgcaccagctctctcaaacggag

SEQ ID NO: 251680 - DNA, 25 bp, Artificial
  probe
  misc_feature (1)..(25): SEQ ID NO: 1856; WAN024GMR_at; Start 102; Stop 126
gaatttcaagaccttcttctctagc

SEQ ID NO: 251681 - DNA, 25 bp, Artificial
  probe
  misc_feature (1)..(25): SEQ ID NO: 1856; WAN024GMR_at; Start 45; Stop 69
tccatttcgctatataacgagcaga

SEQ ID NO: 251682 - DNA, 25 bp, Artificial
  probe
  misc_feature (1)..(25): SEQ ID NO: 1856; WAN024GMR_at; Start 90; Stop 114
caaacggagaatgaatttcaagacc

SEQ ID NO: 251683 - DNA, 25 bp, Artificial
  probe
  misc_feature (1)..(25): SEQ ID NO: 1856; WAN024GMR_at; Start 159; Stop 183
tcatatgcaacctaccatcttcaaa

SEQ ID NO: 251684 - DNA, 25 bp, Artificial
  probe
  misc_feature (1)..(25): SEQ ID NO: 1856; WAN024GMR_at; Start 188; Stop 212
gcatcatcataaatgttaattacag

SEQ ID NO: 251685 - DNA, 25 bp, Artificial
  probe
  misc_feature (1)..(25): SEQ ID NO: 1856; WAN024GMR_at; Start 114; Stop 138
cttcttctctagctatttgtgccaa

SEQ ID NO: 251686 - DNA, 25 bp, Artificial
  probe
  misc_feature (1)..(25): SEQ ID NO: 1856; WAN024GMR_at; Start 30; Stop 54
ttttatttctcaaaatccatttcgc

SEQ ID NO: 251687 - DNA, 25 bp, Artificial
  probe
  misc_feature (1)..(25): SEQ ID NO: 1856; WAN024GMR_at; Start 50; Stop 74
ttcgctatataacgagcagatttag

SEQ ID NO: 251688 - DNA, 25 bp, Artificial
  probe
  misc_feature (1)..(25): SEQ ID NO: 1856; WAN024GMR_at; Start 57; Stop 81
tataacgagcagatttagtcgcacc

SEQ ID NO: 251689 - DNA, 25 bp, Artificial
  probe
  misc_feature (1)..(25): SEQ ID NO: 1856; WAN024GMR_at; Start 87; Stop 111
tctcaaacggagaatgaatttcaag

SEQ ID NO: 251690 - DNA, 25 bp, Artificial
  probe
  misc_feature (1)..(25): SEQ ID NO: 1856; WAN024GMR_at; Start 108; Stop 132
caagaccttcttctctagctatttg

SEQ ID NO: 251691 - DNA, 25 bp, Artificial
  probe
  misc_feature (1)..(25): SEQ ID NO: 1856; WAN024GMR_at; Start 121; Stop 145
tctagctatttgtgccaatttgaag

SEQ ID NO: 251692 - DNA, 25 bp, Artificial
  probe
  misc_feature (1)..(25): SEQ ID NO: 1856; WAN024GMR_at; Start 218; Stop 242
tcatcatacgaccaatctgctttat

SEQ ID NO: 251693 - DNA, 25 bp, Artificial
  probe
  misc_feature (1)..(25): SEQ ID NO: 1856; WAN024GMR_at; Start 39; Stop 63
tcaaaatccatttcgctatataacg

SEQ ID NO: 251694 - DNA, 25 bp, Artificial
  probe
  misc_feature (1)..(25): SEQ ID NO: 1856; WAN024GMR_at; Start 174; Stop 198
catcttcaaaattagcatcatcata

SEQ ID NO: 251695 - DNA, 25 bp, Artificial
  probe
  misc_feature (1)..(25): SEQ ID NO: 1856; WAN024GMR_at; Start 77; Stop 101
gcaccagctctctcaaacggagaat

SEQ ID NO: 251696 - DNA, 25 bp, Artificial
  probe
  misc_feature (1)..(25): SEQ ID NO: 1856; WAN024GMR_at; Start 125; Stop 149
gctatttgtgccaatttgaagaatt

SEQ ID NO: 251697 - DNA, 25 bp, Artificial
  probe
  misc_feature (1)..(25): SEQ ID NO: 1856; WAN024GMR_at; Start 64; Stop 88
agcagatttagtcgcaccagctctc

SEQ ID NO: 251698 - DNA, 25 bp, Artificial
  probe
  misc_feature (1)..(25): SEQ ID NO: 1856; WAN024GMR_at; Start 61; Stop 85
acgagcagatttagtcgcaccagct

SEQ ID NO: 251699 - DNA, 25 bp, Artificial
  probe
  misc_feature (1)..(25): SEQ ID NO: 1856; WAN024GMR_at; Start 53; Stop 77
gctatataacgagcagatttagtcg

SEQ ID NO: 251700 - DNA, 25 bp, Artificial
  probe
  misc_feature (1)..(25): SEQ ID NO: 5676; WAN024GMS_at; Start 181; Stop 205
gaaattcattctccgtttgagagag

SEQ ID NO: 251701 - DNA, 25 bp, Artificial
  probe
  misc_feature (1)..(25): SEQ ID NO: 5676; WAN024GMS_at; Start 163; Stop 187
gctagagaagaaggtcttgaaattc

SEQ ID NO: 251702 - DNA, 25 bp, Artificial
  probe
  misc_feature (1)..(25): SEQ ID NO: 5676; WAN024GMS_at; Start 154; Stop 178
gcacaaatagctagagaagaaggtc

SEQ ID NO: 251703 - DNA, 25 bp, Artificial
  probe
  misc_feature (1)..(25): SEQ ID NO: 5676; WAN024GMS_at; Start 51; Stop 75
agcagattggtcgtatgatgaaaat

SEQ ID NO: 251704 - DNA, 25 bp, Artificial
  probe
  misc_feature (1)..(25): SEQ ID NO: 5676; WAN024GMS_at; Start 2; Stop 26
tgtataatgtaattacaccgtcggt

SEQ ID NO: 251705 - DNA, 25 bp, Artificial
  probe
  misc_feature (1)..(25): SEQ ID NO: 5676; WAN024GMS_at; Start 213; Stop 237
gactaaatctgctcgttatatagcg

SEQ ID NO: 251706 - DNA, 25 bp, Artificial
  probe
  misc_feature (1)..(25): SEQ ID NO: 5676; WAN024GMS_at; Start 147; Stop 171
caaattggcacaaatagctagagaa

SEQ ID NO: 251707 - DNA, 25 bp, Artificial
  probe
  misc_feature (1)..(25): SEQ ID NO: 5676; WAN024GMS_at; Start 201; Stop 225
gagagctggtgcgactaaatctgct

SEQ ID NO: 251708 - DNA, 25 bp, Artificial
  probe
  misc_feature (1)..(25): SEQ ID NO: 5676; WAN024GMS_at; Start 216; Stop 240
taaatctgctcgttatatagcgaaa

SEQ ID NO: 251709 - DNA, 25 bp, Artificial
  probe
  misc_feature (1)..(25): SEQ ID NO: 5676; WAN024GMS_at; Start 135; Stop 159
tgaacaattcttcaaattggcacaa

SEQ ID NO: 251710 - DNA, 25 bp, Artificial
  probe
  misc_feature (1)..(25): SEQ ID NO: 5676; WAN024GMS_at; Start 226; Stop 250
cgttatatagcgaaatggattttga

SEQ ID NO: 251711 - DNA, 25 bp, Artificial
  probe
  misc_feature (1)..(25): SEQ ID NO: 5676; WAN024GMS_at; Start 23; Stop 47
cggtaatagtgctagcagaccaaaa

SEQ ID NO: 251712 - DNA, 25 bp, Artificial
  probe
  misc_feature (1)..(25): SEQ ID NO: 5676; WAN024GMS_at; Start 172; Stop 196
gaaggtcttgaaattcattctccgt

SEQ ID NO: 251713 - DNA, 25 bp, Artificial
  probe
  misc_feature (1)..(25): SEQ ID NO: 5676; WAN024GMS_at; Start 143; Stop 167
tcttcaaattggcacaaatagctag

SEQ ID NO: 251714 - DNA, 25 bp, Artificial
  probe
  misc_feature (1)..(25): SEQ ID NO: 5676; WAN024GMS_at; Start 208; Stop 232
ggtgcgactaaatctgctcgttata

SEQ ID NO: 251715 - DNA, 25 bp, Artificial
  probe
  misc_feature (1)..(25): SEQ ID NO: 5676; WAN024GMS_at; Start 235; Stop 259
gcgaaatggattttgagaaataaaa

SEQ ID NO: 251716 - DNA, 25 bp, Artificial
  probe
  misc_feature (1)..(25): SEQ ID NO: 5676; WAN024GMS_at; Start 157; Stop 181
caaatagctagagaagaaggtcttg

SEQ ID NO: 251717 - DNA, 25 bp, Artificial
  probe
  misc_feature (1)..(25): SEQ ID NO: 5676; WAN024GMS_at; Start 48; Stop 72
taaagcagattggtcgtatgatgaa

SEQ ID NO: 251718 - DNA, 25 bp, Artificial
  probe
  misc_feature (1)..(25): SEQ ID NO: 5676; WAN024GMS_at; Start 35; Stop 59
tagcagaccaaaataaagcagattg

SEQ ID NO: 251719 - DNA, 25 bp, Artificial
  probe
  misc_feature (1)..(25): SEQ ID NO: 5676; WAN024GMS_at; Start 106; Stop 130
tttgaagatggtaggttgcatatga

SEQ ID NO: 251720 - DNA, 25 bp, Artificial
  probe
  misc_feature (1)..(25): SEQ ID NO: 5676; WAN024GMS_at; Start 17; Stop 41
caccgtcggtaatagtgctagcaga

SEQ ID NO: 251721 - DNA, 25 bp, Artificial
  probe
  misc_feature (1)..(25): SEQ ID NO: 5676; WAN024GMS_at; Start 77; Stop 101
ctgtaattaacatttatgatgatgc

SEQ ID NO: 251722 - DNA, 25 bp, Artificial
  probe
  misc_feature (1)..(25): SEQ ID NO: 5676; WAN024GMS_at; Start 43; Stop 67
caaaataaagcagattggtcgtatg

SEQ ID NO: 251723 - DNA, 25 bp, Artificial
  probe
  misc_feature (1)..(25): SEQ ID NO: 5676; WAN024GMS_at; Start 197; Stop 221
ttgagagagctggtgcgactaaatc

SEQ ID NO: 251724 - DNA, 25 bp, Artificial
  probe
  misc_feature (1)..(25): SEQ ID NO: 5676; WAN024GMS_at; Start 205; Stop 229
gctggtgcgactaaatctgctcgtt

SEQ ID NO: 251725 - DNA, 25 bp, Artificial
  probe
  misc_feature (1)..(25): SEQ ID NO: 5676; WAN024GMS_at; Start 20; Stop 44
cgtcggtaatagtgctagcagacca

SEQ ID NO: 251726 - DNA, 25 bp, Artificial
  probe
  misc_feature (1)..(25): SEQ ID NO: 5676; WAN024GMS_at; Start 220; Stop 244
tctgctcgttatatagcgaaatgga

SEQ ID NO: 251727 - DNA, 25 bp, Artificial
  probe
  misc_feature (1)..(25): SEQ ID NO: 5676; WAN024GMS_at; Start 91; Stop 115
tatgatgatgctaattttgaagatg

SEQ ID NO: 251728 - DNA, 25 bp, Artificial
  probe
  misc_feature (1)..(25): SEQ ID NO: 5676; WAN024GMS_at; Start 29; Stop 53
tagtgctagcagaccaaaataaagc

SEQ ID NO: 251729 - DNA, 25 bp, Artificial
  probe
  misc_feature (1)..(25): SEQ ID NO: 5676; WAN024GMS_at; Start 191; Stop 215
ctccgtttgagagagctggtgcgac

SEQ ID NO: 251730 - DNA, 25 bp, Artificial
  probe
  misc_feature (1)..(25): SEQ ID NO: 5676; WAN024GMS_at; Start 186; Stop 210
tcattctccgtttgagagagctggt

SEQ ID NO: 251731 - DNA, 25 bp, Artificial
  probe
  misc_feature (1)..(25): SEQ ID NO: 5676; WAN024GMS_at; Start 193; Stop 217
ccgtttgagagagctggtgcgacta

SEQ ID NO: 251732 - DNA, 25 bp, Artificial
  probe
  misc_feature (1)..(25): SEQ ID NO: 5676; WAN024GMS_at; Start 101; Stop 125
ctaattttgaagatggtaggttgca

SEQ ID NO: 251733 - DNA, 25 bp, Artificial
  probe
  misc_feature (1)..(25): SEQ ID NO: 5676; WAN024GMS_at; Start 15; Stop 39
tacaccgtcggtaatagtgctagca

SEQ ID NO: 251734 - DNA, 25 bp, Artificial
  probe
  misc_feature (1)..(25): SEQ ID NO: 3884; WAN024GMT_at; Start 175; Stop 199
aacacctttacaccagtccatagca

SEQ ID NO: 251735 - DNA, 25 bp, Artificial
  probe
  misc_feature (1)..(25): SEQ ID NO: 3884; WAN024GMT_at; Start 428; Stop 452
tcttgttgaatttcgtctggcgcca

SEQ ID NO: 251736 - DNA, 25 bp, Artificial
  probe
  misc_feature (1)..(25): SEQ ID NO: 3884; WAN024GMT_at; Start 312; Stop 336
tgaagacatctacatccgcaggaac

SEQ ID NO: 251737 - DNA, 25 bp, Artificial
  probe
  misc_feature (1)..(25): SEQ ID NO: 3884; WAN024GMT_at; Start 255; Stop 279
caaatccttcttcgtaagtacgacg

SEQ ID NO: 251738 - DNA, 25 bp, Artificial
  probe
  misc_feature (1)..(25): SEQ ID NO: 3884; WAN024GMT_at; Start 67; Stop 91
ttcgataagggcagtcaaaccacca

SEQ ID NO: 251739 - DNA, 25 bp, Artificial
  probe
  misc_feature (1)..(25): SEQ ID NO: 3884; WAN024GMT_at; Start 147; Stop 171
tttcaagaagacctacacgagccgc

SEQ ID NO: 251740 - DNA, 25 bp, Artificial
  probe
  misc_feature (1)..(25): SEQ ID NO: 3884; WAN024GMT_at; Start 394; Stop 418
ttccaagtttggagcgatttctgct

SEQ ID NO: 251741 - DNA, 25 bp, Artificial
  probe
  misc_feature (1)..(25): SEQ ID NO: 3884; WAN024GMT_at; Start 6; Stop 30
gaacttcaaagtaagccaattctgg

SEQ ID NO: 251742 - DNA, 25 bp, Artificial
  probe
  misc_feature (1)..(25): SEQ ID NO: 3884; WAN024GMT_at; Start 549; Stop 573
caccgataataacgtcacgacctga

SEQ ID NO: 251743 - DNA, 25 bp, Artificial
  probe
  misc_feature (1)..(25): SEQ ID NO: 3884; WAN024GMT_at; Start 185; Stop 209
caccagtccatagcaatgtttttag

SEQ ID NO: 251744 - DNA, 25 bp, Artificial
  probe
  misc_feature (1)..(25): SEQ ID NO: 3884; WAN024GMT_at; Start 29; Stop 53
ggagcgtaacctgcttctgtcaaga

SEQ ID NO: 251745 - DNA, 25 bp, Artificial
  probe
  misc_feature (1)..(25): SEQ ID NO: 3884; WAN024GMT_at; Start 361; Stop 385
gaaaccatgggcaaatccaactgcg

SEQ ID NO: 251746 - DNA, 25 bp, Artificial
  probe
  misc_feature (1)..(25): SEQ ID NO: 3884; WAN024GMT_at; Start 405; Stop 429
gagcgatttctgcttcgtacaattc

SEQ ID NO: 251747 - DNA, 25 bp, Artificial
  probe
  misc_feature (1)..(25): SEQ ID NO: 3884; WAN024GMT_at; Start 297; Stop 321
ctttaggagcacacatgaagacatc

SEQ ID NO: 251748 - DNA, 25 bp, Artificial
  probe
  misc_feature (1)..(25): SEQ ID NO: 3884; WAN024GMT_at; Start 443; Stop 467
tctggcgccaagatcatgataacat

SEQ ID NO: 251749 - DNA, 25 bp, Artificial
  probe
  misc_feature (1)..(25): SEQ ID NO: 3884; WAN024GMT_at; Start 480; Stop 504
tagcttctgctactgtgtaagtatc

SEQ ID NO: 251750 - DNA, 25 bp, Artificial
  probe
  misc_feature (1)..(25): SEQ ID NO: 3884; WAN024GMT_at; Start 210; Stop 234
catttcctgttgcatcttggtatac

SEQ ID NO: 251751 - DNA, 25 bp, Artificial
  probe
  misc_feature (1)..(25): SEQ ID NO: 3884; WAN024GMT_at; Start 521; Stop 545
gctttatcaaaagatttacctggac

SEQ ID NO: 251752 - DNA, 25 bp, Artificial
  probe
  misc_feature (1)..(25): SEQ ID NO: 3884; WAN024GMT_at; Start 17; Stop 41
taagccaattctggagcgtaacctg

SEQ ID NO: 251753 - DNA, 25 bp, Artificial
  probe
  misc_feature (1)..(25): SEQ ID NO: 3884; WAN024GMT_at; Start 493; Stop 517
tgtgtaagtatcaaatccatcttct

SEQ ID NO: 251754 - DNA, 25 bp, Artificial
  probe
  misc_feature (1)..(25): SEQ ID NO: 3884; WAN024GMT_at; Start 269; Stop 293
taagtacgacgtaccaagtgtcctg

SEQ ID NO: 251755 - DNA, 25 bp, Artificial
  probe
  misc_feature (1)..(25): SEQ ID NO: 3884; WAN024GMT_at; Start 104; Stop 128
tgttcaccaaacaaatcttcttcag

SEQ ID NO: 251756 - DNA, 25 bp, Artificial
  probe
  misc_feature (1)..(25): SEQ ID NO: 3884; WAN024GMT_at; Start 376; Stop 400
tccaactgcgtttccagcttccaag

SEQ ID NO: 251757 - DNA, 25 bp, Artificial
  probe
  misc_feature (1)..(25): SEQ ID NO: 3884; WAN024GMT_at; Start 533; Stop 557
gatttacctggacgtacaccgataa

SEQ ID NO: 251758 - DNA, 25 bp, Artificial
  probe
  misc_feature (1)..(25): SEQ ID NO: 3884; WAN024GMT_at; Start 56; Stop 80
tcgaaacctgcttcgataagggcag

SEQ ID NO: 251759 - DNA, 25 bp, Artificial
  probe
  misc_feature (1)..(25): SEQ ID NO: 3884; WAN024GMT_at; Start 77; Stop 101
gcagtcaaaccaccacaaagtacag

SEQ ID NO: 251760 - DNA, 25 bp, Artificial
  probe
  misc_feature (1)..(25): SEQ ID NO: 3884; WAN024GMT_at; Start 239; Stop 263
taaagagctggaacaccaaatcctt

SEQ ID NO: 251761 - DNA, 25 bp, Artificial
  probe
  misc_feature (1)..(25): SEQ ID NO: 3884; WAN024GMT_at; Start 324; Stop 348
catccgcaggaactttgataaattc

SEQ ID NO: 251762 - DNA, 25 bp, Artificial
  probe
  misc_feature (1)..(25): SEQ ID NO: 3884; WAN024GMT_at; Start 92; Stop 116
caaagtacagcttgttcaccaaaca

SEQ ID NO: 251763 - DNA, 25 bp, Artificial
  probe
  misc_feature (1)..(25): SEQ ID NO: 3884; WAN024GMT_at; Start 348; Stop 372
caaagtggatgttgaaaccatgggc

SEQ ID NO: 251764 - DNA, 25 bp, Artificial
  probe
  misc_feature (1)..(25): SEQ ID NO: 3884; WAN024GMT_at; Start 225; Stop 249
cttggtatactgcataaagagctgg

SEQ ID NO: 251765 - DNA, 25 bp, Artificial
  probe
  misc_feature (1)..(25): SEQ ID NO: 3884; WAN024GMT_at; Start 44; Stop 68
tctgtcaagacttcgaaacctgctt

SEQ ID NO: 251766 - DNA, 25 bp, Artificial
  probe
  misc_feature (1)..(25): SEQ ID NO: 3884; WAN024GMT_at; Start 283; Stop 307
caagtgtcctggtcctttaggagca

SEQ ID NO: 251767 - DNA, 25 bp, Artificial
  probe
  misc_feature (1)..(25): SEQ ID NO: 3884; WAN024GMT_at; Start 460; Stop 484
gataacatcagccaacttagtagct

SEQ ID NO: 251768 - DNA, 25 bp, Artificial
  probe
  misc_feature (1)..(25): SEQ ID NO: 1381; WAN024GMU_at; Start 424; Stop 448
gaagaaggatttggtgttccagctc

SEQ ID NO: 251769 - DNA, 25 bp, Artificial
  probe
  misc_feature (1)..(25): SEQ ID NO: 1381; WAN024GMU_at; Start 76; Stop 100
tatggttcacaagggcatgcgcatg

SEQ ID NO: 251770 - DNA, 25 bp, Artificial
  probe
  misc_feature (1)..(25): SEQ ID NO: 1381; WAN024GMU_at; Start 942; Stop 966
tgaaaaagttggtgcagaattgcgt

SEQ ID NO: 251771 - DNA, 25 bp, Artificial
  probe
  misc_feature (1)..(25): SEQ ID NO: 1381; WAN024GMU_at; Start 302; Stop 326
gaaacgcagttggatttgcccatgg

SEQ ID NO: 251772 - DNA, 25 bp, Artificial
  probe
  misc_feature (1)..(25): SEQ ID NO: 1381; WAN024GMU_at; Start 135; Stop 159
tatcggtgtacgtccaggtaaatct

SEQ ID NO: 251773 - DNA, 25 bp, Artificial
  probe
  misc_feature (1)..(25): SEQ ID NO: 1381; WAN024GMU_at; Start 202; Stop 226
gcagaagctactaagttggctgatg

SEQ ID NO: 251774 - DNA, 25 bp, Artificial
  probe
  misc_feature (1)..(25): SEQ ID NO: 1381; WAN024GMU_at; Start 787; Stop 811
ggtccacgtgtaatcactgaacaag

SEQ ID NO: 251775 - DNA, 25 bp, Artificial
  probe
  misc_feature (1)..(25): SEQ ID NO: 1381; WAN024GMU_at; Start 650; Stop 674
caggttacgctccagaattggctta

SEQ ID NO: 251776 - DNA, 25 bp, Artificial
  probe
  misc_feature (1)..(25): SEQ ID NO: 1381; WAN024GMU_at; Start 394; Stop 418
ggaccaggacacttggtacgtcgta

SEQ ID NO: 251777 - DNA, 25 bp, Artificial
  probe
  misc_feature (1)..(25): SEQ ID NO: 1381; WAN024GMU_at; Start 90; Stop 114
gcatgcgcatgctcaaaacttgcgt

SEQ ID NO: 251778 - DNA, 25 bp, Artificial
  probe
  misc_feature (1)..(25): SEQ ID NO: 1381; WAN024GMU_at; Start 721; Stop 745
gaaggtggattcaagaaaatgcgtc

SEQ ID NO: 251779 - DNA, 25 bp, Artificial
  probe
  misc_feature (1)..(25): SEQ ID NO: 1381; WAN024GMU_at; Start 343; Stop 367
gaatttatcaaagttcctgcggatg

SEQ ID NO: 251780 - DNA, 25 bp, Artificial
  probe
  misc_feature (1)..(25): SEQ ID NO: 1381; WAN024GMU_at; Start 834; Stop 858
cttggcagacatccaaaatggtaaa

SEQ ID NO: 251781 - DNA, 25 bp, Artificial
  probe
  misc_feature (1)..(25): SEQ ID NO: 1381; WAN024GMU_at; Start 520; Stop 544
gcggctcgtgtaggtcttcttgaaa

SEQ ID NO: 251782 - DNA, 25 bp, Artificial
  probe
  misc_feature (1)..(25): SEQ ID NO: 1381; WAN024GMU_at; Start 186; Stop 210
tgatacttacacagtagcagaagct

SEQ ID NO: 251783 - DNA, 25 bp, Artificial
  probe
  misc_feature (1)..(25): SEQ ID NO: 1381; WAN024GMU_at; Start 28; Stop 52
gatgttaaagtagcagcacttgacg

SEQ ID NO: 251784 - DNA, 25 bp, Artificial
  probe
  misc_feature (1)..(25): SEQ ID NO: 1381; WAN024GMU_at; Start 223; Stop 247
gatgttatcatgatcttggcgccag

SEQ ID NO: 251785 - DNA, 25 bp, Artificial
  probe
  misc_feature (1)..(25): SEQ ID NO: 1381; WAN024GMU_at; Start 819; Stop 843
aaatatgaaggctgtcttggcagac

SEQ ID NO: 251786 - DNA, 25 bp, Artificial
  probe
  misc_feature (1)..(25): SEQ ID NO: 1381; WAN024GMU_at; Start 984; Stop 1008
tggtaaaaacgacgatgatgcattc

SEQ ID NO: 251787 - DNA, 25 bp, Artificial
  probe
  misc_feature (1)..(25): SEQ ID NO: 1381; WAN024GMU_at; Start 899; Stop 923
caaaattgactgcttaccgtgaaca

SEQ ID NO: 251788 - DNA, 25 bp, Artificial
  probe
  misc_feature (1)..(25): SEQ ID NO: 1381; WAN024GMU_at; Start 885; Stop 909
taaagctggacgtccaaaattgact

SEQ ID NO: 251789 - DNA, 25 bp, Artificial
  probe
  misc_feature (1)..(25): SEQ ID NO: 1381; WAN024GMU_at; Start 355; Stop 379
gttcctgcggatgtagatgtcttca

SEQ ID NO: 251790 - DNA, 25 bp, Artificial
  probe
  misc_feature (1)..(25): SEQ ID NO: 1381; WAN024GMU_at; Start 913; Stop 937
taccgtgaacaagcagctaaccttg

SEQ ID NO: 251791 - DNA, 25 bp, Artificial
  probe
  misc_feature (1)..(25): SEQ ID NO: 1381; WAN024GMU_at; Start 755; Stop 779
caaacactgctgaatacggtgacta

SEQ ID NO: 251792 - DNA, 25 bp, Artificial
  probe
  misc_feature (1)..(25): SEQ ID NO: 1381; WAN024GMU_at; Start 378; Stop 402
catgtgtgctcctaaaggaccagga

SEQ ID NO: 251793 - DNA, 25 bp, Artificial
  probe
  misc_feature (1)..(25): SEQ ID NO: 1381; WAN024GMU_at; Start 105; Stop 129
aaacttgcgtgattcaggtcgtgac

SEQ ID NO: 251794 - DNA, 25 bp, Artificial
  probe
  misc_feature (1)..(25): SEQ ID NO: 1381; WAN024GMU_at; Start 238; Stop 262
ttggcgccagacgaaattcaacaag

SEQ ID NO: 251795 - DNA, 25 bp, Artificial
  probe
  misc_feature (1)..(25): SEQ ID NO: 1381; WAN024GMU_at; Start 705; Stop 729
cgttgacttgatctacgaaggtgga

SEQ ID NO: 251796 - DNA, 25 bp, Artificial
  probe
  misc_feature (1)..(25): SEQ ID NO: 1381; WAN024GMU_at; Start 769; Stop 793
tacggtgactatgtatcaggtccac

SEQ ID NO: 251797 - DNA, 25 bp, Artificial
  probe
  misc_feature (1)..(25): SEQ ID NO: 1381; WAN024GMU_at; Start 63; Stop 87
cgccgttatcggttatggttcacaa

SEQ ID NO: 251798 - DNA, 25 bp, Artificial
  probe
  misc_feature (1)..(25): SEQ ID NO: 1381; WAN024GMU_at; Start 622; Stop 646
gaagcaggtttcgaagtcttgacag

SEQ ID NO: 251799 - DNA, 25 bp, Artificial
  probe
  misc_feature (1)..(25): SEQ ID NO: 1381; WAN024GMU_at; Start 638; Stop 662
tcttgacagaagcaggttacgctcc

SEQ ID NO: 251800 - DNA, 25 bp, Artificial
  probe
  misc_feature (1)..(25): SEQ ID NO: 1381; WAN024GMU_at; Start 263; Stop 287
aattgtacgaagcagaaatcgctcc

SEQ ID NO: 251801 - DNA, 25 bp, Artificial
  probe
  misc_feature (1)..(25): SEQ ID NO: 1381; WAN024GMU_at; Start 601; Stop 625
ggtggtttgactgcccttatcgaag

SEQ ID NO: 251802 - DNA, 25 bp, Artificial
  probe
  misc_feature (1)..(25): SEQ ID NO: 2254; WAN024GMV_at; Start 44; Stop 68
cgaacttggtaattgtacttagtga

SEQ ID NO: 251803 - DNA, 25 bp, Artificial
  probe
  misc_feature (1)..(25): SEQ ID NO: 2254; WAN024GMV_at; Start 188; Stop 212
cctgtaatggcatttgttgctcctg

SEQ ID NO: 251804 - DNA, 25 bp, Artificial
  probe
  misc_feature (1)..(25): SEQ ID NO: 2254; WAN024GMV_at; Start 202; Stop 226
tgttgctcctggtccactagtgacg

SEQ ID NO: 251805 - DNA, 25 bp, Artificial
  probe
  misc_feature (1)..(25): SEQ ID NO: 2254; WAN024GMV_at; Start 33; Stop 57
cagctgtctcacgaacttggtaatt

SEQ ID NO: 251806 - DNA, 25 bp, Artificial
  probe
  misc_feature (1)..(25): SEQ ID NO: 2254; WAN024GMV_at; Start 11; Stop 35
tccgtaatgatacgcggaatatcag

SEQ ID NO: 251807 - DNA, 25 bp, Artificial
  probe
  misc_feature (1)..(25): SEQ ID NO: 2254; WAN024GMV_at; Start 15; Stop 39
taatgatacgcggaatatcagctgt

SEQ ID NO: 251808 - DNA, 25 bp, Artificial
  probe
  misc_feature (1)..(25): SEQ ID NO: 2254; WAN024GMV_at; Start 90; Stop 114
tgtctgcctcctgaaaggcatcctt

SEQ ID NO: 251809 - DNA, 25 bp, Artificial
  probe
  misc_feature (1)..(25): SEQ ID NO: 2254; WAN024GMV_at; Start 30; Stop 54
tatcagctgtctcacgaacttggta

SEQ ID NO: 251810 - DNA, 25 bp, Artificial
  probe
  misc_feature (1)..(25): SEQ ID NO: 2254; WAN024GMV_at; Start 2; Stop 26
tggacagcttccgtaatgatacgcg

SEQ ID NO: 251811 - DNA, 25 bp, Artificial
  probe
  misc_feature (1)..(25): SEQ ID NO: 2254; WAN024GMV_at; Start 101; Stop 125
tgaaaggcatccttcccaatccctg

SEQ ID NO: 251812 - DNA, 25 bp, Artificial
  probe
  misc_feature (1)..(25): SEQ ID NO: 2254; WAN024GMV_at; Start 192; Stop 216
taatggcatttgttgctcctggtcc

SEQ ID NO: 251813 - DNA, 25 bp, Artificial
  probe
  misc_feature (1)..(25): SEQ ID NO: 2254; WAN024GMV_at; Start 133; Stop 157
cacctgacctgtaaagaccaaaagg

SEQ ID NO: 251814 - DNA, 25 bp, Artificial
  probe
  misc_feature (1)..(25): SEQ ID NO: 2254; WAN024GMV_at; Start 228; Stop 252
cggcaacacccaactttccagttga

SEQ ID NO: 251815 - DNA, 25 bp, Artificial
  probe
  misc_feature (1)..(25): SEQ ID NO: 2254; WAN024GMV_at; Start 27; Stop 51
gaatatcagctgtctcacgaacttg

SEQ ID NO: 251816 - DNA, 25 bp, Artificial
  probe
  misc_feature (1)..(25): SEQ ID NO: 2254; WAN024GMV_at; Start 183; Stop 207
caatccctgtaatggcatttgttgc

SEQ ID NO: 251817 - DNA, 25 bp, Artificial
  probe
  misc_feature (1)..(25): SEQ ID NO: 2254; WAN024GMV_at; Start 212; Stop 236
ggtccactagtgacgacggcaacac

SEQ ID NO: 251818 - DNA, 25 bp, Artificial
  probe
  misc_feature (1)..(25): SEQ ID NO: 2254; WAN024GMV_at; Start 4; Stop 28
gacagcttccgtaatgatacgcgga

SEQ ID NO: 251819 - DNA, 25 bp, Artificial
  probe
  misc_feature (1)..(25): SEQ ID NO: 2254; WAN024GMV_at; Start 179; Stop 203
tccgcaatccctgtaatggcatttg

SEQ ID NO: 251820 - DNA, 25 bp, Artificial
  probe
  misc_feature (1)..(25): SEQ ID NO: 2254; WAN024GMV_at; Start 129; Stop 153
gcgccacctgacctgtaaagaccaa

SEQ ID NO: 251821 - DNA, 25 bp, Artificial
  probe
  misc_feature (1)..(25): SEQ ID NO: 2254; WAN024GMV_at; Start 41; Stop 65
tcacgaacttggtaattgtacttag

SEQ ID NO: 251822 - DNA, 25 bp, Artificial
  probe
  misc_feature (1)..(25): SEQ ID NO: 2254; WAN024GMV_at; Start 150; Stop 174
ccaaaaggggaacgctatcgctcat

SEQ ID NO: 251823 - DNA, 25 bp, Artificial
  probe
  misc_feature (1)..(25): SEQ ID NO: 2254; WAN024GMV_at; Start 205; Stop 229
tgctcctggtccactagtgacgacg

SEQ ID NO: 251824 - DNA, 25 bp, Artificial
  probe
  misc_feature (1)..(25): SEQ ID NO: 2254; WAN024GMV_at; Start 53; Stop 77
taattgtacttagtgattggcatgg

SEQ ID NO: 251825 - DNA, 25 bp, Artificial
  probe
  misc_feature (1)..(25): SEQ ID NO: 2254; WAN024GMV_at; Start 177; Stop 201
catccgcaatccctgtaatggcatt

SEQ ID NO: 251826 - DNA, 25 bp, Artificial
  probe
  misc_feature (1)..(25): SEQ ID NO: 2254; WAN024GMV_at; Start 23; Stop 47
cgcggaatatcagctgtctcacgaa

SEQ ID NO: 251827 - DNA, 25 bp, Artificial
  probe
  misc_feature (1)..(25): SEQ ID NO: 2254; WAN024GMV_at; Start 21; Stop 45
tacgcggaatatcagctgtctcacg

SEQ ID NO: 251828 - DNA, 25 bp, Artificial
  probe
  misc_feature (1)..(25): SEQ ID NO: 2254; WAN024GMV_at; Start 209; Stop 233
cctggtccactagtgacgacggcaa

SEQ ID NO: 251829 - DNA, 25 bp, Artificial
  probe
  misc_feature (1)..(25): SEQ ID NO: 2254; WAN024GMV_at; Start 37; Stop 61
tgtctcacgaacttggtaattgtac

SEQ ID NO: 251830 - DNA, 25 bp, Artificial
  probe
  misc_feature (1)..(25): SEQ ID NO: 2254; WAN024GMV_at; Start 131; Stop 155
gccacctgacctgtaaagaccaaaa

SEQ ID NO: 251831 - DNA, 25 bp, Artificial
  probe
  misc_feature (1)..(25): SEQ ID NO: 2254; WAN024GMV_at; Start 196; Stop 220
ggcatttgttgctcctggtccacta

SEQ ID NO: 251832 - DNA, 25 bp, Artificial
  probe
  misc_feature (1)..(25): SEQ ID NO: 2254; WAN024GMV_at; Start 86; Stop 110
acgatgtctgcctcctgaaaggcat

SEQ ID NO: 251833 - DNA, 25 bp, Artificial
  probe
  misc_feature (1)..(25): SEQ ID NO: 2254; WAN024GMV_at; Start 59; Stop 83
tacttagtgattggcatggtaattc

SEQ ID NO: 251834 - DNA, 25 bp, Artificial
  probe
  misc_feature (1)..(25): SEQ ID NO: 2254; WAN024GMV_at; Start 124; Stop 148
tgctcgcgccacctgacctgtaaag

SEQ ID NO: 251835 - DNA, 25 bp, Artificial
  probe
  misc_feature (1)..(25): SEQ ID NO: 2254; WAN024GMV_at; Start 221; Stop 245
gtgacgacggcaacacccaactttc

SEQ ID NO: 251836 - DNA, 25 bp, Artificial
  probe
  misc_feature (1)..(25): SEQ ID NO: 1548; WAN024GMW_at; Start 184; Stop 208
tctcatgatgaagtggagcaaatca

SEQ ID NO: 251837 - DNA, 25 bp, Artificial
  probe
  misc_feature (1)..(25): SEQ ID NO: 1548; WAN024GMW_at; Start 393; Stop 417
tcagatgacgggaaatgcagaaaag

SEQ ID NO: 251838 - DNA, 25 bp, Artificial
  probe
  misc_feature (1)..(25): SEQ ID NO: 1548; WAN024GMW_at; Start 151; Stop 175
gtatcgcgtatcactattattattg

SEQ ID NO: 251839 - DNA, 25 bp, Artificial
  probe
  misc_feature (1)..(25): SEQ ID NO: 1548; WAN024GMW_at; Start 126; Stop 150
tgttggagcaacagaagatccgaat

SEQ ID NO: 251840 - DNA, 25 bp, Artificial
  probe
  misc_feature (1)..(25): SEQ ID NO: 1548; WAN024GMW_at; Start 456; Stop 480
tcgcaatattgctcgaacgggtgca

SEQ ID NO: 251841 - DNA, 25 bp, Artificial
  probe
  misc_feature (1)..(25): SEQ ID NO: 1548; WAN024GMW_at; Start 466; Stop 490
gctcgaacgggtgcaactggattta

SEQ ID NO: 251842 - DNA, 25 bp, Artificial
  probe
  misc_feature (1)..(25): SEQ ID NO: 1548; WAN024GMW_at; Start 478; Stop 502
gcaactggatttacccgcgattaac

SEQ ID NO: 251843 - DNA, 25 bp, Artificial
  probe
  misc_feature (1)..(25): SEQ ID NO: 1548; WAN024GMW_at; Start 290; Stop 314
tggttaagatgtcagcgccagctga

SEQ ID NO: 251844 - DNA, 25 bp, Artificial
  probe
  misc_feature (1)..(25): SEQ ID NO: 1548; WAN024GMW_at; Start 35; Stop 59
tgttaacagcaaaactacaaaatcg

SEQ ID NO: 251845 - DNA, 25 bp, Artificial
  probe
  misc_feature (1)..(25): SEQ ID NO: 1548; WAN024GMW_at; Start 255; Stop 279
tacagacaagcctcatttggagcgc

SEQ ID NO: 251846 - DNA, 25 bp, Artificial
  probe
  misc_feature (1)..(25): SEQ ID NO: 1548; WAN024GMW_at; Start 240; Stop 264
tcgcattcgagatattacagacaag

SEQ ID NO: 251847 - DNA, 25 bp, Artificial
  probe
  misc_feature (1)..(25): SEQ ID NO: 1548; WAN024GMW_at; Start 305; Stop 329
cgccagctgagaagagagctgagat

SEQ ID NO: 251848 - DNA, 25 bp, Artificial
  probe
  misc_feature (1)..(25): SEQ ID NO: 1548; WAN024GMW_at; Start 404; Stop 428
gaaatgcagaaaagagcgaagccct

SEQ ID NO: 251849 - DNA, 25 bp, Artificial
  probe
  misc_feature (1)..(25): SEQ ID NO: 1548; WAN024GMW_at; Start 264; Stop 288
gcctcatttggagcgcgaggtgatt

SEQ ID NO: 251850 - DNA, 25 bp, Artificial
  probe
  misc_feature (1)..(25): SEQ ID NO: 1548; WAN024GMW_at; Start 320; Stop 344
gagctgagattttagcgattattca

SEQ ID NO: 251851 - DNA, 25 bp, Artificial
  probe
  misc_feature (1)..(25): SEQ ID NO: 1548; WAN024GMW_at; Start 81; Stop 105
tacaggtgtcctatctcgtcgtcag

SEQ ID NO: 251852 - DNA, 25 bp, Artificial
  probe
  misc_feature (1)..(25): SEQ ID NO: 1548; WAN024GMW_at; Start 204; Stop 228
aatcatcaaacagctcaatcgtcag

SEQ ID NO: 251853 - DNA, 25 bp, Artificial
  probe
  misc_feature (1)..(25): SEQ ID NO: 1548; WAN024GMW_at; Start 417; Stop 441
gagcgaagccctattgcgagtcatt

SEQ ID NO: 251854 - DNA, 25 bp, Artificial
  probe
  misc_feature (1)..(25): SEQ ID NO: 1548; WAN024GMW_at; Start 338; Stop 362
ttattcaacctttccgtgcaacagt

SEQ ID NO: 251855 - DNA, 25 bp, Artificial
  probe
  misc_feature (1)..(25): SEQ ID NO: 1548; WAN024GMW_at; Start 64; Stop 88
ggagtcctcaatcgctttacaggtg

SEQ ID NO: 251856 - DNA, 25 bp, Artificial
  probe
  misc_feature (1)..(25): SEQ ID NO: 1548; WAN024GMW_at; Start 23; Stop 47
ccatgcgtagaatgttaacagcaaa

SEQ ID NO: 251857 - DNA, 25 bp, Artificial
  probe
  misc_feature (1)..(25): SEQ ID NO: 1548; WAN024GMW_at; Start 434; Stop 458
gagtcattcgcccatacggtattcg

SEQ ID NO: 251858 - DNA, 25 bp, Artificial
  probe
  misc_feature (1)..(25): SEQ ID NO: 1548; WAN024GMW_at; Start 111; Stop 135
tattgaaagcatctctgttggagca

SEQ ID NO: 251859 - DNA, 25 bp, Artificial
  probe
  misc_feature (1)..(25): SEQ ID NO: 1548; WAN024GMW_at; Start 226; Stop 250
cagattgatgtgattcgcattcgag

SEQ ID NO: 251860 - DNA, 25 bp, Artificial
  probe
  misc_feature (1)..(25): SEQ ID NO: 1548; WAN024GMW_at; Start 443; Stop 467
gcccatacggtattcgcaatattgc

SEQ ID NO: 251861 - DNA, 25 bp, Artificial
  probe
  misc_feature (1)..(25): SEQ ID NO: 1548; WAN024GMW_at; Start 50; Stop 74
tacaaaatcgttcaggagtcctcaa

SEQ ID NO: 251862 - DNA, 25 bp, Artificial
  probe
  misc_feature (1)..(25): SEQ ID NO: 1548; WAN024GMW_at; Start 96; Stop 120
tcgtcgtcaggttaatattgaaagc

SEQ ID NO: 251863 - DNA, 25 bp, Artificial
  probe
  misc_feature (1)..(25): SEQ ID NO: 1548; WAN024GMW_at; Start 275; Stop 299
agcgcgaggtgattttggttaagat

SEQ ID NO: 251864 - DNA, 25 bp, Artificial
  probe
  misc_feature (1)..(25): SEQ ID NO: 1548; WAN024GMW_at; Start 380; Stop 404
gctcgattaccattcagatgacggg

SEQ ID NO: 251865 - DNA, 25 bp, Artificial
  probe
  misc_feature (1)..(25): SEQ ID NO: 1548; WAN024GMW_at; Start 332; Stop 356
tagcgattattcaacctttccgtgc

SEQ ID NO: 251866 - DNA, 25 bp, Artificial
  probe
  misc_feature (1)..(25): SEQ ID NO: 1548; WAN024GMW_at; Start 219; Stop 243
caatcgtcagattgatgtgattcgc

SEQ ID NO: 251867 - DNA, 25 bp, Artificial
  probe
  misc_feature (1)..(25): SEQ ID NO: 1548; WAN024GMW_at; Start 139; Stop 163
gaagatccgaatgtatcgcgtatca

SEQ ID NO: 251868 - DNA, 25 bp, Artificial
  probe
  misc_feature (1)..(25): SEQ ID NO: 1548; WAN024GMW_at; Start 17; Stop 41
gcagttccatgcgtagaatgttaac

SEQ ID NO: 251869 - DNA, 25 bp, Artificial
  probe
  misc_feature (1)..(25): SEQ ID NO: 1548; WAN024GMW_at; Start 171; Stop 195
tattgatgttgcttctcatgatgaa

SEQ ID NO: 251870 - DNA, 25 bp, Artificial
  probe
  misc_feature (1)..(25): SEQ ID NO: 2270; WAN024GMX_at; Start 700; Stop 724
gcagaacgctatcaaattccagtgg

SEQ ID NO: 251871 - DNA, 25 bp, Artificial
  probe
  misc_feature (1)..(25): SEQ ID NO: 2270; WAN024GMX_at; Start 1341; Stop 1365
tttccaaatgaccaaccaggagttg

SEQ ID NO: 251872 - DNA, 25 bp, Artificial
  probe
  misc_feature (1)..(25): SEQ ID NO: 2270; WAN024GMX_at; Start 287; Stop 311
tgagcgatagcgttccccttttggt

SEQ ID NO: 251873 - DNA, 25 bp, Artificial
  probe
  misc_feature (1)..(25): SEQ ID NO: 2270; WAN024GMX_at; Start 156; Stop 180
tctagggcgccatgagcaaggttgt

SEQ ID NO: 251874 - DNA, 25 bp, Artificial
  probe
  misc_feature (1)..(25): SEQ ID NO: 2270; WAN024GMX_at; Start 1299; Stop 1323
taacccagataaggaagtagtcttg

SEQ ID NO: 251875 - DNA, 25 bp, Artificial
  probe
  misc_feature (1)..(25): SEQ ID NO: 2270; WAN024GMX_at; Start 415; Stop 439
cgtgagacagctgatattccgcgta

SEQ ID NO: 251876 - DNA, 25 bp, Artificial
  probe
  misc_feature (1)..(25): SEQ ID NO: 2270; WAN024GMX_at; Start 1092; Stop 1116
gaaagagcgtgtggttcaaccgcaa

SEQ ID NO: 251877 - DNA, 25 bp, Artificial
  probe
  misc_feature (1)..(25): SEQ ID NO: 2270; WAN024GMX_at; Start 453; Stop 477
tgtccatatcgcaactacaggccgt

SEQ ID NO: 251878 - DNA, 25 bp, Artificial
  probe
  misc_feature (1)..(25): SEQ ID NO: 2270; WAN024GMX_at; Start 139; Stop 163
aaaggcattcgccacattctagggc

SEQ ID NO: 251879 - DNA, 25 bp, Artificial
  probe
  misc_feature (1)..(25): SEQ ID NO: 2270; WAN024GMX_at; Start 922; Stop 946
gatattgacccagctgagattggca

SEQ ID NO: 251880 - DNA, 25 bp, Artificial
  probe
  misc_feature (1)..(25): SEQ ID NO: 2270; WAN024GMX_at; Start 400; Stop 424
tacaattaccaagttcgtgagacag

SEQ ID NO: 251881 - DNA, 25 bp, Artificial
  probe
  misc_feature (1)..(25): SEQ ID NO: 2270; WAN024GMX_at; Start 1179; Stop 1203
tcaacaccaaatgtggacagctcag

SEQ ID NO: 251882 - DNA, 25 bp, Artificial
  probe
  misc_feature (1)..(25): SEQ ID NO: 2270; WAN024GMX_at; Start 1649; Stop 1673
taccggctggtaagagtaatcatga

SEQ ID NO: 251883 - DNA, 25 bp, Artificial
  probe
  misc_feature (1)..(25): SEQ ID NO: 2270; WAN024GMX_at; Start 307; Stop 331
ttggtctttacaggtcaggtggcgc

SEQ ID NO: 251884 - DNA, 25 bp, Artificial
  probe
  misc_feature (1)..(25): SEQ ID NO: 2270; WAN024GMX_at; Start 1153; Stop 1177
gatgccattgtggtaacagacgttg

SEQ ID NO: 251885 - DNA, 25 bp, Artificial
  probe
  misc_feature (1)..(25): SEQ ID NO: 2270; WAN024GMX_at; Start 1108; Stop 1132
caaccgcaagcagttattgaacgaa

SEQ ID NO: 251886 - DNA, 25 bp, Artificial
  probe
  misc_feature (1)..(25): SEQ ID NO: 2270; WAN024GMX_at; Start 1433; Stop 1457
ttcgccagtggcaggaatccttcta

SEQ ID NO: 251887 - DNA, 25 bp, Artificial
  probe
  misc_feature (1)..(25): SEQ ID NO: 2270; WAN024GMX_at; Start 257; Stop 281
caaatgccattacagggattgcgga

SEQ ID NO: 251888 - DNA, 25 bp, Artificial
  probe
  misc_feature (1)..(25): SEQ ID NO: 2270; WAN024GMX_at; Start 473; Stop 497
gccgtccagggccagttgtaattga

SEQ ID NO: 251889 - DNA, 25 bp, Artificial
  probe
  misc_feature (1)..(25): SEQ ID NO: 2270; WAN024GMX_at; Start 1264; Stop 1288
tttggaattccagcagcaatcggtg

SEQ ID NO: 251890 - DNA, 25 bp, Artificial
  probe
  misc_feature (1)..(25): SEQ ID NO: 2270; WAN024GMX_at; Start 1377; Stop 1401
tatttacaaggtgccaatcaaggtg

SEQ ID NO: 251891 - DNA, 25 bp, Artificial
  probe
  misc_feature (1)..(25): SEQ ID NO: 2270; WAN024GMX_at; Start 973; Stop 997
gttggagatgctaagaaggccttgc

SEQ ID NO: 251892 - DNA, 25 bp, Artificial
  probe
  misc_feature (1)..(25): SEQ ID NO: 2270; WAN024GMX_at; Start 788; Stop 812
gcatgcacgggtcattcgcagcaaa

SEQ ID NO: 251893 - DNA, 25 bp, Artificial
  probe
  misc_feature (1)..(25): SEQ ID NO: 2270; WAN024GMX_at; Start 1456; Stop 1480
tatgaaggcagaacatcagagtcgg

SEQ ID NO: 251894 - DNA, 25 bp, Artificial
  probe
  misc_feature (1)..(25): SEQ ID NO: 2270; WAN024GMX_at; Start 771; Stop 795
ctttcttggaatgggaggcatgcac

SEQ ID NO: 251895 - DNA, 25 bp, Artificial
  probe
  misc_feature (1)..(25): SEQ ID NO: 2270; WAN024GMX_at; Start 892; Stop 916
ttcgctaagaatgctaaggttgccc

SEQ ID NO: 251896 - DNA, 25 bp, Artificial
  probe
  misc_feature (1)..(25): SEQ ID NO: 2270; WAN024GMX_at; Start 1497; Stop 1521
tgatttccaattgatggcgcaggct

SEQ ID NO: 251897 - DNA, 25 bp, Artificial
  probe
  misc_feature (1)..(25): SEQ ID NO: 2270; WAN024GMX_at; Start 562; Stop 586
agttatcagccgactcttgagccga

SEQ ID NO: 251898 - DNA, 25 bp, Artificial
  probe
  misc_feature (1)..(25): SEQ ID NO: 2270; WAN024GMX_at; Start 240; Stop 264
tagtggaccaggagcaacaaatgcc

SEQ ID NO: 251899 - DNA, 25 bp, Artificial
  probe
  misc_feature (1)..(25): SEQ ID NO: 2270; WAN024GMX_at; Start 743; Stop 767
aaggaacgattgcaacgagtcaccc

SEQ ID NO: 251900 - DNA, 25 bp, Artificial
  probe
  misc_feature (1)..(25): SEQ ID NO: 2270; WAN024GMX_at; Start 215; Stop 239
gaaagttgggtgttgccgtcgtcac

SEQ ID NO: 251901 - DNA, 25 bp, Artificial
  probe
  misc_feature (1)..(25): SEQ ID NO: 2270; WAN024GMX_at; Start 1554; Stop 1578
tgagaccttggctcaagaccttgaa

SEQ ID NO: 251902 - DNA, 25 bp, Artificial
  probe
  misc_feature (1)..(25): SEQ ID NO: 2270; WAN024GMX_at; Start 667; Stop 691
tatgctgaggctgctacggaactaa

SEQ ID NO: 251903 - DNA, 25 bp, Artificial
  probe
  misc_feature (1)..(25): SEQ ID NO: 2270; WAN024GMX_at; Start 1539; Stop 1563
taagtttgacaatcctgagaccttg

SEQ ID NO: 251904 - DNA, 25 bp, Artificial
  probe
  misc_feature (1)..(25): SEQ ID NO: 2599; WAN024GMY_at; Start 112; Stop 136
catagaaggttacgatttcactgtc

SEQ ID NO: 251905 - DNA, 25 bp, Artificial
  probe
  misc_feature (1)..(25): SEQ ID NO: 2599; WAN024GMY_at; Start 28; Stop 52
gaatctcgacttcaacgtcttcgaa

SEQ ID NO: 251906 - DNA, 25 bp, Artificial
  probe
  misc_feature (1)..(25): SEQ ID NO: 2599; WAN024GMY_at; Start 6; Stop 30
taaacaggttgttgaccttggtgaa

SEQ ID NO: 251907 - DNA, 25 bp, Artificial
  probe
  misc_feature (1)..(25): SEQ ID NO: 2599; WAN024GMY_at; Start 12; Stop 36
ggttgttgaccttggtgaatctcga

SEQ ID NO: 251908 - DNA, 25 bp, Artificial
  probe
  misc_feature (1)..(25): SEQ ID NO: 2599; WAN024GMY_at; Start 84; Stop 108
gcaagttcttcgcttccgtcttcac

SEQ ID NO: 251909 - DNA, 25 bp, Artificial
  probe
  misc_feature (1)..(25): SEQ ID NO: 2599; WAN024GMY_at; Start 192; Stop 216
gacacaagaatttttccatccacca

SEQ ID NO: 251910 - DNA, 25 bp, Artificial
  probe
  misc_feature (1)..(25): SEQ ID NO: 2599; WAN024GMY_at; Start 254; Stop 278
gatcgttgtatcacgcacggctgtt

SEQ ID NO: 251911 - DNA, 25 bp, Artificial
  probe
  misc_feature (1)..(25): SEQ ID NO: 2599; WAN024GMY_at; Start 39; Stop 63
tcaacgtcttcgaattcttctacga

SEQ ID NO: 251912 - DNA, 25 bp, Artificial
  probe
  misc_feature (1)..(25): SEQ ID NO: 2599; WAN024GMY_at; Start 141; Stop 165
tccaacatatgtttcaaggtttcag

SEQ ID NO: 251913 - DNA, 25 bp, Artificial
  probe
  misc_feature (1)..(25): SEQ ID NO: 2599; WAN024GMY_at; Start 62; Stop 86
gatttcttgagcgatttcattggca

SEQ ID NO: 251914 - DNA, 25 bp, Artificial
  probe
  misc_feature (1)..(25): SEQ ID NO: 2599; WAN024GMY_at; Start 183; Stop 207
tcagggtttgacacaagaatttttc

SEQ ID NO: 251915 - DNA, 25 bp, Artificial
  probe
  misc_feature (1)..(25): SEQ ID NO: 2599; WAN024GMY_at; Start 177; Stop 201
tgcatatcagggtttgacacaagaa

SEQ ID NO: 251916 - DNA, 25 bp, Artificial
  probe
  misc_feature (1)..(25): SEQ ID NO: 2599; WAN024GMY_at; Start 55; Stop 79
cttctacgatttcttgagcgatttc

SEQ ID NO: 251917 - DNA, 25 bp, Artificial
  probe
  misc_feature (1)..(25): SEQ ID NO: 2599; WAN024GMY_at; Start 70; Stop 94
gagcgatttcattggcaagttcttc

SEQ ID NO: 251918 - DNA, 25 bp, Artificial
  probe
  misc_feature (1)..(25): SEQ ID NO: 2599; WAN024GMY_at; Start 116; Stop 140
gaaggttacgatttcactgtcttca

SEQ ID NO: 251919 - DNA, 25 bp, Artificial
  probe
  misc_feature (1)..(25): SEQ ID NO: 2599; WAN024GMY_at; Start 198; Stop 222
agaatttttccatccaccataccta

SEQ ID NO: 251920 - DNA, 25 bp, Artificial
  probe
  misc_feature (1)..(25): SEQ ID NO: 2599; WAN024GMY_at; Start 170; Stop 194
tgtttggtgcatatcagggtttgac

SEQ ID NO: 251921 - DNA, 25 bp, Artificial
  probe
  misc_feature (1)..(25): SEQ ID NO: 2599; WAN024GMY_at; Start 239; Stop 263
gatttctaagccatcgatcgttgta

SEQ ID NO: 251922 - DNA, 25 bp, Artificial
  probe
  misc_feature (1)..(25): SEQ ID NO: 2599; WAN024GMY_at; Start 258; Stop 282
gttgtatcacgcacggctgttgtga

SEQ ID NO: 251923 - DNA, 25 bp, Artificial
  probe
  misc_feature (1)..(25): SEQ ID NO: 2599; WAN024GMY_at; Start 234; Stop 258
tcatggatttctaagccatcgatcg

SEQ ID NO: 251924 - DNA, 25 bp, Artificial
  probe
  misc_feature (1)..(25): SEQ ID NO: 2599; WAN024GMY_at; Start 163; Stop 187
cagtcaatgtttggtgcatatcagg

SEQ ID NO: 251925 - DNA, 25 bp, Artificial
  probe
  misc_feature (1)..(25): SEQ ID NO: 2599; WAN024GMY_at; Start 155; Stop 179
caaggtttcagtcaatgtttggtgc

SEQ ID NO: 251926 - DNA, 25 bp, Artificial
  probe
  misc_feature (1)..(25): SEQ ID NO: 2599; WAN024GMY_at; Start 250; Stop 274
catcgatcgttgtatcacgcacggc

SEQ ID NO: 251927 - DNA, 25 bp, Artificial
  probe
  misc_feature (1)..(25): SEQ ID NO: 2599; WAN024GMY_at; Start 50; Stop 74
gaattcttctacgatttcttgagcg

SEQ ID NO: 251928 - DNA, 25 bp, Artificial
  probe
  misc_feature (1)..(25): SEQ ID NO: 2599; WAN024GMY_at; Start 226; Stop 250
tatcgttttcatggatttctaagcc

SEQ ID NO: 251929 - DNA, 25 bp, Artificial
  probe
  misc_feature (1)..(25): SEQ ID NO: 2599; WAN024GMY_at; Start 16; Stop 40
gttgaccttggtgaatctcgacttc

SEQ ID NO: 251930 - DNA, 25 bp, Artificial
  probe
  misc_feature (1)..(25): SEQ ID NO: 2599; WAN024GMY_at; Start 245; Stop 269
taagccatcgatcgttgtatcacgc

SEQ ID NO: 251931 - DNA, 25 bp, Artificial
  probe
  misc_feature (1)..(25): SEQ ID NO: 2599; WAN024GMY_at; Start 145; Stop 169
acatatgtttcaaggtttcagtcaa

SEQ ID NO: 251932 - DNA, 25 bp, Artificial
  probe
  misc_feature (1)..(25): SEQ ID NO: 2599; WAN024GMY_at; Start 25; Stop 49
ggtgaatctcgacttcaacgtcttc

SEQ ID NO: 251933 - DNA, 25 bp, Artificial
  probe
  misc_feature (1)..(25): SEQ ID NO: 2599; WAN024GMY_at; Start 129; Stop 153
tcactgtcttcatccaacatatgtt

SEQ ID NO: 251934 - DNA, 25 bp, Artificial
  probe
  misc_feature (1)..(25): SEQ ID NO: 2599; WAN024GMY_at; Start 1; Stop 25
atgggtaaacaggttgttgaccttg

SEQ ID NO: 251935 - DNA, 25 bp, Artificial
  probe
  misc_feature (1)..(25): SEQ ID NO: 2599; WAN024GMY_at; Start 79; Stop 103
cattggcaagttcttcgcttccgtc

SEQ ID NO: 251936 - DNA, 25 bp, Artificial
  probe
  misc_feature (1)..(25): SEQ ID NO: 2599; WAN024GMY_at; Start 19; Stop 43
gaccttggtgaatctcgacttcaac

SEQ ID NO: 251937 - DNA, 25 bp, Artificial
  probe
  misc_feature (1)..(25): SEQ ID NO: 2599; WAN024GMY_at; Start 122; Stop 146
tacgatttcactgtcttcatccaac

SEQ ID NO: 251938 - DNA, 25 bp, Artificial
  probe
  misc_feature (1)..(25): SEQ ID NO: 5144; WAN024GMZ_at; Start 227; Stop 251
ggaccttgcttaagagctaccatga

SEQ ID NO: 251939 - DNA, 25 bp, Artificial
  probe
  misc_feature (1)..(25): SEQ ID NO: 5144; WAN024GMZ_at; Start 99; Stop 123
caagtcctggatcttctgtatgaac

SEQ ID NO: 251940 - DNA, 25 bp, Artificial
  probe
  misc_feature (1)..(25): SEQ ID NO: 5144; WAN024GMZ_at; Start 240; Stop 264
gagctaccatgatttcagtacagta

SEQ ID NO: 251941 - DNA, 25 bp, Artificial
  probe
  misc_feature (1)..(25): SEQ ID NO: 5144; WAN024GMZ_at; Start 267; Stop 291
caaacgtgatgtcctcagtcgctac

SEQ ID NO: 251942 - DNA, 25 bp, Artificial
  probe
  misc_feature (1)..(25): SEQ ID NO: 5144; WAN024GMZ_at; Start 179; Stop 203
tccaagtagttacggaattcatcgt

SEQ ID NO: 251943 - DNA, 25 bp, Artificial
  probe
  misc_feature (1)..(25): SEQ ID NO: 5144; WAN024GMZ_at; Start 372; Stop 396
caatatattcgccagtaagggctga

SEQ ID NO: 251944 - DNA, 25 bp, Artificial
  probe
  misc_feature (1)..(25): SEQ ID NO: 5144; WAN024GMZ_at; Start 3; Stop 27
gagtagcttctttctcaacctgtgc

SEQ ID NO: 251945 - DNA, 25 bp, Artificial
  probe
  misc_feature (1)..(25): SEQ ID NO: 5144; WAN024GMZ_at; Start 350; Stop 374
gtcgctacaaagtcctcagatgcaa

SEQ ID NO: 251946 - DNA, 25 bp, Artificial
  probe
  misc_feature (1)..(25): SEQ ID NO: 5144; WAN024GMZ_at; Start 41; Stop 65
cgcatattgtcaacttttaccttga

SEQ ID NO: 251947 - DNA, 25 bp, Artificial
  probe
  misc_feature (1)..(25): SEQ ID NO: 5144; WAN024GMZ_at; Start 191; Stop 215
cggaattcatcgtagtcaaaatctt

SEQ ID NO: 251948 - DNA, 25 bp, Artificial
  probe
  misc_feature (1)..(25): SEQ ID NO: 5144; WAN024GMZ_at; Start 132; Stop 156
tgacaatttcatcatcgttaacaac

SEQ ID NO: 251949 - DNA, 25 bp, Artificial
  probe
  misc_feature (1)..(25): SEQ ID NO: 5144; WAN024GMZ_at; Start 289; Stop 313
tacgtgaccagctacagacttatga

SEQ ID NO: 251950 - DNA, 25 bp, Artificial
  probe
  misc_feature (1)..(25): SEQ ID NO: 5144; WAN024GMZ_at; Start 260; Stop 284
cagtaaccaaacgtgatgtcctcag

SEQ ID NO: 251951 - DNA, 25 bp, Artificial
  probe
  misc_feature (1)..(25): SEQ ID NO: 5144; WAN024GMZ_at; Start 344; Stop 368
gcaggagtcgctacaaagtcctcag

SEQ ID NO: 251952 - DNA, 25 bp, Artificial
  probe
  misc_feature (1)..(25): SEQ ID NO: 5144; WAN024GMZ_at; Start 312; Stop 336
gatgctctacattgatcatctcact

SEQ ID NO: 251953 - DNA, 25 bp, Artificial
  probe
  misc_feature (1)..(25): SEQ ID NO: 5144; WAN024GMZ_at; Start 18; Stop 42
caacctgtgcttcgtgttggttacg

SEQ ID NO: 251954 - DNA, 25 bp, Artificial
  probe
  misc_feature (1)..(25): SEQ ID NO: 5144; WAN024GMZ_at; Start 58; Stop 82
taccttgaccaagctaccatatttg

SEQ ID NO: 251955 - DNA, 25 bp, Artificial
  probe
  misc_feature (1)..(25): SEQ ID NO: 5144; WAN024GMZ_at; Start 171; Stop 195
caagctcatccaagtagttacggaa

SEQ ID NO: 251956 - DNA, 25 bp, Artificial
  probe
  misc_feature (1)..(25): SEQ ID NO: 5144; WAN024GMZ_at; Start 360; Stop 384
agtcctcagatgcaatatattcgcc

SEQ ID NO: 251957 - DNA, 25 bp, Artificial
  probe
  misc_feature (1)..(25): SEQ ID NO: 5144; WAN024GMZ_at; Start 207; Stop 231
caaaatctttagcataggttggacc

SEQ ID NO: 251958 - DNA, 25 bp, Artificial
  probe
  misc_feature (1)..(25): SEQ ID NO: 5144; WAN024GMZ_at; Start 120; Stop 144
gaacatggactttgacaatttcatc

SEQ ID NO: 251959 - DNA, 25 bp, Artificial
  probe
  misc_feature (1)..(25): SEQ ID NO: 5144; WAN024GMZ_at; Start 324; Stop 348
tgatcatctcactcatgttggcagg

SEQ ID NO: 251960 - DNA, 25 bp, Artificial
  probe
  misc_feature (1)..(25): SEQ ID NO: 5144; WAN024GMZ_at; Start 330; Stop 354
tctcactcatgttggcaggagtcgc

SEQ ID NO: 251961 - DNA, 25 bp, Artificial
  probe
  misc_feature (1)..(25): SEQ ID NO: 5144; WAN024GMZ_at; Start 281; Stop 305
tcagtcgctacgtgaccagctacag

SEQ ID NO: 251962 - DNA, 25 bp, Artificial
  probe
  misc_feature (1)..(25): SEQ ID NO: 5144; WAN024GMZ_at; Start 274; Stop 298
gatgtcctcagtcgctacgtgacca

SEQ ID NO: 251963 - DNA, 25 bp, Artificial
  probe
  misc_feature (1)..(25): SEQ ID NO: 5144; WAN024GMZ_at; Start 299; Stop 323
gctacagacttatgatgctctacat

SEQ ID NO: 251964 - DNA, 25 bp, Artificial
  probe
  misc_feature (1)..(25): SEQ ID NO: 5144; WAN024GMZ_at; Start 336; Stop 360
tcatgttggcaggagtcgctacaaa

SEQ ID NO: 251965 - DNA, 25 bp, Artificial
  probe
  misc_feature (1)..(25): SEQ ID NO: 5144; WAN024GMZ_at; Start 70; Stop 94
gctaccatatttgagaccttcttgc

SEQ ID NO: 251966 - DNA, 25 bp, Artificial
  probe
  misc_feature (1)..(25): SEQ ID NO: 5144; WAN024GMZ_at; Start 250; Stop 274
gatttcagtacagtaaccaaacgtg

SEQ ID NO: 251967 - DNA, 25 bp, Artificial
  probe
  misc_feature (1)..(25): SEQ ID NO: 5144; WAN024GMZ_at; Start 29; Stop 53
tcgtgttggttacgcatattgtcaa

SEQ ID NO: 251968 - DNA, 25 bp, Artificial
  probe
  misc_feature (1)..(25): SEQ ID NO: 5144; WAN024GMZ_at; Start 84; Stop 108
gaccttcttgcataacaagtcctgg

SEQ ID NO: 251969 - DNA, 25 bp, Artificial
  probe
  misc_feature (1)..(25): SEQ ID NO: 5144; WAN024GMZ_at; Start 219; Stop 243
cataggttggaccttgcttaagagc

SEQ ID NO: 251970 - DNA, 25 bp, Artificial
  probe
  misc_feature (1)..(25): SEQ ID NO: 5144; WAN024GMZ_at; Start 233; Stop 257
tgcttaagagctaccatgatttcag

SEQ ID NO: 251971 - DNA, 25 bp, Artificial
  probe
  misc_feature (1)..(25): SEQ ID NO: 5144; WAN024GMZ_at; Start 111; Stop 135
cttctgtatgaacatggactttgac

SEQ ID NO: 251972 - DNA, 25 bp, Artificial
  probe
  misc_feature (1)..(25): SEQ ID NO: 4254; WAN024GN2_at; Start 398; Stop 422
cagtttctcgtggagctgctatcgg

SEQ ID NO: 251973 - DNA, 25 bp, Artificial
  probe
  misc_feature (1)..(25): SEQ ID NO: 4254; WAN024GN2_at; Start 964; Stop 988
gcacaggttgagaaagaagctactc

SEQ ID NO: 251974 - DNA, 25 bp, Artificial
  probe
  misc_feature (1)..(25): SEQ ID NO: 4254; WAN024GN2_at; Start 1247; Stop 1271
tagaggctcgcactcttcctcaagg

SEQ ID NO: 251975 - DNA, 25 bp, Artificial
  probe
  misc_feature (1)..(25): SEQ ID NO: 4254; WAN024GN2_at; Start 701; Stop 725
tagcgactgaggacatcacgtttgg

SEQ ID NO: 251976 - DNA, 25 bp, Artificial
  probe
  misc_feature (1)..(25): SEQ ID NO: 4254; WAN024GN2_at; Start 620; Stop 644
catctgaggactttgtagcgactcc

SEQ ID NO: 251977 - DNA, 25 bp, Artificial
  probe
  misc_feature (1)..(25): SEQ ID NO: 4254; WAN024GN2_at; Start 1570; Stop 1594
gaaatcgctcaagaaatcgtagaag

SEQ ID NO: 251978 - DNA, 25 bp, Artificial
  probe
  misc_feature (1)..(25): SEQ ID NO: 4254; WAN024GN2_at; Start 308; Stop 332
taacaggtcaagacttggctctggc

SEQ ID NO: 251979 - DNA, 25 bp, Artificial
  probe
  misc_feature (1)..(25): SEQ ID NO: 4254; WAN024GN2_at; Start 23; Stop 47
tatttcaagaaatggtgcaggctgc

SEQ ID NO: 251980 - DNA, 25 bp, Artificial
  probe
  misc_feature (1)..(25): SEQ ID NO: 4254; WAN024GN2_at; Start 1442; Stop 1466
gaaaaattcttgtgtcaaaccctga

SEQ ID NO: 251981 - DNA, 25 bp, Artificial
  probe
  misc_feature (1)..(25): SEQ ID NO: 4254; WAN024GN2_at; Start 982; Stop 1006
gctactcaagttatcaagtcggctg

SEQ ID NO: 251982 - DNA, 25 bp, Artificial
  probe
  misc_feature (1)..(25): SEQ ID NO: 4254; WAN024GN2_at; Start 325; Stop 349
gctctggccttccaatcaggtgtgg

SEQ ID NO: 251983 - DNA, 25 bp, Artificial
  probe
  misc_feature (1)..(25): SEQ ID NO: 4254; WAN024GN2_at; Start 1543; Stop 1567
gaagacggaagcgaagaacttgcca

SEQ ID NO: 251984 - DNA, 25 bp, Artificial
  probe
  misc_feature (1)..(25): SEQ ID NO: 4254; WAN024GN2_at; Start 865; Stop 889
catgttcatacagaagatccaggac

SEQ ID NO: 251985 - DNA, 25 bp, Artificial
  probe
  misc_feature (1)..(25): SEQ ID NO: 4254; WAN024GN2_at; Start 740; Stop 764
tcatggtagctcttaagcaaggtcc

SEQ ID NO: 251986 - DNA, 25 bp, Artificial
  probe
  misc_feature (1)..(25): SEQ ID NO: 4254; WAN024GN2_at; Start 38; Stop 62
tgcaggctgcatcaactcgcttgaa

SEQ ID NO: 251987 - DNA, 25 bp, Artificial
  probe
  misc_feature (1)..(25): SEQ ID NO: 4254; WAN024GN2_at; Start 271; Stop 295
cgtggattttcccaagctatcaagg

SEQ ID NO: 251988 - DNA, 25 bp, Artificial
  probe
  misc_feature (1)..(25): SEQ ID NO: 4254; WAN024GN2_at; Start 1288; Stop 1312
gcctttgatccaagcaagtccattg

SEQ ID NO: 251989 - DNA, 25 bp, Artificial
  probe
  misc_feature (1)..(25): SEQ ID NO: 4254; WAN024GN2_at; Start 1354; Stop 1378
gttagcggaagcgtcacaacagccg

SEQ ID NO: 251990 - DNA, 25 bp, Artificial
  probe
  misc_feature (1)..(25): SEQ ID NO: 4254; WAN024GN2_at; Start 89; Stop 113
taaacgtctttccagttccagatgg

SEQ ID NO: 251991 - DNA, 25 bp, Artificial
  probe
  misc_feature (1)..(25): SEQ ID NO: 4254; WAN024GN2_at; Start 117; Stop 141
tactgggacaaatatgggaatgacc

SEQ ID NO: 251992 - DNA, 25 bp, Artificial
  probe
  misc_feature (1)..(25): SEQ ID NO: 4254; WAN024GN2_at; Start 171; Stop 195
caagccagcttctacagttggagaa

SEQ ID NO: 251993 - DNA, 25 bp, Artificial
  probe
  misc_feature (1)..(25): SEQ ID NO: 4254; WAN024GN2_at; Start 1197; Stop 1221
catggcagctcaatctgcggcagaa

SEQ ID NO: 251994 - DNA, 25 bp, Artificial
  probe
  misc_feature (1)..(25): SEQ ID NO: 4254; WAN024GN2_at; Start 1089; Stop 1113
tatcgaaggcggtcaaaccatgaac

SEQ ID NO: 251995 - DNA, 25 bp, Artificial
  probe
  misc_feature (1)..(25): SEQ ID NO: 4254; WAN024GN2_at; Start 456; Stop 480
tgttgaagtcatgcgcgcagccttg

SEQ ID NO: 251996 - DNA, 25 bp, Artificial
  probe
  misc_feature (1)..(25): SEQ ID NO: 4254; WAN024GN2_at; Start 1214; Stop 1238
cggcagaagttttggagcaaccagc

SEQ ID NO: 251997 - DNA, 25 bp, Artificial
  probe
  misc_feature (1)..(25): SEQ ID NO: 4254; WAN024GN2_at; Start 1609; Stop 1633
gaagtcgagattcaccaaggtcaac

SEQ ID NO: 251998 - DNA, 25 bp, Artificial
  probe
  misc_feature (1)..(25): SEQ ID NO: 4254; WAN024GN2_at; Start 1057; Stop 1081
gatatcttctgttctcaaggcgtgg

SEQ ID NO: 251999 - DNA, 25 bp, Artificial
  probe
  misc_feature (1)..(25): SEQ ID NO: 4254; WAN024GN2_at; Start 156; Stop 180
taaagaagttgcagacaagccagct

SEQ ID NO: 252000 - DNA, 25 bp, Artificial
  probe
  misc_feature (1)..(25): SEQ ID NO: 4254; WAN024GN2_at; Start 1370; Stop 1394
caacagccgtgcgtgatacaacgat

SEQ ID NO: 252001 - DNA, 25 bp, Artificial
  probe
  misc_feature (1)..(25): SEQ ID NO: 4254; WAN024GN2_at; Start 197; Stop 221
tagcgagcattcttgccaaagggct

SEQ ID NO: 252002 - DNA, 25 bp, Artificial
  probe
  misc_feature (1)..(25): SEQ ID NO: 4254; WAN024GN2_at; Start 476; Stop 500
ccttggaaggtgctaaaacagctct

SEQ ID NO: 252003 - DNA, 25 bp, Artificial
  probe
  misc_feature (1)..(25): SEQ ID NO: 4254; WAN024GN2_at; Start 354; Stop 378
tgcctataaggcagtgatgaaacct

SEQ ID NO: 252004 - DNA, 25 bp, Artificial
  probe
  misc_feature (1)..(25): SEQ ID NO: 4254; WAN024GN2_at; Start 552; Stop 576
ctcaggtggtcaaggattggtcttc

SEQ ID NO: 252005 - DNA, 25 bp, Artificial
  probe
  misc_feature (1)..(25): SEQ ID NO: 4254; WAN024GN2_at; Start 681; Stop 705
taagtctgtagctggtcacgtagcg

SEQ ID NO: 252006 - DNA, 25 bp, Artificial
  probe
  misc_feature (1)..(25): SEQ ID NO: 5753; WAN024GN3_at; Start 72; Stop 96
tacagtcttgcggtcagccatagtc

SEQ ID NO: 252007 - DNA, 25 bp, Artificial
  probe
  misc_feature (1)..(25): SEQ ID NO: 5753; WAN024GN3_at; Start 96; Stop 120
cgtagtaggtgcgacaccagttgtg

SEQ ID NO: 252008 - DNA, 25 bp, Artificial
  probe
  misc_feature (1)..(25): SEQ ID NO: 5753; WAN024GN3_at; Start 129; Stop 153
gcccagcaattcaaccatgtcaaca

SEQ ID NO: 252009 - DNA, 25 bp, Artificial
  probe
  misc_feature (1)..(25): SEQ ID NO: 5753; WAN024GN3_at; Start 252; Stop 276
catcttgcatcctttcgtgaaatga

SEQ ID NO: 252010 - DNA, 25 bp, Artificial
  probe
  misc_feature (1)..(25): SEQ ID NO: 5753; WAN024GN3_at; Start 67; Stop 91
cggagtacagtcttgcggtcagcca

SEQ ID NO: 252011 - DNA, 25 bp, Artificial
  probe
  misc_feature (1)..(25): SEQ ID NO: 5753; WAN024GN3_at; Start 52; Stop 76
tcggccacatcagggcggagtacag

SEQ ID NO: 252012 - DNA, 25 bp, Artificial
  probe
  misc_feature (1)..(25): SEQ ID NO: 5753; WAN024GN3_at; Start 76; Stop 100
gtcttgcggtcagccatagtcgtag

SEQ ID NO: 252013 - DNA, 25 bp, Artificial
  probe
  misc_feature (1)..(25): SEQ ID NO: 5753; WAN024GN3_at; Start 181; Stop 205
gcagtttcttcttcagagaatctta

SEQ ID NO: 252014 - DNA, 25 bp, Artificial
  probe
  misc_feature (1)..(25): SEQ ID NO: 5753; WAN024GN3_at; Start 90; Stop 114
catagtcgtagtaggtgcgacacca

SEQ ID NO: 252015 - DNA, 25 bp, Artificial
  probe
  misc_feature (1)..(25): SEQ ID NO: 5753; WAN024GN3_at; Start 222; Stop 246
aacgtgtgttacctcttcttgcgta

SEQ ID NO: 252016 - DNA, 25 bp, Artificial
  probe
  misc_feature (1)..(25): SEQ ID NO: 5753; WAN024GN3_at; Start 45; Stop 69
tccttcttcggccacatcagggcgg

SEQ ID NO: 252017 - DNA, 25 bp, Artificial
  probe
  misc_feature (1)..(25): SEQ ID NO: 5753; WAN024GN3_at; Start 69; Stop 93
gagtacagtcttgcggtcagccata

SEQ ID NO: 252018 - DNA, 25 bp, Artificial
  probe
  misc_feature (1)..(25): SEQ ID NO: 5753; WAN024GN3_at; Start 80; Stop 104
tgcggtcagccatagtcgtagtagg

SEQ ID NO: 252019 - DNA, 25 bp, Artificial
  probe
  misc_feature (1)..(25): SEQ ID NO: 5753; WAN024GN3_at; Start 123; Stop 147
aacttcgcccagcaattcaaccatg

SEQ ID NO: 252020 - DNA, 25 bp, Artificial
  probe
  misc_feature (1)..(25): SEQ ID NO: 5753; WAN024GN3_at; Start 48; Stop 72
ttcttcggccacatcagggcggagt

SEQ ID NO: 252021 - DNA, 25 bp, Artificial
  probe
  misc_feature (1)..(25): SEQ ID NO: 5753; WAN024GN3_at; Start 59; Stop 83
catcagggcggagtacagtcttgcg

SEQ ID NO: 252022 - DNA, 25 bp, Artificial
  probe
  misc_feature (1)..(25): SEQ ID NO: 5753; WAN024GN3_at; Start 188; Stop 212
cttcttcagagaatcttaattttga

SEQ ID NO: 252023 - DNA, 25 bp, Artificial
  probe
  misc_feature (1)..(25): SEQ ID NO: 5753; WAN024GN3_at; Start 134; Stop 158
gcaattcaaccatgtcaacaatctt

SEQ ID NO: 252024 - DNA, 25 bp, Artificial
  probe
  misc_feature (1)..(25): SEQ ID NO: 5753; WAN024GN3_at; Start 101; Stop 125
taggtgcgacaccagttgtgtcaac

SEQ ID NO: 252025 - DNA, 25 bp, Artificial
  probe
  misc_feature (1)..(25): SEQ ID NO: 5753; WAN024GN3_at; Start 204; Stop 228
taattttgaaagattggcaacgtgt

SEQ ID NO: 252026 - DNA, 25 bp, Artificial
  probe
  misc_feature (1)..(25): SEQ ID NO: 5753; WAN024GN3_at; Start 152; Stop 176
caatcttagacaaggtggtcgcaaa

SEQ ID NO: 252027 - DNA, 25 bp, Artificial
  probe
  misc_feature (1)..(25): SEQ ID NO: 5753; WAN024GN3_at; Start 113; Stop 137
cagttgtgtcaacttcgcccagcaa

SEQ ID NO: 252028 - DNA, 25 bp, Artificial
  probe
  misc_feature (1)..(25): SEQ ID NO: 5753; WAN024GN3_at; Start 85; Stop 109
tcagccatagtcgtagtaggtgcga

SEQ ID NO: 252029 - DNA, 25 bp, Artificial
  probe
  misc_feature (1)..(25): SEQ ID NO: 5753; WAN024GN3_at; Start 246; Stop 270
aattttcatcttgcatcctttcgtg

SEQ ID NO: 252030 - DNA, 25 bp, Artificial
  probe
  misc_feature (1)..(25): SEQ ID NO: 5753; WAN024GN3_at; Start 162; Stop 186
caaggtggtcgcaaaggcagcagtt

SEQ ID NO: 252031 - DNA, 25 bp, Artificial
  probe
  misc_feature (1)..(25): SEQ ID NO: 5753; WAN024GN3_at; Start 235; Stop 259
tcttcttgcgtaattttcatcttgc

SEQ ID NO: 252032 - DNA, 25 bp, Artificial
  probe
  misc_feature (1)..(25): SEQ ID NO: 5753; WAN024GN3_at; Start 57; Stop 81
cacatcagggcggagtacagtcttg

SEQ ID NO: 252033 - DNA, 25 bp, Artificial
  probe
  misc_feature (1)..(25): SEQ ID NO: 5753; WAN024GN3_at; Start 169; Stop 193
gtcgcaaaggcagcagtttcttctt

SEQ ID NO: 252034 - DNA, 25 bp, Artificial
  probe
  misc_feature (1)..(25): SEQ ID NO: 5753; WAN024GN3_at; Start 165; Stop 189
ggtggtcgcaaaggcagcagtttct

SEQ ID NO: 252035 - DNA, 25 bp, Artificial
  probe
  misc_feature (1)..(25): SEQ ID NO: 5753; WAN024GN3_at; Start 148; Stop 172
tcaacaatcttagacaaggtggtcg

SEQ ID NO: 252036 - DNA, 25 bp, Artificial
  probe
  misc_feature (1)..(25): SEQ ID NO: 5753; WAN024GN3_at; Start 158; Stop 182
tagacaaggtggtcgcaaaggcagc

SEQ ID NO: 252037 - DNA, 25 bp, Artificial
  probe
  misc_feature (1)..(25): SEQ ID NO: 5753; WAN024GN3_at; Start 215; Stop 239
gattggcaacgtgtgttacctcttc

SEQ ID NO: 252038 - DNA, 25 bp, Artificial
  probe
  misc_feature (1)..(25): SEQ ID NO: 5753; WAN024GN3_at; Start 212; Stop 236
aaagattggcaacgtgtgttacctc

SEQ ID NO: 252039 - DNA, 25 bp, Artificial
  probe
  misc_feature (1)..(25): SEQ ID NO: 5753; WAN024GN3_at; Start 105; Stop 129
tgcgacaccagttgtgtcaacttcg

SEQ ID NO: 252040 - DNA, 25 bp, Artificial
  probe
  misc_feature (1)..(25): SEQ ID NO: 4561; WAN024GN4_at; Start 237; Stop 261
ccgccctgatgtggccgaagaagga

SEQ ID NO: 252041 - DNA, 25 bp, Artificial
  probe
  misc_feature (1)..(25): SEQ ID NO: 4561; WAN024GN4_at; Start 224; Stop 248
gcaagactgtactccgccctgatgt

SEQ ID NO: 252042 - DNA, 25 bp, Artificial
  probe
  misc_feature (1)..(25): SEQ ID NO: 4561; WAN024GN4_at; Start 67; Stop 91
gaagaggtaacacacgttgccaatc

SEQ ID NO: 252043 - DNA, 25 bp, Artificial
  probe
  misc_feature (1)..(25): SEQ ID NO: 4561; WAN024GN4_at; Start 127; Stop 151
gcctttgcgaccaccttgtctaaga

SEQ ID NO: 252044 - DNA, 25 bp, Artificial
  probe
  misc_feature (1)..(25): SEQ ID NO: 4561; WAN024GN4_at; Start 1; Stop 25
tatggtaaaatagaacagactaaaa

SEQ ID NO: 252045 - DNA, 25 bp, Artificial
  probe
  misc_feature (1)..(25): SEQ ID NO: 4561; WAN024GN4_at; Start 231; Stop 255
tgtactccgccctgatgtggccgaa

SEQ ID NO: 252046 - DNA, 25 bp, Artificial
  probe
  misc_feature (1)..(25): SEQ ID NO: 4561; WAN024GN4_at; Start 301; Stop 325
gacaactactatatcaaggtgccag

SEQ ID NO: 252047 - DNA, 25 bp, Artificial
  probe
  misc_feature (1)..(25): SEQ ID NO: 4561; WAN024GN4_at; Start 133; Stop 157
gcgaccaccttgtctaagattgttg

SEQ ID NO: 252048 - DNA, 25 bp, Artificial
  probe
  misc_feature (1)..(25): SEQ ID NO: 4561; WAN024GN4_at; Start 90; Stop 114
tctttcaaaattaagattctctgaa

SEQ ID NO: 252049 - DNA, 25 bp, Artificial
  probe
  misc_feature (1)..(25): SEQ ID NO: 4561; WAN024GN4_at; Start 215; Stop 239
tggctgaccgcaagactgtactccg

SEQ ID NO: 252050 - DNA, 25 bp, Artificial
  probe
  misc_feature (1)..(25): SEQ ID NO: 4561; WAN024GN4_at; Start 210; Stop 234
gactatggctgaccgcaagactgta

SEQ ID NO: 252051 - DNA, 25 bp, Artificial
  probe
  misc_feature (1)..(25): SEQ ID NO: 4561; WAN024GN4_at; Start 48; Stop 72
caagatgaaaattacgcaagaagag

SEQ ID NO: 252052 - DNA, 25 bp, Artificial
  probe
  misc_feature (1)..(25): SEQ ID NO: 4561; WAN024GN4_at; Start 64; Stop 88
caagaagaggtaacacacgttgcca

SEQ ID NO: 252053 - DNA, 25 bp, Artificial
  probe
  misc_feature (1)..(25): SEQ ID NO: 4561; WAN024GN4_at; Start 312; Stop 336
tatcaaggtgccagctatcctagac

SEQ ID NO: 252054 - DNA, 25 bp, Artificial
  probe
  misc_feature (1)..(25): SEQ ID NO: 4561; WAN024GN4_at; Start 166; Stop 190
gaattgctgggcgaagttgacacaa

SEQ ID NO: 252055 - DNA, 25 bp, Artificial
  probe
  misc_feature (1)..(25): SEQ ID NO: 4561; WAN024GN4_at; Start 213; Stop 237
tatggctgaccgcaagactgtactc

SEQ ID NO: 252056 - DNA, 25 bp, Artificial
  probe
  misc_feature (1)..(25): SEQ ID NO: 4561; WAN024GN4_at; Start 186; Stop 210
cacaactggtgtcgcacctactacg

SEQ ID NO: 252057 - DNA, 25 bp, Artificial
  probe
  misc_feature (1)..(25): SEQ ID NO: 4561; WAN024GN4_at; Start 117; Stop 141
agaaactgctgcctttgcgaccacc

SEQ ID NO: 252058 - DNA, 25 bp, Artificial
  probe
  misc_feature (1)..(25): SEQ ID NO: 4561; WAN024GN4_at; Start 171; Stop 195
gctgggcgaagttgacacaactggt

SEQ ID NO: 252059 - DNA, 25 bp, Artificial
  probe
  misc_feature (1)..(25): SEQ ID NO: 4561; WAN024GN4_at; Start 138; Stop 162
caccttgtctaagattgttgacatg

SEQ ID NO: 252060 - DNA, 25 bp, Artificial
  probe
  misc_feature (1)..(25): SEQ ID NO: 4561; WAN024GN4_at; Start 36; Stop 60
cacgaaaggatgcaagatgaaaatt

SEQ ID NO: 252061 - DNA, 25 bp, Artificial
  probe
  misc_feature (1)..(25): SEQ ID NO: 4561; WAN024GN4_at; Start 178; Stop 202
gaagttgacacaactggtgtcgcac

SEQ ID NO: 252062 - DNA, 25 bp, Artificial
  probe
  misc_feature (1)..(25): SEQ ID NO: 4561; WAN024GN4_at; Start 60; Stop 84
tacgcaagaagaggtaacacacgtt

SEQ ID NO: 252063 - DNA, 25 bp, Artificial
  probe
  misc_feature (1)..(25): SEQ ID NO: 4561; WAN024GN4_at; Start 193; Stop 217
ggtgtcgcacctactacgactatgg

SEQ ID NO: 252064 - DNA, 25 bp, Artificial
  probe
  misc_feature (1)..(25): SEQ ID NO: 4561; WAN024GN4_at; Start 11; Stop 35
tagaacagactaaaaatcatcattt

SEQ ID NO: 252065 - DNA, 25 bp, Artificial
  probe
  misc_feature (1)..(25): SEQ ID NO: 4561; WAN024GN4_at; Start 79; Stop 103
cacgttgccaatctttcaaaattaa

SEQ ID NO: 252066 - DNA, 25 bp, Artificial
  probe
  misc_feature (1)..(25): SEQ ID NO: 4561; WAN024GN4_at; Start 30; Stop 54
tcatttcacgaaaggatgcaagatg

SEQ ID NO: 252067 - DNA, 25 bp, Artificial
  probe
  misc_feature (1)..(25): SEQ ID NO: 4561; WAN024GN4_at; Start 207; Stop 231
tacgactatggctgaccgcaagact

SEQ ID NO: 252068 - DNA, 25 bp, Artificial
  probe
  misc_feature (1)..(25): SEQ ID NO: 4561; WAN024GN4_at; Start 156; Stop 180
tgacatggttgaattgctgggcgaa

SEQ ID NO: 252069 - DNA, 25 bp, Artificial
  probe
  misc_feature (1)..(25): SEQ ID NO: 4561; WAN024GN4_at; Start 307; Stop 331
tactatatcaaggtgccagctatcc

SEQ ID NO: 252070 - DNA, 25 bp, Artificial
  probe
  misc_feature (1)..(25): SEQ ID NO: 4561; WAN024GN4_at; Start 21; Stop 45
taaaaatcatcatttcacgaaagga

SEQ ID NO: 252071 - DNA, 25 bp, Artificial
  probe
  misc_feature (1)..(25): SEQ ID NO: 4561; WAN024GN4_at; Start 204; Stop 228
tactacgactatggctgaccgcaag

SEQ ID NO: 252072 - DNA, 25 bp, Artificial
  probe
  misc_feature (1)..(25): SEQ ID NO: 4561; WAN024GN4_at; Start 72; Stop 96
ggtaacacacgttgccaatctttca

SEQ ID NO: 252073 - DNA, 25 bp, Artificial
  probe
  misc_feature (1)..(25): SEQ ID NO: 4561; WAN024GN4_at; Start 153; Stop 177
tgttgacatggttgaattgctgggc

SEQ ID NO: 252074 - DNA, 25 bp, Artificial
  probe
  misc_feature (1)..(25): SEQ ID NO: 5778; WAN024GN5_at; Start 537; Stop 561
caatcaactagaaattaaagtggga

SEQ ID NO: 252075 - DNA, 25 bp, Artificial
  probe
  misc_feature (1)..(25): SEQ ID NO: 5778; WAN024GN5_at; Start 77; Stop 101
cgaaatggacaggtggtaaaagaca

SEQ ID NO: 252076 - DNA, 25 bp, Artificial
  probe
  misc_feature (1)..(25): SEQ ID NO: 5778; WAN024GN5_at; Start 647; Stop 671
catttacgtcttatactcatgaggg

SEQ ID NO: 252077 - DNA, 25 bp, Artificial
  probe
  misc_feature (1)..(25): SEQ ID NO: 5778; WAN024GN5_at; Start 447; Stop 471
gaatcaatttaatgttccatatgga

SEQ ID NO: 252078 - DNA, 25 bp, Artificial
  probe
  misc_feature (1)..(25): SEQ ID NO: 5778; WAN024GN5_at; Start 685; Stop 709
gatcaagtaagattaagagatgcct

SEQ ID NO: 252079 - DNA, 25 bp, Artificial
  probe
  misc_feature (1)..(25): SEQ ID NO: 5778; WAN024GN5_at; Start 499; Stop 523
gaggaattgatatctgctatttcag

SEQ ID NO: 252080 - DNA, 25 bp, Artificial
  probe
  misc_feature (1)..(25): SEQ ID NO: 5778; WAN024GN5_at; Start 573; Stop 597
ggcaattgtagatgttcgaacagga

SEQ ID NO: 252081 - DNA, 25 bp, Artificial
  probe
  misc_feature (1)..(25): SEQ ID NO: 5778; WAN024GN5_at; Start 258; Stop 282
ggacaatcctcaagaattgattgaa

SEQ ID NO: 252082 - DNA, 25 bp, Artificial
  probe
  misc_feature (1)..(25): SEQ ID NO: 5778; WAN024GN5_at; Start 337; Stop 361
tctgcagatcgtgatgaaagaatag

SEQ ID NO: 252083 - DNA, 25 bp, Artificial
  probe
  misc_feature (1)..(25): SEQ ID NO: 5778; WAN024GN5_at; Start 383; Stop 407
gagctgcacgtattctatatatgtt

SEQ ID NO: 252084 - DNA, 25 bp, Artificial
  probe
  misc_feature (1)..(25): SEQ ID NO: 5778; WAN024GN5_at; Start 552; Stop 576
taaagtgggagattttgaaaaggca

SEQ ID NO: 252085 - DNA, 25 bp, Artificial
  probe
  misc_feature (1)..(25): SEQ ID NO: 5778; WAN024GN5_at; Start 223; Stop 247
aacgctgaactaataaattgctatc

SEQ ID NO: 252086 - DNA, 25 bp, Artificial
  probe
  misc_feature (1)..(25): SEQ ID NO: 5778; WAN024GN5_at; Start 414; Stop 438
gaactttaatggtctatatcgtgtg

SEQ ID NO: 252087 - DNA, 25 bp, Artificial
  probe
  misc_feature (1)..(25): SEQ ID NO: 5778; WAN024GN5_at; Start 98; Stop 122
gacaattattgcctgttattagaga

SEQ ID NO: 252088 - DNA, 25 bp, Artificial
  probe
  misc_feature (1)..(25): SEQ ID NO: 5778; WAN024GN5_at; Start 368; Stop 392
tgtccgaagtacaaagagctgcacg

SEQ ID NO: 252089 - DNA, 25 bp, Artificial
  probe
  misc_feature (1)..(25): SEQ ID NO: 5778; WAN024GN5_at; Start 835; Stop 859
tcttcaagtcgaggaaaaatttctg

SEQ ID NO: 252090 - DNA, 25 bp, Artificial
  probe
  misc_feature (1)..(25): SEQ ID NO: 5778; WAN024GN5_at; Start 822; Stop 846
taatggagcaaaatcttcaagtcga

SEQ ID NO: 252091 - DNA, 25 bp, Artificial
  probe
  misc_feature (1)..(25): SEQ ID NO: 5778; WAN024GN5_at; Start 326; Stop 350
tagatttacgttctgcagatcgtga

SEQ ID NO: 252092 - DNA, 25 bp, Artificial
  probe
  misc_feature (1)..(25): SEQ ID NO: 5778; WAN024GN5_at; Start 593; Stop 617
caggagattttgtgtattttgaccc

SEQ ID NO: 252093 - DNA, 25 bp, Artificial
  probe
  misc_feature (1)..(25): SEQ ID NO: 5778; WAN024GN5_at; Start 754; Stop 778
tcttctagtgctttagtagaggagt

SEQ ID NO: 252094 - DNA, 25 bp, Artificial
  probe
  misc_feature (1)..(25): SEQ ID NO: 5778; WAN024GN5_at; Start 65; Stop 89
tacaaccgttcacgaaatggacagg

SEQ ID NO: 252095 - DNA, 25 bp, Artificial
  probe
  misc_feature (1)..(25): SEQ ID NO: 5778; WAN024GN5_at; Start 711; Stop 735
taagagattgagtgatacaggagct

SEQ ID NO: 252096 - DNA, 25 bp, Artificial
  probe
  misc_feature (1)..(25): SEQ ID NO: 5778; WAN024GN5_at; Start 728; Stop 752
caggagcttatgttatgttatcaaa

SEQ ID NO: 252097 - DNA, 25 bp, Artificial
  probe
  misc_feature (1)..(25): SEQ ID NO: 5778; WAN024GN5_at; Start 620; Stop 644
catatattccattgtctgagacgag

SEQ ID NO: 252098 - DNA, 25 bp, Artificial
  probe
  misc_feature (1)..(25): SEQ ID NO: 5778; WAN024GN5_at; Start 667; Stop 691
gagggattctcttttgcagatcaag

SEQ ID NO: 252099 - DNA, 25 bp, Artificial
  probe
  misc_feature (1)..(25): SEQ ID NO: 5778; WAN024GN5_at; Start 795; Stop 819
tatacattatgttgaagctacccga

SEQ ID NO: 252100 - DNA, 25 bp, Artificial
  probe
  misc_feature (1)..(25): SEQ ID NO: 5778; WAN024GN5_at; Start 808; Stop 832
gaagctacccgaactaatggagcaa

SEQ ID NO: 252101 - DNA, 25 bp, Artificial
  probe
  misc_feature (1)..(25): SEQ ID NO: 5778; WAN024GN5_at; Start 187; Stop 211
gatttggctcctaaagatgcagtta

SEQ ID NO: 252102 - DNA, 25 bp, Artificial
  probe
  misc_feature (1)..(25): SEQ ID NO: 5778; WAN024GN5_at; Start 153; Stop 177
cgaaccttttgttggaggtggagct

SEQ ID NO: 252103 - DNA, 25 bp, Artificial
  probe
  misc_feature (1)..(25): SEQ ID NO: 5778; WAN024GN5_at; Start 352; Stop 376
gaaagaatagatatgatgtccgaag

SEQ ID NO: 252104 - DNA, 25 bp, Artificial
  probe
  misc_feature (1)..(25): SEQ ID NO: 5778; WAN024GN5_at; Start 462; Stop 486
tccatatggacgttataagaatcct

SEQ ID NO: 252105 - DNA, 25 bp, Artificial
  probe
  misc_feature (1)..(25): SEQ ID NO: 5778; WAN024GN5_at; Start 242; Stop 266
gctatcaacaaattaaggacaatcc

SEQ ID NO: 252106 - DNA, 25 bp, Artificial
  probe
  misc_feature (1)..(25): SEQ ID NO: 5778; WAN024GN5_at; Start 632; Stop 656
tgtctgagacgagtgcatttacgtc

SEQ ID NO: 252107 - DNA, 25 bp, Artificial
  probe
  misc_feature (1)..(25): SEQ ID NO: 5778; WAN024GN5_at; Start 698; Stop 722
taagagatgcctttaagagattgag

SEQ ID NO: 252108 - DNA, 25 bp, Artificial
  probe
  misc_feature (1)..(25): SEQ ID NO: 3337; WAN024GN6_at; Start 53; Stop 77
taagagctaaaatactggaaacagt

SEQ ID NO: 252109 - DNA, 25 bp, Artificial
  probe
  misc_feature (1)..(25): SEQ ID NO: 3337; WAN024GN6_at; Start 1109; Stop 1133
gcctacctgaagtcattattgaacc

SEQ ID NO: 252110 - DNA, 25 bp, Artificial
  probe
  misc_feature (1)..(25): SEQ ID NO: 3337; WAN024GN6_at; Start 199; Stop 223
gacgaacacgatacaagcgtaggga

SEQ ID NO: 252111 - DNA, 25 bp, Artificial
  probe
  misc_feature (1)..(25): SEQ ID NO: 3337; WAN024GN6_at; Start 1075; Stop 1099
gaaatgaactacaaacccaaactgc

SEQ ID NO: 252112 - DNA, 25 bp, Artificial
  probe
  misc_feature (1)..(25): SEQ ID NO: 3337; WAN024GN6_at; Start 534; Stop 558
gattcaatcccactttgataagcct

SEQ ID NO: 252113 - DNA, 25 bp, Artificial
  probe
  misc_feature (1)..(25): SEQ ID NO: 3337; WAN024GN6_at; Start 436; Stop 460
gaaatagaagcaattggaatcgcgc

SEQ ID NO: 252114 - DNA, 25 bp, Artificial
  probe
  misc_feature (1)..(25): SEQ ID NO: 3337; WAN024GN6_at; Start 862; Stop 886
cctagtttagtcaaaaatgccgatg

SEQ ID NO: 252115 - DNA, 25 bp, Artificial
  probe
  misc_feature (1)..(25): SEQ ID NO: 3337; WAN024GN6_at; Start 611; Stop 635
gtcgccaacagaatgaccctaattt

SEQ ID NO: 252116 - DNA, 25 bp, Artificial
  probe
  misc_feature (1)..(25): SEQ ID NO: 3337; WAN024GN6_at; Start 83; Stop 107
cattaggtcccatttcacgaattga

SEQ ID NO: 252117 - DNA, 25 bp, Artificial
  probe
  misc_feature (1)..(25): SEQ ID NO: 3337; WAN024GN6_at; Start 597; Stop 621
taaacgcctatttagtcgccaacag

SEQ ID NO: 252118 - DNA, 25 bp, Artificial
  probe
  misc_feature (1)..(25): SEQ ID NO: 3337; WAN024GN6_at; Start 1094; Stop 1118
aactgctctataatcgcctacctga

SEQ ID NO: 252119 - DNA, 25 bp, Artificial
  probe
  misc_feature (1)..(25): SEQ ID NO: 3337; WAN024GN6_at; Start 290; Stop 314
aacatttcacttttgctttaggaga

SEQ ID NO: 252120 - DNA, 25 bp, Artificial
  probe
  misc_feature (1)..(25): SEQ ID NO: 3337; WAN024GN6_at; Start 1128; Stop 1152
tgaaccttacaatgattttacagcc

SEQ ID NO: 252121 - DNA, 25 bp, Artificial
  probe
  misc_feature (1)..(25): SEQ ID NO: 3337; WAN024GN6_at; Start 662; Stop 686
tgcactgttcttatatctacgacgg

SEQ ID NO: 252122 - DNA, 25 bp, Artificial
  probe
  misc_feature (1)..(25): SEQ ID NO: 3337; WAN024GN6_at; Start 768; Stop 792
cgggcgcaagggatgcttacaaact

SEQ ID NO: 252123 - DNA, 25 bp, Artificial
  probe
  misc_feature (1)..(25): SEQ ID NO: 3337; WAN024GN6_at; Start 923; Stop 947
taggtgacactggaataatcacact

SEQ ID NO: 252124 - DNA, 25 bp, Artificial
  probe
  misc_feature (1)..(25): SEQ ID NO: 3337; WAN024GN6_at; Start 677; Stop 701
tctacgacggaaacatttatgggaa

SEQ ID NO: 252125 - DNA, 25 bp, Artificial
  probe
  misc_feature (1)..(25): SEQ ID NO: 3337; WAN024GN6_at; Start 787; Stop 811
caaacttttgctggagaatcttggt

SEQ ID NO: 252126 - DNA, 25 bp, Artificial
  probe
  misc_feature (1)..(25): SEQ ID NO: 3337; WAN024GN6_at; Start 233; Stop 257
tcctgctagacattcaagctaaacg

SEQ ID NO: 252127 - DNA, 25 bp, Artificial
  probe
  misc_feature (1)..(25): SEQ ID NO: 3337; WAN024GN6_at; Start 124; Stop 148
ggaataacacctgcaacaactagca

SEQ ID NO: 252128 - DNA, 25 bp, Artificial
  probe
  misc_feature (1)..(25): SEQ ID NO: 3337; WAN024GN6_at; Start 505; Stop 529
cctttatggcaacatatcgacttag

SEQ ID NO: 252129 - DNA, 25 bp, Artificial
  probe
  misc_feature (1)..(25): SEQ ID NO: 3337; WAN024GN6_at; Start 1144; Stop 1168
tttacagccgcacactcagctattg

SEQ ID NO: 252130 - DNA, 25 bp, Artificial
  probe
  misc_feature (1)..(25): SEQ ID NO: 3337; WAN024GN6_at; Start 184; Stop 208
ttagaacttggtgaagacgaacacg

SEQ ID NO: 252131 - DNA, 25 bp, Artificial
  probe
  misc_feature (1)..(25): SEQ ID NO: 3337; WAN024GN6_at; Start 136; Stop 160
gcaacaactagcagtatcacaaatg

SEQ ID NO: 252132 - DNA, 25 bp, Artificial
  probe
  misc_feature (1)..(25): SEQ ID NO: 3337; WAN024GN6_at; Start 70; Stop 94
gaaacagtttacacattaggtccca

SEQ ID NO: 252133 - DNA, 25 bp, Artificial
  probe
  misc_feature (1)..(25): SEQ ID NO: 3337; WAN024GN6_at; Start 645; Stop 669
tcattttgctagaggtatgcactgt

SEQ ID NO: 252134 - DNA, 25 bp, Artificial
  probe
  misc_feature (1)..(25): SEQ ID NO: 3337; WAN024GN6_at; Start 390; Stop 414
cattaaccagacactaaagcaattc

SEQ ID NO: 252135 - DNA, 25 bp, Artificial
  probe
  misc_feature (1)..(25): SEQ ID NO: 3337; WAN024GN6_at; Start 730; Stop 754
catacagttgtttcatctgagggag

SEQ ID NO: 252136 - DNA, 25 bp, Artificial
  probe
  misc_feature (1)..(25): SEQ ID NO: 3337; WAN024GN6_at; Start 908; Stop 932
taaccgcttatcaattaggtgacac

SEQ ID NO: 252137 - DNA, 25 bp, Artificial
  probe
  misc_feature (1)..(25): SEQ ID NO: 3337; WAN024GN6_at; Start 262; Stop 286
tactacattggttgtgaactatctg

SEQ ID NO: 252138 - DNA, 25 bp, Artificial
  probe
  misc_feature (1)..(25): SEQ ID NO: 3337; WAN024GN6_at; Start 713; Stop 737
tgattggagaaatagggcatacagt

SEQ ID NO: 252139 - DNA, 25 bp, Artificial
  probe
  misc_feature (1)..(25): SEQ ID NO: 3337; WAN024GN6_at; Start 449; Stop 473
ttggaatcgcgctacctggtcgcta

SEQ ID NO: 252140 - DNA, 25 bp, Artificial
  probe
  misc_feature (1)..(25): SEQ ID NO: 3337; WAN024GN6_at; Start 579; Stop 603
taactgtatggctataggtaaacgc

SEQ ID NO: 252141 - DNA, 25 bp, Artificial
  probe
  misc_feature (1)..(25): SEQ ID NO: 3337; WAN024GN6_at; Start 101; Stop 125
gaattgaaatcgctactaaaacagg

SEQ ID NO: 252142 - DNA, 25 bp, Artificial
  probe
  misc_feature (1)..(25): SEQ ID NO: 2137; WAN024GN7_at; Start 1133; Stop 1157
taagtggtttacttgctacaggaag

SEQ ID NO: 252143 - DNA, 25 bp, Artificial
  probe
  misc_feature (1)..(25): SEQ ID NO: 2137; WAN024GN7_at; Start 1086; Stop 1110
ggttccgctaacttatacagatcca

SEQ ID NO: 252144 - DNA, 25 bp, Artificial
  probe
  misc_feature (1)..(25): SEQ ID NO: 2137; WAN024GN7_at; Start 887; Stop 911
gatatttagcacataagaagaaagc

SEQ ID NO: 252145 - DNA, 25 bp, Artificial
  probe
  misc_feature (1)..(25): SEQ ID NO: 2137; WAN024GN7_at; Start 756; Stop 780
taatctagatgcaaataaagtagct

SEQ ID NO: 252146 - DNA, 25 bp, Artificial
  probe
  misc_feature (1)..(25): SEQ ID NO: 2137; WAN024GN7_at; Start 137; Stop 161
caagttttcctattccaggatggga

SEQ ID NO: 252147 - DNA, 25 bp, Artificial
  probe
  misc_feature (1)..(25): SEQ ID NO: 2137; WAN024GN7_at; Start 339; Stop 363
tttcattagaggagaggctggagca

SEQ ID NO: 252148 - DNA, 25 bp, Artificial
  probe
  misc_feature (1)..(25): SEQ ID NO: 2137; WAN024GN7_at; Start 968; Stop 992
taaatgaaccagcaatgtttggcgt

SEQ ID NO: 252149 - DNA, 25 bp, Artificial
  probe
  misc_feature (1)..(25): SEQ ID NO: 2137; WAN024GN7_at; Start 369; Stop 393
gcctaccgctttcatggcatcaaaa

SEQ ID NO: 252150 - DNA, 25 bp, Artificial
  probe
  misc_feature (1)..(25): SEQ ID NO: 2137; WAN024GN7_at; Start 709; Stop 733
cacggaggaaatgttgttaatgcag

SEQ ID NO: 252151 - DNA, 25 bp, Artificial
  probe
  misc_feature (1)..(25): SEQ ID NO: 2137; WAN024GN7_at; Start 186; Stop 210
tgctgactatttatggaagggtgtt

SEQ ID NO: 252152 - DNA, 25 bp, Artificial
  probe
  misc_feature (1)..(25): SEQ ID NO: 2137; WAN024GN7_at; Start 355; Stop 379
gctggagcaggaatgcctaccgctt

SEQ ID NO: 252153 - DNA, 25 bp, Artificial
  probe
  misc_feature (1)..(25): SEQ ID NO: 2137; WAN024GN7_at; Start 694; Stop 718
tggtttgtaggattacacggaggaa

SEQ ID NO: 252154 - DNA, 25 bp, Artificial
  probe
  misc_feature (1)..(25): SEQ ID NO: 2137; WAN024GN7_at; Start 726; Stop 750
taatgcagttatgaaaccgttatgg

SEQ ID NO: 252155 - DNA, 25 bp, Artificial
  probe
  misc_feature (1)..(25): SEQ ID NO: 2137; WAN024GN7_at; Start 1041; Stop 1065
aatgtttaacttactagtagcgtgg

SEQ ID NO: 252156 - DNA, 25 bp, Artificial
  probe
  misc_feature (1)..(25): SEQ ID NO: 2137; WAN024GN7_at; Start 32; Stop 56
cagtagcggctagattgggtaataa

SEQ ID NO: 252157 - DNA, 25 bp, Artificial
  probe
  misc_feature (1)..(25): SEQ ID NO: 2137; WAN024GN7_at; Start 72; Stop 96
tattcgagacggtattactctaact

SEQ ID NO: 252158 - DNA, 25 bp, Artificial
  probe
  misc_feature (1)..(25): SEQ ID NO: 2137; WAN024GN7_at; Start 740; Stop 764
aaccgttatggttagctaatctaga

SEQ ID NO: 252159 - DNA, 25 bp, Artificial
  probe
  misc_feature (1)..(25): SEQ ID NO: 2137; WAN024GN7_at; Start 864; Stop 888
cataggtttagttcttgcgttagga

SEQ ID NO: 252160 - DNA, 25 bp, Artificial
  probe
  misc_feature (1)..(25): SEQ ID NO: 2137; WAN024GN7_at; Start 250; Stop 274
ggtatcgcttactttatggctagac

SEQ ID NO: 252161 - DNA, 25 bp, Artificial
  probe
  misc_feature (1)..(25): SEQ ID NO: 2137; WAN024GN7_at; Start 1070; Stop 1094
caatggcatcaggtttggttccgct

SEQ ID NO: 252162 - DNA, 25 bp, Artificial
  probe
  misc_feature (1)..(25): SEQ ID NO: 2137; WAN024GN7_at; Start 423; Stop 447
gattaatggctatatctaccaatgg

SEQ ID NO: 252163 - DNA, 25 bp, Artificial
  probe
  misc_feature (1)..(25): SEQ ID NO: 2137; WAN024GN7_at; Start 470; Stop 494
taaaaatgccggatggtgttccacc

SEQ ID NO: 252164 - DNA, 25 bp, Artificial
  probe
  misc_feature (1)..(25): SEQ ID NO: 2137; WAN024GN7_at; Start 778; Stop 802
gcttatcaaactggagaaactcttc

SEQ ID NO: 252165 - DNA, 25 bp, Artificial
  probe
  misc_feature (1)..(25): SEQ ID NO: 2137; WAN024GN7_at; Start 168; Stop 192
tctgggtgatattggtgttgctgac

SEQ ID NO: 252166 - DNA, 25 bp, Artificial
  probe
  misc_feature (1)..(25): SEQ ID NO: 2137; WAN024GN7_at; Start 294; Stop 318
tcctgctggtattgtgtcattatca

SEQ ID NO: 252167 - DNA, 25 bp, Artificial
  probe
  misc_feature (1)..(25): SEQ ID NO: 2137; WAN024GN7_at; Start 517; Stop 541
gccattattcctggtgcagtgacta

SEQ ID NO: 252168 - DNA, 25 bp, Artificial
  probe
  misc_feature (1)..(25): SEQ ID NO: 2137; WAN024GN7_at; Start 57; Stop 81
taaagcgttggtttctattcgagac

SEQ ID NO: 252169 - DNA, 25 bp, Artificial
  probe
  misc_feature (1)..(25): SEQ ID NO: 2137; WAN024GN7_at; Start 19; Stop 43
gaaaagttacttccagtagcggcta

SEQ ID NO: 252170 - DNA, 25 bp, Artificial
  probe
  misc_feature (1)..(25): SEQ ID NO: 2137; WAN024GN7_at; Start 484; Stop 508
ggtgttccaccagcagtatctaaaa

SEQ ID NO: 252171 - DNA, 25 bp, Artificial
  probe
  misc_feature (1)..(25): SEQ ID NO: 2137; WAN024GN7_at; Start 266; Stop 290
tggctagacaatacaaagttgatgg

SEQ ID NO: 252172 - DNA, 25 bp, Artificial
  probe
  misc_feature (1)..(25): SEQ ID NO: 2137; WAN024GN7_at; Start 327; Stop 351
tacagttacgcctttcattagagga

SEQ ID NO: 252173 - DNA, 25 bp, Artificial
  probe
  misc_feature (1)..(25): SEQ ID NO: 2137; WAN024GN7_at; Start 1099; Stop 1123
tatacagatccaggttggactatgc

SEQ ID NO: 252174 - DNA, 25 bp, Artificial
  probe
  misc_feature (1)..(25): SEQ ID NO: 2137; WAN024GN7_at; Start 843; Stop 867
cataggtggcggtggtgcaaccata

SEQ ID NO: 252175 - DNA, 25 bp, Artificial
  probe
  misc_feature (1)..(25): SEQ ID NO: 2137; WAN024GN7_at; Start 279; Stop 303
caaagttgatggtattcctgctggt

SEQ ID NO: 252176 - DNA, 25 bp, Artificial
  probe
  misc_feature (1)..(25): SEQ ID NO: 5089; WAN024GN8_at; Start 629; Stop 653
cctttcatgaccaagagttgcgtga

SEQ ID NO: 252177 - DNA, 25 bp, Artificial
  probe
  misc_feature (1)..(25): SEQ ID NO: 5089; WAN024GN8_at; Start 644; Stop 668
agttgcgtgaagtcgttgatctcgt

SEQ ID NO: 252178 - DNA, 25 bp, Artificial
  probe
  misc_feature (1)..(25): SEQ ID NO: 5089; WAN024GN8_at; Start 584; Stop 608
caggtgcggatgtgatacttgttcc

SEQ ID NO: 252179 - DNA, 25 bp, Artificial
  probe
  misc_feature (1)..(25): SEQ ID NO: 5089; WAN024GN8_at; Start 414; Stop 438
tgtctgtttgactggaaatcctgga

SEQ ID NO: 252180 - DNA, 25 bp, Artificial
  probe
  misc_feature (1)..(25): SEQ ID NO: 5089; WAN024GN8_at; Start 194; Stop 218
tgaattgtgttgatgtttttgagcc

SEQ ID NO: 252181 - DNA, 25 bp, Artificial
  probe
  misc_feature (1)..(25): SEQ ID NO: 5089; WAN024GN8_at; Start 266; Stop 290
tacaccagcttgttgcttgtccaat

SEQ ID NO: 252182 - DNA, 25 bp, Artificial
  probe
  misc_feature (1)..(25): SEQ ID NO: 5089; WAN024GN8_at; Start 70; Stop 94
caaagtattttagcaagtgaaggta

SEQ ID NO: 252183 - DNA, 25 bp, Artificial
  probe
  misc_feature (1)..(25): SEQ ID NO: 5089; WAN024GN8_at; Start 537; Stop 561
gaatgagcctgtggcagagctttct

SEQ ID NO: 252184 - DNA, 25 bp, Artificial
  probe
  misc_feature (1)..(25): SEQ ID NO: 5089; WAN024GN8_at; Start 659; Stop 683
ttgatctcgttcatagtaagggtgg

SEQ ID NO: 252185 - DNA, 25 bp, Artificial
  probe
  misc_feature (1)..(25): SEQ ID NO: 5089; WAN024GN8_at; Start 825; Stop 849
taatatttatgcattgagcaaggca

SEQ ID NO: 252186 - DNA, 25 bp, Artificial
  probe
  misc_feature (1)..(25): SEQ ID NO: 5089; WAN024GN8_at; Start 319; Stop 343
tctgcaaagatgctagaggaaacac

SEQ ID NO: 252187 - DNA, 25 bp, Artificial
  probe
  misc_feature (1)..(25): SEQ ID NO: 5089; WAN024GN8_at; Start 37; Stop 61
gagatattacagatgaatgctgaag

SEQ ID NO: 252188 - DNA, 25 bp, Artificial
  probe
  misc_feature (1)..(25): SEQ ID NO: 5089; WAN024GN8_at; Start 863; Stop 887
gacatacagtatctcgcttggctag

SEQ ID NO: 252189 - DNA, 25 bp, Artificial
  probe
  misc_feature (1)..(25): SEQ ID NO: 5089; WAN024GN8_at; Start 365; Stop 389
ttgctagtgttgaaacattgaagcg

SEQ ID NO: 252190 - DNA, 25 bp, Artificial
  probe
  misc_feature (1)..(25): SEQ ID NO: 5089; WAN024GN8_at; Start 88; Stop 112
gaaggtagagttgttctatctgaaa

SEQ ID NO: 252191 - DNA, 25 bp, Artificial
  probe
  misc_feature (1)..(25): SEQ ID NO: 5089; WAN024GN8_at; Start 226; Stop 250
tatgctttggatagttcaggtgatg

SEQ ID NO: 252192 - DNA, 25 bp, Artificial
  probe
  misc_feature (1)..(25): SEQ ID NO: 5089; WAN024GN8_at; Start 728; Stop 752
cagatactatcaaggaaattgcact

SEQ ID NO: 252193 - DNA, 25 bp, Artificial
  probe
  misc_feature (1)..(25): SEQ ID NO: 5089; WAN024GN8_at; Start 250; Stop 274
gatgttattcatcgcttacaccagc

SEQ ID NO: 252194 - DNA, 25 bp, Artificial
  probe
  misc_feature (1)..(25): SEQ ID NO: 5089; WAN024GN8_at; Start 615; Stop 639
tggaaccgttccagcctttcatgac

SEQ ID NO: 252195 - DNA, 25 bp, Artificial
  probe
  misc_feature (1)..(25): SEQ ID NO: 5089; WAN024GN8_at; Start 13; Stop 37
cgtttaattagtgcaaatccatctg

SEQ ID NO: 252196 - DNA, 25 bp, Artificial
  probe
  misc_feature (1)..(25): SEQ ID NO: 5089; WAN024GN8_at; Start 303; Stop 327
ggaaccgattgacccatctgcaaag

SEQ ID NO: 252197 - DNA, 25 bp, Artificial
  probe
  misc_feature (1)..(25): SEQ ID NO: 5089; WAN024GN8_at; Start 692; Stop 716
tgagtgctattggtactagccaaga

SEQ ID NO: 252198 - DNA, 25 bp, Artificial
  probe
  misc_feature (1)..(25): SEQ ID NO: 5089; WAN024GN8_at; Start 107; Stop 131
ctgaaaatgtagttactcgtgagac

SEQ ID NO: 252199 - DNA, 25 bp, Artificial
  probe
  misc_feature (1)..(25): SEQ ID NO: 5089; WAN024GN8_at; Start 380; Stop 404
cattgaagcgaatagaggagttagg

SEQ ID NO: 252200 - DNA, 25 bp, Artificial
  probe
  misc_feature (1)..(25): SEQ ID NO: 5089; WAN024GN8_at; Start 287; Stop 311
caattggtgtaaatttggaaccgat

SEQ ID NO: 252201 - DNA, 25 bp, Artificial
  probe
  misc_feature (1)..(25): SEQ ID NO: 5089; WAN024GN8_at; Start 876; Stop 900
tcgcttggctaggtcagtaaatagg

SEQ ID NO: 252202 - DNA, 25 bp, Artificial
  probe
  misc_feature (1)..(25): SEQ ID NO: 5089; WAN024GN8_at; Start 599; Stop 623
tacttgttccagcagttggaaccgt

SEQ ID NO: 252203 - DNA, 25 bp, Artificial
  probe
  misc_feature (1)..(25): SEQ ID NO: 5089; WAN024GN8_at; Start 708; Stop 732
tagccaagaaacatctgatacagat

SEQ ID NO: 252204 - DNA, 25 bp, Artificial
  probe
  misc_feature (1)..(25): SEQ ID NO: 5089; WAN024GN8_at; Start 336; Stop 360
ggaaacacaggaaattgttgcaggt

SEQ ID NO: 252205 - DNA, 25 bp, Artificial
  probe
  misc_feature (1)..(25): SEQ ID NO: 5089; WAN024GN8_at; Start 566; Stop 590
cagagcaattgttggaagcaggtgc

SEQ ID NO: 252206 - DNA, 25 bp, Artificial
  probe
  misc_feature (1)..(25): SEQ ID NO: 5089; WAN024GN8_at; Start 158; Stop 182
aaattgctagagcttttggagctga

SEQ ID NO: 252207 - DNA, 25 bp, Artificial
  probe
  misc_feature (1)..(25): SEQ ID NO: 5089; WAN024GN8_at; Start 809; Stop 833
gactggcaacagtcgataatattta

SEQ ID NO: 252208 - DNA, 25 bp, Artificial
  probe
  misc_feature (1)..(25): SEQ ID NO: 5089; WAN024GN8_at; Start 846; Stop 870
ggcaattagaggagtgagacataca

SEQ ID NO: 252209 - DNA, 25 bp, Artificial
  probe
  misc_feature (1)..(25): SEQ ID NO: 5089; WAN024GN8_at; Start 430; Stop 454
aatcctggaacaggagttagcaatc

SEQ ID NO: 252210 - DNA, 25 bp, Artificial
  probe
  misc_feature (1)..(25): SEQ ID NO: 2480; WAN024GN9_at; Start 35; Stop 59
caggtatgagtacaagtctgctagt

SEQ ID NO: 252211 - DNA, 25 bp, Artificial
  probe
  misc_feature (1)..(25): SEQ ID NO: 2480; WAN024GN9_at; Start 39; Stop 63
tatgagtacaagtctgctagtgaca

SEQ ID NO: 252212 - DNA, 25 bp, Artificial
  probe
  misc_feature (1)..(25): SEQ ID NO: 2480; WAN024GN9_at; Start 291; Stop 315
agatttagctgaaagtttattagac

SEQ ID NO: 252213 - DNA, 25 bp, Artificial
  probe
  misc_feature (1)..(25): SEQ ID NO: 2480; WAN024GN9_at; Start 28; Stop 52
tgtgcagcaggtatgagtacaagtc

SEQ ID NO: 252214 - DNA, 25 bp, Artificial
  probe
  misc_feature (1)..(25): SEQ ID NO: 2480; WAN024GN9_at; Start 122; Stop 146
ctcctgaagcagaagaaattgtagc

SEQ ID NO: 252215 - DNA, 25 bp, Artificial
  probe
  misc_feature (1)..(25): SEQ ID NO: 2480; WAN024GN9_at; Start 14; Stop 38
caattatgttagcatgtgcagcagg

SEQ ID NO: 252216 - DNA, 25 bp, Artificial
  probe
  misc_feature (1)..(25): SEQ ID NO: 2480; WAN024GN9_at; Start 124; Stop 148
cctgaagcagaagaaattgtagcaa

SEQ ID NO: 252217 - DNA, 25 bp, Artificial
  probe
  misc_feature (1)..(25): SEQ ID NO: 2480; WAN024GN9_at; Start 107; Stop 131
tttttgcagttccagctcctgaagc

SEQ ID NO: 252218 - DNA, 25 bp, Artificial
  probe
  misc_feature (1)..(25): SEQ ID NO: 2480; WAN024GN9_at; Start 59; Stop 83
tgacaaagatgcaaaaggcagcaga

SEQ ID NO: 252219 - DNA, 25 bp, Artificial
  probe
  misc_feature (1)..(25): SEQ ID NO: 2480; WAN024GN9_at; Start 178; Stop 202
cctcaagttcgctatttactagggg

SEQ ID NO: 252220 - DNA, 25 bp, Artificial
  probe
  misc_feature (1)..(25): SEQ ID NO: 2480; WAN024GN9_at; Start 238; Stop 262
gtggcggttattccgatgacagatt

SEQ ID NO: 252221 - DNA, 25 bp, Artificial
  probe
  misc_feature (1)..(25): SEQ ID NO: 2480; WAN024GN9_at; Start 18; Stop 42
tatgttagcatgtgcagcaggtatg

SEQ ID NO: 252222 - DNA, 25 bp, Artificial
  probe
  misc_feature (1)..(25): SEQ ID NO: 2480; WAN024GN9_at; Start 234; Stop 258
tcctgtggcggttattccgatgaca

SEQ ID NO: 252223 - DNA, 25 bp, Artificial
  probe
  misc_feature (1)..(25): SEQ ID NO: 2480; WAN024GN9_at; Start 47; Stop 71
caagtctgctagtgacaaagatgca

SEQ ID NO: 252224 - DNA, 25 bp, Artificial
  probe
  misc_feature (1)..(25): SEQ ID NO: 2480; WAN024GN9_at; Start 25; Stop 49
gcatgtgcagcaggtatgagtacaa

SEQ ID NO: 252225 - DNA, 25 bp, Artificial
  probe
  misc_feature (1)..(25): SEQ ID NO: 2480; WAN024GN9_at; Start 218; Stop 242
taaaagatagacagattcctgtggc

SEQ ID NO: 252226 - DNA, 25 bp, Artificial
  probe
  misc_feature (1)..(25): SEQ ID NO: 2480; WAN024GN9_at; Start 51; Stop 75
tctgctagtgacaaagatgcaaaag

SEQ ID NO: 252227 - DNA, 25 bp, Artificial
  probe
  misc_feature (1)..(25): SEQ ID NO: 2480; WAN024GN9_at; Start 127; Stop 151
gaagcagaagaaattgtagcaacaa

SEQ ID NO: 252228 - DNA, 25 bp, Artificial
  probe
  misc_feature (1)..(25): SEQ ID NO: 2480; WAN024GN9_at; Start 62; Stop 86
caaagatgcaaaaggcagcagaaga

SEQ ID NO: 252229 - DNA, 25 bp, Artificial
  probe
  misc_feature (1)..(25): SEQ ID NO: 2480; WAN024GN9_at; Start 103; Stop 127
gaaatttttgcagttccagctcctg

SEQ ID NO: 252230 - DNA, 25 bp, Artificial
  probe
  misc_feature (1)..(25): SEQ ID NO: 2480; WAN024GN9_at; Start 91; Stop 115
gggttggatgcagaaatttttgcag

SEQ ID NO: 252231 - DNA, 25 bp, Artificial
  probe
  misc_feature (1)..(25): SEQ ID NO: 2480; WAN024GN9_at; Start 214; Stop 238
aaactaaaagatagacagattcctg

SEQ ID NO: 252232 - DNA, 25 bp, Artificial
  probe
  misc_feature (1)..(25): SEQ ID NO: 2480; WAN024GN9_at; Start 2; Stop 26
tggctaaagtaacaattatgttagc

SEQ ID NO: 252233 - DNA, 25 bp, Artificial
  probe
  misc_feature (1)..(25): SEQ ID NO: 2480; WAN024GN9_at; Start 42; Stop 66
gagtacaagtctgctagtgacaaag

SEQ ID NO: 252234 - DNA, 25 bp, Artificial
  probe
  misc_feature (1)..(25): SEQ ID NO: 2480; WAN024GN9_at; Start 220; Stop 244
aaagatagacagattcctgtggcgg

SEQ ID NO: 252235 - DNA, 25 bp, Artificial
  probe
  misc_feature (1)..(25): SEQ ID NO: 2480; WAN024GN9_at; Start 118; Stop 142
ccagctcctgaagcagaagaaattg

SEQ ID NO: 252236 - DNA, 25 bp, Artificial
  probe
  misc_feature (1)..(25): SEQ ID NO: 2480; WAN024GN9_at; Start 11; Stop 35
taacaattatgttagcatgtgcagc

SEQ ID NO: 252237 - DNA, 25 bp, Artificial
  probe
  misc_feature (1)..(25): SEQ ID NO: 2480; WAN024GN9_at; Start 187; Stop 211
cgctatttactaggggactttcaag

SEQ ID NO: 252238 - DNA, 25 bp, Artificial
  probe
  misc_feature (1)..(25): SEQ ID NO: 2480; WAN024GN9_at; Start 56; Stop 80
tagtgacaaagatgcaaaaggcagc

SEQ ID NO: 252239 - DNA, 25 bp, Artificial
  probe
  misc_feature (1)..(25): SEQ ID NO: 2480; WAN024GN9_at; Start 115; Stop 139
gttccagctcctgaagcagaagaaa

SEQ ID NO: 252240 - DNA, 25 bp, Artificial
  probe
  misc_feature (1)..(25): SEQ ID NO: 2480; WAN024GN9_at; Start 227; Stop 251
gacagattcctgtggcggttattcc

SEQ ID NO: 252241 - DNA, 25 bp, Artificial
  probe
  misc_feature (1)..(25): SEQ ID NO: 2480; WAN024GN9_at; Start 66; Stop 90
gatgcaaaaggcagcagaagataag

SEQ ID NO: 252242 - DNA, 25 bp, Artificial
  probe
  misc_feature (1)..(25): SEQ ID NO: 2480; WAN024GN9_at; Start 30; Stop 54
tgcagcaggtatgagtacaagtctg

SEQ ID NO: 252243 - DNA, 25 bp, Artificial
  probe
  misc_feature (1)..(25): SEQ ID NO: 2480; WAN024GN9_at; Start 100; Stop 124
gcagaaatttttgcagttccagctc

SEQ ID NO: 252244 - DNA, 25 bp, Artificial
  probe
  misc_feature (1)..(25): SEQ ID NO: 2749; WAN024GNA_at; Start 213; Stop 237
tagcctcttgatggtacacgcgcaa

SEQ ID NO: 252245 - DNA, 25 bp, Artificial
  probe
  misc_feature (1)..(25): SEQ ID NO: 2749; WAN024GNA_at; Start 149; Stop 173
tacaggcgcataaggctcaaacaga

SEQ ID NO: 252246 - DNA, 25 bp, Artificial
  probe
  misc_feature (1)..(25): SEQ ID NO: 2749; WAN024GNA_at; Start 170; Stop 194
cagaaatgttgacaagagaggcaca

SEQ ID NO: 252247 - DNA, 25 bp, Artificial
  probe
  misc_feature (1)..(25): SEQ ID NO: 2749; WAN024GNA_at; Start 146; Stop 170
tattacaggcgcataaggctcaaac

SEQ ID NO: 252248 - DNA, 25 bp, Artificial
  probe
  misc_feature (1)..(25): SEQ ID NO: 2749; WAN024GNA_at; Start 264; Stop 288
tgttgacttggcgaaagaagtggta

SEQ ID NO: 252249 - DNA, 25 bp, Artificial
  probe
  misc_feature (1)..(25): SEQ ID NO: 2749; WAN024GNA_at; Start 138; Stop 162
tgctgccttattacaggcgcataag

SEQ ID NO: 252250 - DNA, 25 bp, Artificial
  probe
  misc_feature (1)..(25): SEQ ID NO: 2749; WAN024GNA_at; Start 287; Stop 311
tagaagtatacgaacgatttgaaaa

SEQ ID NO: 252251 - DNA, 25 bp, Artificial
  probe
  misc_feature (1)..(25): SEQ ID NO: 2749; WAN024GNA_at; Start 130; Stop 154
gatgcgaatgctgccttattacagg

SEQ ID NO: 252252 - DNA, 25 bp, Artificial
  probe
  misc_feature (1)..(25): SEQ ID NO: 2749; WAN024GNA_at; Start 215; Stop 239
gcctcttgatggtacacgcgcaaga

SEQ ID NO: 252253 - DNA, 25 bp, Artificial
  probe
  misc_feature (1)..(25): SEQ ID NO: 2749; WAN024GNA_at; Start 67; Stop 91
gctatggaggctattcaggcagcaa

SEQ ID NO: 252254 - DNA, 25 bp, Artificial
  probe
  misc_feature (1)..(25): SEQ ID NO: 2749; WAN024GNA_at; Start 69; Stop 93
tatggaggctattcaggcagcaaaa

SEQ ID NO: 252255 - DNA, 25 bp, Artificial
  probe
  misc_feature (1)..(25): SEQ ID NO: 2749; WAN024GNA_at; Start 34; Stop 58
ctaattatgtatggtggggaagcca

SEQ ID NO: 252256 - DNA, 25 bp, Artificial
  probe
  misc_feature (1)..(25): SEQ ID NO: 2749; WAN024GNA_at; Start 50; Stop 74
gggaagccaaaagtaatgctatgga

SEQ ID NO: 252257 - DNA, 25 bp, Artificial
  probe
  misc_feature (1)..(25): SEQ ID NO: 2749; WAN024GNA_at; Start 173; Stop 197
aaatgttgacaagagaggcacaggg

SEQ ID NO: 252258 - DNA, 25 bp, Artificial
  probe
  misc_feature (1)..(25): SEQ ID NO: 2749; WAN024GNA_at; Start 127; Stop 151
gctgatgcgaatgctgccttattac

SEQ ID NO: 252259 - DNA, 25 bp, Artificial
  probe
  misc_feature (1)..(25): SEQ ID NO: 2749; WAN024GNA_at; Start 63; Stop 87
taatgctatggaggctattcaggca

SEQ ID NO: 252260 - DNA, 25 bp, Artificial
  probe
  misc_feature (1)..(25): SEQ ID NO: 2749; WAN024GNA_at; Start 120; Stop 144
aagattagctgatgcgaatgctgcc

SEQ ID NO: 252261 - DNA, 25 bp, Artificial
  probe
  misc_feature (1)..(25): SEQ ID NO: 2749; WAN024GNA_at; Start 284; Stop 308
tggtagaagtatacgaacgatttga

SEQ ID NO: 252262 - DNA, 25 bp, Artificial
  probe
  misc_feature (1)..(25): SEQ ID NO: 2749; WAN024GNA_at; Start 156; Stop 180
gcataaggctcaaacagaaatgttg

SEQ ID NO: 252263 - DNA, 25 bp, Artificial
  probe
  misc_feature (1)..(25): SEQ ID NO: 2749; WAN024GNA_at; Start 56; Stop 80
ccaaaagtaatgctatggaggctat

SEQ ID NO: 252264 - DNA, 25 bp, Artificial
  probe
  misc_feature (1)..(25): SEQ ID NO: 2749; WAN024GNA_at; Start 267; Stop 291
tgacttggcgaaagaagtggtagaa

SEQ ID NO: 252265 - DNA, 25 bp, Artificial
  probe
  misc_feature (1)..(25): SEQ ID NO: 2749; WAN024GNA_at; Start 162; Stop 186
ggctcaaacagaaatgttgacaaga

SEQ ID NO: 252266 - DNA, 25 bp, Artificial
  probe
  misc_feature (1)..(25): SEQ ID NO: 2749; WAN024GNA_at; Start 153; Stop 177
ggcgcataaggctcaaacagaaatg

SEQ ID NO: 252267 - DNA, 25 bp, Artificial
  probe
  misc_feature (1)..(25): SEQ ID NO: 2749; WAN024GNA_at; Start 71; Stop 95
tggaggctattcaggcagcaaaaaa

SEQ ID NO: 252268 - DNA, 25 bp, Artificial
  probe
  misc_feature (1)..(25): SEQ ID NO: 2749; WAN024GNA_at; Start 75; Stop 99
ggctattcaggcagcaaaaaaaggg

SEQ ID NO: 252269 - DNA, 25 bp, Artificial
  probe
  misc_feature (1)..(25): SEQ ID NO: 2749; WAN024GNA_at; Start 123; Stop 147
attagctgatgcgaatgctgcctta

SEQ ID NO: 252270 - DNA, 25 bp, Artificial
  probe
  misc_feature (1)..(25): SEQ ID NO: 2749; WAN024GNA_at; Start 219; Stop 243
cttgatggtacacgcgcaagatcat

SEQ ID NO: 252271 - DNA, 25 bp, Artificial
  probe
  misc_feature (1)..(25): SEQ ID NO: 2749; WAN024GNA_at; Start 210; Stop 234
aattagcctcttgatggtacacgcg

SEQ ID NO: 252272 - DNA, 25 bp, Artificial
  probe
  misc_feature (1)..(25): SEQ ID NO: 2749; WAN024GNA_at; Start 117; Stop 141
tcgaagattagctgatgcgaatgct

SEQ ID NO: 252273 - DNA, 25 bp, Artificial
  probe
  misc_feature (1)..(25): SEQ ID NO: 2749; WAN024GNA_at; Start 104; Stop 128
tctctaaagccaatcgaagattagc

SEQ ID NO: 252274 - DNA, 25 bp, Artificial
  probe
  misc_feature (1)..(25): SEQ ID NO: 2749; WAN024GNA_at; Start 98; Stop 122
gggatttctctaaagccaatcgaag

SEQ ID NO: 252275 - DNA, 25 bp, Artificial
  probe
  misc_feature (1)..(25): SEQ ID NO: 2749; WAN024GNA_at; Start 280; Stop 304
gaagtggtagaagtatacgaacgat

SEQ ID NO: 252276 - DNA, 25 bp, Artificial
  probe
  misc_feature (1)..(25): SEQ ID NO: 2749; WAN024GNA_at; Start 134; Stop 158
cgaatgctgccttattacaggcgca

SEQ ID NO: 252277 - DNA, 25 bp, Artificial
  probe
  misc_feature (1)..(25): SEQ ID NO: 2749; WAN024GNA_at; Start 112; Stop 136
gccaatcgaagattagctgatgcga

SEQ ID NO: 252278 - DNA, 25 bp, Artificial
  probe
  misc_feature (1)..(25): SEQ ID NO: 7638; WAN024GNB_s_at; Start 216; Stop 240
aggaaaccatattaatgccagaggc

SEQ ID NO: 252279 - DNA, 25 bp, Artificial
  probe
  misc_feature (1)..(25): SEQ ID NO: 7638; WAN024GNB_s_at; Start 64; Stop 88
gcttcgtttgtcatttcgattggaa

SEQ ID NO: 252280 - DNA, 25 bp, Artificial
  probe
  misc_feature (1)..(25): SEQ ID NO: 7638; WAN024GNB_s_at; Start 68; Stop 92
cgtttgtcatttcgattggaagtac

SEQ ID NO: 252281 - DNA, 25 bp, Artificial
  probe
  misc_feature (1)..(25): SEQ ID NO: 7638; WAN024GNB_s_at; Start 116; Stop 140
caaatgtaggagatgtgaaattaga

SEQ ID NO: 252282 - DNA, 25 bp, Artificial
  probe
  misc_feature (1)..(25): SEQ ID NO: 7638; WAN024GNB_s_at; Start 54; Stop 78
ggtatcacttgcttcgtttgtcatt

SEQ ID NO: 252283 - DNA, 25 bp, Artificial
  probe
  misc_feature (1)..(25): SEQ ID NO: 7638; WAN024GNB_s_at; Start 102; Stop 126
gagtttccctttggcaaatgtagga

SEQ ID NO: 252284 - DNA, 25 bp, Artificial
  probe
  misc_feature (1)..(25): SEQ ID NO: 7638; WAN024GNB_s_at; Start 146; Stop 170
tcttacaaggaattgataatctagc

SEQ ID NO: 252285 - DNA, 25 bp, Artificial
  probe
  misc_feature (1)..(25): SEQ ID NO: 7638; WAN024GNB_s_at; Start 3; Stop 27
gggagtgaatatcgctaagatttac

SEQ ID NO: 252286 - DNA, 25 bp, Artificial
  probe
  misc_feature (1)..(25): SEQ ID NO: 7638; WAN024GNB_s_at; Start 98; Stop 122
caaagagtttccctttggcaaatgt

SEQ ID NO: 252287 - DNA, 25 bp, Artificial
  probe
  misc_feature (1)..(25): SEQ ID NO: 7638; WAN024GNB_s_at; Start 155; Stop 179
gaattgataatctagcatttgatgg

SEQ ID NO: 252288 - DNA, 25 bp, Artificial
  probe
  misc_feature (1)..(25): SEQ ID NO: 7638; WAN024GNB_s_at; Start 41; Stop 65
tttctgctggtttggtatcacttgc

SEQ ID NO: 252289 - DNA, 25 bp, Artificial
  probe
  misc_feature (1)..(25): SEQ ID NO: 7638; WAN024GNB_s_at; Start 149; Stop 173
tacaaggaattgataatctagcatt

SEQ ID NO: 252290 - DNA, 25 bp, Artificial
  probe
  misc_feature (1)..(25): SEQ ID NO: 7638; WAN024GNB_s_at; Start 80; Stop 104
cgattggaagtacagttacaaagag

SEQ ID NO: 252291 - DNA, 25 bp, Artificial
  probe
  misc_feature (1)..(25): SEQ ID NO: 7638; WAN024GNB_s_at; Start 110; Stop 134
ctttggcaaatgtaggagatgtgaa

SEQ ID NO: 252292 - DNA, 25 bp, Artificial
  probe
  misc_feature (1)..(25): SEQ ID NO: 7638; WAN024GNB_s_at; Start 119; Stop 143
atgtaggagatgtgaaattagatca

SEQ ID NO: 252293 - DNA, 25 bp, Artificial
  probe
  misc_feature (1)..(25): SEQ ID NO: 7638; WAN024GNB_s_at; Start 14; Stop 38
tcgctaagatttacaaggttgatac

SEQ ID NO: 252294 - DNA, 25 bp, Artificial
  probe
  misc_feature (1)..(25): SEQ ID NO: 7638; WAN024GNB_s_at; Start 160; Stop 184
gataatctagcatttgatggtaaaa

SEQ ID NO: 252295 - DNA, 25 bp, Artificial
  probe
  misc_feature (1)..(25): SEQ ID NO: 7638; WAN024GNB_s_at; Start 208; Stop 232
gtgattccaggaaaccatattaatg

SEQ ID NO: 252296 - DNA, 25 bp, Artificial
  probe
  misc_feature (1)..(25): SEQ ID NO: 7638; WAN024GNB_s_at; Start 8; Stop 32
tgaatatcgctaagatttacaaggt

SEQ ID NO: 252297 - DNA, 25 bp, Artificial
  probe
  misc_feature (1)..(25): SEQ ID NO: 7638; WAN024GNB_s_at; Start 166; Stop 190
ctagcatttgatggtaaaaatctga

SEQ ID NO: 252298 - DNA, 25 bp, Artificial
  probe
  misc_feature (1)..(25): SEQ ID NO: 7638; WAN024GNB_s_at; Start 58; Stop 82
tcacttgcttcgtttgtcatttcga

SEQ ID NO: 252299 - DNA, 25 bp, Artificial
  probe
  misc_feature (1)..(25): SEQ ID NO: 7638; WAN024GNB_s_at; Start 210; Stop 234
gattccaggaaaccatattaatgcc

SEQ ID NO: 252300 - DNA, 25 bp, Artificial
  probe
  misc_feature (1)..(25): SEQ ID NO: 7638; WAN024GNB_s_at; Start 180; Stop 204
taaaaatctgatggtaactattggg

SEQ ID NO: 252301 - DNA, 25 bp, Artificial
  probe
  misc_feature (1)..(25): SEQ ID NO: 7638; WAN024GNB_s_at; Start 27; Stop 51
caaggttgatacagtttctgctggt

SEQ ID NO: 252302 - DNA, 25 bp, Artificial
  probe
  misc_feature (1)..(25): SEQ ID NO: 7638; WAN024GNB_s_at; Start 212; Stop 236
ttccaggaaaccatattaatgccag

SEQ ID NO: 252303 - DNA, 25 bp, Artificial
  probe
  misc_feature (1)..(25): SEQ ID NO: 7638; WAN024GNB_s_at; Start 49; Stop 73
ggtttggtatcacttgcttcgtttg

SEQ ID NO: 252304 - DNA, 25 bp, Artificial
  probe
  misc_feature (1)..(25): SEQ ID NO: 7638; WAN024GNB_s_at; Start 75; Stop 99
catttcgattggaagtacagttaca

SEQ ID NO: 252305 - DNA, 25 bp, Artificial
  probe
  misc_feature (1)..(25): SEQ ID NO: 7638; WAN024GNB_s_at; Start 84; Stop 108
tggaagtacagttacaaagagtttc

SEQ ID NO: 252306 - DNA, 25 bp, Artificial
  probe
  misc_feature (1)..(25): SEQ ID NO: 7638; WAN024GNB_s_at; Start 23; Stop 47
tttacaaggttgatacagtttctgc

SEQ ID NO: 252307 - DNA, 25 bp, Artificial
  probe
  misc_feature (1)..(25): SEQ ID NO: 7638; WAN024GNB_s_at; Start 37; Stop 61
acagtttctgctggtttggtatcac

SEQ ID NO: 252308 - DNA, 25 bp, Artificial
  probe
  misc_feature (1)..(25): SEQ ID NO: 7638; WAN024GNB_s_at; Start 45; Stop 69
tgctggtttggtatcacttgcttcg

SEQ ID NO: 252309 - DNA, 25 bp, Artificial
  probe
  misc_feature (1)..(25): SEQ ID NO: 7638; WAN024GNB_s_at; Start 182; Stop 206
aaaatctgatggtaactattgggaa

SEQ ID NO: 252310 - DNA, 25 bp, Artificial
  probe
  misc_feature (1)..(25): SEQ ID NO: 7638; WAN024GNB_s_at; Start 25; Stop 49
tacaaggttgatacagtttctgctg

SEQ ID NO: 252311 - DNA, 25 bp, Artificial
  probe
  misc_feature (1)..(25): SEQ ID NO: 7638; WAN024GNB_s_at; Start 107; Stop 131
tccctttggcaaatgtaggagatgt

SEQ ID NO: 252312 - DNA, 25 bp, Artificial
  probe
  misc_feature (1)..(25): SEQ ID NO: 6422; WAN024GNC_at; Start 45; Stop 69
aattattgatgtcaacaagccactg

SEQ ID NO: 252313 - DNA, 25 bp, Artificial
  probe
  misc_feature (1)..(25): SEQ ID NO: 6422; WAN024GNC_at; Start 8; Stop 32
acaaggcaaacaattggtatacttc

SEQ ID NO: 252314 - DNA, 25 bp, Artificial
  probe
  misc_feature (1)..(25): SEQ ID NO: 6422; WAN024GNC_at; Start 49; Stop 73
attgatgtcaacaagccactgaaag

SEQ ID NO: 252315 - DNA, 25 bp, Artificial
  probe
  misc_feature (1)..(25): SEQ ID NO: 6422; WAN024GNC_at; Start 44; Stop 68
aaattattgatgtcaacaagccact

SEQ ID NO: 252316 - DNA, 25 bp, Artificial
  probe
  misc_feature (1)..(25): SEQ ID NO: 6422; WAN024GNC_at; Start 3; Stop 27
gaacaacaaggcaaacaattggtat

SEQ ID NO: 252317 - DNA, 25 bp, Artificial
  probe
  misc_feature (1)..(25): SEQ ID NO: 6422; WAN024GNC_at; Start 37; Stop 61
gaataccaaattattgatgtcaaca

SEQ ID NO: 252318 - DNA, 25 bp, Artificial
  probe
  misc_feature (1)..(25): SEQ ID NO: 6422; WAN024GNC_at; Start 6; Stop 30
caacaaggcaaacaattggtatact

SEQ ID NO: 252319 - DNA, 25 bp, Artificial
  probe
  misc_feature (1)..(25): SEQ ID NO: 6422; WAN024GNC_at; Start 25; Stop 49
tatacttcccttgaataccaaatta

SEQ ID NO: 252320 - DNA, 25 bp, Artificial
  probe
  misc_feature (1)..(25): SEQ ID NO: 6422; WAN024GNC_at; Start 43; Stop 67
caaattattgatgtcaacaagccac

SEQ ID NO: 252321 - DNA, 25 bp, Artificial
  probe
  misc_feature (1)..(25): SEQ ID NO: 6422; WAN024GNC_at; Start 22; Stop 46
tggtatacttcccttgaataccaaa

SEQ ID NO: 252322 - DNA, 25 bp, Artificial
  probe
  misc_feature (1)..(25): SEQ ID NO: 6422; WAN024GNC_at; Start 51; Stop 75
tgatgtcaacaagccactgaaaggt

SEQ ID NO: 252323 - DNA, 25 bp, Artificial
  probe
  misc_feature (1)..(25): SEQ ID NO: 6422; WAN024GNC_at; Start 14; Stop 38
caaacaattggtatacttcccttga

SEQ ID NO: 252324 - DNA, 25 bp, Artificial
  probe
  misc_feature (1)..(25): SEQ ID NO: 6422; WAN024GNC_at; Start 31; Stop 55
tcccttgaataccaaattattgatg

SEQ ID NO: 252325 - DNA, 25 bp, Artificial
  probe
  misc_feature (1)..(25): SEQ ID NO: 6422; WAN024GNC_at; Start 57; Stop 81
caacaagccactgaaaggttttcgt

SEQ ID NO: 252326 - DNA, 25 bp, Artificial
  probe
  misc_feature (1)..(25): SEQ ID NO: 6422; WAN024GNC_at; Start 33; Stop 57
ccttgaataccaaattattgatgtc

SEQ ID NO: 252327 - DNA, 25 bp, Artificial
  probe
  misc_feature (1)..(25): SEQ ID NO: 6422; WAN024GNC_at; Start 18; Stop 42
caattggtatacttcccttgaatac

SEQ ID NO: 252328 - DNA, 25 bp, Artificial
  probe
  misc_feature (1)..(25): SEQ ID NO: 6422; WAN024GNC_at; Start 55; Stop 79
gtcaacaagccactgaaaggttttc

SEQ ID NO: 252329 - DNA, 25 bp, Artificial
  probe
  misc_feature (1)..(25): SEQ ID NO: 6422; WAN024GNC_at; Start 2; Stop 26
tgaacaacaaggcaaacaattggta

SEQ ID NO: 252330 - DNA, 25 bp, Artificial
  probe
  misc_feature (1)..(25): SEQ ID NO: 6422; WAN024GNC_at; Start 60; Stop 84
caagccactgaaaggttttcgtaat

SEQ ID NO: 252331 - DNA, 25 bp, Artificial
  probe
  misc_feature (1)..(25): SEQ ID NO: 6422; WAN024GNC_at; Start 11; Stop 35
aggcaaacaattggtatacttccct

SEQ ID NO: 252332 - DNA, 25 bp, Artificial
  probe
  misc_feature (1)..(25): SEQ ID NO: 6422; WAN024GNC_at; Start 46; Stop 70
attattgatgtcaacaagccactga

SEQ ID NO: 252333 - DNA, 25 bp, Artificial
  probe
  misc_feature (1)..(25): SEQ ID NO: 6422; WAN024GNC_at; Start 48; Stop 72
tattgatgtcaacaagccactgaaa

SEQ ID NO: 252334 - DNA, 25 bp, Artificial
  probe
  misc_feature (1)..(25): SEQ ID NO: 6422; WAN024GNC_at; Start 40; Stop 64
taccaaattattgatgtcaacaagc

SEQ ID NO: 252335 - DNA, 25 bp, Artificial
  probe
  misc_feature (1)..(25): SEQ ID NO: 6422; WAN024GNC_at; Start 54; Stop 78
tgtcaacaagccactgaaaggtttt

SEQ ID NO: 252336 - DNA, 25 bp, Artificial
  probe
  misc_feature (1)..(25): SEQ ID NO: 6422; WAN024GNC_at; Start 13; Stop 37
gcaaacaattggtatacttcccttg

SEQ ID NO: 252337 - DNA, 25 bp, Artificial
  probe
  misc_feature (1)..(25): SEQ ID NO: 6422; WAN024GNC_at; Start 50; Stop 74
ttgatgtcaacaagccactgaaagg

SEQ ID NO: 252338 - DNA, 25 bp, Artificial
  probe
  misc_feature (1)..(25): SEQ ID NO: 6422; WAN024GNC_at; Start 47; Stop 71
ttattgatgtcaacaagccactgaa

SEQ ID NO: 252339 - DNA, 25 bp, Artificial
  probe
  misc_feature (1)..(25): SEQ ID NO: 6422; WAN024GNC_at; Start 28; Stop 52
acttcccttgaataccaaattattg

SEQ ID NO: 252340 - DNA, 25 bp, Artificial
  probe
  misc_feature (1)..(25): SEQ ID NO: 6422; WAN024GNC_at; Start 16; Stop 40
aacaattggtatacttcccttgaat

SEQ ID NO: 252341 - DNA, 25 bp, Artificial
  probe
  misc_feature (1)..(25): SEQ ID NO: 6422; WAN024GNC_at; Start 42; Stop 66
ccaaattattgatgtcaacaagcca

SEQ ID NO: 252342 - DNA, 25 bp, Artificial
  probe
  misc_feature (1)..(25): SEQ ID NO: 6422; WAN024GNC_at; Start 53; Stop 77
atgtcaacaagccactgaaaggttt

SEQ ID NO: 252343 - DNA, 25 bp, Artificial
  probe
  misc_feature (1)..(25): SEQ ID NO: 6422; WAN024GNC_at; Start 56; Stop 80
tcaacaagccactgaaaggttttcg

SEQ ID NO: 252344 - DNA, 25 bp, Artificial
  probe
  misc_feature (1)..(25): SEQ ID NO: 6422; WAN024GNC_at; Start 9; Stop 33
caaggcaaacaattggtatacttcc

SEQ ID NO: 252345 - DNA, 25 bp, Artificial
  probe
  misc_feature (1)..(25): SEQ ID NO: 6422; WAN024GNC_at; Start 5; Stop 29
acaacaaggcaaacaattggtatac

SEQ ID NO: 252346 - DNA, 25 bp, Artificial
  probe
  misc_feature (1)..(25): SEQ ID NO: 771; WAN024GND_at; Start 775; Stop 799
cgagtagctgctagaaatggatgta

SEQ ID NO: 252347 - DNA, 25 bp, Artificial
  probe
  misc_feature (1)..(25): SEQ ID NO: 771; WAN024GND_at; Start 694; Stop 718
ccaaaatatgggatacaagatgagg

SEQ ID NO: 252348 - DNA, 25 bp, Artificial
  probe
  misc_feature (1)..(25): SEQ ID NO: 771; WAN024GND_at; Start 127; Stop 151
ccagttacgaatcaagaatttgctc

SEQ ID NO: 252349 - DNA, 25 bp, Artificial
  probe
  misc_feature (1)..(25): SEQ ID NO: 771; WAN024GND_at; Start 91; Stop 115
gctgttagtgtaaaggatttttcca

SEQ ID NO: 252350 - DNA, 25 bp, Artificial
  probe
  misc_feature (1)..(25): SEQ ID NO: 771; WAN024GND_at; Start 436; Stop 460
gctgctagaggaggaagacaatctg

SEQ ID NO: 252351 - DNA, 25 bp, Artificial
  probe
  misc_feature (1)..(25): SEQ ID NO: 771; WAN024GND_at; Start 390; Stop 414
taattggagcggaatgtctttaccg

SEQ ID NO: 252352 - DNA, 25 bp, Artificial
  probe
  misc_feature (1)..(25): SEQ ID NO: 771; WAN024GND_at; Start 112; Stop 136
tccattgcggatactccagttacga

SEQ ID NO: 252353 - DNA, 25 bp, Artificial
  probe
  misc_feature (1)..(25): SEQ ID NO: 771; WAN024GND_at; Start 562; Stop 586
ggaacggctcctgtctatgaatttt

SEQ ID NO: 252354 - DNA, 25 bp, Artificial
  probe
  misc_feature (1)..(25): SEQ ID NO: 771; WAN024GND_at; Start 406; Stop 430
tctttaccgactgaagcacagtggg

SEQ ID NO: 252355 - DNA, 25 bp, Artificial
  probe
  misc_feature (1)..(25): SEQ ID NO: 771; WAN024GND_at; Start 626; Stop 650
tttgggaatggtgtcgcaatccgag

SEQ ID NO: 252356 - DNA, 25 bp, Artificial
  probe
  misc_feature (1)..(25): SEQ ID NO: 771; WAN024GND_at; Start 550; Stop 574
gatggatttataggaacggctcctg

SEQ ID NO: 252357 - DNA, 25 bp, Artificial
  probe
  misc_feature (1)..(25): SEQ ID NO: 771; WAN024GND_at; Start 507; Stop 531
caatacttggcaaggaagatttcct

SEQ ID NO: 252358 - DNA, 25 bp, Artificial
  probe
  misc_feature (1)..(25): SEQ ID NO: 771; WAN024GND_at; Start 360; Stop 384
tgttgctttagaagatgcattggct

SEQ ID NO: 252359 - DNA, 25 bp, Artificial
  probe
  misc_feature (1)..(25): SEQ ID NO: 771; WAN024GND_at; Start 641; Stop 665
gcaatccgagatataccttattagc

SEQ ID NO: 252360 - DNA, 25 bp, Artificial
  probe
  misc_feature (1)..(25): SEQ ID NO: 771; WAN024GND_at; Start 731; Stop 755
gaggaggttcctttttatgtcattg

SEQ ID NO: 252361 - DNA, 25 bp, Artificial
  probe
  misc_feature (1)..(25): SEQ ID NO: 771; WAN024GND_at; Start 760; Stop 784
tattgtaatcgataccgagtagctg

SEQ ID NO: 252362 - DNA, 25 bp, Artificial
  probe
  misc_feature (1)..(25): SEQ ID NO: 771; WAN024GND_at; Start 38; Stop 62
tgggaacaaattctgaagagggctt

SEQ ID NO: 252363 - DNA, 25 bp, Artificial
  probe
  misc_feature (1)..(25): SEQ ID NO: 771; WAN024GND_at; Start 182; Stop 206
tagctgagcgacaagagtggtcttt

SEQ ID NO: 252364 - DNA, 25 bp, Artificial
  probe
  misc_feature (1)..(25): SEQ ID NO: 771; WAN024GND_at; Start 421; Stop 445
gcacagtgggaatatgctgctagag

SEQ ID NO: 252365 - DNA, 25 bp, Artificial
  probe
  misc_feature (1)..(25): SEQ ID NO: 771; WAN024GND_at; Start 22; Stop 46
ggtgggacatttatgatgggaacaa

SEQ ID NO: 252366 - DNA, 25 bp, Artificial
  probe
  misc_feature (1)..(25): SEQ ID NO: 771; WAN024GND_at; Start 312; Stop 336
cggtgagaacagtaatctagtgggt

SEQ ID NO: 252367 - DNA, 25 bp, Artificial
  probe
  misc_feature (1)..(25): SEQ ID NO: 771; WAN024GND_at; Start 147; Stop 171
tgctcaatttgtgaaagaaacaggc

SEQ ID NO: 252368 - DNA, 25 bp, Artificial
  probe
  misc_feature (1)..(25): SEQ ID NO: 771; WAN024GND_at; Start 493; Stop 517
ggatattatcatgccaatacttggc

SEQ ID NO: 252369 - DNA, 25 bp, Artificial
  probe
  misc_feature (1)..(25): SEQ ID NO: 771; WAN024GND_at; Start 471; Stop 495
gggagatactcttttagaaggtgga

SEQ ID NO: 252370 - DNA, 25 bp, Artificial
  probe
  misc_feature (1)..(25): SEQ ID NO: 771; WAN024GND_at; Start 300; Stop 324
gaaacatccctacggtgagaacagt

SEQ ID NO: 252371 - DNA, 25 bp, Artificial
  probe
  misc_feature (1)..(25): SEQ ID NO: 771; WAN024GND_at; Start 804; Stop 828
tacttccactagtagccatctaggt

SEQ ID NO: 252372 - DNA, 25 bp, Artificial
  probe
  misc_feature (1)..(25): SEQ ID NO: 771; WAN024GND_at; Start 167; Stop 191
caggctataaaacactagctgagcg

SEQ ID NO: 252373 - DNA, 25 bp, Artificial
  probe
  misc_feature (1)..(25): SEQ ID NO: 771; WAN024GND_at; Start 377; Stop 401
cattggctttctgtaattggagcgg

SEQ ID NO: 252374 - DNA, 25 bp, Artificial
  probe
  misc_feature (1)..(25): SEQ ID NO: 771; WAN024GND_at; Start 76; Stop 100
gaaggtcctcaagtcgctgttagtg

SEQ ID NO: 252375 - DNA, 25 bp, Artificial
  probe
  misc_feature (1)..(25): SEQ ID NO: 771; WAN024GND_at; Start 448; Stop 472
ggaagacaatctgaatatccttggg

SEQ ID NO: 252376 - DNA, 25 bp, Artificial
  probe
  misc_feature (1)..(25): SEQ ID NO: 771; WAN024GND_at; Start 213; Stop 237
tatattgttcgttccggaggcagaa

SEQ ID NO: 252377 - DNA, 25 bp, Artificial
  probe
  misc_feature (1)..(25): SEQ ID NO: 771; WAN024GND_at; Start 718; Stop 742
gagtatgctatcagaggaggttcct

SEQ ID NO: 252378 - DNA, 25 bp, Artificial
  probe
  misc_feature (1)..(25): SEQ ID NO: 771; WAN024GND_at; Start 340; Stop 364
gaagaccatccagtagttcatgttg

SEQ ID NO: 252379 - DNA, 25 bp, Artificial
  probe
  misc_feature (1)..(25): SEQ ID NO: 771; WAN024GND_at; Start 327; Stop 351
tctagtgggtttagaagaccatcca

SEQ ID NO: 252380 - DNA, 25 bp, Artificial
  probe
  misc_feature (1)..(25): SEQ ID NO: 1196; WAN024GNE_at; Start 1214; Stop 1238
gggtaatgcctccaattttatatgg

SEQ ID NO: 252381 - DNA, 25 bp, Artificial
  probe
  misc_feature (1)..(25): SEQ ID NO: 1196; WAN024GNE_at; Start 1179; Stop 1203
gggtcttgtttcacctgttacacaa

SEQ ID NO: 252382 - DNA, 25 bp, Artificial
  probe
  misc_feature (1)..(25): SEQ ID NO: 1196; WAN024GNE_at; Start 145; Stop 169
aatgcttttctagtggatttaccac

SEQ ID NO: 252383 - DNA, 25 bp, Artificial
  probe
  misc_feature (1)..(25): SEQ ID NO: 1196; WAN024GNE_at; Start 1246; Stop 1270
tctacagcatttgattggcgtgcca

SEQ ID NO: 252384 - DNA, 25 bp, Artificial
  probe
  misc_feature (1)..(25): SEQ ID NO: 1196; WAN024GNE_at; Start 845; Stop 869
tattggctcccatcatggaagggct

SEQ ID NO: 252385 - DNA, 25 bp, Artificial
  probe
  misc_feature (1)..(25): SEQ ID NO: 1196; WAN024GNE_at; Start 630; Stop 654
gccgttcacttctatcattccagga

SEQ ID NO: 252386 - DNA, 25 bp, Artificial
  probe
  misc_feature (1)..(25): SEQ ID NO: 1196; WAN024GNE_at; Start 831; Stop 855
ccatggaggaaatgtattggctccc

SEQ ID NO: 252387 - DNA, 25 bp, Artificial
  probe
  misc_feature (1)..(25): SEQ ID NO: 1196; WAN024GNE_at; Start 1035; Stop 1059
taaacttggtctagcaccagttctg

SEQ ID NO: 252388 - DNA, 25 bp, Artificial
  probe
  misc_feature (1)..(25): SEQ ID NO: 1196; WAN024GNE_at; Start 1261; Stop 1285
tggcgtgccatcatcttatcagttg

SEQ ID NO: 252389 - DNA, 25 bp, Artificial
  probe
  misc_feature (1)..(25): SEQ ID NO: 1196; WAN024GNE_at; Start 749; Stop 773
cgccattactaggtttgtctcaaag

SEQ ID NO: 252390 - DNA, 25 bp, Artificial
  probe
  misc_feature (1)..(25): SEQ ID NO: 1196; WAN024GNE_at; Start 879; Stop 903
tgctatgttagcgaatctggatgct

SEQ ID NO: 252391 - DNA, 25 bp, Artificial
  probe
  misc_feature (1)..(25): SEQ ID NO: 1196; WAN024GNE_at; Start 160; Stop 184
gatttaccacaacaatttcacctag

SEQ ID NO: 252392 - DNA, 25 bp, Artificial
  probe
  misc_feature (1)..(25): SEQ ID NO: 1196; WAN024GNE_at; Start 41; Stop 65
caattgcaatgaaagttgggaatca

SEQ ID NO: 252393 - DNA, 25 bp, Artificial
  probe
  misc_feature (1)..(25): SEQ ID NO: 1196; WAN024GNE_at; Start 592; Stop 616
atcaagttaccagattcagttcccc

SEQ ID NO: 252394 - DNA, 25 bp, Artificial
  probe
  misc_feature (1)..(25): SEQ ID NO: 1196; WAN024GNE_at; Start 733; Stop 757
tacaaggtgttacaaacgccattac

SEQ ID NO: 252395 - DNA, 25 bp, Artificial
  probe
  misc_feature (1)..(25): SEQ ID NO: 1196; WAN024GNE_at; Start 1052; Stop 1076
cagttctgtttaatattggtgagcc

SEQ ID NO: 252396 - DNA, 25 bp, Artificial
  probe
  misc_feature (1)..(25): SEQ ID NO: 1196; WAN024GNE_at; Start 816; Stop 840
ctggttttttggtctccatggagga

SEQ ID NO: 252397 - DNA, 25 bp, Artificial
  probe
  misc_feature (1)..(25): SEQ ID NO: 1196; WAN024GNE_at; Start 1010; Stop 1034
gaaacagtcattatcgaaaagttgc

SEQ ID NO: 252398 - DNA, 25 bp, Artificial
  probe
  misc_feature (1)..(25): SEQ ID NO: 1196; WAN024GNE_at; Start 28; Stop 52
gaaaaactttctccaattgcaatga

SEQ ID NO: 252399 - DNA, 25 bp, Artificial
  probe
  misc_feature (1)..(25): SEQ ID NO: 1196; WAN024GNE_at; Start 100; Stop 124
gggactatgcctgttattatgacag

SEQ ID NO: 252400 - DNA, 25 bp, Artificial
  probe
  misc_feature (1)..(25): SEQ ID NO: 1196; WAN024GNE_at; Start 924; Stop 948
tccttatatatggacaagtgggtct

SEQ ID NO: 252401 - DNA, 25 bp, Artificial
  probe
  misc_feature (1)..(25): SEQ ID NO: 1196; WAN024GNE_at; Start 270; Stop 294
catctattgcttgggagtgaatatc

SEQ ID NO: 252402 - DNA, 25 bp, Artificial
  probe
  misc_feature (1)..(25): SEQ ID NO: 1196; WAN024GNE_at; Start 1130; Stop 1154
tacttagcccggttttcatggcaac

SEQ ID NO: 252403 - DNA, 25 bp, Artificial
  probe
  misc_feature (1)..(25): SEQ ID NO: 1196; WAN024GNE_at; Start 898; Stop 922
gatgctttccaaaaaggtgaaccga

SEQ ID NO: 252404 - DNA, 25 bp, Artificial
  probe
  misc_feature (1)..(25): SEQ ID NO: 1196; WAN024GNE_at; Start 1201; Stop 1225
caaaatgttacttgggtaatgcctc

SEQ ID NO: 252405 - DNA, 25 bp, Artificial
  probe
  misc_feature (1)..(25): SEQ ID NO: 1196; WAN024GNE_at; Start 507; Stop 531
taatgccagaggctactttacagcc

SEQ ID NO: 252406 - DNA, 25 bp, Artificial
  probe
  misc_feature (1)..(25): SEQ ID NO: 1196; WAN024GNE_at; Start 530; Stop 554
ccatgatgattggatttttagcctc

SEQ ID NO: 252407 - DNA, 25 bp, Artificial
  probe
  misc_feature (1)..(25): SEQ ID NO: 1196; WAN024GNE_at; Start 645; Stop 669
cattccaggatttatggcgatgtat

SEQ ID NO: 252408 - DNA, 25 bp, Artificial
  probe
  misc_feature (1)..(25): SEQ ID NO: 1196; WAN024GNE_at; Start 1084; Stop 1108
tatggtttaccagttgtcttgaatc

SEQ ID NO: 252409 - DNA, 25 bp, Artificial
  probe
  misc_feature (1)..(25): SEQ ID NO: 1196; WAN024GNE_at; Start 236; Stop 260
tcaagggaagtataccaattgtttc

SEQ ID NO: 252410 - DNA, 25 bp, Artificial
  probe
  misc_feature (1)..(25): SEQ ID NO: 1196; WAN024GNE_at; Start 200; Stop 224
cctttcagtggcttgttgacatcaa

SEQ ID NO: 252411 - DNA, 25 bp, Artificial
  probe
  misc_feature (1)..(25): SEQ ID NO: 1196; WAN024GNE_at; Start 615; Stop 639
ccctgcgattgctaagccgttcact

SEQ ID NO: 252412 - DNA, 25 bp, Artificial
  probe
  misc_feature (1)..(25): SEQ ID NO: 1196; WAN024GNE_at; Start 1151; Stop 1175
caacggtagcttactgggcaacaag

SEQ ID NO: 252413 - DNA, 25 bp, Artificial
  probe
  misc_feature (1)..(25): SEQ ID NO: 1196; WAN024GNE_at; Start 857; Stop 881
tcatggaagggctatttggagttgc

SEQ ID NO: 252414 - DNA, 25 bp, Artificial
  probe
  misc_feature (1)..(25): SEQ ID NO: 4228; WAN024GNF_at; Start 58; Stop 82
tcaggcatgggtggtggaattataa

SEQ ID NO: 252415 - DNA, 25 bp, Artificial
  probe
  misc_feature (1)..(25): SEQ ID NO: 4228; WAN024GNF_at; Start 44; Stop 68
gattgggttctatatcaggcatggg

SEQ ID NO: 252416 - DNA, 25 bp, Artificial
  probe
  misc_feature (1)..(25): SEQ ID NO: 4228; WAN024GNF_at; Start 715; Stop 739
gggatgttattctttgtcatgggaa

SEQ ID NO: 252417 - DNA, 25 bp, Artificial
  probe
  misc_feature (1)..(25): SEQ ID NO: 4228; WAN024GNF_at; Start 562; Stop 586
tctcatttggctacaattgttgtgg

SEQ ID NO: 252418 - DNA, 25 bp, Artificial
  probe
  misc_feature (1)..(25): SEQ ID NO: 4228; WAN024GNF_at; Start 284; Stop 308
tgttatctcaattatcagtacggct

SEQ ID NO: 252419 - DNA, 25 bp, Artificial
  probe
  misc_feature (1)..(25): SEQ ID NO: 4228; WAN024GNF_at; Start 411; Stop 435
tatgatttgtggtcttctattgggc

SEQ ID NO: 252420 - DNA, 25 bp, Artificial
  probe
  misc_feature (1)..(25): SEQ ID NO: 4228; WAN024GNF_at; Start 385; Stop 409
tatcaatttgataagataggattct

SEQ ID NO: 252421 - DNA, 25 bp, Artificial
  probe
  misc_feature (1)..(25): SEQ ID NO: 4228; WAN024GNF_at; Start 83; Stop 107
ttaagccacttatggatagttttgg

SEQ ID NO: 252422 - DNA, 25 bp, Artificial
  probe
  misc_feature (1)..(25): SEQ ID NO: 4228; WAN024GNF_at; Start 685; Stop 709
cctgaaaattgggtaagatactgtt

SEQ ID NO: 252423 - DNA, 25 bp, Artificial
  probe
  misc_feature (1)..(25): SEQ ID NO: 4228; WAN024GNF_at; Start 191; Stop 215
cacaaagtaaagagataaaatggag

SEQ ID NO: 252424 - DNA, 25 bp, Artificial
  probe
  misc_feature (1)..(25): SEQ ID NO: 4228; WAN024GNF_at; Start 332; Stop 356
tactatttgtgatgctacttgtatc

SEQ ID NO: 252425 - DNA, 25 bp, Artificial
  probe
  misc_feature (1)..(25): SEQ ID NO: 4228; WAN024GNF_at; Start 732; Stop 756
catgggaatgactttatataattta

SEQ ID NO: 252426 - DNA, 25 bp, Artificial
  probe
  misc_feature (1)..(25): SEQ ID NO: 4228; WAN024GNF_at; Start 52; Stop 76
tctatatcaggcatgggtggtggaa

SEQ ID NO: 252427 - DNA, 25 bp, Artificial
  probe
  misc_feature (1)..(25): SEQ ID NO: 4228; WAN024GNF_at; Start 73; Stop 97
ggaattataattaagccacttatgg

SEQ ID NO: 252428 - DNA, 25 bp, Artificial
  probe
  misc_feature (1)..(25): SEQ ID NO: 4228; WAN024GNF_at; Start 517; Stop 541
gaagcaacgatgtattctcttgcaa

SEQ ID NO: 252429 - DNA, 25 bp, Artificial
  probe
  misc_feature (1)..(25): SEQ ID NO: 4228; WAN024GNF_at; Start 20; Stop 44
ttctaatcattataatagctagtgg

SEQ ID NO: 252430 - DNA, 25 bp, Artificial
  probe
  misc_feature (1)..(25): SEQ ID NO: 4228; WAN024GNF_at; Start 141; Stop 165
tagtttctctgtttttataatggcg

SEQ ID NO: 252431 - DNA, 25 bp, Artificial
  probe
  misc_feature (1)..(25): SEQ ID NO: 4228; WAN024GNF_at; Start 504; Stop 528
tatttcgataaaagaagcaacgatg

SEQ ID NO: 252432 - DNA, 25 bp, Artificial
  probe
  misc_feature (1)..(25): SEQ ID NO: 4228; WAN024GNF_at; Start 292; Stop 316
caattatcagtacggctagtatcca

SEQ ID NO: 252433 - DNA, 25 bp, Artificial
  probe
  misc_feature (1)..(25): SEQ ID NO: 4228; WAN024GNF_at; Start 585; Stop 609
ggttacaggtttaaatcagtatcat

SEQ ID NO: 252434 - DNA, 25 bp, Artificial
  probe
  misc_feature (1)..(25): SEQ ID NO: 4228; WAN024GNF_at; Start 304; Stop 328
cggctagtatccattgttcaaatga

SEQ ID NO: 252435 - DNA, 25 bp, Artificial
  probe
  misc_feature (1)..(25): SEQ ID NO: 4228; WAN024GNF_at; Start 570; Stop 594
ggctacaattgttgtggttacaggt

SEQ ID NO: 252436 - DNA, 25 bp, Artificial
  probe
  misc_feature (1)..(25): SEQ ID NO: 4228; WAN024GNF_at; Start 466; Stop 490
ggtccgctcaatgtatctttattga

SEQ ID NO: 252437 - DNA, 25 bp, Artificial
  probe
  misc_feature (1)..(25): SEQ ID NO: 4228; WAN024GNF_at; Start 30; Stop 54
tataatagctagtggattgggttct

SEQ ID NO: 252438 - DNA, 25 bp, Artificial
  probe
  misc_feature (1)..(25): SEQ ID NO: 4228; WAN024GNF_at; Start 257; Stop 281
ttctaggtcatcttatttttcaagt

SEQ ID NO: 252439 - DNA, 25 bp, Artificial
  probe
  misc_feature (1)..(25): SEQ ID NO: 4228; WAN024GNF_at; Start 665; Stop 689
cggttgtatcaaaagtcttacctga

SEQ ID NO: 252440 - DNA, 25 bp, Artificial
  probe
  misc_feature (1)..(25): SEQ ID NO: 4228; WAN024GNF_at; Start 116; Stop 140
cggtcagtgatattgctttttattc

SEQ ID NO: 252441 - DNA, 25 bp, Artificial
  probe
  misc_feature (1)..(25): SEQ ID NO: 4228; WAN024GNF_at; Start 630; Stop 654
ttttcttgcttctatatgcggaggg

SEQ ID NO: 252442 - DNA, 25 bp, Artificial
  probe
  misc_feature (1)..(25): SEQ ID NO: 4228; WAN024GNF_at; Start 400; Stop 424
ataggattctatatgatttgtggtc

SEQ ID NO: 252443 - DNA, 25 bp, Artificial
  probe
  misc_feature (1)..(25): SEQ ID NO: 4228; WAN024GNF_at; Start 211; Stop 235
tggagattgatttttacggtatcct

SEQ ID NO: 252444 - DNA, 25 bp, Artificial
  probe
  misc_feature (1)..(25): SEQ ID NO: 4228; WAN024GNF_at; Start 109; Stop 133
taccattcggtcagtgatattgctt

SEQ ID NO: 252445 - DNA, 25 bp, Artificial
  probe
  misc_feature (1)..(25): SEQ ID NO: 4228; WAN024GNF_at; Start 614; Stop 638
cacctgttccagttatttttcttgc

SEQ ID NO: 252446 - DNA, 25 bp, Artificial
  probe
  misc_feature (1)..(25): SEQ ID NO: 4228; WAN024GNF_at; Start 601; Stop 625
cagtatcatttagcacctgttccag

SEQ ID NO: 252447 - DNA, 25 bp, Artificial
  probe
  misc_feature (1)..(25): SEQ ID NO: 4228; WAN024GNF_at; Start 180; Stop 204
caaaagattttcacaaagtaaagag

SEQ ID NO: 252448 - DNA, 25 bp, Artificial
  probe
  misc_feature (1)..(25): SEQ ID NO: 6291; WAN024GNG_at; Start 61; Stop 85
gaatccatccaagggtggctggcac

SEQ ID NO: 252449 - DNA, 25 bp, Artificial
  probe
  misc_feature (1)..(25): SEQ ID NO: 6291; WAN024GNG_at; Start 42; Stop 66
taaggcaaaggatatggcagaatcc

SEQ ID NO: 252450 - DNA, 25 bp, Artificial
  probe
  misc_feature (1)..(25): SEQ ID NO: 6291; WAN024GNG_at; Start 20; Stop 44
tcagtttgaagaccaagagtcgtaa

SEQ ID NO: 252451 - DNA, 25 bp, Artificial
  probe
  misc_feature (1)..(25): SEQ ID NO: 6291; WAN024GNG_at; Start 2; Stop 26
ggtatagtcaattgattgtcagttt

SEQ ID NO: 252452 - DNA, 25 bp, Artificial
  probe
  misc_feature (1)..(25): SEQ ID NO: 6291; WAN024GNG_at; Start 146; Stop 170
ggaaagatatttccaatcatcacga

SEQ ID NO: 252453 - DNA, 25 bp, Artificial
  probe
  misc_feature (1)..(25): SEQ ID NO: 6291; WAN024GNG_at; Start 47; Stop 71
caaaggatatggcagaatccatcca

SEQ ID NO: 252454 - DNA, 25 bp, Artificial
  probe
  misc_feature (1)..(25): SEQ ID NO: 6291; WAN024GNG_at; Start 56; Stop 80
tggcagaatccatccaagggtggct

SEQ ID NO: 252455 - DNA, 25 bp, Artificial
  probe
  misc_feature (1)..(25): SEQ ID NO: 6291; WAN024GNG_at; Start 174; Stop 198
tgagagcttttttgcgaatctagga

SEQ ID NO: 252456 - DNA, 25 bp, Artificial
  probe
  misc_feature (1)..(25): SEQ ID NO: 6291; WAN024GNG_at; Start 54; Stop 78
tatggcagaatccatccaagggtgg

SEQ ID NO: 252457 - DNA, 25 bp, Artificial
  probe
  misc_feature (1)..(25): SEQ ID NO: 6291; WAN024GNG_at; Start 189; Stop 213
gaatctaggatgtccaagacagcgg

SEQ ID NO: 252458 - DNA, 25 bp, Artificial
  probe
  misc_feature (1)..(25): SEQ ID NO: 6291; WAN024GNG_at; Start 166; Stop 190
cacgatagtgagagcttttttgcga

SEQ ID NO: 252459 - DNA, 25 bp, Artificial
  probe
  misc_feature (1)..(25): SEQ ID NO: 6291; WAN024GNG_at; Start 186; Stop 210
tgcgaatctaggatgtccaagacag

SEQ ID NO: 252460 - DNA, 25 bp, Artificial
  probe
  misc_feature (1)..(25): SEQ ID NO: 6291; WAN024GNG_at; Start 32; Stop 56
ccaagagtcgtaaggcaaaggatat

SEQ ID NO: 252461 - DNA, 25 bp, Artificial
  probe
  misc_feature (1)..(25): SEQ ID NO: 6291; WAN024GNG_at; Start 106; Stop 130
aaatctattacgtttgactgtggaa

SEQ ID NO: 252462 - DNA, 25 bp, Artificial
  probe
  misc_feature (1)..(25): SEQ ID NO: 6291; WAN024GNG_at; Start 179; Stop 203
gcttttttgcgaatctaggatgtcc

SEQ ID NO: 252463 - DNA, 25 bp, Artificial
  probe
  misc_feature (1)..(25): SEQ ID NO: 6291; WAN024GNG_at; Start 81; Stop 105
ggcacaatttctagtgaacctcttt

SEQ ID NO: 252464 - DNA, 25 bp, Artificial
  probe
  misc_feature (1)..(25): SEQ ID NO: 6291; WAN024GNG_at; Start 65; Stop 89
ccatccaagggtggctggcacaatt

SEQ ID NO: 252465 - DNA, 25 bp, Artificial
  probe
  misc_feature (1)..(25): SEQ ID NO: 6291; WAN024GNG_at; Start 17; Stop 41
ttgtcagtttgaagaccaagagtcg

SEQ ID NO: 252466 - DNA, 25 bp, Artificial
  probe
  misc_feature (1)..(25): SEQ ID NO: 6291; WAN024GNG_at; Start 136; Stop 160
ttttcaaaatggaaagatatttcca

SEQ ID NO: 252467 - DNA, 25 bp, Artificial
  probe
  misc_feature (1)..(25): SEQ ID NO: 6291; WAN024GNG_at; Start 153; Stop 177
tatttccaatcatcacgatagtgag

SEQ ID NO: 252468 - DNA, 25 bp, Artificial
  probe
  misc_feature (1)..(25): SEQ ID NO: 6291; WAN024GNG_at; Start 124; Stop 148
tgtggaaaagagttttcaaaatgga

SEQ ID NO: 252469 - DNA, 25 bp, Artificial
  probe
  misc_feature (1)..(25): SEQ ID NO: 6291; WAN024GNG_at; Start 69; Stop 93
ccaagggtggctggcacaatttcta

SEQ ID NO: 252470 - DNA, 25 bp, Artificial
  probe
  misc_feature (1)..(25): SEQ ID NO: 6291; WAN024GNG_at; Start 51; Stop 75
ggatatggcagaatccatccaaggg

SEQ ID NO: 252471 - DNA, 25 bp, Artificial
  probe
  misc_feature (1)..(25): SEQ ID NO: 6291; WAN024GNG_at; Start 74; Stop 98
ggtggctggcacaatttctagtgaa

SEQ ID NO: 252472 - DNA, 25 bp, Artificial
  probe
  misc_feature (1)..(25): SEQ ID NO: 6291; WAN024GNG_at; Start 93; Stop 117
agtgaacctctttaaatctattacg

SEQ ID NO: 252473 - DNA, 25 bp, Artificial
  probe
  misc_feature (1)..(25): SEQ ID NO: 6291; WAN024GNG_at; Start 10; Stop 34
caattgattgtcagtttgaagacca

SEQ ID NO: 252474 - DNA, 25 bp, Artificial
  probe
  misc_feature (1)..(25): SEQ ID NO: 6291; WAN024GNG_at; Start 78; Stop 102
gctggcacaatttctagtgaacctc

SEQ ID NO: 252475 - DNA, 25 bp, Artificial
  probe
  misc_feature (1)..(25): SEQ ID NO: 6291; WAN024GNG_at; Start 59; Stop 83
cagaatccatccaagggtggctggc

SEQ ID NO: 252476 - DNA, 25 bp, Artificial
  probe
  misc_feature (1)..(25): SEQ ID NO: 6291; WAN024GNG_at; Start 30; Stop 54
gaccaagagtcgtaaggcaaaggat

SEQ ID NO: 252477 - DNA, 25 bp, Artificial
  probe
  misc_feature (1)..(25): SEQ ID NO: 6291; WAN024GNG_at; Start 111; Stop 135
tattacgtttgactgtggaaaagag

SEQ ID NO: 252478 - DNA, 25 bp, Artificial
  probe
  misc_feature (1)..(25): SEQ ID NO: 6291; WAN024GNG_at; Start 157; Stop 181
tccaatcatcacgatagtgagagct

SEQ ID NO: 252479 - DNA, 25 bp, Artificial
  probe
  misc_feature (1)..(25): SEQ ID NO: 6291; WAN024GNG_at; Start 24; Stop 48
tttgaagaccaagagtcgtaaggca

SEQ ID NO: 252480 - DNA, 25 bp, Artificial
  probe
  misc_feature (1)..(25): SEQ ID NO: 6291; WAN024GNG_at; Start 117; Stop 141
gtttgactgtggaaaagagttttca

SEQ ID NO: 252481 - DNA, 25 bp, Artificial
  probe
  misc_feature (1)..(25): SEQ ID NO: 6291; WAN024GNG_at; Start 36; Stop 60
gagtcgtaaggcaaaggatatggca

SEQ ID NO: 252482 - DNA, 25 bp, Artificial
  probe
  misc_feature (1)..(25): SEQ ID NO: 5666; WAN024GNH_at; Start 15; Stop 39
ttcgcaaaaaagctctcactatcgt

SEQ ID NO: 252483 - DNA, 25 bp, Artificial
  probe
  misc_feature (1)..(25): SEQ ID NO: 5666; WAN024GNH_at; Start 34; Stop 58
tatcgtgatgattggaaatatcttt

SEQ ID NO: 252484 - DNA, 25 bp, Artificial
  probe
  misc_feature (1)..(25): SEQ ID NO: 5666; WAN024GNH_at; Start 46; Stop 70
tggaaatatctttccattttgaaaa

SEQ ID NO: 252485 - DNA, 25 bp, Artificial
  probe
  misc_feature (1)..(25): SEQ ID NO: 5666; WAN024GNH_at; Start 20; Stop 44
aaaaaagctctcactatcgtgatga

SEQ ID NO: 252486 - DNA, 25 bp, Artificial
  probe
  misc_feature (1)..(25): SEQ ID NO: 5666; WAN024GNH_at; Start 32; Stop 56
actatcgtgatgattggaaatatct

SEQ ID NO: 252487 - DNA, 25 bp, Artificial
  probe
  misc_feature (1)..(25): SEQ ID NO: 5666; WAN024GNH_at; Start 62; Stop 86
ttttgaaaactcttttccacagtca

SEQ ID NO: 252488 - DNA, 25 bp, Artificial
  probe
  misc_feature (1)..(25): SEQ ID NO: 5666; WAN024GNH_at; Start 10; Stop 34
ctagattcgcaaaaaagctctcact

SEQ ID NO: 252489 - DNA, 25 bp, Artificial
  probe
  misc_feature (1)..(25): SEQ ID NO: 5666; WAN024GNH_at; Start 33; Stop 57
ctatcgtgatgattggaaatatctt

SEQ ID NO: 252490 - DNA, 25 bp, Artificial
  probe
  misc_feature (1)..(25): SEQ ID NO: 5666; WAN024GNH_at; Start 22; Stop 46
aaaagctctcactatcgtgatgatt

SEQ ID NO: 252491 - DNA, 25 bp, Artificial
  probe
  misc_feature (1)..(25): SEQ ID NO: 5666; WAN024GNH_at; Start 19; Stop 43
caaaaaagctctcactatcgtgatg

SEQ ID NO: 252492 - DNA, 25 bp, Artificial
  probe
  misc_feature (1)..(25): SEQ ID NO: 5666; WAN024GNH_at; Start 26; Stop 50
gctctcactatcgtgatgattggaa

SEQ ID NO: 252493 - DNA, 25 bp, Artificial
  probe
  misc_feature (1)..(25): SEQ ID NO: 5666; WAN024GNH_at; Start 37; Stop 61
cgtgatgattggaaatatctttcca

SEQ ID NO: 252494 - DNA, 25 bp, Artificial
  probe
  misc_feature (1)..(25): SEQ ID NO: 5666; WAN024GNH_at; Start 25; Stop 49
agctctcactatcgtgatgattgga

SEQ ID NO: 252495 - DNA, 25 bp, Artificial
  probe
  misc_feature (1)..(25): SEQ ID NO: 5666; WAN024GNH_at; Start 59; Stop 83
ccattttgaaaactcttttccacag

SEQ ID NO: 252496 - DNA, 25 bp, Artificial
  probe
  misc_feature (1)..(25): SEQ ID NO: 5666; WAN024GNH_at; Start 60; Stop 84
cattttgaaaactcttttccacagt

SEQ ID NO: 252497 - DNA, 25 bp, Artificial
  probe
  misc_feature (1)..(25): SEQ ID NO: 5666; WAN024GNH_at; Start 29; Stop 53
ctcactatcgtgatgattggaaata

SEQ ID NO: 252498 - DNA, 25 bp, Artificial
  probe
  misc_feature (1)..(25): SEQ ID NO: 5666; WAN024GNH_at; Start 38; Stop 62
gtgatgattggaaatatctttccat

SEQ ID NO: 252499 - DNA, 25 bp, Artificial
  probe
  misc_feature (1)..(25): SEQ ID NO: 5666; WAN024GNH_at; Start 31; Stop 55
cactatcgtgatgattggaaatatc

SEQ ID NO: 252500 - DNA, 25 bp, Artificial
  probe
  misc_feature (1)..(25): SEQ ID NO: 5666; WAN024GNH_at; Start 65; Stop 89
tgaaaactcttttccacagtcaaac

SEQ ID NO: 252501 - DNA, 25 bp, Artificial
  probe
  misc_feature (1)..(25): SEQ ID NO: 5666; WAN024GNH_at; Start 17; Stop 41
cgcaaaaaagctctcactatcgtga

SEQ ID NO: 252502 - DNA, 25 bp, Artificial
  probe
  misc_feature (1)..(25): SEQ ID NO: 5666; WAN024GNH_at; Start 28; Stop 52
tctcactatcgtgatgattggaaat

SEQ ID NO: 252503 - DNA, 25 bp, Artificial
  probe
  misc_feature (1)..(25): SEQ ID NO: 5666; WAN024GNH_at; Start 36; Stop 60
tcgtgatgattggaaatatctttcc

SEQ ID NO: 252504 - DNA, 25 bp, Artificial
  probe
  misc_feature (1)..(25): SEQ ID NO: 5666; WAN024GNH_at; Start 11; Stop 35
tagattcgcaaaaaagctctcacta

SEQ ID NO: 252505 - DNA, 25 bp, Artificial
  probe
  misc_feature (1)..(25): SEQ ID NO: 5666; WAN024GNH_at; Start 13; Stop 37
gattcgcaaaaaagctctcactatc

SEQ ID NO: 252506 - DNA, 25 bp, Artificial
  probe
  misc_feature (1)..(25): SEQ ID NO: 5666; WAN024GNH_at; Start 14; Stop 38
attcgcaaaaaagctctcactatcg

SEQ ID NO: 252507 - DNA, 25 bp, Artificial
  probe
  misc_feature (1)..(25): SEQ ID NO: 5666; WAN024GNH_at; Start 43; Stop 67
gattggaaatatctttccattttga

SEQ ID NO: 252508 - DNA, 25 bp, Artificial
  probe
  misc_feature (1)..(25): SEQ ID NO: 5666; WAN024GNH_at; Start 27; Stop 51
ctctcactatcgtgatgattggaaa

SEQ ID NO: 252509 - DNA, 25 bp, Artificial
  probe
  misc_feature (1)..(25): SEQ ID NO: 5666; WAN024GNH_at; Start 18; Stop 42
gcaaaaaagctctcactatcgtgat

SEQ ID NO: 252510 - DNA, 25 bp, Artificial
  probe
  misc_feature (1)..(25): SEQ ID NO: 5666; WAN024GNH_at; Start 12; Stop 36
agattcgcaaaaaagctctcactat

SEQ ID NO: 252511 - DNA, 25 bp, Artificial
  probe
  misc_feature (1)..(25): SEQ ID NO: 5666; WAN024GNH_at; Start 30; Stop 54
tcactatcgtgatgattggaaatat

SEQ ID NO: 252512 - DNA, 25 bp, Artificial
  probe
  misc_feature (1)..(25): SEQ ID NO: 5666; WAN024GNH_at; Start 23; Stop 47
aaagctctcactatcgtgatgattg

SEQ ID NO: 252513 - DNA, 25 bp, Artificial
  probe
  misc_feature (1)..(25): SEQ ID NO: 5666; WAN024GNH_at; Start 24; Stop 48
aagctctcactatcgtgatgattgg

SEQ ID NO: 252514 - DNA, 25 bp, Artificial
  probe
  misc_feature (1)..(25): SEQ ID NO: 5666; WAN024GNH_at; Start 21; Stop 45
aaaaagctctcactatcgtgatgat

SEQ ID NO: 252515 - DNA, 25 bp, Artificial
  probe
  misc_feature (1)..(25): SEQ ID NO: 5666; WAN024GNH_at; Start 16; Stop 40
tcgcaaaaaagctctcactatcgtg

SEQ ID NO: 252516 - DNA, 25 bp, Artificial
  probe
  misc_feature (1)..(25): SEQ ID NO: 2718; WAN024GNI_at; Start 38; Stop 62
ttccttctgcaataacagcgtctgc

SEQ ID NO: 252517 - DNA, 25 bp, Artificial
  probe
  misc_feature (1)..(25): SEQ ID NO: 2718; WAN024GNI_at; Start 366; Stop 390
tgccaaatcaccatcagcaacccag

SEQ ID NO: 252518 - DNA, 25 bp, Artificial
  probe
  misc_feature (1)..(25): SEQ ID NO: 2718; WAN024GNI_at; Start 392; Stop 416
ccatccctccttggaaaataggata

SEQ ID NO: 252519 - DNA, 25 bp, Artificial
  probe
  misc_feature (1)..(25): SEQ ID NO: 2718; WAN024GNI_at; Start 52; Stop 76
acagcgtctgcaccgattttttcca

SEQ ID NO: 252520 - DNA, 25 bp, Artificial
  probe
  misc_feature (1)..(25): SEQ ID NO: 2718; WAN024GNI_at; Start 348; Stop 372
agccttggaaacagcccctgccaaa

SEQ ID NO: 252521 - DNA, 25 bp, Artificial
  probe
  misc_feature (1)..(25): SEQ ID NO: 2718; WAN024GNI_at; Start 144; Stop 168
catatacttgcttggatttcctgct

SEQ ID NO: 252522 - DNA, 25 bp, Artificial
  probe
  misc_feature (1)..(25): SEQ ID NO: 2718; WAN024GNI_at; Start 10; Stop 34
aatttaccgatatgccccccagctt

SEQ ID NO: 252523 - DNA, 25 bp, Artificial
  probe
  misc_feature (1)..(25): SEQ ID NO: 2718; WAN024GNI_at; Start 256; Stop 280
aagggtttatcagtcaatgatttga

SEQ ID NO: 252524 - DNA, 25 bp, Artificial
  probe
  misc_feature (1)..(25): SEQ ID NO: 2718; WAN024GNI_at; Start 243; Stop 267
gatgttgaccccaaagggtttatca

SEQ ID NO: 252525 - DNA, 25 bp, Artificial
  probe
  misc_feature (1)..(25): SEQ ID NO: 2718; WAN024GNI_at; Start 73; Stop 97
tccatgcgtttagctaaagcgacac

SEQ ID NO: 252526 - DNA, 25 bp, Artificial
  probe
  misc_feature (1)..(25): SEQ ID NO: 2718; WAN024GNI_at; Start 62; Stop 86
caccgattttttccatgcgtttagc

SEQ ID NO: 252527 - DNA, 25 bp, Artificial
  probe
  misc_feature (1)..(25): SEQ ID NO: 2718; WAN024GNI_at; Start 251; Stop 275
ccccaaagggtttatcagtcaatga

SEQ ID NO: 252528 - DNA, 25 bp, Artificial
  probe
  misc_feature (1)..(25): SEQ ID NO: 2718; WAN024GNI_at; Start 107; Stop 131
caggaataacgattatcccagcttc

SEQ ID NO: 252529 - DNA, 25 bp, Artificial
  probe
  misc_feature (1)..(25): SEQ ID NO: 2718; WAN024GNI_at; Start 2; Stop 26
tggttgttaatttaccgatatgccc

SEQ ID NO: 252530 - DNA, 25 bp, Artificial
  probe
  misc_feature (1)..(25): SEQ ID NO: 2718; WAN024GNI_at; Start 43; Stop 67
tctgcaataacagcgtctgcaccga

SEQ ID NO: 252531 - DNA, 25 bp, Artificial
  probe
  misc_feature (1)..(25): SEQ ID NO: 2718; WAN024GNI_at; Start 31; Stop 55
gcttccattccttctgcaataacag

SEQ ID NO: 252532 - DNA, 25 bp, Artificial
  probe
  misc_feature (1)..(25): SEQ ID NO: 2718; WAN024GNI_at; Start 113; Stop 137
taacgattatcccagcttcatggaa

SEQ ID NO: 252533 - DNA, 25 bp, Artificial
  probe
  misc_feature (1)..(25): SEQ ID NO: 2718; WAN024GNI_at; Start 230; Stop 254
gagataagagcatgatgttgacccc

SEQ ID NO: 252534 - DNA, 25 bp, Artificial
  probe
  misc_feature (1)..(25): SEQ ID NO: 2718; WAN024GNI_at; Start 158; Stop 182
gatttcctgctcctgttgtgacaac

SEQ ID NO: 252535 - DNA, 25 bp, Artificial
  probe
  misc_feature (1)..(25): SEQ ID NO: 2718; WAN024GNI_at; Start 237; Stop 261
gagcatgatgttgaccccaaagggt

SEQ ID NO: 252536 - DNA, 25 bp, Artificial
  probe
  misc_feature (1)..(25): SEQ ID NO: 2718; WAN024GNI_at; Start 148; Stop 172
tacttgcttggatttcctgctcctg

SEQ ID NO: 252537 - DNA, 25 bp, Artificial
  probe
  misc_feature (1)..(25): SEQ ID NO: 2718; WAN024GNI_at; Start 330; Stop 354
gataattcctaatcctccagccttg

SEQ ID NO: 252538 - DNA, 25 bp, Artificial
  probe
  misc_feature (1)..(25): SEQ ID NO: 2718; WAN024GNI_at; Start 134; Stop 158
ggaaacgttccatatacttgcttgg

SEQ ID NO: 252539 - DNA, 25 bp, Artificial
  probe
  misc_feature (1)..(25): SEQ ID NO: 2718; WAN024GNI_at; Start 220; Stop 244
tccacaaagggagataagagcatga

SEQ ID NO: 252540 - DNA, 25 bp, Artificial
  probe
  misc_feature (1)..(25): SEQ ID NO: 2718; WAN024GNI_at; Start 79; Stop 103
cgtttagctaaagcgacactaggaa

SEQ ID NO: 252541 - DNA, 25 bp, Artificial
  probe
  misc_feature (1)..(25): SEQ ID NO: 2718; WAN024GNI_at; Start 234; Stop 258
taagagcatgatgttgaccccaaag

SEQ ID NO: 252542 - DNA, 25 bp, Artificial
  probe
  misc_feature (1)..(25): SEQ ID NO: 2718; WAN024GNI_at; Start 388; Stop 412
caggccatccctccttggaaaatag

SEQ ID NO: 252543 - DNA, 25 bp, Artificial
  probe
  misc_feature (1)..(25): SEQ ID NO: 2718; WAN024GNI_at; Start 290; Stop 314
tattggccttgacaacttctttcgg

SEQ ID NO: 252544 - DNA, 25 bp, Artificial
  probe
  misc_feature (1)..(25): SEQ ID NO: 2718; WAN024GNI_at; Start 182; Stop 206
ctttaacaccttcttcaataacgag

SEQ ID NO: 252545 - DNA, 25 bp, Artificial
  probe
  misc_feature (1)..(25): SEQ ID NO: 2718; WAN024GNI_at; Start 190; Stop 214
ccttcttcaataacgagatccacga

SEQ ID NO: 252546 - DNA, 25 bp, Artificial
  probe
  misc_feature (1)..(25): SEQ ID NO: 2718; WAN024GNI_at; Start 339; Stop 363
taatcctccagccttggaaacagcc

SEQ ID NO: 252547 - DNA, 25 bp, Artificial
  probe
  misc_feature (1)..(25): SEQ ID NO: 2718; WAN024GNI_at; Start 276; Stop 300
tttgattttatcaatattggccttg

SEQ ID NO: 252548 - DNA, 25 bp, Artificial
  probe
  misc_feature (1)..(25): SEQ ID NO: 2718; WAN024GNI_at; Start 120; Stop 144
tatcccagcttcatggaaacgttcc

SEQ ID NO: 252549 - DNA, 25 bp, Artificial
  probe
  misc_feature (1)..(25): SEQ ID NO: 2718; WAN024GNI_at; Start 169; Stop 193
cctgttgtgacaactttaacacctt

SEQ ID NO: 252550 - DNA, 25 bp, Artificial
  probe
  misc_feature (1)..(25): SEQ ID NO: 709; WAN024GNJ_at; Start 98; Stop 122
ccaaggctggaggattaggaattat

SEQ ID NO: 252551 - DNA, 25 bp, Artificial
  probe
  misc_feature (1)..(25): SEQ ID NO: 709; WAN024GNJ_at; Start 209; Stop 233
tcatgctcttatctccctttgtgga

SEQ ID NO: 252552 - DNA, 25 bp, Artificial
  probe
  misc_feature (1)..(25): SEQ ID NO: 709; WAN024GNJ_at; Start 800; Stop 824
ccaaagcagttgttcacggtgatgt

SEQ ID NO: 252553 - DNA, 25 bp, Artificial
  probe
  misc_feature (1)..(25): SEQ ID NO: 709; WAN024GNJ_at; Start 377; Stop 401
tggaaaaaatcggtgcagacgctgt

SEQ ID NO: 252554 - DNA, 25 bp, Artificial
  probe
  misc_feature (1)..(25): SEQ ID NO: 709; WAN024GNJ_at; Start 842; Stop 866
tggcaggtcaaatcgcagggcttgt

SEQ ID NO: 252555 - DNA, 25 bp, Artificial
  probe
  misc_feature (1)..(25): SEQ ID NO: 709; WAN024GNJ_at; Start 239; Stop 263
tcgtggatctcgttattgaagaagg

SEQ ID NO: 252556 - DNA, 25 bp, Artificial
  probe
  misc_feature (1)..(25): SEQ ID NO: 709; WAN024GNJ_at; Start 684; Stop 708
tgttcgtgctattaaaaatcagttg

SEQ ID NO: 252557 - DNA, 25 bp, Artificial
  probe
  misc_feature (1)..(25): SEQ ID NO: 709; WAN024GNJ_at; Start 910; Stop 934
tacggagccgctaagaaaattcaag

SEQ ID NO: 252558 - DNA, 25 bp, Artificial
  probe
  misc_feature (1)..(25): SEQ ID NO: 709; WAN024GNJ_at; Start 896; Stop 920
taaaagatttgtattacggagccgc

SEQ ID NO: 252559 - DNA, 25 bp, Artificial
  probe
  misc_feature (1)..(25): SEQ ID NO: 709; WAN024GNJ_at; Start 656; Stop 680
cgatttcagctcagcactttggtca

SEQ ID NO: 252560 - DNA, 25 bp, Artificial
  probe
  misc_feature (1)..(25): SEQ ID NO: 709; WAN024GNJ_at; Start 132; Stop 156
aaatgccccgaaagaagttgtcaag

SEQ ID NO: 252561 - DNA, 25 bp, Artificial
  probe
  misc_feature (1)..(25): SEQ ID NO: 709; WAN024GNJ_at; Start 874; Stop 898
gaagaaacagctgaagaaatcctaa

SEQ ID NO: 252562 - DNA, 25 bp, Artificial
  probe
  misc_feature (1)..(25): SEQ ID NO: 709; WAN024GNJ_at; Start 267; Stop 291
taaagttgtcacaacaggagcagga

SEQ ID NO: 252563 - DNA, 25 bp, Artificial
  probe
  misc_feature (1)..(25): SEQ ID NO: 709; WAN024GNJ_at; Start 281; Stop 305
caggagcaggaaatccaagcaagta

SEQ ID NO: 252564 - DNA, 25 bp, Artificial
  probe
  misc_feature (1)..(25): SEQ ID NO: 709; WAN024GNJ_at; Start 296; Stop 320
caagcaagtatatggaacgtttcca

SEQ ID NO: 252565 - DNA, 25 bp, Artificial
  probe
  misc_feature (1)..(25): SEQ ID NO: 709; WAN024GNJ_at; Start 700; Stop 724
aatcagttgactagagattttgaac

SEQ ID NO: 252566 - DNA, 25 bp, Artificial
  probe
  misc_feature (1)..(25): SEQ ID NO: 709; WAN024GNJ_at; Start 456; Stop 480
cttggtgcgacaggtagccacagct

SEQ ID NO: 252567 - DNA, 25 bp, Artificial
  probe
  misc_feature (1)..(25): SEQ ID NO: 709; WAN024GNJ_at; Start 953; Stop 977
caggagttgtaagaaatgactaact

SEQ ID NO: 252568 - DNA, 25 bp, Artificial
  probe
  misc_feature (1)..(25): SEQ ID NO: 709; WAN024GNJ_at; Start 391; Stop 415
gcagacgctgttattgcagaaggaa

SEQ ID NO: 252569 - DNA, 25 bp, Artificial
  probe
  misc_feature (1)..(25): SEQ ID NO: 709; WAN024GNJ_at; Start 443; Stop 467
taacaaccatgaccttggtgcgaca

SEQ ID NO: 252570 - DNA, 25 bp, Artificial
  probe
  misc_feature (1)..(25): SEQ ID NO: 709; WAN024GNJ_at; Start 587; Stop 611
ttgcaaaagagtcgaatgcccatcc

SEQ ID NO: 252571 - DNA, 25 bp, Artificial
  probe
  misc_feature (1)..(25): SEQ ID NO: 709; WAN024GNJ_at; Start 543; Stop 567
tatgctaggtgcagaggctgtacag

SEQ ID NO: 252572 - DNA, 25 bp, Artificial
  probe
  misc_feature (1)..(25): SEQ ID NO: 709; WAN024GNJ_at; Start 42; Stop 66
tattttccaaggagggatggcctgg

SEQ ID NO: 252573 - DNA, 25 bp, Artificial
  probe
  misc_feature (1)..(25): SEQ ID NO: 709; WAN024GNJ_at; Start 855; Stop 879
cgcagggcttgtttctaaagaagaa

SEQ ID NO: 252574 - DNA, 25 bp, Artificial
  probe
  misc_feature (1)..(25): SEQ ID NO: 709; WAN024GNJ_at; Start 600; Stop 624
gaatgcccatccaaactacaaggag

SEQ ID NO: 252575 - DNA, 25 bp, Artificial
  probe
  misc_feature (1)..(25): SEQ ID NO: 709; WAN024GNJ_at; Start 427; Stop 451
gggcatatcggtaaattaacaacca

SEQ ID NO: 252576 - DNA, 25 bp, Artificial
  probe
  misc_feature (1)..(25): SEQ ID NO: 709; WAN024GNJ_at; Start 177; Stop 201
atcattgactgataaaccctttggg

SEQ ID NO: 252577 - DNA, 25 bp, Artificial
  probe
  misc_feature (1)..(25): SEQ ID NO: 709; WAN024GNJ_at; Start 572; Stop 596
ggacacggtttgtagttgcaaaaga

SEQ ID NO: 252578 - DNA, 25 bp, Artificial
  probe
  misc_feature (1)..(25): SEQ ID NO: 709; WAN024GNJ_at; Start 6; Stop 30
aacgcgtattacagaattattgaag

SEQ ID NO: 252579 - DNA, 25 bp, Artificial
  probe
  misc_feature (1)..(25): SEQ ID NO: 709; WAN024GNJ_at; Start 365; Stop 389
tagctaaacgcatggaaaaaatcgg

SEQ ID NO: 252580 - DNA, 25 bp, Artificial
  probe
  misc_feature (1)..(25): SEQ ID NO: 709; WAN024GNJ_at; Start 401; Stop 425
ttattgcagaaggaatggaagctgg

SEQ ID NO: 252581 - DNA, 25 bp, Artificial
  probe
  misc_feature (1)..(25): SEQ ID NO: 709; WAN024GNJ_at; Start 351; Stop 375
tcctagtgtcgctttagctaaacgc

SEQ ID NO: 252582 - DNA, 25 bp, Artificial
  probe
  misc_feature (1)..(25): SEQ ID NO: 709; WAN024GNJ_at; Start 927; Stop 951
aattcaagaagaagcctctcgctgg

SEQ ID NO: 252583 - DNA, 25 bp, Artificial
  probe
  misc_feature (1)..(25): SEQ ID NO: 709; WAN024GNJ_at; Start 309; Stop 333
ggaacgtttccatgaagctgggata

SEQ ID NO: 252584 - DNA, 25 bp, Artificial
  probe
  misc_feature (1)..(25): SEQ ID NO: 5232; WAN024GNK_at; Start 90; Stop 114
caggatttgcagaaccttgcggcca

SEQ ID NO: 252585 - DNA, 25 bp, Artificial
  probe
  misc_feature (1)..(25): SEQ ID NO: 5232; WAN024GNK_at; Start 248; Stop 272
tgttggtattcttgataaccagagg

SEQ ID NO: 252586 - DNA, 25 bp, Artificial
  probe
  misc_feature (1)..(25): SEQ ID NO: 5232; WAN024GNK_at; Start 70; Stop 94
caaccgatgttaagttcttccagga

SEQ ID NO: 252587 - DNA, 25 bp, Artificial
  probe
  misc_feature (1)..(25): SEQ ID NO: 5232; WAN024GNK_at; Start 75; Stop 99
gatgttaagttcttccaggatttgc

SEQ ID NO: 252588 - DNA, 25 bp, Artificial
  probe
  misc_feature (1)..(25): SEQ ID NO: 5232; WAN024GNK_at; Start 224; Stop 248
tacgagtacctggatggtcagggtt

SEQ ID NO: 252589 - DNA, 25 bp, Artificial
  probe
  misc_feature (1)..(25): SEQ ID NO: 5232; WAN024GNK_at; Start 260; Stop 284
tgataaccagaggaatttttccacg

SEQ ID NO: 252590 - DNA, 25 bp, Artificial
  probe
  misc_feature (1)..(25): SEQ ID NO: 5232; WAN024GNK_at; Start 199; Stop 223
tcatcattactgtgttttagaacga

SEQ ID NO: 252591 - DNA, 25 bp, Artificial
  probe
  misc_feature (1)..(25): SEQ ID NO: 5232; WAN024GNK_at; Start 158; Stop 182
tgacaaagcctgagtcaccagcaat

SEQ ID NO: 252592 - DNA, 25 bp, Artificial
  probe
  misc_feature (1)..(25): SEQ ID NO: 5232; WAN024GNK_at; Start 19; Stop 43
cgagaacggagaatgatagaaagat

SEQ ID NO: 252593 - DNA, 25 bp, Artificial
  probe
  misc_feature (1)..(25): SEQ ID NO: 5232; WAN024GNK_at; Start 29; Stop 53
gaatgatagaaagatcgtcgatacc

SEQ ID NO: 252594 - DNA, 25 bp, Artificial
  probe
  misc_feature (1)..(25): SEQ ID NO: 5232; WAN024GNK_at; Start 85; Stop 109
tcttccaggatttgcagaaccttgc

SEQ ID NO: 252595 - DNA, 25 bp, Artificial
  probe
  misc_feature (1)..(25): SEQ ID NO: 5232; WAN024GNK_at; Start 114; Stop 138
aaatccaacctcacggttcatgagg

SEQ ID NO: 252596 - DNA, 25 bp, Artificial
  probe
  misc_feature (1)..(25): SEQ ID NO: 5232; WAN024GNK_at; Start 41; Stop 65
gatcgtcgatacctgttggcatatg

SEQ ID NO: 252597 - DNA, 25 bp, Artificial
  probe
  misc_feature (1)..(25): SEQ ID NO: 5232; WAN024GNK_at; Start 236; Stop 260
gatggtcagggttgttggtattctt

SEQ ID NO: 252598 - DNA, 25 bp, Artificial
  probe
  misc_feature (1)..(25): SEQ ID NO: 5232; WAN024GNK_at; Start 188; Stop 212
caactggaaattcatcattactgtg

SEQ ID NO: 252599 - DNA, 25 bp, Artificial
  probe
  misc_feature (1)..(25): SEQ ID NO: 5232; WAN024GNK_at; Start 175; Stop 199
ccagcaattcccacaactggaaatt

SEQ ID NO: 252600 - DNA, 25 bp, Artificial
  probe
  misc_feature (1)..(25): SEQ ID NO: 5232; WAN024GNK_at; Start 106; Stop 130
ttgcggccaaatccaacctcacggt

SEQ ID NO: 252601 - DNA, 25 bp, Artificial
  probe
  misc_feature (1)..(25): SEQ ID NO: 5232; WAN024GNK_at; Start 96; Stop 120
ttgcagaaccttgcggccaaatcca

SEQ ID NO: 252602 - DNA, 25 bp, Artificial
  probe
  misc_feature (1)..(25): SEQ ID NO: 5232; WAN024GNK_at; Start 152; Stop 176
taatgctgacaaagcctgagtcacc

SEQ ID NO: 252603 - DNA, 25 bp, Artificial
  probe
  misc_feature (1)..(25): SEQ ID NO: 5232; WAN024GNK_at; Start 92; Stop 116
ggatttgcagaaccttgcggccaaa

SEQ ID NO: 252604 - DNA, 25 bp, Artificial
  probe
  misc_feature (1)..(25): SEQ ID NO: 5232; WAN024GNK_at; Start 124; Stop 148
tcacggttcatgaggtatttcgaca

SEQ ID NO: 252605 - DNA, 25 bp, Artificial
  probe
  misc_feature (1)..(25): SEQ ID NO: 5232; WAN024GNK_at; Start 11; Stop 35
ttagttggcgagaacggagaatgat

SEQ ID NO: 252606 - DNA, 25 bp, Artificial
  probe
  misc_feature (1)..(25): SEQ ID NO: 5232; WAN024GNK_at; Start 48; Stop 72
gatacctgttggcatatgttcccaa

SEQ ID NO: 252607 - DNA, 25 bp, Artificial
  probe
  misc_feature (1)..(25): SEQ ID NO: 5232; WAN024GNK_at; Start 257; Stop 281
tcttgataaccagaggaatttttcc

SEQ ID NO: 252608 - DNA, 25 bp, Artificial
  probe
  misc_feature (1)..(25): SEQ ID NO: 5232; WAN024GNK_at; Start 211; Stop 235
tgttttagaacgatacgagtacctg

SEQ ID NO: 252609 - DNA, 25 bp, Artificial
  probe
  misc_feature (1)..(25): SEQ ID NO: 5232; WAN024GNK_at; Start 216; Stop 240
tagaacgatacgagtacctggatgg

SEQ ID NO: 252610 - DNA, 25 bp, Artificial
  probe
  misc_feature (1)..(25): SEQ ID NO: 5232; WAN024GNK_at; Start 38; Stop 62
aaagatcgtcgatacctgttggcat

SEQ ID NO: 252611 - DNA, 25 bp, Artificial
  probe
  misc_feature (1)..(25): SEQ ID NO: 5232; WAN024GNK_at; Start 169; Stop 193
gagtcaccagcaattcccacaactg

SEQ ID NO: 252612 - DNA, 25 bp, Artificial
  probe
  misc_feature (1)..(25): SEQ ID NO: 5232; WAN024GNK_at; Start 143; Stop 167
tcgacatgttaatgctgacaaagcc

SEQ ID NO: 252613 - DNA, 25 bp, Artificial
  probe
  misc_feature (1)..(25): SEQ ID NO: 5232; WAN024GNK_at; Start 219; Stop 243
aacgatacgagtacctggatggtca

SEQ ID NO: 252614 - DNA, 25 bp, Artificial
  probe
  misc_feature (1)..(25): SEQ ID NO: 5232; WAN024GNK_at; Start 58; Stop 82
ggcatatgttcccaaccgatgttaa

SEQ ID NO: 252615 - DNA, 25 bp, Artificial
  probe
  misc_feature (1)..(25): SEQ ID NO: 5232; WAN024GNK_at; Start 149; Stop 173
tgttaatgctgacaaagcctgagtc

SEQ ID NO: 252616 - DNA, 25 bp, Artificial
  probe
  misc_feature (1)..(25): SEQ ID NO: 5232; WAN024GNK_at; Start 242; Stop 266
cagggttgttggtattcttgataac

SEQ ID NO: 252617 - DNA, 25 bp, Artificial
  probe
  misc_feature (1)..(25): SEQ ID NO: 5232; WAN024GNK_at; Start 135; Stop 159
gaggtatttcgacatgttaatgctg

SEQ ID NO: 252618 - DNA, 25 bp, Artificial
  probe
  misc_feature (1)..(25): SEQ ID NO: 934; WAN024GNL_at; Start 427; Stop 451
cctagagaagctgggattgtggtca

SEQ ID NO: 252619 - DNA, 25 bp, Artificial
  probe
  misc_feature (1)..(25): SEQ ID NO: 934; WAN024GNL_at; Start 133; Stop 157
gatactaaggttacggatgccctga

SEQ ID NO: 252620 - DNA, 25 bp, Artificial
  probe
  misc_feature (1)..(25): SEQ ID NO: 934; WAN024GNL_at; Start 1094; Stop 1118
tcctgcgtcagttggttcaaaaggc

SEQ ID NO: 252621 - DNA, 25 bp, Artificial
  probe
  misc_feature (1)..(25): SEQ ID NO: 934; WAN024GNL_at; Start 1296; Stop 1320
taaagaccaagagaaagcagcaatt

SEQ ID NO: 252622 - DNA, 25 bp, Artificial
  probe
  misc_feature (1)..(25): SEQ ID NO: 934; WAN024GNL_at; Start 569; Stop 593
aaatctgtactttctcacgtggagg

SEQ ID NO: 252623 - DNA, 25 bp, Artificial
  probe
  misc_feature (1)..(25): SEQ ID NO: 934; WAN024GNL_at; Start 1193; Stop 1217
tcggagtgactgctactgcgacacg

SEQ ID NO: 252624 - DNA, 25 bp, Artificial
  probe
  misc_feature (1)..(25): SEQ ID NO: 934; WAN024GNL_at; Start 1074; Stop 1098
tcccatcaaggaagaagaaatcctg

SEQ ID NO: 252625 - DNA, 25 bp, Artificial
  probe
  misc_feature (1)..(25): SEQ ID NO: 934; WAN024GNL_at; Start 654; Stop 678
tacggacgttgatggtatctttgca

SEQ ID NO: 252626 - DNA, 25 bp, Artificial
  probe
  misc_feature (1)..(25): SEQ ID NO: 934; WAN024GNL_at; Start 741; Stop 765
cgagttggcctatgcaggcttctca

SEQ ID NO: 252627 - DNA, 25 bp, Artificial
  probe
  misc_feature (1)..(25): SEQ ID NO: 934; WAN024GNL_at; Start 726; Stop 750
ctaccgtgaaatgcgcgagttggcc

SEQ ID NO: 252628 - DNA, 25 bp, Artificial
  probe
  misc_feature (1)..(25): SEQ ID NO: 934; WAN024GNL_at; Start 409; Stop 433
gatgcacgctatatgcaccctagag

SEQ ID NO: 252629 - DNA, 25 bp, Artificial
  probe
  misc_feature (1)..(25): SEQ ID NO: 934; WAN024GNL_at; Start 1242; Stop 1266
catccagatgatgtctcaaggttct

SEQ ID NO: 252630 - DNA, 25 bp, Artificial
  probe
  misc_feature (1)..(25): SEQ ID NO: 934; WAN024GNL_at; Start 334; Stop 358
tacgatactttcctagcagccggtg

SEQ ID NO: 252631 - DNA, 25 bp, Artificial
  probe
  misc_feature (1)..(25): SEQ ID NO: 934; WAN024GNL_at; Start 1111; Stop 1135
caaaaggctaaagtagatcatgcag

SEQ ID NO: 252632 - DNA, 25 bp, Artificial
  probe
  misc_feature (1)..(25): SEQ ID NO: 934; WAN024GNL_at; Start 169; Stop 193
cgcgactatgttgcgggtaacgata

SEQ ID NO: 252633 - DNA, 25 bp, Artificial
  probe
  misc_feature (1)..(25): SEQ ID NO: 934; WAN024GNL_at; Start 148; Stop 172
gatgccctgattaaatactaccgcg

SEQ ID NO: 252634 - DNA, 25 bp, Artificial
  probe
  misc_feature (1)..(25): SEQ ID NO: 934; WAN024GNL_at; Start 464; Stop 488
gtcacgctcgcatcattccatcaag

SEQ ID NO: 252635 - DNA, 25 bp, Artificial
  probe
  misc_feature (1)..(25): SEQ ID NO: 934; WAN024GNL_at; Start 244; Stop 268
gaattgggactaaaaccagctgtgc

SEQ ID NO: 252636 - DNA, 25 bp, Artificial
  probe
  misc_feature (1)..(25): SEQ ID NO: 934; WAN024GNL_at; Start 393; Stop 417
taaccaaaatggtatcgatgcacgc

SEQ ID NO: 252637 - DNA, 25 bp, Artificial
  probe
  misc_feature (1)..(25): SEQ ID NO: 934; WAN024GNL_at; Start 1001; Stop 1025
ttaacatcggttgggaacatatgcc

SEQ ID NO: 252638 - DNA, 25 bp, Artificial
  probe
  misc_feature (1)..(25): SEQ ID NO: 934; WAN024GNL_at; Start 1015; Stop 1039
gaacatatgccaacaggtatcgacg

SEQ ID NO: 252639 - DNA, 25 bp, Artificial
  probe
  misc_feature (1)..(25): SEQ ID NO: 934; WAN024GNL_at; Start 350; Stop 374
cagccggtgaaaataacaatgccaa

SEQ ID NO: 252640 - DNA, 25 bp, Artificial
  probe
  misc_feature (1)..(25): SEQ ID NO: 934; WAN024GNL_at; Start 890; Stop 914
cagttgtgggaattgctggtgactc

SEQ ID NO: 252641 - DNA, 25 bp, Artificial
  probe
  misc_feature (1)..(25): SEQ ID NO: 934; WAN024GNL_at; Start 761; Stop 785
tctcagtccttcatgacgaggctct

SEQ ID NO: 252642 - DNA, 25 bp, Artificial
  probe
  misc_feature (1)..(25): SEQ ID NO: 934; WAN024GNL_at; Start 848; Stop 872
caggtactcgtatcgttctaaaaca

SEQ ID NO: 252643 - DNA, 25 bp, Artificial
  probe
  misc_feature (1)..(25): SEQ ID NO: 934; WAN024GNL_at; Start 974; Stop 998
gcaaggttctgcaaatcctggaaga

SEQ ID NO: 252644 - DNA, 25 bp, Artificial
  probe
  misc_feature (1)..(25): SEQ ID NO: 934; WAN024GNL_at; Start 1129; Stop 1153
catgcagaaatcgaacacgaccttt

SEQ ID NO: 252645 - DNA, 25 bp, Artificial
  probe
  misc_feature (1)..(25): SEQ ID NO: 934; WAN024GNL_at; Start 1209; Stop 1233
tgcgacacgcgctctatctgaaaac

SEQ ID NO: 252646 - DNA, 25 bp, Artificial
  probe
  misc_feature (1)..(25): SEQ ID NO: 934; WAN024GNL_at; Start 106; Stop 130
tctgcgcctggtaaacgcaatgctg

SEQ ID NO: 252647 - DNA, 25 bp, Artificial
  probe
  misc_feature (1)..(25): SEQ ID NO: 934; WAN024GNL_at; Start 610; Stop 634
tctatcattgctgctggtgtcaaag

SEQ ID NO: 252648 - DNA, 25 bp, Artificial
  probe
  misc_feature (1)..(25): SEQ ID NO: 934; WAN024GNL_at; Start 935; Stop 959
tgtcgaaatacctcatgaaccgtga

SEQ ID NO: 252649 - DNA, 25 bp, Artificial
  probe
  misc_feature (1)..(25): SEQ ID NO: 934; WAN024GNL_at; Start 710; Stop 734
cgattcctgagttgacctaccgtga

SEQ ID NO: 252650 - DNA, 25 bp, Artificial
  probe
  misc_feature (1)..(25): SEQ ID NO: 934; WAN024GNL_at; Start 446; Stop 470
tggtcacaagtgaacctggtcacgc

SEQ ID NO: 252651 - DNA, 25 bp, Artificial
  probe
  misc_feature (1)..(25): SEQ ID NO: 934; WAN024GNL_at; Start 213; Stop 237
gattatcgaccgctatgctgctatg

SEQ ID NO: 252652 - DNA, 25 bp, Artificial
  probe
  misc_feature (1)..(25): SEQ ID NO: 2257; WAN024GNM_at; Start 5; Stop 29
acgaagtgcttctgggatggtcaca

SEQ ID NO: 252653 - DNA, 25 bp, Artificial
  probe
  misc_feature (1)..(25): SEQ ID NO: 2257; WAN024GNM_at; Start 216; Stop 240
tgtgctggaatccacacttccaagt

SEQ ID NO: 252654 - DNA, 25 bp, Artificial
  probe
  misc_feature (1)..(25): SEQ ID NO: 2257; WAN024GNM_at; Start 131; Stop 155
tgcttcatcacggtaacggatttgg

SEQ ID NO: 252655 - DNA, 25 bp, Artificial
  probe
  misc_feature (1)..(25): SEQ ID NO: 2257; WAN024GNM_at; Start 222; Stop 246
ggaatccacacttccaagtcgtaag

SEQ ID NO: 252656 - DNA, 25 bp, Artificial
  probe
  misc_feature (1)..(25): SEQ ID NO: 2257; WAN024GNM_at; Start 113; Stop 137
gagtttcaccttgccatctgcttca

SEQ ID NO: 252657 - DNA, 25 bp, Artificial
  probe
  misc_feature (1)..(25): SEQ ID NO: 2257; WAN024GNM_at; Start 255; Stop 279
gctgagaagcccatatctccagtag

SEQ ID NO: 252658 - DNA, 25 bp, Artificial
  probe
  misc_feature (1)..(25): SEQ ID NO: 2257; WAN024GNM_at; Start 109; Stop 133
gaaggagtttcaccttgccatctgc

SEQ ID NO: 252659 - DNA, 25 bp, Artificial
  probe
  misc_feature (1)..(25): SEQ ID NO: 2257; WAN024GNM_at; Start 15; Stop 39
tctgggatggtcacagaaccatctt

SEQ ID NO: 252660 - DNA, 25 bp, Artificial
  probe
  misc_feature (1)..(25): SEQ ID NO: 2257; WAN024GNM_at; Start 124; Stop 148
tgccatctgcttcatcacggtaacg

SEQ ID NO: 252661 - DNA, 25 bp, Artificial
  probe
  misc_feature (1)..(25): SEQ ID NO: 2257; WAN024GNM_at; Start 23; Stop 47
ggtcacagaaccatcttcattttgg

SEQ ID NO: 252662 - DNA, 25 bp, Artificial
  probe
  misc_feature (1)..(25): SEQ ID NO: 2257; WAN024GNM_at; Start 104; Stop 128
ggtatgaaggagtttcaccttgcca

SEQ ID NO: 252663 - DNA, 25 bp, Artificial
  probe
  misc_feature (1)..(25): SEQ ID NO: 2257; WAN024GNM_at; Start 155; Stop 179
ggcacgacgggcttggaaatcttct

SEQ ID NO: 252664 - DNA, 25 bp, Artificial
  probe
  misc_feature (1)..(25): SEQ ID NO: 2257; WAN024GNM_at; Start 208; Stop 232
aattgttttgtgctggaatccacac

SEQ ID NO: 252665 - DNA, 25 bp, Artificial
  probe
  misc_feature (1)..(25): SEQ ID NO: 2257; WAN024GNM_at; Start 169; Stop 193
ggaaatcttctgtgtttgaacagct

SEQ ID NO: 252666 - DNA, 25 bp, Artificial
  probe
  misc_feature (1)..(25): SEQ ID NO: 2257; WAN024GNM_at; Start 126; Stop 150
ccatctgcttcatcacggtaacgga

SEQ ID NO: 252667 - DNA, 25 bp, Artificial
  probe
  misc_feature (1)..(25): SEQ ID NO: 2257; WAN024GNM_at; Start 89; Stop 113
tccagaaccgttcaaggtatgaagg

SEQ ID NO: 252668 - DNA, 25 bp, Artificial
  probe
  misc_feature (1)..(25): SEQ ID NO: 2257; WAN024GNM_at; Start 48; Stop 72
taattttcaagaattgcagccactg

SEQ ID NO: 252669 - DNA, 25 bp, Artificial
  probe
  misc_feature (1)..(25): SEQ ID NO: 2257; WAN024GNM_at; Start 65; Stop 89
agccactgtacgtccaactgcaagt

SEQ ID NO: 252670 - DNA, 25 bp, Artificial
  probe
  misc_feature (1)..(25): SEQ ID NO: 2257; WAN024GNM_at; Start 54; Stop 78
tcaagaattgcagccactgtacgtc

SEQ ID NO: 252671 - DNA, 25 bp, Artificial
  probe
  misc_feature (1)..(25): SEQ ID NO: 2257; WAN024GNM_at; Start 58; Stop 82
gaattgcagccactgtacgtccaac

SEQ ID NO: 252672 - DNA, 25 bp, Artificial
  probe
  misc_feature (1)..(25): SEQ ID NO: 2257; WAN024GNM_at; Start 97; Stop 121
cgttcaaggtatgaaggagtttcac

SEQ ID NO: 252673 - DNA, 25 bp, Artificial
  probe
  misc_feature (1)..(25): SEQ ID NO: 2257; WAN024GNM_at; Start 135; Stop 159
tcatcacggtaacggatttgggcac

SEQ ID NO: 252674 - DNA, 25 bp, Artificial
  probe
  misc_feature (1)..(25): SEQ ID NO: 2257; WAN024GNM_at; Start 80; Stop 104
aactgcaagtccagaaccgttcaag

SEQ ID NO: 252675 - DNA, 25 bp, Artificial
  probe
  misc_feature (1)..(25): SEQ ID NO: 2257; WAN024GNM_at; Start 34; Stop 58
catcttcattttggtaattttcaag

SEQ ID NO: 252676 - DNA, 25 bp, Artificial
  probe
  misc_feature (1)..(25): SEQ ID NO: 2257; WAN024GNM_at; Start 228; Stop 252
cacacttccaagtcgtaagtcttcg

SEQ ID NO: 252677 - DNA, 25 bp, Artificial
  probe
  misc_feature (1)..(25): SEQ ID NO: 2257; WAN024GNM_at; Start 189; Stop 213
cagcttgagatttcacggtaattgt

SEQ ID NO: 252678 - DNA, 25 bp, Artificial
  probe
  misc_feature (1)..(25): SEQ ID NO: 2257; WAN024GNM_at; Start 70; Stop 94
ctgtacgtccaactgcaagtccaga

SEQ ID NO: 252679 - DNA, 25 bp, Artificial
  probe
  misc_feature (1)..(25): SEQ ID NO: 2257; WAN024GNM_at; Start 204; Stop 228
cggtaattgttttgtgctggaatcc

SEQ ID NO: 252680 - DNA, 25 bp, Artificial
  probe
  misc_feature (1)..(25): SEQ ID NO: 2257; WAN024GNM_at; Start 183; Stop 207
tttgaacagcttgagatttcacggt

SEQ ID NO: 252681 - DNA, 25 bp, Artificial
  probe
  misc_feature (1)..(25): SEQ ID NO: 2257; WAN024GNM_at; Start 160; Stop 184
gacgggcttggaaatcttctgtgtt

SEQ ID NO: 252682 - DNA, 25 bp, Artificial
  probe
  misc_feature (1)..(25): SEQ ID NO: 2257; WAN024GNM_at; Start 157; Stop 181
cacgacgggcttggaaatcttctgt

SEQ ID NO: 252683 - DNA, 25 bp, Artificial
  probe
  misc_feature (1)..(25): SEQ ID NO: 2257; WAN024GNM_at; Start 11; Stop 35
tgcttctgggatggtcacagaacca

SEQ ID NO: 252684 - DNA, 25 bp, Artificial
  probe
  misc_feature (1)..(25): SEQ ID NO: 2257; WAN024GNM_at; Start 83; Stop 107
tgcaagtccagaaccgttcaaggta

SEQ ID NO: 252685 - DNA, 25 bp, Artificial
  probe
  misc_feature (1)..(25): SEQ ID NO: 2257; WAN024GNM_at; Start 139; Stop 163
cacggtaacggatttgggcacgacg

SEQ ID NO: 252686 - DNA, 25 bp, Artificial
  probe
  misc_feature (1)..(25): SEQ ID NO: 2711; WAN024GNN_at; Start 325; Stop 349
gatttctgccaattcagcatccaag

SEQ ID NO: 252687 - DNA, 25 bp, Artificial
  probe
  misc_feature (1)..(25): SEQ ID NO: 2711; WAN024GNN_at; Start 310; Stop 334
tgtcaatttagcatcgatttctgcc

SEQ ID NO: 252688 - DNA, 25 bp, Artificial
  probe
  misc_feature (1)..(25): SEQ ID NO: 2711; WAN024GNN_at; Start 404; Stop 428
tccttgttgcgcttagcttgggcaa

SEQ ID NO: 252689 - DNA, 25 bp, Artificial
  probe
  misc_feature (1)..(25): SEQ ID NO: 2711; WAN024GNN_at; Start 508; Stop 532
tttcatttcattcaagacagcagca

SEQ ID NO: 252690 - DNA, 25 bp, Artificial
  probe
  misc_feature (1)..(25): SEQ ID NO: 2711; WAN024GNN_at; Start 163; Stop 187
aaggtcttcaccgagatcccagtga

SEQ ID NO: 252691 - DNA, 25 bp, Artificial
  probe
  misc_feature (1)..(25): SEQ ID NO: 2711; WAN024GNN_at; Start 346; Stop 370
caaggctttaacctcagcagataga

SEQ ID NO: 252692 - DNA, 25 bp, Artificial
  probe
  misc_feature (1)..(25): SEQ ID NO: 2711; WAN024GNN_at; Start 540; Stop 564
cacgtgtagctaatttttctgcgac

SEQ ID NO: 252693 - DNA, 25 bp, Artificial
  probe
  misc_feature (1)..(25): SEQ ID NO: 2711; WAN024GNN_at; Start 102; Stop 126
ctttatagaagaggaagcgagcgcc

SEQ ID NO: 252694 - DNA, 25 bp, Artificial
  probe
  misc_feature (1)..(25): SEQ ID NO: 2711; WAN024GNN_at; Start 224; Stop 248
caacggcgaacttccacattgtcgt

SEQ ID NO: 252695 - DNA, 25 bp, Artificial
  probe
  misc_feature (1)..(25): SEQ ID NO: 2711; WAN024GNN_at; Start 251; Stop 275
tcgtcagccccaacaggaacgctgt

SEQ ID NO: 252696 - DNA, 25 bp, Artificial
  probe
  misc_feature (1)..(25): SEQ ID NO: 2711; WAN024GNN_at; Start 177; Stop 201
gatcccagtgagctttaggttcgaa

SEQ ID NO: 252697 - DNA, 25 bp, Artificial
  probe
  misc_feature (1)..(25): SEQ ID NO: 2711; WAN024GNN_at; Start 474; Stop 498
tgaccaagatgttacgacgtttagc

SEQ ID NO: 252698 - DNA, 25 bp, Artificial
  probe
  misc_feature (1)..(25): SEQ ID NO: 2711; WAN024GNN_at; Start 192; Stop 216
taggttcgaagtcaaactcgcgtgg

SEQ ID NO: 252699 - DNA, 25 bp, Artificial
  probe
  misc_feature (1)..(25): SEQ ID NO: 2711; WAN024GNN_at; Start 90; Stop 114
gagcaccgaggcctttatagaagag

SEQ ID NO: 252700 - DNA, 25 bp, Artificial
  probe
  misc_feature (1)..(25): SEQ ID NO: 2711; WAN024GNN_at; Start 439; Stop 463
aactgtgttacgttctgctttgaga

SEQ ID NO: 252701 - DNA, 25 bp, Artificial
  probe
  misc_feature (1)..(25): SEQ ID NO: 2711; WAN024GNN_at; Start 239; Stop 263
acattgtcgtcttcgtcagccccaa

SEQ ID NO: 252702 - DNA, 25 bp, Artificial
  probe
  misc_feature (1)..(25): SEQ ID NO: 2711; WAN024GNN_at; Start 115; Stop 139
gaagcgagcgcctgttaccttacca

SEQ ID NO: 252703 - DNA, 25 bp, Artificial
  probe
  misc_feature (1)..(25): SEQ ID NO: 2711; WAN024GNN_at; Start 19; Stop 43
tgtgatgacttcagtatagccttct

SEQ ID NO: 252704 - DNA, 25 bp, Artificial
  probe
  misc_feature (1)..(25): SEQ ID NO: 2711; WAN024GNN_at; Start 202; Stop 226
gtcaaactcgcgtggagtaccccaa

SEQ ID NO: 252705 - DNA, 25 bp, Artificial
  probe
  misc_feature (1)..(25): SEQ ID NO: 2711; WAN024GNN_at; Start 75; Stop 99
tagcacgttccaaacgagcaccgag

SEQ ID NO: 252706 - DNA, 25 bp, Artificial
  probe
  misc_feature (1)..(25): SEQ ID NO: 2711; WAN024GNN_at; Start 290; Stop 314
ggaagagtcgttgtaaattctgtca

SEQ ID NO: 252707 - DNA, 25 bp, Artificial
  probe
  misc_feature (1)..(25): SEQ ID NO: 2711; WAN024GNN_at; Start 455; Stop 479
gctttgagagtttcaaccttgacca

SEQ ID NO: 252708 - DNA, 25 bp, Artificial
  probe
  misc_feature (1)..(25): SEQ ID NO: 2711; WAN024GNN_at; Start 489; Stop 513
gacgtttagcatcgatttctttcat

SEQ ID NO: 252709 - DNA, 25 bp, Artificial
  probe
  misc_feature (1)..(25): SEQ ID NO: 2711; WAN024GNN_at; Start 134; Stop 158
ttaccaccgcgttcccagtcaagga

SEQ ID NO: 252710 - DNA, 25 bp, Artificial
  probe
  misc_feature (1)..(25): SEQ ID NO: 2711; WAN024GNN_at; Start 275; Stop 299
tcagctgggatatttggaagagtcg

SEQ ID NO: 252711 - DNA, 25 bp, Artificial
  probe
  misc_feature (1)..(25): SEQ ID NO: 2711; WAN024GNN_at; Start 261; Stop 285
caacaggaacgctgtcagctgggat

SEQ ID NO: 252712 - DNA, 25 bp, Artificial
  probe
  misc_feature (1)..(25): SEQ ID NO: 2711; WAN024GNN_at; Start 557; Stop 581
tctgcgacagcttcaaaatctgtac

SEQ ID NO: 252713 - DNA, 25 bp, Artificial
  probe
  misc_feature (1)..(25): SEQ ID NO: 2711; WAN024GNN_at; Start 35; Stop 59
tagccttcttttccatgttcatcca

SEQ ID NO: 252714 - DNA, 25 bp, Artificial
  probe
  misc_feature (1)..(25): SEQ ID NO: 2711; WAN024GNN_at; Start 146; Stop 170
tcccagtcaaggataccaaggtctt

SEQ ID NO: 252715 - DNA, 25 bp, Artificial
  probe
  misc_feature (1)..(25): SEQ ID NO: 2711; WAN024GNN_at; Start 7; Stop 31
gactatgtaaggtgtgatgacttca

SEQ ID NO: 252716 - DNA, 25 bp, Artificial
  probe
  misc_feature (1)..(25): SEQ ID NO: 2711; WAN024GNN_at; Start 61; Stop 85
cataaagttgtagatagcacgttcc

SEQ ID NO: 252717 - DNA, 25 bp, Artificial
  probe
  misc_feature (1)..(25): SEQ ID NO: 2711; WAN024GNN_at; Start 361; Stop 385
agcagatagattttgcatggcagca

SEQ ID NO: 252718 - DNA, 25 bp, Artificial
  probe
  misc_feature (1)..(25): SEQ ID NO: 2711; WAN024GNN_at; Start 523; Stop 547
gacagcagcatctacaccacgtgta

SEQ ID NO: 252719 - DNA, 25 bp, Artificial
  probe
  misc_feature (1)..(25): SEQ ID NO: 2711; WAN024GNN_at; Start 419; Stop 443
gcttgggcaatctcagcagaaactg

SEQ ID NO: 252720 - DNA, 25 bp, Artificial
  probe
  misc_feature (1)..(25): SEQ ID NO: 4056; WAN024GNO_at; Start 1100; Stop 1124
ggattccagcacaaaacaattaccg

SEQ ID NO: 252721 - DNA, 25 bp, Artificial
  probe
  misc_feature (1)..(25): SEQ ID NO: 4056; WAN024GNO_at; Start 1299; Stop 1323
tgtgaccatcccagaagcacttcgt

SEQ ID NO: 252722 - DNA, 25 bp, Artificial
  probe
  misc_feature (1)..(25): SEQ ID NO: 4056; WAN024GNO_at; Start 582; Stop 606
taaaggcctcggtgctcgtttggaa

SEQ ID NO: 252723 - DNA, 25 bp, Artificial
  probe
  misc_feature (1)..(25): SEQ ID NO: 4056; WAN024GNO_at; Start 738; Stop 762
tgaactcagcgataccaactttgtc

SEQ ID NO: 252724 - DNA, 25 bp, Artificial
  probe
  misc_feature (1)..(25): SEQ ID NO: 4056; WAN024GNO_at; Start 484; Stop 508
gacttcgaacctaaagctcactggg

SEQ ID NO: 252725 - DNA, 25 bp, Artificial
  probe
  misc_feature (1)..(25): SEQ ID NO: 4056; WAN024GNO_at; Start 225; Stop 249
tctcaaagcagaacgtaacacagtt

SEQ ID NO: 252726 - DNA, 25 bp, Artificial
  probe
  misc_feature (1)..(25): SEQ ID NO: 4056; WAN024GNO_at; Start 977; Stop 1001
tggaaaaaatgacagccaacgctga

SEQ ID NO: 252727 - DNA, 25 bp, Artificial
  probe
  misc_feature (1)..(25): SEQ ID NO: 4056; WAN024GNO_at; Start 876; Stop 900
tggttctgccggtcgtgatacgcgt

SEQ ID NO: 252728 - DNA, 25 bp, Artificial
  probe
  misc_feature (1)..(25): SEQ ID NO: 4056; WAN024GNO_at; Start 468; Stop 492
tactccacgcgagtttgacttcgaa

SEQ ID NO: 252729 - DNA, 25 bp, Artificial
  probe
  misc_feature (1)..(25): SEQ ID NO: 4056; WAN024GNO_at; Start 517; Stop 541
gaagaccttggtatccttgactggg

SEQ ID NO: 252730 - DNA, 25 bp, Artificial
  probe
  misc_feature (1)..(25): SEQ ID NO: 4056; WAN024GNO_at; Start 1312; Stop 1336
gaagcacttcgtccatacatgggtg

SEQ ID NO: 252731 - DNA, 25 bp, Artificial
  probe
  misc_feature (1)..(25): SEQ ID NO: 4056; WAN024GNO_at; Start 1250; Stop 1274
gacgtacagtggctgcaattcttga

SEQ ID NO: 252732 - DNA, 25 bp, Artificial
  probe
  misc_feature (1)..(25): SEQ ID NO: 4056; WAN024GNO_at; Start 318; Stop 342
tctatctgctgaggttaaagccttg

SEQ ID NO: 252733 - DNA, 25 bp, Artificial
  probe
  misc_feature (1)..(25): SEQ ID NO: 4056; WAN024GNO_at; Start 333; Stop 357
taaagccttggatgctgaattggca

SEQ ID NO: 252734 - DNA, 25 bp, Artificial
  probe
  misc_feature (1)..(25): SEQ ID NO: 4056; WAN024GNO_at; Start 765; Stop 789
gattccaactgctgaagttcctctg

SEQ ID NO: 252735 - DNA, 25 bp, Artificial
  probe
  misc_feature (1)..(25): SEQ ID NO: 4056; WAN024GNO_at; Start 530; Stop 554
tccttgactgggaacgcggtggtaa

SEQ ID NO: 252736 - DNA, 25 bp, Artificial
  probe
  misc_feature (1)..(25): SEQ ID NO: 4056; WAN024GNO_at; Start 549; Stop 573
tggtaaggtaacaggcgctcgcttc

SEQ ID NO: 252737 - DNA, 25 bp, Artificial
  probe
  misc_feature (1)..(25): SEQ ID NO: 4056; WAN024GNO_at; Start 1233; Stop 1257
ttctggacttgcagttggacgtaca

SEQ ID NO: 252738 - DNA, 25 bp, Artificial
  probe
  misc_feature (1)..(25): SEQ ID NO: 4056; WAN024GNO_at; Start 1180; Stop 1204
cgttaccgtgatgaagcagatggca

SEQ ID NO: 252739 - DNA, 25 bp, Artificial
  probe
  misc_feature (1)..(25): SEQ ID NO: 4056; WAN024GNO_at; Start 628; Stop 652
ttggatgaacatggaaaagaaggct

SEQ ID NO: 252740 - DNA, 25 bp, Artificial
  probe
  misc_feature (1)..(25): SEQ ID NO: 4056; WAN024GNO_at; Start 894; Stop 918
tacgcgtggcttgatccgtttgcac

SEQ ID NO: 252741 - DNA, 25 bp, Artificial
  probe
  misc_feature (1)..(25): SEQ ID NO: 4056; WAN024GNO_at; Start 396; Stop 420
tccaaatatcccagctgacagcgtt

SEQ ID NO: 252742 - DNA, 25 bp, Artificial
  probe
  misc_feature (1)..(25): SEQ ID NO: 4056; WAN024GNO_at; Start 1149; Stop 1173
agaagatttccaagcccgtcgtgcc

SEQ ID NO: 252743 - DNA, 25 bp, Artificial
  probe
  misc_feature (1)..(25): SEQ ID NO: 4056; WAN024GNO_at; Start 177; Stop 201
gaaagaaatcgatgctaaacgtcgt

SEQ ID NO: 252744 - DNA, 25 bp, Artificial
  probe
  misc_feature (1)..(25): SEQ ID NO: 4056; WAN024GNO_at; Start 1196; Stop 1220
cagatggcaaggtgaaactccttca

SEQ ID NO: 252745 - DNA, 25 bp, Artificial
  probe
  misc_feature (1)..(25): SEQ ID NO: 4056; WAN024GNO_at; Start 910; Stop 934
cgtttgcaccaattccacaaggttg

SEQ ID NO: 252746 - DNA, 25 bp, Artificial
  probe
  misc_feature (1)..(25): SEQ ID NO: 4056; WAN024GNO_at; Start 253; Stop 277
gctgagattgcccaagctaagcgca

SEQ ID NO: 252747 - DNA, 25 bp, Artificial
  probe
  misc_feature (1)..(25): SEQ ID NO: 4056; WAN024GNO_at; Start 501; Stop 525
tcactgggatctcggtgaagacctt

SEQ ID NO: 252748 - DNA, 25 bp, Artificial
  probe
  misc_feature (1)..(25): SEQ ID NO: 4056; WAN024GNO_at; Start 1327; Stop 1351
tacatgggtggagctgaagtcatca

SEQ ID NO: 252749 - DNA, 25 bp, Artificial
  probe
  misc_feature (1)..(25): SEQ ID NO: 4056; WAN024GNO_at; Start 851; Stop 875
tgagtccgtcattccgttctgaggc

SEQ ID NO: 252750 - DNA, 25 bp, Artificial
  probe
  misc_feature (1)..(25): SEQ ID NO: 4056; WAN024GNO_at; Start 268; Stop 292
gctaagcgcaacaaggaaaatacag

SEQ ID NO: 252751 - DNA, 25 bp, Artificial
  probe
  misc_feature (1)..(25): SEQ ID NO: 4056; WAN024GNO_at; Start 1046; Stop 1070
tctctactggagatatgggcttctc

SEQ ID NO: 252752 - DNA, 25 bp, Artificial
  probe
  misc_feature (1)..(25): SEQ ID NO: 4056; WAN024GNO_at; Start 141; Stop 165
tacacgtggtgtagatgctgctgtc

SEQ ID NO: 252753 - DNA, 25 bp, Artificial
  probe
  misc_feature (1)..(25): SEQ ID NO: 4056; WAN024GNO_at; Start 1166; Stop 1190
gtcgtgcccaaatccgttaccgtga

SEQ ID NO: 252754 - DNA, 25 bp, Artificial
  probe
  misc_feature (1)..(25): SEQ ID NO: 5475; WAN024GNP_at; Start 530; Stop 554
taaagaaacatccactcccactagc

SEQ ID NO: 252755 - DNA, 25 bp, Artificial
  probe
  misc_feature (1)..(25): SEQ ID NO: 5475; WAN024GNP_at; Start 231; Stop 255
ggctgggatgattttatcgacctat

SEQ ID NO: 252756 - DNA, 25 bp, Artificial
  probe
  misc_feature (1)..(25): SEQ ID NO: 5475; WAN024GNP_at; Start 789; Stop 813
ggctcagggaattttgaaacttcca

SEQ ID NO: 252757 - DNA, 25 bp, Artificial
  probe
  misc_feature (1)..(25): SEQ ID NO: 5475; WAN024GNP_at; Start 82; Stop 106
gatacgttgccggttctatcccatc

SEQ ID NO: 252758 - DNA, 25 bp, Artificial
  probe
  misc_feature (1)..(25): SEQ ID NO: 5475; WAN024GNP_at; Start 611; Stop 635
tagttcgagtaggaggaaccagcct

SEQ ID NO: 252759 - DNA, 25 bp, Artificial
  probe
  misc_feature (1)..(25): SEQ ID NO: 5475; WAN024GNP_at; Start 337; Stop 361
gctggttttaccatcaagtttgctt

SEQ ID NO: 252760 - DNA, 25 bp, Artificial
  probe
  misc_feature (1)..(25): SEQ ID NO: 5475; WAN024GNP_at; Start 413; Stop 437
ggatagcagtggctgccttgaccta

SEQ ID NO: 252761 - DNA, 25 bp, Artificial
  probe
  misc_feature (1)..(25): SEQ ID NO: 5475; WAN024GNP_at; Start 450; Stop 474
tattatcgaaattgcctatgcgacc

SEQ ID NO: 252762 - DNA, 25 bp, Artificial
  probe
  misc_feature (1)..(25): SEQ ID NO: 5475; WAN024GNP_at; Start 624; Stop 648
aggaaccagcctgccgacttgggtc

SEQ ID NO: 252763 - DNA, 25 bp, Artificial
  probe
  misc_feature (1)..(25): SEQ ID NO: 5475; WAN024GNP_at; Start 804; Stop 828
gaaacttccatttctggattacctg

SEQ ID NO: 252764 - DNA, 25 bp, Artificial
  probe
  misc_feature (1)..(25): SEQ ID NO: 5475; WAN024GNP_at; Start 158; Stop 182
tctttaattggaaagaaaccaagca

SEQ ID NO: 252765 - DNA, 25 bp, Artificial
  probe
  misc_feature (1)..(25): SEQ ID NO: 5475; WAN024GNP_at; Start 290; Stop 314
cacaagggatttggtggttttcatt

SEQ ID NO: 252766 - DNA, 25 bp, Artificial
  probe
  misc_feature (1)..(25): SEQ ID NO: 5475; WAN024GNP_at; Start 198; Stop 222
ccctcttttgtcaggaatggcaacc

SEQ ID NO: 252767 - DNA, 25 bp, Artificial
  probe
  misc_feature (1)..(25): SEQ ID NO: 5475; WAN024GNP_at; Start 366; Stop 390
agggcggagggttcatgccactcca

SEQ ID NO: 252768 - DNA, 25 bp, Artificial
  probe
  misc_feature (1)..(25): SEQ ID NO: 5475; WAN024GNP_at; Start 774; Stop 798
gacctcgctcaagatggctcaggga

SEQ ID NO: 252769 - DNA, 25 bp, Artificial
  probe
  misc_feature (1)..(25): SEQ ID NO: 5475; WAN024GNP_at; Start 637; Stop 661
ccgacttgggtcttgattgtcatga

SEQ ID NO: 252770 - DNA, 25 bp, Artificial
  probe
  misc_feature (1)..(25): SEQ ID NO: 5475; WAN024GNP_at; Start 557; Stop 581
tgcttggacaagaaggaatctactg

SEQ ID NO: 252771 - DNA, 25 bp, Artificial
  probe
  misc_feature (1)..(25): SEQ ID NO: 5475; WAN024GNP_at; Start 317; Stop 341
tcttggatttgaccttgattgctgg

SEQ ID NO: 252772 - DNA, 25 bp, Artificial
  probe
  misc_feature (1)..(25): SEQ ID NO: 5475; WAN024GNP_at; Start 174; Stop 198
aaccaagcaagaattgaccaagccc

SEQ ID NO: 252773 - DNA, 25 bp, Artificial
  probe
  misc_feature (1)..(25): SEQ ID NO: 5475; WAN024GNP_at; Start 595; Stop 619
ctactcttggcttctctagttcgag

SEQ ID NO: 252774 - DNA, 25 bp, Artificial
  probe
  misc_feature (1)..(25): SEQ ID NO: 5475; WAN024GNP_at; Start 722; Stop 746
aaggttttcaaccagccttctcagc

SEQ ID NO: 252775 - DNA, 25 bp, Artificial
  probe
  misc_feature (1)..(25): SEQ ID NO: 5475; WAN024GNP_at; Start 580; Stop 604
tgtgctcctttctctctactcttgg

SEQ ID NO: 252776 - DNA, 25 bp, Artificial
  probe
  misc_feature (1)..(25): SEQ ID NO: 5475; WAN024GNP_at; Start 274; Stop 298
tatcttcctttggtagcacaaggga

SEQ ID NO: 252777 - DNA, 25 bp, Artificial
  probe
  misc_feature (1)..(25): SEQ ID NO: 5475; WAN024GNP_at; Start 520; Stop 544
tatagcgatttaaagaaacatccac

SEQ ID NO: 252778 - DNA, 25 bp, Artificial
  probe
  misc_feature (1)..(25): SEQ ID NO: 5475; WAN024GNP_at; Start 350; Stop 374
tcaagtttgcttgtccagggcggag

SEQ ID NO: 252779 - DNA, 25 bp, Artificial
  probe
  misc_feature (1)..(25): SEQ ID NO: 5475; WAN024GNP_at; Start 35; Stop 59
tttcaggttgtttgctaggtttggc

SEQ ID NO: 252780 - DNA, 25 bp, Artificial
  probe
  misc_feature (1)..(25): SEQ ID NO: 5475; WAN024GNP_at; Start 70; Stop 94
aatcttattttagatacgttgccgg

SEQ ID NO: 252781 - DNA, 25 bp, Artificial
  probe
  misc_feature (1)..(25): SEQ ID NO: 5475; WAN024GNP_at; Start 49; Stop 73
ctaggtttggcaggagctggaaatc

SEQ ID NO: 252782 - DNA, 25 bp, Artificial
  probe
  misc_feature (1)..(25): SEQ ID NO: 5475; WAN024GNP_at; Start 686; Stop 710
tctttgttttaactcgtctgcccaa

SEQ ID NO: 252783 - DNA, 25 bp, Artificial
  probe
  misc_feature (1)..(25): SEQ ID NO: 5475; WAN024GNP_at; Start 423; Stop 447
ggctgccttgacctatcctctggta

SEQ ID NO: 252784 - DNA, 25 bp, Artificial
  probe
  misc_feature (1)..(25): SEQ ID NO: 5475; WAN024GNP_at; Start 436; Stop 460
tatcctctggtaggtattatcgaaa

SEQ ID NO: 252785 - DNA, 25 bp, Artificial
  probe
  misc_feature (1)..(25): SEQ ID NO: 5475; WAN024GNP_at; Start 651; Stop 675
gattgtcatgattttggcttctcaa

SEQ ID NO: 252786 - DNA, 25 bp, Artificial
  probe
  misc_feature (1)..(25): SEQ ID NO: 5475; WAN024GNP_at; Start 249; Stop 273
gacctatgtctttcgcgtattctct

SEQ ID NO: 252787 - DNA, 25 bp, Artificial
  probe
  misc_feature (1)..(25): SEQ ID NO: 5475; WAN024GNP_at; Start 700; Stop 724
cgtctgcccaacattttaaaacaag

SEQ ID NO: 252788 - DNA, 25 bp, Artificial
  probe
  misc_feature (1)..(25): SEQ ID NO: 2546; WAN024GNQ_at; Start 13; Stop 37
gctactgcaccatggtcgtccttgg

SEQ ID NO: 252789 - DNA, 25 bp, Artificial
  probe
  misc_feature (1)..(25): SEQ ID NO: 2546; WAN024GNQ_at; Start 190; Stop 214
gctgtacacagagctgcaaaactgg

SEQ ID NO: 252790 - DNA, 25 bp, Artificial
  probe
  misc_feature (1)..(25): SEQ ID NO: 2546; WAN024GNQ_at; Start 57; Stop 81
gagtccttccgcatacttggtagcc

SEQ ID NO: 252791 - DNA, 25 bp, Artificial
  probe
  misc_feature (1)..(25): SEQ ID NO: 2546; WAN024GNQ_at; Start 231; Stop 255
cttatcctggataaaaataagctga

SEQ ID NO: 252792 - DNA, 25 bp, Artificial
  probe
  misc_feature (1)..(25): SEQ ID NO: 2546; WAN024GNQ_at; Start 31; Stop 55
tccttggtgcggtatttgatggcca

SEQ ID NO: 252793 - DNA, 25 bp, Artificial
  probe
  misc_feature (1)..(25): SEQ ID NO: 2546; WAN024GNQ_at; Start 221; Stop 245
caccatgtcccttatcctggataaa

SEQ ID NO: 252794 - DNA, 25 bp, Artificial
  probe
  misc_feature (1)..(25): SEQ ID NO: 2546; WAN024GNQ_at; Start 204; Stop 228
tgcaaaactggatacatcaccatgt

SEQ ID NO: 252795 - DNA, 25 bp, Artificial
  probe
  misc_feature (1)..(25): SEQ ID NO: 2546; WAN024GNQ_at; Start 176; Stop 200
cagttgatgccaaggctgtacacag

SEQ ID NO: 252796 - DNA, 25 bp, Artificial
  probe
  misc_feature (1)..(25): SEQ ID NO: 2546; WAN024GNQ_at; Start 165; Stop 189
tcctgttccaacagttgatgccaag

SEQ ID NO: 252797 - DNA, 25 bp, Artificial
  probe
  misc_feature (1)..(25): SEQ ID NO: 2546; WAN024GNQ_at; Start 94; Stop 118
gccgccatccacatccaaaatagag

SEQ ID NO: 252798 - DNA, 25 bp, Artificial
  probe
  misc_feature (1)..(25): SEQ ID NO: 2546; WAN024GNQ_at; Start 20; Stop 44
caccatggtcgtccttggtgcggta

SEQ ID NO: 252799 - DNA, 25 bp, Artificial
  probe
  misc_feature (1)..(25): SEQ ID NO: 2546; WAN024GNQ_at; Start 181; Stop 205
gatgccaaggctgtacacagagctg

SEQ ID NO: 252800 - DNA, 25 bp, Artificial
  probe
  misc_feature (1)..(25): SEQ ID NO: 2546; WAN024GNQ_at; Start 74; Stop 98
tggtagccattccaaagaaagccgc

SEQ ID NO: 252801 - DNA, 25 bp, Artificial
  probe
  misc_feature (1)..(25): SEQ ID NO: 2546; WAN024GNQ_at; Start 87; Stop 111
aaagaaagccgccatccacatccaa

SEQ ID NO: 252802 - DNA, 25 bp, Artificial
  probe
  misc_feature (1)..(25): SEQ ID NO: 2546; WAN024GNQ_at; Start 43; Stop 67
tatttgatggccaagagtccttccg

SEQ ID NO: 252803 - DNA, 25 bp, Artificial
  probe
  misc_feature (1)..(25): SEQ ID NO: 2546; WAN024GNQ_at; Start 38; Stop 62
tgcggtatttgatggccaagagtcc

SEQ ID NO: 252804 - DNA, 25 bp, Artificial
  probe
  misc_feature (1)..(25): SEQ ID NO: 2546; WAN024GNQ_at; Start 23; Stop 47
catggtcgtccttggtgcggtattt

SEQ ID NO: 252805 - DNA, 25 bp, Artificial
  probe
  misc_feature (1)..(25): SEQ ID NO: 2546; WAN024GNQ_at; Start 196; Stop 220
cacagagctgcaaaactggatacat

SEQ ID NO: 252806 - DNA, 25 bp, Artificial
  probe
  misc_feature (1)..(25): SEQ ID NO: 2546; WAN024GNQ_at; Start 172; Stop 196
ccaacagttgatgccaaggctgtac

SEQ ID NO: 252807 - DNA, 25 bp, Artificial
  probe
  misc_feature (1)..(25): SEQ ID NO: 2546; WAN024GNQ_at; Start 145; Stop 169
gtcgcaactcctatgatatttcctg

SEQ ID NO: 252808 - DNA, 25 bp, Artificial
  probe
  misc_feature (1)..(25): SEQ ID NO: 2546; WAN024GNQ_at; Start 77; Stop 101
tagccattccaaagaaagccgccat

SEQ ID NO: 252809 - DNA, 25 bp, Artificial
  probe
  misc_feature (1)..(25): SEQ ID NO: 2546; WAN024GNQ_at; Start 169; Stop 193
gttccaacagttgatgccaaggctg

SEQ ID NO: 252810 - DNA, 25 bp, Artificial
  probe
  misc_feature (1)..(25): SEQ ID NO: 2546; WAN024GNQ_at; Start 50; Stop 74
tggccaagagtccttccgcatactt

SEQ ID NO: 252811 - DNA, 25 bp, Artificial
  probe
  misc_feature (1)..(25): SEQ ID NO: 2546; WAN024GNQ_at; Start 47; Stop 71
tgatggccaagagtccttccgcata

SEQ ID NO: 252812 - DNA, 25 bp, Artificial
  probe
  misc_feature (1)..(25): SEQ ID NO: 2546; WAN024GNQ_at; Start 142; Stop 166
gccgtcgcaactcctatgatatttc

SEQ ID NO: 252813 - DNA, 25 bp, Artificial
  probe
  misc_feature (1)..(25): SEQ ID NO: 2546; WAN024GNQ_at; Start 64; Stop 88
tccgcatacttggtagccattccaa

SEQ ID NO: 252814 - DNA, 25 bp, Artificial
  probe
  misc_feature (1)..(25): SEQ ID NO: 2546; WAN024GNQ_at; Start 116; Stop 140
gagctcctggtccaccaaccttgat

SEQ ID NO: 252815 - DNA, 25 bp, Artificial
  probe
  misc_feature (1)..(25): SEQ ID NO: 2546; WAN024GNQ_at; Start 185; Stop 209
ccaaggctgtacacagagctgcaaa

SEQ ID NO: 252816 - DNA, 25 bp, Artificial
  probe
  misc_feature (1)..(25): SEQ ID NO: 2546; WAN024GNQ_at; Start 101; Stop 125
tccacatccaaaatagagctcctgg

SEQ ID NO: 252817 - DNA, 25 bp, Artificial
  probe
  misc_feature (1)..(25): SEQ ID NO: 2546; WAN024GNQ_at; Start 154; Stop 178
cctatgatatttcctgttccaacag

SEQ ID NO: 252818 - DNA, 25 bp, Artificial
  probe
  misc_feature (1)..(25): SEQ ID NO: 2546; WAN024GNQ_at; Start 105; Stop 129
catccaaaatagagctcctggtcca

SEQ ID NO: 252819 - DNA, 25 bp, Artificial
  probe
  misc_feature (1)..(25): SEQ ID NO: 2546; WAN024GNQ_at; Start 200; Stop 224
gagctgcaaaactggatacatcacc

SEQ ID NO: 252820 - DNA, 25 bp, Artificial
  probe
  misc_feature (1)..(25): SEQ ID NO: 2546; WAN024GNQ_at; Start 216; Stop 240
tacatcaccatgtcccttatcctgg

SEQ ID NO: 252821 - DNA, 25 bp, Artificial
  probe
  misc_feature (1)..(25): SEQ ID NO: 2546; WAN024GNQ_at; Start 109; Stop 133
caaaatagagctcctggtccaccaa

SEQ ID NO: 252822 - DNA, 25 bp, Artificial
  probe
  misc_feature (1)..(25): SEQ ID NO: 1756; WAN024GNR_at; Start 233; Stop 257
tttctcccatccctagaaggatata

SEQ ID NO: 252823 - DNA, 25 bp, Artificial
  probe
  misc_feature (1)..(25): SEQ ID NO: 1756; WAN024GNR_at; Start 66; Stop 90
tgcaatcgctacaaagacagacaag

SEQ ID NO: 252824 - DNA, 25 bp, Artificial
  probe
  misc_feature (1)..(25): SEQ ID NO: 1756; WAN024GNR_at; Start 96; Stop 120
agctgtgatggctggcgaaatcgtc

SEQ ID NO: 252825 - DNA, 25 bp, Artificial
  probe
  misc_feature (1)..(25): SEQ ID NO: 1756; WAN024GNR_at; Start 205; Stop 229
gcaaacaaaacagcaagtggtcgcc

SEQ ID NO: 252826 - DNA, 25 bp, Artificial
  probe
  misc_feature (1)..(25): SEQ ID NO: 1756; WAN024GNR_at; Start 177; Stop 201
caagagagcaaccaatactcctgct

SEQ ID NO: 252827 - DNA, 25 bp, Artificial
  probe
  misc_feature (1)..(25): SEQ ID NO: 1756; WAN024GNR_at; Start 83; Stop 107
cagacaagacgagagctgtgatggc

SEQ ID NO: 252828 - DNA, 25 bp, Artificial
  probe
  misc_feature (1)..(25): SEQ ID NO: 1756; WAN024GNR_at; Start 50; Stop 74
tgagtccaccaaagactgcaatcgc

SEQ ID NO: 252829 - DNA, 25 bp, Artificial
  probe
  misc_feature (1)..(25): SEQ ID NO: 1756; WAN024GNR_at; Start 229; Stop 253
cacttttctcccatccctagaagga

SEQ ID NO: 252830 - DNA, 25 bp, Artificial
  probe
  misc_feature (1)..(25): SEQ ID NO: 1756; WAN024GNR_at; Start 152; Stop 176
tgacttgggtgaaggttccgattcc

SEQ ID NO: 252831 - DNA, 25 bp, Artificial
  probe
  misc_feature (1)..(25): SEQ ID NO: 1756; WAN024GNR_at; Start 44; Stop 68
tagacttgagtccaccaaagactgc

SEQ ID NO: 252832 - DNA, 25 bp, Artificial
  probe
  misc_feature (1)..(25): SEQ ID NO: 1756; WAN024GNR_at; Start 31; Stop 55
gaaaccttagaaatagacttgagtc

SEQ ID NO: 252833 - DNA, 25 bp, Artificial
  probe
  misc_feature (1)..(25): SEQ ID NO: 1756; WAN024GNR_at; Start 161; Stop 185
tgaaggttccgattcccaagagagc

SEQ ID NO: 252834 - DNA, 25 bp, Artificial
  probe
  misc_feature (1)..(25): SEQ ID NO: 1756; WAN024GNR_at; Start 5; Stop 29
tggccataaaaggaacaacagtagt

SEQ ID NO: 252835 - DNA, 25 bp, Artificial
  probe
  misc_feature (1)..(25): SEQ ID NO: 1756; WAN024GNR_at; Start 208; Stop 232
aacaaaacagcaagtggtcgccact

SEQ ID NO: 252836 - DNA, 25 bp, Artificial
  probe
  misc_feature (1)..(25): SEQ ID NO: 1756; WAN024GNR_at; Start 166; Stop 190
gttccgattcccaagagagcaacca

SEQ ID NO: 252837 - DNA, 25 bp, Artificial
  probe
  misc_feature (1)..(25): SEQ ID NO: 1756; WAN024GNR_at; Start 17; Stop 41
gaacaacagtagttgaaaccttaga

SEQ ID NO: 252838 - DNA, 25 bp, Artificial
  probe
  misc_feature (1)..(25): SEQ ID NO: 1756; WAN024GNR_at; Start 8; Stop 32
ccataaaaggaacaacagtagttga

SEQ ID NO: 252839 - DNA, 25 bp, Artificial
  probe
  misc_feature (1)..(25): SEQ ID NO: 1756; WAN024GNR_at; Start 171; Stop 195
gattcccaagagagcaaccaatact

SEQ ID NO: 252840 - DNA, 25 bp, Artificial
  probe
  misc_feature (1)..(25): SEQ ID NO: 1756; WAN024GNR_at; Start 35; Stop 59
ccttagaaatagacttgagtccacc

SEQ ID NO: 252841 - DNA, 25 bp, Artificial
  probe
  misc_feature (1)..(25): SEQ ID NO: 1756; WAN024GNR_at; Start 217; Stop 241
gcaagtggtcgccacttttctccca

SEQ ID NO: 252842 - DNA, 25 bp, Artificial
  probe
  misc_feature (1)..(25): SEQ ID NO: 1756; WAN024GNR_at; Start 75; Stop 99
tacaaagacagacaagacgagagct

SEQ ID NO: 252843 - DNA, 25 bp, Artificial
  probe
  misc_feature (1)..(25): SEQ ID NO: 1756; WAN024GNR_at; Start 192; Stop 216
tactcctgctactgcaaacaaaaca

SEQ ID NO: 252844 - DNA, 25 bp, Artificial
  probe
  misc_feature (1)..(25): SEQ ID NO: 1756; WAN024GNR_at; Start 105; Stop 129
ggctggcgaaatcgtcgttgtattt

SEQ ID NO: 252845 - DNA, 25 bp, Artificial
  probe
  misc_feature (1)..(25): SEQ ID NO: 1756; WAN024GNR_at; Start 102; Stop 126
gatggctggcgaaatcgtcgttgta

SEQ ID NO: 252846 - DNA, 25 bp, Artificial
  probe
  misc_feature (1)..(25): SEQ ID NO: 1756; WAN024GNR_at; Start 163; Stop 187
aaggttccgattcccaagagagcaa

SEQ ID NO: 252847 - DNA, 25 bp, Artificial
  probe
  misc_feature (1)..(25): SEQ ID NO: 1756; WAN024GNR_at; Start 112; Stop 136
gaaatcgtcgttgtattttggatag

SEQ ID NO: 252848 - DNA, 25 bp, Artificial
  probe
  misc_feature (1)..(25): SEQ ID NO: 1756; WAN024GNR_at; Start 199; Stop 223
gctactgcaaacaaaacagcaagtg

SEQ ID NO: 252849 - DNA, 25 bp, Artificial
  probe
  misc_feature (1)..(25): SEQ ID NO: 1756; WAN024GNR_at; Start 185; Stop 209
caaccaatactcctgctactgcaaa

SEQ ID NO: 252850 - DNA, 25 bp, Artificial
  probe
  misc_feature (1)..(25): SEQ ID NO: 1756; WAN024GNR_at; Start 59; Stop 83
caaagactgcaatcgctacaaagac

SEQ ID NO: 252851 - DNA, 25 bp, Artificial
  probe
  misc_feature (1)..(25): SEQ ID NO: 1756; WAN024GNR_at; Start 146; Stop 170
tcgagttgacttgggtgaaggttcc

SEQ ID NO: 252852 - DNA, 25 bp, Artificial
  probe
  misc_feature (1)..(25): SEQ ID NO: 1756; WAN024GNR_at; Start 2; Stop 26
tgatggccataaaaggaacaacagt

SEQ ID NO: 252853 - DNA, 25 bp, Artificial
  probe
  misc_feature (1)..(25): SEQ ID NO: 1756; WAN024GNR_at; Start 54; Stop 78
tccaccaaagactgcaatcgctaca

SEQ ID NO: 252854 - DNA, 25 bp, Artificial
  probe
  misc_feature (1)..(25): SEQ ID NO: 1756; WAN024GNR_at; Start 117; Stop 141
cgtcgttgtattttggatagattct

SEQ ID NO: 252855 - DNA, 25 bp, Artificial
  probe
  misc_feature (1)..(25): SEQ ID NO: 1756; WAN024GNR_at; Start 69; Stop 93
aatcgctacaaagacagacaagacg

SEQ ID NO: 252856 - DNA, 25 bp, Artificial
  probe
  misc_feature (1)..(25): SEQ ID NO: 3009; WAN024GNS_at; Start 927; Stop 951
catttgtactctaactggtttgacc

SEQ ID NO: 252857 - DNA, 25 bp, Artificial
  probe
  misc_feature (1)..(25): SEQ ID NO: 3009; WAN024GNS_at; Start 852; Stop 876
tgcagctgccaagacaaatgaacca

SEQ ID NO: 252858 - DNA, 25 bp, Artificial
  probe
  misc_feature (1)..(25): SEQ ID NO: 3009; WAN024GNS_at; Start 142; Stop 166
tttatccaggataagggacatggtg

SEQ ID NO: 252859 - DNA, 25 bp, Artificial
  probe
  misc_feature (1)..(25): SEQ ID NO: 3009; WAN024GNS_at; Start 783; Stop 807
tattcaaaatggtgtggcgcgtggt

SEQ ID NO: 252860 - DNA, 25 bp, Artificial
  probe
  misc_feature (1)..(25): SEQ ID NO: 3009; WAN024GNS_at; Start 91; Stop 115
cggctaggactcttgcaggttttgc

SEQ ID NO: 252861 - DNA, 25 bp, Artificial
  probe
  misc_feature (1)..(25): SEQ ID NO: 3009; WAN024GNS_at; Start 1072; Stop 1096
gcctttacaacgattctaggttgga

SEQ ID NO: 252862 - DNA, 25 bp, Artificial
  probe
  misc_feature (1)..(25): SEQ ID NO: 3009; WAN024GNS_at; Start 288; Stop 312
ggcggctttctttggaatggctacc

SEQ ID NO: 252863 - DNA, 25 bp, Artificial
  probe
  misc_feature (1)..(25): SEQ ID NO: 3009; WAN024GNS_at; Start 478; Stop 502
ggaaccttcacccaagtcaactcga

SEQ ID NO: 252864 - DNA, 25 bp, Artificial
  probe
  misc_feature (1)..(25): SEQ ID NO: 3009; WAN024GNS_at; Start 815; Stop 839
caaacgaatctggtctgggttctgc

SEQ ID NO: 252865 - DNA, 25 bp, Artificial
  probe
  misc_feature (1)..(25): SEQ ID NO: 3009; WAN024GNS_at; Start 688; Stop 712
ggaaaaatccctggcacaatcgctt

SEQ ID NO: 252866 - DNA, 25 bp, Artificial
  probe
  misc_feature (1)..(25): SEQ ID NO: 3009; WAN024GNS_at; Start 732; Stop 756
tagtccccttgctgcggtaggtgga

SEQ ID NO: 252867 - DNA, 25 bp, Artificial
  probe
  misc_feature (1)..(25): SEQ ID NO: 3009; WAN024GNS_at; Start 51; Stop 75
cttgattttattggtcggaacaggg

SEQ ID NO: 252868 - DNA, 25 bp, Artificial
  probe
  misc_feature (1)..(25): SEQ ID NO: 3009; WAN024GNS_at; Start 1139; Stop 1163
gctttatctggctctaccgtgtggt

SEQ ID NO: 252869 - DNA, 25 bp, Artificial
  probe
  misc_feature (1)..(25): SEQ ID NO: 3009; WAN024GNS_at; Start 463; Stop 487
gctctcttgggaatcggaaccttca

SEQ ID NO: 252870 - DNA, 25 bp, Artificial
  probe
  misc_feature (1)..(25): SEQ ID NO: 3009; WAN024GNS_at; Start 574; Stop 598
gcgattgcagtctttggtggactca

SEQ ID NO: 252871 - DNA, 25 bp, Artificial
  probe
  misc_feature (1)..(25): SEQ ID NO: 3009; WAN024GNS_at; Start 302; Stop 326
gaatggctaccaagtatgcggaagg

SEQ ID NO: 252872 - DNA, 25 bp, Artificial
  probe
  misc_feature (1)..(25): SEQ ID NO: 3009; WAN024GNS_at; Start 405; Stop 429
gatgggagaaaagtggcgaccactt

SEQ ID NO: 252873 - DNA, 25 bp, Artificial
  probe
  misc_feature (1)..(25): SEQ ID NO: 3009; WAN024GNS_at; Start 350; Stop 374
ccaaggacgaccatggtgcagtagc

SEQ ID NO: 252874 - DNA, 25 bp, Artificial
  probe
  misc_feature (1)..(25): SEQ ID NO: 3009; WAN024GNS_at; Start 882; Stop 906
gcaaggtttgatttccatgacagga

SEQ ID NO: 252875 - DNA, 25 bp, Artificial
  probe
  misc_feature (1)..(25): SEQ ID NO: 3009; WAN024GNS_at; Start 766; Stop 790
gctagcgttcggatggctattcaaa

SEQ ID NO: 252876 - DNA, 25 bp, Artificial
  probe
  misc_feature (1)..(25): SEQ ID NO: 3009; WAN024GNS_at; Start 269; Stop 293
ctctattttggatgtggatggcggc

SEQ ID NO: 252877 - DNA, 25 bp, Artificial
  probe
  misc_feature (1)..(25): SEQ ID NO: 3009; WAN024GNS_at; Start 332; Stop 356
tggccatcaaataccgcaccaagga

SEQ ID NO: 252878 - DNA, 25 bp, Artificial
  probe
  misc_feature (1)..(25): SEQ ID NO: 3009; WAN024GNS_at; Start 522; Stop 546
tacaacgacgatttcgccagccatc

SEQ ID NO: 252879 - DNA, 25 bp, Artificial
  probe
  misc_feature (1)..(25): SEQ ID NO: 3009; WAN024GNS_at; Start 899; Stop 923
tgacaggaacctttattgataccct

SEQ ID NO: 252880 - DNA, 25 bp, Artificial
  probe
  misc_feature (1)..(25): SEQ ID NO: 3009; WAN024GNS_at; Start 947; Stop 971
tgaccatcttggtaactggagtttg

SEQ ID NO: 252881 - DNA, 25 bp, Artificial
  probe
  misc_feature (1)..(25): SEQ ID NO: 3009; WAN024GNS_at; Start 221; Stop 245
gaaatatcataggagttgcgacggc

SEQ ID NO: 252882 - DNA, 25 bp, Artificial
  probe
  misc_feature (1)..(25): SEQ ID NO: 3009; WAN024GNS_at; Start 174; Stop 198
cagttttgcagctctgtgtacagcc

SEQ ID NO: 252883 - DNA, 25 bp, Artificial
  probe
  misc_feature (1)..(25): SEQ ID NO: 3009; WAN024GNS_at; Start 248; Stop 272
tcaaggttggtggaccaggagctct

SEQ ID NO: 252884 - DNA, 25 bp, Artificial
  probe
  misc_feature (1)..(25): SEQ ID NO: 3009; WAN024GNS_at; Start 1280; Stop 1304
cgccagtcgttattgctgaaactaa

SEQ ID NO: 252885 - DNA, 25 bp, Artificial
  probe
  misc_feature (1)..(25): SEQ ID NO: 3009; WAN024GNS_at; Start 1091; Stop 1115
gttggaactattacggagaacgctg

SEQ ID NO: 252886 - DNA, 25 bp, Artificial
  probe
  misc_feature (1)..(25): SEQ ID NO: 3009; WAN024GNS_at; Start 1218; Stop 1242
tatcgcagatatcgttaacgccttg

SEQ ID NO: 252887 - DNA, 25 bp, Artificial
  probe
  misc_feature (1)..(25): SEQ ID NO: 3009; WAN024GNS_at; Start 798; Stop 822
ggcgcgtggtgtgttctcaaacgaa

SEQ ID NO: 252888 - DNA, 25 bp, Artificial
  probe
  misc_feature (1)..(25): SEQ ID NO: 3009; WAN024GNS_at; Start 194; Stop 218
cagccttggcatcaactgttggaac

SEQ ID NO: 252889 - DNA, 25 bp, Artificial
  probe
  misc_feature (1)..(25): SEQ ID NO: 3009; WAN024GNS_at; Start 316; Stop 340
tatgcggaaggactcttggccatca

SEQ ID NO: 252890 - DNA, 25 bp, Artificial
  probe
  misc_feature (1)..(25): SEQ ID NO: 6856; WAN024GNT_at; Start 168; Stop 192
gatttcttcaaaaataccaacacga

SEQ ID NO: 252891 - DNA, 25 bp, Artificial
  probe
  misc_feature (1)..(25): SEQ ID NO: 6856; WAN024GNT_at; Start 153; Stop 177
tccaatatcagcaaagatttcttca

SEQ ID NO: 252892 - DNA, 25 bp, Artificial
  probe
  misc_feature (1)..(25): SEQ ID NO: 6856; WAN024GNT_at; Start 215; Stop 239
gcaatcctgactgggccatgacctg

SEQ ID NO: 252893 - DNA, 25 bp, Artificial
  probe
  misc_feature (1)..(25): SEQ ID NO: 6856; WAN024GNT_at; Start 146; Stop 170
gctcatctccaatatcagcaaagat

SEQ ID NO: 252894 - DNA, 25 bp, Artificial
  probe
  misc_feature (1)..(25): SEQ ID NO: 6856; WAN024GNT_at; Start 89; Stop 113
tatccacgatattggtcatatggct

SEQ ID NO: 252895 - DNA, 25 bp, Artificial
  probe
  misc_feature (1)..(25): SEQ ID NO: 6856; WAN024GNT_at; Start 200; Stop 224
tgtctgctaaaatcggcaatcctga

SEQ ID NO: 252896 - DNA, 25 bp, Artificial
  probe
  misc_feature (1)..(25): SEQ ID NO: 6856; WAN024GNT_at; Start 75; Stop 99
gaccttaccaagaatatccacgata

SEQ ID NO: 252897 - DNA, 25 bp, Artificial
  probe
  misc_feature (1)..(25): SEQ ID NO: 6856; WAN024GNT_at; Start 186; Stop 210
aacacgacttcccttgtctgctaaa

SEQ ID NO: 252898 - DNA, 25 bp, Artificial
  probe
  misc_feature (1)..(25): SEQ ID NO: 6856; WAN024GNT_at; Start 293; Stop 317
taatgacaatagctgttaaatcttg

SEQ ID NO: 252899 - DNA, 25 bp, Artificial
  probe
  misc_feature (1)..(25): SEQ ID NO: 6856; WAN024GNT_at; Start 207; Stop 231
taaaatcggcaatcctgactgggcc

SEQ ID NO: 252900 - DNA, 25 bp, Artificial
  probe
  misc_feature (1)..(25): SEQ ID NO: 6856; WAN024GNT_at; Start 256; Stop 280
ttgagcatgatggtcttcccacctg

SEQ ID NO: 252901 - DNA, 25 bp, Artificial
  probe
  misc_feature (1)..(25): SEQ ID NO: 6856; WAN024GNT_at; Start 234; Stop 258
gacctgtgtcaagcccagagttttg

SEQ ID NO: 252902 - DNA, 25 bp, Artificial
  probe
  misc_feature (1)..(25): SEQ ID NO: 6856; WAN024GNT_at; Start 122; Stop 146
tagacaagctctgctcaatagactg

SEQ ID NO: 252903 - DNA, 25 bp, Artificial
  probe
  misc_feature (1)..(25): SEQ ID NO: 6856; WAN024GNT_at; Start 283; Stop 307
ttgggacctgtaatgacaatagctg

SEQ ID NO: 252904 - DNA, 25 bp, Artificial
  probe
  misc_feature (1)..(25): SEQ ID NO: 6856; WAN024GNT_at; Start 172; Stop 196
tcttcaaaaataccaacacgacttc

SEQ ID NO: 252905 - DNA, 25 bp, Artificial
  probe
  misc_feature (1)..(25): SEQ ID NO: 6856; WAN024GNT_at; Start 126; Stop 150
caagctctgctcaatagactgctca

SEQ ID NO: 252906 - DNA, 25 bp, Artificial
  probe
  misc_feature (1)..(25): SEQ ID NO: 6856; WAN024GNT_at; Start 47; Stop 71
catccaaaagtaagagtgaatgttg

SEQ ID NO: 252907 - DNA, 25 bp, Artificial
  probe
  misc_feature (1)..(25): SEQ ID NO: 6856; WAN024GNT_at; Start 240; Stop 264
tgtcaagcccagagttttgagcatg

SEQ ID NO: 252908 - DNA, 25 bp, Artificial
  probe
  misc_feature (1)..(25): SEQ ID NO: 6856; WAN024GNT_at; Start 192; Stop 216
acttcccttgtctgctaaaatcggc

SEQ ID NO: 252909 - DNA, 25 bp, Artificial
  probe
  misc_feature (1)..(25): SEQ ID NO: 6856; WAN024GNT_at; Start 64; Stop 88
gaatgttggttgaccttaccaagaa

SEQ ID NO: 252910 - DNA, 25 bp, Artificial
  probe
  misc_feature (1)..(25): SEQ ID NO: 6856; WAN024GNT_at; Start 54; Stop 78
aagtaagagtgaatgttggttgacc

SEQ ID NO: 252911 - DNA, 25 bp, Artificial
  probe
  misc_feature (1)..(25): SEQ ID NO: 6856; WAN024GNT_at; Start 15; Stop 39
tccctcttggggatcagtaccagcc

SEQ ID NO: 252912 - DNA, 25 bp, Artificial
  probe
  misc_feature (1)..(25): SEQ ID NO: 6856; WAN024GNT_at; Start 40; Stop 64
cccaactcatccaaaagtaagagtg

SEQ ID NO: 252913 - DNA, 25 bp, Artificial
  probe
  misc_feature (1)..(25): SEQ ID NO: 6856; WAN024GNT_at; Start 275; Stop 299
cacctgtattgggacctgtaatgac

SEQ ID NO: 252914 - DNA, 25 bp, Artificial
  probe
  misc_feature (1)..(25): SEQ ID NO: 6856; WAN024GNT_at; Start 107; Stop 131
tatggctagagaaggtagacaagct

SEQ ID NO: 252915 - DNA, 25 bp, Artificial
  probe
  misc_feature (1)..(25): SEQ ID NO: 6856; WAN024GNT_at; Start 95; Stop 119
cgatattggtcatatggctagagaa

SEQ ID NO: 252916 - DNA, 25 bp, Artificial
  probe
  misc_feature (1)..(25): SEQ ID NO: 6856; WAN024GNT_at; Start 228; Stop 252
ggccatgacctgtgtcaagcccaga

SEQ ID NO: 252917 - DNA, 25 bp, Artificial
  probe
  misc_feature (1)..(25): SEQ ID NO: 6856; WAN024GNT_at; Start 71; Stop 95
ggttgaccttaccaagaatatccac

SEQ ID NO: 252918 - DNA, 25 bp, Artificial
  probe
  misc_feature (1)..(25): SEQ ID NO: 6856; WAN024GNT_at; Start 134; Stop 158
gctcaatagactgctcatctccaat

SEQ ID NO: 252919 - DNA, 25 bp, Artificial
  probe
  misc_feature (1)..(25): SEQ ID NO: 6856; WAN024GNT_at; Start 1; Stop 25
atggcaagggctgctccctcttggg

SEQ ID NO: 252920 - DNA, 25 bp, Artificial
  probe
  misc_feature (1)..(25): SEQ ID NO: 6856; WAN024GNT_at; Start 247; Stop 271
cccagagttttgagcatgatggtct

SEQ ID NO: 252921 - DNA, 25 bp, Artificial
  probe
  misc_feature (1)..(25): SEQ ID NO: 6856; WAN024GNT_at; Start 115; Stop 139
gagaaggtagacaagctctgctcaa

SEQ ID NO: 252922 - DNA, 25 bp, Artificial
  probe
  misc_feature (1)..(25): SEQ ID NO: 6856; WAN024GNT_at; Start 263; Stop 287
tgatggtcttcccacctgtattggg

SEQ ID NO: 252923 - DNA, 25 bp, Artificial
  probe
  misc_feature (1)..(25): SEQ ID NO: 6856; WAN024GNT_at; Start 222; Stop 246
tgactgggccatgacctgtgtcaag

SEQ ID NO: 252924 - DNA, 25 bp, Artificial
  probe
  misc_feature (1)..(25): SEQ ID NO: 5135; WAN024GNU_at; Start 269; Stop 293
tcaggagccaattttttcaacttgg

SEQ ID NO: 252925 - DNA, 25 bp, Artificial
  probe
  misc_feature (1)..(25): SEQ ID NO: 5135; WAN024GNU_at; Start 81; Stop 105
gatcaaactctttctcttccaaggt

SEQ ID NO: 252926 - DNA, 25 bp, Artificial
  probe
  misc_feature (1)..(25): SEQ ID NO: 5135; WAN024GNU_at; Start 32; Stop 56
acattgacctgtttcttcttgactg

SEQ ID NO: 252927 - DNA, 25 bp, Artificial
  probe
  misc_feature (1)..(25): SEQ ID NO: 5135; WAN024GNU_at; Start 162; Stop 186
aggtaccacgctgaccataactgag

SEQ ID NO: 252928 - DNA, 25 bp, Artificial
  probe
  misc_feature (1)..(25): SEQ ID NO: 5135; WAN024GNU_at; Start 256; Stop 280
caagtccactttttcaggagccaat

SEQ ID NO: 252929 - DNA, 25 bp, Artificial
  probe
  misc_feature (1)..(25): SEQ ID NO: 5135; WAN024GNU_at; Start 103; Stop 127
ggtcatcttaatcaagccaacttgg

SEQ ID NO: 252930 - DNA, 25 bp, Artificial
  probe
  misc_feature (1)..(25): SEQ ID NO: 5135; WAN024GNU_at; Start 147; Stop 171
tgagttgactggtcaaggtaccacg

SEQ ID NO: 252931 - DNA, 25 bp, Artificial
  probe
  misc_feature (1)..(25): SEQ ID NO: 5135; WAN024GNU_at; Start 20; Stop 44
gttcgtttcacaacattgacctgtt

SEQ ID NO: 252932 - DNA, 25 bp, Artificial
  probe
  misc_feature (1)..(25): SEQ ID NO: 5135; WAN024GNU_at; Start 85; Stop 109
aaactctttctcttccaaggtcatc

SEQ ID NO: 252933 - DNA, 25 bp, Artificial
  probe
  misc_feature (1)..(25): SEQ ID NO: 5135; WAN024GNU_at; Start 328; Stop 352
ggatttactgtggagatttttgaga

SEQ ID NO: 252934 - DNA, 25 bp, Artificial
  probe
  misc_feature (1)..(25): SEQ ID NO: 5135; WAN024GNU_at; Start 179; Stop 203
taactgagaaccacgatatcatctc

SEQ ID NO: 252935 - DNA, 25 bp, Artificial
  probe
  misc_feature (1)..(25): SEQ ID NO: 5135; WAN024GNU_at; Start 289; Stop 313
cttggccttggcttcaatgatttcg

SEQ ID NO: 252936 - DNA, 25 bp, Artificial
  probe
  misc_feature (1)..(25): SEQ ID NO: 5135; WAN024GNU_at; Start 205; Stop 229
cacctttggagctcgttttttcttg

SEQ ID NO: 252937 - DNA, 25 bp, Artificial
  probe
  misc_feature (1)..(25): SEQ ID NO: 5135; WAN024GNU_at; Start 277; Stop 301
caattttttcaacttggccttggct

SEQ ID NO: 252938 - DNA, 25 bp, Artificial
  probe
  misc_feature (1)..(25): SEQ ID NO: 5135; WAN024GNU_at; Start 95; Stop 119
tcttccaaggtcatcttaatcaagc

SEQ ID NO: 252939 - DNA, 25 bp, Artificial
  probe
  misc_feature (1)..(25): SEQ ID NO: 5135; WAN024GNU_at; Start 174; Stop 198
gaccataactgagaaccacgatatc

SEQ ID NO: 252940 - DNA, 25 bp, Artificial
  probe
  misc_feature (1)..(25): SEQ ID NO: 5135; WAN024GNU_at; Start 17; Stop 41
gaagttcgtttcacaacattgacct

SEQ ID NO: 252941 - DNA, 25 bp, Artificial
  probe
  misc_feature (1)..(25): SEQ ID NO: 5135; WAN024GNU_at; Start 112; Stop 136
aatcaagccaacttgggcttcccag

SEQ ID NO: 252942 - DNA, 25 bp, Artificial
  probe
  misc_feature (1)..(25): SEQ ID NO: 5135; WAN024GNU_at; Start 152; Stop 176
tgactggtcaaggtaccacgctgac

SEQ ID NO: 252943 - DNA, 25 bp, Artificial
  probe
  misc_feature (1)..(25): SEQ ID NO: 5135; WAN024GNU_at; Start 338; Stop 362
tggagatttttgagaatctggtcac

SEQ ID NO: 252944 - DNA, 25 bp, Artificial
  probe
  misc_feature (1)..(25): SEQ ID NO: 5135; WAN024GNU_at; Start 10; Stop 34
tcgcccagaagttcgtttcacaaca

SEQ ID NO: 252945 - DNA, 25 bp, Artificial
  probe
  misc_feature (1)..(25): SEQ ID NO: 5135; WAN024GNU_at; Start 171; Stop 195
gctgaccataactgagaaccacgat

SEQ ID NO: 252946 - DNA, 25 bp, Artificial
  probe
  misc_feature (1)..(25): SEQ ID NO: 5135; WAN024GNU_at; Start 165; Stop 189
taccacgctgaccataactgagaac

SEQ ID NO: 252947 - DNA, 25 bp, Artificial
  probe
  misc_feature (1)..(25): SEQ ID NO: 5135; WAN024GNU_at; Start 140; Stop 164
ccgtccttgagttgactggtcaagg

SEQ ID NO: 252948 - DNA, 25 bp, Artificial
  probe
  misc_feature (1)..(25): SEQ ID NO: 5135; WAN024GNU_at; Start 195; Stop 219
tatcatctcccacctttggagctcg

SEQ ID NO: 252949 - DNA, 25 bp, Artificial
  probe
  misc_feature (1)..(25): SEQ ID NO: 5135; WAN024GNU_at; Start 280; Stop 304
ttttttcaacttggccttggcttca

SEQ ID NO: 252950 - DNA, 25 bp, Artificial
  probe
  misc_feature (1)..(25): SEQ ID NO: 5135; WAN024GNU_at; Start 293; Stop 317
gccttggcttcaatgatttcgtggg

SEQ ID NO: 252951 - DNA, 25 bp, Artificial
  probe
  misc_feature (1)..(25): SEQ ID NO: 5135; WAN024GNU_at; Start 319; Stop 343
cttgagttgggatttactgtggaga

SEQ ID NO: 252952 - DNA, 25 bp, Artificial
  probe
  misc_feature (1)..(25): SEQ ID NO: 5135; WAN024GNU_at; Start 106; Stop 130
catcttaatcaagccaacttgggct

SEQ ID NO: 252953 - DNA, 25 bp, Artificial
  probe
  misc_feature (1)..(25): SEQ ID NO: 5135; WAN024GNU_at; Start 252; Stop 276
tagacaagtccactttttcaggagc

SEQ ID NO: 252954 - DNA, 25 bp, Artificial
  probe
  misc_feature (1)..(25): SEQ ID NO: 5135; WAN024GNU_at; Start 348; Stop 372
tgagaatctggtcactttcacttag

SEQ ID NO: 252955 - DNA, 25 bp, Artificial
  probe
  misc_feature (1)..(25): SEQ ID NO: 5135; WAN024GNU_at; Start 5; Stop 29
ggtcctcgcccagaagttcgtttca

SEQ ID NO: 252956 - DNA, 25 bp, Artificial
  probe
  misc_feature (1)..(25): SEQ ID NO: 5135; WAN024GNU_at; Start 183; Stop 207
tgagaaccacgatatcatctcccac

SEQ ID NO: 252957 - DNA, 25 bp, Artificial
  probe
  misc_feature (1)..(25): SEQ ID NO: 5135; WAN024GNU_at; Start 190; Stop 214
cacgatatcatctcccacctttgga

SEQ ID NO: 252958 - DNA, 25 bp, Artificial
  probe
  misc_feature (1)..(25): SEQ ID NO: 1410; WAN024GNV_at; Start 120; Stop 144
cttcgctcagtttgactacctcacg

SEQ ID NO: 252959 - DNA, 25 bp, Artificial
  probe
  misc_feature (1)..(25): SEQ ID NO: 1410; WAN024GNV_at; Start 78; Stop 102
gaagcatttcatagcgctcatctgc

SEQ ID NO: 252960 - DNA, 25 bp, Artificial
  probe
  misc_feature (1)..(25): SEQ ID NO: 1410; WAN024GNV_at; Start 44; Stop 68
gggcggacacgctcagaaatttctt

SEQ ID NO: 252961 - DNA, 25 bp, Artificial
  probe
  misc_feature (1)..(25): SEQ ID NO: 1410; WAN024GNV_at; Start 75; Stop 99
tgcgaagcatttcatagcgctcatc

SEQ ID NO: 252962 - DNA, 25 bp, Artificial
  probe
  misc_feature (1)..(25): SEQ ID NO: 1410; WAN024GNV_at; Start 27; Stop 51
caatctcagccgcatgagggcggac

SEQ ID NO: 252963 - DNA, 25 bp, Artificial
  probe
  misc_feature (1)..(25): SEQ ID NO: 1410; WAN024GNV_at; Start 23; Stop 47
ttagcaatctcagccgcatgagggc

SEQ ID NO: 252964 - DNA, 25 bp, Artificial
  probe
  misc_feature (1)..(25): SEQ ID NO: 1410; WAN024GNV_at; Start 201; Stop 225
tcttattgcggtaggtgtttttgac

SEQ ID NO: 252965 - DNA, 25 bp, Artificial
  probe
  misc_feature (1)..(25): SEQ ID NO: 1410; WAN024GNV_at; Start 190; Stop 214
gacacctgcaatcttattgcggtag

SEQ ID NO: 252966 - DNA, 25 bp, Artificial
  probe
  misc_feature (1)..(25): SEQ ID NO: 1410; WAN024GNV_at; Start 72; Stop 96
gaatgcgaagcatttcatagcgctc

SEQ ID NO: 252967 - DNA, 25 bp, Artificial
  probe
  misc_feature (1)..(25): SEQ ID NO: 1410; WAN024GNV_at; Start 194; Stop 218
cctgcaatcttattgcggtaggtgt

SEQ ID NO: 252968 - DNA, 25 bp, Artificial
  probe
  misc_feature (1)..(25): SEQ ID NO: 1410; WAN024GNV_at; Start 54; Stop 78
gctcagaaatttcttggagaatgcg

SEQ ID NO: 252969 - DNA, 25 bp, Artificial
  probe
  misc_feature (1)..(25): SEQ ID NO: 1410; WAN024GNV_at; Start 115; Stop 139
aatttcttcgctcagtttgactacc

SEQ ID NO: 252970 - DNA, 25 bp, Artificial
  probe
  misc_feature (1)..(25): SEQ ID NO: 1410; WAN024GNV_at; Start 49; Stop 73
gacacgctcagaaatttcttggaga

SEQ ID NO: 252971 - DNA, 25 bp, Artificial
  probe
  misc_feature (1)..(25): SEQ ID NO: 1410; WAN024GNV_at; Start 186; Stop 210
gaacgacacctgcaatcttattgcg

SEQ ID NO: 252972 - DNA, 25 bp, Artificial
  probe
  misc_feature (1)..(25): SEQ ID NO: 1410; WAN024GNV_at; Start 146; Stop 170
ggttcgatatagacggtgtttccac

SEQ ID NO: 252973 - DNA, 25 bp, Artificial
  probe
  misc_feature (1)..(25): SEQ ID NO: 1410; WAN024GNV_at; Start 155; Stop 179
tagacggtgtttccactagcagaaa

SEQ ID NO: 252974 - DNA, 25 bp, Artificial
  probe
  misc_feature (1)..(25): SEQ ID NO: 1410; WAN024GNV_at; Start 171; Stop 195
tagcagaaatatcatgaacgacacc

SEQ ID NO: 252975 - DNA, 25 bp, Artificial
  probe
  misc_feature (1)..(25): SEQ ID NO: 1410; WAN024GNV_at; Start 84; Stop 108
tttcatagcgctcatctgctcgcag

SEQ ID NO: 252976 - DNA, 25 bp, Artificial
  probe
  misc_feature (1)..(25): SEQ ID NO: 1410; WAN024GNV_at; Start 46; Stop 70
gcggacacgctcagaaatttcttgg

SEQ ID NO: 252977 - DNA, 25 bp, Artificial
  probe
  misc_feature (1)..(25): SEQ ID NO: 1410; WAN024GNV_at; Start 157; Stop 181
gacggtgtttccactagcagaaata

SEQ ID NO: 252978 - DNA, 25 bp, Artificial
  probe
  misc_feature (1)..(25): SEQ ID NO: 1410; WAN024GNV_at; Start 111; Stop 135
tagcaatttcttcgctcagtttgac

SEQ ID NO: 252979 - DNA, 25 bp, Artificial
  probe
  misc_feature (1)..(25): SEQ ID NO: 1410; WAN024GNV_at; Start 89; Stop 113
tagcgctcatctgctcgcagactag

SEQ ID NO: 252980 - DNA, 25 bp, Artificial
  probe
  misc_feature (1)..(25): SEQ ID NO: 1410; WAN024GNV_at; Start 180; Stop 204
tatcatgaacgacacctgcaatctt

SEQ ID NO: 252981 - DNA, 25 bp, Artificial
  probe
  misc_feature (1)..(25): SEQ ID NO: 1410; WAN024GNV_at; Start 100; Stop 124
tgctcgcagactagcaatttcttcg

SEQ ID NO: 252982 - DNA, 25 bp, Artificial
  probe
  misc_feature (1)..(25): SEQ ID NO: 1410; WAN024GNV_at; Start 176; Stop 200
gaaatatcatgaacgacacctgcaa

SEQ ID NO: 252983 - DNA, 25 bp, Artificial
  probe
  misc_feature (1)..(25): SEQ ID NO: 1410; WAN024GNV_at; Start 166; Stop 190
tccactagcagaaatatcatgaacg

SEQ ID NO: 252984 - DNA, 25 bp, Artificial
  probe
  misc_feature (1)..(25): SEQ ID NO: 1410; WAN024GNV_at; Start 39; Stop 63
catgagggcggacacgctcagaaat

SEQ ID NO: 252985 - DNA, 25 bp, Artificial
  probe
  misc_feature (1)..(25): SEQ ID NO: 1410; WAN024GNV_at; Start 59; Stop 83
gaaatttcttggagaatgcgaagca

SEQ ID NO: 252986 - DNA, 25 bp, Artificial
  probe
  misc_feature (1)..(25): SEQ ID NO: 1410; WAN024GNV_at; Start 151; Stop 175
gatatagacggtgtttccactagca

SEQ ID NO: 252987 - DNA, 25 bp, Artificial
  probe
  misc_feature (1)..(25): SEQ ID NO: 1410; WAN024GNV_at; Start 20; Stop 44
tcattagcaatctcagccgcatgag

SEQ ID NO: 252988 - DNA, 25 bp, Artificial
  probe
  misc_feature (1)..(25): SEQ ID NO: 1410; WAN024GNV_at; Start 32; Stop 56
tcagccgcatgagggcggacacgct

SEQ ID NO: 252989 - DNA, 25 bp, Artificial
  probe
  misc_feature (1)..(25): SEQ ID NO: 1410; WAN024GNV_at; Start 207; Stop 231
tgcggtaggtgtttttgactggtaa

SEQ ID NO: 252990 - DNA, 25 bp, Artificial
  probe
  misc_feature (1)..(25): SEQ ID NO: 1410; WAN024GNV_at; Start 105; Stop 129
gcagactagcaatttcttcgctcag

SEQ ID NO: 252991 - DNA, 25 bp, Artificial
  probe
  misc_feature (1)..(25): SEQ ID NO: 1410; WAN024GNV_at; Start 160; Stop 184
ggtgtttccactagcagaaatatca

SEQ ID NO: 252992 - DNA, 25 bp, Artificial
  probe
  misc_feature (1)..(25): SEQ ID NO: 1184; WAN024GNW_at; Start 990; Stop 1014
tacaggtgggaagaccatcatgctc

SEQ ID NO: 252993 - DNA, 25 bp, Artificial
  probe
  misc_feature (1)..(25): SEQ ID NO: 1184; WAN024GNW_at; Start 1342; Stop 1366
gcctacggtattgagacagcctttg

SEQ ID NO: 252994 - DNA, 25 bp, Artificial
  probe
  misc_feature (1)..(25): SEQ ID NO: 1184; WAN024GNW_at; Start 973; Stop 997
gtcattacaggtcccaatacaggtg

SEQ ID NO: 252995 - DNA, 25 bp, Artificial
  probe
  misc_feature (1)..(25): SEQ ID NO: 1184; WAN024GNW_at; Start 1327; Stop 1351
tatccagaactcaaggcctacggta

SEQ ID NO: 252996 - DNA, 25 bp, Artificial
  probe
  misc_feature (1)..(25): SEQ ID NO: 1184; WAN024GNW_at; Start 552; Stop 576
tgttgctagcagaaatggccgtcag

SEQ ID NO: 252997 - DNA, 25 bp, Artificial
  probe
  misc_feature (1)..(25): SEQ ID NO: 1184; WAN024GNW_at; Start 912; Stop 936
tcctttggtcaaaaatgccgtcgca

SEQ ID NO: 252998 - DNA, 25 bp, Artificial
  probe
  misc_feature (1)..(25): SEQ ID NO: 1184; WAN024GNW_at; Start 1052; Stop 1076
gattgccgattttagcagacaaggg

SEQ ID NO: 252999 - DNA, 25 bp, Artificial
  probe
  misc_feature (1)..(25): SEQ ID NO: 1184; WAN024GNW_at; Start 1269; Stop 1293
catggctattctggaggaccttcgc

SEQ ID NO: 253000 - DNA, 25 bp, Artificial
  probe
  misc_feature (1)..(25): SEQ ID NO: 1184; WAN024GNW_at; Start 2085; Stop 2109
gcgaggacctcaagctagactggat

SEQ ID NO: 253001 - DNA, 25 bp, Artificial
  probe
  misc_feature (1)..(25): SEQ ID NO: 1184; WAN024GNW_at; Start 1717; Stop 1741
gatatggccctaagtgaaagtgacc

SEQ ID NO: 253002 - DNA, 25 bp, Artificial
  probe
  misc_feature (1)..(25): SEQ ID NO: 1184; WAN024GNW_at; Start 712; Stop 736
gatgagcgctatgaaatgcttcgca

SEQ ID NO: 253003 - DNA, 25 bp, Artificial
  probe
  misc_feature (1)..(25): SEQ ID NO: 1184; WAN024GNW_at; Start 441; Stop 465
cagtgaagaattggcgcgaatccgt

SEQ ID NO: 253004 - DNA, 25 bp, Artificial
  probe
  misc_feature (1)..(25): SEQ ID NO: 1184; WAN024GNW_at; Start 23; Stop 47
cattagagttcgataaggtcaaggc

SEQ ID NO: 253005 - DNA, 25 bp, Artificial
  probe
  misc_feature (1)..(25): SEQ ID NO: 1184; WAN024GNW_at; Start 2100; Stop 2124
tagactggatcttcgaggcaagcgc

SEQ ID NO: 253006 - DNA, 25 bp, Artificial
  probe
  misc_feature (1)..(25): SEQ ID NO: 1184; WAN024GNW_at; Start 475; Stop 499
catgatagcgagagtcaggtacgcg

SEQ ID NO: 253007 - DNA, 25 bp, Artificial
  probe
  misc_feature (1)..(25): SEQ ID NO: 1184; WAN024GNW_at; Start 1590; Stop 1614
caatatccgtgaggtggagcaagaa

SEQ ID NO: 253008 - DNA, 25 bp, Artificial
  probe
  misc_feature (1)..(25): SEQ ID NO: 1184; WAN024GNW_at; Start 403; Stop 427
caggcctttaatgatgcgggtttca

SEQ ID NO: 253009 - DNA, 25 bp, Artificial
  probe
  misc_feature (1)..(25): SEQ ID NO: 1184; WAN024GNW_at; Start 1015; Stop 1039
aaaactctgggcttgacacaggtca

SEQ ID NO: 253010 - DNA, 25 bp, Artificial
  probe
  misc_feature (1)..(25): SEQ ID NO: 1184; WAN024GNW_at; Start 742; Stop 766
caagaaatttctgagcgtgtccgcc

SEQ ID NO: 253011 - DNA, 25 bp, Artificial
  probe
  misc_feature (1)..(25): SEQ ID NO: 1184; WAN024GNW_at; Start 2069; Stop 2093
tgaaacgaacttctgggcgaggacc

SEQ ID NO: 253012 - DNA, 25 bp, Artificial
  probe
  misc_feature (1)..(25): SEQ ID NO: 1184; WAN024GNW_at; Start 1233; Stop 1257
ggctggtactgatccccaagaggga

SEQ ID NO: 253013 - DNA, 25 bp, Artificial
  probe
  misc_feature (1)..(25): SEQ ID NO: 1184; WAN024GNW_at; Start 61; Stop 85
catttgttgaccgagcagggcttgg

SEQ ID NO: 253014 - DNA, 25 bp, Artificial
  probe
  misc_feature (1)..(25): SEQ ID NO: 1184; WAN024GNW_at; Start 2265; Stop 2289
tgtcaagagtttcggctatgcccca

SEQ ID NO: 253015 - DNA, 25 bp, Artificial
  probe
  misc_feature (1)..(25): SEQ ID NO: 1184; WAN024GNW_at; Start 854; Stop 878
aagcagtcgtgcctcagctgtcaga

SEQ ID NO: 253016 - DNA, 25 bp, Artificial
  probe
  misc_feature (1)..(25): SEQ ID NO: 1184; WAN024GNW_at; Start 823; Stop 847
cgtgccaaggttcgatttatccaag

SEQ ID NO: 253017 - DNA, 25 bp, Artificial
  probe
  misc_feature (1)..(25): SEQ ID NO: 1184; WAN024GNW_at; Start 1682; Stop 1706
ttaacaaggcgcgtgaacaggctgc

SEQ ID NO: 253018 - DNA, 25 bp, Artificial
  probe
  misc_feature (1)..(25): SEQ ID NO: 1184; WAN024GNW_at; Start 1299; Stop 1323
tcaaatcaagaccatggcgacgacc

SEQ ID NO: 253019 - DNA, 25 bp, Artificial
  probe
  misc_feature (1)..(25): SEQ ID NO: 1184; WAN024GNW_at; Start 2203; Stop 2227
catggtatcggaacaggagtcatcc

SEQ ID NO: 253020 - DNA, 25 bp, Artificial
  probe
  misc_feature (1)..(25): SEQ ID NO: 1184; WAN024GNW_at; Start 1702; Stop 1726
gctgctgagattgtggatatggccc

SEQ ID NO: 253021 - DNA, 25 bp, Artificial
  probe
  misc_feature (1)..(25): SEQ ID NO: 1184; WAN024GNW_at; Start 1037; Stop 1061
tcatggcccagtcaggattgccgat

SEQ ID NO: 253022 - DNA, 25 bp, Artificial
  probe
  misc_feature (1)..(25): SEQ ID NO: 1184; WAN024GNW_at; Start 630; Stop 654
tatttctgctagtggaaacaccgtc

SEQ ID NO: 253023 - DNA, 25 bp, Artificial
  probe
  misc_feature (1)..(25): SEQ ID NO: 1184; WAN024GNW_at; Start 1488; Stop 1512
tatcgtaggagatgccagtcagcag

SEQ ID NO: 253024 - DNA, 25 bp, Artificial
  probe
  misc_feature (1)..(25): SEQ ID NO: 1184; WAN024GNW_at; Start 261; Stop 285
ggagttcctactcttgaaacgcgtg

SEQ ID NO: 253025 - DNA, 25 bp, Artificial
  probe
  misc_feature (1)..(25): SEQ ID NO: 1184; WAN024GNW_at; Start 2279; Stop 2303
gctatgccccacaaaatgctggagg

SEQ ID NO: 253026 - DNA, 25 bp, Artificial
  probe
  misc_feature (1)..(25): SEQ ID NO: 5106; WAN024GNX_at; Start 44; Stop 68
ttgcgacgatactcttttcaagagg

SEQ ID NO: 253027 - DNA, 25 bp, Artificial
  probe
  misc_feature (1)..(25): SEQ ID NO: 5106; WAN024GNX_at; Start 123; Stop 147
gacaaataaggtcaccaacatggac

SEQ ID NO: 253028 - DNA, 25 bp, Artificial
  probe
  misc_feature (1)..(25): SEQ ID NO: 5106; WAN024GNX_at; Start 152; Stop 176
tacctgctgaaacttggaacaactt

SEQ ID NO: 253029 - DNA, 25 bp, Artificial
  probe
  misc_feature (1)..(25): SEQ ID NO: 5106; WAN024GNX_at; Start 28; Stop 52
ctctggatgatgtgttttgcgacga

SEQ ID NO: 253030 - DNA, 25 bp, Artificial
  probe
  misc_feature (1)..(25): SEQ ID NO: 5106; WAN024GNX_at; Start 157; Stop 181
gctgaaacttggaacaacttaccac

SEQ ID NO: 253031 - DNA, 25 bp, Artificial
  probe
  misc_feature (1)..(25): SEQ ID NO: 5106; WAN024GNX_at; Start 182; Stop 206
ccagttttttgctaggaatcaagtg

SEQ ID NO: 253032 - DNA, 25 bp, Artificial
  probe
  misc_feature (1)..(25): SEQ ID NO: 5106; WAN024GNX_at; Start 197; Stop 221
gaatcaagtgtaagagaagaccaag

SEQ ID NO: 253033 - DNA, 25 bp, Artificial
  probe
  misc_feature (1)..(25): SEQ ID NO: 5106; WAN024GNX_at; Start 41; Stop 65
gttttgcgacgatactcttttcaag

SEQ ID NO: 253034 - DNA, 25 bp, Artificial
  probe
  misc_feature (1)..(25): SEQ ID NO: 5106; WAN024GNX_at; Start 178; Stop 202
ccacccagttttttgctaggaatca

SEQ ID NO: 253035 - DNA, 25 bp, Artificial
  probe
  misc_feature (1)..(25): SEQ ID NO: 5106; WAN024GNX_at; Start 61; Stop 85
tcaagaggattttgtataactgcca

SEQ ID NO: 253036 - DNA, 25 bp, Artificial
  probe
  misc_feature (1)..(25): SEQ ID NO: 5106; WAN024GNX_at; Start 194; Stop 218
taggaatcaagtgtaagagaagacc

SEQ ID NO: 253037 - DNA, 25 bp, Artificial
  probe
  misc_feature (1)..(25): SEQ ID NO: 5106; WAN024GNX_at; Start 137; Stop 161
ccaacatggacaagatacctgctga

SEQ ID NO: 253038 - DNA, 25 bp, Artificial
  probe
  misc_feature (1)..(25): SEQ ID NO: 5106; WAN024GNX_at; Start 118; Stop 142
tgcaagacaaataaggtcaccaaca

SEQ ID NO: 253039 - DNA, 25 bp, Artificial
  probe
  misc_feature (1)..(25): SEQ ID NO: 5106; WAN024GNX_at; Start 33; Stop 57
gatgatgtgttttgcgacgatactc

SEQ ID NO: 253040 - DNA, 25 bp, Artificial
  probe
  misc_feature (1)..(25): SEQ ID NO: 5106; WAN024GNX_at; Start 95; Stop 119
tcgccaagattgtcaaggccatttg

SEQ ID NO: 253041 - DNA, 25 bp, Artificial
  probe
  misc_feature (1)..(25): SEQ ID NO: 5106; WAN024GNX_at; Start 145; Stop 169
gacaagatacctgctgaaacttgga

SEQ ID NO: 253042 - DNA, 25 bp, Artificial
  probe
  misc_feature (1)..(25): SEQ ID NO: 5106; WAN024GNX_at; Start 141; Stop 165
catggacaagatacctgctgaaact

SEQ ID NO: 253043 - DNA, 25 bp, Artificial
  probe
  misc_feature (1)..(25): SEQ ID NO: 5106; WAN024GNX_at; Start 108; Stop 132
caaggccatttgcaagacaaataag

SEQ ID NO: 253044 - DNA, 25 bp, Artificial
  probe
  misc_feature (1)..(25): SEQ ID NO: 5106; WAN024GNX_at; Start 114; Stop 138
catttgcaagacaaataaggtcacc

SEQ ID NO: 253045 - DNA, 25 bp, Artificial
  probe
  misc_feature (1)..(25): SEQ ID NO: 5106; WAN024GNX_at; Start 126; Stop 150
aaataaggtcaccaacatggacaag

SEQ ID NO: 253046 - DNA, 25 bp, Artificial
  probe
  misc_feature (1)..(25): SEQ ID NO: 5106; WAN024GNX_at; Start 105; Stop 129
tgtcaaggccatttgcaagacaaat

SEQ ID NO: 253047 - DNA, 25 bp, Artificial
  probe
  misc_feature (1)..(25): SEQ ID NO: 5106; WAN024GNX_at; Start 65; Stop 89
gaggattttgtataactgccatggg

SEQ ID NO: 253048 - DNA, 25 bp, Artificial
  probe
  misc_feature (1)..(25): SEQ ID NO: 5106; WAN024GNX_at; Start 75; Stop 99
tataactgccatggggatggtcgcc

SEQ ID NO: 253049 - DNA, 25 bp, Artificial
  probe
  misc_feature (1)..(25): SEQ ID NO: 5106; WAN024GNX_at; Start 102; Stop 126
gattgtcaaggccatttgcaagaca

SEQ ID NO: 253050 - DNA, 25 bp, Artificial
  probe
  misc_feature (1)..(25): SEQ ID NO: 5106; WAN024GNX_at; Start 150; Stop 174
gatacctgctgaaacttggaacaac

SEQ ID NO: 253051 - DNA, 25 bp, Artificial
  probe
  misc_feature (1)..(25): SEQ ID NO: 5106; WAN024GNX_at; Start 98; Stop 122
ccaagattgtcaaggccatttgcaa

SEQ ID NO: 253052 - DNA, 25 bp, Artificial
  probe
  misc_feature (1)..(25): SEQ ID NO: 5106; WAN024GNX_at; Start 21; Stop 45
cggtatgctctggatgatgtgtttt

SEQ ID NO: 253053 - DNA, 25 bp, Artificial
  probe
  misc_feature (1)..(25): SEQ ID NO: 5106; WAN024GNX_at; Start 129; Stop 153
taaggtcaccaacatggacaagata

SEQ ID NO: 253054 - DNA, 25 bp, Artificial
  probe
  misc_feature (1)..(25): SEQ ID NO: 5106; WAN024GNX_at; Start 92; Stop 116
tggtcgccaagattgtcaaggccat

SEQ ID NO: 253055 - DNA, 25 bp, Artificial
  probe
  misc_feature (1)..(25): SEQ ID NO: 5106; WAN024GNX_at; Start 36; Stop 60
gatgtgttttgcgacgatactcttt

SEQ ID NO: 253056 - DNA, 25 bp, Artificial
  probe
  misc_feature (1)..(25): SEQ ID NO: 5106; WAN024GNX_at; Start 24; Stop 48
tatgctctggatgatgtgttttgcg

SEQ ID NO: 253057 - DNA, 25 bp, Artificial
  probe
  misc_feature (1)..(25): SEQ ID NO: 5106; WAN024GNX_at; Start 134; Stop 158
tcaccaacatggacaagatacctgc

SEQ ID NO: 253058 - DNA, 25 bp, Artificial
  probe
  misc_feature (1)..(25): SEQ ID NO: 5106; WAN024GNX_at; Start 46; Stop 70
gcgacgatactcttttcaagaggat

SEQ ID NO: 253059 - DNA, 25 bp, Artificial
  probe
  misc_feature (1)..(25): SEQ ID NO: 5106; WAN024GNX_at; Start 90; Stop 114
gatggtcgccaagattgtcaaggcc

SEQ ID NO: 253060 - DNA, 25 bp, Artificial
  probe
  misc_feature (1)..(25): SEQ ID NO: 5538; WAN024GNY_s_at; Start 4; Stop 28
gctcaaacaaatctgggtgacaaat

SEQ ID NO: 253061 - DNA, 25 bp, Artificial
  probe
  misc_feature (1)..(25): SEQ ID NO: 5538; WAN024GNY_s_at; Start 1; Stop 25
ttggctcaaacaaatctgggtgaca

SEQ ID NO: 253062 - DNA, 25 bp, Artificial
  probe
  misc_feature (1)..(25): SEQ ID NO: 5538; WAN024GNY_s_at; Start 14; Stop 38
atctgggtgacaaatttaatcggat

SEQ ID NO: 253063 - DNA, 25 bp, Artificial
  probe
  misc_feature (1)..(25): SEQ ID NO: 5538; WAN024GNY_s_at; Start 5; Stop 29
ctcaaacaaatctgggtgacaaatt

SEQ ID NO: 253064 - DNA, 25 bp, Artificial
  probe
  misc_feature (1)..(25): SEQ ID NO: 5538; WAN024GNY_s_at; Start 16; Stop 40
ctgggtgacaaatttaatcggataa

SEQ ID NO: 253065 - DNA, 25 bp, Artificial
  probe
  misc_feature (1)..(25): SEQ ID NO: 5538; WAN024GNY_s_at; Start 9; Stop 33
aacaaatctgggtgacaaatttaat

SEQ ID NO: 253066 - DNA, 25 bp, Artificial
  probe
  misc_feature (1)..(25): SEQ ID NO: 5538; WAN024GNY_s_at; Start 7; Stop 31
caaacaaatctgggtgacaaattta

SEQ ID NO: 253067 - DNA, 25 bp, Artificial
  probe
  misc_feature (1)..(25): SEQ ID NO: 5538; WAN024GNY_s_at; Start 15; Stop 39
tctgggtgacaaatttaatcggata

SEQ ID NO: 253068 - DNA, 25 bp, Artificial
  probe
  misc_feature (1)..(25): SEQ ID NO: 5538; WAN024GNY_s_at; Start 6; Stop 30
tcaaacaaatctgggtgacaaattt

SEQ ID NO: 253069 - DNA, 25 bp, Artificial
  probe
  misc_feature (1)..(25): SEQ ID NO: 5538; WAN024GNY_s_at; Start 13; Stop 37
aatctgggtgacaaatttaatcgga

SEQ ID NO: 253070 - DNA, 25 bp, Artificial
  probe
  misc_feature (1)..(25): SEQ ID NO: 5538; WAN024GNY_s_at; Start 2; Stop 26
tggctcaaacaaatctgggtgacaa

SEQ ID NO: 253071 - DNA, 25 bp, Artificial
  probe
  misc_feature (1)..(25): SEQ ID NO: 5538; WAN024GNY_s_at; Start 3; Stop 27
ggctcaaacaaatctgggtgacaaa

SEQ ID NO: 253072 - DNA, 25 bp, Artificial
  probe
  misc_feature (1)..(25): SEQ ID NO: 5538; WAN024GNY_s_at; Start 10; Stop 34
acaaatctgggtgacaaatttaatc

SEQ ID NO: 253073 - DNA, 25 bp, Artificial
  probe
  misc_feature (1)..(25): SEQ ID NO: 5538; WAN024GNY_s_at; Start 12; Stop 36
aaatctgggtgacaaatttaatcgg

SEQ ID NO: 253074 - DNA, 25 bp, Artificial
  probe
  misc_feature (1)..(25): SEQ ID NO: 5538; WAN024GNY_s_at; Start 11; Stop 35
caaatctgggtgacaaatttaatcg

SEQ ID NO: 253075 - DNA, 25 bp, Artificial
  probe
  misc_feature (1)..(25): SEQ ID NO: 5128; WAN024GNZ_at; Start 204; Stop 228
ggactttctttttcccatcggatca

SEQ ID NO: 253076 - DNA, 25 bp, Artificial
  probe
  misc_feature (1)..(25): SEQ ID NO: 5128; WAN024GNZ_at; Start 263; Stop 287
atcggctacttgcttgtatttggga

SEQ ID NO: 253077 - DNA, 25 bp, Artificial
  probe
  misc_feature (1)..(25): SEQ ID NO: 5128; WAN024GNZ_at; Start 86; Stop 110
caggtttattacctgatttcagcca

SEQ ID NO: 253078 - DNA, 25 bp, Artificial
  probe
  misc_feature (1)..(25): SEQ ID NO: 5128; WAN024GNZ_at; Start 219; Stop 243
catcggatcaactctttcagctgga

SEQ ID NO: 253079 - DNA, 25 bp, Artificial
  probe
  misc_feature (1)..(25): SEQ ID NO: 5128; WAN024GNZ_at; Start 49; Stop 73
gggattttatatcggctatcggaga

SEQ ID NO: 253080 - DNA, 25 bp, Artificial
  probe
  misc_feature (1)..(25): SEQ ID NO: 5128; WAN024GNZ_at; Start 159; Stop 183
aattccatttattgctcccttatgc

SEQ ID NO: 253081 - DNA, 25 bp, Artificial
  probe
  misc_feature (1)..(25): SEQ ID NO: 5128; WAN024GNZ_at; Start 441; Stop 465
tccccatggcagttatacaaaatcc

SEQ ID NO: 253082 - DNA, 25 bp, Artificial
  probe
  misc_feature (1)..(25): SEQ ID NO: 5128; WAN024GNZ_at; Start 123; Stop 147
ttatggctggccagttttataaggg

SEQ ID NO: 253083 - DNA, 25 bp, Artificial
  probe
  misc_feature (1)..(25): SEQ ID NO: 5128; WAN024GNZ_at; Start 375; Stop 399
caggtatcttgtccatgttggtgac

SEQ ID NO: 253084 - DNA, 25 bp, Artificial
  probe
  misc_feature (1)..(25): SEQ ID NO: 5128; WAN024GNZ_at; Start 65; Stop 89
tatcggagaggcctgctcttacagg

SEQ ID NO: 253085 - DNA, 25 bp, Artificial
  probe
  misc_feature (1)..(25): SEQ ID NO: 5128; WAN024GNZ_at; Start 16; Stop 40
gatttcattccttcttctattggtc

SEQ ID NO: 253086 - DNA, 25 bp, Artificial
  probe
  misc_feature (1)..(25): SEQ ID NO: 5128; WAN024GNZ_at; Start 353; Stop 377
ggtaagttgttccaagtttcagcag

SEQ ID NO: 253087 - DNA, 25 bp, Artificial
  probe
  misc_feature (1)..(25): SEQ ID NO: 5128; WAN024GNZ_at; Start 513; Stop 537
taacaaccagttggctcaaacaaat

SEQ ID NO: 253088 - DNA, 25 bp, Artificial
  probe
  misc_feature (1)..(25): SEQ ID NO: 5128; WAN024GNZ_at; Start 478; Stop 502
tatcgtcgcaaaacacatcatccag

SEQ ID NO: 253089 - DNA, 25 bp, Artificial
  probe
  misc_feature (1)..(25): SEQ ID NO: 5128; WAN024GNZ_at; Start 109; Stop 133
catggcatcggcttttatggctggc

SEQ ID NO: 253090 - DNA, 25 bp, Artificial
  probe
  misc_feature (1)..(25): SEQ ID NO: 5128; WAN024GNZ_at; Start 464; Stop 488
cctcttgaaaagagtatcgtcgcaa

SEQ ID NO: 253091 - DNA, 25 bp, Artificial
  probe
  misc_feature (1)..(25): SEQ ID NO: 5128; WAN024GNZ_at; Start 448; Stop 472
ggcagttatacaaaatcctcttgaa

SEQ ID NO: 253092 - DNA, 25 bp, Artificial
  probe
  misc_feature (1)..(25): SEQ ID NO: 5128; WAN024GNZ_at; Start 95; Stop 119
tacctgatttcagccatggcatcgg

SEQ ID NO: 253093 - DNA, 25 bp, Artificial
  probe
  misc_feature (1)..(25): SEQ ID NO: 5128; WAN024GNZ_at; Start 427; Stop 451
aatcttggcgaccatccccatggca

SEQ ID NO: 253094 - DNA, 25 bp, Artificial
  probe
  misc_feature (1)..(25): SEQ ID NO: 5128; WAN024GNZ_at; Start 402; Stop 426
tatttgtcttgcaaatggccttgac

SEQ ID NO: 253095 - DNA, 25 bp, Artificial
  probe
  misc_feature (1)..(25): SEQ ID NO: 5128; WAN024GNZ_at; Start 224; Stop 248
gatcaactctttcagctggataagg

SEQ ID NO: 253096 - DNA, 25 bp, Artificial
  probe
  misc_feature (1)..(25): SEQ ID NO: 5128; WAN024GNZ_at; Start 487; Stop 511
aaaacacatcatccagagcataccg

SEQ ID NO: 253097 - DNA, 25 bp, Artificial
  probe
  misc_feature (1)..(25): SEQ ID NO: 5128; WAN024GNZ_at; Start 146; Stop 170
gggcttggagagcaattccatttat

SEQ ID NO: 253098 - DNA, 25 bp, Artificial
  probe
  misc_feature (1)..(25): SEQ ID NO: 5128; WAN024GNZ_at; Start 172; Stop 196
gctcccttatgcaaattcgcaggaa

SEQ ID NO: 253099 - DNA, 25 bp, Artificial
  probe
  misc_feature (1)..(25): SEQ ID NO: 5128; WAN024GNZ_at; Start 2; Stop 26
tgaggattccttatgatttcattcc

SEQ ID NO: 253100 - DNA, 25 bp, Artificial
  probe
  misc_feature (1)..(25): SEQ ID NO: 5128; WAN024GNZ_at; Start 56; Stop 80
tatatcggctatcggagaggcctgc

SEQ ID NO: 253101 - DNA, 25 bp, Artificial
  probe
  misc_feature (1)..(25): SEQ ID NO: 5128; WAN024GNZ_at; Start 314; Stop 338
ggtcttctcttacacttgattccta

SEQ ID NO: 253102 - DNA, 25 bp, Artificial
  probe
  misc_feature (1)..(25): SEQ ID NO: 5128; WAN024GNZ_at; Start 367; Stop 391
agtttcagcaggtatcttgtccatg

SEQ ID NO: 253103 - DNA, 25 bp, Artificial
  probe
  misc_feature (1)..(25): SEQ ID NO: 5128; WAN024GNZ_at; Start 26; Stop 50
cttcttctattggtcttggtttggg

SEQ ID NO: 253104 - DNA, 25 bp, Artificial
  probe
  misc_feature (1)..(25): SEQ ID NO: 5128; WAN024GNZ_at; Start 236; Stop 260
cagctggataaggtcttttatgcag

SEQ ID NO: 253105 - DNA, 25 bp, Artificial
  probe
  misc_feature (1)..(25): SEQ ID NO: 5128; WAN024GNZ_at; Start 390; Stop 414
tgttggtgaccttatttgtcttgca

SEQ ID NO: 253106 - DNA, 25 bp, Artificial
  probe
  misc_feature (1)..(25): SEQ ID NO: 5128; WAN024GNZ_at; Start 72; Stop 96
gaggcctgctcttacaggtttatta

SEQ ID NO: 253107 - DNA, 25 bp, Artificial
  probe
  misc_feature (1)..(25): SEQ ID NO: 5128; WAN024GNZ_at; Start 283; Stop 307
tgggattgtctatagcattggtcgt

SEQ ID NO: 253108 - DNA, 25 bp, Artificial
  probe
  misc_feature (1)..(25): SEQ ID NO: 5128; WAN024GNZ_at; Start 413; Stop 437
caaatggccttgacaatcttggcga

SEQ ID NO: 253109 - DNA, 25 bp, Artificial
  probe
  misc_feature (1)..(25): SEQ ID NO: 7123; WAN024GO2_at; Start 25; Stop 49
caggtaggagagctcttggggcaac

SEQ ID NO: 253110 - DNA, 25 bp, Artificial
  probe
  misc_feature (1)..(25): SEQ ID NO: 7123; WAN024GO2_at; Start 1; Stop 25
ctgctgaaccttgtcttcttcgatc

SEQ ID NO: 253111 - DNA, 25 bp, Artificial
  probe
  misc_feature (1)..(25): SEQ ID NO: 7123; WAN024GO2_at; Start 6; Stop 30
gaaccttgtcttcttcgatcaggta

SEQ ID NO: 253112 - DNA, 25 bp, Artificial
  probe
  misc_feature (1)..(25): SEQ ID NO: 7123; WAN024GO2_at; Start 22; Stop 46
gatcaggtaggagagctcttggggc

SEQ ID NO: 253113 - DNA, 25 bp, Artificial
  probe
  misc_feature (1)..(25): SEQ ID NO: 7123; WAN024GO2_at; Start 10; Stop 34
cttgtcttcttcgatcaggtaggag

SEQ ID NO: 253114 - DNA, 25 bp, Artificial
  probe
  misc_feature (1)..(25): SEQ ID NO: 7123; WAN024GO2_at; Start 69; Stop 93
acgggacgggaagactcaaggagag

SEQ ID NO: 253115 - DNA, 25 bp, Artificial
  probe
  misc_feature (1)..(25): SEQ ID NO: 7123; WAN024GO2_at; Start 68; Stop 92
cacgggacgggaagactcaaggaga

SEQ ID NO: 253116 - DNA, 25 bp, Artificial
  probe
  misc_feature (1)..(25): SEQ ID NO: 7123; WAN024GO2_at; Start 3; Stop 27
gctgaaccttgtcttcttcgatcag

SEQ ID NO: 253117 - DNA, 25 bp, Artificial
  probe
  misc_feature (1)..(25): SEQ ID NO: 7123; WAN024GO2_at; Start 16; Stop 40
ttcttcgatcaggtaggagagctct

SEQ ID NO: 253118 - DNA, 25 bp, Artificial
  probe
  misc_feature (1)..(25): SEQ ID NO: 7123; WAN024GO2_at; Start 19; Stop 43
ttcgatcaggtaggagagctcttgg

SEQ ID NO: 253119 - DNA, 25 bp, Artificial
  probe
  misc_feature (1)..(25): SEQ ID NO: 7123; WAN024GO2_at; Start 15; Stop 39
cttcttcgatcaggtaggagagctc

SEQ ID NO: 253120 - DNA, 25 bp, Artificial
  probe
  misc_feature (1)..(25): SEQ ID NO: 7123; WAN024GO2_at; Start 5; Stop 29
tgaaccttgtcttcttcgatcaggt

SEQ ID NO: 253121 - DNA, 25 bp, Artificial
  probe
  misc_feature (1)..(25): SEQ ID NO: 7123; WAN024GO2_at; Start 2; Stop 26
tgctgaaccttgtcttcttcgatca

SEQ ID NO: 253122 - DNA, 25 bp, Artificial
  probe
  misc_feature (1)..(25): SEQ ID NO: 7123; WAN024GO2_at; Start 9; Stop 33
ccttgtcttcttcgatcaggtagga

SEQ ID NO: 253123 - DNA, 25 bp, Artificial
  probe
  misc_feature (1)..(25): SEQ ID NO: 7123; WAN024GO2_at; Start 13; Stop 37
gtcttcttcgatcaggtaggagagc

SEQ ID NO: 253124 - DNA, 25 bp, Artificial
  probe
  misc_feature (1)..(25): SEQ ID NO: 7123; WAN024GO2_at; Start 23; Stop 47
atcaggtaggagagctcttggggca

SEQ ID NO: 253125 - DNA, 25 bp, Artificial
  probe
  misc_feature (1)..(25): SEQ ID NO: 7123; WAN024GO2_at; Start 4; Stop 28
ctgaaccttgtcttcttcgatcagg

SEQ ID NO: 253126 - DNA, 25 bp, Artificial
  probe
  misc_feature (1)..(25): SEQ ID NO: 7123; WAN024GO2_at; Start 7; Stop 31
aaccttgtcttcttcgatcaggtag

SEQ ID NO: 253127 - DNA, 25 bp, Artificial
  probe
  misc_feature (1)..(25): SEQ ID NO: 7123; WAN024GO2_at; Start 12; Stop 36
tgtcttcttcgatcaggtaggagag

SEQ ID NO: 253128 - DNA, 25 bp, Artificial
  probe
  misc_feature (1)..(25): SEQ ID NO: 7123; WAN024GO2_at; Start 67; Stop 91
ccacgggacgggaagactcaaggag

SEQ ID NO: 253129 - DNA, 25 bp, Artificial
  probe
  misc_feature (1)..(25): SEQ ID NO: 7123; WAN024GO2_at; Start 26; Stop 50
aggtaggagagctcttggggcaact

SEQ ID NO: 253130 - DNA, 25 bp, Artificial
  probe
  misc_feature (1)..(25): SEQ ID NO: 7123; WAN024GO2_at; Start 11; Stop 35
ttgtcttcttcgatcaggtaggaga

SEQ ID NO: 253131 - DNA, 25 bp, Artificial
  probe
  misc_feature (1)..(25): SEQ ID NO: 7123; WAN024GO2_at; Start 18; Stop 42
cttcgatcaggtaggagagctcttg

SEQ ID NO: 253132 - DNA, 25 bp, Artificial
  probe
  misc_feature (1)..(25): SEQ ID NO: 7123; WAN024GO2_at; Start 66; Stop 90
tccacgggacgggaagactcaagga

SEQ ID NO: 253133 - DNA, 25 bp, Artificial
  probe
  misc_feature (1)..(25): SEQ ID NO: 7123; WAN024GO2_at; Start 8; Stop 32
accttgtcttcttcgatcaggtagg

SEQ ID NO: 253134 - DNA, 25 bp, Artificial
  probe
  misc_feature (1)..(25): SEQ ID NO: 7123; WAN024GO2_at; Start 62; Stop 86
tagttccacgggacgggaagactca

SEQ ID NO: 253135 - DNA, 25 bp, Artificial
  probe
  misc_feature (1)..(25): SEQ ID NO: 7123; WAN024GO2_at; Start 17; Stop 41
tcttcgatcaggtaggagagctctt

SEQ ID NO: 253136 - DNA, 25 bp, Artificial
  probe
  misc_feature (1)..(25): SEQ ID NO: 7123; WAN024GO2_at; Start 21; Stop 45
cgatcaggtaggagagctcttgggg

SEQ ID NO: 253137 - DNA, 25 bp, Artificial
  probe
  misc_feature (1)..(25): SEQ ID NO: 7123; WAN024GO2_at; Start 24; Stop 48
tcaggtaggagagctcttggggcaa

SEQ ID NO: 253138 - DNA, 25 bp, Artificial
  probe
  misc_feature (1)..(25): SEQ ID NO: 7123; WAN024GO2_at; Start 14; Stop 38
tcttcttcgatcaggtaggagagct

SEQ ID NO: 253139 - DNA, 25 bp, Artificial
  probe
  misc_feature (1)..(25): SEQ ID NO: 7123; WAN024GO2_at; Start 20; Stop 44
tcgatcaggtaggagagctcttggg

SEQ ID NO: 253140 - DNA, 25 bp, Artificial
  probe
  misc_feature (1)..(25): SEQ ID NO: 1911; WAN024GO3_at; Start 717; Stop 741
ggacacctatgttgaagcacgggat

SEQ ID NO: 253141 - DNA, 25 bp, Artificial
  probe
  misc_feature (1)..(25): SEQ ID NO: 1911; WAN024GO3_at; Start 1078; Stop 1102
cctggtactggtaagacaactgtta

SEQ ID NO: 253142 - DNA, 25 bp, Artificial
  probe
  misc_feature (1)..(25): SEQ ID NO: 1911; WAN024GO3_at; Start 670; Stop 694
cgcgccggtctagttcacagtcttt

SEQ ID NO: 253143 - DNA, 25 bp, Artificial
  probe
  misc_feature (1)..(25): SEQ ID NO: 1911; WAN024GO3_at; Start 2208; Stop 2232
tgaacgcttcagtgatctactggag

SEQ ID NO: 253144 - DNA, 25 bp, Artificial
  probe
  misc_feature (1)..(25): SEQ ID NO: 1911; WAN024GO3_at; Start 1430; Stop 1454
tcagtcctggacaggttctagcgga

SEQ ID NO: 253145 - DNA, 25 bp, Artificial
  probe
  misc_feature (1)..(25): SEQ ID NO: 1911; WAN024GO3_at; Start 2030; Stop 2054
gaagtgagttcccagttgtcatcct

SEQ ID NO: 253146 - DNA, 25 bp, Artificial
  probe
  misc_feature (1)..(25): SEQ ID NO: 1911; WAN024GO3_at; Start 1250; Stop 1274
gccacttgggaatgacaggtgacga

SEQ ID NO: 253147 - DNA, 25 bp, Artificial
  probe
  misc_feature (1)..(25): SEQ ID NO: 1911; WAN024GO3_at; Start 1397; Stop 1421
tcatcgtaggtgacagtgatcagct

SEQ ID NO: 253148 - DNA, 25 bp, Artificial
  probe
  misc_feature (1)..(25): SEQ ID NO: 1911; WAN024GO3_at; Start 2287; Stop 2311
gaacaatcctacatcctaaccgaag

SEQ ID NO: 253149 - DNA, 25 bp, Artificial
  probe
  misc_feature (1)..(25): SEQ ID NO: 1911; WAN024GO3_at; Start 133; Stop 157
gaaatcattgtcacaggaaccatgg

SEQ ID NO: 253150 - DNA, 25 bp, Artificial
  probe
  misc_feature (1)..(25): SEQ ID NO: 1911; WAN024GO3_at; Start 381; Stop 405
cccagaaaagttagaaggcatcgca

SEQ ID NO: 253151 - DNA, 25 bp, Artificial
  probe
  misc_feature (1)..(25): SEQ ID NO: 1911; WAN024GO3_at; Start 1873; Stop 1897
gatttaggagctatcacagacctga

SEQ ID NO: 253152 - DNA, 25 bp, Artificial
  probe
  misc_feature (1)..(25): SEQ ID NO: 1911; WAN024GO3_at; Start 1695; Stop 1719
tctggctcctatgtaccgagggacg

SEQ ID NO: 253153 - DNA, 25 bp, Artificial
  probe
  misc_feature (1)..(25): SEQ ID NO: 1911; WAN024GO3_at; Start 1734; Stop 1758
tatcaatcagctcatgcaagacctg

SEQ ID NO: 253154 - DNA, 25 bp, Artificial
  probe
  misc_feature (1)..(25): SEQ ID NO: 1911; WAN024GO3_at; Start 2337; Stop 2361
gattgggattacagacacagacctc

SEQ ID NO: 253155 - DNA, 25 bp, Artificial
  probe
  misc_feature (1)..(25): SEQ ID NO: 1911; WAN024GO3_at; Start 2086; Stop 2110
gagcgaaatctcatctacacagcca

SEQ ID NO: 253156 - DNA, 25 bp, Artificial
  probe
  misc_feature (1)..(25): SEQ ID NO: 1911; WAN024GO3_at; Start 1217; Stop 1241
aattgacaggtttgcctagcgcgac

SEQ ID NO: 253157 - DNA, 25 bp, Artificial
  probe
  misc_feature (1)..(25): SEQ ID NO: 1911; WAN024GO3_at; Start 612; Stop 636
cattgctgaccaactagctgaggaa

SEQ ID NO: 253158 - DNA, 25 bp, Artificial
  probe
  misc_feature (1)..(25): SEQ ID NO: 1911; WAN024GO3_at; Start 635; Stop 659
aactaggcatcgaaagtcaggctcc

SEQ ID NO: 253159 - DNA, 25 bp, Artificial
  probe
  misc_feature (1)..(25): SEQ ID NO: 1911; WAN024GO3_at; Start 1542; Stop 1566
tcagattcgacagggcatcttgcca

SEQ ID NO: 253160 - DNA, 25 bp, Artificial
  probe
  misc_feature (1)..(25): SEQ ID NO: 1911; WAN024GO3_at; Start 308; Stop 332
ggattggtctcaagacagctcagaa

SEQ ID NO: 253161 - DNA, 25 bp, Artificial
  probe
  misc_feature (1)..(25): SEQ ID NO: 1911; WAN024GO3_at; Start 856; Stop 880
gataccaagatctttgacaacagcc

SEQ ID NO: 253162 - DNA, 25 bp, Artificial
  probe
  misc_feature (1)..(25): SEQ ID NO: 1911; WAN024GO3_at; Start 2070; Stop 2094
tagccgacgtatgctggagcgaaat

SEQ ID NO: 253163 - DNA, 25 bp, Artificial
  probe
  misc_feature (1)..(25): SEQ ID NO: 1911; WAN024GO3_at; Start 94; Stop 118
gaaatcgacgatacggacgcagagg

SEQ ID NO: 253164 - DNA, 25 bp, Artificial
  probe
  misc_feature (1)..(25): SEQ ID NO: 1911; WAN024GO3_at; Start 2263; Stop 2287
gaaacagtcacatcaagtgcctctg

SEQ ID NO: 253165 - DNA, 25 bp, Artificial
  probe
  misc_feature (1)..(25): SEQ ID NO: 1911; WAN024GO3_at; Start 2182; Stop 2206
ggaactgcccgaaaaacctatctga

SEQ ID NO: 253166 - DNA, 25 bp, Artificial
  probe
  misc_feature (1)..(25): SEQ ID NO: 1911; WAN024GO3_at; Start 246; Stop 270
tgatcgcgcaaaaccaactagtaag

SEQ ID NO: 253167 - DNA, 25 bp, Artificial
  probe
  misc_feature (1)..(25): SEQ ID NO: 1911; WAN024GO3_at; Start 412; Stop 436
tctgccaaaaatcgcgaggctttcg

SEQ ID NO: 253168 - DNA, 25 bp, Artificial
  probe
  misc_feature (1)..(25): SEQ ID NO: 1911; WAN024GO3_at; Start 873; Stop 897
caacagcctctttttcgctgaggaa

SEQ ID NO: 253169 - DNA, 25 bp, Artificial
  probe
  misc_feature (1)..(25): SEQ ID NO: 1911; WAN024GO3_at; Start 231; Stop 255
gcaaatcagtcgttatgatcgcgca

SEQ ID NO: 253170 - DNA, 25 bp, Artificial
  probe
  misc_feature (1)..(25): SEQ ID NO: 1911; WAN024GO3_at; Start 811; Stop 835
caagagctctcctacctgatcgaag

SEQ ID NO: 253171 - DNA, 25 bp, Artificial
  probe
  misc_feature (1)..(25): SEQ ID NO: 1911; WAN024GO3_at; Start 152; Stop 176
ccatggctgatgtaattgagggcga

SEQ ID NO: 253172 - DNA, 25 bp, Artificial
  probe
  misc_feature (1)..(25): SEQ ID NO: 1911; WAN024GO3_at; Start 193; Stop 217
gggcaaattgtccagcactccaagt

SEQ ID NO: 253173 - DNA, 25 bp, Artificial
  probe
  misc_feature (1)..(25): SEQ ID NO: 1911; WAN024GO3_at; Start 828; Stop 852
gatcgaagaagacaaggttcagcag

SEQ ID NO: 253174 - DNA, 25 bp, Artificial
  probe
  misc_feature (1)..(25): SEQ ID NO: 2320; WAN024GO4_at; Start 402; Stop 426
catacttggtgtagagatttcggac

SEQ ID NO: 253175 - DNA, 25 bp, Artificial
  probe
  misc_feature (1)..(25): SEQ ID NO: 2320; WAN024GO4_at; Start 65; Stop 89
tgactgaggatgacatgacgaagca

SEQ ID NO: 253176 - DNA, 25 bp, Artificial
  probe
  misc_feature (1)..(25): SEQ ID NO: 2320; WAN024GO4_at; Start 115; Stop 139
gatgccgagttccataactgtcttg

SEQ ID NO: 253177 - DNA, 25 bp, Artificial
  probe
  misc_feature (1)..(25): SEQ ID NO: 2320; WAN024GO4_at; Start 470; Stop 494
gacatgtagtcacgaatttccttga

SEQ ID NO: 253178 - DNA, 25 bp, Artificial
  probe
  misc_feature (1)..(25): SEQ ID NO: 2320; WAN024GO4_at; Start 55; Stop 79
caagccgtggtgactgaggatgaca

SEQ ID NO: 253179 - DNA, 25 bp, Artificial
  probe
  misc_feature (1)..(25): SEQ ID NO: 2320; WAN024GO4_at; Start 429; Stop 453
tccgttgccagacaggattttcaat

SEQ ID NO: 253180 - DNA, 25 bp, Artificial
  probe
  misc_feature (1)..(25): SEQ ID NO: 2320; WAN024GO4_at; Start 324; Stop 348
tcgccgtatgataggccaagcccgt

SEQ ID NO: 253181 - DNA, 25 bp, Artificial
  probe
  misc_feature (1)..(25): SEQ ID NO: 2320; WAN024GO4_at; Start 435; Stop 459
gccagacaggattttcaattttgaa

SEQ ID NO: 253182 - DNA, 25 bp, Artificial
  probe
  misc_feature (1)..(25): SEQ ID NO: 2320; WAN024GO4_at; Start 73; Stop 97
gatgacatgacgaagcaaaacgact

SEQ ID NO: 253183 - DNA, 25 bp, Artificial
  probe
  misc_feature (1)..(25): SEQ ID NO: 2320; WAN024GO4_at; Start 130; Stop 154
aactgtcttggtaatttcgctatca

SEQ ID NO: 253184 - DNA, 25 bp, Artificial
  probe
  misc_feature (1)..(25): SEQ ID NO: 2320; WAN024GO4_at; Start 98; Stop 122
tcttccttggtatcatcgatgccga

SEQ ID NO: 253185 - DNA, 25 bp, Artificial
  probe
  misc_feature (1)..(25): SEQ ID NO: 2320; WAN024GO4_at; Start 300; Stop 324
tagcgtctgccaaacgcaccatggt

SEQ ID NO: 253186 - DNA, 25 bp, Artificial
  probe
  misc_feature (1)..(25): SEQ ID NO: 2320; WAN024GO4_at; Start 88; Stop 112
caaaacgacttcttccttggtatca

SEQ ID NO: 253187 - DNA, 25 bp, Artificial
  probe
  misc_feature (1)..(25): SEQ ID NO: 2320; WAN024GO4_at; Start 375; Stop 399
cagctggataggagtagaattcctt

SEQ ID NO: 253188 - DNA, 25 bp, Artificial
  probe
  misc_feature (1)..(25): SEQ ID NO: 2320; WAN024GO4_at; Start 317; Stop 341
accatggtcgccgtatgataggcca

SEQ ID NO: 253189 - DNA, 25 bp, Artificial
  probe
  misc_feature (1)..(25): SEQ ID NO: 2320; WAN024GO4_at; Start 459; Stop 483
aaatcatttgcgacatgtagtcacg

SEQ ID NO: 253190 - DNA, 25 bp, Artificial
  probe
  misc_feature (1)..(25): SEQ ID NO: 2320; WAN024GO4_at; Start 415; Stop 439
gagatttcggacaatccgttgccag

SEQ ID NO: 253191 - DNA, 25 bp, Artificial
  probe
  misc_feature (1)..(25): SEQ ID NO: 2320; WAN024GO4_at; Start 50; Stop 74
tcaagcaagccgtggtgactgagga

SEQ ID NO: 253192 - DNA, 25 bp, Artificial
  probe
  misc_feature (1)..(25): SEQ ID NO: 2320; WAN024GO4_at; Start 335; Stop 359
taggccaagcccgtttcaaaggcat

SEQ ID NO: 253193 - DNA, 25 bp, Artificial
  probe
  misc_feature (1)..(25): SEQ ID NO: 2320; WAN024GO4_at; Start 369; Stop 393
tcttggcagctggataggagtagaa

SEQ ID NO: 253194 - DNA, 25 bp, Artificial
  probe
  misc_feature (1)..(25): SEQ ID NO: 2320; WAN024GO4_at; Start 349; Stop 373
ttcaaaggcatggtggttggtcttg

SEQ ID NO: 253195 - DNA, 25 bp, Artificial
  probe
  misc_feature (1)..(25): SEQ ID NO: 2320; WAN024GO4_at; Start 421; Stop 445
tcggacaatccgttgccagacagga

SEQ ID NO: 253196 - DNA, 25 bp, Artificial
  probe
  misc_feature (1)..(25): SEQ ID NO: 2320; WAN024GO4_at; Start 260; Stop 284
tagagcaggctcttattgagctgag

SEQ ID NO: 253197 - DNA, 25 bp, Artificial
  probe
  misc_feature (1)..(25): SEQ ID NO: 2320; WAN024GO4_at; Start 246; Stop 270
acataatccccgcatagagcaggct

SEQ ID NO: 253198 - DNA, 25 bp, Artificial
  probe
  misc_feature (1)..(25): SEQ ID NO: 2320; WAN024GO4_at; Start 280; Stop 304
ctgaggataaacttcgctaatagcg

SEQ ID NO: 253199 - DNA, 25 bp, Artificial
  probe
  misc_feature (1)..(25): SEQ ID NO: 2320; WAN024GO4_at; Start 310; Stop 334
caaacgcaccatggtcgccgtatga

SEQ ID NO: 253200 - DNA, 25 bp, Artificial
  probe
  misc_feature (1)..(25): SEQ ID NO: 2320; WAN024GO4_at; Start 449; Stop 473
tcaattttgaaaatcatttgcgaca

SEQ ID NO: 253201 - DNA, 25 bp, Artificial
  probe
  misc_feature (1)..(25): SEQ ID NO: 2320; WAN024GO4_at; Start 272; Stop 296
ttattgagctgaggataaacttcgc

SEQ ID NO: 253202 - DNA, 25 bp, Artificial
  probe
  misc_feature (1)..(25): SEQ ID NO: 2320; WAN024GO4_at; Start 388; Stop 412
gtagaattccttatcatacttggtg

SEQ ID NO: 253203 - DNA, 25 bp, Artificial
  probe
  misc_feature (1)..(25): SEQ ID NO: 2320; WAN024GO4_at; Start 343; Stop 367
gcccgtttcaaaggcatggtggttg

SEQ ID NO: 253204 - DNA, 25 bp, Artificial
  probe
  misc_feature (1)..(25): SEQ ID NO: 2320; WAN024GO4_at; Start 106; Stop 130
ggtatcatcgatgccgagttccata

SEQ ID NO: 253205 - DNA, 25 bp, Artificial
  probe
  misc_feature (1)..(25): SEQ ID NO: 2320; WAN024GO4_at; Start 287; Stop 311
taaacttcgctaatagcgtctgcca

SEQ ID NO: 253206 - DNA, 25 bp, Artificial
  probe
  misc_feature (1)..(25): SEQ ID NO: 2320; WAN024GO4_at; Start 483; Stop 507
gaatttccttgacatcaactggtga

SEQ ID NO: 253207 - DNA, 25 bp, Artificial
  probe
  misc_feature (1)..(25): SEQ ID NO: 2320; WAN024GO4_at; Start 249; Stop 273
taatccccgcatagagcaggctctt

SEQ ID NO: 253208 - DNA, 25 bp, Artificial
  probe
  misc_feature (1)..(25): SEQ ID NO: 1094; WAN024GO5_at; Start 384; Stop 408
gattgtccgaaatctctacaccaag

SEQ ID NO: 253209 - DNA, 25 bp, Artificial
  probe
  misc_feature (1)..(25): SEQ ID NO: 1094; WAN024GO5_at; Start 162; Stop 186
taacattgaggcctttaccgcaggt

SEQ ID NO: 253210 - DNA, 25 bp, Artificial
  probe
  misc_feature (1)..(25): SEQ ID NO: 1094; WAN024GO5_at; Start 238; Stop 262
gtcaatcaaattactctccgcctgc

SEQ ID NO: 253211 - DNA, 25 bp, Artificial
  probe
  misc_feature (1)..(25): SEQ ID NO: 1094; WAN024GO5_at; Start 37; Stop 61
gaaggcttttacctaatcaaatcag

SEQ ID NO: 253212 - DNA, 25 bp, Artificial
  probe
  misc_feature (1)..(25): SEQ ID NO: 1094; WAN024GO5_at; Start 510; Stop 534
cgctattagcgaagtttatcctcag

SEQ ID NO: 253213 - DNA, 25 bp, Artificial
  probe
  misc_feature (1)..(25): SEQ ID NO: 1094; WAN024GO5_at; Start 687; Stop 711
ggaactcggcatcgatgataccaag

SEQ ID NO: 253214 - DNA, 25 bp, Artificial
  probe
  misc_feature (1)..(25): SEQ ID NO: 1094; WAN024GO5_at; Start 660; Stop 684
tgatagcgaaattaccaagacagtt

SEQ ID NO: 253215 - DNA, 25 bp, Artificial
  probe
  misc_feature (1)..(25): SEQ ID NO: 1094; WAN024GO5_at; Start 715; Stop 739
gaagtcgttttgcttcgtcatgtca

SEQ ID NO: 253216 - DNA, 25 bp, Artificial
  probe
  misc_feature (1)..(25): SEQ ID NO: 1094; WAN024GO5_at; Start 672; Stop 696
taccaagacagttatggaactcggc

SEQ ID NO: 253217 - DNA, 25 bp, Artificial
  probe
  misc_feature (1)..(25): SEQ ID NO: 1094; WAN024GO5_at; Start 50; Stop 74
taatcaaatcagctgacctgaggca

SEQ ID NO: 253218 - DNA, 25 bp, Artificial
  probe
  misc_feature (1)..(25): SEQ ID NO: 1094; WAN024GO5_at; Start 190; Stop 214
gttgtccacatgaaaggacgccgag

SEQ ID NO: 253219 - DNA, 25 bp, Artificial
  probe
  misc_feature (1)..(25): SEQ ID NO: 1094; WAN024GO5_at; Start 369; Stop 393
tcctgtctggcaacggattgtccga

SEQ ID NO: 253220 - DNA, 25 bp, Artificial
  probe
  misc_feature (1)..(25): SEQ ID NO: 1094; WAN024GO5_at; Start 816; Stop 840
gattgacaatctggatgcaagcatg

SEQ ID NO: 253221 - DNA, 25 bp, Artificial
  probe
  misc_feature (1)..(25): SEQ ID NO: 1094; WAN024GO5_at; Start 308; Stop 332
caccagttgatgtcaaggaaattcg

SEQ ID NO: 253222 - DNA, 25 bp, Artificial
  probe
  misc_feature (1)..(25): SEQ ID NO: 1094; WAN024GO5_at; Start 402; Stop 426
caccaagtatgataaggaattctac

SEQ ID NO: 253223 - DNA, 25 bp, Artificial
  probe
  misc_feature (1)..(25): SEQ ID NO: 1094; WAN024GO5_at; Start 264; Stop 288
tcaagctggtgaacccaatgaccca

SEQ ID NO: 253224 - DNA, 25 bp, Artificial
  probe
  misc_feature (1)..(25): SEQ ID NO: 1094; WAN024GO5_at; Start 292; Stop 316
gatttcaaggtcaagtcaccagttg

SEQ ID NO: 253225 - DNA, 25 bp, Artificial
  probe
  misc_feature (1)..(25): SEQ ID NO: 1094; WAN024GO5_at; Start 177; Stop 201
taccgcaggtaaggttgtccacatg

SEQ ID NO: 253226 - DNA, 25 bp, Artificial
  probe
  misc_feature (1)..(25): SEQ ID NO: 1094; WAN024GO5_at; Start 355; Stop 379
ttcaaaattgaaaatcctgtctggc

SEQ ID NO: 253227 - DNA, 25 bp, Artificial
  probe
  misc_feature (1)..(25): SEQ ID NO: 1094; WAN024GO5_at; Start 63; Stop 87
tgacctgaggcaaactcgagctggg

SEQ ID NO: 253228 - DNA, 25 bp, Artificial
  probe
  misc_feature (1)..(25): SEQ ID NO: 1094; WAN024GO5_at; Start 444; Stop 468
gaccaaccaccatgcctttgaaacg

SEQ ID NO: 253229 - DNA, 25 bp, Artificial
  probe
  misc_feature (1)..(25): SEQ ID NO: 1094; WAN024GO5_at; Start 799; Stop 823
gcagagattatccatatgattgaca

SEQ ID NO: 253230 - DNA, 25 bp, Artificial
  probe
  misc_feature (1)..(25): SEQ ID NO: 1094; WAN024GO5_at; Start 94; Stop 118
tacctagcctttaccttccaagatg

SEQ ID NO: 253231 - DNA, 25 bp, Artificial
  probe
  misc_feature (1)..(25): SEQ ID NO: 1094; WAN024GO5_at; Start 131; Stop 155
ttgatgggaagctctgggatgccca

SEQ ID NO: 253232 - DNA, 25 bp, Artificial
  probe
  misc_feature (1)..(25): SEQ ID NO: 1094; WAN024GO5_at; Start 731; Stop 755
gtcatgtcatcctcagtcaccacgg

SEQ ID NO: 253233 - DNA, 25 bp, Artificial
  probe
  misc_feature (1)..(25): SEQ ID NO: 1094; WAN024GO5_at; Start 700; Stop 724
gatgataccaaggaagaagtcgttt

SEQ ID NO: 253234 - DNA, 25 bp, Artificial
  probe
  misc_feature (1)..(25): SEQ ID NO: 1094; WAN024GO5_at; Start 205; Stop 229
ggacgccgagaagtttataacaata

SEQ ID NO: 253235 - DNA, 25 bp, Artificial
  probe
  misc_feature (1)..(25): SEQ ID NO: 1094; WAN024GO5_at; Start 325; Stop 349
gaaattcgtgactacatgtcgcaaa

SEQ ID NO: 253236 - DNA, 25 bp, Artificial
  probe
  misc_feature (1)..(25): SEQ ID NO: 1094; WAN024GO5_at; Start 107; Stop 131
ccttccaagatgatagtggcgagat

SEQ ID NO: 253237 - DNA, 25 bp, Artificial
  probe
  misc_feature (1)..(25): SEQ ID NO: 1094; WAN024GO5_at; Start 907; Stop 931
gataatcgttccttctataaaccag

SEQ ID NO: 253238 - DNA, 25 bp, Artificial
  probe
  misc_feature (1)..(25): SEQ ID NO: 1094; WAN024GO5_at; Start 146; Stop 170
gggatgcccaacctcataacattga

SEQ ID NO: 253239 - DNA, 25 bp, Artificial
  probe
  misc_feature (1)..(25): SEQ ID NO: 1094; WAN024GO5_at; Start 78; Stop 102
tcgagctgggaaaaactacctagcc

SEQ ID NO: 253240 - DNA, 25 bp, Artificial
  probe
  misc_feature (1)..(25): SEQ ID NO: 1094; WAN024GO5_at; Start 836; Stop 860
gcatgatgatgatgtcaacagctct

SEQ ID NO: 253241 - DNA, 25 bp, Artificial
  probe
  misc_feature (1)..(25): SEQ ID NO: 1094; WAN024GO5_at; Start 222; Stop 246
taacaatacccctcaagtcaatcaa

SEQ ID NO: 253242 - DNA, 25 bp, Artificial
  probe
  misc_feature (1)..(25): SEQ ID NO: 2907; WAN024GO6_at; Start 2124; Stop 2148
tgacccagcgtggaagtttgaaacg

SEQ ID NO: 253243 - DNA, 25 bp, Artificial
  probe
  misc_feature (1)..(25): SEQ ID NO: 2907; WAN024GO6_at; Start 1944; Stop 1968
tggctccgattaaactagatgatgt

SEQ ID NO: 253244 - DNA, 25 bp, Artificial
  probe
  misc_feature (1)..(25): SEQ ID NO: 2907; WAN024GO6_at; Start 2117; Stop 2141
tacctcttgacccagcgtggaagtt

SEQ ID NO: 253245 - DNA, 25 bp, Artificial
  probe
  misc_feature (1)..(25): SEQ ID NO: 2907; WAN024GO6_at; Start 909; Stop 933
gaaagacgctaataccgagctcgta

SEQ ID NO: 253246 - DNA, 25 bp, Artificial
  probe
  misc_feature (1)..(25): SEQ ID NO: 2907; WAN024GO6_at; Start 1295; Stop 1319
tggttgtcttgcaggaagaagaagc

SEQ ID NO: 253247 - DNA, 25 bp, Artificial
  probe
  misc_feature (1)..(25): SEQ ID NO: 2907; WAN024GO6_at; Start 807; Stop 831
caagaaaattgatgatgtccgtgtc

SEQ ID NO: 253248 - DNA, 25 bp, Artificial
  probe
  misc_feature (1)..(25): SEQ ID NO: 2907; WAN024GO6_at; Start 1721; Stop 1745
ggagagcatctgagccaaaccatca

SEQ ID NO: 253249 - DNA, 25 bp, Artificial
  probe
  misc_feature (1)..(25): SEQ ID NO: 2907; WAN024GO6_at; Start 389; Stop 413
ttcttcaggatatcgagaaaaagac

SEQ ID NO: 253250 - DNA, 25 bp, Artificial
  probe
  misc_feature (1)..(25): SEQ ID NO: 2907; WAN024GO6_at; Start 604; Stop 628
gacaaactcatggagttcttgcctg

SEQ ID NO: 253251 - DNA, 25 bp, Artificial
  probe
  misc_feature (1)..(25): SEQ ID NO: 2907; WAN024GO6_at; Start 2295; Stop 2319
tagaagagaacgaccaaactctgct

SEQ ID NO: 253252 - DNA, 25 bp, Artificial
  probe
  misc_feature (1)..(25): SEQ ID NO: 2907; WAN024GO6_at; Start 296; Stop 320
tcgaaatgcacggtaataacggttc

SEQ ID NO: 253253 - DNA, 25 bp, Artificial
  probe
  misc_feature (1)..(25): SEQ ID NO: 2907; WAN024GO6_at; Start 1772; Stop 1796
ctttatgtggaagtactggatcagt

SEQ ID NO: 253254 - DNA, 25 bp, Artificial
  probe
  misc_feature (1)..(25): SEQ ID NO: 2907; WAN024GO6_at; Start 1743; Stop 1767
tcacaaactttgaaacgaatgaaga

SEQ ID NO: 253255 - DNA, 25 bp, Artificial
  probe
  misc_feature (1)..(25): SEQ ID NO: 2907; WAN024GO6_at; Start 511; Stop 535
tcggctggttatgccacagatattc

SEQ ID NO: 253256 - DNA, 25 bp, Artificial
  probe
  misc_feature (1)..(25): SEQ ID NO: 2907; WAN024GO6_at; Start 995; Stop 1019
ttgacaatttcacacctcgtcaggt

SEQ ID NO: 253257 - DNA, 25 bp, Artificial
  probe
  misc_feature (1)..(25): SEQ ID NO: 2907; WAN024GO6_at; Start 1081; Stop 1105
tcccgctttgacaaggaaaaggctg

SEQ ID NO: 253258 - DNA, 25 bp, Artificial
  probe
  misc_feature (1)..(25): SEQ ID NO: 2907; WAN024GO6_at; Start 1584; Stop 1608
ttggcaagcgtgatgatgaccgttt

SEQ ID NO: 253259 - DNA, 25 bp, Artificial
  probe
  misc_feature (1)..(25): SEQ ID NO: 2907; WAN024GO6_at; Start 1640; Stop 1664
cacctcttgatgttcacaagtcttg

SEQ ID NO: 253260 - DNA, 25 bp, Artificial
  probe
  misc_feature (1)..(25): SEQ ID NO: 2907; WAN024GO6_at; Start 2268; Stop 2292
ttgtaggtgatctcttcagtacaga

SEQ ID NO: 253261 - DNA, 25 bp, Artificial
  probe
  misc_feature (1)..(25): SEQ ID NO: 2907; WAN024GO6_at; Start 927; Stop 951
gctcgtactcaactatctcttcaaa

SEQ ID NO: 253262 - DNA, 25 bp, Artificial
  probe
  misc_feature (1)..(25): SEQ ID NO: 2907; WAN024GO6_at; Start 1462; Stop 1486
gcaattgagattgatacagctagtc

SEQ ID NO: 253263 - DNA, 25 bp, Artificial
  probe
  misc_feature (1)..(25): SEQ ID NO: 2907; WAN024GO6_at; Start 1206; Stop 1230
ggaaaacctcaaagttagctatgat

SEQ ID NO: 253264 - DNA, 25 bp, Artificial
  probe
  misc_feature (1)..(25): SEQ ID NO: 2907; WAN024GO6_at; Start 1654; Stop 1678
cacaagtcttggaaatgtcatctac

SEQ ID NO: 253265 - DNA, 25 bp, Artificial
  probe
  misc_feature (1)..(25): SEQ ID NO: 2907; WAN024GO6_at; Start 834; Stop 858
taacaaggtggcaggtattgctgag

SEQ ID NO: 253266 - DNA, 25 bp, Artificial
  probe
  misc_feature (1)..(25): SEQ ID NO: 2907; WAN024GO6_at; Start 822; Stop 846
tgtccgtgtcaataacaaggtggca

SEQ ID NO: 253267 - DNA, 25 bp, Artificial
  probe
  misc_feature (1)..(25): SEQ ID NO: 2907; WAN024GO6_at; Start 1400; Stop 1424
ttcgtgaggtcaagaagaaatttgc

SEQ ID NO: 253268 - DNA, 25 bp, Artificial
  probe
  misc_feature (1)..(25): SEQ ID NO: 2907; WAN024GO6_at; Start 968; Stop 992
tcaactacaactttaacatggtggc

SEQ ID NO: 253269 - DNA, 25 bp, Artificial
  probe
  misc_feature (1)..(25): SEQ ID NO: 2907; WAN024GO6_at; Start 1524; Stop 1548
ggcaggttacatcaagcgtaccagt

SEQ ID NO: 253270 - DNA, 25 bp, Artificial
  probe
  misc_feature (1)..(25): SEQ ID NO: 2907; WAN024GO6_at; Start 2037; Stop 2061
aggcagcaggtgtcaaggctatgaa

SEQ ID NO: 253271 - DNA, 25 bp, Artificial
  probe
  misc_feature (1)..(25): SEQ ID NO: 2907; WAN024GO6_at; Start 2064; Stop 2088
tgaaagaagatgatgtcctccaatc

SEQ ID NO: 253272 - DNA, 25 bp, Artificial
  probe
  misc_feature (1)..(25): SEQ ID NO: 2907; WAN024GO6_at; Start 2446; Stop 2470
tcaggaagtagttactgaagataaa

SEQ ID NO: 253273 - DNA, 25 bp, Artificial
  probe
  misc_feature (1)..(25): SEQ ID NO: 2907; WAN024GO6_at; Start 1937; Stop 1961
gtagcagtggctccgattaaactag

SEQ ID NO: 253274 - DNA, 25 bp, Artificial
  probe
  misc_feature (1)..(25): SEQ ID NO: 2907; WAN024GO6_at; Start 1321; Stop 1345
gagcttcgtgagaagattgctatgc

SEQ ID NO: 253275 - DNA, 25 bp, Artificial
  probe
  misc_feature (1)..(25): SEQ ID NO: 2907; WAN024GO6_at; Start 2306; Stop 2330
gaccaaactctgcttgttcaatcca

SEQ ID NO: 253276 - DNA, 25 bp, Artificial
  probe
  misc_feature (1)..(25): SEQ ID NO: 1953; WAN024GO7_at; Start 294; Stop 318
catgcttgtagatgggcatggaaac

SEQ ID NO: 253277 - DNA, 25 bp, Artificial
  probe
  misc_feature (1)..(25): SEQ ID NO: 1953; WAN024GO7_at; Start 414; Stop 438
gaatacggttgatttcgttgataac

SEQ ID NO: 253278 - DNA, 25 bp, Artificial
  probe
  misc_feature (1)..(25): SEQ ID NO: 1953; WAN024GO7_at; Start 2016; Stop 2040
tcaatcagccgttcgcggcatgagt

SEQ ID NO: 253279 - DNA, 25 bp, Artificial
  probe
  misc_feature (1)..(25): SEQ ID NO: 1953; WAN024GO7_at; Start 1673; Stop 1697
caaataaaggacgtgtctatcgtct

SEQ ID NO: 253280 - DNA, 25 bp, Artificial
  probe
  misc_feature (1)..(25): SEQ ID NO: 1953; WAN024GO7_at; Start 1876; Stop 1900
aaggaatttgctaacattcgtcaaa

SEQ ID NO: 253281 - DNA, 25 bp, Artificial
  probe
  misc_feature (1)..(25): SEQ ID NO: 1953; WAN024GO7_at; Start 127; Stop 151
caccgtcggattctctatggaatga

SEQ ID NO: 253282 - DNA, 25 bp, Artificial
  probe
  misc_feature (1)..(25): SEQ ID NO: 1953; WAN024GO7_at; Start 464; Stop 488
tggtcttgccagctcgttttccaaa

SEQ ID NO: 253283 - DNA, 25 bp, Artificial
  probe
  misc_feature (1)..(25): SEQ ID NO: 1953; WAN024GO7_at; Start 2411; Stop 2435
ttgcagcggcagaaaaagaagaagt

SEQ ID NO: 253284 - DNA, 25 bp, Artificial
  probe
  misc_feature (1)..(25): SEQ ID NO: 1953; WAN024GO7_at; Start 2254; Stop 2278
ttgactgtgaaaggtgatgaagact

SEQ ID NO: 253285 - DNA, 25 bp, Artificial
  probe
  misc_feature (1)..(25): SEQ ID NO: 1953; WAN024GO7_at; Start 2037; Stop 2061
gagtcgtatcgccacaggtgtgaaa

SEQ ID NO: 253286 - DNA, 25 bp, Artificial
  probe
  misc_feature (1)..(25): SEQ ID NO: 1953; WAN024GO7_at; Start 2023; Stop 2047
gccgttcgcggcatgagtcgtatcg

SEQ ID NO: 253287 - DNA, 25 bp, Artificial
  probe
  misc_feature (1)..(25): SEQ ID NO: 1953; WAN024GO7_at; Start 693; Stop 717
tgaaacaggtaaaggttctattgtc

SEQ ID NO: 253288 - DNA, 25 bp, Artificial
  probe
  misc_feature (1)..(25): SEQ ID NO: 1953; WAN024GO7_at; Start 314; Stop 338
gaaactttggttccatggatggaga

SEQ ID NO: 253289 - DNA, 25 bp, Artificial
  probe
  misc_feature (1)..(25): SEQ ID NO: 1953; WAN024GO7_at; Start 2199; Stop 2223
taaagggatgaagacggctaatgtg

SEQ ID NO: 253290 - DNA, 25 bp, Artificial
  probe
  misc_feature (1)..(25): SEQ ID NO: 1953; WAN024GO7_at; Start 324; Stop 348
ttccatggatggagatggtgctgcc

SEQ ID NO: 253291 - DNA, 25 bp, Artificial
  probe
  misc_feature (1)..(25): SEQ ID NO: 1953; WAN024GO7_at; Start 112; Stop 136
ggcttgaaacctgttcaccgtcgga

SEQ ID NO: 253292 - DNA, 25 bp, Artificial
  probe
  misc_feature (1)..(25): SEQ ID NO: 1953; WAN024GO7_at; Start 724; Stop 748
tctcgtactgaaattgaagaaacta

SEQ ID NO: 253293 - DNA, 25 bp, Artificial
  probe
  misc_feature (1)..(25): SEQ ID NO: 1953; WAN024GO7_at; Start 99; Stop 123
tgatgttcgagatggcttgaaacct

SEQ ID NO: 253294 - DNA, 25 bp, Artificial
  probe
  misc_feature (1)..(25): SEQ ID NO: 1953; WAN024GO7_at; Start 2109; Stop 2133
tacagatcaagacgaggttcttatc

SEQ ID NO: 253295 - DNA, 25 bp, Artificial
  probe
  misc_feature (1)..(25): SEQ ID NO: 1953; WAN024GO7_at; Start 711; Stop 735
tattgtccttcgttctcgtactgaa

SEQ ID NO: 253296 - DNA, 25 bp, Artificial
  probe
  misc_feature (1)..(25): SEQ ID NO: 1953; WAN024GO7_at; Start 2230; Stop 2254
aaaaatggtcctctatcaggtctct

SEQ ID NO: 253297 - DNA, 25 bp, Artificial
  probe
  misc_feature (1)..(25): SEQ ID NO: 1953; WAN024GO7_at; Start 957; Stop 981
gatgacccagatgcaaaccaacttt

SEQ ID NO: 253298 - DNA, 25 bp, Artificial
  probe
  misc_feature (1)..(25): SEQ ID NO: 1953; WAN024GO7_at; Start 2403; Stop 2427
tacaacggttgcagcggcagaaaaa

SEQ ID NO: 253299 - DNA, 25 bp, Artificial
  probe
  misc_feature (1)..(25): SEQ ID NO: 1953; WAN024GO7_at; Start 739; Stop 763
gaagaaactaagactggccgtgagc

SEQ ID NO: 253300 - DNA, 25 bp, Artificial
  probe
  misc_feature (1)..(25): SEQ ID NO: 1953; WAN024GO7_at; Start 928; Stop 952
gccaatgttatcctcaataacctct

SEQ ID NO: 253301 - DNA, 25 bp, Artificial
  probe
  misc_feature (1)..(25): SEQ ID NO: 1953; WAN024GO7_at; Start 302; Stop 326
tagatgggcatggaaactttggttc

SEQ ID NO: 253302 - DNA, 25 bp, Artificial
  probe
  misc_feature (1)..(25): SEQ ID NO: 1953; WAN024GO7_at; Start 749; Stop 773
agactggccgtgagcgcatcgttgt

SEQ ID NO: 253303 - DNA, 25 bp, Artificial
  probe
  misc_feature (1)..(25): SEQ ID NO: 1953; WAN024GO7_at; Start 2243; Stop 2267
tatcaggtctcttgactgtgaaagg

SEQ ID NO: 253304 - DNA, 25 bp, Artificial
  probe
  misc_feature (1)..(25): SEQ ID NO: 1953; WAN024GO7_at; Start 2391; Stop 2415
aattgtgacctttacaacggttgca

SEQ ID NO: 253305 - DNA, 25 bp, Artificial
  probe
  misc_feature (1)..(25): SEQ ID NO: 1953; WAN024GO7_at; Start 503; Stop 527
gagcaactggtattgccgttgggat

SEQ ID NO: 253306 - DNA, 25 bp, Artificial
  probe
  misc_feature (1)..(25): SEQ ID NO: 1953; WAN024GO7_at; Start 160; Stop 184
ggtgttactccagacaaaccccata

SEQ ID NO: 253307 - DNA, 25 bp, Artificial
  probe
  misc_feature (1)..(25): SEQ ID NO: 1953; WAN024GO7_at; Start 2268; Stop 2292
tgatgaagacttgatgattatcact

SEQ ID NO: 253308 - DNA, 25 bp, Artificial
  probe
  misc_feature (1)..(25): SEQ ID NO: 1953; WAN024GO7_at; Start 2095; Stop 2119
ggtgctagtgtgattacagatcaag

SEQ ID NO: 253309 - DNA, 25 bp, Artificial
  probe
  misc_feature (1)..(25): SEQ ID NO: 1953; WAN024GO7_at; Start 1950; Stop 1974
cttgttgacggaagaagatacggat

SEQ ID NO: 253310 - DNA, 25 bp, Artificial
  probe
  misc_feature (1)..(25): SEQ ID NO: 2631; WAN024GO8_at; Start 33; Stop 57
gccagaggcatgttggagatgtttt

SEQ ID NO: 253311 - DNA, 25 bp, Artificial
  probe
  misc_feature (1)..(25): SEQ ID NO: 2631; WAN024GO8_at; Start 226; Stop 250
tcccgtctcaaatcatcaaagaaga

SEQ ID NO: 253312 - DNA, 25 bp, Artificial
  probe
  misc_feature (1)..(25): SEQ ID NO: 2631; WAN024GO8_at; Start 159; Stop 183
gaaaccaactgatagggagttaaga

SEQ ID NO: 253313 - DNA, 25 bp, Artificial
  probe
  misc_feature (1)..(25): SEQ ID NO: 2631; WAN024GO8_at; Start 48; Stop 72
gagatgtttttgtgccttgaccaga

SEQ ID NO: 253314 - DNA, 25 bp, Artificial
  probe
  misc_feature (1)..(25): SEQ ID NO: 2631; WAN024GO8_at; Start 215; Stop 239
taatctgttcttcccgtctcaaatc

SEQ ID NO: 253315 - DNA, 25 bp, Artificial
  probe
  misc_feature (1)..(25): SEQ ID NO: 2631; WAN024GO8_at; Start 56; Stop 80
tttgtgccttgaccagaataccacc

SEQ ID NO: 253316 - DNA, 25 bp, Artificial
  probe
  misc_feature (1)..(25): SEQ ID NO: 2631; WAN024GO8_at; Start 3; Stop 27
ggtacgacggtttaataattcatca

SEQ ID NO: 253317 - DNA, 25 bp, Artificial
  probe
  misc_feature (1)..(25): SEQ ID NO: 2631; WAN024GO8_at; Start 18; Stop 42
taattcatcaatattgccagaggca

SEQ ID NO: 253318 - DNA, 25 bp, Artificial
  probe
  misc_feature (1)..(25): SEQ ID NO: 2631; WAN024GO8_at; Start 116; Stop 140
tcttgctgatatggtcggcactctt

SEQ ID NO: 253319 - DNA, 25 bp, Artificial
  probe
  misc_feature (1)..(25): SEQ ID NO: 2631; WAN024GO8_at; Start 164; Stop 188
caactgatagggagttaagaagggc

SEQ ID NO: 253320 - DNA, 25 bp, Artificial
  probe
  misc_feature (1)..(25): SEQ ID NO: 2631; WAN024GO8_at; Start 123; Stop 147
gatatggtcggcactcttttggata

SEQ ID NO: 253321 - DNA, 25 bp, Artificial
  probe
  misc_feature (1)..(25): SEQ ID NO: 2631; WAN024GO8_at; Start 188; Stop 212
ctgatagggtacttggtcctgcaac

SEQ ID NO: 253322 - DNA, 25 bp, Artificial
  probe
  misc_feature (1)..(25): SEQ ID NO: 2631; WAN024GO8_at; Start 146; Stop 170
tattaagggtcttgaaaccaactga

SEQ ID NO: 253323 - DNA, 25 bp, Artificial
  probe
  misc_feature (1)..(25): SEQ ID NO: 2631; WAN024GO8_at; Start 152; Stop 176
gggtcttgaaaccaactgataggga

SEQ ID NO: 253324 - DNA, 25 bp, Artificial
  probe
  misc_feature (1)..(25): SEQ ID NO: 2631; WAN024GO8_at; Start 80; Stop 104
caaacttgccaaactcggtcttgac

SEQ ID NO: 253325 - DNA, 25 bp, Artificial
  probe
  misc_feature (1)..(25): SEQ ID NO: 2631; WAN024GO8_at; Start 236; Stop 260
aatcatcaaagaagaccggattgcg

SEQ ID NO: 253326 - DNA, 25 bp, Artificial
  probe
  misc_feature (1)..(25): SEQ ID NO: 2631; WAN024GO8_at; Start 113; Stop 137
gagtcttgctgatatggtcggcact

SEQ ID NO: 253327 - DNA, 25 bp, Artificial
  probe
  misc_feature (1)..(25): SEQ ID NO: 2631; WAN024GO8_at; Start 26; Stop 50
caatattgccagaggcatgttggag

SEQ ID NO: 253328 - DNA, 25 bp, Artificial
  probe
  misc_feature (1)..(25): SEQ ID NO: 2631; WAN024GO8_at; Start 73; Stop 97
ataccaccaaacttgccaaactcgg

SEQ ID NO: 253329 - DNA, 25 bp, Artificial
  probe
  misc_feature (1)..(25): SEQ ID NO: 2631; WAN024GO8_at; Start 110; Stop 134
caagagtcttgctgatatggtcggc

SEQ ID NO: 253330 - DNA, 25 bp, Artificial
  probe
  misc_feature (1)..(25): SEQ ID NO: 2631; WAN024GO8_at; Start 91; Stop 115
aactcggtcttgacactggcaagag

SEQ ID NO: 253331 - DNA, 25 bp, Artificial
  probe
  misc_feature (1)..(25): SEQ ID NO: 2631; WAN024GO8_at; Start 65; Stop 89
tgaccagaataccaccaaacttgcc

SEQ ID NO: 253332 - DNA, 25 bp, Artificial
  probe
  misc_feature (1)..(25): SEQ ID NO: 2631; WAN024GO8_at; Start 23; Stop 47
catcaatattgccagaggcatgttg

SEQ ID NO: 253333 - DNA, 25 bp, Artificial
  probe
  misc_feature (1)..(25): SEQ ID NO: 2631; WAN024GO8_at; Start 132; Stop 156
ggcactcttttggatattaagggtc

SEQ ID NO: 253334 - DNA, 25 bp, Artificial
  probe
  misc_feature (1)..(25): SEQ ID NO: 2631; WAN024GO8_at; Start 178; Stop 202
ttaagaagggctgatagggtacttg

SEQ ID NO: 253335 - DNA, 25 bp, Artificial
  probe
  misc_feature (1)..(25): SEQ ID NO: 2631; WAN024GO8_at; Start 220; Stop 244
tgttcttcccgtctcaaatcatcaa

SEQ ID NO: 253336 - DNA, 25 bp, Artificial
  probe
  misc_feature (1)..(25): SEQ ID NO: 2631; WAN024GO8_at; Start 231; Stop 255
tctcaaatcatcaaagaagaccgga

SEQ ID NO: 253337 - DNA, 25 bp, Artificial
  probe
  misc_feature (1)..(25): SEQ ID NO: 2631; WAN024GO8_at; Start 127; Stop 151
tggtcggcactcttttggatattaa

SEQ ID NO: 253338 - DNA, 25 bp, Artificial
  probe
  misc_feature (1)..(25): SEQ ID NO: 2631; WAN024GO8_at; Start 53; Stop 77
gtttttgtgccttgaccagaatacc

SEQ ID NO: 253339 - DNA, 25 bp, Artificial
  probe
  misc_feature (1)..(25): SEQ ID NO: 2631; WAN024GO8_at; Start 155; Stop 179
tcttgaaaccaactgatagggagtt

SEQ ID NO: 253340 - DNA, 25 bp, Artificial
  probe
  misc_feature (1)..(25): SEQ ID NO: 2631; WAN024GO8_at; Start 89; Stop 113
caaactcggtcttgacactggcaag

SEQ ID NO: 253341 - DNA, 25 bp, Artificial
  probe
  misc_feature (1)..(25): SEQ ID NO: 2631; WAN024GO8_at; Start 95; Stop 119
cggtcttgacactggcaagagtctt

SEQ ID NO: 253342 - DNA, 25 bp, Artificial
  probe
  misc_feature (1)..(25): SEQ ID NO: 2631; WAN024GO8_at; Start 85; Stop 109
ttgccaaactcggtcttgacactgg

SEQ ID NO: 253343 - DNA, 25 bp, Artificial
  probe
  misc_feature (1)..(25): SEQ ID NO: 2631; WAN024GO8_at; Start 186; Stop 210
ggctgatagggtacttggtcctgca

SEQ ID NO: 253344 - DNA, 25 bp, Artificial
  probe
  misc_feature (1)..(25): SEQ ID NO: 2589; WAN024GO9_at; Start 158; Stop 182
tagcctgcaatttcagacaaacgtg

SEQ ID NO: 253345 - DNA, 25 bp, Artificial
  probe
  misc_feature (1)..(25): SEQ ID NO: 2589; WAN024GO9_at; Start 126; Stop 150
gaactgtctttttctcgatatcctg

SEQ ID NO: 253346 - DNA, 25 bp, Artificial
  probe
  misc_feature (1)..(25): SEQ ID NO: 2589; WAN024GO9_at; Start 21; Stop 45
cataaccagccgaaatcccagtcga

SEQ ID NO: 253347 - DNA, 25 bp, Artificial
  probe
  misc_feature (1)..(25): SEQ ID NO: 2589; WAN024GO9_at; Start 228; Stop 252
cgttattaccgtgcatttcaactag

SEQ ID NO: 253348 - DNA, 25 bp, Artificial
  probe
  misc_feature (1)..(25): SEQ ID NO: 2589; WAN024GO9_at; Start 224; Stop 248
gaaccgttattaccgtgcatttcaa

SEQ ID NO: 253349 - DNA, 25 bp, Artificial
  probe
  misc_feature (1)..(25): SEQ ID NO: 2589; WAN024GO9_at; Start 96; Stop 120
tctccgtatcgtcaaagttccatgc

SEQ ID NO: 253350 - DNA, 25 bp, Artificial
  probe
  misc_feature (1)..(25): SEQ ID NO: 2589; WAN024GO9_at; Start 38; Stop 62
ccagtcgaaccattgaccaagaggt

SEQ ID NO: 253351 - DNA, 25 bp, Artificial
  probe
  misc_feature (1)..(25): SEQ ID NO: 2589; WAN024GO9_at; Start 70; Stop 94
ggctgctggcaagaccgttggttct

SEQ ID NO: 253352 - DNA, 25 bp, Artificial
  probe
  misc_feature (1)..(25): SEQ ID NO: 2589; WAN024GO9_at; Start 29; Stop 53
gccgaaatcccagtcgaaccattga

SEQ ID NO: 253353 - DNA, 25 bp, Artificial
  probe
  misc_feature (1)..(25): SEQ ID NO: 2589; WAN024GO9_at; Start 164; Stop 188
gcaatttcagacaaacgtgcctcag

SEQ ID NO: 253354 - DNA, 25 bp, Artificial
  probe
  misc_feature (1)..(25): SEQ ID NO: 2589; WAN024GO9_at; Start 64; Stop 88
tggaaaggctgctggcaagaccgtt

SEQ ID NO: 253355 - DNA, 25 bp, Artificial
  probe
  misc_feature (1)..(25): SEQ ID NO: 2589; WAN024GO9_at; Start 4; Stop 28
gggaggaatgtctgtggcataacca

SEQ ID NO: 253356 - DNA, 25 bp, Artificial
  probe
  misc_feature (1)..(25): SEQ ID NO: 2589; WAN024GO9_at; Start 52; Stop 76
gaccaagaggtttggaaaggctgct

SEQ ID NO: 253357 - DNA, 25 bp, Artificial
  probe
  misc_feature (1)..(25): SEQ ID NO: 2589; WAN024GO9_at; Start 146; Stop 170
tcctgaagaaggtagcctgcaattt

SEQ ID NO: 253358 - DNA, 25 bp, Artificial
  probe
  misc_feature (1)..(25): SEQ ID NO: 2589; WAN024GO9_at; Start 44; Stop 68
gaaccattgaccaagaggtttggaa

SEQ ID NO: 253359 - DNA, 25 bp, Artificial
  probe
  misc_feature (1)..(25): SEQ ID NO: 2589; WAN024GO9_at; Start 153; Stop 177
gaaggtagcctgcaatttcagacaa

SEQ ID NO: 253360 - DNA, 25 bp, Artificial
  probe
  misc_feature (1)..(25): SEQ ID NO: 2589; WAN024GO9_at; Start 85; Stop 109
cgttggttctttctccgtatcgtca

SEQ ID NO: 253361 - DNA, 25 bp, Artificial
  probe
  misc_feature (1)..(25): SEQ ID NO: 2589; WAN024GO9_at; Start 170; Stop 194
tcagacaaacgtgcctcagtataac

SEQ ID NO: 253362 - DNA, 25 bp, Artificial
  probe
  misc_feature (1)..(25): SEQ ID NO: 2589; WAN024GO9_at; Start 14; Stop 38
tctgtggcataaccagccgaaatcc

SEQ ID NO: 253363 - DNA, 25 bp, Artificial
  probe
  misc_feature (1)..(25): SEQ ID NO: 2589; WAN024GO9_at; Start 102; Stop 126
tatcgtcaaagttccatgcaaaagg

SEQ ID NO: 253364 - DNA, 25 bp, Artificial
  probe
  misc_feature (1)..(25): SEQ ID NO: 2589; WAN024GO9_at; Start 9; Stop 33
gaatgtctgtggcataaccagccga

SEQ ID NO: 253365 - DNA, 25 bp, Artificial
  probe
  misc_feature (1)..(25): SEQ ID NO: 2589; WAN024GO9_at; Start 32; Stop 56
gaaatcccagtcgaaccattgacca

SEQ ID NO: 253366 - DNA, 25 bp, Artificial
  probe
  misc_feature (1)..(25): SEQ ID NO: 2589; WAN024GO9_at; Start 76; Stop 100
tggcaagaccgttggttctttctcc

SEQ ID NO: 253367 - DNA, 25 bp, Artificial
  probe
  misc_feature (1)..(25): SEQ ID NO: 2589; WAN024GO9_at; Start 185; Stop 209
tcagtataacgcatagccgcaggag

SEQ ID NO: 253368 - DNA, 25 bp, Artificial
  probe
  misc_feature (1)..(25): SEQ ID NO: 2589; WAN024GO9_at; Start 142; Stop 166
gatatcctgaagaaggtagcctgca

SEQ ID NO: 253369 - DNA, 25 bp, Artificial
  probe
  misc_feature (1)..(25): SEQ ID NO: 2589; WAN024GO9_at; Start 112; Stop 136
gttccatgcaaaaggaactgtcttt

SEQ ID NO: 253370 - DNA, 25 bp, Artificial
  probe
  misc_feature (1)..(25): SEQ ID NO: 2589; WAN024GO9_at; Start 195; Stop 219
gcatagccgcaggaggatctccgtc

SEQ ID NO: 253371 - DNA, 25 bp, Artificial
  probe
  misc_feature (1)..(25): SEQ ID NO: 2589; WAN024GO9_at; Start 206; Stop 230
ggaggatctccgtccatagaaccgt

SEQ ID NO: 253372 - DNA, 25 bp, Artificial
  probe
  misc_feature (1)..(25): SEQ ID NO: 2589; WAN024GO9_at; Start 218; Stop 242
tccatagaaccgttattaccgtgca

SEQ ID NO: 253373 - DNA, 25 bp, Artificial
  probe
  misc_feature (1)..(25): SEQ ID NO: 2589; WAN024GO9_at; Start 198; Stop 222
tagccgcaggaggatctccgtccat

SEQ ID NO: 253374 - DNA, 25 bp, Artificial
  probe
  misc_feature (1)..(25): SEQ ID NO: 2589; WAN024GO9_at; Start 138; Stop 162
tctcgatatcctgaagaaggtagcc

SEQ ID NO: 253375 - DNA, 25 bp, Artificial
  probe
  misc_feature (1)..(25): SEQ ID NO: 2589; WAN024GO9_at; Start 188; Stop 212
gtataacgcatagccgcaggaggat

SEQ ID NO: 253376 - DNA, 25 bp, Artificial
  probe
  misc_feature (1)..(25): SEQ ID NO: 2589; WAN024GO9_at; Start 209; Stop 233
ggatctccgtccatagaaccgttat

SEQ ID NO: 253377 - DNA, 25 bp, Artificial
  probe
  misc_feature (1)..(25): SEQ ID NO: 2589; WAN024GO9_at; Start 177; Stop 201
aacgtgcctcagtataacgcatagc

SEQ ID NO: 253378 - DNA, 25 bp, Artificial
  probe
  misc_feature (1)..(25): SEQ ID NO: 4921; WAN024GOA_at; Start 77; Stop 101
ccttttgttgggtattcagtagcga

SEQ ID NO: 253379 - DNA, 25 bp, Artificial
  probe
  misc_feature (1)..(25): SEQ ID NO: 4921; WAN024GOA_at; Start 119; Stop 143
cctttttctgtgataataagaacct

SEQ ID NO: 253380 - DNA, 25 bp, Artificial
  probe
  misc_feature (1)..(25): SEQ ID NO: 4921; WAN024GOA_at; Start 163; Stop 187
gctggcaccaacaactgtgtctcct

SEQ ID NO: 253381 - DNA, 25 bp, Artificial
  probe
  misc_feature (1)..(25): SEQ ID NO: 4921; WAN024GOA_at; Start 5; Stop 29
acagtcataagaccggccagcaagc

SEQ ID NO: 253382 - DNA, 25 bp, Artificial
  probe
  misc_feature (1)..(25): SEQ ID NO: 4921; WAN024GOA_at; Start 226; Stop 250
gctcataccacgaacggctgattga

SEQ ID NO: 253383 - DNA, 25 bp, Artificial
  probe
  misc_feature (1)..(25): SEQ ID NO: 4921; WAN024GOA_at; Start 85; Stop 109
tgggtattcagtagcgactgtacgc

SEQ ID NO: 253384 - DNA, 25 bp, Artificial
  probe
  misc_feature (1)..(25): SEQ ID NO: 4921; WAN024GOA_at; Start 195; Stop 219
ggttaacacctttcacaccagtggc

SEQ ID NO: 253385 - DNA, 25 bp, Artificial
  probe
  misc_feature (1)..(25): SEQ ID NO: 4921; WAN024GOA_at; Start 20; Stop 44
gccagcaagccatttttttcggtaa

SEQ ID NO: 253386 - DNA, 25 bp, Artificial
  probe
  misc_feature (1)..(25): SEQ ID NO: 4921; WAN024GOA_at; Start 180; Stop 204
tgtctccttcacgaaggttaacacc

SEQ ID NO: 253387 - DNA, 25 bp, Artificial
  probe
  misc_feature (1)..(25): SEQ ID NO: 4921; WAN024GOA_at; Start 71; Stop 95
ccacgaccttttgttgggtattcag

SEQ ID NO: 253388 - DNA, 25 bp, Artificial
  probe
  misc_feature (1)..(25): SEQ ID NO: 4921; WAN024GOA_at; Start 127; Stop 151
tgtgataataagaacctcatcttga

SEQ ID NO: 253389 - DNA, 25 bp, Artificial
  probe
  misc_feature (1)..(25): SEQ ID NO: 4921; WAN024GOA_at; Start 107; Stop 131
cgcttaccatatcctttttctgtga

SEQ ID NO: 253390 - DNA, 25 bp, Artificial
  probe
  misc_feature (1)..(25): SEQ ID NO: 4921; WAN024GOA_at; Start 205; Stop 229
tttcacaccagtggcgatacggctc

SEQ ID NO: 253391 - DNA, 25 bp, Artificial
  probe
  misc_feature (1)..(25): SEQ ID NO: 4921; WAN024GOA_at; Start 89; Stop 113
tattcagtagcgactgtacgcttac

SEQ ID NO: 253392 - DNA, 25 bp, Artificial
  probe
  misc_feature (1)..(25): SEQ ID NO: 4921; WAN024GOA_at; Start 216; Stop 240
tggcgatacggctcataccacgaac

SEQ ID NO: 253393 - DNA, 25 bp, Artificial
  probe
  misc_feature (1)..(25): SEQ ID NO: 4921; WAN024GOA_at; Start 160; Stop 184
caagctggcaccaacaactgtgtct

SEQ ID NO: 253394 - DNA, 25 bp, Artificial
  probe
  misc_feature (1)..(25): SEQ ID NO: 4921; WAN024GOA_at; Start 224; Stop 248
cggctcataccacgaacggctgatt

SEQ ID NO: 253395 - DNA, 25 bp, Artificial
  probe
  misc_feature (1)..(25): SEQ ID NO: 4921; WAN024GOA_at; Start 221; Stop 245
atacggctcataccacgaacggctg

SEQ ID NO: 253396 - DNA, 25 bp, Artificial
  probe
  misc_feature (1)..(25): SEQ ID NO: 4921; WAN024GOA_at; Start 198; Stop 222
taacacctttcacaccagtggcgat

SEQ ID NO: 253397 - DNA, 25 bp, Artificial
  probe
  misc_feature (1)..(25): SEQ ID NO: 4921; WAN024GOA_at; Start 156; Stop 180
taatcaagctggcaccaacaactgt

SEQ ID NO: 253398 - DNA, 25 bp, Artificial
  probe
  misc_feature (1)..(25): SEQ ID NO: 4921; WAN024GOA_at; Start 209; Stop 233
acaccagtggcgatacggctcatac

SEQ ID NO: 253399 - DNA, 25 bp, Artificial
  probe
  misc_feature (1)..(25): SEQ ID NO: 4921; WAN024GOA_at; Start 40; Stop 64
ggtaattttagctgtctgcattccc

SEQ ID NO: 253400 - DNA, 25 bp, Artificial
  probe
  misc_feature (1)..(25): SEQ ID NO: 4921; WAN024GOA_at; Start 135; Stop 159
taagaacctcatcttgatcagtaat

SEQ ID NO: 253401 - DNA, 25 bp, Artificial
  probe
  misc_feature (1)..(25): SEQ ID NO: 4921; WAN024GOA_at; Start 10; Stop 34
cataagaccggccagcaagccattt

SEQ ID NO: 253402 - DNA, 25 bp, Artificial
  probe
  misc_feature (1)..(25): SEQ ID NO: 4921; WAN024GOA_at; Start 80; Stop 104
tttgttgggtattcagtagcgactg

SEQ ID NO: 253403 - DNA, 25 bp, Artificial
  probe
  misc_feature (1)..(25): SEQ ID NO: 4921; WAN024GOA_at; Start 98; Stop 122
gcgactgtacgcttaccatatcctt

SEQ ID NO: 253404 - DNA, 25 bp, Artificial
  probe
  misc_feature (1)..(25): SEQ ID NO: 4921; WAN024GOA_at; Start 1; Stop 25
ttgaacagtcataagaccggccagc

SEQ ID NO: 253405 - DNA, 25 bp, Artificial
  probe
  misc_feature (1)..(25): SEQ ID NO: 4921; WAN024GOA_at; Start 35; Stop 59
ttttcggtaattttagctgtctgca

SEQ ID NO: 253406 - DNA, 25 bp, Artificial
  probe
  misc_feature (1)..(25): SEQ ID NO: 4921; WAN024GOA_at; Start 150; Stop 174
gatcagtaatcaagctggcaccaac

SEQ ID NO: 253407 - DNA, 25 bp, Artificial
  probe
  misc_feature (1)..(25): SEQ ID NO: 4921; WAN024GOA_at; Start 47; Stop 71
ttagctgtctgcattcccttaccac

SEQ ID NO: 253408 - DNA, 25 bp, Artificial
  probe
  misc_feature (1)..(25): SEQ ID NO: 4921; WAN024GOA_at; Start 93; Stop 117
cagtagcgactgtacgcttaccata

SEQ ID NO: 253409 - DNA, 25 bp, Artificial
  probe
  misc_feature (1)..(25): SEQ ID NO: 4921; WAN024GOA_at; Start 172; Stop 196
aacaactgtgtctccttcacgaagg

SEQ ID NO: 253410 - DNA, 25 bp, Artificial
  probe
  misc_feature (1)..(25): SEQ ID NO: 4921; WAN024GOA_at; Start 13; Stop 37
aagaccggccagcaagccatttttt

SEQ ID NO: 253411 - DNA, 25 bp, Artificial
  probe
  misc_feature (1)..(25): SEQ ID NO: 4921; WAN024GOA_at; Start 174; Stop 198
caactgtgtctccttcacgaaggtt

SEQ ID NO: 253412 - DNA, 25 bp, Artificial
  probe
  misc_feature (1)..(25): SEQ ID NO: 5453; WAN024GOB_at; Start 18; Stop 42
cacgtttttgagcagtgaactcgtc

SEQ ID NO: 253413 - DNA, 25 bp, Artificial
  probe
  misc_feature (1)..(25): SEQ ID NO: 5453; WAN024GOB_at; Start 31; Stop 55
agtgaactcgtcctgatccaaacgc

SEQ ID NO: 253414 - DNA, 25 bp, Artificial
  probe
  misc_feature (1)..(25): SEQ ID NO: 5453; WAN024GOB_at; Start 38; Stop 62
tcgtcctgatccaaacgcttaatgt

SEQ ID NO: 253415 - DNA, 25 bp, Artificial
  probe
  misc_feature (1)..(25): SEQ ID NO: 5453; WAN024GOB_at; Start 51; Stop 75
aacgcttaatgtagcctctgttaga

SEQ ID NO: 253416 - DNA, 25 bp, Artificial
  probe
  misc_feature (1)..(25): SEQ ID NO: 5453; WAN024GOB_at; Start 216; Stop 240
cacgttcaggcttagcaagaatatc

SEQ ID NO: 253417 - DNA, 25 bp, Artificial
  probe
  misc_feature (1)..(25): SEQ ID NO: 5453; WAN024GOB_at; Start 44; Stop 68
tgatccaaacgcttaatgtagcctc

SEQ ID NO: 253418 - DNA, 25 bp, Artificial
  probe
  misc_feature (1)..(25): SEQ ID NO: 5453; WAN024GOB_at; Start 65; Stop 89
cctctgttagaaagggtaatcaaga

SEQ ID NO: 253419 - DNA, 25 bp, Artificial
  probe
  misc_feature (1)..(25): SEQ ID NO: 5453; WAN024GOB_at; Start 47; Stop 71
tccaaacgcttaatgtagcctctgt

SEQ ID NO: 253420 - DNA, 25 bp, Artificial
  probe
  misc_feature (1)..(25): SEQ ID NO: 5453; WAN024GOB_at; Start 57; Stop 81
taatgtagcctctgttagaaagggt

SEQ ID NO: 253421 - DNA, 25 bp, Artificial
  probe
  misc_feature (1)..(25): SEQ ID NO: 5453; WAN024GOB_at; Start 207; Stop 231
tttgagaaacacgttcaggcttagc

SEQ ID NO: 253422 - DNA, 25 bp, Artificial
  probe
  misc_feature (1)..(25): SEQ ID NO: 5453; WAN024GOB_at; Start 195; Stop 219
cgtctttgataatttgagaaacacg

SEQ ID NO: 253423 - DNA, 25 bp, Artificial
  probe
  misc_feature (1)..(25): SEQ ID NO: 5453; WAN024GOB_at; Start 174; Stop 198
tacgtttaacttcatccaattcgtc

SEQ ID NO: 253424 - DNA, 25 bp, Artificial
  probe
  misc_feature (1)..(25): SEQ ID NO: 5453; WAN024GOB_at; Start 27; Stop 51
gagcagtgaactcgtcctgatccaa

SEQ ID NO: 253425 - DNA, 25 bp, Artificial
  probe
  misc_feature (1)..(25): SEQ ID NO: 5453; WAN024GOB_at; Start 202; Stop 226
gataatttgagaaacacgttcaggc

SEQ ID NO: 253426 - DNA, 25 bp, Artificial
  probe
  misc_feature (1)..(25): SEQ ID NO: 5453; WAN024GOB_at; Start 219; Stop 243
gttcaggcttagcaagaatatctgc

SEQ ID NO: 253427 - DNA, 25 bp, Artificial
  probe
  misc_feature (1)..(25): SEQ ID NO: 5453; WAN024GOB_at; Start 88; Stop 112
gacatccgattcttcaatcaagtcc

SEQ ID NO: 253428 - DNA, 25 bp, Artificial
  probe
  misc_feature (1)..(25): SEQ ID NO: 5453; WAN024GOB_at; Start 103; Stop 127
aatcaagtcctcatcctcgagactc

SEQ ID NO: 253429 - DNA, 25 bp, Artificial
  probe
  misc_feature (1)..(25): SEQ ID NO: 5453; WAN024GOB_at; Start 62; Stop 86
tagcctctgttagaaagggtaatca

SEQ ID NO: 253430 - DNA, 25 bp, Artificial
  probe
  misc_feature (1)..(25): SEQ ID NO: 5453; WAN024GOB_at; Start 92; Stop 116
tccgattcttcaatcaagtcctcat

SEQ ID NO: 253431 - DNA, 25 bp, Artificial
  probe
  misc_feature (1)..(25): SEQ ID NO: 5453; WAN024GOB_at; Start 74; Stop 98
gaaagggtaatcaagacatccgatt

SEQ ID NO: 253432 - DNA, 25 bp, Artificial
  probe
  misc_feature (1)..(25): SEQ ID NO: 5453; WAN024GOB_at; Start 113; Stop 137
tcatcctcgagactcaagacctgtc

SEQ ID NO: 253433 - DNA, 25 bp, Artificial
  probe
  misc_feature (1)..(25): SEQ ID NO: 5453; WAN024GOB_at; Start 15; Stop 39
ccccacgtttttgagcagtgaactc

SEQ ID NO: 253434 - DNA, 25 bp, Artificial
  probe
  misc_feature (1)..(25): SEQ ID NO: 5453; WAN024GOB_at; Start 41; Stop 65
tcctgatccaaacgcttaatgtagc

SEQ ID NO: 253435 - DNA, 25 bp, Artificial
  probe
  misc_feature (1)..(25): SEQ ID NO: 5453; WAN024GOB_at; Start 71; Stop 95
ttagaaagggtaatcaagacatccg

SEQ ID NO: 253436 - DNA, 25 bp, Artificial
  probe
  misc_feature (1)..(25): SEQ ID NO: 5453; WAN024GOB_at; Start 85; Stop 109
caagacatccgattcttcaatcaag

SEQ ID NO: 253437 - DNA, 25 bp, Artificial
  probe
  misc_feature (1)..(25): SEQ ID NO: 5453; WAN024GOB_at; Start 107; Stop 131
aagtcctcatcctcgagactcaaga

SEQ ID NO: 253438 - DNA, 25 bp, Artificial
  probe
  misc_feature (1)..(25): SEQ ID NO: 5453; WAN024GOB_at; Start 34; Stop 58
gaactcgtcctgatccaaacgctta

SEQ ID NO: 253439 - DNA, 25 bp, Artificial
  probe
  misc_feature (1)..(25): SEQ ID NO: 5453; WAN024GOB_at; Start 212; Stop 236
gaaacacgttcaggcttagcaagaa

SEQ ID NO: 253440 - DNA, 25 bp, Artificial
  probe
  misc_feature (1)..(25): SEQ ID NO: 5453; WAN024GOB_at; Start 79; Stop 103
ggtaatcaagacatccgattcttca

SEQ ID NO: 253441 - DNA, 25 bp, Artificial
  probe
  misc_feature (1)..(25): SEQ ID NO: 5453; WAN024GOB_at; Start 180; Stop 204
taacttcatccaattcgtctttgat

SEQ ID NO: 253442 - DNA, 25 bp, Artificial
  probe
  misc_feature (1)..(25): SEQ ID NO: 5453; WAN024GOB_at; Start 116; Stop 140
tcctcgagactcaagacctgtccaa

SEQ ID NO: 253443 - DNA, 25 bp, Artificial
  probe
  misc_feature (1)..(25): SEQ ID NO: 5453; WAN024GOB_at; Start 210; Stop 234
gagaaacacgttcaggcttagcaag

SEQ ID NO: 253444 - DNA, 25 bp, Artificial
  probe
  misc_feature (1)..(25): SEQ ID NO: 5453; WAN024GOB_at; Start 222; Stop 246
caggcttagcaagaatatctgctaa

SEQ ID NO: 253445 - DNA, 25 bp, Artificial
  probe
  misc_feature (1)..(25): SEQ ID NO: 5453; WAN024GOB_at; Start 22; Stop 46
tttttgagcagtgaactcgtcctga

SEQ ID NO: 253446 - DNA, 25 bp, Artificial
  probe
  misc_feature (1)..(25): SEQ ID NO: 1588; WAN024GOC_at; Start 43; Stop 67
tgctccattaaccaaaaggtttgga

SEQ ID NO: 253447 - DNA, 25 bp, Artificial
  probe
  misc_feature (1)..(25): SEQ ID NO: 1588; WAN024GOC_at; Start 282; Stop 306
tacggaccatggcttcataaataga

SEQ ID NO: 253448 - DNA, 25 bp, Artificial
  probe
  misc_feature (1)..(25): SEQ ID NO: 1588; WAN024GOC_at; Start 247; Stop 271
tacaagcatgtaacggtagctccac

SEQ ID NO: 253449 - DNA, 25 bp, Artificial
  probe
  misc_feature (1)..(25): SEQ ID NO: 1588; WAN024GOC_at; Start 268; Stop 292
ccaccattgagccatacggaccatg

SEQ ID NO: 253450 - DNA, 25 bp, Artificial
  probe
  misc_feature (1)..(25): SEQ ID NO: 1588; WAN024GOC_at; Start 336; Stop 360
tgacatcccctgtaatacgagcaga

SEQ ID NO: 253451 - DNA, 25 bp, Artificial
  probe
  misc_feature (1)..(25): SEQ ID NO: 1588; WAN024GOC_at; Start 99; Stop 123
cattggcatcatagttatcaacgaa

SEQ ID NO: 253452 - DNA, 25 bp, Artificial
  probe
  misc_feature (1)..(25): SEQ ID NO: 1588; WAN024GOC_at; Start 326; Stop 350
tatttacccatgacatcccctgtaa

SEQ ID NO: 253453 - DNA, 25 bp, Artificial
  probe
  misc_feature (1)..(25): SEQ ID NO: 1588; WAN024GOC_at; Start 58; Stop 82
aaggtttggaaaacgcgctggcaag

SEQ ID NO: 253454 - DNA, 25 bp, Artificial
  probe
  misc_feature (1)..(25): SEQ ID NO: 1588; WAN024GOC_at; Start 202; Stop 226
ggcagcactatctccatccatggaa

SEQ ID NO: 253455 - DNA, 25 bp, Artificial
  probe
  misc_feature (1)..(25): SEQ ID NO: 1588; WAN024GOC_at; Start 347; Stop 371
gtaatacgagcagattttttatggg

SEQ ID NO: 253456 - DNA, 25 bp, Artificial
  probe
  misc_feature (1)..(25): SEQ ID NO: 1588; WAN024GOC_at; Start 112; Stop 136
gttatcaacgaaatcaactgtattt

SEQ ID NO: 253457 - DNA, 25 bp, Artificial
  probe
  misc_feature (1)..(25): SEQ ID NO: 1588; WAN024GOC_at; Start 126; Stop 150
caactgtatttttgttgatatcacg

SEQ ID NO: 253458 - DNA, 25 bp, Artificial
  probe
  misc_feature (1)..(25): SEQ ID NO: 1588; WAN024GOC_at; Start 381; Stop 405
gggtcacacccaattcattcattcc

SEQ ID NO: 253459 - DNA, 25 bp, Artificial
  probe
  misc_feature (1)..(25): SEQ ID NO: 1588; WAN024GOC_at; Start 194; Stop 218
cgttgagcggcagcactatctccat

SEQ ID NO: 253460 - DNA, 25 bp, Artificial
  probe
  misc_feature (1)..(25): SEQ ID NO: 1588; WAN024GOC_at; Start 76; Stop 100
tggcaagaccaagggttcccgttca

SEQ ID NO: 253461 - DNA, 25 bp, Artificial
  probe
  misc_feature (1)..(25): SEQ ID NO: 1588; WAN024GOC_at; Start 12; Stop 36
tattggttgccatcccaaccgcgat

SEQ ID NO: 253462 - DNA, 25 bp, Artificial
  probe
  misc_feature (1)..(25): SEQ ID NO: 1588; WAN024GOC_at; Start 298; Stop 322
ataaatagaggaatccccgtgtggg

SEQ ID NO: 253463 - DNA, 25 bp, Artificial
  probe
  misc_feature (1)..(25): SEQ ID NO: 1588; WAN024GOC_at; Start 257; Stop 281
taacggtagctccaccattgagcca

SEQ ID NO: 253464 - DNA, 25 bp, Artificial
  probe
  misc_feature (1)..(25): SEQ ID NO: 1588; WAN024GOC_at; Start 293; Stop 317
gcttcataaatagaggaatccccgt

SEQ ID NO: 253465 - DNA, 25 bp, Artificial
  probe
  misc_feature (1)..(25): SEQ ID NO: 1588; WAN024GOC_at; Start 85; Stop 109
caagggttcccgttcattggcatca

SEQ ID NO: 253466 - DNA, 25 bp, Artificial
  probe
  misc_feature (1)..(25): SEQ ID NO: 1588; WAN024GOC_at; Start 29; Stop 53
accgcgataccagttgctccattaa

SEQ ID NO: 253467 - DNA, 25 bp, Artificial
  probe
  misc_feature (1)..(25): SEQ ID NO: 1588; WAN024GOC_at; Start 149; Stop 173
cgaagcatttccagagcaatcttgc

SEQ ID NO: 253468 - DNA, 25 bp, Artificial
  probe
  misc_feature (1)..(25): SEQ ID NO: 1588; WAN024GOC_at; Start 186; Stop 210
cggtataacgttgagcggcagcact

SEQ ID NO: 253469 - DNA, 25 bp, Artificial
  probe
  misc_feature (1)..(25): SEQ ID NO: 1588; WAN024GOC_at; Start 177; Stop 201
tacgtgcctcggtataacgttgagc

SEQ ID NO: 253470 - DNA, 25 bp, Artificial
  probe
  misc_feature (1)..(25): SEQ ID NO: 1588; WAN024GOC_at; Start 141; Stop 165
tgatatcacgaagcatttccagagc

SEQ ID NO: 253471 - DNA, 25 bp, Artificial
  probe
  misc_feature (1)..(25): SEQ ID NO: 1588; WAN024GOC_at; Start 229; Stop 253
aaaattcccatgaccatctacaagc

SEQ ID NO: 253472 - DNA, 25 bp, Artificial
  probe
  misc_feature (1)..(25): SEQ ID NO: 1588; WAN024GOC_at; Start 214; Stop 238
tccatccatggaaccaaaattccca

SEQ ID NO: 253473 - DNA, 25 bp, Artificial
  probe
  misc_feature (1)..(25): SEQ ID NO: 1588; WAN024GOC_at; Start 67; Stop 91
aaaacgcgctggcaagaccaagggt

SEQ ID NO: 253474 - DNA, 25 bp, Artificial
  probe
  misc_feature (1)..(25): SEQ ID NO: 1588; WAN024GOC_at; Start 239; Stop 263
tgaccatctacaagcatgtaacggt

SEQ ID NO: 253475 - DNA, 25 bp, Artificial
  probe
  misc_feature (1)..(25): SEQ ID NO: 1588; WAN024GOC_at; Start 2; Stop 26
tgaggtggaatattggttgccatcc

SEQ ID NO: 253476 - DNA, 25 bp, Artificial
  probe
  misc_feature (1)..(25): SEQ ID NO: 1588; WAN024GOC_at; Start 39; Stop 63
cagttgctccattaaccaaaaggtt

SEQ ID NO: 253477 - DNA, 25 bp, Artificial
  probe
  misc_feature (1)..(25): SEQ ID NO: 1588; WAN024GOC_at; Start 411; Stop 435
gaatgcgacggtgaacaggttttaa

SEQ ID NO: 253478 - DNA, 25 bp, Artificial
  probe
  misc_feature (1)..(25): SEQ ID NO: 1588; WAN024GOC_at; Start 164; Stop 188
gcaatcttgctcatacgtgcctcgg

SEQ ID NO: 253479 - DNA, 25 bp, Artificial
  probe
  misc_feature (1)..(25): SEQ ID NO: 1588; WAN024GOC_at; Start 396; Stop 420
cattcattccgtagagaatgcgacg

SEQ ID NO: 253480 - DNA, 25 bp, Artificial
  probe
  misc_feature (1)..(25): SEQ ID NO: 5872; WAN024GOD_at; Start 50; Stop 74
taggaacctgctacaaaaacagtcg

SEQ ID NO: 253481 - DNA, 25 bp, Artificial
  probe
  misc_feature (1)..(25): SEQ ID NO: 5872; WAN024GOD_at; Start 120; Stop 144
catccacttcgatttcaaagttcaa

SEQ ID NO: 253482 - DNA, 25 bp, Artificial
  probe
  misc_feature (1)..(25): SEQ ID NO: 5872; WAN024GOD_at; Start 183; Stop 207
tatccatggtttctggcagaaaggc

SEQ ID NO: 253483 - DNA, 25 bp, Artificial
  probe
  misc_feature (1)..(25): SEQ ID NO: 5872; WAN024GOD_at; Start 96; Stop 120
caatagtttggtcatcaatcccacc

SEQ ID NO: 253484 - DNA, 25 bp, Artificial
  probe
  misc_feature (1)..(25): SEQ ID NO: 5872; WAN024GOD_at; Start 42; Stop 66
taaagacataggaacctgctacaaa

SEQ ID NO: 253485 - DNA, 25 bp, Artificial
  probe
  misc_feature (1)..(25): SEQ ID NO: 5872; WAN024GOD_at; Start 219; Stop 243
aacctggattaaccgtcatgactaa

SEQ ID NO: 253486 - DNA, 25 bp, Artificial
  probe
  misc_feature (1)..(25): SEQ ID NO: 5872; WAN024GOD_at; Start 116; Stop 140
ccaccatccacttcgatttcaaagt

SEQ ID NO: 253487 - DNA, 25 bp, Artificial
  probe
  misc_feature (1)..(25): SEQ ID NO: 5872; WAN024GOD_at; Start 193; Stop 217
ttctggcagaaaggcttgcccacca

SEQ ID NO: 253488 - DNA, 25 bp, Artificial
  probe
  misc_feature (1)..(25): SEQ ID NO: 5872; WAN024GOD_at; Start 101; Stop 125
gtttggtcatcaatcccaccatcca

SEQ ID NO: 253489 - DNA, 25 bp, Artificial
  probe
  misc_feature (1)..(25): SEQ ID NO: 5872; WAN024GOD_at; Start 17; Stop 41
tgtactcgctcattgacttctccct

SEQ ID NO: 253490 - DNA, 25 bp, Artificial
  probe
  misc_feature (1)..(25): SEQ ID NO: 5872; WAN024GOD_at; Start 35; Stop 59
tctcccttaaagacataggaacctg

SEQ ID NO: 253491 - DNA, 25 bp, Artificial
  probe
  misc_feature (1)..(25): SEQ ID NO: 5872; WAN024GOD_at; Start 203; Stop 227
aaggcttgcccaccaaaacctggat

SEQ ID NO: 253492 - DNA, 25 bp, Artificial
  probe
  misc_feature (1)..(25): SEQ ID NO: 5872; WAN024GOD_at; Start 197; Stop 221
ggcagaaaggcttgcccaccaaaac

SEQ ID NO: 253493 - DNA, 25 bp, Artificial
  probe
  misc_feature (1)..(25): SEQ ID NO: 5872; WAN024GOD_at; Start 3; Stop 27
gttttctgagagtttgtactcgctc

SEQ ID NO: 253494 - DNA, 25 bp, Artificial
  probe
  misc_feature (1)..(25): SEQ ID NO: 5872; WAN024GOD_at; Start 52; Stop 76
ggaacctgctacaaaaacagtcgca

SEQ ID NO: 253495 - DNA, 25 bp, Artificial
  probe
  misc_feature (1)..(25): SEQ ID NO: 5872; WAN024GOD_at; Start 31; Stop 55
gacttctcccttaaagacataggaa

SEQ ID NO: 253496 - DNA, 25 bp, Artificial
  probe
  misc_feature (1)..(25): SEQ ID NO: 5872; WAN024GOD_at; Start 190; Stop 214
ggtttctggcagaaaggcttgccca

SEQ ID NO: 253497 - DNA, 25 bp, Artificial
  probe
  misc_feature (1)..(25): SEQ ID NO: 5872; WAN024GOD_at; Start 85; Stop 109
tttggcttgagcaatagtttggtca

SEQ ID NO: 253498 - DNA, 25 bp, Artificial
  probe
  misc_feature (1)..(25): SEQ ID NO: 5872; WAN024GOD_at; Start 213; Stop 237
caccaaaacctggattaaccgtcat

SEQ ID NO: 253499 - DNA, 25 bp, Artificial
  probe
  misc_feature (1)..(25): SEQ ID NO: 5872; WAN024GOD_at; Start 141; Stop 165
tcaaacctttttcctcacgaagagc

SEQ ID NO: 253500 - DNA, 25 bp, Artificial
  probe
  misc_feature (1)..(25): SEQ ID NO: 5872; WAN024GOD_at; Start 146; Stop 170
cctttttcctcacgaagagcaacca

SEQ ID NO: 253501 - DNA, 25 bp, Artificial
  probe
  misc_feature (1)..(25): SEQ ID NO: 5872; WAN024GOD_at; Start 151; Stop 175
ttcctcacgaagagcaaccaactca

SEQ ID NO: 253502 - DNA, 25 bp, Artificial
  probe
  misc_feature (1)..(25): SEQ ID NO: 5872; WAN024GOD_at; Start 54; Stop 78
aacctgctacaaaaacagtcgcacc

SEQ ID NO: 253503 - DNA, 25 bp, Artificial
  probe
  misc_feature (1)..(25): SEQ ID NO: 5872; WAN024GOD_at; Start 179; Stop 203
accttatccatggtttctggcagaa

SEQ ID NO: 253504 - DNA, 25 bp, Artificial
  probe
  misc_feature (1)..(25): SEQ ID NO: 5872; WAN024GOD_at; Start 88; Stop 112
ggcttgagcaatagtttggtcatca

SEQ ID NO: 253505 - DNA, 25 bp, Artificial
  probe
  misc_feature (1)..(25): SEQ ID NO: 5872; WAN024GOD_at; Start 23; Stop 47
cgctcattgacttctcccttaaaga

SEQ ID NO: 253506 - DNA, 25 bp, Artificial
  probe
  misc_feature (1)..(25): SEQ ID NO: 5872; WAN024GOD_at; Start 216; Stop 240
caaaacctggattaaccgtcatgac

SEQ ID NO: 253507 - DNA, 25 bp, Artificial
  probe
  misc_feature (1)..(25): SEQ ID NO: 5872; WAN024GOD_at; Start 10; Stop 34
gagagtttgtactcgctcattgact

SEQ ID NO: 253508 - DNA, 25 bp, Artificial
  probe
  misc_feature (1)..(25): SEQ ID NO: 5872; WAN024GOD_at; Start 205; Stop 229
ggcttgcccaccaaaacctggatta

SEQ ID NO: 253509 - DNA, 25 bp, Artificial
  probe
  misc_feature (1)..(25): SEQ ID NO: 5872; WAN024GOD_at; Start 93; Stop 117
gagcaatagtttggtcatcaatccc

SEQ ID NO: 253510 - DNA, 25 bp, Artificial
  probe
  misc_feature (1)..(25): SEQ ID NO: 5872; WAN024GOD_at; Start 29; Stop 53
ttgacttctcccttaaagacatagg

SEQ ID NO: 253511 - DNA, 25 bp, Artificial
  probe
  misc_feature (1)..(25): SEQ ID NO: 5872; WAN024GOD_at; Start 38; Stop 62
cccttaaagacataggaacctgcta

SEQ ID NO: 253512 - DNA, 25 bp, Artificial
  probe
  misc_feature (1)..(25): SEQ ID NO: 5872; WAN024GOD_at; Start 124; Stop 148
cacttcgatttcaaagttcaaacct

SEQ ID NO: 253513 - DNA, 25 bp, Artificial
  probe
  misc_feature (1)..(25): SEQ ID NO: 5872; WAN024GOD_at; Start 80; Stop 104
gcttctttggcttgagcaatagttt

SEQ ID NO: 253514 - DNA, 25 bp, Artificial
  probe
  misc_feature (1)..(25): SEQ ID NO: 5228; WAN024GOE_at; Start 113; Stop 137
gaatccctcgcgtcttggttccaga

SEQ ID NO: 253515 - DNA, 25 bp, Artificial
  probe
  misc_feature (1)..(25): SEQ ID NO: 5228; WAN024GOE_at; Start 138; Stop 162
gagaaccttgttaagagctccgaca

SEQ ID NO: 253516 - DNA, 25 bp, Artificial
  probe
  misc_feature (1)..(25): SEQ ID NO: 5228; WAN024GOE_at; Start 324; Stop 348
caaggcttggagacgttggtctgtc

SEQ ID NO: 253517 - DNA, 25 bp, Artificial
  probe
  misc_feature (1)..(25): SEQ ID NO: 5228; WAN024GOE_at; Start 108; Stop 132
tcccagaatccctcgcgtcttggtt

SEQ ID NO: 253518 - DNA, 25 bp, Artificial
  probe
  misc_feature (1)..(25): SEQ ID NO: 5228; WAN024GOE_at; Start 239; Stop 263
cctgtaagcgtgtctgcaaggtctt

SEQ ID NO: 253519 - DNA, 25 bp, Artificial
  probe
  misc_feature (1)..(25): SEQ ID NO: 5228; WAN024GOE_at; Start 77; Stop 101
tgtcttcaataatttgccccagttg

SEQ ID NO: 253520 - DNA, 25 bp, Artificial
  probe
  misc_feature (1)..(25): SEQ ID NO: 5228; WAN024GOE_at; Start 152; Stop 176
gagctccgacatcacgggcaactgt

SEQ ID NO: 253521 - DNA, 25 bp, Artificial
  probe
  misc_feature (1)..(25): SEQ ID NO: 5228; WAN024GOE_at; Start 167; Stop 191
gggcaactgtctgcatttctccaag

SEQ ID NO: 253522 - DNA, 25 bp, Artificial
  probe
  misc_feature (1)..(25): SEQ ID NO: 5228; WAN024GOE_at; Start 21; Stop 45
ttcactagagttttcaaccgttgcg

SEQ ID NO: 253523 - DNA, 25 bp, Artificial
  probe
  misc_feature (1)..(25): SEQ ID NO: 5228; WAN024GOE_at; Start 234; Stop 258
ggaagcctgtaagcgtgtctgcaag

SEQ ID NO: 253524 - DNA, 25 bp, Artificial
  probe
  misc_feature (1)..(25): SEQ ID NO: 5228; WAN024GOE_at; Start 118; Stop 142
cctcgcgtcttggttccagagagaa

SEQ ID NO: 253525 - DNA, 25 bp, Artificial
  probe
  misc_feature (1)..(25): SEQ ID NO: 5228; WAN024GOE_at; Start 193; Stop 217
ccacgattgacagactccagttgtt

SEQ ID NO: 253526 - DNA, 25 bp, Artificial
  probe
  misc_feature (1)..(25): SEQ ID NO: 5228; WAN024GOE_at; Start 201; Stop 225
gacagactccagttgtttagaaact

SEQ ID NO: 253527 - DNA, 25 bp, Artificial
  probe
  misc_feature (1)..(25): SEQ ID NO: 5228; WAN024GOE_at; Start 159; Stop 183
gacatcacgggcaactgtctgcatt

SEQ ID NO: 253528 - DNA, 25 bp, Artificial
  probe
  misc_feature (1)..(25): SEQ ID NO: 5228; WAN024GOE_at; Start 301; Stop 325
aaacgttgctcatttgattcctgca

SEQ ID NO: 253529 - DNA, 25 bp, Artificial
  probe
  misc_feature (1)..(25): SEQ ID NO: 5228; WAN024GOE_at; Start 46; Stop 70
tattctcgttcgtactgggcaggtg

SEQ ID NO: 253530 - DNA, 25 bp, Artificial
  probe
  misc_feature (1)..(25): SEQ ID NO: 5228; WAN024GOE_at; Start 287; Stop 311
ggcgcatttgttccaaacgttgctc

SEQ ID NO: 253531 - DNA, 25 bp, Artificial
  probe
  misc_feature (1)..(25): SEQ ID NO: 5228; WAN024GOE_at; Start 340; Stop 364
tggtctgtcttgtctctagtttgga

SEQ ID NO: 253532 - DNA, 25 bp, Artificial
  probe
  misc_feature (1)..(25): SEQ ID NO: 5228; WAN024GOE_at; Start 355; Stop 379
ctagtttggaggagattatctgtca

SEQ ID NO: 253533 - DNA, 25 bp, Artificial
  probe
  misc_feature (1)..(25): SEQ ID NO: 5228; WAN024GOE_at; Start 311; Stop 335
catttgattcctgcaaggcttggag

SEQ ID NO: 253534 - DNA, 25 bp, Artificial
  probe
  misc_feature (1)..(25): SEQ ID NO: 5228; WAN024GOE_at; Start 265; Stop 289
tctagtttttcctcgaccgtctggc

SEQ ID NO: 253535 - DNA, 25 bp, Artificial
  probe
  misc_feature (1)..(25): SEQ ID NO: 5228; WAN024GOE_at; Start 279; Stop 303
gaccgtctggcgcatttgttccaaa

SEQ ID NO: 253536 - DNA, 25 bp, Artificial
  probe
  misc_feature (1)..(25): SEQ ID NO: 5228; WAN024GOE_at; Start 63; Stop 87
ggcaggtgtcatgatgtcttcaata

SEQ ID NO: 253537 - DNA, 25 bp, Artificial
  probe
  misc_feature (1)..(25): SEQ ID NO: 5228; WAN024GOE_at; Start 6; Stop 30
ggcatactccactcgttcactagag

SEQ ID NO: 253538 - DNA, 25 bp, Artificial
  probe
  misc_feature (1)..(25): SEQ ID NO: 5228; WAN024GOE_at; Start 92; Stop 116
gccccagttgcaattctcccagaat

SEQ ID NO: 253539 - DNA, 25 bp, Artificial
  probe
  misc_feature (1)..(25): SEQ ID NO: 5228; WAN024GOE_at; Start 228; Stop 252
ctcaaaggaagcctgtaagcgtgtc

SEQ ID NO: 253540 - DNA, 25 bp, Artificial
  probe
  misc_feature (1)..(25): SEQ ID NO: 5228; WAN024GOE_at; Start 1; Stop 25
ttgatggcatactccactcgttcac

SEQ ID NO: 253541 - DNA, 25 bp, Artificial
  probe
  misc_feature (1)..(25): SEQ ID NO: 5228; WAN024GOE_at; Start 56; Stop 80
cgtactgggcaggtgtcatgatgtc

SEQ ID NO: 253542 - DNA, 25 bp, Artificial
  probe
  misc_feature (1)..(25): SEQ ID NO: 5228; WAN024GOE_at; Start 246; Stop 270
gcgtgtctgcaaggtcttttctagt

SEQ ID NO: 253543 - DNA, 25 bp, Artificial
  probe
  misc_feature (1)..(25): SEQ ID NO: 5228; WAN024GOE_at; Start 147; Stop 171
gttaagagctccgacatcacgggca

SEQ ID NO: 253544 - DNA, 25 bp, Artificial
  probe
  misc_feature (1)..(25): SEQ ID NO: 5228; WAN024GOE_at; Start 132; Stop 156
tccagagagaaccttgttaagagct

SEQ ID NO: 253545 - DNA, 25 bp, Artificial
  probe
  misc_feature (1)..(25): SEQ ID NO: 5228; WAN024GOE_at; Start 320; Stop 344
cctgcaaggcttggagacgttggtc

SEQ ID NO: 253546 - DNA, 25 bp, Artificial
  probe
  misc_feature (1)..(25): SEQ ID NO: 5228; WAN024GOE_at; Start 35; Stop 59
caaccgttgcgtattctcgttcgta

SEQ ID NO: 253547 - DNA, 25 bp, Artificial
  probe
  misc_feature (1)..(25): SEQ ID NO: 5228; WAN024GOE_at; Start 363; Stop 387
gaggagattatctgtcatttcttga

SEQ ID NO: 253548 - DNA, 25 bp, Artificial
  probe
  misc_feature (1)..(25): SEQ ID NO: 4270; WAN024GOF_at; Start 86; Stop 110
tttcatcaccgataatagccgccag

SEQ ID NO: 253549 - DNA, 25 bp, Artificial
  probe
  misc_feature (1)..(25): SEQ ID NO: 4270; WAN024GOF_at; Start 91; Stop 115
tcaccgataatagccgccagcatag

SEQ ID NO: 253550 - DNA, 25 bp, Artificial
  probe
  misc_feature (1)..(25): SEQ ID NO: 4270; WAN024GOF_at; Start 11; Stop 35
aagaactcaaacgaggagttgcaaa

SEQ ID NO: 253551 - DNA, 25 bp, Artificial
  probe
  misc_feature (1)..(25): SEQ ID NO: 4270; WAN024GOF_at; Start 156; Stop 180
aaccacatcggtattggtcaaacgg

SEQ ID NO: 253552 - DNA, 25 bp, Artificial
  probe
  misc_feature (1)..(25): SEQ ID NO: 4270; WAN024GOF_at; Start 187; Stop 211
tgcaaagttacgatagcctcagcct

SEQ ID NO: 253553 - DNA, 25 bp, Artificial
  probe
  misc_feature (1)..(25): SEQ ID NO: 4270; WAN024GOF_at; Start 161; Stop 185
catcggtattggtcaaacggtacag

SEQ ID NO: 253554 - DNA, 25 bp, Artificial
  probe
  misc_feature (1)..(25): SEQ ID NO: 4270; WAN024GOF_at; Start 101; Stop 125
tagccgccagcatagcaatcttctc

SEQ ID NO: 253555 - DNA, 25 bp, Artificial
  probe
  misc_feature (1)..(25): SEQ ID NO: 4270; WAN024GOF_at; Start 189; Stop 213
caaagttacgatagcctcagcctgt

SEQ ID NO: 253556 - DNA, 25 bp, Artificial
  probe
  misc_feature (1)..(25): SEQ ID NO: 4270; WAN024GOF_at; Start 7; Stop 31
tctaaagaactcaaacgaggagttg

SEQ ID NO: 253557 - DNA, 25 bp, Artificial
  probe
  misc_feature (1)..(25): SEQ ID NO: 4270; WAN024GOF_at; Start 170; Stop 194
tggtcaaacggtacagttgcaaagt

SEQ ID NO: 253558 - DNA, 25 bp, Artificial
  probe
  misc_feature (1)..(25): SEQ ID NO: 4270; WAN024GOF_at; Start 181; Stop 205
tacagttgcaaagttacgatagcct

SEQ ID NO: 253559 - DNA, 25 bp, Artificial
  probe
  misc_feature (1)..(25): SEQ ID NO: 4270; WAN024GOF_at; Start 202; Stop 226
gcctcagcctgttcttccgtaaaat

SEQ ID NO: 253560 - DNA, 25 bp, Artificial
  probe
  misc_feature (1)..(25): SEQ ID NO: 4270; WAN024GOF_at; Start 206; Stop 230
cagcctgttcttccgtaaaatcata

SEQ ID NO: 253561 - DNA, 25 bp, Artificial
  probe
  misc_feature (1)..(25): SEQ ID NO: 4270; WAN024GOF_at; Start 113; Stop 137
tagcaatcttctcacgaagctctgc

SEQ ID NO: 253562 - DNA, 25 bp, Artificial
  probe
  misc_feature (1)..(25): SEQ ID NO: 4270; WAN024GOF_at; Start 117; Stop 141
aatcttctcacgaagctctgcttct

SEQ ID NO: 253563 - DNA, 25 bp, Artificial
  probe
  misc_feature (1)..(25): SEQ ID NO: 4270; WAN024GOF_at; Start 66; Stop 90
catgagattgtacatagtcctttca

SEQ ID NO: 253564 - DNA, 25 bp, Artificial
  probe
  misc_feature (1)..(25): SEQ ID NO: 4270; WAN024GOF_at; Start 108; Stop 132
cagcatagcaatcttctcacgaagc

SEQ ID NO: 253565 - DNA, 25 bp, Artificial
  probe
  misc_feature (1)..(25): SEQ ID NO: 4270; WAN024GOF_at; Start 45; Stop 69
gacctcacgaagttctttcttcatg

SEQ ID NO: 253566 - DNA, 25 bp, Artificial
  probe
  misc_feature (1)..(25): SEQ ID NO: 4270; WAN024GOF_at; Start 174; Stop 198
caaacggtacagttgcaaagttacg

SEQ ID NO: 253567 - DNA, 25 bp, Artificial
  probe
  misc_feature (1)..(25): SEQ ID NO: 4270; WAN024GOF_at; Start 2; Stop 26
tgtcttctaaagaactcaaacgagg

SEQ ID NO: 253568 - DNA, 25 bp, Artificial
  probe
  misc_feature (1)..(25): SEQ ID NO: 4270; WAN024GOF_at; Start 166; Stop 190
gtattggtcaaacggtacagttgca

SEQ ID NO: 253569 - DNA, 25 bp, Artificial
  probe
  misc_feature (1)..(25): SEQ ID NO: 4270; WAN024GOF_at; Start 185; Stop 209
gttgcaaagttacgatagcctcagc

SEQ ID NO: 253570 - DNA, 25 bp, Artificial
  probe
  misc_feature (1)..(25): SEQ ID NO: 4270; WAN024GOF_at; Start 148; Stop 172
tgcaagacaaccacatcggtattgg

SEQ ID NO: 253571 - DNA, 25 bp, Artificial
  probe
  misc_feature (1)..(25): SEQ ID NO: 4270; WAN024GOF_at; Start 106; Stop 130
gccagcatagcaatcttctcacgaa

SEQ ID NO: 253572 - DNA, 25 bp, Artificial
  probe
  misc_feature (1)..(25): SEQ ID NO: 4270; WAN024GOF_at; Start 62; Stop 86
tcttcatgagattgtacatagtcct

SEQ ID NO: 253573 - DNA, 25 bp, Artificial
  probe
  misc_feature (1)..(25): SEQ ID NO: 4270; WAN024GOF_at; Start 193; Stop 217
gttacgatagcctcagcctgttctt

SEQ ID NO: 253574 - DNA, 25 bp, Artificial
  probe
  misc_feature (1)..(25): SEQ ID NO: 4270; WAN024GOF_at; Start 74; Stop 98
tgtacatagtcctttcatcaccgat

SEQ ID NO: 253575 - DNA, 25 bp, Artificial
  probe
  misc_feature (1)..(25): SEQ ID NO: 4270; WAN024GOF_at; Start 49; Stop 73
tcacgaagttctttcttcatgagat

SEQ ID NO: 253576 - DNA, 25 bp, Artificial
  probe
  misc_feature (1)..(25): SEQ ID NO: 4270; WAN024GOF_at; Start 40; Stop 64
ttcttgacctcacgaagttctttct

SEQ ID NO: 253577 - DNA, 25 bp, Artificial
  probe
  misc_feature (1)..(25): SEQ ID NO: 4270; WAN024GOF_at; Start 144; Stop 168
ttcctgcaagacaaccacatcggta

SEQ ID NO: 253578 - DNA, 25 bp, Artificial
  probe
  misc_feature (1)..(25): SEQ ID NO: 4270; WAN024GOF_at; Start 128; Stop 152
gaagctctgcttcttcttcctgcaa

SEQ ID NO: 253579 - DNA, 25 bp, Artificial
  probe
  misc_feature (1)..(25): SEQ ID NO: 4270; WAN024GOF_at; Start 142; Stop 166
tcttcctgcaagacaaccacatcgg

SEQ ID NO: 253580 - DNA, 25 bp, Artificial
  probe
  misc_feature (1)..(25): SEQ ID NO: 4270; WAN024GOF_at; Start 198; Stop 222
gatagcctcagcctgttcttccgta

SEQ ID NO: 253581 - DNA, 25 bp, Artificial
  probe
  misc_feature (1)..(25): SEQ ID NO: 4270; WAN024GOF_at; Start 98; Stop 122
taatagccgccagcatagcaatctt

SEQ ID NO: 253582 - DNA, 25 bp, Artificial
  probe
  misc_feature (1)..(25): SEQ ID NO: 2085; WAN024GOG_at; Start 144; Stop 168
caatttcttccaaggtggaagccgc

SEQ ID NO: 253583 - DNA, 25 bp, Artificial
  probe
  misc_feature (1)..(25): SEQ ID NO: 2085; WAN024GOG_at; Start 255; Stop 279
caatctcaattgctttcgcagtgtc

SEQ ID NO: 253584 - DNA, 25 bp, Artificial
  probe
  misc_feature (1)..(25): SEQ ID NO: 2085; WAN024GOG_at; Start 71; Stop 95
cttgtgaacatcaagaggtgctggg

SEQ ID NO: 253585 - DNA, 25 bp, Artificial
  probe
  misc_feature (1)..(25): SEQ ID NO: 2085; WAN024GOG_at; Start 31; Stop 55
tgccaactcatggattggtctgtag

SEQ ID NO: 253586 - DNA, 25 bp, Artificial
  probe
  misc_feature (1)..(25): SEQ ID NO: 2085; WAN024GOG_at; Start 233; Stop 257
tcagcgataagactagctgtatcaa

SEQ ID NO: 253587 - DNA, 25 bp, Artificial
  probe
  misc_feature (1)..(25): SEQ ID NO: 2085; WAN024GOG_at; Start 211; Stop 235
cacgctgacgtaggtatcttcctca

SEQ ID NO: 253588 - DNA, 25 bp, Artificial
  probe
  misc_feature (1)..(25): SEQ ID NO: 2085; WAN024GOG_at; Start 76; Stop 100
gaacatcaagaggtgctgggttgtc

SEQ ID NO: 253589 - DNA, 25 bp, Artificial
  probe
  misc_feature (1)..(25): SEQ ID NO: 2085; WAN024GOG_at; Start 64; Stop 88
tccaagacttgtgaacatcaagagg

SEQ ID NO: 253590 - DNA, 25 bp, Artificial
  probe
  misc_feature (1)..(25): SEQ ID NO: 2085; WAN024GOG_at; Start 180; Stop 204
gactggtacgcttgatgtaacctgc

SEQ ID NO: 253591 - DNA, 25 bp, Artificial
  probe
  misc_feature (1)..(25): SEQ ID NO: 2085; WAN024GOG_at; Start 185; Stop 209
gtacgcttgatgtaacctgccttgg

SEQ ID NO: 253592 - DNA, 25 bp, Artificial
  probe
  misc_feature (1)..(25): SEQ ID NO: 2085; WAN024GOG_at; Start 90; Stop 114
gctgggttgtcttggcagattgaac

SEQ ID NO: 253593 - DNA, 25 bp, Artificial
  probe
  misc_feature (1)..(25): SEQ ID NO: 2085; WAN024GOG_at; Start 138; Stop 162
gcttgccaatttcttccaaggtgga

SEQ ID NO: 253594 - DNA, 25 bp, Artificial
  probe
  misc_feature (1)..(25): SEQ ID NO: 2085; WAN024GOG_at; Start 159; Stop 183
tggaagccgcaaaggaacgtggact

SEQ ID NO: 253595 - DNA, 25 bp, Artificial
  probe
  misc_feature (1)..(25): SEQ ID NO: 2085; WAN024GOG_at; Start 122; Stop 146
aaacggtcatcatcacgcttgccaa

SEQ ID NO: 253596 - DNA, 25 bp, Artificial
  probe
  misc_feature (1)..(25): SEQ ID NO: 2085; WAN024GOG_at; Start 261; Stop 285
caattgctttcgcagtgtcttctaa

SEQ ID NO: 253597 - DNA, 25 bp, Artificial
  probe
  misc_feature (1)..(25): SEQ ID NO: 2085; WAN024GOG_at; Start 52; Stop 76
gtagatgacatttccaagacttgtg

SEQ ID NO: 253598 - DNA, 25 bp, Artificial
  probe
  misc_feature (1)..(25): SEQ ID NO: 2085; WAN024GOG_at; Start 221; Stop 245
taggtatcttcctcagcgataagac

SEQ ID NO: 253599 - DNA, 25 bp, Artificial
  probe
  misc_feature (1)..(25): SEQ ID NO: 2085; WAN024GOG_at; Start 125; Stop 149
cggtcatcatcacgcttgccaattt

SEQ ID NO: 253600 - DNA, 25 bp, Artificial
  probe
  misc_feature (1)..(25): SEQ ID NO: 2085; WAN024GOG_at; Start 20; Stop 44
caacgaatatctgccaactcatgga

SEQ ID NO: 253601 - DNA, 25 bp, Artificial
  probe
  misc_feature (1)..(25): SEQ ID NO: 2085; WAN024GOG_at; Start 204; Stop 228
ccttggtcacgctgacgtaggtatc

SEQ ID NO: 253602 - DNA, 25 bp, Artificial
  probe
  misc_feature (1)..(25): SEQ ID NO: 2085; WAN024GOG_at; Start 167; Stop 191
gcaaaggaacgtggactggtacgct

SEQ ID NO: 253603 - DNA, 25 bp, Artificial
  probe
  misc_feature (1)..(25): SEQ ID NO: 2085; WAN024GOG_at; Start 10; Stop 34
gatgtccttccaacgaatatctgcc

SEQ ID NO: 253604 - DNA, 25 bp, Artificial
  probe
  misc_feature (1)..(25): SEQ ID NO: 2085; WAN024GOG_at; Start 152; Stop 176
tccaaggtggaagccgcaaaggaac

SEQ ID NO: 253605 - DNA, 25 bp, Artificial
  probe
  misc_feature (1)..(25): SEQ ID NO: 2085; WAN024GOG_at; Start 217; Stop 241
gacgtaggtatcttcctcagcgata

SEQ ID NO: 253606 - DNA, 25 bp, Artificial
  probe
  misc_feature (1)..(25): SEQ ID NO: 2085; WAN024GOG_at; Start 37; Stop 61
ctcatggattggtctgtagatgaca

SEQ ID NO: 253607 - DNA, 25 bp, Artificial
  probe
  misc_feature (1)..(25): SEQ ID NO: 2085; WAN024GOG_at; Start 2; Stop 26
tgctctccgatgtccttccaacgaa

SEQ ID NO: 253608 - DNA, 25 bp, Artificial
  probe
  misc_feature (1)..(25): SEQ ID NO: 2085; WAN024GOG_at; Start 111; Stop 135
gaacaaaaatcaaacggtcatcatc

SEQ ID NO: 253609 - DNA, 25 bp, Artificial
  probe
  misc_feature (1)..(25): SEQ ID NO: 2085; WAN024GOG_at; Start 43; Stop 67
gattggtctgtagatgacatttcca

SEQ ID NO: 253610 - DNA, 25 bp, Artificial
  probe
  misc_feature (1)..(25): SEQ ID NO: 2085; WAN024GOG_at; Start 97; Stop 121
tgtcttggcagattgaacaaaaatc

SEQ ID NO: 253611 - DNA, 25 bp, Artificial
  probe
  misc_feature (1)..(25): SEQ ID NO: 2085; WAN024GOG_at; Start 227; Stop 251
tcttcctcagcgataagactagctg

SEQ ID NO: 253612 - DNA, 25 bp, Artificial
  probe
  misc_feature (1)..(25): SEQ ID NO: 2085; WAN024GOG_at; Start 24; Stop 48
gaatatctgccaactcatggattgg

SEQ ID NO: 253613 - DNA, 25 bp, Artificial
  probe
  misc_feature (1)..(25): SEQ ID NO: 2085; WAN024GOG_at; Start 191; Stop 215
ttgatgtaacctgccttggtcacgc

SEQ ID NO: 253614 - DNA, 25 bp, Artificial
  probe
  misc_feature (1)..(25): SEQ ID NO: 2085; WAN024GOG_at; Start 173; Stop 197
gaacgtggactggtacgcttgatgt

SEQ ID NO: 253615 - DNA, 25 bp, Artificial
  probe
  misc_feature (1)..(25): SEQ ID NO: 2085; WAN024GOG_at; Start 243; Stop 267
gactagctgtatcaatctcaattgc

SEQ ID NO: 253616 - DNA, 25 bp, Artificial
  probe
  misc_feature (1)..(25): SEQ ID NO: 2947; WAN024GOH_at; Start 268; Stop 292
gatacagatctggaattggctctct

SEQ ID NO: 253617 - DNA, 25 bp, Artificial
  probe
  misc_feature (1)..(25): SEQ ID NO: 2947; WAN024GOH_at; Start 99; Stop 123
gacagattttgatgcttttgttggg

SEQ ID NO: 253618 - DNA, 25 bp, Artificial
  probe
  misc_feature (1)..(25): SEQ ID NO: 2947; WAN024GOH_at; Start 350; Stop 374
gccgtattgaccatatgttggccaa

SEQ ID NO: 253619 - DNA, 25 bp, Artificial
  probe
  misc_feature (1)..(25): SEQ ID NO: 2947; WAN024GOH_at; Start 516; Stop 540
gccagttcgggatagccagctgact

SEQ ID NO: 253620 - DNA, 25 bp, Artificial
  probe
  misc_feature (1)..(25): SEQ ID NO: 2947; WAN024GOH_at; Start 418; Stop 442
caaatagaaattgaggatgggcaaa

SEQ ID NO: 253621 - DNA, 25 bp, Artificial
  probe
  misc_feature (1)..(25): SEQ ID NO: 2947; WAN024GOH_at; Start 253; Stop 277
cgaccagaaaaggatgatacagatc

SEQ ID NO: 253622 - DNA, 25 bp, Artificial
  probe
  misc_feature (1)..(25): SEQ ID NO: 2947; WAN024GOH_at; Start 385; Stop 409
cctagcaatcctaagttggcaccct

SEQ ID NO: 253623 - DNA, 25 bp, Artificial
  probe
  misc_feature (1)..(25): SEQ ID NO: 2947; WAN024GOH_at; Start 202; Stop 226
gaagaagagcgacaggtgattcaaa

SEQ ID NO: 253624 - DNA, 25 bp, Artificial
  probe
  misc_feature (1)..(25): SEQ ID NO: 2947; WAN024GOH_at; Start 471; Stop 495
cagtcagctagaacctcgttcagac

SEQ ID NO: 253625 - DNA, 25 bp, Artificial
  probe
  misc_feature (1)..(25): SEQ ID NO: 2947; WAN024GOH_at; Start 592; Stop 616
gtgtacgcttctaacgaatatatag

SEQ ID NO: 253626 - DNA, 25 bp, Artificial
  probe
  misc_feature (1)..(25): SEQ ID NO: 2947; WAN024GOH_at; Start 526; Stop 550
gatagccagctgactattcttggag

SEQ ID NO: 253627 - DNA, 25 bp, Artificial
  probe
  misc_feature (1)..(25): SEQ ID NO: 2947; WAN024GOH_at; Start 154; Stop 178
gaagacttacctcttgctctagcag

SEQ ID NO: 253628 - DNA, 25 bp, Artificial
  probe
  misc_feature (1)..(25): SEQ ID NO: 2947; WAN024GOH_at; Start 276; Stop 300
tctggaattggctctcttaaccatc

SEQ ID NO: 253629 - DNA, 25 bp, Artificial
  probe
  misc_feature (1)..(25): SEQ ID NO: 2947; WAN024GOH_at; Start 128; Stop 152
atcgaggctcgctctgggtcttgga

SEQ ID NO: 253630 - DNA, 25 bp, Artificial
  probe
  misc_feature (1)..(25): SEQ ID NO: 2947; WAN024GOH_at; Start 341; Stop 365
ccttgggtggccgtattgaccatat

SEQ ID NO: 253631 - DNA, 25 bp, Artificial
  probe
  misc_feature (1)..(25): SEQ ID NO: 2947; WAN024GOH_at; Start 80; Stop 104
gaaaccgcggtcattatcggacaga

SEQ ID NO: 253632 - DNA, 25 bp, Artificial
  probe
  misc_feature (1)..(25): SEQ ID NO: 2947; WAN024GOH_at; Start 327; Stop 351
cactattttcggtgccttgggtggc

SEQ ID NO: 253633 - DNA, 25 bp, Artificial
  probe
  misc_feature (1)..(25): SEQ ID NO: 2947; WAN024GOH_at; Start 357; Stop 381
tgaccatatgttggccaatgtcttt

SEQ ID NO: 253634 - DNA, 25 bp, Artificial
  probe
  misc_feature (1)..(25): SEQ ID NO: 2947; WAN024GOH_at; Start 180; Stop 204
cggagattttgattctgtgacggaa

SEQ ID NO: 253635 - DNA, 25 bp, Artificial
  probe
  misc_feature (1)..(25): SEQ ID NO: 2947; WAN024GOH_at; Start 390; Stop 414
caatcctaagttggcaccctatatg

SEQ ID NO: 253636 - DNA, 25 bp, Artificial
  probe
  misc_feature (1)..(25): SEQ ID NO: 2947; WAN024GOH_at; Start 190; Stop 214
gattctgtgacggaagaagagcgac

SEQ ID NO: 253637 - DNA, 25 bp, Artificial
  probe
  misc_feature (1)..(25): SEQ ID NO: 2947; WAN024GOH_at; Start 477; Stop 501
gctagaacctcgttcagactacgac

SEQ ID NO: 253638 - DNA, 25 bp, Artificial
  probe
  misc_feature (1)..(25): SEQ ID NO: 2947; WAN024GOH_at; Start 608; Stop 632
aatatatagatagggaagtgtcggt

SEQ ID NO: 253639 - DNA, 25 bp, Artificial
  probe
  misc_feature (1)..(25): SEQ ID NO: 2947; WAN024GOH_at; Start 297; Stop 321
catctttgaacaaaatcctcaggct

SEQ ID NO: 253640 - DNA, 25 bp, Artificial
  probe
  misc_feature (1)..(25): SEQ ID NO: 2947; WAN024GOH_at; Start 509; Stop 533
cctttatgccagttcgggatagcca

SEQ ID NO: 253641 - DNA, 25 bp, Artificial
  probe
  misc_feature (1)..(25): SEQ ID NO: 2947; WAN024GOH_at; Start 140; Stop 164
tctgggtcttggaagaagacttacc

SEQ ID NO: 253642 - DNA, 25 bp, Artificial
  probe
  misc_feature (1)..(25): SEQ ID NO: 2947; WAN024GOH_at; Start 90; Stop 114
tcattatcggacagattttgatgct

SEQ ID NO: 253643 - DNA, 25 bp, Artificial
  probe
  misc_feature (1)..(25): SEQ ID NO: 2947; WAN024GOH_at; Start 161; Stop 185
tacctcttgctctagcagtcggaga

SEQ ID NO: 253644 - DNA, 25 bp, Artificial
  probe
  misc_feature (1)..(25): SEQ ID NO: 2947; WAN024GOH_at; Start 170; Stop 194
ctctagcagtcggagattttgattc

SEQ ID NO: 253645 - DNA, 25 bp, Artificial
  probe
  misc_feature (1)..(25): SEQ ID NO: 2947; WAN024GOH_at; Start 68; Stop 92
tttttgcaggcggaaaccgcggtca

SEQ ID NO: 253646 - DNA, 25 bp, Artificial
  probe
  misc_feature (1)..(25): SEQ ID NO: 2947; WAN024GOH_at; Start 285; Stop 309
ggctctcttaaccatctttgaacaa

SEQ ID NO: 253647 - DNA, 25 bp, Artificial
  probe
  misc_feature (1)..(25): SEQ ID NO: 2947; WAN024GOH_at; Start 634; Stop 658
acttgcccagatggttatgtggtcg

SEQ ID NO: 253648 - DNA, 25 bp, Artificial
  probe
  misc_feature (1)..(25): SEQ ID NO: 2947; WAN024GOH_at; Start 487; Stop 511
cgttcagactacgactatctagcct

SEQ ID NO: 253649 - DNA, 25 bp, Artificial
  probe
  misc_feature (1)..(25): SEQ ID NO: 2947; WAN024GOH_at; Start 502; Stop 526
tatctagcctttatgccagttcggg

SEQ ID NO: 253650 - DNA, 25 bp, Artificial
  probe
  misc_feature (1)..(25): SEQ ID NO: 2925; WAN024GOI_at; Start 474; Stop 498
tgagttggttgctcttcgtgaggaa

SEQ ID NO: 253651 - DNA, 25 bp, Artificial
  probe
  misc_feature (1)..(25): SEQ ID NO: 2925; WAN024GOI_at; Start 149; Stop 173
caggtgtggtcgagagccttcgtcc

SEQ ID NO: 253652 - DNA, 25 bp, Artificial
  probe
  misc_feature (1)..(25): SEQ ID NO: 2925; WAN024GOI_at; Start 128; Stop 152
taccgcaaatcagttttggtgcagg

SEQ ID NO: 253653 - DNA, 25 bp, Artificial
  probe
  misc_feature (1)..(25): SEQ ID NO: 2925; WAN024GOI_at; Start 336; Stop 360
ttcagtcgttatcaatcctggcaca

SEQ ID NO: 253654 - DNA, 25 bp, Artificial
  probe
  misc_feature (1)..(25): SEQ ID NO: 2925; WAN024GOI_at; Start 211; Stop 235
tcaaaccctgagcatcatctggaag

SEQ ID NO: 253655 - DNA, 25 bp, Artificial
  probe
  misc_feature (1)..(25): SEQ ID NO: 2925; WAN024GOI_at; Start 43; Stop 67
tatgccaactttgaacgtgaaatca

SEQ ID NO: 253656 - DNA, 25 bp, Artificial
  probe
  misc_feature (1)..(25): SEQ ID NO: 2925; WAN024GOI_at; Start 185; Stop 209
tggttttcgattgccacttgatggt

SEQ ID NO: 253657 - DNA, 25 bp, Artificial
  probe
  misc_feature (1)..(25): SEQ ID NO: 2925; WAN024GOI_at; Start 587; Stop 611
tagcaggttcctatgtctttaaggg

SEQ ID NO: 253658 - DNA, 25 bp, Artificial
  probe
  misc_feature (1)..(25): SEQ ID NO: 2925; WAN024GOI_at; Start 506; Stop 530
tgaactttgaaatcgaagtggatgg

SEQ ID NO: 253659 - DNA, 25 bp, Artificial
  probe
  misc_feature (1)..(25): SEQ ID NO: 2925; WAN024GOI_at; Start 379; Stop 403
cacgtccttcatctagttgaccaag

SEQ ID NO: 253660 - DNA, 25 bp, Artificial
  probe
  misc_feature (1)..(25): SEQ ID NO: 2925; WAN024GOI_at; Start 420; Stop 444
taatccaggttttggtgggcaagcc

SEQ ID NO: 253661 - DNA, 25 bp, Artificial
  probe
  misc_feature (1)..(25): SEQ ID NO: 2925; WAN024GOI_at; Start 111; Stop 135
catggacagtcattttgtaccgcaa

SEQ ID NO: 253662 - DNA, 25 bp, Artificial
  probe
  misc_feature (1)..(25): SEQ ID NO: 2925; WAN024GOI_at; Start 394; Stop 418
gttgaccaagttttagtcatgacgg

SEQ ID NO: 253663 - DNA, 25 bp, Artificial
  probe
  misc_feature (1)..(25): SEQ ID NO: 2925; WAN024GOI_at; Start 295; Stop 319
catggcgccctccaaaaaattcgtt

SEQ ID NO: 253664 - DNA, 25 bp, Artificial
  probe
  misc_feature (1)..(25): SEQ ID NO: 2925; WAN024GOI_at; Start 433; Stop 457
ggtgggcaagcctttctgccagaaa

SEQ ID NO: 253665 - DNA, 25 bp, Artificial
  probe
  misc_feature (1)..(25): SEQ ID NO: 2925; WAN024GOI_at; Start 247; Stop 271
gcaggtgcagacatcatcagtatcc

SEQ ID NO: 253666 - DNA, 25 bp, Artificial
  probe
  misc_feature (1)..(25): SEQ ID NO: 2925; WAN024GOI_at; Start 446; Stop 470
ttctgccagaaaccatggataaggt

SEQ ID NO: 253667 - DNA, 25 bp, Artificial
  probe
  misc_feature (1)..(25): SEQ ID NO: 2925; WAN024GOI_at; Start 484; Stop 508
gctcttcgtgaggaaaaaggtttga

SEQ ID NO: 253668 - DNA, 25 bp, Artificial
  probe
  misc_feature (1)..(25): SEQ ID NO: 2925; WAN024GOI_at; Start 135; Stop 159
aatcagttttggtgcaggtgtggtc

SEQ ID NO: 253669 - DNA, 25 bp, Artificial
  probe
  misc_feature (1)..(25): SEQ ID NO: 2925; WAN024GOI_at; Start 260; Stop 284
tcatcagtatccatgtagaagcaac

SEQ ID NO: 253670 - DNA, 25 bp, Artificial
  probe
  misc_feature (1)..(25): SEQ ID NO: 2925; WAN024GOI_at; Start 175; Stop 199
catagtaagatggttttcgattgcc

SEQ ID NO: 253671 - DNA, 25 bp, Artificial
  probe
  misc_feature (1)..(25): SEQ ID NO: 2925; WAN024GOI_at; Start 530; Stop 554
gtgggattgatgaccaaactattgc

SEQ ID NO: 253672 - DNA, 25 bp, Artificial
  probe
  misc_feature (1)..(25): SEQ ID NO: 2925; WAN024GOI_at; Start 199; Stop 223
cacttgatggtgtcaaaccctgagc

SEQ ID NO: 253673 - DNA, 25 bp, Artificial
  probe
  misc_feature (1)..(25): SEQ ID NO: 2925; WAN024GOI_at; Start 226; Stop 250
catctggaagattttgcgcgtgcag

SEQ ID NO: 253674 - DNA, 25 bp, Artificial
  probe
  misc_feature (1)..(25): SEQ ID NO: 2925; WAN024GOI_at; Start 321; Stop 345
actcggagttaagccttcagtcgtt

SEQ ID NO: 253675 - DNA, 25 bp, Artificial
  probe
  misc_feature (1)..(25): SEQ ID NO: 2925; WAN024GOI_at; Start 63; Stop 87
aatcaaacgtctagaagcaactggg

SEQ ID NO: 253676 - DNA, 25 bp, Artificial
  probe
  misc_feature (1)..(25): SEQ ID NO: 2925; WAN024GOI_at; Start 406; Stop 430
ttagtcatgacggttaatccaggtt

SEQ ID NO: 253677 - DNA, 25 bp, Artificial
  probe
  misc_feature (1)..(25): SEQ ID NO: 2925; WAN024GOI_at; Start 15; Stop 39
gattgctccgtcaattctggcagca

SEQ ID NO: 253678 - DNA, 25 bp, Artificial
  probe
  misc_feature (1)..(25): SEQ ID NO: 2925; WAN024GOI_at; Start 238; Stop 262
tttgcgcgtgcaggtgcagacatca

SEQ ID NO: 253679 - DNA, 25 bp, Artificial
  probe
  misc_feature (1)..(25): SEQ ID NO: 2925; WAN024GOI_at; Start 362; Stop 386
cagttgaagccatcaagcacgtcct

SEQ ID NO: 253680 - DNA, 25 bp, Artificial
  probe
  misc_feature (1)..(25): SEQ ID NO: 2925; WAN024GOI_at; Start 160; Stop 184
gagagccttcgtcctcatagtaaga

SEQ ID NO: 253681 - DNA, 25 bp, Artificial
  probe
  misc_feature (1)..(25): SEQ ID NO: 2925; WAN024GOI_at; Start 91; Stop 115
gaatatgcccatatcgatatcatgg

SEQ ID NO: 253682 - DNA, 25 bp, Artificial
  probe
  misc_feature (1)..(25): SEQ ID NO: 2925; WAN024GOI_at; Start 2; Stop 26
tgtctcaatacaagattgctccgtc

SEQ ID NO: 253683 - DNA, 25 bp, Artificial
  probe
  misc_feature (1)..(25): SEQ ID NO: 2925; WAN024GOI_at; Start 27; Stop 51
aattctggcagcagattatgccaac

SEQ ID NO: 253684 - DNA, 25 bp, Artificial
  probe
  misc_feature (1)..(25): SEQ ID NO: 2701; WAN024GOJ_at; Start 384; Stop 408
tttggaacaaatgcgccagacggtc

SEQ ID NO: 253685 - DNA, 25 bp, Artificial
  probe
  misc_feature (1)..(25): SEQ ID NO: 2701; WAN024GOJ_at; Start 673; Stop 697
gagtatgccatcaagttacccggac

SEQ ID NO: 253686 - DNA, 25 bp, Artificial
  probe
  misc_feature (1)..(25): SEQ ID NO: 2701; WAN024GOJ_at; Start 355; Stop 379
caagccttgcaggaatcaaatgagc

SEQ ID NO: 253687 - DNA, 25 bp, Artificial
  probe
  misc_feature (1)..(25): SEQ ID NO: 2701; WAN024GOJ_at; Start 177; Stop 201
ggattaccgctttgaccaagccaga

SEQ ID NO: 253688 - DNA, 25 bp, Artificial
  probe
  misc_feature (1)..(25): SEQ ID NO: 2701; WAN024GOJ_at; Start 82; Stop 106
gctggtctctttctgatttggcaaa

SEQ ID NO: 253689 - DNA, 25 bp, Artificial
  probe
  misc_feature (1)..(25): SEQ ID NO: 2701; WAN024GOJ_at; Start 323; Stop 347
tccaaactagagacaagacagacca

SEQ ID NO: 253690 - DNA, 25 bp, Artificial
  probe
  misc_feature (1)..(25): SEQ ID NO: 2701; WAN024GOJ_at; Start 1128; Stop 1152
tctggtcaaggcacaaaaacatctc

SEQ ID NO: 253691 - DNA, 25 bp, Artificial
  probe
  misc_feature (1)..(25): SEQ ID NO: 2701; WAN024GOJ_at; Start 1174; Stop 1198
gatgaattattaaaccgtcgtacca

SEQ ID NO: 253692 - DNA, 25 bp, Artificial
  probe
  misc_feature (1)..(25): SEQ ID NO: 2701; WAN024GOJ_at; Start 692; Stop 716
ccggacaaggcgaccaagaatacgt

SEQ ID NO: 253693 - DNA, 25 bp, Artificial
  probe
  misc_feature (1)..(25): SEQ ID NO: 2701; WAN024GOJ_at; Start 658; Stop 682
tctagtgaacgagtggagtatgcca

SEQ ID NO: 253694 - DNA, 25 bp, Artificial
  probe
  misc_feature (1)..(25): SEQ ID NO: 2701; WAN024GOJ_at; Start 550; Stop 574
tctggaaccaagacgcgagggattc

SEQ ID NO: 253695 - DNA, 25 bp, Artificial
  probe
  misc_feature (1)..(25): SEQ ID NO: 2701; WAN024GOJ_at; Start 525; Stop 549
tgtcggagctcttaacaaggttctc

SEQ ID NO: 253696 - DNA, 25 bp, Artificial
  probe
  misc_feature (1)..(25): SEQ ID NO: 2701; WAN024GOJ_at; Start 600; Stop 624
tattgaagacatcatgacacctgcc

SEQ ID NO: 253697 - DNA, 25 bp, Artificial
  probe
  misc_feature (1)..(25): SEQ ID NO: 2701; WAN024GOJ_at; Start 398; Stop 422
gccagacggtcgaggaaaaactaga

SEQ ID NO: 253698 - DNA, 25 bp, Artificial
  probe
  misc_feature (1)..(25): SEQ ID NO: 2701; WAN024GOJ_at; Start 510; Stop 534
gacagttgcccgtgatgtcggagct

SEQ ID NO: 253699 - DNA, 25 bp, Artificial
  probe
  misc_feature (1)..(25): SEQ ID NO: 2701; WAN024GOJ_at; Start 729; Stop 753
tgactctaagtttccactggcagat

SEQ ID NO: 253700 - DNA, 25 bp, Artificial
  probe
  misc_feature (1)..(25): SEQ ID NO: 2701; WAN024GOJ_at; Start 1066; Stop 1090
gccgaccatatcagcaagactcttg

SEQ ID NO: 253701 - DNA, 25 bp, Artificial
  probe
  misc_feature (1)..(25): SEQ ID NO: 2701; WAN024GOJ_at; Start 109; Stop 133
caggataggcaggagaaacacttaa

SEQ ID NO: 253702 - DNA, 25 bp, Artificial
  probe
  misc_feature (1)..(25): SEQ ID NO: 2701; WAN024GOJ_at; Start 988; Stop 1012
gttgcaggaccaagtaccctatcag

SEQ ID NO: 253703 - DNA, 25 bp, Artificial
  probe
  misc_feature (1)..(25): SEQ ID NO: 2701; WAN024GOJ_at; Start 470; Stop 494
aacaactggagtctgtcaatcgtgg

SEQ ID NO: 253704 - DNA, 25 bp, Artificial
  probe
  misc_feature (1)..(25): SEQ ID NO: 2701; WAN024GOJ_at; Start 1049; Stop 1073
ttaatatccaaaagagtgccgacca

SEQ ID NO: 253705 - DNA, 25 bp, Artificial
  probe
  misc_feature (1)..(25): SEQ ID NO: 2701; WAN024GOJ_at; Start 419; Stop 443
tagaaaagaccttgcagacacgctt

SEQ ID NO: 253706 - DNA, 25 bp, Artificial
  probe
  misc_feature (1)..(25): SEQ ID NO: 2701; WAN024GOJ_at; Start 287; Stop 311
tgacccaagtccgtcaagaaatgac

SEQ ID NO: 253707 - DNA, 25 bp, Artificial
  probe
  misc_feature (1)..(25): SEQ ID NO: 2701; WAN024GOJ_at; Start 640; Stop 664
tacgcaacggttgaaaactctagtg

SEQ ID NO: 253708 - DNA, 25 bp, Artificial
  probe
  misc_feature (1)..(25): SEQ ID NO: 2701; WAN024GOJ_at; Start 135; Stop 159
taagagcttggaggatcaggcagat

SEQ ID NO: 253709 - DNA, 25 bp, Artificial
  probe
  misc_feature (1)..(25): SEQ ID NO: 2701; WAN024GOJ_at; Start 150; Stop 174
tcaggcagatcatttgtcagaccag

SEQ ID NO: 253710 - DNA, 25 bp, Artificial
  probe
  misc_feature (1)..(25): SEQ ID NO: 2701; WAN024GOJ_at; Start 1215; Stop 1239
gctccgtcacattgagttgtcagaa

SEQ ID NO: 253711 - DNA, 25 bp, Artificial
  probe
  misc_feature (1)..(25): SEQ ID NO: 2701; WAN024GOJ_at; Start 339; Stop 363
gacagaccaacgtctccaagccttg

SEQ ID NO: 253712 - DNA, 25 bp, Artificial
  probe
  misc_feature (1)..(25): SEQ ID NO: 2701; WAN024GOJ_at; Start 802; Stop 826
gaacgctgtcgtaagtcactcctag

SEQ ID NO: 253713 - DNA, 25 bp, Artificial
  probe
  misc_feature (1)..(25): SEQ ID NO: 2701; WAN024GOJ_at; Start 435; Stop 459
gacacgcttacaggcttcctttgag

SEQ ID NO: 253714 - DNA, 25 bp, Artificial
  probe
  misc_feature (1)..(25): SEQ ID NO: 2701; WAN024GOJ_at; Start 1243; Stop 1267
gagcctgcgcttgatctactccatt

SEQ ID NO: 253715 - DNA, 25 bp, Artificial
  probe
  misc_feature (1)..(25): SEQ ID NO: 2701; WAN024GOJ_at; Start 619; Stop 643
cctgcccagtacgaacgagaatacg

SEQ ID NO: 253716 - DNA, 25 bp, Artificial
  probe
  misc_feature (1)..(25): SEQ ID NO: 2701; WAN024GOJ_at; Start 1194; Stop 1218
taccatagctatcgagcggacgctc

SEQ ID NO: 253717 - DNA, 25 bp, Artificial
  probe
  misc_feature (1)..(25): SEQ ID NO: 2701; WAN024GOJ_at; Start 1091; Stop 1115
ccagtgtcaagaccgagtttggcaa

SEQ ID NO: 253718 - DNA, 25 bp, Artificial
  probe
  misc_feature (1)..(25): SEQ ID NO: 3458; WAN024GOK_at; Start 57; Stop 81
ttcacttggtattttatgggctttg

SEQ ID NO: 253719 - DNA, 25 bp, Artificial
  probe
  misc_feature (1)..(25): SEQ ID NO: 3458; WAN024GOK_at; Start 60; Stop 84
acttggtattttatgggctttgtat

SEQ ID NO: 253720 - DNA, 25 bp, Artificial
  probe
  misc_feature (1)..(25): SEQ ID NO: 3458; WAN024GOK_at; Start 17; Stop 41
aattctcttgtgagtttgcttactt

SEQ ID NO: 253721 - DNA, 25 bp, Artificial
  probe
  misc_feature (1)..(25): SEQ ID NO: 3458; WAN024GOK_at; Start 53; Stop 77
tattttcacttggtattttatgggc

SEQ ID NO: 253722 - DNA, 25 bp, Artificial
  probe
  misc_feature (1)..(25): SEQ ID NO: 3458; WAN024GOK_at; Start 26; Stop 50
gtgagtttgcttacttcaagaattt

SEQ ID NO: 253723 - DNA, 25 bp, Artificial
  probe
  misc_feature (1)..(25): SEQ ID NO: 3458; WAN024GOK_at; Start 31; Stop 55
tttgcttacttcaagaattttctat

SEQ ID NO: 253724 - DNA, 25 bp, Artificial
  probe
  misc_feature (1)..(25): SEQ ID NO: 3458; WAN024GOK_at; Start 27; Stop 51
tgagtttgcttacttcaagaatttt

SEQ ID NO: 253725 - DNA, 25 bp, Artificial
  probe
  misc_feature (1)..(25): SEQ ID NO: 3458; WAN024GOK_at; Start 59; Stop 83
cacttggtattttatgggctttgta

SEQ ID NO: 253726 - DNA, 25 bp, Artificial
  probe
  misc_feature (1)..(25): SEQ ID NO: 3458; WAN024GOK_at; Start 62; Stop 86
ttggtattttatgggctttgtatct

SEQ ID NO: 253727 - DNA, 25 bp, Artificial
  probe
  misc_feature (1)..(25): SEQ ID NO: 3458; WAN024GOK_at; Start 58; Stop 82
tcacttggtattttatgggctttgt

SEQ ID NO: 253728 - DNA, 25 bp, Artificial
  probe
  misc_feature (1)..(25): SEQ ID NO: 3458; WAN024GOK_at; Start 61; Stop 85
cttggtattttatgggctttgtatc

SEQ ID NO: 253729 - DNA, 25 bp, Artificial
  probe
  misc_feature (1)..(25): SEQ ID NO: 3458; WAN024GOK_at; Start 12; Stop 36
agataaattctcttgtgagtttgct

SEQ ID NO: 253730 - DNA, 25 bp, Artificial
  probe
  misc_feature (1)..(25): SEQ ID NO: 3458; WAN024GOK_at; Start 54; Stop 78
attttcacttggtattttatgggct

SEQ ID NO: 253731 - DNA, 25 bp, Artificial
  probe
  misc_feature (1)..(25): SEQ ID NO: 3458; WAN024GOK_at; Start 66; Stop 90
tattttatgggctttgtatcttatg

SEQ ID NO: 253732 - DNA, 25 bp, Artificial
  probe
  misc_feature (1)..(25): SEQ ID NO: 3458; WAN024GOK_at; Start 6; Stop 30
tgaaaaagataaattctcttgtgag

SEQ ID NO: 253733 - DNA, 25 bp, Artificial
  probe
  misc_feature (1)..(25): SEQ ID NO: 3458; WAN024GOK_at; Start 28; Stop 52
gagtttgcttacttcaagaattttc

SEQ ID NO: 253734 - DNA, 25 bp, Artificial
  probe
  misc_feature (1)..(25): SEQ ID NO: 3458; WAN024GOK_at; Start 15; Stop 39
taaattctcttgtgagtttgcttac

SEQ ID NO: 253735 - DNA, 25 bp, Artificial
  probe
  misc_feature (1)..(25): SEQ ID NO: 3458; WAN024GOK_at; Start 29; Stop 53
agtttgcttacttcaagaattttct

SEQ ID NO: 253736 - DNA, 25 bp, Artificial
  probe
  misc_feature (1)..(25): SEQ ID NO: 3458; WAN024GOK_at; Start 20; Stop 44
tctcttgtgagtttgcttacttcaa

SEQ ID NO: 253737 - DNA, 25 bp, Artificial
  probe
  misc_feature (1)..(25): SEQ ID NO: 3458; WAN024GOK_at; Start 7; Stop 31
gaaaaagataaattctcttgtgagt

SEQ ID NO: 253738 - DNA, 25 bp, Artificial
  probe
  misc_feature (1)..(25): SEQ ID NO: 3458; WAN024GOK_at; Start 25; Stop 49
tgtgagtttgcttacttcaagaatt

SEQ ID NO: 253739 - DNA, 25 bp, Artificial
  probe
  misc_feature (1)..(25): SEQ ID NO: 3458; WAN024GOK_at; Start 19; Stop 43
ttctcttgtgagtttgcttacttca

SEQ ID NO: 253740 - DNA, 25 bp, Artificial
  probe
  misc_feature (1)..(25): SEQ ID NO: 3458; WAN024GOK_at; Start 18; Stop 42
attctcttgtgagtttgcttacttc

SEQ ID NO: 253741 - DNA, 25 bp, Artificial
  probe
  misc_feature (1)..(25): SEQ ID NO: 3458; WAN024GOK_at; Start 24; Stop 48
ttgtgagtttgcttacttcaagaat

SEQ ID NO: 253742 - DNA, 25 bp, Artificial
  probe
  misc_feature (1)..(25): SEQ ID NO: 3458; WAN024GOK_at; Start 5; Stop 29
gtgaaaaagataaattctcttgtga

SEQ ID NO: 253743 - DNA, 25 bp, Artificial
  probe
  misc_feature (1)..(25): SEQ ID NO: 3458; WAN024GOK_at; Start 30; Stop 54
gtttgcttacttcaagaattttcta

SEQ ID NO: 253744 - DNA, 25 bp, Artificial
  probe
  misc_feature (1)..(25): SEQ ID NO: 3458; WAN024GOK_at; Start 13; Stop 37
gataaattctcttgtgagtttgctt

SEQ ID NO: 253745 - DNA, 25 bp, Artificial
  probe
  misc_feature (1)..(25): SEQ ID NO: 3458; WAN024GOK_at; Start 22; Stop 46
tcttgtgagtttgcttacttcaaga

SEQ ID NO: 253746 - DNA, 25 bp, Artificial
  probe
  misc_feature (1)..(25): SEQ ID NO: 3458; WAN024GOK_at; Start 11; Stop 35
aagataaattctcttgtgagtttgc

SEQ ID NO: 253747 - DNA, 25 bp, Artificial
  probe
  misc_feature (1)..(25): SEQ ID NO: 3458; WAN024GOK_at; Start 23; Stop 47
cttgtgagtttgcttacttcaagaa

SEQ ID NO: 253748 - DNA, 25 bp, Artificial
  probe
  misc_feature (1)..(25): SEQ ID NO: 3458; WAN024GOK_at; Start 10; Stop 34
aaagataaattctcttgtgagtttg

SEQ ID NO: 253749 - DNA, 25 bp, Artificial
  probe
  misc_feature (1)..(25): SEQ ID NO: 3458; WAN024GOK_at; Start 16; Stop 40
aaattctcttgtgagtttgcttact

SEQ ID NO: 253750 - DNA, 25 bp, Artificial
  probe
  misc_feature (1)..(25): SEQ ID NO: 3458; WAN024GOK_at; Start 21; Stop 45
ctcttgtgagtttgcttacttcaag

SEQ ID NO: 253751 - DNA, 25 bp, Artificial
  probe
  misc_feature (1)..(25): SEQ ID NO: 3458; WAN024GOK_at; Start 33; Stop 57
tgcttacttcaagaattttctattt

SEQ ID NO: 253752 - DNA, 25 bp, Artificial
  probe
  misc_feature (1)..(25): SEQ ID NO: 2543; WAN024GOL_at; Start 2264; Stop 2288
tgcagacagctaaaattaccgaaaa

SEQ ID NO: 253753 - DNA, 25 bp, Artificial
  probe
  misc_feature (1)..(25): SEQ ID NO: 2543; WAN024GOL_at; Start 2286; Stop 2310
aaaaaatggcttgctggccggtctt

SEQ ID NO: 253754 - DNA, 25 bp, Artificial
  probe
  misc_feature (1)..(25): SEQ ID NO: 2543; WAN024GOL_at; Start 1777; Stop 1801
tatggtcggactgccaaagggctac

SEQ ID NO: 253755 - DNA, 25 bp, Artificial
  probe
  misc_feature (1)..(25): SEQ ID NO: 2543; WAN024GOL_at; Start 1212; Stop 1236
ccatatcgacgaagtgattcgtatc

SEQ ID NO: 253756 - DNA, 25 bp, Artificial
  probe
  misc_feature (1)..(25): SEQ ID NO: 2543; WAN024GOL_at; Start 1791; Stop 1815
caaagggctaccagtagtcaatctc

SEQ ID NO: 253757 - DNA, 25 bp, Artificial
  probe
  misc_feature (1)..(25): SEQ ID NO: 2543; WAN024GOL_at; Start 2437; Stop 2461
caagatgctcagatagtgactttca

SEQ ID NO: 253758 - DNA, 25 bp, Artificial
  probe
  misc_feature (1)..(25): SEQ ID NO: 2543; WAN024GOL_at; Start 1365; Stop 1389
gattcaatctgagtatgatgacctc

SEQ ID NO: 253759 - DNA, 25 bp, Artificial
  probe
  misc_feature (1)..(25): SEQ ID NO: 2543; WAN024GOL_at; Start 2450; Stop 2474
tagtgactttcacaacggttgcggt

SEQ ID NO: 253760 - DNA, 25 bp, Artificial
  probe
  misc_feature (1)..(25): SEQ ID NO: 2543; WAN024GOL_at; Start 1454; Stop 1478
aagacgaattggatgaagttaaacg

SEQ ID NO: 253761 - DNA, 25 bp, Artificial
  probe
  misc_feature (1)..(25): SEQ ID NO: 2543; WAN024GOL_at; Start 1416; Stop 1440
tattcttgctaagcctgaacgtgtt

SEQ ID NO: 253762 - DNA, 25 bp, Artificial
  probe
  misc_feature (1)..(25): SEQ ID NO: 2543; WAN024GOL_at; Start 2140; Stop 2164
gacacagttgttggtgccagcttga

SEQ ID NO: 253763 - DNA, 25 bp, Artificial
  probe
  misc_feature (1)..(25): SEQ ID NO: 2543; WAN024GOL_at; Start 2127; Stop 2151
ccttcgtgaaggagacacagttgtt

SEQ ID NO: 253764 - DNA, 25 bp, Artificial
  probe
  misc_feature (1)..(25): SEQ ID NO: 2543; WAN024GOL_at; Start 1898; Stop 1922
caacccgtcacggtattgtgaagag

SEQ ID NO: 253765 - DNA, 25 bp, Artificial
  probe
  misc_feature (1)..(25): SEQ ID NO: 2543; WAN024GOL_at; Start 1184; Stop 1208
tcttagaaggtctcttgattgcgct

SEQ ID NO: 253766 - DNA, 25 bp, Artificial
  probe
  misc_feature (1)..(25): SEQ ID NO: 2543; WAN024GOL_at; Start 2458; Stop 2482
ttcacaacggttgcggtggcagaaa

SEQ ID NO: 253767 - DNA, 25 bp, Artificial
  probe
  misc_feature (1)..(25): SEQ ID NO: 2543; WAN024GOL_at; Start 40; Stop 64
gaaatgaggcatttattaatgcagg

SEQ ID NO: 253768 - DNA, 25 bp, Artificial
  probe
  misc_feature (1)..(25): SEQ ID NO: 2543; WAN024GOL_at; Start 2253; Stop 2277
tggtaagggaatgcagacagctaaa

SEQ ID NO: 253769 - DNA, 25 bp, Artificial
  probe
  misc_feature (1)..(25): SEQ ID NO: 2543; WAN024GOL_at; Start 2104; Stop 2128
gccactggtgtgaaaggtgttaacc

SEQ ID NO: 253770 - DNA, 25 bp, Artificial
  probe
  misc_feature (1)..(25): SEQ ID NO: 2543; WAN024GOL_at; Start 1199; Stop 1223
tgattgcgctagaccatatcgacga

SEQ ID NO: 253771 - DNA, 25 bp, Artificial
  probe
  misc_feature (1)..(25): SEQ ID NO: 2543; WAN024GOL_at; Start 1054; Stop 1078
gctatccaaaatggtataccgaaaa

SEQ ID NO: 253772 - DNA, 25 bp, Artificial
  probe
  misc_feature (1)..(25): SEQ ID NO: 2543; WAN024GOL_at; Start 1984; Stop 2008
gatgaagatgagttaatcaatgtct

SEQ ID NO: 253773 - DNA, 25 bp, Artificial
  probe
  misc_feature (1)..(25): SEQ ID NO: 2543; WAN024GOL_at; Start 879; Stop 903
tgttcgcttggttcaggaaaaacgc

SEQ ID NO: 253774 - DNA, 25 bp, Artificial
  probe
  misc_feature (1)..(25): SEQ ID NO: 2543; WAN024GOL_at; Start 623; Stop 647
ttgatgcagtgaagttggtcatgga

SEQ ID NO: 253775 - DNA, 25 bp, Artificial
  probe
  misc_feature (1)..(25): SEQ ID NO: 2543; WAN024GOL_at; Start 26; Stop 50
tacttactaattgtgaaatgaggca

SEQ ID NO: 253776 - DNA, 25 bp, Artificial
  probe
  misc_feature (1)..(25): SEQ ID NO: 2543; WAN024GOL_at; Start 1523; Stop 1547
tcttgagtctcgaggatgaggactt

SEQ ID NO: 253777 - DNA, 25 bp, Artificial
  probe
  misc_feature (1)..(25): SEQ ID NO: 2543; WAN024GOL_at; Start 884; Stop 908
gcttggttcaggaaaaacgcattga

SEQ ID NO: 253778 - DNA, 25 bp, Artificial
  probe
  misc_feature (1)..(25): SEQ ID NO: 2543; WAN024GOL_at; Start 2166; Stop 2190
tactgatcaagatgaggttcttatt

SEQ ID NO: 253779 - DNA, 25 bp, Artificial
  probe
  misc_feature (1)..(25): SEQ ID NO: 2543; WAN024GOL_at; Start 1879; Stop 1903
gatgcttatctcttctttacaaccc

SEQ ID NO: 253780 - DNA, 25 bp, Artificial
  probe
  misc_feature (1)..(25): SEQ ID NO: 2543; WAN024GOL_at; Start 1380; Stop 1404
tgatgacctcttggctctgattgcg

SEQ ID NO: 253781 - DNA, 25 bp, Artificial
  probe
  misc_feature (1)..(25): SEQ ID NO: 2543; WAN024GOL_at; Start 2152; Stop 2176
ggtgccagcttgattactgatcaag

SEQ ID NO: 253782 - DNA, 25 bp, Artificial
  probe
  misc_feature (1)..(25): SEQ ID NO: 2543; WAN024GOL_at; Start 2300; Stop 2324
tggccggtcttatgactgttcaagg

SEQ ID NO: 253783 - DNA, 25 bp, Artificial
  probe
  misc_feature (1)..(25): SEQ ID NO: 2543; WAN024GOL_at; Start 1422; Stop 1446
tgctaagcctgaacgtgtttctcaa

SEQ ID NO: 253784 - DNA, 25 bp, Artificial
  probe
  misc_feature (1)..(25): SEQ ID NO: 2543; WAN024GOL_at; Start 1667; Stop 1691
aagatgatgactttgttcgtgagtt

SEQ ID NO: 253785 - DNA, 25 bp, Artificial
  probe
  misc_feature (1)..(25): SEQ ID NO: 2543; WAN024GOL_at; Start 2423; Stop 2447
taatgcgcctggatcaagatgctca

SEQ ID NO: 253786 - DNA, 25 bp, Artificial
  probe
  misc_feature (1)..(25): SEQ ID NO: 7753; WAN02Q9FZ_at; Start 303; Stop 327
gaggaagttcattgcggcttttgtt

SEQ ID NO: 253787 - DNA, 25 bp, Artificial
  probe
  misc_feature (1)..(25): SEQ ID NO: 7753; WAN02Q9FZ_at; Start 379; Stop 403
tcaggaagaaggttcctaggccgct

SEQ ID NO: 253788 - DNA, 25 bp, Artificial
  probe
  misc_feature (1)..(25): SEQ ID NO: 7753; WAN02Q9FZ_at; Start 60; Stop 84
taatgatgcattctttgctgcgtgc

SEQ ID NO: 253789 - DNA, 25 bp, Artificial
  probe
  misc_feature (1)..(25): SEQ ID NO: 7753; WAN02Q9FZ_at; Start 325; Stop 349
gttatgtatttctggcaaacacccc

SEQ ID NO: 253790 - DNA, 25 bp, Artificial
  probe
  misc_feature (1)..(25): SEQ ID NO: 7753; WAN02Q9FZ_at; Start 129; Stop 153
ttattgttgtactgtgaggcgaggc

SEQ ID NO: 253791 - DNA, 25 bp, Artificial
  probe
  misc_feature (1)..(25): SEQ ID NO: 7753; WAN02Q9FZ_at; Start 370; Stop 394
tataaagaatcaggaagaaggttcc

SEQ ID NO: 253792 - DNA, 25 bp, Artificial
  probe
  misc_feature (1)..(25): SEQ ID NO: 7753; WAN02Q9FZ_at; Start 257; Stop 281
ggatgaatcgtttagggccactgtt

SEQ ID NO: 253793 - DNA, 25 bp, Artificial
  probe
  misc_feature (1)..(25): SEQ ID NO: 7753; WAN02Q9FZ_at; Start 171; Stop 195
aaccttggatattgttgaggcacgc

SEQ ID NO: 253794 - DNA, 25 bp, Artificial
  probe
  misc_feature (1)..(25): SEQ ID NO: 7753; WAN02Q9FZ_at; Start 102; Stop 126
aaaggttaaattttgccctgatgcg

SEQ ID NO: 253795 - DNA, 25 bp, Artificial
  probe
  misc_feature (1)..(25): SEQ ID NO: 7753; WAN02Q9FZ_at; Start 5; Stop 29
ttcgtcacgaaatgattagaaaaca

SEQ ID NO: 253796 - DNA, 25 bp, Artificial
  probe
  misc_feature (1)..(25): SEQ ID NO: 7753; WAN02Q9FZ_at; Start 344; Stop 368
cacccctatctcgagttttctttga

SEQ ID NO: 253797 - DNA, 25 bp, Artificial
  probe
  misc_feature (1)..(25): SEQ ID NO: 7753; WAN02Q9FZ_at; Start 151; Stop 175
ggctcaatatgcacaagactaacct

SEQ ID NO: 253798 - DNA, 25 bp, Artificial
  probe
  misc_feature (1)..(25): SEQ ID NO: 7753; WAN02Q9FZ_at; Start 237; Stop 261
cggtattagtacaaagtattggatg

SEQ ID NO: 253799 - DNA, 25 bp, Artificial
  probe
  misc_feature (1)..(25): SEQ ID NO: 7753; WAN02Q9FZ_at; Start 174; Stop 198
cttggatattgttgaggcacgcatt

SEQ ID NO: 253800 - DNA, 25 bp, Artificial
  probe
  misc_feature (1)..(25): SEQ ID NO: 7753; WAN02Q9FZ_at; Start 219; Stop 243
cagattcttgaaagaaaacggtatt

SEQ ID NO: 253801 - DNA, 25 bp, Artificial
  probe
  misc_feature (1)..(25): SEQ ID NO: 7753; WAN02Q9FZ_at; Start 402; Stop 426
cttgaaaggaaatgttaatgacggg

SEQ ID NO: 253802 - DNA, 25 bp, Artificial
  probe
  misc_feature (1)..(25): SEQ ID NO: 7753; WAN02Q9FZ_at; Start 317; Stop 341
cggcttttgttatgtatttctggca

SEQ ID NO: 253803 - DNA, 25 bp, Artificial
  probe
  misc_feature (1)..(25): SEQ ID NO: 7753; WAN02Q9FZ_at; Start 160; Stop 184
tgcacaagactaaccttggatattg

SEQ ID NO: 253804 - DNA, 25 bp, Artificial
  probe
  misc_feature (1)..(25): SEQ ID NO: 7753; WAN02Q9FZ_at; Start 206; Stop 230
tagaaacggttaacagattcttgaa

SEQ ID NO: 253805 - DNA, 25 bp, Artificial
  probe
  misc_feature (1)..(25): SEQ ID NO: 7753; WAN02Q9FZ_at; Start 297; Stop 321
ttctaagaggaagttcattgcggct

SEQ ID NO: 253806 - DNA, 25 bp, Artificial
  probe
  misc_feature (1)..(25): SEQ ID NO: 7753; WAN02Q9FZ_at; Start 385; Stop 409
agaaggttcctaggccgcttgaaag

SEQ ID NO: 253807 - DNA, 25 bp, Artificial
  probe
  misc_feature (1)..(25): SEQ ID NO: 7753; WAN02Q9FZ_at; Start 285; Stop 309
cctgaaaggactttctaagaggaag

SEQ ID NO: 253808 - DNA, 25 bp, Artificial
  probe
  misc_feature (1)..(25): SEQ ID NO: 7753; WAN02Q9FZ_at; Start 138; Stop 162
tactgtgaggcgaggctcaatatgc

SEQ ID NO: 253809 - DNA, 25 bp, Artificial
  probe
  misc_feature (1)..(25): SEQ ID NO: 7753; WAN02Q9FZ_at; Start 45; Stop 69
ggaagttgctgcttctaatgatgca

SEQ ID NO: 253810 - DNA, 25 bp, Artificial
  probe
  misc_feature (1)..(25): SEQ ID NO: 7753; WAN02Q9FZ_at; Start 144; Stop 168
gaggcgaggctcaatatgcacaaga

SEQ ID NO: 253811 - DNA, 25 bp, Artificial
  probe
  misc_feature (1)..(25): SEQ ID NO: 7753; WAN02Q9FZ_at; Start 253; Stop 277
tattggatgaatcgtttagggccac

SEQ ID NO: 253812 - DNA, 25 bp, Artificial
  probe
  misc_feature (1)..(25): SEQ ID NO: 7753; WAN02Q9FZ_at; Start 393; Stop 417
cctaggccgcttgaaaggaaatgtt

SEQ ID NO: 253813 - DNA, 25 bp, Artificial
  probe
  misc_feature (1)..(25): SEQ ID NO: 7753; WAN02Q9FZ_at; Start 334; Stop 358
ttctggcaaacacccctatctcgag

SEQ ID NO: 253814 - DNA, 25 bp, Artificial
  probe
  misc_feature (1)..(25): SEQ ID NO: 7753; WAN02Q9FZ_at; Start 80; Stop 104
cgtgcgctggggtctttgcagaaaa

SEQ ID NO: 253815 - DNA, 25 bp, Artificial
  probe
  misc_feature (1)..(25): SEQ ID NO: 7753; WAN02Q9FZ_at; Start 187; Stop 211
gaggcacgcatttttgtagtagaaa

SEQ ID NO: 253816 - DNA, 25 bp, Artificial
  probe
  misc_feature (1)..(25): SEQ ID NO: 7753; WAN02Q9FZ_at; Start 116; Stop 140
gccctgatgcggtttattgttgtac

SEQ ID NO: 253817 - DNA, 25 bp, Artificial
  probe
  misc_feature (1)..(25): SEQ ID NO: 7753; WAN02Q9FZ_at; Start 32; Stop 56
aaattcaatttcaggaagttgctgc

SEQ ID NO: 253818 - DNA, 25 bp, Artificial
  probe
  misc_feature (1)..(25): SEQ ID NO: 7753; WAN02Q9FZ_at; Start 191; Stop 215
cacgcatttttgtagtagaaacggt

SEQ ID NO: 253819 - DNA, 25 bp, Artificial
  probe
  misc_feature (1)..(25): SEQ ID NO: 7753; WAN02Q9FZ_at; Start 66; Stop 90
tgcattctttgctgcgtgcgctggg

SEQ ID NO: 253820 - DNA, 25 bp, Artificial
  probe
  misc_feature (1)..(25): SEQ ID NO: 7754; WAN02Q9J2_at; Start 56; Stop 80
tagtcagatcgtacaataaagcttt

SEQ ID NO: 253821 - DNA, 25 bp, Artificial
  probe
  misc_feature (1)..(25): SEQ ID NO: 7754; WAN02Q9J2_at; Start 16; Stop 40
tcaagcaataaacaggaataccaat

SEQ ID NO: 253822 - DNA, 25 bp, Artificial
  probe
  misc_feature (1)..(25): SEQ ID NO: 7754; WAN02Q9J2_at; Start 378; Stop 402
tatagaacagctaaagggtagtgct

SEQ ID NO: 253823 - DNA, 25 bp, Artificial
  probe
  misc_feature (1)..(25): SEQ ID NO: 7754; WAN02Q9J2_at; Start 351; Stop 375
gactaatccaattgaggagtggcag

SEQ ID NO: 253824 - DNA, 25 bp, Artificial
  probe
  misc_feature (1)..(25): SEQ ID NO: 7754; WAN02Q9J2_at; Start 117; Stop 141
aaatggcccaaaatctcacattgga

SEQ ID NO: 253825 - DNA, 25 bp, Artificial
  probe
  misc_feature (1)..(25): SEQ ID NO: 7754; WAN02Q9J2_at; Start 322; Stop 346
tcaaaggaaatgatagcattgaagg

SEQ ID NO: 253826 - DNA, 25 bp, Artificial
  probe
  misc_feature (1)..(25): SEQ ID NO: 7754; WAN02Q9J2_at; Start 203; Stop 227
gaaattggagcgataagcgtgcttc

SEQ ID NO: 253827 - DNA, 25 bp, Artificial
  probe
  misc_feature (1)..(25): SEQ ID NO: 7754; WAN02Q9J2_at; Start 162; Stop 186
tctttcaatgaagggcctaacggag

SEQ ID NO: 253828 - DNA, 25 bp, Artificial
  probe
  misc_feature (1)..(25): SEQ ID NO: 7754; WAN02Q9J2_at; Start 265; Stop 289
gcaatacctgatcactacttcgcac

SEQ ID NO: 253829 - DNA, 25 bp, Artificial
  probe
  misc_feature (1)..(25): SEQ ID NO: 7754; WAN02Q9J2_at; Start 388; Stop 412
ctaaagggtagtgctgaaggaagca

SEQ ID NO: 253830 - DNA, 25 bp, Artificial
  probe
  misc_feature (1)..(25): SEQ ID NO: 7754; WAN02Q9J2_at; Start 280; Stop 304
tacttcgcactagtttctcggtact

SEQ ID NO: 253831 - DNA, 25 bp, Artificial
  probe
  misc_feature (1)..(25): SEQ ID NO: 7754; WAN02Q9J2_at; Start 447; Stop 471
ggaggtactagactacctttcatcc

SEQ ID NO: 253832 - DNA, 25 bp, Artificial
  probe
  misc_feature (1)..(25): SEQ ID NO: 7754; WAN02Q9J2_at; Start 335; Stop 359
tagcattgaaggatgagactaatcc

SEQ ID NO: 253833 - DNA, 25 bp, Artificial
  probe
  misc_feature (1)..(25): SEQ ID NO: 7754; WAN02Q9J2_at; Start 135; Stop 159
cattggaagacatttgatgacctca

SEQ ID NO: 253834 - DNA, 25 bp, Artificial
  probe
  misc_feature (1)..(25): SEQ ID NO: 7754; WAN02Q9J2_at; Start 150; Stop 174
gatgacctcatttctttcaatgaag

SEQ ID NO: 253835 - DNA, 25 bp, Artificial
  probe
  misc_feature (1)..(25): SEQ ID NO: 7754; WAN02Q9J2_at; Start 234; Stop 258
ggccaggacaacgtatactcatcag

SEQ ID NO: 253836 - DNA, 25 bp, Artificial
  probe
  misc_feature (1)..(25): SEQ ID NO: 7754; WAN02Q9J2_at; Start 45; Stop 69
aaaagataacttagtcagatcgtac

SEQ ID NO: 253837 - DNA, 25 bp, Artificial
  probe
  misc_feature (1)..(25): SEQ ID NO: 7754; WAN02Q9J2_at; Start 463; Stop 487
ctttcatcctacataaatagacgca

SEQ ID NO: 253838 - DNA, 25 bp, Artificial
  probe
  misc_feature (1)..(25): SEQ ID NO: 7754; WAN02Q9J2_at; Start 215; Stop 239
ataagcgtgcttctgccgtggccag

SEQ ID NO: 253839 - DNA, 25 bp, Artificial
  probe
  misc_feature (1)..(25): SEQ ID NO: 7754; WAN02Q9J2_at; Start 413; Stop 437
tacgataccccgcatggaatgggat

SEQ ID NO: 253840 - DNA, 25 bp, Artificial
  probe
  misc_feature (1)..(25): SEQ ID NO: 7754; WAN02Q9J2_at; Start 295; Stop 319
tctcggtactatgcatatgatccaa

SEQ ID NO: 253841 - DNA, 25 bp, Artificial
  probe
  misc_feature (1)..(25): SEQ ID NO: 7754; WAN02Q9J2_at; Start 102; Stop 126
aatctttgctataaaaaatggccca

SEQ ID NO: 253842 - DNA, 25 bp, Artificial
  probe
  misc_feature (1)..(25): SEQ ID NO: 7754; WAN02Q9J2_at; Start 403; Stop 427
gaaggaagcatacgataccccgcat

SEQ ID NO: 253843 - DNA, 25 bp, Artificial
  probe
  misc_feature (1)..(25): SEQ ID NO: 7754; WAN02Q9J2_at; Start 2; Stop 26
tgaccggcaattcttcaagcaataa

SEQ ID NO: 253844 - DNA, 25 bp, Artificial
  probe
  misc_feature (1)..(25): SEQ ID NO: 7754; WAN02Q9J2_at; Start 421; Stop 445
cccgcatggaatgggataatatcac

SEQ ID NO: 253845 - DNA, 25 bp, Artificial
  probe
  misc_feature (1)..(25): SEQ ID NO: 7754; WAN02Q9J2_at; Start 249; Stop 273
tactcatcagataacagcaatacct

SEQ ID NO: 253846 - DNA, 25 bp, Artificial
  probe
  misc_feature (1)..(25): SEQ ID NO: 7754; WAN02Q9J2_at; Start 73; Stop 97
aaagctttgaagaaaaatgcgcctt

SEQ ID NO: 253847 - DNA, 25 bp, Artificial
  probe
  misc_feature (1)..(25): SEQ ID NO: 7754; WAN02Q9J2_at; Start 191; Stop 215
ctaatgttgtgggaaattggagcga

SEQ ID NO: 253848 - DNA, 25 bp, Artificial
  probe
  misc_feature (1)..(25): SEQ ID NO: 7754; WAN02Q9J2_at; Start 86; Stop 110
aaaatgcgccttattcaatctttgc

SEQ ID NO: 253849 - DNA, 25 bp, Artificial
  probe
  misc_feature (1)..(25): SEQ ID NO: 7754; WAN02Q9J2_at; Start 435; Stop 459
gataatatcacaggaggtactagac

SEQ ID NO: 253850 - DNA, 25 bp, Artificial
  probe
  misc_feature (1)..(25): SEQ ID NO: 7754; WAN02Q9J2_at; Start 176; Stop 200
gcctaacggagttgactaatgttgt

SEQ ID NO: 253851 - DNA, 25 bp, Artificial
  probe
  misc_feature (1)..(25): SEQ ID NO: 7754; WAN02Q9J2_at; Start 226; Stop 250
tctgccgtggccaggacaacgtata

SEQ ID NO: 253852 - DNA, 25 bp, Artificial
  probe
  misc_feature (1)..(25): SEQ ID NO: 7754; WAN02Q9J2_at; Start 307; Stop 331
gcatatgatccaatatcaaaggaaa

SEQ ID NO: 253853 - DNA, 25 bp, Artificial
  probe
  misc_feature (1)..(25): SEQ ID NO: 7754; WAN02Q9J2_at; Start 366; Stop 390
ggagtggcagcatatagaacagcta

SEQ ID NO: 253854 - DNA, 25 bp, Artificial
  probe
  misc_feature (1)..(25): SEQ ID NO: 7756; WAN02QB81_at; Start 247; Stop 271
tatccgacagtcaaggctatcattg

SEQ ID NO: 253855 - DNA, 25 bp, Artificial
  probe
  misc_feature (1)..(25): SEQ ID NO: 7756; WAN02QB81_at; Start 127; Stop 151
tattggcatacatcaatgaacaagg

SEQ ID NO: 253856 - DNA, 25 bp, Artificial
  probe
  misc_feature (1)..(25): SEQ ID NO: 7756; WAN02QB81_at; Start 36; Stop 60
gctaaaatctctaaacatggttatc

SEQ ID NO: 253857 - DNA, 25 bp, Artificial
  probe
  misc_feature (1)..(25): SEQ ID NO: 7756; WAN02QB81_at; Start 114; Stop 138
tagagcttttgcttattggcataca

SEQ ID NO: 253858 - DNA, 25 bp, Artificial
  probe
  misc_feature (1)..(25): SEQ ID NO: 7756; WAN02QB81_at; Start 198; Stop 222
agttacaatttacagccctactaag

SEQ ID NO: 253859 - DNA, 25 bp, Artificial
  probe
  misc_feature (1)..(25): SEQ ID NO: 7756; WAN02QB81_at; Start 190; Stop 214
gaggttacagttacaatttacagcc

SEQ ID NO: 253860 - DNA, 25 bp, Artificial
  probe
  misc_feature (1)..(25): SEQ ID NO: 7756; WAN02QB81_at; Start 88; Stop 112
gataaggctaaagttactaagcgca

SEQ ID NO: 253861 - DNA, 25 bp, Artificial
  probe
  misc_feature (1)..(25): SEQ ID NO: 7756; WAN02QB81_at; Start 208; Stop 232
tacagccctactaagtctaaattag

SEQ ID NO: 253862 - DNA, 25 bp, Artificial
  probe
  misc_feature (1)..(25): SEQ ID NO: 7756; WAN02QB81_at; Start 287; Stop 311
caggtatttggacagatgataatca

SEQ ID NO: 253863 - DNA, 25 bp, Artificial
  probe
  misc_feature (1)..(25): SEQ ID NO: 7756; WAN02QB81_at; Start 158; Stop 182
ggagggctgcttttagcccctctaa

SEQ ID NO: 253864 - DNA, 25 bp, Artificial
  probe
  misc_feature (1)..(25): SEQ ID NO: 7756; WAN02QB81_at; Start 145; Stop 169
aacaaggataaagggagggctgctt

SEQ ID NO: 253865 - DNA, 25 bp, Artificial
  probe
  misc_feature (1)..(25): SEQ ID NO: 7756; WAN02QB81_at; Start 347; Stop 371
gattaagcgaggaaaaagggcatta

SEQ ID NO: 253866 - DNA, 25 bp, Artificial
  probe
  misc_feature (1)..(25): SEQ ID NO: 7756; WAN02QB81_at; Start 374; Stop 398
gattagagtttgatatagaggaggt

SEQ ID NO: 253867 - DNA, 25 bp, Artificial
  probe
  misc_feature (1)..(25): SEQ ID NO: 7756; WAN02QB81_at; Start 232; Stop 256
gatccacctaacttgtatccgacag

SEQ ID NO: 253868 - DNA, 25 bp, Artificial
  probe
  misc_feature (1)..(25): SEQ ID NO: 7756; WAN02QB81_at; Start 66; Stop 90
taatgacagacaacatcaaacagat

SEQ ID NO: 253869 - DNA, 25 bp, Artificial
  probe
  misc_feature (1)..(25): SEQ ID NO: 7756; WAN02QB81_at; Start 2; Stop 26
tgaaatttgagttttctttgcctcg

SEQ ID NO: 253870 - DNA, 25 bp, Artificial
  probe
  misc_feature (1)..(25): SEQ ID NO: 7756; WAN02QB81_at; Start 276; Stop 300
catgactgatgcaggtatttggaca

SEQ ID NO: 253871 - DNA, 25 bp, Artificial
  probe
  misc_feature (1)..(25): SEQ ID NO: 7756; WAN02QB81_at; Start 266; Stop 290
tcattgatggcatgactgatgcagg

SEQ ID NO: 253872 - DNA, 25 bp, Artificial
  probe
  misc_feature (1)..(25): SEQ ID NO: 7756; WAN02QB81_at; Start 51; Stop 75
catggttatcaatagtaatgacaga

SEQ ID NO: 253873 - DNA, 25 bp, Artificial
  probe
  misc_feature (1)..(25): SEQ ID NO: 7756; WAN02QB81_at; Start 240; Stop 264
taacttgtatccgacagtcaaggct

SEQ ID NO: 253874 - DNA, 25 bp, Artificial
  probe
  misc_feature (1)..(25): SEQ ID NO: 7756; WAN02QB81_at; Start 310; Stop 334
cataaggttatcaaaaagttatcct

SEQ ID NO: 253875 - DNA, 25 bp, Artificial
  probe
  misc_feature (1)..(25): SEQ ID NO: 7756; WAN02QB81_at; Start 140; Stop 164
caatgaacaaggataaagggagggc

SEQ ID NO: 253876 - DNA, 25 bp, Artificial
  probe
  misc_feature (1)..(25): SEQ ID NO: 7756; WAN02QB81_at; Start 96; Stop 120
taaagttactaagcgcattagagct

SEQ ID NO: 253877 - DNA, 25 bp, Artificial
  probe
  misc_feature (1)..(25): SEQ ID NO: 7756; WAN02QB81_at; Start 21; Stop 45
gcctcggaatactaagctaaaatct

SEQ ID NO: 253878 - DNA, 25 bp, Artificial
  probe
  misc_feature (1)..(25): SEQ ID NO: 7756; WAN02QB81_at; Start 219; Stop 243
taagtctaaattagatccacctaac

SEQ ID NO: 253879 - DNA, 25 bp, Artificial
  probe
  misc_feature (1)..(25): SEQ ID NO: 7756; WAN02QB81_at; Start 175; Stop 199
ccctctaacccttgtgaggttacag

SEQ ID NO: 253880 - DNA, 25 bp, Artificial
  probe
  misc_feature (1)..(25): SEQ ID NO: 7756; WAN02QB81_at; Start 297; Stop 321
gacagatgataatcataaggttatc

SEQ ID NO: 253881 - DNA, 25 bp, Artificial
  probe
  misc_feature (1)..(25): SEQ ID NO: 7756; WAN02QB81_at; Start 16; Stop 40
tctttgcctcggaatactaagctaa

SEQ ID NO: 253882 - DNA, 25 bp, Artificial
  probe
  misc_feature (1)..(25): SEQ ID NO: 7756; WAN02QB81_at; Start 74; Stop 98
gacaacatcaaacagataaggctaa

SEQ ID NO: 253883 - DNA, 25 bp, Artificial
  probe
  misc_feature (1)..(25): SEQ ID NO: 7756; WAN02QB81_at; Start 332; Stop 356
cctttgtttatggtggattaagcga

SEQ ID NO: 253884 - DNA, 25 bp, Artificial
  probe
  misc_feature (1)..(25): SEQ ID NO: 7756; WAN02QB81_at; Start 258; Stop 282
caaggctatcattgatggcatgact

SEQ ID NO: 253885 - DNA, 25 bp, Artificial
  probe
  misc_feature (1)..(25): SEQ ID NO: 7756; WAN02QB81_at; Start 252; Stop 276
gacagtcaaggctatcattgatggc

SEQ ID NO: 253886 - DNA, 25 bp, Artificial
  probe
  misc_feature (1)..(25): SEQ ID NO: 7756; WAN02QB81_at; Start 358; Stop 382
gaaaaagggcattatagattagagt

SEQ ID NO: 253887 - DNA, 25 bp, Artificial
  probe
  misc_feature (1)..(25): SEQ ID NO: 7756; WAN02QB81_at; Start 102; Stop 126
tactaagcgcattagagcttttgct

SEQ ID NO: 253888 - DNA, 25 bp, Artificial
  probe
  misc_feature (1)..(25): SEQ ID NO: 7755; WAN02QB8Q_at; Start 441; Stop 465
caatccctgggtgagtttcaccagt

SEQ ID NO: 253889 - DNA, 25 bp, Artificial
  probe
  misc_feature (1)..(25): SEQ ID NO: 7755; WAN02QB8Q_at; Start 558; Stop 582
gctggcgattcaggttcatcatgcc

SEQ ID NO: 253890 - DNA, 25 bp, Artificial
  probe
  misc_feature (1)..(25): SEQ ID NO: 7755; WAN02QB8Q_at; Start 343; Stop 367
cagtttctacacatatattcgcaag

SEQ ID NO: 253891 - DNA, 25 bp, Artificial
  probe
  misc_feature (1)..(25): SEQ ID NO: 7755; WAN02QB8Q_at; Start 67; Stop 91
gaggcatttcagtcagttgctcaat

SEQ ID NO: 253892 - DNA, 25 bp, Artificial
  probe
  misc_feature (1)..(25): SEQ ID NO: 7755; WAN02QB8Q_at; Start 589; Stop 613
gatggcttccatgtcggcagaatgc

SEQ ID NO: 253893 - DNA, 25 bp, Artificial
  probe
  misc_feature (1)..(25): SEQ ID NO: 7755; WAN02QB8Q_at; Start 371; Stop 395
tggcgtgttacggtgaaaacctggc

SEQ ID NO: 253894 - DNA, 25 bp, Artificial
  probe
  misc_feature (1)..(25): SEQ ID NO: 7755; WAN02QB8Q_at; Start 358; Stop 382
tattcgcaagatgtggcgtgttacg

SEQ ID NO: 253895 - DNA, 25 bp, Artificial
  probe
  misc_feature (1)..(25): SEQ ID NO: 7755; WAN02QB8Q_at; Start 331; Stop 355
gacgatttccggcagtttctacaca

SEQ ID NO: 253896 - DNA, 25 bp, Artificial
  probe
  misc_feature (1)..(25): SEQ ID NO: 7755; WAN02QB8Q_at; Start 479; Stop 503
tggccaatatggacaacttcttcgc

SEQ ID NO: 253897 - DNA, 25 bp, Artificial
  probe
  misc_feature (1)..(25): SEQ ID NO: 7755; WAN02QB8Q_at; Start 318; Stop 342
gagtgaataccacgacgatttccgg

SEQ ID NO: 253898 - DNA, 25 bp, Artificial
  probe
  misc_feature (1)..(25): SEQ ID NO: 7755; WAN02QB8Q_at; Start 10; Stop 34
aaaatcactggatataccaccgttg

SEQ ID NO: 253899 - DNA, 25 bp, Artificial
  probe
  misc_feature (1)..(25): SEQ ID NO: 7755; WAN02QB8Q_at; Start 512; Stop 536
tcaccatgggcaaatattatacgca

SEQ ID NO: 253900 - DNA, 25 bp, Artificial
  probe
  misc_feature (1)..(25): SEQ ID NO: 7755; WAN02QB8Q_at; Start 248; Stop 272
tgatatgggatagtgttcacccttg

SEQ ID NO: 253901 - DNA, 25 bp, Artificial
  probe
  misc_feature (1)..(25): SEQ ID NO: 7755; WAN02QB8Q_at; Start 271; Stop 295
tgttacaccgttttccatgagcaaa

SEQ ID NO: 253902 - DNA, 25 bp, Artificial
  probe
  misc_feature (1)..(25): SEQ ID NO: 7755; WAN02QB8Q_at; Start 208; Stop 232
catccggaatttcgtatggcaatga

SEQ ID NO: 253903 - DNA, 25 bp, Artificial
  probe
  misc_feature (1)..(25): SEQ ID NO: 7755; WAN02QB8Q_at; Start 177; Stop 201
tattcacattcttgcccgcctgatg

SEQ ID NO: 253904 - DNA, 25 bp, Artificial
  probe
  misc_feature (1)..(25): SEQ ID NO: 7755; WAN02QB8Q_at; Start 85; Stop 109
gctcaatgtacctataaccagaccg

SEQ ID NO: 253905 - DNA, 25 bp, Artificial
  probe
  misc_feature (1)..(25): SEQ ID NO: 7755; WAN02QB8Q_at; Start 151; Stop 175
aataagcacaagttttatccggcct

SEQ ID NO: 253906 - DNA, 25 bp, Artificial
  probe
  misc_feature (1)..(25): SEQ ID NO: 7755; WAN02QB8Q_at; Start 298; Stop 322
gaaacgttttcatcgctctggagtg

SEQ ID NO: 253907 - DNA, 25 bp, Artificial
  probe
  misc_feature (1)..(25): SEQ ID NO: 7755; WAN02QB8Q_at; Start 97; Stop 121
tataaccagaccgttcagctggata

SEQ ID NO: 253908 - DNA, 25 bp, Artificial
  probe
  misc_feature (1)..(25): SEQ ID NO: 7755; WAN02QB8Q_at; Start 603; Stop 627
cggcagaatgcttaatgaattacaa

SEQ ID NO: 253909 - DNA, 25 bp, Artificial
  probe
  misc_feature (1)..(25): SEQ ID NO: 7755; WAN02QB8Q_at; Start 166; Stop 190
tatccggcctttattcacattcttg

SEQ ID NO: 253910 - DNA, 25 bp, Artificial
  probe
  misc_feature (1)..(25): SEQ ID NO: 7755; WAN02QB8Q_at; Start 574; Stop 598
catcatgccgtttgtgatggcttcc

SEQ ID NO: 253911 - DNA, 25 bp, Artificial
  probe
  misc_feature (1)..(25): SEQ ID NO: 7755; WAN02QB8Q_at; Start 222; Stop 246
tatggcaatgaaagacggtgagctg

SEQ ID NO: 253912 - DNA, 25 bp, Artificial
  probe
  misc_feature (1)..(25): SEQ ID NO: 7755; WAN02QB8Q_at; Start 529; Stop 553
tatacgcaaggcgacaaggtgctga

SEQ ID NO: 253913 - DNA, 25 bp, Artificial
  probe
  misc_feature (1)..(25): SEQ ID NO: 7755; WAN02QB8Q_at; Start 543; Stop 567
caaggtgctgatgccgctggcgatt

SEQ ID NO: 253914 - DNA, 25 bp, Artificial
  probe
  misc_feature (1)..(25): SEQ ID NO: 7755; WAN02QB8Q_at; Start 468; Stop 492
tgatttaaacgtggccaatatggac

SEQ ID NO: 253915 - DNA, 25 bp, Artificial
  probe
  misc_feature (1)..(25): SEQ ID NO: 7755; WAN02QB8Q_at; Start 193; Stop 217
cgcctgatgaatgctcatccggaat

SEQ ID NO: 253916 - DNA, 25 bp, Artificial
  probe
  misc_feature (1)..(25): SEQ ID NO: 7755; WAN02QB8Q_at; Start 29; Stop 53
ccgttgatatatcccaatggcatcg

SEQ ID NO: 253917 - DNA, 25 bp, Artificial
  probe
  misc_feature (1)..(25): SEQ ID NO: 7755; WAN02QB8Q_at; Start 427; Stop 451
tttttcgtctcagccaatccctggg

SEQ ID NO: 253918 - DNA, 25 bp, Artificial
  probe
  misc_feature (1)..(25): SEQ ID NO: 7755; WAN02QB8Q_at; Start 284; Stop 308
tccatgagcaaactgaaacgttttc

SEQ ID NO: 253919 - DNA, 25 bp, Artificial
  probe
  misc_feature (1)..(25): SEQ ID NO: 7755; WAN02QB8Q_at; Start 623; Stop 647
tacaacagtactgcgatgagtggca

SEQ ID NO: 253920 - DNA, 25 bp, Artificial
  probe
  misc_feature (1)..(25): SEQ ID NO: 7755; WAN02QB8Q_at; Start 112; Stop 136
cagctggatattacggcctttttaa

SEQ ID NO: 253921 - DNA, 25 bp, Artificial
  probe
  misc_feature (1)..(25): SEQ ID NO: 7755; WAN02QB8Q_at; Start 48; Stop 72
gcatcgtaaagaacattttgaggca

SEQ ID NO: 253922 - DNA, 25 bp, Artificial
  probe
  misc_feature (1)..(25): SEQ ID NO: 7757; WAN02QBN8_at; Start 195; Stop 219
tgatacaattgttacccatggtggt

SEQ ID NO: 253923 - DNA, 25 bp, Artificial
  probe
  misc_feature (1)..(25): SEQ ID NO: 7757; WAN02QBN8_at; Start 203; Stop 227
ttgttacccatggtggtccagctac

SEQ ID NO: 253924 - DNA, 25 bp, Artificial
  probe
  misc_feature (1)..(25): SEQ ID NO: 7757; WAN02QBN8_at; Start 322; Stop 346
tgttctaaaatatcctctgaagggt

SEQ ID NO: 253925 - DNA, 25 bp, Artificial
  probe
  misc_feature (1)..(25): SEQ ID NO: 7757; WAN02QBN8_at; Start 214; Stop 238
ggtggtccagctacttttatggcaa

SEQ ID NO: 253926 - DNA, 25 bp, Artificial
  probe
  misc_feature (1)..(25): SEQ ID NO: 7757; WAN02QBN8_at; Start 444; Stop 468
gcagttatcaaaaataattgaagat

SEQ ID NO: 253927 - DNA, 25 bp, Artificial
  probe
  misc_feature (1)..(25): SEQ ID NO: 7757; WAN02QBN8_at; Start 204; Stop 228
tgttacccatggtggtccagctact

SEQ ID NO: 253928 - DNA, 25 bp, Artificial
  probe
  misc_feature (1)..(25): SEQ ID NO: 7757; WAN02QBN8_at; Start 325; Stop 349
tctaaaatatcctctgaagggtatg

SEQ ID NO: 253929 - DNA, 25 bp, Artificial
  probe
  misc_feature (1)..(25): SEQ ID NO: 7757; WAN02QBN8_at; Start 327; Stop 351
taaaatatcctctgaagggtatgaa

SEQ ID NO: 253930 - DNA, 25 bp, Artificial
  probe
  misc_feature (1)..(25): SEQ ID NO: 7757; WAN02QBN8_at; Start 430; Stop 454
gcaaattttcttaagcagttatcaa

SEQ ID NO: 253931 - DNA, 25 bp, Artificial
  probe
  misc_feature (1)..(25): SEQ ID NO: 7757; WAN02QBN8_at; Start 423; Stop 447
taataatgcaaattttcttaagcag

SEQ ID NO: 253932 - DNA, 25 bp, Artificial
  probe
  misc_feature (1)..(25): SEQ ID NO: 7757; WAN02QBN8_at; Start 330; Stop 354
aatatcctctgaagggtatgaatta

SEQ ID NO: 253933 - DNA, 25 bp, Artificial
  probe
  misc_feature (1)..(25): SEQ ID NO: 7757; WAN02QBN8_at; Start 323; Stop 347
gttctaaaatatcctctgaagggta

SEQ ID NO: 253934 - DNA, 25 bp, Artificial
  probe
  misc_feature (1)..(25): SEQ ID NO: 7757; WAN02QBN8_at; Start 73; Stop 97
gaagagaatctaattcaagaggaag

SEQ ID NO: 253935 - DNA, 25 bp, Artificial
  probe
  misc_feature (1)..(25): SEQ ID NO: 7757; WAN02QBN8_at; Start 76; Stop 100
gagaatctaattcaagaggaagtat

SEQ ID NO: 253936 - DNA, 25 bp, Artificial
  probe
  misc_feature (1)..(25): SEQ ID NO: 7757; WAN02QBN8_at; Start 186; Stop 210
tgaggaatctgatacaattgttacc

SEQ ID NO: 253937 - DNA, 25 bp, Artificial
  probe
  misc_feature (1)..(25): SEQ ID NO: 7757; WAN02QBN8_at; Start 197; Stop 221
atacaattgttacccatggtggtcc

SEQ ID NO: 253938 - DNA, 25 bp, Artificial
  probe
  misc_feature (1)..(25): SEQ ID NO: 7757; WAN02QBN8_at; Start 190; Stop 214
gaatctgatacaattgttacccatg

SEQ ID NO: 253939 - DNA, 25 bp, Artificial
  probe
  misc_feature (1)..(25): SEQ ID NO: 7757; WAN02QBN8_at; Start 58; Stop 82
gttgatcgtttgaaagaagagaatc

SEQ ID NO: 253940 - DNA, 25 bp, Artificial
  probe
  misc_feature (1)..(25): SEQ ID NO: 7757; WAN02QBN8_at; Start 187; Stop 211
gaggaatctgatacaattgttaccc

SEQ ID NO: 253941 - DNA, 25 bp, Artificial
  probe
  misc_feature (1)..(25): SEQ ID NO: 7757; WAN02QBN8_at; Start 205; Stop 229
gttacccatggtggtccagctactt

SEQ ID NO: 253942 - DNA, 25 bp, Artificial
  probe
  misc_feature (1)..(25): SEQ ID NO: 7757; WAN02QBN8_at; Start 193; Stop 217
tctgatacaattgttacccatggtg

SEQ ID NO: 253943 - DNA, 25 bp, Artificial
  probe
  misc_feature (1)..(25): SEQ ID NO: 7757; WAN02QBN8_at; Start 117; Stop 141
ttctaattatgtcccaaaatattgt

SEQ ID NO: 253944 - DNA, 25 bp, Artificial
  probe
  misc_feature (1)..(25): SEQ ID NO: 7757; WAN02QBN8_at; Start 113; Stop 137
gatattctaattatgtcccaaaata

SEQ ID NO: 253945 - DNA, 25 bp, Artificial
  probe
  misc_feature (1)..(25): SEQ ID NO: 7757; WAN02QBN8_at; Start 69; Stop 93
gaaagaagagaatctaattcaagag

SEQ ID NO: 253946 - DNA, 25 bp, Artificial
  probe
  misc_feature (1)..(25): SEQ ID NO: 7757; WAN02QBN8_at; Start 78; Stop 102
gaatctaattcaagaggaagtattt

SEQ ID NO: 253947 - DNA, 25 bp, Artificial
  probe
  misc_feature (1)..(25): SEQ ID NO: 7757; WAN02QBN8_at; Start 439; Stop 463
cttaagcagttatcaaaaataattg

SEQ ID NO: 253948 - DNA, 25 bp, Artificial
  probe
  misc_feature (1)..(25): SEQ ID NO: 7757; WAN02QBN8_at; Start 216; Stop 240
tggtccagctacttttatggcaatt

SEQ ID NO: 253949 - DNA, 25 bp, Artificial
  probe
  misc_feature (1)..(25): SEQ ID NO: 7757; WAN02QBN8_at; Start 61; Stop 85
gatcgtttgaaagaagagaatctaa

SEQ ID NO: 253950 - DNA, 25 bp, Artificial
  probe
  misc_feature (1)..(25): SEQ ID NO: 7757; WAN02QBN8_at; Start 201; Stop 225
aattgttacccatggtggtccagct

SEQ ID NO: 253951 - DNA, 25 bp, Artificial
  probe
  misc_feature (1)..(25): SEQ ID NO: 7757; WAN02QBN8_at; Start 200; Stop 224
caattgttacccatggtggtccagc

SEQ ID NO: 253952 - DNA, 25 bp, Artificial
  probe
  misc_feature (1)..(25): SEQ ID NO: 7757; WAN02QBN8_at; Start 199; Stop 223
acaattgttacccatggtggtccag

SEQ ID NO: 253953 - DNA, 25 bp, Artificial
  probe
  misc_feature (1)..(25): SEQ ID NO: 7757; WAN02QBN8_at; Start 55; Stop 79
gaagttgatcgtttgaaagaagaga

SEQ ID NO: 253954 - DNA, 25 bp, Artificial
  probe
  misc_feature (1)..(25): SEQ ID NO: 7757; WAN02QBN8_at; Start 320; Stop 344
tttgttctaaaatatcctctgaagg

SEQ ID NO: 253955 - DNA, 25 bp, Artificial
  probe
  misc_feature (1)..(25): SEQ ID NO: 7757; WAN02QBN8_at; Start 64; Stop 88
cgtttgaaagaagagaatctaattc

SEQ ID NO: 253956 - DNA, 25 bp, Artificial
  probe
  misc_feature (1)..(25): SEQ ID NO: 5976; WAN02QCQ9_at; Start 401; Stop 425
caaaagttcagcaagttagttctca

SEQ ID NO: 253957 - DNA, 25 bp, Artificial
  probe
  misc_feature (1)..(25): SEQ ID NO: 5976; WAN02QCQ9_at; Start 212; Stop 236
atggtggcccagcaacatttatggg

SEQ ID NO: 253958 - DNA, 25 bp, Artificial
  probe
  misc_feature (1)..(25): SEQ ID NO: 5976; WAN02QCQ9_at; Start 431; Stop 455
gtaagtttactaatgaactgtcaga

SEQ ID NO: 253959 - DNA, 25 bp, Artificial
  probe
  misc_feature (1)..(25): SEQ ID NO: 5976; WAN02QCQ9_at; Start 250; Stop 274
gggaagagaccgattgtagtaccta

SEQ ID NO: 253960 - DNA, 25 bp, Artificial
  probe
  misc_feature (1)..(25): SEQ ID NO: 5976; WAN02QCQ9_at; Start 349; Stop 373
gatctagttgtaatcgatgaaattg

SEQ ID NO: 253961 - DNA, 25 bp, Artificial
  probe
  misc_feature (1)..(25): SEQ ID NO: 5976; WAN02QCQ9_at; Start 335; Stop 359
taggcgaaggatacgatctagttgt

SEQ ID NO: 253962 - DNA, 25 bp, Artificial
  probe
  misc_feature (1)..(25): SEQ ID NO: 5976; WAN02QCQ9_at; Start 444; Stop 468
tgaactgtcagatataattgaaaat

SEQ ID NO: 253963 - DNA, 25 bp, Artificial
  probe
  misc_feature (1)..(25): SEQ ID NO: 5976; WAN02QCQ9_at; Start 307; Stop 331
caccaaatggaattttgcttaaagt

SEQ ID NO: 253964 - DNA, 25 bp, Artificial
  probe
  misc_feature (1)..(25): SEQ ID NO: 5976; WAN02QCQ9_at; Start 140; Stop 164
gccaatggaaagctttgatttctta

SEQ ID NO: 253965 - DNA, 25 bp, Artificial
  probe
  misc_feature (1)..(25): SEQ ID NO: 5976; WAN02QCQ9_at; Start 114; Stop 138
tttttcggattatgaaccagtgcac

SEQ ID NO: 253966 - DNA, 25 bp, Artificial
  probe
  misc_feature (1)..(25): SEQ ID NO: 5976; WAN02QCQ9_at; Start 131; Stop 155
cagtgcactgccaatggaaagcttt

SEQ ID NO: 253967 - DNA, 25 bp, Artificial
  probe
  misc_feature (1)..(25): SEQ ID NO: 5976; WAN02QCQ9_at; Start 118; Stop 142
tcggattatgaaccagtgcactgcc

SEQ ID NO: 253968 - DNA, 25 bp, Artificial
  probe
  misc_feature (1)..(25): SEQ ID NO: 5976; WAN02QCQ9_at; Start 322; Stop 346
tgcttaaagttactaggcgaaggat

SEQ ID NO: 253969 - DNA, 25 bp, Artificial
  probe
  misc_feature (1)..(25): SEQ ID NO: 5976; WAN02QCQ9_at; Start 76; Stop 100
gagggacttattcaggatgaagtta

SEQ ID NO: 253970 - DNA, 25 bp, Artificial
  probe
  misc_feature (1)..(25): SEQ ID NO: 5976; WAN02QCQ9_at; Start 330; Stop 354
gttactaggcgaaggatacgatcta

SEQ ID NO: 253971 - DNA, 25 bp, Artificial
  probe
  misc_feature (1)..(25): SEQ ID NO: 5976; WAN02QCQ9_at; Start 255; Stop 279
gagaccgattgtagtacctagacaa

SEQ ID NO: 253972 - DNA, 25 bp, Artificial
  probe
  misc_feature (1)..(25): SEQ ID NO: 5976; WAN02QCQ9_at; Start 339; Stop 363
cgaaggatacgatctagttgtaatc

SEQ ID NO: 253973 - DNA, 25 bp, Artificial
  probe
  misc_feature (1)..(25): SEQ ID NO: 5976; WAN02QCQ9_at; Start 227; Stop 251
catttatgggagtgatttctaaggg

SEQ ID NO: 253974 - DNA, 25 bp, Artificial
  probe
  misc_feature (1)..(25): SEQ ID NO: 5976; WAN02QCQ9_at; Start 135; Stop 159
gcactgccaatggaaagctttgatt

SEQ ID NO: 253975 - DNA, 25 bp, Artificial
  probe
  misc_feature (1)..(25): SEQ ID NO: 5976; WAN02QCQ9_at; Start 411; Stop 435
gcaagttagttctcataatagtaag

SEQ ID NO: 253976 - DNA, 25 bp, Artificial
  probe
  misc_feature (1)..(25): SEQ ID NO: 5976; WAN02QCQ9_at; Start 173; Stop 197
tgaatcaatatatggatgaagcaga

SEQ ID NO: 253977 - DNA, 25 bp, Artificial
  probe
  misc_feature (1)..(25): SEQ ID NO: 5976; WAN02QCQ9_at; Start 127; Stop 151
gaaccagtgcactgccaatggaaag

SEQ ID NO: 253978 - DNA, 25 bp, Artificial
  probe
  misc_feature (1)..(25): SEQ ID NO: 5976; WAN02QCQ9_at; Start 221; Stop 245
cagcaacatttatgggagtgatttc

SEQ ID NO: 253979 - DNA, 25 bp, Artificial
  probe
  misc_feature (1)..(25): SEQ ID NO: 5976; WAN02QCQ9_at; Start 363; Stop 387
cgatgaaattgataaacttaatgag

SEQ ID NO: 253980 - DNA, 25 bp, Artificial
  probe
  misc_feature (1)..(25): SEQ ID NO: 5976; WAN02QCQ9_at; Start 300; Stop 324
gaatgatcaccaaatggaattttgc

SEQ ID NO: 253981 - DNA, 25 bp, Artificial
  probe
  misc_feature (1)..(25): SEQ ID NO: 5976; WAN02QCQ9_at; Start 181; Stop 205
tatatggatgaagcagatattgtca

SEQ ID NO: 253982 - DNA, 25 bp, Artificial
  probe
  misc_feature (1)..(25): SEQ ID NO: 5976; WAN02QCQ9_at; Start 271; Stop 295
cctagacaagaaaaatttggcgagc

SEQ ID NO: 253983 - DNA, 25 bp, Artificial
  probe
  misc_feature (1)..(25): SEQ ID NO: 5976; WAN02QCQ9_at; Start 259; Stop 283
ccgattgtagtacctagacaagaaa

SEQ ID NO: 253984 - DNA, 25 bp, Artificial
  probe
  misc_feature (1)..(25): SEQ ID NO: 5976; WAN02QCQ9_at; Start 123; Stop 147
ttatgaaccagtgcactgccaatgg

SEQ ID NO: 253985 - DNA, 25 bp, Artificial
  probe
  misc_feature (1)..(25): SEQ ID NO: 5976; WAN02QCQ9_at; Start 145; Stop 169
tggaaagctttgatttcttatgatg

SEQ ID NO: 253986 - DNA, 25 bp, Artificial
  probe
  misc_feature (1)..(25): SEQ ID NO: 5976; WAN02QCQ9_at; Start 216; Stop 240
tggcccagcaacatttatgggagtg

SEQ ID NO: 253987 - DNA, 25 bp, Artificial
  probe
  misc_feature (1)..(25): SEQ ID NO: 5976; WAN02QCQ9_at; Start 166; Stop 190
gatgagatgaatcaatatatggatg

SEQ ID NO: 253988 - DNA, 25 bp, Artificial
  probe
  misc_feature (1)..(25): SEQ ID NO: 5976; WAN02QCQ9_at; Start 393; Stop 417
taaatattcaaaagttcagcaagtt

SEQ ID NO: 253989 - DNA, 25 bp, Artificial
  probe
  misc_feature (1)..(25): SEQ ID NO: 5976; WAN02QCQ9_at; Start 276; Stop 300
acaagaaaaatttggcgagcatgtg

SEQ ID NO: 253990 - DNA, 25 bp, Artificial
  probe
  misc_feature (1)..(25): SEQ ID NO: 5977; WAN02QCQA_at; Start 31; Stop 55
ggatttcgatatgcattaaatgtcc

SEQ ID NO: 253991 - DNA, 25 bp, Artificial
  probe
  misc_feature (1)..(25): SEQ ID NO: 5977; WAN02QCQA_at; Start 1133; Stop 1157
ttgaaaaacaggatggagaatcgtg

SEQ ID NO: 253992 - DNA, 25 bp, Artificial
  probe
  misc_feature (1)..(25): SEQ ID NO: 5977; WAN02QCQA_at; Start 1141; Stop 1165
caggatggagaatcgtgtgaaagat

SEQ ID NO: 253993 - DNA, 25 bp, Artificial
  probe
  misc_feature (1)..(25): SEQ ID NO: 5977; WAN02QCQA_at; Start 14; Stop 38
gatacttgaaaagaaatggatttcg

SEQ ID NO: 253994 - DNA, 25 bp, Artificial
  probe
  misc_feature (1)..(25): SEQ ID NO: 5977; WAN02QCQA_at; Start 1069; Stop 1093
gataacatttatctagaaattgata

SEQ ID NO: 253995 - DNA, 25 bp, Artificial
  probe
  misc_feature (1)..(25): SEQ ID NO: 5977; WAN02QCQA_at; Start 2; Stop 26
tgaatattataagatacttgaaaag

SEQ ID NO: 253996 - DNA, 25 bp, Artificial
  probe
  misc_feature (1)..(25): SEQ ID NO: 5977; WAN02QCQA_at; Start 245; Stop 269
gactagtacgtactcttcctgaaaa

SEQ ID NO: 253997 - DNA, 25 bp, Artificial
  probe
  misc_feature (1)..(25): SEQ ID NO: 5977; WAN02QCQA_at; Start 73; Stop 97
caaaagattttagattcaattgtta

SEQ ID NO: 253998 - DNA, 25 bp, Artificial
  probe
  misc_feature (1)..(25): SEQ ID NO: 5977; WAN02QCQA_at; Start 146; Stop 170
gtcacacagactttgataataatgg

SEQ ID NO: 253999 - DNA, 25 bp, Artificial
  probe
  misc_feature (1)..(25): SEQ ID NO: 5977; WAN02QCQA_at; Start 169; Stop 193
ggaggagctttttatgattatttga

SEQ ID NO: 254000 - DNA, 25 bp, Artificial
  probe
  misc_feature (1)..(25): SEQ ID NO: 5977; WAN02QCQA_at; Start 1125; Stop 1149
taaaatatttgaaaaacaggatgga

SEQ ID NO: 254001 - DNA, 25 bp, Artificial
  probe
  misc_feature (1)..(25): SEQ ID NO: 5977; WAN02QCQA_at; Start 122; Stop 146
tacaaaatattattgtcattgaatg

SEQ ID NO: 254002 - DNA, 25 bp, Artificial
  probe
  misc_feature (1)..(25): SEQ ID NO: 5977; WAN02QCQA_at; Start 291; Stop 315
aaaacctagtttgaggaagtcatat

SEQ ID NO: 254003 - DNA, 25 bp, Artificial
  probe
  misc_feature (1)..(25): SEQ ID NO: 5977; WAN02QCQA_at; Start 150; Stop 174
cacagactttgataataatggagga

SEQ ID NO: 254004 - DNA, 25 bp, Artificial
  probe
  misc_feature (1)..(25): SEQ ID NO: 5977; WAN02QCQA_at; Start 339; Stop 363
tcttttcgataatgatatacttcgt

SEQ ID NO: 254005 - DNA, 25 bp, Artificial
  probe
  misc_feature (1)..(25): SEQ ID NO: 5977; WAN02QCQA_at; Start 1135; Stop 1159
gaaaaacaggatggagaatcgtgtg

SEQ ID NO: 254006 - DNA, 25 bp, Artificial
  probe
  misc_feature (1)..(25): SEQ ID NO: 5977; WAN02QCQA_at; Start 152; Stop 176
cagactttgataataatggaggagc

SEQ ID NO: 254007 - DNA, 25 bp, Artificial
  probe
  misc_feature (1)..(25): SEQ ID NO: 5977; WAN02QCQA_at; Start 43; Stop 67
gcattaaatgtcctctatcaatata

SEQ ID NO: 254008 - DNA, 25 bp, Artificial
  probe
  misc_feature (1)..(25): SEQ ID NO: 5977; WAN02QCQA_at; Start 51; Stop 75
tgtcctctatcaatataaaattcaa

SEQ ID NO: 254009 - DNA, 25 bp, Artificial
  probe
  misc_feature (1)..(25): SEQ ID NO: 5977; WAN02QCQA_at; Start 1130; Stop 1154
tatttgaaaaacaggatggagaatc

SEQ ID NO: 254010 - DNA, 25 bp, Artificial
  probe
  misc_feature (1)..(25): SEQ ID NO: 5977; WAN02QCQA_at; Start 1137; Stop 1161
aaaacaggatggagaatcgtgtgaa

SEQ ID NO: 254011 - DNA, 25 bp, Artificial
  probe
  misc_feature (1)..(25): SEQ ID NO: 5977; WAN02QCQA_at; Start 142; Stop 166
gaatgtcacacagactttgataata

SEQ ID NO: 254012 - DNA, 25 bp, Artificial
  probe
  misc_feature (1)..(25): SEQ ID NO: 5977; WAN02QCQA_at; Start 138; Stop 162
cattgaatgtcacacagactttgat

SEQ ID NO: 254013 - DNA, 25 bp, Artificial
  probe
  misc_feature (1)..(25): SEQ ID NO: 5977; WAN02QCQA_at; Start 241; Stop 265
aatcgactagtacgtactcttcctg

SEQ ID NO: 254014 - DNA, 25 bp, Artificial
  probe
  misc_feature (1)..(25): SEQ ID NO: 5977; WAN02QCQA_at; Start 21; Stop 45
gaaaagaaatggatttcgatatgca

SEQ ID NO: 254015 - DNA, 25 bp, Artificial
  probe
  misc_feature (1)..(25): SEQ ID NO: 5977; WAN02QCQA_at; Start 38; Stop 62
gatatgcattaaatgtcctctatca

SEQ ID NO: 254016 - DNA, 25 bp, Artificial
  probe
  misc_feature (1)..(25): SEQ ID NO: 5977; WAN02QCQA_at; Start 246; Stop 270
actagtacgtactcttcctgaaaat

SEQ ID NO: 254017 - DNA, 25 bp, Artificial
  probe
  misc_feature (1)..(25): SEQ ID NO: 5977; WAN02QCQA_at; Start 305; Stop 329
ggaagtcatatttgttatcattaag

SEQ ID NO: 254018 - DNA, 25 bp, Artificial
  probe
  misc_feature (1)..(25): SEQ ID NO: 5977; WAN02QCQA_at; Start 1145; Stop 1169
atggagaatcgtgtgaaagattggc

SEQ ID NO: 254019 - DNA, 25 bp, Artificial
  probe
  misc_feature (1)..(25): SEQ ID NO: 5977; WAN02QCQA_at; Start 85; Stop 109
gattcaattgttattagatttacta

SEQ ID NO: 254020 - DNA, 25 bp, Artificial
  probe
  misc_feature (1)..(25): SEQ ID NO: 5977; WAN02QCQA_at; Start 135; Stop 159
tgtcattgaatgtcacacagacttt

SEQ ID NO: 254021 - DNA, 25 bp, Artificial
  probe
  misc_feature (1)..(25): SEQ ID NO: 5977; WAN02QCQA_at; Start 295; Stop 319
cctagtttgaggaagtcatatttgt

SEQ ID NO: 254022 - DNA, 25 bp, Artificial
  probe
  misc_feature (1)..(25): SEQ ID NO: 5977; WAN02QCQA_at; Start 156; Stop 180
ctttgataataatggaggagctttt

SEQ ID NO: 254023 - DNA, 25 bp, Artificial
  probe
  misc_feature (1)..(25): SEQ ID NO: 5977; WAN02QCQA_at; Start 1056; Stop 1080
gctgcactttattgataacatttat

SEQ ID NO: 254024 - DNA, 25 bp, Artificial
  probe
  misc_feature (1)..(25): SEQ ID NO: 5978; WAN02QDE8_at; Start 948; Stop 972
taatggagtaattggtatcgtctct

SEQ ID NO: 254025 - DNA, 25 bp, Artificial
  probe
  misc_feature (1)..(25): SEQ ID NO: 5978; WAN02QDE8_at; Start 182; Stop 206
tattatatcagagactacacctagc

SEQ ID NO: 254026 - DNA, 25 bp, Artificial
  probe
  misc_feature (1)..(25): SEQ ID NO: 5978; WAN02QDE8_at; Start 532; Stop 556
ggaaatagaaatcgcaagatagcct

SEQ ID NO: 254027 - DNA, 25 bp, Artificial
  probe
  misc_feature (1)..(25): SEQ ID NO: 5978; WAN02QDE8_at; Start 330; Stop 354
taatgagattcaagatagggtattg

SEQ ID NO: 254028 - DNA, 25 bp, Artificial
  probe
  misc_feature (1)..(25): SEQ ID NO: 5978; WAN02QDE8_at; Start 785; Stop 809
ttaatggccgctatcaaatttggcg

SEQ ID NO: 254029 - DNA, 25 bp, Artificial
  probe
  misc_feature (1)..(25): SEQ ID NO: 5978; WAN02QDE8_at; Start 54; Stop 78
ctttacaattttatatcctagaggt

SEQ ID NO: 254030 - DNA, 25 bp, Artificial
  probe
  misc_feature (1)..(25): SEQ ID NO: 5978; WAN02QDE8_at; Start 292; Stop 316
caatcagtcttttatccgatctgta

SEQ ID NO: 254031 - DNA, 25 bp, Artificial
  probe
  misc_feature (1)..(25): SEQ ID NO: 5978; WAN02QDE8_at; Start 575; Stop 599
ctgtgctcaattgtctatatgctga

SEQ ID NO: 254032 - DNA, 25 bp, Artificial
  probe
  misc_feature (1)..(25): SEQ ID NO: 5978; WAN02QDE8_at; Start 933; Stop 957
gcaattagcaatagataatggagta

SEQ ID NO: 254033 - DNA, 25 bp, Artificial
  probe
  misc_feature (1)..(25): SEQ ID NO: 5978; WAN02QDE8_at; Start 832; Stop 856
gattcaaaaatatatggctatggag

SEQ ID NO: 254034 - DNA, 25 bp, Artificial
  probe
  misc_feature (1)..(25): SEQ ID NO: 5978; WAN02QDE8_at; Start 252; Stop 276
tattacattgcttttaacaggcaca

SEQ ID NO: 254035 - DNA, 25 bp, Artificial
  probe
  misc_feature (1)..(25): SEQ ID NO: 5978; WAN02QDE8_at; Start 861; Stop 885
tagctttcatttcaatcttccgtgg

SEQ ID NO: 254036 - DNA, 25 bp, Artificial
  probe
  misc_feature (1)..(25): SEQ ID NO: 5978; WAN02QDE8_at; Start 799; Stop 823
caaatttggcgtattgcttatcaaa

SEQ ID NO: 254037 - DNA, 25 bp, Artificial
  probe
  misc_feature (1)..(25): SEQ ID NO: 5978; WAN02QDE8_at; Start 263; Stop 287
ttttaacaggcacaatagattcggg

SEQ ID NO: 254038 - DNA, 25 bp, Artificial
  probe
  misc_feature (1)..(25): SEQ ID NO: 5978; WAN02QDE8_at; Start 611; Stop 635
caaaggttatagcaatcttcatgat

SEQ ID NO: 254039 - DNA, 25 bp, Artificial
  probe
  misc_feature (1)..(25): SEQ ID NO: 5978; WAN02QDE8_at; Start 665; Stop 689
gagtattttggaagagagggattct

SEQ ID NO: 254040 - DNA, 25 bp, Artificial
  probe
  misc_feature (1)..(25): SEQ ID NO: 5978; WAN02QDE8_at; Start 643; Stop 667
gcattatcatttaacataaagagag

SEQ ID NO: 254041 - DNA, 25 bp, Artificial
  probe
  misc_feature (1)..(25): SEQ ID NO: 5978; WAN02QDE8_at; Start 134; Stop 158
gtttatatttcaccatcgcagccag

SEQ ID NO: 254042 - DNA, 25 bp, Artificial
  probe
  misc_feature (1)..(25): SEQ ID NO: 5978; WAN02QDE8_at; Start 1014; Stop 1038
gattagaaattttagagtagcttca

SEQ ID NO: 254043 - DNA, 25 bp, Artificial
  probe
  misc_feature (1)..(25): SEQ ID NO: 5978; WAN02QDE8_at; Start 919; Stop 943
cataatcagcttatgcaattagcaa

SEQ ID NO: 254044 - DNA, 25 bp, Artificial
  probe
  misc_feature (1)..(25): SEQ ID NO: 5978; WAN02QDE8_at; Start 1135; Stop 1159
ttatatgaaaggttagagcaggtgg

SEQ ID NO: 254045 - DNA, 25 bp, Artificial
  probe
  misc_feature (1)..(25): SEQ ID NO: 5978; WAN02QDE8_at; Start 146; Stop 170
ccatcgcagccagtataatatatat

SEQ ID NO: 254046 - DNA, 25 bp, Artificial
  probe
  misc_feature (1)..(25): SEQ ID NO: 5978; WAN02QDE8_at; Start 463; Stop 487
gggcatgtccaagtgatatcacaat

SEQ ID NO: 254047 - DNA, 25 bp, Artificial
  probe
  misc_feature (1)..(25): SEQ ID NO: 5978; WAN02QDE8_at; Start 560; Stop 584
tattacaaattttgactgtgctcaa

SEQ ID NO: 254048 - DNA, 25 bp, Artificial
  probe
  misc_feature (1)..(25): SEQ ID NO: 5978; WAN02QDE8_at; Start 417; Stop 441
ggatcttatgatgaattttaccaat

SEQ ID NO: 254049 - DNA, 25 bp, Artificial
  probe
  misc_feature (1)..(25): SEQ ID NO: 5978; WAN02QDE8_at; Start 876; Stop 900
tcttccgtggcaagattctggtgct

SEQ ID NO: 254050 - DNA, 25 bp, Artificial
  probe
  misc_feature (1)..(25): SEQ ID NO: 5978; WAN02QDE8_at; Start 545; Stop 569
gcaagatagccttcctattacaaat

SEQ ID NO: 254051 - DNA, 25 bp, Artificial
  probe
  misc_feature (1)..(25): SEQ ID NO: 5978; WAN02QDE8_at; Start 961; Stop 985
ggtatcgtctctttctttattatga

SEQ ID NO: 254052 - DNA, 25 bp, Artificial
  probe
  misc_feature (1)..(25): SEQ ID NO: 5978; WAN02QDE8_at; Start 680; Stop 704
gagggattctaatttctttcttgac

SEQ ID NO: 254053 - DNA, 25 bp, Artificial
  probe
  misc_feature (1)..(25): SEQ ID NO: 5978; WAN02QDE8_at; Start 192; Stop 216
gagactacacctagcatcatatact

SEQ ID NO: 254054 - DNA, 25 bp, Artificial
  probe
  misc_feature (1)..(25): SEQ ID NO: 5978; WAN02QDE8_at; Start 69; Stop 93
tcctagaggtattacattaacttat

SEQ ID NO: 254055 - DNA, 25 bp, Artificial
  probe
  misc_feature (1)..(25): SEQ ID NO: 5978; WAN02QDE8_at; Start 278; Stop 302
tagattcgggtttacaatcagtctt

SEQ ID NO: 254056 - DNA, 25 bp, Artificial
  probe
  misc_feature (1)..(25): SEQ ID NO: 5978; WAN02QDE8_at; Start 83; Stop 107
cattaacttattctccatctgcaga

SEQ ID NO: 254057 - DNA, 25 bp, Artificial
  probe
  misc_feature (1)..(25): SEQ ID NO: 5978; WAN02QDE8_at; Start 904; Stop 928
gggatcaactatgctcataatcagc

SEQ ID NO: 254058 - DNA, 25 bp, Artificial
  probe
  misc_feature (1)..(25): SEQ ID NO: 5979; WAN02QDE9_at; Start 952; Stop 976
aaagcgataagagatttctgtccag

SEQ ID NO: 254059 - DNA, 25 bp, Artificial
  probe
  misc_feature (1)..(25): SEQ ID NO: 5979; WAN02QDE9_at; Start 318; Stop 342
ggttccagtaaggattgcccatagt

SEQ ID NO: 254060 - DNA, 25 bp, Artificial
  probe
  misc_feature (1)..(25): SEQ ID NO: 5979; WAN02QDE9_at; Start 151; Stop 175
gagaatttaggtatccaggtagtag

SEQ ID NO: 254061 - DNA, 25 bp, Artificial
  probe
  misc_feature (1)..(25): SEQ ID NO: 5979; WAN02QDE9_at; Start 259; Stop 283
catgttcatggtagtagttctttaa

SEQ ID NO: 254062 - DNA, 25 bp, Artificial
  probe
  misc_feature (1)..(25): SEQ ID NO: 5979; WAN02QDE9_at; Start 881; Stop 905
ctataacaaaggagtgtatctacac

SEQ ID NO: 254063 - DNA, 25 bp, Artificial
  probe
  misc_feature (1)..(25): SEQ ID NO: 5979; WAN02QDE9_at; Start 767; Stop 791
tgaaatcatttgtgtctgctatgga

SEQ ID NO: 254064 - DNA, 25 bp, Artificial
  probe
  misc_feature (1)..(25): SEQ ID NO: 5979; WAN02QDE9_at; Start 556; Stop 580
gatacaactcttgctttaggtcatg

SEQ ID NO: 254065 - DNA, 25 bp, Artificial
  probe
  misc_feature (1)..(25): SEQ ID NO: 5979; WAN02QDE9_at; Start 281; Stop 305
taatgtcaatcgagctatctgttgc

SEQ ID NO: 254066 - DNA, 25 bp, Artificial
  probe
  misc_feature (1)..(25): SEQ ID NO: 5979; WAN02QDE9_at; Start 995; Stop 1019
caattgagaatcaaagacttgcgag

SEQ ID NO: 254067 - DNA, 25 bp, Artificial
  probe
  misc_feature (1)..(25): SEQ ID NO: 5979; WAN02QDE9_at; Start 577; Stop 601
catgttggtcgctttaatgttcaaa

SEQ ID NO: 254068 - DNA, 25 bp, Artificial
  probe
  misc_feature (1)..(25): SEQ ID NO: 5979; WAN02QDE9_at; Start 801; Stop 825
tctcccaagcttgtacgaaggtctc

SEQ ID NO: 254069 - DNA, 25 bp, Artificial
  probe
  misc_feature (1)..(25): SEQ ID NO: 5979; WAN02QDE9_at; Start 433; Stop 457
ggagctgggaaatggctttttacca

SEQ ID NO: 254070 - DNA, 25 bp, Artificial
  probe
  misc_feature (1)..(25): SEQ ID NO: 5979; WAN02QDE9_at; Start 910; Stop 934
caagtgacttctttaccaattagga

SEQ ID NO: 254071 - DNA, 25 bp, Artificial
  probe
  misc_feature (1)..(25): SEQ ID NO: 5979; WAN02QDE9_at; Start 817; Stop 841
gaaggtctccctctggtgtcagtag

SEQ ID NO: 254072 - DNA, 25 bp, Artificial
  probe
  misc_feature (1)..(25): SEQ ID NO: 5979; WAN02QDE9_at; Start 938; Stop 962
ctctttattgggaaaaagcgataag

SEQ ID NO: 254073 - DNA, 25 bp, Artificial
  probe
  misc_feature (1)..(25): SEQ ID NO: 5979; WAN02QDE9_at; Start 294; Stop 318
gctatctgttgcaaaaattgcaggg

SEQ ID NO: 254074 - DNA, 25 bp, Artificial
  probe
  misc_feature (1)..(25): SEQ ID NO: 5979; WAN02QDE9_at; Start 80; Stop 104
tgaatctagataaatgggaagtgac

SEQ ID NO: 254075 - DNA, 25 bp, Artificial
  probe
  misc_feature (1)..(25): SEQ ID NO: 5979; WAN02QDE9_at; Start 120; Stop 144
tattccactgttagaagataaagca

SEQ ID NO: 254076 - DNA, 25 bp, Artificial
  probe
  misc_feature (1)..(25): SEQ ID NO: 5979; WAN02QDE9_at; Start 496; Stop 520
aaacgttatcaatttagtgagtcca

SEQ ID NO: 254077 - DNA, 25 bp, Artificial
  probe
  misc_feature (1)..(25): SEQ ID NO: 5979; WAN02QDE9_at; Start 95; Stop 119
gggaagtgacagttttagctactaa

SEQ ID NO: 254078 - DNA, 25 bp, Artificial
  probe
  misc_feature (1)..(25): SEQ ID NO: 5979; WAN02QDE9_at; Start 967; Stop 991
ttctgtccagaagatagattgagac

SEQ ID NO: 254079 - DNA, 25 bp, Artificial
  probe
  misc_feature (1)..(25): SEQ ID NO: 5979; WAN02QDE9_at; Start 1010; Stop 1034
gacttgcgagagaagctggttatga

SEQ ID NO: 254080 - DNA, 25 bp, Artificial
  probe
  misc_feature (1)..(25): SEQ ID NO: 5979; WAN02QDE9_at; Start 510; Stop 534
tagtgagtccaaacgacaacgattt

SEQ ID NO: 254081 - DNA, 25 bp, Artificial
  probe
  misc_feature (1)..(25): SEQ ID NO: 5979; WAN02QDE9_at; Start 396; Stop 420
tcataaattatatacgcaggcgtgg

SEQ ID NO: 254082 - DNA, 25 bp, Artificial
  probe
  misc_feature (1)..(25): SEQ ID NO: 5979; WAN02QDE9_at; Start 373; Stop 397
gataaagtattacggccagtatttc

SEQ ID NO: 254083 - DNA, 25 bp, Artificial
  probe
  misc_feature (1)..(25): SEQ ID NO: 5979; WAN02QDE9_at; Start 351; Stop 375
tacttgtgaccatagaaaattagat

SEQ ID NO: 254084 - DNA, 25 bp, Artificial
  probe
  misc_feature (1)..(25): SEQ ID NO: 5979; WAN02QDE9_at; Start 833; Stop 857
tgtcagtagaatggcaaataaatgg

SEQ ID NO: 254085 - DNA, 25 bp, Artificial
  probe
  misc_feature (1)..(25): SEQ ID NO: 5979; WAN02QDE9_at; Start 786; Stop 810
tatggatataatgcttctcccaagc

SEQ ID NO: 254086 - DNA, 25 bp, Artificial
  probe
  misc_feature (1)..(25): SEQ ID NO: 5979; WAN02QDE9_at; Start 36; Stop 60
ttcagatggaatagggacgtttatc

SEQ ID NO: 254087 - DNA, 25 bp, Artificial
  probe
  misc_feature (1)..(25): SEQ ID NO: 5979; WAN02QDE9_at; Start 674; Stop 698
taggtgaagggtcaactttatcaaa

SEQ ID NO: 254088 - DNA, 25 bp, Artificial
  probe
  misc_feature (1)..(25): SEQ ID NO: 5979; WAN02QDE9_at; Start 733; Stop 757
gatagggtcttctttttaggtcatc

SEQ ID NO: 254089 - DNA, 25 bp, Artificial
  probe
  misc_feature (1)..(25): SEQ ID NO: 5979; WAN02QDE9_at; Start 165; Stop 189
ccaggtagtagttctagagcggaaa

SEQ ID NO: 254090 - DNA, 25 bp, Artificial
  probe
  misc_feature (1)..(25): SEQ ID NO: 5979; WAN02QDE9_at; Start 895; Stop 919
tgtatctacactaaacaagtgactt

SEQ ID NO: 254091 - DNA, 25 bp, Artificial
  probe
  misc_feature (1)..(25): SEQ ID NO: 5979; WAN02QDE9_at; Start 20; Stop 44
caacaggtggcttattttcagatgg

SEQ ID NO: 254092 - DNA, 25 bp, Artificial
  probe
  misc_feature (1)..(25): SEQ ID NO: 5980; WAN02QDEA_at; Start 493; Stop 517
tctaacattgttcaaacggagtatt

SEQ ID NO: 254093 - DNA, 25 bp, Artificial
  probe
  misc_feature (1)..(25): SEQ ID NO: 5980; WAN02QDEA_at; Start 304; Stop 328
tttggtgctcaccagataaatggat

SEQ ID NO: 254094 - DNA, 25 bp, Artificial
  probe
  misc_feature (1)..(25): SEQ ID NO: 5980; WAN02QDEA_at; Start 424; Stop 448
aaaaagaatgagttggcatgtccca

SEQ ID NO: 254095 - DNA, 25 bp, Artificial
  probe
  misc_feature (1)..(25): SEQ ID NO: 5980; WAN02QDEA_at; Start 94; Stop 118
ccgaactatgagattattagatggg

SEQ ID NO: 254096 - DNA, 25 bp, Artificial
  probe
  misc_feature (1)..(25): SEQ ID NO: 5980; WAN02QDEA_at; Start 464; Stop 488
tctttactgattttggctatcagcc

SEQ ID NO: 254097 - DNA, 25 bp, Artificial
  probe
  misc_feature (1)..(25): SEQ ID NO: 5980; WAN02QDEA_at; Start 60; Stop 84
taaaaaatgtattgacagctggaga

SEQ ID NO: 254098 - DNA, 25 bp, Artificial
  probe
  misc_feature (1)..(25): SEQ ID NO: 5980; WAN02QDEA_at; Start 37; Stop 61
ggaggtccattacctactgatgtta

SEQ ID NO: 254099 - DNA, 25 bp, Artificial
  probe
  misc_feature (1)..(25): SEQ ID NO: 5980; WAN02QDEA_at; Start 439; Stop 463
gcatgtcccatacttaattcgtttg

SEQ ID NO: 254100 - DNA, 25 bp, Artificial
  probe
  misc_feature (1)..(25): SEQ ID NO: 5980; WAN02QDEA_at; Start 215; Stop 239
gaatcatatatgaaaatggtggcat

SEQ ID NO: 254101 - DNA, 25 bp, Artificial
  probe
  misc_feature (1)..(25): SEQ ID NO: 5980; WAN02QDEA_at; Start 562; Stop 586
gccaatgctagaaatttattatcgg

SEQ ID NO: 254102 - DNA, 25 bp, Artificial
  probe
  misc_feature (1)..(25): SEQ ID NO: 5980; WAN02QDEA_at; Start 600; Stop 624
aattcatcattacagtgcctcttgg

SEQ ID NO: 254103 - DNA, 25 bp, Artificial
  probe
  misc_feature (1)..(25): SEQ ID NO: 5980; WAN02QDEA_at; Start 400; Stop 424
gataatacagattttgatccgtgta

SEQ ID NO: 254104 - DNA, 25 bp, Artificial
  probe
  misc_feature (1)..(25): SEQ ID NO: 5980; WAN02QDEA_at; Start 229; Stop 253
aatggtggcatctatttggatacag

SEQ ID NO: 254105 - DNA, 25 bp, Artificial
  probe
  misc_feature (1)..(25): SEQ ID NO: 5980; WAN02QDEA_at; Start 624; Stop 648
gactcctgtgagagttagaataaaa

SEQ ID NO: 254106 - DNA, 25 bp, Artificial
  probe
  misc_feature (1)..(25): SEQ ID NO: 5980; WAN02QDEA_at; Start 81; Stop 105
gagaaaattttgtccgaactatgag

SEQ ID NO: 254107 - DNA, 25 bp, Artificial
  probe
  misc_feature (1)..(25): SEQ ID NO: 5980; WAN02QDEA_at; Start 269; Stop 293
gaaatcttgatgaattgcttgagca

SEQ ID NO: 254108 - DNA, 25 bp, Artificial
  probe
  misc_feature (1)..(25): SEQ ID NO: 5980; WAN02QDEA_at; Start 192; Stop 216
tgttagcgactatgcacggttaaga

SEQ ID NO: 254109 - DNA, 25 bp, Artificial
  probe
  misc_feature (1)..(25): SEQ ID NO: 5980; WAN02QDEA_at; Start 247; Stop 271
gatacagatgttgaattgattagaa

SEQ ID NO: 254110 - DNA, 25 bp, Artificial
  probe
  misc_feature (1)..(25): SEQ ID NO: 5980; WAN02QDEA_at; Start 177; Stop 201
caaagcttgggcatttgttagcgac

SEQ ID NO: 254111 - DNA, 25 bp, Artificial
  probe
  misc_feature (1)..(25): SEQ ID NO: 5980; WAN02QDEA_at; Start 544; Stop 568
gatcctatatatgttggagccaatg

SEQ ID NO: 254112 - DNA, 25 bp, Artificial
  probe
  misc_feature (1)..(25): SEQ ID NO: 5980; WAN02QDEA_at; Start 513; Stop 537
gtattttactatctatcctgctgag

SEQ ID NO: 254113 - DNA, 25 bp, Artificial
  probe
  misc_feature (1)..(25): SEQ ID NO: 5980; WAN02QDEA_at; Start 417; Stop 441
tccgtgtaaaaagaatgagttggca

SEQ ID NO: 254114 - DNA, 25 bp, Artificial
  probe
  misc_feature (1)..(25): SEQ ID NO: 5980; WAN02QDEA_at; Start 280; Stop 304
gaattgcttgagcatgcagcttttt

SEQ ID NO: 254115 - DNA, 25 bp, Artificial
  probe
  misc_feature (1)..(25): SEQ ID NO: 5980; WAN02QDEA_at; Start 22; Stop 46
tattgctggtttggtggaggtccat

SEQ ID NO: 254116 - DNA, 25 bp, Artificial
  probe
  misc_feature (1)..(25): SEQ ID NO: 5980; WAN02QDEA_at; Start 528; Stop 552
tcctgctgagtattttgatcctata

SEQ ID NO: 254117 - DNA, 25 bp, Artificial
  probe
  misc_feature (1)..(25): SEQ ID NO: 5980; WAN02QDEA_at; Start 334; Stop 358
gctactggtctaggttttggttcga

SEQ ID NO: 254118 - DNA, 25 bp, Artificial
  probe
  misc_feature (1)..(25): SEQ ID NO: 5980; WAN02QDEA_at; Start 612; Stop 636
cagtgcctcttggactcctgtgaga

SEQ ID NO: 254119 - DNA, 25 bp, Artificial
  probe
  misc_feature (1)..(25): SEQ ID NO: 5980; WAN02QDEA_at; Start 478; Stop 502
ggctatcagccttcttctaacattg

SEQ ID NO: 254120 - DNA, 25 bp, Artificial
  probe
  misc_feature (1)..(25): SEQ ID NO: 5980; WAN02QDEA_at; Start 162; Stop 186
gactgcatatgaaaacaaagcttgg

SEQ ID NO: 254121 - DNA, 25 bp, Artificial
  probe
  misc_feature (1)..(25): SEQ ID NO: 5980; WAN02QDEA_at; Start 583; Stop 607
tcggagaaaacatattcaattcatc

SEQ ID NO: 254122 - DNA, 25 bp, Artificial
  probe
  misc_feature (1)..(25): SEQ ID NO: 5980; WAN02QDEA_at; Start 108; Stop 132
tattagatgggatgaaagcaatttc

SEQ ID NO: 254123 - DNA, 25 bp, Artificial
  probe
  misc_feature (1)..(25): SEQ ID NO: 5980; WAN02QDEA_at; Start 318; Stop 342
gataaatggattagtagctactggt

SEQ ID NO: 254124 - DNA, 25 bp, Artificial
  probe
  misc_feature (1)..(25): SEQ ID NO: 5980; WAN02QDEA_at; Start 146; Stop 170
aaaacaattttgttcagactgcata

SEQ ID NO: 254125 - DNA, 25 bp, Artificial
  probe
  misc_feature (1)..(25): SEQ ID NO: 5980; WAN02QDEA_at; Start 664; Stop 688
tatattggtagggataagattctac

SEQ ID NO: 254126 - DNA, 25 bp, Artificial
  probe
  misc_feature (1)..(25): SEQ ID NO: 5975; WAN02QE90_at; Start 227; Stop 251
cgtcatttcatgactatgatacagg

SEQ ID NO: 254127 - DNA, 25 bp, Artificial
  probe
  misc_feature (1)..(25): SEQ ID NO: 5975; WAN02QE90_at; Start 215; Stop 239
gccaaattataacgtcatttcatga

SEQ ID NO: 254128 - DNA, 25 bp, Artificial
  probe
  misc_feature (1)..(25): SEQ ID NO: 5975; WAN02QE90_at; Start 258; Stop 282
gataccatacgacaataagtacata

SEQ ID NO: 254129 - DNA, 25 bp, Artificial
  probe
  misc_feature (1)..(25): SEQ ID NO: 5975; WAN02QE90_at; Start 358; Stop 382
gaaggagcagttattcaagcaggga

SEQ ID NO: 254130 - DNA, 25 bp, Artificial
  probe
  misc_feature (1)..(25): SEQ ID NO: 5975; WAN02QE90_at; Start 182; Stop 206
cgataggaagaaatttccattctgg

SEQ ID NO: 254131 - DNA, 25 bp, Artificial
  probe
  misc_feature (1)..(25): SEQ ID NO: 5975; WAN02QE90_at; Start 297; Stop 321
tattgatgataatgtgtggattggg

SEQ ID NO: 254132 - DNA, 25 bp, Artificial
  probe
  misc_feature (1)..(25): SEQ ID NO: 5975; WAN02QE90_at; Start 401; Stop 425
tacctccaggagcaatcgcaggtgg

SEQ ID NO: 254133 - DNA, 25 bp, Artificial
  probe
  misc_feature (1)..(25): SEQ ID NO: 5975; WAN02QE90_at; Start 59; Stop 83
gaaaagctgcagttgctaaaggaag

SEQ ID NO: 254134 - DNA, 25 bp, Artificial
  probe
  misc_feature (1)..(25): SEQ ID NO: 5975; WAN02QE90_at; Start 371; Stop 395
ttcaagcagggagtacagttgtagg

SEQ ID NO: 254135 - DNA, 25 bp, Artificial
  probe
  misc_feature (1)..(25): SEQ ID NO: 5975; WAN02QE90_at; Start 72; Stop 96
tgctaaaggaagagtgtacacgggt

SEQ ID NO: 254136 - DNA, 25 bp, Artificial
  probe
  misc_feature (1)..(25): SEQ ID NO: 5975; WAN02QE90_at; Start 116; Stop 140
cgaatacctatctttctgagaatgt

SEQ ID NO: 254137 - DNA, 25 bp, Artificial
  probe
  misc_feature (1)..(25): SEQ ID NO: 5975; WAN02QE90_at; Start 423; Stop 447
tggtcatccagcaagagtatttaaa

SEQ ID NO: 254138 - DNA, 25 bp, Artificial
  probe
  misc_feature (1)..(25): SEQ ID NO: 5975; WAN02QE90_at; Start 365; Stop 389
cagttattcaagcagggagtacagt

SEQ ID NO: 254139 - DNA, 25 bp, Artificial
  probe
  misc_feature (1)..(25): SEQ ID NO: 5975; WAN02QE90_at; Start 196; Stop 220
ttccattctggtataaattgccaaa

SEQ ID NO: 254140 - DNA, 25 bp, Artificial
  probe
  misc_feature (1)..(25): SEQ ID NO: 5975; WAN02QE90_at; Start 102; Stop 126
aacatttgttacttcgaatacctat

SEQ ID NO: 254141 - DNA, 25 bp, Artificial
  probe
  misc_feature (1)..(25): SEQ ID NO: 5975; WAN02QE90_at; Start 268; Stop 292
gacaataagtacatacataaagatg

SEQ ID NO: 254142 - DNA, 25 bp, Artificial
  probe
  misc_feature (1)..(25): SEQ ID NO: 5975; WAN02QE90_at; Start 68; Stop 92
cagttgctaaaggaagagtgtacac

SEQ ID NO: 254143 - DNA, 25 bp, Artificial
  probe
  misc_feature (1)..(25): SEQ ID NO: 5975; WAN02QE90_at; Start 147; Stop 171
taatggcatgtcaatgtttggagaa

SEQ ID NO: 254144 - DNA, 25 bp, Artificial
  probe
  misc_feature (1)..(25): SEQ ID NO: 5975; WAN02QE90_at; Start 321; Stop 345
gaataatgttattatcctcggcgga

SEQ ID NO: 254145 - DNA, 25 bp, Artificial
  probe
  misc_feature (1)..(25): SEQ ID NO: 5975; WAN02QE90_at; Start 466; Stop 490
tatgaagaattaaagagactagaac

SEQ ID NO: 254146 - DNA, 25 bp, Artificial
  probe
  misc_feature (1)..(25): SEQ ID NO: 5975; WAN02QE90_at; Start 132; Stop 156
tgagaatgtttcttttaatggcatg

SEQ ID NO: 254147 - DNA, 25 bp, Artificial
  probe
  misc_feature (1)..(25): SEQ ID NO: 5975; WAN02QE90_at; Start 450; Stop 474
taggaatatgaagcattatgaagaa

SEQ ID NO: 254148 - DNA, 25 bp, Artificial
  probe
  misc_feature (1)..(25): SEQ ID NO: 5975; WAN02QE90_at; Start 410; Stop 434
gagcaatcgcaggtggtcatccagc

SEQ ID NO: 254149 - DNA, 25 bp, Artificial
  probe
  misc_feature (1)..(25): SEQ ID NO: 5975; WAN02QE90_at; Start 395; Stop 419
gggaaatacctccaggagcaatcgc

SEQ ID NO: 254150 - DNA, 25 bp, Artificial
  probe
  misc_feature (1)..(25): SEQ ID NO: 5975; WAN02QE90_at; Start 169; Stop 193
gaaggtagaatttcgataggaagaa

SEQ ID NO: 254151 - DNA, 25 bp, Artificial
  probe
  misc_feature (1)..(25): SEQ ID NO: 5975; WAN02QE90_at; Start 430; Stop 454
ccagcaagagtatttaaatttagga

SEQ ID NO: 254152 - DNA, 25 bp, Artificial
  probe
  misc_feature (1)..(25): SEQ ID NO: 5975; WAN02QE90_at; Start 46; Stop 70
tatcgggttagaagaaaagctgcag

SEQ ID NO: 254153 - DNA, 25 bp, Artificial
  probe
  misc_feature (1)..(25): SEQ ID NO: 5975; WAN02QE90_at; Start 346; Stop 370
tctcgtatcggagaaggagcagtta

SEQ ID NO: 254154 - DNA, 25 bp, Artificial
  probe
  misc_feature (1)..(25): SEQ ID NO: 5975; WAN02QE90_at; Start 418; Stop 442
gcaggtggtcatccagcaagagtat

SEQ ID NO: 254155 - DNA, 25 bp, Artificial
  probe
  misc_feature (1)..(25): SEQ ID NO: 5975; WAN02QE90_at; Start 333; Stop 357
tatcctcggcggatctcgtatcgga

SEQ ID NO: 254156 - DNA, 25 bp, Artificial
  probe
  misc_feature (1)..(25): SEQ ID NO: 5975; WAN02QE90_at; Start 158; Stop 182
caatgtttggagaaggtagaatttc

SEQ ID NO: 254157 - DNA, 25 bp, Artificial
  probe
  misc_feature (1)..(25): SEQ ID NO: 5975; WAN02QE90_at; Start 28; Stop 52
aatcagattttctatagttatcggg

SEQ ID NO: 254158 - DNA, 25 bp, Artificial
  probe
  misc_feature (1)..(25): SEQ ID NO: 5975; WAN02QE90_at; Start 248; Stop 272
caggaactaagataccatacgacaa

SEQ ID NO: 254159 - DNA, 25 bp, Artificial
  probe
  misc_feature (1)..(25): SEQ ID NO: 5975; WAN02QE90_at; Start 234; Stop 258
tcatgactatgatacaggaactaag

SEQ ID NO: 254160 - DNA, 25 bp, Artificial
  probe
  misc_feature (1)..(25): SEQ ID NO: 5974; WAN02QE91_at; Start 288; Stop 312
ggacgtgggaaaatctcctattatc

SEQ ID NO: 254161 - DNA, 25 bp, Artificial
  probe
  misc_feature (1)..(25): SEQ ID NO: 5974; WAN02QE91_at; Start 218; Stop 242
gcgatgtaactttagggaataatgt

SEQ ID NO: 254162 - DNA, 25 bp, Artificial
  probe
  misc_feature (1)..(25): SEQ ID NO: 5974; WAN02QE91_at; Start 340; Stop 364
gctaaaattataggagggataacga

SEQ ID NO: 254163 - DNA, 25 bp, Artificial
  probe
  misc_feature (1)..(25): SEQ ID NO: 5974; WAN02QE91_at; Start 312; Stop 336
cgaagcaggtgttgatattggagca

SEQ ID NO: 254164 - DNA, 25 bp, Artificial
  probe
  misc_feature (1)..(25): SEQ ID NO: 5974; WAN02QE91_at; Start 436; Stop 460
ggagttccagcgaggaatatagcat

SEQ ID NO: 254165 - DNA, 25 bp, Artificial
  probe
  misc_feature (1)..(25): SEQ ID NO: 5974; WAN02QE91_at; Start 213; Stop 237
taatggcgatgtaactttagggaat

SEQ ID NO: 254166 - DNA, 25 bp, Artificial
  probe
  misc_feature (1)..(25): SEQ ID NO: 5974; WAN02QE91_at; Start 51; Stop 75
taaaagacatgtaggacggtcaact

SEQ ID NO: 254167 - DNA, 25 bp, Artificial
  probe
  misc_feature (1)..(25): SEQ ID NO: 5974; WAN02QE91_at; Start 135; Stop 159
tattttcaatacagaattaccagca

SEQ ID NO: 254168 - DNA, 25 bp, Artificial
  probe
  misc_feature (1)..(25): SEQ ID NO: 5974; WAN02QE91_at; Start 415; Stop 439
ccacctggttcaattttagtaggag

SEQ ID NO: 254169 - DNA, 25 bp, Artificial
  probe
  misc_feature (1)..(25): SEQ ID NO: 5974; WAN02QE91_at; Start 2; Stop 26
tgaaaaatgataggaaagctcaact

SEQ ID NO: 254170 - DNA, 25 bp, Artificial
  probe
  misc_feature (1)..(25): SEQ ID NO: 5974; WAN02QE91_at; Start 264; Stop 288
cattggtaataaagggatggaaagg

SEQ ID NO: 254171 - DNA, 25 bp, Artificial
  probe
  misc_feature (1)..(25): SEQ ID NO: 5974; WAN02QE91_at; Start 141; Stop 165
caatacagaattaccagcatcacaa

SEQ ID NO: 254172 - DNA, 25 bp, Artificial
  probe
  misc_feature (1)..(25): SEQ ID NO: 5974; WAN02QE91_at; Start 320; Stop 344
gtgttgatattggagcaggtgctaa

SEQ ID NO: 254173 - DNA, 25 bp, Artificial
  probe
  misc_feature (1)..(25): SEQ ID NO: 5974; WAN02QE91_at; Start 443; Stop 467
cagcgaggaatatagcattagagaa

SEQ ID NO: 254174 - DNA, 25 bp, Artificial
  probe
  misc_feature (1)..(25): SEQ ID NO: 5974; WAN02QE91_at; Start 197; Stop 221
catatgggataatagttaatggcga

SEQ ID NO: 254175 - DNA, 25 bp, Artificial
  probe
  misc_feature (1)..(25): SEQ ID NO: 5974; WAN02QE91_at; Start 425; Stop 449
caattttagtaggagttccagcgag

SEQ ID NO: 254176 - DNA, 25 bp, Artificial
  probe
  misc_feature (1)..(25): SEQ ID NO: 5974; WAN02QE91_at; Start 118; Stop 142
gctatatttgtaattggtattttca

SEQ ID NO: 254177 - DNA, 25 bp, Artificial
  probe
  misc_feature (1)..(25): SEQ ID NO: 5974; WAN02QE91_at; Start 182; Stop 206
taatattgtttcatccatatgggat

SEQ ID NO: 254178 - DNA, 25 bp, Artificial
  probe
  misc_feature (1)..(25): SEQ ID NO: 5974; WAN02QE91_at; Start 373; Stop 397
ggttcaaaagtaggagctaatgctg

SEQ ID NO: 254179 - DNA, 25 bp, Artificial
  probe
  misc_feature (1)..(25): SEQ ID NO: 5974; WAN02QE91_at; Start 404; Stop 428
caaaaagctttccacctggttcaat

SEQ ID NO: 254180 - DNA, 25 bp, Artificial
  probe
  misc_feature (1)..(25): SEQ ID NO: 5974; WAN02QE91_at; Start 356; Stop 380
ggataacgattggtgagggttcaaa

SEQ ID NO: 254181 - DNA, 25 bp, Artificial
  probe
  misc_feature (1)..(25): SEQ ID NO: 5974; WAN02QE91_at; Start 383; Stop 407
taggagctaatgctgttgtaacaaa

SEQ ID NO: 254182 - DNA, 25 bp, Artificial
  probe
  misc_feature (1)..(25): SEQ ID NO: 5974; WAN02QE91_at; Start 151; Stop 175
ttaccagcatcacaaaatattagtg

SEQ ID NO: 254183 - DNA, 25 bp, Artificial
  probe
  misc_feature (1)..(25): SEQ ID NO: 5974; WAN02QE91_at; Start 240; Stop 264
tgttgtgataagacagcaggttacc

SEQ ID NO: 254184 - DNA, 25 bp, Artificial
  probe
  misc_feature (1)..(25): SEQ ID NO: 5974; WAN02QE91_at; Start 301; Stop 325
tctcctattatcgaagcaggtgttg

SEQ ID NO: 254185 - DNA, 25 bp, Artificial
  probe
  misc_feature (1)..(25): SEQ ID NO: 5974; WAN02QE91_at; Start 330; Stop 354
tggagcaggtgctaaaattatagga

SEQ ID NO: 254186 - DNA, 25 bp, Artificial
  probe
  misc_feature (1)..(25): SEQ ID NO: 5974; WAN02QE91_at; Start 248; Stop 272
taagacagcaggttaccattggtaa

SEQ ID NO: 254187 - DNA, 25 bp, Artificial
  probe
  misc_feature (1)..(25): SEQ ID NO: 5974; WAN02QE91_at; Start 296; Stop 320
gaaaatctcctattatcgaagcagg

SEQ ID NO: 254188 - DNA, 25 bp, Artificial
  probe
  misc_feature (1)..(25): SEQ ID NO: 5974; WAN02QE91_at; Start 233; Stop 257
ggaataatgttgtgataagacagca

SEQ ID NO: 254189 - DNA, 25 bp, Artificial
  probe
  misc_feature (1)..(25): SEQ ID NO: 5974; WAN02QE91_at; Start 14; Stop 38
ggaaagctcaactaataattacaat

SEQ ID NO: 254190 - DNA, 25 bp, Artificial
  probe
  misc_feature (1)..(25): SEQ ID NO: 5974; WAN02QE91_at; Start 44; Stop 68
aatatggtaaaagacatgtaggacg

SEQ ID NO: 254191 - DNA, 25 bp, Artificial
  probe
  misc_feature (1)..(25): SEQ ID NO: 5974; WAN02QE91_at; Start 369; Stop 393
tgagggttcaaaagtaggagctaat

SEQ ID NO: 254192 - DNA, 25 bp, Artificial
  probe
  misc_feature (1)..(25): SEQ ID NO: 5974; WAN02QE91_at; Start 394; Stop 418
gctgttgtaacaaaaagctttccac

SEQ ID NO: 254193 - DNA, 25 bp, Artificial
  probe
  misc_feature (1)..(25): SEQ ID NO: 5974; WAN02QE91_at; Start 63; Stop 87
aggacggtcaactttttatcataag

SEQ ID NO: 254194 - DNA, 25 bp, Artificial
  probe
  misc_feature (1)..(25): SEQ ID NO: 10; WAN024AYX; Start 34; Stop 58
atcgaaaagggcaaaagtagtatct

SEQ ID NO: 254195 - DNA, 25 bp, Artificial
  probe
  misc_feature (1)..(25): SEQ ID NO: 10; WAN024AYX; Start 33; Stop 57
aatcgaaaagggcaaaagtagtatc

SEQ ID NO: 254196 - DNA, 25 bp, Artificial
  probe
  misc_feature (1)..(25): SEQ ID NO: 10; WAN024AYX; Start 32; Stop 56
gaatcgaaaagggcaaaagtagtat

SEQ ID NO: 254197 - DNA, 25 bp, Artificial
  probe
  misc_feature (1)..(25): SEQ ID NO: 10; WAN024AYX; Start 31; Stop 55
agaatcgaaaagggcaaaagtagta

SEQ ID NO: 254198 - DNA, 25 bp, Artificial
  probe
  misc_feature (1)..(25): SEQ ID NO: 10; WAN024AYX; Start 26; Stop 50
aaaagagaatcgaaaagggcaaaag

SEQ ID NO: 254199 - DNA, 25 bp, Artificial
  probe
  misc_feature (1)..(25): SEQ ID NO: 10; WAN024AYX; Start 35; Stop 59
tcgaaaagggcaaaagtagtatctt

SEQ ID NO: 254200 - DNA, 25 bp, Artificial
  probe
  misc_feature (1)..(25): SEQ ID NO: 10; WAN024AYX; Start 28; Stop 52
aagagaatcgaaaagggcaaaagta

SEQ ID NO: 254201 - DNA, 25 bp, Artificial
  probe
  misc_feature (1)..(25): SEQ ID NO: 10; WAN024AYX; Start 29; Stop 53
agagaatcgaaaagggcaaaagtag

SEQ ID NO: 254202 - DNA, 25 bp, Artificial
  probe
  misc_feature (1)..(25): SEQ ID NO: 10; WAN024AYX; Start 30; Stop 54
gagaatcgaaaagggcaaaagtagt

SEQ ID NO: 254203 - DNA, 25 bp, Artificial
  probe
  misc_feature (1)..(25): SEQ ID NO: 10; WAN024AYX; Start 27; Stop 51
aaagagaatcgaaaagggcaaaagt

SEQ ID NO: 254204 - DNA, 25 bp, Artificial
  probe
  misc_feature (1)..(25): SEQ ID NO: 10; WAN024AYX; Start 36; Stop 60
cgaaaagggcaaaagtagtatcttt

SEQ ID NO: 254205 - DNA, 25 bp, Artificial
  probe
  misc_feature (1)..(25): SEQ ID NO: 10; WAN024AYX; Start 40; Stop 64
aagggcaaaagtagtatctttatct

SEQ ID NO: 254206 - DNA, 25 bp, Artificial
  probe
  misc_feature (1)..(25): SEQ ID NO: 10; WAN024AYX; Start 37; Stop 61
gaaaagggcaaaagtagtatcttta

SEQ ID NO: 254207 - DNA, 25 bp, Artificial
  probe
  misc_feature (1)..(25): SEQ ID NO: 10; WAN024AYX; Start 39; Stop 63
aaagggcaaaagtagtatctttatc

SEQ ID NO: 254208 - DNA, 25 bp, Artificial
  probe
  misc_feature (1)..(25): SEQ ID NO: 10; WAN024AYX; Start 41; Stop 65
agggcaaaagtagtatctttatcta

SEQ ID NO: 254209 - DNA, 25 bp, Artificial
  probe
  misc_feature (1)..(25): SEQ ID NO: 10; WAN024AYX; Start 38; Stop 62
aaaagggcaaaagtagtatctttat

SEQ ID NO: 254210 - DNA, 25 bp, Artificial
  probe
  misc_feature (1)..(25): SEQ ID NO: 10; WAN024AYX; Start 42; Stop 66
gggcaaaagtagtatctttatctat

SEQ ID NO: 254211 - DNA, 25 bp, Artificial
  probe
  misc_feature (1)..(25): SEQ ID NO: 11; WAN024B2J; Start 68; Stop 92
acttgaaacagctagataaaccaga

SEQ ID NO: 254212 - DNA, 25 bp, Artificial
  probe
  misc_feature (1)..(25): SEQ ID NO: 11; WAN024B2J; Start 67; Stop 91
cacttgaaacagctagataaaccag

SEQ ID NO: 254213 - DNA, 25 bp, Artificial
  probe
  misc_feature (1)..(25): SEQ ID NO: 11; WAN024B2J; Start 66; Stop 90
tcacttgaaacagctagataaacca

SEQ ID NO: 254214 - DNA, 25 bp, Artificial
  probe
  misc_feature (1)..(25): SEQ ID NO: 11; WAN024B2J; Start 75; Stop 99
acagctagataaaccagataaggac

SEQ ID NO: 254215 - DNA, 25 bp, Artificial
  probe
  misc_feature (1)..(25): SEQ ID NO: 11; WAN024B2J; Start 74; Stop 98
aacagctagataaaccagataagga

SEQ ID NO: 254216 - DNA, 25 bp, Artificial
  probe
  misc_feature (1)..(25): SEQ ID NO: 11; WAN024B2J; Start 65; Stop 89
atcacttgaaacagctagataaacc

SEQ ID NO: 254217 - DNA, 25 bp, Artificial
  probe
  misc_feature (1)..(25): SEQ ID NO: 11; WAN024B2J; Start 69; Stop 93
cttgaaacagctagataaaccagat

SEQ ID NO: 254218 - DNA, 25 bp, Artificial
  probe
  misc_feature (1)..(25): SEQ ID NO: 11; WAN024B2J; Start 31; Stop 55
aaagtcattaaactagctcgttcga

SEQ ID NO: 254219 - DNA, 25 bp, Artificial
  probe
  misc_feature (1)..(25): SEQ ID NO: 11; WAN024B2J; Start 73; Stop 97
aaacagctagataaaccagataagg

SEQ ID NO: 254220 - DNA, 25 bp, Artificial
  probe
  misc_feature (1)..(25): SEQ ID NO: 11; WAN024B2J; Start 35; Stop 59
tcattaaactagctcgttcgaccta

SEQ ID NO: 254221 - DNA, 25 bp, Artificial
  probe
  misc_feature (1)..(25): SEQ ID NO: 11; WAN024B2J; Start 60; Stop 84
ctactatcacttgaaacagctagat

SEQ ID NO: 254222 - DNA, 25 bp, Artificial
  probe
  misc_feature (1)..(25): SEQ ID NO: 11; WAN024B2J; Start 71; Stop 95
tgaaacagctagataaaccagataa

SEQ ID NO: 254223 - DNA, 25 bp, Artificial
  probe
  misc_feature (1)..(25): SEQ ID NO: 11; WAN024B2J; Start 70; Stop 94
ttgaaacagctagataaaccagata

SEQ ID NO: 254224 - DNA, 25 bp, Artificial
  probe
  misc_feature (1)..(25): SEQ ID NO: 11; WAN024B2J; Start 32; Stop 56
aagtcattaaactagctcgttcgac

SEQ ID NO: 254225 - DNA, 25 bp, Artificial
  probe
  misc_feature (1)..(25): SEQ ID NO: 11; WAN024B2J; Start 72; Stop 96
gaaacagctagataaaccagataag

SEQ ID NO: 254226 - DNA, 25 bp, Artificial
  probe
  misc_feature (1)..(25): SEQ ID NO: 11; WAN024B2J; Start 62; Stop 86
actatcacttgaaacagctagataa

SEQ ID NO: 254227 - DNA, 25 bp, Artificial
  probe
  misc_feature (1)..(25): SEQ ID NO: 11; WAN024B2J; Start 34; Stop 58
gtcattaaactagctcgttcgacct

SEQ ID NO: 254228 - DNA, 25 bp, Artificial
  probe
  misc_feature (1)..(25): SEQ ID NO: 11; WAN024B2J; Start 33; Stop 57
agtcattaaactagctcgttcgacc

SEQ ID NO: 254229 - DNA, 25 bp, Artificial
  probe
  misc_feature (1)..(25): SEQ ID NO: 11; WAN024B2J; Start 4; Stop 28
actgaattttcgttagctcttcttc

SEQ ID NO: 254230 - DNA, 25 bp, Artificial
  probe
  misc_feature (1)..(25): SEQ ID NO: 11; WAN024B2J; Start 3; Stop 27
gactgaattttcgttagctcttctt

SEQ ID NO: 254231 - DNA, 25 bp, Artificial
  probe
  misc_feature (1)..(25): SEQ ID NO: 11; WAN024B2J; Start 1; Stop 25
atgactgaattttcgttagctcttc

SEQ ID NO: 254232 - DNA, 25 bp, Artificial
  probe
  misc_feature (1)..(25): SEQ ID NO: 11; WAN024B2J; Start 2; Stop 26
tgactgaattttcgttagctcttct

SEQ ID NO: 254233 - DNA, 25 bp, Artificial
  probe
  misc_feature (1)..(25): SEQ ID NO: 11; WAN024B2J; Start 5; Stop 29
ctgaattttcgttagctcttcttct

SEQ ID NO: 254234 - DNA, 25 bp, Artificial
  probe
  misc_feature (1)..(25): SEQ ID NO: 11; WAN024B2J; Start 64; Stop 88
tatcacttgaaacagctagataaac

SEQ ID NO: 254235 - DNA, 25 bp, Artificial
  probe
  misc_feature (1)..(25): SEQ ID NO: 11; WAN024B2J; Start 30; Stop 54
aaaagtcattaaactagctcgttcg

SEQ ID NO: 254236 - DNA, 25 bp, Artificial
  probe
  misc_feature (1)..(25): SEQ ID NO: 11; WAN024B2J; Start 61; Stop 85
tactatcacttgaaacagctagata

SEQ ID NO: 254237 - DNA, 25 bp, Artificial
  probe
  misc_feature (1)..(25): SEQ ID NO: 11; WAN024B2J; Start 63; Stop 87
ctatcacttgaaacagctagataaa

SEQ ID NO: 254238 - DNA, 25 bp, Artificial
  probe
  misc_feature (1)..(25): SEQ ID NO: 11; WAN024B2J; Start 13; Stop 37
tcgttagctcttcttctaaaagtca

SEQ ID NO: 254239 - DNA, 25 bp, Artificial
  probe
  misc_feature (1)..(25): SEQ ID NO: 11; WAN024B2J; Start 6; Stop 30
tgaattttcgttagctcttcttcta

SEQ ID NO: 254240 - DNA, 25 bp, Artificial
  probe
  misc_feature (1)..(25): SEQ ID NO: 11; WAN024B2J; Start 14; Stop 38
cgttagctcttcttctaaaagtcat

SEQ ID NO: 254241 - DNA, 25 bp, Artificial
  probe
  misc_feature (1)..(25): SEQ ID NO: 11; WAN024B2J; Start 12; Stop 36
ttcgttagctcttcttctaaaagtc

SEQ ID NO: 254242 - DNA, 25 bp, Artificial
  probe
  misc_feature (1)..(25): SEQ ID NO: 11; WAN024B2J; Start 11; Stop 35
tttcgttagctcttcttctaaaagt

SEQ ID NO: 254243 - DNA, 25 bp, Artificial
  probe
  misc_feature (1)..(25): SEQ ID NO: 11; WAN024B2J; Start 27; Stop 51
tctaaaagtcattaaactagctcgt

SEQ ID NO: 254244 - DNA, 25 bp, Artificial
  probe
  misc_feature (1)..(25): SEQ ID NO: 12; WAN024B8T; Start 4; Stop 28
agaatcaaagagcaaattagaaagc

SEQ ID NO: 254245 - DNA, 25 bp, Artificial
  probe
  misc_feature (1)..(25): SEQ ID NO: 12; WAN024B8T; Start 2; Stop 26
tgagaatcaaagagcaaattagaaa

SEQ ID NO: 254246 - DNA, 25 bp, Artificial
  probe
  misc_feature (1)..(25): SEQ ID NO: 12; WAN024B8T; Start 3; Stop 27
gagaatcaaagagcaaattagaaag

SEQ ID NO: 254247 - DNA, 25 bp, Artificial
  probe
  misc_feature (1)..(25): SEQ ID NO: 12; WAN024B8T; Start 1; Stop 25
atgagaatcaaagagcaaattagaa

SEQ ID NO: 254248 - DNA, 25 bp, Artificial
  probe
  misc_feature (1)..(25): SEQ ID NO: 12; WAN024B8T; Start 8; Stop 32
tcaaagagcaaattagaaagctagt

SEQ ID NO: 254249 - DNA, 25 bp, Artificial
  probe
  misc_feature (1)..(25): SEQ ID NO: 12; WAN024B8T; Start 9; Stop 33
caaagagcaaattagaaagctagtc

SEQ ID NO: 254250 - DNA, 25 bp, Artificial
  probe
  misc_feature (1)..(25): SEQ ID NO: 12; WAN024B8T; Start 5; Stop 29
gaatcaaagagcaaattagaaagct

SEQ ID NO: 254251 - DNA, 25 bp, Artificial
  probe
  misc_feature (1)..(25): SEQ ID NO: 12; WAN024B8T; Start 7; Stop 31
atcaaagagcaaattagaaagctag

SEQ ID NO: 254252 - DNA, 25 bp, Artificial
  probe
  misc_feature (1)..(25): SEQ ID NO: 12; WAN024B8T; Start 6; Stop 30
aatcaaagagcaaattagaaagcta

SEQ ID NO: 254253 - DNA, 25 bp, Artificial
  probe
  misc_feature (1)..(25): SEQ ID NO: 15; WAN024BI4; Start 51; Stop 75
atttgagatgattactatgggaggg

SEQ ID NO: 254254 - DNA, 25 bp, Artificial
  probe
  misc_feature (1)..(25): SEQ ID NO: 15; WAN024BI4; Start 50; Stop 74
tatttgagatgattactatgggagg

SEQ ID NO: 254255 - DNA, 25 bp, Artificial
  probe
  misc_feature (1)..(25): SEQ ID NO: 15; WAN024BI4; Start 37; Stop 61
acagtaccaagattatttgagatga

SEQ ID NO: 254256 - DNA, 25 bp, Artificial
  probe
  misc_feature (1)..(25): SEQ ID NO: 15; WAN024BI4; Start 52; Stop 76
tttgagatgattactatgggagggg

SEQ ID NO: 254257 - DNA, 25 bp, Artificial
  probe
  misc_feature (1)..(25): SEQ ID NO: 15; WAN024BI4; Start 6; Stop 30
ggatatgggaactatggaaataaat

SEQ ID NO: 254258 - DNA, 25 bp, Artificial
  probe
  misc_feature (1)..(25): SEQ ID NO: 15; WAN024BI4; Start 38; Stop 62
cagtaccaagattatttgagatgat

SEQ ID NO: 254259 - DNA, 25 bp, Artificial
  probe
  misc_feature (1)..(25): SEQ ID NO: 15; WAN024BI4; Start 49; Stop 73
ttatttgagatgattactatgggag

SEQ ID NO: 254260 - DNA, 25 bp, Artificial
  probe
  misc_feature (1)..(25): SEQ ID NO: 15; WAN024BI4; Start 36; Stop 60
tacagtaccaagattatttgagatg

SEQ ID NO: 254261 - DNA, 25 bp, Artificial
  probe
  misc_feature (1)..(25): SEQ ID NO: 15; WAN024BI4; Start 34; Stop 58
cttacagtaccaagattatttgaga

SEQ ID NO: 254262 - DNA, 25 bp, Artificial
  probe
  misc_feature (1)..(25): SEQ ID NO: 15; WAN024BI4; Start 42; Stop 66
accaagattatttgagatgattact

SEQ ID NO: 254263 - DNA, 25 bp, Artificial
  probe
  misc_feature (1)..(25): SEQ ID NO: 15; WAN024BI4; Start 21; Stop 45
ggaaataaatagtcttacagtacca

SEQ ID NO: 254264 - DNA, 25 bp, Artificial
  probe
  misc_feature (1)..(25): SEQ ID NO: 15; WAN024BI4; Start 20; Stop 44
tggaaataaatagtcttacagtacc

SEQ ID NO: 254265 - DNA, 25 bp, Artificial
  probe
  misc_feature (1)..(25): SEQ ID NO: 15; WAN024BI4; Start 48; Stop 72
attatttgagatgattactatggga

SEQ ID NO: 254266 - DNA, 25 bp, Artificial
  probe
  misc_feature (1)..(25): SEQ ID NO: 15; WAN024BI4; Start 32; Stop 56
gtcttacagtaccaagattatttga

SEQ ID NO: 254267 - DNA, 25 bp, Artificial
  probe
  misc_feature (1)..(25): SEQ ID NO: 15; WAN024BI4; Start 31; Stop 55
agtcttacagtaccaagattatttg

SEQ ID NO: 254268 - DNA, 25 bp, Artificial
  probe
  misc_feature (1)..(25): SEQ ID NO: 15; WAN024BI4; Start 35; Stop 59
ttacagtaccaagattatttgagat

SEQ ID NO: 254269 - DNA, 25 bp, Artificial
  probe
  misc_feature (1)..(25): SEQ ID NO: 15; WAN024BI4; Start 47; Stop 71
gattatttgagatgattactatggg

SEQ ID NO: 254270 - DNA, 25 bp, Artificial
  probe
  misc_feature (1)..(25): SEQ ID NO: 15; WAN024BI4; Start 33; Stop 57
tcttacagtaccaagattatttgag

SEQ ID NO: 254271 - DNA, 25 bp, Artificial
  probe
  misc_feature (1)..(25): SEQ ID NO: 15; WAN024BI4; Start 29; Stop 53
atagtcttacagtaccaagattatt

SEQ ID NO: 254272 - DNA, 25 bp, Artificial
  probe
  misc_feature (1)..(25): SEQ ID NO: 15; WAN024BI4; Start 28; Stop 52
aatagtcttacagtaccaagattat

SEQ ID NO: 254273 - DNA, 25 bp, Artificial
  probe
  misc_feature (1)..(25): SEQ ID NO: 15; WAN024BI4; Start 30; Stop 54
tagtcttacagtaccaagattattt

SEQ ID NO: 254274 - DNA, 25 bp, Artificial
  probe
  misc_feature (1)..(25): SEQ ID NO: 15; WAN024BI4; Start 27; Stop 51
aaatagtcttacagtaccaagatta

SEQ ID NO: 254275 - DNA, 25 bp, Artificial
  probe
  misc_feature (1)..(25): SEQ ID NO: 15; WAN024BI4; Start 26; Stop 50
taaatagtcttacagtaccaagatt

SEQ ID NO: 254276 - DNA, 25 bp, Artificial
  probe
  misc_feature (1)..(25): SEQ ID NO: 15; WAN024BI4; Start 24; Stop 48
aataaatagtcttacagtaccaaga

SEQ ID NO: 254277 - DNA, 25 bp, Artificial
  probe
  misc_feature (1)..(25): SEQ ID NO: 15; WAN024BI4; Start 25; Stop 49
ataaatagtcttacagtaccaagat

SEQ ID NO: 254278 - DNA, 25 bp, Artificial
  probe
  misc_feature (1)..(25): SEQ ID NO: 16; WAN024AXE; Start 36; Stop 60
ccatgaagcagtcttaaaaggaaaa

SEQ ID NO: 254279 - DNA, 25 bp, Artificial
  probe
  misc_feature (1)..(25): SEQ ID NO: 16; WAN024AXE; Start 35; Stop 59
cccatgaagcagtcttaaaaggaaa

SEQ ID NO: 254280 - DNA, 25 bp, Artificial
  probe
  misc_feature (1)..(25): SEQ ID NO: 16; WAN024AXE; Start 29; Stop 53
tctttgcccatgaagcagtcttaaa

SEQ ID NO: 254281 - DNA, 25 bp, Artificial
  probe
  misc_feature (1)..(25): SEQ ID NO: 16; WAN024AXE; Start 28; Stop 52
gtctttgcccatgaagcagtcttaa

SEQ ID NO: 254282 - DNA, 25 bp, Artificial
  probe
  misc_feature (1)..(25): SEQ ID NO: 16; WAN024AXE; Start 34; Stop 58
gcccatgaagcagtcttaaaaggaa

SEQ ID NO: 254283 - DNA, 25 bp, Artificial
  probe
  misc_feature (1)..(25): SEQ ID NO: 16; WAN024AXE; Start 31; Stop 55
tttgcccatgaagcagtcttaaaag

SEQ ID NO: 254284 - DNA, 25 bp, Artificial
  probe
  misc_feature (1)..(25): SEQ ID NO: 16; WAN024AXE; Start 30; Stop 54
ctttgcccatgaagcagtcttaaaa

SEQ ID NO: 254285 - DNA, 25 bp, Artificial
  probe
  misc_feature (1)..(25): SEQ ID NO: 16; WAN024AXE; Start 27; Stop 51
agtctttgcccatgaagcagtctta

SEQ ID NO: 254286 - DNA, 25 bp, Artificial
  probe
  misc_feature (1)..(25): SEQ ID NO: 16; WAN024AXE; Start 32; Stop 56
ttgcccatgaagcagtcttaaaagg

SEQ ID NO: 254287 - DNA, 25 bp, Artificial
  probe
  misc_feature (1)..(25): SEQ ID NO: 16; WAN024AXE; Start 33; Stop 57
tgcccatgaagcagtcttaaaagga

SEQ ID NO: 254288 - DNA, 25 bp, Artificial
  probe
  misc_feature (1)..(25): SEQ ID NO: 17; WAN024BCO; Start 11; Stop 35
catccgcaacctcaaaacagtgttt

SEQ ID NO: 254289 - DNA, 25 bp, Artificial
  probe
  misc_feature (1)..(25): SEQ ID NO: 21; WAN024B8V; Start 21; Stop 45
cacaacctcaaaacactgttttaag

SEQ ID NO: 254290 - DNA, 25 bp, Artificial
  probe
  misc_feature (1)..(25): SEQ ID NO: 21; WAN024B8V; Start 20; Stop 44
ccacaacctcaaaacactgttttaa

SEQ ID NO: 254291 - DNA, 25 bp, Artificial
  probe
  misc_feature (1)..(25): SEQ ID NO: 21; WAN024B8V; Start 22; Stop 46
acaacctcaaaacactgttttaagc

SEQ ID NO: 254292 - DNA, 25 bp, Artificial
  probe
  misc_feature (1)..(25): SEQ ID NO: 21; WAN024B8V; Start 19; Stop 43
tccacaacctcaaaacactgtttta

SEQ ID NO: 254293 - DNA, 25 bp, Artificial
  probe
  misc_feature (1)..(25): SEQ ID NO: 21; WAN024B8V; Start 18; Stop 42
atccacaacctcaaaacactgtttt

SEQ ID NO: 254294 - DNA, 25 bp, Artificial
  probe
  misc_feature (1)..(25): SEQ ID NO: 23; WAN024BCJ; Start 58; Stop 82
aaagatttgattctgctcctcacac

SEQ ID NO: 254295 - DNA, 25 bp, Artificial
  probe
  misc_feature (1)..(25): SEQ ID NO: 23; WAN024BCJ; Start 60; Stop 84
agatttgattctgctcctcacacaa

SEQ ID NO: 254296 - DNA, 25 bp, Artificial
  probe
  misc_feature (1)..(25): SEQ ID NO: 23; WAN024BCJ; Start 59; Stop 83
aagatttgattctgctcctcacaca

SEQ ID NO: 254297 - DNA, 25 bp, Artificial
  probe
  misc_feature (1)..(25): SEQ ID NO: 23; WAN024BCJ; Start 26; Stop 50
aaaatgaagtaaatctccccacaac

SEQ ID NO: 254298 - DNA, 25 bp, Artificial
  probe
  misc_feature (1)..(25): SEQ ID NO: 23; WAN024BCJ; Start 25; Stop 49
gaaaatgaagtaaatctccccacaa

SEQ ID NO: 254299 - DNA, 25 bp, Artificial
  probe
  misc_feature (1)..(25): SEQ ID NO: 23; WAN024BCJ; Start 24; Stop 48
agaaaatgaagtaaatctccccaca

SEQ ID NO: 254300 - DNA, 25 bp, Artificial
  probe
  misc_feature (1)..(25): SEQ ID NO: 23; WAN024BCJ; Start 27; Stop 51
aaatgaagtaaatctccccacaact

SEQ ID NO: 254301 - DNA, 25 bp, Artificial
  probe
  misc_feature (1)..(25): SEQ ID NO: 23; WAN024BCJ; Start 28; Stop 52
aatgaagtaaatctccccacaacta

SEQ ID NO: 254302 - DNA, 25 bp, Artificial
  probe
  misc_feature (1)..(25): SEQ ID NO: 23; WAN024BCJ; Start 29; Stop 53
atgaagtaaatctccccacaactat

SEQ ID NO: 254303 - DNA, 25 bp, Artificial
  probe
  misc_feature (1)..(25): SEQ ID NO: 23; WAN024BCJ; Start 57; Stop 81
aaaagatttgattctgctcctcaca

SEQ ID NO: 254304 - DNA, 25 bp, Artificial
  probe
  misc_feature (1)..(25): SEQ ID NO: 23; WAN024BCJ; Start 30; Stop 54
tgaagtaaatctccccacaactata

SEQ ID NO: 254305 - DNA, 25 bp, Artificial
  probe
  misc_feature (1)..(25): SEQ ID NO: 23; WAN024BCJ; Start 11; Stop 35
actcaatctcaggagaaaatgaagt

SEQ ID NO: 254306 - DNA, 25 bp, Artificial
  probe
  misc_feature (1)..(25): SEQ ID NO: 23; WAN024BCJ; Start 10; Stop 34
aactcaatctcaggagaaaatgaag

SEQ ID NO: 254307 - DNA, 25 bp, Artificial
  probe
  misc_feature (1)..(25): SEQ ID NO: 23; WAN024BCJ; Start 9; Stop 33
aaactcaatctcaggagaaaatgaa

SEQ ID NO: 254308 - DNA, 25 bp, Artificial
  probe
  misc_feature (1)..(25): SEQ ID NO: 23; WAN024BCJ; Start 8; Stop 32
aaaactcaatctcaggagaaaatga

SEQ ID NO: 254309 - DNA, 25 bp, Artificial
  probe
  misc_feature (1)..(25): SEQ ID NO: 23; WAN024BCJ; Start 12; Stop 36
ctcaatctcaggagaaaatgaagta

SEQ ID NO: 254310 - DNA, 25 bp, Artificial
  probe
  misc_feature (1)..(25): SEQ ID NO: 23; WAN024BCJ; Start 13; Stop 37
tcaatctcaggagaaaatgaagtaa

SEQ ID NO: 254311 - DNA, 25 bp, Artificial
  probe
  misc_feature (1)..(25): SEQ ID NO: 23; WAN024BCJ; Start 33; Stop 57
agtaaatctccccacaactatagaa

SEQ ID NO: 254312 - DNA, 25 bp, Artificial
  probe
  misc_feature (1)..(25): SEQ ID NO: 23; WAN024BCJ; Start 32; Stop 56
aagtaaatctccccacaactataga

SEQ ID NO: 254313 - DNA, 25 bp, Artificial
  probe
  misc_feature (1)..(25): SEQ ID NO: 23; WAN024BCJ; Start 17; Stop 41
tctcaggagaaaatgaagtaaatct

SEQ ID NO: 254314 - DNA, 25 bp, Artificial
  probe
  misc_feature (1)..(25): SEQ ID NO: 23; WAN024BCJ; Start 31; Stop 55
gaagtaaatctccccacaactatag

SEQ ID NO: 254315 - DNA, 25 bp, Artificial
  probe
  misc_feature (1)..(25): SEQ ID NO: 23; WAN024BCJ; Start 34; Stop 58
gtaaatctccccacaactatagaaa

SEQ ID NO: 254316 - DNA, 25 bp, Artificial
  probe
  misc_feature (1)..(25): SEQ ID NO: 23; WAN024BCJ; Start 14; Stop 38
caatctcaggagaaaatgaagtaaa

SEQ ID NO: 254317 - DNA, 25 bp, Artificial
  probe
  misc_feature (1)..(25): SEQ ID NO: 23; WAN024BCJ; Start 35; Stop 59
taaatctccccacaactatagaaaa

SEQ ID NO: 254318 - DNA, 25 bp, Artificial
  probe
  misc_feature (1)..(25): SEQ ID NO: 23; WAN024BCJ; Start 16; Stop 40
atctcaggagaaaatgaagtaaatc

SEQ ID NO: 254319 - DNA, 25 bp, Artificial
  probe
  misc_feature (1)..(25): SEQ ID NO: 23; WAN024BCJ; Start 23; Stop 47
gagaaaatgaagtaaatctccccac

SEQ ID NO: 254320 - DNA, 25 bp, Artificial
  probe
  misc_feature (1)..(25): SEQ ID NO: 23; WAN024BCJ; Start 15; Stop 39
aatctcaggagaaaatgaagtaaat

SEQ ID NO: 254321 - DNA, 25 bp, Artificial
  probe
  misc_feature (1)..(25): SEQ ID NO: 23; WAN024BCJ; Start 18; Stop 42
ctcaggagaaaatgaagtaaatctc

SEQ ID NO: 254322 - DNA, 25 bp, Artificial
  probe
  misc_feature (1)..(25): SEQ ID NO: 25; WAN024BG8; Start 1; Stop 25
gtggaaactctcgtaaacaaagagg

SEQ ID NO: 254323 - DNA, 25 bp, Artificial
  probe
  misc_feature (1)..(25): SEQ ID NO: 25; WAN024BG8; Start 2; Stop 26
tggaaactctcgtaaacaaagaggt

SEQ ID NO: 254324 - DNA, 25 bp, Artificial
  probe
  misc_feature (1)..(25): SEQ ID NO: 25; WAN024BG8; Start 34; Stop 58
gcctatttaccatggactaaagttg

SEQ ID NO: 254325 - DNA, 25 bp, Artificial
  probe
  misc_feature (1)..(25): SEQ ID NO: 25; WAN024BG8; Start 33; Stop 57
ggcctatttaccatggactaaagtt

SEQ ID NO: 254326 - DNA, 25 bp, Artificial
  probe
  misc_feature (1)..(25): SEQ ID NO: 25; WAN024BG8; Start 35; Stop 59
cctatttaccatggactaaagttgt

SEQ ID NO: 254327 - DNA, 25 bp, Artificial
  probe
  misc_feature (1)..(25): SEQ ID NO: 25; WAN024BG8; Start 12; Stop 36
cgtaaacaaagaggttttagaggcc

SEQ ID NO: 254328 - DNA, 25 bp, Artificial
  probe
  misc_feature (1)..(25): SEQ ID NO: 25; WAN024BG8; Start 36; Stop 60
ctatttaccatggactaaagttgta

SEQ ID NO: 254329 - DNA, 25 bp, Artificial
  probe
  misc_feature (1)..(25): SEQ ID NO: 27; WAN024B26; Start 66; Stop 90
gaaagaagaaagacagaaattgttt

SEQ ID NO: 254330 - DNA, 25 bp, Artificial
  probe
  misc_feature (1)..(25): SEQ ID NO: 27; WAN024B26; Start 70; Stop 94
gaagaaagacagaaattgtttaaga

SEQ ID NO: 254331 - DNA, 25 bp, Artificial
  probe
  misc_feature (1)..(25): SEQ ID NO: 27; WAN024B26; Start 69; Stop 93
agaagaaagacagaaattgtttaag

SEQ ID NO: 254332 - DNA, 25 bp, Artificial
  probe
  misc_feature (1)..(25): SEQ ID NO: 27; WAN024B26; Start 71; Stop 95
aagaaagacagaaattgtttaagaa

SEQ ID NO: 254333 - DNA, 25 bp, Artificial
  probe
  misc_feature (1)..(25): SEQ ID NO: 27; WAN024B26; Start 68; Stop 92
aagaagaaagacagaaattgtttaa

SEQ ID NO: 254334 - DNA, 25 bp, Artificial
  probe
  misc_feature (1)..(25): SEQ ID NO: 27; WAN024B26; Start 67; Stop 91
aaagaagaaagacagaaattgttta

SEQ ID NO: 254335 - DNA, 25 bp, Artificial
  probe
  misc_feature (1)..(25): SEQ ID NO: 27; WAN024B26; Start 72; Stop 96
agaaagacagaaattgtttaagaat

SEQ ID NO: 254336 - DNA, 25 bp, Artificial
  probe
  misc_feature (1)..(25): SEQ ID NO: 35; WAN024BA5; Start 45; Stop 69
tgaaaatcaaagagcaaactataat

SEQ ID NO: 254337 - DNA, 25 bp, Artificial
  probe
  misc_feature (1)..(25): SEQ ID NO: 35; WAN024BA5; Start 44; Stop 68
atgaaaatcaaagagcaaactataa

SEQ ID NO: 254338 - DNA, 25 bp, Artificial
  probe
  misc_feature (1)..(25): SEQ ID NO: 35; WAN024BA5; Start 30; Stop 54
tgaactaatactcaatgaaaatcaa

SEQ ID NO: 254339 - DNA, 25 bp, Artificial
  probe
  misc_feature (1)..(25): SEQ ID NO: 35; WAN024BA5; Start 29; Stop 53
ttgaactaatactcaatgaaaatca

SEQ ID NO: 254340 - DNA, 25 bp, Artificial
  probe
  misc_feature (1)..(25): SEQ ID NO: 38; WAN024BBM; Start 27; Stop 51
taaggtggtagatagaactgacgaa

SEQ ID NO: 254341 - DNA, 25 bp, Artificial
  probe
  misc_feature (1)..(25): SEQ ID NO: 38; WAN024BBM; Start 26; Stop 50
ttaaggtggtagatagaactgacga

SEQ ID NO: 254342 - DNA, 25 bp, Artificial
  probe
  misc_feature (1)..(25): SEQ ID NO: 38; WAN024BBM; Start 28; Stop 52
aaggtggtagatagaactgacgaag

SEQ ID NO: 254343 - DNA, 25 bp, Artificial
  probe
  misc_feature (1)..(25): SEQ ID NO: 38; WAN024BBM; Start 29; Stop 53
aggtggtagatagaactgacgaagt

SEQ ID NO: 254344 - DNA, 25 bp, Artificial
  probe
  misc_feature (1)..(25): SEQ ID NO: 38; WAN024BBM; Start 25; Stop 49
tttaaggtggtagatagaactgacg

SEQ ID NO: 254345 - DNA, 25 bp, Artificial
  probe
  misc_feature (1)..(25): SEQ ID NO: 38; WAN024BBM; Start 23; Stop 47
gctttaaggtggtagatagaactga

SEQ ID NO: 254346 - DNA, 25 bp, Artificial
  probe
  misc_feature (1)..(25): SEQ ID NO: 38; WAN024BBM; Start 30; Stop 54
ggtggtagatagaactgacgaagtc

SEQ ID NO: 254347 - DNA, 25 bp, Artificial
  probe
  misc_feature (1)..(25): SEQ ID NO: 38; WAN024BBM; Start 24; Stop 48
ctttaaggtggtagatagaactgac

SEQ ID NO: 254348 - DNA, 25 bp, Artificial
  probe
  misc_feature (1)..(25): SEQ ID NO: 38; WAN024BBM; Start 22; Stop 46
agctttaaggtggtagatagaactg

SEQ ID NO: 254349 - DNA, 25 bp, Artificial
  probe
  misc_feature (1)..(25): SEQ ID NO: 38; WAN024BBM; Start 21; Stop 45
cagctttaaggtggtagatagaact

SEQ ID NO: 254350 - DNA, 25 bp, Artificial
  probe
  misc_feature (1)..(25): SEQ ID NO: 38; WAN024BBM; Start 20; Stop 44
acagctttaaggtggtagatagaac

SEQ ID NO: 254351 - DNA, 25 bp, Artificial
  probe
  misc_feature (1)..(25): SEQ ID NO: 38; WAN024BBM; Start 18; Stop 42
gtacagctttaaggtggtagataga

SEQ ID NO: 254352 - DNA, 25 bp, Artificial
  probe
  misc_feature (1)..(25): SEQ ID NO: 38; WAN024BBM; Start 17; Stop 41
agtacagctttaaggtggtagatag

SEQ ID NO: 254353 - DNA, 25 bp, Artificial
  probe
  misc_feature (1)..(25): SEQ ID NO: 38; WAN024BBM; Start 19; Stop 43
tacagctttaaggtggtagatagaa

SEQ ID NO: 254354 - DNA, 25 bp, Artificial
  probe
  misc_feature (1)..(25): SEQ ID NO: 38; WAN024BBM; Start 16; Stop 40
aagtacagctttaaggtggtagata

SEQ ID NO: 254355 - DNA, 25 bp, Artificial
  probe
  misc_feature (1)..(25): SEQ ID NO: 38; WAN024BBM; Start 15; Stop 39
aaagtacagctttaaggtggtagat

SEQ ID NO: 254356 - DNA, 25 bp, Artificial
  probe
  misc_feature (1)..(25): SEQ ID NO: 38; WAN024BBM; Start 14; Stop 38
caaagtacagctttaaggtggtaga

SEQ ID NO: 254357 - DNA, 25 bp, Artificial
  probe
  misc_feature (1)..(25): SEQ ID NO: 38; WAN024BBM; Start 13; Stop 37
tcaaagtacagctttaaggtggtag

SEQ ID NO: 254358 - DNA, 25 bp, Artificial
  probe
  misc_feature (1)..(25): SEQ ID NO: 38; WAN024BBM; Start 12; Stop 36
ctcaaagtacagctttaaggtggta

SEQ ID NO: 254359 - DNA, 25 bp, Artificial
  probe
  misc_feature (1)..(25): SEQ ID NO: 38; WAN024BBM; Start 31; Stop 55
gtggtagatagaactgacgaagtca

SEQ ID NO: 254360 - DNA, 25 bp, Artificial
  probe
  misc_feature (1)..(25): SEQ ID NO: 38; WAN024BBM; Start 11; Stop 35
gctcaaagtacagctttaaggtggt

SEQ ID NO: 254361 - DNA, 25 bp, Artificial
  probe
  misc_feature (1)..(25): SEQ ID NO: 38; WAN024BBM; Start 8; Stop 32
ttagctcaaagtacagctttaaggt

SEQ ID NO: 254362 - DNA, 25 bp, Artificial
  probe
  misc_feature (1)..(25): SEQ ID NO: 38; WAN024BBM; Start 7; Stop 31
gttagctcaaagtacagctttaagg

SEQ ID NO: 254363 - DNA, 25 bp, Artificial
  probe
  misc_feature (1)..(25): SEQ ID NO: 38; WAN024BBM; Start 9; Stop 33
tagctcaaagtacagctttaaggtg

SEQ ID NO: 254364 - DNA, 25 bp, Artificial
  probe
  misc_feature (1)..(25): SEQ ID NO: 38; WAN024BBM; Start 6; Stop 30
agttagctcaaagtacagctttaag

SEQ ID NO: 254365 - DNA, 25 bp, Artificial
  probe
  misc_feature (1)..(25): SEQ ID NO: 38; WAN024BBM; Start 4; Stop 28
gaagttagctcaaagtacagcttta

SEQ ID NO: 254366 - DNA, 25 bp, Artificial
  probe
  misc_feature (1)..(25): SEQ ID NO: 38; WAN024BBM; Start 3; Stop 27
ggaagttagctcaaagtacagcttt

SEQ ID NO: 254367 - DNA, 25 bp, Artificial
  probe
  misc_feature (1)..(25): SEQ ID NO: 38; WAN024BBM; Start 5; Stop 29
aagttagctcaaagtacagctttaa

SEQ ID NO: 254368 - DNA, 25 bp, Artificial
  probe
  misc_feature (1)..(25): SEQ ID NO: 38; WAN024BBM; Start 64; Stop 88
tactgttttgaggttgcagatggac

SEQ ID NO: 254369 - DNA, 25 bp, Artificial
  probe
  misc_feature (1)..(25): SEQ ID NO: 38; WAN024BBM; Start 2; Stop 26
tggaagttagctcaaagtacagctt

SEQ ID NO: 254370 - DNA, 25 bp, Artificial
  probe
  misc_feature (1)..(25): SEQ ID NO: 38; WAN024BBM; Start 1; Stop 25
ttggaagttagctcaaagtacagct

SEQ ID NO: 254371 - DNA, 25 bp, Artificial
  probe
  misc_feature (1)..(25): SEQ ID NO: 38; WAN024BBM; Start 10; Stop 34
agctcaaagtacagctttaaggtgg

SEQ ID NO: 254372 - DNA, 25 bp, Artificial
  probe
  misc_feature (1)..(25): SEQ ID NO: 39; WAN024B6M; Start 55; Stop 79
ttcaaattcttttggggtcaaactc

SEQ ID NO: 254373 - DNA, 25 bp, Artificial
  probe
  misc_feature (1)..(25): SEQ ID NO: 39; WAN024B6M; Start 54; Stop 78
tttcaaattcttttggggtcaaact

SEQ ID NO: 254374 - DNA, 25 bp, Artificial
  probe
  misc_feature (1)..(25): SEQ ID NO: 39; WAN024B6M; Start 53; Stop 77
ctttcaaattcttttggggtcaaac

SEQ ID NO: 254375 - DNA, 25 bp, Artificial
  probe
  misc_feature (1)..(25): SEQ ID NO: 39; WAN024B6M; Start 47; Stop 71
ttatcgctttcaaattcttttgggg

SEQ ID NO: 254376 - DNA, 25 bp, Artificial
  probe
  misc_feature (1)..(25): SEQ ID NO: 39; WAN024B6M; Start 46; Stop 70
tttatcgctttcaaattcttttggg

SEQ ID NO: 254377 - DNA, 25 bp, Artificial
  probe
  misc_feature (1)..(25): SEQ ID NO: 39; WAN024B6M; Start 57; Stop 81
caaattcttttggggtcaaactcag

SEQ ID NO: 254378 - DNA, 25 bp, Artificial
  probe
  misc_feature (1)..(25): SEQ ID NO: 39; WAN024B6M; Start 52; Stop 76
gctttcaaattcttttggggtcaaa

SEQ ID NO: 254379 - DNA, 25 bp, Artificial
  probe
  misc_feature (1)..(25): SEQ ID NO: 39; WAN024B6M; Start 56; Stop 80
tcaaattcttttggggtcaaactca

SEQ ID NO: 254380 - DNA, 25 bp, Artificial
  probe
  misc_feature (1)..(25): SEQ ID NO: 39; WAN024B6M; Start 48; Stop 72
tatcgctttcaaattcttttggggt

SEQ ID NO: 254381 - DNA, 25 bp, Artificial
  probe
  misc_feature (1)..(25): SEQ ID NO: 39; WAN024B6M; Start 45; Stop 69
ttttatcgctttcaaattcttttgg

SEQ ID NO: 254382 - DNA, 25 bp, Artificial
  probe
  misc_feature (1)..(25): SEQ ID NO: 39; WAN024B6M; Start 49; Stop 73
atcgctttcaaattcttttggggtc

SEQ ID NO: 254383 - DNA, 25 bp, Artificial
  probe
  misc_feature (1)..(25): SEQ ID NO: 39; WAN024B6M; Start 51; Stop 75
cgctttcaaattcttttggggtcaa

SEQ ID NO: 254384 - DNA, 25 bp, Artificial
  probe
  misc_feature (1)..(25): SEQ ID NO: 39; WAN024B6M; Start 50; Stop 74
tcgctttcaaattcttttggggtca

SEQ ID NO: 254385 - DNA, 25 bp, Artificial
  probe
  misc_feature (1)..(25): SEQ ID NO: 40; WAN024B7A; Start 18; Stop 42
aaatggtgagttaatcgctccaatg

SEQ ID NO: 254386 - DNA, 25 bp, Artificial
  probe
  misc_feature (1)..(25): SEQ ID NO: 40; WAN024B7A; Start 17; Stop 41
caaatggtgagttaatcgctccaat

SEQ ID NO: 254387 - DNA, 25 bp, Artificial
  probe
  misc_feature (1)..(25): SEQ ID NO: 40; WAN024B7A; Start 16; Stop 40
acaaatggtgagttaatcgctccaa

SEQ ID NO: 254388 - DNA, 25 bp, Artificial
  probe
  misc_feature (1)..(25): SEQ ID NO: 40; WAN024B7A; Start 15; Stop 39
aacaaatggtgagttaatcgctcca

SEQ ID NO: 254389 - DNA, 25 bp, Artificial
  probe
  misc_feature (1)..(25): SEQ ID NO: 43; WAN024GLK; Start 51; Stop 75
tgaactatctatgattgaggtagcg

SEQ ID NO: 254390 - DNA, 25 bp, Artificial
  probe
  misc_feature (1)..(25): SEQ ID NO: 43; WAN024GLK; Start 50; Stop 74
gtgaactatctatgattgaggtagc

SEQ ID NO: 254391 - DNA, 25 bp, Artificial
  probe
  misc_feature (1)..(25): SEQ ID NO: 43; WAN024GLK; Start 371; Stop 395
gtgattcagatgccattgactacaa

SEQ ID NO: 254392 - DNA, 25 bp, Artificial
  probe
  misc_feature (1)..(25): SEQ ID NO: 43; WAN024GLK; Start 49; Stop 73
agtgaactatctatgattgaggtag

SEQ ID NO: 254393 - DNA, 25 bp, Artificial
  probe
  misc_feature (1)..(25): SEQ ID NO: 43; WAN024GLK; Start 15; Stop 39
tttggaattagaagtatttgctggg

SEQ ID NO: 254394 - DNA, 25 bp, Artificial
  probe
  misc_feature (1)..(25): SEQ ID NO: 43; WAN024GLK; Start 372; Stop 396
tgattcagatgccattgactacaat

SEQ ID NO: 254395 - DNA, 25 bp, Artificial
  probe
  misc_feature (1)..(25): SEQ ID NO: 43; WAN024GLK; Start 390; Stop 414
ctacaatgcagatgatccagaagac

SEQ ID NO: 254396 - DNA, 25 bp, Artificial
  probe
  misc_feature (1)..(25): SEQ ID NO: 43; WAN024GLK; Start 388; Stop 412
gactacaatgcagatgatccagaag

SEQ ID NO: 254397 - DNA, 25 bp, Artificial
  probe
  misc_feature (1)..(25): SEQ ID NO: 43; WAN024GLK; Start 12; Stop 36
cgctttggaattagaagtatttgct

SEQ ID NO: 254398 - DNA, 25 bp, Artificial
  probe
  misc_feature (1)..(25): SEQ ID NO: 43; WAN024GLK; Start 11; Stop 35
acgctttggaattagaagtatttgc

SEQ ID NO: 254399 - DNA, 25 bp, Artificial
  probe
  misc_feature (1)..(25): SEQ ID NO: 43; WAN024GLK; Start 6; Stop 30
gagaaacgctttggaattagaagta

SEQ ID NO: 254400 - DNA, 25 bp, Artificial
  probe
  misc_feature (1)..(25): SEQ ID NO: 43; WAN024GLK; Start 389; Stop 413
actacaatgcagatgatccagaaga

SEQ ID NO: 254401 - DNA, 25 bp, Artificial
  probe
  misc_feature (1)..(25): SEQ ID NO: 43; WAN024GLK; Start 370; Stop 394
ggtgattcagatgccattgactaca

SEQ ID NO: 254402 - DNA, 25 bp, Artificial
  probe
  misc_feature (1)..(25): SEQ ID NO: 43; WAN024GLK; Start 355; Stop 379
aatgcctttatggatggtgattcag

SEQ ID NO: 254403 - DNA, 25 bp, Artificial
  probe
  misc_feature (1)..(25): SEQ ID NO: 43; WAN024GLK; Start 13; Stop 37
gctttggaattagaagtatttgctg

SEQ ID NO: 254404 - DNA, 25 bp, Artificial
  probe
  misc_feature (1)..(25): SEQ ID NO: 43; WAN024GLK; Start 3; Stop 27
gaggagaaacgctttggaattagaa

SEQ ID NO: 254405 - DNA, 25 bp, Artificial
  probe
  misc_feature (1)..(25): SEQ ID NO: 43; WAN024GLK; Start 1; Stop 25
atgaggagaaacgctttggaattag

SEQ ID NO: 254406 - DNA, 25 bp, Artificial
  probe
  misc_feature (1)..(25): SEQ ID NO: 43; WAN024GLK; Start 119; Stop 143
ttagcgatcttgtaaacgaaattca

SEQ ID NO: 254407 - DNA, 25 bp, Artificial
  probe
  misc_feature (1)..(25): SEQ ID NO: 43; WAN024GLK; Start 7; Stop 31
agaaacgctttggaattagaagtat

SEQ ID NO: 254408 - DNA, 25 bp, Artificial
  probe
  misc_feature (1)..(25): SEQ ID NO: 43; WAN024GLK; Start 16; Stop 40
ttggaattagaagtatttgctgggc

SEQ ID NO: 254409 - DNA, 25 bp, Artificial
  probe
  misc_feature (1)..(25): SEQ ID NO: 43; WAN024GLK; Start 387; Stop 411
tgactacaatgcagatgatccagaa

SEQ ID NO: 254410 - DNA, 25 bp, Artificial
  probe
  misc_feature (1)..(25): SEQ ID NO: 43; WAN024GLK; Start 4; Stop 28
aggagaaacgctttggaattagaag

SEQ ID NO: 254411 - DNA, 25 bp, Artificial
  probe
  misc_feature (1)..(25): SEQ ID NO: 43; WAN024GLK; Start 360; Stop 384
ctttatggatggtgattcagatgcc

SEQ ID NO: 254412 - DNA, 25 bp, Artificial
  probe
  misc_feature (1)..(25): SEQ ID NO: 43; WAN024GLK; Start 359; Stop 383
cctttatggatggtgattcagatgc

SEQ ID NO: 254413 - DNA, 25 bp, Artificial
  probe
  misc_feature (1)..(25): SEQ ID NO: 43; WAN024GLK; Start 358; Stop 382
gcctttatggatggtgattcagatg

SEQ ID NO: 254414 - DNA, 25 bp, Artificial
  probe
  misc_feature (1)..(25): SEQ ID NO: 43; WAN024GLK; Start 5; Stop 29
ggagaaacgctttggaattagaagt

SEQ ID NO: 254415 - DNA, 25 bp, Artificial
  probe
  misc_feature (1)..(25): SEQ ID NO: 43; WAN024GLK; Start 48; Stop 72
aagtgaactatctatgattgaggta

SEQ ID NO: 254416 - DNA, 25 bp, Artificial
  probe
  misc_feature (1)..(25): SEQ ID NO: 43; WAN024GLK; Start 121; Stop 145
agcgatcttgtaaacgaaattcaaa

SEQ ID NO: 254417 - DNA, 25 bp, Artificial
  probe
  misc_feature (1)..(25): SEQ ID NO: 43; WAN024GLK; Start 14; Stop 38
ctttggaattagaagtatttgctgg

SEQ ID NO: 254418 - DNA, 25 bp, Artificial
  probe
  misc_feature (1)..(25): SEQ ID NO: 43; WAN024GLK; Start 10; Stop 34
aacgctttggaattagaagtatttg

SEQ ID NO: 254419 - DNA, 25 bp, Artificial
  probe
  misc_feature (1)..(25): SEQ ID NO: 43; WAN024GLK; Start 120; Stop 144
tagcgatcttgtaaacgaaattcaa

SEQ ID NO: 254420 - DNA, 25 bp, Artificial
  probe
  misc_feature (1)..(25): SEQ ID NO: 43; WAN024GLK; Start 386; Stop 410
ttgactacaatgcagatgatccaga

SEQ ID NO: 254421 - DNA, 25 bp, Artificial
  probe
  misc_feature (1)..(25): SEQ ID NO: 43; WAN024GLK; Start 357; Stop 381
tgcctttatggatggtgattcagat

SEQ ID NO: 254422 - DNA, 25 bp, Artificial
  probe
  misc_feature (1)..(25): SEQ ID NO: 44; WAN024C8E; Start 105; Stop 129
taactctcttcgtcgtgtacttcta

SEQ ID NO: 254423 - DNA, 25 bp, Artificial
  probe
  misc_feature (1)..(25): SEQ ID NO: 44; WAN024C8E; Start 93; Stop 117
tacaactcttggtaactctcttcgt

SEQ ID NO: 254424 - DNA, 25 bp, Artificial
  probe
  misc_feature (1)..(25): SEQ ID NO: 44; WAN024C8E; Start 477; Stop 501
tggaacacttgctgtagattctatt

SEQ ID NO: 254425 - DNA, 25 bp, Artificial
  probe
  misc_feature (1)..(25): SEQ ID NO: 44; WAN024C8E; Start 476; Stop 500
ttggaacacttgctgtagattctat

SEQ ID NO: 254426 - DNA, 25 bp, Artificial
  probe
  misc_feature (1)..(25): SEQ ID NO: 44; WAN024C8E; Start 91; Stop 115
ggtacaactcttggtaactctcttc

SEQ ID NO: 254427 - DNA, 25 bp, Artificial
  probe
  misc_feature (1)..(25): SEQ ID NO: 44; WAN024C8E; Start 475; Stop 499
gttggaacacttgctgtagattcta

SEQ ID NO: 254428 - DNA, 25 bp, Artificial
  probe
  misc_feature (1)..(25): SEQ ID NO: 44; WAN024C8E; Start 92; Stop 116
gtacaactcttggtaactctcttcg

SEQ ID NO: 254429 - DNA, 25 bp, Artificial
  probe
  misc_feature (1)..(25): SEQ ID NO: 44; WAN024C8E; Start 106; Stop 130
aactctcttcgtcgtgtacttctag

SEQ ID NO: 254430 - DNA, 25 bp, Artificial
  probe
  misc_feature (1)..(25): SEQ ID NO: 44; WAN024C8E; Start 88; Stop 112
tacggtacaactcttggtaactctc

SEQ ID NO: 254431 - DNA, 25 bp, Artificial
  probe
  misc_feature (1)..(25): SEQ ID NO: 44; WAN024C8E; Start 87; Stop 111
ctacggtacaactcttggtaactct

SEQ ID NO: 254432 - DNA, 25 bp, Artificial
  probe
  misc_feature (1)..(25): SEQ ID NO: 44; WAN024C8E; Start 104; Stop 128
gtaactctcttcgtcgtgtacttct

SEQ ID NO: 254433 - DNA, 25 bp, Artificial
  probe
  misc_feature (1)..(25): SEQ ID NO: 44; WAN024C8E; Start 94; Stop 118
acaactcttggtaactctcttcgtc

SEQ ID NO: 254434 - DNA, 25 bp, Artificial
  probe
  misc_feature (1)..(25): SEQ ID NO: 44; WAN024C8E; Start 164; Stop 188
acattgatggtgtgttacatgagtt

SEQ ID NO: 254435 - DNA, 25 bp, Artificial
  probe
  misc_feature (1)..(25): SEQ ID NO: 44; WAN024C8E; Start 90; Stop 114
cggtacaactcttggtaactctctt

SEQ ID NO: 254436 - DNA, 25 bp, Artificial
  probe
  misc_feature (1)..(25): SEQ ID NO: 44; WAN024C8E; Start 474; Stop 498
agttggaacacttgctgtagattct

SEQ ID NO: 254437 - DNA, 25 bp, Artificial
  probe
  misc_feature (1)..(25): SEQ ID NO: 44; WAN024C8E; Start 900; Stop 924
actcattgatttgggtcttggatta

SEQ ID NO: 254438 - DNA, 25 bp, Artificial
  probe
  misc_feature (1)..(25): SEQ ID NO: 44; WAN024C8E; Start 292; Stop 316
gatgttgaaggtcctgctgaagtaa

SEQ ID NO: 254439 - DNA, 25 bp, Artificial
  probe
  misc_feature (1)..(25): SEQ ID NO: 44; WAN024C8E; Start 714; Stop 738
tgatactgaatctgacgaccgtatt

SEQ ID NO: 254440 - DNA, 25 bp, Artificial
  probe
  misc_feature (1)..(25): SEQ ID NO: 44; WAN024C8E; Start 99; Stop 123
tcttggtaactctcttcgtcgtgta

SEQ ID NO: 254441 - DNA, 25 bp, Artificial
  probe
  misc_feature (1)..(25): SEQ ID NO: 44; WAN024C8E; Start 119; Stop 143
gtgtacttctagcttctctaccagg

SEQ ID NO: 254442 - DNA, 25 bp, Artificial
  probe
  misc_feature (1)..(25): SEQ ID NO: 44; WAN024C8E; Start 473; Stop 497
cagttggaacacttgctgtagattc

SEQ ID NO: 254443 - DNA, 25 bp, Artificial
  probe
  misc_feature (1)..(25): SEQ ID NO: 44; WAN024C8E; Start 901; Stop 925
ctcattgatttgggtcttggattaa

SEQ ID NO: 254444 - DNA, 25 bp, Artificial
  probe
  misc_feature (1)..(25): SEQ ID NO: 44; WAN024C8E; Start 120; Stop 144
tgtacttctagcttctctaccagga

SEQ ID NO: 254445 - DNA, 25 bp, Artificial
  probe
  misc_feature (1)..(25): SEQ ID NO: 44; WAN024C8E; Start 899; Stop 923
aactcattgatttgggtcttggatt

SEQ ID NO: 254446 - DNA, 25 bp, Artificial
  probe
  misc_feature (1)..(25): SEQ ID NO: 44; WAN024C8E; Start 898; Stop 922
aaactcattgatttgggtcttggat

SEQ ID NO: 254447 - DNA, 25 bp, Artificial
  probe
  misc_feature (1)..(25): SEQ ID NO: 44; WAN024C8E; Start 707; Stop 731
aagaagctgatactgaatctgacga

SEQ ID NO: 254448 - DNA, 25 bp, Artificial
  probe
  misc_feature (1)..(25): SEQ ID NO: 44; WAN024C8E; Start 902; Stop 926
tcattgatttgggtcttggattaaa

SEQ ID NO: 254449 - DNA, 25 bp, Artificial
  probe
  misc_feature (1)..(25): SEQ ID NO: 44; WAN024C8E; Start 604; Stop 628
attattccagaagatgctttagggc

SEQ ID NO: 254450 - DNA, 25 bp, Artificial
  probe
  misc_feature (1)..(25): SEQ ID NO: 44; WAN024C8E; Start 579; Stop 603
ccttgaaatcttgacaaatggaaca

SEQ ID NO: 254451 - DNA, 25 bp, Artificial
  probe
  misc_feature (1)..(25): SEQ ID NO: 44; WAN024C8E; Start 121; Stop 145
gtacttctagcttctctaccaggag

SEQ ID NO: 254452 - DNA, 25 bp, Artificial
  probe
  misc_feature (1)..(25): SEQ ID NO: 44; WAN024C8E; Start 575; Stop 599
taacccttgaaatcttgacaaatgg

SEQ ID NO: 254453 - DNA, 25 bp, Artificial
  probe
  misc_feature (1)..(25): SEQ ID NO: 44; WAN024C8E; Start 713; Stop 737
ctgatactgaatctgacgaccgtat

SEQ ID NO: 254454 - DNA, 25 bp, Artificial
  probe
  misc_feature (1)..(25): SEQ ID NO: 44; WAN024C8E; Start 118; Stop 142
cgtgtacttctagcttctctaccag

SEQ ID NO: 254455 - DNA, 25 bp, Artificial
  probe
  misc_feature (1)..(25): SEQ ID NO: 45; WAN024G6F; Start 723; Stop 747
acgaatggatatgacacctgataag

SEQ ID NO: 254456 - DNA, 25 bp, Artificial
  probe
  misc_feature (1)..(25): SEQ ID NO: 45; WAN024G6F; Start 722; Stop 746
aacgaatggatatgacacctgataa

SEQ ID NO: 254457 - DNA, 25 bp, Artificial
  probe
  misc_feature (1)..(25): SEQ ID NO: 45; WAN024G6F; Start 721; Stop 745
gaacgaatggatatgacacctgata

SEQ ID NO: 254458 - DNA, 25 bp, Artificial
  probe
  misc_feature (1)..(25): SEQ ID NO: 45; WAN024G6F; Start 908; Stop 932
tcttagatactcttacagaccgtga

SEQ ID NO: 254459 - DNA, 25 bp, Artificial
  probe
  misc_feature (1)..(25): SEQ ID NO: 45; WAN024G6F; Start 713; Stop 737
agattgctgaacgaatggatatgac

SEQ ID NO: 254460 - DNA, 25 bp, Artificial
  probe
  misc_feature (1)..(25): SEQ ID NO: 45; WAN024G6F; Start 910; Stop 934
ttagatactcttacagaccgtgaag

SEQ ID NO: 254461 - DNA, 25 bp, Artificial
  probe
  misc_feature (1)..(25): SEQ ID NO: 45; WAN024G6F; Start 909; Stop 933
cttagatactcttacagaccgtgaa

SEQ ID NO: 254462 - DNA, 25 bp, Artificial
  probe
  misc_feature (1)..(25): SEQ ID NO: 45; WAN024G6F; Start 714; Stop 738
gattgctgaacgaatggatatgaca

SEQ ID NO: 254463 - DNA, 25 bp, Artificial
  probe
  misc_feature (1)..(25): SEQ ID NO: 45; WAN024G6F; Start 715; Stop 739
attgctgaacgaatggatatgacac

SEQ ID NO: 254464 - DNA, 25 bp, Artificial
  probe
  misc_feature (1)..(25): SEQ ID NO: 45; WAN024G6F; Start 720; Stop 744
tgaacgaatggatatgacacctgat

SEQ ID NO: 254465 - DNA, 25 bp, Artificial
  probe
  misc_feature (1)..(25): SEQ ID NO: 45; WAN024G6F; Start 907; Stop 931
atcttagatactcttacagaccgtg

SEQ ID NO: 254466 - DNA, 25 bp, Artificial
  probe
  misc_feature (1)..(25): SEQ ID NO: 45; WAN024G6F; Start 710; Stop 734
aacagattgctgaacgaatggatat

SEQ ID NO: 254467 - DNA, 25 bp, Artificial
  probe
  misc_feature (1)..(25): SEQ ID NO: 45; WAN024G6F; Start 906; Stop 930
aatcttagatactcttacagaccgt

SEQ ID NO: 254468 - DNA, 25 bp, Artificial
  probe
  misc_feature (1)..(25): SEQ ID NO: 45; WAN024G6F; Start 724; Stop 748
cgaatggatatgacacctgataagg

SEQ ID NO: 254469 - DNA, 25 bp, Artificial
  probe
  misc_feature (1)..(25): SEQ ID NO: 45; WAN024G6F; Start 712; Stop 736
cagattgctgaacgaatggatatga

SEQ ID NO: 254470 - DNA, 25 bp, Artificial
  probe
  misc_feature (1)..(25): SEQ ID NO: 45; WAN024G6F; Start 719; Stop 743
ctgaacgaatggatatgacacctga

SEQ ID NO: 254471 - DNA, 25 bp, Artificial
  probe
  misc_feature (1)..(25): SEQ ID NO: 45; WAN024G6F; Start 709; Stop 733
gaacagattgctgaacgaatggata

SEQ ID NO: 254472 - DNA, 25 bp, Artificial
  probe
  misc_feature (1)..(25): SEQ ID NO: 45; WAN024G6F; Start 711; Stop 735
acagattgctgaacgaatggatatg

SEQ ID NO: 254473 - DNA, 25 bp, Artificial
  probe
  misc_feature (1)..(25): SEQ ID NO: 45; WAN024G6F; Start 225; Stop 249
caatgaagaagaaccagaactcagc

SEQ ID NO: 254474 - DNA, 25 bp, Artificial
  probe
  misc_feature (1)..(25): SEQ ID NO: 45; WAN024G6F; Start 224; Stop 248
gcaatgaagaagaaccagaactcag

SEQ ID NO: 254475 - DNA, 25 bp, Artificial
  probe
  misc_feature (1)..(25): SEQ ID NO: 45; WAN024G6F; Start 223; Stop 247
agcaatgaagaagaaccagaactca

SEQ ID NO: 254476 - DNA, 25 bp, Artificial
  probe
  misc_feature (1)..(25): SEQ ID NO: 45; WAN024G6F; Start 782; Stop 806
tatctcttgaaactcctatcggtga

SEQ ID NO: 254477 - DNA, 25 bp, Artificial
  probe
  misc_feature (1)..(25): SEQ ID NO: 45; WAN024G6F; Start 781; Stop 805
gtatctcttgaaactcctatcggtg

SEQ ID NO: 254478 - DNA, 25 bp, Artificial
  probe
  misc_feature (1)..(25): SEQ ID NO: 45; WAN024G6F; Start 39; Stop 63
acaggtagcagaatttatccgtaat

SEQ ID NO: 254479 - DNA, 25 bp, Artificial
  probe
  misc_feature (1)..(25): SEQ ID NO: 45; WAN024G6F; Start 41; Stop 65
aggtagcagaatttatccgtaatca

SEQ ID NO: 254480 - DNA, 25 bp, Artificial
  probe
  misc_feature (1)..(25): SEQ ID NO: 45; WAN024G6F; Start 485; Stop 509
aagaaggaaatatgggcttgatgaa

SEQ ID NO: 254481 - DNA, 25 bp, Artificial
  probe
  misc_feature (1)..(25): SEQ ID NO: 45; WAN024G6F; Start 40; Stop 64
caggtagcagaatttatccgtaatc

SEQ ID NO: 254482 - DNA, 25 bp, Artificial
  probe
  misc_feature (1)..(25): SEQ ID NO: 45; WAN024G6F; Start 741; Stop 765
tgataaggttcgtgaaatcttgaag

SEQ ID NO: 254483 - DNA, 25 bp, Artificial
  probe
  misc_feature (1)..(25): SEQ ID NO: 45; WAN024G6F; Start 740; Stop 764
ctgataaggttcgtgaaatcttgaa

SEQ ID NO: 254484 - DNA, 25 bp, Artificial
  probe
  misc_feature (1)..(25): SEQ ID NO: 45; WAN024G6F; Start 479; Stop 503
tgattcaagaaggaaatatgggctt

SEQ ID NO: 254485 - DNA, 25 bp, Artificial
  probe
  misc_feature (1)..(25): SEQ ID NO: 45; WAN024G6F; Start 38; Stop 62
tacaggtagcagaatttatccgtaa

SEQ ID NO: 254486 - DNA, 25 bp, Artificial
  probe
  misc_feature (1)..(25): SEQ ID NO: 45; WAN024G6F; Start 783; Stop 807
atctcttgaaactcctatcggtgaa

SEQ ID NO: 254487 - DNA, 25 bp, Artificial
  probe
  misc_feature (1)..(25): SEQ ID NO: 45; WAN024G6F; Start 486; Stop 510
agaaggaaatatgggcttgatgaag

SEQ ID NO: 254488 - DNA, 25 bp, Artificial
  probe
  misc_feature (1)..(25): SEQ ID NO: 46; WAN024F8Z-3; Start 471; Stop 495
gagttagttgagaagcatgtgtcta

SEQ ID NO: 254489 - DNA, 25 bp, Artificial
  probe
  misc_feature (1)..(25): SEQ ID NO: 46; WAN024F8Z-3; Start 472; Stop 496
agttagttgagaagcatgtgtctaa

SEQ ID NO: 254490 - DNA, 25 bp, Artificial
  probe
  misc_feature (1)..(25): SEQ ID NO: 46; WAN024F8Z-3; Start 470; Stop 494
agagttagttgagaagcatgtgtct

SEQ ID NO: 254491 - DNA, 25 bp, Artificial
  probe
  misc_feature (1)..(25): SEQ ID NO: 46; WAN024F8Z-3; Start 473; Stop 497
gttagttgagaagcatgtgtctaat

SEQ ID NO: 254492 - DNA, 25 bp, Artificial
  probe
  misc_feature (1)..(25): SEQ ID NO: 46; WAN024F8Z-3; Start 131; Stop 155
taatgaagaatacgtggcagtagat

SEQ ID NO: 254493 - DNA, 25 bp, Artificial
  probe
  misc_feature (1)..(25): SEQ ID NO: 46; WAN024F8Z-3; Start 130; Stop 154
gtaatgaagaatacgtggcagtaga

SEQ ID NO: 254494 - DNA, 25 bp, Artificial
  probe
  misc_feature (1)..(25): SEQ ID NO: 46; WAN024F8Z-3; Start 512; Stop 536
tactgcctgggtatttggaaattat

SEQ ID NO: 254495 - DNA, 25 bp, Artificial
  probe
  misc_feature (1)..(25): SEQ ID NO: 46; WAN024F8Z-3; Start 132; Stop 156
aatgaagaatacgtggcagtagatg

SEQ ID NO: 254496 - DNA, 25 bp, Artificial
  probe
  misc_feature (1)..(25): SEQ ID NO: 46; WAN024F8Z-3; Start 474; Stop 498
ttagttgagaagcatgtgtctaatt

SEQ ID NO: 254497 - DNA, 25 bp, Artificial
  probe
  misc_feature (1)..(25): SEQ ID NO: 46; WAN024F8Z-3; Start 774; Stop 798
ccagtagattccagtcaatttccag

SEQ ID NO: 254498 - DNA, 25 bp, Artificial
  probe
  misc_feature (1)..(25): SEQ ID NO: 46; WAN024F8Z-3; Start 423; Stop 447
cgaccagatccacagacagaatatg

SEQ ID NO: 254499 - DNA, 25 bp, Artificial
  probe
  misc_feature (1)..(25): SEQ ID NO: 46; WAN024F8Z-3; Start 513; Stop 537
actgcctgggtatttggaaattatg

SEQ ID NO: 254500 - DNA, 25 bp, Artificial
  probe
  misc_feature (1)..(25): SEQ ID NO: 46; WAN024F8Z-3; Start 133; Stop 157
atgaagaatacgtggcagtagatgt

SEQ ID NO: 254501 - DNA, 25 bp, Artificial
  probe
  misc_feature (1)..(25): SEQ ID NO: 46; WAN024F8Z-3; Start 511; Stop 535
gtactgcctgggtatttggaaatta

SEQ ID NO: 254502 - DNA, 25 bp, Artificial
  probe
  misc_feature (1)..(25): SEQ ID NO: 46; WAN024F8Z-3; Start 514; Stop 538
ctgcctgggtatttggaaattatgg

SEQ ID NO: 254503 - DNA, 25 bp, Artificial
  probe
  misc_feature (1)..(25): SEQ ID NO: 46; WAN024F8Z-3; Start 476; Stop 500
agttgagaagcatgtgtctaatttc

SEQ ID NO: 254504 - DNA, 25 bp, Artificial
  probe
  misc_feature (1)..(25): SEQ ID NO: 46; WAN024F8Z-3; Start 35; Stop 59
gggaagagttacatattagaaaggt

SEQ ID NO: 254505 - DNA, 25 bp, Artificial
  probe
  misc_feature (1)..(25): SEQ ID NO: 46; WAN024F8Z-3; Start 34; Stop 58
tgggaagagttacatattagaaagg

SEQ ID NO: 254506 - DNA, 25 bp, Artificial
  probe
  misc_feature (1)..(25): SEQ ID NO: 46; WAN024F8Z-3; Start 24; Stop 48
attgctatattgggaagagttacat

SEQ ID NO: 254507 - DNA, 25 bp, Artificial
  probe
  misc_feature (1)..(25): SEQ ID NO: 46; WAN024F8Z-3; Start 424; Stop 448
gaccagatccacagacagaatatgg

SEQ ID NO: 254508 - DNA, 25 bp, Artificial
  probe
  misc_feature (1)..(25): SEQ ID NO: 46; WAN024F8Z-3; Start 475; Stop 499
tagttgagaagcatgtgtctaattt

SEQ ID NO: 254509 - DNA, 25 bp, Artificial
  probe
  misc_feature (1)..(25): SEQ ID NO: 46; WAN024F8Z-3; Start 134; Stop 158
tgaagaatacgtggcagtagatgtg

SEQ ID NO: 254510 - DNA, 25 bp, Artificial
  probe
  misc_feature (1)..(25): SEQ ID NO: 46; WAN024F8Z-3; Start 25; Stop 49
ttgctatattgggaagagttacata

SEQ ID NO: 254511 - DNA, 25 bp, Artificial
  probe
  misc_feature (1)..(25): SEQ ID NO: 46; WAN024F8Z-3; Start 23; Stop 47
tattgctatattgggaagagttaca

SEQ ID NO: 254512 - DNA, 25 bp, Artificial
  probe
  misc_feature (1)..(25): SEQ ID NO: 46; WAN024F8Z-3; Start 422; Stop 446
ccgaccagatccacagacagaatat

SEQ ID NO: 254513 - DNA, 25 bp, Artificial
  probe
  misc_feature (1)..(25): SEQ ID NO: 46; WAN024F8Z-3; Start 201; Stop 225
tttgaagaggtgaaaccgactttag

SEQ ID NO: 254514 - DNA, 25 bp, Artificial
  probe
  misc_feature (1)..(25): SEQ ID NO: 46; WAN024F8Z-3; Start 26; Stop 50
tgctatattgggaagagttacatat

SEQ ID NO: 254515 - DNA, 25 bp, Artificial
  probe
  misc_feature (1)..(25): SEQ ID NO: 46; WAN024F8Z-3; Start 205; Stop 229
aagaggtgaaaccgactttagtcta

SEQ ID NO: 254516 - DNA, 25 bp, Artificial
  probe
  misc_feature (1)..(25): SEQ ID NO: 46; WAN024F8Z-3; Start 36; Stop 60
ggaagagttacatattagaaaggtc

SEQ ID NO: 254517 - DNA, 25 bp, Artificial
  probe
  misc_feature (1)..(25): SEQ ID NO: 46; WAN024F8Z-3; Start 202; Stop 226
ttgaagaggtgaaaccgactttagt

SEQ ID NO: 254518 - DNA, 25 bp, Artificial
  probe
  misc_feature (1)..(25): SEQ ID NO: 46; WAN024F8Z-3; Start 477; Stop 501
gttgagaagcatgtgtctaatttct

SEQ ID NO: 254519 - DNA, 25 bp, Artificial
  probe
  misc_feature (1)..(25): SEQ ID NO: 46; WAN024F8Z-3; Start 206; Stop 230
agaggtgaaaccgactttagtctac

SEQ ID NO: 254520 - DNA, 25 bp, Artificial
  probe
  misc_feature (1)..(25): SEQ ID NO: 46; WAN024F8Z-3; Start 341; Stop 365
tggtgcaactctagtttatatttct

SEQ ID NO: 254521 - DNA, 25 bp, Artificial
  probe
  misc_feature (1)..(25): SEQ ID NO: 47; WAN024FYK; Start 270; Stop 294
ttctctgtccttgtatgctcttctt

SEQ ID NO: 254522 - DNA, 25 bp, Artificial
  probe
  misc_feature (1)..(25): SEQ ID NO: 47; WAN024FYK; Start 287; Stop 311
ctcttctttgtctaactcttccctt

SEQ ID NO: 254523 - DNA, 25 bp, Artificial
  probe
  misc_feature (1)..(25): SEQ ID NO: 47; WAN024FYK; Start 19; Stop 43
tacgcctacaatctttcttaccaat

SEQ ID NO: 254524 - DNA, 25 bp, Artificial
  probe
  misc_feature (1)..(25): SEQ ID NO: 47; WAN024FYK; Start 18; Stop 42
ttacgcctacaatctttcttaccaa

SEQ ID NO: 254525 - DNA, 25 bp, Artificial
  probe
  misc_feature (1)..(25): SEQ ID NO: 47; WAN024FYK; Start 17; Stop 41
attacgcctacaatctttcttacca

SEQ ID NO: 254526 - DNA, 25 bp, Artificial
  probe
  misc_feature (1)..(25): SEQ ID NO: 47; WAN024FYK; Start 278; Stop 302
ccttgtatgctcttctttgtctaac

SEQ ID NO: 254527 - DNA, 25 bp, Artificial
  probe
  misc_feature (1)..(25): SEQ ID NO: 47; WAN024FYK; Start 277; Stop 301
tccttgtatgctcttctttgtctaa

SEQ ID NO: 254528 - DNA, 25 bp, Artificial
  probe
  misc_feature (1)..(25): SEQ ID NO: 47; WAN024FYK; Start 276; Stop 300
gtccttgtatgctcttctttgtcta

SEQ ID NO: 254529 - DNA, 25 bp, Artificial
  probe
  misc_feature (1)..(25): SEQ ID NO: 47; WAN024FYK; Start 284; Stop 308
atgctcttctttgtctaactcttcc

SEQ ID NO: 254530 - DNA, 25 bp, Artificial
  probe
  misc_feature (1)..(25): SEQ ID NO: 47; WAN024FYK; Start 281; Stop 305
tgtatgctcttctttgtctaactct

SEQ ID NO: 254531 - DNA, 25 bp, Artificial
  probe
  misc_feature (1)..(25): SEQ ID NO: 47; WAN024FYK; Start 235; Stop 259
ggaatctattctctgcaattaggtg

SEQ ID NO: 254532 - DNA, 25 bp, Artificial
  probe
  misc_feature (1)..(25): SEQ ID NO: 47; WAN024FYK; Start 268; Stop 292
ctttctctgtccttgtatgctcttc

SEQ ID NO: 254533 - DNA, 25 bp, Artificial
  probe
  misc_feature (1)..(25): SEQ ID NO: 47; WAN024FYK; Start 20; Stop 44
acgcctacaatctttcttaccaatt

SEQ ID NO: 254534 - DNA, 25 bp, Artificial
  probe
  misc_feature (1)..(25): SEQ ID NO: 47; WAN024FYK; Start 16; Stop 40
aattacgcctacaatctttcttacc

SEQ ID NO: 254535 - DNA, 25 bp, Artificial
  probe
  misc_feature (1)..(25): SEQ ID NO: 47; WAN024FYK; Start 280; Stop 304
ttgtatgctcttctttgtctaactc

SEQ ID NO: 254536 - DNA, 25 bp, Artificial
  probe
  misc_feature (1)..(25): SEQ ID NO: 47; WAN024FYK; Start 279; Stop 303
cttgtatgctcttctttgtctaact

SEQ ID NO: 254537 - DNA, 25 bp, Artificial
  probe
  misc_feature (1)..(25): SEQ ID NO: 47; WAN024FYK; Start 282; Stop 306
gtatgctcttctttgtctaactctt

SEQ ID NO: 254538 - DNA, 25 bp, Artificial
  probe
  misc_feature (1)..(25): SEQ ID NO: 47; WAN024FYK; Start 272; Stop 296
ctctgtccttgtatgctcttctttg

SEQ ID NO: 254539 - DNA, 25 bp, Artificial
  probe
  misc_feature (1)..(25): SEQ ID NO: 47; WAN024FYK; Start 271; Stop 295
tctctgtccttgtatgctcttcttt

SEQ ID NO: 254540 - DNA, 25 bp, Artificial
  probe
  misc_feature (1)..(25): SEQ ID NO: 47; WAN024FYK; Start 269; Stop 293
tttctctgtccttgtatgctcttct

SEQ ID NO: 254541 - DNA, 25 bp, Artificial
  probe
  misc_feature (1)..(25): SEQ ID NO: 47; WAN024FYK; Start 267; Stop 291
tctttctctgtccttgtatgctctt

SEQ ID NO: 254542 - DNA, 25 bp, Artificial
  probe
  misc_feature (1)..(25): SEQ ID NO: 47; WAN024FYK; Start 266; Stop 290
ttctttctctgtccttgtatgctct

SEQ ID NO: 254543 - DNA, 25 bp, Artificial
  probe
  misc_feature (1)..(25): SEQ ID NO: 47; WAN024FYK; Start 265; Stop 289
gttctttctctgtccttgtatgctc

SEQ ID NO: 254544 - DNA, 25 bp, Artificial
  probe
  misc_feature (1)..(25): SEQ ID NO: 47; WAN024FYK; Start 283; Stop 307
tatgctcttctttgtctaactcttc

SEQ ID NO: 254545 - DNA, 25 bp, Artificial
  probe
  misc_feature (1)..(25): SEQ ID NO: 47; WAN024FYK; Start 274; Stop 298
ctgtccttgtatgctcttctttgtc

SEQ ID NO: 254546 - DNA, 25 bp, Artificial
  probe
  misc_feature (1)..(25): SEQ ID NO: 47; WAN024FYK; Start 264; Stop 288
agttctttctctgtccttgtatgct

SEQ ID NO: 254547 - DNA, 25 bp, Artificial
  probe
  misc_feature (1)..(25): SEQ ID NO: 47; WAN024FYK; Start 1295; Stop 1319
tttcaccgaccttaaatgttctagc

SEQ ID NO: 254548 - DNA, 25 bp, Artificial
  probe
  misc_feature (1)..(25): SEQ ID NO: 47; WAN024FYK; Start 286; Stop 310
gctcttctttgtctaactcttccct

SEQ ID NO: 254549 - DNA, 25 bp, Artificial
  probe
  misc_feature (1)..(25): SEQ ID NO: 47; WAN024FYK; Start 275; Stop 299
tgtccttgtatgctcttctttgtct

SEQ ID NO: 254550 - DNA, 25 bp, Artificial
  probe
  misc_feature (1)..(25): SEQ ID NO: 47; WAN024FYK; Start 273; Stop 297
tctgtccttgtatgctcttctttgt

SEQ ID NO: 254551 - DNA, 25 bp, Artificial
  probe
  misc_feature (1)..(25): SEQ ID NO: 47; WAN024FYK; Start 363; Stop 387
tttagacatctcctggctctttcaa

SEQ ID NO: 254552 - DNA, 25 bp, Artificial
  probe
  misc_feature (1)..(25): SEQ ID NO: 47; WAN024FYK; Start 285; Stop 309
tgctcttctttgtctaactcttccc

SEQ ID NO: 254553 - DNA, 25 bp, Artificial
  probe
  misc_feature (1)..(25): SEQ ID NO: 47; WAN024FYK; Start 364; Stop 388
ttagacatctcctggctctttcaag

SEQ ID NO: 254554 - DNA, 25 bp, Artificial
  probe
  misc_feature (1)..(25): SEQ ID NO: 48; WAN024BID; Start 294; Stop 318
cctcaatgatagtcgttatgctctc

SEQ ID NO: 254555 - DNA, 25 bp, Artificial
  probe
  misc_feature (1)..(25): SEQ ID NO: 48; WAN024BID; Start 295; Stop 319
ctcaatgatagtcgttatgctctca

SEQ ID NO: 254556 - DNA, 25 bp, Artificial
  probe
  misc_feature (1)..(25): SEQ ID NO: 48; WAN024BID; Start 333; Stop 357
ggatacaccatatcgtgacattcat

SEQ ID NO: 254557 - DNA, 25 bp, Artificial
  probe
  misc_feature (1)..(25): SEQ ID NO: 48; WAN024BID; Start 336; Stop 360
tacaccatatcgtgacattcatagt

SEQ ID NO: 254558 - DNA, 25 bp, Artificial
  probe
  misc_feature (1)..(25): SEQ ID NO: 48; WAN024BID; Start 337; Stop 361
acaccatatcgtgacattcatagtg

SEQ ID NO: 254559 - DNA, 25 bp, Artificial
  probe
  misc_feature (1)..(25): SEQ ID NO: 48; WAN024BID; Start 302; Stop 326
atagtcgttatgctctcattgagtt

SEQ ID NO: 254560 - DNA, 25 bp, Artificial
  probe
  misc_feature (1)..(25): SEQ ID NO: 48; WAN024BID; Start 301; Stop 325
gatagtcgttatgctctcattgagt

SEQ ID NO: 254561 - DNA, 25 bp, Artificial
  probe
  misc_feature (1)..(25): SEQ ID NO: 48; WAN024BID; Start 300; Stop 324
tgatagtcgttatgctctcattgag

SEQ ID NO: 254562 - DNA, 25 bp, Artificial
  probe
  misc_feature (1)..(25): SEQ ID NO: 48; WAN024BID; Start 335; Stop 359
atacaccatatcgtgacattcatag

SEQ ID NO: 254563 - DNA, 25 bp, Artificial
  probe
  misc_feature (1)..(25): SEQ ID NO: 48; WAN024BID; Start 334; Stop 358
gatacaccatatcgtgacattcata

SEQ ID NO: 254564 - DNA, 25 bp, Artificial
  probe
  misc_feature (1)..(25): SEQ ID NO: 48; WAN024BID; Start 475; Stop 499
tacacacaagtaaatagttcacacg

SEQ ID NO: 254565 - DNA, 25 bp, Artificial
  probe
  misc_feature (1)..(25): SEQ ID NO: 48; WAN024BID; Start 338; Stop 362
caccatatcgtgacattcatagtgc

SEQ ID NO: 254566 - DNA, 25 bp, Artificial
  probe
  misc_feature (1)..(25): SEQ ID NO: 48; WAN024BID; Start 22; Stop 46
atcgtctttgatgtagatgatggtc

SEQ ID NO: 254567 - DNA, 25 bp, Artificial
  probe
  misc_feature (1)..(25): SEQ ID NO: 48; WAN024BID; Start 332; Stop 356
tggatacaccatatcgtgacattca

SEQ ID NO: 254568 - DNA, 25 bp, Artificial
  probe
  misc_feature (1)..(25): SEQ ID NO: 48; WAN024BID; Start 344; Stop 368
atcgtgacattcatagtgcattaag

SEQ ID NO: 254569 - DNA, 25 bp, Artificial
  probe
  misc_feature (1)..(25): SEQ ID NO: 48; WAN024BID; Start 341; Stop 365
catatcgtgacattcatagtgcatt

SEQ ID NO: 254570 - DNA, 25 bp, Artificial
  probe
  misc_feature (1)..(25): SEQ ID NO: 48; WAN024BID; Start 340; Stop 364
ccatatcgtgacattcatagtgcat

SEQ ID NO: 254571 - DNA, 25 bp, Artificial
  probe
  misc_feature (1)..(25): SEQ ID NO: 48; WAN024BID; Start 1; Stop 25
atgatagacatccattcgcacatcg

SEQ ID NO: 254572 - DNA, 25 bp, Artificial
  probe
  misc_feature (1)..(25): SEQ ID NO: 48; WAN024BID; Start 299; Stop 323
atgatagtcgttatgctctcattga

SEQ ID NO: 254573 - DNA, 25 bp, Artificial
  probe
  misc_feature (1)..(25): SEQ ID NO: 48; WAN024BID; Start 296; Stop 320
tcaatgatagtcgttatgctctcat

SEQ ID NO: 254574 - DNA, 25 bp, Artificial
  probe
  misc_feature (1)..(25): SEQ ID NO: 48; WAN024BID; Start 343; Stop 367
tatcgtgacattcatagtgcattaa

SEQ ID NO: 254575 - DNA, 25 bp, Artificial
  probe
  misc_feature (1)..(25): SEQ ID NO: 48; WAN024BID; Start 27; Stop 51
ctttgatgtagatgatggtcccaag

SEQ ID NO: 254576 - DNA, 25 bp, Artificial
  probe
  misc_feature (1)..(25): SEQ ID NO: 48; WAN024BID; Start 345; Stop 369
tcgtgacattcatagtgcattaagc

SEQ ID NO: 254577 - DNA, 25 bp, Artificial
  probe
  misc_feature (1)..(25): SEQ ID NO: 48; WAN024BID; Start 342; Stop 366
atatcgtgacattcatagtgcatta

SEQ ID NO: 254578 - DNA, 25 bp, Artificial
  probe
  misc_feature (1)..(25): SEQ ID NO: 48; WAN024BID; Start 293; Stop 317
ccctcaatgatagtcgttatgctct

SEQ ID NO: 254579 - DNA, 25 bp, Artificial
  probe
  misc_feature (1)..(25): SEQ ID NO: 48; WAN024BID; Start 26; Stop 50
tctttgatgtagatgatggtcccaa

SEQ ID NO: 254580 - DNA, 25 bp, Artificial
  probe
  misc_feature (1)..(25): SEQ ID NO: 48; WAN024BID; Start 292; Stop 316
accctcaatgatagtcgttatgctc

SEQ ID NO: 254581 - DNA, 25 bp, Artificial
  probe
  misc_feature (1)..(25): SEQ ID NO: 48; WAN024BID; Start 317; Stop 341
tcattgagtttagtatggatacacc

SEQ ID NO: 254582 - DNA, 25 bp, Artificial
  probe
  misc_feature (1)..(25): SEQ ID NO: 48; WAN024BID; Start 28; Stop 52
tttgatgtagatgatggtcccaagt

SEQ ID NO: 254583 - DNA, 25 bp, Artificial
  probe
  misc_feature (1)..(25): SEQ ID NO: 48; WAN024BID; Start 23; Stop 47
tcgtctttgatgtagatgatggtcc

SEQ ID NO: 254584 - DNA, 25 bp, Artificial
  probe
  misc_feature (1)..(25): SEQ ID NO: 48; WAN024BID; Start 339; Stop 363
accatatcgtgacattcatagtgca

SEQ ID NO: 254585 - DNA, 25 bp, Artificial
  probe
  misc_feature (1)..(25): SEQ ID NO: 48; WAN024BID; Start 306; Stop 330
tcgttatgctctcattgagtttagt

SEQ ID NO: 254586 - DNA, 25 bp, Artificial
  probe
  misc_feature (1)..(25): SEQ ID NO: 48; WAN024BID; Start 305; Stop 329
gtcgttatgctctcattgagtttag

SEQ ID NO: 254587 - DNA, 25 bp, Artificial
  probe
  misc_feature (1)..(25): SEQ ID NO: 49; WAN024BIE; Start 334; Stop 358
gcatacttcctatcgtcagattcat

SEQ ID NO: 254588 - DNA, 25 bp, Artificial
  probe
  misc_feature (1)..(25): SEQ ID NO: 49; WAN024BIE; Start 336; Stop 360
atacttcctatcgtcagattcatac

SEQ ID NO: 254589 - DNA, 25 bp, Artificial
  probe
  misc_feature (1)..(25): SEQ ID NO: 49; WAN024BIE; Start 335; Stop 359
catacttcctatcgtcagattcata

SEQ ID NO: 254590 - DNA, 25 bp, Artificial
  probe
  misc_feature (1)..(25): SEQ ID NO: 49; WAN024BIE; Start 566; Stop 590
gagcaggatttggttcatatcattg

SEQ ID NO: 254591 - DNA, 25 bp, Artificial
  probe
  misc_feature (1)..(25): SEQ ID NO: 49; WAN024BIE; Start 565; Stop 589
agagcaggatttggttcatatcatt

SEQ ID NO: 254592 - DNA, 25 bp, Artificial
  probe
  misc_feature (1)..(25): SEQ ID NO: 49; WAN024BIE; Start 563; Stop 587
ttagagcaggatttggttcatatca

SEQ ID NO: 254593 - DNA, 25 bp, Artificial
  probe
  misc_feature (1)..(25): SEQ ID NO: 49; WAN024BIE; Start 564; Stop 588
tagagcaggatttggttcatatcat

SEQ ID NO: 254594 - DNA, 25 bp, Artificial
  probe
  misc_feature (1)..(25): SEQ ID NO: 49; WAN024BIE; Start 562; Stop 586
tttagagcaggatttggttcatatc

SEQ ID NO: 254595 - DNA, 25 bp, Artificial
  probe
  misc_feature (1)..(25): SEQ ID NO: 49; WAN024BIE; Start 333; Stop 357
tgcatacttcctatcgtcagattca

SEQ ID NO: 254596 - DNA, 25 bp, Artificial
  probe
  misc_feature (1)..(25): SEQ ID NO: 49; WAN024BIE; Start 350; Stop 374
cagattcatacgggattgagcaata

SEQ ID NO: 254597 - DNA, 25 bp, Artificial
  probe
  misc_feature (1)..(25): SEQ ID NO: 49; WAN024BIE; Start 337; Stop 361
tacttcctatcgtcagattcatacg

SEQ ID NO: 254598 - DNA, 25 bp, Artificial
  probe
  misc_feature (1)..(25): SEQ ID NO: 49; WAN024BIE; Start 349; Stop 373
tcagattcatacgggattgagcaat

SEQ ID NO: 254599 - DNA, 25 bp, Artificial
  probe
  misc_feature (1)..(25): SEQ ID NO: 49; WAN024BIE; Start 338; Stop 362
acttcctatcgtcagattcatacgg

SEQ ID NO: 254600 - DNA, 25 bp, Artificial
  probe
  misc_feature (1)..(25): SEQ ID NO: 49; WAN024BIE; Start 629; Stop 653
atggcagaagcatatgaccttgtta

SEQ ID NO: 254601 - DNA, 25 bp, Artificial
  probe
  misc_feature (1)..(25): SEQ ID NO: 49; WAN024BIE; Start 472; Stop 496
gtgttacacgcaagtaaatagttca

SEQ ID NO: 254602 - DNA, 25 bp, Artificial
  probe
  misc_feature (1)..(25): SEQ ID NO: 49; WAN024BIE; Start 471; Stop 495
ggtgttacacgcaagtaaatagttc

SEQ ID NO: 254603 - DNA, 25 bp, Artificial
  probe
  misc_feature (1)..(25): SEQ ID NO: 49; WAN024BIE; Start 606; Stop 630
atctagacggtagacctcctcatat

SEQ ID NO: 254604 - DNA, 25 bp, Artificial
  probe
  misc_feature (1)..(25): SEQ ID NO: 49; WAN024BIE; Start 608; Stop 632
ctagacggtagacctcctcatatgg

SEQ ID NO: 254605 - DNA, 25 bp, Artificial
  probe
  misc_feature (1)..(25): SEQ ID NO: 49; WAN024BIE; Start 605; Stop 629
aatctagacggtagacctcctcata

SEQ ID NO: 254606 - DNA, 25 bp, Artificial
  probe
  misc_feature (1)..(25): SEQ ID NO: 49; WAN024BIE; Start 348; Stop 372
gtcagattcatacgggattgagcaa

SEQ ID NO: 254607 - DNA, 25 bp, Artificial
  probe
  misc_feature (1)..(25): SEQ ID NO: 49; WAN024BIE; Start 332; Stop 356
atgcatacttcctatcgtcagattc

SEQ ID NO: 254608 - DNA, 25 bp, Artificial
  probe
  misc_feature (1)..(25): SEQ ID NO: 49; WAN024BIE; Start 628; Stop 652
tatggcagaagcatatgaccttgtt

SEQ ID NO: 254609 - DNA, 25 bp, Artificial
  probe
  misc_feature (1)..(25): SEQ ID NO: 49; WAN024BIE; Start 331; Stop 355
catgcatacttcctatcgtcagatt

SEQ ID NO: 254610 - DNA, 25 bp, Artificial
  probe
  misc_feature (1)..(25): SEQ ID NO: 49; WAN024BIE; Start 470; Stop 494
gggtgttacacgcaagtaaatagtt

SEQ ID NO: 254611 - DNA, 25 bp, Artificial
  probe
  misc_feature (1)..(25): SEQ ID NO: 49; WAN024BIE; Start 607; Stop 631
tctagacggtagacctcctcatatg

SEQ ID NO: 254612 - DNA, 25 bp, Artificial
  probe
  misc_feature (1)..(25): SEQ ID NO: 49; WAN024BIE; Start 454; Stop 478
tgaactgattgatatggggtgttac

SEQ ID NO: 254613 - DNA, 25 bp, Artificial
  probe
  misc_feature (1)..(25): SEQ ID NO: 49; WAN024BIE; Start 453; Stop 477
gtgaactgattgatatggggtgtta

SEQ ID NO: 254614 - DNA, 25 bp, Artificial
  probe
  misc_feature (1)..(25): SEQ ID NO: 49; WAN024BIE; Start 630; Stop 654
tggcagaagcatatgaccttgttac

SEQ ID NO: 254615 - DNA, 25 bp, Artificial
  probe
  misc_feature (1)..(25): SEQ ID NO: 49; WAN024BIE; Start 455; Stop 479
gaactgattgatatggggtgttaca

SEQ ID NO: 254616 - DNA, 25 bp, Artificial
  probe
  misc_feature (1)..(25): SEQ ID NO: 49; WAN024BIE; Start 635; Stop 659
gaagcatatgaccttgttacccaaa

SEQ ID NO: 254617 - DNA, 25 bp, Artificial
  probe
  misc_feature (1)..(25): SEQ ID NO: 49; WAN024BIE; Start 419; Stop 443
tatgatgctttagagaataacgaaa

SEQ ID NO: 254618 - DNA, 25 bp, Artificial
  probe
  misc_feature (1)..(25): SEQ ID NO: 49; WAN024BIE; Start 561; Stop 585
ttttagagcaggatttggttcatat

SEQ ID NO: 254619 - DNA, 25 bp, Artificial
  probe
  misc_feature (1)..(25): SEQ ID NO: 49; WAN024BIE; Start 343; Stop 367
ctatcgtcagattcatacgggattg

SEQ ID NO: 254620 - DNA, 25 bp, Artificial
  probe
  misc_feature (1)..(25): SEQ ID NO: 50; WAN024BIH; Start 333; Stop 357
gcatacttcctatcgtgagattcat

SEQ ID NO: 254621 - DNA, 25 bp, Artificial
  probe
  misc_feature (1)..(25): SEQ ID NO: 50; WAN024BIH; Start 335; Stop 359
atacttcctatcgtgagattcatgc

SEQ ID NO: 254622 - DNA, 25 bp, Artificial
  probe
  misc_feature (1)..(25): SEQ ID NO: 50; WAN024BIH; Start 417; Stop 441
ttatgatgccttagagaataacgaa

SEQ ID NO: 254623 - DNA, 25 bp, Artificial
  probe
  misc_feature (1)..(25): SEQ ID NO: 50; WAN024BIH; Start 104; Stop 128
gaatgattgtgtctacttcgcatcg

SEQ ID NO: 254624 - DNA, 25 bp, Artificial
  probe
  misc_feature (1)..(25): SEQ ID NO: 50; WAN024BIH; Start 334; Stop 358
catacttcctatcgtgagattcatg

SEQ ID NO: 254625 - DNA, 25 bp, Artificial
  probe
  misc_feature (1)..(25): SEQ ID NO: 50; WAN024BIH; Start 292; Stop 316
acccttaatgatagtcgttatgctt

SEQ ID NO: 254626 - DNA, 25 bp, Artificial
  probe
  misc_feature (1)..(25): SEQ ID NO: 50; WAN024BIH; Start 301; Stop 325
gatagtcgttatgctttgattgagt

SEQ ID NO: 254627 - DNA, 25 bp, Artificial
  probe
  misc_feature (1)..(25): SEQ ID NO: 50; WAN024BIH; Start 300; Stop 324
tgatagtcgttatgctttgattgag

SEQ ID NO: 254628 - DNA, 25 bp, Artificial
  probe
  misc_feature (1)..(25): SEQ ID NO: 50; WAN024BIH; Start 601; Stop 625
cacaatttagacagtagacctccat

SEQ ID NO: 254629 - DNA, 25 bp, Artificial
  probe
  misc_feature (1)..(25): SEQ ID NO: 50; WAN024BIH; Start 105; Stop 129
aatgattgtgtctacttcgcatcgt

SEQ ID NO: 254630 - DNA, 25 bp, Artificial
  probe
  misc_feature (1)..(25): SEQ ID NO: 50; WAN024BIH; Start 304; Stop 328
agtcgttatgctttgattgagttta

SEQ ID NO: 254631 - DNA, 25 bp, Artificial
  probe
  misc_feature (1)..(25): SEQ ID NO: 50; WAN024BIH; Start 303; Stop 327
tagtcgttatgctttgattgagttt

SEQ ID NO: 254632 - DNA, 25 bp, Artificial
  probe
  misc_feature (1)..(25): SEQ ID NO: 50; WAN024BIH; Start 305; Stop 329
gtcgttatgctttgattgagtttag

SEQ ID NO: 254633 - DNA, 25 bp, Artificial
  probe
  misc_feature (1)..(25): SEQ ID NO: 50; WAN024BIH; Start 302; Stop 326
atagtcgttatgctttgattgagtt

SEQ ID NO: 254634 - DNA, 25 bp, Artificial
  probe
  misc_feature (1)..(25): SEQ ID NO: 50; WAN024BIH; Start 291; Stop 315
tacccttaatgatagtcgttatgct

SEQ ID NO: 254635 - DNA, 25 bp, Artificial
  probe
  misc_feature (1)..(25): SEQ ID NO: 50; WAN024BIH; Start 293; Stop 317
cccttaatgatagtcgttatgcttt

SEQ ID NO: 254636 - DNA, 25 bp, Artificial
  probe
  misc_feature (1)..(25): SEQ ID NO: 50; WAN024BIH; Start 299; Stop 323
atgatagtcgttatgctttgattga

SEQ ID NO: 254637 - DNA, 25 bp, Artificial
  probe
  misc_feature (1)..(25): SEQ ID NO: 50; WAN024BIH; Start 602; Stop 626
acaatttagacagtagacctccata

SEQ ID NO: 254638 - DNA, 25 bp, Artificial
  probe
  misc_feature (1)..(25): SEQ ID NO: 50; WAN024BIH; Start 336; Stop 360
tacttcctatcgtgagattcatgcg

SEQ ID NO: 254639 - DNA, 25 bp, Artificial
  probe
  misc_feature (1)..(25): SEQ ID NO: 50; WAN024BIH; Start 106; Stop 130
atgattgtgtctacttcgcatcgtc

SEQ ID NO: 254640 - DNA, 25 bp, Artificial
  probe
  misc_feature (1)..(25): SEQ ID NO: 50; WAN024BIH; Start 332; Stop 356
tgcatacttcctatcgtgagattca

SEQ ID NO: 254641 - DNA, 25 bp, Artificial
  probe
  misc_feature (1)..(25): SEQ ID NO: 50; WAN024BIH; Start 298; Stop 322
aatgatagtcgttatgctttgattg

SEQ ID NO: 254642 - DNA, 25 bp, Artificial
  probe
  misc_feature (1)..(25): SEQ ID NO: 50; WAN024BIH; Start 294; Stop 318
ccttaatgatagtcgttatgctttg

SEQ ID NO: 254643 - DNA, 25 bp, Artificial
  probe
  misc_feature (1)..(25): SEQ ID NO: 50; WAN024BIH; Start 418; Stop 442
tatgatgccttagagaataacgaaa

SEQ ID NO: 254644 - DNA, 25 bp, Artificial
  probe
  misc_feature (1)..(25): SEQ ID NO: 50; WAN024BIH; Start 600; Stop 624
gcacaatttagacagtagacctcca

SEQ ID NO: 254645 - DNA, 25 bp, Artificial
  probe
  misc_feature (1)..(25): SEQ ID NO: 50; WAN024BIH; Start 603; Stop 627
caatttagacagtagacctccatat

SEQ ID NO: 254646 - DNA, 25 bp, Artificial
  probe
  misc_feature (1)..(25): SEQ ID NO: 50; WAN024BIH; Start 595; Stop 619
gacatgcacaatttagacagtagac

SEQ ID NO: 254647 - DNA, 25 bp, Artificial
  probe
  misc_feature (1)..(25): SEQ ID NO: 50; WAN024BIH; Start 594; Stop 618
tgacatgcacaatttagacagtaga

SEQ ID NO: 254648 - DNA, 25 bp, Artificial
  probe
  misc_feature (1)..(25): SEQ ID NO: 50; WAN024BIH; Start 295; Stop 319
cttaatgatagtcgttatgctttga

SEQ ID NO: 254649 - DNA, 25 bp, Artificial
  probe
  misc_feature (1)..(25): SEQ ID NO: 50; WAN024BIH; Start 598; Stop 622
atgcacaatttagacagtagacctc

SEQ ID NO: 254650 - DNA, 25 bp, Artificial
  probe
  misc_feature (1)..(25): SEQ ID NO: 50; WAN024BIH; Start 597; Stop 621
catgcacaatttagacagtagacct

SEQ ID NO: 254651 - DNA, 25 bp, Artificial
  probe
  misc_feature (1)..(25): SEQ ID NO: 50; WAN024BIH; Start 596; Stop 620
acatgcacaatttagacagtagacc

SEQ ID NO: 254652 - DNA, 25 bp, Artificial
  probe
  misc_feature (1)..(25): SEQ ID NO: 50; WAN024BIH; Start 306; Stop 330
tcgttatgctttgattgagtttagc

SEQ ID NO: 254653 - DNA, 25 bp, Artificial
  probe
  misc_feature (1)..(25): SEQ ID NO: 51; WAN024CDE; Start 48; Stop 72
tatcaatagtgtgctgctaatcctg

SEQ ID NO: 254654 - DNA, 25 bp, Artificial
  probe
  misc_feature (1)..(25): SEQ ID NO: 51; WAN024CDE; Start 47; Stop 71
atatcaatagtgtgctgctaatcct

SEQ ID NO: 254655 - DNA, 25 bp, Artificial
  probe
  misc_feature (1)..(25): SEQ ID NO: 51; WAN024CDE; Start 218; Stop 242
agttgacaatgcttctcctaatctt

SEQ ID NO: 254656 - DNA, 25 bp, Artificial
  probe
  misc_feature (1)..(25): SEQ ID NO: 51; WAN024CDE; Start 217; Stop 241
aagttgacaatgcttctcctaatct

SEQ ID NO: 254657 - DNA, 25 bp, Artificial
  probe
  misc_feature (1)..(25): SEQ ID NO: 51; WAN024CDE; Start 1200; Stop 1224
gcaaggattagaggattcaatacaa

SEQ ID NO: 254658 - DNA, 25 bp, Artificial
  probe
  misc_feature (1)..(25): SEQ ID NO: 51; WAN024CDE; Start 219; Stop 243
gttgacaatgcttctcctaatctta

SEQ ID NO: 254659 - DNA, 25 bp, Artificial
  probe
  misc_feature (1)..(25): SEQ ID NO: 51; WAN024CDE; Start 707; Stop 731
atggaccaattaactctgtatcacg

SEQ ID NO: 254660 - DNA, 25 bp, Artificial
  probe
  misc_feature (1)..(25): SEQ ID NO: 51; WAN024CDE; Start 50; Stop 74
tcaatagtgtgctgctaatcctgta

SEQ ID NO: 254661 - DNA, 25 bp, Artificial
  probe
  misc_feature (1)..(25): SEQ ID NO: 51; WAN024CDE; Start 220; Stop 244
ttgacaatgcttctcctaatcttag

SEQ ID NO: 254662 - DNA, 25 bp, Artificial
  probe
  misc_feature (1)..(25): SEQ ID NO: 51; WAN024CDE; Start 970; Stop 994
ttattgaatggtattgatgtggaca

SEQ ID NO: 254663 - DNA, 25 bp, Artificial
  probe
  misc_feature (1)..(25): SEQ ID NO: 51; WAN024CDE; Start 46; Stop 70
tatatcaatagtgtgctgctaatcc

SEQ ID NO: 254664 - DNA, 25 bp, Artificial
  probe
  misc_feature (1)..(25): SEQ ID NO: 51; WAN024CDE; Start 41; Stop 65
aatcttatatcaatagtgtgctgct

SEQ ID NO: 254665 - DNA, 25 bp, Artificial
  probe
  misc_feature (1)..(25): SEQ ID NO: 51; WAN024CDE; Start 49; Stop 73
atcaatagtgtgctgctaatcctgt

SEQ ID NO: 254666 - DNA, 25 bp, Artificial
  probe
  misc_feature (1)..(25): SEQ ID NO: 51; WAN024CDE; Start 971; Stop 995
tattgaatggtattgatgtggacaa

SEQ ID NO: 254667 - DNA, 25 bp, Artificial
  probe
  misc_feature (1)..(25): SEQ ID NO: 51; WAN024CDE; Start 51; Stop 75
caatagtgtgctgctaatcctgtac

SEQ ID NO: 254668 - DNA, 25 bp, Artificial
  probe
  misc_feature (1)..(25): SEQ ID NO: 51; WAN024CDE; Start 706; Stop 730
tatggaccaattaactctgtatcac

SEQ ID NO: 254669 - DNA, 25 bp, Artificial
  probe
  misc_feature (1)..(25): SEQ ID NO: 51; WAN024CDE; Start 43; Stop 67
tcttatatcaatagtgtgctgctaa

SEQ ID NO: 254670 - DNA, 25 bp, Artificial
  probe
  misc_feature (1)..(25): SEQ ID NO: 51; WAN024CDE; Start 241; Stop 265
ttagctgtcgcaagtagttcaatat

SEQ ID NO: 254671 - DNA, 25 bp, Artificial
  probe
  misc_feature (1)..(25): SEQ ID NO: 51; WAN024CDE; Start 406; Stop 430
cctaccgatacagattatgaagcta

SEQ ID NO: 254672 - DNA, 25 bp, Artificial
  probe
  misc_feature (1)..(25): SEQ ID NO: 51; WAN024CDE; Start 242; Stop 266
tagctgtcgcaagtagttcaatatc

SEQ ID NO: 254673 - DNA, 25 bp, Artificial
  probe
  misc_feature (1)..(25): SEQ ID NO: 51; WAN024CDE; Start 42; Stop 66
atcttatatcaatagtgtgctgcta

SEQ ID NO: 254674 - DNA, 25 bp, Artificial
  probe
  misc_feature (1)..(25): SEQ ID NO: 51; WAN024CDE; Start 236; Stop 260
taatcttagctgtcgcaagtagttc

SEQ ID NO: 254675 - DNA, 25 bp, Artificial
  probe
  misc_feature (1)..(25): SEQ ID NO: 51; WAN024CDE; Start 235; Stop 259
ctaatcttagctgtcgcaagtagtt

SEQ ID NO: 254676 - DNA, 25 bp, Artificial
  probe
  misc_feature (1)..(25): SEQ ID NO: 51; WAN024CDE; Start 240; Stop 264
cttagctgtcgcaagtagttcaata

SEQ ID NO: 254677 - DNA, 25 bp, Artificial
  probe
  misc_feature (1)..(25): SEQ ID NO: 51; WAN024CDE; Start 1196; Stop 1220
tcatgcaaggattagaggattcaat

SEQ ID NO: 254678 - DNA, 25 bp, Artificial
  probe
  misc_feature (1)..(25): SEQ ID NO: 51; WAN024CDE; Start 1199; Stop 1223
tgcaaggattagaggattcaataca

SEQ ID NO: 254679 - DNA, 25 bp, Artificial
  probe
  misc_feature (1)..(25): SEQ ID NO: 51; WAN024CDE; Start 874; Stop 898
attgattcttccattcataccttgg

SEQ ID NO: 254680 - DNA, 25 bp, Artificial
  probe
  misc_feature (1)..(25): SEQ ID NO: 51; WAN024CDE; Start 1195; Stop 1219
atcatgcaaggattagaggattcaa

SEQ ID NO: 254681 - DNA, 25 bp, Artificial
  probe
  misc_feature (1)..(25): SEQ ID NO: 51; WAN024CDE; Start 1225; Stop 1249
acaaatctctctccaacaactatca

SEQ ID NO: 254682 - DNA, 25 bp, Artificial
  probe
  misc_feature (1)..(25): SEQ ID NO: 51; WAN024CDE; Start 723; Stop 747
tgtatcacgttcggatgtcaatatt

SEQ ID NO: 254683 - DNA, 25 bp, Artificial
  probe
  misc_feature (1)..(25): SEQ ID NO: 51; WAN024CDE; Start 1220; Stop 1244
tacaaacaaatctctctccaacaac

SEQ ID NO: 254684 - DNA, 25 bp, Artificial
  probe
  misc_feature (1)..(25): SEQ ID NO: 51; WAN024CDE; Start 705; Stop 729
ttatggaccaattaactctgtatca

SEQ ID NO: 254685 - DNA, 25 bp, Artificial
  probe
  misc_feature (1)..(25): SEQ ID NO: 51; WAN024CDE; Start 703; Stop 727
acttatggaccaattaactctgtat

SEQ ID NO: 254686 - DNA, 25 bp, Artificial
  probe
  misc_feature (1)..(25): SEQ ID NO: 52; WAN024FYY; Start 607; Stop 631
cttgatactagaccgccttatatgg

SEQ ID NO: 254687 - DNA, 25 bp, Artificial
  probe
  misc_feature (1)..(25): SEQ ID NO: 52; WAN024FYY; Start 337; Stop 361
acttcttatcgttctattcatagcg

SEQ ID NO: 254688 - DNA, 25 bp, Artificial
  probe
  misc_feature (1)..(25): SEQ ID NO: 52; WAN024FYY; Start 601; Stop 625
cataatcttgatactagaccgcctt

SEQ ID NO: 254689 - DNA, 25 bp, Artificial
  probe
  misc_feature (1)..(25): SEQ ID NO: 52; WAN024FYY; Start 606; Stop 630
tcttgatactagaccgccttatatg

SEQ ID NO: 254690 - DNA, 25 bp, Artificial
  probe
  misc_feature (1)..(25): SEQ ID NO: 52; WAN024FYY; Start 574; Stop 598
ttagtccatattgtagcaagtgaca

SEQ ID NO: 254691 - DNA, 25 bp, Artificial
  probe
  misc_feature (1)..(25): SEQ ID NO: 52; WAN024FYY; Start 575; Stop 599
tagtccatattgtagcaagtgacat

SEQ ID NO: 254692 - DNA, 25 bp, Artificial
  probe
  misc_feature (1)..(25): SEQ ID NO: 52; WAN024FYY; Start 604; Stop 628
aatcttgatactagaccgccttata

SEQ ID NO: 254693 - DNA, 25 bp, Artificial
  probe
  misc_feature (1)..(25): SEQ ID NO: 52; WAN024FYY; Start 603; Stop 627
taatcttgatactagaccgccttat

SEQ ID NO: 254694 - DNA, 25 bp, Artificial
  probe
  misc_feature (1)..(25): SEQ ID NO: 52; WAN024FYY; Start 602; Stop 626
ataatcttgatactagaccgcctta

SEQ ID NO: 254695 - DNA, 25 bp, Artificial
  probe
  misc_feature (1)..(25): SEQ ID NO: 52; WAN024FYY; Start 605; Stop 629
atcttgatactagaccgccttatat

SEQ ID NO: 254696 - DNA, 25 bp, Artificial
  probe
  misc_feature (1)..(25): SEQ ID NO: 52; WAN024FYY; Start 600; Stop 624
gcataatcttgatactagaccgcct

SEQ ID NO: 254697 - DNA, 25 bp, Artificial
  probe
  misc_feature (1)..(25): SEQ ID NO: 52; WAN024FYY; Start 576; Stop 600
agtccatattgtagcaagtgacatg

SEQ ID NO: 254698 - DNA, 25 bp, Artificial
  probe
  misc_feature (1)..(25): SEQ ID NO: 52; WAN024FYY; Start 302; Stop 326
ggagtcgatatgccttgattgaatt

SEQ ID NO: 254699 - DNA, 25 bp, Artificial
  probe
  misc_feature (1)..(25): SEQ ID NO: 52; WAN024FYY; Start 336; Stop 360
gacttcttatcgttctattcatagc

SEQ ID NO: 254700 - DNA, 25 bp, Artificial
  probe
  misc_feature (1)..(25): SEQ ID NO: 52; WAN024FYY; Start 45; Stop 69
gccaaagtccatagaagatagtaga

SEQ ID NO: 254701 - DNA, 25 bp, Artificial
  probe
  misc_feature (1)..(25): SEQ ID NO: 52; WAN024FYY; Start 314; Stop 338
ccttgattgaatttagtagcgagac

SEQ ID NO: 254702 - DNA, 25 bp, Artificial
  probe
  misc_feature (1)..(25): SEQ ID NO: 52; WAN024FYY; Start 310; Stop 334
tatgccttgattgaatttagtagcg

SEQ ID NO: 254703 - DNA, 25 bp, Artificial
  probe
  misc_feature (1)..(25): SEQ ID NO: 52; WAN024FYY; Start 311; Stop 335
atgccttgattgaatttagtagcga

SEQ ID NO: 254704 - DNA, 25 bp, Artificial
  probe
  misc_feature (1)..(25): SEQ ID NO: 52; WAN024FYY; Start 142; Stop 166
tttgaaacaccagaagacaagattg

SEQ ID NO: 254705 - DNA, 25 bp, Artificial
  probe
  misc_feature (1)..(25): SEQ ID NO: 52; WAN024FYY; Start 49; Stop 73
aagtccatagaagatagtagagctt

SEQ ID NO: 254706 - DNA, 25 bp, Artificial
  probe
  misc_feature (1)..(25): SEQ ID NO: 52; WAN024FYY; Start 313; Stop 337
gccttgattgaatttagtagcgaga

SEQ ID NO: 254707 - DNA, 25 bp, Artificial
  probe
  misc_feature (1)..(25): SEQ ID NO: 52; WAN024FYY; Start 329; Stop 353
gtagcgagacttcttatcgttctat

SEQ ID NO: 254708 - DNA, 25 bp, Artificial
  probe
  misc_feature (1)..(25): SEQ ID NO: 52; WAN024FYY; Start 326; Stop 350
ttagtagcgagacttcttatcgttc

SEQ ID NO: 254709 - DNA, 25 bp, Artificial
  probe
  misc_feature (1)..(25): SEQ ID NO: 52; WAN024FYY; Start 331; Stop 355
agcgagacttcttatcgttctattc

SEQ ID NO: 254710 - DNA, 25 bp, Artificial
  probe
  misc_feature (1)..(25): SEQ ID NO: 52; WAN024FYY; Start 332; Stop 356
gcgagacttcttatcgttctattca

SEQ ID NO: 254711 - DNA, 25 bp, Artificial
  probe
  misc_feature (1)..(25): SEQ ID NO: 52; WAN024FYY; Start 312; Stop 336
tgccttgattgaatttagtagcgag

SEQ ID NO: 254712 - DNA, 25 bp, Artificial
  probe
  misc_feature (1)..(25): SEQ ID NO: 52; WAN024FYY; Start 328; Stop 352
agtagcgagacttcttatcgttcta

SEQ ID NO: 254713 - DNA, 25 bp, Artificial
  probe
  misc_feature (1)..(25): SEQ ID NO: 52; WAN024FYY; Start 327; Stop 351
tagtagcgagacttcttatcgttct

SEQ ID NO: 254714 - DNA, 25 bp, Artificial
  probe
  misc_feature (1)..(25): SEQ ID NO: 52; WAN024FYY; Start 330; Stop 354
tagcgagacttcttatcgttctatt

SEQ ID NO: 254715 - DNA, 25 bp, Artificial
  probe
  misc_feature (1)..(25): SEQ ID NO: 52; WAN024FYY; Start 47; Stop 71
caaagtccatagaagatagtagagc

SEQ ID NO: 254716 - DNA, 25 bp, Artificial
  probe
  misc_feature (1)..(25): SEQ ID NO: 52; WAN024FYY; Start 454; Stop 478
gaattgattcgtatgggctgttata

SEQ ID NO: 254717 - DNA, 25 bp, Artificial
  probe
  misc_feature (1)..(25): SEQ ID NO: 52; WAN024FYY; Start 141; Stop 165
gtttgaaacaccagaagacaagatt

SEQ ID NO: 254718 - DNA, 25 bp, Artificial
  probe
  misc_feature (1)..(25): SEQ ID NO: 52; WAN024FYY; Start 317; Stop 341
tgattgaatttagtagcgagacttc

SEQ ID NO: 254719 - DNA, 25 bp, Artificial
  probe
  misc_feature (1)..(25): SEQ ID NO: 53; WAN024BIF; Start 697; Stop 721
aatcctcgcttaatcttatctgatc

SEQ ID NO: 254720 - DNA, 25 bp, Artificial
  probe
  misc_feature (1)..(25): SEQ ID NO: 53; WAN024BIF; Start 664; Stop 688
ggtgaaagaagagcgagagaattat

SEQ ID NO: 254721 - DNA, 25 bp, Artificial
  probe
  misc_feature (1)..(25): SEQ ID NO: 53; WAN024BIF; Start 665; Stop 689
gtgaaagaagagcgagagaattatt

SEQ ID NO: 254722 - DNA, 25 bp, Artificial
  probe
  misc_feature (1)..(25): SEQ ID NO: 53; WAN024BIF; Start 666; Stop 690
tgaaagaagagcgagagaattattt

SEQ ID NO: 254723 - DNA, 25 bp, Artificial
  probe
  misc_feature (1)..(25): SEQ ID NO: 53; WAN024BIF; Start 696; Stop 720
aaatcctcgcttaatcttatctgat

SEQ ID NO: 254724 - DNA, 25 bp, Artificial
  probe
  misc_feature (1)..(25): SEQ ID NO: 53; WAN024BIF; Start 632; Stop 656
aagaagcctatgaacttatctcaaa

SEQ ID NO: 254725 - DNA, 25 bp, Artificial
  probe
  misc_feature (1)..(25): SEQ ID NO: 53; WAN024BIF; Start 631; Stop 655
aaagaagcctatgaacttatctcaa

SEQ ID NO: 254726 - DNA, 25 bp, Artificial
  probe
  misc_feature (1)..(25): SEQ ID NO: 53; WAN024BIF; Start 663; Stop 687
cggtgaaagaagagcgagagaatta

SEQ ID NO: 254727 - DNA, 25 bp, Artificial
  probe
  misc_feature (1)..(25): SEQ ID NO: 53; WAN024BIF; Start 699; Stop 723
tcctcgcttaatcttatctgatcaa

SEQ ID NO: 254728 - DNA, 25 bp, Artificial
  probe
  misc_feature (1)..(25): SEQ ID NO: 53; WAN024BIF; Start 698; Stop 722
atcctcgcttaatcttatctgatca

SEQ ID NO: 254729 - DNA, 25 bp, Artificial
  probe
  misc_feature (1)..(25): SEQ ID NO: 53; WAN024BIF; Start 655; Stop 679
aaacaatacggtgaaagaagagcga

SEQ ID NO: 254730 - DNA, 25 bp, Artificial
  probe
  misc_feature (1)..(25): SEQ ID NO: 53; WAN024BIF; Start 671; Stop 695
gaagagcgagagaattatttattga

SEQ ID NO: 254731 - DNA, 25 bp, Artificial
  probe
  misc_feature (1)..(25): SEQ ID NO: 53; WAN024BIF; Start 670; Stop 694
agaagagcgagagaattatttattg

SEQ ID NO: 254732 - DNA, 25 bp, Artificial
  probe
  misc_feature (1)..(25): SEQ ID NO: 53; WAN024BIF; Start 667; Stop 691
gaaagaagagcgagagaattattta

SEQ ID NO: 254733 - DNA, 25 bp, Artificial
  probe
  misc_feature (1)..(25): SEQ ID NO: 53; WAN024BIF; Start 656; Stop 680
aacaatacggtgaaagaagagcgag

SEQ ID NO: 254734 - DNA, 25 bp, Artificial
  probe
  misc_feature (1)..(25): SEQ ID NO: 53; WAN024BIF; Start 658; Stop 682
caatacggtgaaagaagagcgagag

SEQ ID NO: 254735 - DNA, 25 bp, Artificial
  probe
  misc_feature (1)..(25): SEQ ID NO: 53; WAN024BIF; Start 653; Stop 677
caaaacaatacggtgaaagaagagc

SEQ ID NO: 254736 - DNA, 25 bp, Artificial
  probe
  misc_feature (1)..(25): SEQ ID NO: 53; WAN024BIF; Start 672; Stop 696
aagagcgagagaattatttattgaa

SEQ ID NO: 254737 - DNA, 25 bp, Artificial
  probe
  misc_feature (1)..(25): SEQ ID NO: 53; WAN024BIF; Start 661; Stop 685
tacggtgaaagaagagcgagagaat

SEQ ID NO: 254738 - DNA, 25 bp, Artificial
  probe
  misc_feature (1)..(25): SEQ ID NO: 53; WAN024BIF; Start 660; Stop 684
atacggtgaaagaagagcgagagaa

SEQ ID NO: 254739 - DNA, 25 bp, Artificial
  probe
  misc_feature (1)..(25): SEQ ID NO: 53; WAN024BIF; Start 659; Stop 683
aatacggtgaaagaagagcgagaga

SEQ ID NO: 254740 - DNA, 25 bp, Artificial
  probe
  misc_feature (1)..(25): SEQ ID NO: 53; WAN024BIF; Start 673; Stop 697
agagcgagagaattatttattgaaa

SEQ ID NO: 254741 - DNA, 25 bp, Artificial
  probe
  misc_feature (1)..(25): SEQ ID NO: 53; WAN024BIF; Start 203; Stop 227
aagtagcagatgatttagtcattgc

SEQ ID NO: 254742 - DNA, 25 bp, Artificial
  probe
  misc_feature (1)..(25): SEQ ID NO: 53; WAN024BIF; Start 643; Stop 667
gaacttatctcaaaacaatacggtg

SEQ ID NO: 254743 - DNA, 25 bp, Artificial
  probe
  misc_feature (1)..(25): SEQ ID NO: 53; WAN024BIF; Start 652; Stop 676
tcaaaacaatacggtgaaagaagag

SEQ ID NO: 254744 - DNA, 25 bp, Artificial
  probe
  misc_feature (1)..(25): SEQ ID NO: 53; WAN024BIF; Start 651; Stop 675
ctcaaaacaatacggtgaaagaaga

SEQ ID NO: 254745 - DNA, 25 bp, Artificial
  probe
  misc_feature (1)..(25): SEQ ID NO: 53; WAN024BIF; Start 650; Stop 674
tctcaaaacaatacggtgaaagaag

SEQ ID NO: 254746 - DNA, 25 bp, Artificial
  probe
  misc_feature (1)..(25): SEQ ID NO: 53; WAN024BIF; Start 669; Stop 693
aagaagagcgagagaattatttatt

SEQ ID NO: 254747 - DNA, 25 bp, Artificial
  probe
  misc_feature (1)..(25): SEQ ID NO: 53; WAN024BIF; Start 668; Stop 692
aaagaagagcgagagaattatttat

SEQ ID NO: 254748 - DNA, 25 bp, Artificial
  probe
  misc_feature (1)..(25): SEQ ID NO: 53; WAN024BIF; Start 649; Stop 673
atctcaaaacaatacggtgaaagaa

SEQ ID NO: 254749 - DNA, 25 bp, Artificial
  probe
  misc_feature (1)..(25): SEQ ID NO: 53; WAN024BIF; Start 208; Stop 232
gcagatgatttagtcattgcttatg

SEQ ID NO: 254750 - DNA, 25 bp, Artificial
  probe
  misc_feature (1)..(25): SEQ ID NO: 53; WAN024BIF; Start 645; Stop 669
acttatctcaaaacaatacggtgaa

SEQ ID NO: 254751 - DNA, 25 bp, Artificial
  probe
  misc_feature (1)..(25): SEQ ID NO: 53; WAN024BIF; Start 644; Stop 668
aacttatctcaaaacaatacggtga

SEQ ID NO: 254752 - DNA, 25 bp, Artificial
  probe
  misc_feature (1)..(25): SEQ ID NO: 54; WAN024AWC; Start 187; Stop 211
aaggtcattgtagcgattattcaga

SEQ ID NO: 254753 - DNA, 25 bp, Artificial
  probe
  misc_feature (1)..(25): SEQ ID NO: 54; WAN024AWC; Start 189; Stop 213
ggtcattgtagcgattattcagaag

SEQ ID NO: 254754 - DNA, 25 bp, Artificial
  probe
  misc_feature (1)..(25): SEQ ID NO: 54; WAN024AWC; Start 188; Stop 212
aggtcattgtagcgattattcagaa

SEQ ID NO: 254755 - DNA, 25 bp, Artificial
  probe
  misc_feature (1)..(25): SEQ ID NO: 54; WAN024AWC; Start 283; Stop 307
aatatgccgattgagactatgatgg

SEQ ID NO: 254756 - DNA, 25 bp, Artificial
  probe
  misc_feature (1)..(25): SEQ ID NO: 54; WAN024AWC; Start 190; Stop 214
gtcattgtagcgattattcagaagt

SEQ ID NO: 254757 - DNA, 25 bp, Artificial
  probe
  misc_feature (1)..(25): SEQ ID NO: 54; WAN024AWC; Start 285; Stop 309
tatgccgattgagactatgatggat

SEQ ID NO: 254758 - DNA, 25 bp, Artificial
  probe
  misc_feature (1)..(25): SEQ ID NO: 54; WAN024AWC; Start 284; Stop 308
atatgccgattgagactatgatgga

SEQ ID NO: 254759 - DNA, 25 bp, Artificial
  probe
  misc_feature (1)..(25): SEQ ID NO: 54; WAN024AWC; Start 191; Stop 215
tcattgtagcgattattcagaagtt

SEQ ID NO: 254760 - DNA, 25 bp, Artificial
  probe
  misc_feature (1)..(25): SEQ ID NO: 54; WAN024AWC; Start 286; Stop 310
atgccgattgagactatgatggatt

SEQ ID NO: 254761 - DNA, 25 bp, Artificial
  probe
  misc_feature (1)..(25): SEQ ID NO: 54; WAN024AWC; Start 192; Stop 216
cattgtagcgattattcagaagtta

SEQ ID NO: 254762 - DNA, 25 bp, Artificial
  probe
  misc_feature (1)..(25): SEQ ID NO: 54; WAN024AWC; Start 288; Stop 312
gccgattgagactatgatggattta

SEQ ID NO: 254763 - DNA, 25 bp, Artificial
  probe
  misc_feature (1)..(25): SEQ ID NO: 54; WAN024AWC; Start 186; Stop 210
aaaggtcattgtagcgattattcag

SEQ ID NO: 254764 - DNA, 25 bp, Artificial
  probe
  misc_feature (1)..(25): SEQ ID NO: 54; WAN024AWC; Start 282; Stop 306
aaatatgccgattgagactatgatg

SEQ ID NO: 254765 - DNA, 25 bp, Artificial
  probe
  misc_feature (1)..(25): SEQ ID NO: 54; WAN024AWC; Start 289; Stop 313
ccgattgagactatgatggatttag

SEQ ID NO: 254766 - DNA, 25 bp, Artificial
  probe
  misc_feature (1)..(25): SEQ ID NO: 54; WAN024AWC; Start 306; Stop 330
ggatttagtgaatacccagttggaa

SEQ ID NO: 254767 - DNA, 25 bp, Artificial
  probe
  misc_feature (1)..(25): SEQ ID NO: 54; WAN024AWC; Start 308; Stop 332
atttagtgaatacccagttggaaag

SEQ ID NO: 254768 - DNA, 25 bp, Artificial
  probe
  misc_feature (1)..(25): SEQ ID NO: 54; WAN024AWC; Start 307; Stop 331
gatttagtgaatacccagttggaaa

SEQ ID NO: 254769 - DNA, 25 bp, Artificial
  probe
  misc_feature (1)..(25): SEQ ID NO: 54; WAN024AWC; Start 309; Stop 333
tttagtgaatacccagttggaaagc

SEQ ID NO: 254770 - DNA, 25 bp, Artificial
  probe
  misc_feature (1)..(25): SEQ ID NO: 54; WAN024AWC; Start 193; Stop 217
attgtagcgattattcagaagttaa

SEQ ID NO: 254771 - DNA, 25 bp, Artificial
  probe
  misc_feature (1)..(25): SEQ ID NO: 54; WAN024AWC; Start 327; Stop 351
ggaaagcggagggaattataaagta

SEQ ID NO: 254772 - DNA, 25 bp, Artificial
  probe
  misc_feature (1)..(25): SEQ ID NO: 54; WAN024AWC; Start 214; Stop 238
ttaacttctacagaggtcttgaaag

SEQ ID NO: 254773 - DNA, 25 bp, Artificial
  probe
  misc_feature (1)..(25): SEQ ID NO: 54; WAN024AWC; Start 287; Stop 311
tgccgattgagactatgatggattt

SEQ ID NO: 254774 - DNA, 25 bp, Artificial
  probe
  misc_feature (1)..(25): SEQ ID NO: 54; WAN024AWC; Start 215; Stop 239
taacttctacagaggtcttgaaaga

SEQ ID NO: 254775 - DNA, 25 bp, Artificial
  probe
  misc_feature (1)..(25): SEQ ID NO: 54; WAN024AWC; Start 328; Stop 352
gaaagcggagggaattataaagtaa

SEQ ID NO: 254776 - DNA, 25 bp, Artificial
  probe
  misc_feature (1)..(25): SEQ ID NO: 54; WAN024AWC; Start 325; Stop 349
ttggaaagcggagggaattataaag

SEQ ID NO: 254777 - DNA, 25 bp, Artificial
  probe
  misc_feature (1)..(25): SEQ ID NO: 54; WAN024AWC; Start 324; Stop 348
gttggaaagcggagggaattataaa

SEQ ID NO: 254778 - DNA, 25 bp, Artificial
  probe
  misc_feature (1)..(25): SEQ ID NO: 54; WAN024AWC; Start 381; Stop 405
gatggatcttccttcctatgcaatg

SEQ ID NO: 254779 - DNA, 25 bp, Artificial
  probe
  misc_feature (1)..(25): SEQ ID NO: 54; WAN024AWC; Start 329; Stop 353
aaagcggagggaattataaagtaaa

SEQ ID NO: 254780 - DNA, 25 bp, Artificial
  probe
  misc_feature (1)..(25): SEQ ID NO: 54; WAN024AWC; Start 330; Stop 354
aagcggagggaattataaagtaaat

SEQ ID NO: 254781 - DNA, 25 bp, Artificial
  probe
  misc_feature (1)..(25): SEQ ID NO: 54; WAN024AWC; Start 302; Stop 326
tgatggatttagtgaatacccagtt

SEQ ID NO: 254782 - DNA, 25 bp, Artificial
  probe
  misc_feature (1)..(25): SEQ ID NO: 54; WAN024AWC; Start 304; Stop 328
atggatttagtgaatacccagttgg

SEQ ID NO: 254783 - DNA, 25 bp, Artificial
  probe
  misc_feature (1)..(25): SEQ ID NO: 54; WAN024AWC; Start 301; Stop 325
atgatggatttagtgaatacccagt

SEQ ID NO: 254784 - DNA, 25 bp, Artificial
  probe
  misc_feature (1)..(25): SEQ ID NO: 54; WAN024AWC; Start 303; Stop 327
gatggatttagtgaatacccagttg

SEQ ID NO: 254785 - DNA, 25 bp, Artificial
  probe
  misc_feature (1)..(25): SEQ ID NO: 55; WAN0249X9; Start 43; Stop 67
ttaggagagcacagacacattaatt

SEQ ID NO: 254786 - DNA, 25 bp, Artificial
  probe
  misc_feature (1)..(25): SEQ ID NO: 55; WAN0249X9; Start 603; Stop 627
aggaaccgtaaccaaagattatact

SEQ ID NO: 254787 - DNA, 25 bp, Artificial
  probe
  misc_feature (1)..(25): SEQ ID NO: 55; WAN0249X9; Start 600; Stop 624
gctaggaaccgtaaccaaagattat

SEQ ID NO: 254788 - DNA, 25 bp, Artificial
  probe
  misc_feature (1)..(25): SEQ ID NO: 55; WAN0249X9; Start 604; Stop 628
ggaaccgtaaccaaagattatactt

SEQ ID NO: 254789 - DNA, 25 bp, Artificial
  probe
  misc_feature (1)..(25): SEQ ID NO: 55; WAN0249X9; Start 273; Stop 297
tatggtgtaattagctgataccgtt

SEQ ID NO: 254790 - DNA, 25 bp, Artificial
  probe
  misc_feature (1)..(25): SEQ ID NO: 55; WAN0249X9; Start 272; Stop 296
ttatggtgtaattagctgataccgt

SEQ ID NO: 254791 - DNA, 25 bp, Artificial
  probe
  misc_feature (1)..(25): SEQ ID NO: 55; WAN0249X9; Start 607; Stop 631
accgtaaccaaagattatacttgag

SEQ ID NO: 254792 - DNA, 25 bp, Artificial
  probe
  misc_feature (1)..(25): SEQ ID NO: 55; WAN0249X9; Start 608; Stop 632
ccgtaaccaaagattatacttgagt

SEQ ID NO: 254793 - DNA, 25 bp, Artificial
  probe
  misc_feature (1)..(25): SEQ ID NO: 55; WAN0249X9; Start 602; Stop 626
taggaaccgtaaccaaagattatac

SEQ ID NO: 254794 - DNA, 25 bp, Artificial
  probe
  misc_feature (1)..(25): SEQ ID NO: 55; WAN0249X9; Start 599; Stop 623
tgctaggaaccgtaaccaaagatta

SEQ ID NO: 254795 - DNA, 25 bp, Artificial
  probe
  misc_feature (1)..(25): SEQ ID NO: 55; WAN0249X9; Start 45; Stop 69
aggagagcacagacacattaattta

SEQ ID NO: 254796 - DNA, 25 bp, Artificial
  probe
  misc_feature (1)..(25): SEQ ID NO: 55; WAN0249X9; Start 44; Stop 68
taggagagcacagacacattaattt

SEQ ID NO: 254797 - DNA, 25 bp, Artificial
  probe
  misc_feature (1)..(25): SEQ ID NO: 55; WAN0249X9; Start 42; Stop 66
tttaggagagcacagacacattaat

SEQ ID NO: 254798 - DNA, 25 bp, Artificial
  probe
  misc_feature (1)..(25): SEQ ID NO: 55; WAN0249X9; Start 47; Stop 71
gagagcacagacacattaatttagc

SEQ ID NO: 254799 - DNA, 25 bp, Artificial
  probe
  misc_feature (1)..(25): SEQ ID NO: 55; WAN0249X9; Start 46; Stop 70
ggagagcacagacacattaatttag

SEQ ID NO: 254800 - DNA, 25 bp, Artificial
  probe
  misc_feature (1)..(25): SEQ ID NO: 55; WAN0249X9; Start 606; Stop 630
aaccgtaaccaaagattatacttga

SEQ ID NO: 254801 - DNA, 25 bp, Artificial
  probe
  misc_feature (1)..(25): SEQ ID NO: 55; WAN0249X9; Start 588; Stop 612
ttaccttacagtgctaggaaccgta

SEQ ID NO: 254802 - DNA, 25 bp, Artificial
  probe
  misc_feature (1)..(25): SEQ ID NO: 55; WAN0249X9; Start 605; Stop 629
gaaccgtaaccaaagattatacttg

SEQ ID NO: 254803 - DNA, 25 bp, Artificial
  probe
  misc_feature (1)..(25): SEQ ID NO: 55; WAN0249X9; Start 589; Stop 613
taccttacagtgctaggaaccgtaa

SEQ ID NO: 254804 - DNA, 25 bp, Artificial
  probe
  misc_feature (1)..(25): SEQ ID NO: 55; WAN0249X9; Start 601; Stop 625
ctaggaaccgtaaccaaagattata

SEQ ID NO: 254805 - DNA, 25 bp, Artificial
  probe
  misc_feature (1)..(25): SEQ ID NO: 55; WAN0249X9; Start 277; Stop 301
gtgtaattagctgataccgtttgag

SEQ ID NO: 254806 - DNA, 25 bp, Artificial
  probe
  misc_feature (1)..(25): SEQ ID NO: 55; WAN0249X9; Start 278; Stop 302
tgtaattagctgataccgtttgagg

SEQ ID NO: 254807 - DNA, 25 bp, Artificial
  probe
  misc_feature (1)..(25): SEQ ID NO: 55; WAN0249X9; Start 153; Stop 177
attcagtgactacttccatgtaaag

SEQ ID NO: 254808 - DNA, 25 bp, Artificial
  probe
  misc_feature (1)..(25): SEQ ID NO: 55; WAN0249X9; Start 151; Stop 175
gaattcagtgactacttccatgtaa

SEQ ID NO: 254809 - DNA, 25 bp, Artificial
  probe
  misc_feature (1)..(25): SEQ ID NO: 55; WAN0249X9; Start 152; Stop 176
aattcagtgactacttccatgtaaa

SEQ ID NO: 254810 - DNA, 25 bp, Artificial
  probe
  misc_feature (1)..(25): SEQ ID NO: 55; WAN0249X9; Start 424; Stop 448
cgaacactgtgtcatttccctattt

SEQ ID NO: 254811 - DNA, 25 bp, Artificial
  probe
  misc_feature (1)..(25): SEQ ID NO: 55; WAN0249X9; Start 598; Stop 622
gtgctaggaaccgtaaccaaagatt

SEQ ID NO: 254812 - DNA, 25 bp, Artificial
  probe
  misc_feature (1)..(25): SEQ ID NO: 55; WAN0249X9; Start 432; Stop 456
gtgtcatttccctattttcatacgg

SEQ ID NO: 254813 - DNA, 25 bp, Artificial
  probe
  misc_feature (1)..(25): SEQ ID NO: 55; WAN0249X9; Start 40; Stop 64
attttaggagagcacagacacatta

SEQ ID NO: 254814 - DNA, 25 bp, Artificial
  probe
  misc_feature (1)..(25): SEQ ID NO: 55; WAN0249X9; Start 431; Stop 455
tgtgtcatttccctattttcatacg

SEQ ID NO: 254815 - DNA, 25 bp, Artificial
  probe
  misc_feature (1)..(25): SEQ ID NO: 55; WAN0249X9; Start 280; Stop 304
taattagctgataccgtttgaggtt

SEQ ID NO: 254816 - DNA, 25 bp, Artificial
  probe
  misc_feature (1)..(25): SEQ ID NO: 55; WAN0249X9; Start 41; Stop 65
ttttaggagagcacagacacattaa

SEQ ID NO: 254817 - DNA, 25 bp, Artificial
  probe
  misc_feature (1)..(25): SEQ ID NO: 55; WAN0249X9; Start 593; Stop 617
ttacagtgctaggaaccgtaaccaa

SEQ ID NO: 254818 - DNA, 25 bp, Artificial
  probe
  misc_feature (1)..(25): SEQ ID NO: 56; WAN024ABU; Start 63; Stop 87
acagaagattgagaatgtccctatg

SEQ ID NO: 254819 - DNA, 25 bp, Artificial
  probe
  misc_feature (1)..(25): SEQ ID NO: 56; WAN024ABU; Start 28; Stop 52
tccattgtatcatagaaagaagaga

SEQ ID NO: 254820 - DNA, 25 bp, Artificial
  probe
  misc_feature (1)..(25): SEQ ID NO: 56; WAN024ABU; Start 29; Stop 53
ccattgtatcatagaaagaagagaa

SEQ ID NO: 254821 - DNA, 25 bp, Artificial
  probe
  misc_feature (1)..(25): SEQ ID NO: 56; WAN024ABU; Start 27; Stop 51
ttccattgtatcatagaaagaagag

SEQ ID NO: 254822 - DNA, 25 bp, Artificial
  probe
  misc_feature (1)..(25): SEQ ID NO: 56; WAN024ABU; Start 56; Stop 80
acaaaagacagaagattgagaatgt

SEQ ID NO: 254823 - DNA, 25 bp, Artificial
  probe
  misc_feature (1)..(25): SEQ ID NO: 56; WAN024ABU; Start 55; Stop 79
aacaaaagacagaagattgagaatg

SEQ ID NO: 254824 - DNA, 25 bp, Artificial
  probe
  misc_feature (1)..(25): SEQ ID NO: 56; WAN024ABU; Start 53; Stop 77
aaaacaaaagacagaagattgagaa

SEQ ID NO: 254825 - DNA, 25 bp, Artificial
  probe
  misc_feature (1)..(25): SEQ ID NO: 56; WAN024ABU; Start 54; Stop 78
aaacaaaagacagaagattgagaat

SEQ ID NO: 254826 - DNA, 25 bp, Artificial
  probe
  misc_feature (1)..(25): SEQ ID NO: 56; WAN024ABU; Start 62; Stop 86
gacagaagattgagaatgtccctat

SEQ ID NO: 254827 - DNA, 25 bp, Artificial
  probe
  misc_feature (1)..(25): SEQ ID NO: 56; WAN024ABU; Start 61; Stop 85
agacagaagattgagaatgtcccta

SEQ ID NO: 254828 - DNA, 25 bp, Artificial
  probe
  misc_feature (1)..(25): SEQ ID NO: 56; WAN024ABU; Start 59; Stop 83
aaagacagaagattgagaatgtccc

SEQ ID NO: 254829 - DNA, 25 bp, Artificial
  probe
  misc_feature (1)..(25): SEQ ID NO: 56; WAN024ABU; Start 60; Stop 84
aagacagaagattgagaatgtccct

SEQ ID NO: 254830 - DNA, 25 bp, Artificial
  probe
  misc_feature (1)..(25): SEQ ID NO: 56; WAN024ABU; Start 91; Stop 115
gcgtttacttatcgatgaattaatg

SEQ ID NO: 254831 - DNA, 25 bp, Artificial
  probe
  misc_feature (1)..(25): SEQ ID NO: 56; WAN024ABU; Start 90; Stop 114
agcgtttacttatcgatgaattaat

SEQ ID NO: 254832 - DNA, 25 bp, Artificial
  probe
  misc_feature (1)..(25): SEQ ID NO: 56; WAN024ABU; Start 26; Stop 50
tttccattgtatcatagaaagaaga

SEQ ID NO: 254833 - DNA, 25 bp, Artificial
  probe
  misc_feature (1)..(25): SEQ ID NO: 56; WAN024ABU; Start 89; Stop 113
tagcgtttacttatcgatgaattaa

SEQ ID NO: 254834 - DNA, 25 bp, Artificial
  probe
  misc_feature (1)..(25): SEQ ID NO: 56; WAN024ABU; Start 58; Stop 82
aaaagacagaagattgagaatgtcc

SEQ ID NO: 254835 - DNA, 25 bp, Artificial
  probe
  misc_feature (1)..(25): SEQ ID NO: 56; WAN024ABU; Start 92; Stop 116
cgtttacttatcgatgaattaatga

SEQ ID NO: 254836 - DNA, 25 bp, Artificial
  probe
  misc_feature (1)..(25): SEQ ID NO: 56; WAN024ABU; Start 57; Stop 81
caaaagacagaagattgagaatgtc

SEQ ID NO: 254837 - DNA, 25 bp, Artificial
  probe
  misc_feature (1)..(25): SEQ ID NO: 56; WAN024ABU; Start 25; Stop 49
ttttccattgtatcatagaaagaag

SEQ ID NO: 254838 - DNA, 25 bp, Artificial
  probe
  misc_feature (1)..(25): SEQ ID NO: 57; WAN024AGH; Start 6; Stop 30
actaagatttctcgctaattctgct

SEQ ID NO: 254839 - DNA, 25 bp, Artificial
  probe
  misc_feature (1)..(25): SEQ ID NO: 57; WAN024AGH; Start 11; Stop 35
gatttctcgctaattctgctagttt

SEQ ID NO: 254840 - DNA, 25 bp, Artificial
  probe
  misc_feature (1)..(25): SEQ ID NO: 57; WAN024AGH; Start 5; Stop 29
aactaagatttctcgctaattctgc

SEQ ID NO: 254841 - DNA, 25 bp, Artificial
  probe
  misc_feature (1)..(25): SEQ ID NO: 57; WAN024AGH; Start 10; Stop 34
agatttctcgctaattctgctagtt

SEQ ID NO: 254842 - DNA, 25 bp, Artificial
  probe
  misc_feature (1)..(25): SEQ ID NO: 57; WAN024AGH; Start 9; Stop 33
aagatttctcgctaattctgctagt

SEQ ID NO: 254843 - DNA, 25 bp, Artificial
  probe
  misc_feature (1)..(25): SEQ ID NO: 57; WAN024AGH; Start 13; Stop 37
tttctcgctaattctgctagtttaa

SEQ ID NO: 254844 - DNA, 25 bp, Artificial
  probe
  misc_feature (1)..(25): SEQ ID NO: 57; WAN024AGH; Start 7; Stop 31
ctaagatttctcgctaattctgcta

SEQ ID NO: 254845 - DNA, 25 bp, Artificial
  probe
  misc_feature (1)..(25): SEQ ID NO: 57; WAN024AGH; Start 12; Stop 36
atttctcgctaattctgctagttta

SEQ ID NO: 254846 - DNA, 25 bp, Artificial
  probe
  misc_feature (1)..(25): SEQ ID NO: 57; WAN024AGH; Start 8; Stop 32
taagatttctcgctaattctgctag

SEQ ID NO: 254847 - DNA, 25 bp, Artificial
  probe
  misc_feature (1)..(25): SEQ ID NO: 57; WAN024AGH; Start 14; Stop 38
ttctcgctaattctgctagtttaaa

SEQ ID NO: 254848 - DNA, 25 bp, Artificial
  probe
  misc_feature (1)..(25): SEQ ID NO: 57; WAN024AGH; Start 4; Stop 28
aaactaagatttctcgctaattctg

SEQ ID NO: 254849 - DNA, 25 bp, Artificial
  probe
  misc_feature (1)..(25): SEQ ID NO: 57; WAN024AGH; Start 3; Stop 27
aaaactaagatttctcgctaattct

SEQ ID NO: 254850 - DNA, 25 bp, Artificial
  probe
  misc_feature (1)..(25): SEQ ID NO: 57; WAN024AGH; Start 98; Stop 122
acagtattctattttagaaagcagt

SEQ ID NO: 254851 - DNA, 25 bp, Artificial
  probe
  misc_feature (1)..(25): SEQ ID NO: 58; WAN0249MQ; Start 187; Stop 211
agataagtgagttagaatagcgtga

SEQ ID NO: 254852 - DNA, 25 bp, Artificial
  probe
  misc_feature (1)..(25): SEQ ID NO: 58; WAN0249MQ; Start 188; Stop 212
gataagtgagttagaatagcgtgaa

SEQ ID NO: 254853 - DNA, 25 bp, Artificial
  probe
  misc_feature (1)..(25): SEQ ID NO: 58; WAN0249MQ; Start 186; Stop 210
aagataagtgagttagaatagcgtg

SEQ ID NO: 254854 - DNA, 25 bp, Artificial
  probe
  misc_feature (1)..(25): SEQ ID NO: 58; WAN0249MQ; Start 74; Stop 98
aattggtaagagaagagcattgtat

SEQ ID NO: 254855 - DNA, 25 bp, Artificial
  probe
  misc_feature (1)..(25): SEQ ID NO: 58; WAN0249MQ; Start 190; Stop 214
taagtgagttagaatagcgtgaatt

SEQ ID NO: 254856 - DNA, 25 bp, Artificial
  probe
  misc_feature (1)..(25): SEQ ID NO: 58; WAN0249MQ; Start 189; Stop 213
ataagtgagttagaatagcgtgaat

SEQ ID NO: 254857 - DNA, 25 bp, Artificial
  probe
  misc_feature (1)..(25): SEQ ID NO: 58; WAN0249MQ; Start 76; Stop 100
ttggtaagagaagagcattgtataa

SEQ ID NO: 254858 - DNA, 25 bp, Artificial
  probe
  misc_feature (1)..(25): SEQ ID NO: 58; WAN0249MQ; Start 75; Stop 99
attggtaagagaagagcattgtata

SEQ ID NO: 254859 - DNA, 25 bp, Artificial
  probe
  misc_feature (1)..(25): SEQ ID NO: 58; WAN0249MQ; Start 216; Stop 240
agtgaatgaaatgagaggaggttag

SEQ ID NO: 254860 - DNA, 25 bp, Artificial
  probe
  misc_feature (1)..(25): SEQ ID NO: 58; WAN0249MQ; Start 215; Stop 239
cagtgaatgaaatgagaggaggtta

SEQ ID NO: 254861 - DNA, 25 bp, Artificial
  probe
  misc_feature (1)..(25): SEQ ID NO: 58; WAN0249MQ; Start 185; Stop 209
taagataagtgagttagaatagcgt

SEQ ID NO: 254862 - DNA, 25 bp, Artificial
  probe
  misc_feature (1)..(25): SEQ ID NO: 58; WAN0249MQ; Start 217; Stop 241
gtgaatgaaatgagaggaggttagc

SEQ ID NO: 254863 - DNA, 25 bp, Artificial
  probe
  misc_feature (1)..(25): SEQ ID NO: 58; WAN0249MQ; Start 84; Stop 108
agaagagcattgtataaactccaga

SEQ ID NO: 254864 - DNA, 25 bp, Artificial
  probe
  misc_feature (1)..(25): SEQ ID NO: 58; WAN0249MQ; Start 82; Stop 106
agagaagagcattgtataaactcca

SEQ ID NO: 254865 - DNA, 25 bp, Artificial
  probe
  misc_feature (1)..(25): SEQ ID NO: 58; WAN0249MQ; Start 83; Stop 107
gagaagagcattgtataaactccag

SEQ ID NO: 254866 - DNA, 25 bp, Artificial
  probe
  misc_feature (1)..(25): SEQ ID NO: 58; WAN0249MQ; Start 73; Stop 97
aaattggtaagagaagagcattgta

SEQ ID NO: 254867 - DNA, 25 bp, Artificial
  probe
  misc_feature (1)..(25): SEQ ID NO: 58; WAN0249MQ; Start 85; Stop 109
gaagagcattgtataaactccagat

SEQ ID NO: 254868 - DNA, 25 bp, Artificial
  probe
  misc_feature (1)..(25): SEQ ID NO: 58; WAN0249MQ; Start 214; Stop 238
tcagtgaatgaaatgagaggaggtt

SEQ ID NO: 254869 - DNA, 25 bp, Artificial
  probe
  misc_feature (1)..(25): SEQ ID NO: 58; WAN0249MQ; Start 81; Stop 105
aagagaagagcattgtataaactcc

SEQ ID NO: 254870 - DNA, 25 bp, Artificial
  probe
  misc_feature (1)..(25): SEQ ID NO: 58; WAN0249MQ; Start 77; Stop 101
tggtaagagaagagcattgtataaa

SEQ ID NO: 254871 - DNA, 25 bp, Artificial
  probe
  misc_feature (1)..(25): SEQ ID NO: 58; WAN0249MQ; Start 78; Stop 102
ggtaagagaagagcattgtataaac

SEQ ID NO: 254872 - DNA, 25 bp, Artificial
  probe
  misc_feature (1)..(25): SEQ ID NO: 58; WAN0249MQ; Start 219; Stop 243
gaatgaaatgagaggaggttagcgt

SEQ ID NO: 254873 - DNA, 25 bp, Artificial
  probe
  misc_feature (1)..(25): SEQ ID NO: 58; WAN0249MQ; Start 218; Stop 242
tgaatgaaatgagaggaggttagcg

SEQ ID NO: 254874 - DNA, 25 bp, Artificial
  probe
  misc_feature (1)..(25): SEQ ID NO: 58; WAN0249MQ; Start 184; Stop 208
ataagataagtgagttagaatagcg

SEQ ID NO: 254875 - DNA, 25 bp, Artificial
  probe
  misc_feature (1)..(25): SEQ ID NO: 58; WAN0249MQ; Start 86; Stop 110
aagagcattgtataaactccagata

SEQ ID NO: 254876 - DNA, 25 bp, Artificial
  probe
  misc_feature (1)..(25): SEQ ID NO: 58; WAN0249MQ; Start 16; Stop 40
acttgggtactatcttatttggaat

SEQ ID NO: 254877 - DNA, 25 bp, Artificial
  probe
  misc_feature (1)..(25): SEQ ID NO: 58; WAN0249MQ; Start 191; Stop 215
aagtgagttagaatagcgtgaattc

SEQ ID NO: 254878 - DNA, 25 bp, Artificial
  probe
  misc_feature (1)..(25): SEQ ID NO: 58; WAN0249MQ; Start 87; Stop 111
agagcattgtataaactccagatat

SEQ ID NO: 254879 - DNA, 25 bp, Artificial
  probe
  misc_feature (1)..(25): SEQ ID NO: 58; WAN0249MQ; Start 79; Stop 103
gtaagagaagagcattgtataaact

SEQ ID NO: 254880 - DNA, 25 bp, Artificial
  probe
  misc_feature (1)..(25): SEQ ID NO: 58; WAN0249MQ; Start 15; Stop 39
tacttgggtactatcttatttggaa

SEQ ID NO: 254881 - DNA, 25 bp, Artificial
  probe
  misc_feature (1)..(25): SEQ ID NO: 58; WAN0249MQ; Start 72; Stop 96
aaaattggtaagagaagagcattgt

SEQ ID NO: 254882 - DNA, 25 bp, Artificial
  probe
  misc_feature (1)..(25): SEQ ID NO: 58; WAN0249MQ; Start 141; Stop 165
tagatacaaaatgcttgacttggag

SEQ ID NO: 254883 - DNA, 25 bp, Artificial
  probe
  misc_feature (1)..(25): SEQ ID NO: 58; WAN0249MQ; Start 142; Stop 166
agatacaaaatgcttgacttggagt

SEQ ID NO: 254884 - DNA, 25 bp, Artificial
  probe
  misc_feature (1)..(25): SEQ ID NO: 59; WAN0249ST; Start 97; Stop 121
tggactattctggattcaacacatt

SEQ ID NO: 254885 - DNA, 25 bp, Artificial
  probe
  misc_feature (1)..(25): SEQ ID NO: 59; WAN0249ST; Start 98; Stop 122
ggactattctggattcaacacatta

SEQ ID NO: 254886 - DNA, 25 bp, Artificial
  probe
  misc_feature (1)..(25): SEQ ID NO: 59; WAN0249ST; Start 92; Stop 116
tacagtggactattctggattcaac

SEQ ID NO: 254887 - DNA, 25 bp, Artificial
  probe
  misc_feature (1)..(25): SEQ ID NO: 59; WAN0249ST; Start 91; Stop 115
ctacagtggactattctggattcaa

SEQ ID NO: 254888 - DNA, 25 bp, Artificial
  probe
  misc_feature (1)..(25): SEQ ID NO: 59; WAN0249ST; Start 89; Stop 113
aactacagtggactattctggattc

SEQ ID NO: 254889 - DNA, 25 bp, Artificial
  probe
  misc_feature (1)..(25): SEQ ID NO: 59; WAN0249ST; Start 90; Stop 114
actacagtggactattctggattca

SEQ ID NO: 254890 - DNA, 25 bp, Artificial
  probe
  misc_feature (1)..(25): SEQ ID NO: 59; WAN0249ST; Start 96; Stop 120
gtggactattctggattcaacacat

SEQ ID NO: 254891 - DNA, 25 bp, Artificial
  probe
  misc_feature (1)..(25): SEQ ID NO: 59; WAN0249ST; Start 93; Stop 117
acagtggactattctggattcaaca

SEQ ID NO: 254892 - DNA, 25 bp, Artificial
  probe
  misc_feature (1)..(25): SEQ ID NO: 59; WAN0249ST; Start 94; Stop 118
cagtggactattctggattcaacac

SEQ ID NO: 254893 - DNA, 25 bp, Artificial
  probe
  misc_feature (1)..(25): SEQ ID NO: 59; WAN0249ST; Start 95; Stop 119
agtggactattctggattcaacaca

SEQ ID NO: 254894 - DNA, 25 bp, Artificial
  probe
  misc_feature (1)..(25): SEQ ID NO: 59; WAN0249ST; Start 140; Stop 164
acattcacaagaaggctacgacatt

SEQ ID NO: 254895 - DNA, 25 bp, Artificial
  probe
  misc_feature (1)..(25): SEQ ID NO: 59; WAN0249ST; Start 191; Stop 215
ttgccctactaaagttggttacatt

SEQ ID NO: 254896 - DNA, 25 bp, Artificial
  probe
  misc_feature (1)..(25): SEQ ID NO: 59; WAN0249ST; Start 190; Stop 214
tttgccctactaaagttggttacat

SEQ ID NO: 254897 - DNA, 25 bp, Artificial
  probe
  misc_feature (1)..(25): SEQ ID NO: 59; WAN0249ST; Start 192; Stop 216
tgccctactaaagttggttacatta

SEQ ID NO: 254898 - DNA, 25 bp, Artificial
  probe
  misc_feature (1)..(25): SEQ ID NO: 59; WAN0249ST; Start 182; Stop 206
atgtatcgtttgccctactaaagtt

SEQ ID NO: 254899 - DNA, 25 bp, Artificial
  probe
  misc_feature (1)..(25): SEQ ID NO: 59; WAN0249ST; Start 181; Stop 205
gatgtatcgtttgccctactaaagt

SEQ ID NO: 254900 - DNA, 25 bp, Artificial
  probe
  misc_feature (1)..(25): SEQ ID NO: 59; WAN0249ST; Start 47; Stop 71
aatgaattggtgcttaacatccatt

SEQ ID NO: 254901 - DNA, 25 bp, Artificial
  probe
  misc_feature (1)..(25): SEQ ID NO: 59; WAN0249ST; Start 189; Stop 213
gtttgccctactaaagttggttaca

SEQ ID NO: 254902 - DNA, 25 bp, Artificial
  probe
  misc_feature (1)..(25): SEQ ID NO: 59; WAN0249ST; Start 183; Stop 207
tgtatcgtttgccctactaaagttg

SEQ ID NO: 254903 - DNA, 25 bp, Artificial
  probe
  misc_feature (1)..(25): SEQ ID NO: 59; WAN0249ST; Start 99; Stop 123
gactattctggattcaacacattat

SEQ ID NO: 254904 - DNA, 25 bp, Artificial
  probe
  misc_feature (1)..(25): SEQ ID NO: 59; WAN0249ST; Start 180; Stop 204
ggatgtatcgtttgccctactaaag

SEQ ID NO: 254905 - DNA, 25 bp, Artificial
  probe
  misc_feature (1)..(25): SEQ ID NO: 59; WAN0249ST; Start 36; Stop 60
agatgtaaacaaatgaattggtgct

SEQ ID NO: 254906 - DNA, 25 bp, Artificial
  probe
  misc_feature (1)..(25): SEQ ID NO: 59; WAN0249ST; Start 44; Stop 68
acaaatgaattggtgcttaacatcc

SEQ ID NO: 254907 - DNA, 25 bp, Artificial
  probe
  misc_feature (1)..(25): SEQ ID NO: 59; WAN0249ST; Start 193; Stop 217
gccctactaaagttggttacattat

SEQ ID NO: 254908 - DNA, 25 bp, Artificial
  probe
  misc_feature (1)..(25): SEQ ID NO: 59; WAN0249ST; Start 43; Stop 67
aacaaatgaattggtgcttaacatc

SEQ ID NO: 254909 - DNA, 25 bp, Artificial
  probe
  misc_feature (1)..(25): SEQ ID NO: 59; WAN0249ST; Start 37; Stop 61
gatgtaaacaaatgaattggtgctt

SEQ ID NO: 254910 - DNA, 25 bp, Artificial
  probe
  misc_feature (1)..(25): SEQ ID NO: 59; WAN0249ST; Start 35; Stop 59
aagatgtaaacaaatgaattggtgc

SEQ ID NO: 254911 - DNA, 25 bp, Artificial
  probe
  misc_feature (1)..(25): SEQ ID NO: 59; WAN0249ST; Start 184; Stop 208
gtatcgtttgccctactaaagttgg

SEQ ID NO: 254912 - DNA, 25 bp, Artificial
  probe
  misc_feature (1)..(25): SEQ ID NO: 59; WAN0249ST; Start 139; Stop 163
cacattcacaagaaggctacgacat

SEQ ID NO: 254913 - DNA, 25 bp, Artificial
  probe
  misc_feature (1)..(25): SEQ ID NO: 59; WAN0249ST; Start 42; Stop 66
aaacaaatgaattggtgcttaacat

SEQ ID NO: 254914 - DNA, 25 bp, Artificial
  probe
  misc_feature (1)..(25): SEQ ID NO: 59; WAN0249ST; Start 185; Stop 209
tatcgtttgccctactaaagttggt

SEQ ID NO: 254915 - DNA, 25 bp, Artificial
  probe
  misc_feature (1)..(25): SEQ ID NO: 59; WAN0249ST; Start 141; Stop 165
cattcacaagaaggctacgacattt

SEQ ID NO: 254916 - DNA, 25 bp, Artificial
  probe
  misc_feature (1)..(25): SEQ ID NO: 59; WAN0249ST; Start 87; Stop 111
gaaactacagtggactattctggat

SEQ ID NO: 254917 - DNA, 25 bp, Artificial
  probe
  misc_feature (1)..(25): SEQ ID NO: 60; WAN0249JM; Start 10; Stop 34
gggaatcgagaagatttcctgattt

SEQ ID NO: 254918 - DNA, 25 bp, Artificial
  probe
  misc_feature (1)..(25): SEQ ID NO: 60; WAN0249JM; Start 9; Stop 33
agggaatcgagaagatttcctgatt

SEQ ID NO: 254919 - DNA, 25 bp, Artificial
  probe
  misc_feature (1)..(25): SEQ ID NO: 60; WAN0249JM; Start 5; Stop 29
aatcagggaatcgagaagatttcct

SEQ ID NO: 254920 - DNA, 25 bp, Artificial
  probe
  misc_feature (1)..(25): SEQ ID NO: 60; WAN0249JM; Start 4; Stop 28
aaatcagggaatcgagaagatttcc

SEQ ID NO: 254921 - DNA, 25 bp, Artificial
  probe
  misc_feature (1)..(25): SEQ ID NO: 60; WAN0249JM; Start 8; Stop 32
cagggaatcgagaagatttcctgat

SEQ ID NO: 254922 - DNA, 25 bp, Artificial
  probe
  misc_feature (1)..(25): SEQ ID NO: 60; WAN0249JM; Start 6; Stop 30
atcagggaatcgagaagatttcctg

SEQ ID NO: 254923 - DNA, 25 bp, Artificial
  probe
  misc_feature (1)..(25): SEQ ID NO: 60; WAN0249JM; Start 3; Stop 27
aaaatcagggaatcgagaagatttc

SEQ ID NO: 254924 - DNA, 25 bp, Artificial
  probe
  misc_feature (1)..(25): SEQ ID NO: 61; WAN0249WN; Start 60; Stop 84
agtaaatagaagttcaatcagctaa

SEQ ID NO: 254925 - DNA, 25 bp, Artificial
  probe
  misc_feature (1)..(25): SEQ ID NO: 61; WAN0249WN; Start 58; Stop 82
ttagtaaatagaagttcaatcagct

SEQ ID NO: 254926 - DNA, 25 bp, Artificial
  probe
  misc_feature (1)..(25): SEQ ID NO: 61; WAN0249WN; Start 4; Stop 28
aaatcctctgtcacaaagagttccc

SEQ ID NO: 254927 - DNA, 25 bp, Artificial
  probe
  misc_feature (1)..(25): SEQ ID NO: 61; WAN0249WN; Start 57; Stop 81
attagtaaatagaagttcaatcagc

SEQ ID NO: 254928 - DNA, 25 bp, Artificial
  probe
  misc_feature (1)..(25): SEQ ID NO: 61; WAN0249WN; Start 5; Stop 29
aatcctctgtcacaaagagttccct

SEQ ID NO: 254929 - DNA, 25 bp, Artificial
  probe
  misc_feature (1)..(25): SEQ ID NO: 61; WAN0249WN; Start 61; Stop 85
gtaaatagaagttcaatcagctaaa

SEQ ID NO: 254930 - DNA, 25 bp, Artificial
  probe
  misc_feature (1)..(25): SEQ ID NO: 61; WAN0249WN; Start 3; Stop 27
aaaatcctctgtcacaaagagttcc

SEQ ID NO: 254931 - DNA, 25 bp, Artificial
  probe
  misc_feature (1)..(25): SEQ ID NO: 61; WAN0249WN; Start 59; Stop 83
tagtaaatagaagttcaatcagcta

SEQ ID NO: 254932 - DNA, 25 bp, Artificial
  probe
  misc_feature (1)..(25): SEQ ID NO: 61; WAN0249WN; Start 27; Stop 51
cctgctctttgaaacggaggatttt

SEQ ID NO: 254933 - DNA, 25 bp, Artificial
  probe
  misc_feature (1)..(25): SEQ ID NO: 61; WAN0249WN; Start 6; Stop 30
atcctctgtcacaaagagttccctg

SEQ ID NO: 254934 - DNA, 25 bp, Artificial
  probe
  misc_feature (1)..(25): SEQ ID NO: 61; WAN0249WN; Start 9; Stop 33
ctctgtcacaaagagttccctgctc

SEQ ID NO: 254935 - DNA, 25 bp, Artificial
  probe
  misc_feature (1)..(25): SEQ ID NO: 62; WAN024AGZ; Start 69; Stop 93
aatggttgacatcgactcctatatg

SEQ ID NO: 254936 - DNA, 25 bp, Artificial
  probe
  misc_feature (1)..(25): SEQ ID NO: 62; WAN024AGZ; Start 70; Stop 94
atggttgacatcgactcctatatga

SEQ ID NO: 254937 - DNA, 25 bp, Artificial
  probe
  misc_feature (1)..(25): SEQ ID NO: 62; WAN024AGZ; Start 71; Stop 95
tggttgacatcgactcctatatgag

SEQ ID NO: 254938 - DNA, 25 bp, Artificial
  probe
  misc_feature (1)..(25): SEQ ID NO: 62; WAN024AGZ; Start 68; Stop 92
aaatggttgacatcgactcctatat

SEQ ID NO: 254939 - DNA, 25 bp, Artificial
  probe
  misc_feature (1)..(25): SEQ ID NO: 62; WAN024AGZ; Start 73; Stop 97
gttgacatcgactcctatatgagta

SEQ ID NO: 254940 - DNA, 25 bp, Artificial
  probe
  misc_feature (1)..(25): SEQ ID NO: 62; WAN024AGZ; Start 72; Stop 96
ggttgacatcgactcctatatgagt

SEQ ID NO: 254941 - DNA, 25 bp, Artificial
  probe
  misc_feature (1)..(25): SEQ ID NO: 62; WAN024AGZ; Start 74; Stop 98
ttgacatcgactcctatatgagtat

SEQ ID NO: 254942 - DNA, 25 bp, Artificial
  probe
  misc_feature (1)..(25): SEQ ID NO: 62; WAN024AGZ; Start 67; Stop 91
aaaatggttgacatcgactcctata

SEQ ID NO: 254943 - DNA, 25 bp, Artificial
  probe
  misc_feature (1)..(25): SEQ ID NO: 62; WAN024AGZ; Start 75; Stop 99
tgacatcgactcctatatgagtata

SEQ ID NO: 254944 - DNA, 25 bp, Artificial
  probe
  misc_feature (1)..(25): SEQ ID NO: 62; WAN024AGZ; Start 76; Stop 100
gacatcgactcctatatgagtataa

SEQ ID NO: 254945 - DNA, 25 bp, Artificial
  probe
  misc_feature (1)..(25): SEQ ID NO: 62; WAN024AGZ; Start 77; Stop 101
acatcgactcctatatgagtataat

SEQ ID NO: 254946 - DNA, 25 bp, Artificial
  probe
  misc_feature (1)..(25): SEQ ID NO: 62; WAN024AGZ; Start 20; Stop 44
ctagtcacgaaaatcggctgttaca

SEQ ID NO: 254947 - DNA, 25 bp, Artificial
  probe
  misc_feature (1)..(25): SEQ ID NO: 62; WAN024AGZ; Start 25; Stop 49
cacgaaaatcggctgttacagtttt

SEQ ID NO: 254948 - DNA, 25 bp, Artificial
  probe
  misc_feature (1)..(25): SEQ ID NO: 62; WAN024AGZ; Start 21; Stop 45
tagtcacgaaaatcggctgttacag

SEQ ID NO: 254949 - DNA, 25 bp, Artificial
  probe
  misc_feature (1)..(25): SEQ ID NO: 62; WAN024AGZ; Start 80; Stop 104
tcgactcctatatgagtataatagt

SEQ ID NO: 254950 - DNA, 25 bp, Artificial
  probe
  misc_feature (1)..(25): SEQ ID NO: 62; WAN024AGZ; Start 24; Stop 48
tcacgaaaatcggctgttacagttt

SEQ ID NO: 254951 - DNA, 25 bp, Artificial
  probe
  misc_feature (1)..(25): SEQ ID NO: 62; WAN024AGZ; Start 23; Stop 47
gtcacgaaaatcggctgttacagtt

SEQ ID NO: 254952 - DNA, 25 bp, Artificial
  probe
  misc_feature (1)..(25): SEQ ID NO: 62; WAN024AGZ; Start 19; Stop 43
actagtcacgaaaatcggctgttac

SEQ ID NO: 254953 - DNA, 25 bp, Artificial
  probe
  misc_feature (1)..(25): SEQ ID NO: 62; WAN024AGZ; Start 22; Stop 46
agtcacgaaaatcggctgttacagt

SEQ ID NO: 254954 - DNA, 25 bp, Artificial
  probe
  misc_feature (1)..(25): SEQ ID NO: 63; WAN024APX; Start 61; Stop 85
aaagtggaaagctattctctaatgt

SEQ ID NO: 254955 - DNA, 25 bp, Artificial
  probe
  misc_feature (1)..(25): SEQ ID NO: 63; WAN024APX; Start 60; Stop 84
gaaagtggaaagctattctctaatg

SEQ ID NO: 254956 - DNA, 25 bp, Artificial
  probe
  misc_feature (1)..(25): SEQ ID NO: 63; WAN024APX; Start 62; Stop 86
aagtggaaagctattctctaatgta

SEQ ID NO: 254957 - DNA, 25 bp, Artificial
  probe
  misc_feature (1)..(25): SEQ ID NO: 63; WAN024APX; Start 63; Stop 87
agtggaaagctattctctaatgtat

SEQ ID NO: 254958 - DNA, 25 bp, Artificial
  probe
  misc_feature (1)..(25): SEQ ID NO: 63; WAN024APX; Start 100; Stop 124
ggggcttttgtagtataatagagat

SEQ ID NO: 254959 - DNA, 25 bp, Artificial
  probe
  misc_feature (1)..(25): SEQ ID NO: 63; WAN024APX; Start 64; Stop 88
gtggaaagctattctctaatgtatt

SEQ ID NO: 254960 - DNA, 25 bp, Artificial
  probe
  misc_feature (1)..(25): SEQ ID NO: 63; WAN024APX; Start 43; Stop 67
acaggaaaagtaaaatagaaagtgg

SEQ ID NO: 254961 - DNA, 25 bp, Artificial
  probe
  misc_feature (1)..(25): SEQ ID NO: 63; WAN024APX; Start 119; Stop 143
agagatacgttttgaaagtaggagg

SEQ ID NO: 254962 - DNA, 25 bp, Artificial
  probe
  misc_feature (1)..(25): SEQ ID NO: 63; WAN024APX; Start 120; Stop 144
gagatacgttttgaaagtaggaggt

SEQ ID NO: 254963 - DNA, 25 bp, Artificial
  probe
  misc_feature (1)..(25): SEQ ID NO: 63; WAN024APX; Start 44; Stop 68
caggaaaagtaaaatagaaagtgga

SEQ ID NO: 254964 - DNA, 25 bp, Artificial
  probe
  misc_feature (1)..(25): SEQ ID NO: 63; WAN024APX; Start 59; Stop 83
agaaagtggaaagctattctctaat

SEQ ID NO: 254965 - DNA, 25 bp, Artificial
  probe
  misc_feature (1)..(25): SEQ ID NO: 63; WAN024APX; Start 124; Stop 148
tacgttttgaaagtaggaggtatct

SEQ ID NO: 254966 - DNA, 25 bp, Artificial
  probe
  misc_feature (1)..(25): SEQ ID NO: 63; WAN024APX; Start 121; Stop 145
agatacgttttgaaagtaggaggta

SEQ ID NO: 254967 - DNA, 25 bp, Artificial
  probe
  misc_feature (1)..(25): SEQ ID NO: 63; WAN024APX; Start 25; Stop 49
accattatagacctataaacaggaa

SEQ ID NO: 254968 - DNA, 25 bp, Artificial
  probe
  misc_feature (1)..(25): SEQ ID NO: 63; WAN024APX; Start 58; Stop 82
tagaaagtggaaagctattctctaa

SEQ ID NO: 254969 - DNA, 25 bp, Artificial
  probe
  misc_feature (1)..(25): SEQ ID NO: 63; WAN024APX; Start 65; Stop 89
tggaaagctattctctaatgtattt

SEQ ID NO: 254970 - DNA, 25 bp, Artificial
  probe
  misc_feature (1)..(25): SEQ ID NO: 63; WAN024APX; Start 57; Stop 81
atagaaagtggaaagctattctcta

SEQ ID NO: 254971 - DNA, 25 bp, Artificial
  probe
  misc_feature (1)..(25): SEQ ID NO: 63; WAN024APX; Start 118; Stop 142
tagagatacgttttgaaagtaggag

SEQ ID NO: 254972 - DNA, 25 bp, Artificial
  probe
  misc_feature (1)..(25): SEQ ID NO: 63; WAN024APX; Start 48; Stop 72
aaaagtaaaatagaaagtggaaagc

SEQ ID NO: 254973 - DNA, 25 bp, Artificial
  probe
  misc_feature (1)..(25): SEQ ID NO: 63; WAN024APX; Start 45; Stop 69
aggaaaagtaaaatagaaagtggaa

SEQ ID NO: 254974 - DNA, 25 bp, Artificial
  probe
  misc_feature (1)..(25): SEQ ID NO: 63; WAN024APX; Start 56; Stop 80
aatagaaagtggaaagctattctct

SEQ ID NO: 254975 - DNA, 25 bp, Artificial
  probe
  misc_feature (1)..(25): SEQ ID NO: 63; WAN024APX; Start 123; Stop 147
atacgttttgaaagtaggaggtatc

SEQ ID NO: 254976 - DNA, 25 bp, Artificial
  probe
  misc_feature (1)..(25): SEQ ID NO: 63; WAN024APX; Start 122; Stop 146
gatacgttttgaaagtaggaggtat

SEQ ID NO: 254977 - DNA, 25 bp, Artificial
  probe
  misc_feature (1)..(25): SEQ ID NO: 63; WAN024APX; Start 49; Stop 73
aaagtaaaatagaaagtggaaagct

SEQ ID NO: 254978 - DNA, 25 bp, Artificial
  probe
  misc_feature (1)..(25): SEQ ID NO: 63; WAN024APX; Start 117; Stop 141
atagagatacgttttgaaagtagga

SEQ ID NO: 254979 - DNA, 25 bp, Artificial
  probe
  misc_feature (1)..(25): SEQ ID NO: 63; WAN024APX; Start 24; Stop 48
taccattatagacctataaacagga

SEQ ID NO: 254980 - DNA, 25 bp, Artificial
  probe
  misc_feature (1)..(25): SEQ ID NO: 63; WAN024APX; Start 55; Stop 79
aaatagaaagtggaaagctattctc

SEQ ID NO: 254981 - DNA, 25 bp, Artificial
  probe
  misc_feature (1)..(25): SEQ ID NO: 63; WAN024APX; Start 42; Stop 66
aacaggaaaagtaaaatagaaagtg

SEQ ID NO: 254982 - DNA, 25 bp, Artificial
  probe
  misc_feature (1)..(25): SEQ ID NO: 63; WAN024APX; Start 26; Stop 50
ccattatagacctataaacaggaaa

SEQ ID NO: 254983 - DNA, 25 bp, Artificial
  probe
  misc_feature (1)..(25): SEQ ID NO: 63; WAN024APX; Start 4; Stop 28
aacctccaaataaaatctattacca

SEQ ID NO: 254984 - DNA, 25 bp, Artificial
  probe
  misc_feature (1)..(25): SEQ ID NO: 63; WAN024APX; Start 46; Stop 70
ggaaaagtaaaatagaaagtggaaa

SEQ ID NO: 254985 - DNA, 25 bp, Artificial
  probe
  misc_feature (1)..(25): SEQ ID NO: 63; WAN024APX; Start 5; Stop 29
acctccaaataaaatctattaccat

SEQ ID NO: 254986 - DNA, 25 bp, Artificial
  probe
  misc_feature (1)..(25): SEQ ID NO: 63; WAN024APX; Start 116; Stop 140
aatagagatacgttttgaaagtagg

SEQ ID NO: 254987 - DNA, 25 bp, Artificial
  probe
  misc_feature (1)..(25): SEQ ID NO: 64; WAN0249NJ; Start 70; Stop 94
acatctgtccctttgtttactaaat

SEQ ID NO: 254988 - DNA, 25 bp, Artificial
  probe
  misc_feature (1)..(25): SEQ ID NO: 64; WAN0249NJ; Start 71; Stop 95
catctgtccctttgtttactaaatt

SEQ ID NO: 254989 - DNA, 25 bp, Artificial
  probe
  misc_feature (1)..(25): SEQ ID NO: 64; WAN0249NJ; Start 69; Stop 93
aacatctgtccctttgtttactaaa

SEQ ID NO: 254990 - DNA, 25 bp, Artificial
  probe
  misc_feature (1)..(25): SEQ ID NO: 65; WAN024A7H; Start 26; Stop 50
agcctgctttactattgattcttat

SEQ ID NO: 254991 - DNA, 25 bp, Artificial
  probe
  misc_feature (1)..(25): SEQ ID NO: 65; WAN024A7H; Start 19; Stop 43
ccatctaagcctgctttactattga

SEQ ID NO: 254992 - DNA, 25 bp, Artificial
  probe
  misc_feature (1)..(25): SEQ ID NO: 65; WAN024A7H; Start 17; Stop 41
gaccatctaagcctgctttactatt

SEQ ID NO: 254993 - DNA, 25 bp, Artificial
  probe
  misc_feature (1)..(25): SEQ ID NO: 65; WAN024A7H; Start 18; Stop 42
accatctaagcctgctttactattg

SEQ ID NO: 254994 - DNA, 25 bp, Artificial
  probe
  misc_feature (1)..(25): SEQ ID NO: 65; WAN024A7H; Start 16; Stop 40
agaccatctaagcctgctttactat

SEQ ID NO: 254995 - DNA, 25 bp, Artificial
  probe
  misc_feature (1)..(25): SEQ ID NO: 65; WAN024A7H; Start 23; Stop 47
ctaagcctgctttactattgattct

SEQ ID NO: 254996 - DNA, 25 bp, Artificial
  probe
  misc_feature (1)..(25): SEQ ID NO: 65; WAN024A7H; Start 22; Stop 46
tctaagcctgctttactattgattc

SEQ ID NO: 254997 - DNA, 25 bp, Artificial
  probe
  misc_feature (1)..(25): SEQ ID NO: 65; WAN024A7H; Start 20; Stop 44
catctaagcctgctttactattgat

SEQ ID NO: 254998 - DNA, 25 bp, Artificial
  probe
  misc_feature (1)..(25): SEQ ID NO: 65; WAN024A7H; Start 65; Stop 89
aacaaggaaaggcatttctgataac

SEQ ID NO: 254999 - DNA, 25 bp, Artificial
  probe
  misc_feature (1)..(25): SEQ ID NO: 65; WAN024A7H; Start 64; Stop 88
gaacaaggaaaggcatttctgataa

SEQ ID NO: 255000 - DNA, 25 bp, Artificial
  probe
  misc_feature (1)..(25): SEQ ID NO: 65; WAN024A7H; Start 63; Stop 87
tgaacaaggaaaggcatttctgata

SEQ ID NO: 255001 - DNA, 25 bp, Artificial
  probe
  misc_feature (1)..(25): SEQ ID NO: 65; WAN024A7H; Start 25; Stop 49
aagcctgctttactattgattctta

SEQ ID NO: 255002 - DNA, 25 bp, Artificial
  probe
  misc_feature (1)..(25): SEQ ID NO: 65; WAN024A7H; Start 24; Stop 48
taagcctgctttactattgattctt

SEQ ID NO: 255003 - DNA, 25 bp, Artificial
  probe
  misc_feature (1)..(25): SEQ ID NO: 65; WAN024A7H; Start 21; Stop 45
atctaagcctgctttactattgatt

SEQ ID NO: 255004 - DNA, 25 bp, Artificial
  probe
  misc_feature (1)..(25): SEQ ID NO: 65; WAN024A7H; Start 27; Stop 51
gcctgctttactattgattcttata

SEQ ID NO: 255005 - DNA, 25 bp, Artificial
  probe
  misc_feature (1)..(25): SEQ ID NO: 65; WAN024A7H; Start 15; Stop 39
cagaccatctaagcctgctttacta

SEQ ID NO: 255006 - DNA, 25 bp, Artificial
  probe
  misc_feature (1)..(25): SEQ ID NO: 65; WAN024A7H; Start 62; Stop 86
gtgaacaaggaaaggcatttctgat

SEQ ID NO: 255007 - DNA, 25 bp, Artificial
  probe
  misc_feature (1)..(25): SEQ ID NO: 65; WAN024A7H; Start 60; Stop 84
ctgtgaacaaggaaaggcatttctg

SEQ ID NO: 255008 - DNA, 25 bp, Artificial
  probe
  misc_feature (1)..(25): SEQ ID NO: 65; WAN024A7H; Start 61; Stop 85
tgtgaacaaggaaaggcatttctga

SEQ ID NO: 255009 - DNA, 25 bp, Artificial
  probe
  misc_feature (1)..(25): SEQ ID NO: 65; WAN024A7H; Start 59; Stop 83
cctgtgaacaaggaaaggcatttct

SEQ ID NO: 255010 - DNA, 25 bp, Artificial
  probe
  misc_feature (1)..(25): SEQ ID NO: 65; WAN024A7H; Start 58; Stop 82
tcctgtgaacaaggaaaggcatttc

SEQ ID NO: 255011 - DNA, 25 bp, Artificial
  probe
  misc_feature (1)..(25): SEQ ID NO: 65; WAN024A7H; Start 47; Stop 71
ttatataaatttcctgtgaacaagg

SEQ ID NO: 255012 - DNA, 25 bp, Artificial
  probe
  misc_feature (1)..(25): SEQ ID NO: 65; WAN024A7H; Start 48; Stop 72
tatataaatttcctgtgaacaagga

SEQ ID NO: 255013 - DNA, 25 bp, Artificial
  probe
  misc_feature (1)..(25): SEQ ID NO: 66; WAN024AB7; Start 47; Stop 71
atcattgtcaatagatacagttaca

SEQ ID NO: 255014 - DNA, 25 bp, Artificial
  probe
  misc_feature (1)..(25): SEQ ID NO: 66; WAN024AB7; Start 4; Stop 28
aactccttaaacatatttcaagtct

SEQ ID NO: 255015 - DNA, 25 bp, Artificial
  probe
  misc_feature (1)..(25): SEQ ID NO: 66; WAN024AB7; Start 3; Stop 27
aaactccttaaacatatttcaagtc

SEQ ID NO: 255016 - DNA, 25 bp, Artificial
  probe
  misc_feature (1)..(25): SEQ ID NO: 66; WAN024AB7; Start 5; Stop 29
actccttaaacatatttcaagtcta

SEQ ID NO: 255017 - DNA, 25 bp, Artificial
  probe
  misc_feature (1)..(25): SEQ ID NO: 66; WAN024AB7; Start 48; Stop 72
tcattgtcaatagatacagttacaa

SEQ ID NO: 255018 - DNA, 25 bp, Artificial
  probe
  misc_feature (1)..(25): SEQ ID NO: 66; WAN024AB7; Start 13; Stop 37
aacatatttcaagtctattgtatcg

SEQ ID NO: 255019 - DNA, 25 bp, Artificial
  probe
  misc_feature (1)..(25): SEQ ID NO: 66; WAN024AB7; Start 14; Stop 38
acatatttcaagtctattgtatcga

SEQ ID NO: 255020 - DNA, 25 bp, Artificial
  probe
  misc_feature (1)..(25): SEQ ID NO: 66; WAN024AB7; Start 2; Stop 26
aaaactccttaaacatatttcaagt

SEQ ID NO: 255021 - DNA, 25 bp, Artificial
  probe
  misc_feature (1)..(25): SEQ ID NO: 66; WAN024AB7; Start 49; Stop 73
cattgtcaatagatacagttacaaa

SEQ ID NO: 255022 - DNA, 25 bp, Artificial
  probe
  misc_feature (1)..(25): SEQ ID NO: 67; WAN024AD7; Start 11; Stop 35
gggatttcctcgactctttacatat

SEQ ID NO: 255023 - DNA, 25 bp, Artificial
  probe
  misc_feature (1)..(25): SEQ ID NO: 67; WAN024AD7; Start 12; Stop 36
ggatttcctcgactctttacatatt

SEQ ID NO: 255024 - DNA, 25 bp, Artificial
  probe
  misc_feature (1)..(25): SEQ ID NO: 67; WAN024AD7; Start 10; Stop 34
agggatttcctcgactctttacata

SEQ ID NO: 255025 - DNA, 25 bp, Artificial
  probe
  misc_feature (1)..(25): SEQ ID NO: 67; WAN024AD7; Start 17; Stop 41
tcctcgactctttacatattatttg

SEQ ID NO: 255026 - DNA, 25 bp, Artificial
  probe
  misc_feature (1)..(25): SEQ ID NO: 67; WAN024AD7; Start 18; Stop 42
cctcgactctttacatattatttgt

SEQ ID NO: 255027 - DNA, 25 bp, Artificial
  probe
  misc_feature (1)..(25): SEQ ID NO: 67; WAN024AD7; Start 13; Stop 37
gatttcctcgactctttacatatta

SEQ ID NO: 255028 - DNA, 25 bp, Artificial
  probe
  misc_feature (1)..(25): SEQ ID NO: 67; WAN024AD7; Start 21; Stop 45
cgactctttacatattatttgttcg

SEQ ID NO: 255029 - DNA, 25 bp, Artificial
  probe
  misc_feature (1)..(25): SEQ ID NO: 67; WAN024AD7; Start 22; Stop 46
gactctttacatattatttgttcgt

SEQ ID NO: 255030 - DNA, 25 bp, Artificial
  probe
  misc_feature (1)..(25): SEQ ID NO: 67; WAN024AD7; Start 16; Stop 40
ttcctcgactctttacatattattt

SEQ ID NO: 255031 - DNA, 25 bp, Artificial
  probe
  misc_feature (1)..(25): SEQ ID NO: 67; WAN024AD7; Start 15; Stop 39
tttcctcgactctttacatattatt

SEQ ID NO: 255032 - DNA, 25 bp, Artificial
  probe
  misc_feature (1)..(25): SEQ ID NO: 67; WAN024AD7; Start 14; Stop 38
atttcctcgactctttacatattat

SEQ ID NO: 255033 - DNA, 25 bp, Artificial
  probe
  misc_feature (1)..(25): SEQ ID NO: 67; WAN024AD7; Start 23; Stop 47
actctttacatattatttgttcgtt

SEQ ID NO: 255034 - DNA, 25 bp, Artificial
  probe
  misc_feature (1)..(25): SEQ ID NO: 67; WAN024AD7; Start 20; Stop 44
tcgactctttacatattatttgttc

SEQ ID NO: 255035 - DNA, 25 bp, Artificial
  probe
  misc_feature (1)..(25): SEQ ID NO: 67; WAN024AD7; Start 19; Stop 43
ctcgactctttacatattatttgtt

SEQ ID NO: 255036 - DNA, 25 bp, Artificial
  probe
  misc_feature (1)..(25): SEQ ID NO: 67; WAN024AD7; Start 9; Stop 33
gagggatttcctcgactctttacat

SEQ ID NO: 255037 - DNA, 25 bp, Artificial
  probe
  misc_feature (1)..(25): SEQ ID NO: 68; WAN0249EO; Start 3; Stop 27
aaatagggagttggtgaagattatc

SEQ ID NO: 255038 - DNA, 25 bp, Artificial
  probe
  misc_feature (1)..(25): SEQ ID NO: 68; WAN0249EO; Start 8; Stop 32
gggagttggtgaagattatccttta

SEQ ID NO: 255039 - DNA, 25 bp, Artificial
  probe
  misc_feature (1)..(25): SEQ ID NO: 68; WAN0249EO; Start 4; Stop 28
aatagggagttggtgaagattatcc

SEQ ID NO: 255040 - DNA, 25 bp, Artificial
  probe
  misc_feature (1)..(25): SEQ ID NO: 68; WAN0249EO; Start 5; Stop 29
atagggagttggtgaagattatcct

SEQ ID NO: 255041 - DNA, 25 bp, Artificial
  probe
  misc_feature (1)..(25): SEQ ID NO: 68; WAN0249EO; Start 6; Stop 30
tagggagttggtgaagattatcctt

SEQ ID NO: 255042 - DNA, 25 bp, Artificial
  probe
  misc_feature (1)..(25): SEQ ID NO: 68; WAN0249EO; Start 9; Stop 33
ggagttggtgaagattatcctttac

SEQ ID NO: 255043 - DNA, 25 bp, Artificial
  probe
  misc_feature (1)..(25): SEQ ID NO: 68; WAN0249EO; Start 10; Stop 34
gagttggtgaagattatcctttacc

SEQ ID NO: 255044 - DNA, 25 bp, Artificial
  probe
  misc_feature (1)..(25): SEQ ID NO: 68; WAN0249EO; Start 7; Stop 31
agggagttggtgaagattatccttt

SEQ ID NO: 255045 - DNA, 25 bp, Artificial
  probe
  misc_feature (1)..(25): SEQ ID NO: 68; WAN0249EO; Start 2; Stop 26
aaaatagggagttggtgaagattat

SEQ ID NO: 255046 - DNA, 25 bp, Artificial
  probe
  misc_feature (1)..(25): SEQ ID NO: 68; WAN0249EO; Start 11; Stop 35
agttggtgaagattatcctttacca

SEQ ID NO: 255047 - DNA, 25 bp, Artificial
  probe
  misc_feature (1)..(25): SEQ ID NO: 68; WAN0249EO; Start 12; Stop 36
gttggtgaagattatcctttaccag

SEQ ID NO: 255048 - DNA, 25 bp, Artificial
  probe
  misc_feature (1)..(25): SEQ ID NO: 68; WAN0249EO; Start 13; Stop 37
ttggtgaagattatcctttaccagc

SEQ ID NO: 255049 - DNA, 25 bp, Artificial
  probe
  misc_feature (1)..(25): SEQ ID NO: 68; WAN0249EO; Start 16; Stop 40
gtgaagattatcctttaccagcgcc

SEQ ID NO: 255050 - DNA, 25 bp, Artificial
  probe
  misc_feature (1)..(25): SEQ ID NO: 68; WAN0249EO; Start 14; Stop 38
tggtgaagattatcctttaccagcg

SEQ ID NO: 255051 - DNA, 25 bp, Artificial
  probe
  misc_feature (1)..(25): SEQ ID NO: 68; WAN0249EO; Start 20; Stop 44
agattatcctttaccagcgcccttt

SEQ ID NO: 255052 - DNA, 25 bp, Artificial
  probe
  misc_feature (1)..(25): SEQ ID NO: 68; WAN0249EO; Start 19; Stop 43
aagattatcctttaccagcgccctt

SEQ ID NO: 255053 - DNA, 25 bp, Artificial
  probe
  misc_feature (1)..(25): SEQ ID NO: 68; WAN0249EO; Start 15; Stop 39
ggtgaagattatcctttaccagcgc

SEQ ID NO: 255054 - DNA, 25 bp, Artificial
  probe
  misc_feature (1)..(25): SEQ ID NO: 68; WAN0249EO; Start 18; Stop 42
gaagattatcctttaccagcgccct

SEQ ID NO: 255055 - DNA, 25 bp, Artificial
  probe
  misc_feature (1)..(25): SEQ ID NO: 68; WAN0249EO; Start 21; Stop 45
gattatcctttaccagcgccctttt

SEQ ID NO: 255056 - DNA, 25 bp, Artificial
  probe
  misc_feature (1)..(25): SEQ ID NO: 68; WAN0249EO; Start 17; Stop 41
tgaagattatcctttaccagcgccc

SEQ ID NO: 255057 - DNA, 25 bp, Artificial
  probe
  misc_feature (1)..(25): SEQ ID NO: 69; WAN0249LK; Start 34; Stop 58
actaagagtaggaaattgatgcctt

SEQ ID NO: 255058 - DNA, 25 bp, Artificial
  probe
  misc_feature (1)..(25): SEQ ID NO: 69; WAN0249LK; Start 35; Stop 59
ctaagagtaggaaattgatgccttg

SEQ ID NO: 255059 - DNA, 25 bp, Artificial
  probe
  misc_feature (1)..(25): SEQ ID NO: 69; WAN0249LK; Start 36; Stop 60
taagagtaggaaattgatgccttgc

SEQ ID NO: 255060 - DNA, 25 bp, Artificial
  probe
  misc_feature (1)..(25): SEQ ID NO: 69; WAN0249LK; Start 46; Stop 70
aaattgatgccttgctctgatttca

SEQ ID NO: 255061 - DNA, 25 bp, Artificial
  probe
  misc_feature (1)..(25): SEQ ID NO: 69; WAN0249LK; Start 57; Stop 81
ttgctctgatttcagttctatggtt

SEQ ID NO: 255062 - DNA, 25 bp, Artificial
  probe
  misc_feature (1)..(25): SEQ ID NO: 69; WAN0249LK; Start 56; Stop 80
cttgctctgatttcagttctatggt

SEQ ID NO: 255063 - DNA, 25 bp, Artificial
  probe
  misc_feature (1)..(25): SEQ ID NO: 69; WAN0249LK; Start 33; Stop 57
tactaagagtaggaaattgatgcct

SEQ ID NO: 255064 - DNA, 25 bp, Artificial
  probe
  misc_feature (1)..(25): SEQ ID NO: 69; WAN0249LK; Start 60; Stop 84
ctctgatttcagttctatggttgtt

SEQ ID NO: 255065 - DNA, 25 bp, Artificial
  probe
  misc_feature (1)..(25): SEQ ID NO: 69; WAN0249LK; Start 59; Stop 83
gctctgatttcagttctatggttgt

SEQ ID NO: 255066 - DNA, 25 bp, Artificial
  probe
  misc_feature (1)..(25): SEQ ID NO: 69; WAN0249LK; Start 58; Stop 82
tgctctgatttcagttctatggttg

SEQ ID NO: 255067 - DNA, 25 bp, Artificial
  probe
  misc_feature (1)..(25): SEQ ID NO: 69; WAN0249LK; Start 31; Stop 55
cgtactaagagtaggaaattgatgc

SEQ ID NO: 255068 - DNA, 25 bp, Artificial
  probe
  misc_feature (1)..(25): SEQ ID NO: 69; WAN0249LK; Start 44; Stop 68
ggaaattgatgccttgctctgattt

SEQ ID NO: 255069 - DNA, 25 bp, Artificial
  probe
  misc_feature (1)..(25): SEQ ID NO: 69; WAN0249LK; Start 32; Stop 56
gtactaagagtaggaaattgatgcc

SEQ ID NO: 255070 - DNA, 25 bp, Artificial
  probe
  misc_feature (1)..(25): SEQ ID NO: 69; WAN0249LK; Start 55; Stop 79
ccttgctctgatttcagttctatgg

SEQ ID NO: 255071 - DNA, 25 bp, Artificial
  probe
  misc_feature (1)..(25): SEQ ID NO: 69; WAN0249LK; Start 67; Stop 91
ttcagttctatggttgttagacttt

SEQ ID NO: 255072 - DNA, 25 bp, Artificial
  probe
  misc_feature (1)..(25): SEQ ID NO: 69; WAN0249LK; Start 66; Stop 90
tttcagttctatggttgttagactt

SEQ ID NO: 255073 - DNA, 25 bp, Artificial
  probe
  misc_feature (1)..(25): SEQ ID NO: 69; WAN0249LK; Start 65; Stop 89
atttcagttctatggttgttagact

SEQ ID NO: 255074 - DNA, 25 bp, Artificial
  probe
  misc_feature (1)..(25): SEQ ID NO: 69; WAN0249LK; Start 63; Stop 87
tgatttcagttctatggttgttaga

SEQ ID NO: 255075 - DNA, 25 bp, Artificial
  probe
  misc_feature (1)..(25): SEQ ID NO: 69; WAN0249LK; Start 42; Stop 66
taggaaattgatgccttgctctgat

SEQ ID NO: 255076 - DNA, 25 bp, Artificial
  probe
  misc_feature (1)..(25): SEQ ID NO: 69; WAN0249LK; Start 54; Stop 78
gccttgctctgatttcagttctatg

SEQ ID NO: 255077 - DNA, 25 bp, Artificial
  probe
  misc_feature (1)..(25): SEQ ID NO: 69; WAN0249LK; Start 37; Stop 61
aagagtaggaaattgatgccttgct

SEQ ID NO: 255078 - DNA, 25 bp, Artificial
  probe
  misc_feature (1)..(25): SEQ ID NO: 69; WAN0249LK; Start 8; Stop 32
ttcacttcaaccatcaaaatagacg

SEQ ID NO: 255079 - DNA, 25 bp, Artificial
  probe
  misc_feature (1)..(25): SEQ ID NO: 69; WAN0249LK; Start 64; Stop 88
gatttcagttctatggttgttagac

SEQ ID NO: 255080 - DNA, 25 bp, Artificial
  probe
  misc_feature (1)..(25): SEQ ID NO: 69; WAN0249LK; Start 61; Stop 85
tctgatttcagttctatggttgtta

SEQ ID NO: 255081 - DNA, 25 bp, Artificial
  probe
  misc_feature (1)..(25): SEQ ID NO: 69; WAN0249LK; Start 47; Stop 71
aattgatgccttgctctgatttcag

SEQ ID NO: 255082 - DNA, 25 bp, Artificial
  probe
  misc_feature (1)..(25): SEQ ID NO: 69; WAN0249LK; Start 53; Stop 77
tgccttgctctgatttcagttctat

SEQ ID NO: 255083 - DNA, 25 bp, Artificial
  probe
  misc_feature (1)..(25): SEQ ID NO: 69; WAN0249LK; Start 52; Stop 76
atgccttgctctgatttcagttcta

SEQ ID NO: 255084 - DNA, 25 bp, Artificial
  probe
  misc_feature (1)..(25): SEQ ID NO: 69; WAN0249LK; Start 62; Stop 86
ctgatttcagttctatggttgttag

SEQ ID NO: 255085 - DNA, 25 bp, Artificial
  probe
  misc_feature (1)..(25): SEQ ID NO: 69; WAN0249LK; Start 68; Stop 92
tcagttctatggttgttagacttta

SEQ ID NO: 255086 - DNA, 25 bp, Artificial
  probe
  misc_feature (1)..(25): SEQ ID NO: 69; WAN0249LK; Start 39; Stop 63
gagtaggaaattgatgccttgctct

SEQ ID NO: 255087 - DNA, 25 bp, Artificial
  probe
  misc_feature (1)..(25): SEQ ID NO: 69; WAN0249LK; Start 38; Stop 62
agagtaggaaattgatgccttgctc

SEQ ID NO: 255088 - DNA, 25 bp, Artificial
  probe
  misc_feature (1)..(25): SEQ ID NO: 69; WAN0249LK; Start 7; Stop 31
cttcacttcaaccatcaaaatagac

SEQ ID NO: 255089 - DNA, 25 bp, Artificial
  probe
  misc_feature (1)..(25): SEQ ID NO: 69; WAN0249LK; Start 43; Stop 67
aggaaattgatgccttgctctgatt

SEQ ID NO: 255090 - DNA, 25 bp, Artificial
  probe
  misc_feature (1)..(25): SEQ ID NO: 70; WAN024AHJ; Start 145; Stop 169
tagtgtttcggtttagatagttcgt

SEQ ID NO: 255091 - DNA, 25 bp, Artificial
  probe
  misc_feature (1)..(25): SEQ ID NO: 70; WAN024AHJ; Start 70; Stop 94
aatacctaccatcttatcgggacta

SEQ ID NO: 255092 - DNA, 25 bp, Artificial
  probe
  misc_feature (1)..(25): SEQ ID NO: 70; WAN024AHJ; Start 147; Stop 171
gtgtttcggtttagatagttcgttc

SEQ ID NO: 255093 - DNA, 25 bp, Artificial
  probe
  misc_feature (1)..(25): SEQ ID NO: 70; WAN024AHJ; Start 144; Stop 168
gtagtgtttcggtttagatagttcg

SEQ ID NO: 255094 - DNA, 25 bp, Artificial
  probe
  misc_feature (1)..(25): SEQ ID NO: 70; WAN024AHJ; Start 71; Stop 95
atacctaccatcttatcgggactat

SEQ ID NO: 255095 - DNA, 25 bp, Artificial
  probe
  misc_feature (1)..(25): SEQ ID NO: 70; WAN024AHJ; Start 146; Stop 170
agtgtttcggtttagatagttcgtt

SEQ ID NO: 255096 - DNA, 25 bp, Artificial
  probe
  misc_feature (1)..(25): SEQ ID NO: 70; WAN024AHJ; Start 73; Stop 97
acctaccatcttatcgggactatat

SEQ ID NO: 255097 - DNA, 25 bp, Artificial
  probe
  misc_feature (1)..(25): SEQ ID NO: 70; WAN024AHJ; Start 69; Stop 93
aaatacctaccatcttatcgggact

SEQ ID NO: 255098 - DNA, 25 bp, Artificial
  probe
  misc_feature (1)..(25): SEQ ID NO: 70; WAN024AHJ; Start 133; Stop 157
cagtctttaatgtagtgtttcggtt

SEQ ID NO: 255099 - DNA, 25 bp, Artificial
  probe
  misc_feature (1)..(25): SEQ ID NO: 70; WAN024AHJ; Start 68; Stop 92
taaatacctaccatcttatcgggac

SEQ ID NO: 255100 - DNA, 25 bp, Artificial
  probe
  misc_feature (1)..(25): SEQ ID NO: 70; WAN024AHJ; Start 72; Stop 96
tacctaccatcttatcgggactata

SEQ ID NO: 255101 - DNA, 25 bp, Artificial
  probe
  misc_feature (1)..(25): SEQ ID NO: 70; WAN024AHJ; Start 151; Stop 175
ttcggtttagatagttcgttctcat

SEQ ID NO: 255102 - DNA, 25 bp, Artificial
  probe
  misc_feature (1)..(25): SEQ ID NO: 70; WAN024AHJ; Start 150; Stop 174
tttcggtttagatagttcgttctca

SEQ ID NO: 255103 - DNA, 25 bp, Artificial
  probe
  misc_feature (1)..(25): SEQ ID NO: 70; WAN024AHJ; Start 149; Stop 173
gtttcggtttagatagttcgttctc

SEQ ID NO: 255104 - DNA, 25 bp, Artificial
  probe
  misc_feature (1)..(25): SEQ ID NO: 70; WAN024AHJ; Start 148; Stop 172
tgtttcggtttagatagttcgttct

SEQ ID NO: 255105 - DNA, 25 bp, Artificial
  probe
  misc_feature (1)..(25): SEQ ID NO: 70; WAN024AHJ; Start 134; Stop 158
agtctttaatgtagtgtttcggttt

SEQ ID NO: 255106 - DNA, 25 bp, Artificial
  probe
  misc_feature (1)..(25): SEQ ID NO: 70; WAN024AHJ; Start 143; Stop 167
tgtagtgtttcggtttagatagttc

SEQ ID NO: 255107 - DNA, 25 bp, Artificial
  probe
  misc_feature (1)..(25): SEQ ID NO: 70; WAN024AHJ; Start 152; Stop 176
tcggtttagatagttcgttctcata

SEQ ID NO: 255108 - DNA, 25 bp, Artificial
  probe
  misc_feature (1)..(25): SEQ ID NO: 70; WAN024AHJ; Start 132; Stop 156
gcagtctttaatgtagtgtttcggt

SEQ ID NO: 255109 - DNA, 25 bp, Artificial
  probe
  misc_feature (1)..(25): SEQ ID NO: 70; WAN024AHJ; Start 153; Stop 177
cggtttagatagttcgttctcataa

SEQ ID NO: 255110 - DNA, 25 bp, Artificial
  probe
  misc_feature (1)..(25): SEQ ID NO: 70; WAN024AHJ; Start 142; Stop 166
atgtagtgtttcggtttagatagtt

SEQ ID NO: 255111 - DNA, 25 bp, Artificial
  probe
  misc_feature (1)..(25): SEQ ID NO: 70; WAN024AHJ; Start 141; Stop 165
aatgtagtgtttcggtttagatagt

SEQ ID NO: 255112 - DNA, 25 bp, Artificial
  probe
  misc_feature (1)..(25): SEQ ID NO: 70; WAN024AHJ; Start 67; Stop 91
ataaatacctaccatcttatcggga

SEQ ID NO: 255113 - DNA, 25 bp, Artificial
  probe
  misc_feature (1)..(25): SEQ ID NO: 70; WAN024AHJ; Start 135; Stop 159
gtctttaatgtagtgtttcggttta

SEQ ID NO: 255114 - DNA, 25 bp, Artificial
  probe
  misc_feature (1)..(25): SEQ ID NO: 70; WAN024AHJ; Start 74; Stop 98
cctaccatcttatcgggactatata

SEQ ID NO: 255115 - DNA, 25 bp, Artificial
  probe
  misc_feature (1)..(25): SEQ ID NO: 70; WAN024AHJ; Start 66; Stop 90
aataaatacctaccatcttatcggg

SEQ ID NO: 255116 - DNA, 25 bp, Artificial
  probe
  misc_feature (1)..(25): SEQ ID NO: 70; WAN024AHJ; Start 77; Stop 101
accatcttatcgggactatataact

SEQ ID NO: 255117 - DNA, 25 bp, Artificial
  probe
  misc_feature (1)..(25): SEQ ID NO: 70; WAN024AHJ; Start 137; Stop 161
ctttaatgtagtgtttcggtttaga

SEQ ID NO: 255118 - DNA, 25 bp, Artificial
  probe
  misc_feature (1)..(25): SEQ ID NO: 70; WAN024AHJ; Start 136; Stop 160
tctttaatgtagtgtttcggtttag

SEQ ID NO: 255119 - DNA, 25 bp, Artificial
  probe
  misc_feature (1)..(25): SEQ ID NO: 70; WAN024AHJ; Start 56; Stop 80
aactcttcgtaataaatacctacca

SEQ ID NO: 255120 - DNA, 25 bp, Artificial
  probe
  misc_feature (1)..(25): SEQ ID NO: 70; WAN024AHJ; Start 130; Stop 154
ttgcagtctttaatgtagtgtttcg

SEQ ID NO: 255121 - DNA, 25 bp, Artificial
  probe
  misc_feature (1)..(25): SEQ ID NO: 70; WAN024AHJ; Start 57; Stop 81
actcttcgtaataaatacctaccat

SEQ ID NO: 255122 - DNA, 25 bp, Artificial
  probe
  misc_feature (1)..(25): SEQ ID NO: 70; WAN024AHJ; Start 131; Stop 155
tgcagtctttaatgtagtgtttcgg

SEQ ID NO: 255123 - DNA, 25 bp, Artificial
  probe
  misc_feature (1)..(25): SEQ ID NO: 71; WAN0249DW; Start 7; Stop 31
atgaaaagaactccagtgaaaacag

SEQ ID NO: 255124 - DNA, 25 bp, Artificial
  probe
  misc_feature (1)..(25): SEQ ID NO: 71; WAN0249DW; Start 6; Stop 30
aatgaaaagaactccagtgaaaaca

SEQ ID NO: 255125 - DNA, 25 bp, Artificial
  probe
  misc_feature (1)..(25): SEQ ID NO: 71; WAN0249DW; Start 4; Stop 28
acaatgaaaagaactccagtgaaaa

SEQ ID NO: 255126 - DNA, 25 bp, Artificial
  probe
  misc_feature (1)..(25): SEQ ID NO: 71; WAN0249DW; Start 3; Stop 27
aacaatgaaaagaactccagtgaaa

SEQ ID NO: 255127 - DNA, 25 bp, Artificial
  probe
  misc_feature (1)..(25): SEQ ID NO: 71; WAN0249DW; Start 2; Stop 26
aaacaatgaaaagaactccagtgaa

SEQ ID NO: 255128 - DNA, 25 bp, Artificial
  probe
  misc_feature (1)..(25): SEQ ID NO: 71; WAN0249DW; Start 1; Stop 25
aaaacaatgaaaagaactccagtga

SEQ ID NO: 255129 - DNA, 25 bp, Artificial
  probe
  misc_feature (1)..(25): SEQ ID NO: 71; WAN0249DW; Start 5; Stop 29
caatgaaaagaactccagtgaaaac

SEQ ID NO: 255130 - DNA, 25 bp, Artificial
  probe
  misc_feature (1)..(25): SEQ ID NO: 71; WAN0249DW; Start 8; Stop 32
tgaaaagaactccagtgaaaacagg

SEQ ID NO: 255131 - DNA, 25 bp, Artificial
  probe
  misc_feature (1)..(25): SEQ ID NO: 71; WAN0249DW; Start 19; Stop 43
ccagtgaaaacaggagttcttttac

SEQ ID NO: 255132 - DNA, 25 bp, Artificial
  probe
  misc_feature (1)..(25): SEQ ID NO: 71; WAN0249DW; Start 20; Stop 44
cagtgaaaacaggagttcttttaca

SEQ ID NO: 255133 - DNA, 25 bp, Artificial
  probe
  misc_feature (1)..(25): SEQ ID NO: 71; WAN0249DW; Start 18; Stop 42
tccagtgaaaacaggagttctttta

SEQ ID NO: 255134 - DNA, 25 bp, Artificial
  probe
  misc_feature (1)..(25): SEQ ID NO: 71; WAN0249DW; Start 21; Stop 45
agtgaaaacaggagttcttttacaa

SEQ ID NO: 255135 - DNA, 25 bp, Artificial
  probe
  misc_feature (1)..(25): SEQ ID NO: 71; WAN0249DW; Start 9; Stop 33
gaaaagaactccagtgaaaacagga

SEQ ID NO: 255136 - DNA, 25 bp, Artificial
  probe
  misc_feature (1)..(25): SEQ ID NO: 71; WAN0249DW; Start 24; Stop 48
gaaaacaggagttcttttacaatgt

SEQ ID NO: 255137 - DNA, 25 bp, Artificial
  probe
  misc_feature (1)..(25): SEQ ID NO: 71; WAN0249DW; Start 23; Stop 47
tgaaaacaggagttcttttacaatg

SEQ ID NO: 255138 - DNA, 25 bp, Artificial
  probe
  misc_feature (1)..(25): SEQ ID NO: 71; WAN0249DW; Start 22; Stop 46
gtgaaaacaggagttcttttacaat

SEQ ID NO: 255139 - DNA, 25 bp, Artificial
  probe
  misc_feature (1)..(25): SEQ ID NO: 71; WAN0249DW; Start 26; Stop 50
aaacaggagttcttttacaatgttg

SEQ ID NO: 255140 - DNA, 25 bp, Artificial
  probe
  misc_feature (1)..(25): SEQ ID NO: 71; WAN0249DW; Start 25; Stop 49
aaaacaggagttcttttacaatgtt

SEQ ID NO: 255141 - DNA, 25 bp, Artificial
  probe
  misc_feature (1)..(25): SEQ ID NO: 71; WAN0249DW; Start 17; Stop 41
ctccagtgaaaacaggagttctttt

SEQ ID NO: 255142 - DNA, 25 bp, Artificial
  probe
  misc_feature (1)..(25): SEQ ID NO: 71; WAN0249DW; Start 10; Stop 34
aaaagaactccagtgaaaacaggag

SEQ ID NO: 255143 - DNA, 25 bp, Artificial
  probe
  misc_feature (1)..(25): SEQ ID NO: 72; WAN0249XL; Start 150; Stop 174
tttcttgtgctagaatgtaattcga

SEQ ID NO: 255144 - DNA, 25 bp, Artificial
  probe
  misc_feature (1)..(25): SEQ ID NO: 72; WAN0249XL; Start 90; Stop 114
tttgcctagaaagcgttttcatttt

SEQ ID NO: 255145 - DNA, 25 bp, Artificial
  probe
  misc_feature (1)..(25): SEQ ID NO: 72; WAN0249XL; Start 89; Stop 113
ttttgcctagaaagcgttttcattt

SEQ ID NO: 255146 - DNA, 25 bp, Artificial
  probe
  misc_feature (1)..(25): SEQ ID NO: 72; WAN0249XL; Start 151; Stop 175
ttcttgtgctagaatgtaattcgaa

SEQ ID NO: 255147 - DNA, 25 bp, Artificial
  probe
  misc_feature (1)..(25): SEQ ID NO: 72; WAN0249XL; Start 149; Stop 173
ttttcttgtgctagaatgtaattcg

SEQ ID NO: 255148 - DNA, 25 bp, Artificial
  probe
  misc_feature (1)..(25): SEQ ID NO: 72; WAN0249XL; Start 121; Stop 145
ttttcgtagcagaattgtgcaaaag

SEQ ID NO: 255149 - DNA, 25 bp, Artificial
  probe
  misc_feature (1)..(25): SEQ ID NO: 72; WAN0249XL; Start 125; Stop 149
cgtagcagaattgtgcaaaagtttt

SEQ ID NO: 255150 - DNA, 25 bp, Artificial
  probe
  misc_feature (1)..(25): SEQ ID NO: 72; WAN0249XL; Start 124; Stop 148
tcgtagcagaattgtgcaaaagttt

SEQ ID NO: 255151 - DNA, 25 bp, Artificial
  probe
  misc_feature (1)..(25): SEQ ID NO: 72; WAN0249XL; Start 123; Stop 147
ttcgtagcagaattgtgcaaaagtt

SEQ ID NO: 255152 - DNA, 25 bp, Artificial
  probe
  misc_feature (1)..(25): SEQ ID NO: 72; WAN0249XL; Start 122; Stop 146
tttcgtagcagaattgtgcaaaagt

SEQ ID NO: 255153 - DNA, 25 bp, Artificial
  probe
  misc_feature (1)..(25): SEQ ID NO: 72; WAN0249XL; Start 4; Stop 28
acctcctattttcgaacatttattc

SEQ ID NO: 255154 - DNA, 25 bp, Artificial
  probe
  misc_feature (1)..(25): SEQ ID NO: 72; WAN0249XL; Start 45; Stop 69
agataggattttagtttatcaagct

SEQ ID NO: 255155 - DNA, 25 bp, Artificial
  probe
  misc_feature (1)..(25): SEQ ID NO: 72; WAN0249XL; Start 5; Stop 29
cctcctattttcgaacatttattct

SEQ ID NO: 255156 - DNA, 25 bp, Artificial
  probe
  misc_feature (1)..(25): SEQ ID NO: 72; WAN0249XL; Start 3; Stop 27
aacctcctattttcgaacatttatt

SEQ ID NO: 255157 - DNA, 25 bp, Artificial
  probe
  misc_feature (1)..(25): SEQ ID NO: 72; WAN0249XL; Start 2; Stop 26
aaacctcctattttcgaacatttat

SEQ ID NO: 255158 - DNA, 25 bp, Artificial
  probe
  misc_feature (1)..(25): SEQ ID NO: 72; WAN0249XL; Start 1; Stop 25
aaaacctcctattttcgaacattta

SEQ ID NO: 255159 - DNA, 25 bp, Artificial
  probe
  misc_feature (1)..(25): SEQ ID NO: 72; WAN0249XL; Start 46; Stop 70
gataggattttagtttatcaagctt

SEQ ID NO: 255160 - DNA, 25 bp, Artificial
  probe
  misc_feature (1)..(25): SEQ ID NO: 72; WAN0249XL; Start 6; Stop 30
ctcctattttcgaacatttattcta

SEQ ID NO: 255161 - DNA, 25 bp, Artificial
  probe
  misc_feature (1)..(25): SEQ ID NO: 73; WAN0249DC; Start 137; Stop 161
actccatcatcataacactcaacaa

SEQ ID NO: 255162 - DNA, 25 bp, Artificial
  probe
  misc_feature (1)..(25): SEQ ID NO: 73; WAN0249DC; Start 135; Stop 159
agactccatcatcataacactcaac

SEQ ID NO: 255163 - DNA, 25 bp, Artificial
  probe
  misc_feature (1)..(25): SEQ ID NO: 73; WAN0249DC; Start 134; Stop 158
aagactccatcatcataacactcaa

SEQ ID NO: 255164 - DNA, 25 bp, Artificial
  probe
  misc_feature (1)..(25): SEQ ID NO: 73; WAN0249DC; Start 133; Stop 157
caagactccatcatcataacactca

SEQ ID NO: 255165 - DNA, 25 bp, Artificial
  probe
  misc_feature (1)..(25): SEQ ID NO: 73; WAN0249DC; Start 132; Stop 156
acaagactccatcatcataacactc

SEQ ID NO: 255166 - DNA, 25 bp, Artificial
  probe
  misc_feature (1)..(25): SEQ ID NO: 73; WAN0249DC; Start 136; Stop 160
gactccatcatcataacactcaaca

SEQ ID NO: 255167 - DNA, 25 bp, Artificial
  probe
  misc_feature (1)..(25): SEQ ID NO: 73; WAN0249DC; Start 131; Stop 155
cacaagactccatcatcataacact

SEQ ID NO: 255168 - DNA, 25 bp, Artificial
  probe
  misc_feature (1)..(25): SEQ ID NO: 73; WAN0249DC; Start 130; Stop 154
gcacaagactccatcatcataacac

SEQ ID NO: 255169 - DNA, 25 bp, Artificial
  probe
  misc_feature (1)..(25): SEQ ID NO: 73; WAN0249DC; Start 129; Stop 153
agcacaagactccatcatcataaca

SEQ ID NO: 255170 - DNA, 25 bp, Artificial
  probe
  misc_feature (1)..(25): SEQ ID NO: 73; WAN0249DC; Start 120; Stop 144
tagactaagagcacaagactccatc

SEQ ID NO: 255171 - DNA, 25 bp, Artificial
  probe
  misc_feature (1)..(25): SEQ ID NO: 73; WAN0249DC; Start 128; Stop 152
gagcacaagactccatcatcataac

SEQ ID NO: 255172 - DNA, 25 bp, Artificial
  probe
  misc_feature (1)..(25): SEQ ID NO: 73; WAN0249DC; Start 127; Stop 151
agagcacaagactccatcatcataa

SEQ ID NO: 255173 - DNA, 25 bp, Artificial
  probe
  misc_feature (1)..(25): SEQ ID NO: 73; WAN0249DC; Start 126; Stop 150
aagagcacaagactccatcatcata

SEQ ID NO: 255174 - DNA, 25 bp, Artificial
  probe
  misc_feature (1)..(25): SEQ ID NO: 73; WAN0249DC; Start 125; Stop 149
taagagcacaagactccatcatcat

SEQ ID NO: 255175 - DNA, 25 bp, Artificial
  probe
  misc_feature (1)..(25): SEQ ID NO: 73; WAN0249DC; Start 119; Stop 143
ctagactaagagcacaagactccat

SEQ ID NO: 255176 - DNA, 25 bp, Artificial
  probe
  misc_feature (1)..(25): SEQ ID NO: 73; WAN0249DC; Start 124; Stop 148
ctaagagcacaagactccatcatca

SEQ ID NO: 255177 - DNA, 25 bp, Artificial
  probe
  misc_feature (1)..(25): SEQ ID NO: 73; WAN0249DC; Start 123; Stop 147
actaagagcacaagactccatcatc

SEQ ID NO: 255178 - DNA, 25 bp, Artificial
  probe
  misc_feature (1)..(25): SEQ ID NO: 73; WAN0249DC; Start 122; Stop 146
gactaagagcacaagactccatcat

SEQ ID NO: 255179 - DNA, 25 bp, Artificial
  probe
  misc_feature (1)..(25): SEQ ID NO: 73; WAN0249DC; Start 138; Stop 162
ctccatcatcataacactcaacaaa

SEQ ID NO: 255180 - DNA, 25 bp, Artificial
  probe
  misc_feature (1)..(25): SEQ ID NO: 73; WAN0249DC; Start 54; Stop 78
cgtctactatcccaacttatgatga

SEQ ID NO: 255181 - DNA, 25 bp, Artificial
  probe
  misc_feature (1)..(25): SEQ ID NO: 73; WAN0249DC; Start 40; Stop 64
atttcgtaaacaagcgtctactatc

SEQ ID NO: 255182 - DNA, 25 bp, Artificial
  probe
  misc_feature (1)..(25): SEQ ID NO: 73; WAN0249DC; Start 35; Stop 59
aaacaatttcgtaaacaagcgtcta

SEQ ID NO: 255183 - DNA, 25 bp, Artificial
  probe
  misc_feature (1)..(25): SEQ ID NO: 73; WAN0249DC; Start 38; Stop 62
caatttcgtaaacaagcgtctacta

SEQ ID NO: 255184 - DNA, 25 bp, Artificial
  probe
  misc_feature (1)..(25): SEQ ID NO: 73; WAN0249DC; Start 41; Stop 65
tttcgtaaacaagcgtctactatcc

SEQ ID NO: 255185 - DNA, 25 bp, Artificial
  probe
  misc_feature (1)..(25): SEQ ID NO: 73; WAN0249DC; Start 53; Stop 77
gcgtctactatcccaacttatgatg

SEQ ID NO: 255186 - DNA, 25 bp, Artificial
  probe
  misc_feature (1)..(25): SEQ ID NO: 73; WAN0249DC; Start 52; Stop 76
agcgtctactatcccaacttatgat

SEQ ID NO: 255187 - DNA, 25 bp, Artificial
  probe
  misc_feature (1)..(25): SEQ ID NO: 73; WAN0249DC; Start 36; Stop 60
aacaatttcgtaaacaagcgtctac

SEQ ID NO: 255188 - DNA, 25 bp, Artificial
  probe
  misc_feature (1)..(25): SEQ ID NO: 73; WAN0249DC; Start 50; Stop 74
caagcgtctactatcccaacttatg

SEQ ID NO: 255189 - DNA, 25 bp, Artificial
  probe
  misc_feature (1)..(25): SEQ ID NO: 73; WAN0249DC; Start 51; Stop 75
aagcgtctactatcccaacttatga

SEQ ID NO: 255190 - DNA, 25 bp, Artificial
  probe
  misc_feature (1)..(25): SEQ ID NO: 73; WAN0249DC; Start 39; Stop 63
aatttcgtaaacaagcgtctactat

SEQ ID NO: 255191 - DNA, 25 bp, Artificial
  probe
  misc_feature (1)..(25): SEQ ID NO: 73; WAN0249DC; Start 61; Stop 85
tatcccaacttatgatgagtgttcc

SEQ ID NO: 255192 - DNA, 25 bp, Artificial
  probe
  misc_feature (1)..(25): SEQ ID NO: 73; WAN0249DC; Start 46; Stop 70
taaacaagcgtctactatcccaact

SEQ ID NO: 255193 - DNA, 25 bp, Artificial
  probe
  misc_feature (1)..(25): SEQ ID NO: 73; WAN0249DC; Start 45; Stop 69
gtaaacaagcgtctactatcccaac

SEQ ID NO: 255194 - DNA, 25 bp, Artificial
  probe
  misc_feature (1)..(25): SEQ ID NO: 74; WAN024AME; Start 148; Stop 172
ttagacccatttcaaacgctcttta

SEQ ID NO: 255195 - DNA, 25 bp, Artificial
  probe
  misc_feature (1)..(25): SEQ ID NO: 74; WAN024AME; Start 149; Stop 173
tagacccatttcaaacgctctttaa

SEQ ID NO: 255196 - DNA, 25 bp, Artificial
  probe
  misc_feature (1)..(25): SEQ ID NO: 74; WAN024AME; Start 147; Stop 171
tttagacccatttcaaacgctcttt

SEQ ID NO: 255197 - DNA, 25 bp, Artificial
  probe
  misc_feature (1)..(25): SEQ ID NO: 74; WAN024AME; Start 81; Stop 105
tagaaattgtcgggatatttactgc

SEQ ID NO: 255198 - DNA, 25 bp, Artificial
  probe
  misc_feature (1)..(25): SEQ ID NO: 74; WAN024AME; Start 159; Stop 183
tcaaacgctctttaaattcggaata

SEQ ID NO: 255199 - DNA, 25 bp, Artificial
  probe
  misc_feature (1)..(25): SEQ ID NO: 74; WAN024AME; Start 158; Stop 182
ttcaaacgctctttaaattcggaat

SEQ ID NO: 255200 - DNA, 25 bp, Artificial
  probe
  misc_feature (1)..(25): SEQ ID NO: 74; WAN024AME; Start 157; Stop 181
tttcaaacgctctttaaattcggaa

SEQ ID NO: 255201 - DNA, 25 bp, Artificial
  probe
  misc_feature (1)..(25): SEQ ID NO: 74; WAN024AME; Start 120; Stop 144
acacacattcaattagtttcaaaca

SEQ ID NO: 255202 - DNA, 25 bp, Artificial
  probe
  misc_feature (1)..(25): SEQ ID NO: 74; WAN024AME; Start 163; Stop 187
acgctctttaaattcggaatatagg

SEQ ID NO: 255203 - DNA, 25 bp, Artificial
  probe
  misc_feature (1)..(25): SEQ ID NO: 74; WAN024AME; Start 164; Stop 188
cgctctttaaattcggaatatagga

SEQ ID NO: 255204 - DNA, 25 bp, Artificial
  probe
  misc_feature (1)..(25): SEQ ID NO: 74; WAN024AME; Start 160; Stop 184
caaacgctctttaaattcggaatat

SEQ ID NO: 255205 - DNA, 25 bp, Artificial
  probe
  misc_feature (1)..(25): SEQ ID NO: 74; WAN024AME; Start 85; Stop 109
aattgtcgggatatttactgcattt

SEQ ID NO: 255206 - DNA, 25 bp, Artificial
  probe
  misc_feature (1)..(25): SEQ ID NO: 74; WAN024AME; Start 156; Stop 180
atttcaaacgctctttaaattcgga

SEQ ID NO: 255207 - DNA, 25 bp, Artificial
  probe
  misc_feature (1)..(25): SEQ ID NO: 74; WAN024AME; Start 155; Stop 179
catttcaaacgctctttaaattcgg

SEQ ID NO: 255208 - DNA, 25 bp, Artificial
  probe
  misc_feature (1)..(25): SEQ ID NO: 74; WAN024AME; Start 154; Stop 178
ccatttcaaacgctctttaaattcg

SEQ ID NO: 255209 - DNA, 25 bp, Artificial
  probe
  misc_feature (1)..(25): SEQ ID NO: 74; WAN024AME; Start 152; Stop 176
acccatttcaaacgctctttaaatt

SEQ ID NO: 255210 - DNA, 25 bp, Artificial
  probe
  misc_feature (1)..(25): SEQ ID NO: 74; WAN024AME; Start 153; Stop 177
cccatttcaaacgctctttaaattc

SEQ ID NO: 255211 - DNA, 25 bp, Artificial
  probe
  misc_feature (1)..(25): SEQ ID NO: 74; WAN024AME; Start 150; Stop 174
agacccatttcaaacgctctttaaa

SEQ ID NO: 255212 - DNA, 25 bp, Artificial
  probe
  misc_feature (1)..(25): SEQ ID NO: 74; WAN024AME; Start 70; Stop 94
tgaattgtcaatagaaattgtcggg

SEQ ID NO: 255213 - DNA, 25 bp, Artificial
  probe
  misc_feature (1)..(25): SEQ ID NO: 74; WAN024AME; Start 151; Stop 175
gacccatttcaaacgctctttaaat

SEQ ID NO: 255214 - DNA, 25 bp, Artificial
  probe
  misc_feature (1)..(25): SEQ ID NO: 74; WAN024AME; Start 71; Stop 95
gaattgtcaatagaaattgtcggga

SEQ ID NO: 255215 - DNA, 25 bp, Artificial
  probe
  misc_feature (1)..(25): SEQ ID NO: 74; WAN024AME; Start 72; Stop 96
aattgtcaatagaaattgtcgggat

SEQ ID NO: 255216 - DNA, 25 bp, Artificial
  probe
  misc_feature (1)..(25): SEQ ID NO: 74; WAN024AME; Start 83; Stop 107
gaaattgtcgggatatttactgcat

SEQ ID NO: 255217 - DNA, 25 bp, Artificial
  probe
  misc_feature (1)..(25): SEQ ID NO: 74; WAN024AME; Start 82; Stop 106
agaaattgtcgggatatttactgca

SEQ ID NO: 255218 - DNA, 25 bp, Artificial
  probe
  misc_feature (1)..(25): SEQ ID NO: 74; WAN024AME; Start 84; Stop 108
aaattgtcgggatatttactgcatt

SEQ ID NO: 255219 - DNA, 25 bp, Artificial
  probe
  misc_feature (1)..(25): SEQ ID NO: 74; WAN024AME; Start 165; Stop 189
gctctttaaattcggaatataggac

SEQ ID NO: 255220 - DNA, 25 bp, Artificial
  probe
  misc_feature (1)..(25): SEQ ID NO: 74; WAN024AME; Start 121; Stop 145
cacacattcaattagtttcaaacat

SEQ ID NO: 255221 - DNA, 25 bp, Artificial
  probe
  misc_feature (1)..(25): SEQ ID NO: 74; WAN024AME; Start 162; Stop 186
aacgctctttaaattcggaatatag

SEQ ID NO: 255222 - DNA, 25 bp, Artificial
  probe
  misc_feature (1)..(25): SEQ ID NO: 74; WAN024AME; Start 75; Stop 99
tgtcaatagaaattgtcgggatatt

SEQ ID NO: 255223 - DNA, 25 bp, Artificial
  probe
  misc_feature (1)..(25): SEQ ID NO: 74; WAN024AME; Start 74; Stop 98
ttgtcaatagaaattgtcgggatat

SEQ ID NO: 255224 - DNA, 25 bp, Artificial
  probe
  misc_feature (1)..(25): SEQ ID NO: 74; WAN024AME; Start 73; Stop 97
attgtcaatagaaattgtcgggata

SEQ ID NO: 255225 - DNA, 25 bp, Artificial
  probe
  misc_feature (1)..(25): SEQ ID NO: 74; WAN024AME; Start 167; Stop 191
tctttaaattcggaatataggacct

SEQ ID NO: 255226 - DNA, 25 bp, Artificial
  probe
  misc_feature (1)..(25): SEQ ID NO: 74; WAN024AME; Start 161; Stop 185
aaacgctctttaaattcggaatata

SEQ ID NO: 255227 - DNA, 25 bp, Artificial
  probe
  misc_feature (1)..(25): SEQ ID NO: 75; WAN024AO2; Start 44; Stop 68
ttaaacatcagtcaaatcgctaacc

SEQ ID NO: 255228 - DNA, 25 bp, Artificial
  probe
  misc_feature (1)..(25): SEQ ID NO: 75; WAN024AO2; Start 43; Stop 67
attaaacatcagtcaaatcgctaac

SEQ ID NO: 255229 - DNA, 25 bp, Artificial
  probe
  misc_feature (1)..(25): SEQ ID NO: 75; WAN024AO2; Start 39; Stop 63
acatattaaacatcagtcaaatcgc

SEQ ID NO: 255230 - DNA, 25 bp, Artificial
  probe
  misc_feature (1)..(25): SEQ ID NO: 75; WAN024AO2; Start 40; Stop 64
catattaaacatcagtcaaatcgct

SEQ ID NO: 255231 - DNA, 25 bp, Artificial
  probe
  misc_feature (1)..(25): SEQ ID NO: 75; WAN024AO2; Start 42; Stop 66
tattaaacatcagtcaaatcgctaa

SEQ ID NO: 255232 - DNA, 25 bp, Artificial
  probe
  misc_feature (1)..(25): SEQ ID NO: 75; WAN024AO2; Start 41; Stop 65
atattaaacatcagtcaaatcgcta

SEQ ID NO: 255233 - DNA, 25 bp, Artificial
  probe
  misc_feature (1)..(25): SEQ ID NO: 75; WAN024AO2; Start 38; Stop 62
aacatattaaacatcagtcaaatcg

SEQ ID NO: 255234 - DNA, 25 bp, Artificial
  probe
  misc_feature (1)..(25): SEQ ID NO: 76; WAN0249JW; Start 13; Stop 37
atggaaacatcgggcttttgacttg

SEQ ID NO: 255235 - DNA, 25 bp, Artificial
  probe
  misc_feature (1)..(25): SEQ ID NO: 76; WAN0249JW; Start 1; Stop 25
aaaagaagcctgatggaaacatcgg

SEQ ID NO: 255236 - DNA, 25 bp, Artificial
  probe
  misc_feature (1)..(25): SEQ ID NO: 76; WAN0249JW; Start 12; Stop 36
gatggaaacatcgggcttttgactt

SEQ ID NO: 255237 - DNA, 25 bp, Artificial
  probe
  misc_feature (1)..(25): SEQ ID NO: 76; WAN0249JW; Start 10; Stop 34
ctgatggaaacatcgggcttttgac

SEQ ID NO: 255238 - DNA, 25 bp, Artificial
  probe
  misc_feature (1)..(25): SEQ ID NO: 76; WAN0249JW; Start 11; Stop 35
tgatggaaacatcgggcttttgact

SEQ ID NO: 255239 - DNA, 25 bp, Artificial
  probe
  misc_feature (1)..(25): SEQ ID NO: 76; WAN0249JW; Start 16; Stop 40
gaaacatcgggcttttgacttgcaa

SEQ ID NO: 255240 - DNA, 25 bp, Artificial
  probe
  misc_feature (1)..(25): SEQ ID NO: 76; WAN0249JW; Start 17; Stop 41
aaacatcgggcttttgacttgcaaa

SEQ ID NO: 255241 - DNA, 25 bp, Artificial
  probe
  misc_feature (1)..(25): SEQ ID NO: 76; WAN0249JW; Start 18; Stop 42
aacatcgggcttttgacttgcaaaa

SEQ ID NO: 255242 - DNA, 25 bp, Artificial
  probe
  misc_feature (1)..(25): SEQ ID NO: 77; WAN024A2U; Start 148; Stop 172
gtttggaaaagaagaatgggagtaa

SEQ ID NO: 255243 - DNA, 25 bp, Artificial
  probe
  misc_feature (1)..(25): SEQ ID NO: 77; WAN024A2U; Start 149; Stop 173
tttggaaaagaagaatgggagtaat

SEQ ID NO: 255244 - DNA, 25 bp, Artificial
  probe
  misc_feature (1)..(25): SEQ ID NO: 77; WAN024A2U; Start 151; Stop 175
tggaaaagaagaatgggagtaattt

SEQ ID NO: 255245 - DNA, 25 bp, Artificial
  probe
  misc_feature (1)..(25): SEQ ID NO: 77; WAN024A2U; Start 150; Stop 174
ttggaaaagaagaatgggagtaatt

SEQ ID NO: 255246 - DNA, 25 bp, Artificial
  probe
  misc_feature (1)..(25): SEQ ID NO: 77; WAN024A2U; Start 70; Stop 94
cgtcctataattaggtggatttagt

SEQ ID NO: 255247 - DNA, 25 bp, Artificial
  probe
  misc_feature (1)..(25): SEQ ID NO: 77; WAN024A2U; Start 19; Stop 43
aaacaatatttctccggtactggga

SEQ ID NO: 255248 - DNA, 25 bp, Artificial
  probe
  misc_feature (1)..(25): SEQ ID NO: 77; WAN024A2U; Start 152; Stop 176
ggaaaagaagaatgggagtaatttt

SEQ ID NO: 255249 - DNA, 25 bp, Artificial
  probe
  misc_feature (1)..(25): SEQ ID NO: 77; WAN024A2U; Start 67; Stop 91
aaacgtcctataattaggtggattt

SEQ ID NO: 255250 - DNA, 25 bp, Artificial
  probe
  misc_feature (1)..(25): SEQ ID NO: 77; WAN024A2U; Start 220; Stop 244
tttgttctttctgtaaataatttgc

SEQ ID NO: 255251 - DNA, 25 bp, Artificial
  probe
  misc_feature (1)..(25): SEQ ID NO: 77; WAN024A2U; Start 221; Stop 245
ttgttctttctgtaaataatttgca

SEQ ID NO: 255252 - DNA, 25 bp, Artificial
  probe
  misc_feature (1)..(25): SEQ ID NO: 77; WAN024A2U; Start 20; Stop 44
aacaatatttctccggtactgggac

SEQ ID NO: 255253 - DNA, 25 bp, Artificial
  probe
  misc_feature (1)..(25): SEQ ID NO: 77; WAN024A2U; Start 69; Stop 93
acgtcctataattaggtggatttag

SEQ ID NO: 255254 - DNA, 25 bp, Artificial
  probe
  misc_feature (1)..(25): SEQ ID NO: 77; WAN024A2U; Start 114; Stop 138
tctagtattttgaatggttttggat

SEQ ID NO: 255255 - DNA, 25 bp, Artificial
  probe
  misc_feature (1)..(25): SEQ ID NO: 77; WAN024A2U; Start 113; Stop 137
atctagtattttgaatggttttgga

SEQ ID NO: 255256 - DNA, 25 bp, Artificial
  probe
  misc_feature (1)..(25): SEQ ID NO: 77; WAN024A2U; Start 22; Stop 46
caatatttctccggtactgggactg

SEQ ID NO: 255257 - DNA, 25 bp, Artificial
  probe
  misc_feature (1)..(25): SEQ ID NO: 77; WAN024A2U; Start 18; Stop 42
aaaacaatatttctccggtactggg

SEQ ID NO: 255258 - DNA, 25 bp, Artificial
  probe
  misc_feature (1)..(25): SEQ ID NO: 77; WAN024A2U; Start 17; Stop 41
taaaacaatatttctccggtactgg

SEQ ID NO: 255259 - DNA, 25 bp, Artificial
  probe
  misc_feature (1)..(25): SEQ ID NO: 77; WAN024A2U; Start 68; Stop 92
aacgtcctataattaggtggattta

SEQ ID NO: 255260 - DNA, 25 bp, Artificial
  probe
  misc_feature (1)..(25): SEQ ID NO: 77; WAN024A2U; Start 21; Stop 45
acaatatttctccggtactgggact

SEQ ID NO: 255261 - DNA, 25 bp, Artificial
  probe
  misc_feature (1)..(25): SEQ ID NO: 77; WAN024A2U; Start 71; Stop 95
gtcctataattaggtggatttagtg

SEQ ID NO: 255262 - DNA, 25 bp, Artificial
  probe
  misc_feature (1)..(25): SEQ ID NO: 77; WAN024A2U; Start 72; Stop 96
tcctataattaggtggatttagtga

SEQ ID NO: 255263 - DNA, 25 bp, Artificial
  probe
  misc_feature (1)..(25): SEQ ID NO: 77; WAN024A2U; Start 112; Stop 136
aatctagtattttgaatggttttgg

SEQ ID NO: 255264 - DNA, 25 bp, Artificial
  probe
  misc_feature (1)..(25): SEQ ID NO: 77; WAN024A2U; Start 64; Stop 88
tgaaaacgtcctataattaggtgga

SEQ ID NO: 255265 - DNA, 25 bp, Artificial
  probe
  misc_feature (1)..(25): SEQ ID NO: 77; WAN024A2U; Start 63; Stop 87
ctgaaaacgtcctataattaggtgg

SEQ ID NO: 255266 - DNA, 25 bp, Artificial
  probe
  misc_feature (1)..(25): SEQ ID NO: 77; WAN024A2U; Start 23; Stop 47
aatatttctccggtactgggactgg

SEQ ID NO: 255267 - DNA, 25 bp, Artificial
  probe
  misc_feature (1)..(25): SEQ ID NO: 77; WAN024A2U; Start 16; Stop 40
ttaaaacaatatttctccggtactg

SEQ ID NO: 255268 - DNA, 25 bp, Artificial
  probe
  misc_feature (1)..(25): SEQ ID NO: 77; WAN024A2U; Start 65; Stop 89
gaaaacgtcctataattaggtggat

SEQ ID NO: 255269 - DNA, 25 bp, Artificial
  probe
  misc_feature (1)..(25): SEQ ID NO: 77; WAN024A2U; Start 62; Stop 86
tctgaaaacgtcctataattaggtg

SEQ ID NO: 255270 - DNA, 25 bp, Artificial
  probe
  misc_feature (1)..(25): SEQ ID NO: 77; WAN024A2U; Start 195; Stop 219
ttgaaatcagtgtttcagagcattt

SEQ ID NO: 255271 - DNA, 25 bp, Artificial
  probe
  misc_feature (1)..(25): SEQ ID NO: 77; WAN024A2U; Start 157; Stop 181
agaagaatgggagtaattttaaact

SEQ ID NO: 255272 - DNA, 25 bp, Artificial
  probe
  misc_feature (1)..(25): SEQ ID NO: 77; WAN024A2U; Start 121; Stop 145
ttttgaatggttttggatatattgt

SEQ ID NO: 255273 - DNA, 25 bp, Artificial
  probe
  misc_feature (1)..(25): SEQ ID NO: 77; WAN024A2U; Start 66; Stop 90
aaaacgtcctataattaggtggatt

SEQ ID NO: 255274 - DNA, 25 bp, Artificial
  probe
  misc_feature (1)..(25): SEQ ID NO: 77; WAN024A2U; Start 73; Stop 97
cctataattaggtggatttagtgat

SEQ ID NO: 255275 - DNA, 25 bp, Artificial
  probe
  misc_feature (1)..(25): SEQ ID NO: 78; WAN024A97; Start 91; Stop 115
tgattagacttgttcggtaaccata

SEQ ID NO: 255276 - DNA, 25 bp, Artificial
  probe
  misc_feature (1)..(25): SEQ ID NO: 78; WAN024A97; Start 90; Stop 114
gtgattagacttgttcggtaaccat

SEQ ID NO: 255277 - DNA, 25 bp, Artificial
  probe
  misc_feature (1)..(25): SEQ ID NO: 78; WAN024A97; Start 87; Stop 111
ggagtgattagacttgttcggtaac

SEQ ID NO: 255278 - DNA, 25 bp, Artificial
  probe
  misc_feature (1)..(25): SEQ ID NO: 78; WAN024A97; Start 86; Stop 110
aggagtgattagacttgttcggtaa

SEQ ID NO: 255279 - DNA, 25 bp, Artificial
  probe
  misc_feature (1)..(25): SEQ ID NO: 78; WAN024A97; Start 85; Stop 109
aaggagtgattagacttgttcggta

SEQ ID NO: 255280 - DNA, 25 bp, Artificial
  probe
  misc_feature (1)..(25): SEQ ID NO: 78; WAN024A97; Start 92; Stop 116
gattagacttgttcggtaaccataa

SEQ ID NO: 255281 - DNA, 25 bp, Artificial
  probe
  misc_feature (1)..(25): SEQ ID NO: 78; WAN024A97; Start 88; Stop 112
gagtgattagacttgttcggtaacc

SEQ ID NO: 255282 - DNA, 25 bp, Artificial
  probe
  misc_feature (1)..(25): SEQ ID NO: 78; WAN024A97; Start 14; Stop 38
tctatcgttgcttaactatgaactt

SEQ ID NO: 255283 - DNA, 25 bp, Artificial
  probe
  misc_feature (1)..(25): SEQ ID NO: 78; WAN024A97; Start 13; Stop 37
ttctatcgttgcttaactatgaact

SEQ ID NO: 255284 - DNA, 25 bp, Artificial
  probe
  misc_feature (1)..(25): SEQ ID NO: 78; WAN024A97; Start 89; Stop 113
agtgattagacttgttcggtaacca

SEQ ID NO: 255285 - DNA, 25 bp, Artificial
  probe
  misc_feature (1)..(25): SEQ ID NO: 78; WAN024A97; Start 12; Stop 36
attctatcgttgcttaactatgaac

SEQ ID NO: 255286 - DNA, 25 bp, Artificial
  probe
  misc_feature (1)..(25): SEQ ID NO: 78; WAN024A97; Start 147; Stop 171
caatgcaactaactcctgagaactt

SEQ ID NO: 255287 - DNA, 25 bp, Artificial
  probe
  misc_feature (1)..(25): SEQ ID NO: 78; WAN024A97; Start 17; Stop 41
atcgttgcttaactatgaactttgc

SEQ ID NO: 255288 - DNA, 25 bp, Artificial
  probe
  misc_feature (1)..(25): SEQ ID NO: 78; WAN024A97; Start 102; Stop 126
gttcggtaaccataaagtgtcatac

SEQ ID NO: 255289 - DNA, 25 bp, Artificial
  probe
  misc_feature (1)..(25): SEQ ID NO: 78; WAN024A97; Start 101; Stop 125
tgttcggtaaccataaagtgtcata

SEQ ID NO: 255290 - DNA, 25 bp, Artificial
  probe
  misc_feature (1)..(25): SEQ ID NO: 78; WAN024A97; Start 100; Stop 124
ttgttcggtaaccataaagtgtcat

SEQ ID NO: 255291 - DNA, 25 bp, Artificial
  probe
  misc_feature (1)..(25): SEQ ID NO: 78; WAN024A97; Start 103; Stop 127
ttcggtaaccataaagtgtcatact

SEQ ID NO: 255292 - DNA, 25 bp, Artificial
  probe
  misc_feature (1)..(25): SEQ ID NO: 78; WAN024A97; Start 99; Stop 123
cttgttcggtaaccataaagtgtca

SEQ ID NO: 255293 - DNA, 25 bp, Artificial
  probe
  misc_feature (1)..(25): SEQ ID NO: 78; WAN024A97; Start 94; Stop 118
ttagacttgttcggtaaccataaag

SEQ ID NO: 255294 - DNA, 25 bp, Artificial
  probe
  misc_feature (1)..(25): SEQ ID NO: 78; WAN024A97; Start 104; Stop 128
tcggtaaccataaagtgtcatacta

SEQ ID NO: 255295 - DNA, 25 bp, Artificial
  probe
  misc_feature (1)..(25): SEQ ID NO: 78; WAN024A97; Start 93; Stop 117
attagacttgttcggtaaccataaa

SEQ ID NO: 255296 - DNA, 25 bp, Artificial
  probe
  misc_feature (1)..(25): SEQ ID NO: 78; WAN024A97; Start 105; Stop 129
cggtaaccataaagtgtcatactat

SEQ ID NO: 255297 - DNA, 25 bp, Artificial
  probe
  misc_feature (1)..(25): SEQ ID NO: 78; WAN024A97; Start 151; Stop 175
gcaactaactcctgagaactttaaa

SEQ ID NO: 255298 - DNA, 25 bp, Artificial
  probe
  misc_feature (1)..(25): SEQ ID NO: 78; WAN024A97; Start 144; Stop 168
aagcaatgcaactaactcctgagaa

SEQ ID NO: 255299 - DNA, 25 bp, Artificial
  probe
  misc_feature (1)..(25): SEQ ID NO: 78; WAN024A97; Start 16; Stop 40
tatcgttgcttaactatgaactttg

SEQ ID NO: 255300 - DNA, 25 bp, Artificial
  probe
  misc_feature (1)..(25): SEQ ID NO: 78; WAN024A97; Start 150; Stop 174
tgcaactaactcctgagaactttaa

SEQ ID NO: 255301 - DNA, 25 bp, Artificial
  probe
  misc_feature (1)..(25): SEQ ID NO: 78; WAN024A97; Start 149; Stop 173
atgcaactaactcctgagaacttta

SEQ ID NO: 255302 - DNA, 25 bp, Artificial
  probe
  misc_feature (1)..(25): SEQ ID NO: 78; WAN024A97; Start 15; Stop 39
ctatcgttgcttaactatgaacttt

SEQ ID NO: 255303 - DNA, 25 bp, Artificial
  probe
  misc_feature (1)..(25): SEQ ID NO: 78; WAN024A97; Start 6; Stop 30
cactttattctatcgttgcttaact

SEQ ID NO: 255304 - DNA, 25 bp, Artificial
  probe
  misc_feature (1)..(25): SEQ ID NO: 78; WAN024A97; Start 148; Stop 172
aatgcaactaactcctgagaacttt

SEQ ID NO: 255305 - DNA, 25 bp, Artificial
  probe
  misc_feature (1)..(25): SEQ ID NO: 78; WAN024A97; Start 109; Stop 133
aaccataaagtgtcatactatgctt

SEQ ID NO: 255306 - DNA, 25 bp, Artificial
  probe
  misc_feature (1)..(25): SEQ ID NO: 78; WAN024A97; Start 168; Stop 192
actttaaattactaattggtgccga

SEQ ID NO: 255307 - DNA, 25 bp, Artificial
  probe
  misc_feature (1)..(25): SEQ ID NO: 78; WAN024A97; Start 146; Stop 170
gcaatgcaactaactcctgagaact

SEQ ID NO: 255308 - DNA, 25 bp, Artificial
  probe
  misc_feature (1)..(25): SEQ ID NO: 79; WAN024AQ7; Start 71; Stop 95
ctacaatcgttttaggaggatatat

SEQ ID NO: 255309 - DNA, 25 bp, Artificial
  probe
  misc_feature (1)..(25): SEQ ID NO: 80; WAN0249OI; Start 54; Stop 78
ggcatatcccaaacatcgtaatatt

SEQ ID NO: 255310 - DNA, 25 bp, Artificial
  probe
  misc_feature (1)..(25): SEQ ID NO: 80; WAN0249OI; Start 53; Stop 77
tggcatatcccaaacatcgtaatat

SEQ ID NO: 255311 - DNA, 25 bp, Artificial
  probe
  misc_feature (1)..(25): SEQ ID NO: 80; WAN0249OI; Start 52; Stop 76
atggcatatcccaaacatcgtaata

SEQ ID NO: 255312 - DNA, 25 bp, Artificial
  probe
  misc_feature (1)..(25): SEQ ID NO: 80; WAN0249OI; Start 55; Stop 79
gcatatcccaaacatcgtaatattc

SEQ ID NO: 255313 - DNA, 25 bp, Artificial
  probe
  misc_feature (1)..(25): SEQ ID NO: 80; WAN0249OI; Start 59; Stop 83
atcccaaacatcgtaatattctact

SEQ ID NO: 255314 - DNA, 25 bp, Artificial
  probe
  misc_feature (1)..(25): SEQ ID NO: 80; WAN0249OI; Start 45; Stop 69
tttagcgatggcatatcccaaacat

SEQ ID NO: 255315 - DNA, 25 bp, Artificial
  probe
  misc_feature (1)..(25): SEQ ID NO: 80; WAN0249OI; Start 56; Stop 80
catatcccaaacatcgtaatattct

SEQ ID NO: 255316 - DNA, 25 bp, Artificial
  probe
  misc_feature (1)..(25): SEQ ID NO: 80; WAN0249OI; Start 51; Stop 75
gatggcatatcccaaacatcgtaat

SEQ ID NO: 255317 - DNA, 25 bp, Artificial
  probe
  misc_feature (1)..(25): SEQ ID NO: 80; WAN0249OI; Start 58; Stop 82
tatcccaaacatcgtaatattctac

SEQ ID NO: 255318 - DNA, 25 bp, Artificial
  probe
  misc_feature (1)..(25): SEQ ID NO: 80; WAN0249OI; Start 46; Stop 70
ttagcgatggcatatcccaaacatc

SEQ ID NO: 255319 - DNA, 25 bp, Artificial
  probe
  misc_feature (1)..(25): SEQ ID NO: 80; WAN0249OI; Start 57; Stop 81
atatcccaaacatcgtaatattcta

SEQ ID NO: 255320 - DNA, 25 bp, Artificial
  probe
  misc_feature (1)..(25): SEQ ID NO: 80; WAN0249OI; Start 44; Stop 68
ttttagcgatggcatatcccaaaca

SEQ ID NO: 255321 - DNA, 25 bp, Artificial
  probe
  misc_feature (1)..(25): SEQ ID NO: 81; WAN0249ZH; Start 16; Stop 40
cttctataacagtatcgcaatctct

SEQ ID NO: 255322 - DNA, 25 bp, Artificial
  probe
  misc_feature (1)..(25): SEQ ID NO: 81; WAN0249ZH; Start 19; Stop 43
ctataacagtatcgcaatctctggt

SEQ ID NO: 255323 - DNA, 25 bp, Artificial
  probe
  misc_feature (1)..(25): SEQ ID NO: 81; WAN0249ZH; Start 20; Stop 44
tataacagtatcgcaatctctggtg

SEQ ID NO: 255324 - DNA, 25 bp, Artificial
  probe
  misc_feature (1)..(25): SEQ ID NO: 81; WAN0249ZH; Start 18; Stop 42
tctataacagtatcgcaatctctgg

SEQ ID NO: 255325 - DNA, 25 bp, Artificial
  probe
  misc_feature (1)..(25): SEQ ID NO: 81; WAN0249ZH; Start 15; Stop 39
acttctataacagtatcgcaatctc

SEQ ID NO: 255326 - DNA, 25 bp, Artificial
  probe
  misc_feature (1)..(25): SEQ ID NO: 81; WAN0249ZH; Start 17; Stop 41
ttctataacagtatcgcaatctctg

SEQ ID NO: 255327 - DNA, 25 bp, Artificial
  probe
  misc_feature (1)..(25): SEQ ID NO: 81; WAN0249ZH; Start 21; Stop 45
ataacagtatcgcaatctctggtgt

SEQ ID NO: 255328 - DNA, 25 bp, Artificial
  probe
  misc_feature (1)..(25): SEQ ID NO: 81; WAN0249ZH; Start 22; Stop 46
taacagtatcgcaatctctggtgtg

SEQ ID NO: 255329 - DNA, 25 bp, Artificial
  probe
  misc_feature (1)..(25): SEQ ID NO: 81; WAN0249ZH; Start 44; Stop 68
gtgcgttgtctcgatcttaattcaa

SEQ ID NO: 255330 - DNA, 25 bp, Artificial
  probe
  misc_feature (1)..(25): SEQ ID NO: 81; WAN0249ZH; Start 42; Stop 66
gtgtgcgttgtctcgatcttaattc

SEQ ID NO: 255331 - DNA, 25 bp, Artificial
  probe
  misc_feature (1)..(25): SEQ ID NO: 81; WAN0249ZH; Start 43; Stop 67
tgtgcgttgtctcgatcttaattca

SEQ ID NO: 255332 - DNA, 25 bp, Artificial
  probe
  misc_feature (1)..(25): SEQ ID NO: 81; WAN0249ZH; Start 14; Stop 38
tacttctataacagtatcgcaatct

SEQ ID NO: 255333 - DNA, 25 bp, Artificial
  probe
  misc_feature (1)..(25): SEQ ID NO: 81; WAN0249ZH; Start 13; Stop 37
gtacttctataacagtatcgcaatc

SEQ ID NO: 255334 - DNA, 25 bp, Artificial
  probe
  misc_feature (1)..(25): SEQ ID NO: 81; WAN0249ZH; Start 41; Stop 65
ggtgtgcgttgtctcgatcttaatt

SEQ ID NO: 255335 - DNA, 25 bp, Artificial
  probe
  misc_feature (1)..(25): SEQ ID NO: 81; WAN0249ZH; Start 4; Stop 28
agggcattagtacttctataacagt

SEQ ID NO: 255336 - DNA, 25 bp, Artificial
  probe
  misc_feature (1)..(25): SEQ ID NO: 81; WAN0249ZH; Start 12; Stop 36
agtacttctataacagtatcgcaat

SEQ ID NO: 255337 - DNA, 25 bp, Artificial
  probe
  misc_feature (1)..(25): SEQ ID NO: 81; WAN0249ZH; Start 3; Stop 27
aagggcattagtacttctataacag

SEQ ID NO: 255338 - DNA, 25 bp, Artificial
  probe
  misc_feature (1)..(25): SEQ ID NO: 81; WAN0249ZH; Start 40; Stop 64
tggtgtgcgttgtctcgatcttaat

SEQ ID NO: 255339 - DNA, 25 bp, Artificial
  probe
  misc_feature (1)..(25): SEQ ID NO: 81; WAN0249ZH; Start 11; Stop 35
tagtacttctataacagtatcgcaa

SEQ ID NO: 255340 - DNA, 25 bp, Artificial
  probe
  misc_feature (1)..(25): SEQ ID NO: 81; WAN0249ZH; Start 10; Stop 34
ttagtacttctataacagtatcgca

SEQ ID NO: 255341 - DNA, 25 bp, Artificial
  probe
  misc_feature (1)..(25): SEQ ID NO: 81; WAN0249ZH; Start 2; Stop 26
aaagggcattagtacttctataaca

SEQ ID NO: 255342 - DNA, 25 bp, Artificial
  probe
  misc_feature (1)..(25): SEQ ID NO: 81; WAN0249ZH; Start 39; Stop 63
ctggtgtgcgttgtctcgatcttaa

SEQ ID NO: 255343 - DNA, 25 bp, Artificial
  probe
  misc_feature (1)..(25): SEQ ID NO: 81; WAN0249ZH; Start 5; Stop 29
gggcattagtacttctataacagta

SEQ ID NO: 255344 - DNA, 25 bp, Artificial
  probe
  misc_feature (1)..(25): SEQ ID NO: 81; WAN0249ZH; Start 9; Stop 33
attagtacttctataacagtatcgc

SEQ ID NO: 255345 - DNA, 25 bp, Artificial
  probe
  misc_feature (1)..(25): SEQ ID NO: 81; WAN0249ZH; Start 6; Stop 30
ggcattagtacttctataacagtat

SEQ ID NO: 255346 - DNA, 25 bp, Artificial
  probe
  misc_feature (1)..(25): SEQ ID NO: 81; WAN0249ZH; Start 1; Stop 25
aaaagggcattagtacttctataac

SEQ ID NO: 255347 - DNA, 25 bp, Artificial
  probe
  misc_feature (1)..(25): SEQ ID NO: 82; WAN024A72; Start 49; Stop 73
tataggattaggtcaggaagcatac

SEQ ID NO: 255348 - DNA, 25 bp, Artificial
  probe
  misc_feature (1)..(25): SEQ ID NO: 82; WAN024A72; Start 50; Stop 74
ataggattaggtcaggaagcatacg

SEQ ID NO: 255349 - DNA, 25 bp, Artificial
  probe
  misc_feature (1)..(25): SEQ ID NO: 82; WAN024A72; Start 48; Stop 72
atataggattaggtcaggaagcata

SEQ ID NO: 255350 - DNA, 25 bp, Artificial
  probe
  misc_feature (1)..(25): SEQ ID NO: 82; WAN024A72; Start 51; Stop 75
taggattaggtcaggaagcatacga

SEQ ID NO: 255351 - DNA, 25 bp, Artificial
  probe
  misc_feature (1)..(25): SEQ ID NO: 82; WAN024A72; Start 47; Stop 71
tatataggattaggtcaggaagcat

SEQ ID NO: 255352 - DNA, 25 bp, Artificial
  probe
  misc_feature (1)..(25): SEQ ID NO: 82; WAN024A72; Start 52; Stop 76
aggattaggtcaggaagcatacgat

SEQ ID NO: 255353 - DNA, 25 bp, Artificial
  probe
  misc_feature (1)..(25): SEQ ID NO: 82; WAN024A72; Start 53; Stop 77
ggattaggtcaggaagcatacgatg

SEQ ID NO: 255354 - DNA, 25 bp, Artificial
  probe
  misc_feature (1)..(25): SEQ ID NO: 82; WAN024A72; Start 121; Stop 145
agataaattgacttcgttagcaaac

SEQ ID NO: 255355 - DNA, 25 bp, Artificial
  probe
  misc_feature (1)..(25): SEQ ID NO: 82; WAN024A72; Start 118; Stop 142
gttagataaattgacttcgttagca

SEQ ID NO: 255356 - DNA, 25 bp, Artificial
  probe
  misc_feature (1)..(25): SEQ ID NO: 82; WAN024A72; Start 117; Stop 141
tgttagataaattgacttcgttagc

SEQ ID NO: 255357 - DNA, 25 bp, Artificial
  probe
  misc_feature (1)..(25): SEQ ID NO: 82; WAN024A72; Start 16; Stop 40
tgacaaatagtgctcaatgatctaa

SEQ ID NO: 255358 - DNA, 25 bp, Artificial
  probe
  misc_feature (1)..(25): SEQ ID NO: 82; WAN024A72; Start 17; Stop 41
gacaaatagtgctcaatgatctaaa

SEQ ID NO: 255359 - DNA, 25 bp, Artificial
  probe
  misc_feature (1)..(25): SEQ ID NO: 82; WAN024A72; Start 46; Stop 70
ctatataggattaggtcaggaagca

SEQ ID NO: 255360 - DNA, 25 bp, Artificial
  probe
  misc_feature (1)..(25): SEQ ID NO: 82; WAN024A72; Start 45; Stop 69
actatataggattaggtcaggaagc

SEQ ID NO: 255361 - DNA, 25 bp, Artificial
  probe
  misc_feature (1)..(25): SEQ ID NO: 82; WAN024A72; Start 120; Stop 144
tagataaattgacttcgttagcaaa

SEQ ID NO: 255362 - DNA, 25 bp, Artificial
  probe
  misc_feature (1)..(25): SEQ ID NO: 82; WAN024A72; Start 119; Stop 143
ttagataaattgacttcgttagcaa

SEQ ID NO: 255363 - DNA, 25 bp, Artificial
  probe
  misc_feature (1)..(25): SEQ ID NO: 82; WAN024A72; Start 14; Stop 38
tttgacaaatagtgctcaatgatct

SEQ ID NO: 255364 - DNA, 25 bp, Artificial
  probe
  misc_feature (1)..(25): SEQ ID NO: 82; WAN024A72; Start 15; Stop 39
ttgacaaatagtgctcaatgatcta

SEQ ID NO: 255365 - DNA, 25 bp, Artificial
  probe
  misc_feature (1)..(25): SEQ ID NO: 82; WAN024A72; Start 99; Stop 123
tgagatgagaaagtcatttgttaga

SEQ ID NO: 255366 - DNA, 25 bp, Artificial
  probe
  misc_feature (1)..(25): SEQ ID NO: 82; WAN024A72; Start 113; Stop 137
catttgttagataaattgacttcgt

SEQ ID NO: 255367 - DNA, 25 bp, Artificial
  probe
  misc_feature (1)..(25): SEQ ID NO: 82; WAN024A72; Start 13; Stop 37
atttgacaaatagtgctcaatgatc

SEQ ID NO: 255368 - DNA, 25 bp, Artificial
  probe
  misc_feature (1)..(25): SEQ ID NO: 82; WAN024A72; Start 90; Stop 114
ttgtacttatgagatgagaaagtca

SEQ ID NO: 255369 - DNA, 25 bp, Artificial
  probe
  misc_feature (1)..(25): SEQ ID NO: 82; WAN024A72; Start 24; Stop 48
agtgctcaatgatctaaaatgacta

SEQ ID NO: 255370 - DNA, 25 bp, Artificial
  probe
  misc_feature (1)..(25): SEQ ID NO: 82; WAN024A72; Start 23; Stop 47
tagtgctcaatgatctaaaatgact

SEQ ID NO: 255371 - DNA, 25 bp, Artificial
  probe
  misc_feature (1)..(25): SEQ ID NO: 82; WAN024A72; Start 112; Stop 136
tcatttgttagataaattgacttcg

SEQ ID NO: 255372 - DNA, 25 bp, Artificial
  probe
  misc_feature (1)..(25): SEQ ID NO: 82; WAN024A72; Start 98; Stop 122
atgagatgagaaagtcatttgttag

SEQ ID NO: 255373 - DNA, 25 bp, Artificial
  probe
  misc_feature (1)..(25): SEQ ID NO: 82; WAN024A72; Start 95; Stop 119
cttatgagatgagaaagtcatttgt

SEQ ID NO: 255374 - DNA, 25 bp, Artificial
  probe
  misc_feature (1)..(25): SEQ ID NO: 82; WAN024A72; Start 91; Stop 115
tgtacttatgagatgagaaagtcat

SEQ ID NO: 255375 - DNA, 25 bp, Artificial
  probe
  misc_feature (1)..(25): SEQ ID NO: 82; WAN024A72; Start 44; Stop 68
gactatataggattaggtcaggaag

SEQ ID NO: 255376 - DNA, 25 bp, Artificial
  probe
  misc_feature (1)..(25): SEQ ID NO: 82; WAN024A72; Start 100; Stop 124
gagatgagaaagtcatttgttagat

SEQ ID NO: 255377 - DNA, 25 bp, Artificial
  probe
  misc_feature (1)..(25): SEQ ID NO: 82; WAN024A72; Start 116; Stop 140
ttgttagataaattgacttcgttag

SEQ ID NO: 255378 - DNA, 25 bp, Artificial
  probe
  misc_feature (1)..(25): SEQ ID NO: 82; WAN024A72; Start 94; Stop 118
acttatgagatgagaaagtcatttg

SEQ ID NO: 255379 - DNA, 25 bp, Artificial
  probe
  misc_feature (1)..(25): SEQ ID NO: 82; WAN024A72; Start 96; Stop 120
ttatgagatgagaaagtcatttgtt

SEQ ID NO: 255380 - DNA, 25 bp, Artificial
  probe
  misc_feature (1)..(25): SEQ ID NO: 83; WAN024A92; Start 31; Stop 55
tttaacttgacctaaaagggatttt

SEQ ID NO: 255381 - DNA, 25 bp, Artificial
  probe
  misc_feature (1)..(25): SEQ ID NO: 83; WAN024A92; Start 30; Stop 54
ttttaacttgacctaaaagggattt

SEQ ID NO: 255382 - DNA, 25 bp, Artificial
  probe
  misc_feature (1)..(25): SEQ ID NO: 83; WAN024A92; Start 32; Stop 56
ttaacttgacctaaaagggatttta

SEQ ID NO: 255383 - DNA, 25 bp, Artificial
  probe
  misc_feature (1)..(25): SEQ ID NO: 84; WAN024AMQ; Start 304; Stop 328
gctggatttgttaggaaaggagtaa

SEQ ID NO: 255384 - DNA, 25 bp, Artificial
  probe
  misc_feature (1)..(25): SEQ ID NO: 84; WAN024AMQ; Start 305; Stop 329
ctggatttgttaggaaaggagtaaa

SEQ ID NO: 255385 - DNA, 25 bp, Artificial
  probe
  misc_feature (1)..(25): SEQ ID NO: 84; WAN024AMQ; Start 191; Stop 215
cgatgacaattcaagatttggatga

SEQ ID NO: 255386 - DNA, 25 bp, Artificial
  probe
  misc_feature (1)..(25): SEQ ID NO: 84; WAN024AMQ; Start 98; Stop 122
aagtctacaaacaagttggtatcaa

SEQ ID NO: 255387 - DNA, 25 bp, Artificial
  probe
  misc_feature (1)..(25): SEQ ID NO: 84; WAN024AMQ; Start 97; Stop 121
aaagtctacaaacaagttggtatca

SEQ ID NO: 255388 - DNA, 25 bp, Artificial
  probe
  misc_feature (1)..(25): SEQ ID NO: 84; WAN024AMQ; Start 74; Stop 98
aatgatatgtgatagcaggatgaaa

SEQ ID NO: 255389 - DNA, 25 bp, Artificial
  probe
  misc_feature (1)..(25): SEQ ID NO: 84; WAN024AMQ; Start 73; Stop 97
aaatgatatgtgatagcaggatgaa

SEQ ID NO: 255390 - DNA, 25 bp, Artificial
  probe
  misc_feature (1)..(25): SEQ ID NO: 84; WAN024AMQ; Start 99; Stop 123
agtctacaaacaagttggtatcaat

SEQ ID NO: 255391 - DNA, 25 bp, Artificial
  probe
  misc_feature (1)..(25): SEQ ID NO: 84; WAN024AMQ; Start 48; Stop 72
ttctttaatattgtttcgcctgtca

SEQ ID NO: 255392 - DNA, 25 bp, Artificial
  probe
  misc_feature (1)..(25): SEQ ID NO: 84; WAN024AMQ; Start 43; Stop 67
ggagtttctttaatattgtttcgcc

SEQ ID NO: 255393 - DNA, 25 bp, Artificial
  probe
  misc_feature (1)..(25): SEQ ID NO: 84; WAN024AMQ; Start 42; Stop 66
gggagtttctttaatattgtttcgc

SEQ ID NO: 255394 - DNA, 25 bp, Artificial
  probe
  misc_feature (1)..(25): SEQ ID NO: 84; WAN024AMQ; Start 300; Stop 324
ataagctggatttgttaggaaagga

SEQ ID NO: 255395 - DNA, 25 bp, Artificial
  probe
  misc_feature (1)..(25): SEQ ID NO: 84; WAN024AMQ; Start 299; Stop 323
gataagctggatttgttaggaaagg

SEQ ID NO: 255396 - DNA, 25 bp, Artificial
  probe
  misc_feature (1)..(25): SEQ ID NO: 84; WAN024AMQ; Start 301; Stop 325
taagctggatttgttaggaaaggag

SEQ ID NO: 255397 - DNA, 25 bp, Artificial
  probe
  misc_feature (1)..(25): SEQ ID NO: 84; WAN024AMQ; Start 49; Stop 73
tctttaatattgtttcgcctgtcaa

SEQ ID NO: 255398 - DNA, 25 bp, Artificial
  probe
  misc_feature (1)..(25): SEQ ID NO: 84; WAN024AMQ; Start 298; Stop 322
tgataagctggatttgttaggaaag

SEQ ID NO: 255399 - DNA, 25 bp, Artificial
  probe
  misc_feature (1)..(25): SEQ ID NO: 84; WAN024AMQ; Start 294; Stop 318
tgattgataagctggatttgttagg

SEQ ID NO: 255400 - DNA, 25 bp, Artificial
  probe
  misc_feature (1)..(25): SEQ ID NO: 84; WAN024AMQ; Start 46; Stop 70
gtttctttaatattgtttcgcctgt

SEQ ID NO: 255401 - DNA, 25 bp, Artificial
  probe
  misc_feature (1)..(25): SEQ ID NO: 84; WAN024AMQ; Start 290; Stop 314
ctcttgattgataagctggatttgt

SEQ ID NO: 255402 - DNA, 25 bp, Artificial
  probe
  misc_feature (1)..(25): SEQ ID NO: 84; WAN024AMQ; Start 306; Stop 330
tggatttgttaggaaaggagtaaat

SEQ ID NO: 255403 - DNA, 25 bp, Artificial
  probe
  misc_feature (1)..(25): SEQ ID NO: 84; WAN024AMQ; Start 295; Stop 319
gattgataagctggatttgttagga

SEQ ID NO: 255404 - DNA, 25 bp, Artificial
  probe
  misc_feature (1)..(25): SEQ ID NO: 84; WAN024AMQ; Start 47; Stop 71
tttctttaatattgtttcgcctgtc

SEQ ID NO: 255405 - DNA, 25 bp, Artificial
  probe
  misc_feature (1)..(25): SEQ ID NO: 84; WAN024AMQ; Start 45; Stop 69
agtttctttaatattgtttcgcctg

SEQ ID NO: 255406 - DNA, 25 bp, Artificial
  probe
  misc_feature (1)..(25): SEQ ID NO: 84; WAN024AMQ; Start 291; Stop 315
tcttgattgataagctggatttgtt

SEQ ID NO: 255407 - DNA, 25 bp, Artificial
  probe
  misc_feature (1)..(25): SEQ ID NO: 84; WAN024AMQ; Start 303; Stop 327
agctggatttgttaggaaaggagta

SEQ ID NO: 255408 - DNA, 25 bp, Artificial
  probe
  misc_feature (1)..(25): SEQ ID NO: 84; WAN024AMQ; Start 297; Stop 321
ttgataagctggatttgttaggaaa

SEQ ID NO: 255409 - DNA, 25 bp, Artificial
  probe
  misc_feature (1)..(25): SEQ ID NO: 84; WAN024AMQ; Start 50; Stop 74
ctttaatattgtttcgcctgtcaaa

SEQ ID NO: 255410 - DNA, 25 bp, Artificial
  probe
  misc_feature (1)..(25): SEQ ID NO: 84; WAN024AMQ; Start 44; Stop 68
gagtttctttaatattgtttcgcct

SEQ ID NO: 255411 - DNA, 25 bp, Artificial
  probe
  misc_feature (1)..(25): SEQ ID NO: 84; WAN024AMQ; Start 296; Stop 320
attgataagctggatttgttaggaa

SEQ ID NO: 255412 - DNA, 25 bp, Artificial
  probe
  misc_feature (1)..(25): SEQ ID NO: 84; WAN024AMQ; Start 190; Stop 214
tcgatgacaattcaagatttggatg

SEQ ID NO: 255413 - DNA, 25 bp, Artificial
  probe
  misc_feature (1)..(25): SEQ ID NO: 84; WAN024AMQ; Start 188; Stop 212
tttcgatgacaattcaagatttgga

SEQ ID NO: 255414 - DNA, 25 bp, Artificial
  probe
  misc_feature (1)..(25): SEQ ID NO: 84; WAN024AMQ; Start 187; Stop 211
gtttcgatgacaattcaagatttgg

SEQ ID NO: 255415 - DNA, 25 bp, Artificial
  probe
  misc_feature (1)..(25): SEQ ID NO: 84; WAN024AMQ; Start 189; Stop 213
ttcgatgacaattcaagatttggat

SEQ ID NO: 255416 - DNA, 25 bp, Artificial
  probe
  misc_feature (1)..(25): SEQ ID NO: 85; WAN024AGQ; Start 8; Stop 32
ggagaagtagttcccttggtctaaa

SEQ ID NO: 255417 - DNA, 25 bp, Artificial
  probe
  misc_feature (1)..(25): SEQ ID NO: 85; WAN024AGQ; Start 9; Stop 33
gagaagtagttcccttggtctaaaa

SEQ ID NO: 255418 - DNA, 25 bp, Artificial
  probe
  misc_feature (1)..(25): SEQ ID NO: 87; WAN024A4K; Start 90; Stop 114
agaacaagattgacaagtaagagga

SEQ ID NO: 255419 - DNA, 25 bp, Artificial
  probe
  misc_feature (1)..(25): SEQ ID NO: 87; WAN024A4K; Start 91; Stop 115
gaacaagattgacaagtaagaggaa

SEQ ID NO: 255420 - DNA, 25 bp, Artificial
  probe
  misc_feature (1)..(25): SEQ ID NO: 87; WAN024A4K; Start 89; Stop 113
aagaacaagattgacaagtaagagg

SEQ ID NO: 255421 - DNA, 25 bp, Artificial
  probe
  misc_feature (1)..(25): SEQ ID NO: 87; WAN024A4K; Start 94; Stop 118
caagattgacaagtaagaggaaaca

SEQ ID NO: 255422 - DNA, 25 bp, Artificial
  probe
  misc_feature (1)..(25): SEQ ID NO: 87; WAN024A4K; Start 93; Stop 117
acaagattgacaagtaagaggaaac

SEQ ID NO: 255423 - DNA, 25 bp, Artificial
  probe
  misc_feature (1)..(25): SEQ ID NO: 87; WAN024A4K; Start 92; Stop 116
aacaagattgacaagtaagaggaaa

SEQ ID NO: 255424 - DNA, 25 bp, Artificial
  probe
  misc_feature (1)..(25): SEQ ID NO: 87; WAN024A4K; Start 96; Stop 120
agattgacaagtaagaggaaacatt

SEQ ID NO: 255425 - DNA, 25 bp, Artificial
  probe
  misc_feature (1)..(25): SEQ ID NO: 87; WAN024A4K; Start 95; Stop 119
aagattgacaagtaagaggaaacat

SEQ ID NO: 255426 - DNA, 25 bp, Artificial
  probe
  misc_feature (1)..(25): SEQ ID NO: 87; WAN024A4K; Start 88; Stop 112
aaagaacaagattgacaagtaagag

SEQ ID NO: 255427 - DNA, 25 bp, Artificial
  probe
  misc_feature (1)..(25): SEQ ID NO: 87; WAN024A4K; Start 31; Stop 55
atagtttccttctatcttacgcaaa

SEQ ID NO: 255428 - DNA, 25 bp, Artificial
  probe
  misc_feature (1)..(25): SEQ ID NO: 87; WAN024A4K; Start 30; Stop 54
aatagtttccttctatcttacgcaa

SEQ ID NO: 255429 - DNA, 25 bp, Artificial
  probe
  misc_feature (1)..(25): SEQ ID NO: 87; WAN024A4K; Start 29; Stop 53
aaatagtttccttctatcttacgca

SEQ ID NO: 255430 - DNA, 25 bp, Artificial
  probe
  misc_feature (1)..(25): SEQ ID NO: 87; WAN024A4K; Start 83; Stop 107
agaataaagaacaagattgacaagt

SEQ ID NO: 255431 - DNA, 25 bp, Artificial
  probe
  misc_feature (1)..(25): SEQ ID NO: 87; WAN024A4K; Start 32; Stop 56
tagtttccttctatcttacgcaaac

SEQ ID NO: 255432 - DNA, 25 bp, Artificial
  probe
  misc_feature (1)..(25): SEQ ID NO: 87; WAN024A4K; Start 33; Stop 57
agtttccttctatcttacgcaaacg

SEQ ID NO: 255433 - DNA, 25 bp, Artificial
  probe
  misc_feature (1)..(25): SEQ ID NO: 87; WAN024A4K; Start 87; Stop 111
taaagaacaagattgacaagtaaga

SEQ ID NO: 255434 - DNA, 25 bp, Artificial
  probe
  misc_feature (1)..(25): SEQ ID NO: 87; WAN024A4K; Start 55; Stop 79
acgtttgcgctaatagatactttat

SEQ ID NO: 255435 - DNA, 25 bp, Artificial
  probe
  misc_feature (1)..(25): SEQ ID NO: 87; WAN024A4K; Start 86; Stop 110
ataaagaacaagattgacaagtaag

SEQ ID NO: 255436 - DNA, 25 bp, Artificial
  probe
  misc_feature (1)..(25): SEQ ID NO: 87; WAN024A4K; Start 84; Stop 108
gaataaagaacaagattgacaagta

SEQ ID NO: 255437 - DNA, 25 bp, Artificial
  probe
  misc_feature (1)..(25): SEQ ID NO: 87; WAN024A4K; Start 56; Stop 80
cgtttgcgctaatagatactttatg

SEQ ID NO: 255438 - DNA, 25 bp, Artificial
  probe
  misc_feature (1)..(25): SEQ ID NO: 87; WAN024A4K; Start 34; Stop 58
gtttccttctatcttacgcaaacgt

SEQ ID NO: 255439 - DNA, 25 bp, Artificial
  probe
  misc_feature (1)..(25): SEQ ID NO: 87; WAN024A4K; Start 82; Stop 106
tagaataaagaacaagattgacaag

SEQ ID NO: 255440 - DNA, 25 bp, Artificial
  probe
  misc_feature (1)..(25): SEQ ID NO: 87; WAN024A4K; Start 54; Stop 78
aacgtttgcgctaatagatacttta

SEQ ID NO: 255441 - DNA, 25 bp, Artificial
  probe
  misc_feature (1)..(25): SEQ ID NO: 87; WAN024A4K; Start 28; Stop 52
aaaatagtttccttctatcttacgc

SEQ ID NO: 255442 - DNA, 25 bp, Artificial
  probe
  misc_feature (1)..(25): SEQ ID NO: 87; WAN024A4K; Start 80; Stop 104
gatagaataaagaacaagattgaca

SEQ ID NO: 255443 - DNA, 25 bp, Artificial
  probe
  misc_feature (1)..(25): SEQ ID NO: 87; WAN024A4K; Start 79; Stop 103
tgatagaataaagaacaagattgac

SEQ ID NO: 255444 - DNA, 25 bp, Artificial
  probe
  misc_feature (1)..(25): SEQ ID NO: 87; WAN024A4K; Start 85; Stop 109
aataaagaacaagattgacaagtaa

SEQ ID NO: 255445 - DNA, 25 bp, Artificial
  probe
  misc_feature (1)..(25): SEQ ID NO: 87; WAN024A4K; Start 57; Stop 81
gtttgcgctaatagatactttatga

SEQ ID NO: 255446 - DNA, 25 bp, Artificial
  probe
  misc_feature (1)..(25): SEQ ID NO: 87; WAN024A4K; Start 58; Stop 82
tttgcgctaatagatactttatgat

SEQ ID NO: 255447 - DNA, 25 bp, Artificial
  probe
  misc_feature (1)..(25): SEQ ID NO: 87; WAN024A4K; Start 60; Stop 84
tgcgctaatagatactttatgatag

SEQ ID NO: 255448 - DNA, 25 bp, Artificial
  probe
  misc_feature (1)..(25): SEQ ID NO: 87; WAN024A4K; Start 35; Stop 59
tttccttctatcttacgcaaacgtt

SEQ ID NO: 255449 - DNA, 25 bp, Artificial
  probe
  misc_feature (1)..(25): SEQ ID NO: 87; WAN024A4K; Start 61; Stop 85
gcgctaatagatactttatgataga

SEQ ID NO: 255450 - DNA, 25 bp, Artificial
  probe
  misc_feature (1)..(25): SEQ ID NO: 87; WAN024A4K; Start 59; Stop 83
ttgcgctaatagatactttatgata

SEQ ID NO: 255451 - DNA, 25 bp, Artificial
  probe
  misc_feature (1)..(25): SEQ ID NO: 88; WAN0249Z5; Start 5; Stop 29
tcagctaacaagtcttaaaatcaca

SEQ ID NO: 255452 - DNA, 25 bp, Artificial
  probe
  misc_feature (1)..(25): SEQ ID NO: 88; WAN0249Z5; Start 6; Stop 30
cagctaacaagtcttaaaatcacaa

SEQ ID NO: 255453 - DNA, 25 bp, Artificial
  probe
  misc_feature (1)..(25): SEQ ID NO: 88; WAN0249Z5; Start 8; Stop 32
gctaacaagtcttaaaatcacaaaa

SEQ ID NO: 255454 - DNA, 25 bp, Artificial
  probe
  misc_feature (1)..(25): SEQ ID NO: 88; WAN0249Z5; Start 4; Stop 28
atcagctaacaagtcttaaaatcac

SEQ ID NO: 255455 - DNA, 25 bp, Artificial
  probe
  misc_feature (1)..(25): SEQ ID NO: 88; WAN0249Z5; Start 7; Stop 31
agctaacaagtcttaaaatcacaaa

SEQ ID NO: 255456 - DNA, 25 bp, Artificial
  probe
  misc_feature (1)..(25): SEQ ID NO: 88; WAN0249Z5; Start 3; Stop 27
aatcagctaacaagtcttaaaatca

SEQ ID NO: 255457 - DNA, 25 bp, Artificial
  probe
  misc_feature (1)..(25): SEQ ID NO: 88; WAN0249Z5; Start 2; Stop 26
aaatcagctaacaagtcttaaaatc

SEQ ID NO: 255458 - DNA, 25 bp, Artificial
  probe
  misc_feature (1)..(25): SEQ ID NO: 88; WAN0249Z5; Start 1; Stop 25
aaaatcagctaacaagtcttaaaat

SEQ ID NO: 255459 - DNA, 25 bp, Artificial
  probe
  misc_feature (1)..(25): SEQ ID NO: 89; WAN024A9B; Start 32; Stop 56
tccttgacataaataactctcacca

SEQ ID NO: 255460 - DNA, 25 bp, Artificial
  probe
  misc_feature (1)..(25): SEQ ID NO: 89; WAN024A9B; Start 31; Stop 55
ctccttgacataaataactctcacc

SEQ ID NO: 255461 - DNA, 25 bp, Artificial
  probe
  misc_feature (1)..(25): SEQ ID NO: 89; WAN024A9B; Start 33; Stop 57
ccttgacataaataactctcaccaa

SEQ ID NO: 255462 - DNA, 25 bp, Artificial
  probe
  misc_feature (1)..(25): SEQ ID NO: 89; WAN024A9B; Start 30; Stop 54
actccttgacataaataactctcac

SEQ ID NO: 255463 - DNA, 25 bp, Artificial
  probe
  misc_feature (1)..(25): SEQ ID NO: 89; WAN024A9B; Start 29; Stop 53
cactccttgacataaataactctca

SEQ ID NO: 255464 - DNA, 25 bp, Artificial
  probe
  misc_feature (1)..(25): SEQ ID NO: 89; WAN024A9B; Start 28; Stop 52
tcactccttgacataaataactctc

SEQ ID NO: 255465 - DNA, 25 bp, Artificial
  probe
  misc_feature (1)..(25): SEQ ID NO: 89; WAN024A9B; Start 27; Stop 51
atcactccttgacataaataactct

SEQ ID NO: 255466 - DNA, 25 bp, Artificial
  probe
  misc_feature (1)..(25): SEQ ID NO: 89; WAN024A9B; Start 34; Stop 58
cttgacataaataactctcaccaat

SEQ ID NO: 255467 - DNA, 25 bp, Artificial
  probe
  misc_feature (1)..(25): SEQ ID NO: 89; WAN024A9B; Start 26; Stop 50
aatcactccttgacataaataactc

SEQ ID NO: 255468 - DNA, 25 bp, Artificial
  probe
  misc_feature (1)..(25): SEQ ID NO: 89; WAN024A9B; Start 46; Stop 70
aactctcaccaataaaagactatgt

SEQ ID NO: 255469 - DNA, 25 bp, Artificial
  probe
  misc_feature (1)..(25): SEQ ID NO: 89; WAN024A9B; Start 21; Stop 45
tttctaatcactccttgacataaat

SEQ ID NO: 255470 - DNA, 25 bp, Artificial
  probe
  misc_feature (1)..(25): SEQ ID NO: 89; WAN024A9B; Start 20; Stop 44
atttctaatcactccttgacataaa

SEQ ID NO: 255471 - DNA, 25 bp, Artificial
  probe
  misc_feature (1)..(25): SEQ ID NO: 89; WAN024A9B; Start 17; Stop 41
tttatttctaatcactccttgacat

SEQ ID NO: 255472 - DNA, 25 bp, Artificial
  probe
  misc_feature (1)..(25): SEQ ID NO: 89; WAN024A9B; Start 16; Stop 40
atttatttctaatcactccttgaca

SEQ ID NO: 255473 - DNA, 25 bp, Artificial
  probe
  misc_feature (1)..(25): SEQ ID NO: 89; WAN024A9B; Start 47; Stop 71
actctcaccaataaaagactatgtc

SEQ ID NO: 255474 - DNA, 25 bp, Artificial
  probe
  misc_feature (1)..(25): SEQ ID NO: 89; WAN024A9B; Start 36; Stop 60
tgacataaataactctcaccaataa

SEQ ID NO: 255475 - DNA, 25 bp, Artificial
  probe
  misc_feature (1)..(25): SEQ ID NO: 89; WAN024A9B; Start 35; Stop 59
ttgacataaataactctcaccaata

SEQ ID NO: 255476 - DNA, 25 bp, Artificial
  probe
  misc_feature (1)..(25): SEQ ID NO: 89; WAN024A9B; Start 25; Stop 49
taatcactccttgacataaataact

SEQ ID NO: 255477 - DNA, 25 bp, Artificial
  probe
  misc_feature (1)..(25): SEQ ID NO: 89; WAN024A9B; Start 24; Stop 48
ctaatcactccttgacataaataac

SEQ ID NO: 255478 - DNA, 25 bp, Artificial
  probe
  misc_feature (1)..(25): SEQ ID NO: 89; WAN024A9B; Start 23; Stop 47
tctaatcactccttgacataaataa

SEQ ID NO: 255479 - DNA, 25 bp, Artificial
  probe
  misc_feature (1)..(25): SEQ ID NO: 89; WAN024A9B; Start 22; Stop 46
ttctaatcactccttgacataaata

SEQ ID NO: 255480 - DNA, 25 bp, Artificial
  probe
  misc_feature (1)..(25): SEQ ID NO: 89; WAN024A9B; Start 19; Stop 43
tatttctaatcactccttgacataa

SEQ ID NO: 255481 - DNA, 25 bp, Artificial
  probe
  misc_feature (1)..(25): SEQ ID NO: 89; WAN024A9B; Start 18; Stop 42
ttatttctaatcactccttgacata

SEQ ID NO: 255482 - DNA, 25 bp, Artificial
  probe
  misc_feature (1)..(25): SEQ ID NO: 89; WAN024A9B; Start 15; Stop 39
aatttatttctaatcactccttgac

SEQ ID NO: 255483 - DNA, 25 bp, Artificial
  probe
  misc_feature (1)..(25): SEQ ID NO: 89; WAN024A9B; Start 37; Stop 61
gacataaataactctcaccaataaa

SEQ ID NO: 255484 - DNA, 25 bp, Artificial
  probe
  misc_feature (1)..(25): SEQ ID NO: 89; WAN024A9B; Start 42; Stop 66
aaataactctcaccaataaaagact

SEQ ID NO: 255485 - DNA, 25 bp, Artificial
  probe
  misc_feature (1)..(25): SEQ ID NO: 89; WAN024A9B; Start 45; Stop 69
taactctcaccaataaaagactatg

SEQ ID NO: 255486 - DNA, 25 bp, Artificial
  probe
  misc_feature (1)..(25): SEQ ID NO: 89; WAN024A9B; Start 43; Stop 67
aataactctcaccaataaaagacta

SEQ ID NO: 255487 - DNA, 25 bp, Artificial
  probe
  misc_feature (1)..(25): SEQ ID NO: 89; WAN024A9B; Start 48; Stop 72
ctctcaccaataaaagactatgtct

SEQ ID NO: 255488 - DNA, 25 bp, Artificial
  probe
  misc_feature (1)..(25): SEQ ID NO: 89; WAN024A9B; Start 44; Stop 68
ataactctcaccaataaaagactat

SEQ ID NO: 255489 - DNA, 25 bp, Artificial
  probe
  misc_feature (1)..(25): SEQ ID NO: 89; WAN024A9B; Start 41; Stop 65
taaataactctcaccaataaaagac

SEQ ID NO: 255490 - DNA, 25 bp, Artificial
  probe
  misc_feature (1)..(25): SEQ ID NO: 90; WAN0249KR; Start 13; Stop 37
aatagactgcctgaattgtagaagg

SEQ ID NO: 255491 - DNA, 25 bp, Artificial
  probe
  misc_feature (1)..(25): SEQ ID NO: 90; WAN0249KR; Start 21; Stop 45
gcctgaattgtagaaggtaaggaat

SEQ ID NO: 255492 - DNA, 25 bp, Artificial
  probe
  misc_feature (1)..(25): SEQ ID NO: 90; WAN0249KR; Start 15; Stop 39
tagactgcctgaattgtagaaggta

SEQ ID NO: 255493 - DNA, 25 bp, Artificial
  probe
  misc_feature (1)..(25): SEQ ID NO: 90; WAN0249KR; Start 27; Stop 51
attgtagaaggtaaggaattatgct

SEQ ID NO: 255494 - DNA, 25 bp, Artificial
  probe
  misc_feature (1)..(25): SEQ ID NO: 90; WAN0249KR; Start 17; Stop 41
gactgcctgaattgtagaaggtaag

SEQ ID NO: 255495 - DNA, 25 bp, Artificial
  probe
  misc_feature (1)..(25): SEQ ID NO: 90; WAN0249KR; Start 14; Stop 38
atagactgcctgaattgtagaaggt

SEQ ID NO: 255496 - DNA, 25 bp, Artificial
  probe
  misc_feature (1)..(25): SEQ ID NO: 90; WAN0249KR; Start 16; Stop 40
agactgcctgaattgtagaaggtaa

SEQ ID NO: 255497 - DNA, 25 bp, Artificial
  probe
  misc_feature (1)..(25): SEQ ID NO: 90; WAN0249KR; Start 22; Stop 46
cctgaattgtagaaggtaaggaatt

SEQ ID NO: 255498 - DNA, 25 bp, Artificial
  probe
  misc_feature (1)..(25): SEQ ID NO: 90; WAN0249KR; Start 20; Stop 44
tgcctgaattgtagaaggtaaggaa

SEQ ID NO: 255499 - DNA, 25 bp, Artificial
  probe
  misc_feature (1)..(25): SEQ ID NO: 90; WAN0249KR; Start 28; Stop 52
ttgtagaaggtaaggaattatgcta

SEQ ID NO: 255500 - DNA, 25 bp, Artificial
  probe
  misc_feature (1)..(25): SEQ ID NO: 90; WAN0249KR; Start 19; Stop 43
ctgcctgaattgtagaaggtaagga

SEQ ID NO: 255501 - DNA, 25 bp, Artificial
  probe
  misc_feature (1)..(25): SEQ ID NO: 90; WAN0249KR; Start 29; Stop 53
tgtagaaggtaaggaattatgctat

SEQ ID NO: 255502 - DNA, 25 bp, Artificial
  probe
  misc_feature (1)..(25): SEQ ID NO: 90; WAN0249KR; Start 18; Stop 42
actgcctgaattgtagaaggtaagg

SEQ ID NO: 255503 - DNA, 25 bp, Artificial
  probe
  misc_feature (1)..(25): SEQ ID NO: 90; WAN0249KR; Start 12; Stop 36
aaatagactgcctgaattgtagaag

SEQ ID NO: 255504 - DNA, 25 bp, Artificial
  probe
  misc_feature (1)..(25): SEQ ID NO: 90; WAN0249KR; Start 3; Stop 27
aatccaaataaatagactgcctgaa

SEQ ID NO: 255505 - DNA, 25 bp, Artificial
  probe
  misc_feature (1)..(25): SEQ ID NO: 90; WAN0249KR; Start 2; Stop 26
aaatccaaataaatagactgcctga

SEQ ID NO: 255506 - DNA, 25 bp, Artificial
  probe
  misc_feature (1)..(25): SEQ ID NO: 90; WAN0249KR; Start 4; Stop 28
atccaaataaatagactgcctgaat

SEQ ID NO: 255507 - DNA, 25 bp, Artificial
  probe
  misc_feature (1)..(25): SEQ ID NO: 90; WAN0249KR; Start 5; Stop 29
tccaaataaatagactgcctgaatt

SEQ ID NO: 255508 - DNA, 25 bp, Artificial
  probe
  misc_feature (1)..(25): SEQ ID NO: 90; WAN0249KR; Start 60; Stop 84
actattctaaggaaagagggtgtta

SEQ ID NO: 255509 - DNA, 25 bp, Artificial
  probe
  misc_feature (1)..(25): SEQ ID NO: 90; WAN0249KR; Start 59; Stop 83
tactattctaaggaaagagggtgtt

SEQ ID NO: 255510 - DNA, 25 bp, Artificial
  probe
  misc_feature (1)..(25): SEQ ID NO: 90; WAN0249KR; Start 57; Stop 81
ggtactattctaaggaaagagggtg

SEQ ID NO: 255511 - DNA, 25 bp, Artificial
  probe
  misc_feature (1)..(25): SEQ ID NO: 90; WAN0249KR; Start 56; Stop 80
tggtactattctaaggaaagagggt

SEQ ID NO: 255512 - DNA, 25 bp, Artificial
  probe
  misc_feature (1)..(25): SEQ ID NO: 90; WAN0249KR; Start 26; Stop 50
aattgtagaaggtaaggaattatgc

SEQ ID NO: 255513 - DNA, 25 bp, Artificial
  probe
  misc_feature (1)..(25): SEQ ID NO: 90; WAN0249KR; Start 58; Stop 82
gtactattctaaggaaagagggtgt

SEQ ID NO: 255514 - DNA, 25 bp, Artificial
  probe
  misc_feature (1)..(25): SEQ ID NO: 90; WAN0249KR; Start 6; Stop 30
ccaaataaatagactgcctgaattg

SEQ ID NO: 255515 - DNA, 25 bp, Artificial
  probe
  misc_feature (1)..(25): SEQ ID NO: 90; WAN0249KR; Start 55; Stop 79
atggtactattctaaggaaagaggg

SEQ ID NO: 255516 - DNA, 25 bp, Artificial
  probe
  misc_feature (1)..(25): SEQ ID NO: 90; WAN0249KR; Start 11; Stop 35
taaatagactgcctgaattgtagaa

SEQ ID NO: 255517 - DNA, 25 bp, Artificial
  probe
  misc_feature (1)..(25): SEQ ID NO: 90; WAN0249KR; Start 7; Stop 31
caaataaatagactgcctgaattgt

SEQ ID NO: 255518 - DNA, 25 bp, Artificial
  probe
  misc_feature (1)..(25): SEQ ID NO: 90; WAN0249KR; Start 10; Stop 34
ataaatagactgcctgaattgtaga

SEQ ID NO: 255519 - DNA, 25 bp, Artificial
  probe
  misc_feature (1)..(25): SEQ ID NO: 90; WAN0249KR; Start 35; Stop 59
aggtaaggaattatgctataatggt

SEQ ID NO: 255520 - DNA, 25 bp, Artificial
  probe
  misc_feature (1)..(25): SEQ ID NO: 90; WAN0249KR; Start 61; Stop 85
ctattctaaggaaagagggtgttag

SEQ ID NO: 255521 - DNA, 25 bp, Artificial
  probe
  misc_feature (1)..(25): SEQ ID NO: 90; WAN0249KR; Start 48; Stop 72
tgctataatggtactattctaagga

SEQ ID NO: 255522 - DNA, 25 bp, Artificial
  probe
  misc_feature (1)..(25): SEQ ID NO: 90; WAN0249KR; Start 23; Stop 47
ctgaattgtagaaggtaaggaatta

SEQ ID NO: 255523 - DNA, 25 bp, Artificial
  probe
  misc_feature (1)..(25): SEQ ID NO: 91; WAN0249HL; Start 113; Stop 137
tgtgataaaatagtagaaaagtcca

SEQ ID NO: 255524 - DNA, 25 bp, Artificial
  probe
  misc_feature (1)..(25): SEQ ID NO: 91; WAN0249HL; Start 114; Stop 138
gtgataaaatagtagaaaagtccaa

SEQ ID NO: 255525 - DNA, 25 bp, Artificial
  probe
  misc_feature (1)..(25): SEQ ID NO: 91; WAN0249HL; Start 112; Stop 136
ttgtgataaaatagtagaaaagtcc

SEQ ID NO: 255526 - DNA, 25 bp, Artificial
  probe
  misc_feature (1)..(25): SEQ ID NO: 92; WAN0249QR; Start 21; Stop 45
aaacagtcgccatcatcatttattg

SEQ ID NO: 255527 - DNA, 25 bp, Artificial
  probe
  misc_feature (1)..(25): SEQ ID NO: 92; WAN0249QR; Start 25; Stop 49
agtcgccatcatcatttattgagat

SEQ ID NO: 255528 - DNA, 25 bp, Artificial
  probe
  misc_feature (1)..(25): SEQ ID NO: 92; WAN0249QR; Start 119; Stop 143
agcagatgtagtgtactattctagt

SEQ ID NO: 255529 - DNA, 25 bp, Artificial
  probe
  misc_feature (1)..(25): SEQ ID NO: 92; WAN0249QR; Start 26; Stop 50
gtcgccatcatcatttattgagata

SEQ ID NO: 255530 - DNA, 25 bp, Artificial
  probe
  misc_feature (1)..(25): SEQ ID NO: 92; WAN0249QR; Start 22; Stop 46
aacagtcgccatcatcatttattga

SEQ ID NO: 255531 - DNA, 25 bp, Artificial
  probe
  misc_feature (1)..(25): SEQ ID NO: 92; WAN0249QR; Start 24; Stop 48
cagtcgccatcatcatttattgaga

SEQ ID NO: 255532 - DNA, 25 bp, Artificial
  probe
  misc_feature (1)..(25): SEQ ID NO: 92; WAN0249QR; Start 120; Stop 144
gcagatgtagtgtactattctagtc

SEQ ID NO: 255533 - DNA, 25 bp, Artificial
  probe
  misc_feature (1)..(25): SEQ ID NO: 92; WAN0249QR; Start 27; Stop 51
tcgccatcatcatttattgagataa

SEQ ID NO: 255534 - DNA, 25 bp, Artificial
  probe
  misc_feature (1)..(25): SEQ ID NO: 92; WAN0249QR; Start 23; Stop 47
acagtcgccatcatcatttattgag

SEQ ID NO: 255535 - DNA, 25 bp, Artificial
  probe
  misc_feature (1)..(25): SEQ ID NO: 92; WAN0249QR; Start 118; Stop 142
tagcagatgtagtgtactattctag

SEQ ID NO: 255536 - DNA, 25 bp, Artificial
  probe
  misc_feature (1)..(25): SEQ ID NO: 92; WAN0249QR; Start 28; Stop 52
cgccatcatcatttattgagataat

SEQ ID NO: 255537 - DNA, 25 bp, Artificial
  probe
  misc_feature (1)..(25): SEQ ID NO: 92; WAN0249QR; Start 117; Stop 141
ttagcagatgtagtgtactattcta

SEQ ID NO: 255538 - DNA, 25 bp, Artificial
  probe
  misc_feature (1)..(25): SEQ ID NO: 92; WAN0249QR; Start 123; Stop 147
gatgtagtgtactattctagtctca

SEQ ID NO: 255539 - DNA, 25 bp, Artificial
  probe
  misc_feature (1)..(25): SEQ ID NO: 92; WAN0249QR; Start 121; Stop 145
cagatgtagtgtactattctagtct

SEQ ID NO: 255540 - DNA, 25 bp, Artificial
  probe
  misc_feature (1)..(25): SEQ ID NO: 92; WAN0249QR; Start 20; Stop 44
aaaacagtcgccatcatcatttatt

SEQ ID NO: 255541 - DNA, 25 bp, Artificial
  probe
  misc_feature (1)..(25): SEQ ID NO: 92; WAN0249QR; Start 19; Stop 43
caaaacagtcgccatcatcatttat

SEQ ID NO: 255542 - DNA, 25 bp, Artificial
  probe
  misc_feature (1)..(25): SEQ ID NO: 92; WAN0249QR; Start 116; Stop 140
tttagcagatgtagtgtactattct

SEQ ID NO: 255543 - DNA, 25 bp, Artificial
  probe
  misc_feature (1)..(25): SEQ ID NO: 92; WAN0249QR; Start 122; Stop 146
agatgtagtgtactattctagtctc

SEQ ID NO: 255544 - DNA, 25 bp, Artificial
  probe
  misc_feature (1)..(25): SEQ ID NO: 92; WAN0249QR; Start 231; Stop 255
agatttcgatttgaagtaacttgtt

SEQ ID NO: 255545 - DNA, 25 bp, Artificial
  probe
  misc_feature (1)..(25): SEQ ID NO: 92; WAN0249QR; Start 18; Stop 42
acaaaacagtcgccatcatcattta

SEQ ID NO: 255546 - DNA, 25 bp, Artificial
  probe
  misc_feature (1)..(25): SEQ ID NO: 92; WAN0249QR; Start 125; Stop 149
tgtagtgtactattctagtctcaat

SEQ ID NO: 255547 - DNA, 25 bp, Artificial
  probe
  misc_feature (1)..(25): SEQ ID NO: 92; WAN0249QR; Start 124; Stop 148
atgtagtgtactattctagtctcaa

SEQ ID NO: 255548 - DNA, 25 bp, Artificial
  probe
  misc_feature (1)..(25): SEQ ID NO: 92; WAN0249QR; Start 17; Stop 41
aacaaaacagtcgccatcatcattt

SEQ ID NO: 255549 - DNA, 25 bp, Artificial
  probe
  misc_feature (1)..(25): SEQ ID NO: 92; WAN0249QR; Start 16; Stop 40
aaacaaaacagtcgccatcatcatt

SEQ ID NO: 255550 - DNA, 25 bp, Artificial
  probe
  misc_feature (1)..(25): SEQ ID NO: 92; WAN0249QR; Start 220; Stop 244
agtaaacttgtagatttcgatttga

SEQ ID NO: 255551 - DNA, 25 bp, Artificial
  probe
  misc_feature (1)..(25): SEQ ID NO: 92; WAN0249QR; Start 232; Stop 256
gatttcgatttgaagtaacttgttt

SEQ ID NO: 255552 - DNA, 25 bp, Artificial
  probe
  misc_feature (1)..(25): SEQ ID NO: 92; WAN0249QR; Start 230; Stop 254
tagatttcgatttgaagtaacttgt

SEQ ID NO: 255553 - DNA, 25 bp, Artificial
  probe
  misc_feature (1)..(25): SEQ ID NO: 92; WAN0249QR; Start 228; Stop 252
tgtagatttcgatttgaagtaactt

SEQ ID NO: 255554 - DNA, 25 bp, Artificial
  probe
  misc_feature (1)..(25): SEQ ID NO: 92; WAN0249QR; Start 227; Stop 251
ttgtagatttcgatttgaagtaact

SEQ ID NO: 255555 - DNA, 25 bp, Artificial
  probe
  misc_feature (1)..(25): SEQ ID NO: 92; WAN0249QR; Start 229; Stop 253
gtagatttcgatttgaagtaacttg

SEQ ID NO: 255556 - DNA, 25 bp, Artificial
  probe
  misc_feature (1)..(25): SEQ ID NO: 92; WAN0249QR; Start 226; Stop 250
cttgtagatttcgatttgaagtaac

SEQ ID NO: 255557 - DNA, 25 bp, Artificial
  probe
  misc_feature (1)..(25): SEQ ID NO: 92; WAN0249QR; Start 15; Stop 39
caaacaaaacagtcgccatcatcat

SEQ ID NO: 255558 - DNA, 25 bp, Artificial
  probe
  misc_feature (1)..(25): SEQ ID NO: 92; WAN0249QR; Start 1; Stop 25
aaaatcgacaagcacaaacaaaaca

SEQ ID NO: 255559 - DNA, 25 bp, Artificial
  probe
  misc_feature (1)..(25): SEQ ID NO: 93; WAN024CRK-3; Start 997; Stop 1021
tgtttatggaagattatcagggagc

SEQ ID NO: 255560 - DNA, 25 bp, Artificial
  probe
  misc_feature (1)..(25): SEQ ID NO: 93; WAN024CRK-3; Start 1447; Stop 1471
aacatctggtgtcacaagtattgga

SEQ ID NO: 255561 - DNA, 25 bp, Artificial
  probe
  misc_feature (1)..(25): SEQ ID NO: 93; WAN024CRK-3; Start 991; Stop 1015
ctgccctgtttatggaagattatca

SEQ ID NO: 255562 - DNA, 25 bp, Artificial
  probe
  misc_feature (1)..(25): SEQ ID NO: 93; WAN024CRK-3; Start 803; Stop 827
gactgaattgccagacttgattgag

SEQ ID NO: 255563 - DNA, 25 bp, Artificial
  probe
  misc_feature (1)..(25): SEQ ID NO: 93; WAN024CRK-3; Start 998; Stop 1022
gtttatggaagattatcagggagcc

SEQ ID NO: 255564 - DNA, 25 bp, Artificial
  probe
  misc_feature (1)..(25): SEQ ID NO: 93; WAN024CRK-3; Start 990; Stop 1014
cctgccctgtttatggaagattatc

SEQ ID NO: 255565 - DNA, 25 bp, Artificial
  probe
  misc_feature (1)..(25): SEQ ID NO: 93; WAN024CRK-3; Start 710; Stop 734
gccaagcaagaaagaatttatgaaa

SEQ ID NO: 255566 - DNA, 25 bp, Artificial
  probe
  misc_feature (1)..(25): SEQ ID NO: 93; WAN024CRK-3; Start 801; Stop 825
ctgactgaattgccagacttgattg

SEQ ID NO: 255567 - DNA, 25 bp, Artificial
  probe
  misc_feature (1)..(25): SEQ ID NO: 93; WAN024CRK-3; Start 1495; Stop 1519
tgaccctagcagaaattagagaaat

SEQ ID NO: 255568 - DNA, 25 bp, Artificial
  probe
  misc_feature (1)..(25): SEQ ID NO: 93; WAN024CRK-3; Start 792; Stop 816
gaagaagttctgactgaattgccag

SEQ ID NO: 255569 - DNA, 25 bp, Artificial
  probe
  misc_feature (1)..(25): SEQ ID NO: 93; WAN024CRK-3; Start 465; Stop 489
gagagccatcaaatctatgtgacta

SEQ ID NO: 255570 - DNA, 25 bp, Artificial
  probe
  misc_feature (1)..(25): SEQ ID NO: 93; WAN024CRK-3; Start 866; Stop 890
tatttaccttgcccagttacaacag

SEQ ID NO: 255571 - DNA, 25 bp, Artificial
  probe
  misc_feature (1)..(25): SEQ ID NO: 93; WAN024CRK-3; Start 865; Stop 889
ctatttaccttgcccagttacaaca

SEQ ID NO: 255572 - DNA, 25 bp, Artificial
  probe
  misc_feature (1)..(25): SEQ ID NO: 93; WAN024CRK-3; Start 1091; Stop 1115
tttctctcagttcaagggaatgttg

SEQ ID NO: 255573 - DNA, 25 bp, Artificial
  probe
  misc_feature (1)..(25): SEQ ID NO: 93; WAN024CRK-3; Start 802; Stop 826
tgactgaattgccagacttgattga

SEQ ID NO: 255574 - DNA, 25 bp, Artificial
  probe
  misc_feature (1)..(25): SEQ ID NO: 93; WAN024CRK-3; Start 466; Stop 490
agagccatcaaatctatgtgactag

SEQ ID NO: 255575 - DNA, 25 bp, Artificial
  probe
  misc_feature (1)..(25): SEQ ID NO: 93; WAN024CRK-3; Start 1445; Stop 1469
gaaacatctggtgtcacaagtattg

SEQ ID NO: 255576 - DNA, 25 bp, Artificial
  probe
  misc_feature (1)..(25): SEQ ID NO: 93; WAN024CRK-3; Start 1444; Stop 1468
agaaacatctggtgtcacaagtatt

SEQ ID NO: 255577 - DNA, 25 bp, Artificial
  probe
  misc_feature (1)..(25): SEQ ID NO: 93; WAN024CRK-3; Start 1443; Stop 1467
aagaaacatctggtgtcacaagtat

SEQ ID NO: 255578 - DNA, 25 bp, Artificial
  probe
  misc_feature (1)..(25): SEQ ID NO: 93; WAN024CRK-3; Start 1442; Stop 1466
aaagaaacatctggtgtcacaagta

SEQ ID NO: 255579 - DNA, 25 bp, Artificial
  probe
  misc_feature (1)..(25): SEQ ID NO: 93; WAN024CRK-3; Start 790; Stop 814
aagaagaagttctgactgaattgcc

SEQ ID NO: 255580 - DNA, 25 bp, Artificial
  probe
  misc_feature (1)..(25): SEQ ID NO: 93; WAN024CRK-3; Start 992; Stop 1016
tgccctgtttatggaagattatcag

SEQ ID NO: 255581 - DNA, 25 bp, Artificial
  probe
  misc_feature (1)..(25): SEQ ID NO: 93; WAN024CRK-3; Start 1494; Stop 1518
ctgaccctagcagaaattagagaaa

SEQ ID NO: 255582 - DNA, 25 bp, Artificial
  probe
  misc_feature (1)..(25): SEQ ID NO: 93; WAN024CRK-3; Start 908; Stop 932
tcaagtgtcagaacaggaatttcag

SEQ ID NO: 255583 - DNA, 25 bp, Artificial
  probe
  misc_feature (1)..(25): SEQ ID NO: 93; WAN024CRK-3; Start 907; Stop 931
ctcaagtgtcagaacaggaatttca

SEQ ID NO: 255584 - DNA, 25 bp, Artificial
  probe
  misc_feature (1)..(25): SEQ ID NO: 93; WAN024CRK-3; Start 467; Stop 491
gagccatcaaatctatgtgactagc

SEQ ID NO: 255585 - DNA, 25 bp, Artificial
  probe
  misc_feature (1)..(25): SEQ ID NO: 93; WAN024CRK-3; Start 806; Stop 830
tgaattgccagacttgattgaggtg

SEQ ID NO: 255586 - DNA, 25 bp, Artificial
  probe
  misc_feature (1)..(25): SEQ ID NO: 93; WAN024CRK-3; Start 814; Stop 838
cagacttgattgaggtggtttataa

SEQ ID NO: 255587 - DNA, 25 bp, Artificial
  probe
  misc_feature (1)..(25): SEQ ID NO: 93; WAN024CRK-3; Start 1446; Stop 1470
aaacatctggtgtcacaagtattgg

SEQ ID NO: 255588 - DNA, 25 bp, Artificial
  probe
  misc_feature (1)..(25): SEQ ID NO: 93; WAN024CRK-3; Start 996; Stop 1020
ctgtttatggaagattatcagggag

SEQ ID NO: 255589 - DNA, 25 bp, Artificial
  probe
  misc_feature (1)..(25): SEQ ID NO: 93; WAN024CRK-3; Start 864; Stop 888
gctatttaccttgcccagttacaac

SEQ ID NO: 255590 - DNA, 25 bp, Artificial
  probe
  misc_feature (1)..(25): SEQ ID NO: 93; WAN024CRK-3; Start 660; Stop 684
catctgggtgagttgtggtctattt

SEQ ID NO: 255591 - DNA, 25 bp, Artificial
  probe
  misc_feature (1)..(25): SEQ ID NO: 93; WAN024CRK-3; Start 1496; Stop 1520
gaccctagcagaaattagagaaatt

SEQ ID NO: 255592 - DNA, 25 bp, Artificial
  probe
  misc_feature (1)..(25): SEQ ID NO: 94; WAN024AMD; Start 40; Stop 64
gctacattataccagatttggagaa

SEQ ID NO: 255593 - DNA, 25 bp, Artificial
  probe
  misc_feature (1)..(25): SEQ ID NO: 94; WAN024AMD; Start 3; Stop 27
aatctacctctactgtactgaattt

SEQ ID NO: 255594 - DNA, 25 bp, Artificial
  probe
  misc_feature (1)..(25): SEQ ID NO: 94; WAN024AMD; Start 2; Stop 26
aaatctacctctactgtactgaatt

SEQ ID NO: 255595 - DNA, 25 bp, Artificial
  probe
  misc_feature (1)..(25): SEQ ID NO: 94; WAN024AMD; Start 39; Stop 63
agctacattataccagatttggaga

SEQ ID NO: 255596 - DNA, 25 bp, Artificial
  probe
  misc_feature (1)..(25): SEQ ID NO: 94; WAN024AMD; Start 6; Stop 30
ctacctctactgtactgaattttga

SEQ ID NO: 255597 - DNA, 25 bp, Artificial
  probe
  misc_feature (1)..(25): SEQ ID NO: 94; WAN024AMD; Start 5; Stop 29
tctacctctactgtactgaattttg

SEQ ID NO: 255598 - DNA, 25 bp, Artificial
  probe
  misc_feature (1)..(25): SEQ ID NO: 94; WAN024AMD; Start 41; Stop 65
ctacattataccagatttggagaaa

SEQ ID NO: 255599 - DNA, 25 bp, Artificial
  probe
  misc_feature (1)..(25): SEQ ID NO: 94; WAN024AMD; Start 8; Stop 32
acctctactgtactgaattttgata

SEQ ID NO: 255600 - DNA, 25 bp, Artificial
  probe
  misc_feature (1)..(25): SEQ ID NO: 94; WAN024AMD; Start 7; Stop 31
tacctctactgtactgaattttgat

SEQ ID NO: 255601 - DNA, 25 bp, Artificial
  probe
  misc_feature (1)..(25): SEQ ID NO: 94; WAN024AMD; Start 4; Stop 28
atctacctctactgtactgaatttt

SEQ ID NO: 255602 - DNA, 25 bp, Artificial
  probe
  misc_feature (1)..(25): SEQ ID NO: 94; WAN024AMD; Start 1; Stop 25
aaaatctacctctactgtactgaat

SEQ ID NO: 255603 - DNA, 25 bp, Artificial
  probe
  misc_feature (1)..(25): SEQ ID NO: 94; WAN024AMD; Start 38; Stop 62
tagctacattataccagatttggag

SEQ ID NO: 255604 - DNA, 25 bp, Artificial
  probe
  misc_feature (1)..(25): SEQ ID NO: 94; WAN024AMD; Start 37; Stop 61
atagctacattataccagatttgga

SEQ ID NO: 255605 - DNA, 25 bp, Artificial
  probe
  misc_feature (1)..(25): SEQ ID NO: 94; WAN024AMD; Start 9; Stop 33
cctctactgtactgaattttgatat

SEQ ID NO: 255606 - DNA, 25 bp, Artificial
  probe
  misc_feature (1)..(25): SEQ ID NO: 94; WAN024AMD; Start 43; Stop 67
acattataccagatttggagaaaat

SEQ ID NO: 255607 - DNA, 25 bp, Artificial
  probe
  misc_feature (1)..(25): SEQ ID NO: 94; WAN024AMD; Start 42; Stop 66
tacattataccagatttggagaaaa

SEQ ID NO: 255608 - DNA, 25 bp, Artificial
  probe
  misc_feature (1)..(25): SEQ ID NO: 94; WAN024AMD; Start 36; Stop 60
tatagctacattataccagatttgg

SEQ ID NO: 255609 - DNA, 25 bp, Artificial
  probe
  misc_feature (1)..(25): SEQ ID NO: 95; WAN024ANM; Start 95; Stop 119
cggtgactttaactaggaaatgatc

SEQ ID NO: 255610 - DNA, 25 bp, Artificial
  probe
  misc_feature (1)..(25): SEQ ID NO: 95; WAN024ANM; Start 94; Stop 118
gcggtgactttaactaggaaatgat

SEQ ID NO: 255611 - DNA, 25 bp, Artificial
  probe
  misc_feature (1)..(25): SEQ ID NO: 95; WAN024ANM; Start 148; Stop 172
ttgcctaaccagaagttatgcctac

SEQ ID NO: 255612 - DNA, 25 bp, Artificial
  probe
  misc_feature (1)..(25): SEQ ID NO: 95; WAN024ANM; Start 96; Stop 120
ggtgactttaactaggaaatgatct

SEQ ID NO: 255613 - DNA, 25 bp, Artificial
  probe
  misc_feature (1)..(25): SEQ ID NO: 95; WAN024ANM; Start 153; Stop 177
taaccagaagttatgcctacagctt

SEQ ID NO: 255614 - DNA, 25 bp, Artificial
  probe
  misc_feature (1)..(25): SEQ ID NO: 95; WAN024ANM; Start 151; Stop 175
cctaaccagaagttatgcctacagc

SEQ ID NO: 255615 - DNA, 25 bp, Artificial
  probe
  misc_feature (1)..(25): SEQ ID NO: 95; WAN024ANM; Start 150; Stop 174
gcctaaccagaagttatgcctacag

SEQ ID NO: 255616 - DNA, 25 bp, Artificial
  probe
  misc_feature (1)..(25): SEQ ID NO: 95; WAN024ANM; Start 152; Stop 176
ctaaccagaagttatgcctacagct

SEQ ID NO: 255617 - DNA, 25 bp, Artificial
  probe
  misc_feature (1)..(25): SEQ ID NO: 95; WAN024ANM; Start 154; Stop 178
aaccagaagttatgcctacagcttg

SEQ ID NO: 255618 - DNA, 25 bp, Artificial
  probe
  misc_feature (1)..(25): SEQ ID NO: 95; WAN024ANM; Start 93; Stop 117
ggcggtgactttaactaggaaatga

SEQ ID NO: 255619 - DNA, 25 bp, Artificial
  probe
  misc_feature (1)..(25): SEQ ID NO: 95; WAN024ANM; Start 147; Stop 171
tttgcctaaccagaagttatgccta

SEQ ID NO: 255620 - DNA, 25 bp, Artificial
  probe
  misc_feature (1)..(25): SEQ ID NO: 95; WAN024ANM; Start 149; Stop 173
tgcctaaccagaagttatgcctaca

SEQ ID NO: 255621 - DNA, 25 bp, Artificial
  probe
  misc_feature (1)..(25): SEQ ID NO: 95; WAN024ANM; Start 156; Stop 180
ccagaagttatgcctacagcttgtc

SEQ ID NO: 255622 - DNA, 25 bp, Artificial
  probe
  misc_feature (1)..(25): SEQ ID NO: 95; WAN024ANM; Start 97; Stop 121
gtgactttaactaggaaatgatctt

SEQ ID NO: 255623 - DNA, 25 bp, Artificial
  probe
  misc_feature (1)..(25): SEQ ID NO: 95; WAN024ANM; Start 9; Stop 33
aatgaaaatgaacaaaatgcttgcg

SEQ ID NO: 255624 - DNA, 25 bp, Artificial
  probe
  misc_feature (1)..(25): SEQ ID NO: 95; WAN024ANM; Start 8; Stop 32
aaatgaaaatgaacaaaatgcttgc

SEQ ID NO: 255625 - DNA, 25 bp, Artificial
  probe
  misc_feature (1)..(25): SEQ ID NO: 95; WAN024ANM; Start 157; Stop 181
cagaagttatgcctacagcttgtcg

SEQ ID NO: 255626 - DNA, 25 bp, Artificial
  probe
  misc_feature (1)..(25): SEQ ID NO: 95; WAN024ANM; Start 52; Stop 76
tatgataaaagagtcttcagggcag

SEQ ID NO: 255627 - DNA, 25 bp, Artificial
  probe
  misc_feature (1)..(25): SEQ ID NO: 95; WAN024ANM; Start 146; Stop 170
ctttgcctaaccagaagttatgcct

SEQ ID NO: 255628 - DNA, 25 bp, Artificial
  probe
  misc_feature (1)..(25): SEQ ID NO: 95; WAN024ANM; Start 51; Stop 75
ttatgataaaagagtcttcagggca

SEQ ID NO: 255629 - DNA, 25 bp, Artificial
  probe
  misc_feature (1)..(25): SEQ ID NO: 95; WAN024ANM; Start 50; Stop 74
gttatgataaaagagtcttcagggc

SEQ ID NO: 255630 - DNA, 25 bp, Artificial
  probe
  misc_feature (1)..(25): SEQ ID NO: 95; WAN024ANM; Start 174; Stop 198
gcttgtcgcctagtctaaaagaaaa

SEQ ID NO: 255631 - DNA, 25 bp, Artificial
  probe
  misc_feature (1)..(25): SEQ ID NO: 95; WAN024ANM; Start 155; Stop 179
accagaagttatgcctacagcttgt

SEQ ID NO: 255632 - DNA, 25 bp, Artificial
  probe
  misc_feature (1)..(25): SEQ ID NO: 95; WAN024ANM; Start 92; Stop 116
cggcggtgactttaactaggaaatg

SEQ ID NO: 255633 - DNA, 25 bp, Artificial
  probe
  misc_feature (1)..(25): SEQ ID NO: 95; WAN024ANM; Start 49; Stop 73
tgttatgataaaagagtcttcaggg

SEQ ID NO: 255634 - DNA, 25 bp, Artificial
  probe
  misc_feature (1)..(25): SEQ ID NO: 95; WAN024ANM; Start 98; Stop 122
tgactttaactaggaaatgatcttt

SEQ ID NO: 255635 - DNA, 25 bp, Artificial
  probe
  misc_feature (1)..(25): SEQ ID NO: 95; WAN024ANM; Start 5; Stop 29
tgaaaatgaaaatgaacaaaatgct

SEQ ID NO: 255636 - DNA, 25 bp, Artificial
  probe
  misc_feature (1)..(25): SEQ ID NO: 95; WAN024ANM; Start 122; Stop 146
ttccttttatactttgttgacaagc

SEQ ID NO: 255637 - DNA, 25 bp, Artificial
  probe
  misc_feature (1)..(25): SEQ ID NO: 95; WAN024ANM; Start 123; Stop 147
tccttttatactttgttgacaagct

SEQ ID NO: 255638 - DNA, 25 bp, Artificial
  probe
  misc_feature (1)..(25): SEQ ID NO: 95; WAN024ANM; Start 128; Stop 152
ttatactttgttgacaagctttgcc

SEQ ID NO: 255639 - DNA, 25 bp, Artificial
  probe
  misc_feature (1)..(25): SEQ ID NO: 95; WAN024ANM; Start 53; Stop 77
atgataaaagagtcttcagggcagg

SEQ ID NO: 255640 - DNA, 25 bp, Artificial
  probe
  misc_feature (1)..(25): SEQ ID NO: 95; WAN024ANM; Start 127; Stop 151
tttatactttgttgacaagctttgc

SEQ ID NO: 255641 - DNA, 25 bp, Artificial
  probe
  misc_feature (1)..(25): SEQ ID NO: 95; WAN024ANM; Start 130; Stop 154
atactttgttgacaagctttgccta

SEQ ID NO: 255642 - DNA, 25 bp, Artificial
  probe
  misc_feature (1)..(25): SEQ ID NO: 96; WAN024AAK; Start 102; Stop 126
cgcaaacgatatctacaaatacatc

SEQ ID NO: 255643 - DNA, 25 bp, Artificial
  probe
  misc_feature (1)..(25): SEQ ID NO: 96; WAN024AAK; Start 103; Stop 127
gcaaacgatatctacaaatacatct

SEQ ID NO: 255644 - DNA, 25 bp, Artificial
  probe
  misc_feature (1)..(25): SEQ ID NO: 96; WAN024AAK; Start 101; Stop 125
gcgcaaacgatatctacaaatacat

SEQ ID NO: 255645 - DNA, 25 bp, Artificial
  probe
  misc_feature (1)..(25): SEQ ID NO: 96; WAN024AAK; Start 42; Stop 66
cttctataaaagtcacctaaagagc

SEQ ID NO: 255646 - DNA, 25 bp, Artificial
  probe
  misc_feature (1)..(25): SEQ ID NO: 96; WAN024AAK; Start 41; Stop 65
acttctataaaagtcacctaaagag

SEQ ID NO: 255647 - DNA, 25 bp, Artificial
  probe
  misc_feature (1)..(25): SEQ ID NO: 96; WAN024AAK; Start 35; Stop 59
aactttacttctataaaagtcacct

SEQ ID NO: 255648 - DNA, 25 bp, Artificial
  probe
  misc_feature (1)..(25): SEQ ID NO: 96; WAN024AAK; Start 34; Stop 58
aaactttacttctataaaagtcacc

SEQ ID NO: 255649 - DNA, 25 bp, Artificial
  probe
  misc_feature (1)..(25): SEQ ID NO: 96; WAN024AAK; Start 36; Stop 60
actttacttctataaaagtcaccta

SEQ ID NO: 255650 - DNA, 25 bp, Artificial
  probe
  misc_feature (1)..(25): SEQ ID NO: 97; WAN024AM7; Start 48; Stop 72
aagtctgtttgttgaggaggataat

SEQ ID NO: 255651 - DNA, 25 bp, Artificial
  probe
  misc_feature (1)..(25): SEQ ID NO: 97; WAN024AM7; Start 47; Stop 71
gaagtctgtttgttgaggaggataa

SEQ ID NO: 255652 - DNA, 25 bp, Artificial
  probe
  misc_feature (1)..(25): SEQ ID NO: 97; WAN024AM7; Start 49; Stop 73
agtctgtttgttgaggaggataatt

SEQ ID NO: 255653 - DNA, 25 bp, Artificial
  probe
  misc_feature (1)..(25): SEQ ID NO: 97; WAN024AM7; Start 50; Stop 74
gtctgtttgttgaggaggataattt

SEQ ID NO: 255654 - DNA, 25 bp, Artificial
  probe
  misc_feature (1)..(25): SEQ ID NO: 97; WAN024AM7; Start 17; Stop 41
gaaaggctagaactaaagaatgacg

SEQ ID NO: 255655 - DNA, 25 bp, Artificial
  probe
  misc_feature (1)..(25): SEQ ID NO: 97; WAN024AM7; Start 15; Stop 39
tggaaaggctagaactaaagaatga

SEQ ID NO: 255656 - DNA, 25 bp, Artificial
  probe
  misc_feature (1)..(25): SEQ ID NO: 97; WAN024AM7; Start 16; Stop 40
ggaaaggctagaactaaagaatgac

SEQ ID NO: 255657 - DNA, 25 bp, Artificial
  probe
  misc_feature (1)..(25): SEQ ID NO: 97; WAN024AM7; Start 14; Stop 38
ttggaaaggctagaactaaagaatg

SEQ ID NO: 255658 - DNA, 25 bp, Artificial
  probe
  misc_feature (1)..(25): SEQ ID NO: 97; WAN024AM7; Start 46; Stop 70
ggaagtctgtttgttgaggaggata

SEQ ID NO: 255659 - DNA, 25 bp, Artificial
  probe
  misc_feature (1)..(25): SEQ ID NO: 97; WAN024AM7; Start 42; Stop 66
tgtaggaagtctgtttgttgaggag

SEQ ID NO: 255660 - DNA, 25 bp, Artificial
  probe
  misc_feature (1)..(25): SEQ ID NO: 97; WAN024AM7; Start 13; Stop 37
tttggaaaggctagaactaaagaat

SEQ ID NO: 255661 - DNA, 25 bp, Artificial
  probe
  misc_feature (1)..(25): SEQ ID NO: 97; WAN024AM7; Start 41; Stop 65
gtgtaggaagtctgtttgttgagga

SEQ ID NO: 255662 - DNA, 25 bp, Artificial
  probe
  misc_feature (1)..(25): SEQ ID NO: 97; WAN024AM7; Start 32; Stop 56
aagaatgacgtgtaggaagtctgtt

SEQ ID NO: 255663 - DNA, 25 bp, Artificial
  probe
  misc_feature (1)..(25): SEQ ID NO: 97; WAN024AM7; Start 43; Stop 67
gtaggaagtctgtttgttgaggagg

SEQ ID NO: 255664 - DNA, 25 bp, Artificial
  probe
  misc_feature (1)..(25): SEQ ID NO: 97; WAN024AM7; Start 18; Stop 42
aaaggctagaactaaagaatgacgt

SEQ ID NO: 255665 - DNA, 25 bp, Artificial
  probe
  misc_feature (1)..(25): SEQ ID NO: 97; WAN024AM7; Start 25; Stop 49
agaactaaagaatgacgtgtaggaa

SEQ ID NO: 255666 - DNA, 25 bp, Artificial
  probe
  misc_feature (1)..(25): SEQ ID NO: 97; WAN024AM7; Start 21; Stop 45
ggctagaactaaagaatgacgtgta

SEQ ID NO: 255667 - DNA, 25 bp, Artificial
  probe
  misc_feature (1)..(25): SEQ ID NO: 97; WAN024AM7; Start 26; Stop 50
gaactaaagaatgacgtgtaggaag

SEQ ID NO: 255668 - DNA, 25 bp, Artificial
  probe
  misc_feature (1)..(25): SEQ ID NO: 97; WAN024AM7; Start 44; Stop 68
taggaagtctgtttgttgaggagga

SEQ ID NO: 255669 - DNA, 25 bp, Artificial
  probe
  misc_feature (1)..(25): SEQ ID NO: 97; WAN024AM7; Start 22; Stop 46
gctagaactaaagaatgacgtgtag

SEQ ID NO: 255670 - DNA, 25 bp, Artificial
  probe
  misc_feature (1)..(25): SEQ ID NO: 97; WAN024AM7; Start 19; Stop 43
aaggctagaactaaagaatgacgtg

SEQ ID NO: 255671 - DNA, 25 bp, Artificial
  probe
  misc_feature (1)..(25): SEQ ID NO: 97; WAN024AM7; Start 24; Stop 48
tagaactaaagaatgacgtgtagga

SEQ ID NO: 255672 - DNA, 25 bp, Artificial
  probe
  misc_feature (1)..(25): SEQ ID NO: 97; WAN024AM7; Start 23; Stop 47
ctagaactaaagaatgacgtgtagg

SEQ ID NO: 255673 - DNA, 25 bp, Artificial
  probe
  misc_feature (1)..(25): SEQ ID NO: 97; WAN024AM7; Start 27; Stop 51
aactaaagaatgacgtgtaggaagt

SEQ ID NO: 255674 - DNA, 25 bp, Artificial
  probe
  misc_feature (1)..(25): SEQ ID NO: 97; WAN024AM7; Start 20; Stop 44
aggctagaactaaagaatgacgtgt

SEQ ID NO: 255675 - DNA, 25 bp, Artificial
  probe
  misc_feature (1)..(25): SEQ ID NO: 97; WAN024AM7; Start 45; Stop 69
aggaagtctgtttgttgaggaggat

SEQ ID NO: 255676 - DNA, 25 bp, Artificial
  probe
  misc_feature (1)..(25): SEQ ID NO: 97; WAN024AM7; Start 29; Stop 53
ctaaagaatgacgtgtaggaagtct

SEQ ID NO: 255677 - DNA, 25 bp, Artificial
  probe
  misc_feature (1)..(25): SEQ ID NO: 97; WAN024AM7; Start 30; Stop 54
taaagaatgacgtgtaggaagtctg

SEQ ID NO: 255678 - DNA, 25 bp, Artificial
  probe
  misc_feature (1)..(25): SEQ ID NO: 97; WAN024AM7; Start 28; Stop 52
actaaagaatgacgtgtaggaagtc

SEQ ID NO: 255679 - DNA, 25 bp, Artificial
  probe
  misc_feature (1)..(25): SEQ ID NO: 97; WAN024AM7; Start 40; Stop 64
cgtgtaggaagtctgtttgttgagg

SEQ ID NO: 255680 - DNA, 25 bp, Artificial
  probe
  misc_feature (1)..(25): SEQ ID NO: 97; WAN024AM7; Start 2; Stop 26
aaatggtttgttttggaaaggctag

SEQ ID NO: 255681 - DNA, 25 bp, Artificial
  probe
  misc_feature (1)..(25): SEQ ID NO: 97; WAN024AM7; Start 51; Stop 75
tctgtttgttgaggaggataatttt

SEQ ID NO: 255682 - DNA, 25 bp, Artificial
  probe
  misc_feature (1)..(25): SEQ ID NO: 97; WAN024AM7; Start 7; Stop 31
gtttgttttggaaaggctagaacta

SEQ ID NO: 255683 - DNA, 25 bp, Artificial
  probe
  misc_feature (1)..(25): SEQ ID NO: 98; WAN024APB; Start 69; Stop 93
ttttgaagaaggagggatatgaaaa

SEQ ID NO: 255684 - DNA, 25 bp, Artificial
  probe
  misc_feature (1)..(25): SEQ ID NO: 98; WAN024APB; Start 7; Stop 31
cttgcatcattctttgaattttgat

SEQ ID NO: 255685 - DNA, 25 bp, Artificial
  probe
  misc_feature (1)..(25): SEQ ID NO: 98; WAN024APB; Start 8; Stop 32
ttgcatcattctttgaattttgata

SEQ ID NO: 255686 - DNA, 25 bp, Artificial
  probe
  misc_feature (1)..(25): SEQ ID NO: 98; WAN024APB; Start 9; Stop 33
tgcatcattctttgaattttgatat

SEQ ID NO: 255687 - DNA, 25 bp, Artificial
  probe
  misc_feature (1)..(25): SEQ ID NO: 98; WAN024APB; Start 37; Stop 61
tctttctgtcaaatgttttgattgt

SEQ ID NO: 255688 - DNA, 25 bp, Artificial
  probe
  misc_feature (1)..(25): SEQ ID NO: 98; WAN024APB; Start 32; Stop 56
ataattctttctgtcaaatgttttg

SEQ ID NO: 255689 - DNA, 25 bp, Artificial
  probe
  misc_feature (1)..(25): SEQ ID NO: 98; WAN024APB; Start 36; Stop 60
ttctttctgtcaaatgttttgattg

SEQ ID NO: 255690 - DNA, 25 bp, Artificial
  probe
  misc_feature (1)..(25): SEQ ID NO: 98; WAN024APB; Start 38; Stop 62
ctttctgtcaaatgttttgattgta

SEQ ID NO: 255691 - DNA, 25 bp, Artificial
  probe
  misc_feature (1)..(25): SEQ ID NO: 98; WAN024APB; Start 43; Stop 67
tgtcaaatgttttgattgtaaaagt

SEQ ID NO: 255692 - DNA, 25 bp, Artificial
  probe
  misc_feature (1)..(25): SEQ ID NO: 98; WAN024APB; Start 41; Stop 65
tctgtcaaatgttttgattgtaaaa

SEQ ID NO: 255693 - DNA, 25 bp, Artificial
  probe
  misc_feature (1)..(25): SEQ ID NO: 98; WAN024APB; Start 40; Stop 64
ttctgtcaaatgttttgattgtaaa

SEQ ID NO: 255694 - DNA, 25 bp, Artificial
  probe
  misc_feature (1)..(25): SEQ ID NO: 98; WAN024APB; Start 39; Stop 63
tttctgtcaaatgttttgattgtaa

SEQ ID NO: 255695 - DNA, 25 bp, Artificial
  probe
  misc_feature (1)..(25): SEQ ID NO: 98; WAN024APB; Start 35; Stop 59
attctttctgtcaaatgttttgatt

SEQ ID NO: 255696 - DNA, 25 bp, Artificial
  probe
  misc_feature (1)..(25): SEQ ID NO: 98; WAN024APB; Start 34; Stop 58
aattctttctgtcaaatgttttgat

SEQ ID NO: 255697 - DNA, 25 bp, Artificial
  probe
  misc_feature (1)..(25): SEQ ID NO: 98; WAN024APB; Start 42; Stop 66
ctgtcaaatgttttgattgtaaaag

SEQ ID NO: 255698 - DNA, 25 bp, Artificial
  probe
  misc_feature (1)..(25): SEQ ID NO: 98; WAN024APB; Start 33; Stop 57
taattctttctgtcaaatgttttga

SEQ ID NO: 255699 - DNA, 25 bp, Artificial
  probe
  misc_feature (1)..(25): SEQ ID NO: 98; WAN024APB; Start 44; Stop 68
gtcaaatgttttgattgtaaaagtt

SEQ ID NO: 255700 - DNA, 25 bp, Artificial
  probe
  misc_feature (1)..(25): SEQ ID NO: 98; WAN024APB; Start 45; Stop 69
tcaaatgttttgattgtaaaagttt

SEQ ID NO: 255701 - DNA, 25 bp, Artificial
  probe
  misc_feature (1)..(25): SEQ ID NO: 99; WAN024APT; Start 28; Stop 52
tgactaaccaaaagatatccaaagt

SEQ ID NO: 255702 - DNA, 25 bp, Artificial
  probe
  misc_feature (1)..(25): SEQ ID NO: 99; WAN024APT; Start 33; Stop 57
aaccaaaagatatccaaagtagtct

SEQ ID NO: 255703 - DNA, 25 bp, Artificial
  probe
  misc_feature (1)..(25): SEQ ID NO: 99; WAN024APT; Start 27; Stop 51
atgactaaccaaaagatatccaaag

SEQ ID NO: 255704 - DNA, 25 bp, Artificial
  probe
  misc_feature (1)..(25): SEQ ID NO: 99; WAN024APT; Start 70; Stop 94
actttatgagtgttttagttaggaa

SEQ ID NO: 255705 - DNA, 25 bp, Artificial
  probe
  misc_feature (1)..(25): SEQ ID NO: 99; WAN024APT; Start 34; Stop 58
accaaaagatatccaaagtagtcta

SEQ ID NO: 255706 - DNA, 25 bp, Artificial
  probe
  misc_feature (1)..(25): SEQ ID NO: 99; WAN024APT; Start 21; Stop 45
tggaaaatgactaaccaaaagatat

SEQ ID NO: 255707 - DNA, 25 bp, Artificial
  probe
  misc_feature (1)..(25): SEQ ID NO: 99; WAN024APT; Start 32; Stop 56
taaccaaaagatatccaaagtagtc

SEQ ID NO: 255708 - DNA, 25 bp, Artificial
  probe
  misc_feature (1)..(25): SEQ ID NO: 99; WAN024APT; Start 26; Stop 50
aatgactaaccaaaagatatccaaa

SEQ ID NO: 255709 - DNA, 25 bp, Artificial
  probe
  misc_feature (1)..(25): SEQ ID NO: 99; WAN024APT; Start 25; Stop 49
aaatgactaaccaaaagatatccaa

SEQ ID NO: 255710 - DNA, 25 bp, Artificial
  probe
  misc_feature (1)..(25): SEQ ID NO: 99; WAN024APT; Start 24; Stop 48
aaaatgactaaccaaaagatatcca

SEQ ID NO: 255711 - DNA, 25 bp, Artificial
  probe
  misc_feature (1)..(25): SEQ ID NO: 99; WAN024APT; Start 31; Stop 55
ctaaccaaaagatatccaaagtagt

SEQ ID NO: 255712 - DNA, 25 bp, Artificial
  probe
  misc_feature (1)..(25): SEQ ID NO: 99; WAN024APT; Start 45; Stop 69
tccaaagtagtctaaaattgtctat

SEQ ID NO: 255713 - DNA, 25 bp, Artificial
  probe
  misc_feature (1)..(25): SEQ ID NO: 99; WAN024APT; Start 44; Stop 68
atccaaagtagtctaaaattgtcta

SEQ ID NO: 255714 - DNA, 25 bp, Artificial
  probe
  misc_feature (1)..(25): SEQ ID NO: 99; WAN024APT; Start 43; Stop 67
tatccaaagtagtctaaaattgtct

SEQ ID NO: 255715 - DNA, 25 bp, Artificial
  probe
  misc_feature (1)..(25): SEQ ID NO: 99; WAN024APT; Start 29; Stop 53
gactaaccaaaagatatccaaagta

SEQ ID NO: 255716 - DNA, 25 bp, Artificial
  probe
  misc_feature (1)..(25): SEQ ID NO: 99; WAN024APT; Start 71; Stop 95
ctttatgagtgttttagttaggaaa

SEQ ID NO: 255717 - DNA, 25 bp, Artificial
  probe
  misc_feature (1)..(25): SEQ ID NO: 99; WAN024APT; Start 23; Stop 47
gaaaatgactaaccaaaagatatcc

SEQ ID NO: 255718 - DNA, 25 bp, Artificial
  probe
  misc_feature (1)..(25): SEQ ID NO: 99; WAN024APT; Start 22; Stop 46
ggaaaatgactaaccaaaagatatc

SEQ ID NO: 255719 - DNA, 25 bp, Artificial
  probe
  misc_feature (1)..(25): SEQ ID NO: 99; WAN024APT; Start 30; Stop 54
actaaccaaaagatatccaaagtag

SEQ ID NO: 255720 - DNA, 25 bp, Artificial
  probe
  misc_feature (1)..(25): SEQ ID NO: 99; WAN024APT; Start 35; Stop 59
ccaaaagatatccaaagtagtctaa

SEQ ID NO: 255721 - DNA, 25 bp, Artificial
  probe
  misc_feature (1)..(25): SEQ ID NO: 99; WAN024APT; Start 69; Stop 93
tactttatgagtgttttagttagga

SEQ ID NO: 255722 - DNA, 25 bp, Artificial
  probe
  misc_feature (1)..(25): SEQ ID NO: 99; WAN024APT; Start 14; Stop 38
ttagttttggaaaatgactaaccaa

SEQ ID NO: 255723 - DNA, 25 bp, Artificial
  probe
  misc_feature (1)..(25): SEQ ID NO: 99; WAN024APT; Start 13; Stop 37
attagttttggaaaatgactaacca

SEQ ID NO: 255724 - DNA, 25 bp, Artificial
  probe
  misc_feature (1)..(25): SEQ ID NO: 99; WAN024APT; Start 20; Stop 44
ttggaaaatgactaaccaaaagata

SEQ ID NO: 255725 - DNA, 25 bp, Artificial
  probe
  misc_feature (1)..(25): SEQ ID NO: 99; WAN024APT; Start 12; Stop 36
aattagttttggaaaatgactaacc

SEQ ID NO: 255726 - DNA, 25 bp, Artificial
  probe
  misc_feature (1)..(25): SEQ ID NO: 100; WAN024AM6; Start 4; Stop 28
attatcctcctcaacaaacagactt

SEQ ID NO: 255727 - DNA, 25 bp, Artificial
  probe
  misc_feature (1)..(25): SEQ ID NO: 100; WAN024AM6; Start 5; Stop 29
ttatcctcctcaacaaacagacttc

SEQ ID NO: 255728 - DNA, 25 bp, Artificial
  probe
  misc_feature (1)..(25): SEQ ID NO: 100; WAN024AM6; Start 3; Stop 27
aattatcctcctcaacaaacagact

SEQ ID NO: 255729 - DNA, 25 bp, Artificial
  probe
  misc_feature (1)..(25): SEQ ID NO: 100; WAN024AM6; Start 2; Stop 26
aaattatcctcctcaacaaacagac

SEQ ID NO: 255730 - DNA, 25 bp, Artificial
  probe
  misc_feature (1)..(25): SEQ ID NO: 100; WAN024AM6; Start 35; Stop 59
cgtcattctttagttctagcctttc

SEQ ID NO: 255731 - DNA, 25 bp, Artificial
  probe
  misc_feature (1)..(25): SEQ ID NO: 100; WAN024AM6; Start 37; Stop 61
tcattctttagttctagcctttcca

SEQ ID NO: 255732 - DNA, 25 bp, Artificial
  probe
  misc_feature (1)..(25): SEQ ID NO: 100; WAN024AM6; Start 36; Stop 60
gtcattctttagttctagcctttcc

SEQ ID NO: 255733 - DNA, 25 bp, Artificial
  probe
  misc_feature (1)..(25): SEQ ID NO: 100; WAN024AM6; Start 38; Stop 62
cattctttagttctagcctttccaa

SEQ ID NO: 255734 - DNA, 25 bp, Artificial
  probe
  misc_feature (1)..(25): SEQ ID NO: 100; WAN024AM6; Start 6; Stop 30
tatcctcctcaacaaacagacttcc

SEQ ID NO: 255735 - DNA, 25 bp, Artificial
  probe
  misc_feature (1)..(25): SEQ ID NO: 100; WAN024AM6; Start 10; Stop 34
ctcctcaacaaacagacttcctaca

SEQ ID NO: 255736 - DNA, 25 bp, Artificial
  probe
  misc_feature (1)..(25): SEQ ID NO: 100; WAN024AM6; Start 39; Stop 63
attctttagttctagcctttccaaa

SEQ ID NO: 255737 - DNA, 25 bp, Artificial
  probe
  misc_feature (1)..(25): SEQ ID NO: 100; WAN024AM6; Start 11; Stop 35
tcctcaacaaacagacttcctacac

SEQ ID NO: 255738 - DNA, 25 bp, Artificial
  probe
  misc_feature (1)..(25): SEQ ID NO: 100; WAN024AM6; Start 20; Stop 44
aacagacttcctacacgtcattctt

SEQ ID NO: 255739 - DNA, 25 bp, Artificial
  probe
  misc_feature (1)..(25): SEQ ID NO: 100; WAN024AM6; Start 9; Stop 33
cctcctcaacaaacagacttcctac

SEQ ID NO: 255740 - DNA, 25 bp, Artificial
  probe
  misc_feature (1)..(25): SEQ ID NO: 100; WAN024AM6; Start 34; Stop 58
acgtcattctttagttctagccttt

SEQ ID NO: 255741 - DNA, 25 bp, Artificial
  probe
  misc_feature (1)..(25): SEQ ID NO: 100; WAN024AM6; Start 31; Stop 55
tacacgtcattctttagttctagcc

SEQ ID NO: 255742 - DNA, 25 bp, Artificial
  probe
  misc_feature (1)..(25): SEQ ID NO: 100; WAN024AM6; Start 27; Stop 51
ttcctacacgtcattctttagttct

SEQ ID NO: 255743 - DNA, 25 bp, Artificial
  probe
  misc_feature (1)..(25): SEQ ID NO: 100; WAN024AM6; Start 26; Stop 50
cttcctacacgtcattctttagttc

SEQ ID NO: 255744 - DNA, 25 bp, Artificial
  probe
  misc_feature (1)..(25): SEQ ID NO: 100; WAN024AM6; Start 8; Stop 32
tcctcctcaacaaacagacttccta

SEQ ID NO: 255745 - DNA, 25 bp, Artificial
  probe
  misc_feature (1)..(25): SEQ ID NO: 100; WAN024AM6; Start 30; Stop 54
ctacacgtcattctttagttctagc

SEQ ID NO: 255746 - DNA, 25 bp, Artificial
  probe
  misc_feature (1)..(25): SEQ ID NO: 100; WAN024AM6; Start 33; Stop 57
cacgtcattctttagttctagcctt

SEQ ID NO: 255747 - DNA, 25 bp, Artificial
  probe
  misc_feature (1)..(25): SEQ ID NO: 100; WAN024AM6; Start 28; Stop 52
tcctacacgtcattctttagttcta

SEQ ID NO: 255748 - DNA, 25 bp, Artificial
  probe
  misc_feature (1)..(25): SEQ ID NO: 100; WAN024AM6; Start 29; Stop 53
cctacacgtcattctttagttctag

SEQ ID NO: 255749 - DNA, 25 bp, Artificial
  probe
  misc_feature (1)..(25): SEQ ID NO: 100; WAN024AM6; Start 25; Stop 49
acttcctacacgtcattctttagtt

SEQ ID NO: 255750 - DNA, 25 bp, Artificial
  probe
  misc_feature (1)..(25): SEQ ID NO: 100; WAN024AM6; Start 32; Stop 56
acacgtcattctttagttctagcct

SEQ ID NO: 255751 - DNA, 25 bp, Artificial
  probe
  misc_feature (1)..(25): SEQ ID NO: 100; WAN024AM6; Start 23; Stop 47
agacttcctacacgtcattctttag

SEQ ID NO: 255752 - DNA, 25 bp, Artificial
  probe
  misc_feature (1)..(25): SEQ ID NO: 100; WAN024AM6; Start 7; Stop 31
atcctcctcaacaaacagacttcct

SEQ ID NO: 255753 - DNA, 25 bp, Artificial
  probe
  misc_feature (1)..(25): SEQ ID NO: 100; WAN024AM6; Start 24; Stop 48
gacttcctacacgtcattctttagt

SEQ ID NO: 255754 - DNA, 25 bp, Artificial
  probe
  misc_feature (1)..(25): SEQ ID NO: 100; WAN024AM6; Start 22; Stop 46
cagacttcctacacgtcattcttta

SEQ ID NO: 255755 - DNA, 25 bp, Artificial
  probe
  misc_feature (1)..(25): SEQ ID NO: 100; WAN024AM6; Start 12; Stop 36
cctcaacaaacagacttcctacacg

SEQ ID NO: 255756 - DNA, 25 bp, Artificial
  probe
  misc_feature (1)..(25): SEQ ID NO: 100; WAN024AM6; Start 50; Stop 74
ctagcctttccaaaacaaaccattt

SEQ ID NO: 255757 - DNA, 25 bp, Artificial
  probe
  misc_feature (1)..(25): SEQ ID NO: 100; WAN024AM6; Start 45; Stop 69
tagttctagcctttccaaaacaaac

SEQ ID NO: 255758 - DNA, 25 bp, Artificial
  probe
  misc_feature (1)..(25): SEQ ID NO: 100; WAN024AM6; Start 1; Stop 25
aaaattatcctcctcaacaaacaga

SEQ ID NO: 255759 - DNA, 25 bp, Artificial
  probe
  misc_feature (1)..(25): SEQ ID NO: 101; WAN024EYN; Start 175; Stop 199
gtcttgctgtctccagtaactttac

SEQ ID NO: 255760 - DNA, 25 bp, Artificial
  probe
  misc_feature (1)..(25): SEQ ID NO: 101; WAN024EYN; Start 174; Stop 198
tgtcttgctgtctccagtaacttta

SEQ ID NO: 255761 - DNA, 25 bp, Artificial
  probe
  misc_feature (1)..(25): SEQ ID NO: 101; WAN024EYN; Start 172; Stop 196
tctgtcttgctgtctccagtaactt

SEQ ID NO: 255762 - DNA, 25 bp, Artificial
  probe
  misc_feature (1)..(25): SEQ ID NO: 101; WAN024EYN; Start 171; Stop 195
ttctgtcttgctgtctccagtaact

SEQ ID NO: 255763 - DNA, 25 bp, Artificial
  probe
  misc_feature (1)..(25): SEQ ID NO: 101; WAN024EYN; Start 170; Stop 194
gttctgtcttgctgtctccagtaac

SEQ ID NO: 255764 - DNA, 25 bp, Artificial
  probe
  misc_feature (1)..(25): SEQ ID NO: 101; WAN024EYN; Start 169; Stop 193
agttctgtcttgctgtctccagtaa

SEQ ID NO: 255765 - DNA, 25 bp, Artificial
  probe
  misc_feature (1)..(25): SEQ ID NO: 101; WAN024EYN; Start 168; Stop 192
aagttctgtcttgctgtctccagta

SEQ ID NO: 255766 - DNA, 25 bp, Artificial
  probe
  misc_feature (1)..(25): SEQ ID NO: 101; WAN024EYN; Start 179; Stop 203
tgctgtctccagtaactttaccaaa

SEQ ID NO: 255767 - DNA, 25 bp, Artificial
  probe
  misc_feature (1)..(25): SEQ ID NO: 101; WAN024EYN; Start 178; Stop 202
ttgctgtctccagtaactttaccaa

SEQ ID NO: 255768 - DNA, 25 bp, Artificial
  probe
  misc_feature (1)..(25): SEQ ID NO: 101; WAN024EYN; Start 176; Stop 200
tcttgctgtctccagtaactttacc

SEQ ID NO: 255769 - DNA, 25 bp, Artificial
  probe
  misc_feature (1)..(25): SEQ ID NO: 101; WAN024EYN; Start 177; Stop 201
cttgctgtctccagtaactttacca

SEQ ID NO: 255770 - DNA, 25 bp, Artificial
  probe
  misc_feature (1)..(25): SEQ ID NO: 101; WAN024EYN; Start 173; Stop 197
ctgtcttgctgtctccagtaacttt

SEQ ID NO: 255771 - DNA, 25 bp, Artificial
  probe
  misc_feature (1)..(25): SEQ ID NO: 101; WAN024EYN; Start 186; Stop 210
tccagtaactttaccaaaaccttct

SEQ ID NO: 255772 - DNA, 25 bp, Artificial
  probe
  misc_feature (1)..(25): SEQ ID NO: 101; WAN024EYN; Start 184; Stop 208
tctccagtaactttaccaaaacctt

SEQ ID NO: 255773 - DNA, 25 bp, Artificial
  probe
  misc_feature (1)..(25): SEQ ID NO: 101; WAN024EYN; Start 185; Stop 209
ctccagtaactttaccaaaaccttc

SEQ ID NO: 255774 - DNA, 25 bp, Artificial
  probe
  misc_feature (1)..(25): SEQ ID NO: 101; WAN024EYN; Start 183; Stop 207
gtctccagtaactttaccaaaacct

SEQ ID NO: 255775 - DNA, 25 bp, Artificial
  probe
  misc_feature (1)..(25): SEQ ID NO: 101; WAN024EYN; Start 187; Stop 211
ccagtaactttaccaaaaccttctt

SEQ ID NO: 255776 - DNA, 25 bp, Artificial
  probe
  misc_feature (1)..(25): SEQ ID NO: 101; WAN024EYN; Start 223; Stop 247
gttgcttgttccaatttgttttcaa

SEQ ID NO: 255777 - DNA, 25 bp, Artificial
  probe
  misc_feature (1)..(25): SEQ ID NO: 101; WAN024EYN; Start 182; Stop 206
tgtctccagtaactttaccaaaacc

SEQ ID NO: 255778 - DNA, 25 bp, Artificial
  probe
  misc_feature (1)..(25): SEQ ID NO: 101; WAN024EYN; Start 221; Stop 245
ctgttgcttgttccaatttgttttc

SEQ ID NO: 255779 - DNA, 25 bp, Artificial
  probe
  misc_feature (1)..(25): SEQ ID NO: 101; WAN024EYN; Start 228; Stop 252
ttgttccaatttgttttcaagtgac

SEQ ID NO: 255780 - DNA, 25 bp, Artificial
  probe
  misc_feature (1)..(25): SEQ ID NO: 101; WAN024EYN; Start 222; Stop 246
tgttgcttgttccaatttgttttca

SEQ ID NO: 255781 - DNA, 25 bp, Artificial
  probe
  misc_feature (1)..(25): SEQ ID NO: 101; WAN024EYN; Start 229; Stop 253
tgttccaatttgttttcaagtgaca

SEQ ID NO: 255782 - DNA, 25 bp, Artificial
  probe
  misc_feature (1)..(25): SEQ ID NO: 101; WAN024EYN; Start 230; Stop 254
gttccaatttgttttcaagtgacat

SEQ ID NO: 255783 - DNA, 25 bp, Artificial
  probe
  misc_feature (1)..(25): SEQ ID NO: 101; WAN024EYN; Start 219; Stop 243
gcctgttgcttgttccaatttgttt

SEQ ID NO: 255784 - DNA, 25 bp, Artificial
  probe
  misc_feature (1)..(25): SEQ ID NO: 101; WAN024EYN; Start 181; Stop 205
ctgtctccagtaactttaccaaaac

SEQ ID NO: 255785 - DNA, 25 bp, Artificial
  probe
  misc_feature (1)..(25): SEQ ID NO: 101; WAN024EYN; Start 220; Stop 244
cctgttgcttgttccaatttgtttt

SEQ ID NO: 255786 - DNA, 25 bp, Artificial
  probe
  misc_feature (1)..(25): SEQ ID NO: 101; WAN024EYN; Start 188; Stop 212
cagtaactttaccaaaaccttcttt

SEQ ID NO: 255787 - DNA, 25 bp, Artificial
  probe
  misc_feature (1)..(25): SEQ ID NO: 101; WAN024EYN; Start 180; Stop 204
gctgtctccagtaactttaccaaaa

SEQ ID NO: 255788 - DNA, 25 bp, Artificial
  probe
  misc_feature (1)..(25): SEQ ID NO: 101; WAN024EYN; Start 231; Stop 255
ttccaatttgttttcaagtgacata

SEQ ID NO: 255789 - DNA, 25 bp, Artificial
  probe
  misc_feature (1)..(25): SEQ ID NO: 101; WAN024EYN; Start 232; Stop 256
tccaatttgttttcaagtgacatat

SEQ ID NO: 255790 - DNA, 25 bp, Artificial
  probe
  misc_feature (1)..(25): SEQ ID NO: 101; WAN024EYN; Start 79; Stop 103
ttcaaaccttcaacggcaccttcta

SEQ ID NO: 255791 - DNA, 25 bp, Artificial
  probe
  misc_feature (1)..(25): SEQ ID NO: 101; WAN024EYN; Start 118; Stop 142
tcttctacaacgtcttttgccttag

SEQ ID NO: 255792 - DNA, 25 bp, Artificial
  probe
  misc_feature (1)..(25): SEQ ID NO: 102; WAN024ART; Start 75; Stop 99
aatagtctatggaaagagggtgaga

SEQ ID NO: 255793 - DNA, 25 bp, Artificial
  probe
  misc_feature (1)..(25): SEQ ID NO: 102; WAN024ART; Start 24; Stop 48
aagaggctaacgtatatccaataga

SEQ ID NO: 255794 - DNA, 25 bp, Artificial
  probe
  misc_feature (1)..(25): SEQ ID NO: 102; WAN024ART; Start 74; Stop 98
aaatagtctatggaaagagggtgag

SEQ ID NO: 255795 - DNA, 25 bp, Artificial
  probe
  misc_feature (1)..(25): SEQ ID NO: 102; WAN024ART; Start 76; Stop 100
atagtctatggaaagagggtgagag

SEQ ID NO: 255796 - DNA, 25 bp, Artificial
  probe
  misc_feature (1)..(25): SEQ ID NO: 102; WAN024ART; Start 25; Stop 49
agaggctaacgtatatccaatagat

SEQ ID NO: 255797 - DNA, 25 bp, Artificial
  probe
  misc_feature (1)..(25): SEQ ID NO: 102; WAN024ART; Start 77; Stop 101
tagtctatggaaagagggtgagagt

SEQ ID NO: 255798 - DNA, 25 bp, Artificial
  probe
  misc_feature (1)..(25): SEQ ID NO: 102; WAN024ART; Start 26; Stop 50
gaggctaacgtatatccaatagatt

SEQ ID NO: 255799 - DNA, 25 bp, Artificial
  probe
  misc_feature (1)..(25): SEQ ID NO: 102; WAN024ART; Start 73; Stop 97
aaaatagtctatggaaagagggtga

SEQ ID NO: 255800 - DNA, 25 bp, Artificial
  probe
  misc_feature (1)..(25): SEQ ID NO: 102; WAN024ART; Start 27; Stop 51
aggctaacgtatatccaatagattt

SEQ ID NO: 255801 - DNA, 25 bp, Artificial
  probe
  misc_feature (1)..(25): SEQ ID NO: 102; WAN024ART; Start 72; Stop 96
taaaatagtctatggaaagagggtg

SEQ ID NO: 255802 - DNA, 25 bp, Artificial
  probe
  misc_feature (1)..(25): SEQ ID NO: 102; WAN024ART; Start 71; Stop 95
ttaaaatagtctatggaaagagggt

SEQ ID NO: 255803 - DNA, 25 bp, Artificial
  probe
  misc_feature (1)..(25): SEQ ID NO: 102; WAN024ART; Start 70; Stop 94
gttaaaatagtctatggaaagaggg

SEQ ID NO: 255804 - DNA, 25 bp, Artificial
  probe
  misc_feature (1)..(25): SEQ ID NO: 102; WAN024ART; Start 40; Stop 64
tccaatagatttacattagctttct

SEQ ID NO: 255805 - DNA, 25 bp, Artificial
  probe
  misc_feature (1)..(25): SEQ ID NO: 102; WAN024ART; Start 28; Stop 52
ggctaacgtatatccaatagattta

SEQ ID NO: 255806 - DNA, 25 bp, Artificial
  probe
  misc_feature (1)..(25): SEQ ID NO: 102; WAN024ART; Start 69; Stop 93
tgttaaaatagtctatggaaagagg

SEQ ID NO: 255807 - DNA, 25 bp, Artificial
  probe
  misc_feature (1)..(25): SEQ ID NO: 102; WAN024ART; Start 41; Stop 65
ccaatagatttacattagctttctt

SEQ ID NO: 255808 - DNA, 25 bp, Artificial
  probe
  misc_feature (1)..(25): SEQ ID NO: 102; WAN024ART; Start 29; Stop 53
gctaacgtatatccaatagatttac

SEQ ID NO: 255809 - DNA, 25 bp, Artificial
  probe
  misc_feature (1)..(25): SEQ ID NO: 102; WAN024ART; Start 39; Stop 63
atccaatagatttacattagctttc

SEQ ID NO: 255810 - DNA, 25 bp, Artificial
  probe
  misc_feature (1)..(25): SEQ ID NO: 104; WAN024A7Q; Start 50; Stop 74
aaagcagtttcttctggatgatgta

SEQ ID NO: 255811 - DNA, 25 bp, Artificial
  probe
  misc_feature (1)..(25): SEQ ID NO: 104; WAN024A7Q; Start 53; Stop 77
gcagtttcttctggatgatgtacta

SEQ ID NO: 255812 - DNA, 25 bp, Artificial
  probe
  misc_feature (1)..(25): SEQ ID NO: 104; WAN024A7Q; Start 51; Stop 75
aagcagtttcttctggatgatgtac

SEQ ID NO: 255813 - DNA, 25 bp, Artificial
  probe
  misc_feature (1)..(25): SEQ ID NO: 104; WAN024A7Q; Start 55; Stop 79
agtttcttctggatgatgtactaag

SEQ ID NO: 255814 - DNA, 25 bp, Artificial
  probe
  misc_feature (1)..(25): SEQ ID NO: 104; WAN024A7Q; Start 54; Stop 78
cagtttcttctggatgatgtactaa

SEQ ID NO: 255815 - DNA, 25 bp, Artificial
  probe
  misc_feature (1)..(25): SEQ ID NO: 104; WAN024A7Q; Start 52; Stop 76
agcagtttcttctggatgatgtact

SEQ ID NO: 255816 - DNA, 25 bp, Artificial
  probe
  misc_feature (1)..(25): SEQ ID NO: 104; WAN024A7Q; Start 37; Stop 61
taagttagccctaaaagcagtttct

SEQ ID NO: 255817 - DNA, 25 bp, Artificial
  probe
  misc_feature (1)..(25): SEQ ID NO: 104; WAN024A7Q; Start 36; Stop 60
ctaagttagccctaaaagcagtttc

SEQ ID NO: 255818 - DNA, 25 bp, Artificial
  probe
  misc_feature (1)..(25): SEQ ID NO: 104; WAN024A7Q; Start 35; Stop 59
tctaagttagccctaaaagcagttt

SEQ ID NO: 255819 - DNA, 25 bp, Artificial
  probe
  misc_feature (1)..(25): SEQ ID NO: 104; WAN024A7Q; Start 34; Stop 58
ttctaagttagccctaaaagcagtt

SEQ ID NO: 255820 - DNA, 25 bp, Artificial
  probe
  misc_feature (1)..(25): SEQ ID NO: 104; WAN024A7Q; Start 33; Stop 57
cttctaagttagccctaaaagcagt

SEQ ID NO: 255821 - DNA, 25 bp, Artificial
  probe
  misc_feature (1)..(25): SEQ ID NO: 104; WAN024A7Q; Start 38; Stop 62
aagttagccctaaaagcagtttctt

SEQ ID NO: 255822 - DNA, 25 bp, Artificial
  probe
  misc_feature (1)..(25): SEQ ID NO: 104; WAN024A7Q; Start 40; Stop 64
gttagccctaaaagcagtttcttct

SEQ ID NO: 255823 - DNA, 25 bp, Artificial
  probe
  misc_feature (1)..(25): SEQ ID NO: 104; WAN024A7Q; Start 39; Stop 63
agttagccctaaaagcagtttcttc

SEQ ID NO: 255824 - DNA, 25 bp, Artificial
  probe
  misc_feature (1)..(25): SEQ ID NO: 104; WAN024A7Q; Start 56; Stop 80
gtttcttctggatgatgtactaaga

SEQ ID NO: 255825 - DNA, 25 bp, Artificial
  probe
  misc_feature (1)..(25): SEQ ID NO: 104; WAN024A7Q; Start 48; Stop 72
taaaagcagtttcttctggatgatg

SEQ ID NO: 255826 - DNA, 25 bp, Artificial
  probe
  misc_feature (1)..(25): SEQ ID NO: 104; WAN024A7Q; Start 47; Stop 71
ctaaaagcagtttcttctggatgat

SEQ ID NO: 255827 - DNA, 25 bp, Artificial
  probe
  misc_feature (1)..(25): SEQ ID NO: 104; WAN024A7Q; Start 46; Stop 70
cctaaaagcagtttcttctggatga

SEQ ID NO: 255828 - DNA, 25 bp, Artificial
  probe
  misc_feature (1)..(25): SEQ ID NO: 104; WAN024A7Q; Start 49; Stop 73
aaaagcagtttcttctggatgatgt

SEQ ID NO: 255829 - DNA, 25 bp, Artificial
  probe
  misc_feature (1)..(25): SEQ ID NO: 104; WAN024A7Q; Start 41; Stop 65
ttagccctaaaagcagtttcttctg

SEQ ID NO: 255830 - DNA, 25 bp, Artificial
  probe
  misc_feature (1)..(25): SEQ ID NO: 104; WAN024A7Q; Start 45; Stop 69
ccctaaaagcagtttcttctggatg

SEQ ID NO: 255831 - DNA, 25 bp, Artificial
  probe
  misc_feature (1)..(25): SEQ ID NO: 104; WAN024A7Q; Start 21; Stop 45
acaaaagaaaggcttctaagttagc

SEQ ID NO: 255832 - DNA, 25 bp, Artificial
  probe
  misc_feature (1)..(25): SEQ ID NO: 104; WAN024A7Q; Start 42; Stop 66
tagccctaaaagcagtttcttctgg

SEQ ID NO: 255833 - DNA, 25 bp, Artificial
  probe
  misc_feature (1)..(25): SEQ ID NO: 104; WAN024A7Q; Start 44; Stop 68
gccctaaaagcagtttcttctggat

SEQ ID NO: 255834 - DNA, 25 bp, Artificial
  probe
  misc_feature (1)..(25): SEQ ID NO: 104; WAN024A7Q; Start 18; Stop 42
attacaaaagaaaggcttctaagtt

SEQ ID NO: 255835 - DNA, 25 bp, Artificial
  probe
  misc_feature (1)..(25): SEQ ID NO: 104; WAN024A7Q; Start 17; Stop 41
aattacaaaagaaaggcttctaagt

SEQ ID NO: 255836 - DNA, 25 bp, Artificial
  probe
  misc_feature (1)..(25): SEQ ID NO: 104; WAN024A7Q; Start 20; Stop 44
tacaaaagaaaggcttctaagttag

SEQ ID NO: 255837 - DNA, 25 bp, Artificial
  probe
  misc_feature (1)..(25): SEQ ID NO: 104; WAN024A7Q; Start 43; Stop 67
agccctaaaagcagtttcttctgga

SEQ ID NO: 255838 - DNA, 25 bp, Artificial
  probe
  misc_feature (1)..(25): SEQ ID NO: 104; WAN024A7Q; Start 19; Stop 43
ttacaaaagaaaggcttctaagtta

SEQ ID NO: 255839 - DNA, 25 bp, Artificial
  probe
  misc_feature (1)..(25): SEQ ID NO: 104; WAN024A7Q; Start 13; Stop 37
atctaattacaaaagaaaggcttct

SEQ ID NO: 255840 - DNA, 25 bp, Artificial
  probe
  misc_feature (1)..(25): SEQ ID NO: 104; WAN024A7Q; Start 12; Stop 36
tatctaattacaaaagaaaggcttc

SEQ ID NO: 255841 - DNA, 25 bp, Artificial
  probe
  misc_feature (1)..(25): SEQ ID NO: 104; WAN024A7Q; Start 10; Stop 34
cttatctaattacaaaagaaaggct

SEQ ID NO: 255842 - DNA, 25 bp, Artificial
  probe
  misc_feature (1)..(25): SEQ ID NO: 104; WAN024A7Q; Start 14; Stop 38
tctaattacaaaagaaaggcttcta

SEQ ID NO: 255843 - DNA, 25 bp, Artificial
  probe
  misc_feature (1)..(25): SEQ ID NO: 105; WAN024ALM; Start 70; Stop 94
ataggttcctgctcacttgtattag

SEQ ID NO: 255844 - DNA, 25 bp, Artificial
  probe
  misc_feature (1)..(25): SEQ ID NO: 105; WAN024ALM; Start 69; Stop 93
aataggttcctgctcacttgtatta

SEQ ID NO: 255845 - DNA, 25 bp, Artificial
  probe
  misc_feature (1)..(25): SEQ ID NO: 105; WAN024ALM; Start 71; Stop 95
taggttcctgctcacttgtattagt

SEQ ID NO: 255846 - DNA, 25 bp, Artificial
  probe
  misc_feature (1)..(25): SEQ ID NO: 105; WAN024ALM; Start 65; Stop 89
attaaataggttcctgctcacttgt

SEQ ID NO: 255847 - DNA, 25 bp, Artificial
  probe
  misc_feature (1)..(25): SEQ ID NO: 105; WAN024ALM; Start 58; Stop 82
tgatgtgattaaataggttcctgct

SEQ ID NO: 255848 - DNA, 25 bp, Artificial
  probe
  misc_feature (1)..(25): SEQ ID NO: 105; WAN024ALM; Start 57; Stop 81
ctgatgtgattaaataggttcctgc

SEQ ID NO: 255849 - DNA, 25 bp, Artificial
  probe
  misc_feature (1)..(25): SEQ ID NO: 105; WAN024ALM; Start 64; Stop 88
gattaaataggttcctgctcacttg

SEQ ID NO: 255850 - DNA, 25 bp, Artificial
  probe
  misc_feature (1)..(25): SEQ ID NO: 105; WAN024ALM; Start 66; Stop 90
ttaaataggttcctgctcacttgta

SEQ ID NO: 255851 - DNA, 25 bp, Artificial
  probe
  misc_feature (1)..(25): SEQ ID NO: 105; WAN024ALM; Start 59; Stop 83
gatgtgattaaataggttcctgctc

SEQ ID NO: 255852 - DNA, 25 bp, Artificial
  probe
  misc_feature (1)..(25): SEQ ID NO: 105; WAN024ALM; Start 67; Stop 91
taaataggttcctgctcacttgtat

SEQ ID NO: 255853 - DNA, 25 bp, Artificial
  probe
  misc_feature (1)..(25): SEQ ID NO: 105; WAN024ALM; Start 68; Stop 92
aaataggttcctgctcacttgtatt

SEQ ID NO: 255854 - DNA, 25 bp, Artificial
  probe
  misc_feature (1)..(25): SEQ ID NO: 105; WAN024ALM; Start 63; Stop 87
tgattaaataggttcctgctcactt

SEQ ID NO: 255855 - DNA, 25 bp, Artificial
  probe
  misc_feature (1)..(25): SEQ ID NO: 105; WAN024ALM; Start 60; Stop 84
atgtgattaaataggttcctgctca

SEQ ID NO: 255856 - DNA, 25 bp, Artificial
  probe
  misc_feature (1)..(25): SEQ ID NO: 105; WAN024ALM; Start 56; Stop 80
tctgatgtgattaaataggttcctg

SEQ ID NO: 255857 - DNA, 25 bp, Artificial
  probe
  misc_feature (1)..(25): SEQ ID NO: 105; WAN024ALM; Start 55; Stop 79
ttctgatgtgattaaataggttcct

SEQ ID NO: 255858 - DNA, 25 bp, Artificial
  probe
  misc_feature (1)..(25): SEQ ID NO: 105; WAN024ALM; Start 54; Stop 78
cttctgatgtgattaaataggttcc

SEQ ID NO: 255859 - DNA, 25 bp, Artificial
  probe
  misc_feature (1)..(25): SEQ ID NO: 105; WAN024ALM; Start 53; Stop 77
tcttctgatgtgattaaataggttc

SEQ ID NO: 255860 - DNA, 25 bp, Artificial
  probe
  misc_feature (1)..(25): SEQ ID NO: 105; WAN024ALM; Start 51; Stop 75
cttcttctgatgtgattaaataggt

SEQ ID NO: 255861 - DNA, 25 bp, Artificial
  probe
  misc_feature (1)..(25): SEQ ID NO: 105; WAN024ALM; Start 50; Stop 74
acttcttctgatgtgattaaatagg

SEQ ID NO: 255862 - DNA, 25 bp, Artificial
  probe
  misc_feature (1)..(25): SEQ ID NO: 105; WAN024ALM; Start 52; Stop 76
ttcttctgatgtgattaaataggtt

SEQ ID NO: 255863 - DNA, 25 bp, Artificial
  probe
  misc_feature (1)..(25): SEQ ID NO: 105; WAN024ALM; Start 43; Stop 67
tcaagaaacttcttctgatgtgatt

SEQ ID NO: 255864 - DNA, 25 bp, Artificial
  probe
  misc_feature (1)..(25): SEQ ID NO: 105; WAN024ALM; Start 42; Stop 66
atcaagaaacttcttctgatgtgat

SEQ ID NO: 255865 - DNA, 25 bp, Artificial
  probe
  misc_feature (1)..(25): SEQ ID NO: 105; WAN024ALM; Start 47; Stop 71
gaaacttcttctgatgtgattaaat

SEQ ID NO: 255866 - DNA, 25 bp, Artificial
  probe
  misc_feature (1)..(25): SEQ ID NO: 105; WAN024ALM; Start 72; Stop 96
aggttcctgctcacttgtattagtg

SEQ ID NO: 255867 - DNA, 25 bp, Artificial
  probe
  misc_feature (1)..(25): SEQ ID NO: 105; WAN024ALM; Start 84; Stop 108
acttgtattagtgataacatccttt

SEQ ID NO: 255868 - DNA, 25 bp, Artificial
  probe
  misc_feature (1)..(25): SEQ ID NO: 105; WAN024ALM; Start 44; Stop 68
caagaaacttcttctgatgtgatta

SEQ ID NO: 255869 - DNA, 25 bp, Artificial
  probe
  misc_feature (1)..(25): SEQ ID NO: 105; WAN024ALM; Start 46; Stop 70
agaaacttcttctgatgtgattaaa

SEQ ID NO: 255870 - DNA, 25 bp, Artificial
  probe
  misc_feature (1)..(25): SEQ ID NO: 105; WAN024ALM; Start 62; Stop 86
gtgattaaataggttcctgctcact

SEQ ID NO: 255871 - DNA, 25 bp, Artificial
  probe
  misc_feature (1)..(25): SEQ ID NO: 105; WAN024ALM; Start 61; Stop 85
tgtgattaaataggttcctgctcac

SEQ ID NO: 255872 - DNA, 25 bp, Artificial
  probe
  misc_feature (1)..(25): SEQ ID NO: 105; WAN024ALM; Start 49; Stop 73
aacttcttctgatgtgattaaatag

SEQ ID NO: 255873 - DNA, 25 bp, Artificial
  probe
  misc_feature (1)..(25): SEQ ID NO: 105; WAN024ALM; Start 45; Stop 69
aagaaacttcttctgatgtgattaa

SEQ ID NO: 255874 - DNA, 25 bp, Artificial
  probe
  misc_feature (1)..(25): SEQ ID NO: 105; WAN024ALM; Start 83; Stop 107
cacttgtattagtgataacatcctt

SEQ ID NO: 255875 - DNA, 25 bp, Artificial
  probe
  misc_feature (1)..(25): SEQ ID NO: 105; WAN024ALM; Start 123; Stop 147
atggtgacatgaagcttaaataatt

SEQ ID NO: 255876 - DNA, 25 bp, Artificial
  probe
  misc_feature (1)..(25): SEQ ID NO: 106; WAN0249GN; Start 52; Stop 76
agagacacaaataatttagctttct

SEQ ID NO: 255877 - DNA, 25 bp, Artificial
  probe
  misc_feature (1)..(25): SEQ ID NO: 106; WAN0249GN; Start 47; Stop 71
tcaatagagacacaaataatttagc

SEQ ID NO: 255878 - DNA, 25 bp, Artificial
  probe
  misc_feature (1)..(25): SEQ ID NO: 106; WAN0249GN; Start 53; Stop 77
gagacacaaataatttagctttctt

SEQ ID NO: 255879 - DNA, 25 bp, Artificial
  probe
  misc_feature (1)..(25): SEQ ID NO: 106; WAN0249GN; Start 34; Stop 58
ccctttgaatttatcaatagagaca

SEQ ID NO: 255880 - DNA, 25 bp, Artificial
  probe
  misc_feature (1)..(25): SEQ ID NO: 106; WAN0249GN; Start 48; Stop 72
caatagagacacaaataatttagct

SEQ ID NO: 255881 - DNA, 25 bp, Artificial
  probe
  misc_feature (1)..(25): SEQ ID NO: 106; WAN0249GN; Start 51; Stop 75
tagagacacaaataatttagctttc

SEQ ID NO: 255882 - DNA, 25 bp, Artificial
  probe
  misc_feature (1)..(25): SEQ ID NO: 106; WAN0249GN; Start 35; Stop 59
cctttgaatttatcaatagagacac

SEQ ID NO: 255883 - DNA, 25 bp, Artificial
  probe
  misc_feature (1)..(25): SEQ ID NO: 106; WAN0249GN; Start 33; Stop 57
cccctttgaatttatcaatagagac

SEQ ID NO: 255884 - DNA, 25 bp, Artificial
  probe
  misc_feature (1)..(25): SEQ ID NO: 106; WAN0249GN; Start 54; Stop 78
agacacaaataatttagctttctta

SEQ ID NO: 255885 - DNA, 25 bp, Artificial
  probe
  misc_feature (1)..(25): SEQ ID NO: 106; WAN0249GN; Start 36; Stop 60
ctttgaatttatcaatagagacaca

SEQ ID NO: 255886 - DNA, 25 bp, Artificial
  probe
  misc_feature (1)..(25): SEQ ID NO: 106; WAN0249GN; Start 38; Stop 62
ttgaatttatcaatagagacacaaa

SEQ ID NO: 255887 - DNA, 25 bp, Artificial
  probe
  misc_feature (1)..(25): SEQ ID NO: 106; WAN0249GN; Start 37; Stop 61
tttgaatttatcaatagagacacaa

SEQ ID NO: 255888 - DNA, 25 bp, Artificial
  probe
  misc_feature (1)..(25): SEQ ID NO: 107; WAN024G4Y-3; Start 761; Stop 785
tataggcagaacgaagaggaattac

SEQ ID NO: 255889 - DNA, 25 bp, Artificial
  probe
  misc_feature (1)..(25): SEQ ID NO: 107; WAN024G4Y-3; Start 740; Stop 764
ctctccattcctagtctgacctata

SEQ ID NO: 255890 - DNA, 25 bp, Artificial
  probe
  misc_feature (1)..(25): SEQ ID NO: 107; WAN024G4Y-3; Start 1676; Stop 1700
tatgatgaaccaagtcaactcgtag

SEQ ID NO: 255891 - DNA, 25 bp, Artificial
  probe
  misc_feature (1)..(25): SEQ ID NO: 107; WAN024G4Y-3; Start 1675; Stop 1699
ctatgatgaaccaagtcaactcgta

SEQ ID NO: 255892 - DNA, 25 bp, Artificial
  probe
  misc_feature (1)..(25): SEQ ID NO: 107; WAN024G4Y-3; Start 762; Stop 786
ataggcagaacgaagaggaattaca

SEQ ID NO: 255893 - DNA, 25 bp, Artificial
  probe
  misc_feature (1)..(25): SEQ ID NO: 107; WAN024G4Y-3; Start 1104; Stop 1128
acaatcgtcagtcagataccatcaa

SEQ ID NO: 255894 - DNA, 25 bp, Artificial
  probe
  misc_feature (1)..(25): SEQ ID NO: 107; WAN024G4Y-3; Start 475; Stop 499
tatgattgaccaagtcttagaagcc

SEQ ID NO: 255895 - DNA, 25 bp, Artificial
  probe
  misc_feature (1)..(25): SEQ ID NO: 107; WAN024G4Y-3; Start 474; Stop 498
gtatgattgaccaagtcttagaagc

SEQ ID NO: 255896 - DNA, 25 bp, Artificial
  probe
  misc_feature (1)..(25): SEQ ID NO: 107; WAN024G4Y-3; Start 472; Stop 496
tcgtatgattgaccaagtcttagaa

SEQ ID NO: 255897 - DNA, 25 bp, Artificial
  probe
  misc_feature (1)..(25): SEQ ID NO: 107; WAN024G4Y-3; Start 471; Stop 495
ttcgtatgattgaccaagtcttaga

SEQ ID NO: 255898 - DNA, 25 bp, Artificial
  probe
  misc_feature (1)..(25): SEQ ID NO: 107; WAN024G4Y-3; Start 473; Stop 497
cgtatgattgaccaagtcttagaag

SEQ ID NO: 255899 - DNA, 25 bp, Artificial
  probe
  misc_feature (1)..(25): SEQ ID NO: 107; WAN024G4Y-3; Start 1660; Stop 1684
ctacaagacagaccgctatgatgaa

SEQ ID NO: 255900 - DNA, 25 bp, Artificial
  probe
  misc_feature (1)..(25): SEQ ID NO: 107; WAN024G4Y-3; Start 1677; Stop 1701
atgatgaaccaagtcaactcgtaga

SEQ ID NO: 255901 - DNA, 25 bp, Artificial
  probe
  misc_feature (1)..(25): SEQ ID NO: 107; WAN024G4Y-3; Start 763; Stop 787
taggcagaacgaagaggaattacag

SEQ ID NO: 255902 - DNA, 25 bp, Artificial
  probe
  misc_feature (1)..(25): SEQ ID NO: 107; WAN024G4Y-3; Start 739; Stop 763
actctccattcctagtctgacctat

SEQ ID NO: 255903 - DNA, 25 bp, Artificial
  probe
  misc_feature (1)..(25): SEQ ID NO: 107; WAN024G4Y-3; Start 1661; Stop 1685
tacaagacagaccgctatgatgaac

SEQ ID NO: 255904 - DNA, 25 bp, Artificial
  probe
  misc_feature (1)..(25): SEQ ID NO: 107; WAN024G4Y-3; Start 1705; Stop 1729
ctatcgtggtcagttagctctatac

SEQ ID NO: 255905 - DNA, 25 bp, Artificial
  probe
  misc_feature (1)..(25): SEQ ID NO: 107; WAN024G4Y-3; Start 738; Stop 762
aactctccattcctagtctgaccta

SEQ ID NO: 255906 - DNA, 25 bp, Artificial
  probe
  misc_feature (1)..(25): SEQ ID NO: 107; WAN024G4Y-3; Start 470; Stop 494
attcgtatgattgaccaagtcttag

SEQ ID NO: 255907 - DNA, 25 bp, Artificial
  probe
  misc_feature (1)..(25): SEQ ID NO: 107; WAN024G4Y-3; Start 1232; Stop 1256
tacgaaccagttatggatatggaag

SEQ ID NO: 255908 - DNA, 25 bp, Artificial
  probe
  misc_feature (1)..(25): SEQ ID NO: 107; WAN024G4Y-3; Start 1231; Stop 1255
ctacgaaccagttatggatatggaa

SEQ ID NO: 255909 - DNA, 25 bp, Artificial
  probe
  misc_feature (1)..(25): SEQ ID NO: 107; WAN024G4Y-3; Start 1229; Stop 1253
ttctacgaaccagttatggatatgg

SEQ ID NO: 255910 - DNA, 25 bp, Artificial
  probe
  misc_feature (1)..(25): SEQ ID NO: 107; WAN024G4Y-3; Start 767; Stop 791
cagaacgaagaggaattacagctag

SEQ ID NO: 255911 - DNA, 25 bp, Artificial
  probe
  misc_feature (1)..(25): SEQ ID NO: 107; WAN024G4Y-3; Start 1243; Stop 1267
tatggatatggaaggtgtcgagatt

SEQ ID NO: 255912 - DNA, 25 bp, Artificial
  probe
  misc_feature (1)..(25): SEQ ID NO: 107; WAN024G4Y-3; Start 1242; Stop 1266
ttatggatatggaaggtgtcgagat

SEQ ID NO: 255913 - DNA, 25 bp, Artificial
  probe
  misc_feature (1)..(25): SEQ ID NO: 107; WAN024G4Y-3; Start 468; Stop 492
ttattcgtatgattgaccaagtctt

SEQ ID NO: 255914 - DNA, 25 bp, Artificial
  probe
  misc_feature (1)..(25): SEQ ID NO: 107; WAN024G4Y-3; Start 1230; Stop 1254
tctacgaaccagttatggatatgga

SEQ ID NO: 255915 - DNA, 25 bp, Artificial
  probe
  misc_feature (1)..(25): SEQ ID NO: 107; WAN024G4Y-3; Start 760; Stop 784
ctataggcagaacgaagaggaatta

SEQ ID NO: 255916 - DNA, 25 bp, Artificial
  probe
  misc_feature (1)..(25): SEQ ID NO: 107; WAN024G4Y-3; Start 741; Stop 765
tctccattcctagtctgacctatag

SEQ ID NO: 255917 - DNA, 25 bp, Artificial
  probe
  misc_feature (1)..(25): SEQ ID NO: 107; WAN024G4Y-3; Start 1032; Stop 1056
aagatcagttgaccagagaagctat

SEQ ID NO: 255918 - DNA, 25 bp, Artificial
  probe
  misc_feature (1)..(25): SEQ ID NO: 107; WAN024G4Y-3; Start 1235; Stop 1259
gaaccagttatggatatggaaggtg

SEQ ID NO: 255919 - DNA, 25 bp, Artificial
  probe
  misc_feature (1)..(25): SEQ ID NO: 107; WAN024G4Y-3; Start 1658; Stop 1682
gactacaagacagaccgctatgatg

SEQ ID NO: 255920 - DNA, 25 bp, Artificial
  probe
  misc_feature (1)..(25): SEQ ID NO: 107; WAN024G4Y-3; Start 1102; Stop 1126
agacaatcgtcagtcagataccatc

SEQ ID NO: 255921 - DNA, 25 bp, Artificial
  probe
  misc_feature (1)..(25): SEQ ID NO: 108; WAN024A56; Start 3; Stop 27
acagcagttgatttcaagaaacaaa

SEQ ID NO: 255922 - DNA, 25 bp, Artificial
  probe
  misc_feature (1)..(25): SEQ ID NO: 108; WAN024A56; Start 2; Stop 26
aacagcagttgatttcaagaaacaa

SEQ ID NO: 255923 - DNA, 25 bp, Artificial
  probe
  misc_feature (1)..(25): SEQ ID NO: 108; WAN024A56; Start 1; Stop 25
aaacagcagttgatttcaagaaaca

SEQ ID NO: 255924 - DNA, 25 bp, Artificial
  probe
  misc_feature (1)..(25): SEQ ID NO: 108; WAN024A56; Start 4; Stop 28
cagcagttgatttcaagaaacaaaa

SEQ ID NO: 255925 - DNA, 25 bp, Artificial
  probe
  misc_feature (1)..(25): SEQ ID NO: 109; WAN024AC8; Start 48; Stop 72
gaattatcagtttattttggagtca

SEQ ID NO: 255926 - DNA, 25 bp, Artificial
  probe
  misc_feature (1)..(25): SEQ ID NO: 109; WAN024AC8; Start 47; Stop 71
agaattatcagtttattttggagtc

SEQ ID NO: 255927 - DNA, 25 bp, Artificial
  probe
  misc_feature (1)..(25): SEQ ID NO: 109; WAN024AC8; Start 49; Stop 73
aattatcagtttattttggagtcaa

SEQ ID NO: 255928 - DNA, 25 bp, Artificial
  probe
  misc_feature (1)..(25): SEQ ID NO: 109; WAN024AC8; Start 51; Stop 75
ttatcagtttattttggagtcaaag

SEQ ID NO: 255929 - DNA, 25 bp, Artificial
  probe
  misc_feature (1)..(25): SEQ ID NO: 109; WAN024AC8; Start 50; Stop 74
attatcagtttattttggagtcaaa

SEQ ID NO: 255930 - DNA, 25 bp, Artificial
  probe
  misc_feature (1)..(25): SEQ ID NO: 110; WAN024AHD; Start 20; Stop 44
atccacattcggtactgtatttctt

SEQ ID NO: 255931 - DNA, 25 bp, Artificial
  probe
  misc_feature (1)..(25): SEQ ID NO: 110; WAN024AHD; Start 21; Stop 45
tccacattcggtactgtatttcttt

SEQ ID NO: 255932 - DNA, 25 bp, Artificial
  probe
  misc_feature (1)..(25): SEQ ID NO: 110; WAN024AHD; Start 19; Stop 43
tatccacattcggtactgtatttct

SEQ ID NO: 255933 - DNA, 25 bp, Artificial
  probe
  misc_feature (1)..(25): SEQ ID NO: 110; WAN024AHD; Start 18; Stop 42
gtatccacattcggtactgtatttc

SEQ ID NO: 255934 - DNA, 25 bp, Artificial
  probe
  misc_feature (1)..(25): SEQ ID NO: 110; WAN024AHD; Start 17; Stop 41
agtatccacattcggtactgtattt

SEQ ID NO: 255935 - DNA, 25 bp, Artificial
  probe
  misc_feature (1)..(25): SEQ ID NO: 110; WAN024AHD; Start 11; Stop 35
aaatacagtatccacattcggtact

SEQ ID NO: 255936 - DNA, 25 bp, Artificial
  probe
  misc_feature (1)..(25): SEQ ID NO: 110; WAN024AHD; Start 10; Stop 34
aaaatacagtatccacattcggtac

SEQ ID NO: 255937 - DNA, 25 bp, Artificial
  probe
  misc_feature (1)..(25): SEQ ID NO: 110; WAN024AHD; Start 29; Stop 53
cggtactgtatttcttttactctca

SEQ ID NO: 255938 - DNA, 25 bp, Artificial
  probe
  misc_feature (1)..(25): SEQ ID NO: 110; WAN024AHD; Start 22; Stop 46
ccacattcggtactgtatttctttt

SEQ ID NO: 255939 - DNA, 25 bp, Artificial
  probe
  misc_feature (1)..(25): SEQ ID NO: 110; WAN024AHD; Start 28; Stop 52
tcggtactgtatttcttttactctc

SEQ ID NO: 255940 - DNA, 25 bp, Artificial
  probe
  misc_feature (1)..(25): SEQ ID NO: 110; WAN024AHD; Start 27; Stop 51
ttcggtactgtatttcttttactct

SEQ ID NO: 255941 - DNA, 25 bp, Artificial
  probe
  misc_feature (1)..(25): SEQ ID NO: 110; WAN024AHD; Start 25; Stop 49
cattcggtactgtatttcttttact

SEQ ID NO: 255942 - DNA, 25 bp, Artificial
  probe
  misc_feature (1)..(25): SEQ ID NO: 110; WAN024AHD; Start 24; Stop 48
acattcggtactgtatttcttttac

SEQ ID NO: 255943 - DNA, 25 bp, Artificial
  probe
  misc_feature (1)..(25): SEQ ID NO: 110; WAN024AHD; Start 23; Stop 47
cacattcggtactgtatttctttta

SEQ ID NO: 255944 - DNA, 25 bp, Artificial
  probe
  misc_feature (1)..(25): SEQ ID NO: 110; WAN024AHD; Start 26; Stop 50
attcggtactgtatttcttttactc

SEQ ID NO: 255945 - DNA, 25 bp, Artificial
  probe
  misc_feature (1)..(25): SEQ ID NO: 110; WAN024AHD; Start 30; Stop 54
ggtactgtatttcttttactctcat

SEQ ID NO: 255946 - DNA, 25 bp, Artificial
  probe
  misc_feature (1)..(25): SEQ ID NO: 111; WAN024G3U; Start 313; Stop 337
ttcattggaccaggaacaacattag

SEQ ID NO: 255947 - DNA, 25 bp, Artificial
  probe
  misc_feature (1)..(25): SEQ ID NO: 111; WAN024G3U; Start 315; Stop 339
cattggaccaggaacaacattagag

SEQ ID NO: 255948 - DNA, 25 bp, Artificial
  probe
  misc_feature (1)..(25): SEQ ID NO: 111; WAN024G3U; Start 316; Stop 340
attggaccaggaacaacattagagt

SEQ ID NO: 255949 - DNA, 25 bp, Artificial
  probe
  misc_feature (1)..(25): SEQ ID NO: 111; WAN024G3U; Start 314; Stop 338
tcattggaccaggaacaacattaga

SEQ ID NO: 255950 - DNA, 25 bp, Artificial
  probe
  misc_feature (1)..(25): SEQ ID NO: 111; WAN024G3U; Start 317; Stop 341
ttggaccaggaacaacattagagtt

SEQ ID NO: 255951 - DNA, 25 bp, Artificial
  probe
  misc_feature (1)..(25): SEQ ID NO: 111; WAN024G3U; Start 147; Stop 171
tgataaagatttgctgattcgtgtg

SEQ ID NO: 255952 - DNA, 25 bp, Artificial
  probe
  misc_feature (1)..(25): SEQ ID NO: 111; WAN024G3U; Start 146; Stop 170
ctgataaagatttgctgattcgtgt

SEQ ID NO: 255953 - DNA, 25 bp, Artificial
  probe
  misc_feature (1)..(25): SEQ ID NO: 111; WAN024G3U; Start 350; Stop 374
gtgagttgcctattgacaatatccg

SEQ ID NO: 255954 - DNA, 25 bp, Artificial
  probe
  misc_feature (1)..(25): SEQ ID NO: 111; WAN024G3U; Start 349; Stop 373
cgtgagttgcctattgacaatatcc

SEQ ID NO: 255955 - DNA, 25 bp, Artificial
  probe
  misc_feature (1)..(25): SEQ ID NO: 111; WAN024G3U; Start 81; Stop 105
taaacagattatggacgaaatagcc

SEQ ID NO: 255956 - DNA, 25 bp, Artificial
  probe
  misc_feature (1)..(25): SEQ ID NO: 111; WAN024G3U; Start 751; Stop 775
aaacacattaaagtcatcaagcctt

SEQ ID NO: 255957 - DNA, 25 bp, Artificial
  probe
  misc_feature (1)..(25): SEQ ID NO: 111; WAN024G3U; Start 145; Stop 169
gctgataaagatttgctgattcgtg

SEQ ID NO: 255958 - DNA, 25 bp, Artificial
  probe
  misc_feature (1)..(25): SEQ ID NO: 111; WAN024G3U; Start 750; Stop 774
taaacacattaaagtcatcaagcct

SEQ ID NO: 255959 - DNA, 25 bp, Artificial
  probe
  misc_feature (1)..(25): SEQ ID NO: 111; WAN024G3U; Start 148; Stop 172
gataaagatttgctgattcgtgtgc

SEQ ID NO: 255960 - DNA, 25 bp, Artificial
  probe
  misc_feature (1)..(25): SEQ ID NO: 111; WAN024G3U; Start 749; Stop 773
ctaaacacattaaagtcatcaagcc

SEQ ID NO: 255961 - DNA, 25 bp, Artificial
  probe
  misc_feature (1)..(25): SEQ ID NO: 111; WAN024G3U; Start 76; Stop 100
acagttaaacagattatggacgaaa

SEQ ID NO: 255962 - DNA, 25 bp, Artificial
  probe
  misc_feature (1)..(25): SEQ ID NO: 111; WAN024G3U; Start 75; Stop 99
aacagttaaacagattatggacgaa

SEQ ID NO: 255963 - DNA, 25 bp, Artificial
  probe
  misc_feature (1)..(25): SEQ ID NO: 111; WAN024G3U; Start 752; Stop 776
aacacattaaagtcatcaagcctta

SEQ ID NO: 255964 - DNA, 25 bp, Artificial
  probe
  misc_feature (1)..(25): SEQ ID NO: 111; WAN024G3U; Start 82; Stop 106
aaacagattatggacgaaatagccg

SEQ ID NO: 255965 - DNA, 25 bp, Artificial
  probe
  misc_feature (1)..(25): SEQ ID NO: 111; WAN024G3U; Start 348; Stop 372
gcgtgagttgcctattgacaatatc

SEQ ID NO: 255966 - DNA, 25 bp, Artificial
  probe
  misc_feature (1)..(25): SEQ ID NO: 111; WAN024G3U; Start 4; Stop 28
cgaggtgataatatgctcaaacaag

SEQ ID NO: 255967 - DNA, 25 bp, Artificial
  probe
  misc_feature (1)..(25): SEQ ID NO: 111; WAN024G3U; Start 1; Stop 25
aaacgaggtgataatatgctcaaac

SEQ ID NO: 255968 - DNA, 25 bp, Artificial
  probe
  misc_feature (1)..(25): SEQ ID NO: 111; WAN024G3U; Start 753; Stop 777
acacattaaagtcatcaagccttaa

SEQ ID NO: 255969 - DNA, 25 bp, Artificial
  probe
  misc_feature (1)..(25): SEQ ID NO: 111; WAN024G3U; Start 3; Stop 27
acgaggtgataatatgctcaaacaa

SEQ ID NO: 255970 - DNA, 25 bp, Artificial
  probe
  misc_feature (1)..(25): SEQ ID NO: 111; WAN024G3U; Start 2; Stop 26
aacgaggtgataatatgctcaaaca

SEQ ID NO: 255971 - DNA, 25 bp, Artificial
  probe
  misc_feature (1)..(25): SEQ ID NO: 111; WAN024G3U; Start 754; Stop 778
cacattaaagtcatcaagccttaac

SEQ ID NO: 255972 - DNA, 25 bp, Artificial
  probe
  misc_feature (1)..(25): SEQ ID NO: 111; WAN024G3U; Start 312; Stop 336
tttcattggaccaggaacaacatta

SEQ ID NO: 255973 - DNA, 25 bp, Artificial
  probe
  misc_feature (1)..(25): SEQ ID NO: 111; WAN024G3U; Start 755; Stop 779
acattaaagtcatcaagccttaact

SEQ ID NO: 255974 - DNA, 25 bp, Artificial
  probe
  misc_feature (1)..(25): SEQ ID NO: 111; WAN024G3U; Start 5; Stop 29
gaggtgataatatgctcaaacaaga

SEQ ID NO: 255975 - DNA, 25 bp, Artificial
  probe
  misc_feature (1)..(25): SEQ ID NO: 111; WAN024G3U; Start 64; Stop 88
aaaggaaccataacagttaaacaga

SEQ ID NO: 255976 - DNA, 25 bp, Artificial
  probe
  misc_feature (1)..(25): SEQ ID NO: 111; WAN024G3U; Start 6; Stop 30
aggtgataatatgctcaaacaagaa

SEQ ID NO: 255977 - DNA, 25 bp, Artificial
  probe
  misc_feature (1)..(25): SEQ ID NO: 111; WAN024G3U; Start 748; Stop 772
tctaaacacattaaagtcatcaagc

SEQ ID NO: 255978 - DNA, 25 bp, Artificial
  probe
  misc_feature (1)..(25): SEQ ID NO: 111; WAN024G3U; Start 66; Stop 90
aggaaccataacagttaaacagatt

SEQ ID NO: 255979 - DNA, 25 bp, Artificial
  probe
  misc_feature (1)..(25): SEQ ID NO: 112; WAN0249ZW; Start 6; Stop 30
aaaggagtaaacaatgtctaagaaa

SEQ ID NO: 255980 - DNA, 25 bp, Artificial
  probe
  misc_feature (1)..(25): SEQ ID NO: 112; WAN0249ZW; Start 8; Stop 32
aggagtaaacaatgtctaagaaatt

SEQ ID NO: 255981 - DNA, 25 bp, Artificial
  probe
  misc_feature (1)..(25): SEQ ID NO: 112; WAN0249ZW; Start 7; Stop 31
aaggagtaaacaatgtctaagaaat

SEQ ID NO: 255982 - DNA, 25 bp, Artificial
  probe
  misc_feature (1)..(25): SEQ ID NO: 112; WAN0249ZW; Start 4; Stop 28
ctaaaggagtaaacaatgtctaaga

SEQ ID NO: 255983 - DNA, 25 bp, Artificial
  probe
  misc_feature (1)..(25): SEQ ID NO: 112; WAN0249ZW; Start 3; Stop 27
actaaaggagtaaacaatgtctaag

SEQ ID NO: 255984 - DNA, 25 bp, Artificial
  probe
  misc_feature (1)..(25): SEQ ID NO: 112; WAN0249ZW; Start 2; Stop 26
aactaaaggagtaaacaatgtctaa

SEQ ID NO: 255985 - DNA, 25 bp, Artificial
  probe
  misc_feature (1)..(25): SEQ ID NO: 112; WAN0249ZW; Start 1; Stop 25
aaactaaaggagtaaacaatgtcta

SEQ ID NO: 255986 - DNA, 25 bp, Artificial
  probe
  misc_feature (1)..(25): SEQ ID NO: 112; WAN0249ZW; Start 5; Stop 29
taaaggagtaaacaatgtctaagaa

SEQ ID NO: 255987 - DNA, 25 bp, Artificial
  probe
  misc_feature (1)..(25): SEQ ID NO: 112; WAN0249ZW; Start 101; Stop 125
cctgagctagacgcagtactaactc

SEQ ID NO: 255988 - DNA, 25 bp, Artificial
  probe
  misc_feature (1)..(25): SEQ ID NO: 112; WAN0249ZW; Start 9; Stop 33
ggagtaaacaatgtctaagaaatta

SEQ ID NO: 255989 - DNA, 25 bp, Artificial
  probe
  misc_feature (1)..(25): SEQ ID NO: 112; WAN0249ZW; Start 102; Stop 126
ctgagctagacgcagtactaactcg

SEQ ID NO: 255990 - DNA, 25 bp, Artificial
  probe
  misc_feature (1)..(25): SEQ ID NO: 112; WAN0249ZW; Start 21; Stop 45
gtctaagaaattaacatttcactgc

SEQ ID NO: 255991 - DNA, 25 bp, Artificial
  probe
  misc_feature (1)..(25): SEQ ID NO: 112; WAN0249ZW; Start 103; Stop 127
tgagctagacgcagtactaactcgt

SEQ ID NO: 255992 - DNA, 25 bp, Artificial
  probe
  misc_feature (1)..(25): SEQ ID NO: 112; WAN0249ZW; Start 20; Stop 44
tgtctaagaaattaacatttcactg

SEQ ID NO: 255993 - DNA, 25 bp, Artificial
  probe
  misc_feature (1)..(25): SEQ ID NO: 113; WAN0249VR; Start 10; Stop 34
aagtcaaacagctcctctaaaagta

SEQ ID NO: 255994 - DNA, 25 bp, Artificial
  probe
  misc_feature (1)..(25): SEQ ID NO: 113; WAN0249VR; Start 11; Stop 35
agtcaaacagctcctctaaaagtac

SEQ ID NO: 255995 - DNA, 25 bp, Artificial
  probe
  misc_feature (1)..(25): SEQ ID NO: 113; WAN0249VR; Start 51; Stop 75
tcgacctataaataggagaatacca

SEQ ID NO: 255996 - DNA, 25 bp, Artificial
  probe
  misc_feature (1)..(25): SEQ ID NO: 113; WAN0249VR; Start 52; Stop 76
cgacctataaataggagaataccaa

SEQ ID NO: 255997 - DNA, 25 bp, Artificial
  probe
  misc_feature (1)..(25): SEQ ID NO: 113; WAN0249VR; Start 12; Stop 36
gtcaaacagctcctctaaaagtact

SEQ ID NO: 255998 - DNA, 25 bp, Artificial
  probe
  misc_feature (1)..(25): SEQ ID NO: 113; WAN0249VR; Start 53; Stop 77
gacctataaataggagaataccaaa

SEQ ID NO: 255999 - DNA, 25 bp, Artificial
  probe
  misc_feature (1)..(25): SEQ ID NO: 113; WAN0249VR; Start 54; Stop 78
acctataaataggagaataccaaaa

SEQ ID NO: 256000 - DNA, 25 bp, Artificial
  probe
  misc_feature (1)..(25): SEQ ID NO: 114; WAN024A9W; Start 33; Stop 57
aatagaatgtaacgaaggagagaaa

SEQ ID NO: 256001 - DNA, 25 bp, Artificial
  probe
  misc_feature (1)..(25): SEQ ID NO: 114; WAN024A9W; Start 32; Stop 56
aaatagaatgtaacgaaggagagaa

SEQ ID NO: 256002 - DNA, 25 bp, Artificial
  probe
  misc_feature (1)..(25): SEQ ID NO: 114; WAN024A9W; Start 7; Stop 31
gctcaattcatgctaagataataga

SEQ ID NO: 256003 - DNA, 25 bp, Artificial
  probe
  misc_feature (1)..(25): SEQ ID NO: 114; WAN024A9W; Start 34; Stop 58
atagaatgtaacgaaggagagaaaa

SEQ ID NO: 256004 - DNA, 25 bp, Artificial
  probe
  misc_feature (1)..(25): SEQ ID NO: 114; WAN024A9W; Start 31; Stop 55
aaaatagaatgtaacgaaggagaga

SEQ ID NO: 256005 - DNA, 25 bp, Artificial
  probe
  misc_feature (1)..(25): SEQ ID NO: 114; WAN024A9W; Start 29; Stop 53
agaaaatagaatgtaacgaaggaga

SEQ ID NO: 256006 - DNA, 25 bp, Artificial
  probe
  misc_feature (1)..(25): SEQ ID NO: 114; WAN024A9W; Start 6; Stop 30
agctcaattcatgctaagataatag

SEQ ID NO: 256007 - DNA, 25 bp, Artificial
  probe
  misc_feature (1)..(25): SEQ ID NO: 114; WAN024A9W; Start 30; Stop 54
gaaaatagaatgtaacgaaggagag

SEQ ID NO: 256008 - DNA, 25 bp, Artificial
  probe
  misc_feature (1)..(25): SEQ ID NO: 114; WAN024A9W; Start 3; Stop 27
actagctcaattcatgctaagataa

SEQ ID NO: 256009 - DNA, 25 bp, Artificial
  probe
  misc_feature (1)..(25): SEQ ID NO: 114; WAN024A9W; Start 2; Stop 26
aactagctcaattcatgctaagata

SEQ ID NO: 256010 - DNA, 25 bp, Artificial
  probe
  misc_feature (1)..(25): SEQ ID NO: 114; WAN024A9W; Start 28; Stop 52
tagaaaatagaatgtaacgaaggag

SEQ ID NO: 256011 - DNA, 25 bp, Artificial
  probe
  misc_feature (1)..(25): SEQ ID NO: 114; WAN024A9W; Start 1; Stop 25
aaactagctcaattcatgctaagat

SEQ ID NO: 256012 - DNA, 25 bp, Artificial
  probe
  misc_feature (1)..(25): SEQ ID NO: 114; WAN024A9W; Start 4; Stop 28
ctagctcaattcatgctaagataat

SEQ ID NO: 256013 - DNA, 25 bp, Artificial
  probe
  misc_feature (1)..(25): SEQ ID NO: 114; WAN024A9W; Start 27; Stop 51
atagaaaatagaatgtaacgaagga

SEQ ID NO: 256014 - DNA, 25 bp, Artificial
  probe
  misc_feature (1)..(25): SEQ ID NO: 114; WAN024A9W; Start 5; Stop 29
tagctcaattcatgctaagataata

SEQ ID NO: 256015 - DNA, 25 bp, Artificial
  probe
  misc_feature (1)..(25): SEQ ID NO: 114; WAN024A9W; Start 26; Stop 50
aatagaaaatagaatgtaacgaagg

SEQ ID NO: 256016 - DNA, 25 bp, Artificial
  probe
  misc_feature (1)..(25): SEQ ID NO: 115; WAN024AS9; Start 68; Stop 92
gggagaaatgagtagataaagaggt

SEQ ID NO: 256017 - DNA, 25 bp, Artificial
  probe
  misc_feature (1)..(25): SEQ ID NO: 115; WAN024AS9; Start 67; Stop 91
tgggagaaatgagtagataaagagg

SEQ ID NO: 256018 - DNA, 25 bp, Artificial
  probe
  misc_feature (1)..(25): SEQ ID NO: 115; WAN024AS9; Start 66; Stop 90
atgggagaaatgagtagataaagag

SEQ ID NO: 256019 - DNA, 25 bp, Artificial
  probe
  misc_feature (1)..(25): SEQ ID NO: 115; WAN024AS9; Start 59; Stop 83
ctgtataatgggagaaatgagtaga

SEQ ID NO: 256020 - DNA, 25 bp, Artificial
  probe
  misc_feature (1)..(25): SEQ ID NO: 115; WAN024AS9; Start 65; Stop 89
aatgggagaaatgagtagataaaga

SEQ ID NO: 256021 - DNA, 25 bp, Artificial
  probe
  misc_feature (1)..(25): SEQ ID NO: 115; WAN024AS9; Start 58; Stop 82
tctgtataatgggagaaatgagtag

SEQ ID NO: 256022 - DNA, 25 bp, Artificial
  probe
  misc_feature (1)..(25): SEQ ID NO: 115; WAN024AS9; Start 69; Stop 93
ggagaaatgagtagataaagaggta

SEQ ID NO: 256023 - DNA, 25 bp, Artificial
  probe
  misc_feature (1)..(25): SEQ ID NO: 115; WAN024AS9; Start 60; Stop 84
tgtataatgggagaaatgagtagat

SEQ ID NO: 256024 - DNA, 25 bp, Artificial
  probe
  misc_feature (1)..(25): SEQ ID NO: 115; WAN024AS9; Start 64; Stop 88
taatgggagaaatgagtagataaag

SEQ ID NO: 256025 - DNA, 25 bp, Artificial
  probe
  misc_feature (1)..(25): SEQ ID NO: 115; WAN024AS9; Start 57; Stop 81
ttctgtataatgggagaaatgagta

SEQ ID NO: 256026 - DNA, 25 bp, Artificial
  probe
  misc_feature (1)..(25): SEQ ID NO: 115; WAN024AS9; Start 70; Stop 94
gagaaatgagtagataaagaggtaa

SEQ ID NO: 256027 - DNA, 25 bp, Artificial
  probe
  misc_feature (1)..(25): SEQ ID NO: 115; WAN024AS9; Start 75; Stop 99
atgagtagataaagaggtaaatgtt

SEQ ID NO: 256028 - DNA, 25 bp, Artificial
  probe
  misc_feature (1)..(25): SEQ ID NO: 115; WAN024AS9; Start 74; Stop 98
aatgagtagataaagaggtaaatgt

SEQ ID NO: 256029 - DNA, 25 bp, Artificial
  probe
  misc_feature (1)..(25): SEQ ID NO: 115; WAN024AS9; Start 63; Stop 87
ataatgggagaaatgagtagataaa

SEQ ID NO: 256030 - DNA, 25 bp, Artificial
  probe
  misc_feature (1)..(25): SEQ ID NO: 115; WAN024AS9; Start 61; Stop 85
gtataatgggagaaatgagtagata

SEQ ID NO: 256031 - DNA, 25 bp, Artificial
  probe
  misc_feature (1)..(25): SEQ ID NO: 115; WAN024AS9; Start 71; Stop 95
agaaatgagtagataaagaggtaaa

SEQ ID NO: 256032 - DNA, 25 bp, Artificial
  probe
  misc_feature (1)..(25): SEQ ID NO: 115; WAN024AS9; Start 56; Stop 80
tttctgtataatgggagaaatgagt

SEQ ID NO: 256033 - DNA, 25 bp, Artificial
  probe
  misc_feature (1)..(25): SEQ ID NO: 115; WAN024AS9; Start 55; Stop 79
ttttctgtataatgggagaaatgag

SEQ ID NO: 256034 - DNA, 25 bp, Artificial
  probe
  misc_feature (1)..(25): SEQ ID NO: 116; WAN024AIL; Start 249; Stop 273
gaataagacaccagaacatcctcta

SEQ ID NO: 256035 - DNA, 25 bp, Artificial
  probe
  misc_feature (1)..(25): SEQ ID NO: 116; WAN024AIL; Start 253; Stop 277
aagacaccagaacatcctctaatag

SEQ ID NO: 256036 - DNA, 25 bp, Artificial
  probe
  misc_feature (1)..(25): SEQ ID NO: 116; WAN024AIL; Start 250; Stop 274
aataagacaccagaacatcctctaa

SEQ ID NO: 256037 - DNA, 25 bp, Artificial
  probe
  misc_feature (1)..(25): SEQ ID NO: 116; WAN024AIL; Start 251; Stop 275
ataagacaccagaacatcctctaat

SEQ ID NO: 256038 - DNA, 25 bp, Artificial
  probe
  misc_feature (1)..(25): SEQ ID NO: 116; WAN024AIL; Start 248; Stop 272
tgaataagacaccagaacatcctct

SEQ ID NO: 256039 - DNA, 25 bp, Artificial
  probe
  misc_feature (1)..(25): SEQ ID NO: 116; WAN024AIL; Start 252; Stop 276
taagacaccagaacatcctctaata

SEQ ID NO: 256040 - DNA, 25 bp, Artificial
  probe
  misc_feature (1)..(25): SEQ ID NO: 116; WAN024AIL; Start 244; Stop 268
caagtgaataagacaccagaacatc

SEQ ID NO: 256041 - DNA, 25 bp, Artificial
  probe
  misc_feature (1)..(25): SEQ ID NO: 116; WAN024AIL; Start 243; Stop 267
acaagtgaataagacaccagaacat

SEQ ID NO: 256042 - DNA, 25 bp, Artificial
  probe
  misc_feature (1)..(25): SEQ ID NO: 116; WAN024AIL; Start 242; Stop 266
aacaagtgaataagacaccagaaca

SEQ ID NO: 256043 - DNA, 25 bp, Artificial
  probe
  misc_feature (1)..(25): SEQ ID NO: 116; WAN024AIL; Start 245; Stop 269
aagtgaataagacaccagaacatcc

SEQ ID NO: 256044 - DNA, 25 bp, Artificial
  probe
  misc_feature (1)..(25): SEQ ID NO: 116; WAN024AIL; Start 254; Stop 278
agacaccagaacatcctctaatagg

SEQ ID NO: 256045 - DNA, 25 bp, Artificial
  probe
  misc_feature (1)..(25): SEQ ID NO: 116; WAN024AIL; Start 247; Stop 271
gtgaataagacaccagaacatcctc

SEQ ID NO: 256046 - DNA, 25 bp, Artificial
  probe
  misc_feature (1)..(25): SEQ ID NO: 116; WAN024AIL; Start 246; Stop 270
agtgaataagacaccagaacatcct

SEQ ID NO: 256047 - DNA, 25 bp, Artificial
  probe
  misc_feature (1)..(25): SEQ ID NO: 116; WAN024AIL; Start 315; Stop 339
aagcaagatactatcctagttgacg

SEQ ID NO: 256048 - DNA, 25 bp, Artificial
  probe
  misc_feature (1)..(25): SEQ ID NO: 116; WAN024AIL; Start 320; Stop 344
agatactatcctagttgacgctaac

SEQ ID NO: 256049 - DNA, 25 bp, Artificial
  probe
  misc_feature (1)..(25): SEQ ID NO: 116; WAN024AIL; Start 318; Stop 342
caagatactatcctagttgacgcta

SEQ ID NO: 256050 - DNA, 25 bp, Artificial
  probe
  misc_feature (1)..(25): SEQ ID NO: 116; WAN024AIL; Start 338; Stop 362
cgctaacttcctatcccacttatta

SEQ ID NO: 256051 - DNA, 25 bp, Artificial
  probe
  misc_feature (1)..(25): SEQ ID NO: 116; WAN024AIL; Start 122; Stop 146
gccctactttccttaaactctaaac

SEQ ID NO: 256052 - DNA, 25 bp, Artificial
  probe
  misc_feature (1)..(25): SEQ ID NO: 116; WAN024AIL; Start 121; Stop 145
agccctactttccttaaactctaaa

SEQ ID NO: 256053 - DNA, 25 bp, Artificial
  probe
  misc_feature (1)..(25): SEQ ID NO: 116; WAN024AIL; Start 319; Stop 343
aagatactatcctagttgacgctaa

SEQ ID NO: 256054 - DNA, 25 bp, Artificial
  probe
  misc_feature (1)..(25): SEQ ID NO: 116; WAN024AIL; Start 337; Stop 361
acgctaacttcctatcccacttatt

SEQ ID NO: 256055 - DNA, 25 bp, Artificial
  probe
  misc_feature (1)..(25): SEQ ID NO: 116; WAN024AIL; Start 118; Stop 142
actagccctactttccttaaactct

SEQ ID NO: 256056 - DNA, 25 bp, Artificial
  probe
  misc_feature (1)..(25): SEQ ID NO: 116; WAN024AIL; Start 117; Stop 141
tactagccctactttccttaaactc

SEQ ID NO: 256057 - DNA, 25 bp, Artificial
  probe
  misc_feature (1)..(25): SEQ ID NO: 116; WAN024AIL; Start 120; Stop 144
tagccctactttccttaaactctaa

SEQ ID NO: 256058 - DNA, 25 bp, Artificial
  probe
  misc_feature (1)..(25): SEQ ID NO: 116; WAN024AIL; Start 119; Stop 143
ctagccctactttccttaaactcta

SEQ ID NO: 256059 - DNA, 25 bp, Artificial
  probe
  misc_feature (1)..(25): SEQ ID NO: 116; WAN024AIL; Start 336; Stop 360
gacgctaacttcctatcccacttat

SEQ ID NO: 256060 - DNA, 25 bp, Artificial
  probe
  misc_feature (1)..(25): SEQ ID NO: 116; WAN024AIL; Start 317; Stop 341
gcaagatactatcctagttgacgct

SEQ ID NO: 256061 - DNA, 25 bp, Artificial
  probe
  misc_feature (1)..(25): SEQ ID NO: 116; WAN024AIL; Start 316; Stop 340
agcaagatactatcctagttgacgc

SEQ ID NO: 256062 - DNA, 25 bp, Artificial
  probe
  misc_feature (1)..(25): SEQ ID NO: 116; WAN024AIL; Start 111; Stop 135
acaatatactagccctactttcctt

SEQ ID NO: 256063 - DNA, 25 bp, Artificial
  probe
  misc_feature (1)..(25): SEQ ID NO: 116; WAN024AIL; Start 116; Stop 140
atactagccctactttccttaaact

SEQ ID NO: 256064 - DNA, 25 bp, Artificial
  probe
  misc_feature (1)..(25): SEQ ID NO: 116; WAN024AIL; Start 399; Stop 423
gggaatccaagtcaatttctagtac

SEQ ID NO: 256065 - DNA, 25 bp, Artificial
  probe
  misc_feature (1)..(25): SEQ ID NO: 116; WAN024AIL; Start 326; Stop 350
tatcctagttgacgctaacttccta

SEQ ID NO: 256066 - DNA, 25 bp, Artificial
  probe
  misc_feature (1)..(25): SEQ ID NO: 116; WAN024AIL; Start 323; Stop 347
tactatcctagttgacgctaacttc

SEQ ID NO: 256067 - DNA, 25 bp, Artificial
  probe
  misc_feature (1)..(25): SEQ ID NO: 117; WAN0249PV; Start 2; Stop 26
aacttgtattcctcctgtctcttaa

SEQ ID NO: 256068 - DNA, 25 bp, Artificial
  probe
  misc_feature (1)..(25): SEQ ID NO: 117; WAN0249PV; Start 3; Stop 27
acttgtattcctcctgtctcttaat

SEQ ID NO: 256069 - DNA, 25 bp, Artificial
  probe
  misc_feature (1)..(25): SEQ ID NO: 117; WAN0249PV; Start 4; Stop 28
cttgtattcctcctgtctcttaata

SEQ ID NO: 256070 - DNA, 25 bp, Artificial
  probe
  misc_feature (1)..(25): SEQ ID NO: 117; WAN0249PV; Start 1; Stop 25
aaacttgtattcctcctgtctctta

SEQ ID NO: 256071 - DNA, 25 bp, Artificial
  probe
  misc_feature (1)..(25): SEQ ID NO: 117; WAN0249PV; Start 5; Stop 29
ttgtattcctcctgtctcttaatat

SEQ ID NO: 256072 - DNA, 25 bp, Artificial
  probe
  misc_feature (1)..(25): SEQ ID NO: 117; WAN0249PV; Start 10; Stop 34
ttcctcctgtctcttaatatacatt

SEQ ID NO: 256073 - DNA, 25 bp, Artificial
  probe
  misc_feature (1)..(25): SEQ ID NO: 117; WAN0249PV; Start 9; Stop 33
attcctcctgtctcttaatatacat

SEQ ID NO: 256074 - DNA, 25 bp, Artificial
  probe
  misc_feature (1)..(25): SEQ ID NO: 117; WAN0249PV; Start 6; Stop 30
tgtattcctcctgtctcttaatata

SEQ ID NO: 256075 - DNA, 25 bp, Artificial
  probe
  misc_feature (1)..(25): SEQ ID NO: 117; WAN0249PV; Start 11; Stop 35
tcctcctgtctcttaatatacatta

SEQ ID NO: 256076 - DNA, 25 bp, Artificial
  probe
  misc_feature (1)..(25): SEQ ID NO: 117; WAN0249PV; Start 8; Stop 32
tattcctcctgtctcttaatataca

SEQ ID NO: 256077 - DNA, 25 bp, Artificial
  probe
  misc_feature (1)..(25): SEQ ID NO: 117; WAN0249PV; Start 7; Stop 31
gtattcctcctgtctcttaatatac

SEQ ID NO: 256078 - DNA, 25 bp, Artificial
  probe
  misc_feature (1)..(25): SEQ ID NO: 117; WAN0249PV; Start 161; Stop 185
tggaattatgcgttttatcatggaa

SEQ ID NO: 256079 - DNA, 25 bp, Artificial
  probe
  misc_feature (1)..(25): SEQ ID NO: 117; WAN0249PV; Start 160; Stop 184
ttggaattatgcgttttatcatgga

SEQ ID NO: 256080 - DNA, 25 bp, Artificial
  probe
  misc_feature (1)..(25): SEQ ID NO: 117; WAN0249PV; Start 159; Stop 183
cttggaattatgcgttttatcatgg

SEQ ID NO: 256081 - DNA, 25 bp, Artificial
  probe
  misc_feature (1)..(25): SEQ ID NO: 117; WAN0249PV; Start 132; Stop 156
aaaacgcatagtatcaagtgtaaaa

SEQ ID NO: 256082 - DNA, 25 bp, Artificial
  probe
  misc_feature (1)..(25): SEQ ID NO: 117; WAN0249PV; Start 157; Stop 181
aacttggaattatgcgttttatcat

SEQ ID NO: 256083 - DNA, 25 bp, Artificial
  probe
  misc_feature (1)..(25): SEQ ID NO: 117; WAN0249PV; Start 162; Stop 186
ggaattatgcgttttatcatggaaa

SEQ ID NO: 256084 - DNA, 25 bp, Artificial
  probe
  misc_feature (1)..(25): SEQ ID NO: 117; WAN0249PV; Start 158; Stop 182
acttggaattatgcgttttatcatg

SEQ ID NO: 256085 - DNA, 25 bp, Artificial
  probe
  misc_feature (1)..(25): SEQ ID NO: 117; WAN0249PV; Start 168; Stop 192
atgcgttttatcatggaaagatttt

SEQ ID NO: 256086 - DNA, 25 bp, Artificial
  probe
  misc_feature (1)..(25): SEQ ID NO: 117; WAN0249PV; Start 131; Stop 155
taaaacgcatagtatcaagtgtaaa

SEQ ID NO: 256087 - DNA, 25 bp, Artificial
  probe
  misc_feature (1)..(25): SEQ ID NO: 117; WAN0249PV; Start 167; Stop 191
tatgcgttttatcatggaaagattt

SEQ ID NO: 256088 - DNA, 25 bp, Artificial
  probe
  misc_feature (1)..(25): SEQ ID NO: 117; WAN0249PV; Start 166; Stop 190
ttatgcgttttatcatggaaagatt

SEQ ID NO: 256089 - DNA, 25 bp, Artificial
  probe
  misc_feature (1)..(25): SEQ ID NO: 117; WAN0249PV; Start 164; Stop 188
aattatgcgttttatcatggaaaga

SEQ ID NO: 256090 - DNA, 25 bp, Artificial
  probe
  misc_feature (1)..(25): SEQ ID NO: 117; WAN0249PV; Start 163; Stop 187
gaattatgcgttttatcatggaaag

SEQ ID NO: 256091 - DNA, 25 bp, Artificial
  probe
  misc_feature (1)..(25): SEQ ID NO: 117; WAN0249PV; Start 165; Stop 189
attatgcgttttatcatggaaagat

SEQ ID NO: 256092 - DNA, 25 bp, Artificial
  probe
  misc_feature (1)..(25): SEQ ID NO: 117; WAN0249PV; Start 130; Stop 154
ataaaacgcatagtatcaagtgtaa

SEQ ID NO: 256093 - DNA, 25 bp, Artificial
  probe
  misc_feature (1)..(25): SEQ ID NO: 117; WAN0249PV; Start 12; Stop 36
cctcctgtctcttaatatacattaa

SEQ ID NO: 256094 - DNA, 25 bp, Artificial
  probe
  misc_feature (1)..(25): SEQ ID NO: 117; WAN0249PV; Start 156; Stop 180
aaacttggaattatgcgttttatca

SEQ ID NO: 256095 - DNA, 25 bp, Artificial
  probe
  misc_feature (1)..(25): SEQ ID NO: 117; WAN0249PV; Start 128; Stop 152
ttataaaacgcatagtatcaagtgt

SEQ ID NO: 256096 - DNA, 25 bp, Artificial
  probe
  misc_feature (1)..(25): SEQ ID NO: 117; WAN0249PV; Start 129; Stop 153
tataaaacgcatagtatcaagtgta

SEQ ID NO: 256097 - DNA, 25 bp, Artificial
  probe
  misc_feature (1)..(25): SEQ ID NO: 117; WAN0249PV; Start 92; Stop 116
agattctaaagataactttcaggat

SEQ ID NO: 256098 - DNA, 25 bp, Artificial
  probe
  misc_feature (1)..(25): SEQ ID NO: 117; WAN0249PV; Start 127; Stop 151
attataaaacgcatagtatcaagtg

SEQ ID NO: 256099 - DNA, 25 bp, Artificial
  probe
  misc_feature (1)..(25): SEQ ID NO: 117; WAN0249PV; Start 126; Stop 150
aattataaaacgcatagtatcaagt

SEQ ID NO: 256100 - DNA, 25 bp, Artificial
  probe
  misc_feature (1)..(25): SEQ ID NO: 117; WAN0249PV; Start 155; Stop 179
aaaacttggaattatgcgttttatc

SEQ ID NO: 256101 - DNA, 25 bp, Artificial
  probe
  misc_feature (1)..(25): SEQ ID NO: 118; WAN024A6F; Start 18; Stop 42
acagaaatttgctctaataacaagt

SEQ ID NO: 256102 - DNA, 25 bp, Artificial
  probe
  misc_feature (1)..(25): SEQ ID NO: 118; WAN024A6F; Start 19; Stop 43
cagaaatttgctctaataacaagtt

SEQ ID NO: 256103 - DNA, 25 bp, Artificial
  probe
  misc_feature (1)..(25): SEQ ID NO: 118; WAN024A6F; Start 17; Stop 41
aacagaaatttgctctaataacaag

SEQ ID NO: 256104 - DNA, 25 bp, Artificial
  probe
  misc_feature (1)..(25): SEQ ID NO: 118; WAN024A6F; Start 20; Stop 44
agaaatttgctctaataacaagttt

SEQ ID NO: 256105 - DNA, 25 bp, Artificial
  probe
  misc_feature (1)..(25): SEQ ID NO: 118; WAN024A6F; Start 16; Stop 40
taacagaaatttgctctaataacaa

SEQ ID NO: 256106 - DNA, 25 bp, Artificial
  probe
  misc_feature (1)..(25): SEQ ID NO: 118; WAN024A6F; Start 15; Stop 39
ataacagaaatttgctctaataaca

SEQ ID NO: 256107 - DNA, 25 bp, Artificial
  probe
  misc_feature (1)..(25): SEQ ID NO: 118; WAN024A6F; Start 21; Stop 45
gaaatttgctctaataacaagtttt

SEQ ID NO: 256108 - DNA, 25 bp, Artificial
  probe
  misc_feature (1)..(25): SEQ ID NO: 119; WAN024APC; Start 12; Stop 36
taatcatagcaacggataagtaggt

SEQ ID NO: 256109 - DNA, 25 bp, Artificial
  probe
  misc_feature (1)..(25): SEQ ID NO: 119; WAN024APC; Start 13; Stop 37
aatcatagcaacggataagtaggtt

SEQ ID NO: 256110 - DNA, 25 bp, Artificial
  probe
  misc_feature (1)..(25): SEQ ID NO: 119; WAN024APC; Start 15; Stop 39
tcatagcaacggataagtaggttat

SEQ ID NO: 256111 - DNA, 25 bp, Artificial
  probe
  misc_feature (1)..(25): SEQ ID NO: 119; WAN024APC; Start 14; Stop 38
atcatagcaacggataagtaggtta

SEQ ID NO: 256112 - DNA, 25 bp, Artificial
  probe
  misc_feature (1)..(25): SEQ ID NO: 119; WAN024APC; Start 98; Stop 122
ctaccgttagtgacaattacataca

SEQ ID NO: 256113 - DNA, 25 bp, Artificial
  probe
  misc_feature (1)..(25): SEQ ID NO: 119; WAN024APC; Start 97; Stop 121
tctaccgttagtgacaattacatac

SEQ ID NO: 256114 - DNA, 25 bp, Artificial
  probe
  misc_feature (1)..(25): SEQ ID NO: 119; WAN024APC; Start 11; Stop 35
ataatcatagcaacggataagtagg

SEQ ID NO: 256115 - DNA, 25 bp, Artificial
  probe
  misc_feature (1)..(25): SEQ ID NO: 119; WAN024APC; Start 95; Stop 119
attctaccgttagtgacaattacat

SEQ ID NO: 256116 - DNA, 25 bp, Artificial
  probe
  misc_feature (1)..(25): SEQ ID NO: 119; WAN024APC; Start 100; Stop 124
accgttagtgacaattacatacaca

SEQ ID NO: 256117 - DNA, 25 bp, Artificial
  probe
  misc_feature (1)..(25): SEQ ID NO: 119; WAN024APC; Start 101; Stop 125
ccgttagtgacaattacatacacaa

SEQ ID NO: 256118 - DNA, 25 bp, Artificial
  probe
  misc_feature (1)..(25): SEQ ID NO: 119; WAN024APC; Start 109; Stop 133
gacaattacatacacaatcaagtgc

SEQ ID NO: 256119 - DNA, 25 bp, Artificial
  probe
  misc_feature (1)..(25): SEQ ID NO: 119; WAN024APC; Start 94; Stop 118
aattctaccgttagtgacaattaca

SEQ ID NO: 256120 - DNA, 25 bp, Artificial
  probe
  misc_feature (1)..(25): SEQ ID NO: 119; WAN024APC; Start 96; Stop 120
ttctaccgttagtgacaattacata

SEQ ID NO: 256121 - DNA, 25 bp, Artificial
  probe
  misc_feature (1)..(25): SEQ ID NO: 119; WAN024APC; Start 99; Stop 123
taccgttagtgacaattacatacac

SEQ ID NO: 256122 - DNA, 25 bp, Artificial
  probe
  misc_feature (1)..(25): SEQ ID NO: 119; WAN024APC; Start 8; Stop 32
agtataatcatagcaacggataagt

SEQ ID NO: 256123 - DNA, 25 bp, Artificial
  probe
  misc_feature (1)..(25): SEQ ID NO: 119; WAN024APC; Start 74; Stop 98
cagataggagggataggtgaaattc

SEQ ID NO: 256124 - DNA, 25 bp, Artificial
  probe
  misc_feature (1)..(25): SEQ ID NO: 119; WAN024APC; Start 90; Stop 114
gtgaaattctaccgttagtgacaat

SEQ ID NO: 256125 - DNA, 25 bp, Artificial
  probe
  misc_feature (1)..(25): SEQ ID NO: 119; WAN024APC; Start 108; Stop 132
tgacaattacatacacaatcaagtg

SEQ ID NO: 256126 - DNA, 25 bp, Artificial
  probe
  misc_feature (1)..(25): SEQ ID NO: 119; WAN024APC; Start 107; Stop 131
gtgacaattacatacacaatcaagt

SEQ ID NO: 256127 - DNA, 25 bp, Artificial
  probe
  misc_feature (1)..(25): SEQ ID NO: 119; WAN024APC; Start 75; Stop 99
agataggagggataggtgaaattct

SEQ ID NO: 256128 - DNA, 25 bp, Artificial
  probe
  misc_feature (1)..(25): SEQ ID NO: 119; WAN024APC; Start 77; Stop 101
ataggagggataggtgaaattctac

SEQ ID NO: 256129 - DNA, 25 bp, Artificial
  probe
  misc_feature (1)..(25): SEQ ID NO: 119; WAN024APC; Start 102; Stop 126
cgttagtgacaattacatacacaat

SEQ ID NO: 256130 - DNA, 25 bp, Artificial
  probe
  misc_feature (1)..(25): SEQ ID NO: 119; WAN024APC; Start 76; Stop 100
gataggagggataggtgaaattcta

SEQ ID NO: 256131 - DNA, 25 bp, Artificial
  probe
  misc_feature (1)..(25): SEQ ID NO: 119; WAN024APC; Start 106; Stop 130
agtgacaattacatacacaatcaag

SEQ ID NO: 256132 - DNA, 25 bp, Artificial
  probe
  misc_feature (1)..(25): SEQ ID NO: 119; WAN024APC; Start 73; Stop 97
gcagataggagggataggtgaaatt

SEQ ID NO: 256133 - DNA, 25 bp, Artificial
  probe
  misc_feature (1)..(25): SEQ ID NO: 119; WAN024APC; Start 110; Stop 134
acaattacatacacaatcaagtgca

SEQ ID NO: 256134 - DNA, 25 bp, Artificial
  probe
  misc_feature (1)..(25): SEQ ID NO: 119; WAN024APC; Start 91; Stop 115
tgaaattctaccgttagtgacaatt

SEQ ID NO: 256135 - DNA, 25 bp, Artificial
  probe
  misc_feature (1)..(25): SEQ ID NO: 119; WAN024APC; Start 72; Stop 96
agcagataggagggataggtgaaat

SEQ ID NO: 256136 - DNA, 25 bp, Artificial
  probe
  misc_feature (1)..(25): SEQ ID NO: 119; WAN024APC; Start 3; Stop 27
actttagtataatcatagcaacgga

SEQ ID NO: 256137 - DNA, 25 bp, Artificial
  probe
  misc_feature (1)..(25): SEQ ID NO: 119; WAN024APC; Start 87; Stop 111
taggtgaaattctaccgttagtgac

SEQ ID NO: 256138 - DNA, 25 bp, Artificial
  probe
  misc_feature (1)..(25): SEQ ID NO: 119; WAN024APC; Start 84; Stop 108
ggataggtgaaattctaccgttagt

SEQ ID NO: 256139 - DNA, 25 bp, Artificial
  probe
  misc_feature (1)..(25): SEQ ID NO: 119; WAN024APC; Start 9; Stop 33
gtataatcatagcaacggataagta

SEQ ID NO: 256140 - DNA, 25 bp, Artificial
  probe
  misc_feature (1)..(25): SEQ ID NO: 119; WAN024APC; Start 83; Stop 107
gggataggtgaaattctaccgttag

SEQ ID NO: 256141 - DNA, 25 bp, Artificial
  probe
  misc_feature (1)..(25): SEQ ID NO: 120; WAN0249O7; Start 182; Stop 206
gtacaccacagcgtttctatattta

SEQ ID NO: 256142 - DNA, 25 bp, Artificial
  probe
  misc_feature (1)..(25): SEQ ID NO: 120; WAN0249O7; Start 183; Stop 207
tacaccacagcgtttctatatttat

SEQ ID NO: 256143 - DNA, 25 bp, Artificial
  probe
  misc_feature (1)..(25): SEQ ID NO: 120; WAN0249O7; Start 181; Stop 205
cgtacaccacagcgtttctatattt

SEQ ID NO: 256144 - DNA, 25 bp, Artificial
  probe
  misc_feature (1)..(25): SEQ ID NO: 120; WAN0249O7; Start 180; Stop 204
tcgtacaccacagcgtttctatatt

SEQ ID NO: 256145 - DNA, 25 bp, Artificial
  probe
  misc_feature (1)..(25): SEQ ID NO: 120; WAN0249O7; Start 179; Stop 203
gtcgtacaccacagcgtttctatat

SEQ ID NO: 256146 - DNA, 25 bp, Artificial
  probe
  misc_feature (1)..(25): SEQ ID NO: 120; WAN0249O7; Start 113; Stop 137
atgctgttagaagacttttgtttcc

SEQ ID NO: 256147 - DNA, 25 bp, Artificial
  probe
  misc_feature (1)..(25): SEQ ID NO: 120; WAN0249O7; Start 116; Stop 140
ctgttagaagacttttgtttcccta

SEQ ID NO: 256148 - DNA, 25 bp, Artificial
  probe
  misc_feature (1)..(25): SEQ ID NO: 120; WAN0249O7; Start 115; Stop 139
gctgttagaagacttttgtttccct

SEQ ID NO: 256149 - DNA, 25 bp, Artificial
  probe
  misc_feature (1)..(25): SEQ ID NO: 120; WAN0249O7; Start 114; Stop 138
tgctgttagaagacttttgtttccc

SEQ ID NO: 256150 - DNA, 25 bp, Artificial
  probe
  misc_feature (1)..(25): SEQ ID NO: 120; WAN0249O7; Start 24; Stop 48
cgaaacttcacggtttgtattgaac

SEQ ID NO: 256151 - DNA, 25 bp, Artificial
  probe
  misc_feature (1)..(25): SEQ ID NO: 120; WAN0249O7; Start 178; Stop 202
agtcgtacaccacagcgtttctata

SEQ ID NO: 256152 - DNA, 25 bp, Artificial
  probe
  misc_feature (1)..(25): SEQ ID NO: 120; WAN0249O7; Start 112; Stop 136
catgctgttagaagacttttgtttc

SEQ ID NO: 256153 - DNA, 25 bp, Artificial
  probe
  misc_feature (1)..(25): SEQ ID NO: 120; WAN0249O7; Start 108; Stop 132
cctacatgctgttagaagacttttg

SEQ ID NO: 256154 - DNA, 25 bp, Artificial
  probe
  misc_feature (1)..(25): SEQ ID NO: 120; WAN0249O7; Start 111; Stop 135
acatgctgttagaagacttttgttt

SEQ ID NO: 256155 - DNA, 25 bp, Artificial
  probe
  misc_feature (1)..(25): SEQ ID NO: 120; WAN0249O7; Start 109; Stop 133
ctacatgctgttagaagacttttgt

SEQ ID NO: 256156 - DNA, 25 bp, Artificial
  probe
  misc_feature (1)..(25): SEQ ID NO: 120; WAN0249O7; Start 110; Stop 134
tacatgctgttagaagacttttgtt

SEQ ID NO: 256157 - DNA, 25 bp, Artificial
  probe
  misc_feature (1)..(25): SEQ ID NO: 120; WAN0249O7; Start 117; Stop 141
tgttagaagacttttgtttccctaa

SEQ ID NO: 256158 - DNA, 25 bp, Artificial
  probe
  misc_feature (1)..(25): SEQ ID NO: 120; WAN0249O7; Start 107; Stop 131
gcctacatgctgttagaagactttt

SEQ ID NO: 256159 - DNA, 25 bp, Artificial
  probe
  misc_feature (1)..(25): SEQ ID NO: 120; WAN0249O7; Start 177; Stop 201
aagtcgtacaccacagcgtttctat

SEQ ID NO: 256160 - DNA, 25 bp, Artificial
  probe
  misc_feature (1)..(25): SEQ ID NO: 120; WAN0249O7; Start 79; Stop 103
ctaactgaagctgtttccgtgtgag

SEQ ID NO: 256161 - DNA, 25 bp, Artificial
  probe
  misc_feature (1)..(25): SEQ ID NO: 120; WAN0249O7; Start 77; Stop 101
ctctaactgaagctgtttccgtgtg

SEQ ID NO: 256162 - DNA, 25 bp, Artificial
  probe
  misc_feature (1)..(25): SEQ ID NO: 120; WAN0249O7; Start 25; Stop 49
gaaacttcacggtttgtattgaacc

SEQ ID NO: 256163 - DNA, 25 bp, Artificial
  probe
  misc_feature (1)..(25): SEQ ID NO: 120; WAN0249O7; Start 118; Stop 142
gttagaagacttttgtttccctaat

SEQ ID NO: 256164 - DNA, 25 bp, Artificial
  probe
  misc_feature (1)..(25): SEQ ID NO: 120; WAN0249O7; Start 23; Stop 47
ccgaaacttcacggtttgtattgaa

SEQ ID NO: 256165 - DNA, 25 bp, Artificial
  probe
  misc_feature (1)..(25): SEQ ID NO: 120; WAN0249O7; Start 106; Stop 130
ggcctacatgctgttagaagacttt

SEQ ID NO: 256166 - DNA, 25 bp, Artificial
  probe
  misc_feature (1)..(25): SEQ ID NO: 120; WAN0249O7; Start 80; Stop 104
taactgaagctgtttccgtgtgaga

SEQ ID NO: 256167 - DNA, 25 bp, Artificial
  probe
  misc_feature (1)..(25): SEQ ID NO: 120; WAN0249O7; Start 78; Stop 102
tctaactgaagctgtttccgtgtga

SEQ ID NO: 256168 - DNA, 25 bp, Artificial
  probe
  misc_feature (1)..(25): SEQ ID NO: 120; WAN0249O7; Start 8; Stop 32
aaagctgtattggtgccgaaacttc

SEQ ID NO: 256169 - DNA, 25 bp, Artificial
  probe
  misc_feature (1)..(25): SEQ ID NO: 120; WAN0249O7; Start 71; Stop 95
aactcgctctaactgaagctgtttc

SEQ ID NO: 256170 - DNA, 25 bp, Artificial
  probe
  misc_feature (1)..(25): SEQ ID NO: 120; WAN0249O7; Start 168; Stop 192
ttaagtgtgaagtcgtacaccacag

SEQ ID NO: 256171 - DNA, 25 bp, Artificial
  probe
  misc_feature (1)..(25): SEQ ID NO: 120; WAN0249O7; Start 176; Stop 200
gaagtcgtacaccacagcgtttcta

SEQ ID NO: 256172 - DNA, 25 bp, Artificial
  probe
  misc_feature (1)..(25): SEQ ID NO: 120; WAN0249O7; Start 121; Stop 145
agaagacttttgtttccctaataat

SEQ ID NO: 256173 - DNA, 25 bp, Artificial
  probe
  misc_feature (1)..(25): SEQ ID NO: 120; WAN0249O7; Start 70; Stop 94
caactcgctctaactgaagctgttt

SEQ ID NO: 256174 - DNA, 25 bp, Artificial
  probe
  misc_feature (1)..(25): SEQ ID NO: 121; WAN024AB4; Start 238; Stop 262
acaatggtatcttaggttactacga

SEQ ID NO: 256175 - DNA, 25 bp, Artificial
  probe
  misc_feature (1)..(25): SEQ ID NO: 121; WAN024AB4; Start 237; Stop 261
gacaatggtatcttaggttactacg

SEQ ID NO: 256176 - DNA, 25 bp, Artificial
  probe
  misc_feature (1)..(25): SEQ ID NO: 121; WAN024AB4; Start 239; Stop 263
caatggtatcttaggttactacgaa

SEQ ID NO: 256177 - DNA, 25 bp, Artificial
  probe
  misc_feature (1)..(25): SEQ ID NO: 121; WAN024AB4; Start 236; Stop 260
tgacaatggtatcttaggttactac

SEQ ID NO: 256178 - DNA, 25 bp, Artificial
  probe
  misc_feature (1)..(25): SEQ ID NO: 121; WAN024AB4; Start 240; Stop 264
aatggtatcttaggttactacgaag

SEQ ID NO: 256179 - DNA, 25 bp, Artificial
  probe
  misc_feature (1)..(25): SEQ ID NO: 121; WAN024AB4; Start 160; Stop 184
aagtaccaacaggctcatctattcc

SEQ ID NO: 256180 - DNA, 25 bp, Artificial
  probe
  misc_feature (1)..(25): SEQ ID NO: 121; WAN024AB4; Start 162; Stop 186
gtaccaacaggctcatctattccaa

SEQ ID NO: 256181 - DNA, 25 bp, Artificial
  probe
  misc_feature (1)..(25): SEQ ID NO: 121; WAN024AB4; Start 234; Stop 258
attgacaatggtatcttaggttact

SEQ ID NO: 256182 - DNA, 25 bp, Artificial
  probe
  misc_feature (1)..(25): SEQ ID NO: 121; WAN024AB4; Start 235; Stop 259
ttgacaatggtatcttaggttacta

SEQ ID NO: 256183 - DNA, 25 bp, Artificial
  probe
  misc_feature (1)..(25): SEQ ID NO: 121; WAN024AB4; Start 163; Stop 187
taccaacaggctcatctattccaaa

SEQ ID NO: 256184 - DNA, 25 bp, Artificial
  probe
  misc_feature (1)..(25): SEQ ID NO: 121; WAN024AB4; Start 161; Stop 185
agtaccaacaggctcatctattcca

SEQ ID NO: 256185 - DNA, 25 bp, Artificial
  probe
  misc_feature (1)..(25): SEQ ID NO: 121; WAN024AB4; Start 241; Stop 265
atggtatcttaggttactacgaaga

SEQ ID NO: 256186 - DNA, 25 bp, Artificial
  probe
  misc_feature (1)..(25): SEQ ID NO: 121; WAN024AB4; Start 251; Stop 275
aggttactacgaagatatagatgat

SEQ ID NO: 256187 - DNA, 25 bp, Artificial
  probe
  misc_feature (1)..(25): SEQ ID NO: 121; WAN024AB4; Start 208; Stop 232
aaactcctagaattagtgctacaaa

SEQ ID NO: 256188 - DNA, 25 bp, Artificial
  probe
  misc_feature (1)..(25): SEQ ID NO: 121; WAN024AB4; Start 222; Stop 246
agtgctacaaatattgacaatggta

SEQ ID NO: 256189 - DNA, 25 bp, Artificial
  probe
  misc_feature (1)..(25): SEQ ID NO: 121; WAN024AB4; Start 221; Stop 245
tagtgctacaaatattgacaatggt

SEQ ID NO: 256190 - DNA, 25 bp, Artificial
  probe
  misc_feature (1)..(25): SEQ ID NO: 121; WAN024AB4; Start 209; Stop 233
aactcctagaattagtgctacaaat

SEQ ID NO: 256191 - DNA, 25 bp, Artificial
  probe
  misc_feature (1)..(25): SEQ ID NO: 121; WAN024AB4; Start 233; Stop 257
tattgacaatggtatcttaggttac

SEQ ID NO: 256192 - DNA, 25 bp, Artificial
  probe
  misc_feature (1)..(25): SEQ ID NO: 121; WAN024AB4; Start 250; Stop 274
taggttactacgaagatatagatga

SEQ ID NO: 256193 - DNA, 25 bp, Artificial
  probe
  misc_feature (1)..(25): SEQ ID NO: 121; WAN024AB4; Start 223; Stop 247
gtgctacaaatattgacaatggtat

SEQ ID NO: 256194 - DNA, 25 bp, Artificial
  probe
  misc_feature (1)..(25): SEQ ID NO: 121; WAN024AB4; Start 220; Stop 244
ttagtgctacaaatattgacaatgg

SEQ ID NO: 256195 - DNA, 25 bp, Artificial
  probe
  misc_feature (1)..(25): SEQ ID NO: 121; WAN024AB4; Start 224; Stop 248
tgctacaaatattgacaatggtatc

SEQ ID NO: 256196 - DNA, 25 bp, Artificial
  probe
  misc_feature (1)..(25): SEQ ID NO: 121; WAN024AB4; Start 210; Stop 234
actcctagaattagtgctacaaata

SEQ ID NO: 256197 - DNA, 25 bp, Artificial
  probe
  misc_feature (1)..(25): SEQ ID NO: 121; WAN024AB4; Start 231; Stop 255
aatattgacaatggtatcttaggtt

SEQ ID NO: 256198 - DNA, 25 bp, Artificial
  probe
  misc_feature (1)..(25): SEQ ID NO: 121; WAN024AB4; Start 225; Stop 249
gctacaaatattgacaatggtatct

SEQ ID NO: 256199 - DNA, 25 bp, Artificial
  probe
  misc_feature (1)..(25): SEQ ID NO: 121; WAN024AB4; Start 249; Stop 273
ttaggttactacgaagatatagatg

SEQ ID NO: 256200 - DNA, 25 bp, Artificial
  probe
  misc_feature (1)..(25): SEQ ID NO: 121; WAN024AB4; Start 2; Stop 26
aagaaagtacaacgactagttcaaa

SEQ ID NO: 256201 - DNA, 25 bp, Artificial
  probe
  misc_feature (1)..(25): SEQ ID NO: 121; WAN024AB4; Start 1; Stop 25
aaagaaagtacaacgactagttcaa

SEQ ID NO: 256202 - DNA, 25 bp, Artificial
  probe
  misc_feature (1)..(25): SEQ ID NO: 121; WAN024AB4; Start 164; Stop 188
accaacaggctcatctattccaaaa

SEQ ID NO: 256203 - DNA, 25 bp, Artificial
  probe
  misc_feature (1)..(25): SEQ ID NO: 121; WAN024AB4; Start 232; Stop 256
atattgacaatggtatcttaggtta

SEQ ID NO: 256204 - DNA, 25 bp, Artificial
  probe
  misc_feature (1)..(25): SEQ ID NO: 121; WAN024AB4; Start 211; Stop 235
ctcctagaattagtgctacaaatat

SEQ ID NO: 256205 - DNA, 25 bp, Artificial
  probe
  misc_feature (1)..(25): SEQ ID NO: 121; WAN024AB4; Start 216; Stop 240
agaattagtgctacaaatattgaca

SEQ ID NO: 256206 - DNA, 25 bp, Artificial
  probe
  misc_feature (1)..(25): SEQ ID NO: 121; WAN024AB4; Start 335; Stop 359
tcataaatataaagcaagcctagat

SEQ ID NO: 256207 - DNA, 25 bp, Artificial
  probe
  misc_feature (1)..(25): SEQ ID NO: 122; WAN024AJM; Start 27; Stop 51
agcctacatattggttcttatcatt

SEQ ID NO: 256208 - DNA, 25 bp, Artificial
  probe
  misc_feature (1)..(25): SEQ ID NO: 122; WAN024AJM; Start 25; Stop 49
ctagcctacatattggttcttatca

SEQ ID NO: 256209 - DNA, 25 bp, Artificial
  probe
  misc_feature (1)..(25): SEQ ID NO: 122; WAN024AJM; Start 26; Stop 50
tagcctacatattggttcttatcat

SEQ ID NO: 256210 - DNA, 25 bp, Artificial
  probe
  misc_feature (1)..(25): SEQ ID NO: 122; WAN024AJM; Start 28; Stop 52
gcctacatattggttcttatcattt

SEQ ID NO: 256211 - DNA, 25 bp, Artificial
  probe
  misc_feature (1)..(25): SEQ ID NO: 122; WAN024AJM; Start 29; Stop 53
cctacatattggttcttatcatttc

SEQ ID NO: 256212 - DNA, 25 bp, Artificial
  probe
  misc_feature (1)..(25): SEQ ID NO: 122; WAN024AJM; Start 4; Stop 28
gaaccaatgtgcaggttgttgctag

SEQ ID NO: 256213 - DNA, 25 bp, Artificial
  probe
  misc_feature (1)..(25): SEQ ID NO: 123; WAN024A74; Start 9; Stop 33
ccgagtcaaaattctttgaaatcag

SEQ ID NO: 256214 - DNA, 25 bp, Artificial
  probe
  misc_feature (1)..(25): SEQ ID NO: 123; WAN024A74; Start 8; Stop 32
gccgagtcaaaattctttgaaatca

SEQ ID NO: 256215 - DNA, 25 bp, Artificial
  probe
  misc_feature (1)..(25): SEQ ID NO: 123; WAN024A74; Start 10; Stop 34
cgagtcaaaattctttgaaatcaga

SEQ ID NO: 256216 - DNA, 25 bp, Artificial
  probe
  misc_feature (1)..(25): SEQ ID NO: 123; WAN024A74; Start 2; Stop 26
aagaaggccgagtcaaaattctttg

SEQ ID NO: 256217 - DNA, 25 bp, Artificial
  probe
  misc_feature (1)..(25): SEQ ID NO: 123; WAN024A74; Start 7; Stop 31
ggccgagtcaaaattctttgaaatc

SEQ ID NO: 256218 - DNA, 25 bp, Artificial
  probe
  misc_feature (1)..(25): SEQ ID NO: 123; WAN024A74; Start 6; Stop 30
aggccgagtcaaaattctttgaaat

SEQ ID NO: 256219 - DNA, 25 bp, Artificial
  probe
  misc_feature (1)..(25): SEQ ID NO: 123; WAN024A74; Start 5; Stop 29
aaggccgagtcaaaattctttgaaa

SEQ ID NO: 256220 - DNA, 25 bp, Artificial
  probe
  misc_feature (1)..(25): SEQ ID NO: 123; WAN024A74; Start 4; Stop 28
gaaggccgagtcaaaattctttgaa

SEQ ID NO: 256221 - DNA, 25 bp, Artificial
  probe
  misc_feature (1)..(25): SEQ ID NO: 123; WAN024A74; Start 11; Stop 35
gagtcaaaattctttgaaatcagaa

SEQ ID NO: 256222 - DNA, 25 bp, Artificial
  probe
  misc_feature (1)..(25): SEQ ID NO: 123; WAN024A74; Start 3; Stop 27
agaaggccgagtcaaaattctttga

SEQ ID NO: 256223 - DNA, 25 bp, Artificial
  probe
  misc_feature (1)..(25): SEQ ID NO: 123; WAN024A74; Start 12; Stop 36
agtcaaaattctttgaaatcagaaa

SEQ ID NO: 256224 - DNA, 25 bp, Artificial
  probe
  misc_feature (1)..(25): SEQ ID NO: 123; WAN024A74; Start 13; Stop 37
gtcaaaattctttgaaatcagaaaa

SEQ ID NO: 256225 - DNA, 25 bp, Artificial
  probe
  misc_feature (1)..(25): SEQ ID NO: 124; WAN0249XC; Start 29; Stop 53
ctaaactagagggagtggattatcg

SEQ ID NO: 256226 - DNA, 25 bp, Artificial
  probe
  misc_feature (1)..(25): SEQ ID NO: 124; WAN0249XC; Start 28; Stop 52
gctaaactagagggagtggattatc

SEQ ID NO: 256227 - DNA, 25 bp, Artificial
  probe
  misc_feature (1)..(25): SEQ ID NO: 124; WAN0249XC; Start 18; Stop 42
atggaaatgtgctaaactagaggga

SEQ ID NO: 256228 - DNA, 25 bp, Artificial
  probe
  misc_feature (1)..(25): SEQ ID NO: 124; WAN0249XC; Start 27; Stop 51
tgctaaactagagggagtggattat

SEQ ID NO: 256229 - DNA, 25 bp, Artificial
  probe
  misc_feature (1)..(25): SEQ ID NO: 124; WAN0249XC; Start 21; Stop 45
gaaatgtgctaaactagagggagtg

SEQ ID NO: 256230 - DNA, 25 bp, Artificial
  probe
  misc_feature (1)..(25): SEQ ID NO: 124; WAN0249XC; Start 26; Stop 50
gtgctaaactagagggagtggatta

SEQ ID NO: 256231 - DNA, 25 bp, Artificial
  probe
  misc_feature (1)..(25): SEQ ID NO: 124; WAN0249XC; Start 30; Stop 54
taaactagagggagtggattatcgc

SEQ ID NO: 256232 - DNA, 25 bp, Artificial
  probe
  misc_feature (1)..(25): SEQ ID NO: 124; WAN0249XC; Start 19; Stop 43
tggaaatgtgctaaactagagggag

SEQ ID NO: 256233 - DNA, 25 bp, Artificial
  probe
  misc_feature (1)..(25): SEQ ID NO: 124; WAN0249XC; Start 17; Stop 41
catggaaatgtgctaaactagaggg

SEQ ID NO: 256234 - DNA, 25 bp, Artificial
  probe
  misc_feature (1)..(25): SEQ ID NO: 124; WAN0249XC; Start 20; Stop 44
ggaaatgtgctaaactagagggagt

SEQ ID NO: 256235 - DNA, 25 bp, Artificial
  probe
  misc_feature (1)..(25): SEQ ID NO: 124; WAN0249XC; Start 22; Stop 46
aaatgtgctaaactagagggagtgg

SEQ ID NO: 256236 - DNA, 25 bp, Artificial
  probe
  misc_feature (1)..(25): SEQ ID NO: 124; WAN0249XC; Start 24; Stop 48
atgtgctaaactagagggagtggat

SEQ ID NO: 256237 - DNA, 25 bp, Artificial
  probe
  misc_feature (1)..(25): SEQ ID NO: 124; WAN0249XC; Start 25; Stop 49
tgtgctaaactagagggagtggatt

SEQ ID NO: 256238 - DNA, 25 bp, Artificial
  probe
  misc_feature (1)..(25): SEQ ID NO: 124; WAN0249XC; Start 23; Stop 47
aatgtgctaaactagagggagtgga

SEQ ID NO: 256239 - DNA, 25 bp, Artificial
  probe
  misc_feature (1)..(25): SEQ ID NO: 124; WAN0249XC; Start 16; Stop 40
acatggaaatgtgctaaactagagg

SEQ ID NO: 256240 - DNA, 25 bp, Artificial
  probe
  misc_feature (1)..(25): SEQ ID NO: 124; WAN0249XC; Start 15; Stop 39
tacatggaaatgtgctaaactagag

SEQ ID NO: 256241 - DNA, 25 bp, Artificial
  probe
  misc_feature (1)..(25): SEQ ID NO: 124; WAN0249XC; Start 31; Stop 55
aaactagagggagtggattatcgcc

SEQ ID NO: 256242 - DNA, 25 bp, Artificial
  probe
  misc_feature (1)..(25): SEQ ID NO: 124; WAN0249XC; Start 14; Stop 38
ttacatggaaatgtgctaaactaga

SEQ ID NO: 256243 - DNA, 25 bp, Artificial
  probe
  misc_feature (1)..(25): SEQ ID NO: 124; WAN0249XC; Start 34; Stop 58
ctagagggagtggattatcgccatt

SEQ ID NO: 256244 - DNA, 25 bp, Artificial
  probe
  misc_feature (1)..(25): SEQ ID NO: 124; WAN0249XC; Start 13; Stop 37
tttacatggaaatgtgctaaactag

SEQ ID NO: 256245 - DNA, 25 bp, Artificial
  probe
  misc_feature (1)..(25): SEQ ID NO: 124; WAN0249XC; Start 35; Stop 59
tagagggagtggattatcgccattg

SEQ ID NO: 256246 - DNA, 25 bp, Artificial
  probe
  misc_feature (1)..(25): SEQ ID NO: 124; WAN0249XC; Start 37; Stop 61
gagggagtggattatcgccattgat

SEQ ID NO: 256247 - DNA, 25 bp, Artificial
  probe
  misc_feature (1)..(25): SEQ ID NO: 124; WAN0249XC; Start 33; Stop 57
actagagggagtggattatcgccat

SEQ ID NO: 256248 - DNA, 25 bp, Artificial
  probe
  misc_feature (1)..(25): SEQ ID NO: 124; WAN0249XC; Start 32; Stop 56
aactagagggagtggattatcgcca

SEQ ID NO: 256249 - DNA, 25 bp, Artificial
  probe
  misc_feature (1)..(25): SEQ ID NO: 124; WAN0249XC; Start 11; Stop 35
attttacatggaaatgtgctaaact

SEQ ID NO: 256250 - DNA, 25 bp, Artificial
  probe
  misc_feature (1)..(25): SEQ ID NO: 124; WAN0249XC; Start 36; Stop 60
agagggagtggattatcgccattga

SEQ ID NO: 256251 - DNA, 25 bp, Artificial
  probe
  misc_feature (1)..(25): SEQ ID NO: 124; WAN0249XC; Start 12; Stop 36
ttttacatggaaatgtgctaaacta

SEQ ID NO: 256252 - DNA, 25 bp, Artificial
  probe
  misc_feature (1)..(25): SEQ ID NO: 124; WAN0249XC; Start 10; Stop 34
aattttacatggaaatgtgctaaac

SEQ ID NO: 256253 - DNA, 25 bp, Artificial
  probe
  misc_feature (1)..(25): SEQ ID NO: 124; WAN0249XC; Start 5; Stop 29
actataattttacatggaaatgtgc

SEQ ID NO: 256254 - DNA, 25 bp, Artificial
  probe
  misc_feature (1)..(25): SEQ ID NO: 124; WAN0249XC; Start 6; Stop 30
ctataattttacatggaaatgtgct

SEQ ID NO: 256255 - DNA, 25 bp, Artificial
  probe
  misc_feature (1)..(25): SEQ ID NO: 124; WAN0249XC; Start 9; Stop 33
taattttacatggaaatgtgctaaa

SEQ ID NO: 256256 - DNA, 25 bp, Artificial
  probe
  misc_feature (1)..(25): SEQ ID NO: 124; WAN0249XC; Start 8; Stop 32
ataattttacatggaaatgtgctaa

SEQ ID NO: 256257 - DNA, 25 bp, Artificial
  probe
  misc_feature (1)..(25): SEQ ID NO: 125; WAN024A95; Start 8; Stop 32
taatgtcgtgacctcaaaagttaga

SEQ ID NO: 256258 - DNA, 25 bp, Artificial
  probe
  misc_feature (1)..(25): SEQ ID NO: 125; WAN024A95; Start 7; Stop 31
gtaatgtcgtgacctcaaaagttag

SEQ ID NO: 256259 - DNA, 25 bp, Artificial
  probe
  misc_feature (1)..(25): SEQ ID NO: 125; WAN024A95; Start 38; Stop 62
tcatctatcttttgggttacagaca

SEQ ID NO: 256260 - DNA, 25 bp, Artificial
  probe
  misc_feature (1)..(25): SEQ ID NO: 125; WAN024A95; Start 13; Stop 37
tcgtgacctcaaaagttagactaaa

SEQ ID NO: 256261 - DNA, 25 bp, Artificial
  probe
  misc_feature (1)..(25): SEQ ID NO: 125; WAN024A95; Start 40; Stop 64
atctatcttttgggttacagacaac

SEQ ID NO: 256262 - DNA, 25 bp, Artificial
  probe
  misc_feature (1)..(25): SEQ ID NO: 125; WAN024A95; Start 39; Stop 63
catctatcttttgggttacagacaa

SEQ ID NO: 256263 - DNA, 25 bp, Artificial
  probe
  misc_feature (1)..(25): SEQ ID NO: 125; WAN024A95; Start 14; Stop 38
cgtgacctcaaaagttagactaaat

SEQ ID NO: 256264 - DNA, 25 bp, Artificial
  probe
  misc_feature (1)..(25): SEQ ID NO: 125; WAN024A95; Start 37; Stop 61
atcatctatcttttgggttacagac

SEQ ID NO: 256265 - DNA, 25 bp, Artificial
  probe
  misc_feature (1)..(25): SEQ ID NO: 125; WAN024A95; Start 12; Stop 36
gtcgtgacctcaaaagttagactaa

SEQ ID NO: 256266 - DNA, 25 bp, Artificial
  probe
  misc_feature (1)..(25): SEQ ID NO: 125; WAN024A95; Start 9; Stop 33
aatgtcgtgacctcaaaagttagac

SEQ ID NO: 256267 - DNA, 25 bp, Artificial
  probe
  misc_feature (1)..(25): SEQ ID NO: 125; WAN024A95; Start 11; Stop 35
tgtcgtgacctcaaaagttagacta

SEQ ID NO: 256268 - DNA, 25 bp, Artificial
  probe
  misc_feature (1)..(25): SEQ ID NO: 125; WAN024A95; Start 36; Stop 60
aatcatctatcttttgggttacaga

SEQ ID NO: 256269 - DNA, 25 bp, Artificial
  probe
  misc_feature (1)..(25): SEQ ID NO: 125; WAN024A95; Start 16; Stop 40
tgacctcaaaagttagactaaatca

SEQ ID NO: 256270 - DNA, 25 bp, Artificial
  probe
  misc_feature (1)..(25): SEQ ID NO: 125; WAN024A95; Start 10; Stop 34
atgtcgtgacctcaaaagttagact

SEQ ID NO: 256271 - DNA, 25 bp, Artificial
  probe
  misc_feature (1)..(25): SEQ ID NO: 125; WAN024A95; Start 6; Stop 30
ggtaatgtcgtgacctcaaaagtta

SEQ ID NO: 256272 - DNA, 25 bp, Artificial
  probe
  misc_feature (1)..(25): SEQ ID NO: 125; WAN024A95; Start 15; Stop 39
gtgacctcaaaagttagactaaatc

SEQ ID NO: 256273 - DNA, 25 bp, Artificial
  probe
  misc_feature (1)..(25): SEQ ID NO: 125; WAN024A95; Start 30; Stop 54
agactaaatcatctatcttttgggt

SEQ ID NO: 256274 - DNA, 25 bp, Artificial
  probe
  misc_feature (1)..(25): SEQ ID NO: 125; WAN024A95; Start 35; Stop 59
aaatcatctatcttttgggttacag

SEQ ID NO: 256275 - DNA, 25 bp, Artificial
  probe
  misc_feature (1)..(25): SEQ ID NO: 125; WAN024A95; Start 31; Stop 55
gactaaatcatctatcttttgggtt

SEQ ID NO: 256276 - DNA, 25 bp, Artificial
  probe
  misc_feature (1)..(25): SEQ ID NO: 125; WAN024A95; Start 18; Stop 42
acctcaaaagttagactaaatcatc

SEQ ID NO: 256277 - DNA, 25 bp, Artificial
  probe
  misc_feature (1)..(25): SEQ ID NO: 125; WAN024A95; Start 17; Stop 41
gacctcaaaagttagactaaatcat

SEQ ID NO: 256278 - DNA, 25 bp, Artificial
  probe
  misc_feature (1)..(25): SEQ ID NO: 125; WAN024A95; Start 19; Stop 43
cctcaaaagttagactaaatcatct

SEQ ID NO: 256279 - DNA, 25 bp, Artificial
  probe
  misc_feature (1)..(25): SEQ ID NO: 125; WAN024A95; Start 34; Stop 58
taaatcatctatcttttgggttaca

SEQ ID NO: 256280 - DNA, 25 bp, Artificial
  probe
  misc_feature (1)..(25): SEQ ID NO: 125; WAN024A95; Start 32; Stop 56
actaaatcatctatcttttgggtta

SEQ ID NO: 256281 - DNA, 25 bp, Artificial
  probe
  misc_feature (1)..(25): SEQ ID NO: 125; WAN024A95; Start 33; Stop 57
ctaaatcatctatcttttgggttac

SEQ ID NO: 256282 - DNA, 25 bp, Artificial
  probe
  misc_feature (1)..(25): SEQ ID NO: 125; WAN024A95; Start 43; Stop 67
tatcttttgggttacagacaacctc

SEQ ID NO: 256283 - DNA, 25 bp, Artificial
  probe
  misc_feature (1)..(25): SEQ ID NO: 125; WAN024A95; Start 42; Stop 66
ctatcttttgggttacagacaacct

SEQ ID NO: 256284 - DNA, 25 bp, Artificial
  probe
  misc_feature (1)..(25): SEQ ID NO: 125; WAN024A95; Start 41; Stop 65
tctatcttttgggttacagacaacc

SEQ ID NO: 256285 - DNA, 25 bp, Artificial
  probe
  misc_feature (1)..(25): SEQ ID NO: 125; WAN024A95; Start 47; Stop 71
ttttgggttacagacaacctctttt

SEQ ID NO: 256286 - DNA, 25 bp, Artificial
  probe
  misc_feature (1)..(25): SEQ ID NO: 125; WAN024A95; Start 29; Stop 53
tagactaaatcatctatcttttggg

SEQ ID NO: 256287 - DNA, 25 bp, Artificial
  probe
  misc_feature (1)..(25): SEQ ID NO: 125; WAN024A95; Start 46; Stop 70
cttttgggttacagacaacctcttt

SEQ ID NO: 256288 - DNA, 25 bp, Artificial
  probe
  misc_feature (1)..(25): SEQ ID NO: 125; WAN024A95; Start 44; Stop 68
atcttttgggttacagacaacctct

SEQ ID NO: 256289 - DNA, 25 bp, Artificial
  probe
  misc_feature (1)..(25): SEQ ID NO: 125; WAN024A95; Start 45; Stop 69
tcttttgggttacagacaacctctt

SEQ ID NO: 256290 - DNA, 25 bp, Artificial
  probe
  misc_feature (1)..(25): SEQ ID NO: 125; WAN024A95; Start 5; Stop 29
aggtaatgtcgtgacctcaaaagtt

SEQ ID NO: 256291 - DNA, 25 bp, Artificial
  probe
  misc_feature (1)..(25): SEQ ID NO: 126; WAN024ARZ; Start 1; Stop 25
aaagaggtttgtcatcgcaaagaaa

SEQ ID NO: 256292 - DNA, 25 bp, Artificial
  probe
  misc_feature (1)..(25): SEQ ID NO: 126; WAN024ARZ; Start 40; Stop 64
atgtcaaaattgtgggtataattcc

SEQ ID NO: 256293 - DNA, 25 bp, Artificial
  probe
  misc_feature (1)..(25): SEQ ID NO: 126; WAN024ARZ; Start 37; Stop 61
tgtatgtcaaaattgtgggtataat

SEQ ID NO: 256294 - DNA, 25 bp, Artificial
  probe
  misc_feature (1)..(25): SEQ ID NO: 126; WAN024ARZ; Start 36; Stop 60
ttgtatgtcaaaattgtgggtataa

SEQ ID NO: 256295 - DNA, 25 bp, Artificial
  probe
  misc_feature (1)..(25): SEQ ID NO: 126; WAN024ARZ; Start 43; Stop 67
tcaaaattgtgggtataattcccct

SEQ ID NO: 256296 - DNA, 25 bp, Artificial
  probe
  misc_feature (1)..(25): SEQ ID NO: 126; WAN024ARZ; Start 42; Stop 66
gtcaaaattgtgggtataattcccc

SEQ ID NO: 256297 - DNA, 25 bp, Artificial
  probe
  misc_feature (1)..(25): SEQ ID NO: 126; WAN024ARZ; Start 32; Stop 56
acatttgtatgtcaaaattgtgggt

SEQ ID NO: 256298 - DNA, 25 bp, Artificial
  probe
  misc_feature (1)..(25): SEQ ID NO: 126; WAN024ARZ; Start 41; Stop 65
tgtcaaaattgtgggtataattccc

SEQ ID NO: 256299 - DNA, 25 bp, Artificial
  probe
  misc_feature (1)..(25): SEQ ID NO: 126; WAN024ARZ; Start 33; Stop 57
catttgtatgtcaaaattgtgggta

SEQ ID NO: 256300 - DNA, 25 bp, Artificial
  probe
  misc_feature (1)..(25): SEQ ID NO: 126; WAN024ARZ; Start 44; Stop 68
caaaattgtgggtataattccccta

SEQ ID NO: 256301 - DNA, 25 bp, Artificial
  probe
  misc_feature (1)..(25): SEQ ID NO: 126; WAN024ARZ; Start 2; Stop 26
aagaggtttgtcatcgcaaagaaaa

SEQ ID NO: 256302 - DNA, 25 bp, Artificial
  probe
  misc_feature (1)..(25): SEQ ID NO: 126; WAN024ARZ; Start 46; Stop 70
aaattgtgggtataattcccctaaa

SEQ ID NO: 256303 - DNA, 25 bp, Artificial
  probe
  misc_feature (1)..(25): SEQ ID NO: 126; WAN024ARZ; Start 45; Stop 69
aaaattgtgggtataattcccctaa

SEQ ID NO: 256304 - DNA, 25 bp, Artificial
  probe
  misc_feature (1)..(25): SEQ ID NO: 126; WAN024ARZ; Start 47; Stop 71
aattgtgggtataattcccctaaat

SEQ ID NO: 256305 - DNA, 25 bp, Artificial
  probe
  misc_feature (1)..(25): SEQ ID NO: 126; WAN024ARZ; Start 34; Stop 58
atttgtatgtcaaaattgtgggtat

SEQ ID NO: 256306 - DNA, 25 bp, Artificial
  probe
  misc_feature (1)..(25): SEQ ID NO: 126; WAN024ARZ; Start 50; Stop 74
tgtgggtataattcccctaaatatc

SEQ ID NO: 256307 - DNA, 25 bp, Artificial
  probe
  misc_feature (1)..(25): SEQ ID NO: 126; WAN024ARZ; Start 38; Stop 62
gtatgtcaaaattgtgggtataatt

SEQ ID NO: 256308 - DNA, 25 bp, Artificial
  probe
  misc_feature (1)..(25): SEQ ID NO: 126; WAN024ARZ; Start 49; Stop 73
ttgtgggtataattcccctaaatat

SEQ ID NO: 256309 - DNA, 25 bp, Artificial
  probe
  misc_feature (1)..(25): SEQ ID NO: 126; WAN024ARZ; Start 48; Stop 72
attgtgggtataattcccctaaata

SEQ ID NO: 256310 - DNA, 25 bp, Artificial
  probe
  misc_feature (1)..(25): SEQ ID NO: 126; WAN024ARZ; Start 35; Stop 59
tttgtatgtcaaaattgtgggtata

SEQ ID NO: 256311 - DNA, 25 bp, Artificial
  probe
  misc_feature (1)..(25): SEQ ID NO: 126; WAN024ARZ; Start 39; Stop 63
tatgtcaaaattgtgggtataattc

SEQ ID NO: 256312 - DNA, 25 bp, Artificial
  probe
  misc_feature (1)..(25): SEQ ID NO: 127; WAN024AH8; Start 16; Stop 40
aggcaattccaagactacttaatcg

SEQ ID NO: 256313 - DNA, 25 bp, Artificial
  probe
  misc_feature (1)..(25): SEQ ID NO: 127; WAN024AH8; Start 15; Stop 39
taggcaattccaagactacttaatc

SEQ ID NO: 256314 - DNA, 25 bp, Artificial
  probe
  misc_feature (1)..(25): SEQ ID NO: 127; WAN024AH8; Start 14; Stop 38
ttaggcaattccaagactacttaat

SEQ ID NO: 256315 - DNA, 25 bp, Artificial
  probe
  misc_feature (1)..(25): SEQ ID NO: 127; WAN024AH8; Start 18; Stop 42
gcaattccaagactacttaatcgaa

SEQ ID NO: 256316 - DNA, 25 bp, Artificial
  probe
  misc_feature (1)..(25): SEQ ID NO: 127; WAN024AH8; Start 17; Stop 41
ggcaattccaagactacttaatcga

SEQ ID NO: 256317 - DNA, 25 bp, Artificial
  probe
  misc_feature (1)..(25): SEQ ID NO: 127; WAN024AH8; Start 22; Stop 46
ttccaagactacttaatcgaacatt

SEQ ID NO: 256318 - DNA, 25 bp, Artificial
  probe
  misc_feature (1)..(25): SEQ ID NO: 127; WAN024AH8; Start 20; Stop 44
aattccaagactacttaatcgaaca

SEQ ID NO: 256319 - DNA, 25 bp, Artificial
  probe
  misc_feature (1)..(25): SEQ ID NO: 127; WAN024AH8; Start 19; Stop 43
caattccaagactacttaatcgaac

SEQ ID NO: 256320 - DNA, 25 bp, Artificial
  probe
  misc_feature (1)..(25): SEQ ID NO: 127; WAN024AH8; Start 12; Stop 36
gtttaggcaattccaagactactta

SEQ ID NO: 256321 - DNA, 25 bp, Artificial
  probe
  misc_feature (1)..(25): SEQ ID NO: 127; WAN024AH8; Start 21; Stop 45
attccaagactacttaatcgaacat

SEQ ID NO: 256322 - DNA, 25 bp, Artificial
  probe
  misc_feature (1)..(25): SEQ ID NO: 127; WAN024AH8; Start 11; Stop 35
cgtttaggcaattccaagactactt

SEQ ID NO: 256323 - DNA, 25 bp, Artificial
  probe
  misc_feature (1)..(25): SEQ ID NO: 127; WAN024AH8; Start 13; Stop 37
tttaggcaattccaagactacttaa

SEQ ID NO: 256324 - DNA, 25 bp, Artificial
  probe
  misc_feature (1)..(25): SEQ ID NO: 127; WAN024AH8; Start 23; Stop 47
tccaagactacttaatcgaacatta

SEQ ID NO: 256325 - DNA, 25 bp, Artificial
  probe
  misc_feature (1)..(25): SEQ ID NO: 127; WAN024AH8; Start 32; Stop 56
acttaatcgaacattaacagcagtc

SEQ ID NO: 256326 - DNA, 25 bp, Artificial
  probe
  misc_feature (1)..(25): SEQ ID NO: 127; WAN024AH8; Start 34; Stop 58
ttaatcgaacattaacagcagtctc

SEQ ID NO: 256327 - DNA, 25 bp, Artificial
  probe
  misc_feature (1)..(25): SEQ ID NO: 127; WAN024AH8; Start 56; Stop 80
ctcggactgatgaaggtctctttat

SEQ ID NO: 256328 - DNA, 25 bp, Artificial
  probe
  misc_feature (1)..(25): SEQ ID NO: 127; WAN024AH8; Start 33; Stop 57
cttaatcgaacattaacagcagtct

SEQ ID NO: 256329 - DNA, 25 bp, Artificial
  probe
  misc_feature (1)..(25): SEQ ID NO: 127; WAN024AH8; Start 35; Stop 59
taatcgaacattaacagcagtctcg

SEQ ID NO: 256330 - DNA, 25 bp, Artificial
  probe
  misc_feature (1)..(25): SEQ ID NO: 127; WAN024AH8; Start 31; Stop 55
tacttaatcgaacattaacagcagt

SEQ ID NO: 256331 - DNA, 25 bp, Artificial
  probe
  misc_feature (1)..(25): SEQ ID NO: 127; WAN024AH8; Start 29; Stop 53
actacttaatcgaacattaacagca

SEQ ID NO: 256332 - DNA, 25 bp, Artificial
  probe
  misc_feature (1)..(25): SEQ ID NO: 127; WAN024AH8; Start 30; Stop 54
ctacttaatcgaacattaacagcag

SEQ ID NO: 256333 - DNA, 25 bp, Artificial
  probe
  misc_feature (1)..(25): SEQ ID NO: 127; WAN024AH8; Start 28; Stop 52
gactacttaatcgaacattaacagc

SEQ ID NO: 256334 - DNA, 25 bp, Artificial
  probe
  misc_feature (1)..(25): SEQ ID NO: 127; WAN024AH8; Start 55; Stop 79
tctcggactgatgaaggtctcttta

SEQ ID NO: 256335 - DNA, 25 bp, Artificial
  probe
  misc_feature (1)..(25): SEQ ID NO: 127; WAN024AH8; Start 10; Stop 34
acgtttaggcaattccaagactact

SEQ ID NO: 256336 - DNA, 25 bp, Artificial
  probe
  misc_feature (1)..(25): SEQ ID NO: 127; WAN024AH8; Start 24; Stop 48
ccaagactacttaatcgaacattaa

SEQ ID NO: 256337 - DNA, 25 bp, Artificial
  probe
  misc_feature (1)..(25): SEQ ID NO: 127; WAN024AH8; Start 27; Stop 51
agactacttaatcgaacattaacag

SEQ ID NO: 256338 - DNA, 25 bp, Artificial
  probe
  misc_feature (1)..(25): SEQ ID NO: 127; WAN024AH8; Start 54; Stop 78
gtctcggactgatgaaggtctcttt

SEQ ID NO: 256339 - DNA, 25 bp, Artificial
  probe
  misc_feature (1)..(25): SEQ ID NO: 127; WAN024AH8; Start 36; Stop 60
aatcgaacattaacagcagtctcgg

SEQ ID NO: 256340 - DNA, 25 bp, Artificial
  probe
  misc_feature (1)..(25): SEQ ID NO: 127; WAN024AH8; Start 26; Stop 50
aagactacttaatcgaacattaaca

SEQ ID NO: 256341 - DNA, 25 bp, Artificial
  probe
  misc_feature (1)..(25): SEQ ID NO: 127; WAN024AH8; Start 25; Stop 49
caagactacttaatcgaacattaac

SEQ ID NO: 256342 - DNA, 25 bp, Artificial
  probe
  misc_feature (1)..(25): SEQ ID NO: 127; WAN024AH8; Start 37; Stop 61
atcgaacattaacagcagtctcgga

SEQ ID NO: 256343 - DNA, 25 bp, Artificial
  probe
  misc_feature (1)..(25): SEQ ID NO: 127; WAN024AH8; Start 9; Stop 33
aacgtttaggcaattccaagactac

SEQ ID NO: 256344 - DNA, 25 bp, Artificial
  probe
  misc_feature (1)..(25): SEQ ID NO: 127; WAN024AH8; Start 8; Stop 32
gaacgtttaggcaattccaagacta

SEQ ID NO: 256345 - DNA, 25 bp, Artificial
  probe
  misc_feature (1)..(25): SEQ ID NO: 128; WAN0249FE; Start 3; Stop 27
agattgagagtttgtaaatttgcct

SEQ ID NO: 256346 - DNA, 25 bp, Artificial
  probe
  misc_feature (1)..(25): SEQ ID NO: 128; WAN0249FE; Start 5; Stop 29
attgagagtttgtaaatttgcctcc

SEQ ID NO: 256347 - DNA, 25 bp, Artificial
  probe
  misc_feature (1)..(25): SEQ ID NO: 128; WAN0249FE; Start 2; Stop 26
aagattgagagtttgtaaatttgcc

SEQ ID NO: 256348 - DNA, 25 bp, Artificial
  probe
  misc_feature (1)..(25): SEQ ID NO: 128; WAN0249FE; Start 4; Stop 28
gattgagagtttgtaaatttgcctc

SEQ ID NO: 256349 - DNA, 25 bp, Artificial
  probe
  misc_feature (1)..(25): SEQ ID NO: 128; WAN0249FE; Start 6; Stop 30
ttgagagtttgtaaatttgcctccc

SEQ ID NO: 256350 - DNA, 25 bp, Artificial
  probe
  misc_feature (1)..(25): SEQ ID NO: 128; WAN0249FE; Start 8; Stop 32
gagagtttgtaaatttgcctccctc

SEQ ID NO: 256351 - DNA, 25 bp, Artificial
  probe
  misc_feature (1)..(25): SEQ ID NO: 128; WAN0249FE; Start 86; Stop 110
tttagtgttttgatatgaggaggac

SEQ ID NO: 256352 - DNA, 25 bp, Artificial
  probe
  misc_feature (1)..(25): SEQ ID NO: 128; WAN0249FE; Start 89; Stop 113
agtgttttgatatgaggaggacaag

SEQ ID NO: 256353 - DNA, 25 bp, Artificial
  probe
  misc_feature (1)..(25): SEQ ID NO: 128; WAN0249FE; Start 7; Stop 31
tgagagtttgtaaatttgcctccct

SEQ ID NO: 256354 - DNA, 25 bp, Artificial
  probe
  misc_feature (1)..(25): SEQ ID NO: 128; WAN0249FE; Start 88; Stop 112
tagtgttttgatatgaggaggacaa

SEQ ID NO: 256355 - DNA, 25 bp, Artificial
  probe
  misc_feature (1)..(25): SEQ ID NO: 128; WAN0249FE; Start 87; Stop 111
ttagtgttttgatatgaggaggaca

SEQ ID NO: 256356 - DNA, 25 bp, Artificial
  probe
  misc_feature (1)..(25): SEQ ID NO: 128; WAN0249FE; Start 1; Stop 25
aaagattgagagtttgtaaatttgc

SEQ ID NO: 256357 - DNA, 25 bp, Artificial
  probe
  misc_feature (1)..(25): SEQ ID NO: 128; WAN0249FE; Start 90; Stop 114
gtgttttgatatgaggaggacaagg

SEQ ID NO: 256358 - DNA, 25 bp, Artificial
  probe
  misc_feature (1)..(25): SEQ ID NO: 128; WAN0249FE; Start 85; Stop 109
atttagtgttttgatatgaggagga

SEQ ID NO: 256359 - DNA, 25 bp, Artificial
  probe
  misc_feature (1)..(25): SEQ ID NO: 128; WAN0249FE; Start 9; Stop 33
agagtttgtaaatttgcctccctcc

SEQ ID NO: 256360 - DNA, 25 bp, Artificial
  probe
  misc_feature (1)..(25): SEQ ID NO: 128; WAN0249FE; Start 10; Stop 34
gagtttgtaaatttgcctccctccc

SEQ ID NO: 256361 - DNA, 25 bp, Artificial
  probe
  misc_feature (1)..(25): SEQ ID NO: 128; WAN0249FE; Start 84; Stop 108
tatttagtgttttgatatgaggagg

SEQ ID NO: 256362 - DNA, 25 bp, Artificial
  probe
  misc_feature (1)..(25): SEQ ID NO: 128; WAN0249FE; Start 11; Stop 35
agtttgtaaatttgcctccctcccc

SEQ ID NO: 256363 - DNA, 25 bp, Artificial
  probe
  misc_feature (1)..(25): SEQ ID NO: 128; WAN0249FE; Start 36; Stop 60
cttcttagcttttgtgcaggaaggg

SEQ ID NO: 256364 - DNA, 25 bp, Artificial
  probe
  misc_feature (1)..(25): SEQ ID NO: 128; WAN0249FE; Start 34; Stop 58
cccttcttagcttttgtgcaggaag

SEQ ID NO: 256365 - DNA, 25 bp, Artificial
  probe
  misc_feature (1)..(25): SEQ ID NO: 129; WAN024A75; Start 28; Stop 52
tgatttcaaagaattttgactcggc

SEQ ID NO: 256366 - DNA, 25 bp, Artificial
  probe
  misc_feature (1)..(25): SEQ ID NO: 129; WAN024A75; Start 27; Stop 51
ctgatttcaaagaattttgactcgg

SEQ ID NO: 256367 - DNA, 25 bp, Artificial
  probe
  misc_feature (1)..(25): SEQ ID NO: 129; WAN024A75; Start 26; Stop 50
tctgatttcaaagaattttgactcg

SEQ ID NO: 256368 - DNA, 25 bp, Artificial
  probe
  misc_feature (1)..(25): SEQ ID NO: 129; WAN024A75; Start 34; Stop 58
caaagaattttgactcggccttctt

SEQ ID NO: 256369 - DNA, 25 bp, Artificial
  probe
  misc_feature (1)..(25): SEQ ID NO: 129; WAN024A75; Start 29; Stop 53
gatttcaaagaattttgactcggcc

SEQ ID NO: 256370 - DNA, 25 bp, Artificial
  probe
  misc_feature (1)..(25): SEQ ID NO: 129; WAN024A75; Start 30; Stop 54
atttcaaagaattttgactcggcct

SEQ ID NO: 256371 - DNA, 25 bp, Artificial
  probe
  misc_feature (1)..(25): SEQ ID NO: 129; WAN024A75; Start 31; Stop 55
tttcaaagaattttgactcggcctt

SEQ ID NO: 256372 - DNA, 25 bp, Artificial
  probe
  misc_feature (1)..(25): SEQ ID NO: 129; WAN024A75; Start 32; Stop 56
ttcaaagaattttgactcggccttc

SEQ ID NO: 256373 - DNA, 25 bp, Artificial
  probe
  misc_feature (1)..(25): SEQ ID NO: 129; WAN024A75; Start 25; Stop 49
ttctgatttcaaagaattttgactc

SEQ ID NO: 256374 - DNA, 25 bp, Artificial
  probe
  misc_feature (1)..(25): SEQ ID NO: 129; WAN024A75; Start 33; Stop 57
tcaaagaattttgactcggccttct

SEQ ID NO: 256375 - DNA, 25 bp, Artificial
  probe
  misc_feature (1)..(25): SEQ ID NO: 129; WAN024A75; Start 24; Stop 48
tttctgatttcaaagaattttgact

SEQ ID NO: 256376 - DNA, 25 bp, Artificial
  probe
  misc_feature (1)..(25): SEQ ID NO: 129; WAN024A75; Start 23; Stop 47
ttttctgatttcaaagaattttgac

SEQ ID NO: 256377 - DNA, 25 bp, Artificial
  probe
  misc_feature (1)..(25): SEQ ID NO: 130; WAN0249PJ; Start 53; Stop 77
tatagcggaatgaaataaggacagt

SEQ ID NO: 256378 - DNA, 25 bp, Artificial
  probe
  misc_feature (1)..(25): SEQ ID NO: 130; WAN0249PJ; Start 29; Stop 53
gcgacaagaaacagcaaacttatat

SEQ ID NO: 256379 - DNA, 25 bp, Artificial
  probe
  misc_feature (1)..(25): SEQ ID NO: 130; WAN0249PJ; Start 54; Stop 78
atagcggaatgaaataaggacagtc

SEQ ID NO: 256380 - DNA, 25 bp, Artificial
  probe
  misc_feature (1)..(25): SEQ ID NO: 130; WAN0249PJ; Start 52; Stop 76
atatagcggaatgaaataaggacag

SEQ ID NO: 256381 - DNA, 25 bp, Artificial
  probe
  misc_feature (1)..(25): SEQ ID NO: 130; WAN0249PJ; Start 28; Stop 52
agcgacaagaaacagcaaacttata

SEQ ID NO: 256382 - DNA, 25 bp, Artificial
  probe
  misc_feature (1)..(25): SEQ ID NO: 130; WAN0249PJ; Start 58; Stop 82
cggaatgaaataaggacagtcaaat

SEQ ID NO: 256383 - DNA, 25 bp, Artificial
  probe
  misc_feature (1)..(25): SEQ ID NO: 130; WAN0249PJ; Start 145; Stop 169
gttgagtttggaatagtacgctgta

SEQ ID NO: 256384 - DNA, 25 bp, Artificial
  probe
  misc_feature (1)..(25): SEQ ID NO: 130; WAN0249PJ; Start 140; Stop 164
agttggttgagtttggaatagtacg

SEQ ID NO: 256385 - DNA, 25 bp, Artificial
  probe
  misc_feature (1)..(25): SEQ ID NO: 130; WAN0249PJ; Start 60; Stop 84
gaatgaaataaggacagtcaaatcg

SEQ ID NO: 256386 - DNA, 25 bp, Artificial
  probe
  misc_feature (1)..(25): SEQ ID NO: 130; WAN0249PJ; Start 139; Stop 163
tagttggttgagtttggaatagtac

SEQ ID NO: 256387 - DNA, 25 bp, Artificial
  probe
  misc_feature (1)..(25): SEQ ID NO: 130; WAN0249PJ; Start 128; Stop 152
tcgatctattatagttggttgagtt

SEQ ID NO: 256388 - DNA, 25 bp, Artificial
  probe
  misc_feature (1)..(25): SEQ ID NO: 130; WAN0249PJ; Start 127; Stop 151
ttcgatctattatagttggttgagt

SEQ ID NO: 256389 - DNA, 25 bp, Artificial
  probe
  misc_feature (1)..(25): SEQ ID NO: 130; WAN0249PJ; Start 138; Stop 162
atagttggttgagtttggaatagta

SEQ ID NO: 256390 - DNA, 25 bp, Artificial
  probe
  misc_feature (1)..(25): SEQ ID NO: 130; WAN0249PJ; Start 137; Stop 161
tatagttggttgagtttggaatagt

SEQ ID NO: 256391 - DNA, 25 bp, Artificial
  probe
  misc_feature (1)..(25): SEQ ID NO: 130; WAN0249PJ; Start 59; Stop 83
ggaatgaaataaggacagtcaaatc

SEQ ID NO: 256392 - DNA, 25 bp, Artificial
  probe
  misc_feature (1)..(25): SEQ ID NO: 130; WAN0249PJ; Start 57; Stop 81
gcggaatgaaataaggacagtcaaa

SEQ ID NO: 256393 - DNA, 25 bp, Artificial
  probe
  misc_feature (1)..(25): SEQ ID NO: 130; WAN0249PJ; Start 55; Stop 79
tagcggaatgaaataaggacagtca

SEQ ID NO: 256394 - DNA, 25 bp, Artificial
  probe
  misc_feature (1)..(25): SEQ ID NO: 130; WAN0249PJ; Start 27; Stop 51
gagcgacaagaaacagcaaacttat

SEQ ID NO: 256395 - DNA, 25 bp, Artificial
  probe
  misc_feature (1)..(25): SEQ ID NO: 130; WAN0249PJ; Start 132; Stop 156
tctattatagttggttgagtttgga

SEQ ID NO: 256396 - DNA, 25 bp, Artificial
  probe
  misc_feature (1)..(25): SEQ ID NO: 130; WAN0249PJ; Start 142; Stop 166
ttggttgagtttggaatagtacgct

SEQ ID NO: 256397 - DNA, 25 bp, Artificial
  probe
  misc_feature (1)..(25): SEQ ID NO: 130; WAN0249PJ; Start 141; Stop 165
gttggttgagtttggaatagtacgc

SEQ ID NO: 256398 - DNA, 25 bp, Artificial
  probe
  misc_feature (1)..(25): SEQ ID NO: 130; WAN0249PJ; Start 30; Stop 54
cgacaagaaacagcaaacttatata

SEQ ID NO: 256399 - DNA, 25 bp, Artificial
  probe
  misc_feature (1)..(25): SEQ ID NO: 130; WAN0249PJ; Start 56; Stop 80
agcggaatgaaataaggacagtcaa

SEQ ID NO: 256400 - DNA, 25 bp, Artificial
  probe
  misc_feature (1)..(25): SEQ ID NO: 130; WAN0249PJ; Start 51; Stop 75
tatatagcggaatgaaataaggaca

SEQ ID NO: 256401 - DNA, 25 bp, Artificial
  probe
  misc_feature (1)..(25): SEQ ID NO: 130; WAN0249PJ; Start 61; Stop 85
aatgaaataaggacagtcaaatcga

SEQ ID NO: 256402 - DNA, 25 bp, Artificial
  probe
  misc_feature (1)..(25): SEQ ID NO: 130; WAN0249PJ; Start 136; Stop 160
ttatagttggttgagtttggaatag

SEQ ID NO: 256403 - DNA, 25 bp, Artificial
  probe
  misc_feature (1)..(25): SEQ ID NO: 130; WAN0249PJ; Start 38; Stop 62
aacagcaaacttatatatagcggaa

SEQ ID NO: 256404 - DNA, 25 bp, Artificial
  probe
  misc_feature (1)..(25): SEQ ID NO: 130; WAN0249PJ; Start 37; Stop 61
aaacagcaaacttatatatagcgga

SEQ ID NO: 256405 - DNA, 25 bp, Artificial
  probe
  misc_feature (1)..(25): SEQ ID NO: 130; WAN0249PJ; Start 133; Stop 157
ctattatagttggttgagtttggaa

SEQ ID NO: 256406 - DNA, 25 bp, Artificial
  probe
  misc_feature (1)..(25): SEQ ID NO: 130; WAN0249PJ; Start 39; Stop 63
acagcaaacttatatatagcggaat

SEQ ID NO: 256407 - DNA, 25 bp, Artificial
  probe
  misc_feature (1)..(25): SEQ ID NO: 130; WAN0249PJ; Start 36; Stop 60
gaaacagcaaacttatatatagcgg

SEQ ID NO: 256408 - DNA, 25 bp, Artificial
  probe
  misc_feature (1)..(25): SEQ ID NO: 130; WAN0249PJ; Start 144; Stop 168
ggttgagtttggaatagtacgctgt

SEQ ID NO: 256409 - DNA, 25 bp, Artificial
  probe
  misc_feature (1)..(25): SEQ ID NO: 130; WAN0249PJ; Start 143; Stop 167
tggttgagtttggaatagtacgctg

SEQ ID NO: 256410 - DNA, 25 bp, Artificial
  probe
  misc_feature (1)..(25): SEQ ID NO: 131; WAN024DHZ; Start 668; Stop 692
tctggtatgaatgtggaatatgctt

SEQ ID NO: 256411 - DNA, 25 bp, Artificial
  probe
  misc_feature (1)..(25): SEQ ID NO: 131; WAN024DHZ; Start 341; Stop 365
agtgctgaagaattggataaggtat

SEQ ID NO: 256412 - DNA, 25 bp, Artificial
  probe
  misc_feature (1)..(25): SEQ ID NO: 131; WAN024DHZ; Start 336; Stop 360
actacagtgctgaagaattggataa

SEQ ID NO: 256413 - DNA, 25 bp, Artificial
  probe
  misc_feature (1)..(25): SEQ ID NO: 131; WAN024DHZ; Start 335; Stop 359
aactacagtgctgaagaattggata

SEQ ID NO: 256414 - DNA, 25 bp, Artificial
  probe
  misc_feature (1)..(25): SEQ ID NO: 131; WAN024DHZ; Start 669; Stop 693
ctggtatgaatgtggaatatgcttc

SEQ ID NO: 256415 - DNA, 25 bp, Artificial
  probe
  misc_feature (1)..(25): SEQ ID NO: 131; WAN024DHZ; Start 667; Stop 691
ttctggtatgaatgtggaatatgct

SEQ ID NO: 256416 - DNA, 25 bp, Artificial
  probe
  misc_feature (1)..(25): SEQ ID NO: 131; WAN024DHZ; Start 666; Stop 690
cttctggtatgaatgtggaatatgc

SEQ ID NO: 256417 - DNA, 25 bp, Artificial
  probe
  misc_feature (1)..(25): SEQ ID NO: 131; WAN024DHZ; Start 665; Stop 689
gcttctggtatgaatgtggaatatg

SEQ ID NO: 256418 - DNA, 25 bp, Artificial
  probe
  misc_feature (1)..(25): SEQ ID NO: 131; WAN024DHZ; Start 337; Stop 361
ctacagtgctgaagaattggataag

SEQ ID NO: 256419 - DNA, 25 bp, Artificial
  probe
  misc_feature (1)..(25): SEQ ID NO: 131; WAN024DHZ; Start 664; Stop 688
ggcttctggtatgaatgtggaatat

SEQ ID NO: 256420 - DNA, 25 bp, Artificial
  probe
  misc_feature (1)..(25): SEQ ID NO: 131; WAN024DHZ; Start 340; Stop 364
cagtgctgaagaattggataaggta

SEQ ID NO: 256421 - DNA, 25 bp, Artificial
  probe
  misc_feature (1)..(25): SEQ ID NO: 131; WAN024DHZ; Start 338; Stop 362
tacagtgctgaagaattggataagg

SEQ ID NO: 256422 - DNA, 25 bp, Artificial
  probe
  misc_feature (1)..(25): SEQ ID NO: 131; WAN024DHZ; Start 342; Stop 366
gtgctgaagaattggataaggtatt

SEQ ID NO: 256423 - DNA, 25 bp, Artificial
  probe
  misc_feature (1)..(25): SEQ ID NO: 131; WAN024DHZ; Start 28; Stop 52
tgtcgtatggctagataaggataga

SEQ ID NO: 256424 - DNA, 25 bp, Artificial
  probe
  misc_feature (1)..(25): SEQ ID NO: 131; WAN024DHZ; Start 27; Stop 51
gtgtcgtatggctagataaggatag

SEQ ID NO: 256425 - DNA, 25 bp, Artificial
  probe
  misc_feature (1)..(25): SEQ ID NO: 131; WAN024DHZ; Start 26; Stop 50
agtgtcgtatggctagataaggata

SEQ ID NO: 256426 - DNA, 25 bp, Artificial
  probe
  misc_feature (1)..(25): SEQ ID NO: 131; WAN024DHZ; Start 25; Stop 49
tagtgtcgtatggctagataaggat

SEQ ID NO: 256427 - DNA, 25 bp, Artificial
  probe
  misc_feature (1)..(25): SEQ ID NO: 131; WAN024DHZ; Start 187; Stop 211
ctatgtggctcagaatgctagtatc

SEQ ID NO: 256428 - DNA, 25 bp, Artificial
  probe
  misc_feature (1)..(25): SEQ ID NO: 131; WAN024DHZ; Start 21; Stop 45
aaggtagtgtcgtatggctagataa

SEQ ID NO: 256429 - DNA, 25 bp, Artificial
  probe
  misc_feature (1)..(25): SEQ ID NO: 131; WAN024DHZ; Start 29; Stop 53
gtcgtatggctagataaggatagaa

SEQ ID NO: 256430 - DNA, 25 bp, Artificial
  probe
  misc_feature (1)..(25): SEQ ID NO: 131; WAN024DHZ; Start 24; Stop 48
gtagtgtcgtatggctagataagga

SEQ ID NO: 256431 - DNA, 25 bp, Artificial
  probe
  misc_feature (1)..(25): SEQ ID NO: 131; WAN024DHZ; Start 22; Stop 46
aggtagtgtcgtatggctagataag

SEQ ID NO: 256432 - DNA, 25 bp, Artificial
  probe
  misc_feature (1)..(25): SEQ ID NO: 131; WAN024DHZ; Start 12; Stop 36
atatatcgcaaggtagtgtcgtatg

SEQ ID NO: 256433 - DNA, 25 bp, Artificial
  probe
  misc_feature (1)..(25): SEQ ID NO: 131; WAN024DHZ; Start 20; Stop 44
caaggtagtgtcgtatggctagata

SEQ ID NO: 256434 - DNA, 25 bp, Artificial
  probe
  misc_feature (1)..(25): SEQ ID NO: 131; WAN024DHZ; Start 663; Stop 687
aggcttctggtatgaatgtggaata

SEQ ID NO: 256435 - DNA, 25 bp, Artificial
  probe
  misc_feature (1)..(25): SEQ ID NO: 131; WAN024DHZ; Start 10; Stop 34
ctatatatcgcaaggtagtgtcgta

SEQ ID NO: 256436 - DNA, 25 bp, Artificial
  probe
  misc_feature (1)..(25): SEQ ID NO: 131; WAN024DHZ; Start 13; Stop 37
tatatcgcaaggtagtgtcgtatgg

SEQ ID NO: 256437 - DNA, 25 bp, Artificial
  probe
  misc_feature (1)..(25): SEQ ID NO: 131; WAN024DHZ; Start 11; Stop 35
tatatatcgcaaggtagtgtcgtat

SEQ ID NO: 256438 - DNA, 25 bp, Artificial
  probe
  misc_feature (1)..(25): SEQ ID NO: 131; WAN024DHZ; Start 188; Stop 212
tatgtggctcagaatgctagtatcc

SEQ ID NO: 256439 - DNA, 25 bp, Artificial
  probe
  misc_feature (1)..(25): SEQ ID NO: 131; WAN024DHZ; Start 23; Stop 47
ggtagtgtcgtatggctagataagg

SEQ ID NO: 256440 - DNA, 25 bp, Artificial
  probe
  misc_feature (1)..(25): SEQ ID NO: 131; WAN024DHZ; Start 339; Stop 363
acagtgctgaagaattggataaggt

SEQ ID NO: 256441 - DNA, 25 bp, Artificial
  probe
  misc_feature (1)..(25): SEQ ID NO: 131; WAN024DHZ; Start 662; Stop 686
aaggcttctggtatgaatgtggaat

SEQ ID NO: 256442 - DNA, 25 bp, Artificial
  probe
  misc_feature (1)..(25): SEQ ID NO: 131; WAN024DHZ; Start 182; Stop 206
tatcactatgtggctcagaatgcta

SEQ ID NO: 256443 - DNA, 25 bp, Artificial
  probe
  misc_feature (1)..(25): SEQ ID NO: 132; WAN0249UH; Start 36; Stop 60
cgatgcgtactgttatagattcaac

SEQ ID NO: 256444 - DNA, 25 bp, Artificial
  probe
  misc_feature (1)..(25): SEQ ID NO: 132; WAN0249UH; Start 101; Stop 125
agaagcagttgtgtactactctaac

SEQ ID NO: 256445 - DNA, 25 bp, Artificial
  probe
  misc_feature (1)..(25): SEQ ID NO: 132; WAN0249UH; Start 98; Stop 122
cttagaagcagttgtgtactactct

SEQ ID NO: 256446 - DNA, 25 bp, Artificial
  probe
  misc_feature (1)..(25): SEQ ID NO: 132; WAN0249UH; Start 97; Stop 121
tcttagaagcagttgtgtactactc

SEQ ID NO: 256447 - DNA, 25 bp, Artificial
  probe
  misc_feature (1)..(25): SEQ ID NO: 132; WAN0249UH; Start 96; Stop 120
atcttagaagcagttgtgtactact

SEQ ID NO: 256448 - DNA, 25 bp, Artificial
  probe
  misc_feature (1)..(25): SEQ ID NO: 132; WAN0249UH; Start 162; Stop 186
cctgatgattcaaggagttgtctat

SEQ ID NO: 256449 - DNA, 25 bp, Artificial
  probe
  misc_feature (1)..(25): SEQ ID NO: 132; WAN0249UH; Start 95; Stop 119
gatcttagaagcagttgtgtactac

SEQ ID NO: 256450 - DNA, 25 bp, Artificial
  probe
  misc_feature (1)..(25): SEQ ID NO: 132; WAN0249UH; Start 35; Stop 59
tcgatgcgtactgttatagattcaa

SEQ ID NO: 256451 - DNA, 25 bp, Artificial
  probe
  misc_feature (1)..(25): SEQ ID NO: 132; WAN0249UH; Start 34; Stop 58
gtcgatgcgtactgttatagattca

SEQ ID NO: 256452 - DNA, 25 bp, Artificial
  probe
  misc_feature (1)..(25): SEQ ID NO: 132; WAN0249UH; Start 163; Stop 187
ctgatgattcaaggagttgtctata

SEQ ID NO: 256453 - DNA, 25 bp, Artificial
  probe
  misc_feature (1)..(25): SEQ ID NO: 132; WAN0249UH; Start 33; Stop 57
agtcgatgcgtactgttatagattc

SEQ ID NO: 256454 - DNA, 25 bp, Artificial
  probe
  misc_feature (1)..(25): SEQ ID NO: 132; WAN0249UH; Start 100; Stop 124
tagaagcagttgtgtactactctaa

SEQ ID NO: 256455 - DNA, 25 bp, Artificial
  probe
  misc_feature (1)..(25): SEQ ID NO: 132; WAN0249UH; Start 99; Stop 123
ttagaagcagttgtgtactactcta

SEQ ID NO: 256456 - DNA, 25 bp, Artificial
  probe
  misc_feature (1)..(25): SEQ ID NO: 132; WAN0249UH; Start 104; Stop 128
agcagttgtgtactactctaacttc

SEQ ID NO: 256457 - DNA, 25 bp, Artificial
  probe
  misc_feature (1)..(25): SEQ ID NO: 132; WAN0249UH; Start 102; Stop 126
gaagcagttgtgtactactctaact

SEQ ID NO: 256458 - DNA, 25 bp, Artificial
  probe
  misc_feature (1)..(25): SEQ ID NO: 132; WAN0249UH; Start 37; Stop 61
gatgcgtactgttatagattcaacg

SEQ ID NO: 256459 - DNA, 25 bp, Artificial
  probe
  misc_feature (1)..(25): SEQ ID NO: 132; WAN0249UH; Start 105; Stop 129
gcagttgtgtactactctaacttca

SEQ ID NO: 256460 - DNA, 25 bp, Artificial
  probe
  misc_feature (1)..(25): SEQ ID NO: 132; WAN0249UH; Start 103; Stop 127
aagcagttgtgtactactctaactt

SEQ ID NO: 256461 - DNA, 25 bp, Artificial
  probe
  misc_feature (1)..(25): SEQ ID NO: 132; WAN0249UH; Start 165; Stop 189
gatgattcaaggagttgtctatagt

SEQ ID NO: 256462 - DNA, 25 bp, Artificial
  probe
  misc_feature (1)..(25): SEQ ID NO: 132; WAN0249UH; Start 164; Stop 188
tgatgattcaaggagttgtctatag

SEQ ID NO: 256463 - DNA, 25 bp, Artificial
  probe
  misc_feature (1)..(25): SEQ ID NO: 132; WAN0249UH; Start 88; Stop 112
ttaaccagatcttagaagcagttgt

SEQ ID NO: 256464 - DNA, 25 bp, Artificial
  probe
  misc_feature (1)..(25): SEQ ID NO: 132; WAN0249UH; Start 89; Stop 113
taaccagatcttagaagcagttgtg

SEQ ID NO: 256465 - DNA, 25 bp, Artificial
  probe
  misc_feature (1)..(25): SEQ ID NO: 132; WAN0249UH; Start 92; Stop 116
ccagatcttagaagcagttgtgtac

SEQ ID NO: 256466 - DNA, 25 bp, Artificial
  probe
  misc_feature (1)..(25): SEQ ID NO: 132; WAN0249UH; Start 166; Stop 190
atgattcaaggagttgtctatagtt

SEQ ID NO: 256467 - DNA, 25 bp, Artificial
  probe
  misc_feature (1)..(25): SEQ ID NO: 132; WAN0249UH; Start 93; Stop 117
cagatcttagaagcagttgtgtact

SEQ ID NO: 256468 - DNA, 25 bp, Artificial
  probe
  misc_feature (1)..(25): SEQ ID NO: 132; WAN0249UH; Start 91; Stop 115
accagatcttagaagcagttgtgta

SEQ ID NO: 256469 - DNA, 25 bp, Artificial
  probe
  misc_feature (1)..(25): SEQ ID NO: 132; WAN0249UH; Start 106; Stop 130
cagttgtgtactactctaacttcaa

SEQ ID NO: 256470 - DNA, 25 bp, Artificial
  probe
  misc_feature (1)..(25): SEQ ID NO: 132; WAN0249UH; Start 94; Stop 118
agatcttagaagcagttgtgtacta

SEQ ID NO: 256471 - DNA, 25 bp, Artificial
  probe
  misc_feature (1)..(25): SEQ ID NO: 132; WAN0249UH; Start 161; Stop 185
ccctgatgattcaaggagttgtcta

SEQ ID NO: 256472 - DNA, 25 bp, Artificial
  probe
  misc_feature (1)..(25): SEQ ID NO: 132; WAN0249UH; Start 167; Stop 191
tgattcaaggagttgtctatagtta

SEQ ID NO: 256473 - DNA, 25 bp, Artificial
  probe
  misc_feature (1)..(25): SEQ ID NO: 132; WAN0249UH; Start 153; Stop 177
aaacaactccctgatgattcaagga

SEQ ID NO: 256474 - DNA, 25 bp, Artificial
  probe
  misc_feature (1)..(25): SEQ ID NO: 132; WAN0249UH; Start 90; Stop 114
aaccagatcttagaagcagttgtgt

SEQ ID NO: 256475 - DNA, 25 bp, Artificial
  probe
  misc_feature (1)..(25): SEQ ID NO: 132; WAN0249UH; Start 108; Stop 132
gttgtgtactactctaacttcaata

SEQ ID NO: 256476 - DNA, 25 bp, Artificial
  probe
  misc_feature (1)..(25): SEQ ID NO: 133; WAN024AS7; Start 2; Stop 26
aaggactctgactgattatcccaat

SEQ ID NO: 256477 - DNA, 25 bp, Artificial
  probe
  misc_feature (1)..(25): SEQ ID NO: 133; WAN024AS7; Start 1; Stop 25
aaaggactctgactgattatcccaa

SEQ ID NO: 256478 - DNA, 25 bp, Artificial
  probe
  misc_feature (1)..(25): SEQ ID NO: 133; WAN024AS7; Start 48; Stop 72
caggagcttaatttgaactatacca

SEQ ID NO: 256479 - DNA, 25 bp, Artificial
  probe
  misc_feature (1)..(25): SEQ ID NO: 133; WAN024AS7; Start 47; Stop 71
acaggagcttaatttgaactatacc

SEQ ID NO: 256480 - DNA, 25 bp, Artificial
  probe
  misc_feature (1)..(25): SEQ ID NO: 133; WAN024AS7; Start 3; Stop 27
aggactctgactgattatcccaatc

SEQ ID NO: 256481 - DNA, 25 bp, Artificial
  probe
  misc_feature (1)..(25): SEQ ID NO: 133; WAN024AS7; Start 14; Stop 38
tgattatcccaatcggtcagagttt

SEQ ID NO: 256482 - DNA, 25 bp, Artificial
  probe
  misc_feature (1)..(25): SEQ ID NO: 133; WAN024AS7; Start 84; Stop 108
tgacaagtgaaagaaacaagtatat

SEQ ID NO: 256483 - DNA, 25 bp, Artificial
  probe
  misc_feature (1)..(25): SEQ ID NO: 133; WAN024AS7; Start 83; Stop 107
ttgacaagtgaaagaaacaagtata

SEQ ID NO: 256484 - DNA, 25 bp, Artificial
  probe
  misc_feature (1)..(25): SEQ ID NO: 133; WAN024AS7; Start 49; Stop 73
aggagcttaatttgaactataccaa

SEQ ID NO: 256485 - DNA, 25 bp, Artificial
  probe
  misc_feature (1)..(25): SEQ ID NO: 133; WAN024AS7; Start 147; Stop 171
taccaattttaaggagaaagcacag

SEQ ID NO: 256486 - DNA, 25 bp, Artificial
  probe
  misc_feature (1)..(25): SEQ ID NO: 133; WAN024AS7; Start 146; Stop 170
ataccaattttaaggagaaagcaca

SEQ ID NO: 256487 - DNA, 25 bp, Artificial
  probe
  misc_feature (1)..(25): SEQ ID NO: 133; WAN024AS7; Start 78; Stop 102
tactcttgacaagtgaaagaaacaa

SEQ ID NO: 256488 - DNA, 25 bp, Artificial
  probe
  misc_feature (1)..(25): SEQ ID NO: 133; WAN024AS7; Start 77; Stop 101
ttactcttgacaagtgaaagaaaca

SEQ ID NO: 256489 - DNA, 25 bp, Artificial
  probe
  misc_feature (1)..(25): SEQ ID NO: 133; WAN024AS7; Start 7; Stop 31
ctctgactgattatcccaatcggtc

SEQ ID NO: 256490 - DNA, 25 bp, Artificial
  probe
  misc_feature (1)..(25): SEQ ID NO: 133; WAN024AS7; Start 5; Stop 29
gactctgactgattatcccaatcgg

SEQ ID NO: 256491 - DNA, 25 bp, Artificial
  probe
  misc_feature (1)..(25): SEQ ID NO: 133; WAN024AS7; Start 4; Stop 28
ggactctgactgattatcccaatcg

SEQ ID NO: 256492 - DNA, 25 bp, Artificial
  probe
  misc_feature (1)..(25): SEQ ID NO: 133; WAN024AS7; Start 41; Stop 65
atgcttacaggagcttaatttgaac

SEQ ID NO: 256493 - DNA, 25 bp, Artificial
  probe
  misc_feature (1)..(25): SEQ ID NO: 133; WAN024AS7; Start 42; Stop 66
tgcttacaggagcttaatttgaact

SEQ ID NO: 256494 - DNA, 25 bp, Artificial
  probe
  misc_feature (1)..(25): SEQ ID NO: 133; WAN024AS7; Start 43; Stop 67
gcttacaggagcttaatttgaacta

SEQ ID NO: 256495 - DNA, 25 bp, Artificial
  probe
  misc_feature (1)..(25): SEQ ID NO: 133; WAN024AS7; Start 44; Stop 68
cttacaggagcttaatttgaactat

SEQ ID NO: 256496 - DNA, 25 bp, Artificial
  probe
  misc_feature (1)..(25): SEQ ID NO: 133; WAN024AS7; Start 50; Stop 74
ggagcttaatttgaactataccaat

SEQ ID NO: 256497 - DNA, 25 bp, Artificial
  probe
  misc_feature (1)..(25): SEQ ID NO: 133; WAN024AS7; Start 76; Stop 100
tttactcttgacaagtgaaagaaac

SEQ ID NO: 256498 - DNA, 25 bp, Artificial
  probe
  misc_feature (1)..(25): SEQ ID NO: 133; WAN024AS7; Start 6; Stop 30
actctgactgattatcccaatcggt

SEQ ID NO: 256499 - DNA, 25 bp, Artificial
  probe
  misc_feature (1)..(25): SEQ ID NO: 133; WAN024AS7; Start 40; Stop 64
tatgcttacaggagcttaatttgaa

SEQ ID NO: 256500 - DNA, 25 bp, Artificial
  probe
  misc_feature (1)..(25): SEQ ID NO: 133; WAN024AS7; Start 39; Stop 63
ttatgcttacaggagcttaatttga

SEQ ID NO: 256501 - DNA, 25 bp, Artificial
  probe
  misc_feature (1)..(25): SEQ ID NO: 133; WAN024AS7; Start 148; Stop 172
accaattttaaggagaaagcacagc

SEQ ID NO: 256502 - DNA, 25 bp, Artificial
  probe
  misc_feature (1)..(25): SEQ ID NO: 133; WAN024AS7; Start 80; Stop 104
ctcttgacaagtgaaagaaacaagt

SEQ ID NO: 256503 - DNA, 25 bp, Artificial
  probe
  misc_feature (1)..(25): SEQ ID NO: 133; WAN024AS7; Start 79; Stop 103
actcttgacaagtgaaagaaacaag

SEQ ID NO: 256504 - DNA, 25 bp, Artificial
  probe
  misc_feature (1)..(25): SEQ ID NO: 133; WAN024AS7; Start 81; Stop 105
tcttgacaagtgaaagaaacaagta

SEQ ID NO: 256505 - DNA, 25 bp, Artificial
  probe
  misc_feature (1)..(25): SEQ ID NO: 133; WAN024AS7; Start 38; Stop 62
tttatgcttacaggagcttaatttg

SEQ ID NO: 256506 - DNA, 25 bp, Artificial
  probe
  misc_feature (1)..(25): SEQ ID NO: 133; WAN024AS7; Start 15; Stop 39
gattatcccaatcggtcagagtttt

SEQ ID NO: 256507 - DNA, 25 bp, Artificial
  probe
  misc_feature (1)..(25): SEQ ID NO: 133; WAN024AS7; Start 46; Stop 70
tacaggagcttaatttgaactatac

SEQ ID NO: 256508 - DNA, 25 bp, Artificial
  probe
  misc_feature (1)..(25): SEQ ID NO: 133; WAN024AS7; Start 145; Stop 169
tataccaattttaaggagaaagcac

SEQ ID NO: 256509 - DNA, 25 bp, Artificial
  probe
  misc_feature (1)..(25): SEQ ID NO: 134; WAN0249TZ; Start 321; Stop 345
tgactataagaactgctatctggtt

SEQ ID NO: 256510 - DNA, 25 bp, Artificial
  probe
  misc_feature (1)..(25): SEQ ID NO: 134; WAN0249TZ; Start 320; Stop 344
ttgactataagaactgctatctggt

SEQ ID NO: 256511 - DNA, 25 bp, Artificial
  probe
  misc_feature (1)..(25): SEQ ID NO: 134; WAN0249TZ; Start 246; Stop 270
gtatgaatctggaatagaacactgt

SEQ ID NO: 256512 - DNA, 25 bp, Artificial
  probe
  misc_feature (1)..(25): SEQ ID NO: 134; WAN0249TZ; Start 243; Stop 267
tgagtatgaatctggaatagaacac

SEQ ID NO: 256513 - DNA, 25 bp, Artificial
  probe
  misc_feature (1)..(25): SEQ ID NO: 134; WAN0249TZ; Start 319; Stop 343
attgactataagaactgctatctgg

SEQ ID NO: 256514 - DNA, 25 bp, Artificial
  probe
  misc_feature (1)..(25): SEQ ID NO: 134; WAN0249TZ; Start 245; Stop 269
agtatgaatctggaatagaacactg

SEQ ID NO: 256515 - DNA, 25 bp, Artificial
  probe
  misc_feature (1)..(25): SEQ ID NO: 134; WAN0249TZ; Start 244; Stop 268
gagtatgaatctggaatagaacact

SEQ ID NO: 256516 - DNA, 25 bp, Artificial
  probe
  misc_feature (1)..(25): SEQ ID NO: 134; WAN0249TZ; Start 242; Stop 266
ttgagtatgaatctggaatagaaca

SEQ ID NO: 256517 - DNA, 25 bp, Artificial
  probe
  misc_feature (1)..(25): SEQ ID NO: 134; WAN0249TZ; Start 249; Stop 273
tgaatctggaatagaacactgttaa

SEQ ID NO: 256518 - DNA, 25 bp, Artificial
  probe
  misc_feature (1)..(25): SEQ ID NO: 134; WAN0249TZ; Start 19; Stop 43
ttatcccgaaccttgaaatgtaaag

SEQ ID NO: 256519 - DNA, 25 bp, Artificial
  probe
  misc_feature (1)..(25): SEQ ID NO: 134; WAN0249TZ; Start 248; Stop 272
atgaatctggaatagaacactgtta

SEQ ID NO: 256520 - DNA, 25 bp, Artificial
  probe
  misc_feature (1)..(25): SEQ ID NO: 134; WAN0249TZ; Start 247; Stop 271
tatgaatctggaatagaacactgtt

SEQ ID NO: 256521 - DNA, 25 bp, Artificial
  probe
  misc_feature (1)..(25): SEQ ID NO: 134; WAN0249TZ; Start 18; Stop 42
tttatcccgaaccttgaaatgtaaa

SEQ ID NO: 256522 - DNA, 25 bp, Artificial
  probe
  misc_feature (1)..(25): SEQ ID NO: 134; WAN0249TZ; Start 35; Stop 59
aatgtaaaggtgaggaagctagaaa

SEQ ID NO: 256523 - DNA, 25 bp, Artificial
  probe
  misc_feature (1)..(25): SEQ ID NO: 134; WAN0249TZ; Start 34; Stop 58
aaatgtaaaggtgaggaagctagaa

SEQ ID NO: 256524 - DNA, 25 bp, Artificial
  probe
  misc_feature (1)..(25): SEQ ID NO: 134; WAN0249TZ; Start 31; Stop 55
ttgaaatgtaaaggtgaggaagcta

SEQ ID NO: 256525 - DNA, 25 bp, Artificial
  probe
  misc_feature (1)..(25): SEQ ID NO: 134; WAN0249TZ; Start 33; Stop 57
gaaatgtaaaggtgaggaagctaga

SEQ ID NO: 256526 - DNA, 25 bp, Artificial
  probe
  misc_feature (1)..(25): SEQ ID NO: 134; WAN0249TZ; Start 36; Stop 60
atgtaaaggtgaggaagctagaaac

SEQ ID NO: 256527 - DNA, 25 bp, Artificial
  probe
  misc_feature (1)..(25): SEQ ID NO: 134; WAN0249TZ; Start 32; Stop 56
tgaaatgtaaaggtgaggaagctag

SEQ ID NO: 256528 - DNA, 25 bp, Artificial
  probe
  misc_feature (1)..(25): SEQ ID NO: 134; WAN0249TZ; Start 318; Stop 342
aattgactataagaactgctatctg

SEQ ID NO: 256529 - DNA, 25 bp, Artificial
  probe
  misc_feature (1)..(25): SEQ ID NO: 134; WAN0249TZ; Start 241; Stop 265
attgagtatgaatctggaatagaac

SEQ ID NO: 256530 - DNA, 25 bp, Artificial
  probe
  misc_feature (1)..(25): SEQ ID NO: 134; WAN0249TZ; Start 240; Stop 264
cattgagtatgaatctggaatagaa

SEQ ID NO: 256531 - DNA, 25 bp, Artificial
  probe
  misc_feature (1)..(25): SEQ ID NO: 134; WAN0249TZ; Start 38; Stop 62
gtaaaggtgaggaagctagaaacag

SEQ ID NO: 256532 - DNA, 25 bp, Artificial
  probe
  misc_feature (1)..(25): SEQ ID NO: 134; WAN0249TZ; Start 286; Stop 310
gtttcctactcgatttcttcagatt

SEQ ID NO: 256533 - DNA, 25 bp, Artificial
  probe
  misc_feature (1)..(25): SEQ ID NO: 134; WAN0249TZ; Start 30; Stop 54
cttgaaatgtaaaggtgaggaagct

SEQ ID NO: 256534 - DNA, 25 bp, Artificial
  probe
  misc_feature (1)..(25): SEQ ID NO: 134; WAN0249TZ; Start 285; Stop 309
agtttcctactcgatttcttcagat

SEQ ID NO: 256535 - DNA, 25 bp, Artificial
  probe
  misc_feature (1)..(25): SEQ ID NO: 134; WAN0249TZ; Start 287; Stop 311
tttcctactcgatttcttcagattt

SEQ ID NO: 256536 - DNA, 25 bp, Artificial
  probe
  misc_feature (1)..(25): SEQ ID NO: 134; WAN0249TZ; Start 37; Stop 61
tgtaaaggtgaggaagctagaaaca

SEQ ID NO: 256537 - DNA, 25 bp, Artificial
  probe
  misc_feature (1)..(25): SEQ ID NO: 134; WAN0249TZ; Start 16; Stop 40
cttttatcccgaaccttgaaatgta

SEQ ID NO: 256538 - DNA, 25 bp, Artificial
  probe
  misc_feature (1)..(25): SEQ ID NO: 134; WAN0249TZ; Start 13; Stop 37
aaccttttatcccgaaccttgaaat

SEQ ID NO: 256539 - DNA, 25 bp, Artificial
  probe
  misc_feature (1)..(25): SEQ ID NO: 134; WAN0249TZ; Start 17; Stop 41
ttttatcccgaaccttgaaatgtaa

SEQ ID NO: 256540 - DNA, 25 bp, Artificial
  probe
  misc_feature (1)..(25): SEQ ID NO: 134; WAN0249TZ; Start 239; Stop 263
tcattgagtatgaatctggaataga

SEQ ID NO: 256541 - DNA, 25 bp, Artificial
  probe
  misc_feature (1)..(25): SEQ ID NO: 134; WAN0249TZ; Start 250; Stop 274
gaatctggaatagaacactgttaaa

SEQ ID NO: 256542 - DNA, 25 bp, Artificial
  probe
  misc_feature (1)..(25): SEQ ID NO: 135; WAN0249HC; Start 22; Stop 46
aagtgtgctatactggaatagtcaa

SEQ ID NO: 256543 - DNA, 25 bp, Artificial
  probe
  misc_feature (1)..(25): SEQ ID NO: 135; WAN0249HC; Start 23; Stop 47
agtgtgctatactggaatagtcaat

SEQ ID NO: 256544 - DNA, 25 bp, Artificial
  probe
  misc_feature (1)..(25): SEQ ID NO: 135; WAN0249HC; Start 24; Stop 48
gtgtgctatactggaatagtcaata

SEQ ID NO: 256545 - DNA, 25 bp, Artificial
  probe
  misc_feature (1)..(25): SEQ ID NO: 135; WAN0249HC; Start 25; Stop 49
tgtgctatactggaatagtcaataa

SEQ ID NO: 256546 - DNA, 25 bp, Artificial
  probe
  misc_feature (1)..(25): SEQ ID NO: 135; WAN0249HC; Start 21; Stop 45
aaagtgtgctatactggaatagtca

SEQ ID NO: 256547 - DNA, 25 bp, Artificial
  probe
  misc_feature (1)..(25): SEQ ID NO: 135; WAN0249HC; Start 40; Stop 64
tagtcaataaaacacggggagatag

SEQ ID NO: 256548 - DNA, 25 bp, Artificial
  probe
  misc_feature (1)..(25): SEQ ID NO: 135; WAN0249HC; Start 38; Stop 62
aatagtcaataaaacacggggagat

SEQ ID NO: 256549 - DNA, 25 bp, Artificial
  probe
  misc_feature (1)..(25): SEQ ID NO: 135; WAN0249HC; Start 37; Stop 61
gaatagtcaataaaacacggggaga

SEQ ID NO: 256550 - DNA, 25 bp, Artificial
  probe
  misc_feature (1)..(25): SEQ ID NO: 135; WAN0249HC; Start 56; Stop 80
gggagatagttgtgaagagtgtttt

SEQ ID NO: 256551 - DNA, 25 bp, Artificial
  probe
  misc_feature (1)..(25): SEQ ID NO: 135; WAN0249HC; Start 39; Stop 63
atagtcaataaaacacggggagata

SEQ ID NO: 256552 - DNA, 25 bp, Artificial
  probe
  misc_feature (1)..(25): SEQ ID NO: 135; WAN0249HC; Start 42; Stop 66
gtcaataaaacacggggagatagtt

SEQ ID NO: 256553 - DNA, 25 bp, Artificial
  probe
  misc_feature (1)..(25): SEQ ID NO: 135; WAN0249HC; Start 41; Stop 65
agtcaataaaacacggggagatagt

SEQ ID NO: 256554 - DNA, 25 bp, Artificial
  probe
  misc_feature (1)..(25): SEQ ID NO: 135; WAN0249HC; Start 36; Stop 60
ggaatagtcaataaaacacggggag

SEQ ID NO: 256555 - DNA, 25 bp, Artificial
  probe
  misc_feature (1)..(25): SEQ ID NO: 135; WAN0249HC; Start 43; Stop 67
tcaataaaacacggggagatagttg

SEQ ID NO: 256556 - DNA, 25 bp, Artificial
  probe
  misc_feature (1)..(25): SEQ ID NO: 135; WAN0249HC; Start 34; Stop 58
ctggaatagtcaataaaacacgggg

SEQ ID NO: 256557 - DNA, 25 bp, Artificial
  probe
  misc_feature (1)..(25): SEQ ID NO: 135; WAN0249HC; Start 33; Stop 57
actggaatagtcaataaaacacggg

SEQ ID NO: 256558 - DNA, 25 bp, Artificial
  probe
  misc_feature (1)..(25): SEQ ID NO: 135; WAN0249HC; Start 32; Stop 56
tactggaatagtcaataaaacacgg

SEQ ID NO: 256559 - DNA, 25 bp, Artificial
  probe
  misc_feature (1)..(25): SEQ ID NO: 135; WAN0249HC; Start 35; Stop 59
tggaatagtcaataaaacacgggga

SEQ ID NO: 256560 - DNA, 25 bp, Artificial
  probe
  misc_feature (1)..(25): SEQ ID NO: 135; WAN0249HC; Start 44; Stop 68
caataaaacacggggagatagttgt

SEQ ID NO: 256561 - DNA, 25 bp, Artificial
  probe
  misc_feature (1)..(25): SEQ ID NO: 135; WAN0249HC; Start 26; Stop 50
gtgctatactggaatagtcaataaa

SEQ ID NO: 256562 - DNA, 25 bp, Artificial
  probe
  misc_feature (1)..(25): SEQ ID NO: 135; WAN0249HC; Start 55; Stop 79
ggggagatagttgtgaagagtgttt

SEQ ID NO: 256563 - DNA, 25 bp, Artificial
  probe
  misc_feature (1)..(25): SEQ ID NO: 135; WAN0249HC; Start 20; Stop 44
aaaagtgtgctatactggaatagtc

SEQ ID NO: 256564 - DNA, 25 bp, Artificial
  probe
  misc_feature (1)..(25): SEQ ID NO: 135; WAN0249HC; Start 45; Stop 69
aataaaacacggggagatagttgtg

SEQ ID NO: 256565 - DNA, 25 bp, Artificial
  probe
  misc_feature (1)..(25): SEQ ID NO: 135; WAN0249HC; Start 16; Stop 40
ttctaaaagtgtgctatactggaat

SEQ ID NO: 256566 - DNA, 25 bp, Artificial
  probe
  misc_feature (1)..(25): SEQ ID NO: 135; WAN0249HC; Start 15; Stop 39
attctaaaagtgtgctatactggaa

SEQ ID NO: 256567 - DNA, 25 bp, Artificial
  probe
  misc_feature (1)..(25): SEQ ID NO: 135; WAN0249HC; Start 14; Stop 38
aattctaaaagtgtgctatactgga

SEQ ID NO: 256568 - DNA, 25 bp, Artificial
  probe
  misc_feature (1)..(25): SEQ ID NO: 135; WAN0249HC; Start 46; Stop 70
ataaaacacggggagatagttgtga

SEQ ID NO: 256569 - DNA, 25 bp, Artificial
  probe
  misc_feature (1)..(25): SEQ ID NO: 135; WAN0249HC; Start 47; Stop 71
taaaacacggggagatagttgtgaa

SEQ ID NO: 256570 - DNA, 25 bp, Artificial
  probe
  misc_feature (1)..(25): SEQ ID NO: 135; WAN0249HC; Start 19; Stop 43
taaaagtgtgctatactggaatagt

SEQ ID NO: 256571 - DNA, 25 bp, Artificial
  probe
  misc_feature (1)..(25): SEQ ID NO: 135; WAN0249HC; Start 31; Stop 55
atactggaatagtcaataaaacacg

SEQ ID NO: 256572 - DNA, 25 bp, Artificial
  probe
  misc_feature (1)..(25): SEQ ID NO: 135; WAN0249HC; Start 17; Stop 41
tctaaaagtgtgctatactggaata

SEQ ID NO: 256573 - DNA, 25 bp, Artificial
  probe
  misc_feature (1)..(25): SEQ ID NO: 135; WAN0249HC; Start 105; Stop 129
ttttaccgacagcacgttttatctc

SEQ ID NO: 256574 - DNA, 25 bp, Artificial
  probe
  misc_feature (1)..(25): SEQ ID NO: 135; WAN0249HC; Start 104; Stop 128
cttttaccgacagcacgttttatct

SEQ ID NO: 256575 - DNA, 25 bp, Artificial
  probe
  misc_feature (1)..(25): SEQ ID NO: 136; WAN0249N2; Start 103; Stop 127
agaatgattttatgaaagggagtga

SEQ ID NO: 256576 - DNA, 25 bp, Artificial
  probe
  misc_feature (1)..(25): SEQ ID NO: 136; WAN0249N2; Start 104; Stop 128
gaatgattttatgaaagggagtgaa

SEQ ID NO: 256577 - DNA, 25 bp, Artificial
  probe
  misc_feature (1)..(25): SEQ ID NO: 136; WAN0249N2; Start 102; Stop 126
aagaatgattttatgaaagggagtg

SEQ ID NO: 256578 - DNA, 25 bp, Artificial
  probe
  misc_feature (1)..(25): SEQ ID NO: 136; WAN0249N2; Start 105; Stop 129
aatgattttatgaaagggagtgaaa

SEQ ID NO: 256579 - DNA, 25 bp, Artificial
  probe
  misc_feature (1)..(25): SEQ ID NO: 136; WAN0249N2; Start 106; Stop 130
atgattttatgaaagggagtgaaaa

SEQ ID NO: 256580 - DNA, 25 bp, Artificial
  probe
  misc_feature (1)..(25): SEQ ID NO: 136; WAN0249N2; Start 49; Stop 73
gatctatttccccaacgtatggttt

SEQ ID NO: 256581 - DNA, 25 bp, Artificial
  probe
  misc_feature (1)..(25): SEQ ID NO: 136; WAN0249N2; Start 45; Stop 69
aaaagatctatttccccaacgtatg

SEQ ID NO: 256582 - DNA, 25 bp, Artificial
  probe
  misc_feature (1)..(25): SEQ ID NO: 136; WAN0249N2; Start 50; Stop 74
atctatttccccaacgtatggtttg

SEQ ID NO: 256583 - DNA, 25 bp, Artificial
  probe
  misc_feature (1)..(25): SEQ ID NO: 136; WAN0249N2; Start 52; Stop 76
ctatttccccaacgtatggtttgaa

SEQ ID NO: 256584 - DNA, 25 bp, Artificial
  probe
  misc_feature (1)..(25): SEQ ID NO: 136; WAN0249N2; Start 101; Stop 125
taagaatgattttatgaaagggagt

SEQ ID NO: 256585 - DNA, 25 bp, Artificial
  probe
  misc_feature (1)..(25): SEQ ID NO: 136; WAN0249N2; Start 53; Stop 77
tatttccccaacgtatggtttgaaa

SEQ ID NO: 256586 - DNA, 25 bp, Artificial
  probe
  misc_feature (1)..(25): SEQ ID NO: 136; WAN0249N2; Start 51; Stop 75
tctatttccccaacgtatggtttga

SEQ ID NO: 256587 - DNA, 25 bp, Artificial
  probe
  misc_feature (1)..(25): SEQ ID NO: 136; WAN0249N2; Start 54; Stop 78
atttccccaacgtatggtttgaaaa

SEQ ID NO: 256588 - DNA, 25 bp, Artificial
  probe
  misc_feature (1)..(25): SEQ ID NO: 136; WAN0249N2; Start 46; Stop 70
aaagatctatttccccaacgtatgg

SEQ ID NO: 256589 - DNA, 25 bp, Artificial
  probe
  misc_feature (1)..(25): SEQ ID NO: 136; WAN0249N2; Start 48; Stop 72
agatctatttccccaacgtatggtt

SEQ ID NO: 256590 - DNA, 25 bp, Artificial
  probe
  misc_feature (1)..(25): SEQ ID NO: 136; WAN0249N2; Start 47; Stop 71
aagatctatttccccaacgtatggt

SEQ ID NO: 256591 - DNA, 25 bp, Artificial
  probe
  misc_feature (1)..(25): SEQ ID NO: 136; WAN0249N2; Start 100; Stop 124
ttaagaatgattttatgaaagggag

SEQ ID NO: 256592 - DNA, 25 bp, Artificial
  probe
  misc_feature (1)..(25): SEQ ID NO: 136; WAN0249N2; Start 107; Stop 131
tgattttatgaaagggagtgaaaat

SEQ ID NO: 256593 - DNA, 25 bp, Artificial
  probe
  misc_feature (1)..(25): SEQ ID NO: 136; WAN0249N2; Start 108; Stop 132
gattttatgaaagggagtgaaaata

SEQ ID NO: 256594 - DNA, 25 bp, Artificial
  probe
  misc_feature (1)..(25): SEQ ID NO: 137; WAN024AJW; Start 166; Stop 190
ttctataaagccttgatactatgcg

SEQ ID NO: 256595 - DNA, 25 bp, Artificial
  probe
  misc_feature (1)..(25): SEQ ID NO: 137; WAN024AJW; Start 63; Stop 87
ggacaatgataggggaaaataggaa

SEQ ID NO: 256596 - DNA, 25 bp, Artificial
  probe
  misc_feature (1)..(25): SEQ ID NO: 137; WAN024AJW; Start 60; Stop 84
cagggacaatgataggggaaaatag

SEQ ID NO: 256597 - DNA, 25 bp, Artificial
  probe
  misc_feature (1)..(25): SEQ ID NO: 137; WAN024AJW; Start 165; Stop 189
attctataaagccttgatactatgc

SEQ ID NO: 256598 - DNA, 25 bp, Artificial
  probe
  misc_feature (1)..(25): SEQ ID NO: 137; WAN024AJW; Start 59; Stop 83
acagggacaatgataggggaaaata

SEQ ID NO: 256599 - DNA, 25 bp, Artificial
  probe
  misc_feature (1)..(25): SEQ ID NO: 137; WAN024AJW; Start 62; Stop 86
gggacaatgataggggaaaatagga

SEQ ID NO: 256600 - DNA, 25 bp, Artificial
  probe
  misc_feature (1)..(25): SEQ ID NO: 137; WAN024AJW; Start 61; Stop 85
agggacaatgataggggaaaatagg

SEQ ID NO: 256601 - DNA, 25 bp, Artificial
  probe
  misc_feature (1)..(25): SEQ ID NO: 137; WAN024AJW; Start 64; Stop 88
gacaatgataggggaaaataggaat

SEQ ID NO: 256602 - DNA, 25 bp, Artificial
  probe
  misc_feature (1)..(25): SEQ ID NO: 137; WAN024AJW; Start 58; Stop 82
aacagggacaatgataggggaaaat

SEQ ID NO: 256603 - DNA, 25 bp, Artificial
  probe
  misc_feature (1)..(25): SEQ ID NO: 137; WAN024AJW; Start 57; Stop 81
aaacagggacaatgataggggaaaa

SEQ ID NO: 256604 - DNA, 25 bp, Artificial
  probe
  misc_feature (1)..(25): SEQ ID NO: 137; WAN024AJW; Start 56; Stop 80
aaaacagggacaatgataggggaaa

SEQ ID NO: 256605 - DNA, 25 bp, Artificial
  probe
  misc_feature (1)..(25): SEQ ID NO: 137; WAN024AJW; Start 65; Stop 89
acaatgataggggaaaataggaatt

SEQ ID NO: 256606 - DNA, 25 bp, Artificial
  probe
  misc_feature (1)..(25): SEQ ID NO: 137; WAN024AJW; Start 93; Stop 117
tcagatgatttagaaatcttggaca

SEQ ID NO: 256607 - DNA, 25 bp, Artificial
  probe
  misc_feature (1)..(25): SEQ ID NO: 137; WAN024AJW; Start 167; Stop 191
tctataaagccttgatactatgcgc

SEQ ID NO: 256608 - DNA, 25 bp, Artificial
  probe
  misc_feature (1)..(25): SEQ ID NO: 137; WAN024AJW; Start 94; Stop 118
cagatgatttagaaatcttggacaa

SEQ ID NO: 256609 - DNA, 25 bp, Artificial
  probe
  misc_feature (1)..(25): SEQ ID NO: 137; WAN024AJW; Start 149; Stop 173
agcgcatagtatcaagattctataa

SEQ ID NO: 256610 - DNA, 25 bp, Artificial
  probe
  misc_feature (1)..(25): SEQ ID NO: 137; WAN024AJW; Start 148; Stop 172
aagcgcatagtatcaagattctata

SEQ ID NO: 256611 - DNA, 25 bp, Artificial
  probe
  misc_feature (1)..(25): SEQ ID NO: 137; WAN024AJW; Start 73; Stop 97
aggggaaaataggaatttaatcaga

SEQ ID NO: 256612 - DNA, 25 bp, Artificial
  probe
  misc_feature (1)..(25): SEQ ID NO: 137; WAN024AJW; Start 92; Stop 116
atcagatgatttagaaatcttggac

SEQ ID NO: 256613 - DNA, 25 bp, Artificial
  probe
  misc_feature (1)..(25): SEQ ID NO: 137; WAN024AJW; Start 95; Stop 119
agatgatttagaaatcttggacaaa

SEQ ID NO: 256614 - DNA, 25 bp, Artificial
  probe
  misc_feature (1)..(25): SEQ ID NO: 137; WAN024AJW; Start 152; Stop 176
gcatagtatcaagattctataaagc

SEQ ID NO: 256615 - DNA, 25 bp, Artificial
  probe
  misc_feature (1)..(25): SEQ ID NO: 137; WAN024AJW; Start 66; Stop 90
caatgataggggaaaataggaattt

SEQ ID NO: 256616 - DNA, 25 bp, Artificial
  probe
  misc_feature (1)..(25): SEQ ID NO: 137; WAN024AJW; Start 147; Stop 171
aaagcgcatagtatcaagattctat

SEQ ID NO: 256617 - DNA, 25 bp, Artificial
  probe
  misc_feature (1)..(25): SEQ ID NO: 137; WAN024AJW; Start 151; Stop 175
cgcatagtatcaagattctataaag

SEQ ID NO: 256618 - DNA, 25 bp, Artificial
  probe
  misc_feature (1)..(25): SEQ ID NO: 137; WAN024AJW; Start 74; Stop 98
ggggaaaataggaatttaatcagat

SEQ ID NO: 256619 - DNA, 25 bp, Artificial
  probe
  misc_feature (1)..(25): SEQ ID NO: 137; WAN024AJW; Start 164; Stop 188
gattctataaagccttgatactatg

SEQ ID NO: 256620 - DNA, 25 bp, Artificial
  probe
  misc_feature (1)..(25): SEQ ID NO: 137; WAN024AJW; Start 162; Stop 186
aagattctataaagccttgatacta

SEQ ID NO: 256621 - DNA, 25 bp, Artificial
  probe
  misc_feature (1)..(25): SEQ ID NO: 137; WAN024AJW; Start 155; Stop 179
tagtatcaagattctataaagcctt

SEQ ID NO: 256622 - DNA, 25 bp, Artificial
  probe
  misc_feature (1)..(25): SEQ ID NO: 137; WAN024AJW; Start 168; Stop 192
ctataaagccttgatactatgcgct

SEQ ID NO: 256623 - DNA, 25 bp, Artificial
  probe
  misc_feature (1)..(25): SEQ ID NO: 137; WAN024AJW; Start 91; Stop 115
aatcagatgatttagaaatcttgga

SEQ ID NO: 256624 - DNA, 25 bp, Artificial
  probe
  misc_feature (1)..(25): SEQ ID NO: 137; WAN024AJW; Start 72; Stop 96
taggggaaaataggaatttaatcag

SEQ ID NO: 256625 - DNA, 25 bp, Artificial
  probe
  misc_feature (1)..(25): SEQ ID NO: 137; WAN024AJW; Start 1; Stop 25
aaagttcctcctatcattttattga

SEQ ID NO: 256626 - DNA, 25 bp, Artificial
  probe
  misc_feature (1)..(25): SEQ ID NO: 137; WAN024AJW; Start 153; Stop 177
catagtatcaagattctataaagcc

SEQ ID NO: 256627 - DNA, 25 bp, Artificial
  probe
  misc_feature (1)..(25): SEQ ID NO: 138; WAN024A7L; Start 104; Stop 128
cacaagttaatacaaggtgagtgtt

SEQ ID NO: 256628 - DNA, 25 bp, Artificial
  probe
  misc_feature (1)..(25): SEQ ID NO: 138; WAN024A7L; Start 105; Stop 129
acaagttaatacaaggtgagtgtta

SEQ ID NO: 256629 - DNA, 25 bp, Artificial
  probe
  misc_feature (1)..(25): SEQ ID NO: 138; WAN024A7L; Start 106; Stop 130
caagttaatacaaggtgagtgttac

SEQ ID NO: 256630 - DNA, 25 bp, Artificial
  probe
  misc_feature (1)..(25): SEQ ID NO: 138; WAN024A7L; Start 107; Stop 131
aagttaatacaaggtgagtgttact

SEQ ID NO: 256631 - DNA, 25 bp, Artificial
  probe
  misc_feature (1)..(25): SEQ ID NO: 138; WAN024A7L; Start 111; Stop 135
taatacaaggtgagtgttactaagt

SEQ ID NO: 256632 - DNA, 25 bp, Artificial
  probe
  misc_feature (1)..(25): SEQ ID NO: 138; WAN024A7L; Start 108; Stop 132
agttaatacaaggtgagtgttacta

SEQ ID NO: 256633 - DNA, 25 bp, Artificial
  probe
  misc_feature (1)..(25): SEQ ID NO: 138; WAN024A7L; Start 112; Stop 136
aatacaaggtgagtgttactaagta

SEQ ID NO: 256634 - DNA, 25 bp, Artificial
  probe
  misc_feature (1)..(25): SEQ ID NO: 138; WAN024A7L; Start 148; Stop 172
gatcacaggtgaattagaaatcagc

SEQ ID NO: 256635 - DNA, 25 bp, Artificial
  probe
  misc_feature (1)..(25): SEQ ID NO: 138; WAN024A7L; Start 109; Stop 133
gttaatacaaggtgagtgttactaa

SEQ ID NO: 256636 - DNA, 25 bp, Artificial
  probe
  misc_feature (1)..(25): SEQ ID NO: 138; WAN024A7L; Start 149; Stop 173
atcacaggtgaattagaaatcagct

SEQ ID NO: 256637 - DNA, 25 bp, Artificial
  probe
  misc_feature (1)..(25): SEQ ID NO: 138; WAN024A7L; Start 134; Stop 158
gtaatattaggcatgatcacaggtg

SEQ ID NO: 256638 - DNA, 25 bp, Artificial
  probe
  misc_feature (1)..(25): SEQ ID NO: 138; WAN024A7L; Start 133; Stop 157
agtaatattaggcatgatcacaggt

SEQ ID NO: 256639 - DNA, 25 bp, Artificial
  probe
  misc_feature (1)..(25): SEQ ID NO: 138; WAN024A7L; Start 139; Stop 163
attaggcatgatcacaggtgaatta

SEQ ID NO: 256640 - DNA, 25 bp, Artificial
  probe
  misc_feature (1)..(25): SEQ ID NO: 138; WAN024A7L; Start 138; Stop 162
tattaggcatgatcacaggtgaatt

SEQ ID NO: 256641 - DNA, 25 bp, Artificial
  probe
  misc_feature (1)..(25): SEQ ID NO: 138; WAN024A7L; Start 137; Stop 161
atattaggcatgatcacaggtgaat

SEQ ID NO: 256642 - DNA, 25 bp, Artificial
  probe
  misc_feature (1)..(25): SEQ ID NO: 138; WAN024A7L; Start 136; Stop 160
aatattaggcatgatcacaggtgaa

SEQ ID NO: 256643 - DNA, 25 bp, Artificial
  probe
  misc_feature (1)..(25): SEQ ID NO: 138; WAN024A7L; Start 110; Stop 134
ttaatacaaggtgagtgttactaag

SEQ ID NO: 256644 - DNA, 25 bp, Artificial
  probe
  misc_feature (1)..(25): SEQ ID NO: 138; WAN024A7L; Start 115; Stop 139
acaaggtgagtgttactaagtaata

SEQ ID NO: 256645 - DNA, 25 bp, Artificial
  probe
  misc_feature (1)..(25): SEQ ID NO: 138; WAN024A7L; Start 114; Stop 138
tacaaggtgagtgttactaagtaat

SEQ ID NO: 256646 - DNA, 25 bp, Artificial
  probe
  misc_feature (1)..(25): SEQ ID NO: 138; WAN024A7L; Start 113; Stop 137
atacaaggtgagtgttactaagtaa

SEQ ID NO: 256647 - DNA, 25 bp, Artificial
  probe
  misc_feature (1)..(25): SEQ ID NO: 138; WAN024A7L; Start 140; Stop 164
ttaggcatgatcacaggtgaattag

SEQ ID NO: 256648 - DNA, 25 bp, Artificial
  probe
  misc_feature (1)..(25): SEQ ID NO: 138; WAN024A7L; Start 135; Stop 159
taatattaggcatgatcacaggtga

SEQ ID NO: 256649 - DNA, 25 bp, Artificial
  probe
  misc_feature (1)..(25): SEQ ID NO: 138; WAN024A7L; Start 132; Stop 156
aagtaatattaggcatgatcacagg

SEQ ID NO: 256650 - DNA, 25 bp, Artificial
  probe
  misc_feature (1)..(25): SEQ ID NO: 138; WAN024A7L; Start 141; Stop 165
taggcatgatcacaggtgaattaga

SEQ ID NO: 256651 - DNA, 25 bp, Artificial
  probe
  misc_feature (1)..(25): SEQ ID NO: 138; WAN024A7L; Start 142; Stop 166
aggcatgatcacaggtgaattagaa

SEQ ID NO: 256652 - DNA, 25 bp, Artificial
  probe
  misc_feature (1)..(25): SEQ ID NO: 138; WAN024A7L; Start 103; Stop 127
tcacaagttaatacaaggtgagtgt

SEQ ID NO: 256653 - DNA, 25 bp, Artificial
  probe
  misc_feature (1)..(25): SEQ ID NO: 138; WAN024A7L; Start 171; Stop 195
gctgattttctagttcatttgtggt

SEQ ID NO: 256654 - DNA, 25 bp, Artificial
  probe
  misc_feature (1)..(25): SEQ ID NO: 138; WAN024A7L; Start 102; Stop 126
atcacaagttaatacaaggtgagtg

SEQ ID NO: 256655 - DNA, 25 bp, Artificial
  probe
  misc_feature (1)..(25): SEQ ID NO: 138; WAN024A7L; Start 173; Stop 197
tgattttctagttcatttgtggtca

SEQ ID NO: 256656 - DNA, 25 bp, Artificial
  probe
  misc_feature (1)..(25): SEQ ID NO: 138; WAN024A7L; Start 116; Stop 140
caaggtgagtgttactaagtaatat

SEQ ID NO: 256657 - DNA, 25 bp, Artificial
  probe
  misc_feature (1)..(25): SEQ ID NO: 138; WAN024A7L; Start 101; Stop 125
aatcacaagttaatacaaggtgagt

SEQ ID NO: 256658 - DNA, 25 bp, Artificial
  probe
  misc_feature (1)..(25): SEQ ID NO: 138; WAN024A7L; Start 172; Stop 196
ctgattttctagttcatttgtggtc

SEQ ID NO: 256659 - DNA, 25 bp, Artificial
  probe
  misc_feature (1)..(25): SEQ ID NO: 138; WAN024A7L; Start 144; Stop 168
gcatgatcacaggtgaattagaaat

SEQ ID NO: 256660 - DNA, 25 bp, Artificial
  probe
  misc_feature (1)..(25): SEQ ID NO: 139; WAN024A3U; Start 26; Stop 50
acgctttcaactcttgtataaatgg

SEQ ID NO: 256661 - DNA, 25 bp, Artificial
  probe
  misc_feature (1)..(25): SEQ ID NO: 139; WAN024A3U; Start 27; Stop 51
cgctttcaactcttgtataaatgga

SEQ ID NO: 256662 - DNA, 25 bp, Artificial
  probe
  misc_feature (1)..(25): SEQ ID NO: 139; WAN024A3U; Start 25; Stop 49
aacgctttcaactcttgtataaatg

SEQ ID NO: 256663 - DNA, 25 bp, Artificial
  probe
  misc_feature (1)..(25): SEQ ID NO: 139; WAN024A3U; Start 24; Stop 48
gaacgctttcaactcttgtataaat

SEQ ID NO: 256664 - DNA, 25 bp, Artificial
  probe
  misc_feature (1)..(25): SEQ ID NO: 139; WAN024A3U; Start 28; Stop 52
gctttcaactcttgtataaatggaa

SEQ ID NO: 256665 - DNA, 25 bp, Artificial
  probe
  misc_feature (1)..(25): SEQ ID NO: 139; WAN024A3U; Start 23; Stop 47
tgaacgctttcaactcttgtataaa

SEQ ID NO: 256666 - DNA, 25 bp, Artificial
  probe
  misc_feature (1)..(25): SEQ ID NO: 139; WAN024A3U; Start 79; Stop 103
ttgcttgacaattattccttttacg

SEQ ID NO: 256667 - DNA, 25 bp, Artificial
  probe
  misc_feature (1)..(25): SEQ ID NO: 139; WAN024A3U; Start 29; Stop 53
ctttcaactcttgtataaatggaag

SEQ ID NO: 256668 - DNA, 25 bp, Artificial
  probe
  misc_feature (1)..(25): SEQ ID NO: 139; WAN024A3U; Start 80; Stop 104
tgcttgacaattattccttttacgt

SEQ ID NO: 256669 - DNA, 25 bp, Artificial
  probe
  misc_feature (1)..(25): SEQ ID NO: 139; WAN024A3U; Start 81; Stop 105
gcttgacaattattccttttacgtg

SEQ ID NO: 256670 - DNA, 25 bp, Artificial
  probe
  misc_feature (1)..(25): SEQ ID NO: 139; WAN024A3U; Start 10; Stop 34
agcaatgttctattgaacgctttca

SEQ ID NO: 256671 - DNA, 25 bp, Artificial
  probe
  misc_feature (1)..(25): SEQ ID NO: 139; WAN024A3U; Start 32; Stop 56
tcaactcttgtataaatggaagaaa

SEQ ID NO: 256672 - DNA, 25 bp, Artificial
  probe
  misc_feature (1)..(25): SEQ ID NO: 139; WAN024A3U; Start 31; Stop 55
ttcaactcttgtataaatggaagaa

SEQ ID NO: 256673 - DNA, 25 bp, Artificial
  probe
  misc_feature (1)..(25): SEQ ID NO: 139; WAN024A3U; Start 30; Stop 54
tttcaactcttgtataaatggaaga

SEQ ID NO: 256674 - DNA, 25 bp, Artificial
  probe
  misc_feature (1)..(25): SEQ ID NO: 139; WAN024A3U; Start 78; Stop 102
tttgcttgacaattattccttttac

SEQ ID NO: 256675 - DNA, 25 bp, Artificial
  probe
  misc_feature (1)..(25): SEQ ID NO: 139; WAN024A3U; Start 82; Stop 106
cttgacaattattccttttacgtgt

SEQ ID NO: 256676 - DNA, 25 bp, Artificial
  probe
  misc_feature (1)..(25): SEQ ID NO: 139; WAN024A3U; Start 9; Stop 33
aagcaatgttctattgaacgctttc

SEQ ID NO: 256677 - DNA, 25 bp, Artificial
  probe
  misc_feature (1)..(25): SEQ ID NO: 139; WAN024A3U; Start 77; Stop 101
ttttgcttgacaattattcctttta

SEQ ID NO: 256678 - DNA, 25 bp, Artificial
  probe
  misc_feature (1)..(25): SEQ ID NO: 139; WAN024A3U; Start 83; Stop 107
ttgacaattattccttttacgtgta

SEQ ID NO: 256679 - DNA, 25 bp, Artificial
  probe
  misc_feature (1)..(25): SEQ ID NO: 139; WAN024A3U; Start 17; Stop 41
ttctattgaacgctttcaactcttg

SEQ ID NO: 256680 - DNA, 25 bp, Artificial
  probe
  misc_feature (1)..(25): SEQ ID NO: 139; WAN024A3U; Start 16; Stop 40
gttctattgaacgctttcaactctt

SEQ ID NO: 256681 - DNA, 25 bp, Artificial
  probe
  misc_feature (1)..(25): SEQ ID NO: 139; WAN024A3U; Start 14; Stop 38
atgttctattgaacgctttcaactc

SEQ ID NO: 256682 - DNA, 25 bp, Artificial
  probe
  misc_feature (1)..(25): SEQ ID NO: 139; WAN024A3U; Start 13; Stop 37
aatgttctattgaacgctttcaact

SEQ ID NO: 256683 - DNA, 25 bp, Artificial
  probe
  misc_feature (1)..(25): SEQ ID NO: 139; WAN024A3U; Start 12; Stop 36
caatgttctattgaacgctttcaac

SEQ ID NO: 256684 - DNA, 25 bp, Artificial
  probe
  misc_feature (1)..(25): SEQ ID NO: 139; WAN024A3U; Start 19; Stop 43
ctattgaacgctttcaactcttgta

SEQ ID NO: 256685 - DNA, 25 bp, Artificial
  probe
  misc_feature (1)..(25): SEQ ID NO: 139; WAN024A3U; Start 22; Stop 46
ttgaacgctttcaactcttgtataa

SEQ ID NO: 256686 - DNA, 25 bp, Artificial
  probe
  misc_feature (1)..(25): SEQ ID NO: 139; WAN024A3U; Start 18; Stop 42
tctattgaacgctttcaactcttgt

SEQ ID NO: 256687 - DNA, 25 bp, Artificial
  probe
  misc_feature (1)..(25): SEQ ID NO: 139; WAN024A3U; Start 15; Stop 39
tgttctattgaacgctttcaactct

SEQ ID NO: 256688 - DNA, 25 bp, Artificial
  probe
  misc_feature (1)..(25): SEQ ID NO: 139; WAN024A3U; Start 21; Stop 45
attgaacgctttcaactcttgtata

SEQ ID NO: 256689 - DNA, 25 bp, Artificial
  probe
  misc_feature (1)..(25): SEQ ID NO: 139; WAN024A3U; Start 20; Stop 44
tattgaacgctttcaactcttgtat

SEQ ID NO: 256690 - DNA, 25 bp, Artificial
  probe
  misc_feature (1)..(25): SEQ ID NO: 139; WAN024A3U; Start 11; Stop 35
gcaatgttctattgaacgctttcaa

SEQ ID NO: 256691 - DNA, 25 bp, Artificial
  probe
  misc_feature (1)..(25): SEQ ID NO: 139; WAN024A3U; Start 7; Stop 31
aaaagcaatgttctattgaacgctt

SEQ ID NO: 256692 - DNA, 25 bp, Artificial
  probe
  misc_feature (1)..(25): SEQ ID NO: 139; WAN024A3U; Start 33; Stop 57
caactcttgtataaatggaagaaaa

SEQ ID NO: 256693 - DNA, 25 bp, Artificial
  probe
  misc_feature (1)..(25): SEQ ID NO: 140; WAN0249KH; Start 26; Stop 50
aagtaagtcctacagttcaactaaa

SEQ ID NO: 256694 - DNA, 25 bp, Artificial
  probe
  misc_feature (1)..(25): SEQ ID NO: 140; WAN0249KH; Start 25; Stop 49
aaagtaagtcctacagttcaactaa

SEQ ID NO: 256695 - DNA, 25 bp, Artificial
  probe
  misc_feature (1)..(25): SEQ ID NO: 140; WAN0249KH; Start 2; Stop 26
aataaaatttggagccctctgaaaa

SEQ ID NO: 256696 - DNA, 25 bp, Artificial
  probe
  misc_feature (1)..(25): SEQ ID NO: 140; WAN0249KH; Start 24; Stop 48
aaaagtaagtcctacagttcaacta

SEQ ID NO: 256697 - DNA, 25 bp, Artificial
  probe
  misc_feature (1)..(25): SEQ ID NO: 140; WAN0249KH; Start 1; Stop 25
aaataaaatttggagccctctgaaa

SEQ ID NO: 256698 - DNA, 25 bp, Artificial
  probe
  misc_feature (1)..(25): SEQ ID NO: 141; WAN024A47; Start 105; Stop 129
aaaggagccatcagttgatttcaag

SEQ ID NO: 256699 - DNA, 25 bp, Artificial
  probe
  misc_feature (1)..(25): SEQ ID NO: 141; WAN024A47; Start 38; Stop 62
acgatatccaagttacttgtcaagt

SEQ ID NO: 256700 - DNA, 25 bp, Artificial
  probe
  misc_feature (1)..(25): SEQ ID NO: 141; WAN024A47; Start 39; Stop 63
cgatatccaagttacttgtcaagtg

SEQ ID NO: 256701 - DNA, 25 bp, Artificial
  probe
  misc_feature (1)..(25): SEQ ID NO: 141; WAN024A47; Start 37; Stop 61
aacgatatccaagttacttgtcaag

SEQ ID NO: 256702 - DNA, 25 bp, Artificial
  probe
  misc_feature (1)..(25): SEQ ID NO: 141; WAN024A47; Start 40; Stop 64
gatatccaagttacttgtcaagtgt

SEQ ID NO: 256703 - DNA, 25 bp, Artificial
  probe
  misc_feature (1)..(25): SEQ ID NO: 141; WAN024A47; Start 104; Stop 128
aaaaggagccatcagttgatttcaa

SEQ ID NO: 256704 - DNA, 25 bp, Artificial
  probe
  misc_feature (1)..(25): SEQ ID NO: 141; WAN024A47; Start 41; Stop 65
atatccaagttacttgtcaagtgtt

SEQ ID NO: 256705 - DNA, 25 bp, Artificial
  probe
  misc_feature (1)..(25): SEQ ID NO: 141; WAN024A47; Start 106; Stop 130
aaggagccatcagttgatttcaagc

SEQ ID NO: 256706 - DNA, 25 bp, Artificial
  probe
  misc_feature (1)..(25): SEQ ID NO: 141; WAN024A47; Start 36; Stop 60
taacgatatccaagttacttgtcaa

SEQ ID NO: 256707 - DNA, 25 bp, Artificial
  probe
  misc_feature (1)..(25): SEQ ID NO: 141; WAN024A47; Start 35; Stop 59
ataacgatatccaagttacttgtca

SEQ ID NO: 256708 - DNA, 25 bp, Artificial
  probe
  misc_feature (1)..(25): SEQ ID NO: 141; WAN024A47; Start 42; Stop 66
tatccaagttacttgtcaagtgttt

SEQ ID NO: 256709 - DNA, 25 bp, Artificial
  probe
  misc_feature (1)..(25): SEQ ID NO: 141; WAN024A47; Start 34; Stop 58
tataacgatatccaagttacttgtc

SEQ ID NO: 256710 - DNA, 25 bp, Artificial
  probe
  misc_feature (1)..(25): SEQ ID NO: 141; WAN024A47; Start 33; Stop 57
ttataacgatatccaagttacttgt

SEQ ID NO: 256711 - DNA, 25 bp, Artificial
  probe
  misc_feature (1)..(25): SEQ ID NO: 141; WAN024A47; Start 107; Stop 131
aggagccatcagttgatttcaagct

SEQ ID NO: 256712 - DNA, 25 bp, Artificial
  probe
  misc_feature (1)..(25): SEQ ID NO: 141; WAN024A47; Start 43; Stop 67
atccaagttacttgtcaagtgtttt

SEQ ID NO: 256713 - DNA, 25 bp, Artificial
  probe
  misc_feature (1)..(25): SEQ ID NO: 141; WAN024A47; Start 5; Stop 29
aaacaacctctctgttaattttgta

SEQ ID NO: 256714 - DNA, 25 bp, Artificial
  probe
  misc_feature (1)..(25): SEQ ID NO: 141; WAN024A47; Start 4; Stop 28
taaacaacctctctgttaattttgt

SEQ ID NO: 256715 - DNA, 25 bp, Artificial
  probe
  misc_feature (1)..(25): SEQ ID NO: 141; WAN024A47; Start 8; Stop 32
caacctctctgttaattttgtataa

SEQ ID NO: 256716 - DNA, 25 bp, Artificial
  probe
  misc_feature (1)..(25): SEQ ID NO: 141; WAN024A47; Start 6; Stop 30
aacaacctctctgttaattttgtat

SEQ ID NO: 256717 - DNA, 25 bp, Artificial
  probe
  misc_feature (1)..(25): SEQ ID NO: 141; WAN024A47; Start 1; Stop 25
aaataaacaacctctctgttaattt

SEQ ID NO: 256718 - DNA, 25 bp, Artificial
  probe
  misc_feature (1)..(25): SEQ ID NO: 141; WAN024A47; Start 7; Stop 31
acaacctctctgttaattttgtata

SEQ ID NO: 256719 - DNA, 25 bp, Artificial
  probe
  misc_feature (1)..(25): SEQ ID NO: 141; WAN024A47; Start 3; Stop 27
ataaacaacctctctgttaattttg

SEQ ID NO: 256720 - DNA, 25 bp, Artificial
  probe
  misc_feature (1)..(25): SEQ ID NO: 141; WAN024A47; Start 2; Stop 26
aataaacaacctctctgttaatttt

SEQ ID NO: 256721 - DNA, 25 bp, Artificial
  probe
  misc_feature (1)..(25): SEQ ID NO: 142; WAN024AOX; Start 87; Stop 111
ttttaagaggaaagaaaggggaata

SEQ ID NO: 256722 - DNA, 25 bp, Artificial
  probe
  misc_feature (1)..(25): SEQ ID NO: 143; WAN024ABL; Start 114; Stop 138
ctagactagggactaagaggcatct

SEQ ID NO: 256723 - DNA, 25 bp, Artificial
  probe
  misc_feature (1)..(25): SEQ ID NO: 143; WAN024ABL; Start 224; Stop 248
cctatcgactcatcgcatattctat

SEQ ID NO: 256724 - DNA, 25 bp, Artificial
  probe
  misc_feature (1)..(25): SEQ ID NO: 143; WAN024ABL; Start 221; Stop 245
ctacctatcgactcatcgcatattc

SEQ ID NO: 256725 - DNA, 25 bp, Artificial
  probe
  misc_feature (1)..(25): SEQ ID NO: 143; WAN024ABL; Start 223; Stop 247
acctatcgactcatcgcatattcta

SEQ ID NO: 256726 - DNA, 25 bp, Artificial
  probe
  misc_feature (1)..(25): SEQ ID NO: 143; WAN024ABL; Start 222; Stop 246
tacctatcgactcatcgcatattct

SEQ ID NO: 256727 - DNA, 25 bp, Artificial
  probe
  misc_feature (1)..(25): SEQ ID NO: 143; WAN024ABL; Start 151; Stop 175
caggttcacacaactcatcaaggtc

SEQ ID NO: 256728 - DNA, 25 bp, Artificial
  probe
  misc_feature (1)..(25): SEQ ID NO: 143; WAN024ABL; Start 220; Stop 244
actacctatcgactcatcgcatatt

SEQ ID NO: 256729 - DNA, 25 bp, Artificial
  probe
  misc_feature (1)..(25): SEQ ID NO: 143; WAN024ABL; Start 126; Stop 150
ctaagaggcatcttcatgtgatgag

SEQ ID NO: 256730 - DNA, 25 bp, Artificial
  probe
  misc_feature (1)..(25): SEQ ID NO: 143; WAN024ABL; Start 123; Stop 147
ggactaagaggcatcttcatgtgat

SEQ ID NO: 256731 - DNA, 25 bp, Artificial
  probe
  misc_feature (1)..(25): SEQ ID NO: 143; WAN024ABL; Start 314; Stop 338
cgtattcaagagtttccctatacat

SEQ ID NO: 256732 - DNA, 25 bp, Artificial
  probe
  misc_feature (1)..(25): SEQ ID NO: 143; WAN024ABL; Start 124; Stop 148
gactaagaggcatcttcatgtgatg

SEQ ID NO: 256733 - DNA, 25 bp, Artificial
  probe
  misc_feature (1)..(25): SEQ ID NO: 143; WAN024ABL; Start 219; Stop 243
gactacctatcgactcatcgcatat

SEQ ID NO: 256734 - DNA, 25 bp, Artificial
  probe
  misc_feature (1)..(25): SEQ ID NO: 143; WAN024ABL; Start 230; Stop 254
gactcatcgcatattctatattact

SEQ ID NO: 256735 - DNA, 25 bp, Artificial
  probe
  misc_feature (1)..(25): SEQ ID NO: 143; WAN024ABL; Start 125; Stop 149
actaagaggcatcttcatgtgatga

SEQ ID NO: 256736 - DNA, 25 bp, Artificial
  probe
  misc_feature (1)..(25): SEQ ID NO: 143; WAN024ABL; Start 318; Stop 342
ttcaagagtttccctatacatatca

SEQ ID NO: 256737 - DNA, 25 bp, Artificial
  probe
  misc_feature (1)..(25): SEQ ID NO: 143; WAN024ABL; Start 229; Stop 253
cgactcatcgcatattctatattac

SEQ ID NO: 256738 - DNA, 25 bp, Artificial
  probe
  misc_feature (1)..(25): SEQ ID NO: 143; WAN024ABL; Start 148; Stop 172
gagcaggttcacacaactcatcaag

SEQ ID NO: 256739 - DNA, 25 bp, Artificial
  probe
  misc_feature (1)..(25): SEQ ID NO: 143; WAN024ABL; Start 218; Stop 242
agactacctatcgactcatcgcata

SEQ ID NO: 256740 - DNA, 25 bp, Artificial
  probe
  misc_feature (1)..(25): SEQ ID NO: 143; WAN024ABL; Start 227; Stop 251
atcgactcatcgcatattctatatt

SEQ ID NO: 256741 - DNA, 25 bp, Artificial
  probe
  misc_feature (1)..(25): SEQ ID NO: 143; WAN024ABL; Start 113; Stop 137
gctagactagggactaagaggcatc

SEQ ID NO: 256742 - DNA, 25 bp, Artificial
  probe
  misc_feature (1)..(25): SEQ ID NO: 143; WAN024ABL; Start 225; Stop 249
ctatcgactcatcgcatattctata

SEQ ID NO: 256743 - DNA, 25 bp, Artificial
  probe
  misc_feature (1)..(25): SEQ ID NO: 143; WAN024ABL; Start 115; Stop 139
tagactagggactaagaggcatctt

SEQ ID NO: 256744 - DNA, 25 bp, Artificial
  probe
  misc_feature (1)..(25): SEQ ID NO: 143; WAN024ABL; Start 213; Stop 237
tccgaagactacctatcgactcatc

SEQ ID NO: 256745 - DNA, 25 bp, Artificial
  probe
  misc_feature (1)..(25): SEQ ID NO: 143; WAN024ABL; Start 127; Stop 151
taagaggcatcttcatgtgatgagc

SEQ ID NO: 256746 - DNA, 25 bp, Artificial
  probe
  misc_feature (1)..(25): SEQ ID NO: 143; WAN024ABL; Start 228; Stop 252
tcgactcatcgcatattctatatta

SEQ ID NO: 256747 - DNA, 25 bp, Artificial
  probe
  misc_feature (1)..(25): SEQ ID NO: 143; WAN024ABL; Start 152; Stop 176
aggttcacacaactcatcaaggtcc

SEQ ID NO: 256748 - DNA, 25 bp, Artificial
  probe
  misc_feature (1)..(25): SEQ ID NO: 143; WAN024ABL; Start 217; Stop 241
aagactacctatcgactcatcgcat

SEQ ID NO: 256749 - DNA, 25 bp, Artificial
  probe
  misc_feature (1)..(25): SEQ ID NO: 143; WAN024ABL; Start 212; Stop 236
gtccgaagactacctatcgactcat

SEQ ID NO: 256750 - DNA, 25 bp, Artificial
  probe
  misc_feature (1)..(25): SEQ ID NO: 143; WAN024ABL; Start 118; Stop 142
actagggactaagaggcatcttcat

SEQ ID NO: 256751 - DNA, 25 bp, Artificial
  probe
  misc_feature (1)..(25): SEQ ID NO: 143; WAN024ABL; Start 119; Stop 143
ctagggactaagaggcatcttcatg

SEQ ID NO: 256752 - DNA, 25 bp, Artificial
  probe
  misc_feature (1)..(25): SEQ ID NO: 143; WAN024ABL; Start 226; Stop 250
tatcgactcatcgcatattctatat

SEQ ID NO: 256753 - DNA, 25 bp, Artificial
  probe
  misc_feature (1)..(25): SEQ ID NO: 143; WAN024ABL; Start 134; Stop 158
catcttcatgtgatgagcaggttca

SEQ ID NO: 256754 - DNA, 25 bp, Artificial
  probe
  misc_feature (1)..(25): SEQ ID NO: 143; WAN024ABL; Start 116; Stop 140
agactagggactaagaggcatcttc

SEQ ID NO: 256755 - DNA, 25 bp, Artificial
  probe
  misc_feature (1)..(25): SEQ ID NO: 144; WAN0249QG; Start 50; Stop 74
actattttcaacaccaaactaaaga

SEQ ID NO: 256756 - DNA, 25 bp, Artificial
  probe
  misc_feature (1)..(25): SEQ ID NO: 144; WAN0249QG; Start 28; Stop 52
aaagaagtcaaaagtctgttaaact

SEQ ID NO: 256757 - DNA, 25 bp, Artificial
  probe
  misc_feature (1)..(25): SEQ ID NO: 144; WAN0249QG; Start 93; Stop 117
cgattttcactagaggaaatggatt

SEQ ID NO: 256758 - DNA, 25 bp, Artificial
  probe
  misc_feature (1)..(25): SEQ ID NO: 144; WAN0249QG; Start 49; Stop 73
aactattttcaacaccaaactaaag

SEQ ID NO: 256759 - DNA, 25 bp, Artificial
  probe
  misc_feature (1)..(25): SEQ ID NO: 144; WAN0249QG; Start 45; Stop 69
gttaaactattttcaacaccaaact

SEQ ID NO: 256760 - DNA, 25 bp, Artificial
  probe
  misc_feature (1)..(25): SEQ ID NO: 144; WAN0249QG; Start 27; Stop 51
aaaagaagtcaaaagtctgttaaac

SEQ ID NO: 256761 - DNA, 25 bp, Artificial
  probe
  misc_feature (1)..(25): SEQ ID NO: 144; WAN0249QG; Start 100; Stop 124
cactagaggaaatggattttattca

SEQ ID NO: 256762 - DNA, 25 bp, Artificial
  probe
  misc_feature (1)..(25): SEQ ID NO: 144; WAN0249QG; Start 92; Stop 116
tcgattttcactagaggaaatggat

SEQ ID NO: 256763 - DNA, 25 bp, Artificial
  probe
  misc_feature (1)..(25): SEQ ID NO: 144; WAN0249QG; Start 91; Stop 115
ttcgattttcactagaggaaatgga

SEQ ID NO: 256764 - DNA, 25 bp, Artificial
  probe
  misc_feature (1)..(25): SEQ ID NO: 144; WAN0249QG; Start 102; Stop 126
ctagaggaaatggattttattcagt

SEQ ID NO: 256765 - DNA, 25 bp, Artificial
  probe
  misc_feature (1)..(25): SEQ ID NO: 144; WAN0249QG; Start 101; Stop 125
actagaggaaatggattttattcag

SEQ ID NO: 256766 - DNA, 25 bp, Artificial
  probe
  misc_feature (1)..(25): SEQ ID NO: 144; WAN0249QG; Start 99; Stop 123
tcactagaggaaatggattttattc

SEQ ID NO: 256767 - DNA, 25 bp, Artificial
  probe
  misc_feature (1)..(25): SEQ ID NO: 144; WAN0249QG; Start 29; Stop 53
aagaagtcaaaagtctgttaaacta

SEQ ID NO: 256768 - DNA, 25 bp, Artificial
  probe
  misc_feature (1)..(25): SEQ ID NO: 144; WAN0249QG; Start 90; Stop 114
tttcgattttcactagaggaaatgg

SEQ ID NO: 256769 - DNA, 25 bp, Artificial
  probe
  misc_feature (1)..(25): SEQ ID NO: 144; WAN0249QG; Start 30; Stop 54
agaagtcaaaagtctgttaaactat

SEQ ID NO: 256770 - DNA, 25 bp, Artificial
  probe
  misc_feature (1)..(25): SEQ ID NO: 144; WAN0249QG; Start 48; Stop 72
aaactattttcaacaccaaactaaa

SEQ ID NO: 256771 - DNA, 25 bp, Artificial
  probe
  misc_feature (1)..(25): SEQ ID NO: 144; WAN0249QG; Start 104; Stop 128
agaggaaatggattttattcagtaa

SEQ ID NO: 256772 - DNA, 25 bp, Artificial
  probe
  misc_feature (1)..(25): SEQ ID NO: 144; WAN0249QG; Start 89; Stop 113
ttttcgattttcactagaggaaatg

SEQ ID NO: 256773 - DNA, 25 bp, Artificial
  probe
  misc_feature (1)..(25): SEQ ID NO: 144; WAN0249QG; Start 41; Stop 65
gtctgttaaactattttcaacacca

SEQ ID NO: 256774 - DNA, 25 bp, Artificial
  probe
  misc_feature (1)..(25): SEQ ID NO: 144; WAN0249QG; Start 31; Stop 55
gaagtcaaaagtctgttaaactatt

SEQ ID NO: 256775 - DNA, 25 bp, Artificial
  probe
  misc_feature (1)..(25): SEQ ID NO: 144; WAN0249QG; Start 40; Stop 64
agtctgttaaactattttcaacacc

SEQ ID NO: 256776 - DNA, 25 bp, Artificial
  probe
  misc_feature (1)..(25): SEQ ID NO: 144; WAN0249QG; Start 22; Stop 46
catataaaagaagtcaaaagtctgt

SEQ ID NO: 256777 - DNA, 25 bp, Artificial
  probe
  misc_feature (1)..(25): SEQ ID NO: 144; WAN0249QG; Start 105; Stop 129
gaggaaatggattttattcagtaaa

SEQ ID NO: 256778 - DNA, 25 bp, Artificial
  probe
  misc_feature (1)..(25): SEQ ID NO: 144; WAN0249QG; Start 47; Stop 71
taaactattttcaacaccaaactaa

SEQ ID NO: 256779 - DNA, 25 bp, Artificial
  probe
  misc_feature (1)..(25): SEQ ID NO: 144; WAN0249QG; Start 46; Stop 70
ttaaactattttcaacaccaaacta

SEQ ID NO: 256780 - DNA, 25 bp, Artificial
  probe
  misc_feature (1)..(25): SEQ ID NO: 144; WAN0249QG; Start 21; Stop 45
tcatataaaagaagtcaaaagtctg

SEQ ID NO: 256781 - DNA, 25 bp, Artificial
  probe
  misc_feature (1)..(25): SEQ ID NO: 144; WAN0249QG; Start 103; Stop 127
tagaggaaatggattttattcagta

SEQ ID NO: 256782 - DNA, 25 bp, Artificial
  probe
  misc_feature (1)..(25): SEQ ID NO: 144; WAN0249QG; Start 42; Stop 66
tctgttaaactattttcaacaccaa

SEQ ID NO: 256783 - DNA, 25 bp, Artificial
  probe
  misc_feature (1)..(25): SEQ ID NO: 144; WAN0249QG; Start 26; Stop 50
taaaagaagtcaaaagtctgttaaa

SEQ ID NO: 256784 - DNA, 25 bp, Artificial
  probe
  misc_feature (1)..(25): SEQ ID NO: 144; WAN0249QG; Start 44; Stop 68
tgttaaactattttcaacaccaaac

SEQ ID NO: 256785 - DNA, 25 bp, Artificial
  probe
  misc_feature (1)..(25): SEQ ID NO: 144; WAN0249QG; Start 32; Stop 56
aagtcaaaagtctgttaaactattt

SEQ ID NO: 256786 - DNA, 25 bp, Artificial
  probe
  misc_feature (1)..(25): SEQ ID NO: 144; WAN0249QG; Start 25; Stop 49
ataaaagaagtcaaaagtctgttaa

SEQ ID NO: 256787 - DNA, 25 bp, Artificial
  probe
  misc_feature (1)..(25): SEQ ID NO: 144; WAN0249QG; Start 43; Stop 67
ctgttaaactattttcaacaccaaa

SEQ ID NO: 256788 - DNA, 25 bp, Artificial
  probe
  misc_feature (1)..(25): SEQ ID NO: 145; WAN0249S2; Start 17; Stop 41
atttcaacggataaagtcgggaata

SEQ ID NO: 256789 - DNA, 25 bp, Artificial
  probe
  misc_feature (1)..(25): SEQ ID NO: 145; WAN0249S2; Start 16; Stop 40
tatttcaacggataaagtcgggaat

SEQ ID NO: 256790 - DNA, 25 bp, Artificial
  probe
  misc_feature (1)..(25): SEQ ID NO: 145; WAN0249S2; Start 15; Stop 39
atatttcaacggataaagtcgggaa

SEQ ID NO: 256791 - DNA, 25 bp, Artificial
  probe
  misc_feature (1)..(25): SEQ ID NO: 145; WAN0249S2; Start 18; Stop 42
tttcaacggataaagtcgggaataa

SEQ ID NO: 256792 - DNA, 25 bp, Artificial
  probe
  misc_feature (1)..(25): SEQ ID NO: 145; WAN0249S2; Start 19; Stop 43
ttcaacggataaagtcgggaataac

SEQ ID NO: 256793 - DNA, 25 bp, Artificial
  probe
  misc_feature (1)..(25): SEQ ID NO: 145; WAN0249S2; Start 24; Stop 48
cggataaagtcgggaataactcaat

SEQ ID NO: 256794 - DNA, 25 bp, Artificial
  probe
  misc_feature (1)..(25): SEQ ID NO: 145; WAN0249S2; Start 132; Stop 156
gcacaaagacttcttacacaaactt

SEQ ID NO: 256795 - DNA, 25 bp, Artificial
  probe
  misc_feature (1)..(25): SEQ ID NO: 145; WAN0249S2; Start 130; Stop 154
aagcacaaagacttcttacacaaac

SEQ ID NO: 256796 - DNA, 25 bp, Artificial
  probe
  misc_feature (1)..(25): SEQ ID NO: 145; WAN0249S2; Start 131; Stop 155
agcacaaagacttcttacacaaact

SEQ ID NO: 256797 - DNA, 25 bp, Artificial
  probe
  misc_feature (1)..(25): SEQ ID NO: 145; WAN0249S2; Start 25; Stop 49
ggataaagtcgggaataactcaatt

SEQ ID NO: 256798 - DNA, 25 bp, Artificial
  probe
  misc_feature (1)..(25): SEQ ID NO: 145; WAN0249S2; Start 21; Stop 45
caacggataaagtcgggaataactc

SEQ ID NO: 256799 - DNA, 25 bp, Artificial
  probe
  misc_feature (1)..(25): SEQ ID NO: 145; WAN0249S2; Start 14; Stop 38
aatatttcaacggataaagtcggga

SEQ ID NO: 256800 - DNA, 25 bp, Artificial
  probe
  misc_feature (1)..(25): SEQ ID NO: 145; WAN0249S2; Start 23; Stop 47
acggataaagtcgggaataactcaa

SEQ ID NO: 256801 - DNA, 25 bp, Artificial
  probe
  misc_feature (1)..(25): SEQ ID NO: 145; WAN0249S2; Start 22; Stop 46
aacggataaagtcgggaataactca

SEQ ID NO: 256802 - DNA, 25 bp, Artificial
  probe
  misc_feature (1)..(25): SEQ ID NO: 145; WAN0249S2; Start 20; Stop 44
tcaacggataaagtcgggaataact

SEQ ID NO: 256803 - DNA, 25 bp, Artificial
  probe
  misc_feature (1)..(25): SEQ ID NO: 145; WAN0249S2; Start 13; Stop 37
taatatttcaacggataaagtcggg

SEQ ID NO: 256804 - DNA, 25 bp, Artificial
  probe
  misc_feature (1)..(25): SEQ ID NO: 145; WAN0249S2; Start 129; Stop 153
taagcacaaagacttcttacacaaa

SEQ ID NO: 256805 - DNA, 25 bp, Artificial
  probe
  misc_feature (1)..(25): SEQ ID NO: 145; WAN0249S2; Start 128; Stop 152
ttaagcacaaagacttcttacacaa

SEQ ID NO: 256806 - DNA, 25 bp, Artificial
  probe
  misc_feature (1)..(25): SEQ ID NO: 145; WAN0249S2; Start 127; Stop 151
tttaagcacaaagacttcttacaca

SEQ ID NO: 256807 - DNA, 25 bp, Artificial
  probe
  misc_feature (1)..(25): SEQ ID NO: 145; WAN0249S2; Start 28; Stop 52
taaagtcgggaataactcaatttga

SEQ ID NO: 256808 - DNA, 25 bp, Artificial
  probe
  misc_feature (1)..(25): SEQ ID NO: 145; WAN0249S2; Start 27; Stop 51
ataaagtcgggaataactcaatttg

SEQ ID NO: 256809 - DNA, 25 bp, Artificial
  probe
  misc_feature (1)..(25): SEQ ID NO: 145; WAN0249S2; Start 133; Stop 157
cacaaagacttcttacacaaactta

SEQ ID NO: 256810 - DNA, 25 bp, Artificial
  probe
  misc_feature (1)..(25): SEQ ID NO: 145; WAN0249S2; Start 26; Stop 50
gataaagtcgggaataactcaattt

SEQ ID NO: 256811 - DNA, 25 bp, Artificial
  probe
  misc_feature (1)..(25): SEQ ID NO: 145; WAN0249S2; Start 12; Stop 36
ataatatttcaacggataaagtcgg

SEQ ID NO: 256812 - DNA, 25 bp, Artificial
  probe
  misc_feature (1)..(25): SEQ ID NO: 145; WAN0249S2; Start 139; Stop 163
gacttcttacacaaacttatctaca

SEQ ID NO: 256813 - DNA, 25 bp, Artificial
  probe
  misc_feature (1)..(25): SEQ ID NO: 145; WAN0249S2; Start 70; Stop 94
tcttcctataacaaaacgcataaca

SEQ ID NO: 256814 - DNA, 25 bp, Artificial
  probe
  misc_feature (1)..(25): SEQ ID NO: 145; WAN0249S2; Start 134; Stop 158
acaaagacttcttacacaaacttat

SEQ ID NO: 256815 - DNA, 25 bp, Artificial
  probe
  misc_feature (1)..(25): SEQ ID NO: 145; WAN0249S2; Start 73; Stop 97
tcctataacaaaacgcataacatct

SEQ ID NO: 256816 - DNA, 25 bp, Artificial
  probe
  misc_feature (1)..(25): SEQ ID NO: 145; WAN0249S2; Start 80; Stop 104
acaaaacgcataacatctaggattt

SEQ ID NO: 256817 - DNA, 25 bp, Artificial
  probe
  misc_feature (1)..(25): SEQ ID NO: 145; WAN0249S2; Start 79; Stop 103
aacaaaacgcataacatctaggatt

SEQ ID NO: 256818 - DNA, 25 bp, Artificial
  probe
  misc_feature (1)..(25): SEQ ID NO: 145; WAN0249S2; Start 77; Stop 101
ataacaaaacgcataacatctagga

SEQ ID NO: 256819 - DNA, 25 bp, Artificial
  probe
  misc_feature (1)..(25): SEQ ID NO: 145; WAN0249S2; Start 78; Stop 102
taacaaaacgcataacatctaggat

SEQ ID NO: 256820 - DNA, 25 bp, Artificial
  probe
  misc_feature (1)..(25): SEQ ID NO: 145; WAN0249S2; Start 138; Stop 162
agacttcttacacaaacttatctac

SEQ ID NO: 256821 - DNA, 25 bp, Artificial
  probe
  misc_feature (1)..(25): SEQ ID NO: 146; WAN024AIQ; Start 36; Stop 60
tgtagcacttaaaatcttctttgga

SEQ ID NO: 256822 - DNA, 25 bp, Artificial
  probe
  misc_feature (1)..(25): SEQ ID NO: 146; WAN024AIQ; Start 8; Stop 32
acctcccatctagaaataatacagt

SEQ ID NO: 256823 - DNA, 25 bp, Artificial
  probe
  misc_feature (1)..(25): SEQ ID NO: 146; WAN024AIQ; Start 35; Stop 59
ttgtagcacttaaaatcttctttgg

SEQ ID NO: 256824 - DNA, 25 bp, Artificial
  probe
  misc_feature (1)..(25): SEQ ID NO: 146; WAN024AIQ; Start 37; Stop 61
gtagcacttaaaatcttctttggat

SEQ ID NO: 256825 - DNA, 25 bp, Artificial
  probe
  misc_feature (1)..(25): SEQ ID NO: 146; WAN024AIQ; Start 9; Stop 33
cctcccatctagaaataatacagtt

SEQ ID NO: 256826 - DNA, 25 bp, Artificial
  probe
  misc_feature (1)..(25): SEQ ID NO: 146; WAN024AIQ; Start 7; Stop 31
aacctcccatctagaaataatacag

SEQ ID NO: 256827 - DNA, 25 bp, Artificial
  probe
  misc_feature (1)..(25): SEQ ID NO: 146; WAN024AIQ; Start 6; Stop 30
gaacctcccatctagaaataataca

SEQ ID NO: 256828 - DNA, 25 bp, Artificial
  probe
  misc_feature (1)..(25): SEQ ID NO: 146; WAN024AIQ; Start 5; Stop 29
agaacctcccatctagaaataatac

SEQ ID NO: 256829 - DNA, 25 bp, Artificial
  probe
  misc_feature (1)..(25): SEQ ID NO: 146; WAN024AIQ; Start 39; Stop 63
agcacttaaaatcttctttggataa

SEQ ID NO: 256830 - DNA, 25 bp, Artificial
  probe
  misc_feature (1)..(25): SEQ ID NO: 146; WAN024AIQ; Start 34; Stop 58
attgtagcacttaaaatcttctttg

SEQ ID NO: 256831 - DNA, 25 bp, Artificial
  probe
  misc_feature (1)..(25): SEQ ID NO: 146; WAN024AIQ; Start 28; Stop 52
acagttattgtagcacttaaaatct

SEQ ID NO: 256832 - DNA, 25 bp, Artificial
  probe
  misc_feature (1)..(25): SEQ ID NO: 146; WAN024AIQ; Start 38; Stop 62
tagcacttaaaatcttctttggata

SEQ ID NO: 256833 - DNA, 25 bp, Artificial
  probe
  misc_feature (1)..(25): SEQ ID NO: 146; WAN024AIQ; Start 40; Stop 64
gcacttaaaatcttctttggataat

SEQ ID NO: 256834 - DNA, 25 bp, Artificial
  probe
  misc_feature (1)..(25): SEQ ID NO: 146; WAN024AIQ; Start 2; Stop 26
aatagaacctcccatctagaaataa

SEQ ID NO: 256835 - DNA, 25 bp, Artificial
  probe
  misc_feature (1)..(25): SEQ ID NO: 146; WAN024AIQ; Start 1; Stop 25
aaatagaacctcccatctagaaata

SEQ ID NO: 256836 - DNA, 25 bp, Artificial
  probe
  misc_feature (1)..(25): SEQ ID NO: 146; WAN024AIQ; Start 3; Stop 27
atagaacctcccatctagaaataat

SEQ ID NO: 256837 - DNA, 25 bp, Artificial
  probe
  misc_feature (1)..(25): SEQ ID NO: 146; WAN024AIQ; Start 31; Stop 55
gttattgtagcacttaaaatcttct

SEQ ID NO: 256838 - DNA, 25 bp, Artificial
  probe
  misc_feature (1)..(25): SEQ ID NO: 146; WAN024AIQ; Start 29; Stop 53
cagttattgtagcacttaaaatctt

SEQ ID NO: 256839 - DNA, 25 bp, Artificial
  probe
  misc_feature (1)..(25): SEQ ID NO: 146; WAN024AIQ; Start 30; Stop 54
agttattgtagcacttaaaatcttc

SEQ ID NO: 256840 - DNA, 25 bp, Artificial
  probe
  misc_feature (1)..(25): SEQ ID NO: 146; WAN024AIQ; Start 10; Stop 34
ctcccatctagaaataatacagtta

SEQ ID NO: 256841 - DNA, 25 bp, Artificial
  probe
  misc_feature (1)..(25): SEQ ID NO: 146; WAN024AIQ; Start 20; Stop 44
gaaataatacagttattgtagcact

SEQ ID NO: 256842 - DNA, 25 bp, Artificial
  probe
  misc_feature (1)..(25): SEQ ID NO: 146; WAN024AIQ; Start 19; Stop 43
agaaataatacagttattgtagcac

SEQ ID NO: 256843 - DNA, 25 bp, Artificial
  probe
  misc_feature (1)..(25): SEQ ID NO: 146; WAN024AIQ; Start 4; Stop 28
tagaacctcccatctagaaataata

SEQ ID NO: 256844 - DNA, 25 bp, Artificial
  probe
  misc_feature (1)..(25): SEQ ID NO: 146; WAN024AIQ; Start 33; Stop 57
tattgtagcacttaaaatcttcttt

SEQ ID NO: 256845 - DNA, 25 bp, Artificial
  probe
  misc_feature (1)..(25): SEQ ID NO: 146; WAN024AIQ; Start 32; Stop 56
ttattgtagcacttaaaatcttctt

SEQ ID NO: 256846 - DNA, 25 bp, Artificial
  probe
  misc_feature (1)..(25): SEQ ID NO: 146; WAN024AIQ; Start 27; Stop 51
tacagttattgtagcacttaaaatc

SEQ ID NO: 256847 - DNA, 25 bp, Artificial
  probe
  misc_feature (1)..(25): SEQ ID NO: 146; WAN024AIQ; Start 25; Stop 49
aatacagttattgtagcacttaaaa

SEQ ID NO: 256848 - DNA, 25 bp, Artificial
  probe
  misc_feature (1)..(25): SEQ ID NO: 147; WAN024AFB; Start 95; Stop 119
aacttctactattcttagctgtgaa

SEQ ID NO: 256849 - DNA, 25 bp, Artificial
  probe
  misc_feature (1)..(25): SEQ ID NO: 147; WAN024AFB; Start 94; Stop 118
taacttctactattcttagctgtga

SEQ ID NO: 256850 - DNA, 25 bp, Artificial
  probe
  misc_feature (1)..(25): SEQ ID NO: 147; WAN024AFB; Start 93; Stop 117
ttaacttctactattcttagctgtg

SEQ ID NO: 256851 - DNA, 25 bp, Artificial
  probe
  misc_feature (1)..(25): SEQ ID NO: 147; WAN024AFB; Start 96; Stop 120
acttctactattcttagctgtgaaa

SEQ ID NO: 256852 - DNA, 25 bp, Artificial
  probe
  misc_feature (1)..(25): SEQ ID NO: 147; WAN024AFB; Start 145; Stop 169
ttcagtcttctaatctaaaggccac

SEQ ID NO: 256853 - DNA, 25 bp, Artificial
  probe
  misc_feature (1)..(25): SEQ ID NO: 147; WAN024AFB; Start 144; Stop 168
tttcagtcttctaatctaaaggcca

SEQ ID NO: 256854 - DNA, 25 bp, Artificial
  probe
  misc_feature (1)..(25): SEQ ID NO: 147; WAN024AFB; Start 27; Stop 51
gactatgaaaaccagtggaacttac

SEQ ID NO: 256855 - DNA, 25 bp, Artificial
  probe
  misc_feature (1)..(25): SEQ ID NO: 147; WAN024AFB; Start 26; Stop 50
agactatgaaaaccagtggaactta

SEQ ID NO: 256856 - DNA, 25 bp, Artificial
  probe
  misc_feature (1)..(25): SEQ ID NO: 147; WAN024AFB; Start 25; Stop 49
tagactatgaaaaccagtggaactt

SEQ ID NO: 256857 - DNA, 25 bp, Artificial
  probe
  misc_feature (1)..(25): SEQ ID NO: 147; WAN024AFB; Start 151; Stop 175
cttctaatctaaaggccacttccag

SEQ ID NO: 256858 - DNA, 25 bp, Artificial
  probe
  misc_feature (1)..(25): SEQ ID NO: 147; WAN024AFB; Start 149; Stop 173
gtcttctaatctaaaggccacttcc

SEQ ID NO: 256859 - DNA, 25 bp, Artificial
  probe
  misc_feature (1)..(25): SEQ ID NO: 147; WAN024AFB; Start 24; Stop 48
atagactatgaaaaccagtggaact

SEQ ID NO: 256860 - DNA, 25 bp, Artificial
  probe
  misc_feature (1)..(25): SEQ ID NO: 147; WAN024AFB; Start 154; Stop 178
ctaatctaaaggccacttccagtaa

SEQ ID NO: 256861 - DNA, 25 bp, Artificial
  probe
  misc_feature (1)..(25): SEQ ID NO: 147; WAN024AFB; Start 148; Stop 172
agtcttctaatctaaaggccacttc

SEQ ID NO: 256862 - DNA, 25 bp, Artificial
  probe
  misc_feature (1)..(25): SEQ ID NO: 147; WAN024AFB; Start 28; Stop 52
actatgaaaaccagtggaacttacc

SEQ ID NO: 256863 - DNA, 25 bp, Artificial
  probe
  misc_feature (1)..(25): SEQ ID NO: 147; WAN024AFB; Start 155; Stop 179
taatctaaaggccacttccagtaaa

SEQ ID NO: 256864 - DNA, 25 bp, Artificial
  probe
  misc_feature (1)..(25): SEQ ID NO: 147; WAN024AFB; Start 150; Stop 174
tcttctaatctaaaggccacttcca

SEQ ID NO: 256865 - DNA, 25 bp, Artificial
  probe
  misc_feature (1)..(25): SEQ ID NO: 147; WAN024AFB; Start 147; Stop 171
cagtcttctaatctaaaggccactt

SEQ ID NO: 256866 - DNA, 25 bp, Artificial
  probe
  misc_feature (1)..(25): SEQ ID NO: 147; WAN024AFB; Start 156; Stop 180
aatctaaaggccacttccagtaaag

SEQ ID NO: 256867 - DNA, 25 bp, Artificial
  probe
  misc_feature (1)..(25): SEQ ID NO: 147; WAN024AFB; Start 153; Stop 177
tctaatctaaaggccacttccagta

SEQ ID NO: 256868 - DNA, 25 bp, Artificial
  probe
  misc_feature (1)..(25): SEQ ID NO: 147; WAN024AFB; Start 159; Stop 183
ctaaaggccacttccagtaaagaaa

SEQ ID NO: 256869 - DNA, 25 bp, Artificial
  probe
  misc_feature (1)..(25): SEQ ID NO: 147; WAN024AFB; Start 146; Stop 170
tcagtcttctaatctaaaggccact

SEQ ID NO: 256870 - DNA, 25 bp, Artificial
  probe
  misc_feature (1)..(25): SEQ ID NO: 147; WAN024AFB; Start 23; Stop 47
aatagactatgaaaaccagtggaac

SEQ ID NO: 256871 - DNA, 25 bp, Artificial
  probe
  misc_feature (1)..(25): SEQ ID NO: 147; WAN024AFB; Start 29; Stop 53
ctatgaaaaccagtggaacttaccc

SEQ ID NO: 256872 - DNA, 25 bp, Artificial
  probe
  misc_feature (1)..(25): SEQ ID NO: 147; WAN024AFB; Start 30; Stop 54
tatgaaaaccagtggaacttaccct

SEQ ID NO: 256873 - DNA, 25 bp, Artificial
  probe
  misc_feature (1)..(25): SEQ ID NO: 147; WAN024AFB; Start 157; Stop 181
atctaaaggccacttccagtaaaga

SEQ ID NO: 256874 - DNA, 25 bp, Artificial
  probe
  misc_feature (1)..(25): SEQ ID NO: 147; WAN024AFB; Start 152; Stop 176
ttctaatctaaaggccacttccagt

SEQ ID NO: 256875 - DNA, 25 bp, Artificial
  probe
  misc_feature (1)..(25): SEQ ID NO: 147; WAN024AFB; Start 158; Stop 182
tctaaaggccacttccagtaaagaa

SEQ ID NO: 256876 - DNA, 25 bp, Artificial
  probe
  misc_feature (1)..(25): SEQ ID NO: 147; WAN024AFB; Start 142; Stop 166
attttcagtcttctaatctaaaggc

SEQ ID NO: 256877 - DNA, 25 bp, Artificial
  probe
  misc_feature (1)..(25): SEQ ID NO: 147; WAN024AFB; Start 22; Stop 46
taatagactatgaaaaccagtggaa

SEQ ID NO: 256878 - DNA, 25 bp, Artificial
  probe
  misc_feature (1)..(25): SEQ ID NO: 147; WAN024AFB; Start 21; Stop 45
ttaatagactatgaaaaccagtgga

SEQ ID NO: 256879 - DNA, 25 bp, Artificial
  probe
  misc_feature (1)..(25): SEQ ID NO: 147; WAN024AFB; Start 92; Stop 116
attaacttctactattcttagctgt

SEQ ID NO: 256880 - DNA, 25 bp, Artificial
  probe
  misc_feature (1)..(25): SEQ ID NO: 147; WAN024AFB; Start 31; Stop 55
atgaaaaccagtggaacttaccctg

SEQ ID NO: 256881 - DNA, 25 bp, Artificial
  probe
  misc_feature (1)..(25): SEQ ID NO: 148; WAN024A63; Start 57; Stop 81
tagtagtctgatatgccaatctcac

SEQ ID NO: 256882 - DNA, 25 bp, Artificial
  probe
  misc_feature (1)..(25): SEQ ID NO: 148; WAN024A63; Start 56; Stop 80
ttagtagtctgatatgccaatctca

SEQ ID NO: 256883 - DNA, 25 bp, Artificial
  probe
  misc_feature (1)..(25): SEQ ID NO: 148; WAN024A63; Start 55; Stop 79
tttagtagtctgatatgccaatctc

SEQ ID NO: 256884 - DNA, 25 bp, Artificial
  probe
  misc_feature (1)..(25): SEQ ID NO: 148; WAN024A63; Start 54; Stop 78
ctttagtagtctgatatgccaatct

SEQ ID NO: 256885 - DNA, 25 bp, Artificial
  probe
  misc_feature (1)..(25): SEQ ID NO: 148; WAN024A63; Start 53; Stop 77
actttagtagtctgatatgccaatc

SEQ ID NO: 256886 - DNA, 25 bp, Artificial
  probe
  misc_feature (1)..(25): SEQ ID NO: 148; WAN024A63; Start 1; Stop 25
aaatatcttcctttcccagctaact

SEQ ID NO: 256887 - DNA, 25 bp, Artificial
  probe
  misc_feature (1)..(25): SEQ ID NO: 148; WAN024A63; Start 3; Stop 27
atatcttcctttcccagctaactag

SEQ ID NO: 256888 - DNA, 25 bp, Artificial
  probe
  misc_feature (1)..(25): SEQ ID NO: 148; WAN024A63; Start 2; Stop 26
aatatcttcctttcccagctaacta

SEQ ID NO: 256889 - DNA, 25 bp, Artificial
  probe
  misc_feature (1)..(25): SEQ ID NO: 148; WAN024A63; Start 27; Stop 51
gtcgctaaaatcctaacaaactcaa

SEQ ID NO: 256890 - DNA, 25 bp, Artificial
  probe
  misc_feature (1)..(25): SEQ ID NO: 148; WAN024A63; Start 28; Stop 52
tcgctaaaatcctaacaaactcaat

SEQ ID NO: 256891 - DNA, 25 bp, Artificial
  probe
  misc_feature (1)..(25): SEQ ID NO: 148; WAN024A63; Start 52; Stop 76
tactttagtagtctgatatgccaat

SEQ ID NO: 256892 - DNA, 25 bp, Artificial
  probe
  misc_feature (1)..(25): SEQ ID NO: 148; WAN024A63; Start 51; Stop 75
atactttagtagtctgatatgccaa

SEQ ID NO: 256893 - DNA, 25 bp, Artificial
  probe
  misc_feature (1)..(25): SEQ ID NO: 148; WAN024A63; Start 50; Stop 74
aatactttagtagtctgatatgcca

SEQ ID NO: 256894 - DNA, 25 bp, Artificial
  probe
  misc_feature (1)..(25): SEQ ID NO: 148; WAN024A63; Start 49; Stop 73
caatactttagtagtctgatatgcc

SEQ ID NO: 256895 - DNA, 25 bp, Artificial
  probe
  misc_feature (1)..(25): SEQ ID NO: 148; WAN024A63; Start 4; Stop 28
tatcttcctttcccagctaactagt

SEQ ID NO: 256896 - DNA, 25 bp, Artificial
  probe
  misc_feature (1)..(25): SEQ ID NO: 148; WAN024A63; Start 26; Stop 50
agtcgctaaaatcctaacaaactca

SEQ ID NO: 256897 - DNA, 25 bp, Artificial
  probe
  misc_feature (1)..(25): SEQ ID NO: 148; WAN024A63; Start 25; Stop 49
tagtcgctaaaatcctaacaaactc

SEQ ID NO: 256898 - DNA, 25 bp, Artificial
  probe
  misc_feature (1)..(25): SEQ ID NO: 148; WAN024A63; Start 42; Stop 66
acaaactcaatactttagtagtctg

SEQ ID NO: 256899 - DNA, 25 bp, Artificial
  probe
  misc_feature (1)..(25): SEQ ID NO: 148; WAN024A63; Start 5; Stop 29
atcttcctttcccagctaactagtc

SEQ ID NO: 256900 - DNA, 25 bp, Artificial
  probe
  misc_feature (1)..(25): SEQ ID NO: 148; WAN024A63; Start 24; Stop 48
ctagtcgctaaaatcctaacaaact

SEQ ID NO: 256901 - DNA, 25 bp, Artificial
  probe
  misc_feature (1)..(25): SEQ ID NO: 148; WAN024A63; Start 29; Stop 53
cgctaaaatcctaacaaactcaata

SEQ ID NO: 256902 - DNA, 25 bp, Artificial
  probe
  misc_feature (1)..(25): SEQ ID NO: 148; WAN024A63; Start 43; Stop 67
caaactcaatactttagtagtctga

SEQ ID NO: 256903 - DNA, 25 bp, Artificial
  probe
  misc_feature (1)..(25): SEQ ID NO: 148; WAN024A63; Start 48; Stop 72
tcaatactttagtagtctgatatgc

SEQ ID NO: 256904 - DNA, 25 bp, Artificial
  probe
  misc_feature (1)..(25): SEQ ID NO: 148; WAN024A63; Start 41; Stop 65
aacaaactcaatactttagtagtct

SEQ ID NO: 256905 - DNA, 25 bp, Artificial
  probe
  misc_feature (1)..(25): SEQ ID NO: 148; WAN024A63; Start 36; Stop 60
atcctaacaaactcaatactttagt

SEQ ID NO: 256906 - DNA, 25 bp, Artificial
  probe
  misc_feature (1)..(25): SEQ ID NO: 148; WAN024A63; Start 30; Stop 54
gctaaaatcctaacaaactcaatac

SEQ ID NO: 256907 - DNA, 25 bp, Artificial
  probe
  misc_feature (1)..(25): SEQ ID NO: 148; WAN024A63; Start 19; Stop 43
gctaactagtcgctaaaatcctaac

SEQ ID NO: 256908 - DNA, 25 bp, Artificial
  probe
  misc_feature (1)..(25): SEQ ID NO: 148; WAN024A63; Start 44; Stop 68
aaactcaatactttagtagtctgat

SEQ ID NO: 256909 - DNA, 25 bp, Artificial
  probe
  misc_feature (1)..(25): SEQ ID NO: 148; WAN024A63; Start 23; Stop 47
actagtcgctaaaatcctaacaaac

SEQ ID NO: 256910 - DNA, 25 bp, Artificial
  probe
  misc_feature (1)..(25): SEQ ID NO: 148; WAN024A63; Start 6; Stop 30
tcttcctttcccagctaactagtcg

SEQ ID NO: 256911 - DNA, 25 bp, Artificial
  probe
  misc_feature (1)..(25): SEQ ID NO: 148; WAN024A63; Start 37; Stop 61
tcctaacaaactcaatactttagta

SEQ ID NO: 256912 - DNA, 25 bp, Artificial
  probe
  misc_feature (1)..(25): SEQ ID NO: 148; WAN024A63; Start 22; Stop 46
aactagtcgctaaaatcctaacaaa

SEQ ID NO: 256913 - DNA, 25 bp, Artificial
  probe
  misc_feature (1)..(25): SEQ ID NO: 148; WAN024A63; Start 11; Stop 35
ctttcccagctaactagtcgctaaa

SEQ ID NO: 256914 - DNA, 25 bp, Artificial
  probe
  misc_feature (1)..(25): SEQ ID NO: 149; WAN024A4H; Start 7; Stop 31
aaagacaagctcatatcacgaaggg

SEQ ID NO: 256915 - DNA, 25 bp, Artificial
  probe
  misc_feature (1)..(25): SEQ ID NO: 149; WAN024A4H; Start 2; Stop 26
aatcaaaagacaagctcatatcacg

SEQ ID NO: 256916 - DNA, 25 bp, Artificial
  probe
  misc_feature (1)..(25): SEQ ID NO: 149; WAN024A4H; Start 5; Stop 29
caaaagacaagctcatatcacgaag

SEQ ID NO: 256917 - DNA, 25 bp, Artificial
  probe
  misc_feature (1)..(25): SEQ ID NO: 149; WAN024A4H; Start 3; Stop 27
atcaaaagacaagctcatatcacga

SEQ ID NO: 256918 - DNA, 25 bp, Artificial
  probe
  misc_feature (1)..(25): SEQ ID NO: 149; WAN024A4H; Start 4; Stop 28
tcaaaagacaagctcatatcacgaa

SEQ ID NO: 256919 - DNA, 25 bp, Artificial
  probe
  misc_feature (1)..(25): SEQ ID NO: 149; WAN024A4H; Start 6; Stop 30
aaaagacaagctcatatcacgaagg

SEQ ID NO: 256920 - DNA, 25 bp, Artificial
  probe
  misc_feature (1)..(25): SEQ ID NO: 149; WAN024A4H; Start 1; Stop 25
aaatcaaaagacaagctcatatcac

SEQ ID NO: 256921 - DNA, 25 bp, Artificial
  probe
  misc_feature (1)..(25): SEQ ID NO: 149; WAN024A4H; Start 48; Stop 72
caccttcattcaatgaacttgtcat

SEQ ID NO: 256922 - DNA, 25 bp, Artificial
  probe
  misc_feature (1)..(25): SEQ ID NO: 149; WAN024A4H; Start 44; Stop 68
gtaccaccttcattcaatgaacttg

SEQ ID NO: 256923 - DNA, 25 bp, Artificial
  probe
  misc_feature (1)..(25): SEQ ID NO: 149; WAN024A4H; Start 45; Stop 69
taccaccttcattcaatgaacttgt

SEQ ID NO: 256924 - DNA, 25 bp, Artificial
  probe
  misc_feature (1)..(25): SEQ ID NO: 149; WAN024A4H; Start 8; Stop 32
aagacaagctcatatcacgaagggc

SEQ ID NO: 256925 - DNA, 25 bp, Artificial
  probe
  misc_feature (1)..(25): SEQ ID NO: 149; WAN024A4H; Start 47; Stop 71
ccaccttcattcaatgaacttgtca

SEQ ID NO: 256926 - DNA, 25 bp, Artificial
  probe
  misc_feature (1)..(25): SEQ ID NO: 149; WAN024A4H; Start 46; Stop 70
accaccttcattcaatgaacttgtc

SEQ ID NO: 256927 - DNA, 25 bp, Artificial
  probe
  misc_feature (1)..(25): SEQ ID NO: 149; WAN024A4H; Start 43; Stop 67
ggtaccaccttcattcaatgaactt

SEQ ID NO: 256928 - DNA, 25 bp, Artificial
  probe
  misc_feature (1)..(25): SEQ ID NO: 149; WAN024A4H; Start 13; Stop 37
aagctcatatcacgaagggcgaaaa

SEQ ID NO: 256929 - DNA, 25 bp, Artificial
  probe
  misc_feature (1)..(25): SEQ ID NO: 149; WAN024A4H; Start 42; Stop 66
cggtaccaccttcattcaatgaact

SEQ ID NO: 256930 - DNA, 25 bp, Artificial
  probe
  misc_feature (1)..(25): SEQ ID NO: 149; WAN024A4H; Start 41; Stop 65
gcggtaccaccttcattcaatgaac

SEQ ID NO: 256931 - DNA, 25 bp, Artificial
  probe
  misc_feature (1)..(25): SEQ ID NO: 150; WAN024A4F; Start 57; Stop 81
atgatctccgttgaattagaccaat

SEQ ID NO: 256932 - DNA, 25 bp, Artificial
  probe
  misc_feature (1)..(25): SEQ ID NO: 150; WAN024A4F; Start 56; Stop 80
aatgatctccgttgaattagaccaa

SEQ ID NO: 256933 - DNA, 25 bp, Artificial
  probe
  misc_feature (1)..(25): SEQ ID NO: 150; WAN024A4F; Start 58; Stop 82
tgatctccgttgaattagaccaatt

SEQ ID NO: 256934 - DNA, 25 bp, Artificial
  probe
  misc_feature (1)..(25): SEQ ID NO: 150; WAN024A4F; Start 72; Stop 96
ttagaccaattccctacatctctga

SEQ ID NO: 256935 - DNA, 25 bp, Artificial
  probe
  misc_feature (1)..(25): SEQ ID NO: 150; WAN024A4F; Start 71; Stop 95
attagaccaattccctacatctctg

SEQ ID NO: 256936 - DNA, 25 bp, Artificial
  probe
  misc_feature (1)..(25): SEQ ID NO: 150; WAN024A4F; Start 55; Stop 79
aaatgatctccgttgaattagacca

SEQ ID NO: 256937 - DNA, 25 bp, Artificial
  probe
  misc_feature (1)..(25): SEQ ID NO: 150; WAN024A4F; Start 54; Stop 78
gaaatgatctccgttgaattagacc

SEQ ID NO: 256938 - DNA, 25 bp, Artificial
  probe
  misc_feature (1)..(25): SEQ ID NO: 150; WAN024A4F; Start 70; Stop 94
aattagaccaattccctacatctct

SEQ ID NO: 256939 - DNA, 25 bp, Artificial
  probe
  misc_feature (1)..(25): SEQ ID NO: 150; WAN024A4F; Start 53; Stop 77
ggaaatgatctccgttgaattagac

SEQ ID NO: 256940 - DNA, 25 bp, Artificial
  probe
  misc_feature (1)..(25): SEQ ID NO: 150; WAN024A4F; Start 52; Stop 76
tggaaatgatctccgttgaattaga

SEQ ID NO: 256941 - DNA, 25 bp, Artificial
  probe
  misc_feature (1)..(25): SEQ ID NO: 150; WAN024A4F; Start 51; Stop 75
ctggaaatgatctccgttgaattag

SEQ ID NO: 256942 - DNA, 25 bp, Artificial
  probe
  misc_feature (1)..(25): SEQ ID NO: 150; WAN024A4F; Start 50; Stop 74
actggaaatgatctccgttgaatta

SEQ ID NO: 256943 - DNA, 25 bp, Artificial
  probe
  misc_feature (1)..(25): SEQ ID NO: 150; WAN024A4F; Start 49; Stop 73
aactggaaatgatctccgttgaatt

SEQ ID NO: 256944 - DNA, 25 bp, Artificial
  probe
  misc_feature (1)..(25): SEQ ID NO: 150; WAN024A4F; Start 59; Stop 83
gatctccgttgaattagaccaattc

SEQ ID NO: 256945 - DNA, 25 bp, Artificial
  probe
  misc_feature (1)..(25): SEQ ID NO: 150; WAN024A4F; Start 60; Stop 84
atctccgttgaattagaccaattcc

SEQ ID NO: 256946 - DNA, 25 bp, Artificial
  probe
  misc_feature (1)..(25): SEQ ID NO: 150; WAN024A4F; Start 48; Stop 72
caactggaaatgatctccgttgaat

SEQ ID NO: 256947 - DNA, 25 bp, Artificial
  probe
  misc_feature (1)..(25): SEQ ID NO: 150; WAN024A4F; Start 41; Stop 65
cttgcgtcaactggaaatgatctcc

SEQ ID NO: 256948 - DNA, 25 bp, Artificial
  probe
  misc_feature (1)..(25): SEQ ID NO: 150; WAN024A4F; Start 68; Stop 92
tgaattagaccaattccctacatct

SEQ ID NO: 256949 - DNA, 25 bp, Artificial
  probe
  misc_feature (1)..(25): SEQ ID NO: 150; WAN024A4F; Start 65; Stop 89
cgttgaattagaccaattccctaca

SEQ ID NO: 256950 - DNA, 25 bp, Artificial
  probe
  misc_feature (1)..(25): SEQ ID NO: 150; WAN024A4F; Start 66; Stop 90
gttgaattagaccaattccctacat

SEQ ID NO: 256951 - DNA, 25 bp, Artificial
  probe
  misc_feature (1)..(25): SEQ ID NO: 150; WAN024A4F; Start 69; Stop 93
gaattagaccaattccctacatctc

SEQ ID NO: 256952 - DNA, 25 bp, Artificial
  probe
  misc_feature (1)..(25): SEQ ID NO: 150; WAN024A4F; Start 67; Stop 91
ttgaattagaccaattccctacatc

SEQ ID NO: 256953 - DNA, 25 bp, Artificial
  probe
  misc_feature (1)..(25): SEQ ID NO: 150; WAN024A4F; Start 64; Stop 88
ccgttgaattagaccaattccctac

SEQ ID NO: 256954 - DNA, 25 bp, Artificial
  probe
  misc_feature (1)..(25): SEQ ID NO: 150; WAN024A4F; Start 63; Stop 87
tccgttgaattagaccaattcccta

SEQ ID NO: 256955 - DNA, 25 bp, Artificial
  probe
  misc_feature (1)..(25): SEQ ID NO: 150; WAN024A4F; Start 40; Stop 64
gcttgcgtcaactggaaatgatctc

SEQ ID NO: 256956 - DNA, 25 bp, Artificial
  probe
  misc_feature (1)..(25): SEQ ID NO: 150; WAN024A4F; Start 35; Stop 59
tttaagcttgcgtcaactggaaatg

SEQ ID NO: 256957 - DNA, 25 bp, Artificial
  probe
  misc_feature (1)..(25): SEQ ID NO: 150; WAN024A4F; Start 62; Stop 86
ctccgttgaattagaccaattccct

SEQ ID NO: 256958 - DNA, 25 bp, Artificial
  probe
  misc_feature (1)..(25): SEQ ID NO: 150; WAN024A4F; Start 61; Stop 85
tctccgttgaattagaccaattccc

SEQ ID NO: 256959 - DNA, 25 bp, Artificial
  probe
  misc_feature (1)..(25): SEQ ID NO: 150; WAN024A4F; Start 37; Stop 61
taagcttgcgtcaactggaaatgat

SEQ ID NO: 256960 - DNA, 25 bp, Artificial
  probe
  misc_feature (1)..(25): SEQ ID NO: 150; WAN024A4F; Start 36; Stop 60
ttaagcttgcgtcaactggaaatga

SEQ ID NO: 256961 - DNA, 25 bp, Artificial
  probe
  misc_feature (1)..(25): SEQ ID NO: 150; WAN024A4F; Start 39; Stop 63
agcttgcgtcaactggaaatgatct

SEQ ID NO: 256962 - DNA, 25 bp, Artificial
  probe
  misc_feature (1)..(25): SEQ ID NO: 150; WAN024A4F; Start 34; Stop 58
ttttaagcttgcgtcaactggaaat

SEQ ID NO: 256963 - DNA, 25 bp, Artificial
  probe
  misc_feature (1)..(25): SEQ ID NO: 150; WAN024A4F; Start 45; Stop 69
cgtcaactggaaatgatctccgttg

SEQ ID NO: 256964 - DNA, 25 bp, Artificial
  probe
  misc_feature (1)..(25): SEQ ID NO: 150; WAN024A4F; Start 38; Stop 62
aagcttgcgtcaactggaaatgatc

SEQ ID NO: 256965 - DNA, 25 bp, Artificial
  probe
  misc_feature (1)..(25): SEQ ID NO: 151; WAN0249SB; Start 19; Stop 43
ttggcaatatgtatcatcagctatt

SEQ ID NO: 256966 - DNA, 25 bp, Artificial
  probe
  misc_feature (1)..(25): SEQ ID NO: 151; WAN0249SB; Start 15; Stop 39
gtatttggcaatatgtatcatcagc

SEQ ID NO: 256967 - DNA, 25 bp, Artificial
  probe
  misc_feature (1)..(25): SEQ ID NO: 151; WAN0249SB; Start 68; Stop 92
gaacaagctagtcttctgagtgtca

SEQ ID NO: 256968 - DNA, 25 bp, Artificial
  probe
  misc_feature (1)..(25): SEQ ID NO: 151; WAN0249SB; Start 14; Stop 38
tgtatttggcaatatgtatcatcag

SEQ ID NO: 256969 - DNA, 25 bp, Artificial
  probe
  misc_feature (1)..(25): SEQ ID NO: 151; WAN0249SB; Start 18; Stop 42
tttggcaatatgtatcatcagctat

SEQ ID NO: 256970 - DNA, 25 bp, Artificial
  probe
  misc_feature (1)..(25): SEQ ID NO: 151; WAN0249SB; Start 17; Stop 41
atttggcaatatgtatcatcagcta

SEQ ID NO: 256971 - DNA, 25 bp, Artificial
  probe
  misc_feature (1)..(25): SEQ ID NO: 151; WAN0249SB; Start 20; Stop 44
tggcaatatgtatcatcagctattt

SEQ ID NO: 256972 - DNA, 25 bp, Artificial
  probe
  misc_feature (1)..(25): SEQ ID NO: 151; WAN0249SB; Start 16; Stop 40
tatttggcaatatgtatcatcagct

SEQ ID NO: 256973 - DNA, 25 bp, Artificial
  probe
  misc_feature (1)..(25): SEQ ID NO: 151; WAN0249SB; Start 67; Stop 91
cgaacaagctagtcttctgagtgtc

SEQ ID NO: 256974 - DNA, 25 bp, Artificial
  probe
  misc_feature (1)..(25): SEQ ID NO: 151; WAN0249SB; Start 13; Stop 37
ttgtatttggcaatatgtatcatca

SEQ ID NO: 256975 - DNA, 25 bp, Artificial
  probe
  misc_feature (1)..(25): SEQ ID NO: 151; WAN0249SB; Start 85; Stop 109
gagtgtcagaaaagtagtcttgttc

SEQ ID NO: 256976 - DNA, 25 bp, Artificial
  probe
  misc_feature (1)..(25): SEQ ID NO: 151; WAN0249SB; Start 86; Stop 110
agtgtcagaaaagtagtcttgttcg

SEQ ID NO: 256977 - DNA, 25 bp, Artificial
  probe
  misc_feature (1)..(25): SEQ ID NO: 151; WAN0249SB; Start 84; Stop 108
tgagtgtcagaaaagtagtcttgtt

SEQ ID NO: 256978 - DNA, 25 bp, Artificial
  probe
  misc_feature (1)..(25): SEQ ID NO: 151; WAN0249SB; Start 89; Stop 113
gtcagaaaagtagtcttgttcgctt

SEQ ID NO: 256979 - DNA, 25 bp, Artificial
  probe
  misc_feature (1)..(25): SEQ ID NO: 151; WAN0249SB; Start 87; Stop 111
gtgtcagaaaagtagtcttgttcgc

SEQ ID NO: 256980 - DNA, 25 bp, Artificial
  probe
  misc_feature (1)..(25): SEQ ID NO: 151; WAN0249SB; Start 69; Stop 93
aacaagctagtcttctgagtgtcag

SEQ ID NO: 256981 - DNA, 25 bp, Artificial
  probe
  misc_feature (1)..(25): SEQ ID NO: 151; WAN0249SB; Start 12; Stop 36
tttgtatttggcaatatgtatcatc

SEQ ID NO: 256982 - DNA, 25 bp, Artificial
  probe
  misc_feature (1)..(25): SEQ ID NO: 151; WAN0249SB; Start 88; Stop 112
tgtcagaaaagtagtcttgttcgct

SEQ ID NO: 256983 - DNA, 25 bp, Artificial
  probe
  misc_feature (1)..(25): SEQ ID NO: 151; WAN0249SB; Start 90; Stop 114
tcagaaaagtagtcttgttcgcttt

SEQ ID NO: 256984 - DNA, 25 bp, Artificial
  probe
  misc_feature (1)..(25): SEQ ID NO: 151; WAN0249SB; Start 64; Stop 88
aagcgaacaagctagtcttctgagt

SEQ ID NO: 256985 - DNA, 25 bp, Artificial
  probe
  misc_feature (1)..(25): SEQ ID NO: 151; WAN0249SB; Start 96; Stop 120
aagtagtcttgttcgcttttattat

SEQ ID NO: 256986 - DNA, 25 bp, Artificial
  probe
  misc_feature (1)..(25): SEQ ID NO: 151; WAN0249SB; Start 66; Stop 90
gcgaacaagctagtcttctgagtgt

SEQ ID NO: 256987 - DNA, 25 bp, Artificial
  probe
  misc_feature (1)..(25): SEQ ID NO: 151; WAN0249SB; Start 63; Stop 87
aaagcgaacaagctagtcttctgag

SEQ ID NO: 256988 - DNA, 25 bp, Artificial
  probe
  misc_feature (1)..(25): SEQ ID NO: 151; WAN0249SB; Start 21; Stop 45
ggcaatatgtatcatcagctatttt

SEQ ID NO: 256989 - DNA, 25 bp, Artificial
  probe
  misc_feature (1)..(25): SEQ ID NO: 151; WAN0249SB; Start 65; Stop 89
agcgaacaagctagtcttctgagtg

SEQ ID NO: 256990 - DNA, 25 bp, Artificial
  probe
  misc_feature (1)..(25): SEQ ID NO: 151; WAN0249SB; Start 95; Stop 119
aaagtagtcttgttcgcttttatta

SEQ ID NO: 256991 - DNA, 25 bp, Artificial
  probe
  misc_feature (1)..(25): SEQ ID NO: 151; WAN0249SB; Start 83; Stop 107
ctgagtgtcagaaaagtagtcttgt

SEQ ID NO: 256992 - DNA, 25 bp, Artificial
  probe
  misc_feature (1)..(25): SEQ ID NO: 151; WAN0249SB; Start 2; Stop 26
aatcagatattttgtatttggcaat

SEQ ID NO: 256993 - DNA, 25 bp, Artificial
  probe
  misc_feature (1)..(25): SEQ ID NO: 151; WAN0249SB; Start 1; Stop 25
aaatcagatattttgtatttggcaa

SEQ ID NO: 256994 - DNA, 25 bp, Artificial
  probe
  misc_feature (1)..(25): SEQ ID NO: 151; WAN0249SB; Start 11; Stop 35
ttttgtatttggcaatatgtatcat

SEQ ID NO: 256995 - DNA, 25 bp, Artificial
  probe
  misc_feature (1)..(25): SEQ ID NO: 151; WAN0249SB; Start 10; Stop 34
attttgtatttggcaatatgtatca

SEQ ID NO: 256996 - DNA, 25 bp, Artificial
  probe
  misc_feature (1)..(25): SEQ ID NO: 151; WAN0249SB; Start 62; Stop 86
aaaagcgaacaagctagtcttctga

SEQ ID NO: 256997 - DNA, 25 bp, Artificial
  probe
  misc_feature (1)..(25): SEQ ID NO: 151; WAN0249SB; Start 91; Stop 115
cagaaaagtagtcttgttcgctttt

SEQ ID NO: 256998 - DNA, 25 bp, Artificial
  probe
  misc_feature (1)..(25): SEQ ID NO: 152; WAN024AL2; Start 18; Stop 42
gctgaaatccaagaacaattagttt

SEQ ID NO: 256999 - DNA, 25 bp, Artificial
  probe
  misc_feature (1)..(25): SEQ ID NO: 152; WAN024AL2; Start 25; Stop 49
tccaagaacaattagtttcatcact

SEQ ID NO: 257000 - DNA, 25 bp, Artificial
  probe
  misc_feature (1)..(25): SEQ ID NO: 152; WAN024AL2; Start 24; Stop 48
atccaagaacaattagtttcatcac

SEQ ID NO: 257001 - DNA, 25 bp, Artificial
  probe
  misc_feature (1)..(25): SEQ ID NO: 152; WAN024AL2; Start 16; Stop 40
aagctgaaatccaagaacaattagt

SEQ ID NO: 257002 - DNA, 25 bp, Artificial
  probe
  misc_feature (1)..(25): SEQ ID NO: 152; WAN024AL2; Start 17; Stop 41
agctgaaatccaagaacaattagtt

SEQ ID NO: 257003 - DNA, 25 bp, Artificial
  probe
  misc_feature (1)..(25): SEQ ID NO: 152; WAN024AL2; Start 51; Stop 75
aaagttcaagtaaatttcagtccga

SEQ ID NO: 257004 - DNA, 25 bp, Artificial
  probe
  misc_feature (1)..(25): SEQ ID NO: 152; WAN024AL2; Start 52; Stop 76
aagttcaagtaaatttcagtccgaa

SEQ ID NO: 257005 - DNA, 25 bp, Artificial
  probe
  misc_feature (1)..(25): SEQ ID NO: 152; WAN024AL2; Start 15; Stop 39
aaagctgaaatccaagaacaattag

SEQ ID NO: 257006 - DNA, 25 bp, Artificial
  probe
  misc_feature (1)..(25): SEQ ID NO: 152; WAN024AL2; Start 14; Stop 38
gaaagctgaaatccaagaacaatta

SEQ ID NO: 257007 - DNA, 25 bp, Artificial
  probe
  misc_feature (1)..(25): SEQ ID NO: 152; WAN024AL2; Start 53; Stop 77
agttcaagtaaatttcagtccgaat

SEQ ID NO: 257008 - DNA, 25 bp, Artificial
  probe
  misc_feature (1)..(25): SEQ ID NO: 152; WAN024AL2; Start 23; Stop 47
aatccaagaacaattagtttcatca

SEQ ID NO: 257009 - DNA, 25 bp, Artificial
  probe
  misc_feature (1)..(25): SEQ ID NO: 152; WAN024AL2; Start 13; Stop 37
ggaaagctgaaatccaagaacaatt

SEQ ID NO: 257010 - DNA, 25 bp, Artificial
  probe
  misc_feature (1)..(25): SEQ ID NO: 152; WAN024AL2; Start 12; Stop 36
aggaaagctgaaatccaagaacaat

SEQ ID NO: 257011 - DNA, 25 bp, Artificial
  probe
  misc_feature (1)..(25): SEQ ID NO: 152; WAN024AL2; Start 54; Stop 78
gttcaagtaaatttcagtccgaata

SEQ ID NO: 257012 - DNA, 25 bp, Artificial
  probe
  misc_feature (1)..(25): SEQ ID NO: 152; WAN024AL2; Start 26; Stop 50
ccaagaacaattagtttcatcacta

SEQ ID NO: 257013 - DNA, 25 bp, Artificial
  probe
  misc_feature (1)..(25): SEQ ID NO: 152; WAN024AL2; Start 11; Stop 35
caggaaagctgaaatccaagaacaa

SEQ ID NO: 257014 - DNA, 25 bp, Artificial
  probe
  misc_feature (1)..(25): SEQ ID NO: 152; WAN024AL2; Start 22; Stop 46
aaatccaagaacaattagtttcatc

SEQ ID NO: 257015 - DNA, 25 bp, Artificial
  probe
  misc_feature (1)..(25): SEQ ID NO: 152; WAN024AL2; Start 57; Stop 81
caagtaaatttcagtccgaatatct

SEQ ID NO: 257016 - DNA, 25 bp, Artificial
  probe
  misc_feature (1)..(25): SEQ ID NO: 152; WAN024AL2; Start 56; Stop 80
tcaagtaaatttcagtccgaatatc

SEQ ID NO: 257017 - DNA, 25 bp, Artificial
  probe
  misc_feature (1)..(25): SEQ ID NO: 152; WAN024AL2; Start 55; Stop 79
ttcaagtaaatttcagtccgaatat

SEQ ID NO: 257018 - DNA, 25 bp, Artificial
  probe
  misc_feature (1)..(25): SEQ ID NO: 152; WAN024AL2; Start 19; Stop 43
ctgaaatccaagaacaattagtttc

SEQ ID NO: 257019 - DNA, 25 bp, Artificial
  probe
  misc_feature (1)..(25): SEQ ID NO: 152; WAN024AL2; Start 50; Stop 74
aaaagttcaagtaaatttcagtccg

SEQ ID NO: 257020 - DNA, 25 bp, Artificial
  probe
  misc_feature (1)..(25): SEQ ID NO: 152; WAN024AL2; Start 7; Stop 31
taatcaggaaagctgaaatccaaga

SEQ ID NO: 257021 - DNA, 25 bp, Artificial
  probe
  misc_feature (1)..(25): SEQ ID NO: 152; WAN024AL2; Start 4; Stop 28
tcataatcaggaaagctgaaatcca

SEQ ID NO: 257022 - DNA, 25 bp, Artificial
  probe
  misc_feature (1)..(25): SEQ ID NO: 152; WAN024AL2; Start 5; Stop 29
cataatcaggaaagctgaaatccaa

SEQ ID NO: 257023 - DNA, 25 bp, Artificial
  probe
  misc_feature (1)..(25): SEQ ID NO: 152; WAN024AL2; Start 6; Stop 30
ataatcaggaaagctgaaatccaag

SEQ ID NO: 257024 - DNA, 25 bp, Artificial
  probe
  misc_feature (1)..(25): SEQ ID NO: 152; WAN024AL2; Start 3; Stop 27
atcataatcaggaaagctgaaatcc

SEQ ID NO: 257025 - DNA, 25 bp, Artificial
  probe
  misc_feature (1)..(25): SEQ ID NO: 152; WAN024AL2; Start 8; Stop 32
aatcaggaaagctgaaatccaagaa

SEQ ID NO: 257026 - DNA, 25 bp, Artificial
  probe
  misc_feature (1)..(25): SEQ ID NO: 152; WAN024AL2; Start 21; Stop 45
gaaatccaagaacaattagtttcat

SEQ ID NO: 257027 - DNA, 25 bp, Artificial
  probe
  misc_feature (1)..(25): SEQ ID NO: 152; WAN024AL2; Start 9; Stop 33
atcaggaaagctgaaatccaagaac

SEQ ID NO: 257028 - DNA, 25 bp, Artificial
  probe
  misc_feature (1)..(25): SEQ ID NO: 152; WAN024AL2; Start 38; Stop 62
agtttcatcactaaaagttcaagta

SEQ ID NO: 257029 - DNA, 25 bp, Artificial
  probe
  misc_feature (1)..(25): SEQ ID NO: 152; WAN024AL2; Start 2; Stop 26
aatcataatcaggaaagctgaaatc

SEQ ID NO: 257030 - DNA, 25 bp, Artificial
  probe
  misc_feature (1)..(25): SEQ ID NO: 152; WAN024AL2; Start 10; Stop 34
tcaggaaagctgaaatccaagaaca

SEQ ID NO: 257031 - DNA, 25 bp, Artificial
  probe
  misc_feature (1)..(25): SEQ ID NO: 153; WAN024AEJ; Start 166; Stop 190
aaagataagaaacagcgactaccta

SEQ ID NO: 257032 - DNA, 25 bp, Artificial
  probe
  misc_feature (1)..(25): SEQ ID NO: 153; WAN024AEJ; Start 165; Stop 189
caaagataagaaacagcgactacct

SEQ ID NO: 257033 - DNA, 25 bp, Artificial
  probe
  misc_feature (1)..(25): SEQ ID NO: 153; WAN024AEJ; Start 164; Stop 188
ccaaagataagaaacagcgactacc

SEQ ID NO: 257034 - DNA, 25 bp, Artificial
  probe
  misc_feature (1)..(25): SEQ ID NO: 153; WAN024AEJ; Start 163; Stop 187
gccaaagataagaaacagcgactac

SEQ ID NO: 257035 - DNA, 25 bp, Artificial
  probe
  misc_feature (1)..(25): SEQ ID NO: 153; WAN024AEJ; Start 162; Stop 186
agccaaagataagaaacagcgacta

SEQ ID NO: 257036 - DNA, 25 bp, Artificial
  probe
  misc_feature (1)..(25): SEQ ID NO: 153; WAN024AEJ; Start 102; Stop 126
gagtttccattatcccagacgacta

SEQ ID NO: 257037 - DNA, 25 bp, Artificial
  probe
  misc_feature (1)..(25): SEQ ID NO: 153; WAN024AEJ; Start 103; Stop 127
agtttccattatcccagacgactac

SEQ ID NO: 257038 - DNA, 25 bp, Artificial
  probe
  misc_feature (1)..(25): SEQ ID NO: 153; WAN024AEJ; Start 105; Stop 129
tttccattatcccagacgactacga

SEQ ID NO: 257039 - DNA, 25 bp, Artificial
  probe
  misc_feature (1)..(25): SEQ ID NO: 153; WAN024AEJ; Start 104; Stop 128
gtttccattatcccagacgactacg

SEQ ID NO: 257040 - DNA, 25 bp, Artificial
  probe
  misc_feature (1)..(25): SEQ ID NO: 153; WAN024AEJ; Start 157; Stop 181
catggagccaaagataagaaacagc

SEQ ID NO: 257041 - DNA, 25 bp, Artificial
  probe
  misc_feature (1)..(25): SEQ ID NO: 153; WAN024AEJ; Start 161; Stop 185
gagccaaagataagaaacagcgact

SEQ ID NO: 257042 - DNA, 25 bp, Artificial
  probe
  misc_feature (1)..(25): SEQ ID NO: 153; WAN024AEJ; Start 106; Stop 130
ttccattatcccagacgactacgac

SEQ ID NO: 257043 - DNA, 25 bp, Artificial
  probe
  misc_feature (1)..(25): SEQ ID NO: 153; WAN024AEJ; Start 158; Stop 182
atggagccaaagataagaaacagcg

SEQ ID NO: 257044 - DNA, 25 bp, Artificial
  probe
  misc_feature (1)..(25): SEQ ID NO: 153; WAN024AEJ; Start 160; Stop 184
ggagccaaagataagaaacagcgac

SEQ ID NO: 257045 - DNA, 25 bp, Artificial
  probe
  misc_feature (1)..(25): SEQ ID NO: 153; WAN024AEJ; Start 101; Stop 125
ggagtttccattatcccagacgact

SEQ ID NO: 257046 - DNA, 25 bp, Artificial
  probe
  misc_feature (1)..(25): SEQ ID NO: 153; WAN024AEJ; Start 159; Stop 183
tggagccaaagataagaaacagcga

SEQ ID NO: 257047 - DNA, 25 bp, Artificial
  probe
  misc_feature (1)..(25): SEQ ID NO: 153; WAN024AEJ; Start 132; Stop 156
caatcgcttatgtcgtcagcaagtc

SEQ ID NO: 257048 - DNA, 25 bp, Artificial
  probe
  misc_feature (1)..(25): SEQ ID NO: 153; WAN024AEJ; Start 111; Stop 135
ttatcccagacgactacgacccaat

SEQ ID NO: 257049 - DNA, 25 bp, Artificial
  probe
  misc_feature (1)..(25): SEQ ID NO: 153; WAN024AEJ; Start 110; Stop 134
attatcccagacgactacgacccaa

SEQ ID NO: 257050 - DNA, 25 bp, Artificial
  probe
  misc_feature (1)..(25): SEQ ID NO: 153; WAN024AEJ; Start 156; Stop 180
ccatggagccaaagataagaaacag

SEQ ID NO: 257051 - DNA, 25 bp, Artificial
  probe
  misc_feature (1)..(25): SEQ ID NO: 153; WAN024AEJ; Start 100; Stop 124
tggagtttccattatcccagacgac

SEQ ID NO: 257052 - DNA, 25 bp, Artificial
  probe
  misc_feature (1)..(25): SEQ ID NO: 154; WAN0249YN; Start 30; Stop 54
ctagaaggctattttcataggcgaa

SEQ ID NO: 257053 - DNA, 25 bp, Artificial
  probe
  misc_feature (1)..(25): SEQ ID NO: 154; WAN0249YN; Start 31; Stop 55
tagaaggctattttcataggcgaaa

SEQ ID NO: 257054 - DNA, 25 bp, Artificial
  probe
  misc_feature (1)..(25): SEQ ID NO: 154; WAN0249YN; Start 27; Stop 51
ttcctagaaggctattttcataggc

SEQ ID NO: 257055 - DNA, 25 bp, Artificial
  probe
  misc_feature (1)..(25): SEQ ID NO: 154; WAN0249YN; Start 1; Stop 25
aaatccagccttctaggagaaaagt

SEQ ID NO: 257056 - DNA, 25 bp, Artificial
  probe
  misc_feature (1)..(25): SEQ ID NO: 154; WAN0249YN; Start 2; Stop 26
aatccagccttctaggagaaaagtc

SEQ ID NO: 257057 - DNA, 25 bp, Artificial
  probe
  misc_feature (1)..(25): SEQ ID NO: 154; WAN0249YN; Start 17; Stop 41
gagaaaagtcttcctagaaggctat

SEQ ID NO: 257058 - DNA, 25 bp, Artificial
  probe
  misc_feature (1)..(25): SEQ ID NO: 154; WAN0249YN; Start 22; Stop 46
aagtcttcctagaaggctattttca

SEQ ID NO: 257059 - DNA, 25 bp, Artificial
  probe
  misc_feature (1)..(25): SEQ ID NO: 154; WAN0249YN; Start 23; Stop 47
agtcttcctagaaggctattttcat

SEQ ID NO: 257060 - DNA, 25 bp, Artificial
  probe
  misc_feature (1)..(25): SEQ ID NO: 154; WAN0249YN; Start 18; Stop 42
agaaaagtcttcctagaaggctatt

SEQ ID NO: 257061 - DNA, 25 bp, Artificial
  probe
  misc_feature (1)..(25): SEQ ID NO: 154; WAN0249YN; Start 16; Stop 40
ggagaaaagtcttcctagaaggcta

SEQ ID NO: 257062 - DNA, 25 bp, Artificial
  probe
  misc_feature (1)..(25): SEQ ID NO: 154; WAN0249YN; Start 29; Stop 53
cctagaaggctattttcataggcga

SEQ ID NO: 257063 - DNA, 25 bp, Artificial
  probe
  misc_feature (1)..(25): SEQ ID NO: 154; WAN0249YN; Start 28; Stop 52
tcctagaaggctattttcataggcg

SEQ ID NO: 257064 - DNA, 25 bp, Artificial
  probe
  misc_feature (1)..(25): SEQ ID NO: 154; WAN0249YN; Start 26; Stop 50
cttcctagaaggctattttcatagg

SEQ ID NO: 257065 - DNA, 25 bp, Artificial
  probe
  misc_feature (1)..(25): SEQ ID NO: 154; WAN0249YN; Start 21; Stop 45
aaagtcttcctagaaggctattttc

SEQ ID NO: 257066 - DNA, 25 bp, Artificial
  probe
  misc_feature (1)..(25): SEQ ID NO: 154; WAN0249YN; Start 19; Stop 43
gaaaagtcttcctagaaggctattt

SEQ ID NO: 257067 - DNA, 25 bp, Artificial
  probe
  misc_feature (1)..(25): SEQ ID NO: 154; WAN0249YN; Start 6; Stop 30
cagccttctaggagaaaagtcttcc

SEQ ID NO: 257068 - DNA, 25 bp, Artificial
  probe
  misc_feature (1)..(25): SEQ ID NO: 154; WAN0249YN; Start 5; Stop 29
ccagccttctaggagaaaagtcttc

SEQ ID NO: 257069 - DNA, 25 bp, Artificial
  probe
  misc_feature (1)..(25): SEQ ID NO: 154; WAN0249YN; Start 3; Stop 27
atccagccttctaggagaaaagtct

SEQ ID NO: 257070 - DNA, 25 bp, Artificial
  probe
  misc_feature (1)..(25): SEQ ID NO: 154; WAN0249YN; Start 20; Stop 44
aaaagtcttcctagaaggctatttt

SEQ ID NO: 257071 - DNA, 25 bp, Artificial
  probe
  misc_feature (1)..(25): SEQ ID NO: 154; WAN0249YN; Start 4; Stop 28
tccagccttctaggagaaaagtctt

SEQ ID NO: 257072 - DNA, 25 bp, Artificial
  probe
  misc_feature (1)..(25): SEQ ID NO: 154; WAN0249YN; Start 24; Stop 48
gtcttcctagaaggctattttcata

SEQ ID NO: 257073 - DNA, 25 bp, Artificial
  probe
  misc_feature (1)..(25): SEQ ID NO: 154; WAN0249YN; Start 43; Stop 67
ttcataggcgaaaatatggtataat

SEQ ID NO: 257074 - DNA, 25 bp, Artificial
  probe
  misc_feature (1)..(25): SEQ ID NO: 154; WAN0249YN; Start 25; Stop 49
tcttcctagaaggctattttcatag

SEQ ID NO: 257075 - DNA, 25 bp, Artificial
  probe
  misc_feature (1)..(25): SEQ ID NO: 154; WAN0249YN; Start 42; Stop 66
tttcataggcgaaaatatggtataa

SEQ ID NO: 257076 - DNA, 25 bp, Artificial
  probe
  misc_feature (1)..(25): SEQ ID NO: 154; WAN0249YN; Start 44; Stop 68
tcataggcgaaaatatggtataata

SEQ ID NO: 257077 - DNA, 25 bp, Artificial
  probe
  misc_feature (1)..(25): SEQ ID NO: 154; WAN0249YN; Start 32; Stop 56
agaaggctattttcataggcgaaaa

SEQ ID NO: 257078 - DNA, 25 bp, Artificial
  probe
  misc_feature (1)..(25): SEQ ID NO: 154; WAN0249YN; Start 15; Stop 39
aggagaaaagtcttcctagaaggct

SEQ ID NO: 257079 - DNA, 25 bp, Artificial
  probe
  misc_feature (1)..(25): SEQ ID NO: 154; WAN0249YN; Start 7; Stop 31
agccttctaggagaaaagtcttcct

SEQ ID NO: 257080 - DNA, 25 bp, Artificial
  probe
  misc_feature (1)..(25): SEQ ID NO: 154; WAN0249YN; Start 41; Stop 65
ttttcataggcgaaaatatggtata

SEQ ID NO: 257081 - DNA, 25 bp, Artificial
  probe
  misc_feature (1)..(25): SEQ ID NO: 156; WAN024A4V; Start 21; Stop 45
ctagaaatgaagaaagtgggaagcc

SEQ ID NO: 257082 - DNA, 25 bp, Artificial
  probe
  misc_feature (1)..(25): SEQ ID NO: 156; WAN024A4V; Start 20; Stop 44
tctagaaatgaagaaagtgggaagc

SEQ ID NO: 257083 - DNA, 25 bp, Artificial
  probe
  misc_feature (1)..(25): SEQ ID NO: 156; WAN024A4V; Start 22; Stop 46
tagaaatgaagaaagtgggaagccc

SEQ ID NO: 257084 - DNA, 25 bp, Artificial
  probe
  misc_feature (1)..(25): SEQ ID NO: 156; WAN024A4V; Start 23; Stop 47
agaaatgaagaaagtgggaagcccc

SEQ ID NO: 257085 - DNA, 25 bp, Artificial
  probe
  misc_feature (1)..(25): SEQ ID NO: 157; WAN0249MS; Start 4; Stop 28
tcctccttgattaggttagtatatc

SEQ ID NO: 257086 - DNA, 25 bp, Artificial
  probe
  misc_feature (1)..(25): SEQ ID NO: 157; WAN0249MS; Start 5; Stop 29
cctccttgattaggttagtatatca

SEQ ID NO: 257087 - DNA, 25 bp, Artificial
  probe
  misc_feature (1)..(25): SEQ ID NO: 157; WAN0249MS; Start 3; Stop 27
atcctccttgattaggttagtatat

SEQ ID NO: 257088 - DNA, 25 bp, Artificial
  probe
  misc_feature (1)..(25): SEQ ID NO: 157; WAN0249MS; Start 2; Stop 26
aatcctccttgattaggttagtata

SEQ ID NO: 257089 - DNA, 25 bp, Artificial
  probe
  misc_feature (1)..(25): SEQ ID NO: 157; WAN0249MS; Start 1; Stop 25
aaatcctccttgattaggttagtat

SEQ ID NO: 257090 - DNA, 25 bp, Artificial
  probe
  misc_feature (1)..(25): SEQ ID NO: 157; WAN0249MS; Start 135; Stop 159
ggcttaacggacagtcaaaggagaa

SEQ ID NO: 257091 - DNA, 25 bp, Artificial
  probe
  misc_feature (1)..(25): SEQ ID NO: 157; WAN0249MS; Start 6; Stop 30
ctccttgattaggttagtatatcat

SEQ ID NO: 257092 - DNA, 25 bp, Artificial
  probe
  misc_feature (1)..(25): SEQ ID NO: 157; WAN0249MS; Start 108; Stop 132
agaaagaaaacgattacacgttaag

SEQ ID NO: 257093 - DNA, 25 bp, Artificial
  probe
  misc_feature (1)..(25): SEQ ID NO: 157; WAN0249MS; Start 105; Stop 129
aatagaaagaaaacgattacacgtt

SEQ ID NO: 257094 - DNA, 25 bp, Artificial
  probe
  misc_feature (1)..(25): SEQ ID NO: 157; WAN0249MS; Start 107; Stop 131
tagaaagaaaacgattacacgttaa

SEQ ID NO: 257095 - DNA, 25 bp, Artificial
  probe
  misc_feature (1)..(25): SEQ ID NO: 157; WAN0249MS; Start 106; Stop 130
atagaaagaaaacgattacacgtta

SEQ ID NO: 257096 - DNA, 25 bp, Artificial
  probe
  misc_feature (1)..(25): SEQ ID NO: 158; WAN0249KF; Start 130; Stop 154
aggaagaaataatggagaggaagtt

SEQ ID NO: 257097 - DNA, 25 bp, Artificial
  probe
  misc_feature (1)..(25): SEQ ID NO: 158; WAN0249KF; Start 129; Stop 153
aaggaagaaataatggagaggaagt

SEQ ID NO: 257098 - DNA, 25 bp, Artificial
  probe
  misc_feature (1)..(25): SEQ ID NO: 158; WAN0249KF; Start 128; Stop 152
aaaggaagaaataatggagaggaag

SEQ ID NO: 257099 - DNA, 25 bp, Artificial
  probe
  misc_feature (1)..(25): SEQ ID NO: 158; WAN0249KF; Start 131; Stop 155
ggaagaaataatggagaggaagtta

SEQ ID NO: 257100 - DNA, 25 bp, Artificial
  probe
  misc_feature (1)..(25): SEQ ID NO: 158; WAN0249KF; Start 127; Stop 151
taaaggaagaaataatggagaggaa

SEQ ID NO: 257101 - DNA, 25 bp, Artificial
  probe
  misc_feature (1)..(25): SEQ ID NO: 158; WAN0249KF; Start 13; Stop 37
ttaattgcacgatgagttactgaaa

SEQ ID NO: 257102 - DNA, 25 bp, Artificial
  probe
  misc_feature (1)..(25): SEQ ID NO: 158; WAN0249KF; Start 12; Stop 36
tttaattgcacgatgagttactgaa

SEQ ID NO: 257103 - DNA, 25 bp, Artificial
  probe
  misc_feature (1)..(25): SEQ ID NO: 158; WAN0249KF; Start 17; Stop 41
ttgcacgatgagttactgaaatatt

SEQ ID NO: 257104 - DNA, 25 bp, Artificial
  probe
  misc_feature (1)..(25): SEQ ID NO: 158; WAN0249KF; Start 15; Stop 39
aattgcacgatgagttactgaaata

SEQ ID NO: 257105 - DNA, 25 bp, Artificial
  probe
  misc_feature (1)..(25): SEQ ID NO: 158; WAN0249KF; Start 14; Stop 38
taattgcacgatgagttactgaaat

SEQ ID NO: 257106 - DNA, 25 bp, Artificial
  probe
  misc_feature (1)..(25): SEQ ID NO: 158; WAN0249KF; Start 133; Stop 157
aagaaataatggagaggaagttaga

SEQ ID NO: 257107 - DNA, 25 bp, Artificial
  probe
  misc_feature (1)..(25): SEQ ID NO: 158; WAN0249KF; Start 126; Stop 150
ataaaggaagaaataatggagagga

SEQ ID NO: 257108 - DNA, 25 bp, Artificial
  probe
  misc_feature (1)..(25): SEQ ID NO: 158; WAN0249KF; Start 16; Stop 40
attgcacgatgagttactgaaatat

SEQ ID NO: 257109 - DNA, 25 bp, Artificial
  probe
  misc_feature (1)..(25): SEQ ID NO: 158; WAN0249KF; Start 132; Stop 156
gaagaaataatggagaggaagttag

SEQ ID NO: 257110 - DNA, 25 bp, Artificial
  probe
  misc_feature (1)..(25): SEQ ID NO: 158; WAN0249KF; Start 125; Stop 149
gataaaggaagaaataatggagagg

SEQ ID NO: 257111 - DNA, 25 bp, Artificial
  probe
  misc_feature (1)..(25): SEQ ID NO: 158; WAN0249KF; Start 18; Stop 42
tgcacgatgagttactgaaatatta

SEQ ID NO: 257112 - DNA, 25 bp, Artificial
  probe
  misc_feature (1)..(25): SEQ ID NO: 158; WAN0249KF; Start 19; Stop 43
gcacgatgagttactgaaatattat

SEQ ID NO: 257113 - DNA, 25 bp, Artificial
  probe
  misc_feature (1)..(25): SEQ ID NO: 158; WAN0249KF; Start 44; Stop 68
catgaatcaagaattggagttaatt

SEQ ID NO: 257114 - DNA, 25 bp, Artificial
  probe
  misc_feature (1)..(25): SEQ ID NO: 158; WAN0249KF; Start 124; Stop 148
tgataaaggaagaaataatggagag

SEQ ID NO: 257115 - DNA, 25 bp, Artificial
  probe
  misc_feature (1)..(25): SEQ ID NO: 158; WAN0249KF; Start 123; Stop 147
ttgataaaggaagaaataatggaga

SEQ ID NO: 257116 - DNA, 25 bp, Artificial
  probe
  misc_feature (1)..(25): SEQ ID NO: 158; WAN0249KF; Start 122; Stop 146
cttgataaaggaagaaataatggag

SEQ ID NO: 257117 - DNA, 25 bp, Artificial
  probe
  misc_feature (1)..(25): SEQ ID NO: 158; WAN0249KF; Start 11; Stop 35
ttttaattgcacgatgagttactga

SEQ ID NO: 257118 - DNA, 25 bp, Artificial
  probe
  misc_feature (1)..(25): SEQ ID NO: 158; WAN0249KF; Start 43; Stop 67
tcatgaatcaagaattggagttaat

SEQ ID NO: 257119 - DNA, 25 bp, Artificial
  probe
  misc_feature (1)..(25): SEQ ID NO: 158; WAN0249KF; Start 42; Stop 66
atcatgaatcaagaattggagttaa

SEQ ID NO: 257120 - DNA, 25 bp, Artificial
  probe
  misc_feature (1)..(25): SEQ ID NO: 158; WAN0249KF; Start 40; Stop 64
ttatcatgaatcaagaattggagtt

SEQ ID NO: 257121 - DNA, 25 bp, Artificial
  probe
  misc_feature (1)..(25): SEQ ID NO: 158; WAN0249KF; Start 39; Stop 63
attatcatgaatcaagaattggagt

SEQ ID NO: 257122 - DNA, 25 bp, Artificial
  probe
  misc_feature (1)..(25): SEQ ID NO: 158; WAN0249KF; Start 20; Stop 44
cacgatgagttactgaaatattatc

SEQ ID NO: 257123 - DNA, 25 bp, Artificial
  probe
  misc_feature (1)..(25): SEQ ID NO: 158; WAN0249KF; Start 21; Stop 45
acgatgagttactgaaatattatca

SEQ ID NO: 257124 - DNA, 25 bp, Artificial
  probe
  misc_feature (1)..(25): SEQ ID NO: 158; WAN0249KF; Start 45; Stop 69
atgaatcaagaattggagttaattt

SEQ ID NO: 257125 - DNA, 25 bp, Artificial
  probe
  misc_feature (1)..(25): SEQ ID NO: 158; WAN0249KF; Start 41; Stop 65
tatcatgaatcaagaattggagtta

SEQ ID NO: 257126 - DNA, 25 bp, Artificial
  probe
  misc_feature (1)..(25): SEQ ID NO: 158; WAN0249KF; Start 121; Stop 145
tcttgataaaggaagaaataatgga

SEQ ID NO: 257127 - DNA, 25 bp, Artificial
  probe
  misc_feature (1)..(25): SEQ ID NO: 158; WAN0249KF; Start 38; Stop 62
tattatcatgaatcaagaattggag

SEQ ID NO: 257128 - DNA, 25 bp, Artificial
  probe
  misc_feature (1)..(25): SEQ ID NO: 158; WAN0249KF; Start 120; Stop 144
ttcttgataaaggaagaaataatgg

SEQ ID NO: 257129 - DNA, 25 bp, Artificial
  probe
  misc_feature (1)..(25): SEQ ID NO: 159; WAN024AE9; Start 64; Stop 88
ggaaatagatttatatgctacagcg

SEQ ID NO: 257130 - DNA, 25 bp, Artificial
  probe
  misc_feature (1)..(25): SEQ ID NO: 159; WAN024AE9; Start 3; Stop 27
atctattataccacaagctaaacgt

SEQ ID NO: 257131 - DNA, 25 bp, Artificial
  probe
  misc_feature (1)..(25): SEQ ID NO: 159; WAN024AE9; Start 63; Stop 87
aggaaatagatttatatgctacagc

SEQ ID NO: 257132 - DNA, 25 bp, Artificial
  probe
  misc_feature (1)..(25): SEQ ID NO: 159; WAN024AE9; Start 2; Stop 26
aatctattataccacaagctaaacg

SEQ ID NO: 257133 - DNA, 25 bp, Artificial
  probe
  misc_feature (1)..(25): SEQ ID NO: 159; WAN024AE9; Start 74; Stop 98
ttatatgctacagcgcaataacttg

SEQ ID NO: 257134 - DNA, 25 bp, Artificial
  probe
  misc_feature (1)..(25): SEQ ID NO: 159; WAN024AE9; Start 65; Stop 89
gaaatagatttatatgctacagcgc

SEQ ID NO: 257135 - DNA, 25 bp, Artificial
  probe
  misc_feature (1)..(25): SEQ ID NO: 159; WAN024AE9; Start 4; Stop 28
tctattataccacaagctaaacgtt

SEQ ID NO: 257136 - DNA, 25 bp, Artificial
  probe
  misc_feature (1)..(25): SEQ ID NO: 159; WAN024AE9; Start 73; Stop 97
tttatatgctacagcgcaataactt

SEQ ID NO: 257137 - DNA, 25 bp, Artificial
  probe
  misc_feature (1)..(25): SEQ ID NO: 159; WAN024AE9; Start 1; Stop 25
aaatctattataccacaagctaaac

SEQ ID NO: 257138 - DNA, 25 bp, Artificial
  probe
  misc_feature (1)..(25): SEQ ID NO: 159; WAN024AE9; Start 72; Stop 96
atttatatgctacagcgcaataact

SEQ ID NO: 257139 - DNA, 25 bp, Artificial
  probe
  misc_feature (1)..(25): SEQ ID NO: 159; WAN024AE9; Start 71; Stop 95
gatttatatgctacagcgcaataac

SEQ ID NO: 257140 - DNA, 25 bp, Artificial
  probe
  misc_feature (1)..(25): SEQ ID NO: 159; WAN024AE9; Start 70; Stop 94
agatttatatgctacagcgcaataa

SEQ ID NO: 257141 - DNA, 25 bp, Artificial
  probe
  misc_feature (1)..(25): SEQ ID NO: 159; WAN024AE9; Start 67; Stop 91
aatagatttatatgctacagcgcaa

SEQ ID NO: 257142 - DNA, 25 bp, Artificial
  probe
  misc_feature (1)..(25): SEQ ID NO: 159; WAN024AE9; Start 66; Stop 90
aaatagatttatatgctacagcgca

SEQ ID NO: 257143 - DNA, 25 bp, Artificial
  probe
  misc_feature (1)..(25): SEQ ID NO: 159; WAN024AE9; Start 68; Stop 92
atagatttatatgctacagcgcaat

SEQ ID NO: 257144 - DNA, 25 bp, Artificial
  probe
  misc_feature (1)..(25): SEQ ID NO: 159; WAN024AE9; Start 69; Stop 93
tagatttatatgctacagcgcaata

SEQ ID NO: 257145 - DNA, 25 bp, Artificial
  probe
  misc_feature (1)..(25): SEQ ID NO: 159; WAN024AE9; Start 23; Stop 47
aacgtttcaaattaactcgtagaac

SEQ ID NO: 257146 - DNA, 25 bp, Artificial
  probe
  misc_feature (1)..(25): SEQ ID NO: 159; WAN024AE9; Start 75; Stop 99
tatatgctacagcgcaataacttgc

SEQ ID NO: 257147 - DNA, 25 bp, Artificial
  probe
  misc_feature (1)..(25): SEQ ID NO: 159; WAN024AE9; Start 76; Stop 100
atatgctacagcgcaataacttgca

SEQ ID NO: 257148 - DNA, 25 bp, Artificial
  probe
  misc_feature (1)..(25): SEQ ID NO: 159; WAN024AE9; Start 77; Stop 101
tatgctacagcgcaataacttgcac

SEQ ID NO: 257149 - DNA, 25 bp, Artificial
  probe
  misc_feature (1)..(25): SEQ ID NO: 160; WAN024A26; Start 78; Stop 102
ttatcttgtgcttcattctgttctg

SEQ ID NO: 257150 - DNA, 25 bp, Artificial
  probe
  misc_feature (1)..(25): SEQ ID NO: 160; WAN024A26; Start 79; Stop 103
tatcttgtgcttcattctgttctga

SEQ ID NO: 257151 - DNA, 25 bp, Artificial
  probe
  misc_feature (1)..(25): SEQ ID NO: 160; WAN024A26; Start 84; Stop 108
tgtgcttcattctgttctgacttaa

SEQ ID NO: 257152 - DNA, 25 bp, Artificial
  probe
  misc_feature (1)..(25): SEQ ID NO: 160; WAN024A26; Start 83; Stop 107
ttgtgcttcattctgttctgactta

SEQ ID NO: 257153 - DNA, 25 bp, Artificial
  probe
  misc_feature (1)..(25): SEQ ID NO: 160; WAN024A26; Start 80; Stop 104
atcttgtgcttcattctgttctgac

SEQ ID NO: 257154 - DNA, 25 bp, Artificial
  probe
  misc_feature (1)..(25): SEQ ID NO: 160; WAN024A26; Start 82; Stop 106
cttgtgcttcattctgttctgactt

SEQ ID NO: 257155 - DNA, 25 bp, Artificial
  probe
  misc_feature (1)..(25): SEQ ID NO: 160; WAN024A26; Start 81; Stop 105
tcttgtgcttcattctgttctgact

SEQ ID NO: 257156 - DNA, 25 bp, Artificial
  probe
  misc_feature (1)..(25): SEQ ID NO: 160; WAN024A26; Start 77; Stop 101
tttatcttgtgcttcattctgttct

SEQ ID NO: 257157 - DNA, 25 bp, Artificial
  probe
  misc_feature (1)..(25): SEQ ID NO: 160; WAN024A26; Start 121; Stop 145
gctaccaatacaaatgatgaggata

SEQ ID NO: 257158 - DNA, 25 bp, Artificial
  probe
  misc_feature (1)..(25): SEQ ID NO: 160; WAN024A26; Start 85; Stop 109
gtgcttcattctgttctgacttaaa

SEQ ID NO: 257159 - DNA, 25 bp, Artificial
  probe
  misc_feature (1)..(25): SEQ ID NO: 160; WAN024A26; Start 5; Stop 29
gaatgagctatctggccttaagtta

SEQ ID NO: 257160 - DNA, 25 bp, Artificial
  probe
  misc_feature (1)..(25): SEQ ID NO: 160; WAN024A26; Start 6; Stop 30
aatgagctatctggccttaagttaa

SEQ ID NO: 257161 - DNA, 25 bp, Artificial
  probe
  misc_feature (1)..(25): SEQ ID NO: 160; WAN024A26; Start 2; Stop 26
aatgaatgagctatctggccttaag

SEQ ID NO: 257162 - DNA, 25 bp, Artificial
  probe
  misc_feature (1)..(25): SEQ ID NO: 160; WAN024A26; Start 120; Stop 144
agctaccaatacaaatgatgaggat

SEQ ID NO: 257163 - DNA, 25 bp, Artificial
  probe
  misc_feature (1)..(25): SEQ ID NO: 160; WAN024A26; Start 3; Stop 27
atgaatgagctatctggccttaagt

SEQ ID NO: 257164 - DNA, 25 bp, Artificial
  probe
  misc_feature (1)..(25): SEQ ID NO: 160; WAN024A26; Start 4; Stop 28
tgaatgagctatctggccttaagtt

SEQ ID NO: 257165 - DNA, 25 bp, Artificial
  probe
  misc_feature (1)..(25): SEQ ID NO: 160; WAN024A26; Start 7; Stop 31
atgagctatctggccttaagttaag

SEQ ID NO: 257166 - DNA, 25 bp, Artificial
  probe
  misc_feature (1)..(25): SEQ ID NO: 160; WAN024A26; Start 122; Stop 146
ctaccaatacaaatgatgaggataa

SEQ ID NO: 257167 - DNA, 25 bp, Artificial
  probe
  misc_feature (1)..(25): SEQ ID NO: 160; WAN024A26; Start 1; Stop 25
aaatgaatgagctatctggccttaa

SEQ ID NO: 257168 - DNA, 25 bp, Artificial
  probe
  misc_feature (1)..(25): SEQ ID NO: 160; WAN024A26; Start 119; Stop 143
tagctaccaatacaaatgatgagga

SEQ ID NO: 257169 - DNA, 25 bp, Artificial
  probe
  misc_feature (1)..(25): SEQ ID NO: 160; WAN024A26; Start 76; Stop 100
ttttatcttgtgcttcattctgttc

SEQ ID NO: 257170 - DNA, 25 bp, Artificial
  probe
  misc_feature (1)..(25): SEQ ID NO: 160; WAN024A26; Start 86; Stop 110
tgcttcattctgttctgacttaaaa

SEQ ID NO: 257171 - DNA, 25 bp, Artificial
  probe
  misc_feature (1)..(25): SEQ ID NO: 160; WAN024A26; Start 123; Stop 147
taccaatacaaatgatgaggataaa

SEQ ID NO: 257172 - DNA, 25 bp, Artificial
  probe
  misc_feature (1)..(25): SEQ ID NO: 160; WAN024A26; Start 95; Stop 119
ctgttctgacttaaaatgaaaaggt

SEQ ID NO: 257173 - DNA, 25 bp, Artificial
  probe
  misc_feature (1)..(25): SEQ ID NO: 160; WAN024A26; Start 98; Stop 122
ttctgacttaaaatgaaaaggtagc

SEQ ID NO: 257174 - DNA, 25 bp, Artificial
  probe
  misc_feature (1)..(25): SEQ ID NO: 160; WAN024A26; Start 87; Stop 111
gcttcattctgttctgacttaaaat

SEQ ID NO: 257175 - DNA, 25 bp, Artificial
  probe
  misc_feature (1)..(25): SEQ ID NO: 160; WAN024A26; Start 94; Stop 118
tctgttctgacttaaaatgaaaagg

SEQ ID NO: 257176 - DNA, 25 bp, Artificial
  probe
  misc_feature (1)..(25): SEQ ID NO: 160; WAN024A26; Start 99; Stop 123
tctgacttaaaatgaaaaggtagct

SEQ ID NO: 257177 - DNA, 25 bp, Artificial
  probe
  misc_feature (1)..(25): SEQ ID NO: 160; WAN024A26; Start 124; Stop 148
accaatacaaatgatgaggataaaa

SEQ ID NO: 257178 - DNA, 25 bp, Artificial
  probe
  misc_feature (1)..(25): SEQ ID NO: 160; WAN024A26; Start 96; Stop 120
tgttctgacttaaaatgaaaaggta

SEQ ID NO: 257179 - DNA, 25 bp, Artificial
  probe
  misc_feature (1)..(25): SEQ ID NO: 160; WAN024A26; Start 125; Stop 149
ccaatacaaatgatgaggataaaac

SEQ ID NO: 257180 - DNA, 25 bp, Artificial
  probe
  misc_feature (1)..(25): SEQ ID NO: 160; WAN024A26; Start 97; Stop 121
gttctgacttaaaatgaaaaggtag

SEQ ID NO: 257181 - DNA, 25 bp, Artificial
  probe
  misc_feature (1)..(25): SEQ ID NO: 160; WAN024A26; Start 93; Stop 117
ttctgttctgacttaaaatgaaaag

SEQ ID NO: 257182 - DNA, 25 bp, Artificial
  probe
  misc_feature (1)..(25): SEQ ID NO: 161; WAN024A5Y; Start 48; Stop 72
atgaacccaacatttccataataaa

SEQ ID NO: 257183 - DNA, 25 bp, Artificial
  probe
  misc_feature (1)..(25): SEQ ID NO: 161; WAN024A5Y; Start 53; Stop 77
cccaacatttccataataaaacgca

SEQ ID NO: 257184 - DNA, 25 bp, Artificial
  probe
  misc_feature (1)..(25): SEQ ID NO: 161; WAN024A5Y; Start 52; Stop 76
acccaacatttccataataaaacgc

SEQ ID NO: 257185 - DNA, 25 bp, Artificial
  probe
  misc_feature (1)..(25): SEQ ID NO: 161; WAN024A5Y; Start 54; Stop 78
ccaacatttccataataaaacgcat

SEQ ID NO: 257186 - DNA, 25 bp, Artificial
  probe
  misc_feature (1)..(25): SEQ ID NO: 161; WAN024A5Y; Start 51; Stop 75
aacccaacatttccataataaaacg

SEQ ID NO: 257187 - DNA, 25 bp, Artificial
  probe
  misc_feature (1)..(25): SEQ ID NO: 161; WAN024A5Y; Start 47; Stop 71
aatgaacccaacatttccataataa

SEQ ID NO: 257188 - DNA, 25 bp, Artificial
  probe
  misc_feature (1)..(25): SEQ ID NO: 161; WAN024A5Y; Start 49; Stop 73
tgaacccaacatttccataataaaa

SEQ ID NO: 257189 - DNA, 25 bp, Artificial
  probe
  misc_feature (1)..(25): SEQ ID NO: 161; WAN024A5Y; Start 50; Stop 74
gaacccaacatttccataataaaac

SEQ ID NO: 257190 - DNA, 25 bp, Artificial
  probe
  misc_feature (1)..(25): SEQ ID NO: 161; WAN024A5Y; Start 55; Stop 79
caacatttccataataaaacgcata

SEQ ID NO: 257191 - DNA, 25 bp, Artificial
  probe
  misc_feature (1)..(25): SEQ ID NO: 161; WAN024A5Y; Start 36; Stop 60
ttttaagagaaaatgaacccaacat

SEQ ID NO: 257192 - DNA, 25 bp, Artificial
  probe
  misc_feature (1)..(25): SEQ ID NO: 161; WAN024A5Y; Start 62; Stop 86
tccataataaaacgcatattagcaa

SEQ ID NO: 257193 - DNA, 25 bp, Artificial
  probe
  misc_feature (1)..(25): SEQ ID NO: 161; WAN024A5Y; Start 61; Stop 85
ttccataataaaacgcatattagca

SEQ ID NO: 257194 - DNA, 25 bp, Artificial
  probe
  misc_feature (1)..(25): SEQ ID NO: 161; WAN024A5Y; Start 63; Stop 87
ccataataaaacgcatattagcaag

SEQ ID NO: 257195 - DNA, 25 bp, Artificial
  probe
  misc_feature (1)..(25): SEQ ID NO: 161; WAN024A5Y; Start 37; Stop 61
tttaagagaaaatgaacccaacatt

SEQ ID NO: 257196 - DNA, 25 bp, Artificial
  probe
  misc_feature (1)..(25): SEQ ID NO: 161; WAN024A5Y; Start 56; Stop 80
aacatttccataataaaacgcatat

SEQ ID NO: 257197 - DNA, 25 bp, Artificial
  probe
  misc_feature (1)..(25): SEQ ID NO: 161; WAN024A5Y; Start 64; Stop 88
cataataaaacgcatattagcaagt

SEQ ID NO: 257198 - DNA, 25 bp, Artificial
  probe
  misc_feature (1)..(25): SEQ ID NO: 161; WAN024A5Y; Start 60; Stop 84
tttccataataaaacgcatattagc

SEQ ID NO: 257199 - DNA, 25 bp, Artificial
  probe
  misc_feature (1)..(25): SEQ ID NO: 161; WAN024A5Y; Start 57; Stop 81
acatttccataataaaacgcatatt

SEQ ID NO: 257200 - DNA, 25 bp, Artificial
  probe
  misc_feature (1)..(25): SEQ ID NO: 161; WAN024A5Y; Start 35; Stop 59
attttaagagaaaatgaacccaaca

SEQ ID NO: 257201 - DNA, 25 bp, Artificial
  probe
  misc_feature (1)..(25): SEQ ID NO: 161; WAN024A5Y; Start 32; Stop 56
tcaattttaagagaaaatgaaccca

SEQ ID NO: 257202 - DNA, 25 bp, Artificial
  probe
  misc_feature (1)..(25): SEQ ID NO: 161; WAN024A5Y; Start 46; Stop 70
aaatgaacccaacatttccataata

SEQ ID NO: 257203 - DNA, 25 bp, Artificial
  probe
  misc_feature (1)..(25): SEQ ID NO: 161; WAN024A5Y; Start 65; Stop 89
ataataaaacgcatattagcaagtt

SEQ ID NO: 257204 - DNA, 25 bp, Artificial
  probe
  misc_feature (1)..(25): SEQ ID NO: 161; WAN024A5Y; Start 42; Stop 66
gagaaaatgaacccaacatttccat

SEQ ID NO: 257205 - DNA, 25 bp, Artificial
  probe
  misc_feature (1)..(25): SEQ ID NO: 161; WAN024A5Y; Start 40; Stop 64
aagagaaaatgaacccaacatttcc

SEQ ID NO: 257206 - DNA, 25 bp, Artificial
  probe
  misc_feature (1)..(25): SEQ ID NO: 161; WAN024A5Y; Start 43; Stop 67
agaaaatgaacccaacatttccata

SEQ ID NO: 257207 - DNA, 25 bp, Artificial
  probe
  misc_feature (1)..(25): SEQ ID NO: 161; WAN024A5Y; Start 34; Stop 58
aattttaagagaaaatgaacccaac

SEQ ID NO: 257208 - DNA, 25 bp, Artificial
  probe
  misc_feature (1)..(25): SEQ ID NO: 161; WAN024A5Y; Start 33; Stop 57
caattttaagagaaaatgaacccaa

SEQ ID NO: 257209 - DNA, 25 bp, Artificial
  probe
  misc_feature (1)..(25): SEQ ID NO: 161; WAN024A5Y; Start 41; Stop 65
agagaaaatgaacccaacatttcca

SEQ ID NO: 257210 - DNA, 25 bp, Artificial
  probe
  misc_feature (1)..(25): SEQ ID NO: 161; WAN024A5Y; Start 66; Stop 90
taataaaacgcatattagcaagttt

SEQ ID NO: 257211 - DNA, 25 bp, Artificial
  probe
  misc_feature (1)..(25): SEQ ID NO: 161; WAN024A5Y; Start 44; Stop 68
gaaaatgaacccaacatttccataa

SEQ ID NO: 257212 - DNA, 25 bp, Artificial
  probe
  misc_feature (1)..(25): SEQ ID NO: 161; WAN024A5Y; Start 31; Stop 55
atcaattttaagagaaaatgaaccc

SEQ ID NO: 257213 - DNA, 25 bp, Artificial
  probe
  misc_feature (1)..(25): SEQ ID NO: 161; WAN024A5Y; Start 39; Stop 63
taagagaaaatgaacccaacatttc

SEQ ID NO: 257214 - DNA, 25 bp, Artificial
  probe
  misc_feature (1)..(25): SEQ ID NO: 161; WAN024A5Y; Start 45; Stop 69
aaaatgaacccaacatttccataat

SEQ ID NO: 257215 - DNA, 25 bp, Artificial
  probe
  misc_feature (1)..(25): SEQ ID NO: 162; WAN0249D2; Start 168; Stop 192
tttacatagtgaaatgaggaggaat

SEQ ID NO: 257216 - DNA, 25 bp, Artificial
  probe
  misc_feature (1)..(25): SEQ ID NO: 162; WAN0249D2; Start 169; Stop 193
ttacatagtgaaatgaggaggaatt

SEQ ID NO: 257217 - DNA, 25 bp, Artificial
  probe
  misc_feature (1)..(25): SEQ ID NO: 162; WAN0249D2; Start 170; Stop 194
tacatagtgaaatgaggaggaattt

SEQ ID NO: 257218 - DNA, 25 bp, Artificial
  probe
  misc_feature (1)..(25): SEQ ID NO: 162; WAN0249D2; Start 167; Stop 191
ttttacatagtgaaatgaggaggaa

SEQ ID NO: 257219 - DNA, 25 bp, Artificial
  probe
  misc_feature (1)..(25): SEQ ID NO: 162; WAN0249D2; Start 91; Stop 115
tggattgacaactttattatgtagt

SEQ ID NO: 257220 - DNA, 25 bp, Artificial
  probe
  misc_feature (1)..(25): SEQ ID NO: 162; WAN0249D2; Start 90; Stop 114
ttggattgacaactttattatgtag

SEQ ID NO: 257221 - DNA, 25 bp, Artificial
  probe
  misc_feature (1)..(25): SEQ ID NO: 162; WAN0249D2; Start 4; Stop 28
tgatagactgattcagtttatcgtt

SEQ ID NO: 257222 - DNA, 25 bp, Artificial
  probe
  misc_feature (1)..(25): SEQ ID NO: 162; WAN0249D2; Start 3; Stop 27
atgatagactgattcagtttatcgt

SEQ ID NO: 257223 - DNA, 25 bp, Artificial
  probe
  misc_feature (1)..(25): SEQ ID NO: 162; WAN0249D2; Start 92; Stop 116
ggattgacaactttattatgtagtt

SEQ ID NO: 257224 - DNA, 25 bp, Artificial
  probe
  misc_feature (1)..(25): SEQ ID NO: 162; WAN0249D2; Start 88; Stop 112
ttttggattgacaactttattatgt

SEQ ID NO: 257225 - DNA, 25 bp, Artificial
  probe
  misc_feature (1)..(25): SEQ ID NO: 162; WAN0249D2; Start 5; Stop 29
gatagactgattcagtttatcgttt

SEQ ID NO: 257226 - DNA, 25 bp, Artificial
  probe
  misc_feature (1)..(25): SEQ ID NO: 162; WAN0249D2; Start 2; Stop 26
aatgatagactgattcagtttatcg

SEQ ID NO: 257227 - DNA, 25 bp, Artificial
  probe
  misc_feature (1)..(25): SEQ ID NO: 162; WAN0249D2; Start 6; Stop 30
atagactgattcagtttatcgtttt

SEQ ID NO: 257228 - DNA, 25 bp, Artificial
  probe
  misc_feature (1)..(25): SEQ ID NO: 162; WAN0249D2; Start 1; Stop 25
aaatgatagactgattcagtttatc

SEQ ID NO: 257229 - DNA, 25 bp, Artificial
  probe
  misc_feature (1)..(25): SEQ ID NO: 163; WAN0249SZ; Start 56; Stop 80
catcaagaaagtcaagccagataac

SEQ ID NO: 257230 - DNA, 25 bp, Artificial
  probe
  misc_feature (1)..(25): SEQ ID NO: 163; WAN0249SZ; Start 55; Stop 79
ccatcaagaaagtcaagccagataa

SEQ ID NO: 257231 - DNA, 25 bp, Artificial
  probe
  misc_feature (1)..(25): SEQ ID NO: 163; WAN0249SZ; Start 57; Stop 81
atcaagaaagtcaagccagataact

SEQ ID NO: 257232 - DNA, 25 bp, Artificial
  probe
  misc_feature (1)..(25): SEQ ID NO: 163; WAN0249SZ; Start 61; Stop 85
agaaagtcaagccagataactcaaa

SEQ ID NO: 257233 - DNA, 25 bp, Artificial
  probe
  misc_feature (1)..(25): SEQ ID NO: 163; WAN0249SZ; Start 60; Stop 84
aagaaagtcaagccagataactcaa

SEQ ID NO: 257234 - DNA, 25 bp, Artificial
  probe
  misc_feature (1)..(25): SEQ ID NO: 163; WAN0249SZ; Start 58; Stop 82
tcaagaaagtcaagccagataactc

SEQ ID NO: 257235 - DNA, 25 bp, Artificial
  probe
  misc_feature (1)..(25): SEQ ID NO: 163; WAN0249SZ; Start 59; Stop 83
caagaaagtcaagccagataactca

SEQ ID NO: 257236 - DNA, 25 bp, Artificial
  probe
  misc_feature (1)..(25): SEQ ID NO: 163; WAN0249SZ; Start 54; Stop 78
tccatcaagaaagtcaagccagata

SEQ ID NO: 257237 - DNA, 25 bp, Artificial
  probe
  misc_feature (1)..(25): SEQ ID NO: 163; WAN0249SZ; Start 53; Stop 77
ttccatcaagaaagtcaagccagat

SEQ ID NO: 257238 - DNA, 25 bp, Artificial
  probe
  misc_feature (1)..(25): SEQ ID NO: 163; WAN0249SZ; Start 49; Stop 73
taatttccatcaagaaagtcaagcc

SEQ ID NO: 257239 - DNA, 25 bp, Artificial
  probe
  misc_feature (1)..(25): SEQ ID NO: 163; WAN0249SZ; Start 50; Stop 74
aatttccatcaagaaagtcaagcca

SEQ ID NO: 257240 - DNA, 25 bp, Artificial
  probe
  misc_feature (1)..(25): SEQ ID NO: 163; WAN0249SZ; Start 2; Stop 26
aatggtcctcttttctcgttgtaat

SEQ ID NO: 257241 - DNA, 25 bp, Artificial
  probe
  misc_feature (1)..(25): SEQ ID NO: 163; WAN0249SZ; Start 1; Stop 25
aaatggtcctcttttctcgttgtaa

SEQ ID NO: 257242 - DNA, 25 bp, Artificial
  probe
  misc_feature (1)..(25): SEQ ID NO: 163; WAN0249SZ; Start 51; Stop 75
atttccatcaagaaagtcaagccag

SEQ ID NO: 257243 - DNA, 25 bp, Artificial
  probe
  misc_feature (1)..(25): SEQ ID NO: 163; WAN0249SZ; Start 3; Stop 27
atggtcctcttttctcgttgtaatt

SEQ ID NO: 257244 - DNA, 25 bp, Artificial
  probe
  misc_feature (1)..(25): SEQ ID NO: 163; WAN0249SZ; Start 48; Stop 72
ataatttccatcaagaaagtcaagc

SEQ ID NO: 257245 - DNA, 25 bp, Artificial
  probe
  misc_feature (1)..(25): SEQ ID NO: 163; WAN0249SZ; Start 214; Stop 238
acttgatactcagtgaaaagcaaag

SEQ ID NO: 257246 - DNA, 25 bp, Artificial
  probe
  misc_feature (1)..(25): SEQ ID NO: 163; WAN0249SZ; Start 62; Stop 86
gaaagtcaagccagataactcaaaa

SEQ ID NO: 257247 - DNA, 25 bp, Artificial
  probe
  misc_feature (1)..(25): SEQ ID NO: 163; WAN0249SZ; Start 215; Stop 239
cttgatactcagtgaaaagcaaaga

SEQ ID NO: 257248 - DNA, 25 bp, Artificial
  probe
  misc_feature (1)..(25): SEQ ID NO: 163; WAN0249SZ; Start 213; Stop 237
aacttgatactcagtgaaaagcaaa

SEQ ID NO: 257249 - DNA, 25 bp, Artificial
  probe
  misc_feature (1)..(25): SEQ ID NO: 163; WAN0249SZ; Start 216; Stop 240
ttgatactcagtgaaaagcaaagat

SEQ ID NO: 257250 - DNA, 25 bp, Artificial
  probe
  misc_feature (1)..(25): SEQ ID NO: 163; WAN0249SZ; Start 212; Stop 236
taacttgatactcagtgaaaagcaa

SEQ ID NO: 257251 - DNA, 25 bp, Artificial
  probe
  misc_feature (1)..(25): SEQ ID NO: 163; WAN0249SZ; Start 211; Stop 235
ttaacttgatactcagtgaaaagca

SEQ ID NO: 257252 - DNA, 25 bp, Artificial
  probe
  misc_feature (1)..(25): SEQ ID NO: 163; WAN0249SZ; Start 4; Stop 28
tggtcctcttttctcgttgtaatta

SEQ ID NO: 257253 - DNA, 25 bp, Artificial
  probe
  misc_feature (1)..(25): SEQ ID NO: 163; WAN0249SZ; Start 52; Stop 76
tttccatcaagaaagtcaagccaga

SEQ ID NO: 257254 - DNA, 25 bp, Artificial
  probe
  misc_feature (1)..(25): SEQ ID NO: 163; WAN0249SZ; Start 5; Stop 29
ggtcctcttttctcgttgtaattat

SEQ ID NO: 257255 - DNA, 25 bp, Artificial
  probe
  misc_feature (1)..(25): SEQ ID NO: 163; WAN0249SZ; Start 133; Stop 157
acgcatattatcaaacttttcatca

SEQ ID NO: 257256 - DNA, 25 bp, Artificial
  probe
  misc_feature (1)..(25): SEQ ID NO: 163; WAN0249SZ; Start 90; Stop 114
acaccatttcaggataatataaagt

SEQ ID NO: 257257 - DNA, 25 bp, Artificial
  probe
  misc_feature (1)..(25): SEQ ID NO: 163; WAN0249SZ; Start 134; Stop 158
cgcatattatcaaacttttcatcac

SEQ ID NO: 257258 - DNA, 25 bp, Artificial
  probe
  misc_feature (1)..(25): SEQ ID NO: 163; WAN0249SZ; Start 210; Stop 234
tttaacttgatactcagtgaaaagc

SEQ ID NO: 257259 - DNA, 25 bp, Artificial
  probe
  misc_feature (1)..(25): SEQ ID NO: 163; WAN0249SZ; Start 135; Stop 159
gcatattatcaaacttttcatcacc

SEQ ID NO: 257260 - DNA, 25 bp, Artificial
  probe
  misc_feature (1)..(25): SEQ ID NO: 163; WAN0249SZ; Start 132; Stop 156
aacgcatattatcaaacttttcatc

SEQ ID NO: 257261 - DNA, 25 bp, Artificial
  probe
  misc_feature (1)..(25): SEQ ID NO: 163; WAN0249SZ; Start 6; Stop 30
gtcctcttttctcgttgtaattatt

SEQ ID NO: 257262 - DNA, 25 bp, Artificial
  probe
  misc_feature (1)..(25): SEQ ID NO: 164; WAN024ALP; Start 266; Stop 290
atcacgacctgtagttcctcttata

SEQ ID NO: 257263 - DNA, 25 bp, Artificial
  probe
  misc_feature (1)..(25): SEQ ID NO: 164; WAN024ALP; Start 267; Stop 291
tcacgacctgtagttcctcttatag

SEQ ID NO: 257264 - DNA, 25 bp, Artificial
  probe
  misc_feature (1)..(25): SEQ ID NO: 164; WAN024ALP; Start 268; Stop 292
cacgacctgtagttcctcttatagt

SEQ ID NO: 257265 - DNA, 25 bp, Artificial
  probe
  misc_feature (1)..(25): SEQ ID NO: 164; WAN024ALP; Start 265; Stop 289
catcacgacctgtagttcctcttat

SEQ ID NO: 257266 - DNA, 25 bp, Artificial
  probe
  misc_feature (1)..(25): SEQ ID NO: 164; WAN024ALP; Start 259; Stop 283
ctataacatcacgacctgtagttcc

SEQ ID NO: 257267 - DNA, 25 bp, Artificial
  probe
  misc_feature (1)..(25): SEQ ID NO: 164; WAN024ALP; Start 260; Stop 284
tataacatcacgacctgtagttcct

SEQ ID NO: 257268 - DNA, 25 bp, Artificial
  probe
  misc_feature (1)..(25): SEQ ID NO: 164; WAN024ALP; Start 270; Stop 294
cgacctgtagttcctcttatagtct

SEQ ID NO: 257269 - DNA, 25 bp, Artificial
  probe
  misc_feature (1)..(25): SEQ ID NO: 164; WAN024ALP; Start 258; Stop 282
gctataacatcacgacctgtagttc

SEQ ID NO: 257270 - DNA, 25 bp, Artificial
  probe
  misc_feature (1)..(25): SEQ ID NO: 164; WAN024ALP; Start 269; Stop 293
acgacctgtagttcctcttatagtc

SEQ ID NO: 257271 - DNA, 25 bp, Artificial
  probe
  misc_feature (1)..(25): SEQ ID NO: 164; WAN024ALP; Start 272; Stop 296
acctgtagttcctcttatagtctag

SEQ ID NO: 257272 - DNA, 25 bp, Artificial
  probe
  misc_feature (1)..(25): SEQ ID NO: 164; WAN024ALP; Start 261; Stop 285
ataacatcacgacctgtagttcctc

SEQ ID NO: 257273 - DNA, 25 bp, Artificial
  probe
  misc_feature (1)..(25): SEQ ID NO: 164; WAN024ALP; Start 273; Stop 297
cctgtagttcctcttatagtctagg

SEQ ID NO: 257274 - DNA, 25 bp, Artificial
  probe
  misc_feature (1)..(25): SEQ ID NO: 164; WAN024ALP; Start 271; Stop 295
gacctgtagttcctcttatagtcta

SEQ ID NO: 257275 - DNA, 25 bp, Artificial
  probe
  misc_feature (1)..(25): SEQ ID NO: 164; WAN024ALP; Start 257; Stop 281
ggctataacatcacgacctgtagtt

SEQ ID NO: 257276 - DNA, 25 bp, Artificial
  probe
  misc_feature (1)..(25): SEQ ID NO: 164; WAN024ALP; Start 255; Stop 279
ttggctataacatcacgacctgtag

SEQ ID NO: 257277 - DNA, 25 bp, Artificial
  probe
  misc_feature (1)..(25): SEQ ID NO: 164; WAN024ALP; Start 264; Stop 288
acatcacgacctgtagttcctctta

SEQ ID NO: 257278 - DNA, 25 bp, Artificial
  probe
  misc_feature (1)..(25): SEQ ID NO: 164; WAN024ALP; Start 262; Stop 286
taacatcacgacctgtagttcctct

SEQ ID NO: 257279 - DNA, 25 bp, Artificial
  probe
  misc_feature (1)..(25): SEQ ID NO: 164; WAN024ALP; Start 256; Stop 280
tggctataacatcacgacctgtagt

SEQ ID NO: 257280 - DNA, 25 bp, Artificial
  probe
  misc_feature (1)..(25): SEQ ID NO: 164; WAN024ALP; Start 282; Stop 306
cctcttatagtctaggagattgggt

SEQ ID NO: 257281 - DNA, 25 bp, Artificial
  probe
  misc_feature (1)..(25): SEQ ID NO: 164; WAN024ALP; Start 283; Stop 307
ctcttatagtctaggagattgggtt

SEQ ID NO: 257282 - DNA, 25 bp, Artificial
  probe
  misc_feature (1)..(25): SEQ ID NO: 164; WAN024ALP; Start 254; Stop 278
tttggctataacatcacgacctgta

SEQ ID NO: 257283 - DNA, 25 bp, Artificial
  probe
  misc_feature (1)..(25): SEQ ID NO: 164; WAN024ALP; Start 263; Stop 287
aacatcacgacctgtagttcctctt

SEQ ID NO: 257284 - DNA, 25 bp, Artificial
  probe
  misc_feature (1)..(25): SEQ ID NO: 164; WAN024ALP; Start 108; Stop 132
gataaacacattcgtccctgtcatg

SEQ ID NO: 257285 - DNA, 25 bp, Artificial
  probe
  misc_feature (1)..(25): SEQ ID NO: 164; WAN024ALP; Start 249; Stop 273
agaattttggctataacatcacgac

SEQ ID NO: 257286 - DNA, 25 bp, Artificial
  probe
  misc_feature (1)..(25): SEQ ID NO: 164; WAN024ALP; Start 250; Stop 274
gaattttggctataacatcacgacc

SEQ ID NO: 257287 - DNA, 25 bp, Artificial
  probe
  misc_feature (1)..(25): SEQ ID NO: 164; WAN024ALP; Start 251; Stop 275
aattttggctataacatcacgacct

SEQ ID NO: 257288 - DNA, 25 bp, Artificial
  probe
  misc_feature (1)..(25): SEQ ID NO: 164; WAN024ALP; Start 1; Stop 25
aaatgtgtcaaaactggttgctaat

SEQ ID NO: 257289 - DNA, 25 bp, Artificial
  probe
  misc_feature (1)..(25): SEQ ID NO: 164; WAN024ALP; Start 252; Stop 276
attttggctataacatcacgacctg

SEQ ID NO: 257290 - DNA, 25 bp, Artificial
  probe
  misc_feature (1)..(25): SEQ ID NO: 164; WAN024ALP; Start 2; Stop 26
aatgtgtcaaaactggttgctaatg

SEQ ID NO: 257291 - DNA, 25 bp, Artificial
  probe
  misc_feature (1)..(25): SEQ ID NO: 164; WAN024ALP; Start 107; Stop 131
ggataaacacattcgtccctgtcat

SEQ ID NO: 257292 - DNA, 25 bp, Artificial
  probe
  misc_feature (1)..(25): SEQ ID NO: 164; WAN024ALP; Start 248; Stop 272
tagaattttggctataacatcacga

SEQ ID NO: 257293 - DNA, 25 bp, Artificial
  probe
  misc_feature (1)..(25): SEQ ID NO: 164; WAN024ALP; Start 247; Stop 271
ttagaattttggctataacatcacg

SEQ ID NO: 257294 - DNA, 25 bp, Artificial
  probe
  misc_feature (1)..(25): SEQ ID NO: 164; WAN024ALP; Start 280; Stop 304
ttcctcttatagtctaggagattgg

SEQ ID NO: 257295 - DNA, 25 bp, Artificial
  probe
  misc_feature (1)..(25): SEQ ID NO: 165; WAN024AMF; Start 46; Stop 70
taaagagcgtttgaaatgggtctaa

SEQ ID NO: 257296 - DNA, 25 bp, Artificial
  probe
  misc_feature (1)..(25): SEQ ID NO: 165; WAN024AMF; Start 45; Stop 69
ttaaagagcgtttgaaatgggtcta

SEQ ID NO: 257297 - DNA, 25 bp, Artificial
  probe
  misc_feature (1)..(25): SEQ ID NO: 165; WAN024AMF; Start 47; Stop 71
aaagagcgtttgaaatgggtctaaa

SEQ ID NO: 257298 - DNA, 25 bp, Artificial
  probe
  misc_feature (1)..(25): SEQ ID NO: 165; WAN024AMF; Start 113; Stop 137
gcagtaaatatcccgacaatttcta

SEQ ID NO: 257299 - DNA, 25 bp, Artificial
  probe
  misc_feature (1)..(25): SEQ ID NO: 165; WAN024AMF; Start 35; Stop 59
tattccgaatttaaagagcgtttga

SEQ ID NO: 257300 - DNA, 25 bp, Artificial
  probe
  misc_feature (1)..(25): SEQ ID NO: 165; WAN024AMF; Start 36; Stop 60
attccgaatttaaagagcgtttgaa

SEQ ID NO: 257301 - DNA, 25 bp, Artificial
  probe
  misc_feature (1)..(25): SEQ ID NO: 165; WAN024AMF; Start 74; Stop 98
tgtttgaaactaattgaatgtgtgt

SEQ ID NO: 257302 - DNA, 25 bp, Artificial
  probe
  misc_feature (1)..(25): SEQ ID NO: 165; WAN024AMF; Start 37; Stop 61
ttccgaatttaaagagcgtttgaaa

SEQ ID NO: 257303 - DNA, 25 bp, Artificial
  probe
  misc_feature (1)..(25): SEQ ID NO: 165; WAN024AMF; Start 31; Stop 55
cctatattccgaatttaaagagcgt

SEQ ID NO: 257304 - DNA, 25 bp, Artificial
  probe
  misc_feature (1)..(25): SEQ ID NO: 165; WAN024AMF; Start 30; Stop 54
tcctatattccgaatttaaagagcg

SEQ ID NO: 257305 - DNA, 25 bp, Artificial
  probe
  misc_feature (1)..(25): SEQ ID NO: 165; WAN024AMF; Start 34; Stop 58
atattccgaatttaaagagcgtttg

SEQ ID NO: 257306 - DNA, 25 bp, Artificial
  probe
  misc_feature (1)..(25): SEQ ID NO: 165; WAN024AMF; Start 109; Stop 133
aaatgcagtaaatatcccgacaatt

SEQ ID NO: 257307 - DNA, 25 bp, Artificial
  probe
  misc_feature (1)..(25): SEQ ID NO: 165; WAN024AMF; Start 42; Stop 66
aatttaaagagcgtttgaaatgggt

SEQ ID NO: 257308 - DNA, 25 bp, Artificial
  probe
  misc_feature (1)..(25): SEQ ID NO: 165; WAN024AMF; Start 40; Stop 64
cgaatttaaagagcgtttgaaatgg

SEQ ID NO: 257309 - DNA, 25 bp, Artificial
  probe
  misc_feature (1)..(25): SEQ ID NO: 165; WAN024AMF; Start 39; Stop 63
ccgaatttaaagagcgtttgaaatg

SEQ ID NO: 257310 - DNA, 25 bp, Artificial
  probe
  misc_feature (1)..(25): SEQ ID NO: 165; WAN024AMF; Start 38; Stop 62
tccgaatttaaagagcgtttgaaat

SEQ ID NO: 257311 - DNA, 25 bp, Artificial
  probe
  misc_feature (1)..(25): SEQ ID NO: 165; WAN024AMF; Start 41; Stop 65
gaatttaaagagcgtttgaaatggg

SEQ ID NO: 257312 - DNA, 25 bp, Artificial
  probe
  misc_feature (1)..(25): SEQ ID NO: 165; WAN024AMF; Start 44; Stop 68
tttaaagagcgtttgaaatgggtct

SEQ ID NO: 257313 - DNA, 25 bp, Artificial
  probe
  misc_feature (1)..(25): SEQ ID NO: 165; WAN024AMF; Start 124; Stop 148
cccgacaatttctattgacaattca

SEQ ID NO: 257314 - DNA, 25 bp, Artificial
  probe
  misc_feature (1)..(25): SEQ ID NO: 165; WAN024AMF; Start 123; Stop 147
tcccgacaatttctattgacaattc

SEQ ID NO: 257315 - DNA, 25 bp, Artificial
  probe
  misc_feature (1)..(25): SEQ ID NO: 165; WAN024AMF; Start 43; Stop 67
atttaaagagcgtttgaaatgggtc

SEQ ID NO: 257316 - DNA, 25 bp, Artificial
  probe
  misc_feature (1)..(25): SEQ ID NO: 165; WAN024AMF; Start 122; Stop 146
atcccgacaatttctattgacaatt

SEQ ID NO: 257317 - DNA, 25 bp, Artificial
  probe
  misc_feature (1)..(25): SEQ ID NO: 165; WAN024AMF; Start 111; Stop 135
atgcagtaaatatcccgacaatttc

SEQ ID NO: 257318 - DNA, 25 bp, Artificial
  probe
  misc_feature (1)..(25): SEQ ID NO: 165; WAN024AMF; Start 112; Stop 136
tgcagtaaatatcccgacaatttct

SEQ ID NO: 257319 - DNA, 25 bp, Artificial
  probe
  misc_feature (1)..(25): SEQ ID NO: 165; WAN024AMF; Start 110; Stop 134
aatgcagtaaatatcccgacaattt

SEQ ID NO: 257320 - DNA, 25 bp, Artificial
  probe
  misc_feature (1)..(25): SEQ ID NO: 165; WAN024AMF; Start 29; Stop 53
gtcctatattccgaatttaaagagc

SEQ ID NO: 257321 - DNA, 25 bp, Artificial
  probe
  misc_feature (1)..(25): SEQ ID NO: 165; WAN024AMF; Start 73; Stop 97
atgtttgaaactaattgaatgtgtg

SEQ ID NO: 257322 - DNA, 25 bp, Artificial
  probe
  misc_feature (1)..(25): SEQ ID NO: 165; WAN024AMF; Start 32; Stop 56
ctatattccgaatttaaagagcgtt

SEQ ID NO: 257323 - DNA, 25 bp, Artificial
  probe
  misc_feature (1)..(25): SEQ ID NO: 165; WAN024AMF; Start 121; Stop 145
tatcccgacaatttctattgacaat

SEQ ID NO: 257324 - DNA, 25 bp, Artificial
  probe
  misc_feature (1)..(25): SEQ ID NO: 165; WAN024AMF; Start 120; Stop 144
atatcccgacaatttctattgacaa

SEQ ID NO: 257325 - DNA, 25 bp, Artificial
  probe
  misc_feature (1)..(25): SEQ ID NO: 165; WAN024AMF; Start 119; Stop 143
aatatcccgacaatttctattgaca

SEQ ID NO: 257326 - DNA, 25 bp, Artificial
  probe
  misc_feature (1)..(25): SEQ ID NO: 165; WAN024AMF; Start 27; Stop 51
aggtcctatattccgaatttaaaga

SEQ ID NO: 257327 - DNA, 25 bp, Artificial
  probe
  misc_feature (1)..(25): SEQ ID NO: 165; WAN024AMF; Start 114; Stop 138
cagtaaatatcccgacaatttctat

SEQ ID NO: 257328 - DNA, 25 bp, Artificial
  probe
  misc_feature (1)..(25): SEQ ID NO: 166; WAN0249O5; Start 91; Stop 115
tggtatttgtaaaattggtgttgga

SEQ ID NO: 257329 - DNA, 25 bp, Artificial
  probe
  misc_feature (1)..(25): SEQ ID NO: 166; WAN0249O5; Start 90; Stop 114
atggtatttgtaaaattggtgttgg

SEQ ID NO: 257330 - DNA, 25 bp, Artificial
  probe
  misc_feature (1)..(25): SEQ ID NO: 166; WAN0249O5; Start 92; Stop 116
ggtatttgtaaaattggtgttggat

SEQ ID NO: 257331 - DNA, 25 bp, Artificial
  probe
  misc_feature (1)..(25): SEQ ID NO: 166; WAN0249O5; Start 97; Stop 121
ttgtaaaattggtgttggattatga

SEQ ID NO: 257332 - DNA, 25 bp, Artificial
  probe
  misc_feature (1)..(25): SEQ ID NO: 166; WAN0249O5; Start 36; Stop 60
ttctaaaatagtggaaagaggactt

SEQ ID NO: 257333 - DNA, 25 bp, Artificial
  probe
  misc_feature (1)..(25): SEQ ID NO: 166; WAN0249O5; Start 98; Stop 122
tgtaaaattggtgttggattatgat

SEQ ID NO: 257334 - DNA, 25 bp, Artificial
  probe
  misc_feature (1)..(25): SEQ ID NO: 166; WAN0249O5; Start 96; Stop 120
tttgtaaaattggtgttggattatg

SEQ ID NO: 257335 - DNA, 25 bp, Artificial
  probe
  misc_feature (1)..(25): SEQ ID NO: 166; WAN0249O5; Start 102; Stop 126
aaattggtgttggattatgatttaa

SEQ ID NO: 257336 - DNA, 25 bp, Artificial
  probe
  misc_feature (1)..(25): SEQ ID NO: 166; WAN0249O5; Start 93; Stop 117
gtatttgtaaaattggtgttggatt

SEQ ID NO: 257337 - DNA, 25 bp, Artificial
  probe
  misc_feature (1)..(25): SEQ ID NO: 166; WAN0249O5; Start 99; Stop 123
gtaaaattggtgttggattatgatt

SEQ ID NO: 257338 - DNA, 25 bp, Artificial
  probe
  misc_feature (1)..(25): SEQ ID NO: 166; WAN0249O5; Start 37; Stop 61
tctaaaatagtggaaagaggacttt

SEQ ID NO: 257339 - DNA, 25 bp, Artificial
  probe
  misc_feature (1)..(25): SEQ ID NO: 166; WAN0249O5; Start 35; Stop 59
tttctaaaatagtggaaagaggact

SEQ ID NO: 257340 - DNA, 25 bp, Artificial
  probe
  misc_feature (1)..(25): SEQ ID NO: 166; WAN0249O5; Start 27; Stop 51
aagttctctttctaaaatagtggaa

SEQ ID NO: 257341 - DNA, 25 bp, Artificial
  probe
  misc_feature (1)..(25): SEQ ID NO: 166; WAN0249O5; Start 89; Stop 113
tatggtatttgtaaaattggtgttg

SEQ ID NO: 257342 - DNA, 25 bp, Artificial
  probe
  misc_feature (1)..(25): SEQ ID NO: 166; WAN0249O5; Start 38; Stop 62
ctaaaatagtggaaagaggactttt

SEQ ID NO: 257343 - DNA, 25 bp, Artificial
  probe
  misc_feature (1)..(25): SEQ ID NO: 166; WAN0249O5; Start 95; Stop 119
atttgtaaaattggtgttggattat

SEQ ID NO: 257344 - DNA, 25 bp, Artificial
  probe
  misc_feature (1)..(25): SEQ ID NO: 166; WAN0249O5; Start 101; Stop 125
aaaattggtgttggattatgattta

SEQ ID NO: 257345 - DNA, 25 bp, Artificial
  probe
  misc_feature (1)..(25): SEQ ID NO: 166; WAN0249O5; Start 100; Stop 124
taaaattggtgttggattatgattt

SEQ ID NO: 257346 - DNA, 25 bp, Artificial
  probe
  misc_feature (1)..(25): SEQ ID NO: 166; WAN0249O5; Start 88; Stop 112
ttatggtatttgtaaaattggtgtt

SEQ ID NO: 257347 - DNA, 25 bp, Artificial
  probe
  misc_feature (1)..(25): SEQ ID NO: 166; WAN0249O5; Start 87; Stop 111
tttatggtatttgtaaaattggtgt

SEQ ID NO: 257348 - DNA, 25 bp, Artificial
  probe
  misc_feature (1)..(25): SEQ ID NO: 166; WAN0249O5; Start 86; Stop 110
gtttatggtatttgtaaaattggtg

SEQ ID NO: 257349 - DNA, 25 bp, Artificial
  probe
  misc_feature (1)..(25): SEQ ID NO: 166; WAN0249O5; Start 28; Stop 52
agttctctttctaaaatagtggaaa

SEQ ID NO: 257350 - DNA, 25 bp, Artificial
  probe
  misc_feature (1)..(25): SEQ ID NO: 166; WAN0249O5; Start 26; Stop 50
aaagttctctttctaaaatagtgga

SEQ ID NO: 257351 - DNA, 25 bp, Artificial
  probe
  misc_feature (1)..(25): SEQ ID NO: 166; WAN0249O5; Start 94; Stop 118
tatttgtaaaattggtgttggatta

SEQ ID NO: 257352 - DNA, 25 bp, Artificial
  probe
  misc_feature (1)..(25): SEQ ID NO: 166; WAN0249O5; Start 85; Stop 109
agtttatggtatttgtaaaattggt

SEQ ID NO: 257353 - DNA, 25 bp, Artificial
  probe
  misc_feature (1)..(25): SEQ ID NO: 166; WAN0249O5; Start 60; Stop 84
ttttgtgttttgggtatataagctt

SEQ ID NO: 257354 - DNA, 25 bp, Artificial
  probe
  misc_feature (1)..(25): SEQ ID NO: 166; WAN0249O5; Start 25; Stop 49
aaaagttctctttctaaaatagtgg

SEQ ID NO: 257355 - DNA, 25 bp, Artificial
  probe
  misc_feature (1)..(25): SEQ ID NO: 167; WAN024ASP; Start 8; Stop 32
taaatggtgtcaattaggttggaaa

SEQ ID NO: 257356 - DNA, 25 bp, Artificial
  probe
  misc_feature (1)..(25): SEQ ID NO: 167; WAN024ASP; Start 7; Stop 31
ataaatggtgtcaattaggttggaa

SEQ ID NO: 257357 - DNA, 25 bp, Artificial
  probe
  misc_feature (1)..(25): SEQ ID NO: 167; WAN024ASP; Start 6; Stop 30
aataaatggtgtcaattaggttgga

SEQ ID NO: 257358 - DNA, 25 bp, Artificial
  probe
  misc_feature (1)..(25): SEQ ID NO: 167; WAN024ASP; Start 5; Stop 29
taataaatggtgtcaattaggttgg

SEQ ID NO: 257359 - DNA, 25 bp, Artificial
  probe
  misc_feature (1)..(25): SEQ ID NO: 167; WAN024ASP; Start 9; Stop 33
aaatggtgtcaattaggttggaaaa

SEQ ID NO: 257360 - DNA, 25 bp, Artificial
  probe
  misc_feature (1)..(25): SEQ ID NO: 167; WAN024ASP; Start 4; Stop 28
ttaataaatggtgtcaattaggttg

SEQ ID NO: 257361 - DNA, 25 bp, Artificial
  probe
  misc_feature (1)..(25): SEQ ID NO: 167; WAN024ASP; Start 33; Stop 57
aaaattccaacccttttggcttttg

SEQ ID NO: 257362 - DNA, 25 bp, Artificial
  probe
  misc_feature (1)..(25): SEQ ID NO: 167; WAN024ASP; Start 36; Stop 60
attccaacccttttggcttttgaaa

SEQ ID NO: 257363 - DNA, 25 bp, Artificial
  probe
  misc_feature (1)..(25): SEQ ID NO: 167; WAN024ASP; Start 35; Stop 59
aattccaacccttttggcttttgaa

SEQ ID NO: 257364 - DNA, 25 bp, Artificial
  probe
  misc_feature (1)..(25): SEQ ID NO: 167; WAN024ASP; Start 34; Stop 58
aaattccaacccttttggcttttga

SEQ ID NO: 257365 - DNA, 25 bp, Artificial
  probe
  misc_feature (1)..(25): SEQ ID NO: 167; WAN024ASP; Start 37; Stop 61
ttccaacccttttggcttttgaaag

SEQ ID NO: 257366 - DNA, 25 bp, Artificial
  probe
  misc_feature (1)..(25): SEQ ID NO: 168; WAN024AKG; Start 61; Stop 85
attaccaacctactcatcttctcac

SEQ ID NO: 257367 - DNA, 25 bp, Artificial
  probe
  misc_feature (1)..(25): SEQ ID NO: 168; WAN024AKG; Start 60; Stop 84
aattaccaacctactcatcttctca

SEQ ID NO: 257368 - DNA, 25 bp, Artificial
  probe
  misc_feature (1)..(25): SEQ ID NO: 168; WAN024AKG; Start 62; Stop 86
ttaccaacctactcatcttctcacc

SEQ ID NO: 257369 - DNA, 25 bp, Artificial
  probe
  misc_feature (1)..(25): SEQ ID NO: 168; WAN024AKG; Start 63; Stop 87
taccaacctactcatcttctcacca

SEQ ID NO: 257370 - DNA, 25 bp, Artificial
  probe
  misc_feature (1)..(25): SEQ ID NO: 168; WAN024AKG; Start 66; Stop 90
caacctactcatcttctcaccagag

SEQ ID NO: 257371 - DNA, 25 bp, Artificial
  probe
  misc_feature (1)..(25): SEQ ID NO: 168; WAN024AKG; Start 59; Stop 83
aaattaccaacctactcatcttctc

SEQ ID NO: 257372 - DNA, 25 bp, Artificial
  probe
  misc_feature (1)..(25): SEQ ID NO: 168; WAN024AKG; Start 65; Stop 89
ccaacctactcatcttctcaccaga

SEQ ID NO: 257373 - DNA, 25 bp, Artificial
  probe
  misc_feature (1)..(25): SEQ ID NO: 168; WAN024AKG; Start 64; Stop 88
accaacctactcatcttctcaccag

SEQ ID NO: 257374 - DNA, 25 bp, Artificial
  probe
  misc_feature (1)..(25): SEQ ID NO: 168; WAN024AKG; Start 67; Stop 91
aacctactcatcttctcaccagagg

SEQ ID NO: 257375 - DNA, 25 bp, Artificial
  probe
  misc_feature (1)..(25): SEQ ID NO: 168; WAN024AKG; Start 58; Stop 82
taaattaccaacctactcatcttct

SEQ ID NO: 257376 - DNA, 25 bp, Artificial
  probe
  misc_feature (1)..(25): SEQ ID NO: 168; WAN024AKG; Start 57; Stop 81
ttaaattaccaacctactcatcttc

SEQ ID NO: 257377 - DNA, 25 bp, Artificial
  probe
  misc_feature (1)..(25): SEQ ID NO: 168; WAN024AKG; Start 85; Stop 109
ccagagggcggtattaactttgatc

SEQ ID NO: 257378 - DNA, 25 bp, Artificial
  probe
  misc_feature (1)..(25): SEQ ID NO: 168; WAN024AKG; Start 89; Stop 113
agggcggtattaactttgatcataa

SEQ ID NO: 257379 - DNA, 25 bp, Artificial
  probe
  misc_feature (1)..(25): SEQ ID NO: 168; WAN024AKG; Start 88; Stop 112
gagggcggtattaactttgatcata

SEQ ID NO: 257380 - DNA, 25 bp, Artificial
  probe
  misc_feature (1)..(25): SEQ ID NO: 168; WAN024AKG; Start 90; Stop 114
gggcggtattaactttgatcataaa

SEQ ID NO: 257381 - DNA, 25 bp, Artificial
  probe
  misc_feature (1)..(25): SEQ ID NO: 168; WAN024AKG; Start 55; Stop 79
gtttaaattaccaacctactcatct

SEQ ID NO: 257382 - DNA, 25 bp, Artificial
  probe
  misc_feature (1)..(25): SEQ ID NO: 168; WAN024AKG; Start 54; Stop 78
agtttaaattaccaacctactcatc

SEQ ID NO: 257383 - DNA, 25 bp, Artificial
  probe
  misc_feature (1)..(25): SEQ ID NO: 168; WAN024AKG; Start 106; Stop 130
gatcataaaatcggatactccctct

SEQ ID NO: 257384 - DNA, 25 bp, Artificial
  probe
  misc_feature (1)..(25): SEQ ID NO: 168; WAN024AKG; Start 87; Stop 111
agagggcggtattaactttgatcat

SEQ ID NO: 257385 - DNA, 25 bp, Artificial
  probe
  misc_feature (1)..(25): SEQ ID NO: 168; WAN024AKG; Start 108; Stop 132
tcataaaatcggatactccctctat

SEQ ID NO: 257386 - DNA, 25 bp, Artificial
  probe
  misc_feature (1)..(25): SEQ ID NO: 168; WAN024AKG; Start 107; Stop 131
atcataaaatcggatactccctcta

SEQ ID NO: 257387 - DNA, 25 bp, Artificial
  probe
  misc_feature (1)..(25): SEQ ID NO: 168; WAN024AKG; Start 109; Stop 133
cataaaatcggatactccctctatc

SEQ ID NO: 257388 - DNA, 25 bp, Artificial
  probe
  misc_feature (1)..(25): SEQ ID NO: 168; WAN024AKG; Start 84; Stop 108
accagagggcggtattaactttgat

SEQ ID NO: 257389 - DNA, 25 bp, Artificial
  probe
  misc_feature (1)..(25): SEQ ID NO: 168; WAN024AKG; Start 56; Stop 80
tttaaattaccaacctactcatctt

SEQ ID NO: 257390 - DNA, 25 bp, Artificial
  probe
  misc_feature (1)..(25): SEQ ID NO: 168; WAN024AKG; Start 86; Stop 110
cagagggcggtattaactttgatca

SEQ ID NO: 257391 - DNA, 25 bp, Artificial
  probe
  misc_feature (1)..(25): SEQ ID NO: 168; WAN024AKG; Start 81; Stop 105
ctcaccagagggcggtattaacttt

SEQ ID NO: 257392 - DNA, 25 bp, Artificial
  probe
  misc_feature (1)..(25): SEQ ID NO: 168; WAN024AKG; Start 68; Stop 92
acctactcatcttctcaccagaggg

SEQ ID NO: 257393 - DNA, 25 bp, Artificial
  probe
  misc_feature (1)..(25): SEQ ID NO: 168; WAN024AKG; Start 53; Stop 77
tagtttaaattaccaacctactcat

SEQ ID NO: 257394 - DNA, 25 bp, Artificial
  probe
  misc_feature (1)..(25): SEQ ID NO: 168; WAN024AKG; Start 52; Stop 76
atagtttaaattaccaacctactca

SEQ ID NO: 257395 - DNA, 25 bp, Artificial
  probe
  misc_feature (1)..(25): SEQ ID NO: 168; WAN024AKG; Start 83; Stop 107
caccagagggcggtattaactttga

SEQ ID NO: 257396 - DNA, 25 bp, Artificial
  probe
  misc_feature (1)..(25): SEQ ID NO: 168; WAN024AKG; Start 82; Stop 106
tcaccagagggcggtattaactttg

SEQ ID NO: 257397 - DNA, 25 bp, Artificial
  probe
  misc_feature (1)..(25): SEQ ID NO: 168; WAN024AKG; Start 76; Stop 100
atcttctcaccagagggcggtatta

SEQ ID NO: 257398 - DNA, 25 bp, Artificial
  probe
  misc_feature (1)..(25): SEQ ID NO: 168; WAN024AKG; Start 78; Stop 102
cttctcaccagagggcggtattaac

SEQ ID NO: 257399 - DNA, 25 bp, Artificial
  probe
  misc_feature (1)..(25): SEQ ID NO: 169; WAN024A2X; Start 297; Stop 321
aacaagaggatagaaatgaccgaat

SEQ ID NO: 257400 - DNA, 25 bp, Artificial
  probe
  misc_feature (1)..(25): SEQ ID NO: 169; WAN024A2X; Start 296; Stop 320
taacaagaggatagaaatgaccgaa

SEQ ID NO: 257401 - DNA, 25 bp, Artificial
  probe
  misc_feature (1)..(25): SEQ ID NO: 169; WAN024A2X; Start 295; Stop 319
ataacaagaggatagaaatgaccga

SEQ ID NO: 257402 - DNA, 25 bp, Artificial
  probe
  misc_feature (1)..(25): SEQ ID NO: 169; WAN024A2X; Start 298; Stop 322
acaagaggatagaaatgaccgaatt

SEQ ID NO: 257403 - DNA, 25 bp, Artificial
  probe
  misc_feature (1)..(25): SEQ ID NO: 169; WAN024A2X; Start 301; Stop 325
agaggatagaaatgaccgaattaga

SEQ ID NO: 257404 - DNA, 25 bp, Artificial
  probe
  misc_feature (1)..(25): SEQ ID NO: 169; WAN024A2X; Start 10; Stop 34
cttagatgactactcccactctgtt

SEQ ID NO: 257405 - DNA, 25 bp, Artificial
  probe
  misc_feature (1)..(25): SEQ ID NO: 169; WAN024A2X; Start 11; Stop 35
ttagatgactactcccactctgttg

SEQ ID NO: 257406 - DNA, 25 bp, Artificial
  probe
  misc_feature (1)..(25): SEQ ID NO: 169; WAN024A2X; Start 25; Stop 49
ccactctgttgctcctataatggaa

SEQ ID NO: 257407 - DNA, 25 bp, Artificial
  probe
  misc_feature (1)..(25): SEQ ID NO: 169; WAN024A2X; Start 299; Stop 323
caagaggatagaaatgaccgaatta

SEQ ID NO: 257408 - DNA, 25 bp, Artificial
  probe
  misc_feature (1)..(25): SEQ ID NO: 169; WAN024A2X; Start 302; Stop 326
gaggatagaaatgaccgaattagaa

SEQ ID NO: 257409 - DNA, 25 bp, Artificial
  probe
  misc_feature (1)..(25): SEQ ID NO: 169; WAN024A2X; Start 300; Stop 324
aagaggatagaaatgaccgaattag

SEQ ID NO: 257410 - DNA, 25 bp, Artificial
  probe
  misc_feature (1)..(25): SEQ ID NO: 169; WAN024A2X; Start 294; Stop 318
tataacaagaggatagaaatgaccg

SEQ ID NO: 257411 - DNA, 25 bp, Artificial
  probe
  misc_feature (1)..(25): SEQ ID NO: 169; WAN024A2X; Start 20; Stop 44
tactcccactctgttgctcctataa

SEQ ID NO: 257412 - DNA, 25 bp, Artificial
  probe
  misc_feature (1)..(25): SEQ ID NO: 169; WAN024A2X; Start 303; Stop 327
aggatagaaatgaccgaattagaaa

SEQ ID NO: 257413 - DNA, 25 bp, Artificial
  probe
  misc_feature (1)..(25): SEQ ID NO: 169; WAN024A2X; Start 22; Stop 46
ctcccactctgttgctcctataatg

SEQ ID NO: 257414 - DNA, 25 bp, Artificial
  probe
  misc_feature (1)..(25): SEQ ID NO: 169; WAN024A2X; Start 26; Stop 50
cactctgttgctcctataatggaaa

SEQ ID NO: 257415 - DNA, 25 bp, Artificial
  probe
  misc_feature (1)..(25): SEQ ID NO: 169; WAN024A2X; Start 304; Stop 328
ggatagaaatgaccgaattagaaag

SEQ ID NO: 257416 - DNA, 25 bp, Artificial
  probe
  misc_feature (1)..(25): SEQ ID NO: 169; WAN024A2X; Start 8; Stop 32
tccttagatgactactcccactctg

SEQ ID NO: 257417 - DNA, 25 bp, Artificial
  probe
  misc_feature (1)..(25): SEQ ID NO: 169; WAN024A2X; Start 19; Stop 43
ctactcccactctgttgctcctata

SEQ ID NO: 257418 - DNA, 25 bp, Artificial
  probe
  misc_feature (1)..(25): SEQ ID NO: 169; WAN024A2X; Start 21; Stop 45
actcccactctgttgctcctataat

SEQ ID NO: 257419 - DNA, 25 bp, Artificial
  probe
  misc_feature (1)..(25): SEQ ID NO: 169; WAN024A2X; Start 9; Stop 33
ccttagatgactactcccactctgt

SEQ ID NO: 257420 - DNA, 25 bp, Artificial
  probe
  misc_feature (1)..(25): SEQ ID NO: 169; WAN024A2X; Start 52; Stop 76
ggattgatacagtctagaatatcgc

SEQ ID NO: 257421 - DNA, 25 bp, Artificial
  probe
  misc_feature (1)..(25): SEQ ID NO: 169; WAN024A2X; Start 7; Stop 31
gtccttagatgactactcccactct

SEQ ID NO: 257422 - DNA, 25 bp, Artificial
  probe
  misc_feature (1)..(25): SEQ ID NO: 169; WAN024A2X; Start 53; Stop 77
gattgatacagtctagaatatcgct

SEQ ID NO: 257423 - DNA, 25 bp, Artificial
  probe
  misc_feature (1)..(25): SEQ ID NO: 169; WAN024A2X; Start 305; Stop 329
gatagaaatgaccgaattagaaaga

SEQ ID NO: 257424 - DNA, 25 bp, Artificial
  probe
  misc_feature (1)..(25): SEQ ID NO: 169; WAN024A2X; Start 12; Stop 36
tagatgactactcccactctgttgc

SEQ ID NO: 257425 - DNA, 25 bp, Artificial
  probe
  misc_feature (1)..(25): SEQ ID NO: 169; WAN024A2X; Start 307; Stop 331
tagaaatgaccgaattagaaagaaa

SEQ ID NO: 257426 - DNA, 25 bp, Artificial
  probe
  misc_feature (1)..(25): SEQ ID NO: 169; WAN024A2X; Start 54; Stop 78
attgatacagtctagaatatcgctt

SEQ ID NO: 257427 - DNA, 25 bp, Artificial
  probe
  misc_feature (1)..(25): SEQ ID NO: 169; WAN024A2X; Start 51; Stop 75
aggattgatacagtctagaatatcg

SEQ ID NO: 257428 - DNA, 25 bp, Artificial
  probe
  misc_feature (1)..(25): SEQ ID NO: 169; WAN024A2X; Start 306; Stop 330
atagaaatgaccgaattagaaagaa

SEQ ID NO: 257429 - DNA, 25 bp, Artificial
  probe
  misc_feature (1)..(25): SEQ ID NO: 169; WAN024A2X; Start 242; Stop 266
gctcaaagaatttattaaaccatgt

SEQ ID NO: 257430 - DNA, 25 bp, Artificial
  probe
  misc_feature (1)..(25): SEQ ID NO: 169; WAN024A2X; Start 44; Stop 68
atggaaaaggattgatacagtctag

SEQ ID NO: 257431 - DNA, 25 bp, Artificial
  probe
  misc_feature (1)..(25): SEQ ID NO: 169; WAN024A2X; Start 43; Stop 67
aatggaaaaggattgatacagtcta

SEQ ID NO: 257432 - DNA, 25 bp, Artificial
  probe
  misc_feature (1)..(25): SEQ ID NO: 170; WAN024AI4; Start 56; Stop 80
aagaagaataaattgaaagaaggaa

SEQ ID NO: 257433 - DNA, 25 bp, Artificial
  probe
  misc_feature (1)..(25): SEQ ID NO: 171; WAN024AM5; Start 47; Stop 71
tataatgatacccaagccaatccag

SEQ ID NO: 257434 - DNA, 25 bp, Artificial
  probe
  misc_feature (1)..(25): SEQ ID NO: 171; WAN024AM5; Start 46; Stop 70
ctataatgatacccaagccaatcca

SEQ ID NO: 257435 - DNA, 25 bp, Artificial
  probe
  misc_feature (1)..(25): SEQ ID NO: 171; WAN024AM5; Start 48; Stop 72
ataatgatacccaagccaatccaga

SEQ ID NO: 257436 - DNA, 25 bp, Artificial
  probe
  misc_feature (1)..(25): SEQ ID NO: 171; WAN024AM5; Start 49; Stop 73
taatgatacccaagccaatccagag

SEQ ID NO: 257437 - DNA, 25 bp, Artificial
  probe
  misc_feature (1)..(25): SEQ ID NO: 171; WAN024AM5; Start 3; Stop 27
attatgaaaaggtaagcagaagacg

SEQ ID NO: 257438 - DNA, 25 bp, Artificial
  probe
  misc_feature (1)..(25): SEQ ID NO: 171; WAN024AM5; Start 45; Stop 69
gctataatgatacccaagccaatcc

SEQ ID NO: 257439 - DNA, 25 bp, Artificial
  probe
  misc_feature (1)..(25): SEQ ID NO: 171; WAN024AM5; Start 4; Stop 28
ttatgaaaaggtaagcagaagacgg

SEQ ID NO: 257440 - DNA, 25 bp, Artificial
  probe
  misc_feature (1)..(25): SEQ ID NO: 171; WAN024AM5; Start 43; Stop 67
aagctataatgatacccaagccaat

SEQ ID NO: 257441 - DNA, 25 bp, Artificial
  probe
  misc_feature (1)..(25): SEQ ID NO: 171; WAN024AM5; Start 44; Stop 68
agctataatgatacccaagccaatc

SEQ ID NO: 257442 - DNA, 25 bp, Artificial
  probe
  misc_feature (1)..(25): SEQ ID NO: 171; WAN024AM5; Start 40; Stop 64
ttcaagctataatgatacccaagcc

SEQ ID NO: 257443 - DNA, 25 bp, Artificial
  probe
  misc_feature (1)..(25): SEQ ID NO: 171; WAN024AM5; Start 39; Stop 63
tttcaagctataatgatacccaagc

SEQ ID NO: 257444 - DNA, 25 bp, Artificial
  probe
  misc_feature (1)..(25): SEQ ID NO: 171; WAN024AM5; Start 5; Stop 29
tatgaaaaggtaagcagaagacggt

SEQ ID NO: 257445 - DNA, 25 bp, Artificial
  probe
  misc_feature (1)..(25): SEQ ID NO: 171; WAN024AM5; Start 42; Stop 66
caagctataatgatacccaagccaa

SEQ ID NO: 257446 - DNA, 25 bp, Artificial
  probe
  misc_feature (1)..(25): SEQ ID NO: 171; WAN024AM5; Start 41; Stop 65
tcaagctataatgatacccaagcca

SEQ ID NO: 257447 - DNA, 25 bp, Artificial
  probe
  misc_feature (1)..(25): SEQ ID NO: 171; WAN024AM5; Start 2; Stop 26
aattatgaaaaggtaagcagaagac

SEQ ID NO: 257448 - DNA, 25 bp, Artificial
  probe
  misc_feature (1)..(25): SEQ ID NO: 171; WAN024AM5; Start 50; Stop 74
aatgatacccaagccaatccagagg

SEQ ID NO: 257449 - DNA, 25 bp, Artificial
  probe
  misc_feature (1)..(25): SEQ ID NO: 171; WAN024AM5; Start 63; Stop 87
ccaatccagaggcttttctttgaga

SEQ ID NO: 257450 - DNA, 25 bp, Artificial
  probe
  misc_feature (1)..(25): SEQ ID NO: 171; WAN024AM5; Start 6; Stop 30
atgaaaaggtaagcagaagacggtg

SEQ ID NO: 257451 - DNA, 25 bp, Artificial
  probe
  misc_feature (1)..(25): SEQ ID NO: 171; WAN024AM5; Start 65; Stop 89
aatccagaggcttttctttgagaat

SEQ ID NO: 257452 - DNA, 25 bp, Artificial
  probe
  misc_feature (1)..(25): SEQ ID NO: 171; WAN024AM5; Start 1; Stop 25
aaattatgaaaaggtaagcagaaga

SEQ ID NO: 257453 - DNA, 25 bp, Artificial
  probe
  misc_feature (1)..(25): SEQ ID NO: 171; WAN024AM5; Start 66; Stop 90
atccagaggcttttctttgagaatc

SEQ ID NO: 257454 - DNA, 25 bp, Artificial
  probe
  misc_feature (1)..(25): SEQ ID NO: 171; WAN024AM5; Start 64; Stop 88
caatccagaggcttttctttgagaa

SEQ ID NO: 257455 - DNA, 25 bp, Artificial
  probe
  misc_feature (1)..(25): SEQ ID NO: 171; WAN024AM5; Start 38; Stop 62
ttttcaagctataatgatacccaag

SEQ ID NO: 257456 - DNA, 25 bp, Artificial
  probe
  misc_feature (1)..(25): SEQ ID NO: 171; WAN024AM5; Start 67; Stop 91
tccagaggcttttctttgagaatcg

SEQ ID NO: 257457 - DNA, 25 bp, Artificial
  probe
  misc_feature (1)..(25): SEQ ID NO: 171; WAN024AM5; Start 69; Stop 93
cagaggcttttctttgagaatcggg

SEQ ID NO: 257458 - DNA, 25 bp, Artificial
  probe
  misc_feature (1)..(25): SEQ ID NO: 171; WAN024AM5; Start 68; Stop 92
ccagaggcttttctttgagaatcgg

SEQ ID NO: 257459 - DNA, 25 bp, Artificial
  probe
  misc_feature (1)..(25): SEQ ID NO: 171; WAN024AM5; Start 70; Stop 94
agaggcttttctttgagaatcgggt

SEQ ID NO: 257460 - DNA, 25 bp, Artificial
  probe
  misc_feature (1)..(25): SEQ ID NO: 171; WAN024AM5; Start 62; Stop 86
gccaatccagaggcttttctttgag

SEQ ID NO: 257461 - DNA, 25 bp, Artificial
  probe
  misc_feature (1)..(25): SEQ ID NO: 172; WAN024AKW; Start 107; Stop 131
tagccattcctatccactattcttg

SEQ ID NO: 257462 - DNA, 25 bp, Artificial
  probe
  misc_feature (1)..(25): SEQ ID NO: 172; WAN024AKW; Start 108; Stop 132
agccattcctatccactattcttga

SEQ ID NO: 257463 - DNA, 25 bp, Artificial
  probe
  misc_feature (1)..(25): SEQ ID NO: 172; WAN024AKW; Start 109; Stop 133
gccattcctatccactattcttgaa

SEQ ID NO: 257464 - DNA, 25 bp, Artificial
  probe
  misc_feature (1)..(25): SEQ ID NO: 172; WAN024AKW; Start 106; Stop 130
atagccattcctatccactattctt

SEQ ID NO: 257465 - DNA, 25 bp, Artificial
  probe
  misc_feature (1)..(25): SEQ ID NO: 172; WAN024AKW; Start 70; Stop 94
ttcaccactgctttcggatttattt

SEQ ID NO: 257466 - DNA, 25 bp, Artificial
  probe
  misc_feature (1)..(25): SEQ ID NO: 172; WAN024AKW; Start 69; Stop 93
tttcaccactgctttcggatttatt

SEQ ID NO: 257467 - DNA, 25 bp, Artificial
  probe
  misc_feature (1)..(25): SEQ ID NO: 172; WAN024AKW; Start 110; Stop 134
ccattcctatccactattcttgaat

SEQ ID NO: 257468 - DNA, 25 bp, Artificial
  probe
  misc_feature (1)..(25): SEQ ID NO: 172; WAN024AKW; Start 100; Stop 124
tgttaaatagccattcctatccact

SEQ ID NO: 257469 - DNA, 25 bp, Artificial
  probe
  misc_feature (1)..(25): SEQ ID NO: 172; WAN024AKW; Start 99; Stop 123
ttgttaaatagccattcctatccac

SEQ ID NO: 257470 - DNA, 25 bp, Artificial
  probe
  misc_feature (1)..(25): SEQ ID NO: 172; WAN024AKW; Start 98; Stop 122
attgttaaatagccattcctatcca

SEQ ID NO: 257471 - DNA, 25 bp, Artificial
  probe
  misc_feature (1)..(25): SEQ ID NO: 172; WAN024AKW; Start 101; Stop 125
gttaaatagccattcctatccacta

SEQ ID NO: 257472 - DNA, 25 bp, Artificial
  probe
  misc_feature (1)..(25): SEQ ID NO: 172; WAN024AKW; Start 105; Stop 129
aatagccattcctatccactattct

SEQ ID NO: 257473 - DNA, 25 bp, Artificial
  probe
  misc_feature (1)..(25): SEQ ID NO: 172; WAN024AKW; Start 129; Stop 153
ttgaatagaaacacaagatgcaatc

SEQ ID NO: 257474 - DNA, 25 bp, Artificial
  probe
  misc_feature (1)..(25): SEQ ID NO: 172; WAN024AKW; Start 97; Stop 121
aattgttaaatagccattcctatcc

SEQ ID NO: 257475 - DNA, 25 bp, Artificial
  probe
  misc_feature (1)..(25): SEQ ID NO: 172; WAN024AKW; Start 74; Stop 98
ccactgctttcggatttattttgaa

SEQ ID NO: 257476 - DNA, 25 bp, Artificial
  probe
  misc_feature (1)..(25): SEQ ID NO: 172; WAN024AKW; Start 102; Stop 126
ttaaatagccattcctatccactat

SEQ ID NO: 257477 - DNA, 25 bp, Artificial
  probe
  misc_feature (1)..(25): SEQ ID NO: 172; WAN024AKW; Start 73; Stop 97
accactgctttcggatttattttga

SEQ ID NO: 257478 - DNA, 25 bp, Artificial
  probe
  misc_feature (1)..(25): SEQ ID NO: 172; WAN024AKW; Start 72; Stop 96
caccactgctttcggatttattttg

SEQ ID NO: 257479 - DNA, 25 bp, Artificial
  probe
  misc_feature (1)..(25): SEQ ID NO: 172; WAN024AKW; Start 71; Stop 95
tcaccactgctttcggatttatttt

SEQ ID NO: 257480 - DNA, 25 bp, Artificial
  probe
  misc_feature (1)..(25): SEQ ID NO: 172; WAN024AKW; Start 68; Stop 92
ttttcaccactgctttcggatttat

SEQ ID NO: 257481 - DNA, 25 bp, Artificial
  probe
  misc_feature (1)..(25): SEQ ID NO: 172; WAN024AKW; Start 67; Stop 91
attttcaccactgctttcggattta

SEQ ID NO: 257482 - DNA, 25 bp, Artificial
  probe
  misc_feature (1)..(25): SEQ ID NO: 172; WAN024AKW; Start 75; Stop 99
cactgctttcggatttattttgaat

SEQ ID NO: 257483 - DNA, 25 bp, Artificial
  probe
  misc_feature (1)..(25): SEQ ID NO: 172; WAN024AKW; Start 93; Stop 117
tttgaattgttaaatagccattcct

SEQ ID NO: 257484 - DNA, 25 bp, Artificial
  probe
  misc_feature (1)..(25): SEQ ID NO: 172; WAN024AKW; Start 78; Stop 102
tgctttcggatttattttgaattgt

SEQ ID NO: 257485 - DNA, 25 bp, Artificial
  probe
  misc_feature (1)..(25): SEQ ID NO: 172; WAN024AKW; Start 76; Stop 100
actgctttcggatttattttgaatt

SEQ ID NO: 257486 - DNA, 25 bp, Artificial
  probe
  misc_feature (1)..(25): SEQ ID NO: 172; WAN024AKW; Start 130; Stop 154
tgaatagaaacacaagatgcaatct

SEQ ID NO: 257487 - DNA, 25 bp, Artificial
  probe
  misc_feature (1)..(25): SEQ ID NO: 172; WAN024AKW; Start 77; Stop 101
ctgctttcggatttattttgaattg

SEQ ID NO: 257488 - DNA, 25 bp, Artificial
  probe
  misc_feature (1)..(25): SEQ ID NO: 172; WAN024AKW; Start 66; Stop 90
gattttcaccactgctttcggattt

SEQ ID NO: 257489 - DNA, 25 bp, Artificial
  probe
  misc_feature (1)..(25): SEQ ID NO: 172; WAN024AKW; Start 111; Stop 135
cattcctatccactattcttgaata

SEQ ID NO: 257490 - DNA, 25 bp, Artificial
  probe
  misc_feature (1)..(25): SEQ ID NO: 172; WAN024AKW; Start 79; Stop 103
gctttcggatttattttgaattgtt

SEQ ID NO: 257491 - DNA, 25 bp, Artificial
  probe
  misc_feature (1)..(25): SEQ ID NO: 172; WAN024AKW; Start 94; Stop 118
ttgaattgttaaatagccattccta

SEQ ID NO: 257492 - DNA, 25 bp, Artificial
  probe
  misc_feature (1)..(25): SEQ ID NO: 172; WAN024AKW; Start 104; Stop 128
aaatagccattcctatccactattc

SEQ ID NO: 257493 - DNA, 25 bp, Artificial
  probe
  misc_feature (1)..(25): SEQ ID NO: 172; WAN024AKW; Start 95; Stop 119
tgaattgttaaatagccattcctat

SEQ ID NO: 257494 - DNA, 25 bp, Artificial
  probe
  misc_feature (1)..(25): SEQ ID NO: 173; WAN024A2H; Start 57; Stop 81
tgctcaaatttaacattatttagct

SEQ ID NO: 257495 - DNA, 25 bp, Artificial
  probe
  misc_feature (1)..(25): SEQ ID NO: 173; WAN024A2H; Start 56; Stop 80
atgctcaaatttaacattatttagc

SEQ ID NO: 257496 - DNA, 25 bp, Artificial
  probe
  misc_feature (1)..(25): SEQ ID NO: 174; WAN0249D3; Start 3; Stop 27
attcctcctcatttcactatgtaaa

SEQ ID NO: 257497 - DNA, 25 bp, Artificial
  probe
  misc_feature (1)..(25): SEQ ID NO: 174; WAN0249D3; Start 2; Stop 26
aattcctcctcatttcactatgtaa

SEQ ID NO: 257498 - DNA, 25 bp, Artificial
  probe
  misc_feature (1)..(25): SEQ ID NO: 174; WAN0249D3; Start 1; Stop 25
aaattcctcctcatttcactatgta

SEQ ID NO: 257499 - DNA, 25 bp, Artificial
  probe
  misc_feature (1)..(25): SEQ ID NO: 174; WAN0249D3; Start 4; Stop 28
ttcctcctcatttcactatgtaaaa

SEQ ID NO: 257500 - DNA, 25 bp, Artificial
  probe
  misc_feature (1)..(25): SEQ ID NO: 174; WAN0249D3; Start 80; Stop 104
actacataataaagttgtcaatcca

SEQ ID NO: 257501 - DNA, 25 bp, Artificial
  probe
  misc_feature (1)..(25): SEQ ID NO: 174; WAN0249D3; Start 81; Stop 105
ctacataataaagttgtcaatccaa

SEQ ID NO: 257502 - DNA, 25 bp, Artificial
  probe
  misc_feature (1)..(25): SEQ ID NO: 174; WAN0249D3; Start 167; Stop 191
aacgataaactgaatcagtctatca

SEQ ID NO: 257503 - DNA, 25 bp, Artificial
  probe
  misc_feature (1)..(25): SEQ ID NO: 174; WAN0249D3; Start 168; Stop 192
acgataaactgaatcagtctatcat

SEQ ID NO: 257504 - DNA, 25 bp, Artificial
  probe
  misc_feature (1)..(25): SEQ ID NO: 174; WAN0249D3; Start 79; Stop 103
aactacataataaagttgtcaatcc

SEQ ID NO: 257505 - DNA, 25 bp, Artificial
  probe
  misc_feature (1)..(25): SEQ ID NO: 174; WAN0249D3; Start 83; Stop 107
acataataaagttgtcaatccaaaa

SEQ ID NO: 257506 - DNA, 25 bp, Artificial
  probe
  misc_feature (1)..(25): SEQ ID NO: 174; WAN0249D3; Start 166; Stop 190
aaacgataaactgaatcagtctatc

SEQ ID NO: 257507 - DNA, 25 bp, Artificial
  probe
  misc_feature (1)..(25): SEQ ID NO: 174; WAN0249D3; Start 169; Stop 193
cgataaactgaatcagtctatcatt

SEQ ID NO: 257508 - DNA, 25 bp, Artificial
  probe
  misc_feature (1)..(25): SEQ ID NO: 174; WAN0249D3; Start 165; Stop 189
aaaacgataaactgaatcagtctat

SEQ ID NO: 257509 - DNA, 25 bp, Artificial
  probe
  misc_feature (1)..(25): SEQ ID NO: 174; WAN0249D3; Start 170; Stop 194
gataaactgaatcagtctatcattt

SEQ ID NO: 257510 - DNA, 25 bp, Artificial
  probe
  misc_feature (1)..(25): SEQ ID NO: 175; WAN0249FS; Start 8; Stop 32
cctttatcacactcaatagaatgcg

SEQ ID NO: 257511 - DNA, 25 bp, Artificial
  probe
  misc_feature (1)..(25): SEQ ID NO: 175; WAN0249FS; Start 14; Stop 38
tcacactcaatagaatgcgtttaga

SEQ ID NO: 257512 - DNA, 25 bp, Artificial
  probe
  misc_feature (1)..(25): SEQ ID NO: 175; WAN0249FS; Start 15; Stop 39
cacactcaatagaatgcgtttagat

SEQ ID NO: 257513 - DNA, 25 bp, Artificial
  probe
  misc_feature (1)..(25): SEQ ID NO: 175; WAN0249FS; Start 13; Stop 37
atcacactcaatagaatgcgtttag

SEQ ID NO: 257514 - DNA, 25 bp, Artificial
  probe
  misc_feature (1)..(25): SEQ ID NO: 175; WAN0249FS; Start 9; Stop 33
ctttatcacactcaatagaatgcgt

SEQ ID NO: 257515 - DNA, 25 bp, Artificial
  probe
  misc_feature (1)..(25): SEQ ID NO: 175; WAN0249FS; Start 11; Stop 35
ttatcacactcaatagaatgcgttt

SEQ ID NO: 257516 - DNA, 25 bp, Artificial
  probe
  misc_feature (1)..(25): SEQ ID NO: 175; WAN0249FS; Start 10; Stop 34
tttatcacactcaatagaatgcgtt

SEQ ID NO: 257517 - DNA, 25 bp, Artificial
  probe
  misc_feature (1)..(25): SEQ ID NO: 175; WAN0249FS; Start 16; Stop 40
acactcaatagaatgcgtttagatt

SEQ ID NO: 257518 - DNA, 25 bp, Artificial
  probe
  misc_feature (1)..(25): SEQ ID NO: 175; WAN0249FS; Start 7; Stop 31
tcctttatcacactcaatagaatgc

SEQ ID NO: 257519 - DNA, 25 bp, Artificial
  probe
  misc_feature (1)..(25): SEQ ID NO: 175; WAN0249FS; Start 136; Stop 160
gctgttggtagacggtttattatct

SEQ ID NO: 257520 - DNA, 25 bp, Artificial
  probe
  misc_feature (1)..(25): SEQ ID NO: 175; WAN0249FS; Start 12; Stop 36
tatcacactcaatagaatgcgttta

SEQ ID NO: 257521 - DNA, 25 bp, Artificial
  probe
  misc_feature (1)..(25): SEQ ID NO: 175; WAN0249FS; Start 17; Stop 41
cactcaatagaatgcgtttagattt

SEQ ID NO: 257522 - DNA, 25 bp, Artificial
  probe
  misc_feature (1)..(25): SEQ ID NO: 175; WAN0249FS; Start 19; Stop 43
ctcaatagaatgcgtttagatttca

SEQ ID NO: 257523 - DNA, 25 bp, Artificial
  probe
  misc_feature (1)..(25): SEQ ID NO: 175; WAN0249FS; Start 18; Stop 42
actcaatagaatgcgtttagatttc

SEQ ID NO: 257524 - DNA, 25 bp, Artificial
  probe
  misc_feature (1)..(25): SEQ ID NO: 175; WAN0249FS; Start 134; Stop 158
tagctgttggtagacggtttattat

SEQ ID NO: 257525 - DNA, 25 bp, Artificial
  probe
  misc_feature (1)..(25): SEQ ID NO: 175; WAN0249FS; Start 133; Stop 157
atagctgttggtagacggtttatta

SEQ ID NO: 257526 - DNA, 25 bp, Artificial
  probe
  misc_feature (1)..(25): SEQ ID NO: 175; WAN0249FS; Start 135; Stop 159
agctgttggtagacggtttattatc

SEQ ID NO: 257527 - DNA, 25 bp, Artificial
  probe
  misc_feature (1)..(25): SEQ ID NO: 175; WAN0249FS; Start 132; Stop 156
catagctgttggtagacggtttatt

SEQ ID NO: 257528 - DNA, 25 bp, Artificial
  probe
  misc_feature (1)..(25): SEQ ID NO: 175; WAN0249FS; Start 6; Stop 30
ctcctttatcacactcaatagaatg

SEQ ID NO: 257529 - DNA, 25 bp, Artificial
  probe
  misc_feature (1)..(25): SEQ ID NO: 175; WAN0249FS; Start 20; Stop 44
tcaatagaatgcgtttagatttcaa

SEQ ID NO: 257530 - DNA, 25 bp, Artificial
  probe
  misc_feature (1)..(25): SEQ ID NO: 175; WAN0249FS; Start 131; Stop 155
tcatagctgttggtagacggtttat

SEQ ID NO: 257531 - DNA, 25 bp, Artificial
  probe
  misc_feature (1)..(25): SEQ ID NO: 175; WAN0249FS; Start 5; Stop 29
tctcctttatcacactcaatagaat

SEQ ID NO: 257532 - DNA, 25 bp, Artificial
  probe
  misc_feature (1)..(25): SEQ ID NO: 175; WAN0249FS; Start 3; Stop 27
attctcctttatcacactcaataga

SEQ ID NO: 257533 - DNA, 25 bp, Artificial
  probe
  misc_feature (1)..(25): SEQ ID NO: 175; WAN0249FS; Start 137; Stop 161
ctgttggtagacggtttattatcta

SEQ ID NO: 257534 - DNA, 25 bp, Artificial
  probe
  misc_feature (1)..(25): SEQ ID NO: 175; WAN0249FS; Start 130; Stop 154
ctcatagctgttggtagacggttta

SEQ ID NO: 257535 - DNA, 25 bp, Artificial
  probe
  misc_feature (1)..(25): SEQ ID NO: 175; WAN0249FS; Start 138; Stop 162
tgttggtagacggtttattatctaa

SEQ ID NO: 257536 - DNA, 25 bp, Artificial
  probe
  misc_feature (1)..(25): SEQ ID NO: 175; WAN0249FS; Start 2; Stop 26
aattctcctttatcacactcaatag

SEQ ID NO: 257537 - DNA, 25 bp, Artificial
  probe
  misc_feature (1)..(25): SEQ ID NO: 175; WAN0249FS; Start 21; Stop 45
caatagaatgcgtttagatttcaat

SEQ ID NO: 257538 - DNA, 25 bp, Artificial
  probe
  misc_feature (1)..(25): SEQ ID NO: 175; WAN0249FS; Start 96; Stop 120
aaagaggaccggactaaagctatta

SEQ ID NO: 257539 - DNA, 25 bp, Artificial
  probe
  misc_feature (1)..(25): SEQ ID NO: 175; WAN0249FS; Start 1; Stop 25
aaattctcctttatcacactcaata

SEQ ID NO: 257540 - DNA, 25 bp, Artificial
  probe
  misc_feature (1)..(25): SEQ ID NO: 175; WAN0249FS; Start 25; Stop 49
agaatgcgtttagatttcaatttaa

SEQ ID NO: 257541 - DNA, 25 bp, Artificial
  probe
  misc_feature (1)..(25): SEQ ID NO: 175; WAN0249FS; Start 139; Stop 163
gttggtagacggtttattatctaaa

SEQ ID NO: 257542 - DNA, 25 bp, Artificial
  probe
  misc_feature (1)..(25): SEQ ID NO: 175; WAN0249FS; Start 4; Stop 28
ttctcctttatcacactcaatagaa

SEQ ID NO: 257543 - DNA, 25 bp, Artificial
  probe
  misc_feature (1)..(25): SEQ ID NO: 176; WAN0249FR; Start 41; Stop 65
catgtattaactagcaagtgcaact

SEQ ID NO: 257544 - DNA, 25 bp, Artificial
  probe
  misc_feature (1)..(25): SEQ ID NO: 176; WAN0249FR; Start 40; Stop 64
tcatgtattaactagcaagtgcaac

SEQ ID NO: 257545 - DNA, 25 bp, Artificial
  probe
  misc_feature (1)..(25): SEQ ID NO: 176; WAN0249FR; Start 37; Stop 61
gtatcatgtattaactagcaagtgc

SEQ ID NO: 257546 - DNA, 25 bp, Artificial
  probe
  misc_feature (1)..(25): SEQ ID NO: 176; WAN0249FR; Start 39; Stop 63
atcatgtattaactagcaagtgcaa

SEQ ID NO: 257547 - DNA, 25 bp, Artificial
  probe
  misc_feature (1)..(25): SEQ ID NO: 176; WAN0249FR; Start 23; Stop 47
ctgttacgctctttgtatcatgtat

SEQ ID NO: 257548 - DNA, 25 bp, Artificial
  probe
  misc_feature (1)..(25): SEQ ID NO: 176; WAN0249FR; Start 22; Stop 46
gctgttacgctctttgtatcatgta

SEQ ID NO: 257549 - DNA, 25 bp, Artificial
  probe
  misc_feature (1)..(25): SEQ ID NO: 176; WAN0249FR; Start 38; Stop 62
tatcatgtattaactagcaagtgca

SEQ ID NO: 257550 - DNA, 25 bp, Artificial
  probe
  misc_feature (1)..(25): SEQ ID NO: 176; WAN0249FR; Start 24; Stop 48
tgttacgctctttgtatcatgtatt

SEQ ID NO: 257551 - DNA, 25 bp, Artificial
  probe
  misc_feature (1)..(25): SEQ ID NO: 176; WAN0249FR; Start 28; Stop 52
acgctctttgtatcatgtattaact

SEQ ID NO: 257552 - DNA, 25 bp, Artificial
  probe
  misc_feature (1)..(25): SEQ ID NO: 176; WAN0249FR; Start 36; Stop 60
tgtatcatgtattaactagcaagtg

SEQ ID NO: 257553 - DNA, 25 bp, Artificial
  probe
  misc_feature (1)..(25): SEQ ID NO: 176; WAN0249FR; Start 20; Stop 44
gtgctgttacgctctttgtatcatg

SEQ ID NO: 257554 - DNA, 25 bp, Artificial
  probe
  misc_feature (1)..(25): SEQ ID NO: 176; WAN0249FR; Start 42; Stop 66
atgtattaactagcaagtgcaactt

SEQ ID NO: 257555 - DNA, 25 bp, Artificial
  probe
  misc_feature (1)..(25): SEQ ID NO: 176; WAN0249FR; Start 21; Stop 45
tgctgttacgctctttgtatcatgt

SEQ ID NO: 257556 - DNA, 25 bp, Artificial
  probe
  misc_feature (1)..(25): SEQ ID NO: 176; WAN0249FR; Start 27; Stop 51
tacgctctttgtatcatgtattaac

SEQ ID NO: 257557 - DNA, 25 bp, Artificial
  probe
  misc_feature (1)..(25): SEQ ID NO: 176; WAN0249FR; Start 25; Stop 49
gttacgctctttgtatcatgtatta

SEQ ID NO: 257558 - DNA, 25 bp, Artificial
  probe
  misc_feature (1)..(25): SEQ ID NO: 176; WAN0249FR; Start 35; Stop 59
ttgtatcatgtattaactagcaagt

SEQ ID NO: 257559 - DNA, 25 bp, Artificial
  probe
  misc_feature (1)..(25): SEQ ID NO: 176; WAN0249FR; Start 29; Stop 53
cgctctttgtatcatgtattaacta

SEQ ID NO: 257560 - DNA, 25 bp, Artificial
  probe
  misc_feature (1)..(25): SEQ ID NO: 176; WAN0249FR; Start 26; Stop 50
ttacgctctttgtatcatgtattaa

SEQ ID NO: 257561 - DNA, 25 bp, Artificial
  probe
  misc_feature (1)..(25): SEQ ID NO: 176; WAN0249FR; Start 32; Stop 56
tctttgtatcatgtattaactagca

SEQ ID NO: 257562 - DNA, 25 bp, Artificial
  probe
  misc_feature (1)..(25): SEQ ID NO: 176; WAN0249FR; Start 31; Stop 55
ctctttgtatcatgtattaactagc

SEQ ID NO: 257563 - DNA, 25 bp, Artificial
  probe
  misc_feature (1)..(25): SEQ ID NO: 176; WAN0249FR; Start 30; Stop 54
gctctttgtatcatgtattaactag

SEQ ID NO: 257564 - DNA, 25 bp, Artificial
  probe
  misc_feature (1)..(25): SEQ ID NO: 176; WAN0249FR; Start 63; Stop 87
acttgcaaactactagtaagaggag

SEQ ID NO: 257565 - DNA, 25 bp, Artificial
  probe
  misc_feature (1)..(25): SEQ ID NO: 176; WAN0249FR; Start 64; Stop 88
cttgcaaactactagtaagaggaga

SEQ ID NO: 257566 - DNA, 25 bp, Artificial
  probe
  misc_feature (1)..(25): SEQ ID NO: 176; WAN0249FR; Start 62; Stop 86
aacttgcaaactactagtaagagga

SEQ ID NO: 257567 - DNA, 25 bp, Artificial
  probe
  misc_feature (1)..(25): SEQ ID NO: 176; WAN0249FR; Start 61; Stop 85
caacttgcaaactactagtaagagg

SEQ ID NO: 257568 - DNA, 25 bp, Artificial
  probe
  misc_feature (1)..(25): SEQ ID NO: 176; WAN0249FR; Start 66; Stop 90
tgcaaactactagtaagaggagaaa

SEQ ID NO: 257569 - DNA, 25 bp, Artificial
  probe
  misc_feature (1)..(25): SEQ ID NO: 176; WAN0249FR; Start 65; Stop 89
ttgcaaactactagtaagaggagaa

SEQ ID NO: 257570 - DNA, 25 bp, Artificial
  probe
  misc_feature (1)..(25): SEQ ID NO: 176; WAN0249FR; Start 19; Stop 43
cgtgctgttacgctctttgtatcat

SEQ ID NO: 257571 - DNA, 25 bp, Artificial
  probe
  misc_feature (1)..(25): SEQ ID NO: 176; WAN0249FR; Start 34; Stop 58
tttgtatcatgtattaactagcaag

SEQ ID NO: 257572 - DNA, 25 bp, Artificial
  probe
  misc_feature (1)..(25): SEQ ID NO: 176; WAN0249FR; Start 33; Stop 57
ctttgtatcatgtattaactagcaa

SEQ ID NO: 257573 - DNA, 25 bp, Artificial
  probe
  misc_feature (1)..(25): SEQ ID NO: 176; WAN0249FR; Start 17; Stop 41
ctcgtgctgttacgctctttgtatc

SEQ ID NO: 257574 - DNA, 25 bp, Artificial
  probe
  misc_feature (1)..(25): SEQ ID NO: 176; WAN0249FR; Start 60; Stop 84
gcaacttgcaaactactagtaagag

SEQ ID NO: 257575 - DNA, 25 bp, Artificial
  probe
  misc_feature (1)..(25): SEQ ID NO: 176; WAN0249FR; Start 18; Stop 42
tcgtgctgttacgctctttgtatca

SEQ ID NO: 257576 - DNA, 25 bp, Artificial
  probe
  misc_feature (1)..(25): SEQ ID NO: 176; WAN0249FR; Start 67; Stop 91
gcaaactactagtaagaggagaaaa

SEQ ID NO: 257577 - DNA, 25 bp, Artificial
  probe
  misc_feature (1)..(25): SEQ ID NO: 177; WAN024A7A; Start 57; Stop 81
cctcaggcatgatataatggttaca

SEQ ID NO: 257578 - DNA, 25 bp, Artificial
  probe
  misc_feature (1)..(25): SEQ ID NO: 177; WAN024A7A; Start 59; Stop 83
tcaggcatgatataatggttacaga

SEQ ID NO: 257579 - DNA, 25 bp, Artificial
  probe
  misc_feature (1)..(25): SEQ ID NO: 177; WAN024A7A; Start 62; Stop 86
ggcatgatataatggttacagaagt

SEQ ID NO: 257580 - DNA, 25 bp, Artificial
  probe
  misc_feature (1)..(25): SEQ ID NO: 177; WAN024A7A; Start 60; Stop 84
caggcatgatataatggttacagaa

SEQ ID NO: 257581 - DNA, 25 bp, Artificial
  probe
  misc_feature (1)..(25): SEQ ID NO: 177; WAN024A7A; Start 58; Stop 82
ctcaggcatgatataatggttacag

SEQ ID NO: 257582 - DNA, 25 bp, Artificial
  probe
  misc_feature (1)..(25): SEQ ID NO: 177; WAN024A7A; Start 61; Stop 85
aggcatgatataatggttacagaag

SEQ ID NO: 257583 - DNA, 25 bp, Artificial
  probe
  misc_feature (1)..(25): SEQ ID NO: 177; WAN024A7A; Start 63; Stop 87
gcatgatataatggttacagaagtc

SEQ ID NO: 257584 - DNA, 25 bp, Artificial
  probe
  misc_feature (1)..(25): SEQ ID NO: 177; WAN024A7A; Start 56; Stop 80
ccctcaggcatgatataatggttac

SEQ ID NO: 257585 - DNA, 25 bp, Artificial
  probe
  misc_feature (1)..(25): SEQ ID NO: 177; WAN024A7A; Start 55; Stop 79
tccctcaggcatgatataatggtta

SEQ ID NO: 257586 - DNA, 25 bp, Artificial
  probe
  misc_feature (1)..(25): SEQ ID NO: 177; WAN024A7A; Start 54; Stop 78
ttccctcaggcatgatataatggtt

SEQ ID NO: 257587 - DNA, 25 bp, Artificial
  probe
  misc_feature (1)..(25): SEQ ID NO: 177; WAN024A7A; Start 53; Stop 77
tttccctcaggcatgatataatggt

SEQ ID NO: 257588 - DNA, 25 bp, Artificial
  probe
  misc_feature (1)..(25): SEQ ID NO: 177; WAN024A7A; Start 64; Stop 88
catgatataatggttacagaagtct

SEQ ID NO: 257589 - DNA, 25 bp, Artificial
  probe
  misc_feature (1)..(25): SEQ ID NO: 177; WAN024A7A; Start 74; Stop 98
tggttacagaagtctagaaagagga

SEQ ID NO: 257590 - DNA, 25 bp, Artificial
  probe
  misc_feature (1)..(25): SEQ ID NO: 177; WAN024A7A; Start 73; Stop 97
atggttacagaagtctagaaagagg

SEQ ID NO: 257591 - DNA, 25 bp, Artificial
  probe
  misc_feature (1)..(25): SEQ ID NO: 177; WAN024A7A; Start 75; Stop 99
ggttacagaagtctagaaagaggaa

SEQ ID NO: 257592 - DNA, 25 bp, Artificial
  probe
  misc_feature (1)..(25): SEQ ID NO: 177; WAN024A7A; Start 66; Stop 90
tgatataatggttacagaagtctag

SEQ ID NO: 257593 - DNA, 25 bp, Artificial
  probe
  misc_feature (1)..(25): SEQ ID NO: 177; WAN024A7A; Start 49; Stop 73
tgattttccctcaggcatgatataa

SEQ ID NO: 257594 - DNA, 25 bp, Artificial
  probe
  misc_feature (1)..(25): SEQ ID NO: 177; WAN024A7A; Start 48; Stop 72
ttgattttccctcaggcatgatata

SEQ ID NO: 257595 - DNA, 25 bp, Artificial
  probe
  misc_feature (1)..(25): SEQ ID NO: 177; WAN024A7A; Start 47; Stop 71
tttgattttccctcaggcatgatat

SEQ ID NO: 257596 - DNA, 25 bp, Artificial
  probe
  misc_feature (1)..(25): SEQ ID NO: 177; WAN024A7A; Start 52; Stop 76
ttttccctcaggcatgatataatgg

SEQ ID NO: 257597 - DNA, 25 bp, Artificial
  probe
  misc_feature (1)..(25): SEQ ID NO: 177; WAN024A7A; Start 46; Stop 70
ttttgattttccctcaggcatgata

SEQ ID NO: 257598 - DNA, 25 bp, Artificial
  probe
  misc_feature (1)..(25): SEQ ID NO: 177; WAN024A7A; Start 72; Stop 96
aatggttacagaagtctagaaagag

SEQ ID NO: 257599 - DNA, 25 bp, Artificial
  probe
  misc_feature (1)..(25): SEQ ID NO: 177; WAN024A7A; Start 51; Stop 75
attttccctcaggcatgatataatg

SEQ ID NO: 257600 - DNA, 25 bp, Artificial
  probe
  misc_feature (1)..(25): SEQ ID NO: 177; WAN024A7A; Start 7; Stop 31
aaagtaaaagaagataaacagtggg

SEQ ID NO: 257601 - DNA, 25 bp, Artificial
  probe
  misc_feature (1)..(25): SEQ ID NO: 177; WAN024A7A; Start 50; Stop 74
gattttccctcaggcatgatataat

SEQ ID NO: 257602 - DNA, 25 bp, Artificial
  probe
  misc_feature (1)..(25): SEQ ID NO: 177; WAN024A7A; Start 71; Stop 95
taatggttacagaagtctagaaaga

SEQ ID NO: 257603 - DNA, 25 bp, Artificial
  probe
  misc_feature (1)..(25): SEQ ID NO: 177; WAN024A7A; Start 70; Stop 94
ataatggttacagaagtctagaaag

SEQ ID NO: 257604 - DNA, 25 bp, Artificial
  probe
  misc_feature (1)..(25): SEQ ID NO: 177; WAN024A7A; Start 67; Stop 91
gatataatggttacagaagtctaga

SEQ ID NO: 257605 - DNA, 25 bp, Artificial
  probe
  misc_feature (1)..(25): SEQ ID NO: 177; WAN024A7A; Start 6; Stop 30
taaagtaaaagaagataaacagtgg

SEQ ID NO: 257606 - DNA, 25 bp, Artificial
  probe
  misc_feature (1)..(25): SEQ ID NO: 178; WAN024A7Z; Start 7; Stop 31
aaggcaatcaattacttggaagagt

SEQ ID NO: 257607 - DNA, 25 bp, Artificial
  probe
  misc_feature (1)..(25): SEQ ID NO: 178; WAN024A7Z; Start 6; Stop 30
taaggcaatcaattacttggaagag

SEQ ID NO: 257608 - DNA, 25 bp, Artificial
  probe
  misc_feature (1)..(25): SEQ ID NO: 178; WAN024A7Z; Start 5; Stop 29
ttaaggcaatcaattacttggaaga

SEQ ID NO: 257609 - DNA, 25 bp, Artificial
  probe
  misc_feature (1)..(25): SEQ ID NO: 178; WAN024A7Z; Start 8; Stop 32
aggcaatcaattacttggaagagta

SEQ ID NO: 257610 - DNA, 25 bp, Artificial
  probe
  misc_feature (1)..(25): SEQ ID NO: 178; WAN024A7Z; Start 9; Stop 33
ggcaatcaattacttggaagagtat

SEQ ID NO: 257611 - DNA, 25 bp, Artificial
  probe
  misc_feature (1)..(25): SEQ ID NO: 178; WAN024A7Z; Start 137; Stop 161
gctgtcagttgtatagaaagtgttc

SEQ ID NO: 257612 - DNA, 25 bp, Artificial
  probe
  misc_feature (1)..(25): SEQ ID NO: 178; WAN024A7Z; Start 138; Stop 162
ctgtcagttgtatagaaagtgttcg

SEQ ID NO: 257613 - DNA, 25 bp, Artificial
  probe
  misc_feature (1)..(25): SEQ ID NO: 178; WAN024A7Z; Start 10; Stop 34
gcaatcaattacttggaagagtatg

SEQ ID NO: 257614 - DNA, 25 bp, Artificial
  probe
  misc_feature (1)..(25): SEQ ID NO: 178; WAN024A7Z; Start 23; Stop 47
tggaagagtatgaaagcatttagtt

SEQ ID NO: 257615 - DNA, 25 bp, Artificial
  probe
  misc_feature (1)..(25): SEQ ID NO: 178; WAN024A7Z; Start 22; Stop 46
ttggaagagtatgaaagcatttagt

SEQ ID NO: 257616 - DNA, 25 bp, Artificial
  probe
  misc_feature (1)..(25): SEQ ID NO: 178; WAN024A7Z; Start 20; Stop 44
acttggaagagtatgaaagcattta

SEQ ID NO: 257617 - DNA, 25 bp, Artificial
  probe
  misc_feature (1)..(25): SEQ ID NO: 178; WAN024A7Z; Start 21; Stop 45
cttggaagagtatgaaagcatttag

SEQ ID NO: 257618 - DNA, 25 bp, Artificial
  probe
  misc_feature (1)..(25): SEQ ID NO: 178; WAN024A7Z; Start 114; Stop 138
ttgttctattctgaaagatttgagc

SEQ ID NO: 257619 - DNA, 25 bp, Artificial
  probe
  misc_feature (1)..(25): SEQ ID NO: 178; WAN024A7Z; Start 136; Stop 160
agctgtcagttgtatagaaagtgtt

SEQ ID NO: 257620 - DNA, 25 bp, Artificial
  probe
  misc_feature (1)..(25): SEQ ID NO: 178; WAN024A7Z; Start 4; Stop 28
tttaaggcaatcaattacttggaag

SEQ ID NO: 257621 - DNA, 25 bp, Artificial
  probe
  misc_feature (1)..(25): SEQ ID NO: 178; WAN024A7Z; Start 135; Stop 159
gagctgtcagttgtatagaaagtgt

SEQ ID NO: 257622 - DNA, 25 bp, Artificial
  probe
  misc_feature (1)..(25): SEQ ID NO: 178; WAN024A7Z; Start 24; Stop 48
ggaagagtatgaaagcatttagttt

SEQ ID NO: 257623 - DNA, 25 bp, Artificial
  probe
  misc_feature (1)..(25): SEQ ID NO: 178; WAN024A7Z; Start 139; Stop 163
tgtcagttgtatagaaagtgttcga

SEQ ID NO: 257624 - DNA, 25 bp, Artificial
  probe
  misc_feature (1)..(25): SEQ ID NO: 178; WAN024A7Z; Start 133; Stop 157
ttgagctgtcagttgtatagaaagt

SEQ ID NO: 257625 - DNA, 25 bp, Artificial
  probe
  misc_feature (1)..(25): SEQ ID NO: 178; WAN024A7Z; Start 126; Stop 150
gaaagatttgagctgtcagttgtat

SEQ ID NO: 257626 - DNA, 25 bp, Artificial
  probe
  misc_feature (1)..(25): SEQ ID NO: 178; WAN024A7Z; Start 129; Stop 153
agatttgagctgtcagttgtataga

SEQ ID NO: 257627 - DNA, 25 bp, Artificial
  probe
  misc_feature (1)..(25): SEQ ID NO: 178; WAN024A7Z; Start 134; Stop 158
tgagctgtcagttgtatagaaagtg

SEQ ID NO: 257628 - DNA, 25 bp, Artificial
  probe
  misc_feature (1)..(25): SEQ ID NO: 178; WAN024A7Z; Start 125; Stop 149
tgaaagatttgagctgtcagttgta

SEQ ID NO: 257629 - DNA, 25 bp, Artificial
  probe
  misc_feature (1)..(25): SEQ ID NO: 178; WAN024A7Z; Start 118; Stop 142
tctattctgaaagatttgagctgtc

SEQ ID NO: 257630 - DNA, 25 bp, Artificial
  probe
  misc_feature (1)..(25): SEQ ID NO: 178; WAN024A7Z; Start 132; Stop 156
tttgagctgtcagttgtatagaaag

SEQ ID NO: 257631 - DNA, 25 bp, Artificial
  probe
  misc_feature (1)..(25): SEQ ID NO: 178; WAN024A7Z; Start 119; Stop 143
ctattctgaaagatttgagctgtca

SEQ ID NO: 257632 - DNA, 25 bp, Artificial
  probe
  misc_feature (1)..(25): SEQ ID NO: 178; WAN024A7Z; Start 11; Stop 35
caatcaattacttggaagagtatga

SEQ ID NO: 257633 - DNA, 25 bp, Artificial
  probe
  misc_feature (1)..(25): SEQ ID NO: 178; WAN024A7Z; Start 130; Stop 154
gatttgagctgtcagttgtatagaa

SEQ ID NO: 257634 - DNA, 25 bp, Artificial
  probe
  misc_feature (1)..(25): SEQ ID NO: 178; WAN024A7Z; Start 128; Stop 152
aagatttgagctgtcagttgtatag

SEQ ID NO: 257635 - DNA, 25 bp, Artificial
  probe
  misc_feature (1)..(25): SEQ ID NO: 178; WAN024A7Z; Start 3; Stop 27
atttaaggcaatcaattacttggaa

SEQ ID NO: 257636 - DNA, 25 bp, Artificial
  probe
  misc_feature (1)..(25): SEQ ID NO: 178; WAN024A7Z; Start 117; Stop 141
ttctattctgaaagatttgagctgt

SEQ ID NO: 257637 - DNA, 25 bp, Artificial
  probe
  misc_feature (1)..(25): SEQ ID NO: 178; WAN024A7Z; Start 115; Stop 139
tgttctattctgaaagatttgagct

SEQ ID NO: 257638 - DNA, 25 bp, Artificial
  probe
  misc_feature (1)..(25): SEQ ID NO: 178; WAN024A7Z; Start 19; Stop 43
tacttggaagagtatgaaagcattt

SEQ ID NO: 257639 - DNA, 25 bp, Artificial
  probe
  misc_feature (1)..(25): SEQ ID NO: 179; WAN024ACB; Start 61; Stop 85
ttactggtggagagagtatatgagg

SEQ ID NO: 257640 - DNA, 25 bp, Artificial
  probe
  misc_feature (1)..(25): SEQ ID NO: 179; WAN024ACB; Start 69; Stop 93
ggagagagtatatgagggtggataa

SEQ ID NO: 257641 - DNA, 25 bp, Artificial
  probe
  misc_feature (1)..(25): SEQ ID NO: 179; WAN024ACB; Start 68; Stop 92
tggagagagtatatgagggtggata

SEQ ID NO: 257642 - DNA, 25 bp, Artificial
  probe
  misc_feature (1)..(25): SEQ ID NO: 179; WAN024ACB; Start 72; Stop 96
gagagtatatgagggtggataaagt

SEQ ID NO: 257643 - DNA, 25 bp, Artificial
  probe
  misc_feature (1)..(25): SEQ ID NO: 179; WAN024ACB; Start 71; Stop 95
agagagtatatgagggtggataaag

SEQ ID NO: 257644 - DNA, 25 bp, Artificial
  probe
  misc_feature (1)..(25): SEQ ID NO: 179; WAN024ACB; Start 70; Stop 94
gagagagtatatgagggtggataaa

SEQ ID NO: 257645 - DNA, 25 bp, Artificial
  probe
  misc_feature (1)..(25): SEQ ID NO: 179; WAN024ACB; Start 73; Stop 97
agagtatatgagggtggataaagta

SEQ ID NO: 257646 - DNA, 25 bp, Artificial
  probe
  misc_feature (1)..(25): SEQ ID NO: 179; WAN024ACB; Start 67; Stop 91
gtggagagagtatatgagggtggat

SEQ ID NO: 257647 - DNA, 25 bp, Artificial
  probe
  misc_feature (1)..(25): SEQ ID NO: 179; WAN024ACB; Start 74; Stop 98
gagtatatgagggtggataaagtac

SEQ ID NO: 257648 - DNA, 25 bp, Artificial
  probe
  misc_feature (1)..(25): SEQ ID NO: 179; WAN024ACB; Start 60; Stop 84
tttactggtggagagagtatatgag

SEQ ID NO: 257649 - DNA, 25 bp, Artificial
  probe
  misc_feature (1)..(25): SEQ ID NO: 179; WAN024ACB; Start 64; Stop 88
ctggtggagagagtatatgagggtg

SEQ ID NO: 257650 - DNA, 25 bp, Artificial
  probe
  misc_feature (1)..(25): SEQ ID NO: 179; WAN024ACB; Start 62; Stop 86
tactggtggagagagtatatgaggg

SEQ ID NO: 257651 - DNA, 25 bp, Artificial
  probe
  misc_feature (1)..(25): SEQ ID NO: 179; WAN024ACB; Start 63; Stop 87
actggtggagagagtatatgagggt

SEQ ID NO: 257652 - DNA, 25 bp, Artificial
  probe
  misc_feature (1)..(25): SEQ ID NO: 179; WAN024ACB; Start 66; Stop 90
ggtggagagagtatatgagggtgga

SEQ ID NO: 257653 - DNA, 25 bp, Artificial
  probe
  misc_feature (1)..(25): SEQ ID NO: 179; WAN024ACB; Start 65; Stop 89
tggtggagagagtatatgagggtgg

SEQ ID NO: 257654 - DNA, 25 bp, Artificial
  probe
  misc_feature (1)..(25): SEQ ID NO: 179; WAN024ACB; Start 45; Stop 69
tatcattgcttgcattttactggtg

SEQ ID NO: 257655 - DNA, 25 bp, Artificial
  probe
  misc_feature (1)..(25): SEQ ID NO: 179; WAN024ACB; Start 44; Stop 68
gtatcattgcttgcattttactggt

SEQ ID NO: 257656 - DNA, 25 bp, Artificial
  probe
  misc_feature (1)..(25): SEQ ID NO: 179; WAN024ACB; Start 43; Stop 67
tgtatcattgcttgcattttactgg

SEQ ID NO: 257657 - DNA, 25 bp, Artificial
  probe
  misc_feature (1)..(25): SEQ ID NO: 179; WAN024ACB; Start 42; Stop 66
ttgtatcattgcttgcattttactg

SEQ ID NO: 257658 - DNA, 25 bp, Artificial
  probe
  misc_feature (1)..(25): SEQ ID NO: 179; WAN024ACB; Start 59; Stop 83
ttttactggtggagagagtatatga

SEQ ID NO: 257659 - DNA, 25 bp, Artificial
  probe
  misc_feature (1)..(25): SEQ ID NO: 179; WAN024ACB; Start 33; Stop 57
aaatctattttgtatcattgcttgc

SEQ ID NO: 257660 - DNA, 25 bp, Artificial
  probe
  misc_feature (1)..(25): SEQ ID NO: 179; WAN024ACB; Start 41; Stop 65
tttgtatcattgcttgcattttact

SEQ ID NO: 257661 - DNA, 25 bp, Artificial
  probe
  misc_feature (1)..(25): SEQ ID NO: 179; WAN024ACB; Start 75; Stop 99
agtatatgagggtggataaagtact

SEQ ID NO: 257662 - DNA, 25 bp, Artificial
  probe
  misc_feature (1)..(25): SEQ ID NO: 179; WAN024ACB; Start 36; Stop 60
tctattttgtatcattgcttgcatt

SEQ ID NO: 257663 - DNA, 25 bp, Artificial
  probe
  misc_feature (1)..(25): SEQ ID NO: 179; WAN024ACB; Start 34; Stop 58
aatctattttgtatcattgcttgca

SEQ ID NO: 257664 - DNA, 25 bp, Artificial
  probe
  misc_feature (1)..(25): SEQ ID NO: 179; WAN024ACB; Start 58; Stop 82
attttactggtggagagagtatatg

SEQ ID NO: 257665 - DNA, 25 bp, Artificial
  probe
  misc_feature (1)..(25): SEQ ID NO: 179; WAN024ACB; Start 57; Stop 81
cattttactggtggagagagtatat

SEQ ID NO: 257666 - DNA, 25 bp, Artificial
  probe
  misc_feature (1)..(25): SEQ ID NO: 179; WAN024ACB; Start 40; Stop 64
ttttgtatcattgcttgcattttac

SEQ ID NO: 257667 - DNA, 25 bp, Artificial
  probe
  misc_feature (1)..(25): SEQ ID NO: 179; WAN024ACB; Start 35; Stop 59
atctattttgtatcattgcttgcat

SEQ ID NO: 257668 - DNA, 25 bp, Artificial
  probe
  misc_feature (1)..(25): SEQ ID NO: 179; WAN024ACB; Start 46; Stop 70
atcattgcttgcattttactggtgg

SEQ ID NO: 257669 - DNA, 25 bp, Artificial
  probe
  misc_feature (1)..(25): SEQ ID NO: 179; WAN024ACB; Start 37; Stop 61
ctattttgtatcattgcttgcattt

SEQ ID NO: 257670 - DNA, 25 bp, Artificial
  probe
  misc_feature (1)..(25): SEQ ID NO: 179; WAN024ACB; Start 48; Stop 72
cattgcttgcattttactggtggag

SEQ ID NO: 257671 - DNA, 25 bp, Artificial
  probe
  misc_feature (1)..(25): SEQ ID NO: 179; WAN024ACB; Start 39; Stop 63
attttgtatcattgcttgcatttta

SEQ ID NO: 257672 - DNA, 25 bp, Artificial
  probe
  misc_feature (1)..(25): SEQ ID NO: 180; WAN0249WF; Start 140; Stop 164
gcttgctaagtttctctttgattct

SEQ ID NO: 257673 - DNA, 25 bp, Artificial
  probe
  misc_feature (1)..(25): SEQ ID NO: 180; WAN0249WF; Start 126; Stop 150
tcttactactgttagcttgctaagt

SEQ ID NO: 257674 - DNA, 25 bp, Artificial
  probe
  misc_feature (1)..(25): SEQ ID NO: 180; WAN0249WF; Start 127; Stop 151
cttactactgttagcttgctaagtt

SEQ ID NO: 257675 - DNA, 25 bp, Artificial
  probe
  misc_feature (1)..(25): SEQ ID NO: 180; WAN0249WF; Start 139; Stop 163
agcttgctaagtttctctttgattc

SEQ ID NO: 257676 - DNA, 25 bp, Artificial
  probe
  misc_feature (1)..(25): SEQ ID NO: 180; WAN0249WF; Start 123; Stop 147
ttatcttactactgttagcttgcta

SEQ ID NO: 257677 - DNA, 25 bp, Artificial
  probe
  misc_feature (1)..(25): SEQ ID NO: 180; WAN0249WF; Start 125; Stop 149
atcttactactgttagcttgctaag

SEQ ID NO: 257678 - DNA, 25 bp, Artificial
  probe
  misc_feature (1)..(25): SEQ ID NO: 180; WAN0249WF; Start 138; Stop 162
tagcttgctaagtttctctttgatt

SEQ ID NO: 257679 - DNA, 25 bp, Artificial
  probe
  misc_feature (1)..(25): SEQ ID NO: 180; WAN0249WF; Start 122; Stop 146
tttatcttactactgttagcttgct

SEQ ID NO: 257680 - DNA, 25 bp, Artificial
  probe
  misc_feature (1)..(25): SEQ ID NO: 180; WAN0249WF; Start 82; Stop 106
acactatttaccaatcttatcccta

SEQ ID NO: 257681 - DNA, 25 bp, Artificial
  probe
  misc_feature (1)..(25): SEQ ID NO: 180; WAN0249WF; Start 81; Stop 105
tacactatttaccaatcttatccct

SEQ ID NO: 257682 - DNA, 25 bp, Artificial
  probe
  misc_feature (1)..(25): SEQ ID NO: 180; WAN0249WF; Start 135; Stop 159
tgttagcttgctaagtttctctttg

SEQ ID NO: 257683 - DNA, 25 bp, Artificial
  probe
  misc_feature (1)..(25): SEQ ID NO: 180; WAN0249WF; Start 130; Stop 154
actactgttagcttgctaagtttct

SEQ ID NO: 257684 - DNA, 25 bp, Artificial
  probe
  misc_feature (1)..(25): SEQ ID NO: 180; WAN0249WF; Start 133; Stop 157
actgttagcttgctaagtttctctt

SEQ ID NO: 257685 - DNA, 25 bp, Artificial
  probe
  misc_feature (1)..(25): SEQ ID NO: 180; WAN0249WF; Start 132; Stop 156
tactgttagcttgctaagtttctct

SEQ ID NO: 257686 - DNA, 25 bp, Artificial
  probe
  misc_feature (1)..(25): SEQ ID NO: 180; WAN0249WF; Start 136; Stop 160
gttagcttgctaagtttctctttga

SEQ ID NO: 257687 - DNA, 25 bp, Artificial
  probe
  misc_feature (1)..(25): SEQ ID NO: 180; WAN0249WF; Start 134; Stop 158
ctgttagcttgctaagtttctcttt

SEQ ID NO: 257688 - DNA, 25 bp, Artificial
  probe
  misc_feature (1)..(25): SEQ ID NO: 180; WAN0249WF; Start 131; Stop 155
ctactgttagcttgctaagtttctc

SEQ ID NO: 257689 - DNA, 25 bp, Artificial
  probe
  misc_feature (1)..(25): SEQ ID NO: 180; WAN0249WF; Start 124; Stop 148
tatcttactactgttagcttgctaa

SEQ ID NO: 257690 - DNA, 25 bp, Artificial
  probe
  misc_feature (1)..(25): SEQ ID NO: 180; WAN0249WF; Start 137; Stop 161
ttagcttgctaagtttctctttgat

SEQ ID NO: 257691 - DNA, 25 bp, Artificial
  probe
  misc_feature (1)..(25): SEQ ID NO: 180; WAN0249WF; Start 129; Stop 153
tactactgttagcttgctaagtttc

SEQ ID NO: 257692 - DNA, 25 bp, Artificial
  probe
  misc_feature (1)..(25): SEQ ID NO: 180; WAN0249WF; Start 128; Stop 152
ttactactgttagcttgctaagttt

SEQ ID NO: 257693 - DNA, 25 bp, Artificial
  probe
  misc_feature (1)..(25): SEQ ID NO: 180; WAN0249WF; Start 80; Stop 104
ttacactatttaccaatcttatccc

SEQ ID NO: 257694 - DNA, 25 bp, Artificial
  probe
  misc_feature (1)..(25): SEQ ID NO: 180; WAN0249WF; Start 83; Stop 107
cactatttaccaatcttatccctaa

SEQ ID NO: 257695 - DNA, 25 bp, Artificial
  probe
  misc_feature (1)..(25): SEQ ID NO: 180; WAN0249WF; Start 91; Stop 115
accaatcttatccctaatatcaaat

SEQ ID NO: 257696 - DNA, 25 bp, Artificial
  probe
  misc_feature (1)..(25): SEQ ID NO: 180; WAN0249WF; Start 121; Stop 145
ttttatcttactactgttagcttgc

SEQ ID NO: 257697 - DNA, 25 bp, Artificial
  probe
  misc_feature (1)..(25): SEQ ID NO: 180; WAN0249WF; Start 31; Stop 55
acttttcagaaaccagaaataacta

SEQ ID NO: 257698 - DNA, 25 bp, Artificial
  probe
  misc_feature (1)..(25): SEQ ID NO: 180; WAN0249WF; Start 30; Stop 54
tacttttcagaaaccagaaataact

SEQ ID NO: 257699 - DNA, 25 bp, Artificial
  probe
  misc_feature (1)..(25): SEQ ID NO: 180; WAN0249WF; Start 29; Stop 53
atacttttcagaaaccagaaataac

SEQ ID NO: 257700 - DNA, 25 bp, Artificial
  probe
  misc_feature (1)..(25): SEQ ID NO: 180; WAN0249WF; Start 32; Stop 56
cttttcagaaaccagaaataactat

SEQ ID NO: 257701 - DNA, 25 bp, Artificial
  probe
  misc_feature (1)..(25): SEQ ID NO: 180; WAN0249WF; Start 28; Stop 52
aatacttttcagaaaccagaaataa

SEQ ID NO: 257702 - DNA, 25 bp, Artificial
  probe
  misc_feature (1)..(25): SEQ ID NO: 181; WAN024AF3; Start 79; Stop 103
actgattttcgctattcttttggat

SEQ ID NO: 257703 - DNA, 25 bp, Artificial
  probe
  misc_feature (1)..(25): SEQ ID NO: 181; WAN024AF3; Start 86; Stop 110
ttcgctattcttttggattttctga

SEQ ID NO: 257704 - DNA, 25 bp, Artificial
  probe
  misc_feature (1)..(25): SEQ ID NO: 181; WAN024AF3; Start 87; Stop 111
tcgctattcttttggattttctgaa

SEQ ID NO: 257705 - DNA, 25 bp, Artificial
  probe
  misc_feature (1)..(25): SEQ ID NO: 181; WAN024AF3; Start 78; Stop 102
tactgattttcgctattcttttgga

SEQ ID NO: 257706 - DNA, 25 bp, Artificial
  probe
  misc_feature (1)..(25): SEQ ID NO: 181; WAN024AF3; Start 85; Stop 109
tttcgctattcttttggattttctg

SEQ ID NO: 257707 - DNA, 25 bp, Artificial
  probe
  misc_feature (1)..(25): SEQ ID NO: 181; WAN024AF3; Start 80; Stop 104
ctgattttcgctattcttttggatt

SEQ ID NO: 257708 - DNA, 25 bp, Artificial
  probe
  misc_feature (1)..(25): SEQ ID NO: 181; WAN024AF3; Start 77; Stop 101
ttactgattttcgctattcttttgg

SEQ ID NO: 257709 - DNA, 25 bp, Artificial
  probe
  misc_feature (1)..(25): SEQ ID NO: 181; WAN024AF3; Start 84; Stop 108
ttttcgctattcttttggattttct

SEQ ID NO: 257710 - DNA, 25 bp, Artificial
  probe
  misc_feature (1)..(25): SEQ ID NO: 181; WAN024AF3; Start 81; Stop 105
tgattttcgctattcttttggattt

SEQ ID NO: 257711 - DNA, 25 bp, Artificial
  probe
  misc_feature (1)..(25): SEQ ID NO: 181; WAN024AF3; Start 83; Stop 107
attttcgctattcttttggattttc

SEQ ID NO: 257712 - DNA, 25 bp, Artificial
  probe
  misc_feature (1)..(25): SEQ ID NO: 181; WAN024AF3; Start 82; Stop 106
gattttcgctattcttttggatttt

SEQ ID NO: 257713 - DNA, 25 bp, Artificial
  probe
  misc_feature (1)..(25): SEQ ID NO: 181; WAN024AF3; Start 76; Stop 100
tttactgattttcgctattcttttg

SEQ ID NO: 257714 - DNA, 25 bp, Artificial
  probe
  misc_feature (1)..(25): SEQ ID NO: 181; WAN024AF3; Start 75; Stop 99
ttttactgattttcgctattctttt

SEQ ID NO: 257715 - DNA, 25 bp, Artificial
  probe
  misc_feature (1)..(25): SEQ ID NO: 182; WAN024AK2; Start 41; Stop 65
actcttgtcctaaatagaagataaa

SEQ ID NO: 257716 - DNA, 25 bp, Artificial
  probe
  misc_feature (1)..(25): SEQ ID NO: 182; WAN024AK2; Start 40; Stop 64
aactcttgtcctaaatagaagataa

SEQ ID NO: 257717 - DNA, 25 bp, Artificial
  probe
  misc_feature (1)..(25): SEQ ID NO: 182; WAN024AK2; Start 39; Stop 63
aaactcttgtcctaaatagaagata

SEQ ID NO: 257718 - DNA, 25 bp, Artificial
  probe
  misc_feature (1)..(25): SEQ ID NO: 182; WAN024AK2; Start 97; Stop 121
aaaagctagatatttccaattgtgg

SEQ ID NO: 257719 - DNA, 25 bp, Artificial
  probe
  misc_feature (1)..(25): SEQ ID NO: 182; WAN024AK2; Start 98; Stop 122
aaagctagatatttccaattgtgga

SEQ ID NO: 257720 - DNA, 25 bp, Artificial
  probe
  misc_feature (1)..(25): SEQ ID NO: 182; WAN024AK2; Start 38; Stop 62
aaaactcttgtcctaaatagaagat

SEQ ID NO: 257721 - DNA, 25 bp, Artificial
  probe
  misc_feature (1)..(25): SEQ ID NO: 183; WAN024AHY; Start 41; Stop 65
cgaagtaatcatcattatagtctgg

SEQ ID NO: 257722 - DNA, 25 bp, Artificial
  probe
  misc_feature (1)..(25): SEQ ID NO: 183; WAN024AHY; Start 24; Stop 48
tcggcagatgaagattacgaagtaa

SEQ ID NO: 257723 - DNA, 25 bp, Artificial
  probe
  misc_feature (1)..(25): SEQ ID NO: 183; WAN024AHY; Start 20; Stop 44
ttagtcggcagatgaagattacgaa

SEQ ID NO: 257724 - DNA, 25 bp, Artificial
  probe
  misc_feature (1)..(25): SEQ ID NO: 183; WAN024AHY; Start 40; Stop 64
acgaagtaatcatcattatagtctg

SEQ ID NO: 257725 - DNA, 25 bp, Artificial
  probe
  misc_feature (1)..(25): SEQ ID NO: 183; WAN024AHY; Start 21; Stop 45
tagtcggcagatgaagattacgaag

SEQ ID NO: 257726 - DNA, 25 bp, Artificial
  probe
  misc_feature (1)..(25): SEQ ID NO: 183; WAN024AHY; Start 23; Stop 47
gtcggcagatgaagattacgaagta

SEQ ID NO: 257727 - DNA, 25 bp, Artificial
  probe
  misc_feature (1)..(25): SEQ ID NO: 183; WAN024AHY; Start 45; Stop 69
gtaatcatcattatagtctgggaga

SEQ ID NO: 257728 - DNA, 25 bp, Artificial
  probe
  misc_feature (1)..(25): SEQ ID NO: 183; WAN024AHY; Start 44; Stop 68
agtaatcatcattatagtctgggag

SEQ ID NO: 257729 - DNA, 25 bp, Artificial
  probe
  misc_feature (1)..(25): SEQ ID NO: 183; WAN024AHY; Start 145; Stop 169
tacgaagtaatcatcaatatagtcc

SEQ ID NO: 257730 - DNA, 25 bp, Artificial
  probe
  misc_feature (1)..(25): SEQ ID NO: 183; WAN024AHY; Start 17; Stop 41
gttttagtcggcagatgaagattac

SEQ ID NO: 257731 - DNA, 25 bp, Artificial
  probe
  misc_feature (1)..(25): SEQ ID NO: 183; WAN024AHY; Start 16; Stop 40
tgttttagtcggcagatgaagatta

SEQ ID NO: 257732 - DNA, 25 bp, Artificial
  probe
  misc_feature (1)..(25): SEQ ID NO: 183; WAN024AHY; Start 25; Stop 49
cggcagatgaagattacgaagtaat

SEQ ID NO: 257733 - DNA, 25 bp, Artificial
  probe
  misc_feature (1)..(25): SEQ ID NO: 183; WAN024AHY; Start 14; Stop 38
attgttttagtcggcagatgaagat

SEQ ID NO: 257734 - DNA, 25 bp, Artificial
  probe
  misc_feature (1)..(25): SEQ ID NO: 183; WAN024AHY; Start 15; Stop 39
ttgttttagtcggcagatgaagatt

SEQ ID NO: 257735 - DNA, 25 bp, Artificial
  probe
  misc_feature (1)..(25): SEQ ID NO: 183; WAN024AHY; Start 43; Stop 67
aagtaatcatcattatagtctggga

SEQ ID NO: 257736 - DNA, 25 bp, Artificial
  probe
  misc_feature (1)..(25): SEQ ID NO: 183; WAN024AHY; Start 18; Stop 42
ttttagtcggcagatgaagattacg

SEQ ID NO: 257737 - DNA, 25 bp, Artificial
  probe
  misc_feature (1)..(25): SEQ ID NO: 183; WAN024AHY; Start 42; Stop 66
gaagtaatcatcattatagtctggg

SEQ ID NO: 257738 - DNA, 25 bp, Artificial
  probe
  misc_feature (1)..(25): SEQ ID NO: 183; WAN024AHY; Start 65; Stop 89
ggagactagtttaggttgcagataa

SEQ ID NO: 257739 - DNA, 25 bp, Artificial
  probe
  misc_feature (1)..(25): SEQ ID NO: 183; WAN024AHY; Start 13; Stop 37
gattgttttagtcggcagatgaaga

SEQ ID NO: 257740 - DNA, 25 bp, Artificial
  probe
  misc_feature (1)..(25): SEQ ID NO: 183; WAN024AHY; Start 19; Stop 43
tttagtcggcagatgaagattacga

SEQ ID NO: 257741 - DNA, 25 bp, Artificial
  probe
  misc_feature (1)..(25): SEQ ID NO: 183; WAN024AHY; Start 64; Stop 88
gggagactagtttaggttgcagata

SEQ ID NO: 257742 - DNA, 25 bp, Artificial
  probe
  misc_feature (1)..(25): SEQ ID NO: 183; WAN024AHY; Start 12; Stop 36
ggattgttttagtcggcagatgaag

SEQ ID NO: 257743 - DNA, 25 bp, Artificial
  probe
  misc_feature (1)..(25): SEQ ID NO: 183; WAN024AHY; Start 22; Stop 46
agtcggcagatgaagattacgaagt

SEQ ID NO: 257744 - DNA, 25 bp, Artificial
  probe
  misc_feature (1)..(25): SEQ ID NO: 183; WAN024AHY; Start 131; Stop 155
cggcagatggagattacgaagtaat

SEQ ID NO: 257745 - DNA, 25 bp, Artificial
  probe
  misc_feature (1)..(25): SEQ ID NO: 183; WAN024AHY; Start 68; Stop 92
gactagtttaggttgcagataaaga

SEQ ID NO: 257746 - DNA, 25 bp, Artificial
  probe
  misc_feature (1)..(25): SEQ ID NO: 183; WAN024AHY; Start 67; Stop 91
agactagtttaggttgcagataaag

SEQ ID NO: 257747 - DNA, 25 bp, Artificial
  probe
  misc_feature (1)..(25): SEQ ID NO: 183; WAN024AHY; Start 66; Stop 90
gagactagtttaggttgcagataaa

SEQ ID NO: 257748 - DNA, 25 bp, Artificial
  probe
  misc_feature (1)..(25): SEQ ID NO: 183; WAN024AHY; Start 71; Stop 95
tagtttaggttgcagataaagattg

SEQ ID NO: 257749 - DNA, 25 bp, Artificial
  probe
  misc_feature (1)..(25): SEQ ID NO: 183; WAN024AHY; Start 72; Stop 96
agtttaggttgcagataaagattgc

SEQ ID NO: 257750 - DNA, 25 bp, Artificial
  probe
  misc_feature (1)..(25): SEQ ID NO: 183; WAN024AHY; Start 11; Stop 35
tggattgttttagtcggcagatgaa

SEQ ID NO: 257751 - DNA, 25 bp, Artificial
  probe
  misc_feature (1)..(25): SEQ ID NO: 183; WAN024AHY; Start 70; Stop 94
ctagtttaggttgcagataaagatt

SEQ ID NO: 257752 - DNA, 25 bp, Artificial
  probe
  misc_feature (1)..(25): SEQ ID NO: 183; WAN024AHY; Start 39; Stop 63
tacgaagtaatcatcattatagtct

SEQ ID NO: 257753 - DNA, 25 bp, Artificial
  probe
  misc_feature (1)..(25): SEQ ID NO: 183; WAN024AHY; Start 75; Stop 99
ttaggttgcagataaagattgcgaa

SEQ ID NO: 257754 - DNA, 25 bp, Artificial
  probe
  misc_feature (1)..(25): SEQ ID NO: 184; WAN024A5Q; Start 1; Stop 25
aacacaagacgttaaaagacgccag

SEQ ID NO: 257755 - DNA, 25 bp, Artificial
  probe
  misc_feature (1)..(25): SEQ ID NO: 184; WAN024A5Q; Start 5; Stop 29
caagacgttaaaagacgccagtgag

SEQ ID NO: 257756 - DNA, 25 bp, Artificial
  probe
  misc_feature (1)..(25): SEQ ID NO: 184; WAN024A5Q; Start 3; Stop 27
cacaagacgttaaaagacgccagtg

SEQ ID NO: 257757 - DNA, 25 bp, Artificial
  probe
  misc_feature (1)..(25): SEQ ID NO: 184; WAN024A5Q; Start 4; Stop 28
acaagacgttaaaagacgccagtga

SEQ ID NO: 257758 - DNA, 25 bp, Artificial
  probe
  misc_feature (1)..(25): SEQ ID NO: 185; WAN024A2O; Start 18; Stop 42
agacaatattccaattagccttatt

SEQ ID NO: 257759 - DNA, 25 bp, Artificial
  probe
  misc_feature (1)..(25): SEQ ID NO: 185; WAN024A2O; Start 16; Stop 40
ttagacaatattccaattagcctta

SEQ ID NO: 257760 - DNA, 25 bp, Artificial
  probe
  misc_feature (1)..(25): SEQ ID NO: 185; WAN024A2O; Start 1; Stop 25
aacacactatcccttttagacaata

SEQ ID NO: 257761 - DNA, 25 bp, Artificial
  probe
  misc_feature (1)..(25): SEQ ID NO: 185; WAN024A2O; Start 17; Stop 41
tagacaatattccaattagccttat

SEQ ID NO: 257762 - DNA, 25 bp, Artificial
  probe
  misc_feature (1)..(25): SEQ ID NO: 185; WAN024A2O; Start 15; Stop 39
tttagacaatattccaattagcctt

SEQ ID NO: 257763 - DNA, 25 bp, Artificial
  probe
  misc_feature (1)..(25): SEQ ID NO: 185; WAN024A2O; Start 2; Stop 26
acacactatcccttttagacaatat

SEQ ID NO: 257764 - DNA, 25 bp, Artificial
  probe
  misc_feature (1)..(25): SEQ ID NO: 185; WAN024A2O; Start 19; Stop 43
gacaatattccaattagccttatta

SEQ ID NO: 257765 - DNA, 25 bp, Artificial
  probe
  misc_feature (1)..(25): SEQ ID NO: 185; WAN024A2O; Start 6; Stop 30
actatcccttttagacaatattcca

SEQ ID NO: 257766 - DNA, 25 bp, Artificial
  probe
  misc_feature (1)..(25): SEQ ID NO: 185; WAN024A2O; Start 5; Stop 29
cactatcccttttagacaatattcc

SEQ ID NO: 257767 - DNA, 25 bp, Artificial
  probe
  misc_feature (1)..(25): SEQ ID NO: 185; WAN024A2O; Start 113; Stop 137
aagcgaatttatatctaaaagggat

SEQ ID NO: 257768 - DNA, 25 bp, Artificial
  probe
  misc_feature (1)..(25): SEQ ID NO: 185; WAN024A2O; Start 3; Stop 27
cacactatcccttttagacaatatt

SEQ ID NO: 257769 - DNA, 25 bp, Artificial
  probe
  misc_feature (1)..(25): SEQ ID NO: 185; WAN024A2O; Start 14; Stop 38
ttttagacaatattccaattagcct

SEQ ID NO: 257770 - DNA, 25 bp, Artificial
  probe
  misc_feature (1)..(25): SEQ ID NO: 185; WAN024A2O; Start 9; Stop 33
atcccttttagacaatattccaatt

SEQ ID NO: 257771 - DNA, 25 bp, Artificial
  probe
  misc_feature (1)..(25): SEQ ID NO: 185; WAN024A2O; Start 129; Stop 153
aaaagggatattaaagaaaggagat

SEQ ID NO: 257772 - DNA, 25 bp, Artificial
  probe
  misc_feature (1)..(25): SEQ ID NO: 185; WAN024A2O; Start 13; Stop 37
cttttagacaatattccaattagcc

SEQ ID NO: 257773 - DNA, 25 bp, Artificial
  probe
  misc_feature (1)..(25): SEQ ID NO: 185; WAN024A2O; Start 12; Stop 36
ccttttagacaatattccaattagc

SEQ ID NO: 257774 - DNA, 25 bp, Artificial
  probe
  misc_feature (1)..(25): SEQ ID NO: 185; WAN024A2O; Start 7; Stop 31
ctatcccttttagacaatattccaa

SEQ ID NO: 257775 - DNA, 25 bp, Artificial
  probe
  misc_feature (1)..(25): SEQ ID NO: 185; WAN024A2O; Start 4; Stop 28
acactatcccttttagacaatattc

SEQ ID NO: 257776 - DNA, 25 bp, Artificial
  probe
  misc_feature (1)..(25): SEQ ID NO: 185; WAN024A2O; Start 25; Stop 49
attccaattagccttattaattcaa

SEQ ID NO: 257777 - DNA, 25 bp, Artificial
  probe
  misc_feature (1)..(25): SEQ ID NO: 185; WAN024A2O; Start 112; Stop 136
taagcgaatttatatctaaaaggga

SEQ ID NO: 257778 - DNA, 25 bp, Artificial
  probe
  misc_feature (1)..(25): SEQ ID NO: 185; WAN024A2O; Start 72; Stop 96
acagatgtataatagaaaagcaatg

SEQ ID NO: 257779 - DNA, 25 bp, Artificial
  probe
  misc_feature (1)..(25): SEQ ID NO: 185; WAN024A2O; Start 10; Stop 34
tcccttttagacaatattccaatta

SEQ ID NO: 257780 - DNA, 25 bp, Artificial
  probe
  misc_feature (1)..(25): SEQ ID NO: 185; WAN024A2O; Start 73; Stop 97
cagatgtataatagaaaagcaatga

SEQ ID NO: 257781 - DNA, 25 bp, Artificial
  probe
  misc_feature (1)..(25): SEQ ID NO: 185; WAN024A2O; Start 128; Stop 152
taaaagggatattaaagaaaggaga

SEQ ID NO: 257782 - DNA, 25 bp, Artificial
  probe
  misc_feature (1)..(25): SEQ ID NO: 185; WAN024A2O; Start 114; Stop 138
agcgaatttatatctaaaagggata

SEQ ID NO: 257783 - DNA, 25 bp, Artificial
  probe
  misc_feature (1)..(25): SEQ ID NO: 185; WAN024A2O; Start 11; Stop 35
cccttttagacaatattccaattag

SEQ ID NO: 257784 - DNA, 25 bp, Artificial
  probe
  misc_feature (1)..(25): SEQ ID NO: 185; WAN024A2O; Start 8; Stop 32
tatcccttttagacaatattccaat

SEQ ID NO: 257785 - DNA, 25 bp, Artificial
  probe
  misc_feature (1)..(25): SEQ ID NO: 185; WAN024A2O; Start 127; Stop 151
ctaaaagggatattaaagaaaggag

SEQ ID NO: 257786 - DNA, 25 bp, Artificial
  probe
  misc_feature (1)..(25): SEQ ID NO: 185; WAN024A2O; Start 126; Stop 150
tctaaaagggatattaaagaaagga

SEQ ID NO: 257787 - DNA, 25 bp, Artificial
  probe
  misc_feature (1)..(25): SEQ ID NO: 185; WAN024A2O; Start 111; Stop 135
ttaagcgaatttatatctaaaaggg

SEQ ID NO: 257788 - DNA, 25 bp, Artificial
  probe
  misc_feature (1)..(25): SEQ ID NO: 185; WAN024A2O; Start 26; Stop 50
ttccaattagccttattaattcaaa

SEQ ID NO: 257789 - DNA, 25 bp, Artificial
  probe
  misc_feature (1)..(25): SEQ ID NO: 185; WAN024A2O; Start 34; Stop 58
agccttattaattcaaaactattgt

SEQ ID NO: 257790 - DNA, 25 bp, Artificial
  probe
  misc_feature (1)..(25): SEQ ID NO: 185; WAN024A2O; Start 28; Stop 52
ccaattagccttattaattcaaaac

SEQ ID NO: 257791 - DNA, 25 bp, Artificial
  probe
  misc_feature (1)..(25): SEQ ID NO: 185; WAN024A2O; Start 27; Stop 51
tccaattagccttattaattcaaaa

SEQ ID NO: 257792 - DNA, 25 bp, Artificial
  probe
  misc_feature (1)..(25): SEQ ID NO: 186; WAN0249NA; Start 64; Stop 88
aatcatagagcaaactaggaaacca

SEQ ID NO: 257793 - DNA, 25 bp, Artificial
  probe
  misc_feature (1)..(25): SEQ ID NO: 186; WAN0249NA; Start 65; Stop 89
atcatagagcaaactaggaaaccag

SEQ ID NO: 257794 - DNA, 25 bp, Artificial
  probe
  misc_feature (1)..(25): SEQ ID NO: 186; WAN0249NA; Start 16; Stop 40
tagacgaataaagaaacttggcaaa

SEQ ID NO: 257795 - DNA, 25 bp, Artificial
  probe
  misc_feature (1)..(25): SEQ ID NO: 186; WAN0249NA; Start 15; Stop 39
ttagacgaataaagaaacttggcaa

SEQ ID NO: 257796 - DNA, 25 bp, Artificial
  probe
  misc_feature (1)..(25): SEQ ID NO: 186; WAN0249NA; Start 63; Stop 87
aaatcatagagcaaactaggaaacc

SEQ ID NO: 257797 - DNA, 25 bp, Artificial
  probe
  misc_feature (1)..(25): SEQ ID NO: 186; WAN0249NA; Start 14; Stop 38
tttagacgaataaagaaacttggca

SEQ ID NO: 257798 - DNA, 25 bp, Artificial
  probe
  misc_feature (1)..(25): SEQ ID NO: 186; WAN0249NA; Start 67; Stop 91
catagagcaaactaggaaaccagtc

SEQ ID NO: 257799 - DNA, 25 bp, Artificial
  probe
  misc_feature (1)..(25): SEQ ID NO: 186; WAN0249NA; Start 66; Stop 90
tcatagagcaaactaggaaaccagt

SEQ ID NO: 257800 - DNA, 25 bp, Artificial
  probe
  misc_feature (1)..(25): SEQ ID NO: 186; WAN0249NA; Start 68; Stop 92
atagagcaaactaggaaaccagtcg

SEQ ID NO: 257801 - DNA, 25 bp, Artificial
  probe
  misc_feature (1)..(25): SEQ ID NO: 186; WAN0249NA; Start 17; Stop 41
agacgaataaagaaacttggcaaaa

SEQ ID NO: 257802 - DNA, 25 bp, Artificial
  probe
  misc_feature (1)..(25): SEQ ID NO: 186; WAN0249NA; Start 21; Stop 45
gaataaagaaacttggcaaaatcgc

SEQ ID NO: 257803 - DNA, 25 bp, Artificial
  probe
  misc_feature (1)..(25): SEQ ID NO: 186; WAN0249NA; Start 22; Stop 46
aataaagaaacttggcaaaatcgca

SEQ ID NO: 257804 - DNA, 25 bp, Artificial
  probe
  misc_feature (1)..(25): SEQ ID NO: 186; WAN0249NA; Start 19; Stop 43
acgaataaagaaacttggcaaaatc

SEQ ID NO: 257805 - DNA, 25 bp, Artificial
  probe
  misc_feature (1)..(25): SEQ ID NO: 186; WAN0249NA; Start 18; Stop 42
gacgaataaagaaacttggcaaaat

SEQ ID NO: 257806 - DNA, 25 bp, Artificial
  probe
  misc_feature (1)..(25): SEQ ID NO: 186; WAN0249NA; Start 24; Stop 48
taaagaaacttggcaaaatcgcaat

SEQ ID NO: 257807 - DNA, 25 bp, Artificial
  probe
  misc_feature (1)..(25): SEQ ID NO: 186; WAN0249NA; Start 23; Stop 47
ataaagaaacttggcaaaatcgcaa

SEQ ID NO: 257808 - DNA, 25 bp, Artificial
  probe
  misc_feature (1)..(25): SEQ ID NO: 186; WAN0249NA; Start 28; Stop 52
gaaacttggcaaaatcgcaatttaa

SEQ ID NO: 257809 - DNA, 25 bp, Artificial
  probe
  misc_feature (1)..(25): SEQ ID NO: 186; WAN0249NA; Start 29; Stop 53
aaacttggcaaaatcgcaatttaat

SEQ ID NO: 257810 - DNA, 25 bp, Artificial
  probe
  misc_feature (1)..(25): SEQ ID NO: 186; WAN0249NA; Start 27; Stop 51
agaaacttggcaaaatcgcaattta

SEQ ID NO: 257811 - DNA, 25 bp, Artificial
  probe
  misc_feature (1)..(25): SEQ ID NO: 186; WAN0249NA; Start 25; Stop 49
aaagaaacttggcaaaatcgcaatt

SEQ ID NO: 257812 - DNA, 25 bp, Artificial
  probe
  misc_feature (1)..(25): SEQ ID NO: 186; WAN0249NA; Start 58; Stop 82
tgtgaaaatcatagagcaaactagg

SEQ ID NO: 257813 - DNA, 25 bp, Artificial
  probe
  misc_feature (1)..(25): SEQ ID NO: 186; WAN0249NA; Start 13; Stop 37
ttttagacgaataaagaaacttggc

SEQ ID NO: 257814 - DNA, 25 bp, Artificial
  probe
  misc_feature (1)..(25): SEQ ID NO: 186; WAN0249NA; Start 59; Stop 83
gtgaaaatcatagagcaaactagga

SEQ ID NO: 257815 - DNA, 25 bp, Artificial
  probe
  misc_feature (1)..(25): SEQ ID NO: 186; WAN0249NA; Start 56; Stop 80
tctgtgaaaatcatagagcaaacta

SEQ ID NO: 257816 - DNA, 25 bp, Artificial
  probe
  misc_feature (1)..(25): SEQ ID NO: 186; WAN0249NA; Start 26; Stop 50
aagaaacttggcaaaatcgcaattt

SEQ ID NO: 257817 - DNA, 25 bp, Artificial
  probe
  misc_feature (1)..(25): SEQ ID NO: 186; WAN0249NA; Start 60; Stop 84
tgaaaatcatagagcaaactaggaa

SEQ ID NO: 257818 - DNA, 25 bp, Artificial
  probe
  misc_feature (1)..(25): SEQ ID NO: 186; WAN0249NA; Start 62; Stop 86
aaaatcatagagcaaactaggaaac

SEQ ID NO: 257819 - DNA, 25 bp, Artificial
  probe
  misc_feature (1)..(25): SEQ ID NO: 186; WAN0249NA; Start 57; Stop 81
ctgtgaaaatcatagagcaaactag

SEQ ID NO: 257820 - DNA, 25 bp, Artificial
  probe
  misc_feature (1)..(25): SEQ ID NO: 186; WAN0249NA; Start 61; Stop 85
gaaaatcatagagcaaactaggaaa

SEQ ID NO: 257821 - DNA, 25 bp, Artificial
  probe
  misc_feature (1)..(25): SEQ ID NO: 186; WAN0249NA; Start 20; Stop 44
cgaataaagaaacttggcaaaatcg

SEQ ID NO: 257822 - DNA, 25 bp, Artificial
  probe
  misc_feature (1)..(25): SEQ ID NO: 186; WAN0249NA; Start 69; Stop 93
tagagcaaactaggaaaccagtcgc

SEQ ID NO: 257823 - DNA, 25 bp, Artificial
  probe
  misc_feature (1)..(25): SEQ ID NO: 186; WAN0249NA; Start 2; Stop 26
acagactctacttttagacgaataa

SEQ ID NO: 257824 - DNA, 25 bp, Artificial
  probe
  misc_feature (1)..(25): SEQ ID NO: 186; WAN0249NA; Start 1; Stop 25
aacagactctacttttagacgaata

SEQ ID NO: 257825 - DNA, 25 bp, Artificial
  probe
  misc_feature (1)..(25): SEQ ID NO: 187; WAN024A4U; Start 13; Stop 37
ggcttcccactttcttcatttctag

SEQ ID NO: 257826 - DNA, 25 bp, Artificial
  probe
  misc_feature (1)..(25): SEQ ID NO: 187; WAN024A4U; Start 14; Stop 38
gcttcccactttcttcatttctaga

SEQ ID NO: 257827 - DNA, 25 bp, Artificial
  probe
  misc_feature (1)..(25): SEQ ID NO: 187; WAN024A4U; Start 12; Stop 36
gggcttcccactttcttcatttcta

SEQ ID NO: 257828 - DNA, 25 bp, Artificial
  probe
  misc_feature (1)..(25): SEQ ID NO: 187; WAN024A4U; Start 11; Stop 35
ggggcttcccactttcttcatttct

SEQ ID NO: 257829 - DNA, 25 bp, Artificial
  probe
  misc_feature (1)..(25): SEQ ID NO: 188; WAN0249QB; Start 113; Stop 137
ttggtttctgttgagtatgtctgtt

SEQ ID NO: 257830 - DNA, 25 bp, Artificial
  probe
  misc_feature (1)..(25): SEQ ID NO: 188; WAN0249QB; Start 112; Stop 136
tttggtttctgttgagtatgtctgt

SEQ ID NO: 257831 - DNA, 25 bp, Artificial
  probe
  misc_feature (1)..(25): SEQ ID NO: 188; WAN0249QB; Start 525; Stop 549
cgatttgttctgttcttgtttcatt

SEQ ID NO: 257832 - DNA, 25 bp, Artificial
  probe
  misc_feature (1)..(25): SEQ ID NO: 188; WAN0249QB; Start 114; Stop 138
tggtttctgttgagtatgtctgttc

SEQ ID NO: 257833 - DNA, 25 bp, Artificial
  probe
  misc_feature (1)..(25): SEQ ID NO: 188; WAN0249QB; Start 574; Stop 598
ttctataatgaagttagccacccag

SEQ ID NO: 257834 - DNA, 25 bp, Artificial
  probe
  misc_feature (1)..(25): SEQ ID NO: 188; WAN0249QB; Start 572; Stop 596
agttctataatgaagttagccaccc

SEQ ID NO: 257835 - DNA, 25 bp, Artificial
  probe
  misc_feature (1)..(25): SEQ ID NO: 188; WAN0249QB; Start 573; Stop 597
gttctataatgaagttagccaccca

SEQ ID NO: 257836 - DNA, 25 bp, Artificial
  probe
  misc_feature (1)..(25): SEQ ID NO: 188; WAN0249QB; Start 37; Stop 61
aactaaggaactaaaggttgactca

SEQ ID NO: 257837 - DNA, 25 bp, Artificial
  probe
  misc_feature (1)..(25): SEQ ID NO: 188; WAN0249QB; Start 38; Stop 62
actaaggaactaaaggttgactcat

SEQ ID NO: 257838 - DNA, 25 bp, Artificial
  probe
  misc_feature (1)..(25): SEQ ID NO: 188; WAN0249QB; Start 128; Stop 152
tatgtctgttcccgatgtttcctaa

SEQ ID NO: 257839 - DNA, 25 bp, Artificial
  probe
  misc_feature (1)..(25): SEQ ID NO: 188; WAN0249QB; Start 116; Stop 140
gtttctgttgagtatgtctgttccc

SEQ ID NO: 257840 - DNA, 25 bp, Artificial
  probe
  misc_feature (1)..(25): SEQ ID NO: 188; WAN0249QB; Start 115; Stop 139
ggtttctgttgagtatgtctgttcc

SEQ ID NO: 257841 - DNA, 25 bp, Artificial
  probe
  misc_feature (1)..(25): SEQ ID NO: 188; WAN0249QB; Start 275; Stop 299
ttaaccctatcaataatgtggcttt

SEQ ID NO: 257842 - DNA, 25 bp, Artificial
  probe
  misc_feature (1)..(25): SEQ ID NO: 188; WAN0249QB; Start 274; Stop 298
tttaaccctatcaataatgtggctt

SEQ ID NO: 257843 - DNA, 25 bp, Artificial
  probe
  misc_feature (1)..(25): SEQ ID NO: 188; WAN0249QB; Start 36; Stop 60
aaactaaggaactaaaggttgactc

SEQ ID NO: 257844 - DNA, 25 bp, Artificial
  probe
  misc_feature (1)..(25): SEQ ID NO: 188; WAN0249QB; Start 139; Stop 163
ccgatgtttcctaactctctagtag

SEQ ID NO: 257845 - DNA, 25 bp, Artificial
  probe
  misc_feature (1)..(25): SEQ ID NO: 188; WAN0249QB; Start 140; Stop 164
cgatgtttcctaactctctagtagc

SEQ ID NO: 257846 - DNA, 25 bp, Artificial
  probe
  misc_feature (1)..(25): SEQ ID NO: 188; WAN0249QB; Start 135; Stop 159
gttcccgatgtttcctaactctcta

SEQ ID NO: 257847 - DNA, 25 bp, Artificial
  probe
  misc_feature (1)..(25): SEQ ID NO: 188; WAN0249QB; Start 141; Stop 165
gatgtttcctaactctctagtagca

SEQ ID NO: 257848 - DNA, 25 bp, Artificial
  probe
  misc_feature (1)..(25): SEQ ID NO: 188; WAN0249QB; Start 138; Stop 162
cccgatgtttcctaactctctagta

SEQ ID NO: 257849 - DNA, 25 bp, Artificial
  probe
  misc_feature (1)..(25): SEQ ID NO: 188; WAN0249QB; Start 143; Stop 167
tgtttcctaactctctagtagcaaa

SEQ ID NO: 257850 - DNA, 25 bp, Artificial
  probe
  misc_feature (1)..(25): SEQ ID NO: 188; WAN0249QB; Start 136; Stop 160
ttcccgatgtttcctaactctctag

SEQ ID NO: 257851 - DNA, 25 bp, Artificial
  probe
  misc_feature (1)..(25): SEQ ID NO: 188; WAN0249QB; Start 575; Stop 599
tctataatgaagttagccacccagc

SEQ ID NO: 257852 - DNA, 25 bp, Artificial
  probe
  misc_feature (1)..(25): SEQ ID NO: 188; WAN0249QB; Start 127; Stop 151
gtatgtctgttcccgatgtttccta

SEQ ID NO: 257853 - DNA, 25 bp, Artificial
  probe
  misc_feature (1)..(25): SEQ ID NO: 188; WAN0249QB; Start 142; Stop 166
atgtttcctaactctctagtagcaa

SEQ ID NO: 257854 - DNA, 25 bp, Artificial
  probe
  misc_feature (1)..(25): SEQ ID NO: 188; WAN0249QB; Start 123; Stop 147
ttgagtatgtctgttcccgatgttt

SEQ ID NO: 257855 - DNA, 25 bp, Artificial
  probe
  misc_feature (1)..(25): SEQ ID NO: 188; WAN0249QB; Start 39; Stop 63
ctaaggaactaaaggttgactcatg

SEQ ID NO: 257856 - DNA, 25 bp, Artificial
  probe
  misc_feature (1)..(25): SEQ ID NO: 188; WAN0249QB; Start 173; Stop 197
cgtactttattgatcgtttcacaag

SEQ ID NO: 257857 - DNA, 25 bp, Artificial
  probe
  misc_feature (1)..(25): SEQ ID NO: 188; WAN0249QB; Start 628; Stop 652
ctgatagctcttgtaggcataagaa

SEQ ID NO: 257858 - DNA, 25 bp, Artificial
  probe
  misc_feature (1)..(25): SEQ ID NO: 188; WAN0249QB; Start 124; Stop 148
tgagtatgtctgttcccgatgtttc

SEQ ID NO: 257859 - DNA, 25 bp, Artificial
  probe
  misc_feature (1)..(25): SEQ ID NO: 188; WAN0249QB; Start 524; Stop 548
tcgatttgttctgttcttgtttcat

SEQ ID NO: 257860 - DNA, 25 bp, Artificial
  probe
  misc_feature (1)..(25): SEQ ID NO: 188; WAN0249QB; Start 346; Stop 370
tactcgggtttatatttgctagaaa

SEQ ID NO: 257861 - DNA, 25 bp, Artificial
  probe
  misc_feature (1)..(25): SEQ ID NO: 188; WAN0249QB; Start 345; Stop 369
ttactcgggtttatatttgctagaa

SEQ ID NO: 257862 - DNA, 25 bp, Artificial
  probe
  misc_feature (1)..(25): SEQ ID NO: 189; WAN024AHP; Start 45; Stop 69
ttccattacagtagtctcacttatt

SEQ ID NO: 257863 - DNA, 25 bp, Artificial
  probe
  misc_feature (1)..(25): SEQ ID NO: 189; WAN024AHP; Start 42; Stop 66
ttattccattacagtagtctcactt

SEQ ID NO: 257864 - DNA, 25 bp, Artificial
  probe
  misc_feature (1)..(25): SEQ ID NO: 189; WAN024AHP; Start 58; Stop 82
gtctcacttatttaggctatttcca

SEQ ID NO: 257865 - DNA, 25 bp, Artificial
  probe
  misc_feature (1)..(25): SEQ ID NO: 189; WAN024AHP; Start 44; Stop 68
attccattacagtagtctcacttat

SEQ ID NO: 257866 - DNA, 25 bp, Artificial
  probe
  misc_feature (1)..(25): SEQ ID NO: 189; WAN024AHP; Start 59; Stop 83
tctcacttatttaggctatttccag

SEQ ID NO: 257867 - DNA, 25 bp, Artificial
  probe
  misc_feature (1)..(25): SEQ ID NO: 189; WAN024AHP; Start 52; Stop 76
acagtagtctcacttatttaggcta

SEQ ID NO: 257868 - DNA, 25 bp, Artificial
  probe
  misc_feature (1)..(25): SEQ ID NO: 189; WAN024AHP; Start 51; Stop 75
tacagtagtctcacttatttaggct

SEQ ID NO: 257869 - DNA, 25 bp, Artificial
  probe
  misc_feature (1)..(25): SEQ ID NO: 189; WAN024AHP; Start 60; Stop 84
ctcacttatttaggctatttccagt

SEQ ID NO: 257870 - DNA, 25 bp, Artificial
  probe
  misc_feature (1)..(25): SEQ ID NO: 189; WAN024AHP; Start 57; Stop 81
agtctcacttatttaggctatttcc

SEQ ID NO: 257871 - DNA, 25 bp, Artificial
  probe
  misc_feature (1)..(25): SEQ ID NO: 189; WAN024AHP; Start 50; Stop 74
ttacagtagtctcacttatttaggc

SEQ ID NO: 257872 - DNA, 25 bp, Artificial
  probe
  misc_feature (1)..(25): SEQ ID NO: 189; WAN024AHP; Start 43; Stop 67
tattccattacagtagtctcactta

SEQ ID NO: 257873 - DNA, 25 bp, Artificial
  probe
  misc_feature (1)..(25): SEQ ID NO: 189; WAN024AHP; Start 53; Stop 77
cagtagtctcacttatttaggctat

SEQ ID NO: 257874 - DNA, 25 bp, Artificial
  probe
  misc_feature (1)..(25): SEQ ID NO: 189; WAN024AHP; Start 76; Stop 100
atttccagtagcttctctagtaaga

SEQ ID NO: 257875 - DNA, 25 bp, Artificial
  probe
  misc_feature (1)..(25): SEQ ID NO: 189; WAN024AHP; Start 61; Stop 85
tcacttatttaggctatttccagta

SEQ ID NO: 257876 - DNA, 25 bp, Artificial
  probe
  misc_feature (1)..(25): SEQ ID NO: 189; WAN024AHP; Start 46; Stop 70
tccattacagtagtctcacttattt

SEQ ID NO: 257877 - DNA, 25 bp, Artificial
  probe
  misc_feature (1)..(25): SEQ ID NO: 189; WAN024AHP; Start 41; Stop 65
tttattccattacagtagtctcact

SEQ ID NO: 257878 - DNA, 25 bp, Artificial
  probe
  misc_feature (1)..(25): SEQ ID NO: 189; WAN024AHP; Start 62; Stop 86
cacttatttaggctatttccagtag

SEQ ID NO: 257879 - DNA, 25 bp, Artificial
  probe
  misc_feature (1)..(25): SEQ ID NO: 189; WAN024AHP; Start 54; Stop 78
agtagtctcacttatttaggctatt

SEQ ID NO: 257880 - DNA, 25 bp, Artificial
  probe
  misc_feature (1)..(25): SEQ ID NO: 189; WAN024AHP; Start 89; Stop 113
tctctagtaagaaaaggctggaatt

SEQ ID NO: 257881 - DNA, 25 bp, Artificial
  probe
  misc_feature (1)..(25): SEQ ID NO: 189; WAN024AHP; Start 74; Stop 98
ctatttccagtagcttctctagtaa

SEQ ID NO: 257882 - DNA, 25 bp, Artificial
  probe
  misc_feature (1)..(25): SEQ ID NO: 189; WAN024AHP; Start 90; Stop 114
ctctagtaagaaaaggctggaattt

SEQ ID NO: 257883 - DNA, 25 bp, Artificial
  probe
  misc_feature (1)..(25): SEQ ID NO: 189; WAN024AHP; Start 75; Stop 99
tatttccagtagcttctctagtaag

SEQ ID NO: 257884 - DNA, 25 bp, Artificial
  probe
  misc_feature (1)..(25): SEQ ID NO: 189; WAN024AHP; Start 113; Stop 137
tttatagttccaacctcttttcagt

SEQ ID NO: 257885 - DNA, 25 bp, Artificial
  probe
  misc_feature (1)..(25): SEQ ID NO: 189; WAN024AHP; Start 78; Stop 102
ttccagtagcttctctagtaagaaa

SEQ ID NO: 257886 - DNA, 25 bp, Artificial
  probe
  misc_feature (1)..(25): SEQ ID NO: 189; WAN024AHP; Start 77; Stop 101
tttccagtagcttctctagtaagaa

SEQ ID NO: 257887 - DNA, 25 bp, Artificial
  probe
  misc_feature (1)..(25): SEQ ID NO: 189; WAN024AHP; Start 114; Stop 138
ttatagttccaacctcttttcagtt

SEQ ID NO: 257888 - DNA, 25 bp, Artificial
  probe
  misc_feature (1)..(25): SEQ ID NO: 189; WAN024AHP; Start 55; Stop 79
gtagtctcacttatttaggctattt

SEQ ID NO: 257889 - DNA, 25 bp, Artificial
  probe
  misc_feature (1)..(25): SEQ ID NO: 189; WAN024AHP; Start 112; Stop 136
ttttatagttccaacctcttttcag

SEQ ID NO: 257890 - DNA, 25 bp, Artificial
  probe
  misc_feature (1)..(25): SEQ ID NO: 189; WAN024AHP; Start 56; Stop 80
tagtctcacttatttaggctatttc

SEQ ID NO: 257891 - DNA, 25 bp, Artificial
  probe
  misc_feature (1)..(25): SEQ ID NO: 189; WAN024AHP; Start 47; Stop 71
ccattacagtagtctcacttattta

SEQ ID NO: 257892 - DNA, 25 bp, Artificial
  probe
  misc_feature (1)..(25): SEQ ID NO: 189; WAN024AHP; Start 91; Stop 115
tctagtaagaaaaggctggaatttt

SEQ ID NO: 257893 - DNA, 25 bp, Artificial
  probe
  misc_feature (1)..(25): SEQ ID NO: 189; WAN024AHP; Start 115; Stop 139
tatagttccaacctcttttcagtta

SEQ ID NO: 257894 - DNA, 25 bp, Artificial
  probe
  misc_feature (1)..(25): SEQ ID NO: 189; WAN024AHP; Start 87; Stop 111
cttctctagtaagaaaaggctggaa

SEQ ID NO: 257895 - DNA, 25 bp, Artificial
  probe
  misc_feature (1)..(25): SEQ ID NO: 190; WAN024ACK; Start 2; Stop 26
acatgatttatgaaatgtcagacct

SEQ ID NO: 257896 - DNA, 25 bp, Artificial
  probe
  misc_feature (1)..(25): SEQ ID NO: 190; WAN024ACK; Start 3; Stop 27
catgatttatgaaatgtcagaccta

SEQ ID NO: 257897 - DNA, 25 bp, Artificial
  probe
  misc_feature (1)..(25): SEQ ID NO: 190; WAN024ACK; Start 22; Stop 46
gacctaaaagacattttcgttcaca

SEQ ID NO: 257898 - DNA, 25 bp, Artificial
  probe
  misc_feature (1)..(25): SEQ ID NO: 190; WAN024ACK; Start 21; Stop 45
agacctaaaagacattttcgttcac

SEQ ID NO: 257899 - DNA, 25 bp, Artificial
  probe
  misc_feature (1)..(25): SEQ ID NO: 190; WAN024ACK; Start 20; Stop 44
cagacctaaaagacattttcgttca

SEQ ID NO: 257900 - DNA, 25 bp, Artificial
  probe
  misc_feature (1)..(25): SEQ ID NO: 190; WAN024ACK; Start 18; Stop 42
gtcagacctaaaagacattttcgtt

SEQ ID NO: 257901 - DNA, 25 bp, Artificial
  probe
  misc_feature (1)..(25): SEQ ID NO: 190; WAN024ACK; Start 23; Stop 47
acctaaaagacattttcgttcacaa

SEQ ID NO: 257902 - DNA, 25 bp, Artificial
  probe
  misc_feature (1)..(25): SEQ ID NO: 190; WAN024ACK; Start 19; Stop 43
tcagacctaaaagacattttcgttc

SEQ ID NO: 257903 - DNA, 25 bp, Artificial
  probe
  misc_feature (1)..(25): SEQ ID NO: 190; WAN024ACK; Start 5; Stop 29
tgatttatgaaatgtcagacctaaa

SEQ ID NO: 257904 - DNA, 25 bp, Artificial
  probe
  misc_feature (1)..(25): SEQ ID NO: 190; WAN024ACK; Start 24; Stop 48
cctaaaagacattttcgttcacaaa

SEQ ID NO: 257905 - DNA, 25 bp, Artificial
  probe
  misc_feature (1)..(25): SEQ ID NO: 190; WAN024ACK; Start 1; Stop 25
aacatgatttatgaaatgtcagacc

SEQ ID NO: 257906 - DNA, 25 bp, Artificial
  probe
  misc_feature (1)..(25): SEQ ID NO: 190; WAN024ACK; Start 4; Stop 28
atgatttatgaaatgtcagacctaa

SEQ ID NO: 257907 - DNA, 25 bp, Artificial
  probe
  misc_feature (1)..(25): SEQ ID NO: 190; WAN024ACK; Start 26; Stop 50
taaaagacattttcgttcacaaaag

SEQ ID NO: 257908 - DNA, 25 bp, Artificial
  probe
  misc_feature (1)..(25): SEQ ID NO: 190; WAN024ACK; Start 25; Stop 49
ctaaaagacattttcgttcacaaaa

SEQ ID NO: 257909 - DNA, 25 bp, Artificial
  probe
  misc_feature (1)..(25): SEQ ID NO: 190; WAN024ACK; Start 9; Stop 33
ttatgaaatgtcagacctaaaagac

SEQ ID NO: 257910 - DNA, 25 bp, Artificial
  probe
  misc_feature (1)..(25): SEQ ID NO: 190; WAN024ACK; Start 8; Stop 32
tttatgaaatgtcagacctaaaaga

SEQ ID NO: 257911 - DNA, 25 bp, Artificial
  probe
  misc_feature (1)..(25): SEQ ID NO: 190; WAN024ACK; Start 17; Stop 41
tgtcagacctaaaagacattttcgt

SEQ ID NO: 257912 - DNA, 25 bp, Artificial
  probe
  misc_feature (1)..(25): SEQ ID NO: 190; WAN024ACK; Start 7; Stop 31
atttatgaaatgtcagacctaaaag

SEQ ID NO: 257913 - DNA, 25 bp, Artificial
  probe
  misc_feature (1)..(25): SEQ ID NO: 190; WAN024ACK; Start 6; Stop 30
gatttatgaaatgtcagacctaaaa

SEQ ID NO: 257914 - DNA, 25 bp, Artificial
  probe
  misc_feature (1)..(25): SEQ ID NO: 190; WAN024ACK; Start 10; Stop 34
tatgaaatgtcagacctaaaagaca

SEQ ID NO: 257915 - DNA, 25 bp, Artificial
  probe
  misc_feature (1)..(25): SEQ ID NO: 191; WAN024AWH; Start 549; Stop 573
ctatcctgagtatgacgatgttgag

SEQ ID NO: 257916 - DNA, 25 bp, Artificial
  probe
  misc_feature (1)..(25): SEQ ID NO: 191; WAN024AWH; Start 547; Stop 571
gactatcctgagtatgacgatgttg

SEQ ID NO: 257917 - DNA, 25 bp, Artificial
  probe
  misc_feature (1)..(25): SEQ ID NO: 191; WAN024AWH; Start 548; Stop 572
actatcctgagtatgacgatgttga

SEQ ID NO: 257918 - DNA, 25 bp, Artificial
  probe
  misc_feature (1)..(25): SEQ ID NO: 191; WAN024AWH; Start 743; Stop 767
aggacaaggctatcgtaacagatat

SEQ ID NO: 257919 - DNA, 25 bp, Artificial
  probe
  misc_feature (1)..(25): SEQ ID NO: 191; WAN024AWH; Start 742; Stop 766
gaggacaaggctatcgtaacagata

SEQ ID NO: 257920 - DNA, 25 bp, Artificial
  probe
  misc_feature (1)..(25): SEQ ID NO: 191; WAN024AWH; Start 546; Stop 570
cgactatcctgagtatgacgatgtt

SEQ ID NO: 257921 - DNA, 25 bp, Artificial
  probe
  misc_feature (1)..(25): SEQ ID NO: 191; WAN024AWH; Start 550; Stop 574
tatcctgagtatgacgatgttgagg

SEQ ID NO: 257922 - DNA, 25 bp, Artificial
  probe
  misc_feature (1)..(25): SEQ ID NO: 191; WAN024AWH; Start 713; Stop 737
aatcaagccttctcaacaacctctt

SEQ ID NO: 257923 - DNA, 25 bp, Artificial
  probe
  misc_feature (1)..(25): SEQ ID NO: 191; WAN024AWH; Start 541; Stop 565
aatatcgactatcctgagtatgacg

SEQ ID NO: 257924 - DNA, 25 bp, Artificial
  probe
  misc_feature (1)..(25): SEQ ID NO: 191; WAN024AWH; Start 474; Stop 498
ctccctttctgacctcattaacaat

SEQ ID NO: 257925 - DNA, 25 bp, Artificial
  probe
  misc_feature (1)..(25): SEQ ID NO: 191; WAN024AWH; Start 477; Stop 501
cctttctgacctcattaacaatacc

SEQ ID NO: 257926 - DNA, 25 bp, Artificial
  probe
  misc_feature (1)..(25): SEQ ID NO: 191; WAN024AWH; Start 476; Stop 500
ccctttctgacctcattaacaatac

SEQ ID NO: 257927 - DNA, 25 bp, Artificial
  probe
  misc_feature (1)..(25): SEQ ID NO: 191; WAN024AWH; Start 475; Stop 499
tccctttctgacctcattaacaata

SEQ ID NO: 257928 - DNA, 25 bp, Artificial
  probe
  misc_feature (1)..(25): SEQ ID NO: 191; WAN024AWH; Start 741; Stop 765
tgaggacaaggctatcgtaacagat

SEQ ID NO: 257929 - DNA, 25 bp, Artificial
  probe
  misc_feature (1)..(25): SEQ ID NO: 191; WAN024AWH; Start 601; Stop 625
aagacaatggagtttgagcaattac

SEQ ID NO: 257930 - DNA, 25 bp, Artificial
  probe
  misc_feature (1)..(25): SEQ ID NO: 191; WAN024AWH; Start 600; Stop 624
gaagacaatggagtttgagcaatta

SEQ ID NO: 257931 - DNA, 25 bp, Artificial
  probe
  misc_feature (1)..(25): SEQ ID NO: 191; WAN024AWH; Start 554; Stop 578
ctgagtatgacgatgttgaggaagc

SEQ ID NO: 257932 - DNA, 25 bp, Artificial
  probe
  misc_feature (1)..(25): SEQ ID NO: 191; WAN024AWH; Start 536; Stop 560
aggtcaatatcgactatcctgagta

SEQ ID NO: 257933 - DNA, 25 bp, Artificial
  probe
  misc_feature (1)..(25): SEQ ID NO: 191; WAN024AWH; Start 537; Stop 561
ggtcaatatcgactatcctgagtat

SEQ ID NO: 257934 - DNA, 25 bp, Artificial
  probe
  misc_feature (1)..(25): SEQ ID NO: 191; WAN024AWH; Start 670; Stop 694
gaaggaatttcaacggctatcattg

SEQ ID NO: 257935 - DNA, 25 bp, Artificial
  probe
  misc_feature (1)..(25): SEQ ID NO: 191; WAN024AWH; Start 606; Stop 630
aatggagtttgagcaattactaacc

SEQ ID NO: 257936 - DNA, 25 bp, Artificial
  probe
  misc_feature (1)..(25): SEQ ID NO: 191; WAN024AWH; Start 602; Stop 626
agacaatggagtttgagcaattact

SEQ ID NO: 257937 - DNA, 25 bp, Artificial
  probe
  misc_feature (1)..(25): SEQ ID NO: 191; WAN024AWH; Start 603; Stop 627
gacaatggagtttgagcaattacta

SEQ ID NO: 257938 - DNA, 25 bp, Artificial
  probe
  misc_feature (1)..(25): SEQ ID NO: 191; WAN024AWH; Start 615; Stop 639
tgagcaattactaaccaaactcctt

SEQ ID NO: 257939 - DNA, 25 bp, Artificial
  probe
  misc_feature (1)..(25): SEQ ID NO: 191; WAN024AWH; Start 614; Stop 638
ttgagcaattactaaccaaactcct

SEQ ID NO: 257940 - DNA, 25 bp, Artificial
  probe
  misc_feature (1)..(25): SEQ ID NO: 191; WAN024AWH; Start 559; Stop 583
tatgacgatgttgaggaagccacta

SEQ ID NO: 257941 - DNA, 25 bp, Artificial
  probe
  misc_feature (1)..(25): SEQ ID NO: 191; WAN024AWH; Start 599; Stop 623
agaagacaatggagtttgagcaatt

SEQ ID NO: 257942 - DNA, 25 bp, Artificial
  probe
  misc_feature (1)..(25): SEQ ID NO: 191; WAN024AWH; Start 540; Stop 564
caatatcgactatcctgagtatgac

SEQ ID NO: 257943 - DNA, 25 bp, Artificial
  probe
  misc_feature (1)..(25): SEQ ID NO: 191; WAN024AWH; Start 539; Stop 563
tcaatatcgactatcctgagtatga

SEQ ID NO: 257944 - DNA, 25 bp, Artificial
  probe
  misc_feature (1)..(25): SEQ ID NO: 191; WAN024AWH; Start 535; Stop 559
gaggtcaatatcgactatcctgagt

SEQ ID NO: 257945 - DNA, 25 bp, Artificial
  probe
  misc_feature (1)..(25): SEQ ID NO: 191; WAN024AWH; Start 534; Stop 558
tgaggtcaatatcgactatcctgag

SEQ ID NO: 257946 - DNA, 25 bp, Artificial
  probe
  misc_feature (1)..(25): SEQ ID NO: 191; WAN024AWH; Start 604; Stop 628
acaatggagtttgagcaattactaa

SEQ ID NO: 257947 - DNA, 25 bp, Artificial
  probe
  misc_feature (1)..(25): SEQ ID NO: 191; WAN024AWH; Start 744; Stop 768
ggacaaggctatcgtaacagatatc

SEQ ID NO: 257948 - DNA, 25 bp, Artificial
  probe
  misc_feature (1)..(25): SEQ ID NO: 192; WAN024AS8; Start 9; Stop 33
cctctttatctactcatttctccca

SEQ ID NO: 257949 - DNA, 25 bp, Artificial
  probe
  misc_feature (1)..(25): SEQ ID NO: 192; WAN024AS8; Start 8; Stop 32
acctctttatctactcatttctccc

SEQ ID NO: 257950 - DNA, 25 bp, Artificial
  probe
  misc_feature (1)..(25): SEQ ID NO: 192; WAN024AS8; Start 10; Stop 34
ctctttatctactcatttctcccat

SEQ ID NO: 257951 - DNA, 25 bp, Artificial
  probe
  misc_feature (1)..(25): SEQ ID NO: 192; WAN024AS8; Start 17; Stop 41
tctactcatttctcccattatacag

SEQ ID NO: 257952 - DNA, 25 bp, Artificial
  probe
  misc_feature (1)..(25): SEQ ID NO: 192; WAN024AS8; Start 11; Stop 35
tctttatctactcatttctcccatt

SEQ ID NO: 257953 - DNA, 25 bp, Artificial
  probe
  misc_feature (1)..(25): SEQ ID NO: 192; WAN024AS8; Start 18; Stop 42
ctactcatttctcccattatacaga

SEQ ID NO: 257954 - DNA, 25 bp, Artificial
  probe
  misc_feature (1)..(25): SEQ ID NO: 192; WAN024AS8; Start 7; Stop 31
tacctctttatctactcatttctcc

SEQ ID NO: 257955 - DNA, 25 bp, Artificial
  probe
  misc_feature (1)..(25): SEQ ID NO: 192; WAN024AS8; Start 16; Stop 40
atctactcatttctcccattataca

SEQ ID NO: 257956 - DNA, 25 bp, Artificial
  probe
  misc_feature (1)..(25): SEQ ID NO: 192; WAN024AS8; Start 12; Stop 36
ctttatctactcatttctcccatta

SEQ ID NO: 257957 - DNA, 25 bp, Artificial
  probe
  misc_feature (1)..(25): SEQ ID NO: 192; WAN024AS8; Start 19; Stop 43
tactcatttctcccattatacagaa

SEQ ID NO: 257958 - DNA, 25 bp, Artificial
  probe
  misc_feature (1)..(25): SEQ ID NO: 192; WAN024AS8; Start 6; Stop 30
ttacctctttatctactcatttctc

SEQ ID NO: 257959 - DNA, 25 bp, Artificial
  probe
  misc_feature (1)..(25): SEQ ID NO: 192; WAN024AS8; Start 2; Stop 26
acatttacctctttatctactcatt

SEQ ID NO: 257960 - DNA, 25 bp, Artificial
  probe
  misc_feature (1)..(25): SEQ ID NO: 192; WAN024AS8; Start 1; Stop 25
aacatttacctctttatctactcat

SEQ ID NO: 257961 - DNA, 25 bp, Artificial
  probe
  misc_feature (1)..(25): SEQ ID NO: 192; WAN024AS8; Start 15; Stop 39
tatctactcatttctcccattatac

SEQ ID NO: 257962 - DNA, 25 bp, Artificial
  probe
  misc_feature (1)..(25): SEQ ID NO: 192; WAN024AS8; Start 13; Stop 37
tttatctactcatttctcccattat

SEQ ID NO: 257963 - DNA, 25 bp, Artificial
  probe
  misc_feature (1)..(25): SEQ ID NO: 192; WAN024AS8; Start 5; Stop 29
tttacctctttatctactcatttct

SEQ ID NO: 257964 - DNA, 25 bp, Artificial
  probe
  misc_feature (1)..(25): SEQ ID NO: 192; WAN024AS8; Start 20; Stop 44
actcatttctcccattatacagaaa

SEQ ID NO: 257965 - DNA, 25 bp, Artificial
  probe
  misc_feature (1)..(25): SEQ ID NO: 192; WAN024AS8; Start 21; Stop 45
ctcatttctcccattatacagaaaa

SEQ ID NO: 257966 - DNA, 25 bp, Artificial
  probe
  misc_feature (1)..(25): SEQ ID NO: 193; WAN024AA7; Start 121; Stop 145
gctaattggaattgcgttactaagt

SEQ ID NO: 257967 - DNA, 25 bp, Artificial
  probe
  misc_feature (1)..(25): SEQ ID NO: 193; WAN024AA7; Start 120; Stop 144
tgctaattggaattgcgttactaag

SEQ ID NO: 257968 - DNA, 25 bp, Artificial
  probe
  misc_feature (1)..(25): SEQ ID NO: 193; WAN024AA7; Start 111; Stop 135
taggtgtattgctaattggaattgc

SEQ ID NO: 257969 - DNA, 25 bp, Artificial
  probe
  misc_feature (1)..(25): SEQ ID NO: 193; WAN024AA7; Start 119; Stop 143
ttgctaattggaattgcgttactaa

SEQ ID NO: 257970 - DNA, 25 bp, Artificial
  probe
  misc_feature (1)..(25): SEQ ID NO: 193; WAN024AA7; Start 115; Stop 139
tgtattgctaattggaattgcgtta

SEQ ID NO: 257971 - DNA, 25 bp, Artificial
  probe
  misc_feature (1)..(25): SEQ ID NO: 193; WAN024AA7; Start 118; Stop 142
attgctaattggaattgcgttacta

SEQ ID NO: 257972 - DNA, 25 bp, Artificial
  probe
  misc_feature (1)..(25): SEQ ID NO: 193; WAN024AA7; Start 117; Stop 141
tattgctaattggaattgcgttact

SEQ ID NO: 257973 - DNA, 25 bp, Artificial
  probe
  misc_feature (1)..(25): SEQ ID NO: 193; WAN024AA7; Start 116; Stop 140
gtattgctaattggaattgcgttac

SEQ ID NO: 257974 - DNA, 25 bp, Artificial
  probe
  misc_feature (1)..(25): SEQ ID NO: 193; WAN024AA7; Start 114; Stop 138
gtgtattgctaattggaattgcgtt

SEQ ID NO: 257975 - DNA, 25 bp, Artificial
  probe
  misc_feature (1)..(25): SEQ ID NO: 193; WAN024AA7; Start 123; Stop 147
taattggaattgcgttactaagtca

SEQ ID NO: 257976 - DNA, 25 bp, Artificial
  probe
  misc_feature (1)..(25): SEQ ID NO: 193; WAN024AA7; Start 124; Stop 148
aattggaattgcgttactaagtcaa

SEQ ID NO: 257977 - DNA, 25 bp, Artificial
  probe
  misc_feature (1)..(25): SEQ ID NO: 193; WAN024AA7; Start 122; Stop 146
ctaattggaattgcgttactaagtc

SEQ ID NO: 257978 - DNA, 25 bp, Artificial
  probe
  misc_feature (1)..(25): SEQ ID NO: 193; WAN024AA7; Start 167; Stop 191
tagtattagtgagttcgcaatcatt

SEQ ID NO: 257979 - DNA, 25 bp, Artificial
  probe
  misc_feature (1)..(25): SEQ ID NO: 193; WAN024AA7; Start 165; Stop 189
aatagtattagtgagttcgcaatca

SEQ ID NO: 257980 - DNA, 25 bp, Artificial
  probe
  misc_feature (1)..(25): SEQ ID NO: 193; WAN024AA7; Start 112; Stop 136
aggtgtattgctaattggaattgcg

SEQ ID NO: 257981 - DNA, 25 bp, Artificial
  probe
  misc_feature (1)..(25): SEQ ID NO: 193; WAN024AA7; Start 166; Stop 190
atagtattagtgagttcgcaatcat

SEQ ID NO: 257982 - DNA, 25 bp, Artificial
  probe
  misc_feature (1)..(25): SEQ ID NO: 193; WAN024AA7; Start 113; Stop 137
ggtgtattgctaattggaattgcgt

SEQ ID NO: 257983 - DNA, 25 bp, Artificial
  probe
  misc_feature (1)..(25): SEQ ID NO: 193; WAN024AA7; Start 110; Stop 134
ttaggtgtattgctaattggaattg

SEQ ID NO: 257984 - DNA, 25 bp, Artificial
  probe
  misc_feature (1)..(25): SEQ ID NO: 193; WAN024AA7; Start 125; Stop 149
attggaattgcgttactaagtcaaa

SEQ ID NO: 257985 - DNA, 25 bp, Artificial
  probe
  misc_feature (1)..(25): SEQ ID NO: 193; WAN024AA7; Start 195; Stop 219
tgctagtggtttagaactgttaagt

SEQ ID NO: 257986 - DNA, 25 bp, Artificial
  probe
  misc_feature (1)..(25): SEQ ID NO: 193; WAN024AA7; Start 168; Stop 192
agtattagtgagttcgcaatcattt

SEQ ID NO: 257987 - DNA, 25 bp, Artificial
  probe
  misc_feature (1)..(25): SEQ ID NO: 193; WAN024AA7; Start 43; Stop 67
agtcagtatgtatcttattccactt

SEQ ID NO: 257988 - DNA, 25 bp, Artificial
  probe
  misc_feature (1)..(25): SEQ ID NO: 193; WAN024AA7; Start 162; Stop 186
tgaaatagtattagtgagttcgcaa

SEQ ID NO: 257989 - DNA, 25 bp, Artificial
  probe
  misc_feature (1)..(25): SEQ ID NO: 193; WAN024AA7; Start 161; Stop 185
ttgaaatagtattagtgagttcgca

SEQ ID NO: 257990 - DNA, 25 bp, Artificial
  probe
  misc_feature (1)..(25): SEQ ID NO: 193; WAN024AA7; Start 194; Stop 218
ttgctagtggtttagaactgttaag

SEQ ID NO: 257991 - DNA, 25 bp, Artificial
  probe
  misc_feature (1)..(25): SEQ ID NO: 193; WAN024AA7; Start 193; Stop 217
attgctagtggtttagaactgttaa

SEQ ID NO: 257992 - DNA, 25 bp, Artificial
  probe
  misc_feature (1)..(25): SEQ ID NO: 193; WAN024AA7; Start 191; Stop 215
ttattgctagtggtttagaactgtt

SEQ ID NO: 257993 - DNA, 25 bp, Artificial
  probe
  misc_feature (1)..(25): SEQ ID NO: 193; WAN024AA7; Start 190; Stop 214
tttattgctagtggtttagaactgt

SEQ ID NO: 257994 - DNA, 25 bp, Artificial
  probe
  misc_feature (1)..(25): SEQ ID NO: 193; WAN024AA7; Start 160; Stop 184
tttgaaatagtattagtgagttcgc

SEQ ID NO: 257995 - DNA, 25 bp, Artificial
  probe
  misc_feature (1)..(25): SEQ ID NO: 193; WAN024AA7; Start 164; Stop 188
aaatagtattagtgagttcgcaatc

SEQ ID NO: 257996 - DNA, 25 bp, Artificial
  probe
  misc_feature (1)..(25): SEQ ID NO: 193; WAN024AA7; Start 169; Stop 193
gtattagtgagttcgcaatcattta

SEQ ID NO: 257997 - DNA, 25 bp, Artificial
  probe
  misc_feature (1)..(25): SEQ ID NO: 193; WAN024AA7; Start 42; Stop 66
tagtcagtatgtatcttattccact

SEQ ID NO: 257998 - DNA, 25 bp, Artificial
  probe
  misc_feature (1)..(25): SEQ ID NO: 193; WAN024AA7; Start 163; Stop 187
gaaatagtattagtgagttcgcaat

SEQ ID NO: 257999 - DNA, 25 bp, Artificial
  probe
  misc_feature (1)..(25): SEQ ID NO: 194; WAN0249TE; Start 2; Stop 26
accagatagcagttcttatagtcaa

SEQ ID NO: 258000 - DNA, 25 bp, Artificial
  probe
  misc_feature (1)..(25): SEQ ID NO: 194; WAN0249TE; Start 1; Stop 25
aaccagatagcagttcttatagtca

SEQ ID NO: 258001 - DNA, 25 bp, Artificial
  probe
  misc_feature (1)..(25): SEQ ID NO: 194; WAN0249TE; Start 76; Stop 100
acagtgttctattccagattcatac

SEQ ID NO: 258002 - DNA, 25 bp, Artificial
  probe
  misc_feature (1)..(25): SEQ ID NO: 194; WAN0249TE; Start 79; Stop 103
gtgttctattccagattcatactca

SEQ ID NO: 258003 - DNA, 25 bp, Artificial
  probe
  misc_feature (1)..(25): SEQ ID NO: 194; WAN0249TE; Start 3; Stop 27
ccagatagcagttcttatagtcaat

SEQ ID NO: 258004 - DNA, 25 bp, Artificial
  probe
  misc_feature (1)..(25): SEQ ID NO: 194; WAN0249TE; Start 77; Stop 101
cagtgttctattccagattcatact

SEQ ID NO: 258005 - DNA, 25 bp, Artificial
  probe
  misc_feature (1)..(25): SEQ ID NO: 194; WAN0249TE; Start 78; Stop 102
agtgttctattccagattcatactc

SEQ ID NO: 258006 - DNA, 25 bp, Artificial
  probe
  misc_feature (1)..(25): SEQ ID NO: 194; WAN0249TE; Start 80; Stop 104
tgttctattccagattcatactcaa

SEQ ID NO: 258007 - DNA, 25 bp, Artificial
  probe
  misc_feature (1)..(25): SEQ ID NO: 194; WAN0249TE; Start 73; Stop 97
ttaacagtgttctattccagattca

SEQ ID NO: 258008 - DNA, 25 bp, Artificial
  probe
  misc_feature (1)..(25): SEQ ID NO: 194; WAN0249TE; Start 303; Stop 327
ctttacatttcaaggttcgggataa

SEQ ID NO: 258009 - DNA, 25 bp, Artificial
  probe
  misc_feature (1)..(25): SEQ ID NO: 194; WAN0249TE; Start 75; Stop 99
aacagtgttctattccagattcata

SEQ ID NO: 258010 - DNA, 25 bp, Artificial
  probe
  misc_feature (1)..(25): SEQ ID NO: 194; WAN0249TE; Start 74; Stop 98
taacagtgttctattccagattcat

SEQ ID NO: 258011 - DNA, 25 bp, Artificial
  probe
  misc_feature (1)..(25): SEQ ID NO: 194; WAN0249TE; Start 304; Stop 328
tttacatttcaaggttcgggataaa

SEQ ID NO: 258012 - DNA, 25 bp, Artificial
  probe
  misc_feature (1)..(25): SEQ ID NO: 194; WAN0249TE; Start 291; Stop 315
tagcttcctcacctttacatttcaa

SEQ ID NO: 258013 - DNA, 25 bp, Artificial
  probe
  misc_feature (1)..(25): SEQ ID NO: 194; WAN0249TE; Start 288; Stop 312
ttctagcttcctcacctttacattt

SEQ ID NO: 258014 - DNA, 25 bp, Artificial
  probe
  misc_feature (1)..(25): SEQ ID NO: 194; WAN0249TE; Start 287; Stop 311
tttctagcttcctcacctttacatt

SEQ ID NO: 258015 - DNA, 25 bp, Artificial
  probe
  misc_feature (1)..(25): SEQ ID NO: 194; WAN0249TE; Start 289; Stop 313
tctagcttcctcacctttacatttc

SEQ ID NO: 258016 - DNA, 25 bp, Artificial
  probe
  misc_feature (1)..(25): SEQ ID NO: 194; WAN0249TE; Start 290; Stop 314
ctagcttcctcacctttacatttca

SEQ ID NO: 258017 - DNA, 25 bp, Artificial
  probe
  misc_feature (1)..(25): SEQ ID NO: 194; WAN0249TE; Start 286; Stop 310
gtttctagcttcctcacctttacat

SEQ ID NO: 258018 - DNA, 25 bp, Artificial
  probe
  misc_feature (1)..(25): SEQ ID NO: 194; WAN0249TE; Start 4; Stop 28
cagatagcagttcttatagtcaatt

SEQ ID NO: 258019 - DNA, 25 bp, Artificial
  probe
  misc_feature (1)..(25): SEQ ID NO: 194; WAN0249TE; Start 82; Stop 106
ttctattccagattcatactcaatg

SEQ ID NO: 258020 - DNA, 25 bp, Artificial
  probe
  misc_feature (1)..(25): SEQ ID NO: 194; WAN0249TE; Start 81; Stop 105
gttctattccagattcatactcaat

SEQ ID NO: 258021 - DNA, 25 bp, Artificial
  probe
  misc_feature (1)..(25): SEQ ID NO: 194; WAN0249TE; Start 284; Stop 308
ctgtttctagcttcctcacctttac

SEQ ID NO: 258022 - DNA, 25 bp, Artificial
  probe
  misc_feature (1)..(25): SEQ ID NO: 194; WAN0249TE; Start 36; Stop 60
aatctgaagaaatcgagtaggaaac

SEQ ID NO: 258023 - DNA, 25 bp, Artificial
  probe
  misc_feature (1)..(25): SEQ ID NO: 194; WAN0249TE; Start 292; Stop 316
agcttcctcacctttacatttcaag

SEQ ID NO: 258024 - DNA, 25 bp, Artificial
  probe
  misc_feature (1)..(25): SEQ ID NO: 194; WAN0249TE; Start 37; Stop 61
atctgaagaaatcgagtaggaaact

SEQ ID NO: 258025 - DNA, 25 bp, Artificial
  probe
  misc_feature (1)..(25): SEQ ID NO: 194; WAN0249TE; Start 35; Stop 59
aaatctgaagaaatcgagtaggaaa

SEQ ID NO: 258026 - DNA, 25 bp, Artificial
  probe
  misc_feature (1)..(25): SEQ ID NO: 194; WAN0249TE; Start 285; Stop 309
tgtttctagcttcctcacctttaca

SEQ ID NO: 258027 - DNA, 25 bp, Artificial
  probe
  misc_feature (1)..(25): SEQ ID NO: 194; WAN0249TE; Start 306; Stop 330
tacatttcaaggttcgggataaaag

SEQ ID NO: 258028 - DNA, 25 bp, Artificial
  probe
  misc_feature (1)..(25): SEQ ID NO: 194; WAN0249TE; Start 309; Stop 333
atttcaaggttcgggataaaaggtt

SEQ ID NO: 258029 - DNA, 25 bp, Artificial
  probe
  misc_feature (1)..(25): SEQ ID NO: 194; WAN0249TE; Start 305; Stop 329
ttacatttcaaggttcgggataaaa

SEQ ID NO: 258030 - DNA, 25 bp, Artificial
  probe
  misc_feature (1)..(25): SEQ ID NO: 194; WAN0249TE; Start 83; Stop 107
tctattccagattcatactcaatga

SEQ ID NO: 258031 - DNA, 25 bp, Artificial
  probe
  misc_feature (1)..(25): SEQ ID NO: 194; WAN0249TE; Start 72; Stop 96
tttaacagtgttctattccagattc

SEQ ID NO: 258032 - DNA, 25 bp, Artificial
  probe
  misc_feature (1)..(25): SEQ ID NO: 195; WAN024ALO; Start 18; Stop 42
tataagaggaactacaggtcgtgat

SEQ ID NO: 258033 - DNA, 25 bp, Artificial
  probe
  misc_feature (1)..(25): SEQ ID NO: 195; WAN024ALO; Start 17; Stop 41
ctataagaggaactacaggtcgtga

SEQ ID NO: 258034 - DNA, 25 bp, Artificial
  probe
  misc_feature (1)..(25): SEQ ID NO: 195; WAN024ALO; Start 16; Stop 40
actataagaggaactacaggtcgtg

SEQ ID NO: 258035 - DNA, 25 bp, Artificial
  probe
  misc_feature (1)..(25): SEQ ID NO: 195; WAN024ALO; Start 19; Stop 43
ataagaggaactacaggtcgtgatg

SEQ ID NO: 258036 - DNA, 25 bp, Artificial
  probe
  misc_feature (1)..(25): SEQ ID NO: 195; WAN024ALO; Start 25; Stop 49
ggaactacaggtcgtgatgttatag

SEQ ID NO: 258037 - DNA, 25 bp, Artificial
  probe
  misc_feature (1)..(25): SEQ ID NO: 195; WAN024ALO; Start 24; Stop 48
aggaactacaggtcgtgatgttata

SEQ ID NO: 258038 - DNA, 25 bp, Artificial
  probe
  misc_feature (1)..(25): SEQ ID NO: 195; WAN024ALO; Start 14; Stop 38
agactataagaggaactacaggtcg

SEQ ID NO: 258039 - DNA, 25 bp, Artificial
  probe
  misc_feature (1)..(25): SEQ ID NO: 195; WAN024ALO; Start 26; Stop 50
gaactacaggtcgtgatgttatagc

SEQ ID NO: 258040 - DNA, 25 bp, Artificial
  probe
  misc_feature (1)..(25): SEQ ID NO: 195; WAN024ALO; Start 15; Stop 39
gactataagaggaactacaggtcgt

SEQ ID NO: 258041 - DNA, 25 bp, Artificial
  probe
  misc_feature (1)..(25): SEQ ID NO: 195; WAN024ALO; Start 12; Stop 36
ctagactataagaggaactacaggt

SEQ ID NO: 258042 - DNA, 25 bp, Artificial
  probe
  misc_feature (1)..(25): SEQ ID NO: 195; WAN024ALO; Start 23; Stop 47
gaggaactacaggtcgtgatgttat

SEQ ID NO: 258043 - DNA, 25 bp, Artificial
  probe
  misc_feature (1)..(25): SEQ ID NO: 195; WAN024ALO; Start 11; Stop 35
cctagactataagaggaactacagg

SEQ ID NO: 258044 - DNA, 25 bp, Artificial
  probe
  misc_feature (1)..(25): SEQ ID NO: 195; WAN024ALO; Start 13; Stop 37
tagactataagaggaactacaggtc

SEQ ID NO: 258045 - DNA, 25 bp, Artificial
  probe
  misc_feature (1)..(25): SEQ ID NO: 195; WAN024ALO; Start 29; Stop 53
ctacaggtcgtgatgttatagccaa

SEQ ID NO: 258046 - DNA, 25 bp, Artificial
  probe
  misc_feature (1)..(25): SEQ ID NO: 195; WAN024ALO; Start 27; Stop 51
aactacaggtcgtgatgttatagcc

SEQ ID NO: 258047 - DNA, 25 bp, Artificial
  probe
  misc_feature (1)..(25): SEQ ID NO: 195; WAN024ALO; Start 22; Stop 46
agaggaactacaggtcgtgatgtta

SEQ ID NO: 258048 - DNA, 25 bp, Artificial
  probe
  misc_feature (1)..(25): SEQ ID NO: 195; WAN024ALO; Start 20; Stop 44
taagaggaactacaggtcgtgatgt

SEQ ID NO: 258049 - DNA, 25 bp, Artificial
  probe
  misc_feature (1)..(25): SEQ ID NO: 195; WAN024ALO; Start 28; Stop 52
actacaggtcgtgatgttatagcca

SEQ ID NO: 258050 - DNA, 25 bp, Artificial
  probe
  misc_feature (1)..(25): SEQ ID NO: 195; WAN024ALO; Start 2; Stop 26
acccaatctcctagactataagagg

SEQ ID NO: 258051 - DNA, 25 bp, Artificial
  probe
  misc_feature (1)..(25): SEQ ID NO: 195; WAN024ALO; Start 1; Stop 25
aacccaatctcctagactataagag

SEQ ID NO: 258052 - DNA, 25 bp, Artificial
  probe
  misc_feature (1)..(25): SEQ ID NO: 195; WAN024ALO; Start 30; Stop 54
tacaggtcgtgatgttatagccaaa

SEQ ID NO: 258053 - DNA, 25 bp, Artificial
  probe
  misc_feature (1)..(25): SEQ ID NO: 195; WAN024ALO; Start 21; Stop 45
aagaggaactacaggtcgtgatgtt

SEQ ID NO: 258054 - DNA, 25 bp, Artificial
  probe
  misc_feature (1)..(25): SEQ ID NO: 195; WAN024ALO; Start 176; Stop 200
catgacagggacgaatgtgtttatc

SEQ ID NO: 258055 - DNA, 25 bp, Artificial
  probe
  misc_feature (1)..(25): SEQ ID NO: 195; WAN024ALO; Start 35; Stop 59
gtcgtgatgttatagccaaaattct

SEQ ID NO: 258056 - DNA, 25 bp, Artificial
  probe
  misc_feature (1)..(25): SEQ ID NO: 195; WAN024ALO; Start 34; Stop 58
ggtcgtgatgttatagccaaaattc

SEQ ID NO: 258057 - DNA, 25 bp, Artificial
  probe
  misc_feature (1)..(25): SEQ ID NO: 195; WAN024ALO; Start 33; Stop 57
aggtcgtgatgttatagccaaaatt

SEQ ID NO: 258058 - DNA, 25 bp, Artificial
  probe
  misc_feature (1)..(25): SEQ ID NO: 195; WAN024ALO; Start 283; Stop 307
attagcaaccagttttgacacattt

SEQ ID NO: 258059 - DNA, 25 bp, Artificial
  probe
  misc_feature (1)..(25): SEQ ID NO: 195; WAN024ALO; Start 32; Stop 56
caggtcgtgatgttatagccaaaat

SEQ ID NO: 258060 - DNA, 25 bp, Artificial
  probe
  misc_feature (1)..(25): SEQ ID NO: 195; WAN024ALO; Start 282; Stop 306
cattagcaaccagttttgacacatt

SEQ ID NO: 258061 - DNA, 25 bp, Artificial
  probe
  misc_feature (1)..(25): SEQ ID NO: 195; WAN024ALO; Start 177; Stop 201
atgacagggacgaatgtgtttatcc

SEQ ID NO: 258062 - DNA, 25 bp, Artificial
  probe
  misc_feature (1)..(25): SEQ ID NO: 195; WAN024ALO; Start 36; Stop 60
tcgtgatgttatagccaaaattcta

SEQ ID NO: 258063 - DNA, 25 bp, Artificial
  probe
  misc_feature (1)..(25): SEQ ID NO: 195; WAN024ALO; Start 37; Stop 61
cgtgatgttatagccaaaattctaa

SEQ ID NO: 258064 - DNA, 25 bp, Artificial
  probe
  misc_feature (1)..(25): SEQ ID NO: 195; WAN024ALO; Start 4; Stop 28
ccaatctcctagactataagaggaa

SEQ ID NO: 258065 - DNA, 25 bp, Artificial
  probe
  misc_feature (1)..(25): SEQ ID NO: 196; WAN024AHM; Start 132; Stop 156
gaatcagggctttctaagtgactat

SEQ ID NO: 258066 - DNA, 25 bp, Artificial
  probe
  misc_feature (1)..(25): SEQ ID NO: 196; WAN024AHM; Start 40; Stop 64
tttgtgtgaaatatcagcaggaaag

SEQ ID NO: 258067 - DNA, 25 bp, Artificial
  probe
  misc_feature (1)..(25): SEQ ID NO: 196; WAN024AHM; Start 135; Stop 159
tcagggctttctaagtgactatttc

SEQ ID NO: 258068 - DNA, 25 bp, Artificial
  probe
  misc_feature (1)..(25): SEQ ID NO: 196; WAN024AHM; Start 134; Stop 158
atcagggctttctaagtgactattt

SEQ ID NO: 258069 - DNA, 25 bp, Artificial
  probe
  misc_feature (1)..(25): SEQ ID NO: 196; WAN024AHM; Start 133; Stop 157
aatcagggctttctaagtgactatt

SEQ ID NO: 258070 - DNA, 25 bp, Artificial
  probe
  misc_feature (1)..(25): SEQ ID NO: 196; WAN024AHM; Start 136; Stop 160
cagggctttctaagtgactatttcc

SEQ ID NO: 258071 - DNA, 25 bp, Artificial
  probe
  misc_feature (1)..(25): SEQ ID NO: 196; WAN024AHM; Start 137; Stop 161
agggctttctaagtgactatttcca

SEQ ID NO: 258072 - DNA, 25 bp, Artificial
  probe
  misc_feature (1)..(25): SEQ ID NO: 196; WAN024AHM; Start 142; Stop 166
tttctaagtgactatttccaccgaa

SEQ ID NO: 258073 - DNA, 25 bp, Artificial
  probe
  misc_feature (1)..(25): SEQ ID NO: 196; WAN024AHM; Start 141; Stop 165
ctttctaagtgactatttccaccga

SEQ ID NO: 258074 - DNA, 25 bp, Artificial
  probe
  misc_feature (1)..(25): SEQ ID NO: 196; WAN024AHM; Start 47; Stop 71
gaaatatcagcaggaaagcatgaag

SEQ ID NO: 258075 - DNA, 25 bp, Artificial
  probe
  misc_feature (1)..(25): SEQ ID NO: 196; WAN024AHM; Start 43; Stop 67
gtgtgaaatatcagcaggaaagcat

SEQ ID NO: 258076 - DNA, 25 bp, Artificial
  probe
  misc_feature (1)..(25): SEQ ID NO: 196; WAN024AHM; Start 4; Stop 28
ccctttacaaatccagctattcatg

SEQ ID NO: 258077 - DNA, 25 bp, Artificial
  probe
  misc_feature (1)..(25): SEQ ID NO: 196; WAN024AHM; Start 46; Stop 70
tgaaatatcagcaggaaagcatgaa

SEQ ID NO: 258078 - DNA, 25 bp, Artificial
  probe
  misc_feature (1)..(25): SEQ ID NO: 196; WAN024AHM; Start 41; Stop 65
ttgtgtgaaatatcagcaggaaagc

SEQ ID NO: 258079 - DNA, 25 bp, Artificial
  probe
  misc_feature (1)..(25): SEQ ID NO: 196; WAN024AHM; Start 131; Stop 155
cgaatcagggctttctaagtgacta

SEQ ID NO: 258080 - DNA, 25 bp, Artificial
  probe
  misc_feature (1)..(25): SEQ ID NO: 196; WAN024AHM; Start 139; Stop 163
ggctttctaagtgactatttccacc

SEQ ID NO: 258081 - DNA, 25 bp, Artificial
  probe
  misc_feature (1)..(25): SEQ ID NO: 196; WAN024AHM; Start 138; Stop 162
gggctttctaagtgactatttccac

SEQ ID NO: 258082 - DNA, 25 bp, Artificial
  probe
  misc_feature (1)..(25): SEQ ID NO: 196; WAN024AHM; Start 45; Stop 69
gtgaaatatcagcaggaaagcatga

SEQ ID NO: 258083 - DNA, 25 bp, Artificial
  probe
  misc_feature (1)..(25): SEQ ID NO: 196; WAN024AHM; Start 140; Stop 164
gctttctaagtgactatttccaccg

SEQ ID NO: 258084 - DNA, 25 bp, Artificial
  probe
  misc_feature (1)..(25): SEQ ID NO: 196; WAN024AHM; Start 44; Stop 68
tgtgaaatatcagcaggaaagcatg

SEQ ID NO: 258085 - DNA, 25 bp, Artificial
  probe
  misc_feature (1)..(25): SEQ ID NO: 196; WAN024AHM; Start 143; Stop 167
ttctaagtgactatttccaccgaaa

SEQ ID NO: 258086 - DNA, 25 bp, Artificial
  probe
  misc_feature (1)..(25): SEQ ID NO: 196; WAN024AHM; Start 48; Stop 72
aaatatcagcaggaaagcatgaagc

SEQ ID NO: 258087 - DNA, 25 bp, Artificial
  probe
  misc_feature (1)..(25): SEQ ID NO: 196; WAN024AHM; Start 87; Stop 111
cttatgacaagtaaccttggctgtt

SEQ ID NO: 258088 - DNA, 25 bp, Artificial
  probe
  misc_feature (1)..(25): SEQ ID NO: 196; WAN024AHM; Start 42; Stop 66
tgtgtgaaatatcagcaggaaagca

SEQ ID NO: 258089 - DNA, 25 bp, Artificial
  probe
  misc_feature (1)..(25): SEQ ID NO: 196; WAN024AHM; Start 10; Stop 34
acaaatccagctattcatggtagaa

SEQ ID NO: 258090 - DNA, 25 bp, Artificial
  probe
  misc_feature (1)..(25): SEQ ID NO: 196; WAN024AHM; Start 5; Stop 29
cctttacaaatccagctattcatgg

SEQ ID NO: 258091 - DNA, 25 bp, Artificial
  probe
  misc_feature (1)..(25): SEQ ID NO: 196; WAN024AHM; Start 85; Stop 109
gtcttatgacaagtaaccttggctg

SEQ ID NO: 258092 - DNA, 25 bp, Artificial
  probe
  misc_feature (1)..(25): SEQ ID NO: 196; WAN024AHM; Start 68; Stop 92
gaagctcgtcaacaggtgtcttatg

SEQ ID NO: 258093 - DNA, 25 bp, Artificial
  probe
  misc_feature (1)..(25): SEQ ID NO: 196; WAN024AHM; Start 9; Stop 33
tacaaatccagctattcatggtaga

SEQ ID NO: 258094 - DNA, 25 bp, Artificial
  probe
  misc_feature (1)..(25): SEQ ID NO: 196; WAN024AHM; Start 6; Stop 30
ctttacaaatccagctattcatggt

SEQ ID NO: 258095 - DNA, 25 bp, Artificial
  probe
  misc_feature (1)..(25): SEQ ID NO: 196; WAN024AHM; Start 11; Stop 35
caaatccagctattcatggtagaat

SEQ ID NO: 258096 - DNA, 25 bp, Artificial
  probe
  misc_feature (1)..(25): SEQ ID NO: 196; WAN024AHM; Start 86; Stop 110
tcttatgacaagtaaccttggctgt

SEQ ID NO: 258097 - DNA, 25 bp, Artificial
  probe
  misc_feature (1)..(25): SEQ ID NO: 196; WAN024AHM; Start 8; Stop 32
ttacaaatccagctattcatggtag

SEQ ID NO: 258098 - DNA, 25 bp, Artificial
  probe
  misc_feature (1)..(25): SEQ ID NO: 197; WAN0249KN; Start 12; Stop 36
ttgcacgagaatgagagaattataa

SEQ ID NO: 258099 - DNA, 25 bp, Artificial
  probe
  misc_feature (1)..(25): SEQ ID NO: 197; WAN0249KN; Start 13; Stop 37
tgcacgagaatgagagaattataat

SEQ ID NO: 258100 - DNA, 25 bp, Artificial
  probe
  misc_feature (1)..(25): SEQ ID NO: 197; WAN0249KN; Start 11; Stop 35
tttgcacgagaatgagagaattata

SEQ ID NO: 258101 - DNA, 25 bp, Artificial
  probe
  misc_feature (1)..(25): SEQ ID NO: 197; WAN0249KN; Start 6; Stop 30
gatattttgcacgagaatgagagaa

SEQ ID NO: 258102 - DNA, 25 bp, Artificial
  probe
  misc_feature (1)..(25): SEQ ID NO: 197; WAN0249KN; Start 10; Stop 34
ttttgcacgagaatgagagaattat

SEQ ID NO: 258103 - DNA, 25 bp, Artificial
  probe
  misc_feature (1)..(25): SEQ ID NO: 197; WAN0249KN; Start 9; Stop 33
attttgcacgagaatgagagaatta

SEQ ID NO: 258104 - DNA, 25 bp, Artificial
  probe
  misc_feature (1)..(25): SEQ ID NO: 197; WAN0249KN; Start 8; Stop 32
tattttgcacgagaatgagagaatt

SEQ ID NO: 258105 - DNA, 25 bp, Artificial
  probe
  misc_feature (1)..(25): SEQ ID NO: 197; WAN0249KN; Start 7; Stop 31
atattttgcacgagaatgagagaat

SEQ ID NO: 258106 - DNA, 25 bp, Artificial
  probe
  misc_feature (1)..(25): SEQ ID NO: 197; WAN0249KN; Start 5; Stop 29
cgatattttgcacgagaatgagaga

SEQ ID NO: 258107 - DNA, 25 bp, Artificial
  probe
  misc_feature (1)..(25): SEQ ID NO: 197; WAN0249KN; Start 4; Stop 28
ccgatattttgcacgagaatgagag

SEQ ID NO: 258108 - DNA, 25 bp, Artificial
  probe
  misc_feature (1)..(25): SEQ ID NO: 197; WAN0249KN; Start 1; Stop 25
aacccgatattttgcacgagaatga

SEQ ID NO: 258109 - DNA, 25 bp, Artificial
  probe
  misc_feature (1)..(25): SEQ ID NO: 197; WAN0249KN; Start 3; Stop 27
cccgatattttgcacgagaatgaga

SEQ ID NO: 258110 - DNA, 25 bp, Artificial
  probe
  misc_feature (1)..(25): SEQ ID NO: 197; WAN0249KN; Start 2; Stop 26
acccgatattttgcacgagaatgag

SEQ ID NO: 258111 - DNA, 25 bp, Artificial
  probe
  misc_feature (1)..(25): SEQ ID NO: 198; WAN0249XZ; Start 50; Stop 74
acaaatctcaaacacttagtccttt

SEQ ID NO: 258112 - DNA, 25 bp, Artificial
  probe
  misc_feature (1)..(25): SEQ ID NO: 198; WAN0249XZ; Start 1; Stop 25
aaccctctcctaactgtactctttc

SEQ ID NO: 258113 - DNA, 25 bp, Artificial
  probe
  misc_feature (1)..(25): SEQ ID NO: 198; WAN0249XZ; Start 48; Stop 72
agacaaatctcaaacacttagtcct

SEQ ID NO: 258114 - DNA, 25 bp, Artificial
  probe
  misc_feature (1)..(25): SEQ ID NO: 198; WAN0249XZ; Start 45; Stop 69
tgaagacaaatctcaaacacttagt

SEQ ID NO: 258115 - DNA, 25 bp, Artificial
  probe
  misc_feature (1)..(25): SEQ ID NO: 198; WAN0249XZ; Start 49; Stop 73
gacaaatctcaaacacttagtcctt

SEQ ID NO: 258116 - DNA, 25 bp, Artificial
  probe
  misc_feature (1)..(25): SEQ ID NO: 198; WAN0249XZ; Start 47; Stop 71
aagacaaatctcaaacacttagtcc

SEQ ID NO: 258117 - DNA, 25 bp, Artificial
  probe
  misc_feature (1)..(25): SEQ ID NO: 198; WAN0249XZ; Start 13; Stop 37
actgtactctttcaggaataattgc

SEQ ID NO: 258118 - DNA, 25 bp, Artificial
  probe
  misc_feature (1)..(25): SEQ ID NO: 198; WAN0249XZ; Start 2; Stop 26
accctctcctaactgtactctttca

SEQ ID NO: 258119 - DNA, 25 bp, Artificial
  probe
  misc_feature (1)..(25): SEQ ID NO: 198; WAN0249XZ; Start 46; Stop 70
gaagacaaatctcaaacacttagtc

SEQ ID NO: 258120 - DNA, 25 bp, Artificial
  probe
  misc_feature (1)..(25): SEQ ID NO: 198; WAN0249XZ; Start 3; Stop 27
ccctctcctaactgtactctttcag

SEQ ID NO: 258121 - DNA, 25 bp, Artificial
  probe
  misc_feature (1)..(25): SEQ ID NO: 198; WAN0249XZ; Start 4; Stop 28
cctctcctaactgtactctttcagg

SEQ ID NO: 258122 - DNA, 25 bp, Artificial
  probe
  misc_feature (1)..(25): SEQ ID NO: 198; WAN0249XZ; Start 15; Stop 39
tgtactctttcaggaataattgcat

SEQ ID NO: 258123 - DNA, 25 bp, Artificial
  probe
  misc_feature (1)..(25): SEQ ID NO: 198; WAN0249XZ; Start 9; Stop 33
cctaactgtactctttcaggaataa

SEQ ID NO: 258124 - DNA, 25 bp, Artificial
  probe
  misc_feature (1)..(25): SEQ ID NO: 198; WAN0249XZ; Start 14; Stop 38
ctgtactctttcaggaataattgca

SEQ ID NO: 258125 - DNA, 25 bp, Artificial
  probe
  misc_feature (1)..(25): SEQ ID NO: 198; WAN0249XZ; Start 12; Stop 36
aactgtactctttcaggaataattg

SEQ ID NO: 258126 - DNA, 25 bp, Artificial
  probe
  misc_feature (1)..(25): SEQ ID NO: 198; WAN0249XZ; Start 141; Stop 165
atatcctagtgtagagaaaacagcc

SEQ ID NO: 258127 - DNA, 25 bp, Artificial
  probe
  misc_feature (1)..(25): SEQ ID NO: 198; WAN0249XZ; Start 51; Stop 75
caaatctcaaacacttagtcctttt

SEQ ID NO: 258128 - DNA, 25 bp, Artificial
  probe
  misc_feature (1)..(25): SEQ ID NO: 198; WAN0249XZ; Start 19; Stop 43
ctctttcaggaataattgcatatgt

SEQ ID NO: 258129 - DNA, 25 bp, Artificial
  probe
  misc_feature (1)..(25): SEQ ID NO: 198; WAN0249XZ; Start 18; Stop 42
actctttcaggaataattgcatatg

SEQ ID NO: 258130 - DNA, 25 bp, Artificial
  probe
  misc_feature (1)..(25): SEQ ID NO: 198; WAN0249XZ; Start 142; Stop 166
tatcctagtgtagagaaaacagccc

SEQ ID NO: 258131 - DNA, 25 bp, Artificial
  probe
  misc_feature (1)..(25): SEQ ID NO: 198; WAN0249XZ; Start 16; Stop 40
gtactctttcaggaataattgcata

SEQ ID NO: 258132 - DNA, 25 bp, Artificial
  probe
  misc_feature (1)..(25): SEQ ID NO: 198; WAN0249XZ; Start 44; Stop 68
ttgaagacaaatctcaaacacttag

SEQ ID NO: 258133 - DNA, 25 bp, Artificial
  probe
  misc_feature (1)..(25): SEQ ID NO: 198; WAN0249XZ; Start 27; Stop 51
ggaataattgcatatgtttgaagac

SEQ ID NO: 258134 - DNA, 25 bp, Artificial
  probe
  misc_feature (1)..(25): SEQ ID NO: 198; WAN0249XZ; Start 25; Stop 49
caggaataattgcatatgtttgaag

SEQ ID NO: 258135 - DNA, 25 bp, Artificial
  probe
  misc_feature (1)..(25): SEQ ID NO: 198; WAN0249XZ; Start 26; Stop 50
aggaataattgcatatgtttgaaga

SEQ ID NO: 258136 - DNA, 25 bp, Artificial
  probe
  misc_feature (1)..(25): SEQ ID NO: 198; WAN0249XZ; Start 24; Stop 48
tcaggaataattgcatatgtttgaa

SEQ ID NO: 258137 - DNA, 25 bp, Artificial
  probe
  misc_feature (1)..(25): SEQ ID NO: 198; WAN0249XZ; Start 23; Stop 47
ttcaggaataattgcatatgtttga

SEQ ID NO: 258138 - DNA, 25 bp, Artificial
  probe
  misc_feature (1)..(25): SEQ ID NO: 198; WAN0249XZ; Start 20; Stop 44
tctttcaggaataattgcatatgtt

SEQ ID NO: 258139 - DNA, 25 bp, Artificial
  probe
  misc_feature (1)..(25): SEQ ID NO: 198; WAN0249XZ; Start 144; Stop 168
tcctagtgtagagaaaacagcccta

SEQ ID NO: 258140 - DNA, 25 bp, Artificial
  probe
  misc_feature (1)..(25): SEQ ID NO: 198; WAN0249XZ; Start 35; Stop 59
tgcatatgtttgaagacaaatctca

SEQ ID NO: 258141 - DNA, 25 bp, Artificial
  probe
  misc_feature (1)..(25): SEQ ID NO: 198; WAN0249XZ; Start 22; Stop 46
tttcaggaataattgcatatgtttg

SEQ ID NO: 258142 - DNA, 25 bp, Artificial
  probe
  misc_feature (1)..(25): SEQ ID NO: 198; WAN0249XZ; Start 10; Stop 34
ctaactgtactctttcaggaataat

SEQ ID NO: 258143 - DNA, 25 bp, Artificial
  probe
  misc_feature (1)..(25): SEQ ID NO: 198; WAN0249XZ; Start 34; Stop 58
ttgcatatgtttgaagacaaatctc

SEQ ID NO: 258144 - DNA, 25 bp, Artificial
  probe
  misc_feature (1)..(25): SEQ ID NO: 199; WAN024A87; Start 3; Stop 27
cgaagatagattagactggaaggtt

SEQ ID NO: 258145 - DNA, 25 bp, Artificial
  probe
  misc_feature (1)..(25): SEQ ID NO: 199; WAN024A87; Start 1; Stop 25
aacgaagatagattagactggaagg

SEQ ID NO: 258146 - DNA, 25 bp, Artificial
  probe
  misc_feature (1)..(25): SEQ ID NO: 199; WAN024A87; Start 2; Stop 26
acgaagatagattagactggaaggt

SEQ ID NO: 258147 - DNA, 25 bp, Artificial
  probe
  misc_feature (1)..(25): SEQ ID NO: 199; WAN024A87; Start 4; Stop 28
gaagatagattagactggaaggtta

SEQ ID NO: 258148 - DNA, 25 bp, Artificial
  probe
  misc_feature (1)..(25): SEQ ID NO: 199; WAN024A87; Start 6; Stop 30
agatagattagactggaaggttatt

SEQ ID NO: 258149 - DNA, 25 bp, Artificial
  probe
  misc_feature (1)..(25): SEQ ID NO: 199; WAN024A87; Start 5; Stop 29
aagatagattagactggaaggttat

SEQ ID NO: 258150 - DNA, 25 bp, Artificial
  probe
  misc_feature (1)..(25): SEQ ID NO: 199; WAN024A87; Start 21; Stop 45
gaaggttatttccagtttctatcat

SEQ ID NO: 258151 - DNA, 25 bp, Artificial
  probe
  misc_feature (1)..(25): SEQ ID NO: 199; WAN024A87; Start 7; Stop 31
gatagattagactggaaggttattt

SEQ ID NO: 258152 - DNA, 25 bp, Artificial
  probe
  misc_feature (1)..(25): SEQ ID NO: 199; WAN024A87; Start 8; Stop 32
atagattagactggaaggttatttc

SEQ ID NO: 258153 - DNA, 25 bp, Artificial
  probe
  misc_feature (1)..(25): SEQ ID NO: 199; WAN024A87; Start 22; Stop 46
aaggttatttccagtttctatcata

SEQ ID NO: 258154 - DNA, 25 bp, Artificial
  probe
  misc_feature (1)..(25): SEQ ID NO: 199; WAN024A87; Start 23; Stop 47
aggttatttccagtttctatcatat

SEQ ID NO: 258155 - DNA, 25 bp, Artificial
  probe
  misc_feature (1)..(25): SEQ ID NO: 199; WAN024A87; Start 20; Stop 44
ggaaggttatttccagtttctatca

SEQ ID NO: 258156 - DNA, 25 bp, Artificial
  probe
  misc_feature (1)..(25): SEQ ID NO: 199; WAN024A87; Start 9; Stop 33
tagattagactggaaggttatttcc

SEQ ID NO: 258157 - DNA, 25 bp, Artificial
  probe
  misc_feature (1)..(25): SEQ ID NO: 200; WAN0249JB; Start 3; Stop 27
cgcctccatcttatccattataaca

SEQ ID NO: 258158 - DNA, 25 bp, Artificial
  probe
  misc_feature (1)..(25): SEQ ID NO: 200; WAN0249JB; Start 2; Stop 26
acgcctccatcttatccattataac

SEQ ID NO: 258159 - DNA, 25 bp, Artificial
  probe
  misc_feature (1)..(25): SEQ ID NO: 200; WAN0249JB; Start 1; Stop 25
aacgcctccatcttatccattataa

SEQ ID NO: 258160 - DNA, 25 bp, Artificial
  probe
  misc_feature (1)..(25): SEQ ID NO: 200; WAN0249JB; Start 4; Stop 28
gcctccatcttatccattataacaa

SEQ ID NO: 258161 - DNA, 25 bp, Artificial
  probe
  misc_feature (1)..(25): SEQ ID NO: 200; WAN0249JB; Start 15; Stop 39
atccattataacaagaaagctaggc

SEQ ID NO: 258162 - DNA, 25 bp, Artificial
  probe
  misc_feature (1)..(25): SEQ ID NO: 200; WAN0249JB; Start 5; Stop 29
cctccatcttatccattataacaag

SEQ ID NO: 258163 - DNA, 25 bp, Artificial
  probe
  misc_feature (1)..(25): SEQ ID NO: 200; WAN0249JB; Start 16; Stop 40
tccattataacaagaaagctaggct

SEQ ID NO: 258164 - DNA, 25 bp, Artificial
  probe
  misc_feature (1)..(25): SEQ ID NO: 200; WAN0249JB; Start 14; Stop 38
tatccattataacaagaaagctagg

SEQ ID NO: 258165 - DNA, 25 bp, Artificial
  probe
  misc_feature (1)..(25): SEQ ID NO: 200; WAN0249JB; Start 6; Stop 30
ctccatcttatccattataacaaga

SEQ ID NO: 258166 - DNA, 25 bp, Artificial
  probe
  misc_feature (1)..(25): SEQ ID NO: 200; WAN0249JB; Start 7; Stop 31
tccatcttatccattataacaagaa

SEQ ID NO: 258167 - DNA, 25 bp, Artificial
  probe
  misc_feature (1)..(25): SEQ ID NO: 200; WAN0249JB; Start 17; Stop 41
ccattataacaagaaagctaggctt

SEQ ID NO: 258168 - DNA, 25 bp, Artificial
  probe
  misc_feature (1)..(25): SEQ ID NO: 200; WAN0249JB; Start 11; Stop 35
tcttatccattataacaagaaagct

SEQ ID NO: 258169 - DNA, 25 bp, Artificial
  probe
  misc_feature (1)..(25): SEQ ID NO: 200; WAN0249JB; Start 10; Stop 34
atcttatccattataacaagaaagc

SEQ ID NO: 258170 - DNA, 25 bp, Artificial
  probe
  misc_feature (1)..(25): SEQ ID NO: 201; WAN024AGS; Start 24; Stop 48
ttatgtggaaaactcagggaaatca

SEQ ID NO: 258171 - DNA, 25 bp, Artificial
  probe
  misc_feature (1)..(25): SEQ ID NO: 201; WAN024AGS; Start 23; Stop 47
tttatgtggaaaactcagggaaatc

SEQ ID NO: 258172 - DNA, 25 bp, Artificial
  probe
  misc_feature (1)..(25): SEQ ID NO: 201; WAN024AGS; Start 25; Stop 49
tatgtggaaaactcagggaaatcat

SEQ ID NO: 258173 - DNA, 25 bp, Artificial
  probe
  misc_feature (1)..(25): SEQ ID NO: 201; WAN024AGS; Start 26; Stop 50
atgtggaaaactcagggaaatcatc

SEQ ID NO: 258174 - DNA, 25 bp, Artificial
  probe
  misc_feature (1)..(25): SEQ ID NO: 201; WAN024AGS; Start 31; Stop 55
gaaaactcagggaaatcatcgcttt

SEQ ID NO: 258175 - DNA, 25 bp, Artificial
  probe
  misc_feature (1)..(25): SEQ ID NO: 201; WAN024AGS; Start 22; Stop 46
ttttatgtggaaaactcagggaaat

SEQ ID NO: 258176 - DNA, 25 bp, Artificial
  probe
  misc_feature (1)..(25): SEQ ID NO: 201; WAN024AGS; Start 32; Stop 56
aaaactcagggaaatcatcgctttt

SEQ ID NO: 258177 - DNA, 25 bp, Artificial
  probe
  misc_feature (1)..(25): SEQ ID NO: 201; WAN024AGS; Start 27; Stop 51
tgtggaaaactcagggaaatcatcg

SEQ ID NO: 258178 - DNA, 25 bp, Artificial
  probe
  misc_feature (1)..(25): SEQ ID NO: 201; WAN024AGS; Start 30; Stop 54
ggaaaactcagggaaatcatcgctt

SEQ ID NO: 258179 - DNA, 25 bp, Artificial
  probe
  misc_feature (1)..(25): SEQ ID NO: 201; WAN024AGS; Start 28; Stop 52
gtggaaaactcagggaaatcatcgc

SEQ ID NO: 258180 - DNA, 25 bp, Artificial
  probe
  misc_feature (1)..(25): SEQ ID NO: 201; WAN024AGS; Start 29; Stop 53
tggaaaactcagggaaatcatcgct

SEQ ID NO: 258181 - DNA, 25 bp, Artificial
  probe
  misc_feature (1)..(25): SEQ ID NO: 202; WAN024AAU; Start 65; Stop 89
agtattagagtagccgctcataatt

SEQ ID NO: 258182 - DNA, 25 bp, Artificial
  probe
  misc_feature (1)..(25): SEQ ID NO: 202; WAN024AAU; Start 64; Stop 88
aagtattagagtagccgctcataat

SEQ ID NO: 258183 - DNA, 25 bp, Artificial
  probe
  misc_feature (1)..(25): SEQ ID NO: 202; WAN024AAU; Start 56; Stop 80
tagagggaaagtattagagtagccg

SEQ ID NO: 258184 - DNA, 25 bp, Artificial
  probe
  misc_feature (1)..(25): SEQ ID NO: 202; WAN024AAU; Start 55; Stop 79
ttagagggaaagtattagagtagcc

SEQ ID NO: 258185 - DNA, 25 bp, Artificial
  probe
  misc_feature (1)..(25): SEQ ID NO: 202; WAN024AAU; Start 62; Stop 86
gaaagtattagagtagccgctcata

SEQ ID NO: 258186 - DNA, 25 bp, Artificial
  probe
  misc_feature (1)..(25): SEQ ID NO: 202; WAN024AAU; Start 63; Stop 87
aaagtattagagtagccgctcataa

SEQ ID NO: 258187 - DNA, 25 bp, Artificial
  probe
  misc_feature (1)..(25): SEQ ID NO: 202; WAN024AAU; Start 66; Stop 90
gtattagagtagccgctcataattt

SEQ ID NO: 258188 - DNA, 25 bp, Artificial
  probe
  misc_feature (1)..(25): SEQ ID NO: 202; WAN024AAU; Start 74; Stop 98
gtagccgctcataatttatactaga

SEQ ID NO: 258189 - DNA, 25 bp, Artificial
  probe
  misc_feature (1)..(25): SEQ ID NO: 202; WAN024AAU; Start 76; Stop 100
agccgctcataatttatactagatt

SEQ ID NO: 258190 - DNA, 25 bp, Artificial
  probe
  misc_feature (1)..(25): SEQ ID NO: 202; WAN024AAU; Start 54; Stop 78
tttagagggaaagtattagagtagc

SEQ ID NO: 258191 - DNA, 25 bp, Artificial
  probe
  misc_feature (1)..(25): SEQ ID NO: 202; WAN024AAU; Start 71; Stop 95
agagtagccgctcataatttatact

SEQ ID NO: 258192 - DNA, 25 bp, Artificial
  probe
  misc_feature (1)..(25): SEQ ID NO: 202; WAN024AAU; Start 61; Stop 85
ggaaagtattagagtagccgctcat

SEQ ID NO: 258193 - DNA, 25 bp, Artificial
  probe
  misc_feature (1)..(25): SEQ ID NO: 202; WAN024AAU; Start 51; Stop 75
ttgtttagagggaaagtattagagt

SEQ ID NO: 258194 - DNA, 25 bp, Artificial
  probe
  misc_feature (1)..(25): SEQ ID NO: 202; WAN024AAU; Start 70; Stop 94
tagagtagccgctcataatttatac

SEQ ID NO: 258195 - DNA, 25 bp, Artificial
  probe
  misc_feature (1)..(25): SEQ ID NO: 202; WAN024AAU; Start 77; Stop 101
gccgctcataatttatactagattt

SEQ ID NO: 258196 - DNA, 25 bp, Artificial
  probe
  misc_feature (1)..(25): SEQ ID NO: 202; WAN024AAU; Start 68; Stop 92
attagagtagccgctcataatttat

SEQ ID NO: 258197 - DNA, 25 bp, Artificial
  probe
  misc_feature (1)..(25): SEQ ID NO: 202; WAN024AAU; Start 75; Stop 99
tagccgctcataatttatactagat

SEQ ID NO: 258198 - DNA, 25 bp, Artificial
  probe
  misc_feature (1)..(25): SEQ ID NO: 202; WAN024AAU; Start 49; Stop 73
tcttgtttagagggaaagtattaga

SEQ ID NO: 258199 - DNA, 25 bp, Artificial
  probe
  misc_feature (1)..(25): SEQ ID NO: 202; WAN024AAU; Start 57; Stop 81
agagggaaagtattagagtagccgc

SEQ ID NO: 258200 - DNA, 25 bp, Artificial
  probe
  misc_feature (1)..(25): SEQ ID NO: 202; WAN024AAU; Start 50; Stop 74
cttgtttagagggaaagtattagag

SEQ ID NO: 258201 - DNA, 25 bp, Artificial
  probe
  misc_feature (1)..(25): SEQ ID NO: 202; WAN024AAU; Start 73; Stop 97
agtagccgctcataatttatactag

SEQ ID NO: 258202 - DNA, 25 bp, Artificial
  probe
  misc_feature (1)..(25): SEQ ID NO: 202; WAN024AAU; Start 72; Stop 96
gagtagccgctcataatttatacta

SEQ ID NO: 258203 - DNA, 25 bp, Artificial
  probe
  misc_feature (1)..(25): SEQ ID NO: 202; WAN024AAU; Start 69; Stop 93
ttagagtagccgctcataatttata

SEQ ID NO: 258204 - DNA, 25 bp, Artificial
  probe
  misc_feature (1)..(25): SEQ ID NO: 202; WAN024AAU; Start 67; Stop 91
tattagagtagccgctcataattta

SEQ ID NO: 258205 - DNA, 25 bp, Artificial
  probe
  misc_feature (1)..(25): SEQ ID NO: 202; WAN024AAU; Start 23; Stop 47
agaaaacccttgagtgtaagtcttt

SEQ ID NO: 258206 - DNA, 25 bp, Artificial
  probe
  misc_feature (1)..(25): SEQ ID NO: 202; WAN024AAU; Start 97; Stop 121
gatttgataactgatttgagacaga

SEQ ID NO: 258207 - DNA, 25 bp, Artificial
  probe
  misc_feature (1)..(25): SEQ ID NO: 202; WAN024AAU; Start 96; Stop 120
agatttgataactgatttgagacag

SEQ ID NO: 258208 - DNA, 25 bp, Artificial
  probe
  misc_feature (1)..(25): SEQ ID NO: 202; WAN024AAU; Start 52; Stop 76
tgtttagagggaaagtattagagta

SEQ ID NO: 258209 - DNA, 25 bp, Artificial
  probe
  misc_feature (1)..(25): SEQ ID NO: 202; WAN024AAU; Start 58; Stop 82
gagggaaagtattagagtagccgct

SEQ ID NO: 258210 - DNA, 25 bp, Artificial
  probe
  misc_feature (1)..(25): SEQ ID NO: 202; WAN024AAU; Start 100; Stop 124
ttgataactgatttgagacagattt

SEQ ID NO: 258211 - DNA, 25 bp, Artificial
  probe
  misc_feature (1)..(25): SEQ ID NO: 202; WAN024AAU; Start 99; Stop 123
tttgataactgatttgagacagatt

SEQ ID NO: 258212 - DNA, 25 bp, Artificial
  probe
  misc_feature (1)..(25): SEQ ID NO: 202; WAN024AAU; Start 48; Stop 72
ttcttgtttagagggaaagtattag

SEQ ID NO: 258213 - DNA, 25 bp, Artificial
  probe
  misc_feature (1)..(25): SEQ ID NO: 202; WAN024AAU; Start 59; Stop 83
agggaaagtattagagtagccgctc

SEQ ID NO: 258214 - DNA, 25 bp, Artificial
  probe
  misc_feature (1)..(25): SEQ ID NO: 203; WAN0249LS; Start 63; Stop 87
aaatctgtgaatttcacttggaaat

SEQ ID NO: 258215 - DNA, 25 bp, Artificial
  probe
  misc_feature (1)..(25): SEQ ID NO: 203; WAN0249LS; Start 64; Stop 88
aatctgtgaatttcacttggaaata

SEQ ID NO: 258216 - DNA, 25 bp, Artificial
  probe
  misc_feature (1)..(25): SEQ ID NO: 203; WAN0249LS; Start 62; Stop 86
aaaatctgtgaatttcacttggaaa

SEQ ID NO: 258217 - DNA, 25 bp, Artificial
  probe
  misc_feature (1)..(25): SEQ ID NO: 204; WAN024A4P; Start 27; Stop 51
tataggtagagaggttgtatcagca

SEQ ID NO: 258218 - DNA, 25 bp, Artificial
  probe
  misc_feature (1)..(25): SEQ ID NO: 204; WAN024A4P; Start 17; Stop 41
actgtgagattataggtagagaggt

SEQ ID NO: 258219 - DNA, 25 bp, Artificial
  probe
  misc_feature (1)..(25): SEQ ID NO: 204; WAN024A4P; Start 26; Stop 50
ttataggtagagaggttgtatcagc

SEQ ID NO: 258220 - DNA, 25 bp, Artificial
  probe
  misc_feature (1)..(25): SEQ ID NO: 204; WAN024A4P; Start 20; Stop 44
gtgagattataggtagagaggttgt

SEQ ID NO: 258221 - DNA, 25 bp, Artificial
  probe
  misc_feature (1)..(25): SEQ ID NO: 204; WAN024A4P; Start 19; Stop 43
tgtgagattataggtagagaggttg

SEQ ID NO: 258222 - DNA, 25 bp, Artificial
  probe
  misc_feature (1)..(25): SEQ ID NO: 204; WAN024A4P; Start 31; Stop 55
ggtagagaggttgtatcagcaatat

SEQ ID NO: 258223 - DNA, 25 bp, Artificial
  probe
  misc_feature (1)..(25): SEQ ID NO: 204; WAN024A4P; Start 34; Stop 58
agagaggttgtatcagcaatatgtg

SEQ ID NO: 258224 - DNA, 25 bp, Artificial
  probe
  misc_feature (1)..(25): SEQ ID NO: 204; WAN024A4P; Start 30; Stop 54
aggtagagaggttgtatcagcaata

SEQ ID NO: 258225 - DNA, 25 bp, Artificial
  probe
  misc_feature (1)..(25): SEQ ID NO: 204; WAN024A4P; Start 29; Stop 53
taggtagagaggttgtatcagcaat

SEQ ID NO: 258226 - DNA, 25 bp, Artificial
  probe
  misc_feature (1)..(25): SEQ ID NO: 204; WAN024A4P; Start 28; Stop 52
ataggtagagaggttgtatcagcaa

SEQ ID NO: 258227 - DNA, 25 bp, Artificial
  probe
  misc_feature (1)..(25): SEQ ID NO: 204; WAN024A4P; Start 18; Stop 42
ctgtgagattataggtagagaggtt

SEQ ID NO: 258228 - DNA, 25 bp, Artificial
  probe
  misc_feature (1)..(25): SEQ ID NO: 204; WAN024A4P; Start 16; Stop 40
aactgtgagattataggtagagagg

SEQ ID NO: 258229 - DNA, 25 bp, Artificial
  probe
  misc_feature (1)..(25): SEQ ID NO: 204; WAN024A4P; Start 37; Stop 61
gaggttgtatcagcaatatgtgtct

SEQ ID NO: 258230 - DNA, 25 bp, Artificial
  probe
  misc_feature (1)..(25): SEQ ID NO: 204; WAN024A4P; Start 36; Stop 60
agaggttgtatcagcaatatgtgtc

SEQ ID NO: 258231 - DNA, 25 bp, Artificial
  probe
  misc_feature (1)..(25): SEQ ID NO: 204; WAN024A4P; Start 35; Stop 59
gagaggttgtatcagcaatatgtgt

SEQ ID NO: 258232 - DNA, 25 bp, Artificial
  probe
  misc_feature (1)..(25): SEQ ID NO: 204; WAN024A4P; Start 33; Stop 57
tagagaggttgtatcagcaatatgt

SEQ ID NO: 258233 - DNA, 25 bp, Artificial
  probe
  misc_feature (1)..(25): SEQ ID NO: 204; WAN024A4P; Start 32; Stop 56
gtagagaggttgtatcagcaatatg

SEQ ID NO: 258234 - DNA, 25 bp, Artificial
  probe
  misc_feature (1)..(25): SEQ ID NO: 204; WAN024A4P; Start 40; Stop 64
gttgtatcagcaatatgtgtctgtc

SEQ ID NO: 258235 - DNA, 25 bp, Artificial
  probe
  misc_feature (1)..(25): SEQ ID NO: 204; WAN024A4P; Start 42; Stop 66
tgtatcagcaatatgtgtctgtcaa

SEQ ID NO: 258236 - DNA, 25 bp, Artificial
  probe
  misc_feature (1)..(25): SEQ ID NO: 204; WAN024A4P; Start 41; Stop 65
ttgtatcagcaatatgtgtctgtca

SEQ ID NO: 258237 - DNA, 25 bp, Artificial
  probe
  misc_feature (1)..(25): SEQ ID NO: 204; WAN024A4P; Start 38; Stop 62
aggttgtatcagcaatatgtgtctg

SEQ ID NO: 258238 - DNA, 25 bp, Artificial
  probe
  misc_feature (1)..(25): SEQ ID NO: 204; WAN024A4P; Start 39; Stop 63
ggttgtatcagcaatatgtgtctgt

SEQ ID NO: 258239 - DNA, 25 bp, Artificial
  probe
  misc_feature (1)..(25): SEQ ID NO: 204; WAN024A4P; Start 21; Stop 45
tgagattataggtagagaggttgta

SEQ ID NO: 258240 - DNA, 25 bp, Artificial
  probe
  misc_feature (1)..(25): SEQ ID NO: 204; WAN024A4P; Start 71; Stop 95
agtgacaaaggtagtagaagaaaga

SEQ ID NO: 258241 - DNA, 25 bp, Artificial
  probe
  misc_feature (1)..(25): SEQ ID NO: 204; WAN024A4P; Start 72; Stop 96
gtgacaaaggtagtagaagaaagat

SEQ ID NO: 258242 - DNA, 25 bp, Artificial
  probe
  misc_feature (1)..(25): SEQ ID NO: 204; WAN024A4P; Start 24; Stop 48
gattataggtagagaggttgtatca

SEQ ID NO: 258243 - DNA, 25 bp, Artificial
  probe
  misc_feature (1)..(25): SEQ ID NO: 204; WAN024A4P; Start 25; Stop 49
attataggtagagaggttgtatcag

SEQ ID NO: 258244 - DNA, 25 bp, Artificial
  probe
  misc_feature (1)..(25): SEQ ID NO: 204; WAN024A4P; Start 43; Stop 67
gtatcagcaatatgtgtctgtcaaa

SEQ ID NO: 258245 - DNA, 25 bp, Artificial
  probe
  misc_feature (1)..(25): SEQ ID NO: 204; WAN024A4P; Start 45; Stop 69
atcagcaatatgtgtctgtcaaatt

SEQ ID NO: 258246 - DNA, 25 bp, Artificial
  probe
  misc_feature (1)..(25): SEQ ID NO: 204; WAN024A4P; Start 22; Stop 46
gagattataggtagagaggttgtat

SEQ ID NO: 258247 - DNA, 25 bp, Artificial
  probe
  misc_feature (1)..(25): SEQ ID NO: 204; WAN024A4P; Start 15; Stop 39
taactgtgagattataggtagagag

SEQ ID NO: 258248 - DNA, 25 bp, Artificial
  probe
  misc_feature (1)..(25): SEQ ID NO: 204; WAN024A4P; Start 70; Stop 94
tagtgacaaaggtagtagaagaaag

SEQ ID NO: 258249 - DNA, 25 bp, Artificial
  probe
  misc_feature (1)..(25): SEQ ID NO: 204; WAN024A4P; Start 23; Stop 47
agattataggtagagaggttgtatc

SEQ ID NO: 258250 - DNA, 25 bp, Artificial
  probe
  misc_feature (1)..(25): SEQ ID NO: 206; WAN0249FI; Start 8; Stop 32
ttatataggaggtgaacttacgtcc

SEQ ID NO: 258251 - DNA, 25 bp, Artificial
  probe
  misc_feature (1)..(25): SEQ ID NO: 206; WAN0249FI; Start 5; Stop 29
tgtttatataggaggtgaacttacg

SEQ ID NO: 258252 - DNA, 25 bp, Artificial
  probe
  misc_feature (1)..(25): SEQ ID NO: 206; WAN0249FI; Start 2; Stop 26
acttgtttatataggaggtgaactt

SEQ ID NO: 258253 - DNA, 25 bp, Artificial
  probe
  misc_feature (1)..(25): SEQ ID NO: 206; WAN0249FI; Start 1; Stop 25
aacttgtttatataggaggtgaact

SEQ ID NO: 258254 - DNA, 25 bp, Artificial
  probe
  misc_feature (1)..(25): SEQ ID NO: 206; WAN0249FI; Start 9; Stop 33
tatataggaggtgaacttacgtccc

SEQ ID NO: 258255 - DNA, 25 bp, Artificial
  probe
  misc_feature (1)..(25): SEQ ID NO: 206; WAN0249FI; Start 7; Stop 31
tttatataggaggtgaacttacgtc

SEQ ID NO: 258256 - DNA, 25 bp, Artificial
  probe
  misc_feature (1)..(25): SEQ ID NO: 206; WAN0249FI; Start 6; Stop 30
gtttatataggaggtgaacttacgt

SEQ ID NO: 258257 - DNA, 25 bp, Artificial
  probe
  misc_feature (1)..(25): SEQ ID NO: 206; WAN0249FI; Start 20; Stop 44
tgaacttacgtccctcctatccttt

SEQ ID NO: 258258 - DNA, 25 bp, Artificial
  probe
  misc_feature (1)..(25): SEQ ID NO: 206; WAN0249FI; Start 10; Stop 34
atataggaggtgaacttacgtccct

SEQ ID NO: 258259 - DNA, 25 bp, Artificial
  probe
  misc_feature (1)..(25): SEQ ID NO: 206; WAN0249FI; Start 102; Stop 126
aatgatgttaaatagatagcgcgga

SEQ ID NO: 258260 - DNA, 25 bp, Artificial
  probe
  misc_feature (1)..(25): SEQ ID NO: 206; WAN0249FI; Start 24; Stop 48
cttacgtccctcctatccttttaaa

SEQ ID NO: 258261 - DNA, 25 bp, Artificial
  probe
  misc_feature (1)..(25): SEQ ID NO: 206; WAN0249FI; Start 19; Stop 43
gtgaacttacgtccctcctatcctt

SEQ ID NO: 258262 - DNA, 25 bp, Artificial
  probe
  misc_feature (1)..(25): SEQ ID NO: 206; WAN0249FI; Start 4; Stop 28
ttgtttatataggaggtgaacttac

SEQ ID NO: 258263 - DNA, 25 bp, Artificial
  probe
  misc_feature (1)..(25): SEQ ID NO: 206; WAN0249FI; Start 101; Stop 125
taatgatgttaaatagatagcgcgg

SEQ ID NO: 258264 - DNA, 25 bp, Artificial
  probe
  misc_feature (1)..(25): SEQ ID NO: 206; WAN0249FI; Start 103; Stop 127
atgatgttaaatagatagcgcggag

SEQ ID NO: 258265 - DNA, 25 bp, Artificial
  probe
  misc_feature (1)..(25): SEQ ID NO: 206; WAN0249FI; Start 23; Stop 47
acttacgtccctcctatccttttaa

SEQ ID NO: 258266 - DNA, 25 bp, Artificial
  probe
  misc_feature (1)..(25): SEQ ID NO: 206; WAN0249FI; Start 22; Stop 46
aacttacgtccctcctatcctttta

SEQ ID NO: 258267 - DNA, 25 bp, Artificial
  probe
  misc_feature (1)..(25): SEQ ID NO: 206; WAN0249FI; Start 3; Stop 27
cttgtttatataggaggtgaactta

SEQ ID NO: 258268 - DNA, 25 bp, Artificial
  probe
  misc_feature (1)..(25): SEQ ID NO: 206; WAN0249FI; Start 21; Stop 45
gaacttacgtccctcctatcctttt

SEQ ID NO: 258269 - DNA, 25 bp, Artificial
  probe
  misc_feature (1)..(25): SEQ ID NO: 206; WAN0249FI; Start 100; Stop 124
ataatgatgttaaatagatagcgcg

SEQ ID NO: 258270 - DNA, 25 bp, Artificial
  probe
  misc_feature (1)..(25): SEQ ID NO: 206; WAN0249FI; Start 104; Stop 128
tgatgttaaatagatagcgcggagg

SEQ ID NO: 258271 - DNA, 25 bp, Artificial
  probe
  misc_feature (1)..(25): SEQ ID NO: 206; WAN0249FI; Start 25; Stop 49
ttacgtccctcctatccttttaaaa

SEQ ID NO: 258272 - DNA, 25 bp, Artificial
  probe
  misc_feature (1)..(25): SEQ ID NO: 206; WAN0249FI; Start 18; Stop 42
ggtgaacttacgtccctcctatcct

SEQ ID NO: 258273 - DNA, 25 bp, Artificial
  probe
  misc_feature (1)..(25): SEQ ID NO: 206; WAN0249FI; Start 105; Stop 129
gatgttaaatagatagcgcggaggc

SEQ ID NO: 258274 - DNA, 25 bp, Artificial
  probe
  misc_feature (1)..(25): SEQ ID NO: 206; WAN0249FI; Start 17; Stop 41
aggtgaacttacgtccctcctatcc

SEQ ID NO: 258275 - DNA, 25 bp, Artificial
  probe
  misc_feature (1)..(25): SEQ ID NO: 206; WAN0249FI; Start 11; Stop 35
tataggaggtgaacttacgtccctc

SEQ ID NO: 258276 - DNA, 25 bp, Artificial
  probe
  misc_feature (1)..(25): SEQ ID NO: 206; WAN0249FI; Start 99; Stop 123
tataatgatgttaaatagatagcgc

SEQ ID NO: 258277 - DNA, 25 bp, Artificial
  probe
  misc_feature (1)..(25): SEQ ID NO: 206; WAN0249FI; Start 16; Stop 40
gaggtgaacttacgtccctcctatc

SEQ ID NO: 258278 - DNA, 25 bp, Artificial
  probe
  misc_feature (1)..(25): SEQ ID NO: 206; WAN0249FI; Start 47; Stop 71
aaaagatttgttaaacaattcacaa

SEQ ID NO: 258279 - DNA, 25 bp, Artificial
  probe
  misc_feature (1)..(25): SEQ ID NO: 207; WAN0249JH; Start 198; Stop 222
gcttcaatcagtacctctacttgta

SEQ ID NO: 258280 - DNA, 25 bp, Artificial
  probe
  misc_feature (1)..(25): SEQ ID NO: 207; WAN0249JH; Start 189; Stop 213
agatatagagcttcaatcagtacct

SEQ ID NO: 258281 - DNA, 25 bp, Artificial
  probe
  misc_feature (1)..(25): SEQ ID NO: 207; WAN0249JH; Start 29; Stop 53
tttgtttagtctaaggtggtagcaa

SEQ ID NO: 258282 - DNA, 25 bp, Artificial
  probe
  misc_feature (1)..(25): SEQ ID NO: 207; WAN0249JH; Start 30; Stop 54
ttgtttagtctaaggtggtagcaag

SEQ ID NO: 258283 - DNA, 25 bp, Artificial
  probe
  misc_feature (1)..(25): SEQ ID NO: 207; WAN0249JH; Start 33; Stop 57
tttagtctaaggtggtagcaaggag

SEQ ID NO: 258284 - DNA, 25 bp, Artificial
  probe
  misc_feature (1)..(25): SEQ ID NO: 207; WAN0249JH; Start 32; Stop 56
gtttagtctaaggtggtagcaagga

SEQ ID NO: 258285 - DNA, 25 bp, Artificial
  probe
  misc_feature (1)..(25): SEQ ID NO: 207; WAN0249JH; Start 190; Stop 214
gatatagagcttcaatcagtacctc

SEQ ID NO: 258286 - DNA, 25 bp, Artificial
  probe
  misc_feature (1)..(25): SEQ ID NO: 207; WAN0249JH; Start 196; Stop 220
gagcttcaatcagtacctctacttg

SEQ ID NO: 258287 - DNA, 25 bp, Artificial
  probe
  misc_feature (1)..(25): SEQ ID NO: 207; WAN0249JH; Start 31; Stop 55
tgtttagtctaaggtggtagcaagg

SEQ ID NO: 258288 - DNA, 25 bp, Artificial
  probe
  misc_feature (1)..(25): SEQ ID NO: 207; WAN0249JH; Start 197; Stop 221
agcttcaatcagtacctctacttgt

SEQ ID NO: 258289 - DNA, 25 bp, Artificial
  probe
  misc_feature (1)..(25): SEQ ID NO: 207; WAN0249JH; Start 199; Stop 223
cttcaatcagtacctctacttgtaa

SEQ ID NO: 258290 - DNA, 25 bp, Artificial
  probe
  misc_feature (1)..(25): SEQ ID NO: 207; WAN0249JH; Start 34; Stop 58
ttagtctaaggtggtagcaaggagc

SEQ ID NO: 258291 - DNA, 25 bp, Artificial
  probe
  misc_feature (1)..(25): SEQ ID NO: 207; WAN0249JH; Start 188; Stop 212
tagatatagagcttcaatcagtacc

SEQ ID NO: 258292 - DNA, 25 bp, Artificial
  probe
  misc_feature (1)..(25): SEQ ID NO: 207; WAN0249JH; Start 185; Stop 209
aagtagatatagagcttcaatcagt

SEQ ID NO: 258293 - DNA, 25 bp, Artificial
  probe
  misc_feature (1)..(25): SEQ ID NO: 207; WAN0249JH; Start 195; Stop 219
agagcttcaatcagtacctctactt

SEQ ID NO: 258294 - DNA, 25 bp, Artificial
  probe
  misc_feature (1)..(25): SEQ ID NO: 207; WAN0249JH; Start 28; Stop 52
ttttgtttagtctaaggtggtagca

SEQ ID NO: 258295 - DNA, 25 bp, Artificial
  probe
  misc_feature (1)..(25): SEQ ID NO: 207; WAN0249JH; Start 187; Stop 211
gtagatatagagcttcaatcagtac

SEQ ID NO: 258296 - DNA, 25 bp, Artificial
  probe
  misc_feature (1)..(25): SEQ ID NO: 207; WAN0249JH; Start 106; Stop 130
acttgaaagtgtttacaattagtga

SEQ ID NO: 258297 - DNA, 25 bp, Artificial
  probe
  misc_feature (1)..(25): SEQ ID NO: 207; WAN0249JH; Start 191; Stop 215
atatagagcttcaatcagtacctct

SEQ ID NO: 258298 - DNA, 25 bp, Artificial
  probe
  misc_feature (1)..(25): SEQ ID NO: 207; WAN0249JH; Start 186; Stop 210
agtagatatagagcttcaatcagta

SEQ ID NO: 258299 - DNA, 25 bp, Artificial
  probe
  misc_feature (1)..(25): SEQ ID NO: 207; WAN0249JH; Start 200; Stop 224
ttcaatcagtacctctacttgtaaa

SEQ ID NO: 258300 - DNA, 25 bp, Artificial
  probe
  misc_feature (1)..(25): SEQ ID NO: 207; WAN0249JH; Start 114; Stop 138
gtgtttacaattagtgatagaatgg

SEQ ID NO: 258301 - DNA, 25 bp, Artificial
  probe
  misc_feature (1)..(25): SEQ ID NO: 207; WAN0249JH; Start 115; Stop 139
tgtttacaattagtgatagaatgga

SEQ ID NO: 258302 - DNA, 25 bp, Artificial
  probe
  misc_feature (1)..(25): SEQ ID NO: 207; WAN0249JH; Start 107; Stop 131
cttgaaagtgtttacaattagtgat

SEQ ID NO: 258303 - DNA, 25 bp, Artificial
  probe
  misc_feature (1)..(25): SEQ ID NO: 207; WAN0249JH; Start 183; Stop 207
gtaagtagatatagagcttcaatca

SEQ ID NO: 258304 - DNA, 25 bp, Artificial
  probe
  misc_feature (1)..(25): SEQ ID NO: 207; WAN0249JH; Start 182; Stop 206
tgtaagtagatatagagcttcaatc

SEQ ID NO: 258305 - DNA, 25 bp, Artificial
  probe
  misc_feature (1)..(25): SEQ ID NO: 207; WAN0249JH; Start 194; Stop 218
tagagcttcaatcagtacctctact

SEQ ID NO: 258306 - DNA, 25 bp, Artificial
  probe
  misc_feature (1)..(25): SEQ ID NO: 207; WAN0249JH; Start 193; Stop 217
atagagcttcaatcagtacctctac

SEQ ID NO: 258307 - DNA, 25 bp, Artificial
  probe
  misc_feature (1)..(25): SEQ ID NO: 207; WAN0249JH; Start 184; Stop 208
taagtagatatagagcttcaatcag

SEQ ID NO: 258308 - DNA, 25 bp, Artificial
  probe
  misc_feature (1)..(25): SEQ ID NO: 207; WAN0249JH; Start 158; Stop 182
acgaaattttcacatcttcactttt

SEQ ID NO: 258309 - DNA, 25 bp, Artificial
  probe
  misc_feature (1)..(25): SEQ ID NO: 207; WAN0249JH; Start 157; Stop 181
aacgaaattttcacatcttcacttt

SEQ ID NO: 258310 - DNA, 25 bp, Artificial
  probe
  misc_feature (1)..(25): SEQ ID NO: 207; WAN0249JH; Start 156; Stop 180
aaacgaaattttcacatcttcactt

SEQ ID NO: 258311 - DNA, 25 bp, Artificial
  probe
  misc_feature (1)..(25): SEQ ID NO: 207; WAN0249JH; Start 159; Stop 183
cgaaattttcacatcttcacttttg

SEQ ID NO: 258312 - DNA, 25 bp, Artificial
  probe
  misc_feature (1)..(25): SEQ ID NO: 208; WAN024APZ; Start 38; Stop 62
agttttaagaaaaggaggatgatct

SEQ ID NO: 258313 - DNA, 25 bp, Artificial
  probe
  misc_feature (1)..(25): SEQ ID NO: 208; WAN024APZ; Start 36; Stop 60
ctagttttaagaaaaggaggatgat

SEQ ID NO: 258314 - DNA, 25 bp, Artificial
  probe
  misc_feature (1)..(25): SEQ ID NO: 208; WAN024APZ; Start 39; Stop 63
gttttaagaaaaggaggatgatcta

SEQ ID NO: 258315 - DNA, 25 bp, Artificial
  probe
  misc_feature (1)..(25): SEQ ID NO: 208; WAN024APZ; Start 37; Stop 61
tagttttaagaaaaggaggatgatc

SEQ ID NO: 258316 - DNA, 25 bp, Artificial
  probe
  misc_feature (1)..(25): SEQ ID NO: 208; WAN024APZ; Start 35; Stop 59
actagttttaagaaaaggaggatga

SEQ ID NO: 258317 - DNA, 25 bp, Artificial
  probe
  misc_feature (1)..(25): SEQ ID NO: 208; WAN024APZ; Start 34; Stop 58
tactagttttaagaaaaggaggatg

SEQ ID NO: 258318 - DNA, 25 bp, Artificial
  probe
  misc_feature (1)..(25): SEQ ID NO: 208; WAN024APZ; Start 33; Stop 57
atactagttttaagaaaaggaggat

SEQ ID NO: 258319 - DNA, 25 bp, Artificial
  probe
  misc_feature (1)..(25): SEQ ID NO: 209; WAN024GA4-3; Start 1394; Stop 1418
attggttcgtgagattattggctta

SEQ ID NO: 258320 - DNA, 25 bp, Artificial
  probe
  misc_feature (1)..(25): SEQ ID NO: 209; WAN024GA4-3; Start 1397; Stop 1421
ggttcgtgagattattggcttagat

SEQ ID NO: 258321 - DNA, 25 bp, Artificial
  probe
  misc_feature (1)..(25): SEQ ID NO: 209; WAN024GA4-3; Start 1400; Stop 1424
tcgtgagattattggcttagataga

SEQ ID NO: 258322 - DNA, 25 bp, Artificial
  probe
  misc_feature (1)..(25): SEQ ID NO: 209; WAN024GA4-3; Start 1395; Stop 1419
ttggttcgtgagattattggcttag

SEQ ID NO: 258323 - DNA, 25 bp, Artificial
  probe
  misc_feature (1)..(25): SEQ ID NO: 209; WAN024GA4-3; Start 1572; Stop 1596
tatggttctgttcaactactcttcc

SEQ ID NO: 258324 - DNA, 25 bp, Artificial
  probe
  misc_feature (1)..(25): SEQ ID NO: 209; WAN024GA4-3; Start 1417; Stop 1441
tagatagagagtctgccaatcgtat

SEQ ID NO: 258325 - DNA, 25 bp, Artificial
  probe
  misc_feature (1)..(25): SEQ ID NO: 209; WAN024GA4-3; Start 1408; Stop 1432
ttattggcttagatagagagtctgc

SEQ ID NO: 258326 - DNA, 25 bp, Artificial
  probe
  misc_feature (1)..(25): SEQ ID NO: 209; WAN024GA4-3; Start 1416; Stop 1440
ttagatagagagtctgccaatcgta

SEQ ID NO: 258327 - DNA, 25 bp, Artificial
  probe
  misc_feature (1)..(25): SEQ ID NO: 209; WAN024GA4-3; Start 1584; Stop 1608
caactactcttccaacaccaactac

SEQ ID NO: 258328 - DNA, 25 bp, Artificial
  probe
  misc_feature (1)..(25): SEQ ID NO: 209; WAN024GA4-3; Start 1583; Stop 1607
tcaactactcttccaacaccaacta

SEQ ID NO: 258329 - DNA, 25 bp, Artificial
  probe
  misc_feature (1)..(25): SEQ ID NO: 209; WAN024GA4-3; Start 1401; Stop 1425
cgtgagattattggcttagatagag

SEQ ID NO: 258330 - DNA, 25 bp, Artificial
  probe
  misc_feature (1)..(25): SEQ ID NO: 209; WAN024GA4-3; Start 1569; Stop 1593
tcttatggttctgttcaactactct

SEQ ID NO: 258331 - DNA, 25 bp, Artificial
  probe
  misc_feature (1)..(25): SEQ ID NO: 209; WAN024GA4-3; Start 1418; Stop 1442
agatagagagtctgccaatcgtatt

SEQ ID NO: 258332 - DNA, 25 bp, Artificial
  probe
  misc_feature (1)..(25): SEQ ID NO: 209; WAN024GA4-3; Start 1398; Stop 1422
gttcgtgagattattggcttagata

SEQ ID NO: 258333 - DNA, 25 bp, Artificial
  probe
  misc_feature (1)..(25): SEQ ID NO: 209; WAN024GA4-3; Start 1393; Stop 1417
gattggttcgtgagattattggctt

SEQ ID NO: 258334 - DNA, 25 bp, Artificial
  probe
  misc_feature (1)..(25): SEQ ID NO: 209; WAN024GA4-3; Start 1399; Stop 1423
ttcgtgagattattggcttagatag

SEQ ID NO: 258335 - DNA, 25 bp, Artificial
  probe
  misc_feature (1)..(25): SEQ ID NO: 209; WAN024GA4-3; Start 1415; Stop 1439
cttagatagagagtctgccaatcgt

SEQ ID NO: 258336 - DNA, 25 bp, Artificial
  probe
  misc_feature (1)..(25): SEQ ID NO: 209; WAN024GA4-3; Start 1396; Stop 1420
tggttcgtgagattattggcttaga

SEQ ID NO: 258337 - DNA, 25 bp, Artificial
  probe
  misc_feature (1)..(25): SEQ ID NO: 209; WAN024GA4-3; Start 1575; Stop 1599
ggttctgttcaactactcttccaac

SEQ ID NO: 258338 - DNA, 25 bp, Artificial
  probe
  misc_feature (1)..(25): SEQ ID NO: 209; WAN024GA4-3; Start 1571; Stop 1595
ttatggttctgttcaactactcttc

SEQ ID NO: 258339 - DNA, 25 bp, Artificial
  probe
  misc_feature (1)..(25): SEQ ID NO: 209; WAN024GA4-3; Start 1570; Stop 1594
cttatggttctgttcaactactctt

SEQ ID NO: 258340 - DNA, 25 bp, Artificial
  probe
  misc_feature (1)..(25): SEQ ID NO: 209; WAN024GA4-3; Start 1290; Stop 1314
aagttgacatctgatgatatgcttg

SEQ ID NO: 258341 - DNA, 25 bp, Artificial
  probe
  misc_feature (1)..(25): SEQ ID NO: 209; WAN024GA4-3; Start 1582; Stop 1606
ttcaactactcttccaacaccaact

SEQ ID NO: 258342 - DNA, 25 bp, Artificial
  probe
  misc_feature (1)..(25): SEQ ID NO: 209; WAN024GA4-3; Start 1391; Stop 1415
gagattggttcgtgagattattggc

SEQ ID NO: 258343 - DNA, 25 bp, Artificial
  probe
  misc_feature (1)..(25): SEQ ID NO: 209; WAN024GA4-3; Start 1568; Stop 1592
atcttatggttctgttcaactactc

SEQ ID NO: 258344 - DNA, 25 bp, Artificial
  probe
  misc_feature (1)..(25): SEQ ID NO: 209; WAN024GA4-3; Start 882; Stop 906
ttgtggttgcttcatattcagttgg

SEQ ID NO: 258345 - DNA, 25 bp, Artificial
  probe
  misc_feature (1)..(25): SEQ ID NO: 209; WAN024GA4-3; Start 1585; Stop 1609
aactactcttccaacaccaactacc

SEQ ID NO: 258346 - DNA, 25 bp, Artificial
  probe
  misc_feature (1)..(25): SEQ ID NO: 209; WAN024GA4-3; Start 1581; Stop 1605
gttcaactactcttccaacaccaac

SEQ ID NO: 258347 - DNA, 25 bp, Artificial
  probe
  misc_feature (1)..(25): SEQ ID NO: 209; WAN024GA4-3; Start 685; Stop 709
cggaacttcaaggtcgtatagagag

SEQ ID NO: 258348 - DNA, 25 bp, Artificial
  probe
  misc_feature (1)..(25): SEQ ID NO: 209; WAN024GA4-3; Start 1392; Stop 1416
agattggttcgtgagattattggct

SEQ ID NO: 258349 - DNA, 25 bp, Artificial
  probe
  misc_feature (1)..(25): SEQ ID NO: 209; WAN024GA4-3; Start 1567; Stop 1591
aatcttatggttctgttcaactact

SEQ ID NO: 258350 - DNA, 25 bp, Artificial
  probe
  misc_feature (1)..(25): SEQ ID NO: 209; WAN024GA4-3; Start 1291; Stop 1315
agttgacatctgatgatatgcttgc

SEQ ID NO: 258351 - DNA, 25 bp, Artificial
  probe
  misc_feature (1)..(25): SEQ ID NO: 209; WAN024GA4-3; Start 1455; Stop 1479
ttgtcggatgagaatcttaatgcca

SEQ ID NO: 258352 - DNA, 25 bp, Artificial
  probe
  misc_feature (1)..(25): SEQ ID NO: 210; WAN0249TF; Start 219; Stop 243
atagaaagcaaacagccttgaaatc

SEQ ID NO: 258353 - DNA, 25 bp, Artificial
  probe
  misc_feature (1)..(25): SEQ ID NO: 210; WAN0249TF; Start 218; Stop 242
gatagaaagcaaacagccttgaaat

SEQ ID NO: 258354 - DNA, 25 bp, Artificial
  probe
  misc_feature (1)..(25): SEQ ID NO: 210; WAN0249TF; Start 217; Stop 241
agatagaaagcaaacagccttgaaa

SEQ ID NO: 258355 - DNA, 25 bp, Artificial
  probe
  misc_feature (1)..(25): SEQ ID NO: 210; WAN0249TF; Start 220; Stop 244
tagaaagcaaacagccttgaaatca

SEQ ID NO: 258356 - DNA, 25 bp, Artificial
  probe
  misc_feature (1)..(25): SEQ ID NO: 210; WAN0249TF; Start 216; Stop 240
gagatagaaagcaaacagccttgaa

SEQ ID NO: 258357 - DNA, 25 bp, Artificial
  probe
  misc_feature (1)..(25): SEQ ID NO: 210; WAN0249TF; Start 222; Stop 246
gaaagcaaacagccttgaaatcaat

SEQ ID NO: 258358 - DNA, 25 bp, Artificial
  probe
  misc_feature (1)..(25): SEQ ID NO: 210; WAN0249TF; Start 80; Stop 104
gacttggtcagttctatagtagact

SEQ ID NO: 258359 - DNA, 25 bp, Artificial
  probe
  misc_feature (1)..(25): SEQ ID NO: 210; WAN0249TF; Start 223; Stop 247
aaagcaaacagccttgaaatcaatg

SEQ ID NO: 258360 - DNA, 25 bp, Artificial
  probe
  misc_feature (1)..(25): SEQ ID NO: 210; WAN0249TF; Start 221; Stop 245
agaaagcaaacagccttgaaatcaa

SEQ ID NO: 258361 - DNA, 25 bp, Artificial
  probe
  misc_feature (1)..(25): SEQ ID NO: 210; WAN0249TF; Start 215; Stop 239
ggagatagaaagcaaacagccttga

SEQ ID NO: 258362 - DNA, 25 bp, Artificial
  probe
  misc_feature (1)..(25): SEQ ID NO: 210; WAN0249TF; Start 224; Stop 248
aagcaaacagccttgaaatcaatgt

SEQ ID NO: 258363 - DNA, 25 bp, Artificial
  probe
  misc_feature (1)..(25): SEQ ID NO: 210; WAN0249TF; Start 209; Stop 233
aaaaggggagatagaaagcaaacag

SEQ ID NO: 258364 - DNA, 25 bp, Artificial
  probe
  misc_feature (1)..(25): SEQ ID NO: 210; WAN0249TF; Start 251; Stop 275
actgcgattatgaacctgaatcagc

SEQ ID NO: 258365 - DNA, 25 bp, Artificial
  probe
  misc_feature (1)..(25): SEQ ID NO: 210; WAN0249TF; Start 214; Stop 238
gggagatagaaagcaaacagccttg

SEQ ID NO: 258366 - DNA, 25 bp, Artificial
  probe
  misc_feature (1)..(25): SEQ ID NO: 210; WAN0249TF; Start 252; Stop 276
ctgcgattatgaacctgaatcagcc

SEQ ID NO: 258367 - DNA, 25 bp, Artificial
  probe
  misc_feature (1)..(25): SEQ ID NO: 210; WAN0249TF; Start 81; Stop 105
acttggtcagttctatagtagactg

SEQ ID NO: 258368 - DNA, 25 bp, Artificial
  probe
  misc_feature (1)..(25): SEQ ID NO: 210; WAN0249TF; Start 79; Stop 103
tgacttggtcagttctatagtagac

SEQ ID NO: 258369 - DNA, 25 bp, Artificial
  probe
  misc_feature (1)..(25): SEQ ID NO: 210; WAN0249TF; Start 225; Stop 249
agcaaacagccttgaaatcaatgtt

SEQ ID NO: 258370 - DNA, 25 bp, Artificial
  probe
  misc_feature (1)..(25): SEQ ID NO: 210; WAN0249TF; Start 210; Stop 234
aaaggggagatagaaagcaaacagc

SEQ ID NO: 258371 - DNA, 25 bp, Artificial
  probe
  misc_feature (1)..(25): SEQ ID NO: 210; WAN0249TF; Start 108; Stop 132
actataatagtacacctctacttct

SEQ ID NO: 258372 - DNA, 25 bp, Artificial
  probe
  misc_feature (1)..(25): SEQ ID NO: 210; WAN0249TF; Start 102; Stop 126
actgaaactataatagtacacctct

SEQ ID NO: 258373 - DNA, 25 bp, Artificial
  probe
  misc_feature (1)..(25): SEQ ID NO: 210; WAN0249TF; Start 100; Stop 124
agactgaaactataatagtacacct

SEQ ID NO: 258374 - DNA, 25 bp, Artificial
  probe
  misc_feature (1)..(25): SEQ ID NO: 210; WAN0249TF; Start 101; Stop 125
gactgaaactataatagtacacctc

SEQ ID NO: 258375 - DNA, 25 bp, Artificial
  probe
  misc_feature (1)..(25): SEQ ID NO: 210; WAN0249TF; Start 270; Stop 294
atcagcccctcaaaagagactgtat

SEQ ID NO: 258376 - DNA, 25 bp, Artificial
  probe
  misc_feature (1)..(25): SEQ ID NO: 210; WAN0249TF; Start 269; Stop 293
aatcagcccctcaaaagagactgta

SEQ ID NO: 258377 - DNA, 25 bp, Artificial
  probe
  misc_feature (1)..(25): SEQ ID NO: 210; WAN0249TF; Start 256; Stop 280
gattatgaacctgaatcagcccctc

SEQ ID NO: 258378 - DNA, 25 bp, Artificial
  probe
  misc_feature (1)..(25): SEQ ID NO: 210; WAN0249TF; Start 257; Stop 281
attatgaacctgaatcagcccctca

SEQ ID NO: 258379 - DNA, 25 bp, Artificial
  probe
  misc_feature (1)..(25): SEQ ID NO: 210; WAN0249TF; Start 259; Stop 283
tatgaacctgaatcagcccctcaaa

SEQ ID NO: 258380 - DNA, 25 bp, Artificial
  probe
  misc_feature (1)..(25): SEQ ID NO: 210; WAN0249TF; Start 258; Stop 282
ttatgaacctgaatcagcccctcaa

SEQ ID NO: 258381 - DNA, 25 bp, Artificial
  probe
  misc_feature (1)..(25): SEQ ID NO: 210; WAN0249TF; Start 104; Stop 128
tgaaactataatagtacacctctac

SEQ ID NO: 258382 - DNA, 25 bp, Artificial
  probe
  misc_feature (1)..(25): SEQ ID NO: 210; WAN0249TF; Start 99; Stop 123
tagactgaaactataatagtacacc

SEQ ID NO: 258383 - DNA, 25 bp, Artificial
  probe
  misc_feature (1)..(25): SEQ ID NO: 210; WAN0249TF; Start 211; Stop 235
aaggggagatagaaagcaaacagcc

SEQ ID NO: 258384 - DNA, 25 bp, Artificial
  probe
  misc_feature (1)..(25): SEQ ID NO: 210; WAN0249TF; Start 213; Stop 237
ggggagatagaaagcaaacagcctt

SEQ ID NO: 258385 - DNA, 25 bp, Artificial
  probe
  misc_feature (1)..(25): SEQ ID NO: 211; WAN024AET; Start 6; Stop 30
agccctgtcaagagaaatgtgtaaa

SEQ ID NO: 258386 - DNA, 25 bp, Artificial
  probe
  misc_feature (1)..(25): SEQ ID NO: 211; WAN024AET; Start 5; Stop 29
aagccctgtcaagagaaatgtgtaa

SEQ ID NO: 258387 - DNA, 25 bp, Artificial
  probe
  misc_feature (1)..(25): SEQ ID NO: 211; WAN024AET; Start 4; Stop 28
aaagccctgtcaagagaaatgtgta

SEQ ID NO: 258388 - DNA, 25 bp, Artificial
  probe
  misc_feature (1)..(25): SEQ ID NO: 211; WAN024AET; Start 1; Stop 25
aagaaagccctgtcaagagaaatgt

SEQ ID NO: 258389 - DNA, 25 bp, Artificial
  probe
  misc_feature (1)..(25): SEQ ID NO: 211; WAN024AET; Start 2; Stop 26
agaaagccctgtcaagagaaatgtg

SEQ ID NO: 258390 - DNA, 25 bp, Artificial
  probe
  misc_feature (1)..(25): SEQ ID NO: 211; WAN024AET; Start 8; Stop 32
ccctgtcaagagaaatgtgtaaaat

SEQ ID NO: 258391 - DNA, 25 bp, Artificial
  probe
  misc_feature (1)..(25): SEQ ID NO: 211; WAN024AET; Start 3; Stop 27
gaaagccctgtcaagagaaatgtgt

SEQ ID NO: 258392 - DNA, 25 bp, Artificial
  probe
  misc_feature (1)..(25): SEQ ID NO: 211; WAN024AET; Start 7; Stop 31
gccctgtcaagagaaatgtgtaaaa

SEQ ID NO: 258393 - DNA, 25 bp, Artificial
  probe
  misc_feature (1)..(25): SEQ ID NO: 211; WAN024AET; Start 9; Stop 33
cctgtcaagagaaatgtgtaaaatt

SEQ ID NO: 258394 - DNA, 25 bp, Artificial
  probe
  misc_feature (1)..(25): SEQ ID NO: 211; WAN024AET; Start 10; Stop 34
ctgtcaagagaaatgtgtaaaattt

SEQ ID NO: 258395 - DNA, 25 bp, Artificial
  probe
  misc_feature (1)..(25): SEQ ID NO: 211; WAN024AET; Start 11; Stop 35
tgtcaagagaaatgtgtaaaatttt

SEQ ID NO: 258396 - DNA, 25 bp, Artificial
  probe
  misc_feature (1)..(25): SEQ ID NO: 212; WAN0249RT; Start 25; Stop 49
atacgattatagcagaaagaaaggc

SEQ ID NO: 258397 - DNA, 25 bp, Artificial
  probe
  misc_feature (1)..(25): SEQ ID NO: 212; WAN0249RT; Start 95; Stop 119
ctttcttatcggctgagacactttc

SEQ ID NO: 258398 - DNA, 25 bp, Artificial
  probe
  misc_feature (1)..(25): SEQ ID NO: 212; WAN0249RT; Start 96; Stop 120
tttcttatcggctgagacactttca

SEQ ID NO: 258399 - DNA, 25 bp, Artificial
  probe
  misc_feature (1)..(25): SEQ ID NO: 212; WAN0249RT; Start 94; Stop 118
cctttcttatcggctgagacacttt

SEQ ID NO: 258400 - DNA, 25 bp, Artificial
  probe
  misc_feature (1)..(25): SEQ ID NO: 212; WAN0249RT; Start 204; Stop 228
aaactaagaagctagacgaagtcag

SEQ ID NO: 258401 - DNA, 25 bp, Artificial
  probe
  misc_feature (1)..(25): SEQ ID NO: 212; WAN0249RT; Start 203; Stop 227
caaactaagaagctagacgaagtca

SEQ ID NO: 258402 - DNA, 25 bp, Artificial
  probe
  misc_feature (1)..(25): SEQ ID NO: 212; WAN0249RT; Start 28; Stop 52
cgattatagcagaaagaaaggcttt

SEQ ID NO: 258403 - DNA, 25 bp, Artificial
  probe
  misc_feature (1)..(25): SEQ ID NO: 212; WAN0249RT; Start 26; Stop 50
tacgattatagcagaaagaaaggct

SEQ ID NO: 258404 - DNA, 25 bp, Artificial
  probe
  misc_feature (1)..(25): SEQ ID NO: 212; WAN0249RT; Start 27; Stop 51
acgattatagcagaaagaaaggctt

SEQ ID NO: 258405 - DNA, 25 bp, Artificial
  probe
  misc_feature (1)..(25): SEQ ID NO: 212; WAN0249RT; Start 205; Stop 229
aactaagaagctagacgaagtcagc

SEQ ID NO: 258406 - DNA, 25 bp, Artificial
  probe
  misc_feature (1)..(25): SEQ ID NO: 212; WAN0249RT; Start 202; Stop 226
gcaaactaagaagctagacgaagtc

SEQ ID NO: 258407 - DNA, 25 bp, Artificial
  probe
  misc_feature (1)..(25): SEQ ID NO: 212; WAN0249RT; Start 24; Stop 48
tatacgattatagcagaaagaaagg

SEQ ID NO: 258408 - DNA, 25 bp, Artificial
  probe
  misc_feature (1)..(25): SEQ ID NO: 212; WAN0249RT; Start 80; Stop 104
tagcctaaagcgagcctttcttatc

SEQ ID NO: 258409 - DNA, 25 bp, Artificial
  probe
  misc_feature (1)..(25): SEQ ID NO: 212; WAN0249RT; Start 79; Stop 103
ctagcctaaagcgagcctttcttat

SEQ ID NO: 258410 - DNA, 25 bp, Artificial
  probe
  misc_feature (1)..(25): SEQ ID NO: 212; WAN0249RT; Start 197; Stop 221
aaagagcaaactaagaagctagacg

SEQ ID NO: 258411 - DNA, 25 bp, Artificial
  probe
  misc_feature (1)..(25): SEQ ID NO: 212; WAN0249RT; Start 196; Stop 220
taaagagcaaactaagaagctagac

SEQ ID NO: 258412 - DNA, 25 bp, Artificial
  probe
  misc_feature (1)..(25): SEQ ID NO: 212; WAN0249RT; Start 200; Stop 224
gagcaaactaagaagctagacgaag

SEQ ID NO: 258413 - DNA, 25 bp, Artificial
  probe
  misc_feature (1)..(25): SEQ ID NO: 212; WAN0249RT; Start 199; Stop 223
agagcaaactaagaagctagacgaa

SEQ ID NO: 258414 - DNA, 25 bp, Artificial
  probe
  misc_feature (1)..(25): SEQ ID NO: 212; WAN0249RT; Start 198; Stop 222
aagagcaaactaagaagctagacga

SEQ ID NO: 258415 - DNA, 25 bp, Artificial
  probe
  misc_feature (1)..(25): SEQ ID NO: 212; WAN0249RT; Start 201; Stop 225
agcaaactaagaagctagacgaagt

SEQ ID NO: 258416 - DNA, 25 bp, Artificial
  probe
  misc_feature (1)..(25): SEQ ID NO: 212; WAN0249RT; Start 65; Stop 89
aaataagatgctttctagcctaaag

SEQ ID NO: 258417 - DNA, 25 bp, Artificial
  probe
  misc_feature (1)..(25): SEQ ID NO: 212; WAN0249RT; Start 195; Stop 219
ttaaagagcaaactaagaagctaga

SEQ ID NO: 258418 - DNA, 25 bp, Artificial
  probe
  misc_feature (1)..(25): SEQ ID NO: 212; WAN0249RT; Start 78; Stop 102
tctagcctaaagcgagcctttctta

SEQ ID NO: 258419 - DNA, 25 bp, Artificial
  probe
  misc_feature (1)..(25): SEQ ID NO: 212; WAN0249RT; Start 215; Stop 239
ctagacgaagtcagctcaaaatact

SEQ ID NO: 258420 - DNA, 25 bp, Artificial
  probe
  misc_feature (1)..(25): SEQ ID NO: 212; WAN0249RT; Start 216; Stop 240
tagacgaagtcagctcaaaatactg

SEQ ID NO: 258421 - DNA, 25 bp, Artificial
  probe
  misc_feature (1)..(25): SEQ ID NO: 212; WAN0249RT; Start 192; Stop 216
aaattaaagagcaaactaagaagct

SEQ ID NO: 258422 - DNA, 25 bp, Artificial
  probe
  misc_feature (1)..(25): SEQ ID NO: 212; WAN0249RT; Start 191; Stop 215
aaaattaaagagcaaactaagaagc

SEQ ID NO: 258423 - DNA, 25 bp, Artificial
  probe
  misc_feature (1)..(25): SEQ ID NO: 212; WAN0249RT; Start 159; Stop 183
actttgacagtgaaataatttaaca

SEQ ID NO: 258424 - DNA, 25 bp, Artificial
  probe
  misc_feature (1)..(25): SEQ ID NO: 212; WAN0249RT; Start 75; Stop 99
ctttctagcctaaagcgagcctttc

SEQ ID NO: 258425 - DNA, 25 bp, Artificial
  probe
  misc_feature (1)..(25): SEQ ID NO: 212; WAN0249RT; Start 194; Stop 218
attaaagagcaaactaagaagctag

SEQ ID NO: 258426 - DNA, 25 bp, Artificial
  probe
  misc_feature (1)..(25): SEQ ID NO: 212; WAN0249RT; Start 193; Stop 217
aattaaagagcaaactaagaagcta

SEQ ID NO: 258427 - DNA, 25 bp, Artificial
  probe
  misc_feature (1)..(25): SEQ ID NO: 212; WAN0249RT; Start 77; Stop 101
ttctagcctaaagcgagcctttctt

SEQ ID NO: 258428 - DNA, 25 bp, Artificial
  probe
  misc_feature (1)..(25): SEQ ID NO: 212; WAN0249RT; Start 76; Stop 100
tttctagcctaaagcgagcctttct

SEQ ID NO: 258429 - DNA, 25 bp, Artificial
  probe
  misc_feature (1)..(25): SEQ ID NO: 213; WAN0249QM; Start 1; Stop 25
aagaagagattgcgattgttagagg

SEQ ID NO: 258430 - DNA, 25 bp, Artificial
  probe
  misc_feature (1)..(25): SEQ ID NO: 213; WAN0249QM; Start 3; Stop 27
gaagagattgcgattgttagaggtg

SEQ ID NO: 258431 - DNA, 25 bp, Artificial
  probe
  misc_feature (1)..(25): SEQ ID NO: 213; WAN0249QM; Start 2; Stop 26
agaagagattgcgattgttagaggt

SEQ ID NO: 258432 - DNA, 25 bp, Artificial
  probe
  misc_feature (1)..(25): SEQ ID NO: 213; WAN0249QM; Start 5; Stop 29
agagattgcgattgttagaggtgaa

SEQ ID NO: 258433 - DNA, 25 bp, Artificial
  probe
  misc_feature (1)..(25): SEQ ID NO: 213; WAN0249QM; Start 4; Stop 28
aagagattgcgattgttagaggtga

SEQ ID NO: 258434 - DNA, 25 bp, Artificial
  probe
  misc_feature (1)..(25): SEQ ID NO: 213; WAN0249QM; Start 55; Stop 79
tgaacaactctattaggaaaggcaa

SEQ ID NO: 258435 - DNA, 25 bp, Artificial
  probe
  misc_feature (1)..(25): SEQ ID NO: 213; WAN0249QM; Start 54; Stop 78
atgaacaactctattaggaaaggca

SEQ ID NO: 258436 - DNA, 25 bp, Artificial
  probe
  misc_feature (1)..(25): SEQ ID NO: 213; WAN0249QM; Start 152; Stop 176
ctagtaatggttggactcaataaga

SEQ ID NO: 258437 - DNA, 25 bp, Artificial
  probe
  misc_feature (1)..(25): SEQ ID NO: 213; WAN0249QM; Start 56; Stop 80
gaacaactctattaggaaaggcaaa

SEQ ID NO: 258438 - DNA, 25 bp, Artificial
  probe
  misc_feature (1)..(25): SEQ ID NO: 213; WAN0249QM; Start 153; Stop 177
tagtaatggttggactcaataagaa

SEQ ID NO: 258439 - DNA, 25 bp, Artificial
  probe
  misc_feature (1)..(25): SEQ ID NO: 213; WAN0249QM; Start 57; Stop 81
aacaactctattaggaaaggcaaat

SEQ ID NO: 258440 - DNA, 25 bp, Artificial
  probe
  misc_feature (1)..(25): SEQ ID NO: 213; WAN0249QM; Start 6; Stop 30
gagattgcgattgttagaggtgaaa

SEQ ID NO: 258441 - DNA, 25 bp, Artificial
  probe
  misc_feature (1)..(25): SEQ ID NO: 213; WAN0249QM; Start 53; Stop 77
tatgaacaactctattaggaaaggc

SEQ ID NO: 258442 - DNA, 25 bp, Artificial
  probe
  misc_feature (1)..(25): SEQ ID NO: 213; WAN0249QM; Start 58; Stop 82
acaactctattaggaaaggcaaatt

SEQ ID NO: 258443 - DNA, 25 bp, Artificial
  probe
  misc_feature (1)..(25): SEQ ID NO: 213; WAN0249QM; Start 149; Stop 173
agactagtaatggttggactcaata

SEQ ID NO: 258444 - DNA, 25 bp, Artificial
  probe
  misc_feature (1)..(25): SEQ ID NO: 213; WAN0249QM; Start 148; Stop 172
tagactagtaatggttggactcaat

SEQ ID NO: 258445 - DNA, 25 bp, Artificial
  probe
  misc_feature (1)..(25): SEQ ID NO: 213; WAN0249QM; Start 147; Stop 171
atagactagtaatggttggactcaa

SEQ ID NO: 258446 - DNA, 25 bp, Artificial
  probe
  misc_feature (1)..(25): SEQ ID NO: 213; WAN0249QM; Start 59; Stop 83
caactctattaggaaaggcaaatta

SEQ ID NO: 258447 - DNA, 25 bp, Artificial
  probe
  misc_feature (1)..(25): SEQ ID NO: 213; WAN0249QM; Start 150; Stop 174
gactagtaatggttggactcaataa

SEQ ID NO: 258448 - DNA, 25 bp, Artificial
  probe
  misc_feature (1)..(25): SEQ ID NO: 213; WAN0249QM; Start 151; Stop 175
actagtaatggttggactcaataag

SEQ ID NO: 258449 - DNA, 25 bp, Artificial
  probe
  misc_feature (1)..(25): SEQ ID NO: 213; WAN0249QM; Start 146; Stop 170
tatagactagtaatggttggactca

SEQ ID NO: 258450 - DNA, 25 bp, Artificial
  probe
  misc_feature (1)..(25): SEQ ID NO: 213; WAN0249QM; Start 7; Stop 31
agattgcgattgttagaggtgaaaa

SEQ ID NO: 258451 - DNA, 25 bp, Artificial
  probe
  misc_feature (1)..(25): SEQ ID NO: 213; WAN0249QM; Start 60; Stop 84
aactctattaggaaaggcaaattaa

SEQ ID NO: 258452 - DNA, 25 bp, Artificial
  probe
  misc_feature (1)..(25): SEQ ID NO: 213; WAN0249QM; Start 52; Stop 76
atatgaacaactctattaggaaagg

SEQ ID NO: 258453 - DNA, 25 bp, Artificial
  probe
  misc_feature (1)..(25): SEQ ID NO: 213; WAN0249QM; Start 145; Stop 169
atatagactagtaatggttggactc

SEQ ID NO: 258454 - DNA, 25 bp, Artificial
  probe
  misc_feature (1)..(25): SEQ ID NO: 213; WAN0249QM; Start 142; Stop 166
acaatatagactagtaatggttgga

SEQ ID NO: 258455 - DNA, 25 bp, Artificial
  probe
  misc_feature (1)..(25): SEQ ID NO: 213; WAN0249QM; Start 143; Stop 167
caatatagactagtaatggttggac

SEQ ID NO: 258456 - DNA, 25 bp, Artificial
  probe
  misc_feature (1)..(25): SEQ ID NO: 213; WAN0249QM; Start 85; Stop 109
ttcctagaaatgttttagcagctac

SEQ ID NO: 258457 - DNA, 25 bp, Artificial
  probe
  misc_feature (1)..(25): SEQ ID NO: 213; WAN0249QM; Start 83; Stop 107
aattcctagaaatgttttagcagct

SEQ ID NO: 258458 - DNA, 25 bp, Artificial
  probe
  misc_feature (1)..(25): SEQ ID NO: 213; WAN0249QM; Start 82; Stop 106
taattcctagaaatgttttagcagc

SEQ ID NO: 258459 - DNA, 25 bp, Artificial
  probe
  misc_feature (1)..(25): SEQ ID NO: 213; WAN0249QM; Start 86; Stop 110
tcctagaaatgttttagcagctaca

SEQ ID NO: 258460 - DNA, 25 bp, Artificial
  probe
  misc_feature (1)..(25): SEQ ID NO: 213; WAN0249QM; Start 87; Stop 111
cctagaaatgttttagcagctacag

SEQ ID NO: 258461 - DNA, 25 bp, Artificial
  probe
  misc_feature (1)..(25): SEQ ID NO: 213; WAN0249QM; Start 144; Stop 168
aatatagactagtaatggttggact

SEQ ID NO: 258462 - DNA, 25 bp, Artificial
  probe
  misc_feature (1)..(25): SEQ ID NO: 214; WAN024ABO; Start 45; Stop 69
aaatttctaaggaaacttgacaagt

SEQ ID NO: 258463 - DNA, 25 bp, Artificial
  probe
  misc_feature (1)..(25): SEQ ID NO: 214; WAN024ABO; Start 42; Stop 66
ggaaaatttctaaggaaacttgaca

SEQ ID NO: 258464 - DNA, 25 bp, Artificial
  probe
  misc_feature (1)..(25): SEQ ID NO: 214; WAN024ABO; Start 41; Stop 65
tggaaaatttctaaggaaacttgac

SEQ ID NO: 258465 - DNA, 25 bp, Artificial
  probe
  misc_feature (1)..(25): SEQ ID NO: 214; WAN024ABO; Start 40; Stop 64
atggaaaatttctaaggaaacttga

SEQ ID NO: 258466 - DNA, 25 bp, Artificial
  probe
  misc_feature (1)..(25): SEQ ID NO: 214; WAN024ABO; Start 37; Stop 61
cctatggaaaatttctaaggaaact

SEQ ID NO: 258467 - DNA, 25 bp, Artificial
  probe
  misc_feature (1)..(25): SEQ ID NO: 214; WAN024ABO; Start 43; Stop 67
gaaaatttctaaggaaacttgacaa

SEQ ID NO: 258468 - DNA, 25 bp, Artificial
  probe
  misc_feature (1)..(25): SEQ ID NO: 214; WAN024ABO; Start 44; Stop 68
aaaatttctaaggaaacttgacaag

SEQ ID NO: 258469 - DNA, 25 bp, Artificial
  probe
  misc_feature (1)..(25): SEQ ID NO: 214; WAN024ABO; Start 39; Stop 63
tatggaaaatttctaaggaaacttg

SEQ ID NO: 258470 - DNA, 25 bp, Artificial
  probe
  misc_feature (1)..(25): SEQ ID NO: 214; WAN024ABO; Start 36; Stop 60
tcctatggaaaatttctaaggaaac

SEQ ID NO: 258471 - DNA, 25 bp, Artificial
  probe
  misc_feature (1)..(25): SEQ ID NO: 214; WAN024ABO; Start 38; Stop 62
ctatggaaaatttctaaggaaactt

SEQ ID NO: 258472 - DNA, 25 bp, Artificial
  probe
  misc_feature (1)..(25): SEQ ID NO: 214; WAN024ABO; Start 46; Stop 70
aatttctaaggaaacttgacaagtt

SEQ ID NO: 258473 - DNA, 25 bp, Artificial
  probe
  misc_feature (1)..(25): SEQ ID NO: 215; WAN024A6L; Start 7; Stop 31
cctctctccatgtgctattcctatt

SEQ ID NO: 258474 - DNA, 25 bp, Artificial
  probe
  misc_feature (1)..(25): SEQ ID NO: 215; WAN024A6L; Start 1; Stop 25
aagaatcctctctccatgtgctatt

SEQ ID NO: 258475 - DNA, 25 bp, Artificial
  probe
  misc_feature (1)..(25): SEQ ID NO: 215; WAN024A6L; Start 6; Stop 30
tcctctctccatgtgctattcctat

SEQ ID NO: 258476 - DNA, 25 bp, Artificial
  probe
  misc_feature (1)..(25): SEQ ID NO: 215; WAN024A6L; Start 5; Stop 29
atcctctctccatgtgctattccta

SEQ ID NO: 258477 - DNA, 25 bp, Artificial
  probe
  misc_feature (1)..(25): SEQ ID NO: 215; WAN024A6L; Start 8; Stop 32
ctctctccatgtgctattcctattt

SEQ ID NO: 258478 - DNA, 25 bp, Artificial
  probe
  misc_feature (1)..(25): SEQ ID NO: 215; WAN024A6L; Start 4; Stop 28
aatcctctctccatgtgctattcct

SEQ ID NO: 258479 - DNA, 25 bp, Artificial
  probe
  misc_feature (1)..(25): SEQ ID NO: 215; WAN024A6L; Start 2; Stop 26
agaatcctctctccatgtgctattc

SEQ ID NO: 258480 - DNA, 25 bp, Artificial
  probe
  misc_feature (1)..(25): SEQ ID NO: 215; WAN024A6L; Start 3; Stop 27
gaatcctctctccatgtgctattcc

SEQ ID NO: 258481 - DNA, 25 bp, Artificial
  probe
  misc_feature (1)..(25): SEQ ID NO: 215; WAN024A6L; Start 9; Stop 33
tctctccatgtgctattcctatttt

SEQ ID NO: 258482 - DNA, 25 bp, Artificial
  probe
  misc_feature (1)..(25): SEQ ID NO: 215; WAN024A6L; Start 11; Stop 35
tctccatgtgctattcctattttag

SEQ ID NO: 258483 - DNA, 25 bp, Artificial
  probe
  misc_feature (1)..(25): SEQ ID NO: 215; WAN024A6L; Start 10; Stop 34
ctctccatgtgctattcctatttta

SEQ ID NO: 258484 - DNA, 25 bp, Artificial
  probe
  misc_feature (1)..(25): SEQ ID NO: 215; WAN024A6L; Start 12; Stop 36
ctccatgtgctattcctattttagc

SEQ ID NO: 258485 - DNA, 25 bp, Artificial
  probe
  misc_feature (1)..(25): SEQ ID NO: 215; WAN024A6L; Start 44; Stop 68
tagtattttcacgaagaaaaggacg

SEQ ID NO: 258486 - DNA, 25 bp, Artificial
  probe
  misc_feature (1)..(25): SEQ ID NO: 215; WAN024A6L; Start 45; Stop 69
agtattttcacgaagaaaaggacgg

SEQ ID NO: 258487 - DNA, 25 bp, Artificial
  probe
  misc_feature (1)..(25): SEQ ID NO: 215; WAN024A6L; Start 47; Stop 71
tattttcacgaagaaaaggacggac

SEQ ID NO: 258488 - DNA, 25 bp, Artificial
  probe
  misc_feature (1)..(25): SEQ ID NO: 215; WAN024A6L; Start 46; Stop 70
gtattttcacgaagaaaaggacgga

SEQ ID NO: 258489 - DNA, 25 bp, Artificial
  probe
  misc_feature (1)..(25): SEQ ID NO: 215; WAN024A6L; Start 43; Stop 67
atagtattttcacgaagaaaaggac

SEQ ID NO: 258490 - DNA, 25 bp, Artificial
  probe
  misc_feature (1)..(25): SEQ ID NO: 215; WAN024A6L; Start 34; Stop 58
agcatacttatagtattttcacgaa

SEQ ID NO: 258491 - DNA, 25 bp, Artificial
  probe
  misc_feature (1)..(25): SEQ ID NO: 215; WAN024A6L; Start 35; Stop 59
gcatacttatagtattttcacgaag

SEQ ID NO: 258492 - DNA, 25 bp, Artificial
  probe
  misc_feature (1)..(25): SEQ ID NO: 215; WAN024A6L; Start 48; Stop 72
attttcacgaagaaaaggacggacc

SEQ ID NO: 258493 - DNA, 25 bp, Artificial
  probe
  misc_feature (1)..(25): SEQ ID NO: 215; WAN024A6L; Start 33; Stop 57
tagcatacttatagtattttcacga

SEQ ID NO: 258494 - DNA, 25 bp, Artificial
  probe
  misc_feature (1)..(25): SEQ ID NO: 215; WAN024A6L; Start 42; Stop 66
tatagtattttcacgaagaaaagga

SEQ ID NO: 258495 - DNA, 25 bp, Artificial
  probe
  misc_feature (1)..(25): SEQ ID NO: 215; WAN024A6L; Start 41; Stop 65
ttatagtattttcacgaagaaaagg

SEQ ID NO: 258496 - DNA, 25 bp, Artificial
  probe
  misc_feature (1)..(25): SEQ ID NO: 216; WAN0249GC; Start 84; Stop 108
aaactttcagcccaataatttcttt

SEQ ID NO: 258497 - DNA, 25 bp, Artificial
  probe
  misc_feature (1)..(25): SEQ ID NO: 216; WAN0249GC; Start 85; Stop 109
aactttcagcccaataatttctttt

SEQ ID NO: 258498 - DNA, 25 bp, Artificial
  probe
  misc_feature (1)..(25): SEQ ID NO: 216; WAN0249GC; Start 83; Stop 107
aaaactttcagcccaataatttctt

SEQ ID NO: 258499 - DNA, 25 bp, Artificial
  probe
  misc_feature (1)..(25): SEQ ID NO: 216; WAN0249GC; Start 86; Stop 110
actttcagcccaataatttctttta

SEQ ID NO: 258500 - DNA, 25 bp, Artificial
  probe
  misc_feature (1)..(25): SEQ ID NO: 216; WAN0249GC; Start 118; Stop 142
agattatattgtgctcaaatactct

SEQ ID NO: 258501 - DNA, 25 bp, Artificial
  probe
  misc_feature (1)..(25): SEQ ID NO: 216; WAN0249GC; Start 112; Stop 136
aaggtgagattatattgtgctcaaa

SEQ ID NO: 258502 - DNA, 25 bp, Artificial
  probe
  misc_feature (1)..(25): SEQ ID NO: 216; WAN0249GC; Start 111; Stop 135
aaaggtgagattatattgtgctcaa

SEQ ID NO: 258503 - DNA, 25 bp, Artificial
  probe
  misc_feature (1)..(25): SEQ ID NO: 216; WAN0249GC; Start 127; Stop 151
tgtgctcaaatactcttttattctt

SEQ ID NO: 258504 - DNA, 25 bp, Artificial
  probe
  misc_feature (1)..(25): SEQ ID NO: 216; WAN0249GC; Start 117; Stop 141
gagattatattgtgctcaaatactc

SEQ ID NO: 258505 - DNA, 25 bp, Artificial
  probe
  misc_feature (1)..(25): SEQ ID NO: 216; WAN0249GC; Start 113; Stop 137
aggtgagattatattgtgctcaaat

SEQ ID NO: 258506 - DNA, 25 bp, Artificial
  probe
  misc_feature (1)..(25): SEQ ID NO: 216; WAN0249GC; Start 126; Stop 150
ttgtgctcaaatactcttttattct

SEQ ID NO: 258507 - DNA, 25 bp, Artificial
  probe
  misc_feature (1)..(25): SEQ ID NO: 216; WAN0249GC; Start 167; Stop 191
taattgtagttagaaaggaagagaa

SEQ ID NO: 258508 - DNA, 25 bp, Artificial
  probe
  misc_feature (1)..(25): SEQ ID NO: 216; WAN0249GC; Start 109; Stop 133
taaaaggtgagattatattgtgctc

SEQ ID NO: 258509 - DNA, 25 bp, Artificial
  probe
  misc_feature (1)..(25): SEQ ID NO: 216; WAN0249GC; Start 108; Stop 132
ttaaaaggtgagattatattgtgct

SEQ ID NO: 258510 - DNA, 25 bp, Artificial
  probe
  misc_feature (1)..(25): SEQ ID NO: 216; WAN0249GC; Start 119; Stop 143
gattatattgtgctcaaatactctt

SEQ ID NO: 258511 - DNA, 25 bp, Artificial
  probe
  misc_feature (1)..(25): SEQ ID NO: 216; WAN0249GC; Start 87; Stop 111
ctttcagcccaataatttcttttaa

SEQ ID NO: 258512 - DNA, 25 bp, Artificial
  probe
  misc_feature (1)..(25): SEQ ID NO: 216; WAN0249GC; Start 166; Stop 190
ataattgtagttagaaaggaagaga

SEQ ID NO: 258513 - DNA, 25 bp, Artificial
  probe
  misc_feature (1)..(25): SEQ ID NO: 216; WAN0249GC; Start 125; Stop 149
attgtgctcaaatactcttttattc

SEQ ID NO: 258514 - DNA, 25 bp, Artificial
  probe
  misc_feature (1)..(25): SEQ ID NO: 216; WAN0249GC; Start 114; Stop 138
ggtgagattatattgtgctcaaata

SEQ ID NO: 258515 - DNA, 25 bp, Artificial
  probe
  misc_feature (1)..(25): SEQ ID NO: 216; WAN0249GC; Start 161; Stop 185
acactataattgtagttagaaagga

SEQ ID NO: 258516 - DNA, 25 bp, Artificial
  probe
  misc_feature (1)..(25): SEQ ID NO: 216; WAN0249GC; Start 110; Stop 134
aaaaggtgagattatattgtgctca

SEQ ID NO: 258517 - DNA, 25 bp, Artificial
  probe
  misc_feature (1)..(25): SEQ ID NO: 216; WAN0249GC; Start 88; Stop 112
tttcagcccaataatttcttttaaa

SEQ ID NO: 258518 - DNA, 25 bp, Artificial
  probe
  misc_feature (1)..(25): SEQ ID NO: 216; WAN0249GC; Start 115; Stop 139
gtgagattatattgtgctcaaatac

SEQ ID NO: 258519 - DNA, 25 bp, Artificial
  probe
  misc_feature (1)..(25): SEQ ID NO: 216; WAN0249GC; Start 128; Stop 152
gtgctcaaatactcttttattctta

SEQ ID NO: 258520 - DNA, 25 bp, Artificial
  probe
  misc_feature (1)..(25): SEQ ID NO: 216; WAN0249GC; Start 116; Stop 140
tgagattatattgtgctcaaatact

SEQ ID NO: 258521 - DNA, 25 bp, Artificial
  probe
  misc_feature (1)..(25): SEQ ID NO: 216; WAN0249GC; Start 107; Stop 131
tttaaaaggtgagattatattgtgc

SEQ ID NO: 258522 - DNA, 25 bp, Artificial
  probe
  misc_feature (1)..(25): SEQ ID NO: 216; WAN0249GC; Start 124; Stop 148
tattgtgctcaaatactcttttatt

SEQ ID NO: 258523 - DNA, 25 bp, Artificial
  probe
  misc_feature (1)..(25): SEQ ID NO: 216; WAN0249GC; Start 121; Stop 145
ttatattgtgctcaaatactctttt

SEQ ID NO: 258524 - DNA, 25 bp, Artificial
  probe
  misc_feature (1)..(25): SEQ ID NO: 216; WAN0249GC; Start 89; Stop 113
ttcagcccaataatttcttttaaaa

SEQ ID NO: 258525 - DNA, 25 bp, Artificial
  probe
  misc_feature (1)..(25): SEQ ID NO: 217; WAN0249OK; Start 21; Stop 45
gaataaaagcgtaaaagacaagaca

SEQ ID NO: 258526 - DNA, 25 bp, Artificial
  probe
  misc_feature (1)..(25): SEQ ID NO: 217; WAN0249OK; Start 20; Stop 44
agaataaaagcgtaaaagacaagac

SEQ ID NO: 258527 - DNA, 25 bp, Artificial
  probe
  misc_feature (1)..(25): SEQ ID NO: 217; WAN0249OK; Start 25; Stop 49
aaaagcgtaaaagacaagacatgag

SEQ ID NO: 258528 - DNA, 25 bp, Artificial
  probe
  misc_feature (1)..(25): SEQ ID NO: 217; WAN0249OK; Start 24; Stop 48
taaaagcgtaaaagacaagacatga

SEQ ID NO: 258529 - DNA, 25 bp, Artificial
  probe
  misc_feature (1)..(25): SEQ ID NO: 217; WAN0249OK; Start 22; Stop 46
aataaaagcgtaaaagacaagacat

SEQ ID NO: 258530 - DNA, 25 bp, Artificial
  probe
  misc_feature (1)..(25): SEQ ID NO: 217; WAN0249OK; Start 23; Stop 47
ataaaagcgtaaaagacaagacatg

SEQ ID NO: 258531 - DNA, 25 bp, Artificial
  probe
  misc_feature (1)..(25): SEQ ID NO: 217; WAN0249OK; Start 26; Stop 50
aaagcgtaaaagacaagacatgagc

SEQ ID NO: 258532 - DNA, 25 bp, Artificial
  probe
  misc_feature (1)..(25): SEQ ID NO: 217; WAN0249OK; Start 16; Stop 40
agttagaataaaagcgtaaaagaca

SEQ ID NO: 258533 - DNA, 25 bp, Artificial
  probe
  misc_feature (1)..(25): SEQ ID NO: 217; WAN0249OK; Start 19; Stop 43
tagaataaaagcgtaaaagacaaga

SEQ ID NO: 258534 - DNA, 25 bp, Artificial
  probe
  misc_feature (1)..(25): SEQ ID NO: 217; WAN0249OK; Start 17; Stop 41
gttagaataaaagcgtaaaagacaa

SEQ ID NO: 258535 - DNA, 25 bp, Artificial
  probe
  misc_feature (1)..(25): SEQ ID NO: 217; WAN0249OK; Start 27; Stop 51
aagcgtaaaagacaagacatgagca

SEQ ID NO: 258536 - DNA, 25 bp, Artificial
  probe
  misc_feature (1)..(25): SEQ ID NO: 217; WAN0249OK; Start 18; Stop 42
ttagaataaaagcgtaaaagacaag

SEQ ID NO: 258537 - DNA, 25 bp, Artificial
  probe
  misc_feature (1)..(25): SEQ ID NO: 217; WAN0249OK; Start 15; Stop 39
aagttagaataaaagcgtaaaagac

SEQ ID NO: 258538 - DNA, 25 bp, Artificial
  probe
  misc_feature (1)..(25): SEQ ID NO: 217; WAN0249OK; Start 28; Stop 52
agcgtaaaagacaagacatgagcag

SEQ ID NO: 258539 - DNA, 25 bp, Artificial
  probe
  misc_feature (1)..(25): SEQ ID NO: 217; WAN0249OK; Start 8; Stop 32
tcctaataagttagaataaaagcgt

SEQ ID NO: 258540 - DNA, 25 bp, Artificial
  probe
  misc_feature (1)..(25): SEQ ID NO: 217; WAN0249OK; Start 7; Stop 31
ttcctaataagttagaataaaagcg

SEQ ID NO: 258541 - DNA, 25 bp, Artificial
  probe
  misc_feature (1)..(25): SEQ ID NO: 218; WAN024A8T; Start 9; Stop 33
tttaccataaaacaagccctcctca

SEQ ID NO: 258542 - DNA, 25 bp, Artificial
  probe
  misc_feature (1)..(25): SEQ ID NO: 218; WAN024A8T; Start 14; Stop 38
cataaaacaagccctcctcacaaac

SEQ ID NO: 258543 - DNA, 25 bp, Artificial
  probe
  misc_feature (1)..(25): SEQ ID NO: 218; WAN024A8T; Start 10; Stop 34
ttaccataaaacaagccctcctcac

SEQ ID NO: 258544 - DNA, 25 bp, Artificial
  probe
  misc_feature (1)..(25): SEQ ID NO: 218; WAN024A8T; Start 2; Stop 26
agaccattttaccataaaacaagcc

SEQ ID NO: 258545 - DNA, 25 bp, Artificial
  probe
  misc_feature (1)..(25): SEQ ID NO: 218; WAN024A8T; Start 13; Stop 37
ccataaaacaagccctcctcacaaa

SEQ ID NO: 258546 - DNA, 25 bp, Artificial
  probe
  misc_feature (1)..(25): SEQ ID NO: 218; WAN024A8T; Start 7; Stop 31
attttaccataaaacaagccctcct

SEQ ID NO: 258547 - DNA, 25 bp, Artificial
  probe
  misc_feature (1)..(25): SEQ ID NO: 218; WAN024A8T; Start 6; Stop 30
cattttaccataaaacaagccctcc

SEQ ID NO: 258548 - DNA, 25 bp, Artificial
  probe
  misc_feature (1)..(25): SEQ ID NO: 218; WAN024A8T; Start 5; Stop 29
ccattttaccataaaacaagccctc

SEQ ID NO: 258549 - DNA, 25 bp, Artificial
  probe
  misc_feature (1)..(25): SEQ ID NO: 218; WAN024A8T; Start 3; Stop 27
gaccattttaccataaaacaagccc

SEQ ID NO: 258550 - DNA, 25 bp, Artificial
  probe
  misc_feature (1)..(25): SEQ ID NO: 218; WAN024A8T; Start 4; Stop 28
accattttaccataaaacaagccct

SEQ ID NO: 258551 - DNA, 25 bp, Artificial
  probe
  misc_feature (1)..(25): SEQ ID NO: 218; WAN024A8T; Start 8; Stop 32
ttttaccataaaacaagccctcctc

SEQ ID NO: 258552 - DNA, 25 bp, Artificial
  probe
  misc_feature (1)..(25): SEQ ID NO: 218; WAN024A8T; Start 11; Stop 35
taccataaaacaagccctcctcaca

SEQ ID NO: 258553 - DNA, 25 bp, Artificial
  probe
  misc_feature (1)..(25): SEQ ID NO: 218; WAN024A8T; Start 1; Stop 25
aagaccattttaccataaaacaagc

SEQ ID NO: 258554 - DNA, 25 bp, Artificial
  probe
  misc_feature (1)..(25): SEQ ID NO: 218; WAN024A8T; Start 15; Stop 39
ataaaacaagccctcctcacaaacg

SEQ ID NO: 258555 - DNA, 25 bp, Artificial
  probe
  misc_feature (1)..(25): SEQ ID NO: 218; WAN024A8T; Start 12; Stop 36
accataaaacaagccctcctcacaa

SEQ ID NO: 258556 - DNA, 25 bp, Artificial
  probe
  misc_feature (1)..(25): SEQ ID NO: 218; WAN024A8T; Start 16; Stop 40
taaaacaagccctcctcacaaacga

SEQ ID NO: 258557 - DNA, 25 bp, Artificial
  probe
  misc_feature (1)..(25): SEQ ID NO: 219; WAN0249MX; Start 406; Stop 430
tgctgacttacttattgttaggtgt

SEQ ID NO: 258558 - DNA, 25 bp, Artificial
  probe
  misc_feature (1)..(25): SEQ ID NO: 219; WAN0249MX; Start 404; Stop 428
actgctgacttacttattgttaggt

SEQ ID NO: 258559 - DNA, 25 bp, Artificial
  probe
  misc_feature (1)..(25): SEQ ID NO: 219; WAN0249MX; Start 410; Stop 434
gacttacttattgttaggtgttccg

SEQ ID NO: 258560 - DNA, 25 bp, Artificial
  probe
  misc_feature (1)..(25): SEQ ID NO: 219; WAN0249MX; Start 405; Stop 429
ctgctgacttacttattgttaggtg

SEQ ID NO: 258561 - DNA, 25 bp, Artificial
  probe
  misc_feature (1)..(25): SEQ ID NO: 219; WAN0249MX; Start 403; Stop 427
cactgctgacttacttattgttagg

SEQ ID NO: 258562 - DNA, 25 bp, Artificial
  probe
  misc_feature (1)..(25): SEQ ID NO: 219; WAN0249MX; Start 407; Stop 431
gctgacttacttattgttaggtgtt

SEQ ID NO: 258563 - DNA, 25 bp, Artificial
  probe
  misc_feature (1)..(25): SEQ ID NO: 219; WAN0249MX; Start 409; Stop 433
tgacttacttattgttaggtgttcc

SEQ ID NO: 258564 - DNA, 25 bp, Artificial
  probe
  misc_feature (1)..(25): SEQ ID NO: 219; WAN0249MX; Start 400; Stop 424
tctcactgctgacttacttattgtt

SEQ ID NO: 258565 - DNA, 25 bp, Artificial
  probe
  misc_feature (1)..(25): SEQ ID NO: 219; WAN0249MX; Start 399; Stop 423
atctcactgctgacttacttattgt

SEQ ID NO: 258566 - DNA, 25 bp, Artificial
  probe
  misc_feature (1)..(25): SEQ ID NO: 219; WAN0249MX; Start 395; Stop 419
ccatatctcactgctgacttactta

SEQ ID NO: 258567 - DNA, 25 bp, Artificial
  probe
  misc_feature (1)..(25): SEQ ID NO: 219; WAN0249MX; Start 402; Stop 426
tcactgctgacttacttattgttag

SEQ ID NO: 258568 - DNA, 25 bp, Artificial
  probe
  misc_feature (1)..(25): SEQ ID NO: 219; WAN0249MX; Start 401; Stop 425
ctcactgctgacttacttattgtta

SEQ ID NO: 258569 - DNA, 25 bp, Artificial
  probe
  misc_feature (1)..(25): SEQ ID NO: 219; WAN0249MX; Start 398; Stop 422
tatctcactgctgacttacttattg

SEQ ID NO: 258570 - DNA, 25 bp, Artificial
  probe
  misc_feature (1)..(25): SEQ ID NO: 219; WAN0249MX; Start 396; Stop 420
catatctcactgctgacttacttat

SEQ ID NO: 258571 - DNA, 25 bp, Artificial
  probe
  misc_feature (1)..(25): SEQ ID NO: 219; WAN0249MX; Start 91; Stop 115
tattacgagcgaagcgagtcttatc

SEQ ID NO: 258572 - DNA, 25 bp, Artificial
  probe
  misc_feature (1)..(25): SEQ ID NO: 219; WAN0249MX; Start 90; Stop 114
ctattacgagcgaagcgagtcttat

SEQ ID NO: 258573 - DNA, 25 bp, Artificial
  probe
  misc_feature (1)..(25): SEQ ID NO: 219; WAN0249MX; Start 408; Stop 432
ctgacttacttattgttaggtgttc

SEQ ID NO: 258574 - DNA, 25 bp, Artificial
  probe
  misc_feature (1)..(25): SEQ ID NO: 219; WAN0249MX; Start 120; Stop 144
atttcccgttgtagtggtatcatag

SEQ ID NO: 258575 - DNA, 25 bp, Artificial
  probe
  misc_feature (1)..(25): SEQ ID NO: 219; WAN0249MX; Start 394; Stop 418
gccatatctcactgctgacttactt

SEQ ID NO: 258576 - DNA, 25 bp, Artificial
  probe
  misc_feature (1)..(25): SEQ ID NO: 219; WAN0249MX; Start 118; Stop 142
atatttcccgttgtagtggtatcat

SEQ ID NO: 258577 - DNA, 25 bp, Artificial
  probe
  misc_feature (1)..(25): SEQ ID NO: 219; WAN0249MX; Start 119; Stop 143
tatttcccgttgtagtggtatcata

SEQ ID NO: 258578 - DNA, 25 bp, Artificial
  probe
  misc_feature (1)..(25): SEQ ID NO: 219; WAN0249MX; Start 455; Stop 479
gccaattcacgacataaacaagtaa

SEQ ID NO: 258579 - DNA, 25 bp, Artificial
  probe
  misc_feature (1)..(25): SEQ ID NO: 219; WAN0249MX; Start 121; Stop 145
tttcccgttgtagtggtatcataga

SEQ ID NO: 258580 - DNA, 25 bp, Artificial
  probe
  misc_feature (1)..(25): SEQ ID NO: 219; WAN0249MX; Start 208; Stop 232
tagcctaagcctagaaatgaaagag

SEQ ID NO: 258581 - DNA, 25 bp, Artificial
  probe
  misc_feature (1)..(25): SEQ ID NO: 219; WAN0249MX; Start 397; Stop 421
atatctcactgctgacttacttatt

SEQ ID NO: 258582 - DNA, 25 bp, Artificial
  probe
  misc_feature (1)..(25): SEQ ID NO: 219; WAN0249MX; Start 207; Stop 231
ttagcctaagcctagaaatgaaaga

SEQ ID NO: 258583 - DNA, 25 bp, Artificial
  probe
  misc_feature (1)..(25): SEQ ID NO: 219; WAN0249MX; Start 254; Stop 278
atgaaattccctggattcctgaaat

SEQ ID NO: 258584 - DNA, 25 bp, Artificial
  probe
  misc_feature (1)..(25): SEQ ID NO: 219; WAN0249MX; Start 97; Stop 121
gagcgaagcgagtcttatcaaatat

SEQ ID NO: 258585 - DNA, 25 bp, Artificial
  probe
  misc_feature (1)..(25): SEQ ID NO: 219; WAN0249MX; Start 454; Stop 478
tgccaattcacgacataaacaagta

SEQ ID NO: 258586 - DNA, 25 bp, Artificial
  probe
  misc_feature (1)..(25): SEQ ID NO: 219; WAN0249MX; Start 122; Stop 146
ttcccgttgtagtggtatcatagac

SEQ ID NO: 258587 - DNA, 25 bp, Artificial
  probe
  misc_feature (1)..(25): SEQ ID NO: 219; WAN0249MX; Start 253; Stop 277
gatgaaattccctggattcctgaaa

SEQ ID NO: 258588 - DNA, 25 bp, Artificial
  probe
  misc_feature (1)..(25): SEQ ID NO: 219; WAN0249MX; Start 206; Stop 230
tttagcctaagcctagaaatgaaag

SEQ ID NO: 258589 - DNA, 25 bp, Artificial
  probe
  misc_feature (1)..(25): SEQ ID NO: 219; WAN0249MX; Start 456; Stop 480
ccaattcacgacataaacaagtaaa

SEQ ID NO: 258590 - DNA, 25 bp, Artificial
  probe
  misc_feature (1)..(25): SEQ ID NO: 220; WAN0249TV; Start 102; Stop 126
atagtgaactgaatctggaatagga

SEQ ID NO: 258591 - DNA, 25 bp, Artificial
  probe
  misc_feature (1)..(25): SEQ ID NO: 220; WAN0249TV; Start 104; Stop 128
agtgaactgaatctggaataggata

SEQ ID NO: 258592 - DNA, 25 bp, Artificial
  probe
  misc_feature (1)..(25): SEQ ID NO: 220; WAN0249TV; Start 103; Stop 127
tagtgaactgaatctggaataggat

SEQ ID NO: 258593 - DNA, 25 bp, Artificial
  probe
  misc_feature (1)..(25): SEQ ID NO: 220; WAN0249TV; Start 105; Stop 129
gtgaactgaatctggaataggataa

SEQ ID NO: 258594 - DNA, 25 bp, Artificial
  probe
  misc_feature (1)..(25): SEQ ID NO: 220; WAN0249TV; Start 41; Stop 65
tggaatcacgaacctaattatgtac

SEQ ID NO: 258595 - DNA, 25 bp, Artificial
  probe
  misc_feature (1)..(25): SEQ ID NO: 220; WAN0249TV; Start 98; Stop 122
ttgtatagtgaactgaatctggaat

SEQ ID NO: 258596 - DNA, 25 bp, Artificial
  probe
  misc_feature (1)..(25): SEQ ID NO: 220; WAN0249TV; Start 97; Stop 121
attgtatagtgaactgaatctggaa

SEQ ID NO: 258597 - DNA, 25 bp, Artificial
  probe
  misc_feature (1)..(25): SEQ ID NO: 220; WAN0249TV; Start 96; Stop 120
aattgtatagtgaactgaatctgga

SEQ ID NO: 258598 - DNA, 25 bp, Artificial
  probe
  misc_feature (1)..(25): SEQ ID NO: 220; WAN0249TV; Start 101; Stop 125
tatagtgaactgaatctggaatagg

SEQ ID NO: 258599 - DNA, 25 bp, Artificial
  probe
  misc_feature (1)..(25): SEQ ID NO: 220; WAN0249TV; Start 176; Stop 200
ccatcgttccgttcttatttcattt

SEQ ID NO: 258600 - DNA, 25 bp, Artificial
  probe
  misc_feature (1)..(25): SEQ ID NO: 220; WAN0249TV; Start 106; Stop 130
tgaactgaatctggaataggataat

SEQ ID NO: 258601 - DNA, 25 bp, Artificial
  probe
  misc_feature (1)..(25): SEQ ID NO: 220; WAN0249TV; Start 99; Stop 123
tgtatagtgaactgaatctggaata

SEQ ID NO: 258602 - DNA, 25 bp, Artificial
  probe
  misc_feature (1)..(25): SEQ ID NO: 220; WAN0249TV; Start 40; Stop 64
gtggaatcacgaacctaattatgta

SEQ ID NO: 258603 - DNA, 25 bp, Artificial
  probe
  misc_feature (1)..(25): SEQ ID NO: 220; WAN0249TV; Start 172; Stop 196
aatcccatcgttccgttcttatttc

SEQ ID NO: 258604 - DNA, 25 bp, Artificial
  probe
  misc_feature (1)..(25): SEQ ID NO: 220; WAN0249TV; Start 39; Stop 63
ggtggaatcacgaacctaattatgt

SEQ ID NO: 258605 - DNA, 25 bp, Artificial
  probe
  misc_feature (1)..(25): SEQ ID NO: 220; WAN0249TV; Start 175; Stop 199
cccatcgttccgttcttatttcatt

SEQ ID NO: 258606 - DNA, 25 bp, Artificial
  probe
  misc_feature (1)..(25): SEQ ID NO: 220; WAN0249TV; Start 201; Stop 225
tgcgatatagtgaaaggaaataagt

SEQ ID NO: 258607 - DNA, 25 bp, Artificial
  probe
  misc_feature (1)..(25): SEQ ID NO: 220; WAN0249TV; Start 100; Stop 124
gtatagtgaactgaatctggaatag

SEQ ID NO: 258608 - DNA, 25 bp, Artificial
  probe
  misc_feature (1)..(25): SEQ ID NO: 220; WAN0249TV; Start 171; Stop 195
aaatcccatcgttccgttcttattt

SEQ ID NO: 258609 - DNA, 25 bp, Artificial
  probe
  misc_feature (1)..(25): SEQ ID NO: 220; WAN0249TV; Start 174; Stop 198
tcccatcgttccgttcttatttcat

SEQ ID NO: 258610 - DNA, 25 bp, Artificial
  probe
  misc_feature (1)..(25): SEQ ID NO: 220; WAN0249TV; Start 173; Stop 197
atcccatcgttccgttcttatttca

SEQ ID NO: 258611 - DNA, 25 bp, Artificial
  probe
  misc_feature (1)..(25): SEQ ID NO: 220; WAN0249TV; Start 202; Stop 226
gcgatatagtgaaaggaaataagtc

SEQ ID NO: 258612 - DNA, 25 bp, Artificial
  probe
  misc_feature (1)..(25): SEQ ID NO: 220; WAN0249TV; Start 212; Stop 236
gaaaggaaataagtcagctcacaaa

SEQ ID NO: 258613 - DNA, 25 bp, Artificial
  probe
  misc_feature (1)..(25): SEQ ID NO: 220; WAN0249TV; Start 200; Stop 224
ttgcgatatagtgaaaggaaataag

SEQ ID NO: 258614 - DNA, 25 bp, Artificial
  probe
  misc_feature (1)..(25): SEQ ID NO: 220; WAN0249TV; Start 208; Stop 232
tagtgaaaggaaataagtcagctca

SEQ ID NO: 258615 - DNA, 25 bp, Artificial
  probe
  misc_feature (1)..(25): SEQ ID NO: 220; WAN0249TV; Start 211; Stop 235
tgaaaggaaataagtcagctcacaa

SEQ ID NO: 258616 - DNA, 25 bp, Artificial
  probe
  misc_feature (1)..(25): SEQ ID NO: 220; WAN0249TV; Start 42; Stop 66
ggaatcacgaacctaattatgtaca

SEQ ID NO: 258617 - DNA, 25 bp, Artificial
  probe
  misc_feature (1)..(25): SEQ ID NO: 220; WAN0249TV; Start 207; Stop 231
atagtgaaaggaaataagtcagctc

SEQ ID NO: 258618 - DNA, 25 bp, Artificial
  probe
  misc_feature (1)..(25): SEQ ID NO: 220; WAN0249TV; Start 199; Stop 223
tttgcgatatagtgaaaggaaataa

SEQ ID NO: 258619 - DNA, 25 bp, Artificial
  probe
  misc_feature (1)..(25): SEQ ID NO: 220; WAN0249TV; Start 44; Stop 68
aatcacgaacctaattatgtacaca

SEQ ID NO: 258620 - DNA, 25 bp, Artificial
  probe
  misc_feature (1)..(25): SEQ ID NO: 220; WAN0249TV; Start 95; Stop 119
caattgtatagtgaactgaatctgg

SEQ ID NO: 258621 - DNA, 25 bp, Artificial
  probe
  misc_feature (1)..(25): SEQ ID NO: 220; WAN0249TV; Start 182; Stop 206
ttccgttcttatttcattttgcgat

SEQ ID NO: 258622 - DNA, 25 bp, Artificial
  probe
  misc_feature (1)..(25): SEQ ID NO: 220; WAN0249TV; Start 107; Stop 131
gaactgaatctggaataggataata

SEQ ID NO: 258623 - DNA, 25 bp, Artificial
  probe
  misc_feature (1)..(25): SEQ ID NO: 221; WAN0249WY; Start 20; Stop 44
tttatcttagcaaatttccctcaaa

SEQ ID NO: 258624 - DNA, 25 bp, Artificial
  probe
  misc_feature (1)..(25): SEQ ID NO: 221; WAN0249WY; Start 21; Stop 45
ttatcttagcaaatttccctcaaat

SEQ ID NO: 258625 - DNA, 25 bp, Artificial
  probe
  misc_feature (1)..(25): SEQ ID NO: 221; WAN0249WY; Start 19; Stop 43
atttatcttagcaaatttccctcaa

SEQ ID NO: 258626 - DNA, 25 bp, Artificial
  probe
  misc_feature (1)..(25): SEQ ID NO: 221; WAN0249WY; Start 26; Stop 50
ttagcaaatttccctcaaattagct

SEQ ID NO: 258627 - DNA, 25 bp, Artificial
  probe
  misc_feature (1)..(25): SEQ ID NO: 221; WAN0249WY; Start 25; Stop 49
cttagcaaatttccctcaaattagc

SEQ ID NO: 258628 - DNA, 25 bp, Artificial
  probe
  misc_feature (1)..(25): SEQ ID NO: 221; WAN0249WY; Start 34; Stop 58
tttccctcaaattagctagtagcat

SEQ ID NO: 258629 - DNA, 25 bp, Artificial
  probe
  misc_feature (1)..(25): SEQ ID NO: 221; WAN0249WY; Start 33; Stop 57
atttccctcaaattagctagtagca

SEQ ID NO: 258630 - DNA, 25 bp, Artificial
  probe
  misc_feature (1)..(25): SEQ ID NO: 221; WAN0249WY; Start 36; Stop 60
tccctcaaattagctagtagcatag

SEQ ID NO: 258631 - DNA, 25 bp, Artificial
  probe
  misc_feature (1)..(25): SEQ ID NO: 221; WAN0249WY; Start 35; Stop 59
ttccctcaaattagctagtagcata

SEQ ID NO: 258632 - DNA, 25 bp, Artificial
  probe
  misc_feature (1)..(25): SEQ ID NO: 221; WAN0249WY; Start 18; Stop 42
tatttatcttagcaaatttccctca

SEQ ID NO: 258633 - DNA, 25 bp, Artificial
  probe
  misc_feature (1)..(25): SEQ ID NO: 221; WAN0249WY; Start 29; Stop 53
gcaaatttccctcaaattagctagt

SEQ ID NO: 258634 - DNA, 25 bp, Artificial
  probe
  misc_feature (1)..(25): SEQ ID NO: 221; WAN0249WY; Start 24; Stop 48
tcttagcaaatttccctcaaattag

SEQ ID NO: 258635 - DNA, 25 bp, Artificial
  probe
  misc_feature (1)..(25): SEQ ID NO: 221; WAN0249WY; Start 28; Stop 52
agcaaatttccctcaaattagctag

SEQ ID NO: 258636 - DNA, 25 bp, Artificial
  probe
  misc_feature (1)..(25): SEQ ID NO: 221; WAN0249WY; Start 32; Stop 56
aatttccctcaaattagctagtagc

SEQ ID NO: 258637 - DNA, 25 bp, Artificial
  probe
  misc_feature (1)..(25): SEQ ID NO: 221; WAN0249WY; Start 39; Stop 63
ctcaaattagctagtagcatagcct

SEQ ID NO: 258638 - DNA, 25 bp, Artificial
  probe
  misc_feature (1)..(25): SEQ ID NO: 221; WAN0249WY; Start 40; Stop 64
tcaaattagctagtagcatagcctg

SEQ ID NO: 258639 - DNA, 25 bp, Artificial
  probe
  misc_feature (1)..(25): SEQ ID NO: 221; WAN0249WY; Start 23; Stop 47
atcttagcaaatttccctcaaatta

SEQ ID NO: 258640 - DNA, 25 bp, Artificial
  probe
  misc_feature (1)..(25): SEQ ID NO: 221; WAN0249WY; Start 22; Stop 46
tatcttagcaaatttccctcaaatt

SEQ ID NO: 258641 - DNA, 25 bp, Artificial
  probe
  misc_feature (1)..(25): SEQ ID NO: 221; WAN0249WY; Start 41; Stop 65
caaattagctagtagcatagcctgt

SEQ ID NO: 258642 - DNA, 25 bp, Artificial
  probe
  misc_feature (1)..(25): SEQ ID NO: 221; WAN0249WY; Start 38; Stop 62
cctcaaattagctagtagcatagcc

SEQ ID NO: 258643 - DNA, 25 bp, Artificial
  probe
  misc_feature (1)..(25): SEQ ID NO: 221; WAN0249WY; Start 37; Stop 61
ccctcaaattagctagtagcatagc

SEQ ID NO: 258644 - DNA, 25 bp, Artificial
  probe
  misc_feature (1)..(25): SEQ ID NO: 221; WAN0249WY; Start 27; Stop 51
tagcaaatttccctcaaattagcta

SEQ ID NO: 258645 - DNA, 25 bp, Artificial
  probe
  misc_feature (1)..(25): SEQ ID NO: 221; WAN0249WY; Start 17; Stop 41
ttatttatcttagcaaatttccctc

SEQ ID NO: 258646 - DNA, 25 bp, Artificial
  probe
  misc_feature (1)..(25): SEQ ID NO: 221; WAN0249WY; Start 30; Stop 54
caaatttccctcaaattagctagta

SEQ ID NO: 258647 - DNA, 25 bp, Artificial
  probe
  misc_feature (1)..(25): SEQ ID NO: 221; WAN0249WY; Start 31; Stop 55
aaatttccctcaaattagctagtag

SEQ ID NO: 258648 - DNA, 25 bp, Artificial
  probe
  misc_feature (1)..(25): SEQ ID NO: 222; WAN024AHN; Start 1; Stop 25
aagagtcagtataattctggctttt

SEQ ID NO: 258649 - DNA, 25 bp, Artificial
  probe
  misc_feature (1)..(25): SEQ ID NO: 224; WAN0249D5; Start 6; Stop 30
ttcctcctcttcataagtctatcct

SEQ ID NO: 258650 - DNA, 25 bp, Artificial
  probe
  misc_feature (1)..(25): SEQ ID NO: 224; WAN0249D5; Start 5; Stop 29
gttcctcctcttcataagtctatcc

SEQ ID NO: 258651 - DNA, 25 bp, Artificial
  probe
  misc_feature (1)..(25): SEQ ID NO: 224; WAN0249D5; Start 7; Stop 31
tcctcctcttcataagtctatccta

SEQ ID NO: 258652 - DNA, 25 bp, Artificial
  probe
  misc_feature (1)..(25): SEQ ID NO: 224; WAN0249D5; Start 4; Stop 28
agttcctcctcttcataagtctatc

SEQ ID NO: 258653 - DNA, 25 bp, Artificial
  probe
  misc_feature (1)..(25): SEQ ID NO: 224; WAN0249D5; Start 3; Stop 27
gagttcctcctcttcataagtctat

SEQ ID NO: 258654 - DNA, 25 bp, Artificial
  probe
  misc_feature (1)..(25): SEQ ID NO: 224; WAN0249D5; Start 8; Stop 32
cctcctcttcataagtctatcctat

SEQ ID NO: 258655 - DNA, 25 bp, Artificial
  probe
  misc_feature (1)..(25): SEQ ID NO: 224; WAN0249D5; Start 11; Stop 35
cctcttcataagtctatcctatcac

SEQ ID NO: 258656 - DNA, 25 bp, Artificial
  probe
  misc_feature (1)..(25): SEQ ID NO: 224; WAN0249D5; Start 10; Stop 34
tcctcttcataagtctatcctatca

SEQ ID NO: 258657 - DNA, 25 bp, Artificial
  probe
  misc_feature (1)..(25): SEQ ID NO: 224; WAN0249D5; Start 9; Stop 33
ctcctcttcataagtctatcctatc

SEQ ID NO: 258658 - DNA, 25 bp, Artificial
  probe
  misc_feature (1)..(25): SEQ ID NO: 224; WAN0249D5; Start 12; Stop 36
ctcttcataagtctatcctatcaca

SEQ ID NO: 258659 - DNA, 25 bp, Artificial
  probe
  misc_feature (1)..(25): SEQ ID NO: 224; WAN0249D5; Start 13; Stop 37
tcttcataagtctatcctatcacaa

SEQ ID NO: 258660 - DNA, 25 bp, Artificial
  probe
  misc_feature (1)..(25): SEQ ID NO: 224; WAN0249D5; Start 2; Stop 26
agagttcctcctcttcataagtcta

SEQ ID NO: 258661 - DNA, 25 bp, Artificial
  probe
  misc_feature (1)..(25): SEQ ID NO: 224; WAN0249D5; Start 14; Stop 38
cttcataagtctatcctatcacaaa

SEQ ID NO: 258662 - DNA, 25 bp, Artificial
  probe
  misc_feature (1)..(25): SEQ ID NO: 224; WAN0249D5; Start 15; Stop 39
ttcataagtctatcctatcacaaaa

SEQ ID NO: 258663 - DNA, 25 bp, Artificial
  probe
  misc_feature (1)..(25): SEQ ID NO: 225; WAN024ACF; Start 22; Stop 46
gtcacttatggatgtaggagttctt

SEQ ID NO: 258664 - DNA, 25 bp, Artificial
  probe
  misc_feature (1)..(25): SEQ ID NO: 225; WAN024ACF; Start 20; Stop 44
atgtcacttatggatgtaggagttc

SEQ ID NO: 258665 - DNA, 25 bp, Artificial
  probe
  misc_feature (1)..(25): SEQ ID NO: 225; WAN024ACF; Start 21; Stop 45
tgtcacttatggatgtaggagttct

SEQ ID NO: 258666 - DNA, 25 bp, Artificial
  probe
  misc_feature (1)..(25): SEQ ID NO: 225; WAN024ACF; Start 18; Stop 42
ctatgtcacttatggatgtaggagt

SEQ ID NO: 258667 - DNA, 25 bp, Artificial
  probe
  misc_feature (1)..(25): SEQ ID NO: 225; WAN024ACF; Start 19; Stop 43
tatgtcacttatggatgtaggagtt

SEQ ID NO: 258668 - DNA, 25 bp, Artificial
  probe
  misc_feature (1)..(25): SEQ ID NO: 225; WAN024ACF; Start 14; Stop 38
actcctatgtcacttatggatgtag

SEQ ID NO: 258669 - DNA, 25 bp, Artificial
  probe
  misc_feature (1)..(25): SEQ ID NO: 225; WAN024ACF; Start 13; Stop 37
aactcctatgtcacttatggatgta

SEQ ID NO: 258670 - DNA, 25 bp, Artificial
  probe
  misc_feature (1)..(25): SEQ ID NO: 225; WAN024ACF; Start 7; Stop 31
agcctaaactcctatgtcacttatg

SEQ ID NO: 258671 - DNA, 25 bp, Artificial
  probe
  misc_feature (1)..(25): SEQ ID NO: 225; WAN024ACF; Start 3; Stop 27
gataagcctaaactcctatgtcact

SEQ ID NO: 258672 - DNA, 25 bp, Artificial
  probe
  misc_feature (1)..(25): SEQ ID NO: 225; WAN024ACF; Start 2; Stop 26
agataagcctaaactcctatgtcac

SEQ ID NO: 258673 - DNA, 25 bp, Artificial
  probe
  misc_feature (1)..(25): SEQ ID NO: 225; WAN024ACF; Start 8; Stop 32
gcctaaactcctatgtcacttatgg

SEQ ID NO: 258674 - DNA, 25 bp, Artificial
  probe
  misc_feature (1)..(25): SEQ ID NO: 225; WAN024ACF; Start 1; Stop 25
aagataagcctaaactcctatgtca

SEQ ID NO: 258675 - DNA, 25 bp, Artificial
  probe
  misc_feature (1)..(25): SEQ ID NO: 225; WAN024ACF; Start 6; Stop 30
aagcctaaactcctatgtcacttat

SEQ ID NO: 258676 - DNA, 25 bp, Artificial
  probe
  misc_feature (1)..(25): SEQ ID NO: 225; WAN024ACF; Start 4; Stop 28
ataagcctaaactcctatgtcactt

SEQ ID NO: 258677 - DNA, 25 bp, Artificial
  probe
  misc_feature (1)..(25): SEQ ID NO: 225; WAN024ACF; Start 23; Stop 47
tcacttatggatgtaggagttcttt

SEQ ID NO: 258678 - DNA, 25 bp, Artificial
  probe
  misc_feature (1)..(25): SEQ ID NO: 225; WAN024ACF; Start 120; Stop 144
ggagagagatggaagttactttgag

SEQ ID NO: 258679 - DNA, 25 bp, Artificial
  probe
  misc_feature (1)..(25): SEQ ID NO: 225; WAN024ACF; Start 121; Stop 145
gagagagatggaagttactttgaga

SEQ ID NO: 258680 - DNA, 25 bp, Artificial
  probe
  misc_feature (1)..(25): SEQ ID NO: 225; WAN024ACF; Start 122; Stop 146
agagagatggaagttactttgagaa

SEQ ID NO: 258681 - DNA, 25 bp, Artificial
  probe
  misc_feature (1)..(25): SEQ ID NO: 225; WAN024ACF; Start 123; Stop 147
gagagatggaagttactttgagaag

SEQ ID NO: 258682 - DNA, 25 bp, Artificial
  probe
  misc_feature (1)..(25): SEQ ID NO: 225; WAN024ACF; Start 17; Stop 41
cctatgtcacttatggatgtaggag

SEQ ID NO: 258683 - DNA, 25 bp, Artificial
  probe
  misc_feature (1)..(25): SEQ ID NO: 225; WAN024ACF; Start 15; Stop 39
ctcctatgtcacttatggatgtagg

SEQ ID NO: 258684 - DNA, 25 bp, Artificial
  probe
  misc_feature (1)..(25): SEQ ID NO: 225; WAN024ACF; Start 5; Stop 29
taagcctaaactcctatgtcactta

SEQ ID NO: 258685 - DNA, 25 bp, Artificial
  probe
  misc_feature (1)..(25): SEQ ID NO: 225; WAN024ACF; Start 12; Stop 36
aaactcctatgtcacttatggatgt

SEQ ID NO: 258686 - DNA, 25 bp, Artificial
  probe
  misc_feature (1)..(25): SEQ ID NO: 225; WAN024ACF; Start 9; Stop 33
cctaaactcctatgtcacttatgga

SEQ ID NO: 258687 - DNA, 25 bp, Artificial
  probe
  misc_feature (1)..(25): SEQ ID NO: 225; WAN024ACF; Start 11; Stop 35
taaactcctatgtcacttatggatg

SEQ ID NO: 258688 - DNA, 25 bp, Artificial
  probe
  misc_feature (1)..(25): SEQ ID NO: 225; WAN024ACF; Start 90; Stop 114
agcaacttctaaaactaacttccag

SEQ ID NO: 258689 - DNA, 25 bp, Artificial
  probe
  misc_feature (1)..(25): SEQ ID NO: 225; WAN024ACF; Start 10; Stop 34
ctaaactcctatgtcacttatggat

SEQ ID NO: 258690 - DNA, 25 bp, Artificial
  probe
  misc_feature (1)..(25): SEQ ID NO: 225; WAN024ACF; Start 130; Stop 154
ggaagttactttgagaagttacggt

SEQ ID NO: 258691 - DNA, 25 bp, Artificial
  probe
  misc_feature (1)..(25): SEQ ID NO: 225; WAN024ACF; Start 129; Stop 153
tggaagttactttgagaagttacgg

SEQ ID NO: 258692 - DNA, 25 bp, Artificial
  probe
  misc_feature (1)..(25): SEQ ID NO: 225; WAN024ACF; Start 124; Stop 148
agagatggaagttactttgagaagt

SEQ ID NO: 258693 - DNA, 25 bp, Artificial
  probe
  misc_feature (1)..(25): SEQ ID NO: 225; WAN024ACF; Start 128; Stop 152
atggaagttactttgagaagttacg

SEQ ID NO: 258694 - DNA, 25 bp, Artificial
  probe
  misc_feature (1)..(25): SEQ ID NO: 225; WAN024ACF; Start 91; Stop 115
gcaacttctaaaactaacttccagt

SEQ ID NO: 258695 - DNA, 25 bp, Artificial
  probe
  misc_feature (1)..(25): SEQ ID NO: 225; WAN024ACF; Start 125; Stop 149
gagatggaagttactttgagaagtt

SEQ ID NO: 258696 - DNA, 25 bp, Artificial
  probe
  misc_feature (1)..(25): SEQ ID NO: 226; WAN024APJ; Start 119; Stop 143
agtttatcacacttccaatcacttg

SEQ ID NO: 258697 - DNA, 25 bp, Artificial
  probe
  misc_feature (1)..(25): SEQ ID NO: 226; WAN024APJ; Start 118; Stop 142
tagtttatcacacttccaatcactt

SEQ ID NO: 258698 - DNA, 25 bp, Artificial
  probe
  misc_feature (1)..(25): SEQ ID NO: 226; WAN024APJ; Start 117; Stop 141
ttagtttatcacacttccaatcact

SEQ ID NO: 258699 - DNA, 25 bp, Artificial
  probe
  misc_feature (1)..(25): SEQ ID NO: 226; WAN024APJ; Start 116; Stop 140
attagtttatcacacttccaatcac

SEQ ID NO: 258700 - DNA, 25 bp, Artificial
  probe
  misc_feature (1)..(25): SEQ ID NO: 226; WAN024APJ; Start 55; Stop 79
tcctgattcctaagtttatctaaga

SEQ ID NO: 258701 - DNA, 25 bp, Artificial
  probe
  misc_feature (1)..(25): SEQ ID NO: 226; WAN024APJ; Start 115; Stop 139
tattagtttatcacacttccaatca

SEQ ID NO: 258702 - DNA, 25 bp, Artificial
  probe
  misc_feature (1)..(25): SEQ ID NO: 226; WAN024APJ; Start 54; Stop 78
atcctgattcctaagtttatctaag

SEQ ID NO: 258703 - DNA, 25 bp, Artificial
  probe
  misc_feature (1)..(25): SEQ ID NO: 226; WAN024APJ; Start 89; Stop 113
attctctcataagattttcgttgtt

SEQ ID NO: 258704 - DNA, 25 bp, Artificial
  probe
  misc_feature (1)..(25): SEQ ID NO: 226; WAN024APJ; Start 56; Stop 80
cctgattcctaagtttatctaagat

SEQ ID NO: 258705 - DNA, 25 bp, Artificial
  probe
  misc_feature (1)..(25): SEQ ID NO: 226; WAN024APJ; Start 90; Stop 114
ttctctcataagattttcgttgtta

SEQ ID NO: 258706 - DNA, 25 bp, Artificial
  probe
  misc_feature (1)..(25): SEQ ID NO: 226; WAN024APJ; Start 84; Stop 108
gctttattctctcataagattttcg

SEQ ID NO: 258707 - DNA, 25 bp, Artificial
  probe
  misc_feature (1)..(25): SEQ ID NO: 226; WAN024APJ; Start 107; Stop 131
cgttgttatattagtttatcacact

SEQ ID NO: 258708 - DNA, 25 bp, Artificial
  probe
  misc_feature (1)..(25): SEQ ID NO: 226; WAN024APJ; Start 106; Stop 130
tcgttgttatattagtttatcacac

SEQ ID NO: 258709 - DNA, 25 bp, Artificial
  probe
  misc_feature (1)..(25): SEQ ID NO: 226; WAN024APJ; Start 53; Stop 77
aatcctgattcctaagtttatctaa

SEQ ID NO: 258710 - DNA, 25 bp, Artificial
  probe
  misc_feature (1)..(25): SEQ ID NO: 226; WAN024APJ; Start 52; Stop 76
aaatcctgattcctaagtttatcta

SEQ ID NO: 258711 - DNA, 25 bp, Artificial
  probe
  misc_feature (1)..(25): SEQ ID NO: 226; WAN024APJ; Start 91; Stop 115
tctctcataagattttcgttgttat

SEQ ID NO: 258712 - DNA, 25 bp, Artificial
  probe
  misc_feature (1)..(25): SEQ ID NO: 226; WAN024APJ; Start 88; Stop 112
tattctctcataagattttcgttgt

SEQ ID NO: 258713 - DNA, 25 bp, Artificial
  probe
  misc_feature (1)..(25): SEQ ID NO: 226; WAN024APJ; Start 51; Stop 75
aaaatcctgattcctaagtttatct

SEQ ID NO: 258714 - DNA, 25 bp, Artificial
  probe
  misc_feature (1)..(25): SEQ ID NO: 226; WAN024APJ; Start 6; Stop 30
acctcttttcttattattgacacta

SEQ ID NO: 258715 - DNA, 25 bp, Artificial
  probe
  misc_feature (1)..(25): SEQ ID NO: 226; WAN024APJ; Start 5; Stop 29
tacctcttttcttattattgacact

SEQ ID NO: 258716 - DNA, 25 bp, Artificial
  probe
  misc_feature (1)..(25): SEQ ID NO: 226; WAN024APJ; Start 87; Stop 111
ttattctctcataagattttcgttg

SEQ ID NO: 258717 - DNA, 25 bp, Artificial
  probe
  misc_feature (1)..(25): SEQ ID NO: 226; WAN024APJ; Start 85; Stop 109
ctttattctctcataagattttcgt

SEQ ID NO: 258718 - DNA, 25 bp, Artificial
  probe
  misc_feature (1)..(25): SEQ ID NO: 226; WAN024APJ; Start 92; Stop 116
ctctcataagattttcgttgttata

SEQ ID NO: 258719 - DNA, 25 bp, Artificial
  probe
  misc_feature (1)..(25): SEQ ID NO: 226; WAN024APJ; Start 83; Stop 107
agctttattctctcataagattttc

SEQ ID NO: 258720 - DNA, 25 bp, Artificial
  probe
  misc_feature (1)..(25): SEQ ID NO: 226; WAN024APJ; Start 45; Stop 69
tcttataaaatcctgattcctaagt

SEQ ID NO: 258721 - DNA, 25 bp, Artificial
  probe
  misc_feature (1)..(25): SEQ ID NO: 227; WAN0249OO; Start 52; Stop 76
ttgatagaaaggtaaagggctagtg

SEQ ID NO: 258722 - DNA, 25 bp, Artificial
  probe
  misc_feature (1)..(25): SEQ ID NO: 227; WAN0249OO; Start 19; Stop 43
gtcaactgggtttctttgcttattt

SEQ ID NO: 258723 - DNA, 25 bp, Artificial
  probe
  misc_feature (1)..(25): SEQ ID NO: 227; WAN0249OO; Start 17; Stop 41
tagtcaactgggtttctttgcttat

SEQ ID NO: 258724 - DNA, 25 bp, Artificial
  probe
  misc_feature (1)..(25): SEQ ID NO: 227; WAN0249OO; Start 51; Stop 75
attgatagaaaggtaaagggctagt

SEQ ID NO: 258725 - DNA, 25 bp, Artificial
  probe
  misc_feature (1)..(25): SEQ ID NO: 227; WAN0249OO; Start 18; Stop 42
agtcaactgggtttctttgcttatt

SEQ ID NO: 258726 - DNA, 25 bp, Artificial
  probe
  misc_feature (1)..(25): SEQ ID NO: 227; WAN0249OO; Start 16; Stop 40
gtagtcaactgggtttctttgctta

SEQ ID NO: 258727 - DNA, 25 bp, Artificial
  probe
  misc_feature (1)..(25): SEQ ID NO: 227; WAN0249OO; Start 54; Stop 78
gatagaaaggtaaagggctagtggt

SEQ ID NO: 258728 - DNA, 25 bp, Artificial
  probe
  misc_feature (1)..(25): SEQ ID NO: 227; WAN0249OO; Start 53; Stop 77
tgatagaaaggtaaagggctagtgg

SEQ ID NO: 258729 - DNA, 25 bp, Artificial
  probe
  misc_feature (1)..(25): SEQ ID NO: 227; WAN0249OO; Start 55; Stop 79
atagaaaggtaaagggctagtggtg

SEQ ID NO: 258730 - DNA, 25 bp, Artificial
  probe
  misc_feature (1)..(25): SEQ ID NO: 227; WAN0249OO; Start 50; Stop 74
aattgatagaaaggtaaagggctag

SEQ ID NO: 258731 - DNA, 25 bp, Artificial
  probe
  misc_feature (1)..(25): SEQ ID NO: 227; WAN0249OO; Start 49; Stop 73
aaattgatagaaaggtaaagggcta

SEQ ID NO: 258732 - DNA, 25 bp, Artificial
  probe
  misc_feature (1)..(25): SEQ ID NO: 227; WAN0249OO; Start 59; Stop 83
aaaggtaaagggctagtggtgttta

SEQ ID NO: 258733 - DNA, 25 bp, Artificial
  probe
  misc_feature (1)..(25): SEQ ID NO: 227; WAN0249OO; Start 15; Stop 39
tgtagtcaactgggtttctttgctt

SEQ ID NO: 258734 - DNA, 25 bp, Artificial
  probe
  misc_feature (1)..(25): SEQ ID NO: 227; WAN0249OO; Start 14; Stop 38
ttgtagtcaactgggtttctttgct

SEQ ID NO: 258735 - DNA, 25 bp, Artificial
  probe
  misc_feature (1)..(25): SEQ ID NO: 227; WAN0249OO; Start 56; Stop 80
tagaaaggtaaagggctagtggtgt

SEQ ID NO: 258736 - DNA, 25 bp, Artificial
  probe
  misc_feature (1)..(25): SEQ ID NO: 227; WAN0249OO; Start 58; Stop 82
gaaaggtaaagggctagtggtgttt

SEQ ID NO: 258737 - DNA, 25 bp, Artificial
  probe
  misc_feature (1)..(25): SEQ ID NO: 227; WAN0249OO; Start 20; Stop 44
tcaactgggtttctttgcttatttt

SEQ ID NO: 258738 - DNA, 25 bp, Artificial
  probe
  misc_feature (1)..(25): SEQ ID NO: 227; WAN0249OO; Start 48; Stop 72
aaaattgatagaaaggtaaagggct

SEQ ID NO: 258739 - DNA, 25 bp, Artificial
  probe
  misc_feature (1)..(25): SEQ ID NO: 227; WAN0249OO; Start 23; Stop 47
actgggtttctttgcttattttaga

SEQ ID NO: 258740 - DNA, 25 bp, Artificial
  probe
  misc_feature (1)..(25): SEQ ID NO: 227; WAN0249OO; Start 57; Stop 81
agaaaggtaaagggctagtggtgtt

SEQ ID NO: 258741 - DNA, 25 bp, Artificial
  probe
  misc_feature (1)..(25): SEQ ID NO: 227; WAN0249OO; Start 21; Stop 45
caactgggtttctttgcttatttta

SEQ ID NO: 258742 - DNA, 25 bp, Artificial
  probe
  misc_feature (1)..(25): SEQ ID NO: 227; WAN0249OO; Start 22; Stop 46
aactgggtttctttgcttattttag

SEQ ID NO: 258743 - DNA, 25 bp, Artificial
  probe
  misc_feature (1)..(25): SEQ ID NO: 227; WAN0249OO; Start 24; Stop 48
ctgggtttctttgcttattttagaa

SEQ ID NO: 258744 - DNA, 25 bp, Artificial
  probe
  misc_feature (1)..(25): SEQ ID NO: 227; WAN0249OO; Start 78; Stop 102
tgtttaccatggagctcttagtatc

SEQ ID NO: 258745 - DNA, 25 bp, Artificial
  probe
  misc_feature (1)..(25): SEQ ID NO: 227; WAN0249OO; Start 77; Stop 101
gtgtttaccatggagctcttagtat

SEQ ID NO: 258746 - DNA, 25 bp, Artificial
  probe
  misc_feature (1)..(25): SEQ ID NO: 227; WAN0249OO; Start 60; Stop 84
aaggtaaagggctagtggtgtttac

SEQ ID NO: 258747 - DNA, 25 bp, Artificial
  probe
  misc_feature (1)..(25): SEQ ID NO: 227; WAN0249OO; Start 13; Stop 37
gttgtagtcaactgggtttctttgc

SEQ ID NO: 258748 - DNA, 25 bp, Artificial
  probe
  misc_feature (1)..(25): SEQ ID NO: 227; WAN0249OO; Start 63; Stop 87
gtaaagggctagtggtgtttaccat

SEQ ID NO: 258749 - DNA, 25 bp, Artificial
  probe
  misc_feature (1)..(25): SEQ ID NO: 227; WAN0249OO; Start 64; Stop 88
taaagggctagtggtgtttaccatg

SEQ ID NO: 258750 - DNA, 25 bp, Artificial
  probe
  misc_feature (1)..(25): SEQ ID NO: 227; WAN0249OO; Start 76; Stop 100
ggtgtttaccatggagctcttagta

SEQ ID NO: 258751 - DNA, 25 bp, Artificial
  probe
  misc_feature (1)..(25): SEQ ID NO: 227; WAN0249OO; Start 25; Stop 49
tgggtttctttgcttattttagaaa

SEQ ID NO: 258752 - DNA, 25 bp, Artificial
  probe
  misc_feature (1)..(25): SEQ ID NO: 227; WAN0249OO; Start 26; Stop 50
gggtttctttgcttattttagaaaa

SEQ ID NO: 258753 - DNA, 25 bp, Artificial
  probe
  misc_feature (1)..(25): SEQ ID NO: 227; WAN0249OO; Start 74; Stop 98
gtggtgtttaccatggagctcttag

SEQ ID NO: 258754 - DNA, 25 bp, Artificial
  probe
  misc_feature (1)..(25): SEQ ID NO: 228; WAN0249U5; Start 238; Stop 262
aggctcattccctatttcaacattt

SEQ ID NO: 258755 - DNA, 25 bp, Artificial
  probe
  misc_feature (1)..(25): SEQ ID NO: 228; WAN0249U5; Start 237; Stop 261
aaggctcattccctatttcaacatt

SEQ ID NO: 258756 - DNA, 25 bp, Artificial
  probe
  misc_feature (1)..(25): SEQ ID NO: 228; WAN0249U5; Start 236; Stop 260
aaaggctcattccctatttcaacat

SEQ ID NO: 258757 - DNA, 25 bp, Artificial
  probe
  misc_feature (1)..(25): SEQ ID NO: 228; WAN0249U5; Start 234; Stop 258
tcaaaggctcattccctatttcaac

SEQ ID NO: 258758 - DNA, 25 bp, Artificial
  probe
  misc_feature (1)..(25): SEQ ID NO: 228; WAN0249U5; Start 233; Stop 257
gtcaaaggctcattccctatttcaa

SEQ ID NO: 258759 - DNA, 25 bp, Artificial
  probe
  misc_feature (1)..(25): SEQ ID NO: 228; WAN0249U5; Start 231; Stop 255
gagtcaaaggctcattccctatttc

SEQ ID NO: 258760 - DNA, 25 bp, Artificial
  probe
  misc_feature (1)..(25): SEQ ID NO: 228; WAN0249U5; Start 235; Stop 259
caaaggctcattccctatttcaaca

SEQ ID NO: 258761 - DNA, 25 bp, Artificial
  probe
  misc_feature (1)..(25): SEQ ID NO: 228; WAN0249U5; Start 232; Stop 256
agtcaaaggctcattccctatttca

SEQ ID NO: 258762 - DNA, 25 bp, Artificial
  probe
  misc_feature (1)..(25): SEQ ID NO: 228; WAN0249U5; Start 239; Stop 263
ggctcattccctatttcaacatttt

SEQ ID NO: 258763 - DNA, 25 bp, Artificial
  probe
  misc_feature (1)..(25): SEQ ID NO: 228; WAN0249U5; Start 10; Stop 34
tctttctatttataattccgagggt

SEQ ID NO: 258764 - DNA, 25 bp, Artificial
  probe
  misc_feature (1)..(25): SEQ ID NO: 228; WAN0249U5; Start 215; Stop 239
tatcgaaacagggagtgagtcaaag

SEQ ID NO: 258765 - DNA, 25 bp, Artificial
  probe
  misc_feature (1)..(25): SEQ ID NO: 228; WAN0249U5; Start 11; Stop 35
ctttctatttataattccgagggtt

SEQ ID NO: 258766 - DNA, 25 bp, Artificial
  probe
  misc_feature (1)..(25): SEQ ID NO: 228; WAN0249U5; Start 9; Stop 33
ctctttctatttataattccgaggg

SEQ ID NO: 258767 - DNA, 25 bp, Artificial
  probe
  misc_feature (1)..(25): SEQ ID NO: 228; WAN0249U5; Start 12; Stop 36
tttctatttataattccgagggttt

SEQ ID NO: 258768 - DNA, 25 bp, Artificial
  probe
  misc_feature (1)..(25): SEQ ID NO: 228; WAN0249U5; Start 8; Stop 32
actctttctatttataattccgagg

SEQ ID NO: 258769 - DNA, 25 bp, Artificial
  probe
  misc_feature (1)..(25): SEQ ID NO: 228; WAN0249U5; Start 15; Stop 39
ctatttataattccgagggttttcc

SEQ ID NO: 258770 - DNA, 25 bp, Artificial
  probe
  misc_feature (1)..(25): SEQ ID NO: 228; WAN0249U5; Start 230; Stop 254
tgagtcaaaggctcattccctattt

SEQ ID NO: 258771 - DNA, 25 bp, Artificial
  probe
  misc_feature (1)..(25): SEQ ID NO: 228; WAN0249U5; Start 6; Stop 30
tcactctttctatttataattccga

SEQ ID NO: 258772 - DNA, 25 bp, Artificial
  probe
  misc_feature (1)..(25): SEQ ID NO: 228; WAN0249U5; Start 229; Stop 253
gtgagtcaaaggctcattccctatt

SEQ ID NO: 258773 - DNA, 25 bp, Artificial
  probe
  misc_feature (1)..(25): SEQ ID NO: 228; WAN0249U5; Start 216; Stop 240
atcgaaacagggagtgagtcaaagg

SEQ ID NO: 258774 - DNA, 25 bp, Artificial
  probe
  misc_feature (1)..(25): SEQ ID NO: 228; WAN0249U5; Start 14; Stop 38
tctatttataattccgagggttttc

SEQ ID NO: 258775 - DNA, 25 bp, Artificial
  probe
  misc_feature (1)..(25): SEQ ID NO: 228; WAN0249U5; Start 7; Stop 31
cactctttctatttataattccgag

SEQ ID NO: 258776 - DNA, 25 bp, Artificial
  probe
  misc_feature (1)..(25): SEQ ID NO: 228; WAN0249U5; Start 16; Stop 40
tatttataattccgagggttttccc

SEQ ID NO: 258777 - DNA, 25 bp, Artificial
  probe
  misc_feature (1)..(25): SEQ ID NO: 228; WAN0249U5; Start 228; Stop 252
agtgagtcaaaggctcattccctat

SEQ ID NO: 258778 - DNA, 25 bp, Artificial
  probe
  misc_feature (1)..(25): SEQ ID NO: 228; WAN0249U5; Start 5; Stop 29
ttcactctttctatttataattccg

SEQ ID NO: 258779 - DNA, 25 bp, Artificial
  probe
  misc_feature (1)..(25): SEQ ID NO: 228; WAN0249U5; Start 13; Stop 37
ttctatttataattccgagggtttt

SEQ ID NO: 258780 - DNA, 25 bp, Artificial
  probe
  misc_feature (1)..(25): SEQ ID NO: 228; WAN0249U5; Start 227; Stop 251
gagtgagtcaaaggctcattcccta

SEQ ID NO: 258781 - DNA, 25 bp, Artificial
  probe
  misc_feature (1)..(25): SEQ ID NO: 228; WAN0249U5; Start 223; Stop 247
cagggagtgagtcaaaggctcattc

SEQ ID NO: 258782 - DNA, 25 bp, Artificial
  probe
  misc_feature (1)..(25): SEQ ID NO: 230; WAN0249UI; Start 366; Stop 390
tatgttcaatgattcctaccgtctc

SEQ ID NO: 258783 - DNA, 25 bp, Artificial
  probe
  misc_feature (1)..(25): SEQ ID NO: 230; WAN0249UI; Start 365; Stop 389
ttatgttcaatgattcctaccgtct

SEQ ID NO: 258784 - DNA, 25 bp, Artificial
  probe
  misc_feature (1)..(25): SEQ ID NO: 230; WAN0249UI; Start 364; Stop 388
gttatgttcaatgattcctaccgtc

SEQ ID NO: 258785 - DNA, 25 bp, Artificial
  probe
  misc_feature (1)..(25): SEQ ID NO: 230; WAN0249UI; Start 348; Stop 372
gattgatgttggctaggttatgttc

SEQ ID NO: 258786 - DNA, 25 bp, Artificial
  probe
  misc_feature (1)..(25): SEQ ID NO: 230; WAN0249UI; Start 339; Stop 363
aatgattgtgattgatgttggctag

SEQ ID NO: 258787 - DNA, 25 bp, Artificial
  probe
  misc_feature (1)..(25): SEQ ID NO: 230; WAN0249UI; Start 347; Stop 371
tgattgatgttggctaggttatgtt

SEQ ID NO: 258788 - DNA, 25 bp, Artificial
  probe
  misc_feature (1)..(25): SEQ ID NO: 230; WAN0249UI; Start 344; Stop 368
ttgtgattgatgttggctaggttat

SEQ ID NO: 258789 - DNA, 25 bp, Artificial
  probe
  misc_feature (1)..(25): SEQ ID NO: 230; WAN0249UI; Start 343; Stop 367
attgtgattgatgttggctaggtta

SEQ ID NO: 258790 - DNA, 25 bp, Artificial
  probe
  misc_feature (1)..(25): SEQ ID NO: 230; WAN0249UI; Start 357; Stop 381
tggctaggttatgttcaatgattcc

SEQ ID NO: 258791 - DNA, 25 bp, Artificial
  probe
  misc_feature (1)..(25): SEQ ID NO: 230; WAN0249UI; Start 346; Stop 370
gtgattgatgttggctaggttatgt

SEQ ID NO: 258792 - DNA, 25 bp, Artificial
  probe
  misc_feature (1)..(25): SEQ ID NO: 230; WAN0249UI; Start 345; Stop 369
tgtgattgatgttggctaggttatg

SEQ ID NO: 258793 - DNA, 25 bp, Artificial
  probe
  misc_feature (1)..(25): SEQ ID NO: 230; WAN0249UI; Start 352; Stop 376
gatgttggctaggttatgttcaatg

SEQ ID NO: 258794 - DNA, 25 bp, Artificial
  probe
  misc_feature (1)..(25): SEQ ID NO: 230; WAN0249UI; Start 355; Stop 379
gttggctaggttatgttcaatgatt

SEQ ID NO: 258795 - DNA, 25 bp, Artificial
  probe
  misc_feature (1)..(25): SEQ ID NO: 230; WAN0249UI; Start 354; Stop 378
tgttggctaggttatgttcaatgat

SEQ ID NO: 258796 - DNA, 25 bp, Artificial
  probe
  misc_feature (1)..(25): SEQ ID NO: 230; WAN0249UI; Start 353; Stop 377
atgttggctaggttatgttcaatga

SEQ ID NO: 258797 - DNA, 25 bp, Artificial
  probe
  misc_feature (1)..(25): SEQ ID NO: 230; WAN0249UI; Start 356; Stop 380
ttggctaggttatgttcaatgattc

SEQ ID NO: 258798 - DNA, 25 bp, Artificial
  probe
  misc_feature (1)..(25): SEQ ID NO: 230; WAN0249UI; Start 340; Stop 364
atgattgtgattgatgttggctagg

SEQ ID NO: 258799 - DNA, 25 bp, Artificial
  probe
  misc_feature (1)..(25): SEQ ID NO: 230; WAN0249UI; Start 351; Stop 375
tgatgttggctaggttatgttcaat

SEQ ID NO: 258800 - DNA, 25 bp, Artificial
  probe
  misc_feature (1)..(25): SEQ ID NO: 230; WAN0249UI; Start 349; Stop 373
attgatgttggctaggttatgttca

SEQ ID NO: 258801 - DNA, 25 bp, Artificial
  probe
  misc_feature (1)..(25): SEQ ID NO: 230; WAN0249UI; Start 342; Stop 366
gattgtgattgatgttggctaggtt

SEQ ID NO: 258802 - DNA, 25 bp, Artificial
  probe
  misc_feature (1)..(25): SEQ ID NO: 230; WAN0249UI; Start 367; Stop 391
atgttcaatgattcctaccgtctca

SEQ ID NO: 258803 - DNA, 25 bp, Artificial
  probe
  misc_feature (1)..(25): SEQ ID NO: 230; WAN0249UI; Start 368; Stop 392
tgttcaatgattcctaccgtctcaa

SEQ ID NO: 258804 - DNA, 25 bp, Artificial
  probe
  misc_feature (1)..(25): SEQ ID NO: 230; WAN0249UI; Start 358; Stop 382
ggctaggttatgttcaatgattcct

SEQ ID NO: 258805 - DNA, 25 bp, Artificial
  probe
  misc_feature (1)..(25): SEQ ID NO: 230; WAN0249UI; Start 362; Stop 386
aggttatgttcaatgattcctaccg

SEQ ID NO: 258806 - DNA, 25 bp, Artificial
  probe
  misc_feature (1)..(25): SEQ ID NO: 230; WAN0249UI; Start 341; Stop 365
tgattgtgattgatgttggctaggt

SEQ ID NO: 258807 - DNA, 25 bp, Artificial
  probe
  misc_feature (1)..(25): SEQ ID NO: 230; WAN0249UI; Start 363; Stop 387
ggttatgttcaatgattcctaccgt

SEQ ID NO: 258808 - DNA, 25 bp, Artificial
  probe
  misc_feature (1)..(25): SEQ ID NO: 230; WAN0249UI; Start 338; Stop 362
aaatgattgtgattgatgttggcta

SEQ ID NO: 258809 - DNA, 25 bp, Artificial
  probe
  misc_feature (1)..(25): SEQ ID NO: 230; WAN0249UI; Start 337; Stop 361
gaaatgattgtgattgatgttggct

SEQ ID NO: 258810 - DNA, 25 bp, Artificial
  probe
  misc_feature (1)..(25): SEQ ID NO: 230; WAN0249UI; Start 336; Stop 360
agaaatgattgtgattgatgttggc

SEQ ID NO: 258811 - DNA, 25 bp, Artificial
  probe
  misc_feature (1)..(25): SEQ ID NO: 230; WAN0249UI; Start 335; Stop 359
gagaaatgattgtgattgatgttgg

SEQ ID NO: 258812 - DNA, 25 bp, Artificial
  probe
  misc_feature (1)..(25): SEQ ID NO: 230; WAN0249UI; Start 334; Stop 358
ggagaaatgattgtgattgatgttg

SEQ ID NO: 258813 - DNA, 25 bp, Artificial
  probe
  misc_feature (1)..(25): SEQ ID NO: 230; WAN0249UI; Start 333; Stop 357
aggagaaatgattgtgattgatgtt

SEQ ID NO: 258814 - DNA, 25 bp, Artificial
  probe
  misc_feature (1)..(25): SEQ ID NO: 230; WAN0249UI; Start 332; Stop 356
aaggagaaatgattgtgattgatgt

SEQ ID NO: 258815 - DNA, 25 bp, Artificial
  probe
  misc_feature (1)..(25): SEQ ID NO: 231; WAN024ARP; Start 13; Stop 37
aaggaatcagattttagaacctggt

SEQ ID NO: 258816 - DNA, 25 bp, Artificial
  probe
  misc_feature (1)..(25): SEQ ID NO: 231; WAN024ARP; Start 12; Stop 36
aaaggaatcagattttagaacctgg

SEQ ID NO: 258817 - DNA, 25 bp, Artificial
  probe
  misc_feature (1)..(25): SEQ ID NO: 231; WAN024ARP; Start 14; Stop 38
aggaatcagattttagaacctggtt

SEQ ID NO: 258818 - DNA, 25 bp, Artificial
  probe
  misc_feature (1)..(25): SEQ ID NO: 231; WAN024ARP; Start 11; Stop 35
aaaaggaatcagattttagaacctg

SEQ ID NO: 258819 - DNA, 25 bp, Artificial
  probe
  misc_feature (1)..(25): SEQ ID NO: 231; WAN024ARP; Start 19; Stop 43
tcagattttagaacctggttccttt

SEQ ID NO: 258820 - DNA, 25 bp, Artificial
  probe
  misc_feature (1)..(25): SEQ ID NO: 231; WAN024ARP; Start 18; Stop 42
atcagattttagaacctggttcctt

SEQ ID NO: 258821 - DNA, 25 bp, Artificial
  probe
  misc_feature (1)..(25): SEQ ID NO: 231; WAN024ARP; Start 17; Stop 41
aatcagattttagaacctggttcct

SEQ ID NO: 258822 - DNA, 25 bp, Artificial
  probe
  misc_feature (1)..(25): SEQ ID NO: 231; WAN024ARP; Start 16; Stop 40
gaatcagattttagaacctggttcc

SEQ ID NO: 258823 - DNA, 25 bp, Artificial
  probe
  misc_feature (1)..(25): SEQ ID NO: 231; WAN024ARP; Start 15; Stop 39
ggaatcagattttagaacctggttc

SEQ ID NO: 258824 - DNA, 25 bp, Artificial
  probe
  misc_feature (1)..(25): SEQ ID NO: 231; WAN024ARP; Start 20; Stop 44
cagattttagaacctggttcctttt

SEQ ID NO: 258825 - DNA, 25 bp, Artificial
  probe
  misc_feature (1)..(25): SEQ ID NO: 232; WAN024ACV; Start 67; Stop 91
ttgaaatagaaatagttggaggaaa

SEQ ID NO: 258826 - DNA, 25 bp, Artificial
  probe
  misc_feature (1)..(25): SEQ ID NO: 232; WAN024ACV; Start 66; Stop 90
tttgaaatagaaatagttggaggaa

SEQ ID NO: 258827 - DNA, 25 bp, Artificial
  probe
  misc_feature (1)..(25): SEQ ID NO: 232; WAN024ACV; Start 68; Stop 92
tgaaatagaaatagttggaggaaat

SEQ ID NO: 258828 - DNA, 25 bp, Artificial
  probe
  misc_feature (1)..(25): SEQ ID NO: 232; WAN024ACV; Start 65; Stop 89
ttttgaaatagaaatagttggagga

SEQ ID NO: 258829 - DNA, 25 bp, Artificial
  probe
  misc_feature (1)..(25): SEQ ID NO: 232; WAN024ACV; Start 33; Stop 57
gtgtctgattgtgatacaatatagt

SEQ ID NO: 258830 - DNA, 25 bp, Artificial
  probe
  misc_feature (1)..(25): SEQ ID NO: 232; WAN024ACV; Start 32; Stop 56
tgtgtctgattgtgatacaatatag

SEQ ID NO: 258831 - DNA, 25 bp, Artificial
  probe
  misc_feature (1)..(25): SEQ ID NO: 232; WAN024ACV; Start 31; Stop 55
ttgtgtctgattgtgatacaatata

SEQ ID NO: 258832 - DNA, 25 bp, Artificial
  probe
  misc_feature (1)..(25): SEQ ID NO: 232; WAN024ACV; Start 30; Stop 54
tttgtgtctgattgtgatacaatat

SEQ ID NO: 258833 - DNA, 25 bp, Artificial
  probe
  misc_feature (1)..(25): SEQ ID NO: 232; WAN024ACV; Start 34; Stop 58
tgtctgattgtgatacaatatagta

SEQ ID NO: 258834 - DNA, 25 bp, Artificial
  probe
  misc_feature (1)..(25): SEQ ID NO: 232; WAN024ACV; Start 38; Stop 62
tgattgtgatacaatatagtaagga

SEQ ID NO: 258835 - DNA, 25 bp, Artificial
  probe
  misc_feature (1)..(25): SEQ ID NO: 232; WAN024ACV; Start 29; Stop 53
ttttgtgtctgattgtgatacaata

SEQ ID NO: 258836 - DNA, 25 bp, Artificial
  probe
  misc_feature (1)..(25): SEQ ID NO: 233; WAN0249TS; Start 3; Stop 27
gccacctcctacaaatagaaagtaa

SEQ ID NO: 258837 - DNA, 25 bp, Artificial
  probe
  misc_feature (1)..(25): SEQ ID NO: 233; WAN0249TS; Start 2; Stop 26
agccacctcctacaaatagaaagta

SEQ ID NO: 258838 - DNA, 25 bp, Artificial
  probe
  misc_feature (1)..(25): SEQ ID NO: 233; WAN0249TS; Start 262; Stop 286
aatagctgatgatacatattgccaa

SEQ ID NO: 258839 - DNA, 25 bp, Artificial
  probe
  misc_feature (1)..(25): SEQ ID NO: 233; WAN0249TS; Start 1; Stop 25
aagccacctcctacaaatagaaagt

SEQ ID NO: 258840 - DNA, 25 bp, Artificial
  probe
  misc_feature (1)..(25): SEQ ID NO: 233; WAN0249TS; Start 266; Stop 290
gctgatgatacatattgccaaatac

SEQ ID NO: 258841 - DNA, 25 bp, Artificial
  probe
  misc_feature (1)..(25): SEQ ID NO: 233; WAN0249TS; Start 4; Stop 28
ccacctcctacaaatagaaagtaat

SEQ ID NO: 258842 - DNA, 25 bp, Artificial
  probe
  misc_feature (1)..(25): SEQ ID NO: 233; WAN0249TS; Start 213; Stop 237
tgacactcagaagactagcttgttc

SEQ ID NO: 258843 - DNA, 25 bp, Artificial
  probe
  misc_feature (1)..(25): SEQ ID NO: 233; WAN0249TS; Start 267; Stop 291
ctgatgatacatattgccaaataca

SEQ ID NO: 258844 - DNA, 25 bp, Artificial
  probe
  misc_feature (1)..(25): SEQ ID NO: 233; WAN0249TS; Start 264; Stop 288
tagctgatgatacatattgccaaat

SEQ ID NO: 258845 - DNA, 25 bp, Artificial
  probe
  misc_feature (1)..(25): SEQ ID NO: 233; WAN0249TS; Start 263; Stop 287
atagctgatgatacatattgccaaa

SEQ ID NO: 258846 - DNA, 25 bp, Artificial
  probe
  misc_feature (1)..(25): SEQ ID NO: 233; WAN0249TS; Start 265; Stop 289
agctgatgatacatattgccaaata

SEQ ID NO: 258847 - DNA, 25 bp, Artificial
  probe
  misc_feature (1)..(25): SEQ ID NO: 233; WAN0249TS; Start 261; Stop 285
aaatagctgatgatacatattgcca

SEQ ID NO: 258848 - DNA, 25 bp, Artificial
  probe
  misc_feature (1)..(25): SEQ ID NO: 233; WAN0249TS; Start 214; Stop 238
gacactcagaagactagcttgttcg

SEQ ID NO: 258849 - DNA, 25 bp, Artificial
  probe
  misc_feature (1)..(25): SEQ ID NO: 233; WAN0249TS; Start 268; Stop 292
tgatgatacatattgccaaatacaa

SEQ ID NO: 258850 - DNA, 25 bp, Artificial
  probe
  misc_feature (1)..(25): SEQ ID NO: 233; WAN0249TS; Start 196; Stop 220
gaacaagactacttttctgacactc

SEQ ID NO: 258851 - DNA, 25 bp, Artificial
  probe
  misc_feature (1)..(25): SEQ ID NO: 233; WAN0249TS; Start 197; Stop 221
aacaagactacttttctgacactca

SEQ ID NO: 258852 - DNA, 25 bp, Artificial
  probe
  misc_feature (1)..(25): SEQ ID NO: 233; WAN0249TS; Start 195; Stop 219
cgaacaagactacttttctgacact

SEQ ID NO: 258853 - DNA, 25 bp, Artificial
  probe
  misc_feature (1)..(25): SEQ ID NO: 233; WAN0249TS; Start 192; Stop 216
aagcgaacaagactacttttctgac

SEQ ID NO: 258854 - DNA, 25 bp, Artificial
  probe
  misc_feature (1)..(25): SEQ ID NO: 233; WAN0249TS; Start 194; Stop 218
gcgaacaagactacttttctgacac

SEQ ID NO: 258855 - DNA, 25 bp, Artificial
  probe
  misc_feature (1)..(25): SEQ ID NO: 233; WAN0249TS; Start 212; Stop 236
ctgacactcagaagactagcttgtt

SEQ ID NO: 258856 - DNA, 25 bp, Artificial
  probe
  misc_feature (1)..(25): SEQ ID NO: 233; WAN0249TS; Start 269; Stop 293
gatgatacatattgccaaatacaaa

SEQ ID NO: 258857 - DNA, 25 bp, Artificial
  probe
  misc_feature (1)..(25): SEQ ID NO: 233; WAN0249TS; Start 193; Stop 217
agcgaacaagactacttttctgaca

SEQ ID NO: 258858 - DNA, 25 bp, Artificial
  probe
  misc_feature (1)..(25): SEQ ID NO: 233; WAN0249TS; Start 191; Stop 215
aaagcgaacaagactacttttctga

SEQ ID NO: 258859 - DNA, 25 bp, Artificial
  probe
  misc_feature (1)..(25): SEQ ID NO: 233; WAN0249TS; Start 217; Stop 241
actcagaagactagcttgttcgctt

SEQ ID NO: 258860 - DNA, 25 bp, Artificial
  probe
  misc_feature (1)..(25): SEQ ID NO: 233; WAN0249TS; Start 185; Stop 209
ataataaaagcgaacaagactactt

SEQ ID NO: 258861 - DNA, 25 bp, Artificial
  probe
  misc_feature (1)..(25): SEQ ID NO: 233; WAN0249TS; Start 218; Stop 242
ctcagaagactagcttgttcgcttt

SEQ ID NO: 258862 - DNA, 25 bp, Artificial
  probe
  misc_feature (1)..(25): SEQ ID NO: 233; WAN0249TS; Start 215; Stop 239
acactcagaagactagcttgttcgc

SEQ ID NO: 258863 - DNA, 25 bp, Artificial
  probe
  misc_feature (1)..(25): SEQ ID NO: 233; WAN0249TS; Start 260; Stop 284
aaaatagctgatgatacatattgcc

SEQ ID NO: 258864 - DNA, 25 bp, Artificial
  probe
  misc_feature (1)..(25): SEQ ID NO: 233; WAN0249TS; Start 216; Stop 240
cactcagaagactagcttgttcgct

SEQ ID NO: 258865 - DNA, 25 bp, Artificial
  probe
  misc_feature (1)..(25): SEQ ID NO: 233; WAN0249TS; Start 186; Stop 210
taataaaagcgaacaagactacttt

SEQ ID NO: 258866 - DNA, 25 bp, Artificial
  probe
  misc_feature (1)..(25): SEQ ID NO: 233; WAN0249TS; Start 198; Stop 222
acaagactacttttctgacactcag

SEQ ID NO: 258867 - DNA, 25 bp, Artificial
  probe
  misc_feature (1)..(25): SEQ ID NO: 233; WAN0249TS; Start 279; Stop 303
attgccaaatacaaaatatctgatt

SEQ ID NO: 258868 - DNA, 25 bp, Artificial
  probe
  misc_feature (1)..(25): SEQ ID NO: 233; WAN0249TS; Start 280; Stop 304
ttgccaaatacaaaatatctgattt

SEQ ID NO: 258869 - DNA, 25 bp, Artificial
  probe
  misc_feature (1)..(25): SEQ ID NO: 234; WAN024ALY; Start 95; Stop 119
tggtgaaagtgatggaactgattta

SEQ ID NO: 258870 - DNA, 25 bp, Artificial
  probe
  misc_feature (1)..(25): SEQ ID NO: 234; WAN024ALY; Start 96; Stop 120
ggtgaaagtgatggaactgatttat

SEQ ID NO: 258871 - DNA, 25 bp, Artificial
  probe
  misc_feature (1)..(25): SEQ ID NO: 234; WAN024ALY; Start 94; Stop 118
gtggtgaaagtgatggaactgattt

SEQ ID NO: 258872 - DNA, 25 bp, Artificial
  probe
  misc_feature (1)..(25): SEQ ID NO: 234; WAN024ALY; Start 97; Stop 121
gtgaaagtgatggaactgatttatc

SEQ ID NO: 258873 - DNA, 25 bp, Artificial
  probe
  misc_feature (1)..(25): SEQ ID NO: 234; WAN024ALY; Start 98; Stop 122
tgaaagtgatggaactgatttatca

SEQ ID NO: 258874 - DNA, 25 bp, Artificial
  probe
  misc_feature (1)..(25): SEQ ID NO: 234; WAN024ALY; Start 67; Stop 91
aatttgaagtcatctgcttctttcg

SEQ ID NO: 258875 - DNA, 25 bp, Artificial
  probe
  misc_feature (1)..(25): SEQ ID NO: 234; WAN024ALY; Start 65; Stop 89
tcaatttgaagtcatctgcttcttt

SEQ ID NO: 258876 - DNA, 25 bp, Artificial
  probe
  misc_feature (1)..(25): SEQ ID NO: 234; WAN024ALY; Start 93; Stop 117
cgtggtgaaagtgatggaactgatt

SEQ ID NO: 258877 - DNA, 25 bp, Artificial
  probe
  misc_feature (1)..(25): SEQ ID NO: 234; WAN024ALY; Start 66; Stop 90
caatttgaagtcatctgcttctttc

SEQ ID NO: 258878 - DNA, 25 bp, Artificial
  probe
  misc_feature (1)..(25): SEQ ID NO: 234; WAN024ALY; Start 60; Stop 84
gaagttcaatttgaagtcatctgct

SEQ ID NO: 258879 - DNA, 25 bp, Artificial
  probe
  misc_feature (1)..(25): SEQ ID NO: 234; WAN024ALY; Start 58; Stop 82
acgaagttcaatttgaagtcatctg

SEQ ID NO: 258880 - DNA, 25 bp, Artificial
  probe
  misc_feature (1)..(25): SEQ ID NO: 234; WAN024ALY; Start 54; Stop 78
tgaaacgaagttcaatttgaagtca

SEQ ID NO: 258881 - DNA, 25 bp, Artificial
  probe
  misc_feature (1)..(25): SEQ ID NO: 234; WAN024ALY; Start 61; Stop 85
aagttcaatttgaagtcatctgctt

SEQ ID NO: 258882 - DNA, 25 bp, Artificial
  probe
  misc_feature (1)..(25): SEQ ID NO: 234; WAN024ALY; Start 57; Stop 81
aacgaagttcaatttgaagtcatct

SEQ ID NO: 258883 - DNA, 25 bp, Artificial
  probe
  misc_feature (1)..(25): SEQ ID NO: 234; WAN024ALY; Start 63; Stop 87
gttcaatttgaagtcatctgcttct

SEQ ID NO: 258884 - DNA, 25 bp, Artificial
  probe
  misc_feature (1)..(25): SEQ ID NO: 234; WAN024ALY; Start 62; Stop 86
agttcaatttgaagtcatctgcttc

SEQ ID NO: 258885 - DNA, 25 bp, Artificial
  probe
  misc_feature (1)..(25): SEQ ID NO: 234; WAN024ALY; Start 64; Stop 88
ttcaatttgaagtcatctgcttctt

SEQ ID NO: 258886 - DNA, 25 bp, Artificial
  probe
  misc_feature (1)..(25): SEQ ID NO: 234; WAN024ALY; Start 59; Stop 83
cgaagttcaatttgaagtcatctgc

SEQ ID NO: 258887 - DNA, 25 bp, Artificial
  probe
  misc_feature (1)..(25): SEQ ID NO: 234; WAN024ALY; Start 56; Stop 80
aaacgaagttcaatttgaagtcatc

SEQ ID NO: 258888 - DNA, 25 bp, Artificial
  probe
  misc_feature (1)..(25): SEQ ID NO: 234; WAN024ALY; Start 55; Stop 79
gaaacgaagttcaatttgaagtcat

SEQ ID NO: 258889 - DNA, 25 bp, Artificial
  probe
  misc_feature (1)..(25): SEQ ID NO: 234; WAN024ALY; Start 68; Stop 92
atttgaagtcatctgcttctttcgc

SEQ ID NO: 258890 - DNA, 25 bp, Artificial
  probe
  misc_feature (1)..(25): SEQ ID NO: 234; WAN024ALY; Start 43; Stop 67
tcagtttaaattgaaacgaagttca

SEQ ID NO: 258891 - DNA, 25 bp, Artificial
  probe
  misc_feature (1)..(25): SEQ ID NO: 234; WAN024ALY; Start 195; Stop 219
ctcaccacctaagaaaggagcaaaa

SEQ ID NO: 258892 - DNA, 25 bp, Artificial
  probe
  misc_feature (1)..(25): SEQ ID NO: 234; WAN024ALY; Start 194; Stop 218
cctcaccacctaagaaaggagcaaa

SEQ ID NO: 258893 - DNA, 25 bp, Artificial
  probe
  misc_feature (1)..(25): SEQ ID NO: 234; WAN024ALY; Start 42; Stop 66
ttcagtttaaattgaaacgaagttc

SEQ ID NO: 258894 - DNA, 25 bp, Artificial
  probe
  misc_feature (1)..(25): SEQ ID NO: 234; WAN024ALY; Start 12; Stop 36
gcagacctagctattttaaacttct

SEQ ID NO: 258895 - DNA, 25 bp, Artificial
  probe
  misc_feature (1)..(25): SEQ ID NO: 234; WAN024ALY; Start 99; Stop 123
gaaagtgatggaactgatttatcag

SEQ ID NO: 258896 - DNA, 25 bp, Artificial
  probe
  misc_feature (1)..(25): SEQ ID NO: 234; WAN024ALY; Start 92; Stop 116
ccgtggtgaaagtgatggaactgat

SEQ ID NO: 258897 - DNA, 25 bp, Artificial
  probe
  misc_feature (1)..(25): SEQ ID NO: 234; WAN024ALY; Start 112; Stop 136
ctgatttatcagtcccatcacaggg

SEQ ID NO: 258898 - DNA, 25 bp, Artificial
  probe
  misc_feature (1)..(25): SEQ ID NO: 234; WAN024ALY; Start 69; Stop 93
tttgaagtcatctgcttctttcgcc

SEQ ID NO: 258899 - DNA, 25 bp, Artificial
  probe
  misc_feature (1)..(25): SEQ ID NO: 234; WAN024ALY; Start 9; Stop 33
ccagcagacctagctattttaaact

SEQ ID NO: 258900 - DNA, 25 bp, Artificial
  probe
  misc_feature (1)..(25): SEQ ID NO: 234; WAN024ALY; Start 53; Stop 77
ttgaaacgaagttcaatttgaagtc

SEQ ID NO: 258901 - DNA, 25 bp, Artificial
  probe
  misc_feature (1)..(25): SEQ ID NO: 234; WAN024ALY; Start 159; Stop 183
aaaataagcaatgaaaccatcggtt

SEQ ID NO: 258902 - DNA, 25 bp, Artificial
  probe
  misc_feature (1)..(25): SEQ ID NO: 235; WAN0249FC; Start 90; Stop 114
acattattcaagtaagcgttcacat

SEQ ID NO: 258903 - DNA, 25 bp, Artificial
  probe
  misc_feature (1)..(25): SEQ ID NO: 235; WAN0249FC; Start 89; Stop 113
aacattattcaagtaagcgttcaca

SEQ ID NO: 258904 - DNA, 25 bp, Artificial
  probe
  misc_feature (1)..(25): SEQ ID NO: 235; WAN0249FC; Start 91; Stop 115
cattattcaagtaagcgttcacata

SEQ ID NO: 258905 - DNA, 25 bp, Artificial
  probe
  misc_feature (1)..(25): SEQ ID NO: 235; WAN0249FC; Start 94; Stop 118
tattcaagtaagcgttcacatattg

SEQ ID NO: 258906 - DNA, 25 bp, Artificial
  probe
  misc_feature (1)..(25): SEQ ID NO: 235; WAN0249FC; Start 93; Stop 117
ttattcaagtaagcgttcacatatt

SEQ ID NO: 258907 - DNA, 25 bp, Artificial
  probe
  misc_feature (1)..(25): SEQ ID NO: 235; WAN0249FC; Start 92; Stop 116
attattcaagtaagcgttcacatat

SEQ ID NO: 258908 - DNA, 25 bp, Artificial
  probe
  misc_feature (1)..(25): SEQ ID NO: 235; WAN0249FC; Start 3; Stop 27
gctcctcctaatttatcatttcaac

SEQ ID NO: 258909 - DNA, 25 bp, Artificial
  probe
  misc_feature (1)..(25): SEQ ID NO: 235; WAN0249FC; Start 95; Stop 119
attcaagtaagcgttcacatattga

SEQ ID NO: 258910 - DNA, 25 bp, Artificial
  probe
  misc_feature (1)..(25): SEQ ID NO: 235; WAN0249FC; Start 88; Stop 112
gaacattattcaagtaagcgttcac

SEQ ID NO: 258911 - DNA, 25 bp, Artificial
  probe
  misc_feature (1)..(25): SEQ ID NO: 235; WAN0249FC; Start 2; Stop 26
agctcctcctaatttatcatttcaa

SEQ ID NO: 258912 - DNA, 25 bp, Artificial
  probe
  misc_feature (1)..(25): SEQ ID NO: 235; WAN0249FC; Start 1; Stop 25
aagctcctcctaatttatcatttca

SEQ ID NO: 258913 - DNA, 25 bp, Artificial
  probe
  misc_feature (1)..(25): SEQ ID NO: 235; WAN0249FC; Start 4; Stop 28
ctcctcctaatttatcatttcaact

SEQ ID NO: 258914 - DNA, 25 bp, Artificial
  probe
  misc_feature (1)..(25): SEQ ID NO: 235; WAN0249FC; Start 97; Stop 121
tcaagtaagcgttcacatattgaaa

SEQ ID NO: 258915 - DNA, 25 bp, Artificial
  probe
  misc_feature (1)..(25): SEQ ID NO: 235; WAN0249FC; Start 29; Stop 53
atattatagcacaaattggaggaat

SEQ ID NO: 258916 - DNA, 25 bp, Artificial
  probe
  misc_feature (1)..(25): SEQ ID NO: 235; WAN0249FC; Start 30; Stop 54
tattatagcacaaattggaggaatt

SEQ ID NO: 258917 - DNA, 25 bp, Artificial
  probe
  misc_feature (1)..(25): SEQ ID NO: 235; WAN0249FC; Start 26; Stop 50
actatattatagcacaaattggagg

SEQ ID NO: 258918 - DNA, 25 bp, Artificial
  probe
  misc_feature (1)..(25): SEQ ID NO: 235; WAN0249FC; Start 28; Stop 52
tatattatagcacaaattggaggaa

SEQ ID NO: 258919 - DNA, 25 bp, Artificial
  probe
  misc_feature (1)..(25): SEQ ID NO: 235; WAN0249FC; Start 27; Stop 51
ctatattatagcacaaattggagga

SEQ ID NO: 258920 - DNA, 25 bp, Artificial
  probe
  misc_feature (1)..(25): SEQ ID NO: 235; WAN0249FC; Start 68; Stop 92
tgaatattgggttaacatttgaaca

SEQ ID NO: 258921 - DNA, 25 bp, Artificial
  probe
  misc_feature (1)..(25): SEQ ID NO: 235; WAN0249FC; Start 5; Stop 29
tcctcctaatttatcatttcaacta

SEQ ID NO: 258922 - DNA, 25 bp, Artificial
  probe
  misc_feature (1)..(25): SEQ ID NO: 235; WAN0249FC; Start 31; Stop 55
attatagcacaaattggaggaattt

SEQ ID NO: 258923 - DNA, 25 bp, Artificial
  probe
  misc_feature (1)..(25): SEQ ID NO: 235; WAN0249FC; Start 96; Stop 120
ttcaagtaagcgttcacatattgaa

SEQ ID NO: 258924 - DNA, 25 bp, Artificial
  probe
  misc_feature (1)..(25): SEQ ID NO: 235; WAN0249FC; Start 74; Stop 98
ttgggttaacatttgaacattattc

SEQ ID NO: 258925 - DNA, 25 bp, Artificial
  probe
  misc_feature (1)..(25): SEQ ID NO: 235; WAN0249FC; Start 98; Stop 122
caagtaagcgttcacatattgaaaa

SEQ ID NO: 258926 - DNA, 25 bp, Artificial
  probe
  misc_feature (1)..(25): SEQ ID NO: 235; WAN0249FC; Start 86; Stop 110
ttgaacattattcaagtaagcgttc

SEQ ID NO: 258927 - DNA, 25 bp, Artificial
  probe
  misc_feature (1)..(25): SEQ ID NO: 235; WAN0249FC; Start 69; Stop 93
gaatattgggttaacatttgaacat

SEQ ID NO: 258928 - DNA, 25 bp, Artificial
  probe
  misc_feature (1)..(25): SEQ ID NO: 235; WAN0249FC; Start 67; Stop 91
atgaatattgggttaacatttgaac

SEQ ID NO: 258929 - DNA, 25 bp, Artificial
  probe
  misc_feature (1)..(25): SEQ ID NO: 235; WAN0249FC; Start 24; Stop 48
caactatattatagcacaaattgga

SEQ ID NO: 258930 - DNA, 25 bp, Artificial
  probe
  misc_feature (1)..(25): SEQ ID NO: 235; WAN0249FC; Start 23; Stop 47
tcaactatattatagcacaaattgg

SEQ ID NO: 258931 - DNA, 25 bp, Artificial
  probe
  misc_feature (1)..(25): SEQ ID NO: 235; WAN0249FC; Start 75; Stop 99
tgggttaacatttgaacattattca

SEQ ID NO: 258932 - DNA, 25 bp, Artificial
  probe
  misc_feature (1)..(25): SEQ ID NO: 235; WAN0249FC; Start 73; Stop 97
attgggttaacatttgaacattatt

SEQ ID NO: 258933 - DNA, 25 bp, Artificial
  probe
  misc_feature (1)..(25): SEQ ID NO: 235; WAN0249FC; Start 70; Stop 94
aatattgggttaacatttgaacatt

SEQ ID NO: 258934 - DNA, 25 bp, Artificial
  probe
  misc_feature (1)..(25): SEQ ID NO: 235; WAN0249FC; Start 25; Stop 49
aactatattatagcacaaattggag

SEQ ID NO: 258935 - DNA, 25 bp, Artificial
  probe
  misc_feature (1)..(25): SEQ ID NO: 236; WAN0249JV; Start 42; Stop 66
tcgttccaacctttagttctatctc

SEQ ID NO: 258936 - DNA, 25 bp, Artificial
  probe
  misc_feature (1)..(25): SEQ ID NO: 236; WAN0249JV; Start 38; Stop 62
acaatcgttccaacctttagttcta

SEQ ID NO: 258937 - DNA, 25 bp, Artificial
  probe
  misc_feature (1)..(25): SEQ ID NO: 236; WAN0249JV; Start 41; Stop 65
atcgttccaacctttagttctatct

SEQ ID NO: 258938 - DNA, 25 bp, Artificial
  probe
  misc_feature (1)..(25): SEQ ID NO: 236; WAN0249JV; Start 39; Stop 63
caatcgttccaacctttagttctat

SEQ ID NO: 258939 - DNA, 25 bp, Artificial
  probe
  misc_feature (1)..(25): SEQ ID NO: 236; WAN0249JV; Start 40; Stop 64
aatcgttccaacctttagttctatc

SEQ ID NO: 258940 - DNA, 25 bp, Artificial
  probe
  misc_feature (1)..(25): SEQ ID NO: 236; WAN0249JV; Start 37; Stop 61
gacaatcgttccaacctttagttct

SEQ ID NO: 258941 - DNA, 25 bp, Artificial
  probe
  misc_feature (1)..(25): SEQ ID NO: 236; WAN0249JV; Start 36; Stop 60
ggacaatcgttccaacctttagttc

SEQ ID NO: 258942 - DNA, 25 bp, Artificial
  probe
  misc_feature (1)..(25): SEQ ID NO: 236; WAN0249JV; Start 35; Stop 59
gggacaatcgttccaacctttagtt

SEQ ID NO: 258943 - DNA, 25 bp, Artificial
  probe
  misc_feature (1)..(25): SEQ ID NO: 236; WAN0249JV; Start 33; Stop 57
ctgggacaatcgttccaacctttag

SEQ ID NO: 258944 - DNA, 25 bp, Artificial
  probe
  misc_feature (1)..(25): SEQ ID NO: 236; WAN0249JV; Start 23; Stop 47
caaagaaaggctgggacaatcgttc

SEQ ID NO: 258945 - DNA, 25 bp, Artificial
  probe
  misc_feature (1)..(25): SEQ ID NO: 236; WAN0249JV; Start 1; Stop 25
aagcttccttctattctgtttgcaa

SEQ ID NO: 258946 - DNA, 25 bp, Artificial
  probe
  misc_feature (1)..(25): SEQ ID NO: 236; WAN0249JV; Start 34; Stop 58
tgggacaatcgttccaacctttagt

SEQ ID NO: 258947 - DNA, 25 bp, Artificial
  probe
  misc_feature (1)..(25): SEQ ID NO: 237; WAN024AFY; Start 63; Stop 87
tttctttctccgatgtgacaatttc

SEQ ID NO: 258948 - DNA, 25 bp, Artificial
  probe
  misc_feature (1)..(25): SEQ ID NO: 237; WAN024AFY; Start 6; Stop 30
acctcctattcgttcatctttacta

SEQ ID NO: 258949 - DNA, 25 bp, Artificial
  probe
  misc_feature (1)..(25): SEQ ID NO: 237; WAN024AFY; Start 5; Stop 29
aacctcctattcgttcatctttact

SEQ ID NO: 258950 - DNA, 25 bp, Artificial
  probe
  misc_feature (1)..(25): SEQ ID NO: 237; WAN024AFY; Start 74; Stop 98
gatgtgacaatttcagcagagattc

SEQ ID NO: 258951 - DNA, 25 bp, Artificial
  probe
  misc_feature (1)..(25): SEQ ID NO: 237; WAN024AFY; Start 75; Stop 99
atgtgacaatttcagcagagattct

SEQ ID NO: 258952 - DNA, 25 bp, Artificial
  probe
  misc_feature (1)..(25): SEQ ID NO: 237; WAN024AFY; Start 64; Stop 88
ttctttctccgatgtgacaatttca

SEQ ID NO: 258953 - DNA, 25 bp, Artificial
  probe
  misc_feature (1)..(25): SEQ ID NO: 237; WAN024AFY; Start 16; Stop 40
cgttcatctttactattctacaggt

SEQ ID NO: 258954 - DNA, 25 bp, Artificial
  probe
  misc_feature (1)..(25): SEQ ID NO: 237; WAN024AFY; Start 15; Stop 39
tcgttcatctttactattctacagg

SEQ ID NO: 258955 - DNA, 25 bp, Artificial
  probe
  misc_feature (1)..(25): SEQ ID NO: 237; WAN024AFY; Start 65; Stop 89
tctttctccgatgtgacaatttcag

SEQ ID NO: 258956 - DNA, 25 bp, Artificial
  probe
  misc_feature (1)..(25): SEQ ID NO: 237; WAN024AFY; Start 7; Stop 31
cctcctattcgttcatctttactat

SEQ ID NO: 258957 - DNA, 25 bp, Artificial
  probe
  misc_feature (1)..(25): SEQ ID NO: 237; WAN024AFY; Start 73; Stop 97
cgatgtgacaatttcagcagagatt

SEQ ID NO: 258958 - DNA, 25 bp, Artificial
  probe
  misc_feature (1)..(25): SEQ ID NO: 237; WAN024AFY; Start 76; Stop 100
tgtgacaatttcagcagagattctc

SEQ ID NO: 258959 - DNA, 25 bp, Artificial
  probe
  misc_feature (1)..(25): SEQ ID NO: 237; WAN024AFY; Start 66; Stop 90
ctttctccgatgtgacaatttcagc

SEQ ID NO: 258960 - DNA, 25 bp, Artificial
  probe
  misc_feature (1)..(25): SEQ ID NO: 237; WAN024AFY; Start 95; Stop 119
attctctgcttttctttcccaattc

SEQ ID NO: 258961 - DNA, 25 bp, Artificial
  probe
  misc_feature (1)..(25): SEQ ID NO: 237; WAN024AFY; Start 94; Stop 118
gattctctgcttttctttcccaatt

SEQ ID NO: 258962 - DNA, 25 bp, Artificial
  probe
  misc_feature (1)..(25): SEQ ID NO: 237; WAN024AFY; Start 62; Stop 86
ttttctttctccgatgtgacaattt

SEQ ID NO: 258963 - DNA, 25 bp, Artificial
  probe
  misc_feature (1)..(25): SEQ ID NO: 237; WAN024AFY; Start 14; Stop 38
ttcgttcatctttactattctacag

SEQ ID NO: 258964 - DNA, 25 bp, Artificial
  probe
  misc_feature (1)..(25): SEQ ID NO: 237; WAN024AFY; Start 97; Stop 121
tctctgcttttctttcccaattcat

SEQ ID NO: 258965 - DNA, 25 bp, Artificial
  probe
  misc_feature (1)..(25): SEQ ID NO: 237; WAN024AFY; Start 93; Stop 117
agattctctgcttttctttcccaat

SEQ ID NO: 258966 - DNA, 25 bp, Artificial
  probe
  misc_feature (1)..(25): SEQ ID NO: 237; WAN024AFY; Start 96; Stop 120
ttctctgcttttctttcccaattca

SEQ ID NO: 258967 - DNA, 25 bp, Artificial
  probe
  misc_feature (1)..(25): SEQ ID NO: 237; WAN024AFY; Start 27; Stop 51
actattctacaggttttccaaggat

SEQ ID NO: 258968 - DNA, 25 bp, Artificial
  probe
  misc_feature (1)..(25): SEQ ID NO: 237; WAN024AFY; Start 67; Stop 91
tttctccgatgtgacaatttcagca

SEQ ID NO: 258969 - DNA, 25 bp, Artificial
  probe
  misc_feature (1)..(25): SEQ ID NO: 237; WAN024AFY; Start 30; Stop 54
attctacaggttttccaaggatttt

SEQ ID NO: 258970 - DNA, 25 bp, Artificial
  probe
  misc_feature (1)..(25): SEQ ID NO: 237; WAN024AFY; Start 26; Stop 50
tactattctacaggttttccaagga

SEQ ID NO: 258971 - DNA, 25 bp, Artificial
  probe
  misc_feature (1)..(25): SEQ ID NO: 237; WAN024AFY; Start 31; Stop 55
ttctacaggttttccaaggattttg

SEQ ID NO: 258972 - DNA, 25 bp, Artificial
  probe
  misc_feature (1)..(25): SEQ ID NO: 237; WAN024AFY; Start 17; Stop 41
gttcatctttactattctacaggtt

SEQ ID NO: 258973 - DNA, 25 bp, Artificial
  probe
  misc_feature (1)..(25): SEQ ID NO: 237; WAN024AFY; Start 10; Stop 34
cctattcgttcatctttactattct

SEQ ID NO: 258974 - DNA, 25 bp, Artificial
  probe
  misc_feature (1)..(25): SEQ ID NO: 237; WAN024AFY; Start 9; Stop 33
tcctattcgttcatctttactattc

SEQ ID NO: 258975 - DNA, 25 bp, Artificial
  probe
  misc_feature (1)..(25): SEQ ID NO: 237; WAN024AFY; Start 8; Stop 32
ctcctattcgttcatctttactatt

SEQ ID NO: 258976 - DNA, 25 bp, Artificial
  probe
  misc_feature (1)..(25): SEQ ID NO: 237; WAN024AFY; Start 72; Stop 96
ccgatgtgacaatttcagcagagat

SEQ ID NO: 258977 - DNA, 25 bp, Artificial
  probe
  misc_feature (1)..(25): SEQ ID NO: 237; WAN024AFY; Start 25; Stop 49
ttactattctacaggttttccaagg

SEQ ID NO: 258978 - DNA, 25 bp, Artificial
  probe
  misc_feature (1)..(25): SEQ ID NO: 237; WAN024AFY; Start 28; Stop 52
ctattctacaggttttccaaggatt

SEQ ID NO: 258979 - DNA, 25 bp, Artificial
  probe
  misc_feature (1)..(25): SEQ ID NO: 237; WAN024AFY; Start 68; Stop 92
ttctccgatgtgacaatttcagcag

SEQ ID NO: 258980 - DNA, 25 bp, Artificial
  probe
  misc_feature (1)..(25): SEQ ID NO: 238; WAN0249XA; Start 10; Stop 34
tggcaaacttttcccttgactagat

SEQ ID NO: 258981 - DNA, 25 bp, Artificial
  probe
  misc_feature (1)..(25): SEQ ID NO: 238; WAN0249XA; Start 9; Stop 33
ctggcaaacttttcccttgactaga

SEQ ID NO: 258982 - DNA, 25 bp, Artificial
  probe
  misc_feature (1)..(25): SEQ ID NO: 238; WAN0249XA; Start 8; Stop 32
gctggcaaacttttcccttgactag

SEQ ID NO: 258983 - DNA, 25 bp, Artificial
  probe
  misc_feature (1)..(25): SEQ ID NO: 239; WAN0249F3; Start 30; Stop 54
gaaattcacacaatctcctcacatt

SEQ ID NO: 258984 - DNA, 25 bp, Artificial
  probe
  misc_feature (1)..(25): SEQ ID NO: 239; WAN0249F3; Start 31; Stop 55
aaattcacacaatctcctcacattt

SEQ ID NO: 258985 - DNA, 25 bp, Artificial
  probe
  misc_feature (1)..(25): SEQ ID NO: 239; WAN0249F3; Start 29; Stop 53
tgaaattcacacaatctcctcacat

SEQ ID NO: 258986 - DNA, 25 bp, Artificial
  probe
  misc_feature (1)..(25): SEQ ID NO: 239; WAN0249F3; Start 32; Stop 56
aattcacacaatctcctcacatttt

SEQ ID NO: 258987 - DNA, 25 bp, Artificial
  probe
  misc_feature (1)..(25): SEQ ID NO: 239; WAN0249F3; Start 1; Stop 25
aaggcttggttaatccaggtctttt

SEQ ID NO: 258988 - DNA, 25 bp, Artificial
  probe
  misc_feature (1)..(25): SEQ ID NO: 239; WAN0249F3; Start 28; Stop 52
gtgaaattcacacaatctcctcaca

SEQ ID NO: 258989 - DNA, 25 bp, Artificial
  probe
  misc_feature (1)..(25): SEQ ID NO: 240; WAN0249I6; Start 4; Stop 28
gtcgattctaatctcgctaatcctt

SEQ ID NO: 258990 - DNA, 25 bp, Artificial
  probe
  misc_feature (1)..(25): SEQ ID NO: 240; WAN0249I6; Start 1; Stop 25
aaggtcgattctaatctcgctaatc

SEQ ID NO: 258991 - DNA, 25 bp, Artificial
  probe
  misc_feature (1)..(25): SEQ ID NO: 240; WAN0249I6; Start 3; Stop 27
ggtcgattctaatctcgctaatcct

SEQ ID NO: 258992 - DNA, 25 bp, Artificial
  probe
  misc_feature (1)..(25): SEQ ID NO: 240; WAN0249I6; Start 2; Stop 26
aggtcgattctaatctcgctaatcc

SEQ ID NO: 258993 - DNA, 25 bp, Artificial
  probe
  misc_feature (1)..(25): SEQ ID NO: 240; WAN0249I6; Start 83; Stop 107
ttgaattggttttgaggagttagaa

SEQ ID NO: 258994 - DNA, 25 bp, Artificial
  probe
  misc_feature (1)..(25): SEQ ID NO: 240; WAN0249I6; Start 82; Stop 106
attgaattggttttgaggagttaga

SEQ ID NO: 258995 - DNA, 25 bp, Artificial
  probe
  misc_feature (1)..(25): SEQ ID NO: 240; WAN0249I6; Start 81; Stop 105
cattgaattggttttgaggagttag

SEQ ID NO: 258996 - DNA, 25 bp, Artificial
  probe
  misc_feature (1)..(25): SEQ ID NO: 240; WAN0249I6; Start 5; Stop 29
tcgattctaatctcgctaatccttt

SEQ ID NO: 258997 - DNA, 25 bp, Artificial
  probe
  misc_feature (1)..(25): SEQ ID NO: 240; WAN0249I6; Start 80; Stop 104
tcattgaattggttttgaggagtta

SEQ ID NO: 258998 - DNA, 25 bp, Artificial
  probe
  misc_feature (1)..(25): SEQ ID NO: 240; WAN0249I6; Start 73; Stop 97
aaaagtctcattgaattggttttga

SEQ ID NO: 258999 - DNA, 25 bp, Artificial
  probe
  misc_feature (1)..(25): SEQ ID NO: 240; WAN0249I6; Start 6; Stop 30
cgattctaatctcgctaatcctttt

SEQ ID NO: 259000 - DNA, 25 bp, Artificial
  probe
  misc_feature (1)..(25): SEQ ID NO: 240; WAN0249I6; Start 32; Stop 56
aatccagaataagggaaatatgtta

SEQ ID NO: 259001 - DNA, 25 bp, Artificial
  probe
  misc_feature (1)..(25): SEQ ID NO: 240; WAN0249I6; Start 31; Stop 55
taatccagaataagggaaatatgtt

SEQ ID NO: 259002 - DNA, 25 bp, Artificial
  probe
  misc_feature (1)..(25): SEQ ID NO: 240; WAN0249I6; Start 30; Stop 54
ttaatccagaataagggaaatatgt

SEQ ID NO: 259003 - DNA, 25 bp, Artificial
  probe
  misc_feature (1)..(25): SEQ ID NO: 240; WAN0249I6; Start 35; Stop 59
ccagaataagggaaatatgttatac

SEQ ID NO: 259004 - DNA, 25 bp, Artificial
  probe
  misc_feature (1)..(25): SEQ ID NO: 240; WAN0249I6; Start 33; Stop 57
atccagaataagggaaatatgttat

SEQ ID NO: 259005 - DNA, 25 bp, Artificial
  probe
  misc_feature (1)..(25): SEQ ID NO: 240; WAN0249I6; Start 79; Stop 103
ctcattgaattggttttgaggagtt

SEQ ID NO: 259006 - DNA, 25 bp, Artificial
  probe
  misc_feature (1)..(25): SEQ ID NO: 240; WAN0249I6; Start 75; Stop 99
aagtctcattgaattggttttgagg

SEQ ID NO: 259007 - DNA, 25 bp, Artificial
  probe
  misc_feature (1)..(25): SEQ ID NO: 240; WAN0249I6; Start 77; Stop 101
gtctcattgaattggttttgaggag

SEQ ID NO: 259008 - DNA, 25 bp, Artificial
  probe
  misc_feature (1)..(25): SEQ ID NO: 240; WAN0249I6; Start 78; Stop 102
tctcattgaattggttttgaggagt

SEQ ID NO: 259009 - DNA, 25 bp, Artificial
  probe
  misc_feature (1)..(25): SEQ ID NO: 240; WAN0249I6; Start 76; Stop 100
agtctcattgaattggttttgagga

SEQ ID NO: 259010 - DNA, 25 bp, Artificial
  probe
  misc_feature (1)..(25): SEQ ID NO: 240; WAN0249I6; Start 74; Stop 98
aaagtctcattgaattggttttgag

SEQ ID NO: 259011 - DNA, 25 bp, Artificial
  probe
  misc_feature (1)..(25): SEQ ID NO: 241; WAN024A79; Start 28; Stop 52
ggatattgtagcaccttgagttata

SEQ ID NO: 259012 - DNA, 25 bp, Artificial
  probe
  misc_feature (1)..(25): SEQ ID NO: 241; WAN024A79; Start 27; Stop 51
aggatattgtagcaccttgagttat

SEQ ID NO: 259013 - DNA, 25 bp, Artificial
  probe
  misc_feature (1)..(25): SEQ ID NO: 241; WAN024A79; Start 31; Stop 55
tattgtagcaccttgagttatagtt

SEQ ID NO: 259014 - DNA, 25 bp, Artificial
  probe
  misc_feature (1)..(25): SEQ ID NO: 241; WAN024A79; Start 30; Stop 54
atattgtagcaccttgagttatagt

SEQ ID NO: 259015 - DNA, 25 bp, Artificial
  probe
  misc_feature (1)..(25): SEQ ID NO: 241; WAN024A79; Start 29; Stop 53
gatattgtagcaccttgagttatag

SEQ ID NO: 259016 - DNA, 25 bp, Artificial
  probe
  misc_feature (1)..(25): SEQ ID NO: 241; WAN024A79; Start 35; Stop 59
gtagcaccttgagttatagtttaca

SEQ ID NO: 259017 - DNA, 25 bp, Artificial
  probe
  misc_feature (1)..(25): SEQ ID NO: 241; WAN024A79; Start 34; Stop 58
tgtagcaccttgagttatagtttac

SEQ ID NO: 259018 - DNA, 25 bp, Artificial
  probe
  misc_feature (1)..(25): SEQ ID NO: 241; WAN024A79; Start 32; Stop 56
attgtagcaccttgagttatagttt

SEQ ID NO: 259019 - DNA, 25 bp, Artificial
  probe
  misc_feature (1)..(25): SEQ ID NO: 241; WAN024A79; Start 37; Stop 61
agcaccttgagttatagtttacaaa

SEQ ID NO: 259020 - DNA, 25 bp, Artificial
  probe
  misc_feature (1)..(25): SEQ ID NO: 241; WAN024A79; Start 33; Stop 57
ttgtagcaccttgagttatagttta

SEQ ID NO: 259021 - DNA, 25 bp, Artificial
  probe
  misc_feature (1)..(25): SEQ ID NO: 241; WAN024A79; Start 36; Stop 60
tagcaccttgagttatagtttacaa

SEQ ID NO: 259022 - DNA, 25 bp, Artificial
  probe
  misc_feature (1)..(25): SEQ ID NO: 241; WAN024A79; Start 38; Stop 62
gcaccttgagttatagtttacaaat

SEQ ID NO: 259023 - DNA, 25 bp, Artificial
  probe
  misc_feature (1)..(25): SEQ ID NO: 241; WAN024A79; Start 26; Stop 50
aaggatattgtagcaccttgagtta

SEQ ID NO: 259024 - DNA, 25 bp, Artificial
  probe
  misc_feature (1)..(25): SEQ ID NO: 241; WAN024A79; Start 25; Stop 49
taaggatattgtagcaccttgagtt

SEQ ID NO: 259025 - DNA, 25 bp, Artificial
  probe
  misc_feature (1)..(25): SEQ ID NO: 241; WAN024A79; Start 24; Stop 48
ttaaggatattgtagcaccttgagt

SEQ ID NO: 259026 - DNA, 25 bp, Artificial
  probe
  misc_feature (1)..(25): SEQ ID NO: 241; WAN024A79; Start 23; Stop 47
attaaggatattgtagcaccttgag

SEQ ID NO: 259027 - DNA, 25 bp, Artificial
  probe
  misc_feature (1)..(25): SEQ ID NO: 241; WAN024A79; Start 22; Stop 46
tattaaggatattgtagcaccttga

SEQ ID NO: 259028 - DNA, 25 bp, Artificial
  probe
  misc_feature (1)..(25): SEQ ID NO: 241; WAN024A79; Start 21; Stop 45
ttattaaggatattgtagcaccttg

SEQ ID NO: 259029 - DNA, 25 bp, Artificial
  probe
  misc_feature (1)..(25): SEQ ID NO: 241; WAN024A79; Start 19; Stop 43
ttttattaaggatattgtagcacct

SEQ ID NO: 259030 - DNA, 25 bp, Artificial
  probe
  misc_feature (1)..(25): SEQ ID NO: 241; WAN024A79; Start 18; Stop 42
attttattaaggatattgtagcacc

SEQ ID NO: 259031 - DNA, 25 bp, Artificial
  probe
  misc_feature (1)..(25): SEQ ID NO: 241; WAN024A79; Start 20; Stop 44
tttattaaggatattgtagcacctt

SEQ ID NO: 259032 - DNA, 25 bp, Artificial
  probe
  misc_feature (1)..(25): SEQ ID NO: 241; WAN024A79; Start 1; Stop 25
aaggtgacctccatattattttatt

SEQ ID NO: 259033 - DNA, 25 bp, Artificial
  probe
  misc_feature (1)..(25): SEQ ID NO: 241; WAN024A79; Start 2; Stop 26
aggtgacctccatattattttatta

SEQ ID NO: 259034 - DNA, 25 bp, Artificial
  probe
  misc_feature (1)..(25): SEQ ID NO: 241; WAN024A79; Start 93; Stop 117
agctattaccttattttgaaaatga

SEQ ID NO: 259035 - DNA, 25 bp, Artificial
  probe
  misc_feature (1)..(25): SEQ ID NO: 242; WAN0249KM; Start 67; Stop 91
ttataattctctcattctcgtgcaa

SEQ ID NO: 259036 - DNA, 25 bp, Artificial
  probe
  misc_feature (1)..(25): SEQ ID NO: 242; WAN0249KM; Start 66; Stop 90
attataattctctcattctcgtgca

SEQ ID NO: 259037 - DNA, 25 bp, Artificial
  probe
  misc_feature (1)..(25): SEQ ID NO: 242; WAN0249KM; Start 68; Stop 92
tataattctctcattctcgtgcaaa

SEQ ID NO: 259038 - DNA, 25 bp, Artificial
  probe
  misc_feature (1)..(25): SEQ ID NO: 242; WAN0249KM; Start 73; Stop 97
ttctctcattctcgtgcaaaatatc

SEQ ID NO: 259039 - DNA, 25 bp, Artificial
  probe
  misc_feature (1)..(25): SEQ ID NO: 242; WAN0249KM; Start 71; Stop 95
aattctctcattctcgtgcaaaata

SEQ ID NO: 259040 - DNA, 25 bp, Artificial
  probe
  misc_feature (1)..(25): SEQ ID NO: 242; WAN0249KM; Start 70; Stop 94
taattctctcattctcgtgcaaaat

SEQ ID NO: 259041 - DNA, 25 bp, Artificial
  probe
  misc_feature (1)..(25): SEQ ID NO: 242; WAN0249KM; Start 69; Stop 93
ataattctctcattctcgtgcaaaa

SEQ ID NO: 259042 - DNA, 25 bp, Artificial
  probe
  misc_feature (1)..(25): SEQ ID NO: 242; WAN0249KM; Start 72; Stop 96
attctctcattctcgtgcaaaatat

SEQ ID NO: 259043 - DNA, 25 bp, Artificial
  probe
  misc_feature (1)..(25): SEQ ID NO: 242; WAN0249KM; Start 74; Stop 98
tctctcattctcgtgcaaaatatcg

SEQ ID NO: 259044 - DNA, 25 bp, Artificial
  probe
  misc_feature (1)..(25): SEQ ID NO: 242; WAN0249KM; Start 75; Stop 99
ctctcattctcgtgcaaaatatcgg

SEQ ID NO: 259045 - DNA, 25 bp, Artificial
  probe
  misc_feature (1)..(25): SEQ ID NO: 242; WAN0249KM; Start 78; Stop 102
tcattctcgtgcaaaatatcgggtt

SEQ ID NO: 259046 - DNA, 25 bp, Artificial
  probe
  misc_feature (1)..(25): SEQ ID NO: 242; WAN0249KM; Start 76; Stop 100
tctcattctcgtgcaaaatatcggg

SEQ ID NO: 259047 - DNA, 25 bp, Artificial
  probe
  misc_feature (1)..(25): SEQ ID NO: 242; WAN0249KM; Start 77; Stop 101
ctcattctcgtgcaaaatatcgggt

SEQ ID NO: 259048 - DNA, 25 bp, Artificial
  probe
  misc_feature (1)..(25): SEQ ID NO: 243; WAN024AIE; Start 155; Stop 179
tctatgtaatcgtattctccaagtt

SEQ ID NO: 259049 - DNA, 25 bp, Artificial
  probe
  misc_feature (1)..(25): SEQ ID NO: 243; WAN024AIE; Start 154; Stop 178
ttctatgtaatcgtattctccaagt

SEQ ID NO: 259050 - DNA, 25 bp, Artificial
  probe
  misc_feature (1)..(25): SEQ ID NO: 243; WAN024AIE; Start 150; Stop 174
ccaattctatgtaatcgtattctcc

SEQ ID NO: 259051 - DNA, 25 bp, Artificial
  probe
  misc_feature (1)..(25): SEQ ID NO: 243; WAN024AIE; Start 151; Stop 175
caattctatgtaatcgtattctcca

SEQ ID NO: 259052 - DNA, 25 bp, Artificial
  probe
  misc_feature (1)..(25): SEQ ID NO: 243; WAN024AIE; Start 101; Stop 125
gtcagcataaatatgatacagtgga

SEQ ID NO: 259053 - DNA, 25 bp, Artificial
  probe
  misc_feature (1)..(25): SEQ ID NO: 243; WAN024AIE; Start 100; Stop 124
agtcagcataaatatgatacagtgg

SEQ ID NO: 259054 - DNA, 25 bp, Artificial
  probe
  misc_feature (1)..(25): SEQ ID NO: 243; WAN024AIE; Start 153; Stop 177
attctatgtaatcgtattctccaag

SEQ ID NO: 259055 - DNA, 25 bp, Artificial
  probe
  misc_feature (1)..(25): SEQ ID NO: 243; WAN024AIE; Start 149; Stop 173
tccaattctatgtaatcgtattctc

SEQ ID NO: 259056 - DNA, 25 bp, Artificial
  probe
  misc_feature (1)..(25): SEQ ID NO: 243; WAN024AIE; Start 145; Stop 169
cgtttccaattctatgtaatcgtat

SEQ ID NO: 259057 - DNA, 25 bp, Artificial
  probe
  misc_feature (1)..(25): SEQ ID NO: 243; WAN024AIE; Start 102; Stop 126
tcagcataaatatgatacagtggaa

SEQ ID NO: 259058 - DNA, 25 bp, Artificial
  probe
  misc_feature (1)..(25): SEQ ID NO: 243; WAN024AIE; Start 152; Stop 176
aattctatgtaatcgtattctccaa

SEQ ID NO: 259059 - DNA, 25 bp, Artificial
  probe
  misc_feature (1)..(25): SEQ ID NO: 243; WAN024AIE; Start 148; Stop 172
ttccaattctatgtaatcgtattct

SEQ ID NO: 259060 - DNA, 25 bp, Artificial
  probe
  misc_feature (1)..(25): SEQ ID NO: 243; WAN024AIE; Start 103; Stop 127
cagcataaatatgatacagtggaat

SEQ ID NO: 259061 - DNA, 25 bp, Artificial
  probe
  misc_feature (1)..(25): SEQ ID NO: 243; WAN024AIE; Start 156; Stop 180
ctatgtaatcgtattctccaagttt

SEQ ID NO: 259062 - DNA, 25 bp, Artificial
  probe
  misc_feature (1)..(25): SEQ ID NO: 243; WAN024AIE; Start 66; Stop 90
agagaatagagagttttgagcagat

SEQ ID NO: 259063 - DNA, 25 bp, Artificial
  probe
  misc_feature (1)..(25): SEQ ID NO: 243; WAN024AIE; Start 99; Stop 123
aagtcagcataaatatgatacagtg

SEQ ID NO: 259064 - DNA, 25 bp, Artificial
  probe
  misc_feature (1)..(25): SEQ ID NO: 243; WAN024AIE; Start 65; Stop 89
tagagaatagagagttttgagcaga

SEQ ID NO: 259065 - DNA, 25 bp, Artificial
  probe
  misc_feature (1)..(25): SEQ ID NO: 243; WAN024AIE; Start 67; Stop 91
gagaatagagagttttgagcagatt

SEQ ID NO: 259066 - DNA, 25 bp, Artificial
  probe
  misc_feature (1)..(25): SEQ ID NO: 243; WAN024AIE; Start 158; Stop 182
atgtaatcgtattctccaagtttaa

SEQ ID NO: 259067 - DNA, 25 bp, Artificial
  probe
  misc_feature (1)..(25): SEQ ID NO: 243; WAN024AIE; Start 68; Stop 92
agaatagagagttttgagcagattt

SEQ ID NO: 259068 - DNA, 25 bp, Artificial
  probe
  misc_feature (1)..(25): SEQ ID NO: 243; WAN024AIE; Start 64; Stop 88
atagagaatagagagttttgagcag

SEQ ID NO: 259069 - DNA, 25 bp, Artificial
  probe
  misc_feature (1)..(25): SEQ ID NO: 243; WAN024AIE; Start 98; Stop 122
aaagtcagcataaatatgatacagt

SEQ ID NO: 259070 - DNA, 25 bp, Artificial
  probe
  misc_feature (1)..(25): SEQ ID NO: 243; WAN024AIE; Start 69; Stop 93
gaatagagagttttgagcagatttt

SEQ ID NO: 259071 - DNA, 25 bp, Artificial
  probe
  misc_feature (1)..(25): SEQ ID NO: 243; WAN024AIE; Start 63; Stop 87
aatagagaatagagagttttgagca

SEQ ID NO: 259072 - DNA, 25 bp, Artificial
  probe
  misc_feature (1)..(25): SEQ ID NO: 243; WAN024AIE; Start 159; Stop 183
tgtaatcgtattctccaagtttaaa

SEQ ID NO: 259073 - DNA, 25 bp, Artificial
  probe
  misc_feature (1)..(25): SEQ ID NO: 243; WAN024AIE; Start 62; Stop 86
gaatagagaatagagagttttgagc

SEQ ID NO: 259074 - DNA, 25 bp, Artificial
  probe
  misc_feature (1)..(25): SEQ ID NO: 243; WAN024AIE; Start 157; Stop 181
tatgtaatcgtattctccaagttta

SEQ ID NO: 259075 - DNA, 25 bp, Artificial
  probe
  misc_feature (1)..(25): SEQ ID NO: 243; WAN024AIE; Start 146; Stop 170
gtttccaattctatgtaatcgtatt

SEQ ID NO: 259076 - DNA, 25 bp, Artificial
  probe
  misc_feature (1)..(25): SEQ ID NO: 243; WAN024AIE; Start 144; Stop 168
acgtttccaattctatgtaatcgta

SEQ ID NO: 259077 - DNA, 25 bp, Artificial
  probe
  misc_feature (1)..(25): SEQ ID NO: 243; WAN024AIE; Start 104; Stop 128
agcataaatatgatacagtggaata

SEQ ID NO: 259078 - DNA, 25 bp, Artificial
  probe
  misc_feature (1)..(25): SEQ ID NO: 243; WAN024AIE; Start 105; Stop 129
gcataaatatgatacagtggaatag

SEQ ID NO: 259079 - DNA, 25 bp, Artificial
  probe
  misc_feature (1)..(25): SEQ ID NO: 243; WAN024AIE; Start 147; Stop 171
tttccaattctatgtaatcgtattc

SEQ ID NO: 259080 - DNA, 25 bp, Artificial
  probe
  misc_feature (1)..(25): SEQ ID NO: 243; WAN024AIE; Start 142; Stop 166
gaacgtttccaattctatgtaatcg

SEQ ID NO: 259081 - DNA, 25 bp, Artificial
  probe
  misc_feature (1)..(25): SEQ ID NO: 244; WAN0249T4; Start 41; Stop 65
aacgcataaaatcaggtgttcaaaa

SEQ ID NO: 259082 - DNA, 25 bp, Artificial
  probe
  misc_feature (1)..(25): SEQ ID NO: 244; WAN0249T4; Start 40; Stop 64
aaacgcataaaatcaggtgttcaaa

SEQ ID NO: 259083 - DNA, 25 bp, Artificial
  probe
  misc_feature (1)..(25): SEQ ID NO: 244; WAN0249T4; Start 39; Stop 63
aaaacgcataaaatcaggtgttcaa

SEQ ID NO: 259084 - DNA, 25 bp, Artificial
  probe
  misc_feature (1)..(25): SEQ ID NO: 244; WAN0249T4; Start 65; Stop 89
aaccttgattttatgcgttttatca

SEQ ID NO: 259085 - DNA, 25 bp, Artificial
  probe
  misc_feature (1)..(25): SEQ ID NO: 244; WAN0249T4; Start 66; Stop 90
accttgattttatgcgttttatcat

SEQ ID NO: 259086 - DNA, 25 bp, Artificial
  probe
  misc_feature (1)..(25): SEQ ID NO: 244; WAN0249T4; Start 64; Stop 88
aaaccttgattttatgcgttttatc

SEQ ID NO: 259087 - DNA, 25 bp, Artificial
  probe
  misc_feature (1)..(25): SEQ ID NO: 244; WAN0249T4; Start 63; Stop 87
aaaaccttgattttatgcgttttat

SEQ ID NO: 259088 - DNA, 25 bp, Artificial
  probe
  misc_feature (1)..(25): SEQ ID NO: 245; WAN0249EB; Start 19; Stop 43
taaatactgagggagtggaggttta

SEQ ID NO: 259089 - DNA, 25 bp, Artificial
  probe
  misc_feature (1)..(25): SEQ ID NO: 245; WAN0249EB; Start 20; Stop 44
aaatactgagggagtggaggtttaa

SEQ ID NO: 259090 - DNA, 25 bp, Artificial
  probe
  misc_feature (1)..(25): SEQ ID NO: 245; WAN0249EB; Start 47; Stop 71
tctgacatttgtaagagttggatct

SEQ ID NO: 259091 - DNA, 25 bp, Artificial
  probe
  misc_feature (1)..(25): SEQ ID NO: 245; WAN0249EB; Start 49; Stop 73
tgacatttgtaagagttggatctcc

SEQ ID NO: 259092 - DNA, 25 bp, Artificial
  probe
  misc_feature (1)..(25): SEQ ID NO: 245; WAN0249EB; Start 18; Stop 42
gtaaatactgagggagtggaggttt

SEQ ID NO: 259093 - DNA, 25 bp, Artificial
  probe
  misc_feature (1)..(25): SEQ ID NO: 245; WAN0249EB; Start 48; Stop 72
ctgacatttgtaagagttggatctc

SEQ ID NO: 259094 - DNA, 25 bp, Artificial
  probe
  misc_feature (1)..(25): SEQ ID NO: 245; WAN0249EB; Start 50; Stop 74
gacatttgtaagagttggatctccc

SEQ ID NO: 259095 - DNA, 25 bp, Artificial
  probe
  misc_feature (1)..(25): SEQ ID NO: 245; WAN0249EB; Start 17; Stop 41
agtaaatactgagggagtggaggtt

SEQ ID NO: 259096 - DNA, 25 bp, Artificial
  probe
  misc_feature (1)..(25): SEQ ID NO: 245; WAN0249EB; Start 21; Stop 45
aatactgagggagtggaggtttaaa

SEQ ID NO: 259097 - DNA, 25 bp, Artificial
  probe
  misc_feature (1)..(25): SEQ ID NO: 245; WAN0249EB; Start 66; Stop 90
ggatctcccctcttctattttgttt

SEQ ID NO: 259098 - DNA, 25 bp, Artificial
  probe
  misc_feature (1)..(25): SEQ ID NO: 245; WAN0249EB; Start 63; Stop 87
gttggatctcccctcttctattttg

SEQ ID NO: 259099 - DNA, 25 bp, Artificial
  probe
  misc_feature (1)..(25): SEQ ID NO: 245; WAN0249EB; Start 62; Stop 86
agttggatctcccctcttctatttt

SEQ ID NO: 259100 - DNA, 25 bp, Artificial
  probe
  misc_feature (1)..(25): SEQ ID NO: 245; WAN0249EB; Start 65; Stop 89
tggatctcccctcttctattttgtt

SEQ ID NO: 259101 - DNA, 25 bp, Artificial
  probe
  misc_feature (1)..(25): SEQ ID NO: 245; WAN0249EB; Start 64; Stop 88
ttggatctcccctcttctattttgt

SEQ ID NO: 259102 - DNA, 25 bp, Artificial
  probe
  misc_feature (1)..(25): SEQ ID NO: 245; WAN0249EB; Start 67; Stop 91
gatctcccctcttctattttgtttt

SEQ ID NO: 259103 - DNA, 25 bp, Artificial
  probe
  misc_feature (1)..(25): SEQ ID NO: 245; WAN0249EB; Start 46; Stop 70
ctctgacatttgtaagagttggatc

SEQ ID NO: 259104 - DNA, 25 bp, Artificial
  probe
  misc_feature (1)..(25): SEQ ID NO: 245; WAN0249EB; Start 61; Stop 85
gagttggatctcccctcttctattt

SEQ ID NO: 259105 - DNA, 25 bp, Artificial
  probe
  misc_feature (1)..(25): SEQ ID NO: 245; WAN0249EB; Start 53; Stop 77
atttgtaagagttggatctcccctc

SEQ ID NO: 259106 - DNA, 25 bp, Artificial
  probe
  misc_feature (1)..(25): SEQ ID NO: 245; WAN0249EB; Start 52; Stop 76
catttgtaagagttggatctcccct

SEQ ID NO: 259107 - DNA, 25 bp, Artificial
  probe
  misc_feature (1)..(25): SEQ ID NO: 245; WAN0249EB; Start 51; Stop 75
acatttgtaagagttggatctcccc

SEQ ID NO: 259108 - DNA, 25 bp, Artificial
  probe
  misc_feature (1)..(25): SEQ ID NO: 245; WAN0249EB; Start 60; Stop 84
agagttggatctcccctcttctatt

SEQ ID NO: 259109 - DNA, 25 bp, Artificial
  probe
  misc_feature (1)..(25): SEQ ID NO: 245; WAN0249EB; Start 54; Stop 78
tttgtaagagttggatctcccctct

SEQ ID NO: 259110 - DNA, 25 bp, Artificial
  probe
  misc_feature (1)..(25): SEQ ID NO: 245; WAN0249EB; Start 16; Stop 40
cagtaaatactgagggagtggaggt

SEQ ID NO: 259111 - DNA, 25 bp, Artificial
  probe
  misc_feature (1)..(25): SEQ ID NO: 246; WAN024AFC; Start 85; Stop 109
ttcacagctaagaatagtagaagtt

SEQ ID NO: 259112 - DNA, 25 bp, Artificial
  probe
  misc_feature (1)..(25): SEQ ID NO: 246; WAN024AFC; Start 86; Stop 110
tcacagctaagaatagtagaagtta

SEQ ID NO: 259113 - DNA, 25 bp, Artificial
  probe
  misc_feature (1)..(25): SEQ ID NO: 246; WAN024AFC; Start 87; Stop 111
cacagctaagaatagtagaagttaa

SEQ ID NO: 259114 - DNA, 25 bp, Artificial
  probe
  misc_feature (1)..(25): SEQ ID NO: 246; WAN024AFC; Start 84; Stop 108
tttcacagctaagaatagtagaagt

SEQ ID NO: 259115 - DNA, 25 bp, Artificial
  probe
  misc_feature (1)..(25): SEQ ID NO: 246; WAN024AFC; Start 36; Stop 60
tggcctttagattagaagactgaaa

SEQ ID NO: 259116 - DNA, 25 bp, Artificial
  probe
  misc_feature (1)..(25): SEQ ID NO: 246; WAN024AFC; Start 35; Stop 59
gtggcctttagattagaagactgaa

SEQ ID NO: 259117 - DNA, 25 bp, Artificial
  probe
  misc_feature (1)..(25): SEQ ID NO: 246; WAN024AFC; Start 155; Stop 179
aagttccactggttttcatagtcta

SEQ ID NO: 259118 - DNA, 25 bp, Artificial
  probe
  misc_feature (1)..(25): SEQ ID NO: 246; WAN024AFC; Start 154; Stop 178
taagttccactggttttcatagtct

SEQ ID NO: 259119 - DNA, 25 bp, Artificial
  probe
  misc_feature (1)..(25): SEQ ID NO: 246; WAN024AFC; Start 153; Stop 177
gtaagttccactggttttcatagtc

SEQ ID NO: 259120 - DNA, 25 bp, Artificial
  probe
  misc_feature (1)..(25): SEQ ID NO: 246; WAN024AFC; Start 31; Stop 55
ggaagtggcctttagattagaagac

SEQ ID NO: 259121 - DNA, 25 bp, Artificial
  probe
  misc_feature (1)..(25): SEQ ID NO: 246; WAN024AFC; Start 29; Stop 53
ctggaagtggcctttagattagaag

SEQ ID NO: 259122 - DNA, 25 bp, Artificial
  probe
  misc_feature (1)..(25): SEQ ID NO: 246; WAN024AFC; Start 156; Stop 180
agttccactggttttcatagtctat

SEQ ID NO: 259123 - DNA, 25 bp, Artificial
  probe
  misc_feature (1)..(25): SEQ ID NO: 246; WAN024AFC; Start 152; Stop 176
ggtaagttccactggttttcatagt

SEQ ID NO: 259124 - DNA, 25 bp, Artificial
  probe
  misc_feature (1)..(25): SEQ ID NO: 246; WAN024AFC; Start 32; Stop 56
gaagtggcctttagattagaagact

SEQ ID NO: 259125 - DNA, 25 bp, Artificial
  probe
  misc_feature (1)..(25): SEQ ID NO: 246; WAN024AFC; Start 26; Stop 50
ttactggaagtggcctttagattag

SEQ ID NO: 259126 - DNA, 25 bp, Artificial
  probe
  misc_feature (1)..(25): SEQ ID NO: 246; WAN024AFC; Start 33; Stop 57
aagtggcctttagattagaagactg

SEQ ID NO: 259127 - DNA, 25 bp, Artificial
  probe
  misc_feature (1)..(25): SEQ ID NO: 246; WAN024AFC; Start 30; Stop 54
tggaagtggcctttagattagaaga

SEQ ID NO: 259128 - DNA, 25 bp, Artificial
  probe
  misc_feature (1)..(25): SEQ ID NO: 246; WAN024AFC; Start 25; Stop 49
tttactggaagtggcctttagatta

SEQ ID NO: 259129 - DNA, 25 bp, Artificial
  probe
  misc_feature (1)..(25): SEQ ID NO: 246; WAN024AFC; Start 27; Stop 51
tactggaagtggcctttagattaga

SEQ ID NO: 259130 - DNA, 25 bp, Artificial
  probe
  misc_feature (1)..(25): SEQ ID NO: 246; WAN024AFC; Start 24; Stop 48
ctttactggaagtggcctttagatt

SEQ ID NO: 259131 - DNA, 25 bp, Artificial
  probe
  misc_feature (1)..(25): SEQ ID NO: 246; WAN024AFC; Start 157; Stop 181
gttccactggttttcatagtctatt

SEQ ID NO: 259132 - DNA, 25 bp, Artificial
  probe
  misc_feature (1)..(25): SEQ ID NO: 246; WAN024AFC; Start 34; Stop 58
agtggcctttagattagaagactga

SEQ ID NO: 259133 - DNA, 25 bp, Artificial
  probe
  misc_feature (1)..(25): SEQ ID NO: 246; WAN024AFC; Start 21; Stop 45
tttctttactggaagtggcctttag

SEQ ID NO: 259134 - DNA, 25 bp, Artificial
  probe
  misc_feature (1)..(25): SEQ ID NO: 246; WAN024AFC; Start 151; Stop 175
gggtaagttccactggttttcatag

SEQ ID NO: 259135 - DNA, 25 bp, Artificial
  probe
  misc_feature (1)..(25): SEQ ID NO: 246; WAN024AFC; Start 150; Stop 174
agggtaagttccactggttttcata

SEQ ID NO: 259136 - DNA, 25 bp, Artificial
  probe
  misc_feature (1)..(25): SEQ ID NO: 246; WAN024AFC; Start 28; Stop 52
actggaagtggcctttagattagaa

SEQ ID NO: 259137 - DNA, 25 bp, Artificial
  probe
  misc_feature (1)..(25): SEQ ID NO: 246; WAN024AFC; Start 23; Stop 47
tctttactggaagtggcctttagat

SEQ ID NO: 259138 - DNA, 25 bp, Artificial
  probe
  misc_feature (1)..(25): SEQ ID NO: 246; WAN024AFC; Start 22; Stop 46
ttctttactggaagtggcctttaga

SEQ ID NO: 259139 - DNA, 25 bp, Artificial
  probe
  misc_feature (1)..(25): SEQ ID NO: 246; WAN024AFC; Start 38; Stop 62
gcctttagattagaagactgaaaat

SEQ ID NO: 259140 - DNA, 25 bp, Artificial
  probe
  misc_feature (1)..(25): SEQ ID NO: 246; WAN024AFC; Start 159; Stop 183
tccactggttttcatagtctattaa

SEQ ID NO: 259141 - DNA, 25 bp, Artificial
  probe
  misc_feature (1)..(25): SEQ ID NO: 246; WAN024AFC; Start 158; Stop 182
ttccactggttttcatagtctatta

SEQ ID NO: 259142 - DNA, 25 bp, Artificial
  probe
  misc_feature (1)..(25): SEQ ID NO: 246; WAN024AFC; Start 88; Stop 112
acagctaagaatagtagaagttaat

SEQ ID NO: 259143 - DNA, 25 bp, Artificial
  probe
  misc_feature (1)..(25): SEQ ID NO: 246; WAN024AFC; Start 149; Stop 173
cagggtaagttccactggttttcat

SEQ ID NO: 259144 - DNA, 25 bp, Artificial
  probe
  misc_feature (1)..(25): SEQ ID NO: 247; WAN024DAB-3; Start 348; Stop 372
attagagatattagtcaacgccgaa

SEQ ID NO: 259145 - DNA, 25 bp, Artificial
  probe
  misc_feature (1)..(25): SEQ ID NO: 247; WAN024DAB-3; Start 346; Stop 370
gtattagagatattagtcaacgccg

SEQ ID NO: 259146 - DNA, 25 bp, Artificial
  probe
  misc_feature (1)..(25): SEQ ID NO: 247; WAN024DAB-3; Start 347; Stop 371
tattagagatattagtcaacgccga

SEQ ID NO: 259147 - DNA, 25 bp, Artificial
  probe
  misc_feature (1)..(25): SEQ ID NO: 247; WAN024DAB-3; Start 345; Stop 369
agtattagagatattagtcaacgcc

SEQ ID NO: 259148 - DNA, 25 bp, Artificial
  probe
  misc_feature (1)..(25): SEQ ID NO: 247; WAN024DAB-3; Start 706; Stop 730
atcaatgtgaatgaactctcaacac

SEQ ID NO: 259149 - DNA, 25 bp, Artificial
  probe
  misc_feature (1)..(25): SEQ ID NO: 247; WAN024DAB-3; Start 704; Stop 728
gtatcaatgtgaatgaactctcaac

SEQ ID NO: 259150 - DNA, 25 bp, Artificial
  probe
  misc_feature (1)..(25): SEQ ID NO: 247; WAN024DAB-3; Start 703; Stop 727
agtatcaatgtgaatgaactctcaa

SEQ ID NO: 259151 - DNA, 25 bp, Artificial
  probe
  misc_feature (1)..(25): SEQ ID NO: 247; WAN024DAB-3; Start 705; Stop 729
tatcaatgtgaatgaactctcaaca

SEQ ID NO: 259152 - DNA, 25 bp, Artificial
  probe
  misc_feature (1)..(25): SEQ ID NO: 247; WAN024DAB-3; Start 709; Stop 733
aatgtgaatgaactctcaacaccaa

SEQ ID NO: 259153 - DNA, 25 bp, Artificial
  probe
  misc_feature (1)..(25): SEQ ID NO: 247; WAN024DAB-3; Start 861; Stop 885
ttcagtaacagataccgattatagg

SEQ ID NO: 259154 - DNA, 25 bp, Artificial
  probe
  misc_feature (1)..(25): SEQ ID NO: 247; WAN024DAB-3; Start 707; Stop 731
tcaatgtgaatgaactctcaacacc

SEQ ID NO: 259155 - DNA, 25 bp, Artificial
  probe
  misc_feature (1)..(25): SEQ ID NO: 247; WAN024DAB-3; Start 868; Stop 892
acagataccgattatagggagtttg

SEQ ID NO: 259156 - DNA, 25 bp, Artificial
  probe
  misc_feature (1)..(25): SEQ ID NO: 247; WAN024DAB-3; Start 708; Stop 732
caatgtgaatgaactctcaacacca

SEQ ID NO: 259157 - DNA, 25 bp, Artificial
  probe
  misc_feature (1)..(25): SEQ ID NO: 247; WAN024DAB-3; Start 349; Stop 373
ttagagatattagtcaacgccgaaa

SEQ ID NO: 259158 - DNA, 25 bp, Artificial
  probe
  misc_feature (1)..(25): SEQ ID NO: 247; WAN024DAB-3; Start 1302; Stop 1326
agaggaattgagtgattacttaaca

SEQ ID NO: 259159 - DNA, 25 bp, Artificial
  probe
  misc_feature (1)..(25): SEQ ID NO: 247; WAN024DAB-3; Start 870; Stop 894
agataccgattatagggagtttgct

SEQ ID NO: 259160 - DNA, 25 bp, Artificial
  probe
  misc_feature (1)..(25): SEQ ID NO: 247; WAN024DAB-3; Start 869; Stop 893
cagataccgattatagggagtttgc

SEQ ID NO: 259161 - DNA, 25 bp, Artificial
  probe
  misc_feature (1)..(25): SEQ ID NO: 247; WAN024DAB-3; Start 702; Stop 726
tagtatcaatgtgaatgaactctca

SEQ ID NO: 259162 - DNA, 25 bp, Artificial
  probe
  misc_feature (1)..(25): SEQ ID NO: 247; WAN024DAB-3; Start 168; Stop 192
tcactttggagaggaattaaacact

SEQ ID NO: 259163 - DNA, 25 bp, Artificial
  probe
  misc_feature (1)..(25): SEQ ID NO: 247; WAN024DAB-3; Start 865; Stop 889
gtaacagataccgattatagggagt

SEQ ID NO: 259164 - DNA, 25 bp, Artificial
  probe
  misc_feature (1)..(25): SEQ ID NO: 247; WAN024DAB-3; Start 863; Stop 887
cagtaacagataccgattataggga

SEQ ID NO: 259165 - DNA, 25 bp, Artificial
  probe
  misc_feature (1)..(25): SEQ ID NO: 247; WAN024DAB-3; Start 862; Stop 886
tcagtaacagataccgattataggg

SEQ ID NO: 259166 - DNA, 25 bp, Artificial
  probe
  misc_feature (1)..(25): SEQ ID NO: 247; WAN024DAB-3; Start 169; Stop 193
cactttggagaggaattaaacactt

SEQ ID NO: 259167 - DNA, 25 bp, Artificial
  probe
  misc_feature (1)..(25): SEQ ID NO: 247; WAN024DAB-3; Start 167; Stop 191
ttcactttggagaggaattaaacac

SEQ ID NO: 259168 - DNA, 25 bp, Artificial
  probe
  misc_feature (1)..(25): SEQ ID NO: 247; WAN024DAB-3; Start 1333; Stop 1357
aaccagaaattatctttacgaggga

SEQ ID NO: 259169 - DNA, 25 bp, Artificial
  probe
  misc_feature (1)..(25): SEQ ID NO: 247; WAN024DAB-3; Start 864; Stop 888
agtaacagataccgattatagggag

SEQ ID NO: 259170 - DNA, 25 bp, Artificial
  probe
  misc_feature (1)..(25): SEQ ID NO: 247; WAN024DAB-3; Start 1334; Stop 1358
accagaaattatctttacgagggat

SEQ ID NO: 259171 - DNA, 25 bp, Artificial
  probe
  misc_feature (1)..(25): SEQ ID NO: 247; WAN024DAB-3; Start 1305; Stop 1329
ggaattgagtgattacttaacaact

SEQ ID NO: 259172 - DNA, 25 bp, Artificial
  probe
  misc_feature (1)..(25): SEQ ID NO: 247; WAN024DAB-3; Start 1304; Stop 1328
aggaattgagtgattacttaacaac

SEQ ID NO: 259173 - DNA, 25 bp, Artificial
  probe
  misc_feature (1)..(25): SEQ ID NO: 247; WAN024DAB-3; Start 170; Stop 194
actttggagaggaattaaacacttt

SEQ ID NO: 259174 - DNA, 25 bp, Artificial
  probe
  misc_feature (1)..(25): SEQ ID NO: 247; WAN024DAB-3; Start 1335; Stop 1359
ccagaaattatctttacgagggatg

SEQ ID NO: 259175 - DNA, 25 bp, Artificial
  probe
  misc_feature (1)..(25): SEQ ID NO: 247; WAN024DAB-3; Start 867; Stop 891
aacagataccgattatagggagttt

SEQ ID NO: 259176 - DNA, 25 bp, Artificial
  probe
  misc_feature (1)..(25): SEQ ID NO: 247; WAN024DAB-3; Start 344; Stop 368
gagtattagagatattagtcaacgc

SEQ ID NO: 259177 - DNA, 25 bp, Artificial
  probe
  misc_feature (1)..(25): SEQ ID NO: 248; WAN024ALD; Start 127; Stop 151
ccactacaacatatcatacaggagg

SEQ ID NO: 259178 - DNA, 25 bp, Artificial
  probe
  misc_feature (1)..(25): SEQ ID NO: 248; WAN024ALD; Start 128; Stop 152
cactacaacatatcatacaggaggt

SEQ ID NO: 259179 - DNA, 25 bp, Artificial
  probe
  misc_feature (1)..(25): SEQ ID NO: 248; WAN024ALD; Start 126; Stop 150
gccactacaacatatcatacaggag

SEQ ID NO: 259180 - DNA, 25 bp, Artificial
  probe
  misc_feature (1)..(25): SEQ ID NO: 248; WAN024ALD; Start 120; Stop 144
ttctccgccactacaacatatcata

SEQ ID NO: 259181 - DNA, 25 bp, Artificial
  probe
  misc_feature (1)..(25): SEQ ID NO: 248; WAN024ALD; Start 129; Stop 153
actacaacatatcatacaggaggta

SEQ ID NO: 259182 - DNA, 25 bp, Artificial
  probe
  misc_feature (1)..(25): SEQ ID NO: 248; WAN024ALD; Start 121; Stop 145
tctccgccactacaacatatcatac

SEQ ID NO: 259183 - DNA, 25 bp, Artificial
  probe
  misc_feature (1)..(25): SEQ ID NO: 248; WAN024ALD; Start 125; Stop 149
cgccactacaacatatcatacagga

SEQ ID NO: 259184 - DNA, 25 bp, Artificial
  probe
  misc_feature (1)..(25): SEQ ID NO: 248; WAN024ALD; Start 123; Stop 147
tccgccactacaacatatcatacag

SEQ ID NO: 259185 - DNA, 25 bp, Artificial
  probe
  misc_feature (1)..(25): SEQ ID NO: 248; WAN024ALD; Start 122; Stop 146
ctccgccactacaacatatcataca

SEQ ID NO: 259186 - DNA, 25 bp, Artificial
  probe
  misc_feature (1)..(25): SEQ ID NO: 248; WAN024ALD; Start 130; Stop 154
ctacaacatatcatacaggaggtac

SEQ ID NO: 259187 - DNA, 25 bp, Artificial
  probe
  misc_feature (1)..(25): SEQ ID NO: 248; WAN024ALD; Start 124; Stop 148
ccgccactacaacatatcatacagg

SEQ ID NO: 259188 - DNA, 25 bp, Artificial
  probe
  misc_feature (1)..(25): SEQ ID NO: 248; WAN024ALD; Start 119; Stop 143
tttctccgccactacaacatatcat

SEQ ID NO: 259189 - DNA, 25 bp, Artificial
  probe
  misc_feature (1)..(25): SEQ ID NO: 248; WAN024ALD; Start 118; Stop 142
gtttctccgccactacaacatatca

SEQ ID NO: 259190 - DNA, 25 bp, Artificial
  probe
  misc_feature (1)..(25): SEQ ID NO: 248; WAN024ALD; Start 102; Stop 126
tgataagatagaagtggtttctccg

SEQ ID NO: 259191 - DNA, 25 bp, Artificial
  probe
  misc_feature (1)..(25): SEQ ID NO: 248; WAN024ALD; Start 103; Stop 127
gataagatagaagtggtttctccgc

SEQ ID NO: 259192 - DNA, 25 bp, Artificial
  probe
  misc_feature (1)..(25): SEQ ID NO: 248; WAN024ALD; Start 117; Stop 141
ggtttctccgccactacaacatatc

SEQ ID NO: 259193 - DNA, 25 bp, Artificial
  probe
  misc_feature (1)..(25): SEQ ID NO: 248; WAN024ALD; Start 104; Stop 128
ataagatagaagtggtttctccgcc

SEQ ID NO: 259194 - DNA, 25 bp, Artificial
  probe
  misc_feature (1)..(25): SEQ ID NO: 248; WAN024ALD; Start 101; Stop 125
atgataagatagaagtggtttctcc

SEQ ID NO: 259195 - DNA, 25 bp, Artificial
  probe
  misc_feature (1)..(25): SEQ ID NO: 248; WAN024ALD; Start 47; Stop 71
tatgctagtggttccatagagcttt

SEQ ID NO: 259196 - DNA, 25 bp, Artificial
  probe
  misc_feature (1)..(25): SEQ ID NO: 248; WAN024ALD; Start 131; Stop 155
tacaacatatcatacaggaggtacc

SEQ ID NO: 259197 - DNA, 25 bp, Artificial
  probe
  misc_feature (1)..(25): SEQ ID NO: 248; WAN024ALD; Start 105; Stop 129
taagatagaagtggtttctccgcca

SEQ ID NO: 259198 - DNA, 25 bp, Artificial
  probe
  misc_feature (1)..(25): SEQ ID NO: 248; WAN024ALD; Start 46; Stop 70
ctatgctagtggttccatagagctt

SEQ ID NO: 259199 - DNA, 25 bp, Artificial
  probe
  misc_feature (1)..(25): SEQ ID NO: 248; WAN024ALD; Start 116; Stop 140
tggtttctccgccactacaacatat

SEQ ID NO: 259200 - DNA, 25 bp, Artificial
  probe
  misc_feature (1)..(25): SEQ ID NO: 248; WAN024ALD; Start 100; Stop 124
aatgataagatagaagtggtttctc

SEQ ID NO: 259201 - DNA, 25 bp, Artificial
  probe
  misc_feature (1)..(25): SEQ ID NO: 248; WAN024ALD; Start 21; Stop 45
tttgttgtctcccgaaaaccactag

SEQ ID NO: 259202 - DNA, 25 bp, Artificial
  probe
  misc_feature (1)..(25): SEQ ID NO: 248; WAN024ALD; Start 20; Stop 44
ttttgttgtctcccgaaaaccacta

SEQ ID NO: 259203 - DNA, 25 bp, Artificial
  probe
  misc_feature (1)..(25): SEQ ID NO: 248; WAN024ALD; Start 62; Stop 86
atagagcttttagcgtggtaacaaa

SEQ ID NO: 259204 - DNA, 25 bp, Artificial
  probe
  misc_feature (1)..(25): SEQ ID NO: 248; WAN024ALD; Start 63; Stop 87
tagagcttttagcgtggtaacaaaa

SEQ ID NO: 259205 - DNA, 25 bp, Artificial
  probe
  misc_feature (1)..(25): SEQ ID NO: 248; WAN024ALD; Start 51; Stop 75
ctagtggttccatagagcttttagc

SEQ ID NO: 259206 - DNA, 25 bp, Artificial
  probe
  misc_feature (1)..(25): SEQ ID NO: 248; WAN024ALD; Start 50; Stop 74
gctagtggttccatagagcttttag

SEQ ID NO: 259207 - DNA, 25 bp, Artificial
  probe
  misc_feature (1)..(25): SEQ ID NO: 248; WAN024ALD; Start 95; Stop 119
cctaaaatgataagatagaagtggt

SEQ ID NO: 259208 - DNA, 25 bp, Artificial
  probe
  misc_feature (1)..(25): SEQ ID NO: 248; WAN024ALD; Start 85; Stop 109
aaaagaacctcctaaaatgataaga

SEQ ID NO: 259209 - DNA, 25 bp, Artificial
  probe
  misc_feature (1)..(25): SEQ ID NO: 248; WAN024ALD; Start 43; Stop 67
tagctatgctagtggttccatagag

SEQ ID NO: 259210 - DNA, 25 bp, Artificial
  probe
  misc_feature (1)..(25): SEQ ID NO: 249; WAN024A73; Start 92; Stop 116
gtatgcttcctgacctaatcctata

SEQ ID NO: 259211 - DNA, 25 bp, Artificial
  probe
  misc_feature (1)..(25): SEQ ID NO: 249; WAN024A73; Start 91; Stop 115
cgtatgcttcctgacctaatcctat

SEQ ID NO: 259212 - DNA, 25 bp, Artificial
  probe
  misc_feature (1)..(25): SEQ ID NO: 249; WAN024A73; Start 93; Stop 117
tatgcttcctgacctaatcctatat

SEQ ID NO: 259213 - DNA, 25 bp, Artificial
  probe
  misc_feature (1)..(25): SEQ ID NO: 249; WAN024A73; Start 90; Stop 114
tcgtatgcttcctgacctaatccta

SEQ ID NO: 259214 - DNA, 25 bp, Artificial
  probe
  misc_feature (1)..(25): SEQ ID NO: 249; WAN024A73; Start 94; Stop 118
atgcttcctgacctaatcctatata

SEQ ID NO: 259215 - DNA, 25 bp, Artificial
  probe
  misc_feature (1)..(25): SEQ ID NO: 249; WAN024A73; Start 89; Stop 113
atcgtatgcttcctgacctaatcct

SEQ ID NO: 259216 - DNA, 25 bp, Artificial
  probe
  misc_feature (1)..(25): SEQ ID NO: 249; WAN024A73; Start 88; Stop 112
catcgtatgcttcctgacctaatcc

SEQ ID NO: 259217 - DNA, 25 bp, Artificial
  probe
  misc_feature (1)..(25): SEQ ID NO: 249; WAN024A73; Start 20; Stop 44
gtttgctaacgaagtcaatttatct

SEQ ID NO: 259218 - DNA, 25 bp, Artificial
  probe
  misc_feature (1)..(25): SEQ ID NO: 249; WAN024A73; Start 24; Stop 48
gctaacgaagtcaatttatctaaca

SEQ ID NO: 259219 - DNA, 25 bp, Artificial
  probe
  misc_feature (1)..(25): SEQ ID NO: 249; WAN024A73; Start 23; Stop 47
tgctaacgaagtcaatttatctaac

SEQ ID NO: 259220 - DNA, 25 bp, Artificial
  probe
  misc_feature (1)..(25): SEQ ID NO: 249; WAN024A73; Start 125; Stop 149
ttagatcattgagcactatttgtca

SEQ ID NO: 259221 - DNA, 25 bp, Artificial
  probe
  misc_feature (1)..(25): SEQ ID NO: 249; WAN024A73; Start 124; Stop 148
tttagatcattgagcactatttgtc

SEQ ID NO: 259222 - DNA, 25 bp, Artificial
  probe
  misc_feature (1)..(25): SEQ ID NO: 249; WAN024A73; Start 96; Stop 120
gcttcctgacctaatcctatatagt

SEQ ID NO: 259223 - DNA, 25 bp, Artificial
  probe
  misc_feature (1)..(25): SEQ ID NO: 249; WAN024A73; Start 95; Stop 119
tgcttcctgacctaatcctatatag

SEQ ID NO: 259224 - DNA, 25 bp, Artificial
  probe
  misc_feature (1)..(25): SEQ ID NO: 249; WAN024A73; Start 22; Stop 46
ttgctaacgaagtcaatttatctaa

SEQ ID NO: 259225 - DNA, 25 bp, Artificial
  probe
  misc_feature (1)..(25): SEQ ID NO: 249; WAN024A73; Start 21; Stop 45
tttgctaacgaagtcaatttatcta

SEQ ID NO: 259226 - DNA, 25 bp, Artificial
  probe
  misc_feature (1)..(25): SEQ ID NO: 249; WAN024A73; Start 127; Stop 151
agatcattgagcactatttgtcaaa

SEQ ID NO: 259227 - DNA, 25 bp, Artificial
  probe
  misc_feature (1)..(25): SEQ ID NO: 249; WAN024A73; Start 126; Stop 150
tagatcattgagcactatttgtcaa

SEQ ID NO: 259228 - DNA, 25 bp, Artificial
  probe
  misc_feature (1)..(25): SEQ ID NO: 249; WAN024A73; Start 42; Stop 66
tctaacaaatgactttctcatctca

SEQ ID NO: 259229 - DNA, 25 bp, Artificial
  probe
  misc_feature (1)..(25): SEQ ID NO: 249; WAN024A73; Start 28; Stop 52
acgaagtcaatttatctaacaaatg

SEQ ID NO: 259230 - DNA, 25 bp, Artificial
  probe
  misc_feature (1)..(25): SEQ ID NO: 249; WAN024A73; Start 128; Stop 152
gatcattgagcactatttgtcaaat

SEQ ID NO: 259231 - DNA, 25 bp, Artificial
  probe
  misc_feature (1)..(25): SEQ ID NO: 249; WAN024A73; Start 51; Stop 75
tgactttctcatctcataagtacaa

SEQ ID NO: 259232 - DNA, 25 bp, Artificial
  probe
  misc_feature (1)..(25): SEQ ID NO: 249; WAN024A73; Start 118; Stop 142
agtcattttagatcattgagcacta

SEQ ID NO: 259233 - DNA, 25 bp, Artificial
  probe
  misc_feature (1)..(25): SEQ ID NO: 249; WAN024A73; Start 117; Stop 141
tagtcattttagatcattgagcact

SEQ ID NO: 259234 - DNA, 25 bp, Artificial
  probe
  misc_feature (1)..(25): SEQ ID NO: 249; WAN024A73; Start 29; Stop 53
cgaagtcaatttatctaacaaatga

SEQ ID NO: 259235 - DNA, 25 bp, Artificial
  probe
  misc_feature (1)..(25): SEQ ID NO: 249; WAN024A73; Start 46; Stop 70
acaaatgactttctcatctcataag

SEQ ID NO: 259236 - DNA, 25 bp, Artificial
  probe
  misc_feature (1)..(25): SEQ ID NO: 249; WAN024A73; Start 43; Stop 67
ctaacaaatgactttctcatctcat

SEQ ID NO: 259237 - DNA, 25 bp, Artificial
  probe
  misc_feature (1)..(25): SEQ ID NO: 249; WAN024A73; Start 50; Stop 74
atgactttctcatctcataagtaca

SEQ ID NO: 259238 - DNA, 25 bp, Artificial
  probe
  misc_feature (1)..(25): SEQ ID NO: 249; WAN024A73; Start 97; Stop 121
cttcctgacctaatcctatatagtc

SEQ ID NO: 259239 - DNA, 25 bp, Artificial
  probe
  misc_feature (1)..(25): SEQ ID NO: 249; WAN024A73; Start 41; Stop 65
atctaacaaatgactttctcatctc

SEQ ID NO: 259240 - DNA, 25 bp, Artificial
  probe
  misc_feature (1)..(25): SEQ ID NO: 249; WAN024A73; Start 47; Stop 71
caaatgactttctcatctcataagt

SEQ ID NO: 259241 - DNA, 25 bp, Artificial
  probe
  misc_feature (1)..(25): SEQ ID NO: 249; WAN024A73; Start 25; Stop 49
ctaacgaagtcaatttatctaacaa

SEQ ID NO: 259242 - DNA, 25 bp, Artificial
  probe
  misc_feature (1)..(25): SEQ ID NO: 249; WAN024A73; Start 45; Stop 69
aacaaatgactttctcatctcataa

SEQ ID NO: 259243 - DNA, 25 bp, Artificial
  probe
  misc_feature (1)..(25): SEQ ID NO: 250; WAN0249YP; Start 7; Stop 31
ttcctccttgttgataatccataat

SEQ ID NO: 259244 - DNA, 25 bp, Artificial
  probe
  misc_feature (1)..(25): SEQ ID NO: 250; WAN0249YP; Start 8; Stop 32
tcctccttgttgataatccataata

SEQ ID NO: 259245 - DNA, 25 bp, Artificial
  probe
  misc_feature (1)..(25): SEQ ID NO: 250; WAN0249YP; Start 6; Stop 30
tttcctccttgttgataatccataa

SEQ ID NO: 259246 - DNA, 25 bp, Artificial
  probe
  misc_feature (1)..(25): SEQ ID NO: 250; WAN0249YP; Start 9; Stop 33
cctccttgttgataatccataatat

SEQ ID NO: 259247 - DNA, 25 bp, Artificial
  probe
  misc_feature (1)..(25): SEQ ID NO: 250; WAN0249YP; Start 5; Stop 29
ttttcctccttgttgataatccata

SEQ ID NO: 259248 - DNA, 25 bp, Artificial
  probe
  misc_feature (1)..(25): SEQ ID NO: 250; WAN0249YP; Start 56; Stop 80
agcaatctatgatacttttcctaac

SEQ ID NO: 259249 - DNA, 25 bp, Artificial
  probe
  misc_feature (1)..(25): SEQ ID NO: 250; WAN0249YP; Start 55; Stop 79
aagcaatctatgatacttttcctaa

SEQ ID NO: 259250 - DNA, 25 bp, Artificial
  probe
  misc_feature (1)..(25): SEQ ID NO: 250; WAN0249YP; Start 54; Stop 78
aaagcaatctatgatacttttccta

SEQ ID NO: 259251 - DNA, 25 bp, Artificial
  probe
  misc_feature (1)..(25): SEQ ID NO: 250; WAN0249YP; Start 53; Stop 77
aaaagcaatctatgatacttttcct

SEQ ID NO: 259252 - DNA, 25 bp, Artificial
  probe
  misc_feature (1)..(25): SEQ ID NO: 251; WAN024C77-3; Start 738; Stop 762
tcctgatattgacttgaacttctcg

SEQ ID NO: 259253 - DNA, 25 bp, Artificial
  probe
  misc_feature (1)..(25): SEQ ID NO: 251; WAN024C77-3; Start 739; Stop 763
cctgatattgacttgaacttctcgg

SEQ ID NO: 259254 - DNA, 25 bp, Artificial
  probe
  misc_feature (1)..(25): SEQ ID NO: 251; WAN024C77-3; Start 555; Stop 579
caatcctctctctcctcactatgtc

SEQ ID NO: 259255 - DNA, 25 bp, Artificial
  probe
  misc_feature (1)..(25): SEQ ID NO: 251; WAN024C77-3; Start 553; Stop 577
gtcaatcctctctctcctcactatg

SEQ ID NO: 259256 - DNA, 25 bp, Artificial
  probe
  misc_feature (1)..(25): SEQ ID NO: 251; WAN024C77-3; Start 556; Stop 580
aatcctctctctcctcactatgtct

SEQ ID NO: 259257 - DNA, 25 bp, Artificial
  probe
  misc_feature (1)..(25): SEQ ID NO: 251; WAN024C77-3; Start 737; Stop 761
ttcctgatattgacttgaacttctc

SEQ ID NO: 259258 - DNA, 25 bp, Artificial
  probe
  misc_feature (1)..(25): SEQ ID NO: 251; WAN024C77-3; Start 554; Stop 578
tcaatcctctctctcctcactatgt

SEQ ID NO: 259259 - DNA, 25 bp, Artificial
  probe
  misc_feature (1)..(25): SEQ ID NO: 251; WAN024C77-3; Start 1839; Stop 1863
gaagaacaatgaagcctctaatgtg

SEQ ID NO: 259260 - DNA, 25 bp, Artificial
  probe
  misc_feature (1)..(25): SEQ ID NO: 251; WAN024C77-3; Start 557; Stop 581
atcctctctctcctcactatgtctg

SEQ ID NO: 259261 - DNA, 25 bp, Artificial
  probe
  misc_feature (1)..(25): SEQ ID NO: 251; WAN024C77-3; Start 1838; Stop 1862
ggaagaacaatgaagcctctaatgt

SEQ ID NO: 259262 - DNA, 25 bp, Artificial
  probe
  misc_feature (1)..(25): SEQ ID NO: 251; WAN024C77-3; Start 1842; Stop 1866
gaacaatgaagcctctaatgtggaa

SEQ ID NO: 259263 - DNA, 25 bp, Artificial
  probe
  misc_feature (1)..(25): SEQ ID NO: 251; WAN024C77-3; Start 1840; Stop 1864
aagaacaatgaagcctctaatgtgg

SEQ ID NO: 259264 - DNA, 25 bp, Artificial
  probe
  misc_feature (1)..(25): SEQ ID NO: 251; WAN024C77-3; Start 1837; Stop 1861
cggaagaacaatgaagcctctaatg

SEQ ID NO: 259265 - DNA, 25 bp, Artificial
  probe
  misc_feature (1)..(25): SEQ ID NO: 251; WAN024C77-3; Start 552; Stop 576
ggtcaatcctctctctcctcactat

SEQ ID NO: 259266 - DNA, 25 bp, Artificial
  probe
  misc_feature (1)..(25): SEQ ID NO: 251; WAN024C77-3; Start 730; Stop 754
gataaggttcctgatattgacttga

SEQ ID NO: 259267 - DNA, 25 bp, Artificial
  probe
  misc_feature (1)..(25): SEQ ID NO: 251; WAN024C77-3; Start 1836; Stop 1860
acggaagaacaatgaagcctctaat

SEQ ID NO: 259268 - DNA, 25 bp, Artificial
  probe
  misc_feature (1)..(25): SEQ ID NO: 251; WAN024C77-3; Start 729; Stop 753
ggataaggttcctgatattgacttg

SEQ ID NO: 259269 - DNA, 25 bp, Artificial
  probe
  misc_feature (1)..(25): SEQ ID NO: 251; WAN024C77-3; Start 731; Stop 755
ataaggttcctgatattgacttgaa

SEQ ID NO: 259270 - DNA, 25 bp, Artificial
  probe
  misc_feature (1)..(25): SEQ ID NO: 251; WAN024C77-3; Start 1835; Stop 1859
aacggaagaacaatgaagcctctaa

SEQ ID NO: 259271 - DNA, 25 bp, Artificial
  probe
  misc_feature (1)..(25): SEQ ID NO: 251; WAN024C77-3; Start 1841; Stop 1865
agaacaatgaagcctctaatgtgga

SEQ ID NO: 259272 - DNA, 25 bp, Artificial
  probe
  misc_feature (1)..(25): SEQ ID NO: 251; WAN024C77-3; Start 2168; Stop 2192
agttgagtttgtttgatgagttgtt

SEQ ID NO: 259273 - DNA, 25 bp, Artificial
  probe
  misc_feature (1)..(25): SEQ ID NO: 251; WAN024C77-3; Start 2167; Stop 2191
cagttgagtttgtttgatgagttgt

SEQ ID NO: 259274 - DNA, 25 bp, Artificial
  probe
  misc_feature (1)..(25): SEQ ID NO: 251; WAN024C77-3; Start 424; Stop 448
aatggatttgctgtgatttatctgg

SEQ ID NO: 259275 - DNA, 25 bp, Artificial
  probe
  misc_feature (1)..(25): SEQ ID NO: 251; WAN024C77-3; Start 422; Stop 446
ggaatggatttgctgtgatttatct

SEQ ID NO: 259276 - DNA, 25 bp, Artificial
  probe
  misc_feature (1)..(25): SEQ ID NO: 251; WAN024C77-3; Start 421; Stop 445
gggaatggatttgctgtgatttatc

SEQ ID NO: 259277 - DNA, 25 bp, Artificial
  probe
  misc_feature (1)..(25): SEQ ID NO: 251; WAN024C77-3; Start 2169; Stop 2193
gttgagtttgtttgatgagttgttt

SEQ ID NO: 259278 - DNA, 25 bp, Artificial
  probe
  misc_feature (1)..(25): SEQ ID NO: 251; WAN024C77-3; Start 742; Stop 766
gatattgacttgaacttctcgggag

SEQ ID NO: 259279 - DNA, 25 bp, Artificial
  probe
  misc_feature (1)..(25): SEQ ID NO: 251; WAN024C77-3; Start 740; Stop 764
ctgatattgacttgaacttctcggg

SEQ ID NO: 259280 - DNA, 25 bp, Artificial
  probe
  misc_feature (1)..(25): SEQ ID NO: 251; WAN024C77-3; Start 423; Stop 447
gaatggatttgctgtgatttatctg

SEQ ID NO: 259281 - DNA, 25 bp, Artificial
  probe
  misc_feature (1)..(25): SEQ ID NO: 251; WAN024C77-3; Start 741; Stop 765
tgatattgacttgaacttctcggga

SEQ ID NO: 259282 - DNA, 25 bp, Artificial
  probe
  misc_feature (1)..(25): SEQ ID NO: 251; WAN024C77-3; Start 558; Stop 582
tcctctctctcctcactatgtctgt

SEQ ID NO: 259283 - DNA, 25 bp, Artificial
  probe
  misc_feature (1)..(25): SEQ ID NO: 251; WAN024C77-3; Start 572; Stop 596
actatgtctgtggtcagtgtcagta

SEQ ID NO: 259284 - DNA, 25 bp, Artificial
  probe
  misc_feature (1)..(25): SEQ ID NO: 251; WAN024C77-3; Start 573; Stop 597
ctatgtctgtggtcagtgtcagtac

SEQ ID NO: 259285 - DNA, 25 bp, Artificial
  probe
  misc_feature (1)..(25): SEQ ID NO: 253; WAN0249F4; Start 46; Stop 70
aatgtgaggagattgtgtgaatttc

SEQ ID NO: 259286 - DNA, 25 bp, Artificial
  probe
  misc_feature (1)..(25): SEQ ID NO: 253; WAN0249F4; Start 45; Stop 69
aaatgtgaggagattgtgtgaattt

SEQ ID NO: 259287 - DNA, 25 bp, Artificial
  probe
  misc_feature (1)..(25): SEQ ID NO: 253; WAN0249F4; Start 47; Stop 71
atgtgaggagattgtgtgaatttca

SEQ ID NO: 259288 - DNA, 25 bp, Artificial
  probe
  misc_feature (1)..(25): SEQ ID NO: 253; WAN0249F4; Start 44; Stop 68
aaaatgtgaggagattgtgtgaatt

SEQ ID NO: 259289 - DNA, 25 bp, Artificial
  probe
  misc_feature (1)..(25): SEQ ID NO: 253; WAN0249F4; Start 75; Stop 99
aaaagacctggattaaccaagcctt

SEQ ID NO: 259290 - DNA, 25 bp, Artificial
  probe
  misc_feature (1)..(25): SEQ ID NO: 253; WAN0249F4; Start 48; Stop 72
tgtgaggagattgtgtgaatttcac

SEQ ID NO: 259291 - DNA, 25 bp, Artificial
  probe
  misc_feature (1)..(25): SEQ ID NO: 254; WAN0249TJ; Start 316; Stop 340
tctacaagtgaagctatatgcgtaa

SEQ ID NO: 259292 - DNA, 25 bp, Artificial
  probe
  misc_feature (1)..(25): SEQ ID NO: 254; WAN0249TJ; Start 315; Stop 339
atctacaagtgaagctatatgcgta

SEQ ID NO: 259293 - DNA, 25 bp, Artificial
  probe
  misc_feature (1)..(25): SEQ ID NO: 254; WAN0249TJ; Start 312; Stop 336
accatctacaagtgaagctatatgc

SEQ ID NO: 259294 - DNA, 25 bp, Artificial
  probe
  misc_feature (1)..(25): SEQ ID NO: 254; WAN0249TJ; Start 314; Stop 338
catctacaagtgaagctatatgcgt

SEQ ID NO: 259295 - DNA, 25 bp, Artificial
  probe
  misc_feature (1)..(25): SEQ ID NO: 254; WAN0249TJ; Start 272; Stop 296
tagtttgctctttgatttccattga

SEQ ID NO: 259296 - DNA, 25 bp, Artificial
  probe
  misc_feature (1)..(25): SEQ ID NO: 254; WAN0249TJ; Start 313; Stop 337
ccatctacaagtgaagctatatgcg

SEQ ID NO: 259297 - DNA, 25 bp, Artificial
  probe
  misc_feature (1)..(25): SEQ ID NO: 254; WAN0249TJ; Start 135; Stop 159
ttgtgatgctctttaatactcttcg

SEQ ID NO: 259298 - DNA, 25 bp, Artificial
  probe
  misc_feature (1)..(25): SEQ ID NO: 254; WAN0249TJ; Start 270; Stop 294
cctagtttgctctttgatttccatt

SEQ ID NO: 259299 - DNA, 25 bp, Artificial
  probe
  misc_feature (1)..(25): SEQ ID NO: 254; WAN0249TJ; Start 267; Stop 291
tttcctagtttgctctttgatttcc

SEQ ID NO: 259300 - DNA, 25 bp, Artificial
  probe
  misc_feature (1)..(25): SEQ ID NO: 254; WAN0249TJ; Start 269; Stop 293
tcctagtttgctctttgatttccat

SEQ ID NO: 259301 - DNA, 25 bp, Artificial
  probe
  misc_feature (1)..(25): SEQ ID NO: 254; WAN0249TJ; Start 268; Stop 292
ttcctagtttgctctttgatttcca

SEQ ID NO: 259302 - DNA, 25 bp, Artificial
  probe
  misc_feature (1)..(25): SEQ ID NO: 254; WAN0249TJ; Start 271; Stop 295
ctagtttgctctttgatttccattg

SEQ ID NO: 259303 - DNA, 25 bp, Artificial
  probe
  misc_feature (1)..(25): SEQ ID NO: 254; WAN0249TJ; Start 266; Stop 290
gtttcctagtttgctctttgatttc

SEQ ID NO: 259304 - DNA, 25 bp, Artificial
  probe
  misc_feature (1)..(25): SEQ ID NO: 254; WAN0249TJ; Start 273; Stop 297
agtttgctctttgatttccattgag

SEQ ID NO: 259305 - DNA, 25 bp, Artificial
  probe
  misc_feature (1)..(25): SEQ ID NO: 254; WAN0249TJ; Start 274; Stop 298
gtttgctctttgatttccattgagt

SEQ ID NO: 259306 - DNA, 25 bp, Artificial
  probe
  misc_feature (1)..(25): SEQ ID NO: 254; WAN0249TJ; Start 310; Stop 334
gtaccatctacaagtgaagctatat

SEQ ID NO: 259307 - DNA, 25 bp, Artificial
  probe
  misc_feature (1)..(25): SEQ ID NO: 254; WAN0249TJ; Start 275; Stop 299
tttgctctttgatttccattgagta

SEQ ID NO: 259308 - DNA, 25 bp, Artificial
  probe
  misc_feature (1)..(25): SEQ ID NO: 254; WAN0249TJ; Start 277; Stop 301
tgctctttgatttccattgagtatt

SEQ ID NO: 259309 - DNA, 25 bp, Artificial
  probe
  misc_feature (1)..(25): SEQ ID NO: 254; WAN0249TJ; Start 276; Stop 300
ttgctctttgatttccattgagtat

SEQ ID NO: 259310 - DNA, 25 bp, Artificial
  probe
  misc_feature (1)..(25): SEQ ID NO: 254; WAN0249TJ; Start 311; Stop 335
taccatctacaagtgaagctatatg

SEQ ID NO: 259311 - DNA, 25 bp, Artificial
  probe
  misc_feature (1)..(25): SEQ ID NO: 254; WAN0249TJ; Start 136; Stop 160
tgtgatgctctttaatactcttcga

SEQ ID NO: 259312 - DNA, 25 bp, Artificial
  probe
  misc_feature (1)..(25): SEQ ID NO: 254; WAN0249TJ; Start 318; Stop 342
tacaagtgaagctatatgcgtaaac

SEQ ID NO: 259313 - DNA, 25 bp, Artificial
  probe
  misc_feature (1)..(25): SEQ ID NO: 254; WAN0249TJ; Start 317; Stop 341
ctacaagtgaagctatatgcgtaaa

SEQ ID NO: 259314 - DNA, 25 bp, Artificial
  probe
  misc_feature (1)..(25): SEQ ID NO: 254; WAN0249TJ; Start 44; Stop 68
tcaattgtagtggagagatatcagt

SEQ ID NO: 259315 - DNA, 25 bp, Artificial
  probe
  misc_feature (1)..(25): SEQ ID NO: 254; WAN0249TJ; Start 319; Stop 343
acaagtgaagctatatgcgtaaact

SEQ ID NO: 259316 - DNA, 25 bp, Artificial
  probe
  misc_feature (1)..(25): SEQ ID NO: 254; WAN0249TJ; Start 134; Stop 158
attgtgatgctctttaatactcttc

SEQ ID NO: 259317 - DNA, 25 bp, Artificial
  probe
  misc_feature (1)..(25): SEQ ID NO: 254; WAN0249TJ; Start 320; Stop 344
caagtgaagctatatgcgtaaacta

SEQ ID NO: 259318 - DNA, 25 bp, Artificial
  probe
  misc_feature (1)..(25): SEQ ID NO: 254; WAN0249TJ; Start 321; Stop 345
aagtgaagctatatgcgtaaactac

SEQ ID NO: 259319 - DNA, 25 bp, Artificial
  probe
  misc_feature (1)..(25): SEQ ID NO: 254; WAN0249TJ; Start 287; Stop 311
tttccattgagtattatttgtgggt

SEQ ID NO: 259320 - DNA, 25 bp, Artificial
  probe
  misc_feature (1)..(25): SEQ ID NO: 254; WAN0249TJ; Start 45; Stop 69
caattgtagtggagagatatcagtt

SEQ ID NO: 259321 - DNA, 25 bp, Artificial
  probe
  misc_feature (1)..(25): SEQ ID NO: 254; WAN0249TJ; Start 278; Stop 302
gctctttgatttccattgagtatta

SEQ ID NO: 259322 - DNA, 25 bp, Artificial
  probe
  misc_feature (1)..(25): SEQ ID NO: 254; WAN0249TJ; Start 289; Stop 313
tccattgagtattatttgtgggtac

SEQ ID NO: 259323 - DNA, 25 bp, Artificial
  probe
  misc_feature (1)..(25): SEQ ID NO: 254; WAN0249TJ; Start 348; Stop 372
gagcaattgaattcgaactagagag

SEQ ID NO: 259324 - DNA, 25 bp, Artificial
  probe
  misc_feature (1)..(25): SEQ ID NO: 255; WAN0249LX; Start 52; Stop 76
tcaattaagttttacggatctgaag

SEQ ID NO: 259325 - DNA, 25 bp, Artificial
  probe
  misc_feature (1)..(25): SEQ ID NO: 255; WAN0249LX; Start 50; Stop 74
attcaattaagttttacggatctga

SEQ ID NO: 259326 - DNA, 25 bp, Artificial
  probe
  misc_feature (1)..(25): SEQ ID NO: 255; WAN0249LX; Start 49; Stop 73
aattcaattaagttttacggatctg

SEQ ID NO: 259327 - DNA, 25 bp, Artificial
  probe
  misc_feature (1)..(25): SEQ ID NO: 255; WAN0249LX; Start 51; Stop 75
ttcaattaagttttacggatctgaa

SEQ ID NO: 259328 - DNA, 25 bp, Artificial
  probe
  misc_feature (1)..(25): SEQ ID NO: 255; WAN0249LX; Start 46; Stop 70
agtaattcaattaagttttacggat

SEQ ID NO: 259329 - DNA, 25 bp, Artificial
  probe
  misc_feature (1)..(25): SEQ ID NO: 255; WAN0249LX; Start 47; Stop 71
gtaattcaattaagttttacggatc

SEQ ID NO: 259330 - DNA, 25 bp, Artificial
  probe
  misc_feature (1)..(25): SEQ ID NO: 256; WAN024AR6; Start 8; Stop 32
gcagttccctgtttatcaactattc

SEQ ID NO: 259331 - DNA, 25 bp, Artificial
  probe
  misc_feature (1)..(25): SEQ ID NO: 256; WAN024AR6; Start 9; Stop 33
cagttccctgtttatcaactattcg

SEQ ID NO: 259332 - DNA, 25 bp, Artificial
  probe
  misc_feature (1)..(25): SEQ ID NO: 256; WAN024AR6; Start 7; Stop 31
agcagttccctgtttatcaactatt

SEQ ID NO: 259333 - DNA, 25 bp, Artificial
  probe
  misc_feature (1)..(25): SEQ ID NO: 256; WAN024AR6; Start 6; Stop 30
cagcagttccctgtttatcaactat

SEQ ID NO: 259334 - DNA, 25 bp, Artificial
  probe
  misc_feature (1)..(25): SEQ ID NO: 256; WAN024AR6; Start 40; Stop 64
tttctattttgcttcataccctaca

SEQ ID NO: 259335 - DNA, 25 bp, Artificial
  probe
  misc_feature (1)..(25): SEQ ID NO: 256; WAN024AR6; Start 41; Stop 65
ttctattttgcttcataccctacat

SEQ ID NO: 259336 - DNA, 25 bp, Artificial
  probe
  misc_feature (1)..(25): SEQ ID NO: 256; WAN024AR6; Start 38; Stop 62
actttctattttgcttcatacccta

SEQ ID NO: 259337 - DNA, 25 bp, Artificial
  probe
  misc_feature (1)..(25): SEQ ID NO: 256; WAN024AR6; Start 37; Stop 61
tactttctattttgcttcataccct

SEQ ID NO: 259338 - DNA, 25 bp, Artificial
  probe
  misc_feature (1)..(25): SEQ ID NO: 256; WAN024AR6; Start 32; Stop 56
cgaactactttctattttgcttcat

SEQ ID NO: 259339 - DNA, 25 bp, Artificial
  probe
  misc_feature (1)..(25): SEQ ID NO: 256; WAN024AR6; Start 39; Stop 63
ctttctattttgcttcataccctac

SEQ ID NO: 259340 - DNA, 25 bp, Artificial
  probe
  misc_feature (1)..(25): SEQ ID NO: 256; WAN024AR6; Start 36; Stop 60
ctactttctattttgcttcataccc

SEQ ID NO: 259341 - DNA, 25 bp, Artificial
  probe
  misc_feature (1)..(25): SEQ ID NO: 256; WAN024AR6; Start 10; Stop 34
agttccctgtttatcaactattcga

SEQ ID NO: 259342 - DNA, 25 bp, Artificial
  probe
  misc_feature (1)..(25): SEQ ID NO: 256; WAN024AR6; Start 42; Stop 66
tctattttgcttcataccctacata

SEQ ID NO: 259343 - DNA, 25 bp, Artificial
  probe
  misc_feature (1)..(25): SEQ ID NO: 256; WAN024AR6; Start 35; Stop 59
actactttctattttgcttcatacc

SEQ ID NO: 259344 - DNA, 25 bp, Artificial
  probe
  misc_feature (1)..(25): SEQ ID NO: 256; WAN024AR6; Start 31; Stop 55
tcgaactactttctattttgcttca

SEQ ID NO: 259345 - DNA, 25 bp, Artificial
  probe
  misc_feature (1)..(25): SEQ ID NO: 256; WAN024AR6; Start 13; Stop 37
tccctgtttatcaactattcgaact

SEQ ID NO: 259346 - DNA, 25 bp, Artificial
  probe
  misc_feature (1)..(25): SEQ ID NO: 256; WAN024AR6; Start 12; Stop 36
ttccctgtttatcaactattcgaac

SEQ ID NO: 259347 - DNA, 25 bp, Artificial
  probe
  misc_feature (1)..(25): SEQ ID NO: 256; WAN024AR6; Start 11; Stop 35
gttccctgtttatcaactattcgaa

SEQ ID NO: 259348 - DNA, 25 bp, Artificial
  probe
  misc_feature (1)..(25): SEQ ID NO: 256; WAN024AR6; Start 14; Stop 38
ccctgtttatcaactattcgaacta

SEQ ID NO: 259349 - DNA, 25 bp, Artificial
  probe
  misc_feature (1)..(25): SEQ ID NO: 256; WAN024AR6; Start 44; Stop 68
tattttgcttcataccctacatagc

SEQ ID NO: 259350 - DNA, 25 bp, Artificial
  probe
  misc_feature (1)..(25): SEQ ID NO: 256; WAN024AR6; Start 43; Stop 67
ctattttgcttcataccctacatag

SEQ ID NO: 259351 - DNA, 25 bp, Artificial
  probe
  misc_feature (1)..(25): SEQ ID NO: 256; WAN024AR6; Start 5; Stop 29
acagcagttccctgtttatcaacta

SEQ ID NO: 259352 - DNA, 25 bp, Artificial
  probe
  misc_feature (1)..(25): SEQ ID NO: 256; WAN024AR6; Start 15; Stop 39
cctgtttatcaactattcgaactac

SEQ ID NO: 259353 - DNA, 25 bp, Artificial
  probe
  misc_feature (1)..(25): SEQ ID NO: 256; WAN024AR6; Start 34; Stop 58
aactactttctattttgcttcatac

SEQ ID NO: 259354 - DNA, 25 bp, Artificial
  probe
  misc_feature (1)..(25): SEQ ID NO: 256; WAN024AR6; Start 16; Stop 40
ctgtttatcaactattcgaactact

SEQ ID NO: 259355 - DNA, 25 bp, Artificial
  probe
  misc_feature (1)..(25): SEQ ID NO: 256; WAN024AR6; Start 33; Stop 57
gaactactttctattttgcttcata

SEQ ID NO: 259356 - DNA, 25 bp, Artificial
  probe
  misc_feature (1)..(25): SEQ ID NO: 256; WAN024AR6; Start 17; Stop 41
tgtttatcaactattcgaactactt

SEQ ID NO: 259357 - DNA, 25 bp, Artificial
  probe
  misc_feature (1)..(25): SEQ ID NO: 256; WAN024AR6; Start 30; Stop 54
ttcgaactactttctattttgcttc

SEQ ID NO: 259358 - DNA, 25 bp, Artificial
  probe
  misc_feature (1)..(25): SEQ ID NO: 256; WAN024AR6; Start 23; Stop 47
tcaactattcgaactactttctatt

SEQ ID NO: 259359 - DNA, 25 bp, Artificial
  probe
  misc_feature (1)..(25): SEQ ID NO: 256; WAN024AR6; Start 20; Stop 44
ttatcaactattcgaactactttct

SEQ ID NO: 259360 - DNA, 25 bp, Artificial
  probe
  misc_feature (1)..(25): SEQ ID NO: 256; WAN024AR6; Start 29; Stop 53
attcgaactactttctattttgctt

SEQ ID NO: 259361 - DNA, 25 bp, Artificial
  probe
  misc_feature (1)..(25): SEQ ID NO: 256; WAN024AR6; Start 22; Stop 46
atcaactattcgaactactttctat

SEQ ID NO: 259362 - DNA, 25 bp, Artificial
  probe
  misc_feature (1)..(25): SEQ ID NO: 256; WAN024AR6; Start 18; Stop 42
gtttatcaactattcgaactacttt

SEQ ID NO: 259363 - DNA, 25 bp, Artificial
  probe
  misc_feature (1)..(25): SEQ ID NO: 257; WAN024AJH; Start 74; Stop 98
cgacttatgataagataggcacagt

SEQ ID NO: 259364 - DNA, 25 bp, Artificial
  probe
  misc_feature (1)..(25): SEQ ID NO: 257; WAN024AJH; Start 73; Stop 97
gcgacttatgataagataggcacag

SEQ ID NO: 259365 - DNA, 25 bp, Artificial
  probe
  misc_feature (1)..(25): SEQ ID NO: 257; WAN024AJH; Start 72; Stop 96
agcgacttatgataagataggcaca

SEQ ID NO: 259366 - DNA, 25 bp, Artificial
  probe
  misc_feature (1)..(25): SEQ ID NO: 257; WAN024AJH; Start 1; Stop 25
aataacataactcaagcaagtgtaa

SEQ ID NO: 259367 - DNA, 25 bp, Artificial
  probe
  misc_feature (1)..(25): SEQ ID NO: 257; WAN024AJH; Start 6; Stop 30
cataactcaagcaagtgtaaatgtt

SEQ ID NO: 259368 - DNA, 25 bp, Artificial
  probe
  misc_feature (1)..(25): SEQ ID NO: 257; WAN024AJH; Start 4; Stop 28
aacataactcaagcaagtgtaaatg

SEQ ID NO: 259369 - DNA, 25 bp, Artificial
  probe
  misc_feature (1)..(25): SEQ ID NO: 257; WAN024AJH; Start 7; Stop 31
ataactcaagcaagtgtaaatgttt

SEQ ID NO: 259370 - DNA, 25 bp, Artificial
  probe
  misc_feature (1)..(25): SEQ ID NO: 257; WAN024AJH; Start 3; Stop 27
taacataactcaagcaagtgtaaat

SEQ ID NO: 259371 - DNA, 25 bp, Artificial
  probe
  misc_feature (1)..(25): SEQ ID NO: 257; WAN024AJH; Start 2; Stop 26
ataacataactcaagcaagtgtaaa

SEQ ID NO: 259372 - DNA, 25 bp, Artificial
  probe
  misc_feature (1)..(25): SEQ ID NO: 257; WAN024AJH; Start 5; Stop 29
acataactcaagcaagtgtaaatgt

SEQ ID NO: 259373 - DNA, 25 bp, Artificial
  probe
  misc_feature (1)..(25): SEQ ID NO: 257; WAN024AJH; Start 10; Stop 34
actcaagcaagtgtaaatgttttca

SEQ ID NO: 259374 - DNA, 25 bp, Artificial
  probe
  misc_feature (1)..(25): SEQ ID NO: 257; WAN024AJH; Start 9; Stop 33
aactcaagcaagtgtaaatgttttc

SEQ ID NO: 259375 - DNA, 25 bp, Artificial
  probe
  misc_feature (1)..(25): SEQ ID NO: 257; WAN024AJH; Start 11; Stop 35
ctcaagcaagtgtaaatgttttcac

SEQ ID NO: 259376 - DNA, 25 bp, Artificial
  probe
  misc_feature (1)..(25): SEQ ID NO: 257; WAN024AJH; Start 8; Stop 32
taactcaagcaagtgtaaatgtttt

SEQ ID NO: 259377 - DNA, 25 bp, Artificial
  probe
  misc_feature (1)..(25): SEQ ID NO: 257; WAN024AJH; Start 41; Stop 65
ttttcttttcacgtcaagccttttc

SEQ ID NO: 259378 - DNA, 25 bp, Artificial
  probe
  misc_feature (1)..(25): SEQ ID NO: 257; WAN024AJH; Start 40; Stop 64
cttttcttttcacgtcaagcctttt

SEQ ID NO: 259379 - DNA, 25 bp, Artificial
  probe
  misc_feature (1)..(25): SEQ ID NO: 257; WAN024AJH; Start 44; Stop 68
tcttttcacgtcaagccttttcaaa

SEQ ID NO: 259380 - DNA, 25 bp, Artificial
  probe
  misc_feature (1)..(25): SEQ ID NO: 257; WAN024AJH; Start 43; Stop 67
ttcttttcacgtcaagccttttcaa

SEQ ID NO: 259381 - DNA, 25 bp, Artificial
  probe
  misc_feature (1)..(25): SEQ ID NO: 257; WAN024AJH; Start 42; Stop 66
tttcttttcacgtcaagccttttca

SEQ ID NO: 259382 - DNA, 25 bp, Artificial
  probe
  misc_feature (1)..(25): SEQ ID NO: 257; WAN024AJH; Start 45; Stop 69
cttttcacgtcaagccttttcaaag

SEQ ID NO: 259383 - DNA, 25 bp, Artificial
  probe
  misc_feature (1)..(25): SEQ ID NO: 257; WAN024AJH; Start 46; Stop 70
ttttcacgtcaagccttttcaaagc

SEQ ID NO: 259384 - DNA, 25 bp, Artificial
  probe
  misc_feature (1)..(25): SEQ ID NO: 257; WAN024AJH; Start 12; Stop 36
tcaagcaagtgtaaatgttttcact

SEQ ID NO: 259385 - DNA, 25 bp, Artificial
  probe
  misc_feature (1)..(25): SEQ ID NO: 257; WAN024AJH; Start 13; Stop 37
caagcaagtgtaaatgttttcactc

SEQ ID NO: 259386 - DNA, 25 bp, Artificial
  probe
  misc_feature (1)..(25): SEQ ID NO: 257; WAN024AJH; Start 39; Stop 63
gcttttcttttcacgtcaagccttt

SEQ ID NO: 259387 - DNA, 25 bp, Artificial
  probe
  misc_feature (1)..(25): SEQ ID NO: 258; WAN024AKO; Start 26; Stop 50
gctaaaagaaatctaaatactgact

SEQ ID NO: 259388 - DNA, 25 bp, Artificial
  probe
  misc_feature (1)..(25): SEQ ID NO: 258; WAN024AKO; Start 25; Stop 49
agctaaaagaaatctaaatactgac

SEQ ID NO: 259389 - DNA, 25 bp, Artificial
  probe
  misc_feature (1)..(25): SEQ ID NO: 259; WAN0249RG; Start 100; Stop 124
gattctcagacatctaggtatcagc

SEQ ID NO: 259390 - DNA, 25 bp, Artificial
  probe
  misc_feature (1)..(25): SEQ ID NO: 259; WAN0249RG; Start 98; Stop 122
aggattctcagacatctaggtatca

SEQ ID NO: 259391 - DNA, 25 bp, Artificial
  probe
  misc_feature (1)..(25): SEQ ID NO: 259; WAN0249RG; Start 99; Stop 123
ggattctcagacatctaggtatcag

SEQ ID NO: 259392 - DNA, 25 bp, Artificial
  probe
  misc_feature (1)..(25): SEQ ID NO: 259; WAN0249RG; Start 101; Stop 125
attctcagacatctaggtatcagcc

SEQ ID NO: 259393 - DNA, 25 bp, Artificial
  probe
  misc_feature (1)..(25): SEQ ID NO: 259; WAN0249RG; Start 96; Stop 120
ggaggattctcagacatctaggtat

SEQ ID NO: 259394 - DNA, 25 bp, Artificial
  probe
  misc_feature (1)..(25): SEQ ID NO: 259; WAN0249RG; Start 97; Stop 121
gaggattctcagacatctaggtatc

SEQ ID NO: 259395 - DNA, 25 bp, Artificial
  probe
  misc_feature (1)..(25): SEQ ID NO: 259; WAN0249RG; Start 95; Stop 119
aggaggattctcagacatctaggta

SEQ ID NO: 259396 - DNA, 25 bp, Artificial
  probe
  misc_feature (1)..(25): SEQ ID NO: 259; WAN0249RG; Start 94; Stop 118
aaggaggattctcagacatctaggt

SEQ ID NO: 259397 - DNA, 25 bp, Artificial
  probe
  misc_feature (1)..(25): SEQ ID NO: 259; WAN0249RG; Start 37; Stop 61
agaagcatagaatctagcaaaccta

SEQ ID NO: 259398 - DNA, 25 bp, Artificial
  probe
  misc_feature (1)..(25): SEQ ID NO: 259; WAN0249RG; Start 93; Stop 117
aaaggaggattctcagacatctagg

SEQ ID NO: 259399 - DNA, 25 bp, Artificial
  probe
  misc_feature (1)..(25): SEQ ID NO: 259; WAN0249RG; Start 107; Stop 131
agacatctaggtatcagcccaacta

SEQ ID NO: 259400 - DNA, 25 bp, Artificial
  probe
  misc_feature (1)..(25): SEQ ID NO: 259; WAN0249RG; Start 36; Stop 60
tagaagcatagaatctagcaaacct

SEQ ID NO: 259401 - DNA, 25 bp, Artificial
  probe
  misc_feature (1)..(25): SEQ ID NO: 259; WAN0249RG; Start 70; Stop 94
aatgtgctataatagaaggaggaaa

SEQ ID NO: 259402 - DNA, 25 bp, Artificial
  probe
  misc_feature (1)..(25): SEQ ID NO: 259; WAN0249RG; Start 69; Stop 93
aaatgtgctataatagaaggaggaa

SEQ ID NO: 259403 - DNA, 25 bp, Artificial
  probe
  misc_feature (1)..(25): SEQ ID NO: 259; WAN0249RG; Start 35; Stop 59
atagaagcatagaatctagcaaacc

SEQ ID NO: 259404 - DNA, 25 bp, Artificial
  probe
  misc_feature (1)..(25): SEQ ID NO: 259; WAN0249RG; Start 38; Stop 62
gaagcatagaatctagcaaacctag

SEQ ID NO: 259405 - DNA, 25 bp, Artificial
  probe
  misc_feature (1)..(25): SEQ ID NO: 259; WAN0249RG; Start 102; Stop 126
ttctcagacatctaggtatcagccc

SEQ ID NO: 259406 - DNA, 25 bp, Artificial
  probe
  misc_feature (1)..(25): SEQ ID NO: 259; WAN0249RG; Start 104; Stop 128
ctcagacatctaggtatcagcccaa

SEQ ID NO: 259407 - DNA, 25 bp, Artificial
  probe
  misc_feature (1)..(25): SEQ ID NO: 259; WAN0249RG; Start 80; Stop 104
aatagaaggaggaaaaggaggattc

SEQ ID NO: 259408 - DNA, 25 bp, Artificial
  probe
  misc_feature (1)..(25): SEQ ID NO: 259; WAN0249RG; Start 106; Stop 130
cagacatctaggtatcagcccaact

SEQ ID NO: 259409 - DNA, 25 bp, Artificial
  probe
  misc_feature (1)..(25): SEQ ID NO: 259; WAN0249RG; Start 105; Stop 129
tcagacatctaggtatcagcccaac

SEQ ID NO: 259410 - DNA, 25 bp, Artificial
  probe
  misc_feature (1)..(25): SEQ ID NO: 259; WAN0249RG; Start 34; Stop 58
gatagaagcatagaatctagcaaac

SEQ ID NO: 259411 - DNA, 25 bp, Artificial
  probe
  misc_feature (1)..(25): SEQ ID NO: 259; WAN0249RG; Start 79; Stop 103
taatagaaggaggaaaaggaggatt

SEQ ID NO: 259412 - DNA, 25 bp, Artificial
  probe
  misc_feature (1)..(25): SEQ ID NO: 259; WAN0249RG; Start 74; Stop 98
tgctataatagaaggaggaaaagga

SEQ ID NO: 259413 - DNA, 25 bp, Artificial
  probe
  misc_feature (1)..(25): SEQ ID NO: 259; WAN0249RG; Start 73; Stop 97
gtgctataatagaaggaggaaaagg

SEQ ID NO: 259414 - DNA, 25 bp, Artificial
  probe
  misc_feature (1)..(25): SEQ ID NO: 259; WAN0249RG; Start 78; Stop 102
ataatagaaggaggaaaaggaggat

SEQ ID NO: 259415 - DNA, 25 bp, Artificial
  probe
  misc_feature (1)..(25): SEQ ID NO: 259; WAN0249RG; Start 91; Stop 115
gaaaaggaggattctcagacatcta

SEQ ID NO: 259416 - DNA, 25 bp, Artificial
  probe
  misc_feature (1)..(25): SEQ ID NO: 259; WAN0249RG; Start 75; Stop 99
gctataatagaaggaggaaaaggag

SEQ ID NO: 259417 - DNA, 25 bp, Artificial
  probe
  misc_feature (1)..(25): SEQ ID NO: 259; WAN0249RG; Start 92; Stop 116
aaaaggaggattctcagacatctag

SEQ ID NO: 259418 - DNA, 25 bp, Artificial
  probe
  misc_feature (1)..(25): SEQ ID NO: 259; WAN0249RG; Start 72; Stop 96
tgtgctataatagaaggaggaaaag

SEQ ID NO: 259419 - DNA, 25 bp, Artificial
  probe
  misc_feature (1)..(25): SEQ ID NO: 259; WAN0249RG; Start 20; Stop 44
tttccgaataaatagatagaagcat

SEQ ID NO: 259420 - DNA, 25 bp, Artificial
  probe
  misc_feature (1)..(25): SEQ ID NO: 259; WAN0249RG; Start 77; Stop 101
tataatagaaggaggaaaaggagga

SEQ ID NO: 259421 - DNA, 25 bp, Artificial
  probe
  misc_feature (1)..(25): SEQ ID NO: 259; WAN0249RG; Start 33; Stop 57
agatagaagcatagaatctagcaaa

SEQ ID NO: 259422 - DNA, 25 bp, Artificial
  probe
  misc_feature (1)..(25): SEQ ID NO: 260; WAN024A8F; Start 99; Stop 123
ttcttaggtacggaatacacttcaa

SEQ ID NO: 259423 - DNA, 25 bp, Artificial
  probe
  misc_feature (1)..(25): SEQ ID NO: 260; WAN024A8F; Start 101; Stop 125
cttaggtacggaatacacttcaatg

SEQ ID NO: 259424 - DNA, 25 bp, Artificial
  probe
  misc_feature (1)..(25): SEQ ID NO: 260; WAN024A8F; Start 100; Stop 124
tcttaggtacggaatacacttcaat

SEQ ID NO: 259425 - DNA, 25 bp, Artificial
  probe
  misc_feature (1)..(25): SEQ ID NO: 260; WAN024A8F; Start 23; Stop 47
agatagaataagtctggctactgaa

SEQ ID NO: 259426 - DNA, 25 bp, Artificial
  probe
  misc_feature (1)..(25): SEQ ID NO: 260; WAN024A8F; Start 102; Stop 126
ttaggtacggaatacacttcaatgt

SEQ ID NO: 259427 - DNA, 25 bp, Artificial
  probe
  misc_feature (1)..(25): SEQ ID NO: 260; WAN024A8F; Start 103; Stop 127
taggtacggaatacacttcaatgtg

SEQ ID NO: 259428 - DNA, 25 bp, Artificial
  probe
  misc_feature (1)..(25): SEQ ID NO: 260; WAN024A8F; Start 22; Stop 46
tagatagaataagtctggctactga

SEQ ID NO: 259429 - DNA, 25 bp, Artificial
  probe
  misc_feature (1)..(25): SEQ ID NO: 260; WAN024A8F; Start 123; Stop 147
atgtgttgtcccagtatcttaatgt

SEQ ID NO: 259430 - DNA, 25 bp, Artificial
  probe
  misc_feature (1)..(25): SEQ ID NO: 260; WAN024A8F; Start 124; Stop 148
tgtgttgtcccagtatcttaatgtc

SEQ ID NO: 259431 - DNA, 25 bp, Artificial
  probe
  misc_feature (1)..(25): SEQ ID NO: 260; WAN024A8F; Start 122; Stop 146
aatgtgttgtcccagtatcttaatg

SEQ ID NO: 259432 - DNA, 25 bp, Artificial
  probe
  misc_feature (1)..(25): SEQ ID NO: 260; WAN024A8F; Start 154; Stop 178
gtagattgtctgatttatcgccatc

SEQ ID NO: 259433 - DNA, 25 bp, Artificial
  probe
  misc_feature (1)..(25): SEQ ID NO: 260; WAN024A8F; Start 150; Stop 174
actggtagattgtctgatttatcgc

SEQ ID NO: 259434 - DNA, 25 bp, Artificial
  probe
  misc_feature (1)..(25): SEQ ID NO: 260; WAN024A8F; Start 120; Stop 144
tcaatgtgttgtcccagtatcttaa

SEQ ID NO: 259435 - DNA, 25 bp, Artificial
  probe
  misc_feature (1)..(25): SEQ ID NO: 260; WAN024A8F; Start 119; Stop 143
ttcaatgtgttgtcccagtatctta

SEQ ID NO: 259436 - DNA, 25 bp, Artificial
  probe
  misc_feature (1)..(25): SEQ ID NO: 260; WAN024A8F; Start 184; Stop 208
cggactctaattcgatatcagaaga

SEQ ID NO: 259437 - DNA, 25 bp, Artificial
  probe
  misc_feature (1)..(25): SEQ ID NO: 260; WAN024A8F; Start 153; Stop 177
ggtagattgtctgatttatcgccat

SEQ ID NO: 259438 - DNA, 25 bp, Artificial
  probe
  misc_feature (1)..(25): SEQ ID NO: 260; WAN024A8F; Start 21; Stop 45
ttagatagaataagtctggctactg

SEQ ID NO: 259439 - DNA, 25 bp, Artificial
  probe
  misc_feature (1)..(25): SEQ ID NO: 260; WAN024A8F; Start 125; Stop 149
gtgttgtcccagtatcttaatgtcg

SEQ ID NO: 259440 - DNA, 25 bp, Artificial
  probe
  misc_feature (1)..(25): SEQ ID NO: 260; WAN024A8F; Start 121; Stop 145
caatgtgttgtcccagtatcttaat

SEQ ID NO: 259441 - DNA, 25 bp, Artificial
  probe
  misc_feature (1)..(25): SEQ ID NO: 260; WAN024A8F; Start 118; Stop 142
cttcaatgtgttgtcccagtatctt

SEQ ID NO: 259442 - DNA, 25 bp, Artificial
  probe
  misc_feature (1)..(25): SEQ ID NO: 260; WAN024A8F; Start 151; Stop 175
ctggtagattgtctgatttatcgcc

SEQ ID NO: 259443 - DNA, 25 bp, Artificial
  probe
  misc_feature (1)..(25): SEQ ID NO: 260; WAN024A8F; Start 98; Stop 122
tttcttaggtacggaatacacttca

SEQ ID NO: 259444 - DNA, 25 bp, Artificial
  probe
  misc_feature (1)..(25): SEQ ID NO: 260; WAN024A8F; Start 169; Stop 193
tatcgccatcaacatcggactctaa

SEQ ID NO: 259445 - DNA, 25 bp, Artificial
  probe
  misc_feature (1)..(25): SEQ ID NO: 260; WAN024A8F; Start 168; Stop 192
ttatcgccatcaacatcggactcta

SEQ ID NO: 259446 - DNA, 25 bp, Artificial
  probe
  misc_feature (1)..(25): SEQ ID NO: 260; WAN024A8F; Start 97; Stop 121
gtttcttaggtacggaatacacttc

SEQ ID NO: 259447 - DNA, 25 bp, Artificial
  probe
  misc_feature (1)..(25): SEQ ID NO: 260; WAN024A8F; Start 149; Stop 173
gactggtagattgtctgatttatcg

SEQ ID NO: 259448 - DNA, 25 bp, Artificial
  probe
  misc_feature (1)..(25): SEQ ID NO: 260; WAN024A8F; Start 148; Stop 172
cgactggtagattgtctgatttatc

SEQ ID NO: 259449 - DNA, 25 bp, Artificial
  probe
  misc_feature (1)..(25): SEQ ID NO: 260; WAN024A8F; Start 17; Stop 41
tgtattagatagaataagtctggct

SEQ ID NO: 259450 - DNA, 25 bp, Artificial
  probe
  misc_feature (1)..(25): SEQ ID NO: 260; WAN024A8F; Start 92; Stop 116
tgattgtttcttaggtacggaatac

SEQ ID NO: 259451 - DNA, 25 bp, Artificial
  probe
  misc_feature (1)..(25): SEQ ID NO: 260; WAN024A8F; Start 96; Stop 120
tgtttcttaggtacggaatacactt

SEQ ID NO: 259452 - DNA, 25 bp, Artificial
  probe
  misc_feature (1)..(25): SEQ ID NO: 260; WAN024A8F; Start 95; Stop 119
ttgtttcttaggtacggaatacact

SEQ ID NO: 259453 - DNA, 25 bp, Artificial
  probe
  misc_feature (1)..(25): SEQ ID NO: 260; WAN024A8F; Start 117; Stop 141
acttcaatgtgttgtcccagtatct

SEQ ID NO: 259454 - DNA, 25 bp, Artificial
  probe
  misc_feature (1)..(25): SEQ ID NO: 260; WAN024A8F; Start 185; Stop 209
ggactctaattcgatatcagaagaa

SEQ ID NO: 259455 - DNA, 25 bp, Artificial
  probe
  misc_feature (1)..(25): SEQ ID NO: 261; WAN024A9U; Start 8; Stop 32
tcaagaaaatttagtgactgggatt

SEQ ID NO: 259456 - DNA, 25 bp, Artificial
  probe
  misc_feature (1)..(25): SEQ ID NO: 261; WAN024A9U; Start 7; Stop 31
ttcaagaaaatttagtgactgggat

SEQ ID NO: 259457 - DNA, 25 bp, Artificial
  probe
  misc_feature (1)..(25): SEQ ID NO: 261; WAN024A9U; Start 6; Stop 30
attcaagaaaatttagtgactggga

SEQ ID NO: 259458 - DNA, 25 bp, Artificial
  probe
  misc_feature (1)..(25): SEQ ID NO: 261; WAN024A9U; Start 5; Stop 29
gattcaagaaaatttagtgactggg

SEQ ID NO: 259459 - DNA, 25 bp, Artificial
  probe
  misc_feature (1)..(25): SEQ ID NO: 261; WAN024A9U; Start 9; Stop 33
caagaaaatttagtgactgggattt

SEQ ID NO: 259460 - DNA, 25 bp, Artificial
  probe
  misc_feature (1)..(25): SEQ ID NO: 261; WAN024A9U; Start 11; Stop 35
agaaaatttagtgactgggatttcc

SEQ ID NO: 259461 - DNA, 25 bp, Artificial
  probe
  misc_feature (1)..(25): SEQ ID NO: 261; WAN024A9U; Start 4; Stop 28
agattcaagaaaatttagtgactgg

SEQ ID NO: 259462 - DNA, 25 bp, Artificial
  probe
  misc_feature (1)..(25): SEQ ID NO: 261; WAN024A9U; Start 12; Stop 36
gaaaatttagtgactgggatttccc

SEQ ID NO: 259463 - DNA, 25 bp, Artificial
  probe
  misc_feature (1)..(25): SEQ ID NO: 261; WAN024A9U; Start 10; Stop 34
aagaaaatttagtgactgggatttc

SEQ ID NO: 259464 - DNA, 25 bp, Artificial
  probe
  misc_feature (1)..(25): SEQ ID NO: 261; WAN024A9U; Start 3; Stop 27
tagattcaagaaaatttagtgactg

SEQ ID NO: 259465 - DNA, 25 bp, Artificial
  probe
  misc_feature (1)..(25): SEQ ID NO: 262; WAN0249GQ; Start 7; Stop 31
acctcgtgtgttaaaataatggaac

SEQ ID NO: 259466 - DNA, 25 bp, Artificial
  probe
  misc_feature (1)..(25): SEQ ID NO: 262; WAN0249GQ; Start 222; Stop 246
tccttagggagcttgaatttatatg

SEQ ID NO: 259467 - DNA, 25 bp, Artificial
  probe
  misc_feature (1)..(25): SEQ ID NO: 262; WAN0249GQ; Start 6; Stop 30
cacctcgtgtgttaaaataatggaa

SEQ ID NO: 259468 - DNA, 25 bp, Artificial
  probe
  misc_feature (1)..(25): SEQ ID NO: 262; WAN0249GQ; Start 3; Stop 27
tagcacctcgtgtgttaaaataatg

SEQ ID NO: 259469 - DNA, 25 bp, Artificial
  probe
  misc_feature (1)..(25): SEQ ID NO: 262; WAN0249GQ; Start 134; Stop 158
ggagactaactcattttagcaaaga

SEQ ID NO: 259470 - DNA, 25 bp, Artificial
  probe
  misc_feature (1)..(25): SEQ ID NO: 262; WAN0249GQ; Start 133; Stop 157
aggagactaactcattttagcaaag

SEQ ID NO: 259471 - DNA, 25 bp, Artificial
  probe
  misc_feature (1)..(25): SEQ ID NO: 262; WAN0249GQ; Start 1; Stop 25
aatagcacctcgtgtgttaaaataa

SEQ ID NO: 259472 - DNA, 25 bp, Artificial
  probe
  misc_feature (1)..(25): SEQ ID NO: 262; WAN0249GQ; Start 2; Stop 26
atagcacctcgtgtgttaaaataat

SEQ ID NO: 259473 - DNA, 25 bp, Artificial
  probe
  misc_feature (1)..(25): SEQ ID NO: 262; WAN0249GQ; Start 206; Stop 230
tacaaagtacaaaacctccttaggg

SEQ ID NO: 259474 - DNA, 25 bp, Artificial
  probe
  misc_feature (1)..(25): SEQ ID NO: 262; WAN0249GQ; Start 132; Stop 156
aaggagactaactcattttagcaaa

SEQ ID NO: 259475 - DNA, 25 bp, Artificial
  probe
  misc_feature (1)..(25): SEQ ID NO: 262; WAN0249GQ; Start 5; Stop 29
gcacctcgtgtgttaaaataatgga

SEQ ID NO: 259476 - DNA, 25 bp, Artificial
  probe
  misc_feature (1)..(25): SEQ ID NO: 262; WAN0249GQ; Start 4; Stop 28
agcacctcgtgtgttaaaataatgg

SEQ ID NO: 259477 - DNA, 25 bp, Artificial
  probe
  misc_feature (1)..(25): SEQ ID NO: 262; WAN0249GQ; Start 207; Stop 231
acaaagtacaaaacctccttaggga

SEQ ID NO: 259478 - DNA, 25 bp, Artificial
  probe
  misc_feature (1)..(25): SEQ ID NO: 262; WAN0249GQ; Start 131; Stop 155
taaggagactaactcattttagcaa

SEQ ID NO: 259479 - DNA, 25 bp, Artificial
  probe
  misc_feature (1)..(25): SEQ ID NO: 262; WAN0249GQ; Start 130; Stop 154
ttaaggagactaactcattttagca

SEQ ID NO: 259480 - DNA, 25 bp, Artificial
  probe
  misc_feature (1)..(25): SEQ ID NO: 262; WAN0249GQ; Start 135; Stop 159
gagactaactcattttagcaaagat

SEQ ID NO: 259481 - DNA, 25 bp, Artificial
  probe
  misc_feature (1)..(25): SEQ ID NO: 262; WAN0249GQ; Start 8; Stop 32
cctcgtgtgttaaaataatggaacg

SEQ ID NO: 259482 - DNA, 25 bp, Artificial
  probe
  misc_feature (1)..(25): SEQ ID NO: 262; WAN0249GQ; Start 129; Stop 153
tttaaggagactaactcattttagc

SEQ ID NO: 259483 - DNA, 25 bp, Artificial
  probe
  misc_feature (1)..(25): SEQ ID NO: 262; WAN0249GQ; Start 220; Stop 244
cctccttagggagcttgaatttata

SEQ ID NO: 259484 - DNA, 25 bp, Artificial
  probe
  misc_feature (1)..(25): SEQ ID NO: 262; WAN0249GQ; Start 9; Stop 33
ctcgtgtgttaaaataatggaacgt

SEQ ID NO: 259485 - DNA, 25 bp, Artificial
  probe
  misc_feature (1)..(25): SEQ ID NO: 262; WAN0249GQ; Start 74; Stop 98
tatactccttttcaagcataattgc

SEQ ID NO: 259486 - DNA, 25 bp, Artificial
  probe
  misc_feature (1)..(25): SEQ ID NO: 262; WAN0249GQ; Start 219; Stop 243
acctccttagggagcttgaatttat

SEQ ID NO: 259487 - DNA, 25 bp, Artificial
  probe
  misc_feature (1)..(25): SEQ ID NO: 262; WAN0249GQ; Start 75; Stop 99
atactccttttcaagcataattgca

SEQ ID NO: 259488 - DNA, 25 bp, Artificial
  probe
  misc_feature (1)..(25): SEQ ID NO: 262; WAN0249GQ; Start 218; Stop 242
aacctccttagggagcttgaattta

SEQ ID NO: 259489 - DNA, 25 bp, Artificial
  probe
  misc_feature (1)..(25): SEQ ID NO: 262; WAN0249GQ; Start 136; Stop 160
agactaactcattttagcaaagata

SEQ ID NO: 259490 - DNA, 25 bp, Artificial
  probe
  misc_feature (1)..(25): SEQ ID NO: 262; WAN0249GQ; Start 221; Stop 245
ctccttagggagcttgaatttatat

SEQ ID NO: 259491 - DNA, 25 bp, Artificial
  probe
  misc_feature (1)..(25): SEQ ID NO: 262; WAN0249GQ; Start 217; Stop 241
aaacctccttagggagcttgaattt

SEQ ID NO: 259492 - DNA, 25 bp, Artificial
  probe
  misc_feature (1)..(25): SEQ ID NO: 262; WAN0249GQ; Start 12; Stop 36
gtgtgttaaaataatggaacgttgc

SEQ ID NO: 259493 - DNA, 25 bp, Artificial
  probe
  misc_feature (1)..(25): SEQ ID NO: 262; WAN0249GQ; Start 138; Stop 162
actaactcattttagcaaagataac

SEQ ID NO: 259494 - DNA, 25 bp, Artificial
  probe
  misc_feature (1)..(25): SEQ ID NO: 262; WAN0249GQ; Start 73; Stop 97
gtatactccttttcaagcataattg

SEQ ID NO: 259495 - DNA, 25 bp, Artificial
  probe
  misc_feature (1)..(25): SEQ ID NO: 262; WAN0249GQ; Start 13; Stop 37
tgtgttaaaataatggaacgttgcg

SEQ ID NO: 259496 - DNA, 25 bp, Artificial
  probe
  misc_feature (1)..(25): SEQ ID NO: 262; WAN0249GQ; Start 139; Stop 163
ctaactcattttagcaaagataact

SEQ ID NO: 259497 - DNA, 25 bp, Artificial
  probe
  misc_feature (1)..(25): SEQ ID NO: 262; WAN0249GQ; Start 137; Stop 161
gactaactcattttagcaaagataa

SEQ ID NO: 259498 - DNA, 25 bp, Artificial
  probe
  misc_feature (1)..(25): SEQ ID NO: 263; WAN0249GZ; Start 27; Stop 51
acagtatatgataaaatgtaagcag

SEQ ID NO: 259499 - DNA, 25 bp, Artificial
  probe
  misc_feature (1)..(25): SEQ ID NO: 264; WAN024ACD; Start 101; Stop 125
gtgacaacattgtataattgcttgc

SEQ ID NO: 259500 - DNA, 25 bp, Artificial
  probe
  misc_feature (1)..(25): SEQ ID NO: 264; WAN024ACD; Start 130; Stop 154
tactggtggagagagtataatgagg

SEQ ID NO: 259501 - DNA, 25 bp, Artificial
  probe
  misc_feature (1)..(25): SEQ ID NO: 264; WAN024ACD; Start 100; Stop 124
tgtgacaacattgtataattgcttg

SEQ ID NO: 259502 - DNA, 25 bp, Artificial
  probe
  misc_feature (1)..(25): SEQ ID NO: 264; WAN024ACD; Start 137; Stop 161
ggagagagtataatgagggtggata

SEQ ID NO: 259503 - DNA, 25 bp, Artificial
  probe
  misc_feature (1)..(25): SEQ ID NO: 264; WAN024ACD; Start 129; Stop 153
ttactggtggagagagtataatgag

SEQ ID NO: 259504 - DNA, 25 bp, Artificial
  probe
  misc_feature (1)..(25): SEQ ID NO: 264; WAN024ACD; Start 138; Stop 162
gagagagtataatgagggtggataa

SEQ ID NO: 259505 - DNA, 25 bp, Artificial
  probe
  misc_feature (1)..(25): SEQ ID NO: 264; WAN024ACD; Start 141; Stop 165
agagtataatgagggtggataaagt

SEQ ID NO: 259506 - DNA, 25 bp, Artificial
  probe
  misc_feature (1)..(25): SEQ ID NO: 264; WAN024ACD; Start 102; Stop 126
tgacaacattgtataattgcttgca

SEQ ID NO: 259507 - DNA, 25 bp, Artificial
  probe
  misc_feature (1)..(25): SEQ ID NO: 264; WAN024ACD; Start 136; Stop 160
tggagagagtataatgagggtggat

SEQ ID NO: 259508 - DNA, 25 bp, Artificial
  probe
  misc_feature (1)..(25): SEQ ID NO: 264; WAN024ACD; Start 51; Stop 75
ggagagagatggaagttactttgaa

SEQ ID NO: 259509 - DNA, 25 bp, Artificial
  probe
  misc_feature (1)..(25): SEQ ID NO: 264; WAN024ACD; Start 139; Stop 163
agagagtataatgagggtggataaa

SEQ ID NO: 259510 - DNA, 25 bp, Artificial
  probe
  misc_feature (1)..(25): SEQ ID NO: 264; WAN024ACD; Start 103; Stop 127
gacaacattgtataattgcttgcat

SEQ ID NO: 259511 - DNA, 25 bp, Artificial
  probe
  misc_feature (1)..(25): SEQ ID NO: 264; WAN024ACD; Start 140; Stop 164
gagagtataatgagggtggataaag

SEQ ID NO: 259512 - DNA, 25 bp, Artificial
  probe
  misc_feature (1)..(25): SEQ ID NO: 264; WAN024ACD; Start 104; Stop 128
acaacattgtataattgcttgcatt

SEQ ID NO: 259513 - DNA, 25 bp, Artificial
  probe
  misc_feature (1)..(25): SEQ ID NO: 264; WAN024ACD; Start 52; Stop 76
gagagagatggaagttactttgaaa

SEQ ID NO: 259514 - DNA, 25 bp, Artificial
  probe
  misc_feature (1)..(25): SEQ ID NO: 264; WAN024ACD; Start 135; Stop 159
gtggagagagtataatgagggtgga

SEQ ID NO: 259515 - DNA, 25 bp, Artificial
  probe
  misc_feature (1)..(25): SEQ ID NO: 264; WAN024ACD; Start 132; Stop 156
ctggtggagagagtataatgagggt

SEQ ID NO: 259516 - DNA, 25 bp, Artificial
  probe
  misc_feature (1)..(25): SEQ ID NO: 264; WAN024ACD; Start 133; Stop 157
tggtggagagagtataatgagggtg

SEQ ID NO: 259517 - DNA, 25 bp, Artificial
  probe
  misc_feature (1)..(25): SEQ ID NO: 264; WAN024ACD; Start 142; Stop 166
gagtataatgagggtggataaagta

SEQ ID NO: 259518 - DNA, 25 bp, Artificial
  probe
  misc_feature (1)..(25): SEQ ID NO: 264; WAN024ACD; Start 131; Stop 155
actggtggagagagtataatgaggg

SEQ ID NO: 259519 - DNA, 25 bp, Artificial
  probe
  misc_feature (1)..(25): SEQ ID NO: 264; WAN024ACD; Start 143; Stop 167
agtataatgagggtggataaagtac

SEQ ID NO: 259520 - DNA, 25 bp, Artificial
  probe
  misc_feature (1)..(25): SEQ ID NO: 264; WAN024ACD; Start 128; Stop 152
tttactggtggagagagtataatga

SEQ ID NO: 259521 - DNA, 25 bp, Artificial
  probe
  misc_feature (1)..(25): SEQ ID NO: 264; WAN024ACD; Start 99; Stop 123
atgtgacaacattgtataattgctt

SEQ ID NO: 259522 - DNA, 25 bp, Artificial
  probe
  misc_feature (1)..(25): SEQ ID NO: 264; WAN024ACD; Start 134; Stop 158
ggtggagagagtataatgagggtgg

SEQ ID NO: 259523 - DNA, 25 bp, Artificial
  probe
  misc_feature (1)..(25): SEQ ID NO: 264; WAN024ACD; Start 98; Stop 122
tatgtgacaacattgtataattgct

SEQ ID NO: 259524 - DNA, 25 bp, Artificial
  probe
  misc_feature (1)..(25): SEQ ID NO: 264; WAN024ACD; Start 105; Stop 129
caacattgtataattgcttgcattt

SEQ ID NO: 259525 - DNA, 25 bp, Artificial
  probe
  misc_feature (1)..(25): SEQ ID NO: 264; WAN024ACD; Start 97; Stop 121
ctatgtgacaacattgtataattgc

SEQ ID NO: 259526 - DNA, 25 bp, Artificial
  probe
  misc_feature (1)..(25): SEQ ID NO: 264; WAN024ACD; Start 20; Stop 44
aggtaacttctaaaactaacttcca

SEQ ID NO: 259527 - DNA, 25 bp, Artificial
  probe
  misc_feature (1)..(25): SEQ ID NO: 264; WAN024ACD; Start 53; Stop 77
agagagatggaagttactttgaaaa

SEQ ID NO: 259528 - DNA, 25 bp, Artificial
  probe
  misc_feature (1)..(25): SEQ ID NO: 264; WAN024ACD; Start 54; Stop 78
gagagatggaagttactttgaaaag

SEQ ID NO: 259529 - DNA, 25 bp, Artificial
  probe
  misc_feature (1)..(25): SEQ ID NO: 264; WAN024ACD; Start 114; Stop 138
ataattgcttgcattttactggtgg

SEQ ID NO: 259530 - DNA, 25 bp, Artificial
  probe
  misc_feature (1)..(25): SEQ ID NO: 264; WAN024ACD; Start 144; Stop 168
gtataatgagggtggataaagtact

SEQ ID NO: 259531 - DNA, 25 bp, Artificial
  probe
  misc_feature (1)..(25): SEQ ID NO: 264; WAN024ACD; Start 115; Stop 139
taattgcttgcattttactggtgga

SEQ ID NO: 259532 - DNA, 25 bp, Artificial
  probe
  misc_feature (1)..(25): SEQ ID NO: 265; WAN024AK8; Start 70; Stop 94
gtcatcacctcactatctaatctca

SEQ ID NO: 259533 - DNA, 25 bp, Artificial
  probe
  misc_feature (1)..(25): SEQ ID NO: 265; WAN024AK8; Start 69; Stop 93
tgtcatcacctcactatctaatctc

SEQ ID NO: 259534 - DNA, 25 bp, Artificial
  probe
  misc_feature (1)..(25): SEQ ID NO: 265; WAN024AK8; Start 71; Stop 95
tcatcacctcactatctaatctcag

SEQ ID NO: 259535 - DNA, 25 bp, Artificial
  probe
  misc_feature (1)..(25): SEQ ID NO: 265; WAN024AK8; Start 68; Stop 92
atgtcatcacctcactatctaatct

SEQ ID NO: 259536 - DNA, 25 bp, Artificial
  probe
  misc_feature (1)..(25): SEQ ID NO: 265; WAN024AK8; Start 72; Stop 96
catcacctcactatctaatctcagt

SEQ ID NO: 259537 - DNA, 25 bp, Artificial
  probe
  misc_feature (1)..(25): SEQ ID NO: 265; WAN024AK8; Start 65; Stop 89
actatgtcatcacctcactatctaa

SEQ ID NO: 259538 - DNA, 25 bp, Artificial
  probe
  misc_feature (1)..(25): SEQ ID NO: 265; WAN024AK8; Start 64; Stop 88
aactatgtcatcacctcactatcta

SEQ ID NO: 259539 - DNA, 25 bp, Artificial
  probe
  misc_feature (1)..(25): SEQ ID NO: 265; WAN024AK8; Start 75; Stop 99
cacctcactatctaatctcagtaca

SEQ ID NO: 259540 - DNA, 25 bp, Artificial
  probe
  misc_feature (1)..(25): SEQ ID NO: 265; WAN024AK8; Start 74; Stop 98
tcacctcactatctaatctcagtac

SEQ ID NO: 259541 - DNA, 25 bp, Artificial
  probe
  misc_feature (1)..(25): SEQ ID NO: 265; WAN024AK8; Start 73; Stop 97
atcacctcactatctaatctcagta

SEQ ID NO: 259542 - DNA, 25 bp, Artificial
  probe
  misc_feature (1)..(25): SEQ ID NO: 265; WAN024AK8; Start 67; Stop 91
tatgtcatcacctcactatctaatc

SEQ ID NO: 259543 - DNA, 25 bp, Artificial
  probe
  misc_feature (1)..(25): SEQ ID NO: 265; WAN024AK8; Start 66; Stop 90
ctatgtcatcacctcactatctaat

SEQ ID NO: 259544 - DNA, 25 bp, Artificial
  probe
  misc_feature (1)..(25): SEQ ID NO: 265; WAN024AK8; Start 76; Stop 100
acctcactatctaatctcagtacat

SEQ ID NO: 259545 - DNA, 25 bp, Artificial
  probe
  misc_feature (1)..(25): SEQ ID NO: 265; WAN024AK8; Start 63; Stop 87
aaactatgtcatcacctcactatct

SEQ ID NO: 259546 - DNA, 25 bp, Artificial
  probe
  misc_feature (1)..(25): SEQ ID NO: 265; WAN024AK8; Start 77; Stop 101
cctcactatctaatctcagtacata

SEQ ID NO: 259547 - DNA, 25 bp, Artificial
  probe
  misc_feature (1)..(25): SEQ ID NO: 265; WAN024AK8; Start 61; Stop 85
caaaactatgtcatcacctcactat

SEQ ID NO: 259548 - DNA, 25 bp, Artificial
  probe
  misc_feature (1)..(25): SEQ ID NO: 265; WAN024AK8; Start 62; Stop 86
aaaactatgtcatcacctcactatc

SEQ ID NO: 259549 - DNA, 25 bp, Artificial
  probe
  misc_feature (1)..(25): SEQ ID NO: 265; WAN024AK8; Start 60; Stop 84
acaaaactatgtcatcacctcacta

SEQ ID NO: 259550 - DNA, 25 bp, Artificial
  probe
  misc_feature (1)..(25): SEQ ID NO: 265; WAN024AK8; Start 57; Stop 81
ttcacaaaactatgtcatcacctca

SEQ ID NO: 259551 - DNA, 25 bp, Artificial
  probe
  misc_feature (1)..(25): SEQ ID NO: 265; WAN024AK8; Start 56; Stop 80
tttcacaaaactatgtcatcacctc

SEQ ID NO: 259552 - DNA, 25 bp, Artificial
  probe
  misc_feature (1)..(25): SEQ ID NO: 265; WAN024AK8; Start 59; Stop 83
cacaaaactatgtcatcacctcact

SEQ ID NO: 259553 - DNA, 25 bp, Artificial
  probe
  misc_feature (1)..(25): SEQ ID NO: 265; WAN024AK8; Start 58; Stop 82
tcacaaaactatgtcatcacctcac

SEQ ID NO: 259554 - DNA, 25 bp, Artificial
  probe
  misc_feature (1)..(25): SEQ ID NO: 265; WAN024AK8; Start 55; Stop 79
ttttcacaaaactatgtcatcacct

SEQ ID NO: 259555 - DNA, 25 bp, Artificial
  probe
  misc_feature (1)..(25): SEQ ID NO: 265; WAN024AK8; Start 85; Stop 109
tctaatctcagtacataaaccattt

SEQ ID NO: 259556 - DNA, 25 bp, Artificial
  probe
  misc_feature (1)..(25): SEQ ID NO: 265; WAN024AK8; Start 78; Stop 102
ctcactatctaatctcagtacataa

SEQ ID NO: 259557 - DNA, 25 bp, Artificial
  probe
  misc_feature (1)..(25): SEQ ID NO: 265; WAN024AK8; Start 84; Stop 108
atctaatctcagtacataaaccatt

SEQ ID NO: 259558 - DNA, 25 bp, Artificial
  probe
  misc_feature (1)..(25): SEQ ID NO: 265; WAN024AK8; Start 82; Stop 106
ctatctaatctcagtacataaacca

SEQ ID NO: 259559 - DNA, 25 bp, Artificial
  probe
  misc_feature (1)..(25): SEQ ID NO: 265; WAN024AK8; Start 81; Stop 105
actatctaatctcagtacataaacc

SEQ ID NO: 259560 - DNA, 25 bp, Artificial
  probe
  misc_feature (1)..(25): SEQ ID NO: 265; WAN024AK8; Start 86; Stop 110
ctaatctcagtacataaaccatttt

SEQ ID NO: 259561 - DNA, 25 bp, Artificial
  probe
  misc_feature (1)..(25): SEQ ID NO: 266; WAN024AH2; Start 42; Stop 66
catataggagtcgatgtcaaccatt

SEQ ID NO: 259562 - DNA, 25 bp, Artificial
  probe
  misc_feature (1)..(25): SEQ ID NO: 266; WAN024AH2; Start 41; Stop 65
tcatataggagtcgatgtcaaccat

SEQ ID NO: 259563 - DNA, 25 bp, Artificial
  probe
  misc_feature (1)..(25): SEQ ID NO: 266; WAN024AH2; Start 40; Stop 64
ctcatataggagtcgatgtcaacca

SEQ ID NO: 259564 - DNA, 25 bp, Artificial
  probe
  misc_feature (1)..(25): SEQ ID NO: 266; WAN024AH2; Start 43; Stop 67
atataggagtcgatgtcaaccattt

SEQ ID NO: 259565 - DNA, 25 bp, Artificial
  probe
  misc_feature (1)..(25): SEQ ID NO: 266; WAN024AH2; Start 38; Stop 62
tactcatataggagtcgatgtcaac

SEQ ID NO: 259566 - DNA, 25 bp, Artificial
  probe
  misc_feature (1)..(25): SEQ ID NO: 266; WAN024AH2; Start 39; Stop 63
actcatataggagtcgatgtcaacc

SEQ ID NO: 259567 - DNA, 25 bp, Artificial
  probe
  misc_feature (1)..(25): SEQ ID NO: 266; WAN024AH2; Start 37; Stop 61
atactcatataggagtcgatgtcaa

SEQ ID NO: 259568 - DNA, 25 bp, Artificial
  probe
  misc_feature (1)..(25): SEQ ID NO: 266; WAN024AH2; Start 44; Stop 68
tataggagtcgatgtcaaccatttt

SEQ ID NO: 259569 - DNA, 25 bp, Artificial
  probe
  misc_feature (1)..(25): SEQ ID NO: 266; WAN024AH2; Start 36; Stop 60
tatactcatataggagtcgatgtca

SEQ ID NO: 259570 - DNA, 25 bp, Artificial
  probe
  misc_feature (1)..(25): SEQ ID NO: 266; WAN024AH2; Start 35; Stop 59
ttatactcatataggagtcgatgtc

SEQ ID NO: 259571 - DNA, 25 bp, Artificial
  probe
  misc_feature (1)..(25): SEQ ID NO: 266; WAN024AH2; Start 34; Stop 58
attatactcatataggagtcgatgt

SEQ ID NO: 259572 - DNA, 25 bp, Artificial
  probe
  misc_feature (1)..(25): SEQ ID NO: 266; WAN024AH2; Start 91; Stop 115
tgtaacagccgattttcgtgactag

SEQ ID NO: 259573 - DNA, 25 bp, Artificial
  probe
  misc_feature (1)..(25): SEQ ID NO: 266; WAN024AH2; Start 86; Stop 110
aaaactgtaacagccgattttcgtg

SEQ ID NO: 259574 - DNA, 25 bp, Artificial
  probe
  misc_feature (1)..(25): SEQ ID NO: 266; WAN024AH2; Start 90; Stop 114
ctgtaacagccgattttcgtgacta

SEQ ID NO: 259575 - DNA, 25 bp, Artificial
  probe
  misc_feature (1)..(25): SEQ ID NO: 266; WAN024AH2; Start 31; Stop 55
actattatactcatataggagtcga

SEQ ID NO: 259576 - DNA, 25 bp, Artificial
  probe
  misc_feature (1)..(25): SEQ ID NO: 266; WAN024AH2; Start 87; Stop 111
aaactgtaacagccgattttcgtga

SEQ ID NO: 259577 - DNA, 25 bp, Artificial
  probe
  misc_feature (1)..(25): SEQ ID NO: 266; WAN024AH2; Start 88; Stop 112
aactgtaacagccgattttcgtgac

SEQ ID NO: 259578 - DNA, 25 bp, Artificial
  probe
  misc_feature (1)..(25): SEQ ID NO: 266; WAN024AH2; Start 92; Stop 116
gtaacagccgattttcgtgactagt

SEQ ID NO: 259579 - DNA, 25 bp, Artificial
  probe
  misc_feature (1)..(25): SEQ ID NO: 266; WAN024AH2; Start 89; Stop 113
actgtaacagccgattttcgtgact

SEQ ID NO: 259580 - DNA, 25 bp, Artificial
  probe
  misc_feature (1)..(25): SEQ ID NO: 267; WAN024A46; Start 28; Stop 52
cttgaaatcaactgatggctccttt

SEQ ID NO: 259581 - DNA, 25 bp, Artificial
  probe
  misc_feature (1)..(25): SEQ ID NO: 267; WAN024A46; Start 95; Stop 119
acttgacaagtaacttggatatcgt

SEQ ID NO: 259582 - DNA, 25 bp, Artificial
  probe
  misc_feature (1)..(25): SEQ ID NO: 267; WAN024A46; Start 94; Stop 118
cacttgacaagtaacttggatatcg

SEQ ID NO: 259583 - DNA, 25 bp, Artificial
  probe
  misc_feature (1)..(25): SEQ ID NO: 267; WAN024A46; Start 96; Stop 120
cttgacaagtaacttggatatcgtt

SEQ ID NO: 259584 - DNA, 25 bp, Artificial
  probe
  misc_feature (1)..(25): SEQ ID NO: 267; WAN024A46; Start 93; Stop 117
acacttgacaagtaacttggatatc

SEQ ID NO: 259585 - DNA, 25 bp, Artificial
  probe
  misc_feature (1)..(25): SEQ ID NO: 267; WAN024A46; Start 29; Stop 53
ttgaaatcaactgatggctcctttt

SEQ ID NO: 259586 - DNA, 25 bp, Artificial
  probe
  misc_feature (1)..(25): SEQ ID NO: 267; WAN024A46; Start 92; Stop 116
aacacttgacaagtaacttggatat

SEQ ID NO: 259587 - DNA, 25 bp, Artificial
  probe
  misc_feature (1)..(25): SEQ ID NO: 267; WAN024A46; Start 27; Stop 51
gcttgaaatcaactgatggctcctt

SEQ ID NO: 259588 - DNA, 25 bp, Artificial
  probe
  misc_feature (1)..(25): SEQ ID NO: 267; WAN024A46; Start 97; Stop 121
ttgacaagtaacttggatatcgtta

SEQ ID NO: 259589 - DNA, 25 bp, Artificial
  probe
  misc_feature (1)..(25): SEQ ID NO: 267; WAN024A46; Start 98; Stop 122
tgacaagtaacttggatatcgttat

SEQ ID NO: 259590 - DNA, 25 bp, Artificial
  probe
  misc_feature (1)..(25): SEQ ID NO: 267; WAN024A46; Start 91; Stop 115
aaacacttgacaagtaacttggata

SEQ ID NO: 259591 - DNA, 25 bp, Artificial
  probe
  misc_feature (1)..(25): SEQ ID NO: 267; WAN024A46; Start 99; Stop 123
gacaagtaacttggatatcgttata

SEQ ID NO: 259592 - DNA, 25 bp, Artificial
  probe
  misc_feature (1)..(25): SEQ ID NO: 267; WAN024A46; Start 100; Stop 124
acaagtaacttggatatcgttataa

SEQ ID NO: 259593 - DNA, 25 bp, Artificial
  probe
  misc_feature (1)..(25): SEQ ID NO: 267; WAN024A46; Start 26; Stop 50
agcttgaaatcaactgatggctcct

SEQ ID NO: 259594 - DNA, 25 bp, Artificial
  probe
  misc_feature (1)..(25): SEQ ID NO: 267; WAN024A46; Start 90; Stop 114
aaaacacttgacaagtaacttggat

SEQ ID NO: 259595 - DNA, 25 bp, Artificial
  probe
  misc_feature (1)..(25): SEQ ID NO: 267; WAN024A46; Start 129; Stop 153
acaaaattaacagagaggttgttta

SEQ ID NO: 259596 - DNA, 25 bp, Artificial
  probe
  misc_feature (1)..(25): SEQ ID NO: 267; WAN024A46; Start 128; Stop 152
tacaaaattaacagagaggttgttt

SEQ ID NO: 259597 - DNA, 25 bp, Artificial
  probe
  misc_feature (1)..(25): SEQ ID NO: 267; WAN024A46; Start 125; Stop 149
ttatacaaaattaacagagaggttg

SEQ ID NO: 259598 - DNA, 25 bp, Artificial
  probe
  misc_feature (1)..(25): SEQ ID NO: 267; WAN024A46; Start 127; Stop 151
atacaaaattaacagagaggttgtt

SEQ ID NO: 259599 - DNA, 25 bp, Artificial
  probe
  misc_feature (1)..(25): SEQ ID NO: 267; WAN024A46; Start 132; Stop 156
aaattaacagagaggttgtttattt

SEQ ID NO: 259600 - DNA, 25 bp, Artificial
  probe
  misc_feature (1)..(25): SEQ ID NO: 267; WAN024A46; Start 126; Stop 150
tatacaaaattaacagagaggttgt

SEQ ID NO: 259601 - DNA, 25 bp, Artificial
  probe
  misc_feature (1)..(25): SEQ ID NO: 267; WAN024A46; Start 130; Stop 154
caaaattaacagagaggttgtttat

SEQ ID NO: 259602 - DNA, 25 bp, Artificial
  probe
  misc_feature (1)..(25): SEQ ID NO: 267; WAN024A46; Start 131; Stop 155
aaaattaacagagaggttgtttatt

SEQ ID NO: 259603 - DNA, 25 bp, Artificial
  probe
  misc_feature (1)..(25): SEQ ID NO: 268; WAN024AB9; Start 99; Stop 123
ttgttgtgttattccgtccttattt

SEQ ID NO: 259604 - DNA, 25 bp, Artificial
  probe
  misc_feature (1)..(25): SEQ ID NO: 268; WAN024AB9; Start 98; Stop 122
tttgttgtgttattccgtccttatt

SEQ ID NO: 259605 - DNA, 25 bp, Artificial
  probe
  misc_feature (1)..(25): SEQ ID NO: 268; WAN024AB9; Start 97; Stop 121
atttgttgtgttattccgtccttat

SEQ ID NO: 259606 - DNA, 25 bp, Artificial
  probe
  misc_feature (1)..(25): SEQ ID NO: 268; WAN024AB9; Start 96; Stop 120
aatttgttgtgttattccgtcctta

SEQ ID NO: 259607 - DNA, 25 bp, Artificial
  probe
  misc_feature (1)..(25): SEQ ID NO: 268; WAN024AB9; Start 137; Stop 161
tttaagtgggacctcttatccttac

SEQ ID NO: 259608 - DNA, 25 bp, Artificial
  probe
  misc_feature (1)..(25): SEQ ID NO: 268; WAN024AB9; Start 138; Stop 162
ttaagtgggacctcttatccttacc

SEQ ID NO: 259609 - DNA, 25 bp, Artificial
  probe
  misc_feature (1)..(25): SEQ ID NO: 268; WAN024AB9; Start 95; Stop 119
gaatttgttgtgttattccgtcctt

SEQ ID NO: 259610 - DNA, 25 bp, Artificial
  probe
  misc_feature (1)..(25): SEQ ID NO: 268; WAN024AB9; Start 92; Stop 116
agagaatttgttgtgttattccgtc

SEQ ID NO: 259611 - DNA, 25 bp, Artificial
  probe
  misc_feature (1)..(25): SEQ ID NO: 268; WAN024AB9; Start 93; Stop 117
gagaatttgttgtgttattccgtcc

SEQ ID NO: 259612 - DNA, 25 bp, Artificial
  probe
  misc_feature (1)..(25): SEQ ID NO: 268; WAN024AB9; Start 94; Stop 118
agaatttgttgtgttattccgtcct

SEQ ID NO: 259613 - DNA, 25 bp, Artificial
  probe
  misc_feature (1)..(25): SEQ ID NO: 268; WAN024AB9; Start 91; Stop 115
tagagaatttgttgtgttattccgt

SEQ ID NO: 259614 - DNA, 25 bp, Artificial
  probe
  misc_feature (1)..(25): SEQ ID NO: 268; WAN024AB9; Start 142; Stop 166
gtgggacctcttatccttaccattt

SEQ ID NO: 259615 - DNA, 25 bp, Artificial
  probe
  misc_feature (1)..(25): SEQ ID NO: 268; WAN024AB9; Start 139; Stop 163
taagtgggacctcttatccttacca

SEQ ID NO: 259616 - DNA, 25 bp, Artificial
  probe
  misc_feature (1)..(25): SEQ ID NO: 268; WAN024AB9; Start 102; Stop 126
ttgtgttattccgtccttattttgc

SEQ ID NO: 259617 - DNA, 25 bp, Artificial
  probe
  misc_feature (1)..(25): SEQ ID NO: 268; WAN024AB9; Start 90; Stop 114
ttagagaatttgttgtgttattccg

SEQ ID NO: 259618 - DNA, 25 bp, Artificial
  probe
  misc_feature (1)..(25): SEQ ID NO: 268; WAN024AB9; Start 106; Stop 130
gttattccgtccttattttgccata

SEQ ID NO: 259619 - DNA, 25 bp, Artificial
  probe
  misc_feature (1)..(25): SEQ ID NO: 268; WAN024AB9; Start 100; Stop 124
tgttgtgttattccgtccttatttt

SEQ ID NO: 259620 - DNA, 25 bp, Artificial
  probe
  misc_feature (1)..(25): SEQ ID NO: 268; WAN024AB9; Start 105; Stop 129
tgttattccgtccttattttgccat

SEQ ID NO: 259621 - DNA, 25 bp, Artificial
  probe
  misc_feature (1)..(25): SEQ ID NO: 268; WAN024AB9; Start 101; Stop 125
gttgtgttattccgtccttattttg

SEQ ID NO: 259622 - DNA, 25 bp, Artificial
  probe
  misc_feature (1)..(25): SEQ ID NO: 268; WAN024AB9; Start 141; Stop 165
agtgggacctcttatccttaccatt

SEQ ID NO: 259623 - DNA, 25 bp, Artificial
  probe
  misc_feature (1)..(25): SEQ ID NO: 268; WAN024AB9; Start 140; Stop 164
aagtgggacctcttatccttaccat

SEQ ID NO: 259624 - DNA, 25 bp, Artificial
  probe
  misc_feature (1)..(25): SEQ ID NO: 268; WAN024AB9; Start 108; Stop 132
tattccgtccttattttgccataaa

SEQ ID NO: 259625 - DNA, 25 bp, Artificial
  probe
  misc_feature (1)..(25): SEQ ID NO: 268; WAN024AB9; Start 107; Stop 131
ttattccgtccttattttgccataa

SEQ ID NO: 259626 - DNA, 25 bp, Artificial
  probe
  misc_feature (1)..(25): SEQ ID NO: 268; WAN024AB9; Start 104; Stop 128
gtgttattccgtccttattttgcca

SEQ ID NO: 259627 - DNA, 25 bp, Artificial
  probe
  misc_feature (1)..(25): SEQ ID NO: 268; WAN024AB9; Start 103; Stop 127
tgtgttattccgtccttattttgcc

SEQ ID NO: 259628 - DNA, 25 bp, Artificial
  probe
  misc_feature (1)..(25): SEQ ID NO: 268; WAN024AB9; Start 111; Stop 135
tccgtccttattttgccataaattg

SEQ ID NO: 259629 - DNA, 25 bp, Artificial
  probe
  misc_feature (1)..(25): SEQ ID NO: 268; WAN024AB9; Start 112; Stop 136
ccgtccttattttgccataaattgt

SEQ ID NO: 259630 - DNA, 25 bp, Artificial
  probe
  misc_feature (1)..(25): SEQ ID NO: 268; WAN024AB9; Start 110; Stop 134
ttccgtccttattttgccataaatt

SEQ ID NO: 259631 - DNA, 25 bp, Artificial
  probe
  misc_feature (1)..(25): SEQ ID NO: 268; WAN024AB9; Start 109; Stop 133
attccgtccttattttgccataaat

SEQ ID NO: 259632 - DNA, 25 bp, Artificial
  probe
  misc_feature (1)..(25): SEQ ID NO: 268; WAN024AB9; Start 129; Stop 153
taaattgttttaagtgggacctctt

SEQ ID NO: 259633 - DNA, 25 bp, Artificial
  probe
  misc_feature (1)..(25): SEQ ID NO: 268; WAN024AB9; Start 127; Stop 151
cataaattgttttaagtgggacctc

SEQ ID NO: 259634 - DNA, 25 bp, Artificial
  probe
  misc_feature (1)..(25): SEQ ID NO: 268; WAN024AB9; Start 113; Stop 137
cgtccttattttgccataaattgtt

SEQ ID NO: 259635 - DNA, 25 bp, Artificial
  probe
  misc_feature (1)..(25): SEQ ID NO: 268; WAN024AB9; Start 128; Stop 152
ataaattgttttaagtgggacctct

SEQ ID NO: 259636 - DNA, 25 bp, Artificial
  probe
  misc_feature (1)..(25): SEQ ID NO: 269; WAN024ACR; Start 14; Stop 38
acgttttctagcttttctttactta

SEQ ID NO: 259637 - DNA, 25 bp, Artificial
  probe
  misc_feature (1)..(25): SEQ ID NO: 269; WAN024ACR; Start 15; Stop 39
cgttttctagcttttctttacttaa

SEQ ID NO: 259638 - DNA, 25 bp, Artificial
  probe
  misc_feature (1)..(25): SEQ ID NO: 269; WAN024ACR; Start 13; Stop 37
aacgttttctagcttttctttactt

SEQ ID NO: 259639 - DNA, 25 bp, Artificial
  probe
  misc_feature (1)..(25): SEQ ID NO: 270; WAN0249LL; Start 79; Stop 103
aaggcatcaatttcctactcttagt

SEQ ID NO: 259640 - DNA, 25 bp, Artificial
  probe
  misc_feature (1)..(25): SEQ ID NO: 270; WAN0249LL; Start 78; Stop 102
caaggcatcaatttcctactcttag

SEQ ID NO: 259641 - DNA, 25 bp, Artificial
  probe
  misc_feature (1)..(25): SEQ ID NO: 270; WAN0249LL; Start 77; Stop 101
gcaaggcatcaatttcctactctta

SEQ ID NO: 259642 - DNA, 25 bp, Artificial
  probe
  misc_feature (1)..(25): SEQ ID NO: 270; WAN0249LL; Start 67; Stop 91
tgaaatcagagcaaggcatcaattt

SEQ ID NO: 259643 - DNA, 25 bp, Artificial
  probe
  misc_feature (1)..(25): SEQ ID NO: 270; WAN0249LL; Start 56; Stop 80
aaccatagaactgaaatcagagcaa

SEQ ID NO: 259644 - DNA, 25 bp, Artificial
  probe
  misc_feature (1)..(25): SEQ ID NO: 270; WAN0249LL; Start 57; Stop 81
accatagaactgaaatcagagcaag

SEQ ID NO: 259645 - DNA, 25 bp, Artificial
  probe
  misc_feature (1)..(25): SEQ ID NO: 270; WAN0249LL; Start 80; Stop 104
aggcatcaatttcctactcttagta

SEQ ID NO: 259646 - DNA, 25 bp, Artificial
  probe
  misc_feature (1)..(25): SEQ ID NO: 270; WAN0249LL; Start 55; Stop 79
caaccatagaactgaaatcagagca

SEQ ID NO: 259647 - DNA, 25 bp, Artificial
  probe
  misc_feature (1)..(25): SEQ ID NO: 270; WAN0249LL; Start 54; Stop 78
acaaccatagaactgaaatcagagc

SEQ ID NO: 259648 - DNA, 25 bp, Artificial
  probe
  misc_feature (1)..(25): SEQ ID NO: 270; WAN0249LL; Start 53; Stop 77
aacaaccatagaactgaaatcagag

SEQ ID NO: 259649 - DNA, 25 bp, Artificial
  probe
  misc_feature (1)..(25): SEQ ID NO: 270; WAN0249LL; Start 82; Stop 106
gcatcaatttcctactcttagtacg

SEQ ID NO: 259650 - DNA, 25 bp, Artificial
  probe
  misc_feature (1)..(25): SEQ ID NO: 270; WAN0249LL; Start 69; Stop 93
aaatcagagcaaggcatcaatttcc

SEQ ID NO: 259651 - DNA, 25 bp, Artificial
  probe
  misc_feature (1)..(25): SEQ ID NO: 270; WAN0249LL; Start 81; Stop 105
ggcatcaatttcctactcttagtac

SEQ ID NO: 259652 - DNA, 25 bp, Artificial
  probe
  misc_feature (1)..(25): SEQ ID NO: 270; WAN0249LL; Start 58; Stop 82
ccatagaactgaaatcagagcaagg

SEQ ID NO: 259653 - DNA, 25 bp, Artificial
  probe
  misc_feature (1)..(25): SEQ ID NO: 270; WAN0249LL; Start 47; Stop 71
aagtctaacaaccatagaactgaaa

SEQ ID NO: 259654 - DNA, 25 bp, Artificial
  probe
  misc_feature (1)..(25): SEQ ID NO: 270; WAN0249LL; Start 46; Stop 70
aaagtctaacaaccatagaactgaa

SEQ ID NO: 259655 - DNA, 25 bp, Artificial
  probe
  misc_feature (1)..(25): SEQ ID NO: 270; WAN0249LL; Start 71; Stop 95
atcagagcaaggcatcaatttccta

SEQ ID NO: 259656 - DNA, 25 bp, Artificial
  probe
  misc_feature (1)..(25): SEQ ID NO: 270; WAN0249LL; Start 50; Stop 74
tctaacaaccatagaactgaaatca

SEQ ID NO: 259657 - DNA, 25 bp, Artificial
  probe
  misc_feature (1)..(25): SEQ ID NO: 270; WAN0249LL; Start 48; Stop 72
agtctaacaaccatagaactgaaat

SEQ ID NO: 259658 - DNA, 25 bp, Artificial
  probe
  misc_feature (1)..(25): SEQ ID NO: 270; WAN0249LL; Start 59; Stop 83
catagaactgaaatcagagcaaggc

SEQ ID NO: 259659 - DNA, 25 bp, Artificial
  probe
  misc_feature (1)..(25): SEQ ID NO: 270; WAN0249LL; Start 76; Stop 100
agcaaggcatcaatttcctactctt

SEQ ID NO: 259660 - DNA, 25 bp, Artificial
  probe
  misc_feature (1)..(25): SEQ ID NO: 270; WAN0249LL; Start 105; Stop 129
cgtctattttgatggttgaagtgaa

SEQ ID NO: 259661 - DNA, 25 bp, Artificial
  probe
  misc_feature (1)..(25): SEQ ID NO: 270; WAN0249LL; Start 49; Stop 73
gtctaacaaccatagaactgaaatc

SEQ ID NO: 259662 - DNA, 25 bp, Artificial
  probe
  misc_feature (1)..(25): SEQ ID NO: 270; WAN0249LL; Start 66; Stop 90
ctgaaatcagagcaaggcatcaatt

SEQ ID NO: 259663 - DNA, 25 bp, Artificial
  probe
  misc_feature (1)..(25): SEQ ID NO: 270; WAN0249LL; Start 52; Stop 76
taacaaccatagaactgaaatcaga

SEQ ID NO: 259664 - DNA, 25 bp, Artificial
  probe
  misc_feature (1)..(25): SEQ ID NO: 270; WAN0249LL; Start 61; Stop 85
tagaactgaaatcagagcaaggcat

SEQ ID NO: 259665 - DNA, 25 bp, Artificial
  probe
  misc_feature (1)..(25): SEQ ID NO: 270; WAN0249LL; Start 60; Stop 84
atagaactgaaatcagagcaaggca

SEQ ID NO: 259666 - DNA, 25 bp, Artificial
  probe
  misc_feature (1)..(25): SEQ ID NO: 270; WAN0249LL; Start 51; Stop 75
ctaacaaccatagaactgaaatcag

SEQ ID NO: 259667 - DNA, 25 bp, Artificial
  probe
  misc_feature (1)..(25): SEQ ID NO: 270; WAN0249LL; Start 45; Stop 69
taaagtctaacaaccatagaactga

SEQ ID NO: 259668 - DNA, 25 bp, Artificial
  probe
  misc_feature (1)..(25): SEQ ID NO: 270; WAN0249LL; Start 75; Stop 99
gagcaaggcatcaatttcctactct

SEQ ID NO: 259669 - DNA, 25 bp, Artificial
  probe
  misc_feature (1)..(25): SEQ ID NO: 270; WAN0249LL; Start 74; Stop 98
agagcaaggcatcaatttcctactc

SEQ ID NO: 259670 - DNA, 25 bp, Artificial
  probe
  misc_feature (1)..(25): SEQ ID NO: 270; WAN0249LL; Start 106; Stop 130
gtctattttgatggttgaagtgaag

SEQ ID NO: 259671 - DNA, 25 bp, Artificial
  probe
  misc_feature (1)..(25): SEQ ID NO: 270; WAN0249LL; Start 73; Stop 97
cagagcaaggcatcaatttcctact

SEQ ID NO: 259672 - DNA, 25 bp, Artificial
  probe
  misc_feature (1)..(25): SEQ ID NO: 271; WAN024AGW; Start 12; Stop 36
ataagtttgtttgaagaagagcagc

SEQ ID NO: 259673 - DNA, 25 bp, Artificial
  probe
  misc_feature (1)..(25): SEQ ID NO: 271; WAN024AGW; Start 13; Stop 37
taagtttgtttgaagaagagcagca

SEQ ID NO: 259674 - DNA, 25 bp, Artificial
  probe
  misc_feature (1)..(25): SEQ ID NO: 271; WAN024AGW; Start 11; Stop 35
aataagtttgtttgaagaagagcag

SEQ ID NO: 259675 - DNA, 25 bp, Artificial
  probe
  misc_feature (1)..(25): SEQ ID NO: 271; WAN024AGW; Start 14; Stop 38
aagtttgtttgaagaagagcagcag

SEQ ID NO: 259676 - DNA, 25 bp, Artificial
  probe
  misc_feature (1)..(25): SEQ ID NO: 271; WAN024AGW; Start 32; Stop 56
gcagcagctcttaaacttagaatag

SEQ ID NO: 259677 - DNA, 25 bp, Artificial
  probe
  misc_feature (1)..(25): SEQ ID NO: 271; WAN024AGW; Start 33; Stop 57
cagcagctcttaaacttagaatagg

SEQ ID NO: 259678 - DNA, 25 bp, Artificial
  probe
  misc_feature (1)..(25): SEQ ID NO: 271; WAN024AGW; Start 34; Stop 58
agcagctcttaaacttagaatagga

SEQ ID NO: 259679 - DNA, 25 bp, Artificial
  probe
  misc_feature (1)..(25): SEQ ID NO: 271; WAN024AGW; Start 10; Stop 34
taataagtttgtttgaagaagagca

SEQ ID NO: 259680 - DNA, 25 bp, Artificial
  probe
  misc_feature (1)..(25): SEQ ID NO: 271; WAN024AGW; Start 35; Stop 59
gcagctcttaaacttagaataggag

SEQ ID NO: 259681 - DNA, 25 bp, Artificial
  probe
  misc_feature (1)..(25): SEQ ID NO: 271; WAN024AGW; Start 36; Stop 60
cagctcttaaacttagaataggaga

SEQ ID NO: 259682 - DNA, 25 bp, Artificial
  probe
  misc_feature (1)..(25): SEQ ID NO: 271; WAN024AGW; Start 31; Stop 55
agcagcagctcttaaacttagaata

SEQ ID NO: 259683 - DNA, 25 bp, Artificial
  probe
  misc_feature (1)..(25): SEQ ID NO: 271; WAN024AGW; Start 9; Stop 33
ataataagtttgtttgaagaagagc

SEQ ID NO: 259684 - DNA, 25 bp, Artificial
  probe
  misc_feature (1)..(25): SEQ ID NO: 271; WAN024AGW; Start 38; Stop 62
gctcttaaacttagaataggagaaa

SEQ ID NO: 259685 - DNA, 25 bp, Artificial
  probe
  misc_feature (1)..(25): SEQ ID NO: 271; WAN024AGW; Start 37; Stop 61
agctcttaaacttagaataggagaa

SEQ ID NO: 259686 - DNA, 25 bp, Artificial
  probe
  misc_feature (1)..(25): SEQ ID NO: 271; WAN024AGW; Start 15; Stop 39
agtttgtttgaagaagagcagcagc

SEQ ID NO: 259687 - DNA, 25 bp, Artificial
  probe
  misc_feature (1)..(25): SEQ ID NO: 271; WAN024AGW; Start 16; Stop 40
gtttgtttgaagaagagcagcagct

SEQ ID NO: 259688 - DNA, 25 bp, Artificial
  probe
  misc_feature (1)..(25): SEQ ID NO: 272; WAN0249KL; Start 91; Stop 115
agtcgtataggtttgaggtaagtaa

SEQ ID NO: 259689 - DNA, 25 bp, Artificial
  probe
  misc_feature (1)..(25): SEQ ID NO: 272; WAN0249KL; Start 90; Stop 114
aagtcgtataggtttgaggtaagta

SEQ ID NO: 259690 - DNA, 25 bp, Artificial
  probe
  misc_feature (1)..(25): SEQ ID NO: 272; WAN0249KL; Start 89; Stop 113
taagtcgtataggtttgaggtaagt

SEQ ID NO: 259691 - DNA, 25 bp, Artificial
  probe
  misc_feature (1)..(25): SEQ ID NO: 272; WAN0249KL; Start 87; Stop 111
agtaagtcgtataggtttgaggtaa

SEQ ID NO: 259692 - DNA, 25 bp, Artificial
  probe
  misc_feature (1)..(25): SEQ ID NO: 272; WAN0249KL; Start 88; Stop 112
gtaagtcgtataggtttgaggtaag

SEQ ID NO: 259693 - DNA, 25 bp, Artificial
  probe
  misc_feature (1)..(25): SEQ ID NO: 272; WAN0249KL; Start 85; Stop 109
atagtaagtcgtataggtttgaggt

SEQ ID NO: 259694 - DNA, 25 bp, Artificial
  probe
  misc_feature (1)..(25): SEQ ID NO: 272; WAN0249KL; Start 86; Stop 110
tagtaagtcgtataggtttgaggta

SEQ ID NO: 259695 - DNA, 25 bp, Artificial
  probe
  misc_feature (1)..(25): SEQ ID NO: 272; WAN0249KL; Start 84; Stop 108
aatagtaagtcgtataggtttgagg

SEQ ID NO: 259696 - DNA, 25 bp, Artificial
  probe
  misc_feature (1)..(25): SEQ ID NO: 272; WAN0249KL; Start 82; Stop 106
acaatagtaagtcgtataggtttga

SEQ ID NO: 259697 - DNA, 25 bp, Artificial
  probe
  misc_feature (1)..(25): SEQ ID NO: 272; WAN0249KL; Start 26; Stop 50
tgctctttattttcctctctcgtaa

SEQ ID NO: 259698 - DNA, 25 bp, Artificial
  probe
  misc_feature (1)..(25): SEQ ID NO: 272; WAN0249KL; Start 25; Stop 49
ttgctctttattttcctctctcgta

SEQ ID NO: 259699 - DNA, 25 bp, Artificial
  probe
  misc_feature (1)..(25): SEQ ID NO: 272; WAN0249KL; Start 27; Stop 51
gctctttattttcctctctcgtaac

SEQ ID NO: 259700 - DNA, 25 bp, Artificial
  probe
  misc_feature (1)..(25): SEQ ID NO: 272; WAN0249KL; Start 83; Stop 107
caatagtaagtcgtataggtttgag

SEQ ID NO: 259701 - DNA, 25 bp, Artificial
  probe
  misc_feature (1)..(25): SEQ ID NO: 272; WAN0249KL; Start 23; Stop 47
agttgctctttattttcctctctcg

SEQ ID NO: 259702 - DNA, 25 bp, Artificial
  probe
  misc_feature (1)..(25): SEQ ID NO: 272; WAN0249KL; Start 24; Stop 48
gttgctctttattttcctctctcgt

SEQ ID NO: 259703 - DNA, 25 bp, Artificial
  probe
  misc_feature (1)..(25): SEQ ID NO: 272; WAN0249KL; Start 81; Stop 105
aacaatagtaagtcgtataggtttg

SEQ ID NO: 259704 - DNA, 25 bp, Artificial
  probe
  misc_feature (1)..(25): SEQ ID NO: 272; WAN0249KL; Start 22; Stop 46
aagttgctctttattttcctctctc

SEQ ID NO: 259705 - DNA, 25 bp, Artificial
  probe
  misc_feature (1)..(25): SEQ ID NO: 272; WAN0249KL; Start 28; Stop 52
ctctttattttcctctctcgtaact

SEQ ID NO: 259706 - DNA, 25 bp, Artificial
  probe
  misc_feature (1)..(25): SEQ ID NO: 272; WAN0249KL; Start 36; Stop 60
tttcctctctcgtaactaataattt

SEQ ID NO: 259707 - DNA, 25 bp, Artificial
  probe
  misc_feature (1)..(25): SEQ ID NO: 272; WAN0249KL; Start 29; Stop 53
tctttattttcctctctcgtaacta

SEQ ID NO: 259708 - DNA, 25 bp, Artificial
  probe
  misc_feature (1)..(25): SEQ ID NO: 272; WAN0249KL; Start 21; Stop 45
aaagttgctctttattttcctctct

SEQ ID NO: 259709 - DNA, 25 bp, Artificial
  probe
  misc_feature (1)..(25): SEQ ID NO: 272; WAN0249KL; Start 46; Stop 70
cgtaactaataattttgagagaggt

SEQ ID NO: 259710 - DNA, 25 bp, Artificial
  probe
  misc_feature (1)..(25): SEQ ID NO: 272; WAN0249KL; Start 45; Stop 69
tcgtaactaataattttgagagagg

SEQ ID NO: 259711 - DNA, 25 bp, Artificial
  probe
  misc_feature (1)..(25): SEQ ID NO: 272; WAN0249KL; Start 39; Stop 63
cctctctcgtaactaataattttga

SEQ ID NO: 259712 - DNA, 25 bp, Artificial
  probe
  misc_feature (1)..(25): SEQ ID NO: 272; WAN0249KL; Start 38; Stop 62
tcctctctcgtaactaataattttg

SEQ ID NO: 259713 - DNA, 25 bp, Artificial
  probe
  misc_feature (1)..(25): SEQ ID NO: 272; WAN0249KL; Start 20; Stop 44
aaaagttgctctttattttcctctc

SEQ ID NO: 259714 - DNA, 25 bp, Artificial
  probe
  misc_feature (1)..(25): SEQ ID NO: 272; WAN0249KL; Start 30; Stop 54
ctttattttcctctctcgtaactaa

SEQ ID NO: 259715 - DNA, 25 bp, Artificial
  probe
  misc_feature (1)..(25): SEQ ID NO: 272; WAN0249KL; Start 80; Stop 104
aaacaatagtaagtcgtataggttt

SEQ ID NO: 259716 - DNA, 25 bp, Artificial
  probe
  misc_feature (1)..(25): SEQ ID NO: 272; WAN0249KL; Start 31; Stop 55
tttattttcctctctcgtaactaat

SEQ ID NO: 259717 - DNA, 25 bp, Artificial
  probe
  misc_feature (1)..(25): SEQ ID NO: 272; WAN0249KL; Start 37; Stop 61
ttcctctctcgtaactaataatttt

SEQ ID NO: 259718 - DNA, 25 bp, Artificial
  probe
  misc_feature (1)..(25): SEQ ID NO: 272; WAN0249KL; Start 35; Stop 59
ttttcctctctcgtaactaataatt

SEQ ID NO: 259719 - DNA, 25 bp, Artificial
  probe
  misc_feature (1)..(25): SEQ ID NO: 272; WAN0249KL; Start 19; Stop 43
taaaagttgctctttattttcctct

SEQ ID NO: 259720 - DNA, 25 bp, Artificial
  probe
  misc_feature (1)..(25): SEQ ID NO: 272; WAN0249KL; Start 34; Stop 58
attttcctctctcgtaactaataat

SEQ ID NO: 259721 - DNA, 25 bp, Artificial
  probe
  misc_feature (1)..(25): SEQ ID NO: 273; WAN0249UJ; Start 176; Stop 200
gaccaaccattatcctgtagtaaca

SEQ ID NO: 259722 - DNA, 25 bp, Artificial
  probe
  misc_feature (1)..(25): SEQ ID NO: 273; WAN0249UJ; Start 177; Stop 201
accaaccattatcctgtagtaacaa

SEQ ID NO: 259723 - DNA, 25 bp, Artificial
  probe
  misc_feature (1)..(25): SEQ ID NO: 273; WAN0249UJ; Start 164; Stop 188
taagtctctacggaccaaccattat

SEQ ID NO: 259724 - DNA, 25 bp, Artificial
  probe
  misc_feature (1)..(25): SEQ ID NO: 273; WAN0249UJ; Start 163; Stop 187
ataagtctctacggaccaaccatta

SEQ ID NO: 259725 - DNA, 25 bp, Artificial
  probe
  misc_feature (1)..(25): SEQ ID NO: 273; WAN0249UJ; Start 162; Stop 186
tataagtctctacggaccaaccatt

SEQ ID NO: 259726 - DNA, 25 bp, Artificial
  probe
  misc_feature (1)..(25): SEQ ID NO: 273; WAN0249UJ; Start 161; Stop 185
gtataagtctctacggaccaaccat

SEQ ID NO: 259727 - DNA, 25 bp, Artificial
  probe
  misc_feature (1)..(25): SEQ ID NO: 273; WAN0249UJ; Start 175; Stop 199
ggaccaaccattatcctgtagtaac

SEQ ID NO: 259728 - DNA, 25 bp, Artificial
  probe
  misc_feature (1)..(25): SEQ ID NO: 273; WAN0249UJ; Start 159; Stop 183
gagtataagtctctacggaccaacc

SEQ ID NO: 259729 - DNA, 25 bp, Artificial
  probe
  misc_feature (1)..(25): SEQ ID NO: 273; WAN0249UJ; Start 165; Stop 189
aagtctctacggaccaaccattatc

SEQ ID NO: 259730 - DNA, 25 bp, Artificial
  probe
  misc_feature (1)..(25): SEQ ID NO: 273; WAN0249UJ; Start 160; Stop 184
agtataagtctctacggaccaacca

SEQ ID NO: 259731 - DNA, 25 bp, Artificial
  probe
  misc_feature (1)..(25): SEQ ID NO: 273; WAN0249UJ; Start 174; Stop 198
cggaccaaccattatcctgtagtaa

SEQ ID NO: 259732 - DNA, 25 bp, Artificial
  probe
  misc_feature (1)..(25): SEQ ID NO: 273; WAN0249UJ; Start 212; Stop 236
gagacagactgaactcaacttcttt

SEQ ID NO: 259733 - DNA, 25 bp, Artificial
  probe
  misc_feature (1)..(25): SEQ ID NO: 273; WAN0249UJ; Start 170; Stop 194
tctacggaccaaccattatcctgta

SEQ ID NO: 259734 - DNA, 25 bp, Artificial
  probe
  misc_feature (1)..(25): SEQ ID NO: 273; WAN0249UJ; Start 178; Stop 202
ccaaccattatcctgtagtaacaaa

SEQ ID NO: 259735 - DNA, 25 bp, Artificial
  probe
  misc_feature (1)..(25): SEQ ID NO: 273; WAN0249UJ; Start 173; Stop 197
acggaccaaccattatcctgtagta

SEQ ID NO: 259736 - DNA, 25 bp, Artificial
  probe
  misc_feature (1)..(25): SEQ ID NO: 273; WAN0249UJ; Start 172; Stop 196
tacggaccaaccattatcctgtagt

SEQ ID NO: 259737 - DNA, 25 bp, Artificial
  probe
  misc_feature (1)..(25): SEQ ID NO: 273; WAN0249UJ; Start 171; Stop 195
ctacggaccaaccattatcctgtag

SEQ ID NO: 259738 - DNA, 25 bp, Artificial
  probe
  misc_feature (1)..(25): SEQ ID NO: 273; WAN0249UJ; Start 158; Stop 182
agagtataagtctctacggaccaac

SEQ ID NO: 259739 - DNA, 25 bp, Artificial
  probe
  misc_feature (1)..(25): SEQ ID NO: 273; WAN0249UJ; Start 168; Stop 192
tctctacggaccaaccattatcctg

SEQ ID NO: 259740 - DNA, 25 bp, Artificial
  probe
  misc_feature (1)..(25): SEQ ID NO: 273; WAN0249UJ; Start 167; Stop 191
gtctctacggaccaaccattatcct

SEQ ID NO: 259741 - DNA, 25 bp, Artificial
  probe
  misc_feature (1)..(25): SEQ ID NO: 273; WAN0249UJ; Start 166; Stop 190
agtctctacggaccaaccattatcc

SEQ ID NO: 259742 - DNA, 25 bp, Artificial
  probe
  misc_feature (1)..(25): SEQ ID NO: 273; WAN0249UJ; Start 169; Stop 193
ctctacggaccaaccattatcctgt

SEQ ID NO: 259743 - DNA, 25 bp, Artificial
  probe
  misc_feature (1)..(25): SEQ ID NO: 273; WAN0249UJ; Start 213; Stop 237
agacagactgaactcaacttctttt

SEQ ID NO: 259744 - DNA, 25 bp, Artificial
  probe
  misc_feature (1)..(25): SEQ ID NO: 273; WAN0249UJ; Start 211; Stop 235
tgagacagactgaactcaacttctt

SEQ ID NO: 259745 - DNA, 25 bp, Artificial
  probe
  misc_feature (1)..(25): SEQ ID NO: 273; WAN0249UJ; Start 48; Stop 72
agtcgcttgatttatactcaatgaa

SEQ ID NO: 259746 - DNA, 25 bp, Artificial
  probe
  misc_feature (1)..(25): SEQ ID NO: 273; WAN0249UJ; Start 49; Stop 73
gtcgcttgatttatactcaatgaaa

SEQ ID NO: 259747 - DNA, 25 bp, Artificial
  probe
  misc_feature (1)..(25): SEQ ID NO: 273; WAN0249UJ; Start 179; Stop 203
caaccattatcctgtagtaacaaaa

SEQ ID NO: 259748 - DNA, 25 bp, Artificial
  probe
  misc_feature (1)..(25): SEQ ID NO: 273; WAN0249UJ; Start 5; Stop 29
tttcctccgattttctaattctatt

SEQ ID NO: 259749 - DNA, 25 bp, Artificial
  probe
  misc_feature (1)..(25): SEQ ID NO: 273; WAN0249UJ; Start 4; Stop 28
atttcctccgattttctaattctat

SEQ ID NO: 259750 - DNA, 25 bp, Artificial
  probe
  misc_feature (1)..(25): SEQ ID NO: 273; WAN0249UJ; Start 2; Stop 26
atatttcctccgattttctaattct

SEQ ID NO: 259751 - DNA, 25 bp, Artificial
  probe
  misc_feature (1)..(25): SEQ ID NO: 273; WAN0249UJ; Start 50; Stop 74
tcgcttgatttatactcaatgaaaa

SEQ ID NO: 259752 - DNA, 25 bp, Artificial
  probe
  misc_feature (1)..(25): SEQ ID NO: 273; WAN0249UJ; Start 3; Stop 27
tatttcctccgattttctaattcta

SEQ ID NO: 259753 - DNA, 25 bp, Artificial
  probe
  misc_feature (1)..(25): SEQ ID NO: 273; WAN0249UJ; Start 6; Stop 30
ttcctccgattttctaattctatta

SEQ ID NO: 259754 - DNA, 25 bp, Artificial
  probe
  misc_feature (1)..(25): SEQ ID NO: 274; WAN0249Q5; Start 37; Stop 61
ttgaacacctgattttatgcgtttt

SEQ ID NO: 259755 - DNA, 25 bp, Artificial
  probe
  misc_feature (1)..(25): SEQ ID NO: 274; WAN0249Q5; Start 36; Stop 60
tttgaacacctgattttatgcgttt

SEQ ID NO: 259756 - DNA, 25 bp, Artificial
  probe
  misc_feature (1)..(25): SEQ ID NO: 274; WAN0249Q5; Start 35; Stop 59
ttttgaacacctgattttatgcgtt

SEQ ID NO: 259757 - DNA, 25 bp, Artificial
  probe
  misc_feature (1)..(25): SEQ ID NO: 274; WAN0249Q5; Start 11; Stop 35
tgataaaacgcataaaatcaaggtt

SEQ ID NO: 259758 - DNA, 25 bp, Artificial
  probe
  misc_feature (1)..(25): SEQ ID NO: 274; WAN0249Q5; Start 10; Stop 34
atgataaaacgcataaaatcaaggt

SEQ ID NO: 259759 - DNA, 25 bp, Artificial
  probe
  misc_feature (1)..(25): SEQ ID NO: 274; WAN0249Q5; Start 12; Stop 36
gataaaacgcataaaatcaaggttt

SEQ ID NO: 259760 - DNA, 25 bp, Artificial
  probe
  misc_feature (1)..(25): SEQ ID NO: 274; WAN0249Q5; Start 13; Stop 37
ataaaacgcataaaatcaaggtttt

SEQ ID NO: 259761 - DNA, 25 bp, Artificial
  probe
  misc_feature (1)..(25): SEQ ID NO: 275; WAN024B63; Start 192; Stop 216
caatctcaagtacaagtttgggaat

SEQ ID NO: 259762 - DNA, 25 bp, Artificial
  probe
  misc_feature (1)..(25): SEQ ID NO: 275; WAN024B63; Start 193; Stop 217
aatctcaagtacaagtttgggaatc

SEQ ID NO: 259763 - DNA, 25 bp, Artificial
  probe
  misc_feature (1)..(25): SEQ ID NO: 275; WAN024B63; Start 34; Stop 58
catcgcttgtgtagttataaaggtg

SEQ ID NO: 259764 - DNA, 25 bp, Artificial
  probe
  misc_feature (1)..(25): SEQ ID NO: 275; WAN024B63; Start 33; Stop 57
tcatcgcttgtgtagttataaaggt

SEQ ID NO: 259765 - DNA, 25 bp, Artificial
  probe
  misc_feature (1)..(25): SEQ ID NO: 275; WAN024B63; Start 35; Stop 59
atcgcttgtgtagttataaaggtgt

SEQ ID NO: 259766 - DNA, 25 bp, Artificial
  probe
  misc_feature (1)..(25): SEQ ID NO: 275; WAN024B63; Start 37; Stop 61
cgcttgtgtagttataaaggtgttg

SEQ ID NO: 259767 - DNA, 25 bp, Artificial
  probe
  misc_feature (1)..(25): SEQ ID NO: 275; WAN024B63; Start 36; Stop 60
tcgcttgtgtagttataaaggtgtt

SEQ ID NO: 259768 - DNA, 25 bp, Artificial
  probe
  misc_feature (1)..(25): SEQ ID NO: 275; WAN024B63; Start 194; Stop 218
atctcaagtacaagtttgggaatcg

SEQ ID NO: 259769 - DNA, 25 bp, Artificial
  probe
  misc_feature (1)..(25): SEQ ID NO: 275; WAN024B63; Start 38; Stop 62
gcttgtgtagttataaaggtgttga

SEQ ID NO: 259770 - DNA, 25 bp, Artificial
  probe
  misc_feature (1)..(25): SEQ ID NO: 275; WAN024B63; Start 185; Stop 209
aacacgccaatctcaagtacaagtt

SEQ ID NO: 259771 - DNA, 25 bp, Artificial
  probe
  misc_feature (1)..(25): SEQ ID NO: 275; WAN024B63; Start 32; Stop 56
ttcatcgcttgtgtagttataaagg

SEQ ID NO: 259772 - DNA, 25 bp, Artificial
  probe
  misc_feature (1)..(25): SEQ ID NO: 275; WAN024B63; Start 3; Stop 27
tcaatatagaagtagtttaggcgaa

SEQ ID NO: 259773 - DNA, 25 bp, Artificial
  probe
  misc_feature (1)..(25): SEQ ID NO: 275; WAN024B63; Start 50; Stop 74
ataaaggtgttgaaatgatcgaggg

SEQ ID NO: 259774 - DNA, 25 bp, Artificial
  probe
  misc_feature (1)..(25): SEQ ID NO: 275; WAN024B63; Start 49; Stop 73
tataaaggtgttgaaatgatcgagg

SEQ ID NO: 259775 - DNA, 25 bp, Artificial
  probe
  misc_feature (1)..(25): SEQ ID NO: 275; WAN024B63; Start 2; Stop 26
atcaatatagaagtagtttaggcga

SEQ ID NO: 259776 - DNA, 25 bp, Artificial
  probe
  misc_feature (1)..(25): SEQ ID NO: 275; WAN024B63; Start 59; Stop 83
ttgaaatgatcgagggtcacttaat

SEQ ID NO: 259777 - DNA, 25 bp, Artificial
  probe
  misc_feature (1)..(25): SEQ ID NO: 275; WAN024B63; Start 60; Stop 84
tgaaatgatcgagggtcacttaatg

SEQ ID NO: 259778 - DNA, 25 bp, Artificial
  probe
  misc_feature (1)..(25): SEQ ID NO: 275; WAN024B63; Start 58; Stop 82
gttgaaatgatcgagggtcacttaa

SEQ ID NO: 259779 - DNA, 25 bp, Artificial
  probe
  misc_feature (1)..(25): SEQ ID NO: 275; WAN024B63; Start 46; Stop 70
agttataaaggtgttgaaatgatcg

SEQ ID NO: 259780 - DNA, 25 bp, Artificial
  probe
  misc_feature (1)..(25): SEQ ID NO: 275; WAN024B63; Start 202; Stop 226
tacaagtttgggaatcggcatttct

SEQ ID NO: 259781 - DNA, 25 bp, Artificial
  probe
  misc_feature (1)..(25): SEQ ID NO: 275; WAN024B63; Start 31; Stop 55
tttcatcgcttgtgtagttataaag

SEQ ID NO: 259782 - DNA, 25 bp, Artificial
  probe
  misc_feature (1)..(25): SEQ ID NO: 275; WAN024B63; Start 183; Stop 207
caaacacgccaatctcaagtacaag

SEQ ID NO: 259783 - DNA, 25 bp, Artificial
  probe
  misc_feature (1)..(25): SEQ ID NO: 275; WAN024B63; Start 4; Stop 28
caatatagaagtagtttaggcgaaa

SEQ ID NO: 259784 - DNA, 25 bp, Artificial
  probe
  misc_feature (1)..(25): SEQ ID NO: 275; WAN024B63; Start 51; Stop 75
taaaggtgttgaaatgatcgagggt

SEQ ID NO: 259785 - DNA, 25 bp, Artificial
  probe
  misc_feature (1)..(25): SEQ ID NO: 275; WAN024B63; Start 195; Stop 219
tctcaagtacaagtttgggaatcgg

SEQ ID NO: 259786 - DNA, 25 bp, Artificial
  probe
  misc_feature (1)..(25): SEQ ID NO: 275; WAN024B63; Start 47; Stop 71
gttataaaggtgttgaaatgatcga

SEQ ID NO: 259787 - DNA, 25 bp, Artificial
  probe
  misc_feature (1)..(25): SEQ ID NO: 275; WAN024B63; Start 201; Stop 225
gtacaagtttgggaatcggcatttc

SEQ ID NO: 259788 - DNA, 25 bp, Artificial
  probe
  misc_feature (1)..(25): SEQ ID NO: 275; WAN024B63; Start 57; Stop 81
tgttgaaatgatcgagggtcactta

SEQ ID NO: 259789 - DNA, 25 bp, Artificial
  probe
  misc_feature (1)..(25): SEQ ID NO: 275; WAN024B63; Start 187; Stop 211
cacgccaatctcaagtacaagtttg

SEQ ID NO: 259790 - DNA, 25 bp, Artificial
  probe
  misc_feature (1)..(25): SEQ ID NO: 275; WAN024B63; Start 1; Stop 25
aatcaatatagaagtagtttaggcg

SEQ ID NO: 259791 - DNA, 25 bp, Artificial
  probe
  misc_feature (1)..(25): SEQ ID NO: 275; WAN024B63; Start 61; Stop 85
gaaatgatcgagggtcacttaatgc

SEQ ID NO: 259792 - DNA, 25 bp, Artificial
  probe
  misc_feature (1)..(25): SEQ ID NO: 275; WAN024B63; Start 39; Stop 63
cttgtgtagttataaaggtgttgaa

SEQ ID NO: 259793 - DNA, 25 bp, Artificial
  probe
  misc_feature (1)..(25): SEQ ID NO: 275; WAN024B63; Start 200; Stop 224
agtacaagtttgggaatcggcattt

SEQ ID NO: 259794 - DNA, 25 bp, Artificial
  probe
  misc_feature (1)..(25): SEQ ID NO: 276; WAN0249DD; Start 12; Stop 36
ttgttgagtgttatgatgatggagt

SEQ ID NO: 259795 - DNA, 25 bp, Artificial
  probe
  misc_feature (1)..(25): SEQ ID NO: 276; WAN0249DD; Start 17; Stop 41
gagtgttatgatgatggagtcttgt

SEQ ID NO: 259796 - DNA, 25 bp, Artificial
  probe
  misc_feature (1)..(25): SEQ ID NO: 276; WAN0249DD; Start 16; Stop 40
tgagtgttatgatgatggagtcttg

SEQ ID NO: 259797 - DNA, 25 bp, Artificial
  probe
  misc_feature (1)..(25): SEQ ID NO: 276; WAN0249DD; Start 15; Stop 39
ttgagtgttatgatgatggagtctt

SEQ ID NO: 259798 - DNA, 25 bp, Artificial
  probe
  misc_feature (1)..(25): SEQ ID NO: 276; WAN0249DD; Start 14; Stop 38
gttgagtgttatgatgatggagtct

SEQ ID NO: 259799 - DNA, 25 bp, Artificial
  probe
  misc_feature (1)..(25): SEQ ID NO: 276; WAN0249DD; Start 18; Stop 42
agtgttatgatgatggagtcttgtg

SEQ ID NO: 259800 - DNA, 25 bp, Artificial
  probe
  misc_feature (1)..(25): SEQ ID NO: 276; WAN0249DD; Start 13; Stop 37
tgttgagtgttatgatgatggagtc

SEQ ID NO: 259801 - DNA, 25 bp, Artificial
  probe
  misc_feature (1)..(25): SEQ ID NO: 276; WAN0249DD; Start 20; Stop 44
tgttatgatgatggagtcttgtgct

SEQ ID NO: 259802 - DNA, 25 bp, Artificial
  probe
  misc_feature (1)..(25): SEQ ID NO: 276; WAN0249DD; Start 19; Stop 43
gtgttatgatgatggagtcttgtgc

SEQ ID NO: 259803 - DNA, 25 bp, Artificial
  probe
  misc_feature (1)..(25): SEQ ID NO: 276; WAN0249DD; Start 29; Stop 53
gatggagtcttgtgctcttagtcta

SEQ ID NO: 259804 - DNA, 25 bp, Artificial
  probe
  misc_feature (1)..(25): SEQ ID NO: 276; WAN0249DD; Start 24; Stop 48
atgatgatggagtcttgtgctctta

SEQ ID NO: 259805 - DNA, 25 bp, Artificial
  probe
  misc_feature (1)..(25): SEQ ID NO: 276; WAN0249DD; Start 23; Stop 47
tatgatgatggagtcttgtgctctt

SEQ ID NO: 259806 - DNA, 25 bp, Artificial
  probe
  misc_feature (1)..(25): SEQ ID NO: 276; WAN0249DD; Start 22; Stop 46
ttatgatgatggagtcttgtgctct

SEQ ID NO: 259807 - DNA, 25 bp, Artificial
  probe
  misc_feature (1)..(25): SEQ ID NO: 276; WAN0249DD; Start 21; Stop 45
gttatgatgatggagtcttgtgctc

SEQ ID NO: 259808 - DNA, 25 bp, Artificial
  probe
  misc_feature (1)..(25): SEQ ID NO: 276; WAN0249DD; Start 30; Stop 54
atggagtcttgtgctcttagtctag

SEQ ID NO: 259809 - DNA, 25 bp, Artificial
  probe
  misc_feature (1)..(25): SEQ ID NO: 276; WAN0249DD; Start 27; Stop 51
atgatggagtcttgtgctcttagtc

SEQ ID NO: 259810 - DNA, 25 bp, Artificial
  probe
  misc_feature (1)..(25): SEQ ID NO: 276; WAN0249DD; Start 26; Stop 50
gatgatggagtcttgtgctcttagt

SEQ ID NO: 259811 - DNA, 25 bp, Artificial
  probe
  misc_feature (1)..(25): SEQ ID NO: 276; WAN0249DD; Start 25; Stop 49
tgatgatggagtcttgtgctcttag

SEQ ID NO: 259812 - DNA, 25 bp, Artificial
  probe
  misc_feature (1)..(25): SEQ ID NO: 276; WAN0249DD; Start 11; Stop 35
tttgttgagtgttatgatgatggag

SEQ ID NO: 259813 - DNA, 25 bp, Artificial
  probe
  misc_feature (1)..(25): SEQ ID NO: 276; WAN0249DD; Start 95; Stop 119
tcatcataagttgggatagtagacg

SEQ ID NO: 259814 - DNA, 25 bp, Artificial
  probe
  misc_feature (1)..(25): SEQ ID NO: 276; WAN0249DD; Start 109; Stop 133
gatagtagacgcttgtttacgaaat

SEQ ID NO: 259815 - DNA, 25 bp, Artificial
  probe
  misc_feature (1)..(25): SEQ ID NO: 276; WAN0249DD; Start 114; Stop 138
tagacgcttgtttacgaaattgttt

SEQ ID NO: 259816 - DNA, 25 bp, Artificial
  probe
  misc_feature (1)..(25): SEQ ID NO: 276; WAN0249DD; Start 111; Stop 135
tagtagacgcttgtttacgaaattg

SEQ ID NO: 259817 - DNA, 25 bp, Artificial
  probe
  misc_feature (1)..(25): SEQ ID NO: 276; WAN0249DD; Start 108; Stop 132
ggatagtagacgcttgtttacgaaa

SEQ ID NO: 259818 - DNA, 25 bp, Artificial
  probe
  misc_feature (1)..(25): SEQ ID NO: 276; WAN0249DD; Start 97; Stop 121
atcataagttgggatagtagacgct

SEQ ID NO: 259819 - DNA, 25 bp, Artificial
  probe
  misc_feature (1)..(25): SEQ ID NO: 276; WAN0249DD; Start 96; Stop 120
catcataagttgggatagtagacgc

SEQ ID NO: 259820 - DNA, 25 bp, Artificial
  probe
  misc_feature (1)..(25): SEQ ID NO: 276; WAN0249DD; Start 113; Stop 137
gtagacgcttgtttacgaaattgtt

SEQ ID NO: 259821 - DNA, 25 bp, Artificial
  probe
  misc_feature (1)..(25): SEQ ID NO: 276; WAN0249DD; Start 99; Stop 123
cataagttgggatagtagacgcttg

SEQ ID NO: 259822 - DNA, 25 bp, Artificial
  probe
  misc_feature (1)..(25): SEQ ID NO: 276; WAN0249DD; Start 110; Stop 134
atagtagacgcttgtttacgaaatt

SEQ ID NO: 259823 - DNA, 25 bp, Artificial
  probe
  misc_feature (1)..(25): SEQ ID NO: 276; WAN0249DD; Start 98; Stop 122
tcataagttgggatagtagacgctt

SEQ ID NO: 259824 - DNA, 25 bp, Artificial
  probe
  misc_feature (1)..(25): SEQ ID NO: 276; WAN0249DD; Start 103; Stop 127
agttgggatagtagacgcttgttta

SEQ ID NO: 259825 - DNA, 25 bp, Artificial
  probe
  misc_feature (1)..(25): SEQ ID NO: 276; WAN0249DD; Start 88; Stop 112
ggaacactcatcataagttgggata

SEQ ID NO: 259826 - DNA, 25 bp, Artificial
  probe
  misc_feature (1)..(25): SEQ ID NO: 276; WAN0249DD; Start 104; Stop 128
gttgggatagtagacgcttgtttac

SEQ ID NO: 259827 - DNA, 25 bp, Artificial
  probe
  misc_feature (1)..(25): SEQ ID NO: 277; WAN024ACG; Start 213; Stop 237
aacagagtcgtcttagagtaacttc

SEQ ID NO: 259828 - DNA, 25 bp, Artificial
  probe
  misc_feature (1)..(25): SEQ ID NO: 277; WAN024ACG; Start 216; Stop 240
agagtcgtcttagagtaacttccag

SEQ ID NO: 259829 - DNA, 25 bp, Artificial
  probe
  misc_feature (1)..(25): SEQ ID NO: 277; WAN024ACG; Start 217; Stop 241
gagtcgtcttagagtaacttccagt

SEQ ID NO: 259830 - DNA, 25 bp, Artificial
  probe
  misc_feature (1)..(25): SEQ ID NO: 277; WAN024ACG; Start 215; Stop 239
cagagtcgtcttagagtaacttcca

SEQ ID NO: 259831 - DNA, 25 bp, Artificial
  probe
  misc_feature (1)..(25): SEQ ID NO: 277; WAN024ACG; Start 214; Stop 238
acagagtcgtcttagagtaacttcc

SEQ ID NO: 259832 - DNA, 25 bp, Artificial
  probe
  misc_feature (1)..(25): SEQ ID NO: 277; WAN024ACG; Start 114; Stop 138
aatccgtcttagactaacttccact

SEQ ID NO: 259833 - DNA, 25 bp, Artificial
  probe
  misc_feature (1)..(25): SEQ ID NO: 277; WAN024ACG; Start 115; Stop 139
atccgtcttagactaacttccactg

SEQ ID NO: 259834 - DNA, 25 bp, Artificial
  probe
  misc_feature (1)..(25): SEQ ID NO: 277; WAN024ACG; Start 212; Stop 236
aaacagagtcgtcttagagtaactt

SEQ ID NO: 259835 - DNA, 25 bp, Artificial
  probe
  misc_feature (1)..(25): SEQ ID NO: 277; WAN024ACG; Start 118; Stop 142
cgtcttagactaacttccactggtt

SEQ ID NO: 259836 - DNA, 25 bp, Artificial
  probe
  misc_feature (1)..(25): SEQ ID NO: 277; WAN024ACG; Start 218; Stop 242
agtcgtcttagagtaacttccagtt

SEQ ID NO: 259837 - DNA, 25 bp, Artificial
  probe
  misc_feature (1)..(25): SEQ ID NO: 277; WAN024ACG; Start 119; Stop 143
gtcttagactaacttccactggttt

SEQ ID NO: 259838 - DNA, 25 bp, Artificial
  probe
  misc_feature (1)..(25): SEQ ID NO: 277; WAN024ACG; Start 112; Stop 136
gaaatccgtcttagactaacttcca

SEQ ID NO: 259839 - DNA, 25 bp, Artificial
  probe
  misc_feature (1)..(25): SEQ ID NO: 277; WAN024ACG; Start 110; Stop 134
tggaaatccgtcttagactaacttc

SEQ ID NO: 259840 - DNA, 25 bp, Artificial
  probe
  misc_feature (1)..(25): SEQ ID NO: 277; WAN024ACG; Start 113; Stop 137
aaatccgtcttagactaacttccac

SEQ ID NO: 259841 - DNA, 25 bp, Artificial
  probe
  misc_feature (1)..(25): SEQ ID NO: 277; WAN024ACG; Start 109; Stop 133
gtggaaatccgtcttagactaactt

SEQ ID NO: 259842 - DNA, 25 bp, Artificial
  probe
  misc_feature (1)..(25): SEQ ID NO: 277; WAN024ACG; Start 105; Stop 129
atcagtggaaatccgtcttagacta

SEQ ID NO: 259843 - DNA, 25 bp, Artificial
  probe
  misc_feature (1)..(25): SEQ ID NO: 277; WAN024ACG; Start 108; Stop 132
agtggaaatccgtcttagactaact

SEQ ID NO: 259844 - DNA, 25 bp, Artificial
  probe
  misc_feature (1)..(25): SEQ ID NO: 277; WAN024ACG; Start 107; Stop 131
cagtggaaatccgtcttagactaac

SEQ ID NO: 259845 - DNA, 25 bp, Artificial
  probe
  misc_feature (1)..(25): SEQ ID NO: 277; WAN024ACG; Start 106; Stop 130
tcagtggaaatccgtcttagactaa

SEQ ID NO: 259846 - DNA, 25 bp, Artificial
  probe
  misc_feature (1)..(25): SEQ ID NO: 277; WAN024ACG; Start 102; Stop 126
gacatcagtggaaatccgtcttaga

SEQ ID NO: 259847 - DNA, 25 bp, Artificial
  probe
  misc_feature (1)..(25): SEQ ID NO: 277; WAN024ACG; Start 116; Stop 140
tccgtcttagactaacttccactgg

SEQ ID NO: 259848 - DNA, 25 bp, Artificial
  probe
  misc_feature (1)..(25): SEQ ID NO: 277; WAN024ACG; Start 101; Stop 125
tgacatcagtggaaatccgtcttag

SEQ ID NO: 259849 - DNA, 25 bp, Artificial
  probe
  misc_feature (1)..(25): SEQ ID NO: 277; WAN024ACG; Start 117; Stop 141
ccgtcttagactaacttccactggt

SEQ ID NO: 259850 - DNA, 25 bp, Artificial
  probe
  misc_feature (1)..(25): SEQ ID NO: 277; WAN024ACG; Start 100; Stop 124
gtgacatcagtggaaatccgtctta

SEQ ID NO: 259851 - DNA, 25 bp, Artificial
  probe
  misc_feature (1)..(25): SEQ ID NO: 277; WAN024ACG; Start 104; Stop 128
catcagtggaaatccgtcttagact

SEQ ID NO: 259852 - DNA, 25 bp, Artificial
  probe
  misc_feature (1)..(25): SEQ ID NO: 277; WAN024ACG; Start 166; Stop 190
ttcaaaagcgaaaagactcagaaaa

SEQ ID NO: 259853 - DNA, 25 bp, Artificial
  probe
  misc_feature (1)..(25): SEQ ID NO: 277; WAN024ACG; Start 158; Stop 182
tataagggttcaaaagcgaaaagac

SEQ ID NO: 259854 - DNA, 25 bp, Artificial
  probe
  misc_feature (1)..(25): SEQ ID NO: 277; WAN024ACG; Start 165; Stop 189
gttcaaaagcgaaaagactcagaaa

SEQ ID NO: 259855 - DNA, 25 bp, Artificial
  probe
  misc_feature (1)..(25): SEQ ID NO: 277; WAN024ACG; Start 103; Stop 127
acatcagtggaaatccgtcttagac

SEQ ID NO: 259856 - DNA, 25 bp, Artificial
  probe
  misc_feature (1)..(25): SEQ ID NO: 277; WAN024ACG; Start 219; Stop 243
gtcgtcttagagtaacttccagttt

SEQ ID NO: 259857 - DNA, 25 bp, Artificial
  probe
  misc_feature (1)..(25): SEQ ID NO: 277; WAN024ACG; Start 157; Stop 181
atataagggttcaaaagcgaaaaga

SEQ ID NO: 259858 - DNA, 25 bp, Artificial
  probe
  misc_feature (1)..(25): SEQ ID NO: 277; WAN024ACG; Start 159; Stop 183
ataagggttcaaaagcgaaaagact

SEQ ID NO: 259859 - DNA, 25 bp, Artificial
  probe
  misc_feature (1)..(25): SEQ ID NO: 277; WAN024ACG; Start 203; Stop 227
atagccctaaaacagagtcgtctta

SEQ ID NO: 259860 - DNA, 25 bp, Artificial
  probe
  misc_feature (1)..(25): SEQ ID NO: 278; WAN0249Q6; Start 137; Stop 161
gactacttcaagactaactgtccaa

SEQ ID NO: 259861 - DNA, 25 bp, Artificial
  probe
  misc_feature (1)..(25): SEQ ID NO: 278; WAN0249Q6; Start 136; Stop 160
agactacttcaagactaactgtcca

SEQ ID NO: 259862 - DNA, 25 bp, Artificial
  probe
  misc_feature (1)..(25): SEQ ID NO: 278; WAN0249Q6; Start 138; Stop 162
actacttcaagactaactgtccaat

SEQ ID NO: 259863 - DNA, 25 bp, Artificial
  probe
  misc_feature (1)..(25): SEQ ID NO: 278; WAN0249Q6; Start 85; Stop 109
actaacctcctcattattagcaagg

SEQ ID NO: 259864 - DNA, 25 bp, Artificial
  probe
  misc_feature (1)..(25): SEQ ID NO: 278; WAN0249Q6; Start 135; Stop 159
tagactacttcaagactaactgtcc

SEQ ID NO: 259865 - DNA, 25 bp, Artificial
  probe
  misc_feature (1)..(25): SEQ ID NO: 278; WAN0249Q6; Start 86; Stop 110
ctaacctcctcattattagcaaggc

SEQ ID NO: 259866 - DNA, 25 bp, Artificial
  probe
  misc_feature (1)..(25): SEQ ID NO: 278; WAN0249Q6; Start 84; Stop 108
aactaacctcctcattattagcaag

SEQ ID NO: 259867 - DNA, 25 bp, Artificial
  probe
  misc_feature (1)..(25): SEQ ID NO: 278; WAN0249Q6; Start 104; Stop 128
gcaaggcttctactgattataacct

SEQ ID NO: 259868 - DNA, 25 bp, Artificial
  probe
  misc_feature (1)..(25): SEQ ID NO: 278; WAN0249Q6; Start 141; Stop 165
acttcaagactaactgtccaataat

SEQ ID NO: 259869 - DNA, 25 bp, Artificial
  probe
  misc_feature (1)..(25): SEQ ID NO: 278; WAN0249Q6; Start 139; Stop 163
ctacttcaagactaactgtccaata

SEQ ID NO: 259870 - DNA, 25 bp, Artificial
  probe
  misc_feature (1)..(25): SEQ ID NO: 278; WAN0249Q6; Start 93; Stop 117
cctcattattagcaaggcttctact

SEQ ID NO: 259871 - DNA, 25 bp, Artificial
  probe
  misc_feature (1)..(25): SEQ ID NO: 278; WAN0249Q6; Start 92; Stop 116
tcctcattattagcaaggcttctac

SEQ ID NO: 259872 - DNA, 25 bp, Artificial
  probe
  misc_feature (1)..(25): SEQ ID NO: 278; WAN0249Q6; Start 91; Stop 115
ctcctcattattagcaaggcttcta

SEQ ID NO: 259873 - DNA, 25 bp, Artificial
  probe
  misc_feature (1)..(25): SEQ ID NO: 278; WAN0249Q6; Start 95; Stop 119
tcattattagcaaggcttctactga

SEQ ID NO: 259874 - DNA, 25 bp, Artificial
  probe
  misc_feature (1)..(25): SEQ ID NO: 278; WAN0249Q6; Start 134; Stop 158
ttagactacttcaagactaactgtc

SEQ ID NO: 259875 - DNA, 25 bp, Artificial
  probe
  misc_feature (1)..(25): SEQ ID NO: 278; WAN0249Q6; Start 133; Stop 157
cttagactacttcaagactaactgt

SEQ ID NO: 259876 - DNA, 25 bp, Artificial
  probe
  misc_feature (1)..(25): SEQ ID NO: 278; WAN0249Q6; Start 94; Stop 118
ctcattattagcaaggcttctactg

SEQ ID NO: 259877 - DNA, 25 bp, Artificial
  probe
  misc_feature (1)..(25): SEQ ID NO: 278; WAN0249Q6; Start 140; Stop 164
tacttcaagactaactgtccaataa

SEQ ID NO: 259878 - DNA, 25 bp, Artificial
  probe
  misc_feature (1)..(25): SEQ ID NO: 278; WAN0249Q6; Start 87; Stop 111
taacctcctcattattagcaaggct

SEQ ID NO: 259879 - DNA, 25 bp, Artificial
  probe
  misc_feature (1)..(25): SEQ ID NO: 278; WAN0249Q6; Start 96; Stop 120
cattattagcaaggcttctactgat

SEQ ID NO: 259880 - DNA, 25 bp, Artificial
  probe
  misc_feature (1)..(25): SEQ ID NO: 278; WAN0249Q6; Start 103; Stop 127
agcaaggcttctactgattataacc

SEQ ID NO: 259881 - DNA, 25 bp, Artificial
  probe
  misc_feature (1)..(25): SEQ ID NO: 278; WAN0249Q6; Start 97; Stop 121
attattagcaaggcttctactgatt

SEQ ID NO: 259882 - DNA, 25 bp, Artificial
  probe
  misc_feature (1)..(25): SEQ ID NO: 278; WAN0249Q6; Start 88; Stop 112
aacctcctcattattagcaaggctt

SEQ ID NO: 259883 - DNA, 25 bp, Artificial
  probe
  misc_feature (1)..(25): SEQ ID NO: 278; WAN0249Q6; Start 105; Stop 129
caaggcttctactgattataaccta

SEQ ID NO: 259884 - DNA, 25 bp, Artificial
  probe
  misc_feature (1)..(25): SEQ ID NO: 278; WAN0249Q6; Start 90; Stop 114
cctcctcattattagcaaggcttct

SEQ ID NO: 259885 - DNA, 25 bp, Artificial
  probe
  misc_feature (1)..(25): SEQ ID NO: 278; WAN0249Q6; Start 102; Stop 126
tagcaaggcttctactgattataac

SEQ ID NO: 259886 - DNA, 25 bp, Artificial
  probe
  misc_feature (1)..(25): SEQ ID NO: 278; WAN0249Q6; Start 89; Stop 113
acctcctcattattagcaaggcttc

SEQ ID NO: 259887 - DNA, 25 bp, Artificial
  probe
  misc_feature (1)..(25): SEQ ID NO: 278; WAN0249Q6; Start 98; Stop 122
ttattagcaaggcttctactgatta

SEQ ID NO: 259888 - DNA, 25 bp, Artificial
  probe
  misc_feature (1)..(25): SEQ ID NO: 278; WAN0249Q6; Start 83; Stop 107
aaactaacctcctcattattagcaa

SEQ ID NO: 259889 - DNA, 25 bp, Artificial
  probe
  misc_feature (1)..(25): SEQ ID NO: 278; WAN0249Q6; Start 132; Stop 156
tcttagactacttcaagactaactg

SEQ ID NO: 259890 - DNA, 25 bp, Artificial
  probe
  misc_feature (1)..(25): SEQ ID NO: 278; WAN0249Q6; Start 100; Stop 124
attagcaaggcttctactgattata

SEQ ID NO: 259891 - DNA, 25 bp, Artificial
  probe
  misc_feature (1)..(25): SEQ ID NO: 278; WAN0249Q6; Start 99; Stop 123
tattagcaaggcttctactgattat

SEQ ID NO: 259892 - DNA, 25 bp, Artificial
  probe
  misc_feature (1)..(25): SEQ ID NO: 278; WAN0249Q6; Start 106; Stop 130
aaggcttctactgattataacctaa

SEQ ID NO: 259893 - DNA, 25 bp, Artificial
  probe
  misc_feature (1)..(25): SEQ ID NO: 279; WAN0249PY; Start 140; Stop 164
aaaacctactgaccaagctagaaag

SEQ ID NO: 259894 - DNA, 25 bp, Artificial
  probe
  misc_feature (1)..(25): SEQ ID NO: 279; WAN0249PY; Start 81; Stop 105
acaatattttcggaacattcaactt

SEQ ID NO: 259895 - DNA, 25 bp, Artificial
  probe
  misc_feature (1)..(25): SEQ ID NO: 279; WAN0249PY; Start 141; Stop 165
aaacctactgaccaagctagaaagc

SEQ ID NO: 259896 - DNA, 25 bp, Artificial
  probe
  misc_feature (1)..(25): SEQ ID NO: 279; WAN0249PY; Start 80; Stop 104
tacaatattttcggaacattcaact

SEQ ID NO: 259897 - DNA, 25 bp, Artificial
  probe
  misc_feature (1)..(25): SEQ ID NO: 279; WAN0249PY; Start 82; Stop 106
caatattttcggaacattcaacttt

SEQ ID NO: 259898 - DNA, 25 bp, Artificial
  probe
  misc_feature (1)..(25): SEQ ID NO: 279; WAN0249PY; Start 156; Stop 180
gctagaaagcttgatacaataggct

SEQ ID NO: 259899 - DNA, 25 bp, Artificial
  probe
  misc_feature (1)..(25): SEQ ID NO: 279; WAN0249PY; Start 83; Stop 107
aatattttcggaacattcaactttt

SEQ ID NO: 259900 - DNA, 25 bp, Artificial
  probe
  misc_feature (1)..(25): SEQ ID NO: 279; WAN0249PY; Start 79; Stop 103
atacaatattttcggaacattcaac

SEQ ID NO: 259901 - DNA, 25 bp, Artificial
  probe
  misc_feature (1)..(25): SEQ ID NO: 279; WAN0249PY; Start 78; Stop 102
tatacaatattttcggaacattcaa

SEQ ID NO: 259902 - DNA, 25 bp, Artificial
  probe
  misc_feature (1)..(25): SEQ ID NO: 279; WAN0249PY; Start 142; Stop 166
aacctactgaccaagctagaaagct

SEQ ID NO: 259903 - DNA, 25 bp, Artificial
  probe
  misc_feature (1)..(25): SEQ ID NO: 279; WAN0249PY; Start 157; Stop 181
ctagaaagcttgatacaataggctt

SEQ ID NO: 259904 - DNA, 25 bp, Artificial
  probe
  misc_feature (1)..(25): SEQ ID NO: 279; WAN0249PY; Start 155; Stop 179
agctagaaagcttgatacaataggc

SEQ ID NO: 259905 - DNA, 25 bp, Artificial
  probe
  misc_feature (1)..(25): SEQ ID NO: 280; WAN0249S9; Start 133; Stop 157
ttcccgactttatccgttgaaatat

SEQ ID NO: 259906 - DNA, 25 bp, Artificial
  probe
  misc_feature (1)..(25): SEQ ID NO: 280; WAN0249S9; Start 132; Stop 156
attcccgactttatccgttgaaata

SEQ ID NO: 259907 - DNA, 25 bp, Artificial
  probe
  misc_feature (1)..(25): SEQ ID NO: 280; WAN0249S9; Start 131; Stop 155
tattcccgactttatccgttgaaat

SEQ ID NO: 259908 - DNA, 25 bp, Artificial
  probe
  misc_feature (1)..(25): SEQ ID NO: 280; WAN0249S9; Start 130; Stop 154
ttattcccgactttatccgttgaaa

SEQ ID NO: 259909 - DNA, 25 bp, Artificial
  probe
  misc_feature (1)..(25): SEQ ID NO: 280; WAN0249S9; Start 129; Stop 153
gttattcccgactttatccgttgaa

SEQ ID NO: 259910 - DNA, 25 bp, Artificial
  probe
  misc_feature (1)..(25): SEQ ID NO: 280; WAN0249S9; Start 124; Stop 148
attgagttattcccgactttatccg

SEQ ID NO: 259911 - DNA, 25 bp, Artificial
  probe
  misc_feature (1)..(25): SEQ ID NO: 280; WAN0249S9; Start 18; Stop 42
gtttgtgtaagaagtctttgtgctt

SEQ ID NO: 259912 - DNA, 25 bp, Artificial
  probe
  misc_feature (1)..(25): SEQ ID NO: 280; WAN0249S9; Start 16; Stop 40
aagtttgtgtaagaagtctttgtgc

SEQ ID NO: 259913 - DNA, 25 bp, Artificial
  probe
  misc_feature (1)..(25): SEQ ID NO: 280; WAN0249S9; Start 123; Stop 147
aattgagttattcccgactttatcc

SEQ ID NO: 259914 - DNA, 25 bp, Artificial
  probe
  misc_feature (1)..(25): SEQ ID NO: 280; WAN0249S9; Start 17; Stop 41
agtttgtgtaagaagtctttgtgct

SEQ ID NO: 259915 - DNA, 25 bp, Artificial
  probe
  misc_feature (1)..(25): SEQ ID NO: 280; WAN0249S9; Start 127; Stop 151
gagttattcccgactttatccgttg

SEQ ID NO: 259916 - DNA, 25 bp, Artificial
  probe
  misc_feature (1)..(25): SEQ ID NO: 280; WAN0249S9; Start 134; Stop 158
tcccgactttatccgttgaaatatt

SEQ ID NO: 259917 - DNA, 25 bp, Artificial
  probe
  misc_feature (1)..(25): SEQ ID NO: 280; WAN0249S9; Start 128; Stop 152
agttattcccgactttatccgttga

SEQ ID NO: 259918 - DNA, 25 bp, Artificial
  probe
  misc_feature (1)..(25): SEQ ID NO: 280; WAN0249S9; Start 126; Stop 150
tgagttattcccgactttatccgtt

SEQ ID NO: 259919 - DNA, 25 bp, Artificial
  probe
  misc_feature (1)..(25): SEQ ID NO: 280; WAN0249S9; Start 125; Stop 149
ttgagttattcccgactttatccgt

SEQ ID NO: 259920 - DNA, 25 bp, Artificial
  probe
  misc_feature (1)..(25): SEQ ID NO: 280; WAN0249S9; Start 135; Stop 159
cccgactttatccgttgaaatatta

SEQ ID NO: 259921 - DNA, 25 bp, Artificial
  probe
  misc_feature (1)..(25): SEQ ID NO: 280; WAN0249S9; Start 21; Stop 45
tgtgtaagaagtctttgtgcttaaa

SEQ ID NO: 259922 - DNA, 25 bp, Artificial
  probe
  misc_feature (1)..(25): SEQ ID NO: 280; WAN0249S9; Start 20; Stop 44
ttgtgtaagaagtctttgtgcttaa

SEQ ID NO: 259923 - DNA, 25 bp, Artificial
  probe
  misc_feature (1)..(25): SEQ ID NO: 280; WAN0249S9; Start 19; Stop 43
tttgtgtaagaagtctttgtgctta

SEQ ID NO: 259924 - DNA, 25 bp, Artificial
  probe
  misc_feature (1)..(25): SEQ ID NO: 280; WAN0249S9; Start 120; Stop 144
tcaaattgagttattcccgacttta

SEQ ID NO: 259925 - DNA, 25 bp, Artificial
  probe
  misc_feature (1)..(25): SEQ ID NO: 280; WAN0249S9; Start 121; Stop 145
caaattgagttattcccgactttat

SEQ ID NO: 259926 - DNA, 25 bp, Artificial
  probe
  misc_feature (1)..(25): SEQ ID NO: 280; WAN0249S9; Start 15; Stop 39
taagtttgtgtaagaagtctttgtg

SEQ ID NO: 259927 - DNA, 25 bp, Artificial
  probe
  misc_feature (1)..(25): SEQ ID NO: 280; WAN0249S9; Start 122; Stop 146
aaattgagttattcccgactttatc

SEQ ID NO: 259928 - DNA, 25 bp, Artificial
  probe
  misc_feature (1)..(25): SEQ ID NO: 280; WAN0249S9; Start 136; Stop 160
ccgactttatccgttgaaatattat

SEQ ID NO: 259929 - DNA, 25 bp, Artificial
  probe
  misc_feature (1)..(25): SEQ ID NO: 280; WAN0249S9; Start 9; Stop 33
tgtagataagtttgtgtaagaagtc

SEQ ID NO: 259930 - DNA, 25 bp, Artificial
  probe
  misc_feature (1)..(25): SEQ ID NO: 280; WAN0249S9; Start 78; Stop 102
tgttatgcgttttgttataggaaga

SEQ ID NO: 259931 - DNA, 25 bp, Artificial
  probe
  misc_feature (1)..(25): SEQ ID NO: 280; WAN0249S9; Start 75; Stop 99
agatgttatgcgttttgttatagga

SEQ ID NO: 259932 - DNA, 25 bp, Artificial
  probe
  misc_feature (1)..(25): SEQ ID NO: 280; WAN0249S9; Start 14; Stop 38
ataagtttgtgtaagaagtctttgt

SEQ ID NO: 259933 - DNA, 25 bp, Artificial
  probe
  misc_feature (1)..(25): SEQ ID NO: 280; WAN0249S9; Start 69; Stop 93
aatcctagatgttatgcgttttgtt

SEQ ID NO: 259934 - DNA, 25 bp, Artificial
  probe
  misc_feature (1)..(25): SEQ ID NO: 280; WAN0249S9; Start 68; Stop 92
aaatcctagatgttatgcgttttgt

SEQ ID NO: 259935 - DNA, 25 bp, Artificial
  probe
  misc_feature (1)..(25): SEQ ID NO: 280; WAN0249S9; Start 71; Stop 95
tcctagatgttatgcgttttgttat

SEQ ID NO: 259936 - DNA, 25 bp, Artificial
  probe
  misc_feature (1)..(25): SEQ ID NO: 280; WAN0249S9; Start 70; Stop 94
atcctagatgttatgcgttttgtta

SEQ ID NO: 259937 - DNA, 25 bp, Artificial
  probe
  misc_feature (1)..(25): SEQ ID NO: 280; WAN0249S9; Start 77; Stop 101
atgttatgcgttttgttataggaag

SEQ ID NO: 259938 - DNA, 25 bp, Artificial
  probe
  misc_feature (1)..(25): SEQ ID NO: 281; WAN024AN2; Start 45; Stop 69
tatgagtaatagttgagaggaagcg

SEQ ID NO: 259939 - DNA, 25 bp, Artificial
  probe
  misc_feature (1)..(25): SEQ ID NO: 281; WAN024AN2; Start 46; Stop 70
atgagtaatagttgagaggaagcgt

SEQ ID NO: 259940 - DNA, 25 bp, Artificial
  probe
  misc_feature (1)..(25): SEQ ID NO: 281; WAN024AN2; Start 47; Stop 71
tgagtaatagttgagaggaagcgtt

SEQ ID NO: 259941 - DNA, 25 bp, Artificial
  probe
  misc_feature (1)..(25): SEQ ID NO: 281; WAN024AN2; Start 44; Stop 68
ttatgagtaatagttgagaggaagc

SEQ ID NO: 259942 - DNA, 25 bp, Artificial
  probe
  misc_feature (1)..(25): SEQ ID NO: 281; WAN024AN2; Start 48; Stop 72
gagtaatagttgagaggaagcgttt

SEQ ID NO: 259943 - DNA, 25 bp, Artificial
  probe
  misc_feature (1)..(25): SEQ ID NO: 281; WAN024AN2; Start 49; Stop 73
agtaatagttgagaggaagcgtttt

SEQ ID NO: 259944 - DNA, 25 bp, Artificial
  probe
  misc_feature (1)..(25): SEQ ID NO: 281; WAN024AN2; Start 43; Stop 67
tttatgagtaatagttgagaggaag

SEQ ID NO: 259945 - DNA, 25 bp, Artificial
  probe
  misc_feature (1)..(25): SEQ ID NO: 281; WAN024AN2; Start 76; Stop 100
ttttaagcaaaagaaaagaggaact

SEQ ID NO: 259946 - DNA, 25 bp, Artificial
  probe
  misc_feature (1)..(25): SEQ ID NO: 281; WAN024AN2; Start 16; Stop 40
tttccattttatcataaatcggtga

SEQ ID NO: 259947 - DNA, 25 bp, Artificial
  probe
  misc_feature (1)..(25): SEQ ID NO: 281; WAN024AN2; Start 75; Stop 99
attttaagcaaaagaaaagaggaac

SEQ ID NO: 259948 - DNA, 25 bp, Artificial
  probe
  misc_feature (1)..(25): SEQ ID NO: 281; WAN024AN2; Start 15; Stop 39
atttccattttatcataaatcggtg

SEQ ID NO: 259949 - DNA, 25 bp, Artificial
  probe
  misc_feature (1)..(25): SEQ ID NO: 281; WAN024AN2; Start 18; Stop 42
tccattttatcataaatcggtgatt

SEQ ID NO: 259950 - DNA, 25 bp, Artificial
  probe
  misc_feature (1)..(25): SEQ ID NO: 281; WAN024AN2; Start 17; Stop 41
ttccattttatcataaatcggtgat

SEQ ID NO: 259951 - DNA, 25 bp, Artificial
  probe
  misc_feature (1)..(25): SEQ ID NO: 281; WAN024AN2; Start 42; Stop 66
ttttatgagtaatagttgagaggaa

SEQ ID NO: 259952 - DNA, 25 bp, Artificial
  probe
  misc_feature (1)..(25): SEQ ID NO: 281; WAN024AN2; Start 1; Stop 25
aatctcaactttctatttccatttt

SEQ ID NO: 259953 - DNA, 25 bp, Artificial
  probe
  misc_feature (1)..(25): SEQ ID NO: 281; WAN024AN2; Start 74; Stop 98
tattttaagcaaaagaaaagaggaa

SEQ ID NO: 259954 - DNA, 25 bp, Artificial
  probe
  misc_feature (1)..(25): SEQ ID NO: 281; WAN024AN2; Start 73; Stop 97
ttattttaagcaaaagaaaagagga

SEQ ID NO: 259955 - DNA, 25 bp, Artificial
  probe
  misc_feature (1)..(25): SEQ ID NO: 281; WAN024AN2; Start 72; Stop 96
tttattttaagcaaaagaaaagagg

SEQ ID NO: 259956 - DNA, 25 bp, Artificial
  probe
  misc_feature (1)..(25): SEQ ID NO: 281; WAN024AN2; Start 19; Stop 43
ccattttatcataaatcggtgattt

SEQ ID NO: 259957 - DNA, 25 bp, Artificial
  probe
  misc_feature (1)..(25): SEQ ID NO: 282; WAN0249HG; Start 37; Stop 61
atcgtactcttctcttttaaggatt

SEQ ID NO: 259958 - DNA, 25 bp, Artificial
  probe
  misc_feature (1)..(25): SEQ ID NO: 282; WAN0249HG; Start 36; Stop 60
aatcgtactcttctcttttaaggat

SEQ ID NO: 259959 - DNA, 25 bp, Artificial
  probe
  misc_feature (1)..(25): SEQ ID NO: 282; WAN0249HG; Start 38; Stop 62
tcgtactcttctcttttaaggatta

SEQ ID NO: 259960 - DNA, 25 bp, Artificial
  probe
  misc_feature (1)..(25): SEQ ID NO: 282; WAN0249HG; Start 35; Stop 59
taatcgtactcttctcttttaagga

SEQ ID NO: 259961 - DNA, 25 bp, Artificial
  probe
  misc_feature (1)..(25): SEQ ID NO: 282; WAN0249HG; Start 39; Stop 63
cgtactcttctcttttaaggattag

SEQ ID NO: 259962 - DNA, 25 bp, Artificial
  probe
  misc_feature (1)..(25): SEQ ID NO: 282; WAN0249HG; Start 42; Stop 66
actcttctcttttaaggattagttg

SEQ ID NO: 259963 - DNA, 25 bp, Artificial
  probe
  misc_feature (1)..(25): SEQ ID NO: 282; WAN0249HG; Start 43; Stop 67
ctcttctcttttaaggattagttga

SEQ ID NO: 259964 - DNA, 25 bp, Artificial
  probe
  misc_feature (1)..(25): SEQ ID NO: 282; WAN0249HG; Start 34; Stop 58
ttaatcgtactcttctcttttaagg

SEQ ID NO: 259965 - DNA, 25 bp, Artificial
  probe
  misc_feature (1)..(25): SEQ ID NO: 282; WAN0249HG; Start 44; Stop 68
tcttctcttttaaggattagttgaa

SEQ ID NO: 259966 - DNA, 25 bp, Artificial
  probe
  misc_feature (1)..(25): SEQ ID NO: 282; WAN0249HG; Start 32; Stop 56
acttaatcgtactcttctcttttaa

SEQ ID NO: 259967 - DNA, 25 bp, Artificial
  probe
  misc_feature (1)..(25): SEQ ID NO: 282; WAN0249HG; Start 40; Stop 64
gtactcttctcttttaaggattagt

SEQ ID NO: 259968 - DNA, 25 bp, Artificial
  probe
  misc_feature (1)..(25): SEQ ID NO: 282; WAN0249HG; Start 41; Stop 65
tactcttctcttttaaggattagtt

SEQ ID NO: 259969 - DNA, 25 bp, Artificial
  probe
  misc_feature (1)..(25): SEQ ID NO: 282; WAN0249HG; Start 33; Stop 57
cttaatcgtactcttctcttttaag

SEQ ID NO: 259970 - DNA, 25 bp, Artificial
  probe
  misc_feature (1)..(25): SEQ ID NO: 283; WAN024AQV; Start 82; Stop 106
tgaaatgagaaattatgggagcaag

SEQ ID NO: 259971 - DNA, 25 bp, Artificial
  probe
  misc_feature (1)..(25): SEQ ID NO: 283; WAN024AQV; Start 83; Stop 107
gaaatgagaaattatgggagcaagc

SEQ ID NO: 259972 - DNA, 25 bp, Artificial
  probe
  misc_feature (1)..(25): SEQ ID NO: 283; WAN024AQV; Start 76; Stop 100
tgcctatgaaatgagaaattatggg

SEQ ID NO: 259973 - DNA, 25 bp, Artificial
  probe
  misc_feature (1)..(25): SEQ ID NO: 283; WAN024AQV; Start 81; Stop 105
atgaaatgagaaattatgggagcaa

SEQ ID NO: 259974 - DNA, 25 bp, Artificial
  probe
  misc_feature (1)..(25): SEQ ID NO: 283; WAN024AQV; Start 77; Stop 101
gcctatgaaatgagaaattatggga

SEQ ID NO: 259975 - DNA, 25 bp, Artificial
  probe
  misc_feature (1)..(25): SEQ ID NO: 283; WAN024AQV; Start 64; Stop 88
ggtgggattatttgcctatgaaatg

SEQ ID NO: 259976 - DNA, 25 bp, Artificial
  probe
  misc_feature (1)..(25): SEQ ID NO: 283; WAN024AQV; Start 80; Stop 104
tatgaaatgagaaattatgggagca

SEQ ID NO: 259977 - DNA, 25 bp, Artificial
  probe
  misc_feature (1)..(25): SEQ ID NO: 283; WAN024AQV; Start 65; Stop 89
gtgggattatttgcctatgaaatga

SEQ ID NO: 259978 - DNA, 25 bp, Artificial
  probe
  misc_feature (1)..(25): SEQ ID NO: 283; WAN024AQV; Start 66; Stop 90
tgggattatttgcctatgaaatgag

SEQ ID NO: 259979 - DNA, 25 bp, Artificial
  probe
  misc_feature (1)..(25): SEQ ID NO: 283; WAN024AQV; Start 67; Stop 91
gggattatttgcctatgaaatgaga

SEQ ID NO: 259980 - DNA, 25 bp, Artificial
  probe
  misc_feature (1)..(25): SEQ ID NO: 283; WAN024AQV; Start 63; Stop 87
aggtgggattatttgcctatgaaat

SEQ ID NO: 259981 - DNA, 25 bp, Artificial
  probe
  misc_feature (1)..(25): SEQ ID NO: 283; WAN024AQV; Start 79; Stop 103
ctatgaaatgagaaattatgggagc

SEQ ID NO: 259982 - DNA, 25 bp, Artificial
  probe
  misc_feature (1)..(25): SEQ ID NO: 283; WAN024AQV; Start 75; Stop 99
ttgcctatgaaatgagaaattatgg

SEQ ID NO: 259983 - DNA, 25 bp, Artificial
  probe
  misc_feature (1)..(25): SEQ ID NO: 283; WAN024AQV; Start 52; Stop 76
tagaacaagctaggtgggattattt

SEQ ID NO: 259984 - DNA, 25 bp, Artificial
  probe
  misc_feature (1)..(25): SEQ ID NO: 283; WAN024AQV; Start 39; Stop 63
aaataatcccacctagaacaagcta

SEQ ID NO: 259985 - DNA, 25 bp, Artificial
  probe
  misc_feature (1)..(25): SEQ ID NO: 283; WAN024AQV; Start 84; Stop 108
aaatgagaaattatgggagcaagct

SEQ ID NO: 259986 - DNA, 25 bp, Artificial
  probe
  misc_feature (1)..(25): SEQ ID NO: 283; WAN024AQV; Start 53; Stop 77
agaacaagctaggtgggattatttg

SEQ ID NO: 259987 - DNA, 25 bp, Artificial
  probe
  misc_feature (1)..(25): SEQ ID NO: 283; WAN024AQV; Start 78; Stop 102
cctatgaaatgagaaattatgggag

SEQ ID NO: 259988 - DNA, 25 bp, Artificial
  probe
  misc_feature (1)..(25): SEQ ID NO: 283; WAN024AQV; Start 68; Stop 92
ggattatttgcctatgaaatgagaa

SEQ ID NO: 259989 - DNA, 25 bp, Artificial
  probe
  misc_feature (1)..(25): SEQ ID NO: 283; WAN024AQV; Start 85; Stop 109
aatgagaaattatgggagcaagctc

SEQ ID NO: 259990 - DNA, 25 bp, Artificial
  probe
  misc_feature (1)..(25): SEQ ID NO: 283; WAN024AQV; Start 54; Stop 78
gaacaagctaggtgggattatttgc

SEQ ID NO: 259991 - DNA, 25 bp, Artificial
  probe
  misc_feature (1)..(25): SEQ ID NO: 283; WAN024AQV; Start 51; Stop 75
ctagaacaagctaggtgggattatt

SEQ ID NO: 259992 - DNA, 25 bp, Artificial
  probe
  misc_feature (1)..(25): SEQ ID NO: 283; WAN024AQV; Start 40; Stop 64
aataatcccacctagaacaagctag

SEQ ID NO: 259993 - DNA, 25 bp, Artificial
  probe
  misc_feature (1)..(25): SEQ ID NO: 283; WAN024AQV; Start 61; Stop 85
ctaggtgggattatttgcctatgaa

SEQ ID NO: 259994 - DNA, 25 bp, Artificial
  probe
  misc_feature (1)..(25): SEQ ID NO: 283; WAN024AQV; Start 62; Stop 86
taggtgggattatttgcctatgaaa

SEQ ID NO: 259995 - DNA, 25 bp, Artificial
  probe
  misc_feature (1)..(25): SEQ ID NO: 283; WAN024AQV; Start 37; Stop 61
taaaataatcccacctagaacaagc

SEQ ID NO: 259996 - DNA, 25 bp, Artificial
  probe
  misc_feature (1)..(25): SEQ ID NO: 283; WAN024AQV; Start 74; Stop 98
tttgcctatgaaatgagaaattatg

SEQ ID NO: 259997 - DNA, 25 bp, Artificial
  probe
  misc_feature (1)..(25): SEQ ID NO: 283; WAN024AQV; Start 11; Stop 35
aatgacttgcaatctctgttaagaa

SEQ ID NO: 259998 - DNA, 25 bp, Artificial
  probe
  misc_feature (1)..(25): SEQ ID NO: 283; WAN024AQV; Start 38; Stop 62
aaaataatcccacctagaacaagct

SEQ ID NO: 259999 - DNA, 25 bp, Artificial
  probe
  misc_feature (1)..(25): SEQ ID NO: 283; WAN024AQV; Start 60; Stop 84
gctaggtgggattatttgcctatga

SEQ ID NO: 260000 - DNA, 25 bp, Artificial
  probe
  misc_feature (1)..(25): SEQ ID NO: 283; WAN024AQV; Start 55; Stop 79
aacaagctaggtgggattatttgcc

SEQ ID NO: 260001 - DNA, 25 bp, Artificial
  probe
  misc_feature (1)..(25): SEQ ID NO: 283; WAN024AQV; Start 58; Stop 82
aagctaggtgggattatttgcctat

SEQ ID NO: 260002 - DNA, 25 bp, Artificial
  probe
  misc_feature (1)..(25): SEQ ID NO: 283; WAN024AQV; Start 69; Stop 93
gattatttgcctatgaaatgagaaa

SEQ ID NO: 260003 - DNA, 25 bp, Artificial
  probe
  misc_feature (1)..(25): SEQ ID NO: 284; WAN024AID; Start 29; Stop 53
acttggagaatacgattacatagaa

SEQ ID NO: 260004 - DNA, 25 bp, Artificial
  probe
  misc_feature (1)..(25): SEQ ID NO: 284; WAN024AID; Start 28; Stop 52
aacttggagaatacgattacataga

SEQ ID NO: 260005 - DNA, 25 bp, Artificial
  probe
  misc_feature (1)..(25): SEQ ID NO: 284; WAN024AID; Start 33; Stop 57
ggagaatacgattacatagaattgg

SEQ ID NO: 260006 - DNA, 25 bp, Artificial
  probe
  misc_feature (1)..(25): SEQ ID NO: 284; WAN024AID; Start 32; Stop 56
tggagaatacgattacatagaattg

SEQ ID NO: 260007 - DNA, 25 bp, Artificial
  probe
  misc_feature (1)..(25): SEQ ID NO: 284; WAN024AID; Start 83; Stop 107
ccactgtatcatatttatgctgact

SEQ ID NO: 260008 - DNA, 25 bp, Artificial
  probe
  misc_feature (1)..(25): SEQ ID NO: 284; WAN024AID; Start 82; Stop 106
tccactgtatcatatttatgctgac

SEQ ID NO: 260009 - DNA, 25 bp, Artificial
  probe
  misc_feature (1)..(25): SEQ ID NO: 284; WAN024AID; Start 30; Stop 54
cttggagaatacgattacatagaat

SEQ ID NO: 260010 - DNA, 25 bp, Artificial
  probe
  misc_feature (1)..(25): SEQ ID NO: 284; WAN024AID; Start 34; Stop 58
gagaatacgattacatagaattgga

SEQ ID NO: 260011 - DNA, 25 bp, Artificial
  probe
  misc_feature (1)..(25): SEQ ID NO: 284; WAN024AID; Start 38; Stop 62
atacgattacatagaattggaaacg

SEQ ID NO: 260012 - DNA, 25 bp, Artificial
  probe
  misc_feature (1)..(25): SEQ ID NO: 284; WAN024AID; Start 81; Stop 105
ttccactgtatcatatttatgctga

SEQ ID NO: 260013 - DNA, 25 bp, Artificial
  probe
  misc_feature (1)..(25): SEQ ID NO: 284; WAN024AID; Start 35; Stop 59
agaatacgattacatagaattggaa

SEQ ID NO: 260014 - DNA, 25 bp, Artificial
  probe
  misc_feature (1)..(25): SEQ ID NO: 284; WAN024AID; Start 31; Stop 55
ttggagaatacgattacatagaatt

SEQ ID NO: 260015 - DNA, 25 bp, Artificial
  probe
  misc_feature (1)..(25): SEQ ID NO: 284; WAN024AID; Start 80; Stop 104
attccactgtatcatatttatgctg

SEQ ID NO: 260016 - DNA, 25 bp, Artificial
  probe
  misc_feature (1)..(25): SEQ ID NO: 284; WAN024AID; Start 27; Stop 51
aaacttggagaatacgattacatag

SEQ ID NO: 260017 - DNA, 25 bp, Artificial
  probe
  misc_feature (1)..(25): SEQ ID NO: 284; WAN024AID; Start 117; Stop 141
atctgctcaaaactctctattctct

SEQ ID NO: 260018 - DNA, 25 bp, Artificial
  probe
  misc_feature (1)..(25): SEQ ID NO: 284; WAN024AID; Start 84; Stop 108
cactgtatcatatttatgctgactt

SEQ ID NO: 260019 - DNA, 25 bp, Artificial
  probe
  misc_feature (1)..(25): SEQ ID NO: 284; WAN024AID; Start 118; Stop 142
tctgctcaaaactctctattctcta

SEQ ID NO: 260020 - DNA, 25 bp, Artificial
  probe
  misc_feature (1)..(25): SEQ ID NO: 284; WAN024AID; Start 116; Stop 140
aatctgctcaaaactctctattctc

SEQ ID NO: 260021 - DNA, 25 bp, Artificial
  probe
  misc_feature (1)..(25): SEQ ID NO: 284; WAN024AID; Start 25; Stop 49
ttaaacttggagaatacgattacat

SEQ ID NO: 260022 - DNA, 25 bp, Artificial
  probe
  misc_feature (1)..(25): SEQ ID NO: 284; WAN024AID; Start 115; Stop 139
aaatctgctcaaaactctctattct

SEQ ID NO: 260023 - DNA, 25 bp, Artificial
  probe
  misc_feature (1)..(25): SEQ ID NO: 284; WAN024AID; Start 119; Stop 143
ctgctcaaaactctctattctctat

SEQ ID NO: 260024 - DNA, 25 bp, Artificial
  probe
  misc_feature (1)..(25): SEQ ID NO: 284; WAN024AID; Start 85; Stop 109
actgtatcatatttatgctgacttt

SEQ ID NO: 260025 - DNA, 25 bp, Artificial
  probe
  misc_feature (1)..(25): SEQ ID NO: 284; WAN024AID; Start 114; Stop 138
aaaatctgctcaaaactctctattc

SEQ ID NO: 260026 - DNA, 25 bp, Artificial
  probe
  misc_feature (1)..(25): SEQ ID NO: 284; WAN024AID; Start 120; Stop 144
tgctcaaaactctctattctctatt

SEQ ID NO: 260027 - DNA, 25 bp, Artificial
  probe
  misc_feature (1)..(25): SEQ ID NO: 284; WAN024AID; Start 24; Stop 48
tttaaacttggagaatacgattaca

SEQ ID NO: 260028 - DNA, 25 bp, Artificial
  probe
  misc_feature (1)..(25): SEQ ID NO: 284; WAN024AID; Start 121; Stop 145
gctcaaaactctctattctctattc

SEQ ID NO: 260029 - DNA, 25 bp, Artificial
  probe
  misc_feature (1)..(25): SEQ ID NO: 284; WAN024AID; Start 26; Stop 50
taaacttggagaatacgattacata

SEQ ID NO: 260030 - DNA, 25 bp, Artificial
  probe
  misc_feature (1)..(25): SEQ ID NO: 284; WAN024AID; Start 39; Stop 63
tacgattacatagaattggaaacgt

SEQ ID NO: 260031 - DNA, 25 bp, Artificial
  probe
  misc_feature (1)..(25): SEQ ID NO: 284; WAN024AID; Start 37; Stop 61
aatacgattacatagaattggaaac

SEQ ID NO: 260032 - DNA, 25 bp, Artificial
  probe
  misc_feature (1)..(25): SEQ ID NO: 284; WAN024AID; Start 79; Stop 103
tattccactgtatcatatttatgct

SEQ ID NO: 260033 - DNA, 25 bp, Artificial
  probe
  misc_feature (1)..(25): SEQ ID NO: 284; WAN024AID; Start 78; Stop 102
ctattccactgtatcatatttatgc

SEQ ID NO: 260034 - DNA, 25 bp, Artificial
  probe
  misc_feature (1)..(25): SEQ ID NO: 284; WAN024AID; Start 36; Stop 60
gaatacgattacatagaattggaaa

SEQ ID NO: 260035 - DNA, 25 bp, Artificial
  probe
  misc_feature (1)..(25): SEQ ID NO: 284; WAN024AID; Start 41; Stop 65
cgattacatagaattggaaacgttc

SEQ ID NO: 260036 - DNA, 25 bp, Artificial
  probe
  misc_feature (1)..(25): SEQ ID NO: 285; WAN024AS3; Start 57; Stop 81
gcaagcgttttctttgatttgtgaa

SEQ ID NO: 260037 - DNA, 25 bp, Artificial
  probe
  misc_feature (1)..(25): SEQ ID NO: 285; WAN024AS3; Start 58; Stop 82
caagcgttttctttgatttgtgaaa

SEQ ID NO: 260038 - DNA, 25 bp, Artificial
  probe
  misc_feature (1)..(25): SEQ ID NO: 285; WAN024AS3; Start 53; Stop 77
atatgcaagcgttttctttgatttg

SEQ ID NO: 260039 - DNA, 25 bp, Artificial
  probe
  misc_feature (1)..(25): SEQ ID NO: 285; WAN024AS3; Start 51; Stop 75
caatatgcaagcgttttctttgatt

SEQ ID NO: 260040 - DNA, 25 bp, Artificial
  probe
  misc_feature (1)..(25): SEQ ID NO: 285; WAN024AS3; Start 50; Stop 74
acaatatgcaagcgttttctttgat

SEQ ID NO: 260041 - DNA, 25 bp, Artificial
  probe
  misc_feature (1)..(25): SEQ ID NO: 285; WAN024AS3; Start 54; Stop 78
tatgcaagcgttttctttgatttgt

SEQ ID NO: 260042 - DNA, 25 bp, Artificial
  probe
  misc_feature (1)..(25): SEQ ID NO: 285; WAN024AS3; Start 49; Stop 73
aacaatatgcaagcgttttctttga

SEQ ID NO: 260043 - DNA, 25 bp, Artificial
  probe
  misc_feature (1)..(25): SEQ ID NO: 285; WAN024AS3; Start 52; Stop 76
aatatgcaagcgttttctttgattt

SEQ ID NO: 260044 - DNA, 25 bp, Artificial
  probe
  misc_feature (1)..(25): SEQ ID NO: 285; WAN024AS3; Start 41; Stop 65
tgtagtaaaacaatatgcaagcgtt

SEQ ID NO: 260045 - DNA, 25 bp, Artificial
  probe
  misc_feature (1)..(25): SEQ ID NO: 285; WAN024AS3; Start 40; Stop 64
atgtagtaaaacaatatgcaagcgt

SEQ ID NO: 260046 - DNA, 25 bp, Artificial
  probe
  misc_feature (1)..(25): SEQ ID NO: 285; WAN024AS3; Start 39; Stop 63
catgtagtaaaacaatatgcaagcg

SEQ ID NO: 260047 - DNA, 25 bp, Artificial
  probe
  misc_feature (1)..(25): SEQ ID NO: 285; WAN024AS3; Start 55; Stop 79
atgcaagcgttttctttgatttgtg

SEQ ID NO: 260048 - DNA, 25 bp, Artificial
  probe
  misc_feature (1)..(25): SEQ ID NO: 285; WAN024AS3; Start 123; Stop 147
tatcagtataaatgacggagataaa

SEQ ID NO: 260049 - DNA, 25 bp, Artificial
  probe
  misc_feature (1)..(25): SEQ ID NO: 285; WAN024AS3; Start 48; Stop 72
aaacaatatgcaagcgttttctttg

SEQ ID NO: 260050 - DNA, 25 bp, Artificial
  probe
  misc_feature (1)..(25): SEQ ID NO: 285; WAN024AS3; Start 42; Stop 66
gtagtaaaacaatatgcaagcgttt

SEQ ID NO: 260051 - DNA, 25 bp, Artificial
  probe
  misc_feature (1)..(25): SEQ ID NO: 285; WAN024AS3; Start 56; Stop 80
tgcaagcgttttctttgatttgtga

SEQ ID NO: 260052 - DNA, 25 bp, Artificial
  probe
  misc_feature (1)..(25): SEQ ID NO: 285; WAN024AS3; Start 122; Stop 146
atatcagtataaatgacggagataa

SEQ ID NO: 260053 - DNA, 25 bp, Artificial
  probe
  misc_feature (1)..(25): SEQ ID NO: 285; WAN024AS3; Start 124; Stop 148
atcagtataaatgacggagataaaa

SEQ ID NO: 260054 - DNA, 25 bp, Artificial
  probe
  misc_feature (1)..(25): SEQ ID NO: 285; WAN024AS3; Start 30; Stop 54
tcagtatagcatgtagtaaaacaat

SEQ ID NO: 260055 - DNA, 25 bp, Artificial
  probe
  misc_feature (1)..(25): SEQ ID NO: 285; WAN024AS3; Start 29; Stop 53
atcagtatagcatgtagtaaaacaa

SEQ ID NO: 260056 - DNA, 25 bp, Artificial
  probe
  misc_feature (1)..(25): SEQ ID NO: 285; WAN024AS3; Start 28; Stop 52
tatcagtatagcatgtagtaaaaca

SEQ ID NO: 260057 - DNA, 25 bp, Artificial
  probe
  misc_feature (1)..(25): SEQ ID NO: 285; WAN024AS3; Start 38; Stop 62
gcatgtagtaaaacaatatgcaagc

SEQ ID NO: 260058 - DNA, 25 bp, Artificial
  probe
  misc_feature (1)..(25): SEQ ID NO: 285; WAN024AS3; Start 47; Stop 71
aaaacaatatgcaagcgttttcttt

SEQ ID NO: 260059 - DNA, 25 bp, Artificial
  probe
  misc_feature (1)..(25): SEQ ID NO: 285; WAN024AS3; Start 45; Stop 69
gtaaaacaatatgcaagcgttttct

SEQ ID NO: 260060 - DNA, 25 bp, Artificial
  probe
  misc_feature (1)..(25): SEQ ID NO: 285; WAN024AS3; Start 44; Stop 68
agtaaaacaatatgcaagcgttttc

SEQ ID NO: 260061 - DNA, 25 bp, Artificial
  probe
  misc_feature (1)..(25): SEQ ID NO: 285; WAN024AS3; Start 46; Stop 70
taaaacaatatgcaagcgttttctt

SEQ ID NO: 260062 - DNA, 25 bp, Artificial
  probe
  misc_feature (1)..(25): SEQ ID NO: 285; WAN024AS3; Start 37; Stop 61
agcatgtagtaaaacaatatgcaag

SEQ ID NO: 260063 - DNA, 25 bp, Artificial
  probe
  misc_feature (1)..(25): SEQ ID NO: 285; WAN024AS3; Start 43; Stop 67
tagtaaaacaatatgcaagcgtttt

SEQ ID NO: 260064 - DNA, 25 bp, Artificial
  probe
  misc_feature (1)..(25): SEQ ID NO: 285; WAN024AS3; Start 36; Stop 60
tagcatgtagtaaaacaatatgcaa

SEQ ID NO: 260065 - DNA, 25 bp, Artificial
  probe
  misc_feature (1)..(25): SEQ ID NO: 285; WAN024AS3; Start 35; Stop 59
atagcatgtagtaaaacaatatgca

SEQ ID NO: 260066 - DNA, 25 bp, Artificial
  probe
  misc_feature (1)..(25): SEQ ID NO: 285; WAN024AS3; Start 2; Stop 26
atgattctccaatcaataaatttct

SEQ ID NO: 260067 - DNA, 25 bp, Artificial
  probe
  misc_feature (1)..(25): SEQ ID NO: 285; WAN024AS3; Start 34; Stop 58
tatagcatgtagtaaaacaatatgc

SEQ ID NO: 260068 - DNA, 25 bp, Artificial
  probe
  misc_feature (1)..(25): SEQ ID NO: 286; WAN0249VW; Start 33; Stop 57
attgaatatgttagcttggacagtg

SEQ ID NO: 260069 - DNA, 25 bp, Artificial
  probe
  misc_feature (1)..(25): SEQ ID NO: 286; WAN0249VW; Start 4; Stop 28
gcgagaatgaaagcactttgtattt

SEQ ID NO: 260070 - DNA, 25 bp, Artificial
  probe
  misc_feature (1)..(25): SEQ ID NO: 286; WAN0249VW; Start 34; Stop 58
ttgaatatgttagcttggacagtgc

SEQ ID NO: 260071 - DNA, 25 bp, Artificial
  probe
  misc_feature (1)..(25): SEQ ID NO: 286; WAN0249VW; Start 32; Stop 56
tattgaatatgttagcttggacagt

SEQ ID NO: 260072 - DNA, 25 bp, Artificial
  probe
  misc_feature (1)..(25): SEQ ID NO: 286; WAN0249VW; Start 36; Stop 60
gaatatgttagcttggacagtgctt

SEQ ID NO: 260073 - DNA, 25 bp, Artificial
  probe
  misc_feature (1)..(25): SEQ ID NO: 286; WAN0249VW; Start 37; Stop 61
aatatgttagcttggacagtgcttg

SEQ ID NO: 260074 - DNA, 25 bp, Artificial
  probe
  misc_feature (1)..(25): SEQ ID NO: 286; WAN0249VW; Start 31; Stop 55
ttattgaatatgttagcttggacag

SEQ ID NO: 260075 - DNA, 25 bp, Artificial
  probe
  misc_feature (1)..(25): SEQ ID NO: 286; WAN0249VW; Start 35; Stop 59
tgaatatgttagcttggacagtgct

SEQ ID NO: 260076 - DNA, 25 bp, Artificial
  probe
  misc_feature (1)..(25): SEQ ID NO: 286; WAN0249VW; Start 5; Stop 29
cgagaatgaaagcactttgtatttt

SEQ ID NO: 260077 - DNA, 25 bp, Artificial
  probe
  misc_feature (1)..(25): SEQ ID NO: 286; WAN0249VW; Start 2; Stop 26
atgcgagaatgaaagcactttgtat

SEQ ID NO: 260078 - DNA, 25 bp, Artificial
  probe
  misc_feature (1)..(25): SEQ ID NO: 286; WAN0249VW; Start 3; Stop 27
tgcgagaatgaaagcactttgtatt

SEQ ID NO: 260079 - DNA, 25 bp, Artificial
  probe
  misc_feature (1)..(25): SEQ ID NO: 286; WAN0249VW; Start 1; Stop 25
aatgcgagaatgaaagcactttgta

SEQ ID NO: 260080 - DNA, 25 bp, Artificial
  probe
  misc_feature (1)..(25): SEQ ID NO: 286; WAN0249VW; Start 38; Stop 62
atatgttagcttggacagtgcttgc

SEQ ID NO: 260081 - DNA, 25 bp, Artificial
  probe
  misc_feature (1)..(25): SEQ ID NO: 286; WAN0249VW; Start 30; Stop 54
tttattgaatatgttagcttggaca

SEQ ID NO: 260082 - DNA, 25 bp, Artificial
  probe
  misc_feature (1)..(25): SEQ ID NO: 286; WAN0249VW; Start 106; Stop 130
tggagtactattttaattgcttcgc

SEQ ID NO: 260083 - DNA, 25 bp, Artificial
  probe
  misc_feature (1)..(25): SEQ ID NO: 286; WAN0249VW; Start 107; Stop 131
ggagtactattttaattgcttcgct

SEQ ID NO: 260084 - DNA, 25 bp, Artificial
  probe
  misc_feature (1)..(25): SEQ ID NO: 286; WAN0249VW; Start 109; Stop 133
agtactattttaattgcttcgctgt

SEQ ID NO: 260085 - DNA, 25 bp, Artificial
  probe
  misc_feature (1)..(25): SEQ ID NO: 286; WAN0249VW; Start 108; Stop 132
gagtactattttaattgcttcgctg

SEQ ID NO: 260086 - DNA, 25 bp, Artificial
  probe
  misc_feature (1)..(25): SEQ ID NO: 286; WAN0249VW; Start 39; Stop 63
tatgttagcttggacagtgcttgca

SEQ ID NO: 260087 - DNA, 25 bp, Artificial
  probe
  misc_feature (1)..(25): SEQ ID NO: 286; WAN0249VW; Start 105; Stop 129
ttggagtactattttaattgcttcg

SEQ ID NO: 260088 - DNA, 25 bp, Artificial
  probe
  misc_feature (1)..(25): SEQ ID NO: 286; WAN0249VW; Start 29; Stop 53
ttttattgaatatgttagcttggac

SEQ ID NO: 260089 - DNA, 25 bp, Artificial
  probe
  misc_feature (1)..(25): SEQ ID NO: 286; WAN0249VW; Start 103; Stop 127
acttggagtactattttaattgctt

SEQ ID NO: 260090 - DNA, 25 bp, Artificial
  probe
  misc_feature (1)..(25): SEQ ID NO: 286; WAN0249VW; Start 104; Stop 128
cttggagtactattttaattgcttc

SEQ ID NO: 260091 - DNA, 25 bp, Artificial
  probe
  misc_feature (1)..(25): SEQ ID NO: 286; WAN0249VW; Start 102; Stop 126
tacttggagtactattttaattgct

SEQ ID NO: 260092 - DNA, 25 bp, Artificial
  probe
  misc_feature (1)..(25): SEQ ID NO: 286; WAN0249VW; Start 45; Stop 69
agcttggacagtgcttgcaatgata

SEQ ID NO: 260093 - DNA, 25 bp, Artificial
  probe
  misc_feature (1)..(25): SEQ ID NO: 286; WAN0249VW; Start 44; Stop 68
tagcttggacagtgcttgcaatgat

SEQ ID NO: 260094 - DNA, 25 bp, Artificial
  probe
  misc_feature (1)..(25): SEQ ID NO: 286; WAN0249VW; Start 42; Stop 66
gttagcttggacagtgcttgcaatg

SEQ ID NO: 260095 - DNA, 25 bp, Artificial
  probe
  misc_feature (1)..(25): SEQ ID NO: 286; WAN0249VW; Start 101; Stop 125
atacttggagtactattttaattgc

SEQ ID NO: 260096 - DNA, 25 bp, Artificial
  probe
  misc_feature (1)..(25): SEQ ID NO: 286; WAN0249VW; Start 99; Stop 123
gcatacttggagtactattttaatt

SEQ ID NO: 260097 - DNA, 25 bp, Artificial
  probe
  misc_feature (1)..(25): SEQ ID NO: 287; WAN0249FL; Start 93; Stop 117
ttagaggtgaattgtcctattgtcg

SEQ ID NO: 260098 - DNA, 25 bp, Artificial
  probe
  misc_feature (1)..(25): SEQ ID NO: 287; WAN0249FL; Start 94; Stop 118
tagaggtgaattgtcctattgtcgt

SEQ ID NO: 260099 - DNA, 25 bp, Artificial
  probe
  misc_feature (1)..(25): SEQ ID NO: 287; WAN0249FL; Start 92; Stop 116
attagaggtgaattgtcctattgtc

SEQ ID NO: 260100 - DNA, 25 bp, Artificial
  probe
  misc_feature (1)..(25): SEQ ID NO: 287; WAN0249FL; Start 91; Stop 115
aattagaggtgaattgtcctattgt

SEQ ID NO: 260101 - DNA, 25 bp, Artificial
  probe
  misc_feature (1)..(25): SEQ ID NO: 287; WAN0249FL; Start 95; Stop 119
agaggtgaattgtcctattgtcgtc

SEQ ID NO: 260102 - DNA, 25 bp, Artificial
  probe
  misc_feature (1)..(25): SEQ ID NO: 287; WAN0249FL; Start 86; Stop 110
tcaataattagaggtgaattgtcct

SEQ ID NO: 260103 - DNA, 25 bp, Artificial
  probe
  misc_feature (1)..(25): SEQ ID NO: 287; WAN0249FL; Start 85; Stop 109
gtcaataattagaggtgaattgtcc

SEQ ID NO: 260104 - DNA, 25 bp, Artificial
  probe
  misc_feature (1)..(25): SEQ ID NO: 287; WAN0249FL; Start 84; Stop 108
tgtcaataattagaggtgaattgtc

SEQ ID NO: 260105 - DNA, 25 bp, Artificial
  probe
  misc_feature (1)..(25): SEQ ID NO: 287; WAN0249FL; Start 90; Stop 114
taattagaggtgaattgtcctattg

SEQ ID NO: 260106 - DNA, 25 bp, Artificial
  probe
  misc_feature (1)..(25): SEQ ID NO: 287; WAN0249FL; Start 77; Stop 101
cctgaaatgtcaataattagaggtg

SEQ ID NO: 260107 - DNA, 25 bp, Artificial
  probe
  misc_feature (1)..(25): SEQ ID NO: 287; WAN0249FL; Start 76; Stop 100
tcctgaaatgtcaataattagaggt

SEQ ID NO: 260108 - DNA, 25 bp, Artificial
  probe
  misc_feature (1)..(25): SEQ ID NO: 287; WAN0249FL; Start 78; Stop 102
ctgaaatgtcaataattagaggtga

SEQ ID NO: 260109 - DNA, 25 bp, Artificial
  probe
  misc_feature (1)..(25): SEQ ID NO: 287; WAN0249FL; Start 83; Stop 107
atgtcaataattagaggtgaattgt

SEQ ID NO: 260110 - DNA, 25 bp, Artificial
  probe
  misc_feature (1)..(25): SEQ ID NO: 287; WAN0249FL; Start 31; Stop 55
ttatagcacatttaaagaaggctgt

SEQ ID NO: 260111 - DNA, 25 bp, Artificial
  probe
  misc_feature (1)..(25): SEQ ID NO: 287; WAN0249FL; Start 87; Stop 111
caataattagaggtgaattgtccta

SEQ ID NO: 260112 - DNA, 25 bp, Artificial
  probe
  misc_feature (1)..(25): SEQ ID NO: 287; WAN0249FL; Start 75; Stop 99
ttcctgaaatgtcaataattagagg

SEQ ID NO: 260113 - DNA, 25 bp, Artificial
  probe
  misc_feature (1)..(25): SEQ ID NO: 287; WAN0249FL; Start 79; Stop 103
tgaaatgtcaataattagaggtgaa

SEQ ID NO: 260114 - DNA, 25 bp, Artificial
  probe
  misc_feature (1)..(25): SEQ ID NO: 287; WAN0249FL; Start 28; Stop 52
gtattatagcacatttaaagaaggc

SEQ ID NO: 260115 - DNA, 25 bp, Artificial
  probe
  misc_feature (1)..(25): SEQ ID NO: 287; WAN0249FL; Start 30; Stop 54
attatagcacatttaaagaaggctg

SEQ ID NO: 260116 - DNA, 25 bp, Artificial
  probe
  misc_feature (1)..(25): SEQ ID NO: 287; WAN0249FL; Start 89; Stop 113
ataattagaggtgaattgtcctatt

SEQ ID NO: 260117 - DNA, 25 bp, Artificial
  probe
  misc_feature (1)..(25): SEQ ID NO: 287; WAN0249FL; Start 88; Stop 112
aataattagaggtgaattgtcctat

SEQ ID NO: 260118 - DNA, 25 bp, Artificial
  probe
  misc_feature (1)..(25): SEQ ID NO: 287; WAN0249FL; Start 82; Stop 106
aatgtcaataattagaggtgaattg

SEQ ID NO: 260119 - DNA, 25 bp, Artificial
  probe
  misc_feature (1)..(25): SEQ ID NO: 287; WAN0249FL; Start 32; Stop 56
tatagcacatttaaagaaggctgtg

SEQ ID NO: 260120 - DNA, 25 bp, Artificial
  probe
  misc_feature (1)..(25): SEQ ID NO: 287; WAN0249FL; Start 80; Stop 104
gaaatgtcaataattagaggtgaat

SEQ ID NO: 260121 - DNA, 25 bp, Artificial
  probe
  misc_feature (1)..(25): SEQ ID NO: 287; WAN0249FL; Start 74; Stop 98
tttcctgaaatgtcaataattagag

SEQ ID NO: 260122 - DNA, 25 bp, Artificial
  probe
  misc_feature (1)..(25): SEQ ID NO: 287; WAN0249FL; Start 29; Stop 53
tattatagcacatttaaagaaggct

SEQ ID NO: 260123 - DNA, 25 bp, Artificial
  probe
  misc_feature (1)..(25): SEQ ID NO: 287; WAN0249FL; Start 38; Stop 62
acatttaaagaaggctgtgccgttt

SEQ ID NO: 260124 - DNA, 25 bp, Artificial
  probe
  misc_feature (1)..(25): SEQ ID NO: 287; WAN0249FL; Start 39; Stop 63
catttaaagaaggctgtgccgtttt

SEQ ID NO: 260125 - DNA, 25 bp, Artificial
  probe
  misc_feature (1)..(25): SEQ ID NO: 287; WAN0249FL; Start 37; Stop 61
cacatttaaagaaggctgtgccgtt

SEQ ID NO: 260126 - DNA, 25 bp, Artificial
  probe
  misc_feature (1)..(25): SEQ ID NO: 288; WAN0249IB; Start 73; Stop 97
acaatgaaaggaagaataaactcgt

SEQ ID NO: 260127 - DNA, 25 bp, Artificial
  probe
  misc_feature (1)..(25): SEQ ID NO: 288; WAN0249IB; Start 72; Stop 96
tacaatgaaaggaagaataaactcg

SEQ ID NO: 260128 - DNA, 25 bp, Artificial
  probe
  misc_feature (1)..(25): SEQ ID NO: 288; WAN0249IB; Start 71; Stop 95
gtacaatgaaaggaagaataaactc

SEQ ID NO: 260129 - DNA, 25 bp, Artificial
  probe
  misc_feature (1)..(25): SEQ ID NO: 288; WAN0249IB; Start 69; Stop 93
gtgtacaatgaaaggaagaataaac

SEQ ID NO: 260130 - DNA, 25 bp, Artificial
  probe
  misc_feature (1)..(25): SEQ ID NO: 288; WAN0249IB; Start 70; Stop 94
tgtacaatgaaaggaagaataaact

SEQ ID NO: 260131 - DNA, 25 bp, Artificial
  probe
  misc_feature (1)..(25): SEQ ID NO: 288; WAN0249IB; Start 68; Stop 92
agtgtacaatgaaaggaagaataaa

SEQ ID NO: 260132 - DNA, 25 bp, Artificial
  probe
  misc_feature (1)..(25): SEQ ID NO: 288; WAN0249IB; Start 67; Stop 91
aagtgtacaatgaaaggaagaataa

SEQ ID NO: 260133 - DNA, 25 bp, Artificial
  probe
  misc_feature (1)..(25): SEQ ID NO: 288; WAN0249IB; Start 66; Stop 90
aaagtgtacaatgaaaggaagaata

SEQ ID NO: 260134 - DNA, 25 bp, Artificial
  probe
  misc_feature (1)..(25): SEQ ID NO: 288; WAN0249IB; Start 65; Stop 89
taaagtgtacaatgaaaggaagaat

SEQ ID NO: 260135 - DNA, 25 bp, Artificial
  probe
  misc_feature (1)..(25): SEQ ID NO: 288; WAN0249IB; Start 64; Stop 88
ataaagtgtacaatgaaaggaagaa

SEQ ID NO: 260136 - DNA, 25 bp, Artificial
  probe
  misc_feature (1)..(25): SEQ ID NO: 288; WAN0249IB; Start 63; Stop 87
aataaagtgtacaatgaaaggaaga

SEQ ID NO: 260137 - DNA, 25 bp, Artificial
  probe
  misc_feature (1)..(25): SEQ ID NO: 288; WAN0249IB; Start 61; Stop 85
agaataaagtgtacaatgaaaggaa

SEQ ID NO: 260138 - DNA, 25 bp, Artificial
  probe
  misc_feature (1)..(25): SEQ ID NO: 288; WAN0249IB; Start 62; Stop 86
gaataaagtgtacaatgaaaggaag

SEQ ID NO: 260139 - DNA, 25 bp, Artificial
  probe
  misc_feature (1)..(25): SEQ ID NO: 288; WAN0249IB; Start 60; Stop 84
tagaataaagtgtacaatgaaagga

SEQ ID NO: 260140 - DNA, 25 bp, Artificial
  probe
  misc_feature (1)..(25): SEQ ID NO: 288; WAN0249IB; Start 59; Stop 83
atagaataaagtgtacaatgaaagg

SEQ ID NO: 260141 - DNA, 25 bp, Artificial
  probe
  misc_feature (1)..(25): SEQ ID NO: 289; WAN024FH8; Start 177; Stop 201
caagatgtctgatacgatgatgtca

SEQ ID NO: 260142 - DNA, 25 bp, Artificial
  probe
  misc_feature (1)..(25): SEQ ID NO: 289; WAN024FH8; Start 32; Stop 56
gttcattatcaccttctaactctgg

SEQ ID NO: 260143 - DNA, 25 bp, Artificial
  probe
  misc_feature (1)..(25): SEQ ID NO: 289; WAN024FH8; Start 77; Stop 101
atcacaatcatgctacaggtactac

SEQ ID NO: 260144 - DNA, 25 bp, Artificial
  probe
  misc_feature (1)..(25): SEQ ID NO: 289; WAN024FH8; Start 175; Stop 199
aacaagatgtctgatacgatgatgt

SEQ ID NO: 260145 - DNA, 25 bp, Artificial
  probe
  misc_feature (1)..(25): SEQ ID NO: 289; WAN024FH8; Start 81; Stop 105
caatcatgctacaggtactacagat

SEQ ID NO: 260146 - DNA, 25 bp, Artificial
  probe
  misc_feature (1)..(25): SEQ ID NO: 289; WAN024FH8; Start 76; Stop 100
aatcacaatcatgctacaggtacta

SEQ ID NO: 260147 - DNA, 25 bp, Artificial
  probe
  misc_feature (1)..(25): SEQ ID NO: 289; WAN024FH8; Start 176; Stop 200
acaagatgtctgatacgatgatgtc

SEQ ID NO: 260148 - DNA, 25 bp, Artificial
  probe
  misc_feature (1)..(25): SEQ ID NO: 289; WAN024FH8; Start 172; Stop 196
gctaacaagatgtctgatacgatga

SEQ ID NO: 260149 - DNA, 25 bp, Artificial
  probe
  misc_feature (1)..(25): SEQ ID NO: 289; WAN024FH8; Start 170; Stop 194
ctgctaacaagatgtctgatacgat

SEQ ID NO: 260150 - DNA, 25 bp, Artificial
  probe
  misc_feature (1)..(25): SEQ ID NO: 289; WAN024FH8; Start 75; Stop 99
gaatcacaatcatgctacaggtact

SEQ ID NO: 260151 - DNA, 25 bp, Artificial
  probe
  misc_feature (1)..(25): SEQ ID NO: 289; WAN024FH8; Start 168; Stop 192
ttctgctaacaagatgtctgatacg

SEQ ID NO: 260152 - DNA, 25 bp, Artificial
  probe
  misc_feature (1)..(25): SEQ ID NO: 289; WAN024FH8; Start 167; Stop 191
cttctgctaacaagatgtctgatac

SEQ ID NO: 260153 - DNA, 25 bp, Artificial
  probe
  misc_feature (1)..(25): SEQ ID NO: 289; WAN024FH8; Start 166; Stop 190
gcttctgctaacaagatgtctgata

SEQ ID NO: 260154 - DNA, 25 bp, Artificial
  probe
  misc_feature (1)..(25): SEQ ID NO: 289; WAN024FH8; Start 171; Stop 195
tgctaacaagatgtctgatacgatg

SEQ ID NO: 260155 - DNA, 25 bp, Artificial
  probe
  misc_feature (1)..(25): SEQ ID NO: 289; WAN024FH8; Start 80; Stop 104
acaatcatgctacaggtactacaga

SEQ ID NO: 260156 - DNA, 25 bp, Artificial
  probe
  misc_feature (1)..(25): SEQ ID NO: 289; WAN024FH8; Start 79; Stop 103
cacaatcatgctacaggtactacag

SEQ ID NO: 260157 - DNA, 25 bp, Artificial
  probe
  misc_feature (1)..(25): SEQ ID NO: 289; WAN024FH8; Start 83; Stop 107
atcatgctacaggtactacagatag

SEQ ID NO: 260158 - DNA, 25 bp, Artificial
  probe
  misc_feature (1)..(25): SEQ ID NO: 289; WAN024FH8; Start 78; Stop 102
tcacaatcatgctacaggtactaca

SEQ ID NO: 260159 - DNA, 25 bp, Artificial
  probe
  misc_feature (1)..(25): SEQ ID NO: 289; WAN024FH8; Start 169; Stop 193
tctgctaacaagatgtctgatacga

SEQ ID NO: 260160 - DNA, 25 bp, Artificial
  probe
  misc_feature (1)..(25): SEQ ID NO: 289; WAN024FH8; Start 174; Stop 198
taacaagatgtctgatacgatgatg

SEQ ID NO: 260161 - DNA, 25 bp, Artificial
  probe
  misc_feature (1)..(25): SEQ ID NO: 289; WAN024FH8; Start 82; Stop 106
aatcatgctacaggtactacagata

SEQ ID NO: 260162 - DNA, 25 bp, Artificial
  probe
  misc_feature (1)..(25): SEQ ID NO: 289; WAN024FH8; Start 74; Stop 98
tgaatcacaatcatgctacaggtac

SEQ ID NO: 260163 - DNA, 25 bp, Artificial
  probe
  misc_feature (1)..(25): SEQ ID NO: 289; WAN024FH8; Start 173; Stop 197
ctaacaagatgtctgatacgatgat

SEQ ID NO: 260164 - DNA, 25 bp, Artificial
  probe
  misc_feature (1)..(25): SEQ ID NO: 289; WAN024FH8; Start 37; Stop 61
ttatcaccttctaactctggttctg

SEQ ID NO: 260165 - DNA, 25 bp, Artificial
  probe
  misc_feature (1)..(25): SEQ ID NO: 289; WAN024FH8; Start 34; Stop 58
tcattatcaccttctaactctggtt

SEQ ID NO: 260166 - DNA, 25 bp, Artificial
  probe
  misc_feature (1)..(25): SEQ ID NO: 289; WAN024FH8; Start 33; Stop 57
ttcattatcaccttctaactctggt

SEQ ID NO: 260167 - DNA, 25 bp, Artificial
  probe
  misc_feature (1)..(25): SEQ ID NO: 289; WAN024FH8; Start 30; Stop 54
tggttcattatcaccttctaactct

SEQ ID NO: 260168 - DNA, 25 bp, Artificial
  probe
  misc_feature (1)..(25): SEQ ID NO: 289; WAN024FH8; Start 36; Stop 60
attatcaccttctaactctggttct

SEQ ID NO: 260169 - DNA, 25 bp, Artificial
  probe
  misc_feature (1)..(25): SEQ ID NO: 289; WAN024FH8; Start 35; Stop 59
cattatcaccttctaactctggttc

SEQ ID NO: 260170 - DNA, 25 bp, Artificial
  probe
  misc_feature (1)..(25): SEQ ID NO: 289; WAN024FH8; Start 31; Stop 55
ggttcattatcaccttctaactctg

SEQ ID NO: 260171 - DNA, 25 bp, Artificial
  probe
  misc_feature (1)..(25): SEQ ID NO: 289; WAN024FH8; Start 6; Stop 30
taaagaaacatcagacacagcaaat

SEQ ID NO: 260172 - DNA, 25 bp, Artificial
  probe
  misc_feature (1)..(25): SEQ ID NO: 289; WAN024FH8; Start 38; Stop 62
tatcaccttctaactctggttctgg

SEQ ID NO: 260173 - DNA, 25 bp, Artificial
  probe
  misc_feature (1)..(25): SEQ ID NO: 289; WAN024FH8; Start 165; Stop 189
tgcttctgctaacaagatgtctgat

SEQ ID NO: 260174 - DNA, 25 bp, Artificial
  probe
  misc_feature (1)..(25): SEQ ID NO: 290; WAN024A4L; Start 7; Stop 31
tcctcttacttgtcaatcttgttct

SEQ ID NO: 260175 - DNA, 25 bp, Artificial
  probe
  misc_feature (1)..(25): SEQ ID NO: 290; WAN024A4L; Start 8; Stop 32
cctcttacttgtcaatcttgttctt

SEQ ID NO: 260176 - DNA, 25 bp, Artificial
  probe
  misc_feature (1)..(25): SEQ ID NO: 290; WAN024A4L; Start 6; Stop 30
ttcctcttacttgtcaatcttgttc

SEQ ID NO: 260177 - DNA, 25 bp, Artificial
  probe
  misc_feature (1)..(25): SEQ ID NO: 290; WAN024A4L; Start 4; Stop 28
gtttcctcttacttgtcaatcttgt

SEQ ID NO: 260178 - DNA, 25 bp, Artificial
  probe
  misc_feature (1)..(25): SEQ ID NO: 290; WAN024A4L; Start 3; Stop 27
tgtttcctcttacttgtcaatcttg

SEQ ID NO: 260179 - DNA, 25 bp, Artificial
  probe
  misc_feature (1)..(25): SEQ ID NO: 290; WAN024A4L; Start 5; Stop 29
tttcctcttacttgtcaatcttgtt

SEQ ID NO: 260180 - DNA, 25 bp, Artificial
  probe
  misc_feature (1)..(25): SEQ ID NO: 290; WAN024A4L; Start 2; Stop 26
atgtttcctcttacttgtcaatctt

SEQ ID NO: 260181 - DNA, 25 bp, Artificial
  probe
  misc_feature (1)..(25): SEQ ID NO: 290; WAN024A4L; Start 1; Stop 25
aatgtttcctcttacttgtcaatct

SEQ ID NO: 260182 - DNA, 25 bp, Artificial
  probe
  misc_feature (1)..(25): SEQ ID NO: 290; WAN024A4L; Start 9; Stop 33
ctcttacttgtcaatcttgttcttt

SEQ ID NO: 260183 - DNA, 25 bp, Artificial
  probe
  misc_feature (1)..(25): SEQ ID NO: 290; WAN024A4L; Start 68; Stop 92
tgcgtaagatagaaggaaactattt

SEQ ID NO: 260184 - DNA, 25 bp, Artificial
  probe
  misc_feature (1)..(25): SEQ ID NO: 290; WAN024A4L; Start 67; Stop 91
ttgcgtaagatagaaggaaactatt

SEQ ID NO: 260185 - DNA, 25 bp, Artificial
  probe
  misc_feature (1)..(25): SEQ ID NO: 290; WAN024A4L; Start 66; Stop 90
tttgcgtaagatagaaggaaactat

SEQ ID NO: 260186 - DNA, 25 bp, Artificial
  probe
  misc_feature (1)..(25): SEQ ID NO: 290; WAN024A4L; Start 14; Stop 38
acttgtcaatcttgttctttattct

SEQ ID NO: 260187 - DNA, 25 bp, Artificial
  probe
  misc_feature (1)..(25): SEQ ID NO: 290; WAN024A4L; Start 65; Stop 89
gtttgcgtaagatagaaggaaacta

SEQ ID NO: 260188 - DNA, 25 bp, Artificial
  probe
  misc_feature (1)..(25): SEQ ID NO: 290; WAN024A4L; Start 64; Stop 88
cgtttgcgtaagatagaaggaaact

SEQ ID NO: 260189 - DNA, 25 bp, Artificial
  probe
  misc_feature (1)..(25): SEQ ID NO: 290; WAN024A4L; Start 10; Stop 34
tcttacttgtcaatcttgttcttta

SEQ ID NO: 260190 - DNA, 25 bp, Artificial
  probe
  misc_feature (1)..(25): SEQ ID NO: 290; WAN024A4L; Start 42; Stop 66
ataaagtatctattagcgcaaacgt

SEQ ID NO: 260191 - DNA, 25 bp, Artificial
  probe
  misc_feature (1)..(25): SEQ ID NO: 290; WAN024A4L; Start 13; Stop 37
tacttgtcaatcttgttctttattc

SEQ ID NO: 260192 - DNA, 25 bp, Artificial
  probe
  misc_feature (1)..(25): SEQ ID NO: 290; WAN024A4L; Start 11; Stop 35
cttacttgtcaatcttgttctttat

SEQ ID NO: 260193 - DNA, 25 bp, Artificial
  probe
  misc_feature (1)..(25): SEQ ID NO: 290; WAN024A4L; Start 41; Stop 65
cataaagtatctattagcgcaaacg

SEQ ID NO: 260194 - DNA, 25 bp, Artificial
  probe
  misc_feature (1)..(25): SEQ ID NO: 290; WAN024A4L; Start 63; Stop 87
acgtttgcgtaagatagaaggaaac

SEQ ID NO: 260195 - DNA, 25 bp, Artificial
  probe
  misc_feature (1)..(25): SEQ ID NO: 290; WAN024A4L; Start 15; Stop 39
cttgtcaatcttgttctttattcta

SEQ ID NO: 260196 - DNA, 25 bp, Artificial
  probe
  misc_feature (1)..(25): SEQ ID NO: 290; WAN024A4L; Start 43; Stop 67
taaagtatctattagcgcaaacgtt

SEQ ID NO: 260197 - DNA, 25 bp, Artificial
  probe
  misc_feature (1)..(25): SEQ ID NO: 290; WAN024A4L; Start 69; Stop 93
gcgtaagatagaaggaaactatttt

SEQ ID NO: 260198 - DNA, 25 bp, Artificial
  probe
  misc_feature (1)..(25): SEQ ID NO: 290; WAN024A4L; Start 18; Stop 42
gtcaatcttgttctttattctatca

SEQ ID NO: 260199 - DNA, 25 bp, Artificial
  probe
  misc_feature (1)..(25): SEQ ID NO: 290; WAN024A4L; Start 17; Stop 41
tgtcaatcttgttctttattctatc

SEQ ID NO: 260200 - DNA, 25 bp, Artificial
  probe
  misc_feature (1)..(25): SEQ ID NO: 290; WAN024A4L; Start 12; Stop 36
ttacttgtcaatcttgttctttatt

SEQ ID NO: 260201 - DNA, 25 bp, Artificial
  probe
  misc_feature (1)..(25): SEQ ID NO: 290; WAN024A4L; Start 40; Stop 64
tcataaagtatctattagcgcaaac

SEQ ID NO: 260202 - DNA, 25 bp, Artificial
  probe
  misc_feature (1)..(25): SEQ ID NO: 290; WAN024A4L; Start 39; Stop 63
atcataaagtatctattagcgcaaa

SEQ ID NO: 260203 - DNA, 25 bp, Artificial
  probe
  misc_feature (1)..(25): SEQ ID NO: 290; WAN024A4L; Start 37; Stop 61
ctatcataaagtatctattagcgca

SEQ ID NO: 260204 - DNA, 25 bp, Artificial
  probe
  misc_feature (1)..(25): SEQ ID NO: 290; WAN024A4L; Start 62; Stop 86
aacgtttgcgtaagatagaaggaaa

SEQ ID NO: 260205 - DNA, 25 bp, Artificial
  probe
  misc_feature (1)..(25): SEQ ID NO: 290; WAN024A4L; Start 36; Stop 60
tctatcataaagtatctattagcgc

SEQ ID NO: 260206 - DNA, 25 bp, Artificial
  probe
  misc_feature (1)..(25): SEQ ID NO: 290; WAN024A4L; Start 38; Stop 62
tatcataaagtatctattagcgcaa

SEQ ID NO: 260207 - DNA, 25 bp, Artificial
  probe
  misc_feature (1)..(25): SEQ ID NO: 291; WAN0249D4; Start 46; Stop 70
ggatagacttatgaagaggaggaac

SEQ ID NO: 260208 - DNA, 25 bp, Artificial
  probe
  misc_feature (1)..(25): SEQ ID NO: 291; WAN0249D4; Start 45; Stop 69
aggatagacttatgaagaggaggaa

SEQ ID NO: 260209 - DNA, 25 bp, Artificial
  probe
  misc_feature (1)..(25): SEQ ID NO: 291; WAN0249D4; Start 44; Stop 68
taggatagacttatgaagaggagga

SEQ ID NO: 260210 - DNA, 25 bp, Artificial
  probe
  misc_feature (1)..(25): SEQ ID NO: 291; WAN0249D4; Start 47; Stop 71
gatagacttatgaagaggaggaact

SEQ ID NO: 260211 - DNA, 25 bp, Artificial
  probe
  misc_feature (1)..(25): SEQ ID NO: 291; WAN0249D4; Start 48; Stop 72
atagacttatgaagaggaggaactc

SEQ ID NO: 260212 - DNA, 25 bp, Artificial
  probe
  misc_feature (1)..(25): SEQ ID NO: 291; WAN0249D4; Start 43; Stop 67
ataggatagacttatgaagaggagg

SEQ ID NO: 260213 - DNA, 25 bp, Artificial
  probe
  misc_feature (1)..(25): SEQ ID NO: 291; WAN0249D4; Start 40; Stop 64
gtgataggatagacttatgaagagg

SEQ ID NO: 260214 - DNA, 25 bp, Artificial
  probe
  misc_feature (1)..(25): SEQ ID NO: 291; WAN0249D4; Start 41; Stop 65
tgataggatagacttatgaagagga

SEQ ID NO: 260215 - DNA, 25 bp, Artificial
  probe
  misc_feature (1)..(25): SEQ ID NO: 291; WAN0249D4; Start 42; Stop 66
gataggatagacttatgaagaggag

SEQ ID NO: 260216 - DNA, 25 bp, Artificial
  probe
  misc_feature (1)..(25): SEQ ID NO: 291; WAN0249D4; Start 39; Stop 63
tgtgataggatagacttatgaagag

SEQ ID NO: 260217 - DNA, 25 bp, Artificial
  probe
  misc_feature (1)..(25): SEQ ID NO: 291; WAN0249D4; Start 38; Stop 62
ttgtgataggatagacttatgaaga

SEQ ID NO: 260218 - DNA, 25 bp, Artificial
  probe
  misc_feature (1)..(25): SEQ ID NO: 291; WAN0249D4; Start 49; Stop 73
tagacttatgaagaggaggaactct

SEQ ID NO: 260219 - DNA, 25 bp, Artificial
  probe
  misc_feature (1)..(25): SEQ ID NO: 291; WAN0249D4; Start 37; Stop 61
tttgtgataggatagacttatgaag

SEQ ID NO: 260220 - DNA, 25 bp, Artificial
  probe
  misc_feature (1)..(25): SEQ ID NO: 291; WAN0249D4; Start 36; Stop 60
ttttgtgataggatagacttatgaa

SEQ ID NO: 260221 - DNA, 25 bp, Artificial
  probe
  misc_feature (1)..(25): SEQ ID NO: 292; WAN0249T3; Start 52; Stop 76
tttattgtgggaatgtttgcttcat

SEQ ID NO: 260222 - DNA, 25 bp, Artificial
  probe
  misc_feature (1)..(25): SEQ ID NO: 292; WAN0249T3; Start 54; Stop 78
tattgtgggaatgtttgcttcattt

SEQ ID NO: 260223 - DNA, 25 bp, Artificial
  probe
  misc_feature (1)..(25): SEQ ID NO: 292; WAN0249T3; Start 53; Stop 77
ttattgtgggaatgtttgcttcatt

SEQ ID NO: 260224 - DNA, 25 bp, Artificial
  probe
  misc_feature (1)..(25): SEQ ID NO: 292; WAN0249T3; Start 45; Stop 69
tatgcgttttattgtgggaatgttt

SEQ ID NO: 260225 - DNA, 25 bp, Artificial
  probe
  misc_feature (1)..(25): SEQ ID NO: 292; WAN0249T3; Start 42; Stop 66
tactatgcgttttattgtgggaatg

SEQ ID NO: 260226 - DNA, 25 bp, Artificial
  probe
  misc_feature (1)..(25): SEQ ID NO: 292; WAN0249T3; Start 44; Stop 68
ctatgcgttttattgtgggaatgtt

SEQ ID NO: 260227 - DNA, 25 bp, Artificial
  probe
  misc_feature (1)..(25): SEQ ID NO: 292; WAN0249T3; Start 51; Stop 75
ttttattgtgggaatgtttgcttca

SEQ ID NO: 260228 - DNA, 25 bp, Artificial
  probe
  misc_feature (1)..(25): SEQ ID NO: 292; WAN0249T3; Start 50; Stop 74
gttttattgtgggaatgtttgcttc

SEQ ID NO: 260229 - DNA, 25 bp, Artificial
  probe
  misc_feature (1)..(25): SEQ ID NO: 292; WAN0249T3; Start 49; Stop 73
cgttttattgtgggaatgtttgctt

SEQ ID NO: 260230 - DNA, 25 bp, Artificial
  probe
  misc_feature (1)..(25): SEQ ID NO: 292; WAN0249T3; Start 46; Stop 70
atgcgttttattgtgggaatgtttg

SEQ ID NO: 260231 - DNA, 25 bp, Artificial
  probe
  misc_feature (1)..(25): SEQ ID NO: 292; WAN0249T3; Start 43; Stop 67
actatgcgttttattgtgggaatgt

SEQ ID NO: 260232 - DNA, 25 bp, Artificial
  probe
  misc_feature (1)..(25): SEQ ID NO: 292; WAN0249T3; Start 36; Stop 60
accttgtactatgcgttttattgtg

SEQ ID NO: 260233 - DNA, 25 bp, Artificial
  probe
  misc_feature (1)..(25): SEQ ID NO: 292; WAN0249T3; Start 41; Stop 65
gtactatgcgttttattgtgggaat

SEQ ID NO: 260234 - DNA, 25 bp, Artificial
  probe
  misc_feature (1)..(25): SEQ ID NO: 292; WAN0249T3; Start 38; Stop 62
cttgtactatgcgttttattgtggg

SEQ ID NO: 260235 - DNA, 25 bp, Artificial
  probe
  misc_feature (1)..(25): SEQ ID NO: 292; WAN0249T3; Start 37; Stop 61
ccttgtactatgcgttttattgtgg

SEQ ID NO: 260236 - DNA, 25 bp, Artificial
  probe
  misc_feature (1)..(25): SEQ ID NO: 292; WAN0249T3; Start 40; Stop 64
tgtactatgcgttttattgtgggaa

SEQ ID NO: 260237 - DNA, 25 bp, Artificial
  probe
  misc_feature (1)..(25): SEQ ID NO: 292; WAN0249T3; Start 39; Stop 63
ttgtactatgcgttttattgtggga

SEQ ID NO: 260238 - DNA, 25 bp, Artificial
  probe
  misc_feature (1)..(25): SEQ ID NO: 292; WAN0249T3; Start 35; Stop 59
aaccttgtactatgcgttttattgt

SEQ ID NO: 260239 - DNA, 25 bp, Artificial
  probe
  misc_feature (1)..(25): SEQ ID NO: 292; WAN0249T3; Start 55; Stop 79
attgtgggaatgtttgcttcatttt

SEQ ID NO: 260240 - DNA, 25 bp, Artificial
  probe
  misc_feature (1)..(25): SEQ ID NO: 292; WAN0249T3; Start 48; Stop 72
gcgttttattgtgggaatgtttgct

SEQ ID NO: 260241 - DNA, 25 bp, Artificial
  probe
  misc_feature (1)..(25): SEQ ID NO: 292; WAN0249T3; Start 47; Stop 71
tgcgttttattgtgggaatgtttgc

SEQ ID NO: 260242 - DNA, 25 bp, Artificial
  probe
  misc_feature (1)..(25): SEQ ID NO: 292; WAN0249T3; Start 34; Stop 58
aaaccttgtactatgcgttttattg

SEQ ID NO: 260243 - DNA, 25 bp, Artificial
  probe
  misc_feature (1)..(25): SEQ ID NO: 292; WAN0249T3; Start 33; Stop 57
caaaccttgtactatgcgttttatt

SEQ ID NO: 260244 - DNA, 25 bp, Artificial
  probe
  misc_feature (1)..(25): SEQ ID NO: 292; WAN0249T3; Start 32; Stop 56
acaaaccttgtactatgcgttttat

SEQ ID NO: 260245 - DNA, 25 bp, Artificial
  probe
  misc_feature (1)..(25): SEQ ID NO: 292; WAN0249T3; Start 31; Stop 55
tacaaaccttgtactatgcgtttta

SEQ ID NO: 260246 - DNA, 25 bp, Artificial
  probe
  misc_feature (1)..(25): SEQ ID NO: 293; WAN0249T8; Start 81; Stop 105
taaggaggaaagtctatgggagaag

SEQ ID NO: 260247 - DNA, 25 bp, Artificial
  probe
  misc_feature (1)..(25): SEQ ID NO: 293; WAN0249T8; Start 82; Stop 106
aaggaggaaagtctatgggagaaga

SEQ ID NO: 260248 - DNA, 25 bp, Artificial
  probe
  misc_feature (1)..(25): SEQ ID NO: 294; WAN0249SI; Start 27; Stop 51
gtcaaggtgtactgttatagattca

SEQ ID NO: 260249 - DNA, 25 bp, Artificial
  probe
  misc_feature (1)..(25): SEQ ID NO: 294; WAN0249SI; Start 26; Stop 50
agtcaaggtgtactgttatagattc

SEQ ID NO: 260250 - DNA, 25 bp, Artificial
  probe
  misc_feature (1)..(25): SEQ ID NO: 294; WAN0249SI; Start 28; Stop 52
tcaaggtgtactgttatagattcaa

SEQ ID NO: 260251 - DNA, 25 bp, Artificial
  probe
  misc_feature (1)..(25): SEQ ID NO: 294; WAN0249SI; Start 63; Stop 87
gactattaaccttgtcttctcctaa

SEQ ID NO: 260252 - DNA, 25 bp, Artificial
  probe
  misc_feature (1)..(25): SEQ ID NO: 294; WAN0249SI; Start 29; Stop 53
caaggtgtactgttatagattcaat

SEQ ID NO: 260253 - DNA, 25 bp, Artificial
  probe
  misc_feature (1)..(25): SEQ ID NO: 294; WAN0249SI; Start 64; Stop 88
actattaaccttgtcttctcctaaa

SEQ ID NO: 260254 - DNA, 25 bp, Artificial
  probe
  misc_feature (1)..(25): SEQ ID NO: 294; WAN0249SI; Start 24; Stop 48
gcagtcaaggtgtactgttatagat

SEQ ID NO: 260255 - DNA, 25 bp, Artificial
  probe
  misc_feature (1)..(25): SEQ ID NO: 294; WAN0249SI; Start 22; Stop 46
tagcagtcaaggtgtactgttatag

SEQ ID NO: 260256 - DNA, 25 bp, Artificial
  probe
  misc_feature (1)..(25): SEQ ID NO: 294; WAN0249SI; Start 21; Stop 45
ttagcagtcaaggtgtactgttata

SEQ ID NO: 260257 - DNA, 25 bp, Artificial
  probe
  misc_feature (1)..(25): SEQ ID NO: 294; WAN0249SI; Start 23; Stop 47
agcagtcaaggtgtactgttataga

SEQ ID NO: 260258 - DNA, 25 bp, Artificial
  probe
  misc_feature (1)..(25): SEQ ID NO: 294; WAN0249SI; Start 71; Stop 95
accttgtcttctcctaaaattgact

SEQ ID NO: 260259 - DNA, 25 bp, Artificial
  probe
  misc_feature (1)..(25): SEQ ID NO: 294; WAN0249SI; Start 70; Stop 94
aaccttgtcttctcctaaaattgac

SEQ ID NO: 260260 - DNA, 25 bp, Artificial
  probe
  misc_feature (1)..(25): SEQ ID NO: 294; WAN0249SI; Start 72; Stop 96
ccttgtcttctcctaaaattgactt

SEQ ID NO: 260261 - DNA, 25 bp, Artificial
  probe
  misc_feature (1)..(25): SEQ ID NO: 294; WAN0249SI; Start 69; Stop 93
taaccttgtcttctcctaaaattga

SEQ ID NO: 260262 - DNA, 25 bp, Artificial
  probe
  misc_feature (1)..(25): SEQ ID NO: 294; WAN0249SI; Start 25; Stop 49
cagtcaaggtgtactgttatagatt

SEQ ID NO: 260263 - DNA, 25 bp, Artificial
  probe
  misc_feature (1)..(25): SEQ ID NO: 294; WAN0249SI; Start 30; Stop 54
aaggtgtactgttatagattcaata

SEQ ID NO: 260264 - DNA, 25 bp, Artificial
  probe
  misc_feature (1)..(25): SEQ ID NO: 294; WAN0249SI; Start 78; Stop 102
cttctcctaaaattgactttcttgt

SEQ ID NO: 260265 - DNA, 25 bp, Artificial
  probe
  misc_feature (1)..(25): SEQ ID NO: 294; WAN0249SI; Start 75; Stop 99
tgtcttctcctaaaattgactttct

SEQ ID NO: 260266 - DNA, 25 bp, Artificial
  probe
  misc_feature (1)..(25): SEQ ID NO: 294; WAN0249SI; Start 77; Stop 101
tcttctcctaaaattgactttcttg

SEQ ID NO: 260267 - DNA, 25 bp, Artificial
  probe
  misc_feature (1)..(25): SEQ ID NO: 294; WAN0249SI; Start 68; Stop 92
ttaaccttgtcttctcctaaaattg

SEQ ID NO: 260268 - DNA, 25 bp, Artificial
  probe
  misc_feature (1)..(25): SEQ ID NO: 294; WAN0249SI; Start 31; Stop 55
aggtgtactgttatagattcaatat

SEQ ID NO: 260269 - DNA, 25 bp, Artificial
  probe
  misc_feature (1)..(25): SEQ ID NO: 294; WAN0249SI; Start 80; Stop 104
tctcctaaaattgactttcttgttt

SEQ ID NO: 260270 - DNA, 25 bp, Artificial
  probe
  misc_feature (1)..(25): SEQ ID NO: 294; WAN0249SI; Start 79; Stop 103
ttctcctaaaattgactttcttgtt

SEQ ID NO: 260271 - DNA, 25 bp, Artificial
  probe
  misc_feature (1)..(25): SEQ ID NO: 294; WAN0249SI; Start 74; Stop 98
ttgtcttctcctaaaattgactttc

SEQ ID NO: 260272 - DNA, 25 bp, Artificial
  probe
  misc_feature (1)..(25): SEQ ID NO: 294; WAN0249SI; Start 73; Stop 97
cttgtcttctcctaaaattgacttt

SEQ ID NO: 260273 - DNA, 25 bp, Artificial
  probe
  misc_feature (1)..(25): SEQ ID NO: 294; WAN0249SI; Start 20; Stop 44
tttagcagtcaaggtgtactgttat

SEQ ID NO: 260274 - DNA, 25 bp, Artificial
  probe
  misc_feature (1)..(25): SEQ ID NO: 294; WAN0249SI; Start 76; Stop 100
gtcttctcctaaaattgactttctt

SEQ ID NO: 260275 - DNA, 25 bp, Artificial
  probe
  misc_feature (1)..(25): SEQ ID NO: 294; WAN0249SI; Start 67; Stop 91
attaaccttgtcttctcctaaaatt

SEQ ID NO: 260276 - DNA, 25 bp, Artificial
  probe
  misc_feature (1)..(25): SEQ ID NO: 294; WAN0249SI; Start 65; Stop 89
ctattaaccttgtcttctcctaaaa

SEQ ID NO: 260277 - DNA, 25 bp, Artificial
  probe
  misc_feature (1)..(25): SEQ ID NO: 294; WAN0249SI; Start 82; Stop 106
tcctaaaattgactttcttgttttc

SEQ ID NO: 260278 - DNA, 25 bp, Artificial
  probe
  misc_feature (1)..(25): SEQ ID NO: 294; WAN0249SI; Start 83; Stop 107
cctaaaattgactttcttgttttct

SEQ ID NO: 260279 - DNA, 25 bp, Artificial
  probe
  misc_feature (1)..(25): SEQ ID NO: 294; WAN0249SI; Start 81; Stop 105
ctcctaaaattgactttcttgtttt

SEQ ID NO: 260280 - DNA, 25 bp, Artificial
  probe
  misc_feature (1)..(25): SEQ ID NO: 294; WAN0249SI; Start 66; Stop 90
tattaaccttgtcttctcctaaaat

SEQ ID NO: 260281 - DNA, 25 bp, Artificial
  probe
  misc_feature (1)..(25): SEQ ID NO: 295; WAN0249NK; Start 81; Stop 105
ttagaatgttcgtaatggaggactg

SEQ ID NO: 260282 - DNA, 25 bp, Artificial
  probe
  misc_feature (1)..(25): SEQ ID NO: 295; WAN0249NK; Start 82; Stop 106
tagaatgttcgtaatggaggactga

SEQ ID NO: 260283 - DNA, 25 bp, Artificial
  probe
  misc_feature (1)..(25): SEQ ID NO: 295; WAN0249NK; Start 80; Stop 104
attagaatgttcgtaatggaggact

SEQ ID NO: 260284 - DNA, 25 bp, Artificial
  probe
  misc_feature (1)..(25): SEQ ID NO: 295; WAN0249NK; Start 83; Stop 107
agaatgttcgtaatggaggactgaa

SEQ ID NO: 260285 - DNA, 25 bp, Artificial
  probe
  misc_feature (1)..(25): SEQ ID NO: 295; WAN0249NK; Start 79; Stop 103
tattagaatgttcgtaatggaggac

SEQ ID NO: 260286 - DNA, 25 bp, Artificial
  probe
  misc_feature (1)..(25): SEQ ID NO: 295; WAN0249NK; Start 78; Stop 102
atattagaatgttcgtaatggagga

SEQ ID NO: 260287 - DNA, 25 bp, Artificial
  probe
  misc_feature (1)..(25): SEQ ID NO: 295; WAN0249NK; Start 77; Stop 101
aatattagaatgttcgtaatggagg

SEQ ID NO: 260288 - DNA, 25 bp, Artificial
  probe
  misc_feature (1)..(25): SEQ ID NO: 295; WAN0249NK; Start 9; Stop 33
ttgtgaatttgtggatcttaaataa

SEQ ID NO: 260289 - DNA, 25 bp, Artificial
  probe
  misc_feature (1)..(25): SEQ ID NO: 295; WAN0249NK; Start 8; Stop 32
tttgtgaatttgtggatcttaaata

SEQ ID NO: 260290 - DNA, 25 bp, Artificial
  probe
  misc_feature (1)..(25): SEQ ID NO: 295; WAN0249NK; Start 10; Stop 34
tgtgaatttgtggatcttaaataat

SEQ ID NO: 260291 - DNA, 25 bp, Artificial
  probe
  misc_feature (1)..(25): SEQ ID NO: 295; WAN0249NK; Start 6; Stop 30
attttgtgaatttgtggatcttaaa

SEQ ID NO: 260292 - DNA, 25 bp, Artificial
  probe
  misc_feature (1)..(25): SEQ ID NO: 295; WAN0249NK; Start 7; Stop 31
ttttgtgaatttgtggatcttaaat

SEQ ID NO: 260293 - DNA, 25 bp, Artificial
  probe
  misc_feature (1)..(25): SEQ ID NO: 295; WAN0249NK; Start 5; Stop 29
aattttgtgaatttgtggatcttaa

SEQ ID NO: 260294 - DNA, 25 bp, Artificial
  probe
  misc_feature (1)..(25): SEQ ID NO: 295; WAN0249NK; Start 3; Stop 27
ttaattttgtgaatttgtggatctt

SEQ ID NO: 260295 - DNA, 25 bp, Artificial
  probe
  misc_feature (1)..(25): SEQ ID NO: 295; WAN0249NK; Start 2; Stop 26
attaattttgtgaatttgtggatct

SEQ ID NO: 260296 - DNA, 25 bp, Artificial
  probe
  misc_feature (1)..(25): SEQ ID NO: 295; WAN0249NK; Start 4; Stop 28
taattttgtgaatttgtggatctta

SEQ ID NO: 260297 - DNA, 25 bp, Artificial
  probe
  misc_feature (1)..(25): SEQ ID NO: 295; WAN0249NK; Start 1; Stop 25
aattaattttgtgaatttgtggatc

SEQ ID NO: 260298 - DNA, 25 bp, Artificial
  probe
  misc_feature (1)..(25): SEQ ID NO: 296; WAN024ARJ; Start 161; Stop 185
taagagtatcaaagtcaggaggaaa

SEQ ID NO: 260299 - DNA, 25 bp, Artificial
  probe
  misc_feature (1)..(25): SEQ ID NO: 296; WAN024ARJ; Start 160; Stop 184
ataagagtatcaaagtcaggaggaa

SEQ ID NO: 260300 - DNA, 25 bp, Artificial
  probe
  misc_feature (1)..(25): SEQ ID NO: 296; WAN024ARJ; Start 159; Stop 183
aataagagtatcaaagtcaggagga

SEQ ID NO: 260301 - DNA, 25 bp, Artificial
  probe
  misc_feature (1)..(25): SEQ ID NO: 296; WAN024ARJ; Start 158; Stop 182
taataagagtatcaaagtcaggagg

SEQ ID NO: 260302 - DNA, 25 bp, Artificial
  probe
  misc_feature (1)..(25): SEQ ID NO: 296; WAN024ARJ; Start 162; Stop 186
aagagtatcaaagtcaggaggaaaa

SEQ ID NO: 260303 - DNA, 25 bp, Artificial
  probe
  misc_feature (1)..(25): SEQ ID NO: 296; WAN024ARJ; Start 52; Stop 76
tcattacgagaatacaagaagatat

SEQ ID NO: 260304 - DNA, 25 bp, Artificial
  probe
  misc_feature (1)..(25): SEQ ID NO: 296; WAN024ARJ; Start 49; Stop 73
atatcattacgagaatacaagaaga

SEQ ID NO: 260305 - DNA, 25 bp, Artificial
  probe
  misc_feature (1)..(25): SEQ ID NO: 296; WAN024ARJ; Start 51; Stop 75
atcattacgagaatacaagaagata

SEQ ID NO: 260306 - DNA, 25 bp, Artificial
  probe
  misc_feature (1)..(25): SEQ ID NO: 296; WAN024ARJ; Start 50; Stop 74
tatcattacgagaatacaagaagat

SEQ ID NO: 260307 - DNA, 25 bp, Artificial
  probe
  misc_feature (1)..(25): SEQ ID NO: 296; WAN024ARJ; Start 57; Stop 81
acgagaatacaagaagatattgttc

SEQ ID NO: 260308 - DNA, 25 bp, Artificial
  probe
  misc_feature (1)..(25): SEQ ID NO: 296; WAN024ARJ; Start 58; Stop 82
cgagaatacaagaagatattgttct

SEQ ID NO: 260309 - DNA, 25 bp, Artificial
  probe
  misc_feature (1)..(25): SEQ ID NO: 296; WAN024ARJ; Start 157; Stop 181
ataataagagtatcaaagtcaggag

SEQ ID NO: 260310 - DNA, 25 bp, Artificial
  probe
  misc_feature (1)..(25): SEQ ID NO: 296; WAN024ARJ; Start 47; Stop 71
agatatcattacgagaatacaagaa

SEQ ID NO: 260311 - DNA, 25 bp, Artificial
  probe
  misc_feature (1)..(25): SEQ ID NO: 296; WAN024ARJ; Start 46; Stop 70
aagatatcattacgagaatacaaga

SEQ ID NO: 260312 - DNA, 25 bp, Artificial
  probe
  misc_feature (1)..(25): SEQ ID NO: 296; WAN024ARJ; Start 48; Stop 72
gatatcattacgagaatacaagaag

SEQ ID NO: 260313 - DNA, 25 bp, Artificial
  probe
  misc_feature (1)..(25): SEQ ID NO: 296; WAN024ARJ; Start 20; Stop 44
gtagtttgaaagtattgaaaatcgt

SEQ ID NO: 260314 - DNA, 25 bp, Artificial
  probe
  misc_feature (1)..(25): SEQ ID NO: 296; WAN024ARJ; Start 19; Stop 43
tgtagtttgaaagtattgaaaatcg

SEQ ID NO: 260315 - DNA, 25 bp, Artificial
  probe
  misc_feature (1)..(25): SEQ ID NO: 296; WAN024ARJ; Start 56; Stop 80
tacgagaatacaagaagatattgtt

SEQ ID NO: 260316 - DNA, 25 bp, Artificial
  probe
  misc_feature (1)..(25): SEQ ID NO: 296; WAN024ARJ; Start 55; Stop 79
ttacgagaatacaagaagatattgt

SEQ ID NO: 260317 - DNA, 25 bp, Artificial
  probe
  misc_feature (1)..(25): SEQ ID NO: 296; WAN024ARJ; Start 22; Stop 46
agtttgaaagtattgaaaatcgtaa

SEQ ID NO: 260318 - DNA, 25 bp, Artificial
  probe
  misc_feature (1)..(25): SEQ ID NO: 296; WAN024ARJ; Start 65; Stop 89
acaagaagatattgttctatttcca

SEQ ID NO: 260319 - DNA, 25 bp, Artificial
  probe
  misc_feature (1)..(25): SEQ ID NO: 296; WAN024ARJ; Start 25; Stop 49
ttgaaagtattgaaaatcgtaaaga

SEQ ID NO: 260320 - DNA, 25 bp, Artificial
  probe
  misc_feature (1)..(25): SEQ ID NO: 296; WAN024ARJ; Start 66; Stop 90
caagaagatattgttctatttccat

SEQ ID NO: 260321 - DNA, 25 bp, Artificial
  probe
  misc_feature (1)..(25): SEQ ID NO: 296; WAN024ARJ; Start 26; Stop 50
tgaaagtattgaaaatcgtaaagat

SEQ ID NO: 260322 - DNA, 25 bp, Artificial
  probe
  misc_feature (1)..(25): SEQ ID NO: 296; WAN024ARJ; Start 23; Stop 47
gtttgaaagtattgaaaatcgtaaa

SEQ ID NO: 260323 - DNA, 25 bp, Artificial
  probe
  misc_feature (1)..(25): SEQ ID NO: 296; WAN024ARJ; Start 21; Stop 45
tagtttgaaagtattgaaaatcgta

SEQ ID NO: 260324 - DNA, 25 bp, Artificial
  probe
  misc_feature (1)..(25): SEQ ID NO: 296; WAN024ARJ; Start 24; Stop 48
tttgaaagtattgaaaatcgtaaag

SEQ ID NO: 260325 - DNA, 25 bp, Artificial
  probe
  misc_feature (1)..(25): SEQ ID NO: 296; WAN024ARJ; Start 96; Stop 120
attacttctttccttaacaataagg

SEQ ID NO: 260326 - DNA, 25 bp, Artificial
  probe
  misc_feature (1)..(25): SEQ ID NO: 297; WAN0249DY; Start 42; Stop 66
aatagtgagagagacagcgagaaat

SEQ ID NO: 260327 - DNA, 25 bp, Artificial
  probe
  misc_feature (1)..(25): SEQ ID NO: 297; WAN0249DY; Start 41; Stop 65
aaatagtgagagagacagcgagaaa

SEQ ID NO: 260328 - DNA, 25 bp, Artificial
  probe
  misc_feature (1)..(25): SEQ ID NO: 297; WAN0249DY; Start 43; Stop 67
atagtgagagagacagcgagaaatg

SEQ ID NO: 260329 - DNA, 25 bp, Artificial
  probe
  misc_feature (1)..(25): SEQ ID NO: 297; WAN0249DY; Start 47; Stop 71
tgagagagacagcgagaaatgtaag

SEQ ID NO: 260330 - DNA, 25 bp, Artificial
  probe
  misc_feature (1)..(25): SEQ ID NO: 297; WAN0249DY; Start 46; Stop 70
gtgagagagacagcgagaaatgtaa

SEQ ID NO: 260331 - DNA, 25 bp, Artificial
  probe
  misc_feature (1)..(25): SEQ ID NO: 297; WAN0249DY; Start 129; Stop 153
aatagaagtctgtatataaggaggt

SEQ ID NO: 260332 - DNA, 25 bp, Artificial
  probe
  misc_feature (1)..(25): SEQ ID NO: 297; WAN0249DY; Start 45; Stop 69
agtgagagagacagcgagaaatgta

SEQ ID NO: 260333 - DNA, 25 bp, Artificial
  probe
  misc_feature (1)..(25): SEQ ID NO: 297; WAN0249DY; Start 44; Stop 68
tagtgagagagacagcgagaaatgt

SEQ ID NO: 260334 - DNA, 25 bp, Artificial
  probe
  misc_feature (1)..(25): SEQ ID NO: 297; WAN0249DY; Start 53; Stop 77
agacagcgagaaatgtaagcgattt

SEQ ID NO: 260335 - DNA, 25 bp, Artificial
  probe
  misc_feature (1)..(25): SEQ ID NO: 297; WAN0249DY; Start 40; Stop 64
aaaatagtgagagagacagcgagaa

SEQ ID NO: 260336 - DNA, 25 bp, Artificial
  probe
  misc_feature (1)..(25): SEQ ID NO: 297; WAN0249DY; Start 48; Stop 72
gagagagacagcgagaaatgtaagc

SEQ ID NO: 260337 - DNA, 25 bp, Artificial
  probe
  misc_feature (1)..(25): SEQ ID NO: 297; WAN0249DY; Start 52; Stop 76
gagacagcgagaaatgtaagcgatt

SEQ ID NO: 260338 - DNA, 25 bp, Artificial
  probe
  misc_feature (1)..(25): SEQ ID NO: 297; WAN0249DY; Start 131; Stop 155
tagaagtctgtatataaggaggtaa

SEQ ID NO: 260339 - DNA, 25 bp, Artificial
  probe
  misc_feature (1)..(25): SEQ ID NO: 297; WAN0249DY; Start 132; Stop 156
agaagtctgtatataaggaggtaaa

SEQ ID NO: 260340 - DNA, 25 bp, Artificial
  probe
  misc_feature (1)..(25): SEQ ID NO: 297; WAN0249DY; Start 78; Stop 102
ttatttcaaaagtgttacagggaac

SEQ ID NO: 260341 - DNA, 25 bp, Artificial
  probe
  misc_feature (1)..(25): SEQ ID NO: 297; WAN0249DY; Start 130; Stop 154
atagaagtctgtatataaggaggta

SEQ ID NO: 260342 - DNA, 25 bp, Artificial
  probe
  misc_feature (1)..(25): SEQ ID NO: 297; WAN0249DY; Start 119; Stop 143
ttcgtgatataatagaagtctgtat

SEQ ID NO: 260343 - DNA, 25 bp, Artificial
  probe
  misc_feature (1)..(25): SEQ ID NO: 297; WAN0249DY; Start 3; Stop 27
ttcacctcaatctttggtattatac

SEQ ID NO: 260344 - DNA, 25 bp, Artificial
  probe
  misc_feature (1)..(25): SEQ ID NO: 297; WAN0249DY; Start 93; Stop 117
tacagggaacaagaaaatttcaggt

SEQ ID NO: 260345 - DNA, 25 bp, Artificial
  probe
  misc_feature (1)..(25): SEQ ID NO: 297; WAN0249DY; Start 92; Stop 116
ttacagggaacaagaaaatttcagg

SEQ ID NO: 260346 - DNA, 25 bp, Artificial
  probe
  misc_feature (1)..(25): SEQ ID NO: 297; WAN0249DY; Start 95; Stop 119
cagggaacaagaaaatttcaggttt

SEQ ID NO: 260347 - DNA, 25 bp, Artificial
  probe
  misc_feature (1)..(25): SEQ ID NO: 297; WAN0249DY; Start 77; Stop 101
tttatttcaaaagtgttacagggaa

SEQ ID NO: 260348 - DNA, 25 bp, Artificial
  probe
  misc_feature (1)..(25): SEQ ID NO: 297; WAN0249DY; Start 1; Stop 25
aattcacctcaatctttggtattat

SEQ ID NO: 260349 - DNA, 25 bp, Artificial
  probe
  misc_feature (1)..(25): SEQ ID NO: 297; WAN0249DY; Start 54; Stop 78
gacagcgagaaatgtaagcgatttt

SEQ ID NO: 260350 - DNA, 25 bp, Artificial
  probe
  misc_feature (1)..(25): SEQ ID NO: 297; WAN0249DY; Start 51; Stop 75
agagacagcgagaaatgtaagcgat

SEQ ID NO: 260351 - DNA, 25 bp, Artificial
  probe
  misc_feature (1)..(25): SEQ ID NO: 297; WAN0249DY; Start 94; Stop 118
acagggaacaagaaaatttcaggtt

SEQ ID NO: 260352 - DNA, 25 bp, Artificial
  probe
  misc_feature (1)..(25): SEQ ID NO: 297; WAN0249DY; Start 91; Stop 115
gttacagggaacaagaaaatttcag

SEQ ID NO: 260353 - DNA, 25 bp, Artificial
  probe
  misc_feature (1)..(25): SEQ ID NO: 297; WAN0249DY; Start 96; Stop 120
agggaacaagaaaatttcaggtttt

SEQ ID NO: 260354 - DNA, 25 bp, Artificial
  probe
  misc_feature (1)..(25): SEQ ID NO: 297; WAN0249DY; Start 4; Stop 28
tcacctcaatctttggtattatacc

SEQ ID NO: 260355 - DNA, 25 bp, Artificial
  probe
  misc_feature (1)..(25): SEQ ID NO: 297; WAN0249DY; Start 113; Stop 137
caggttttcgtgatataatagaagt

SEQ ID NO: 260356 - DNA, 25 bp, Artificial
  probe
  misc_feature (1)..(25): SEQ ID NO: 297; WAN0249DY; Start 76; Stop 100
ttttatttcaaaagtgttacaggga

SEQ ID NO: 260357 - DNA, 25 bp, Artificial
  probe
  misc_feature (1)..(25): SEQ ID NO: 297; WAN0249DY; Start 134; Stop 158
aagtctgtatataaggaggtaaatc

SEQ ID NO: 260358 - DNA, 25 bp, Artificial
  probe
  misc_feature (1)..(25): SEQ ID NO: 297; WAN0249DY; Start 133; Stop 157
gaagtctgtatataaggaggtaaat

SEQ ID NO: 260359 - DNA, 25 bp, Artificial
  probe
  misc_feature (1)..(25): SEQ ID NO: 298; WAN024AQD; Start 39; Stop 63
ccataatttgcacagaaagggttaa

SEQ ID NO: 260360 - DNA, 25 bp, Artificial
  probe
  misc_feature (1)..(25): SEQ ID NO: 298; WAN024AQD; Start 35; Stop 59
tataccataatttgcacagaaaggg

SEQ ID NO: 260361 - DNA, 25 bp, Artificial
  probe
  misc_feature (1)..(25): SEQ ID NO: 298; WAN024AQD; Start 40; Stop 64
cataatttgcacagaaagggttaaa

SEQ ID NO: 260362 - DNA, 25 bp, Artificial
  probe
  misc_feature (1)..(25): SEQ ID NO: 298; WAN024AQD; Start 36; Stop 60
ataccataatttgcacagaaagggt

SEQ ID NO: 260363 - DNA, 25 bp, Artificial
  probe
  misc_feature (1)..(25): SEQ ID NO: 298; WAN024AQD; Start 38; Stop 62
accataatttgcacagaaagggtta

SEQ ID NO: 260364 - DNA, 25 bp, Artificial
  probe
  misc_feature (1)..(25): SEQ ID NO: 298; WAN024AQD; Start 37; Stop 61
taccataatttgcacagaaagggtt

SEQ ID NO: 260365 - DNA, 25 bp, Artificial
  probe
  misc_feature (1)..(25): SEQ ID NO: 298; WAN024AQD; Start 34; Stop 58
ttataccataatttgcacagaaagg

SEQ ID NO: 260366 - DNA, 25 bp, Artificial
  probe
  misc_feature (1)..(25): SEQ ID NO: 298; WAN024AQD; Start 41; Stop 65
ataatttgcacagaaagggttaaaa

SEQ ID NO: 260367 - DNA, 25 bp, Artificial
  probe
  misc_feature (1)..(25): SEQ ID NO: 298; WAN024AQD; Start 33; Stop 57
attataccataatttgcacagaaag

SEQ ID NO: 260368 - DNA, 25 bp, Artificial
  probe
  misc_feature (1)..(25): SEQ ID NO: 298; WAN024AQD; Start 11; Stop 35
attggtacaataacatcactttatt

SEQ ID NO: 260369 - DNA, 25 bp, Artificial
  probe
  misc_feature (1)..(25): SEQ ID NO: 298; WAN024AQD; Start 28; Stop 52
actttattataccataatttgcaca

SEQ ID NO: 260370 - DNA, 25 bp, Artificial
  probe
  misc_feature (1)..(25): SEQ ID NO: 299; WAN0249NP; Start 1; Stop 25
aattcttcctcctccaaatactttt

SEQ ID NO: 260371 - DNA, 25 bp, Artificial
  probe
  misc_feature (1)..(25): SEQ ID NO: 300; WAN0249G6; Start 7; Stop 31
aatcagtctgtgtaggcttagtatt

SEQ ID NO: 260372 - DNA, 25 bp, Artificial
  probe
  misc_feature (1)..(25): SEQ ID NO: 300; WAN0249G6; Start 11; Stop 35
agtctgtgtaggcttagtatttcaa

SEQ ID NO: 260373 - DNA, 25 bp, Artificial
  probe
  misc_feature (1)..(25): SEQ ID NO: 300; WAN0249G6; Start 10; Stop 34
cagtctgtgtaggcttagtatttca

SEQ ID NO: 260374 - DNA, 25 bp, Artificial
  probe
  misc_feature (1)..(25): SEQ ID NO: 300; WAN0249G6; Start 9; Stop 33
tcagtctgtgtaggcttagtatttc

SEQ ID NO: 260375 - DNA, 25 bp, Artificial
  probe
  misc_feature (1)..(25): SEQ ID NO: 300; WAN0249G6; Start 5; Stop 29
gaaatcagtctgtgtaggcttagta

SEQ ID NO: 260376 - DNA, 25 bp, Artificial
  probe
  misc_feature (1)..(25): SEQ ID NO: 300; WAN0249G6; Start 2; Stop 26
attgaaatcagtctgtgtaggctta

SEQ ID NO: 260377 - DNA, 25 bp, Artificial
  probe
  misc_feature (1)..(25): SEQ ID NO: 300; WAN0249G6; Start 3; Stop 27
ttgaaatcagtctgtgtaggcttag

SEQ ID NO: 260378 - DNA, 25 bp, Artificial
  probe
  misc_feature (1)..(25): SEQ ID NO: 300; WAN0249G6; Start 1; Stop 25
aattgaaatcagtctgtgtaggctt

SEQ ID NO: 260379 - DNA, 25 bp, Artificial
  probe
  misc_feature (1)..(25): SEQ ID NO: 300; WAN0249G6; Start 8; Stop 32
atcagtctgtgtaggcttagtattt

SEQ ID NO: 260380 - DNA, 25 bp, Artificial
  probe
  misc_feature (1)..(25): SEQ ID NO: 300; WAN0249G6; Start 6; Stop 30
aaatcagtctgtgtaggcttagtat

SEQ ID NO: 260381 - DNA, 25 bp, Artificial
  probe
  misc_feature (1)..(25): SEQ ID NO: 300; WAN0249G6; Start 12; Stop 36
gtctgtgtaggcttagtatttcaat

SEQ ID NO: 260382 - DNA, 25 bp, Artificial
  probe
  misc_feature (1)..(25): SEQ ID NO: 300; WAN0249G6; Start 4; Stop 28
tgaaatcagtctgtgtaggcttagt

SEQ ID NO: 260383 - DNA, 25 bp, Artificial
  probe
  misc_feature (1)..(25): SEQ ID NO: 300; WAN0249G6; Start 21; Stop 45
ggcttagtatttcaatagacttcct

SEQ ID NO: 260384 - DNA, 25 bp, Artificial
  probe
  misc_feature (1)..(25): SEQ ID NO: 300; WAN0249G6; Start 20; Stop 44
aggcttagtatttcaatagacttcc

SEQ ID NO: 260385 - DNA, 25 bp, Artificial
  probe
  misc_feature (1)..(25): SEQ ID NO: 300; WAN0249G6; Start 15; Stop 39
tgtgtaggcttagtatttcaataga

SEQ ID NO: 260386 - DNA, 25 bp, Artificial
  probe
  misc_feature (1)..(25): SEQ ID NO: 300; WAN0249G6; Start 13; Stop 37
tctgtgtaggcttagtatttcaata

SEQ ID NO: 260387 - DNA, 25 bp, Artificial
  probe
  misc_feature (1)..(25): SEQ ID NO: 300; WAN0249G6; Start 16; Stop 40
gtgtaggcttagtatttcaatagac

SEQ ID NO: 260388 - DNA, 25 bp, Artificial
  probe
  misc_feature (1)..(25): SEQ ID NO: 300; WAN0249G6; Start 14; Stop 38
ctgtgtaggcttagtatttcaatag

SEQ ID NO: 260389 - DNA, 25 bp, Artificial
  probe
  misc_feature (1)..(25): SEQ ID NO: 300; WAN0249G6; Start 23; Stop 47
cttagtatttcaatagacttcctgc

SEQ ID NO: 260390 - DNA, 25 bp, Artificial
  probe
  misc_feature (1)..(25): SEQ ID NO: 300; WAN0249G6; Start 22; Stop 46
gcttagtatttcaatagacttcctg

SEQ ID NO: 260391 - DNA, 25 bp, Artificial
  probe
  misc_feature (1)..(25): SEQ ID NO: 300; WAN0249G6; Start 17; Stop 41
tgtaggcttagtatttcaatagact

SEQ ID NO: 260392 - DNA, 25 bp, Artificial
  probe
  misc_feature (1)..(25): SEQ ID NO: 300; WAN0249G6; Start 26; Stop 50
agtatttcaatagacttcctgcaaa

SEQ ID NO: 260393 - DNA, 25 bp, Artificial
  probe
  misc_feature (1)..(25): SEQ ID NO: 300; WAN0249G6; Start 25; Stop 49
tagtatttcaatagacttcctgcaa

SEQ ID NO: 260394 - DNA, 25 bp, Artificial
  probe
  misc_feature (1)..(25): SEQ ID NO: 300; WAN0249G6; Start 24; Stop 48
ttagtatttcaatagacttcctgca

SEQ ID NO: 260395 - DNA, 25 bp, Artificial
  probe
  misc_feature (1)..(25): SEQ ID NO: 300; WAN0249G6; Start 18; Stop 42
gtaggcttagtatttcaatagactt

SEQ ID NO: 260396 - DNA, 25 bp, Artificial
  probe
  misc_feature (1)..(25): SEQ ID NO: 300; WAN0249G6; Start 19; Stop 43
taggcttagtatttcaatagacttc

SEQ ID NO: 260397 - DNA, 25 bp, Artificial
  probe
  misc_feature (1)..(25): SEQ ID NO: 300; WAN0249G6; Start 27; Stop 51
gtatttcaatagacttcctgcaaaa

SEQ ID NO: 260398 - DNA, 25 bp, Artificial
  probe
  misc_feature (1)..(25): SEQ ID NO: 301; WAN024A2F; Start 35; Stop 59
tcctaaatgccataatgctttcaat

SEQ ID NO: 260399 - DNA, 25 bp, Artificial
  probe
  misc_feature (1)..(25): SEQ ID NO: 301; WAN024A2F; Start 34; Stop 58
atcctaaatgccataatgctttcaa

SEQ ID NO: 260400 - DNA, 25 bp, Artificial
  probe
  misc_feature (1)..(25): SEQ ID NO: 301; WAN024A2F; Start 33; Stop 57
aatcctaaatgccataatgctttca

SEQ ID NO: 260401 - DNA, 25 bp, Artificial
  probe
  misc_feature (1)..(25): SEQ ID NO: 301; WAN024A2F; Start 41; Stop 65
atgccataatgctttcaattcttgt

SEQ ID NO: 260402 - DNA, 25 bp, Artificial
  probe
  misc_feature (1)..(25): SEQ ID NO: 301; WAN024A2F; Start 36; Stop 60
cctaaatgccataatgctttcaatt

SEQ ID NO: 260403 - DNA, 25 bp, Artificial
  probe
  misc_feature (1)..(25): SEQ ID NO: 301; WAN024A2F; Start 43; Stop 67
gccataatgctttcaattcttgtca

SEQ ID NO: 260404 - DNA, 25 bp, Artificial
  probe
  misc_feature (1)..(25): SEQ ID NO: 301; WAN024A2F; Start 42; Stop 66
tgccataatgctttcaattcttgtc

SEQ ID NO: 260405 - DNA, 25 bp, Artificial
  probe
  misc_feature (1)..(25): SEQ ID NO: 301; WAN024A2F; Start 40; Stop 64
aatgccataatgctttcaattcttg

SEQ ID NO: 260406 - DNA, 25 bp, Artificial
  probe
  misc_feature (1)..(25): SEQ ID NO: 301; WAN024A2F; Start 32; Stop 56
aaatcctaaatgccataatgctttc

SEQ ID NO: 260407 - DNA, 25 bp, Artificial
  probe
  misc_feature (1)..(25): SEQ ID NO: 301; WAN024A2F; Start 39; Stop 63
aaatgccataatgctttcaattctt

SEQ ID NO: 260408 - DNA, 25 bp, Artificial
  probe
  misc_feature (1)..(25): SEQ ID NO: 301; WAN024A2F; Start 44; Stop 68
ccataatgctttcaattcttgtcat

SEQ ID NO: 260409 - DNA, 25 bp, Artificial
  probe
  misc_feature (1)..(25): SEQ ID NO: 301; WAN024A2F; Start 38; Stop 62
taaatgccataatgctttcaattct

SEQ ID NO: 260410 - DNA, 25 bp, Artificial
  probe
  misc_feature (1)..(25): SEQ ID NO: 301; WAN024A2F; Start 37; Stop 61
ctaaatgccataatgctttcaattc

SEQ ID NO: 260411 - DNA, 25 bp, Artificial
  probe
  misc_feature (1)..(25): SEQ ID NO: 301; WAN024A2F; Start 31; Stop 55
taaatcctaaatgccataatgcttt

SEQ ID NO: 260412 - DNA, 25 bp, Artificial
  probe
  misc_feature (1)..(25): SEQ ID NO: 301; WAN024A2F; Start 30; Stop 54
ataaatcctaaatgccataatgctt

SEQ ID NO: 260413 - DNA, 25 bp, Artificial
  probe
  misc_feature (1)..(25): SEQ ID NO: 301; WAN024A2F; Start 29; Stop 53
tataaatcctaaatgccataatgct

SEQ ID NO: 260414 - DNA, 25 bp, Artificial
  probe
  misc_feature (1)..(25): SEQ ID NO: 301; WAN024A2F; Start 50; Stop 74
tgctttcaattcttgtcattttgtg

SEQ ID NO: 260415 - DNA, 25 bp, Artificial
  probe
  misc_feature (1)..(25): SEQ ID NO: 301; WAN024A2F; Start 51; Stop 75
gctttcaattcttgtcattttgtga

SEQ ID NO: 260416 - DNA, 25 bp, Artificial
  probe
  misc_feature (1)..(25): SEQ ID NO: 301; WAN024A2F; Start 28; Stop 52
ctataaatcctaaatgccataatgc

SEQ ID NO: 260417 - DNA, 25 bp, Artificial
  probe
  misc_feature (1)..(25): SEQ ID NO: 301; WAN024A2F; Start 49; Stop 73
atgctttcaattcttgtcattttgt

SEQ ID NO: 260418 - DNA, 25 bp, Artificial
  probe
  misc_feature (1)..(25): SEQ ID NO: 301; WAN024A2F; Start 92; Stop 116
tgaaagaaaatgaactaatccacag

SEQ ID NO: 260419 - DNA, 25 bp, Artificial
  probe
  misc_feature (1)..(25): SEQ ID NO: 301; WAN024A2F; Start 162; Stop 186
gcactaaacataatataaggagaga

SEQ ID NO: 260420 - DNA, 25 bp, Artificial
  probe
  misc_feature (1)..(25): SEQ ID NO: 301; WAN024A2F; Start 94; Stop 118
aaagaaaatgaactaatccacagtg

SEQ ID NO: 260421 - DNA, 25 bp, Artificial
  probe
  misc_feature (1)..(25): SEQ ID NO: 301; WAN024A2F; Start 93; Stop 117
gaaagaaaatgaactaatccacagt

SEQ ID NO: 260422 - DNA, 25 bp, Artificial
  probe
  misc_feature (1)..(25): SEQ ID NO: 301; WAN024A2F; Start 45; Stop 69
cataatgctttcaattcttgtcatt

SEQ ID NO: 260423 - DNA, 25 bp, Artificial
  probe
  misc_feature (1)..(25): SEQ ID NO: 301; WAN024A2F; Start 151; Stop 175
agtagctaactgcactaaacataat

SEQ ID NO: 260424 - DNA, 25 bp, Artificial
  probe
  misc_feature (1)..(25): SEQ ID NO: 301; WAN024A2F; Start 91; Stop 115
atgaaagaaaatgaactaatccaca

SEQ ID NO: 260425 - DNA, 25 bp, Artificial
  probe
  misc_feature (1)..(25): SEQ ID NO: 301; WAN024A2F; Start 159; Stop 183
actgcactaaacataatataaggag

SEQ ID NO: 260426 - DNA, 25 bp, Artificial
  probe
  misc_feature (1)..(25): SEQ ID NO: 301; WAN024A2F; Start 52; Stop 76
ctttcaattcttgtcattttgtgat

SEQ ID NO: 260427 - DNA, 25 bp, Artificial
  probe
  misc_feature (1)..(25): SEQ ID NO: 301; WAN024A2F; Start 161; Stop 185
tgcactaaacataatataaggagag

SEQ ID NO: 260428 - DNA, 25 bp, Artificial
  probe
  misc_feature (1)..(25): SEQ ID NO: 301; WAN024A2F; Start 160; Stop 184
ctgcactaaacataatataaggaga

SEQ ID NO: 260429 - DNA, 25 bp, Artificial
  probe
  misc_feature (1)..(25): SEQ ID NO: 301; WAN024A2F; Start 46; Stop 70
ataatgctttcaattcttgtcattt

SEQ ID NO: 260430 - DNA, 25 bp, Artificial
  probe
  misc_feature (1)..(25): SEQ ID NO: 301; WAN024A2F; Start 152; Stop 176
gtagctaactgcactaaacataata

SEQ ID NO: 260431 - DNA, 25 bp, Artificial
  probe
  misc_feature (1)..(25): SEQ ID NO: 302; WAN0249NI; Start 2; Stop 26
atttagtaaacaaagggacagatgt

SEQ ID NO: 260432 - DNA, 25 bp, Artificial
  probe
  misc_feature (1)..(25): SEQ ID NO: 302; WAN0249NI; Start 1; Stop 25
aatttagtaaacaaagggacagatg

SEQ ID NO: 260433 - DNA, 25 bp, Artificial
  probe
  misc_feature (1)..(25): SEQ ID NO: 302; WAN0249NI; Start 3; Stop 27
tttagtaaacaaagggacagatgtt

SEQ ID NO: 260434 - DNA, 25 bp, Artificial
  probe
  misc_feature (1)..(25): SEQ ID NO: 303; WAN024ALI; Start 43; Stop 67
cctttcctatcatttcaatagaaga

SEQ ID NO: 260435 - DNA, 25 bp, Artificial
  probe
  misc_feature (1)..(25): SEQ ID NO: 303; WAN024ALI; Start 42; Stop 66
tcctttcctatcatttcaatagaag

SEQ ID NO: 260436 - DNA, 25 bp, Artificial
  probe
  misc_feature (1)..(25): SEQ ID NO: 303; WAN024ALI; Start 35; Stop 59
gttcttttcctttcctatcatttca

SEQ ID NO: 260437 - DNA, 25 bp, Artificial
  probe
  misc_feature (1)..(25): SEQ ID NO: 303; WAN024ALI; Start 47; Stop 71
tcctatcatttcaatagaagaatcc

SEQ ID NO: 260438 - DNA, 25 bp, Artificial
  probe
  misc_feature (1)..(25): SEQ ID NO: 303; WAN024ALI; Start 48; Stop 72
cctatcatttcaatagaagaatcct

SEQ ID NO: 260439 - DNA, 25 bp, Artificial
  probe
  misc_feature (1)..(25): SEQ ID NO: 303; WAN024ALI; Start 41; Stop 65
ttcctttcctatcatttcaatagaa

SEQ ID NO: 260440 - DNA, 25 bp, Artificial
  probe
  misc_feature (1)..(25): SEQ ID NO: 303; WAN024ALI; Start 40; Stop 64
tttcctttcctatcatttcaataga

SEQ ID NO: 260441 - DNA, 25 bp, Artificial
  probe
  misc_feature (1)..(25): SEQ ID NO: 303; WAN024ALI; Start 36; Stop 60
ttcttttcctttcctatcatttcaa

SEQ ID NO: 260442 - DNA, 25 bp, Artificial
  probe
  misc_feature (1)..(25): SEQ ID NO: 303; WAN024ALI; Start 37; Stop 61
tcttttcctttcctatcatttcaat

SEQ ID NO: 260443 - DNA, 25 bp, Artificial
  probe
  misc_feature (1)..(25): SEQ ID NO: 303; WAN024ALI; Start 50; Stop 74
tatcatttcaatagaagaatcctct

SEQ ID NO: 260444 - DNA, 25 bp, Artificial
  probe
  misc_feature (1)..(25): SEQ ID NO: 303; WAN024ALI; Start 51; Stop 75
atcatttcaatagaagaatcctctt

SEQ ID NO: 260445 - DNA, 25 bp, Artificial
  probe
  misc_feature (1)..(25): SEQ ID NO: 303; WAN024ALI; Start 49; Stop 73
ctatcatttcaatagaagaatcctc

SEQ ID NO: 260446 - DNA, 25 bp, Artificial
  probe
  misc_feature (1)..(25): SEQ ID NO: 303; WAN024ALI; Start 38; Stop 62
cttttcctttcctatcatttcaata

SEQ ID NO: 260447 - DNA, 25 bp, Artificial
  probe
  misc_feature (1)..(25): SEQ ID NO: 303; WAN024ALI; Start 39; Stop 63
ttttcctttcctatcatttcaatag

SEQ ID NO: 260448 - DNA, 25 bp, Artificial
  probe
  misc_feature (1)..(25): SEQ ID NO: 304; WAN024AG5; Start 118; Stop 142
acacacgctctacctttctttattt

SEQ ID NO: 260449 - DNA, 25 bp, Artificial
  probe
  misc_feature (1)..(25): SEQ ID NO: 304; WAN024AG5; Start 117; Stop 141
aacacacgctctacctttctttatt

SEQ ID NO: 260450 - DNA, 25 bp, Artificial
  probe
  misc_feature (1)..(25): SEQ ID NO: 304; WAN024AG5; Start 116; Stop 140
aaacacacgctctacctttctttat

SEQ ID NO: 260451 - DNA, 25 bp, Artificial
  probe
  misc_feature (1)..(25): SEQ ID NO: 304; WAN024AG5; Start 153; Stop 177
attgagaaagataccaaacccatca

SEQ ID NO: 260452 - DNA, 25 bp, Artificial
  probe
  misc_feature (1)..(25): SEQ ID NO: 304; WAN024AG5; Start 155; Stop 179
tgagaaagataccaaacccatcaaa

SEQ ID NO: 260453 - DNA, 25 bp, Artificial
  probe
  misc_feature (1)..(25): SEQ ID NO: 304; WAN024AG5; Start 4; Stop 28
ttatgatacaaagagcgagaagaaa

SEQ ID NO: 260454 - DNA, 25 bp, Artificial
  probe
  misc_feature (1)..(25): SEQ ID NO: 304; WAN024AG5; Start 3; Stop 27
tttatgatacaaagagcgagaagaa

SEQ ID NO: 260455 - DNA, 25 bp, Artificial
  probe
  misc_feature (1)..(25): SEQ ID NO: 304; WAN024AG5; Start 2; Stop 26
atttatgatacaaagagcgagaaga

SEQ ID NO: 260456 - DNA, 25 bp, Artificial
  probe
  misc_feature (1)..(25): SEQ ID NO: 304; WAN024AG5; Start 152; Stop 176
tattgagaaagataccaaacccatc

SEQ ID NO: 260457 - DNA, 25 bp, Artificial
  probe
  misc_feature (1)..(25): SEQ ID NO: 304; WAN024AG5; Start 151; Stop 175
atattgagaaagataccaaacccat

SEQ ID NO: 260458 - DNA, 25 bp, Artificial
  probe
  misc_feature (1)..(25): SEQ ID NO: 304; WAN024AG5; Start 37; Stop 61
aaattaggaacctgacgagaaatcc

SEQ ID NO: 260459 - DNA, 25 bp, Artificial
  probe
  misc_feature (1)..(25): SEQ ID NO: 304; WAN024AG5; Start 1; Stop 25
aatttatgatacaaagagcgagaag

SEQ ID NO: 260460 - DNA, 25 bp, Artificial
  probe
  misc_feature (1)..(25): SEQ ID NO: 304; WAN024AG5; Start 150; Stop 174
tatattgagaaagataccaaaccca

SEQ ID NO: 260461 - DNA, 25 bp, Artificial
  probe
  misc_feature (1)..(25): SEQ ID NO: 304; WAN024AG5; Start 119; Stop 143
cacacgctctacctttctttatttt

SEQ ID NO: 260462 - DNA, 25 bp, Artificial
  probe
  misc_feature (1)..(25): SEQ ID NO: 304; WAN024AG5; Start 77; Stop 101
attatctattttccgagttttccgc

SEQ ID NO: 260463 - DNA, 25 bp, Artificial
  probe
  misc_feature (1)..(25): SEQ ID NO: 304; WAN024AG5; Start 6; Stop 30
atgatacaaagagcgagaagaaaac

SEQ ID NO: 260464 - DNA, 25 bp, Artificial
  probe
  misc_feature (1)..(25): SEQ ID NO: 304; WAN024AG5; Start 78; Stop 102
ttatctattttccgagttttccgct

SEQ ID NO: 260465 - DNA, 25 bp, Artificial
  probe
  misc_feature (1)..(25): SEQ ID NO: 304; WAN024AG5; Start 156; Stop 180
gagaaagataccaaacccatcaaaa

SEQ ID NO: 260466 - DNA, 25 bp, Artificial
  probe
  misc_feature (1)..(25): SEQ ID NO: 304; WAN024AG5; Start 24; Stop 48
agaaaacgactgaaaattaggaacc

SEQ ID NO: 260467 - DNA, 25 bp, Artificial
  probe
  misc_feature (1)..(25): SEQ ID NO: 304; WAN024AG5; Start 115; Stop 139
aaaacacacgctctacctttcttta

SEQ ID NO: 260468 - DNA, 25 bp, Artificial
  probe
  misc_feature (1)..(25): SEQ ID NO: 304; WAN024AG5; Start 18; Stop 42
gcgagaagaaaacgactgaaaatta

SEQ ID NO: 260469 - DNA, 25 bp, Artificial
  probe
  misc_feature (1)..(25): SEQ ID NO: 304; WAN024AG5; Start 26; Stop 50
aaaacgactgaaaattaggaacctg

SEQ ID NO: 260470 - DNA, 25 bp, Artificial
  probe
  misc_feature (1)..(25): SEQ ID NO: 304; WAN024AG5; Start 25; Stop 49
gaaaacgactgaaaattaggaacct

SEQ ID NO: 260471 - DNA, 25 bp, Artificial
  probe
  misc_feature (1)..(25): SEQ ID NO: 304; WAN024AG5; Start 34; Stop 58
tgaaaattaggaacctgacgagaaa

SEQ ID NO: 260472 - DNA, 25 bp, Artificial
  probe
  misc_feature (1)..(25): SEQ ID NO: 304; WAN024AG5; Start 27; Stop 51
aaacgactgaaaattaggaacctga

SEQ ID NO: 260473 - DNA, 25 bp, Artificial
  probe
  misc_feature (1)..(25): SEQ ID NO: 304; WAN024AG5; Start 36; Stop 60
aaaattaggaacctgacgagaaatc

SEQ ID NO: 260474 - DNA, 25 bp, Artificial
  probe
  misc_feature (1)..(25): SEQ ID NO: 304; WAN024AG5; Start 35; Stop 59
gaaaattaggaacctgacgagaaat

SEQ ID NO: 260475 - DNA, 25 bp, Artificial
  probe
  misc_feature (1)..(25): SEQ ID NO: 304; WAN024AG5; Start 154; Stop 178
ttgagaaagataccaaacccatcaa

SEQ ID NO: 260476 - DNA, 25 bp, Artificial
  probe
  misc_feature (1)..(25): SEQ ID NO: 304; WAN024AG5; Start 33; Stop 57
ctgaaaattaggaacctgacgagaa

SEQ ID NO: 260477 - DNA, 25 bp, Artificial
  probe
  misc_feature (1)..(25): SEQ ID NO: 304; WAN024AG5; Start 8; Stop 32
gatacaaagagcgagaagaaaacga

SEQ ID NO: 260478 - DNA, 25 bp, Artificial
  probe
  misc_feature (1)..(25): SEQ ID NO: 304; WAN024AG5; Start 19; Stop 43
cgagaagaaaacgactgaaaattag

SEQ ID NO: 260479 - DNA, 25 bp, Artificial
  probe
  misc_feature (1)..(25): SEQ ID NO: 304; WAN024AG5; Start 120; Stop 144
acacgctctacctttctttatttta

SEQ ID NO: 260480 - DNA, 25 bp, Artificial
  probe
  misc_feature (1)..(25): SEQ ID NO: 304; WAN024AG5; Start 149; Stop 173
ttatattgagaaagataccaaaccc

SEQ ID NO: 260481 - DNA, 25 bp, Artificial
  probe
  misc_feature (1)..(25): SEQ ID NO: 305; WAN024A2Q; Start 83; Stop 107
gcatataacgcagattcctttcaat

SEQ ID NO: 260482 - DNA, 25 bp, Artificial
  probe
  misc_feature (1)..(25): SEQ ID NO: 305; WAN024A2Q; Start 81; Stop 105
tagcatataacgcagattcctttca

SEQ ID NO: 260483 - DNA, 25 bp, Artificial
  probe
  misc_feature (1)..(25): SEQ ID NO: 305; WAN024A2Q; Start 82; Stop 106
agcatataacgcagattcctttcaa

SEQ ID NO: 260484 - DNA, 25 bp, Artificial
  probe
  misc_feature (1)..(25): SEQ ID NO: 305; WAN024A2Q; Start 80; Stop 104
atagcatataacgcagattcctttc

SEQ ID NO: 260485 - DNA, 25 bp, Artificial
  probe
  misc_feature (1)..(25): SEQ ID NO: 305; WAN024A2Q; Start 158; Stop 182
actgccgatatttatctctcatctc

SEQ ID NO: 260486 - DNA, 25 bp, Artificial
  probe
  misc_feature (1)..(25): SEQ ID NO: 305; WAN024A2Q; Start 157; Stop 181
gactgccgatatttatctctcatct

SEQ ID NO: 260487 - DNA, 25 bp, Artificial
  probe
  misc_feature (1)..(25): SEQ ID NO: 305; WAN024A2Q; Start 159; Stop 183
ctgccgatatttatctctcatctct

SEQ ID NO: 260488 - DNA, 25 bp, Artificial
  probe
  misc_feature (1)..(25): SEQ ID NO: 305; WAN024A2Q; Start 78; Stop 102
ttatagcatataacgcagattcctt

SEQ ID NO: 260489 - DNA, 25 bp, Artificial
  probe
  misc_feature (1)..(25): SEQ ID NO: 305; WAN024A2Q; Start 160; Stop 184
tgccgatatttatctctcatctctt

SEQ ID NO: 260490 - DNA, 25 bp, Artificial
  probe
  misc_feature (1)..(25): SEQ ID NO: 305; WAN024A2Q; Start 156; Stop 180
agactgccgatatttatctctcatc

SEQ ID NO: 260491 - DNA, 25 bp, Artificial
  probe
  misc_feature (1)..(25): SEQ ID NO: 305; WAN024A2Q; Start 154; Stop 178
gaagactgccgatatttatctctca

SEQ ID NO: 260492 - DNA, 25 bp, Artificial
  probe
  misc_feature (1)..(25): SEQ ID NO: 305; WAN024A2Q; Start 155; Stop 179
aagactgccgatatttatctctcat

SEQ ID NO: 260493 - DNA, 25 bp, Artificial
  probe
  misc_feature (1)..(25): SEQ ID NO: 305; WAN024A2Q; Start 77; Stop 101
attatagcatataacgcagattcct

SEQ ID NO: 260494 - DNA, 25 bp, Artificial
  probe
  misc_feature (1)..(25): SEQ ID NO: 305; WAN024A2Q; Start 153; Stop 177
cgaagactgccgatatttatctctc

SEQ ID NO: 260495 - DNA, 25 bp, Artificial
  probe
  misc_feature (1)..(25): SEQ ID NO: 305; WAN024A2Q; Start 161; Stop 185
gccgatatttatctctcatctcttt

SEQ ID NO: 260496 - DNA, 25 bp, Artificial
  probe
  misc_feature (1)..(25): SEQ ID NO: 305; WAN024A2Q; Start 79; Stop 103
tatagcatataacgcagattccttt

SEQ ID NO: 260497 - DNA, 25 bp, Artificial
  probe
  misc_feature (1)..(25): SEQ ID NO: 305; WAN024A2Q; Start 76; Stop 100
aattatagcatataacgcagattcc

SEQ ID NO: 260498 - DNA, 25 bp, Artificial
  probe
  misc_feature (1)..(25): SEQ ID NO: 305; WAN024A2Q; Start 152; Stop 176
ccgaagactgccgatatttatctct

SEQ ID NO: 260499 - DNA, 25 bp, Artificial
  probe
  misc_feature (1)..(25): SEQ ID NO: 305; WAN024A2Q; Start 151; Stop 175
tccgaagactgccgatatttatctc

SEQ ID NO: 260500 - DNA, 25 bp, Artificial
  probe
  misc_feature (1)..(25): SEQ ID NO: 305; WAN024A2Q; Start 72; Stop 96
acctaattatagcatataacgcaga

SEQ ID NO: 260501 - DNA, 25 bp, Artificial
  probe
  misc_feature (1)..(25): SEQ ID NO: 305; WAN024A2Q; Start 92; Stop 116
gcagattcctttcaatcgtatgatt

SEQ ID NO: 260502 - DNA, 25 bp, Artificial
  probe
  misc_feature (1)..(25): SEQ ID NO: 305; WAN024A2Q; Start 85; Stop 109
atataacgcagattcctttcaatcg

SEQ ID NO: 260503 - DNA, 25 bp, Artificial
  probe
  misc_feature (1)..(25): SEQ ID NO: 305; WAN024A2Q; Start 98; Stop 122
tcctttcaatcgtatgatttactgc

SEQ ID NO: 260504 - DNA, 25 bp, Artificial
  probe
  misc_feature (1)..(25): SEQ ID NO: 305; WAN024A2Q; Start 84; Stop 108
catataacgcagattcctttcaatc

SEQ ID NO: 260505 - DNA, 25 bp, Artificial
  probe
  misc_feature (1)..(25): SEQ ID NO: 305; WAN024A2Q; Start 91; Stop 115
cgcagattcctttcaatcgtatgat

SEQ ID NO: 260506 - DNA, 25 bp, Artificial
  probe
  misc_feature (1)..(25): SEQ ID NO: 305; WAN024A2Q; Start 150; Stop 174
gtccgaagactgccgatatttatct

SEQ ID NO: 260507 - DNA, 25 bp, Artificial
  probe
  misc_feature (1)..(25): SEQ ID NO: 305; WAN024A2Q; Start 93; Stop 117
cagattcctttcaatcgtatgattt

SEQ ID NO: 260508 - DNA, 25 bp, Artificial
  probe
  misc_feature (1)..(25): SEQ ID NO: 305; WAN024A2Q; Start 73; Stop 97
cctaattatagcatataacgcagat

SEQ ID NO: 260509 - DNA, 25 bp, Artificial
  probe
  misc_feature (1)..(25): SEQ ID NO: 305; WAN024A2Q; Start 97; Stop 121
ttcctttcaatcgtatgatttactg

SEQ ID NO: 260510 - DNA, 25 bp, Artificial
  probe
  misc_feature (1)..(25): SEQ ID NO: 305; WAN024A2Q; Start 88; Stop 112
taacgcagattcctttcaatcgtat

SEQ ID NO: 260511 - DNA, 25 bp, Artificial
  probe
  misc_feature (1)..(25): SEQ ID NO: 305; WAN024A2Q; Start 87; Stop 111
ataacgcagattcctttcaatcgta

SEQ ID NO: 260512 - DNA, 25 bp, Artificial
  probe
  misc_feature (1)..(25): SEQ ID NO: 305; WAN024A2Q; Start 86; Stop 110
tataacgcagattcctttcaatcgt

SEQ ID NO: 260513 - DNA, 25 bp, Artificial
  probe
  misc_feature (1)..(25): SEQ ID NO: 305; WAN024A2Q; Start 99; Stop 123
cctttcaatcgtatgatttactgca

SEQ ID NO: 260514 - DNA, 25 bp, Artificial
  probe
  misc_feature (1)..(25): SEQ ID NO: 306; WAN024AED; Start 94; Stop 118
tcagaaaattatgggaggtagtcaa

SEQ ID NO: 260515 - DNA, 25 bp, Artificial
  probe
  misc_feature (1)..(25): SEQ ID NO: 306; WAN024AED; Start 93; Stop 117
atcagaaaattatgggaggtagtca

SEQ ID NO: 260516 - DNA, 25 bp, Artificial
  probe
  misc_feature (1)..(25): SEQ ID NO: 306; WAN024AED; Start 96; Stop 120
agaaaattatgggaggtagtcaaac

SEQ ID NO: 260517 - DNA, 25 bp, Artificial
  probe
  misc_feature (1)..(25): SEQ ID NO: 306; WAN024AED; Start 95; Stop 119
cagaaaattatgggaggtagtcaaa

SEQ ID NO: 260518 - DNA, 25 bp, Artificial
  probe
  misc_feature (1)..(25): SEQ ID NO: 306; WAN024AED; Start 92; Stop 116
tatcagaaaattatgggaggtagtc

SEQ ID NO: 260519 - DNA, 25 bp, Artificial
  probe
  misc_feature (1)..(25): SEQ ID NO: 306; WAN024AED; Start 88; Stop 112
tcattatcagaaaattatgggaggt

SEQ ID NO: 260520 - DNA, 25 bp, Artificial
  probe
  misc_feature (1)..(25): SEQ ID NO: 306; WAN024AED; Start 91; Stop 115
ttatcagaaaattatgggaggtagt

SEQ ID NO: 260521 - DNA, 25 bp, Artificial
  probe
  misc_feature (1)..(25): SEQ ID NO: 306; WAN024AED; Start 87; Stop 111
atcattatcagaaaattatgggagg

SEQ ID NO: 260522 - DNA, 25 bp, Artificial
  probe
  misc_feature (1)..(25): SEQ ID NO: 306; WAN024AED; Start 89; Stop 113
cattatcagaaaattatgggaggta

SEQ ID NO: 260523 - DNA, 25 bp, Artificial
  probe
  misc_feature (1)..(25): SEQ ID NO: 306; WAN024AED; Start 90; Stop 114
attatcagaaaattatgggaggtag

SEQ ID NO: 260524 - DNA, 25 bp, Artificial
  probe
  misc_feature (1)..(25): SEQ ID NO: 306; WAN024AED; Start 1; Stop 25
aatttcaaattgagtagctaagaga

SEQ ID NO: 260525 - DNA, 25 bp, Artificial
  probe
  misc_feature (1)..(25): SEQ ID NO: 306; WAN024AED; Start 2; Stop 26
atttcaaattgagtagctaagagat

SEQ ID NO: 260526 - DNA, 25 bp, Artificial
  probe
  misc_feature (1)..(25): SEQ ID NO: 306; WAN024AED; Start 4; Stop 28
ttcaaattgagtagctaagagataa

SEQ ID NO: 260527 - DNA, 25 bp, Artificial
  probe
  misc_feature (1)..(25): SEQ ID NO: 306; WAN024AED; Start 3; Stop 27
tttcaaattgagtagctaagagata

SEQ ID NO: 260528 - DNA, 25 bp, Artificial
  probe
  misc_feature (1)..(25): SEQ ID NO: 306; WAN024AED; Start 5; Stop 29
tcaaattgagtagctaagagataat

SEQ ID NO: 260529 - DNA, 25 bp, Artificial
  probe
  misc_feature (1)..(25): SEQ ID NO: 306; WAN024AED; Start 86; Stop 110
aatcattatcagaaaattatgggag

SEQ ID NO: 260530 - DNA, 25 bp, Artificial
  probe
  misc_feature (1)..(25): SEQ ID NO: 306; WAN024AED; Start 10; Stop 34
ttgagtagctaagagataatatagc

SEQ ID NO: 260531 - DNA, 25 bp, Artificial
  probe
  misc_feature (1)..(25): SEQ ID NO: 307; WAN0249MA; Start 50; Stop 74
tattgactaagagactgaaggttct

SEQ ID NO: 260532 - DNA, 25 bp, Artificial
  probe
  misc_feature (1)..(25): SEQ ID NO: 307; WAN0249MA; Start 49; Stop 73
ttattgactaagagactgaaggttc

SEQ ID NO: 260533 - DNA, 25 bp, Artificial
  probe
  misc_feature (1)..(25): SEQ ID NO: 307; WAN0249MA; Start 61; Stop 85
agactgaaggttctctaacttgagc

SEQ ID NO: 260534 - DNA, 25 bp, Artificial
  probe
  misc_feature (1)..(25): SEQ ID NO: 307; WAN0249MA; Start 17; Stop 41
aatgtgataacgatttagggagtct

SEQ ID NO: 260535 - DNA, 25 bp, Artificial
  probe
  misc_feature (1)..(25): SEQ ID NO: 307; WAN0249MA; Start 48; Stop 72
cttattgactaagagactgaaggtt

SEQ ID NO: 260536 - DNA, 25 bp, Artificial
  probe
  misc_feature (1)..(25): SEQ ID NO: 307; WAN0249MA; Start 20; Stop 44
gtgataacgatttagggagtctctt

SEQ ID NO: 260537 - DNA, 25 bp, Artificial
  probe
  misc_feature (1)..(25): SEQ ID NO: 307; WAN0249MA; Start 18; Stop 42
atgtgataacgatttagggagtctc

SEQ ID NO: 260538 - DNA, 25 bp, Artificial
  probe
  misc_feature (1)..(25): SEQ ID NO: 307; WAN0249MA; Start 19; Stop 43
tgtgataacgatttagggagtctct

SEQ ID NO: 260539 - DNA, 25 bp, Artificial
  probe
  misc_feature (1)..(25): SEQ ID NO: 307; WAN0249MA; Start 21; Stop 45
tgataacgatttagggagtctctta

SEQ ID NO: 260540 - DNA, 25 bp, Artificial
  probe
  misc_feature (1)..(25): SEQ ID NO: 307; WAN0249MA; Start 63; Stop 87
actgaaggttctctaacttgagctt

SEQ ID NO: 260541 - DNA, 25 bp, Artificial
  probe
  misc_feature (1)..(25): SEQ ID NO: 307; WAN0249MA; Start 62; Stop 86
gactgaaggttctctaacttgagct

SEQ ID NO: 260542 - DNA, 25 bp, Artificial
  probe
  misc_feature (1)..(25): SEQ ID NO: 307; WAN0249MA; Start 16; Stop 40
aaatgtgataacgatttagggagtc

SEQ ID NO: 260543 - DNA, 25 bp, Artificial
  probe
  misc_feature (1)..(25): SEQ ID NO: 307; WAN0249MA; Start 22; Stop 46
gataacgatttagggagtctcttaa

SEQ ID NO: 260544 - DNA, 25 bp, Artificial
  probe
  misc_feature (1)..(25): SEQ ID NO: 307; WAN0249MA; Start 26; Stop 50
acgatttagggagtctcttaatctt

SEQ ID NO: 260545 - DNA, 25 bp, Artificial
  probe
  misc_feature (1)..(25): SEQ ID NO: 307; WAN0249MA; Start 25; Stop 49
aacgatttagggagtctcttaatct

SEQ ID NO: 260546 - DNA, 25 bp, Artificial
  probe
  misc_feature (1)..(25): SEQ ID NO: 307; WAN0249MA; Start 64; Stop 88
ctgaaggttctctaacttgagcttt

SEQ ID NO: 260547 - DNA, 25 bp, Artificial
  probe
  misc_feature (1)..(25): SEQ ID NO: 307; WAN0249MA; Start 51; Stop 75
attgactaagagactgaaggttctc

SEQ ID NO: 260548 - DNA, 25 bp, Artificial
  probe
  misc_feature (1)..(25): SEQ ID NO: 307; WAN0249MA; Start 60; Stop 84
gagactgaaggttctctaacttgag

SEQ ID NO: 260549 - DNA, 25 bp, Artificial
  probe
  misc_feature (1)..(25): SEQ ID NO: 307; WAN0249MA; Start 23; Stop 47
ataacgatttagggagtctcttaat

SEQ ID NO: 260550 - DNA, 25 bp, Artificial
  probe
  misc_feature (1)..(25): SEQ ID NO: 307; WAN0249MA; Start 24; Stop 48
taacgatttagggagtctcttaatc

SEQ ID NO: 260551 - DNA, 25 bp, Artificial
  probe
  misc_feature (1)..(25): SEQ ID NO: 307; WAN0249MA; Start 32; Stop 56
tagggagtctcttaatcttattgac

SEQ ID NO: 260552 - DNA, 25 bp, Artificial
  probe
  misc_feature (1)..(25): SEQ ID NO: 307; WAN0249MA; Start 31; Stop 55
ttagggagtctcttaatcttattga

SEQ ID NO: 260553 - DNA, 25 bp, Artificial
  probe
  misc_feature (1)..(25): SEQ ID NO: 307; WAN0249MA; Start 27; Stop 51
cgatttagggagtctcttaatctta

SEQ ID NO: 260554 - DNA, 25 bp, Artificial
  probe
  misc_feature (1)..(25): SEQ ID NO: 307; WAN0249MA; Start 47; Stop 71
tcttattgactaagagactgaaggt

SEQ ID NO: 260555 - DNA, 25 bp, Artificial
  probe
  misc_feature (1)..(25): SEQ ID NO: 307; WAN0249MA; Start 15; Stop 39
aaaatgtgataacgatttagggagt

SEQ ID NO: 260556 - DNA, 25 bp, Artificial
  probe
  misc_feature (1)..(25): SEQ ID NO: 307; WAN0249MA; Start 46; Stop 70
atcttattgactaagagactgaagg

SEQ ID NO: 260557 - DNA, 25 bp, Artificial
  probe
  misc_feature (1)..(25): SEQ ID NO: 307; WAN0249MA; Start 30; Stop 54
tttagggagtctcttaatcttattg

SEQ ID NO: 260558 - DNA, 25 bp, Artificial
  probe
  misc_feature (1)..(25): SEQ ID NO: 307; WAN0249MA; Start 65; Stop 89
tgaaggttctctaacttgagctttt

SEQ ID NO: 260559 - DNA, 25 bp, Artificial
  probe
  misc_feature (1)..(25): SEQ ID NO: 307; WAN0249MA; Start 69; Stop 93
ggttctctaacttgagcttttatgt

SEQ ID NO: 260560 - DNA, 25 bp, Artificial
  probe
  misc_feature (1)..(25): SEQ ID NO: 307; WAN0249MA; Start 68; Stop 92
aggttctctaacttgagcttttatg

SEQ ID NO: 260561 - DNA, 25 bp, Artificial
  probe
  misc_feature (1)..(25): SEQ ID NO: 307; WAN0249MA; Start 66; Stop 90
gaaggttctctaacttgagctttta

SEQ ID NO: 260562 - DNA, 25 bp, Artificial
  probe
  misc_feature (1)..(25): SEQ ID NO: 307; WAN0249MA; Start 33; Stop 57
agggagtctcttaatcttattgact

SEQ ID NO: 260563 - DNA, 25 bp, Artificial
  probe
  misc_feature (1)..(25): SEQ ID NO: 307; WAN0249MA; Start 67; Stop 91
aaggttctctaacttgagcttttat

SEQ ID NO: 260564 - DNA, 25 bp, Artificial
  probe
  misc_feature (1)..(25): SEQ ID NO: 308; WAN024AN7; Start 55; Stop 79
tttctccattctgttccctttagct

SEQ ID NO: 260565 - DNA, 25 bp, Artificial
  probe
  misc_feature (1)..(25): SEQ ID NO: 308; WAN024AN7; Start 56; Stop 80
ttctccattctgttccctttagctc

SEQ ID NO: 260566 - DNA, 25 bp, Artificial
  probe
  misc_feature (1)..(25): SEQ ID NO: 308; WAN024AN7; Start 46; Stop 70
ttgttccattttctccattctgttc

SEQ ID NO: 260567 - DNA, 25 bp, Artificial
  probe
  misc_feature (1)..(25): SEQ ID NO: 308; WAN024AN7; Start 45; Stop 69
tttgttccattttctccattctgtt

SEQ ID NO: 260568 - DNA, 25 bp, Artificial
  probe
  misc_feature (1)..(25): SEQ ID NO: 308; WAN024AN7; Start 44; Stop 68
atttgttccattttctccattctgt

SEQ ID NO: 260569 - DNA, 25 bp, Artificial
  probe
  misc_feature (1)..(25): SEQ ID NO: 308; WAN024AN7; Start 52; Stop 76
cattttctccattctgttcccttta

SEQ ID NO: 260570 - DNA, 25 bp, Artificial
  probe
  misc_feature (1)..(25): SEQ ID NO: 308; WAN024AN7; Start 43; Stop 67
catttgttccattttctccattctg

SEQ ID NO: 260571 - DNA, 25 bp, Artificial
  probe
  misc_feature (1)..(25): SEQ ID NO: 308; WAN024AN7; Start 53; Stop 77
attttctccattctgttccctttag

SEQ ID NO: 260572 - DNA, 25 bp, Artificial
  probe
  misc_feature (1)..(25): SEQ ID NO: 308; WAN024AN7; Start 41; Stop 65
cacatttgttccattttctccattc

SEQ ID NO: 260573 - DNA, 25 bp, Artificial
  probe
  misc_feature (1)..(25): SEQ ID NO: 308; WAN024AN7; Start 42; Stop 66
acatttgttccattttctccattct

SEQ ID NO: 260574 - DNA, 25 bp, Artificial
  probe
  misc_feature (1)..(25): SEQ ID NO: 308; WAN024AN7; Start 54; Stop 78
ttttctccattctgttccctttagc

SEQ ID NO: 260575 - DNA, 25 bp, Artificial
  probe
  misc_feature (1)..(25): SEQ ID NO: 308; WAN024AN7; Start 59; Stop 83
tccattctgttccctttagctccta

SEQ ID NO: 260576 - DNA, 25 bp, Artificial
  probe
  misc_feature (1)..(25): SEQ ID NO: 308; WAN024AN7; Start 51; Stop 75
ccattttctccattctgttcccttt

SEQ ID NO: 260577 - DNA, 25 bp, Artificial
  probe
  misc_feature (1)..(25): SEQ ID NO: 308; WAN024AN7; Start 47; Stop 71
tgttccattttctccattctgttcc

SEQ ID NO: 260578 - DNA, 25 bp, Artificial
  probe
  misc_feature (1)..(25): SEQ ID NO: 308; WAN024AN7; Start 60; Stop 84
ccattctgttccctttagctcctaa

SEQ ID NO: 260579 - DNA, 25 bp, Artificial
  probe
  misc_feature (1)..(25): SEQ ID NO: 308; WAN024AN7; Start 40; Stop 64
acacatttgttccattttctccatt

SEQ ID NO: 260580 - DNA, 25 bp, Artificial
  probe
  misc_feature (1)..(25): SEQ ID NO: 308; WAN024AN7; Start 48; Stop 72
gttccattttctccattctgttccc

SEQ ID NO: 260581 - DNA, 25 bp, Artificial
  probe
  misc_feature (1)..(25): SEQ ID NO: 308; WAN024AN7; Start 50; Stop 74
tccattttctccattctgttccctt

SEQ ID NO: 260582 - DNA, 25 bp, Artificial
  probe
  misc_feature (1)..(25): SEQ ID NO: 308; WAN024AN7; Start 49; Stop 73
ttccattttctccattctgttccct

SEQ ID NO: 260583 - DNA, 25 bp, Artificial
  probe
  misc_feature (1)..(25): SEQ ID NO: 308; WAN024AN7; Start 8; Stop 32
ccctttctagatacagtctaacaga

SEQ ID NO: 260584 - DNA, 25 bp, Artificial
  probe
  misc_feature (1)..(25): SEQ ID NO: 308; WAN024AN7; Start 62; Stop 86
attctgttccctttagctcctaaac

SEQ ID NO: 260585 - DNA, 25 bp, Artificial
  probe
  misc_feature (1)..(25): SEQ ID NO: 308; WAN024AN7; Start 61; Stop 85
cattctgttccctttagctcctaaa

SEQ ID NO: 260586 - DNA, 25 bp, Artificial
  probe
  misc_feature (1)..(25): SEQ ID NO: 308; WAN024AN7; Start 58; Stop 82
ctccattctgttccctttagctcct

SEQ ID NO: 260587 - DNA, 25 bp, Artificial
  probe
  misc_feature (1)..(25): SEQ ID NO: 308; WAN024AN7; Start 57; Stop 81
tctccattctgttccctttagctcc

SEQ ID NO: 260588 - DNA, 25 bp, Artificial
  probe
  misc_feature (1)..(25): SEQ ID NO: 308; WAN024AN7; Start 63; Stop 87
ttctgttccctttagctcctaaact

SEQ ID NO: 260589 - DNA, 25 bp, Artificial
  probe
  misc_feature (1)..(25): SEQ ID NO: 308; WAN024AN7; Start 64; Stop 88
tctgttccctttagctcctaaactg

SEQ ID NO: 260590 - DNA, 25 bp, Artificial
  probe
  misc_feature (1)..(25): SEQ ID NO: 308; WAN024AN7; Start 9; Stop 33
cctttctagatacagtctaacagat

SEQ ID NO: 260591 - DNA, 25 bp, Artificial
  probe
  misc_feature (1)..(25): SEQ ID NO: 308; WAN024AN7; Start 2; Stop 26
attttcccctttctagatacagtct

SEQ ID NO: 260592 - DNA, 25 bp, Artificial
  probe
  misc_feature (1)..(25): SEQ ID NO: 308; WAN024AN7; Start 1; Stop 25
aattttcccctttctagatacagtc

SEQ ID NO: 260593 - DNA, 25 bp, Artificial
  probe
  misc_feature (1)..(25): SEQ ID NO: 308; WAN024AN7; Start 38; Stop 62
aaacacatttgttccattttctcca

SEQ ID NO: 260594 - DNA, 25 bp, Artificial
  probe
  misc_feature (1)..(25): SEQ ID NO: 308; WAN024AN7; Start 39; Stop 63
aacacatttgttccattttctccat

SEQ ID NO: 260595 - DNA, 25 bp, Artificial
  probe
  misc_feature (1)..(25): SEQ ID NO: 308; WAN024AN7; Start 37; Stop 61
aaaacacatttgttccattttctcc

SEQ ID NO: 260596 - DNA, 25 bp, Artificial
  probe
  misc_feature (1)..(25): SEQ ID NO: 308; WAN024AN7; Start 6; Stop 30
tcccctttctagatacagtctaaca

SEQ ID NO: 260597 - DNA, 25 bp, Artificial
  probe
  misc_feature (1)..(25): SEQ ID NO: 309; WAN024ADH; Start 52; Stop 76
gtcatcagctattacatcgttggtt

SEQ ID NO: 260598 - DNA, 25 bp, Artificial
  probe
  misc_feature (1)..(25): SEQ ID NO: 309; WAN024ADH; Start 48; Stop 72
ttgtgtcatcagctattacatcgtt

SEQ ID NO: 260599 - DNA, 25 bp, Artificial
  probe
  misc_feature (1)..(25): SEQ ID NO: 309; WAN024ADH; Start 49; Stop 73
tgtgtcatcagctattacatcgttg

SEQ ID NO: 260600 - DNA, 25 bp, Artificial
  probe
  misc_feature (1)..(25): SEQ ID NO: 309; WAN024ADH; Start 50; Stop 74
gtgtcatcagctattacatcgttgg

SEQ ID NO: 260601 - DNA, 25 bp, Artificial
  probe
  misc_feature (1)..(25): SEQ ID NO: 309; WAN024ADH; Start 51; Stop 75
tgtcatcagctattacatcgttggt

SEQ ID NO: 260602 - DNA, 25 bp, Artificial
  probe
  misc_feature (1)..(25): SEQ ID NO: 309; WAN024ADH; Start 146; Stop 170
tgaataaagtcaacagagtttcgcc

SEQ ID NO: 260603 - DNA, 25 bp, Artificial
  probe
  misc_feature (1)..(25): SEQ ID NO: 309; WAN024ADH; Start 53; Stop 77
tcatcagctattacatcgttggttt

SEQ ID NO: 260604 - DNA, 25 bp, Artificial
  probe
  misc_feature (1)..(25): SEQ ID NO: 309; WAN024ADH; Start 54; Stop 78
catcagctattacatcgttggttta

SEQ ID NO: 260605 - DNA, 25 bp, Artificial
  probe
  misc_feature (1)..(25): SEQ ID NO: 309; WAN024ADH; Start 170; Stop 194
ccaaccacttcgtcttgtaatgaca

SEQ ID NO: 260606 - DNA, 25 bp, Artificial
  probe
  misc_feature (1)..(25): SEQ ID NO: 309; WAN024ADH; Start 112; Stop 136
ttccagactcaattgtgcataagaa

SEQ ID NO: 260607 - DNA, 25 bp, Artificial
  probe
  misc_feature (1)..(25): SEQ ID NO: 309; WAN024ADH; Start 147; Stop 171
gaataaagtcaacagagtttcgccc

SEQ ID NO: 260608 - DNA, 25 bp, Artificial
  probe
  misc_feature (1)..(25): SEQ ID NO: 309; WAN024ADH; Start 111; Stop 135
gttccagactcaattgtgcataaga

SEQ ID NO: 260609 - DNA, 25 bp, Artificial
  probe
  misc_feature (1)..(25): SEQ ID NO: 309; WAN024ADH; Start 65; Stop 89
acatcgttggtttattgtactgtat

SEQ ID NO: 260610 - DNA, 25 bp, Artificial
  probe
  misc_feature (1)..(25): SEQ ID NO: 309; WAN024ADH; Start 57; Stop 81
cagctattacatcgttggtttattg

SEQ ID NO: 260611 - DNA, 25 bp, Artificial
  probe
  misc_feature (1)..(25): SEQ ID NO: 309; WAN024ADH; Start 56; Stop 80
tcagctattacatcgttggtttatt

SEQ ID NO: 260612 - DNA, 25 bp, Artificial
  probe
  misc_feature (1)..(25): SEQ ID NO: 309; WAN024ADH; Start 174; Stop 198
ccacttcgtcttgtaatgacaatta

SEQ ID NO: 260613 - DNA, 25 bp, Artificial
  probe
  misc_feature (1)..(25): SEQ ID NO: 309; WAN024ADH; Start 173; Stop 197
accacttcgtcttgtaatgacaatt

SEQ ID NO: 260614 - DNA, 25 bp, Artificial
  probe
  misc_feature (1)..(25): SEQ ID NO: 309; WAN024ADH; Start 172; Stop 196
aaccacttcgtcttgtaatgacaat

SEQ ID NO: 260615 - DNA, 25 bp, Artificial
  probe
  misc_feature (1)..(25): SEQ ID NO: 309; WAN024ADH; Start 55; Stop 79
atcagctattacatcgttggtttat

SEQ ID NO: 260616 - DNA, 25 bp, Artificial
  probe
  misc_feature (1)..(25): SEQ ID NO: 309; WAN024ADH; Start 46; Stop 70
ctttgtgtcatcagctattacatcg

SEQ ID NO: 260617 - DNA, 25 bp, Artificial
  probe
  misc_feature (1)..(25): SEQ ID NO: 309; WAN024ADH; Start 47; Stop 71
tttgtgtcatcagctattacatcgt

SEQ ID NO: 260618 - DNA, 25 bp, Artificial
  probe
  misc_feature (1)..(25): SEQ ID NO: 309; WAN024ADH; Start 149; Stop 173
ataaagtcaacagagtttcgcccaa

SEQ ID NO: 260619 - DNA, 25 bp, Artificial
  probe
  misc_feature (1)..(25): SEQ ID NO: 309; WAN024ADH; Start 148; Stop 172
aataaagtcaacagagtttcgccca

SEQ ID NO: 260620 - DNA, 25 bp, Artificial
  probe
  misc_feature (1)..(25): SEQ ID NO: 309; WAN024ADH; Start 58; Stop 82
agctattacatcgttggtttattgt

SEQ ID NO: 260621 - DNA, 25 bp, Artificial
  probe
  misc_feature (1)..(25): SEQ ID NO: 309; WAN024ADH; Start 171; Stop 195
caaccacttcgtcttgtaatgacaa

SEQ ID NO: 260622 - DNA, 25 bp, Artificial
  probe
  misc_feature (1)..(25): SEQ ID NO: 309; WAN024ADH; Start 63; Stop 87
ttacatcgttggtttattgtactgt

SEQ ID NO: 260623 - DNA, 25 bp, Artificial
  probe
  misc_feature (1)..(25): SEQ ID NO: 309; WAN024ADH; Start 110; Stop 134
cgttccagactcaattgtgcataag

SEQ ID NO: 260624 - DNA, 25 bp, Artificial
  probe
  misc_feature (1)..(25): SEQ ID NO: 309; WAN024ADH; Start 66; Stop 90
catcgttggtttattgtactgtata

SEQ ID NO: 260625 - DNA, 25 bp, Artificial
  probe
  misc_feature (1)..(25): SEQ ID NO: 309; WAN024ADH; Start 196; Stop 220
ttatataaaccaaaggaagctgagc

SEQ ID NO: 260626 - DNA, 25 bp, Artificial
  probe
  misc_feature (1)..(25): SEQ ID NO: 309; WAN024ADH; Start 145; Stop 169
ttgaataaagtcaacagagtttcgc

SEQ ID NO: 260627 - DNA, 25 bp, Artificial
  probe
  misc_feature (1)..(25): SEQ ID NO: 309; WAN024ADH; Start 175; Stop 199
cacttcgtcttgtaatgacaattat

SEQ ID NO: 260628 - DNA, 25 bp, Artificial
  probe
  misc_feature (1)..(25): SEQ ID NO: 309; WAN024ADH; Start 109; Stop 133
tcgttccagactcaattgtgcataa

SEQ ID NO: 260629 - DNA, 25 bp, Artificial
  probe
  misc_feature (1)..(25): SEQ ID NO: 309; WAN024ADH; Start 108; Stop 132
ttcgttccagactcaattgtgcata

SEQ ID NO: 260630 - DNA, 25 bp, Artificial
  probe
  misc_feature (1)..(25): SEQ ID NO: 310; WAN024AKL; Start 112; Stop 136
ttcagactcctaatcgtggtatact

SEQ ID NO: 260631 - DNA, 25 bp, Artificial
  probe
  misc_feature (1)..(25): SEQ ID NO: 310; WAN024AKL; Start 113; Stop 137
tcagactcctaatcgtggtatacta

SEQ ID NO: 260632 - DNA, 25 bp, Artificial
  probe
  misc_feature (1)..(25): SEQ ID NO: 310; WAN024AKL; Start 114; Stop 138
cagactcctaatcgtggtatactag

SEQ ID NO: 260633 - DNA, 25 bp, Artificial
  probe
  misc_feature (1)..(25): SEQ ID NO: 310; WAN024AKL; Start 121; Stop 145
ctaatcgtggtatactaggtcagta

SEQ ID NO: 260634 - DNA, 25 bp, Artificial
  probe
  misc_feature (1)..(25): SEQ ID NO: 310; WAN024AKL; Start 111; Stop 135
tttcagactcctaatcgtggtatac

SEQ ID NO: 260635 - DNA, 25 bp, Artificial
  probe
  misc_feature (1)..(25): SEQ ID NO: 310; WAN024AKL; Start 115; Stop 139
agactcctaatcgtggtatactagg

SEQ ID NO: 260636 - DNA, 25 bp, Artificial
  probe
  misc_feature (1)..(25): SEQ ID NO: 310; WAN024AKL; Start 119; Stop 143
tcctaatcgtggtatactaggtcag

SEQ ID NO: 260637 - DNA, 25 bp, Artificial
  probe
  misc_feature (1)..(25): SEQ ID NO: 310; WAN024AKL; Start 118; Stop 142
ctcctaatcgtggtatactaggtca

SEQ ID NO: 260638 - DNA, 25 bp, Artificial
  probe
  misc_feature (1)..(25): SEQ ID NO: 310; WAN024AKL; Start 117; Stop 141
actcctaatcgtggtatactaggtc

SEQ ID NO: 260639 - DNA, 25 bp, Artificial
  probe
  misc_feature (1)..(25): SEQ ID NO: 310; WAN024AKL; Start 116; Stop 140
gactcctaatcgtggtatactaggt

SEQ ID NO: 260640 - DNA, 25 bp, Artificial
  probe
  misc_feature (1)..(25): SEQ ID NO: 310; WAN024AKL; Start 120; Stop 144
cctaatcgtggtatactaggtcagt

SEQ ID NO: 260641 - DNA, 25 bp, Artificial
  probe
  misc_feature (1)..(25): SEQ ID NO: 310; WAN024AKL; Start 110; Stop 134
ttttcagactcctaatcgtggtata

SEQ ID NO: 260642 - DNA, 25 bp, Artificial
  probe
  misc_feature (1)..(25): SEQ ID NO: 310; WAN024AKL; Start 27; Stop 51
ggactgggtaggagagttttatttt

SEQ ID NO: 260643 - DNA, 25 bp, Artificial
  probe
  misc_feature (1)..(25): SEQ ID NO: 310; WAN024AKL; Start 26; Stop 50
tggactgggtaggagagttttattt

SEQ ID NO: 260644 - DNA, 25 bp, Artificial
  probe
  misc_feature (1)..(25): SEQ ID NO: 310; WAN024AKL; Start 8; Stop 32
catttctcctacttggtgtggactg

SEQ ID NO: 260645 - DNA, 25 bp, Artificial
  probe
  misc_feature (1)..(25): SEQ ID NO: 310; WAN024AKL; Start 25; Stop 49
gtggactgggtaggagagttttatt

SEQ ID NO: 260646 - DNA, 25 bp, Artificial
  probe
  misc_feature (1)..(25): SEQ ID NO: 310; WAN024AKL; Start 1; Stop 25
aattttgcatttctcctacttggtg

SEQ ID NO: 260647 - DNA, 25 bp, Artificial
  probe
  misc_feature (1)..(25): SEQ ID NO: 310; WAN024AKL; Start 123; Stop 147
aatcgtggtatactaggtcagtatt

SEQ ID NO: 260648 - DNA, 25 bp, Artificial
  probe
  misc_feature (1)..(25): SEQ ID NO: 310; WAN024AKL; Start 4; Stop 28
tttgcatttctcctacttggtgtgg

SEQ ID NO: 260649 - DNA, 25 bp, Artificial
  probe
  misc_feature (1)..(25): SEQ ID NO: 310; WAN024AKL; Start 2; Stop 26
attttgcatttctcctacttggtgt

SEQ ID NO: 260650 - DNA, 25 bp, Artificial
  probe
  misc_feature (1)..(25): SEQ ID NO: 310; WAN024AKL; Start 24; Stop 48
tgtggactgggtaggagagttttat

SEQ ID NO: 260651 - DNA, 25 bp, Artificial
  probe
  misc_feature (1)..(25): SEQ ID NO: 310; WAN024AKL; Start 122; Stop 146
taatcgtggtatactaggtcagtat

SEQ ID NO: 260652 - DNA, 25 bp, Artificial
  probe
  misc_feature (1)..(25): SEQ ID NO: 310; WAN024AKL; Start 9; Stop 33
atttctcctacttggtgtggactgg

SEQ ID NO: 260653 - DNA, 25 bp, Artificial
  probe
  misc_feature (1)..(25): SEQ ID NO: 310; WAN024AKL; Start 3; Stop 27
ttttgcatttctcctacttggtgtg

SEQ ID NO: 260654 - DNA, 25 bp, Artificial
  probe
  misc_feature (1)..(25): SEQ ID NO: 310; WAN024AKL; Start 23; Stop 47
gtgtggactgggtaggagagtttta

SEQ ID NO: 260655 - DNA, 25 bp, Artificial
  probe
  misc_feature (1)..(25): SEQ ID NO: 310; WAN024AKL; Start 7; Stop 31
gcatttctcctacttggtgtggact

SEQ ID NO: 260656 - DNA, 25 bp, Artificial
  probe
  misc_feature (1)..(25): SEQ ID NO: 310; WAN024AKL; Start 124; Stop 148
atcgtggtatactaggtcagtattt

SEQ ID NO: 260657 - DNA, 25 bp, Artificial
  probe
  misc_feature (1)..(25): SEQ ID NO: 310; WAN024AKL; Start 5; Stop 29
ttgcatttctcctacttggtgtgga

SEQ ID NO: 260658 - DNA, 25 bp, Artificial
  probe
  misc_feature (1)..(25): SEQ ID NO: 310; WAN024AKL; Start 6; Stop 30
tgcatttctcctacttggtgtggac

SEQ ID NO: 260659 - DNA, 25 bp, Artificial
  probe
  misc_feature (1)..(25): SEQ ID NO: 310; WAN024AKL; Start 125; Stop 149
tcgtggtatactaggtcagtatttt

SEQ ID NO: 260660 - DNA, 25 bp, Artificial
  probe
  misc_feature (1)..(25): SEQ ID NO: 310; WAN024AKL; Start 126; Stop 150
cgtggtatactaggtcagtatttta

SEQ ID NO: 260661 - DNA, 25 bp, Artificial
  probe
  misc_feature (1)..(25): SEQ ID NO: 310; WAN024AKL; Start 127; Stop 151
gtggtatactaggtcagtattttat

SEQ ID NO: 260662 - DNA, 25 bp, Artificial
  probe
  misc_feature (1)..(25): SEQ ID NO: 311; WAN0249Z8; Start 9; Stop 33
ggttatatgatgttgaggctaggaa

SEQ ID NO: 260663 - DNA, 25 bp, Artificial
  probe
  misc_feature (1)..(25): SEQ ID NO: 311; WAN0249Z8; Start 8; Stop 32
gggttatatgatgttgaggctagga

SEQ ID NO: 260664 - DNA, 25 bp, Artificial
  probe
  misc_feature (1)..(25): SEQ ID NO: 311; WAN0249Z8; Start 10; Stop 34
gttatatgatgttgaggctaggaaa

SEQ ID NO: 260665 - DNA, 25 bp, Artificial
  probe
  misc_feature (1)..(25): SEQ ID NO: 311; WAN0249Z8; Start 2; Stop 26
attttggggttatatgatgttgagg

SEQ ID NO: 260666 - DNA, 25 bp, Artificial
  probe
  misc_feature (1)..(25): SEQ ID NO: 311; WAN0249Z8; Start 5; Stop 29
ttggggttatatgatgttgaggcta

SEQ ID NO: 260667 - DNA, 25 bp, Artificial
  probe
  misc_feature (1)..(25): SEQ ID NO: 311; WAN0249Z8; Start 3; Stop 27
ttttggggttatatgatgttgaggc

SEQ ID NO: 260668 - DNA, 25 bp, Artificial
  probe
  misc_feature (1)..(25): SEQ ID NO: 311; WAN0249Z8; Start 4; Stop 28
tttggggttatatgatgttgaggct

SEQ ID NO: 260669 - DNA, 25 bp, Artificial
  probe
  misc_feature (1)..(25): SEQ ID NO: 311; WAN0249Z8; Start 6; Stop 30
tggggttatatgatgttgaggctag

SEQ ID NO: 260670 - DNA, 25 bp, Artificial
  probe
  misc_feature (1)..(25): SEQ ID NO: 311; WAN0249Z8; Start 7; Stop 31
ggggttatatgatgttgaggctagg

SEQ ID NO: 260671 - DNA, 25 bp, Artificial
  probe
  misc_feature (1)..(25): SEQ ID NO: 311; WAN0249Z8; Start 1; Stop 25
aattttggggttatatgatgttgag

SEQ ID NO: 260672 - DNA, 25 bp, Artificial
  probe
  misc_feature (1)..(25): SEQ ID NO: 311; WAN0249Z8; Start 11; Stop 35
ttatatgatgttgaggctaggaaaa

SEQ ID NO: 260673 - DNA, 25 bp, Artificial
  probe
  misc_feature (1)..(25): SEQ ID NO: 311; WAN0249Z8; Start 58; Stop 82
aagtcttctcataacaaaacattga

SEQ ID NO: 260674 - DNA, 25 bp, Artificial
  probe
  misc_feature (1)..(25): SEQ ID NO: 311; WAN0249Z8; Start 59; Stop 83
agtcttctcataacaaaacattgat

SEQ ID NO: 260675 - DNA, 25 bp, Artificial
  probe
  misc_feature (1)..(25): SEQ ID NO: 311; WAN0249Z8; Start 54; Stop 78
aagtaagtcttctcataacaaaaca

SEQ ID NO: 260676 - DNA, 25 bp, Artificial
  probe
  misc_feature (1)..(25): SEQ ID NO: 311; WAN0249Z8; Start 55; Stop 79
agtaagtcttctcataacaaaacat

SEQ ID NO: 260677 - DNA, 25 bp, Artificial
  probe
  misc_feature (1)..(25): SEQ ID NO: 311; WAN0249Z8; Start 56; Stop 80
gtaagtcttctcataacaaaacatt

SEQ ID NO: 260678 - DNA, 25 bp, Artificial
  probe
  misc_feature (1)..(25): SEQ ID NO: 311; WAN0249Z8; Start 53; Stop 77
aaagtaagtcttctcataacaaaac

SEQ ID NO: 260679 - DNA, 25 bp, Artificial
  probe
  misc_feature (1)..(25): SEQ ID NO: 311; WAN0249Z8; Start 57; Stop 81
taagtcttctcataacaaaacattg

SEQ ID NO: 260680 - DNA, 25 bp, Artificial
  probe
  misc_feature (1)..(25): SEQ ID NO: 311; WAN0249Z8; Start 60; Stop 84
gtcttctcataacaaaacattgata

SEQ ID NO: 260681 - DNA, 25 bp, Artificial
  probe
  misc_feature (1)..(25): SEQ ID NO: 311; WAN0249Z8; Start 52; Stop 76
aaaagtaagtcttctcataacaaaa

SEQ ID NO: 260682 - DNA, 25 bp, Artificial
  probe
  misc_feature (1)..(25): SEQ ID NO: 312; WAN024AGB; Start 29; Stop 53
gagtcctattcaagctcaggtagta

SEQ ID NO: 260683 - DNA, 25 bp, Artificial
  probe
  misc_feature (1)..(25): SEQ ID NO: 312; WAN024AGB; Start 18; Stop 42
gagagctacctgagtcctattcaag

SEQ ID NO: 260684 - DNA, 25 bp, Artificial
  probe
  misc_feature (1)..(25): SEQ ID NO: 312; WAN024AGB; Start 30; Stop 54
agtcctattcaagctcaggtagtac

SEQ ID NO: 260685 - DNA, 25 bp, Artificial
  probe
  misc_feature (1)..(25): SEQ ID NO: 312; WAN024AGB; Start 17; Stop 41
agagagctacctgagtcctattcaa

SEQ ID NO: 260686 - DNA, 25 bp, Artificial
  probe
  misc_feature (1)..(25): SEQ ID NO: 312; WAN024AGB; Start 32; Stop 56
tcctattcaagctcaggtagtactt

SEQ ID NO: 260687 - DNA, 25 bp, Artificial
  probe
  misc_feature (1)..(25): SEQ ID NO: 312; WAN024AGB; Start 31; Stop 55
gtcctattcaagctcaggtagtact

SEQ ID NO: 260688 - DNA, 25 bp, Artificial
  probe
  misc_feature (1)..(25): SEQ ID NO: 312; WAN024AGB; Start 36; Stop 60
attcaagctcaggtagtactttctt

SEQ ID NO: 260689 - DNA, 25 bp, Artificial
  probe
  misc_feature (1)..(25): SEQ ID NO: 312; WAN024AGB; Start 37; Stop 61
ttcaagctcaggtagtactttctta

SEQ ID NO: 260690 - DNA, 25 bp, Artificial
  probe
  misc_feature (1)..(25): SEQ ID NO: 312; WAN024AGB; Start 38; Stop 62
tcaagctcaggtagtactttcttat

SEQ ID NO: 260691 - DNA, 25 bp, Artificial
  probe
  misc_feature (1)..(25): SEQ ID NO: 312; WAN024AGB; Start 35; Stop 59
tattcaagctcaggtagtactttct

SEQ ID NO: 260692 - DNA, 25 bp, Artificial
  probe
  misc_feature (1)..(25): SEQ ID NO: 312; WAN024AGB; Start 34; Stop 58
ctattcaagctcaggtagtactttc

SEQ ID NO: 260693 - DNA, 25 bp, Artificial
  probe
  misc_feature (1)..(25): SEQ ID NO: 312; WAN024AGB; Start 33; Stop 57
cctattcaagctcaggtagtacttt

SEQ ID NO: 260694 - DNA, 25 bp, Artificial
  probe
  misc_feature (1)..(25): SEQ ID NO: 312; WAN024AGB; Start 19; Stop 43
agagctacctgagtcctattcaagc

SEQ ID NO: 260695 - DNA, 25 bp, Artificial
  probe
  misc_feature (1)..(25): SEQ ID NO: 312; WAN024AGB; Start 28; Stop 52
tgagtcctattcaagctcaggtagt

SEQ ID NO: 260696 - DNA, 25 bp, Artificial
  probe
  misc_feature (1)..(25): SEQ ID NO: 312; WAN024AGB; Start 39; Stop 63
caagctcaggtagtactttcttata

SEQ ID NO: 260697 - DNA, 25 bp, Artificial
  probe
  misc_feature (1)..(25): SEQ ID NO: 312; WAN024AGB; Start 42; Stop 66
gctcaggtagtactttcttataaac

SEQ ID NO: 260698 - DNA, 25 bp, Artificial
  probe
  misc_feature (1)..(25): SEQ ID NO: 312; WAN024AGB; Start 41; Stop 65
agctcaggtagtactttcttataaa

SEQ ID NO: 260699 - DNA, 25 bp, Artificial
  probe
  misc_feature (1)..(25): SEQ ID NO: 312; WAN024AGB; Start 40; Stop 64
aagctcaggtagtactttcttataa

SEQ ID NO: 260700 - DNA, 25 bp, Artificial
  probe
  misc_feature (1)..(25): SEQ ID NO: 312; WAN024AGB; Start 22; Stop 46
gctacctgagtcctattcaagctca

SEQ ID NO: 260701 - DNA, 25 bp, Artificial
  probe
  misc_feature (1)..(25): SEQ ID NO: 312; WAN024AGB; Start 21; Stop 45
agctacctgagtcctattcaagctc

SEQ ID NO: 260702 - DNA, 25 bp, Artificial
  probe
  misc_feature (1)..(25): SEQ ID NO: 312; WAN024AGB; Start 20; Stop 44
gagctacctgagtcctattcaagct

SEQ ID NO: 260703 - DNA, 25 bp, Artificial
  probe
  misc_feature (1)..(25): SEQ ID NO: 312; WAN024AGB; Start 43; Stop 67
ctcaggtagtactttcttataaact

SEQ ID NO: 260704 - DNA, 25 bp, Artificial
  probe
  misc_feature (1)..(25): SEQ ID NO: 313; WAN024AXW; Start 182; Stop 206
ttagtctcattccattcttaggatg

SEQ ID NO: 260705 - DNA, 25 bp, Artificial
  probe
  misc_feature (1)..(25): SEQ ID NO: 313; WAN024AXW; Start 183; Stop 207
tagtctcattccattcttaggatgg

SEQ ID NO: 260706 - DNA, 25 bp, Artificial
  probe
  misc_feature (1)..(25): SEQ ID NO: 313; WAN024AXW; Start 187; Stop 211
ctcattccattcttaggatgggttg

SEQ ID NO: 260707 - DNA, 25 bp, Artificial
  probe
  misc_feature (1)..(25): SEQ ID NO: 313; WAN024AXW; Start 186; Stop 210
tctcattccattcttaggatgggtt

SEQ ID NO: 260708 - DNA, 25 bp, Artificial
  probe
  misc_feature (1)..(25): SEQ ID NO: 313; WAN024AXW; Start 184; Stop 208
agtctcattccattcttaggatggg

SEQ ID NO: 260709 - DNA, 25 bp, Artificial
  probe
  misc_feature (1)..(25): SEQ ID NO: 313; WAN024AXW; Start 185; Stop 209
gtctcattccattcttaggatgggt

SEQ ID NO: 260710 - DNA, 25 bp, Artificial
  probe
  misc_feature (1)..(25): SEQ ID NO: 313; WAN024AXW; Start 188; Stop 212
tcattccattcttaggatgggttgg

SEQ ID NO: 260711 - DNA, 25 bp, Artificial
  probe
  misc_feature (1)..(25): SEQ ID NO: 313; WAN024AXW; Start 189; Stop 213
cattccattcttaggatgggttggg

SEQ ID NO: 260712 - DNA, 25 bp, Artificial
  probe
  misc_feature (1)..(25): SEQ ID NO: 313; WAN024AXW; Start 190; Stop 214
attccattcttaggatgggttgggg

SEQ ID NO: 260713 - DNA, 25 bp, Artificial
  probe
  misc_feature (1)..(25): SEQ ID NO: 314; WAN024A4O; Start 108; Stop 132
tgctgatacaacctctctacctata

SEQ ID NO: 260714 - DNA, 25 bp, Artificial
  probe
  misc_feature (1)..(25): SEQ ID NO: 314; WAN024A4O; Start 118; Stop 142
acctctctacctataatctcacagt

SEQ ID NO: 260715 - DNA, 25 bp, Artificial
  probe
  misc_feature (1)..(25): SEQ ID NO: 314; WAN024A4O; Start 109; Stop 133
gctgatacaacctctctacctataa

SEQ ID NO: 260716 - DNA, 25 bp, Artificial
  probe
  misc_feature (1)..(25): SEQ ID NO: 314; WAN024A4O; Start 116; Stop 140
caacctctctacctataatctcaca

SEQ ID NO: 260717 - DNA, 25 bp, Artificial
  probe
  misc_feature (1)..(25): SEQ ID NO: 314; WAN024A4O; Start 115; Stop 139
acaacctctctacctataatctcac

SEQ ID NO: 260718 - DNA, 25 bp, Artificial
  probe
  misc_feature (1)..(25): SEQ ID NO: 314; WAN024A4O; Start 104; Stop 128
atattgctgatacaacctctctacc

SEQ ID NO: 260719 - DNA, 25 bp, Artificial
  probe
  misc_feature (1)..(25): SEQ ID NO: 314; WAN024A4O; Start 101; Stop 125
cacatattgctgatacaacctctct

SEQ ID NO: 260720 - DNA, 25 bp, Artificial
  probe
  misc_feature (1)..(25): SEQ ID NO: 314; WAN024A4O; Start 119; Stop 143
cctctctacctataatctcacagtt

SEQ ID NO: 260721 - DNA, 25 bp, Artificial
  probe
  misc_feature (1)..(25): SEQ ID NO: 314; WAN024A4O; Start 117; Stop 141
aacctctctacctataatctcacag

SEQ ID NO: 260722 - DNA, 25 bp, Artificial
  probe
  misc_feature (1)..(25): SEQ ID NO: 314; WAN024A4O; Start 107; Stop 131
ttgctgatacaacctctctacctat

SEQ ID NO: 260723 - DNA, 25 bp, Artificial
  probe
  misc_feature (1)..(25): SEQ ID NO: 314; WAN024A4O; Start 106; Stop 130
attgctgatacaacctctctaccta

SEQ ID NO: 260724 - DNA, 25 bp, Artificial
  probe
  misc_feature (1)..(25): SEQ ID NO: 314; WAN024A4O; Start 105; Stop 129
tattgctgatacaacctctctacct

SEQ ID NO: 260725 - DNA, 25 bp, Artificial
  probe
  misc_feature (1)..(25): SEQ ID NO: 314; WAN024A4O; Start 100; Stop 124
acacatattgctgatacaacctctc

SEQ ID NO: 260726 - DNA, 25 bp, Artificial
  probe
  misc_feature (1)..(25): SEQ ID NO: 314; WAN024A4O; Start 99; Stop 123
gacacatattgctgatacaacctct

SEQ ID NO: 260727 - DNA, 25 bp, Artificial
  probe
  misc_feature (1)..(25): SEQ ID NO: 314; WAN024A4O; Start 98; Stop 122
agacacatattgctgatacaacctc

SEQ ID NO: 260728 - DNA, 25 bp, Artificial
  probe
  misc_feature (1)..(25): SEQ ID NO: 314; WAN024A4O; Start 102; Stop 126
acatattgctgatacaacctctcta

SEQ ID NO: 260729 - DNA, 25 bp, Artificial
  probe
  misc_feature (1)..(25): SEQ ID NO: 314; WAN024A4O; Start 103; Stop 127
catattgctgatacaacctctctac

SEQ ID NO: 260730 - DNA, 25 bp, Artificial
  probe
  misc_feature (1)..(25): SEQ ID NO: 314; WAN024A4O; Start 95; Stop 119
gacagacacatattgctgatacaac

SEQ ID NO: 260731 - DNA, 25 bp, Artificial
  probe
  misc_feature (1)..(25): SEQ ID NO: 314; WAN024A4O; Start 94; Stop 118
tgacagacacatattgctgatacaa

SEQ ID NO: 260732 - DNA, 25 bp, Artificial
  probe
  misc_feature (1)..(25): SEQ ID NO: 314; WAN024A4O; Start 93; Stop 117
ttgacagacacatattgctgataca

SEQ ID NO: 260733 - DNA, 25 bp, Artificial
  probe
  misc_feature (1)..(25): SEQ ID NO: 314; WAN024A4O; Start 97; Stop 121
cagacacatattgctgatacaacct

SEQ ID NO: 260734 - DNA, 25 bp, Artificial
  probe
  misc_feature (1)..(25): SEQ ID NO: 314; WAN024A4O; Start 96; Stop 120
acagacacatattgctgatacaacc

SEQ ID NO: 260735 - DNA, 25 bp, Artificial
  probe
  misc_feature (1)..(25): SEQ ID NO: 314; WAN024A4O; Start 114; Stop 138
tacaacctctctacctataatctca

SEQ ID NO: 260736 - DNA, 25 bp, Artificial
  probe
  misc_feature (1)..(25): SEQ ID NO: 314; WAN024A4O; Start 64; Stop 88
tctttcttctactacctttgtcact

SEQ ID NO: 260737 - DNA, 25 bp, Artificial
  probe
  misc_feature (1)..(25): SEQ ID NO: 314; WAN024A4O; Start 63; Stop 87
atctttcttctactacctttgtcac

SEQ ID NO: 260738 - DNA, 25 bp, Artificial
  probe
  misc_feature (1)..(25): SEQ ID NO: 314; WAN024A4O; Start 111; Stop 135
tgatacaacctctctacctataatc

SEQ ID NO: 260739 - DNA, 25 bp, Artificial
  probe
  misc_feature (1)..(25): SEQ ID NO: 314; WAN024A4O; Start 110; Stop 134
ctgatacaacctctctacctataat

SEQ ID NO: 260740 - DNA, 25 bp, Artificial
  probe
  misc_feature (1)..(25): SEQ ID NO: 314; WAN024A4O; Start 92; Stop 116
tttgacagacacatattgctgatac

SEQ ID NO: 260741 - DNA, 25 bp, Artificial
  probe
  misc_feature (1)..(25): SEQ ID NO: 314; WAN024A4O; Start 90; Stop 114
aatttgacagacacatattgctgat

SEQ ID NO: 260742 - DNA, 25 bp, Artificial
  probe
  misc_feature (1)..(25): SEQ ID NO: 314; WAN024A4O; Start 120; Stop 144
ctctctacctataatctcacagtta

SEQ ID NO: 260743 - DNA, 25 bp, Artificial
  probe
  misc_feature (1)..(25): SEQ ID NO: 314; WAN024A4O; Start 113; Stop 137
atacaacctctctacctataatctc

SEQ ID NO: 260744 - DNA, 25 bp, Artificial
  probe
  misc_feature (1)..(25): SEQ ID NO: 314; WAN024A4O; Start 65; Stop 89
ctttcttctactacctttgtcacta

SEQ ID NO: 260745 - DNA, 25 bp, Artificial
  probe
  misc_feature (1)..(25): SEQ ID NO: 314; WAN024A4O; Start 112; Stop 136
gatacaacctctctacctataatct

SEQ ID NO: 260746 - DNA, 25 bp, Artificial
  probe
  misc_feature (1)..(25): SEQ ID NO: 315; WAN024F54; Start 58; Stop 82
ttctctcttgatacagcgattcatc

SEQ ID NO: 260747 - DNA, 25 bp, Artificial
  probe
  misc_feature (1)..(25): SEQ ID NO: 315; WAN024F54; Start 57; Stop 81
gttctctcttgatacagcgattcat

SEQ ID NO: 260748 - DNA, 25 bp, Artificial
  probe
  misc_feature (1)..(25): SEQ ID NO: 315; WAN024F54; Start 54; Stop 78
tatgttctctcttgatacagcgatt

SEQ ID NO: 260749 - DNA, 25 bp, Artificial
  probe
  misc_feature (1)..(25): SEQ ID NO: 315; WAN024F54; Start 42; Stop 66
caatcaagcgagtatgttctctctt

SEQ ID NO: 260750 - DNA, 25 bp, Artificial
  probe
  misc_feature (1)..(25): SEQ ID NO: 315; WAN024F54; Start 55; Stop 79
atgttctctcttgatacagcgattc

SEQ ID NO: 260751 - DNA, 25 bp, Artificial
  probe
  misc_feature (1)..(25): SEQ ID NO: 315; WAN024F54; Start 40; Stop 64
ctcaatcaagcgagtatgttctctc

SEQ ID NO: 260752 - DNA, 25 bp, Artificial
  probe
  misc_feature (1)..(25): SEQ ID NO: 315; WAN024F54; Start 53; Stop 77
gtatgttctctcttgatacagcgat

SEQ ID NO: 260753 - DNA, 25 bp, Artificial
  probe
  misc_feature (1)..(25): SEQ ID NO: 315; WAN024F54; Start 47; Stop 71
aagcgagtatgttctctcttgatac

SEQ ID NO: 260754 - DNA, 25 bp, Artificial
  probe
  misc_feature (1)..(25): SEQ ID NO: 315; WAN024F54; Start 41; Stop 65
tcaatcaagcgagtatgttctctct

SEQ ID NO: 260755 - DNA, 25 bp, Artificial
  probe
  misc_feature (1)..(25): SEQ ID NO: 315; WAN024F54; Start 51; Stop 75
gagtatgttctctcttgatacagcg

SEQ ID NO: 260756 - DNA, 25 bp, Artificial
  probe
  misc_feature (1)..(25): SEQ ID NO: 315; WAN024F54; Start 50; Stop 74
cgagtatgttctctcttgatacagc

SEQ ID NO: 260757 - DNA, 25 bp, Artificial
  probe
  misc_feature (1)..(25): SEQ ID NO: 315; WAN024F54; Start 49; Stop 73
gcgagtatgttctctcttgatacag

SEQ ID NO: 260758 - DNA, 25 bp, Artificial
  probe
  misc_feature (1)..(25): SEQ ID NO: 315; WAN024F54; Start 36; Stop 60
cttcctcaatcaagcgagtatgttc

SEQ ID NO: 260759 - DNA, 25 bp, Artificial
  probe
  misc_feature (1)..(25): SEQ ID NO: 315; WAN024F54; Start 52; Stop 76
agtatgttctctcttgatacagcga

SEQ ID NO: 260760 - DNA, 25 bp, Artificial
  probe
  misc_feature (1)..(25): SEQ ID NO: 315; WAN024F54; Start 48; Stop 72
agcgagtatgttctctcttgataca

SEQ ID NO: 260761 - DNA, 25 bp, Artificial
  probe
  misc_feature (1)..(25): SEQ ID NO: 315; WAN024F54; Start 56; Stop 80
tgttctctcttgatacagcgattca

SEQ ID NO: 260762 - DNA, 25 bp, Artificial
  probe
  misc_feature (1)..(25): SEQ ID NO: 315; WAN024F54; Start 37; Stop 61
ttcctcaatcaagcgagtatgttct

SEQ ID NO: 260763 - DNA, 25 bp, Artificial
  probe
  misc_feature (1)..(25): SEQ ID NO: 315; WAN024F54; Start 39; Stop 63
cctcaatcaagcgagtatgttctct

SEQ ID NO: 260764 - DNA, 25 bp, Artificial
  probe
  misc_feature (1)..(25): SEQ ID NO: 315; WAN024F54; Start 38; Stop 62
tcctcaatcaagcgagtatgttctc

SEQ ID NO: 260765 - DNA, 25 bp, Artificial
  probe
  misc_feature (1)..(25): SEQ ID NO: 315; WAN024F54; Start 76; Stop 100
attcatcacgatatcatcacatcca

SEQ ID NO: 260766 - DNA, 25 bp, Artificial
  probe
  misc_feature (1)..(25): SEQ ID NO: 315; WAN024F54; Start 74; Stop 98
cgattcatcacgatatcatcacatc

SEQ ID NO: 260767 - DNA, 25 bp, Artificial
  probe
  misc_feature (1)..(25): SEQ ID NO: 315; WAN024F54; Start 68; Stop 92
atacagcgattcatcacgatatcat

SEQ ID NO: 260768 - DNA, 25 bp, Artificial
  probe
  misc_feature (1)..(25): SEQ ID NO: 315; WAN024F54; Start 114; Stop 138
tctctttcgcttctaaactttcaag

SEQ ID NO: 260769 - DNA, 25 bp, Artificial
  probe
  misc_feature (1)..(25): SEQ ID NO: 315; WAN024F54; Start 113; Stop 137
atctctttcgcttctaaactttcaa

SEQ ID NO: 260770 - DNA, 25 bp, Artificial
  probe
  misc_feature (1)..(25): SEQ ID NO: 315; WAN024F54; Start 112; Stop 136
aatctctttcgcttctaaactttca

SEQ ID NO: 260771 - DNA, 25 bp, Artificial
  probe
  misc_feature (1)..(25): SEQ ID NO: 315; WAN024F54; Start 75; Stop 99
gattcatcacgatatcatcacatcc

SEQ ID NO: 260772 - DNA, 25 bp, Artificial
  probe
  misc_feature (1)..(25): SEQ ID NO: 315; WAN024F54; Start 69; Stop 93
tacagcgattcatcacgatatcatc

SEQ ID NO: 260773 - DNA, 25 bp, Artificial
  probe
  misc_feature (1)..(25): SEQ ID NO: 315; WAN024F54; Start 77; Stop 101
ttcatcacgatatcatcacatccac

SEQ ID NO: 260774 - DNA, 25 bp, Artificial
  probe
  misc_feature (1)..(25): SEQ ID NO: 315; WAN024F54; Start 73; Stop 97
gcgattcatcacgatatcatcacat

SEQ ID NO: 260775 - DNA, 25 bp, Artificial
  probe
  misc_feature (1)..(25): SEQ ID NO: 315; WAN024F54; Start 65; Stop 89
ttgatacagcgattcatcacgatat

SEQ ID NO: 260776 - DNA, 25 bp, Artificial
  probe
  misc_feature (1)..(25): SEQ ID NO: 315; WAN024F54; Start 111; Stop 135
aaatctctttcgcttctaaactttc

SEQ ID NO: 260777 - DNA, 25 bp, Artificial
  probe
  misc_feature (1)..(25): SEQ ID NO: 315; WAN024F54; Start 80; Stop 104
atcacgatatcatcacatccaccat

SEQ ID NO: 260778 - DNA, 25 bp, Artificial
  probe
  misc_feature (1)..(25): SEQ ID NO: 315; WAN024F54; Start 67; Stop 91
gatacagcgattcatcacgatatca

SEQ ID NO: 260779 - DNA, 25 bp, Artificial
  probe
  misc_feature (1)..(25): SEQ ID NO: 316; WAN0249XJ; Start 96; Stop 120
caaaatagaggggtagaaagaaggt

SEQ ID NO: 260780 - DNA, 25 bp, Artificial
  probe
  misc_feature (1)..(25): SEQ ID NO: 316; WAN0249XJ; Start 95; Stop 119
ccaaaatagaggggtagaaagaagg

SEQ ID NO: 260781 - DNA, 25 bp, Artificial
  probe
  misc_feature (1)..(25): SEQ ID NO: 316; WAN0249XJ; Start 51; Stop 75
tcttttcttttacccttctcccttg

SEQ ID NO: 260782 - DNA, 25 bp, Artificial
  probe
  misc_feature (1)..(25): SEQ ID NO: 316; WAN0249XJ; Start 50; Stop 74
gtcttttcttttacccttctccctt

SEQ ID NO: 260783 - DNA, 25 bp, Artificial
  probe
  misc_feature (1)..(25): SEQ ID NO: 316; WAN0249XJ; Start 47; Stop 71
tttgtcttttcttttacccttctcc

SEQ ID NO: 260784 - DNA, 25 bp, Artificial
  probe
  misc_feature (1)..(25): SEQ ID NO: 316; WAN0249XJ; Start 16; Stop 40
atcaaagaactccgttatcttgtcg

SEQ ID NO: 260785 - DNA, 25 bp, Artificial
  probe
  misc_feature (1)..(25): SEQ ID NO: 316; WAN0249XJ; Start 48; Stop 72
ttgtcttttcttttacccttctccc

SEQ ID NO: 260786 - DNA, 25 bp, Artificial
  probe
  misc_feature (1)..(25): SEQ ID NO: 316; WAN0249XJ; Start 15; Stop 39
tatcaaagaactccgttatcttgtc

SEQ ID NO: 260787 - DNA, 25 bp, Artificial
  probe
  misc_feature (1)..(25): SEQ ID NO: 316; WAN0249XJ; Start 99; Stop 123
aatagaggggtagaaagaaggtagc

SEQ ID NO: 260788 - DNA, 25 bp, Artificial
  probe
  misc_feature (1)..(25): SEQ ID NO: 316; WAN0249XJ; Start 98; Stop 122
aaatagaggggtagaaagaaggtag

SEQ ID NO: 260789 - DNA, 25 bp, Artificial
  probe
  misc_feature (1)..(25): SEQ ID NO: 316; WAN0249XJ; Start 94; Stop 118
gccaaaatagaggggtagaaagaag

SEQ ID NO: 260790 - DNA, 25 bp, Artificial
  probe
  misc_feature (1)..(25): SEQ ID NO: 316; WAN0249XJ; Start 97; Stop 121
aaaatagaggggtagaaagaaggta

SEQ ID NO: 260791 - DNA, 25 bp, Artificial
  probe
  misc_feature (1)..(25): SEQ ID NO: 316; WAN0249XJ; Start 49; Stop 73
tgtcttttcttttacccttctccct

SEQ ID NO: 260792 - DNA, 25 bp, Artificial
  probe
  misc_feature (1)..(25): SEQ ID NO: 316; WAN0249XJ; Start 93; Stop 117
tgccaaaatagaggggtagaaagaa

SEQ ID NO: 260793 - DNA, 25 bp, Artificial
  probe
  misc_feature (1)..(25): SEQ ID NO: 316; WAN0249XJ; Start 92; Stop 116
ttgccaaaatagaggggtagaaaga

SEQ ID NO: 260794 - DNA, 25 bp, Artificial
  probe
  misc_feature (1)..(25): SEQ ID NO: 316; WAN0249XJ; Start 91; Stop 115
tttgccaaaatagaggggtagaaag

SEQ ID NO: 260795 - DNA, 25 bp, Artificial
  probe
  misc_feature (1)..(25): SEQ ID NO: 316; WAN0249XJ; Start 14; Stop 38
atatcaaagaactccgttatcttgt

SEQ ID NO: 260796 - DNA, 25 bp, Artificial
  probe
  misc_feature (1)..(25): SEQ ID NO: 316; WAN0249XJ; Start 101; Stop 125
tagaggggtagaaagaaggtagcat

SEQ ID NO: 260797 - DNA, 25 bp, Artificial
  probe
  misc_feature (1)..(25): SEQ ID NO: 316; WAN0249XJ; Start 100; Stop 124
atagaggggtagaaagaaggtagca

SEQ ID NO: 260798 - DNA, 25 bp, Artificial
  probe
  misc_feature (1)..(25): SEQ ID NO: 316; WAN0249XJ; Start 52; Stop 76
cttttcttttacccttctcccttgc

SEQ ID NO: 260799 - DNA, 25 bp, Artificial
  probe
  misc_feature (1)..(25): SEQ ID NO: 316; WAN0249XJ; Start 46; Stop 70
ttttgtcttttcttttacccttctc

SEQ ID NO: 260800 - DNA, 25 bp, Artificial
  probe
  misc_feature (1)..(25): SEQ ID NO: 316; WAN0249XJ; Start 67; Stop 91
tctcccttgcattttctctcatttt

SEQ ID NO: 260801 - DNA, 25 bp, Artificial
  probe
  misc_feature (1)..(25): SEQ ID NO: 316; WAN0249XJ; Start 66; Stop 90
ttctcccttgcattttctctcattt

SEQ ID NO: 260802 - DNA, 25 bp, Artificial
  probe
  misc_feature (1)..(25): SEQ ID NO: 316; WAN0249XJ; Start 65; Stop 89
cttctcccttgcattttctctcatt

SEQ ID NO: 260803 - DNA, 25 bp, Artificial
  probe
  misc_feature (1)..(25): SEQ ID NO: 316; WAN0249XJ; Start 90; Stop 114
ttttgccaaaatagaggggtagaaa

SEQ ID NO: 260804 - DNA, 25 bp, Artificial
  probe
  misc_feature (1)..(25): SEQ ID NO: 316; WAN0249XJ; Start 58; Stop 82
ttttacccttctcccttgcattttc

SEQ ID NO: 260805 - DNA, 25 bp, Artificial
  probe
  misc_feature (1)..(25): SEQ ID NO: 316; WAN0249XJ; Start 57; Stop 81
cttttacccttctcccttgcatttt

SEQ ID NO: 260806 - DNA, 25 bp, Artificial
  probe
  misc_feature (1)..(25): SEQ ID NO: 316; WAN0249XJ; Start 13; Stop 37
gatatcaaagaactccgttatcttg

SEQ ID NO: 260807 - DNA, 25 bp, Artificial
  probe
  misc_feature (1)..(25): SEQ ID NO: 316; WAN0249XJ; Start 59; Stop 83
tttacccttctcccttgcattttct

SEQ ID NO: 260808 - DNA, 25 bp, Artificial
  probe
  misc_feature (1)..(25): SEQ ID NO: 316; WAN0249XJ; Start 56; Stop 80
tcttttacccttctcccttgcattt

SEQ ID NO: 260809 - DNA, 25 bp, Artificial
  probe
  misc_feature (1)..(25): SEQ ID NO: 316; WAN0249XJ; Start 55; Stop 79
ttcttttacccttctcccttgcatt

SEQ ID NO: 260810 - DNA, 25 bp, Artificial
  probe
  misc_feature (1)..(25): SEQ ID NO: 316; WAN0249XJ; Start 54; Stop 78
tttcttttacccttctcccttgcat

SEQ ID NO: 260811 - DNA, 25 bp, Artificial
  probe
  misc_feature (1)..(25): SEQ ID NO: 316; WAN0249XJ; Start 53; Stop 77
ttttcttttacccttctcccttgca

SEQ ID NO: 260812 - DNA, 25 bp, Artificial
  probe
  misc_feature (1)..(25): SEQ ID NO: 317; WAN0249W5; Start 180; Stop 204
tcttccagtatgactcatgtaaagg

SEQ ID NO: 260813 - DNA, 25 bp, Artificial
  probe
  misc_feature (1)..(25): SEQ ID NO: 317; WAN0249W5; Start 179; Stop 203
gtcttccagtatgactcatgtaaag

SEQ ID NO: 260814 - DNA, 25 bp, Artificial
  probe
  misc_feature (1)..(25): SEQ ID NO: 317; WAN0249W5; Start 182; Stop 206
ttccagtatgactcatgtaaaggag

SEQ ID NO: 260815 - DNA, 25 bp, Artificial
  probe
  misc_feature (1)..(25): SEQ ID NO: 317; WAN0249W5; Start 181; Stop 205
cttccagtatgactcatgtaaagga

SEQ ID NO: 260816 - DNA, 25 bp, Artificial
  probe
  misc_feature (1)..(25): SEQ ID NO: 317; WAN0249W5; Start 185; Stop 209
cagtatgactcatgtaaaggagctt

SEQ ID NO: 260817 - DNA, 25 bp, Artificial
  probe
  misc_feature (1)..(25): SEQ ID NO: 317; WAN0249W5; Start 175; Stop 199
tctagtcttccagtatgactcatgt

SEQ ID NO: 260818 - DNA, 25 bp, Artificial
  probe
  misc_feature (1)..(25): SEQ ID NO: 317; WAN0249W5; Start 172; Stop 196
tgatctagtcttccagtatgactca

SEQ ID NO: 260819 - DNA, 25 bp, Artificial
  probe
  misc_feature (1)..(25): SEQ ID NO: 317; WAN0249W5; Start 171; Stop 195
ctgatctagtcttccagtatgactc

SEQ ID NO: 260820 - DNA, 25 bp, Artificial
  probe
  misc_feature (1)..(25): SEQ ID NO: 317; WAN0249W5; Start 174; Stop 198
atctagtcttccagtatgactcatg

SEQ ID NO: 260821 - DNA, 25 bp, Artificial
  probe
  misc_feature (1)..(25): SEQ ID NO: 317; WAN0249W5; Start 184; Stop 208
ccagtatgactcatgtaaaggagct

SEQ ID NO: 260822 - DNA, 25 bp, Artificial
  probe
  misc_feature (1)..(25): SEQ ID NO: 317; WAN0249W5; Start 183; Stop 207
tccagtatgactcatgtaaaggagc

SEQ ID NO: 260823 - DNA, 25 bp, Artificial
  probe
  misc_feature (1)..(25): SEQ ID NO: 317; WAN0249W5; Start 176; Stop 200
ctagtcttccagtatgactcatgta

SEQ ID NO: 260824 - DNA, 25 bp, Artificial
  probe
  misc_feature (1)..(25): SEQ ID NO: 317; WAN0249W5; Start 173; Stop 197
gatctagtcttccagtatgactcat

SEQ ID NO: 260825 - DNA, 25 bp, Artificial
  probe
  misc_feature (1)..(25): SEQ ID NO: 317; WAN0249W5; Start 144; Stop 168
tgtgttataatgaagtgtgactatt

SEQ ID NO: 260826 - DNA, 25 bp, Artificial
  probe
  misc_feature (1)..(25): SEQ ID NO: 317; WAN0249W5; Start 141; Stop 165
ttatgtgttataatgaagtgtgact

SEQ ID NO: 260827 - DNA, 25 bp, Artificial
  probe
  misc_feature (1)..(25): SEQ ID NO: 317; WAN0249W5; Start 177; Stop 201
tagtcttccagtatgactcatgtaa

SEQ ID NO: 260828 - DNA, 25 bp, Artificial
  probe
  misc_feature (1)..(25): SEQ ID NO: 317; WAN0249W5; Start 188; Stop 212
tatgactcatgtaaaggagctttcc

SEQ ID NO: 260829 - DNA, 25 bp, Artificial
  probe
  misc_feature (1)..(25): SEQ ID NO: 317; WAN0249W5; Start 186; Stop 210
agtatgactcatgtaaaggagcttt

SEQ ID NO: 260830 - DNA, 25 bp, Artificial
  probe
  misc_feature (1)..(25): SEQ ID NO: 317; WAN0249W5; Start 187; Stop 211
gtatgactcatgtaaaggagctttc

SEQ ID NO: 260831 - DNA, 25 bp, Artificial
  probe
  misc_feature (1)..(25): SEQ ID NO: 317; WAN0249W5; Start 143; Stop 167
atgtgttataatgaagtgtgactat

SEQ ID NO: 260832 - DNA, 25 bp, Artificial
  probe
  misc_feature (1)..(25): SEQ ID NO: 317; WAN0249W5; Start 145; Stop 169
gtgttataatgaagtgtgactattc

SEQ ID NO: 260833 - DNA, 25 bp, Artificial
  probe
  misc_feature (1)..(25): SEQ ID NO: 317; WAN0249W5; Start 59; Stop 83
agaaaattatggaaaagagagaagc

SEQ ID NO: 260834 - DNA, 25 bp, Artificial
  probe
  misc_feature (1)..(25): SEQ ID NO: 317; WAN0249W5; Start 1; Stop 25
acaaatcagtctcatttctaactta

SEQ ID NO: 260835 - DNA, 25 bp, Artificial
  probe
  misc_feature (1)..(25): SEQ ID NO: 317; WAN0249W5; Start 142; Stop 166
tatgtgttataatgaagtgtgacta

SEQ ID NO: 260836 - DNA, 25 bp, Artificial
  probe
  misc_feature (1)..(25): SEQ ID NO: 317; WAN0249W5; Start 178; Stop 202
agtcttccagtatgactcatgtaaa

SEQ ID NO: 260837 - DNA, 25 bp, Artificial
  probe
  misc_feature (1)..(25): SEQ ID NO: 317; WAN0249W5; Start 189; Stop 213
atgactcatgtaaaggagctttccc

SEQ ID NO: 260838 - DNA, 25 bp, Artificial
  probe
  misc_feature (1)..(25): SEQ ID NO: 317; WAN0249W5; Start 26; Stop 50
aaatcttactcttaattgtaccaca

SEQ ID NO: 260839 - DNA, 25 bp, Artificial
  probe
  misc_feature (1)..(25): SEQ ID NO: 317; WAN0249W5; Start 60; Stop 84
gaaaattatggaaaagagagaagct

SEQ ID NO: 260840 - DNA, 25 bp, Artificial
  probe
  misc_feature (1)..(25): SEQ ID NO: 317; WAN0249W5; Start 140; Stop 164
attatgtgttataatgaagtgtgac

SEQ ID NO: 260841 - DNA, 25 bp, Artificial
  probe
  misc_feature (1)..(25): SEQ ID NO: 317; WAN0249W5; Start 27; Stop 51
aatcttactcttaattgtaccacaa

SEQ ID NO: 260842 - DNA, 25 bp, Artificial
  probe
  misc_feature (1)..(25): SEQ ID NO: 317; WAN0249W5; Start 190; Stop 214
tgactcatgtaaaggagctttccct

SEQ ID NO: 260843 - DNA, 25 bp, Artificial
  probe
  misc_feature (1)..(25): SEQ ID NO: 317; WAN0249W5; Start 2; Stop 26
caaatcagtctcatttctaacttaa

SEQ ID NO: 260844 - DNA, 25 bp, Artificial
  probe
  misc_feature (1)..(25): SEQ ID NO: 317; WAN0249W5; Start 54; Stop 78
tgagtagaaaattatggaaaagaga

SEQ ID NO: 260845 - DNA, 25 bp, Artificial
  probe
  misc_feature (1)..(25): SEQ ID NO: 318; WAN024DLR-3; Start 365; Stop 389
atctcattgctcaaccaactaactt

SEQ ID NO: 260846 - DNA, 25 bp, Artificial
  probe
  misc_feature (1)..(25): SEQ ID NO: 318; WAN024DLR-3; Start 364; Stop 388
aatctcattgctcaaccaactaact

SEQ ID NO: 260847 - DNA, 25 bp, Artificial
  probe
  misc_feature (1)..(25): SEQ ID NO: 318; WAN024DLR-3; Start 711; Stop 735
catccatgattcttacgattctagc

SEQ ID NO: 260848 - DNA, 25 bp, Artificial
  probe
  misc_feature (1)..(25): SEQ ID NO: 318; WAN024DLR-3; Start 712; Stop 736
atccatgattcttacgattctagcg

SEQ ID NO: 260849 - DNA, 25 bp, Artificial
  probe
  misc_feature (1)..(25): SEQ ID NO: 318; WAN024DLR-3; Start 714; Stop 738
ccatgattcttacgattctagcgac

SEQ ID NO: 260850 - DNA, 25 bp, Artificial
  probe
  misc_feature (1)..(25): SEQ ID NO: 318; WAN024DLR-3; Start 713; Stop 737
tccatgattcttacgattctagcga

SEQ ID NO: 260851 - DNA, 25 bp, Artificial
  probe
  misc_feature (1)..(25): SEQ ID NO: 318; WAN024DLR-3; Start 703; Stop 727
ccttacttcatccatgattcttacg

SEQ ID NO: 260852 - DNA, 25 bp, Artificial
  probe
  misc_feature (1)..(25): SEQ ID NO: 318; WAN024DLR-3; Start 707; Stop 731
acttcatccatgattcttacgattc

SEQ ID NO: 260853 - DNA, 25 bp, Artificial
  probe
  misc_feature (1)..(25): SEQ ID NO: 318; WAN024DLR-3; Start 715; Stop 739
catgattcttacgattctagcgacg

SEQ ID NO: 260854 - DNA, 25 bp, Artificial
  probe
  misc_feature (1)..(25): SEQ ID NO: 318; WAN024DLR-3; Start 708; Stop 732
cttcatccatgattcttacgattct

SEQ ID NO: 260855 - DNA, 25 bp, Artificial
  probe
  misc_feature (1)..(25): SEQ ID NO: 318; WAN024DLR-3; Start 696; Stop 720
tgactatccttacttcatccatgat

SEQ ID NO: 260856 - DNA, 25 bp, Artificial
  probe
  misc_feature (1)..(25): SEQ ID NO: 318; WAN024DLR-3; Start 1360; Stop 1384
caagaagcacaagcatcatctgtaa

SEQ ID NO: 260857 - DNA, 25 bp, Artificial
  probe
  misc_feature (1)..(25): SEQ ID NO: 318; WAN024DLR-3; Start 704; Stop 728
cttacttcatccatgattcttacga

SEQ ID NO: 260858 - DNA, 25 bp, Artificial
  probe
  misc_feature (1)..(25): SEQ ID NO: 318; WAN024DLR-3; Start 710; Stop 734
tcatccatgattcttacgattctag

SEQ ID NO: 260859 - DNA, 25 bp, Artificial
  probe
  misc_feature (1)..(25): SEQ ID NO: 318; WAN024DLR-3; Start 702; Stop 726
tccttacttcatccatgattcttac

SEQ ID NO: 260860 - DNA, 25 bp, Artificial
  probe
  misc_feature (1)..(25): SEQ ID NO: 318; WAN024DLR-3; Start 622; Stop 646
tacaagactccagtagcagaggata

SEQ ID NO: 260861 - DNA, 25 bp, Artificial
  probe
  misc_feature (1)..(25): SEQ ID NO: 318; WAN024DLR-3; Start 1272; Stop 1296
tgattctactaaaccagatgccaaa

SEQ ID NO: 260862 - DNA, 25 bp, Artificial
  probe
  misc_feature (1)..(25): SEQ ID NO: 318; WAN024DLR-3; Start 1273; Stop 1297
gattctactaaaccagatgccaaag

SEQ ID NO: 260863 - DNA, 25 bp, Artificial
  probe
  misc_feature (1)..(25): SEQ ID NO: 318; WAN024DLR-3; Start 624; Stop 648
caagactccagtagcagaggataag

SEQ ID NO: 260864 - DNA, 25 bp, Artificial
  probe
  misc_feature (1)..(25): SEQ ID NO: 318; WAN024DLR-3; Start 706; Stop 730
tacttcatccatgattcttacgatt

SEQ ID NO: 260865 - DNA, 25 bp, Artificial
  probe
  misc_feature (1)..(25): SEQ ID NO: 318; WAN024DLR-3; Start 705; Stop 729
ttacttcatccatgattcttacgat

SEQ ID NO: 260866 - DNA, 25 bp, Artificial
  probe
  misc_feature (1)..(25): SEQ ID NO: 318; WAN024DLR-3; Start 698; Stop 722
actatccttacttcatccatgattc

SEQ ID NO: 260867 - DNA, 25 bp, Artificial
  probe
  misc_feature (1)..(25): SEQ ID NO: 318; WAN024DLR-3; Start 697; Stop 721
gactatccttacttcatccatgatt

SEQ ID NO: 260868 - DNA, 25 bp, Artificial
  probe
  misc_feature (1)..(25): SEQ ID NO: 318; WAN024DLR-3; Start 363; Stop 387
aaatctcattgctcaaccaactaac

SEQ ID NO: 260869 - DNA, 25 bp, Artificial
  probe
  misc_feature (1)..(25): SEQ ID NO: 318; WAN024DLR-3; Start 1274; Stop 1298
attctactaaaccagatgccaaagt

SEQ ID NO: 260870 - DNA, 25 bp, Artificial
  probe
  misc_feature (1)..(25): SEQ ID NO: 318; WAN024DLR-3; Start 367; Stop 391
ctcattgctcaaccaactaactttg

SEQ ID NO: 260871 - DNA, 25 bp, Artificial
  probe
  misc_feature (1)..(25): SEQ ID NO: 318; WAN024DLR-3; Start 366; Stop 390
tctcattgctcaaccaactaacttt

SEQ ID NO: 260872 - DNA, 25 bp, Artificial
  probe
  misc_feature (1)..(25): SEQ ID NO: 318; WAN024DLR-3; Start 699; Stop 723
ctatccttacttcatccatgattct

SEQ ID NO: 260873 - DNA, 25 bp, Artificial
  probe
  misc_feature (1)..(25): SEQ ID NO: 318; WAN024DLR-3; Start 1359; Stop 1383
acaagaagcacaagcatcatctgta

SEQ ID NO: 260874 - DNA, 25 bp, Artificial
  probe
  misc_feature (1)..(25): SEQ ID NO: 318; WAN024DLR-3; Start 709; Stop 733
ttcatccatgattcttacgattcta

SEQ ID NO: 260875 - DNA, 25 bp, Artificial
  probe
  misc_feature (1)..(25): SEQ ID NO: 318; WAN024DLR-3; Start 623; Stop 647
acaagactccagtagcagaggataa

SEQ ID NO: 260876 - DNA, 25 bp, Artificial
  probe
  misc_feature (1)..(25): SEQ ID NO: 318; WAN024DLR-3; Start 1267; Stop 1291
agacctgattctactaaaccagatg

SEQ ID NO: 260877 - DNA, 25 bp, Artificial
  probe
  misc_feature (1)..(25): SEQ ID NO: 318; WAN024DLR-3; Start 1271; Stop 1295
ctgattctactaaaccagatgccaa

SEQ ID NO: 260878 - DNA, 25 bp, Artificial
  probe
  misc_feature (1)..(25): SEQ ID NO: 319; WAN024ABW; Start 1; Stop 25
acaagacctctcaagactaaacaag

SEQ ID NO: 260879 - DNA, 25 bp, Artificial
  probe
  misc_feature (1)..(25): SEQ ID NO: 319; WAN024ABW; Start 3; Stop 27
aagacctctcaagactaaacaagac

SEQ ID NO: 260880 - DNA, 25 bp, Artificial
  probe
  misc_feature (1)..(25): SEQ ID NO: 319; WAN024ABW; Start 2; Stop 26
caagacctctcaagactaaacaaga

SEQ ID NO: 260881 - DNA, 25 bp, Artificial
  probe
  misc_feature (1)..(25): SEQ ID NO: 319; WAN024ABW; Start 8; Stop 32
ctctcaagactaaacaagaccaatg

SEQ ID NO: 260882 - DNA, 25 bp, Artificial
  probe
  misc_feature (1)..(25): SEQ ID NO: 319; WAN024ABW; Start 7; Stop 31
cctctcaagactaaacaagaccaat

SEQ ID NO: 260883 - DNA, 25 bp, Artificial
  probe
  misc_feature (1)..(25): SEQ ID NO: 319; WAN024ABW; Start 9; Stop 33
tctcaagactaaacaagaccaatgc

SEQ ID NO: 260884 - DNA, 25 bp, Artificial
  probe
  misc_feature (1)..(25): SEQ ID NO: 319; WAN024ABW; Start 6; Stop 30
acctctcaagactaaacaagaccaa

SEQ ID NO: 260885 - DNA, 25 bp, Artificial
  probe
  misc_feature (1)..(25): SEQ ID NO: 319; WAN024ABW; Start 4; Stop 28
agacctctcaagactaaacaagacc

SEQ ID NO: 260886 - DNA, 25 bp, Artificial
  probe
  misc_feature (1)..(25): SEQ ID NO: 319; WAN024ABW; Start 5; Stop 29
gacctctcaagactaaacaagacca

SEQ ID NO: 260887 - DNA, 25 bp, Artificial
  probe
  misc_feature (1)..(25): SEQ ID NO: 319; WAN024ABW; Start 10; Stop 34
ctcaagactaaacaagaccaatgcg

SEQ ID NO: 260888 - DNA, 25 bp, Artificial
  probe
  misc_feature (1)..(25): SEQ ID NO: 319; WAN024ABW; Start 11; Stop 35
tcaagactaaacaagaccaatgcgc

SEQ ID NO: 260889 - DNA, 25 bp, Artificial
  probe
  misc_feature (1)..(25): SEQ ID NO: 319; WAN024ABW; Start 32; Stop 56
gcgcagttccttatccttagaaagg

SEQ ID NO: 260890 - DNA, 25 bp, Artificial
  probe
  misc_feature (1)..(25): SEQ ID NO: 320; WAN024A8X; Start 25; Stop 49
aaggcattcaagataatcgtaagtc

SEQ ID NO: 260891 - DNA, 25 bp, Artificial
  probe
  misc_feature (1)..(25): SEQ ID NO: 320; WAN024A8X; Start 26; Stop 50
aggcattcaagataatcgtaagtct

SEQ ID NO: 260892 - DNA, 25 bp, Artificial
  probe
  misc_feature (1)..(25): SEQ ID NO: 320; WAN024A8X; Start 22; Stop 46
cctaaggcattcaagataatcgtaa

SEQ ID NO: 260893 - DNA, 25 bp, Artificial
  probe
  misc_feature (1)..(25): SEQ ID NO: 320; WAN024A8X; Start 24; Stop 48
taaggcattcaagataatcgtaagt

SEQ ID NO: 260894 - DNA, 25 bp, Artificial
  probe
  misc_feature (1)..(25): SEQ ID NO: 320; WAN024A8X; Start 23; Stop 47
ctaaggcattcaagataatcgtaag

SEQ ID NO: 260895 - DNA, 25 bp, Artificial
  probe
  misc_feature (1)..(25): SEQ ID NO: 320; WAN024A8X; Start 148; Stop 172
gtttcaaatagttatcgcacaagtc

SEQ ID NO: 260896 - DNA, 25 bp, Artificial
  probe
  misc_feature (1)..(25): SEQ ID NO: 320; WAN024A8X; Start 149; Stop 173
tttcaaatagttatcgcacaagtct

SEQ ID NO: 260897 - DNA, 25 bp, Artificial
  probe
  misc_feature (1)..(25): SEQ ID NO: 320; WAN024A8X; Start 21; Stop 45
ccctaaggcattcaagataatcgta

SEQ ID NO: 260898 - DNA, 25 bp, Artificial
  probe
  misc_feature (1)..(25): SEQ ID NO: 320; WAN024A8X; Start 16; Stop 40
tgtttccctaaggcattcaagataa

SEQ ID NO: 260899 - DNA, 25 bp, Artificial
  probe
  misc_feature (1)..(25): SEQ ID NO: 320; WAN024A8X; Start 19; Stop 43
ttccctaaggcattcaagataatcg

SEQ ID NO: 260900 - DNA, 25 bp, Artificial
  probe
  misc_feature (1)..(25): SEQ ID NO: 320; WAN024A8X; Start 15; Stop 39
atgtttccctaaggcattcaagata

SEQ ID NO: 260901 - DNA, 25 bp, Artificial
  probe
  misc_feature (1)..(25): SEQ ID NO: 320; WAN024A8X; Start 17; Stop 41
gtttccctaaggcattcaagataat

SEQ ID NO: 260902 - DNA, 25 bp, Artificial
  probe
  misc_feature (1)..(25): SEQ ID NO: 320; WAN024A8X; Start 18; Stop 42
tttccctaaggcattcaagataatc

SEQ ID NO: 260903 - DNA, 25 bp, Artificial
  probe
  misc_feature (1)..(25): SEQ ID NO: 320; WAN024A8X; Start 150; Stop 174
ttcaaatagttatcgcacaagtcta

SEQ ID NO: 260904 - DNA, 25 bp, Artificial
  probe
  misc_feature (1)..(25): SEQ ID NO: 320; WAN024A8X; Start 27; Stop 51
ggcattcaagataatcgtaagtctt

SEQ ID NO: 260905 - DNA, 25 bp, Artificial
  probe
  misc_feature (1)..(25): SEQ ID NO: 320; WAN024A8X; Start 20; Stop 44
tccctaaggcattcaagataatcgt

SEQ ID NO: 260906 - DNA, 25 bp, Artificial
  probe
  misc_feature (1)..(25): SEQ ID NO: 320; WAN024A8X; Start 147; Stop 171
tgtttcaaatagttatcgcacaagt

SEQ ID NO: 260907 - DNA, 25 bp, Artificial
  probe
  misc_feature (1)..(25): SEQ ID NO: 320; WAN024A8X; Start 4; Stop 28
agtagtatagcatgtttccctaagg

SEQ ID NO: 260908 - DNA, 25 bp, Artificial
  probe
  misc_feature (1)..(25): SEQ ID NO: 320; WAN024A8X; Start 144; Stop 168
tcttgtttcaaatagttatcgcaca

SEQ ID NO: 260909 - DNA, 25 bp, Artificial
  probe
  misc_feature (1)..(25): SEQ ID NO: 320; WAN024A8X; Start 5; Stop 29
gtagtatagcatgtttccctaaggc

SEQ ID NO: 260910 - DNA, 25 bp, Artificial
  probe
  misc_feature (1)..(25): SEQ ID NO: 320; WAN024A8X; Start 6; Stop 30
tagtatagcatgtttccctaaggca

SEQ ID NO: 260911 - DNA, 25 bp, Artificial
  probe
  misc_feature (1)..(25): SEQ ID NO: 320; WAN024A8X; Start 143; Stop 167
atcttgtttcaaatagttatcgcac

SEQ ID NO: 260912 - DNA, 25 bp, Artificial
  probe
  misc_feature (1)..(25): SEQ ID NO: 320; WAN024A8X; Start 9; Stop 33
tatagcatgtttccctaaggcattc

SEQ ID NO: 260913 - DNA, 25 bp, Artificial
  probe
  misc_feature (1)..(25): SEQ ID NO: 320; WAN024A8X; Start 8; Stop 32
gtatagcatgtttccctaaggcatt

SEQ ID NO: 260914 - DNA, 25 bp, Artificial
  probe
  misc_feature (1)..(25): SEQ ID NO: 320; WAN024A8X; Start 14; Stop 38
catgtttccctaaggcattcaagat

SEQ ID NO: 260915 - DNA, 25 bp, Artificial
  probe
  misc_feature (1)..(25): SEQ ID NO: 320; WAN024A8X; Start 7; Stop 31
agtatagcatgtttccctaaggcat

SEQ ID NO: 260916 - DNA, 25 bp, Artificial
  probe
  misc_feature (1)..(25): SEQ ID NO: 320; WAN024A8X; Start 151; Stop 175
tcaaatagttatcgcacaagtctat

SEQ ID NO: 260917 - DNA, 25 bp, Artificial
  probe
  misc_feature (1)..(25): SEQ ID NO: 320; WAN024A8X; Start 2; Stop 26
caagtagtatagcatgtttccctaa

SEQ ID NO: 260918 - DNA, 25 bp, Artificial
  probe
  misc_feature (1)..(25): SEQ ID NO: 320; WAN024A8X; Start 1; Stop 25
acaagtagtatagcatgtttcccta

SEQ ID NO: 260919 - DNA, 25 bp, Artificial
  probe
  misc_feature (1)..(25): SEQ ID NO: 320; WAN024A8X; Start 142; Stop 166
aatcttgtttcaaatagttatcgca

SEQ ID NO: 260920 - DNA, 25 bp, Artificial
  probe
  misc_feature (1)..(25): SEQ ID NO: 320; WAN024A8X; Start 3; Stop 27
aagtagtatagcatgtttccctaag

SEQ ID NO: 260921 - DNA, 25 bp, Artificial
  probe
  misc_feature (1)..(25): SEQ ID NO: 320; WAN024A8X; Start 129; Stop 153
tttctaaccagctaatcttgtttca

SEQ ID NO: 260922 - DNA, 25 bp, Artificial
  probe
  misc_feature (1)..(25): SEQ ID NO: 320; WAN024A8X; Start 135; Stop 159
accagctaatcttgtttcaaatagt

SEQ ID NO: 260923 - DNA, 25 bp, Artificial
  probe
  misc_feature (1)..(25): SEQ ID NO: 321; WAN0249Q3; Start 332; Stop 356
ggagatagagcaattcatagtcatc

SEQ ID NO: 260924 - DNA, 25 bp, Artificial
  probe
  misc_feature (1)..(25): SEQ ID NO: 321; WAN0249Q3; Start 333; Stop 357
gagatagagcaattcatagtcatca

SEQ ID NO: 260925 - DNA, 25 bp, Artificial
  probe
  misc_feature (1)..(25): SEQ ID NO: 321; WAN0249Q3; Start 334; Stop 358
agatagagcaattcatagtcatcaa

SEQ ID NO: 260926 - DNA, 25 bp, Artificial
  probe
  misc_feature (1)..(25): SEQ ID NO: 321; WAN0249Q3; Start 286; Stop 310
cttgacttactccttgatttactgc

SEQ ID NO: 260927 - DNA, 25 bp, Artificial
  probe
  misc_feature (1)..(25): SEQ ID NO: 321; WAN0249Q3; Start 192; Stop 216
taggttgtcggctatttattgtgaa

SEQ ID NO: 260928 - DNA, 25 bp, Artificial
  probe
  misc_feature (1)..(25): SEQ ID NO: 321; WAN0249Q3; Start 193; Stop 217
aggttgtcggctatttattgtgaat

SEQ ID NO: 260929 - DNA, 25 bp, Artificial
  probe
  misc_feature (1)..(25): SEQ ID NO: 321; WAN0249Q3; Start 327; Stop 351
aagtgggagatagagcaattcatag

SEQ ID NO: 260930 - DNA, 25 bp, Artificial
  probe
  misc_feature (1)..(25): SEQ ID NO: 321; WAN0249Q3; Start 331; Stop 355
gggagatagagcaattcatagtcat

SEQ ID NO: 260931 - DNA, 25 bp, Artificial
  probe
  misc_feature (1)..(25): SEQ ID NO: 321; WAN0249Q3; Start 329; Stop 353
gtgggagatagagcaattcatagtc

SEQ ID NO: 260932 - DNA, 25 bp, Artificial
  probe
  misc_feature (1)..(25): SEQ ID NO: 321; WAN0249Q3; Start 326; Stop 350
aaagtgggagatagagcaattcata

SEQ ID NO: 260933 - DNA, 25 bp, Artificial
  probe
  misc_feature (1)..(25): SEQ ID NO: 321; WAN0249Q3; Start 330; Stop 354
tgggagatagagcaattcatagtca

SEQ ID NO: 260934 - DNA, 25 bp, Artificial
  probe
  misc_feature (1)..(25): SEQ ID NO: 321; WAN0249Q3; Start 328; Stop 352
agtgggagatagagcaattcatagt

SEQ ID NO: 260935 - DNA, 25 bp, Artificial
  probe
  misc_feature (1)..(25): SEQ ID NO: 321; WAN0249Q3; Start 194; Stop 218
ggttgtcggctatttattgtgaata

SEQ ID NO: 260936 - DNA, 25 bp, Artificial
  probe
  misc_feature (1)..(25): SEQ ID NO: 321; WAN0249Q3; Start 285; Stop 309
tcttgacttactccttgatttactg

SEQ ID NO: 260937 - DNA, 25 bp, Artificial
  probe
  misc_feature (1)..(25): SEQ ID NO: 321; WAN0249Q3; Start 195; Stop 219
gttgtcggctatttattgtgaatac

SEQ ID NO: 260938 - DNA, 25 bp, Artificial
  probe
  misc_feature (1)..(25): SEQ ID NO: 321; WAN0249Q3; Start 191; Stop 215
ataggttgtcggctatttattgtga

SEQ ID NO: 260939 - DNA, 25 bp, Artificial
  probe
  misc_feature (1)..(25): SEQ ID NO: 321; WAN0249Q3; Start 190; Stop 214
cataggttgtcggctatttattgtg

SEQ ID NO: 260940 - DNA, 25 bp, Artificial
  probe
  misc_feature (1)..(25): SEQ ID NO: 321; WAN0249Q3; Start 189; Stop 213
acataggttgtcggctatttattgt

SEQ ID NO: 260941 - DNA, 25 bp, Artificial
  probe
  misc_feature (1)..(25): SEQ ID NO: 321; WAN0249Q3; Start 196; Stop 220
ttgtcggctatttattgtgaataca

SEQ ID NO: 260942 - DNA, 25 bp, Artificial
  probe
  misc_feature (1)..(25): SEQ ID NO: 321; WAN0249Q3; Start 197; Stop 221
tgtcggctatttattgtgaatacat

SEQ ID NO: 260943 - DNA, 25 bp, Artificial
  probe
  misc_feature (1)..(25): SEQ ID NO: 321; WAN0249Q3; Start 62; Stop 86
agaagattgaaataggatgagaaca

SEQ ID NO: 260944 - DNA, 25 bp, Artificial
  probe
  misc_feature (1)..(25): SEQ ID NO: 321; WAN0249Q3; Start 391; Stop 415
taaacacatttcaaattccctcaaa

SEQ ID NO: 260945 - DNA, 25 bp, Artificial
  probe
  misc_feature (1)..(25): SEQ ID NO: 321; WAN0249Q3; Start 390; Stop 414
ttaaacacatttcaaattccctcaa

SEQ ID NO: 260946 - DNA, 25 bp, Artificial
  probe
  misc_feature (1)..(25): SEQ ID NO: 321; WAN0249Q3; Start 67; Stop 91
attgaaataggatgagaacaaatcg

SEQ ID NO: 260947 - DNA, 25 bp, Artificial
  probe
  misc_feature (1)..(25): SEQ ID NO: 321; WAN0249Q3; Start 288; Stop 312
tgacttactccttgatttactgcat

SEQ ID NO: 260948 - DNA, 25 bp, Artificial
  probe
  misc_feature (1)..(25): SEQ ID NO: 321; WAN0249Q3; Start 287; Stop 311
ttgacttactccttgatttactgca

SEQ ID NO: 260949 - DNA, 25 bp, Artificial
  probe
  misc_feature (1)..(25): SEQ ID NO: 321; WAN0249Q3; Start 198; Stop 222
gtcggctatttattgtgaatacatt

SEQ ID NO: 260950 - DNA, 25 bp, Artificial
  probe
  misc_feature (1)..(25): SEQ ID NO: 321; WAN0249Q3; Start 298; Stop 322
cttgatttactgcataacaatggga

SEQ ID NO: 260951 - DNA, 25 bp, Artificial
  probe
  misc_feature (1)..(25): SEQ ID NO: 321; WAN0249Q3; Start 297; Stop 321
ccttgatttactgcataacaatggg

SEQ ID NO: 260952 - DNA, 25 bp, Artificial
  probe
  misc_feature (1)..(25): SEQ ID NO: 321; WAN0249Q3; Start 296; Stop 320
tccttgatttactgcataacaatgg

SEQ ID NO: 260953 - DNA, 25 bp, Artificial
  probe
  misc_feature (1)..(25): SEQ ID NO: 321; WAN0249Q3; Start 335; Stop 359
gatagagcaattcatagtcatcaaa

SEQ ID NO: 260954 - DNA, 25 bp, Artificial
  probe
  misc_feature (1)..(25): SEQ ID NO: 321; WAN0249Q3; Start 299; Stop 323
ttgatttactgcataacaatgggat

SEQ ID NO: 260955 - DNA, 25 bp, Artificial
  probe
  misc_feature (1)..(25): SEQ ID NO: 321; WAN0249Q3; Start 68; Stop 92
ttgaaataggatgagaacaaatcga

SEQ ID NO: 260956 - DNA, 25 bp, Artificial
  probe
  misc_feature (1)..(25): SEQ ID NO: 322; WAN0249ZV; Start 20; Stop 44
aaagaaccacatctgacaatcctag

SEQ ID NO: 260957 - DNA, 25 bp, Artificial
  probe
  misc_feature (1)..(25): SEQ ID NO: 322; WAN0249ZV; Start 8; Stop 32
actgaataagcaaaagaaccacatc

SEQ ID NO: 260958 - DNA, 25 bp, Artificial
  probe
  misc_feature (1)..(25): SEQ ID NO: 322; WAN0249ZV; Start 7; Stop 31
gactgaataagcaaaagaaccacat

SEQ ID NO: 260959 - DNA, 25 bp, Artificial
  probe
  misc_feature (1)..(25): SEQ ID NO: 322; WAN0249ZV; Start 5; Stop 29
tagactgaataagcaaaagaaccac

SEQ ID NO: 260960 - DNA, 25 bp, Artificial
  probe
  misc_feature (1)..(25): SEQ ID NO: 322; WAN0249ZV; Start 6; Stop 30
agactgaataagcaaaagaaccaca

SEQ ID NO: 260961 - DNA, 25 bp, Artificial
  probe
  misc_feature (1)..(25): SEQ ID NO: 322; WAN0249ZV; Start 19; Stop 43
aaaagaaccacatctgacaatccta

SEQ ID NO: 260962 - DNA, 25 bp, Artificial
  probe
  misc_feature (1)..(25): SEQ ID NO: 322; WAN0249ZV; Start 12; Stop 36
aataagcaaaagaaccacatctgac

SEQ ID NO: 260963 - DNA, 25 bp, Artificial
  probe
  misc_feature (1)..(25): SEQ ID NO: 322; WAN0249ZV; Start 11; Stop 35
gaataagcaaaagaaccacatctga

SEQ ID NO: 260964 - DNA, 25 bp, Artificial
  probe
  misc_feature (1)..(25): SEQ ID NO: 322; WAN0249ZV; Start 10; Stop 34
tgaataagcaaaagaaccacatctg

SEQ ID NO: 260965 - DNA, 25 bp, Artificial
  probe
  misc_feature (1)..(25): SEQ ID NO: 322; WAN0249ZV; Start 9; Stop 33
ctgaataagcaaaagaaccacatct

SEQ ID NO: 260966 - DNA, 25 bp, Artificial
  probe
  misc_feature (1)..(25): SEQ ID NO: 322; WAN0249ZV; Start 13; Stop 37
ataagcaaaagaaccacatctgaca

SEQ ID NO: 260967 - DNA, 25 bp, Artificial
  probe
  misc_feature (1)..(25): SEQ ID NO: 322; WAN0249ZV; Start 14; Stop 38
taagcaaaagaaccacatctgacaa

SEQ ID NO: 260968 - DNA, 25 bp, Artificial
  probe
  misc_feature (1)..(25): SEQ ID NO: 322; WAN0249ZV; Start 4; Stop 28
atagactgaataagcaaaagaacca

SEQ ID NO: 260969 - DNA, 25 bp, Artificial
  probe
  misc_feature (1)..(25): SEQ ID NO: 322; WAN0249ZV; Start 18; Stop 42
caaaagaaccacatctgacaatcct

SEQ ID NO: 260970 - DNA, 25 bp, Artificial
  probe
  misc_feature (1)..(25): SEQ ID NO: 322; WAN0249ZV; Start 15; Stop 39
aagcaaaagaaccacatctgacaat

SEQ ID NO: 260971 - DNA, 25 bp, Artificial
  probe
  misc_feature (1)..(25): SEQ ID NO: 322; WAN0249ZV; Start 16; Stop 40
agcaaaagaaccacatctgacaatc

SEQ ID NO: 260972 - DNA, 25 bp, Artificial
  probe
  misc_feature (1)..(25): SEQ ID NO: 322; WAN0249ZV; Start 21; Stop 45
aagaaccacatctgacaatcctagg

SEQ ID NO: 260973 - DNA, 25 bp, Artificial
  probe
  misc_feature (1)..(25): SEQ ID NO: 322; WAN0249ZV; Start 3; Stop 27
aatagactgaataagcaaaagaacc

SEQ ID NO: 260974 - DNA, 25 bp, Artificial
  probe
  misc_feature (1)..(25): SEQ ID NO: 322; WAN0249ZV; Start 26; Stop 50
ccacatctgacaatcctaggttgat

SEQ ID NO: 260975 - DNA, 25 bp, Artificial
  probe
  misc_feature (1)..(25): SEQ ID NO: 322; WAN0249ZV; Start 27; Stop 51
cacatctgacaatcctaggttgatt

SEQ ID NO: 260976 - DNA, 25 bp, Artificial
  probe
  misc_feature (1)..(25): SEQ ID NO: 322; WAN0249ZV; Start 17; Stop 41
gcaaaagaaccacatctgacaatcc

SEQ ID NO: 260977 - DNA, 25 bp, Artificial
  probe
  misc_feature (1)..(25): SEQ ID NO: 322; WAN0249ZV; Start 1; Stop 25
acaatagactgaataagcaaaagaa

SEQ ID NO: 260978 - DNA, 25 bp, Artificial
  probe
  misc_feature (1)..(25): SEQ ID NO: 322; WAN0249ZV; Start 2; Stop 26
caatagactgaataagcaaaagaac

SEQ ID NO: 260979 - DNA, 25 bp, Artificial
  probe
  misc_feature (1)..(25): SEQ ID NO: 322; WAN0249ZV; Start 28; Stop 52
acatctgacaatcctaggttgattt

SEQ ID NO: 260980 - DNA, 25 bp, Artificial
  probe
  misc_feature (1)..(25): SEQ ID NO: 322; WAN0249ZV; Start 22; Stop 46
agaaccacatctgacaatcctaggt

SEQ ID NO: 260981 - DNA, 25 bp, Artificial
  probe
  misc_feature (1)..(25): SEQ ID NO: 322; WAN0249ZV; Start 25; Stop 49
accacatctgacaatcctaggttga

SEQ ID NO: 260982 - DNA, 25 bp, Artificial
  probe
  misc_feature (1)..(25): SEQ ID NO: 322; WAN0249ZV; Start 31; Stop 55
tctgacaatcctaggttgatttaac

SEQ ID NO: 260983 - DNA, 25 bp, Artificial
  probe
  misc_feature (1)..(25): SEQ ID NO: 322; WAN0249ZV; Start 29; Stop 53
catctgacaatcctaggttgattta

SEQ ID NO: 260984 - DNA, 25 bp, Artificial
  probe
  misc_feature (1)..(25): SEQ ID NO: 322; WAN0249ZV; Start 70; Stop 94
aacgcggttccaccctaatttatta

SEQ ID NO: 260985 - DNA, 25 bp, Artificial
  probe
  misc_feature (1)..(25): SEQ ID NO: 322; WAN0249ZV; Start 30; Stop 54
atctgacaatcctaggttgatttaa

SEQ ID NO: 260986 - DNA, 25 bp, Artificial
  probe
  misc_feature (1)..(25): SEQ ID NO: 322; WAN0249ZV; Start 71; Stop 95
acgcggttccaccctaatttattac

SEQ ID NO: 260987 - DNA, 25 bp, Artificial
  probe
  misc_feature (1)..(25): SEQ ID NO: 322; WAN0249ZV; Start 69; Stop 93
aaacgcggttccaccctaatttatt

SEQ ID NO: 260988 - DNA, 25 bp, Artificial
  probe
  misc_feature (1)..(25): SEQ ID NO: 322; WAN0249ZV; Start 23; Stop 47
gaaccacatctgacaatcctaggtt

SEQ ID NO: 260989 - DNA, 25 bp, Artificial
  probe
  misc_feature (1)..(25): SEQ ID NO: 323; WAN0249YL; Start 108; Stop 132
tttcctgctccctttaatagactat

SEQ ID NO: 260990 - DNA, 25 bp, Artificial
  probe
  misc_feature (1)..(25): SEQ ID NO: 323; WAN0249YL; Start 110; Stop 134
tcctgctccctttaatagactataa

SEQ ID NO: 260991 - DNA, 25 bp, Artificial
  probe
  misc_feature (1)..(25): SEQ ID NO: 323; WAN0249YL; Start 109; Stop 133
ttcctgctccctttaatagactata

SEQ ID NO: 260992 - DNA, 25 bp, Artificial
  probe
  misc_feature (1)..(25): SEQ ID NO: 323; WAN0249YL; Start 111; Stop 135
cctgctccctttaatagactataaa

SEQ ID NO: 260993 - DNA, 25 bp, Artificial
  probe
  misc_feature (1)..(25): SEQ ID NO: 323; WAN0249YL; Start 107; Stop 131
ttttcctgctccctttaatagacta

SEQ ID NO: 260994 - DNA, 25 bp, Artificial
  probe
  misc_feature (1)..(25): SEQ ID NO: 323; WAN0249YL; Start 66; Stop 90
tcaagagctagttatagtttcaaac

SEQ ID NO: 260995 - DNA, 25 bp, Artificial
  probe
  misc_feature (1)..(25): SEQ ID NO: 323; WAN0249YL; Start 132; Stop 156
taaaatggtgaatctcaaaagacac

SEQ ID NO: 260996 - DNA, 25 bp, Artificial
  probe
  misc_feature (1)..(25): SEQ ID NO: 323; WAN0249YL; Start 65; Stop 89
ttcaagagctagttatagtttcaaa

SEQ ID NO: 260997 - DNA, 25 bp, Artificial
  probe
  misc_feature (1)..(25): SEQ ID NO: 323; WAN0249YL; Start 64; Stop 88
tttcaagagctagttatagtttcaa

SEQ ID NO: 260998 - DNA, 25 bp, Artificial
  probe
  misc_feature (1)..(25): SEQ ID NO: 323; WAN0249YL; Start 131; Stop 155
ataaaatggtgaatctcaaaagaca

SEQ ID NO: 260999 - DNA, 25 bp, Artificial
  probe
  misc_feature (1)..(25): SEQ ID NO: 323; WAN0249YL; Start 67; Stop 91
caagagctagttatagtttcaaact

SEQ ID NO: 261000 - DNA, 25 bp, Artificial
  probe
  misc_feature (1)..(25): SEQ ID NO: 323; WAN0249YL; Start 126; Stop 150
agactataaaatggtgaatctcaaa

SEQ ID NO: 261001 - DNA, 25 bp, Artificial
  probe
  misc_feature (1)..(25): SEQ ID NO: 323; WAN0249YL; Start 112; Stop 136
ctgctccctttaatagactataaaa

SEQ ID NO: 261002 - DNA, 25 bp, Artificial
  probe
  misc_feature (1)..(25): SEQ ID NO: 323; WAN0249YL; Start 7; Stop 31
cctccaaatctatagtaactattgt

SEQ ID NO: 261003 - DNA, 25 bp, Artificial
  probe
  misc_feature (1)..(25): SEQ ID NO: 323; WAN0249YL; Start 63; Stop 87
ttttcaagagctagttatagtttca

SEQ ID NO: 261004 - DNA, 25 bp, Artificial
  probe
  misc_feature (1)..(25): SEQ ID NO: 323; WAN0249YL; Start 130; Stop 154
tataaaatggtgaatctcaaaagac

SEQ ID NO: 261005 - DNA, 25 bp, Artificial
  probe
  misc_feature (1)..(25): SEQ ID NO: 323; WAN0249YL; Start 128; Stop 152
actataaaatggtgaatctcaaaag

SEQ ID NO: 261006 - DNA, 25 bp, Artificial
  probe
  misc_feature (1)..(25): SEQ ID NO: 323; WAN0249YL; Start 127; Stop 151
gactataaaatggtgaatctcaaaa

SEQ ID NO: 261007 - DNA, 25 bp, Artificial
  probe
  misc_feature (1)..(25): SEQ ID NO: 323; WAN0249YL; Start 113; Stop 137
tgctccctttaatagactataaaat

SEQ ID NO: 261008 - DNA, 25 bp, Artificial
  probe
  misc_feature (1)..(25): SEQ ID NO: 323; WAN0249YL; Start 125; Stop 149
tagactataaaatggtgaatctcaa

SEQ ID NO: 261009 - DNA, 25 bp, Artificial
  probe
  misc_feature (1)..(25): SEQ ID NO: 323; WAN0249YL; Start 114; Stop 138
gctccctttaatagactataaaatg

SEQ ID NO: 261010 - DNA, 25 bp, Artificial
  probe
  misc_feature (1)..(25): SEQ ID NO: 323; WAN0249YL; Start 129; Stop 153
ctataaaatggtgaatctcaaaaga

SEQ ID NO: 261011 - DNA, 25 bp, Artificial
  probe
  misc_feature (1)..(25): SEQ ID NO: 323; WAN0249YL; Start 124; Stop 148
atagactataaaatggtgaatctca

SEQ ID NO: 261012 - DNA, 25 bp, Artificial
  probe
  misc_feature (1)..(25): SEQ ID NO: 323; WAN0249YL; Start 117; Stop 141
ccctttaatagactataaaatggtg

SEQ ID NO: 261013 - DNA, 25 bp, Artificial
  probe
  misc_feature (1)..(25): SEQ ID NO: 323; WAN0249YL; Start 116; Stop 140
tccctttaatagactataaaatggt

SEQ ID NO: 261014 - DNA, 25 bp, Artificial
  probe
  misc_feature (1)..(25): SEQ ID NO: 323; WAN0249YL; Start 68; Stop 92
aagagctagttatagtttcaaacta

SEQ ID NO: 261015 - DNA, 25 bp, Artificial
  probe
  misc_feature (1)..(25): SEQ ID NO: 324; WAN024A9X; Start 2; Stop 26
cacaatacctccatgttatcatagt

SEQ ID NO: 261016 - DNA, 25 bp, Artificial
  probe
  misc_feature (1)..(25): SEQ ID NO: 324; WAN024A9X; Start 1; Stop 25
acacaatacctccatgttatcatag

SEQ ID NO: 261017 - DNA, 25 bp, Artificial
  probe
  misc_feature (1)..(25): SEQ ID NO: 324; WAN024A9X; Start 3; Stop 27
acaatacctccatgttatcatagtt

SEQ ID NO: 261018 - DNA, 25 bp, Artificial
  probe
  misc_feature (1)..(25): SEQ ID NO: 324; WAN024A9X; Start 8; Stop 32
acctccatgttatcatagtttactt

SEQ ID NO: 261019 - DNA, 25 bp, Artificial
  probe
  misc_feature (1)..(25): SEQ ID NO: 324; WAN024A9X; Start 65; Stop 89
aaccatttcactcattttccctact

SEQ ID NO: 261020 - DNA, 25 bp, Artificial
  probe
  misc_feature (1)..(25): SEQ ID NO: 324; WAN024A9X; Start 64; Stop 88
aaaccatttcactcattttccctac

SEQ ID NO: 261021 - DNA, 25 bp, Artificial
  probe
  misc_feature (1)..(25): SEQ ID NO: 324; WAN024A9X; Start 62; Stop 86
gtaaaccatttcactcattttccct

SEQ ID NO: 261022 - DNA, 25 bp, Artificial
  probe
  misc_feature (1)..(25): SEQ ID NO: 324; WAN024A9X; Start 61; Stop 85
agtaaaccatttcactcattttccc

SEQ ID NO: 261023 - DNA, 25 bp, Artificial
  probe
  misc_feature (1)..(25): SEQ ID NO: 324; WAN024A9X; Start 63; Stop 87
taaaccatttcactcattttcccta

SEQ ID NO: 261024 - DNA, 25 bp, Artificial
  probe
  misc_feature (1)..(25): SEQ ID NO: 324; WAN024A9X; Start 7; Stop 31
tacctccatgttatcatagtttact

SEQ ID NO: 261025 - DNA, 25 bp, Artificial
  probe
  misc_feature (1)..(25): SEQ ID NO: 324; WAN024A9X; Start 9; Stop 33
cctccatgttatcatagtttacttt

SEQ ID NO: 261026 - DNA, 25 bp, Artificial
  probe
  misc_feature (1)..(25): SEQ ID NO: 324; WAN024A9X; Start 4; Stop 28
caatacctccatgttatcatagttt

SEQ ID NO: 261027 - DNA, 25 bp, Artificial
  probe
  misc_feature (1)..(25): SEQ ID NO: 324; WAN024A9X; Start 60; Stop 84
aagtaaaccatttcactcattttcc

SEQ ID NO: 261028 - DNA, 25 bp, Artificial
  probe
  misc_feature (1)..(25): SEQ ID NO: 324; WAN024A9X; Start 6; Stop 30
atacctccatgttatcatagtttac

SEQ ID NO: 261029 - DNA, 25 bp, Artificial
  probe
  misc_feature (1)..(25): SEQ ID NO: 324; WAN024A9X; Start 59; Stop 83
aaagtaaaccatttcactcattttc

SEQ ID NO: 261030 - DNA, 25 bp, Artificial
  probe
  misc_feature (1)..(25): SEQ ID NO: 324; WAN024A9X; Start 5; Stop 29
aatacctccatgttatcatagttta

SEQ ID NO: 261031 - DNA, 25 bp, Artificial
  probe
  misc_feature (1)..(25): SEQ ID NO: 324; WAN024A9X; Start 58; Stop 82
aaaagtaaaccatttcactcatttt

SEQ ID NO: 261032 - DNA, 25 bp, Artificial
  probe
  misc_feature (1)..(25): SEQ ID NO: 325; WAN0249K4; Start 20; Stop 44
gtccaatcaattatcgcattaaagt

SEQ ID NO: 261033 - DNA, 25 bp, Artificial
  probe
  misc_feature (1)..(25): SEQ ID NO: 325; WAN0249K4; Start 19; Stop 43
agtccaatcaattatcgcattaaag

SEQ ID NO: 261034 - DNA, 25 bp, Artificial
  probe
  misc_feature (1)..(25): SEQ ID NO: 325; WAN0249K4; Start 18; Stop 42
aagtccaatcaattatcgcattaaa

SEQ ID NO: 261035 - DNA, 25 bp, Artificial
  probe
  misc_feature (1)..(25): SEQ ID NO: 325; WAN0249K4; Start 17; Stop 41
aaagtccaatcaattatcgcattaa

SEQ ID NO: 261036 - DNA, 25 bp, Artificial
  probe
  misc_feature (1)..(25): SEQ ID NO: 325; WAN0249K4; Start 144; Stop 168
cactgaatgtcccaattcttcttta

SEQ ID NO: 261037 - DNA, 25 bp, Artificial
  probe
  misc_feature (1)..(25): SEQ ID NO: 325; WAN0249K4; Start 143; Stop 167
ccactgaatgtcccaattcttcttt

SEQ ID NO: 261038 - DNA, 25 bp, Artificial
  probe
  misc_feature (1)..(25): SEQ ID NO: 325; WAN0249K4; Start 149; Stop 173
aatgtcccaattcttctttatttca

SEQ ID NO: 261039 - DNA, 25 bp, Artificial
  probe
  misc_feature (1)..(25): SEQ ID NO: 325; WAN0249K4; Start 26; Stop 50
tcaattatcgcattaaagtatggtt

SEQ ID NO: 261040 - DNA, 25 bp, Artificial
  probe
  misc_feature (1)..(25): SEQ ID NO: 325; WAN0249K4; Start 145; Stop 169
actgaatgtcccaattcttctttat

SEQ ID NO: 261041 - DNA, 25 bp, Artificial
  probe
  misc_feature (1)..(25): SEQ ID NO: 325; WAN0249K4; Start 21; Stop 45
tccaatcaattatcgcattaaagta

SEQ ID NO: 261042 - DNA, 25 bp, Artificial
  probe
  misc_feature (1)..(25): SEQ ID NO: 325; WAN0249K4; Start 141; Stop 165
atccactgaatgtcccaattcttct

SEQ ID NO: 261043 - DNA, 25 bp, Artificial
  probe
  misc_feature (1)..(25): SEQ ID NO: 325; WAN0249K4; Start 140; Stop 164
catccactgaatgtcccaattcttc

SEQ ID NO: 261044 - DNA, 25 bp, Artificial
  probe
  misc_feature (1)..(25): SEQ ID NO: 325; WAN0249K4; Start 25; Stop 49
atcaattatcgcattaaagtatggt

SEQ ID NO: 261045 - DNA, 25 bp, Artificial
  probe
  misc_feature (1)..(25): SEQ ID NO: 325; WAN0249K4; Start 142; Stop 166
tccactgaatgtcccaattcttctt

SEQ ID NO: 261046 - DNA, 25 bp, Artificial
  probe
  misc_feature (1)..(25): SEQ ID NO: 325; WAN0249K4; Start 14; Stop 38
acaaaagtccaatcaattatcgcat

SEQ ID NO: 261047 - DNA, 25 bp, Artificial
  probe
  misc_feature (1)..(25): SEQ ID NO: 325; WAN0249K4; Start 15; Stop 39
caaaagtccaatcaattatcgcatt

SEQ ID NO: 261048 - DNA, 25 bp, Artificial
  probe
  misc_feature (1)..(25): SEQ ID NO: 325; WAN0249K4; Start 146; Stop 170
ctgaatgtcccaattcttctttatt

SEQ ID NO: 261049 - DNA, 25 bp, Artificial
  probe
  misc_feature (1)..(25): SEQ ID NO: 325; WAN0249K4; Start 147; Stop 171
tgaatgtcccaattcttctttattt

SEQ ID NO: 261050 - DNA, 25 bp, Artificial
  probe
  misc_feature (1)..(25): SEQ ID NO: 325; WAN0249K4; Start 13; Stop 37
gacaaaagtccaatcaattatcgca

SEQ ID NO: 261051 - DNA, 25 bp, Artificial
  probe
  misc_feature (1)..(25): SEQ ID NO: 325; WAN0249K4; Start 12; Stop 36
tgacaaaagtccaatcaattatcgc

SEQ ID NO: 261052 - DNA, 25 bp, Artificial
  probe
  misc_feature (1)..(25): SEQ ID NO: 325; WAN0249K4; Start 137; Stop 161
aaacatccactgaatgtcccaattc

SEQ ID NO: 261053 - DNA, 25 bp, Artificial
  probe
  misc_feature (1)..(25): SEQ ID NO: 325; WAN0249K4; Start 22; Stop 46
ccaatcaattatcgcattaaagtat

SEQ ID NO: 261054 - DNA, 25 bp, Artificial
  probe
  misc_feature (1)..(25): SEQ ID NO: 325; WAN0249K4; Start 24; Stop 48
aatcaattatcgcattaaagtatgg

SEQ ID NO: 261055 - DNA, 25 bp, Artificial
  probe
  misc_feature (1)..(25): SEQ ID NO: 325; WAN0249K4; Start 4; Stop 28
catctccttgacaaaagtccaatca

SEQ ID NO: 261056 - DNA, 25 bp, Artificial
  probe
  misc_feature (1)..(25): SEQ ID NO: 325; WAN0249K4; Start 3; Stop 27
acatctccttgacaaaagtccaatc

SEQ ID NO: 261057 - DNA, 25 bp, Artificial
  probe
  misc_feature (1)..(25): SEQ ID NO: 325; WAN0249K4; Start 2; Stop 26
cacatctccttgacaaaagtccaat

SEQ ID NO: 261058 - DNA, 25 bp, Artificial
  probe
  misc_feature (1)..(25): SEQ ID NO: 325; WAN0249K4; Start 16; Stop 40
aaaagtccaatcaattatcgcatta

SEQ ID NO: 261059 - DNA, 25 bp, Artificial
  probe
  misc_feature (1)..(25): SEQ ID NO: 325; WAN0249K4; Start 148; Stop 172
gaatgtcccaattcttctttatttc

SEQ ID NO: 261060 - DNA, 25 bp, Artificial
  probe
  misc_feature (1)..(25): SEQ ID NO: 325; WAN0249K4; Start 28; Stop 52
aattatcgcattaaagtatggttac

SEQ ID NO: 261061 - DNA, 25 bp, Artificial
  probe
  misc_feature (1)..(25): SEQ ID NO: 325; WAN0249K4; Start 27; Stop 51
caattatcgcattaaagtatggtta

SEQ ID NO: 261062 - DNA, 25 bp, Artificial
  probe
  misc_feature (1)..(25): SEQ ID NO: 325; WAN0249K4; Start 139; Stop 163
acatccactgaatgtcccaattctt

SEQ ID NO: 261063 - DNA, 25 bp, Artificial
  probe
  misc_feature (1)..(25): SEQ ID NO: 325; WAN0249K4; Start 138; Stop 162
aacatccactgaatgtcccaattct

SEQ ID NO: 261064 - DNA, 25 bp, Artificial
  probe
  misc_feature (1)..(25): SEQ ID NO: 325; WAN0249K4; Start 32; Stop 56
atcgcattaaagtatggttactaat

SEQ ID NO: 261065 - DNA, 25 bp, Artificial
  probe
  misc_feature (1)..(25): SEQ ID NO: 326; WAN0249UE; Start 73; Stop 97
ccgaataaatagatagagccagaga

SEQ ID NO: 261066 - DNA, 25 bp, Artificial
  probe
  misc_feature (1)..(25): SEQ ID NO: 326; WAN0249UE; Start 72; Stop 96
tccgaataaatagatagagccagag

SEQ ID NO: 261067 - DNA, 25 bp, Artificial
  probe
  misc_feature (1)..(25): SEQ ID NO: 326; WAN0249UE; Start 71; Stop 95
ttccgaataaatagatagagccaga

SEQ ID NO: 261068 - DNA, 25 bp, Artificial
  probe
  misc_feature (1)..(25): SEQ ID NO: 326; WAN0249UE; Start 87; Stop 111
agagccagagaatttagtaaaccta

SEQ ID NO: 261069 - DNA, 25 bp, Artificial
  probe
  misc_feature (1)..(25): SEQ ID NO: 326; WAN0249UE; Start 86; Stop 110
tagagccagagaatttagtaaacct

SEQ ID NO: 261070 - DNA, 25 bp, Artificial
  probe
  misc_feature (1)..(25): SEQ ID NO: 326; WAN0249UE; Start 198; Stop 222
ttcctgatagagttattcacatctt

SEQ ID NO: 261071 - DNA, 25 bp, Artificial
  probe
  misc_feature (1)..(25): SEQ ID NO: 326; WAN0249UE; Start 89; Stop 113
agccagagaatttagtaaacctaga

SEQ ID NO: 261072 - DNA, 25 bp, Artificial
  probe
  misc_feature (1)..(25): SEQ ID NO: 326; WAN0249UE; Start 70; Stop 94
tttccgaataaatagatagagccag

SEQ ID NO: 261073 - DNA, 25 bp, Artificial
  probe
  misc_feature (1)..(25): SEQ ID NO: 326; WAN0249UE; Start 88; Stop 112
gagccagagaatttagtaaacctag

SEQ ID NO: 261074 - DNA, 25 bp, Artificial
  probe
  misc_feature (1)..(25): SEQ ID NO: 326; WAN0249UE; Start 85; Stop 109
atagagccagagaatttagtaaacc

SEQ ID NO: 261075 - DNA, 25 bp, Artificial
  probe
  misc_feature (1)..(25): SEQ ID NO: 326; WAN0249UE; Start 74; Stop 98
cgaataaatagatagagccagagaa

SEQ ID NO: 261076 - DNA, 25 bp, Artificial
  probe
  misc_feature (1)..(25): SEQ ID NO: 326; WAN0249UE; Start 90; Stop 114
gccagagaatttagtaaacctagat

SEQ ID NO: 261077 - DNA, 25 bp, Artificial
  probe
  misc_feature (1)..(25): SEQ ID NO: 326; WAN0249UE; Start 194; Stop 218
gactttcctgatagagttattcaca

SEQ ID NO: 261078 - DNA, 25 bp, Artificial
  probe
  misc_feature (1)..(25): SEQ ID NO: 326; WAN0249UE; Start 193; Stop 217
tgactttcctgatagagttattcac

SEQ ID NO: 261079 - DNA, 25 bp, Artificial
  probe
  misc_feature (1)..(25): SEQ ID NO: 326; WAN0249UE; Start 199; Stop 223
tcctgatagagttattcacatctta

SEQ ID NO: 261080 - DNA, 25 bp, Artificial
  probe
  misc_feature (1)..(25): SEQ ID NO: 326; WAN0249UE; Start 1; Stop 25
acacccattataaaggaaagaatca

SEQ ID NO: 261081 - DNA, 25 bp, Artificial
  probe
  misc_feature (1)..(25): SEQ ID NO: 326; WAN0249UE; Start 195; Stop 219
actttcctgatagagttattcacat

SEQ ID NO: 261082 - DNA, 25 bp, Artificial
  probe
  misc_feature (1)..(25): SEQ ID NO: 326; WAN0249UE; Start 192; Stop 216
ttgactttcctgatagagttattca

SEQ ID NO: 261083 - DNA, 25 bp, Artificial
  probe
  misc_feature (1)..(25): SEQ ID NO: 326; WAN0249UE; Start 84; Stop 108
gatagagccagagaatttagtaaac

SEQ ID NO: 261084 - DNA, 25 bp, Artificial
  probe
  misc_feature (1)..(25): SEQ ID NO: 326; WAN0249UE; Start 35; Stop 59
attgggaagagctagagcaagtatt

SEQ ID NO: 261085 - DNA, 25 bp, Artificial
  probe
  misc_feature (1)..(25): SEQ ID NO: 326; WAN0249UE; Start 83; Stop 107
agatagagccagagaatttagtaaa

SEQ ID NO: 261086 - DNA, 25 bp, Artificial
  probe
  misc_feature (1)..(25): SEQ ID NO: 326; WAN0249UE; Start 197; Stop 221
tttcctgatagagttattcacatct

SEQ ID NO: 261087 - DNA, 25 bp, Artificial
  probe
  misc_feature (1)..(25): SEQ ID NO: 326; WAN0249UE; Start 36; Stop 60
ttgggaagagctagagcaagtattt

SEQ ID NO: 261088 - DNA, 25 bp, Artificial
  probe
  misc_feature (1)..(25): SEQ ID NO: 326; WAN0249UE; Start 196; Stop 220
ctttcctgatagagttattcacatc

SEQ ID NO: 261089 - DNA, 25 bp, Artificial
  probe
  misc_feature (1)..(25): SEQ ID NO: 326; WAN0249UE; Start 80; Stop 104
aatagatagagccagagaatttagt

SEQ ID NO: 261090 - DNA, 25 bp, Artificial
  probe
  misc_feature (1)..(25): SEQ ID NO: 326; WAN0249UE; Start 28; Stop 52
aaataccattgggaagagctagagc

SEQ ID NO: 261091 - DNA, 25 bp, Artificial
  probe
  misc_feature (1)..(25): SEQ ID NO: 326; WAN0249UE; Start 2; Stop 26
cacccattataaaggaaagaatcaa

SEQ ID NO: 261092 - DNA, 25 bp, Artificial
  probe
  misc_feature (1)..(25): SEQ ID NO: 326; WAN0249UE; Start 34; Stop 58
cattgggaagagctagagcaagtat

SEQ ID NO: 261093 - DNA, 25 bp, Artificial
  probe
  misc_feature (1)..(25): SEQ ID NO: 326; WAN0249UE; Start 200; Stop 224
cctgatagagttattcacatcttat

SEQ ID NO: 261094 - DNA, 25 bp, Artificial
  probe
  misc_feature (1)..(25): SEQ ID NO: 326; WAN0249UE; Start 191; Stop 215
tttgactttcctgatagagttattc

SEQ ID NO: 261095 - DNA, 25 bp, Artificial
  probe
  misc_feature (1)..(25): SEQ ID NO: 326; WAN0249UE; Start 82; Stop 106
tagatagagccagagaatttagtaa

SEQ ID NO: 261096 - DNA, 25 bp, Artificial
  probe
  misc_feature (1)..(25): SEQ ID NO: 326; WAN0249UE; Start 3; Stop 27
acccattataaaggaaagaatcaaa

SEQ ID NO: 261097 - DNA, 25 bp, Artificial
  probe
  misc_feature (1)..(25): SEQ ID NO: 326; WAN0249UE; Start 81; Stop 105
atagatagagccagagaatttagta

SEQ ID NO: 261098 - DNA, 25 bp, Artificial
  probe
  misc_feature (1)..(25): SEQ ID NO: 327; WAN024AFW; Start 52; Stop 76
acattctttgaaaggagttgaacac

SEQ ID NO: 261099 - DNA, 25 bp, Artificial
  probe
  misc_feature (1)..(25): SEQ ID NO: 327; WAN024AFW; Start 53; Stop 77
cattctttgaaaggagttgaacacg

SEQ ID NO: 261100 - DNA, 25 bp, Artificial
  probe
  misc_feature (1)..(25): SEQ ID NO: 327; WAN024AFW; Start 51; Stop 75
tacattctttgaaaggagttgaaca

SEQ ID NO: 261101 - DNA, 25 bp, Artificial
  probe
  misc_feature (1)..(25): SEQ ID NO: 327; WAN024AFW; Start 50; Stop 74
ctacattctttgaaaggagttgaac

SEQ ID NO: 261102 - DNA, 25 bp, Artificial
  probe
  misc_feature (1)..(25): SEQ ID NO: 327; WAN024AFW; Start 49; Stop 73
tctacattctttgaaaggagttgaa

SEQ ID NO: 261103 - DNA, 25 bp, Artificial
  probe
  misc_feature (1)..(25): SEQ ID NO: 327; WAN024AFW; Start 48; Stop 72
ctctacattctttgaaaggagttga

SEQ ID NO: 261104 - DNA, 25 bp, Artificial
  probe
  misc_feature (1)..(25): SEQ ID NO: 327; WAN024AFW; Start 43; Stop 67
acctactctacattctttgaaagga

SEQ ID NO: 261105 - DNA, 25 bp, Artificial
  probe
  misc_feature (1)..(25): SEQ ID NO: 327; WAN024AFW; Start 44; Stop 68
cctactctacattctttgaaaggag

SEQ ID NO: 261106 - DNA, 25 bp, Artificial
  probe
  misc_feature (1)..(25): SEQ ID NO: 327; WAN024AFW; Start 42; Stop 66
aacctactctacattctttgaaagg

SEQ ID NO: 261107 - DNA, 25 bp, Artificial
  probe
  misc_feature (1)..(25): SEQ ID NO: 327; WAN024AFW; Start 54; Stop 78
attctttgaaaggagttgaacacgc

SEQ ID NO: 261108 - DNA, 25 bp, Artificial
  probe
  misc_feature (1)..(25): SEQ ID NO: 327; WAN024AFW; Start 41; Stop 65
aaacctactctacattctttgaaag

SEQ ID NO: 261109 - DNA, 25 bp, Artificial
  probe
  misc_feature (1)..(25): SEQ ID NO: 327; WAN024AFW; Start 62; Stop 86
aaaggagttgaacacgccctagata

SEQ ID NO: 261110 - DNA, 25 bp, Artificial
  probe
  misc_feature (1)..(25): SEQ ID NO: 327; WAN024AFW; Start 55; Stop 79
ttctttgaaaggagttgaacacgcc

SEQ ID NO: 261111 - DNA, 25 bp, Artificial
  probe
  misc_feature (1)..(25): SEQ ID NO: 327; WAN024AFW; Start 47; Stop 71
actctacattctttgaaaggagttg

SEQ ID NO: 261112 - DNA, 25 bp, Artificial
  probe
  misc_feature (1)..(25): SEQ ID NO: 327; WAN024AFW; Start 63; Stop 87
aaggagttgaacacgccctagatac

SEQ ID NO: 261113 - DNA, 25 bp, Artificial
  probe
  misc_feature (1)..(25): SEQ ID NO: 327; WAN024AFW; Start 45; Stop 69
ctactctacattctttgaaaggagt

SEQ ID NO: 261114 - DNA, 25 bp, Artificial
  probe
  misc_feature (1)..(25): SEQ ID NO: 327; WAN024AFW; Start 40; Stop 64
aaaacctactctacattctttgaaa

SEQ ID NO: 261115 - DNA, 25 bp, Artificial
  probe
  misc_feature (1)..(25): SEQ ID NO: 327; WAN024AFW; Start 46; Stop 70
tactctacattctttgaaaggagtt

SEQ ID NO: 261116 - DNA, 25 bp, Artificial
  probe
  misc_feature (1)..(25): SEQ ID NO: 327; WAN024AFW; Start 58; Stop 82
tttgaaaggagttgaacacgcccta

SEQ ID NO: 261117 - DNA, 25 bp, Artificial
  probe
  misc_feature (1)..(25): SEQ ID NO: 327; WAN024AFW; Start 61; Stop 85
gaaaggagttgaacacgccctagat

SEQ ID NO: 261118 - DNA, 25 bp, Artificial
  probe
  misc_feature (1)..(25): SEQ ID NO: 327; WAN024AFW; Start 59; Stop 83
ttgaaaggagttgaacacgccctag

SEQ ID NO: 261119 - DNA, 25 bp, Artificial
  probe
  misc_feature (1)..(25): SEQ ID NO: 328; WAN0249J6; Start 43; Stop 67
gctaaattcttgtcttcctatgatg

SEQ ID NO: 261120 - DNA, 25 bp, Artificial
  probe
  misc_feature (1)..(25): SEQ ID NO: 328; WAN0249J6; Start 42; Stop 66
agctaaattcttgtcttcctatgat

SEQ ID NO: 261121 - DNA, 25 bp, Artificial
  probe
  misc_feature (1)..(25): SEQ ID NO: 328; WAN0249J6; Start 44; Stop 68
ctaaattcttgtcttcctatgatga

SEQ ID NO: 261122 - DNA, 25 bp, Artificial
  probe
  misc_feature (1)..(25): SEQ ID NO: 328; WAN0249J6; Start 45; Stop 69
taaattcttgtcttcctatgatgaa

SEQ ID NO: 261123 - DNA, 25 bp, Artificial
  probe
  misc_feature (1)..(25): SEQ ID NO: 328; WAN0249J6; Start 41; Stop 65
tagctaaattcttgtcttcctatga

SEQ ID NO: 261124 - DNA, 25 bp, Artificial
  probe
  misc_feature (1)..(25): SEQ ID NO: 328; WAN0249J6; Start 37; Stop 61
gaaatagctaaattcttgtcttcct

SEQ ID NO: 261125 - DNA, 25 bp, Artificial
  probe
  misc_feature (1)..(25): SEQ ID NO: 328; WAN0249J6; Start 35; Stop 59
aggaaatagctaaattcttgtcttc

SEQ ID NO: 261126 - DNA, 25 bp, Artificial
  probe
  misc_feature (1)..(25): SEQ ID NO: 328; WAN0249J6; Start 46; Stop 70
aaattcttgtcttcctatgatgaag

SEQ ID NO: 261127 - DNA, 25 bp, Artificial
  probe
  misc_feature (1)..(25): SEQ ID NO: 328; WAN0249J6; Start 62; Stop 86
atgatgaagatgataaaataaacgc

SEQ ID NO: 261128 - DNA, 25 bp, Artificial
  probe
  misc_feature (1)..(25): SEQ ID NO: 328; WAN0249J6; Start 31; Stop 55
ggataggaaatagctaaattcttgt

SEQ ID NO: 261129 - DNA, 25 bp, Artificial
  probe
  misc_feature (1)..(25): SEQ ID NO: 328; WAN0249J6; Start 30; Stop 54
tggataggaaatagctaaattcttg

SEQ ID NO: 261130 - DNA, 25 bp, Artificial
  probe
  misc_feature (1)..(25): SEQ ID NO: 328; WAN0249J6; Start 40; Stop 64
atagctaaattcttgtcttcctatg

SEQ ID NO: 261131 - DNA, 25 bp, Artificial
  probe
  misc_feature (1)..(25): SEQ ID NO: 328; WAN0249J6; Start 38; Stop 62
aaatagctaaattcttgtcttccta

SEQ ID NO: 261132 - DNA, 25 bp, Artificial
  probe
  misc_feature (1)..(25): SEQ ID NO: 328; WAN0249J6; Start 34; Stop 58
taggaaatagctaaattcttgtctt

SEQ ID NO: 261133 - DNA, 25 bp, Artificial
  probe
  misc_feature (1)..(25): SEQ ID NO: 328; WAN0249J6; Start 29; Stop 53
ttggataggaaatagctaaattctt

SEQ ID NO: 261134 - DNA, 25 bp, Artificial
  probe
  misc_feature (1)..(25): SEQ ID NO: 328; WAN0249J6; Start 28; Stop 52
tttggataggaaatagctaaattct

SEQ ID NO: 261135 - DNA, 25 bp, Artificial
  probe
  misc_feature (1)..(25): SEQ ID NO: 328; WAN0249J6; Start 33; Stop 57
ataggaaatagctaaattcttgtct

SEQ ID NO: 261136 - DNA, 25 bp, Artificial
  probe
  misc_feature (1)..(25): SEQ ID NO: 328; WAN0249J6; Start 36; Stop 60
ggaaatagctaaattcttgtcttcc

SEQ ID NO: 261137 - DNA, 25 bp, Artificial
  probe
  misc_feature (1)..(25): SEQ ID NO: 328; WAN0249J6; Start 32; Stop 56
gataggaaatagctaaattcttgtc

SEQ ID NO: 261138 - DNA, 25 bp, Artificial
  probe
  misc_feature (1)..(25): SEQ ID NO: 328; WAN0249J6; Start 39; Stop 63
aatagctaaattcttgtcttcctat

SEQ ID NO: 261139 - DNA, 25 bp, Artificial
  probe
  misc_feature (1)..(25): SEQ ID NO: 328; WAN0249J6; Start 27; Stop 51
atttggataggaaatagctaaattc

SEQ ID NO: 261140 - DNA, 25 bp, Artificial
  probe
  misc_feature (1)..(25): SEQ ID NO: 328; WAN0249J6; Start 18; Stop 42
aaaagccctatttggataggaaata

SEQ ID NO: 261141 - DNA, 25 bp, Artificial
  probe
  misc_feature (1)..(25): SEQ ID NO: 329; WAN0249ES; Start 37; Stop 61
acataagtgtgttattctttgtgta

SEQ ID NO: 261142 - DNA, 25 bp, Artificial
  probe
  misc_feature (1)..(25): SEQ ID NO: 329; WAN0249ES; Start 38; Stop 62
cataagtgtgttattctttgtgtag

SEQ ID NO: 261143 - DNA, 25 bp, Artificial
  probe
  misc_feature (1)..(25): SEQ ID NO: 329; WAN0249ES; Start 42; Stop 66
agtgtgttattctttgtgtagataa

SEQ ID NO: 261144 - DNA, 25 bp, Artificial
  probe
  misc_feature (1)..(25): SEQ ID NO: 329; WAN0249ES; Start 41; Stop 65
aagtgtgttattctttgtgtagata

SEQ ID NO: 261145 - DNA, 25 bp, Artificial
  probe
  misc_feature (1)..(25): SEQ ID NO: 329; WAN0249ES; Start 40; Stop 64
taagtgtgttattctttgtgtagat

SEQ ID NO: 261146 - DNA, 25 bp, Artificial
  probe
  misc_feature (1)..(25): SEQ ID NO: 329; WAN0249ES; Start 39; Stop 63
ataagtgtgttattctttgtgtaga

SEQ ID NO: 261147 - DNA, 25 bp, Artificial
  probe
  misc_feature (1)..(25): SEQ ID NO: 329; WAN0249ES; Start 43; Stop 67
gtgtgttattctttgtgtagataaa

SEQ ID NO: 261148 - DNA, 25 bp, Artificial
  probe
  misc_feature (1)..(25): SEQ ID NO: 329; WAN0249ES; Start 36; Stop 60
aacataagtgtgttattctttgtgt

SEQ ID NO: 261149 - DNA, 25 bp, Artificial
  probe
  misc_feature (1)..(25): SEQ ID NO: 329; WAN0249ES; Start 24; Stop 48
tcatatagggttaacataagtgtgt

SEQ ID NO: 261150 - DNA, 25 bp, Artificial
  probe
  misc_feature (1)..(25): SEQ ID NO: 329; WAN0249ES; Start 23; Stop 47
ttcatatagggttaacataagtgtg

SEQ ID NO: 261151 - DNA, 25 bp, Artificial
  probe
  misc_feature (1)..(25): SEQ ID NO: 329; WAN0249ES; Start 22; Stop 46
gttcatatagggttaacataagtgt

SEQ ID NO: 261152 - DNA, 25 bp, Artificial
  probe
  misc_feature (1)..(25): SEQ ID NO: 329; WAN0249ES; Start 21; Stop 45
agttcatatagggttaacataagtg

SEQ ID NO: 261153 - DNA, 25 bp, Artificial
  probe
  misc_feature (1)..(25): SEQ ID NO: 329; WAN0249ES; Start 55; Stop 79
ttgtgtagataaaagaaaggatact

SEQ ID NO: 261154 - DNA, 25 bp, Artificial
  probe
  misc_feature (1)..(25): SEQ ID NO: 329; WAN0249ES; Start 20; Stop 44
aagttcatatagggttaacataagt

SEQ ID NO: 261155 - DNA, 25 bp, Artificial
  probe
  misc_feature (1)..(25): SEQ ID NO: 329; WAN0249ES; Start 54; Stop 78
tttgtgtagataaaagaaaggatac

SEQ ID NO: 261156 - DNA, 25 bp, Artificial
  probe
  misc_feature (1)..(25): SEQ ID NO: 329; WAN0249ES; Start 25; Stop 49
catatagggttaacataagtgtgtt

SEQ ID NO: 261157 - DNA, 25 bp, Artificial
  probe
  misc_feature (1)..(25): SEQ ID NO: 329; WAN0249ES; Start 30; Stop 54
agggttaacataagtgtgttattct

SEQ ID NO: 261158 - DNA, 25 bp, Artificial
  probe
  misc_feature (1)..(25): SEQ ID NO: 329; WAN0249ES; Start 31; Stop 55
gggttaacataagtgtgttattctt

SEQ ID NO: 261159 - DNA, 25 bp, Artificial
  probe
  misc_feature (1)..(25): SEQ ID NO: 329; WAN0249ES; Start 35; Stop 59
taacataagtgtgttattctttgtg

SEQ ID NO: 261160 - DNA, 25 bp, Artificial
  probe
  misc_feature (1)..(25): SEQ ID NO: 329; WAN0249ES; Start 29; Stop 53
tagggttaacataagtgtgttattc

SEQ ID NO: 261161 - DNA, 25 bp, Artificial
  probe
  misc_feature (1)..(25): SEQ ID NO: 329; WAN0249ES; Start 34; Stop 58
ttaacataagtgtgttattctttgt

SEQ ID NO: 261162 - DNA, 25 bp, Artificial
  probe
  misc_feature (1)..(25): SEQ ID NO: 329; WAN0249ES; Start 28; Stop 52
atagggttaacataagtgtgttatt

SEQ ID NO: 261163 - DNA, 25 bp, Artificial
  probe
  misc_feature (1)..(25): SEQ ID NO: 329; WAN0249ES; Start 32; Stop 56
ggttaacataagtgtgttattcttt

SEQ ID NO: 261164 - DNA, 25 bp, Artificial
  probe
  misc_feature (1)..(25): SEQ ID NO: 329; WAN0249ES; Start 52; Stop 76
tctttgtgtagataaaagaaaggat

SEQ ID NO: 261165 - DNA, 25 bp, Artificial
  probe
  misc_feature (1)..(25): SEQ ID NO: 329; WAN0249ES; Start 27; Stop 51
tatagggttaacataagtgtgttat

SEQ ID NO: 261166 - DNA, 25 bp, Artificial
  probe
  misc_feature (1)..(25): SEQ ID NO: 329; WAN0249ES; Start 26; Stop 50
atatagggttaacataagtgtgtta

SEQ ID NO: 261167 - DNA, 25 bp, Artificial
  probe
  misc_feature (1)..(25): SEQ ID NO: 329; WAN0249ES; Start 33; Stop 57
gttaacataagtgtgttattctttg

SEQ ID NO: 261168 - DNA, 25 bp, Artificial
  probe
  misc_feature (1)..(25): SEQ ID NO: 330; WAN0249WZ; Start 22; Stop 46
tttgagggaaatttgctaagataaa

SEQ ID NO: 261169 - DNA, 25 bp, Artificial
  probe
  misc_feature (1)..(25): SEQ ID NO: 330; WAN0249WZ; Start 23; Stop 47
ttgagggaaatttgctaagataaat

SEQ ID NO: 261170 - DNA, 25 bp, Artificial
  probe
  misc_feature (1)..(25): SEQ ID NO: 330; WAN0249WZ; Start 21; Stop 45
atttgagggaaatttgctaagataa

SEQ ID NO: 261171 - DNA, 25 bp, Artificial
  probe
  misc_feature (1)..(25): SEQ ID NO: 330; WAN0249WZ; Start 16; Stop 40
agctaatttgagggaaatttgctaa

SEQ ID NO: 261172 - DNA, 25 bp, Artificial
  probe
  misc_feature (1)..(25): SEQ ID NO: 330; WAN0249WZ; Start 17; Stop 41
gctaatttgagggaaatttgctaag

SEQ ID NO: 261173 - DNA, 25 bp, Artificial
  probe
  misc_feature (1)..(25): SEQ ID NO: 330; WAN0249WZ; Start 9; Stop 33
tgctactagctaatttgagggaaat

SEQ ID NO: 261174 - DNA, 25 bp, Artificial
  probe
  misc_feature (1)..(25): SEQ ID NO: 330; WAN0249WZ; Start 8; Stop 32
atgctactagctaatttgagggaaa

SEQ ID NO: 261175 - DNA, 25 bp, Artificial
  probe
  misc_feature (1)..(25): SEQ ID NO: 330; WAN0249WZ; Start 6; Stop 30
ctatgctactagctaatttgaggga

SEQ ID NO: 261176 - DNA, 25 bp, Artificial
  probe
  misc_feature (1)..(25): SEQ ID NO: 330; WAN0249WZ; Start 7; Stop 31
tatgctactagctaatttgagggaa

SEQ ID NO: 261177 - DNA, 25 bp, Artificial
  probe
  misc_feature (1)..(25): SEQ ID NO: 330; WAN0249WZ; Start 24; Stop 48
tgagggaaatttgctaagataaata

SEQ ID NO: 261178 - DNA, 25 bp, Artificial
  probe
  misc_feature (1)..(25): SEQ ID NO: 330; WAN0249WZ; Start 18; Stop 42
ctaatttgagggaaatttgctaaga

SEQ ID NO: 261179 - DNA, 25 bp, Artificial
  probe
  misc_feature (1)..(25): SEQ ID NO: 330; WAN0249WZ; Start 13; Stop 37
actagctaatttgagggaaatttgc

SEQ ID NO: 261180 - DNA, 25 bp, Artificial
  probe
  misc_feature (1)..(25): SEQ ID NO: 330; WAN0249WZ; Start 14; Stop 38
ctagctaatttgagggaaatttgct

SEQ ID NO: 261181 - DNA, 25 bp, Artificial
  probe
  misc_feature (1)..(25): SEQ ID NO: 330; WAN0249WZ; Start 10; Stop 34
gctactagctaatttgagggaaatt

SEQ ID NO: 261182 - DNA, 25 bp, Artificial
  probe
  misc_feature (1)..(25): SEQ ID NO: 330; WAN0249WZ; Start 3; Stop 27
aggctatgctactagctaatttgag

SEQ ID NO: 261183 - DNA, 25 bp, Artificial
  probe
  misc_feature (1)..(25): SEQ ID NO: 330; WAN0249WZ; Start 20; Stop 44
aatttgagggaaatttgctaagata

SEQ ID NO: 261184 - DNA, 25 bp, Artificial
  probe
  misc_feature (1)..(25): SEQ ID NO: 330; WAN0249WZ; Start 19; Stop 43
taatttgagggaaatttgctaagat

SEQ ID NO: 261185 - DNA, 25 bp, Artificial
  probe
  misc_feature (1)..(25): SEQ ID NO: 330; WAN0249WZ; Start 2; Stop 26
caggctatgctactagctaatttga

SEQ ID NO: 261186 - DNA, 25 bp, Artificial
  probe
  misc_feature (1)..(25): SEQ ID NO: 330; WAN0249WZ; Start 1; Stop 25
acaggctatgctactagctaatttg

SEQ ID NO: 261187 - DNA, 25 bp, Artificial
  probe
  misc_feature (1)..(25): SEQ ID NO: 330; WAN0249WZ; Start 5; Stop 29
gctatgctactagctaatttgaggg

SEQ ID NO: 261188 - DNA, 25 bp, Artificial
  probe
  misc_feature (1)..(25): SEQ ID NO: 330; WAN0249WZ; Start 4; Stop 28
ggctatgctactagctaatttgagg

SEQ ID NO: 261189 - DNA, 25 bp, Artificial
  probe
  misc_feature (1)..(25): SEQ ID NO: 330; WAN0249WZ; Start 25; Stop 49
gagggaaatttgctaagataaataa

SEQ ID NO: 261190 - DNA, 25 bp, Artificial
  probe
  misc_feature (1)..(25): SEQ ID NO: 330; WAN0249WZ; Start 15; Stop 39
tagctaatttgagggaaatttgcta

SEQ ID NO: 261191 - DNA, 25 bp, Artificial
  probe
  misc_feature (1)..(25): SEQ ID NO: 330; WAN0249WZ; Start 12; Stop 36
tactagctaatttgagggaaatttg

SEQ ID NO: 261192 - DNA, 25 bp, Artificial
  probe
  misc_feature (1)..(25): SEQ ID NO: 330; WAN0249WZ; Start 11; Stop 35
ctactagctaatttgagggaaattt

SEQ ID NO: 261193 - DNA, 25 bp, Artificial
  probe
  misc_feature (1)..(25): SEQ ID NO: 331; WAN024DDO; Start 506; Stop 530
taccagtagcatcaatatcagagga

SEQ ID NO: 261194 - DNA, 25 bp, Artificial
  probe
  misc_feature (1)..(25): SEQ ID NO: 331; WAN024DDO; Start 2002; Stop 2026
tctatcatcaagcaagtcttacctg

SEQ ID NO: 261195 - DNA, 25 bp, Artificial
  probe
  misc_feature (1)..(25): SEQ ID NO: 331; WAN024DDO; Start 2001; Stop 2025
ctctatcatcaagcaagtcttacct

SEQ ID NO: 261196 - DNA, 25 bp, Artificial
  probe
  misc_feature (1)..(25): SEQ ID NO: 331; WAN024DDO; Start 1999; Stop 2023
acctctatcatcaagcaagtcttac

SEQ ID NO: 261197 - DNA, 25 bp, Artificial
  probe
  misc_feature (1)..(25): SEQ ID NO: 331; WAN024DDO; Start 2543; Stop 2567
aatcagagactaaggcttacattgt

SEQ ID NO: 261198 - DNA, 25 bp, Artificial
  probe
  misc_feature (1)..(25): SEQ ID NO: 331; WAN024DDO; Start 2041; Stop 2065
gactatcattcagaagccatcagaa

SEQ ID NO: 261199 - DNA, 25 bp, Artificial
  probe
  misc_feature (1)..(25): SEQ ID NO: 331; WAN024DDO; Start 1998; Stop 2022
aacctctatcatcaagcaagtctta

SEQ ID NO: 261200 - DNA, 25 bp, Artificial
  probe
  misc_feature (1)..(25): SEQ ID NO: 331; WAN024DDO; Start 507; Stop 531
accagtagcatcaatatcagaggaa

SEQ ID NO: 261201 - DNA, 25 bp, Artificial
  probe
  misc_feature (1)..(25): SEQ ID NO: 331; WAN024DDO; Start 4106; Stop 4130
acaatccagacatagatagtgaagt

SEQ ID NO: 261202 - DNA, 25 bp, Artificial
  probe
  misc_feature (1)..(25): SEQ ID NO: 331; WAN024DDO; Start 2000; Stop 2024
cctctatcatcaagcaagtcttacc

SEQ ID NO: 261203 - DNA, 25 bp, Artificial
  probe
  misc_feature (1)..(25): SEQ ID NO: 331; WAN024DDO; Start 3722; Stop 3746
gtcgtatagcctatgaactactagc

SEQ ID NO: 261204 - DNA, 25 bp, Artificial
  probe
  misc_feature (1)..(25): SEQ ID NO: 331; WAN024DDO; Start 3721; Stop 3745
cgtcgtatagcctatgaactactag

SEQ ID NO: 261205 - DNA, 25 bp, Artificial
  probe
  misc_feature (1)..(25): SEQ ID NO: 331; WAN024DDO; Start 3818; Stop 3842
gcaagacaatcaatctctacggtaa

SEQ ID NO: 261206 - DNA, 25 bp, Artificial
  probe
  misc_feature (1)..(25): SEQ ID NO: 331; WAN024DDO; Start 2003; Stop 2027
ctatcatcaagcaagtcttacctga

SEQ ID NO: 261207 - DNA, 25 bp, Artificial
  probe
  misc_feature (1)..(25): SEQ ID NO: 331; WAN024DDO; Start 2358; Stop 2382
tgcttcaccattagatactctgatt

SEQ ID NO: 261208 - DNA, 25 bp, Artificial
  probe
  misc_feature (1)..(25): SEQ ID NO: 331; WAN024DDO; Start 3684; Stop 3708
aagtaatgatataggaacaccaggt

SEQ ID NO: 261209 - DNA, 25 bp, Artificial
  probe
  misc_feature (1)..(25): SEQ ID NO: 331; WAN024DDO; Start 3221; Stop 3245
gattattacaagcaccagaccatcc

SEQ ID NO: 261210 - DNA, 25 bp, Artificial
  probe
  misc_feature (1)..(25): SEQ ID NO: 331; WAN024DDO; Start 3220; Stop 3244
ggattattacaagcaccagaccatc

SEQ ID NO: 261211 - DNA, 25 bp, Artificial
  probe
  misc_feature (1)..(25): SEQ ID NO: 331; WAN024DDO; Start 2267; Stop 2291
cctatctggaacggtggtataactt

SEQ ID NO: 261212 - DNA, 25 bp, Artificial
  probe
  misc_feature (1)..(25): SEQ ID NO: 331; WAN024DDO; Start 2039; Stop 2063
ttgactatcattcagaagccatcag

SEQ ID NO: 261213 - DNA, 25 bp, Artificial
  probe
  misc_feature (1)..(25): SEQ ID NO: 331; WAN024DDO; Start 2359; Stop 2383
gcttcaccattagatactctgattg

SEQ ID NO: 261214 - DNA, 25 bp, Artificial
  probe
  misc_feature (1)..(25): SEQ ID NO: 331; WAN024DDO; Start 2357; Stop 2381
atgcttcaccattagatactctgat

SEQ ID NO: 261215 - DNA, 25 bp, Artificial
  probe
  misc_feature (1)..(25): SEQ ID NO: 331; WAN024DDO; Start 3219; Stop 3243
aggattattacaagcaccagaccat

SEQ ID NO: 261216 - DNA, 25 bp, Artificial
  probe
  misc_feature (1)..(25): SEQ ID NO: 331; WAN024DDO; Start 2038; Stop 2062
gttgactatcattcagaagccatca

SEQ ID NO: 261217 - DNA, 25 bp, Artificial
  probe
  misc_feature (1)..(25): SEQ ID NO: 331; WAN024DDO; Start 3218; Stop 3242
aaggattattacaagcaccagacca

SEQ ID NO: 261218 - DNA, 25 bp, Artificial
  probe
  misc_feature (1)..(25): SEQ ID NO: 331; WAN024DDO; Start 3255; Stop 3279
gaccattaccatcaactccatcttg

SEQ ID NO: 261219 - DNA, 25 bp, Artificial
  probe
  misc_feature (1)..(25): SEQ ID NO: 331; WAN024DDO; Start 2040; Stop 2064
tgactatcattcagaagccatcaga

SEQ ID NO: 261220 - DNA, 25 bp, Artificial
  probe
  misc_feature (1)..(25): SEQ ID NO: 331; WAN024DDO; Start 3222; Stop 3246
attattacaagcaccagaccatcca

SEQ ID NO: 261221 - DNA, 25 bp, Artificial
  probe
  misc_feature (1)..(25): SEQ ID NO: 331; WAN024DDO; Start 3122; Stop 3146
ttacttatacgcatgagatgacaca

SEQ ID NO: 261222 - DNA, 25 bp, Artificial
  probe
  misc_feature (1)..(25): SEQ ID NO: 331; WAN024DDO; Start 3123; Stop 3147
tacttatacgcatgagatgacacat

SEQ ID NO: 261223 - DNA, 25 bp, Artificial
  probe
  misc_feature (1)..(25): SEQ ID NO: 331; WAN024DDO; Start 2544; Stop 2568
atcagagactaaggcttacattgtc

SEQ ID NO: 261224 - DNA, 25 bp, Artificial
  probe
  misc_feature (1)..(25): SEQ ID NO: 331; WAN024DDO; Start 4109; Stop 4133
atccagacatagatagtgaagtcca

SEQ ID NO: 261225 - DNA, 25 bp, Artificial
  probe
  misc_feature (1)..(25): SEQ ID NO: 331; WAN024DDO; Start 3044; Stop 3068
ataatcaacacggtgcttatgctac

SEQ ID NO: 261226 - DNA, 25 bp, Artificial
  probe
  misc_feature (1)..(25): SEQ ID NO: 332; WAN024DDP; Start 1918; Stop 1942
gattaccagtcagatgctatcagaa

SEQ ID NO: 261227 - DNA, 25 bp, Artificial
  probe
  misc_feature (1)..(25): SEQ ID NO: 332; WAN024DDP; Start 1839; Stop 1863
acttctctacactcctaaccaattc

SEQ ID NO: 261228 - DNA, 25 bp, Artificial
  probe
  misc_feature (1)..(25): SEQ ID NO: 332; WAN024DDP; Start 1838; Stop 1862
gacttctctacactcctaaccaatt

SEQ ID NO: 261229 - DNA, 25 bp, Artificial
  probe
  misc_feature (1)..(25): SEQ ID NO: 332; WAN024DDP; Start 265; Stop 289
gagttgtatagtcagacgaatggaa

SEQ ID NO: 261230 - DNA, 25 bp, Artificial
  probe
  misc_feature (1)..(25): SEQ ID NO: 332; WAN024DDP; Start 1840; Stop 1864
cttctctacactcctaaccaattct

SEQ ID NO: 261231 - DNA, 25 bp, Artificial
  probe
  misc_feature (1)..(25): SEQ ID NO: 332; WAN024DDP; Start 270; Stop 294
gtatagtcagacgaatggaacctac

SEQ ID NO: 261232 - DNA, 25 bp, Artificial
  probe
  misc_feature (1)..(25): SEQ ID NO: 332; WAN024DDP; Start 271; Stop 295
tatagtcagacgaatggaacctaca

SEQ ID NO: 261233 - DNA, 25 bp, Artificial
  probe
  misc_feature (1)..(25): SEQ ID NO: 332; WAN024DDP; Start 269; Stop 293
tgtatagtcagacgaatggaaccta

SEQ ID NO: 261234 - DNA, 25 bp, Artificial
  probe
  misc_feature (1)..(25): SEQ ID NO: 332; WAN024DDP; Start 1841; Stop 1865
ttctctacactcctaaccaattctt

SEQ ID NO: 261235 - DNA, 25 bp, Artificial
  probe
  misc_feature (1)..(25): SEQ ID NO: 332; WAN024DDP; Start 266; Stop 290
agttgtatagtcagacgaatggaac

SEQ ID NO: 261236 - DNA, 25 bp, Artificial
  probe
  misc_feature (1)..(25): SEQ ID NO: 332; WAN024DDP; Start 268; Stop 292
ttgtatagtcagacgaatggaacct

SEQ ID NO: 261237 - DNA, 25 bp, Artificial
  probe
  misc_feature (1)..(25): SEQ ID NO: 332; WAN024DDP; Start 1877; Stop 1901
actctattgttaaggaagtcttgcc

SEQ ID NO: 261238 - DNA, 25 bp, Artificial
  probe
  misc_feature (1)..(25): SEQ ID NO: 332; WAN024DDP; Start 263; Stop 287
ttgagttgtatagtcagacgaatgg

SEQ ID NO: 261239 - DNA, 25 bp, Artificial
  probe
  misc_feature (1)..(25): SEQ ID NO: 332; WAN024DDP; Start 1842; Stop 1866
tctctacactcctaaccaattctta

SEQ ID NO: 261240 - DNA, 25 bp, Artificial
  probe
  misc_feature (1)..(25): SEQ ID NO: 332; WAN024DDP; Start 267; Stop 291
gttgtatagtcagacgaatggaacc

SEQ ID NO: 261241 - DNA, 25 bp, Artificial
  probe
  misc_feature (1)..(25): SEQ ID NO: 332; WAN024DDP; Start 272; Stop 296
atagtcagacgaatggaacctacag

SEQ ID NO: 261242 - DNA, 25 bp, Artificial
  probe
  misc_feature (1)..(25): SEQ ID NO: 332; WAN024DDP; Start 264; Stop 288
tgagttgtatagtcagacgaatgga

SEQ ID NO: 261243 - DNA, 25 bp, Artificial
  probe
  misc_feature (1)..(25): SEQ ID NO: 332; WAN024DDP; Start 1914; Stop 1938
gcttgattaccagtcagatgctatc

SEQ ID NO: 261244 - DNA, 25 bp, Artificial
  probe
  misc_feature (1)..(25): SEQ ID NO: 332; WAN024DDP; Start 262; Stop 286
attgagttgtatagtcagacgaatg

SEQ ID NO: 261245 - DNA, 25 bp, Artificial
  probe
  misc_feature (1)..(25): SEQ ID NO: 332; WAN024DDP; Start 3122; Stop 3146
caagtgacgcaaccattaccattaa

SEQ ID NO: 261246 - DNA, 25 bp, Artificial
  probe
  misc_feature (1)..(25): SEQ ID NO: 332; WAN024DDP; Start 2168; Stop 2192
ttaactatggtcaagtgaatgtcaa

SEQ ID NO: 261247 - DNA, 25 bp, Artificial
  probe
  misc_feature (1)..(25): SEQ ID NO: 332; WAN024DDP; Start 1878; Stop 1902
ctctattgttaaggaagtcttgcct

SEQ ID NO: 261248 - DNA, 25 bp, Artificial
  probe
  misc_feature (1)..(25): SEQ ID NO: 332; WAN024DDP; Start 1881; Stop 1905
tattgttaaggaagtcttgcctgag

SEQ ID NO: 261249 - DNA, 25 bp, Artificial
  probe
  misc_feature (1)..(25): SEQ ID NO: 332; WAN024DDP; Start 1880; Stop 1904
ctattgttaaggaagtcttgcctga

SEQ ID NO: 261250 - DNA, 25 bp, Artificial
  probe
  misc_feature (1)..(25): SEQ ID NO: 332; WAN024DDP; Start 1879; Stop 1903
tctattgttaaggaagtcttgcctg

SEQ ID NO: 261251 - DNA, 25 bp, Artificial
  probe
  misc_feature (1)..(25): SEQ ID NO: 332; WAN024DDP; Start 1843; Stop 1867
ctctacactcctaaccaattcttat

SEQ ID NO: 261252 - DNA, 25 bp, Artificial
  probe
  misc_feature (1)..(25): SEQ ID NO: 332; WAN024DDP; Start 273; Stop 297
tagtcagacgaatggaacctacaga

SEQ ID NO: 261253 - DNA, 25 bp, Artificial
  probe
  misc_feature (1)..(25): SEQ ID NO: 332; WAN024DDP; Start 258; Stop 282
tgatattgagttgtatagtcagacg

SEQ ID NO: 261254 - DNA, 25 bp, Artificial
  probe
  misc_feature (1)..(25): SEQ ID NO: 332; WAN024DDP; Start 3272; Stop 3296
tctacatgatggaatatctcgaagg

SEQ ID NO: 261255 - DNA, 25 bp, Artificial
  probe
  misc_feature (1)..(25): SEQ ID NO: 332; WAN024DDP; Start 1692; Stop 1716
tgaccaagtaatcacagatattgtt

SEQ ID NO: 261256 - DNA, 25 bp, Artificial
  probe
  misc_feature (1)..(25): SEQ ID NO: 332; WAN024DDP; Start 1869; Stop 1893
tgatcgagactctattgttaaggaa

SEQ ID NO: 261257 - DNA, 25 bp, Artificial
  probe
  misc_feature (1)..(25): SEQ ID NO: 332; WAN024DDP; Start 1837; Stop 1861
ggacttctctacactcctaaccaat

SEQ ID NO: 261258 - DNA, 25 bp, Artificial
  probe
  misc_feature (1)..(25): SEQ ID NO: 332; WAN024DDP; Start 320; Stop 344
ttccagagaatacggatacttactt

SEQ ID NO: 261259 - DNA, 25 bp, Artificial
  probe
  misc_feature (1)..(25): SEQ ID NO: 333; WAN024A5B; Start 1; Stop 25
acagtctcctcctttatttgaatta

SEQ ID NO: 261260 - DNA, 25 bp, Artificial
  probe
  misc_feature (1)..(25): SEQ ID NO: 333; WAN024A5B; Start 2; Stop 26
cagtctcctcctttatttgaattat

SEQ ID NO: 261261 - DNA, 25 bp, Artificial
  probe
  misc_feature (1)..(25): SEQ ID NO: 333; WAN024A5B; Start 39; Stop 63
ccatcaattaggctagtaaaatccc

SEQ ID NO: 261262 - DNA, 25 bp, Artificial
  probe
  misc_feature (1)..(25): SEQ ID NO: 333; WAN024A5B; Start 42; Stop 66
tcaattaggctagtaaaatcccaac

SEQ ID NO: 261263 - DNA, 25 bp, Artificial
  probe
  misc_feature (1)..(25): SEQ ID NO: 333; WAN024A5B; Start 46; Stop 70
ttaggctagtaaaatcccaactctc

SEQ ID NO: 261264 - DNA, 25 bp, Artificial
  probe
  misc_feature (1)..(25): SEQ ID NO: 333; WAN024A5B; Start 40; Stop 64
catcaattaggctagtaaaatccca

SEQ ID NO: 261265 - DNA, 25 bp, Artificial
  probe
  misc_feature (1)..(25): SEQ ID NO: 333; WAN024A5B; Start 45; Stop 69
attaggctagtaaaatcccaactct

SEQ ID NO: 261266 - DNA, 25 bp, Artificial
  probe
  misc_feature (1)..(25): SEQ ID NO: 333; WAN024A5B; Start 43; Stop 67
caattaggctagtaaaatcccaact

SEQ ID NO: 261267 - DNA, 25 bp, Artificial
  probe
  misc_feature (1)..(25): SEQ ID NO: 333; WAN024A5B; Start 5; Stop 29
tctcctcctttatttgaattattgt

SEQ ID NO: 261268 - DNA, 25 bp, Artificial
  probe
  misc_feature (1)..(25): SEQ ID NO: 333; WAN024A5B; Start 44; Stop 68
aattaggctagtaaaatcccaactc

SEQ ID NO: 261269 - DNA, 25 bp, Artificial
  probe
  misc_feature (1)..(25): SEQ ID NO: 333; WAN024A5B; Start 4; Stop 28
gtctcctcctttatttgaattattg

SEQ ID NO: 261270 - DNA, 25 bp, Artificial
  probe
  misc_feature (1)..(25): SEQ ID NO: 333; WAN024A5B; Start 47; Stop 71
taggctagtaaaatcccaactctcg

SEQ ID NO: 261271 - DNA, 25 bp, Artificial
  probe
  misc_feature (1)..(25): SEQ ID NO: 333; WAN024A5B; Start 41; Stop 65
atcaattaggctagtaaaatcccaa

SEQ ID NO: 261272 - DNA, 25 bp, Artificial
  probe
  misc_feature (1)..(25): SEQ ID NO: 333; WAN024A5B; Start 3; Stop 27
agtctcctcctttatttgaattatt

SEQ ID NO: 261273 - DNA, 25 bp, Artificial
  probe
  misc_feature (1)..(25): SEQ ID NO: 333; WAN024A5B; Start 50; Stop 74
gctagtaaaatcccaactctcgata

SEQ ID NO: 261274 - DNA, 25 bp, Artificial
  probe
  misc_feature (1)..(25): SEQ ID NO: 333; WAN024A5B; Start 53; Stop 77
agtaaaatcccaactctcgataaga

SEQ ID NO: 261275 - DNA, 25 bp, Artificial
  probe
  misc_feature (1)..(25): SEQ ID NO: 333; WAN024A5B; Start 56; Stop 80
aaaatcccaactctcgataagaaaa

SEQ ID NO: 261276 - DNA, 25 bp, Artificial
  probe
  misc_feature (1)..(25): SEQ ID NO: 333; WAN024A5B; Start 54; Stop 78
gtaaaatcccaactctcgataagaa

SEQ ID NO: 261277 - DNA, 25 bp, Artificial
  probe
  misc_feature (1)..(25): SEQ ID NO: 333; WAN024A5B; Start 55; Stop 79
taaaatcccaactctcgataagaaa

SEQ ID NO: 261278 - DNA, 25 bp, Artificial
  probe
  misc_feature (1)..(25): SEQ ID NO: 333; WAN024A5B; Start 52; Stop 76
tagtaaaatcccaactctcgataag

SEQ ID NO: 261279 - DNA, 25 bp, Artificial
  probe
  misc_feature (1)..(25): SEQ ID NO: 333; WAN024A5B; Start 51; Stop 75
ctagtaaaatcccaactctcgataa

SEQ ID NO: 261280 - DNA, 25 bp, Artificial
  probe
  misc_feature (1)..(25): SEQ ID NO: 333; WAN024A5B; Start 49; Stop 73
ggctagtaaaatcccaactctcgat

SEQ ID NO: 261281 - DNA, 25 bp, Artificial
  probe
  misc_feature (1)..(25): SEQ ID NO: 333; WAN024A5B; Start 48; Stop 72
aggctagtaaaatcccaactctcga

SEQ ID NO: 261282 - DNA, 25 bp, Artificial
  probe
  misc_feature (1)..(25): SEQ ID NO: 333; WAN024A5B; Start 38; Stop 62
gccatcaattaggctagtaaaatcc

SEQ ID NO: 261283 - DNA, 25 bp, Artificial
  probe
  misc_feature (1)..(25): SEQ ID NO: 333; WAN024A5B; Start 89; Stop 113
attgattacatcagcgcacttttat

SEQ ID NO: 261284 - DNA, 25 bp, Artificial
  probe
  misc_feature (1)..(25): SEQ ID NO: 333; WAN024A5B; Start 88; Stop 112
gattgattacatcagcgcactttta

SEQ ID NO: 261285 - DNA, 25 bp, Artificial
  probe
  misc_feature (1)..(25): SEQ ID NO: 333; WAN024A5B; Start 90; Stop 114
ttgattacatcagcgcacttttatg

SEQ ID NO: 261286 - DNA, 25 bp, Artificial
  probe
  misc_feature (1)..(25): SEQ ID NO: 333; WAN024A5B; Start 91; Stop 115
tgattacatcagcgcacttttatgt

SEQ ID NO: 261287 - DNA, 25 bp, Artificial
  probe
  misc_feature (1)..(25): SEQ ID NO: 333; WAN024A5B; Start 87; Stop 111
tgattgattacatcagcgcactttt

SEQ ID NO: 261288 - DNA, 25 bp, Artificial
  probe
  misc_feature (1)..(25): SEQ ID NO: 334; WAN024A5A; Start 91; Stop 115
taattcaaataaaggaggagactgt

SEQ ID NO: 261289 - DNA, 25 bp, Artificial
  probe
  misc_feature (1)..(25): SEQ ID NO: 334; WAN024A5A; Start 90; Stop 114
ataattcaaataaaggaggagactg

SEQ ID NO: 261290 - DNA, 25 bp, Artificial
  probe
  misc_feature (1)..(25): SEQ ID NO: 334; WAN024A5A; Start 53; Stop 77
gggattttactagcctaattgatgg

SEQ ID NO: 261291 - DNA, 25 bp, Artificial
  probe
  misc_feature (1)..(25): SEQ ID NO: 334; WAN024A5A; Start 50; Stop 74
gttgggattttactagcctaattga

SEQ ID NO: 261292 - DNA, 25 bp, Artificial
  probe
  misc_feature (1)..(25): SEQ ID NO: 334; WAN024A5A; Start 46; Stop 70
gagagttgggattttactagcctaa

SEQ ID NO: 261293 - DNA, 25 bp, Artificial
  probe
  misc_feature (1)..(25): SEQ ID NO: 334; WAN024A5A; Start 52; Stop 76
tgggattttactagcctaattgatg

SEQ ID NO: 261294 - DNA, 25 bp, Artificial
  probe
  misc_feature (1)..(25): SEQ ID NO: 334; WAN024A5A; Start 47; Stop 71
agagttgggattttactagcctaat

SEQ ID NO: 261295 - DNA, 25 bp, Artificial
  probe
  misc_feature (1)..(25): SEQ ID NO: 334; WAN024A5A; Start 49; Stop 73
agttgggattttactagcctaattg

SEQ ID NO: 261296 - DNA, 25 bp, Artificial
  probe
  misc_feature (1)..(25): SEQ ID NO: 334; WAN024A5A; Start 87; Stop 111
acaataattcaaataaaggaggaga

SEQ ID NO: 261297 - DNA, 25 bp, Artificial
  probe
  misc_feature (1)..(25): SEQ ID NO: 334; WAN024A5A; Start 48; Stop 72
gagttgggattttactagcctaatt

SEQ ID NO: 261298 - DNA, 25 bp, Artificial
  probe
  misc_feature (1)..(25): SEQ ID NO: 334; WAN024A5A; Start 88; Stop 112
caataattcaaataaaggaggagac

SEQ ID NO: 261299 - DNA, 25 bp, Artificial
  probe
  misc_feature (1)..(25): SEQ ID NO: 334; WAN024A5A; Start 45; Stop 69
cgagagttgggattttactagccta

SEQ ID NO: 261300 - DNA, 25 bp, Artificial
  probe
  misc_feature (1)..(25): SEQ ID NO: 334; WAN024A5A; Start 51; Stop 75
ttgggattttactagcctaattgat

SEQ ID NO: 261301 - DNA, 25 bp, Artificial
  probe
  misc_feature (1)..(25): SEQ ID NO: 334; WAN024A5A; Start 89; Stop 113
aataattcaaataaaggaggagact

SEQ ID NO: 261302 - DNA, 25 bp, Artificial
  probe
  misc_feature (1)..(25): SEQ ID NO: 334; WAN024A5A; Start 42; Stop 66
tatcgagagttgggattttactagc

SEQ ID NO: 261303 - DNA, 25 bp, Artificial
  probe
  misc_feature (1)..(25): SEQ ID NO: 334; WAN024A5A; Start 39; Stop 63
tcttatcgagagttgggattttact

SEQ ID NO: 261304 - DNA, 25 bp, Artificial
  probe
  misc_feature (1)..(25): SEQ ID NO: 334; WAN024A5A; Start 36; Stop 60
ttttcttatcgagagttgggatttt

SEQ ID NO: 261305 - DNA, 25 bp, Artificial
  probe
  misc_feature (1)..(25): SEQ ID NO: 334; WAN024A5A; Start 38; Stop 62
ttcttatcgagagttgggattttac

SEQ ID NO: 261306 - DNA, 25 bp, Artificial
  probe
  misc_feature (1)..(25): SEQ ID NO: 334; WAN024A5A; Start 37; Stop 61
tttcttatcgagagttgggatttta

SEQ ID NO: 261307 - DNA, 25 bp, Artificial
  probe
  misc_feature (1)..(25): SEQ ID NO: 334; WAN024A5A; Start 43; Stop 67
atcgagagttgggattttactagcc

SEQ ID NO: 261308 - DNA, 25 bp, Artificial
  probe
  misc_feature (1)..(25): SEQ ID NO: 334; WAN024A5A; Start 41; Stop 65
ttatcgagagttgggattttactag

SEQ ID NO: 261309 - DNA, 25 bp, Artificial
  probe
  misc_feature (1)..(25): SEQ ID NO: 334; WAN024A5A; Start 40; Stop 64
cttatcgagagttgggattttacta

SEQ ID NO: 261310 - DNA, 25 bp, Artificial
  probe
  misc_feature (1)..(25): SEQ ID NO: 334; WAN024A5A; Start 44; Stop 68
tcgagagttgggattttactagcct

SEQ ID NO: 261311 - DNA, 25 bp, Artificial
  probe
  misc_feature (1)..(25): SEQ ID NO: 334; WAN024A5A; Start 54; Stop 78
ggattttactagcctaattgatggc

SEQ ID NO: 261312 - DNA, 25 bp, Artificial
  probe
  misc_feature (1)..(25): SEQ ID NO: 334; WAN024A5A; Start 4; Stop 28
taaaagtgcgctgatgtaatcaatc

SEQ ID NO: 261313 - DNA, 25 bp, Artificial
  probe
  misc_feature (1)..(25): SEQ ID NO: 334; WAN024A5A; Start 3; Stop 27
ataaaagtgcgctgatgtaatcaat

SEQ ID NO: 261314 - DNA, 25 bp, Artificial
  probe
  misc_feature (1)..(25): SEQ ID NO: 334; WAN024A5A; Start 2; Stop 26
cataaaagtgcgctgatgtaatcaa

SEQ ID NO: 261315 - DNA, 25 bp, Artificial
  probe
  misc_feature (1)..(25): SEQ ID NO: 334; WAN024A5A; Start 1; Stop 25
acataaaagtgcgctgatgtaatca

SEQ ID NO: 261316 - DNA, 25 bp, Artificial
  probe
  misc_feature (1)..(25): SEQ ID NO: 334; WAN024A5A; Start 5; Stop 29
aaaagtgcgctgatgtaatcaatca

SEQ ID NO: 261317 - DNA, 25 bp, Artificial
  probe
  misc_feature (1)..(25): SEQ ID NO: 335; WAN024AO7; Start 78; Stop 102
caacgctttctgttagtggtatatt

SEQ ID NO: 261318 - DNA, 25 bp, Artificial
  probe
  misc_feature (1)..(25): SEQ ID NO: 335; WAN024AO7; Start 79; Stop 103
aacgctttctgttagtggtatattt

SEQ ID NO: 261319 - DNA, 25 bp, Artificial
  probe
  misc_feature (1)..(25): SEQ ID NO: 335; WAN024AO7; Start 71; Stop 95
atattgacaacgctttctgttagtg

SEQ ID NO: 261320 - DNA, 25 bp, Artificial
  probe
  misc_feature (1)..(25): SEQ ID NO: 335; WAN024AO7; Start 77; Stop 101
acaacgctttctgttagtggtatat

SEQ ID NO: 261321 - DNA, 25 bp, Artificial
  probe
  misc_feature (1)..(25): SEQ ID NO: 335; WAN024AO7; Start 80; Stop 104
acgctttctgttagtggtatattta

SEQ ID NO: 261322 - DNA, 25 bp, Artificial
  probe
  misc_feature (1)..(25): SEQ ID NO: 335; WAN024AO7; Start 76; Stop 100
gacaacgctttctgttagtggtata

SEQ ID NO: 261323 - DNA, 25 bp, Artificial
  probe
  misc_feature (1)..(25): SEQ ID NO: 335; WAN024AO7; Start 70; Stop 94
tatattgacaacgctttctgttagt

SEQ ID NO: 261324 - DNA, 25 bp, Artificial
  probe
  misc_feature (1)..(25): SEQ ID NO: 335; WAN024AO7; Start 72; Stop 96
tattgacaacgctttctgttagtgg

SEQ ID NO: 261325 - DNA, 25 bp, Artificial
  probe
  misc_feature (1)..(25): SEQ ID NO: 335; WAN024AO7; Start 81; Stop 105
cgctttctgttagtggtatatttaa

SEQ ID NO: 261326 - DNA, 25 bp, Artificial
  probe
  misc_feature (1)..(25): SEQ ID NO: 335; WAN024AO7; Start 75; Stop 99
tgacaacgctttctgttagtggtat

SEQ ID NO: 261327 - DNA, 25 bp, Artificial
  probe
  misc_feature (1)..(25): SEQ ID NO: 335; WAN024AO7; Start 74; Stop 98
ttgacaacgctttctgttagtggta

SEQ ID NO: 261328 - DNA, 25 bp, Artificial
  probe
  misc_feature (1)..(25): SEQ ID NO: 335; WAN024AO7; Start 69; Stop 93
atatattgacaacgctttctgttag

SEQ ID NO: 261329 - DNA, 25 bp, Artificial
  probe
  misc_feature (1)..(25): SEQ ID NO: 335; WAN024AO7; Start 73; Stop 97
attgacaacgctttctgttagtggt

SEQ ID NO: 261330 - DNA, 25 bp, Artificial
  probe
  misc_feature (1)..(25): SEQ ID NO: 335; WAN024AO7; Start 67; Stop 91
aaatatattgacaacgctttctgtt

SEQ ID NO: 261331 - DNA, 25 bp, Artificial
  probe
  misc_feature (1)..(25): SEQ ID NO: 335; WAN024AO7; Start 82; Stop 106
gctttctgttagtggtatatttaat

SEQ ID NO: 261332 - DNA, 25 bp, Artificial
  probe
  misc_feature (1)..(25): SEQ ID NO: 335; WAN024AO7; Start 68; Stop 92
aatatattgacaacgctttctgtta

SEQ ID NO: 261333 - DNA, 25 bp, Artificial
  probe
  misc_feature (1)..(25): SEQ ID NO: 335; WAN024AO7; Start 66; Stop 90
aaaatatattgacaacgctttctgt

SEQ ID NO: 261334 - DNA, 25 bp, Artificial
  probe
  misc_feature (1)..(25): SEQ ID NO: 336; WAN0249JS; Start 123; Stop 147
cattgatgtccttgatagttcttga

SEQ ID NO: 261335 - DNA, 25 bp, Artificial
  probe
  misc_feature (1)..(25): SEQ ID NO: 336; WAN0249JS; Start 124; Stop 148
attgatgtccttgatagttcttgaa

SEQ ID NO: 261336 - DNA, 25 bp, Artificial
  probe
  misc_feature (1)..(25): SEQ ID NO: 336; WAN0249JS; Start 122; Stop 146
acattgatgtccttgatagttcttg

SEQ ID NO: 261337 - DNA, 25 bp, Artificial
  probe
  misc_feature (1)..(25): SEQ ID NO: 336; WAN0249JS; Start 125; Stop 149
ttgatgtccttgatagttcttgaaa

SEQ ID NO: 261338 - DNA, 25 bp, Artificial
  probe
  misc_feature (1)..(25): SEQ ID NO: 336; WAN0249JS; Start 33; Stop 57
cctcgtatcaaaacagttctaaagt

SEQ ID NO: 261339 - DNA, 25 bp, Artificial
  probe
  misc_feature (1)..(25): SEQ ID NO: 336; WAN0249JS; Start 31; Stop 55
gtcctcgtatcaaaacagttctaaa

SEQ ID NO: 261340 - DNA, 25 bp, Artificial
  probe
  misc_feature (1)..(25): SEQ ID NO: 336; WAN0249JS; Start 32; Stop 56
tcctcgtatcaaaacagttctaaag

SEQ ID NO: 261341 - DNA, 25 bp, Artificial
  probe
  misc_feature (1)..(25): SEQ ID NO: 336; WAN0249JS; Start 40; Stop 64
tcaaaacagttctaaagttcgtctt

SEQ ID NO: 261342 - DNA, 25 bp, Artificial
  probe
  misc_feature (1)..(25): SEQ ID NO: 336; WAN0249JS; Start 39; Stop 63
atcaaaacagttctaaagttcgtct

SEQ ID NO: 261343 - DNA, 25 bp, Artificial
  probe
  misc_feature (1)..(25): SEQ ID NO: 336; WAN0249JS; Start 126; Stop 150
tgatgtccttgatagttcttgaaaa

SEQ ID NO: 261344 - DNA, 25 bp, Artificial
  probe
  misc_feature (1)..(25): SEQ ID NO: 336; WAN0249JS; Start 36; Stop 60
cgtatcaaaacagttctaaagttcg

SEQ ID NO: 261345 - DNA, 25 bp, Artificial
  probe
  misc_feature (1)..(25): SEQ ID NO: 336; WAN0249JS; Start 194; Stop 218
taataagcttcttaacatcgcagtg

SEQ ID NO: 261346 - DNA, 25 bp, Artificial
  probe
  misc_feature (1)..(25): SEQ ID NO: 336; WAN0249JS; Start 201; Stop 225
cttcttaacatcgcagtgactgtgg

SEQ ID NO: 261347 - DNA, 25 bp, Artificial
  probe
  misc_feature (1)..(25): SEQ ID NO: 336; WAN0249JS; Start 195; Stop 219
aataagcttcttaacatcgcagtga

SEQ ID NO: 261348 - DNA, 25 bp, Artificial
  probe
  misc_feature (1)..(25): SEQ ID NO: 336; WAN0249JS; Start 30; Stop 54
tgtcctcgtatcaaaacagttctaa

SEQ ID NO: 261349 - DNA, 25 bp, Artificial
  probe
  misc_feature (1)..(25): SEQ ID NO: 336; WAN0249JS; Start 29; Stop 53
ttgtcctcgtatcaaaacagttcta

SEQ ID NO: 261350 - DNA, 25 bp, Artificial
  probe
  misc_feature (1)..(25): SEQ ID NO: 336; WAN0249JS; Start 152; Stop 176
acggatataatgtatttgaagatgt

SEQ ID NO: 261351 - DNA, 25 bp, Artificial
  probe
  misc_feature (1)..(25): SEQ ID NO: 336; WAN0249JS; Start 193; Stop 217
ttaataagcttcttaacatcgcagt

SEQ ID NO: 261352 - DNA, 25 bp, Artificial
  probe
  misc_feature (1)..(25): SEQ ID NO: 336; WAN0249JS; Start 191; Stop 215
acttaataagcttcttaacatcgca

SEQ ID NO: 261353 - DNA, 25 bp, Artificial
  probe
  misc_feature (1)..(25): SEQ ID NO: 336; WAN0249JS; Start 28; Stop 52
cttgtcctcgtatcaaaacagttct

SEQ ID NO: 261354 - DNA, 25 bp, Artificial
  probe
  misc_feature (1)..(25): SEQ ID NO: 336; WAN0249JS; Start 196; Stop 220
ataagcttcttaacatcgcagtgac

SEQ ID NO: 261355 - DNA, 25 bp, Artificial
  probe
  misc_feature (1)..(25): SEQ ID NO: 336; WAN0249JS; Start 192; Stop 216
cttaataagcttcttaacatcgcag

SEQ ID NO: 261356 - DNA, 25 bp, Artificial
  probe
  misc_feature (1)..(25): SEQ ID NO: 336; WAN0249JS; Start 37; Stop 61
gtatcaaaacagttctaaagttcgt

SEQ ID NO: 261357 - DNA, 25 bp, Artificial
  probe
  misc_feature (1)..(25): SEQ ID NO: 336; WAN0249JS; Start 190; Stop 214
aacttaataagcttcttaacatcgc

SEQ ID NO: 261358 - DNA, 25 bp, Artificial
  probe
  misc_feature (1)..(25): SEQ ID NO: 336; WAN0249JS; Start 27; Stop 51
ccttgtcctcgtatcaaaacagttc

SEQ ID NO: 261359 - DNA, 25 bp, Artificial
  probe
  misc_feature (1)..(25): SEQ ID NO: 336; WAN0249JS; Start 38; Stop 62
tatcaaaacagttctaaagttcgtc

SEQ ID NO: 261360 - DNA, 25 bp, Artificial
  probe
  misc_feature (1)..(25): SEQ ID NO: 336; WAN0249JS; Start 35; Stop 59
tcgtatcaaaacagttctaaagttc

SEQ ID NO: 261361 - DNA, 25 bp, Artificial
  probe
  misc_feature (1)..(25): SEQ ID NO: 336; WAN0249JS; Start 34; Stop 58
ctcgtatcaaaacagttctaaagtt

SEQ ID NO: 261362 - DNA, 25 bp, Artificial
  probe
  misc_feature (1)..(25): SEQ ID NO: 336; WAN0249JS; Start 200; Stop 224
gcttcttaacatcgcagtgactgtg

SEQ ID NO: 261363 - DNA, 25 bp, Artificial
  probe
  misc_feature (1)..(25): SEQ ID NO: 336; WAN0249JS; Start 26; Stop 50
tccttgtcctcgtatcaaaacagtt

SEQ ID NO: 261364 - DNA, 25 bp, Artificial
  probe
  misc_feature (1)..(25): SEQ ID NO: 336; WAN0249JS; Start 197; Stop 221
taagcttcttaacatcgcagtgact

SEQ ID NO: 261365 - DNA, 25 bp, Artificial
  probe
  misc_feature (1)..(25): SEQ ID NO: 336; WAN0249JS; Start 121; Stop 145
gacattgatgtccttgatagttctt

SEQ ID NO: 261366 - DNA, 25 bp, Artificial
  probe
  misc_feature (1)..(25): SEQ ID NO: 336; WAN0249JS; Start 202; Stop 226
ttcttaacatcgcagtgactgtggt

SEQ ID NO: 261367 - DNA, 25 bp, Artificial
  probe
  misc_feature (1)..(25): SEQ ID NO: 337; WAN024AL6; Start 12; Stop 36
actcactcgtgtcgttaaatcttac

SEQ ID NO: 261368 - DNA, 25 bp, Artificial
  probe
  misc_feature (1)..(25): SEQ ID NO: 337; WAN024AL6; Start 17; Stop 41
ctcgtgtcgttaaatcttacagttt

SEQ ID NO: 261369 - DNA, 25 bp, Artificial
  probe
  misc_feature (1)..(25): SEQ ID NO: 337; WAN024AL6; Start 16; Stop 40
actcgtgtcgttaaatcttacagtt

SEQ ID NO: 261370 - DNA, 25 bp, Artificial
  probe
  misc_feature (1)..(25): SEQ ID NO: 337; WAN024AL6; Start 14; Stop 38
tcactcgtgtcgttaaatcttacag

SEQ ID NO: 261371 - DNA, 25 bp, Artificial
  probe
  misc_feature (1)..(25): SEQ ID NO: 337; WAN024AL6; Start 13; Stop 37
ctcactcgtgtcgttaaatcttaca

SEQ ID NO: 261372 - DNA, 25 bp, Artificial
  probe
  misc_feature (1)..(25): SEQ ID NO: 337; WAN024AL6; Start 11; Stop 35
gactcactcgtgtcgttaaatctta

SEQ ID NO: 261373 - DNA, 25 bp, Artificial
  probe
  misc_feature (1)..(25): SEQ ID NO: 337; WAN024AL6; Start 15; Stop 39
cactcgtgtcgttaaatcttacagt

SEQ ID NO: 261374 - DNA, 25 bp, Artificial
  probe
  misc_feature (1)..(25): SEQ ID NO: 337; WAN024AL6; Start 7; Stop 31
atttgactcactcgtgtcgttaaat

SEQ ID NO: 261375 - DNA, 25 bp, Artificial
  probe
  misc_feature (1)..(25): SEQ ID NO: 337; WAN024AL6; Start 18; Stop 42
tcgtgtcgttaaatcttacagttta

SEQ ID NO: 261376 - DNA, 25 bp, Artificial
  probe
  misc_feature (1)..(25): SEQ ID NO: 337; WAN024AL6; Start 62; Stop 86
taccttcatctttgtatcaagtacg

SEQ ID NO: 261377 - DNA, 25 bp, Artificial
  probe
  misc_feature (1)..(25): SEQ ID NO: 337; WAN024AL6; Start 8; Stop 32
tttgactcactcgtgtcgttaaatc

SEQ ID NO: 261378 - DNA, 25 bp, Artificial
  probe
  misc_feature (1)..(25): SEQ ID NO: 337; WAN024AL6; Start 6; Stop 30
gatttgactcactcgtgtcgttaaa

SEQ ID NO: 261379 - DNA, 25 bp, Artificial
  probe
  misc_feature (1)..(25): SEQ ID NO: 337; WAN024AL6; Start 63; Stop 87
accttcatctttgtatcaagtacgt

SEQ ID NO: 261380 - DNA, 25 bp, Artificial
  probe
  misc_feature (1)..(25): SEQ ID NO: 337; WAN024AL6; Start 10; Stop 34
tgactcactcgtgtcgttaaatctt

SEQ ID NO: 261381 - DNA, 25 bp, Artificial
  probe
  misc_feature (1)..(25): SEQ ID NO: 337; WAN024AL6; Start 9; Stop 33
ttgactcactcgtgtcgttaaatct

SEQ ID NO: 261382 - DNA, 25 bp, Artificial
  probe
  misc_feature (1)..(25): SEQ ID NO: 337; WAN024AL6; Start 156; Stop 180
tcacctgagaagaatggtttgcttt

SEQ ID NO: 261383 - DNA, 25 bp, Artificial
  probe
  misc_feature (1)..(25): SEQ ID NO: 337; WAN024AL6; Start 19; Stop 43
cgtgtcgttaaatcttacagtttaa

SEQ ID NO: 261384 - DNA, 25 bp, Artificial
  probe
  misc_feature (1)..(25): SEQ ID NO: 337; WAN024AL6; Start 158; Stop 182
acctgagaagaatggtttgctttta

SEQ ID NO: 261385 - DNA, 25 bp, Artificial
  probe
  misc_feature (1)..(25): SEQ ID NO: 337; WAN024AL6; Start 64; Stop 88
ccttcatctttgtatcaagtacgta

SEQ ID NO: 261386 - DNA, 25 bp, Artificial
  probe
  misc_feature (1)..(25): SEQ ID NO: 337; WAN024AL6; Start 155; Stop 179
ctcacctgagaagaatggtttgctt

SEQ ID NO: 261387 - DNA, 25 bp, Artificial
  probe
  misc_feature (1)..(25): SEQ ID NO: 337; WAN024AL6; Start 61; Stop 85
ataccttcatctttgtatcaagtac

SEQ ID NO: 261388 - DNA, 25 bp, Artificial
  probe
  misc_feature (1)..(25): SEQ ID NO: 337; WAN024AL6; Start 5; Stop 29
cgatttgactcactcgtgtcgttaa

SEQ ID NO: 261389 - DNA, 25 bp, Artificial
  probe
  misc_feature (1)..(25): SEQ ID NO: 337; WAN024AL6; Start 157; Stop 181
cacctgagaagaatggtttgctttt

SEQ ID NO: 261390 - DNA, 25 bp, Artificial
  probe
  misc_feature (1)..(25): SEQ ID NO: 337; WAN024AL6; Start 60; Stop 84
aataccttcatctttgtatcaagta

SEQ ID NO: 261391 - DNA, 25 bp, Artificial
  probe
  misc_feature (1)..(25): SEQ ID NO: 337; WAN024AL6; Start 59; Stop 83
taataccttcatctttgtatcaagt

SEQ ID NO: 261392 - DNA, 25 bp, Artificial
  probe
  misc_feature (1)..(25): SEQ ID NO: 337; WAN024AL6; Start 23; Stop 47
tcgttaaatcttacagtttaaatgc

SEQ ID NO: 261393 - DNA, 25 bp, Artificial
  probe
  misc_feature (1)..(25): SEQ ID NO: 337; WAN024AL6; Start 24; Stop 48
cgttaaatcttacagtttaaatgca

SEQ ID NO: 261394 - DNA, 25 bp, Artificial
  probe
  misc_feature (1)..(25): SEQ ID NO: 337; WAN024AL6; Start 117; Stop 141
aaaagtgaggtctttaccattaaaa

SEQ ID NO: 261395 - DNA, 25 bp, Artificial
  probe
  misc_feature (1)..(25): SEQ ID NO: 337; WAN024AL6; Start 20; Stop 44
gtgtcgttaaatcttacagtttaaa

SEQ ID NO: 261396 - DNA, 25 bp, Artificial
  probe
  misc_feature (1)..(25): SEQ ID NO: 337; WAN024AL6; Start 154; Stop 178
cctcacctgagaagaatggtttgct

SEQ ID NO: 261397 - DNA, 25 bp, Artificial
  probe
  misc_feature (1)..(25): SEQ ID NO: 337; WAN024AL6; Start 4; Stop 28
tcgatttgactcactcgtgtcgtta

SEQ ID NO: 261398 - DNA, 25 bp, Artificial
  probe
  misc_feature (1)..(25): SEQ ID NO: 337; WAN024AL6; Start 21; Stop 45
tgtcgttaaatcttacagtttaaat

SEQ ID NO: 261399 - DNA, 25 bp, Artificial
  probe
  misc_feature (1)..(25): SEQ ID NO: 337; WAN024AL6; Start 22; Stop 46
gtcgttaaatcttacagtttaaatg

SEQ ID NO: 261400 - DNA, 25 bp, Artificial
  probe
  misc_feature (1)..(25): SEQ ID NO: 338; WAN024AGK; Start 11; Stop 35
catttctttctttagcctgacttgt

SEQ ID NO: 261401 - DNA, 25 bp, Artificial
  probe
  misc_feature (1)..(25): SEQ ID NO: 338; WAN024AGK; Start 5; Stop 29
ctacctcatttctttctttagcctg

SEQ ID NO: 261402 - DNA, 25 bp, Artificial
  probe
  misc_feature (1)..(25): SEQ ID NO: 338; WAN024AGK; Start 4; Stop 28
tctacctcatttctttctttagcct

SEQ ID NO: 261403 - DNA, 25 bp, Artificial
  probe
  misc_feature (1)..(25): SEQ ID NO: 338; WAN024AGK; Start 13; Stop 37
tttctttctttagcctgacttgttt

SEQ ID NO: 261404 - DNA, 25 bp, Artificial
  probe
  misc_feature (1)..(25): SEQ ID NO: 338; WAN024AGK; Start 12; Stop 36
atttctttctttagcctgacttgtt

SEQ ID NO: 261405 - DNA, 25 bp, Artificial
  probe
  misc_feature (1)..(25): SEQ ID NO: 338; WAN024AGK; Start 14; Stop 38
ttctttctttagcctgacttgttta

SEQ ID NO: 261406 - DNA, 25 bp, Artificial
  probe
  misc_feature (1)..(25): SEQ ID NO: 338; WAN024AGK; Start 3; Stop 27
atctacctcatttctttctttagcc

SEQ ID NO: 261407 - DNA, 25 bp, Artificial
  probe
  misc_feature (1)..(25): SEQ ID NO: 338; WAN024AGK; Start 15; Stop 39
tctttctttagcctgacttgtttaa

SEQ ID NO: 261408 - DNA, 25 bp, Artificial
  probe
  misc_feature (1)..(25): SEQ ID NO: 338; WAN024AGK; Start 6; Stop 30
tacctcatttctttctttagcctga

SEQ ID NO: 261409 - DNA, 25 bp, Artificial
  probe
  misc_feature (1)..(25): SEQ ID NO: 338; WAN024AGK; Start 10; Stop 34
tcatttctttctttagcctgacttg

SEQ ID NO: 261410 - DNA, 25 bp, Artificial
  probe
  misc_feature (1)..(25): SEQ ID NO: 338; WAN024AGK; Start 9; Stop 33
ctcatttctttctttagcctgactt

SEQ ID NO: 261411 - DNA, 25 bp, Artificial
  probe
  misc_feature (1)..(25): SEQ ID NO: 338; WAN024AGK; Start 8; Stop 32
cctcatttctttctttagcctgact

SEQ ID NO: 261412 - DNA, 25 bp, Artificial
  probe
  misc_feature (1)..(25): SEQ ID NO: 338; WAN024AGK; Start 7; Stop 31
acctcatttctttctttagcctgac

SEQ ID NO: 261413 - DNA, 25 bp, Artificial
  probe
  misc_feature (1)..(25): SEQ ID NO: 338; WAN024AGK; Start 2; Stop 26
catctacctcatttctttctttagc

SEQ ID NO: 261414 - DNA, 25 bp, Artificial
  probe
  misc_feature (1)..(25): SEQ ID NO: 338; WAN024AGK; Start 62; Stop 86
atactctcattataacaggattggg

SEQ ID NO: 261415 - DNA, 25 bp, Artificial
  probe
  misc_feature (1)..(25): SEQ ID NO: 338; WAN024AGK; Start 16; Stop 40
ctttctttagcctgacttgtttaaa

SEQ ID NO: 261416 - DNA, 25 bp, Artificial
  probe
  misc_feature (1)..(25): SEQ ID NO: 338; WAN024AGK; Start 1; Stop 25
acatctacctcatttctttctttag

SEQ ID NO: 261417 - DNA, 25 bp, Artificial
  probe
  misc_feature (1)..(25): SEQ ID NO: 338; WAN024AGK; Start 79; Stop 103
ggattggggtgtaaagcaagtaaaa

SEQ ID NO: 261418 - DNA, 25 bp, Artificial
  probe
  misc_feature (1)..(25): SEQ ID NO: 338; WAN024AGK; Start 65; Stop 89
ctctcattataacaggattggggtg

SEQ ID NO: 261419 - DNA, 25 bp, Artificial
  probe
  misc_feature (1)..(25): SEQ ID NO: 338; WAN024AGK; Start 63; Stop 87
tactctcattataacaggattgggg

SEQ ID NO: 261420 - DNA, 25 bp, Artificial
  probe
  misc_feature (1)..(25): SEQ ID NO: 338; WAN024AGK; Start 64; Stop 88
actctcattataacaggattggggt

SEQ ID NO: 261421 - DNA, 25 bp, Artificial
  probe
  misc_feature (1)..(25): SEQ ID NO: 338; WAN024AGK; Start 72; Stop 96
tataacaggattggggtgtaaagca

SEQ ID NO: 261422 - DNA, 25 bp, Artificial
  probe
  misc_feature (1)..(25): SEQ ID NO: 338; WAN024AGK; Start 61; Stop 85
tatactctcattataacaggattgg

SEQ ID NO: 261423 - DNA, 25 bp, Artificial
  probe
  misc_feature (1)..(25): SEQ ID NO: 338; WAN024AGK; Start 67; Stop 91
ctcattataacaggattggggtgta

SEQ ID NO: 261424 - DNA, 25 bp, Artificial
  probe
  misc_feature (1)..(25): SEQ ID NO: 338; WAN024AGK; Start 78; Stop 102
aggattggggtgtaaagcaagtaaa

SEQ ID NO: 261425 - DNA, 25 bp, Artificial
  probe
  misc_feature (1)..(25): SEQ ID NO: 338; WAN024AGK; Start 68; Stop 92
tcattataacaggattggggtgtaa

SEQ ID NO: 261426 - DNA, 25 bp, Artificial
  probe
  misc_feature (1)..(25): SEQ ID NO: 338; WAN024AGK; Start 71; Stop 95
ttataacaggattggggtgtaaagc

SEQ ID NO: 261427 - DNA, 25 bp, Artificial
  probe
  misc_feature (1)..(25): SEQ ID NO: 338; WAN024AGK; Start 103; Stop 127
aagattgaagctttgagaagttgtt

SEQ ID NO: 261428 - DNA, 25 bp, Artificial
  probe
  misc_feature (1)..(25): SEQ ID NO: 338; WAN024AGK; Start 106; Stop 130
attgaagctttgagaagttgttaca

SEQ ID NO: 261429 - DNA, 25 bp, Artificial
  probe
  misc_feature (1)..(25): SEQ ID NO: 338; WAN024AGK; Start 69; Stop 93
cattataacaggattggggtgtaaa

SEQ ID NO: 261430 - DNA, 25 bp, Artificial
  probe
  misc_feature (1)..(25): SEQ ID NO: 338; WAN024AGK; Start 66; Stop 90
tctcattataacaggattggggtgt

SEQ ID NO: 261431 - DNA, 25 bp, Artificial
  probe
  misc_feature (1)..(25): SEQ ID NO: 338; WAN024AGK; Start 20; Stop 44
ctttagcctgacttgtttaaaggtc

SEQ ID NO: 261432 - DNA, 25 bp, Artificial
  probe
  misc_feature (1)..(25): SEQ ID NO: 338; WAN024AGK; Start 19; Stop 43
tctttagcctgacttgtttaaaggt

SEQ ID NO: 261433 - DNA, 25 bp, Artificial
  probe
  misc_feature (1)..(25): SEQ ID NO: 339; WAN024AIS; Start 8; Stop 32
agatagactcaggatgttataggta

SEQ ID NO: 261434 - DNA, 25 bp, Artificial
  probe
  misc_feature (1)..(25): SEQ ID NO: 339; WAN024AIS; Start 7; Stop 31
tagatagactcaggatgttataggt

SEQ ID NO: 261435 - DNA, 25 bp, Artificial
  probe
  misc_feature (1)..(25): SEQ ID NO: 339; WAN024AIS; Start 9; Stop 33
gatagactcaggatgttataggtaa

SEQ ID NO: 261436 - DNA, 25 bp, Artificial
  probe
  misc_feature (1)..(25): SEQ ID NO: 339; WAN024AIS; Start 6; Stop 30
ttagatagactcaggatgttatagg

SEQ ID NO: 261437 - DNA, 25 bp, Artificial
  probe
  misc_feature (1)..(25): SEQ ID NO: 339; WAN024AIS; Start 3; Stop 27
atcttagatagactcaggatgttat

SEQ ID NO: 261438 - DNA, 25 bp, Artificial
  probe
  misc_feature (1)..(25): SEQ ID NO: 339; WAN024AIS; Start 5; Stop 29
cttagatagactcaggatgttatag

SEQ ID NO: 261439 - DNA, 25 bp, Artificial
  probe
  misc_feature (1)..(25): SEQ ID NO: 339; WAN024AIS; Start 4; Stop 28
tcttagatagactcaggatgttata

SEQ ID NO: 261440 - DNA, 25 bp, Artificial
  probe
  misc_feature (1)..(25): SEQ ID NO: 339; WAN024AIS; Start 10; Stop 34
atagactcaggatgttataggtaaa

SEQ ID NO: 261441 - DNA, 25 bp, Artificial
  probe
  misc_feature (1)..(25): SEQ ID NO: 339; WAN024AIS; Start 2; Stop 26
catcttagatagactcaggatgtta

SEQ ID NO: 261442 - DNA, 25 bp, Artificial
  probe
  misc_feature (1)..(25): SEQ ID NO: 339; WAN024AIS; Start 12; Stop 36
agactcaggatgttataggtaaaat

SEQ ID NO: 261443 - DNA, 25 bp, Artificial
  probe
  misc_feature (1)..(25): SEQ ID NO: 339; WAN024AIS; Start 14; Stop 38
actcaggatgttataggtaaaatct

SEQ ID NO: 261444 - DNA, 25 bp, Artificial
  probe
  misc_feature (1)..(25): SEQ ID NO: 339; WAN024AIS; Start 13; Stop 37
gactcaggatgttataggtaaaatc

SEQ ID NO: 261445 - DNA, 25 bp, Artificial
  probe
  misc_feature (1)..(25): SEQ ID NO: 339; WAN024AIS; Start 11; Stop 35
tagactcaggatgttataggtaaaa

SEQ ID NO: 261446 - DNA, 25 bp, Artificial
  probe
  misc_feature (1)..(25): SEQ ID NO: 339; WAN024AIS; Start 15; Stop 39
ctcaggatgttataggtaaaatctt

SEQ ID NO: 261447 - DNA, 25 bp, Artificial
  probe
  misc_feature (1)..(25): SEQ ID NO: 340; WAN024F32; Start 69; Stop 93
catagttaaggttggtcatacagat

SEQ ID NO: 261448 - DNA, 25 bp, Artificial
  probe
  misc_feature (1)..(25): SEQ ID NO: 340; WAN024F32; Start 70; Stop 94
atagttaaggttggtcatacagatg

SEQ ID NO: 261449 - DNA, 25 bp, Artificial
  probe
  misc_feature (1)..(25): SEQ ID NO: 340; WAN024F32; Start 68; Stop 92
ccatagttaaggttggtcatacaga

SEQ ID NO: 261450 - DNA, 25 bp, Artificial
  probe
  misc_feature (1)..(25): SEQ ID NO: 340; WAN024F32; Start 31; Stop 55
atcagtttgttcacatttaccttcg

SEQ ID NO: 261451 - DNA, 25 bp, Artificial
  probe
  misc_feature (1)..(25): SEQ ID NO: 340; WAN024F32; Start 282; Stop 306
aattgatagcagtgaagcaatgttg

SEQ ID NO: 261452 - DNA, 25 bp, Artificial
  probe
  misc_feature (1)..(25): SEQ ID NO: 340; WAN024F32; Start 27; Stop 51
cctaatcagtttgttcacatttacc

SEQ ID NO: 261453 - DNA, 25 bp, Artificial
  probe
  misc_feature (1)..(25): SEQ ID NO: 340; WAN024F32; Start 129; Stop 153
tttagttgacaaagatgccatgaaa

SEQ ID NO: 261454 - DNA, 25 bp, Artificial
  probe
  misc_feature (1)..(25): SEQ ID NO: 340; WAN024F32; Start 72; Stop 96
agttaaggttggtcatacagatgat

SEQ ID NO: 261455 - DNA, 25 bp, Artificial
  probe
  misc_feature (1)..(25): SEQ ID NO: 340; WAN024F32; Start 30; Stop 54
aatcagtttgttcacatttaccttc

SEQ ID NO: 261456 - DNA, 25 bp, Artificial
  probe
  misc_feature (1)..(25): SEQ ID NO: 340; WAN024F32; Start 71; Stop 95
tagttaaggttggtcatacagatga

SEQ ID NO: 261457 - DNA, 25 bp, Artificial
  probe
  misc_feature (1)..(25): SEQ ID NO: 340; WAN024F32; Start 73; Stop 97
gttaaggttggtcatacagatgatt

SEQ ID NO: 261458 - DNA, 25 bp, Artificial
  probe
  misc_feature (1)..(25): SEQ ID NO: 340; WAN024F32; Start 33; Stop 57
cagtttgttcacatttaccttcgat

SEQ ID NO: 261459 - DNA, 25 bp, Artificial
  probe
  misc_feature (1)..(25): SEQ ID NO: 340; WAN024F32; Start 65; Stop 89
atcccatagttaaggttggtcatac

SEQ ID NO: 261460 - DNA, 25 bp, Artificial
  probe
  misc_feature (1)..(25): SEQ ID NO: 340; WAN024F32; Start 28; Stop 52
ctaatcagtttgttcacatttacct

SEQ ID NO: 261461 - DNA, 25 bp, Artificial
  probe
  misc_feature (1)..(25): SEQ ID NO: 340; WAN024F32; Start 32; Stop 56
tcagtttgttcacatttaccttcga

SEQ ID NO: 261462 - DNA, 25 bp, Artificial
  probe
  misc_feature (1)..(25): SEQ ID NO: 340; WAN024F32; Start 67; Stop 91
cccatagttaaggttggtcatacag

SEQ ID NO: 261463 - DNA, 25 bp, Artificial
  probe
  misc_feature (1)..(25): SEQ ID NO: 340; WAN024F32; Start 66; Stop 90
tcccatagttaaggttggtcataca

SEQ ID NO: 261464 - DNA, 25 bp, Artificial
  probe
  misc_feature (1)..(25): SEQ ID NO: 340; WAN024F32; Start 63; Stop 87
atatcccatagttaaggttggtcat

SEQ ID NO: 261465 - DNA, 25 bp, Artificial
  probe
  misc_feature (1)..(25): SEQ ID NO: 340; WAN024F32; Start 34; Stop 58
agtttgttcacatttaccttcgata

SEQ ID NO: 261466 - DNA, 25 bp, Artificial
  probe
  misc_feature (1)..(25): SEQ ID NO: 340; WAN024F32; Start 77; Stop 101
aggttggtcatacagatgattatag

SEQ ID NO: 261467 - DNA, 25 bp, Artificial
  probe
  misc_feature (1)..(25): SEQ ID NO: 340; WAN024F32; Start 29; Stop 53
taatcagtttgttcacatttacctt

SEQ ID NO: 261468 - DNA, 25 bp, Artificial
  probe
  misc_feature (1)..(25): SEQ ID NO: 340; WAN024F32; Start 64; Stop 88
tatcccatagttaaggttggtcata

SEQ ID NO: 261469 - DNA, 25 bp, Artificial
  probe
  misc_feature (1)..(25): SEQ ID NO: 340; WAN024F32; Start 62; Stop 86
tatatcccatagttaaggttggtca

SEQ ID NO: 261470 - DNA, 25 bp, Artificial
  probe
  misc_feature (1)..(25): SEQ ID NO: 340; WAN024F32; Start 74; Stop 98
ttaaggttggtcatacagatgatta

SEQ ID NO: 261471 - DNA, 25 bp, Artificial
  probe
  misc_feature (1)..(25): SEQ ID NO: 340; WAN024F32; Start 128; Stop 152
ctttagttgacaaagatgccatgaa

SEQ ID NO: 261472 - DNA, 25 bp, Artificial
  probe
  misc_feature (1)..(25): SEQ ID NO: 340; WAN024F32; Start 35; Stop 59
gtttgttcacatttaccttcgatat

SEQ ID NO: 261473 - DNA, 25 bp, Artificial
  probe
  misc_feature (1)..(25): SEQ ID NO: 340; WAN024F32; Start 76; Stop 100
aaggttggtcatacagatgattata

SEQ ID NO: 261474 - DNA, 25 bp, Artificial
  probe
  misc_feature (1)..(25): SEQ ID NO: 340; WAN024F32; Start 75; Stop 99
taaggttggtcatacagatgattat

SEQ ID NO: 261475 - DNA, 25 bp, Artificial
  probe
  misc_feature (1)..(25): SEQ ID NO: 340; WAN024F32; Start 222; Stop 246
cgtaaatggtactgctattctttat

SEQ ID NO: 261476 - DNA, 25 bp, Artificial
  probe
  misc_feature (1)..(25): SEQ ID NO: 340; WAN024F32; Start 221; Stop 245
acgtaaatggtactgctattcttta

SEQ ID NO: 261477 - DNA, 25 bp, Artificial
  probe
  misc_feature (1)..(25): SEQ ID NO: 340; WAN024F32; Start 61; Stop 85
ttatatcccatagttaaggttggtc

SEQ ID NO: 261478 - DNA, 25 bp, Artificial
  probe
  misc_feature (1)..(25): SEQ ID NO: 340; WAN024F32; Start 281; Stop 305
caattgatagcagtgaagcaatgtt

SEQ ID NO: 261479 - DNA, 25 bp, Artificial
  probe
  misc_feature (1)..(25): SEQ ID NO: 340; WAN024F32; Start 130; Stop 154
ttagttgacaaagatgccatgaaaa

SEQ ID NO: 261480 - DNA, 25 bp, Artificial
  probe
  misc_feature (1)..(25): SEQ ID NO: 342; WAN024A35; Start 311; Stop 335
atttcgccattctttaatctcgttt

SEQ ID NO: 261481 - DNA, 25 bp, Artificial
  probe
  misc_feature (1)..(25): SEQ ID NO: 342; WAN024A35; Start 312; Stop 336
tttcgccattctttaatctcgttta

SEQ ID NO: 261482 - DNA, 25 bp, Artificial
  probe
  misc_feature (1)..(25): SEQ ID NO: 342; WAN024A35; Start 315; Stop 339
cgccattctttaatctcgtttaagt

SEQ ID NO: 261483 - DNA, 25 bp, Artificial
  probe
  misc_feature (1)..(25): SEQ ID NO: 342; WAN024A35; Start 314; Stop 338
tcgccattctttaatctcgtttaag

SEQ ID NO: 261484 - DNA, 25 bp, Artificial
  probe
  misc_feature (1)..(25): SEQ ID NO: 342; WAN024A35; Start 313; Stop 337
ttcgccattctttaatctcgtttaa

SEQ ID NO: 261485 - DNA, 25 bp, Artificial
  probe
  misc_feature (1)..(25): SEQ ID NO: 342; WAN024A35; Start 304; Stop 328
tcaagggatttcgccattctttaat

SEQ ID NO: 261486 - DNA, 25 bp, Artificial
  probe
  misc_feature (1)..(25): SEQ ID NO: 342; WAN024A35; Start 303; Stop 327
atcaagggatttcgccattctttaa

SEQ ID NO: 261487 - DNA, 25 bp, Artificial
  probe
  misc_feature (1)..(25): SEQ ID NO: 342; WAN024A35; Start 329; Stop 353
ctcgtttaagtgttgtatatggagc

SEQ ID NO: 261488 - DNA, 25 bp, Artificial
  probe
  misc_feature (1)..(25): SEQ ID NO: 342; WAN024A35; Start 316; Stop 340
gccattctttaatctcgtttaagtg

SEQ ID NO: 261489 - DNA, 25 bp, Artificial
  probe
  misc_feature (1)..(25): SEQ ID NO: 342; WAN024A35; Start 302; Stop 326
catcaagggatttcgccattcttta

SEQ ID NO: 261490 - DNA, 25 bp, Artificial
  probe
  misc_feature (1)..(25): SEQ ID NO: 342; WAN024A35; Start 327; Stop 351
atctcgtttaagtgttgtatatgga

SEQ ID NO: 261491 - DNA, 25 bp, Artificial
  probe
  misc_feature (1)..(25): SEQ ID NO: 342; WAN024A35; Start 24; Stop 48
attcatggtttgctctttgattctt

SEQ ID NO: 261492 - DNA, 25 bp, Artificial
  probe
  misc_feature (1)..(25): SEQ ID NO: 342; WAN024A35; Start 328; Stop 352
tctcgtttaagtgttgtatatggag

SEQ ID NO: 261493 - DNA, 25 bp, Artificial
  probe
  misc_feature (1)..(25): SEQ ID NO: 342; WAN024A35; Start 25; Stop 49
ttcatggtttgctctttgattctta

SEQ ID NO: 261494 - DNA, 25 bp, Artificial
  probe
  misc_feature (1)..(25): SEQ ID NO: 342; WAN024A35; Start 330; Stop 354
tcgtttaagtgttgtatatggagct

SEQ ID NO: 261495 - DNA, 25 bp, Artificial
  probe
  misc_feature (1)..(25): SEQ ID NO: 342; WAN024A35; Start 26; Stop 50
tcatggtttgctctttgattcttat

SEQ ID NO: 261496 - DNA, 25 bp, Artificial
  probe
  misc_feature (1)..(25): SEQ ID NO: 342; WAN024A35; Start 23; Stop 47
tattcatggtttgctctttgattct

SEQ ID NO: 261497 - DNA, 25 bp, Artificial
  probe
  misc_feature (1)..(25): SEQ ID NO: 342; WAN024A35; Start 27; Stop 51
catggtttgctctttgattcttatt

SEQ ID NO: 261498 - DNA, 25 bp, Artificial
  probe
  misc_feature (1)..(25): SEQ ID NO: 342; WAN024A35; Start 334; Stop 358
ttaagtgttgtatatggagctttgc

SEQ ID NO: 261499 - DNA, 25 bp, Artificial
  probe
  misc_feature (1)..(25): SEQ ID NO: 342; WAN024A35; Start 331; Stop 355
cgtttaagtgttgtatatggagctt

SEQ ID NO: 261500 - DNA, 25 bp, Artificial
  probe
  misc_feature (1)..(25): SEQ ID NO: 342; WAN024A35; Start 310; Stop 334
gatttcgccattctttaatctcgtt

SEQ ID NO: 261501 - DNA, 25 bp, Artificial
  probe
  misc_feature (1)..(25): SEQ ID NO: 342; WAN024A35; Start 306; Stop 330
aagggatttcgccattctttaatct

SEQ ID NO: 261502 - DNA, 25 bp, Artificial
  probe
  misc_feature (1)..(25): SEQ ID NO: 342; WAN024A35; Start 317; Stop 341
ccattctttaatctcgtttaagtgt

SEQ ID NO: 261503 - DNA, 25 bp, Artificial
  probe
  misc_feature (1)..(25): SEQ ID NO: 342; WAN024A35; Start 305; Stop 329
caagggatttcgccattctttaatc

SEQ ID NO: 261504 - DNA, 25 bp, Artificial
  probe
  misc_feature (1)..(25): SEQ ID NO: 342; WAN024A35; Start 307; Stop 331
agggatttcgccattctttaatctc

SEQ ID NO: 261505 - DNA, 25 bp, Artificial
  probe
  misc_feature (1)..(25): SEQ ID NO: 342; WAN024A35; Start 326; Stop 350
aatctcgtttaagtgttgtatatgg

SEQ ID NO: 261506 - DNA, 25 bp, Artificial
  probe
  misc_feature (1)..(25): SEQ ID NO: 342; WAN024A35; Start 22; Stop 46
atattcatggtttgctctttgattc

SEQ ID NO: 261507 - DNA, 25 bp, Artificial
  probe
  misc_feature (1)..(25): SEQ ID NO: 342; WAN024A35; Start 335; Stop 359
taagtgttgtatatggagctttgca

SEQ ID NO: 261508 - DNA, 25 bp, Artificial
  probe
  misc_feature (1)..(25): SEQ ID NO: 342; WAN024A35; Start 336; Stop 360
aagtgttgtatatggagctttgcat

SEQ ID NO: 261509 - DNA, 25 bp, Artificial
  probe
  misc_feature (1)..(25): SEQ ID NO: 342; WAN024A35; Start 320; Stop 344
ttctttaatctcgtttaagtgttgt

SEQ ID NO: 261510 - DNA, 25 bp, Artificial
  probe
  misc_feature (1)..(25): SEQ ID NO: 342; WAN024A35; Start 309; Stop 333
ggatttcgccattctttaatctcgt

SEQ ID NO: 261511 - DNA, 25 bp, Artificial
  probe
  misc_feature (1)..(25): SEQ ID NO: 342; WAN024A35; Start 337; Stop 361
agtgttgtatatggagctttgcata

SEQ ID NO: 261512 - DNA, 25 bp, Artificial
  probe
  misc_feature (1)..(25): SEQ ID NO: 342; WAN024A35; Start 21; Stop 45
aatattcatggtttgctctttgatt

SEQ ID NO: 261513 - DNA, 25 bp, Artificial
  probe
  misc_feature (1)..(25): SEQ ID NO: 343; WAN024AR5; Start 38; Stop 62
aacagatagaacattgcattcagaa

SEQ ID NO: 261514 - DNA, 25 bp, Artificial
  probe
  misc_feature (1)..(25): SEQ ID NO: 343; WAN024AR5; Start 39; Stop 63
acagatagaacattgcattcagaat

SEQ ID NO: 261515 - DNA, 25 bp, Artificial
  probe
  misc_feature (1)..(25): SEQ ID NO: 343; WAN024AR5; Start 37; Stop 61
taacagatagaacattgcattcaga

SEQ ID NO: 261516 - DNA, 25 bp, Artificial
  probe
  misc_feature (1)..(25): SEQ ID NO: 343; WAN024AR5; Start 36; Stop 60
ataacagatagaacattgcattcag

SEQ ID NO: 261517 - DNA, 25 bp, Artificial
  probe
  misc_feature (1)..(25): SEQ ID NO: 343; WAN024AR5; Start 40; Stop 64
cagatagaacattgcattcagaata

SEQ ID NO: 261518 - DNA, 25 bp, Artificial
  probe
  misc_feature (1)..(25): SEQ ID NO: 343; WAN024AR5; Start 103; Stop 127
gctaccataaaaggaggaaaacaaa

SEQ ID NO: 261519 - DNA, 25 bp, Artificial
  probe
  misc_feature (1)..(25): SEQ ID NO: 343; WAN024AR5; Start 102; Stop 126
tgctaccataaaaggaggaaaacaa

SEQ ID NO: 261520 - DNA, 25 bp, Artificial
  probe
  misc_feature (1)..(25): SEQ ID NO: 343; WAN024AR5; Start 101; Stop 125
atgctaccataaaaggaggaaaaca

SEQ ID NO: 261521 - DNA, 25 bp, Artificial
  probe
  misc_feature (1)..(25): SEQ ID NO: 343; WAN024AR5; Start 41; Stop 65
agatagaacattgcattcagaataa

SEQ ID NO: 261522 - DNA, 25 bp, Artificial
  probe
  misc_feature (1)..(25): SEQ ID NO: 343; WAN024AR5; Start 35; Stop 59
tataacagatagaacattgcattca

SEQ ID NO: 261523 - DNA, 25 bp, Artificial
  probe
  misc_feature (1)..(25): SEQ ID NO: 343; WAN024AR5; Start 45; Stop 69
agaacattgcattcagaataatgaa

SEQ ID NO: 261524 - DNA, 25 bp, Artificial
  probe
  misc_feature (1)..(25): SEQ ID NO: 343; WAN024AR5; Start 32; Stop 56
agatataacagatagaacattgcat

SEQ ID NO: 261525 - DNA, 25 bp, Artificial
  probe
  misc_feature (1)..(25): SEQ ID NO: 343; WAN024AR5; Start 104; Stop 128
ctaccataaaaggaggaaaacaaat

SEQ ID NO: 261526 - DNA, 25 bp, Artificial
  probe
  misc_feature (1)..(25): SEQ ID NO: 343; WAN024AR5; Start 44; Stop 68
tagaacattgcattcagaataatga

SEQ ID NO: 261527 - DNA, 25 bp, Artificial
  probe
  misc_feature (1)..(25): SEQ ID NO: 343; WAN024AR5; Start 100; Stop 124
tatgctaccataaaaggaggaaaac

SEQ ID NO: 261528 - DNA, 25 bp, Artificial
  probe
  misc_feature (1)..(25): SEQ ID NO: 343; WAN024AR5; Start 42; Stop 66
gatagaacattgcattcagaataat

SEQ ID NO: 261529 - DNA, 25 bp, Artificial
  probe
  misc_feature (1)..(25): SEQ ID NO: 343; WAN024AR5; Start 31; Stop 55
tagatataacagatagaacattgca

SEQ ID NO: 261530 - DNA, 25 bp, Artificial
  probe
  misc_feature (1)..(25): SEQ ID NO: 343; WAN024AR5; Start 33; Stop 57
gatataacagatagaacattgcatt

SEQ ID NO: 261531 - DNA, 25 bp, Artificial
  probe
  misc_feature (1)..(25): SEQ ID NO: 343; WAN024AR5; Start 34; Stop 58
atataacagatagaacattgcattc

SEQ ID NO: 261532 - DNA, 25 bp, Artificial
  probe
  misc_feature (1)..(25): SEQ ID NO: 343; WAN024AR5; Start 43; Stop 67
atagaacattgcattcagaataatg

SEQ ID NO: 261533 - DNA, 25 bp, Artificial
  probe
  misc_feature (1)..(25): SEQ ID NO: 343; WAN024AR5; Start 46; Stop 70
gaacattgcattcagaataatgaaa

SEQ ID NO: 261534 - DNA, 25 bp, Artificial
  probe
  misc_feature (1)..(25): SEQ ID NO: 343; WAN024AR5; Start 99; Stop 123
ttatgctaccataaaaggaggaaaa

SEQ ID NO: 261535 - DNA, 25 bp, Artificial
  probe
  misc_feature (1)..(25): SEQ ID NO: 343; WAN024AR5; Start 47; Stop 71
aacattgcattcagaataatgaaaa

SEQ ID NO: 261536 - DNA, 25 bp, Artificial
  probe
  misc_feature (1)..(25): SEQ ID NO: 344; WAN024A6H; Start 94; Stop 118
ttctttagacagagattctcagttt

SEQ ID NO: 261537 - DNA, 25 bp, Artificial
  probe
  misc_feature (1)..(25): SEQ ID NO: 344; WAN024A6H; Start 93; Stop 117
attctttagacagagattctcagtt

SEQ ID NO: 261538 - DNA, 25 bp, Artificial
  probe
  misc_feature (1)..(25): SEQ ID NO: 344; WAN024A6H; Start 92; Stop 116
aattctttagacagagattctcagt

SEQ ID NO: 261539 - DNA, 25 bp, Artificial
  probe
  misc_feature (1)..(25): SEQ ID NO: 344; WAN024A6H; Start 81; Stop 105
aagcatttgggaattctttagacag

SEQ ID NO: 261540 - DNA, 25 bp, Artificial
  probe
  misc_feature (1)..(25): SEQ ID NO: 344; WAN024A6H; Start 83; Stop 107
gcatttgggaattctttagacagag

SEQ ID NO: 261541 - DNA, 25 bp, Artificial
  probe
  misc_feature (1)..(25): SEQ ID NO: 344; WAN024A6H; Start 82; Stop 106
agcatttgggaattctttagacaga

SEQ ID NO: 261542 - DNA, 25 bp, Artificial
  probe
  misc_feature (1)..(25): SEQ ID NO: 344; WAN024A6H; Start 106; Stop 130
agattctcagttttagcggcaaatt

SEQ ID NO: 261543 - DNA, 25 bp, Artificial
  probe
  misc_feature (1)..(25): SEQ ID NO: 344; WAN024A6H; Start 84; Stop 108
catttgggaattctttagacagaga

SEQ ID NO: 261544 - DNA, 25 bp, Artificial
  probe
  misc_feature (1)..(25): SEQ ID NO: 344; WAN024A6H; Start 74; Stop 98
gactggaaagcatttgggaattctt

SEQ ID NO: 261545 - DNA, 25 bp, Artificial
  probe
  misc_feature (1)..(25): SEQ ID NO: 344; WAN024A6H; Start 86; Stop 110
tttgggaattctttagacagagatt

SEQ ID NO: 261546 - DNA, 25 bp, Artificial
  probe
  misc_feature (1)..(25): SEQ ID NO: 344; WAN024A6H; Start 99; Stop 123
tagacagagattctcagttttagcg

SEQ ID NO: 261547 - DNA, 25 bp, Artificial
  probe
  misc_feature (1)..(25): SEQ ID NO: 344; WAN024A6H; Start 85; Stop 109
atttgggaattctttagacagagat

SEQ ID NO: 261548 - DNA, 25 bp, Artificial
  probe
  misc_feature (1)..(25): SEQ ID NO: 344; WAN024A6H; Start 88; Stop 112
tgggaattctttagacagagattct

SEQ ID NO: 261549 - DNA, 25 bp, Artificial
  probe
  misc_feature (1)..(25): SEQ ID NO: 344; WAN024A6H; Start 107; Stop 131
gattctcagttttagcggcaaattt

SEQ ID NO: 261550 - DNA, 25 bp, Artificial
  probe
  misc_feature (1)..(25): SEQ ID NO: 344; WAN024A6H; Start 89; Stop 113
gggaattctttagacagagattctc

SEQ ID NO: 261551 - DNA, 25 bp, Artificial
  probe
  misc_feature (1)..(25): SEQ ID NO: 344; WAN024A6H; Start 78; Stop 102
ggaaagcatttgggaattctttaga

SEQ ID NO: 261552 - DNA, 25 bp, Artificial
  probe
  misc_feature (1)..(25): SEQ ID NO: 344; WAN024A6H; Start 77; Stop 101
tggaaagcatttgggaattctttag

SEQ ID NO: 261553 - DNA, 25 bp, Artificial
  probe
  misc_feature (1)..(25): SEQ ID NO: 344; WAN024A6H; Start 76; Stop 100
ctggaaagcatttgggaattcttta

SEQ ID NO: 261554 - DNA, 25 bp, Artificial
  probe
  misc_feature (1)..(25): SEQ ID NO: 344; WAN024A6H; Start 65; Stop 89
ctaaaacgggactggaaagcatttg

SEQ ID NO: 261555 - DNA, 25 bp, Artificial
  probe
  misc_feature (1)..(25): SEQ ID NO: 344; WAN024A6H; Start 98; Stop 122
ttagacagagattctcagttttagc

SEQ ID NO: 261556 - DNA, 25 bp, Artificial
  probe
  misc_feature (1)..(25): SEQ ID NO: 344; WAN024A6H; Start 80; Stop 104
aaagcatttgggaattctttagaca

SEQ ID NO: 261557 - DNA, 25 bp, Artificial
  probe
  misc_feature (1)..(25): SEQ ID NO: 344; WAN024A6H; Start 87; Stop 111
ttgggaattctttagacagagattc

SEQ ID NO: 261558 - DNA, 25 bp, Artificial
  probe
  misc_feature (1)..(25): SEQ ID NO: 344; WAN024A6H; Start 64; Stop 88
tctaaaacgggactggaaagcattt

SEQ ID NO: 261559 - DNA, 25 bp, Artificial
  probe
  misc_feature (1)..(25): SEQ ID NO: 344; WAN024A6H; Start 79; Stop 103
gaaagcatttgggaattctttagac

SEQ ID NO: 261560 - DNA, 25 bp, Artificial
  probe
  misc_feature (1)..(25): SEQ ID NO: 344; WAN024A6H; Start 105; Stop 129
gagattctcagttttagcggcaaat

SEQ ID NO: 261561 - DNA, 25 bp, Artificial
  probe
  misc_feature (1)..(25): SEQ ID NO: 344; WAN024A6H; Start 90; Stop 114
ggaattctttagacagagattctca

SEQ ID NO: 261562 - DNA, 25 bp, Artificial
  probe
  misc_feature (1)..(25): SEQ ID NO: 344; WAN024A6H; Start 63; Stop 87
ctctaaaacgggactggaaagcatt

SEQ ID NO: 261563 - DNA, 25 bp, Artificial
  probe
  misc_feature (1)..(25): SEQ ID NO: 344; WAN024A6H; Start 75; Stop 99
actggaaagcatttgggaattcttt

SEQ ID NO: 261564 - DNA, 25 bp, Artificial
  probe
  misc_feature (1)..(25): SEQ ID NO: 344; WAN024A6H; Start 100; Stop 124
agacagagattctcagttttagcgg

SEQ ID NO: 261565 - DNA, 25 bp, Artificial
  probe
  misc_feature (1)..(25): SEQ ID NO: 344; WAN024A6H; Start 95; Stop 119
tctttagacagagattctcagtttt

SEQ ID NO: 261566 - DNA, 25 bp, Artificial
  probe
  misc_feature (1)..(25): SEQ ID NO: 344; WAN024A6H; Start 104; Stop 128
agagattctcagttttagcggcaaa

SEQ ID NO: 261567 - DNA, 25 bp, Artificial
  probe
  misc_feature (1)..(25): SEQ ID NO: 344; WAN024A6H; Start 73; Stop 97
ggactggaaagcatttgggaattct

SEQ ID NO: 261568 - DNA, 25 bp, Artificial
  probe
  misc_feature (1)..(25): SEQ ID NO: 344; WAN024A6H; Start 59; Stop 83
gtcactctaaaacgggactggaaag

SEQ ID NO: 261569 - DNA, 25 bp, Artificial
  probe
  misc_feature (1)..(25): SEQ ID NO: 345; WAN024AEV; Start 1; Stop 25
accacttaacaactgatactgtatt

SEQ ID NO: 261570 - DNA, 25 bp, Artificial
  probe
  misc_feature (1)..(25): SEQ ID NO: 345; WAN024AEV; Start 2; Stop 26
ccacttaacaactgatactgtattc

SEQ ID NO: 261571 - DNA, 25 bp, Artificial
  probe
  misc_feature (1)..(25): SEQ ID NO: 345; WAN024AEV; Start 8; Stop 32
aacaactgatactgtattctaggaa

SEQ ID NO: 261572 - DNA, 25 bp, Artificial
  probe
  misc_feature (1)..(25): SEQ ID NO: 345; WAN024AEV; Start 106; Stop 130
ctcagcatggcaatcactttagaat

SEQ ID NO: 261573 - DNA, 25 bp, Artificial
  probe
  misc_feature (1)..(25): SEQ ID NO: 345; WAN024AEV; Start 3; Stop 27
cacttaacaactgatactgtattct

SEQ ID NO: 261574 - DNA, 25 bp, Artificial
  probe
  misc_feature (1)..(25): SEQ ID NO: 345; WAN024AEV; Start 96; Stop 120
ttaaatgagtctcagcatggcaatc

SEQ ID NO: 261575 - DNA, 25 bp, Artificial
  probe
  misc_feature (1)..(25): SEQ ID NO: 345; WAN024AEV; Start 7; Stop 31
taacaactgatactgtattctagga

SEQ ID NO: 261576 - DNA, 25 bp, Artificial
  probe
  misc_feature (1)..(25): SEQ ID NO: 345; WAN024AEV; Start 95; Stop 119
tttaaatgagtctcagcatggcaat

SEQ ID NO: 261577 - DNA, 25 bp, Artificial
  probe
  misc_feature (1)..(25): SEQ ID NO: 345; WAN024AEV; Start 32; Stop 56
aaacgatgacattcttcctaataaa

SEQ ID NO: 261578 - DNA, 25 bp, Artificial
  probe
  misc_feature (1)..(25): SEQ ID NO: 345; WAN024AEV; Start 105; Stop 129
tctcagcatggcaatcactttagaa

SEQ ID NO: 261579 - DNA, 25 bp, Artificial
  probe
  misc_feature (1)..(25): SEQ ID NO: 345; WAN024AEV; Start 97; Stop 121
taaatgagtctcagcatggcaatca

SEQ ID NO: 261580 - DNA, 25 bp, Artificial
  probe
  misc_feature (1)..(25): SEQ ID NO: 345; WAN024AEV; Start 9; Stop 33
acaactgatactgtattctaggaaa

SEQ ID NO: 261581 - DNA, 25 bp, Artificial
  probe
  misc_feature (1)..(25): SEQ ID NO: 345; WAN024AEV; Start 6; Stop 30
ttaacaactgatactgtattctagg

SEQ ID NO: 261582 - DNA, 25 bp, Artificial
  probe
  misc_feature (1)..(25): SEQ ID NO: 345; WAN024AEV; Start 104; Stop 128
gtctcagcatggcaatcactttaga

SEQ ID NO: 261583 - DNA, 25 bp, Artificial
  probe
  misc_feature (1)..(25): SEQ ID NO: 345; WAN024AEV; Start 24; Stop 48
ttctaggaaaacgatgacattcttc

SEQ ID NO: 261584 - DNA, 25 bp, Artificial
  probe
  misc_feature (1)..(25): SEQ ID NO: 345; WAN024AEV; Start 103; Stop 127
agtctcagcatggcaatcactttag

SEQ ID NO: 261585 - DNA, 25 bp, Artificial
  probe
  misc_feature (1)..(25): SEQ ID NO: 345; WAN024AEV; Start 102; Stop 126
gagtctcagcatggcaatcacttta

SEQ ID NO: 261586 - DNA, 25 bp, Artificial
  probe
  misc_feature (1)..(25): SEQ ID NO: 345; WAN024AEV; Start 18; Stop 42
actgtattctaggaaaacgatgaca

SEQ ID NO: 261587 - DNA, 25 bp, Artificial
  probe
  misc_feature (1)..(25): SEQ ID NO: 345; WAN024AEV; Start 23; Stop 47
attctaggaaaacgatgacattctt

SEQ ID NO: 261588 - DNA, 25 bp, Artificial
  probe
  misc_feature (1)..(25): SEQ ID NO: 345; WAN024AEV; Start 17; Stop 41
tactgtattctaggaaaacgatgac

SEQ ID NO: 261589 - DNA, 25 bp, Artificial
  probe
  misc_feature (1)..(25): SEQ ID NO: 345; WAN024AEV; Start 12; Stop 36
actgatactgtattctaggaaaacg

SEQ ID NO: 261590 - DNA, 25 bp, Artificial
  probe
  misc_feature (1)..(25): SEQ ID NO: 345; WAN024AEV; Start 19; Stop 43
ctgtattctaggaaaacgatgacat

SEQ ID NO: 261591 - DNA, 25 bp, Artificial
  probe
  misc_feature (1)..(25): SEQ ID NO: 345; WAN024AEV; Start 13; Stop 37
ctgatactgtattctaggaaaacga

SEQ ID NO: 261592 - DNA, 25 bp, Artificial
  probe
  misc_feature (1)..(25): SEQ ID NO: 345; WAN024AEV; Start 34; Stop 58
acgatgacattcttcctaataaaac

SEQ ID NO: 261593 - DNA, 25 bp, Artificial
  probe
  misc_feature (1)..(25): SEQ ID NO: 345; WAN024AEV; Start 21; Stop 45
gtattctaggaaaacgatgacattc

SEQ ID NO: 261594 - DNA, 25 bp, Artificial
  probe
  misc_feature (1)..(25): SEQ ID NO: 345; WAN024AEV; Start 100; Stop 124
atgagtctcagcatggcaatcactt

SEQ ID NO: 261595 - DNA, 25 bp, Artificial
  probe
  misc_feature (1)..(25): SEQ ID NO: 345; WAN024AEV; Start 99; Stop 123
aatgagtctcagcatggcaatcact

SEQ ID NO: 261596 - DNA, 25 bp, Artificial
  probe
  misc_feature (1)..(25): SEQ ID NO: 345; WAN024AEV; Start 22; Stop 46
tattctaggaaaacgatgacattct

SEQ ID NO: 261597 - DNA, 25 bp, Artificial
  probe
  misc_feature (1)..(25): SEQ ID NO: 345; WAN024AEV; Start 20; Stop 44
tgtattctaggaaaacgatgacatt

SEQ ID NO: 261598 - DNA, 25 bp, Artificial
  probe
  misc_feature (1)..(25): SEQ ID NO: 345; WAN024AEV; Start 92; Stop 116
aattttaaatgagtctcagcatggc

SEQ ID NO: 261599 - DNA, 25 bp, Artificial
  probe
  misc_feature (1)..(25): SEQ ID NO: 345; WAN024AEV; Start 35; Stop 59
cgatgacattcttcctaataaaact

SEQ ID NO: 261600 - DNA, 25 bp, Artificial
  probe
  misc_feature (1)..(25): SEQ ID NO: 345; WAN024AEV; Start 4; Stop 28
acttaacaactgatactgtattcta

SEQ ID NO: 261601 - DNA, 25 bp, Artificial
  probe
  misc_feature (1)..(25): SEQ ID NO: 345; WAN024AEV; Start 30; Stop 54
gaaaacgatgacattcttcctaata

SEQ ID NO: 261602 - DNA, 25 bp, Artificial
  probe
  misc_feature (1)..(25): SEQ ID NO: 346; WAN024ABE; Start 49; Stop 73
aaagaagtaaaggaggaaattccct

SEQ ID NO: 261603 - DNA, 25 bp, Artificial
  probe
  misc_feature (1)..(25): SEQ ID NO: 346; WAN024ABE; Start 44; Stop 68
actctaaagaagtaaaggaggaaat

SEQ ID NO: 261604 - DNA, 25 bp, Artificial
  probe
  misc_feature (1)..(25): SEQ ID NO: 346; WAN024ABE; Start 48; Stop 72
taaagaagtaaaggaggaaattccc

SEQ ID NO: 261605 - DNA, 25 bp, Artificial
  probe
  misc_feature (1)..(25): SEQ ID NO: 346; WAN024ABE; Start 46; Stop 70
tctaaagaagtaaaggaggaaattc

SEQ ID NO: 261606 - DNA, 25 bp, Artificial
  probe
  misc_feature (1)..(25): SEQ ID NO: 346; WAN024ABE; Start 45; Stop 69
ctctaaagaagtaaaggaggaaatt

SEQ ID NO: 261607 - DNA, 25 bp, Artificial
  probe
  misc_feature (1)..(25): SEQ ID NO: 346; WAN024ABE; Start 47; Stop 71
ctaaagaagtaaaggaggaaattcc

SEQ ID NO: 261608 - DNA, 25 bp, Artificial
  probe
  misc_feature (1)..(25): SEQ ID NO: 346; WAN024ABE; Start 43; Stop 67
tactctaaagaagtaaaggaggaaa

SEQ ID NO: 261609 - DNA, 25 bp, Artificial
  probe
  misc_feature (1)..(25): SEQ ID NO: 346; WAN024ABE; Start 42; Stop 66
ttactctaaagaagtaaaggaggaa

SEQ ID NO: 261610 - DNA, 25 bp, Artificial
  probe
  misc_feature (1)..(25): SEQ ID NO: 346; WAN024ABE; Start 41; Stop 65
attactctaaagaagtaaaggagga

SEQ ID NO: 261611 - DNA, 25 bp, Artificial
  probe
  misc_feature (1)..(25): SEQ ID NO: 346; WAN024ABE; Start 40; Stop 64
tattactctaaagaagtaaaggagg

SEQ ID NO: 261612 - DNA, 25 bp, Artificial
  probe
  misc_feature (1)..(25): SEQ ID NO: 347; WAN024AG4; Start 143; Stop 167
gttcacaacttataggaggtgtact

SEQ ID NO: 261613 - DNA, 25 bp, Artificial
  probe
  misc_feature (1)..(25): SEQ ID NO: 347; WAN024AG4; Start 34; Stop 58
tgaatgtggtaagtcaatggtatat

SEQ ID NO: 261614 - DNA, 25 bp, Artificial
  probe
  misc_feature (1)..(25): SEQ ID NO: 347; WAN024AG4; Start 18; Stop 42
aaataaagcggtttcttgaatgtgg

SEQ ID NO: 261615 - DNA, 25 bp, Artificial
  probe
  misc_feature (1)..(25): SEQ ID NO: 347; WAN024AG4; Start 20; Stop 44
ataaagcggtttcttgaatgtggta

SEQ ID NO: 261616 - DNA, 25 bp, Artificial
  probe
  misc_feature (1)..(25): SEQ ID NO: 347; WAN024AG4; Start 21; Stop 45
taaagcggtttcttgaatgtggtaa

SEQ ID NO: 261617 - DNA, 25 bp, Artificial
  probe
  misc_feature (1)..(25): SEQ ID NO: 347; WAN024AG4; Start 37; Stop 61
atgtggtaagtcaatggtatatagt

SEQ ID NO: 261618 - DNA, 25 bp, Artificial
  probe
  misc_feature (1)..(25): SEQ ID NO: 347; WAN024AG4; Start 19; Stop 43
aataaagcggtttcttgaatgtggt

SEQ ID NO: 261619 - DNA, 25 bp, Artificial
  probe
  misc_feature (1)..(25): SEQ ID NO: 347; WAN024AG4; Start 31; Stop 55
tcttgaatgtggtaagtcaatggta

SEQ ID NO: 261620 - DNA, 25 bp, Artificial
  probe
  misc_feature (1)..(25): SEQ ID NO: 347; WAN024AG4; Start 142; Stop 166
agttcacaacttataggaggtgtac

SEQ ID NO: 261621 - DNA, 25 bp, Artificial
  probe
  misc_feature (1)..(25): SEQ ID NO: 347; WAN024AG4; Start 30; Stop 54
ttcttgaatgtggtaagtcaatggt

SEQ ID NO: 261622 - DNA, 25 bp, Artificial
  probe
  misc_feature (1)..(25): SEQ ID NO: 347; WAN024AG4; Start 140; Stop 164
ttagttcacaacttataggaggtgt

SEQ ID NO: 261623 - DNA, 25 bp, Artificial
  probe
  misc_feature (1)..(25): SEQ ID NO: 347; WAN024AG4; Start 32; Stop 56
cttgaatgtggtaagtcaatggtat

SEQ ID NO: 261624 - DNA, 25 bp, Artificial
  probe
  misc_feature (1)..(25): SEQ ID NO: 347; WAN024AG4; Start 22; Stop 46
aaagcggtttcttgaatgtggtaag

SEQ ID NO: 261625 - DNA, 25 bp, Artificial
  probe
  misc_feature (1)..(25): SEQ ID NO: 347; WAN024AG4; Start 38; Stop 62
tgtggtaagtcaatggtatatagta

SEQ ID NO: 261626 - DNA, 25 bp, Artificial
  probe
  misc_feature (1)..(25): SEQ ID NO: 347; WAN024AG4; Start 141; Stop 165
tagttcacaacttataggaggtgta

SEQ ID NO: 261627 - DNA, 25 bp, Artificial
  probe
  misc_feature (1)..(25): SEQ ID NO: 347; WAN024AG4; Start 36; Stop 60
aatgtggtaagtcaatggtatatag

SEQ ID NO: 261628 - DNA, 25 bp, Artificial
  probe
  misc_feature (1)..(25): SEQ ID NO: 347; WAN024AG4; Start 35; Stop 59
gaatgtggtaagtcaatggtatata

SEQ ID NO: 261629 - DNA, 25 bp, Artificial
  probe
  misc_feature (1)..(25): SEQ ID NO: 347; WAN024AG4; Start 33; Stop 57
ttgaatgtggtaagtcaatggtata

SEQ ID NO: 261630 - DNA, 25 bp, Artificial
  probe
  misc_feature (1)..(25): SEQ ID NO: 347; WAN024AG4; Start 23; Stop 47
aagcggtttcttgaatgtggtaagt

SEQ ID NO: 261631 - DNA, 25 bp, Artificial
  probe
  misc_feature (1)..(25): SEQ ID NO: 347; WAN024AG4; Start 17; Stop 41
aaaataaagcggtttcttgaatgtg

SEQ ID NO: 261632 - DNA, 25 bp, Artificial
  probe
  misc_feature (1)..(25): SEQ ID NO: 347; WAN024AG4; Start 29; Stop 53
tttcttgaatgtggtaagtcaatgg

SEQ ID NO: 261633 - DNA, 25 bp, Artificial
  probe
  misc_feature (1)..(25): SEQ ID NO: 347; WAN024AG4; Start 27; Stop 51
ggtttcttgaatgtggtaagtcaat

SEQ ID NO: 261634 - DNA, 25 bp, Artificial
  probe
  misc_feature (1)..(25): SEQ ID NO: 347; WAN024AG4; Start 24; Stop 48
agcggtttcttgaatgtggtaagtc

SEQ ID NO: 261635 - DNA, 25 bp, Artificial
  probe
  misc_feature (1)..(25): SEQ ID NO: 347; WAN024AG4; Start 28; Stop 52
gtttcttgaatgtggtaagtcaatg

SEQ ID NO: 261636 - DNA, 25 bp, Artificial
  probe
  misc_feature (1)..(25): SEQ ID NO: 347; WAN024AG4; Start 39; Stop 63
gtggtaagtcaatggtatatagtat

SEQ ID NO: 261637 - DNA, 25 bp, Artificial
  probe
  misc_feature (1)..(25): SEQ ID NO: 347; WAN024AG4; Start 26; Stop 50
cggtttcttgaatgtggtaagtcaa

SEQ ID NO: 261638 - DNA, 25 bp, Artificial
  probe
  misc_feature (1)..(25): SEQ ID NO: 347; WAN024AG4; Start 139; Stop 163
tttagttcacaacttataggaggtg

SEQ ID NO: 261639 - DNA, 25 bp, Artificial
  probe
  misc_feature (1)..(25): SEQ ID NO: 347; WAN024AG4; Start 25; Stop 49
gcggtttcttgaatgtggtaagtca

SEQ ID NO: 261640 - DNA, 25 bp, Artificial
  probe
  misc_feature (1)..(25): SEQ ID NO: 347; WAN024AG4; Start 82; Stop 106
tgaaataggagatagattctactga

SEQ ID NO: 261641 - DNA, 25 bp, Artificial
  probe
  misc_feature (1)..(25): SEQ ID NO: 347; WAN024AG4; Start 81; Stop 105
atgaaataggagatagattctactg

SEQ ID NO: 261642 - DNA, 25 bp, Artificial
  probe
  misc_feature (1)..(25): SEQ ID NO: 347; WAN024AG4; Start 79; Stop 103
tgatgaaataggagatagattctac

SEQ ID NO: 261643 - DNA, 25 bp, Artificial
  probe
  misc_feature (1)..(25): SEQ ID NO: 347; WAN024AG4; Start 77; Stop 101
attgatgaaataggagatagattct

SEQ ID NO: 261644 - DNA, 25 bp, Artificial
  probe
  misc_feature (1)..(25): SEQ ID NO: 347; WAN024AG4; Start 83; Stop 107
gaaataggagatagattctactgat

SEQ ID NO: 261645 - DNA, 25 bp, Artificial
  probe
  misc_feature (1)..(25): SEQ ID NO: 348; WAN024ANX; Start 1; Stop 25
accatatttcagagaaagtcgctaa

SEQ ID NO: 261646 - DNA, 25 bp, Artificial
  probe
  misc_feature (1)..(25): SEQ ID NO: 348; WAN024ANX; Start 2; Stop 26
ccatatttcagagaaagtcgctaat

SEQ ID NO: 261647 - DNA, 25 bp, Artificial
  probe
  misc_feature (1)..(25): SEQ ID NO: 348; WAN024ANX; Start 5; Stop 29
tatttcagagaaagtcgctaatagc

SEQ ID NO: 261648 - DNA, 25 bp, Artificial
  probe
  misc_feature (1)..(25): SEQ ID NO: 348; WAN024ANX; Start 6; Stop 30
atttcagagaaagtcgctaatagct

SEQ ID NO: 261649 - DNA, 25 bp, Artificial
  probe
  misc_feature (1)..(25): SEQ ID NO: 348; WAN024ANX; Start 3; Stop 27
catatttcagagaaagtcgctaata

SEQ ID NO: 261650 - DNA, 25 bp, Artificial
  probe
  misc_feature (1)..(25): SEQ ID NO: 348; WAN024ANX; Start 27; Stop 51
agctatttcaattggttagggtata

SEQ ID NO: 261651 - DNA, 25 bp, Artificial
  probe
  misc_feature (1)..(25): SEQ ID NO: 348; WAN024ANX; Start 26; Stop 50
tagctatttcaattggttagggtat

SEQ ID NO: 261652 - DNA, 25 bp, Artificial
  probe
  misc_feature (1)..(25): SEQ ID NO: 348; WAN024ANX; Start 4; Stop 28
atatttcagagaaagtcgctaatag

SEQ ID NO: 261653 - DNA, 25 bp, Artificial
  probe
  misc_feature (1)..(25): SEQ ID NO: 348; WAN024ANX; Start 7; Stop 31
tttcagagaaagtcgctaatagcta

SEQ ID NO: 261654 - DNA, 25 bp, Artificial
  probe
  misc_feature (1)..(25): SEQ ID NO: 348; WAN024ANX; Start 28; Stop 52
gctatttcaattggttagggtatag

SEQ ID NO: 261655 - DNA, 25 bp, Artificial
  probe
  misc_feature (1)..(25): SEQ ID NO: 348; WAN024ANX; Start 31; Stop 55
atttcaattggttagggtatagttt

SEQ ID NO: 261656 - DNA, 25 bp, Artificial
  probe
  misc_feature (1)..(25): SEQ ID NO: 348; WAN024ANX; Start 29; Stop 53
ctatttcaattggttagggtatagt

SEQ ID NO: 261657 - DNA, 25 bp, Artificial
  probe
  misc_feature (1)..(25): SEQ ID NO: 348; WAN024ANX; Start 30; Stop 54
tatttcaattggttagggtatagtt

SEQ ID NO: 261658 - DNA, 25 bp, Artificial
  probe
  misc_feature (1)..(25): SEQ ID NO: 348; WAN024ANX; Start 37; Stop 61
attggttagggtatagttttacctt

SEQ ID NO: 261659 - DNA, 25 bp, Artificial
  probe
  misc_feature (1)..(25): SEQ ID NO: 348; WAN024ANX; Start 36; Stop 60
aattggttagggtatagttttacct

SEQ ID NO: 261660 - DNA, 25 bp, Artificial
  probe
  misc_feature (1)..(25): SEQ ID NO: 348; WAN024ANX; Start 38; Stop 62
ttggttagggtatagttttacctta

SEQ ID NO: 261661 - DNA, 25 bp, Artificial
  probe
  misc_feature (1)..(25): SEQ ID NO: 348; WAN024ANX; Start 32; Stop 56
tttcaattggttagggtatagtttt

SEQ ID NO: 261662 - DNA, 25 bp, Artificial
  probe
  misc_feature (1)..(25): SEQ ID NO: 348; WAN024ANX; Start 34; Stop 58
tcaattggttagggtatagttttac

SEQ ID NO: 261663 - DNA, 25 bp, Artificial
  probe
  misc_feature (1)..(25): SEQ ID NO: 348; WAN024ANX; Start 39; Stop 63
tggttagggtatagttttaccttat

SEQ ID NO: 261664 - DNA, 25 bp, Artificial
  probe
  misc_feature (1)..(25): SEQ ID NO: 348; WAN024ANX; Start 33; Stop 57
ttcaattggttagggtatagtttta

SEQ ID NO: 261665 - DNA, 25 bp, Artificial
  probe
  misc_feature (1)..(25): SEQ ID NO: 348; WAN024ANX; Start 35; Stop 59
caattggttagggtatagttttacc

SEQ ID NO: 261666 - DNA, 25 bp, Artificial
  probe
  misc_feature (1)..(25): SEQ ID NO: 348; WAN024ANX; Start 42; Stop 66
ttagggtatagttttaccttatagc

SEQ ID NO: 261667 - DNA, 25 bp, Artificial
  probe
  misc_feature (1)..(25): SEQ ID NO: 348; WAN024ANX; Start 40; Stop 64
ggttagggtatagttttaccttata

SEQ ID NO: 261668 - DNA, 25 bp, Artificial
  probe
  misc_feature (1)..(25): SEQ ID NO: 349; WAN024A3Y; Start 23; Stop 47
ctatgtatctggggatggtgatttt

SEQ ID NO: 261669 - DNA, 25 bp, Artificial
  probe
  misc_feature (1)..(25): SEQ ID NO: 349; WAN024A3Y; Start 22; Stop 46
actatgtatctggggatggtgattt

SEQ ID NO: 261670 - DNA, 25 bp, Artificial
  probe
  misc_feature (1)..(25): SEQ ID NO: 349; WAN024A3Y; Start 21; Stop 45
gactatgtatctggggatggtgatt

SEQ ID NO: 261671 - DNA, 25 bp, Artificial
  probe
  misc_feature (1)..(25): SEQ ID NO: 349; WAN024A3Y; Start 20; Stop 44
ggactatgtatctggggatggtgat

SEQ ID NO: 261672 - DNA, 25 bp, Artificial
  probe
  misc_feature (1)..(25): SEQ ID NO: 349; WAN024A3Y; Start 19; Stop 43
cggactatgtatctggggatggtga

SEQ ID NO: 261673 - DNA, 25 bp, Artificial
  probe
  misc_feature (1)..(25): SEQ ID NO: 349; WAN024A3Y; Start 17; Stop 41
gacggactatgtatctggggatggt

SEQ ID NO: 261674 - DNA, 25 bp, Artificial
  probe
  misc_feature (1)..(25): SEQ ID NO: 350; WAN024CN5; Start 183; Stop 207
ggtcactatgagtcgcctaactaat

SEQ ID NO: 261675 - DNA, 25 bp, Artificial
  probe
  misc_feature (1)..(25): SEQ ID NO: 350; WAN024CN5; Start 182; Stop 206
tggtcactatgagtcgcctaactaa

SEQ ID NO: 261676 - DNA, 25 bp, Artificial
  probe
  misc_feature (1)..(25): SEQ ID NO: 350; WAN024CN5; Start 39; Stop 63
gagtgcctttccaacttctaatagt

SEQ ID NO: 261677 - DNA, 25 bp, Artificial
  probe
  misc_feature (1)..(25): SEQ ID NO: 350; WAN024CN5; Start 40; Stop 64
agtgcctttccaacttctaatagta

SEQ ID NO: 261678 - DNA, 25 bp, Artificial
  probe
  misc_feature (1)..(25): SEQ ID NO: 350; WAN024CN5; Start 178; Stop 202
aatctggtcactatgagtcgcctaa

SEQ ID NO: 261679 - DNA, 25 bp, Artificial
  probe
  misc_feature (1)..(25): SEQ ID NO: 350; WAN024CN5; Start 181; Stop 205
ctggtcactatgagtcgcctaacta

SEQ ID NO: 261680 - DNA, 25 bp, Artificial
  probe
  misc_feature (1)..(25): SEQ ID NO: 350; WAN024CN5; Start 41; Stop 65
gtgcctttccaacttctaatagtat

SEQ ID NO: 261681 - DNA, 25 bp, Artificial
  probe
  misc_feature (1)..(25): SEQ ID NO: 350; WAN024CN5; Start 156; Stop 180
aatagtggttcagacaacgggaaat

SEQ ID NO: 261682 - DNA, 25 bp, Artificial
  probe
  misc_feature (1)..(25): SEQ ID NO: 350; WAN024CN5; Start 38; Stop 62
ggagtgcctttccaacttctaatag

SEQ ID NO: 261683 - DNA, 25 bp, Artificial
  probe
  misc_feature (1)..(25): SEQ ID NO: 350; WAN024CN5; Start 179; Stop 203
atctggtcactatgagtcgcctaac

SEQ ID NO: 261684 - DNA, 25 bp, Artificial
  probe
  misc_feature (1)..(25): SEQ ID NO: 350; WAN024CN5; Start 155; Stop 179
aaatagtggttcagacaacgggaaa

SEQ ID NO: 261685 - DNA, 25 bp, Artificial
  probe
  misc_feature (1)..(25): SEQ ID NO: 350; WAN024CN5; Start 6; Stop 30
ggatcatacccgtctttctagcaaa

SEQ ID NO: 261686 - DNA, 25 bp, Artificial
  probe
  misc_feature (1)..(25): SEQ ID NO: 350; WAN024CN5; Start 157; Stop 181
atagtggttcagacaacgggaaatc

SEQ ID NO: 261687 - DNA, 25 bp, Artificial
  probe
  misc_feature (1)..(25): SEQ ID NO: 350; WAN024CN5; Start 42; Stop 66
tgcctttccaacttctaatagtata

SEQ ID NO: 261688 - DNA, 25 bp, Artificial
  probe
  misc_feature (1)..(25): SEQ ID NO: 350; WAN024CN5; Start 177; Stop 201
aaatctggtcactatgagtcgccta

SEQ ID NO: 261689 - DNA, 25 bp, Artificial
  probe
  misc_feature (1)..(25): SEQ ID NO: 350; WAN024CN5; Start 7; Stop 31
gatcatacccgtctttctagcaaag

SEQ ID NO: 261690 - DNA, 25 bp, Artificial
  probe
  misc_feature (1)..(25): SEQ ID NO: 350; WAN024CN5; Start 170; Stop 194
caacgggaaatctggtcactatgag

SEQ ID NO: 261691 - DNA, 25 bp, Artificial
  probe
  misc_feature (1)..(25): SEQ ID NO: 350; WAN024CN5; Start 3; Stop 27
catggatcatacccgtctttctagc

SEQ ID NO: 261692 - DNA, 25 bp, Artificial
  probe
  misc_feature (1)..(25): SEQ ID NO: 350; WAN024CN5; Start 4; Stop 28
atggatcatacccgtctttctagca

SEQ ID NO: 261693 - DNA, 25 bp, Artificial
  probe
  misc_feature (1)..(25): SEQ ID NO: 350; WAN024CN5; Start 5; Stop 29
tggatcatacccgtctttctagcaa

SEQ ID NO: 261694 - DNA, 25 bp, Artificial
  probe
  misc_feature (1)..(25): SEQ ID NO: 350; WAN024CN5; Start 171; Stop 195
aacgggaaatctggtcactatgagt

SEQ ID NO: 261695 - DNA, 25 bp, Artificial
  probe
  misc_feature (1)..(25): SEQ ID NO: 350; WAN024CN5; Start 158; Stop 182
tagtggttcagacaacgggaaatct

SEQ ID NO: 261696 - DNA, 25 bp, Artificial
  probe
  misc_feature (1)..(25): SEQ ID NO: 350; WAN024CN5; Start 180; Stop 204
tctggtcactatgagtcgcctaact

SEQ ID NO: 261697 - DNA, 25 bp, Artificial
  probe
  misc_feature (1)..(25): SEQ ID NO: 350; WAN024CN5; Start 43; Stop 67
gcctttccaacttctaatagtataa

SEQ ID NO: 261698 - DNA, 25 bp, Artificial
  probe
  misc_feature (1)..(25): SEQ ID NO: 350; WAN024CN5; Start 168; Stop 192
gacaacgggaaatctggtcactatg

SEQ ID NO: 261699 - DNA, 25 bp, Artificial
  probe
  misc_feature (1)..(25): SEQ ID NO: 350; WAN024CN5; Start 167; Stop 191
agacaacgggaaatctggtcactat

SEQ ID NO: 261700 - DNA, 25 bp, Artificial
  probe
  misc_feature (1)..(25): SEQ ID NO: 350; WAN024CN5; Start 169; Stop 193
acaacgggaaatctggtcactatga

SEQ ID NO: 261701 - DNA, 25 bp, Artificial
  probe
  misc_feature (1)..(25): SEQ ID NO: 350; WAN024CN5; Start 172; Stop 196
acgggaaatctggtcactatgagtc

SEQ ID NO: 261702 - DNA, 25 bp, Artificial
  probe
  misc_feature (1)..(25): SEQ ID NO: 350; WAN024CN5; Start 101; Stop 125
ttctaaaagctattgaacaatggcg

SEQ ID NO: 261703 - DNA, 25 bp, Artificial
  probe
  misc_feature (1)..(25): SEQ ID NO: 350; WAN024CN5; Start 91; Stop 115
catgacggttttctaaaagctattg

SEQ ID NO: 261704 - DNA, 25 bp, Artificial
  probe
  misc_feature (1)..(25): SEQ ID NO: 350; WAN024CN5; Start 92; Stop 116
atgacggttttctaaaagctattga

SEQ ID NO: 261705 - DNA, 25 bp, Artificial
  probe
  misc_feature (1)..(25): SEQ ID NO: 350; WAN024CN5; Start 95; Stop 119
acggttttctaaaagctattgaaca

SEQ ID NO: 261706 - DNA, 25 bp, Artificial
  probe
  misc_feature (1)..(25): SEQ ID NO: 350; WAN024CN5; Start 93; Stop 117
tgacggttttctaaaagctattgaa

SEQ ID NO: 261707 - DNA, 25 bp, Artificial
  probe
  misc_feature (1)..(25): SEQ ID NO: 351; WAN024CTY-3; Start 188; Stop 212
accgaagtcttatgtgattgagtat

SEQ ID NO: 261708 - DNA, 25 bp, Artificial
  probe
  misc_feature (1)..(25): SEQ ID NO: 351; WAN024CTY-3; Start 1176; Stop 1200
aatggtaagattgtagaacggactg

SEQ ID NO: 261709 - DNA, 25 bp, Artificial
  probe
  misc_feature (1)..(25): SEQ ID NO: 351; WAN024CTY-3; Start 1669; Stop 1693
ctgtggtagatagtggagaagatag

SEQ ID NO: 261710 - DNA, 25 bp, Artificial
  probe
  misc_feature (1)..(25): SEQ ID NO: 351; WAN024CTY-3; Start 1670; Stop 1694
tgtggtagatagtggagaagatagc

SEQ ID NO: 261711 - DNA, 25 bp, Artificial
  probe
  misc_feature (1)..(25): SEQ ID NO: 351; WAN024CTY-3; Start 189; Stop 213
ccgaagtcttatgtgattgagtatt

SEQ ID NO: 261712 - DNA, 25 bp, Artificial
  probe
  misc_feature (1)..(25): SEQ ID NO: 351; WAN024CTY-3; Start 1177; Stop 1201
atggtaagattgtagaacggactgt

SEQ ID NO: 261713 - DNA, 25 bp, Artificial
  probe
  misc_feature (1)..(25): SEQ ID NO: 351; WAN024CTY-3; Start 1668; Stop 1692
actgtggtagatagtggagaagata

SEQ ID NO: 261714 - DNA, 25 bp, Artificial
  probe
  misc_feature (1)..(25): SEQ ID NO: 351; WAN024CTY-3; Start 1667; Stop 1691
aactgtggtagatagtggagaagat

SEQ ID NO: 261715 - DNA, 25 bp, Artificial
  probe
  misc_feature (1)..(25): SEQ ID NO: 351; WAN024CTY-3; Start 1664; Stop 1688
ttcaactgtggtagatagtggagaa

SEQ ID NO: 261716 - DNA, 25 bp, Artificial
  probe
  misc_feature (1)..(25): SEQ ID NO: 351; WAN024CTY-3; Start 1666; Stop 1690
caactgtggtagatagtggagaaga

SEQ ID NO: 261717 - DNA, 25 bp, Artificial
  probe
  misc_feature (1)..(25): SEQ ID NO: 351; WAN024CTY-3; Start 1665; Stop 1689
tcaactgtggtagatagtggagaag

SEQ ID NO: 261718 - DNA, 25 bp, Artificial
  probe
  misc_feature (1)..(25): SEQ ID NO: 351; WAN024CTY-3; Start 1663; Stop 1687
cttcaactgtggtagatagtggaga

SEQ ID NO: 261719 - DNA, 25 bp, Artificial
  probe
  misc_feature (1)..(25): SEQ ID NO: 351; WAN024CTY-3; Start 1178; Stop 1202
tggtaagattgtagaacggactgtt

SEQ ID NO: 261720 - DNA, 25 bp, Artificial
  probe
  misc_feature (1)..(25): SEQ ID NO: 351; WAN024CTY-3; Start 207; Stop 231
gagtattatgttggtaagactgtcc

SEQ ID NO: 261721 - DNA, 25 bp, Artificial
  probe
  misc_feature (1)..(25): SEQ ID NO: 351; WAN024CTY-3; Start 32; Stop 56
ttcctacaataaccaaccagccaat

SEQ ID NO: 261722 - DNA, 25 bp, Artificial
  probe
  misc_feature (1)..(25): SEQ ID NO: 351; WAN024CTY-3; Start 669; Stop 693
aatggcgacatcttaggagaatacc

SEQ ID NO: 261723 - DNA, 25 bp, Artificial
  probe
  misc_feature (1)..(25): SEQ ID NO: 351; WAN024CTY-3; Start 206; Stop 230
tgagtattatgttggtaagactgtc

SEQ ID NO: 261724 - DNA, 25 bp, Artificial
  probe
  misc_feature (1)..(25): SEQ ID NO: 351; WAN024CTY-3; Start 33; Stop 57
tcctacaataaccaaccagccaatc

SEQ ID NO: 261725 - DNA, 25 bp, Artificial
  probe
  misc_feature (1)..(25): SEQ ID NO: 351; WAN024CTY-3; Start 205; Stop 229
ttgagtattatgttggtaagactgt

SEQ ID NO: 261726 - DNA, 25 bp, Artificial
  probe
  misc_feature (1)..(25): SEQ ID NO: 351; WAN024CTY-3; Start 1656; Stop 1680
caagtagcttcaactgtggtagata

SEQ ID NO: 261727 - DNA, 25 bp, Artificial
  probe
  misc_feature (1)..(25): SEQ ID NO: 351; WAN024CTY-3; Start 1657; Stop 1681
aagtagcttcaactgtggtagatag

SEQ ID NO: 261728 - DNA, 25 bp, Artificial
  probe
  misc_feature (1)..(25): SEQ ID NO: 351; WAN024CTY-3; Start 1302; Stop 1326
tactattcaaactaccaagcctacg

SEQ ID NO: 261729 - DNA, 25 bp, Artificial
  probe
  misc_feature (1)..(25): SEQ ID NO: 351; WAN024CTY-3; Start 1175; Stop 1199
aaatggtaagattgtagaacggact

SEQ ID NO: 261730 - DNA, 25 bp, Artificial
  probe
  misc_feature (1)..(25): SEQ ID NO: 351; WAN024CTY-3; Start 27; Stop 51
ctcatttcctacaataaccaaccag

SEQ ID NO: 261731 - DNA, 25 bp, Artificial
  probe
  misc_feature (1)..(25): SEQ ID NO: 351; WAN024CTY-3; Start 1300; Stop 1324
cctactattcaaactaccaagccta

SEQ ID NO: 261732 - DNA, 25 bp, Artificial
  probe
  misc_feature (1)..(25): SEQ ID NO: 351; WAN024CTY-3; Start 1659; Stop 1683
gtagcttcaactgtggtagatagtg

SEQ ID NO: 261733 - DNA, 25 bp, Artificial
  probe
  misc_feature (1)..(25): SEQ ID NO: 351; WAN024CTY-3; Start 1658; Stop 1682
agtagcttcaactgtggtagatagt

SEQ ID NO: 261734 - DNA, 25 bp, Artificial
  probe
  misc_feature (1)..(25): SEQ ID NO: 351; WAN024CTY-3; Start 274; Stop 298
atgtctttaatgattctgccaactg

SEQ ID NO: 261735 - DNA, 25 bp, Artificial
  probe
  misc_feature (1)..(25): SEQ ID NO: 351; WAN024CTY-3; Start 1653; Stop 1677
aatcaagtagcttcaactgtggtag

SEQ ID NO: 261736 - DNA, 25 bp, Artificial
  probe
  misc_feature (1)..(25): SEQ ID NO: 351; WAN024CTY-3; Start 1652; Stop 1676
caatcaagtagcttcaactgtggta

SEQ ID NO: 261737 - DNA, 25 bp, Artificial
  probe
  misc_feature (1)..(25): SEQ ID NO: 351; WAN024CTY-3; Start 1732; Stop 1756
aacaagtcaaggaataccgtatcca

SEQ ID NO: 261738 - DNA, 25 bp, Artificial
  probe
  misc_feature (1)..(25): SEQ ID NO: 351; WAN024CTY-3; Start 1027; Stop 1051
cttcagcaaccaatgatattgacaa

SEQ ID NO: 261739 - DNA, 25 bp, Artificial
  probe
  misc_feature (1)..(25): SEQ ID NO: 351; WAN024CTY-3; Start 1662; Stop 1686
gcttcaactgtggtagatagtggag

SEQ ID NO: 261740 - DNA, 25 bp, Artificial
  probe
  misc_feature (1)..(25): SEQ ID NO: 352; WAN024AM4; Start 25; Stop 49
tggattggcttgggtatcattatag

SEQ ID NO: 261741 - DNA, 25 bp, Artificial
  probe
  misc_feature (1)..(25): SEQ ID NO: 352; WAN024AM4; Start 24; Stop 48
ctggattggcttgggtatcattata

SEQ ID NO: 261742 - DNA, 25 bp, Artificial
  probe
  misc_feature (1)..(25): SEQ ID NO: 352; WAN024AM4; Start 23; Stop 47
tctggattggcttgggtatcattat

SEQ ID NO: 261743 - DNA, 25 bp, Artificial
  probe
  misc_feature (1)..(25): SEQ ID NO: 352; WAN024AM4; Start 22; Stop 46
ctctggattggcttgggtatcatta

SEQ ID NO: 261744 - DNA, 25 bp, Artificial
  probe
  misc_feature (1)..(25): SEQ ID NO: 352; WAN024AM4; Start 68; Stop 92
cgtcttctgcttaccttttcataat

SEQ ID NO: 261745 - DNA, 25 bp, Artificial
  probe
  misc_feature (1)..(25): SEQ ID NO: 352; WAN024AM4; Start 26; Stop 50
ggattggcttgggtatcattatagc

SEQ ID NO: 261746 - DNA, 25 bp, Artificial
  probe
  misc_feature (1)..(25): SEQ ID NO: 352; WAN024AM4; Start 67; Stop 91
ccgtcttctgcttaccttttcataa

SEQ ID NO: 261747 - DNA, 25 bp, Artificial
  probe
  misc_feature (1)..(25): SEQ ID NO: 352; WAN024AM4; Start 28; Stop 52
attggcttgggtatcattatagctt

SEQ ID NO: 261748 - DNA, 25 bp, Artificial
  probe
  misc_feature (1)..(25): SEQ ID NO: 352; WAN024AM4; Start 27; Stop 51
gattggcttgggtatcattatagct

SEQ ID NO: 261749 - DNA, 25 bp, Artificial
  probe
  misc_feature (1)..(25): SEQ ID NO: 352; WAN024AM4; Start 31; Stop 55
ggcttgggtatcattatagcttgaa

SEQ ID NO: 261750 - DNA, 25 bp, Artificial
  probe
  misc_feature (1)..(25): SEQ ID NO: 352; WAN024AM4; Start 66; Stop 90
accgtcttctgcttaccttttcata

SEQ ID NO: 261751 - DNA, 25 bp, Artificial
  probe
  misc_feature (1)..(25): SEQ ID NO: 352; WAN024AM4; Start 32; Stop 56
gcttgggtatcattatagcttgaaa

SEQ ID NO: 261752 - DNA, 25 bp, Artificial
  probe
  misc_feature (1)..(25): SEQ ID NO: 352; WAN024AM4; Start 29; Stop 53
ttggcttgggtatcattatagcttg

SEQ ID NO: 261753 - DNA, 25 bp, Artificial
  probe
  misc_feature (1)..(25): SEQ ID NO: 352; WAN024AM4; Start 30; Stop 54
tggcttgggtatcattatagcttga

SEQ ID NO: 261754 - DNA, 25 bp, Artificial
  probe
  misc_feature (1)..(25): SEQ ID NO: 352; WAN024AM4; Start 69; Stop 93
gtcttctgcttaccttttcataatt

SEQ ID NO: 261755 - DNA, 25 bp, Artificial
  probe
  misc_feature (1)..(25): SEQ ID NO: 352; WAN024AM4; Start 21; Stop 45
cctctggattggcttgggtatcatt

SEQ ID NO: 261756 - DNA, 25 bp, Artificial
  probe
  misc_feature (1)..(25): SEQ ID NO: 352; WAN024AM4; Start 8; Stop 32
tctcaaagaaaagcctctggattgg

SEQ ID NO: 261757 - DNA, 25 bp, Artificial
  probe
  misc_feature (1)..(25): SEQ ID NO: 352; WAN024AM4; Start 65; Stop 89
caccgtcttctgcttaccttttcat

SEQ ID NO: 261758 - DNA, 25 bp, Artificial
  probe
  misc_feature (1)..(25): SEQ ID NO: 352; WAN024AM4; Start 70; Stop 94
tcttctgcttaccttttcataattt

SEQ ID NO: 261759 - DNA, 25 bp, Artificial
  probe
  misc_feature (1)..(25): SEQ ID NO: 352; WAN024AM4; Start 6; Stop 30
attctcaaagaaaagcctctggatt

SEQ ID NO: 261760 - DNA, 25 bp, Artificial
  probe
  misc_feature (1)..(25): SEQ ID NO: 352; WAN024AM4; Start 5; Stop 29
gattctcaaagaaaagcctctggat

SEQ ID NO: 261761 - DNA, 25 bp, Artificial
  probe
  misc_feature (1)..(25): SEQ ID NO: 352; WAN024AM4; Start 7; Stop 31
ttctcaaagaaaagcctctggattg

SEQ ID NO: 261762 - DNA, 25 bp, Artificial
  probe
  misc_feature (1)..(25): SEQ ID NO: 352; WAN024AM4; Start 33; Stop 57
cttgggtatcattatagcttgaaaa

SEQ ID NO: 261763 - DNA, 25 bp, Artificial
  probe
  misc_feature (1)..(25): SEQ ID NO: 352; WAN024AM4; Start 4; Stop 28
cgattctcaaagaaaagcctctgga

SEQ ID NO: 261764 - DNA, 25 bp, Artificial
  probe
  misc_feature (1)..(25): SEQ ID NO: 352; WAN024AM4; Start 3; Stop 27
ccgattctcaaagaaaagcctctgg

SEQ ID NO: 261765 - DNA, 25 bp, Artificial
  probe
  misc_feature (1)..(25): SEQ ID NO: 352; WAN024AM4; Start 2; Stop 26
cccgattctcaaagaaaagcctctg

SEQ ID NO: 261766 - DNA, 25 bp, Artificial
  probe
  misc_feature (1)..(25): SEQ ID NO: 352; WAN024AM4; Start 1; Stop 25
acccgattctcaaagaaaagcctct

SEQ ID NO: 261767 - DNA, 25 bp, Artificial
  probe
  misc_feature (1)..(25): SEQ ID NO: 352; WAN024AM4; Start 9; Stop 33
ctcaaagaaaagcctctggattggc

SEQ ID NO: 261768 - DNA, 25 bp, Artificial
  probe
  misc_feature (1)..(25): SEQ ID NO: 353; WAN0249EW; Start 52; Stop 76
tccctacaaataccatatcctttca

SEQ ID NO: 261769 - DNA, 25 bp, Artificial
  probe
  misc_feature (1)..(25): SEQ ID NO: 353; WAN0249EW; Start 15; Stop 39
gttaatactgacttcctgtaagaac

SEQ ID NO: 261770 - DNA, 25 bp, Artificial
  probe
  misc_feature (1)..(25): SEQ ID NO: 353; WAN0249EW; Start 16; Stop 40
ttaatactgacttcctgtaagaact

SEQ ID NO: 261771 - DNA, 25 bp, Artificial
  probe
  misc_feature (1)..(25): SEQ ID NO: 353; WAN0249EW; Start 53; Stop 77
ccctacaaataccatatcctttcag

SEQ ID NO: 261772 - DNA, 25 bp, Artificial
  probe
  misc_feature (1)..(25): SEQ ID NO: 353; WAN0249EW; Start 14; Stop 38
agttaatactgacttcctgtaagaa

SEQ ID NO: 261773 - DNA, 25 bp, Artificial
  probe
  misc_feature (1)..(25): SEQ ID NO: 353; WAN0249EW; Start 54; Stop 78
cctacaaataccatatcctttcagt

SEQ ID NO: 261774 - DNA, 25 bp, Artificial
  probe
  misc_feature (1)..(25): SEQ ID NO: 353; WAN0249EW; Start 51; Stop 75
ttccctacaaataccatatcctttc

SEQ ID NO: 261775 - DNA, 25 bp, Artificial
  probe
  misc_feature (1)..(25): SEQ ID NO: 353; WAN0249EW; Start 115; Stop 139
ataactctgtaatctctagccggat

SEQ ID NO: 261776 - DNA, 25 bp, Artificial
  probe
  misc_feature (1)..(25): SEQ ID NO: 353; WAN0249EW; Start 114; Stop 138
aataactctgtaatctctagccgga

SEQ ID NO: 261777 - DNA, 25 bp, Artificial
  probe
  misc_feature (1)..(25): SEQ ID NO: 353; WAN0249EW; Start 50; Stop 74
attccctacaaataccatatccttt

SEQ ID NO: 261778 - DNA, 25 bp, Artificial
  probe
  misc_feature (1)..(25): SEQ ID NO: 353; WAN0249EW; Start 13; Stop 37
tagttaatactgacttcctgtaaga

SEQ ID NO: 261779 - DNA, 25 bp, Artificial
  probe
  misc_feature (1)..(25): SEQ ID NO: 353; WAN0249EW; Start 57; Stop 81
acaaataccatatcctttcagtaga

SEQ ID NO: 261780 - DNA, 25 bp, Artificial
  probe
  misc_feature (1)..(25): SEQ ID NO: 353; WAN0249EW; Start 12; Stop 36
ctagttaatactgacttcctgtaag

SEQ ID NO: 261781 - DNA, 25 bp, Artificial
  probe
  misc_feature (1)..(25): SEQ ID NO: 353; WAN0249EW; Start 116; Stop 140
taactctgtaatctctagccggatt

SEQ ID NO: 261782 - DNA, 25 bp, Artificial
  probe
  misc_feature (1)..(25): SEQ ID NO: 353; WAN0249EW; Start 88; Stop 112
acccttgtaggaagtttagattaaa

SEQ ID NO: 261783 - DNA, 25 bp, Artificial
  probe
  misc_feature (1)..(25): SEQ ID NO: 353; WAN0249EW; Start 49; Stop 73
tattccctacaaataccatatcctt

SEQ ID NO: 261784 - DNA, 25 bp, Artificial
  probe
  misc_feature (1)..(25): SEQ ID NO: 353; WAN0249EW; Start 113; Stop 137
aaataactctgtaatctctagccgg

SEQ ID NO: 261785 - DNA, 25 bp, Artificial
  probe
  misc_feature (1)..(25): SEQ ID NO: 353; WAN0249EW; Start 70; Stop 94
cctttcagtagataatatacccttg

SEQ ID NO: 261786 - DNA, 25 bp, Artificial
  probe
  misc_feature (1)..(25): SEQ ID NO: 353; WAN0249EW; Start 69; Stop 93
tcctttcagtagataatataccctt

SEQ ID NO: 261787 - DNA, 25 bp, Artificial
  probe
  misc_feature (1)..(25): SEQ ID NO: 353; WAN0249EW; Start 112; Stop 136
aaaataactctgtaatctctagccg

SEQ ID NO: 261788 - DNA, 25 bp, Artificial
  probe
  misc_feature (1)..(25): SEQ ID NO: 353; WAN0249EW; Start 58; Stop 82
caaataccatatcctttcagtagat

SEQ ID NO: 261789 - DNA, 25 bp, Artificial
  probe
  misc_feature (1)..(25): SEQ ID NO: 353; WAN0249EW; Start 87; Stop 111
tacccttgtaggaagtttagattaa

SEQ ID NO: 261790 - DNA, 25 bp, Artificial
  probe
  misc_feature (1)..(25): SEQ ID NO: 353; WAN0249EW; Start 68; Stop 92
atcctttcagtagataatataccct

SEQ ID NO: 261791 - DNA, 25 bp, Artificial
  probe
  misc_feature (1)..(25): SEQ ID NO: 353; WAN0249EW; Start 86; Stop 110
atacccttgtaggaagtttagatta

SEQ ID NO: 261792 - DNA, 25 bp, Artificial
  probe
  misc_feature (1)..(25): SEQ ID NO: 353; WAN0249EW; Start 85; Stop 109
tatacccttgtaggaagtttagatt

SEQ ID NO: 261793 - DNA, 25 bp, Artificial
  probe
  misc_feature (1)..(25): SEQ ID NO: 353; WAN0249EW; Start 83; Stop 107
aatatacccttgtaggaagtttaga

SEQ ID NO: 261794 - DNA, 25 bp, Artificial
  probe
  misc_feature (1)..(25): SEQ ID NO: 353; WAN0249EW; Start 56; Stop 80
tacaaataccatatcctttcagtag

SEQ ID NO: 261795 - DNA, 25 bp, Artificial
  probe
  misc_feature (1)..(25): SEQ ID NO: 353; WAN0249EW; Start 55; Stop 79
ctacaaataccatatcctttcagta

SEQ ID NO: 261796 - DNA, 25 bp, Artificial
  probe
  misc_feature (1)..(25): SEQ ID NO: 353; WAN0249EW; Start 122; Stop 146
tgtaatctctagccggatttatagc

SEQ ID NO: 261797 - DNA, 25 bp, Artificial
  probe
  misc_feature (1)..(25): SEQ ID NO: 353; WAN0249EW; Start 119; Stop 143
ctctgtaatctctagccggatttat

SEQ ID NO: 261798 - DNA, 25 bp, Artificial
  probe
  misc_feature (1)..(25): SEQ ID NO: 353; WAN0249EW; Start 84; Stop 108
atatacccttgtaggaagtttagat

SEQ ID NO: 261799 - DNA, 25 bp, Artificial
  probe
  misc_feature (1)..(25): SEQ ID NO: 353; WAN0249EW; Start 79; Stop 103
agataatatacccttgtaggaagtt

SEQ ID NO: 261800 - DNA, 25 bp, Artificial
  probe
  misc_feature (1)..(25): SEQ ID NO: 353; WAN0249EW; Start 75; Stop 99
cagtagataatatacccttgtagga

SEQ ID NO: 261801 - DNA, 25 bp, Artificial
  probe
  misc_feature (1)..(25): SEQ ID NO: 354; WAN024A3D; Start 71; Stop 95
ttatttctaaactcggggttcaaga

SEQ ID NO: 261802 - DNA, 25 bp, Artificial
  probe
  misc_feature (1)..(25): SEQ ID NO: 354; WAN024A3D; Start 69; Stop 93
tcttatttctaaactcggggttcaa

SEQ ID NO: 261803 - DNA, 25 bp, Artificial
  probe
  misc_feature (1)..(25): SEQ ID NO: 354; WAN024A3D; Start 68; Stop 92
ttcttatttctaaactcggggttca

SEQ ID NO: 261804 - DNA, 25 bp, Artificial
  probe
  misc_feature (1)..(25): SEQ ID NO: 354; WAN024A3D; Start 72; Stop 96
tatttctaaactcggggttcaagat

SEQ ID NO: 261805 - DNA, 25 bp, Artificial
  probe
  misc_feature (1)..(25): SEQ ID NO: 354; WAN024A3D; Start 70; Stop 94
cttatttctaaactcggggttcaag

SEQ ID NO: 261806 - DNA, 25 bp, Artificial
  probe
  misc_feature (1)..(25): SEQ ID NO: 354; WAN024A3D; Start 67; Stop 91
tttcttatttctaaactcggggttc

SEQ ID NO: 261807 - DNA, 25 bp, Artificial
  probe
  misc_feature (1)..(25): SEQ ID NO: 354; WAN024A3D; Start 65; Stop 89
attttcttatttctaaactcggggt

SEQ ID NO: 261808 - DNA, 25 bp, Artificial
  probe
  misc_feature (1)..(25): SEQ ID NO: 354; WAN024A3D; Start 66; Stop 90
ttttcttatttctaaactcggggtt

SEQ ID NO: 261809 - DNA, 25 bp, Artificial
  probe
  misc_feature (1)..(25): SEQ ID NO: 354; WAN024A3D; Start 64; Stop 88
cattttcttatttctaaactcgggg

SEQ ID NO: 261810 - DNA, 25 bp, Artificial
  probe
  misc_feature (1)..(25): SEQ ID NO: 354; WAN024A3D; Start 73; Stop 97
atttctaaactcggggttcaagatc

SEQ ID NO: 261811 - DNA, 25 bp, Artificial
  probe
  misc_feature (1)..(25): SEQ ID NO: 354; WAN024A3D; Start 54; Stop 78
gaatctgcctcattttcttatttct

SEQ ID NO: 261812 - DNA, 25 bp, Artificial
  probe
  misc_feature (1)..(25): SEQ ID NO: 354; WAN024A3D; Start 63; Stop 87
tcattttcttatttctaaactcggg

SEQ ID NO: 261813 - DNA, 25 bp, Artificial
  probe
  misc_feature (1)..(25): SEQ ID NO: 354; WAN024A3D; Start 59; Stop 83
tgcctcattttcttatttctaaact

SEQ ID NO: 261814 - DNA, 25 bp, Artificial
  probe
  misc_feature (1)..(25): SEQ ID NO: 354; WAN024A3D; Start 74; Stop 98
tttctaaactcggggttcaagatcc

SEQ ID NO: 261815 - DNA, 25 bp, Artificial
  probe
  misc_feature (1)..(25): SEQ ID NO: 354; WAN024A3D; Start 58; Stop 82
ctgcctcattttcttatttctaaac

SEQ ID NO: 261816 - DNA, 25 bp, Artificial
  probe
  misc_feature (1)..(25): SEQ ID NO: 354; WAN024A3D; Start 57; Stop 81
tctgcctcattttcttatttctaaa

SEQ ID NO: 261817 - DNA, 25 bp, Artificial
  probe
  misc_feature (1)..(25): SEQ ID NO: 354; WAN024A3D; Start 60; Stop 84
gcctcattttcttatttctaaactc

SEQ ID NO: 261818 - DNA, 25 bp, Artificial
  probe
  misc_feature (1)..(25): SEQ ID NO: 354; WAN024A3D; Start 56; Stop 80
atctgcctcattttcttatttctaa

SEQ ID NO: 261819 - DNA, 25 bp, Artificial
  probe
  misc_feature (1)..(25): SEQ ID NO: 354; WAN024A3D; Start 55; Stop 79
aatctgcctcattttcttatttcta

SEQ ID NO: 261820 - DNA, 25 bp, Artificial
  probe
  misc_feature (1)..(25): SEQ ID NO: 354; WAN024A3D; Start 62; Stop 86
ctcattttcttatttctaaactcgg

SEQ ID NO: 261821 - DNA, 25 bp, Artificial
  probe
  misc_feature (1)..(25): SEQ ID NO: 354; WAN024A3D; Start 61; Stop 85
cctcattttcttatttctaaactcg

SEQ ID NO: 261822 - DNA, 25 bp, Artificial
  probe
  misc_feature (1)..(25): SEQ ID NO: 354; WAN024A3D; Start 21; Stop 45
gtaagacgatgaaatcgaactcttc

SEQ ID NO: 261823 - DNA, 25 bp, Artificial
  probe
  misc_feature (1)..(25): SEQ ID NO: 354; WAN024A3D; Start 20; Stop 44
ggtaagacgatgaaatcgaactctt

SEQ ID NO: 261824 - DNA, 25 bp, Artificial
  probe
  misc_feature (1)..(25): SEQ ID NO: 354; WAN024A3D; Start 22; Stop 46
taagacgatgaaatcgaactcttcg

SEQ ID NO: 261825 - DNA, 25 bp, Artificial
  probe
  misc_feature (1)..(25): SEQ ID NO: 354; WAN024A3D; Start 19; Stop 43
gggtaagacgatgaaatcgaactct

SEQ ID NO: 261826 - DNA, 25 bp, Artificial
  probe
  misc_feature (1)..(25): SEQ ID NO: 354; WAN024A3D; Start 12; Stop 36
gttgcaggggtaagacgatgaaatc

SEQ ID NO: 261827 - DNA, 25 bp, Artificial
  probe
  misc_feature (1)..(25): SEQ ID NO: 354; WAN024A3D; Start 75; Stop 99
ttctaaactcggggttcaagatccc

SEQ ID NO: 261828 - DNA, 25 bp, Artificial
  probe
  misc_feature (1)..(25): SEQ ID NO: 354; WAN024A3D; Start 3; Stop 27
ctagtcatcgttgcaggggtaagac

SEQ ID NO: 261829 - DNA, 25 bp, Artificial
  probe
  misc_feature (1)..(25): SEQ ID NO: 354; WAN024A3D; Start 18; Stop 42
ggggtaagacgatgaaatcgaactc

SEQ ID NO: 261830 - DNA, 25 bp, Artificial
  probe
  misc_feature (1)..(25): SEQ ID NO: 354; WAN024A3D; Start 16; Stop 40
caggggtaagacgatgaaatcgaac

SEQ ID NO: 261831 - DNA, 25 bp, Artificial
  probe
  misc_feature (1)..(25): SEQ ID NO: 354; WAN024A3D; Start 17; Stop 41
aggggtaagacgatgaaatcgaact

SEQ ID NO: 261832 - DNA, 25 bp, Artificial
  probe
  misc_feature (1)..(25): SEQ ID NO: 354; WAN024A3D; Start 15; Stop 39
gcaggggtaagacgatgaaatcgaa

SEQ ID NO: 261833 - DNA, 25 bp, Artificial
  probe
  misc_feature (1)..(25): SEQ ID NO: 355; WAN024AIF; Start 226; Stop 250
ctctgactcaatctaggtaatgcta

SEQ ID NO: 261834 - DNA, 25 bp, Artificial
  probe
  misc_feature (1)..(25): SEQ ID NO: 355; WAN024AIF; Start 225; Stop 249
cctctgactcaatctaggtaatgct

SEQ ID NO: 261835 - DNA, 25 bp, Artificial
  probe
  misc_feature (1)..(25): SEQ ID NO: 355; WAN024AIF; Start 252; Stop 276
ctgatggaagtggaaatgataatgg

SEQ ID NO: 261836 - DNA, 25 bp, Artificial
  probe
  misc_feature (1)..(25): SEQ ID NO: 355; WAN024AIF; Start 251; Stop 275
gctgatggaagtggaaatgataatg

SEQ ID NO: 261837 - DNA, 25 bp, Artificial
  probe
  misc_feature (1)..(25): SEQ ID NO: 355; WAN024AIF; Start 253; Stop 277
tgatggaagtggaaatgataatggg

SEQ ID NO: 261838 - DNA, 25 bp, Artificial
  probe
  misc_feature (1)..(25): SEQ ID NO: 355; WAN024AIF; Start 227; Stop 251
tctgactcaatctaggtaatgctag

SEQ ID NO: 261839 - DNA, 25 bp, Artificial
  probe
  misc_feature (1)..(25): SEQ ID NO: 355; WAN024AIF; Start 201; Stop 225
gctgagattaacgactgttagatcc

SEQ ID NO: 261840 - DNA, 25 bp, Artificial
  probe
  misc_feature (1)..(25): SEQ ID NO: 355; WAN024AIF; Start 200; Stop 224
agctgagattaacgactgttagatc

SEQ ID NO: 261841 - DNA, 25 bp, Artificial
  probe
  misc_feature (1)..(25): SEQ ID NO: 355; WAN024AIF; Start 199; Stop 223
aagctgagattaacgactgttagat

SEQ ID NO: 261842 - DNA, 25 bp, Artificial
  probe
  misc_feature (1)..(25): SEQ ID NO: 355; WAN024AIF; Start 325; Stop 349
aagaatacaaacttcagttggttgg

SEQ ID NO: 261843 - DNA, 25 bp, Artificial
  probe
  misc_feature (1)..(25): SEQ ID NO: 355; WAN024AIF; Start 14; Stop 38
acatttgtcaattacactcatcagt

SEQ ID NO: 261844 - DNA, 25 bp, Artificial
  probe
  misc_feature (1)..(25): SEQ ID NO: 355; WAN024AIF; Start 214; Stop 238
actgttagatccctctgactcaatc

SEQ ID NO: 261845 - DNA, 25 bp, Artificial
  probe
  misc_feature (1)..(25): SEQ ID NO: 355; WAN024AIF; Start 213; Stop 237
gactgttagatccctctgactcaat

SEQ ID NO: 261846 - DNA, 25 bp, Artificial
  probe
  misc_feature (1)..(25): SEQ ID NO: 355; WAN024AIF; Start 222; Stop 246
atccctctgactcaatctaggtaat

SEQ ID NO: 261847 - DNA, 25 bp, Artificial
  probe
  misc_feature (1)..(25): SEQ ID NO: 355; WAN024AIF; Start 328; Stop 352
aatacaaacttcagttggttgggag

SEQ ID NO: 261848 - DNA, 25 bp, Artificial
  probe
  misc_feature (1)..(25): SEQ ID NO: 355; WAN024AIF; Start 327; Stop 351
gaatacaaacttcagttggttggga

SEQ ID NO: 261849 - DNA, 25 bp, Artificial
  probe
  misc_feature (1)..(25): SEQ ID NO: 355; WAN024AIF; Start 326; Stop 350
agaatacaaacttcagttggttggg

SEQ ID NO: 261850 - DNA, 25 bp, Artificial
  probe
  misc_feature (1)..(25): SEQ ID NO: 355; WAN024AIF; Start 248; Stop 272
ctagctgatggaagtggaaatgata

SEQ ID NO: 261851 - DNA, 25 bp, Artificial
  probe
  misc_feature (1)..(25): SEQ ID NO: 355; WAN024AIF; Start 250; Stop 274
agctgatggaagtggaaatgataat

SEQ ID NO: 261852 - DNA, 25 bp, Artificial
  probe
  misc_feature (1)..(25): SEQ ID NO: 355; WAN024AIF; Start 249; Stop 273
tagctgatggaagtggaaatgataa

SEQ ID NO: 261853 - DNA, 25 bp, Artificial
  probe
  misc_feature (1)..(25): SEQ ID NO: 355; WAN024AIF; Start 223; Stop 247
tccctctgactcaatctaggtaatg

SEQ ID NO: 261854 - DNA, 25 bp, Artificial
  probe
  misc_feature (1)..(25): SEQ ID NO: 355; WAN024AIF; Start 221; Stop 245
gatccctctgactcaatctaggtaa

SEQ ID NO: 261855 - DNA, 25 bp, Artificial
  probe
  misc_feature (1)..(25): SEQ ID NO: 355; WAN024AIF; Start 204; Stop 228
gagattaacgactgttagatccctc

SEQ ID NO: 261856 - DNA, 25 bp, Artificial
  probe
  misc_feature (1)..(25): SEQ ID NO: 355; WAN024AIF; Start 206; Stop 230
gattaacgactgttagatccctctg

SEQ ID NO: 261857 - DNA, 25 bp, Artificial
  probe
  misc_feature (1)..(25): SEQ ID NO: 355; WAN024AIF; Start 205; Stop 229
agattaacgactgttagatccctct

SEQ ID NO: 261858 - DNA, 25 bp, Artificial
  probe
  misc_feature (1)..(25): SEQ ID NO: 355; WAN024AIF; Start 202; Stop 226
ctgagattaacgactgttagatccc

SEQ ID NO: 261859 - DNA, 25 bp, Artificial
  probe
  misc_feature (1)..(25): SEQ ID NO: 355; WAN024AIF; Start 207; Stop 231
attaacgactgttagatccctctga

SEQ ID NO: 261860 - DNA, 25 bp, Artificial
  probe
  misc_feature (1)..(25): SEQ ID NO: 355; WAN024AIF; Start 203; Stop 227
tgagattaacgactgttagatccct

SEQ ID NO: 261861 - DNA, 25 bp, Artificial
  probe
  misc_feature (1)..(25): SEQ ID NO: 355; WAN024AIF; Start 324; Stop 348
taagaatacaaacttcagttggttg

SEQ ID NO: 261862 - DNA, 25 bp, Artificial
  probe
  misc_feature (1)..(25): SEQ ID NO: 355; WAN024AIF; Start 208; Stop 232
ttaacgactgttagatccctctgac

SEQ ID NO: 261863 - DNA, 25 bp, Artificial
  probe
  misc_feature (1)..(25): SEQ ID NO: 355; WAN024AIF; Start 15; Stop 39
catttgtcaattacactcatcagta

SEQ ID NO: 261864 - DNA, 25 bp, Artificial
  probe
  misc_feature (1)..(25): SEQ ID NO: 355; WAN024AIF; Start 13; Stop 37
tacatttgtcaattacactcatcag

SEQ ID NO: 261865 - DNA, 25 bp, Artificial
  probe
  misc_feature (1)..(25): SEQ ID NO: 355; WAN024AIF; Start 12; Stop 36
ctacatttgtcaattacactcatca

SEQ ID NO: 261866 - DNA, 25 bp, Artificial
  probe
  misc_feature (1)..(25): SEQ ID NO: 356; WAN0249QJ; Start 238; Stop 262
atggctagatagtaaggagtagacc

SEQ ID NO: 261867 - DNA, 25 bp, Artificial
  probe
  misc_feature (1)..(25): SEQ ID NO: 356; WAN0249QJ; Start 234; Stop 258
gcagatggctagatagtaaggagta

SEQ ID NO: 261868 - DNA, 25 bp, Artificial
  probe
  misc_feature (1)..(25): SEQ ID NO: 356; WAN0249QJ; Start 237; Stop 261
gatggctagatagtaaggagtagac

SEQ ID NO: 261869 - DNA, 25 bp, Artificial
  probe
  misc_feature (1)..(25): SEQ ID NO: 356; WAN0249QJ; Start 235; Stop 259
cagatggctagatagtaaggagtag

SEQ ID NO: 261870 - DNA, 25 bp, Artificial
  probe
  misc_feature (1)..(25): SEQ ID NO: 356; WAN0249QJ; Start 236; Stop 260
agatggctagatagtaaggagtaga

SEQ ID NO: 261871 - DNA, 25 bp, Artificial
  probe
  misc_feature (1)..(25): SEQ ID NO: 356; WAN0249QJ; Start 240; Stop 264
ggctagatagtaaggagtagaccga

SEQ ID NO: 261872 - DNA, 25 bp, Artificial
  probe
  misc_feature (1)..(25): SEQ ID NO: 356; WAN0249QJ; Start 239; Stop 263
tggctagatagtaaggagtagaccg

SEQ ID NO: 261873 - DNA, 25 bp, Artificial
  probe
  misc_feature (1)..(25): SEQ ID NO: 356; WAN0249QJ; Start 197; Stop 221
gcggatgttatagctggaattatct

SEQ ID NO: 261874 - DNA, 25 bp, Artificial
  probe
  misc_feature (1)..(25): SEQ ID NO: 356; WAN0249QJ; Start 59; Stop 83
aagaattaagtgaccttgatgatct

SEQ ID NO: 261875 - DNA, 25 bp, Artificial
  probe
  misc_feature (1)..(25): SEQ ID NO: 356; WAN0249QJ; Start 198; Stop 222
cggatgttatagctggaattatctt

SEQ ID NO: 261876 - DNA, 25 bp, Artificial
  probe
  misc_feature (1)..(25): SEQ ID NO: 356; WAN0249QJ; Start 278; Stop 302
aaacacccgttaaatcgctaagata

SEQ ID NO: 261877 - DNA, 25 bp, Artificial
  probe
  misc_feature (1)..(25): SEQ ID NO: 356; WAN0249QJ; Start 277; Stop 301
taaacacccgttaaatcgctaagat

SEQ ID NO: 261878 - DNA, 25 bp, Artificial
  probe
  misc_feature (1)..(25): SEQ ID NO: 356; WAN0249QJ; Start 276; Stop 300
ataaacacccgttaaatcgctaaga

SEQ ID NO: 261879 - DNA, 25 bp, Artificial
  probe
  misc_feature (1)..(25): SEQ ID NO: 356; WAN0249QJ; Start 275; Stop 299
tataaacacccgttaaatcgctaag

SEQ ID NO: 261880 - DNA, 25 bp, Artificial
  probe
  misc_feature (1)..(25): SEQ ID NO: 356; WAN0249QJ; Start 274; Stop 298
ctataaacacccgttaaatcgctaa

SEQ ID NO: 261881 - DNA, 25 bp, Artificial
  probe
  misc_feature (1)..(25): SEQ ID NO: 356; WAN0249QJ; Start 273; Stop 297
cctataaacacccgttaaatcgcta

SEQ ID NO: 261882 - DNA, 25 bp, Artificial
  probe
  misc_feature (1)..(25): SEQ ID NO: 356; WAN0249QJ; Start 270; Stop 294
tagcctataaacacccgttaaatcg

SEQ ID NO: 261883 - DNA, 25 bp, Artificial
  probe
  misc_feature (1)..(25): SEQ ID NO: 356; WAN0249QJ; Start 268; Stop 292
actagcctataaacacccgttaaat

SEQ ID NO: 261884 - DNA, 25 bp, Artificial
  probe
  misc_feature (1)..(25): SEQ ID NO: 356; WAN0249QJ; Start 267; Stop 291
gactagcctataaacacccgttaaa

SEQ ID NO: 261885 - DNA, 25 bp, Artificial
  probe
  misc_feature (1)..(25): SEQ ID NO: 356; WAN0249QJ; Start 279; Stop 303
aacacccgttaaatcgctaagatac

SEQ ID NO: 261886 - DNA, 25 bp, Artificial
  probe
  misc_feature (1)..(25): SEQ ID NO: 356; WAN0249QJ; Start 269; Stop 293
ctagcctataaacacccgttaaatc

SEQ ID NO: 261887 - DNA, 25 bp, Artificial
  probe
  misc_feature (1)..(25): SEQ ID NO: 356; WAN0249QJ; Start 60; Stop 84
agaattaagtgaccttgatgatcta

SEQ ID NO: 261888 - DNA, 25 bp, Artificial
  probe
  misc_feature (1)..(25): SEQ ID NO: 356; WAN0249QJ; Start 266; Stop 290
tgactagcctataaacacccgttaa

SEQ ID NO: 261889 - DNA, 25 bp, Artificial
  probe
  misc_feature (1)..(25): SEQ ID NO: 356; WAN0249QJ; Start 233; Stop 257
tgcagatggctagatagtaaggagt

SEQ ID NO: 261890 - DNA, 25 bp, Artificial
  probe
  misc_feature (1)..(25): SEQ ID NO: 356; WAN0249QJ; Start 199; Stop 223
ggatgttatagctggaattatcttg

SEQ ID NO: 261891 - DNA, 25 bp, Artificial
  probe
  misc_feature (1)..(25): SEQ ID NO: 356; WAN0249QJ; Start 149; Stop 173
gaggtgaaactaatgagccttatca

SEQ ID NO: 261892 - DNA, 25 bp, Artificial
  probe
  misc_feature (1)..(25): SEQ ID NO: 356; WAN0249QJ; Start 148; Stop 172
ggaggtgaaactaatgagccttatc

SEQ ID NO: 261893 - DNA, 25 bp, Artificial
  probe
  misc_feature (1)..(25): SEQ ID NO: 356; WAN0249QJ; Start 139; Stop 163
ttcgtgagaggaggtgaaactaatg

SEQ ID NO: 261894 - DNA, 25 bp, Artificial
  probe
  misc_feature (1)..(25): SEQ ID NO: 356; WAN0249QJ; Start 195; Stop 219
tagcggatgttatagctggaattat

SEQ ID NO: 261895 - DNA, 25 bp, Artificial
  probe
  misc_feature (1)..(25): SEQ ID NO: 356; WAN0249QJ; Start 194; Stop 218
atagcggatgttatagctggaatta

SEQ ID NO: 261896 - DNA, 25 bp, Artificial
  probe
  misc_feature (1)..(25): SEQ ID NO: 356; WAN0249QJ; Start 193; Stop 217
tatagcggatgttatagctggaatt

SEQ ID NO: 261897 - DNA, 25 bp, Artificial
  probe
  misc_feature (1)..(25): SEQ ID NO: 356; WAN0249QJ; Start 192; Stop 216
ttatagcggatgttatagctggaat

SEQ ID NO: 261898 - DNA, 25 bp, Artificial
  probe
  misc_feature (1)..(25): SEQ ID NO: 356; WAN0249QJ; Start 191; Stop 215
attatagcggatgttatagctggaa

SEQ ID NO: 261899 - DNA, 25 bp, Artificial
  probe
  misc_feature (1)..(25): SEQ ID NO: 357; WAN024AVC; Start 24; Stop 48
tttgaaactctacaactacatgctg

SEQ ID NO: 261900 - DNA, 25 bp, Artificial
  probe
  misc_feature (1)..(25): SEQ ID NO: 357; WAN024AVC; Start 25; Stop 49
ttgaaactctacaactacatgctgg

SEQ ID NO: 261901 - DNA, 25 bp, Artificial
  probe
  misc_feature (1)..(25): SEQ ID NO: 357; WAN024AVC; Start 23; Stop 47
atttgaaactctacaactacatgct

SEQ ID NO: 261902 - DNA, 25 bp, Artificial
  probe
  misc_feature (1)..(25): SEQ ID NO: 357; WAN024AVC; Start 22; Stop 46
aatttgaaactctacaactacatgc

SEQ ID NO: 261903 - DNA, 25 bp, Artificial
  probe
  misc_feature (1)..(25): SEQ ID NO: 357; WAN024AVC; Start 81; Stop 105
gcagtgccgatttatcaaacaacat

SEQ ID NO: 261904 - DNA, 25 bp, Artificial
  probe
  misc_feature (1)..(25): SEQ ID NO: 357; WAN024AVC; Start 79; Stop 103
gtgcagtgccgatttatcaaacaac

SEQ ID NO: 261905 - DNA, 25 bp, Artificial
  probe
  misc_feature (1)..(25): SEQ ID NO: 357; WAN024AVC; Start 80; Stop 104
tgcagtgccgatttatcaaacaaca

SEQ ID NO: 261906 - DNA, 25 bp, Artificial
  probe
  misc_feature (1)..(25): SEQ ID NO: 357; WAN024AVC; Start 21; Stop 45
aaatttgaaactctacaactacatg

SEQ ID NO: 261907 - DNA, 25 bp, Artificial
  probe
  misc_feature (1)..(25): SEQ ID NO: 357; WAN024AVC; Start 78; Stop 102
cgtgcagtgccgatttatcaaacaa

SEQ ID NO: 261908 - DNA, 25 bp, Artificial
  probe
  misc_feature (1)..(25): SEQ ID NO: 357; WAN024AVC; Start 71; Stop 95
taagtctcgtgcagtgccgatttat

SEQ ID NO: 261909 - DNA, 25 bp, Artificial
  probe
  misc_feature (1)..(25): SEQ ID NO: 357; WAN024AVC; Start 70; Stop 94
ctaagtctcgtgcagtgccgattta

SEQ ID NO: 261910 - DNA, 25 bp, Artificial
  probe
  misc_feature (1)..(25): SEQ ID NO: 357; WAN024AVC; Start 76; Stop 100
ctcgtgcagtgccgatttatcaaac

SEQ ID NO: 261911 - DNA, 25 bp, Artificial
  probe
  misc_feature (1)..(25): SEQ ID NO: 357; WAN024AVC; Start 75; Stop 99
tctcgtgcagtgccgatttatcaaa

SEQ ID NO: 261912 - DNA, 25 bp, Artificial
  probe
  misc_feature (1)..(25): SEQ ID NO: 358; WAN0249ID; Start 60; Stop 84
ctggatttctccaactcttctcttt

SEQ ID NO: 261913 - DNA, 25 bp, Artificial
  probe
  misc_feature (1)..(25): SEQ ID NO: 358; WAN0249ID; Start 59; Stop 83
gctggatttctccaactcttctctt

SEQ ID NO: 261914 - DNA, 25 bp, Artificial
  probe
  misc_feature (1)..(25): SEQ ID NO: 358; WAN0249ID; Start 40; Stop 64
ttggagatattttaaaagagctgga

SEQ ID NO: 261915 - DNA, 25 bp, Artificial
  probe
  misc_feature (1)..(25): SEQ ID NO: 358; WAN0249ID; Start 41; Stop 65
tggagatattttaaaagagctggat

SEQ ID NO: 261916 - DNA, 25 bp, Artificial
  probe
  misc_feature (1)..(25): SEQ ID NO: 358; WAN0249ID; Start 57; Stop 81
gagctggatttctccaactcttctc

SEQ ID NO: 261917 - DNA, 25 bp, Artificial
  probe
  misc_feature (1)..(25): SEQ ID NO: 358; WAN0249ID; Start 39; Stop 63
tttggagatattttaaaagagctgg

SEQ ID NO: 261918 - DNA, 25 bp, Artificial
  probe
  misc_feature (1)..(25): SEQ ID NO: 358; WAN0249ID; Start 58; Stop 82
agctggatttctccaactcttctct

SEQ ID NO: 261919 - DNA, 25 bp, Artificial
  probe
  misc_feature (1)..(25): SEQ ID NO: 358; WAN0249ID; Start 56; Stop 80
agagctggatttctccaactcttct

SEQ ID NO: 261920 - DNA, 25 bp, Artificial
  probe
  misc_feature (1)..(25): SEQ ID NO: 358; WAN0249ID; Start 61; Stop 85
tggatttctccaactcttctctttt

SEQ ID NO: 261921 - DNA, 25 bp, Artificial
  probe
  misc_feature (1)..(25): SEQ ID NO: 358; WAN0249ID; Start 51; Stop 75
ttaaaagagctggatttctccaact

SEQ ID NO: 261922 - DNA, 25 bp, Artificial
  probe
  misc_feature (1)..(25): SEQ ID NO: 358; WAN0249ID; Start 50; Stop 74
tttaaaagagctggatttctccaac

SEQ ID NO: 261923 - DNA, 25 bp, Artificial
  probe
  misc_feature (1)..(25): SEQ ID NO: 358; WAN0249ID; Start 52; Stop 76
taaaagagctggatttctccaactc

SEQ ID NO: 261924 - DNA, 25 bp, Artificial
  probe
  misc_feature (1)..(25): SEQ ID NO: 358; WAN0249ID; Start 42; Stop 66
ggagatattttaaaagagctggatt

SEQ ID NO: 261925 - DNA, 25 bp, Artificial
  probe
  misc_feature (1)..(25): SEQ ID NO: 358; WAN0249ID; Start 53; Stop 77
aaaagagctggatttctccaactct

SEQ ID NO: 261926 - DNA, 25 bp, Artificial
  probe
  misc_feature (1)..(25): SEQ ID NO: 358; WAN0249ID; Start 47; Stop 71
tattttaaaagagctggatttctcc

SEQ ID NO: 261927 - DNA, 25 bp, Artificial
  probe
  misc_feature (1)..(25): SEQ ID NO: 358; WAN0249ID; Start 38; Stop 62
ttttggagatattttaaaagagctg

SEQ ID NO: 261928 - DNA, 25 bp, Artificial
  probe
  misc_feature (1)..(25): SEQ ID NO: 358; WAN0249ID; Start 44; Stop 68
agatattttaaaagagctggatttc

SEQ ID NO: 261929 - DNA, 25 bp, Artificial
  probe
  misc_feature (1)..(25): SEQ ID NO: 358; WAN0249ID; Start 43; Stop 67
gagatattttaaaagagctggattt

SEQ ID NO: 261930 - DNA, 25 bp, Artificial
  probe
  misc_feature (1)..(25): SEQ ID NO: 358; WAN0249ID; Start 45; Stop 69
gatattttaaaagagctggatttct

SEQ ID NO: 261931 - DNA, 25 bp, Artificial
  probe
  misc_feature (1)..(25): SEQ ID NO: 358; WAN0249ID; Start 49; Stop 73
ttttaaaagagctggatttctccaa

SEQ ID NO: 261932 - DNA, 25 bp, Artificial
  probe
  misc_feature (1)..(25): SEQ ID NO: 358; WAN0249ID; Start 48; Stop 72
attttaaaagagctggatttctcca

SEQ ID NO: 261933 - DNA, 25 bp, Artificial
  probe
  misc_feature (1)..(25): SEQ ID NO: 358; WAN0249ID; Start 46; Stop 70
atattttaaaagagctggatttctc

SEQ ID NO: 261934 - DNA, 25 bp, Artificial
  probe
  misc_feature (1)..(25): SEQ ID NO: 359; WAN0249L5; Start 51; Stop 75
agcatctagtaacagttcctcatac

SEQ ID NO: 261935 - DNA, 25 bp, Artificial
  probe
  misc_feature (1)..(25): SEQ ID NO: 359; WAN0249L5; Start 50; Stop 74
aagcatctagtaacagttcctcata

SEQ ID NO: 261936 - DNA, 25 bp, Artificial
  probe
  misc_feature (1)..(25): SEQ ID NO: 359; WAN0249L5; Start 52; Stop 76
gcatctagtaacagttcctcatact

SEQ ID NO: 261937 - DNA, 25 bp, Artificial
  probe
  misc_feature (1)..(25): SEQ ID NO: 359; WAN0249L5; Start 55; Stop 79
tctagtaacagttcctcatacttcc

SEQ ID NO: 261938 - DNA, 25 bp, Artificial
  probe
  misc_feature (1)..(25): SEQ ID NO: 359; WAN0249L5; Start 73; Stop 97
tacttcccttgcgaaattctgttat

SEQ ID NO: 261939 - DNA, 25 bp, Artificial
  probe
  misc_feature (1)..(25): SEQ ID NO: 359; WAN0249L5; Start 72; Stop 96
atacttcccttgcgaaattctgtta

SEQ ID NO: 261940 - DNA, 25 bp, Artificial
  probe
  misc_feature (1)..(25): SEQ ID NO: 359; WAN0249L5; Start 49; Stop 73
aaagcatctagtaacagttcctcat

SEQ ID NO: 261941 - DNA, 25 bp, Artificial
  probe
  misc_feature (1)..(25): SEQ ID NO: 359; WAN0249L5; Start 14; Stop 38
cctcttcatctagcccatatacaat

SEQ ID NO: 261942 - DNA, 25 bp, Artificial
  probe
  misc_feature (1)..(25): SEQ ID NO: 359; WAN0249L5; Start 48; Stop 72
gaaagcatctagtaacagttcctca

SEQ ID NO: 261943 - DNA, 25 bp, Artificial
  probe
  misc_feature (1)..(25): SEQ ID NO: 359; WAN0249L5; Start 47; Stop 71
tgaaagcatctagtaacagttcctc

SEQ ID NO: 261944 - DNA, 25 bp, Artificial
  probe
  misc_feature (1)..(25): SEQ ID NO: 359; WAN0249L5; Start 13; Stop 37
ccctcttcatctagcccatatacaa

SEQ ID NO: 261945 - DNA, 25 bp, Artificial
  probe
  misc_feature (1)..(25): SEQ ID NO: 359; WAN0249L5; Start 74; Stop 98
acttcccttgcgaaattctgttatt

SEQ ID NO: 261946 - DNA, 25 bp, Artificial
  probe
  misc_feature (1)..(25): SEQ ID NO: 359; WAN0249L5; Start 59; Stop 83
gtaacagttcctcatacttcccttg

SEQ ID NO: 261947 - DNA, 25 bp, Artificial
  probe
  misc_feature (1)..(25): SEQ ID NO: 359; WAN0249L5; Start 75; Stop 99
cttcccttgcgaaattctgttattt

SEQ ID NO: 261948 - DNA, 25 bp, Artificial
  probe
  misc_feature (1)..(25): SEQ ID NO: 359; WAN0249L5; Start 71; Stop 95
catacttcccttgcgaaattctgtt

SEQ ID NO: 261949 - DNA, 25 bp, Artificial
  probe
  misc_feature (1)..(25): SEQ ID NO: 359; WAN0249L5; Start 53; Stop 77
catctagtaacagttcctcatactt

SEQ ID NO: 261950 - DNA, 25 bp, Artificial
  probe
  misc_feature (1)..(25): SEQ ID NO: 359; WAN0249L5; Start 46; Stop 70
ctgaaagcatctagtaacagttcct

SEQ ID NO: 261951 - DNA, 25 bp, Artificial
  probe
  misc_feature (1)..(25): SEQ ID NO: 359; WAN0249L5; Start 45; Stop 69
tctgaaagcatctagtaacagttcc

SEQ ID NO: 261952 - DNA, 25 bp, Artificial
  probe
  misc_feature (1)..(25): SEQ ID NO: 359; WAN0249L5; Start 69; Stop 93
ctcatacttcccttgcgaaattctg

SEQ ID NO: 261953 - DNA, 25 bp, Artificial
  probe
  misc_feature (1)..(25): SEQ ID NO: 359; WAN0249L5; Start 54; Stop 78
atctagtaacagttcctcatacttc

SEQ ID NO: 261954 - DNA, 25 bp, Artificial
  probe
  misc_feature (1)..(25): SEQ ID NO: 359; WAN0249L5; Start 57; Stop 81
tagtaacagttcctcatacttccct

SEQ ID NO: 261955 - DNA, 25 bp, Artificial
  probe
  misc_feature (1)..(25): SEQ ID NO: 359; WAN0249L5; Start 44; Stop 68
atctgaaagcatctagtaacagttc

SEQ ID NO: 261956 - DNA, 25 bp, Artificial
  probe
  misc_feature (1)..(25): SEQ ID NO: 359; WAN0249L5; Start 60; Stop 84
taacagttcctcatacttcccttgc

SEQ ID NO: 261957 - DNA, 25 bp, Artificial
  probe
  misc_feature (1)..(25): SEQ ID NO: 359; WAN0249L5; Start 56; Stop 80
ctagtaacagttcctcatacttccc

SEQ ID NO: 261958 - DNA, 25 bp, Artificial
  probe
  misc_feature (1)..(25): SEQ ID NO: 359; WAN0249L5; Start 66; Stop 90
ttcctcatacttcccttgcgaaatt

SEQ ID NO: 261959 - DNA, 25 bp, Artificial
  probe
  misc_feature (1)..(25): SEQ ID NO: 359; WAN0249L5; Start 58; Stop 82
agtaacagttcctcatacttccctt

SEQ ID NO: 261960 - DNA, 25 bp, Artificial
  probe
  misc_feature (1)..(25): SEQ ID NO: 359; WAN0249L5; Start 70; Stop 94
tcatacttcccttgcgaaattctgt

SEQ ID NO: 261961 - DNA, 25 bp, Artificial
  probe
  misc_feature (1)..(25): SEQ ID NO: 359; WAN0249L5; Start 15; Stop 39
ctcttcatctagcccatatacaata

SEQ ID NO: 261962 - DNA, 25 bp, Artificial
  probe
  misc_feature (1)..(25): SEQ ID NO: 359; WAN0249L5; Start 68; Stop 92
cctcatacttcccttgcgaaattct

SEQ ID NO: 261963 - DNA, 25 bp, Artificial
  probe
  misc_feature (1)..(25): SEQ ID NO: 359; WAN0249L5; Start 67; Stop 91
tcctcatacttcccttgcgaaattc

SEQ ID NO: 261964 - DNA, 25 bp, Artificial
  probe
  misc_feature (1)..(25): SEQ ID NO: 359; WAN0249L5; Start 65; Stop 89
gttcctcatacttcccttgcgaaat

SEQ ID NO: 261965 - DNA, 25 bp, Artificial
  probe
  misc_feature (1)..(25): SEQ ID NO: 359; WAN0249L5; Start 40; Stop 64
tcatatctgaaagcatctagtaaca

SEQ ID NO: 261966 - DNA, 25 bp, Artificial
  probe
  misc_feature (1)..(25): SEQ ID NO: 359; WAN0249L5; Start 43; Stop 67
tatctgaaagcatctagtaacagtt

SEQ ID NO: 261967 - DNA, 25 bp, Artificial
  probe
  misc_feature (1)..(25): SEQ ID NO: 360; WAN024ALV; Start 45; Stop 69
ttatgttaaatccttgtcagagcag

SEQ ID NO: 261968 - DNA, 25 bp, Artificial
  probe
  misc_feature (1)..(25): SEQ ID NO: 360; WAN024ALV; Start 44; Stop 68
tttatgttaaatccttgtcagagca

SEQ ID NO: 261969 - DNA, 25 bp, Artificial
  probe
  misc_feature (1)..(25): SEQ ID NO: 360; WAN024ALV; Start 43; Stop 67
gtttatgttaaatccttgtcagagc

SEQ ID NO: 261970 - DNA, 25 bp, Artificial
  probe
  misc_feature (1)..(25): SEQ ID NO: 360; WAN024ALV; Start 46; Stop 70
tatgttaaatccttgtcagagcagg

SEQ ID NO: 261971 - DNA, 25 bp, Artificial
  probe
  misc_feature (1)..(25): SEQ ID NO: 360; WAN024ALV; Start 42; Stop 66
tgtttatgttaaatccttgtcagag

SEQ ID NO: 261972 - DNA, 25 bp, Artificial
  probe
  misc_feature (1)..(25): SEQ ID NO: 360; WAN024ALV; Start 47; Stop 71
atgttaaatccttgtcagagcaggg

SEQ ID NO: 261973 - DNA, 25 bp, Artificial
  probe
  misc_feature (1)..(25): SEQ ID NO: 360; WAN024ALV; Start 41; Stop 65
atgtttatgttaaatccttgtcaga

SEQ ID NO: 261974 - DNA, 25 bp, Artificial
  probe
  misc_feature (1)..(25): SEQ ID NO: 360; WAN024ALV; Start 40; Stop 64
aatgtttatgttaaatccttgtcag

SEQ ID NO: 261975 - DNA, 25 bp, Artificial
  probe
  misc_feature (1)..(25): SEQ ID NO: 360; WAN024ALV; Start 39; Stop 63
gaatgtttatgttaaatccttgtca

SEQ ID NO: 261976 - DNA, 25 bp, Artificial
  probe
  misc_feature (1)..(25): SEQ ID NO: 360; WAN024ALV; Start 48; Stop 72
tgttaaatccttgtcagagcaggga

SEQ ID NO: 261977 - DNA, 25 bp, Artificial
  probe
  misc_feature (1)..(25): SEQ ID NO: 360; WAN024ALV; Start 38; Stop 62
agaatgtttatgttaaatccttgtc

SEQ ID NO: 261978 - DNA, 25 bp, Artificial
  probe
  misc_feature (1)..(25): SEQ ID NO: 360; WAN024ALV; Start 49; Stop 73
gttaaatccttgtcagagcagggat

SEQ ID NO: 261979 - DNA, 25 bp, Artificial
  probe
  misc_feature (1)..(25): SEQ ID NO: 361; WAN0249IA; Start 1; Stop 25
acgagtttattcttcctttcattgt

SEQ ID NO: 261980 - DNA, 25 bp, Artificial
  probe
  misc_feature (1)..(25): SEQ ID NO: 361; WAN0249IA; Start 2; Stop 26
cgagtttattcttcctttcattgta

SEQ ID NO: 261981 - DNA, 25 bp, Artificial
  probe
  misc_feature (1)..(25): SEQ ID NO: 361; WAN0249IA; Start 3; Stop 27
gagtttattcttcctttcattgtac

SEQ ID NO: 261982 - DNA, 25 bp, Artificial
  probe
  misc_feature (1)..(25): SEQ ID NO: 361; WAN0249IA; Start 5; Stop 29
gtttattcttcctttcattgtacac

SEQ ID NO: 261983 - DNA, 25 bp, Artificial
  probe
  misc_feature (1)..(25): SEQ ID NO: 361; WAN0249IA; Start 13; Stop 37
ttcctttcattgtacactttattct

SEQ ID NO: 261984 - DNA, 25 bp, Artificial
  probe
  misc_feature (1)..(25): SEQ ID NO: 361; WAN0249IA; Start 11; Stop 35
tcttcctttcattgtacactttatt

SEQ ID NO: 261985 - DNA, 25 bp, Artificial
  probe
  misc_feature (1)..(25): SEQ ID NO: 361; WAN0249IA; Start 10; Stop 34
ttcttcctttcattgtacactttat

SEQ ID NO: 261986 - DNA, 25 bp, Artificial
  probe
  misc_feature (1)..(25): SEQ ID NO: 361; WAN0249IA; Start 9; Stop 33
attcttcctttcattgtacacttta

SEQ ID NO: 261987 - DNA, 25 bp, Artificial
  probe
  misc_feature (1)..(25): SEQ ID NO: 361; WAN0249IA; Start 8; Stop 32
tattcttcctttcattgtacacttt

SEQ ID NO: 261988 - DNA, 25 bp, Artificial
  probe
  misc_feature (1)..(25): SEQ ID NO: 361; WAN0249IA; Start 7; Stop 31
ttattcttcctttcattgtacactt

SEQ ID NO: 261989 - DNA, 25 bp, Artificial
  probe
  misc_feature (1)..(25): SEQ ID NO: 361; WAN0249IA; Start 6; Stop 30
tttattcttcctttcattgtacact

SEQ ID NO: 261990 - DNA, 25 bp, Artificial
  probe
  misc_feature (1)..(25): SEQ ID NO: 361; WAN0249IA; Start 4; Stop 28
agtttattcttcctttcattgtaca

SEQ ID NO: 261991 - DNA, 25 bp, Artificial
  probe
  misc_feature (1)..(25): SEQ ID NO: 361; WAN0249IA; Start 12; Stop 36
cttcctttcattgtacactttattc

SEQ ID NO: 261992 - DNA, 25 bp, Artificial
  probe
  misc_feature (1)..(25): SEQ ID NO: 361; WAN0249IA; Start 14; Stop 38
tcctttcattgtacactttattcta

SEQ ID NO: 261993 - DNA, 25 bp, Artificial
  probe
  misc_feature (1)..(25): SEQ ID NO: 361; WAN0249IA; Start 15; Stop 39
cctttcattgtacactttattctat

SEQ ID NO: 261994 - DNA, 25 bp, Artificial
  probe
  misc_feature (1)..(25): SEQ ID NO: 362; WAN0249F8; Start 70; Stop 94
acctcacttttgttttctgctattt

SEQ ID NO: 261995 - DNA, 25 bp, Artificial
  probe
  misc_feature (1)..(25): SEQ ID NO: 362; WAN0249F8; Start 69; Stop 93
aacctcacttttgttttctgctatt

SEQ ID NO: 261996 - DNA, 25 bp, Artificial
  probe
  misc_feature (1)..(25): SEQ ID NO: 362; WAN0249F8; Start 71; Stop 95
cctcacttttgttttctgctatttt

SEQ ID NO: 261997 - DNA, 25 bp, Artificial
  probe
  misc_feature (1)..(25): SEQ ID NO: 362; WAN0249F8; Start 122; Stop 146
aattccaaagtttgtaactaaaggg

SEQ ID NO: 261998 - DNA, 25 bp, Artificial
  probe
  misc_feature (1)..(25): SEQ ID NO: 362; WAN0249F8; Start 75; Stop 99
acttttgttttctgctattttatgc

SEQ ID NO: 261999 - DNA, 25 bp, Artificial
  probe
  misc_feature (1)..(25): SEQ ID NO: 362; WAN0249F8; Start 76; Stop 100
cttttgttttctgctattttatgct

SEQ ID NO: 262000 - DNA, 25 bp, Artificial
  probe
  misc_feature (1)..(25): SEQ ID NO: 362; WAN0249F8; Start 68; Stop 92
aaacctcacttttgttttctgctat

SEQ ID NO: 262001 - DNA, 25 bp, Artificial
  probe
  misc_feature (1)..(25): SEQ ID NO: 362; WAN0249F8; Start 72; Stop 96
ctcacttttgttttctgctatttta

SEQ ID NO: 262002 - DNA, 25 bp, Artificial
  probe
  misc_feature (1)..(25): SEQ ID NO: 362; WAN0249F8; Start 123; Stop 147
attccaaagtttgtaactaaagggg

SEQ ID NO: 262003 - DNA, 25 bp, Artificial
  probe
  misc_feature (1)..(25): SEQ ID NO: 362; WAN0249F8; Start 78; Stop 102
tttgttttctgctattttatgctaa

SEQ ID NO: 262004 - DNA, 25 bp, Artificial
  probe
  misc_feature (1)..(25): SEQ ID NO: 362; WAN0249F8; Start 77; Stop 101
ttttgttttctgctattttatgcta

SEQ ID NO: 262005 - DNA, 25 bp, Artificial
  probe
  misc_feature (1)..(25): SEQ ID NO: 362; WAN0249F8; Start 74; Stop 98
cacttttgttttctgctattttatg

SEQ ID NO: 262006 - DNA, 25 bp, Artificial
  probe
  misc_feature (1)..(25): SEQ ID NO: 362; WAN0249F8; Start 73; Stop 97
tcacttttgttttctgctattttat

SEQ ID NO: 262007 - DNA, 25 bp, Artificial
  probe
  misc_feature (1)..(25): SEQ ID NO: 362; WAN0249F8; Start 79; Stop 103
ttgttttctgctattttatgctaaa

SEQ ID NO: 262008 - DNA, 25 bp, Artificial
  probe
  misc_feature (1)..(25): SEQ ID NO: 362; WAN0249F8; Start 1; Stop 25
acgataatcataattcctcctaaaa

SEQ ID NO: 262009 - DNA, 25 bp, Artificial
  probe
  misc_feature (1)..(25): SEQ ID NO: 362; WAN0249F8; Start 121; Stop 145
taattccaaagtttgtaactaaagg

SEQ ID NO: 262010 - DNA, 25 bp, Artificial
  probe
  misc_feature (1)..(25): SEQ ID NO: 362; WAN0249F8; Start 80; Stop 104
tgttttctgctattttatgctaaaa

SEQ ID NO: 262011 - DNA, 25 bp, Artificial
  probe
  misc_feature (1)..(25): SEQ ID NO: 362; WAN0249F8; Start 67; Stop 91
aaaacctcacttttgttttctgcta

SEQ ID NO: 262012 - DNA, 25 bp, Artificial
  probe
  misc_feature (1)..(25): SEQ ID NO: 362; WAN0249F8; Start 19; Stop 43
cctaaaattaggaataataaaggca

SEQ ID NO: 262013 - DNA, 25 bp, Artificial
  probe
  misc_feature (1)..(25): SEQ ID NO: 362; WAN0249F8; Start 81; Stop 105
gttttctgctattttatgctaaaat

SEQ ID NO: 262014 - DNA, 25 bp, Artificial
  probe
  misc_feature (1)..(25): SEQ ID NO: 364; WAN024B87; Start 104; Stop 128
tctggaatagagtgagtcgttctaa

SEQ ID NO: 262015 - DNA, 25 bp, Artificial
  probe
  misc_feature (1)..(25): SEQ ID NO: 364; WAN024B87; Start 71; Stop 95
ccttgaggagtatgaatgacaatcc

SEQ ID NO: 262016 - DNA, 25 bp, Artificial
  probe
  misc_feature (1)..(25): SEQ ID NO: 364; WAN024B87; Start 166; Stop 190
gttgtggttgatttcgtaaagtttg

SEQ ID NO: 262017 - DNA, 25 bp, Artificial
  probe
  misc_feature (1)..(25): SEQ ID NO: 364; WAN024B87; Start 165; Stop 189
tgttgtggttgatttcgtaaagttt

SEQ ID NO: 262018 - DNA, 25 bp, Artificial
  probe
  misc_feature (1)..(25): SEQ ID NO: 364; WAN024B87; Start 167; Stop 191
ttgtggttgatttcgtaaagtttgg

SEQ ID NO: 262019 - DNA, 25 bp, Artificial
  probe
  misc_feature (1)..(25): SEQ ID NO: 364; WAN024B87; Start 164; Stop 188
gtgttgtggttgatttcgtaaagtt

SEQ ID NO: 262020 - DNA, 25 bp, Artificial
  probe
  misc_feature (1)..(25): SEQ ID NO: 364; WAN024B87; Start 124; Stop 148
tctaaagaaagttgccttgagattt

SEQ ID NO: 262021 - DNA, 25 bp, Artificial
  probe
  misc_feature (1)..(25): SEQ ID NO: 364; WAN024B87; Start 113; Stop 137
gagtgagtcgttctaaagaaagttg

SEQ ID NO: 262022 - DNA, 25 bp, Artificial
  probe
  misc_feature (1)..(25): SEQ ID NO: 364; WAN024B87; Start 112; Stop 136
agagtgagtcgttctaaagaaagtt

SEQ ID NO: 262023 - DNA, 25 bp, Artificial
  probe
  misc_feature (1)..(25): SEQ ID NO: 364; WAN024B87; Start 70; Stop 94
cccttgaggagtatgaatgacaatc

SEQ ID NO: 262024 - DNA, 25 bp, Artificial
  probe
  misc_feature (1)..(25): SEQ ID NO: 364; WAN024B87; Start 122; Stop 146
gttctaaagaaagttgccttgagat

SEQ ID NO: 262025 - DNA, 25 bp, Artificial
  probe
  misc_feature (1)..(25): SEQ ID NO: 364; WAN024B87; Start 256; Stop 280
ataaatagggacatttgcttgcttg

SEQ ID NO: 262026 - DNA, 25 bp, Artificial
  probe
  misc_feature (1)..(25): SEQ ID NO: 364; WAN024B87; Start 255; Stop 279
cataaatagggacatttgcttgctt

SEQ ID NO: 262027 - DNA, 25 bp, Artificial
  probe
  misc_feature (1)..(25): SEQ ID NO: 364; WAN024B87; Start 257; Stop 281
taaatagggacatttgcttgcttga

SEQ ID NO: 262028 - DNA, 25 bp, Artificial
  probe
  misc_feature (1)..(25): SEQ ID NO: 364; WAN024B87; Start 172; Stop 196
gttgatttcgtaaagtttggcgttg

SEQ ID NO: 262029 - DNA, 25 bp, Artificial
  probe
  misc_feature (1)..(25): SEQ ID NO: 364; WAN024B87; Start 123; Stop 147
ttctaaagaaagttgccttgagatt

SEQ ID NO: 262030 - DNA, 25 bp, Artificial
  probe
  misc_feature (1)..(25): SEQ ID NO: 364; WAN024B87; Start 260; Stop 284
atagggacatttgcttgcttgagta

SEQ ID NO: 262031 - DNA, 25 bp, Artificial
  probe
  misc_feature (1)..(25): SEQ ID NO: 364; WAN024B87; Start 163; Stop 187
ggtgttgtggttgatttcgtaaagt

SEQ ID NO: 262032 - DNA, 25 bp, Artificial
  probe
  misc_feature (1)..(25): SEQ ID NO: 364; WAN024B87; Start 120; Stop 144
tcgttctaaagaaagttgccttgag

SEQ ID NO: 262033 - DNA, 25 bp, Artificial
  probe
  misc_feature (1)..(25): SEQ ID NO: 364; WAN024B87; Start 117; Stop 141
gagtcgttctaaagaaagttgcctt

SEQ ID NO: 262034 - DNA, 25 bp, Artificial
  probe
  misc_feature (1)..(25): SEQ ID NO: 364; WAN024B87; Start 114; Stop 138
agtgagtcgttctaaagaaagttgc

SEQ ID NO: 262035 - DNA, 25 bp, Artificial
  probe
  misc_feature (1)..(25): SEQ ID NO: 364; WAN024B87; Start 121; Stop 145
cgttctaaagaaagttgccttgaga

SEQ ID NO: 262036 - DNA, 25 bp, Artificial
  probe
  misc_feature (1)..(25): SEQ ID NO: 364; WAN024B87; Start 119; Stop 143
gtcgttctaaagaaagttgccttga

SEQ ID NO: 262037 - DNA, 25 bp, Artificial
  probe
  misc_feature (1)..(25): SEQ ID NO: 364; WAN024B87; Start 118; Stop 142
agtcgttctaaagaaagttgccttg

SEQ ID NO: 262038 - DNA, 25 bp, Artificial
  probe
  misc_feature (1)..(25): SEQ ID NO: 364; WAN024B87; Start 106; Stop 130
tggaatagagtgagtcgttctaaag

SEQ ID NO: 262039 - DNA, 25 bp, Artificial
  probe
  misc_feature (1)..(25): SEQ ID NO: 364; WAN024B87; Start 105; Stop 129
ctggaatagagtgagtcgttctaaa

SEQ ID NO: 262040 - DNA, 25 bp, Artificial
  probe
  misc_feature (1)..(25): SEQ ID NO: 364; WAN024B87; Start 107; Stop 131
ggaatagagtgagtcgttctaaaga

SEQ ID NO: 262041 - DNA, 25 bp, Artificial
  probe
  misc_feature (1)..(25): SEQ ID NO: 364; WAN024B87; Start 72; Stop 96
cttgaggagtatgaatgacaatccc

SEQ ID NO: 262042 - DNA, 25 bp, Artificial
  probe
  misc_feature (1)..(25): SEQ ID NO: 364; WAN024B87; Start 168; Stop 192
tgtggttgatttcgtaaagtttggc

SEQ ID NO: 262043 - DNA, 25 bp, Artificial
  probe
  misc_feature (1)..(25): SEQ ID NO: 364; WAN024B87; Start 111; Stop 135
tagagtgagtcgttctaaagaaagt

SEQ ID NO: 262044 - DNA, 25 bp, Artificial
  probe
  misc_feature (1)..(25): SEQ ID NO: 364; WAN024B87; Start 69; Stop 93
tcccttgaggagtatgaatgacaat

SEQ ID NO: 262045 - DNA, 25 bp, Artificial
  probe
  misc_feature (1)..(25): SEQ ID NO: 364; WAN024B87; Start 258; Stop 282
aaatagggacatttgcttgcttgag

SEQ ID NO: 262046 - DNA, 25 bp, Artificial
  probe
  misc_feature (1)..(25): SEQ ID NO: 364; WAN024B87; Start 68; Stop 92
ttcccttgaggagtatgaatgacaa

SEQ ID NO: 262047 - DNA, 25 bp, Artificial
  probe
  misc_feature (1)..(25): SEQ ID NO: 365; WAN0249MR; Start 33; Stop 57
tcacgctattctaactcacttatct

SEQ ID NO: 262048 - DNA, 25 bp, Artificial
  probe
  misc_feature (1)..(25): SEQ ID NO: 365; WAN0249MR; Start 34; Stop 58
cacgctattctaactcacttatctt

SEQ ID NO: 262049 - DNA, 25 bp, Artificial
  probe
  misc_feature (1)..(25): SEQ ID NO: 365; WAN0249MR; Start 32; Stop 56
ttcacgctattctaactcacttatc

SEQ ID NO: 262050 - DNA, 25 bp, Artificial
  probe
  misc_feature (1)..(25): SEQ ID NO: 365; WAN0249MR; Start 146; Stop 170
atacaatgctcttctcttaccaatt

SEQ ID NO: 262051 - DNA, 25 bp, Artificial
  probe
  misc_feature (1)..(25): SEQ ID NO: 365; WAN0249MR; Start 30; Stop 54
aattcacgctattctaactcactta

SEQ ID NO: 262052 - DNA, 25 bp, Artificial
  probe
  misc_feature (1)..(25): SEQ ID NO: 365; WAN0249MR; Start 31; Stop 55
attcacgctattctaactcacttat

SEQ ID NO: 262053 - DNA, 25 bp, Artificial
  probe
  misc_feature (1)..(25): SEQ ID NO: 365; WAN0249MR; Start 144; Stop 168
ttatacaatgctcttctcttaccaa

SEQ ID NO: 262054 - DNA, 25 bp, Artificial
  probe
  misc_feature (1)..(25): SEQ ID NO: 365; WAN0249MR; Start 145; Stop 169
tatacaatgctcttctcttaccaat

SEQ ID NO: 262055 - DNA, 25 bp, Artificial
  probe
  misc_feature (1)..(25): SEQ ID NO: 365; WAN0249MR; Start 4; Stop 28
ctaacctcctctcatttcattcact

SEQ ID NO: 262056 - DNA, 25 bp, Artificial
  probe
  misc_feature (1)..(25): SEQ ID NO: 365; WAN0249MR; Start 5; Stop 29
taacctcctctcatttcattcactg

SEQ ID NO: 262057 - DNA, 25 bp, Artificial
  probe
  misc_feature (1)..(25): SEQ ID NO: 365; WAN0249MR; Start 35; Stop 59
acgctattctaactcacttatctta

SEQ ID NO: 262058 - DNA, 25 bp, Artificial
  probe
  misc_feature (1)..(25): SEQ ID NO: 365; WAN0249MR; Start 3; Stop 27
gctaacctcctctcatttcattcac

SEQ ID NO: 262059 - DNA, 25 bp, Artificial
  probe
  misc_feature (1)..(25): SEQ ID NO: 365; WAN0249MR; Start 138; Stop 162
tggagtttatacaatgctcttctct

SEQ ID NO: 262060 - DNA, 25 bp, Artificial
  probe
  misc_feature (1)..(25): SEQ ID NO: 365; WAN0249MR; Start 136; Stop 160
tctggagtttatacaatgctcttct

SEQ ID NO: 262061 - DNA, 25 bp, Artificial
  probe
  misc_feature (1)..(25): SEQ ID NO: 365; WAN0249MR; Start 147; Stop 171
tacaatgctcttctcttaccaattt

SEQ ID NO: 262062 - DNA, 25 bp, Artificial
  probe
  misc_feature (1)..(25): SEQ ID NO: 365; WAN0249MR; Start 137; Stop 161
ctggagtttatacaatgctcttctc

SEQ ID NO: 262063 - DNA, 25 bp, Artificial
  probe
  misc_feature (1)..(25): SEQ ID NO: 365; WAN0249MR; Start 135; Stop 159
atctggagtttatacaatgctcttc

SEQ ID NO: 262064 - DNA, 25 bp, Artificial
  probe
  misc_feature (1)..(25): SEQ ID NO: 365; WAN0249MR; Start 139; Stop 163
ggagtttatacaatgctcttctctt

SEQ ID NO: 262065 - DNA, 25 bp, Artificial
  probe
  misc_feature (1)..(25): SEQ ID NO: 365; WAN0249MR; Start 6; Stop 30
aacctcctctcatttcattcactga

SEQ ID NO: 262066 - DNA, 25 bp, Artificial
  probe
  misc_feature (1)..(25): SEQ ID NO: 365; WAN0249MR; Start 143; Stop 167
tttatacaatgctcttctcttacca

SEQ ID NO: 262067 - DNA, 25 bp, Artificial
  probe
  misc_feature (1)..(25): SEQ ID NO: 365; WAN0249MR; Start 142; Stop 166
gtttatacaatgctcttctcttacc

SEQ ID NO: 262068 - DNA, 25 bp, Artificial
  probe
  misc_feature (1)..(25): SEQ ID NO: 365; WAN0249MR; Start 2; Stop 26
cgctaacctcctctcatttcattca

SEQ ID NO: 262069 - DNA, 25 bp, Artificial
  probe
  misc_feature (1)..(25): SEQ ID NO: 365; WAN0249MR; Start 1; Stop 25
acgctaacctcctctcatttcattc

SEQ ID NO: 262070 - DNA, 25 bp, Artificial
  probe
  misc_feature (1)..(25): SEQ ID NO: 365; WAN0249MR; Start 36; Stop 60
cgctattctaactcacttatcttat

SEQ ID NO: 262071 - DNA, 25 bp, Artificial
  probe
  misc_feature (1)..(25): SEQ ID NO: 365; WAN0249MR; Start 134; Stop 158
tatctggagtttatacaatgctctt

SEQ ID NO: 262072 - DNA, 25 bp, Artificial
  probe
  misc_feature (1)..(25): SEQ ID NO: 365; WAN0249MR; Start 204; Stop 228
attccaaataagatagtacccaagt

SEQ ID NO: 262073 - DNA, 25 bp, Artificial
  probe
  misc_feature (1)..(25): SEQ ID NO: 365; WAN0249MR; Start 29; Stop 53
gaattcacgctattctaactcactt

SEQ ID NO: 262074 - DNA, 25 bp, Artificial
  probe
  misc_feature (1)..(25): SEQ ID NO: 365; WAN0249MR; Start 133; Stop 157
atatctggagtttatacaatgctct

SEQ ID NO: 262075 - DNA, 25 bp, Artificial
  probe
  misc_feature (1)..(25): SEQ ID NO: 365; WAN0249MR; Start 141; Stop 165
agtttatacaatgctcttctcttac

SEQ ID NO: 262076 - DNA, 25 bp, Artificial
  probe
  misc_feature (1)..(25): SEQ ID NO: 365; WAN0249MR; Start 205; Stop 229
ttccaaataagatagtacccaagta

SEQ ID NO: 262077 - DNA, 25 bp, Artificial
  probe
  misc_feature (1)..(25): SEQ ID NO: 365; WAN0249MR; Start 148; Stop 172
acaatgctcttctcttaccaatttt

SEQ ID NO: 262078 - DNA, 25 bp, Artificial
  probe
  misc_feature (1)..(25): SEQ ID NO: 365; WAN0249MR; Start 79; Stop 103
ctccaagtcaagcattttgtatcta

SEQ ID NO: 262079 - DNA, 25 bp, Artificial
  probe
  misc_feature (1)..(25): SEQ ID NO: 365; WAN0249MR; Start 206; Stop 230
tccaaataagatagtacccaagtat

SEQ ID NO: 262080 - DNA, 25 bp, Artificial
  probe
  misc_feature (1)..(25): SEQ ID NO: 366; WAN024DZE; Start 13; Stop 37
taaaggtagaactaaggtctccaaa

SEQ ID NO: 262081 - DNA, 25 bp, Artificial
  probe
  misc_feature (1)..(25): SEQ ID NO: 366; WAN024DZE; Start 12; Stop 36
ttaaaggtagaactaaggtctccaa

SEQ ID NO: 262082 - DNA, 25 bp, Artificial
  probe
  misc_feature (1)..(25): SEQ ID NO: 366; WAN024DZE; Start 40; Stop 64
cttcagtgtgggttcaattcctact

SEQ ID NO: 262083 - DNA, 25 bp, Artificial
  probe
  misc_feature (1)..(25): SEQ ID NO: 366; WAN024DZE; Start 11; Stop 35
tttaaaggtagaactaaggtctcca

SEQ ID NO: 262084 - DNA, 25 bp, Artificial
  probe
  misc_feature (1)..(25): SEQ ID NO: 366; WAN024DZE; Start 10; Stop 34
gtttaaaggtagaactaaggtctcc

SEQ ID NO: 262085 - DNA, 25 bp, Artificial
  probe
  misc_feature (1)..(25): SEQ ID NO: 366; WAN024DZE; Start 39; Stop 63
ccttcagtgtgggttcaattcctac

SEQ ID NO: 262086 - DNA, 25 bp, Artificial
  probe
  misc_feature (1)..(25): SEQ ID NO: 366; WAN024DZE; Start 15; Stop 39
aaggtagaactaaggtctccaaaac

SEQ ID NO: 262087 - DNA, 25 bp, Artificial
  probe
  misc_feature (1)..(25): SEQ ID NO: 366; WAN024DZE; Start 14; Stop 38
aaaggtagaactaaggtctccaaaa

SEQ ID NO: 262088 - DNA, 25 bp, Artificial
  probe
  misc_feature (1)..(25): SEQ ID NO: 366; WAN024DZE; Start 1; Stop 25
acgggcatagtttaaaggtagaact

SEQ ID NO: 262089 - DNA, 25 bp, Artificial
  probe
  misc_feature (1)..(25): SEQ ID NO: 366; WAN024DZE; Start 38; Stop 62
accttcagtgtgggttcaattccta

SEQ ID NO: 262090 - DNA, 25 bp, Artificial
  probe
  misc_feature (1)..(25): SEQ ID NO: 366; WAN024DZE; Start 16; Stop 40
aggtagaactaaggtctccaaaacc

SEQ ID NO: 262091 - DNA, 25 bp, Artificial
  probe
  misc_feature (1)..(25): SEQ ID NO: 366; WAN024DZE; Start 9; Stop 33
agtttaaaggtagaactaaggtctc

SEQ ID NO: 262092 - DNA, 25 bp, Artificial
  probe
  misc_feature (1)..(25): SEQ ID NO: 366; WAN024DZE; Start 2; Stop 26
cgggcatagtttaaaggtagaacta

SEQ ID NO: 262093 - DNA, 25 bp, Artificial
  probe
  misc_feature (1)..(25): SEQ ID NO: 366; WAN024DZE; Start 3; Stop 27
gggcatagtttaaaggtagaactaa

SEQ ID NO: 262094 - DNA, 25 bp, Artificial
  probe
  misc_feature (1)..(25): SEQ ID NO: 366; WAN024DZE; Start 41; Stop 65
ttcagtgtgggttcaattcctactg

SEQ ID NO: 262095 - DNA, 25 bp, Artificial
  probe
  misc_feature (1)..(25): SEQ ID NO: 366; WAN024DZE; Start 5; Stop 29
gcatagtttaaaggtagaactaagg

SEQ ID NO: 262096 - DNA, 25 bp, Artificial
  probe
  misc_feature (1)..(25): SEQ ID NO: 366; WAN024DZE; Start 4; Stop 28
ggcatagtttaaaggtagaactaag

SEQ ID NO: 262097 - DNA, 25 bp, Artificial
  probe
  misc_feature (1)..(25): SEQ ID NO: 366; WAN024DZE; Start 36; Stop 60
aaaccttcagtgtgggttcaattcc

SEQ ID NO: 262098 - DNA, 25 bp, Artificial
  probe
  misc_feature (1)..(25): SEQ ID NO: 366; WAN024DZE; Start 8; Stop 32
tagtttaaaggtagaactaaggtct

SEQ ID NO: 262099 - DNA, 25 bp, Artificial
  probe
  misc_feature (1)..(25): SEQ ID NO: 366; WAN024DZE; Start 35; Stop 59
aaaaccttcagtgtgggttcaattc

SEQ ID NO: 262100 - DNA, 25 bp, Artificial
  probe
  misc_feature (1)..(25): SEQ ID NO: 366; WAN024DZE; Start 34; Stop 58
caaaaccttcagtgtgggttcaatt

SEQ ID NO: 262101 - DNA, 25 bp, Artificial
  probe
  misc_feature (1)..(25): SEQ ID NO: 366; WAN024DZE; Start 17; Stop 41
ggtagaactaaggtctccaaaacct

SEQ ID NO: 262102 - DNA, 25 bp, Artificial
  probe
  misc_feature (1)..(25): SEQ ID NO: 366; WAN024DZE; Start 6; Stop 30
catagtttaaaggtagaactaaggt

SEQ ID NO: 262103 - DNA, 25 bp, Artificial
  probe
  misc_feature (1)..(25): SEQ ID NO: 366; WAN024DZE; Start 37; Stop 61
aaccttcagtgtgggttcaattcct

SEQ ID NO: 262104 - DNA, 25 bp, Artificial
  probe
  misc_feature (1)..(25): SEQ ID NO: 366; WAN024DZE; Start 7; Stop 31
atagtttaaaggtagaactaaggtc

SEQ ID NO: 262105 - DNA, 25 bp, Artificial
  probe
  misc_feature (1)..(25): SEQ ID NO: 366; WAN024DZE; Start 42; Stop 66
tcagtgtgggttcaattcctactgc

SEQ ID NO: 262106 - DNA, 25 bp, Artificial
  probe
  misc_feature (1)..(25): SEQ ID NO: 366; WAN024DZE; Start 33; Stop 57
ccaaaaccttcagtgtgggttcaat

SEQ ID NO: 262107 - DNA, 25 bp, Artificial
  probe
  misc_feature (1)..(25): SEQ ID NO: 366; WAN024DZE; Start 32; Stop 56
tccaaaaccttcagtgtgggttcaa

SEQ ID NO: 262108 - DNA, 25 bp, Artificial
  probe
  misc_feature (1)..(25): SEQ ID NO: 366; WAN024DZE; Start 30; Stop 54
tctccaaaaccttcagtgtgggttc

SEQ ID NO: 262109 - DNA, 25 bp, Artificial
  probe
  misc_feature (1)..(25): SEQ ID NO: 366; WAN024DZE; Start 31; Stop 55
ctccaaaaccttcagtgtgggttca

SEQ ID NO: 262110 - DNA, 25 bp, Artificial
  probe
  misc_feature (1)..(25): SEQ ID NO: 366; WAN024DZE; Start 29; Stop 53
gtctccaaaaccttcagtgtgggtt

SEQ ID NO: 262111 - DNA, 25 bp, Artificial
  probe
  misc_feature (1)..(25): SEQ ID NO: 367; WAN024AQR; Start 10; Stop 34
aaatgaaagccttactagaacactt

SEQ ID NO: 262112 - DNA, 25 bp, Artificial
  probe
  misc_feature (1)..(25): SEQ ID NO: 367; WAN024AQR; Start 9; Stop 33
taaatgaaagccttactagaacact

SEQ ID NO: 262113 - DNA, 25 bp, Artificial
  probe
  misc_feature (1)..(25): SEQ ID NO: 367; WAN024AQR; Start 13; Stop 37
tgaaagccttactagaacacttatt

SEQ ID NO: 262114 - DNA, 25 bp, Artificial
  probe
  misc_feature (1)..(25): SEQ ID NO: 367; WAN024AQR; Start 11; Stop 35
aatgaaagccttactagaacactta

SEQ ID NO: 262115 - DNA, 25 bp, Artificial
  probe
  misc_feature (1)..(25): SEQ ID NO: 367; WAN024AQR; Start 12; Stop 36
atgaaagccttactagaacacttat

SEQ ID NO: 262116 - DNA, 25 bp, Artificial
  probe
  misc_feature (1)..(25): SEQ ID NO: 367; WAN024AQR; Start 7; Stop 31
ggtaaatgaaagccttactagaaca

SEQ ID NO: 262117 - DNA, 25 bp, Artificial
  probe
  misc_feature (1)..(25): SEQ ID NO: 367; WAN024AQR; Start 6; Stop 30
aggtaaatgaaagccttactagaac

SEQ ID NO: 262118 - DNA, 25 bp, Artificial
  probe
  misc_feature (1)..(25): SEQ ID NO: 367; WAN024AQR; Start 8; Stop 32
gtaaatgaaagccttactagaacac

SEQ ID NO: 262119 - DNA, 25 bp, Artificial
  probe
  misc_feature (1)..(25): SEQ ID NO: 367; WAN024AQR; Start 14; Stop 38
gaaagccttactagaacacttattt

SEQ ID NO: 262120 - DNA, 25 bp, Artificial
  probe
  misc_feature (1)..(25): SEQ ID NO: 367; WAN024AQR; Start 39; Stop 63
aaagtaaaatagaaagaggtgggtc

SEQ ID NO: 262121 - DNA, 25 bp, Artificial
  probe
  misc_feature (1)..(25): SEQ ID NO: 367; WAN024AQR; Start 40; Stop 64
aagtaaaatagaaagaggtgggtct

SEQ ID NO: 262122 - DNA, 25 bp, Artificial
  probe
  misc_feature (1)..(25): SEQ ID NO: 367; WAN024AQR; Start 38; Stop 62
taaagtaaaatagaaagaggtgggt

SEQ ID NO: 262123 - DNA, 25 bp, Artificial
  probe
  misc_feature (1)..(25): SEQ ID NO: 367; WAN024AQR; Start 41; Stop 65
agtaaaatagaaagaggtgggtcta

SEQ ID NO: 262124 - DNA, 25 bp, Artificial
  probe
  misc_feature (1)..(25): SEQ ID NO: 367; WAN024AQR; Start 16; Stop 40
aagccttactagaacacttatttaa

SEQ ID NO: 262125 - DNA, 25 bp, Artificial
  probe
  misc_feature (1)..(25): SEQ ID NO: 367; WAN024AQR; Start 15; Stop 39
aaagccttactagaacacttattta

SEQ ID NO: 262126 - DNA, 25 bp, Artificial
  probe
  misc_feature (1)..(25): SEQ ID NO: 367; WAN024AQR; Start 37; Stop 61
ttaaagtaaaatagaaagaggtggg

SEQ ID NO: 262127 - DNA, 25 bp, Artificial
  probe
  misc_feature (1)..(25): SEQ ID NO: 367; WAN024AQR; Start 17; Stop 41
agccttactagaacacttatttaaa

SEQ ID NO: 262128 - DNA, 25 bp, Artificial
  probe
  misc_feature (1)..(25): SEQ ID NO: 367; WAN024AQR; Start 18; Stop 42
gccttactagaacacttatttaaag

SEQ ID NO: 262129 - DNA, 25 bp, Artificial
  probe
  misc_feature (1)..(25): SEQ ID NO: 367; WAN024AQR; Start 5; Stop 29
aaggtaaatgaaagccttactagaa

SEQ ID NO: 262130 - DNA, 25 bp, Artificial
  probe
  misc_feature (1)..(25): SEQ ID NO: 367; WAN024AQR; Start 4; Stop 28
taaggtaaatgaaagccttactaga

SEQ ID NO: 262131 - DNA, 25 bp, Artificial
  probe
  misc_feature (1)..(25): SEQ ID NO: 367; WAN024AQR; Start 36; Stop 60
tttaaagtaaaatagaaagaggtgg

SEQ ID NO: 262132 - DNA, 25 bp, Artificial
  probe
  misc_feature (1)..(25): SEQ ID NO: 368; WAN024ADF; Start 118; Stop 142
ttatgaactggaatgtgacaaccaa

SEQ ID NO: 262133 - DNA, 25 bp, Artificial
  probe
  misc_feature (1)..(25): SEQ ID NO: 368; WAN024ADF; Start 116; Stop 140
atttatgaactggaatgtgacaacc

SEQ ID NO: 262134 - DNA, 25 bp, Artificial
  probe
  misc_feature (1)..(25): SEQ ID NO: 368; WAN024ADF; Start 114; Stop 138
tgatttatgaactggaatgtgacaa

SEQ ID NO: 262135 - DNA, 25 bp, Artificial
  probe
  misc_feature (1)..(25): SEQ ID NO: 368; WAN024ADF; Start 113; Stop 137
ttgatttatgaactggaatgtgaca

SEQ ID NO: 262136 - DNA, 25 bp, Artificial
  probe
  misc_feature (1)..(25): SEQ ID NO: 368; WAN024ADF; Start 115; Stop 139
gatttatgaactggaatgtgacaac

SEQ ID NO: 262137 - DNA, 25 bp, Artificial
  probe
  misc_feature (1)..(25): SEQ ID NO: 368; WAN024ADF; Start 112; Stop 136
tttgatttatgaactggaatgtgac

SEQ ID NO: 262138 - DNA, 25 bp, Artificial
  probe
  misc_feature (1)..(25): SEQ ID NO: 368; WAN024ADF; Start 119; Stop 143
tatgaactggaatgtgacaaccaaa

SEQ ID NO: 262139 - DNA, 25 bp, Artificial
  probe
  misc_feature (1)..(25): SEQ ID NO: 368; WAN024ADF; Start 117; Stop 141
tttatgaactggaatgtgacaacca

SEQ ID NO: 262140 - DNA, 25 bp, Artificial
  probe
  misc_feature (1)..(25): SEQ ID NO: 368; WAN024ADF; Start 88; Stop 112
catatacaatgaaaccgtcacattt

SEQ ID NO: 262141 - DNA, 25 bp, Artificial
  probe
  misc_feature (1)..(25): SEQ ID NO: 368; WAN024ADF; Start 87; Stop 111
tcatatacaatgaaaccgtcacatt

SEQ ID NO: 262142 - DNA, 25 bp, Artificial
  probe
  misc_feature (1)..(25): SEQ ID NO: 368; WAN024ADF; Start 75; Stop 99
tttgaagcggtttcatatacaatga

SEQ ID NO: 262143 - DNA, 25 bp, Artificial
  probe
  misc_feature (1)..(25): SEQ ID NO: 368; WAN024ADF; Start 111; Stop 135
ttttgatttatgaactggaatgtga

SEQ ID NO: 262144 - DNA, 25 bp, Artificial
  probe
  misc_feature (1)..(25): SEQ ID NO: 368; WAN024ADF; Start 4; Stop 28
tttccctccattagagcttgatttt

SEQ ID NO: 262145 - DNA, 25 bp, Artificial
  probe
  misc_feature (1)..(25): SEQ ID NO: 368; WAN024ADF; Start 8; Stop 32
cctccattagagcttgattttcact

SEQ ID NO: 262146 - DNA, 25 bp, Artificial
  probe
  misc_feature (1)..(25): SEQ ID NO: 368; WAN024ADF; Start 5; Stop 29
ttccctccattagagcttgattttc

SEQ ID NO: 262147 - DNA, 25 bp, Artificial
  probe
  misc_feature (1)..(25): SEQ ID NO: 368; WAN024ADF; Start 120; Stop 144
atgaactggaatgtgacaaccaaaa

SEQ ID NO: 262148 - DNA, 25 bp, Artificial
  probe
  misc_feature (1)..(25): SEQ ID NO: 368; WAN024ADF; Start 10; Stop 34
tccattagagcttgattttcactag

SEQ ID NO: 262149 - DNA, 25 bp, Artificial
  probe
  misc_feature (1)..(25): SEQ ID NO: 368; WAN024ADF; Start 9; Stop 33
ctccattagagcttgattttcacta

SEQ ID NO: 262150 - DNA, 25 bp, Artificial
  probe
  misc_feature (1)..(25): SEQ ID NO: 368; WAN024ADF; Start 123; Stop 147
aactggaatgtgacaaccaaaacaa

SEQ ID NO: 262151 - DNA, 25 bp, Artificial
  probe
  misc_feature (1)..(25): SEQ ID NO: 368; WAN024ADF; Start 7; Stop 31
ccctccattagagcttgattttcac

SEQ ID NO: 262152 - DNA, 25 bp, Artificial
  probe
  misc_feature (1)..(25): SEQ ID NO: 368; WAN024ADF; Start 134; Stop 158
gacaaccaaaacaagaccgtcaatt

SEQ ID NO: 262153 - DNA, 25 bp, Artificial
  probe
  misc_feature (1)..(25): SEQ ID NO: 368; WAN024ADF; Start 6; Stop 30
tccctccattagagcttgattttca

SEQ ID NO: 262154 - DNA, 25 bp, Artificial
  probe
  misc_feature (1)..(25): SEQ ID NO: 368; WAN024ADF; Start 125; Stop 149
ctggaatgtgacaaccaaaacaaga

SEQ ID NO: 262155 - DNA, 25 bp, Artificial
  probe
  misc_feature (1)..(25): SEQ ID NO: 368; WAN024ADF; Start 127; Stop 151
ggaatgtgacaaccaaaacaagacc

SEQ ID NO: 262156 - DNA, 25 bp, Artificial
  probe
  misc_feature (1)..(25): SEQ ID NO: 368; WAN024ADF; Start 126; Stop 150
tggaatgtgacaaccaaaacaagac

SEQ ID NO: 262157 - DNA, 25 bp, Artificial
  probe
  misc_feature (1)..(25): SEQ ID NO: 368; WAN024ADF; Start 124; Stop 148
actggaatgtgacaaccaaaacaag

SEQ ID NO: 262158 - DNA, 25 bp, Artificial
  probe
  misc_feature (1)..(25): SEQ ID NO: 368; WAN024ADF; Start 122; Stop 146
gaactggaatgtgacaaccaaaaca

SEQ ID NO: 262159 - DNA, 25 bp, Artificial
  probe
  misc_feature (1)..(25): SEQ ID NO: 368; WAN024ADF; Start 121; Stop 145
tgaactggaatgtgacaaccaaaac

SEQ ID NO: 262160 - DNA, 25 bp, Artificial
  probe
  misc_feature (1)..(25): SEQ ID NO: 368; WAN024ADF; Start 128; Stop 152
gaatgtgacaaccaaaacaagaccg

SEQ ID NO: 262161 - DNA, 25 bp, Artificial
  probe
  misc_feature (1)..(25): SEQ ID NO: 368; WAN024ADF; Start 74; Stop 98
ttttgaagcggtttcatatacaatg

SEQ ID NO: 262162 - DNA, 25 bp, Artificial
  probe
  misc_feature (1)..(25): SEQ ID NO: 368; WAN024ADF; Start 89; Stop 113
atatacaatgaaaccgtcacatttt

SEQ ID NO: 262163 - DNA, 25 bp, Artificial
  probe
  misc_feature (1)..(25): SEQ ID NO: 368; WAN024ADF; Start 11; Stop 35
ccattagagcttgattttcactagt

SEQ ID NO: 262164 - DNA, 25 bp, Artificial
  probe
  misc_feature (1)..(25): SEQ ID NO: 368; WAN024ADF; Start 129; Stop 153
aatgtgacaaccaaaacaagaccgt

SEQ ID NO: 262165 - DNA, 25 bp, Artificial
  probe
  misc_feature (1)..(25): SEQ ID NO: 369; WAN024AAG; Start 4; Stop 28
aagttatcttatcgttagctgtcaa

SEQ ID NO: 262166 - DNA, 25 bp, Artificial
  probe
  misc_feature (1)..(25): SEQ ID NO: 369; WAN024AAG; Start 3; Stop 27
taagttatcttatcgttagctgtca

SEQ ID NO: 262167 - DNA, 25 bp, Artificial
  probe
  misc_feature (1)..(25): SEQ ID NO: 369; WAN024AAG; Start 1; Stop 25
actaagttatcttatcgttagctgt

SEQ ID NO: 262168 - DNA, 25 bp, Artificial
  probe
  misc_feature (1)..(25): SEQ ID NO: 369; WAN024AAG; Start 5; Stop 29
agttatcttatcgttagctgtcaaa

SEQ ID NO: 262169 - DNA, 25 bp, Artificial
  probe
  misc_feature (1)..(25): SEQ ID NO: 369; WAN024AAG; Start 2; Stop 26
ctaagttatcttatcgttagctgtc

SEQ ID NO: 262170 - DNA, 25 bp, Artificial
  probe
  misc_feature (1)..(25): SEQ ID NO: 369; WAN024AAG; Start 40; Stop 64
tttgataggctggcgatatgatttt

SEQ ID NO: 262171 - DNA, 25 bp, Artificial
  probe
  misc_feature (1)..(25): SEQ ID NO: 369; WAN024AAG; Start 39; Stop 63
ttttgataggctggcgatatgattt

SEQ ID NO: 262172 - DNA, 25 bp, Artificial
  probe
  misc_feature (1)..(25): SEQ ID NO: 369; WAN024AAG; Start 164; Stop 188
gtcagacaagtataatgttgaaaga

SEQ ID NO: 262173 - DNA, 25 bp, Artificial
  probe
  misc_feature (1)..(25): SEQ ID NO: 369; WAN024AAG; Start 169; Stop 193
acaagtataatgttgaaagaatggt

SEQ ID NO: 262174 - DNA, 25 bp, Artificial
  probe
  misc_feature (1)..(25): SEQ ID NO: 369; WAN024AAG; Start 38; Stop 62
gttttgataggctggcgatatgatt

SEQ ID NO: 262175 - DNA, 25 bp, Artificial
  probe
  misc_feature (1)..(25): SEQ ID NO: 369; WAN024AAG; Start 163; Stop 187
tgtcagacaagtataatgttgaaag

SEQ ID NO: 262176 - DNA, 25 bp, Artificial
  probe
  misc_feature (1)..(25): SEQ ID NO: 369; WAN024AAG; Start 168; Stop 192
gacaagtataatgttgaaagaatgg

SEQ ID NO: 262177 - DNA, 25 bp, Artificial
  probe
  misc_feature (1)..(25): SEQ ID NO: 369; WAN024AAG; Start 165; Stop 189
tcagacaagtataatgttgaaagaa

SEQ ID NO: 262178 - DNA, 25 bp, Artificial
  probe
  misc_feature (1)..(25): SEQ ID NO: 369; WAN024AAG; Start 35; Stop 59
taggttttgataggctggcgatatg

SEQ ID NO: 262179 - DNA, 25 bp, Artificial
  probe
  misc_feature (1)..(25): SEQ ID NO: 369; WAN024AAG; Start 34; Stop 58
gtaggttttgataggctggcgatat

SEQ ID NO: 262180 - DNA, 25 bp, Artificial
  probe
  misc_feature (1)..(25): SEQ ID NO: 369; WAN024AAG; Start 12; Stop 36
ttatcgttagctgtcaaaactggta

SEQ ID NO: 262181 - DNA, 25 bp, Artificial
  probe
  misc_feature (1)..(25): SEQ ID NO: 369; WAN024AAG; Start 13; Stop 37
tatcgttagctgtcaaaactggtag

SEQ ID NO: 262182 - DNA, 25 bp, Artificial
  probe
  misc_feature (1)..(25): SEQ ID NO: 369; WAN024AAG; Start 9; Stop 33
atcttatcgttagctgtcaaaactg

SEQ ID NO: 262183 - DNA, 25 bp, Artificial
  probe
  misc_feature (1)..(25): SEQ ID NO: 369; WAN024AAG; Start 10; Stop 34
tcttatcgttagctgtcaaaactgg

SEQ ID NO: 262184 - DNA, 25 bp, Artificial
  probe
  misc_feature (1)..(25): SEQ ID NO: 369; WAN024AAG; Start 11; Stop 35
cttatcgttagctgtcaaaactggt

SEQ ID NO: 262185 - DNA, 25 bp, Artificial
  probe
  misc_feature (1)..(25): SEQ ID NO: 369; WAN024AAG; Start 37; Stop 61
ggttttgataggctggcgatatgat

SEQ ID NO: 262186 - DNA, 25 bp, Artificial
  probe
  misc_feature (1)..(25): SEQ ID NO: 369; WAN024AAG; Start 160; Stop 184
cattgtcagacaagtataatgttga

SEQ ID NO: 262187 - DNA, 25 bp, Artificial
  probe
  misc_feature (1)..(25): SEQ ID NO: 369; WAN024AAG; Start 8; Stop 32
tatcttatcgttagctgtcaaaact

SEQ ID NO: 262188 - DNA, 25 bp, Artificial
  probe
  misc_feature (1)..(25): SEQ ID NO: 369; WAN024AAG; Start 170; Stop 194
caagtataatgttgaaagaatggta

SEQ ID NO: 262189 - DNA, 25 bp, Artificial
  probe
  misc_feature (1)..(25): SEQ ID NO: 369; WAN024AAG; Start 167; Stop 191
agacaagtataatgttgaaagaatg

SEQ ID NO: 262190 - DNA, 25 bp, Artificial
  probe
  misc_feature (1)..(25): SEQ ID NO: 369; WAN024AAG; Start 166; Stop 190
cagacaagtataatgttgaaagaat

SEQ ID NO: 262191 - DNA, 25 bp, Artificial
  probe
  misc_feature (1)..(25): SEQ ID NO: 369; WAN024AAG; Start 6; Stop 30
gttatcttatcgttagctgtcaaaa

SEQ ID NO: 262192 - DNA, 25 bp, Artificial
  probe
  misc_feature (1)..(25): SEQ ID NO: 369; WAN024AAG; Start 172; Stop 196
agtataatgttgaaagaatggtaag

SEQ ID NO: 262193 - DNA, 25 bp, Artificial
  probe
  misc_feature (1)..(25): SEQ ID NO: 369; WAN024AAG; Start 7; Stop 31
ttatcttatcgttagctgtcaaaac

SEQ ID NO: 262194 - DNA, 25 bp, Artificial
  probe
  misc_feature (1)..(25): SEQ ID NO: 369; WAN024AAG; Start 161; Stop 185
attgtcagacaagtataatgttgaa

SEQ ID NO: 262195 - DNA, 25 bp, Artificial
  probe
  misc_feature (1)..(25): SEQ ID NO: 369; WAN024AAG; Start 36; Stop 60
aggttttgataggctggcgatatga

SEQ ID NO: 262196 - DNA, 25 bp, Artificial
  probe
  misc_feature (1)..(25): SEQ ID NO: 369; WAN024AAG; Start 14; Stop 38
atcgttagctgtcaaaactggtagg

SEQ ID NO: 262197 - DNA, 25 bp, Artificial
  probe
  misc_feature (1)..(25): SEQ ID NO: 369; WAN024AAG; Start 17; Stop 41
gttagctgtcaaaactggtaggttt

SEQ ID NO: 262198 - DNA, 25 bp, Artificial
  probe
  misc_feature (1)..(25): SEQ ID NO: 370; WAN0249K6; Start 44; Stop 68
tgatttcaaaagggaattatgccat

SEQ ID NO: 262199 - DNA, 25 bp, Artificial
  probe
  misc_feature (1)..(25): SEQ ID NO: 370; WAN0249K6; Start 43; Stop 67
ttgatttcaaaagggaattatgcca

SEQ ID NO: 262200 - DNA, 25 bp, Artificial
  probe
  misc_feature (1)..(25): SEQ ID NO: 370; WAN0249K6; Start 45; Stop 69
gatttcaaaagggaattatgccatg

SEQ ID NO: 262201 - DNA, 25 bp, Artificial
  probe
  misc_feature (1)..(25): SEQ ID NO: 370; WAN0249K6; Start 42; Stop 66
attgatttcaaaagggaattatgcc

SEQ ID NO: 262202 - DNA, 25 bp, Artificial
  probe
  misc_feature (1)..(25): SEQ ID NO: 370; WAN0249K6; Start 67; Stop 91
atggaaagaactctgccacaaactc

SEQ ID NO: 262203 - DNA, 25 bp, Artificial
  probe
  misc_feature (1)..(25): SEQ ID NO: 370; WAN0249K6; Start 66; Stop 90
catggaaagaactctgccacaaact

SEQ ID NO: 262204 - DNA, 25 bp, Artificial
  probe
  misc_feature (1)..(25): SEQ ID NO: 370; WAN0249K6; Start 41; Stop 65
aattgatttcaaaagggaattatgc

SEQ ID NO: 262205 - DNA, 25 bp, Artificial
  probe
  misc_feature (1)..(25): SEQ ID NO: 370; WAN0249K6; Start 57; Stop 81
gaattatgccatggaaagaactctg

SEQ ID NO: 262206 - DNA, 25 bp, Artificial
  probe
  misc_feature (1)..(25): SEQ ID NO: 370; WAN0249K6; Start 52; Stop 76
aaagggaattatgccatggaaagaa

SEQ ID NO: 262207 - DNA, 25 bp, Artificial
  probe
  misc_feature (1)..(25): SEQ ID NO: 370; WAN0249K6; Start 56; Stop 80
ggaattatgccatggaaagaactct

SEQ ID NO: 262208 - DNA, 25 bp, Artificial
  probe
  misc_feature (1)..(25): SEQ ID NO: 370; WAN0249K6; Start 53; Stop 77
aagggaattatgccatggaaagaac

SEQ ID NO: 262209 - DNA, 25 bp, Artificial
  probe
  misc_feature (1)..(25): SEQ ID NO: 370; WAN0249K6; Start 58; Stop 82
aattatgccatggaaagaactctgc

SEQ ID NO: 262210 - DNA, 25 bp, Artificial
  probe
  misc_feature (1)..(25): SEQ ID NO: 370; WAN0249K6; Start 55; Stop 79
gggaattatgccatggaaagaactc

SEQ ID NO: 262211 - DNA, 25 bp, Artificial
  probe
  misc_feature (1)..(25): SEQ ID NO: 370; WAN0249K6; Start 54; Stop 78
agggaattatgccatggaaagaact

SEQ ID NO: 262212 - DNA, 25 bp, Artificial
  probe
  misc_feature (1)..(25): SEQ ID NO: 370; WAN0249K6; Start 59; Stop 83
attatgccatggaaagaactctgcc

SEQ ID NO: 262213 - DNA, 25 bp, Artificial
  probe
  misc_feature (1)..(25): SEQ ID NO: 370; WAN0249K6; Start 51; Stop 75
aaaagggaattatgccatggaaaga

SEQ ID NO: 262214 - DNA, 25 bp, Artificial
  probe
  misc_feature (1)..(25): SEQ ID NO: 370; WAN0249K6; Start 50; Stop 74
caaaagggaattatgccatggaaag

SEQ ID NO: 262215 - DNA, 25 bp, Artificial
  probe
  misc_feature (1)..(25): SEQ ID NO: 370; WAN0249K6; Start 46; Stop 70
atttcaaaagggaattatgccatgg

SEQ ID NO: 262216 - DNA, 25 bp, Artificial
  probe
  misc_feature (1)..(25): SEQ ID NO: 370; WAN0249K6; Start 49; Stop 73
tcaaaagggaattatgccatggaaa

SEQ ID NO: 262217 - DNA, 25 bp, Artificial
  probe
  misc_feature (1)..(25): SEQ ID NO: 370; WAN0249K6; Start 48; Stop 72
ttcaaaagggaattatgccatggaa

SEQ ID NO: 262218 - DNA, 25 bp, Artificial
  probe
  misc_feature (1)..(25): SEQ ID NO: 370; WAN0249K6; Start 47; Stop 71
tttcaaaagggaattatgccatgga

SEQ ID NO: 262219 - DNA, 25 bp, Artificial
  probe
  misc_feature (1)..(25): SEQ ID NO: 370; WAN0249K6; Start 40; Stop 64
caattgatttcaaaagggaattatg

SEQ ID NO: 262220 - DNA, 25 bp, Artificial
  probe
  misc_feature (1)..(25): SEQ ID NO: 370; WAN0249K6; Start 65; Stop 89
ccatggaaagaactctgccacaaac

SEQ ID NO: 262221 - DNA, 25 bp, Artificial
  probe
  misc_feature (1)..(25): SEQ ID NO: 370; WAN0249K6; Start 60; Stop 84
ttatgccatggaaagaactctgcca

SEQ ID NO: 262222 - DNA, 25 bp, Artificial
  probe
  misc_feature (1)..(25): SEQ ID NO: 370; WAN0249K6; Start 61; Stop 85
tatgccatggaaagaactctgccac

SEQ ID NO: 262223 - DNA, 25 bp, Artificial
  probe
  misc_feature (1)..(25): SEQ ID NO: 371; WAN024AS4; Start 64; Stop 88
atttgttgtcctaataaacttgatt

SEQ ID NO: 262224 - DNA, 25 bp, Artificial
  probe
  misc_feature (1)..(25): SEQ ID NO: 371; WAN024AS4; Start 66; Stop 90
ttgttgtcctaataaacttgattag

SEQ ID NO: 262225 - DNA, 25 bp, Artificial
  probe
  misc_feature (1)..(25): SEQ ID NO: 372; WAN024ACP; Start 20; Stop 44
aaagaagccatcaggttagcattta

SEQ ID NO: 262226 - DNA, 25 bp, Artificial
  probe
  misc_feature (1)..(25): SEQ ID NO: 372; WAN024ACP; Start 21; Stop 45
aagaagccatcaggttagcatttaa

SEQ ID NO: 262227 - DNA, 25 bp, Artificial
  probe
  misc_feature (1)..(25): SEQ ID NO: 372; WAN024ACP; Start 22; Stop 46
agaagccatcaggttagcatttaac

SEQ ID NO: 262228 - DNA, 25 bp, Artificial
  probe
  misc_feature (1)..(25): SEQ ID NO: 372; WAN024ACP; Start 38; Stop 62
gcatttaacctaaacagctccttga

SEQ ID NO: 262229 - DNA, 25 bp, Artificial
  probe
  misc_feature (1)..(25): SEQ ID NO: 372; WAN024ACP; Start 8; Stop 32
tattcacaaacaaaagaagccatca

SEQ ID NO: 262230 - DNA, 25 bp, Artificial
  probe
  misc_feature (1)..(25): SEQ ID NO: 372; WAN024ACP; Start 6; Stop 30
actattcacaaacaaaagaagccat

SEQ ID NO: 262231 - DNA, 25 bp, Artificial
  probe
  misc_feature (1)..(25): SEQ ID NO: 372; WAN024ACP; Start 9; Stop 33
attcacaaacaaaagaagccatcag

SEQ ID NO: 262232 - DNA, 25 bp, Artificial
  probe
  misc_feature (1)..(25): SEQ ID NO: 372; WAN024ACP; Start 7; Stop 31
ctattcacaaacaaaagaagccatc

SEQ ID NO: 262233 - DNA, 25 bp, Artificial
  probe
  misc_feature (1)..(25): SEQ ID NO: 372; WAN024ACP; Start 5; Stop 29
tactattcacaaacaaaagaagcca

SEQ ID NO: 262234 - DNA, 25 bp, Artificial
  probe
  misc_feature (1)..(25): SEQ ID NO: 372; WAN024ACP; Start 14; Stop 38
caaacaaaagaagccatcaggttag

SEQ ID NO: 262235 - DNA, 25 bp, Artificial
  probe
  misc_feature (1)..(25): SEQ ID NO: 372; WAN024ACP; Start 19; Stop 43
aaaagaagccatcaggttagcattt

SEQ ID NO: 262236 - DNA, 25 bp, Artificial
  probe
  misc_feature (1)..(25): SEQ ID NO: 372; WAN024ACP; Start 36; Stop 60
tagcatttaacctaaacagctcctt

SEQ ID NO: 262237 - DNA, 25 bp, Artificial
  probe
  misc_feature (1)..(25): SEQ ID NO: 372; WAN024ACP; Start 35; Stop 59
ttagcatttaacctaaacagctcct

SEQ ID NO: 262238 - DNA, 25 bp, Artificial
  probe
  misc_feature (1)..(25): SEQ ID NO: 372; WAN024ACP; Start 34; Stop 58
gttagcatttaacctaaacagctcc

SEQ ID NO: 262239 - DNA, 25 bp, Artificial
  probe
  misc_feature (1)..(25): SEQ ID NO: 372; WAN024ACP; Start 13; Stop 37
acaaacaaaagaagccatcaggtta

SEQ ID NO: 262240 - DNA, 25 bp, Artificial
  probe
  misc_feature (1)..(25): SEQ ID NO: 372; WAN024ACP; Start 18; Stop 42
caaaagaagccatcaggttagcatt

SEQ ID NO: 262241 - DNA, 25 bp, Artificial
  probe
  misc_feature (1)..(25): SEQ ID NO: 372; WAN024ACP; Start 4; Stop 28
atactattcacaaacaaaagaagcc

SEQ ID NO: 262242 - DNA, 25 bp, Artificial
  probe
  misc_feature (1)..(25): SEQ ID NO: 372; WAN024ACP; Start 37; Stop 61
agcatttaacctaaacagctccttg

SEQ ID NO: 262243 - DNA, 25 bp, Artificial
  probe
  misc_feature (1)..(25): SEQ ID NO: 372; WAN024ACP; Start 15; Stop 39
aaacaaaagaagccatcaggttagc

SEQ ID NO: 262244 - DNA, 25 bp, Artificial
  probe
  misc_feature (1)..(25): SEQ ID NO: 372; WAN024ACP; Start 10; Stop 34
ttcacaaacaaaagaagccatcagg

SEQ ID NO: 262245 - DNA, 25 bp, Artificial
  probe
  misc_feature (1)..(25): SEQ ID NO: 372; WAN024ACP; Start 12; Stop 36
cacaaacaaaagaagccatcaggtt

SEQ ID NO: 262246 - DNA, 25 bp, Artificial
  probe
  misc_feature (1)..(25): SEQ ID NO: 372; WAN024ACP; Start 17; Stop 41
acaaaagaagccatcaggttagcat

SEQ ID NO: 262247 - DNA, 25 bp, Artificial
  probe
  misc_feature (1)..(25): SEQ ID NO: 372; WAN024ACP; Start 16; Stop 40
aacaaaagaagccatcaggttagca

SEQ ID NO: 262248 - DNA, 25 bp, Artificial
  probe
  misc_feature (1)..(25): SEQ ID NO: 372; WAN024ACP; Start 11; Stop 35
tcacaaacaaaagaagccatcaggt

SEQ ID NO: 262249 - DNA, 25 bp, Artificial
  probe
  misc_feature (1)..(25): SEQ ID NO: 372; WAN024ACP; Start 3; Stop 27
tatactattcacaaacaaaagaagc

SEQ ID NO: 262250 - DNA, 25 bp, Artificial
  probe
  misc_feature (1)..(25): SEQ ID NO: 373; WAN024APE; Start 325; Stop 349
ttgactcgttactataagactcctc

SEQ ID NO: 262251 - DNA, 25 bp, Artificial
  probe
  misc_feature (1)..(25): SEQ ID NO: 373; WAN024APE; Start 326; Stop 350
tgactcgttactataagactcctct

SEQ ID NO: 262252 - DNA, 25 bp, Artificial
  probe
  misc_feature (1)..(25): SEQ ID NO: 373; WAN024APE; Start 270; Stop 294
tcctagtcagaatagataacaccgt

SEQ ID NO: 262253 - DNA, 25 bp, Artificial
  probe
  misc_feature (1)..(25): SEQ ID NO: 373; WAN024APE; Start 269; Stop 293
ttcctagtcagaatagataacaccg

SEQ ID NO: 262254 - DNA, 25 bp, Artificial
  probe
  misc_feature (1)..(25): SEQ ID NO: 373; WAN024APE; Start 271; Stop 295
cctagtcagaatagataacaccgtt

SEQ ID NO: 262255 - DNA, 25 bp, Artificial
  probe
  misc_feature (1)..(25): SEQ ID NO: 373; WAN024APE; Start 253; Stop 277
cctctggtatgatctattcctagtc

SEQ ID NO: 262256 - DNA, 25 bp, Artificial
  probe
  misc_feature (1)..(25): SEQ ID NO: 373; WAN024APE; Start 272; Stop 296
ctagtcagaatagataacaccgttc

SEQ ID NO: 262257 - DNA, 25 bp, Artificial
  probe
  misc_feature (1)..(25): SEQ ID NO: 373; WAN024APE; Start 185; Stop 209
ttgatagtaacacttacgacatcct

SEQ ID NO: 262258 - DNA, 25 bp, Artificial
  probe
  misc_feature (1)..(25): SEQ ID NO: 373; WAN024APE; Start 254; Stop 278
ctctggtatgatctattcctagtca

SEQ ID NO: 262259 - DNA, 25 bp, Artificial
  probe
  misc_feature (1)..(25): SEQ ID NO: 373; WAN024APE; Start 186; Stop 210
tgatagtaacacttacgacatccta

SEQ ID NO: 262260 - DNA, 25 bp, Artificial
  probe
  misc_feature (1)..(25): SEQ ID NO: 373; WAN024APE; Start 184; Stop 208
attgatagtaacacttacgacatcc

SEQ ID NO: 262261 - DNA, 25 bp, Artificial
  probe
  misc_feature (1)..(25): SEQ ID NO: 373; WAN024APE; Start 252; Stop 276
acctctggtatgatctattcctagt

SEQ ID NO: 262262 - DNA, 25 bp, Artificial
  probe
  misc_feature (1)..(25): SEQ ID NO: 373; WAN024APE; Start 257; Stop 281
tggtatgatctattcctagtcagaa

SEQ ID NO: 262263 - DNA, 25 bp, Artificial
  probe
  misc_feature (1)..(25): SEQ ID NO: 373; WAN024APE; Start 256; Stop 280
ctggtatgatctattcctagtcaga

SEQ ID NO: 262264 - DNA, 25 bp, Artificial
  probe
  misc_feature (1)..(25): SEQ ID NO: 373; WAN024APE; Start 255; Stop 279
tctggtatgatctattcctagtcag

SEQ ID NO: 262265 - DNA, 25 bp, Artificial
  probe
  misc_feature (1)..(25): SEQ ID NO: 373; WAN024APE; Start 324; Stop 348
tttgactcgttactataagactcct

SEQ ID NO: 262266 - DNA, 25 bp, Artificial
  probe
  misc_feature (1)..(25): SEQ ID NO: 373; WAN024APE; Start 182; Stop 206
tcattgatagtaacacttacgacat

SEQ ID NO: 262267 - DNA, 25 bp, Artificial
  probe
  misc_feature (1)..(25): SEQ ID NO: 373; WAN024APE; Start 183; Stop 207
cattgatagtaacacttacgacatc

SEQ ID NO: 262268 - DNA, 25 bp, Artificial
  probe
  misc_feature (1)..(25): SEQ ID NO: 373; WAN024APE; Start 327; Stop 351
gactcgttactataagactcctctt

SEQ ID NO: 262269 - DNA, 25 bp, Artificial
  probe
  misc_feature (1)..(25): SEQ ID NO: 373; WAN024APE; Start 181; Stop 205
atcattgatagtaacacttacgaca

SEQ ID NO: 262270 - DNA, 25 bp, Artificial
  probe
  misc_feature (1)..(25): SEQ ID NO: 373; WAN024APE; Start 274; Stop 298
agtcagaatagataacaccgttcta

SEQ ID NO: 262271 - DNA, 25 bp, Artificial
  probe
  misc_feature (1)..(25): SEQ ID NO: 373; WAN024APE; Start 273; Stop 297
tagtcagaatagataacaccgttct

SEQ ID NO: 262272 - DNA, 25 bp, Artificial
  probe
  misc_feature (1)..(25): SEQ ID NO: 373; WAN024APE; Start 187; Stop 211
gatagtaacacttacgacatcctat

SEQ ID NO: 262273 - DNA, 25 bp, Artificial
  probe
  misc_feature (1)..(25): SEQ ID NO: 373; WAN024APE; Start 217; Stop 241
acttcaatttctaatgtctctgcta

SEQ ID NO: 262274 - DNA, 25 bp, Artificial
  probe
  misc_feature (1)..(25): SEQ ID NO: 373; WAN024APE; Start 216; Stop 240
tacttcaatttctaatgtctctgct

SEQ ID NO: 262275 - DNA, 25 bp, Artificial
  probe
  misc_feature (1)..(25): SEQ ID NO: 373; WAN024APE; Start 275; Stop 299
gtcagaatagataacaccgttctaa

SEQ ID NO: 262276 - DNA, 25 bp, Artificial
  probe
  misc_feature (1)..(25): SEQ ID NO: 373; WAN024APE; Start 268; Stop 292
attcctagtcagaatagataacacc

SEQ ID NO: 262277 - DNA, 25 bp, Artificial
  probe
  misc_feature (1)..(25): SEQ ID NO: 373; WAN024APE; Start 188; Stop 212
atagtaacacttacgacatcctatt

SEQ ID NO: 262278 - DNA, 25 bp, Artificial
  probe
  misc_feature (1)..(25): SEQ ID NO: 373; WAN024APE; Start 215; Stop 239
ttacttcaatttctaatgtctctgc

SEQ ID NO: 262279 - DNA, 25 bp, Artificial
  probe
  misc_feature (1)..(25): SEQ ID NO: 373; WAN024APE; Start 249; Stop 273
gctacctctggtatgatctattcct

SEQ ID NO: 262280 - DNA, 25 bp, Artificial
  probe
  misc_feature (1)..(25): SEQ ID NO: 373; WAN024APE; Start 180; Stop 204
aatcattgatagtaacacttacgac

SEQ ID NO: 262281 - DNA, 25 bp, Artificial
  probe
  misc_feature (1)..(25): SEQ ID NO: 373; WAN024APE; Start 33; Stop 57
gacttccttcccaaatgagcctatc

SEQ ID NO: 262282 - DNA, 25 bp, Artificial
  probe
  misc_feature (1)..(25): SEQ ID NO: 373; WAN024APE; Start 35; Stop 59
cttccttcccaaatgagcctatctc

SEQ ID NO: 262283 - DNA, 25 bp, Artificial
  probe
  misc_feature (1)..(25): SEQ ID NO: 374; WAN0249H9; Start 17; Stop 41
ctataaacaaaggagttaacctcga

SEQ ID NO: 262284 - DNA, 25 bp, Artificial
  probe
  misc_feature (1)..(25): SEQ ID NO: 374; WAN0249H9; Start 16; Stop 40
tctataaacaaaggagttaacctcg

SEQ ID NO: 262285 - DNA, 25 bp, Artificial
  probe
  misc_feature (1)..(25): SEQ ID NO: 374; WAN0249H9; Start 20; Stop 44
taaacaaaggagttaacctcgagaa

SEQ ID NO: 262286 - DNA, 25 bp, Artificial
  probe
  misc_feature (1)..(25): SEQ ID NO: 374; WAN0249H9; Start 19; Stop 43
ataaacaaaggagttaacctcgaga

SEQ ID NO: 262287 - DNA, 25 bp, Artificial
  probe
  misc_feature (1)..(25): SEQ ID NO: 374; WAN0249H9; Start 21; Stop 45
aaacaaaggagttaacctcgagaaa

SEQ ID NO: 262288 - DNA, 25 bp, Artificial
  probe
  misc_feature (1)..(25): SEQ ID NO: 374; WAN0249H9; Start 15; Stop 39
atctataaacaaaggagttaacctc

SEQ ID NO: 262289 - DNA, 25 bp, Artificial
  probe
  misc_feature (1)..(25): SEQ ID NO: 374; WAN0249H9; Start 22; Stop 46
aacaaaggagttaacctcgagaaag

SEQ ID NO: 262290 - DNA, 25 bp, Artificial
  probe
  misc_feature (1)..(25): SEQ ID NO: 374; WAN0249H9; Start 18; Stop 42
tataaacaaaggagttaacctcgag

SEQ ID NO: 262291 - DNA, 25 bp, Artificial
  probe
  misc_feature (1)..(25): SEQ ID NO: 374; WAN0249H9; Start 23; Stop 47
acaaaggagttaacctcgagaaagg

SEQ ID NO: 262292 - DNA, 25 bp, Artificial
  probe
  misc_feature (1)..(25): SEQ ID NO: 374; WAN0249H9; Start 14; Stop 38
tatctataaacaaaggagttaacct

SEQ ID NO: 262293 - DNA, 25 bp, Artificial
  probe
  misc_feature (1)..(25): SEQ ID NO: 374; WAN0249H9; Start 32; Stop 56
ttaacctcgagaaaggtaactcctt

SEQ ID NO: 262294 - DNA, 25 bp, Artificial
  probe
  misc_feature (1)..(25): SEQ ID NO: 374; WAN0249H9; Start 26; Stop 50
aaggagttaacctcgagaaaggtaa

SEQ ID NO: 262295 - DNA, 25 bp, Artificial
  probe
  misc_feature (1)..(25): SEQ ID NO: 374; WAN0249H9; Start 25; Stop 49
aaaggagttaacctcgagaaaggta

SEQ ID NO: 262296 - DNA, 25 bp, Artificial
  probe
  misc_feature (1)..(25): SEQ ID NO: 374; WAN0249H9; Start 31; Stop 55
gttaacctcgagaaaggtaactcct

SEQ ID NO: 262297 - DNA, 25 bp, Artificial
  probe
  misc_feature (1)..(25): SEQ ID NO: 374; WAN0249H9; Start 30; Stop 54
agttaacctcgagaaaggtaactcc

SEQ ID NO: 262298 - DNA, 25 bp, Artificial
  probe
  misc_feature (1)..(25): SEQ ID NO: 374; WAN0249H9; Start 28; Stop 52
ggagttaacctcgagaaaggtaact

SEQ ID NO: 262299 - DNA, 25 bp, Artificial
  probe
  misc_feature (1)..(25): SEQ ID NO: 374; WAN0249H9; Start 27; Stop 51
aggagttaacctcgagaaaggtaac

SEQ ID NO: 262300 - DNA, 25 bp, Artificial
  probe
  misc_feature (1)..(25): SEQ ID NO: 374; WAN0249H9; Start 24; Stop 48
caaaggagttaacctcgagaaaggt

SEQ ID NO: 262301 - DNA, 25 bp, Artificial
  probe
  misc_feature (1)..(25): SEQ ID NO: 375; WAN024A6J; Start 97; Stop 121
gtttcctcatacctagcaagactag

SEQ ID NO: 262302 - DNA, 25 bp, Artificial
  probe
  misc_feature (1)..(25): SEQ ID NO: 375; WAN024A6J; Start 96; Stop 120
ggtttcctcatacctagcaagacta

SEQ ID NO: 262303 - DNA, 25 bp, Artificial
  probe
  misc_feature (1)..(25): SEQ ID NO: 375; WAN024A6J; Start 79; Stop 103
ttaagtttatgaaatgaggtttcct

SEQ ID NO: 262304 - DNA, 25 bp, Artificial
  probe
  misc_feature (1)..(25): SEQ ID NO: 375; WAN024A6J; Start 78; Stop 102
attaagtttatgaaatgaggtttcc

SEQ ID NO: 262305 - DNA, 25 bp, Artificial
  probe
  misc_feature (1)..(25): SEQ ID NO: 375; WAN024A6J; Start 3; Stop 27
tcaaactgtaaggatttccttgcag

SEQ ID NO: 262306 - DNA, 25 bp, Artificial
  probe
  misc_feature (1)..(25): SEQ ID NO: 375; WAN024A6J; Start 2; Stop 26
ctcaaactgtaaggatttccttgca

SEQ ID NO: 262307 - DNA, 25 bp, Artificial
  probe
  misc_feature (1)..(25): SEQ ID NO: 375; WAN024A6J; Start 1; Stop 25
actcaaactgtaaggatttccttgc

SEQ ID NO: 262308 - DNA, 25 bp, Artificial
  probe
  misc_feature (1)..(25): SEQ ID NO: 375; WAN024A6J; Start 4; Stop 28
caaactgtaaggatttccttgcagt

SEQ ID NO: 262309 - DNA, 25 bp, Artificial
  probe
  misc_feature (1)..(25): SEQ ID NO: 375; WAN024A6J; Start 95; Stop 119
aggtttcctcatacctagcaagact

SEQ ID NO: 262310 - DNA, 25 bp, Artificial
  probe
  misc_feature (1)..(25): SEQ ID NO: 375; WAN024A6J; Start 94; Stop 118
gaggtttcctcatacctagcaagac

SEQ ID NO: 262311 - DNA, 25 bp, Artificial
  probe
  misc_feature (1)..(25): SEQ ID NO: 375; WAN024A6J; Start 80; Stop 104
taagtttatgaaatgaggtttcctc

SEQ ID NO: 262312 - DNA, 25 bp, Artificial
  probe
  misc_feature (1)..(25): SEQ ID NO: 375; WAN024A6J; Start 7; Stop 31
actgtaaggatttccttgcagtttt

SEQ ID NO: 262313 - DNA, 25 bp, Artificial
  probe
  misc_feature (1)..(25): SEQ ID NO: 376; WAN024A9T; Start 40; Stop 64
tcccagtcactaaattttcttgaat

SEQ ID NO: 262314 - DNA, 25 bp, Artificial
  probe
  misc_feature (1)..(25): SEQ ID NO: 376; WAN024A9T; Start 39; Stop 63
atcccagtcactaaattttcttgaa

SEQ ID NO: 262315 - DNA, 25 bp, Artificial
  probe
  misc_feature (1)..(25): SEQ ID NO: 376; WAN024A9T; Start 38; Stop 62
aatcccagtcactaaattttcttga

SEQ ID NO: 262316 - DNA, 25 bp, Artificial
  probe
  misc_feature (1)..(25): SEQ ID NO: 376; WAN024A9T; Start 41; Stop 65
cccagtcactaaattttcttgaatc

SEQ ID NO: 262317 - DNA, 25 bp, Artificial
  probe
  misc_feature (1)..(25): SEQ ID NO: 376; WAN024A9T; Start 37; Stop 61
aaatcccagtcactaaattttcttg

SEQ ID NO: 262318 - DNA, 25 bp, Artificial
  probe
  misc_feature (1)..(25): SEQ ID NO: 376; WAN024A9T; Start 35; Stop 59
ggaaatcccagtcactaaattttct

SEQ ID NO: 262319 - DNA, 25 bp, Artificial
  probe
  misc_feature (1)..(25): SEQ ID NO: 376; WAN024A9T; Start 42; Stop 66
ccagtcactaaattttcttgaatct

SEQ ID NO: 262320 - DNA, 25 bp, Artificial
  probe
  misc_feature (1)..(25): SEQ ID NO: 376; WAN024A9T; Start 34; Stop 58
gggaaatcccagtcactaaattttc

SEQ ID NO: 262321 - DNA, 25 bp, Artificial
  probe
  misc_feature (1)..(25): SEQ ID NO: 376; WAN024A9T; Start 36; Stop 60
gaaatcccagtcactaaattttctt

SEQ ID NO: 262322 - DNA, 25 bp, Artificial
  probe
  misc_feature (1)..(25): SEQ ID NO: 376; WAN024A9T; Start 43; Stop 67
cagtcactaaattttcttgaatcta

SEQ ID NO: 262323 - DNA, 25 bp, Artificial
  probe
  misc_feature (1)..(25): SEQ ID NO: 377; WAN0249QC; Start 87; Stop 111
tatgttgtgcttattaggcttatcg

SEQ ID NO: 262324 - DNA, 25 bp, Artificial
  probe
  misc_feature (1)..(25): SEQ ID NO: 377; WAN0249QC; Start 696; Stop 720
atcataacacaatcacctcttcaat

SEQ ID NO: 262325 - DNA, 25 bp, Artificial
  probe
  misc_feature (1)..(25): SEQ ID NO: 377; WAN0249QC; Start 691; Stop 715
agactatcataacacaatcacctct

SEQ ID NO: 262326 - DNA, 25 bp, Artificial
  probe
  misc_feature (1)..(25): SEQ ID NO: 377; WAN0249QC; Start 694; Stop 718
ctatcataacacaatcacctcttca

SEQ ID NO: 262327 - DNA, 25 bp, Artificial
  probe
  misc_feature (1)..(25): SEQ ID NO: 377; WAN0249QC; Start 693; Stop 717
actatcataacacaatcacctcttc

SEQ ID NO: 262328 - DNA, 25 bp, Artificial
  probe
  misc_feature (1)..(25): SEQ ID NO: 377; WAN0249QC; Start 692; Stop 716
gactatcataacacaatcacctctt

SEQ ID NO: 262329 - DNA, 25 bp, Artificial
  probe
  misc_feature (1)..(25): SEQ ID NO: 377; WAN0249QC; Start 88; Stop 112
atgttgtgcttattaggcttatcgc

SEQ ID NO: 262330 - DNA, 25 bp, Artificial
  probe
  misc_feature (1)..(25): SEQ ID NO: 377; WAN0249QC; Start 146; Stop 170
agtgtgcttactactatgtgtccat

SEQ ID NO: 262331 - DNA, 25 bp, Artificial
  probe
  misc_feature (1)..(25): SEQ ID NO: 377; WAN0249QC; Start 697; Stop 721
tcataacacaatcacctcttcaata

SEQ ID NO: 262332 - DNA, 25 bp, Artificial
  probe
  misc_feature (1)..(25): SEQ ID NO: 377; WAN0249QC; Start 695; Stop 719
tatcataacacaatcacctcttcaa

SEQ ID NO: 262333 - DNA, 25 bp, Artificial
  probe
  misc_feature (1)..(25): SEQ ID NO: 377; WAN0249QC; Start 149; Stop 173
gtgcttactactatgtgtccatgtc

SEQ ID NO: 262334 - DNA, 25 bp, Artificial
  probe
  misc_feature (1)..(25): SEQ ID NO: 377; WAN0249QC; Start 690; Stop 714
tagactatcataacacaatcacctc

SEQ ID NO: 262335 - DNA, 25 bp, Artificial
  probe
  misc_feature (1)..(25): SEQ ID NO: 377; WAN0249QC; Start 86; Stop 110
ctatgttgtgcttattaggcttatc

SEQ ID NO: 262336 - DNA, 25 bp, Artificial
  probe
  misc_feature (1)..(25): SEQ ID NO: 377; WAN0249QC; Start 537; Stop 561
ctcagttccgaacctatgacatata

SEQ ID NO: 262337 - DNA, 25 bp, Artificial
  probe
  misc_feature (1)..(25): SEQ ID NO: 377; WAN0249QC; Start 150; Stop 174
tgcttactactatgtgtccatgtca

SEQ ID NO: 262338 - DNA, 25 bp, Artificial
  probe
  misc_feature (1)..(25): SEQ ID NO: 377; WAN0249QC; Start 147; Stop 171
gtgtgcttactactatgtgtccatg

SEQ ID NO: 262339 - DNA, 25 bp, Artificial
  probe
  misc_feature (1)..(25): SEQ ID NO: 377; WAN0249QC; Start 278; Stop 302
gtcataacggactattccagattca

SEQ ID NO: 262340 - DNA, 25 bp, Artificial
  probe
  misc_feature (1)..(25): SEQ ID NO: 377; WAN0249QC; Start 279; Stop 303
tcataacggactattccagattcaa

SEQ ID NO: 262341 - DNA, 25 bp, Artificial
  probe
  misc_feature (1)..(25): SEQ ID NO: 377; WAN0249QC; Start 536; Stop 560
actcagttccgaacctatgacatat

SEQ ID NO: 262342 - DNA, 25 bp, Artificial
  probe
  misc_feature (1)..(25): SEQ ID NO: 377; WAN0249QC; Start 148; Stop 172
tgtgcttactactatgtgtccatgt

SEQ ID NO: 262343 - DNA, 25 bp, Artificial
  probe
  misc_feature (1)..(25): SEQ ID NO: 377; WAN0249QC; Start 538; Stop 562
tcagttccgaacctatgacatatat

SEQ ID NO: 262344 - DNA, 25 bp, Artificial
  probe
  misc_feature (1)..(25): SEQ ID NO: 377; WAN0249QC; Start 535; Stop 559
aactcagttccgaacctatgacata

SEQ ID NO: 262345 - DNA, 25 bp, Artificial
  probe
  misc_feature (1)..(25): SEQ ID NO: 377; WAN0249QC; Start 698; Stop 722
cataacacaatcacctcttcaataa

SEQ ID NO: 262346 - DNA, 25 bp, Artificial
  probe
  misc_feature (1)..(25): SEQ ID NO: 377; WAN0249QC; Start 145; Stop 169
tagtgtgcttactactatgtgtcca

SEQ ID NO: 262347 - DNA, 25 bp, Artificial
  probe
  misc_feature (1)..(25): SEQ ID NO: 377; WAN0249QC; Start 280; Stop 304
cataacggactattccagattcaat

SEQ ID NO: 262348 - DNA, 25 bp, Artificial
  probe
  misc_feature (1)..(25): SEQ ID NO: 377; WAN0249QC; Start 152; Stop 176
cttactactatgtgtccatgtcacc

SEQ ID NO: 262349 - DNA, 25 bp, Artificial
  probe
  misc_feature (1)..(25): SEQ ID NO: 377; WAN0249QC; Start 689; Stop 713
ttagactatcataacacaatcacct

SEQ ID NO: 262350 - DNA, 25 bp, Artificial
  probe
  misc_feature (1)..(25): SEQ ID NO: 377; WAN0249QC; Start 154; Stop 178
tactactatgtgtccatgtcaccat

SEQ ID NO: 262351 - DNA, 25 bp, Artificial
  probe
  misc_feature (1)..(25): SEQ ID NO: 377; WAN0249QC; Start 153; Stop 177
ttactactatgtgtccatgtcacca

SEQ ID NO: 262352 - DNA, 25 bp, Artificial
  probe
  misc_feature (1)..(25): SEQ ID NO: 377; WAN0249QC; Start 186; Stop 210
cgaacggtttaacgagaaagtatag

SEQ ID NO: 262353 - DNA, 25 bp, Artificial
  probe
  misc_feature (1)..(25): SEQ ID NO: 377; WAN0249QC; Start 281; Stop 305
ataacggactattccagattcaatc

SEQ ID NO: 262354 - DNA, 25 bp, Artificial
  probe
  misc_feature (1)..(25): SEQ ID NO: 377; WAN0249QC; Start 151; Stop 175
gcttactactatgtgtccatgtcac

SEQ ID NO: 262355 - DNA, 25 bp, Artificial
  probe
  misc_feature (1)..(25): SEQ ID NO: 377; WAN0249QC; Start 732; Stop 756
gcgaaatactattctgaagcattga

SEQ ID NO: 262356 - DNA, 25 bp, Artificial
  probe
  misc_feature (1)..(25): SEQ ID NO: 378; WAN0249HV; Start 1; Stop 25
actcccctacactttcttaatctaa

SEQ ID NO: 262357 - DNA, 25 bp, Artificial
  probe
  misc_feature (1)..(25): SEQ ID NO: 378; WAN0249HV; Start 75; Stop 99
cgaagaataacaacgttcctaacac

SEQ ID NO: 262358 - DNA, 25 bp, Artificial
  probe
  misc_feature (1)..(25): SEQ ID NO: 378; WAN0249HV; Start 76; Stop 100
gaagaataacaacgttcctaacact

SEQ ID NO: 262359 - DNA, 25 bp, Artificial
  probe
  misc_feature (1)..(25): SEQ ID NO: 378; WAN0249HV; Start 2; Stop 26
ctcccctacactttcttaatctaaa

SEQ ID NO: 262360 - DNA, 25 bp, Artificial
  probe
  misc_feature (1)..(25): SEQ ID NO: 378; WAN0249HV; Start 77; Stop 101
aagaataacaacgttcctaacacta

SEQ ID NO: 262361 - DNA, 25 bp, Artificial
  probe
  misc_feature (1)..(25): SEQ ID NO: 378; WAN0249HV; Start 78; Stop 102
agaataacaacgttcctaacactat

SEQ ID NO: 262362 - DNA, 25 bp, Artificial
  probe
  misc_feature (1)..(25): SEQ ID NO: 378; WAN0249HV; Start 3; Stop 27
tcccctacactttcttaatctaaat

SEQ ID NO: 262363 - DNA, 25 bp, Artificial
  probe
  misc_feature (1)..(25): SEQ ID NO: 378; WAN0249HV; Start 81; Stop 105
ataacaacgttcctaacactatact

SEQ ID NO: 262364 - DNA, 25 bp, Artificial
  probe
  misc_feature (1)..(25): SEQ ID NO: 378; WAN0249HV; Start 82; Stop 106
taacaacgttcctaacactatacta

SEQ ID NO: 262365 - DNA, 25 bp, Artificial
  probe
  misc_feature (1)..(25): SEQ ID NO: 378; WAN0249HV; Start 80; Stop 104
aataacaacgttcctaacactatac

SEQ ID NO: 262366 - DNA, 25 bp, Artificial
  probe
  misc_feature (1)..(25): SEQ ID NO: 378; WAN0249HV; Start 74; Stop 98
acgaagaataacaacgttcctaaca

SEQ ID NO: 262367 - DNA, 25 bp, Artificial
  probe
  misc_feature (1)..(25): SEQ ID NO: 378; WAN0249HV; Start 79; Stop 103
gaataacaacgttcctaacactata

SEQ ID NO: 262368 - DNA, 25 bp, Artificial
  probe
  misc_feature (1)..(25): SEQ ID NO: 378; WAN0249HV; Start 4; Stop 28
cccctacactttcttaatctaaata

SEQ ID NO: 262369 - DNA, 25 bp, Artificial
  probe
  misc_feature (1)..(25): SEQ ID NO: 378; WAN0249HV; Start 73; Stop 97
aacgaagaataacaacgttcctaac

SEQ ID NO: 262370 - DNA, 25 bp, Artificial
  probe
  misc_feature (1)..(25): SEQ ID NO: 378; WAN0249HV; Start 67; Stop 91
aaaaggaacgaagaataacaacgtt

SEQ ID NO: 262371 - DNA, 25 bp, Artificial
  probe
  misc_feature (1)..(25): SEQ ID NO: 379; WAN024AFX; Start 49; Stop 73
gaaattgtcacatcggagaaagaaa

SEQ ID NO: 262372 - DNA, 25 bp, Artificial
  probe
  misc_feature (1)..(25): SEQ ID NO: 379; WAN024AFX; Start 106; Stop 130
tagtaaagatgaacgaataggaggt

SEQ ID NO: 262373 - DNA, 25 bp, Artificial
  probe
  misc_feature (1)..(25): SEQ ID NO: 379; WAN024AFX; Start 107; Stop 131
agtaaagatgaacgaataggaggtt

SEQ ID NO: 262374 - DNA, 25 bp, Artificial
  probe
  misc_feature (1)..(25): SEQ ID NO: 379; WAN024AFX; Start 38; Stop 62
gaatctctgctgaaattgtcacatc

SEQ ID NO: 262375 - DNA, 25 bp, Artificial
  probe
  misc_feature (1)..(25): SEQ ID NO: 379; WAN024AFX; Start 37; Stop 61
agaatctctgctgaaattgtcacat

SEQ ID NO: 262376 - DNA, 25 bp, Artificial
  probe
  misc_feature (1)..(25): SEQ ID NO: 379; WAN024AFX; Start 96; Stop 120
acctgtagaatagtaaagatgaacg

SEQ ID NO: 262377 - DNA, 25 bp, Artificial
  probe
  misc_feature (1)..(25): SEQ ID NO: 379; WAN024AFX; Start 48; Stop 72
tgaaattgtcacatcggagaaagaa

SEQ ID NO: 262378 - DNA, 25 bp, Artificial
  probe
  misc_feature (1)..(25): SEQ ID NO: 379; WAN024AFX; Start 97; Stop 121
cctgtagaatagtaaagatgaacga

SEQ ID NO: 262379 - DNA, 25 bp, Artificial
  probe
  misc_feature (1)..(25): SEQ ID NO: 379; WAN024AFX; Start 47; Stop 71
ctgaaattgtcacatcggagaaaga

SEQ ID NO: 262380 - DNA, 25 bp, Artificial
  probe
  misc_feature (1)..(25): SEQ ID NO: 379; WAN024AFX; Start 105; Stop 129
atagtaaagatgaacgaataggagg

SEQ ID NO: 262381 - DNA, 25 bp, Artificial
  probe
  misc_feature (1)..(25): SEQ ID NO: 379; WAN024AFX; Start 39; Stop 63
aatctctgctgaaattgtcacatcg

SEQ ID NO: 262382 - DNA, 25 bp, Artificial
  probe
  misc_feature (1)..(25): SEQ ID NO: 379; WAN024AFX; Start 36; Stop 60
gagaatctctgctgaaattgtcaca

SEQ ID NO: 262383 - DNA, 25 bp, Artificial
  probe
  misc_feature (1)..(25): SEQ ID NO: 379; WAN024AFX; Start 46; Stop 70
gctgaaattgtcacatcggagaaag

SEQ ID NO: 262384 - DNA, 25 bp, Artificial
  probe
  misc_feature (1)..(25): SEQ ID NO: 379; WAN024AFX; Start 18; Stop 42
aattgggaaagaaaagcagagaatc

SEQ ID NO: 262385 - DNA, 25 bp, Artificial
  probe
  misc_feature (1)..(25): SEQ ID NO: 379; WAN024AFX; Start 17; Stop 41
gaattgggaaagaaaagcagagaat

SEQ ID NO: 262386 - DNA, 25 bp, Artificial
  probe
  misc_feature (1)..(25): SEQ ID NO: 379; WAN024AFX; Start 50; Stop 74
aaattgtcacatcggagaaagaaaa

SEQ ID NO: 262387 - DNA, 25 bp, Artificial
  probe
  misc_feature (1)..(25): SEQ ID NO: 379; WAN024AFX; Start 98; Stop 122
ctgtagaatagtaaagatgaacgaa

SEQ ID NO: 262388 - DNA, 25 bp, Artificial
  probe
  misc_feature (1)..(25): SEQ ID NO: 379; WAN024AFX; Start 15; Stop 39
atgaattgggaaagaaaagcagaga

SEQ ID NO: 262389 - DNA, 25 bp, Artificial
  probe
  misc_feature (1)..(25): SEQ ID NO: 379; WAN024AFX; Start 19; Stop 43
attgggaaagaaaagcagagaatct

SEQ ID NO: 262390 - DNA, 25 bp, Artificial
  probe
  misc_feature (1)..(25): SEQ ID NO: 379; WAN024AFX; Start 85; Stop 109
atccttggaaaacctgtagaatagt

SEQ ID NO: 262391 - DNA, 25 bp, Artificial
  probe
  misc_feature (1)..(25): SEQ ID NO: 379; WAN024AFX; Start 16; Stop 40
tgaattgggaaagaaaagcagagaa

SEQ ID NO: 262392 - DNA, 25 bp, Artificial
  probe
  misc_feature (1)..(25): SEQ ID NO: 379; WAN024AFX; Start 45; Stop 69
tgctgaaattgtcacatcggagaaa

SEQ ID NO: 262393 - DNA, 25 bp, Artificial
  probe
  misc_feature (1)..(25): SEQ ID NO: 379; WAN024AFX; Start 86; Stop 110
tccttggaaaacctgtagaatagta

SEQ ID NO: 262394 - DNA, 25 bp, Artificial
  probe
  misc_feature (1)..(25): SEQ ID NO: 379; WAN024AFX; Start 82; Stop 106
aaaatccttggaaaacctgtagaat

SEQ ID NO: 262395 - DNA, 25 bp, Artificial
  probe
  misc_feature (1)..(25): SEQ ID NO: 379; WAN024AFX; Start 104; Stop 128
aatagtaaagatgaacgaataggag

SEQ ID NO: 262396 - DNA, 25 bp, Artificial
  probe
  misc_feature (1)..(25): SEQ ID NO: 379; WAN024AFX; Start 103; Stop 127
gaatagtaaagatgaacgaatagga

SEQ ID NO: 262397 - DNA, 25 bp, Artificial
  probe
  misc_feature (1)..(25): SEQ ID NO: 379; WAN024AFX; Start 102; Stop 126
agaatagtaaagatgaacgaatagg

SEQ ID NO: 262398 - DNA, 25 bp, Artificial
  probe
  misc_feature (1)..(25): SEQ ID NO: 379; WAN024AFX; Start 95; Stop 119
aacctgtagaatagtaaagatgaac

SEQ ID NO: 262399 - DNA, 25 bp, Artificial
  probe
  misc_feature (1)..(25): SEQ ID NO: 379; WAN024AFX; Start 81; Stop 105
caaaatccttggaaaacctgtagaa

SEQ ID NO: 262400 - DNA, 25 bp, Artificial
  probe
  misc_feature (1)..(25): SEQ ID NO: 379; WAN024AFX; Start 40; Stop 64
atctctgctgaaattgtcacatcgg

SEQ ID NO: 262401 - DNA, 25 bp, Artificial
  probe
  misc_feature (1)..(25): SEQ ID NO: 379; WAN024AFX; Start 87; Stop 111
ccttggaaaacctgtagaatagtaa

SEQ ID NO: 262402 - DNA, 25 bp, Artificial
  probe
  misc_feature (1)..(25): SEQ ID NO: 379; WAN024AFX; Start 84; Stop 108
aatccttggaaaacctgtagaatag

SEQ ID NO: 262403 - DNA, 25 bp, Artificial
  probe
  misc_feature (1)..(25): SEQ ID NO: 379; WAN024AFX; Start 44; Stop 68
ctgctgaaattgtcacatcggagaa

SEQ ID NO: 262404 - DNA, 25 bp, Artificial
  probe
  misc_feature (1)..(25): SEQ ID NO: 380; WAN0249EY; Start 87; Stop 111
atctatgatgacatcgtataggcga

SEQ ID NO: 262405 - DNA, 25 bp, Artificial
  probe
  misc_feature (1)..(25): SEQ ID NO: 380; WAN0249EY; Start 3; Stop 27
tcgcctatacgatgtcatcatagat

SEQ ID NO: 262406 - DNA, 25 bp, Artificial
  probe
  misc_feature (1)..(25): SEQ ID NO: 380; WAN0249EY; Start 88; Stop 112
tctatgatgacatcgtataggcgag

SEQ ID NO: 262407 - DNA, 25 bp, Artificial
  probe
  misc_feature (1)..(25): SEQ ID NO: 380; WAN0249EY; Start 2; Stop 26
ctcgcctatacgatgtcatcataga

SEQ ID NO: 262408 - DNA, 25 bp, Artificial
  probe
  misc_feature (1)..(25): SEQ ID NO: 380; WAN0249EY; Start 89; Stop 113
ctatgatgacatcgtataggcgagt

SEQ ID NO: 262409 - DNA, 25 bp, Artificial
  probe
  misc_feature (1)..(25): SEQ ID NO: 380; WAN0249EY; Start 1; Stop 25
actcgcctatacgatgtcatcatag

SEQ ID NO: 262410 - DNA, 25 bp, Artificial
  probe
  misc_feature (1)..(25): SEQ ID NO: 380; WAN0249EY; Start 86; Stop 110
catctatgatgacatcgtataggcg

SEQ ID NO: 262411 - DNA, 25 bp, Artificial
  probe
  misc_feature (1)..(25): SEQ ID NO: 380; WAN0249EY; Start 4; Stop 28
cgcctatacgatgtcatcatagatg

SEQ ID NO: 262412 - DNA, 25 bp, Artificial
  probe
  misc_feature (1)..(25): SEQ ID NO: 381; WAN024F7D; Start 118; Stop 142
ccaattctatttctcccttcaaaca

SEQ ID NO: 262413 - DNA, 25 bp, Artificial
  probe
  misc_feature (1)..(25): SEQ ID NO: 381; WAN024F7D; Start 117; Stop 141
accaattctatttctcccttcaaac

SEQ ID NO: 262414 - DNA, 25 bp, Artificial
  probe
  misc_feature (1)..(25): SEQ ID NO: 381; WAN024F7D; Start 115; Stop 139
caaccaattctatttctcccttcaa

SEQ ID NO: 262415 - DNA, 25 bp, Artificial
  probe
  misc_feature (1)..(25): SEQ ID NO: 381; WAN024F7D; Start 113; Stop 137
agcaaccaattctatttctcccttc

SEQ ID NO: 262416 - DNA, 25 bp, Artificial
  probe
  misc_feature (1)..(25): SEQ ID NO: 381; WAN024F7D; Start 114; Stop 138
gcaaccaattctatttctcccttca

SEQ ID NO: 262417 - DNA, 25 bp, Artificial
  probe
  misc_feature (1)..(25): SEQ ID NO: 381; WAN024F7D; Start 116; Stop 140
aaccaattctatttctcccttcaaa

SEQ ID NO: 262418 - DNA, 25 bp, Artificial
  probe
  misc_feature (1)..(25): SEQ ID NO: 381; WAN024F7D; Start 109; Stop 133
tttgagcaaccaattctatttctcc

SEQ ID NO: 262419 - DNA, 25 bp, Artificial
  probe
  misc_feature (1)..(25): SEQ ID NO: 381; WAN024F7D; Start 112; Stop 136
gagcaaccaattctatttctccctt

SEQ ID NO: 262420 - DNA, 25 bp, Artificial
  probe
  misc_feature (1)..(25): SEQ ID NO: 381; WAN024F7D; Start 110; Stop 134
ttgagcaaccaattctatttctccc

SEQ ID NO: 262421 - DNA, 25 bp, Artificial
  probe
  misc_feature (1)..(25): SEQ ID NO: 381; WAN024F7D; Start 108; Stop 132
ctttgagcaaccaattctatttctc

SEQ ID NO: 262422 - DNA, 25 bp, Artificial
  probe
  misc_feature (1)..(25): SEQ ID NO: 381; WAN024F7D; Start 119; Stop 143
caattctatttctcccttcaaacaa

SEQ ID NO: 262423 - DNA, 25 bp, Artificial
  probe
  misc_feature (1)..(25): SEQ ID NO: 381; WAN024F7D; Start 111; Stop 135
tgagcaaccaattctatttctccct

SEQ ID NO: 262424 - DNA, 25 bp, Artificial
  probe
  misc_feature (1)..(25): SEQ ID NO: 381; WAN024F7D; Start 120; Stop 144
aattctatttctcccttcaaacaaa

SEQ ID NO: 262425 - DNA, 25 bp, Artificial
  probe
  misc_feature (1)..(25): SEQ ID NO: 381; WAN024F7D; Start 107; Stop 131
gctttgagcaaccaattctatttct

SEQ ID NO: 262426 - DNA, 25 bp, Artificial
  probe
  misc_feature (1)..(25): SEQ ID NO: 381; WAN024F7D; Start 143; Stop 167
aaaccgattttgaaagtgaaacagt

SEQ ID NO: 262427 - DNA, 25 bp, Artificial
  probe
  misc_feature (1)..(25): SEQ ID NO: 381; WAN024F7D; Start 124; Stop 148
ctatttctcccttcaaacaaaaccg

SEQ ID NO: 262428 - DNA, 25 bp, Artificial
  probe
  misc_feature (1)..(25): SEQ ID NO: 381; WAN024F7D; Start 123; Stop 147
tctatttctcccttcaaacaaaacc

SEQ ID NO: 262429 - DNA, 25 bp, Artificial
  probe
  misc_feature (1)..(25): SEQ ID NO: 381; WAN024F7D; Start 125; Stop 149
tatttctcccttcaaacaaaaccga

SEQ ID NO: 262430 - DNA, 25 bp, Artificial
  probe
  misc_feature (1)..(25): SEQ ID NO: 381; WAN024F7D; Start 146; Stop 170
ccgattttgaaagtgaaacagttct

SEQ ID NO: 262431 - DNA, 25 bp, Artificial
  probe
  misc_feature (1)..(25): SEQ ID NO: 381; WAN024F7D; Start 144; Stop 168
aaccgattttgaaagtgaaacagtt

SEQ ID NO: 262432 - DNA, 25 bp, Artificial
  probe
  misc_feature (1)..(25): SEQ ID NO: 381; WAN024F7D; Start 145; Stop 169
accgattttgaaagtgaaacagttc

SEQ ID NO: 262433 - DNA, 25 bp, Artificial
  probe
  misc_feature (1)..(25): SEQ ID NO: 381; WAN024F7D; Start 126; Stop 150
atttctcccttcaaacaaaaccgat

SEQ ID NO: 262434 - DNA, 25 bp, Artificial
  probe
  misc_feature (1)..(25): SEQ ID NO: 381; WAN024F7D; Start 147; Stop 171
cgattttgaaagtgaaacagttctt

SEQ ID NO: 262435 - DNA, 25 bp, Artificial
  probe
  misc_feature (1)..(25): SEQ ID NO: 381; WAN024F7D; Start 128; Stop 152
ttctcccttcaaacaaaaccgattt

SEQ ID NO: 262436 - DNA, 25 bp, Artificial
  probe
  misc_feature (1)..(25): SEQ ID NO: 381; WAN024F7D; Start 127; Stop 151
tttctcccttcaaacaaaaccgatt

SEQ ID NO: 262437 - DNA, 25 bp, Artificial
  probe
  misc_feature (1)..(25): SEQ ID NO: 381; WAN024F7D; Start 122; Stop 146
ttctatttctcccttcaaacaaaac

SEQ ID NO: 262438 - DNA, 25 bp, Artificial
  probe
  misc_feature (1)..(25): SEQ ID NO: 381; WAN024F7D; Start 142; Stop 166
aaaaccgattttgaaagtgaaacag

SEQ ID NO: 262439 - DNA, 25 bp, Artificial
  probe
  misc_feature (1)..(25): SEQ ID NO: 381; WAN024F7D; Start 129; Stop 153
tctcccttcaaacaaaaccgatttt

SEQ ID NO: 262440 - DNA, 25 bp, Artificial
  probe
  misc_feature (1)..(25): SEQ ID NO: 381; WAN024F7D; Start 151; Stop 175
tttgaaagtgaaacagttcttactt

SEQ ID NO: 262441 - DNA, 25 bp, Artificial
  probe
  misc_feature (1)..(25): SEQ ID NO: 381; WAN024F7D; Start 150; Stop 174
ttttgaaagtgaaacagttcttact

SEQ ID NO: 262442 - DNA, 25 bp, Artificial
  probe
  misc_feature (1)..(25): SEQ ID NO: 381; WAN024F7D; Start 121; Stop 145
attctatttctcccttcaaacaaaa

SEQ ID NO: 262443 - DNA, 25 bp, Artificial
  probe
  misc_feature (1)..(25): SEQ ID NO: 381; WAN024F7D; Start 78; Stop 102
gtcagctttatctgcaacctcaaag

SEQ ID NO: 262444 - DNA, 25 bp, Artificial
  probe
  misc_feature (1)..(25): SEQ ID NO: 381; WAN024F7D; Start 83; Stop 107
ctttatctgcaacctcaaagctgtg

SEQ ID NO: 262445 - DNA, 25 bp, Artificial
  probe
  misc_feature (1)..(25): SEQ ID NO: 382; WAN024ARS; Start 54; Stop 78
tctattggatatacgttagcctctt

SEQ ID NO: 262446 - DNA, 25 bp, Artificial
  probe
  misc_feature (1)..(25): SEQ ID NO: 382; WAN024ARS; Start 3; Stop 27
tctcaccctctttccatagactatt

SEQ ID NO: 262447 - DNA, 25 bp, Artificial
  probe
  misc_feature (1)..(25): SEQ ID NO: 382; WAN024ARS; Start 4; Stop 28
ctcaccctctttccatagactattt

SEQ ID NO: 262448 - DNA, 25 bp, Artificial
  probe
  misc_feature (1)..(25): SEQ ID NO: 382; WAN024ARS; Start 2; Stop 26
ctctcaccctctttccatagactat

SEQ ID NO: 262449 - DNA, 25 bp, Artificial
  probe
  misc_feature (1)..(25): SEQ ID NO: 382; WAN024ARS; Start 53; Stop 77
atctattggatatacgttagcctct

SEQ ID NO: 262450 - DNA, 25 bp, Artificial
  probe
  misc_feature (1)..(25): SEQ ID NO: 382; WAN024ARS; Start 1; Stop 25
actctcaccctctttccatagacta

SEQ ID NO: 262451 - DNA, 25 bp, Artificial
  probe
  misc_feature (1)..(25): SEQ ID NO: 382; WAN024ARS; Start 52; Stop 76
aatctattggatatacgttagcctc

SEQ ID NO: 262452 - DNA, 25 bp, Artificial
  probe
  misc_feature (1)..(25): SEQ ID NO: 382; WAN024ARS; Start 5; Stop 29
tcaccctctttccatagactatttt

SEQ ID NO: 262453 - DNA, 25 bp, Artificial
  probe
  misc_feature (1)..(25): SEQ ID NO: 382; WAN024ARS; Start 51; Stop 75
aaatctattggatatacgttagcct

SEQ ID NO: 262454 - DNA, 25 bp, Artificial
  probe
  misc_feature (1)..(25): SEQ ID NO: 382; WAN024ARS; Start 6; Stop 30
caccctctttccatagactatttta

SEQ ID NO: 262455 - DNA, 25 bp, Artificial
  probe
  misc_feature (1)..(25): SEQ ID NO: 382; WAN024ARS; Start 7; Stop 31
accctctttccatagactattttaa

SEQ ID NO: 262456 - DNA, 25 bp, Artificial
  probe
  misc_feature (1)..(25): SEQ ID NO: 382; WAN024ARS; Start 8; Stop 32
ccctctttccatagactattttaac

SEQ ID NO: 262457 - DNA, 25 bp, Artificial
  probe
  misc_feature (1)..(25): SEQ ID NO: 382; WAN024ARS; Start 38; Stop 62
agaaagctaatgtaaatctattgga

SEQ ID NO: 262458 - DNA, 25 bp, Artificial
  probe
  misc_feature (1)..(25): SEQ ID NO: 382; WAN024ARS; Start 50; Stop 74
taaatctattggatatacgttagcc

SEQ ID NO: 262459 - DNA, 25 bp, Artificial
  probe
  misc_feature (1)..(25): SEQ ID NO: 382; WAN024ARS; Start 9; Stop 33
cctctttccatagactattttaaca

SEQ ID NO: 262460 - DNA, 25 bp, Artificial
  probe
  misc_feature (1)..(25): SEQ ID NO: 382; WAN024ARS; Start 37; Stop 61
aagaaagctaatgtaaatctattgg

SEQ ID NO: 262461 - DNA, 25 bp, Artificial
  probe
  misc_feature (1)..(25): SEQ ID NO: 382; WAN024ARS; Start 49; Stop 73
gtaaatctattggatatacgttagc

SEQ ID NO: 262462 - DNA, 25 bp, Artificial
  probe
  misc_feature (1)..(25): SEQ ID NO: 382; WAN024ARS; Start 39; Stop 63
gaaagctaatgtaaatctattggat

SEQ ID NO: 262463 - DNA, 25 bp, Artificial
  probe
  misc_feature (1)..(25): SEQ ID NO: 383; WAN0249ZJ; Start 52; Stop 76
cgttcgctttcatattctcagttac

SEQ ID NO: 262464 - DNA, 25 bp, Artificial
  probe
  misc_feature (1)..(25): SEQ ID NO: 383; WAN0249ZJ; Start 53; Stop 77
gttcgctttcatattctcagttact

SEQ ID NO: 262465 - DNA, 25 bp, Artificial
  probe
  misc_feature (1)..(25): SEQ ID NO: 383; WAN0249ZJ; Start 51; Stop 75
ccgttcgctttcatattctcagtta

SEQ ID NO: 262466 - DNA, 25 bp, Artificial
  probe
  misc_feature (1)..(25): SEQ ID NO: 383; WAN0249ZJ; Start 48; Stop 72
aaaccgttcgctttcatattctcag

SEQ ID NO: 262467 - DNA, 25 bp, Artificial
  probe
  misc_feature (1)..(25): SEQ ID NO: 383; WAN0249ZJ; Start 50; Stop 74
accgttcgctttcatattctcagtt

SEQ ID NO: 262468 - DNA, 25 bp, Artificial
  probe
  misc_feature (1)..(25): SEQ ID NO: 383; WAN0249ZJ; Start 49; Stop 73
aaccgttcgctttcatattctcagt

SEQ ID NO: 262469 - DNA, 25 bp, Artificial
  probe
  misc_feature (1)..(25): SEQ ID NO: 383; WAN0249ZJ; Start 47; Stop 71
aaaaccgttcgctttcatattctca

SEQ ID NO: 262470 - DNA, 25 bp, Artificial
  probe
  misc_feature (1)..(25): SEQ ID NO: 383; WAN0249ZJ; Start 43; Stop 67
taagaaaaccgttcgctttcatatt

SEQ ID NO: 262471 - DNA, 25 bp, Artificial
  probe
  misc_feature (1)..(25): SEQ ID NO: 383; WAN0249ZJ; Start 42; Stop 66
ttaagaaaaccgttcgctttcatat

SEQ ID NO: 262472 - DNA, 25 bp, Artificial
  probe
  misc_feature (1)..(25): SEQ ID NO: 383; WAN0249ZJ; Start 44; Stop 68
aagaaaaccgttcgctttcatattc

SEQ ID NO: 262473 - DNA, 25 bp, Artificial
  probe
  misc_feature (1)..(25): SEQ ID NO: 383; WAN0249ZJ; Start 46; Stop 70
gaaaaccgttcgctttcatattctc

SEQ ID NO: 262474 - DNA, 25 bp, Artificial
  probe
  misc_feature (1)..(25): SEQ ID NO: 383; WAN0249ZJ; Start 45; Stop 69
agaaaaccgttcgctttcatattct

SEQ ID NO: 262475 - DNA, 25 bp, Artificial
  probe
  misc_feature (1)..(25): SEQ ID NO: 384; WAN0249JD; Start 43; Stop 67
acacactcacatatctctgtaatga

SEQ ID NO: 262476 - DNA, 25 bp, Artificial
  probe
  misc_feature (1)..(25): SEQ ID NO: 384; WAN0249JD; Start 44; Stop 68
cacactcacatatctctgtaatgaa

SEQ ID NO: 262477 - DNA, 25 bp, Artificial
  probe
  misc_feature (1)..(25): SEQ ID NO: 384; WAN0249JD; Start 42; Stop 66
tacacactcacatatctctgtaatg

SEQ ID NO: 262478 - DNA, 25 bp, Artificial
  probe
  misc_feature (1)..(25): SEQ ID NO: 384; WAN0249JD; Start 40; Stop 64
aatacacactcacatatctctgtaa

SEQ ID NO: 262479 - DNA, 25 bp, Artificial
  probe
  misc_feature (1)..(25): SEQ ID NO: 384; WAN0249JD; Start 41; Stop 65
atacacactcacatatctctgtaat

SEQ ID NO: 262480 - DNA, 25 bp, Artificial
  probe
  misc_feature (1)..(25): SEQ ID NO: 384; WAN0249JD; Start 39; Stop 63
aaatacacactcacatatctctgta

SEQ ID NO: 262481 - DNA, 25 bp, Artificial
  probe
  misc_feature (1)..(25): SEQ ID NO: 384; WAN0249JD; Start 38; Stop 62
aaaatacacactcacatatctctgt

SEQ ID NO: 262482 - DNA, 25 bp, Artificial
  probe
  misc_feature (1)..(25): SEQ ID NO: 385; WAN024AGI; Start 93; Stop 117
agcagaattagcgagaaatcttagt

SEQ ID NO: 262483 - DNA, 25 bp, Artificial
  probe
  misc_feature (1)..(25): SEQ ID NO: 385; WAN024AGI; Start 88; Stop 112
aaactagcagaattagcgagaaatc

SEQ ID NO: 262484 - DNA, 25 bp, Artificial
  probe
  misc_feature (1)..(25): SEQ ID NO: 385; WAN024AGI; Start 94; Stop 118
gcagaattagcgagaaatcttagtt

SEQ ID NO: 262485 - DNA, 25 bp, Artificial
  probe
  misc_feature (1)..(25): SEQ ID NO: 385; WAN024AGI; Start 90; Stop 114
actagcagaattagcgagaaatctt

SEQ ID NO: 262486 - DNA, 25 bp, Artificial
  probe
  misc_feature (1)..(25): SEQ ID NO: 385; WAN024AGI; Start 89; Stop 113
aactagcagaattagcgagaaatct

SEQ ID NO: 262487 - DNA, 25 bp, Artificial
  probe
  misc_feature (1)..(25): SEQ ID NO: 385; WAN024AGI; Start 86; Stop 110
ttaaactagcagaattagcgagaaa

SEQ ID NO: 262488 - DNA, 25 bp, Artificial
  probe
  misc_feature (1)..(25): SEQ ID NO: 385; WAN024AGI; Start 92; Stop 116
tagcagaattagcgagaaatcttag

SEQ ID NO: 262489 - DNA, 25 bp, Artificial
  probe
  misc_feature (1)..(25): SEQ ID NO: 385; WAN024AGI; Start 87; Stop 111
taaactagcagaattagcgagaaat

SEQ ID NO: 262490 - DNA, 25 bp, Artificial
  probe
  misc_feature (1)..(25): SEQ ID NO: 385; WAN024AGI; Start 91; Stop 115
ctagcagaattagcgagaaatctta

SEQ ID NO: 262491 - DNA, 25 bp, Artificial
  probe
  misc_feature (1)..(25): SEQ ID NO: 385; WAN024AGI; Start 85; Stop 109
tttaaactagcagaattagcgagaa

SEQ ID NO: 262492 - DNA, 25 bp, Artificial
  probe
  misc_feature (1)..(25): SEQ ID NO: 385; WAN024AGI; Start 95; Stop 119
cagaattagcgagaaatcttagttt

SEQ ID NO: 262493 - DNA, 25 bp, Artificial
  probe
  misc_feature (1)..(25): SEQ ID NO: 385; WAN024AGI; Start 96; Stop 120
agaattagcgagaaatcttagtttt

SEQ ID NO: 262494 - DNA, 25 bp, Artificial
  probe
  misc_feature (1)..(25): SEQ ID NO: 385; WAN024AGI; Start 1; Stop 25
actgctttctaaaatagaatactgt

SEQ ID NO: 262495 - DNA, 25 bp, Artificial
  probe
  misc_feature (1)..(25): SEQ ID NO: 386; WAN024DVW-3; Start 909; Stop 933
tataatagaacagatgccgaacctc

SEQ ID NO: 262496 - DNA, 25 bp, Artificial
  probe
  misc_feature (1)..(25): SEQ ID NO: 386; WAN024DVW-3; Start 831; Stop 855
actcatactaaggcagattctaacg

SEQ ID NO: 262497 - DNA, 25 bp, Artificial
  probe
  misc_feature (1)..(25): SEQ ID NO: 386; WAN024DVW-3; Start 675; Stop 699
gatggtaagcaatctgaagaggata

SEQ ID NO: 262498 - DNA, 25 bp, Artificial
  probe
  misc_feature (1)..(25): SEQ ID NO: 386; WAN024DVW-3; Start 828; Stop 852
gtgactcatactaaggcagattcta

SEQ ID NO: 262499 - DNA, 25 bp, Artificial
  probe
  misc_feature (1)..(25): SEQ ID NO: 386; WAN024DVW-3; Start 676; Stop 700
atggtaagcaatctgaagaggatat

SEQ ID NO: 262500 - DNA, 25 bp, Artificial
  probe
  misc_feature (1)..(25): SEQ ID NO: 386; WAN024DVW-3; Start 1230; Stop 1254
aacggagattatggtcatcattcag

SEQ ID NO: 262501 - DNA, 25 bp, Artificial
  probe
  misc_feature (1)..(25): SEQ ID NO: 386; WAN024DVW-3; Start 835; Stop 859
atactaaggcagattctaacgcttg

SEQ ID NO: 262502 - DNA, 25 bp, Artificial
  probe
  misc_feature (1)..(25): SEQ ID NO: 386; WAN024DVW-3; Start 834; Stop 858
catactaaggcagattctaacgctt

SEQ ID NO: 262503 - DNA, 25 bp, Artificial
  probe
  misc_feature (1)..(25): SEQ ID NO: 386; WAN024DVW-3; Start 832; Stop 856
ctcatactaaggcagattctaacgc

SEQ ID NO: 262504 - DNA, 25 bp, Artificial
  probe
  misc_feature (1)..(25): SEQ ID NO: 386; WAN024DVW-3; Start 829; Stop 853
tgactcatactaaggcagattctaa

SEQ ID NO: 262505 - DNA, 25 bp, Artificial
  probe
  misc_feature (1)..(25): SEQ ID NO: 386; WAN024DVW-3; Start 677; Stop 701
tggtaagcaatctgaagaggatata

SEQ ID NO: 262506 - DNA, 25 bp, Artificial
  probe
  misc_feature (1)..(25): SEQ ID NO: 386; WAN024DVW-3; Start 1233; Stop 1257
ggagattatggtcatcattcagtga

SEQ ID NO: 262507 - DNA, 25 bp, Artificial
  probe
  misc_feature (1)..(25): SEQ ID NO: 386; WAN024DVW-3; Start 833; Stop 857
tcatactaaggcagattctaacgct

SEQ ID NO: 262508 - DNA, 25 bp, Artificial
  probe
  misc_feature (1)..(25): SEQ ID NO: 386; WAN024DVW-3; Start 830; Stop 854
gactcatactaaggcagattctaac

SEQ ID NO: 262509 - DNA, 25 bp, Artificial
  probe
  misc_feature (1)..(25): SEQ ID NO: 386; WAN024DVW-3; Start 818; Stop 842
acatcattcggtgactcatactaag

SEQ ID NO: 262510 - DNA, 25 bp, Artificial
  probe
  misc_feature (1)..(25): SEQ ID NO: 386; WAN024DVW-3; Start 817; Stop 841
gacatcattcggtgactcatactaa

SEQ ID NO: 262511 - DNA, 25 bp, Artificial
  probe
  misc_feature (1)..(25): SEQ ID NO: 386; WAN024DVW-3; Start 1232; Stop 1256
cggagattatggtcatcattcagtg

SEQ ID NO: 262512 - DNA, 25 bp, Artificial
  probe
  misc_feature (1)..(25): SEQ ID NO: 386; WAN024DVW-3; Start 910; Stop 934
ataatagaacagatgccgaacctca

SEQ ID NO: 262513 - DNA, 25 bp, Artificial
  probe
  misc_feature (1)..(25): SEQ ID NO: 386; WAN024DVW-3; Start 179; Stop 203
tcataatggaatggtagagatgtct

SEQ ID NO: 262514 - DNA, 25 bp, Artificial
  probe
  misc_feature (1)..(25): SEQ ID NO: 386; WAN024DVW-3; Start 171; Stop 195
acggttaatcataatggaatggtag

SEQ ID NO: 262515 - DNA, 25 bp, Artificial
  probe
  misc_feature (1)..(25): SEQ ID NO: 386; WAN024DVW-3; Start 819; Stop 843
catcattcggtgactcatactaagg

SEQ ID NO: 262516 - DNA, 25 bp, Artificial
  probe
  misc_feature (1)..(25): SEQ ID NO: 386; WAN024DVW-3; Start 664; Stop 688
ttagagaatcagatggtaagcaatc

SEQ ID NO: 262517 - DNA, 25 bp, Artificial
  probe
  misc_feature (1)..(25): SEQ ID NO: 386; WAN024DVW-3; Start 827; Stop 851
ggtgactcatactaaggcagattct

SEQ ID NO: 262518 - DNA, 25 bp, Artificial
  probe
  misc_feature (1)..(25): SEQ ID NO: 386; WAN024DVW-3; Start 172; Stop 196
cggttaatcataatggaatggtaga

SEQ ID NO: 262519 - DNA, 25 bp, Artificial
  probe
  misc_feature (1)..(25): SEQ ID NO: 386; WAN024DVW-3; Start 678; Stop 702
ggtaagcaatctgaagaggatatag

SEQ ID NO: 262520 - DNA, 25 bp, Artificial
  probe
  misc_feature (1)..(25): SEQ ID NO: 386; WAN024DVW-3; Start 1231; Stop 1255
acggagattatggtcatcattcagt

SEQ ID NO: 262521 - DNA, 25 bp, Artificial
  probe
  misc_feature (1)..(25): SEQ ID NO: 386; WAN024DVW-3; Start 1176; Stop 1200
cagagttcaacggattacaatggtt

SEQ ID NO: 262522 - DNA, 25 bp, Artificial
  probe
  misc_feature (1)..(25): SEQ ID NO: 386; WAN024DVW-3; Start 1098; Stop 1122
ttagcggaagttgaagtctatggtt

SEQ ID NO: 262523 - DNA, 25 bp, Artificial
  probe
  misc_feature (1)..(25): SEQ ID NO: 386; WAN024DVW-3; Start 21; Stop 45
tccatcaatcctgtagataatgact

SEQ ID NO: 262524 - DNA, 25 bp, Artificial
  probe
  misc_feature (1)..(25): SEQ ID NO: 386; WAN024DVW-3; Start 1174; Stop 1198
gacagagttcaacggattacaatgg

SEQ ID NO: 262525 - DNA, 25 bp, Artificial
  probe
  misc_feature (1)..(25): SEQ ID NO: 386; WAN024DVW-3; Start 169; Stop 193
ttacggttaatcataatggaatggt

SEQ ID NO: 262526 - DNA, 25 bp, Artificial
  probe
  misc_feature (1)..(25): SEQ ID NO: 386; WAN024DVW-3; Start 908; Stop 932
ttataatagaacagatgccgaacct

SEQ ID NO: 262527 - DNA, 25 bp, Artificial
  probe
  misc_feature (1)..(25): SEQ ID NO: 386; WAN024DVW-3; Start 911; Stop 935
taatagaacagatgccgaacctcag

SEQ ID NO: 262528 - DNA, 25 bp, Artificial
  probe
  misc_feature (1)..(25): SEQ ID NO: 387; WAN024AJI; Start 1; Stop 25
actgtgcctatcttatcataagtcg

SEQ ID NO: 262529 - DNA, 25 bp, Artificial
  probe
  misc_feature (1)..(25): SEQ ID NO: 387; WAN024AJI; Start 2; Stop 26
ctgtgcctatcttatcataagtcgc

SEQ ID NO: 262530 - DNA, 25 bp, Artificial
  probe
  misc_feature (1)..(25): SEQ ID NO: 387; WAN024AJI; Start 3; Stop 27
tgtgcctatcttatcataagtcgct

SEQ ID NO: 262531 - DNA, 25 bp, Artificial
  probe
  misc_feature (1)..(25): SEQ ID NO: 387; WAN024AJI; Start 74; Stop 98
ttacacttgcttgagttatgttatt

SEQ ID NO: 262532 - DNA, 25 bp, Artificial
  probe
  misc_feature (1)..(25): SEQ ID NO: 387; WAN024AJI; Start 69; Stop 93
aacatttacacttgcttgagttatg

SEQ ID NO: 262533 - DNA, 25 bp, Artificial
  probe
  misc_feature (1)..(25): SEQ ID NO: 387; WAN024AJI; Start 71; Stop 95
catttacacttgcttgagttatgtt

SEQ ID NO: 262534 - DNA, 25 bp, Artificial
  probe
  misc_feature (1)..(25): SEQ ID NO: 387; WAN024AJI; Start 68; Stop 92
aaacatttacacttgcttgagttat

SEQ ID NO: 262535 - DNA, 25 bp, Artificial
  probe
  misc_feature (1)..(25): SEQ ID NO: 387; WAN024AJI; Start 73; Stop 97
tttacacttgcttgagttatgttat

SEQ ID NO: 262536 - DNA, 25 bp, Artificial
  probe
  misc_feature (1)..(25): SEQ ID NO: 387; WAN024AJI; Start 72; Stop 96
atttacacttgcttgagttatgtta

SEQ ID NO: 262537 - DNA, 25 bp, Artificial
  probe
  misc_feature (1)..(25): SEQ ID NO: 387; WAN024AJI; Start 70; Stop 94
acatttacacttgcttgagttatgt

SEQ ID NO: 262538 - DNA, 25 bp, Artificial
  probe
  misc_feature (1)..(25): SEQ ID NO: 387; WAN024AJI; Start 65; Stop 89
tgaaaacatttacacttgcttgagt

SEQ ID NO: 262539 - DNA, 25 bp, Artificial
  probe
  misc_feature (1)..(25): SEQ ID NO: 387; WAN024AJI; Start 66; Stop 90
gaaaacatttacacttgcttgagtt

SEQ ID NO: 262540 - DNA, 25 bp, Artificial
  probe
  misc_feature (1)..(25): SEQ ID NO: 387; WAN024AJI; Start 64; Stop 88
gtgaaaacatttacacttgcttgag

SEQ ID NO: 262541 - DNA, 25 bp, Artificial
  probe
  misc_feature (1)..(25): SEQ ID NO: 387; WAN024AJI; Start 67; Stop 91
aaaacatttacacttgcttgagtta

SEQ ID NO: 262542 - DNA, 25 bp, Artificial
  probe
  misc_feature (1)..(25): SEQ ID NO: 387; WAN024AJI; Start 35; Stop 59
aaaaggcttgacgtgaaaagaaaag

SEQ ID NO: 262543 - DNA, 25 bp, Artificial
  probe
  misc_feature (1)..(25): SEQ ID NO: 387; WAN024AJI; Start 34; Stop 58
gaaaaggcttgacgtgaaaagaaaa

SEQ ID NO: 262544 - DNA, 25 bp, Artificial
  probe
  misc_feature (1)..(25): SEQ ID NO: 387; WAN024AJI; Start 33; Stop 57
tgaaaaggcttgacgtgaaaagaaa

SEQ ID NO: 262545 - DNA, 25 bp, Artificial
  probe
  misc_feature (1)..(25): SEQ ID NO: 387; WAN024AJI; Start 32; Stop 56
ttgaaaaggcttgacgtgaaaagaa

SEQ ID NO: 262546 - DNA, 25 bp, Artificial
  probe
  misc_feature (1)..(25): SEQ ID NO: 387; WAN024AJI; Start 31; Stop 55
tttgaaaaggcttgacgtgaaaaga

SEQ ID NO: 262547 - DNA, 25 bp, Artificial
  probe
  misc_feature (1)..(25): SEQ ID NO: 387; WAN024AJI; Start 30; Stop 54
ctttgaaaaggcttgacgtgaaaag

SEQ ID NO: 262548 - DNA, 25 bp, Artificial
  probe
  misc_feature (1)..(25): SEQ ID NO: 387; WAN024AJI; Start 29; Stop 53
gctttgaaaaggcttgacgtgaaaa

SEQ ID NO: 262549 - DNA, 25 bp, Artificial
  probe
  misc_feature (1)..(25): SEQ ID NO: 387; WAN024AJI; Start 63; Stop 87
agtgaaaacatttacacttgcttga

SEQ ID NO: 262550 - DNA, 25 bp, Artificial
  probe
  misc_feature (1)..(25): SEQ ID NO: 387; WAN024AJI; Start 62; Stop 86
gagtgaaaacatttacacttgcttg

SEQ ID NO: 262551 - DNA, 25 bp, Artificial
  probe
  misc_feature (1)..(25): SEQ ID NO: 387; WAN024AJI; Start 36; Stop 60
aaaggcttgacgtgaaaagaaaagc

SEQ ID NO: 262552 - DNA, 25 bp, Artificial
  probe
  misc_feature (1)..(25): SEQ ID NO: 388; WAN0249K3; Start 28; Stop 52
aaaagagaaagaaaaccgaaccttg

SEQ ID NO: 262553 - DNA, 25 bp, Artificial
  probe
  misc_feature (1)..(25): SEQ ID NO: 388; WAN0249K3; Start 29; Stop 53
aaagagaaagaaaaccgaaccttgc

SEQ ID NO: 262554 - DNA, 25 bp, Artificial
  probe
  misc_feature (1)..(25): SEQ ID NO: 388; WAN0249K3; Start 30; Stop 54
aagagaaagaaaaccgaaccttgcg

SEQ ID NO: 262555 - DNA, 25 bp, Artificial
  probe
  misc_feature (1)..(25): SEQ ID NO: 389; WAN024ABS; Start 6; Stop 30
tttcctttcaatgtttcgtgtttca

SEQ ID NO: 262556 - DNA, 25 bp, Artificial
  probe
  misc_feature (1)..(25): SEQ ID NO: 389; WAN024ABS; Start 7; Stop 31
ttcctttcaatgtttcgtgtttcat

SEQ ID NO: 262557 - DNA, 25 bp, Artificial
  probe
  misc_feature (1)..(25): SEQ ID NO: 389; WAN024ABS; Start 17; Stop 41
tgtttcgtgtttcattgtatcctaa

SEQ ID NO: 262558 - DNA, 25 bp, Artificial
  probe
  misc_feature (1)..(25): SEQ ID NO: 389; WAN024ABS; Start 21; Stop 45
tcgtgtttcattgtatcctaaatca

SEQ ID NO: 262559 - DNA, 25 bp, Artificial
  probe
  misc_feature (1)..(25): SEQ ID NO: 389; WAN024ABS; Start 16; Stop 40
atgtttcgtgtttcattgtatccta

SEQ ID NO: 262560 - DNA, 25 bp, Artificial
  probe
  misc_feature (1)..(25): SEQ ID NO: 389; WAN024ABS; Start 18; Stop 42
gtttcgtgtttcattgtatcctaaa

SEQ ID NO: 262561 - DNA, 25 bp, Artificial
  probe
  misc_feature (1)..(25): SEQ ID NO: 389; WAN024ABS; Start 22; Stop 46
cgtgtttcattgtatcctaaatcat

SEQ ID NO: 262562 - DNA, 25 bp, Artificial
  probe
  misc_feature (1)..(25): SEQ ID NO: 389; WAN024ABS; Start 20; Stop 44
ttcgtgtttcattgtatcctaaatc

SEQ ID NO: 262563 - DNA, 25 bp, Artificial
  probe
  misc_feature (1)..(25): SEQ ID NO: 389; WAN024ABS; Start 19; Stop 43
tttcgtgtttcattgtatcctaaat

SEQ ID NO: 262564 - DNA, 25 bp, Artificial
  probe
  misc_feature (1)..(25): SEQ ID NO: 389; WAN024ABS; Start 8; Stop 32
tcctttcaatgtttcgtgtttcatt

SEQ ID NO: 262565 - DNA, 25 bp, Artificial
  probe
  misc_feature (1)..(25): SEQ ID NO: 389; WAN024ABS; Start 15; Stop 39
aatgtttcgtgtttcattgtatcct

SEQ ID NO: 262566 - DNA, 25 bp, Artificial
  probe
  misc_feature (1)..(25): SEQ ID NO: 389; WAN024ABS; Start 4; Stop 28
gttttcctttcaatgtttcgtgttt

SEQ ID NO: 262567 - DNA, 25 bp, Artificial
  probe
  misc_feature (1)..(25): SEQ ID NO: 389; WAN024ABS; Start 5; Stop 29
ttttcctttcaatgtttcgtgtttc

SEQ ID NO: 262568 - DNA, 25 bp, Artificial
  probe
  misc_feature (1)..(25): SEQ ID NO: 389; WAN024ABS; Start 3; Stop 27
tgttttcctttcaatgtttcgtgtt

SEQ ID NO: 262569 - DNA, 25 bp, Artificial
  probe
  misc_feature (1)..(25): SEQ ID NO: 389; WAN024ABS; Start 54; Stop 78
ggcaattaaaaggctcataaatgga

SEQ ID NO: 262570 - DNA, 25 bp, Artificial
  probe
  misc_feature (1)..(25): SEQ ID NO: 389; WAN024ABS; Start 53; Stop 77
aggcaattaaaaggctcataaatgg

SEQ ID NO: 262571 - DNA, 25 bp, Artificial
  probe
  misc_feature (1)..(25): SEQ ID NO: 389; WAN024ABS; Start 2; Stop 26
ctgttttcctttcaatgtttcgtgt

SEQ ID NO: 262572 - DNA, 25 bp, Artificial
  probe
  misc_feature (1)..(25): SEQ ID NO: 389; WAN024ABS; Start 1; Stop 25
actgttttcctttcaatgtttcgtg

SEQ ID NO: 262573 - DNA, 25 bp, Artificial
  probe
  misc_feature (1)..(25): SEQ ID NO: 389; WAN024ABS; Start 50; Stop 74
agaaggcaattaaaaggctcataaa

SEQ ID NO: 262574 - DNA, 25 bp, Artificial
  probe
  misc_feature (1)..(25): SEQ ID NO: 389; WAN024ABS; Start 52; Stop 76
aaggcaattaaaaggctcataaatg

SEQ ID NO: 262575 - DNA, 25 bp, Artificial
  probe
  misc_feature (1)..(25): SEQ ID NO: 389; WAN024ABS; Start 49; Stop 73
tagaaggcaattaaaaggctcataa

SEQ ID NO: 262576 - DNA, 25 bp, Artificial
  probe
  misc_feature (1)..(25): SEQ ID NO: 389; WAN024ABS; Start 46; Stop 70
ttatagaaggcaattaaaaggctca

SEQ ID NO: 262577 - DNA, 25 bp, Artificial
  probe
  misc_feature (1)..(25): SEQ ID NO: 389; WAN024ABS; Start 51; Stop 75
gaaggcaattaaaaggctcataaat

SEQ ID NO: 262578 - DNA, 25 bp, Artificial
  probe
  misc_feature (1)..(25): SEQ ID NO: 389; WAN024ABS; Start 48; Stop 72
atagaaggcaattaaaaggctcata

SEQ ID NO: 262579 - DNA, 25 bp, Artificial
  probe
  misc_feature (1)..(25): SEQ ID NO: 389; WAN024ABS; Start 47; Stop 71
tatagaaggcaattaaaaggctcat

SEQ ID NO: 262580 - DNA, 25 bp, Artificial
  probe
  misc_feature (1)..(25): SEQ ID NO: 389; WAN024ABS; Start 55; Stop 79
gcaattaaaaggctcataaatggag

SEQ ID NO: 262581 - DNA, 25 bp, Artificial
  probe
  misc_feature (1)..(25): SEQ ID NO: 389; WAN024ABS; Start 23; Stop 47
gtgtttcattgtatcctaaatcatt

SEQ ID NO: 262582 - DNA, 25 bp, Artificial
  probe
  misc_feature (1)..(25): SEQ ID NO: 389; WAN024ABS; Start 44; Stop 68
cattatagaaggcaattaaaaggct

SEQ ID NO: 262583 - DNA, 25 bp, Artificial
  probe
  misc_feature (1)..(25): SEQ ID NO: 389; WAN024ABS; Start 43; Stop 67
tcattatagaaggcaattaaaaggc

SEQ ID NO: 262584 - DNA, 25 bp, Artificial
  probe
  misc_feature (1)..(25): SEQ ID NO: 389; WAN024ABS; Start 45; Stop 69
attatagaaggcaattaaaaggctc

SEQ ID NO: 262585 - DNA, 25 bp, Artificial
  probe
  misc_feature (1)..(25): SEQ ID NO: 389; WAN024ABS; Start 36; Stop 60
tcctaaatcattatagaaggcaatt

SEQ ID NO: 262586 - DNA, 25 bp, Artificial
  probe
  misc_feature (1)..(25): SEQ ID NO: 389; WAN024ABS; Start 33; Stop 57
gtatcctaaatcattatagaaggca

SEQ ID NO: 262587 - DNA, 25 bp, Artificial
  probe
  misc_feature (1)..(25): SEQ ID NO: 389; WAN024ABS; Start 32; Stop 56
tgtatcctaaatcattatagaaggc

SEQ ID NO: 262588 - DNA, 25 bp, Artificial
  probe
  misc_feature (1)..(25): SEQ ID NO: 390; WAN024A6X; Start 60; Stop 84
tctccccatataagcactaacattc

SEQ ID NO: 262589 - DNA, 25 bp, Artificial
  probe
  misc_feature (1)..(25): SEQ ID NO: 390; WAN024A6X; Start 57; Stop 81
gattctccccatataagcactaaca

SEQ ID NO: 262590 - DNA, 25 bp, Artificial
  probe
  misc_feature (1)..(25): SEQ ID NO: 390; WAN024A6X; Start 59; Stop 83
ttctccccatataagcactaacatt

SEQ ID NO: 262591 - DNA, 25 bp, Artificial
  probe
  misc_feature (1)..(25): SEQ ID NO: 390; WAN024A6X; Start 61; Stop 85
ctccccatataagcactaacattcc

SEQ ID NO: 262592 - DNA, 25 bp, Artificial
  probe
  misc_feature (1)..(25): SEQ ID NO: 390; WAN024A6X; Start 58; Stop 82
attctccccatataagcactaacat

SEQ ID NO: 262593 - DNA, 25 bp, Artificial
  probe
  misc_feature (1)..(25): SEQ ID NO: 390; WAN024A6X; Start 62; Stop 86
tccccatataagcactaacattcca

SEQ ID NO: 262594 - DNA, 25 bp, Artificial
  probe
  misc_feature (1)..(25): SEQ ID NO: 390; WAN024A6X; Start 56; Stop 80
ggattctccccatataagcactaac

SEQ ID NO: 262595 - DNA, 25 bp, Artificial
  probe
  misc_feature (1)..(25): SEQ ID NO: 390; WAN024A6X; Start 55; Stop 79
tggattctccccatataagcactaa

SEQ ID NO: 262596 - DNA, 25 bp, Artificial
  probe
  misc_feature (1)..(25): SEQ ID NO: 390; WAN024A6X; Start 54; Stop 78
ttggattctccccatataagcacta

SEQ ID NO: 262597 - DNA, 25 bp, Artificial
  probe
  misc_feature (1)..(25): SEQ ID NO: 390; WAN024A6X; Start 52; Stop 76
ctttggattctccccatataagcac

SEQ ID NO: 262598 - DNA, 25 bp, Artificial
  probe
  misc_feature (1)..(25): SEQ ID NO: 390; WAN024A6X; Start 53; Stop 77
tttggattctccccatataagcact

SEQ ID NO: 262599 - DNA, 25 bp, Artificial
  probe
  misc_feature (1)..(25): SEQ ID NO: 390; WAN024A6X; Start 50; Stop 74
tcctttggattctccccatataagc

SEQ ID NO: 262600 - DNA, 25 bp, Artificial
  probe
  misc_feature (1)..(25): SEQ ID NO: 390; WAN024A6X; Start 51; Stop 75
cctttggattctccccatataagca

SEQ ID NO: 262601 - DNA, 25 bp, Artificial
  probe
  misc_feature (1)..(25): SEQ ID NO: 390; WAN024A6X; Start 49; Stop 73
atcctttggattctccccatataag

SEQ ID NO: 262602 - DNA, 25 bp, Artificial
  probe
  misc_feature (1)..(25): SEQ ID NO: 391; WAN0249IH; Start 2; Stop 26
cttacctcctcacctatactattcg

SEQ ID NO: 262603 - DNA, 25 bp, Artificial
  probe
  misc_feature (1)..(25): SEQ ID NO: 391; WAN0249IH; Start 3; Stop 27
ttacctcctcacctatactattcgc

SEQ ID NO: 262604 - DNA, 25 bp, Artificial
  probe
  misc_feature (1)..(25): SEQ ID NO: 391; WAN0249IH; Start 1; Stop 25
acttacctcctcacctatactattc

SEQ ID NO: 262605 - DNA, 25 bp, Artificial
  probe
  misc_feature (1)..(25): SEQ ID NO: 391; WAN0249IH; Start 4; Stop 28
tacctcctcacctatactattcgca

SEQ ID NO: 262606 - DNA, 25 bp, Artificial
  probe
  misc_feature (1)..(25): SEQ ID NO: 391; WAN0249IH; Start 5; Stop 29
acctcctcacctatactattcgcaa

SEQ ID NO: 262607 - DNA, 25 bp, Artificial
  probe
  misc_feature (1)..(25): SEQ ID NO: 391; WAN0249IH; Start 7; Stop 31
ctcctcacctatactattcgcaaag

SEQ ID NO: 262608 - DNA, 25 bp, Artificial
  probe
  misc_feature (1)..(25): SEQ ID NO: 391; WAN0249IH; Start 8; Stop 32
tcctcacctatactattcgcaaaga

SEQ ID NO: 262609 - DNA, 25 bp, Artificial
  probe
  misc_feature (1)..(25): SEQ ID NO: 391; WAN0249IH; Start 11; Stop 35
tcacctatactattcgcaaagagtt

SEQ ID NO: 262610 - DNA, 25 bp, Artificial
  probe
  misc_feature (1)..(25): SEQ ID NO: 391; WAN0249IH; Start 10; Stop 34
ctcacctatactattcgcaaagagt

SEQ ID NO: 262611 - DNA, 25 bp, Artificial
  probe
  misc_feature (1)..(25): SEQ ID NO: 391; WAN0249IH; Start 6; Stop 30
cctcctcacctatactattcgcaaa

SEQ ID NO: 262612 - DNA, 25 bp, Artificial
  probe
  misc_feature (1)..(25): SEQ ID NO: 391; WAN0249IH; Start 9; Stop 33
cctcacctatactattcgcaaagag

SEQ ID NO: 262613 - DNA, 25 bp, Artificial
  probe
  misc_feature (1)..(25): SEQ ID NO: 391; WAN0249IH; Start 12; Stop 36
cacctatactattcgcaaagagtta

SEQ ID NO: 262614 - DNA, 25 bp, Artificial
  probe
  misc_feature (1)..(25): SEQ ID NO: 391; WAN0249IH; Start 13; Stop 37
acctatactattcgcaaagagttag

SEQ ID NO: 262615 - DNA, 25 bp, Artificial
  probe
  misc_feature (1)..(25): SEQ ID NO: 391; WAN0249IH; Start 14; Stop 38
cctatactattcgcaaagagttaga

SEQ ID NO: 262616 - DNA, 25 bp, Artificial
  probe
  misc_feature (1)..(25): SEQ ID NO: 391; WAN0249IH; Start 15; Stop 39
ctatactattcgcaaagagttagaa

SEQ ID NO: 262617 - DNA, 25 bp, Artificial
  probe
  misc_feature (1)..(25): SEQ ID NO: 391; WAN0249IH; Start 16; Stop 40
tatactattcgcaaagagttagaaa

SEQ ID NO: 262618 - DNA, 25 bp, Artificial
  probe
  misc_feature (1)..(25): SEQ ID NO: 391; WAN0249IH; Start 17; Stop 41
atactattcgcaaagagttagaaaa

SEQ ID NO: 262619 - DNA, 25 bp, Artificial
  probe
  misc_feature (1)..(25): SEQ ID NO: 392; WAN024AJ9; Start 33; Stop 57
ctcctgctcctaatactaatactgt

SEQ ID NO: 262620 - DNA, 25 bp, Artificial
  probe
  misc_feature (1)..(25): SEQ ID NO: 392; WAN024AJ9; Start 34; Stop 58
tcctgctcctaatactaatactgtt

SEQ ID NO: 262621 - DNA, 25 bp, Artificial
  probe
  misc_feature (1)..(25): SEQ ID NO: 392; WAN024AJ9; Start 189; Stop 213
actgcctaatacttcttctatctct

SEQ ID NO: 262622 - DNA, 25 bp, Artificial
  probe
  misc_feature (1)..(25): SEQ ID NO: 392; WAN024AJ9; Start 188; Stop 212
tactgcctaatacttcttctatctc

SEQ ID NO: 262623 - DNA, 25 bp, Artificial
  probe
  misc_feature (1)..(25): SEQ ID NO: 392; WAN024AJ9; Start 190; Stop 214
ctgcctaatacttcttctatctcta

SEQ ID NO: 262624 - DNA, 25 bp, Artificial
  probe
  misc_feature (1)..(25): SEQ ID NO: 392; WAN024AJ9; Start 35; Stop 59
cctgctcctaatactaatactgttt

SEQ ID NO: 262625 - DNA, 25 bp, Artificial
  probe
  misc_feature (1)..(25): SEQ ID NO: 392; WAN024AJ9; Start 187; Stop 211
ttactgcctaatacttcttctatct

SEQ ID NO: 262626 - DNA, 25 bp, Artificial
  probe
  misc_feature (1)..(25): SEQ ID NO: 392; WAN024AJ9; Start 127; Stop 151
actatcaatatctatctcatccgaa

SEQ ID NO: 262627 - DNA, 25 bp, Artificial
  probe
  misc_feature (1)..(25): SEQ ID NO: 392; WAN024AJ9; Start 172; Stop 196
agttcaaatgttagtttactgccta

SEQ ID NO: 262628 - DNA, 25 bp, Artificial
  probe
  misc_feature (1)..(25): SEQ ID NO: 392; WAN024AJ9; Start 171; Stop 195
tagttcaaatgttagtttactgcct

SEQ ID NO: 262629 - DNA, 25 bp, Artificial
  probe
  misc_feature (1)..(25): SEQ ID NO: 392; WAN024AJ9; Start 191; Stop 215
tgcctaatacttcttctatctctaa

SEQ ID NO: 262630 - DNA, 25 bp, Artificial
  probe
  misc_feature (1)..(25): SEQ ID NO: 392; WAN024AJ9; Start 235; Stop 259
aatagatcgttgataaattcttgcg

SEQ ID NO: 262631 - DNA, 25 bp, Artificial
  probe
  misc_feature (1)..(25): SEQ ID NO: 392; WAN024AJ9; Start 294; Stop 318
ccgaccacgtaaatacattatacct

SEQ ID NO: 262632 - DNA, 25 bp, Artificial
  probe
  misc_feature (1)..(25): SEQ ID NO: 392; WAN024AJ9; Start 293; Stop 317
tccgaccacgtaaatacattatacc

SEQ ID NO: 262633 - DNA, 25 bp, Artificial
  probe
  misc_feature (1)..(25): SEQ ID NO: 392; WAN024AJ9; Start 291; Stop 315
actccgaccacgtaaatacattata

SEQ ID NO: 262634 - DNA, 25 bp, Artificial
  probe
  misc_feature (1)..(25): SEQ ID NO: 392; WAN024AJ9; Start 170; Stop 194
atagttcaaatgttagtttactgcc

SEQ ID NO: 262635 - DNA, 25 bp, Artificial
  probe
  misc_feature (1)..(25): SEQ ID NO: 392; WAN024AJ9; Start 290; Stop 314
tactccgaccacgtaaatacattat

SEQ ID NO: 262636 - DNA, 25 bp, Artificial
  probe
  misc_feature (1)..(25): SEQ ID NO: 392; WAN024AJ9; Start 289; Stop 313
atactccgaccacgtaaatacatta

SEQ ID NO: 262637 - DNA, 25 bp, Artificial
  probe
  misc_feature (1)..(25): SEQ ID NO: 392; WAN024AJ9; Start 288; Stop 312
catactccgaccacgtaaatacatt

SEQ ID NO: 262638 - DNA, 25 bp, Artificial
  probe
  misc_feature (1)..(25): SEQ ID NO: 392; WAN024AJ9; Start 254; Stop 278
cttgcgaaatttgaggttctatagc

SEQ ID NO: 262639 - DNA, 25 bp, Artificial
  probe
  misc_feature (1)..(25): SEQ ID NO: 392; WAN024AJ9; Start 251; Stop 275
attcttgcgaaatttgaggttctat

SEQ ID NO: 262640 - DNA, 25 bp, Artificial
  probe
  misc_feature (1)..(25): SEQ ID NO: 392; WAN024AJ9; Start 292; Stop 316
ctccgaccacgtaaatacattatac

SEQ ID NO: 262641 - DNA, 25 bp, Artificial
  probe
  misc_feature (1)..(25): SEQ ID NO: 392; WAN024AJ9; Start 255; Stop 279
ttgcgaaatttgaggttctatagct

SEQ ID NO: 262642 - DNA, 25 bp, Artificial
  probe
  misc_feature (1)..(25): SEQ ID NO: 392; WAN024AJ9; Start 253; Stop 277
tcttgcgaaatttgaggttctatag

SEQ ID NO: 262643 - DNA, 25 bp, Artificial
  probe
  misc_feature (1)..(25): SEQ ID NO: 392; WAN024AJ9; Start 173; Stop 197
gttcaaatgttagtttactgcctaa

SEQ ID NO: 262644 - DNA, 25 bp, Artificial
  probe
  misc_feature (1)..(25): SEQ ID NO: 392; WAN024AJ9; Start 295; Stop 319
cgaccacgtaaatacattatacctt

SEQ ID NO: 262645 - DNA, 25 bp, Artificial
  probe
  misc_feature (1)..(25): SEQ ID NO: 392; WAN024AJ9; Start 252; Stop 276
ttcttgcgaaatttgaggttctata

SEQ ID NO: 262646 - DNA, 25 bp, Artificial
  probe
  misc_feature (1)..(25): SEQ ID NO: 392; WAN024AJ9; Start 126; Stop 150
tactatcaatatctatctcatccga

SEQ ID NO: 262647 - DNA, 25 bp, Artificial
  probe
  misc_feature (1)..(25): SEQ ID NO: 392; WAN024AJ9; Start 250; Stop 274
aattcttgcgaaatttgaggttcta

SEQ ID NO: 262648 - DNA, 25 bp, Artificial
  probe
  misc_feature (1)..(25): SEQ ID NO: 392; WAN024AJ9; Start 238; Stop 262
agatcgttgataaattcttgcgaaa

SEQ ID NO: 262649 - DNA, 25 bp, Artificial
  probe
  misc_feature (1)..(25): SEQ ID NO: 392; WAN024AJ9; Start 180; Stop 204
tgttagtttactgcctaatacttct

SEQ ID NO: 262650 - DNA, 25 bp, Artificial
  probe
  misc_feature (1)..(25): SEQ ID NO: 392; WAN024AJ9; Start 237; Stop 261
tagatcgttgataaattcttgcgaa

SEQ ID NO: 262651 - DNA, 25 bp, Artificial
  probe
  misc_feature (1)..(25): SEQ ID NO: 392; WAN024AJ9; Start 125; Stop 149
ctactatcaatatctatctcatccg

SEQ ID NO: 262652 - DNA, 25 bp, Artificial
  probe
  misc_feature (1)..(25): SEQ ID NO: 393; WAN024ABB; Start 34; Stop 58
ctttatcaatcatttcaacgctcct

SEQ ID NO: 262653 - DNA, 25 bp, Artificial
  probe
  misc_feature (1)..(25): SEQ ID NO: 393; WAN024ABB; Start 36; Stop 60
ttatcaatcatttcaacgctccttt

SEQ ID NO: 262654 - DNA, 25 bp, Artificial
  probe
  misc_feature (1)..(25): SEQ ID NO: 393; WAN024ABB; Start 35; Stop 59
tttatcaatcatttcaacgctcctt

SEQ ID NO: 262655 - DNA, 25 bp, Artificial
  probe
  misc_feature (1)..(25): SEQ ID NO: 393; WAN024ABB; Start 38; Stop 62
atcaatcatttcaacgctcctttaa

SEQ ID NO: 262656 - DNA, 25 bp, Artificial
  probe
  misc_feature (1)..(25): SEQ ID NO: 393; WAN024ABB; Start 33; Stop 57
cctttatcaatcatttcaacgctcc

SEQ ID NO: 262657 - DNA, 25 bp, Artificial
  probe
  misc_feature (1)..(25): SEQ ID NO: 393; WAN024ABB; Start 37; Stop 61
tatcaatcatttcaacgctccttta

SEQ ID NO: 262658 - DNA, 25 bp, Artificial
  probe
  misc_feature (1)..(25): SEQ ID NO: 393; WAN024ABB; Start 32; Stop 56
gcctttatcaatcatttcaacgctc

SEQ ID NO: 262659 - DNA, 25 bp, Artificial
  probe
  misc_feature (1)..(25): SEQ ID NO: 393; WAN024ABB; Start 30; Stop 54
ttgcctttatcaatcatttcaacgc

SEQ ID NO: 262660 - DNA, 25 bp, Artificial
  probe
  misc_feature (1)..(25): SEQ ID NO: 393; WAN024ABB; Start 31; Stop 55
tgcctttatcaatcatttcaacgct

SEQ ID NO: 262661 - DNA, 25 bp, Artificial
  probe
  misc_feature (1)..(25): SEQ ID NO: 393; WAN024ABB; Start 27; Stop 51
ttgttgcctttatcaatcatttcaa

SEQ ID NO: 262662 - DNA, 25 bp, Artificial
  probe
  misc_feature (1)..(25): SEQ ID NO: 393; WAN024ABB; Start 26; Stop 50
tttgttgcctttatcaatcatttca

SEQ ID NO: 262663 - DNA, 25 bp, Artificial
  probe
  misc_feature (1)..(25): SEQ ID NO: 393; WAN024ABB; Start 39; Stop 63
tcaatcatttcaacgctcctttaaa

SEQ ID NO: 262664 - DNA, 25 bp, Artificial
  probe
  misc_feature (1)..(25): SEQ ID NO: 393; WAN024ABB; Start 118; Stop 142
tgcaagaaaggaataatagctgttc

SEQ ID NO: 262665 - DNA, 25 bp, Artificial
  probe
  misc_feature (1)..(25): SEQ ID NO: 393; WAN024ABB; Start 132; Stop 156
aatagctgttcctataccaagtagg

SEQ ID NO: 262666 - DNA, 25 bp, Artificial
  probe
  misc_feature (1)..(25): SEQ ID NO: 393; WAN024ABB; Start 131; Stop 155
taatagctgttcctataccaagtag

SEQ ID NO: 262667 - DNA, 25 bp, Artificial
  probe
  misc_feature (1)..(25): SEQ ID NO: 393; WAN024ABB; Start 129; Stop 153
aataatagctgttcctataccaagt

SEQ ID NO: 262668 - DNA, 25 bp, Artificial
  probe
  misc_feature (1)..(25): SEQ ID NO: 393; WAN024ABB; Start 146; Stop 170
taccaagtaggaatgtaataaatgc

SEQ ID NO: 262669 - DNA, 25 bp, Artificial
  probe
  misc_feature (1)..(25): SEQ ID NO: 393; WAN024ABB; Start 147; Stop 171
accaagtaggaatgtaataaatgca

SEQ ID NO: 262670 - DNA, 25 bp, Artificial
  probe
  misc_feature (1)..(25): SEQ ID NO: 393; WAN024ABB; Start 40; Stop 64
caatcatttcaacgctcctttaaat

SEQ ID NO: 262671 - DNA, 25 bp, Artificial
  probe
  misc_feature (1)..(25): SEQ ID NO: 393; WAN024ABB; Start 128; Stop 152
gaataatagctgttcctataccaag

SEQ ID NO: 262672 - DNA, 25 bp, Artificial
  probe
  misc_feature (1)..(25): SEQ ID NO: 393; WAN024ABB; Start 148; Stop 172
ccaagtaggaatgtaataaatgcag

SEQ ID NO: 262673 - DNA, 25 bp, Artificial
  probe
  misc_feature (1)..(25): SEQ ID NO: 393; WAN024ABB; Start 169; Stop 193
gcagaaagtcatatactgtcattct

SEQ ID NO: 262674 - DNA, 25 bp, Artificial
  probe
  misc_feature (1)..(25): SEQ ID NO: 393; WAN024ABB; Start 155; Stop 179
ggaatgtaataaatgcagaaagtca

SEQ ID NO: 262675 - DNA, 25 bp, Artificial
  probe
  misc_feature (1)..(25): SEQ ID NO: 393; WAN024ABB; Start 168; Stop 192
tgcagaaagtcatatactgtcattc

SEQ ID NO: 262676 - DNA, 25 bp, Artificial
  probe
  misc_feature (1)..(25): SEQ ID NO: 393; WAN024ABB; Start 130; Stop 154
ataatagctgttcctataccaagta

SEQ ID NO: 262677 - DNA, 25 bp, Artificial
  probe
  misc_feature (1)..(25): SEQ ID NO: 393; WAN024ABB; Start 165; Stop 189
aaatgcagaaagtcatatactgtca

SEQ ID NO: 262678 - DNA, 25 bp, Artificial
  probe
  misc_feature (1)..(25): SEQ ID NO: 393; WAN024ABB; Start 154; Stop 178
aggaatgtaataaatgcagaaagtc

SEQ ID NO: 262679 - DNA, 25 bp, Artificial
  probe
  misc_feature (1)..(25): SEQ ID NO: 393; WAN024ABB; Start 167; Stop 191
atgcagaaagtcatatactgtcatt

SEQ ID NO: 262680 - DNA, 25 bp, Artificial
  probe
  misc_feature (1)..(25): SEQ ID NO: 393; WAN024ABB; Start 166; Stop 190
aatgcagaaagtcatatactgtcat

SEQ ID NO: 262681 - DNA, 25 bp, Artificial
  probe
  misc_feature (1)..(25): SEQ ID NO: 393; WAN024ABB; Start 41; Stop 65
aatcatttcaacgctcctttaaata

SEQ ID NO: 262682 - DNA, 25 bp, Artificial
  probe
  misc_feature (1)..(25): SEQ ID NO: 393; WAN024ABB; Start 96; Stop 120
gcctattttctaattgataccttgc

SEQ ID NO: 262683 - DNA, 25 bp, Artificial
  probe
  misc_feature (1)..(25): SEQ ID NO: 393; WAN024ABB; Start 149; Stop 173
caagtaggaatgtaataaatgcaga

SEQ ID NO: 262684 - DNA, 25 bp, Artificial
  probe
  misc_feature (1)..(25): SEQ ID NO: 393; WAN024ABB; Start 42; Stop 66
atcatttcaacgctcctttaaatat

SEQ ID NO: 262685 - DNA, 25 bp, Artificial
  probe
  misc_feature (1)..(25): SEQ ID NO: 395; WAN024A5N; Start 51; Stop 75
aatcagcacaccaaactttgtaatt

SEQ ID NO: 262686 - DNA, 25 bp, Artificial
  probe
  misc_feature (1)..(25): SEQ ID NO: 395; WAN024A5N; Start 50; Stop 74
aaatcagcacaccaaactttgtaat

SEQ ID NO: 262687 - DNA, 25 bp, Artificial
  probe
  misc_feature (1)..(25): SEQ ID NO: 395; WAN024A5N; Start 1; Stop 25
acttcctccataaagatttactctc

SEQ ID NO: 262688 - DNA, 25 bp, Artificial
  probe
  misc_feature (1)..(25): SEQ ID NO: 395; WAN024A5N; Start 53; Stop 77
tcagcacaccaaactttgtaattaa

SEQ ID NO: 262689 - DNA, 25 bp, Artificial
  probe
  misc_feature (1)..(25): SEQ ID NO: 395; WAN024A5N; Start 52; Stop 76
atcagcacaccaaactttgtaatta

SEQ ID NO: 262690 - DNA, 25 bp, Artificial
  probe
  misc_feature (1)..(25): SEQ ID NO: 395; WAN024A5N; Start 2; Stop 26
cttcctccataaagatttactctct

SEQ ID NO: 262691 - DNA, 25 bp, Artificial
  probe
  misc_feature (1)..(25): SEQ ID NO: 395; WAN024A5N; Start 54; Stop 78
cagcacaccaaactttgtaattaaa

SEQ ID NO: 262692 - DNA, 25 bp, Artificial
  probe
  misc_feature (1)..(25): SEQ ID NO: 395; WAN024A5N; Start 49; Stop 73
caaatcagcacaccaaactttgtaa

SEQ ID NO: 262693 - DNA, 25 bp, Artificial
  probe
  misc_feature (1)..(25): SEQ ID NO: 395; WAN024A5N; Start 46; Stop 70
ctacaaatcagcacaccaaactttg

SEQ ID NO: 262694 - DNA, 25 bp, Artificial
  probe
  misc_feature (1)..(25): SEQ ID NO: 395; WAN024A5N; Start 5; Stop 29
cctccataaagatttactctcttga

SEQ ID NO: 262695 - DNA, 25 bp, Artificial
  probe
  misc_feature (1)..(25): SEQ ID NO: 395; WAN024A5N; Start 4; Stop 28
tcctccataaagatttactctcttg

SEQ ID NO: 262696 - DNA, 25 bp, Artificial
  probe
  misc_feature (1)..(25): SEQ ID NO: 395; WAN024A5N; Start 23; Stop 47
ctcttgattataccatgaaaaggct

SEQ ID NO: 262697 - DNA, 25 bp, Artificial
  probe
  misc_feature (1)..(25): SEQ ID NO: 395; WAN024A5N; Start 22; Stop 46
tctcttgattataccatgaaaaggc

SEQ ID NO: 262698 - DNA, 25 bp, Artificial
  probe
  misc_feature (1)..(25): SEQ ID NO: 395; WAN024A5N; Start 32; Stop 56
ataccatgaaaaggctacaaatcag

SEQ ID NO: 262699 - DNA, 25 bp, Artificial
  probe
  misc_feature (1)..(25): SEQ ID NO: 395; WAN024A5N; Start 45; Stop 69
gctacaaatcagcacaccaaacttt

SEQ ID NO: 262700 - DNA, 25 bp, Artificial
  probe
  misc_feature (1)..(25): SEQ ID NO: 395; WAN024A5N; Start 27; Stop 51
tgattataccatgaaaaggctacaa

SEQ ID NO: 262701 - DNA, 25 bp, Artificial
  probe
  misc_feature (1)..(25): SEQ ID NO: 395; WAN024A5N; Start 26; Stop 50
ttgattataccatgaaaaggctaca

SEQ ID NO: 262702 - DNA, 25 bp, Artificial
  probe
  misc_feature (1)..(25): SEQ ID NO: 395; WAN024A5N; Start 3; Stop 27
ttcctccataaagatttactctctt

SEQ ID NO: 262703 - DNA, 25 bp, Artificial
  probe
  misc_feature (1)..(25): SEQ ID NO: 395; WAN024A5N; Start 31; Stop 55
tataccatgaaaaggctacaaatca

SEQ ID NO: 262704 - DNA, 25 bp, Artificial
  probe
  misc_feature (1)..(25): SEQ ID NO: 395; WAN024A5N; Start 25; Stop 49
cttgattataccatgaaaaggctac

SEQ ID NO: 262705 - DNA, 25 bp, Artificial
  probe
  misc_feature (1)..(25): SEQ ID NO: 395; WAN024A5N; Start 24; Stop 48
tcttgattataccatgaaaaggcta

SEQ ID NO: 262706 - DNA, 25 bp, Artificial
  probe
  misc_feature (1)..(25): SEQ ID NO: 395; WAN024A5N; Start 55; Stop 79
agcacaccaaactttgtaattaaaa

SEQ ID NO: 262707 - DNA, 25 bp, Artificial
  probe
  misc_feature (1)..(25): SEQ ID NO: 395; WAN024A5N; Start 30; Stop 54
ttataccatgaaaaggctacaaatc

SEQ ID NO: 262708 - DNA, 25 bp, Artificial
  probe
  misc_feature (1)..(25): SEQ ID NO: 395; WAN024A5N; Start 28; Stop 52
gattataccatgaaaaggctacaaa

SEQ ID NO: 262709 - DNA, 25 bp, Artificial
  probe
  misc_feature (1)..(25): SEQ ID NO: 395; WAN024A5N; Start 21; Stop 45
ctctcttgattataccatgaaaagg

SEQ ID NO: 262710 - DNA, 25 bp, Artificial
  probe
  misc_feature (1)..(25): SEQ ID NO: 395; WAN024A5N; Start 41; Stop 65
aaaggctacaaatcagcacaccaaa

SEQ ID NO: 262711 - DNA, 25 bp, Artificial
  probe
  misc_feature (1)..(25): SEQ ID NO: 395; WAN024A5N; Start 18; Stop 42
ttactctcttgattataccatgaaa

SEQ ID NO: 262712 - DNA, 25 bp, Artificial
  probe
  misc_feature (1)..(25): SEQ ID NO: 395; WAN024A5N; Start 17; Stop 41
tttactctcttgattataccatgaa

SEQ ID NO: 262713 - DNA, 25 bp, Artificial
  probe
  misc_feature (1)..(25): SEQ ID NO: 395; WAN024A5N; Start 56; Stop 80
gcacaccaaactttgtaattaaaat

SEQ ID NO: 262714 - DNA, 25 bp, Artificial
  probe
  misc_feature (1)..(25): SEQ ID NO: 395; WAN024A5N; Start 33; Stop 57
taccatgaaaaggctacaaatcagc

SEQ ID NO: 262715 - DNA, 25 bp, Artificial
  probe
  misc_feature (1)..(25): SEQ ID NO: 395; WAN024A5N; Start 29; Stop 53
attataccatgaaaaggctacaaat

SEQ ID NO: 262716 - DNA, 25 bp, Artificial
  probe
  misc_feature (1)..(25): SEQ ID NO: 395; WAN024A5N; Start 6; Stop 30
ctccataaagatttactctcttgat

SEQ ID NO: 262717 - DNA, 25 bp, Artificial
  probe
  misc_feature (1)..(25): SEQ ID NO: 395; WAN024A5N; Start 16; Stop 40
atttactctcttgattataccatga

SEQ ID NO: 262718 - DNA, 25 bp, Artificial
  probe
  misc_feature (1)..(25): SEQ ID NO: 396; WAN024AEU; Start 42; Stop 66
tacacatttctcttgacagggcttt

SEQ ID NO: 262719 - DNA, 25 bp, Artificial
  probe
  misc_feature (1)..(25): SEQ ID NO: 396; WAN024AEU; Start 41; Stop 65
ttacacatttctcttgacagggctt

SEQ ID NO: 262720 - DNA, 25 bp, Artificial
  probe
  misc_feature (1)..(25): SEQ ID NO: 396; WAN024AEU; Start 40; Stop 64
tttacacatttctcttgacagggct

SEQ ID NO: 262721 - DNA, 25 bp, Artificial
  probe
  misc_feature (1)..(25): SEQ ID NO: 396; WAN024AEU; Start 45; Stop 69
acatttctcttgacagggctttctt

SEQ ID NO: 262722 - DNA, 25 bp, Artificial
  probe
  misc_feature (1)..(25): SEQ ID NO: 396; WAN024AEU; Start 44; Stop 68
cacatttctcttgacagggctttct

SEQ ID NO: 262723 - DNA, 25 bp, Artificial
  probe
  misc_feature (1)..(25): SEQ ID NO: 396; WAN024AEU; Start 38; Stop 62
attttacacatttctcttgacaggg

SEQ ID NO: 262724 - DNA, 25 bp, Artificial
  probe
  misc_feature (1)..(25): SEQ ID NO: 396; WAN024AEU; Start 43; Stop 67
acacatttctcttgacagggctttc

SEQ ID NO: 262725 - DNA, 25 bp, Artificial
  probe
  misc_feature (1)..(25): SEQ ID NO: 396; WAN024AEU; Start 39; Stop 63
ttttacacatttctcttgacagggc

SEQ ID NO: 262726 - DNA, 25 bp, Artificial
  probe
  misc_feature (1)..(25): SEQ ID NO: 396; WAN024AEU; Start 37; Stop 61
aattttacacatttctcttgacagg

SEQ ID NO: 262727 - DNA, 25 bp, Artificial
  probe
  misc_feature (1)..(25): SEQ ID NO: 396; WAN024AEU; Start 36; Stop 60
aaattttacacatttctcttgacag

SEQ ID NO: 262728 - DNA, 25 bp, Artificial
  probe
  misc_feature (1)..(25): SEQ ID NO: 396; WAN024AEU; Start 35; Stop 59
aaaattttacacatttctcttgaca

SEQ ID NO: 262729 - DNA, 25 bp, Artificial
  probe
  misc_feature (1)..(25): SEQ ID NO: 398; WAN0249XO; Start 57; Stop 81
tgtaagtcaatgcaagtcaataagg

SEQ ID NO: 262730 - DNA, 25 bp, Artificial
  probe
  misc_feature (1)..(25): SEQ ID NO: 398; WAN0249XO; Start 58; Stop 82
gtaagtcaatgcaagtcaataagga

SEQ ID NO: 262731 - DNA, 25 bp, Artificial
  probe
  misc_feature (1)..(25): SEQ ID NO: 398; WAN0249XO; Start 61; Stop 85
agtcaatgcaagtcaataaggaatt

SEQ ID NO: 262732 - DNA, 25 bp, Artificial
  probe
  misc_feature (1)..(25): SEQ ID NO: 398; WAN0249XO; Start 60; Stop 84
aagtcaatgcaagtcaataaggaat

SEQ ID NO: 262733 - DNA, 25 bp, Artificial
  probe
  misc_feature (1)..(25): SEQ ID NO: 398; WAN0249XO; Start 59; Stop 83
taagtcaatgcaagtcaataaggaa

SEQ ID NO: 262734 - DNA, 25 bp, Artificial
  probe
  misc_feature (1)..(25): SEQ ID NO: 398; WAN0249XO; Start 56; Stop 80
ttgtaagtcaatgcaagtcaataag

SEQ ID NO: 262735 - DNA, 25 bp, Artificial
  probe
  misc_feature (1)..(25): SEQ ID NO: 398; WAN0249XO; Start 62; Stop 86
gtcaatgcaagtcaataaggaattt

SEQ ID NO: 262736 - DNA, 25 bp, Artificial
  probe
  misc_feature (1)..(25): SEQ ID NO: 398; WAN0249XO; Start 55; Stop 79
attgtaagtcaatgcaagtcaataa

SEQ ID NO: 262737 - DNA, 25 bp, Artificial
  probe
  misc_feature (1)..(25): SEQ ID NO: 398; WAN0249XO; Start 54; Stop 78
aattgtaagtcaatgcaagtcaata

SEQ ID NO: 262738 - DNA, 25 bp, Artificial
  probe
  misc_feature (1)..(25): SEQ ID NO: 398; WAN0249XO; Start 125; Stop 149
atgatagcgattaaattcgaggtga

SEQ ID NO: 262739 - DNA, 25 bp, Artificial
  probe
  misc_feature (1)..(25): SEQ ID NO: 398; WAN0249XO; Start 127; Stop 151
gatagcgattaaattcgaggtgaaa

SEQ ID NO: 262740 - DNA, 25 bp, Artificial
  probe
  misc_feature (1)..(25): SEQ ID NO: 398; WAN0249XO; Start 126; Stop 150
tgatagcgattaaattcgaggtgaa

SEQ ID NO: 262741 - DNA, 25 bp, Artificial
  probe
  misc_feature (1)..(25): SEQ ID NO: 398; WAN0249XO; Start 124; Stop 148
aatgatagcgattaaattcgaggtg

SEQ ID NO: 262742 - DNA, 25 bp, Artificial
  probe
  misc_feature (1)..(25): SEQ ID NO: 398; WAN0249XO; Start 68; Stop 92
gcaagtcaataaggaattttcagat

SEQ ID NO: 262743 - DNA, 25 bp, Artificial
  probe
  misc_feature (1)..(25): SEQ ID NO: 398; WAN0249XO; Start 123; Stop 147
taatgatagcgattaaattcgaggt

SEQ ID NO: 262744 - DNA, 25 bp, Artificial
  probe
  misc_feature (1)..(25): SEQ ID NO: 398; WAN0249XO; Start 53; Stop 77
aaattgtaagtcaatgcaagtcaat

SEQ ID NO: 262745 - DNA, 25 bp, Artificial
  probe
  misc_feature (1)..(25): SEQ ID NO: 398; WAN0249XO; Start 67; Stop 91
tgcaagtcaataaggaattttcaga

SEQ ID NO: 262746 - DNA, 25 bp, Artificial
  probe
  misc_feature (1)..(25): SEQ ID NO: 398; WAN0249XO; Start 52; Stop 76
taaattgtaagtcaatgcaagtcaa

SEQ ID NO: 262747 - DNA, 25 bp, Artificial
  probe
  misc_feature (1)..(25): SEQ ID NO: 398; WAN0249XO; Start 51; Stop 75
ttaaattgtaagtcaatgcaagtca

SEQ ID NO: 262748 - DNA, 25 bp, Artificial
  probe
  misc_feature (1)..(25): SEQ ID NO: 398; WAN0249XO; Start 66; Stop 90
atgcaagtcaataaggaattttcag

SEQ ID NO: 262749 - DNA, 25 bp, Artificial
  probe
  misc_feature (1)..(25): SEQ ID NO: 398; WAN0249XO; Start 122; Stop 146
ataatgatagcgattaaattcgagg

SEQ ID NO: 262750 - DNA, 25 bp, Artificial
  probe
  misc_feature (1)..(25): SEQ ID NO: 398; WAN0249XO; Start 65; Stop 89
aatgcaagtcaataaggaattttca

SEQ ID NO: 262751 - DNA, 25 bp, Artificial
  probe
  misc_feature (1)..(25): SEQ ID NO: 398; WAN0249XO; Start 63; Stop 87
tcaatgcaagtcaataaggaatttt

SEQ ID NO: 262752 - DNA, 25 bp, Artificial
  probe
  misc_feature (1)..(25): SEQ ID NO: 398; WAN0249XO; Start 64; Stop 88
caatgcaagtcaataaggaattttc

SEQ ID NO: 262753 - DNA, 25 bp, Artificial
  probe
  misc_feature (1)..(25): SEQ ID NO: 398; WAN0249XO; Start 50; Stop 74
attaaattgtaagtcaatgcaagtc

SEQ ID NO: 262754 - DNA, 25 bp, Artificial
  probe
  misc_feature (1)..(25): SEQ ID NO: 398; WAN0249XO; Start 128; Stop 152
atagcgattaaattcgaggtgaaaa

SEQ ID NO: 262755 - DNA, 25 bp, Artificial
  probe
  misc_feature (1)..(25): SEQ ID NO: 398; WAN0249XO; Start 49; Stop 73
aattaaattgtaagtcaatgcaagt

SEQ ID NO: 262756 - DNA, 25 bp, Artificial
  probe
  misc_feature (1)..(25): SEQ ID NO: 398; WAN0249XO; Start 69; Stop 93
caagtcaataaggaattttcagata

SEQ ID NO: 262757 - DNA, 25 bp, Artificial
  probe
  misc_feature (1)..(25): SEQ ID NO: 398; WAN0249XO; Start 1; Stop 25
acttgtcaatagaaaaggaacaatt

SEQ ID NO: 262758 - DNA, 25 bp, Artificial
  probe
  misc_feature (1)..(25): SEQ ID NO: 398; WAN0249XO; Start 4; Stop 28
tgtcaatagaaaaggaacaatttaa

SEQ ID NO: 262759 - DNA, 25 bp, Artificial
  probe
  misc_feature (1)..(25): SEQ ID NO: 398; WAN0249XO; Start 121; Stop 145
tataatgatagcgattaaattcgag

SEQ ID NO: 262760 - DNA, 25 bp, Artificial
  probe
  misc_feature (1)..(25): SEQ ID NO: 398; WAN0249XO; Start 2; Stop 26
cttgtcaatagaaaaggaacaattt

SEQ ID NO: 262761 - DNA, 25 bp, Artificial
  probe
  misc_feature (1)..(25): SEQ ID NO: 398; WAN0249XO; Start 3; Stop 27
ttgtcaatagaaaaggaacaattta

SEQ ID NO: 262762 - DNA, 25 bp, Artificial
  probe
  misc_feature (1)..(25): SEQ ID NO: 399; WAN0249YI; Start 5; Stop 29
tctattgtaaaccgaaagtcgtaaa

SEQ ID NO: 262763 - DNA, 25 bp, Artificial
  probe
  misc_feature (1)..(25): SEQ ID NO: 399; WAN0249YI; Start 4; Stop 28
ttctattgtaaaccgaaagtcgtaa

SEQ ID NO: 262764 - DNA, 25 bp, Artificial
  probe
  misc_feature (1)..(25): SEQ ID NO: 399; WAN0249YI; Start 3; Stop 27
tttctattgtaaaccgaaagtcgta

SEQ ID NO: 262765 - DNA, 25 bp, Artificial
  probe
  misc_feature (1)..(25): SEQ ID NO: 399; WAN0249YI; Start 6; Stop 30
ctattgtaaaccgaaagtcgtaaat

SEQ ID NO: 262766 - DNA, 25 bp, Artificial
  probe
  misc_feature (1)..(25): SEQ ID NO: 399; WAN0249YI; Start 7; Stop 31
tattgtaaaccgaaagtcgtaaatt

SEQ ID NO: 262767 - DNA, 25 bp, Artificial
  probe
  misc_feature (1)..(25): SEQ ID NO: 399; WAN0249YI; Start 8; Stop 32
attgtaaaccgaaagtcgtaaattt

SEQ ID NO: 262768 - DNA, 25 bp, Artificial
  probe
  misc_feature (1)..(25): SEQ ID NO: 399; WAN0249YI; Start 49; Stop 73
agtttataatggaagataaggagtt

SEQ ID NO: 262769 - DNA, 25 bp, Artificial
  probe
  misc_feature (1)..(25): SEQ ID NO: 399; WAN0249YI; Start 48; Stop 72
aagtttataatggaagataaggagt

SEQ ID NO: 262770 - DNA, 25 bp, Artificial
  probe
  misc_feature (1)..(25): SEQ ID NO: 399; WAN0249YI; Start 40; Stop 64
acaaggaaaagtttataatggaaga

SEQ ID NO: 262771 - DNA, 25 bp, Artificial
  probe
  misc_feature (1)..(25): SEQ ID NO: 399; WAN0249YI; Start 77; Stop 101
cctagttatcaaaattgaatgagga

SEQ ID NO: 262772 - DNA, 25 bp, Artificial
  probe
  misc_feature (1)..(25): SEQ ID NO: 399; WAN0249YI; Start 76; Stop 100
tcctagttatcaaaattgaatgagg

SEQ ID NO: 262773 - DNA, 25 bp, Artificial
  probe
  misc_feature (1)..(25): SEQ ID NO: 399; WAN0249YI; Start 9; Stop 33
ttgtaaaccgaaagtcgtaaattta

SEQ ID NO: 262774 - DNA, 25 bp, Artificial
  probe
  misc_feature (1)..(25): SEQ ID NO: 399; WAN0249YI; Start 29; Stop 53
atttacaagtaacaaggaaaagttt

SEQ ID NO: 262775 - DNA, 25 bp, Artificial
  probe
  misc_feature (1)..(25): SEQ ID NO: 399; WAN0249YI; Start 28; Stop 52
aatttacaagtaacaaggaaaagtt

SEQ ID NO: 262776 - DNA, 25 bp, Artificial
  probe
  misc_feature (1)..(25): SEQ ID NO: 399; WAN0249YI; Start 81; Stop 105
gttatcaaaattgaatgaggaatct

SEQ ID NO: 262777 - DNA, 25 bp, Artificial
  probe
  misc_feature (1)..(25): SEQ ID NO: 399; WAN0249YI; Start 80; Stop 104
agttatcaaaattgaatgaggaatc

SEQ ID NO: 262778 - DNA, 25 bp, Artificial
  probe
  misc_feature (1)..(25): SEQ ID NO: 399; WAN0249YI; Start 39; Stop 63
aacaaggaaaagtttataatggaag

SEQ ID NO: 262779 - DNA, 25 bp, Artificial
  probe
  misc_feature (1)..(25): SEQ ID NO: 399; WAN0249YI; Start 41; Stop 65
caaggaaaagtttataatggaagat

SEQ ID NO: 262780 - DNA, 25 bp, Artificial
  probe
  misc_feature (1)..(25): SEQ ID NO: 399; WAN0249YI; Start 30; Stop 54
tttacaagtaacaaggaaaagttta

SEQ ID NO: 262781 - DNA, 25 bp, Artificial
  probe
  misc_feature (1)..(25): SEQ ID NO: 399; WAN0249YI; Start 27; Stop 51
aaatttacaagtaacaaggaaaagt

SEQ ID NO: 262782 - DNA, 25 bp, Artificial
  probe
  misc_feature (1)..(25): SEQ ID NO: 399; WAN0249YI; Start 37; Stop 61
gtaacaaggaaaagtttataatgga

SEQ ID NO: 262783 - DNA, 25 bp, Artificial
  probe
  misc_feature (1)..(25): SEQ ID NO: 399; WAN0249YI; Start 36; Stop 60
agtaacaaggaaaagtttataatgg

SEQ ID NO: 262784 - DNA, 25 bp, Artificial
  probe
  misc_feature (1)..(25): SEQ ID NO: 399; WAN0249YI; Start 78; Stop 102
ctagttatcaaaattgaatgaggaa

SEQ ID NO: 262785 - DNA, 25 bp, Artificial
  probe
  misc_feature (1)..(25): SEQ ID NO: 399; WAN0249YI; Start 75; Stop 99
ttcctagttatcaaaattgaatgag

SEQ ID NO: 262786 - DNA, 25 bp, Artificial
  probe
  misc_feature (1)..(25): SEQ ID NO: 399; WAN0249YI; Start 31; Stop 55
ttacaagtaacaaggaaaagtttat

SEQ ID NO: 262787 - DNA, 25 bp, Artificial
  probe
  misc_feature (1)..(25): SEQ ID NO: 399; WAN0249YI; Start 33; Stop 57
acaagtaacaaggaaaagtttataa

SEQ ID NO: 262788 - DNA, 25 bp, Artificial
  probe
  misc_feature (1)..(25): SEQ ID NO: 400; WAN0249IG; Start 50; Stop 74
cgaatagtataggtgaggaggtaag

SEQ ID NO: 262789 - DNA, 25 bp, Artificial
  probe
  misc_feature (1)..(25): SEQ ID NO: 400; WAN0249IG; Start 49; Stop 73
gcgaatagtataggtgaggaggtaa

SEQ ID NO: 262790 - DNA, 25 bp, Artificial
  probe
  misc_feature (1)..(25): SEQ ID NO: 400; WAN0249IG; Start 51; Stop 75
gaatagtataggtgaggaggtaagt

SEQ ID NO: 262791 - DNA, 25 bp, Artificial
  probe
  misc_feature (1)..(25): SEQ ID NO: 400; WAN0249IG; Start 48; Stop 72
tgcgaatagtataggtgaggaggta

SEQ ID NO: 262792 - DNA, 25 bp, Artificial
  probe
  misc_feature (1)..(25): SEQ ID NO: 400; WAN0249IG; Start 47; Stop 71
ttgcgaatagtataggtgaggaggt

SEQ ID NO: 262793 - DNA, 25 bp, Artificial
  probe
  misc_feature (1)..(25): SEQ ID NO: 400; WAN0249IG; Start 45; Stop 69
ctttgcgaatagtataggtgaggag

SEQ ID NO: 262794 - DNA, 25 bp, Artificial
  probe
  misc_feature (1)..(25): SEQ ID NO: 400; WAN0249IG; Start 44; Stop 68
tctttgcgaatagtataggtgagga

SEQ ID NO: 262795 - DNA, 25 bp, Artificial
  probe
  misc_feature (1)..(25): SEQ ID NO: 400; WAN0249IG; Start 41; Stop 65
aactctttgcgaatagtataggtga

SEQ ID NO: 262796 - DNA, 25 bp, Artificial
  probe
  misc_feature (1)..(25): SEQ ID NO: 400; WAN0249IG; Start 42; Stop 66
actctttgcgaatagtataggtgag

SEQ ID NO: 262797 - DNA, 25 bp, Artificial
  probe
  misc_feature (1)..(25): SEQ ID NO: 400; WAN0249IG; Start 46; Stop 70
tttgcgaatagtataggtgaggagg

SEQ ID NO: 262798 - DNA, 25 bp, Artificial
  probe
  misc_feature (1)..(25): SEQ ID NO: 400; WAN0249IG; Start 43; Stop 67
ctctttgcgaatagtataggtgagg

SEQ ID NO: 262799 - DNA, 25 bp, Artificial
  probe
  misc_feature (1)..(25): SEQ ID NO: 400; WAN0249IG; Start 40; Stop 64
taactctttgcgaatagtataggtg

SEQ ID NO: 262800 - DNA, 25 bp, Artificial
  probe
  misc_feature (1)..(25): SEQ ID NO: 400; WAN0249IG; Start 39; Stop 63
ctaactctttgcgaatagtataggt

SEQ ID NO: 262801 - DNA, 25 bp, Artificial
  probe
  misc_feature (1)..(25): SEQ ID NO: 400; WAN0249IG; Start 38; Stop 62
tctaactctttgcgaatagtatagg

SEQ ID NO: 262802 - DNA, 25 bp, Artificial
  probe
  misc_feature (1)..(25): SEQ ID NO: 400; WAN0249IG; Start 37; Stop 61
ttctaactctttgcgaatagtatag

SEQ ID NO: 262803 - DNA, 25 bp, Artificial
  probe
  misc_feature (1)..(25): SEQ ID NO: 400; WAN0249IG; Start 36; Stop 60
tttctaactctttgcgaatagtata

SEQ ID NO: 262804 - DNA, 25 bp, Artificial
  probe
  misc_feature (1)..(25): SEQ ID NO: 400; WAN0249IG; Start 35; Stop 59
ttttctaactctttgcgaatagtat

SEQ ID NO: 262805 - DNA, 25 bp, Artificial
  probe
  misc_feature (1)..(25): SEQ ID NO: 401; WAN0249MU; Start 137; Stop 161
ttgcttatatcgagtgagttctcat

SEQ ID NO: 262806 - DNA, 25 bp, Artificial
  probe
  misc_feature (1)..(25): SEQ ID NO: 401; WAN0249MU; Start 136; Stop 160
attgcttatatcgagtgagttctca

SEQ ID NO: 262807 - DNA, 25 bp, Artificial
  probe
  misc_feature (1)..(25): SEQ ID NO: 401; WAN0249MU; Start 145; Stop 169
atcgagtgagttctcatattagtga

SEQ ID NO: 262808 - DNA, 25 bp, Artificial
  probe
  misc_feature (1)..(25): SEQ ID NO: 401; WAN0249MU; Start 138; Stop 162
tgcttatatcgagtgagttctcata

SEQ ID NO: 262809 - DNA, 25 bp, Artificial
  probe
  misc_feature (1)..(25): SEQ ID NO: 401; WAN0249MU; Start 135; Stop 159
aattgcttatatcgagtgagttctc

SEQ ID NO: 262810 - DNA, 25 bp, Artificial
  probe
  misc_feature (1)..(25): SEQ ID NO: 401; WAN0249MU; Start 134; Stop 158
taattgcttatatcgagtgagttct

SEQ ID NO: 262811 - DNA, 25 bp, Artificial
  probe
  misc_feature (1)..(25): SEQ ID NO: 401; WAN0249MU; Start 139; Stop 163
gcttatatcgagtgagttctcatat

SEQ ID NO: 262812 - DNA, 25 bp, Artificial
  probe
  misc_feature (1)..(25): SEQ ID NO: 401; WAN0249MU; Start 144; Stop 168
tatcgagtgagttctcatattagtg

SEQ ID NO: 262813 - DNA, 25 bp, Artificial
  probe
  misc_feature (1)..(25): SEQ ID NO: 401; WAN0249MU; Start 133; Stop 157
ttaattgcttatatcgagtgagttc

SEQ ID NO: 262814 - DNA, 25 bp, Artificial
  probe
  misc_feature (1)..(25): SEQ ID NO: 401; WAN0249MU; Start 69; Stop 93
aaagagagtgatgaaatacaaatgt

SEQ ID NO: 262815 - DNA, 25 bp, Artificial
  probe
  misc_feature (1)..(25): SEQ ID NO: 401; WAN0249MU; Start 147; Stop 171
cgagtgagttctcatattagtgagg

SEQ ID NO: 262816 - DNA, 25 bp, Artificial
  probe
  misc_feature (1)..(25): SEQ ID NO: 401; WAN0249MU; Start 148; Stop 172
gagtgagttctcatattagtgagga

SEQ ID NO: 262817 - DNA, 25 bp, Artificial
  probe
  misc_feature (1)..(25): SEQ ID NO: 401; WAN0249MU; Start 143; Stop 167
atatcgagtgagttctcatattagt

SEQ ID NO: 262818 - DNA, 25 bp, Artificial
  probe
  misc_feature (1)..(25): SEQ ID NO: 401; WAN0249MU; Start 149; Stop 173
agtgagttctcatattagtgaggaa

SEQ ID NO: 262819 - DNA, 25 bp, Artificial
  probe
  misc_feature (1)..(25): SEQ ID NO: 401; WAN0249MU; Start 146; Stop 170
tcgagtgagttctcatattagtgag

SEQ ID NO: 262820 - DNA, 25 bp, Artificial
  probe
  misc_feature (1)..(25): SEQ ID NO: 401; WAN0249MU; Start 150; Stop 174
gtgagttctcatattagtgaggaat

SEQ ID NO: 262821 - DNA, 25 bp, Artificial
  probe
  misc_feature (1)..(25): SEQ ID NO: 401; WAN0249MU; Start 71; Stop 95
agagagtgatgaaatacaaatgtaa

SEQ ID NO: 262822 - DNA, 25 bp, Artificial
  probe
  misc_feature (1)..(25): SEQ ID NO: 401; WAN0249MU; Start 70; Stop 94
aagagagtgatgaaatacaaatgta

SEQ ID NO: 262823 - DNA, 25 bp, Artificial
  probe
  misc_feature (1)..(25): SEQ ID NO: 401; WAN0249MU; Start 132; Stop 156
tttaattgcttatatcgagtgagtt

SEQ ID NO: 262824 - DNA, 25 bp, Artificial
  probe
  misc_feature (1)..(25): SEQ ID NO: 401; WAN0249MU; Start 140; Stop 164
cttatatcgagtgagttctcatatt

SEQ ID NO: 262825 - DNA, 25 bp, Artificial
  probe
  misc_feature (1)..(25): SEQ ID NO: 401; WAN0249MU; Start 151; Stop 175
tgagttctcatattagtgaggaatt

SEQ ID NO: 262826 - DNA, 25 bp, Artificial
  probe
  misc_feature (1)..(25): SEQ ID NO: 401; WAN0249MU; Start 72; Stop 96
gagagtgatgaaatacaaatgtaat

SEQ ID NO: 262827 - DNA, 25 bp, Artificial
  probe
  misc_feature (1)..(25): SEQ ID NO: 401; WAN0249MU; Start 76; Stop 100
gtgatgaaatacaaatgtaataggt

SEQ ID NO: 262828 - DNA, 25 bp, Artificial
  probe
  misc_feature (1)..(25): SEQ ID NO: 401; WAN0249MU; Start 142; Stop 166
tatatcgagtgagttctcatattag

SEQ ID NO: 262829 - DNA, 25 bp, Artificial
  probe
  misc_feature (1)..(25): SEQ ID NO: 401; WAN0249MU; Start 75; Stop 99
agtgatgaaatacaaatgtaatagg

SEQ ID NO: 262830 - DNA, 25 bp, Artificial
  probe
  misc_feature (1)..(25): SEQ ID NO: 401; WAN0249MU; Start 68; Stop 92
aaaagagagtgatgaaatacaaatg

SEQ ID NO: 262831 - DNA, 25 bp, Artificial
  probe
  misc_feature (1)..(25): SEQ ID NO: 401; WAN0249MU; Start 131; Stop 155
ttttaattgcttatatcgagtgagt

SEQ ID NO: 262832 - DNA, 25 bp, Artificial
  probe
  misc_feature (1)..(25): SEQ ID NO: 401; WAN0249MU; Start 59; Stop 83
aggaaatataaaagagagtgatgaa

SEQ ID NO: 262833 - DNA, 25 bp, Artificial
  probe
  misc_feature (1)..(25): SEQ ID NO: 401; WAN0249MU; Start 58; Stop 82
aaggaaatataaaagagagtgatga

SEQ ID NO: 262834 - DNA, 25 bp, Artificial
  probe
  misc_feature (1)..(25): SEQ ID NO: 401; WAN0249MU; Start 57; Stop 81
gaaggaaatataaaagagagtgatg

SEQ ID NO: 262835 - DNA, 25 bp, Artificial
  probe
  misc_feature (1)..(25): SEQ ID NO: 401; WAN0249MU; Start 152; Stop 176
gagttctcatattagtgaggaattt

SEQ ID NO: 262836 - DNA, 25 bp, Artificial
  probe
  misc_feature (1)..(25): SEQ ID NO: 401; WAN0249MU; Start 56; Stop 80
agaaggaaatataaaagagagtgat

SEQ ID NO: 262837 - DNA, 25 bp, Artificial
  probe
  misc_feature (1)..(25): SEQ ID NO: 401; WAN0249MU; Start 60; Stop 84
ggaaatataaaagagagtgatgaaa

SEQ ID NO: 262838 - DNA, 25 bp, Artificial
  probe
  misc_feature (1)..(25): SEQ ID NO: 402; WAN024A38; Start 111; Stop 135
ttcggctgaagataatactggagtg

SEQ ID NO: 262839 - DNA, 25 bp, Artificial
  probe
  misc_feature (1)..(25): SEQ ID NO: 402; WAN024A38; Start 110; Stop 134
tttcggctgaagataatactggagt

SEQ ID NO: 262840 - DNA, 25 bp, Artificial
  probe
  misc_feature (1)..(25): SEQ ID NO: 402; WAN024A38; Start 114; Stop 138
ggctgaagataatactggagtgcaa

SEQ ID NO: 262841 - DNA, 25 bp, Artificial
  probe
  misc_feature (1)..(25): SEQ ID NO: 402; WAN024A38; Start 116; Stop 140
ctgaagataatactggagtgcaaat

SEQ ID NO: 262842 - DNA, 25 bp, Artificial
  probe
  misc_feature (1)..(25): SEQ ID NO: 402; WAN024A38; Start 115; Stop 139
gctgaagataatactggagtgcaaa

SEQ ID NO: 262843 - DNA, 25 bp, Artificial
  probe
  misc_feature (1)..(25): SEQ ID NO: 402; WAN024A38; Start 123; Stop 147
taatactggagtgcaaattaatggg

SEQ ID NO: 262844 - DNA, 25 bp, Artificial
  probe
  misc_feature (1)..(25): SEQ ID NO: 402; WAN024A38; Start 112; Stop 136
tcggctgaagataatactggagtgc

SEQ ID NO: 262845 - DNA, 25 bp, Artificial
  probe
  misc_feature (1)..(25): SEQ ID NO: 402; WAN024A38; Start 117; Stop 141
tgaagataatactggagtgcaaatt

SEQ ID NO: 262846 - DNA, 25 bp, Artificial
  probe
  misc_feature (1)..(25): SEQ ID NO: 402; WAN024A38; Start 108; Stop 132
attttcggctgaagataatactgga

SEQ ID NO: 262847 - DNA, 25 bp, Artificial
  probe
  misc_feature (1)..(25): SEQ ID NO: 402; WAN024A38; Start 107; Stop 131
gattttcggctgaagataatactgg

SEQ ID NO: 262848 - DNA, 25 bp, Artificial
  probe
  misc_feature (1)..(25): SEQ ID NO: 402; WAN024A38; Start 109; Stop 133
ttttcggctgaagataatactggag

SEQ ID NO: 262849 - DNA, 25 bp, Artificial
  probe
  misc_feature (1)..(25): SEQ ID NO: 402; WAN024A38; Start 106; Stop 130
tgattttcggctgaagataatactg

SEQ ID NO: 262850 - DNA, 25 bp, Artificial
  probe
  misc_feature (1)..(25): SEQ ID NO: 402; WAN024A38; Start 104; Stop 128
actgattttcggctgaagataatac

SEQ ID NO: 262851 - DNA, 25 bp, Artificial
  probe
  misc_feature (1)..(25): SEQ ID NO: 402; WAN024A38; Start 105; Stop 129
ctgattttcggctgaagataatact

SEQ ID NO: 262852 - DNA, 25 bp, Artificial
  probe
  misc_feature (1)..(25): SEQ ID NO: 402; WAN024A38; Start 101; Stop 125
aatactgattttcggctgaagataa

SEQ ID NO: 262853 - DNA, 25 bp, Artificial
  probe
  misc_feature (1)..(25): SEQ ID NO: 402; WAN024A38; Start 102; Stop 126
atactgattttcggctgaagataat

SEQ ID NO: 262854 - DNA, 25 bp, Artificial
  probe
  misc_feature (1)..(25): SEQ ID NO: 402; WAN024A38; Start 122; Stop 146
ataatactggagtgcaaattaatgg

SEQ ID NO: 262855 - DNA, 25 bp, Artificial
  probe
  misc_feature (1)..(25): SEQ ID NO: 402; WAN024A38; Start 73; Stop 97
actaggaagtttatttcaaacaacc

SEQ ID NO: 262856 - DNA, 25 bp, Artificial
  probe
  misc_feature (1)..(25): SEQ ID NO: 402; WAN024A38; Start 103; Stop 127
tactgattttcggctgaagataata

SEQ ID NO: 262857 - DNA, 25 bp, Artificial
  probe
  misc_feature (1)..(25): SEQ ID NO: 402; WAN024A38; Start 100; Stop 124
aaatactgattttcggctgaagata

SEQ ID NO: 262858 - DNA, 25 bp, Artificial
  probe
  misc_feature (1)..(25): SEQ ID NO: 402; WAN024A38; Start 165; Stop 189
atagcttgtgttggttttggatttt

SEQ ID NO: 262859 - DNA, 25 bp, Artificial
  probe
  misc_feature (1)..(25): SEQ ID NO: 402; WAN024A38; Start 74; Stop 98
ctaggaagtttatttcaaacaacct

SEQ ID NO: 262860 - DNA, 25 bp, Artificial
  probe
  misc_feature (1)..(25): SEQ ID NO: 402; WAN024A38; Start 164; Stop 188
gatagcttgtgttggttttggattt

SEQ ID NO: 262861 - DNA, 25 bp, Artificial
  probe
  misc_feature (1)..(25): SEQ ID NO: 402; WAN024A38; Start 118; Stop 142
gaagataatactggagtgcaaatta

SEQ ID NO: 262862 - DNA, 25 bp, Artificial
  probe
  misc_feature (1)..(25): SEQ ID NO: 402; WAN024A38; Start 163; Stop 187
tgatagcttgtgttggttttggatt

SEQ ID NO: 262863 - DNA, 25 bp, Artificial
  probe
  misc_feature (1)..(25): SEQ ID NO: 402; WAN024A38; Start 129; Stop 153
tggagtgcaaattaatggggttata

SEQ ID NO: 262864 - DNA, 25 bp, Artificial
  probe
  misc_feature (1)..(25): SEQ ID NO: 402; WAN024A38; Start 130; Stop 154
ggagtgcaaattaatggggttataa

SEQ ID NO: 262865 - DNA, 25 bp, Artificial
  probe
  misc_feature (1)..(25): SEQ ID NO: 402; WAN024A38; Start 113; Stop 137
cggctgaagataatactggagtgca

SEQ ID NO: 262866 - DNA, 25 bp, Artificial
  probe
  misc_feature (1)..(25): SEQ ID NO: 402; WAN024A38; Start 76; Stop 100
aggaagtttatttcaaacaacctaa

SEQ ID NO: 262867 - DNA, 25 bp, Artificial
  probe
  misc_feature (1)..(25): SEQ ID NO: 402; WAN024A38; Start 162; Stop 186
ctgatagcttgtgttggttttggat

SEQ ID NO: 262868 - DNA, 25 bp, Artificial
  probe
  misc_feature (1)..(25): SEQ ID NO: 402; WAN024A38; Start 128; Stop 152
ctggagtgcaaattaatggggttat

SEQ ID NO: 262869 - DNA, 25 bp, Artificial
  probe
  misc_feature (1)..(25): SEQ ID NO: 402; WAN024A38; Start 124; Stop 148
aatactggagtgcaaattaatgggg

SEQ ID NO: 262870 - DNA, 25 bp, Artificial
  probe
  misc_feature (1)..(25): SEQ ID NO: 402; WAN024A38; Start 119; Stop 143
aagataatactggagtgcaaattaa

SEQ ID NO: 262871 - DNA, 25 bp, Artificial
  probe
  misc_feature (1)..(25): SEQ ID NO: 403; WAN0249YC; Start 64; Stop 88
tggaaagagttagattgaaagaggt

SEQ ID NO: 262872 - DNA, 25 bp, Artificial
  probe
  misc_feature (1)..(25): SEQ ID NO: 403; WAN0249YC; Start 69; Stop 93
agagttagattgaaagaggtagtga

SEQ ID NO: 262873 - DNA, 25 bp, Artificial
  probe
  misc_feature (1)..(25): SEQ ID NO: 403; WAN0249YC; Start 63; Stop 87
atggaaagagttagattgaaagagg

SEQ ID NO: 262874 - DNA, 25 bp, Artificial
  probe
  misc_feature (1)..(25): SEQ ID NO: 403; WAN0249YC; Start 70; Stop 94
gagttagattgaaagaggtagtgag

SEQ ID NO: 262875 - DNA, 25 bp, Artificial
  probe
  misc_feature (1)..(25): SEQ ID NO: 403; WAN0249YC; Start 68; Stop 92
aagagttagattgaaagaggtagtg

SEQ ID NO: 262876 - DNA, 25 bp, Artificial
  probe
  misc_feature (1)..(25): SEQ ID NO: 403; WAN0249YC; Start 65; Stop 89
ggaaagagttagattgaaagaggta

SEQ ID NO: 262877 - DNA, 25 bp, Artificial
  probe
  misc_feature (1)..(25): SEQ ID NO: 403; WAN0249YC; Start 67; Stop 91
aaagagttagattgaaagaggtagt

SEQ ID NO: 262878 - DNA, 25 bp, Artificial
  probe
  misc_feature (1)..(25): SEQ ID NO: 403; WAN0249YC; Start 62; Stop 86
aatggaaagagttagattgaaagag

SEQ ID NO: 262879 - DNA, 25 bp, Artificial
  probe
  misc_feature (1)..(25): SEQ ID NO: 403; WAN0249YC; Start 66; Stop 90
gaaagagttagattgaaagaggtag

SEQ ID NO: 262880 - DNA, 25 bp, Artificial
  probe
  misc_feature (1)..(25): SEQ ID NO: 403; WAN0249YC; Start 39; Stop 63
gggatttgcctactttatgatataa

SEQ ID NO: 262881 - DNA, 25 bp, Artificial
  probe
  misc_feature (1)..(25): SEQ ID NO: 403; WAN0249YC; Start 38; Stop 62
ggggatttgcctactttatgatata

SEQ ID NO: 262882 - DNA, 25 bp, Artificial
  probe
  misc_feature (1)..(25): SEQ ID NO: 403; WAN0249YC; Start 37; Stop 61
aggggatttgcctactttatgatat

SEQ ID NO: 262883 - DNA, 25 bp, Artificial
  probe
  misc_feature (1)..(25): SEQ ID NO: 403; WAN0249YC; Start 61; Stop 85
taatggaaagagttagattgaaaga

SEQ ID NO: 262884 - DNA, 25 bp, Artificial
  probe
  misc_feature (1)..(25): SEQ ID NO: 403; WAN0249YC; Start 45; Stop 69
tgcctactttatgatataatggaaa

SEQ ID NO: 262885 - DNA, 25 bp, Artificial
  probe
  misc_feature (1)..(25): SEQ ID NO: 403; WAN0249YC; Start 44; Stop 68
ttgcctactttatgatataatggaa

SEQ ID NO: 262886 - DNA, 25 bp, Artificial
  probe
  misc_feature (1)..(25): SEQ ID NO: 403; WAN0249YC; Start 43; Stop 67
tttgcctactttatgatataatgga

SEQ ID NO: 262887 - DNA, 25 bp, Artificial
  probe
  misc_feature (1)..(25): SEQ ID NO: 403; WAN0249YC; Start 30; Stop 54
tgaaaataggggatttgcctacttt

SEQ ID NO: 262888 - DNA, 25 bp, Artificial
  probe
  misc_feature (1)..(25): SEQ ID NO: 403; WAN0249YC; Start 29; Stop 53
ttgaaaataggggatttgcctactt

SEQ ID NO: 262889 - DNA, 25 bp, Artificial
  probe
  misc_feature (1)..(25): SEQ ID NO: 403; WAN0249YC; Start 28; Stop 52
tttgaaaataggggatttgcctact

SEQ ID NO: 262890 - DNA, 25 bp, Artificial
  probe
  misc_feature (1)..(25): SEQ ID NO: 403; WAN0249YC; Start 27; Stop 51
ttttgaaaataggggatttgcctac

SEQ ID NO: 262891 - DNA, 25 bp, Artificial
  probe
  misc_feature (1)..(25): SEQ ID NO: 403; WAN0249YC; Start 34; Stop 58
aataggggatttgcctactttatga

SEQ ID NO: 262892 - DNA, 25 bp, Artificial
  probe
  misc_feature (1)..(25): SEQ ID NO: 403; WAN0249YC; Start 60; Stop 84
ataatggaaagagttagattgaaag

SEQ ID NO: 262893 - DNA, 25 bp, Artificial
  probe
  misc_feature (1)..(25): SEQ ID NO: 403; WAN0249YC; Start 35; Stop 59
ataggggatttgcctactttatgat

SEQ ID NO: 262894 - DNA, 25 bp, Artificial
  probe
  misc_feature (1)..(25): SEQ ID NO: 403; WAN0249YC; Start 33; Stop 57
aaataggggatttgcctactttatg

SEQ ID NO: 262895 - DNA, 25 bp, Artificial
  probe
  misc_feature (1)..(25): SEQ ID NO: 403; WAN0249YC; Start 31; Stop 55
gaaaataggggatttgcctacttta

SEQ ID NO: 262896 - DNA, 25 bp, Artificial
  probe
  misc_feature (1)..(25): SEQ ID NO: 403; WAN0249YC; Start 36; Stop 60
taggggatttgcctactttatgata

SEQ ID NO: 262897 - DNA, 25 bp, Artificial
  probe
  misc_feature (1)..(25): SEQ ID NO: 403; WAN0249YC; Start 42; Stop 66
atttgcctactttatgatataatgg

SEQ ID NO: 262898 - DNA, 25 bp, Artificial
  probe
  misc_feature (1)..(25): SEQ ID NO: 403; WAN0249YC; Start 32; Stop 56
aaaataggggatttgcctactttat

SEQ ID NO: 262899 - DNA, 25 bp, Artificial
  probe
  misc_feature (1)..(25): SEQ ID NO: 403; WAN0249YC; Start 46; Stop 70
gcctactttatgatataatggaaag

SEQ ID NO: 262900 - DNA, 25 bp, Artificial
  probe
  misc_feature (1)..(25): SEQ ID NO: 404; WAN0249SN; Start 133; Stop 157
agaagtagatgtgtactattccagt

SEQ ID NO: 262901 - DNA, 25 bp, Artificial
  probe
  misc_feature (1)..(25): SEQ ID NO: 404; WAN0249SN; Start 134; Stop 158
gaagtagatgtgtactattccagtt

SEQ ID NO: 262902 - DNA, 25 bp, Artificial
  probe
  misc_feature (1)..(25): SEQ ID NO: 404; WAN0249SN; Start 13; Stop 37
gtggatgatttcttcacgagtatga

SEQ ID NO: 262903 - DNA, 25 bp, Artificial
  probe
  misc_feature (1)..(25): SEQ ID NO: 404; WAN0249SN; Start 12; Stop 36
agtggatgatttcttcacgagtatg

SEQ ID NO: 262904 - DNA, 25 bp, Artificial
  probe
  misc_feature (1)..(25): SEQ ID NO: 404; WAN0249SN; Start 11; Stop 35
cagtggatgatttcttcacgagtat

SEQ ID NO: 262905 - DNA, 25 bp, Artificial
  probe
  misc_feature (1)..(25): SEQ ID NO: 404; WAN0249SN; Start 137; Stop 161
gtagatgtgtactattccagtttca

SEQ ID NO: 262906 - DNA, 25 bp, Artificial
  probe
  misc_feature (1)..(25): SEQ ID NO: 404; WAN0249SN; Start 141; Stop 165
atgtgtactattccagtttcaatct

SEQ ID NO: 262907 - DNA, 25 bp, Artificial
  probe
  misc_feature (1)..(25): SEQ ID NO: 404; WAN0249SN; Start 139; Stop 163
agatgtgtactattccagtttcaat

SEQ ID NO: 262908 - DNA, 25 bp, Artificial
  probe
  misc_feature (1)..(25): SEQ ID NO: 404; WAN0249SN; Start 140; Stop 164
gatgtgtactattccagtttcaatc

SEQ ID NO: 262909 - DNA, 25 bp, Artificial
  probe
  misc_feature (1)..(25): SEQ ID NO: 404; WAN0249SN; Start 132; Stop 156
tagaagtagatgtgtactattccag

SEQ ID NO: 262910 - DNA, 25 bp, Artificial
  probe
  misc_feature (1)..(25): SEQ ID NO: 404; WAN0249SN; Start 152; Stop 176
tccagtttcaatctactatagcact

SEQ ID NO: 262911 - DNA, 25 bp, Artificial
  probe
  misc_feature (1)..(25): SEQ ID NO: 404; WAN0249SN; Start 10; Stop 34
ccagtggatgatttcttcacgagta

SEQ ID NO: 262912 - DNA, 25 bp, Artificial
  probe
  misc_feature (1)..(25): SEQ ID NO: 404; WAN0249SN; Start 73; Stop 97
aatgaaataagaacagaacaaatcg

SEQ ID NO: 262913 - DNA, 25 bp, Artificial
  probe
  misc_feature (1)..(25): SEQ ID NO: 404; WAN0249SN; Start 142; Stop 166
tgtgtactattccagtttcaatcta

SEQ ID NO: 262914 - DNA, 25 bp, Artificial
  probe
  misc_feature (1)..(25): SEQ ID NO: 404; WAN0249SN; Start 138; Stop 162
tagatgtgtactattccagtttcaa

SEQ ID NO: 262915 - DNA, 25 bp, Artificial
  probe
  misc_feature (1)..(25): SEQ ID NO: 404; WAN0249SN; Start 151; Stop 175
ttccagtttcaatctactatagcac

SEQ ID NO: 262916 - DNA, 25 bp, Artificial
  probe
  misc_feature (1)..(25): SEQ ID NO: 404; WAN0249SN; Start 143; Stop 167
gtgtactattccagtttcaatctac

SEQ ID NO: 262917 - DNA, 25 bp, Artificial
  probe
  misc_feature (1)..(25): SEQ ID NO: 404; WAN0249SN; Start 209; Stop 233
cctttagggatagtggtaagtaata

SEQ ID NO: 262918 - DNA, 25 bp, Artificial
  probe
  misc_feature (1)..(25): SEQ ID NO: 404; WAN0249SN; Start 144; Stop 168
tgtactattccagtttcaatctact

SEQ ID NO: 262919 - DNA, 25 bp, Artificial
  probe
  misc_feature (1)..(25): SEQ ID NO: 404; WAN0249SN; Start 131; Stop 155
ttagaagtagatgtgtactattcca

SEQ ID NO: 262920 - DNA, 25 bp, Artificial
  probe
  misc_feature (1)..(25): SEQ ID NO: 404; WAN0249SN; Start 14; Stop 38
tggatgatttcttcacgagtatgaa

SEQ ID NO: 262921 - DNA, 25 bp, Artificial
  probe
  misc_feature (1)..(25): SEQ ID NO: 404; WAN0249SN; Start 136; Stop 160
agtagatgtgtactattccagtttc

SEQ ID NO: 262922 - DNA, 25 bp, Artificial
  probe
  misc_feature (1)..(25): SEQ ID NO: 404; WAN0249SN; Start 15; Stop 39
ggatgatttcttcacgagtatgaaa

SEQ ID NO: 262923 - DNA, 25 bp, Artificial
  probe
  misc_feature (1)..(25): SEQ ID NO: 404; WAN0249SN; Start 74; Stop 98
atgaaataagaacagaacaaatcga

SEQ ID NO: 262924 - DNA, 25 bp, Artificial
  probe
  misc_feature (1)..(25): SEQ ID NO: 404; WAN0249SN; Start 153; Stop 177
ccagtttcaatctactatagcacta

SEQ ID NO: 262925 - DNA, 25 bp, Artificial
  probe
  misc_feature (1)..(25): SEQ ID NO: 404; WAN0249SN; Start 135; Stop 159
aagtagatgtgtactattccagttt

SEQ ID NO: 262926 - DNA, 25 bp, Artificial
  probe
  misc_feature (1)..(25): SEQ ID NO: 404; WAN0249SN; Start 150; Stop 174
attccagtttcaatctactatagca

SEQ ID NO: 262927 - DNA, 25 bp, Artificial
  probe
  misc_feature (1)..(25): SEQ ID NO: 404; WAN0249SN; Start 80; Stop 104
taagaacagaacaaatcgatcagga

SEQ ID NO: 262928 - DNA, 25 bp, Artificial
  probe
  misc_feature (1)..(25): SEQ ID NO: 404; WAN0249SN; Start 210; Stop 234
ctttagggatagtggtaagtaatac

SEQ ID NO: 262929 - DNA, 25 bp, Artificial
  probe
  misc_feature (1)..(25): SEQ ID NO: 404; WAN0249SN; Start 79; Stop 103
ataagaacagaacaaatcgatcagg

SEQ ID NO: 262930 - DNA, 25 bp, Artificial
  probe
  misc_feature (1)..(25): SEQ ID NO: 404; WAN0249SN; Start 208; Stop 232
ccctttagggatagtggtaagtaat

SEQ ID NO: 262931 - DNA, 25 bp, Artificial
  probe
  misc_feature (1)..(25): SEQ ID NO: 404; WAN0249SN; Start 89; Stop 113
aacaaatcgatcaggacagtcaaat

SEQ ID NO: 262932 - DNA, 25 bp, Artificial
  probe
  misc_feature (1)..(25): SEQ ID NO: 404; WAN0249SN; Start 88; Stop 112
gaacaaatcgatcaggacagtcaaa

SEQ ID NO: 262933 - DNA, 25 bp, Artificial
  probe
  misc_feature (1)..(25): SEQ ID NO: 405; WAN0249ZQ; Start 39; Stop 63
atacggatgttggagttgatgtaag

SEQ ID NO: 262934 - DNA, 25 bp, Artificial
  probe
  misc_feature (1)..(25): SEQ ID NO: 405; WAN0249ZQ; Start 38; Stop 62
gatacggatgttggagttgatgtaa

SEQ ID NO: 262935 - DNA, 25 bp, Artificial
  probe
  misc_feature (1)..(25): SEQ ID NO: 405; WAN0249ZQ; Start 44; Stop 68
gatgttggagttgatgtaagatgct

SEQ ID NO: 262936 - DNA, 25 bp, Artificial
  probe
  misc_feature (1)..(25): SEQ ID NO: 405; WAN0249ZQ; Start 45; Stop 69
atgttggagttgatgtaagatgctt

SEQ ID NO: 262937 - DNA, 25 bp, Artificial
  probe
  misc_feature (1)..(25): SEQ ID NO: 405; WAN0249ZQ; Start 37; Stop 61
agatacggatgttggagttgatgta

SEQ ID NO: 262938 - DNA, 25 bp, Artificial
  probe
  misc_feature (1)..(25): SEQ ID NO: 405; WAN0249ZQ; Start 40; Stop 64
tacggatgttggagttgatgtaaga

SEQ ID NO: 262939 - DNA, 25 bp, Artificial
  probe
  misc_feature (1)..(25): SEQ ID NO: 405; WAN0249ZQ; Start 42; Stop 66
cggatgttggagttgatgtaagatg

SEQ ID NO: 262940 - DNA, 25 bp, Artificial
  probe
  misc_feature (1)..(25): SEQ ID NO: 405; WAN0249ZQ; Start 43; Stop 67
ggatgttggagttgatgtaagatgc

SEQ ID NO: 262941 - DNA, 25 bp, Artificial
  probe
  misc_feature (1)..(25): SEQ ID NO: 405; WAN0249ZQ; Start 41; Stop 65
acggatgttggagttgatgtaagat

SEQ ID NO: 262942 - DNA, 25 bp, Artificial
  probe
  misc_feature (1)..(25): SEQ ID NO: 405; WAN0249ZQ; Start 34; Stop 58
tacagatacggatgttggagttgat

SEQ ID NO: 262943 - DNA, 25 bp, Artificial
  probe
  misc_feature (1)..(25): SEQ ID NO: 405; WAN0249ZQ; Start 31; Stop 55
ctctacagatacggatgttggagtt

SEQ ID NO: 262944 - DNA, 25 bp, Artificial
  probe
  misc_feature (1)..(25): SEQ ID NO: 405; WAN0249ZQ; Start 36; Stop 60
cagatacggatgttggagttgatgt

SEQ ID NO: 262945 - DNA, 25 bp, Artificial
  probe
  misc_feature (1)..(25): SEQ ID NO: 405; WAN0249ZQ; Start 33; Stop 57
ctacagatacggatgttggagttga

SEQ ID NO: 262946 - DNA, 25 bp, Artificial
  probe
  misc_feature (1)..(25): SEQ ID NO: 405; WAN0249ZQ; Start 32; Stop 56
tctacagatacggatgttggagttg

SEQ ID NO: 262947 - DNA, 25 bp, Artificial
  probe
  misc_feature (1)..(25): SEQ ID NO: 405; WAN0249ZQ; Start 30; Stop 54
tctctacagatacggatgttggagt

SEQ ID NO: 262948 - DNA, 25 bp, Artificial
  probe
  misc_feature (1)..(25): SEQ ID NO: 405; WAN0249ZQ; Start 47; Stop 71
gttggagttgatgtaagatgctttg

SEQ ID NO: 262949 - DNA, 25 bp, Artificial
  probe
  misc_feature (1)..(25): SEQ ID NO: 405; WAN0249ZQ; Start 27; Stop 51
taatctctacagatacggatgttgg

SEQ ID NO: 262950 - DNA, 25 bp, Artificial
  probe
  misc_feature (1)..(25): SEQ ID NO: 405; WAN0249ZQ; Start 46; Stop 70
tgttggagttgatgtaagatgcttt

SEQ ID NO: 262951 - DNA, 25 bp, Artificial
  probe
  misc_feature (1)..(25): SEQ ID NO: 405; WAN0249ZQ; Start 28; Stop 52
aatctctacagatacggatgttgga

SEQ ID NO: 262952 - DNA, 25 bp, Artificial
  probe
  misc_feature (1)..(25): SEQ ID NO: 405; WAN0249ZQ; Start 35; Stop 59
acagatacggatgttggagttgatg

SEQ ID NO: 262953 - DNA, 25 bp, Artificial
  probe
  misc_feature (1)..(25): SEQ ID NO: 405; WAN0249ZQ; Start 29; Stop 53
atctctacagatacggatgttggag

SEQ ID NO: 262954 - DNA, 25 bp, Artificial
  probe
  misc_feature (1)..(25): SEQ ID NO: 405; WAN0249ZQ; Start 48; Stop 72
ttggagttgatgtaagatgctttgg

SEQ ID NO: 262955 - DNA, 25 bp, Artificial
  probe
  misc_feature (1)..(25): SEQ ID NO: 405; WAN0249ZQ; Start 51; Stop 75
gagttgatgtaagatgctttggctt

SEQ ID NO: 262956 - DNA, 25 bp, Artificial
  probe
  misc_feature (1)..(25): SEQ ID NO: 405; WAN0249ZQ; Start 52; Stop 76
agttgatgtaagatgctttggcttg

SEQ ID NO: 262957 - DNA, 25 bp, Artificial
  probe
  misc_feature (1)..(25): SEQ ID NO: 405; WAN0249ZQ; Start 21; Stop 45
actacataatctctacagatacgga

SEQ ID NO: 262958 - DNA, 25 bp, Artificial
  probe
  misc_feature (1)..(25): SEQ ID NO: 405; WAN0249ZQ; Start 26; Stop 50
ataatctctacagatacggatgttg

SEQ ID NO: 262959 - DNA, 25 bp, Artificial
  probe
  misc_feature (1)..(25): SEQ ID NO: 405; WAN0249ZQ; Start 25; Stop 49
cataatctctacagatacggatgtt

SEQ ID NO: 262960 - DNA, 25 bp, Artificial
  probe
  misc_feature (1)..(25): SEQ ID NO: 405; WAN0249ZQ; Start 24; Stop 48
acataatctctacagatacggatgt

SEQ ID NO: 262961 - DNA, 25 bp, Artificial
  probe
  misc_feature (1)..(25): SEQ ID NO: 405; WAN0249ZQ; Start 56; Stop 80
gatgtaagatgctttggcttgctag

SEQ ID NO: 262962 - DNA, 25 bp, Artificial
  probe
  misc_feature (1)..(25): SEQ ID NO: 405; WAN0249ZQ; Start 55; Stop 79
tgatgtaagatgctttggcttgcta

SEQ ID NO: 262963 - DNA, 25 bp, Artificial
  probe
  misc_feature (1)..(25): SEQ ID NO: 405; WAN0249ZQ; Start 20; Stop 44
aactacataatctctacagatacgg

SEQ ID NO: 262964 - DNA, 25 bp, Artificial
  probe
  misc_feature (1)..(25): SEQ ID NO: 405; WAN0249ZQ; Start 57; Stop 81
atgtaagatgctttggcttgctaga

SEQ ID NO: 262965 - DNA, 25 bp, Artificial
  probe
  misc_feature (1)..(25): SEQ ID NO: 405; WAN0249ZQ; Start 23; Stop 47
tacataatctctacagatacggatg

SEQ ID NO: 262966 - DNA, 25 bp, Artificial
  probe
  misc_feature (1)..(25): SEQ ID NO: 406; WAN024AI6; Start 19; Stop 43
tcagttatacattgacaaaggttct

SEQ ID NO: 262967 - DNA, 25 bp, Artificial
  probe
  misc_feature (1)..(25): SEQ ID NO: 406; WAN024AI6; Start 21; Stop 45
agttatacattgacaaaggttctgt

SEQ ID NO: 262968 - DNA, 25 bp, Artificial
  probe
  misc_feature (1)..(25): SEQ ID NO: 406; WAN024AI6; Start 1; Stop 25
agaaattctccatctttgtcagtta

SEQ ID NO: 262969 - DNA, 25 bp, Artificial
  probe
  misc_feature (1)..(25): SEQ ID NO: 406; WAN024AI6; Start 20; Stop 44
cagttatacattgacaaaggttctg

SEQ ID NO: 262970 - DNA, 25 bp, Artificial
  probe
  misc_feature (1)..(25): SEQ ID NO: 406; WAN024AI6; Start 9; Stop 33
tccatctttgtcagttatacattga

SEQ ID NO: 262971 - DNA, 25 bp, Artificial
  probe
  misc_feature (1)..(25): SEQ ID NO: 406; WAN024AI6; Start 2; Stop 26
gaaattctccatctttgtcagttat

SEQ ID NO: 262972 - DNA, 25 bp, Artificial
  probe
  misc_feature (1)..(25): SEQ ID NO: 406; WAN024AI6; Start 8; Stop 32
ctccatctttgtcagttatacattg

SEQ ID NO: 262973 - DNA, 25 bp, Artificial
  probe
  misc_feature (1)..(25): SEQ ID NO: 406; WAN024AI6; Start 7; Stop 31
tctccatctttgtcagttatacatt

SEQ ID NO: 262974 - DNA, 25 bp, Artificial
  probe
  misc_feature (1)..(25): SEQ ID NO: 406; WAN024AI6; Start 6; Stop 30
ttctccatctttgtcagttatacat

SEQ ID NO: 262975 - DNA, 25 bp, Artificial
  probe
  misc_feature (1)..(25): SEQ ID NO: 406; WAN024AI6; Start 5; Stop 29
attctccatctttgtcagttataca

SEQ ID NO: 262976 - DNA, 25 bp, Artificial
  probe
  misc_feature (1)..(25): SEQ ID NO: 406; WAN024AI6; Start 4; Stop 28
aattctccatctttgtcagttatac

SEQ ID NO: 262977 - DNA, 25 bp, Artificial
  probe
  misc_feature (1)..(25): SEQ ID NO: 406; WAN024AI6; Start 3; Stop 27
aaattctccatctttgtcagttata

SEQ ID NO: 262978 - DNA, 25 bp, Artificial
  probe
  misc_feature (1)..(25): SEQ ID NO: 406; WAN024AI6; Start 25; Stop 49
atacattgacaaaggttctgtcttt

SEQ ID NO: 262979 - DNA, 25 bp, Artificial
  probe
  misc_feature (1)..(25): SEQ ID NO: 406; WAN024AI6; Start 22; Stop 46
gttatacattgacaaaggttctgtc

SEQ ID NO: 262980 - DNA, 25 bp, Artificial
  probe
  misc_feature (1)..(25): SEQ ID NO: 406; WAN024AI6; Start 18; Stop 42
gtcagttatacattgacaaaggttc

SEQ ID NO: 262981 - DNA, 25 bp, Artificial
  probe
  misc_feature (1)..(25): SEQ ID NO: 406; WAN024AI6; Start 24; Stop 48
tatacattgacaaaggttctgtctt

SEQ ID NO: 262982 - DNA, 25 bp, Artificial
  probe
  misc_feature (1)..(25): SEQ ID NO: 406; WAN024AI6; Start 23; Stop 47
ttatacattgacaaaggttctgtct

SEQ ID NO: 262983 - DNA, 25 bp, Artificial
  probe
  misc_feature (1)..(25): SEQ ID NO: 406; WAN024AI6; Start 10; Stop 34
ccatctttgtcagttatacattgac

SEQ ID NO: 262984 - DNA, 25 bp, Artificial
  probe
  misc_feature (1)..(25): SEQ ID NO: 406; WAN024AI6; Start 26; Stop 50
tacattgacaaaggttctgtctttt

SEQ ID NO: 262985 - DNA, 25 bp, Artificial
  probe
  misc_feature (1)..(25): SEQ ID NO: 407; WAN0249TD; Start 1312; Stop 1336
actcgttatggacaatgctatatgg

SEQ ID NO: 262986 - DNA, 25 bp, Artificial
  probe
  misc_feature (1)..(25): SEQ ID NO: 407; WAN0249TD; Start 1767; Stop 1791
cttcataagccagtctacttgttct

SEQ ID NO: 262987 - DNA, 25 bp, Artificial
  probe
  misc_feature (1)..(25): SEQ ID NO: 407; WAN0249TD; Start 1766; Stop 1790
ccttcataagccagtctacttgttc

SEQ ID NO: 262988 - DNA, 25 bp, Artificial
  probe
  misc_feature (1)..(25): SEQ ID NO: 407; WAN0249TD; Start 1212; Stop 1236
atggatggtgtgagcgataatagaa

SEQ ID NO: 262989 - DNA, 25 bp, Artificial
  probe
  misc_feature (1)..(25): SEQ ID NO: 407; WAN0249TD; Start 1095; Stop 1119
atagtattgactcgccttgatatgc

SEQ ID NO: 262990 - DNA, 25 bp, Artificial
  probe
  misc_feature (1)..(25): SEQ ID NO: 407; WAN0249TD; Start 1543; Stop 1567
cgttaatcggagatggactagaatg

SEQ ID NO: 262991 - DNA, 25 bp, Artificial
  probe
  misc_feature (1)..(25): SEQ ID NO: 407; WAN0249TD; Start 1542; Stop 1566
tcgttaatcggagatggactagaat

SEQ ID NO: 262992 - DNA, 25 bp, Artificial
  probe
  misc_feature (1)..(25): SEQ ID NO: 407; WAN0249TD; Start 1541; Stop 1565
atcgttaatcggagatggactagaa

SEQ ID NO: 262993 - DNA, 25 bp, Artificial
  probe
  misc_feature (1)..(25): SEQ ID NO: 407; WAN0249TD; Start 1311; Stop 1335
tactcgttatggacaatgctatatg

SEQ ID NO: 262994 - DNA, 25 bp, Artificial
  probe
  misc_feature (1)..(25): SEQ ID NO: 407; WAN0249TD; Start 869; Stop 893
gcacatagccagaataatctcctag

SEQ ID NO: 262995 - DNA, 25 bp, Artificial
  probe
  misc_feature (1)..(25): SEQ ID NO: 407; WAN0249TD; Start 1546; Stop 1570
taatcggagatggactagaatgctt

SEQ ID NO: 262996 - DNA, 25 bp, Artificial
  probe
  misc_feature (1)..(25): SEQ ID NO: 407; WAN0249TD; Start 1545; Stop 1569
ttaatcggagatggactagaatgct

SEQ ID NO: 262997 - DNA, 25 bp, Artificial
  probe
  misc_feature (1)..(25): SEQ ID NO: 407; WAN0249TD; Start 1544; Stop 1568
gttaatcggagatggactagaatgc

SEQ ID NO: 262998 - DNA, 25 bp, Artificial
  probe
  misc_feature (1)..(25): SEQ ID NO: 407; WAN0249TD; Start 1313; Stop 1337
ctcgttatggacaatgctatatggc

SEQ ID NO: 262999 - DNA, 25 bp, Artificial
  probe
  misc_feature (1)..(25): SEQ ID NO: 407; WAN0249TD; Start 1505; Stop 1529
gttatacaaggactggagaaggagg

SEQ ID NO: 263000 - DNA, 25 bp, Artificial
  probe
  misc_feature (1)..(25): SEQ ID NO: 407; WAN0249TD; Start 1383; Stop 1407
ttattcctccatacacaccagagat

SEQ ID NO: 263001 - DNA, 25 bp, Artificial
  probe
  misc_feature (1)..(25): SEQ ID NO: 407; WAN0249TD; Start 1499; Stop 1523
caagatgttatacaaggactggaga

SEQ ID NO: 263002 - DNA, 25 bp, Artificial
  probe
  misc_feature (1)..(25): SEQ ID NO: 407; WAN0249TD; Start 896; Stop 920
attcttgtactactgaaccacttcg

SEQ ID NO: 263003 - DNA, 25 bp, Artificial
  probe
  misc_feature (1)..(25): SEQ ID NO: 407; WAN0249TD; Start 1502; Stop 1526
gatgttatacaaggactggagaagg

SEQ ID NO: 263004 - DNA, 25 bp, Artificial
  probe
  misc_feature (1)..(25): SEQ ID NO: 407; WAN0249TD; Start 1501; Stop 1525
agatgttatacaaggactggagaag

SEQ ID NO: 263005 - DNA, 25 bp, Artificial
  probe
  misc_feature (1)..(25): SEQ ID NO: 407; WAN0249TD; Start 1107; Stop 1131
cgccttgatatgccaattagagatt

SEQ ID NO: 263006 - DNA, 25 bp, Artificial
  probe
  misc_feature (1)..(25): SEQ ID NO: 407; WAN0249TD; Start 1503; Stop 1527
atgttatacaaggactggagaagga

SEQ ID NO: 263007 - DNA, 25 bp, Artificial
  probe
  misc_feature (1)..(25): SEQ ID NO: 407; WAN0249TD; Start 1211; Stop 1235
gatggatggtgtgagcgataataga

SEQ ID NO: 263008 - DNA, 25 bp, Artificial
  probe
  misc_feature (1)..(25): SEQ ID NO: 407; WAN0249TD; Start 1094; Stop 1118
aatagtattgactcgccttgatatg

SEQ ID NO: 263009 - DNA, 25 bp, Artificial
  probe
  misc_feature (1)..(25): SEQ ID NO: 407; WAN0249TD; Start 1500; Stop 1524
aagatgttatacaaggactggagaa

SEQ ID NO: 263010 - DNA, 25 bp, Artificial
  probe
  misc_feature (1)..(25): SEQ ID NO: 407; WAN0249TD; Start 1506; Stop 1530
ttatacaaggactggagaaggaggt

SEQ ID NO: 263011 - DNA, 25 bp, Artificial
  probe
  misc_feature (1)..(25): SEQ ID NO: 407; WAN0249TD; Start 1768; Stop 1792
ttcataagccagtctacttgttctg

SEQ ID NO: 263012 - DNA, 25 bp, Artificial
  probe
  misc_feature (1)..(25): SEQ ID NO: 407; WAN0249TD; Start 1384; Stop 1408
tattcctccatacacaccagagatg

SEQ ID NO: 263013 - DNA, 25 bp, Artificial
  probe
  misc_feature (1)..(25): SEQ ID NO: 407; WAN0249TD; Start 1213; Stop 1237
tggatggtgtgagcgataatagaag

SEQ ID NO: 263014 - DNA, 25 bp, Artificial
  probe
  misc_feature (1)..(25): SEQ ID NO: 407; WAN0249TD; Start 895; Stop 919
aattcttgtactactgaaccacttc

SEQ ID NO: 263015 - DNA, 25 bp, Artificial
  probe
  misc_feature (1)..(25): SEQ ID NO: 407; WAN0249TD; Start 1504; Stop 1528
tgttatacaaggactggagaaggag

SEQ ID NO: 263016 - DNA, 25 bp, Artificial
  probe
  misc_feature (1)..(25): SEQ ID NO: 407; WAN0249TD; Start 442; Stop 466
ttcttcatacttgaggctgtattca

SEQ ID NO: 263017 - DNA, 25 bp, Artificial
  probe
  misc_feature (1)..(25): SEQ ID NO: 407; WAN0249TD; Start 1210; Stop 1234
tgatggatggtgtgagcgataatag

SEQ ID NO: 263018 - DNA, 25 bp, Artificial
  probe
  misc_feature (1)..(25): SEQ ID NO: 408; WAN0249RP; Start 98; Stop 122
ccttgccgtatatatgttactgact

SEQ ID NO: 263019 - DNA, 25 bp, Artificial
  probe
  misc_feature (1)..(25): SEQ ID NO: 408; WAN0249RP; Start 102; Stop 126
gccgtatatatgttactgacttcgt

SEQ ID NO: 263020 - DNA, 25 bp, Artificial
  probe
  misc_feature (1)..(25): SEQ ID NO: 408; WAN0249RP; Start 101; Stop 125
tgccgtatatatgttactgacttcg

SEQ ID NO: 263021 - DNA, 25 bp, Artificial
  probe
  misc_feature (1)..(25): SEQ ID NO: 408; WAN0249RP; Start 100; Stop 124
ttgccgtatatatgttactgacttc

SEQ ID NO: 263022 - DNA, 25 bp, Artificial
  probe
  misc_feature (1)..(25): SEQ ID NO: 408; WAN0249RP; Start 97; Stop 121
gccttgccgtatatatgttactgac

SEQ ID NO: 263023 - DNA, 25 bp, Artificial
  probe
  misc_feature (1)..(25): SEQ ID NO: 408; WAN0249RP; Start 99; Stop 123
cttgccgtatatatgttactgactt

SEQ ID NO: 263024 - DNA, 25 bp, Artificial
  probe
  misc_feature (1)..(25): SEQ ID NO: 408; WAN0249RP; Start 96; Stop 120
cgccttgccgtatatatgttactga

SEQ ID NO: 263025 - DNA, 25 bp, Artificial
  probe
  misc_feature (1)..(25): SEQ ID NO: 408; WAN0249RP; Start 95; Stop 119
tcgccttgccgtatatatgttactg

SEQ ID NO: 263026 - DNA, 25 bp, Artificial
  probe
  misc_feature (1)..(25): SEQ ID NO: 408; WAN0249RP; Start 94; Stop 118
gtcgccttgccgtatatatgttact

SEQ ID NO: 263027 - DNA, 25 bp, Artificial
  probe
  misc_feature (1)..(25): SEQ ID NO: 408; WAN0249RP; Start 93; Stop 117
cgtcgccttgccgtatatatgttac

SEQ ID NO: 263028 - DNA, 25 bp, Artificial
  probe
  misc_feature (1)..(25): SEQ ID NO: 408; WAN0249RP; Start 46; Stop 70
ctccttttcgtttcatactcttcaa

SEQ ID NO: 263029 - DNA, 25 bp, Artificial
  probe
  misc_feature (1)..(25): SEQ ID NO: 408; WAN0249RP; Start 45; Stop 69
cctccttttcgtttcatactcttca

SEQ ID NO: 263030 - DNA, 25 bp, Artificial
  probe
  misc_feature (1)..(25): SEQ ID NO: 408; WAN0249RP; Start 44; Stop 68
acctccttttcgtttcatactcttc

SEQ ID NO: 263031 - DNA, 25 bp, Artificial
  probe
  misc_feature (1)..(25): SEQ ID NO: 408; WAN0249RP; Start 47; Stop 71
tccttttcgtttcatactcttcaaa

SEQ ID NO: 263032 - DNA, 25 bp, Artificial
  probe
  misc_feature (1)..(25): SEQ ID NO: 408; WAN0249RP; Start 43; Stop 67
aacctccttttcgtttcatactctt

SEQ ID NO: 263033 - DNA, 25 bp, Artificial
  probe
  misc_feature (1)..(25): SEQ ID NO: 408; WAN0249RP; Start 42; Stop 66
caacctccttttcgtttcatactct

SEQ ID NO: 263034 - DNA, 25 bp, Artificial
  probe
  misc_feature (1)..(25): SEQ ID NO: 408; WAN0249RP; Start 41; Stop 65
ccaacctccttttcgtttcatactc

SEQ ID NO: 263035 - DNA, 25 bp, Artificial
  probe
  misc_feature (1)..(25): SEQ ID NO: 408; WAN0249RP; Start 39; Stop 63
gaccaacctccttttcgtttcatac

SEQ ID NO: 263036 - DNA, 25 bp, Artificial
  probe
  misc_feature (1)..(25): SEQ ID NO: 408; WAN0249RP; Start 40; Stop 64
accaacctccttttcgtttcatact

SEQ ID NO: 263037 - DNA, 25 bp, Artificial
  probe
  misc_feature (1)..(25): SEQ ID NO: 408; WAN0249RP; Start 38; Stop 62
tgaccaacctccttttcgtttcata

SEQ ID NO: 263038 - DNA, 25 bp, Artificial
  probe
  misc_feature (1)..(25): SEQ ID NO: 408; WAN0249RP; Start 48; Stop 72
ccttttcgtttcatactcttcaaaa

SEQ ID NO: 263039 - DNA, 25 bp, Artificial
  probe
  misc_feature (1)..(25): SEQ ID NO: 408; WAN0249RP; Start 33; Stop 57
tacaatgaccaacctccttttcgtt

SEQ ID NO: 263040 - DNA, 25 bp, Artificial
  probe
  misc_feature (1)..(25): SEQ ID NO: 408; WAN0249RP; Start 288; Stop 312
ttcattgagtatcagatttaggaaa

SEQ ID NO: 263041 - DNA, 25 bp, Artificial
  probe
  misc_feature (1)..(25): SEQ ID NO: 408; WAN0249RP; Start 287; Stop 311
tttcattgagtatcagatttaggaa

SEQ ID NO: 263042 - DNA, 25 bp, Artificial
  probe
  misc_feature (1)..(25): SEQ ID NO: 408; WAN0249RP; Start 35; Stop 59
caatgaccaacctccttttcgtttc

SEQ ID NO: 263043 - DNA, 25 bp, Artificial
  probe
  misc_feature (1)..(25): SEQ ID NO: 408; WAN0249RP; Start 36; Stop 60
aatgaccaacctccttttcgtttca

SEQ ID NO: 263044 - DNA, 25 bp, Artificial
  probe
  misc_feature (1)..(25): SEQ ID NO: 408; WAN0249RP; Start 34; Stop 58
acaatgaccaacctccttttcgttt

SEQ ID NO: 263045 - DNA, 25 bp, Artificial
  probe
  misc_feature (1)..(25): SEQ ID NO: 408; WAN0249RP; Start 32; Stop 56
gtacaatgaccaacctccttttcgt

SEQ ID NO: 263046 - DNA, 25 bp, Artificial
  probe
  misc_feature (1)..(25): SEQ ID NO: 408; WAN0249RP; Start 92; Stop 116
acgtcgccttgccgtatatatgtta

SEQ ID NO: 263047 - DNA, 25 bp, Artificial
  probe
  misc_feature (1)..(25): SEQ ID NO: 408; WAN0249RP; Start 286; Stop 310
ttttcattgagtatcagatttagga

SEQ ID NO: 263048 - DNA, 25 bp, Artificial
  probe
  misc_feature (1)..(25): SEQ ID NO: 408; WAN0249RP; Start 37; Stop 61
atgaccaacctccttttcgtttcat

SEQ ID NO: 263049 - DNA, 25 bp, Artificial
  probe
  misc_feature (1)..(25): SEQ ID NO: 408; WAN0249RP; Start 91; Stop 115
aacgtcgccttgccgtatatatgtt

SEQ ID NO: 263050 - DNA, 25 bp, Artificial
  probe
  misc_feature (1)..(25): SEQ ID NO: 408; WAN0249RP; Start 6; Stop 30
tattatatcatatcaaaaggaggct

SEQ ID NO: 263051 - DNA, 25 bp, Artificial
  probe
  misc_feature (1)..(25): SEQ ID NO: 409; WAN0249M2; Start 95; Stop 119
atcacagtctatattagtacgagtt

SEQ ID NO: 263052 - DNA, 25 bp, Artificial
  probe
  misc_feature (1)..(25): SEQ ID NO: 409; WAN0249M2; Start 6; Stop 30
agctcatggaatctatagtctttga

SEQ ID NO: 263053 - DNA, 25 bp, Artificial
  probe
  misc_feature (1)..(25): SEQ ID NO: 409; WAN0249M2; Start 19; Stop 43
tatagtctttgacacagaggaagag

SEQ ID NO: 263054 - DNA, 25 bp, Artificial
  probe
  misc_feature (1)..(25): SEQ ID NO: 409; WAN0249M2; Start 20; Stop 44
atagtctttgacacagaggaagagt

SEQ ID NO: 263055 - DNA, 25 bp, Artificial
  probe
  misc_feature (1)..(25): SEQ ID NO: 409; WAN0249M2; Start 21; Stop 45
tagtctttgacacagaggaagagtt

SEQ ID NO: 263056 - DNA, 25 bp, Artificial
  probe
  misc_feature (1)..(25): SEQ ID NO: 409; WAN0249M2; Start 17; Stop 41
tctatagtctttgacacagaggaag

SEQ ID NO: 263057 - DNA, 25 bp, Artificial
  probe
  misc_feature (1)..(25): SEQ ID NO: 409; WAN0249M2; Start 7; Stop 31
gctcatggaatctatagtctttgac

SEQ ID NO: 263058 - DNA, 25 bp, Artificial
  probe
  misc_feature (1)..(25): SEQ ID NO: 409; WAN0249M2; Start 94; Stop 118
tatcacagtctatattagtacgagt

SEQ ID NO: 263059 - DNA, 25 bp, Artificial
  probe
  misc_feature (1)..(25): SEQ ID NO: 409; WAN0249M2; Start 12; Stop 36
tggaatctatagtctttgacacaga

SEQ ID NO: 263060 - DNA, 25 bp, Artificial
  probe
  misc_feature (1)..(25): SEQ ID NO: 409; WAN0249M2; Start 98; Stop 122
acagtctatattagtacgagtttga

SEQ ID NO: 263061 - DNA, 25 bp, Artificial
  probe
  misc_feature (1)..(25): SEQ ID NO: 409; WAN0249M2; Start 97; Stop 121
cacagtctatattagtacgagtttg

SEQ ID NO: 263062 - DNA, 25 bp, Artificial
  probe
  misc_feature (1)..(25): SEQ ID NO: 409; WAN0249M2; Start 96; Stop 120
tcacagtctatattagtacgagttt

SEQ ID NO: 263063 - DNA, 25 bp, Artificial
  probe
  misc_feature (1)..(25): SEQ ID NO: 409; WAN0249M2; Start 16; Stop 40
atctatagtctttgacacagaggaa

SEQ ID NO: 263064 - DNA, 25 bp, Artificial
  probe
  misc_feature (1)..(25): SEQ ID NO: 409; WAN0249M2; Start 15; Stop 39
aatctatagtctttgacacagagga

SEQ ID NO: 263065 - DNA, 25 bp, Artificial
  probe
  misc_feature (1)..(25): SEQ ID NO: 409; WAN0249M2; Start 14; Stop 38
gaatctatagtctttgacacagagg

SEQ ID NO: 263066 - DNA, 25 bp, Artificial
  probe
  misc_feature (1)..(25): SEQ ID NO: 409; WAN0249M2; Start 13; Stop 37
ggaatctatagtctttgacacagag

SEQ ID NO: 263067 - DNA, 25 bp, Artificial
  probe
  misc_feature (1)..(25): SEQ ID NO: 409; WAN0249M2; Start 10; Stop 34
catggaatctatagtctttgacaca

SEQ ID NO: 263068 - DNA, 25 bp, Artificial
  probe
  misc_feature (1)..(25): SEQ ID NO: 409; WAN0249M2; Start 11; Stop 35
atggaatctatagtctttgacacag

SEQ ID NO: 263069 - DNA, 25 bp, Artificial
  probe
  misc_feature (1)..(25): SEQ ID NO: 409; WAN0249M2; Start 9; Stop 33
tcatggaatctatagtctttgacac

SEQ ID NO: 263070 - DNA, 25 bp, Artificial
  probe
  misc_feature (1)..(25): SEQ ID NO: 409; WAN0249M2; Start 8; Stop 32
ctcatggaatctatagtctttgaca

SEQ ID NO: 263071 - DNA, 25 bp, Artificial
  probe
  misc_feature (1)..(25): SEQ ID NO: 409; WAN0249M2; Start 113; Stop 137
acgagtttgatgataaatagagatt

SEQ ID NO: 263072 - DNA, 25 bp, Artificial
  probe
  misc_feature (1)..(25): SEQ ID NO: 409; WAN0249M2; Start 18; Stop 42
ctatagtctttgacacagaggaaga

SEQ ID NO: 263073 - DNA, 25 bp, Artificial
  probe
  misc_feature (1)..(25): SEQ ID NO: 409; WAN0249M2; Start 111; Stop 135
gtacgagtttgatgataaatagaga

SEQ ID NO: 263074 - DNA, 25 bp, Artificial
  probe
  misc_feature (1)..(25): SEQ ID NO: 409; WAN0249M2; Start 110; Stop 134
agtacgagtttgatgataaatagag

SEQ ID NO: 263075 - DNA, 25 bp, Artificial
  probe
  misc_feature (1)..(25): SEQ ID NO: 409; WAN0249M2; Start 93; Stop 117
ttatcacagtctatattagtacgag

SEQ ID NO: 263076 - DNA, 25 bp, Artificial
  probe
  misc_feature (1)..(25): SEQ ID NO: 409; WAN0249M2; Start 2; Stop 26
gaagagctcatggaatctatagtct

SEQ ID NO: 263077 - DNA, 25 bp, Artificial
  probe
  misc_feature (1)..(25): SEQ ID NO: 409; WAN0249M2; Start 1; Stop 25
agaagagctcatggaatctatagtc

SEQ ID NO: 263078 - DNA, 25 bp, Artificial
  probe
  misc_feature (1)..(25): SEQ ID NO: 409; WAN0249M2; Start 101; Stop 125
gtctatattagtacgagtttgatga

SEQ ID NO: 263079 - DNA, 25 bp, Artificial
  probe
  misc_feature (1)..(25): SEQ ID NO: 409; WAN0249M2; Start 100; Stop 124
agtctatattagtacgagtttgatg

SEQ ID NO: 263080 - DNA, 25 bp, Artificial
  probe
  misc_feature (1)..(25): SEQ ID NO: 409; WAN0249M2; Start 99; Stop 123
cagtctatattagtacgagtttgat

SEQ ID NO: 263081 - DNA, 25 bp, Artificial
  probe
  misc_feature (1)..(25): SEQ ID NO: 409; WAN0249M2; Start 112; Stop 136
tacgagtttgatgataaatagagat

SEQ ID NO: 263082 - DNA, 25 bp, Artificial
  probe
  misc_feature (1)..(25): SEQ ID NO: 409; WAN0249M2; Start 80; Stop 104
agtagtactttgtttatcacagtct

SEQ ID NO: 263083 - DNA, 25 bp, Artificial
  probe
  misc_feature (1)..(25): SEQ ID NO: 409; WAN0249M2; Start 114; Stop 138
cgagtttgatgataaatagagattt

SEQ ID NO: 263084 - DNA, 25 bp, Artificial
  probe
  misc_feature (1)..(25): SEQ ID NO: 410; WAN0249QV; Start 75; Stop 99
tggaatagcacagcatatcttctaa

SEQ ID NO: 263085 - DNA, 25 bp, Artificial
  probe
  misc_feature (1)..(25): SEQ ID NO: 410; WAN0249QV; Start 74; Stop 98
ctggaatagcacagcatatcttcta

SEQ ID NO: 263086 - DNA, 25 bp, Artificial
  probe
  misc_feature (1)..(25): SEQ ID NO: 410; WAN0249QV; Start 71; Stop 95
aatctggaatagcacagcatatctt

SEQ ID NO: 263087 - DNA, 25 bp, Artificial
  probe
  misc_feature (1)..(25): SEQ ID NO: 410; WAN0249QV; Start 72; Stop 96
atctggaatagcacagcatatcttc

SEQ ID NO: 263088 - DNA, 25 bp, Artificial
  probe
  misc_feature (1)..(25): SEQ ID NO: 410; WAN0249QV; Start 70; Stop 94
gaatctggaatagcacagcatatct

SEQ ID NO: 263089 - DNA, 25 bp, Artificial
  probe
  misc_feature (1)..(25): SEQ ID NO: 410; WAN0249QV; Start 68; Stop 92
ctgaatctggaatagcacagcatat

SEQ ID NO: 263090 - DNA, 25 bp, Artificial
  probe
  misc_feature (1)..(25): SEQ ID NO: 410; WAN0249QV; Start 69; Stop 93
tgaatctggaatagcacagcatatc

SEQ ID NO: 263091 - DNA, 25 bp, Artificial
  probe
  misc_feature (1)..(25): SEQ ID NO: 410; WAN0249QV; Start 73; Stop 97
tctggaatagcacagcatatcttct

SEQ ID NO: 263092 - DNA, 25 bp, Artificial
  probe
  misc_feature (1)..(25): SEQ ID NO: 410; WAN0249QV; Start 67; Stop 91
actgaatctggaatagcacagcata

SEQ ID NO: 263093 - DNA, 25 bp, Artificial
  probe
  misc_feature (1)..(25): SEQ ID NO: 410; WAN0249QV; Start 272; Stop 296
tatatctgatgtcaaagttctcggc

SEQ ID NO: 263094 - DNA, 25 bp, Artificial
  probe
  misc_feature (1)..(25): SEQ ID NO: 410; WAN0249QV; Start 271; Stop 295
gtatatctgatgtcaaagttctcgg

SEQ ID NO: 263095 - DNA, 25 bp, Artificial
  probe
  misc_feature (1)..(25): SEQ ID NO: 410; WAN0249QV; Start 368; Stop 392
ttaagtctgacgctggaaataagaa

SEQ ID NO: 263096 - DNA, 25 bp, Artificial
  probe
  misc_feature (1)..(25): SEQ ID NO: 410; WAN0249QV; Start 367; Stop 391
tttaagtctgacgctggaaataaga

SEQ ID NO: 263097 - DNA, 25 bp, Artificial
  probe
  misc_feature (1)..(25): SEQ ID NO: 410; WAN0249QV; Start 76; Stop 100
ggaatagcacagcatatcttctaaa

SEQ ID NO: 263098 - DNA, 25 bp, Artificial
  probe
  misc_feature (1)..(25): SEQ ID NO: 410; WAN0249QV; Start 66; Stop 90
aactgaatctggaatagcacagcat

SEQ ID NO: 263099 - DNA, 25 bp, Artificial
  probe
  misc_feature (1)..(25): SEQ ID NO: 410; WAN0249QV; Start 270; Stop 294
agtatatctgatgtcaaagttctcg

SEQ ID NO: 263100 - DNA, 25 bp, Artificial
  probe
  misc_feature (1)..(25): SEQ ID NO: 410; WAN0249QV; Start 273; Stop 297
atatctgatgtcaaagttctcggcg

SEQ ID NO: 263101 - DNA, 25 bp, Artificial
  probe
  misc_feature (1)..(25): SEQ ID NO: 410; WAN0249QV; Start 365; Stop 389
gttttaagtctgacgctggaaataa

SEQ ID NO: 263102 - DNA, 25 bp, Artificial
  probe
  misc_feature (1)..(25): SEQ ID NO: 410; WAN0249QV; Start 366; Stop 390
ttttaagtctgacgctggaaataag

SEQ ID NO: 263103 - DNA, 25 bp, Artificial
  probe
  misc_feature (1)..(25): SEQ ID NO: 410; WAN0249QV; Start 302; Stop 326
aaatagcgattcccaagcctgacta

SEQ ID NO: 263104 - DNA, 25 bp, Artificial
  probe
  misc_feature (1)..(25): SEQ ID NO: 410; WAN0249QV; Start 274; Stop 298
tatctgatgtcaaagttctcggcga

SEQ ID NO: 263105 - DNA, 25 bp, Artificial
  probe
  misc_feature (1)..(25): SEQ ID NO: 410; WAN0249QV; Start 283; Stop 307
tcaaagttctcggcgagtcaaatag

SEQ ID NO: 263106 - DNA, 25 bp, Artificial
  probe
  misc_feature (1)..(25): SEQ ID NO: 410; WAN0249QV; Start 269; Stop 293
tagtatatctgatgtcaaagttctc

SEQ ID NO: 263107 - DNA, 25 bp, Artificial
  probe
  misc_feature (1)..(25): SEQ ID NO: 410; WAN0249QV; Start 77; Stop 101
gaatagcacagcatatcttctaaaa

SEQ ID NO: 263108 - DNA, 25 bp, Artificial
  probe
  misc_feature (1)..(25): SEQ ID NO: 410; WAN0249QV; Start 282; Stop 306
gtcaaagttctcggcgagtcaaata

SEQ ID NO: 263109 - DNA, 25 bp, Artificial
  probe
  misc_feature (1)..(25): SEQ ID NO: 410; WAN0249QV; Start 78; Stop 102
aatagcacagcatatcttctaaaat

SEQ ID NO: 263110 - DNA, 25 bp, Artificial
  probe
  misc_feature (1)..(25): SEQ ID NO: 410; WAN0249QV; Start 297; Stop 321
gagtcaaatagcgattcccaagcct

SEQ ID NO: 263111 - DNA, 25 bp, Artificial
  probe
  misc_feature (1)..(25): SEQ ID NO: 410; WAN0249QV; Start 268; Stop 292
atagtatatctgatgtcaaagttct

SEQ ID NO: 263112 - DNA, 25 bp, Artificial
  probe
  misc_feature (1)..(25): SEQ ID NO: 410; WAN0249QV; Start 364; Stop 388
cgttttaagtctgacgctggaaata

SEQ ID NO: 263113 - DNA, 25 bp, Artificial
  probe
  misc_feature (1)..(25): SEQ ID NO: 410; WAN0249QV; Start 79; Stop 103
atagcacagcatatcttctaaaata

SEQ ID NO: 263114 - DNA, 25 bp, Artificial
  probe
  misc_feature (1)..(25): SEQ ID NO: 410; WAN0249QV; Start 81; Stop 105
agcacagcatatcttctaaaatata

SEQ ID NO: 263115 - DNA, 25 bp, Artificial
  probe
  misc_feature (1)..(25): SEQ ID NO: 410; WAN0249QV; Start 80; Stop 104
tagcacagcatatcttctaaaatat

SEQ ID NO: 263116 - DNA, 25 bp, Artificial
  probe
  misc_feature (1)..(25): SEQ ID NO: 410; WAN0249QV; Start 284; Stop 308
caaagttctcggcgagtcaaatagc

SEQ ID NO: 263117 - DNA, 25 bp, Artificial
  probe
  misc_feature (1)..(25): SEQ ID NO: 411; WAN0249NW; Start 101; Stop 125
ctattgagggcgtgaatacagaatc

SEQ ID NO: 263118 - DNA, 25 bp, Artificial
  probe
  misc_feature (1)..(25): SEQ ID NO: 411; WAN0249NW; Start 100; Stop 124
tctattgagggcgtgaatacagaat

SEQ ID NO: 263119 - DNA, 25 bp, Artificial
  probe
  misc_feature (1)..(25): SEQ ID NO: 411; WAN0249NW; Start 106; Stop 130
gagggcgtgaatacagaatcaaatt

SEQ ID NO: 263120 - DNA, 25 bp, Artificial
  probe
  misc_feature (1)..(25): SEQ ID NO: 411; WAN0249NW; Start 102; Stop 126
tattgagggcgtgaatacagaatca

SEQ ID NO: 263121 - DNA, 25 bp, Artificial
  probe
  misc_feature (1)..(25): SEQ ID NO: 411; WAN0249NW; Start 5; Stop 29
taggtatagcatgatataacgactt

SEQ ID NO: 263122 - DNA, 25 bp, Artificial
  probe
  misc_feature (1)..(25): SEQ ID NO: 411; WAN0249NW; Start 99; Stop 123
gtctattgagggcgtgaatacagaa

SEQ ID NO: 263123 - DNA, 25 bp, Artificial
  probe
  misc_feature (1)..(25): SEQ ID NO: 411; WAN0249NW; Start 4; Stop 28
ataggtatagcatgatataacgact

SEQ ID NO: 263124 - DNA, 25 bp, Artificial
  probe
  misc_feature (1)..(25): SEQ ID NO: 411; WAN0249NW; Start 105; Stop 129
tgagggcgtgaatacagaatcaaat

SEQ ID NO: 263125 - DNA, 25 bp, Artificial
  probe
  misc_feature (1)..(25): SEQ ID NO: 411; WAN0249NW; Start 107; Stop 131
agggcgtgaatacagaatcaaattc

SEQ ID NO: 263126 - DNA, 25 bp, Artificial
  probe
  misc_feature (1)..(25): SEQ ID NO: 411; WAN0249NW; Start 58; Stop 82
acactacggagacaatatataaaca

SEQ ID NO: 263127 - DNA, 25 bp, Artificial
  probe
  misc_feature (1)..(25): SEQ ID NO: 411; WAN0249NW; Start 50; Stop 74
gtataataacactacggagacaata

SEQ ID NO: 263128 - DNA, 25 bp, Artificial
  probe
  misc_feature (1)..(25): SEQ ID NO: 411; WAN0249NW; Start 6; Stop 30
aggtatagcatgatataacgacttt

SEQ ID NO: 263129 - DNA, 25 bp, Artificial
  probe
  misc_feature (1)..(25): SEQ ID NO: 411; WAN0249NW; Start 87; Stop 111
tcttattttaccgtctattgagggc

SEQ ID NO: 263130 - DNA, 25 bp, Artificial
  probe
  misc_feature (1)..(25): SEQ ID NO: 411; WAN0249NW; Start 3; Stop 27
aataggtatagcatgatataacgac

SEQ ID NO: 263131 - DNA, 25 bp, Artificial
  probe
  misc_feature (1)..(25): SEQ ID NO: 411; WAN0249NW; Start 94; Stop 118
ttaccgtctattgagggcgtgaata

SEQ ID NO: 263132 - DNA, 25 bp, Artificial
  probe
  misc_feature (1)..(25): SEQ ID NO: 411; WAN0249NW; Start 88; Stop 112
cttattttaccgtctattgagggcg

SEQ ID NO: 263133 - DNA, 25 bp, Artificial
  probe
  misc_feature (1)..(25): SEQ ID NO: 411; WAN0249NW; Start 86; Stop 110
ttcttattttaccgtctattgaggg

SEQ ID NO: 263134 - DNA, 25 bp, Artificial
  probe
  misc_feature (1)..(25): SEQ ID NO: 411; WAN0249NW; Start 2; Stop 26
gaataggtatagcatgatataacga

SEQ ID NO: 263135 - DNA, 25 bp, Artificial
  probe
  misc_feature (1)..(25): SEQ ID NO: 411; WAN0249NW; Start 1; Stop 25
agaataggtatagcatgatataacg

SEQ ID NO: 263136 - DNA, 25 bp, Artificial
  probe
  misc_feature (1)..(25): SEQ ID NO: 411; WAN0249NW; Start 48; Stop 72
tcgtataataacactacggagacaa

SEQ ID NO: 263137 - DNA, 25 bp, Artificial
  probe
  misc_feature (1)..(25): SEQ ID NO: 411; WAN0249NW; Start 47; Stop 71
ttcgtataataacactacggagaca

SEQ ID NO: 263138 - DNA, 25 bp, Artificial
  probe
  misc_feature (1)..(25): SEQ ID NO: 411; WAN0249NW; Start 59; Stop 83
cactacggagacaatatataaacaa

SEQ ID NO: 263139 - DNA, 25 bp, Artificial
  probe
  misc_feature (1)..(25): SEQ ID NO: 411; WAN0249NW; Start 57; Stop 81
aacactacggagacaatatataaac

SEQ ID NO: 263140 - DNA, 25 bp, Artificial
  probe
  misc_feature (1)..(25): SEQ ID NO: 411; WAN0249NW; Start 89; Stop 113
ttattttaccgtctattgagggcgt

SEQ ID NO: 263141 - DNA, 25 bp, Artificial
  probe
  misc_feature (1)..(25): SEQ ID NO: 411; WAN0249NW; Start 93; Stop 117
tttaccgtctattgagggcgtgaat

SEQ ID NO: 263142 - DNA, 25 bp, Artificial
  probe
  misc_feature (1)..(25): SEQ ID NO: 411; WAN0249NW; Start 95; Stop 119
taccgtctattgagggcgtgaatac

SEQ ID NO: 263143 - DNA, 25 bp, Artificial
  probe
  misc_feature (1)..(25): SEQ ID NO: 411; WAN0249NW; Start 49; Stop 73
cgtataataacactacggagacaat

SEQ ID NO: 263144 - DNA, 25 bp, Artificial
  probe
  misc_feature (1)..(25): SEQ ID NO: 411; WAN0249NW; Start 12; Stop 36
agcatgatataacgacttttcctaa

SEQ ID NO: 263145 - DNA, 25 bp, Artificial
  probe
  misc_feature (1)..(25): SEQ ID NO: 411; WAN0249NW; Start 98; Stop 122
cgtctattgagggcgtgaatacaga

SEQ ID NO: 263146 - DNA, 25 bp, Artificial
  probe
  misc_feature (1)..(25): SEQ ID NO: 411; WAN0249NW; Start 90; Stop 114
tattttaccgtctattgagggcgtg

SEQ ID NO: 263147 - DNA, 25 bp, Artificial
  probe
  misc_feature (1)..(25): SEQ ID NO: 411; WAN0249NW; Start 118; Stop 142
acagaatcaaattcaagtctaaaga

SEQ ID NO: 263148 - DNA, 25 bp, Artificial
  probe
  misc_feature (1)..(25): SEQ ID NO: 411; WAN0249NW; Start 10; Stop 34
atagcatgatataacgacttttcct

SEQ ID NO: 263149 - DNA, 25 bp, Artificial
  probe
  misc_feature (1)..(25): SEQ ID NO: 411; WAN0249NW; Start 103; Stop 127
attgagggcgtgaatacagaatcaa

SEQ ID NO: 263150 - DNA, 25 bp, Artificial
  probe
  misc_feature (1)..(25): SEQ ID NO: 412; WAN0249WE; Start 1; Stop 25
agaatcaaagagaaacttagcaagc

SEQ ID NO: 263151 - DNA, 25 bp, Artificial
  probe
  misc_feature (1)..(25): SEQ ID NO: 412; WAN0249WE; Start 15; Stop 39
acttagcaagctaacagtagtaaga

SEQ ID NO: 263152 - DNA, 25 bp, Artificial
  probe
  misc_feature (1)..(25): SEQ ID NO: 412; WAN0249WE; Start 14; Stop 38
aacttagcaagctaacagtagtaag

SEQ ID NO: 263153 - DNA, 25 bp, Artificial
  probe
  misc_feature (1)..(25): SEQ ID NO: 412; WAN0249WE; Start 2; Stop 26
gaatcaaagagaaacttagcaagct

SEQ ID NO: 263154 - DNA, 25 bp, Artificial
  probe
  misc_feature (1)..(25): SEQ ID NO: 412; WAN0249WE; Start 18; Stop 42
tagcaagctaacagtagtaagataa

SEQ ID NO: 263155 - DNA, 25 bp, Artificial
  probe
  misc_feature (1)..(25): SEQ ID NO: 412; WAN0249WE; Start 16; Stop 40
cttagcaagctaacagtagtaagat

SEQ ID NO: 263156 - DNA, 25 bp, Artificial
  probe
  misc_feature (1)..(25): SEQ ID NO: 412; WAN0249WE; Start 3; Stop 27
aatcaaagagaaacttagcaagcta

SEQ ID NO: 263157 - DNA, 25 bp, Artificial
  probe
  misc_feature (1)..(25): SEQ ID NO: 412; WAN0249WE; Start 19; Stop 43
agcaagctaacagtagtaagataaa

SEQ ID NO: 263158 - DNA, 25 bp, Artificial
  probe
  misc_feature (1)..(25): SEQ ID NO: 412; WAN0249WE; Start 60; Stop 84
agggataagattggtaaatagtgta

SEQ ID NO: 263159 - DNA, 25 bp, Artificial
  probe
  misc_feature (1)..(25): SEQ ID NO: 412; WAN0249WE; Start 59; Stop 83
tagggataagattggtaaatagtgt

SEQ ID NO: 263160 - DNA, 25 bp, Artificial
  probe
  misc_feature (1)..(25): SEQ ID NO: 412; WAN0249WE; Start 11; Stop 35
agaaacttagcaagctaacagtagt

SEQ ID NO: 263161 - DNA, 25 bp, Artificial
  probe
  misc_feature (1)..(25): SEQ ID NO: 412; WAN0249WE; Start 6; Stop 30
caaagagaaacttagcaagctaaca

SEQ ID NO: 263162 - DNA, 25 bp, Artificial
  probe
  misc_feature (1)..(25): SEQ ID NO: 412; WAN0249WE; Start 9; Stop 33
agagaaacttagcaagctaacagta

SEQ ID NO: 263163 - DNA, 25 bp, Artificial
  probe
  misc_feature (1)..(25): SEQ ID NO: 412; WAN0249WE; Start 8; Stop 32
aagagaaacttagcaagctaacagt

SEQ ID NO: 263164 - DNA, 25 bp, Artificial
  probe
  misc_feature (1)..(25): SEQ ID NO: 412; WAN0249WE; Start 10; Stop 34
gagaaacttagcaagctaacagtag

SEQ ID NO: 263165 - DNA, 25 bp, Artificial
  probe
  misc_feature (1)..(25): SEQ ID NO: 412; WAN0249WE; Start 7; Stop 31
aaagagaaacttagcaagctaacag

SEQ ID NO: 263166 - DNA, 25 bp, Artificial
  probe
  misc_feature (1)..(25): SEQ ID NO: 412; WAN0249WE; Start 5; Stop 29
tcaaagagaaacttagcaagctaac

SEQ ID NO: 263167 - DNA, 25 bp, Artificial
  probe
  misc_feature (1)..(25): SEQ ID NO: 412; WAN0249WE; Start 17; Stop 41
ttagcaagctaacagtagtaagata

SEQ ID NO: 263168 - DNA, 25 bp, Artificial
  probe
  misc_feature (1)..(25): SEQ ID NO: 412; WAN0249WE; Start 4; Stop 28
atcaaagagaaacttagcaagctaa

SEQ ID NO: 263169 - DNA, 25 bp, Artificial
  probe
  misc_feature (1)..(25): SEQ ID NO: 412; WAN0249WE; Start 12; Stop 36
gaaacttagcaagctaacagtagta

SEQ ID NO: 263170 - DNA, 25 bp, Artificial
  probe
  misc_feature (1)..(25): SEQ ID NO: 412; WAN0249WE; Start 61; Stop 85
gggataagattggtaaatagtgtaa

SEQ ID NO: 263171 - DNA, 25 bp, Artificial
  probe
  misc_feature (1)..(25): SEQ ID NO: 412; WAN0249WE; Start 13; Stop 37
aaacttagcaagctaacagtagtaa

SEQ ID NO: 263172 - DNA, 25 bp, Artificial
  probe
  misc_feature (1)..(25): SEQ ID NO: 412; WAN0249WE; Start 58; Stop 82
ttagggataagattggtaaatagtg

SEQ ID NO: 263173 - DNA, 25 bp, Artificial
  probe
  misc_feature (1)..(25): SEQ ID NO: 412; WAN0249WE; Start 50; Stop 74
atttgatattagggataagattggt

SEQ ID NO: 263174 - DNA, 25 bp, Artificial
  probe
  misc_feature (1)..(25): SEQ ID NO: 412; WAN0249WE; Start 20; Stop 44
gcaagctaacagtagtaagataaaa

SEQ ID NO: 263175 - DNA, 25 bp, Artificial
  probe
  misc_feature (1)..(25): SEQ ID NO: 412; WAN0249WE; Start 111; Stop 135
agttatttctggtttctgaaaagta

SEQ ID NO: 263176 - DNA, 25 bp, Artificial
  probe
  misc_feature (1)..(25): SEQ ID NO: 412; WAN0249WE; Start 110; Stop 134
tagttatttctggtttctgaaaagt

SEQ ID NO: 263177 - DNA, 25 bp, Artificial
  probe
  misc_feature (1)..(25): SEQ ID NO: 412; WAN0249WE; Start 112; Stop 136
gttatttctggtttctgaaaagtat

SEQ ID NO: 263178 - DNA, 25 bp, Artificial
  probe
  misc_feature (1)..(25): SEQ ID NO: 412; WAN0249WE; Start 109; Stop 133
atagttatttctggtttctgaaaag

SEQ ID NO: 263179 - DNA, 25 bp, Artificial
  probe
  misc_feature (1)..(25): SEQ ID NO: 412; WAN0249WE; Start 113; Stop 137
ttatttctggtttctgaaaagtatt

SEQ ID NO: 263180 - DNA, 25 bp, Artificial
  probe
  misc_feature (1)..(25): SEQ ID NO: 413; WAN0249K2; Start 13; Stop 37
caaggttcggttttctttctctttt

SEQ ID NO: 263181 - DNA, 25 bp, Artificial
  probe
  misc_feature (1)..(25): SEQ ID NO: 413; WAN0249K2; Start 12; Stop 36
gcaaggttcggttttctttctcttt

SEQ ID NO: 263182 - DNA, 25 bp, Artificial
  probe
  misc_feature (1)..(25): SEQ ID NO: 413; WAN0249K2; Start 11; Stop 35
cgcaaggttcggttttctttctctt

SEQ ID NO: 263183 - DNA, 25 bp, Artificial
  probe
  misc_feature (1)..(25): SEQ ID NO: 414; WAN0249LM; Start 67; Stop 91
atttctgaccaagtgatacaataga

SEQ ID NO: 263184 - DNA, 25 bp, Artificial
  probe
  misc_feature (1)..(25): SEQ ID NO: 414; WAN0249LM; Start 132; Stop 156
tctatctcattatggaggaaatcag

SEQ ID NO: 263185 - DNA, 25 bp, Artificial
  probe
  misc_feature (1)..(25): SEQ ID NO: 414; WAN0249LM; Start 131; Stop 155
atctatctcattatggaggaaatca

SEQ ID NO: 263186 - DNA, 25 bp, Artificial
  probe
  misc_feature (1)..(25): SEQ ID NO: 414; WAN0249LM; Start 66; Stop 90
tatttctgaccaagtgatacaatag

SEQ ID NO: 263187 - DNA, 25 bp, Artificial
  probe
  misc_feature (1)..(25): SEQ ID NO: 414; WAN0249LM; Start 68; Stop 92
tttctgaccaagtgatacaatagaa

SEQ ID NO: 263188 - DNA, 25 bp, Artificial
  probe
  misc_feature (1)..(25): SEQ ID NO: 414; WAN0249LM; Start 110; Stop 134
agttcaaagagtgctaataatatct

SEQ ID NO: 263189 - DNA, 25 bp, Artificial
  probe
  misc_feature (1)..(25): SEQ ID NO: 414; WAN0249LM; Start 130; Stop 154
tatctatctcattatggaggaaatc

SEQ ID NO: 263190 - DNA, 25 bp, Artificial
  probe
  misc_feature (1)..(25): SEQ ID NO: 414; WAN0249LM; Start 33; Stop 57
tttatcttgagaaagtcagactttt

SEQ ID NO: 263191 - DNA, 25 bp, Artificial
  probe
  misc_feature (1)..(25): SEQ ID NO: 414; WAN0249LM; Start 32; Stop 56
ttttatcttgagaaagtcagacttt

SEQ ID NO: 263192 - DNA, 25 bp, Artificial
  probe
  misc_feature (1)..(25): SEQ ID NO: 415; WAN0249OE; Start 37; Stop 61
gaacagttgctagaaatgtagaggt

SEQ ID NO: 263193 - DNA, 25 bp, Artificial
  probe
  misc_feature (1)..(25): SEQ ID NO: 415; WAN0249OE; Start 36; Stop 60
tgaacagttgctagaaatgtagagg

SEQ ID NO: 263194 - DNA, 25 bp, Artificial
  probe
  misc_feature (1)..(25): SEQ ID NO: 415; WAN0249OE; Start 38; Stop 62
aacagttgctagaaatgtagaggta

SEQ ID NO: 263195 - DNA, 25 bp, Artificial
  probe
  misc_feature (1)..(25): SEQ ID NO: 415; WAN0249OE; Start 35; Stop 59
ttgaacagttgctagaaatgtagag

SEQ ID NO: 263196 - DNA, 25 bp, Artificial
  probe
  misc_feature (1)..(25): SEQ ID NO: 415; WAN0249OE; Start 34; Stop 58
tttgaacagttgctagaaatgtaga

SEQ ID NO: 263197 - DNA, 25 bp, Artificial
  probe
  misc_feature (1)..(25): SEQ ID NO: 415; WAN0249OE; Start 33; Stop 57
ttttgaacagttgctagaaatgtag

SEQ ID NO: 263198 - DNA, 25 bp, Artificial
  probe
  misc_feature (1)..(25): SEQ ID NO: 415; WAN0249OE; Start 10; Stop 34
tattgagtcatttaagactgccttt

SEQ ID NO: 263199 - DNA, 25 bp, Artificial
  probe
  misc_feature (1)..(25): SEQ ID NO: 415; WAN0249OE; Start 9; Stop 33
atattgagtcatttaagactgcctt

SEQ ID NO: 263200 - DNA, 25 bp, Artificial
  probe
  misc_feature (1)..(25): SEQ ID NO: 415; WAN0249OE; Start 8; Stop 32
aatattgagtcatttaagactgcct

SEQ ID NO: 263201 - DNA, 25 bp, Artificial
  probe
  misc_feature (1)..(25): SEQ ID NO: 415; WAN0249OE; Start 11; Stop 35
attgagtcatttaagactgcctttt

SEQ ID NO: 263202 - DNA, 25 bp, Artificial
  probe
  misc_feature (1)..(25): SEQ ID NO: 415; WAN0249OE; Start 7; Stop 31
caatattgagtcatttaagactgcc

SEQ ID NO: 263203 - DNA, 25 bp, Artificial
  probe
  misc_feature (1)..(25): SEQ ID NO: 416; WAN024A25; Start 1; Stop 25
agacaactgtttcaatggaatttta

SEQ ID NO: 263204 - DNA, 25 bp, Artificial
  probe
  misc_feature (1)..(25): SEQ ID NO: 416; WAN024A25; Start 2; Stop 26
gacaactgtttcaatggaattttaa

SEQ ID NO: 263205 - DNA, 25 bp, Artificial
  probe
  misc_feature (1)..(25): SEQ ID NO: 416; WAN024A25; Start 3; Stop 27
acaactgtttcaatggaattttaaa

SEQ ID NO: 263206 - DNA, 25 bp, Artificial
  probe
  misc_feature (1)..(25): SEQ ID NO: 416; WAN024A25; Start 4; Stop 28
caactgtttcaatggaattttaaaa

SEQ ID NO: 263207 - DNA, 25 bp, Artificial
  probe
  misc_feature (1)..(25): SEQ ID NO: 417; WAN024AL4; Start 43; Stop 67
ttacacaagatattttggacggttc

SEQ ID NO: 263208 - DNA, 25 bp, Artificial
  probe
  misc_feature (1)..(25): SEQ ID NO: 417; WAN024AL4; Start 42; Stop 66
attacacaagatattttggacggtt

SEQ ID NO: 263209 - DNA, 25 bp, Artificial
  probe
  misc_feature (1)..(25): SEQ ID NO: 417; WAN024AL4; Start 41; Stop 65
aattacacaagatattttggacggt

SEQ ID NO: 263210 - DNA, 25 bp, Artificial
  probe
  misc_feature (1)..(25): SEQ ID NO: 417; WAN024AL4; Start 40; Stop 64
caattacacaagatattttggacgg

SEQ ID NO: 263211 - DNA, 25 bp, Artificial
  probe
  misc_feature (1)..(25): SEQ ID NO: 417; WAN024AL4; Start 44; Stop 68
tacacaagatattttggacggttcg

SEQ ID NO: 263212 - DNA, 25 bp, Artificial
  probe
  misc_feature (1)..(25): SEQ ID NO: 417; WAN024AL4; Start 32; Stop 56
gccgtgttcaattacacaagatatt

SEQ ID NO: 263213 - DNA, 25 bp, Artificial
  probe
  misc_feature (1)..(25): SEQ ID NO: 417; WAN024AL4; Start 39; Stop 63
tcaattacacaagatattttggacg

SEQ ID NO: 263214 - DNA, 25 bp, Artificial
  probe
  misc_feature (1)..(25): SEQ ID NO: 417; WAN024AL4; Start 45; Stop 69
acacaagatattttggacggttcgg

SEQ ID NO: 263215 - DNA, 25 bp, Artificial
  probe
  misc_feature (1)..(25): SEQ ID NO: 417; WAN024AL4; Start 49; Stop 73
aagatattttggacggttcggcttg

SEQ ID NO: 263216 - DNA, 25 bp, Artificial
  probe
  misc_feature (1)..(25): SEQ ID NO: 417; WAN024AL4; Start 31; Stop 55
ggccgtgttcaattacacaagatat

SEQ ID NO: 263217 - DNA, 25 bp, Artificial
  probe
  misc_feature (1)..(25): SEQ ID NO: 417; WAN024AL4; Start 33; Stop 57
ccgtgttcaattacacaagatattt

SEQ ID NO: 263218 - DNA, 25 bp, Artificial
  probe
  misc_feature (1)..(25): SEQ ID NO: 417; WAN024AL4; Start 48; Stop 72
caagatattttggacggttcggctt

SEQ ID NO: 263219 - DNA, 25 bp, Artificial
  probe
  misc_feature (1)..(25): SEQ ID NO: 417; WAN024AL4; Start 38; Stop 62
ttcaattacacaagatattttggac

SEQ ID NO: 263220 - DNA, 25 bp, Artificial
  probe
  misc_feature (1)..(25): SEQ ID NO: 417; WAN024AL4; Start 37; Stop 61
gttcaattacacaagatattttgga

SEQ ID NO: 263221 - DNA, 25 bp, Artificial
  probe
  misc_feature (1)..(25): SEQ ID NO: 417; WAN024AL4; Start 36; Stop 60
tgttcaattacacaagatattttgg

SEQ ID NO: 263222 - DNA, 25 bp, Artificial
  probe
  misc_feature (1)..(25): SEQ ID NO: 417; WAN024AL4; Start 68; Stop 92
ggcttgccgaacatttctgtagaaa

SEQ ID NO: 263223 - DNA, 25 bp, Artificial
  probe
  misc_feature (1)..(25): SEQ ID NO: 417; WAN024AL4; Start 69; Stop 93
gcttgccgaacatttctgtagaaaa

SEQ ID NO: 263224 - DNA, 25 bp, Artificial
  probe
  misc_feature (1)..(25): SEQ ID NO: 417; WAN024AL4; Start 46; Stop 70
cacaagatattttggacggttcggc

SEQ ID NO: 263225 - DNA, 25 bp, Artificial
  probe
  misc_feature (1)..(25): SEQ ID NO: 417; WAN024AL4; Start 47; Stop 71
acaagatattttggacggttcggct

SEQ ID NO: 263226 - DNA, 25 bp, Artificial
  probe
  misc_feature (1)..(25): SEQ ID NO: 417; WAN024AL4; Start 34; Stop 58
cgtgttcaattacacaagatatttt

SEQ ID NO: 263227 - DNA, 25 bp, Artificial
  probe
  misc_feature (1)..(25): SEQ ID NO: 417; WAN024AL4; Start 35; Stop 59
gtgttcaattacacaagatattttg

SEQ ID NO: 263228 - DNA, 25 bp, Artificial
  probe
  misc_feature (1)..(25): SEQ ID NO: 418; WAN0249Z7; Start 72; Stop 96
atggcatactagacttatcaatgaa

SEQ ID NO: 263229 - DNA, 25 bp, Artificial
  probe
  misc_feature (1)..(25): SEQ ID NO: 418; WAN0249Z7; Start 82; Stop 106
agacttatcaatgaaagcgaggtaa

SEQ ID NO: 263230 - DNA, 25 bp, Artificial
  probe
  misc_feature (1)..(25): SEQ ID NO: 418; WAN0249Z7; Start 81; Stop 105
tagacttatcaatgaaagcgaggta

SEQ ID NO: 263231 - DNA, 25 bp, Artificial
  probe
  misc_feature (1)..(25): SEQ ID NO: 418; WAN0249Z7; Start 84; Stop 108
acttatcaatgaaagcgaggtaatc

SEQ ID NO: 263232 - DNA, 25 bp, Artificial
  probe
  misc_feature (1)..(25): SEQ ID NO: 418; WAN0249Z7; Start 83; Stop 107
gacttatcaatgaaagcgaggtaat

SEQ ID NO: 263233 - DNA, 25 bp, Artificial
  probe
  misc_feature (1)..(25): SEQ ID NO: 418; WAN0249Z7; Start 85; Stop 109
cttatcaatgaaagcgaggtaatct

SEQ ID NO: 263234 - DNA, 25 bp, Artificial
  probe
  misc_feature (1)..(25): SEQ ID NO: 418; WAN0249Z7; Start 80; Stop 104
ctagacttatcaatgaaagcgaggt

SEQ ID NO: 263235 - DNA, 25 bp, Artificial
  probe
  misc_feature (1)..(25): SEQ ID NO: 418; WAN0249Z7; Start 79; Stop 103
actagacttatcaatgaaagcgagg

SEQ ID NO: 263236 - DNA, 25 bp, Artificial
  probe
  misc_feature (1)..(25): SEQ ID NO: 418; WAN0249Z7; Start 86; Stop 110
ttatcaatgaaagcgaggtaatctc

SEQ ID NO: 263237 - DNA, 25 bp, Artificial
  probe
  misc_feature (1)..(25): SEQ ID NO: 418; WAN0249Z7; Start 71; Stop 95
tatggcatactagacttatcaatga

SEQ ID NO: 263238 - DNA, 25 bp, Artificial
  probe
  misc_feature (1)..(25): SEQ ID NO: 418; WAN0249Z7; Start 78; Stop 102
tactagacttatcaatgaaagcgag

SEQ ID NO: 263239 - DNA, 25 bp, Artificial
  probe
  misc_feature (1)..(25): SEQ ID NO: 418; WAN0249Z7; Start 75; Stop 99
gcatactagacttatcaatgaaagc

SEQ ID NO: 263240 - DNA, 25 bp, Artificial
  probe
  misc_feature (1)..(25): SEQ ID NO: 418; WAN0249Z7; Start 63; Stop 87
agaaactttatggcatactagactt

SEQ ID NO: 263241 - DNA, 25 bp, Artificial
  probe
  misc_feature (1)..(25): SEQ ID NO: 418; WAN0249Z7; Start 73; Stop 97
tggcatactagacttatcaatgaaa

SEQ ID NO: 263242 - DNA, 25 bp, Artificial
  probe
  misc_feature (1)..(25): SEQ ID NO: 418; WAN0249Z7; Start 77; Stop 101
atactagacttatcaatgaaagcga

SEQ ID NO: 263243 - DNA, 25 bp, Artificial
  probe
  misc_feature (1)..(25): SEQ ID NO: 418; WAN0249Z7; Start 76; Stop 100
catactagacttatcaatgaaagcg

SEQ ID NO: 263244 - DNA, 25 bp, Artificial
  probe
  misc_feature (1)..(25): SEQ ID NO: 418; WAN0249Z7; Start 70; Stop 94
ttatggcatactagacttatcaatg

SEQ ID NO: 263245 - DNA, 25 bp, Artificial
  probe
  misc_feature (1)..(25): SEQ ID NO: 418; WAN0249Z7; Start 74; Stop 98
ggcatactagacttatcaatgaaag

SEQ ID NO: 263246 - DNA, 25 bp, Artificial
  probe
  misc_feature (1)..(25): SEQ ID NO: 418; WAN0249Z7; Start 67; Stop 91
actttatggcatactagacttatca

SEQ ID NO: 263247 - DNA, 25 bp, Artificial
  probe
  misc_feature (1)..(25): SEQ ID NO: 418; WAN0249Z7; Start 62; Stop 86
tagaaactttatggcatactagact

SEQ ID NO: 263248 - DNA, 25 bp, Artificial
  probe
  misc_feature (1)..(25): SEQ ID NO: 418; WAN0249Z7; Start 2; Stop 26
gacctataaaagatgagaccaacca

SEQ ID NO: 263249 - DNA, 25 bp, Artificial
  probe
  misc_feature (1)..(25): SEQ ID NO: 418; WAN0249Z7; Start 1; Stop 25
agacctataaaagatgagaccaacc

SEQ ID NO: 263250 - DNA, 25 bp, Artificial
  probe
  misc_feature (1)..(25): SEQ ID NO: 418; WAN0249Z7; Start 6; Stop 30
tataaaagatgagaccaaccaacct

SEQ ID NO: 263251 - DNA, 25 bp, Artificial
  probe
  misc_feature (1)..(25): SEQ ID NO: 418; WAN0249Z7; Start 3; Stop 27
acctataaaagatgagaccaaccaa

SEQ ID NO: 263252 - DNA, 25 bp, Artificial
  probe
  misc_feature (1)..(25): SEQ ID NO: 418; WAN0249Z7; Start 5; Stop 29
ctataaaagatgagaccaaccaacc

SEQ ID NO: 263253 - DNA, 25 bp, Artificial
  probe
  misc_feature (1)..(25): SEQ ID NO: 418; WAN0249Z7; Start 4; Stop 28
cctataaaagatgagaccaaccaac

SEQ ID NO: 263254 - DNA, 25 bp, Artificial
  probe
  misc_feature (1)..(25): SEQ ID NO: 418; WAN0249Z7; Start 7; Stop 31
ataaaagatgagaccaaccaacctc

SEQ ID NO: 263255 - DNA, 25 bp, Artificial
  probe
  misc_feature (1)..(25): SEQ ID NO: 418; WAN0249Z7; Start 64; Stop 88
gaaactttatggcatactagactta

SEQ ID NO: 263256 - DNA, 25 bp, Artificial
  probe
  misc_feature (1)..(25): SEQ ID NO: 418; WAN0249Z7; Start 61; Stop 85
ttagaaactttatggcatactagac

SEQ ID NO: 263257 - DNA, 25 bp, Artificial
  probe
  misc_feature (1)..(25): SEQ ID NO: 418; WAN0249Z7; Start 53; Stop 77
aagcaattttagaaactttatggca

SEQ ID NO: 263258 - DNA, 25 bp, Artificial
  probe
  misc_feature (1)..(25): SEQ ID NO: 418; WAN0249Z7; Start 54; Stop 78
agcaattttagaaactttatggcat

SEQ ID NO: 263259 - DNA, 25 bp, Artificial
  probe
  misc_feature (1)..(25): SEQ ID NO: 418; WAN0249Z7; Start 68; Stop 92
ctttatggcatactagacttatcaa

SEQ ID NO: 263260 - DNA, 25 bp, Artificial
  probe
  misc_feature (1)..(25): SEQ ID NO: 418; WAN0249Z7; Start 66; Stop 90
aactttatggcatactagacttatc

SEQ ID NO: 263261 - DNA, 25 bp, Artificial
  probe
  misc_feature (1)..(25): SEQ ID NO: 419; WAN0249PM; Start 58; Stop 82
atcctctagtcacttgatttgtttc

SEQ ID NO: 263262 - DNA, 25 bp, Artificial
  probe
  misc_feature (1)..(25): SEQ ID NO: 419; WAN0249PM; Start 62; Stop 86
tctagtcacttgatttgtttcaggt

SEQ ID NO: 263263 - DNA, 25 bp, Artificial
  probe
  misc_feature (1)..(25): SEQ ID NO: 419; WAN0249PM; Start 59; Stop 83
tcctctagtcacttgatttgtttca

SEQ ID NO: 263264 - DNA, 25 bp, Artificial
  probe
  misc_feature (1)..(25): SEQ ID NO: 419; WAN0249PM; Start 61; Stop 85
ctctagtcacttgatttgtttcagg

SEQ ID NO: 263265 - DNA, 25 bp, Artificial
  probe
  misc_feature (1)..(25): SEQ ID NO: 419; WAN0249PM; Start 60; Stop 84
cctctagtcacttgatttgtttcag

SEQ ID NO: 263266 - DNA, 25 bp, Artificial
  probe
  misc_feature (1)..(25): SEQ ID NO: 419; WAN0249PM; Start 63; Stop 87
ctagtcacttgatttgtttcaggtg

SEQ ID NO: 263267 - DNA, 25 bp, Artificial
  probe
  misc_feature (1)..(25): SEQ ID NO: 419; WAN0249PM; Start 64; Stop 88
tagtcacttgatttgtttcaggtgg

SEQ ID NO: 263268 - DNA, 25 bp, Artificial
  probe
  misc_feature (1)..(25): SEQ ID NO: 419; WAN0249PM; Start 67; Stop 91
tcacttgatttgtttcaggtggttt

SEQ ID NO: 263269 - DNA, 25 bp, Artificial
  probe
  misc_feature (1)..(25): SEQ ID NO: 419; WAN0249PM; Start 57; Stop 81
tatcctctagtcacttgatttgttt

SEQ ID NO: 263270 - DNA, 25 bp, Artificial
  probe
  misc_feature (1)..(25): SEQ ID NO: 419; WAN0249PM; Start 56; Stop 80
ttatcctctagtcacttgatttgtt

SEQ ID NO: 263271 - DNA, 25 bp, Artificial
  probe
  misc_feature (1)..(25): SEQ ID NO: 419; WAN0249PM; Start 55; Stop 79
tttatcctctagtcacttgatttgt

SEQ ID NO: 263272 - DNA, 25 bp, Artificial
  probe
  misc_feature (1)..(25): SEQ ID NO: 419; WAN0249PM; Start 66; Stop 90
gtcacttgatttgtttcaggtggtt

SEQ ID NO: 263273 - DNA, 25 bp, Artificial
  probe
  misc_feature (1)..(25): SEQ ID NO: 419; WAN0249PM; Start 65; Stop 89
agtcacttgatttgtttcaggtggt

SEQ ID NO: 263274 - DNA, 25 bp, Artificial
  probe
  misc_feature (1)..(25): SEQ ID NO: 419; WAN0249PM; Start 68; Stop 92
cacttgatttgtttcaggtggtttt

SEQ ID NO: 263275 - DNA, 25 bp, Artificial
  probe
  misc_feature (1)..(25): SEQ ID NO: 419; WAN0249PM; Start 54; Stop 78
ttttatcctctagtcacttgatttg

SEQ ID NO: 263276 - DNA, 25 bp, Artificial
  probe
  misc_feature (1)..(25): SEQ ID NO: 420; WAN024FKJ-3; Start 73; Stop 97
cagcagttaaggaagttctctacac

SEQ ID NO: 263277 - DNA, 25 bp, Artificial
  probe
  misc_feature (1)..(25): SEQ ID NO: 420; WAN024FKJ-3; Start 78; Stop 102
gttaaggaagttctctacactggtc

SEQ ID NO: 263278 - DNA, 25 bp, Artificial
  probe
  misc_feature (1)..(25): SEQ ID NO: 420; WAN024FKJ-3; Start 77; Stop 101
agttaaggaagttctctacactggt

SEQ ID NO: 263279 - DNA, 25 bp, Artificial
  probe
  misc_feature (1)..(25): SEQ ID NO: 420; WAN024FKJ-3; Start 74; Stop 98
agcagttaaggaagttctctacact

SEQ ID NO: 263280 - DNA, 25 bp, Artificial
  probe
  misc_feature (1)..(25): SEQ ID NO: 420; WAN024FKJ-3; Start 72; Stop 96
ccagcagttaaggaagttctctaca

SEQ ID NO: 263281 - DNA, 25 bp, Artificial
  probe
  misc_feature (1)..(25): SEQ ID NO: 420; WAN024FKJ-3; Start 79; Stop 103
ttaaggaagttctctacactggtcg

SEQ ID NO: 263282 - DNA, 25 bp, Artificial
  probe
  misc_feature (1)..(25): SEQ ID NO: 420; WAN024FKJ-3; Start 209; Stop 233
tcttattacttatccaacgactcaa

SEQ ID NO: 263283 - DNA, 25 bp, Artificial
  probe
  misc_feature (1)..(25): SEQ ID NO: 420; WAN024FKJ-3; Start 208; Stop 232
gtcttattacttatccaacgactca

SEQ ID NO: 263284 - DNA, 25 bp, Artificial
  probe
  misc_feature (1)..(25): SEQ ID NO: 420; WAN024FKJ-3; Start 214; Stop 238
ttacttatccaacgactcaaactca

SEQ ID NO: 263285 - DNA, 25 bp, Artificial
  probe
  misc_feature (1)..(25): SEQ ID NO: 420; WAN024FKJ-3; Start 66; Stop 90
gattctccagcagttaaggaagttc

SEQ ID NO: 263286 - DNA, 25 bp, Artificial
  probe
  misc_feature (1)..(25): SEQ ID NO: 420; WAN024FKJ-3; Start 215; Stop 239
tacttatccaacgactcaaactcat

SEQ ID NO: 263287 - DNA, 25 bp, Artificial
  probe
  misc_feature (1)..(25): SEQ ID NO: 420; WAN024FKJ-3; Start 70; Stop 94
ctccagcagttaaggaagttctcta

SEQ ID NO: 263288 - DNA, 25 bp, Artificial
  probe
  misc_feature (1)..(25): SEQ ID NO: 420; WAN024FKJ-3; Start 67; Stop 91
attctccagcagttaaggaagttct

SEQ ID NO: 263289 - DNA, 25 bp, Artificial
  probe
  misc_feature (1)..(25): SEQ ID NO: 420; WAN024FKJ-3; Start 71; Stop 95
tccagcagttaaggaagttctctac

SEQ ID NO: 263290 - DNA, 25 bp, Artificial
  probe
  misc_feature (1)..(25): SEQ ID NO: 420; WAN024FKJ-3; Start 213; Stop 237
attacttatccaacgactcaaactc

SEQ ID NO: 263291 - DNA, 25 bp, Artificial
  probe
  misc_feature (1)..(25): SEQ ID NO: 420; WAN024FKJ-3; Start 80; Stop 104
taaggaagttctctacactggtcgt

SEQ ID NO: 263292 - DNA, 25 bp, Artificial
  probe
  misc_feature (1)..(25): SEQ ID NO: 420; WAN024FKJ-3; Start 297; Stop 321
ttgtctattgggattgaggatgcta

SEQ ID NO: 263293 - DNA, 25 bp, Artificial
  probe
  misc_feature (1)..(25): SEQ ID NO: 420; WAN024FKJ-3; Start 307; Stop 331
ggattgaggatgctagagatttgat

SEQ ID NO: 263294 - DNA, 25 bp, Artificial
  probe
  misc_feature (1)..(25): SEQ ID NO: 420; WAN024FKJ-3; Start 302; Stop 326
tattgggattgaggatgctagagat

SEQ ID NO: 263295 - DNA, 25 bp, Artificial
  probe
  misc_feature (1)..(25): SEQ ID NO: 420; WAN024FKJ-3; Start 309; Stop 333
attgaggatgctagagatttgattg

SEQ ID NO: 263296 - DNA, 25 bp, Artificial
  probe
  misc_feature (1)..(25): SEQ ID NO: 420; WAN024FKJ-3; Start 294; Stop 318
cgtttgtctattgggattgaggatg

SEQ ID NO: 263297 - DNA, 25 bp, Artificial
  probe
  misc_feature (1)..(25): SEQ ID NO: 420; WAN024FKJ-3; Start 68; Stop 92
ttctccagcagttaaggaagttctc

SEQ ID NO: 263298 - DNA, 25 bp, Artificial
  probe
  misc_feature (1)..(25): SEQ ID NO: 420; WAN024FKJ-3; Start 63; Stop 87
aaggattctccagcagttaaggaag

SEQ ID NO: 263299 - DNA, 25 bp, Artificial
  probe
  misc_feature (1)..(25): SEQ ID NO: 420; WAN024FKJ-3; Start 62; Stop 86
gaaggattctccagcagttaaggaa

SEQ ID NO: 263300 - DNA, 25 bp, Artificial
  probe
  misc_feature (1)..(25): SEQ ID NO: 420; WAN024FKJ-3; Start 310; Stop 334
ttgaggatgctagagatttgattgc

SEQ ID NO: 263301 - DNA, 25 bp, Artificial
  probe
  misc_feature (1)..(25): SEQ ID NO: 420; WAN024FKJ-3; Start 301; Stop 325
ctattgggattgaggatgctagaga

SEQ ID NO: 263302 - DNA, 25 bp, Artificial
  probe
  misc_feature (1)..(25): SEQ ID NO: 420; WAN024FKJ-3; Start 308; Stop 332
gattgaggatgctagagatttgatt

SEQ ID NO: 263303 - DNA, 25 bp, Artificial
  probe
  misc_feature (1)..(25): SEQ ID NO: 420; WAN024FKJ-3; Start 303; Stop 327
attgggattgaggatgctagagatt

SEQ ID NO: 263304 - DNA, 25 bp, Artificial
  probe
  misc_feature (1)..(25): SEQ ID NO: 420; WAN024FKJ-3; Start 296; Stop 320
tttgtctattgggattgaggatgct

SEQ ID NO: 263305 - DNA, 25 bp, Artificial
  probe
  misc_feature (1)..(25): SEQ ID NO: 420; WAN024FKJ-3; Start 295; Stop 319
gtttgtctattgggattgaggatgc

SEQ ID NO: 263306 - DNA, 25 bp, Artificial
  probe
  misc_feature (1)..(25): SEQ ID NO: 420; WAN024FKJ-3; Start 304; Stop 328
ttgggattgaggatgctagagattt

SEQ ID NO: 263307 - DNA, 25 bp, Artificial
  probe
  misc_feature (1)..(25): SEQ ID NO: 420; WAN024FKJ-3; Start 298; Stop 322
tgtctattgggattgaggatgctag

SEQ ID NO: 263308 - DNA, 25 bp, Artificial
  probe
  misc_feature (1)..(25): SEQ ID NO: 420; WAN024FKJ-3; Start 65; Stop 89
ggattctccagcagttaaggaagtt

SEQ ID NO: 263309 - DNA, 25 bp, Artificial
  probe
  misc_feature (1)..(25): SEQ ID NO: 421; WAN0249ME; Start 25; Stop 49
tagagcaggactaagatactaactt

SEQ ID NO: 263310 - DNA, 25 bp, Artificial
  probe
  misc_feature (1)..(25): SEQ ID NO: 421; WAN0249ME; Start 24; Stop 48
atagagcaggactaagatactaact

SEQ ID NO: 263311 - DNA, 25 bp, Artificial
  probe
  misc_feature (1)..(25): SEQ ID NO: 421; WAN0249ME; Start 23; Stop 47
gatagagcaggactaagatactaac

SEQ ID NO: 263312 - DNA, 25 bp, Artificial
  probe
  misc_feature (1)..(25): SEQ ID NO: 421; WAN0249ME; Start 22; Stop 46
agatagagcaggactaagatactaa

SEQ ID NO: 263313 - DNA, 25 bp, Artificial
  probe
  misc_feature (1)..(25): SEQ ID NO: 421; WAN0249ME; Start 21; Stop 45
aagatagagcaggactaagatacta

SEQ ID NO: 263314 - DNA, 25 bp, Artificial
  probe
  misc_feature (1)..(25): SEQ ID NO: 421; WAN0249ME; Start 20; Stop 44
taagatagagcaggactaagatact

SEQ ID NO: 263315 - DNA, 25 bp, Artificial
  probe
  misc_feature (1)..(25): SEQ ID NO: 421; WAN0249ME; Start 19; Stop 43
ctaagatagagcaggactaagatac

SEQ ID NO: 263316 - DNA, 25 bp, Artificial
  probe
  misc_feature (1)..(25): SEQ ID NO: 421; WAN0249ME; Start 95; Stop 119
atggatgaaagaaagaaggaactga

SEQ ID NO: 263317 - DNA, 25 bp, Artificial
  probe
  misc_feature (1)..(25): SEQ ID NO: 421; WAN0249ME; Start 96; Stop 120
tggatgaaagaaagaaggaactgaa

SEQ ID NO: 263318 - DNA, 25 bp, Artificial
  probe
  misc_feature (1)..(25): SEQ ID NO: 421; WAN0249ME; Start 59; Stop 83
ccttcccactatccttctcctataa

SEQ ID NO: 263319 - DNA, 25 bp, Artificial
  probe
  misc_feature (1)..(25): SEQ ID NO: 421; WAN0249ME; Start 94; Stop 118
aatggatgaaagaaagaaggaactg

SEQ ID NO: 263320 - DNA, 25 bp, Artificial
  probe
  misc_feature (1)..(25): SEQ ID NO: 421; WAN0249ME; Start 26; Stop 50
agagcaggactaagatactaactta

SEQ ID NO: 263321 - DNA, 25 bp, Artificial
  probe
  misc_feature (1)..(25): SEQ ID NO: 421; WAN0249ME; Start 47; Stop 71
cttagaaatccaccttcccactatc

SEQ ID NO: 263322 - DNA, 25 bp, Artificial
  probe
  misc_feature (1)..(25): SEQ ID NO: 421; WAN0249ME; Start 93; Stop 117
aaatggatgaaagaaagaaggaact

SEQ ID NO: 263323 - DNA, 25 bp, Artificial
  probe
  misc_feature (1)..(25): SEQ ID NO: 421; WAN0249ME; Start 60; Stop 84
cttcccactatccttctcctataaa

SEQ ID NO: 263324 - DNA, 25 bp, Artificial
  probe
  misc_feature (1)..(25): SEQ ID NO: 421; WAN0249ME; Start 58; Stop 82
accttcccactatccttctcctata

SEQ ID NO: 263325 - DNA, 25 bp, Artificial
  probe
  misc_feature (1)..(25): SEQ ID NO: 421; WAN0249ME; Start 46; Stop 70
acttagaaatccaccttcccactat

SEQ ID NO: 263326 - DNA, 25 bp, Artificial
  probe
  misc_feature (1)..(25): SEQ ID NO: 421; WAN0249ME; Start 41; Stop 65
tactaacttagaaatccaccttccc

SEQ ID NO: 263327 - DNA, 25 bp, Artificial
  probe
  misc_feature (1)..(25): SEQ ID NO: 421; WAN0249ME; Start 45; Stop 69
aacttagaaatccaccttcccacta

SEQ ID NO: 263328 - DNA, 25 bp, Artificial
  probe
  misc_feature (1)..(25): SEQ ID NO: 421; WAN0249ME; Start 44; Stop 68
taacttagaaatccaccttcccact

SEQ ID NO: 263329 - DNA, 25 bp, Artificial
  probe
  misc_feature (1)..(25): SEQ ID NO: 421; WAN0249ME; Start 17; Stop 41
ttctaagatagagcaggactaagat

SEQ ID NO: 263330 - DNA, 25 bp, Artificial
  probe
  misc_feature (1)..(25): SEQ ID NO: 421; WAN0249ME; Start 43; Stop 67
ctaacttagaaatccaccttcccac

SEQ ID NO: 263331 - DNA, 25 bp, Artificial
  probe
  misc_feature (1)..(25): SEQ ID NO: 421; WAN0249ME; Start 42; Stop 66
actaacttagaaatccaccttccca

SEQ ID NO: 263332 - DNA, 25 bp, Artificial
  probe
  misc_feature (1)..(25): SEQ ID NO: 421; WAN0249ME; Start 48; Stop 72
ttagaaatccaccttcccactatcc

SEQ ID NO: 263333 - DNA, 25 bp, Artificial
  probe
  misc_feature (1)..(25): SEQ ID NO: 421; WAN0249ME; Start 49; Stop 73
tagaaatccaccttcccactatcct

SEQ ID NO: 263334 - DNA, 25 bp, Artificial
  probe
  misc_feature (1)..(25): SEQ ID NO: 421; WAN0249ME; Start 18; Stop 42
tctaagatagagcaggactaagata

SEQ ID NO: 263335 - DNA, 25 bp, Artificial
  probe
  misc_feature (1)..(25): SEQ ID NO: 421; WAN0249ME; Start 57; Stop 81
caccttcccactatccttctcctat

SEQ ID NO: 263336 - DNA, 25 bp, Artificial
  probe
  misc_feature (1)..(25): SEQ ID NO: 421; WAN0249ME; Start 40; Stop 64
atactaacttagaaatccaccttcc

SEQ ID NO: 263337 - DNA, 25 bp, Artificial
  probe
  misc_feature (1)..(25): SEQ ID NO: 421; WAN0249ME; Start 51; Stop 75
gaaatccaccttcccactatccttc

SEQ ID NO: 263338 - DNA, 25 bp, Artificial
  probe
  misc_feature (1)..(25): SEQ ID NO: 421; WAN0249ME; Start 52; Stop 76
aaatccaccttcccactatccttct

SEQ ID NO: 263339 - DNA, 25 bp, Artificial
  probe
  misc_feature (1)..(25): SEQ ID NO: 421; WAN0249ME; Start 16; Stop 40
tttctaagatagagcaggactaaga

SEQ ID NO: 263340 - DNA, 25 bp, Artificial
  probe
  misc_feature (1)..(25): SEQ ID NO: 421; WAN0249ME; Start 50; Stop 74
agaaatccaccttcccactatcctt

SEQ ID NO: 263341 - DNA, 25 bp, Artificial
  probe
  misc_feature (1)..(25): SEQ ID NO: 421; WAN0249ME; Start 53; Stop 77
aatccaccttcccactatccttctc

SEQ ID NO: 263342 - DNA, 25 bp, Artificial
  probe
  misc_feature (1)..(25): SEQ ID NO: 422; WAN0249X3; Start 53; Stop 77
cgcataggaagtctaaactgatact

SEQ ID NO: 263343 - DNA, 25 bp, Artificial
  probe
  misc_feature (1)..(25): SEQ ID NO: 422; WAN0249X3; Start 52; Stop 76
acgcataggaagtctaaactgatac

SEQ ID NO: 263344 - DNA, 25 bp, Artificial
  probe
  misc_feature (1)..(25): SEQ ID NO: 422; WAN0249X3; Start 50; Stop 74
aaacgcataggaagtctaaactgat

SEQ ID NO: 263345 - DNA, 25 bp, Artificial
  probe
  misc_feature (1)..(25): SEQ ID NO: 422; WAN0249X3; Start 51; Stop 75
aacgcataggaagtctaaactgata

SEQ ID NO: 263346 - DNA, 25 bp, Artificial
  probe
  misc_feature (1)..(25): SEQ ID NO: 422; WAN0249X3; Start 46; Stop 70
ctggaaacgcataggaagtctaaac

SEQ ID NO: 263347 - DNA, 25 bp, Artificial
  probe
  misc_feature (1)..(25): SEQ ID NO: 422; WAN0249X3; Start 49; Stop 73
gaaacgcataggaagtctaaactga

SEQ ID NO: 263348 - DNA, 25 bp, Artificial
  probe
  misc_feature (1)..(25): SEQ ID NO: 422; WAN0249X3; Start 5; Stop 29
acaagtcacttagtccctttctact

SEQ ID NO: 263349 - DNA, 25 bp, Artificial
  probe
  misc_feature (1)..(25): SEQ ID NO: 422; WAN0249X3; Start 48; Stop 72
ggaaacgcataggaagtctaaactg

SEQ ID NO: 263350 - DNA, 25 bp, Artificial
  probe
  misc_feature (1)..(25): SEQ ID NO: 422; WAN0249X3; Start 47; Stop 71
tggaaacgcataggaagtctaaact

SEQ ID NO: 263351 - DNA, 25 bp, Artificial
  probe
  misc_feature (1)..(25): SEQ ID NO: 422; WAN0249X3; Start 4; Stop 28
gacaagtcacttagtccctttctac

SEQ ID NO: 263352 - DNA, 25 bp, Artificial
  probe
  misc_feature (1)..(25): SEQ ID NO: 422; WAN0249X3; Start 3; Stop 27
agacaagtcacttagtccctttcta

SEQ ID NO: 263353 - DNA, 25 bp, Artificial
  probe
  misc_feature (1)..(25): SEQ ID NO: 422; WAN0249X3; Start 58; Stop 82
aggaagtctaaactgatactactct

SEQ ID NO: 263354 - DNA, 25 bp, Artificial
  probe
  misc_feature (1)..(25): SEQ ID NO: 422; WAN0249X3; Start 8; Stop 32
agtcacttagtccctttctactaga

SEQ ID NO: 263355 - DNA, 25 bp, Artificial
  probe
  misc_feature (1)..(25): SEQ ID NO: 422; WAN0249X3; Start 10; Stop 34
tcacttagtccctttctactagaga

SEQ ID NO: 263356 - DNA, 25 bp, Artificial
  probe
  misc_feature (1)..(25): SEQ ID NO: 422; WAN0249X3; Start 9; Stop 33
gtcacttagtccctttctactagag

SEQ ID NO: 263357 - DNA, 25 bp, Artificial
  probe
  misc_feature (1)..(25): SEQ ID NO: 422; WAN0249X3; Start 12; Stop 36
acttagtccctttctactagagagt

SEQ ID NO: 263358 - DNA, 25 bp, Artificial
  probe
  misc_feature (1)..(25): SEQ ID NO: 422; WAN0249X3; Start 14; Stop 38
ttagtccctttctactagagagtgc

SEQ ID NO: 263359 - DNA, 25 bp, Artificial
  probe
  misc_feature (1)..(25): SEQ ID NO: 422; WAN0249X3; Start 13; Stop 37
cttagtccctttctactagagagtg

SEQ ID NO: 263360 - DNA, 25 bp, Artificial
  probe
  misc_feature (1)..(25): SEQ ID NO: 422; WAN0249X3; Start 11; Stop 35
cacttagtccctttctactagagag

SEQ ID NO: 263361 - DNA, 25 bp, Artificial
  probe
  misc_feature (1)..(25): SEQ ID NO: 422; WAN0249X3; Start 6; Stop 30
caagtcacttagtccctttctacta

SEQ ID NO: 263362 - DNA, 25 bp, Artificial
  probe
  misc_feature (1)..(25): SEQ ID NO: 422; WAN0249X3; Start 2; Stop 26
gagacaagtcacttagtccctttct

SEQ ID NO: 263363 - DNA, 25 bp, Artificial
  probe
  misc_feature (1)..(25): SEQ ID NO: 422; WAN0249X3; Start 1; Stop 25
agagacaagtcacttagtccctttc

SEQ ID NO: 263364 - DNA, 25 bp, Artificial
  probe
  misc_feature (1)..(25): SEQ ID NO: 422; WAN0249X3; Start 7; Stop 31
aagtcacttagtccctttctactag

SEQ ID NO: 263365 - DNA, 25 bp, Artificial
  probe
  misc_feature (1)..(25): SEQ ID NO: 422; WAN0249X3; Start 54; Stop 78
gcataggaagtctaaactgatacta

SEQ ID NO: 263366 - DNA, 25 bp, Artificial
  probe
  misc_feature (1)..(25): SEQ ID NO: 422; WAN0249X3; Start 59; Stop 83
ggaagtctaaactgatactactctt

SEQ ID NO: 263367 - DNA, 25 bp, Artificial
  probe
  misc_feature (1)..(25): SEQ ID NO: 422; WAN0249X3; Start 45; Stop 69
gctggaaacgcataggaagtctaaa

SEQ ID NO: 263368 - DNA, 25 bp, Artificial
  probe
  misc_feature (1)..(25): SEQ ID NO: 422; WAN0249X3; Start 62; Stop 86
agtctaaactgatactactcttgag

SEQ ID NO: 263369 - DNA, 25 bp, Artificial
  probe
  misc_feature (1)..(25): SEQ ID NO: 422; WAN0249X3; Start 21; Stop 45
ctttctactagagagtgcgtggttg

SEQ ID NO: 263370 - DNA, 25 bp, Artificial
  probe
  misc_feature (1)..(25): SEQ ID NO: 422; WAN0249X3; Start 63; Stop 87
gtctaaactgatactactcttgagt

SEQ ID NO: 263371 - DNA, 25 bp, Artificial
  probe
  misc_feature (1)..(25): SEQ ID NO: 422; WAN0249X3; Start 61; Stop 85
aagtctaaactgatactactcttga

SEQ ID NO: 263372 - DNA, 25 bp, Artificial
  probe
  misc_feature (1)..(25): SEQ ID NO: 422; WAN0249X3; Start 57; Stop 81
taggaagtctaaactgatactactc

SEQ ID NO: 263373 - DNA, 25 bp, Artificial
  probe
  misc_feature (1)..(25): SEQ ID NO: 422; WAN0249X3; Start 15; Stop 39
tagtccctttctactagagagtgcg

SEQ ID NO: 263374 - DNA, 25 bp, Artificial
  probe
  misc_feature (1)..(25): SEQ ID NO: 422; WAN0249X3; Start 60; Stop 84
gaagtctaaactgatactactcttg

SEQ ID NO: 263375 - DNA, 25 bp, Artificial
  probe
  misc_feature (1)..(25): SEQ ID NO: 423; WAN0249QD; Start 88; Stop 112
actggaatagtacacatctacttct

SEQ ID NO: 263376 - DNA, 25 bp, Artificial
  probe
  misc_feature (1)..(25): SEQ ID NO: 423; WAN0249QD; Start 87; Stop 111
aactggaatagtacacatctacttc

SEQ ID NO: 263377 - DNA, 25 bp, Artificial
  probe
  misc_feature (1)..(25): SEQ ID NO: 423; WAN0249QD; Start 210; Stop 234
atactcgtgaagaaatcatccactg

SEQ ID NO: 263378 - DNA, 25 bp, Artificial
  probe
  misc_feature (1)..(25): SEQ ID NO: 423; WAN0249QD; Start 209; Stop 233
catactcgtgaagaaatcatccact

SEQ ID NO: 263379 - DNA, 25 bp, Artificial
  probe
  misc_feature (1)..(25): SEQ ID NO: 423; WAN0249QD; Start 208; Stop 232
tcatactcgtgaagaaatcatccac

SEQ ID NO: 263380 - DNA, 25 bp, Artificial
  probe
  misc_feature (1)..(25): SEQ ID NO: 423; WAN0249QD; Start 84; Stop 108
tgaaactggaatagtacacatctac

SEQ ID NO: 263381 - DNA, 25 bp, Artificial
  probe
  misc_feature (1)..(25): SEQ ID NO: 423; WAN0249QD; Start 82; Stop 106
attgaaactggaatagtacacatct

SEQ ID NO: 263382 - DNA, 25 bp, Artificial
  probe
  misc_feature (1)..(25): SEQ ID NO: 423; WAN0249QD; Start 80; Stop 104
agattgaaactggaatagtacacat

SEQ ID NO: 263383 - DNA, 25 bp, Artificial
  probe
  misc_feature (1)..(25): SEQ ID NO: 423; WAN0249QD; Start 81; Stop 105
gattgaaactggaatagtacacatc

SEQ ID NO: 263384 - DNA, 25 bp, Artificial
  probe
  misc_feature (1)..(25): SEQ ID NO: 423; WAN0249QD; Start 89; Stop 113
ctggaatagtacacatctacttcta

SEQ ID NO: 263385 - DNA, 25 bp, Artificial
  probe
  misc_feature (1)..(25): SEQ ID NO: 423; WAN0249QD; Start 69; Stop 93
agtgctatagtagattgaaactgga

SEQ ID NO: 263386 - DNA, 25 bp, Artificial
  probe
  misc_feature (1)..(25): SEQ ID NO: 423; WAN0249QD; Start 211; Stop 235
tactcgtgaagaaatcatccactgg

SEQ ID NO: 263387 - DNA, 25 bp, Artificial
  probe
  misc_feature (1)..(25): SEQ ID NO: 423; WAN0249QD; Start 148; Stop 172
cgatttgttctgttcttatttcatt

SEQ ID NO: 263388 - DNA, 25 bp, Artificial
  probe
  misc_feature (1)..(25): SEQ ID NO: 423; WAN0249QD; Start 83; Stop 107
ttgaaactggaatagtacacatcta

SEQ ID NO: 263389 - DNA, 25 bp, Artificial
  probe
  misc_feature (1)..(25): SEQ ID NO: 423; WAN0249QD; Start 79; Stop 103
tagattgaaactggaatagtacaca

SEQ ID NO: 263390 - DNA, 25 bp, Artificial
  probe
  misc_feature (1)..(25): SEQ ID NO: 423; WAN0249QD; Start 70; Stop 94
gtgctatagtagattgaaactggaa

SEQ ID NO: 263391 - DNA, 25 bp, Artificial
  probe
  misc_feature (1)..(25): SEQ ID NO: 423; WAN0249QD; Start 78; Stop 102
gtagattgaaactggaatagtacac

SEQ ID NO: 263392 - DNA, 25 bp, Artificial
  probe
  misc_feature (1)..(25): SEQ ID NO: 423; WAN0249QD; Start 12; Stop 36
tattacttaccactatccctaaagg

SEQ ID NO: 263393 - DNA, 25 bp, Artificial
  probe
  misc_feature (1)..(25): SEQ ID NO: 423; WAN0249QD; Start 77; Stop 101
agtagattgaaactggaatagtaca

SEQ ID NO: 263394 - DNA, 25 bp, Artificial
  probe
  misc_feature (1)..(25): SEQ ID NO: 423; WAN0249QD; Start 90; Stop 114
tggaatagtacacatctacttctaa

SEQ ID NO: 263395 - DNA, 25 bp, Artificial
  probe
  misc_feature (1)..(25): SEQ ID NO: 423; WAN0249QD; Start 207; Stop 231
ttcatactcgtgaagaaatcatcca

SEQ ID NO: 263396 - DNA, 25 bp, Artificial
  probe
  misc_feature (1)..(25): SEQ ID NO: 423; WAN0249QD; Start 85; Stop 109
gaaactggaatagtacacatctact

SEQ ID NO: 263397 - DNA, 25 bp, Artificial
  probe
  misc_feature (1)..(25): SEQ ID NO: 423; WAN0249QD; Start 206; Stop 230
tttcatactcgtgaagaaatcatcc

SEQ ID NO: 263398 - DNA, 25 bp, Artificial
  probe
  misc_feature (1)..(25): SEQ ID NO: 423; WAN0249QD; Start 147; Stop 171
tcgatttgttctgttcttatttcat

SEQ ID NO: 263399 - DNA, 25 bp, Artificial
  probe
  misc_feature (1)..(25): SEQ ID NO: 423; WAN0249QD; Start 68; Stop 92
tagtgctatagtagattgaaactgg

SEQ ID NO: 263400 - DNA, 25 bp, Artificial
  probe
  misc_feature (1)..(25): SEQ ID NO: 423; WAN0249QD; Start 86; Stop 110
aaactggaatagtacacatctactt

SEQ ID NO: 263401 - DNA, 25 bp, Artificial
  probe
  misc_feature (1)..(25): SEQ ID NO: 423; WAN0249QD; Start 71; Stop 95
tgctatagtagattgaaactggaat

SEQ ID NO: 263402 - DNA, 25 bp, Artificial
  probe
  misc_feature (1)..(25): SEQ ID NO: 423; WAN0249QD; Start 141; Stop 165
tcctgatcgatttgttctgttctta

SEQ ID NO: 263403 - DNA, 25 bp, Artificial
  probe
  misc_feature (1)..(25): SEQ ID NO: 423; WAN0249QD; Start 11; Stop 35
gtattacttaccactatccctaaag

SEQ ID NO: 263404 - DNA, 25 bp, Artificial
  probe
  misc_feature (1)..(25): SEQ ID NO: 423; WAN0249QD; Start 142; Stop 166
cctgatcgatttgttctgttcttat

SEQ ID NO: 263405 - DNA, 25 bp, Artificial
  probe
  misc_feature (1)..(25): SEQ ID NO: 423; WAN0249QD; Start 132; Stop 156
atttgactgtcctgatcgatttgtt

SEQ ID NO: 263406 - DNA, 25 bp, Artificial
  probe
  misc_feature (1)..(25): SEQ ID NO: 423; WAN0249QD; Start 13; Stop 37
attacttaccactatccctaaaggg

SEQ ID NO: 263407 - DNA, 25 bp, Artificial
  probe
  misc_feature (1)..(25): SEQ ID NO: 423; WAN0249QD; Start 133; Stop 157
tttgactgtcctgatcgatttgttc

SEQ ID NO: 263408 - DNA, 25 bp, Artificial
  probe
  misc_feature (1)..(25): SEQ ID NO: 424; WAN0249SC; Start 67; Stop 91
ggtggctaacttcattatagaactt

SEQ ID NO: 263409 - DNA, 25 bp, Artificial
  probe
  misc_feature (1)..(25): SEQ ID NO: 424; WAN0249SC; Start 526; Stop 550
acagacatactcaacagaaaccaaa

SEQ ID NO: 263410 - DNA, 25 bp, Artificial
  probe
  misc_feature (1)..(25): SEQ ID NO: 424; WAN0249SC; Start 525; Stop 549
aacagacatactcaacagaaaccaa

SEQ ID NO: 263411 - DNA, 25 bp, Artificial
  probe
  misc_feature (1)..(25): SEQ ID NO: 424; WAN0249SC; Start 524; Stop 548
gaacagacatactcaacagaaacca

SEQ ID NO: 263412 - DNA, 25 bp, Artificial
  probe
  misc_feature (1)..(25): SEQ ID NO: 424; WAN0249SC; Start 113; Stop 137
aatgaaacaagaacagaacaaatcg

SEQ ID NO: 263413 - DNA, 25 bp, Artificial
  probe
  misc_feature (1)..(25): SEQ ID NO: 424; WAN0249SC; Start 66; Stop 90
gggtggctaacttcattatagaact

SEQ ID NO: 263414 - DNA, 25 bp, Artificial
  probe
  misc_feature (1)..(25): SEQ ID NO: 424; WAN0249SC; Start 64; Stop 88
ctgggtggctaacttcattatagaa

SEQ ID NO: 263415 - DNA, 25 bp, Artificial
  probe
  misc_feature (1)..(25): SEQ ID NO: 424; WAN0249SC; Start 65; Stop 89
tgggtggctaacttcattatagaac

SEQ ID NO: 263416 - DNA, 25 bp, Artificial
  probe
  misc_feature (1)..(25): SEQ ID NO: 424; WAN0249SC; Start 601; Stop 625
tgagtcaacctttagttccttagtt

SEQ ID NO: 263417 - DNA, 25 bp, Artificial
  probe
  misc_feature (1)..(25): SEQ ID NO: 424; WAN0249SC; Start 600; Stop 624
atgagtcaacctttagttccttagt

SEQ ID NO: 263418 - DNA, 25 bp, Artificial
  probe
  misc_feature (1)..(25): SEQ ID NO: 424; WAN0249SC; Start 523; Stop 547
ggaacagacatactcaacagaaacc

SEQ ID NO: 263419 - DNA, 25 bp, Artificial
  probe
  misc_feature (1)..(25): SEQ ID NO: 424; WAN0249SC; Start 522; Stop 546
gggaacagacatactcaacagaaac

SEQ ID NO: 263420 - DNA, 25 bp, Artificial
  probe
  misc_feature (1)..(25): SEQ ID NO: 424; WAN0249SC; Start 510; Stop 534
ttaggaaacatcgggaacagacata

SEQ ID NO: 263421 - DNA, 25 bp, Artificial
  probe
  misc_feature (1)..(25): SEQ ID NO: 424; WAN0249SC; Start 364; Stop 388
aagccacattattgatagggttaaa

SEQ ID NO: 263422 - DNA, 25 bp, Artificial
  probe
  misc_feature (1)..(25): SEQ ID NO: 424; WAN0249SC; Start 363; Stop 387
aaagccacattattgatagggttaa

SEQ ID NO: 263423 - DNA, 25 bp, Artificial
  probe
  misc_feature (1)..(25): SEQ ID NO: 424; WAN0249SC; Start 602; Stop 626
gagtcaacctttagttccttagttt

SEQ ID NO: 263424 - DNA, 25 bp, Artificial
  probe
  misc_feature (1)..(25): SEQ ID NO: 424; WAN0249SC; Start 499; Stop 523
ctactagagagttaggaaacatcgg

SEQ ID NO: 263425 - DNA, 25 bp, Artificial
  probe
  misc_feature (1)..(25): SEQ ID NO: 424; WAN0249SC; Start 498; Stop 522
gctactagagagttaggaaacatcg

SEQ ID NO: 263426 - DNA, 25 bp, Artificial
  probe
  misc_feature (1)..(25): SEQ ID NO: 424; WAN0249SC; Start 503; Stop 527
tagagagttaggaaacatcgggaac

SEQ ID NO: 263427 - DNA, 25 bp, Artificial
  probe
  misc_feature (1)..(25): SEQ ID NO: 424; WAN0249SC; Start 497; Stop 521
tgctactagagagttaggaaacatc

SEQ ID NO: 263428 - DNA, 25 bp, Artificial
  probe
  misc_feature (1)..(25): SEQ ID NO: 424; WAN0249SC; Start 500; Stop 524
tactagagagttaggaaacatcggg

SEQ ID NO: 263429 - DNA, 25 bp, Artificial
  probe
  misc_feature (1)..(25): SEQ ID NO: 424; WAN0249SC; Start 495; Stop 519
tttgctactagagagttaggaaaca

SEQ ID NO: 263430 - DNA, 25 bp, Artificial
  probe
  misc_feature (1)..(25): SEQ ID NO: 424; WAN0249SC; Start 502; Stop 526
ctagagagttaggaaacatcgggaa

SEQ ID NO: 263431 - DNA, 25 bp, Artificial
  probe
  misc_feature (1)..(25): SEQ ID NO: 424; WAN0249SC; Start 511; Stop 535
taggaaacatcgggaacagacatac

SEQ ID NO: 263432 - DNA, 25 bp, Artificial
  probe
  misc_feature (1)..(25): SEQ ID NO: 424; WAN0249SC; Start 63; Stop 87
gctgggtggctaacttcattataga

SEQ ID NO: 263433 - DNA, 25 bp, Artificial
  probe
  misc_feature (1)..(25): SEQ ID NO: 424; WAN0249SC; Start 496; Stop 520
ttgctactagagagttaggaaacat

SEQ ID NO: 263434 - DNA, 25 bp, Artificial
  probe
  misc_feature (1)..(25): SEQ ID NO: 424; WAN0249SC; Start 515; Stop 539
aaacatcgggaacagacatactcaa

SEQ ID NO: 263435 - DNA, 25 bp, Artificial
  probe
  misc_feature (1)..(25): SEQ ID NO: 424; WAN0249SC; Start 599; Stop 623
catgagtcaacctttagttccttag

SEQ ID NO: 263436 - DNA, 25 bp, Artificial
  probe
  misc_feature (1)..(25): SEQ ID NO: 424; WAN0249SC; Start 465; Stop 489
cttgtgaaacgatcaataaagtacg

SEQ ID NO: 263437 - DNA, 25 bp, Artificial
  probe
  misc_feature (1)..(25): SEQ ID NO: 424; WAN0249SC; Start 10; Stop 34
ttcttatgcctacaagagctatcag

SEQ ID NO: 263438 - DNA, 25 bp, Artificial
  probe
  misc_feature (1)..(25): SEQ ID NO: 424; WAN0249SC; Start 514; Stop 538
gaaacatcgggaacagacatactca

SEQ ID NO: 263439 - DNA, 25 bp, Artificial
  probe
  misc_feature (1)..(25): SEQ ID NO: 424; WAN0249SC; Start 114; Stop 138
atgaaacaagaacagaacaaatcga

SEQ ID NO: 263440 - DNA, 25 bp, Artificial
  probe
  misc_feature (1)..(25): SEQ ID NO: 424; WAN0249SC; Start 294; Stop 318
tctagcaaatataaacccgagtaaa

SEQ ID NO: 263441 - DNA, 25 bp, Artificial
  probe
  misc_feature (1)..(25): SEQ ID NO: 425; WAN024FEJ-M; Start 184; Stop 208
cattattggtcgtgaaggtcgtaac

SEQ ID NO: 263442 - DNA, 25 bp, Artificial
  probe
  misc_feature (1)..(25): SEQ ID NO: 425; WAN024FEJ-M; Start 391; Stop 415
agagattgacaataagattcgtgaa

SEQ ID NO: 263443 - DNA, 25 bp, Artificial
  probe
  misc_feature (1)..(25): SEQ ID NO: 425; WAN024FEJ-M; Start 390; Stop 414
aagagattgacaataagattcgtga

SEQ ID NO: 263444 - DNA, 25 bp, Artificial
  probe
  misc_feature (1)..(25): SEQ ID NO: 425; WAN024FEJ-M; Start 187; Stop 211
tattggtcgtgaaggtcgtaacatt

SEQ ID NO: 263445 - DNA, 25 bp, Artificial
  probe
  misc_feature (1)..(25): SEQ ID NO: 425; WAN024FEJ-M; Start 186; Stop 210
ttattggtcgtgaaggtcgtaacat

SEQ ID NO: 263446 - DNA, 25 bp, Artificial
  probe
  misc_feature (1)..(25): SEQ ID NO: 425; WAN024FEJ-M; Start 185; Stop 209
attattggtcgtgaaggtcgtaaca

SEQ ID NO: 263447 - DNA, 25 bp, Artificial
  probe
  misc_feature (1)..(25): SEQ ID NO: 425; WAN024FEJ-M; Start 389; Stop 413
caagagattgacaataagattcgtg

SEQ ID NO: 263448 - DNA, 25 bp, Artificial
  probe
  misc_feature (1)..(25): SEQ ID NO: 425; WAN024FEJ-M; Start 392; Stop 416
gagattgacaataagattcgtgaat

SEQ ID NO: 263449 - DNA, 25 bp, Artificial
  probe
  misc_feature (1)..(25): SEQ ID NO: 425; WAN024FEJ-M; Start 317; Stop 341
actatggaaatgttgctcaaagatg

SEQ ID NO: 263450 - DNA, 25 bp, Artificial
  probe
  misc_feature (1)..(25): SEQ ID NO: 425; WAN024FEJ-M; Start 318; Stop 342
ctatggaaatgttgctcaaagatgg

SEQ ID NO: 263451 - DNA, 25 bp, Artificial
  probe
  misc_feature (1)..(25): SEQ ID NO: 425; WAN024FEJ-M; Start 316; Stop 340
gactatggaaatgttgctcaaagat

SEQ ID NO: 263452 - DNA, 25 bp, Artificial
  probe
  misc_feature (1)..(25): SEQ ID NO: 425; WAN024FEJ-M; Start 325; Stop 349
aatgttgctcaaagatggtcgtata

SEQ ID NO: 263453 - DNA, 25 bp, Artificial
  probe
  misc_feature (1)..(25): SEQ ID NO: 425; WAN024FEJ-M; Start 168; Stop 192
atactatgaagggacgcattattgg

SEQ ID NO: 263454 - DNA, 25 bp, Artificial
  probe
  misc_feature (1)..(25): SEQ ID NO: 425; WAN024FEJ-M; Start 319; Stop 343
tatggaaatgttgctcaaagatggt

SEQ ID NO: 263455 - DNA, 25 bp, Artificial
  probe
  misc_feature (1)..(25): SEQ ID NO: 425; WAN024FEJ-M; Start 167; Stop 191
gatactatgaagggacgcattattg

SEQ ID NO: 263456 - DNA, 25 bp, Artificial
  probe
  misc_feature (1)..(25): SEQ ID NO: 425; WAN024FEJ-M; Start 166; Stop 190
cgatactatgaagggacgcattatt

SEQ ID NO: 263457 - DNA, 25 bp, Artificial
  probe
  misc_feature (1)..(25): SEQ ID NO: 425; WAN024FEJ-M; Start 151; Stop 175
agttcatctgccagacgatactatg

SEQ ID NO: 263458 - DNA, 25 bp, Artificial
  probe
  misc_feature (1)..(25): SEQ ID NO: 425; WAN024FEJ-M; Start 324; Stop 348
aaatgttgctcaaagatggtcgtat

SEQ ID NO: 263459 - DNA, 25 bp, Artificial
  probe
  misc_feature (1)..(25): SEQ ID NO: 425; WAN024FEJ-M; Start 314; Stop 338
atgactatggaaatgttgctcaaag

SEQ ID NO: 263460 - DNA, 25 bp, Artificial
  probe
  misc_feature (1)..(25): SEQ ID NO: 425; WAN024FEJ-M; Start 462; Stop 486
cagacttgatgaagattatgggacg

SEQ ID NO: 263461 - DNA, 25 bp, Artificial
  probe
  misc_feature (1)..(25): SEQ ID NO: 425; WAN024FEJ-M; Start 312; Stop 336
gtatgactatggaaatgttgctcaa

SEQ ID NO: 263462 - DNA, 25 bp, Artificial
  probe
  misc_feature (1)..(25): SEQ ID NO: 425; WAN024FEJ-M; Start 107; Stop 131
caacgtatcgctggtgaatatgtag

SEQ ID NO: 263463 - DNA, 25 bp, Artificial
  probe
  misc_feature (1)..(25): SEQ ID NO: 425; WAN024FEJ-M; Start 315; Stop 339
tgactatggaaatgttgctcaaaga

SEQ ID NO: 263464 - DNA, 25 bp, Artificial
  probe
  misc_feature (1)..(25): SEQ ID NO: 425; WAN024FEJ-M; Start 165; Stop 189
acgatactatgaagggacgcattat

SEQ ID NO: 263465 - DNA, 25 bp, Artificial
  probe
  misc_feature (1)..(25): SEQ ID NO: 425; WAN024FEJ-M; Start 209; Stop 233
attcgtacctttgaaagtttgacag

SEQ ID NO: 263466 - DNA, 25 bp, Artificial
  probe
  misc_feature (1)..(25): SEQ ID NO: 425; WAN024FEJ-M; Start 150; Stop 174
cagttcatctgccagacgatactat

SEQ ID NO: 263467 - DNA, 25 bp, Artificial
  probe
  misc_feature (1)..(25): SEQ ID NO: 425; WAN024FEJ-M; Start 310; Stop 334
ccgtatgactatggaaatgttgctc

SEQ ID NO: 263468 - DNA, 25 bp, Artificial
  probe
  misc_feature (1)..(25): SEQ ID NO: 425; WAN024FEJ-M; Start 304; Stop 328
gattgcccgtatgactatggaaatg

SEQ ID NO: 263469 - DNA, 25 bp, Artificial
  probe
  misc_feature (1)..(25): SEQ ID NO: 425; WAN024FEJ-M; Start 208; Stop 232
cattcgtacctttgaaagtttgaca

SEQ ID NO: 263470 - DNA, 25 bp, Artificial
  probe
  misc_feature (1)..(25): SEQ ID NO: 425; WAN024FEJ-M; Start 207; Stop 231
acattcgtacctttgaaagtttgac

SEQ ID NO: 263471 - DNA, 25 bp, Artificial
  probe
  misc_feature (1)..(25): SEQ ID NO: 425; WAN024FEJ-M; Start 201; Stop 225
gtcgtaacattcgtacctttgaaag

SEQ ID NO: 263472 - DNA, 25 bp, Artificial
  probe
  misc_feature (1)..(25): SEQ ID NO: 425; WAN024FEJ-M; Start 169; Stop 193
tactatgaagggacgcattattggt

SEQ ID NO: 263473 - DNA, 25 bp, Artificial
  probe
  misc_feature (1)..(25): SEQ ID NO: 425; WAN024FEJ-M; Start 203; Stop 227
cgtaacattcgtacctttgaaagtt

SEQ ID NO: 263474 - DNA, 25 bp, Artificial
  probe
  misc_feature (1)..(25): SEQ ID NO: 426; WAN024APW; Start 64; Stop 88
acattagagaatagctttccacttt

SEQ ID NO: 263475 - DNA, 25 bp, Artificial
  probe
  misc_feature (1)..(25): SEQ ID NO: 426; WAN024APW; Start 65; Stop 89
cattagagaatagctttccactttc

SEQ ID NO: 263476 - DNA, 25 bp, Artificial
  probe
  misc_feature (1)..(25): SEQ ID NO: 426; WAN024APW; Start 63; Stop 87
tacattagagaatagctttccactt

SEQ ID NO: 263477 - DNA, 25 bp, Artificial
  probe
  misc_feature (1)..(25): SEQ ID NO: 426; WAN024APW; Start 62; Stop 86
atacattagagaatagctttccact

SEQ ID NO: 263478 - DNA, 25 bp, Artificial
  probe
  misc_feature (1)..(25): SEQ ID NO: 426; WAN024APW; Start 25; Stop 49
atctctattatactacaaaagcccc

SEQ ID NO: 263479 - DNA, 25 bp, Artificial
  probe
  misc_feature (1)..(25): SEQ ID NO: 426; WAN024APW; Start 61; Stop 85
aatacattagagaatagctttccac

SEQ ID NO: 263480 - DNA, 25 bp, Artificial
  probe
  misc_feature (1)..(25): SEQ ID NO: 426; WAN024APW; Start 82; Stop 106
ccactttctattttacttttcctgt

SEQ ID NO: 263481 - DNA, 25 bp, Artificial
  probe
  misc_feature (1)..(25): SEQ ID NO: 426; WAN024APW; Start 6; Stop 30
cctcctactttcaaaacgtatctct

SEQ ID NO: 263482 - DNA, 25 bp, Artificial
  probe
  misc_feature (1)..(25): SEQ ID NO: 426; WAN024APW; Start 81; Stop 105
tccactttctattttacttttcctg

SEQ ID NO: 263483 - DNA, 25 bp, Artificial
  probe
  misc_feature (1)..(25): SEQ ID NO: 426; WAN024APW; Start 5; Stop 29
acctcctactttcaaaacgtatctc

SEQ ID NO: 263484 - DNA, 25 bp, Artificial
  probe
  misc_feature (1)..(25): SEQ ID NO: 426; WAN024APW; Start 66; Stop 90
attagagaatagctttccactttct

SEQ ID NO: 263485 - DNA, 25 bp, Artificial
  probe
  misc_feature (1)..(25): SEQ ID NO: 426; WAN024APW; Start 4; Stop 28
tacctcctactttcaaaacgtatct

SEQ ID NO: 263486 - DNA, 25 bp, Artificial
  probe
  misc_feature (1)..(25): SEQ ID NO: 426; WAN024APW; Start 1; Stop 25
agatacctcctactttcaaaacgta

SEQ ID NO: 263487 - DNA, 25 bp, Artificial
  probe
  misc_feature (1)..(25): SEQ ID NO: 426; WAN024APW; Start 100; Stop 124
ttcctgtttataggtctataatggt

SEQ ID NO: 263488 - DNA, 25 bp, Artificial
  probe
  misc_feature (1)..(25): SEQ ID NO: 426; WAN024APW; Start 67; Stop 91
ttagagaatagctttccactttcta

SEQ ID NO: 263489 - DNA, 25 bp, Artificial
  probe
  misc_feature (1)..(25): SEQ ID NO: 426; WAN024APW; Start 60; Stop 84
aaatacattagagaatagctttcca

SEQ ID NO: 263490 - DNA, 25 bp, Artificial
  probe
  misc_feature (1)..(25): SEQ ID NO: 426; WAN024APW; Start 68; Stop 92
tagagaatagctttccactttctat

SEQ ID NO: 263491 - DNA, 25 bp, Artificial
  probe
  misc_feature (1)..(25): SEQ ID NO: 426; WAN024APW; Start 7; Stop 31
ctcctactttcaaaacgtatctcta

SEQ ID NO: 263492 - DNA, 25 bp, Artificial
  probe
  misc_feature (1)..(25): SEQ ID NO: 426; WAN024APW; Start 80; Stop 104
ttccactttctattttacttttcct

SEQ ID NO: 263493 - DNA, 25 bp, Artificial
  probe
  misc_feature (1)..(25): SEQ ID NO: 426; WAN024APW; Start 77; Stop 101
gctttccactttctattttactttt

SEQ ID NO: 263494 - DNA, 25 bp, Artificial
  probe
  misc_feature (1)..(25): SEQ ID NO: 426; WAN024APW; Start 69; Stop 93
agagaatagctttccactttctatt

SEQ ID NO: 263495 - DNA, 25 bp, Artificial
  probe
  misc_feature (1)..(25): SEQ ID NO: 426; WAN024APW; Start 3; Stop 27
atacctcctactttcaaaacgtatc

SEQ ID NO: 263496 - DNA, 25 bp, Artificial
  probe
  misc_feature (1)..(25): SEQ ID NO: 426; WAN024APW; Start 2; Stop 26
gatacctcctactttcaaaacgtat

SEQ ID NO: 263497 - DNA, 25 bp, Artificial
  probe
  misc_feature (1)..(25): SEQ ID NO: 426; WAN024APW; Start 76; Stop 100
agctttccactttctattttacttt

SEQ ID NO: 263498 - DNA, 25 bp, Artificial
  probe
  misc_feature (1)..(25): SEQ ID NO: 426; WAN024APW; Start 8; Stop 32
tcctactttcaaaacgtatctctat

SEQ ID NO: 263499 - DNA, 25 bp, Artificial
  probe
  misc_feature (1)..(25): SEQ ID NO: 426; WAN024APW; Start 101; Stop 125
tcctgtttataggtctataatggta

SEQ ID NO: 263500 - DNA, 25 bp, Artificial
  probe
  misc_feature (1)..(25): SEQ ID NO: 426; WAN024APW; Start 70; Stop 94
gagaatagctttccactttctattt

SEQ ID NO: 263501 - DNA, 25 bp, Artificial
  probe
  misc_feature (1)..(25): SEQ ID NO: 426; WAN024APW; Start 83; Stop 107
cactttctattttacttttcctgtt

SEQ ID NO: 263502 - DNA, 25 bp, Artificial
  probe
  misc_feature (1)..(25): SEQ ID NO: 426; WAN024APW; Start 99; Stop 123
tttcctgtttataggtctataatgg

SEQ ID NO: 263503 - DNA, 25 bp, Artificial
  probe
  misc_feature (1)..(25): SEQ ID NO: 426; WAN024APW; Start 121; Stop 145
tggtaatagattttatttggaggtt

SEQ ID NO: 263504 - DNA, 25 bp, Artificial
  probe
  misc_feature (1)..(25): SEQ ID NO: 426; WAN024APW; Start 79; Stop 103
tttccactttctattttacttttcc

SEQ ID NO: 263505 - DNA, 25 bp, Artificial
  probe
  misc_feature (1)..(25): SEQ ID NO: 426; WAN024APW; Start 120; Stop 144
atggtaatagattttatttggaggt

SEQ ID NO: 263506 - DNA, 25 bp, Artificial
  probe
  misc_feature (1)..(25): SEQ ID NO: 426; WAN024APW; Start 9; Stop 33
cctactttcaaaacgtatctctatt

SEQ ID NO: 263507 - DNA, 25 bp, Artificial
  probe
  misc_feature (1)..(25): SEQ ID NO: 427; WAN024A9Q; Start 42; Stop 66
cttagtacgaattcaattactctcg

SEQ ID NO: 263508 - DNA, 25 bp, Artificial
  probe
  misc_feature (1)..(25): SEQ ID NO: 427; WAN024A9Q; Start 12; Stop 36
cgttaaaaggttacagtgaaaatag

SEQ ID NO: 263509 - DNA, 25 bp, Artificial
  probe
  misc_feature (1)..(25): SEQ ID NO: 427; WAN024A9Q; Start 41; Stop 65
tcttagtacgaattcaattactctc

SEQ ID NO: 263510 - DNA, 25 bp, Artificial
  probe
  misc_feature (1)..(25): SEQ ID NO: 427; WAN024A9Q; Start 19; Stop 43
aggttacagtgaaaatagaaaatct

SEQ ID NO: 263511 - DNA, 25 bp, Artificial
  probe
  misc_feature (1)..(25): SEQ ID NO: 427; WAN024A9Q; Start 18; Stop 42
aaggttacagtgaaaatagaaaatc

SEQ ID NO: 263512 - DNA, 25 bp, Artificial
  probe
  misc_feature (1)..(25): SEQ ID NO: 427; WAN024A9Q; Start 40; Stop 64
atcttagtacgaattcaattactct

SEQ ID NO: 263513 - DNA, 25 bp, Artificial
  probe
  misc_feature (1)..(25): SEQ ID NO: 427; WAN024A9Q; Start 20; Stop 44
ggttacagtgaaaatagaaaatctt

SEQ ID NO: 263514 - DNA, 25 bp, Artificial
  probe
  misc_feature (1)..(25): SEQ ID NO: 427; WAN024A9Q; Start 16; Stop 40
aaaaggttacagtgaaaatagaaaa

SEQ ID NO: 263515 - DNA, 25 bp, Artificial
  probe
  misc_feature (1)..(25): SEQ ID NO: 427; WAN024A9Q; Start 13; Stop 37
gttaaaaggttacagtgaaaataga

SEQ ID NO: 263516 - DNA, 25 bp, Artificial
  probe
  misc_feature (1)..(25): SEQ ID NO: 427; WAN024A9Q; Start 17; Stop 41
aaaggttacagtgaaaatagaaaat

SEQ ID NO: 263517 - DNA, 25 bp, Artificial
  probe
  misc_feature (1)..(25): SEQ ID NO: 427; WAN024A9Q; Start 39; Stop 63
aatcttagtacgaattcaattactc

SEQ ID NO: 263518 - DNA, 25 bp, Artificial
  probe
  misc_feature (1)..(25): SEQ ID NO: 427; WAN024A9Q; Start 27; Stop 51
gtgaaaatagaaaatcttagtacga

SEQ ID NO: 263519 - DNA, 25 bp, Artificial
  probe
  misc_feature (1)..(25): SEQ ID NO: 427; WAN024A9Q; Start 26; Stop 50
agtgaaaatagaaaatcttagtacg

SEQ ID NO: 263520 - DNA, 25 bp, Artificial
  probe
  misc_feature (1)..(25): SEQ ID NO: 427; WAN024A9Q; Start 35; Stop 59
agaaaatcttagtacgaattcaatt

SEQ ID NO: 263521 - DNA, 25 bp, Artificial
  probe
  misc_feature (1)..(25): SEQ ID NO: 428; WAN024AKM; Start 1; Stop 25
agatatactaaaagcgattggacca

SEQ ID NO: 263522 - DNA, 25 bp, Artificial
  probe
  misc_feature (1)..(25): SEQ ID NO: 428; WAN024AKM; Start 2; Stop 26
gatatactaaaagcgattggaccag

SEQ ID NO: 263523 - DNA, 25 bp, Artificial
  probe
  misc_feature (1)..(25): SEQ ID NO: 428; WAN024AKM; Start 3; Stop 27
atatactaaaagcgattggaccagc

SEQ ID NO: 263524 - DNA, 25 bp, Artificial
  probe
  misc_feature (1)..(25): SEQ ID NO: 428; WAN024AKM; Start 44; Stop 68
ttgcattggctattttaggaaactc

SEQ ID NO: 263525 - DNA, 25 bp, Artificial
  probe
  misc_feature (1)..(25): SEQ ID NO: 428; WAN024AKM; Start 43; Stop 67
tttgcattggctattttaggaaact

SEQ ID NO: 263526 - DNA, 25 bp, Artificial
  probe
  misc_feature (1)..(25): SEQ ID NO: 428; WAN024AKM; Start 41; Stop 65
agtttgcattggctattttaggaaa

SEQ ID NO: 263527 - DNA, 25 bp, Artificial
  probe
  misc_feature (1)..(25): SEQ ID NO: 428; WAN024AKM; Start 40; Stop 64
tagtttgcattggctattttaggaa

SEQ ID NO: 263528 - DNA, 25 bp, Artificial
  probe
  misc_feature (1)..(25): SEQ ID NO: 428; WAN024AKM; Start 39; Stop 63
ttagtttgcattggctattttagga

SEQ ID NO: 263529 - DNA, 25 bp, Artificial
  probe
  misc_feature (1)..(25): SEQ ID NO: 428; WAN024AKM; Start 38; Stop 62
tttagtttgcattggctattttagg

SEQ ID NO: 263530 - DNA, 25 bp, Artificial
  probe
  misc_feature (1)..(25): SEQ ID NO: 428; WAN024AKM; Start 42; Stop 66
gtttgcattggctattttaggaaac

SEQ ID NO: 263531 - DNA, 25 bp, Artificial
  probe
  misc_feature (1)..(25): SEQ ID NO: 428; WAN024AKM; Start 37; Stop 61
ttttagtttgcattggctattttag

SEQ ID NO: 263532 - DNA, 25 bp, Artificial
  probe
  misc_feature (1)..(25): SEQ ID NO: 429; WAN024AHF; Start 96; Stop 120
ttgtcagaccagaatcttataacct

SEQ ID NO: 263533 - DNA, 25 bp, Artificial
  probe
  misc_feature (1)..(25): SEQ ID NO: 429; WAN024AHF; Start 97; Stop 121
tgtcagaccagaatcttataaccta

SEQ ID NO: 263534 - DNA, 25 bp, Artificial
  probe
  misc_feature (1)..(25): SEQ ID NO: 429; WAN024AHF; Start 132; Stop 156
gaacaattcttccctccaactatca

SEQ ID NO: 263535 - DNA, 25 bp, Artificial
  probe
  misc_feature (1)..(25): SEQ ID NO: 429; WAN024AHF; Start 98; Stop 122
gtcagaccagaatcttataacctaa

SEQ ID NO: 263536 - DNA, 25 bp, Artificial
  probe
  misc_feature (1)..(25): SEQ ID NO: 429; WAN024AHF; Start 39; Stop 63
accataatttctagcagttagcacg

SEQ ID NO: 263537 - DNA, 25 bp, Artificial
  probe
  misc_feature (1)..(25): SEQ ID NO: 429; WAN024AHF; Start 38; Stop 62
taccataatttctagcagttagcac

SEQ ID NO: 263538 - DNA, 25 bp, Artificial
  probe
  misc_feature (1)..(25): SEQ ID NO: 429; WAN024AHF; Start 37; Stop 61
ctaccataatttctagcagttagca

SEQ ID NO: 263539 - DNA, 25 bp, Artificial
  probe
  misc_feature (1)..(25): SEQ ID NO: 429; WAN024AHF; Start 36; Stop 60
tctaccataatttctagcagttagc

SEQ ID NO: 263540 - DNA, 25 bp, Artificial
  probe
  misc_feature (1)..(25): SEQ ID NO: 429; WAN024AHF; Start 95; Stop 119
tttgtcagaccagaatcttataacc

SEQ ID NO: 263541 - DNA, 25 bp, Artificial
  probe
  misc_feature (1)..(25): SEQ ID NO: 429; WAN024AHF; Start 43; Stop 67
taatttctagcagttagcacgtttc

SEQ ID NO: 263542 - DNA, 25 bp, Artificial
  probe
  misc_feature (1)..(25): SEQ ID NO: 429; WAN024AHF; Start 41; Stop 65
cataatttctagcagttagcacgtt

SEQ ID NO: 263543 - DNA, 25 bp, Artificial
  probe
  misc_feature (1)..(25): SEQ ID NO: 429; WAN024AHF; Start 50; Stop 74
tagcagttagcacgtttctcataaa

SEQ ID NO: 263544 - DNA, 25 bp, Artificial
  probe
  misc_feature (1)..(25): SEQ ID NO: 429; WAN024AHF; Start 49; Stop 73
ctagcagttagcacgtttctcataa

SEQ ID NO: 263545 - DNA, 25 bp, Artificial
  probe
  misc_feature (1)..(25): SEQ ID NO: 429; WAN024AHF; Start 42; Stop 66
ataatttctagcagttagcacgttt

SEQ ID NO: 263546 - DNA, 25 bp, Artificial
  probe
  misc_feature (1)..(25): SEQ ID NO: 429; WAN024AHF; Start 44; Stop 68
aatttctagcagttagcacgtttct

SEQ ID NO: 263547 - DNA, 25 bp, Artificial
  probe
  misc_feature (1)..(25): SEQ ID NO: 429; WAN024AHF; Start 40; Stop 64
ccataatttctagcagttagcacgt

SEQ ID NO: 263548 - DNA, 25 bp, Artificial
  probe
  misc_feature (1)..(25): SEQ ID NO: 429; WAN024AHF; Start 45; Stop 69
atttctagcagttagcacgtttctc

SEQ ID NO: 263549 - DNA, 25 bp, Artificial
  probe
  misc_feature (1)..(25): SEQ ID NO: 429; WAN024AHF; Start 131; Stop 155
agaacaattcttccctccaactatc

SEQ ID NO: 263550 - DNA, 25 bp, Artificial
  probe
  misc_feature (1)..(25): SEQ ID NO: 429; WAN024AHF; Start 48; Stop 72
tctagcagttagcacgtttctcata

SEQ ID NO: 263551 - DNA, 25 bp, Artificial
  probe
  misc_feature (1)..(25): SEQ ID NO: 429; WAN024AHF; Start 47; Stop 71
ttctagcagttagcacgtttctcat

SEQ ID NO: 263552 - DNA, 25 bp, Artificial
  probe
  misc_feature (1)..(25): SEQ ID NO: 429; WAN024AHF; Start 46; Stop 70
tttctagcagttagcacgtttctca

SEQ ID NO: 263553 - DNA, 25 bp, Artificial
  probe
  misc_feature (1)..(25): SEQ ID NO: 429; WAN024AHF; Start 99; Stop 123
tcagaccagaatcttataacctaaa

SEQ ID NO: 263554 - DNA, 25 bp, Artificial
  probe
  misc_feature (1)..(25): SEQ ID NO: 429; WAN024AHF; Start 35; Stop 59
ttctaccataatttctagcagttag

SEQ ID NO: 263555 - DNA, 25 bp, Artificial
  probe
  misc_feature (1)..(25): SEQ ID NO: 429; WAN024AHF; Start 90; Stop 114
acgattttgtcagaccagaatctta

SEQ ID NO: 263556 - DNA, 25 bp, Artificial
  probe
  misc_feature (1)..(25): SEQ ID NO: 429; WAN024AHF; Start 91; Stop 115
cgattttgtcagaccagaatcttat

SEQ ID NO: 263557 - DNA, 25 bp, Artificial
  probe
  misc_feature (1)..(25): SEQ ID NO: 429; WAN024AHF; Start 89; Stop 113
gacgattttgtcagaccagaatctt

SEQ ID NO: 263558 - DNA, 25 bp, Artificial
  probe
  misc_feature (1)..(25): SEQ ID NO: 429; WAN024AHF; Start 51; Stop 75
agcagttagcacgtttctcataaaa

SEQ ID NO: 263559 - DNA, 25 bp, Artificial
  probe
  misc_feature (1)..(25): SEQ ID NO: 429; WAN024AHF; Start 34; Stop 58
attctaccataatttctagcagtta

SEQ ID NO: 263560 - DNA, 25 bp, Artificial
  probe
  misc_feature (1)..(25): SEQ ID NO: 429; WAN024AHF; Start 33; Stop 57
tattctaccataatttctagcagtt

SEQ ID NO: 263561 - DNA, 25 bp, Artificial
  probe
  misc_feature (1)..(25): SEQ ID NO: 429; WAN024AHF; Start 32; Stop 56
ttattctaccataatttctagcagt

SEQ ID NO: 263562 - DNA, 25 bp, Artificial
  probe
  misc_feature (1)..(25): SEQ ID NO: 429; WAN024AHF; Start 94; Stop 118
ttttgtcagaccagaatcttataac

SEQ ID NO: 263563 - DNA, 25 bp, Artificial
  probe
  misc_feature (1)..(25): SEQ ID NO: 429; WAN024AHF; Start 130; Stop 154
aagaacaattcttccctccaactat

SEQ ID NO: 263564 - DNA, 25 bp, Artificial
  probe
  misc_feature (1)..(25): SEQ ID NO: 429; WAN024AHF; Start 92; Stop 116
gattttgtcagaccagaatcttata

SEQ ID NO: 263565 - DNA, 25 bp, Artificial
  probe
  misc_feature (1)..(25): SEQ ID NO: 430; WAN024AL3; Start 40; Stop 64
aaactaattgttcttggatttcagc

SEQ ID NO: 263566 - DNA, 25 bp, Artificial
  probe
  misc_feature (1)..(25): SEQ ID NO: 430; WAN024AL3; Start 33; Stop 57
agtgatgaaactaattgttcttgga

SEQ ID NO: 263567 - DNA, 25 bp, Artificial
  probe
  misc_feature (1)..(25): SEQ ID NO: 430; WAN024AL3; Start 34; Stop 58
gtgatgaaactaattgttcttggat

SEQ ID NO: 263568 - DNA, 25 bp, Artificial
  probe
  misc_feature (1)..(25): SEQ ID NO: 430; WAN024AL3; Start 42; Stop 66
actaattgttcttggatttcagctt

SEQ ID NO: 263569 - DNA, 25 bp, Artificial
  probe
  misc_feature (1)..(25): SEQ ID NO: 430; WAN024AL3; Start 41; Stop 65
aactaattgttcttggatttcagct

SEQ ID NO: 263570 - DNA, 25 bp, Artificial
  probe
  misc_feature (1)..(25): SEQ ID NO: 430; WAN024AL3; Start 7; Stop 31
tcggactgaaatttacttgaacttt

SEQ ID NO: 263571 - DNA, 25 bp, Artificial
  probe
  misc_feature (1)..(25): SEQ ID NO: 430; WAN024AL3; Start 6; Stop 30
ttcggactgaaatttacttgaactt

SEQ ID NO: 263572 - DNA, 25 bp, Artificial
  probe
  misc_feature (1)..(25): SEQ ID NO: 430; WAN024AL3; Start 44; Stop 68
taattgttcttggatttcagctttc

SEQ ID NO: 263573 - DNA, 25 bp, Artificial
  probe
  misc_feature (1)..(25): SEQ ID NO: 430; WAN024AL3; Start 43; Stop 67
ctaattgttcttggatttcagcttt

SEQ ID NO: 263574 - DNA, 25 bp, Artificial
  probe
  misc_feature (1)..(25): SEQ ID NO: 430; WAN024AL3; Start 5; Stop 29
attcggactgaaatttacttgaact

SEQ ID NO: 263575 - DNA, 25 bp, Artificial
  probe
  misc_feature (1)..(25): SEQ ID NO: 430; WAN024AL3; Start 35; Stop 59
tgatgaaactaattgttcttggatt

SEQ ID NO: 263576 - DNA, 25 bp, Artificial
  probe
  misc_feature (1)..(25): SEQ ID NO: 430; WAN024AL3; Start 45; Stop 69
aattgttcttggatttcagctttcc

SEQ ID NO: 263577 - DNA, 25 bp, Artificial
  probe
  misc_feature (1)..(25): SEQ ID NO: 430; WAN024AL3; Start 46; Stop 70
attgttcttggatttcagctttcct

SEQ ID NO: 263578 - DNA, 25 bp, Artificial
  probe
  misc_feature (1)..(25): SEQ ID NO: 430; WAN024AL3; Start 4; Stop 28
tattcggactgaaatttacttgaac

SEQ ID NO: 263579 - DNA, 25 bp, Artificial
  probe
  misc_feature (1)..(25): SEQ ID NO: 430; WAN024AL3; Start 32; Stop 56
tagtgatgaaactaattgttcttgg

SEQ ID NO: 263580 - DNA, 25 bp, Artificial
  probe
  misc_feature (1)..(25): SEQ ID NO: 430; WAN024AL3; Start 47; Stop 71
ttgttcttggatttcagctttcctg

SEQ ID NO: 263581 - DNA, 25 bp, Artificial
  probe
  misc_feature (1)..(25): SEQ ID NO: 430; WAN024AL3; Start 36; Stop 60
gatgaaactaattgttcttggattt

SEQ ID NO: 263582 - DNA, 25 bp, Artificial
  probe
  misc_feature (1)..(25): SEQ ID NO: 430; WAN024AL3; Start 2; Stop 26
gatattcggactgaaatttacttga

SEQ ID NO: 263583 - DNA, 25 bp, Artificial
  probe
  misc_feature (1)..(25): SEQ ID NO: 430; WAN024AL3; Start 1; Stop 25
agatattcggactgaaatttacttg

SEQ ID NO: 263584 - DNA, 25 bp, Artificial
  probe
  misc_feature (1)..(25): SEQ ID NO: 430; WAN024AL3; Start 3; Stop 27
atattcggactgaaatttacttgaa

SEQ ID NO: 263585 - DNA, 25 bp, Artificial
  probe
  misc_feature (1)..(25): SEQ ID NO: 430; WAN024AL3; Start 39; Stop 63
gaaactaattgttcttggatttcag

SEQ ID NO: 263586 - DNA, 25 bp, Artificial
  probe
  misc_feature (1)..(25): SEQ ID NO: 430; WAN024AL3; Start 8; Stop 32
cggactgaaatttacttgaactttt

SEQ ID NO: 263587 - DNA, 25 bp, Artificial
  probe
  misc_feature (1)..(25): SEQ ID NO: 430; WAN024AL3; Start 54; Stop 78
tggatttcagctttcctgattatga

SEQ ID NO: 263588 - DNA, 25 bp, Artificial
  probe
  misc_feature (1)..(25): SEQ ID NO: 430; WAN024AL3; Start 51; Stop 75
tcttggatttcagctttcctgatta

SEQ ID NO: 263589 - DNA, 25 bp, Artificial
  probe
  misc_feature (1)..(25): SEQ ID NO: 430; WAN024AL3; Start 53; Stop 77
ttggatttcagctttcctgattatg

SEQ ID NO: 263590 - DNA, 25 bp, Artificial
  probe
  misc_feature (1)..(25): SEQ ID NO: 430; WAN024AL3; Start 52; Stop 76
cttggatttcagctttcctgattat

SEQ ID NO: 263591 - DNA, 25 bp, Artificial
  probe
  misc_feature (1)..(25): SEQ ID NO: 430; WAN024AL3; Start 55; Stop 79
ggatttcagctttcctgattatgat

SEQ ID NO: 263592 - DNA, 25 bp, Artificial
  probe
  misc_feature (1)..(25): SEQ ID NO: 430; WAN024AL3; Start 50; Stop 74
ttcttggatttcagctttcctgatt

SEQ ID NO: 263593 - DNA, 25 bp, Artificial
  probe
  misc_feature (1)..(25): SEQ ID NO: 430; WAN024AL3; Start 37; Stop 61
atgaaactaattgttcttggatttc

SEQ ID NO: 263594 - DNA, 25 bp, Artificial
  probe
  misc_feature (1)..(25): SEQ ID NO: 430; WAN024AL3; Start 49; Stop 73
gttcttggatttcagctttcctgat

SEQ ID NO: 263595 - DNA, 25 bp, Artificial
  probe
  misc_feature (1)..(25): SEQ ID NO: 430; WAN024AL3; Start 20; Stop 44
tacttgaacttttagtgatgaaact

SEQ ID NO: 263596 - DNA, 25 bp, Artificial
  probe
  misc_feature (1)..(25): SEQ ID NO: 430; WAN024AL3; Start 56; Stop 80
gatttcagctttcctgattatgatt

SEQ ID NO: 263597 - DNA, 25 bp, Artificial
  probe
  misc_feature (1)..(25): SEQ ID NO: 430; WAN024AL3; Start 48; Stop 72
tgttcttggatttcagctttcctga

SEQ ID NO: 263598 - DNA, 25 bp, Artificial
  probe
  misc_feature (1)..(25): SEQ ID NO: 431; WAN024G9G; Start 286; Stop 310
atgtcttgtataactctattgccgt

SEQ ID NO: 263599 - DNA, 25 bp, Artificial
  probe
  misc_feature (1)..(25): SEQ ID NO: 431; WAN024G9G; Start 422; Stop 446
ctggaatactcgctatgctaagatt

SEQ ID NO: 263600 - DNA, 25 bp, Artificial
  probe
  misc_feature (1)..(25): SEQ ID NO: 431; WAN024G9G; Start 289; Stop 313
tcttgtataactctattgccgtcat

SEQ ID NO: 263601 - DNA, 25 bp, Artificial
  probe
  misc_feature (1)..(25): SEQ ID NO: 431; WAN024G9G; Start 288; Stop 312
gtcttgtataactctattgccgtca

SEQ ID NO: 263602 - DNA, 25 bp, Artificial
  probe
  misc_feature (1)..(25): SEQ ID NO: 431; WAN024G9G; Start 287; Stop 311
tgtcttgtataactctattgccgtc

SEQ ID NO: 263603 - DNA, 25 bp, Artificial
  probe
  misc_feature (1)..(25): SEQ ID NO: 431; WAN024G9G; Start 433; Stop 457
gctatgctaagattggtatcggtat

SEQ ID NO: 263604 - DNA, 25 bp, Artificial
  probe
  misc_feature (1)..(25): SEQ ID NO: 431; WAN024G9G; Start 428; Stop 452
tactcgctatgctaagattggtatc

SEQ ID NO: 263605 - DNA, 25 bp, Artificial
  probe
  misc_feature (1)..(25): SEQ ID NO: 431; WAN024G9G; Start 425; Stop 449
gaatactcgctatgctaagattggt

SEQ ID NO: 263606 - DNA, 25 bp, Artificial
  probe
  misc_feature (1)..(25): SEQ ID NO: 431; WAN024G9G; Start 423; Stop 447
tggaatactcgctatgctaagattg

SEQ ID NO: 263607 - DNA, 25 bp, Artificial
  probe
  misc_feature (1)..(25): SEQ ID NO: 431; WAN024G9G; Start 292; Stop 316
tgtataactctattgccgtcattga

SEQ ID NO: 263608 - DNA, 25 bp, Artificial
  probe
  misc_feature (1)..(25): SEQ ID NO: 431; WAN024G9G; Start 291; Stop 315
ttgtataactctattgccgtcattg

SEQ ID NO: 263609 - DNA, 25 bp, Artificial
  probe
  misc_feature (1)..(25): SEQ ID NO: 431; WAN024G9G; Start 426; Stop 450
aatactcgctatgctaagattggta

SEQ ID NO: 263610 - DNA, 25 bp, Artificial
  probe
  misc_feature (1)..(25): SEQ ID NO: 431; WAN024G9G; Start 223; Stop 247
ttaaggtgattgctaaggaactaca

SEQ ID NO: 263611 - DNA, 25 bp, Artificial
  probe
  misc_feature (1)..(25): SEQ ID NO: 431; WAN024G9G; Start 290; Stop 314
cttgtataactctattgccgtcatt

SEQ ID NO: 263612 - DNA, 25 bp, Artificial
  probe
  misc_feature (1)..(25): SEQ ID NO: 431; WAN024G9G; Start 285; Stop 309
aatgtcttgtataactctattgccg

SEQ ID NO: 263613 - DNA, 25 bp, Artificial
  probe
  misc_feature (1)..(25): SEQ ID NO: 431; WAN024G9G; Start 424; Stop 448
ggaatactcgctatgctaagattgg

SEQ ID NO: 263614 - DNA, 25 bp, Artificial
  probe
  misc_feature (1)..(25): SEQ ID NO: 431; WAN024G9G; Start 294; Stop 318
tataactctattgccgtcattgatg

SEQ ID NO: 263615 - DNA, 25 bp, Artificial
  probe
  misc_feature (1)..(25): SEQ ID NO: 431; WAN024G9G; Start 293; Stop 317
gtataactctattgccgtcattgat

SEQ ID NO: 263616 - DNA, 25 bp, Artificial
  probe
  misc_feature (1)..(25): SEQ ID NO: 431; WAN024G9G; Start 224; Stop 248
taaggtgattgctaaggaactacaa

SEQ ID NO: 263617 - DNA, 25 bp, Artificial
  probe
  misc_feature (1)..(25): SEQ ID NO: 431; WAN024G9G; Start 421; Stop 445
tctggaatactcgctatgctaagat

SEQ ID NO: 263618 - DNA, 25 bp, Artificial
  probe
  misc_feature (1)..(25): SEQ ID NO: 431; WAN024G9G; Start 225; Stop 249
aaggtgattgctaaggaactacaag

SEQ ID NO: 263619 - DNA, 25 bp, Artificial
  probe
  misc_feature (1)..(25): SEQ ID NO: 431; WAN024G9G; Start 434; Stop 458
ctatgctaagattggtatcggtatc

SEQ ID NO: 263620 - DNA, 25 bp, Artificial
  probe
  misc_feature (1)..(25): SEQ ID NO: 431; WAN024G9G; Start 295; Stop 319
ataactctattgccgtcattgatgc

SEQ ID NO: 263621 - DNA, 25 bp, Artificial
  probe
  misc_feature (1)..(25): SEQ ID NO: 431; WAN024G9G; Start 420; Stop 444
gtctggaatactcgctatgctaaga

SEQ ID NO: 263622 - DNA, 25 bp, Artificial
  probe
  misc_feature (1)..(25): SEQ ID NO: 431; WAN024G9G; Start 432; Stop 456
cgctatgctaagattggtatcggta

SEQ ID NO: 263623 - DNA, 25 bp, Artificial
  probe
  misc_feature (1)..(25): SEQ ID NO: 431; WAN024G9G; Start 226; Stop 250
aggtgattgctaaggaactacaagt

SEQ ID NO: 263624 - DNA, 25 bp, Artificial
  probe
  misc_feature (1)..(25): SEQ ID NO: 431; WAN024G9G; Start 555; Stop 579
ttggatacagatagttgtggtcact

SEQ ID NO: 263625 - DNA, 25 bp, Artificial
  probe
  misc_feature (1)..(25): SEQ ID NO: 431; WAN024G9G; Start 414; Stop 438
ttcaaggtctggaatactcgctatg

SEQ ID NO: 263626 - DNA, 25 bp, Artificial
  probe
  misc_feature (1)..(25): SEQ ID NO: 431; WAN024G9G; Start 427; Stop 451
atactcgctatgctaagattggtat

SEQ ID NO: 263627 - DNA, 25 bp, Artificial
  probe
  misc_feature (1)..(25): SEQ ID NO: 431; WAN024G9G; Start 429; Stop 453
actcgctatgctaagattggtatcg

SEQ ID NO: 263628 - DNA, 25 bp, Artificial
  probe
  misc_feature (1)..(25): SEQ ID NO: 431; WAN024G9G; Start 419; Stop 443
ggtctggaatactcgctatgctaag

SEQ ID NO: 263629 - DNA, 25 bp, Artificial
  probe
  misc_feature (1)..(25): SEQ ID NO: 431; WAN024G9G; Start 359; Stop 383
accagatgaccattattatcaagaa

SEQ ID NO: 263630 - DNA, 25 bp, Artificial
  probe
  misc_feature (1)..(25): SEQ ID NO: 431; WAN024G9G; Start 556; Stop 580
tggatacagatagttgtggtcactg

SEQ ID NO: 263631 - DNA, 25 bp, Artificial
  probe
  misc_feature (1)..(25): SEQ ID NO: 432; WAN024AHW; Start 83; Stop 107
tctgacgaattactgaaatgtccat

SEQ ID NO: 263632 - DNA, 25 bp, Artificial
  probe
  misc_feature (1)..(25): SEQ ID NO: 432; WAN024AHW; Start 82; Stop 106
ttctgacgaattactgaaatgtcca

SEQ ID NO: 263633 - DNA, 25 bp, Artificial
  probe
  misc_feature (1)..(25): SEQ ID NO: 432; WAN024AHW; Start 94; Stop 118
actgaaatgtccataaatactcctt

SEQ ID NO: 263634 - DNA, 25 bp, Artificial
  probe
  misc_feature (1)..(25): SEQ ID NO: 432; WAN024AHW; Start 84; Stop 108
ctgacgaattactgaaatgtccata

SEQ ID NO: 263635 - DNA, 25 bp, Artificial
  probe
  misc_feature (1)..(25): SEQ ID NO: 432; WAN024AHW; Start 85; Stop 109
tgacgaattactgaaatgtccataa

SEQ ID NO: 263636 - DNA, 25 bp, Artificial
  probe
  misc_feature (1)..(25): SEQ ID NO: 432; WAN024AHW; Start 93; Stop 117
tactgaaatgtccataaatactcct

SEQ ID NO: 263637 - DNA, 25 bp, Artificial
  probe
  misc_feature (1)..(25): SEQ ID NO: 432; WAN024AHW; Start 95; Stop 119
ctgaaatgtccataaatactccttt

SEQ ID NO: 263638 - DNA, 25 bp, Artificial
  probe
  misc_feature (1)..(25): SEQ ID NO: 432; WAN024AHW; Start 81; Stop 105
tttctgacgaattactgaaatgtcc

SEQ ID NO: 263639 - DNA, 25 bp, Artificial
  probe
  misc_feature (1)..(25): SEQ ID NO: 432; WAN024AHW; Start 87; Stop 111
acgaattactgaaatgtccataaat

SEQ ID NO: 263640 - DNA, 25 bp, Artificial
  probe
  misc_feature (1)..(25): SEQ ID NO: 432; WAN024AHW; Start 86; Stop 110
gacgaattactgaaatgtccataaa

SEQ ID NO: 263641 - DNA, 25 bp, Artificial
  probe
  misc_feature (1)..(25): SEQ ID NO: 432; WAN024AHW; Start 160; Stop 184
catcttttgctctaatccccttttc

SEQ ID NO: 263642 - DNA, 25 bp, Artificial
  probe
  misc_feature (1)..(25): SEQ ID NO: 432; WAN024AHW; Start 162; Stop 186
tcttttgctctaatccccttttcat

SEQ ID NO: 263643 - DNA, 25 bp, Artificial
  probe
  misc_feature (1)..(25): SEQ ID NO: 432; WAN024AHW; Start 161; Stop 185
atcttttgctctaatccccttttca

SEQ ID NO: 263644 - DNA, 25 bp, Artificial
  probe
  misc_feature (1)..(25): SEQ ID NO: 432; WAN024AHW; Start 153; Stop 177
ttctttccatcttttgctctaatcc

SEQ ID NO: 263645 - DNA, 25 bp, Artificial
  probe
  misc_feature (1)..(25): SEQ ID NO: 432; WAN024AHW; Start 154; Stop 178
tctttccatcttttgctctaatccc

SEQ ID NO: 263646 - DNA, 25 bp, Artificial
  probe
  misc_feature (1)..(25): SEQ ID NO: 432; WAN024AHW; Start 148; Stop 172
atcatttctttccatcttttgctct

SEQ ID NO: 263647 - DNA, 25 bp, Artificial
  probe
  misc_feature (1)..(25): SEQ ID NO: 432; WAN024AHW; Start 92; Stop 116
ttactgaaatgtccataaatactcc

SEQ ID NO: 263648 - DNA, 25 bp, Artificial
  probe
  misc_feature (1)..(25): SEQ ID NO: 432; WAN024AHW; Start 159; Stop 183
ccatcttttgctctaatcccctttt

SEQ ID NO: 263649 - DNA, 25 bp, Artificial
  probe
  misc_feature (1)..(25): SEQ ID NO: 432; WAN024AHW; Start 149; Stop 173
tcatttctttccatcttttgctcta

SEQ ID NO: 263650 - DNA, 25 bp, Artificial
  probe
  misc_feature (1)..(25): SEQ ID NO: 432; WAN024AHW; Start 155; Stop 179
ctttccatcttttgctctaatcccc

SEQ ID NO: 263651 - DNA, 25 bp, Artificial
  probe
  misc_feature (1)..(25): SEQ ID NO: 432; WAN024AHW; Start 163; Stop 187
cttttgctctaatccccttttcatg

SEQ ID NO: 263652 - DNA, 25 bp, Artificial
  probe
  misc_feature (1)..(25): SEQ ID NO: 432; WAN024AHW; Start 158; Stop 182
tccatcttttgctctaatccccttt

SEQ ID NO: 263653 - DNA, 25 bp, Artificial
  probe
  misc_feature (1)..(25): SEQ ID NO: 432; WAN024AHW; Start 157; Stop 181
ttccatcttttgctctaatcccctt

SEQ ID NO: 263654 - DNA, 25 bp, Artificial
  probe
  misc_feature (1)..(25): SEQ ID NO: 432; WAN024AHW; Start 156; Stop 180
tttccatcttttgctctaatcccct

SEQ ID NO: 263655 - DNA, 25 bp, Artificial
  probe
  misc_feature (1)..(25): SEQ ID NO: 432; WAN024AHW; Start 150; Stop 174
catttctttccatcttttgctctaa

SEQ ID NO: 263656 - DNA, 25 bp, Artificial
  probe
  misc_feature (1)..(25): SEQ ID NO: 432; WAN024AHW; Start 147; Stop 171
tatcatttctttccatcttttgctc

SEQ ID NO: 263657 - DNA, 25 bp, Artificial
  probe
  misc_feature (1)..(25): SEQ ID NO: 432; WAN024AHW; Start 152; Stop 176
tttctttccatcttttgctctaatc

SEQ ID NO: 263658 - DNA, 25 bp, Artificial
  probe
  misc_feature (1)..(25): SEQ ID NO: 432; WAN024AHW; Start 146; Stop 170
ttatcatttctttccatcttttgct

SEQ ID NO: 263659 - DNA, 25 bp, Artificial
  probe
  misc_feature (1)..(25): SEQ ID NO: 432; WAN024AHW; Start 151; Stop 175
atttctttccatcttttgctctaat

SEQ ID NO: 263660 - DNA, 25 bp, Artificial
  probe
  misc_feature (1)..(25): SEQ ID NO: 432; WAN024AHW; Start 88; Stop 112
cgaattactgaaatgtccataaata

SEQ ID NO: 263661 - DNA, 25 bp, Artificial
  probe
  misc_feature (1)..(25): SEQ ID NO: 432; WAN024AHW; Start 145; Stop 169
tttatcatttctttccatcttttgc

SEQ ID NO: 263662 - DNA, 25 bp, Artificial
  probe
  misc_feature (1)..(25): SEQ ID NO: 432; WAN024AHW; Start 96; Stop 120
tgaaatgtccataaatactcctttt

SEQ ID NO: 263663 - DNA, 25 bp, Artificial
  probe
  misc_feature (1)..(25): SEQ ID NO: 432; WAN024AHW; Start 80; Stop 104
ttttctgacgaattactgaaatgtc

SEQ ID NO: 263664 - DNA, 25 bp, Artificial
  probe
  misc_feature (1)..(25): SEQ ID NO: 433; WAN0249U3; Start 238; Stop 262
actcctaagaatagcgatttaatca

SEQ ID NO: 263665 - DNA, 25 bp, Artificial
  probe
  misc_feature (1)..(25): SEQ ID NO: 433; WAN0249U3; Start 270; Stop 294
aagctactactgtagttgctctatt

SEQ ID NO: 263666 - DNA, 25 bp, Artificial
  probe
  misc_feature (1)..(25): SEQ ID NO: 433; WAN0249U3; Start 268; Stop 292
ttaagctactactgtagttgctcta

SEQ ID NO: 263667 - DNA, 25 bp, Artificial
  probe
  misc_feature (1)..(25): SEQ ID NO: 433; WAN0249U3; Start 271; Stop 295
agctactactgtagttgctctatta

SEQ ID NO: 263668 - DNA, 25 bp, Artificial
  probe
  misc_feature (1)..(25): SEQ ID NO: 433; WAN0249U3; Start 269; Stop 293
taagctactactgtagttgctctat

SEQ ID NO: 263669 - DNA, 25 bp, Artificial
  probe
  misc_feature (1)..(25): SEQ ID NO: 433; WAN0249U3; Start 161; Stop 185
tactttgaggttgaagatggaagct

SEQ ID NO: 263670 - DNA, 25 bp, Artificial
  probe
  misc_feature (1)..(25): SEQ ID NO: 433; WAN0249U3; Start 77; Stop 101
atgcgaaactagaagaagattattt

SEQ ID NO: 263671 - DNA, 25 bp, Artificial
  probe
  misc_feature (1)..(25): SEQ ID NO: 433; WAN0249U3; Start 241; Stop 265
cctaagaatagcgatttaatcatgt

SEQ ID NO: 263672 - DNA, 25 bp, Artificial
  probe
  misc_feature (1)..(25): SEQ ID NO: 433; WAN0249U3; Start 272; Stop 296
gctactactgtagttgctctattat

SEQ ID NO: 263673 - DNA, 25 bp, Artificial
  probe
  misc_feature (1)..(25): SEQ ID NO: 433; WAN0249U3; Start 239; Stop 263
ctcctaagaatagcgatttaatcat

SEQ ID NO: 263674 - DNA, 25 bp, Artificial
  probe
  misc_feature (1)..(25): SEQ ID NO: 433; WAN0249U3; Start 240; Stop 264
tcctaagaatagcgatttaatcatg

SEQ ID NO: 263675 - DNA, 25 bp, Artificial
  probe
  misc_feature (1)..(25): SEQ ID NO: 433; WAN0249U3; Start 74; Stop 98
tttatgcgaaactagaagaagatta

SEQ ID NO: 263676 - DNA, 25 bp, Artificial
  probe
  misc_feature (1)..(25): SEQ ID NO: 433; WAN0249U3; Start 163; Stop 187
ctttgaggttgaagatggaagctga

SEQ ID NO: 263677 - DNA, 25 bp, Artificial
  probe
  misc_feature (1)..(25): SEQ ID NO: 433; WAN0249U3; Start 39; Stop 63
gctccttttggttagaacttgacaa

SEQ ID NO: 263678 - DNA, 25 bp, Artificial
  probe
  misc_feature (1)..(25): SEQ ID NO: 433; WAN0249U3; Start 267; Stop 291
tttaagctactactgtagttgctct

SEQ ID NO: 263679 - DNA, 25 bp, Artificial
  probe
  misc_feature (1)..(25): SEQ ID NO: 433; WAN0249U3; Start 236; Stop 260
ctactcctaagaatagcgatttaat

SEQ ID NO: 263680 - DNA, 25 bp, Artificial
  probe
  misc_feature (1)..(25): SEQ ID NO: 433; WAN0249U3; Start 164; Stop 188
tttgaggttgaagatggaagctgac

SEQ ID NO: 263681 - DNA, 25 bp, Artificial
  probe
  misc_feature (1)..(25): SEQ ID NO: 433; WAN0249U3; Start 76; Stop 100
tatgcgaaactagaagaagattatt

SEQ ID NO: 263682 - DNA, 25 bp, Artificial
  probe
  misc_feature (1)..(25): SEQ ID NO: 433; WAN0249U3; Start 75; Stop 99
ttatgcgaaactagaagaagattat

SEQ ID NO: 263683 - DNA, 25 bp, Artificial
  probe
  misc_feature (1)..(25): SEQ ID NO: 433; WAN0249U3; Start 237; Stop 261
tactcctaagaatagcgatttaatc

SEQ ID NO: 263684 - DNA, 25 bp, Artificial
  probe
  misc_feature (1)..(25): SEQ ID NO: 433; WAN0249U3; Start 162; Stop 186
actttgaggttgaagatggaagctg

SEQ ID NO: 263685 - DNA, 25 bp, Artificial
  probe
  misc_feature (1)..(25): SEQ ID NO: 433; WAN0249U3; Start 67; Stop 91
acatcattttatgcgaaactagaag

SEQ ID NO: 263686 - DNA, 25 bp, Artificial
  probe
  misc_feature (1)..(25): SEQ ID NO: 433; WAN0249U3; Start 68; Stop 92
catcattttatgcgaaactagaaga

SEQ ID NO: 263687 - DNA, 25 bp, Artificial
  probe
  misc_feature (1)..(25): SEQ ID NO: 433; WAN0249U3; Start 71; Stop 95
cattttatgcgaaactagaagaaga

SEQ ID NO: 263688 - DNA, 25 bp, Artificial
  probe
  misc_feature (1)..(25): SEQ ID NO: 433; WAN0249U3; Start 70; Stop 94
tcattttatgcgaaactagaagaag

SEQ ID NO: 263689 - DNA, 25 bp, Artificial
  probe
  misc_feature (1)..(25): SEQ ID NO: 433; WAN0249U3; Start 37; Stop 61
aggctccttttggttagaacttgac

SEQ ID NO: 263690 - DNA, 25 bp, Artificial
  probe
  misc_feature (1)..(25): SEQ ID NO: 433; WAN0249U3; Start 38; Stop 62
ggctccttttggttagaacttgaca

SEQ ID NO: 263691 - DNA, 25 bp, Artificial
  probe
  misc_feature (1)..(25): SEQ ID NO: 433; WAN0249U3; Start 78; Stop 102
tgcgaaactagaagaagattatttt

SEQ ID NO: 263692 - DNA, 25 bp, Artificial
  probe
  misc_feature (1)..(25): SEQ ID NO: 433; WAN0249U3; Start 73; Stop 97
ttttatgcgaaactagaagaagatt

SEQ ID NO: 263693 - DNA, 25 bp, Artificial
  probe
  misc_feature (1)..(25): SEQ ID NO: 433; WAN0249U3; Start 69; Stop 93
atcattttatgcgaaactagaagaa

SEQ ID NO: 263694 - DNA, 25 bp, Artificial
  probe
  misc_feature (1)..(25): SEQ ID NO: 433; WAN0249U3; Start 72; Stop 96
attttatgcgaaactagaagaagat

SEQ ID NO: 263695 - DNA, 25 bp, Artificial
  probe
  misc_feature (1)..(25): SEQ ID NO: 433; WAN0249U3; Start 40; Stop 64
ctccttttggttagaacttgacaaa

SEQ ID NO: 263696 - DNA, 25 bp, Artificial
  probe
  misc_feature (1)..(25): SEQ ID NO: 433; WAN0249U3; Start 235; Stop 259
gctactcctaagaatagcgatttaa

SEQ ID NO: 263697 - DNA, 25 bp, Artificial
  probe
  misc_feature (1)..(25): SEQ ID NO: 434; WAN024A5W; Start 3; Stop 27
attccaacatctgacaaaatagtcg

SEQ ID NO: 263698 - DNA, 25 bp, Artificial
  probe
  misc_feature (1)..(25): SEQ ID NO: 434; WAN024A5W; Start 6; Stop 30
ccaacatctgacaaaatagtcggat

SEQ ID NO: 263699 - DNA, 25 bp, Artificial
  probe
  misc_feature (1)..(25): SEQ ID NO: 434; WAN024A5W; Start 4; Stop 28
ttccaacatctgacaaaatagtcgg

SEQ ID NO: 263700 - DNA, 25 bp, Artificial
  probe
  misc_feature (1)..(25): SEQ ID NO: 434; WAN024A5W; Start 11; Stop 35
atctgacaaaatagtcggatgtttt

SEQ ID NO: 263701 - DNA, 25 bp, Artificial
  probe
  misc_feature (1)..(25): SEQ ID NO: 434; WAN024A5W; Start 2; Stop 26
gattccaacatctgacaaaatagtc

SEQ ID NO: 263702 - DNA, 25 bp, Artificial
  probe
  misc_feature (1)..(25): SEQ ID NO: 434; WAN024A5W; Start 5; Stop 29
tccaacatctgacaaaatagtcgga

SEQ ID NO: 263703 - DNA, 25 bp, Artificial
  probe
  misc_feature (1)..(25): SEQ ID NO: 434; WAN024A5W; Start 46; Stop 70
acgaacttttacgaatagatagatg

SEQ ID NO: 263704 - DNA, 25 bp, Artificial
  probe
  misc_feature (1)..(25): SEQ ID NO: 434; WAN024A5W; Start 47; Stop 71
cgaacttttacgaatagatagatga

SEQ ID NO: 263705 - DNA, 25 bp, Artificial
  probe
  misc_feature (1)..(25): SEQ ID NO: 434; WAN024A5W; Start 1; Stop 25
agattccaacatctgacaaaatagt

SEQ ID NO: 263706 - DNA, 25 bp, Artificial
  probe
  misc_feature (1)..(25): SEQ ID NO: 434; WAN024A5W; Start 10; Stop 34
catctgacaaaatagtcggatgttt

SEQ ID NO: 263707 - DNA, 25 bp, Artificial
  probe
  misc_feature (1)..(25): SEQ ID NO: 434; WAN024A5W; Start 7; Stop 31
caacatctgacaaaatagtcggatg

SEQ ID NO: 263708 - DNA, 25 bp, Artificial
  probe
  misc_feature (1)..(25): SEQ ID NO: 434; WAN024A5W; Start 44; Stop 68
ttacgaacttttacgaatagataga

SEQ ID NO: 263709 - DNA, 25 bp, Artificial
  probe
  misc_feature (1)..(25): SEQ ID NO: 434; WAN024A5W; Start 45; Stop 69
tacgaacttttacgaatagatagat

SEQ ID NO: 263710 - DNA, 25 bp, Artificial
  probe
  misc_feature (1)..(25): SEQ ID NO: 434; WAN024A5W; Start 49; Stop 73
aacttttacgaatagatagatgagt

SEQ ID NO: 263711 - DNA, 25 bp, Artificial
  probe
  misc_feature (1)..(25): SEQ ID NO: 434; WAN024A5W; Start 48; Stop 72
gaacttttacgaatagatagatgag

SEQ ID NO: 263712 - DNA, 25 bp, Artificial
  probe
  misc_feature (1)..(25): SEQ ID NO: 434; WAN024A5W; Start 43; Stop 67
tttacgaacttttacgaatagatag

SEQ ID NO: 263713 - DNA, 25 bp, Artificial
  probe
  misc_feature (1)..(25): SEQ ID NO: 435; WAN0249YJ; Start 79; Stop 103
tacgactttcggtttacaatagaaa

SEQ ID NO: 263714 - DNA, 25 bp, Artificial
  probe
  misc_feature (1)..(25): SEQ ID NO: 435; WAN0249YJ; Start 78; Stop 102
ttacgactttcggtttacaatagaa

SEQ ID NO: 263715 - DNA, 25 bp, Artificial
  probe
  misc_feature (1)..(25): SEQ ID NO: 435; WAN0249YJ; Start 77; Stop 101
tttacgactttcggtttacaataga

SEQ ID NO: 263716 - DNA, 25 bp, Artificial
  probe
  misc_feature (1)..(25): SEQ ID NO: 435; WAN0249YJ; Start 76; Stop 100
atttacgactttcggtttacaatag

SEQ ID NO: 263717 - DNA, 25 bp, Artificial
  probe
  misc_feature (1)..(25): SEQ ID NO: 435; WAN0249YJ; Start 75; Stop 99
aatttacgactttcggtttacaata

SEQ ID NO: 263718 - DNA, 25 bp, Artificial
  probe
  misc_feature (1)..(25): SEQ ID NO: 435; WAN0249YJ; Start 74; Stop 98
aaatttacgactttcggtttacaat

SEQ ID NO: 263719 - DNA, 25 bp, Artificial
  probe
  misc_feature (1)..(25): SEQ ID NO: 435; WAN0249YJ; Start 34; Stop 58
actccttatcttccattataaactt

SEQ ID NO: 263720 - DNA, 25 bp, Artificial
  probe
  misc_feature (1)..(25): SEQ ID NO: 435; WAN0249YJ; Start 33; Stop 57
aactccttatcttccattataaact

SEQ ID NO: 263721 - DNA, 25 bp, Artificial
  probe
  misc_feature (1)..(25): SEQ ID NO: 435; WAN0249YJ; Start 42; Stop 66
tcttccattataaacttttccttgt

SEQ ID NO: 263722 - DNA, 25 bp, Artificial
  probe
  misc_feature (1)..(25): SEQ ID NO: 435; WAN0249YJ; Start 6; Stop 30
cctcattcaattttgataactagga

SEQ ID NO: 263723 - DNA, 25 bp, Artificial
  probe
  misc_feature (1)..(25): SEQ ID NO: 435; WAN0249YJ; Start 5; Stop 29
tcctcattcaattttgataactagg

SEQ ID NO: 263724 - DNA, 25 bp, Artificial
  probe
  misc_feature (1)..(25): SEQ ID NO: 435; WAN0249YJ; Start 73; Stop 97
taaatttacgactttcggtttacaa

SEQ ID NO: 263725 - DNA, 25 bp, Artificial
  probe
  misc_feature (1)..(25): SEQ ID NO: 435; WAN0249YJ; Start 54; Stop 78
aacttttccttgttacttgtaaatt

SEQ ID NO: 263726 - DNA, 25 bp, Artificial
  probe
  misc_feature (1)..(25): SEQ ID NO: 435; WAN0249YJ; Start 53; Stop 77
aaacttttccttgttacttgtaaat

SEQ ID NO: 263727 - DNA, 25 bp, Artificial
  probe
  misc_feature (1)..(25): SEQ ID NO: 435; WAN0249YJ; Start 43; Stop 67
cttccattataaacttttccttgtt

SEQ ID NO: 263728 - DNA, 25 bp, Artificial
  probe
  misc_feature (1)..(25): SEQ ID NO: 435; WAN0249YJ; Start 2; Stop 26
gattcctcattcaattttgataact

SEQ ID NO: 263729 - DNA, 25 bp, Artificial
  probe
  misc_feature (1)..(25): SEQ ID NO: 435; WAN0249YJ; Start 1; Stop 25
agattcctcattcaattttgataac

SEQ ID NO: 263730 - DNA, 25 bp, Artificial
  probe
  misc_feature (1)..(25): SEQ ID NO: 435; WAN0249YJ; Start 52; Stop 76
taaacttttccttgttacttgtaaa

SEQ ID NO: 263731 - DNA, 25 bp, Artificial
  probe
  misc_feature (1)..(25): SEQ ID NO: 435; WAN0249YJ; Start 41; Stop 65
atcttccattataaacttttccttg

SEQ ID NO: 263732 - DNA, 25 bp, Artificial
  probe
  misc_feature (1)..(25): SEQ ID NO: 435; WAN0249YJ; Start 55; Stop 79
acttttccttgttacttgtaaattt

SEQ ID NO: 263733 - DNA, 25 bp, Artificial
  probe
  misc_feature (1)..(25): SEQ ID NO: 435; WAN0249YJ; Start 46; Stop 70
ccattataaacttttccttgttact

SEQ ID NO: 263734 - DNA, 25 bp, Artificial
  probe
  misc_feature (1)..(25): SEQ ID NO: 435; WAN0249YJ; Start 45; Stop 69
tccattataaacttttccttgttac

SEQ ID NO: 263735 - DNA, 25 bp, Artificial
  probe
  misc_feature (1)..(25): SEQ ID NO: 435; WAN0249YJ; Start 7; Stop 31
ctcattcaattttgataactaggaa

SEQ ID NO: 263736 - DNA, 25 bp, Artificial
  probe
  misc_feature (1)..(25): SEQ ID NO: 435; WAN0249YJ; Start 4; Stop 28
ttcctcattcaattttgataactag

SEQ ID NO: 263737 - DNA, 25 bp, Artificial
  probe
  misc_feature (1)..(25): SEQ ID NO: 435; WAN0249YJ; Start 51; Stop 75
ataaacttttccttgttacttgtaa

SEQ ID NO: 263738 - DNA, 25 bp, Artificial
  probe
  misc_feature (1)..(25): SEQ ID NO: 435; WAN0249YJ; Start 49; Stop 73
ttataaacttttccttgttacttgt

SEQ ID NO: 263739 - DNA, 25 bp, Artificial
  probe
  misc_feature (1)..(25): SEQ ID NO: 436; WAN024ANG; Start 69; Stop 93
aataagaataatctgggacgactgc

SEQ ID NO: 263740 - DNA, 25 bp, Artificial
  probe
  misc_feature (1)..(25): SEQ ID NO: 436; WAN024ANG; Start 68; Stop 92
taataagaataatctgggacgactg

SEQ ID NO: 263741 - DNA, 25 bp, Artificial
  probe
  misc_feature (1)..(25): SEQ ID NO: 436; WAN024ANG; Start 66; Stop 90
actaataagaataatctgggacgac

SEQ ID NO: 263742 - DNA, 25 bp, Artificial
  probe
  misc_feature (1)..(25): SEQ ID NO: 436; WAN024ANG; Start 67; Stop 91
ctaataagaataatctgggacgact

SEQ ID NO: 263743 - DNA, 25 bp, Artificial
  probe
  misc_feature (1)..(25): SEQ ID NO: 436; WAN024ANG; Start 17; Stop 41
aatgctcaaggtcttgttaactacg

SEQ ID NO: 263744 - DNA, 25 bp, Artificial
  probe
  misc_feature (1)..(25): SEQ ID NO: 436; WAN024ANG; Start 18; Stop 42
atgctcaaggtcttgttaactacga

SEQ ID NO: 263745 - DNA, 25 bp, Artificial
  probe
  misc_feature (1)..(25): SEQ ID NO: 436; WAN024ANG; Start 70; Stop 94
ataagaataatctgggacgactgca

SEQ ID NO: 263746 - DNA, 25 bp, Artificial
  probe
  misc_feature (1)..(25): SEQ ID NO: 436; WAN024ANG; Start 38; Stop 62
tacgaggggatatagaaaacaagac

SEQ ID NO: 263747 - DNA, 25 bp, Artificial
  probe
  misc_feature (1)..(25): SEQ ID NO: 436; WAN024ANG; Start 36; Stop 60
actacgaggggatatagaaaacaag

SEQ ID NO: 263748 - DNA, 25 bp, Artificial
  probe
  misc_feature (1)..(25): SEQ ID NO: 436; WAN024ANG; Start 37; Stop 61
ctacgaggggatatagaaaacaaga

SEQ ID NO: 263749 - DNA, 25 bp, Artificial
  probe
  misc_feature (1)..(25): SEQ ID NO: 436; WAN024ANG; Start 35; Stop 59
aactacgaggggatatagaaaacaa

SEQ ID NO: 263750 - DNA, 25 bp, Artificial
  probe
  misc_feature (1)..(25): SEQ ID NO: 436; WAN024ANG; Start 7; Stop 31
ctctttctaaaatgctcaaggtctt

SEQ ID NO: 263751 - DNA, 25 bp, Artificial
  probe
  misc_feature (1)..(25): SEQ ID NO: 436; WAN024ANG; Start 19; Stop 43
tgctcaaggtcttgttaactacgag

SEQ ID NO: 263752 - DNA, 25 bp, Artificial
  probe
  misc_feature (1)..(25): SEQ ID NO: 436; WAN024ANG; Start 65; Stop 89
tactaataagaataatctgggacga

SEQ ID NO: 263753 - DNA, 25 bp, Artificial
  probe
  misc_feature (1)..(25): SEQ ID NO: 436; WAN024ANG; Start 16; Stop 40
aaatgctcaaggtcttgttaactac

SEQ ID NO: 263754 - DNA, 25 bp, Artificial
  probe
  misc_feature (1)..(25): SEQ ID NO: 436; WAN024ANG; Start 34; Stop 58
taactacgaggggatatagaaaaca

SEQ ID NO: 263755 - DNA, 25 bp, Artificial
  probe
  misc_feature (1)..(25): SEQ ID NO: 436; WAN024ANG; Start 64; Stop 88
ctactaataagaataatctgggacg

SEQ ID NO: 263756 - DNA, 25 bp, Artificial
  probe
  misc_feature (1)..(25): SEQ ID NO: 436; WAN024ANG; Start 71; Stop 95
taagaataatctgggacgactgcac

SEQ ID NO: 263757 - DNA, 25 bp, Artificial
  probe
  misc_feature (1)..(25): SEQ ID NO: 436; WAN024ANG; Start 39; Stop 63
acgaggggatatagaaaacaagacc

SEQ ID NO: 263758 - DNA, 25 bp, Artificial
  probe
  misc_feature (1)..(25): SEQ ID NO: 436; WAN024ANG; Start 1; Stop 25
agattcctctttctaaaatgctcaa

SEQ ID NO: 263759 - DNA, 25 bp, Artificial
  probe
  misc_feature (1)..(25): SEQ ID NO: 436; WAN024ANG; Start 2; Stop 26
gattcctctttctaaaatgctcaag

SEQ ID NO: 263760 - DNA, 25 bp, Artificial
  probe
  misc_feature (1)..(25): SEQ ID NO: 436; WAN024ANG; Start 20; Stop 44
gctcaaggtcttgttaactacgagg

SEQ ID NO: 263761 - DNA, 25 bp, Artificial
  probe
  misc_feature (1)..(25): SEQ ID NO: 436; WAN024ANG; Start 9; Stop 33
ctttctaaaatgctcaaggtcttgt

SEQ ID NO: 263762 - DNA, 25 bp, Artificial
  probe
  misc_feature (1)..(25): SEQ ID NO: 436; WAN024ANG; Start 8; Stop 32
tctttctaaaatgctcaaggtcttg

SEQ ID NO: 263763 - DNA, 25 bp, Artificial
  probe
  misc_feature (1)..(25): SEQ ID NO: 436; WAN024ANG; Start 4; Stop 28
ttcctctttctaaaatgctcaaggt

SEQ ID NO: 263764 - DNA, 25 bp, Artificial
  probe
  misc_feature (1)..(25): SEQ ID NO: 436; WAN024ANG; Start 10; Stop 34
tttctaaaatgctcaaggtcttgtt

SEQ ID NO: 263765 - DNA, 25 bp, Artificial
  probe
  misc_feature (1)..(25): SEQ ID NO: 436; WAN024ANG; Start 6; Stop 30
cctctttctaaaatgctcaaggtct

SEQ ID NO: 263766 - DNA, 25 bp, Artificial
  probe
  misc_feature (1)..(25): SEQ ID NO: 436; WAN024ANG; Start 5; Stop 29
tcctctttctaaaatgctcaaggtc

SEQ ID NO: 263767 - DNA, 25 bp, Artificial
  probe
  misc_feature (1)..(25): SEQ ID NO: 436; WAN024ANG; Start 3; Stop 27
attcctctttctaaaatgctcaagg

SEQ ID NO: 263768 - DNA, 25 bp, Artificial
  probe
  misc_feature (1)..(25): SEQ ID NO: 436; WAN024ANG; Start 33; Stop 57
ttaactacgaggggatatagaaaac

SEQ ID NO: 263769 - DNA, 25 bp, Artificial
  probe
  misc_feature (1)..(25): SEQ ID NO: 436; WAN024ANG; Start 63; Stop 87
cctactaataagaataatctgggac

SEQ ID NO: 263770 - DNA, 25 bp, Artificial
  probe
  misc_feature (1)..(25): SEQ ID NO: 436; WAN024ANG; Start 60; Stop 84
gaccctactaataagaataatctgg

SEQ ID NO: 263771 - DNA, 25 bp, Artificial
  probe
  misc_feature (1)..(25): SEQ ID NO: 436; WAN024ANG; Start 12; Stop 36
tctaaaatgctcaaggtcttgttaa

SEQ ID NO: 263772 - DNA, 25 bp, Artificial
  probe
  misc_feature (1)..(25): SEQ ID NO: 437; WAN024A4X; Start 54; Stop 78
acaagctctctcatcggaaatgttt

SEQ ID NO: 263773 - DNA, 25 bp, Artificial
  probe
  misc_feature (1)..(25): SEQ ID NO: 437; WAN024A4X; Start 52; Stop 76
aaacaagctctctcatcggaaatgt

SEQ ID NO: 263774 - DNA, 25 bp, Artificial
  probe
  misc_feature (1)..(25): SEQ ID NO: 437; WAN024A4X; Start 55; Stop 79
caagctctctcatcggaaatgtttt

SEQ ID NO: 263775 - DNA, 25 bp, Artificial
  probe
  misc_feature (1)..(25): SEQ ID NO: 437; WAN024A4X; Start 51; Stop 75
aaaacaagctctctcatcggaaatg

SEQ ID NO: 263776 - DNA, 25 bp, Artificial
  probe
  misc_feature (1)..(25): SEQ ID NO: 437; WAN024A4X; Start 53; Stop 77
aacaagctctctcatcggaaatgtt

SEQ ID NO: 263777 - DNA, 25 bp, Artificial
  probe
  misc_feature (1)..(25): SEQ ID NO: 438; WAN024AQK; Start 40; Stop 64
gtctcaggagcaacctttatgatat

SEQ ID NO: 263778 - DNA, 25 bp, Artificial
  probe
  misc_feature (1)..(25): SEQ ID NO: 438; WAN024AQK; Start 41; Stop 65
tctcaggagcaacctttatgatata

SEQ ID NO: 263779 - DNA, 25 bp, Artificial
  probe
  misc_feature (1)..(25): SEQ ID NO: 438; WAN024AQK; Start 39; Stop 63
tgtctcaggagcaacctttatgata

SEQ ID NO: 263780 - DNA, 25 bp, Artificial
  probe
  misc_feature (1)..(25): SEQ ID NO: 438; WAN024AQK; Start 46; Stop 70
ggagcaacctttatgatataatgag

SEQ ID NO: 263781 - DNA, 25 bp, Artificial
  probe
  misc_feature (1)..(25): SEQ ID NO: 438; WAN024AQK; Start 42; Stop 66
ctcaggagcaacctttatgatataa

SEQ ID NO: 263782 - DNA, 25 bp, Artificial
  probe
  misc_feature (1)..(25): SEQ ID NO: 438; WAN024AQK; Start 38; Stop 62
ctgtctcaggagcaacctttatgat

SEQ ID NO: 263783 - DNA, 25 bp, Artificial
  probe
  misc_feature (1)..(25): SEQ ID NO: 438; WAN024AQK; Start 44; Stop 68
caggagcaacctttatgatataatg

SEQ ID NO: 263784 - DNA, 25 bp, Artificial
  probe
  misc_feature (1)..(25): SEQ ID NO: 438; WAN024AQK; Start 45; Stop 69
aggagcaacctttatgatataatga

SEQ ID NO: 263785 - DNA, 25 bp, Artificial
  probe
  misc_feature (1)..(25): SEQ ID NO: 438; WAN024AQK; Start 43; Stop 67
tcaggagcaacctttatgatataat

SEQ ID NO: 263786 - DNA, 25 bp, Artificial
  probe
  misc_feature (1)..(25): SEQ ID NO: 438; WAN024AQK; Start 36; Stop 60
ctctgtctcaggagcaacctttatg

SEQ ID NO: 263787 - DNA, 25 bp, Artificial
  probe
  misc_feature (1)..(25): SEQ ID NO: 438; WAN024AQK; Start 67; Stop 91
tgagagaagaaaactgaaaggattt

SEQ ID NO: 263788 - DNA, 25 bp, Artificial
  probe
  misc_feature (1)..(25): SEQ ID NO: 438; WAN024AQK; Start 49; Stop 73
gcaacctttatgatataatgagaga

SEQ ID NO: 263789 - DNA, 25 bp, Artificial
  probe
  misc_feature (1)..(25): SEQ ID NO: 438; WAN024AQK; Start 48; Stop 72
agcaacctttatgatataatgagag

SEQ ID NO: 263790 - DNA, 25 bp, Artificial
  probe
  misc_feature (1)..(25): SEQ ID NO: 438; WAN024AQK; Start 47; Stop 71
gagcaacctttatgatataatgaga

SEQ ID NO: 263791 - DNA, 25 bp, Artificial
  probe
  misc_feature (1)..(25): SEQ ID NO: 438; WAN024AQK; Start 35; Stop 59
tctctgtctcaggagcaacctttat

SEQ ID NO: 263792 - DNA, 25 bp, Artificial
  probe
  misc_feature (1)..(25): SEQ ID NO: 438; WAN024AQK; Start 66; Stop 90
atgagagaagaaaactgaaaggatt

SEQ ID NO: 263793 - DNA, 25 bp, Artificial
  probe
  misc_feature (1)..(25): SEQ ID NO: 438; WAN024AQK; Start 65; Stop 89
aatgagagaagaaaactgaaaggat

SEQ ID NO: 263794 - DNA, 25 bp, Artificial
  probe
  misc_feature (1)..(25): SEQ ID NO: 438; WAN024AQK; Start 70; Stop 94
gagaagaaaactgaaaggatttacc

SEQ ID NO: 263795 - DNA, 25 bp, Artificial
  probe
  misc_feature (1)..(25): SEQ ID NO: 438; WAN024AQK; Start 37; Stop 61
tctgtctcaggagcaacctttatga

SEQ ID NO: 263796 - DNA, 25 bp, Artificial
  probe
  misc_feature (1)..(25): SEQ ID NO: 438; WAN024AQK; Start 64; Stop 88
taatgagagaagaaaactgaaagga

SEQ ID NO: 263797 - DNA, 25 bp, Artificial
  probe
  misc_feature (1)..(25): SEQ ID NO: 438; WAN024AQK; Start 34; Stop 58
ctctctgtctcaggagcaaccttta

SEQ ID NO: 263798 - DNA, 25 bp, Artificial
  probe
  misc_feature (1)..(25): SEQ ID NO: 438; WAN024AQK; Start 69; Stop 93
agagaagaaaactgaaaggatttac

SEQ ID NO: 263799 - DNA, 25 bp, Artificial
  probe
  misc_feature (1)..(25): SEQ ID NO: 438; WAN024AQK; Start 68; Stop 92
gagagaagaaaactgaaaggattta

SEQ ID NO: 263800 - DNA, 25 bp, Artificial
  probe
  misc_feature (1)..(25): SEQ ID NO: 438; WAN024AQK; Start 63; Stop 87
ataatgagagaagaaaactgaaagg

SEQ ID NO: 263801 - DNA, 25 bp, Artificial
  probe
  misc_feature (1)..(25): SEQ ID NO: 438; WAN024AQK; Start 32; Stop 56
ttctctctgtctcaggagcaacctt

SEQ ID NO: 263802 - DNA, 25 bp, Artificial
  probe
  misc_feature (1)..(25): SEQ ID NO: 438; WAN024AQK; Start 29; Stop 53
gttttctctctgtctcaggagcaac

SEQ ID NO: 263803 - DNA, 25 bp, Artificial
  probe
  misc_feature (1)..(25): SEQ ID NO: 438; WAN024AQK; Start 33; Stop 57
tctctctgtctcaggagcaaccttt

SEQ ID NO: 263804 - DNA, 25 bp, Artificial
  probe
  misc_feature (1)..(25): SEQ ID NO: 438; WAN024AQK; Start 31; Stop 55
tttctctctgtctcaggagcaacct

SEQ ID NO: 263805 - DNA, 25 bp, Artificial
  probe
  misc_feature (1)..(25): SEQ ID NO: 438; WAN024AQK; Start 59; Stop 83
tgatataatgagagaagaaaactga

SEQ ID NO: 263806 - DNA, 25 bp, Artificial
  probe
  misc_feature (1)..(25): SEQ ID NO: 438; WAN024AQK; Start 30; Stop 54
ttttctctctgtctcaggagcaacc

SEQ ID NO: 263807 - DNA, 25 bp, Artificial
  probe
  misc_feature (1)..(25): SEQ ID NO: 438; WAN024AQK; Start 28; Stop 52
ggttttctctctgtctcaggagcaa

SEQ ID NO: 263808 - DNA, 25 bp, Artificial
  probe
  misc_feature (1)..(25): SEQ ID NO: 438; WAN024AQK; Start 26; Stop 50
gaggttttctctctgtctcaggagc

SEQ ID NO: 263809 - DNA, 25 bp, Artificial
  probe
  misc_feature (1)..(25): SEQ ID NO: 438; WAN024AQK; Start 25; Stop 49
agaggttttctctctgtctcaggag

SEQ ID NO: 263810 - DNA, 25 bp, Artificial
  probe
  misc_feature (1)..(25): SEQ ID NO: 438; WAN024AQK; Start 27; Stop 51
aggttttctctctgtctcaggagca

SEQ ID NO: 263811 - DNA, 25 bp, Artificial
  probe
  misc_feature (1)..(25): SEQ ID NO: 439; WAN0249VZ; Start 119; Stop 143
ttatagaatagcgtttggagccttt

SEQ ID NO: 263812 - DNA, 25 bp, Artificial
  probe
  misc_feature (1)..(25): SEQ ID NO: 439; WAN0249VZ; Start 118; Stop 142
cttatagaatagcgtttggagcctt

SEQ ID NO: 263813 - DNA, 25 bp, Artificial
  probe
  misc_feature (1)..(25): SEQ ID NO: 439; WAN0249VZ; Start 120; Stop 144
tatagaatagcgtttggagcctttg

SEQ ID NO: 263814 - DNA, 25 bp, Artificial
  probe
  misc_feature (1)..(25): SEQ ID NO: 439; WAN0249VZ; Start 121; Stop 145
atagaatagcgtttggagcctttga

SEQ ID NO: 263815 - DNA, 25 bp, Artificial
  probe
  misc_feature (1)..(25): SEQ ID NO: 439; WAN0249VZ; Start 122; Stop 146
tagaatagcgtttggagcctttgaa

SEQ ID NO: 263816 - DNA, 25 bp, Artificial
  probe
  misc_feature (1)..(25): SEQ ID NO: 439; WAN0249VZ; Start 130; Stop 154
cgtttggagcctttgaaagtagttt

SEQ ID NO: 263817 - DNA, 25 bp, Artificial
  probe
  misc_feature (1)..(25): SEQ ID NO: 439; WAN0249VZ; Start 76; Stop 100
aggctttcaatatcttatagacact

SEQ ID NO: 263818 - DNA, 25 bp, Artificial
  probe
  misc_feature (1)..(25): SEQ ID NO: 439; WAN0249VZ; Start 131; Stop 155
gtttggagcctttgaaagtagtttc

SEQ ID NO: 263819 - DNA, 25 bp, Artificial
  probe
  misc_feature (1)..(25): SEQ ID NO: 439; WAN0249VZ; Start 126; Stop 150
atagcgtttggagcctttgaaagta

SEQ ID NO: 263820 - DNA, 25 bp, Artificial
  probe
  misc_feature (1)..(25): SEQ ID NO: 439; WAN0249VZ; Start 123; Stop 147
agaatagcgtttggagcctttgaaa

SEQ ID NO: 263821 - DNA, 25 bp, Artificial
  probe
  misc_feature (1)..(25): SEQ ID NO: 439; WAN0249VZ; Start 124; Stop 148
gaatagcgtttggagcctttgaaag

SEQ ID NO: 263822 - DNA, 25 bp, Artificial
  probe
  misc_feature (1)..(25): SEQ ID NO: 439; WAN0249VZ; Start 77; Stop 101
ggctttcaatatcttatagacactt

SEQ ID NO: 263823 - DNA, 25 bp, Artificial
  probe
  misc_feature (1)..(25): SEQ ID NO: 439; WAN0249VZ; Start 75; Stop 99
aaggctttcaatatcttatagacac

SEQ ID NO: 263824 - DNA, 25 bp, Artificial
  probe
  misc_feature (1)..(25): SEQ ID NO: 439; WAN0249VZ; Start 127; Stop 151
tagcgtttggagcctttgaaagtag

SEQ ID NO: 263825 - DNA, 25 bp, Artificial
  probe
  misc_feature (1)..(25): SEQ ID NO: 439; WAN0249VZ; Start 95; Stop 119
gacacttagattttagtttctcgct

SEQ ID NO: 263826 - DNA, 25 bp, Artificial
  probe
  misc_feature (1)..(25): SEQ ID NO: 439; WAN0249VZ; Start 94; Stop 118
agacacttagattttagtttctcgc

SEQ ID NO: 263827 - DNA, 25 bp, Artificial
  probe
  misc_feature (1)..(25): SEQ ID NO: 439; WAN0249VZ; Start 125; Stop 149
aatagcgtttggagcctttgaaagt

SEQ ID NO: 263828 - DNA, 25 bp, Artificial
  probe
  misc_feature (1)..(25): SEQ ID NO: 439; WAN0249VZ; Start 96; Stop 120
acacttagattttagtttctcgctt

SEQ ID NO: 263829 - DNA, 25 bp, Artificial
  probe
  misc_feature (1)..(25): SEQ ID NO: 439; WAN0249VZ; Start 117; Stop 141
gcttatagaatagcgtttggagcct

SEQ ID NO: 263830 - DNA, 25 bp, Artificial
  probe
  misc_feature (1)..(25): SEQ ID NO: 439; WAN0249VZ; Start 49; Stop 73
acttctttagtatacactttaccga

SEQ ID NO: 263831 - DNA, 25 bp, Artificial
  probe
  misc_feature (1)..(25): SEQ ID NO: 439; WAN0249VZ; Start 74; Stop 98
aaaggctttcaatatcttatagaca

SEQ ID NO: 263832 - DNA, 25 bp, Artificial
  probe
  misc_feature (1)..(25): SEQ ID NO: 439; WAN0249VZ; Start 129; Stop 153
gcgtttggagcctttgaaagtagtt

SEQ ID NO: 263833 - DNA, 25 bp, Artificial
  probe
  misc_feature (1)..(25): SEQ ID NO: 439; WAN0249VZ; Start 106; Stop 130
tttagtttctcgcttatagaatagc

SEQ ID NO: 263834 - DNA, 25 bp, Artificial
  probe
  misc_feature (1)..(25): SEQ ID NO: 439; WAN0249VZ; Start 63; Stop 87
cactttaccgaaaaggctttcaata

SEQ ID NO: 263835 - DNA, 25 bp, Artificial
  probe
  misc_feature (1)..(25): SEQ ID NO: 439; WAN0249VZ; Start 59; Stop 83
tatacactttaccgaaaaggctttc

SEQ ID NO: 263836 - DNA, 25 bp, Artificial
  probe
  misc_feature (1)..(25): SEQ ID NO: 439; WAN0249VZ; Start 64; Stop 88
actttaccgaaaaggctttcaatat

SEQ ID NO: 263837 - DNA, 25 bp, Artificial
  probe
  misc_feature (1)..(25): SEQ ID NO: 439; WAN0249VZ; Start 60; Stop 84
atacactttaccgaaaaggctttca

SEQ ID NO: 263838 - DNA, 25 bp, Artificial
  probe
  misc_feature (1)..(25): SEQ ID NO: 439; WAN0249VZ; Start 67; Stop 91
ttaccgaaaaggctttcaatatctt

SEQ ID NO: 263839 - DNA, 25 bp, Artificial
  probe
  misc_feature (1)..(25): SEQ ID NO: 439; WAN0249VZ; Start 66; Stop 90
tttaccgaaaaggctttcaatatct

SEQ ID NO: 263840 - DNA, 25 bp, Artificial
  probe
  misc_feature (1)..(25): SEQ ID NO: 439; WAN0249VZ; Start 97; Stop 121
cacttagattttagtttctcgctta

SEQ ID NO: 263841 - DNA, 25 bp, Artificial
  probe
  misc_feature (1)..(25): SEQ ID NO: 439; WAN0249VZ; Start 61; Stop 85
tacactttaccgaaaaggctttcaa

SEQ ID NO: 263842 - DNA, 25 bp, Artificial
  probe
  misc_feature (1)..(25): SEQ ID NO: 439; WAN0249VZ; Start 69; Stop 93
accgaaaaggctttcaatatcttat

SEQ ID NO: 263843 - DNA, 25 bp, Artificial
  probe
  misc_feature (1)..(25): SEQ ID NO: 439; WAN0249VZ; Start 65; Stop 89
ctttaccgaaaaggctttcaatatc

SEQ ID NO: 263844 - DNA, 25 bp, Artificial
  probe
  misc_feature (1)..(25): SEQ ID NO: 440; WAN0249UU; Start 141; Stop 165
tccgaatacctgaaaccattagatt

SEQ ID NO: 263845 - DNA, 25 bp, Artificial
  probe
  misc_feature (1)..(25): SEQ ID NO: 440; WAN0249UU; Start 142; Stop 166
ccgaatacctgaaaccattagattt

SEQ ID NO: 263846 - DNA, 25 bp, Artificial
  probe
  misc_feature (1)..(25): SEQ ID NO: 440; WAN0249UU; Start 140; Stop 164
ttccgaatacctgaaaccattagat

SEQ ID NO: 263847 - DNA, 25 bp, Artificial
  probe
  misc_feature (1)..(25): SEQ ID NO: 440; WAN0249UU; Start 160; Stop 184
tagatttcaggtgtttctatcacgg

SEQ ID NO: 263848 - DNA, 25 bp, Artificial
  probe
  misc_feature (1)..(25): SEQ ID NO: 440; WAN0249UU; Start 159; Stop 183
ttagatttcaggtgtttctatcacg

SEQ ID NO: 263849 - DNA, 25 bp, Artificial
  probe
  misc_feature (1)..(25): SEQ ID NO: 440; WAN0249UU; Start 255; Stop 279
gtatcaagctatagttaatctacgc

SEQ ID NO: 263850 - DNA, 25 bp, Artificial
  probe
  misc_feature (1)..(25): SEQ ID NO: 440; WAN0249UU; Start 193; Stop 217
ctaggtaagtcctcgcctcactatc

SEQ ID NO: 263851 - DNA, 25 bp, Artificial
  probe
  misc_feature (1)..(25): SEQ ID NO: 440; WAN0249UU; Start 139; Stop 163
tttccgaatacctgaaaccattaga

SEQ ID NO: 263852 - DNA, 25 bp, Artificial
  probe
  misc_feature (1)..(25): SEQ ID NO: 440; WAN0249UU; Start 154; Stop 178
aaccattagatttcaggtgtttcta

SEQ ID NO: 263853 - DNA, 25 bp, Artificial
  probe
  misc_feature (1)..(25): SEQ ID NO: 440; WAN0249UU; Start 63; Stop 87
ttccttaagtgattacggacggtag

SEQ ID NO: 263854 - DNA, 25 bp, Artificial
  probe
  misc_feature (1)..(25): SEQ ID NO: 440; WAN0249UU; Start 155; Stop 179
accattagatttcaggtgtttctat

SEQ ID NO: 263855 - DNA, 25 bp, Artificial
  probe
  misc_feature (1)..(25): SEQ ID NO: 440; WAN0249UU; Start 54; Stop 78
tttgagcctttccttaagtgattac

SEQ ID NO: 263856 - DNA, 25 bp, Artificial
  probe
  misc_feature (1)..(25): SEQ ID NO: 440; WAN0249UU; Start 153; Stop 177
aaaccattagatttcaggtgtttct

SEQ ID NO: 263857 - DNA, 25 bp, Artificial
  probe
  misc_feature (1)..(25): SEQ ID NO: 440; WAN0249UU; Start 55; Stop 79
ttgagcctttccttaagtgattacg

SEQ ID NO: 263858 - DNA, 25 bp, Artificial
  probe
  misc_feature (1)..(25): SEQ ID NO: 440; WAN0249UU; Start 67; Stop 91
ttaagtgattacggacggtagcgac

SEQ ID NO: 263859 - DNA, 25 bp, Artificial
  probe
  misc_feature (1)..(25): SEQ ID NO: 440; WAN0249UU; Start 156; Stop 180
ccattagatttcaggtgtttctatc

SEQ ID NO: 263860 - DNA, 25 bp, Artificial
  probe
  misc_feature (1)..(25): SEQ ID NO: 440; WAN0249UU; Start 143; Stop 167
cgaatacctgaaaccattagatttc

SEQ ID NO: 263861 - DNA, 25 bp, Artificial
  probe
  misc_feature (1)..(25): SEQ ID NO: 440; WAN0249UU; Start 161; Stop 185
agatttcaggtgtttctatcacggc

SEQ ID NO: 263862 - DNA, 25 bp, Artificial
  probe
  misc_feature (1)..(25): SEQ ID NO: 440; WAN0249UU; Start 158; Stop 182
attagatttcaggtgtttctatcac

SEQ ID NO: 263863 - DNA, 25 bp, Artificial
  probe
  misc_feature (1)..(25): SEQ ID NO: 440; WAN0249UU; Start 157; Stop 181
cattagatttcaggtgtttctatca

SEQ ID NO: 263864 - DNA, 25 bp, Artificial
  probe
  misc_feature (1)..(25): SEQ ID NO: 440; WAN0249UU; Start 256; Stop 280
tatcaagctatagttaatctacgct

SEQ ID NO: 263865 - DNA, 25 bp, Artificial
  probe
  misc_feature (1)..(25): SEQ ID NO: 440; WAN0249UU; Start 62; Stop 86
tttccttaagtgattacggacggta

SEQ ID NO: 263866 - DNA, 25 bp, Artificial
  probe
  misc_feature (1)..(25): SEQ ID NO: 440; WAN0249UU; Start 56; Stop 80
tgagcctttccttaagtgattacgg

SEQ ID NO: 263867 - DNA, 25 bp, Artificial
  probe
  misc_feature (1)..(25): SEQ ID NO: 440; WAN0249UU; Start 254; Stop 278
agtatcaagctatagttaatctacg

SEQ ID NO: 263868 - DNA, 25 bp, Artificial
  probe
  misc_feature (1)..(25): SEQ ID NO: 440; WAN0249UU; Start 194; Stop 218
taggtaagtcctcgcctcactatcg

SEQ ID NO: 263869 - DNA, 25 bp, Artificial
  probe
  misc_feature (1)..(25): SEQ ID NO: 440; WAN0249UU; Start 66; Stop 90
cttaagtgattacggacggtagcga

SEQ ID NO: 263870 - DNA, 25 bp, Artificial
  probe
  misc_feature (1)..(25): SEQ ID NO: 440; WAN0249UU; Start 57; Stop 81
gagcctttccttaagtgattacgga

SEQ ID NO: 263871 - DNA, 25 bp, Artificial
  probe
  misc_feature (1)..(25): SEQ ID NO: 440; WAN0249UU; Start 58; Stop 82
agcctttccttaagtgattacggac

SEQ ID NO: 263872 - DNA, 25 bp, Artificial
  probe
  misc_feature (1)..(25): SEQ ID NO: 440; WAN0249UU; Start 74; Stop 98
attacggacggtagcgactttcttc

SEQ ID NO: 263873 - DNA, 25 bp, Artificial
  probe
  misc_feature (1)..(25): SEQ ID NO: 440; WAN0249UU; Start 73; Stop 97
gattacggacggtagcgactttctt

SEQ ID NO: 263874 - DNA, 25 bp, Artificial
  probe
  misc_feature (1)..(25): SEQ ID NO: 440; WAN0249UU; Start 61; Stop 85
ctttccttaagtgattacggacggt

SEQ ID NO: 263875 - DNA, 25 bp, Artificial
  probe
  misc_feature (1)..(25): SEQ ID NO: 440; WAN0249UU; Start 192; Stop 216
gctaggtaagtcctcgcctcactat

SEQ ID NO: 263876 - DNA, 25 bp, Artificial
  probe
  misc_feature (1)..(25): SEQ ID NO: 440; WAN0249UU; Start 64; Stop 88
tccttaagtgattacggacggtagc

SEQ ID NO: 263877 - DNA, 25 bp, Artificial
  probe
  misc_feature (1)..(25): SEQ ID NO: 441; WAN024FB8; Start 58; Stop 82
gagtccctttcattataccacaaac

SEQ ID NO: 263878 - DNA, 25 bp, Artificial
  probe
  misc_feature (1)..(25): SEQ ID NO: 441; WAN024FB8; Start 63; Stop 87
cctttcattataccacaaactagcc

SEQ ID NO: 263879 - DNA, 25 bp, Artificial
  probe
  misc_feature (1)..(25): SEQ ID NO: 441; WAN024FB8; Start 62; Stop 86
ccctttcattataccacaaactagc

SEQ ID NO: 263880 - DNA, 25 bp, Artificial
  probe
  misc_feature (1)..(25): SEQ ID NO: 441; WAN024FB8; Start 65; Stop 89
tttcattataccacaaactagccac

SEQ ID NO: 263881 - DNA, 25 bp, Artificial
  probe
  misc_feature (1)..(25): SEQ ID NO: 441; WAN024FB8; Start 66; Stop 90
ttcattataccacaaactagccacc

SEQ ID NO: 263882 - DNA, 25 bp, Artificial
  probe
  misc_feature (1)..(25): SEQ ID NO: 441; WAN024FB8; Start 60; Stop 84
gtccctttcattataccacaaacta

SEQ ID NO: 263883 - DNA, 25 bp, Artificial
  probe
  misc_feature (1)..(25): SEQ ID NO: 441; WAN024FB8; Start 59; Stop 83
agtccctttcattataccacaaact

SEQ ID NO: 263884 - DNA, 25 bp, Artificial
  probe
  misc_feature (1)..(25): SEQ ID NO: 441; WAN024FB8; Start 57; Stop 81
tgagtccctttcattataccacaaa

SEQ ID NO: 263885 - DNA, 25 bp, Artificial
  probe
  misc_feature (1)..(25): SEQ ID NO: 441; WAN024FB8; Start 56; Stop 80
ttgagtccctttcattataccacaa

SEQ ID NO: 263886 - DNA, 25 bp, Artificial
  probe
  misc_feature (1)..(25): SEQ ID NO: 441; WAN024FB8; Start 55; Stop 79
tttgagtccctttcattataccaca

SEQ ID NO: 263887 - DNA, 25 bp, Artificial
  probe
  misc_feature (1)..(25): SEQ ID NO: 441; WAN024FB8; Start 64; Stop 88
ctttcattataccacaaactagcca

SEQ ID NO: 263888 - DNA, 25 bp, Artificial
  probe
  misc_feature (1)..(25): SEQ ID NO: 441; WAN024FB8; Start 61; Stop 85
tccctttcattataccacaaactag

SEQ ID NO: 263889 - DNA, 25 bp, Artificial
  probe
  misc_feature (1)..(25): SEQ ID NO: 441; WAN024FB8; Start 91; Stop 115
ctgaccagtttgttctacactttca

SEQ ID NO: 263890 - DNA, 25 bp, Artificial
  probe
  misc_feature (1)..(25): SEQ ID NO: 441; WAN024FB8; Start 90; Stop 114
cctgaccagtttgttctacactttc

SEQ ID NO: 263891 - DNA, 25 bp, Artificial
  probe
  misc_feature (1)..(25): SEQ ID NO: 441; WAN024FB8; Start 69; Stop 93
attataccacaaactagccaccctg

SEQ ID NO: 263892 - DNA, 25 bp, Artificial
  probe
  misc_feature (1)..(25): SEQ ID NO: 441; WAN024FB8; Start 68; Stop 92
cattataccacaaactagccaccct

SEQ ID NO: 263893 - DNA, 25 bp, Artificial
  probe
  misc_feature (1)..(25): SEQ ID NO: 441; WAN024FB8; Start 67; Stop 91
tcattataccacaaactagccaccc

SEQ ID NO: 263894 - DNA, 25 bp, Artificial
  probe
  misc_feature (1)..(25): SEQ ID NO: 441; WAN024FB8; Start 70; Stop 94
ttataccacaaactagccaccctga

SEQ ID NO: 263895 - DNA, 25 bp, Artificial
  probe
  misc_feature (1)..(25): SEQ ID NO: 441; WAN024FB8; Start 89; Stop 113
ccctgaccagtttgttctacacttt

SEQ ID NO: 263896 - DNA, 25 bp, Artificial
  probe
  misc_feature (1)..(25): SEQ ID NO: 441; WAN024FB8; Start 54; Stop 78
ttttgagtccctttcattataccac

SEQ ID NO: 263897 - DNA, 25 bp, Artificial
  probe
  misc_feature (1)..(25): SEQ ID NO: 441; WAN024FB8; Start 71; Stop 95
tataccacaaactagccaccctgac

SEQ ID NO: 263898 - DNA, 25 bp, Artificial
  probe
  misc_feature (1)..(25): SEQ ID NO: 441; WAN024FB8; Start 88; Stop 112
accctgaccagtttgttctacactt

SEQ ID NO: 263899 - DNA, 25 bp, Artificial
  probe
  misc_feature (1)..(25): SEQ ID NO: 441; WAN024FB8; Start 87; Stop 111
caccctgaccagtttgttctacact

SEQ ID NO: 263900 - DNA, 25 bp, Artificial
  probe
  misc_feature (1)..(25): SEQ ID NO: 441; WAN024FB8; Start 83; Stop 107
tagccaccctgaccagtttgttcta

SEQ ID NO: 263901 - DNA, 25 bp, Artificial
  probe
  misc_feature (1)..(25): SEQ ID NO: 441; WAN024FB8; Start 15; Stop 39
aattgctaaaagtaaatccatcatt

SEQ ID NO: 263902 - DNA, 25 bp, Artificial
  probe
  misc_feature (1)..(25): SEQ ID NO: 441; WAN024FB8; Start 13; Stop 37
acaattgctaaaagtaaatccatca

SEQ ID NO: 263903 - DNA, 25 bp, Artificial
  probe
  misc_feature (1)..(25): SEQ ID NO: 441; WAN024FB8; Start 17; Stop 41
ttgctaaaagtaaatccatcatttt

SEQ ID NO: 263904 - DNA, 25 bp, Artificial
  probe
  misc_feature (1)..(25): SEQ ID NO: 441; WAN024FB8; Start 16; Stop 40
attgctaaaagtaaatccatcattt

SEQ ID NO: 263905 - DNA, 25 bp, Artificial
  probe
  misc_feature (1)..(25): SEQ ID NO: 441; WAN024FB8; Start 14; Stop 38
caattgctaaaagtaaatccatcat

SEQ ID NO: 263906 - DNA, 25 bp, Artificial
  probe
  misc_feature (1)..(25): SEQ ID NO: 441; WAN024FB8; Start 2; Stop 26
gcacaatcaatacaattgctaaaag

SEQ ID NO: 263907 - DNA, 25 bp, Artificial
  probe
  misc_feature (1)..(25): SEQ ID NO: 441; WAN024FB8; Start 3; Stop 27
cacaatcaatacaattgctaaaagt

SEQ ID NO: 263908 - DNA, 25 bp, Artificial
  probe
  misc_feature (1)..(25): SEQ ID NO: 441; WAN024FB8; Start 12; Stop 36
tacaattgctaaaagtaaatccatc

SEQ ID NO: 263909 - DNA, 25 bp, Artificial
  probe
  misc_feature (1)..(25): SEQ ID NO: 441; WAN024FB8; Start 10; Stop 34
aatacaattgctaaaagtaaatcca

SEQ ID NO: 263910 - DNA, 25 bp, Artificial
  probe
  misc_feature (1)..(25): SEQ ID NO: 442; WAN024AKE; Start 249; Stop 273
gcactctgagaatagatgtcaagta

SEQ ID NO: 263911 - DNA, 25 bp, Artificial
  probe
  misc_feature (1)..(25): SEQ ID NO: 442; WAN024AKE; Start 250; Stop 274
cactctgagaatagatgtcaagtaa

SEQ ID NO: 263912 - DNA, 25 bp, Artificial
  probe
  misc_feature (1)..(25): SEQ ID NO: 442; WAN024AKE; Start 119; Stop 143
taaggcttaacggttatcttctacc

SEQ ID NO: 263913 - DNA, 25 bp, Artificial
  probe
  misc_feature (1)..(25): SEQ ID NO: 442; WAN024AKE; Start 122; Stop 146
ggcttaacggttatcttctacctat

SEQ ID NO: 263914 - DNA, 25 bp, Artificial
  probe
  misc_feature (1)..(25): SEQ ID NO: 442; WAN024AKE; Start 121; Stop 145
aggcttaacggttatcttctaccta

SEQ ID NO: 263915 - DNA, 25 bp, Artificial
  probe
  misc_feature (1)..(25): SEQ ID NO: 442; WAN024AKE; Start 33; Stop 57
aaacttgaacaactaccagaaacac

SEQ ID NO: 263916 - DNA, 25 bp, Artificial
  probe
  misc_feature (1)..(25): SEQ ID NO: 442; WAN024AKE; Start 120; Stop 144
aaggcttaacggttatcttctacct

SEQ ID NO: 263917 - DNA, 25 bp, Artificial
  probe
  misc_feature (1)..(25): SEQ ID NO: 442; WAN024AKE; Start 123; Stop 147
gcttaacggttatcttctacctatc

SEQ ID NO: 263918 - DNA, 25 bp, Artificial
  probe
  misc_feature (1)..(25): SEQ ID NO: 442; WAN024AKE; Start 28; Stop 52
gcaataaacttgaacaactaccaga

SEQ ID NO: 263919 - DNA, 25 bp, Artificial
  probe
  misc_feature (1)..(25): SEQ ID NO: 442; WAN024AKE; Start 32; Stop 56
taaacttgaacaactaccagaaaca

SEQ ID NO: 263920 - DNA, 25 bp, Artificial
  probe
  misc_feature (1)..(25): SEQ ID NO: 442; WAN024AKE; Start 27; Stop 51
agcaataaacttgaacaactaccag

SEQ ID NO: 263921 - DNA, 25 bp, Artificial
  probe
  misc_feature (1)..(25): SEQ ID NO: 442; WAN024AKE; Start 37; Stop 61
ttgaacaactaccagaaacacgaaa

SEQ ID NO: 263922 - DNA, 25 bp, Artificial
  probe
  misc_feature (1)..(25): SEQ ID NO: 442; WAN024AKE; Start 36; Stop 60
cttgaacaactaccagaaacacgaa

SEQ ID NO: 263923 - DNA, 25 bp, Artificial
  probe
  misc_feature (1)..(25): SEQ ID NO: 442; WAN024AKE; Start 251; Stop 275
actctgagaatagatgtcaagtaat

SEQ ID NO: 263924 - DNA, 25 bp, Artificial
  probe
  misc_feature (1)..(25): SEQ ID NO: 442; WAN024AKE; Start 26; Stop 50
tagcaataaacttgaacaactacca

SEQ ID NO: 263925 - DNA, 25 bp, Artificial
  probe
  misc_feature (1)..(25): SEQ ID NO: 442; WAN024AKE; Start 34; Stop 58
aacttgaacaactaccagaaacacg

SEQ ID NO: 263926 - DNA, 25 bp, Artificial
  probe
  misc_feature (1)..(25): SEQ ID NO: 442; WAN024AKE; Start 163; Stop 187
tcagtcgtttatctacctataacct

SEQ ID NO: 263927 - DNA, 25 bp, Artificial
  probe
  misc_feature (1)..(25): SEQ ID NO: 442; WAN024AKE; Start 162; Stop 186
ctcagtcgtttatctacctataacc

SEQ ID NO: 263928 - DNA, 25 bp, Artificial
  probe
  misc_feature (1)..(25): SEQ ID NO: 442; WAN024AKE; Start 161; Stop 185
cctcagtcgtttatctacctataac

SEQ ID NO: 263929 - DNA, 25 bp, Artificial
  probe
  misc_feature (1)..(25): SEQ ID NO: 442; WAN024AKE; Start 160; Stop 184
tcctcagtcgtttatctacctataa

SEQ ID NO: 263930 - DNA, 25 bp, Artificial
  probe
  misc_feature (1)..(25): SEQ ID NO: 442; WAN024AKE; Start 31; Stop 55
ataaacttgaacaactaccagaaac

SEQ ID NO: 263931 - DNA, 25 bp, Artificial
  probe
  misc_feature (1)..(25): SEQ ID NO: 442; WAN024AKE; Start 35; Stop 59
acttgaacaactaccagaaacacga

SEQ ID NO: 263932 - DNA, 25 bp, Artificial
  probe
  misc_feature (1)..(25): SEQ ID NO: 442; WAN024AKE; Start 124; Stop 148
cttaacggttatcttctacctatct

SEQ ID NO: 263933 - DNA, 25 bp, Artificial
  probe
  misc_feature (1)..(25): SEQ ID NO: 442; WAN024AKE; Start 29; Stop 53
caataaacttgaacaactaccagaa

SEQ ID NO: 263934 - DNA, 25 bp, Artificial
  probe
  misc_feature (1)..(25): SEQ ID NO: 442; WAN024AKE; Start 30; Stop 54
aataaacttgaacaactaccagaaa

SEQ ID NO: 263935 - DNA, 25 bp, Artificial
  probe
  misc_feature (1)..(25): SEQ ID NO: 442; WAN024AKE; Start 164; Stop 188
cagtcgtttatctacctataaccta

SEQ ID NO: 263936 - DNA, 25 bp, Artificial
  probe
  misc_feature (1)..(25): SEQ ID NO: 442; WAN024AKE; Start 127; Stop 151
aacggttatcttctacctatctatt

SEQ ID NO: 263937 - DNA, 25 bp, Artificial
  probe
  misc_feature (1)..(25): SEQ ID NO: 442; WAN024AKE; Start 52; Stop 76
aaacacgaaaacaggcataattgat

SEQ ID NO: 263938 - DNA, 25 bp, Artificial
  probe
  misc_feature (1)..(25): SEQ ID NO: 442; WAN024AKE; Start 39; Stop 63
gaacaactaccagaaacacgaaaac

SEQ ID NO: 263939 - DNA, 25 bp, Artificial
  probe
  misc_feature (1)..(25): SEQ ID NO: 442; WAN024AKE; Start 51; Stop 75
gaaacacgaaaacaggcataattga

SEQ ID NO: 263940 - DNA, 25 bp, Artificial
  probe
  misc_feature (1)..(25): SEQ ID NO: 442; WAN024AKE; Start 50; Stop 74
agaaacacgaaaacaggcataattg

SEQ ID NO: 263941 - DNA, 25 bp, Artificial
  probe
  misc_feature (1)..(25): SEQ ID NO: 442; WAN024AKE; Start 49; Stop 73
cagaaacacgaaaacaggcataatt

SEQ ID NO: 263942 - DNA, 25 bp, Artificial
  probe
  misc_feature (1)..(25): SEQ ID NO: 442; WAN024AKE; Start 38; Stop 62
tgaacaactaccagaaacacgaaaa

SEQ ID NO: 263943 - DNA, 25 bp, Artificial
  probe
  misc_feature (1)..(25): SEQ ID NO: 443; WAN024A6O; Start 22; Stop 46
aagcggtaagtaaaatgaaagtgat

SEQ ID NO: 263944 - DNA, 25 bp, Artificial
  probe
  misc_feature (1)..(25): SEQ ID NO: 443; WAN024A6O; Start 21; Stop 45
taagcggtaagtaaaatgaaagtga

SEQ ID NO: 263945 - DNA, 25 bp, Artificial
  probe
  misc_feature (1)..(25): SEQ ID NO: 443; WAN024A6O; Start 23; Stop 47
agcggtaagtaaaatgaaagtgata

SEQ ID NO: 263946 - DNA, 25 bp, Artificial
  probe
  misc_feature (1)..(25): SEQ ID NO: 443; WAN024A6O; Start 24; Stop 48
gcggtaagtaaaatgaaagtgataa

SEQ ID NO: 263947 - DNA, 25 bp, Artificial
  probe
  misc_feature (1)..(25): SEQ ID NO: 443; WAN024A6O; Start 20; Stop 44
ataagcggtaagtaaaatgaaagtg

SEQ ID NO: 263948 - DNA, 25 bp, Artificial
  probe
  misc_feature (1)..(25): SEQ ID NO: 443; WAN024A6O; Start 19; Stop 43
aataagcggtaagtaaaatgaaagt

SEQ ID NO: 263949 - DNA, 25 bp, Artificial
  probe
  misc_feature (1)..(25): SEQ ID NO: 443; WAN024A6O; Start 18; Stop 42
aaataagcggtaagtaaaatgaaag

SEQ ID NO: 263950 - DNA, 25 bp, Artificial
  probe
  misc_feature (1)..(25): SEQ ID NO: 443; WAN024A6O; Start 133; Stop 157
acagagatatttacgaacgtttaga

SEQ ID NO: 263951 - DNA, 25 bp, Artificial
  probe
  misc_feature (1)..(25): SEQ ID NO: 443; WAN024A6O; Start 17; Stop 41
aaaataagcggtaagtaaaatgaaa

SEQ ID NO: 263952 - DNA, 25 bp, Artificial
  probe
  misc_feature (1)..(25): SEQ ID NO: 443; WAN024A6O; Start 134; Stop 158
cagagatatttacgaacgtttagag

SEQ ID NO: 263953 - DNA, 25 bp, Artificial
  probe
  misc_feature (1)..(25): SEQ ID NO: 443; WAN024A6O; Start 25; Stop 49
cggtaagtaaaatgaaagtgataaa

SEQ ID NO: 263954 - DNA, 25 bp, Artificial
  probe
  misc_feature (1)..(25): SEQ ID NO: 443; WAN024A6O; Start 132; Stop 156
aacagagatatttacgaacgtttag

SEQ ID NO: 263955 - DNA, 25 bp, Artificial
  probe
  misc_feature (1)..(25): SEQ ID NO: 443; WAN024A6O; Start 204; Stop 228
catataagaggttagaggaattttg

SEQ ID NO: 263956 - DNA, 25 bp, Artificial
  probe
  misc_feature (1)..(25): SEQ ID NO: 443; WAN024A6O; Start 205; Stop 229
atataagaggttagaggaattttga

SEQ ID NO: 263957 - DNA, 25 bp, Artificial
  probe
  misc_feature (1)..(25): SEQ ID NO: 443; WAN024A6O; Start 203; Stop 227
tcatataagaggttagaggaatttt

SEQ ID NO: 263958 - DNA, 25 bp, Artificial
  probe
  misc_feature (1)..(25): SEQ ID NO: 443; WAN024A6O; Start 131; Stop 155
aaacagagatatttacgaacgttta

SEQ ID NO: 263959 - DNA, 25 bp, Artificial
  probe
  misc_feature (1)..(25): SEQ ID NO: 443; WAN024A6O; Start 130; Stop 154
aaaacagagatatttacgaacgttt

SEQ ID NO: 263960 - DNA, 25 bp, Artificial
  probe
  misc_feature (1)..(25): SEQ ID NO: 444; WAN024ADD; Start 13; Stop 37
ggactgaagaagaccaatagattat

SEQ ID NO: 263961 - DNA, 25 bp, Artificial
  probe
  misc_feature (1)..(25): SEQ ID NO: 444; WAN024ADD; Start 11; Stop 35
ctggactgaagaagaccaatagatt

SEQ ID NO: 263962 - DNA, 25 bp, Artificial
  probe
  misc_feature (1)..(25): SEQ ID NO: 444; WAN024ADD; Start 10; Stop 34
actggactgaagaagaccaatagat

SEQ ID NO: 263963 - DNA, 25 bp, Artificial
  probe
  misc_feature (1)..(25): SEQ ID NO: 444; WAN024ADD; Start 7; Stop 31
tacactggactgaagaagaccaata

SEQ ID NO: 263964 - DNA, 25 bp, Artificial
  probe
  misc_feature (1)..(25): SEQ ID NO: 444; WAN024ADD; Start 12; Stop 36
tggactgaagaagaccaatagatta

SEQ ID NO: 263965 - DNA, 25 bp, Artificial
  probe
  misc_feature (1)..(25): SEQ ID NO: 444; WAN024ADD; Start 6; Stop 30
atacactggactgaagaagaccaat

SEQ ID NO: 263966 - DNA, 25 bp, Artificial
  probe
  misc_feature (1)..(25): SEQ ID NO: 444; WAN024ADD; Start 3; Stop 27
cagatacactggactgaagaagacc

SEQ ID NO: 263967 - DNA, 25 bp, Artificial
  probe
  misc_feature (1)..(25): SEQ ID NO: 444; WAN024ADD; Start 9; Stop 33
cactggactgaagaagaccaataga

SEQ ID NO: 263968 - DNA, 25 bp, Artificial
  probe
  misc_feature (1)..(25): SEQ ID NO: 444; WAN024ADD; Start 8; Stop 32
acactggactgaagaagaccaatag

SEQ ID NO: 263969 - DNA, 25 bp, Artificial
  probe
  misc_feature (1)..(25): SEQ ID NO: 444; WAN024ADD; Start 5; Stop 29
gatacactggactgaagaagaccaa

SEQ ID NO: 263970 - DNA, 25 bp, Artificial
  probe
  misc_feature (1)..(25): SEQ ID NO: 444; WAN024ADD; Start 2; Stop 26
gcagatacactggactgaagaagac

SEQ ID NO: 263971 - DNA, 25 bp, Artificial
  probe
  misc_feature (1)..(25): SEQ ID NO: 444; WAN024ADD; Start 1; Stop 25
agcagatacactggactgaagaaga

SEQ ID NO: 263972 - DNA, 25 bp, Artificial
  probe
  misc_feature (1)..(25): SEQ ID NO: 444; WAN024ADD; Start 4; Stop 28
agatacactggactgaagaagacca

SEQ ID NO: 263973 - DNA, 25 bp, Artificial
  probe
  misc_feature (1)..(25): SEQ ID NO: 444; WAN024ADD; Start 14; Stop 38
gactgaagaagaccaatagattata

SEQ ID NO: 263974 - DNA, 25 bp, Artificial
  probe
  misc_feature (1)..(25): SEQ ID NO: 444; WAN024ADD; Start 153; Stop 177
tcactaatctacaacatttatcctt

SEQ ID NO: 263975 - DNA, 25 bp, Artificial
  probe
  misc_feature (1)..(25): SEQ ID NO: 444; WAN024ADD; Start 152; Stop 176
ttcactaatctacaacatttatcct

SEQ ID NO: 263976 - DNA, 25 bp, Artificial
  probe
  misc_feature (1)..(25): SEQ ID NO: 444; WAN024ADD; Start 15; Stop 39
actgaagaagaccaatagattataa

SEQ ID NO: 263977 - DNA, 25 bp, Artificial
  probe
  misc_feature (1)..(25): SEQ ID NO: 444; WAN024ADD; Start 154; Stop 178
cactaatctacaacatttatccttc

SEQ ID NO: 263978 - DNA, 25 bp, Artificial
  probe
  misc_feature (1)..(25): SEQ ID NO: 444; WAN024ADD; Start 151; Stop 175
tttcactaatctacaacatttatcc

SEQ ID NO: 263979 - DNA, 25 bp, Artificial
  probe
  misc_feature (1)..(25): SEQ ID NO: 444; WAN024ADD; Start 44; Stop 68
actaataaaacaacttttgctgatt

SEQ ID NO: 263980 - DNA, 25 bp, Artificial
  probe
  misc_feature (1)..(25): SEQ ID NO: 444; WAN024ADD; Start 43; Stop 67
aactaataaaacaacttttgctgat

SEQ ID NO: 263981 - DNA, 25 bp, Artificial
  probe
  misc_feature (1)..(25): SEQ ID NO: 444; WAN024ADD; Start 42; Stop 66
taactaataaaacaacttttgctga

SEQ ID NO: 263982 - DNA, 25 bp, Artificial
  probe
  misc_feature (1)..(25): SEQ ID NO: 444; WAN024ADD; Start 40; Stop 64
actaactaataaaacaacttttgct

SEQ ID NO: 263983 - DNA, 25 bp, Artificial
  probe
  misc_feature (1)..(25): SEQ ID NO: 444; WAN024ADD; Start 41; Stop 65
ctaactaataaaacaacttttgctg

SEQ ID NO: 263984 - DNA, 25 bp, Artificial
  probe
  misc_feature (1)..(25): SEQ ID NO: 444; WAN024ADD; Start 45; Stop 69
ctaataaaacaacttttgctgattt

SEQ ID NO: 263985 - DNA, 25 bp, Artificial
  probe
  misc_feature (1)..(25): SEQ ID NO: 444; WAN024ADD; Start 39; Stop 63
aactaactaataaaacaacttttgc

SEQ ID NO: 263986 - DNA, 25 bp, Artificial
  probe
  misc_feature (1)..(25): SEQ ID NO: 445; WAN0249O8; Start 12; Stop 36
ctaacgtggatttgagtagaatgac

SEQ ID NO: 263987 - DNA, 25 bp, Artificial
  probe
  misc_feature (1)..(25): SEQ ID NO: 445; WAN0249O8; Start 13; Stop 37
taacgtggatttgagtagaatgact

SEQ ID NO: 263988 - DNA, 25 bp, Artificial
  probe
  misc_feature (1)..(25): SEQ ID NO: 445; WAN0249O8; Start 7; Stop 31
cctttctaacgtggatttgagtaga

SEQ ID NO: 263989 - DNA, 25 bp, Artificial
  probe
  misc_feature (1)..(25): SEQ ID NO: 445; WAN0249O8; Start 6; Stop 30
tcctttctaacgtggatttgagtag

SEQ ID NO: 263990 - DNA, 25 bp, Artificial
  probe
  misc_feature (1)..(25): SEQ ID NO: 445; WAN0249O8; Start 11; Stop 35
tctaacgtggatttgagtagaatga

SEQ ID NO: 263991 - DNA, 25 bp, Artificial
  probe
  misc_feature (1)..(25): SEQ ID NO: 445; WAN0249O8; Start 5; Stop 29
gtcctttctaacgtggatttgagta

SEQ ID NO: 263992 - DNA, 25 bp, Artificial
  probe
  misc_feature (1)..(25): SEQ ID NO: 445; WAN0249O8; Start 3; Stop 27
cagtcctttctaacgtggatttgag

SEQ ID NO: 263993 - DNA, 25 bp, Artificial
  probe
  misc_feature (1)..(25): SEQ ID NO: 445; WAN0249O8; Start 4; Stop 28
agtcctttctaacgtggatttgagt

SEQ ID NO: 263994 - DNA, 25 bp, Artificial
  probe
  misc_feature (1)..(25): SEQ ID NO: 445; WAN0249O8; Start 2; Stop 26
gcagtcctttctaacgtggatttga

SEQ ID NO: 263995 - DNA, 25 bp, Artificial
  probe
  misc_feature (1)..(25): SEQ ID NO: 445; WAN0249O8; Start 1; Stop 25
agcagtcctttctaacgtggatttg

SEQ ID NO: 263996 - DNA, 25 bp, Artificial
  probe
  misc_feature (1)..(25): SEQ ID NO: 445; WAN0249O8; Start 14; Stop 38
aacgtggatttgagtagaatgactc

SEQ ID NO: 263997 - DNA, 25 bp, Artificial
  probe
  misc_feature (1)..(25): SEQ ID NO: 445; WAN0249O8; Start 10; Stop 34
ttctaacgtggatttgagtagaatg

SEQ ID NO: 263998 - DNA, 25 bp, Artificial
  probe
  misc_feature (1)..(25): SEQ ID NO: 445; WAN0249O8; Start 8; Stop 32
ctttctaacgtggatttgagtagaa

SEQ ID NO: 263999 - DNA, 25 bp, Artificial
  probe
  misc_feature (1)..(25): SEQ ID NO: 445; WAN0249O8; Start 9; Stop 33
tttctaacgtggatttgagtagaat

SEQ ID NO: 264000 - DNA, 25 bp, Artificial
  probe
  misc_feature (1)..(25): SEQ ID NO: 446; WAN024CDM; Start 283; Stop 307
atcaccaatcagaacgatagaactc

SEQ ID NO: 264001 - DNA, 25 bp, Artificial
  probe
  misc_feature (1)..(25): SEQ ID NO: 446; WAN024CDM; Start 746; Stop 770
acatctcaagcaactatggttctat

SEQ ID NO: 264002 - DNA, 25 bp, Artificial
  probe
  misc_feature (1)..(25): SEQ ID NO: 446; WAN024CDM; Start 751; Stop 775
tcaagcaactatggttctatcttcc

SEQ ID NO: 264003 - DNA, 25 bp, Artificial
  probe
  misc_feature (1)..(25): SEQ ID NO: 446; WAN024CDM; Start 745; Stop 769
gacatctcaagcaactatggttcta

SEQ ID NO: 264004 - DNA, 25 bp, Artificial
  probe
  misc_feature (1)..(25): SEQ ID NO: 446; WAN024CDM; Start 749; Stop 773
tctcaagcaactatggttctatctt

SEQ ID NO: 264005 - DNA, 25 bp, Artificial
  probe
  misc_feature (1)..(25): SEQ ID NO: 446; WAN024CDM; Start 750; Stop 774
ctcaagcaactatggttctatcttc

SEQ ID NO: 264006 - DNA, 25 bp, Artificial
  probe
  misc_feature (1)..(25): SEQ ID NO: 446; WAN024CDM; Start 748; Stop 772
atctcaagcaactatggttctatct

SEQ ID NO: 264007 - DNA, 25 bp, Artificial
  probe
  misc_feature (1)..(25): SEQ ID NO: 446; WAN024CDM; Start 747; Stop 771
catctcaagcaactatggttctatc

SEQ ID NO: 264008 - DNA, 25 bp, Artificial
  probe
  misc_feature (1)..(25): SEQ ID NO: 446; WAN024CDM; Start 698; Stop 722
atctcagaatcatcctagaccagaa

SEQ ID NO: 264009 - DNA, 25 bp, Artificial
  probe
  misc_feature (1)..(25): SEQ ID NO: 446; WAN024CDM; Start 284; Stop 308
tcaccaatcagaacgatagaactct

SEQ ID NO: 264010 - DNA, 25 bp, Artificial
  probe
  misc_feature (1)..(25): SEQ ID NO: 446; WAN024CDM; Start 797; Stop 821
aatcaagaggtacggaattaagcaa

SEQ ID NO: 264011 - DNA, 25 bp, Artificial
  probe
  misc_feature (1)..(25): SEQ ID NO: 446; WAN024CDM; Start 697; Stop 721
tatctcagaatcatcctagaccaga

SEQ ID NO: 264012 - DNA, 25 bp, Artificial
  probe
  misc_feature (1)..(25): SEQ ID NO: 446; WAN024CDM; Start 794; Stop 818
ctgaatcaagaggtacggaattaag

SEQ ID NO: 264013 - DNA, 25 bp, Artificial
  probe
  misc_feature (1)..(25): SEQ ID NO: 446; WAN024CDM; Start 623; Stop 647
tagagtcaacagagaatcacttcca

SEQ ID NO: 264014 - DNA, 25 bp, Artificial
  probe
  misc_feature (1)..(25): SEQ ID NO: 446; WAN024CDM; Start 598; Stop 622
gatacagttcttacagatagtcagc

SEQ ID NO: 264015 - DNA, 25 bp, Artificial
  probe
  misc_feature (1)..(25): SEQ ID NO: 446; WAN024CDM; Start 796; Stop 820
gaatcaagaggtacggaattaagca

SEQ ID NO: 264016 - DNA, 25 bp, Artificial
  probe
  misc_feature (1)..(25): SEQ ID NO: 446; WAN024CDM; Start 795; Stop 819
tgaatcaagaggtacggaattaagc

SEQ ID NO: 264017 - DNA, 25 bp, Artificial
  probe
  misc_feature (1)..(25): SEQ ID NO: 446; WAN024CDM; Start 622; Stop 646
ctagagtcaacagagaatcacttcc

SEQ ID NO: 264018 - DNA, 25 bp, Artificial
  probe
  misc_feature (1)..(25): SEQ ID NO: 446; WAN024CDM; Start 798; Stop 822
atcaagaggtacggaattaagcaac

SEQ ID NO: 264019 - DNA, 25 bp, Artificial
  probe
  misc_feature (1)..(25): SEQ ID NO: 446; WAN024CDM; Start 696; Stop 720
ttatctcagaatcatcctagaccag

SEQ ID NO: 264020 - DNA, 25 bp, Artificial
  probe
  misc_feature (1)..(25): SEQ ID NO: 446; WAN024CDM; Start 883; Stop 907
attgatctaatatccacaccaagca

SEQ ID NO: 264021 - DNA, 25 bp, Artificial
  probe
  misc_feature (1)..(25): SEQ ID NO: 446; WAN024CDM; Start 282; Stop 306
tatcaccaatcagaacgatagaact

SEQ ID NO: 264022 - DNA, 25 bp, Artificial
  probe
  misc_feature (1)..(25): SEQ ID NO: 446; WAN024CDM; Start 621; Stop 645
gctagagtcaacagagaatcacttc

SEQ ID NO: 264023 - DNA, 25 bp, Artificial
  probe
  misc_feature (1)..(25): SEQ ID NO: 446; WAN024CDM; Start 884; Stop 908
ttgatctaatatccacaccaagcag

SEQ ID NO: 264024 - DNA, 25 bp, Artificial
  probe
  misc_feature (1)..(25): SEQ ID NO: 446; WAN024CDM; Start 279; Stop 303
tcttatcaccaatcagaacgataga

SEQ ID NO: 264025 - DNA, 25 bp, Artificial
  probe
  misc_feature (1)..(25): SEQ ID NO: 446; WAN024CDM; Start 886; Stop 910
gatctaatatccacaccaagcagac

SEQ ID NO: 264026 - DNA, 25 bp, Artificial
  probe
  misc_feature (1)..(25): SEQ ID NO: 446; WAN024CDM; Start 281; Stop 305
ttatcaccaatcagaacgatagaac

SEQ ID NO: 264027 - DNA, 25 bp, Artificial
  probe
  misc_feature (1)..(25): SEQ ID NO: 446; WAN024CDM; Start 885; Stop 909
tgatctaatatccacaccaagcaga

SEQ ID NO: 264028 - DNA, 25 bp, Artificial
  probe
  misc_feature (1)..(25): SEQ ID NO: 446; WAN024CDM; Start 695; Stop 719
attatctcagaatcatcctagacca

SEQ ID NO: 264029 - DNA, 25 bp, Artificial
  probe
  misc_feature (1)..(25): SEQ ID NO: 446; WAN024CDM; Start 301; Stop 325
agaactctgagtctcactgataaga

SEQ ID NO: 264030 - DNA, 25 bp, Artificial
  probe
  misc_feature (1)..(25): SEQ ID NO: 446; WAN024CDM; Start 302; Stop 326
gaactctgagtctcactgataagaa

SEQ ID NO: 264031 - DNA, 25 bp, Artificial
  probe
  misc_feature (1)..(25): SEQ ID NO: 446; WAN024CDM; Start 280; Stop 304
cttatcaccaatcagaacgatagaa

SEQ ID NO: 264032 - DNA, 25 bp, Artificial
  probe
  misc_feature (1)..(25): SEQ ID NO: 446; WAN024CDM; Start 609; Stop 633
tacagatagtcagctagagtcaaca

SEQ ID NO: 264033 - DNA, 25 bp, Artificial
  probe
  misc_feature (1)..(25): SEQ ID NO: 447; WAN0249V9; Start 25; Stop 49
cgttaccacaactgtagcatatcta

SEQ ID NO: 264034 - DNA, 25 bp, Artificial
  probe
  misc_feature (1)..(25): SEQ ID NO: 447; WAN0249V9; Start 21; Stop 45
taatcgttaccacaactgtagcata

SEQ ID NO: 264035 - DNA, 25 bp, Artificial
  probe
  misc_feature (1)..(25): SEQ ID NO: 447; WAN0249V9; Start 22; Stop 46
aatcgttaccacaactgtagcatat

SEQ ID NO: 264036 - DNA, 25 bp, Artificial
  probe
  misc_feature (1)..(25): SEQ ID NO: 447; WAN0249V9; Start 23; Stop 47
atcgttaccacaactgtagcatatc

SEQ ID NO: 264037 - DNA, 25 bp, Artificial
  probe
  misc_feature (1)..(25): SEQ ID NO: 447; WAN0249V9; Start 24; Stop 48
tcgttaccacaactgtagcatatct

SEQ ID NO: 264038 - DNA, 25 bp, Artificial
  probe
  misc_feature (1)..(25): SEQ ID NO: 447; WAN0249V9; Start 29; Stop 53
accacaactgtagcatatctatgta

SEQ ID NO: 264039 - DNA, 25 bp, Artificial
  probe
  misc_feature (1)..(25): SEQ ID NO: 447; WAN0249V9; Start 28; Stop 52
taccacaactgtagcatatctatgt

SEQ ID NO: 264040 - DNA, 25 bp, Artificial
  probe
  misc_feature (1)..(25): SEQ ID NO: 447; WAN0249V9; Start 27; Stop 51
ttaccacaactgtagcatatctatg

SEQ ID NO: 264041 - DNA, 25 bp, Artificial
  probe
  misc_feature (1)..(25): SEQ ID NO: 447; WAN0249V9; Start 26; Stop 50
gttaccacaactgtagcatatctat

SEQ ID NO: 264042 - DNA, 25 bp, Artificial
  probe
  misc_feature (1)..(25): SEQ ID NO: 447; WAN0249V9; Start 30; Stop 54
ccacaactgtagcatatctatgtaa

SEQ ID NO: 264043 - DNA, 25 bp, Artificial
  probe
  misc_feature (1)..(25): SEQ ID NO: 447; WAN0249V9; Start 20; Stop 44
gtaatcgttaccacaactgtagcat

SEQ ID NO: 264044 - DNA, 25 bp, Artificial
  probe
  misc_feature (1)..(25): SEQ ID NO: 447; WAN0249V9; Start 19; Stop 43
tgtaatcgttaccacaactgtagca

SEQ ID NO: 264045 - DNA, 25 bp, Artificial
  probe
  misc_feature (1)..(25): SEQ ID NO: 447; WAN0249V9; Start 31; Stop 55
cacaactgtagcatatctatgtaat

SEQ ID NO: 264046 - DNA, 25 bp, Artificial
  probe
  misc_feature (1)..(25): SEQ ID NO: 447; WAN0249V9; Start 33; Stop 57
caactgtagcatatctatgtaatca

SEQ ID NO: 264047 - DNA, 25 bp, Artificial
  probe
  misc_feature (1)..(25): SEQ ID NO: 447; WAN0249V9; Start 18; Stop 42
ttgtaatcgttaccacaactgtagc

SEQ ID NO: 264048 - DNA, 25 bp, Artificial
  probe
  misc_feature (1)..(25): SEQ ID NO: 447; WAN0249V9; Start 32; Stop 56
acaactgtagcatatctatgtaatc

SEQ ID NO: 264049 - DNA, 25 bp, Artificial
  probe
  misc_feature (1)..(25): SEQ ID NO: 447; WAN0249V9; Start 94; Stop 118
attctttacttttaggatgatgggc

SEQ ID NO: 264050 - DNA, 25 bp, Artificial
  probe
  misc_feature (1)..(25): SEQ ID NO: 447; WAN0249V9; Start 34; Stop 58
aactgtagcatatctatgtaatcaa

SEQ ID NO: 264051 - DNA, 25 bp, Artificial
  probe
  misc_feature (1)..(25): SEQ ID NO: 447; WAN0249V9; Start 48; Stop 72
tatgtaatcaatgcaagaaagaagg

SEQ ID NO: 264052 - DNA, 25 bp, Artificial
  probe
  misc_feature (1)..(25): SEQ ID NO: 447; WAN0249V9; Start 35; Stop 59
actgtagcatatctatgtaatcaat

SEQ ID NO: 264053 - DNA, 25 bp, Artificial
  probe
  misc_feature (1)..(25): SEQ ID NO: 447; WAN0249V9; Start 17; Stop 41
tttgtaatcgttaccacaactgtag

SEQ ID NO: 264054 - DNA, 25 bp, Artificial
  probe
  misc_feature (1)..(25): SEQ ID NO: 447; WAN0249V9; Start 4; Stop 28
atgctccttttattttgtaatcgtt

SEQ ID NO: 264055 - DNA, 25 bp, Artificial
  probe
  misc_feature (1)..(25): SEQ ID NO: 447; WAN0249V9; Start 36; Stop 60
ctgtagcatatctatgtaatcaatg

SEQ ID NO: 264056 - DNA, 25 bp, Artificial
  probe
  misc_feature (1)..(25): SEQ ID NO: 447; WAN0249V9; Start 3; Stop 27
catgctccttttattttgtaatcgt

SEQ ID NO: 264057 - DNA, 25 bp, Artificial
  probe
  misc_feature (1)..(25): SEQ ID NO: 447; WAN0249V9; Start 93; Stop 117
gattctttacttttaggatgatggg

SEQ ID NO: 264058 - DNA, 25 bp, Artificial
  probe
  misc_feature (1)..(25): SEQ ID NO: 447; WAN0249V9; Start 5; Stop 29
tgctccttttattttgtaatcgtta

SEQ ID NO: 264059 - DNA, 25 bp, Artificial
  probe
  misc_feature (1)..(25): SEQ ID NO: 447; WAN0249V9; Start 46; Stop 70
tctatgtaatcaatgcaagaaagaa

SEQ ID NO: 264060 - DNA, 25 bp, Artificial
  probe
  misc_feature (1)..(25): SEQ ID NO: 447; WAN0249V9; Start 47; Stop 71
ctatgtaatcaatgcaagaaagaag

SEQ ID NO: 264061 - DNA, 25 bp, Artificial
  probe
  misc_feature (1)..(25): SEQ ID NO: 447; WAN0249V9; Start 45; Stop 69
atctatgtaatcaatgcaagaaaga

SEQ ID NO: 264062 - DNA, 25 bp, Artificial
  probe
  misc_feature (1)..(25): SEQ ID NO: 447; WAN0249V9; Start 92; Stop 116
agattctttacttttaggatgatgg

SEQ ID NO: 264063 - DNA, 25 bp, Artificial
  probe
  misc_feature (1)..(25): SEQ ID NO: 447; WAN0249V9; Start 42; Stop 66
catatctatgtaatcaatgcaagaa

SEQ ID NO: 264064 - DNA, 25 bp, Artificial
  probe
  misc_feature (1)..(25): SEQ ID NO: 447; WAN0249V9; Start 6; Stop 30
gctccttttattttgtaatcgttac

SEQ ID NO: 264065 - DNA, 25 bp, Artificial
  probe
  misc_feature (1)..(25): SEQ ID NO: 447; WAN0249V9; Start 9; Stop 33
ccttttattttgtaatcgttaccac

SEQ ID NO: 264066 - DNA, 25 bp, Artificial
  probe
  misc_feature (1)..(25): SEQ ID NO: 448; WAN024A84; Start 102; Stop 126
cgatttgaatacgtgaatacagttt

SEQ ID NO: 264067 - DNA, 25 bp, Artificial
  probe
  misc_feature (1)..(25): SEQ ID NO: 448; WAN024A84; Start 101; Stop 125
acgatttgaatacgtgaatacagtt

SEQ ID NO: 264068 - DNA, 25 bp, Artificial
  probe
  misc_feature (1)..(25): SEQ ID NO: 448; WAN024A84; Start 100; Stop 124
tacgatttgaatacgtgaatacagt

SEQ ID NO: 264069 - DNA, 25 bp, Artificial
  probe
  misc_feature (1)..(25): SEQ ID NO: 448; WAN024A84; Start 99; Stop 123
atacgatttgaatacgtgaatacag

SEQ ID NO: 264070 - DNA, 25 bp, Artificial
  probe
  misc_feature (1)..(25): SEQ ID NO: 448; WAN024A84; Start 103; Stop 127
gatttgaatacgtgaatacagttta

SEQ ID NO: 264071 - DNA, 25 bp, Artificial
  probe
  misc_feature (1)..(25): SEQ ID NO: 448; WAN024A84; Start 90; Stop 114
cgactatatatacgatttgaatacg

SEQ ID NO: 264072 - DNA, 25 bp, Artificial
  probe
  misc_feature (1)..(25): SEQ ID NO: 448; WAN024A84; Start 98; Stop 122
tatacgatttgaatacgtgaataca

SEQ ID NO: 264073 - DNA, 25 bp, Artificial
  probe
  misc_feature (1)..(25): SEQ ID NO: 448; WAN024A84; Start 104; Stop 128
atttgaatacgtgaatacagtttat

SEQ ID NO: 264074 - DNA, 25 bp, Artificial
  probe
  misc_feature (1)..(25): SEQ ID NO: 448; WAN024A84; Start 111; Stop 135
tacgtgaatacagtttataaagact

SEQ ID NO: 264075 - DNA, 25 bp, Artificial
  probe
  misc_feature (1)..(25): SEQ ID NO: 448; WAN024A84; Start 16; Stop 40
ttttactgcctctattatagcaaaa

SEQ ID NO: 264076 - DNA, 25 bp, Artificial
  probe
  misc_feature (1)..(25): SEQ ID NO: 448; WAN024A84; Start 113; Stop 137
cgtgaatacagtttataaagactgg

SEQ ID NO: 264077 - DNA, 25 bp, Artificial
  probe
  misc_feature (1)..(25): SEQ ID NO: 448; WAN024A84; Start 110; Stop 134
atacgtgaatacagtttataaagac

SEQ ID NO: 264078 - DNA, 25 bp, Artificial
  probe
  misc_feature (1)..(25): SEQ ID NO: 448; WAN024A84; Start 97; Stop 121
atatacgatttgaatacgtgaatac

SEQ ID NO: 264079 - DNA, 25 bp, Artificial
  probe
  misc_feature (1)..(25): SEQ ID NO: 448; WAN024A84; Start 112; Stop 136
acgtgaatacagtttataaagactg

SEQ ID NO: 264080 - DNA, 25 bp, Artificial
  probe
  misc_feature (1)..(25): SEQ ID NO: 449; WAN024ASI; Start 71; Stop 95
ggtcttcttaacttatgaacttagt

SEQ ID NO: 264081 - DNA, 25 bp, Artificial
  probe
  misc_feature (1)..(25): SEQ ID NO: 449; WAN024ASI; Start 96; Stop 120
gtacactccctagcttaaagtttcc

SEQ ID NO: 264082 - DNA, 25 bp, Artificial
  probe
  misc_feature (1)..(25): SEQ ID NO: 449; WAN024ASI; Start 70; Stop 94
aggtcttcttaacttatgaacttag

SEQ ID NO: 264083 - DNA, 25 bp, Artificial
  probe
  misc_feature (1)..(25): SEQ ID NO: 449; WAN024ASI; Start 55; Stop 79
taggagtttaagttaaggtcttctt

SEQ ID NO: 264084 - DNA, 25 bp, Artificial
  probe
  misc_feature (1)..(25): SEQ ID NO: 449; WAN024ASI; Start 54; Stop 78
ttaggagtttaagttaaggtcttct

SEQ ID NO: 264085 - DNA, 25 bp, Artificial
  probe
  misc_feature (1)..(25): SEQ ID NO: 449; WAN024ASI; Start 69; Stop 93
aaggtcttcttaacttatgaactta

SEQ ID NO: 264086 - DNA, 25 bp, Artificial
  probe
  misc_feature (1)..(25): SEQ ID NO: 449; WAN024ASI; Start 56; Stop 80
aggagtttaagttaaggtcttctta

SEQ ID NO: 264087 - DNA, 25 bp, Artificial
  probe
  misc_feature (1)..(25): SEQ ID NO: 449; WAN024ASI; Start 73; Stop 97
tcttcttaacttatgaacttagtgt

SEQ ID NO: 264088 - DNA, 25 bp, Artificial
  probe
  misc_feature (1)..(25): SEQ ID NO: 449; WAN024ASI; Start 53; Stop 77
tttaggagtttaagttaaggtcttc

SEQ ID NO: 264089 - DNA, 25 bp, Artificial
  probe
  misc_feature (1)..(25): SEQ ID NO: 449; WAN024ASI; Start 72; Stop 96
gtcttcttaacttatgaacttagtg

SEQ ID NO: 264090 - DNA, 25 bp, Artificial
  probe
  misc_feature (1)..(25): SEQ ID NO: 449; WAN024ASI; Start 68; Stop 92
taaggtcttcttaacttatgaactt

SEQ ID NO: 264091 - DNA, 25 bp, Artificial
  probe
  misc_feature (1)..(25): SEQ ID NO: 449; WAN024ASI; Start 95; Stop 119
tgtacactccctagcttaaagtttc

SEQ ID NO: 264092 - DNA, 25 bp, Artificial
  probe
  misc_feature (1)..(25): SEQ ID NO: 449; WAN024ASI; Start 51; Stop 75
gttttaggagtttaagttaaggtct

SEQ ID NO: 264093 - DNA, 25 bp, Artificial
  probe
  misc_feature (1)..(25): SEQ ID NO: 449; WAN024ASI; Start 50; Stop 74
agttttaggagtttaagttaaggtc

SEQ ID NO: 264094 - DNA, 25 bp, Artificial
  probe
  misc_feature (1)..(25): SEQ ID NO: 449; WAN024ASI; Start 49; Stop 73
aagttttaggagtttaagttaaggt

SEQ ID NO: 264095 - DNA, 25 bp, Artificial
  probe
  misc_feature (1)..(25): SEQ ID NO: 449; WAN024ASI; Start 52; Stop 76
ttttaggagtttaagttaaggtctt

SEQ ID NO: 264096 - DNA, 25 bp, Artificial
  probe
  misc_feature (1)..(25): SEQ ID NO: 449; WAN024ASI; Start 67; Stop 91
ttaaggtcttcttaacttatgaact

SEQ ID NO: 264097 - DNA, 25 bp, Artificial
  probe
  misc_feature (1)..(25): SEQ ID NO: 449; WAN024ASI; Start 57; Stop 81
ggagtttaagttaaggtcttcttaa

SEQ ID NO: 264098 - DNA, 25 bp, Artificial
  probe
  misc_feature (1)..(25): SEQ ID NO: 449; WAN024ASI; Start 76; Stop 100
tcttaacttatgaacttagtgtaca

SEQ ID NO: 264099 - DNA, 25 bp, Artificial
  probe
  misc_feature (1)..(25): SEQ ID NO: 449; WAN024ASI; Start 48; Stop 72
aaagttttaggagtttaagttaagg

SEQ ID NO: 264100 - DNA, 25 bp, Artificial
  probe
  misc_feature (1)..(25): SEQ ID NO: 450; WAN0249IT; Start 61; Stop 85
ctttctttccaaatccctcttccaa

SEQ ID NO: 264101 - DNA, 25 bp, Artificial
  probe
  misc_feature (1)..(25): SEQ ID NO: 450; WAN0249IT; Start 55; Stop 79
aaatccctttctttccaaatccctc

SEQ ID NO: 264102 - DNA, 25 bp, Artificial
  probe
  misc_feature (1)..(25): SEQ ID NO: 450; WAN0249IT; Start 77; Stop 101
ctcttccaagcaagtttgtgaaata

SEQ ID NO: 264103 - DNA, 25 bp, Artificial
  probe
  misc_feature (1)..(25): SEQ ID NO: 450; WAN0249IT; Start 78; Stop 102
tcttccaagcaagtttgtgaaataa

SEQ ID NO: 264104 - DNA, 25 bp, Artificial
  probe
  misc_feature (1)..(25): SEQ ID NO: 450; WAN0249IT; Start 62; Stop 86
tttctttccaaatccctcttccaag

SEQ ID NO: 264105 - DNA, 25 bp, Artificial
  probe
  misc_feature (1)..(25): SEQ ID NO: 450; WAN0249IT; Start 79; Stop 103
cttccaagcaagtttgtgaaataaa

SEQ ID NO: 264106 - DNA, 25 bp, Artificial
  probe
  misc_feature (1)..(25): SEQ ID NO: 450; WAN0249IT; Start 213; Stop 237
tgtttacaaagttgaaataatgcgt

SEQ ID NO: 264107 - DNA, 25 bp, Artificial
  probe
  misc_feature (1)..(25): SEQ ID NO: 450; WAN0249IT; Start 57; Stop 81
atccctttctttccaaatccctctt

SEQ ID NO: 264108 - DNA, 25 bp, Artificial
  probe
  misc_feature (1)..(25): SEQ ID NO: 450; WAN0249IT; Start 56; Stop 80
aatccctttctttccaaatccctct

SEQ ID NO: 264109 - DNA, 25 bp, Artificial
  probe
  misc_feature (1)..(25): SEQ ID NO: 450; WAN0249IT; Start 212; Stop 236
ctgtttacaaagttgaaataatgcg

SEQ ID NO: 264110 - DNA, 25 bp, Artificial
  probe
  misc_feature (1)..(25): SEQ ID NO: 450; WAN0249IT; Start 214; Stop 238
gtttacaaagttgaaataatgcgtt

SEQ ID NO: 264111 - DNA, 25 bp, Artificial
  probe
  misc_feature (1)..(25): SEQ ID NO: 450; WAN0249IT; Start 58; Stop 82
tccctttctttccaaatccctcttc

SEQ ID NO: 264112 - DNA, 25 bp, Artificial
  probe
  misc_feature (1)..(25): SEQ ID NO: 450; WAN0249IT; Start 76; Stop 100
cctcttccaagcaagtttgtgaaat

SEQ ID NO: 264113 - DNA, 25 bp, Artificial
  probe
  misc_feature (1)..(25): SEQ ID NO: 450; WAN0249IT; Start 60; Stop 84
cctttctttccaaatccctcttcca

SEQ ID NO: 264114 - DNA, 25 bp, Artificial
  probe
  misc_feature (1)..(25): SEQ ID NO: 450; WAN0249IT; Start 59; Stop 83
ccctttctttccaaatccctcttcc

SEQ ID NO: 264115 - DNA, 25 bp, Artificial
  probe
  misc_feature (1)..(25): SEQ ID NO: 450; WAN0249IT; Start 63; Stop 87
ttctttccaaatccctcttccaagc

SEQ ID NO: 264116 - DNA, 25 bp, Artificial
  probe
  misc_feature (1)..(25): SEQ ID NO: 450; WAN0249IT; Start 71; Stop 95
aaatccctcttccaagcaagtttgt

SEQ ID NO: 264117 - DNA, 25 bp, Artificial
  probe
  misc_feature (1)..(25): SEQ ID NO: 450; WAN0249IT; Start 269; Stop 293
atatcgttccttgaaagctatggag

SEQ ID NO: 264118 - DNA, 25 bp, Artificial
  probe
  misc_feature (1)..(25): SEQ ID NO: 450; WAN0249IT; Start 211; Stop 235
actgtttacaaagttgaaataatgc

SEQ ID NO: 264119 - DNA, 25 bp, Artificial
  probe
  misc_feature (1)..(25): SEQ ID NO: 450; WAN0249IT; Start 66; Stop 90
tttccaaatccctcttccaagcaag

SEQ ID NO: 264120 - DNA, 25 bp, Artificial
  probe
  misc_feature (1)..(25): SEQ ID NO: 450; WAN0249IT; Start 65; Stop 89
ctttccaaatccctcttccaagcaa

SEQ ID NO: 264121 - DNA, 25 bp, Artificial
  probe
  misc_feature (1)..(25): SEQ ID NO: 450; WAN0249IT; Start 268; Stop 292
gatatcgttccttgaaagctatgga

SEQ ID NO: 264122 - DNA, 25 bp, Artificial
  probe
  misc_feature (1)..(25): SEQ ID NO: 450; WAN0249IT; Start 69; Stop 93
ccaaatccctcttccaagcaagttt

SEQ ID NO: 264123 - DNA, 25 bp, Artificial
  probe
  misc_feature (1)..(25): SEQ ID NO: 450; WAN0249IT; Start 215; Stop 239
tttacaaagttgaaataatgcgtta

SEQ ID NO: 264124 - DNA, 25 bp, Artificial
  probe
  misc_feature (1)..(25): SEQ ID NO: 450; WAN0249IT; Start 122; Stop 146
tcacaaacttcaaagataaaacctg

SEQ ID NO: 264125 - DNA, 25 bp, Artificial
  probe
  misc_feature (1)..(25): SEQ ID NO: 450; WAN0249IT; Start 80; Stop 104
ttccaagcaagtttgtgaaataaaa

SEQ ID NO: 264126 - DNA, 25 bp, Artificial
  probe
  misc_feature (1)..(25): SEQ ID NO: 450; WAN0249IT; Start 72; Stop 96
aatccctcttccaagcaagtttgtg

SEQ ID NO: 264127 - DNA, 25 bp, Artificial
  probe
  misc_feature (1)..(25): SEQ ID NO: 450; WAN0249IT; Start 270; Stop 294
tatcgttccttgaaagctatggagg

SEQ ID NO: 264128 - DNA, 25 bp, Artificial
  probe
  misc_feature (1)..(25): SEQ ID NO: 450; WAN0249IT; Start 267; Stop 291
ggatatcgttccttgaaagctatgg

SEQ ID NO: 264129 - DNA, 25 bp, Artificial
  probe
  misc_feature (1)..(25): SEQ ID NO: 450; WAN0249IT; Start 75; Stop 99
ccctcttccaagcaagtttgtgaaa

SEQ ID NO: 264130 - DNA, 25 bp, Artificial
  probe
  misc_feature (1)..(25): SEQ ID NO: 450; WAN0249IT; Start 123; Stop 147
cacaaacttcaaagataaaacctga

SEQ ID NO: 264131 - DNA, 25 bp, Artificial
  probe
  misc_feature (1)..(25): SEQ ID NO: 450; WAN0249IT; Start 216; Stop 240
ttacaaagttgaaataatgcgttat

SEQ ID NO: 264132 - DNA, 25 bp, Artificial
  probe
  misc_feature (1)..(25): SEQ ID NO: 450; WAN0249IT; Start 121; Stop 145
ttcacaaacttcaaagataaaacct

SEQ ID NO: 264133 - DNA, 25 bp, Artificial
  probe
  misc_feature (1)..(25): SEQ ID NO: 451; WAN0249QP; Start 319; Stop 343
ttccattgactataagcatccaacc

SEQ ID NO: 264134 - DNA, 25 bp, Artificial
  probe
  misc_feature (1)..(25): SEQ ID NO: 451; WAN0249QP; Start 444; Stop 468
aggtagtaatcattaagaagtggtt

SEQ ID NO: 264135 - DNA, 25 bp, Artificial
  probe
  misc_feature (1)..(25): SEQ ID NO: 451; WAN0249QP; Start 443; Stop 467
aaggtagtaatcattaagaagtggt

SEQ ID NO: 264136 - DNA, 25 bp, Artificial
  probe
  misc_feature (1)..(25): SEQ ID NO: 451; WAN0249QP; Start 9; Stop 33
tttgaaagagggatgtgatagtagc

SEQ ID NO: 264137 - DNA, 25 bp, Artificial
  probe
  misc_feature (1)..(25): SEQ ID NO: 451; WAN0249QP; Start 6; Stop 30
tgatttgaaagagggatgtgatagt

SEQ ID NO: 264138 - DNA, 25 bp, Artificial
  probe
  misc_feature (1)..(25): SEQ ID NO: 451; WAN0249QP; Start 10; Stop 34
ttgaaagagggatgtgatagtagca

SEQ ID NO: 264139 - DNA, 25 bp, Artificial
  probe
  misc_feature (1)..(25): SEQ ID NO: 451; WAN0249QP; Start 3; Stop 27
cgatgatttgaaagagggatgtgat

SEQ ID NO: 264140 - DNA, 25 bp, Artificial
  probe
  misc_feature (1)..(25): SEQ ID NO: 451; WAN0249QP; Start 316; Stop 340
gatttccattgactataagcatcca

SEQ ID NO: 264141 - DNA, 25 bp, Artificial
  probe
  misc_feature (1)..(25): SEQ ID NO: 451; WAN0249QP; Start 292; Stop 316
gtttagtttcctagtttgctgatgg

SEQ ID NO: 264142 - DNA, 25 bp, Artificial
  probe
  misc_feature (1)..(25): SEQ ID NO: 451; WAN0249QP; Start 291; Stop 315
ggtttagtttcctagtttgctgatg

SEQ ID NO: 264143 - DNA, 25 bp, Artificial
  probe
  misc_feature (1)..(25): SEQ ID NO: 451; WAN0249QP; Start 5; Stop 29
atgatttgaaagagggatgtgatag

SEQ ID NO: 264144 - DNA, 25 bp, Artificial
  probe
  misc_feature (1)..(25): SEQ ID NO: 451; WAN0249QP; Start 4; Stop 28
gatgatttgaaagagggatgtgata

SEQ ID NO: 264145 - DNA, 25 bp, Artificial
  probe
  misc_feature (1)..(25): SEQ ID NO: 451; WAN0249QP; Start 318; Stop 342
tttccattgactataagcatccaac

SEQ ID NO: 264146 - DNA, 25 bp, Artificial
  probe
  misc_feature (1)..(25): SEQ ID NO: 451; WAN0249QP; Start 290; Stop 314
gggtttagtttcctagtttgctgat

SEQ ID NO: 264147 - DNA, 25 bp, Artificial
  probe
  misc_feature (1)..(25): SEQ ID NO: 451; WAN0249QP; Start 325; Stop 349
tgactataagcatccaaccctcttt

SEQ ID NO: 264148 - DNA, 25 bp, Artificial
  probe
  misc_feature (1)..(25): SEQ ID NO: 451; WAN0249QP; Start 323; Stop 347
attgactataagcatccaaccctct

SEQ ID NO: 264149 - DNA, 25 bp, Artificial
  probe
  misc_feature (1)..(25): SEQ ID NO: 451; WAN0249QP; Start 322; Stop 346
cattgactataagcatccaaccctc

SEQ ID NO: 264150 - DNA, 25 bp, Artificial
  probe
  misc_feature (1)..(25): SEQ ID NO: 451; WAN0249QP; Start 8; Stop 32
atttgaaagagggatgtgatagtag

SEQ ID NO: 264151 - DNA, 25 bp, Artificial
  probe
  misc_feature (1)..(25): SEQ ID NO: 451; WAN0249QP; Start 7; Stop 31
gatttgaaagagggatgtgatagta

SEQ ID NO: 264152 - DNA, 25 bp, Artificial
  probe
  misc_feature (1)..(25): SEQ ID NO: 451; WAN0249QP; Start 324; Stop 348
ttgactataagcatccaaccctctt

SEQ ID NO: 264153 - DNA, 25 bp, Artificial
  probe
  misc_feature (1)..(25): SEQ ID NO: 451; WAN0249QP; Start 317; Stop 341
atttccattgactataagcatccaa

SEQ ID NO: 264154 - DNA, 25 bp, Artificial
  probe
  misc_feature (1)..(25): SEQ ID NO: 451; WAN0249QP; Start 288; Stop 312
ctgggtttagtttcctagtttgctg

SEQ ID NO: 264155 - DNA, 25 bp, Artificial
  probe
  misc_feature (1)..(25): SEQ ID NO: 451; WAN0249QP; Start 179; Stop 203
cgacttggtttcatcttatttcaat

SEQ ID NO: 264156 - DNA, 25 bp, Artificial
  probe
  misc_feature (1)..(25): SEQ ID NO: 451; WAN0249QP; Start 289; Stop 313
tgggtttagtttcctagtttgctga

SEQ ID NO: 264157 - DNA, 25 bp, Artificial
  probe
  misc_feature (1)..(25): SEQ ID NO: 451; WAN0249QP; Start 295; Stop 319
tagtttcctagtttgctgatggatt

SEQ ID NO: 264158 - DNA, 25 bp, Artificial
  probe
  misc_feature (1)..(25): SEQ ID NO: 451; WAN0249QP; Start 294; Stop 318
ttagtttcctagtttgctgatggat

SEQ ID NO: 264159 - DNA, 25 bp, Artificial
  probe
  misc_feature (1)..(25): SEQ ID NO: 451; WAN0249QP; Start 293; Stop 317
tttagtttcctagtttgctgatgga

SEQ ID NO: 264160 - DNA, 25 bp, Artificial
  probe
  misc_feature (1)..(25): SEQ ID NO: 451; WAN0249QP; Start 169; Stop 193
ctttcctaatcgacttggtttcatc

SEQ ID NO: 264161 - DNA, 25 bp, Artificial
  probe
  misc_feature (1)..(25): SEQ ID NO: 451; WAN0249QP; Start 171; Stop 195
ttcctaatcgacttggtttcatctt

SEQ ID NO: 264162 - DNA, 25 bp, Artificial
  probe
  misc_feature (1)..(25): SEQ ID NO: 451; WAN0249QP; Start 170; Stop 194
tttcctaatcgacttggtttcatct

SEQ ID NO: 264163 - DNA, 25 bp, Artificial
  probe
  misc_feature (1)..(25): SEQ ID NO: 451; WAN0249QP; Start 162; Stop 186
catttacctttcctaatcgacttgg

SEQ ID NO: 264164 - DNA, 25 bp, Artificial
  probe
  misc_feature (1)..(25): SEQ ID NO: 451; WAN0249QP; Start 297; Stop 321
gtttcctagtttgctgatggatttc

SEQ ID NO: 264165 - DNA, 25 bp, Artificial
  probe
  misc_feature (1)..(25): SEQ ID NO: 451; WAN0249QP; Start 172; Stop 196
tcctaatcgacttggtttcatctta

SEQ ID NO: 264166 - DNA, 25 bp, Artificial
  probe
  misc_feature (1)..(25): SEQ ID NO: 452; WAN0249DN; Start 21; Stop 45
aaatccgctacaaatgttatactga

SEQ ID NO: 264167 - DNA, 25 bp, Artificial
  probe
  misc_feature (1)..(25): SEQ ID NO: 452; WAN0249DN; Start 20; Stop 44
aaaatccgctacaaatgttatactg

SEQ ID NO: 264168 - DNA, 25 bp, Artificial
  probe
  misc_feature (1)..(25): SEQ ID NO: 453; WAN024ACE; Start 48; Stop 72
cctcatatactctctccaccagtaa

SEQ ID NO: 264169 - DNA, 25 bp, Artificial
  probe
  misc_feature (1)..(25): SEQ ID NO: 453; WAN024ACE; Start 40; Stop 64
ttatccaccctcatatactctctcc

SEQ ID NO: 264170 - DNA, 25 bp, Artificial
  probe
  misc_feature (1)..(25): SEQ ID NO: 453; WAN024ACE; Start 41; Stop 65
tatccaccctcatatactctctcca

SEQ ID NO: 264171 - DNA, 25 bp, Artificial
  probe
  misc_feature (1)..(25): SEQ ID NO: 453; WAN024ACE; Start 37; Stop 61
actttatccaccctcatatactctc

SEQ ID NO: 264172 - DNA, 25 bp, Artificial
  probe
  misc_feature (1)..(25): SEQ ID NO: 453; WAN024ACE; Start 39; Stop 63
tttatccaccctcatatactctctc

SEQ ID NO: 264173 - DNA, 25 bp, Artificial
  probe
  misc_feature (1)..(25): SEQ ID NO: 453; WAN024ACE; Start 38; Stop 62
ctttatccaccctcatatactctct

SEQ ID NO: 264174 - DNA, 25 bp, Artificial
  probe
  misc_feature (1)..(25): SEQ ID NO: 453; WAN024ACE; Start 36; Stop 60
tactttatccaccctcatatactct

SEQ ID NO: 264175 - DNA, 25 bp, Artificial
  probe
  misc_feature (1)..(25): SEQ ID NO: 453; WAN024ACE; Start 42; Stop 66
atccaccctcatatactctctccac

SEQ ID NO: 264176 - DNA, 25 bp, Artificial
  probe
  misc_feature (1)..(25): SEQ ID NO: 453; WAN024ACE; Start 35; Stop 59
gtactttatccaccctcatatactc

SEQ ID NO: 264177 - DNA, 25 bp, Artificial
  probe
  misc_feature (1)..(25): SEQ ID NO: 453; WAN024ACE; Start 49; Stop 73
ctcatatactctctccaccagtaaa

SEQ ID NO: 264178 - DNA, 25 bp, Artificial
  probe
  misc_feature (1)..(25): SEQ ID NO: 453; WAN024ACE; Start 45; Stop 69
caccctcatatactctctccaccag

SEQ ID NO: 264179 - DNA, 25 bp, Artificial
  probe
  misc_feature (1)..(25): SEQ ID NO: 453; WAN024ACE; Start 47; Stop 71
ccctcatatactctctccaccagta

SEQ ID NO: 264180 - DNA, 25 bp, Artificial
  probe
  misc_feature (1)..(25): SEQ ID NO: 453; WAN024ACE; Start 46; Stop 70
accctcatatactctctccaccagt

SEQ ID NO: 264181 - DNA, 25 bp, Artificial
  probe
  misc_feature (1)..(25): SEQ ID NO: 453; WAN024ACE; Start 43; Stop 67
tccaccctcatatactctctccacc

SEQ ID NO: 264182 - DNA, 25 bp, Artificial
  probe
  misc_feature (1)..(25): SEQ ID NO: 453; WAN024ACE; Start 64; Stop 88
caccagtaaaatgcaagcaatgata

SEQ ID NO: 264183 - DNA, 25 bp, Artificial
  probe
  misc_feature (1)..(25): SEQ ID NO: 453; WAN024ACE; Start 44; Stop 68
ccaccctcatatactctctccacca

SEQ ID NO: 264184 - DNA, 25 bp, Artificial
  probe
  misc_feature (1)..(25): SEQ ID NO: 453; WAN024ACE; Start 66; Stop 90
ccagtaaaatgcaagcaatgataca

SEQ ID NO: 264185 - DNA, 25 bp, Artificial
  probe
  misc_feature (1)..(25): SEQ ID NO: 453; WAN024ACE; Start 65; Stop 89
accagtaaaatgcaagcaatgatac

SEQ ID NO: 264186 - DNA, 25 bp, Artificial
  probe
  misc_feature (1)..(25): SEQ ID NO: 453; WAN024ACE; Start 67; Stop 91
cagtaaaatgcaagcaatgatacaa

SEQ ID NO: 264187 - DNA, 25 bp, Artificial
  probe
  misc_feature (1)..(25): SEQ ID NO: 453; WAN024ACE; Start 50; Stop 74
tcatatactctctccaccagtaaaa

SEQ ID NO: 264188 - DNA, 25 bp, Artificial
  probe
  misc_feature (1)..(25): SEQ ID NO: 453; WAN024ACE; Start 76; Stop 100
gcaagcaatgatacaaaatagattt

SEQ ID NO: 264189 - DNA, 25 bp, Artificial
  probe
  misc_feature (1)..(25): SEQ ID NO: 453; WAN024ACE; Start 68; Stop 92
agtaaaatgcaagcaatgatacaaa

SEQ ID NO: 264190 - DNA, 25 bp, Artificial
  probe
  misc_feature (1)..(25): SEQ ID NO: 453; WAN024ACE; Start 34; Stop 58
agtactttatccaccctcatatact

SEQ ID NO: 264191 - DNA, 25 bp, Artificial
  probe
  misc_feature (1)..(25): SEQ ID NO: 453; WAN024ACE; Start 75; Stop 99
tgcaagcaatgatacaaaatagatt

SEQ ID NO: 264192 - DNA, 25 bp, Artificial
  probe
  misc_feature (1)..(25): SEQ ID NO: 453; WAN024ACE; Start 73; Stop 97
aatgcaagcaatgatacaaaataga

SEQ ID NO: 264193 - DNA, 25 bp, Artificial
  probe
  misc_feature (1)..(25): SEQ ID NO: 453; WAN024ACE; Start 52; Stop 76
atatactctctccaccagtaaaatg

SEQ ID NO: 264194 - DNA, 25 bp, Artificial
  probe
  misc_feature (1)..(25): SEQ ID NO: 453; WAN024ACE; Start 51; Stop 75
catatactctctccaccagtaaaat

SEQ ID NO: 264195 - DNA, 25 bp, Artificial
  probe
  misc_feature (1)..(25): SEQ ID NO: 453; WAN024ACE; Start 69; Stop 93
gtaaaatgcaagcaatgatacaaaa

SEQ ID NO: 264196 - DNA, 25 bp, Artificial
  probe
  misc_feature (1)..(25): SEQ ID NO: 453; WAN024ACE; Start 74; Stop 98
atgcaagcaatgatacaaaatagat

SEQ ID NO: 264197 - DNA, 25 bp, Artificial
  probe
  misc_feature (1)..(25): SEQ ID NO: 453; WAN024ACE; Start 63; Stop 87
ccaccagtaaaatgcaagcaatgat

SEQ ID NO: 264198 - DNA, 25 bp, Artificial
  probe
  misc_feature (1)..(25): SEQ ID NO: 453; WAN024ACE; Start 72; Stop 96
aaatgcaagcaatgatacaaaatag

SEQ ID NO: 264199 - DNA, 25 bp, Artificial
  probe
  misc_feature (1)..(25): SEQ ID NO: 453; WAN024ACE; Start 61; Stop 85
ctccaccagtaaaatgcaagcaatg

SEQ ID NO: 264200 - DNA, 25 bp, Artificial
  probe
  misc_feature (1)..(25): SEQ ID NO: 453; WAN024ACE; Start 71; Stop 95
aaaatgcaagcaatgatacaaaata

SEQ ID NO: 264201 - DNA, 25 bp, Artificial
  probe
  misc_feature (1)..(25): SEQ ID NO: 454; WAN024ACA; Start 77; Stop 101
gcaagcaattatacaatgttgtcac

SEQ ID NO: 264202 - DNA, 25 bp, Artificial
  probe
  misc_feature (1)..(25): SEQ ID NO: 454; WAN024ACA; Start 48; Stop 72
cctcattatactctctccaccagta

SEQ ID NO: 264203 - DNA, 25 bp, Artificial
  probe
  misc_feature (1)..(25): SEQ ID NO: 454; WAN024ACA; Start 78; Stop 102
caagcaattatacaatgttgtcaca

SEQ ID NO: 264204 - DNA, 25 bp, Artificial
  probe
  misc_feature (1)..(25): SEQ ID NO: 454; WAN024ACA; Start 41; Stop 65
tatccaccctcattatactctctcc

SEQ ID NO: 264205 - DNA, 25 bp, Artificial
  probe
  misc_feature (1)..(25): SEQ ID NO: 454; WAN024ACA; Start 49; Stop 73
ctcattatactctctccaccagtaa

SEQ ID NO: 264206 - DNA, 25 bp, Artificial
  probe
  misc_feature (1)..(25): SEQ ID NO: 454; WAN024ACA; Start 40; Stop 64
ttatccaccctcattatactctctc

SEQ ID NO: 264207 - DNA, 25 bp, Artificial
  probe
  misc_feature (1)..(25): SEQ ID NO: 454; WAN024ACA; Start 76; Stop 100
tgcaagcaattatacaatgttgtca

SEQ ID NO: 264208 - DNA, 25 bp, Artificial
  probe
  misc_feature (1)..(25): SEQ ID NO: 454; WAN024ACA; Start 37; Stop 61
actttatccaccctcattatactct

SEQ ID NO: 264209 - DNA, 25 bp, Artificial
  probe
  misc_feature (1)..(25): SEQ ID NO: 454; WAN024ACA; Start 42; Stop 66
atccaccctcattatactctctcca

SEQ ID NO: 264210 - DNA, 25 bp, Artificial
  probe
  misc_feature (1)..(25): SEQ ID NO: 454; WAN024ACA; Start 127; Stop 151
ttcaaagtaacttccatctctctcc

SEQ ID NO: 264211 - DNA, 25 bp, Artificial
  probe
  misc_feature (1)..(25): SEQ ID NO: 454; WAN024ACA; Start 39; Stop 63
tttatccaccctcattatactctct

SEQ ID NO: 264212 - DNA, 25 bp, Artificial
  probe
  misc_feature (1)..(25): SEQ ID NO: 454; WAN024ACA; Start 75; Stop 99
atgcaagcaattatacaatgttgtc

SEQ ID NO: 264213 - DNA, 25 bp, Artificial
  probe
  misc_feature (1)..(25): SEQ ID NO: 454; WAN024ACA; Start 38; Stop 62
ctttatccaccctcattatactctc

SEQ ID NO: 264214 - DNA, 25 bp, Artificial
  probe
  misc_feature (1)..(25): SEQ ID NO: 454; WAN024ACA; Start 74; Stop 98
aatgcaagcaattatacaatgttgt

SEQ ID NO: 264215 - DNA, 25 bp, Artificial
  probe
  misc_feature (1)..(25): SEQ ID NO: 454; WAN024ACA; Start 126; Stop 150
tttcaaagtaacttccatctctctc

SEQ ID NO: 264216 - DNA, 25 bp, Artificial
  probe
  misc_feature (1)..(25): SEQ ID NO: 454; WAN024ACA; Start 46; Stop 70
accctcattatactctctccaccag

SEQ ID NO: 264217 - DNA, 25 bp, Artificial
  probe
  misc_feature (1)..(25): SEQ ID NO: 454; WAN024ACA; Start 43; Stop 67
tccaccctcattatactctctccac

SEQ ID NO: 264218 - DNA, 25 bp, Artificial
  probe
  misc_feature (1)..(25): SEQ ID NO: 454; WAN024ACA; Start 45; Stop 69
caccctcattatactctctccacca

SEQ ID NO: 264219 - DNA, 25 bp, Artificial
  probe
  misc_feature (1)..(25): SEQ ID NO: 454; WAN024ACA; Start 47; Stop 71
ccctcattatactctctccaccagt

SEQ ID NO: 264220 - DNA, 25 bp, Artificial
  probe
  misc_feature (1)..(25): SEQ ID NO: 454; WAN024ACA; Start 36; Stop 60
tactttatccaccctcattatactc

SEQ ID NO: 264221 - DNA, 25 bp, Artificial
  probe
  misc_feature (1)..(25): SEQ ID NO: 454; WAN024ACA; Start 50; Stop 74
tcattatactctctccaccagtaaa

SEQ ID NO: 264222 - DNA, 25 bp, Artificial
  probe
  misc_feature (1)..(25): SEQ ID NO: 454; WAN024ACA; Start 35; Stop 59
gtactttatccaccctcattatact

SEQ ID NO: 264223 - DNA, 25 bp, Artificial
  probe
  misc_feature (1)..(25): SEQ ID NO: 454; WAN024ACA; Start 79; Stop 103
aagcaattatacaatgttgtcacat

SEQ ID NO: 264224 - DNA, 25 bp, Artificial
  probe
  misc_feature (1)..(25): SEQ ID NO: 454; WAN024ACA; Start 44; Stop 68
ccaccctcattatactctctccacc

SEQ ID NO: 264225 - DNA, 25 bp, Artificial
  probe
  misc_feature (1)..(25): SEQ ID NO: 454; WAN024ACA; Start 80; Stop 104
agcaattatacaatgttgtcacata

SEQ ID NO: 264226 - DNA, 25 bp, Artificial
  probe
  misc_feature (1)..(25): SEQ ID NO: 454; WAN024ACA; Start 73; Stop 97
aaatgcaagcaattatacaatgttg

SEQ ID NO: 264227 - DNA, 25 bp, Artificial
  probe
  misc_feature (1)..(25): SEQ ID NO: 454; WAN024ACA; Start 81; Stop 105
gcaattatacaatgttgtcacatag

SEQ ID NO: 264228 - DNA, 25 bp, Artificial
  probe
  misc_feature (1)..(25): SEQ ID NO: 454; WAN024ACA; Start 158; Stop 182
tggaagttagttttagaagttacct

SEQ ID NO: 264229 - DNA, 25 bp, Artificial
  probe
  misc_feature (1)..(25): SEQ ID NO: 454; WAN024ACA; Start 125; Stop 149
ttttcaaagtaacttccatctctct

SEQ ID NO: 264230 - DNA, 25 bp, Artificial
  probe
  misc_feature (1)..(25): SEQ ID NO: 454; WAN024ACA; Start 124; Stop 148
cttttcaaagtaacttccatctctc

SEQ ID NO: 264231 - DNA, 25 bp, Artificial
  probe
  misc_feature (1)..(25): SEQ ID NO: 454; WAN024ACA; Start 64; Stop 88
ccaccagtaaaatgcaagcaattat

SEQ ID NO: 264232 - DNA, 25 bp, Artificial
  probe
  misc_feature (1)..(25): SEQ ID NO: 454; WAN024ACA; Start 34; Stop 58
agtactttatccaccctcattatac

SEQ ID NO: 264233 - DNA, 25 bp, Artificial
  probe
  misc_feature (1)..(25): SEQ ID NO: 454; WAN024ACA; Start 63; Stop 87
tccaccagtaaaatgcaagcaatta

SEQ ID NO: 264234 - DNA, 25 bp, Artificial
  probe
  misc_feature (1)..(25): SEQ ID NO: 455; WAN0249M6; Start 43; Stop 67
ggcattttcatcacatattacagca

SEQ ID NO: 264235 - DNA, 25 bp, Artificial
  probe
  misc_feature (1)..(25): SEQ ID NO: 455; WAN0249M6; Start 42; Stop 66
tggcattttcatcacatattacagc

SEQ ID NO: 264236 - DNA, 25 bp, Artificial
  probe
  misc_feature (1)..(25): SEQ ID NO: 455; WAN0249M6; Start 40; Stop 64
actggcattttcatcacatattaca

SEQ ID NO: 264237 - DNA, 25 bp, Artificial
  probe
  misc_feature (1)..(25): SEQ ID NO: 455; WAN0249M6; Start 44; Stop 68
gcattttcatcacatattacagcaa

SEQ ID NO: 264238 - DNA, 25 bp, Artificial
  probe
  misc_feature (1)..(25): SEQ ID NO: 455; WAN0249M6; Start 41; Stop 65
ctggcattttcatcacatattacag

SEQ ID NO: 264239 - DNA, 25 bp, Artificial
  probe
  misc_feature (1)..(25): SEQ ID NO: 455; WAN0249M6; Start 39; Stop 63
tactggcattttcatcacatattac

SEQ ID NO: 264240 - DNA, 25 bp, Artificial
  probe
  misc_feature (1)..(25): SEQ ID NO: 455; WAN0249M6; Start 37; Stop 61
attactggcattttcatcacatatt

SEQ ID NO: 264241 - DNA, 25 bp, Artificial
  probe
  misc_feature (1)..(25): SEQ ID NO: 455; WAN0249M6; Start 38; Stop 62
ttactggcattttcatcacatatta

SEQ ID NO: 264242 - DNA, 25 bp, Artificial
  probe
  misc_feature (1)..(25): SEQ ID NO: 456; WAN024AQB; Start 38; Stop 62
aataatactagcaagcgagaatgga

SEQ ID NO: 264243 - DNA, 25 bp, Artificial
  probe
  misc_feature (1)..(25): SEQ ID NO: 456; WAN024AQB; Start 39; Stop 63
ataatactagcaagcgagaatggag

SEQ ID NO: 264244 - DNA, 25 bp, Artificial
  probe
  misc_feature (1)..(25): SEQ ID NO: 456; WAN024AQB; Start 40; Stop 64
taatactagcaagcgagaatggaga

SEQ ID NO: 264245 - DNA, 25 bp, Artificial
  probe
  misc_feature (1)..(25): SEQ ID NO: 456; WAN024AQB; Start 37; Stop 61
taataatactagcaagcgagaatgg

SEQ ID NO: 264246 - DNA, 25 bp, Artificial
  probe
  misc_feature (1)..(25): SEQ ID NO: 456; WAN024AQB; Start 41; Stop 65
aatactagcaagcgagaatggagag

SEQ ID NO: 264247 - DNA, 25 bp, Artificial
  probe
  misc_feature (1)..(25): SEQ ID NO: 456; WAN024AQB; Start 42; Stop 66
atactagcaagcgagaatggagaga

SEQ ID NO: 264248 - DNA, 25 bp, Artificial
  probe
  misc_feature (1)..(25): SEQ ID NO: 456; WAN024AQB; Start 36; Stop 60
ataataatactagcaagcgagaatg

SEQ ID NO: 264249 - DNA, 25 bp, Artificial
  probe
  misc_feature (1)..(25): SEQ ID NO: 456; WAN024AQB; Start 43; Stop 67
tactagcaagcgagaatggagagag

SEQ ID NO: 264250 - DNA, 25 bp, Artificial
  probe
  misc_feature (1)..(25): SEQ ID NO: 456; WAN024AQB; Start 45; Stop 69
ctagcaagcgagaatggagagagac

SEQ ID NO: 264251 - DNA, 25 bp, Artificial
  probe
  misc_feature (1)..(25): SEQ ID NO: 456; WAN024AQB; Start 35; Stop 59
tataataatactagcaagcgagaat

SEQ ID NO: 264252 - DNA, 25 bp, Artificial
  probe
  misc_feature (1)..(25): SEQ ID NO: 456; WAN024AQB; Start 34; Stop 58
atataataatactagcaagcgagaa

SEQ ID NO: 264253 - DNA, 25 bp, Artificial
  probe
  misc_feature (1)..(25): SEQ ID NO: 456; WAN024AQB; Start 44; Stop 68
actagcaagcgagaatggagagaga

SEQ ID NO: 264254 - DNA, 25 bp, Artificial
  probe
  misc_feature (1)..(25): SEQ ID NO: 457; WAN024F58; Start 195; Stop 219
ccagcaattaggtatgtcagtatct

SEQ ID NO: 264255 - DNA, 25 bp, Artificial
  probe
  misc_feature (1)..(25): SEQ ID NO: 457; WAN024F58; Start 194; Stop 218
gccagcaattaggtatgtcagtatc

SEQ ID NO: 264256 - DNA, 25 bp, Artificial
  probe
  misc_feature (1)..(25): SEQ ID NO: 457; WAN024F58; Start 193; Stop 217
agccagcaattaggtatgtcagtat

SEQ ID NO: 264257 - DNA, 25 bp, Artificial
  probe
  misc_feature (1)..(25): SEQ ID NO: 457; WAN024F58; Start 196; Stop 220
cagcaattaggtatgtcagtatctg

SEQ ID NO: 264258 - DNA, 25 bp, Artificial
  probe
  misc_feature (1)..(25): SEQ ID NO: 457; WAN024F58; Start 192; Stop 216
cagccagcaattaggtatgtcagta

SEQ ID NO: 264259 - DNA, 25 bp, Artificial
  probe
  misc_feature (1)..(25): SEQ ID NO: 457; WAN024F58; Start 220; Stop 244
gaatttgaggcactgttgtaactaa

SEQ ID NO: 264260 - DNA, 25 bp, Artificial
  probe
  misc_feature (1)..(25): SEQ ID NO: 457; WAN024F58; Start 215; Stop 239
tatctgaatttgaggcactgttgta

SEQ ID NO: 264261 - DNA, 25 bp, Artificial
  probe
  misc_feature (1)..(25): SEQ ID NO: 457; WAN024F58; Start 219; Stop 243
tgaatttgaggcactgttgtaacta

SEQ ID NO: 264262 - DNA, 25 bp, Artificial
  probe
  misc_feature (1)..(25): SEQ ID NO: 457; WAN024F58; Start 221; Stop 245
aatttgaggcactgttgtaactaat

SEQ ID NO: 264263 - DNA, 25 bp, Artificial
  probe
  misc_feature (1)..(25): SEQ ID NO: 457; WAN024F58; Start 216; Stop 240
atctgaatttgaggcactgttgtaa

SEQ ID NO: 264264 - DNA, 25 bp, Artificial
  probe
  misc_feature (1)..(25): SEQ ID NO: 457; WAN024F58; Start 16; Stop 40
caactacatatgcgagaagaacaag

SEQ ID NO: 264265 - DNA, 25 bp, Artificial
  probe
  misc_feature (1)..(25): SEQ ID NO: 457; WAN024F58; Start 15; Stop 39
tcaactacatatgcgagaagaacaa

SEQ ID NO: 264266 - DNA, 25 bp, Artificial
  probe
  misc_feature (1)..(25): SEQ ID NO: 457; WAN024F58; Start 12; Stop 36
tagtcaactacatatgcgagaagaa

SEQ ID NO: 264267 - DNA, 25 bp, Artificial
  probe
  misc_feature (1)..(25): SEQ ID NO: 457; WAN024F58; Start 11; Stop 35
ttagtcaactacatatgcgagaaga

SEQ ID NO: 264268 - DNA, 25 bp, Artificial
  probe
  misc_feature (1)..(25): SEQ ID NO: 457; WAN024F58; Start 13; Stop 37
agtcaactacatatgcgagaagaac

SEQ ID NO: 264269 - DNA, 25 bp, Artificial
  probe
  misc_feature (1)..(25): SEQ ID NO: 457; WAN024F58; Start 214; Stop 238
gtatctgaatttgaggcactgttgt

SEQ ID NO: 264270 - DNA, 25 bp, Artificial
  probe
  misc_feature (1)..(25): SEQ ID NO: 457; WAN024F58; Start 14; Stop 38
gtcaactacatatgcgagaagaaca

SEQ ID NO: 264271 - DNA, 25 bp, Artificial
  probe
  misc_feature (1)..(25): SEQ ID NO: 457; WAN024F58; Start 19; Stop 43
ctacatatgcgagaagaacaagtct

SEQ ID NO: 264272 - DNA, 25 bp, Artificial
  probe
  misc_feature (1)..(25): SEQ ID NO: 457; WAN024F58; Start 218; Stop 242
ctgaatttgaggcactgttgtaact

SEQ ID NO: 264273 - DNA, 25 bp, Artificial
  probe
  misc_feature (1)..(25): SEQ ID NO: 457; WAN024F58; Start 217; Stop 241
tctgaatttgaggcactgttgtaac

SEQ ID NO: 264274 - DNA, 25 bp, Artificial
  probe
  misc_feature (1)..(25): SEQ ID NO: 457; WAN024F58; Start 213; Stop 237
agtatctgaatttgaggcactgttg

SEQ ID NO: 264275 - DNA, 25 bp, Artificial
  probe
  misc_feature (1)..(25): SEQ ID NO: 457; WAN024F58; Start 17; Stop 41
aactacatatgcgagaagaacaagt

SEQ ID NO: 264276 - DNA, 25 bp, Artificial
  probe
  misc_feature (1)..(25): SEQ ID NO: 457; WAN024F58; Start 18; Stop 42
actacatatgcgagaagaacaagtc

SEQ ID NO: 264277 - DNA, 25 bp, Artificial
  probe
  misc_feature (1)..(25): SEQ ID NO: 457; WAN024F58; Start 166; Stop 190
caaggtcttctgacttctgaggttg

SEQ ID NO: 264278 - DNA, 25 bp, Artificial
  probe
  misc_feature (1)..(25): SEQ ID NO: 457; WAN024F58; Start 157; Stop 181
atagtacgccaaggtcttctgactt

SEQ ID NO: 264279 - DNA, 25 bp, Artificial
  probe
  misc_feature (1)..(25): SEQ ID NO: 457; WAN024F58; Start 148; Stop 172
ttcctagacatagtacgccaaggtc

SEQ ID NO: 264280 - DNA, 25 bp, Artificial
  probe
  misc_feature (1)..(25): SEQ ID NO: 457; WAN024F58; Start 147; Stop 171
cttcctagacatagtacgccaaggt

SEQ ID NO: 264281 - DNA, 25 bp, Artificial
  probe
  misc_feature (1)..(25): SEQ ID NO: 457; WAN024F58; Start 20; Stop 44
tacatatgcgagaagaacaagtctt

SEQ ID NO: 264282 - DNA, 25 bp, Artificial
  probe
  misc_feature (1)..(25): SEQ ID NO: 457; WAN024F58; Start 165; Stop 189
ccaaggtcttctgacttctgaggtt

SEQ ID NO: 264283 - DNA, 25 bp, Artificial
  probe
  misc_feature (1)..(25): SEQ ID NO: 457; WAN024F58; Start 10; Stop 34
tttagtcaactacatatgcgagaag

SEQ ID NO: 264284 - DNA, 25 bp, Artificial
  probe
  misc_feature (1)..(25): SEQ ID NO: 457; WAN024F58; Start 197; Stop 221
agcaattaggtatgtcagtatctga

SEQ ID NO: 264285 - DNA, 25 bp, Artificial
  probe
  misc_feature (1)..(25): SEQ ID NO: 457; WAN024F58; Start 158; Stop 182
tagtacgccaaggtcttctgacttc

SEQ ID NO: 264286 - DNA, 25 bp, Artificial
  probe
  misc_feature (1)..(25): SEQ ID NO: 457; WAN024F58; Start 9; Stop 33
gtttagtcaactacatatgcgagaa

SEQ ID NO: 264287 - DNA, 25 bp, Artificial
  probe
  misc_feature (1)..(25): SEQ ID NO: 458; WAN0249TT; Start 21; Stop 45
cgagcccatagtagtgaagaaactt

SEQ ID NO: 264288 - DNA, 25 bp, Artificial
  probe
  misc_feature (1)..(25): SEQ ID NO: 458; WAN0249TT; Start 44; Stop 68
ttctgtaatggaagtggagcgaagt

SEQ ID NO: 264289 - DNA, 25 bp, Artificial
  probe
  misc_feature (1)..(25): SEQ ID NO: 458; WAN0249TT; Start 47; Stop 71
tgtaatggaagtggagcgaagtgag

SEQ ID NO: 264290 - DNA, 25 bp, Artificial
  probe
  misc_feature (1)..(25): SEQ ID NO: 458; WAN0249TT; Start 46; Stop 70
ctgtaatggaagtggagcgaagtga

SEQ ID NO: 264291 - DNA, 25 bp, Artificial
  probe
  misc_feature (1)..(25): SEQ ID NO: 458; WAN0249TT; Start 45; Stop 69
tctgtaatggaagtggagcgaagtg

SEQ ID NO: 264292 - DNA, 25 bp, Artificial
  probe
  misc_feature (1)..(25): SEQ ID NO: 458; WAN0249TT; Start 156; Stop 180
agatatgaacaaattgattgaggaa

SEQ ID NO: 264293 - DNA, 25 bp, Artificial
  probe
  misc_feature (1)..(25): SEQ ID NO: 458; WAN0249TT; Start 155; Stop 179
aagatatgaacaaattgattgagga

SEQ ID NO: 264294 - DNA, 25 bp, Artificial
  probe
  misc_feature (1)..(25): SEQ ID NO: 458; WAN0249TT; Start 25; Stop 49
cccatagtagtgaagaaacttctgt

SEQ ID NO: 264295 - DNA, 25 bp, Artificial
  probe
  misc_feature (1)..(25): SEQ ID NO: 458; WAN0249TT; Start 22; Stop 46
gagcccatagtagtgaagaaacttc

SEQ ID NO: 264296 - DNA, 25 bp, Artificial
  probe
  misc_feature (1)..(25): SEQ ID NO: 458; WAN0249TT; Start 33; Stop 57
agtgaagaaacttctgtaatggaag

SEQ ID NO: 264297 - DNA, 25 bp, Artificial
  probe
  misc_feature (1)..(25): SEQ ID NO: 458; WAN0249TT; Start 24; Stop 48
gcccatagtagtgaagaaacttctg

SEQ ID NO: 264298 - DNA, 25 bp, Artificial
  probe
  misc_feature (1)..(25): SEQ ID NO: 458; WAN0249TT; Start 23; Stop 47
agcccatagtagtgaagaaacttct

SEQ ID NO: 264299 - DNA, 25 bp, Artificial
  probe
  misc_feature (1)..(25): SEQ ID NO: 458; WAN0249TT; Start 31; Stop 55
gtagtgaagaaacttctgtaatgga

SEQ ID NO: 264300 - DNA, 25 bp, Artificial
  probe
  misc_feature (1)..(25): SEQ ID NO: 458; WAN0249TT; Start 30; Stop 54
agtagtgaagaaacttctgtaatgg

SEQ ID NO: 264301 - DNA, 25 bp, Artificial
  probe
  misc_feature (1)..(25): SEQ ID NO: 458; WAN0249TT; Start 20; Stop 44
ccgagcccatagtagtgaagaaact

SEQ ID NO: 264302 - DNA, 25 bp, Artificial
  probe
  misc_feature (1)..(25): SEQ ID NO: 458; WAN0249TT; Start 157; Stop 181
gatatgaacaaattgattgaggaaa

SEQ ID NO: 264303 - DNA, 25 bp, Artificial
  probe
  misc_feature (1)..(25): SEQ ID NO: 458; WAN0249TT; Start 43; Stop 67
cttctgtaatggaagtggagcgaag

SEQ ID NO: 264304 - DNA, 25 bp, Artificial
  probe
  misc_feature (1)..(25): SEQ ID NO: 458; WAN0249TT; Start 32; Stop 56
tagtgaagaaacttctgtaatggaa

SEQ ID NO: 264305 - DNA, 25 bp, Artificial
  probe
  misc_feature (1)..(25): SEQ ID NO: 458; WAN0249TT; Start 26; Stop 50
ccatagtagtgaagaaacttctgta

SEQ ID NO: 264306 - DNA, 25 bp, Artificial
  probe
  misc_feature (1)..(25): SEQ ID NO: 458; WAN0249TT; Start 119; Stop 143
aagatagggtaaggtgaaattatag

SEQ ID NO: 264307 - DNA, 25 bp, Artificial
  probe
  misc_feature (1)..(25): SEQ ID NO: 458; WAN0249TT; Start 158; Stop 182
atatgaacaaattgattgaggaaat

SEQ ID NO: 264308 - DNA, 25 bp, Artificial
  probe
  misc_feature (1)..(25): SEQ ID NO: 458; WAN0249TT; Start 154; Stop 178
taagatatgaacaaattgattgagg

SEQ ID NO: 264309 - DNA, 25 bp, Artificial
  probe
  misc_feature (1)..(25): SEQ ID NO: 458; WAN0249TT; Start 64; Stop 88
gaagtgaggaatcgtcaaacggtag

SEQ ID NO: 264310 - DNA, 25 bp, Artificial
  probe
  misc_feature (1)..(25): SEQ ID NO: 458; WAN0249TT; Start 118; Stop 142
aaagatagggtaaggtgaaattata

SEQ ID NO: 264311 - DNA, 25 bp, Artificial
  probe
  misc_feature (1)..(25): SEQ ID NO: 458; WAN0249TT; Start 193; Stop 217
tatagaaatcttttagcagtcatgg

SEQ ID NO: 264312 - DNA, 25 bp, Artificial
  probe
  misc_feature (1)..(25): SEQ ID NO: 458; WAN0249TT; Start 29; Stop 53
tagtagtgaagaaacttctgtaatg

SEQ ID NO: 264313 - DNA, 25 bp, Artificial
  probe
  misc_feature (1)..(25): SEQ ID NO: 458; WAN0249TT; Start 27; Stop 51
catagtagtgaagaaacttctgtaa

SEQ ID NO: 264314 - DNA, 25 bp, Artificial
  probe
  misc_feature (1)..(25): SEQ ID NO: 458; WAN0249TT; Start 117; Stop 141
aaaagatagggtaaggtgaaattat

SEQ ID NO: 264315 - DNA, 25 bp, Artificial
  probe
  misc_feature (1)..(25): SEQ ID NO: 458; WAN0249TT; Start 65; Stop 89
aagtgaggaatcgtcaaacggtagg

SEQ ID NO: 264316 - DNA, 25 bp, Artificial
  probe
  misc_feature (1)..(25): SEQ ID NO: 458; WAN0249TT; Start 28; Stop 52
atagtagtgaagaaacttctgtaat

SEQ ID NO: 264317 - DNA, 25 bp, Artificial
  probe
  misc_feature (1)..(25): SEQ ID NO: 458; WAN0249TT; Start 63; Stop 87
cgaagtgaggaatcgtcaaacggta

SEQ ID NO: 264318 - DNA, 25 bp, Artificial
  probe
  misc_feature (1)..(25): SEQ ID NO: 458; WAN0249TT; Start 192; Stop 216
ttatagaaatcttttagcagtcatg

SEQ ID NO: 264319 - DNA, 25 bp, Artificial
  probe
  misc_feature (1)..(25): SEQ ID NO: 458; WAN0249TT; Start 72; Stop 96
gaatcgtcaaacggtaggggatagg

SEQ ID NO: 264320 - DNA, 25 bp, Artificial
  probe
  misc_feature (1)..(25): SEQ ID NO: 459; WAN024A94; Start 47; Stop 71
aatttgattgactccattaggattt

SEQ ID NO: 264321 - DNA, 25 bp, Artificial
  probe
  misc_feature (1)..(25): SEQ ID NO: 459; WAN024A94; Start 46; Stop 70
aaatttgattgactccattaggatt

SEQ ID NO: 264322 - DNA, 25 bp, Artificial
  probe
  misc_feature (1)..(25): SEQ ID NO: 459; WAN024A94; Start 97; Stop 121
aagtaaggaaaccaatctgaatcct

SEQ ID NO: 264323 - DNA, 25 bp, Artificial
  probe
  misc_feature (1)..(25): SEQ ID NO: 459; WAN024A94; Start 98; Stop 122
agtaaggaaaccaatctgaatccta

SEQ ID NO: 264324 - DNA, 25 bp, Artificial
  probe
  misc_feature (1)..(25): SEQ ID NO: 459; WAN024A94; Start 38; Stop 62
tttacggaaaatttgattgactcca

SEQ ID NO: 264325 - DNA, 25 bp, Artificial
  probe
  misc_feature (1)..(25): SEQ ID NO: 459; WAN024A94; Start 41; Stop 65
acggaaaatttgattgactccatta

SEQ ID NO: 264326 - DNA, 25 bp, Artificial
  probe
  misc_feature (1)..(25): SEQ ID NO: 459; WAN024A94; Start 40; Stop 64
tacggaaaatttgattgactccatt

SEQ ID NO: 264327 - DNA, 25 bp, Artificial
  probe
  misc_feature (1)..(25): SEQ ID NO: 459; WAN024A94; Start 39; Stop 63
ttacggaaaatttgattgactccat

SEQ ID NO: 264328 - DNA, 25 bp, Artificial
  probe
  misc_feature (1)..(25): SEQ ID NO: 459; WAN024A94; Start 99; Stop 123
gtaaggaaaccaatctgaatcctaa

SEQ ID NO: 264329 - DNA, 25 bp, Artificial
  probe
  misc_feature (1)..(25): SEQ ID NO: 459; WAN024A94; Start 42; Stop 66
cggaaaatttgattgactccattag

SEQ ID NO: 264330 - DNA, 25 bp, Artificial
  probe
  misc_feature (1)..(25): SEQ ID NO: 459; WAN024A94; Start 37; Stop 61
ttttacggaaaatttgattgactcc

SEQ ID NO: 264331 - DNA, 25 bp, Artificial
  probe
  misc_feature (1)..(25): SEQ ID NO: 459; WAN024A94; Start 43; Stop 67
ggaaaatttgattgactccattagg

SEQ ID NO: 264332 - DNA, 25 bp, Artificial
  probe
  misc_feature (1)..(25): SEQ ID NO: 459; WAN024A94; Start 103; Stop 127
ggaaaccaatctgaatcctaaaata

SEQ ID NO: 264333 - DNA, 25 bp, Artificial
  probe
  misc_feature (1)..(25): SEQ ID NO: 459; WAN024A94; Start 48; Stop 72
atttgattgactccattaggatttt

SEQ ID NO: 264334 - DNA, 25 bp, Artificial
  probe
  misc_feature (1)..(25): SEQ ID NO: 459; WAN024A94; Start 100; Stop 124
taaggaaaccaatctgaatcctaaa

SEQ ID NO: 264335 - DNA, 25 bp, Artificial
  probe
  misc_feature (1)..(25): SEQ ID NO: 459; WAN024A94; Start 104; Stop 128
gaaaccaatctgaatcctaaaatag

SEQ ID NO: 264336 - DNA, 25 bp, Artificial
  probe
  misc_feature (1)..(25): SEQ ID NO: 459; WAN024A94; Start 107; Stop 131
accaatctgaatcctaaaatagaaa

SEQ ID NO: 264337 - DNA, 25 bp, Artificial
  probe
  misc_feature (1)..(25): SEQ ID NO: 459; WAN024A94; Start 106; Stop 130
aaccaatctgaatcctaaaatagaa

SEQ ID NO: 264338 - DNA, 25 bp, Artificial
  probe
  misc_feature (1)..(25): SEQ ID NO: 459; WAN024A94; Start 105; Stop 129
aaaccaatctgaatcctaaaataga

SEQ ID NO: 264339 - DNA, 25 bp, Artificial
  probe
  misc_feature (1)..(25): SEQ ID NO: 459; WAN024A94; Start 44; Stop 68
gaaaatttgattgactccattagga

SEQ ID NO: 264340 - DNA, 25 bp, Artificial
  probe
  misc_feature (1)..(25): SEQ ID NO: 459; WAN024A94; Start 108; Stop 132
ccaatctgaatcctaaaatagaaag

SEQ ID NO: 264341 - DNA, 25 bp, Artificial
  probe
  misc_feature (1)..(25): SEQ ID NO: 459; WAN024A94; Start 45; Stop 69
aaaatttgattgactccattaggat

SEQ ID NO: 264342 - DNA, 25 bp, Artificial
  probe
  misc_feature (1)..(25): SEQ ID NO: 459; WAN024A94; Start 2; Stop 26
ggacacctcttttcttataagttga

SEQ ID NO: 264343 - DNA, 25 bp, Artificial
  probe
  misc_feature (1)..(25): SEQ ID NO: 459; WAN024A94; Start 101; Stop 125
aaggaaaccaatctgaatcctaaaa

SEQ ID NO: 264344 - DNA, 25 bp, Artificial
  probe
  misc_feature (1)..(25): SEQ ID NO: 459; WAN024A94; Start 102; Stop 126
aggaaaccaatctgaatcctaaaat

SEQ ID NO: 264345 - DNA, 25 bp, Artificial
  probe
  misc_feature (1)..(25): SEQ ID NO: 459; WAN024A94; Start 1; Stop 25
aggacacctcttttcttataagttg

SEQ ID NO: 264346 - DNA, 25 bp, Artificial
  probe
  misc_feature (1)..(25): SEQ ID NO: 459; WAN024A94; Start 36; Stop 60
attttacggaaaatttgattgactc

SEQ ID NO: 264347 - DNA, 25 bp, Artificial
  probe
  misc_feature (1)..(25): SEQ ID NO: 459; WAN024A94; Start 3; Stop 27
gacacctcttttcttataagttgat

SEQ ID NO: 264348 - DNA, 25 bp, Artificial
  probe
  misc_feature (1)..(25): SEQ ID NO: 459; WAN024A94; Start 4; Stop 28
acacctcttttcttataagttgatt

SEQ ID NO: 264349 - DNA, 25 bp, Artificial
  probe
  misc_feature (1)..(25): SEQ ID NO: 460; WAN0249GM; Start 20; Stop 44
agaaagctaaattatttgtgtctct

SEQ ID NO: 264350 - DNA, 25 bp, Artificial
  probe
  misc_feature (1)..(25): SEQ ID NO: 460; WAN0249GM; Start 25; Stop 49
gctaaattatttgtgtctctattga

SEQ ID NO: 264351 - DNA, 25 bp, Artificial
  probe
  misc_feature (1)..(25): SEQ ID NO: 460; WAN0249GM; Start 19; Stop 43
aagaaagctaaattatttgtgtctc

SEQ ID NO: 264352 - DNA, 25 bp, Artificial
  probe
  misc_feature (1)..(25): SEQ ID NO: 460; WAN0249GM; Start 38; Stop 62
tgtctctattgataaattcaaaggg

SEQ ID NO: 264353 - DNA, 25 bp, Artificial
  probe
  misc_feature (1)..(25): SEQ ID NO: 460; WAN0249GM; Start 24; Stop 48
agctaaattatttgtgtctctattg

SEQ ID NO: 264354 - DNA, 25 bp, Artificial
  probe
  misc_feature (1)..(25): SEQ ID NO: 460; WAN0249GM; Start 21; Stop 45
gaaagctaaattatttgtgtctcta

SEQ ID NO: 264355 - DNA, 25 bp, Artificial
  probe
  misc_feature (1)..(25): SEQ ID NO: 460; WAN0249GM; Start 37; Stop 61
gtgtctctattgataaattcaaagg

SEQ ID NO: 264356 - DNA, 25 bp, Artificial
  probe
  misc_feature (1)..(25): SEQ ID NO: 460; WAN0249GM; Start 39; Stop 63
gtctctattgataaattcaaagggg

SEQ ID NO: 264357 - DNA, 25 bp, Artificial
  probe
  misc_feature (1)..(25): SEQ ID NO: 460; WAN0249GM; Start 18; Stop 42
taagaaagctaaattatttgtgtct

SEQ ID NO: 264358 - DNA, 25 bp, Artificial
  probe
  misc_feature (1)..(25): SEQ ID NO: 460; WAN0249GM; Start 36; Stop 60
tgtgtctctattgataaattcaaag

SEQ ID NO: 264359 - DNA, 25 bp, Artificial
  probe
  misc_feature (1)..(25): SEQ ID NO: 460; WAN0249GM; Start 35; Stop 59
ttgtgtctctattgataaattcaaa

SEQ ID NO: 264360 - DNA, 25 bp, Artificial
  probe
  misc_feature (1)..(25): SEQ ID NO: 460; WAN0249GM; Start 34; Stop 58
tttgtgtctctattgataaattcaa

SEQ ID NO: 264361 - DNA, 25 bp, Artificial
  probe
  misc_feature (1)..(25): SEQ ID NO: 461; WAN0249ZY; Start 24; Stop 48
ttcagccgactatactccgttattg

SEQ ID NO: 264362 - DNA, 25 bp, Artificial
  probe
  misc_feature (1)..(25): SEQ ID NO: 461; WAN0249ZY; Start 13; Stop 37
cctattcttgtttcagccgactata

SEQ ID NO: 264363 - DNA, 25 bp, Artificial
  probe
  misc_feature (1)..(25): SEQ ID NO: 461; WAN0249ZY; Start 15; Stop 39
tattcttgtttcagccgactatact

SEQ ID NO: 264364 - DNA, 25 bp, Artificial
  probe
  misc_feature (1)..(25): SEQ ID NO: 461; WAN0249ZY; Start 14; Stop 38
ctattcttgtttcagccgactatac

SEQ ID NO: 264365 - DNA, 25 bp, Artificial
  probe
  misc_feature (1)..(25): SEQ ID NO: 461; WAN0249ZY; Start 16; Stop 40
attcttgtttcagccgactatactc

SEQ ID NO: 264366 - DNA, 25 bp, Artificial
  probe
  misc_feature (1)..(25): SEQ ID NO: 461; WAN0249ZY; Start 12; Stop 36
tcctattcttgtttcagccgactat

SEQ ID NO: 264367 - DNA, 25 bp, Artificial
  probe
  misc_feature (1)..(25): SEQ ID NO: 461; WAN0249ZY; Start 131; Stop 155
aattgacaatctcggtagatacctc

SEQ ID NO: 264368 - DNA, 25 bp, Artificial
  probe
  misc_feature (1)..(25): SEQ ID NO: 461; WAN0249ZY; Start 130; Stop 154
gaattgacaatctcggtagatacct

SEQ ID NO: 264369 - DNA, 25 bp, Artificial
  probe
  misc_feature (1)..(25): SEQ ID NO: 461; WAN0249ZY; Start 129; Stop 153
agaattgacaatctcggtagatacc

SEQ ID NO: 264370 - DNA, 25 bp, Artificial
  probe
  misc_feature (1)..(25): SEQ ID NO: 461; WAN0249ZY; Start 23; Stop 47
tttcagccgactatactccgttatt

SEQ ID NO: 264371 - DNA, 25 bp, Artificial
  probe
  misc_feature (1)..(25): SEQ ID NO: 461; WAN0249ZY; Start 136; Stop 160
acaatctcggtagatacctcgttat

SEQ ID NO: 264372 - DNA, 25 bp, Artificial
  probe
  misc_feature (1)..(25): SEQ ID NO: 461; WAN0249ZY; Start 139; Stop 163
atctcggtagatacctcgttatagc

SEQ ID NO: 264373 - DNA, 25 bp, Artificial
  probe
  misc_feature (1)..(25): SEQ ID NO: 461; WAN0249ZY; Start 137; Stop 161
caatctcggtagatacctcgttata

SEQ ID NO: 264374 - DNA, 25 bp, Artificial
  probe
  misc_feature (1)..(25): SEQ ID NO: 461; WAN0249ZY; Start 138; Stop 162
aatctcggtagatacctcgttatag

SEQ ID NO: 264375 - DNA, 25 bp, Artificial
  probe
  misc_feature (1)..(25): SEQ ID NO: 461; WAN0249ZY; Start 135; Stop 159
gacaatctcggtagatacctcgtta

SEQ ID NO: 264376 - DNA, 25 bp, Artificial
  probe
  misc_feature (1)..(25): SEQ ID NO: 461; WAN0249ZY; Start 22; Stop 46
gtttcagccgactatactccgttat

SEQ ID NO: 264377 - DNA, 25 bp, Artificial
  probe
  misc_feature (1)..(25): SEQ ID NO: 461; WAN0249ZY; Start 17; Stop 41
ttcttgtttcagccgactatactcc

SEQ ID NO: 264378 - DNA, 25 bp, Artificial
  probe
  misc_feature (1)..(25): SEQ ID NO: 461; WAN0249ZY; Start 132; Stop 156
attgacaatctcggtagatacctcg

SEQ ID NO: 264379 - DNA, 25 bp, Artificial
  probe
  misc_feature (1)..(25): SEQ ID NO: 461; WAN0249ZY; Start 25; Stop 49
tcagccgactatactccgttattgg

SEQ ID NO: 264380 - DNA, 25 bp, Artificial
  probe
  misc_feature (1)..(25): SEQ ID NO: 461; WAN0249ZY; Start 8; Stop 32
tttgtcctattcttgtttcagccga

SEQ ID NO: 264381 - DNA, 25 bp, Artificial
  probe
  misc_feature (1)..(25): SEQ ID NO: 461; WAN0249ZY; Start 121; Stop 145
tatactggagaattgacaatctcgg

SEQ ID NO: 264382 - DNA, 25 bp, Artificial
  probe
  misc_feature (1)..(25): SEQ ID NO: 461; WAN0249ZY; Start 140; Stop 164
tctcggtagatacctcgttatagcg

SEQ ID NO: 264383 - DNA, 25 bp, Artificial
  probe
  misc_feature (1)..(25): SEQ ID NO: 461; WAN0249ZY; Start 127; Stop 151
ggagaattgacaatctcggtagata

SEQ ID NO: 264384 - DNA, 25 bp, Artificial
  probe
  misc_feature (1)..(25): SEQ ID NO: 461; WAN0249ZY; Start 11; Stop 35
gtcctattcttgtttcagccgacta

SEQ ID NO: 264385 - DNA, 25 bp, Artificial
  probe
  misc_feature (1)..(25): SEQ ID NO: 461; WAN0249ZY; Start 123; Stop 147
tactggagaattgacaatctcggta

SEQ ID NO: 264386 - DNA, 25 bp, Artificial
  probe
  misc_feature (1)..(25): SEQ ID NO: 461; WAN0249ZY; Start 134; Stop 158
tgacaatctcggtagatacctcgtt

SEQ ID NO: 264387 - DNA, 25 bp, Artificial
  probe
  misc_feature (1)..(25): SEQ ID NO: 461; WAN0249ZY; Start 133; Stop 157
ttgacaatctcggtagatacctcgt

SEQ ID NO: 264388 - DNA, 25 bp, Artificial
  probe
  misc_feature (1)..(25): SEQ ID NO: 461; WAN0249ZY; Start 128; Stop 152
gagaattgacaatctcggtagatac

SEQ ID NO: 264389 - DNA, 25 bp, Artificial
  probe
  misc_feature (1)..(25): SEQ ID NO: 461; WAN0249ZY; Start 126; Stop 150
tggagaattgacaatctcggtagat

SEQ ID NO: 264390 - DNA, 25 bp, Artificial
  probe
  misc_feature (1)..(25): SEQ ID NO: 461; WAN0249ZY; Start 153; Stop 177
ctcgttatagcgcggttacttatta

SEQ ID NO: 264391 - DNA, 25 bp, Artificial
  probe
  misc_feature (1)..(25): SEQ ID NO: 461; WAN0249ZY; Start 21; Stop 45
tgtttcagccgactatactccgtta

SEQ ID NO: 264392 - DNA, 25 bp, Artificial
  probe
  misc_feature (1)..(25): SEQ ID NO: 461; WAN0249ZY; Start 5; Stop 29
acttttgtcctattcttgtttcagc

SEQ ID NO: 264393 - DNA, 25 bp, Artificial
  probe
  misc_feature (1)..(25): SEQ ID NO: 461; WAN0249ZY; Start 3; Stop 27
gcacttttgtcctattcttgtttca

SEQ ID NO: 264394 - DNA, 25 bp, Artificial
  probe
  misc_feature (1)..(25): SEQ ID NO: 462; WAN0249ON; Start 2; Stop 26
ggctagtcccctttatttctctata

SEQ ID NO: 264395 - DNA, 25 bp, Artificial
  probe
  misc_feature (1)..(25): SEQ ID NO: 462; WAN0249ON; Start 1; Stop 25
aggctagtcccctttatttctctat

SEQ ID NO: 264396 - DNA, 25 bp, Artificial
  probe
  misc_feature (1)..(25): SEQ ID NO: 462; WAN0249ON; Start 3; Stop 27
gctagtcccctttatttctctataa

SEQ ID NO: 264397 - DNA, 25 bp, Artificial
  probe
  misc_feature (1)..(25): SEQ ID NO: 462; WAN0249ON; Start 27; Stop 51
aaaacagttatttggagtttcggtc

SEQ ID NO: 264398 - DNA, 25 bp, Artificial
  probe
  misc_feature (1)..(25): SEQ ID NO: 462; WAN0249ON; Start 4; Stop 28
ctagtcccctttatttctctataaa

SEQ ID NO: 264399 - DNA, 25 bp, Artificial
  probe
  misc_feature (1)..(25): SEQ ID NO: 463; WAN0249W4; Start 11; Stop 35
cctttacatgagtcatactggaaga

SEQ ID NO: 264400 - DNA, 25 bp, Artificial
  probe
  misc_feature (1)..(25): SEQ ID NO: 463; WAN0249W4; Start 12; Stop 36
ctttacatgagtcatactggaagac

SEQ ID NO: 264401 - DNA, 25 bp, Artificial
  probe
  misc_feature (1)..(25): SEQ ID NO: 463; WAN0249W4; Start 10; Stop 34
tcctttacatgagtcatactggaag

SEQ ID NO: 264402 - DNA, 25 bp, Artificial
  probe
  misc_feature (1)..(25): SEQ ID NO: 463; WAN0249W4; Start 9; Stop 33
ctcctttacatgagtcatactggaa

SEQ ID NO: 264403 - DNA, 25 bp, Artificial
  probe
  misc_feature (1)..(25): SEQ ID NO: 463; WAN0249W4; Start 6; Stop 30
aagctcctttacatgagtcatactg

SEQ ID NO: 264404 - DNA, 25 bp, Artificial
  probe
  misc_feature (1)..(25): SEQ ID NO: 463; WAN0249W4; Start 19; Stop 43
tgagtcatactggaagactagatca

SEQ ID NO: 264405 - DNA, 25 bp, Artificial
  probe
  misc_feature (1)..(25): SEQ ID NO: 463; WAN0249W4; Start 16; Stop 40
acatgagtcatactggaagactaga

SEQ ID NO: 264406 - DNA, 25 bp, Artificial
  probe
  misc_feature (1)..(25): SEQ ID NO: 463; WAN0249W4; Start 20; Stop 44
gagtcatactggaagactagatcag

SEQ ID NO: 264407 - DNA, 25 bp, Artificial
  probe
  misc_feature (1)..(25): SEQ ID NO: 463; WAN0249W4; Start 17; Stop 41
catgagtcatactggaagactagat

SEQ ID NO: 264408 - DNA, 25 bp, Artificial
  probe
  misc_feature (1)..(25): SEQ ID NO: 463; WAN0249W4; Start 8; Stop 32
gctcctttacatgagtcatactgga

SEQ ID NO: 264409 - DNA, 25 bp, Artificial
  probe
  misc_feature (1)..(25): SEQ ID NO: 463; WAN0249W4; Start 7; Stop 31
agctcctttacatgagtcatactgg

SEQ ID NO: 264410 - DNA, 25 bp, Artificial
  probe
  misc_feature (1)..(25): SEQ ID NO: 463; WAN0249W4; Start 18; Stop 42
atgagtcatactggaagactagatc

SEQ ID NO: 264411 - DNA, 25 bp, Artificial
  probe
  misc_feature (1)..(25): SEQ ID NO: 463; WAN0249W4; Start 15; Stop 39
tacatgagtcatactggaagactag

SEQ ID NO: 264412 - DNA, 25 bp, Artificial
  probe
  misc_feature (1)..(25): SEQ ID NO: 463; WAN0249W4; Start 50; Stop 74
agtcacacttcattataacacataa

SEQ ID NO: 264413 - DNA, 25 bp, Artificial
  probe
  misc_feature (1)..(25): SEQ ID NO: 463; WAN0249W4; Start 47; Stop 71
aatagtcacacttcattataacaca

SEQ ID NO: 264414 - DNA, 25 bp, Artificial
  probe
  misc_feature (1)..(25): SEQ ID NO: 463; WAN0249W4; Start 14; Stop 38
ttacatgagtcatactggaagacta

SEQ ID NO: 264415 - DNA, 25 bp, Artificial
  probe
  misc_feature (1)..(25): SEQ ID NO: 463; WAN0249W4; Start 5; Stop 29
aaagctcctttacatgagtcatact

SEQ ID NO: 264416 - DNA, 25 bp, Artificial
  probe
  misc_feature (1)..(25): SEQ ID NO: 463; WAN0249W4; Start 3; Stop 27
ggaaagctcctttacatgagtcata

SEQ ID NO: 264417 - DNA, 25 bp, Artificial
  probe
  misc_feature (1)..(25): SEQ ID NO: 463; WAN0249W4; Start 4; Stop 28
gaaagctcctttacatgagtcatac

SEQ ID NO: 264418 - DNA, 25 bp, Artificial
  probe
  misc_feature (1)..(25): SEQ ID NO: 463; WAN0249W4; Start 48; Stop 72
atagtcacacttcattataacacat

SEQ ID NO: 264419 - DNA, 25 bp, Artificial
  probe
  misc_feature (1)..(25): SEQ ID NO: 463; WAN0249W4; Start 46; Stop 70
gaatagtcacacttcattataacac

SEQ ID NO: 264420 - DNA, 25 bp, Artificial
  probe
  misc_feature (1)..(25): SEQ ID NO: 463; WAN0249W4; Start 132; Stop 156
gcttctctcttttccataattttct

SEQ ID NO: 264421 - DNA, 25 bp, Artificial
  probe
  misc_feature (1)..(25): SEQ ID NO: 463; WAN0249W4; Start 190; Stop 214
taagttagaaatgagactgatttgt

SEQ ID NO: 264422 - DNA, 25 bp, Artificial
  probe
  misc_feature (1)..(25): SEQ ID NO: 463; WAN0249W4; Start 49; Stop 73
tagtcacacttcattataacacata

SEQ ID NO: 264423 - DNA, 25 bp, Artificial
  probe
  misc_feature (1)..(25): SEQ ID NO: 463; WAN0249W4; Start 13; Stop 37
tttacatgagtcatactggaagact

SEQ ID NO: 264424 - DNA, 25 bp, Artificial
  probe
  misc_feature (1)..(25): SEQ ID NO: 463; WAN0249W4; Start 2; Stop 26
gggaaagctcctttacatgagtcat

SEQ ID NO: 264425 - DNA, 25 bp, Artificial
  probe
  misc_feature (1)..(25): SEQ ID NO: 463; WAN0249W4; Start 165; Stop 189
tgtggtacaattaagagtaagattt

SEQ ID NO: 264426 - DNA, 25 bp, Artificial
  probe
  misc_feature (1)..(25): SEQ ID NO: 463; WAN0249W4; Start 131; Stop 155
agcttctctcttttccataattttc

SEQ ID NO: 264427 - DNA, 25 bp, Artificial
  probe
  misc_feature (1)..(25): SEQ ID NO: 463; WAN0249W4; Start 164; Stop 188
ttgtggtacaattaagagtaagatt

SEQ ID NO: 264428 - DNA, 25 bp, Artificial
  probe
  misc_feature (1)..(25): SEQ ID NO: 463; WAN0249W4; Start 51; Stop 75
gtcacacttcattataacacataat

SEQ ID NO: 264429 - DNA, 25 bp, Artificial
  probe
  misc_feature (1)..(25): SEQ ID NO: 463; WAN0249W4; Start 1; Stop 25
agggaaagctcctttacatgagtca

SEQ ID NO: 264430 - DNA, 25 bp, Artificial
  probe
  misc_feature (1)..(25): SEQ ID NO: 463; WAN0249W4; Start 189; Stop 213
ttaagttagaaatgagactgatttg

SEQ ID NO: 264431 - DNA, 25 bp, Artificial
  probe
  misc_feature (1)..(25): SEQ ID NO: 463; WAN0249W4; Start 137; Stop 161
tctcttttccataattttctactca

SEQ ID NO: 264432 - DNA, 25 bp, Artificial
  probe
  misc_feature (1)..(25): SEQ ID NO: 464; WAN024ABD; Start 1; Stop 25
agggaatttcctcctttacttcttt

SEQ ID NO: 264433 - DNA, 25 bp, Artificial
  probe
  misc_feature (1)..(25): SEQ ID NO: 464; WAN024ABD; Start 6; Stop 30
atttcctcctttacttctttagagt

SEQ ID NO: 264434 - DNA, 25 bp, Artificial
  probe
  misc_feature (1)..(25): SEQ ID NO: 464; WAN024ABD; Start 2; Stop 26
gggaatttcctcctttacttcttta

SEQ ID NO: 264435 - DNA, 25 bp, Artificial
  probe
  misc_feature (1)..(25): SEQ ID NO: 464; WAN024ABD; Start 4; Stop 28
gaatttcctcctttacttctttaga

SEQ ID NO: 264436 - DNA, 25 bp, Artificial
  probe
  misc_feature (1)..(25): SEQ ID NO: 464; WAN024ABD; Start 5; Stop 29
aatttcctcctttacttctttagag

SEQ ID NO: 264437 - DNA, 25 bp, Artificial
  probe
  misc_feature (1)..(25): SEQ ID NO: 464; WAN024ABD; Start 3; Stop 27
ggaatttcctcctttacttctttag

SEQ ID NO: 264438 - DNA, 25 bp, Artificial
  probe
  misc_feature (1)..(25): SEQ ID NO: 464; WAN024ABD; Start 7; Stop 31
tttcctcctttacttctttagagta

SEQ ID NO: 264439 - DNA, 25 bp, Artificial
  probe
  misc_feature (1)..(25): SEQ ID NO: 464; WAN024ABD; Start 8; Stop 32
ttcctcctttacttctttagagtaa

SEQ ID NO: 264440 - DNA, 25 bp, Artificial
  probe
  misc_feature (1)..(25): SEQ ID NO: 464; WAN024ABD; Start 9; Stop 33
tcctcctttacttctttagagtaat

SEQ ID NO: 264441 - DNA, 25 bp, Artificial
  probe
  misc_feature (1)..(25): SEQ ID NO: 464; WAN024ABD; Start 10; Stop 34
cctcctttacttctttagagtaata

SEQ ID NO: 264442 - DNA, 25 bp, Artificial
  probe
  misc_feature (1)..(25): SEQ ID NO: 465; WAN024ADQ; Start 140; Stop 164
gcagttatagcgttcttagaaggta

SEQ ID NO: 264443 - DNA, 25 bp, Artificial
  probe
  misc_feature (1)..(25): SEQ ID NO: 465; WAN024ADQ; Start 63; Stop 87
aagatgtatcacttggtatagaagc

SEQ ID NO: 264444 - DNA, 25 bp, Artificial
  probe
  misc_feature (1)..(25): SEQ ID NO: 465; WAN024ADQ; Start 138; Stop 162
cagcagttatagcgttcttagaagg

SEQ ID NO: 264445 - DNA, 25 bp, Artificial
  probe
  misc_feature (1)..(25): SEQ ID NO: 465; WAN024ADQ; Start 139; Stop 163
agcagttatagcgttcttagaaggt

SEQ ID NO: 264446 - DNA, 25 bp, Artificial
  probe
  misc_feature (1)..(25): SEQ ID NO: 465; WAN024ADQ; Start 137; Stop 161
gcagcagttatagcgttcttagaag

SEQ ID NO: 264447 - DNA, 25 bp, Artificial
  probe
  misc_feature (1)..(25): SEQ ID NO: 465; WAN024ADQ; Start 135; Stop 159
gagcagcagttatagcgttcttaga

SEQ ID NO: 264448 - DNA, 25 bp, Artificial
  probe
  misc_feature (1)..(25): SEQ ID NO: 465; WAN024ADQ; Start 141; Stop 165
cagttatagcgttcttagaaggtat

SEQ ID NO: 264449 - DNA, 25 bp, Artificial
  probe
  misc_feature (1)..(25): SEQ ID NO: 465; WAN024ADQ; Start 136; Stop 160
agcagcagttatagcgttcttagaa

SEQ ID NO: 264450 - DNA, 25 bp, Artificial
  probe
  misc_feature (1)..(25): SEQ ID NO: 465; WAN024ADQ; Start 64; Stop 88
agatgtatcacttggtatagaagct

SEQ ID NO: 264451 - DNA, 25 bp, Artificial
  probe
  misc_feature (1)..(25): SEQ ID NO: 465; WAN024ADQ; Start 134; Stop 158
ggagcagcagttatagcgttcttag

SEQ ID NO: 264452 - DNA, 25 bp, Artificial
  probe
  misc_feature (1)..(25): SEQ ID NO: 465; WAN024ADQ; Start 1; Stop 25
agggagacaggatgtaataattctg

SEQ ID NO: 264453 - DNA, 25 bp, Artificial
  probe
  misc_feature (1)..(25): SEQ ID NO: 465; WAN024ADQ; Start 142; Stop 166
agttatagcgttcttagaaggtata

SEQ ID NO: 264454 - DNA, 25 bp, Artificial
  probe
  misc_feature (1)..(25): SEQ ID NO: 465; WAN024ADQ; Start 133; Stop 157
tggagcagcagttatagcgttctta

SEQ ID NO: 264455 - DNA, 25 bp, Artificial
  probe
  misc_feature (1)..(25): SEQ ID NO: 465; WAN024ADQ; Start 19; Stop 43
aattctgtctgtttctgtttaactt

SEQ ID NO: 264456 - DNA, 25 bp, Artificial
  probe
  misc_feature (1)..(25): SEQ ID NO: 465; WAN024ADQ; Start 10; Stop 34
ggatgtaataattctgtctgtttct

SEQ ID NO: 264457 - DNA, 25 bp, Artificial
  probe
  misc_feature (1)..(25): SEQ ID NO: 465; WAN024ADQ; Start 9; Stop 33
aggatgtaataattctgtctgtttc

SEQ ID NO: 264458 - DNA, 25 bp, Artificial
  probe
  misc_feature (1)..(25): SEQ ID NO: 465; WAN024ADQ; Start 148; Stop 172
agcgttcttagaaggtataaataga

SEQ ID NO: 264459 - DNA, 25 bp, Artificial
  probe
  misc_feature (1)..(25): SEQ ID NO: 465; WAN024ADQ; Start 21; Stop 45
ttctgtctgtttctgtttaacttaa

SEQ ID NO: 264460 - DNA, 25 bp, Artificial
  probe
  misc_feature (1)..(25): SEQ ID NO: 465; WAN024ADQ; Start 13; Stop 37
tgtaataattctgtctgtttctgtt

SEQ ID NO: 264461 - DNA, 25 bp, Artificial
  probe
  misc_feature (1)..(25): SEQ ID NO: 465; WAN024ADQ; Start 132; Stop 156
ttggagcagcagttatagcgttctt

SEQ ID NO: 264462 - DNA, 25 bp, Artificial
  probe
  misc_feature (1)..(25): SEQ ID NO: 465; WAN024ADQ; Start 8; Stop 32
caggatgtaataattctgtctgttt

SEQ ID NO: 264463 - DNA, 25 bp, Artificial
  probe
  misc_feature (1)..(25): SEQ ID NO: 465; WAN024ADQ; Start 22; Stop 46
tctgtctgtttctgtttaacttaat

SEQ ID NO: 264464 - DNA, 25 bp, Artificial
  probe
  misc_feature (1)..(25): SEQ ID NO: 465; WAN024ADQ; Start 20; Stop 44
attctgtctgtttctgtttaactta

SEQ ID NO: 264465 - DNA, 25 bp, Artificial
  probe
  misc_feature (1)..(25): SEQ ID NO: 465; WAN024ADQ; Start 12; Stop 36
atgtaataattctgtctgtttctgt

SEQ ID NO: 264466 - DNA, 25 bp, Artificial
  probe
  misc_feature (1)..(25): SEQ ID NO: 465; WAN024ADQ; Start 18; Stop 42
taattctgtctgtttctgtttaact

SEQ ID NO: 264467 - DNA, 25 bp, Artificial
  probe
  misc_feature (1)..(25): SEQ ID NO: 465; WAN024ADQ; Start 143; Stop 167
gttatagcgttcttagaaggtataa

SEQ ID NO: 264468 - DNA, 25 bp, Artificial
  probe
  misc_feature (1)..(25): SEQ ID NO: 465; WAN024ADQ; Start 102; Stop 126
ttttattaagcccatacggaatacc

SEQ ID NO: 264469 - DNA, 25 bp, Artificial
  probe
  misc_feature (1)..(25): SEQ ID NO: 465; WAN024ADQ; Start 65; Stop 89
gatgtatcacttggtatagaagctt

SEQ ID NO: 264470 - DNA, 25 bp, Artificial
  probe
  misc_feature (1)..(25): SEQ ID NO: 465; WAN024ADQ; Start 11; Stop 35
gatgtaataattctgtctgtttctg

SEQ ID NO: 264471 - DNA, 25 bp, Artificial
  probe
  misc_feature (1)..(25): SEQ ID NO: 465; WAN024ADQ; Start 62; Stop 86
aaagatgtatcacttggtatagaag

SEQ ID NO: 264472 - DNA, 25 bp, Artificial
  probe
  misc_feature (1)..(25): SEQ ID NO: 465; WAN024ADQ; Start 23; Stop 47
ctgtctgtttctgtttaacttaatt

SEQ ID NO: 264473 - DNA, 25 bp, Artificial
  probe
  misc_feature (1)..(25): SEQ ID NO: 465; WAN024ADQ; Start 7; Stop 31
acaggatgtaataattctgtctgtt

SEQ ID NO: 264474 - DNA, 25 bp, Artificial
  probe
  misc_feature (1)..(25): SEQ ID NO: 465; WAN024ADQ; Start 14; Stop 38
gtaataattctgtctgtttctgttt

SEQ ID NO: 264475 - DNA, 25 bp, Artificial
  probe
  misc_feature (1)..(25): SEQ ID NO: 466; WAN024A7V; Start 56; Stop 80
aatgagagcagaatgtgagttctag

SEQ ID NO: 264476 - DNA, 25 bp, Artificial
  probe
  misc_feature (1)..(25): SEQ ID NO: 466; WAN024A7V; Start 61; Stop 85
gagcagaatgtgagttctagttctc

SEQ ID NO: 264477 - DNA, 25 bp, Artificial
  probe
  misc_feature (1)..(25): SEQ ID NO: 466; WAN024A7V; Start 59; Stop 83
gagagcagaatgtgagttctagttc

SEQ ID NO: 264478 - DNA, 25 bp, Artificial
  probe
  misc_feature (1)..(25): SEQ ID NO: 466; WAN024A7V; Start 60; Stop 84
agagcagaatgtgagttctagttct

SEQ ID NO: 264479 - DNA, 25 bp, Artificial
  probe
  misc_feature (1)..(25): SEQ ID NO: 466; WAN024A7V; Start 57; Stop 81
atgagagcagaatgtgagttctagt

SEQ ID NO: 264480 - DNA, 25 bp, Artificial
  probe
  misc_feature (1)..(25): SEQ ID NO: 466; WAN024A7V; Start 58; Stop 82
tgagagcagaatgtgagttctagtt

SEQ ID NO: 264481 - DNA, 25 bp, Artificial
  probe
  misc_feature (1)..(25): SEQ ID NO: 466; WAN024A7V; Start 55; Stop 79
aaatgagagcagaatgtgagttcta

SEQ ID NO: 264482 - DNA, 25 bp, Artificial
  probe
  misc_feature (1)..(25): SEQ ID NO: 466; WAN024A7V; Start 63; Stop 87
gcagaatgtgagttctagttctcat

SEQ ID NO: 264483 - DNA, 25 bp, Artificial
  probe
  misc_feature (1)..(25): SEQ ID NO: 466; WAN024A7V; Start 2; Stop 26
ggtagcagcattttctaactcctaa

SEQ ID NO: 264484 - DNA, 25 bp, Artificial
  probe
  misc_feature (1)..(25): SEQ ID NO: 466; WAN024A7V; Start 3; Stop 27
gtagcagcattttctaactcctaaa

SEQ ID NO: 264485 - DNA, 25 bp, Artificial
  probe
  misc_feature (1)..(25): SEQ ID NO: 466; WAN024A7V; Start 64; Stop 88
cagaatgtgagttctagttctcatt

SEQ ID NO: 264486 - DNA, 25 bp, Artificial
  probe
  misc_feature (1)..(25): SEQ ID NO: 466; WAN024A7V; Start 62; Stop 86
agcagaatgtgagttctagttctca

SEQ ID NO: 264487 - DNA, 25 bp, Artificial
  probe
  misc_feature (1)..(25): SEQ ID NO: 466; WAN024A7V; Start 26; Stop 50
aaaacaggataggagaacgggaaaa

SEQ ID NO: 264488 - DNA, 25 bp, Artificial
  probe
  misc_feature (1)..(25): SEQ ID NO: 466; WAN024A7V; Start 1; Stop 25
aggtagcagcattttctaactccta

SEQ ID NO: 264489 - DNA, 25 bp, Artificial
  probe
  misc_feature (1)..(25): SEQ ID NO: 466; WAN024A7V; Start 27; Stop 51
aaacaggataggagaacgggaaaac

SEQ ID NO: 264490 - DNA, 25 bp, Artificial
  probe
  misc_feature (1)..(25): SEQ ID NO: 466; WAN024A7V; Start 4; Stop 28
tagcagcattttctaactcctaaaa

SEQ ID NO: 264491 - DNA, 25 bp, Artificial
  probe
  misc_feature (1)..(25): SEQ ID NO: 466; WAN024A7V; Start 32; Stop 56
ggataggagaacgggaaaacgaaaa

SEQ ID NO: 264492 - DNA, 25 bp, Artificial
  probe
  misc_feature (1)..(25): SEQ ID NO: 466; WAN024A7V; Start 54; Stop 78
aaaatgagagcagaatgtgagttct

SEQ ID NO: 264493 - DNA, 25 bp, Artificial
  probe
  misc_feature (1)..(25): SEQ ID NO: 466; WAN024A7V; Start 65; Stop 89
agaatgtgagttctagttctcattt

SEQ ID NO: 264494 - DNA, 25 bp, Artificial
  probe
  misc_feature (1)..(25): SEQ ID NO: 466; WAN024A7V; Start 31; Stop 55
aggataggagaacgggaaaacgaaa

SEQ ID NO: 264495 - DNA, 25 bp, Artificial
  probe
  misc_feature (1)..(25): SEQ ID NO: 466; WAN024A7V; Start 30; Stop 54
caggataggagaacgggaaaacgaa

SEQ ID NO: 264496 - DNA, 25 bp, Artificial
  probe
  misc_feature (1)..(25): SEQ ID NO: 466; WAN024A7V; Start 28; Stop 52
aacaggataggagaacgggaaaacg

SEQ ID NO: 264497 - DNA, 25 bp, Artificial
  probe
  misc_feature (1)..(25): SEQ ID NO: 466; WAN024A7V; Start 66; Stop 90
gaatgtgagttctagttctcatttt

SEQ ID NO: 264498 - DNA, 25 bp, Artificial
  probe
  misc_feature (1)..(25): SEQ ID NO: 467; WAN0249GK; Start 2; Stop 26
ggtatctttctaaaaggtgttttct

SEQ ID NO: 264499 - DNA, 25 bp, Artificial
  probe
  misc_feature (1)..(25): SEQ ID NO: 467; WAN0249GK; Start 1; Stop 25
aggtatctttctaaaaggtgttttc

SEQ ID NO: 264500 - DNA, 25 bp, Artificial
  probe
  misc_feature (1)..(25): SEQ ID NO: 467; WAN0249GK; Start 10; Stop 34
tctaaaaggtgttttctatatgagt

SEQ ID NO: 264501 - DNA, 25 bp, Artificial
  probe
  misc_feature (1)..(25): SEQ ID NO: 467; WAN0249GK; Start 3; Stop 27
gtatctttctaaaaggtgttttcta

SEQ ID NO: 264502 - DNA, 25 bp, Artificial
  probe
  misc_feature (1)..(25): SEQ ID NO: 468; WAN0249CZ; Start 2; Stop 26
ggtatttgtgtgttactgttaaact

SEQ ID NO: 264503 - DNA, 25 bp, Artificial
  probe
  misc_feature (1)..(25): SEQ ID NO: 468; WAN0249CZ; Start 1; Stop 25
aggtatttgtgtgttactgttaaac

SEQ ID NO: 264504 - DNA, 25 bp, Artificial
  probe
  misc_feature (1)..(25): SEQ ID NO: 468; WAN0249CZ; Start 13; Stop 37
gttactgttaaactcacacatttgt

SEQ ID NO: 264505 - DNA, 25 bp, Artificial
  probe
  misc_feature (1)..(25): SEQ ID NO: 468; WAN0249CZ; Start 12; Stop 36
tgttactgttaaactcacacatttg

SEQ ID NO: 264506 - DNA, 25 bp, Artificial
  probe
  misc_feature (1)..(25): SEQ ID NO: 468; WAN0249CZ; Start 5; Stop 29
atttgtgtgttactgttaaactcac

SEQ ID NO: 264507 - DNA, 25 bp, Artificial
  probe
  misc_feature (1)..(25): SEQ ID NO: 468; WAN0249CZ; Start 4; Stop 28
tatttgtgtgttactgttaaactca

SEQ ID NO: 264508 - DNA, 25 bp, Artificial
  probe
  misc_feature (1)..(25): SEQ ID NO: 468; WAN0249CZ; Start 3; Stop 27
gtatttgtgtgttactgttaaactc

SEQ ID NO: 264509 - DNA, 25 bp, Artificial
  probe
  misc_feature (1)..(25): SEQ ID NO: 468; WAN0249CZ; Start 17; Stop 41
ctgttaaactcacacatttgtgcta

SEQ ID NO: 264510 - DNA, 25 bp, Artificial
  probe
  misc_feature (1)..(25): SEQ ID NO: 468; WAN0249CZ; Start 15; Stop 39
tactgttaaactcacacatttgtgc

SEQ ID NO: 264511 - DNA, 25 bp, Artificial
  probe
  misc_feature (1)..(25): SEQ ID NO: 468; WAN0249CZ; Start 18; Stop 42
tgttaaactcacacatttgtgctaa

SEQ ID NO: 264512 - DNA, 25 bp, Artificial
  probe
  misc_feature (1)..(25): SEQ ID NO: 468; WAN0249CZ; Start 6; Stop 30
tttgtgtgttactgttaaactcaca

SEQ ID NO: 264513 - DNA, 25 bp, Artificial
  probe
  misc_feature (1)..(25): SEQ ID NO: 468; WAN0249CZ; Start 19; Stop 43
gttaaactcacacatttgtgctaaa

SEQ ID NO: 264514 - DNA, 25 bp, Artificial
  probe
  misc_feature (1)..(25): SEQ ID NO: 468; WAN0249CZ; Start 11; Stop 35
gtgttactgttaaactcacacattt

SEQ ID NO: 264515 - DNA, 25 bp, Artificial
  probe
  misc_feature (1)..(25): SEQ ID NO: 468; WAN0249CZ; Start 16; Stop 40
actgttaaactcacacatttgtgct

SEQ ID NO: 264516 - DNA, 25 bp, Artificial
  probe
  misc_feature (1)..(25): SEQ ID NO: 468; WAN0249CZ; Start 14; Stop 38
ttactgttaaactcacacatttgtg

SEQ ID NO: 264517 - DNA, 25 bp, Artificial
  probe
  misc_feature (1)..(25): SEQ ID NO: 468; WAN0249CZ; Start 20; Stop 44
ttaaactcacacatttgtgctaaaa

SEQ ID NO: 264518 - DNA, 25 bp, Artificial
  probe
  misc_feature (1)..(25): SEQ ID NO: 468; WAN0249CZ; Start 64; Stop 88
tctagttaaaagcttgaaaatttct

SEQ ID NO: 264519 - DNA, 25 bp, Artificial
  probe
  misc_feature (1)..(25): SEQ ID NO: 469; WAN024A48; Start 8; Stop 32
tttatggtcgtcaaatgtctctaaa

SEQ ID NO: 264520 - DNA, 25 bp, Artificial
  probe
  misc_feature (1)..(25): SEQ ID NO: 469; WAN024A48; Start 9; Stop 33
ttatggtcgtcaaatgtctctaaaa

SEQ ID NO: 264521 - DNA, 25 bp, Artificial
  probe
  misc_feature (1)..(25): SEQ ID NO: 469; WAN024A48; Start 7; Stop 31
ttttatggtcgtcaaatgtctctaa

SEQ ID NO: 264522 - DNA, 25 bp, Artificial
  probe
  misc_feature (1)..(25): SEQ ID NO: 469; WAN024A48; Start 48; Stop 72
tgaattttgtaaaaggaagagtgac

SEQ ID NO: 264523 - DNA, 25 bp, Artificial
  probe
  misc_feature (1)..(25): SEQ ID NO: 469; WAN024A48; Start 43; Stop 67
tggaatgaattttgtaaaaggaaga

SEQ ID NO: 264524 - DNA, 25 bp, Artificial
  probe
  misc_feature (1)..(25): SEQ ID NO: 469; WAN024A48; Start 47; Stop 71
atgaattttgtaaaaggaagagtga

SEQ ID NO: 264525 - DNA, 25 bp, Artificial
  probe
  misc_feature (1)..(25): SEQ ID NO: 469; WAN024A48; Start 44; Stop 68
ggaatgaattttgtaaaaggaagag

SEQ ID NO: 264526 - DNA, 25 bp, Artificial
  probe
  misc_feature (1)..(25): SEQ ID NO: 469; WAN024A48; Start 46; Stop 70
aatgaattttgtaaaaggaagagtg

SEQ ID NO: 264527 - DNA, 25 bp, Artificial
  probe
  misc_feature (1)..(25): SEQ ID NO: 469; WAN024A48; Start 42; Stop 66
atggaatgaattttgtaaaaggaag

SEQ ID NO: 264528 - DNA, 25 bp, Artificial
  probe
  misc_feature (1)..(25): SEQ ID NO: 469; WAN024A48; Start 45; Stop 69
gaatgaattttgtaaaaggaagagt

SEQ ID NO: 264529 - DNA, 25 bp, Artificial
  probe
  misc_feature (1)..(25): SEQ ID NO: 469; WAN024A48; Start 41; Stop 65
aatggaatgaattttgtaaaaggaa

SEQ ID NO: 264530 - DNA, 25 bp, Artificial
  probe
  misc_feature (1)..(25): SEQ ID NO: 469; WAN024A48; Start 33; Stop 57
aatggtataatggaatgaattttgt

SEQ ID NO: 264531 - DNA, 25 bp, Artificial
  probe
  misc_feature (1)..(25): SEQ ID NO: 469; WAN024A48; Start 40; Stop 64
taatggaatgaattttgtaaaagga

SEQ ID NO: 264532 - DNA, 25 bp, Artificial
  probe
  misc_feature (1)..(25): SEQ ID NO: 470; WAN024AE2; Start 238; Stop 262
caactaatctgaagaataatggagg

SEQ ID NO: 264533 - DNA, 25 bp, Artificial
  probe
  misc_feature (1)..(25): SEQ ID NO: 470; WAN024AE2; Start 240; Stop 264
actaatctgaagaataatggaggaa

SEQ ID NO: 264534 - DNA, 25 bp, Artificial
  probe
  misc_feature (1)..(25): SEQ ID NO: 470; WAN024AE2; Start 239; Stop 263
aactaatctgaagaataatggagga

SEQ ID NO: 264535 - DNA, 25 bp, Artificial
  probe
  misc_feature (1)..(25): SEQ ID NO: 470; WAN024AE2; Start 143; Stop 167
gctatactatgtttgtcaatgttgc

SEQ ID NO: 264536 - DNA, 25 bp, Artificial
  probe
  misc_feature (1)..(25): SEQ ID NO: 470; WAN024AE2; Start 112; Stop 136
atgatttgaagaggatatttcgcaa

SEQ ID NO: 264537 - DNA, 25 bp, Artificial
  probe
  misc_feature (1)..(25): SEQ ID NO: 470; WAN024AE2; Start 118; Stop 142
tgaagaggatatttcgcaaagatat

SEQ ID NO: 264538 - DNA, 25 bp, Artificial
  probe
  misc_feature (1)..(25): SEQ ID NO: 470; WAN024AE2; Start 111; Stop 135
catgatttgaagaggatatttcgca

SEQ ID NO: 264539 - DNA, 25 bp, Artificial
  probe
  misc_feature (1)..(25): SEQ ID NO: 470; WAN024AE2; Start 117; Stop 141
ttgaagaggatatttcgcaaagata

SEQ ID NO: 264540 - DNA, 25 bp, Artificial
  probe
  misc_feature (1)..(25): SEQ ID NO: 470; WAN024AE2; Start 119; Stop 143
gaagaggatatttcgcaaagatatg

SEQ ID NO: 264541 - DNA, 25 bp, Artificial
  probe
  misc_feature (1)..(25): SEQ ID NO: 470; WAN024AE2; Start 142; Stop 166
tgctatactatgtttgtcaatgttg

SEQ ID NO: 264542 - DNA, 25 bp, Artificial
  probe
  misc_feature (1)..(25): SEQ ID NO: 470; WAN024AE2; Start 41; Stop 65
tttggagaagaaattgatagaaagc

SEQ ID NO: 264543 - DNA, 25 bp, Artificial
  probe
  misc_feature (1)..(25): SEQ ID NO: 470; WAN024AE2; Start 235; Stop 259
actcaactaatctgaagaataatgg

SEQ ID NO: 264544 - DNA, 25 bp, Artificial
  probe
  misc_feature (1)..(25): SEQ ID NO: 470; WAN024AE2; Start 237; Stop 261
tcaactaatctgaagaataatggag

SEQ ID NO: 264545 - DNA, 25 bp, Artificial
  probe
  misc_feature (1)..(25): SEQ ID NO: 470; WAN024AE2; Start 236; Stop 260
ctcaactaatctgaagaataatgga

SEQ ID NO: 264546 - DNA, 25 bp, Artificial
  probe
  misc_feature (1)..(25): SEQ ID NO: 470; WAN024AE2; Start 42; Stop 66
ttggagaagaaattgatagaaagct

SEQ ID NO: 264547 - DNA, 25 bp, Artificial
  probe
  misc_feature (1)..(25): SEQ ID NO: 470; WAN024AE2; Start 141; Stop 165
atgctatactatgtttgtcaatgtt

SEQ ID NO: 264548 - DNA, 25 bp, Artificial
  probe
  misc_feature (1)..(25): SEQ ID NO: 470; WAN024AE2; Start 113; Stop 137
tgatttgaagaggatatttcgcaaa

SEQ ID NO: 264549 - DNA, 25 bp, Artificial
  probe
  misc_feature (1)..(25): SEQ ID NO: 470; WAN024AE2; Start 116; Stop 140
tttgaagaggatatttcgcaaagat

SEQ ID NO: 264550 - DNA, 25 bp, Artificial
  probe
  misc_feature (1)..(25): SEQ ID NO: 470; WAN024AE2; Start 115; Stop 139
atttgaagaggatatttcgcaaaga

SEQ ID NO: 264551 - DNA, 25 bp, Artificial
  probe
  misc_feature (1)..(25): SEQ ID NO: 470; WAN024AE2; Start 114; Stop 138
gatttgaagaggatatttcgcaaag

SEQ ID NO: 264552 - DNA, 25 bp, Artificial
  probe
  misc_feature (1)..(25): SEQ ID NO: 470; WAN024AE2; Start 2; Stop 26
ggtcttccttctttatcttttgcta

SEQ ID NO: 264553 - DNA, 25 bp, Artificial
  probe
  misc_feature (1)..(25): SEQ ID NO: 470; WAN024AE2; Start 121; Stop 145
agaggatatttcgcaaagatatgct

SEQ ID NO: 264554 - DNA, 25 bp, Artificial
  probe
  misc_feature (1)..(25): SEQ ID NO: 470; WAN024AE2; Start 120; Stop 144
aagaggatatttcgcaaagatatgc

SEQ ID NO: 264555 - DNA, 25 bp, Artificial
  probe
  misc_feature (1)..(25): SEQ ID NO: 470; WAN024AE2; Start 144; Stop 168
ctatactatgtttgtcaatgttgca

SEQ ID NO: 264556 - DNA, 25 bp, Artificial
  probe
  misc_feature (1)..(25): SEQ ID NO: 470; WAN024AE2; Start 122; Stop 146
gaggatatttcgcaaagatatgcta

SEQ ID NO: 264557 - DNA, 25 bp, Artificial
  probe
  misc_feature (1)..(25): SEQ ID NO: 470; WAN024AE2; Start 241; Stop 265
ctaatctgaagaataatggaggaaa

SEQ ID NO: 264558 - DNA, 25 bp, Artificial
  probe
  misc_feature (1)..(25): SEQ ID NO: 470; WAN024AE2; Start 123; Stop 147
aggatatttcgcaaagatatgctat

SEQ ID NO: 264559 - DNA, 25 bp, Artificial
  probe
  misc_feature (1)..(25): SEQ ID NO: 470; WAN024AE2; Start 140; Stop 164
tatgctatactatgtttgtcaatgt

SEQ ID NO: 264560 - DNA, 25 bp, Artificial
  probe
  misc_feature (1)..(25): SEQ ID NO: 470; WAN024AE2; Start 1; Stop 25
aggtcttccttctttatcttttgct

SEQ ID NO: 264561 - DNA, 25 bp, Artificial
  probe
  misc_feature (1)..(25): SEQ ID NO: 470; WAN024AE2; Start 131; Stop 155
tcgcaaagatatgctatactatgtt

SEQ ID NO: 264562 - DNA, 25 bp, Artificial
  probe
  misc_feature (1)..(25): SEQ ID NO: 470; WAN024AE2; Start 130; Stop 154
ttcgcaaagatatgctatactatgt

SEQ ID NO: 264563 - DNA, 25 bp, Artificial
  probe
  misc_feature (1)..(25): SEQ ID NO: 470; WAN024AE2; Start 110; Stop 134
tcatgatttgaagaggatatttcgc

SEQ ID NO: 264564 - DNA, 25 bp, Artificial
  probe
  misc_feature (1)..(25): SEQ ID NO: 470; WAN024AE2; Start 243; Stop 267
aatctgaagaataatggaggaaata

SEQ ID NO: 264565 - DNA, 25 bp, Artificial
  probe
  misc_feature (1)..(25): SEQ ID NO: 471; WAN024ABF; Start 2; Stop 26
ggtcttctcctttattgtgtgacta

SEQ ID NO: 264566 - DNA, 25 bp, Artificial
  probe
  misc_feature (1)..(25): SEQ ID NO: 471; WAN024ABF; Start 3; Stop 27
gtcttctcctttattgtgtgactag

SEQ ID NO: 264567 - DNA, 25 bp, Artificial
  probe
  misc_feature (1)..(25): SEQ ID NO: 471; WAN024ABF; Start 1; Stop 25
aggtcttctcctttattgtgtgact

SEQ ID NO: 264568 - DNA, 25 bp, Artificial
  probe
  misc_feature (1)..(25): SEQ ID NO: 471; WAN024ABF; Start 4; Stop 28
tcttctcctttattgtgtgactagt

SEQ ID NO: 264569 - DNA, 25 bp, Artificial
  probe
  misc_feature (1)..(25): SEQ ID NO: 471; WAN024ABF; Start 24; Stop 48
ctagtccattagtttgattttacaa

SEQ ID NO: 264570 - DNA, 25 bp, Artificial
  probe
  misc_feature (1)..(25): SEQ ID NO: 471; WAN024ABF; Start 23; Stop 47
actagtccattagtttgattttaca

SEQ ID NO: 264571 - DNA, 25 bp, Artificial
  probe
  misc_feature (1)..(25): SEQ ID NO: 472; WAN024AQ4; Start 2; Stop 26
ggttcatcctctcccttctatttta

SEQ ID NO: 264572 - DNA, 25 bp, Artificial
  probe
  misc_feature (1)..(25): SEQ ID NO: 472; WAN024AQ4; Start 8; Stop 32
tcctctcccttctattttatcacaa

SEQ ID NO: 264573 - DNA, 25 bp, Artificial
  probe
  misc_feature (1)..(25): SEQ ID NO: 472; WAN024AQ4; Start 7; Stop 31
atcctctcccttctattttatcaca

SEQ ID NO: 264574 - DNA, 25 bp, Artificial
  probe
  misc_feature (1)..(25): SEQ ID NO: 472; WAN024AQ4; Start 6; Stop 30
catcctctcccttctattttatcac

SEQ ID NO: 264575 - DNA, 25 bp, Artificial
  probe
  misc_feature (1)..(25): SEQ ID NO: 472; WAN024AQ4; Start 5; Stop 29
tcatcctctcccttctattttatca

SEQ ID NO: 264576 - DNA, 25 bp, Artificial
  probe
  misc_feature (1)..(25): SEQ ID NO: 472; WAN024AQ4; Start 9; Stop 33
cctctcccttctattttatcacaat

SEQ ID NO: 264577 - DNA, 25 bp, Artificial
  probe
  misc_feature (1)..(25): SEQ ID NO: 472; WAN024AQ4; Start 3; Stop 27
gttcatcctctcccttctattttat

SEQ ID NO: 264578 - DNA, 25 bp, Artificial
  probe
  misc_feature (1)..(25): SEQ ID NO: 472; WAN024AQ4; Start 1; Stop 25
aggttcatcctctcccttctatttt

SEQ ID NO: 264579 - DNA, 25 bp, Artificial
  probe
  misc_feature (1)..(25): SEQ ID NO: 472; WAN024AQ4; Start 4; Stop 28
ttcatcctctcccttctattttatc

SEQ ID NO: 264580 - DNA, 25 bp, Artificial
  probe
  misc_feature (1)..(25): SEQ ID NO: 472; WAN024AQ4; Start 12; Stop 36
ctcccttctattttatcacaattca

SEQ ID NO: 264581 - DNA, 25 bp, Artificial
  probe
  misc_feature (1)..(25): SEQ ID NO: 472; WAN024AQ4; Start 11; Stop 35
tctcccttctattttatcacaattc

SEQ ID NO: 264582 - DNA, 25 bp, Artificial
  probe
  misc_feature (1)..(25): SEQ ID NO: 472; WAN024AQ4; Start 10; Stop 34
ctctcccttctattttatcacaatt

SEQ ID NO: 264583 - DNA, 25 bp, Artificial
  probe
  misc_feature (1)..(25): SEQ ID NO: 472; WAN024AQ4; Start 13; Stop 37
tcccttctattttatcacaattcaa

SEQ ID NO: 264584 - DNA, 25 bp, Artificial
  probe
  misc_feature (1)..(25): SEQ ID NO: 472; WAN024AQ4; Start 14; Stop 38
cccttctattttatcacaattcaaa

SEQ ID NO: 264585 - DNA, 25 bp, Artificial
  probe
  misc_feature (1)..(25): SEQ ID NO: 473; WAN024AIX; Start 14; Stop 38
tacctttactagtgagagagtctgg

SEQ ID NO: 264586 - DNA, 25 bp, Artificial
  probe
  misc_feature (1)..(25): SEQ ID NO: 473; WAN024AIX; Start 13; Stop 37
ttacctttactagtgagagagtctg

SEQ ID NO: 264587 - DNA, 25 bp, Artificial
  probe
  misc_feature (1)..(25): SEQ ID NO: 473; WAN024AIX; Start 12; Stop 36
tttacctttactagtgagagagtct

SEQ ID NO: 264588 - DNA, 25 bp, Artificial
  probe
  misc_feature (1)..(25): SEQ ID NO: 473; WAN024AIX; Start 96; Stop 120
tagtctccaccctttcaccgtctaa

SEQ ID NO: 264589 - DNA, 25 bp, Artificial
  probe
  misc_feature (1)..(25): SEQ ID NO: 473; WAN024AIX; Start 102; Stop 126
ccaccctttcaccgtctaaccttag

SEQ ID NO: 264590 - DNA, 25 bp, Artificial
  probe
  misc_feature (1)..(25): SEQ ID NO: 473; WAN024AIX; Start 101; Stop 125
tccaccctttcaccgtctaacctta

SEQ ID NO: 264591 - DNA, 25 bp, Artificial
  probe
  misc_feature (1)..(25): SEQ ID NO: 473; WAN024AIX; Start 15; Stop 39
acctttactagtgagagagtctggc

SEQ ID NO: 264592 - DNA, 25 bp, Artificial
  probe
  misc_feature (1)..(25): SEQ ID NO: 473; WAN024AIX; Start 95; Stop 119
gtagtctccaccctttcaccgtcta

SEQ ID NO: 264593 - DNA, 25 bp, Artificial
  probe
  misc_feature (1)..(25): SEQ ID NO: 473; WAN024AIX; Start 8; Stop 32
tccttttacctttactagtgagaga

SEQ ID NO: 264594 - DNA, 25 bp, Artificial
  probe
  misc_feature (1)..(25): SEQ ID NO: 473; WAN024AIX; Start 9; Stop 33
ccttttacctttactagtgagagag

SEQ ID NO: 264595 - DNA, 25 bp, Artificial
  probe
  misc_feature (1)..(25): SEQ ID NO: 473; WAN024AIX; Start 16; Stop 40
cctttactagtgagagagtctggcc

SEQ ID NO: 264596 - DNA, 25 bp, Artificial
  probe
  misc_feature (1)..(25): SEQ ID NO: 473; WAN024AIX; Start 7; Stop 31
ctccttttacctttactagtgagag

SEQ ID NO: 264597 - DNA, 25 bp, Artificial
  probe
  misc_feature (1)..(25): SEQ ID NO: 473; WAN024AIX; Start 3; Stop 27
gtttctccttttacctttactagtg

SEQ ID NO: 264598 - DNA, 25 bp, Artificial
  probe
  misc_feature (1)..(25): SEQ ID NO: 473; WAN024AIX; Start 4; Stop 28
tttctccttttacctttactagtga

SEQ ID NO: 264599 - DNA, 25 bp, Artificial
  probe
  misc_feature (1)..(25): SEQ ID NO: 473; WAN024AIX; Start 5; Stop 29
ttctccttttacctttactagtgag

SEQ ID NO: 264600 - DNA, 25 bp, Artificial
  probe
  misc_feature (1)..(25): SEQ ID NO: 473; WAN024AIX; Start 11; Stop 35
ttttacctttactagtgagagagtc

SEQ ID NO: 264601 - DNA, 25 bp, Artificial
  probe
  misc_feature (1)..(25): SEQ ID NO: 473; WAN024AIX; Start 10; Stop 34
cttttacctttactagtgagagagt

SEQ ID NO: 264602 - DNA, 25 bp, Artificial
  probe
  misc_feature (1)..(25): SEQ ID NO: 473; WAN024AIX; Start 2; Stop 26
ggtttctccttttacctttactagt

SEQ ID NO: 264603 - DNA, 25 bp, Artificial
  probe
  misc_feature (1)..(25): SEQ ID NO: 473; WAN024AIX; Start 6; Stop 30
tctccttttacctttactagtgaga

SEQ ID NO: 264604 - DNA, 25 bp, Artificial
  probe
  misc_feature (1)..(25): SEQ ID NO: 473; WAN024AIX; Start 1; Stop 25
aggtttctccttttacctttactag

SEQ ID NO: 264605 - DNA, 25 bp, Artificial
  probe
  misc_feature (1)..(25): SEQ ID NO: 474; WAN024AAR; Start 37; Stop 61
aaagagaaatctgacgtactggaga

SEQ ID NO: 264606 - DNA, 25 bp, Artificial
  probe
  misc_feature (1)..(25): SEQ ID NO: 474; WAN024AAR; Start 36; Stop 60
aaaagagaaatctgacgtactggag

SEQ ID NO: 264607 - DNA, 25 bp, Artificial
  probe
  misc_feature (1)..(25): SEQ ID NO: 474; WAN024AAR; Start 35; Stop 59
gaaaagagaaatctgacgtactgga

SEQ ID NO: 264608 - DNA, 25 bp, Artificial
  probe
  misc_feature (1)..(25): SEQ ID NO: 474; WAN024AAR; Start 34; Stop 58
agaaaagagaaatctgacgtactgg

SEQ ID NO: 264609 - DNA, 25 bp, Artificial
  probe
  misc_feature (1)..(25): SEQ ID NO: 474; WAN024AAR; Start 21; Stop 45
acaatgaaaatacagaaaagagaaa

SEQ ID NO: 264610 - DNA, 25 bp, Artificial
  probe
  misc_feature (1)..(25): SEQ ID NO: 474; WAN024AAR; Start 33; Stop 57
cagaaaagagaaatctgacgtactg

SEQ ID NO: 264611 - DNA, 25 bp, Artificial
  probe
  misc_feature (1)..(25): SEQ ID NO: 474; WAN024AAR; Start 32; Stop 56
acagaaaagagaaatctgacgtact

SEQ ID NO: 264612 - DNA, 25 bp, Artificial
  probe
  misc_feature (1)..(25): SEQ ID NO: 474; WAN024AAR; Start 28; Stop 52
aaatacagaaaagagaaatctgacg

SEQ ID NO: 264613 - DNA, 25 bp, Artificial
  probe
  misc_feature (1)..(25): SEQ ID NO: 474; WAN024AAR; Start 31; Stop 55
tacagaaaagagaaatctgacgtac

SEQ ID NO: 264614 - DNA, 25 bp, Artificial
  probe
  misc_feature (1)..(25): SEQ ID NO: 474; WAN024AAR; Start 29; Stop 53
aatacagaaaagagaaatctgacgt

SEQ ID NO: 264615 - DNA, 25 bp, Artificial
  probe
  misc_feature (1)..(25): SEQ ID NO: 474; WAN024AAR; Start 30; Stop 54
atacagaaaagagaaatctgacgta

SEQ ID NO: 264616 - DNA, 25 bp, Artificial
  probe
  misc_feature (1)..(25): SEQ ID NO: 474; WAN024AAR; Start 27; Stop 51
aaaatacagaaaagagaaatctgac

SEQ ID NO: 264617 - DNA, 25 bp, Artificial
  probe
  misc_feature (1)..(25): SEQ ID NO: 474; WAN024AAR; Start 25; Stop 49
tgaaaatacagaaaagagaaatctg

SEQ ID NO: 264618 - DNA, 25 bp, Artificial
  probe
  misc_feature (1)..(25): SEQ ID NO: 474; WAN024AAR; Start 26; Stop 50
gaaaatacagaaaagagaaatctga

SEQ ID NO: 264619 - DNA, 25 bp, Artificial
  probe
  misc_feature (1)..(25): SEQ ID NO: 475; WAN0249ZI; Start 2; Stop 26
gtaactgagaatatgaaagcgaacg

SEQ ID NO: 264620 - DNA, 25 bp, Artificial
  probe
  misc_feature (1)..(25): SEQ ID NO: 475; WAN0249ZI; Start 1; Stop 25
agtaactgagaatatgaaagcgaac

SEQ ID NO: 264621 - DNA, 25 bp, Artificial
  probe
  misc_feature (1)..(25): SEQ ID NO: 475; WAN0249ZI; Start 3; Stop 27
taactgagaatatgaaagcgaacgg

SEQ ID NO: 264622 - DNA, 25 bp, Artificial
  probe
  misc_feature (1)..(25): SEQ ID NO: 475; WAN0249ZI; Start 6; Stop 30
ctgagaatatgaaagcgaacggttt

SEQ ID NO: 264623 - DNA, 25 bp, Artificial
  probe
  misc_feature (1)..(25): SEQ ID NO: 475; WAN0249ZI; Start 4; Stop 28
aactgagaatatgaaagcgaacggt

SEQ ID NO: 264624 - DNA, 25 bp, Artificial
  probe
  misc_feature (1)..(25): SEQ ID NO: 475; WAN0249ZI; Start 5; Stop 29
actgagaatatgaaagcgaacggtt

SEQ ID NO: 264625 - DNA, 25 bp, Artificial
  probe
  misc_feature (1)..(25): SEQ ID NO: 475; WAN0249ZI; Start 7; Stop 31
tgagaatatgaaagcgaacggtttt

SEQ ID NO: 264626 - DNA, 25 bp, Artificial
  probe
  misc_feature (1)..(25): SEQ ID NO: 475; WAN0249ZI; Start 12; Stop 36
atatgaaagcgaacggttttcttaa

SEQ ID NO: 264627 - DNA, 25 bp, Artificial
  probe
  misc_feature (1)..(25): SEQ ID NO: 475; WAN0249ZI; Start 11; Stop 35
aatatgaaagcgaacggttttctta

SEQ ID NO: 264628 - DNA, 25 bp, Artificial
  probe
  misc_feature (1)..(25): SEQ ID NO: 475; WAN0249ZI; Start 10; Stop 34
gaatatgaaagcgaacggttttctt

SEQ ID NO: 264629 - DNA, 25 bp, Artificial
  probe
  misc_feature (1)..(25): SEQ ID NO: 475; WAN0249ZI; Start 8; Stop 32
gagaatatgaaagcgaacggttttc

SEQ ID NO: 264630 - DNA, 25 bp, Artificial
  probe
  misc_feature (1)..(25): SEQ ID NO: 475; WAN0249ZI; Start 9; Stop 33
agaatatgaaagcgaacggttttct

SEQ ID NO: 264631 - DNA, 25 bp, Artificial
  probe
  misc_feature (1)..(25): SEQ ID NO: 476; WAN024A2R; Start 39; Stop 63
gtgtatatgtgcatatatagtctga

SEQ ID NO: 264632 - DNA, 25 bp, Artificial
  probe
  misc_feature (1)..(25): SEQ ID NO: 476; WAN024A2R; Start 38; Stop 62
agtgtatatgtgcatatatagtctg

SEQ ID NO: 264633 - DNA, 25 bp, Artificial
  probe
  misc_feature (1)..(25): SEQ ID NO: 476; WAN024A2R; Start 40; Stop 64
tgtatatgtgcatatatagtctgaa

SEQ ID NO: 264634 - DNA, 25 bp, Artificial
  probe
  misc_feature (1)..(25): SEQ ID NO: 477; WAN024AGM; Start 1; Stop 25
agtacaatacctttcctccgataat

SEQ ID NO: 264635 - DNA, 25 bp, Artificial
  probe
  misc_feature (1)..(25): SEQ ID NO: 477; WAN024AGM; Start 2; Stop 26
gtacaatacctttcctccgataatt

SEQ ID NO: 264636 - DNA, 25 bp, Artificial
  probe
  misc_feature (1)..(25): SEQ ID NO: 477; WAN024AGM; Start 3; Stop 27
tacaatacctttcctccgataatta

SEQ ID NO: 264637 - DNA, 25 bp, Artificial
  probe
  misc_feature (1)..(25): SEQ ID NO: 477; WAN024AGM; Start 4; Stop 28
acaatacctttcctccgataattat

SEQ ID NO: 264638 - DNA, 25 bp, Artificial
  probe
  misc_feature (1)..(25): SEQ ID NO: 477; WAN024AGM; Start 39; Stop 63
gtatactggaagttggggaattagg

SEQ ID NO: 264639 - DNA, 25 bp, Artificial
  probe
  misc_feature (1)..(25): SEQ ID NO: 477; WAN024AGM; Start 5; Stop 29
caatacctttcctccgataattatt

SEQ ID NO: 264640 - DNA, 25 bp, Artificial
  probe
  misc_feature (1)..(25): SEQ ID NO: 477; WAN024AGM; Start 6; Stop 30
aatacctttcctccgataattattt

SEQ ID NO: 264641 - DNA, 25 bp, Artificial
  probe
  misc_feature (1)..(25): SEQ ID NO: 477; WAN024AGM; Start 7; Stop 31
atacctttcctccgataattatttt

SEQ ID NO: 264642 - DNA, 25 bp, Artificial
  probe
  misc_feature (1)..(25): SEQ ID NO: 478; WAN024AG3; Start 1; Stop 25
agtacacctcctataagttgtgaac

SEQ ID NO: 264643 - DNA, 25 bp, Artificial
  probe
  misc_feature (1)..(25): SEQ ID NO: 478; WAN024AG3; Start 110; Stop 134
atataccattgacttaccacattca

SEQ ID NO: 264644 - DNA, 25 bp, Artificial
  probe
  misc_feature (1)..(25): SEQ ID NO: 478; WAN024AG3; Start 126; Stop 150
ccacattcaagaaaccgctttattt

SEQ ID NO: 264645 - DNA, 25 bp, Artificial
  probe
  misc_feature (1)..(25): SEQ ID NO: 478; WAN024AG3; Start 124; Stop 148
taccacattcaagaaaccgctttat

SEQ ID NO: 264646 - DNA, 25 bp, Artificial
  probe
  misc_feature (1)..(25): SEQ ID NO: 478; WAN024AG3; Start 123; Stop 147
ttaccacattcaagaaaccgcttta

SEQ ID NO: 264647 - DNA, 25 bp, Artificial
  probe
  misc_feature (1)..(25): SEQ ID NO: 478; WAN024AG3; Start 107; Stop 131
actatataccattgacttaccacat

SEQ ID NO: 264648 - DNA, 25 bp, Artificial
  probe
  misc_feature (1)..(25): SEQ ID NO: 478; WAN024AG3; Start 125; Stop 149
accacattcaagaaaccgctttatt

SEQ ID NO: 264649 - DNA, 25 bp, Artificial
  probe
  misc_feature (1)..(25): SEQ ID NO: 478; WAN024AG3; Start 113; Stop 137
taccattgacttaccacattcaaga

SEQ ID NO: 264650 - DNA, 25 bp, Artificial
  probe
  misc_feature (1)..(25): SEQ ID NO: 478; WAN024AG3; Start 2; Stop 26
gtacacctcctataagttgtgaact

SEQ ID NO: 264651 - DNA, 25 bp, Artificial
  probe
  misc_feature (1)..(25): SEQ ID NO: 478; WAN024AG3; Start 114; Stop 138
accattgacttaccacattcaagaa

SEQ ID NO: 264652 - DNA, 25 bp, Artificial
  probe
  misc_feature (1)..(25): SEQ ID NO: 478; WAN024AG3; Start 112; Stop 136
ataccattgacttaccacattcaag

SEQ ID NO: 264653 - DNA, 25 bp, Artificial
  probe
  misc_feature (1)..(25): SEQ ID NO: 478; WAN024AG3; Start 4; Stop 28
acacctcctataagttgtgaactaa

SEQ ID NO: 264654 - DNA, 25 bp, Artificial
  probe
  misc_feature (1)..(25): SEQ ID NO: 478; WAN024AG3; Start 122; Stop 146
cttaccacattcaagaaaccgcttt

SEQ ID NO: 264655 - DNA, 25 bp, Artificial
  probe
  misc_feature (1)..(25): SEQ ID NO: 478; WAN024AG3; Start 106; Stop 130
tactatataccattgacttaccaca

SEQ ID NO: 264656 - DNA, 25 bp, Artificial
  probe
  misc_feature (1)..(25): SEQ ID NO: 478; WAN024AG3; Start 3; Stop 27
tacacctcctataagttgtgaacta

SEQ ID NO: 264657 - DNA, 25 bp, Artificial
  probe
  misc_feature (1)..(25): SEQ ID NO: 478; WAN024AG3; Start 109; Stop 133
tatataccattgacttaccacattc

SEQ ID NO: 264658 - DNA, 25 bp, Artificial
  probe
  misc_feature (1)..(25): SEQ ID NO: 478; WAN024AG3; Start 108; Stop 132
ctatataccattgacttaccacatt

SEQ ID NO: 264659 - DNA, 25 bp, Artificial
  probe
  misc_feature (1)..(25): SEQ ID NO: 478; WAN024AG3; Start 111; Stop 135
tataccattgacttaccacattcaa

SEQ ID NO: 264660 - DNA, 25 bp, Artificial
  probe
  misc_feature (1)..(25): SEQ ID NO: 478; WAN024AG3; Start 121; Stop 145
acttaccacattcaagaaaccgctt

SEQ ID NO: 264661 - DNA, 25 bp, Artificial
  probe
  misc_feature (1)..(25): SEQ ID NO: 478; WAN024AG3; Start 127; Stop 151
cacattcaagaaaccgctttatttt

SEQ ID NO: 264662 - DNA, 25 bp, Artificial
  probe
  misc_feature (1)..(25): SEQ ID NO: 478; WAN024AG3; Start 117; Stop 141
attgacttaccacattcaagaaacc

SEQ ID NO: 264663 - DNA, 25 bp, Artificial
  probe
  misc_feature (1)..(25): SEQ ID NO: 478; WAN024AG3; Start 115; Stop 139
ccattgacttaccacattcaagaaa

SEQ ID NO: 264664 - DNA, 25 bp, Artificial
  probe
  misc_feature (1)..(25): SEQ ID NO: 478; WAN024AG3; Start 120; Stop 144
gacttaccacattcaagaaaccgct

SEQ ID NO: 264665 - DNA, 25 bp, Artificial
  probe
  misc_feature (1)..(25): SEQ ID NO: 478; WAN024AG3; Start 116; Stop 140
cattgacttaccacattcaagaaac

SEQ ID NO: 264666 - DNA, 25 bp, Artificial
  probe
  misc_feature (1)..(25): SEQ ID NO: 478; WAN024AG3; Start 105; Stop 129
atactatataccattgacttaccac

SEQ ID NO: 264667 - DNA, 25 bp, Artificial
  probe
  misc_feature (1)..(25): SEQ ID NO: 478; WAN024AG3; Start 118; Stop 142
ttgacttaccacattcaagaaaccg

SEQ ID NO: 264668 - DNA, 25 bp, Artificial
  probe
  misc_feature (1)..(25): SEQ ID NO: 478; WAN024AG3; Start 5; Stop 29
cacctcctataagttgtgaactaaa

SEQ ID NO: 264669 - DNA, 25 bp, Artificial
  probe
  misc_feature (1)..(25): SEQ ID NO: 478; WAN024AG3; Start 119; Stop 143
tgacttaccacattcaagaaaccgc

SEQ ID NO: 264670 - DNA, 25 bp, Artificial
  probe
  misc_feature (1)..(25): SEQ ID NO: 478; WAN024AG3; Start 62; Stop 86
tcagtagaatctatctcctatttca

SEQ ID NO: 264671 - DNA, 25 bp, Artificial
  probe
  misc_feature (1)..(25): SEQ ID NO: 478; WAN024AG3; Start 65; Stop 89
gtagaatctatctcctatttcatca

SEQ ID NO: 264672 - DNA, 25 bp, Artificial
  probe
  misc_feature (1)..(25): SEQ ID NO: 478; WAN024AG3; Start 63; Stop 87
cagtagaatctatctcctatttcat

SEQ ID NO: 264673 - DNA, 25 bp, Artificial
  probe
  misc_feature (1)..(25): SEQ ID NO: 478; WAN024AG3; Start 67; Stop 91
agaatctatctcctatttcatcaat

SEQ ID NO: 264674 - DNA, 25 bp, Artificial
  probe
  misc_feature (1)..(25): SEQ ID NO: 478; WAN024AG3; Start 64; Stop 88
agtagaatctatctcctatttcatc

SEQ ID NO: 264675 - DNA, 25 bp, Artificial
  probe
  misc_feature (1)..(25): SEQ ID NO: 479; WAN0249OJ; Start 6; Stop 30
aatattacgatgtttgggatatgcc

SEQ ID NO: 264676 - DNA, 25 bp, Artificial
  probe
  misc_feature (1)..(25): SEQ ID NO: 479; WAN0249OJ; Start 8; Stop 32
tattacgatgtttgggatatgccat

SEQ ID NO: 264677 - DNA, 25 bp, Artificial
  probe
  misc_feature (1)..(25): SEQ ID NO: 479; WAN0249OJ; Start 7; Stop 31
atattacgatgtttgggatatgcca

SEQ ID NO: 264678 - DNA, 25 bp, Artificial
  probe
  misc_feature (1)..(25): SEQ ID NO: 479; WAN0249OJ; Start 5; Stop 29
gaatattacgatgtttgggatatgc

SEQ ID NO: 264679 - DNA, 25 bp, Artificial
  probe
  misc_feature (1)..(25): SEQ ID NO: 479; WAN0249OJ; Start 1; Stop 25
agtagaatattacgatgtttgggat

SEQ ID NO: 264680 - DNA, 25 bp, Artificial
  probe
  misc_feature (1)..(25): SEQ ID NO: 479; WAN0249OJ; Start 15; Stop 39
atgtttgggatatgccatcgctaaa

SEQ ID NO: 264681 - DNA, 25 bp, Artificial
  probe
  misc_feature (1)..(25): SEQ ID NO: 479; WAN0249OJ; Start 4; Stop 28
agaatattacgatgtttgggatatg

SEQ ID NO: 264682 - DNA, 25 bp, Artificial
  probe
  misc_feature (1)..(25): SEQ ID NO: 479; WAN0249OJ; Start 9; Stop 33
attacgatgtttgggatatgccatc

SEQ ID NO: 264683 - DNA, 25 bp, Artificial
  probe
  misc_feature (1)..(25): SEQ ID NO: 479; WAN0249OJ; Start 2; Stop 26
gtagaatattacgatgtttgggata

SEQ ID NO: 264684 - DNA, 25 bp, Artificial
  probe
  misc_feature (1)..(25): SEQ ID NO: 479; WAN0249OJ; Start 14; Stop 38
gatgtttgggatatgccatcgctaa

SEQ ID NO: 264685 - DNA, 25 bp, Artificial
  probe
  misc_feature (1)..(25): SEQ ID NO: 479; WAN0249OJ; Start 3; Stop 27
tagaatattacgatgtttgggatat

SEQ ID NO: 264686 - DNA, 25 bp, Artificial
  probe
  misc_feature (1)..(25): SEQ ID NO: 479; WAN0249OJ; Start 16; Stop 40
tgtttgggatatgccatcgctaaaa

SEQ ID NO: 264687 - DNA, 25 bp, Artificial
  probe
  misc_feature (1)..(25): SEQ ID NO: 480; WAN024A9Y; Start 65; Stop 89
ctatgataacatggaggtattgtgt

SEQ ID NO: 264688 - DNA, 25 bp, Artificial
  probe
  misc_feature (1)..(25): SEQ ID NO: 480; WAN024A9Y; Start 64; Stop 88
actatgataacatggaggtattgtg

SEQ ID NO: 264689 - DNA, 25 bp, Artificial
  probe
  misc_feature (1)..(25): SEQ ID NO: 480; WAN024A9Y; Start 63; Stop 87
aactatgataacatggaggtattgt

SEQ ID NO: 264690 - DNA, 25 bp, Artificial
  probe
  misc_feature (1)..(25): SEQ ID NO: 480; WAN024A9Y; Start 58; Stop 82
aagtaaactatgataacatggaggt

SEQ ID NO: 264691 - DNA, 25 bp, Artificial
  probe
  misc_feature (1)..(25): SEQ ID NO: 480; WAN024A9Y; Start 1; Stop 25
agtagggaaaatgagtgaaatggtt

SEQ ID NO: 264692 - DNA, 25 bp, Artificial
  probe
  misc_feature (1)..(25): SEQ ID NO: 480; WAN024A9Y; Start 4; Stop 28
agggaaaatgagtgaaatggtttac

SEQ ID NO: 264693 - DNA, 25 bp, Artificial
  probe
  misc_feature (1)..(25): SEQ ID NO: 480; WAN024A9Y; Start 2; Stop 26
gtagggaaaatgagtgaaatggttt

SEQ ID NO: 264694 - DNA, 25 bp, Artificial
  probe
  misc_feature (1)..(25): SEQ ID NO: 480; WAN024A9Y; Start 5; Stop 29
gggaaaatgagtgaaatggtttact

SEQ ID NO: 264695 - DNA, 25 bp, Artificial
  probe
  misc_feature (1)..(25): SEQ ID NO: 480; WAN024A9Y; Start 3; Stop 27
tagggaaaatgagtgaaatggttta

SEQ ID NO: 264696 - DNA, 25 bp, Artificial
  probe
  misc_feature (1)..(25): SEQ ID NO: 480; WAN024A9Y; Start 59; Stop 83
agtaaactatgataacatggaggta

SEQ ID NO: 264697 - DNA, 25 bp, Artificial
  probe
  misc_feature (1)..(25): SEQ ID NO: 480; WAN024A9Y; Start 62; Stop 86
aaactatgataacatggaggtattg

SEQ ID NO: 264698 - DNA, 25 bp, Artificial
  probe
  misc_feature (1)..(25): SEQ ID NO: 480; WAN024A9Y; Start 57; Stop 81
aaagtaaactatgataacatggagg

SEQ ID NO: 264699 - DNA, 25 bp, Artificial
  probe
  misc_feature (1)..(25): SEQ ID NO: 480; WAN024A9Y; Start 6; Stop 30
ggaaaatgagtgaaatggtttactt

SEQ ID NO: 264700 - DNA, 25 bp, Artificial
  probe
  misc_feature (1)..(25): SEQ ID NO: 480; WAN024A9Y; Start 60; Stop 84
gtaaactatgataacatggaggtat

SEQ ID NO: 264701 - DNA, 25 bp, Artificial
  probe
  misc_feature (1)..(25): SEQ ID NO: 480; WAN024A9Y; Start 7; Stop 31
gaaaatgagtgaaatggtttacttt

SEQ ID NO: 264702 - DNA, 25 bp, Artificial
  probe
  misc_feature (1)..(25): SEQ ID NO: 480; WAN024A9Y; Start 61; Stop 85
taaactatgataacatggaggtatt

SEQ ID NO: 264703 - DNA, 25 bp, Artificial
  probe
  misc_feature (1)..(25): SEQ ID NO: 480; WAN024A9Y; Start 8; Stop 32
aaaatgagtgaaatggtttactttt

SEQ ID NO: 264704 - DNA, 25 bp, Artificial
  probe
  misc_feature (1)..(25): SEQ ID NO: 481; WAN024AFE; Start 34; Stop 58
ttcttgctttaataattcatctgtt

SEQ ID NO: 264705 - DNA, 25 bp, Artificial
  probe
  misc_feature (1)..(25): SEQ ID NO: 481; WAN024AFE; Start 33; Stop 57
attcttgctttaataattcatctgt

SEQ ID NO: 264706 - DNA, 25 bp, Artificial
  probe
  misc_feature (1)..(25): SEQ ID NO: 482; WAN024AS6; Start 167; Stop 191
attgggataatcagtcagagtcctt

SEQ ID NO: 264707 - DNA, 25 bp, Artificial
  probe
  misc_feature (1)..(25): SEQ ID NO: 482; WAN024AS6; Start 168; Stop 192
ttgggataatcagtcagagtccttt

SEQ ID NO: 264708 - DNA, 25 bp, Artificial
  probe
  misc_feature (1)..(25): SEQ ID NO: 482; WAN024AS6; Start 122; Stop 146
ggtatagttcaaattaagctcctgt

SEQ ID NO: 264709 - DNA, 25 bp, Artificial
  probe
  misc_feature (1)..(25): SEQ ID NO: 482; WAN024AS6; Start 121; Stop 145
tggtatagttcaaattaagctcctg

SEQ ID NO: 264710 - DNA, 25 bp, Artificial
  probe
  misc_feature (1)..(25): SEQ ID NO: 482; WAN024AS6; Start 166; Stop 190
gattgggataatcagtcagagtcct

SEQ ID NO: 264711 - DNA, 25 bp, Artificial
  probe
  misc_feature (1)..(25): SEQ ID NO: 482; WAN024AS6; Start 155; Stop 179
aaactctgaccgattgggataatca

SEQ ID NO: 264712 - DNA, 25 bp, Artificial
  probe
  misc_feature (1)..(25): SEQ ID NO: 482; WAN024AS6; Start 85; Stop 109
atatacttgtttctttcacttgtca

SEQ ID NO: 264713 - DNA, 25 bp, Artificial
  probe
  misc_feature (1)..(25): SEQ ID NO: 482; WAN024AS6; Start 86; Stop 110
tatacttgtttctttcacttgtcaa

SEQ ID NO: 264714 - DNA, 25 bp, Artificial
  probe
  misc_feature (1)..(25): SEQ ID NO: 482; WAN024AS6; Start 120; Stop 144
ttggtatagttcaaattaagctcct

SEQ ID NO: 264715 - DNA, 25 bp, Artificial
  probe
  misc_feature (1)..(25): SEQ ID NO: 482; WAN024AS6; Start 22; Stop 46
ctgtgctttctccttaaaattggta

SEQ ID NO: 264716 - DNA, 25 bp, Artificial
  probe
  misc_feature (1)..(25): SEQ ID NO: 482; WAN024AS6; Start 92; Stop 116
tgtttctttcacttgtcaagagtaa

SEQ ID NO: 264717 - DNA, 25 bp, Artificial
  probe
  misc_feature (1)..(25): SEQ ID NO: 482; WAN024AS6; Start 91; Stop 115
ttgtttctttcacttgtcaagagta

SEQ ID NO: 264718 - DNA, 25 bp, Artificial
  probe
  misc_feature (1)..(25): SEQ ID NO: 482; WAN024AS6; Start 23; Stop 47
tgtgctttctccttaaaattggtat

SEQ ID NO: 264719 - DNA, 25 bp, Artificial
  probe
  misc_feature (1)..(25): SEQ ID NO: 482; WAN024AS6; Start 165; Stop 189
cgattgggataatcagtcagagtcc

SEQ ID NO: 264720 - DNA, 25 bp, Artificial
  probe
  misc_feature (1)..(25): SEQ ID NO: 482; WAN024AS6; Start 164; Stop 188
ccgattgggataatcagtcagagtc

SEQ ID NO: 264721 - DNA, 25 bp, Artificial
  probe
  misc_feature (1)..(25): SEQ ID NO: 482; WAN024AS6; Start 162; Stop 186
gaccgattgggataatcagtcagag

SEQ ID NO: 264722 - DNA, 25 bp, Artificial
  probe
  misc_feature (1)..(25): SEQ ID NO: 482; WAN024AS6; Start 128; Stop 152
gttcaaattaagctcctgtaagcat

SEQ ID NO: 264723 - DNA, 25 bp, Artificial
  probe
  misc_feature (1)..(25): SEQ ID NO: 482; WAN024AS6; Start 127; Stop 151
agttcaaattaagctcctgtaagca

SEQ ID NO: 264724 - DNA, 25 bp, Artificial
  probe
  misc_feature (1)..(25): SEQ ID NO: 482; WAN024AS6; Start 126; Stop 150
tagttcaaattaagctcctgtaagc

SEQ ID NO: 264725 - DNA, 25 bp, Artificial
  probe
  misc_feature (1)..(25): SEQ ID NO: 482; WAN024AS6; Start 125; Stop 149
atagttcaaattaagctcctgtaag

SEQ ID NO: 264726 - DNA, 25 bp, Artificial
  probe
  misc_feature (1)..(25): SEQ ID NO: 482; WAN024AS6; Start 119; Stop 143
attggtatagttcaaattaagctcc

SEQ ID NO: 264727 - DNA, 25 bp, Artificial
  probe
  misc_feature (1)..(25): SEQ ID NO: 482; WAN024AS6; Start 163; Stop 187
accgattgggataatcagtcagagt

SEQ ID NO: 264728 - DNA, 25 bp, Artificial
  probe
  misc_feature (1)..(25): SEQ ID NO: 482; WAN024AS6; Start 93; Stop 117
gtttctttcacttgtcaagagtaaa

SEQ ID NO: 264729 - DNA, 25 bp, Artificial
  probe
  misc_feature (1)..(25): SEQ ID NO: 482; WAN024AS6; Start 130; Stop 154
tcaaattaagctcctgtaagcataa

SEQ ID NO: 264730 - DNA, 25 bp, Artificial
  probe
  misc_feature (1)..(25): SEQ ID NO: 482; WAN024AS6; Start 129; Stop 153
ttcaaattaagctcctgtaagcata

SEQ ID NO: 264731 - DNA, 25 bp, Artificial
  probe
  misc_feature (1)..(25): SEQ ID NO: 482; WAN024AS6; Start 21; Stop 45
gctgtgctttctccttaaaattggt

SEQ ID NO: 264732 - DNA, 25 bp, Artificial
  probe
  misc_feature (1)..(25): SEQ ID NO: 482; WAN024AS6; Start 90; Stop 114
cttgtttctttcacttgtcaagagt

SEQ ID NO: 264733 - DNA, 25 bp, Artificial
  probe
  misc_feature (1)..(25): SEQ ID NO: 482; WAN024AS6; Start 89; Stop 113
acttgtttctttcacttgtcaagag

SEQ ID NO: 264734 - DNA, 25 bp, Artificial
  probe
  misc_feature (1)..(25): SEQ ID NO: 482; WAN024AS6; Start 131; Stop 155
caaattaagctcctgtaagcataaa

SEQ ID NO: 264735 - DNA, 25 bp, Artificial
  probe
  misc_feature (1)..(25): SEQ ID NO: 482; WAN024AS6; Start 88; Stop 112
tacttgtttctttcacttgtcaaga

SEQ ID NO: 264736 - DNA, 25 bp, Artificial
  probe
  misc_feature (1)..(25): SEQ ID NO: 482; WAN024AS6; Start 154; Stop 178
aaaactctgaccgattgggataatc

SEQ ID NO: 264737 - DNA, 25 bp, Artificial
  probe
  misc_feature (1)..(25): SEQ ID NO: 482; WAN024AS6; Start 123; Stop 147
gtatagttcaaattaagctcctgta

SEQ ID NO: 264738 - DNA, 25 bp, Artificial
  probe
  misc_feature (1)..(25): SEQ ID NO: 482; WAN024AS6; Start 24; Stop 48
gtgctttctccttaaaattggtata

SEQ ID NO: 264739 - DNA, 25 bp, Artificial
  probe
  misc_feature (1)..(25): SEQ ID NO: 483; WAN024A93; Start 71; Stop 95
aaatcctaatggagtcaatcaaatt

SEQ ID NO: 264740 - DNA, 25 bp, Artificial
  probe
  misc_feature (1)..(25): SEQ ID NO: 483; WAN024A93; Start 72; Stop 96
aatcctaatggagtcaatcaaattt

SEQ ID NO: 264741 - DNA, 25 bp, Artificial
  probe
  misc_feature (1)..(25): SEQ ID NO: 483; WAN024A93; Start 21; Stop 45
aggattcagattggtttccttactt

SEQ ID NO: 264742 - DNA, 25 bp, Artificial
  probe
  misc_feature (1)..(25): SEQ ID NO: 483; WAN024A93; Start 20; Stop 44
taggattcagattggtttccttact

SEQ ID NO: 264743 - DNA, 25 bp, Artificial
  probe
  misc_feature (1)..(25): SEQ ID NO: 483; WAN024A93; Start 80; Stop 104
tggagtcaatcaaattttccgtaaa

SEQ ID NO: 264744 - DNA, 25 bp, Artificial
  probe
  misc_feature (1)..(25): SEQ ID NO: 483; WAN024A93; Start 79; Stop 103
atggagtcaatcaaattttccgtaa

SEQ ID NO: 264745 - DNA, 25 bp, Artificial
  probe
  misc_feature (1)..(25): SEQ ID NO: 483; WAN024A93; Start 78; Stop 102
aatggagtcaatcaaattttccgta

SEQ ID NO: 264746 - DNA, 25 bp, Artificial
  probe
  misc_feature (1)..(25): SEQ ID NO: 483; WAN024A93; Start 77; Stop 101
taatggagtcaatcaaattttccgt

SEQ ID NO: 264747 - DNA, 25 bp, Artificial
  probe
  misc_feature (1)..(25): SEQ ID NO: 483; WAN024A93; Start 19; Stop 43
ttaggattcagattggtttccttac

SEQ ID NO: 264748 - DNA, 25 bp, Artificial
  probe
  misc_feature (1)..(25): SEQ ID NO: 483; WAN024A93; Start 76; Stop 100
ctaatggagtcaatcaaattttccg

SEQ ID NO: 264749 - DNA, 25 bp, Artificial
  probe
  misc_feature (1)..(25): SEQ ID NO: 483; WAN024A93; Start 81; Stop 105
ggagtcaatcaaattttccgtaaaa

SEQ ID NO: 264750 - DNA, 25 bp, Artificial
  probe
  misc_feature (1)..(25): SEQ ID NO: 483; WAN024A93; Start 75; Stop 99
cctaatggagtcaatcaaattttcc

SEQ ID NO: 264751 - DNA, 25 bp, Artificial
  probe
  misc_feature (1)..(25): SEQ ID NO: 483; WAN024A93; Start 15; Stop 39
tattttaggattcagattggtttcc

SEQ ID NO: 264752 - DNA, 25 bp, Artificial
  probe
  misc_feature (1)..(25): SEQ ID NO: 483; WAN024A93; Start 70; Stop 94
aaaatcctaatggagtcaatcaaat

SEQ ID NO: 264753 - DNA, 25 bp, Artificial
  probe
  misc_feature (1)..(25): SEQ ID NO: 483; WAN024A93; Start 18; Stop 42
tttaggattcagattggtttcctta

SEQ ID NO: 264754 - DNA, 25 bp, Artificial
  probe
  misc_feature (1)..(25): SEQ ID NO: 483; WAN024A93; Start 14; Stop 38
ctattttaggattcagattggtttc

SEQ ID NO: 264755 - DNA, 25 bp, Artificial
  probe
  misc_feature (1)..(25): SEQ ID NO: 483; WAN024A93; Start 13; Stop 37
tctattttaggattcagattggttt

SEQ ID NO: 264756 - DNA, 25 bp, Artificial
  probe
  misc_feature (1)..(25): SEQ ID NO: 483; WAN024A93; Start 12; Stop 36
ttctattttaggattcagattggtt

SEQ ID NO: 264757 - DNA, 25 bp, Artificial
  probe
  misc_feature (1)..(25): SEQ ID NO: 483; WAN024A93; Start 11; Stop 35
tttctattttaggattcagattggt

SEQ ID NO: 264758 - DNA, 25 bp, Artificial
  probe
  misc_feature (1)..(25): SEQ ID NO: 483; WAN024A93; Start 74; Stop 98
tcctaatggagtcaatcaaattttc

SEQ ID NO: 264759 - DNA, 25 bp, Artificial
  probe
  misc_feature (1)..(25): SEQ ID NO: 483; WAN024A93; Start 10; Stop 34
ctttctattttaggattcagattgg

SEQ ID NO: 264760 - DNA, 25 bp, Artificial
  probe
  misc_feature (1)..(25): SEQ ID NO: 483; WAN024A93; Start 73; Stop 97
atcctaatggagtcaatcaaatttt

SEQ ID NO: 264761 - DNA, 25 bp, Artificial
  probe
  misc_feature (1)..(25): SEQ ID NO: 483; WAN024A93; Start 116; Stop 140
tcaacttataagaaaagaggtgtcc

SEQ ID NO: 264762 - DNA, 25 bp, Artificial
  probe
  misc_feature (1)..(25): SEQ ID NO: 483; WAN024A93; Start 17; Stop 41
ttttaggattcagattggtttcctt

SEQ ID NO: 264763 - DNA, 25 bp, Artificial
  probe
  misc_feature (1)..(25): SEQ ID NO: 483; WAN024A93; Start 16; Stop 40
attttaggattcagattggtttcct

SEQ ID NO: 264764 - DNA, 25 bp, Artificial
  probe
  misc_feature (1)..(25): SEQ ID NO: 483; WAN024A93; Start 117; Stop 141
caacttataagaaaagaggtgtcct

SEQ ID NO: 264765 - DNA, 25 bp, Artificial
  probe
  misc_feature (1)..(25): SEQ ID NO: 483; WAN024A93; Start 82; Stop 106
gagtcaatcaaattttccgtaaaat

SEQ ID NO: 264766 - DNA, 25 bp, Artificial
  probe
  misc_feature (1)..(25): SEQ ID NO: 483; WAN024A93; Start 115; Stop 139
atcaacttataagaaaagaggtgtc

SEQ ID NO: 264767 - DNA, 25 bp, Artificial
  probe
  misc_feature (1)..(25): SEQ ID NO: 483; WAN024A93; Start 114; Stop 138
aatcaacttataagaaaagaggtgt

SEQ ID NO: 264768 - DNA, 25 bp, Artificial
  probe
  misc_feature (1)..(25): SEQ ID NO: 484; WAN024A64; Start 120; Stop 144
tgatatacatagaagactcacgaga

SEQ ID NO: 264769 - DNA, 25 bp, Artificial
  probe
  misc_feature (1)..(25): SEQ ID NO: 484; WAN024A64; Start 123; Stop 147
tatacatagaagactcacgagagaa

SEQ ID NO: 264770 - DNA, 25 bp, Artificial
  probe
  misc_feature (1)..(25): SEQ ID NO: 484; WAN024A64; Start 122; Stop 146
atatacatagaagactcacgagaga

SEQ ID NO: 264771 - DNA, 25 bp, Artificial
  probe
  misc_feature (1)..(25): SEQ ID NO: 484; WAN024A64; Start 121; Stop 145
gatatacatagaagactcacgagag

SEQ ID NO: 264772 - DNA, 25 bp, Artificial
  probe
  misc_feature (1)..(25): SEQ ID NO: 484; WAN024A64; Start 119; Stop 143
ttgatatacatagaagactcacgag

SEQ ID NO: 264773 - DNA, 25 bp, Artificial
  probe
  misc_feature (1)..(25): SEQ ID NO: 484; WAN024A64; Start 125; Stop 149
tacatagaagactcacgagagaaac

SEQ ID NO: 264774 - DNA, 25 bp, Artificial
  probe
  misc_feature (1)..(25): SEQ ID NO: 484; WAN024A64; Start 104; Stop 128
aacctcagtcttcctttgatataca

SEQ ID NO: 264775 - DNA, 25 bp, Artificial
  probe
  misc_feature (1)..(25): SEQ ID NO: 484; WAN024A64; Start 105; Stop 129
acctcagtcttcctttgatatacat

SEQ ID NO: 264776 - DNA, 25 bp, Artificial
  probe
  misc_feature (1)..(25): SEQ ID NO: 484; WAN024A64; Start 124; Stop 148
atacatagaagactcacgagagaaa

SEQ ID NO: 264777 - DNA, 25 bp, Artificial
  probe
  misc_feature (1)..(25): SEQ ID NO: 484; WAN024A64; Start 103; Stop 127
aaacctcagtcttcctttgatatac

SEQ ID NO: 264778 - DNA, 25 bp, Artificial
  probe
  misc_feature (1)..(25): SEQ ID NO: 484; WAN024A64; Start 128; Stop 152
atagaagactcacgagagaaaccag

SEQ ID NO: 264779 - DNA, 25 bp, Artificial
  probe
  misc_feature (1)..(25): SEQ ID NO: 484; WAN024A64; Start 127; Stop 151
catagaagactcacgagagaaacca

SEQ ID NO: 264780 - DNA, 25 bp, Artificial
  probe
  misc_feature (1)..(25): SEQ ID NO: 484; WAN024A64; Start 126; Stop 150
acatagaagactcacgagagaaacc

SEQ ID NO: 264781 - DNA, 25 bp, Artificial
  probe
  misc_feature (1)..(25): SEQ ID NO: 484; WAN024A64; Start 106; Stop 130
cctcagtcttcctttgatatacata

SEQ ID NO: 264782 - DNA, 25 bp, Artificial
  probe
  misc_feature (1)..(25): SEQ ID NO: 484; WAN024A64; Start 118; Stop 142
tttgatatacatagaagactcacga

SEQ ID NO: 264783 - DNA, 25 bp, Artificial
  probe
  misc_feature (1)..(25): SEQ ID NO: 484; WAN024A64; Start 117; Stop 141
ctttgatatacatagaagactcacg

SEQ ID NO: 264784 - DNA, 25 bp, Artificial
  probe
  misc_feature (1)..(25): SEQ ID NO: 484; WAN024A64; Start 57; Stop 81
cctgtcaagacttagctactataat

SEQ ID NO: 264785 - DNA, 25 bp, Artificial
  probe
  misc_feature (1)..(25): SEQ ID NO: 484; WAN024A64; Start 55; Stop 79
accctgtcaagacttagctactata

SEQ ID NO: 264786 - DNA, 25 bp, Artificial
  probe
  misc_feature (1)..(25): SEQ ID NO: 484; WAN024A64; Start 98; Stop 122
acttaaaacctcagtcttcctttga

SEQ ID NO: 264787 - DNA, 25 bp, Artificial
  probe
  misc_feature (1)..(25): SEQ ID NO: 484; WAN024A64; Start 54; Stop 78
aaccctgtcaagacttagctactat

SEQ ID NO: 264788 - DNA, 25 bp, Artificial
  probe
  misc_feature (1)..(25): SEQ ID NO: 484; WAN024A64; Start 56; Stop 80
ccctgtcaagacttagctactataa

SEQ ID NO: 264789 - DNA, 25 bp, Artificial
  probe
  misc_feature (1)..(25): SEQ ID NO: 484; WAN024A64; Start 116; Stop 140
cctttgatatacatagaagactcac

SEQ ID NO: 264790 - DNA, 25 bp, Artificial
  probe
  misc_feature (1)..(25): SEQ ID NO: 484; WAN024A64; Start 53; Stop 77
gaaccctgtcaagacttagctacta

SEQ ID NO: 264791 - DNA, 25 bp, Artificial
  probe
  misc_feature (1)..(25): SEQ ID NO: 484; WAN024A64; Start 99; Stop 123
cttaaaacctcagtcttcctttgat

SEQ ID NO: 264792 - DNA, 25 bp, Artificial
  probe
  misc_feature (1)..(25): SEQ ID NO: 484; WAN024A64; Start 115; Stop 139
tcctttgatatacatagaagactca

SEQ ID NO: 264793 - DNA, 25 bp, Artificial
  probe
  misc_feature (1)..(25): SEQ ID NO: 484; WAN024A64; Start 108; Stop 132
tcagtcttcctttgatatacataga

SEQ ID NO: 264794 - DNA, 25 bp, Artificial
  probe
  misc_feature (1)..(25): SEQ ID NO: 484; WAN024A64; Start 97; Stop 121
tacttaaaacctcagtcttcctttg

SEQ ID NO: 264795 - DNA, 25 bp, Artificial
  probe
  misc_feature (1)..(25): SEQ ID NO: 484; WAN024A64; Start 107; Stop 131
ctcagtcttcctttgatatacatag

SEQ ID NO: 264796 - DNA, 25 bp, Artificial
  probe
  misc_feature (1)..(25): SEQ ID NO: 484; WAN024A64; Start 134; Stop 158
gactcacgagagaaaccagctattc

SEQ ID NO: 264797 - DNA, 25 bp, Artificial
  probe
  misc_feature (1)..(25): SEQ ID NO: 484; WAN024A64; Start 129; Stop 153
tagaagactcacgagagaaaccagc

SEQ ID NO: 264798 - DNA, 25 bp, Artificial
  probe
  misc_feature (1)..(25): SEQ ID NO: 484; WAN024A64; Start 109; Stop 133
cagtcttcctttgatatacatagaa

SEQ ID NO: 264799 - DNA, 25 bp, Artificial
  probe
  misc_feature (1)..(25): SEQ ID NO: 484; WAN024A64; Start 100; Stop 124
ttaaaacctcagtcttcctttgata

SEQ ID NO: 264800 - DNA, 25 bp, Artificial
  probe
  misc_feature (1)..(25): SEQ ID NO: 484; WAN024A64; Start 96; Stop 120
atacttaaaacctcagtcttccttt

SEQ ID NO: 264801 - DNA, 25 bp, Artificial
  probe
  misc_feature (1)..(25): SEQ ID NO: 485; WAN024AAB; Start 4; Stop 28
atcaccactctactaggatacagac

SEQ ID NO: 264802 - DNA, 25 bp, Artificial
  probe
  misc_feature (1)..(25): SEQ ID NO: 485; WAN024AAB; Start 6; Stop 30
caccactctactaggatacagacaa

SEQ ID NO: 264803 - DNA, 25 bp, Artificial
  probe
  misc_feature (1)..(25): SEQ ID NO: 485; WAN024AAB; Start 5; Stop 29
tcaccactctactaggatacagaca

SEQ ID NO: 264804 - DNA, 25 bp, Artificial
  probe
  misc_feature (1)..(25): SEQ ID NO: 485; WAN024AAB; Start 3; Stop 27
tatcaccactctactaggatacaga

SEQ ID NO: 264805 - DNA, 25 bp, Artificial
  probe
  misc_feature (1)..(25): SEQ ID NO: 485; WAN024AAB; Start 7; Stop 31
accactctactaggatacagacaaa

SEQ ID NO: 264806 - DNA, 25 bp, Artificial
  probe
  misc_feature (1)..(25): SEQ ID NO: 485; WAN024AAB; Start 8; Stop 32
ccactctactaggatacagacaaat

SEQ ID NO: 264807 - DNA, 25 bp, Artificial
  probe
  misc_feature (1)..(25): SEQ ID NO: 485; WAN024AAB; Start 26; Stop 50
gacaaatctgttccaaattccgttt

SEQ ID NO: 264808 - DNA, 25 bp, Artificial
  probe
  misc_feature (1)..(25): SEQ ID NO: 485; WAN024AAB; Start 25; Stop 49
agacaaatctgttccaaattccgtt

SEQ ID NO: 264809 - DNA, 25 bp, Artificial
  probe
  misc_feature (1)..(25): SEQ ID NO: 485; WAN024AAB; Start 98; Stop 122
aaactcttaccttacaatccttcga

SEQ ID NO: 264810 - DNA, 25 bp, Artificial
  probe
  misc_feature (1)..(25): SEQ ID NO: 485; WAN024AAB; Start 10; Stop 34
actctactaggatacagacaaatct

SEQ ID NO: 264811 - DNA, 25 bp, Artificial
  probe
  misc_feature (1)..(25): SEQ ID NO: 485; WAN024AAB; Start 9; Stop 33
cactctactaggatacagacaaatc

SEQ ID NO: 264812 - DNA, 25 bp, Artificial
  probe
  misc_feature (1)..(25): SEQ ID NO: 485; WAN024AAB; Start 99; Stop 123
aactcttaccttacaatccttcgaa

SEQ ID NO: 264813 - DNA, 25 bp, Artificial
  probe
  misc_feature (1)..(25): SEQ ID NO: 485; WAN024AAB; Start 100; Stop 124
actcttaccttacaatccttcgaat

SEQ ID NO: 264814 - DNA, 25 bp, Artificial
  probe
  misc_feature (1)..(25): SEQ ID NO: 485; WAN024AAB; Start 97; Stop 121
aaaactcttaccttacaatccttcg

SEQ ID NO: 264815 - DNA, 25 bp, Artificial
  probe
  misc_feature (1)..(25): SEQ ID NO: 485; WAN024AAB; Start 101; Stop 125
ctcttaccttacaatccttcgaatt

SEQ ID NO: 264816 - DNA, 25 bp, Artificial
  probe
  misc_feature (1)..(25): SEQ ID NO: 485; WAN024AAB; Start 28; Stop 52
caaatctgttccaaattccgtttta

SEQ ID NO: 264817 - DNA, 25 bp, Artificial
  probe
  misc_feature (1)..(25): SEQ ID NO: 485; WAN024AAB; Start 27; Stop 51
acaaatctgttccaaattccgtttt

SEQ ID NO: 264818 - DNA, 25 bp, Artificial
  probe
  misc_feature (1)..(25): SEQ ID NO: 485; WAN024AAB; Start 30; Stop 54
aatctgttccaaattccgttttatt

SEQ ID NO: 264819 - DNA, 25 bp, Artificial
  probe
  misc_feature (1)..(25): SEQ ID NO: 485; WAN024AAB; Start 29; Stop 53
aaatctgttccaaattccgttttat

SEQ ID NO: 264820 - DNA, 25 bp, Artificial
  probe
  misc_feature (1)..(25): SEQ ID NO: 485; WAN024AAB; Start 34; Stop 58
tgttccaaattccgttttattttct

SEQ ID NO: 264821 - DNA, 25 bp, Artificial
  probe
  misc_feature (1)..(25): SEQ ID NO: 485; WAN024AAB; Start 32; Stop 56
tctgttccaaattccgttttatttt

SEQ ID NO: 264822 - DNA, 25 bp, Artificial
  probe
  misc_feature (1)..(25): SEQ ID NO: 485; WAN024AAB; Start 1; Stop 25
agtatcaccactctactaggataca

SEQ ID NO: 264823 - DNA, 25 bp, Artificial
  probe
  misc_feature (1)..(25): SEQ ID NO: 485; WAN024AAB; Start 33; Stop 57
ctgttccaaattccgttttattttc

SEQ ID NO: 264824 - DNA, 25 bp, Artificial
  probe
  misc_feature (1)..(25): SEQ ID NO: 485; WAN024AAB; Start 2; Stop 26
gtatcaccactctactaggatacag

SEQ ID NO: 264825 - DNA, 25 bp, Artificial
  probe
  misc_feature (1)..(25): SEQ ID NO: 485; WAN024AAB; Start 31; Stop 55
atctgttccaaattccgttttattt

SEQ ID NO: 264826 - DNA, 25 bp, Artificial
  probe
  misc_feature (1)..(25): SEQ ID NO: 485; WAN024AAB; Start 102; Stop 126
tcttaccttacaatccttcgaattt

SEQ ID NO: 264827 - DNA, 25 bp, Artificial
  probe
  misc_feature (1)..(25): SEQ ID NO: 485; WAN024AAB; Start 24; Stop 48
cagacaaatctgttccaaattccgt

SEQ ID NO: 264828 - DNA, 25 bp, Artificial
  probe
  misc_feature (1)..(25): SEQ ID NO: 485; WAN024AAB; Start 37; Stop 61
tccaaattccgttttattttctagt

SEQ ID NO: 264829 - DNA, 25 bp, Artificial
  probe
  misc_feature (1)..(25): SEQ ID NO: 485; WAN024AAB; Start 11; Stop 35
ctctactaggatacagacaaatctg

SEQ ID NO: 264830 - DNA, 25 bp, Artificial
  probe
  misc_feature (1)..(25): SEQ ID NO: 485; WAN024AAB; Start 46; Stop 70
cgttttattttctagttttgattgc

SEQ ID NO: 264831 - DNA, 25 bp, Artificial
  probe
  misc_feature (1)..(25): SEQ ID NO: 485; WAN024AAB; Start 35; Stop 59
gttccaaattccgttttattttcta

SEQ ID NO: 264832 - DNA, 25 bp, Artificial
  probe
  misc_feature (1)..(25): SEQ ID NO: 485; WAN024AAB; Start 38; Stop 62
ccaaattccgttttattttctagtt

SEQ ID NO: 264833 - DNA, 25 bp, Artificial
  probe
  misc_feature (1)..(25): SEQ ID NO: 485; WAN024AAB; Start 36; Stop 60
ttccaaattccgttttattttctag

SEQ ID NO: 264834 - DNA, 25 bp, Artificial
  probe
  misc_feature (1)..(25): SEQ ID NO: 486; WAN024AAX; Start 50; Stop 74
ttaagtttggactatcatttcaagt

SEQ ID NO: 264835 - DNA, 25 bp, Artificial
  probe
  misc_feature (1)..(25): SEQ ID NO: 486; WAN024AAX; Start 52; Stop 76
aagtttggactatcatttcaagtat

SEQ ID NO: 264836 - DNA, 25 bp, Artificial
  probe
  misc_feature (1)..(25): SEQ ID NO: 486; WAN024AAX; Start 51; Stop 75
taagtttggactatcatttcaagta

SEQ ID NO: 264837 - DNA, 25 bp, Artificial
  probe
  misc_feature (1)..(25): SEQ ID NO: 486; WAN024AAX; Start 49; Stop 73
tttaagtttggactatcatttcaag

SEQ ID NO: 264838 - DNA, 25 bp, Artificial
  probe
  misc_feature (1)..(25): SEQ ID NO: 486; WAN024AAX; Start 53; Stop 77
agtttggactatcatttcaagtata

SEQ ID NO: 264839 - DNA, 25 bp, Artificial
  probe
  misc_feature (1)..(25): SEQ ID NO: 486; WAN024AAX; Start 48; Stop 72
atttaagtttggactatcatttcaa

SEQ ID NO: 264840 - DNA, 25 bp, Artificial
  probe
  misc_feature (1)..(25): SEQ ID NO: 486; WAN024AAX; Start 47; Stop 71
aatttaagtttggactatcatttca

SEQ ID NO: 264841 - DNA, 25 bp, Artificial
  probe
  misc_feature (1)..(25): SEQ ID NO: 487; WAN024AD2; Start 48; Stop 72
taaagccaagtaaagagaaacgaga

SEQ ID NO: 264842 - DNA, 25 bp, Artificial
  probe
  misc_feature (1)..(25): SEQ ID NO: 487; WAN024AD2; Start 47; Stop 71
ataaagccaagtaaagagaaacgag

SEQ ID NO: 264843 - DNA, 25 bp, Artificial
  probe
  misc_feature (1)..(25): SEQ ID NO: 487; WAN024AD2; Start 49; Stop 73
aaagccaagtaaagagaaacgagaa

SEQ ID NO: 264844 - DNA, 25 bp, Artificial
  probe
  misc_feature (1)..(25): SEQ ID NO: 487; WAN024AD2; Start 46; Stop 70
aataaagccaagtaaagagaaacga

SEQ ID NO: 264845 - DNA, 25 bp, Artificial
  probe
  misc_feature (1)..(25): SEQ ID NO: 487; WAN024AD2; Start 50; Stop 74
aagccaagtaaagagaaacgagaag

SEQ ID NO: 264846 - DNA, 25 bp, Artificial
  probe
  misc_feature (1)..(25): SEQ ID NO: 487; WAN024AD2; Start 53; Stop 77
ccaagtaaagagaaacgagaagcac

SEQ ID NO: 264847 - DNA, 25 bp, Artificial
  probe
  misc_feature (1)..(25): SEQ ID NO: 487; WAN024AD2; Start 45; Stop 69
taataaagccaagtaaagagaaacg

SEQ ID NO: 264848 - DNA, 25 bp, Artificial
  probe
  misc_feature (1)..(25): SEQ ID NO: 487; WAN024AD2; Start 30; Stop 54
catggaaatgtggtataataaagcc

SEQ ID NO: 264849 - DNA, 25 bp, Artificial
  probe
  misc_feature (1)..(25): SEQ ID NO: 487; WAN024AD2; Start 32; Stop 56
tggaaatgtggtataataaagccaa

SEQ ID NO: 264850 - DNA, 25 bp, Artificial
  probe
  misc_feature (1)..(25): SEQ ID NO: 487; WAN024AD2; Start 31; Stop 55
atggaaatgtggtataataaagcca

SEQ ID NO: 264851 - DNA, 25 bp, Artificial
  probe
  misc_feature (1)..(25): SEQ ID NO: 487; WAN024AD2; Start 33; Stop 57
ggaaatgtggtataataaagccaag

SEQ ID NO: 264852 - DNA, 25 bp, Artificial
  probe
  misc_feature (1)..(25): SEQ ID NO: 487; WAN024AD2; Start 51; Stop 75
agccaagtaaagagaaacgagaagc

SEQ ID NO: 264853 - DNA, 25 bp, Artificial
  probe
  misc_feature (1)..(25): SEQ ID NO: 487; WAN024AD2; Start 29; Stop 53
tcatggaaatgtggtataataaagc

SEQ ID NO: 264854 - DNA, 25 bp, Artificial
  probe
  misc_feature (1)..(25): SEQ ID NO: 487; WAN024AD2; Start 52; Stop 76
gccaagtaaagagaaacgagaagca

SEQ ID NO: 264855 - DNA, 25 bp, Artificial
  probe
  misc_feature (1)..(25): SEQ ID NO: 487; WAN024AD2; Start 34; Stop 58
gaaatgtggtataataaagccaagt

SEQ ID NO: 264856 - DNA, 25 bp, Artificial
  probe
  misc_feature (1)..(25): SEQ ID NO: 487; WAN024AD2; Start 41; Stop 65
ggtataataaagccaagtaaagaga

SEQ ID NO: 264857 - DNA, 25 bp, Artificial
  probe
  misc_feature (1)..(25): SEQ ID NO: 487; WAN024AD2; Start 38; Stop 62
tgtggtataataaagccaagtaaag

SEQ ID NO: 264858 - DNA, 25 bp, Artificial
  probe
  misc_feature (1)..(25): SEQ ID NO: 487; WAN024AD2; Start 39; Stop 63
gtggtataataaagccaagtaaaga

SEQ ID NO: 264859 - DNA, 25 bp, Artificial
  probe
  misc_feature (1)..(25): SEQ ID NO: 487; WAN024AD2; Start 40; Stop 64
tggtataataaagccaagtaaagag

SEQ ID NO: 264860 - DNA, 25 bp, Artificial
  probe
  misc_feature (1)..(25): SEQ ID NO: 487; WAN024AD2; Start 37; Stop 61
atgtggtataataaagccaagtaaa

SEQ ID NO: 264861 - DNA, 25 bp, Artificial
  probe
  misc_feature (1)..(25): SEQ ID NO: 487; WAN024AD2; Start 36; Stop 60
aatgtggtataataaagccaagtaa

SEQ ID NO: 264862 - DNA, 25 bp, Artificial
  probe
  misc_feature (1)..(25): SEQ ID NO: 487; WAN024AD2; Start 35; Stop 59
aaatgtggtataataaagccaagta

SEQ ID NO: 264863 - DNA, 25 bp, Artificial
  probe
  misc_feature (1)..(25): SEQ ID NO: 487; WAN024AD2; Start 44; Stop 68
ataataaagccaagtaaagagaaac

SEQ ID NO: 264864 - DNA, 25 bp, Artificial
  probe
  misc_feature (1)..(25): SEQ ID NO: 487; WAN024AD2; Start 20; Stop 44
agaataaaatcatggaaatgtggta

SEQ ID NO: 264865 - DNA, 25 bp, Artificial
  probe
  misc_feature (1)..(25): SEQ ID NO: 487; WAN024AD2; Start 19; Stop 43
tagaataaaatcatggaaatgtggt

SEQ ID NO: 264866 - DNA, 25 bp, Artificial
  probe
  misc_feature (1)..(25): SEQ ID NO: 487; WAN024AD2; Start 28; Stop 52
atcatggaaatgtggtataataaag

SEQ ID NO: 264867 - DNA, 25 bp, Artificial
  probe
  misc_feature (1)..(25): SEQ ID NO: 487; WAN024AD2; Start 18; Stop 42
gtagaataaaatcatggaaatgtgg

SEQ ID NO: 264868 - DNA, 25 bp, Artificial
  probe
  misc_feature (1)..(25): SEQ ID NO: 487; WAN024AD2; Start 17; Stop 41
ggtagaataaaatcatggaaatgtg

SEQ ID NO: 264869 - DNA, 25 bp, Artificial
  probe
  misc_feature (1)..(25): SEQ ID NO: 487; WAN024AD2; Start 16; Stop 40
aggtagaataaaatcatggaaatgt

SEQ ID NO: 264870 - DNA, 25 bp, Artificial
  probe
  misc_feature (1)..(25): SEQ ID NO: 487; WAN024AD2; Start 21; Stop 45
gaataaaatcatggaaatgtggtat

SEQ ID NO: 264871 - DNA, 25 bp, Artificial
  probe
  misc_feature (1)..(25): SEQ ID NO: 487; WAN024AD2; Start 15; Stop 39
aaggtagaataaaatcatggaaatg

SEQ ID NO: 264872 - DNA, 25 bp, Artificial
  probe
  misc_feature (1)..(25): SEQ ID NO: 487; WAN024AD2; Start 13; Stop 37
aaaaggtagaataaaatcatggaaa

SEQ ID NO: 264873 - DNA, 25 bp, Artificial
  probe
  misc_feature (1)..(25): SEQ ID NO: 488; WAN024AIA; Start 39; Stop 63
tgctccgatctttcaatagttcata

SEQ ID NO: 264874 - DNA, 25 bp, Artificial
  probe
  misc_feature (1)..(25): SEQ ID NO: 488; WAN024AIA; Start 40; Stop 64
gctccgatctttcaatagttcatat

SEQ ID NO: 264875 - DNA, 25 bp, Artificial
  probe
  misc_feature (1)..(25): SEQ ID NO: 488; WAN024AIA; Start 38; Stop 62
ttgctccgatctttcaatagttcat

SEQ ID NO: 264876 - DNA, 25 bp, Artificial
  probe
  misc_feature (1)..(25): SEQ ID NO: 488; WAN024AIA; Start 36; Stop 60
gattgctccgatctttcaatagttc

SEQ ID NO: 264877 - DNA, 25 bp, Artificial
  probe
  misc_feature (1)..(25): SEQ ID NO: 488; WAN024AIA; Start 37; Stop 61
attgctccgatctttcaatagttca

SEQ ID NO: 264878 - DNA, 25 bp, Artificial
  probe
  misc_feature (1)..(25): SEQ ID NO: 488; WAN024AIA; Start 35; Stop 59
ggattgctccgatctttcaatagtt

SEQ ID NO: 264879 - DNA, 25 bp, Artificial
  probe
  misc_feature (1)..(25): SEQ ID NO: 488; WAN024AIA; Start 43; Stop 67
ccgatctttcaatagttcatattct

SEQ ID NO: 264880 - DNA, 25 bp, Artificial
  probe
  misc_feature (1)..(25): SEQ ID NO: 488; WAN024AIA; Start 42; Stop 66
tccgatctttcaatagttcatattc

SEQ ID NO: 264881 - DNA, 25 bp, Artificial
  probe
  misc_feature (1)..(25): SEQ ID NO: 488; WAN024AIA; Start 41; Stop 65
ctccgatctttcaatagttcatatt

SEQ ID NO: 264882 - DNA, 25 bp, Artificial
  probe
  misc_feature (1)..(25): SEQ ID NO: 488; WAN024AIA; Start 88; Stop 112
gctaaggttaacgtcaaatgactac

SEQ ID NO: 264883 - DNA, 25 bp, Artificial
  probe
  misc_feature (1)..(25): SEQ ID NO: 488; WAN024AIA; Start 87; Stop 111
agctaaggttaacgtcaaatgacta

SEQ ID NO: 264884 - DNA, 25 bp, Artificial
  probe
  misc_feature (1)..(25): SEQ ID NO: 488; WAN024AIA; Start 84; Stop 108
aatagctaaggttaacgtcaaatga

SEQ ID NO: 264885 - DNA, 25 bp, Artificial
  probe
  misc_feature (1)..(25): SEQ ID NO: 488; WAN024AIA; Start 86; Stop 110
tagctaaggttaacgtcaaatgact

SEQ ID NO: 264886 - DNA, 25 bp, Artificial
  probe
  misc_feature (1)..(25): SEQ ID NO: 488; WAN024AIA; Start 85; Stop 109
atagctaaggttaacgtcaaatgac

SEQ ID NO: 264887 - DNA, 25 bp, Artificial
  probe
  misc_feature (1)..(25): SEQ ID NO: 488; WAN024AIA; Start 83; Stop 107
aaatagctaaggttaacgtcaaatg

SEQ ID NO: 264888 - DNA, 25 bp, Artificial
  probe
  misc_feature (1)..(25): SEQ ID NO: 488; WAN024AIA; Start 44; Stop 68
cgatctttcaatagttcatattctc

SEQ ID NO: 264889 - DNA, 25 bp, Artificial
  probe
  misc_feature (1)..(25): SEQ ID NO: 488; WAN024AIA; Start 89; Stop 113
ctaaggttaacgtcaaatgactacg

SEQ ID NO: 264890 - DNA, 25 bp, Artificial
  probe
  misc_feature (1)..(25): SEQ ID NO: 488; WAN024AIA; Start 90; Stop 114
taaggttaacgtcaaatgactacgc

SEQ ID NO: 264891 - DNA, 25 bp, Artificial
  probe
  misc_feature (1)..(25): SEQ ID NO: 488; WAN024AIA; Start 82; Stop 106
aaaatagctaaggttaacgtcaaat

SEQ ID NO: 264892 - DNA, 25 bp, Artificial
  probe
  misc_feature (1)..(25): SEQ ID NO: 488; WAN024AIA; Start 91; Stop 115
aaggttaacgtcaaatgactacgcg

SEQ ID NO: 264893 - DNA, 25 bp, Artificial
  probe
  misc_feature (1)..(25): SEQ ID NO: 488; WAN024AIA; Start 93; Stop 117
ggttaacgtcaaatgactacgcgac

SEQ ID NO: 264894 - DNA, 25 bp, Artificial
  probe
  misc_feature (1)..(25): SEQ ID NO: 488; WAN024AIA; Start 92; Stop 116
aggttaacgtcaaatgactacgcga

SEQ ID NO: 264895 - DNA, 25 bp, Artificial
  probe
  misc_feature (1)..(25): SEQ ID NO: 489; WAN024ADR; Start 1; Stop 25
agtctcactccgattattcatattt

SEQ ID NO: 264896 - DNA, 25 bp, Artificial
  probe
  misc_feature (1)..(25): SEQ ID NO: 489; WAN024ADR; Start 6; Stop 30
cactccgattattcatatttatcca

SEQ ID NO: 264897 - DNA, 25 bp, Artificial
  probe
  misc_feature (1)..(25): SEQ ID NO: 489; WAN024ADR; Start 2; Stop 26
gtctcactccgattattcatattta

SEQ ID NO: 264898 - DNA, 25 bp, Artificial
  probe
  misc_feature (1)..(25): SEQ ID NO: 489; WAN024ADR; Start 5; Stop 29
tcactccgattattcatatttatcc

SEQ ID NO: 264899 - DNA, 25 bp, Artificial
  probe
  misc_feature (1)..(25): SEQ ID NO: 489; WAN024ADR; Start 27; Stop 51
tccattataacatgaataacaggaa

SEQ ID NO: 264900 - DNA, 25 bp, Artificial
  probe
  misc_feature (1)..(25): SEQ ID NO: 489; WAN024ADR; Start 26; Stop 50
atccattataacatgaataacagga

SEQ ID NO: 264901 - DNA, 25 bp, Artificial
  probe
  misc_feature (1)..(25): SEQ ID NO: 489; WAN024ADR; Start 46; Stop 70
caggaaatagaaaagagttgatagg

SEQ ID NO: 264902 - DNA, 25 bp, Artificial
  probe
  misc_feature (1)..(25): SEQ ID NO: 489; WAN024ADR; Start 7; Stop 31
actccgattattcatatttatccat

SEQ ID NO: 264903 - DNA, 25 bp, Artificial
  probe
  misc_feature (1)..(25): SEQ ID NO: 489; WAN024ADR; Start 47; Stop 71
aggaaatagaaaagagttgatagga

SEQ ID NO: 264904 - DNA, 25 bp, Artificial
  probe
  misc_feature (1)..(25): SEQ ID NO: 489; WAN024ADR; Start 3; Stop 27
tctcactccgattattcatatttat

SEQ ID NO: 264905 - DNA, 25 bp, Artificial
  probe
  misc_feature (1)..(25): SEQ ID NO: 489; WAN024ADR; Start 45; Stop 69
acaggaaatagaaaagagttgatag

SEQ ID NO: 264906 - DNA, 25 bp, Artificial
  probe
  misc_feature (1)..(25): SEQ ID NO: 489; WAN024ADR; Start 4; Stop 28
ctcactccgattattcatatttatc

SEQ ID NO: 264907 - DNA, 25 bp, Artificial
  probe
  misc_feature (1)..(25): SEQ ID NO: 489; WAN024ADR; Start 48; Stop 72
ggaaatagaaaagagttgataggaa

SEQ ID NO: 264908 - DNA, 25 bp, Artificial
  probe
  misc_feature (1)..(25): SEQ ID NO: 489; WAN024ADR; Start 39; Stop 63
tgaataacaggaaatagaaaagagt

SEQ ID NO: 264909 - DNA, 25 bp, Artificial
  probe
  misc_feature (1)..(25): SEQ ID NO: 489; WAN024ADR; Start 28; Stop 52
ccattataacatgaataacaggaaa

SEQ ID NO: 264910 - DNA, 25 bp, Artificial
  probe
  misc_feature (1)..(25): SEQ ID NO: 489; WAN024ADR; Start 44; Stop 68
aacaggaaatagaaaagagttgata

SEQ ID NO: 264911 - DNA, 25 bp, Artificial
  probe
  misc_feature (1)..(25): SEQ ID NO: 489; WAN024ADR; Start 43; Stop 67
taacaggaaatagaaaagagttgat

SEQ ID NO: 264912 - DNA, 25 bp, Artificial
  probe
  misc_feature (1)..(25): SEQ ID NO: 489; WAN024ADR; Start 42; Stop 66
ataacaggaaatagaaaagagttga

SEQ ID NO: 264913 - DNA, 25 bp, Artificial
  probe
  misc_feature (1)..(25): SEQ ID NO: 489; WAN024ADR; Start 41; Stop 65
aataacaggaaatagaaaagagttg

SEQ ID NO: 264914 - DNA, 25 bp, Artificial
  probe
  misc_feature (1)..(25): SEQ ID NO: 489; WAN024ADR; Start 36; Stop 60
acatgaataacaggaaatagaaaag

SEQ ID NO: 264915 - DNA, 25 bp, Artificial
  probe
  misc_feature (1)..(25): SEQ ID NO: 489; WAN024ADR; Start 40; Stop 64
gaataacaggaaatagaaaagagtt

SEQ ID NO: 264916 - DNA, 25 bp, Artificial
  probe
  misc_feature (1)..(25): SEQ ID NO: 489; WAN024ADR; Start 49; Stop 73
gaaatagaaaagagttgataggaaa

SEQ ID NO: 264917 - DNA, 25 bp, Artificial
  probe
  misc_feature (1)..(25): SEQ ID NO: 489; WAN024ADR; Start 38; Stop 62
atgaataacaggaaatagaaaagag

SEQ ID NO: 264918 - DNA, 25 bp, Artificial
  probe
  misc_feature (1)..(25): SEQ ID NO: 489; WAN024ADR; Start 37; Stop 61
catgaataacaggaaatagaaaaga

SEQ ID NO: 264919 - DNA, 25 bp, Artificial
  probe
  misc_feature (1)..(25): SEQ ID NO: 489; WAN024ADR; Start 35; Stop 59
aacatgaataacaggaaatagaaaa

SEQ ID NO: 264920 - DNA, 25 bp, Artificial
  probe
  misc_feature (1)..(25): SEQ ID NO: 490; WAN024A9R; Start 30; Stop 54
tttcacacaaaccttagtccgaatt

SEQ ID NO: 264921 - DNA, 25 bp, Artificial
  probe
  misc_feature (1)..(25): SEQ ID NO: 490; WAN024A9R; Start 40; Stop 64
accttagtccgaattcaattactct

SEQ ID NO: 264922 - DNA, 25 bp, Artificial
  probe
  misc_feature (1)..(25): SEQ ID NO: 490; WAN024A9R; Start 41; Stop 65
ccttagtccgaattcaattactctc

SEQ ID NO: 264923 - DNA, 25 bp, Artificial
  probe
  misc_feature (1)..(25): SEQ ID NO: 490; WAN024A9R; Start 39; Stop 63
aaccttagtccgaattcaattactc

SEQ ID NO: 264924 - DNA, 25 bp, Artificial
  probe
  misc_feature (1)..(25): SEQ ID NO: 490; WAN024A9R; Start 52; Stop 76
attcaattactctcgtgatttacac

SEQ ID NO: 264925 - DNA, 25 bp, Artificial
  probe
  misc_feature (1)..(25): SEQ ID NO: 490; WAN024A9R; Start 35; Stop 59
cacaaaccttagtccgaattcaatt

SEQ ID NO: 264926 - DNA, 25 bp, Artificial
  probe
  misc_feature (1)..(25): SEQ ID NO: 490; WAN024A9R; Start 43; Stop 67
ttagtccgaattcaattactctcgt

SEQ ID NO: 264927 - DNA, 25 bp, Artificial
  probe
  misc_feature (1)..(25): SEQ ID NO: 490; WAN024A9R; Start 47; Stop 71
tccgaattcaattactctcgtgatt

SEQ ID NO: 264928 - DNA, 25 bp, Artificial
  probe
  misc_feature (1)..(25): SEQ ID NO: 490; WAN024A9R; Start 44; Stop 68
tagtccgaattcaattactctcgtg

SEQ ID NO: 264929 - DNA, 25 bp, Artificial
  probe
  misc_feature (1)..(25): SEQ ID NO: 490; WAN024A9R; Start 42; Stop 66
cttagtccgaattcaattactctcg

SEQ ID NO: 264930 - DNA, 25 bp, Artificial
  probe
  misc_feature (1)..(25): SEQ ID NO: 490; WAN024A9R; Start 34; Stop 58
acacaaaccttagtccgaattcaat

SEQ ID NO: 264931 - DNA, 25 bp, Artificial
  probe
  misc_feature (1)..(25): SEQ ID NO: 490; WAN024A9R; Start 51; Stop 75
aattcaattactctcgtgatttaca

SEQ ID NO: 264932 - DNA, 25 bp, Artificial
  probe
  misc_feature (1)..(25): SEQ ID NO: 490; WAN024A9R; Start 46; Stop 70
gtccgaattcaattactctcgtgat

SEQ ID NO: 264933 - DNA, 25 bp, Artificial
  probe
  misc_feature (1)..(25): SEQ ID NO: 490; WAN024A9R; Start 29; Stop 53
ttttcacacaaaccttagtccgaat

SEQ ID NO: 264934 - DNA, 25 bp, Artificial
  probe
  misc_feature (1)..(25): SEQ ID NO: 490; WAN024A9R; Start 36; Stop 60
acaaaccttagtccgaattcaatta

SEQ ID NO: 264935 - DNA, 25 bp, Artificial
  probe
  misc_feature (1)..(25): SEQ ID NO: 490; WAN024A9R; Start 37; Stop 61
caaaccttagtccgaattcaattac

SEQ ID NO: 264936 - DNA, 25 bp, Artificial
  probe
  misc_feature (1)..(25): SEQ ID NO: 490; WAN024A9R; Start 33; Stop 57
cacacaaaccttagtccgaattcaa

SEQ ID NO: 264937 - DNA, 25 bp, Artificial
  probe
  misc_feature (1)..(25): SEQ ID NO: 490; WAN024A9R; Start 31; Stop 55
ttcacacaaaccttagtccgaattc

SEQ ID NO: 264938 - DNA, 25 bp, Artificial
  probe
  misc_feature (1)..(25): SEQ ID NO: 490; WAN024A9R; Start 45; Stop 69
agtccgaattcaattactctcgtga

SEQ ID NO: 264939 - DNA, 25 bp, Artificial
  probe
  misc_feature (1)..(25): SEQ ID NO: 490; WAN024A9R; Start 38; Stop 62
aaaccttagtccgaattcaattact

SEQ ID NO: 264940 - DNA, 25 bp, Artificial
  probe
  misc_feature (1)..(25): SEQ ID NO: 490; WAN024A9R; Start 32; Stop 56
tcacacaaaccttagtccgaattca

SEQ ID NO: 264941 - DNA, 25 bp, Artificial
  probe
  misc_feature (1)..(25): SEQ ID NO: 490; WAN024A9R; Start 48; Stop 72
ccgaattcaattactctcgtgattt

SEQ ID NO: 264942 - DNA, 25 bp, Artificial
  probe
  misc_feature (1)..(25): SEQ ID NO: 490; WAN024A9R; Start 50; Stop 74
gaattcaattactctcgtgatttac

SEQ ID NO: 264943 - DNA, 25 bp, Artificial
  probe
  misc_feature (1)..(25): SEQ ID NO: 492; WAN024AC6; Start 3; Stop 27
tgaaagtctattgagttgttgacac

SEQ ID NO: 264944 - DNA, 25 bp, Artificial
  probe
  misc_feature (1)..(25): SEQ ID NO: 492; WAN024AC6; Start 2; Stop 26
gtgaaagtctattgagttgttgaca

SEQ ID NO: 264945 - DNA, 25 bp, Artificial
  probe
  misc_feature (1)..(25): SEQ ID NO: 492; WAN024AC6; Start 4; Stop 28
gaaagtctattgagttgttgacact

SEQ ID NO: 264946 - DNA, 25 bp, Artificial
  probe
  misc_feature (1)..(25): SEQ ID NO: 492; WAN024AC6; Start 1; Stop 25
agtgaaagtctattgagttgttgac

SEQ ID NO: 264947 - DNA, 25 bp, Artificial
  probe
  misc_feature (1)..(25): SEQ ID NO: 492; WAN024AC6; Start 5; Stop 29
aaagtctattgagttgttgacactc

SEQ ID NO: 264948 - DNA, 25 bp, Artificial
  probe
  misc_feature (1)..(25): SEQ ID NO: 492; WAN024AC6; Start 118; Stop 142
taattaaatggttaaggagttgttc

SEQ ID NO: 264949 - DNA, 25 bp, Artificial
  probe
  misc_feature (1)..(25): SEQ ID NO: 492; WAN024AC6; Start 78; Stop 102
cttgacagattaaattttcaggagt

SEQ ID NO: 264950 - DNA, 25 bp, Artificial
  probe
  misc_feature (1)..(25): SEQ ID NO: 492; WAN024AC6; Start 77; Stop 101
tcttgacagattaaattttcaggag

SEQ ID NO: 264951 - DNA, 25 bp, Artificial
  probe
  misc_feature (1)..(25): SEQ ID NO: 492; WAN024AC6; Start 81; Stop 105
gacagattaaattttcaggagtaga

SEQ ID NO: 264952 - DNA, 25 bp, Artificial
  probe
  misc_feature (1)..(25): SEQ ID NO: 492; WAN024AC6; Start 80; Stop 104
tgacagattaaattttcaggagtag

SEQ ID NO: 264953 - DNA, 25 bp, Artificial
  probe
  misc_feature (1)..(25): SEQ ID NO: 492; WAN024AC6; Start 79; Stop 103
ttgacagattaaattttcaggagta

SEQ ID NO: 264954 - DNA, 25 bp, Artificial
  probe
  misc_feature (1)..(25): SEQ ID NO: 492; WAN024AC6; Start 116; Stop 140
gttaattaaatggttaaggagttgt

SEQ ID NO: 264955 - DNA, 25 bp, Artificial
  probe
  misc_feature (1)..(25): SEQ ID NO: 492; WAN024AC6; Start 82; Stop 106
acagattaaattttcaggagtagaa

SEQ ID NO: 264956 - DNA, 25 bp, Artificial
  probe
  misc_feature (1)..(25): SEQ ID NO: 492; WAN024AC6; Start 76; Stop 100
atcttgacagattaaattttcagga

SEQ ID NO: 264957 - DNA, 25 bp, Artificial
  probe
  misc_feature (1)..(25): SEQ ID NO: 492; WAN024AC6; Start 115; Stop 139
agttaattaaatggttaaggagttg

SEQ ID NO: 264958 - DNA, 25 bp, Artificial
  probe
  misc_feature (1)..(25): SEQ ID NO: 492; WAN024AC6; Start 117; Stop 141
ttaattaaatggttaaggagttgtt

SEQ ID NO: 264959 - DNA, 25 bp, Artificial
  probe
  misc_feature (1)..(25): SEQ ID NO: 492; WAN024AC6; Start 83; Stop 107
cagattaaattttcaggagtagaat

SEQ ID NO: 264960 - DNA, 25 bp, Artificial
  probe
  misc_feature (1)..(25): SEQ ID NO: 492; WAN024AC6; Start 75; Stop 99
tatcttgacagattaaattttcagg

SEQ ID NO: 264961 - DNA, 25 bp, Artificial
  probe
  misc_feature (1)..(25): SEQ ID NO: 493; WAN024AP6; Start 86; Stop 110
ggtttctccctactccttctactaa

SEQ ID NO: 264962 - DNA, 25 bp, Artificial
  probe
  misc_feature (1)..(25): SEQ ID NO: 493; WAN024AP6; Start 87; Stop 111
gtttctccctactccttctactaat

SEQ ID NO: 264963 - DNA, 25 bp, Artificial
  probe
  misc_feature (1)..(25): SEQ ID NO: 493; WAN024AP6; Start 94; Stop 118
cctactccttctactaatattctgc

SEQ ID NO: 264964 - DNA, 25 bp, Artificial
  probe
  misc_feature (1)..(25): SEQ ID NO: 493; WAN024AP6; Start 62; Stop 86
ctattacctaaacaagagggagtgg

SEQ ID NO: 264965 - DNA, 25 bp, Artificial
  probe
  misc_feature (1)..(25): SEQ ID NO: 493; WAN024AP6; Start 61; Stop 85
actattacctaaacaagagggagtg

SEQ ID NO: 264966 - DNA, 25 bp, Artificial
  probe
  misc_feature (1)..(25): SEQ ID NO: 493; WAN024AP6; Start 35; Stop 59
cgatttcaccataatttgacagtca

SEQ ID NO: 264967 - DNA, 25 bp, Artificial
  probe
  misc_feature (1)..(25): SEQ ID NO: 493; WAN024AP6; Start 63; Stop 87
tattacctaaacaagagggagtggg

SEQ ID NO: 264968 - DNA, 25 bp, Artificial
  probe
  misc_feature (1)..(25): SEQ ID NO: 493; WAN024AP6; Start 60; Stop 84
aactattacctaaacaagagggagt

SEQ ID NO: 264969 - DNA, 25 bp, Artificial
  probe
  misc_feature (1)..(25): SEQ ID NO: 493; WAN024AP6; Start 88; Stop 112
tttctccctactccttctactaata

SEQ ID NO: 264970 - DNA, 25 bp, Artificial
  probe
  misc_feature (1)..(25): SEQ ID NO: 493; WAN024AP6; Start 89; Stop 113
ttctccctactccttctactaatat

SEQ ID NO: 264971 - DNA, 25 bp, Artificial
  probe
  misc_feature (1)..(25): SEQ ID NO: 493; WAN024AP6; Start 34; Stop 58
tcgatttcaccataatttgacagtc

SEQ ID NO: 264972 - DNA, 25 bp, Artificial
  probe
  misc_feature (1)..(25): SEQ ID NO: 493; WAN024AP6; Start 58; Stop 82
caaactattacctaaacaagaggga

SEQ ID NO: 264973 - DNA, 25 bp, Artificial
  probe
  misc_feature (1)..(25): SEQ ID NO: 493; WAN024AP6; Start 57; Stop 81
tcaaactattacctaaacaagaggg

SEQ ID NO: 264974 - DNA, 25 bp, Artificial
  probe
  misc_feature (1)..(25): SEQ ID NO: 493; WAN024AP6; Start 33; Stop 57
ttcgatttcaccataatttgacagt

SEQ ID NO: 264975 - DNA, 25 bp, Artificial
  probe
  misc_feature (1)..(25): SEQ ID NO: 493; WAN024AP6; Start 31; Stop 55
agttcgatttcaccataatttgaca

SEQ ID NO: 264976 - DNA, 25 bp, Artificial
  probe
  misc_feature (1)..(25): SEQ ID NO: 493; WAN024AP6; Start 32; Stop 56
gttcgatttcaccataatttgacag

SEQ ID NO: 264977 - DNA, 25 bp, Artificial
  probe
  misc_feature (1)..(25): SEQ ID NO: 493; WAN024AP6; Start 59; Stop 83
aaactattacctaaacaagagggag

SEQ ID NO: 264978 - DNA, 25 bp, Artificial
  probe
  misc_feature (1)..(25): SEQ ID NO: 493; WAN024AP6; Start 24; Stop 48
acgtaatagttcgatttcaccataa

SEQ ID NO: 264979 - DNA, 25 bp, Artificial
  probe
  misc_feature (1)..(25): SEQ ID NO: 493; WAN024AP6; Start 51; Stop 75
tgacagtcaaactattacctaaaca

SEQ ID NO: 264980 - DNA, 25 bp, Artificial
  probe
  misc_feature (1)..(25): SEQ ID NO: 493; WAN024AP6; Start 53; Stop 77
acagtcaaactattacctaaacaag

SEQ ID NO: 264981 - DNA, 25 bp, Artificial
  probe
  misc_feature (1)..(25): SEQ ID NO: 493; WAN024AP6; Start 52; Stop 76
gacagtcaaactattacctaaacaa

SEQ ID NO: 264982 - DNA, 25 bp, Artificial
  probe
  misc_feature (1)..(25): SEQ ID NO: 493; WAN024AP6; Start 56; Stop 80
gtcaaactattacctaaacaagagg

SEQ ID NO: 264983 - DNA, 25 bp, Artificial
  probe
  misc_feature (1)..(25): SEQ ID NO: 493; WAN024AP6; Start 93; Stop 117
ccctactccttctactaatattctg

SEQ ID NO: 264984 - DNA, 25 bp, Artificial
  probe
  misc_feature (1)..(25): SEQ ID NO: 493; WAN024AP6; Start 92; Stop 116
tccctactccttctactaatattct

SEQ ID NO: 264985 - DNA, 25 bp, Artificial
  probe
  misc_feature (1)..(25): SEQ ID NO: 493; WAN024AP6; Start 90; Stop 114
tctccctactccttctactaatatt

SEQ ID NO: 264986 - DNA, 25 bp, Artificial
  probe
  misc_feature (1)..(25): SEQ ID NO: 493; WAN024AP6; Start 54; Stop 78
cagtcaaactattacctaaacaaga

SEQ ID NO: 264987 - DNA, 25 bp, Artificial
  probe
  misc_feature (1)..(25): SEQ ID NO: 493; WAN024AP6; Start 25; Stop 49
cgtaatagttcgatttcaccataat

SEQ ID NO: 264988 - DNA, 25 bp, Artificial
  probe
  misc_feature (1)..(25): SEQ ID NO: 493; WAN024AP6; Start 30; Stop 54
tagttcgatttcaccataatttgac

SEQ ID NO: 264989 - DNA, 25 bp, Artificial
  probe
  misc_feature (1)..(25): SEQ ID NO: 493; WAN024AP6; Start 91; Stop 115
ctccctactccttctactaatattc

SEQ ID NO: 264990 - DNA, 25 bp, Artificial
  probe
  misc_feature (1)..(25): SEQ ID NO: 493; WAN024AP6; Start 55; Stop 79
agtcaaactattacctaaacaagag

SEQ ID NO: 264991 - DNA, 25 bp, Artificial
  probe
  misc_feature (1)..(25): SEQ ID NO: 493; WAN024AP6; Start 64; Stop 88
attacctaaacaagagggagtgggt

SEQ ID NO: 264992 - DNA, 25 bp, Artificial
  probe
  misc_feature (1)..(25): SEQ ID NO: 493; WAN024AP6; Start 65; Stop 89
ttacctaaacaagagggagtgggtt

SEQ ID NO: 264993 - DNA, 25 bp, Artificial
  probe
  misc_feature (1)..(25): SEQ ID NO: 493; WAN024AP6; Start 85; Stop 109
gggtttctccctactccttctacta

SEQ ID NO: 264994 - DNA, 25 bp, Artificial
  probe
  misc_feature (1)..(25): SEQ ID NO: 494; WAN0249SO; Start 8; Stop 32
tgaagttggaatgctacactataac

SEQ ID NO: 264995 - DNA, 25 bp, Artificial
  probe
  misc_feature (1)..(25): SEQ ID NO: 494; WAN0249SO; Start 7; Stop 31
ttgaagttggaatgctacactataa

SEQ ID NO: 264996 - DNA, 25 bp, Artificial
  probe
  misc_feature (1)..(25): SEQ ID NO: 494; WAN0249SO; Start 5; Stop 29
ctttgaagttggaatgctacactat

SEQ ID NO: 264997 - DNA, 25 bp, Artificial
  probe
  misc_feature (1)..(25): SEQ ID NO: 494; WAN0249SO; Start 12; Stop 36
gttggaatgctacactataacttat

SEQ ID NO: 264998 - DNA, 25 bp, Artificial
  probe
  misc_feature (1)..(25): SEQ ID NO: 494; WAN0249SO; Start 4; Stop 28
gctttgaagttggaatgctacacta

SEQ ID NO: 264999 - DNA, 25 bp, Artificial
  probe
  misc_feature (1)..(25): SEQ ID NO: 494; WAN0249SO; Start 6; Stop 30
tttgaagttggaatgctacactata

SEQ ID NO: 265000 - DNA, 25 bp, Artificial
  probe
  misc_feature (1)..(25): SEQ ID NO: 494; WAN0249SO; Start 9; Stop 33
gaagttggaatgctacactataact

SEQ ID NO: 265001 - DNA, 25 bp, Artificial
  probe
  misc_feature (1)..(25): SEQ ID NO: 494; WAN0249SO; Start 1; Stop 25
agtgctttgaagttggaatgctaca

SEQ ID NO: 265002 - DNA, 25 bp, Artificial
  probe
  misc_feature (1)..(25): SEQ ID NO: 494; WAN0249SO; Start 11; Stop 35
agttggaatgctacactataactta

SEQ ID NO: 265003 - DNA, 25 bp, Artificial
  probe
  misc_feature (1)..(25): SEQ ID NO: 494; WAN0249SO; Start 3; Stop 27
tgctttgaagttggaatgctacact

SEQ ID NO: 265004 - DNA, 25 bp, Artificial
  probe
  misc_feature (1)..(25): SEQ ID NO: 494; WAN0249SO; Start 2; Stop 26
gtgctttgaagttggaatgctacac

SEQ ID NO: 265005 - DNA, 25 bp, Artificial
  probe
  misc_feature (1)..(25): SEQ ID NO: 494; WAN0249SO; Start 13; Stop 37
ttggaatgctacactataacttata

SEQ ID NO: 265006 - DNA, 25 bp, Artificial
  probe
  misc_feature (1)..(25): SEQ ID NO: 494; WAN0249SO; Start 14; Stop 38
tggaatgctacactataacttataa

SEQ ID NO: 265007 - DNA, 25 bp, Artificial
  probe
  misc_feature (1)..(25): SEQ ID NO: 494; WAN0249SO; Start 10; Stop 34
aagttggaatgctacactataactt

SEQ ID NO: 265008 - DNA, 25 bp, Artificial
  probe
  misc_feature (1)..(25): SEQ ID NO: 495; WAN0249UQ; Start 81; Stop 105
atcgctttcaaacaagaacaaaatg

SEQ ID NO: 265009 - DNA, 25 bp, Artificial
  probe
  misc_feature (1)..(25): SEQ ID NO: 495; WAN0249UQ; Start 50; Stop 74
tgataaaataatagtcgtaagggcg

SEQ ID NO: 265010 - DNA, 25 bp, Artificial
  probe
  misc_feature (1)..(25): SEQ ID NO: 495; WAN0249UQ; Start 79; Stop 103
aaatcgctttcaaacaagaacaaaa

SEQ ID NO: 265011 - DNA, 25 bp, Artificial
  probe
  misc_feature (1)..(25): SEQ ID NO: 495; WAN0249UQ; Start 78; Stop 102
aaaatcgctttcaaacaagaacaaa

SEQ ID NO: 265012 - DNA, 25 bp, Artificial
  probe
  misc_feature (1)..(25): SEQ ID NO: 495; WAN0249UQ; Start 80; Stop 104
aatcgctttcaaacaagaacaaaat

SEQ ID NO: 265013 - DNA, 25 bp, Artificial
  probe
  misc_feature (1)..(25): SEQ ID NO: 495; WAN0249UQ; Start 56; Stop 80
aataatagtcgtaagggcgaataaa

SEQ ID NO: 265014 - DNA, 25 bp, Artificial
  probe
  misc_feature (1)..(25): SEQ ID NO: 495; WAN0249UQ; Start 55; Stop 79
aaataatagtcgtaagggcgaataa

SEQ ID NO: 265015 - DNA, 25 bp, Artificial
  probe
  misc_feature (1)..(25): SEQ ID NO: 495; WAN0249UQ; Start 77; Stop 101
taaaatcgctttcaaacaagaacaa

SEQ ID NO: 265016 - DNA, 25 bp, Artificial
  probe
  misc_feature (1)..(25): SEQ ID NO: 495; WAN0249UQ; Start 76; Stop 100
ataaaatcgctttcaaacaagaaca

SEQ ID NO: 265017 - DNA, 25 bp, Artificial
  probe
  misc_feature (1)..(25): SEQ ID NO: 495; WAN0249UQ; Start 82; Stop 106
tcgctttcaaacaagaacaaaatgt

SEQ ID NO: 265018 - DNA, 25 bp, Artificial
  probe
  misc_feature (1)..(25): SEQ ID NO: 495; WAN0249UQ; Start 75; Stop 99
aataaaatcgctttcaaacaagaac

SEQ ID NO: 265019 - DNA, 25 bp, Artificial
  probe
  misc_feature (1)..(25): SEQ ID NO: 495; WAN0249UQ; Start 74; Stop 98
gaataaaatcgctttcaaacaagaa

SEQ ID NO: 265020 - DNA, 25 bp, Artificial
  probe
  misc_feature (1)..(25): SEQ ID NO: 495; WAN0249UQ; Start 17; Stop 41
tttctgcaaaacgcttgacatattt

SEQ ID NO: 265021 - DNA, 25 bp, Artificial
  probe
  misc_feature (1)..(25): SEQ ID NO: 495; WAN0249UQ; Start 49; Stop 73
atgataaaataatagtcgtaagggc

SEQ ID NO: 265022 - DNA, 25 bp, Artificial
  probe
  misc_feature (1)..(25): SEQ ID NO: 495; WAN0249UQ; Start 59; Stop 83
aatagtcgtaagggcgaataaaatc

SEQ ID NO: 265023 - DNA, 25 bp, Artificial
  probe
  misc_feature (1)..(25): SEQ ID NO: 495; WAN0249UQ; Start 73; Stop 97
cgaataaaatcgctttcaaacaaga

SEQ ID NO: 265024 - DNA, 25 bp, Artificial
  probe
  misc_feature (1)..(25): SEQ ID NO: 495; WAN0249UQ; Start 60; Stop 84
atagtcgtaagggcgaataaaatcg

SEQ ID NO: 265025 - DNA, 25 bp, Artificial
  probe
  misc_feature (1)..(25): SEQ ID NO: 495; WAN0249UQ; Start 51; Stop 75
gataaaataatagtcgtaagggcga

SEQ ID NO: 265026 - DNA, 25 bp, Artificial
  probe
  misc_feature (1)..(25): SEQ ID NO: 495; WAN0249UQ; Start 18; Stop 42
ttctgcaaaacgcttgacatatttt

SEQ ID NO: 265027 - DNA, 25 bp, Artificial
  probe
  misc_feature (1)..(25): SEQ ID NO: 495; WAN0249UQ; Start 16; Stop 40
ttttctgcaaaacgcttgacatatt

SEQ ID NO: 265028 - DNA, 25 bp, Artificial
  probe
  misc_feature (1)..(25): SEQ ID NO: 495; WAN0249UQ; Start 58; Stop 82
taatagtcgtaagggcgaataaaat

SEQ ID NO: 265029 - DNA, 25 bp, Artificial
  probe
  misc_feature (1)..(25): SEQ ID NO: 495; WAN0249UQ; Start 57; Stop 81
ataatagtcgtaagggcgaataaaa

SEQ ID NO: 265030 - DNA, 25 bp, Artificial
  probe
  misc_feature (1)..(25): SEQ ID NO: 495; WAN0249UQ; Start 54; Stop 78
aaaataatagtcgtaagggcgaata

SEQ ID NO: 265031 - DNA, 25 bp, Artificial
  probe
  misc_feature (1)..(25): SEQ ID NO: 495; WAN0249UQ; Start 53; Stop 77
taaaataatagtcgtaagggcgaat

SEQ ID NO: 265032 - DNA, 25 bp, Artificial
  probe
  misc_feature (1)..(25): SEQ ID NO: 495; WAN0249UQ; Start 52; Stop 76
ataaaataatagtcgtaagggcgaa

SEQ ID NO: 265033 - DNA, 25 bp, Artificial
  probe
  misc_feature (1)..(25): SEQ ID NO: 495; WAN0249UQ; Start 83; Stop 107
cgctttcaaacaagaacaaaatgtt

SEQ ID NO: 265034 - DNA, 25 bp, Artificial
  probe
  misc_feature (1)..(25): SEQ ID NO: 495; WAN0249UQ; Start 84; Stop 108
gctttcaaacaagaacaaaatgtta

SEQ ID NO: 265035 - DNA, 25 bp, Artificial
  probe
  misc_feature (1)..(25): SEQ ID NO: 495; WAN0249UQ; Start 48; Stop 72
catgataaaataatagtcgtaaggg

SEQ ID NO: 265036 - DNA, 25 bp, Artificial
  probe
  misc_feature (1)..(25): SEQ ID NO: 495; WAN0249UQ; Start 85; Stop 109
ctttcaaacaagaacaaaatgttat

SEQ ID NO: 265037 - DNA, 25 bp, Artificial
  probe
  misc_feature (1)..(25): SEQ ID NO: 496; WAN0249ZM; Start 152; Stop 176
actgtattgcctactgtctatctat

SEQ ID NO: 265038 - DNA, 25 bp, Artificial
  probe
  misc_feature (1)..(25): SEQ ID NO: 496; WAN0249ZM; Start 145; Stop 169
aagttagactgtattgcctactgtc

SEQ ID NO: 265039 - DNA, 25 bp, Artificial
  probe
  misc_feature (1)..(25): SEQ ID NO: 496; WAN0249ZM; Start 151; Stop 175
gactgtattgcctactgtctatcta

SEQ ID NO: 265040 - DNA, 25 bp, Artificial
  probe
  misc_feature (1)..(25): SEQ ID NO: 496; WAN0249ZM; Start 142; Stop 166
ggaaagttagactgtattgcctact

SEQ ID NO: 265041 - DNA, 25 bp, Artificial
  probe
  misc_feature (1)..(25): SEQ ID NO: 496; WAN0249ZM; Start 144; Stop 168
aaagttagactgtattgcctactgt

SEQ ID NO: 265042 - DNA, 25 bp, Artificial
  probe
  misc_feature (1)..(25): SEQ ID NO: 496; WAN0249ZM; Start 153; Stop 177
ctgtattgcctactgtctatctata

SEQ ID NO: 265043 - DNA, 25 bp, Artificial
  probe
  misc_feature (1)..(25): SEQ ID NO: 496; WAN0249ZM; Start 138; Stop 162
gtaaggaaagttagactgtattgcc

SEQ ID NO: 265044 - DNA, 25 bp, Artificial
  probe
  misc_feature (1)..(25): SEQ ID NO: 496; WAN0249ZM; Start 143; Stop 167
gaaagttagactgtattgcctactg

SEQ ID NO: 265045 - DNA, 25 bp, Artificial
  probe
  misc_feature (1)..(25): SEQ ID NO: 496; WAN0249ZM; Start 137; Stop 161
agtaaggaaagttagactgtattgc

SEQ ID NO: 265046 - DNA, 25 bp, Artificial
  probe
  misc_feature (1)..(25): SEQ ID NO: 496; WAN0249ZM; Start 141; Stop 165
aggaaagttagactgtattgcctac

SEQ ID NO: 265047 - DNA, 25 bp, Artificial
  probe
  misc_feature (1)..(25): SEQ ID NO: 496; WAN0249ZM; Start 140; Stop 164
aaggaaagttagactgtattgccta

SEQ ID NO: 265048 - DNA, 25 bp, Artificial
  probe
  misc_feature (1)..(25): SEQ ID NO: 496; WAN0249ZM; Start 139; Stop 163
taaggaaagttagactgtattgcct

SEQ ID NO: 265049 - DNA, 25 bp, Artificial
  probe
  misc_feature (1)..(25): SEQ ID NO: 496; WAN0249ZM; Start 154; Stop 178
tgtattgcctactgtctatctataa

SEQ ID NO: 265050 - DNA, 25 bp, Artificial
  probe
  misc_feature (1)..(25): SEQ ID NO: 496; WAN0249ZM; Start 150; Stop 174
agactgtattgcctactgtctatct

SEQ ID NO: 265051 - DNA, 25 bp, Artificial
  probe
  misc_feature (1)..(25): SEQ ID NO: 496; WAN0249ZM; Start 146; Stop 170
agttagactgtattgcctactgtct

SEQ ID NO: 265052 - DNA, 25 bp, Artificial
  probe
  misc_feature (1)..(25): SEQ ID NO: 496; WAN0249ZM; Start 1; Stop 25
agtggatggataatgctgaaaactc

SEQ ID NO: 265053 - DNA, 25 bp, Artificial
  probe
  misc_feature (1)..(25): SEQ ID NO: 496; WAN0249ZM; Start 8; Stop 32
ggataatgctgaaaactccttgaag

SEQ ID NO: 265054 - DNA, 25 bp, Artificial
  probe
  misc_feature (1)..(25): SEQ ID NO: 496; WAN0249ZM; Start 5; Stop 29
gatggataatgctgaaaactccttg

SEQ ID NO: 265055 - DNA, 25 bp, Artificial
  probe
  misc_feature (1)..(25): SEQ ID NO: 496; WAN0249ZM; Start 6; Stop 30
atggataatgctgaaaactccttga

SEQ ID NO: 265056 - DNA, 25 bp, Artificial
  probe
  misc_feature (1)..(25): SEQ ID NO: 496; WAN0249ZM; Start 7; Stop 31
tggataatgctgaaaactccttgaa

SEQ ID NO: 265057 - DNA, 25 bp, Artificial
  probe
  misc_feature (1)..(25): SEQ ID NO: 496; WAN0249ZM; Start 4; Stop 28
ggatggataatgctgaaaactcctt

SEQ ID NO: 265058 - DNA, 25 bp, Artificial
  probe
  misc_feature (1)..(25): SEQ ID NO: 496; WAN0249ZM; Start 9; Stop 33
gataatgctgaaaactccttgaagg

SEQ ID NO: 265059 - DNA, 25 bp, Artificial
  probe
  misc_feature (1)..(25): SEQ ID NO: 496; WAN0249ZM; Start 136; Stop 160
tagtaaggaaagttagactgtattg

SEQ ID NO: 265060 - DNA, 25 bp, Artificial
  probe
  misc_feature (1)..(25): SEQ ID NO: 496; WAN0249ZM; Start 155; Stop 179
gtattgcctactgtctatctataaa

SEQ ID NO: 265061 - DNA, 25 bp, Artificial
  probe
  misc_feature (1)..(25): SEQ ID NO: 496; WAN0249ZM; Start 3; Stop 27
tggatggataatgctgaaaactcct

SEQ ID NO: 265062 - DNA, 25 bp, Artificial
  probe
  misc_feature (1)..(25): SEQ ID NO: 496; WAN0249ZM; Start 2; Stop 26
gtggatggataatgctgaaaactcc

SEQ ID NO: 265063 - DNA, 25 bp, Artificial
  probe
  misc_feature (1)..(25): SEQ ID NO: 496; WAN0249ZM; Start 147; Stop 171
gttagactgtattgcctactgtcta

SEQ ID NO: 265064 - DNA, 25 bp, Artificial
  probe
  misc_feature (1)..(25): SEQ ID NO: 496; WAN0249ZM; Start 149; Stop 173
tagactgtattgcctactgtctatc

SEQ ID NO: 265065 - DNA, 25 bp, Artificial
  probe
  misc_feature (1)..(25): SEQ ID NO: 496; WAN0249ZM; Start 183; Stop 207
tattttattggaggcttttactcaa

SEQ ID NO: 265066 - DNA, 25 bp, Artificial
  probe
  misc_feature (1)..(25): SEQ ID NO: 496; WAN0249ZM; Start 148; Stop 172
ttagactgtattgcctactgtctat

SEQ ID NO: 265067 - DNA, 25 bp, Artificial
  probe
  misc_feature (1)..(25): SEQ ID NO: 496; WAN0249ZM; Start 133; Stop 157
aaatagtaaggaaagttagactgta

SEQ ID NO: 265068 - DNA, 25 bp, Artificial
  probe
  misc_feature (1)..(25): SEQ ID NO: 496; WAN0249ZM; Start 182; Stop 206
atattttattggaggcttttactca

SEQ ID NO: 265069 - DNA, 25 bp, Artificial
  probe
  misc_feature (1)..(25): SEQ ID NO: 496; WAN0249ZM; Start 25; Stop 49
ccttgaaggataagtctatttagta

SEQ ID NO: 265070 - DNA, 25 bp, Artificial
  probe
  misc_feature (1)..(25): SEQ ID NO: 497; WAN0249GO; Start 70; Stop 94
agtatagcacaaatagaaaacggtt

SEQ ID NO: 265071 - DNA, 25 bp, Artificial
  probe
  misc_feature (1)..(25): SEQ ID NO: 497; WAN0249GO; Start 28; Stop 52
ttttattgataaggaaacgcaaacg

SEQ ID NO: 265072 - DNA, 25 bp, Artificial
  probe
  misc_feature (1)..(25): SEQ ID NO: 497; WAN0249GO; Start 71; Stop 95
gtatagcacaaatagaaaacggttg

SEQ ID NO: 265073 - DNA, 25 bp, Artificial
  probe
  misc_feature (1)..(25): SEQ ID NO: 497; WAN0249GO; Start 69; Stop 93
tagtatagcacaaatagaaaacggt

SEQ ID NO: 265074 - DNA, 25 bp, Artificial
  probe
  misc_feature (1)..(25): SEQ ID NO: 497; WAN0249GO; Start 56; Stop 80
tcctttatgagcttagtatagcaca

SEQ ID NO: 265075 - DNA, 25 bp, Artificial
  probe
  misc_feature (1)..(25): SEQ ID NO: 497; WAN0249GO; Start 57; Stop 81
cctttatgagcttagtatagcacaa

SEQ ID NO: 265076 - DNA, 25 bp, Artificial
  probe
  misc_feature (1)..(25): SEQ ID NO: 497; WAN0249GO; Start 55; Stop 79
ttcctttatgagcttagtatagcac

SEQ ID NO: 265077 - DNA, 25 bp, Artificial
  probe
  misc_feature (1)..(25): SEQ ID NO: 497; WAN0249GO; Start 29; Stop 53
tttattgataaggaaacgcaaacgt

SEQ ID NO: 265078 - DNA, 25 bp, Artificial
  probe
  misc_feature (1)..(25): SEQ ID NO: 497; WAN0249GO; Start 68; Stop 92
ttagtatagcacaaatagaaaacgg

SEQ ID NO: 265079 - DNA, 25 bp, Artificial
  probe
  misc_feature (1)..(25): SEQ ID NO: 497; WAN0249GO; Start 63; Stop 87
tgagcttagtatagcacaaatagaa

SEQ ID NO: 265080 - DNA, 25 bp, Artificial
  probe
  misc_feature (1)..(25): SEQ ID NO: 497; WAN0249GO; Start 54; Stop 78
tttcctttatgagcttagtatagca

SEQ ID NO: 265081 - DNA, 25 bp, Artificial
  probe
  misc_feature (1)..(25): SEQ ID NO: 497; WAN0249GO; Start 62; Stop 86
atgagcttagtatagcacaaataga

SEQ ID NO: 265082 - DNA, 25 bp, Artificial
  probe
  misc_feature (1)..(25): SEQ ID NO: 497; WAN0249GO; Start 23; Stop 47
gcaagttttattgataaggaaacgc

SEQ ID NO: 265083 - DNA, 25 bp, Artificial
  probe
  misc_feature (1)..(25): SEQ ID NO: 497; WAN0249GO; Start 50; Stop 74
acgttttcctttatgagcttagtat

SEQ ID NO: 265084 - DNA, 25 bp, Artificial
  probe
  misc_feature (1)..(25): SEQ ID NO: 497; WAN0249GO; Start 24; Stop 48
caagttttattgataaggaaacgca

SEQ ID NO: 265085 - DNA, 25 bp, Artificial
  probe
  misc_feature (1)..(25): SEQ ID NO: 497; WAN0249GO; Start 58; Stop 82
ctttatgagcttagtatagcacaaa

SEQ ID NO: 265086 - DNA, 25 bp, Artificial
  probe
  misc_feature (1)..(25): SEQ ID NO: 497; WAN0249GO; Start 72; Stop 96
tatagcacaaatagaaaacggttgc

SEQ ID NO: 265087 - DNA, 25 bp, Artificial
  probe
  misc_feature (1)..(25): SEQ ID NO: 497; WAN0249GO; Start 22; Stop 46
agcaagttttattgataaggaaacg

SEQ ID NO: 265088 - DNA, 25 bp, Artificial
  probe
  misc_feature (1)..(25): SEQ ID NO: 497; WAN0249GO; Start 27; Stop 51
gttttattgataaggaaacgcaaac

SEQ ID NO: 265089 - DNA, 25 bp, Artificial
  probe
  misc_feature (1)..(25): SEQ ID NO: 497; WAN0249GO; Start 64; Stop 88
gagcttagtatagcacaaatagaaa

SEQ ID NO: 265090 - DNA, 25 bp, Artificial
  probe
  misc_feature (1)..(25): SEQ ID NO: 497; WAN0249GO; Start 26; Stop 50
agttttattgataaggaaacgcaaa

SEQ ID NO: 265091 - DNA, 25 bp, Artificial
  probe
  misc_feature (1)..(25): SEQ ID NO: 497; WAN0249GO; Start 25; Stop 49
aagttttattgataaggaaacgcaa

SEQ ID NO: 265092 - DNA, 25 bp, Artificial
  probe
  misc_feature (1)..(25): SEQ ID NO: 497; WAN0249GO; Start 67; Stop 91
cttagtatagcacaaatagaaaacg

SEQ ID NO: 265093 - DNA, 25 bp, Artificial
  probe
  misc_feature (1)..(25): SEQ ID NO: 497; WAN0249GO; Start 59; Stop 83
tttatgagcttagtatagcacaaat

SEQ ID NO: 265094 - DNA, 25 bp, Artificial
  probe
  misc_feature (1)..(25): SEQ ID NO: 497; WAN0249GO; Start 51; Stop 75
cgttttcctttatgagcttagtata

SEQ ID NO: 265095 - DNA, 25 bp, Artificial
  probe
  misc_feature (1)..(25): SEQ ID NO: 497; WAN0249GO; Start 61; Stop 85
tatgagcttagtatagcacaaatag

SEQ ID NO: 265096 - DNA, 25 bp, Artificial
  probe
  misc_feature (1)..(25): SEQ ID NO: 497; WAN0249GO; Start 73; Stop 97
atagcacaaatagaaaacggttgca

SEQ ID NO: 265097 - DNA, 25 bp, Artificial
  probe
  misc_feature (1)..(25): SEQ ID NO: 497; WAN0249GO; Start 60; Stop 84
ttatgagcttagtatagcacaaata

SEQ ID NO: 265098 - DNA, 25 bp, Artificial
  probe
  misc_feature (1)..(25): SEQ ID NO: 497; WAN0249GO; Start 78; Stop 102
acaaatagaaaacggttgcaagtat

SEQ ID NO: 265099 - DNA, 25 bp, Artificial
  probe
  misc_feature (1)..(25): SEQ ID NO: 497; WAN0249GO; Start 77; Stop 101
cacaaatagaaaacggttgcaagta

SEQ ID NO: 265100 - DNA, 25 bp, Artificial
  probe
  misc_feature (1)..(25): SEQ ID NO: 497; WAN0249GO; Start 18; Stop 42
gaatagcaagttttattgataagga

SEQ ID NO: 265101 - DNA, 25 bp, Artificial
  probe
  misc_feature (1)..(25): SEQ ID NO: 497; WAN0249GO; Start 17; Stop 41
agaatagcaagttttattgataagg

SEQ ID NO: 265102 - DNA, 25 bp, Artificial
  probe
  misc_feature (1)..(25): SEQ ID NO: 497; WAN0249GO; Start 66; Stop 90
gcttagtatagcacaaatagaaaac

SEQ ID NO: 265103 - DNA, 25 bp, Artificial
  probe
  misc_feature (1)..(25): SEQ ID NO: 498; WAN0249MM; Start 227; Stop 251
gaaattccaaagccgacagtatagt

SEQ ID NO: 265104 - DNA, 25 bp, Artificial
  probe
  misc_feature (1)..(25): SEQ ID NO: 498; WAN0249MM; Start 226; Stop 250
tgaaattccaaagccgacagtatag

SEQ ID NO: 265105 - DNA, 25 bp, Artificial
  probe
  misc_feature (1)..(25): SEQ ID NO: 498; WAN0249MM; Start 225; Stop 249
gtgaaattccaaagccgacagtata

SEQ ID NO: 265106 - DNA, 25 bp, Artificial
  probe
  misc_feature (1)..(25): SEQ ID NO: 498; WAN0249MM; Start 240; Stop 264
cgacagtatagtctggatgaaagaa

SEQ ID NO: 265107 - DNA, 25 bp, Artificial
  probe
  misc_feature (1)..(25): SEQ ID NO: 498; WAN0249MM; Start 236; Stop 260
aagccgacagtatagtctggatgaa

SEQ ID NO: 265108 - DNA, 25 bp, Artificial
  probe
  misc_feature (1)..(25): SEQ ID NO: 498; WAN0249MM; Start 228; Stop 252
aaattccaaagccgacagtatagtc

SEQ ID NO: 265109 - DNA, 25 bp, Artificial
  probe
  misc_feature (1)..(25): SEQ ID NO: 498; WAN0249MM; Start 242; Stop 266
acagtatagtctggatgaaagaaga

SEQ ID NO: 265110 - DNA, 25 bp, Artificial
  probe
  misc_feature (1)..(25): SEQ ID NO: 498; WAN0249MM; Start 239; Stop 263
ccgacagtatagtctggatgaaaga

SEQ ID NO: 265111 - DNA, 25 bp, Artificial
  probe
  misc_feature (1)..(25): SEQ ID NO: 498; WAN0249MM; Start 241; Stop 265
gacagtatagtctggatgaaagaag

SEQ ID NO: 265112 - DNA, 25 bp, Artificial
  probe
  misc_feature (1)..(25): SEQ ID NO: 498; WAN0249MM; Start 6; Stop 30
tccttctctcttatttcgtttatct

SEQ ID NO: 265113 - DNA, 25 bp, Artificial
  probe
  misc_feature (1)..(25): SEQ ID NO: 498; WAN0249MM; Start 229; Stop 253
aattccaaagccgacagtatagtct

SEQ ID NO: 265114 - DNA, 25 bp, Artificial
  probe
  misc_feature (1)..(25): SEQ ID NO: 498; WAN0249MM; Start 153; Stop 177
gaataactatcttcagggcagggtg

SEQ ID NO: 265115 - DNA, 25 bp, Artificial
  probe
  misc_feature (1)..(25): SEQ ID NO: 498; WAN0249MM; Start 210; Stop 234
gaaaggcatgatttggtgaaattcc

SEQ ID NO: 265116 - DNA, 25 bp, Artificial
  probe
  misc_feature (1)..(25): SEQ ID NO: 498; WAN0249MM; Start 209; Stop 233
cgaaaggcatgatttggtgaaattc

SEQ ID NO: 265117 - DNA, 25 bp, Artificial
  probe
  misc_feature (1)..(25): SEQ ID NO: 498; WAN0249MM; Start 243; Stop 267
cagtatagtctggatgaaagaagat

SEQ ID NO: 265118 - DNA, 25 bp, Artificial
  probe
  misc_feature (1)..(25): SEQ ID NO: 498; WAN0249MM; Start 230; Stop 254
attccaaagccgacagtatagtctg

SEQ ID NO: 265119 - DNA, 25 bp, Artificial
  probe
  misc_feature (1)..(25): SEQ ID NO: 498; WAN0249MM; Start 5; Stop 29
ttccttctctcttatttcgtttatc

SEQ ID NO: 265120 - DNA, 25 bp, Artificial
  probe
  misc_feature (1)..(25): SEQ ID NO: 498; WAN0249MM; Start 238; Stop 262
gccgacagtatagtctggatgaaag

SEQ ID NO: 265121 - DNA, 25 bp, Artificial
  probe
  misc_feature (1)..(25): SEQ ID NO: 498; WAN0249MM; Start 211; Stop 235
aaaggcatgatttggtgaaattcca

SEQ ID NO: 265122 - DNA, 25 bp, Artificial
  probe
  misc_feature (1)..(25): SEQ ID NO: 498; WAN0249MM; Start 39; Stop 63
atattttctttatccgaggagcgag

SEQ ID NO: 265123 - DNA, 25 bp, Artificial
  probe
  misc_feature (1)..(25): SEQ ID NO: 498; WAN0249MM; Start 150; Stop 174
attgaataactatcttcagggcagg

SEQ ID NO: 265124 - DNA, 25 bp, Artificial
  probe
  misc_feature (1)..(25): SEQ ID NO: 498; WAN0249MM; Start 38; Stop 62
catattttctttatccgaggagcga

SEQ ID NO: 265125 - DNA, 25 bp, Artificial
  probe
  misc_feature (1)..(25): SEQ ID NO: 498; WAN0249MM; Start 37; Stop 61
tcatattttctttatccgaggagcg

SEQ ID NO: 265126 - DNA, 25 bp, Artificial
  probe
  misc_feature (1)..(25): SEQ ID NO: 498; WAN0249MM; Start 224; Stop 248
ggtgaaattccaaagccgacagtat

SEQ ID NO: 265127 - DNA, 25 bp, Artificial
  probe
  misc_feature (1)..(25): SEQ ID NO: 498; WAN0249MM; Start 237; Stop 261
agccgacagtatagtctggatgaaa

SEQ ID NO: 265128 - DNA, 25 bp, Artificial
  probe
  misc_feature (1)..(25): SEQ ID NO: 498; WAN0249MM; Start 235; Stop 259
aaagccgacagtatagtctggatga

SEQ ID NO: 265129 - DNA, 25 bp, Artificial
  probe
  misc_feature (1)..(25): SEQ ID NO: 498; WAN0249MM; Start 234; Stop 258
caaagccgacagtatagtctggatg

SEQ ID NO: 265130 - DNA, 25 bp, Artificial
  probe
  misc_feature (1)..(25): SEQ ID NO: 498; WAN0249MM; Start 36; Stop 60
atcatattttctttatccgaggagc

SEQ ID NO: 265131 - DNA, 25 bp, Artificial
  probe
  misc_feature (1)..(25): SEQ ID NO: 498; WAN0249MM; Start 149; Stop 173
aattgaataactatcttcagggcag

SEQ ID NO: 265132 - DNA, 25 bp, Artificial
  probe
  misc_feature (1)..(25): SEQ ID NO: 498; WAN0249MM; Start 208; Stop 232
ccgaaaggcatgatttggtgaaatt

SEQ ID NO: 265133 - DNA, 25 bp, Artificial
  probe
  misc_feature (1)..(25): SEQ ID NO: 498; WAN0249MM; Start 40; Stop 64
tattttctttatccgaggagcgaga

SEQ ID NO: 265134 - DNA, 25 bp, Artificial
  probe
  misc_feature (1)..(25): SEQ ID NO: 498; WAN0249MM; Start 244; Stop 268
agtatagtctggatgaaagaagata

SEQ ID NO: 265135 - DNA, 25 bp, Artificial
  probe
  misc_feature (1)..(25): SEQ ID NO: 498; WAN0249MM; Start 43; Stop 67
tttctttatccgaggagcgagaatc

SEQ ID NO: 265136 - DNA, 25 bp, Artificial
  probe
  misc_feature (1)..(25): SEQ ID NO: 499; WAN024FGJ; Start 499; Stop 523
ggaattgacctaccagatgaatcta

SEQ ID NO: 265137 - DNA, 25 bp, Artificial
  probe
  misc_feature (1)..(25): SEQ ID NO: 499; WAN024FGJ; Start 1041; Stop 1065
atataaccaacaccatccaatgaat

SEQ ID NO: 265138 - DNA, 25 bp, Artificial
  probe
  misc_feature (1)..(25): SEQ ID NO: 499; WAN024FGJ; Start 501; Stop 525
aattgacctaccagatgaatctact

SEQ ID NO: 265139 - DNA, 25 bp, Artificial
  probe
  misc_feature (1)..(25): SEQ ID NO: 499; WAN024FGJ; Start 500; Stop 524
gaattgacctaccagatgaatctac

SEQ ID NO: 265140 - DNA, 25 bp, Artificial
  probe
  misc_feature (1)..(25): SEQ ID NO: 499; WAN024FGJ; Start 497; Stop 521
caggaattgacctaccagatgaatc

SEQ ID NO: 265141 - DNA, 25 bp, Artificial
  probe
  misc_feature (1)..(25): SEQ ID NO: 499; WAN024FGJ; Start 344; Stop 368
aggagtattcatccaatgcttacat

SEQ ID NO: 265142 - DNA, 25 bp, Artificial
  probe
  misc_feature (1)..(25): SEQ ID NO: 499; WAN024FGJ; Start 341; Stop 365
ctgaggagtattcatccaatgctta

SEQ ID NO: 265143 - DNA, 25 bp, Artificial
  probe
  misc_feature (1)..(25): SEQ ID NO: 499; WAN024FGJ; Start 904; Stop 928
caagaagctaataataccaatgccg

SEQ ID NO: 265144 - DNA, 25 bp, Artificial
  probe
  misc_feature (1)..(25): SEQ ID NO: 499; WAN024FGJ; Start 343; Stop 367
gaggagtattcatccaatgcttaca

SEQ ID NO: 265145 - DNA, 25 bp, Artificial
  probe
  misc_feature (1)..(25): SEQ ID NO: 499; WAN024FGJ; Start 342; Stop 366
tgaggagtattcatccaatgcttac

SEQ ID NO: 265146 - DNA, 25 bp, Artificial
  probe
  misc_feature (1)..(25): SEQ ID NO: 499; WAN024FGJ; Start 905; Stop 929
aagaagctaataataccaatgccgt

SEQ ID NO: 265147 - DNA, 25 bp, Artificial
  probe
  misc_feature (1)..(25): SEQ ID NO: 499; WAN024FGJ; Start 903; Stop 927
tcaagaagctaataataccaatgcc

SEQ ID NO: 265148 - DNA, 25 bp, Artificial
  probe
  misc_feature (1)..(25): SEQ ID NO: 499; WAN024FGJ; Start 896; Stop 920
ctggtggtcaagaagctaataatac

SEQ ID NO: 265149 - DNA, 25 bp, Artificial
  probe
  misc_feature (1)..(25): SEQ ID NO: 499; WAN024FGJ; Start 498; Stop 522
aggaattgacctaccagatgaatct

SEQ ID NO: 265150 - DNA, 25 bp, Artificial
  probe
  misc_feature (1)..(25): SEQ ID NO: 499; WAN024FGJ; Start 1040; Stop 1064
tatataaccaacaccatccaatgaa

SEQ ID NO: 265151 - DNA, 25 bp, Artificial
  probe
  misc_feature (1)..(25): SEQ ID NO: 499; WAN024FGJ; Start 496; Stop 520
acaggaattgacctaccagatgaat

SEQ ID NO: 265152 - DNA, 25 bp, Artificial
  probe
  misc_feature (1)..(25): SEQ ID NO: 499; WAN024FGJ; Start 906; Stop 930
agaagctaataataccaatgccgtg

SEQ ID NO: 265153 - DNA, 25 bp, Artificial
  probe
  misc_feature (1)..(25): SEQ ID NO: 499; WAN024FGJ; Start 681; Stop 705
taataatgataagggaggactgggt

SEQ ID NO: 265154 - DNA, 25 bp, Artificial
  probe
  misc_feature (1)..(25): SEQ ID NO: 499; WAN024FGJ; Start 680; Stop 704
gtaataatgataagggaggactggg

SEQ ID NO: 265155 - DNA, 25 bp, Artificial
  probe
  misc_feature (1)..(25): SEQ ID NO: 499; WAN024FGJ; Start 679; Stop 703
ggtaataatgataagggaggactgg

SEQ ID NO: 265156 - DNA, 25 bp, Artificial
  probe
  misc_feature (1)..(25): SEQ ID NO: 499; WAN024FGJ; Start 967; Stop 991
gcagtagtctttcctcataatacca

SEQ ID NO: 265157 - DNA, 25 bp, Artificial
  probe
  misc_feature (1)..(25): SEQ ID NO: 499; WAN024FGJ; Start 658; Stop 682
cgtattgttgaaggcatttatggta

SEQ ID NO: 265158 - DNA, 25 bp, Artificial
  probe
  misc_feature (1)..(25): SEQ ID NO: 499; WAN024FGJ; Start 345; Stop 369
ggagtattcatccaatgcttacatg

SEQ ID NO: 265159 - DNA, 25 bp, Artificial
  probe
  misc_feature (1)..(25): SEQ ID NO: 499; WAN024FGJ; Start 656; Stop 680
ctcgtattgttgaaggcatttatgg

SEQ ID NO: 265160 - DNA, 25 bp, Artificial
  probe
  misc_feature (1)..(25): SEQ ID NO: 499; WAN024FGJ; Start 678; Stop 702
tggtaataatgataagggaggactg

SEQ ID NO: 265161 - DNA, 25 bp, Artificial
  probe
  misc_feature (1)..(25): SEQ ID NO: 499; WAN024FGJ; Start 902; Stop 926
gtcaagaagctaataataccaatgc

SEQ ID NO: 265162 - DNA, 25 bp, Artificial
  probe
  misc_feature (1)..(25): SEQ ID NO: 499; WAN024FGJ; Start 348; Stop 372
gtattcatccaatgcttacatggtc

SEQ ID NO: 265163 - DNA, 25 bp, Artificial
  probe
  misc_feature (1)..(25): SEQ ID NO: 499; WAN024FGJ; Start 346; Stop 370
gagtattcatccaatgcttacatgg

SEQ ID NO: 265164 - DNA, 25 bp, Artificial
  probe
  misc_feature (1)..(25): SEQ ID NO: 499; WAN024FGJ; Start 219; Stop 243
gaatggagtcttatcaggaaatcag

SEQ ID NO: 265165 - DNA, 25 bp, Artificial
  probe
  misc_feature (1)..(25): SEQ ID NO: 499; WAN024FGJ; Start 347; Stop 371
agtattcatccaatgcttacatggt

SEQ ID NO: 265166 - DNA, 25 bp, Artificial
  probe
  misc_feature (1)..(25): SEQ ID NO: 499; WAN024FGJ; Start 657; Stop 681
tcgtattgttgaaggcatttatggt

SEQ ID NO: 265167 - DNA, 25 bp, Artificial
  probe
  misc_feature (1)..(25): SEQ ID NO: 499; WAN024FGJ; Start 495; Stop 519
gacaggaattgacctaccagatgaa

SEQ ID NO: 265168 - DNA, 25 bp, Artificial
  probe
  misc_feature (1)..(25): SEQ ID NO: 499; WAN024FGJ; Start 216; Stop 240
ggagaatggagtcttatcaggaaat

SEQ ID NO: 265169 - DNA, 25 bp, Artificial
  probe
  misc_feature (1)..(25): SEQ ID NO: 500; WAN024AEF; Start 56; Stop 80
ttagtgacttgtagattttcatctt

SEQ ID NO: 265170 - DNA, 25 bp, Artificial
  probe
  misc_feature (1)..(25): SEQ ID NO: 500; WAN024AEF; Start 54; Stop 78
aattagtgacttgtagattttcatc

SEQ ID NO: 265171 - DNA, 25 bp, Artificial
  probe
  misc_feature (1)..(25): SEQ ID NO: 500; WAN024AEF; Start 58; Stop 82
agtgacttgtagattttcatcttat

SEQ ID NO: 265172 - DNA, 25 bp, Artificial
  probe
  misc_feature (1)..(25): SEQ ID NO: 500; WAN024AEF; Start 55; Stop 79
attagtgacttgtagattttcatct

SEQ ID NO: 265173 - DNA, 25 bp, Artificial
  probe
  misc_feature (1)..(25): SEQ ID NO: 500; WAN024AEF; Start 62; Stop 86
acttgtagattttcatcttatacca

SEQ ID NO: 265174 - DNA, 25 bp, Artificial
  probe
  misc_feature (1)..(25): SEQ ID NO: 500; WAN024AEF; Start 57; Stop 81
tagtgacttgtagattttcatctta

SEQ ID NO: 265175 - DNA, 25 bp, Artificial
  probe
  misc_feature (1)..(25): SEQ ID NO: 500; WAN024AEF; Start 61; Stop 85
gacttgtagattttcatcttatacc

SEQ ID NO: 265176 - DNA, 25 bp, Artificial
  probe
  misc_feature (1)..(25): SEQ ID NO: 500; WAN024AEF; Start 52; Stop 76
aaaattagtgacttgtagattttca

SEQ ID NO: 265177 - DNA, 25 bp, Artificial
  probe
  misc_feature (1)..(25): SEQ ID NO: 500; WAN024AEF; Start 50; Stop 74
tgaaaattagtgacttgtagatttt

SEQ ID NO: 265178 - DNA, 25 bp, Artificial
  probe
  misc_feature (1)..(25): SEQ ID NO: 501; WAN024AC9; Start 185; Stop 209
gaactcctacatccataagtgacat

SEQ ID NO: 265179 - DNA, 25 bp, Artificial
  probe
  misc_feature (1)..(25): SEQ ID NO: 501; WAN024AC9; Start 183; Stop 207
aagaactcctacatccataagtgac

SEQ ID NO: 265180 - DNA, 25 bp, Artificial
  probe
  misc_feature (1)..(25): SEQ ID NO: 501; WAN024AC9; Start 184; Stop 208
agaactcctacatccataagtgaca

SEQ ID NO: 265181 - DNA, 25 bp, Artificial
  probe
  misc_feature (1)..(25): SEQ ID NO: 501; WAN024AC9; Start 187; Stop 211
actcctacatccataagtgacatag

SEQ ID NO: 265182 - DNA, 25 bp, Artificial
  probe
  misc_feature (1)..(25): SEQ ID NO: 501; WAN024AC9; Start 186; Stop 210
aactcctacatccataagtgacata

SEQ ID NO: 265183 - DNA, 25 bp, Artificial
  probe
  misc_feature (1)..(25): SEQ ID NO: 501; WAN024AC9; Start 191; Stop 215
ctacatccataagtgacataggagt

SEQ ID NO: 265184 - DNA, 25 bp, Artificial
  probe
  misc_feature (1)..(25): SEQ ID NO: 501; WAN024AC9; Start 192; Stop 216
tacatccataagtgacataggagtt

SEQ ID NO: 265185 - DNA, 25 bp, Artificial
  probe
  misc_feature (1)..(25): SEQ ID NO: 501; WAN024AC9; Start 198; Stop 222
cataagtgacataggagtttaggct

SEQ ID NO: 265186 - DNA, 25 bp, Artificial
  probe
  misc_feature (1)..(25): SEQ ID NO: 501; WAN024AC9; Start 203; Stop 227
gtgacataggagtttaggcttatct

SEQ ID NO: 265187 - DNA, 25 bp, Artificial
  probe
  misc_feature (1)..(25): SEQ ID NO: 501; WAN024AC9; Start 202; Stop 226
agtgacataggagtttaggcttatc

SEQ ID NO: 265188 - DNA, 25 bp, Artificial
  probe
  misc_feature (1)..(25): SEQ ID NO: 501; WAN024AC9; Start 197; Stop 221
ccataagtgacataggagtttaggc

SEQ ID NO: 265189 - DNA, 25 bp, Artificial
  probe
  misc_feature (1)..(25): SEQ ID NO: 501; WAN024AC9; Start 204; Stop 228
tgacataggagtttaggcttatctt

SEQ ID NO: 265190 - DNA, 25 bp, Artificial
  probe
  misc_feature (1)..(25): SEQ ID NO: 501; WAN024AC9; Start 201; Stop 225
aagtgacataggagtttaggcttat

SEQ ID NO: 265191 - DNA, 25 bp, Artificial
  probe
  misc_feature (1)..(25): SEQ ID NO: 501; WAN024AC9; Start 199; Stop 223
ataagtgacataggagtttaggctt

SEQ ID NO: 265192 - DNA, 25 bp, Artificial
  probe
  misc_feature (1)..(25): SEQ ID NO: 501; WAN024AC9; Start 182; Stop 206
aaagaactcctacatccataagtga

SEQ ID NO: 265193 - DNA, 25 bp, Artificial
  probe
  misc_feature (1)..(25): SEQ ID NO: 501; WAN024AC9; Start 85; Stop 109
ctcaaagtaacttccatctctctcc

SEQ ID NO: 265194 - DNA, 25 bp, Artificial
  probe
  misc_feature (1)..(25): SEQ ID NO: 501; WAN024AC9; Start 84; Stop 108
tctcaaagtaacttccatctctctc

SEQ ID NO: 265195 - DNA, 25 bp, Artificial
  probe
  misc_feature (1)..(25): SEQ ID NO: 501; WAN024AC9; Start 83; Stop 107
ttctcaaagtaacttccatctctct

SEQ ID NO: 265196 - DNA, 25 bp, Artificial
  probe
  misc_feature (1)..(25): SEQ ID NO: 501; WAN024AC9; Start 82; Stop 106
cttctcaaagtaacttccatctctc

SEQ ID NO: 265197 - DNA, 25 bp, Artificial
  probe
  misc_feature (1)..(25): SEQ ID NO: 501; WAN024AC9; Start 190; Stop 214
cctacatccataagtgacataggag

SEQ ID NO: 265198 - DNA, 25 bp, Artificial
  probe
  misc_feature (1)..(25): SEQ ID NO: 501; WAN024AC9; Start 188; Stop 212
ctcctacatccataagtgacatagg

SEQ ID NO: 265199 - DNA, 25 bp, Artificial
  probe
  misc_feature (1)..(25): SEQ ID NO: 501; WAN024AC9; Start 200; Stop 224
taagtgacataggagtttaggctta

SEQ ID NO: 265200 - DNA, 25 bp, Artificial
  probe
  misc_feature (1)..(25): SEQ ID NO: 501; WAN024AC9; Start 193; Stop 217
acatccataagtgacataggagttt

SEQ ID NO: 265201 - DNA, 25 bp, Artificial
  probe
  misc_feature (1)..(25): SEQ ID NO: 501; WAN024AC9; Start 196; Stop 220
tccataagtgacataggagtttagg

SEQ ID NO: 265202 - DNA, 25 bp, Artificial
  probe
  misc_feature (1)..(25): SEQ ID NO: 501; WAN024AC9; Start 194; Stop 218
catccataagtgacataggagttta

SEQ ID NO: 265203 - DNA, 25 bp, Artificial
  probe
  misc_feature (1)..(25): SEQ ID NO: 501; WAN024AC9; Start 195; Stop 219
atccataagtgacataggagtttag

SEQ ID NO: 265204 - DNA, 25 bp, Artificial
  probe
  misc_feature (1)..(25): SEQ ID NO: 501; WAN024AC9; Start 115; Stop 139
ctggaagttagttttagaagttgct

SEQ ID NO: 265205 - DNA, 25 bp, Artificial
  probe
  misc_feature (1)..(25): SEQ ID NO: 501; WAN024AC9; Start 81; Stop 105
acttctcaaagtaacttccatctct

SEQ ID NO: 265206 - DNA, 25 bp, Artificial
  probe
  misc_feature (1)..(25): SEQ ID NO: 501; WAN024AC9; Start 76; Stop 100
ccgtaacttctcaaagtaacttcca

SEQ ID NO: 265207 - DNA, 25 bp, Artificial
  probe
  misc_feature (1)..(25): SEQ ID NO: 501; WAN024AC9; Start 75; Stop 99
accgtaacttctcaaagtaacttcc

SEQ ID NO: 265208 - DNA, 25 bp, Artificial
  probe
  misc_feature (1)..(25): SEQ ID NO: 501; WAN024AC9; Start 77; Stop 101
cgtaacttctcaaagtaacttccat

SEQ ID NO: 265209 - DNA, 25 bp, Artificial
  probe
  misc_feature (1)..(25): SEQ ID NO: 501; WAN024AC9; Start 114; Stop 138
actggaagttagttttagaagttgc

SEQ ID NO: 265210 - DNA, 25 bp, Artificial
  probe
  misc_feature (1)..(25): SEQ ID NO: 501; WAN024AC9; Start 80; Stop 104
aacttctcaaagtaacttccatctc

SEQ ID NO: 265211 - DNA, 25 bp, Artificial
  probe
  misc_feature (1)..(25): SEQ ID NO: 502; WAN0249LR; Start 88; Stop 112
agcagagttacaacacattactaga

SEQ ID NO: 265212 - DNA, 25 bp, Artificial
  probe
  misc_feature (1)..(25): SEQ ID NO: 502; WAN0249LR; Start 89; Stop 113
gcagagttacaacacattactagaa

SEQ ID NO: 265213 - DNA, 25 bp, Artificial
  probe
  misc_feature (1)..(25): SEQ ID NO: 502; WAN0249LR; Start 87; Stop 111
tagcagagttacaacacattactag

SEQ ID NO: 265214 - DNA, 25 bp, Artificial
  probe
  misc_feature (1)..(25): SEQ ID NO: 502; WAN0249LR; Start 86; Stop 110
atagcagagttacaacacattacta

SEQ ID NO: 265215 - DNA, 25 bp, Artificial
  probe
  misc_feature (1)..(25): SEQ ID NO: 502; WAN0249LR; Start 85; Stop 109
tatagcagagttacaacacattact

SEQ ID NO: 265216 - DNA, 25 bp, Artificial
  probe
  misc_feature (1)..(25): SEQ ID NO: 502; WAN0249LR; Start 80; Stop 104
tctattatagcagagttacaacaca

SEQ ID NO: 265217 - DNA, 25 bp, Artificial
  probe
  misc_feature (1)..(25): SEQ ID NO: 502; WAN0249LR; Start 84; Stop 108
ttatagcagagttacaacacattac

SEQ ID NO: 265218 - DNA, 25 bp, Artificial
  probe
  misc_feature (1)..(25): SEQ ID NO: 502; WAN0249LR; Start 288; Stop 312
ttccacatagcatcaatcatttagt

SEQ ID NO: 265219 - DNA, 25 bp, Artificial
  probe
  misc_feature (1)..(25): SEQ ID NO: 502; WAN0249LR; Start 289; Stop 313
tccacatagcatcaatcatttagta

SEQ ID NO: 265220 - DNA, 25 bp, Artificial
  probe
  misc_feature (1)..(25): SEQ ID NO: 502; WAN0249LR; Start 284; Stop 308
gtatttccacatagcatcaatcatt

SEQ ID NO: 265221 - DNA, 25 bp, Artificial
  probe
  misc_feature (1)..(25): SEQ ID NO: 502; WAN0249LR; Start 282; Stop 306
ttgtatttccacatagcatcaatca

SEQ ID NO: 265222 - DNA, 25 bp, Artificial
  probe
  misc_feature (1)..(25): SEQ ID NO: 502; WAN0249LR; Start 81; Stop 105
ctattatagcagagttacaacacat

SEQ ID NO: 265223 - DNA, 25 bp, Artificial
  probe
  misc_feature (1)..(25): SEQ ID NO: 502; WAN0249LR; Start 287; Stop 311
tttccacatagcatcaatcatttag

SEQ ID NO: 265224 - DNA, 25 bp, Artificial
  probe
  misc_feature (1)..(25): SEQ ID NO: 502; WAN0249LR; Start 283; Stop 307
tgtatttccacatagcatcaatcat

SEQ ID NO: 265225 - DNA, 25 bp, Artificial
  probe
  misc_feature (1)..(25): SEQ ID NO: 502; WAN0249LR; Start 248; Stop 272
aaatacaggtcaacttcgtatcaaa

SEQ ID NO: 265226 - DNA, 25 bp, Artificial
  probe
  misc_feature (1)..(25): SEQ ID NO: 502; WAN0249LR; Start 290; Stop 314
ccacatagcatcaatcatttagtac

SEQ ID NO: 265227 - DNA, 25 bp, Artificial
  probe
  misc_feature (1)..(25): SEQ ID NO: 502; WAN0249LR; Start 83; Stop 107
attatagcagagttacaacacatta

SEQ ID NO: 265228 - DNA, 25 bp, Artificial
  probe
  misc_feature (1)..(25): SEQ ID NO: 502; WAN0249LR; Start 82; Stop 106
tattatagcagagttacaacacatt

SEQ ID NO: 265229 - DNA, 25 bp, Artificial
  probe
  misc_feature (1)..(25): SEQ ID NO: 502; WAN0249LR; Start 79; Stop 103
atctattatagcagagttacaacac

SEQ ID NO: 265230 - DNA, 25 bp, Artificial
  probe
  misc_feature (1)..(25): SEQ ID NO: 502; WAN0249LR; Start 281; Stop 305
tttgtatttccacatagcatcaatc

SEQ ID NO: 265231 - DNA, 25 bp, Artificial
  probe
  misc_feature (1)..(25): SEQ ID NO: 502; WAN0249LR; Start 286; Stop 310
atttccacatagcatcaatcattta

SEQ ID NO: 265232 - DNA, 25 bp, Artificial
  probe
  misc_feature (1)..(25): SEQ ID NO: 502; WAN0249LR; Start 285; Stop 309
tatttccacatagcatcaatcattt

SEQ ID NO: 265233 - DNA, 25 bp, Artificial
  probe
  misc_feature (1)..(25): SEQ ID NO: 502; WAN0249LR; Start 291; Stop 315
cacatagcatcaatcatttagtaca

SEQ ID NO: 265234 - DNA, 25 bp, Artificial
  probe
  misc_feature (1)..(25): SEQ ID NO: 502; WAN0249LR; Start 94; Stop 118
gttacaacacattactagaaagaga

SEQ ID NO: 265235 - DNA, 25 bp, Artificial
  probe
  misc_feature (1)..(25): SEQ ID NO: 502; WAN0249LR; Start 78; Stop 102
aatctattatagcagagttacaaca

SEQ ID NO: 265236 - DNA, 25 bp, Artificial
  probe
  misc_feature (1)..(25): SEQ ID NO: 502; WAN0249LR; Start 90; Stop 114
cagagttacaacacattactagaaa

SEQ ID NO: 265237 - DNA, 25 bp, Artificial
  probe
  misc_feature (1)..(25): SEQ ID NO: 502; WAN0249LR; Start 292; Stop 316
acatagcatcaatcatttagtacaa

SEQ ID NO: 265238 - DNA, 25 bp, Artificial
  probe
  misc_feature (1)..(25): SEQ ID NO: 502; WAN0249LR; Start 97; Stop 121
acaacacattactagaaagagattt

SEQ ID NO: 265239 - DNA, 25 bp, Artificial
  probe
  misc_feature (1)..(25): SEQ ID NO: 502; WAN0249LR; Start 93; Stop 117
agttacaacacattactagaaagag

SEQ ID NO: 265240 - DNA, 25 bp, Artificial
  probe
  misc_feature (1)..(25): SEQ ID NO: 502; WAN0249LR; Start 92; Stop 116
gagttacaacacattactagaaaga

SEQ ID NO: 265241 - DNA, 25 bp, Artificial
  probe
  misc_feature (1)..(25): SEQ ID NO: 502; WAN0249LR; Start 91; Stop 115
agagttacaacacattactagaaag

SEQ ID NO: 265242 - DNA, 25 bp, Artificial
  probe
  misc_feature (1)..(25): SEQ ID NO: 502; WAN0249LR; Start 249; Stop 273
aatacaggtcaacttcgtatcaaaa

SEQ ID NO: 265243 - DNA, 25 bp, Artificial
  probe
  misc_feature (1)..(25): SEQ ID NO: 502; WAN0249LR; Start 247; Stop 271
aaaatacaggtcaacttcgtatcaa

SEQ ID NO: 265244 - DNA, 25 bp, Artificial
  probe
  misc_feature (1)..(25): SEQ ID NO: 503; WAN0249WQ; Start 123; Stop 147
atggtaggaagaattggagagtaga

SEQ ID NO: 265245 - DNA, 25 bp, Artificial
  probe
  misc_feature (1)..(25): SEQ ID NO: 503; WAN0249WQ; Start 122; Stop 146
aatggtaggaagaattggagagtag

SEQ ID NO: 265246 - DNA, 25 bp, Artificial
  probe
  misc_feature (1)..(25): SEQ ID NO: 503; WAN0249WQ; Start 124; Stop 148
tggtaggaagaattggagagtagag

SEQ ID NO: 265247 - DNA, 25 bp, Artificial
  probe
  misc_feature (1)..(25): SEQ ID NO: 503; WAN0249WQ; Start 121; Stop 145
aaatggtaggaagaattggagagta

SEQ ID NO: 265248 - DNA, 25 bp, Artificial
  probe
  misc_feature (1)..(25): SEQ ID NO: 503; WAN0249WQ; Start 120; Stop 144
aaaatggtaggaagaattggagagt

SEQ ID NO: 265249 - DNA, 25 bp, Artificial
  probe
  misc_feature (1)..(25): SEQ ID NO: 503; WAN0249WQ; Start 119; Stop 143
taaaatggtaggaagaattggagag

SEQ ID NO: 265250 - DNA, 25 bp, Artificial
  probe
  misc_feature (1)..(25): SEQ ID NO: 503; WAN0249WQ; Start 116; Stop 140
tgataaaatggtaggaagaattgga

SEQ ID NO: 265251 - DNA, 25 bp, Artificial
  probe
  misc_feature (1)..(25): SEQ ID NO: 503; WAN0249WQ; Start 115; Stop 139
gtgataaaatggtaggaagaattgg

SEQ ID NO: 265252 - DNA, 25 bp, Artificial
  probe
  misc_feature (1)..(25): SEQ ID NO: 503; WAN0249WQ; Start 74; Stop 98
ttcttattctgttccaatctagttt

SEQ ID NO: 265253 - DNA, 25 bp, Artificial
  probe
  misc_feature (1)..(25): SEQ ID NO: 503; WAN0249WQ; Start 73; Stop 97
tttcttattctgttccaatctagtt

SEQ ID NO: 265254 - DNA, 25 bp, Artificial
  probe
  misc_feature (1)..(25): SEQ ID NO: 503; WAN0249WQ; Start 118; Stop 142
ataaaatggtaggaagaattggaga

SEQ ID NO: 265255 - DNA, 25 bp, Artificial
  probe
  misc_feature (1)..(25): SEQ ID NO: 503; WAN0249WQ; Start 117; Stop 141
gataaaatggtaggaagaattggag

SEQ ID NO: 265256 - DNA, 25 bp, Artificial
  probe
  misc_feature (1)..(25): SEQ ID NO: 503; WAN0249WQ; Start 114; Stop 138
agtgataaaatggtaggaagaattg

SEQ ID NO: 265257 - DNA, 25 bp, Artificial
  probe
  misc_feature (1)..(25): SEQ ID NO: 503; WAN0249WQ; Start 111; Stop 135
aaaagtgataaaatggtaggaagaa

SEQ ID NO: 265258 - DNA, 25 bp, Artificial
  probe
  misc_feature (1)..(25): SEQ ID NO: 503; WAN0249WQ; Start 112; Stop 136
aaagtgataaaatggtaggaagaat

SEQ ID NO: 265259 - DNA, 25 bp, Artificial
  probe
  misc_feature (1)..(25): SEQ ID NO: 503; WAN0249WQ; Start 113; Stop 137
aagtgataaaatggtaggaagaatt

SEQ ID NO: 265260 - DNA, 25 bp, Artificial
  probe
  misc_feature (1)..(25): SEQ ID NO: 503; WAN0249WQ; Start 77; Stop 101
ttattctgttccaatctagttttca

SEQ ID NO: 265261 - DNA, 25 bp, Artificial
  probe
  misc_feature (1)..(25): SEQ ID NO: 503; WAN0249WQ; Start 83; Stop 107
tgttccaatctagttttcatattct

SEQ ID NO: 265262 - DNA, 25 bp, Artificial
  probe
  misc_feature (1)..(25): SEQ ID NO: 503; WAN0249WQ; Start 81; Stop 105
tctgttccaatctagttttcatatt

SEQ ID NO: 265263 - DNA, 25 bp, Artificial
  probe
  misc_feature (1)..(25): SEQ ID NO: 503; WAN0249WQ; Start 80; Stop 104
ttctgttccaatctagttttcatat

SEQ ID NO: 265264 - DNA, 25 bp, Artificial
  probe
  misc_feature (1)..(25): SEQ ID NO: 503; WAN0249WQ; Start 79; Stop 103
attctgttccaatctagttttcata

SEQ ID NO: 265265 - DNA, 25 bp, Artificial
  probe
  misc_feature (1)..(25): SEQ ID NO: 503; WAN0249WQ; Start 78; Stop 102
tattctgttccaatctagttttcat

SEQ ID NO: 265266 - DNA, 25 bp, Artificial
  probe
  misc_feature (1)..(25): SEQ ID NO: 503; WAN0249WQ; Start 82; Stop 106
ctgttccaatctagttttcatattc

SEQ ID NO: 265267 - DNA, 25 bp, Artificial
  probe
  misc_feature (1)..(25): SEQ ID NO: 503; WAN0249WQ; Start 75; Stop 99
tcttattctgttccaatctagtttt

SEQ ID NO: 265268 - DNA, 25 bp, Artificial
  probe
  misc_feature (1)..(25): SEQ ID NO: 503; WAN0249WQ; Start 72; Stop 96
ttttcttattctgttccaatctagt

SEQ ID NO: 265269 - DNA, 25 bp, Artificial
  probe
  misc_feature (1)..(25): SEQ ID NO: 503; WAN0249WQ; Start 76; Stop 100
cttattctgttccaatctagttttc

SEQ ID NO: 265270 - DNA, 25 bp, Artificial
  probe
  misc_feature (1)..(25): SEQ ID NO: 503; WAN0249WQ; Start 8; Stop 32
aatctaacttcgtagtatattacgg

SEQ ID NO: 265271 - DNA, 25 bp, Artificial
  probe
  misc_feature (1)..(25): SEQ ID NO: 503; WAN0249WQ; Start 84; Stop 108
gttccaatctagttttcatattctt

SEQ ID NO: 265272 - DNA, 25 bp, Artificial
  probe
  misc_feature (1)..(25): SEQ ID NO: 503; WAN0249WQ; Start 34; Stop 58
ccaataattcagaattatcaagcaa

SEQ ID NO: 265273 - DNA, 25 bp, Artificial
  probe
  misc_feature (1)..(25): SEQ ID NO: 503; WAN0249WQ; Start 41; Stop 65
ttcagaattatcaagcaattttgaa

SEQ ID NO: 265274 - DNA, 25 bp, Artificial
  probe
  misc_feature (1)..(25): SEQ ID NO: 503; WAN0249WQ; Start 42; Stop 66
tcagaattatcaagcaattttgaat

SEQ ID NO: 265275 - DNA, 25 bp, Artificial
  probe
  misc_feature (1)..(25): SEQ ID NO: 503; WAN0249WQ; Start 40; Stop 64
attcagaattatcaagcaattttga

SEQ ID NO: 265276 - DNA, 25 bp, Artificial
  probe
  misc_feature (1)..(25): SEQ ID NO: 503; WAN0249WQ; Start 39; Stop 63
aattcagaattatcaagcaattttg

SEQ ID NO: 265277 - DNA, 25 bp, Artificial
  probe
  misc_feature (1)..(25): SEQ ID NO: 503; WAN0249WQ; Start 43; Stop 67
cagaattatcaagcaattttgaatt

SEQ ID NO: 265278 - DNA, 25 bp, Artificial
  probe
  misc_feature (1)..(25): SEQ ID NO: 504; WAN0249H6; Start 46; Stop 70
aagtagatgggagattcagtagaaa

SEQ ID NO: 265279 - DNA, 25 bp, Artificial
  probe
  misc_feature (1)..(25): SEQ ID NO: 504; WAN0249H6; Start 47; Stop 71
agtagatgggagattcagtagaaat

SEQ ID NO: 265280 - DNA, 25 bp, Artificial
  probe
  misc_feature (1)..(25): SEQ ID NO: 504; WAN0249H6; Start 45; Stop 69
taagtagatgggagattcagtagaa

SEQ ID NO: 265281 - DNA, 25 bp, Artificial
  probe
  misc_feature (1)..(25): SEQ ID NO: 504; WAN0249H6; Start 44; Stop 68
ataagtagatgggagattcagtaga

SEQ ID NO: 265282 - DNA, 25 bp, Artificial
  probe
  misc_feature (1)..(25): SEQ ID NO: 504; WAN0249H6; Start 41; Stop 65
ggaataagtagatgggagattcagt

SEQ ID NO: 265283 - DNA, 25 bp, Artificial
  probe
  misc_feature (1)..(25): SEQ ID NO: 504; WAN0249H6; Start 40; Stop 64
aggaataagtagatgggagattcag

SEQ ID NO: 265284 - DNA, 25 bp, Artificial
  probe
  misc_feature (1)..(25): SEQ ID NO: 504; WAN0249H6; Start 43; Stop 67
aataagtagatgggagattcagtag

SEQ ID NO: 265285 - DNA, 25 bp, Artificial
  probe
  misc_feature (1)..(25): SEQ ID NO: 504; WAN0249H6; Start 50; Stop 74
agatgggagattcagtagaaataaa

SEQ ID NO: 265286 - DNA, 25 bp, Artificial
  probe
  misc_feature (1)..(25): SEQ ID NO: 504; WAN0249H6; Start 16; Stop 40
aaagaggcaaatgaaagcaacttta

SEQ ID NO: 265287 - DNA, 25 bp, Artificial
  probe
  misc_feature (1)..(25): SEQ ID NO: 504; WAN0249H6; Start 17; Stop 41
aagaggcaaatgaaagcaactttag

SEQ ID NO: 265288 - DNA, 25 bp, Artificial
  probe
  misc_feature (1)..(25): SEQ ID NO: 504; WAN0249H6; Start 48; Stop 72
gtagatgggagattcagtagaaata

SEQ ID NO: 265289 - DNA, 25 bp, Artificial
  probe
  misc_feature (1)..(25): SEQ ID NO: 504; WAN0249H6; Start 36; Stop 60
ctttaggaataagtagatgggagat

SEQ ID NO: 265290 - DNA, 25 bp, Artificial
  probe
  misc_feature (1)..(25): SEQ ID NO: 504; WAN0249H6; Start 21; Stop 45
ggcaaatgaaagcaactttaggaat

SEQ ID NO: 265291 - DNA, 25 bp, Artificial
  probe
  misc_feature (1)..(25): SEQ ID NO: 504; WAN0249H6; Start 39; Stop 63
taggaataagtagatgggagattca

SEQ ID NO: 265292 - DNA, 25 bp, Artificial
  probe
  misc_feature (1)..(25): SEQ ID NO: 504; WAN0249H6; Start 22; Stop 46
gcaaatgaaagcaactttaggaata

SEQ ID NO: 265293 - DNA, 25 bp, Artificial
  probe
  misc_feature (1)..(25): SEQ ID NO: 504; WAN0249H6; Start 20; Stop 44
aggcaaatgaaagcaactttaggaa

SEQ ID NO: 265294 - DNA, 25 bp, Artificial
  probe
  misc_feature (1)..(25): SEQ ID NO: 504; WAN0249H6; Start 37; Stop 61
tttaggaataagtagatgggagatt

SEQ ID NO: 265295 - DNA, 25 bp, Artificial
  probe
  misc_feature (1)..(25): SEQ ID NO: 504; WAN0249H6; Start 1; Stop 25
agtttaagtgtatcaaaagaggcaa

SEQ ID NO: 265296 - DNA, 25 bp, Artificial
  probe
  misc_feature (1)..(25): SEQ ID NO: 504; WAN0249H6; Start 19; Stop 43
gaggcaaatgaaagcaactttagga

SEQ ID NO: 265297 - DNA, 25 bp, Artificial
  probe
  misc_feature (1)..(25): SEQ ID NO: 504; WAN0249H6; Start 18; Stop 42
agaggcaaatgaaagcaactttagg

SEQ ID NO: 265298 - DNA, 25 bp, Artificial
  probe
  misc_feature (1)..(25): SEQ ID NO: 504; WAN0249H6; Start 49; Stop 73
tagatgggagattcagtagaaataa

SEQ ID NO: 265299 - DNA, 25 bp, Artificial
  probe
  misc_feature (1)..(25): SEQ ID NO: 504; WAN0249H6; Start 32; Stop 56
gcaactttaggaataagtagatggg

SEQ ID NO: 265300 - DNA, 25 bp, Artificial
  probe
  misc_feature (1)..(25): SEQ ID NO: 504; WAN0249H6; Start 11; Stop 35
tatcaaaagaggcaaatgaaagcaa

SEQ ID NO: 265301 - DNA, 25 bp, Artificial
  probe
  misc_feature (1)..(25): SEQ ID NO: 504; WAN0249H6; Start 10; Stop 34
gtatcaaaagaggcaaatgaaagca

SEQ ID NO: 265302 - DNA, 25 bp, Artificial
  probe
  misc_feature (1)..(25): SEQ ID NO: 504; WAN0249H6; Start 9; Stop 33
tgtatcaaaagaggcaaatgaaagc

SEQ ID NO: 265303 - DNA, 25 bp, Artificial
  probe
  misc_feature (1)..(25): SEQ ID NO: 504; WAN0249H6; Start 7; Stop 31
agtgtatcaaaagaggcaaatgaaa

SEQ ID NO: 265304 - DNA, 25 bp, Artificial
  probe
  misc_feature (1)..(25): SEQ ID NO: 504; WAN0249H6; Start 6; Stop 30
aagtgtatcaaaagaggcaaatgaa

SEQ ID NO: 265305 - DNA, 25 bp, Artificial
  probe
  misc_feature (1)..(25): SEQ ID NO: 504; WAN0249H6; Start 14; Stop 38
caaaagaggcaaatgaaagcaactt

SEQ ID NO: 265306 - DNA, 25 bp, Artificial
  probe
  misc_feature (1)..(25): SEQ ID NO: 504; WAN0249H6; Start 8; Stop 32
gtgtatcaaaagaggcaaatgaaag

SEQ ID NO: 265307 - DNA, 25 bp, Artificial
  probe
  misc_feature (1)..(25): SEQ ID NO: 504; WAN0249H6; Start 2; Stop 26
gtttaagtgtatcaaaagaggcaaa

SEQ ID NO: 265308 - DNA, 25 bp, Artificial
  probe
  misc_feature (1)..(25): SEQ ID NO: 504; WAN0249H6; Start 12; Stop 36
atcaaaagaggcaaatgaaagcaac

SEQ ID NO: 265309 - DNA, 25 bp, Artificial
  probe
  misc_feature (1)..(25): SEQ ID NO: 504; WAN0249H6; Start 5; Stop 29
taagtgtatcaaaagaggcaaatga

SEQ ID NO: 265310 - DNA, 25 bp, Artificial
  probe
  misc_feature (1)..(25): SEQ ID NO: 504; WAN0249H6; Start 4; Stop 28
ttaagtgtatcaaaagaggcaaatg

SEQ ID NO: 265311 - DNA, 25 bp, Artificial
  probe
  misc_feature (1)..(25): SEQ ID NO: 505; WAN0249F5; Start 108; Stop 132
ttgtaagcataatacttgcgaaact

SEQ ID NO: 265312 - DNA, 25 bp, Artificial
  probe
  misc_feature (1)..(25): SEQ ID NO: 505; WAN0249F5; Start 1; Stop 25
agtttcgcaagtattatgcttacaa

SEQ ID NO: 265313 - DNA, 25 bp, Artificial
  probe
  misc_feature (1)..(25): SEQ ID NO: 505; WAN0249F5; Start 107; Stop 131
tttgtaagcataatacttgcgaaac

SEQ ID NO: 265314 - DNA, 25 bp, Artificial
  probe
  misc_feature (1)..(25): SEQ ID NO: 505; WAN0249F5; Start 2; Stop 26
gtttcgcaagtattatgcttacaaa

SEQ ID NO: 265315 - DNA, 25 bp, Artificial
  probe
  misc_feature (1)..(25): SEQ ID NO: 505; WAN0249F5; Start 106; Stop 130
atttgtaagcataatacttgcgaaa

SEQ ID NO: 265316 - DNA, 25 bp, Artificial
  probe
  misc_feature (1)..(25): SEQ ID NO: 505; WAN0249F5; Start 105; Stop 129
aatttgtaagcataatacttgcgaa

SEQ ID NO: 265317 - DNA, 25 bp, Artificial
  probe
  misc_feature (1)..(25): SEQ ID NO: 505; WAN0249F5; Start 4; Stop 28
ttcgcaagtattatgcttacaaatt

SEQ ID NO: 265318 - DNA, 25 bp, Artificial
  probe
  misc_feature (1)..(25): SEQ ID NO: 505; WAN0249F5; Start 3; Stop 27
tttcgcaagtattatgcttacaaat

SEQ ID NO: 265319 - DNA, 25 bp, Artificial
  probe
  misc_feature (1)..(25): SEQ ID NO: 505; WAN0249F5; Start 103; Stop 127
gtaatttgtaagcataatacttgcg

SEQ ID NO: 265320 - DNA, 25 bp, Artificial
  probe
  misc_feature (1)..(25): SEQ ID NO: 505; WAN0249F5; Start 6; Stop 30
cgcaagtattatgcttacaaattac

SEQ ID NO: 265321 - DNA, 25 bp, Artificial
  probe
  misc_feature (1)..(25): SEQ ID NO: 505; WAN0249F5; Start 104; Stop 128
taatttgtaagcataatacttgcga

SEQ ID NO: 265322 - DNA, 25 bp, Artificial
  probe
  misc_feature (1)..(25): SEQ ID NO: 505; WAN0249F5; Start 5; Stop 29
tcgcaagtattatgcttacaaatta

SEQ ID NO: 265323 - DNA, 25 bp, Artificial
  probe
  misc_feature (1)..(25): SEQ ID NO: 505; WAN0249F5; Start 91; Stop 115
ttaattgctcaagtaatttgtaagc

SEQ ID NO: 265324 - DNA, 25 bp, Artificial
  probe
  misc_feature (1)..(25): SEQ ID NO: 505; WAN0249F5; Start 18; Stop 42
gcttacaaattacttgagcaattaa

SEQ ID NO: 265325 - DNA, 25 bp, Artificial
  probe
  misc_feature (1)..(25): SEQ ID NO: 505; WAN0249F5; Start 89; Stop 113
agttaattgctcaagtaatttgtaa

SEQ ID NO: 265326 - DNA, 25 bp, Artificial
  probe
  misc_feature (1)..(25): SEQ ID NO: 505; WAN0249F5; Start 87; Stop 111
ttagttaattgctcaagtaatttgt

SEQ ID NO: 265327 - DNA, 25 bp, Artificial
  probe
  misc_feature (1)..(25): SEQ ID NO: 505; WAN0249F5; Start 22; Stop 46
acaaattacttgagcaattaactaa

SEQ ID NO: 265328 - DNA, 25 bp, Artificial
  probe
  misc_feature (1)..(25): SEQ ID NO: 505; WAN0249F5; Start 20; Stop 44
ttacaaattacttgagcaattaact

SEQ ID NO: 265329 - DNA, 25 bp, Artificial
  probe
  misc_feature (1)..(25): SEQ ID NO: 505; WAN0249F5; Start 90; Stop 114
gttaattgctcaagtaatttgtaag

SEQ ID NO: 265330 - DNA, 25 bp, Artificial
  probe
  misc_feature (1)..(25): SEQ ID NO: 505; WAN0249F5; Start 19; Stop 43
cttacaaattacttgagcaattaac

SEQ ID NO: 265331 - DNA, 25 bp, Artificial
  probe
  misc_feature (1)..(25): SEQ ID NO: 505; WAN0249F5; Start 71; Stop 95
aggcagggtttatattttagttaat

SEQ ID NO: 265332 - DNA, 25 bp, Artificial
  probe
  misc_feature (1)..(25): SEQ ID NO: 505; WAN0249F5; Start 38; Stop 62
attaactaaaatataaaccctgcct

SEQ ID NO: 265333 - DNA, 25 bp, Artificial
  probe
  misc_feature (1)..(25): SEQ ID NO: 505; WAN0249F5; Start 97; Stop 121
gctcaagtaatttgtaagcataata

SEQ ID NO: 265334 - DNA, 25 bp, Artificial
  probe
  misc_feature (1)..(25): SEQ ID NO: 505; WAN0249F5; Start 12; Stop 36
tattatgcttacaaattacttgagc

SEQ ID NO: 265335 - DNA, 25 bp, Artificial
  probe
  misc_feature (1)..(25): SEQ ID NO: 505; WAN0249F5; Start 102; Stop 126
agtaatttgtaagcataatacttgc

SEQ ID NO: 265336 - DNA, 25 bp, Artificial
  probe
  misc_feature (1)..(25): SEQ ID NO: 505; WAN0249F5; Start 7; Stop 31
gcaagtattatgcttacaaattact

SEQ ID NO: 265337 - DNA, 25 bp, Artificial
  probe
  misc_feature (1)..(25): SEQ ID NO: 505; WAN0249F5; Start 72; Stop 96
ggcagggtttatattttagttaatt

SEQ ID NO: 265338 - DNA, 25 bp, Artificial
  probe
  misc_feature (1)..(25): SEQ ID NO: 505; WAN0249F5; Start 37; Stop 61
aattaactaaaatataaaccctgcc

SEQ ID NO: 265339 - DNA, 25 bp, Artificial
  probe
  misc_feature (1)..(25): SEQ ID NO: 506; WAN024APR; Start 52; Stop 76
agcgaattttggtataatatcgtga

SEQ ID NO: 265340 - DNA, 25 bp, Artificial
  probe
  misc_feature (1)..(25): SEQ ID NO: 506; WAN024APR; Start 53; Stop 77
gcgaattttggtataatatcgtgag

SEQ ID NO: 265341 - DNA, 25 bp, Artificial
  probe
  misc_feature (1)..(25): SEQ ID NO: 506; WAN024APR; Start 2; Stop 26
gtttctattgtaccacaaaagcagt

SEQ ID NO: 265342 - DNA, 25 bp, Artificial
  probe
  misc_feature (1)..(25): SEQ ID NO: 506; WAN024APR; Start 1; Stop 25
agtttctattgtaccacaaaagcag

SEQ ID NO: 265343 - DNA, 25 bp, Artificial
  probe
  misc_feature (1)..(25): SEQ ID NO: 506; WAN024APR; Start 51; Stop 75
tagcgaattttggtataatatcgtg

SEQ ID NO: 265344 - DNA, 25 bp, Artificial
  probe
  misc_feature (1)..(25): SEQ ID NO: 506; WAN024APR; Start 10; Stop 34
tgtaccacaaaagcagtaaaatttg

SEQ ID NO: 265345 - DNA, 25 bp, Artificial
  probe
  misc_feature (1)..(25): SEQ ID NO: 506; WAN024APR; Start 5; Stop 29
tctattgtaccacaaaagcagtaaa

SEQ ID NO: 265346 - DNA, 25 bp, Artificial
  probe
  misc_feature (1)..(25): SEQ ID NO: 506; WAN024APR; Start 4; Stop 28
ttctattgtaccacaaaagcagtaa

SEQ ID NO: 265347 - DNA, 25 bp, Artificial
  probe
  misc_feature (1)..(25): SEQ ID NO: 506; WAN024APR; Start 3; Stop 27
tttctattgtaccacaaaagcagta

SEQ ID NO: 265348 - DNA, 25 bp, Artificial
  probe
  misc_feature (1)..(25): SEQ ID NO: 506; WAN024APR; Start 8; Stop 32
attgtaccacaaaagcagtaaaatt

SEQ ID NO: 265349 - DNA, 25 bp, Artificial
  probe
  misc_feature (1)..(25): SEQ ID NO: 506; WAN024APR; Start 6; Stop 30
ctattgtaccacaaaagcagtaaaa

SEQ ID NO: 265350 - DNA, 25 bp, Artificial
  probe
  misc_feature (1)..(25): SEQ ID NO: 506; WAN024APR; Start 50; Stop 74
ttagcgaattttggtataatatcgt

SEQ ID NO: 265351 - DNA, 25 bp, Artificial
  probe
  misc_feature (1)..(25): SEQ ID NO: 506; WAN024APR; Start 7; Stop 31
tattgtaccacaaaagcagtaaaat

SEQ ID NO: 265352 - DNA, 25 bp, Artificial
  probe
  misc_feature (1)..(25): SEQ ID NO: 506; WAN024APR; Start 9; Stop 33
ttgtaccacaaaagcagtaaaattt

SEQ ID NO: 265353 - DNA, 25 bp, Artificial
  probe
  misc_feature (1)..(25): SEQ ID NO: 506; WAN024APR; Start 49; Stop 73
attagcgaattttggtataatatcg

SEQ ID NO: 265354 - DNA, 25 bp, Artificial
  probe
  misc_feature (1)..(25): SEQ ID NO: 507; WAN0249HT; Start 43; Stop 67
attatatcacaagtcttggctgagt

SEQ ID NO: 265355 - DNA, 25 bp, Artificial
  probe
  misc_feature (1)..(25): SEQ ID NO: 507; WAN0249HT; Start 44; Stop 68
ttatatcacaagtcttggctgagtc

SEQ ID NO: 265356 - DNA, 25 bp, Artificial
  probe
  misc_feature (1)..(25): SEQ ID NO: 507; WAN0249HT; Start 45; Stop 69
tatatcacaagtcttggctgagtcc

SEQ ID NO: 265357 - DNA, 25 bp, Artificial
  probe
  misc_feature (1)..(25): SEQ ID NO: 507; WAN0249HT; Start 42; Stop 66
tattatatcacaagtcttggctgag

SEQ ID NO: 265358 - DNA, 25 bp, Artificial
  probe
  misc_feature (1)..(25): SEQ ID NO: 507; WAN0249HT; Start 41; Stop 65
atattatatcacaagtcttggctga

SEQ ID NO: 265359 - DNA, 25 bp, Artificial
  probe
  misc_feature (1)..(25): SEQ ID NO: 507; WAN0249HT; Start 40; Stop 64
tatattatatcacaagtcttggctg

SEQ ID NO: 265360 - DNA, 25 bp, Artificial
  probe
  misc_feature (1)..(25): SEQ ID NO: 507; WAN0249HT; Start 46; Stop 70
atatcacaagtcttggctgagtcca

SEQ ID NO: 265361 - DNA, 25 bp, Artificial
  probe
  misc_feature (1)..(25): SEQ ID NO: 507; WAN0249HT; Start 2; Stop 26
gtttctcctattatctaggcgtctg

SEQ ID NO: 265362 - DNA, 25 bp, Artificial
  probe
  misc_feature (1)..(25): SEQ ID NO: 507; WAN0249HT; Start 1; Stop 25
agtttctcctattatctaggcgtct

SEQ ID NO: 265363 - DNA, 25 bp, Artificial
  probe
  misc_feature (1)..(25): SEQ ID NO: 507; WAN0249HT; Start 39; Stop 63
ctatattatatcacaagtcttggct

SEQ ID NO: 265364 - DNA, 25 bp, Artificial
  probe
  misc_feature (1)..(25): SEQ ID NO: 507; WAN0249HT; Start 38; Stop 62
tctatattatatcacaagtcttggc

SEQ ID NO: 265365 - DNA, 25 bp, Artificial
  probe
  misc_feature (1)..(25): SEQ ID NO: 507; WAN0249HT; Start 3; Stop 27
tttctcctattatctaggcgtctgc

SEQ ID NO: 265366 - DNA, 25 bp, Artificial
  probe
  misc_feature (1)..(25): SEQ ID NO: 507; WAN0249HT; Start 4; Stop 28
ttctcctattatctaggcgtctgcc

SEQ ID NO: 265367 - DNA, 25 bp, Artificial
  probe
  misc_feature (1)..(25): SEQ ID NO: 507; WAN0249HT; Start 68; Stop 92
ccaatttctatggataaagagagta

SEQ ID NO: 265368 - DNA, 25 bp, Artificial
  probe
  misc_feature (1)..(25): SEQ ID NO: 507; WAN0249HT; Start 55; Stop 79
gtcttggctgagtccaatttctatg

SEQ ID NO: 265369 - DNA, 25 bp, Artificial
  probe
  misc_feature (1)..(25): SEQ ID NO: 507; WAN0249HT; Start 54; Stop 78
agtcttggctgagtccaatttctat

SEQ ID NO: 265370 - DNA, 25 bp, Artificial
  probe
  misc_feature (1)..(25): SEQ ID NO: 507; WAN0249HT; Start 53; Stop 77
aagtcttggctgagtccaatttcta

SEQ ID NO: 265371 - DNA, 25 bp, Artificial
  probe
  misc_feature (1)..(25): SEQ ID NO: 507; WAN0249HT; Start 60; Stop 84
ggctgagtccaatttctatggataa

SEQ ID NO: 265372 - DNA, 25 bp, Artificial
  probe
  misc_feature (1)..(25): SEQ ID NO: 507; WAN0249HT; Start 61; Stop 85
gctgagtccaatttctatggataaa

SEQ ID NO: 265373 - DNA, 25 bp, Artificial
  probe
  misc_feature (1)..(25): SEQ ID NO: 507; WAN0249HT; Start 59; Stop 83
tggctgagtccaatttctatggata

SEQ ID NO: 265374 - DNA, 25 bp, Artificial
  probe
  misc_feature (1)..(25): SEQ ID NO: 507; WAN0249HT; Start 47; Stop 71
tatcacaagtcttggctgagtccaa

SEQ ID NO: 265375 - DNA, 25 bp, Artificial
  probe
  misc_feature (1)..(25): SEQ ID NO: 507; WAN0249HT; Start 56; Stop 80
tcttggctgagtccaatttctatgg

SEQ ID NO: 265376 - DNA, 25 bp, Artificial
  probe
  misc_feature (1)..(25): SEQ ID NO: 507; WAN0249HT; Start 58; Stop 82
ttggctgagtccaatttctatggat

SEQ ID NO: 265377 - DNA, 25 bp, Artificial
  probe
  misc_feature (1)..(25): SEQ ID NO: 507; WAN0249HT; Start 48; Stop 72
atcacaagtcttggctgagtccaat

SEQ ID NO: 265378 - DNA, 25 bp, Artificial
  probe
  misc_feature (1)..(25): SEQ ID NO: 507; WAN0249HT; Start 57; Stop 81
cttggctgagtccaatttctatgga

SEQ ID NO: 265379 - DNA, 25 bp, Artificial
  probe
  misc_feature (1)..(25): SEQ ID NO: 507; WAN0249HT; Start 52; Stop 76
caagtcttggctgagtccaatttct

SEQ ID NO: 265380 - DNA, 25 bp, Artificial
  probe
  misc_feature (1)..(25): SEQ ID NO: 507; WAN0249HT; Start 63; Stop 87
tgagtccaatttctatggataaaga

SEQ ID NO: 265381 - DNA, 25 bp, Artificial
  probe
  misc_feature (1)..(25): SEQ ID NO: 507; WAN0249HT; Start 49; Stop 73
tcacaagtcttggctgagtccaatt

SEQ ID NO: 265382 - DNA, 25 bp, Artificial
  probe
  misc_feature (1)..(25): SEQ ID NO: 507; WAN0249HT; Start 62; Stop 86
ctgagtccaatttctatggataaag

SEQ ID NO: 265383 - DNA, 25 bp, Artificial
  probe
  misc_feature (1)..(25): SEQ ID NO: 507; WAN0249HT; Start 67; Stop 91
tccaatttctatggataaagagagt

SEQ ID NO: 265384 - DNA, 25 bp, Artificial
  probe
  misc_feature (1)..(25): SEQ ID NO: 507; WAN0249HT; Start 65; Stop 89
agtccaatttctatggataaagaga

SEQ ID NO: 265385 - DNA, 25 bp, Artificial
  probe
  misc_feature (1)..(25): SEQ ID NO: 507; WAN0249HT; Start 51; Stop 75
acaagtcttggctgagtccaatttc

SEQ ID NO: 265386 - DNA, 25 bp, Artificial
  probe
  misc_feature (1)..(25): SEQ ID NO: 507; WAN0249HT; Start 66; Stop 90
gtccaatttctatggataaagagag

SEQ ID NO: 265387 - DNA, 25 bp, Artificial
  probe
  misc_feature (1)..(25): SEQ ID NO: 508; WAN024A7S; Start 112; Stop 136
tcaatttcctttcagataacttgct

SEQ ID NO: 265388 - DNA, 25 bp, Artificial
  probe
  misc_feature (1)..(25): SEQ ID NO: 508; WAN024A7S; Start 108; Stop 132
tccttcaatttcctttcagataact

SEQ ID NO: 265389 - DNA, 25 bp, Artificial
  probe
  misc_feature (1)..(25): SEQ ID NO: 508; WAN024A7S; Start 111; Stop 135
ttcaatttcctttcagataacttgc

SEQ ID NO: 265390 - DNA, 25 bp, Artificial
  probe
  misc_feature (1)..(25): SEQ ID NO: 508; WAN024A7S; Start 113; Stop 137
caatttcctttcagataacttgctg

SEQ ID NO: 265391 - DNA, 25 bp, Artificial
  probe
  misc_feature (1)..(25): SEQ ID NO: 508; WAN024A7S; Start 109; Stop 133
ccttcaatttcctttcagataactt

SEQ ID NO: 265392 - DNA, 25 bp, Artificial
  probe
  misc_feature (1)..(25): SEQ ID NO: 508; WAN024A7S; Start 107; Stop 131
ttccttcaatttcctttcagataac

SEQ ID NO: 265393 - DNA, 25 bp, Artificial
  probe
  misc_feature (1)..(25): SEQ ID NO: 508; WAN024A7S; Start 206; Stop 230
ttgctatttcacaatacaaacacta

SEQ ID NO: 265394 - DNA, 25 bp, Artificial
  probe
  misc_feature (1)..(25): SEQ ID NO: 508; WAN024A7S; Start 207; Stop 231
tgctatttcacaatacaaacactat

SEQ ID NO: 265395 - DNA, 25 bp, Artificial
  probe
  misc_feature (1)..(25): SEQ ID NO: 508; WAN024A7S; Start 106; Stop 130
tttccttcaatttcctttcagataa

SEQ ID NO: 265396 - DNA, 25 bp, Artificial
  probe
  misc_feature (1)..(25): SEQ ID NO: 508; WAN024A7S; Start 2; Stop 26
gtttgactctccttttgttctttct

SEQ ID NO: 265397 - DNA, 25 bp, Artificial
  probe
  misc_feature (1)..(25): SEQ ID NO: 508; WAN024A7S; Start 5; Stop 29
tgactctccttttgttctttctttt

SEQ ID NO: 265398 - DNA, 25 bp, Artificial
  probe
  misc_feature (1)..(25): SEQ ID NO: 508; WAN024A7S; Start 4; Stop 28
ttgactctccttttgttctttcttt

SEQ ID NO: 265399 - DNA, 25 bp, Artificial
  probe
  misc_feature (1)..(25): SEQ ID NO: 508; WAN024A7S; Start 3; Stop 27
tttgactctccttttgttctttctt

SEQ ID NO: 265400 - DNA, 25 bp, Artificial
  probe
  misc_feature (1)..(25): SEQ ID NO: 508; WAN024A7S; Start 110; Stop 134
cttcaatttcctttcagataacttg

SEQ ID NO: 265401 - DNA, 25 bp, Artificial
  probe
  misc_feature (1)..(25): SEQ ID NO: 508; WAN024A7S; Start 1; Stop 25
agtttgactctccttttgttctttc

SEQ ID NO: 265402 - DNA, 25 bp, Artificial
  probe
  misc_feature (1)..(25): SEQ ID NO: 508; WAN024A7S; Start 204; Stop 228
cattgctatttcacaatacaaacac

SEQ ID NO: 265403 - DNA, 25 bp, Artificial
  probe
  misc_feature (1)..(25): SEQ ID NO: 508; WAN024A7S; Start 203; Stop 227
tcattgctatttcacaatacaaaca

SEQ ID NO: 265404 - DNA, 25 bp, Artificial
  probe
  misc_feature (1)..(25): SEQ ID NO: 508; WAN024A7S; Start 205; Stop 229
attgctatttcacaatacaaacact

SEQ ID NO: 265405 - DNA, 25 bp, Artificial
  probe
  misc_feature (1)..(25): SEQ ID NO: 508; WAN024A7S; Start 195; Stop 219
taggataatcattgctatttcacaa

SEQ ID NO: 265406 - DNA, 25 bp, Artificial
  probe
  misc_feature (1)..(25): SEQ ID NO: 508; WAN024A7S; Start 103; Stop 127
gattttccttcaatttcctttcaga

SEQ ID NO: 265407 - DNA, 25 bp, Artificial
  probe
  misc_feature (1)..(25): SEQ ID NO: 508; WAN024A7S; Start 130; Stop 154
acttgctgaaaatcttctatcctag

SEQ ID NO: 265408 - DNA, 25 bp, Artificial
  probe
  misc_feature (1)..(25): SEQ ID NO: 508; WAN024A7S; Start 129; Stop 153
aacttgctgaaaatcttctatccta

SEQ ID NO: 265409 - DNA, 25 bp, Artificial
  probe
  misc_feature (1)..(25): SEQ ID NO: 508; WAN024A7S; Start 128; Stop 152
taacttgctgaaaatcttctatcct

SEQ ID NO: 265410 - DNA, 25 bp, Artificial
  probe
  misc_feature (1)..(25): SEQ ID NO: 508; WAN024A7S; Start 91; Stop 115
aagcattttctggattttccttcaa

SEQ ID NO: 265411 - DNA, 25 bp, Artificial
  probe
  misc_feature (1)..(25): SEQ ID NO: 508; WAN024A7S; Start 89; Stop 113
tcaagcattttctggattttccttc

SEQ ID NO: 265412 - DNA, 25 bp, Artificial
  probe
  misc_feature (1)..(25): SEQ ID NO: 508; WAN024A7S; Start 88; Stop 112
ttcaagcattttctggattttcctt

SEQ ID NO: 265413 - DNA, 25 bp, Artificial
  probe
  misc_feature (1)..(25): SEQ ID NO: 508; WAN024A7S; Start 87; Stop 111
tttcaagcattttctggattttcct

SEQ ID NO: 265414 - DNA, 25 bp, Artificial
  probe
  misc_feature (1)..(25): SEQ ID NO: 508; WAN024A7S; Start 92; Stop 116
agcattttctggattttccttcaat

SEQ ID NO: 265415 - DNA, 25 bp, Artificial
  probe
  misc_feature (1)..(25): SEQ ID NO: 508; WAN024A7S; Start 90; Stop 114
caagcattttctggattttccttca

SEQ ID NO: 265416 - DNA, 25 bp, Artificial
  probe
  misc_feature (1)..(25): SEQ ID NO: 508; WAN024A7S; Start 250; Stop 274
aaaacaacaaaagaacaccactata

SEQ ID NO: 265417 - DNA, 25 bp, Artificial
  probe
  misc_feature (1)..(25): SEQ ID NO: 508; WAN024A7S; Start 101; Stop 125
tggattttccttcaatttcctttca

SEQ ID NO: 265418 - DNA, 25 bp, Artificial
  probe
  misc_feature (1)..(25): SEQ ID NO: 508; WAN024A7S; Start 86; Stop 110
ttttcaagcattttctggattttcc

SEQ ID NO: 265419 - DNA, 25 bp, Artificial
  probe
  misc_feature (1)..(25): SEQ ID NO: 508; WAN024A7S; Start 99; Stop 123
tctggattttccttcaatttccttt

SEQ ID NO: 265420 - DNA, 25 bp, Artificial
  probe
  misc_feature (1)..(25): SEQ ID NO: 509; WAN024AJC; Start 76; Stop 100
gcagcaagagattaatagaattagt

SEQ ID NO: 265421 - DNA, 25 bp, Artificial
  probe
  misc_feature (1)..(25): SEQ ID NO: 509; WAN024AJC; Start 75; Stop 99
tgcagcaagagattaatagaattag

SEQ ID NO: 265422 - DNA, 25 bp, Artificial
  probe
  misc_feature (1)..(25): SEQ ID NO: 509; WAN024AJC; Start 108; Stop 132
ttattgattgcggactgagggacta

SEQ ID NO: 265423 - DNA, 25 bp, Artificial
  probe
  misc_feature (1)..(25): SEQ ID NO: 509; WAN024AJC; Start 103; Stop 127
ttattttattgattgcggactgagg

SEQ ID NO: 265424 - DNA, 25 bp, Artificial
  probe
  misc_feature (1)..(25): SEQ ID NO: 509; WAN024AJC; Start 118; Stop 142
cggactgagggactagagtatgttt

SEQ ID NO: 265425 - DNA, 25 bp, Artificial
  probe
  misc_feature (1)..(25): SEQ ID NO: 509; WAN024AJC; Start 104; Stop 128
tattttattgattgcggactgaggg

SEQ ID NO: 265426 - DNA, 25 bp, Artificial
  probe
  misc_feature (1)..(25): SEQ ID NO: 509; WAN024AJC; Start 74; Stop 98
ttgcagcaagagattaatagaatta

SEQ ID NO: 265427 - DNA, 25 bp, Artificial
  probe
  misc_feature (1)..(25): SEQ ID NO: 509; WAN024AJC; Start 101; Stop 125
cattattttattgattgcggactga

SEQ ID NO: 265428 - DNA, 25 bp, Artificial
  probe
  misc_feature (1)..(25): SEQ ID NO: 509; WAN024AJC; Start 109; Stop 133
tattgattgcggactgagggactag

SEQ ID NO: 265429 - DNA, 25 bp, Artificial
  probe
  misc_feature (1)..(25): SEQ ID NO: 509; WAN024AJC; Start 121; Stop 145
actgagggactagagtatgttttac

SEQ ID NO: 265430 - DNA, 25 bp, Artificial
  probe
  misc_feature (1)..(25): SEQ ID NO: 509; WAN024AJC; Start 102; Stop 126
attattttattgattgcggactgag

SEQ ID NO: 265431 - DNA, 25 bp, Artificial
  probe
  misc_feature (1)..(25): SEQ ID NO: 509; WAN024AJC; Start 120; Stop 144
gactgagggactagagtatgtttta

SEQ ID NO: 265432 - DNA, 25 bp, Artificial
  probe
  misc_feature (1)..(25): SEQ ID NO: 509; WAN024AJC; Start 119; Stop 143
ggactgagggactagagtatgtttt

SEQ ID NO: 265433 - DNA, 25 bp, Artificial
  probe
  misc_feature (1)..(25): SEQ ID NO: 509; WAN024AJC; Start 107; Stop 131
tttattgattgcggactgagggact

SEQ ID NO: 265434 - DNA, 25 bp, Artificial
  probe
  misc_feature (1)..(25): SEQ ID NO: 509; WAN024AJC; Start 100; Stop 124
tcattattttattgattgcggactg

SEQ ID NO: 265435 - DNA, 25 bp, Artificial
  probe
  misc_feature (1)..(25): SEQ ID NO: 509; WAN024AJC; Start 105; Stop 129
attttattgattgcggactgaggga

SEQ ID NO: 265436 - DNA, 25 bp, Artificial
  probe
  misc_feature (1)..(25): SEQ ID NO: 509; WAN024AJC; Start 99; Stop 123
gtcattattttattgattgcggact

SEQ ID NO: 265437 - DNA, 25 bp, Artificial
  probe
  misc_feature (1)..(25): SEQ ID NO: 509; WAN024AJC; Start 98; Stop 122
agtcattattttattgattgcggac

SEQ ID NO: 265438 - DNA, 25 bp, Artificial
  probe
  misc_feature (1)..(25): SEQ ID NO: 509; WAN024AJC; Start 78; Stop 102
agcaagagattaatagaattagtca

SEQ ID NO: 265439 - DNA, 25 bp, Artificial
  probe
  misc_feature (1)..(25): SEQ ID NO: 509; WAN024AJC; Start 122; Stop 146
ctgagggactagagtatgttttact

SEQ ID NO: 265440 - DNA, 25 bp, Artificial
  probe
  misc_feature (1)..(25): SEQ ID NO: 509; WAN024AJC; Start 77; Stop 101
cagcaagagattaatagaattagtc

SEQ ID NO: 265441 - DNA, 25 bp, Artificial
  probe
  misc_feature (1)..(25): SEQ ID NO: 509; WAN024AJC; Start 123; Stop 147
tgagggactagagtatgttttactt

SEQ ID NO: 265442 - DNA, 25 bp, Artificial
  probe
  misc_feature (1)..(25): SEQ ID NO: 509; WAN024AJC; Start 57; Stop 81
aattttccgtattagtcttgcagca

SEQ ID NO: 265443 - DNA, 25 bp, Artificial
  probe
  misc_feature (1)..(25): SEQ ID NO: 509; WAN024AJC; Start 58; Stop 82
attttccgtattagtcttgcagcaa

SEQ ID NO: 265444 - DNA, 25 bp, Artificial
  probe
  misc_feature (1)..(25): SEQ ID NO: 509; WAN024AJC; Start 2; Stop 26
gtttgttcatttactaacatcaagc

SEQ ID NO: 265445 - DNA, 25 bp, Artificial
  probe
  misc_feature (1)..(25): SEQ ID NO: 509; WAN024AJC; Start 106; Stop 130
ttttattgattgcggactgagggac

SEQ ID NO: 265446 - DNA, 25 bp, Artificial
  probe
  misc_feature (1)..(25): SEQ ID NO: 509; WAN024AJC; Start 114; Stop 138
attgcggactgagggactagagtat

SEQ ID NO: 265447 - DNA, 25 bp, Artificial
  probe
  misc_feature (1)..(25): SEQ ID NO: 509; WAN024AJC; Start 97; Stop 121
tagtcattattttattgattgcgga

SEQ ID NO: 265448 - DNA, 25 bp, Artificial
  probe
  misc_feature (1)..(25): SEQ ID NO: 509; WAN024AJC; Start 3; Stop 27
tttgttcatttactaacatcaagct

SEQ ID NO: 265449 - DNA, 25 bp, Artificial
  probe
  misc_feature (1)..(25): SEQ ID NO: 509; WAN024AJC; Start 73; Stop 97
cttgcagcaagagattaatagaatt

SEQ ID NO: 265450 - DNA, 25 bp, Artificial
  probe
  misc_feature (1)..(25): SEQ ID NO: 509; WAN024AJC; Start 113; Stop 137
gattgcggactgagggactagagta

SEQ ID NO: 265451 - DNA, 25 bp, Artificial
  probe
  misc_feature (1)..(25): SEQ ID NO: 509; WAN024AJC; Start 110; Stop 134
attgattgcggactgagggactaga

SEQ ID NO: 265452 - DNA, 25 bp, Artificial
  probe
  misc_feature (1)..(25): SEQ ID NO: 509; WAN024AJC; Start 96; Stop 120
ttagtcattattttattgattgcgg

SEQ ID NO: 265453 - DNA, 25 bp, Artificial
  probe
  misc_feature (1)..(25): SEQ ID NO: 510; WAN024AIJ; Start 11; Stop 35
agcaatttattcttccaatacacga

SEQ ID NO: 265454 - DNA, 25 bp, Artificial
  probe
  misc_feature (1)..(25): SEQ ID NO: 510; WAN024AIJ; Start 12; Stop 36
gcaatttattcttccaatacacgaa

SEQ ID NO: 265455 - DNA, 25 bp, Artificial
  probe
  misc_feature (1)..(25): SEQ ID NO: 510; WAN024AIJ; Start 10; Stop 34
tagcaatttattcttccaatacacg

SEQ ID NO: 265456 - DNA, 25 bp, Artificial
  probe
  misc_feature (1)..(25): SEQ ID NO: 510; WAN024AIJ; Start 4; Stop 28
tttcgatagcaatttattcttccaa

SEQ ID NO: 265457 - DNA, 25 bp, Artificial
  probe
  misc_feature (1)..(25): SEQ ID NO: 510; WAN024AIJ; Start 7; Stop 31
cgatagcaatttattcttccaatac

SEQ ID NO: 265458 - DNA, 25 bp, Artificial
  probe
  misc_feature (1)..(25): SEQ ID NO: 510; WAN024AIJ; Start 5; Stop 29
ttcgatagcaatttattcttccaat

SEQ ID NO: 265459 - DNA, 25 bp, Artificial
  probe
  misc_feature (1)..(25): SEQ ID NO: 510; WAN024AIJ; Start 49; Stop 73
cattcagtggaggcaatctgtttta

SEQ ID NO: 265460 - DNA, 25 bp, Artificial
  probe
  misc_feature (1)..(25): SEQ ID NO: 510; WAN024AIJ; Start 47; Stop 71
cacattcagtggaggcaatctgttt

SEQ ID NO: 265461 - DNA, 25 bp, Artificial
  probe
  misc_feature (1)..(25): SEQ ID NO: 510; WAN024AIJ; Start 9; Stop 33
atagcaatttattcttccaatacac

SEQ ID NO: 265462 - DNA, 25 bp, Artificial
  probe
  misc_feature (1)..(25): SEQ ID NO: 510; WAN024AIJ; Start 6; Stop 30
tcgatagcaatttattcttccaata

SEQ ID NO: 265463 - DNA, 25 bp, Artificial
  probe
  misc_feature (1)..(25): SEQ ID NO: 510; WAN024AIJ; Start 8; Stop 32
gatagcaatttattcttccaataca

SEQ ID NO: 265464 - DNA, 25 bp, Artificial
  probe
  misc_feature (1)..(25): SEQ ID NO: 510; WAN024AIJ; Start 13; Stop 37
caatttattcttccaatacacgaag

SEQ ID NO: 265465 - DNA, 25 bp, Artificial
  probe
  misc_feature (1)..(25): SEQ ID NO: 510; WAN024AIJ; Start 3; Stop 27
ttttcgatagcaatttattcttcca

SEQ ID NO: 265466 - DNA, 25 bp, Artificial
  probe
  misc_feature (1)..(25): SEQ ID NO: 510; WAN024AIJ; Start 48; Stop 72
acattcagtggaggcaatctgtttt

SEQ ID NO: 265467 - DNA, 25 bp, Artificial
  probe
  misc_feature (1)..(25): SEQ ID NO: 510; WAN024AIJ; Start 2; Stop 26
gttttcgatagcaatttattcttcc

SEQ ID NO: 265468 - DNA, 25 bp, Artificial
  probe
  misc_feature (1)..(25): SEQ ID NO: 510; WAN024AIJ; Start 1; Stop 25
agttttcgatagcaatttattcttc

SEQ ID NO: 265469 - DNA, 25 bp, Artificial
  probe
  misc_feature (1)..(25): SEQ ID NO: 511; WAN024AGV; Start 30; Stop 54
gctgctcttcttcaaacaaacttat

SEQ ID NO: 265470 - DNA, 25 bp, Artificial
  probe
  misc_feature (1)..(25): SEQ ID NO: 511; WAN024AGV; Start 29; Stop 53
tgctgctcttcttcaaacaaactta

SEQ ID NO: 265471 - DNA, 25 bp, Artificial
  probe
  misc_feature (1)..(25): SEQ ID NO: 511; WAN024AGV; Start 31; Stop 55
ctgctcttcttcaaacaaacttatt

SEQ ID NO: 265472 - DNA, 25 bp, Artificial
  probe
  misc_feature (1)..(25): SEQ ID NO: 511; WAN024AGV; Start 28; Stop 52
ctgctgctcttcttcaaacaaactt

SEQ ID NO: 265473 - DNA, 25 bp, Artificial
  probe
  misc_feature (1)..(25): SEQ ID NO: 511; WAN024AGV; Start 10; Stop 34
ctattctaagtttaagagctgctgc

SEQ ID NO: 265474 - DNA, 25 bp, Artificial
  probe
  misc_feature (1)..(25): SEQ ID NO: 511; WAN024AGV; Start 9; Stop 33
cctattctaagtttaagagctgctg

SEQ ID NO: 265475 - DNA, 25 bp, Artificial
  probe
  misc_feature (1)..(25): SEQ ID NO: 511; WAN024AGV; Start 8; Stop 32
tcctattctaagtttaagagctgct

SEQ ID NO: 265476 - DNA, 25 bp, Artificial
  probe
  misc_feature (1)..(25): SEQ ID NO: 511; WAN024AGV; Start 32; Stop 56
tgctcttcttcaaacaaacttatta

SEQ ID NO: 265477 - DNA, 25 bp, Artificial
  probe
  misc_feature (1)..(25): SEQ ID NO: 511; WAN024AGV; Start 7; Stop 31
ctcctattctaagtttaagagctgc

SEQ ID NO: 265478 - DNA, 25 bp, Artificial
  probe
  misc_feature (1)..(25): SEQ ID NO: 511; WAN024AGV; Start 11; Stop 35
tattctaagtttaagagctgctgct

SEQ ID NO: 265479 - DNA, 25 bp, Artificial
  probe
  misc_feature (1)..(25): SEQ ID NO: 511; WAN024AGV; Start 6; Stop 30
tctcctattctaagtttaagagctg

SEQ ID NO: 265480 - DNA, 25 bp, Artificial
  probe
  misc_feature (1)..(25): SEQ ID NO: 511; WAN024AGV; Start 33; Stop 57
gctcttcttcaaacaaacttattat

SEQ ID NO: 265481 - DNA, 25 bp, Artificial
  probe
  misc_feature (1)..(25): SEQ ID NO: 511; WAN024AGV; Start 4; Stop 28
tttctcctattctaagtttaagagc

SEQ ID NO: 265482 - DNA, 25 bp, Artificial
  probe
  misc_feature (1)..(25): SEQ ID NO: 511; WAN024AGV; Start 5; Stop 29
ttctcctattctaagtttaagagct

SEQ ID NO: 265483 - DNA, 25 bp, Artificial
  probe
  misc_feature (1)..(25): SEQ ID NO: 511; WAN024AGV; Start 27; Stop 51
gctgctgctcttcttcaaacaaact

SEQ ID NO: 265484 - DNA, 25 bp, Artificial
  probe
  misc_feature (1)..(25): SEQ ID NO: 511; WAN024AGV; Start 26; Stop 50
agctgctgctcttcttcaaacaaac

SEQ ID NO: 265485 - DNA, 25 bp, Artificial
  probe
  misc_feature (1)..(25): SEQ ID NO: 512; WAN024AO9; Start 85; Stop 109
ccgaggatgaacttatatattgtga

SEQ ID NO: 265486 - DNA, 25 bp, Artificial
  probe
  misc_feature (1)..(25): SEQ ID NO: 512; WAN024AO9; Start 84; Stop 108
tccgaggatgaacttatatattgtg

SEQ ID NO: 265487 - DNA, 25 bp, Artificial
  probe
  misc_feature (1)..(25): SEQ ID NO: 512; WAN024AO9; Start 140; Stop 164
actatcgctatcaatttcatccact

SEQ ID NO: 265488 - DNA, 25 bp, Artificial
  probe
  misc_feature (1)..(25): SEQ ID NO: 512; WAN024AO9; Start 139; Stop 163
gactatcgctatcaatttcatccac

SEQ ID NO: 265489 - DNA, 25 bp, Artificial
  probe
  misc_feature (1)..(25): SEQ ID NO: 512; WAN024AO9; Start 119; Stop 143
gttatgatgcctcttgatttgacta

SEQ ID NO: 265490 - DNA, 25 bp, Artificial
  probe
  misc_feature (1)..(25): SEQ ID NO: 512; WAN024AO9; Start 122; Stop 146
atgatgcctcttgatttgactatcg

SEQ ID NO: 265491 - DNA, 25 bp, Artificial
  probe
  misc_feature (1)..(25): SEQ ID NO: 512; WAN024AO9; Start 141; Stop 165
ctatcgctatcaatttcatccactt

SEQ ID NO: 265492 - DNA, 25 bp, Artificial
  probe
  misc_feature (1)..(25): SEQ ID NO: 512; WAN024AO9; Start 127; Stop 151
gcctcttgatttgactatcgctatc

SEQ ID NO: 265493 - DNA, 25 bp, Artificial
  probe
  misc_feature (1)..(25): SEQ ID NO: 512; WAN024AO9; Start 118; Stop 142
agttatgatgcctcttgatttgact

SEQ ID NO: 265494 - DNA, 25 bp, Artificial
  probe
  misc_feature (1)..(25): SEQ ID NO: 512; WAN024AO9; Start 138; Stop 162
tgactatcgctatcaatttcatcca

SEQ ID NO: 265495 - DNA, 25 bp, Artificial
  probe
  misc_feature (1)..(25): SEQ ID NO: 512; WAN024AO9; Start 83; Stop 107
ttccgaggatgaacttatatattgt

SEQ ID NO: 265496 - DNA, 25 bp, Artificial
  probe
  misc_feature (1)..(25): SEQ ID NO: 512; WAN024AO9; Start 121; Stop 145
tatgatgcctcttgatttgactatc

SEQ ID NO: 265497 - DNA, 25 bp, Artificial
  probe
  misc_feature (1)..(25): SEQ ID NO: 512; WAN024AO9; Start 142; Stop 166
tatcgctatcaatttcatccacttt

SEQ ID NO: 265498 - DNA, 25 bp, Artificial
  probe
  misc_feature (1)..(25): SEQ ID NO: 512; WAN024AO9; Start 265; Stop 289
ttcttgtgataacgccctattcaaa

SEQ ID NO: 265499 - DNA, 25 bp, Artificial
  probe
  misc_feature (1)..(25): SEQ ID NO: 512; WAN024AO9; Start 264; Stop 288
tttcttgtgataacgccctattcaa

SEQ ID NO: 265500 - DNA, 25 bp, Artificial
  probe
  misc_feature (1)..(25): SEQ ID NO: 512; WAN024AO9; Start 117; Stop 141
gagttatgatgcctcttgatttgac

SEQ ID NO: 265501 - DNA, 25 bp, Artificial
  probe
  misc_feature (1)..(25): SEQ ID NO: 512; WAN024AO9; Start 86; Stop 110
cgaggatgaacttatatattgtgac

SEQ ID NO: 265502 - DNA, 25 bp, Artificial
  probe
  misc_feature (1)..(25): SEQ ID NO: 512; WAN024AO9; Start 525; Stop 549
taaatcactcaacatagcgagaagg

SEQ ID NO: 265503 - DNA, 25 bp, Artificial
  probe
  misc_feature (1)..(25): SEQ ID NO: 512; WAN024AO9; Start 268; Stop 292
ttgtgataacgccctattcaaagag

SEQ ID NO: 265504 - DNA, 25 bp, Artificial
  probe
  misc_feature (1)..(25): SEQ ID NO: 512; WAN024AO9; Start 267; Stop 291
cttgtgataacgccctattcaaaga

SEQ ID NO: 265505 - DNA, 25 bp, Artificial
  probe
  misc_feature (1)..(25): SEQ ID NO: 512; WAN024AO9; Start 266; Stop 290
tcttgtgataacgccctattcaaag

SEQ ID NO: 265506 - DNA, 25 bp, Artificial
  probe
  misc_feature (1)..(25): SEQ ID NO: 512; WAN024AO9; Start 120; Stop 144
ttatgatgcctcttgatttgactat

SEQ ID NO: 265507 - DNA, 25 bp, Artificial
  probe
  misc_feature (1)..(25): SEQ ID NO: 512; WAN024AO9; Start 524; Stop 548
ataaatcactcaacatagcgagaag

SEQ ID NO: 265508 - DNA, 25 bp, Artificial
  probe
  misc_feature (1)..(25): SEQ ID NO: 512; WAN024AO9; Start 4; Stop 28
tttgatacctgtattcgttgtttca

SEQ ID NO: 265509 - DNA, 25 bp, Artificial
  probe
  misc_feature (1)..(25): SEQ ID NO: 512; WAN024AO9; Start 126; Stop 150
tgcctcttgatttgactatcgctat

SEQ ID NO: 265510 - DNA, 25 bp, Artificial
  probe
  misc_feature (1)..(25): SEQ ID NO: 512; WAN024AO9; Start 125; Stop 149
atgcctcttgatttgactatcgcta

SEQ ID NO: 265511 - DNA, 25 bp, Artificial
  probe
  misc_feature (1)..(25): SEQ ID NO: 512; WAN024AO9; Start 5; Stop 29
ttgatacctgtattcgttgtttcat

SEQ ID NO: 265512 - DNA, 25 bp, Artificial
  probe
  misc_feature (1)..(25): SEQ ID NO: 512; WAN024AO9; Start 6; Stop 30
tgatacctgtattcgttgtttcatg

SEQ ID NO: 265513 - DNA, 25 bp, Artificial
  probe
  misc_feature (1)..(25): SEQ ID NO: 512; WAN024AO9; Start 523; Stop 547
tataaatcactcaacatagcgagaa

SEQ ID NO: 265514 - DNA, 25 bp, Artificial
  probe
  misc_feature (1)..(25): SEQ ID NO: 512; WAN024AO9; Start 272; Stop 296
gataacgccctattcaaagaggaat

SEQ ID NO: 265515 - DNA, 25 bp, Artificial
  probe
  misc_feature (1)..(25): SEQ ID NO: 512; WAN024AO9; Start 49; Stop 73
tcatgtaggcatttcaacaattaga

SEQ ID NO: 265516 - DNA, 25 bp, Artificial
  probe
  misc_feature (1)..(25): SEQ ID NO: 512; WAN024AO9; Start 271; Stop 295
tgataacgccctattcaaagaggaa

SEQ ID NO: 265517 - DNA, 25 bp, Artificial
  probe
  misc_feature (1)..(25): SEQ ID NO: 512; WAN024AO9; Start 183; Stop 207
tatgaaccgaaacatctaggtacag

SEQ ID NO: 265518 - DNA, 25 bp, Artificial
  probe
  misc_feature (1)..(25): SEQ ID NO: 513; WAN024DFA; Start 157; Stop 181
tgctatcacacccaatacctatcta

SEQ ID NO: 265519 - DNA, 25 bp, Artificial
  probe
  misc_feature (1)..(25): SEQ ID NO: 513; WAN024DFA; Start 160; Stop 184
tatcacacccaatacctatctaagc

SEQ ID NO: 265520 - DNA, 25 bp, Artificial
  probe
  misc_feature (1)..(25): SEQ ID NO: 513; WAN024DFA; Start 158; Stop 182
gctatcacacccaatacctatctaa

SEQ ID NO: 265521 - DNA, 25 bp, Artificial
  probe
  misc_feature (1)..(25): SEQ ID NO: 513; WAN024DFA; Start 305; Stop 329
caagatgatgatgaaatcccaacta

SEQ ID NO: 265522 - DNA, 25 bp, Artificial
  probe
  misc_feature (1)..(25): SEQ ID NO: 513; WAN024DFA; Start 304; Stop 328
tcaagatgatgatgaaatcccaact

SEQ ID NO: 265523 - DNA, 25 bp, Artificial
  probe
  misc_feature (1)..(25): SEQ ID NO: 513; WAN024DFA; Start 156; Stop 180
ttgctatcacacccaatacctatct

SEQ ID NO: 265524 - DNA, 25 bp, Artificial
  probe
  misc_feature (1)..(25): SEQ ID NO: 513; WAN024DFA; Start 161; Stop 185
atcacacccaatacctatctaagcg

SEQ ID NO: 265525 - DNA, 25 bp, Artificial
  probe
  misc_feature (1)..(25): SEQ ID NO: 513; WAN024DFA; Start 25; Stop 49
aagaagaagggagttactggacttt

SEQ ID NO: 265526 - DNA, 25 bp, Artificial
  probe
  misc_feature (1)..(25): SEQ ID NO: 513; WAN024DFA; Start 307; Stop 331
agatgatgatgaaatcccaactatt

SEQ ID NO: 265527 - DNA, 25 bp, Artificial
  probe
  misc_feature (1)..(25): SEQ ID NO: 513; WAN024DFA; Start 306; Stop 330
aagatgatgatgaaatcccaactat

SEQ ID NO: 265528 - DNA, 25 bp, Artificial
  probe
  misc_feature (1)..(25): SEQ ID NO: 513; WAN024DFA; Start 159; Stop 183
ctatcacacccaatacctatctaag

SEQ ID NO: 265529 - DNA, 25 bp, Artificial
  probe
  misc_feature (1)..(25): SEQ ID NO: 513; WAN024DFA; Start 24; Stop 48
gaagaagaagggagttactggactt

SEQ ID NO: 265530 - DNA, 25 bp, Artificial
  probe
  misc_feature (1)..(25): SEQ ID NO: 513; WAN024DFA; Start 22; Stop 46
ctgaagaagaagggagttactggac

SEQ ID NO: 265531 - DNA, 25 bp, Artificial
  probe
  misc_feature (1)..(25): SEQ ID NO: 513; WAN024DFA; Start 18; Stop 42
tatcctgaagaagaagggagttact

SEQ ID NO: 265532 - DNA, 25 bp, Artificial
  probe
  misc_feature (1)..(25): SEQ ID NO: 513; WAN024DFA; Start 15; Stop 39
gaatatcctgaagaagaagggagtt

SEQ ID NO: 265533 - DNA, 25 bp, Artificial
  probe
  misc_feature (1)..(25): SEQ ID NO: 513; WAN024DFA; Start 14; Stop 38
agaatatcctgaagaagaagggagt

SEQ ID NO: 265534 - DNA, 25 bp, Artificial
  probe
  misc_feature (1)..(25): SEQ ID NO: 513; WAN024DFA; Start 13; Stop 37
aagaatatcctgaagaagaagggag

SEQ ID NO: 265535 - DNA, 25 bp, Artificial
  probe
  misc_feature (1)..(25): SEQ ID NO: 513; WAN024DFA; Start 17; Stop 41
atatcctgaagaagaagggagttac

SEQ ID NO: 265536 - DNA, 25 bp, Artificial
  probe
  misc_feature (1)..(25): SEQ ID NO: 513; WAN024DFA; Start 12; Stop 36
aaagaatatcctgaagaagaaggga

SEQ ID NO: 265537 - DNA, 25 bp, Artificial
  probe
  misc_feature (1)..(25): SEQ ID NO: 513; WAN024DFA; Start 206; Stop 230
gcagctcttcctctaaatttcctaa

SEQ ID NO: 265538 - DNA, 25 bp, Artificial
  probe
  misc_feature (1)..(25): SEQ ID NO: 513; WAN024DFA; Start 197; Stop 221
aactttattgcagctcttcctctaa

SEQ ID NO: 265539 - DNA, 25 bp, Artificial
  probe
  misc_feature (1)..(25): SEQ ID NO: 513; WAN024DFA; Start 196; Stop 220
aaactttattgcagctcttcctcta

SEQ ID NO: 265540 - DNA, 25 bp, Artificial
  probe
  misc_feature (1)..(25): SEQ ID NO: 513; WAN024DFA; Start 195; Stop 219
taaactttattgcagctcttcctct

SEQ ID NO: 265541 - DNA, 25 bp, Artificial
  probe
  misc_feature (1)..(25): SEQ ID NO: 513; WAN024DFA; Start 194; Stop 218
gtaaactttattgcagctcttcctc

SEQ ID NO: 265542 - DNA, 25 bp, Artificial
  probe
  misc_feature (1)..(25): SEQ ID NO: 513; WAN024DFA; Start 191; Stop 215
ttcgtaaactttattgcagctcttc

SEQ ID NO: 265543 - DNA, 25 bp, Artificial
  probe
  misc_feature (1)..(25): SEQ ID NO: 513; WAN024DFA; Start 19; Stop 43
atcctgaagaagaagggagttactg

SEQ ID NO: 265544 - DNA, 25 bp, Artificial
  probe
  misc_feature (1)..(25): SEQ ID NO: 513; WAN024DFA; Start 16; Stop 40
aatatcctgaagaagaagggagtta

SEQ ID NO: 265545 - DNA, 25 bp, Artificial
  probe
  misc_feature (1)..(25): SEQ ID NO: 513; WAN024DFA; Start 202; Stop 226
tattgcagctcttcctctaaatttc

SEQ ID NO: 265546 - DNA, 25 bp, Artificial
  probe
  misc_feature (1)..(25): SEQ ID NO: 513; WAN024DFA; Start 23; Stop 47
tgaagaagaagggagttactggact

SEQ ID NO: 265547 - DNA, 25 bp, Artificial
  probe
  misc_feature (1)..(25): SEQ ID NO: 513; WAN024DFA; Start 190; Stop 214
gttcgtaaactttattgcagctctt

SEQ ID NO: 265548 - DNA, 25 bp, Artificial
  probe
  misc_feature (1)..(25): SEQ ID NO: 513; WAN024DFA; Start 198; Stop 222
actttattgcagctcttcctctaaa

SEQ ID NO: 265549 - DNA, 25 bp, Artificial
  probe
  misc_feature (1)..(25): SEQ ID NO: 513; WAN024DFA; Start 155; Stop 179
attgctatcacacccaatacctatc

SEQ ID NO: 265550 - DNA, 25 bp, Artificial
  probe
  misc_feature (1)..(25): SEQ ID NO: 513; WAN024DFA; Start 154; Stop 178
cattgctatcacacccaatacctat

SEQ ID NO: 265551 - DNA, 25 bp, Artificial
  probe
  misc_feature (1)..(25): SEQ ID NO: 514; WAN0249RM; Start 17; Stop 41
agaaattagtctgtaaacaaggacc

SEQ ID NO: 265552 - DNA, 25 bp, Artificial
  probe
  misc_feature (1)..(25): SEQ ID NO: 514; WAN0249RM; Start 18; Stop 42
gaaattagtctgtaaacaaggacct

SEQ ID NO: 265553 - DNA, 25 bp, Artificial
  probe
  misc_feature (1)..(25): SEQ ID NO: 514; WAN0249RM; Start 181; Stop 205
tgaacaactctattaggaaagtcaa

SEQ ID NO: 265554 - DNA, 25 bp, Artificial
  probe
  misc_feature (1)..(25): SEQ ID NO: 514; WAN0249RM; Start 180; Stop 204
atgaacaactctattaggaaagtca

SEQ ID NO: 265555 - DNA, 25 bp, Artificial
  probe
  misc_feature (1)..(25): SEQ ID NO: 514; WAN0249RM; Start 15; Stop 39
caagaaattagtctgtaaacaagga

SEQ ID NO: 265556 - DNA, 25 bp, Artificial
  probe
  misc_feature (1)..(25): SEQ ID NO: 514; WAN0249RM; Start 14; Stop 38
tcaagaaattagtctgtaaacaagg

SEQ ID NO: 265557 - DNA, 25 bp, Artificial
  probe
  misc_feature (1)..(25): SEQ ID NO: 514; WAN0249RM; Start 110; Stop 134
ccatctgcaacctcaacacactatt

SEQ ID NO: 265558 - DNA, 25 bp, Artificial
  probe
  misc_feature (1)..(25): SEQ ID NO: 514; WAN0249RM; Start 21; Stop 45
attagtctgtaaacaaggacctaaa

SEQ ID NO: 265559 - DNA, 25 bp, Artificial
  probe
  misc_feature (1)..(25): SEQ ID NO: 514; WAN0249RM; Start 20; Stop 44
aattagtctgtaaacaaggacctaa

SEQ ID NO: 265560 - DNA, 25 bp, Artificial
  probe
  misc_feature (1)..(25): SEQ ID NO: 514; WAN0249RM; Start 19; Stop 43
aaattagtctgtaaacaaggaccta

SEQ ID NO: 265561 - DNA, 25 bp, Artificial
  probe
  misc_feature (1)..(25): SEQ ID NO: 514; WAN0249RM; Start 111; Stop 135
catctgcaacctcaacacactattt

SEQ ID NO: 265562 - DNA, 25 bp, Artificial
  probe
  misc_feature (1)..(25): SEQ ID NO: 514; WAN0249RM; Start 182; Stop 206
gaacaactctattaggaaagtcaaa

SEQ ID NO: 265563 - DNA, 25 bp, Artificial
  probe
  misc_feature (1)..(25): SEQ ID NO: 514; WAN0249RM; Start 16; Stop 40
aagaaattagtctgtaaacaaggac

SEQ ID NO: 265564 - DNA, 25 bp, Artificial
  probe
  misc_feature (1)..(25): SEQ ID NO: 514; WAN0249RM; Start 109; Stop 133
tccatctgcaacctcaacacactat

SEQ ID NO: 265565 - DNA, 25 bp, Artificial
  probe
  misc_feature (1)..(25): SEQ ID NO: 514; WAN0249RM; Start 183; Stop 207
aacaactctattaggaaagtcaaat

SEQ ID NO: 265566 - DNA, 25 bp, Artificial
  probe
  misc_feature (1)..(25): SEQ ID NO: 514; WAN0249RM; Start 24; Stop 48
agtctgtaaacaaggacctaaaaca

SEQ ID NO: 265567 - DNA, 25 bp, Artificial
  probe
  misc_feature (1)..(25): SEQ ID NO: 514; WAN0249RM; Start 184; Stop 208
acaactctattaggaaagtcaaatt

SEQ ID NO: 265568 - DNA, 25 bp, Artificial
  probe
  misc_feature (1)..(25): SEQ ID NO: 514; WAN0249RM; Start 25; Stop 49
gtctgtaaacaaggacctaaaacaa

SEQ ID NO: 265569 - DNA, 25 bp, Artificial
  probe
  misc_feature (1)..(25): SEQ ID NO: 514; WAN0249RM; Start 26; Stop 50
tctgtaaacaaggacctaaaacaaa

SEQ ID NO: 265570 - DNA, 25 bp, Artificial
  probe
  misc_feature (1)..(25): SEQ ID NO: 514; WAN0249RM; Start 108; Stop 132
ttccatctgcaacctcaacacacta

SEQ ID NO: 265571 - DNA, 25 bp, Artificial
  probe
  misc_feature (1)..(25): SEQ ID NO: 514; WAN0249RM; Start 222; Stop 246
attttagcagctacagcgtactatt

SEQ ID NO: 265572 - DNA, 25 bp, Artificial
  probe
  misc_feature (1)..(25): SEQ ID NO: 514; WAN0249RM; Start 221; Stop 245
tattttagcagctacagcgtactat

SEQ ID NO: 265573 - DNA, 25 bp, Artificial
  probe
  misc_feature (1)..(25): SEQ ID NO: 514; WAN0249RM; Start 220; Stop 244
atattttagcagctacagcgtacta

SEQ ID NO: 265574 - DNA, 25 bp, Artificial
  probe
  misc_feature (1)..(25): SEQ ID NO: 514; WAN0249RM; Start 219; Stop 243
aatattttagcagctacagcgtact

SEQ ID NO: 265575 - DNA, 25 bp, Artificial
  probe
  misc_feature (1)..(25): SEQ ID NO: 514; WAN0249RM; Start 179; Stop 203
tatgaacaactctattaggaaagtc

SEQ ID NO: 265576 - DNA, 25 bp, Artificial
  probe
  misc_feature (1)..(25): SEQ ID NO: 514; WAN0249RM; Start 23; Stop 47
tagtctgtaaacaaggacctaaaac

SEQ ID NO: 265577 - DNA, 25 bp, Artificial
  probe
  misc_feature (1)..(25): SEQ ID NO: 514; WAN0249RM; Start 27; Stop 51
ctgtaaacaaggacctaaaacaaat

SEQ ID NO: 265578 - DNA, 25 bp, Artificial
  probe
  misc_feature (1)..(25): SEQ ID NO: 514; WAN0249RM; Start 112; Stop 136
atctgcaacctcaacacactatttt

SEQ ID NO: 265579 - DNA, 25 bp, Artificial
  probe
  misc_feature (1)..(25): SEQ ID NO: 514; WAN0249RM; Start 22; Stop 46
ttagtctgtaaacaaggacctaaaa

SEQ ID NO: 265580 - DNA, 25 bp, Artificial
  probe
  misc_feature (1)..(25): SEQ ID NO: 514; WAN0249RM; Start 13; Stop 37
atcaagaaattagtctgtaaacaag

SEQ ID NO: 265581 - DNA, 25 bp, Artificial
  probe
  misc_feature (1)..(25): SEQ ID NO: 514; WAN0249RM; Start 263; Stop 287
atagtttgctctttgattttcattg

SEQ ID NO: 265582 - DNA, 25 bp, Artificial
  probe
  misc_feature (1)..(25): SEQ ID NO: 514; WAN0249RM; Start 178; Stop 202
atatgaacaactctattaggaaagt

SEQ ID NO: 265583 - DNA, 25 bp, Artificial
  probe
  misc_feature (1)..(25): SEQ ID NO: 514; WAN0249RM; Start 113; Stop 137
tctgcaacctcaacacactattttg

SEQ ID NO: 265584 - DNA, 25 bp, Artificial
  probe
  misc_feature (1)..(25): SEQ ID NO: 515; WAN024AFF; Start 28; Stop 52
aattcataagacaaaagaaacttgt

SEQ ID NO: 265585 - DNA, 25 bp, Artificial
  probe
  misc_feature (1)..(25): SEQ ID NO: 516; WAN0249FV; Start 33; Stop 57
tccgagaaattatagccattgacat

SEQ ID NO: 265586 - DNA, 25 bp, Artificial
  probe
  misc_feature (1)..(25): SEQ ID NO: 516; WAN0249FV; Start 34; Stop 58
ccgagaaattatagccattgacatt

SEQ ID NO: 265587 - DNA, 25 bp, Artificial
  probe
  misc_feature (1)..(25): SEQ ID NO: 516; WAN0249FV; Start 32; Stop 56
ttccgagaaattatagccattgaca

SEQ ID NO: 265588 - DNA, 25 bp, Artificial
  probe
  misc_feature (1)..(25): SEQ ID NO: 516; WAN0249FV; Start 40; Stop 64
aattatagccattgacattacctag

SEQ ID NO: 265589 - DNA, 25 bp, Artificial
  probe
  misc_feature (1)..(25): SEQ ID NO: 516; WAN0249FV; Start 35; Stop 59
cgagaaattatagccattgacatta

SEQ ID NO: 265590 - DNA, 25 bp, Artificial
  probe
  misc_feature (1)..(25): SEQ ID NO: 516; WAN0249FV; Start 38; Stop 62
gaaattatagccattgacattacct

SEQ ID NO: 265591 - DNA, 25 bp, Artificial
  probe
  misc_feature (1)..(25): SEQ ID NO: 516; WAN0249FV; Start 37; Stop 61
agaaattatagccattgacattacc

SEQ ID NO: 265592 - DNA, 25 bp, Artificial
  probe
  misc_feature (1)..(25): SEQ ID NO: 516; WAN0249FV; Start 31; Stop 55
tttccgagaaattatagccattgac

SEQ ID NO: 265593 - DNA, 25 bp, Artificial
  probe
  misc_feature (1)..(25): SEQ ID NO: 516; WAN0249FV; Start 52; Stop 76
tgacattacctaggaattgcgttat

SEQ ID NO: 265594 - DNA, 25 bp, Artificial
  probe
  misc_feature (1)..(25): SEQ ID NO: 516; WAN0249FV; Start 51; Stop 75
ttgacattacctaggaattgcgtta

SEQ ID NO: 265595 - DNA, 25 bp, Artificial
  probe
  misc_feature (1)..(25): SEQ ID NO: 516; WAN0249FV; Start 45; Stop 69
tagccattgacattacctaggaatt

SEQ ID NO: 265596 - DNA, 25 bp, Artificial
  probe
  misc_feature (1)..(25): SEQ ID NO: 516; WAN0249FV; Start 44; Stop 68
atagccattgacattacctaggaat

SEQ ID NO: 265597 - DNA, 25 bp, Artificial
  probe
  misc_feature (1)..(25): SEQ ID NO: 516; WAN0249FV; Start 50; Stop 74
attgacattacctaggaattgcgtt

SEQ ID NO: 265598 - DNA, 25 bp, Artificial
  probe
  misc_feature (1)..(25): SEQ ID NO: 516; WAN0249FV; Start 46; Stop 70
agccattgacattacctaggaattg

SEQ ID NO: 265599 - DNA, 25 bp, Artificial
  probe
  misc_feature (1)..(25): SEQ ID NO: 516; WAN0249FV; Start 43; Stop 67
tatagccattgacattacctaggaa

SEQ ID NO: 265600 - DNA, 25 bp, Artificial
  probe
  misc_feature (1)..(25): SEQ ID NO: 516; WAN0249FV; Start 42; Stop 66
ttatagccattgacattacctagga

SEQ ID NO: 265601 - DNA, 25 bp, Artificial
  probe
  misc_feature (1)..(25): SEQ ID NO: 516; WAN0249FV; Start 49; Stop 73
cattgacattacctaggaattgcgt

SEQ ID NO: 265602 - DNA, 25 bp, Artificial
  probe
  misc_feature (1)..(25): SEQ ID NO: 516; WAN0249FV; Start 53; Stop 77
gacattacctaggaattgcgttata

SEQ ID NO: 265603 - DNA, 25 bp, Artificial
  probe
  misc_feature (1)..(25): SEQ ID NO: 516; WAN0249FV; Start 36; Stop 60
gagaaattatagccattgacattac

SEQ ID NO: 265604 - DNA, 25 bp, Artificial
  probe
  misc_feature (1)..(25): SEQ ID NO: 516; WAN0249FV; Start 54; Stop 78
acattacctaggaattgcgttataa

SEQ ID NO: 265605 - DNA, 25 bp, Artificial
  probe
  misc_feature (1)..(25): SEQ ID NO: 516; WAN0249FV; Start 48; Stop 72
ccattgacattacctaggaattgcg

SEQ ID NO: 265606 - DNA, 25 bp, Artificial
  probe
  misc_feature (1)..(25): SEQ ID NO: 516; WAN0249FV; Start 41; Stop 65
attatagccattgacattacctagg

SEQ ID NO: 265607 - DNA, 25 bp, Artificial
  probe
  misc_feature (1)..(25): SEQ ID NO: 516; WAN0249FV; Start 47; Stop 71
gccattgacattacctaggaattgc

SEQ ID NO: 265608 - DNA, 25 bp, Artificial
  probe
  misc_feature (1)..(25): SEQ ID NO: 516; WAN0249FV; Start 39; Stop 63
aaattatagccattgacattaccta

SEQ ID NO: 265609 - DNA, 25 bp, Artificial
  probe
  misc_feature (1)..(25): SEQ ID NO: 516; WAN0249FV; Start 30; Stop 54
ttttccgagaaattatagccattga

SEQ ID NO: 265610 - DNA, 25 bp, Artificial
  probe
  misc_feature (1)..(25): SEQ ID NO: 516; WAN0249FV; Start 29; Stop 53
attttccgagaaattatagccattg

SEQ ID NO: 265611 - DNA, 25 bp, Artificial
  probe
  misc_feature (1)..(25): SEQ ID NO: 516; WAN0249FV; Start 97; Stop 121
ccaaaatggtgccaagtcaaaattt

SEQ ID NO: 265612 - DNA, 25 bp, Artificial
  probe
  misc_feature (1)..(25): SEQ ID NO: 516; WAN0249FV; Start 96; Stop 120
cccaaaatggtgccaagtcaaaatt

SEQ ID NO: 265613 - DNA, 25 bp, Artificial
  probe
  misc_feature (1)..(25): SEQ ID NO: 516; WAN0249FV; Start 94; Stop 118
tacccaaaatggtgccaagtcaaaa

SEQ ID NO: 265614 - DNA, 25 bp, Artificial
  probe
  misc_feature (1)..(25): SEQ ID NO: 516; WAN0249FV; Start 28; Stop 52
tattttccgagaaattatagccatt

SEQ ID NO: 265615 - DNA, 25 bp, Artificial
  probe
  misc_feature (1)..(25): SEQ ID NO: 516; WAN0249FV; Start 27; Stop 51
ttattttccgagaaattatagccat

SEQ ID NO: 265616 - DNA, 25 bp, Artificial
  probe
  misc_feature (1)..(25): SEQ ID NO: 516; WAN0249FV; Start 26; Stop 50
attattttccgagaaattatagcca

SEQ ID NO: 265617 - DNA, 25 bp, Artificial
  probe
  misc_feature (1)..(25): SEQ ID NO: 516; WAN0249FV; Start 95; Stop 119
acccaaaatggtgccaagtcaaaat

SEQ ID NO: 265618 - DNA, 25 bp, Artificial
  probe
  misc_feature (1)..(25): SEQ ID NO: 517; WAN024AMI; Start 45; Stop 69
ccttaggctcaaagtttagtcaaag

SEQ ID NO: 265619 - DNA, 25 bp, Artificial
  probe
  misc_feature (1)..(25): SEQ ID NO: 517; WAN024AMI; Start 44; Stop 68
accttaggctcaaagtttagtcaaa

SEQ ID NO: 265620 - DNA, 25 bp, Artificial
  probe
  misc_feature (1)..(25): SEQ ID NO: 517; WAN024AMI; Start 46; Stop 70
cttaggctcaaagtttagtcaaaga

SEQ ID NO: 265621 - DNA, 25 bp, Artificial
  probe
  misc_feature (1)..(25): SEQ ID NO: 517; WAN024AMI; Start 49; Stop 73
aggctcaaagtttagtcaaagagat

SEQ ID NO: 265622 - DNA, 25 bp, Artificial
  probe
  misc_feature (1)..(25): SEQ ID NO: 517; WAN024AMI; Start 48; Stop 72
taggctcaaagtttagtcaaagaga

SEQ ID NO: 265623 - DNA, 25 bp, Artificial
  probe
  misc_feature (1)..(25): SEQ ID NO: 517; WAN024AMI; Start 50; Stop 74
ggctcaaagtttagtcaaagagatt

SEQ ID NO: 265624 - DNA, 25 bp, Artificial
  probe
  misc_feature (1)..(25): SEQ ID NO: 517; WAN024AMI; Start 47; Stop 71
ttaggctcaaagtttagtcaaagag

SEQ ID NO: 265625 - DNA, 25 bp, Artificial
  probe
  misc_feature (1)..(25): SEQ ID NO: 517; WAN024AMI; Start 51; Stop 75
gctcaaagtttagtcaaagagattg

SEQ ID NO: 265626 - DNA, 25 bp, Artificial
  probe
  misc_feature (1)..(25): SEQ ID NO: 517; WAN024AMI; Start 43; Stop 67
gaccttaggctcaaagtttagtcaa

SEQ ID NO: 265627 - DNA, 25 bp, Artificial
  probe
  misc_feature (1)..(25): SEQ ID NO: 517; WAN024AMI; Start 41; Stop 65
gagaccttaggctcaaagtttagtc

SEQ ID NO: 265628 - DNA, 25 bp, Artificial
  probe
  misc_feature (1)..(25): SEQ ID NO: 517; WAN024AMI; Start 42; Stop 66
agaccttaggctcaaagtttagtca

SEQ ID NO: 265629 - DNA, 25 bp, Artificial
  probe
  misc_feature (1)..(25): SEQ ID NO: 517; WAN024AMI; Start 52; Stop 76
ctcaaagtttagtcaaagagattga

SEQ ID NO: 265630 - DNA, 25 bp, Artificial
  probe
  misc_feature (1)..(25): SEQ ID NO: 517; WAN024AMI; Start 40; Stop 64
tgagaccttaggctcaaagtttagt

SEQ ID NO: 265631 - DNA, 25 bp, Artificial
  probe
  misc_feature (1)..(25): SEQ ID NO: 517; WAN024AMI; Start 31; Stop 55
cgcaaattttgagaccttaggctca

SEQ ID NO: 265632 - DNA, 25 bp, Artificial
  probe
  misc_feature (1)..(25): SEQ ID NO: 517; WAN024AMI; Start 30; Stop 54
gcgcaaattttgagaccttaggctc

SEQ ID NO: 265633 - DNA, 25 bp, Artificial
  probe
  misc_feature (1)..(25): SEQ ID NO: 518; WAN0249V6; Start 54; Stop 78
caaaatggggattcttccttgaaaa

SEQ ID NO: 265634 - DNA, 25 bp, Artificial
  probe
  misc_feature (1)..(25): SEQ ID NO: 518; WAN0249V6; Start 50; Stop 74
ttttcaaaatggggattcttccttg

SEQ ID NO: 265635 - DNA, 25 bp, Artificial
  probe
  misc_feature (1)..(25): SEQ ID NO: 518; WAN0249V6; Start 49; Stop 73
cttttcaaaatggggattcttcctt

SEQ ID NO: 265636 - DNA, 25 bp, Artificial
  probe
  misc_feature (1)..(25): SEQ ID NO: 518; WAN0249V6; Start 46; Stop 70
ttccttttcaaaatggggattcttc

SEQ ID NO: 265637 - DNA, 25 bp, Artificial
  probe
  misc_feature (1)..(25): SEQ ID NO: 518; WAN0249V6; Start 45; Stop 69
tttccttttcaaaatggggattctt

SEQ ID NO: 265638 - DNA, 25 bp, Artificial
  probe
  misc_feature (1)..(25): SEQ ID NO: 518; WAN0249V6; Start 44; Stop 68
ttttccttttcaaaatggggattct

SEQ ID NO: 265639 - DNA, 25 bp, Artificial
  probe
  misc_feature (1)..(25): SEQ ID NO: 518; WAN0249V6; Start 55; Stop 79
aaaatggggattcttccttgaaaat

SEQ ID NO: 265640 - DNA, 25 bp, Artificial
  probe
  misc_feature (1)..(25): SEQ ID NO: 518; WAN0249V6; Start 60; Stop 84
ggggattcttccttgaaaataatca

SEQ ID NO: 265641 - DNA, 25 bp, Artificial
  probe
  misc_feature (1)..(25): SEQ ID NO: 518; WAN0249V6; Start 59; Stop 83
tggggattcttccttgaaaataatc

SEQ ID NO: 265642 - DNA, 25 bp, Artificial
  probe
  misc_feature (1)..(25): SEQ ID NO: 518; WAN0249V6; Start 57; Stop 81
aatggggattcttccttgaaaataa

SEQ ID NO: 265643 - DNA, 25 bp, Artificial
  probe
  misc_feature (1)..(25): SEQ ID NO: 518; WAN0249V6; Start 56; Stop 80
aaatggggattcttccttgaaaata

SEQ ID NO: 265644 - DNA, 25 bp, Artificial
  probe
  misc_feature (1)..(25): SEQ ID NO: 518; WAN0249V6; Start 48; Stop 72
ccttttcaaaatggggattcttcct

SEQ ID NO: 265645 - DNA, 25 bp, Artificial
  probe
  misc_feature (1)..(25): SEQ ID NO: 518; WAN0249V6; Start 47; Stop 71
tccttttcaaaatggggattcttcc

SEQ ID NO: 265646 - DNA, 25 bp, Artificial
  probe
  misc_feature (1)..(25): SEQ ID NO: 518; WAN0249V6; Start 58; Stop 82
atggggattcttccttgaaaataat

SEQ ID NO: 265647 - DNA, 25 bp, Artificial
  probe
  misc_feature (1)..(25): SEQ ID NO: 518; WAN0249V6; Start 70; Stop 94
ccttgaaaataatcagtaattgtgc

SEQ ID NO: 265648 - DNA, 25 bp, Artificial
  probe
  misc_feature (1)..(25): SEQ ID NO: 518; WAN0249V6; Start 90; Stop 114
tgtgctaaaattaaaggaacattct

SEQ ID NO: 265649 - DNA, 25 bp, Artificial
  probe
  misc_feature (1)..(25): SEQ ID NO: 518; WAN0249V6; Start 61; Stop 85
gggattcttccttgaaaataatcag

SEQ ID NO: 265650 - DNA, 25 bp, Artificial
  probe
  misc_feature (1)..(25): SEQ ID NO: 518; WAN0249V6; Start 53; Stop 77
tcaaaatggggattcttccttgaaa

SEQ ID NO: 265651 - DNA, 25 bp, Artificial
  probe
  misc_feature (1)..(25): SEQ ID NO: 518; WAN0249V6; Start 51; Stop 75
tttcaaaatggggattcttccttga

SEQ ID NO: 265652 - DNA, 25 bp, Artificial
  probe
  misc_feature (1)..(25): SEQ ID NO: 518; WAN0249V6; Start 89; Stop 113
ttgtgctaaaattaaaggaacattc

SEQ ID NO: 265653 - DNA, 25 bp, Artificial
  probe
  misc_feature (1)..(25): SEQ ID NO: 518; WAN0249V6; Start 62; Stop 86
ggattcttccttgaaaataatcagt

SEQ ID NO: 265654 - DNA, 25 bp, Artificial
  probe
  misc_feature (1)..(25): SEQ ID NO: 518; WAN0249V6; Start 71; Stop 95
cttgaaaataatcagtaattgtgct

SEQ ID NO: 265655 - DNA, 25 bp, Artificial
  probe
  misc_feature (1)..(25): SEQ ID NO: 518; WAN0249V6; Start 103; Stop 127
aaggaacattctaaaatattcggaa

SEQ ID NO: 265656 - DNA, 25 bp, Artificial
  probe
  misc_feature (1)..(25): SEQ ID NO: 518; WAN0249V6; Start 102; Stop 126
aaaggaacattctaaaatattcgga

SEQ ID NO: 265657 - DNA, 25 bp, Artificial
  probe
  misc_feature (1)..(25): SEQ ID NO: 518; WAN0249V6; Start 91; Stop 115
gtgctaaaattaaaggaacattcta

SEQ ID NO: 265658 - DNA, 25 bp, Artificial
  probe
  misc_feature (1)..(25): SEQ ID NO: 518; WAN0249V6; Start 88; Stop 112
attgtgctaaaattaaaggaacatt

SEQ ID NO: 265659 - DNA, 25 bp, Artificial
  probe
  misc_feature (1)..(25): SEQ ID NO: 518; WAN0249V6; Start 87; Stop 111
aattgtgctaaaattaaaggaacat

SEQ ID NO: 265660 - DNA, 25 bp, Artificial
  probe
  misc_feature (1)..(25): SEQ ID NO: 518; WAN0249V6; Start 69; Stop 93
tccttgaaaataatcagtaattgtg

SEQ ID NO: 265661 - DNA, 25 bp, Artificial
  probe
  misc_feature (1)..(25): SEQ ID NO: 518; WAN0249V6; Start 104; Stop 128
aggaacattctaaaatattcggaat

SEQ ID NO: 265662 - DNA, 25 bp, Artificial
  probe
  misc_feature (1)..(25): SEQ ID NO: 518; WAN0249V6; Start 92; Stop 116
tgctaaaattaaaggaacattctaa

SEQ ID NO: 265663 - DNA, 25 bp, Artificial
  probe
  misc_feature (1)..(25): SEQ ID NO: 518; WAN0249V6; Start 73; Stop 97
tgaaaataatcagtaattgtgctaa

SEQ ID NO: 265664 - DNA, 25 bp, Artificial
  probe
  misc_feature (1)..(25): SEQ ID NO: 518; WAN0249V6; Start 72; Stop 96
ttgaaaataatcagtaattgtgcta

SEQ ID NO: 265665 - DNA, 25 bp, Artificial
  probe
  misc_feature (1)..(25): SEQ ID NO: 518; WAN0249V6; Start 83; Stop 107
cagtaattgtgctaaaattaaagga

SEQ ID NO: 265666 - DNA, 25 bp, Artificial
  probe
  misc_feature (1)..(25): SEQ ID NO: 519; WAN024AB2; Start 398; Stop 422
agcgtaataacctatccgtcaagat

SEQ ID NO: 265667 - DNA, 25 bp, Artificial
  probe
  misc_feature (1)..(25): SEQ ID NO: 519; WAN024AB2; Start 397; Stop 421
gagcgtaataacctatccgtcaaga

SEQ ID NO: 265668 - DNA, 25 bp, Artificial
  probe
  misc_feature (1)..(25): SEQ ID NO: 519; WAN024AB2; Start 399; Stop 423
gcgtaataacctatccgtcaagatc

SEQ ID NO: 265669 - DNA, 25 bp, Artificial
  probe
  misc_feature (1)..(25): SEQ ID NO: 519; WAN024AB2; Start 363; Stop 387
tgaatagaccaagacaagacgttaa

SEQ ID NO: 265670 - DNA, 25 bp, Artificial
  probe
  misc_feature (1)..(25): SEQ ID NO: 519; WAN024AB2; Start 471; Stop 495
agtgagcgataagtaagagtttgaa

SEQ ID NO: 265671 - DNA, 25 bp, Artificial
  probe
  misc_feature (1)..(25): SEQ ID NO: 519; WAN024AB2; Start 470; Stop 494
aagtgagcgataagtaagagtttga

SEQ ID NO: 265672 - DNA, 25 bp, Artificial
  probe
  misc_feature (1)..(25): SEQ ID NO: 519; WAN024AB2; Start 467; Stop 491
agaaagtgagcgataagtaagagtt

SEQ ID NO: 265673 - DNA, 25 bp, Artificial
  probe
  misc_feature (1)..(25): SEQ ID NO: 519; WAN024AB2; Start 466; Stop 490
aagaaagtgagcgataagtaagagt

SEQ ID NO: 265674 - DNA, 25 bp, Artificial
  probe
  misc_feature (1)..(25): SEQ ID NO: 519; WAN024AB2; Start 487; Stop 511
gagtttgaatatagggagggatacc

SEQ ID NO: 265675 - DNA, 25 bp, Artificial
  probe
  misc_feature (1)..(25): SEQ ID NO: 519; WAN024AB2; Start 469; Stop 493
aaagtgagcgataagtaagagtttg

SEQ ID NO: 265676 - DNA, 25 bp, Artificial
  probe
  misc_feature (1)..(25): SEQ ID NO: 519; WAN024AB2; Start 44; Stop 68
aaaggtatcaaagtatgccagagat

SEQ ID NO: 265677 - DNA, 25 bp, Artificial
  probe
  misc_feature (1)..(25): SEQ ID NO: 519; WAN024AB2; Start 472; Stop 496
gtgagcgataagtaagagtttgaat

SEQ ID NO: 265678 - DNA, 25 bp, Artificial
  probe
  misc_feature (1)..(25): SEQ ID NO: 519; WAN024AB2; Start 468; Stop 492
gaaagtgagcgataagtaagagttt

SEQ ID NO: 265679 - DNA, 25 bp, Artificial
  probe
  misc_feature (1)..(25): SEQ ID NO: 519; WAN024AB2; Start 364; Stop 388
gaatagaccaagacaagacgttaat

SEQ ID NO: 265680 - DNA, 25 bp, Artificial
  probe
  misc_feature (1)..(25): SEQ ID NO: 519; WAN024AB2; Start 483; Stop 507
gtaagagtttgaatatagggaggga

SEQ ID NO: 265681 - DNA, 25 bp, Artificial
  probe
  misc_feature (1)..(25): SEQ ID NO: 519; WAN024AB2; Start 482; Stop 506
agtaagagtttgaatatagggaggg

SEQ ID NO: 265682 - DNA, 25 bp, Artificial
  probe
  misc_feature (1)..(25): SEQ ID NO: 519; WAN024AB2; Start 362; Stop 386
ttgaatagaccaagacaagacgtta

SEQ ID NO: 265683 - DNA, 25 bp, Artificial
  probe
  misc_feature (1)..(25): SEQ ID NO: 519; WAN024AB2; Start 465; Stop 489
aaagaaagtgagcgataagtaagag

SEQ ID NO: 265684 - DNA, 25 bp, Artificial
  probe
  misc_feature (1)..(25): SEQ ID NO: 519; WAN024AB2; Start 361; Stop 385
attgaatagaccaagacaagacgtt

SEQ ID NO: 265685 - DNA, 25 bp, Artificial
  probe
  misc_feature (1)..(25): SEQ ID NO: 519; WAN024AB2; Start 360; Stop 384
aattgaatagaccaagacaagacgt

SEQ ID NO: 265686 - DNA, 25 bp, Artificial
  probe
  misc_feature (1)..(25): SEQ ID NO: 519; WAN024AB2; Start 486; Stop 510
agagtttgaatatagggagggatac

SEQ ID NO: 265687 - DNA, 25 bp, Artificial
  probe
  misc_feature (1)..(25): SEQ ID NO: 519; WAN024AB2; Start 368; Stop 392
agaccaagacaagacgttaattatt

SEQ ID NO: 265688 - DNA, 25 bp, Artificial
  probe
  misc_feature (1)..(25): SEQ ID NO: 519; WAN024AB2; Start 365; Stop 389
aatagaccaagacaagacgttaatt

SEQ ID NO: 265689 - DNA, 25 bp, Artificial
  probe
  misc_feature (1)..(25): SEQ ID NO: 519; WAN024AB2; Start 485; Stop 509
aagagtttgaatatagggagggata

SEQ ID NO: 265690 - DNA, 25 bp, Artificial
  probe
  misc_feature (1)..(25): SEQ ID NO: 519; WAN024AB2; Start 484; Stop 508
taagagtttgaatatagggagggat

SEQ ID NO: 265691 - DNA, 25 bp, Artificial
  probe
  misc_feature (1)..(25): SEQ ID NO: 519; WAN024AB2; Start 473; Stop 497
tgagcgataagtaagagtttgaata

SEQ ID NO: 265692 - DNA, 25 bp, Artificial
  probe
  misc_feature (1)..(25): SEQ ID NO: 519; WAN024AB2; Start 46; Stop 70
aggtatcaaagtatgccagagataa

SEQ ID NO: 265693 - DNA, 25 bp, Artificial
  probe
  misc_feature (1)..(25): SEQ ID NO: 519; WAN024AB2; Start 45; Stop 69
aaggtatcaaagtatgccagagata

SEQ ID NO: 265694 - DNA, 25 bp, Artificial
  probe
  misc_feature (1)..(25): SEQ ID NO: 519; WAN024AB2; Start 367; Stop 391
tagaccaagacaagacgttaattat

SEQ ID NO: 265695 - DNA, 25 bp, Artificial
  probe
  misc_feature (1)..(25): SEQ ID NO: 519; WAN024AB2; Start 366; Stop 390
atagaccaagacaagacgttaatta

SEQ ID NO: 265696 - DNA, 25 bp, Artificial
  probe
  misc_feature (1)..(25): SEQ ID NO: 519; WAN024AB2; Start 5; Stop 29
aaagaggtggaaaggcactattaaa

SEQ ID NO: 265697 - DNA, 25 bp, Artificial
  probe
  misc_feature (1)..(25): SEQ ID NO: 519; WAN024AB2; Start 400; Stop 424
cgtaataacctatccgtcaagatct

SEQ ID NO: 265698 - DNA, 25 bp, Artificial
  probe
  misc_feature (1)..(25): SEQ ID NO: 519; WAN024AB2; Start 6; Stop 30
aagaggtggaaaggcactattaaag

SEQ ID NO: 265699 - DNA, 25 bp, Artificial
  probe
  misc_feature (1)..(25): SEQ ID NO: 520; WAN024A3Z; Start 4; Stop 28
aaaatcaccatccccagatacatag

SEQ ID NO: 265700 - DNA, 25 bp, Artificial
  probe
  misc_feature (1)..(25): SEQ ID NO: 520; WAN024A3Z; Start 5; Stop 29
aaatcaccatccccagatacatagt

SEQ ID NO: 265701 - DNA, 25 bp, Artificial
  probe
  misc_feature (1)..(25): SEQ ID NO: 520; WAN024A3Z; Start 6; Stop 30
aatcaccatccccagatacatagtc

SEQ ID NO: 265702 - DNA, 25 bp, Artificial
  probe
  misc_feature (1)..(25): SEQ ID NO: 520; WAN024A3Z; Start 7; Stop 31
atcaccatccccagatacatagtcc

SEQ ID NO: 265703 - DNA, 25 bp, Artificial
  probe
  misc_feature (1)..(25): SEQ ID NO: 520; WAN024A3Z; Start 10; Stop 34
accatccccagatacatagtccgtc

SEQ ID NO: 265704 - DNA, 25 bp, Artificial
  probe
  misc_feature (1)..(25): SEQ ID NO: 520; WAN024A3Z; Start 8; Stop 32
tcaccatccccagatacatagtccg

SEQ ID NO: 265705 - DNA, 25 bp, Artificial
  probe
  misc_feature (1)..(25): SEQ ID NO: 522; WAN0249DR; Start 34; Stop 58
tgagttttctatcattctacgaggt

SEQ ID NO: 265706 - DNA, 25 bp, Artificial
  probe
  misc_feature (1)..(25): SEQ ID NO: 522; WAN0249DR; Start 33; Stop 57
ctgagttttctatcattctacgagg

SEQ ID NO: 265707 - DNA, 25 bp, Artificial
  probe
  misc_feature (1)..(25): SEQ ID NO: 522; WAN0249DR; Start 35; Stop 59
gagttttctatcattctacgaggta

SEQ ID NO: 265708 - DNA, 25 bp, Artificial
  probe
  misc_feature (1)..(25): SEQ ID NO: 522; WAN0249DR; Start 32; Stop 56
actgagttttctatcattctacgag

SEQ ID NO: 265709 - DNA, 25 bp, Artificial
  probe
  misc_feature (1)..(25): SEQ ID NO: 522; WAN0249DR; Start 27; Stop 51
aaccaactgagttttctatcattct

SEQ ID NO: 265710 - DNA, 25 bp, Artificial
  probe
  misc_feature (1)..(25): SEQ ID NO: 522; WAN0249DR; Start 36; Stop 60
agttttctatcattctacgaggtaa

SEQ ID NO: 265711 - DNA, 25 bp, Artificial
  probe
  misc_feature (1)..(25): SEQ ID NO: 522; WAN0249DR; Start 37; Stop 61
gttttctatcattctacgaggtaac

SEQ ID NO: 265712 - DNA, 25 bp, Artificial
  probe
  misc_feature (1)..(25): SEQ ID NO: 522; WAN0249DR; Start 30; Stop 54
caactgagttttctatcattctacg

SEQ ID NO: 265713 - DNA, 25 bp, Artificial
  probe
  misc_feature (1)..(25): SEQ ID NO: 522; WAN0249DR; Start 31; Stop 55
aactgagttttctatcattctacga

SEQ ID NO: 265714 - DNA, 25 bp, Artificial
  probe
  misc_feature (1)..(25): SEQ ID NO: 522; WAN0249DR; Start 28; Stop 52
accaactgagttttctatcattcta

SEQ ID NO: 265715 - DNA, 25 bp, Artificial
  probe
  misc_feature (1)..(25): SEQ ID NO: 522; WAN0249DR; Start 29; Stop 53
ccaactgagttttctatcattctac

SEQ ID NO: 265716 - DNA, 25 bp, Artificial
  probe
  misc_feature (1)..(25): SEQ ID NO: 522; WAN0249DR; Start 26; Stop 50
taaccaactgagttttctatcattc

SEQ ID NO: 265717 - DNA, 25 bp, Artificial
  probe
  misc_feature (1)..(25): SEQ ID NO: 522; WAN0249DR; Start 4; Stop 28
aaacttcaaaactcagttgggttaa

SEQ ID NO: 265718 - DNA, 25 bp, Artificial
  probe
  misc_feature (1)..(25): SEQ ID NO: 522; WAN0249DR; Start 3; Stop 27
aaaacttcaaaactcagttgggtta

SEQ ID NO: 265719 - DNA, 25 bp, Artificial
  probe
  misc_feature (1)..(25): SEQ ID NO: 522; WAN0249DR; Start 2; Stop 26
taaaacttcaaaactcagttgggtt

SEQ ID NO: 265720 - DNA, 25 bp, Artificial
  probe
  misc_feature (1)..(25): SEQ ID NO: 522; WAN0249DR; Start 1; Stop 25
ataaaacttcaaaactcagttgggt

SEQ ID NO: 265721 - DNA, 25 bp, Artificial
  probe
  misc_feature (1)..(25): SEQ ID NO: 522; WAN0249DR; Start 25; Stop 49
ttaaccaactgagttttctatcatt

SEQ ID NO: 265722 - DNA, 25 bp, Artificial
  probe
  misc_feature (1)..(25): SEQ ID NO: 522; WAN0249DR; Start 24; Stop 48
gttaaccaactgagttttctatcat

SEQ ID NO: 265723 - DNA, 25 bp, Artificial
  probe
  misc_feature (1)..(25): SEQ ID NO: 522; WAN0249DR; Start 5; Stop 29
aacttcaaaactcagttgggttaac

SEQ ID NO: 265724 - DNA, 25 bp, Artificial
  probe
  misc_feature (1)..(25): SEQ ID NO: 523; WAN024ARG; Start 15; Stop 39
ccatatttgtacccttgcatcattc

SEQ ID NO: 265725 - DNA, 25 bp, Artificial
  probe
  misc_feature (1)..(25): SEQ ID NO: 523; WAN024ARG; Start 16; Stop 40
catatttgtacccttgcatcattct

SEQ ID NO: 265726 - DNA, 25 bp, Artificial
  probe
  misc_feature (1)..(25): SEQ ID NO: 523; WAN024ARG; Start 14; Stop 38
accatatttgtacccttgcatcatt

SEQ ID NO: 265727 - DNA, 25 bp, Artificial
  probe
  misc_feature (1)..(25): SEQ ID NO: 523; WAN024ARG; Start 18; Stop 42
tatttgtacccttgcatcattcttt

SEQ ID NO: 265728 - DNA, 25 bp, Artificial
  probe
  misc_feature (1)..(25): SEQ ID NO: 523; WAN024ARG; Start 17; Stop 41
atatttgtacccttgcatcattctt

SEQ ID NO: 265729 - DNA, 25 bp, Artificial
  probe
  misc_feature (1)..(25): SEQ ID NO: 523; WAN024ARG; Start 13; Stop 37
caccatatttgtacccttgcatcat

SEQ ID NO: 265730 - DNA, 25 bp, Artificial
  probe
  misc_feature (1)..(25): SEQ ID NO: 523; WAN024ARG; Start 1; Stop 25
ataaaagaagggcaccatatttgta

SEQ ID NO: 265731 - DNA, 25 bp, Artificial
  probe
  misc_feature (1)..(25): SEQ ID NO: 523; WAN024ARG; Start 2; Stop 26
taaaagaagggcaccatatttgtac

SEQ ID NO: 265732 - DNA, 25 bp, Artificial
  probe
  misc_feature (1)..(25): SEQ ID NO: 523; WAN024ARG; Start 3; Stop 27
aaaagaagggcaccatatttgtacc

SEQ ID NO: 265733 - DNA, 25 bp, Artificial
  probe
  misc_feature (1)..(25): SEQ ID NO: 523; WAN024ARG; Start 19; Stop 43
atttgtacccttgcatcattctttt

SEQ ID NO: 265734 - DNA, 25 bp, Artificial
  probe
  misc_feature (1)..(25): SEQ ID NO: 523; WAN024ARG; Start 20; Stop 44
tttgtacccttgcatcattcttttg

SEQ ID NO: 265735 - DNA, 25 bp, Artificial
  probe
  misc_feature (1)..(25): SEQ ID NO: 523; WAN024ARG; Start 23; Stop 47
gtacccttgcatcattcttttgaaa

SEQ ID NO: 265736 - DNA, 25 bp, Artificial
  probe
  misc_feature (1)..(25): SEQ ID NO: 523; WAN024ARG; Start 24; Stop 48
tacccttgcatcattcttttgaaaa

SEQ ID NO: 265737 - DNA, 25 bp, Artificial
  probe
  misc_feature (1)..(25): SEQ ID NO: 523; WAN024ARG; Start 22; Stop 46
tgtacccttgcatcattcttttgaa

SEQ ID NO: 265738 - DNA, 25 bp, Artificial
  probe
  misc_feature (1)..(25): SEQ ID NO: 523; WAN024ARG; Start 21; Stop 45
ttgtacccttgcatcattcttttga

SEQ ID NO: 265739 - DNA, 25 bp, Artificial
  probe
  misc_feature (1)..(25): SEQ ID NO: 523; WAN024ARG; Start 4; Stop 28
aaagaagggcaccatatttgtaccc

SEQ ID NO: 265740 - DNA, 25 bp, Artificial
  probe
  misc_feature (1)..(25): SEQ ID NO: 523; WAN024ARG; Start 12; Stop 36
gcaccatatttgtacccttgcatca

SEQ ID NO: 265741 - DNA, 25 bp, Artificial
  probe
  misc_feature (1)..(25): SEQ ID NO: 523; WAN024ARG; Start 11; Stop 35
ggcaccatatttgtacccttgcatc

SEQ ID NO: 265742 - DNA, 25 bp, Artificial
  probe
  misc_feature (1)..(25): SEQ ID NO: 524; WAN024ADC; Start 30; Stop 54
cttctcgccttgtgacattaagttg

SEQ ID NO: 265743 - DNA, 25 bp, Artificial
  probe
  misc_feature (1)..(25): SEQ ID NO: 524; WAN024ADC; Start 29; Stop 53
gcttctcgccttgtgacattaagtt

SEQ ID NO: 265744 - DNA, 25 bp, Artificial
  probe
  misc_feature (1)..(25): SEQ ID NO: 524; WAN024ADC; Start 31; Stop 55
ttctcgccttgtgacattaagttgc

SEQ ID NO: 265745 - DNA, 25 bp, Artificial
  probe
  misc_feature (1)..(25): SEQ ID NO: 524; WAN024ADC; Start 3; Stop 27
aaaagttgagaaaagcagaagtgag

SEQ ID NO: 265746 - DNA, 25 bp, Artificial
  probe
  misc_feature (1)..(25): SEQ ID NO: 524; WAN024ADC; Start 4; Stop 28
aaagttgagaaaagcagaagtgaga

SEQ ID NO: 265747 - DNA, 25 bp, Artificial
  probe
  misc_feature (1)..(25): SEQ ID NO: 524; WAN024ADC; Start 2; Stop 26
taaaagttgagaaaagcagaagtga

SEQ ID NO: 265748 - DNA, 25 bp, Artificial
  probe
  misc_feature (1)..(25): SEQ ID NO: 524; WAN024ADC; Start 5; Stop 29
aagttgagaaaagcagaagtgagag

SEQ ID NO: 265749 - DNA, 25 bp, Artificial
  probe
  misc_feature (1)..(25): SEQ ID NO: 524; WAN024ADC; Start 1; Stop 25
ataaaagttgagaaaagcagaagtg

SEQ ID NO: 265750 - DNA, 25 bp, Artificial
  probe
  misc_feature (1)..(25): SEQ ID NO: 524; WAN024ADC; Start 27; Stop 51
gagcttctcgccttgtgacattaag

SEQ ID NO: 265751 - DNA, 25 bp, Artificial
  probe
  misc_feature (1)..(25): SEQ ID NO: 524; WAN024ADC; Start 26; Stop 50
agagcttctcgccttgtgacattaa

SEQ ID NO: 265752 - DNA, 25 bp, Artificial
  probe
  misc_feature (1)..(25): SEQ ID NO: 524; WAN024ADC; Start 28; Stop 52
agcttctcgccttgtgacattaagt

SEQ ID NO: 265753 - DNA, 25 bp, Artificial
  probe
  misc_feature (1)..(25): SEQ ID NO: 524; WAN024ADC; Start 6; Stop 30
agttgagaaaagcagaagtgagagc

SEQ ID NO: 265754 - DNA, 25 bp, Artificial
  probe
  misc_feature (1)..(25): SEQ ID NO: 524; WAN024ADC; Start 25; Stop 49
gagagcttctcgccttgtgacatta

SEQ ID NO: 265755 - DNA, 25 bp, Artificial
  probe
  misc_feature (1)..(25): SEQ ID NO: 524; WAN024ADC; Start 61; Stop 85
cctacggatgaaaagtttcgaagaa

SEQ ID NO: 265756 - DNA, 25 bp, Artificial
  probe
  misc_feature (1)..(25): SEQ ID NO: 524; WAN024ADC; Start 7; Stop 31
gttgagaaaagcagaagtgagagct

SEQ ID NO: 265757 - DNA, 25 bp, Artificial
  probe
  misc_feature (1)..(25): SEQ ID NO: 524; WAN024ADC; Start 62; Stop 86
ctacggatgaaaagtttcgaagaaa

SEQ ID NO: 265758 - DNA, 25 bp, Artificial
  probe
  misc_feature (1)..(25): SEQ ID NO: 524; WAN024ADC; Start 60; Stop 84
ccctacggatgaaaagtttcgaaga

SEQ ID NO: 265759 - DNA, 25 bp, Artificial
  probe
  misc_feature (1)..(25): SEQ ID NO: 524; WAN024ADC; Start 8; Stop 32
ttgagaaaagcagaagtgagagctt

SEQ ID NO: 265760 - DNA, 25 bp, Artificial
  probe
  misc_feature (1)..(25): SEQ ID NO: 524; WAN024ADC; Start 59; Stop 83
gccctacggatgaaaagtttcgaag

SEQ ID NO: 265761 - DNA, 25 bp, Artificial
  probe
  misc_feature (1)..(25): SEQ ID NO: 524; WAN024ADC; Start 9; Stop 33
tgagaaaagcagaagtgagagcttc

SEQ ID NO: 265762 - DNA, 25 bp, Artificial
  probe
  misc_feature (1)..(25): SEQ ID NO: 525; WAN0249NF; Start 46; Stop 70
acattatacaatgaaaccgtttcct

SEQ ID NO: 265763 - DNA, 25 bp, Artificial
  probe
  misc_feature (1)..(25): SEQ ID NO: 525; WAN0249NF; Start 54; Stop 78
caatgaaaccgtttcctttgtcaag

SEQ ID NO: 265764 - DNA, 25 bp, Artificial
  probe
  misc_feature (1)..(25): SEQ ID NO: 525; WAN0249NF; Start 41; Stop 65
tgtttacattatacaatgaaaccgt

SEQ ID NO: 265765 - DNA, 25 bp, Artificial
  probe
  misc_feature (1)..(25): SEQ ID NO: 525; WAN0249NF; Start 49; Stop 73
ttatacaatgaaaccgtttcctttg

SEQ ID NO: 265766 - DNA, 25 bp, Artificial
  probe
  misc_feature (1)..(25): SEQ ID NO: 525; WAN0249NF; Start 47; Stop 71
cattatacaatgaaaccgtttcctt

SEQ ID NO: 265767 - DNA, 25 bp, Artificial
  probe
  misc_feature (1)..(25): SEQ ID NO: 525; WAN0249NF; Start 51; Stop 75
atacaatgaaaccgtttcctttgtc

SEQ ID NO: 265768 - DNA, 25 bp, Artificial
  probe
  misc_feature (1)..(25): SEQ ID NO: 525; WAN0249NF; Start 45; Stop 69
tacattatacaatgaaaccgtttcc

SEQ ID NO: 265769 - DNA, 25 bp, Artificial
  probe
  misc_feature (1)..(25): SEQ ID NO: 525; WAN0249NF; Start 50; Stop 74
tatacaatgaaaccgtttcctttgt

SEQ ID NO: 265770 - DNA, 25 bp, Artificial
  probe
  misc_feature (1)..(25): SEQ ID NO: 525; WAN0249NF; Start 48; Stop 72
attatacaatgaaaccgtttccttt

SEQ ID NO: 265771 - DNA, 25 bp, Artificial
  probe
  misc_feature (1)..(25): SEQ ID NO: 525; WAN0249NF; Start 52; Stop 76
tacaatgaaaccgtttcctttgtca

SEQ ID NO: 265772 - DNA, 25 bp, Artificial
  probe
  misc_feature (1)..(25): SEQ ID NO: 525; WAN0249NF; Start 42; Stop 66
gtttacattatacaatgaaaccgtt

SEQ ID NO: 265773 - DNA, 25 bp, Artificial
  probe
  misc_feature (1)..(25): SEQ ID NO: 525; WAN0249NF; Start 55; Stop 79
aatgaaaccgtttcctttgtcaagc

SEQ ID NO: 265774 - DNA, 25 bp, Artificial
  probe
  misc_feature (1)..(25): SEQ ID NO: 525; WAN0249NF; Start 53; Stop 77
acaatgaaaccgtttcctttgtcaa

SEQ ID NO: 265775 - DNA, 25 bp, Artificial
  probe
  misc_feature (1)..(25): SEQ ID NO: 525; WAN0249NF; Start 40; Stop 64
atgtttacattatacaatgaaaccg

SEQ ID NO: 265776 - DNA, 25 bp, Artificial
  probe
  misc_feature (1)..(25): SEQ ID NO: 525; WAN0249NF; Start 43; Stop 67
tttacattatacaatgaaaccgttt

SEQ ID NO: 265777 - DNA, 25 bp, Artificial
  probe
  misc_feature (1)..(25): SEQ ID NO: 525; WAN0249NF; Start 44; Stop 68
ttacattatacaatgaaaccgtttc

SEQ ID NO: 265778 - DNA, 25 bp, Artificial
  probe
  misc_feature (1)..(25): SEQ ID NO: 526; WAN024AH7; Start 41; Stop 65
cgattaagtagtcttggaattgcct

SEQ ID NO: 265779 - DNA, 25 bp, Artificial
  probe
  misc_feature (1)..(25): SEQ ID NO: 526; WAN024AH7; Start 42; Stop 66
gattaagtagtcttggaattgccta

SEQ ID NO: 265780 - DNA, 25 bp, Artificial
  probe
  misc_feature (1)..(25): SEQ ID NO: 526; WAN024AH7; Start 43; Stop 67
attaagtagtcttggaattgcctaa

SEQ ID NO: 265781 - DNA, 25 bp, Artificial
  probe
  misc_feature (1)..(25): SEQ ID NO: 526; WAN024AH7; Start 39; Stop 63
ttcgattaagtagtcttggaattgc

SEQ ID NO: 265782 - DNA, 25 bp, Artificial
  probe
  misc_feature (1)..(25): SEQ ID NO: 526; WAN024AH7; Start 40; Stop 64
tcgattaagtagtcttggaattgcc

SEQ ID NO: 265783 - DNA, 25 bp, Artificial
  probe
  misc_feature (1)..(25): SEQ ID NO: 526; WAN024AH7; Start 37; Stop 61
tgttcgattaagtagtcttggaatt

SEQ ID NO: 265784 - DNA, 25 bp, Artificial
  probe
  misc_feature (1)..(25): SEQ ID NO: 526; WAN024AH7; Start 35; Stop 59
aatgttcgattaagtagtcttggaa

SEQ ID NO: 265785 - DNA, 25 bp, Artificial
  probe
  misc_feature (1)..(25): SEQ ID NO: 526; WAN024AH7; Start 38; Stop 62
gttcgattaagtagtcttggaattg

SEQ ID NO: 265786 - DNA, 25 bp, Artificial
  probe
  misc_feature (1)..(25): SEQ ID NO: 526; WAN024AH7; Start 45; Stop 69
taagtagtcttggaattgcctaaac

SEQ ID NO: 265787 - DNA, 25 bp, Artificial
  probe
  misc_feature (1)..(25): SEQ ID NO: 526; WAN024AH7; Start 46; Stop 70
aagtagtcttggaattgcctaaacg

SEQ ID NO: 265788 - DNA, 25 bp, Artificial
  probe
  misc_feature (1)..(25): SEQ ID NO: 526; WAN024AH7; Start 36; Stop 60
atgttcgattaagtagtcttggaat

SEQ ID NO: 265789 - DNA, 25 bp, Artificial
  probe
  misc_feature (1)..(25): SEQ ID NO: 526; WAN024AH7; Start 44; Stop 68
ttaagtagtcttggaattgcctaaa

SEQ ID NO: 265790 - DNA, 25 bp, Artificial
  probe
  misc_feature (1)..(25): SEQ ID NO: 526; WAN024AH7; Start 34; Stop 58
taatgttcgattaagtagtcttgga

SEQ ID NO: 265791 - DNA, 25 bp, Artificial
  probe
  misc_feature (1)..(25): SEQ ID NO: 526; WAN024AH7; Start 25; Stop 49
gactgctgttaatgttcgattaagt

SEQ ID NO: 265792 - DNA, 25 bp, Artificial
  probe
  misc_feature (1)..(25): SEQ ID NO: 526; WAN024AH7; Start 23; Stop 47
gagactgctgttaatgttcgattaa

SEQ ID NO: 265793 - DNA, 25 bp, Artificial
  probe
  misc_feature (1)..(25): SEQ ID NO: 526; WAN024AH7; Start 1; Stop 25
ataaagagaccttcatcagtccgag

SEQ ID NO: 265794 - DNA, 25 bp, Artificial
  probe
  misc_feature (1)..(25): SEQ ID NO: 526; WAN024AH7; Start 24; Stop 48
agactgctgttaatgttcgattaag

SEQ ID NO: 265795 - DNA, 25 bp, Artificial
  probe
  misc_feature (1)..(25): SEQ ID NO: 526; WAN024AH7; Start 22; Stop 46
cgagactgctgttaatgttcgatta

SEQ ID NO: 265796 - DNA, 25 bp, Artificial
  probe
  misc_feature (1)..(25): SEQ ID NO: 526; WAN024AH7; Start 28; Stop 52
tgctgttaatgttcgattaagtagt

SEQ ID NO: 265797 - DNA, 25 bp, Artificial
  probe
  misc_feature (1)..(25): SEQ ID NO: 526; WAN024AH7; Start 26; Stop 50
actgctgttaatgttcgattaagta

SEQ ID NO: 265798 - DNA, 25 bp, Artificial
  probe
  misc_feature (1)..(25): SEQ ID NO: 526; WAN024AH7; Start 29; Stop 53
gctgttaatgttcgattaagtagtc

SEQ ID NO: 265799 - DNA, 25 bp, Artificial
  probe
  misc_feature (1)..(25): SEQ ID NO: 526; WAN024AH7; Start 27; Stop 51
ctgctgttaatgttcgattaagtag

SEQ ID NO: 265800 - DNA, 25 bp, Artificial
  probe
  misc_feature (1)..(25): SEQ ID NO: 526; WAN024AH7; Start 2; Stop 26
taaagagaccttcatcagtccgaga

SEQ ID NO: 265801 - DNA, 25 bp, Artificial
  probe
  misc_feature (1)..(25): SEQ ID NO: 526; WAN024AH7; Start 47; Stop 71
agtagtcttggaattgcctaaacgt

SEQ ID NO: 265802 - DNA, 25 bp, Artificial
  probe
  misc_feature (1)..(25): SEQ ID NO: 526; WAN024AH7; Start 33; Stop 57
ttaatgttcgattaagtagtcttgg

SEQ ID NO: 265803 - DNA, 25 bp, Artificial
  probe
  misc_feature (1)..(25): SEQ ID NO: 526; WAN024AH7; Start 30; Stop 54
ctgttaatgttcgattaagtagtct

SEQ ID NO: 265804 - DNA, 25 bp, Artificial
  probe
  misc_feature (1)..(25): SEQ ID NO: 526; WAN024AH7; Start 3; Stop 27
aaagagaccttcatcagtccgagac

SEQ ID NO: 265805 - DNA, 25 bp, Artificial
  probe
  misc_feature (1)..(25): SEQ ID NO: 526; WAN024AH7; Start 21; Stop 45
ccgagactgctgttaatgttcgatt

SEQ ID NO: 265806 - DNA, 25 bp, Artificial
  probe
  misc_feature (1)..(25): SEQ ID NO: 526; WAN024AH7; Start 31; Stop 55
tgttaatgttcgattaagtagtctt

SEQ ID NO: 265807 - DNA, 25 bp, Artificial
  probe
  misc_feature (1)..(25): SEQ ID NO: 526; WAN024AH7; Start 32; Stop 56
gttaatgttcgattaagtagtcttg

SEQ ID NO: 265808 - DNA, 25 bp, Artificial
  probe
  misc_feature (1)..(25): SEQ ID NO: 526; WAN024AH7; Start 20; Stop 44
tccgagactgctgttaatgttcgat

SEQ ID NO: 265809 - DNA, 25 bp, Artificial
  probe
  misc_feature (1)..(25): SEQ ID NO: 526; WAN024AH7; Start 48; Stop 72
gtagtcttggaattgcctaaacgtt

SEQ ID NO: 265810 - DNA, 25 bp, Artificial
  probe
  misc_feature (1)..(25): SEQ ID NO: 526; WAN024AH7; Start 49; Stop 73
tagtcttggaattgcctaaacgttc

SEQ ID NO: 265811 - DNA, 25 bp, Artificial
  probe
  misc_feature (1)..(25): SEQ ID NO: 527; WAN0249TR; Start 92; Stop 116
acgctatataatacggacacttgaa

SEQ ID NO: 265812 - DNA, 25 bp, Artificial
  probe
  misc_feature (1)..(25): SEQ ID NO: 527; WAN0249TR; Start 87; Stop 111
cgaatacgctatataatacggacac

SEQ ID NO: 265813 - DNA, 25 bp, Artificial
  probe
  misc_feature (1)..(25): SEQ ID NO: 527; WAN0249TR; Start 91; Stop 115
tacgctatataatacggacacttga

SEQ ID NO: 265814 - DNA, 25 bp, Artificial
  probe
  misc_feature (1)..(25): SEQ ID NO: 527; WAN0249TR; Start 90; Stop 114
atacgctatataatacggacacttg

SEQ ID NO: 265815 - DNA, 25 bp, Artificial
  probe
  misc_feature (1)..(25): SEQ ID NO: 527; WAN0249TR; Start 88; Stop 112
gaatacgctatataatacggacact

SEQ ID NO: 265816 - DNA, 25 bp, Artificial
  probe
  misc_feature (1)..(25): SEQ ID NO: 527; WAN0249TR; Start 181; Stop 205
agtcttattagagaatagcatcacc

SEQ ID NO: 265817 - DNA, 25 bp, Artificial
  probe
  misc_feature (1)..(25): SEQ ID NO: 527; WAN0249TR; Start 86; Stop 110
tcgaatacgctatataatacggaca

SEQ ID NO: 265818 - DNA, 25 bp, Artificial
  probe
  misc_feature (1)..(25): SEQ ID NO: 527; WAN0249TR; Start 195; Stop 219
atagcatcacccactttctcaaata

SEQ ID NO: 265819 - DNA, 25 bp, Artificial
  probe
  misc_feature (1)..(25): SEQ ID NO: 527; WAN0249TR; Start 432; Stop 456
gctgaaatctattggaaacatacgg

SEQ ID NO: 265820 - DNA, 25 bp, Artificial
  probe
  misc_feature (1)..(25): SEQ ID NO: 527; WAN0249TR; Start 196; Stop 220
tagcatcacccactttctcaaataa

SEQ ID NO: 265821 - DNA, 25 bp, Artificial
  probe
  misc_feature (1)..(25): SEQ ID NO: 527; WAN0249TR; Start 187; Stop 211
attagagaatagcatcacccacttt

SEQ ID NO: 265822 - DNA, 25 bp, Artificial
  probe
  misc_feature (1)..(25): SEQ ID NO: 527; WAN0249TR; Start 89; Stop 113
aatacgctatataatacggacactt

SEQ ID NO: 265823 - DNA, 25 bp, Artificial
  probe
  misc_feature (1)..(25): SEQ ID NO: 527; WAN0249TR; Start 194; Stop 218
aatagcatcacccactttctcaaat

SEQ ID NO: 265824 - DNA, 25 bp, Artificial
  probe
  misc_feature (1)..(25): SEQ ID NO: 527; WAN0249TR; Start 433; Stop 457
ctgaaatctattggaaacatacggt

SEQ ID NO: 265825 - DNA, 25 bp, Artificial
  probe
  misc_feature (1)..(25): SEQ ID NO: 527; WAN0249TR; Start 188; Stop 212
ttagagaatagcatcacccactttc

SEQ ID NO: 265826 - DNA, 25 bp, Artificial
  probe
  misc_feature (1)..(25): SEQ ID NO: 527; WAN0249TR; Start 35; Stop 59
acagtctgttatcaatgattctacc

SEQ ID NO: 265827 - DNA, 25 bp, Artificial
  probe
  misc_feature (1)..(25): SEQ ID NO: 527; WAN0249TR; Start 199; Stop 223
catcacccactttctcaaataagat

SEQ ID NO: 265828 - DNA, 25 bp, Artificial
  probe
  misc_feature (1)..(25): SEQ ID NO: 527; WAN0249TR; Start 186; Stop 210
tattagagaatagcatcacccactt

SEQ ID NO: 265829 - DNA, 25 bp, Artificial
  probe
  misc_feature (1)..(25): SEQ ID NO: 527; WAN0249TR; Start 185; Stop 209
ttattagagaatagcatcacccact

SEQ ID NO: 265830 - DNA, 25 bp, Artificial
  probe
  misc_feature (1)..(25): SEQ ID NO: 527; WAN0249TR; Start 197; Stop 221
agcatcacccactttctcaaataag

SEQ ID NO: 265831 - DNA, 25 bp, Artificial
  probe
  misc_feature (1)..(25): SEQ ID NO: 527; WAN0249TR; Start 193; Stop 217
gaatagcatcacccactttctcaaa

SEQ ID NO: 265832 - DNA, 25 bp, Artificial
  probe
  misc_feature (1)..(25): SEQ ID NO: 527; WAN0249TR; Start 184; Stop 208
cttattagagaatagcatcacccac

SEQ ID NO: 265833 - DNA, 25 bp, Artificial
  probe
  misc_feature (1)..(25): SEQ ID NO: 527; WAN0249TR; Start 183; Stop 207
tcttattagagaatagcatcaccca

SEQ ID NO: 265834 - DNA, 25 bp, Artificial
  probe
  misc_feature (1)..(25): SEQ ID NO: 527; WAN0249TR; Start 438; Stop 462
atctattggaaacatacggtaaaca

SEQ ID NO: 265835 - DNA, 25 bp, Artificial
  probe
  misc_feature (1)..(25): SEQ ID NO: 527; WAN0249TR; Start 198; Stop 222
gcatcacccactttctcaaataaga

SEQ ID NO: 265836 - DNA, 25 bp, Artificial
  probe
  misc_feature (1)..(25): SEQ ID NO: 527; WAN0249TR; Start 37; Stop 61
agtctgttatcaatgattctaccca

SEQ ID NO: 265837 - DNA, 25 bp, Artificial
  probe
  misc_feature (1)..(25): SEQ ID NO: 527; WAN0249TR; Start 182; Stop 206
gtcttattagagaatagcatcaccc

SEQ ID NO: 265838 - DNA, 25 bp, Artificial
  probe
  misc_feature (1)..(25): SEQ ID NO: 527; WAN0249TR; Start 93; Stop 117
cgctatataatacggacacttgaaa

SEQ ID NO: 265839 - DNA, 25 bp, Artificial
  probe
  misc_feature (1)..(25): SEQ ID NO: 527; WAN0249TR; Start 36; Stop 60
cagtctgttatcaatgattctaccc

SEQ ID NO: 265840 - DNA, 25 bp, Artificial
  probe
  misc_feature (1)..(25): SEQ ID NO: 527; WAN0249TR; Start 200; Stop 224
atcacccactttctcaaataagatt

SEQ ID NO: 265841 - DNA, 25 bp, Artificial
  probe
  misc_feature (1)..(25): SEQ ID NO: 527; WAN0249TR; Start 439; Stop 463
tctattggaaacatacggtaaacaa

SEQ ID NO: 265842 - DNA, 25 bp, Artificial
  probe
  misc_feature (1)..(25): SEQ ID NO: 527; WAN0249TR; Start 57; Stop 81
acccaaatcctaacaagatatagtg

SEQ ID NO: 265843 - DNA, 25 bp, Artificial
  probe
  misc_feature (1)..(25): SEQ ID NO: 527; WAN0249TR; Start 434; Stop 458
tgaaatctattggaaacatacggta

SEQ ID NO: 265844 - DNA, 25 bp, Artificial
  probe
  misc_feature (1)..(25): SEQ ID NO: 528; WAN0249O6; Start 2; Stop 26
taaatatagaaacgctgtggtgtac

SEQ ID NO: 265845 - DNA, 25 bp, Artificial
  probe
  misc_feature (1)..(25): SEQ ID NO: 528; WAN0249O6; Start 1; Stop 25
ataaatatagaaacgctgtggtgta

SEQ ID NO: 265846 - DNA, 25 bp, Artificial
  probe
  misc_feature (1)..(25): SEQ ID NO: 528; WAN0249O6; Start 3; Stop 27
aaatatagaaacgctgtggtgtacg

SEQ ID NO: 265847 - DNA, 25 bp, Artificial
  probe
  misc_feature (1)..(25): SEQ ID NO: 528; WAN0249O6; Start 4; Stop 28
aatatagaaacgctgtggtgtacga

SEQ ID NO: 265848 - DNA, 25 bp, Artificial
  probe
  misc_feature (1)..(25): SEQ ID NO: 528; WAN0249O6; Start 5; Stop 29
atatagaaacgctgtggtgtacgac

SEQ ID NO: 265849 - DNA, 25 bp, Artificial
  probe
  misc_feature (1)..(25): SEQ ID NO: 528; WAN0249O6; Start 71; Stop 95
ggaaacaaaagtcttctaacagcat

SEQ ID NO: 265850 - DNA, 25 bp, Artificial
  probe
  misc_feature (1)..(25): SEQ ID NO: 528; WAN0249O6; Start 68; Stop 92
tagggaaacaaaagtcttctaacag

SEQ ID NO: 265851 - DNA, 25 bp, Artificial
  probe
  misc_feature (1)..(25): SEQ ID NO: 528; WAN0249O6; Start 69; Stop 93
agggaaacaaaagtcttctaacagc

SEQ ID NO: 265852 - DNA, 25 bp, Artificial
  probe
  misc_feature (1)..(25): SEQ ID NO: 528; WAN0249O6; Start 70; Stop 94
gggaaacaaaagtcttctaacagca

SEQ ID NO: 265853 - DNA, 25 bp, Artificial
  probe
  misc_feature (1)..(25): SEQ ID NO: 528; WAN0249O6; Start 160; Stop 184
gttcaatacaaaccgtgaagtttcg

SEQ ID NO: 265854 - DNA, 25 bp, Artificial
  probe
  misc_feature (1)..(25): SEQ ID NO: 528; WAN0249O6; Start 6; Stop 30
tatagaaacgctgtggtgtacgact

SEQ ID NO: 265855 - DNA, 25 bp, Artificial
  probe
  misc_feature (1)..(25): SEQ ID NO: 528; WAN0249O6; Start 72; Stop 96
gaaacaaaagtcttctaacagcatg

SEQ ID NO: 265856 - DNA, 25 bp, Artificial
  probe
  misc_feature (1)..(25): SEQ ID NO: 528; WAN0249O6; Start 76; Stop 100
caaaagtcttctaacagcatgtagg

SEQ ID NO: 265857 - DNA, 25 bp, Artificial
  probe
  misc_feature (1)..(25): SEQ ID NO: 528; WAN0249O6; Start 73; Stop 97
aaacaaaagtcttctaacagcatgt

SEQ ID NO: 265858 - DNA, 25 bp, Artificial
  probe
  misc_feature (1)..(25): SEQ ID NO: 528; WAN0249O6; Start 75; Stop 99
acaaaagtcttctaacagcatgtag

SEQ ID NO: 265859 - DNA, 25 bp, Artificial
  probe
  misc_feature (1)..(25): SEQ ID NO: 528; WAN0249O6; Start 74; Stop 98
aacaaaagtcttctaacagcatgta

SEQ ID NO: 265860 - DNA, 25 bp, Artificial
  probe
  misc_feature (1)..(25): SEQ ID NO: 528; WAN0249O6; Start 67; Stop 91
ttagggaaacaaaagtcttctaaca

SEQ ID NO: 265861 - DNA, 25 bp, Artificial
  probe
  misc_feature (1)..(25): SEQ ID NO: 528; WAN0249O6; Start 77; Stop 101
aaaagtcttctaacagcatgtaggc

SEQ ID NO: 265862 - DNA, 25 bp, Artificial
  probe
  misc_feature (1)..(25): SEQ ID NO: 528; WAN0249O6; Start 7; Stop 31
atagaaacgctgtggtgtacgactt

SEQ ID NO: 265863 - DNA, 25 bp, Artificial
  probe
  misc_feature (1)..(25): SEQ ID NO: 528; WAN0249O6; Start 107; Stop 131
cacacggaaacagcttcagttagag

SEQ ID NO: 265864 - DNA, 25 bp, Artificial
  probe
  misc_feature (1)..(25): SEQ ID NO: 528; WAN0249O6; Start 105; Stop 129
ctcacacggaaacagcttcagttag

SEQ ID NO: 265865 - DNA, 25 bp, Artificial
  probe
  misc_feature (1)..(25): SEQ ID NO: 528; WAN0249O6; Start 159; Stop 183
ggttcaatacaaaccgtgaagtttc

SEQ ID NO: 265866 - DNA, 25 bp, Artificial
  probe
  misc_feature (1)..(25): SEQ ID NO: 528; WAN0249O6; Start 66; Stop 90
attagggaaacaaaagtcttctaac

SEQ ID NO: 265867 - DNA, 25 bp, Artificial
  probe
  misc_feature (1)..(25): SEQ ID NO: 528; WAN0249O6; Start 161; Stop 185
ttcaatacaaaccgtgaagtttcgg

SEQ ID NO: 265868 - DNA, 25 bp, Artificial
  probe
  misc_feature (1)..(25): SEQ ID NO: 528; WAN0249O6; Start 78; Stop 102
aaagtcttctaacagcatgtaggcc

SEQ ID NO: 265869 - DNA, 25 bp, Artificial
  probe
  misc_feature (1)..(25): SEQ ID NO: 528; WAN0249O6; Start 106; Stop 130
tcacacggaaacagcttcagttaga

SEQ ID NO: 265870 - DNA, 25 bp, Artificial
  probe
  misc_feature (1)..(25): SEQ ID NO: 528; WAN0249O6; Start 104; Stop 128
tctcacacggaaacagcttcagtta

SEQ ID NO: 265871 - DNA, 25 bp, Artificial
  probe
  misc_feature (1)..(25): SEQ ID NO: 528; WAN0249O6; Start 176; Stop 200
gaagtttcggcaccaatacagcttt

SEQ ID NO: 265872 - DNA, 25 bp, Artificial
  probe
  misc_feature (1)..(25): SEQ ID NO: 528; WAN0249O6; Start 113; Stop 137
gaaacagcttcagttagagcgagtt

SEQ ID NO: 265873 - DNA, 25 bp, Artificial
  probe
  misc_feature (1)..(25): SEQ ID NO: 528; WAN0249O6; Start 16; Stop 40
ctgtggtgtacgacttcacacttaa

SEQ ID NO: 265874 - DNA, 25 bp, Artificial
  probe
  misc_feature (1)..(25): SEQ ID NO: 528; WAN0249O6; Start 8; Stop 32
tagaaacgctgtggtgtacgacttc

SEQ ID NO: 265875 - DNA, 25 bp, Artificial
  probe
  misc_feature (1)..(25): SEQ ID NO: 528; WAN0249O6; Start 63; Stop 87
attattagggaaacaaaagtcttct

SEQ ID NO: 265876 - DNA, 25 bp, Artificial
  probe
  misc_feature (1)..(25): SEQ ID NO: 528; WAN0249O6; Start 114; Stop 138
aaacagcttcagttagagcgagttg

SEQ ID NO: 265877 - DNA, 25 bp, Artificial
  probe
  misc_feature (1)..(25): SEQ ID NO: 529; WAN0249RO; Start 77; Stop 101
cctcattttctagtgaaattgaact

SEQ ID NO: 265878 - DNA, 25 bp, Artificial
  probe
  misc_feature (1)..(25): SEQ ID NO: 529; WAN0249RO; Start 76; Stop 100
tcctcattttctagtgaaattgaac

SEQ ID NO: 265879 - DNA, 25 bp, Artificial
  probe
  misc_feature (1)..(25): SEQ ID NO: 529; WAN0249RO; Start 75; Stop 99
ttcctcattttctagtgaaattgaa

SEQ ID NO: 265880 - DNA, 25 bp, Artificial
  probe
  misc_feature (1)..(25): SEQ ID NO: 529; WAN0249RO; Start 74; Stop 98
tttcctcattttctagtgaaattga

SEQ ID NO: 265881 - DNA, 25 bp, Artificial
  probe
  misc_feature (1)..(25): SEQ ID NO: 529; WAN0249RO; Start 70; Stop 94
agattttcctcattttctagtgaaa

SEQ ID NO: 265882 - DNA, 25 bp, Artificial
  probe
  misc_feature (1)..(25): SEQ ID NO: 529; WAN0249RO; Start 3; Stop 27
aaattaattgtctaactgtttgggg

SEQ ID NO: 265883 - DNA, 25 bp, Artificial
  probe
  misc_feature (1)..(25): SEQ ID NO: 529; WAN0249RO; Start 73; Stop 97
ttttcctcattttctagtgaaattg

SEQ ID NO: 265884 - DNA, 25 bp, Artificial
  probe
  misc_feature (1)..(25): SEQ ID NO: 529; WAN0249RO; Start 2; Stop 26
taaattaattgtctaactgtttggg

SEQ ID NO: 265885 - DNA, 25 bp, Artificial
  probe
  misc_feature (1)..(25): SEQ ID NO: 529; WAN0249RO; Start 78; Stop 102
ctcattttctagtgaaattgaactt

SEQ ID NO: 265886 - DNA, 25 bp, Artificial
  probe
  misc_feature (1)..(25): SEQ ID NO: 529; WAN0249RO; Start 71; Stop 95
gattttcctcattttctagtgaaat

SEQ ID NO: 265887 - DNA, 25 bp, Artificial
  probe
  misc_feature (1)..(25): SEQ ID NO: 529; WAN0249RO; Start 79; Stop 103
tcattttctagtgaaattgaacttt

SEQ ID NO: 265888 - DNA, 25 bp, Artificial
  probe
  misc_feature (1)..(25): SEQ ID NO: 529; WAN0249RO; Start 72; Stop 96
attttcctcattttctagtgaaatt

SEQ ID NO: 265889 - DNA, 25 bp, Artificial
  probe
  misc_feature (1)..(25): SEQ ID NO: 529; WAN0249RO; Start 80; Stop 104
cattttctagtgaaattgaactttt

SEQ ID NO: 265890 - DNA, 25 bp, Artificial
  probe
  misc_feature (1)..(25): SEQ ID NO: 530; WAN0249L6; Start 17; Stop 41
cgaactcactattcaggaggcatat

SEQ ID NO: 265891 - DNA, 25 bp, Artificial
  probe
  misc_feature (1)..(25): SEQ ID NO: 530; WAN0249L6; Start 167; Stop 191
aacgatatgtagggtaatgtgagag

SEQ ID NO: 265892 - DNA, 25 bp, Artificial
  probe
  misc_feature (1)..(25): SEQ ID NO: 530; WAN0249L6; Start 162; Stop 186
tgtcaaacgatatgtagggtaatgt

SEQ ID NO: 265893 - DNA, 25 bp, Artificial
  probe
  misc_feature (1)..(25): SEQ ID NO: 530; WAN0249L6; Start 163; Stop 187
gtcaaacgatatgtagggtaatgtg

SEQ ID NO: 265894 - DNA, 25 bp, Artificial
  probe
  misc_feature (1)..(25): SEQ ID NO: 530; WAN0249L6; Start 166; Stop 190
aaacgatatgtagggtaatgtgaga

SEQ ID NO: 265895 - DNA, 25 bp, Artificial
  probe
  misc_feature (1)..(25): SEQ ID NO: 530; WAN0249L6; Start 165; Stop 189
caaacgatatgtagggtaatgtgag

SEQ ID NO: 265896 - DNA, 25 bp, Artificial
  probe
  misc_feature (1)..(25): SEQ ID NO: 530; WAN0249L6; Start 84; Stop 108
gtagaagtgaaatagtaagtcctgc

SEQ ID NO: 265897 - DNA, 25 bp, Artificial
  probe
  misc_feature (1)..(25): SEQ ID NO: 530; WAN0249L6; Start 168; Stop 192
acgatatgtagggtaatgtgagagg

SEQ ID NO: 265898 - DNA, 25 bp, Artificial
  probe
  misc_feature (1)..(25): SEQ ID NO: 530; WAN0249L6; Start 161; Stop 185
atgtcaaacgatatgtagggtaatg

SEQ ID NO: 265899 - DNA, 25 bp, Artificial
  probe
  misc_feature (1)..(25): SEQ ID NO: 530; WAN0249L6; Start 164; Stop 188
tcaaacgatatgtagggtaatgtga

SEQ ID NO: 265900 - DNA, 25 bp, Artificial
  probe
  misc_feature (1)..(25): SEQ ID NO: 530; WAN0249L6; Start 169; Stop 193
cgatatgtagggtaatgtgagaggg

SEQ ID NO: 265901 - DNA, 25 bp, Artificial
  probe
  misc_feature (1)..(25): SEQ ID NO: 530; WAN0249L6; Start 94; Stop 118
aatagtaagtcctgcatagtggatg

SEQ ID NO: 265902 - DNA, 25 bp, Artificial
  probe
  misc_feature (1)..(25): SEQ ID NO: 530; WAN0249L6; Start 26; Stop 50
tattcaggaggcatatgagcaattc

SEQ ID NO: 265903 - DNA, 25 bp, Artificial
  probe
  misc_feature (1)..(25): SEQ ID NO: 530; WAN0249L6; Start 25; Stop 49
ctattcaggaggcatatgagcaatt

SEQ ID NO: 265904 - DNA, 25 bp, Artificial
  probe
  misc_feature (1)..(25): SEQ ID NO: 530; WAN0249L6; Start 95; Stop 119
atagtaagtcctgcatagtggatga

SEQ ID NO: 265905 - DNA, 25 bp, Artificial
  probe
  misc_feature (1)..(25): SEQ ID NO: 530; WAN0249L6; Start 159; Stop 183
gcatgtcaaacgatatgtagggtaa

SEQ ID NO: 265906 - DNA, 25 bp, Artificial
  probe
  misc_feature (1)..(25): SEQ ID NO: 530; WAN0249L6; Start 18; Stop 42
gaactcactattcaggaggcatatg

SEQ ID NO: 265907 - DNA, 25 bp, Artificial
  probe
  misc_feature (1)..(25): SEQ ID NO: 530; WAN0249L6; Start 19; Stop 43
aactcactattcaggaggcatatga

SEQ ID NO: 265908 - DNA, 25 bp, Artificial
  probe
  misc_feature (1)..(25): SEQ ID NO: 530; WAN0249L6; Start 96; Stop 120
tagtaagtcctgcatagtggatgag

SEQ ID NO: 265909 - DNA, 25 bp, Artificial
  probe
  misc_feature (1)..(25): SEQ ID NO: 530; WAN0249L6; Start 160; Stop 184
catgtcaaacgatatgtagggtaat

SEQ ID NO: 265910 - DNA, 25 bp, Artificial
  probe
  misc_feature (1)..(25): SEQ ID NO: 530; WAN0249L6; Start 83; Stop 107
agtagaagtgaaatagtaagtcctg

SEQ ID NO: 265911 - DNA, 25 bp, Artificial
  probe
  misc_feature (1)..(25): SEQ ID NO: 530; WAN0249L6; Start 24; Stop 48
actattcaggaggcatatgagcaat

SEQ ID NO: 265912 - DNA, 25 bp, Artificial
  probe
  misc_feature (1)..(25): SEQ ID NO: 530; WAN0249L6; Start 82; Stop 106
gagtagaagtgaaatagtaagtcct

SEQ ID NO: 265913 - DNA, 25 bp, Artificial
  probe
  misc_feature (1)..(25): SEQ ID NO: 530; WAN0249L6; Start 80; Stop 104
aggagtagaagtgaaatagtaagtc

SEQ ID NO: 265914 - DNA, 25 bp, Artificial
  probe
  misc_feature (1)..(25): SEQ ID NO: 530; WAN0249L6; Start 91; Stop 115
tgaaatagtaagtcctgcatagtgg

SEQ ID NO: 265915 - DNA, 25 bp, Artificial
  probe
  misc_feature (1)..(25): SEQ ID NO: 530; WAN0249L6; Start 86; Stop 110
agaagtgaaatagtaagtcctgcat

SEQ ID NO: 265916 - DNA, 25 bp, Artificial
  probe
  misc_feature (1)..(25): SEQ ID NO: 530; WAN0249L6; Start 9; Stop 33
ggataaatcgaactcactattcagg

SEQ ID NO: 265917 - DNA, 25 bp, Artificial
  probe
  misc_feature (1)..(25): SEQ ID NO: 530; WAN0249L6; Start 90; Stop 114
gtgaaatagtaagtcctgcatagtg

SEQ ID NO: 265918 - DNA, 25 bp, Artificial
  probe
  misc_feature (1)..(25): SEQ ID NO: 530; WAN0249L6; Start 89; Stop 113
agtgaaatagtaagtcctgcatagt

SEQ ID NO: 265919 - DNA, 25 bp, Artificial
  probe
  misc_feature (1)..(25): SEQ ID NO: 530; WAN0249L6; Start 85; Stop 109
tagaagtgaaatagtaagtcctgca

SEQ ID NO: 265920 - DNA, 25 bp, Artificial
  probe
  misc_feature (1)..(25): SEQ ID NO: 530; WAN0249L6; Start 16; Stop 40
tcgaactcactattcaggaggcata

SEQ ID NO: 265921 - DNA, 25 bp, Artificial
  probe
  misc_feature (1)..(25): SEQ ID NO: 530; WAN0249L6; Start 12; Stop 36
taaatcgaactcactattcaggagg

SEQ ID NO: 265922 - DNA, 25 bp, Artificial
  probe
  misc_feature (1)..(25): SEQ ID NO: 530; WAN0249L6; Start 81; Stop 105
ggagtagaagtgaaatagtaagtcc

SEQ ID NO: 265923 - DNA, 25 bp, Artificial
  probe
  misc_feature (1)..(25): SEQ ID NO: 531; WAN0249NX; Start 129; Stop 153
gattctgtattcacgccctcaatag

SEQ ID NO: 265924 - DNA, 25 bp, Artificial
  probe
  misc_feature (1)..(25): SEQ ID NO: 531; WAN0249NX; Start 130; Stop 154
attctgtattcacgccctcaataga

SEQ ID NO: 265925 - DNA, 25 bp, Artificial
  probe
  misc_feature (1)..(25): SEQ ID NO: 531; WAN0249NX; Start 124; Stop 148
aatttgattctgtattcacgccctc

SEQ ID NO: 265926 - DNA, 25 bp, Artificial
  probe
  misc_feature (1)..(25): SEQ ID NO: 531; WAN0249NX; Start 128; Stop 152
tgattctgtattcacgccctcaata

SEQ ID NO: 265927 - DNA, 25 bp, Artificial
  probe
  misc_feature (1)..(25): SEQ ID NO: 531; WAN0249NX; Start 225; Stop 249
aagtcgttatatcatgctataccta

SEQ ID NO: 265928 - DNA, 25 bp, Artificial
  probe
  misc_feature (1)..(25): SEQ ID NO: 531; WAN0249NX; Start 131; Stop 155
ttctgtattcacgccctcaatagac

SEQ ID NO: 265929 - DNA, 25 bp, Artificial
  probe
  misc_feature (1)..(25): SEQ ID NO: 531; WAN0249NX; Start 226; Stop 250
agtcgttatatcatgctatacctat

SEQ ID NO: 265930 - DNA, 25 bp, Artificial
  probe
  misc_feature (1)..(25): SEQ ID NO: 531; WAN0249NX; Start 125; Stop 149
atttgattctgtattcacgccctca

SEQ ID NO: 265931 - DNA, 25 bp, Artificial
  probe
  misc_feature (1)..(25): SEQ ID NO: 531; WAN0249NX; Start 123; Stop 147
gaatttgattctgtattcacgccct

SEQ ID NO: 265932 - DNA, 25 bp, Artificial
  probe
  misc_feature (1)..(25): SEQ ID NO: 531; WAN0249NX; Start 172; Stop 196
tgtttatatattgtctccgtagtgt

SEQ ID NO: 265933 - DNA, 25 bp, Artificial
  probe
  misc_feature (1)..(25): SEQ ID NO: 531; WAN0249NX; Start 180; Stop 204
tattgtctccgtagtgttattatac

SEQ ID NO: 265934 - DNA, 25 bp, Artificial
  probe
  misc_feature (1)..(25): SEQ ID NO: 531; WAN0249NX; Start 224; Stop 248
aaagtcgttatatcatgctatacct

SEQ ID NO: 265935 - DNA, 25 bp, Artificial
  probe
  misc_feature (1)..(25): SEQ ID NO: 531; WAN0249NX; Start 143; Stop 167
gccctcaatagacggtaaaataaga

SEQ ID NO: 265936 - DNA, 25 bp, Artificial
  probe
  misc_feature (1)..(25): SEQ ID NO: 531; WAN0249NX; Start 227; Stop 251
gtcgttatatcatgctatacctatt

SEQ ID NO: 265937 - DNA, 25 bp, Artificial
  probe
  misc_feature (1)..(25): SEQ ID NO: 531; WAN0249NX; Start 136; Stop 160
tattcacgccctcaatagacggtaa

SEQ ID NO: 265938 - DNA, 25 bp, Artificial
  probe
  misc_feature (1)..(25): SEQ ID NO: 531; WAN0249NX; Start 144; Stop 168
ccctcaatagacggtaaaataagaa

SEQ ID NO: 265939 - DNA, 25 bp, Artificial
  probe
  misc_feature (1)..(25): SEQ ID NO: 531; WAN0249NX; Start 142; Stop 166
cgccctcaatagacggtaaaataag

SEQ ID NO: 265940 - DNA, 25 bp, Artificial
  probe
  misc_feature (1)..(25): SEQ ID NO: 531; WAN0249NX; Start 229; Stop 253
cgttatatcatgctatacctattct

SEQ ID NO: 265941 - DNA, 25 bp, Artificial
  probe
  misc_feature (1)..(25): SEQ ID NO: 531; WAN0249NX; Start 228; Stop 252
tcgttatatcatgctatacctattc

SEQ ID NO: 265942 - DNA, 25 bp, Artificial
  probe
  misc_feature (1)..(25): SEQ ID NO: 531; WAN0249NX; Start 183; Stop 207
tgtctccgtagtgttattatacgaa

SEQ ID NO: 265943 - DNA, 25 bp, Artificial
  probe
  misc_feature (1)..(25): SEQ ID NO: 531; WAN0249NX; Start 182; Stop 206
ttgtctccgtagtgttattatacga

SEQ ID NO: 265944 - DNA, 25 bp, Artificial
  probe
  misc_feature (1)..(25): SEQ ID NO: 531; WAN0249NX; Start 173; Stop 197
gtttatatattgtctccgtagtgtt

SEQ ID NO: 265945 - DNA, 25 bp, Artificial
  probe
  misc_feature (1)..(25): SEQ ID NO: 531; WAN0249NX; Start 171; Stop 195
ttgtttatatattgtctccgtagtg

SEQ ID NO: 265946 - DNA, 25 bp, Artificial
  probe
  misc_feature (1)..(25): SEQ ID NO: 531; WAN0249NX; Start 141; Stop 165
acgccctcaatagacggtaaaataa

SEQ ID NO: 265947 - DNA, 25 bp, Artificial
  probe
  misc_feature (1)..(25): SEQ ID NO: 531; WAN0249NX; Start 137; Stop 161
attcacgccctcaatagacggtaaa

SEQ ID NO: 265948 - DNA, 25 bp, Artificial
  probe
  misc_feature (1)..(25): SEQ ID NO: 531; WAN0249NX; Start 181; Stop 205
attgtctccgtagtgttattatacg

SEQ ID NO: 265949 - DNA, 25 bp, Artificial
  probe
  misc_feature (1)..(25): SEQ ID NO: 531; WAN0249NX; Start 135; Stop 159
gtattcacgccctcaatagacggta

SEQ ID NO: 265950 - DNA, 25 bp, Artificial
  probe
  misc_feature (1)..(25): SEQ ID NO: 531; WAN0249NX; Start 218; Stop 242
ttaggaaaagtcgttatatcatgct

SEQ ID NO: 265951 - DNA, 25 bp, Artificial
  probe
  misc_feature (1)..(25): SEQ ID NO: 531; WAN0249NX; Start 132; Stop 156
tctgtattcacgccctcaatagacg

SEQ ID NO: 265952 - DNA, 25 bp, Artificial
  probe
  misc_feature (1)..(25): SEQ ID NO: 531; WAN0249NX; Start 140; Stop 164
cacgccctcaatagacggtaaaata

SEQ ID NO: 265953 - DNA, 25 bp, Artificial
  probe
  misc_feature (1)..(25): SEQ ID NO: 531; WAN0249NX; Start 112; Stop 136
tctttagacttgaatttgattctgt

SEQ ID NO: 265954 - DNA, 25 bp, Artificial
  probe
  misc_feature (1)..(25): SEQ ID NO: 531; WAN0249NX; Start 220; Stop 244
aggaaaagtcgttatatcatgctat

SEQ ID NO: 265955 - DNA, 25 bp, Artificial
  probe
  misc_feature (1)..(25): SEQ ID NO: 531; WAN0249NX; Start 127; Stop 151
ttgattctgtattcacgccctcaat

SEQ ID NO: 265956 - DNA, 25 bp, Artificial
  probe
  misc_feature (1)..(25): SEQ ID NO: 532; WAN024A2K; Start 37; Stop 61
tcttcatctcttacagtttgctcag

SEQ ID NO: 265957 - DNA, 25 bp, Artificial
  probe
  misc_feature (1)..(25): SEQ ID NO: 532; WAN024A2K; Start 36; Stop 60
gtcttcatctcttacagtttgctca

SEQ ID NO: 265958 - DNA, 25 bp, Artificial
  probe
  misc_feature (1)..(25): SEQ ID NO: 532; WAN024A2K; Start 34; Stop 58
ttgtcttcatctcttacagtttgct

SEQ ID NO: 265959 - DNA, 25 bp, Artificial
  probe
  misc_feature (1)..(25): SEQ ID NO: 532; WAN024A2K; Start 33; Stop 57
attgtcttcatctcttacagtttgc

SEQ ID NO: 265960 - DNA, 25 bp, Artificial
  probe
  misc_feature (1)..(25): SEQ ID NO: 532; WAN024A2K; Start 35; Stop 59
tgtcttcatctcttacagtttgctc

SEQ ID NO: 265961 - DNA, 25 bp, Artificial
  probe
  misc_feature (1)..(25): SEQ ID NO: 532; WAN024A2K; Start 38; Stop 62
cttcatctcttacagtttgctcagc

SEQ ID NO: 265962 - DNA, 25 bp, Artificial
  probe
  misc_feature (1)..(25): SEQ ID NO: 532; WAN024A2K; Start 91; Stop 115
tccctttaccattcgatttatctgt

SEQ ID NO: 265963 - DNA, 25 bp, Artificial
  probe
  misc_feature (1)..(25): SEQ ID NO: 532; WAN024A2K; Start 92; Stop 116
ccctttaccattcgatttatctgtt

SEQ ID NO: 265964 - DNA, 25 bp, Artificial
  probe
  misc_feature (1)..(25): SEQ ID NO: 532; WAN024A2K; Start 90; Stop 114
atccctttaccattcgatttatctg

SEQ ID NO: 265965 - DNA, 25 bp, Artificial
  probe
  misc_feature (1)..(25): SEQ ID NO: 532; WAN024A2K; Start 93; Stop 117
cctttaccattcgatttatctgttt

SEQ ID NO: 265966 - DNA, 25 bp, Artificial
  probe
  misc_feature (1)..(25): SEQ ID NO: 532; WAN024A2K; Start 57; Stop 81
ctcagcattctcaatgatttgaaca

SEQ ID NO: 265967 - DNA, 25 bp, Artificial
  probe
  misc_feature (1)..(25): SEQ ID NO: 532; WAN024A2K; Start 58; Stop 82
tcagcattctcaatgatttgaacat

SEQ ID NO: 265968 - DNA, 25 bp, Artificial
  probe
  misc_feature (1)..(25): SEQ ID NO: 532; WAN024A2K; Start 32; Stop 56
tattgtcttcatctcttacagtttg

SEQ ID NO: 265969 - DNA, 25 bp, Artificial
  probe
  misc_feature (1)..(25): SEQ ID NO: 532; WAN024A2K; Start 95; Stop 119
tttaccattcgatttatctgtttgt

SEQ ID NO: 265970 - DNA, 25 bp, Artificial
  probe
  misc_feature (1)..(25): SEQ ID NO: 532; WAN024A2K; Start 59; Stop 83
cagcattctcaatgatttgaacatt

SEQ ID NO: 265971 - DNA, 25 bp, Artificial
  probe
  misc_feature (1)..(25): SEQ ID NO: 532; WAN024A2K; Start 56; Stop 80
gctcagcattctcaatgatttgaac

SEQ ID NO: 265972 - DNA, 25 bp, Artificial
  probe
  misc_feature (1)..(25): SEQ ID NO: 532; WAN024A2K; Start 98; Stop 122
accattcgatttatctgtttgtatt

SEQ ID NO: 265973 - DNA, 25 bp, Artificial
  probe
  misc_feature (1)..(25): SEQ ID NO: 532; WAN024A2K; Start 99; Stop 123
ccattcgatttatctgtttgtattg

SEQ ID NO: 265974 - DNA, 25 bp, Artificial
  probe
  misc_feature (1)..(25): SEQ ID NO: 532; WAN024A2K; Start 94; Stop 118
ctttaccattcgatttatctgtttg

SEQ ID NO: 265975 - DNA, 25 bp, Artificial
  probe
  misc_feature (1)..(25): SEQ ID NO: 532; WAN024A2K; Start 185; Stop 209
gctttgaaaattccattgtcatgtc

SEQ ID NO: 265976 - DNA, 25 bp, Artificial
  probe
  misc_feature (1)..(25): SEQ ID NO: 532; WAN024A2K; Start 188; Stop 212
ttgaaaattccattgtcatgtcatg

SEQ ID NO: 265977 - DNA, 25 bp, Artificial
  probe
  misc_feature (1)..(25): SEQ ID NO: 532; WAN024A2K; Start 186; Stop 210
ctttgaaaattccattgtcatgtca

SEQ ID NO: 265978 - DNA, 25 bp, Artificial
  probe
  misc_feature (1)..(25): SEQ ID NO: 532; WAN024A2K; Start 53; Stop 77
tttgctcagcattctcaatgatttg

SEQ ID NO: 265979 - DNA, 25 bp, Artificial
  probe
  misc_feature (1)..(25): SEQ ID NO: 532; WAN024A2K; Start 52; Stop 76
gtttgctcagcattctcaatgattt

SEQ ID NO: 265980 - DNA, 25 bp, Artificial
  probe
  misc_feature (1)..(25): SEQ ID NO: 532; WAN024A2K; Start 96; Stop 120
ttaccattcgatttatctgtttgta

SEQ ID NO: 265981 - DNA, 25 bp, Artificial
  probe
  misc_feature (1)..(25): SEQ ID NO: 532; WAN024A2K; Start 31; Stop 55
ttattgtcttcatctcttacagttt

SEQ ID NO: 265982 - DNA, 25 bp, Artificial
  probe
  misc_feature (1)..(25): SEQ ID NO: 532; WAN024A2K; Start 30; Stop 54
tttattgtcttcatctcttacagtt

SEQ ID NO: 265983 - DNA, 25 bp, Artificial
  probe
  misc_feature (1)..(25): SEQ ID NO: 532; WAN024A2K; Start 47; Stop 71
ttacagtttgctcagcattctcaat

SEQ ID NO: 265984 - DNA, 25 bp, Artificial
  probe
  misc_feature (1)..(25): SEQ ID NO: 532; WAN024A2K; Start 61; Stop 85
gcattctcaatgatttgaacattac

SEQ ID NO: 265985 - DNA, 25 bp, Artificial
  probe
  misc_feature (1)..(25): SEQ ID NO: 532; WAN024A2K; Start 184; Stop 208
agctttgaaaattccattgtcatgt

SEQ ID NO: 265986 - DNA, 25 bp, Artificial
  probe
  misc_feature (1)..(25): SEQ ID NO: 532; WAN024A2K; Start 42; Stop 66
atctcttacagtttgctcagcattc

SEQ ID NO: 265987 - DNA, 25 bp, Artificial
  probe
  misc_feature (1)..(25): SEQ ID NO: 532; WAN024A2K; Start 60; Stop 84
agcattctcaatgatttgaacatta

SEQ ID NO: 265988 - DNA, 25 bp, Artificial
  probe
  misc_feature (1)..(25): SEQ ID NO: 532; WAN024A2K; Start 55; Stop 79
tgctcagcattctcaatgatttgaa

SEQ ID NO: 265989 - DNA, 25 bp, Artificial
  probe
  misc_feature (1)..(25): SEQ ID NO: 533; WAN0249OS; Start 51; Stop 75
aagactgtaaaggataatctggctt

SEQ ID NO: 265990 - DNA, 25 bp, Artificial
  probe
  misc_feature (1)..(25): SEQ ID NO: 533; WAN0249OS; Start 50; Stop 74
aaagactgtaaaggataatctggct

SEQ ID NO: 265991 - DNA, 25 bp, Artificial
  probe
  misc_feature (1)..(25): SEQ ID NO: 533; WAN0249OS; Start 49; Stop 73
gaaagactgtaaaggataatctggc

SEQ ID NO: 265992 - DNA, 25 bp, Artificial
  probe
  misc_feature (1)..(25): SEQ ID NO: 533; WAN0249OS; Start 48; Stop 72
agaaagactgtaaaggataatctgg

SEQ ID NO: 265993 - DNA, 25 bp, Artificial
  probe
  misc_feature (1)..(25): SEQ ID NO: 533; WAN0249OS; Start 40; Stop 64
cactagatagaaagactgtaaagga

SEQ ID NO: 265994 - DNA, 25 bp, Artificial
  probe
  misc_feature (1)..(25): SEQ ID NO: 533; WAN0249OS; Start 52; Stop 76
agactgtaaaggataatctggcttt

SEQ ID NO: 265995 - DNA, 25 bp, Artificial
  probe
  misc_feature (1)..(25): SEQ ID NO: 533; WAN0249OS; Start 39; Stop 63
acactagatagaaagactgtaaagg

SEQ ID NO: 265996 - DNA, 25 bp, Artificial
  probe
  misc_feature (1)..(25): SEQ ID NO: 533; WAN0249OS; Start 105; Stop 129
cacagattgactaaaaggagacaca

SEQ ID NO: 265997 - DNA, 25 bp, Artificial
  probe
  misc_feature (1)..(25): SEQ ID NO: 533; WAN0249OS; Start 34; Stop 58
ttgttacactagatagaaagactgt

SEQ ID NO: 265998 - DNA, 25 bp, Artificial
  probe
  misc_feature (1)..(25): SEQ ID NO: 533; WAN0249OS; Start 103; Stop 127
ttcacagattgactaaaaggagaca

SEQ ID NO: 265999 - DNA, 25 bp, Artificial
  probe
  misc_feature (1)..(25): SEQ ID NO: 533; WAN0249OS; Start 104; Stop 128
tcacagattgactaaaaggagacac

SEQ ID NO: 266000 - DNA, 25 bp, Artificial
  probe
  misc_feature (1)..(25): SEQ ID NO: 533; WAN0249OS; Start 102; Stop 126
tttcacagattgactaaaaggagac

SEQ ID NO: 266001 - DNA, 25 bp, Artificial
  probe
  misc_feature (1)..(25): SEQ ID NO: 533; WAN0249OS; Start 41; Stop 65
actagatagaaagactgtaaaggat

SEQ ID NO: 266002 - DNA, 25 bp, Artificial
  probe
  misc_feature (1)..(25): SEQ ID NO: 533; WAN0249OS; Start 33; Stop 57
tttgttacactagatagaaagactg

SEQ ID NO: 266003 - DNA, 25 bp, Artificial
  probe
  misc_feature (1)..(25): SEQ ID NO: 533; WAN0249OS; Start 101; Stop 125
atttcacagattgactaaaaggaga

SEQ ID NO: 266004 - DNA, 25 bp, Artificial
  probe
  misc_feature (1)..(25): SEQ ID NO: 533; WAN0249OS; Start 47; Stop 71
tagaaagactgtaaaggataatctg

SEQ ID NO: 266005 - DNA, 25 bp, Artificial
  probe
  misc_feature (1)..(25): SEQ ID NO: 533; WAN0249OS; Start 53; Stop 77
gactgtaaaggataatctggctttt

SEQ ID NO: 266006 - DNA, 25 bp, Artificial
  probe
  misc_feature (1)..(25): SEQ ID NO: 533; WAN0249OS; Start 35; Stop 59
tgttacactagatagaaagactgta

SEQ ID NO: 266007 - DNA, 25 bp, Artificial
  probe
  misc_feature (1)..(25): SEQ ID NO: 533; WAN0249OS; Start 100; Stop 124
tatttcacagattgactaaaaggag

SEQ ID NO: 266008 - DNA, 25 bp, Artificial
  probe
  misc_feature (1)..(25): SEQ ID NO: 533; WAN0249OS; Start 98; Stop 122
gttatttcacagattgactaaaagg

SEQ ID NO: 266009 - DNA, 25 bp, Artificial
  probe
  misc_feature (1)..(25): SEQ ID NO: 533; WAN0249OS; Start 99; Stop 123
ttatttcacagattgactaaaagga

SEQ ID NO: 266010 - DNA, 25 bp, Artificial
  probe
  misc_feature (1)..(25): SEQ ID NO: 533; WAN0249OS; Start 95; Stop 119
aatgttatttcacagattgactaaa

SEQ ID NO: 266011 - DNA, 25 bp, Artificial
  probe
  misc_feature (1)..(25): SEQ ID NO: 533; WAN0249OS; Start 94; Stop 118
aaatgttatttcacagattgactaa

SEQ ID NO: 266012 - DNA, 25 bp, Artificial
  probe
  misc_feature (1)..(25): SEQ ID NO: 533; WAN0249OS; Start 76; Stop 100
tttgccattattctagagaaatgtt

SEQ ID NO: 266013 - DNA, 25 bp, Artificial
  probe
  misc_feature (1)..(25): SEQ ID NO: 533; WAN0249OS; Start 38; Stop 62
tacactagatagaaagactgtaaag

SEQ ID NO: 266014 - DNA, 25 bp, Artificial
  probe
  misc_feature (1)..(25): SEQ ID NO: 533; WAN0249OS; Start 32; Stop 56
ttttgttacactagatagaaagact

SEQ ID NO: 266015 - DNA, 25 bp, Artificial
  probe
  misc_feature (1)..(25): SEQ ID NO: 533; WAN0249OS; Start 97; Stop 121
tgttatttcacagattgactaaaag

SEQ ID NO: 266016 - DNA, 25 bp, Artificial
  probe
  misc_feature (1)..(25): SEQ ID NO: 533; WAN0249OS; Start 77; Stop 101
ttgccattattctagagaaatgtta

SEQ ID NO: 266017 - DNA, 25 bp, Artificial
  probe
  misc_feature (1)..(25): SEQ ID NO: 533; WAN0249OS; Start 92; Stop 116
agaaatgttatttcacagattgact

SEQ ID NO: 266018 - DNA, 25 bp, Artificial
  probe
  misc_feature (1)..(25): SEQ ID NO: 533; WAN0249OS; Start 91; Stop 115
gagaaatgttatttcacagattgac

SEQ ID NO: 266019 - DNA, 25 bp, Artificial
  probe
  misc_feature (1)..(25): SEQ ID NO: 533; WAN0249OS; Start 78; Stop 102
tgccattattctagagaaatgttat

SEQ ID NO: 266020 - DNA, 25 bp, Artificial
  probe
  misc_feature (1)..(25): SEQ ID NO: 533; WAN0249OS; Start 90; Stop 114
agagaaatgttatttcacagattga

SEQ ID NO: 266021 - DNA, 25 bp, Artificial
  probe
  misc_feature (1)..(25): SEQ ID NO: 533; WAN0249OS; Start 96; Stop 120
atgttatttcacagattgactaaaa

SEQ ID NO: 266022 - DNA, 25 bp, Artificial
  probe
  misc_feature (1)..(25): SEQ ID NO: 534; WAN0249GW; Start 36; Stop 60
aattatatacaatgtacgacgaagt

SEQ ID NO: 266023 - DNA, 25 bp, Artificial
  probe
  misc_feature (1)..(25): SEQ ID NO: 534; WAN0249GW; Start 37; Stop 61
attatatacaatgtacgacgaagtc

SEQ ID NO: 266024 - DNA, 25 bp, Artificial
  probe
  misc_feature (1)..(25): SEQ ID NO: 534; WAN0249GW; Start 90; Stop 114
agggaactttaaacaacattgataa

SEQ ID NO: 266025 - DNA, 25 bp, Artificial
  probe
  misc_feature (1)..(25): SEQ ID NO: 534; WAN0249GW; Start 89; Stop 113
aagggaactttaaacaacattgata

SEQ ID NO: 266026 - DNA, 25 bp, Artificial
  probe
  misc_feature (1)..(25): SEQ ID NO: 534; WAN0249GW; Start 33; Stop 57
agtaattatatacaatgtacgacga

SEQ ID NO: 266027 - DNA, 25 bp, Artificial
  probe
  misc_feature (1)..(25): SEQ ID NO: 534; WAN0249GW; Start 91; Stop 115
gggaactttaaacaacattgataag

SEQ ID NO: 266028 - DNA, 25 bp, Artificial
  probe
  misc_feature (1)..(25): SEQ ID NO: 534; WAN0249GW; Start 88; Stop 112
aaagggaactttaaacaacattgat

SEQ ID NO: 266029 - DNA, 25 bp, Artificial
  probe
  misc_feature (1)..(25): SEQ ID NO: 534; WAN0249GW; Start 77; Stop 101
atccaccacctaaagggaactttaa

SEQ ID NO: 266030 - DNA, 25 bp, Artificial
  probe
  misc_feature (1)..(25): SEQ ID NO: 534; WAN0249GW; Start 82; Stop 106
ccacctaaagggaactttaaacaac

SEQ ID NO: 266031 - DNA, 25 bp, Artificial
  probe
  misc_feature (1)..(25): SEQ ID NO: 534; WAN0249GW; Start 83; Stop 107
cacctaaagggaactttaaacaaca

SEQ ID NO: 266032 - DNA, 25 bp, Artificial
  probe
  misc_feature (1)..(25): SEQ ID NO: 534; WAN0249GW; Start 81; Stop 105
accacctaaagggaactttaaacaa

SEQ ID NO: 266033 - DNA, 25 bp, Artificial
  probe
  misc_feature (1)..(25): SEQ ID NO: 534; WAN0249GW; Start 80; Stop 104
caccacctaaagggaactttaaaca

SEQ ID NO: 266034 - DNA, 25 bp, Artificial
  probe
  misc_feature (1)..(25): SEQ ID NO: 534; WAN0249GW; Start 76; Stop 100
gatccaccacctaaagggaacttta

SEQ ID NO: 266035 - DNA, 25 bp, Artificial
  probe
  misc_feature (1)..(25): SEQ ID NO: 534; WAN0249GW; Start 84; Stop 108
acctaaagggaactttaaacaacat

SEQ ID NO: 266036 - DNA, 25 bp, Artificial
  probe
  misc_feature (1)..(25): SEQ ID NO: 534; WAN0249GW; Start 34; Stop 58
gtaattatatacaatgtacgacgaa

SEQ ID NO: 266037 - DNA, 25 bp, Artificial
  probe
  misc_feature (1)..(25): SEQ ID NO: 534; WAN0249GW; Start 32; Stop 56
aagtaattatatacaatgtacgacg

SEQ ID NO: 266038 - DNA, 25 bp, Artificial
  probe
  misc_feature (1)..(25): SEQ ID NO: 534; WAN0249GW; Start 75; Stop 99
tgatccaccacctaaagggaacttt

SEQ ID NO: 266039 - DNA, 25 bp, Artificial
  probe
  misc_feature (1)..(25): SEQ ID NO: 534; WAN0249GW; Start 79; Stop 103
ccaccacctaaagggaactttaaac

SEQ ID NO: 266040 - DNA, 25 bp, Artificial
  probe
  misc_feature (1)..(25): SEQ ID NO: 534; WAN0249GW; Start 78; Stop 102
tccaccacctaaagggaactttaaa

SEQ ID NO: 266041 - DNA, 25 bp, Artificial
  probe
  misc_feature (1)..(25): SEQ ID NO: 534; WAN0249GW; Start 74; Stop 98
ctgatccaccacctaaagggaactt

SEQ ID NO: 266042 - DNA, 25 bp, Artificial
  probe
  misc_feature (1)..(25): SEQ ID NO: 534; WAN0249GW; Start 92; Stop 116
ggaactttaaacaacattgataaga

SEQ ID NO: 266043 - DNA, 25 bp, Artificial
  probe
  misc_feature (1)..(25): SEQ ID NO: 534; WAN0249GW; Start 85; Stop 109
cctaaagggaactttaaacaacatt

SEQ ID NO: 266044 - DNA, 25 bp, Artificial
  probe
  misc_feature (1)..(25): SEQ ID NO: 534; WAN0249GW; Start 87; Stop 111
taaagggaactttaaacaacattga

SEQ ID NO: 266045 - DNA, 25 bp, Artificial
  probe
  misc_feature (1)..(25): SEQ ID NO: 534; WAN0249GW; Start 86; Stop 110
ctaaagggaactttaaacaacattg

SEQ ID NO: 266046 - DNA, 25 bp, Artificial
  probe
  misc_feature (1)..(25): SEQ ID NO: 534; WAN0249GW; Start 133; Stop 157
cgaaaatacgttatacccaattaat

SEQ ID NO: 266047 - DNA, 25 bp, Artificial
  probe
  misc_feature (1)..(25): SEQ ID NO: 534; WAN0249GW; Start 2; Stop 26
taagatcattccttttctctctttt

SEQ ID NO: 266048 - DNA, 25 bp, Artificial
  probe
  misc_feature (1)..(25): SEQ ID NO: 534; WAN0249GW; Start 132; Stop 156
acgaaaatacgttatacccaattaa

SEQ ID NO: 266049 - DNA, 25 bp, Artificial
  probe
  misc_feature (1)..(25): SEQ ID NO: 534; WAN0249GW; Start 1; Stop 25
ataagatcattccttttctctcttt

SEQ ID NO: 266050 - DNA, 25 bp, Artificial
  probe
  misc_feature (1)..(25): SEQ ID NO: 534; WAN0249GW; Start 128; Stop 152
aacaacgaaaatacgttatacccaa

SEQ ID NO: 266051 - DNA, 25 bp, Artificial
  probe
  misc_feature (1)..(25): SEQ ID NO: 534; WAN0249GW; Start 127; Stop 151
aaacaacgaaaatacgttataccca

SEQ ID NO: 266052 - DNA, 25 bp, Artificial
  probe
  misc_feature (1)..(25): SEQ ID NO: 534; WAN0249GW; Start 129; Stop 153
acaacgaaaatacgttatacccaat

SEQ ID NO: 266053 - DNA, 25 bp, Artificial
  probe
  misc_feature (1)..(25): SEQ ID NO: 534; WAN0249GW; Start 66; Stop 90
ttgcaatgctgatccaccacctaaa

SEQ ID NO: 266054 - DNA, 25 bp, Artificial
  probe
  misc_feature (1)..(25): SEQ ID NO: 534; WAN0249GW; Start 130; Stop 154
caacgaaaatacgttatacccaatt

SEQ ID NO: 266055 - DNA, 25 bp, Artificial
  probe
  misc_feature (1)..(25): SEQ ID NO: 535; WAN0249FW; Start 77; Stop 101
atctcttcctaaatactcagaaaag

SEQ ID NO: 266056 - DNA, 25 bp, Artificial
  probe
  misc_feature (1)..(25): SEQ ID NO: 535; WAN0249FW; Start 78; Stop 102
tctcttcctaaatactcagaaaaga

SEQ ID NO: 266057 - DNA, 25 bp, Artificial
  probe
  misc_feature (1)..(25): SEQ ID NO: 535; WAN0249FW; Start 81; Stop 105
cttcctaaatactcagaaaagattc

SEQ ID NO: 266058 - DNA, 25 bp, Artificial
  probe
  misc_feature (1)..(25): SEQ ID NO: 535; WAN0249FW; Start 79; Stop 103
ctcttcctaaatactcagaaaagat

SEQ ID NO: 266059 - DNA, 25 bp, Artificial
  probe
  misc_feature (1)..(25): SEQ ID NO: 535; WAN0249FW; Start 82; Stop 106
ttcctaaatactcagaaaagattct

SEQ ID NO: 266060 - DNA, 25 bp, Artificial
  probe
  misc_feature (1)..(25): SEQ ID NO: 535; WAN0249FW; Start 80; Stop 104
tcttcctaaatactcagaaaagatt

SEQ ID NO: 266061 - DNA, 25 bp, Artificial
  probe
  misc_feature (1)..(25): SEQ ID NO: 536; WAN024AEC; Start 7; Stop 31
cctcttctagctgattttaataaca

SEQ ID NO: 266062 - DNA, 25 bp, Artificial
  probe
  misc_feature (1)..(25): SEQ ID NO: 536; WAN024AEC; Start 6; Stop 30
acctcttctagctgattttaataac

SEQ ID NO: 266063 - DNA, 25 bp, Artificial
  probe
  misc_feature (1)..(25): SEQ ID NO: 536; WAN024AEC; Start 3; Stop 27
aatacctcttctagctgattttaat

SEQ ID NO: 266064 - DNA, 25 bp, Artificial
  probe
  misc_feature (1)..(25): SEQ ID NO: 536; WAN024AEC; Start 8; Stop 32
ctcttctagctgattttaataacag

SEQ ID NO: 266065 - DNA, 25 bp, Artificial
  probe
  misc_feature (1)..(25): SEQ ID NO: 536; WAN024AEC; Start 5; Stop 29
tacctcttctagctgattttaataa

SEQ ID NO: 266066 - DNA, 25 bp, Artificial
  probe
  misc_feature (1)..(25): SEQ ID NO: 536; WAN024AEC; Start 2; Stop 26
taatacctcttctagctgattttaa

SEQ ID NO: 266067 - DNA, 25 bp, Artificial
  probe
  misc_feature (1)..(25): SEQ ID NO: 536; WAN024AEC; Start 25; Stop 49
aataacagcttattttaaggctttt

SEQ ID NO: 266068 - DNA, 25 bp, Artificial
  probe
  misc_feature (1)..(25): SEQ ID NO: 536; WAN024AEC; Start 4; Stop 28
atacctcttctagctgattttaata

SEQ ID NO: 266069 - DNA, 25 bp, Artificial
  probe
  misc_feature (1)..(25): SEQ ID NO: 536; WAN024AEC; Start 1; Stop 25
ataatacctcttctagctgatttta

SEQ ID NO: 266070 - DNA, 25 bp, Artificial
  probe
  misc_feature (1)..(25): SEQ ID NO: 536; WAN024AEC; Start 24; Stop 48
taataacagcttattttaaggcttt

SEQ ID NO: 266071 - DNA, 25 bp, Artificial
  probe
  misc_feature (1)..(25): SEQ ID NO: 536; WAN024AEC; Start 23; Stop 47
ttaataacagcttattttaaggctt

SEQ ID NO: 266072 - DNA, 25 bp, Artificial
  probe
  misc_feature (1)..(25): SEQ ID NO: 536; WAN024AEC; Start 22; Stop 46
tttaataacagcttattttaaggct

SEQ ID NO: 266073 - DNA, 25 bp, Artificial
  probe
  misc_feature (1)..(25): SEQ ID NO: 538; WAN024AI5; Start 19; Stop 43
agaacctttgtcaatgtataactga

SEQ ID NO: 266074 - DNA, 25 bp, Artificial
  probe
  misc_feature (1)..(25): SEQ ID NO: 538; WAN024AI5; Start 17; Stop 41
acagaacctttgtcaatgtataact

SEQ ID NO: 266075 - DNA, 25 bp, Artificial
  probe
  misc_feature (1)..(25): SEQ ID NO: 538; WAN024AI5; Start 37; Stop 61
taactgacaaagatggagaatttct

SEQ ID NO: 266076 - DNA, 25 bp, Artificial
  probe
  misc_feature (1)..(25): SEQ ID NO: 538; WAN024AI5; Start 18; Stop 42
cagaacctttgtcaatgtataactg

SEQ ID NO: 266077 - DNA, 25 bp, Artificial
  probe
  misc_feature (1)..(25): SEQ ID NO: 538; WAN024AI5; Start 29; Stop 53
tcaatgtataactgacaaagatgga

SEQ ID NO: 266078 - DNA, 25 bp, Artificial
  probe
  misc_feature (1)..(25): SEQ ID NO: 538; WAN024AI5; Start 36; Stop 60
ataactgacaaagatggagaatttc

SEQ ID NO: 266079 - DNA, 25 bp, Artificial
  probe
  misc_feature (1)..(25): SEQ ID NO: 538; WAN024AI5; Start 30; Stop 54
caatgtataactgacaaagatggag

SEQ ID NO: 266080 - DNA, 25 bp, Artificial
  probe
  misc_feature (1)..(25): SEQ ID NO: 538; WAN024AI5; Start 33; Stop 57
tgtataactgacaaagatggagaat

SEQ ID NO: 266081 - DNA, 25 bp, Artificial
  probe
  misc_feature (1)..(25): SEQ ID NO: 538; WAN024AI5; Start 32; Stop 56
atgtataactgacaaagatggagaa

SEQ ID NO: 266082 - DNA, 25 bp, Artificial
  probe
  misc_feature (1)..(25): SEQ ID NO: 538; WAN024AI5; Start 31; Stop 55
aatgtataactgacaaagatggaga

SEQ ID NO: 266083 - DNA, 25 bp, Artificial
  probe
  misc_feature (1)..(25): SEQ ID NO: 538; WAN024AI5; Start 34; Stop 58
gtataactgacaaagatggagaatt

SEQ ID NO: 266084 - DNA, 25 bp, Artificial
  probe
  misc_feature (1)..(25): SEQ ID NO: 538; WAN024AI5; Start 35; Stop 59
tataactgacaaagatggagaattt

SEQ ID NO: 266085 - DNA, 25 bp, Artificial
  probe
  misc_feature (1)..(25): SEQ ID NO: 538; WAN024AI5; Start 13; Stop 37
aaagacagaacctttgtcaatgtat

SEQ ID NO: 266086 - DNA, 25 bp, Artificial
  probe
  misc_feature (1)..(25): SEQ ID NO: 538; WAN024AI5; Start 20; Stop 44
gaacctttgtcaatgtataactgac

SEQ ID NO: 266087 - DNA, 25 bp, Artificial
  probe
  misc_feature (1)..(25): SEQ ID NO: 538; WAN024AI5; Start 16; Stop 40
gacagaacctttgtcaatgtataac

SEQ ID NO: 266088 - DNA, 25 bp, Artificial
  probe
  misc_feature (1)..(25): SEQ ID NO: 538; WAN024AI5; Start 15; Stop 39
agacagaacctttgtcaatgtataa

SEQ ID NO: 266089 - DNA, 25 bp, Artificial
  probe
  misc_feature (1)..(25): SEQ ID NO: 538; WAN024AI5; Start 14; Stop 38
aagacagaacctttgtcaatgtata

SEQ ID NO: 266090 - DNA, 25 bp, Artificial
  probe
  misc_feature (1)..(25): SEQ ID NO: 538; WAN024AI5; Start 28; Stop 52
gtcaatgtataactgacaaagatgg

SEQ ID NO: 266091 - DNA, 25 bp, Artificial
  probe
  misc_feature (1)..(25): SEQ ID NO: 538; WAN024AI5; Start 12; Stop 36
aaaagacagaacctttgtcaatgta

SEQ ID NO: 266092 - DNA, 25 bp, Artificial
  probe
  misc_feature (1)..(25): SEQ ID NO: 539; WAN0249M4; Start 8; Stop 32
ctaatagaactttctctccatgagg

SEQ ID NO: 266093 - DNA, 25 bp, Artificial
  probe
  misc_feature (1)..(25): SEQ ID NO: 539; WAN0249M4; Start 9; Stop 33
taatagaactttctctccatgagga

SEQ ID NO: 266094 - DNA, 25 bp, Artificial
  probe
  misc_feature (1)..(25): SEQ ID NO: 539; WAN0249M4; Start 7; Stop 31
tctaatagaactttctctccatgag

SEQ ID NO: 266095 - DNA, 25 bp, Artificial
  probe
  misc_feature (1)..(25): SEQ ID NO: 539; WAN0249M4; Start 29; Stop 53
gaggagaaggttcttttgggatttt

SEQ ID NO: 266096 - DNA, 25 bp, Artificial
  probe
  misc_feature (1)..(25): SEQ ID NO: 539; WAN0249M4; Start 27; Stop 51
atgaggagaaggttcttttgggatt

SEQ ID NO: 266097 - DNA, 25 bp, Artificial
  probe
  misc_feature (1)..(25): SEQ ID NO: 539; WAN0249M4; Start 28; Stop 52
tgaggagaaggttcttttgggattt

SEQ ID NO: 266098 - DNA, 25 bp, Artificial
  probe
  misc_feature (1)..(25): SEQ ID NO: 539; WAN0249M4; Start 26; Stop 50
catgaggagaaggttcttttgggat

SEQ ID NO: 266099 - DNA, 25 bp, Artificial
  probe
  misc_feature (1)..(25): SEQ ID NO: 539; WAN0249M4; Start 6; Stop 30
ttctaatagaactttctctccatga

SEQ ID NO: 266100 - DNA, 25 bp, Artificial
  probe
  misc_feature (1)..(25): SEQ ID NO: 539; WAN0249M4; Start 5; Stop 29
tttctaatagaactttctctccatg

SEQ ID NO: 266101 - DNA, 25 bp, Artificial
  probe
  misc_feature (1)..(25): SEQ ID NO: 539; WAN0249M4; Start 10; Stop 34
aatagaactttctctccatgaggag

SEQ ID NO: 266102 - DNA, 25 bp, Artificial
  probe
  misc_feature (1)..(25): SEQ ID NO: 539; WAN0249M4; Start 3; Stop 27
aatttctaatagaactttctctcca

SEQ ID NO: 266103 - DNA, 25 bp, Artificial
  probe
  misc_feature (1)..(25): SEQ ID NO: 539; WAN0249M4; Start 4; Stop 28
atttctaatagaactttctctccat

SEQ ID NO: 266104 - DNA, 25 bp, Artificial
  probe
  misc_feature (1)..(25): SEQ ID NO: 539; WAN0249M4; Start 25; Stop 49
ccatgaggagaaggttcttttggga

SEQ ID NO: 266105 - DNA, 25 bp, Artificial
  probe
  misc_feature (1)..(25): SEQ ID NO: 539; WAN0249M4; Start 24; Stop 48
tccatgaggagaaggttcttttggg

SEQ ID NO: 266106 - DNA, 25 bp, Artificial
  probe
  misc_feature (1)..(25): SEQ ID NO: 539; WAN0249M4; Start 23; Stop 47
ctccatgaggagaaggttcttttgg

SEQ ID NO: 266107 - DNA, 25 bp, Artificial
  probe
  misc_feature (1)..(25): SEQ ID NO: 540; WAN0249FJ; Start 114; Stop 138
ggacgtaagttcacctcctatataa

SEQ ID NO: 266108 - DNA, 25 bp, Artificial
  probe
  misc_feature (1)..(25): SEQ ID NO: 540; WAN0249FJ; Start 117; Stop 141
cgtaagttcacctcctatataaaca

SEQ ID NO: 266109 - DNA, 25 bp, Artificial
  probe
  misc_feature (1)..(25): SEQ ID NO: 540; WAN0249FJ; Start 121; Stop 145
agttcacctcctatataaacaagtt

SEQ ID NO: 266110 - DNA, 25 bp, Artificial
  probe
  misc_feature (1)..(25): SEQ ID NO: 540; WAN0249FJ; Start 120; Stop 144
aagttcacctcctatataaacaagt

SEQ ID NO: 266111 - DNA, 25 bp, Artificial
  probe
  misc_feature (1)..(25): SEQ ID NO: 540; WAN0249FJ; Start 113; Stop 137
gggacgtaagttcacctcctatata

SEQ ID NO: 266112 - DNA, 25 bp, Artificial
  probe
  misc_feature (1)..(25): SEQ ID NO: 540; WAN0249FJ; Start 115; Stop 139
gacgtaagttcacctcctatataaa

SEQ ID NO: 266113 - DNA, 25 bp, Artificial
  probe
  misc_feature (1)..(25): SEQ ID NO: 540; WAN0249FJ; Start 116; Stop 140
acgtaagttcacctcctatataaac

SEQ ID NO: 266114 - DNA, 25 bp, Artificial
  probe
  misc_feature (1)..(25): SEQ ID NO: 540; WAN0249FJ; Start 102; Stop 126
aaaggataggagggacgtaagttca

SEQ ID NO: 266115 - DNA, 25 bp, Artificial
  probe
  misc_feature (1)..(25): SEQ ID NO: 540; WAN0249FJ; Start 112; Stop 136
agggacgtaagttcacctcctatat

SEQ ID NO: 266116 - DNA, 25 bp, Artificial
  probe
  misc_feature (1)..(25): SEQ ID NO: 540; WAN0249FJ; Start 20; Stop 44
tccgcgctatctatttaacatcatt

SEQ ID NO: 266117 - DNA, 25 bp, Artificial
  probe
  misc_feature (1)..(25): SEQ ID NO: 540; WAN0249FJ; Start 118; Stop 142
gtaagttcacctcctatataaacaa

SEQ ID NO: 266118 - DNA, 25 bp, Artificial
  probe
  misc_feature (1)..(25): SEQ ID NO: 540; WAN0249FJ; Start 103; Stop 127
aaggataggagggacgtaagttcac

SEQ ID NO: 266119 - DNA, 25 bp, Artificial
  probe
  misc_feature (1)..(25): SEQ ID NO: 540; WAN0249FJ; Start 98; Stop 122
tttaaaaggataggagggacgtaag

SEQ ID NO: 266120 - DNA, 25 bp, Artificial
  probe
  misc_feature (1)..(25): SEQ ID NO: 540; WAN0249FJ; Start 21; Stop 45
ccgcgctatctatttaacatcatta

SEQ ID NO: 266121 - DNA, 25 bp, Artificial
  probe
  misc_feature (1)..(25): SEQ ID NO: 540; WAN0249FJ; Start 19; Stop 43
ctccgcgctatctatttaacatcat

SEQ ID NO: 266122 - DNA, 25 bp, Artificial
  probe
  misc_feature (1)..(25): SEQ ID NO: 540; WAN0249FJ; Start 100; Stop 124
taaaaggataggagggacgtaagtt

SEQ ID NO: 266123 - DNA, 25 bp, Artificial
  probe
  misc_feature (1)..(25): SEQ ID NO: 540; WAN0249FJ; Start 99; Stop 123
ttaaaaggataggagggacgtaagt

SEQ ID NO: 266124 - DNA, 25 bp, Artificial
  probe
  misc_feature (1)..(25): SEQ ID NO: 540; WAN0249FJ; Start 119; Stop 143
taagttcacctcctatataaacaag

SEQ ID NO: 266125 - DNA, 25 bp, Artificial
  probe
  misc_feature (1)..(25): SEQ ID NO: 540; WAN0249FJ; Start 101; Stop 125
aaaaggataggagggacgtaagttc

SEQ ID NO: 266126 - DNA, 25 bp, Artificial
  probe
  misc_feature (1)..(25): SEQ ID NO: 540; WAN0249FJ; Start 22; Stop 46
cgcgctatctatttaacatcattat

SEQ ID NO: 266127 - DNA, 25 bp, Artificial
  probe
  misc_feature (1)..(25): SEQ ID NO: 540; WAN0249FJ; Start 18; Stop 42
cctccgcgctatctatttaacatca

SEQ ID NO: 266128 - DNA, 25 bp, Artificial
  probe
  misc_feature (1)..(25): SEQ ID NO: 540; WAN0249FJ; Start 97; Stop 121
ttttaaaaggataggagggacgtaa

SEQ ID NO: 266129 - DNA, 25 bp, Artificial
  probe
  misc_feature (1)..(25): SEQ ID NO: 540; WAN0249FJ; Start 104; Stop 128
aggataggagggacgtaagttcacc

SEQ ID NO: 266130 - DNA, 25 bp, Artificial
  probe
  misc_feature (1)..(25): SEQ ID NO: 540; WAN0249FJ; Start 17; Stop 41
gcctccgcgctatctatttaacatc

SEQ ID NO: 266131 - DNA, 25 bp, Artificial
  probe
  misc_feature (1)..(25): SEQ ID NO: 540; WAN0249FJ; Start 105; Stop 129
ggataggagggacgtaagttcacct

SEQ ID NO: 266132 - DNA, 25 bp, Artificial
  probe
  misc_feature (1)..(25): SEQ ID NO: 540; WAN0249FJ; Start 111; Stop 135
gagggacgtaagttcacctcctata

SEQ ID NO: 266133 - DNA, 25 bp, Artificial
  probe
  misc_feature (1)..(25): SEQ ID NO: 540; WAN0249FJ; Start 23; Stop 47
gcgctatctatttaacatcattata

SEQ ID NO: 266134 - DNA, 25 bp, Artificial
  probe
  misc_feature (1)..(25): SEQ ID NO: 540; WAN0249FJ; Start 106; Stop 130
gataggagggacgtaagttcacctc

SEQ ID NO: 266135 - DNA, 25 bp, Artificial
  probe
  misc_feature (1)..(25): SEQ ID NO: 540; WAN0249FJ; Start 75; Stop 99
ttgtgaattgtttaacaaatctttt

SEQ ID NO: 266136 - DNA, 25 bp, Artificial
  probe
  misc_feature (1)..(25): SEQ ID NO: 541; WAN0249TK; Start 286; Stop 310
tcctattccagattcagttcactat

SEQ ID NO: 266137 - DNA, 25 bp, Artificial
  probe
  misc_feature (1)..(25): SEQ ID NO: 541; WAN0249TK; Start 285; Stop 309
atcctattccagattcagttcacta

SEQ ID NO: 266138 - DNA, 25 bp, Artificial
  probe
  misc_feature (1)..(25): SEQ ID NO: 541; WAN0249TK; Start 284; Stop 308
tatcctattccagattcagttcact

SEQ ID NO: 266139 - DNA, 25 bp, Artificial
  probe
  misc_feature (1)..(25): SEQ ID NO: 541; WAN0249TK; Start 283; Stop 307
ttatcctattccagattcagttcac

SEQ ID NO: 266140 - DNA, 25 bp, Artificial
  probe
  misc_feature (1)..(25): SEQ ID NO: 541; WAN0249TK; Start 347; Stop 371
gtacataattaggttcgtgattcca

SEQ ID NO: 266141 - DNA, 25 bp, Artificial
  probe
  misc_feature (1)..(25): SEQ ID NO: 541; WAN0249TK; Start 291; Stop 315
ttccagattcagttcactatacaat

SEQ ID NO: 266142 - DNA, 25 bp, Artificial
  probe
  misc_feature (1)..(25): SEQ ID NO: 541; WAN0249TK; Start 290; Stop 314
attccagattcagttcactatacaa

SEQ ID NO: 266143 - DNA, 25 bp, Artificial
  probe
  misc_feature (1)..(25): SEQ ID NO: 541; WAN0249TK; Start 292; Stop 316
tccagattcagttcactatacaatt

SEQ ID NO: 266144 - DNA, 25 bp, Artificial
  probe
  misc_feature (1)..(25): SEQ ID NO: 541; WAN0249TK; Start 287; Stop 311
cctattccagattcagttcactata

SEQ ID NO: 266145 - DNA, 25 bp, Artificial
  probe
  misc_feature (1)..(25): SEQ ID NO: 541; WAN0249TK; Start 212; Stop 236
aaatgaaataagaacggaacgatgg

SEQ ID NO: 266146 - DNA, 25 bp, Artificial
  probe
  misc_feature (1)..(25): SEQ ID NO: 541; WAN0249TK; Start 282; Stop 306
attatcctattccagattcagttca

SEQ ID NO: 266147 - DNA, 25 bp, Artificial
  probe
  misc_feature (1)..(25): SEQ ID NO: 541; WAN0249TK; Start 289; Stop 313
tattccagattcagttcactataca

SEQ ID NO: 266148 - DNA, 25 bp, Artificial
  probe
  misc_feature (1)..(25): SEQ ID NO: 541; WAN0249TK; Start 348; Stop 372
tacataattaggttcgtgattccac

SEQ ID NO: 266149 - DNA, 25 bp, Artificial
  probe
  misc_feature (1)..(25): SEQ ID NO: 541; WAN0249TK; Start 216; Stop 240
gaaataagaacggaacgatgggatt

SEQ ID NO: 266150 - DNA, 25 bp, Artificial
  probe
  misc_feature (1)..(25): SEQ ID NO: 541; WAN0249TK; Start 349; Stop 373
acataattaggttcgtgattccacc

SEQ ID NO: 266151 - DNA, 25 bp, Artificial
  probe
  misc_feature (1)..(25): SEQ ID NO: 541; WAN0249TK; Start 213; Stop 237
aatgaaataagaacggaacgatggg

SEQ ID NO: 266152 - DNA, 25 bp, Artificial
  probe
  misc_feature (1)..(25): SEQ ID NO: 541; WAN0249TK; Start 187; Stop 211
acttatttcctttcactatatcgca

SEQ ID NO: 266153 - DNA, 25 bp, Artificial
  probe
  misc_feature (1)..(25): SEQ ID NO: 541; WAN0249TK; Start 288; Stop 312
ctattccagattcagttcactatac

SEQ ID NO: 266154 - DNA, 25 bp, Artificial
  probe
  misc_feature (1)..(25): SEQ ID NO: 541; WAN0249TK; Start 217; Stop 241
aaataagaacggaacgatgggattt

SEQ ID NO: 266155 - DNA, 25 bp, Artificial
  probe
  misc_feature (1)..(25): SEQ ID NO: 541; WAN0249TK; Start 215; Stop 239
tgaaataagaacggaacgatgggat

SEQ ID NO: 266156 - DNA, 25 bp, Artificial
  probe
  misc_feature (1)..(25): SEQ ID NO: 541; WAN0249TK; Start 214; Stop 238
atgaaataagaacggaacgatggga

SEQ ID NO: 266157 - DNA, 25 bp, Artificial
  probe
  misc_feature (1)..(25): SEQ ID NO: 541; WAN0249TK; Start 186; Stop 210
gacttatttcctttcactatatcgc

SEQ ID NO: 266158 - DNA, 25 bp, Artificial
  probe
  misc_feature (1)..(25): SEQ ID NO: 541; WAN0249TK; Start 176; Stop 200
tttgtgagctgacttatttcctttc

SEQ ID NO: 266159 - DNA, 25 bp, Artificial
  probe
  misc_feature (1)..(25): SEQ ID NO: 541; WAN0249TK; Start 188; Stop 212
cttatttcctttcactatatcgcaa

SEQ ID NO: 266160 - DNA, 25 bp, Artificial
  probe
  misc_feature (1)..(25): SEQ ID NO: 541; WAN0249TK; Start 180; Stop 204
tgagctgacttatttcctttcacta

SEQ ID NO: 266161 - DNA, 25 bp, Artificial
  probe
  misc_feature (1)..(25): SEQ ID NO: 541; WAN0249TK; Start 177; Stop 201
ttgtgagctgacttatttcctttca

SEQ ID NO: 266162 - DNA, 25 bp, Artificial
  probe
  misc_feature (1)..(25): SEQ ID NO: 541; WAN0249TK; Start 346; Stop 370
tgtacataattaggttcgtgattcc

SEQ ID NO: 266163 - DNA, 25 bp, Artificial
  probe
  misc_feature (1)..(25): SEQ ID NO: 541; WAN0249TK; Start 181; Stop 205
gagctgacttatttcctttcactat

SEQ ID NO: 266164 - DNA, 25 bp, Artificial
  probe
  misc_feature (1)..(25): SEQ ID NO: 541; WAN0249TK; Start 189; Stop 213
ttatttcctttcactatatcgcaaa

SEQ ID NO: 266165 - DNA, 25 bp, Artificial
  probe
  misc_feature (1)..(25): SEQ ID NO: 541; WAN0249TK; Start 344; Stop 368
tgtgtacataattaggttcgtgatt

SEQ ID NO: 266166 - DNA, 25 bp, Artificial
  probe
  misc_feature (1)..(25): SEQ ID NO: 541; WAN0249TK; Start 293; Stop 317
ccagattcagttcactatacaattg

SEQ ID NO: 266167 - DNA, 25 bp, Artificial
  probe
  misc_feature (1)..(25): SEQ ID NO: 541; WAN0249TK; Start 281; Stop 305
tattatcctattccagattcagttc

SEQ ID NO: 266168 - DNA, 25 bp, Artificial
  probe
  misc_feature (1)..(25): SEQ ID NO: 541; WAN0249TK; Start 206; Stop 230
atcgcaaaatgaaataagaacggaa

SEQ ID NO: 266169 - DNA, 25 bp, Artificial
  probe
  misc_feature (1)..(25): SEQ ID NO: 542; WAN0249N8; Start 76; Stop 100
acttgtctacgattacctatatgcc

SEQ ID NO: 266170 - DNA, 25 bp, Artificial
  probe
  misc_feature (1)..(25): SEQ ID NO: 542; WAN0249N8; Start 75; Stop 99
cacttgtctacgattacctatatgc

SEQ ID NO: 266171 - DNA, 25 bp, Artificial
  probe
  misc_feature (1)..(25): SEQ ID NO: 542; WAN0249N8; Start 74; Stop 98
acacttgtctacgattacctatatg

SEQ ID NO: 266172 - DNA, 25 bp, Artificial
  probe
  misc_feature (1)..(25): SEQ ID NO: 542; WAN0249N8; Start 79; Stop 103
tgtctacgattacctatatgcccta

SEQ ID NO: 266173 - DNA, 25 bp, Artificial
  probe
  misc_feature (1)..(25): SEQ ID NO: 542; WAN0249N8; Start 85; Stop 109
cgattacctatatgccctattccag

SEQ ID NO: 266174 - DNA, 25 bp, Artificial
  probe
  misc_feature (1)..(25): SEQ ID NO: 542; WAN0249N8; Start 77; Stop 101
cttgtctacgattacctatatgccc

SEQ ID NO: 266175 - DNA, 25 bp, Artificial
  probe
  misc_feature (1)..(25): SEQ ID NO: 542; WAN0249N8; Start 78; Stop 102
ttgtctacgattacctatatgccct

SEQ ID NO: 266176 - DNA, 25 bp, Artificial
  probe
  misc_feature (1)..(25): SEQ ID NO: 542; WAN0249N8; Start 84; Stop 108
acgattacctatatgccctattcca

SEQ ID NO: 266177 - DNA, 25 bp, Artificial
  probe
  misc_feature (1)..(25): SEQ ID NO: 542; WAN0249N8; Start 86; Stop 110
gattacctatatgccctattccagt

SEQ ID NO: 266178 - DNA, 25 bp, Artificial
  probe
  misc_feature (1)..(25): SEQ ID NO: 542; WAN0249N8; Start 83; Stop 107
tacgattacctatatgccctattcc

SEQ ID NO: 266179 - DNA, 25 bp, Artificial
  probe
  misc_feature (1)..(25): SEQ ID NO: 542; WAN0249N8; Start 73; Stop 97
aacacttgtctacgattacctatat

SEQ ID NO: 266180 - DNA, 25 bp, Artificial
  probe
  misc_feature (1)..(25): SEQ ID NO: 542; WAN0249N8; Start 80; Stop 104
gtctacgattacctatatgccctat

SEQ ID NO: 266181 - DNA, 25 bp, Artificial
  probe
  misc_feature (1)..(25): SEQ ID NO: 542; WAN0249N8; Start 90; Stop 114
acctatatgccctattccagtattt

SEQ ID NO: 266182 - DNA, 25 bp, Artificial
  probe
  misc_feature (1)..(25): SEQ ID NO: 542; WAN0249N8; Start 81; Stop 105
tctacgattacctatatgccctatt

SEQ ID NO: 266183 - DNA, 25 bp, Artificial
  probe
  misc_feature (1)..(25): SEQ ID NO: 542; WAN0249N8; Start 82; Stop 106
ctacgattacctatatgccctattc

SEQ ID NO: 266184 - DNA, 25 bp, Artificial
  probe
  misc_feature (1)..(25): SEQ ID NO: 542; WAN0249N8; Start 89; Stop 113
tacctatatgccctattccagtatt

SEQ ID NO: 266185 - DNA, 25 bp, Artificial
  probe
  misc_feature (1)..(25): SEQ ID NO: 542; WAN0249N8; Start 88; Stop 112
ttacctatatgccctattccagtat

SEQ ID NO: 266186 - DNA, 25 bp, Artificial
  probe
  misc_feature (1)..(25): SEQ ID NO: 542; WAN0249N8; Start 87; Stop 111
attacctatatgccctattccagta

SEQ ID NO: 266187 - DNA, 25 bp, Artificial
  probe
  misc_feature (1)..(25): SEQ ID NO: 542; WAN0249N8; Start 18; Stop 42
tatgtttagtgatgcttgctataca

SEQ ID NO: 266188 - DNA, 25 bp, Artificial
  probe
  misc_feature (1)..(25): SEQ ID NO: 542; WAN0249N8; Start 72; Stop 96
aaacacttgtctacgattacctata

SEQ ID NO: 266189 - DNA, 25 bp, Artificial
  probe
  misc_feature (1)..(25): SEQ ID NO: 542; WAN0249N8; Start 17; Stop 41
atatgtttagtgatgcttgctatac

SEQ ID NO: 266190 - DNA, 25 bp, Artificial
  probe
  misc_feature (1)..(25): SEQ ID NO: 542; WAN0249N8; Start 187; Stop 211
tagtgttttagtttcaatccgccat

SEQ ID NO: 266191 - DNA, 25 bp, Artificial
  probe
  misc_feature (1)..(25): SEQ ID NO: 542; WAN0249N8; Start 98; Stop 122
gccctattccagtattttagaagca

SEQ ID NO: 266192 - DNA, 25 bp, Artificial
  probe
  misc_feature (1)..(25): SEQ ID NO: 542; WAN0249N8; Start 97; Stop 121
tgccctattccagtattttagaagc

SEQ ID NO: 266193 - DNA, 25 bp, Artificial
  probe
  misc_feature (1)..(25): SEQ ID NO: 542; WAN0249N8; Start 99; Stop 123
ccctattccagtattttagaagcac

SEQ ID NO: 266194 - DNA, 25 bp, Artificial
  probe
  misc_feature (1)..(25): SEQ ID NO: 542; WAN0249N8; Start 55; Stop 79
ctgcgagacaatctataaaacactt

SEQ ID NO: 266195 - DNA, 25 bp, Artificial
  probe
  misc_feature (1)..(25): SEQ ID NO: 542; WAN0249N8; Start 184; Stop 208
ttgtagtgttttagtttcaatccgc

SEQ ID NO: 266196 - DNA, 25 bp, Artificial
  probe
  misc_feature (1)..(25): SEQ ID NO: 542; WAN0249N8; Start 56; Stop 80
tgcgagacaatctataaaacacttg

SEQ ID NO: 266197 - DNA, 25 bp, Artificial
  probe
  misc_feature (1)..(25): SEQ ID NO: 542; WAN0249N8; Start 54; Stop 78
cctgcgagacaatctataaaacact

SEQ ID NO: 266198 - DNA, 25 bp, Artificial
  probe
  misc_feature (1)..(25): SEQ ID NO: 542; WAN0249N8; Start 53; Stop 77
tcctgcgagacaatctataaaacac

SEQ ID NO: 266199 - DNA, 25 bp, Artificial
  probe
  misc_feature (1)..(25): SEQ ID NO: 542; WAN0249N8; Start 186; Stop 210
gtagtgttttagtttcaatccgcca

SEQ ID NO: 266200 - DNA, 25 bp, Artificial
  probe
  misc_feature (1)..(25): SEQ ID NO: 542; WAN0249N8; Start 185; Stop 209
tgtagtgttttagtttcaatccgcc

SEQ ID NO: 266201 - DNA, 25 bp, Artificial
  probe
  misc_feature (1)..(25): SEQ ID NO: 542; WAN0249N8; Start 52; Stop 76
ctcctgcgagacaatctataaaaca

SEQ ID NO: 266202 - DNA, 25 bp, Artificial
  probe
  misc_feature (1)..(25): SEQ ID NO: 544; WAN024A8B; Start 1; Stop 25
atacagtaaactcctttctagcttt

SEQ ID NO: 266203 - DNA, 25 bp, Artificial
  probe
  misc_feature (1)..(25): SEQ ID NO: 544; WAN024A8B; Start 3; Stop 27
acagtaaactcctttctagctttat

SEQ ID NO: 266204 - DNA, 25 bp, Artificial
  probe
  misc_feature (1)..(25): SEQ ID NO: 544; WAN024A8B; Start 2; Stop 26
tacagtaaactcctttctagcttta

SEQ ID NO: 266205 - DNA, 25 bp, Artificial
  probe
  misc_feature (1)..(25): SEQ ID NO: 544; WAN024A8B; Start 8; Stop 32
aaactcctttctagctttatacttt

SEQ ID NO: 266206 - DNA, 25 bp, Artificial
  probe
  misc_feature (1)..(25): SEQ ID NO: 544; WAN024A8B; Start 6; Stop 30
gtaaactcctttctagctttatact

SEQ ID NO: 266207 - DNA, 25 bp, Artificial
  probe
  misc_feature (1)..(25): SEQ ID NO: 544; WAN024A8B; Start 5; Stop 29
agtaaactcctttctagctttatac

SEQ ID NO: 266208 - DNA, 25 bp, Artificial
  probe
  misc_feature (1)..(25): SEQ ID NO: 544; WAN024A8B; Start 4; Stop 28
cagtaaactcctttctagctttata

SEQ ID NO: 266209 - DNA, 25 bp, Artificial
  probe
  misc_feature (1)..(25): SEQ ID NO: 544; WAN024A8B; Start 9; Stop 33
aactcctttctagctttatacttta

SEQ ID NO: 266210 - DNA, 25 bp, Artificial
  probe
  misc_feature (1)..(25): SEQ ID NO: 544; WAN024A8B; Start 7; Stop 31
taaactcctttctagctttatactt

SEQ ID NO: 266211 - DNA, 25 bp, Artificial
  probe
  misc_feature (1)..(25): SEQ ID NO: 544; WAN024A8B; Start 12; Stop 36
tcctttctagctttatactttatca

SEQ ID NO: 266212 - DNA, 25 bp, Artificial
  probe
  misc_feature (1)..(25): SEQ ID NO: 544; WAN024A8B; Start 10; Stop 34
actcctttctagctttatactttat

SEQ ID NO: 266213 - DNA, 25 bp, Artificial
  probe
  misc_feature (1)..(25): SEQ ID NO: 544; WAN024A8B; Start 134; Stop 158
cggttttctaaataaatcaaactga

SEQ ID NO: 266214 - DNA, 25 bp, Artificial
  probe
  misc_feature (1)..(25): SEQ ID NO: 544; WAN024A8B; Start 133; Stop 157
tcggttttctaaataaatcaaactg

SEQ ID NO: 266215 - DNA, 25 bp, Artificial
  probe
  misc_feature (1)..(25): SEQ ID NO: 544; WAN024A8B; Start 128; Stop 152
gagaatcggttttctaaataaatca

SEQ ID NO: 266216 - DNA, 25 bp, Artificial
  probe
  misc_feature (1)..(25): SEQ ID NO: 544; WAN024A8B; Start 127; Stop 151
tgagaatcggttttctaaataaatc

SEQ ID NO: 266217 - DNA, 25 bp, Artificial
  probe
  misc_feature (1)..(25): SEQ ID NO: 544; WAN024A8B; Start 126; Stop 150
ctgagaatcggttttctaaataaat

SEQ ID NO: 266218 - DNA, 25 bp, Artificial
  probe
  misc_feature (1)..(25): SEQ ID NO: 544; WAN024A8B; Start 132; Stop 156
atcggttttctaaataaatcaaact

SEQ ID NO: 266219 - DNA, 25 bp, Artificial
  probe
  misc_feature (1)..(25): SEQ ID NO: 544; WAN024A8B; Start 129; Stop 153
agaatcggttttctaaataaatcaa

SEQ ID NO: 266220 - DNA, 25 bp, Artificial
  probe
  misc_feature (1)..(25): SEQ ID NO: 544; WAN024A8B; Start 131; Stop 155
aatcggttttctaaataaatcaaac

SEQ ID NO: 266221 - DNA, 25 bp, Artificial
  probe
  misc_feature (1)..(25): SEQ ID NO: 544; WAN024A8B; Start 148; Stop 172
aatcaaactgatcatttacataaca

SEQ ID NO: 266222 - DNA, 25 bp, Artificial
  probe
  misc_feature (1)..(25): SEQ ID NO: 544; WAN024A8B; Start 149; Stop 173
atcaaactgatcatttacataacat

SEQ ID NO: 266223 - DNA, 25 bp, Artificial
  probe
  misc_feature (1)..(25): SEQ ID NO: 545; WAN0249U7; Start 251; Stop 275
agtttgaagagatttccgaagagta

SEQ ID NO: 266224 - DNA, 25 bp, Artificial
  probe
  misc_feature (1)..(25): SEQ ID NO: 545; WAN0249U7; Start 250; Stop 274
tagtttgaagagatttccgaagagt

SEQ ID NO: 266225 - DNA, 25 bp, Artificial
  probe
  misc_feature (1)..(25): SEQ ID NO: 545; WAN0249U7; Start 53; Stop 77
atttcaaggctgtttgctttctatc

SEQ ID NO: 266226 - DNA, 25 bp, Artificial
  probe
  misc_feature (1)..(25): SEQ ID NO: 545; WAN0249U7; Start 52; Stop 76
gatttcaaggctgtttgctttctat

SEQ ID NO: 266227 - DNA, 25 bp, Artificial
  probe
  misc_feature (1)..(25): SEQ ID NO: 545; WAN0249U7; Start 252; Stop 276
gtttgaagagatttccgaagagtat

SEQ ID NO: 266228 - DNA, 25 bp, Artificial
  probe
  misc_feature (1)..(25): SEQ ID NO: 545; WAN0249U7; Start 248; Stop 272
cctagtttgaagagatttccgaaga

SEQ ID NO: 266229 - DNA, 25 bp, Artificial
  probe
  misc_feature (1)..(25): SEQ ID NO: 545; WAN0249U7; Start 247; Stop 271
acctagtttgaagagatttccgaag

SEQ ID NO: 266230 - DNA, 25 bp, Artificial
  probe
  misc_feature (1)..(25): SEQ ID NO: 545; WAN0249U7; Start 246; Stop 270
gacctagtttgaagagatttccgaa

SEQ ID NO: 266231 - DNA, 25 bp, Artificial
  probe
  misc_feature (1)..(25): SEQ ID NO: 545; WAN0249U7; Start 249; Stop 273
ctagtttgaagagatttccgaagag

SEQ ID NO: 266232 - DNA, 25 bp, Artificial
  probe
  misc_feature (1)..(25): SEQ ID NO: 545; WAN0249U7; Start 54; Stop 78
tttcaaggctgtttgctttctatct

SEQ ID NO: 266233 - DNA, 25 bp, Artificial
  probe
  misc_feature (1)..(25): SEQ ID NO: 545; WAN0249U7; Start 243; Stop 267
actgacctagtttgaagagatttcc

SEQ ID NO: 266234 - DNA, 25 bp, Artificial
  probe
  misc_feature (1)..(25): SEQ ID NO: 545; WAN0249U7; Start 244; Stop 268
ctgacctagtttgaagagatttccg

SEQ ID NO: 266235 - DNA, 25 bp, Artificial
  probe
  misc_feature (1)..(25): SEQ ID NO: 545; WAN0249U7; Start 242; Stop 266
cactgacctagtttgaagagatttc

SEQ ID NO: 266236 - DNA, 25 bp, Artificial
  probe
  misc_feature (1)..(25): SEQ ID NO: 545; WAN0249U7; Start 51; Stop 75
tgatttcaaggctgtttgctttcta

SEQ ID NO: 266237 - DNA, 25 bp, Artificial
  probe
  misc_feature (1)..(25): SEQ ID NO: 545; WAN0249U7; Start 55; Stop 79
ttcaaggctgtttgctttctatctc

SEQ ID NO: 266238 - DNA, 25 bp, Artificial
  probe
  misc_feature (1)..(25): SEQ ID NO: 545; WAN0249U7; Start 245; Stop 269
tgacctagtttgaagagatttccga

SEQ ID NO: 266239 - DNA, 25 bp, Artificial
  probe
  misc_feature (1)..(25): SEQ ID NO: 545; WAN0249U7; Start 241; Stop 265
gcactgacctagtttgaagagattt

SEQ ID NO: 266240 - DNA, 25 bp, Artificial
  probe
  misc_feature (1)..(25): SEQ ID NO: 545; WAN0249U7; Start 49; Stop 73
attgatttcaaggctgtttgctttc

SEQ ID NO: 266241 - DNA, 25 bp, Artificial
  probe
  misc_feature (1)..(25): SEQ ID NO: 545; WAN0249U7; Start 191; Stop 215
agtctactatagaactgaccaagtc

SEQ ID NO: 266242 - DNA, 25 bp, Artificial
  probe
  misc_feature (1)..(25): SEQ ID NO: 545; WAN0249U7; Start 48; Stop 72
cattgatttcaaggctgtttgcttt

SEQ ID NO: 266243 - DNA, 25 bp, Artificial
  probe
  misc_feature (1)..(25): SEQ ID NO: 545; WAN0249U7; Start 255; Stop 279
tgaagagatttccgaagagtataaa

SEQ ID NO: 266244 - DNA, 25 bp, Artificial
  probe
  misc_feature (1)..(25): SEQ ID NO: 545; WAN0249U7; Start 254; Stop 278
ttgaagagatttccgaagagtataa

SEQ ID NO: 266245 - DNA, 25 bp, Artificial
  probe
  misc_feature (1)..(25): SEQ ID NO: 545; WAN0249U7; Start 253; Stop 277
tttgaagagatttccgaagagtata

SEQ ID NO: 266246 - DNA, 25 bp, Artificial
  probe
  misc_feature (1)..(25): SEQ ID NO: 545; WAN0249U7; Start 50; Stop 74
ttgatttcaaggctgtttgctttct

SEQ ID NO: 266247 - DNA, 25 bp, Artificial
  probe
  misc_feature (1)..(25): SEQ ID NO: 545; WAN0249U7; Start 240; Stop 264
ggcactgacctagtttgaagagatt

SEQ ID NO: 266248 - DNA, 25 bp, Artificial
  probe
  misc_feature (1)..(25): SEQ ID NO: 545; WAN0249U7; Start 56; Stop 80
tcaaggctgtttgctttctatctcc

SEQ ID NO: 266249 - DNA, 25 bp, Artificial
  probe
  misc_feature (1)..(25): SEQ ID NO: 545; WAN0249U7; Start 47; Stop 71
acattgatttcaaggctgtttgctt

SEQ ID NO: 266250 - DNA, 25 bp, Artificial
  probe
  misc_feature (1)..(25): SEQ ID NO: 545; WAN0249U7; Start 62; Stop 86
ctgtttgctttctatctcccctttt

SEQ ID NO: 266251 - DNA, 25 bp, Artificial
  probe
  misc_feature (1)..(25): SEQ ID NO: 545; WAN0249U7; Start 20; Stop 44
gctgattcaggttcataatcgcagt

SEQ ID NO: 266252 - DNA, 25 bp, Artificial
  probe
  misc_feature (1)..(25): SEQ ID NO: 545; WAN0249U7; Start 256; Stop 280
gaagagatttccgaagagtataaat

SEQ ID NO: 266253 - DNA, 25 bp, Artificial
  probe
  misc_feature (1)..(25): SEQ ID NO: 545; WAN0249U7; Start 57; Stop 81
caaggctgtttgctttctatctccc

SEQ ID NO: 266254 - DNA, 25 bp, Artificial
  probe
  misc_feature (1)..(25): SEQ ID NO: 545; WAN0249U7; Start 213; Stop 237
gtcagtaacctagacttagggcaag

SEQ ID NO: 266255 - DNA, 25 bp, Artificial
  probe
  misc_feature (1)..(25): SEQ ID NO: 545; WAN0249U7; Start 19; Stop 43
ggctgattcaggttcataatcgcag

SEQ ID NO: 266256 - DNA, 25 bp, Artificial
  probe
  misc_feature (1)..(25): SEQ ID NO: 546; WAN024ANR; Start 33; Stop 57
tatcacttcaaaattagcttgtcaa

SEQ ID NO: 266257 - DNA, 25 bp, Artificial
  probe
  misc_feature (1)..(25): SEQ ID NO: 546; WAN024ANR; Start 32; Stop 56
ttatcacttcaaaattagcttgtca

SEQ ID NO: 266258 - DNA, 25 bp, Artificial
  probe
  misc_feature (1)..(25): SEQ ID NO: 546; WAN024ANR; Start 31; Stop 55
tttatcacttcaaaattagcttgtc

SEQ ID NO: 266259 - DNA, 25 bp, Artificial
  probe
  misc_feature (1)..(25): SEQ ID NO: 546; WAN024ANR; Start 18; Stop 42
ttcttgcatttattttatcacttca

SEQ ID NO: 266260 - DNA, 25 bp, Artificial
  probe
  misc_feature (1)..(25): SEQ ID NO: 546; WAN024ANR; Start 19; Stop 43
tcttgcatttattttatcacttcaa

SEQ ID NO: 266261 - DNA, 25 bp, Artificial
  probe
  misc_feature (1)..(25): SEQ ID NO: 546; WAN024ANR; Start 30; Stop 54
ttttatcacttcaaaattagcttgt

SEQ ID NO: 266262 - DNA, 25 bp, Artificial
  probe
  misc_feature (1)..(25): SEQ ID NO: 546; WAN024ANR; Start 15; Stop 39
gttttcttgcatttattttatcact

SEQ ID NO: 266263 - DNA, 25 bp, Artificial
  probe
  misc_feature (1)..(25): SEQ ID NO: 546; WAN024ANR; Start 20; Stop 44
cttgcatttattttatcacttcaaa

SEQ ID NO: 266264 - DNA, 25 bp, Artificial
  probe
  misc_feature (1)..(25): SEQ ID NO: 548; WAN024ANU; Start 89; Stop 113
taaagcgtttgaatgaagaaatgga

SEQ ID NO: 266265 - DNA, 25 bp, Artificial
  probe
  misc_feature (1)..(25): SEQ ID NO: 548; WAN024ANU; Start 91; Stop 115
aagcgtttgaatgaagaaatggaaa

SEQ ID NO: 266266 - DNA, 25 bp, Artificial
  probe
  misc_feature (1)..(25): SEQ ID NO: 548; WAN024ANU; Start 90; Stop 114
aaagcgtttgaatgaagaaatggaa

SEQ ID NO: 266267 - DNA, 25 bp, Artificial
  probe
  misc_feature (1)..(25): SEQ ID NO: 548; WAN024ANU; Start 92; Stop 116
agcgtttgaatgaagaaatggaaag

SEQ ID NO: 266268 - DNA, 25 bp, Artificial
  probe
  misc_feature (1)..(25): SEQ ID NO: 548; WAN024ANU; Start 93; Stop 117
gcgtttgaatgaagaaatggaaagt

SEQ ID NO: 266269 - DNA, 25 bp, Artificial
  probe
  misc_feature (1)..(25): SEQ ID NO: 548; WAN024ANU; Start 88; Stop 112
ataaagcgtttgaatgaagaaatgg

SEQ ID NO: 266270 - DNA, 25 bp, Artificial
  probe
  misc_feature (1)..(25): SEQ ID NO: 548; WAN024ANU; Start 28; Stop 52
ggaacagttggaattagaaagtgat

SEQ ID NO: 266271 - DNA, 25 bp, Artificial
  probe
  misc_feature (1)..(25): SEQ ID NO: 548; WAN024ANU; Start 27; Stop 51
gggaacagttggaattagaaagtga

SEQ ID NO: 266272 - DNA, 25 bp, Artificial
  probe
  misc_feature (1)..(25): SEQ ID NO: 548; WAN024ANU; Start 110; Stop 134
tggaaagtaaataagttgacgatga

SEQ ID NO: 266273 - DNA, 25 bp, Artificial
  probe
  misc_feature (1)..(25): SEQ ID NO: 548; WAN024ANU; Start 94; Stop 118
cgtttgaatgaagaaatggaaagta

SEQ ID NO: 266274 - DNA, 25 bp, Artificial
  probe
  misc_feature (1)..(25): SEQ ID NO: 548; WAN024ANU; Start 32; Stop 56
cagttggaattagaaagtgataggt

SEQ ID NO: 266275 - DNA, 25 bp, Artificial
  probe
  misc_feature (1)..(25): SEQ ID NO: 548; WAN024ANU; Start 31; Stop 55
acagttggaattagaaagtgatagg

SEQ ID NO: 266276 - DNA, 25 bp, Artificial
  probe
  misc_feature (1)..(25): SEQ ID NO: 548; WAN024ANU; Start 111; Stop 135
ggaaagtaaataagttgacgatgaa

SEQ ID NO: 266277 - DNA, 25 bp, Artificial
  probe
  misc_feature (1)..(25): SEQ ID NO: 548; WAN024ANU; Start 109; Stop 133
atggaaagtaaataagttgacgatg

SEQ ID NO: 266278 - DNA, 25 bp, Artificial
  probe
  misc_feature (1)..(25): SEQ ID NO: 548; WAN024ANU; Start 66; Stop 90
ggcgttgaagctgaataagtttata

SEQ ID NO: 266279 - DNA, 25 bp, Artificial
  probe
  misc_feature (1)..(25): SEQ ID NO: 548; WAN024ANU; Start 65; Stop 89
tggcgttgaagctgaataagtttat

SEQ ID NO: 266280 - DNA, 25 bp, Artificial
  probe
  misc_feature (1)..(25): SEQ ID NO: 548; WAN024ANU; Start 107; Stop 131
aaatggaaagtaaataagttgacga

SEQ ID NO: 266281 - DNA, 25 bp, Artificial
  probe
  misc_feature (1)..(25): SEQ ID NO: 548; WAN024ANU; Start 106; Stop 130
gaaatggaaagtaaataagttgacg

SEQ ID NO: 266282 - DNA, 25 bp, Artificial
  probe
  misc_feature (1)..(25): SEQ ID NO: 548; WAN024ANU; Start 67; Stop 91
gcgttgaagctgaataagtttataa

SEQ ID NO: 266283 - DNA, 25 bp, Artificial
  probe
  misc_feature (1)..(25): SEQ ID NO: 548; WAN024ANU; Start 108; Stop 132
aatggaaagtaaataagttgacgat

SEQ ID NO: 266284 - DNA, 25 bp, Artificial
  probe
  misc_feature (1)..(25): SEQ ID NO: 548; WAN024ANU; Start 33; Stop 57
agttggaattagaaagtgataggta

SEQ ID NO: 266285 - DNA, 25 bp, Artificial
  probe
  misc_feature (1)..(25): SEQ ID NO: 548; WAN024ANU; Start 29; Stop 53
gaacagttggaattagaaagtgata

SEQ ID NO: 266286 - DNA, 25 bp, Artificial
  probe
  misc_feature (1)..(25): SEQ ID NO: 548; WAN024ANU; Start 62; Stop 86
aagtggcgttgaagctgaataagtt

SEQ ID NO: 266287 - DNA, 25 bp, Artificial
  probe
  misc_feature (1)..(25): SEQ ID NO: 548; WAN024ANU; Start 36; Stop 60
tggaattagaaagtgataggtatga

SEQ ID NO: 266288 - DNA, 25 bp, Artificial
  probe
  misc_feature (1)..(25): SEQ ID NO: 548; WAN024ANU; Start 30; Stop 54
aacagttggaattagaaagtgatag

SEQ ID NO: 266289 - DNA, 25 bp, Artificial
  probe
  misc_feature (1)..(25): SEQ ID NO: 548; WAN024ANU; Start 87; Stop 111
tataaagcgtttgaatgaagaaatg

SEQ ID NO: 266290 - DNA, 25 bp, Artificial
  probe
  misc_feature (1)..(25): SEQ ID NO: 548; WAN024ANU; Start 64; Stop 88
gtggcgttgaagctgaataagttta

SEQ ID NO: 266291 - DNA, 25 bp, Artificial
  probe
  misc_feature (1)..(25): SEQ ID NO: 548; WAN024ANU; Start 44; Stop 68
gaaagtgataggtatgaaaagtggc

SEQ ID NO: 266292 - DNA, 25 bp, Artificial
  probe
  misc_feature (1)..(25): SEQ ID NO: 548; WAN024ANU; Start 24; Stop 48
taggggaacagttggaattagaaag

SEQ ID NO: 266293 - DNA, 25 bp, Artificial
  probe
  misc_feature (1)..(25): SEQ ID NO: 548; WAN024ANU; Start 95; Stop 119
gtttgaatgaagaaatggaaagtaa

SEQ ID NO: 266294 - DNA, 25 bp, Artificial
  probe
  misc_feature (1)..(25): SEQ ID NO: 548; WAN024ANU; Start 23; Stop 47
ctaggggaacagttggaattagaaa

SEQ ID NO: 266295 - DNA, 25 bp, Artificial
  probe
  misc_feature (1)..(25): SEQ ID NO: 548; WAN024ANU; Start 51; Stop 75
ataggtatgaaaagtggcgttgaag

SEQ ID NO: 266296 - DNA, 25 bp, Artificial
  probe
  misc_feature (1)..(25): SEQ ID NO: 548; WAN024ANU; Start 45; Stop 69
aaagtgataggtatgaaaagtggcg

SEQ ID NO: 266297 - DNA, 25 bp, Artificial
  probe
  misc_feature (1)..(25): SEQ ID NO: 549; WAN0249K7; Start 53; Stop 77
atggcataattcccttttgaaatca

SEQ ID NO: 266298 - DNA, 25 bp, Artificial
  probe
  misc_feature (1)..(25): SEQ ID NO: 549; WAN0249K7; Start 54; Stop 78
tggcataattcccttttgaaatcaa

SEQ ID NO: 266299 - DNA, 25 bp, Artificial
  probe
  misc_feature (1)..(25): SEQ ID NO: 549; WAN0249K7; Start 52; Stop 76
catggcataattcccttttgaaatc

SEQ ID NO: 266300 - DNA, 25 bp, Artificial
  probe
  misc_feature (1)..(25): SEQ ID NO: 549; WAN0249K7; Start 55; Stop 79
ggcataattcccttttgaaatcaat

SEQ ID NO: 266301 - DNA, 25 bp, Artificial
  probe
  misc_feature (1)..(25): SEQ ID NO: 549; WAN0249K7; Start 30; Stop 54
gagtttgtggcagagttctttccat

SEQ ID NO: 266302 - DNA, 25 bp, Artificial
  probe
  misc_feature (1)..(25): SEQ ID NO: 549; WAN0249K7; Start 31; Stop 55
agtttgtggcagagttctttccatg

SEQ ID NO: 266303 - DNA, 25 bp, Artificial
  probe
  misc_feature (1)..(25): SEQ ID NO: 549; WAN0249K7; Start 56; Stop 80
gcataattcccttttgaaatcaatt

SEQ ID NO: 266304 - DNA, 25 bp, Artificial
  probe
  misc_feature (1)..(25): SEQ ID NO: 549; WAN0249K7; Start 40; Stop 64
cagagttctttccatggcataattc

SEQ ID NO: 266305 - DNA, 25 bp, Artificial
  probe
  misc_feature (1)..(25): SEQ ID NO: 549; WAN0249K7; Start 45; Stop 69
ttctttccatggcataattcccttt

SEQ ID NO: 266306 - DNA, 25 bp, Artificial
  probe
  misc_feature (1)..(25): SEQ ID NO: 549; WAN0249K7; Start 41; Stop 65
agagttctttccatggcataattcc

SEQ ID NO: 266307 - DNA, 25 bp, Artificial
  probe
  misc_feature (1)..(25): SEQ ID NO: 549; WAN0249K7; Start 44; Stop 68
gttctttccatggcataattccctt

SEQ ID NO: 266308 - DNA, 25 bp, Artificial
  probe
  misc_feature (1)..(25): SEQ ID NO: 549; WAN0249K7; Start 39; Stop 63
gcagagttctttccatggcataatt

SEQ ID NO: 266309 - DNA, 25 bp, Artificial
  probe
  misc_feature (1)..(25): SEQ ID NO: 549; WAN0249K7; Start 42; Stop 66
gagttctttccatggcataattccc

SEQ ID NO: 266310 - DNA, 25 bp, Artificial
  probe
  misc_feature (1)..(25): SEQ ID NO: 549; WAN0249K7; Start 43; Stop 67
agttctttccatggcataattccct

SEQ ID NO: 266311 - DNA, 25 bp, Artificial
  probe
  misc_feature (1)..(25): SEQ ID NO: 549; WAN0249K7; Start 38; Stop 62
ggcagagttctttccatggcataat

SEQ ID NO: 266312 - DNA, 25 bp, Artificial
  probe
  misc_feature (1)..(25): SEQ ID NO: 549; WAN0249K7; Start 51; Stop 75
ccatggcataattcccttttgaaat

SEQ ID NO: 266313 - DNA, 25 bp, Artificial
  probe
  misc_feature (1)..(25): SEQ ID NO: 549; WAN0249K7; Start 47; Stop 71
ctttccatggcataattcccttttg

SEQ ID NO: 266314 - DNA, 25 bp, Artificial
  probe
  misc_feature (1)..(25): SEQ ID NO: 549; WAN0249K7; Start 46; Stop 70
tctttccatggcataattccctttt

SEQ ID NO: 266315 - DNA, 25 bp, Artificial
  probe
  misc_feature (1)..(25): SEQ ID NO: 549; WAN0249K7; Start 48; Stop 72
tttccatggcataattcccttttga

SEQ ID NO: 266316 - DNA, 25 bp, Artificial
  probe
  misc_feature (1)..(25): SEQ ID NO: 549; WAN0249K7; Start 50; Stop 74
tccatggcataattcccttttgaaa

SEQ ID NO: 266317 - DNA, 25 bp, Artificial
  probe
  misc_feature (1)..(25): SEQ ID NO: 549; WAN0249K7; Start 49; Stop 73
ttccatggcataattcccttttgaa

SEQ ID NO: 266318 - DNA, 25 bp, Artificial
  probe
  misc_feature (1)..(25): SEQ ID NO: 549; WAN0249K7; Start 57; Stop 81
cataattcccttttgaaatcaattg

SEQ ID NO: 266319 - DNA, 25 bp, Artificial
  probe
  misc_feature (1)..(25): SEQ ID NO: 549; WAN0249K7; Start 37; Stop 61
tggcagagttctttccatggcataa

SEQ ID NO: 266320 - DNA, 25 bp, Artificial
  probe
  misc_feature (1)..(25): SEQ ID NO: 549; WAN0249K7; Start 32; Stop 56
gtttgtggcagagttctttccatgg

SEQ ID NO: 266321 - DNA, 25 bp, Artificial
  probe
  misc_feature (1)..(25): SEQ ID NO: 549; WAN0249K7; Start 36; Stop 60
gtggcagagttctttccatggcata

SEQ ID NO: 266322 - DNA, 25 bp, Artificial
  probe
  misc_feature (1)..(25): SEQ ID NO: 550; WAN0249JK; Start 43; Stop 67
ttacacattcactatcaattcctga

SEQ ID NO: 266323 - DNA, 25 bp, Artificial
  probe
  misc_feature (1)..(25): SEQ ID NO: 550; WAN0249JK; Start 42; Stop 66
tttacacattcactatcaattcctg

SEQ ID NO: 266324 - DNA, 25 bp, Artificial
  probe
  misc_feature (1)..(25): SEQ ID NO: 550; WAN0249JK; Start 44; Stop 68
tacacattcactatcaattcctgaa

SEQ ID NO: 266325 - DNA, 25 bp, Artificial
  probe
  misc_feature (1)..(25): SEQ ID NO: 550; WAN0249JK; Start 75; Stop 99
aaataccagcctcaacaagataaaa

SEQ ID NO: 266326 - DNA, 25 bp, Artificial
  probe
  misc_feature (1)..(25): SEQ ID NO: 550; WAN0249JK; Start 74; Stop 98
aaaataccagcctcaacaagataaa

SEQ ID NO: 266327 - DNA, 25 bp, Artificial
  probe
  misc_feature (1)..(25): SEQ ID NO: 550; WAN0249JK; Start 71; Stop 95
gttaaaataccagcctcaacaagat

SEQ ID NO: 266328 - DNA, 25 bp, Artificial
  probe
  misc_feature (1)..(25): SEQ ID NO: 550; WAN0249JK; Start 73; Stop 97
taaaataccagcctcaacaagataa

SEQ ID NO: 266329 - DNA, 25 bp, Artificial
  probe
  misc_feature (1)..(25): SEQ ID NO: 550; WAN0249JK; Start 66; Stop 90
gaattgttaaaataccagcctcaac

SEQ ID NO: 266330 - DNA, 25 bp, Artificial
  probe
  misc_feature (1)..(25): SEQ ID NO: 550; WAN0249JK; Start 65; Stop 89
tgaattgttaaaataccagcctcaa

SEQ ID NO: 266331 - DNA, 25 bp, Artificial
  probe
  misc_feature (1)..(25): SEQ ID NO: 550; WAN0249JK; Start 72; Stop 96
ttaaaataccagcctcaacaagata

SEQ ID NO: 266332 - DNA, 25 bp, Artificial
  probe
  misc_feature (1)..(25): SEQ ID NO: 550; WAN0249JK; Start 63; Stop 87
cctgaattgttaaaataccagcctc

SEQ ID NO: 266333 - DNA, 25 bp, Artificial
  probe
  misc_feature (1)..(25): SEQ ID NO: 550; WAN0249JK; Start 61; Stop 85
ttcctgaattgttaaaataccagcc

SEQ ID NO: 266334 - DNA, 25 bp, Artificial
  probe
  misc_feature (1)..(25): SEQ ID NO: 550; WAN0249JK; Start 62; Stop 86
tcctgaattgttaaaataccagcct

SEQ ID NO: 266335 - DNA, 25 bp, Artificial
  probe
  misc_feature (1)..(25): SEQ ID NO: 550; WAN0249JK; Start 64; Stop 88
ctgaattgttaaaataccagcctca

SEQ ID NO: 266336 - DNA, 25 bp, Artificial
  probe
  misc_feature (1)..(25): SEQ ID NO: 550; WAN0249JK; Start 102; Stop 126
aggaaaagttgacaaaatagaaaca

SEQ ID NO: 266337 - DNA, 25 bp, Artificial
  probe
  misc_feature (1)..(25): SEQ ID NO: 550; WAN0249JK; Start 60; Stop 84
attcctgaattgttaaaataccagc

SEQ ID NO: 266338 - DNA, 25 bp, Artificial
  probe
  misc_feature (1)..(25): SEQ ID NO: 550; WAN0249JK; Start 103; Stop 127
ggaaaagttgacaaaatagaaacaa

SEQ ID NO: 266339 - DNA, 25 bp, Artificial
  probe
  misc_feature (1)..(25): SEQ ID NO: 550; WAN0249JK; Start 41; Stop 65
ttttacacattcactatcaattcct

SEQ ID NO: 266340 - DNA, 25 bp, Artificial
  probe
  misc_feature (1)..(25): SEQ ID NO: 550; WAN0249JK; Start 45; Stop 69
acacattcactatcaattcctgaat

SEQ ID NO: 266341 - DNA, 25 bp, Artificial
  probe
  misc_feature (1)..(25): SEQ ID NO: 550; WAN0249JK; Start 166; Stop 190
agaccgccttaaaacttttgggtaa

SEQ ID NO: 266342 - DNA, 25 bp, Artificial
  probe
  misc_feature (1)..(25): SEQ ID NO: 550; WAN0249JK; Start 165; Stop 189
aagaccgccttaaaacttttgggta

SEQ ID NO: 266343 - DNA, 25 bp, Artificial
  probe
  misc_feature (1)..(25): SEQ ID NO: 550; WAN0249JK; Start 70; Stop 94
tgttaaaataccagcctcaacaaga

SEQ ID NO: 266344 - DNA, 25 bp, Artificial
  probe
  misc_feature (1)..(25): SEQ ID NO: 550; WAN0249JK; Start 67; Stop 91
aattgttaaaataccagcctcaaca

SEQ ID NO: 266345 - DNA, 25 bp, Artificial
  probe
  misc_feature (1)..(25): SEQ ID NO: 550; WAN0249JK; Start 46; Stop 70
cacattcactatcaattcctgaatt

SEQ ID NO: 266346 - DNA, 25 bp, Artificial
  probe
  misc_feature (1)..(25): SEQ ID NO: 550; WAN0249JK; Start 101; Stop 125
taggaaaagttgacaaaatagaaac

SEQ ID NO: 266347 - DNA, 25 bp, Artificial
  probe
  misc_feature (1)..(25): SEQ ID NO: 550; WAN0249JK; Start 40; Stop 64
attttacacattcactatcaattcc

SEQ ID NO: 266348 - DNA, 25 bp, Artificial
  probe
  misc_feature (1)..(25): SEQ ID NO: 550; WAN0249JK; Start 164; Stop 188
aaagaccgccttaaaacttttgggt

SEQ ID NO: 266349 - DNA, 25 bp, Artificial
  probe
  misc_feature (1)..(25): SEQ ID NO: 550; WAN0249JK; Start 104; Stop 128
gaaaagttgacaaaatagaaacaaa

SEQ ID NO: 266350 - DNA, 25 bp, Artificial
  probe
  misc_feature (1)..(25): SEQ ID NO: 550; WAN0249JK; Start 48; Stop 72
cattcactatcaattcctgaattgt

SEQ ID NO: 266351 - DNA, 25 bp, Artificial
  probe
  misc_feature (1)..(25): SEQ ID NO: 550; WAN0249JK; Start 47; Stop 71
acattcactatcaattcctgaattg

SEQ ID NO: 266352 - DNA, 25 bp, Artificial
  probe
  misc_feature (1)..(25): SEQ ID NO: 550; WAN0249JK; Start 59; Stop 83
aattcctgaattgttaaaataccag

SEQ ID NO: 266353 - DNA, 25 bp, Artificial
  probe
  misc_feature (1)..(25): SEQ ID NO: 550; WAN0249JK; Start 100; Stop 124
ataggaaaagttgacaaaatagaaa

SEQ ID NO: 266354 - DNA, 25 bp, Artificial
  probe
  misc_feature (1)..(25): SEQ ID NO: 550; WAN0249JK; Start 99; Stop 123
aataggaaaagttgacaaaatagaa

SEQ ID NO: 266355 - DNA, 25 bp, Artificial
  probe
  misc_feature (1)..(25): SEQ ID NO: 551; WAN0249R2; Start 80; Stop 104
tttctaattgatttgttcgcatctt

SEQ ID NO: 266356 - DNA, 25 bp, Artificial
  probe
  misc_feature (1)..(25): SEQ ID NO: 551; WAN0249R2; Start 86; Stop 110
attgatttgttcgcatcttatttca

SEQ ID NO: 266357 - DNA, 25 bp, Artificial
  probe
  misc_feature (1)..(25): SEQ ID NO: 551; WAN0249R2; Start 25; Stop 49
tgaatttagaacagtacacaggaat

SEQ ID NO: 266358 - DNA, 25 bp, Artificial
  probe
  misc_feature (1)..(25): SEQ ID NO: 551; WAN0249R2; Start 24; Stop 48
ctgaatttagaacagtacacaggaa

SEQ ID NO: 266359 - DNA, 25 bp, Artificial
  probe
  misc_feature (1)..(25): SEQ ID NO: 551; WAN0249R2; Start 81; Stop 105
ttctaattgatttgttcgcatctta

SEQ ID NO: 266360 - DNA, 25 bp, Artificial
  probe
  misc_feature (1)..(25): SEQ ID NO: 551; WAN0249R2; Start 85; Stop 109
aattgatttgttcgcatcttatttc

SEQ ID NO: 266361 - DNA, 25 bp, Artificial
  probe
  misc_feature (1)..(25): SEQ ID NO: 551; WAN0249R2; Start 82; Stop 106
tctaattgatttgttcgcatcttat

SEQ ID NO: 266362 - DNA, 25 bp, Artificial
  probe
  misc_feature (1)..(25): SEQ ID NO: 551; WAN0249R2; Start 30; Stop 54
ttagaacagtacacaggaatactaa

SEQ ID NO: 266363 - DNA, 25 bp, Artificial
  probe
  misc_feature (1)..(25): SEQ ID NO: 551; WAN0249R2; Start 176; Stop 200
gatatgatgcgttttattgtgggaa

SEQ ID NO: 266364 - DNA, 25 bp, Artificial
  probe
  misc_feature (1)..(25): SEQ ID NO: 551; WAN0249R2; Start 174; Stop 198
ttgatatgatgcgttttattgtggg

SEQ ID NO: 266365 - DNA, 25 bp, Artificial
  probe
  misc_feature (1)..(25): SEQ ID NO: 551; WAN0249R2; Start 177; Stop 201
atatgatgcgttttattgtgggaat

SEQ ID NO: 266366 - DNA, 25 bp, Artificial
  probe
  misc_feature (1)..(25): SEQ ID NO: 551; WAN0249R2; Start 171; Stop 195
accttgatatgatgcgttttattgt

SEQ ID NO: 266367 - DNA, 25 bp, Artificial
  probe
  misc_feature (1)..(25): SEQ ID NO: 551; WAN0249R2; Start 175; Stop 199
tgatatgatgcgttttattgtggga

SEQ ID NO: 266368 - DNA, 25 bp, Artificial
  probe
  misc_feature (1)..(25): SEQ ID NO: 551; WAN0249R2; Start 173; Stop 197
cttgatatgatgcgttttattgtgg

SEQ ID NO: 266369 - DNA, 25 bp, Artificial
  probe
  misc_feature (1)..(25): SEQ ID NO: 551; WAN0249R2; Start 172; Stop 196
ccttgatatgatgcgttttattgtg

SEQ ID NO: 266370 - DNA, 25 bp, Artificial
  probe
  misc_feature (1)..(25): SEQ ID NO: 551; WAN0249R2; Start 181; Stop 205
gatgcgttttattgtgggaatatgt

SEQ ID NO: 266371 - DNA, 25 bp, Artificial
  probe
  misc_feature (1)..(25): SEQ ID NO: 551; WAN0249R2; Start 180; Stop 204
tgatgcgttttattgtgggaatatg

SEQ ID NO: 266372 - DNA, 25 bp, Artificial
  probe
  misc_feature (1)..(25): SEQ ID NO: 551; WAN0249R2; Start 179; Stop 203
atgatgcgttttattgtgggaatat

SEQ ID NO: 266373 - DNA, 25 bp, Artificial
  probe
  misc_feature (1)..(25): SEQ ID NO: 551; WAN0249R2; Start 83; Stop 107
ctaattgatttgttcgcatcttatt

SEQ ID NO: 266374 - DNA, 25 bp, Artificial
  probe
  misc_feature (1)..(25): SEQ ID NO: 551; WAN0249R2; Start 27; Stop 51
aatttagaacagtacacaggaatac

SEQ ID NO: 266375 - DNA, 25 bp, Artificial
  probe
  misc_feature (1)..(25): SEQ ID NO: 551; WAN0249R2; Start 183; Stop 207
tgcgttttattgtgggaatatgtat

SEQ ID NO: 266376 - DNA, 25 bp, Artificial
  probe
  misc_feature (1)..(25): SEQ ID NO: 551; WAN0249R2; Start 182; Stop 206
atgcgttttattgtgggaatatgta

SEQ ID NO: 266377 - DNA, 25 bp, Artificial
  probe
  misc_feature (1)..(25): SEQ ID NO: 551; WAN0249R2; Start 178; Stop 202
tatgatgcgttttattgtgggaata

SEQ ID NO: 266378 - DNA, 25 bp, Artificial
  probe
  misc_feature (1)..(25): SEQ ID NO: 551; WAN0249R2; Start 26; Stop 50
gaatttagaacagtacacaggaata

SEQ ID NO: 266379 - DNA, 25 bp, Artificial
  probe
  misc_feature (1)..(25): SEQ ID NO: 551; WAN0249R2; Start 170; Stop 194
aaccttgatatgatgcgttttattg

SEQ ID NO: 266380 - DNA, 25 bp, Artificial
  probe
  misc_feature (1)..(25): SEQ ID NO: 551; WAN0249R2; Start 28; Stop 52
atttagaacagtacacaggaatact

SEQ ID NO: 266381 - DNA, 25 bp, Artificial
  probe
  misc_feature (1)..(25): SEQ ID NO: 551; WAN0249R2; Start 184; Stop 208
gcgttttattgtgggaatatgtatt

SEQ ID NO: 266382 - DNA, 25 bp, Artificial
  probe
  misc_feature (1)..(25): SEQ ID NO: 551; WAN0249R2; Start 84; Stop 108
taattgatttgttcgcatcttattt

SEQ ID NO: 266383 - DNA, 25 bp, Artificial
  probe
  misc_feature (1)..(25): SEQ ID NO: 551; WAN0249R2; Start 79; Stop 103
ttttctaattgatttgttcgcatct

SEQ ID NO: 266384 - DNA, 25 bp, Artificial
  probe
  misc_feature (1)..(25): SEQ ID NO: 551; WAN0249R2; Start 31; Stop 55
tagaacagtacacaggaatactaaa

SEQ ID NO: 266385 - DNA, 25 bp, Artificial
  probe
  misc_feature (1)..(25): SEQ ID NO: 551; WAN0249R2; Start 29; Stop 53
tttagaacagtacacaggaatacta

SEQ ID NO: 266386 - DNA, 25 bp, Artificial
  probe
  misc_feature (1)..(25): SEQ ID NO: 551; WAN0249R2; Start 78; Stop 102
attttctaattgatttgttcgcatc

SEQ ID NO: 266387 - DNA, 25 bp, Artificial
  probe
  misc_feature (1)..(25): SEQ ID NO: 551; WAN0249R2; Start 76; Stop 100
gaattttctaattgatttgttcgca

SEQ ID NO: 266388 - DNA, 25 bp, Artificial
  probe
  misc_feature (1)..(25): SEQ ID NO: 552; WAN024AOA; Start 47; Stop 71
agtgtaactatccttccagtcagaa

SEQ ID NO: 266389 - DNA, 25 bp, Artificial
  probe
  misc_feature (1)..(25): SEQ ID NO: 552; WAN024AOA; Start 46; Stop 70
tagtgtaactatccttccagtcaga

SEQ ID NO: 266390 - DNA, 25 bp, Artificial
  probe
  misc_feature (1)..(25): SEQ ID NO: 552; WAN024AOA; Start 45; Stop 69
ctagtgtaactatccttccagtcag

SEQ ID NO: 266391 - DNA, 25 bp, Artificial
  probe
  misc_feature (1)..(25): SEQ ID NO: 552; WAN024AOA; Start 103; Stop 127
aatttatctcgttaggcaatcaagc

SEQ ID NO: 266392 - DNA, 25 bp, Artificial
  probe
  misc_feature (1)..(25): SEQ ID NO: 552; WAN024AOA; Start 104; Stop 128
atttatctcgttaggcaatcaagca

SEQ ID NO: 266393 - DNA, 25 bp, Artificial
  probe
  misc_feature (1)..(25): SEQ ID NO: 552; WAN024AOA; Start 106; Stop 130
ttatctcgttaggcaatcaagcaaa

SEQ ID NO: 266394 - DNA, 25 bp, Artificial
  probe
  misc_feature (1)..(25): SEQ ID NO: 552; WAN024AOA; Start 105; Stop 129
tttatctcgttaggcaatcaagcaa

SEQ ID NO: 266395 - DNA, 25 bp, Artificial
  probe
  misc_feature (1)..(25): SEQ ID NO: 552; WAN024AOA; Start 44; Stop 68
actagtgtaactatccttccagtca

SEQ ID NO: 266396 - DNA, 25 bp, Artificial
  probe
  misc_feature (1)..(25): SEQ ID NO: 552; WAN024AOA; Start 130; Stop 154
aaactcgacgatagtacaaacatta

SEQ ID NO: 266397 - DNA, 25 bp, Artificial
  probe
  misc_feature (1)..(25): SEQ ID NO: 552; WAN024AOA; Start 133; Stop 157
ctcgacgatagtacaaacattatca

SEQ ID NO: 266398 - DNA, 25 bp, Artificial
  probe
  misc_feature (1)..(25): SEQ ID NO: 552; WAN024AOA; Start 132; Stop 156
actcgacgatagtacaaacattatc

SEQ ID NO: 266399 - DNA, 25 bp, Artificial
  probe
  misc_feature (1)..(25): SEQ ID NO: 552; WAN024AOA; Start 102; Stop 126
aaatttatctcgttaggcaatcaag

SEQ ID NO: 266400 - DNA, 25 bp, Artificial
  probe
  misc_feature (1)..(25): SEQ ID NO: 552; WAN024AOA; Start 131; Stop 155
aactcgacgatagtacaaacattat

SEQ ID NO: 266401 - DNA, 25 bp, Artificial
  probe
  misc_feature (1)..(25): SEQ ID NO: 552; WAN024AOA; Start 302; Stop 326
atcatcctatagatacgagctaatt

SEQ ID NO: 266402 - DNA, 25 bp, Artificial
  probe
  misc_feature (1)..(25): SEQ ID NO: 552; WAN024AOA; Start 107; Stop 131
tatctcgttaggcaatcaagcaaaa

SEQ ID NO: 266403 - DNA, 25 bp, Artificial
  probe
  misc_feature (1)..(25): SEQ ID NO: 552; WAN024AOA; Start 43; Stop 67
tactagtgtaactatccttccagtc

SEQ ID NO: 266404 - DNA, 25 bp, Artificial
  probe
  misc_feature (1)..(25): SEQ ID NO: 552; WAN024AOA; Start 281; Stop 305
agcaacaagaagattttcagtatca

SEQ ID NO: 266405 - DNA, 25 bp, Artificial
  probe
  misc_feature (1)..(25): SEQ ID NO: 552; WAN024AOA; Start 271; Stop 295
tgtgatttaaagcaacaagaagatt

SEQ ID NO: 266406 - DNA, 25 bp, Artificial
  probe
  misc_feature (1)..(25): SEQ ID NO: 552; WAN024AOA; Start 134; Stop 158
tcgacgatagtacaaacattatcat

SEQ ID NO: 266407 - DNA, 25 bp, Artificial
  probe
  misc_feature (1)..(25): SEQ ID NO: 552; WAN024AOA; Start 272; Stop 296
gtgatttaaagcaacaagaagattt

SEQ ID NO: 266408 - DNA, 25 bp, Artificial
  probe
  misc_feature (1)..(25): SEQ ID NO: 552; WAN024AOA; Start 42; Stop 66
atactagtgtaactatccttccagt

SEQ ID NO: 266409 - DNA, 25 bp, Artificial
  probe
  misc_feature (1)..(25): SEQ ID NO: 552; WAN024AOA; Start 306; Stop 330
tcctatagatacgagctaattaaga

SEQ ID NO: 266410 - DNA, 25 bp, Artificial
  probe
  misc_feature (1)..(25): SEQ ID NO: 552; WAN024AOA; Start 282; Stop 306
gcaacaagaagattttcagtatcat

SEQ ID NO: 266411 - DNA, 25 bp, Artificial
  probe
  misc_feature (1)..(25): SEQ ID NO: 552; WAN024AOA; Start 280; Stop 304
aagcaacaagaagattttcagtatc

SEQ ID NO: 266412 - DNA, 25 bp, Artificial
  probe
  misc_feature (1)..(25): SEQ ID NO: 552; WAN024AOA; Start 303; Stop 327
tcatcctatagatacgagctaatta

SEQ ID NO: 266413 - DNA, 25 bp, Artificial
  probe
  misc_feature (1)..(25): SEQ ID NO: 552; WAN024AOA; Start 135; Stop 159
cgacgatagtacaaacattatcata

SEQ ID NO: 266414 - DNA, 25 bp, Artificial
  probe
  misc_feature (1)..(25): SEQ ID NO: 552; WAN024AOA; Start 285; Stop 309
acaagaagattttcagtatcatcct

SEQ ID NO: 266415 - DNA, 25 bp, Artificial
  probe
  misc_feature (1)..(25): SEQ ID NO: 552; WAN024AOA; Start 277; Stop 301
ttaaagcaacaagaagattttcagt

SEQ ID NO: 266416 - DNA, 25 bp, Artificial
  probe
  misc_feature (1)..(25): SEQ ID NO: 552; WAN024AOA; Start 279; Stop 303
aaagcaacaagaagattttcagtat

SEQ ID NO: 266417 - DNA, 25 bp, Artificial
  probe
  misc_feature (1)..(25): SEQ ID NO: 552; WAN024AOA; Start 184; Stop 208
actttagtaaggttttcggataaga

SEQ ID NO: 266418 - DNA, 25 bp, Artificial
  probe
  misc_feature (1)..(25): SEQ ID NO: 552; WAN024AOA; Start 40; Stop 64
caatactagtgtaactatccttcca

SEQ ID NO: 266419 - DNA, 25 bp, Artificial
  probe
  misc_feature (1)..(25): SEQ ID NO: 552; WAN024AOA; Start 39; Stop 63
acaatactagtgtaactatccttcc

SEQ ID NO: 266420 - DNA, 25 bp, Artificial
  probe
  misc_feature (1)..(25): SEQ ID NO: 552; WAN024AOA; Start 266; Stop 290
tcgattgtgatttaaagcaacaaga

SEQ ID NO: 266421 - DNA, 25 bp, Artificial
  probe
  misc_feature (1)..(25): SEQ ID NO: 553; WAN024A2D; Start 35; Stop 59
ttctaactctttcttgtcaatcacg

SEQ ID NO: 266422 - DNA, 25 bp, Artificial
  probe
  misc_feature (1)..(25): SEQ ID NO: 553; WAN024A2D; Start 36; Stop 60
tctaactctttcttgtcaatcacgc

SEQ ID NO: 266423 - DNA, 25 bp, Artificial
  probe
  misc_feature (1)..(25): SEQ ID NO: 553; WAN024A2D; Start 37; Stop 61
ctaactctttcttgtcaatcacgca

SEQ ID NO: 266424 - DNA, 25 bp, Artificial
  probe
  misc_feature (1)..(25): SEQ ID NO: 553; WAN024A2D; Start 38; Stop 62
taactctttcttgtcaatcacgcaa

SEQ ID NO: 266425 - DNA, 25 bp, Artificial
  probe
  misc_feature (1)..(25): SEQ ID NO: 553; WAN024A2D; Start 3; Stop 27
agattccttctttcttgttgtaact

SEQ ID NO: 266426 - DNA, 25 bp, Artificial
  probe
  misc_feature (1)..(25): SEQ ID NO: 553; WAN024A2D; Start 7; Stop 31
tccttctttcttgttgtaactatct

SEQ ID NO: 266427 - DNA, 25 bp, Artificial
  probe
  misc_feature (1)..(25): SEQ ID NO: 553; WAN024A2D; Start 34; Stop 58
attctaactctttcttgtcaatcac

SEQ ID NO: 266428 - DNA, 25 bp, Artificial
  probe
  misc_feature (1)..(25): SEQ ID NO: 553; WAN024A2D; Start 8; Stop 32
ccttctttcttgttgtaactatctt

SEQ ID NO: 266429 - DNA, 25 bp, Artificial
  probe
  misc_feature (1)..(25): SEQ ID NO: 553; WAN024A2D; Start 6; Stop 30
ttccttctttcttgttgtaactatc

SEQ ID NO: 266430 - DNA, 25 bp, Artificial
  probe
  misc_feature (1)..(25): SEQ ID NO: 553; WAN024A2D; Start 4; Stop 28
gattccttctttcttgttgtaacta

SEQ ID NO: 266431 - DNA, 25 bp, Artificial
  probe
  misc_feature (1)..(25): SEQ ID NO: 553; WAN024A2D; Start 2; Stop 26
tagattccttctttcttgttgtaac

SEQ ID NO: 266432 - DNA, 25 bp, Artificial
  probe
  misc_feature (1)..(25): SEQ ID NO: 553; WAN024A2D; Start 5; Stop 29
attccttctttcttgttgtaactat

SEQ ID NO: 266433 - DNA, 25 bp, Artificial
  probe
  misc_feature (1)..(25): SEQ ID NO: 553; WAN024A2D; Start 1; Stop 25
atagattccttctttcttgttgtaa

SEQ ID NO: 266434 - DNA, 25 bp, Artificial
  probe
  misc_feature (1)..(25): SEQ ID NO: 553; WAN024A2D; Start 29; Stop 53
tctttattctaactctttcttgtca

SEQ ID NO: 266435 - DNA, 25 bp, Artificial
  probe
  misc_feature (1)..(25): SEQ ID NO: 553; WAN024A2D; Start 33; Stop 57
tattctaactctttcttgtcaatca

SEQ ID NO: 266436 - DNA, 25 bp, Artificial
  probe
  misc_feature (1)..(25): SEQ ID NO: 553; WAN024A2D; Start 9; Stop 33
cttctttcttgttgtaactatcttt

SEQ ID NO: 266437 - DNA, 25 bp, Artificial
  probe
  misc_feature (1)..(25): SEQ ID NO: 553; WAN024A2D; Start 39; Stop 63
aactctttcttgtcaatcacgcaag

SEQ ID NO: 266438 - DNA, 25 bp, Artificial
  probe
  misc_feature (1)..(25): SEQ ID NO: 553; WAN024A2D; Start 30; Stop 54
ctttattctaactctttcttgtcaa

SEQ ID NO: 266439 - DNA, 25 bp, Artificial
  probe
  misc_feature (1)..(25): SEQ ID NO: 553; WAN024A2D; Start 32; Stop 56
ttattctaactctttcttgtcaatc

SEQ ID NO: 266440 - DNA, 25 bp, Artificial
  probe
  misc_feature (1)..(25): SEQ ID NO: 553; WAN024A2D; Start 41; Stop 65
ctctttcttgtcaatcacgcaagga

SEQ ID NO: 266441 - DNA, 25 bp, Artificial
  probe
  misc_feature (1)..(25): SEQ ID NO: 553; WAN024A2D; Start 40; Stop 64
actctttcttgtcaatcacgcaagg

SEQ ID NO: 266442 - DNA, 25 bp, Artificial
  probe
  misc_feature (1)..(25): SEQ ID NO: 554; WAN024A4Q; Start 19; Stop 43
tttgtggtataatgaaacgatacga

SEQ ID NO: 266443 - DNA, 25 bp, Artificial
  probe
  misc_feature (1)..(25): SEQ ID NO: 554; WAN024A4Q; Start 20; Stop 44
ttgtggtataatgaaacgatacgat

SEQ ID NO: 266444 - DNA, 25 bp, Artificial
  probe
  misc_feature (1)..(25): SEQ ID NO: 554; WAN024A4Q; Start 21; Stop 45
tgtggtataatgaaacgatacgata

SEQ ID NO: 266445 - DNA, 25 bp, Artificial
  probe
  misc_feature (1)..(25): SEQ ID NO: 554; WAN024A4Q; Start 14; Stop 38
ccttgtttgtggtataatgaaacga

SEQ ID NO: 266446 - DNA, 25 bp, Artificial
  probe
  misc_feature (1)..(25): SEQ ID NO: 554; WAN024A4Q; Start 13; Stop 37
cccttgtttgtggtataatgaaacg

SEQ ID NO: 266447 - DNA, 25 bp, Artificial
  probe
  misc_feature (1)..(25): SEQ ID NO: 554; WAN024A4Q; Start 29; Stop 53
aatgaaacgatacgatagaaagaat

SEQ ID NO: 266448 - DNA, 25 bp, Artificial
  probe
  misc_feature (1)..(25): SEQ ID NO: 554; WAN024A4Q; Start 18; Stop 42
gtttgtggtataatgaaacgatacg

SEQ ID NO: 266449 - DNA, 25 bp, Artificial
  probe
  misc_feature (1)..(25): SEQ ID NO: 554; WAN024A4Q; Start 22; Stop 46
gtggtataatgaaacgatacgatag

SEQ ID NO: 266450 - DNA, 25 bp, Artificial
  probe
  misc_feature (1)..(25): SEQ ID NO: 554; WAN024A4Q; Start 23; Stop 47
tggtataatgaaacgatacgataga

SEQ ID NO: 266451 - DNA, 25 bp, Artificial
  probe
  misc_feature (1)..(25): SEQ ID NO: 554; WAN024A4Q; Start 15; Stop 39
cttgtttgtggtataatgaaacgat

SEQ ID NO: 266452 - DNA, 25 bp, Artificial
  probe
  misc_feature (1)..(25): SEQ ID NO: 554; WAN024A4Q; Start 28; Stop 52
taatgaaacgatacgatagaaagaa

SEQ ID NO: 266453 - DNA, 25 bp, Artificial
  probe
  misc_feature (1)..(25): SEQ ID NO: 554; WAN024A4Q; Start 17; Stop 41
tgtttgtggtataatgaaacgatac

SEQ ID NO: 266454 - DNA, 25 bp, Artificial
  probe
  misc_feature (1)..(25): SEQ ID NO: 554; WAN024A4Q; Start 30; Stop 54
atgaaacgatacgatagaaagaata

SEQ ID NO: 266455 - DNA, 25 bp, Artificial
  probe
  misc_feature (1)..(25): SEQ ID NO: 554; WAN024A4Q; Start 27; Stop 51
ataatgaaacgatacgatagaaaga

SEQ ID NO: 266456 - DNA, 25 bp, Artificial
  probe
  misc_feature (1)..(25): SEQ ID NO: 554; WAN024A4Q; Start 24; Stop 48
ggtataatgaaacgatacgatagaa

SEQ ID NO: 266457 - DNA, 25 bp, Artificial
  probe
  misc_feature (1)..(25): SEQ ID NO: 554; WAN024A4Q; Start 1; Stop 25
atagattttcaccccttgtttgtgg

SEQ ID NO: 266458 - DNA, 25 bp, Artificial
  probe
  misc_feature (1)..(25): SEQ ID NO: 554; WAN024A4Q; Start 11; Stop 35
accccttgtttgtggtataatgaaa

SEQ ID NO: 266459 - DNA, 25 bp, Artificial
  probe
  misc_feature (1)..(25): SEQ ID NO: 554; WAN024A4Q; Start 7; Stop 31
tttcaccccttgtttgtggtataat

SEQ ID NO: 266460 - DNA, 25 bp, Artificial
  probe
  misc_feature (1)..(25): SEQ ID NO: 554; WAN024A4Q; Start 5; Stop 29
attttcaccccttgtttgtggtata

SEQ ID NO: 266461 - DNA, 25 bp, Artificial
  probe
  misc_feature (1)..(25): SEQ ID NO: 554; WAN024A4Q; Start 6; Stop 30
ttttcaccccttgtttgtggtataa

SEQ ID NO: 266462 - DNA, 25 bp, Artificial
  probe
  misc_feature (1)..(25): SEQ ID NO: 554; WAN024A4Q; Start 16; Stop 40
ttgtttgtggtataatgaaacgata

SEQ ID NO: 266463 - DNA, 25 bp, Artificial
  probe
  misc_feature (1)..(25): SEQ ID NO: 554; WAN024A4Q; Start 10; Stop 34
caccccttgtttgtggtataatgaa

SEQ ID NO: 266464 - DNA, 25 bp, Artificial
  probe
  misc_feature (1)..(25): SEQ ID NO: 554; WAN024A4Q; Start 8; Stop 32
ttcaccccttgtttgtggtataatg

SEQ ID NO: 266465 - DNA, 25 bp, Artificial
  probe
  misc_feature (1)..(25): SEQ ID NO: 554; WAN024A4Q; Start 4; Stop 28
gattttcaccccttgtttgtggtat

SEQ ID NO: 266466 - DNA, 25 bp, Artificial
  probe
  misc_feature (1)..(25): SEQ ID NO: 554; WAN024A4Q; Start 9; Stop 33
tcaccccttgtttgtggtataatga

SEQ ID NO: 266467 - DNA, 25 bp, Artificial
  probe
  misc_feature (1)..(25): SEQ ID NO: 554; WAN024A4Q; Start 12; Stop 36
ccccttgtttgtggtataatgaaac

SEQ ID NO: 266468 - DNA, 25 bp, Artificial
  probe
  misc_feature (1)..(25): SEQ ID NO: 554; WAN024A4Q; Start 3; Stop 27
agattttcaccccttgtttgtggta

SEQ ID NO: 266469 - DNA, 25 bp, Artificial
  probe
  misc_feature (1)..(25): SEQ ID NO: 554; WAN024A4Q; Start 2; Stop 26
tagattttcaccccttgtttgtggt

SEQ ID NO: 266470 - DNA, 25 bp, Artificial
  probe
  misc_feature (1)..(25): SEQ ID NO: 554; WAN024A4Q; Start 25; Stop 49
gtataatgaaacgatacgatagaaa

SEQ ID NO: 266471 - DNA, 25 bp, Artificial
  probe
  misc_feature (1)..(25): SEQ ID NO: 555; WAN024A2G; Start 3; Stop 27
agctaaataatgttaaatttgagca

SEQ ID NO: 266472 - DNA, 25 bp, Artificial
  probe
  misc_feature (1)..(25): SEQ ID NO: 555; WAN024A2G; Start 4; Stop 28
gctaaataatgttaaatttgagcat

SEQ ID NO: 266473 - DNA, 25 bp, Artificial
  probe
  misc_feature (1)..(25): SEQ ID NO: 556; WAN024ANI; Start 36; Stop 60
aaagaggtgcccaaacaatatgata

SEQ ID NO: 266474 - DNA, 25 bp, Artificial
  probe
  misc_feature (1)..(25): SEQ ID NO: 556; WAN024ANI; Start 42; Stop 66
gtgcccaaacaatatgatacctaaa

SEQ ID NO: 266475 - DNA, 25 bp, Artificial
  probe
  misc_feature (1)..(25): SEQ ID NO: 556; WAN024ANI; Start 37; Stop 61
aagaggtgcccaaacaatatgatac

SEQ ID NO: 266476 - DNA, 25 bp, Artificial
  probe
  misc_feature (1)..(25): SEQ ID NO: 556; WAN024ANI; Start 41; Stop 65
ggtgcccaaacaatatgatacctaa

SEQ ID NO: 266477 - DNA, 25 bp, Artificial
  probe
  misc_feature (1)..(25): SEQ ID NO: 556; WAN024ANI; Start 33; Stop 57
ctaaaagaggtgcccaaacaatatg

SEQ ID NO: 266478 - DNA, 25 bp, Artificial
  probe
  misc_feature (1)..(25): SEQ ID NO: 556; WAN024ANI; Start 34; Stop 58
taaaagaggtgcccaaacaatatga

SEQ ID NO: 266479 - DNA, 25 bp, Artificial
  probe
  misc_feature (1)..(25): SEQ ID NO: 556; WAN024ANI; Start 35; Stop 59
aaaagaggtgcccaaacaatatgat

SEQ ID NO: 266480 - DNA, 25 bp, Artificial
  probe
  misc_feature (1)..(25): SEQ ID NO: 556; WAN024ANI; Start 32; Stop 56
tctaaaagaggtgcccaaacaatat

SEQ ID NO: 266481 - DNA, 25 bp, Artificial
  probe
  misc_feature (1)..(25): SEQ ID NO: 556; WAN024ANI; Start 43; Stop 67
tgcccaaacaatatgatacctaaaa

SEQ ID NO: 266482 - DNA, 25 bp, Artificial
  probe
  misc_feature (1)..(25): SEQ ID NO: 556; WAN024ANI; Start 38; Stop 62
agaggtgcccaaacaatatgatacc

SEQ ID NO: 266483 - DNA, 25 bp, Artificial
  probe
  misc_feature (1)..(25): SEQ ID NO: 556; WAN024ANI; Start 69; Stop 93
taggataattgtcaatagctaactc

SEQ ID NO: 266484 - DNA, 25 bp, Artificial
  probe
  misc_feature (1)..(25): SEQ ID NO: 556; WAN024ANI; Start 68; Stop 92
ataggataattgtcaatagctaact

SEQ ID NO: 266485 - DNA, 25 bp, Artificial
  probe
  misc_feature (1)..(25): SEQ ID NO: 556; WAN024ANI; Start 31; Stop 55
ctctaaaagaggtgcccaaacaata

SEQ ID NO: 266486 - DNA, 25 bp, Artificial
  probe
  misc_feature (1)..(25): SEQ ID NO: 556; WAN024ANI; Start 40; Stop 64
aggtgcccaaacaatatgataccta

SEQ ID NO: 266487 - DNA, 25 bp, Artificial
  probe
  misc_feature (1)..(25): SEQ ID NO: 556; WAN024ANI; Start 39; Stop 63
gaggtgcccaaacaatatgatacct

SEQ ID NO: 266488 - DNA, 25 bp, Artificial
  probe
  misc_feature (1)..(25): SEQ ID NO: 557; WAN024F2K; Start 141; Stop 165
tttgttggcatctgtaaagtcattg

SEQ ID NO: 266489 - DNA, 25 bp, Artificial
  probe
  misc_feature (1)..(25): SEQ ID NO: 557; WAN024F2K; Start 144; Stop 168
gttggcatctgtaaagtcattgata

SEQ ID NO: 266490 - DNA, 25 bp, Artificial
  probe
  misc_feature (1)..(25): SEQ ID NO: 557; WAN024F2K; Start 142; Stop 166
ttgttggcatctgtaaagtcattga

SEQ ID NO: 266491 - DNA, 25 bp, Artificial
  probe
  misc_feature (1)..(25): SEQ ID NO: 557; WAN024F2K; Start 143; Stop 167
tgttggcatctgtaaagtcattgat

SEQ ID NO: 266492 - DNA, 25 bp, Artificial
  probe
  misc_feature (1)..(25): SEQ ID NO: 557; WAN024F2K; Start 64; Stop 88
gtttcaagtgaggctttggtaattc

SEQ ID NO: 266493 - DNA, 25 bp, Artificial
  probe
  misc_feature (1)..(25): SEQ ID NO: 557; WAN024F2K; Start 145; Stop 169
ttggcatctgtaaagtcattgatat

SEQ ID NO: 266494 - DNA, 25 bp, Artificial
  probe
  misc_feature (1)..(25): SEQ ID NO: 557; WAN024F2K; Start 62; Stop 86
ttgtttcaagtgaggctttggtaat

SEQ ID NO: 266495 - DNA, 25 bp, Artificial
  probe
  misc_feature (1)..(25): SEQ ID NO: 557; WAN024F2K; Start 63; Stop 87
tgtttcaagtgaggctttggtaatt

SEQ ID NO: 266496 - DNA, 25 bp, Artificial
  probe
  misc_feature (1)..(25): SEQ ID NO: 557; WAN024F2K; Start 61; Stop 85
tttgtttcaagtgaggctttggtaa

SEQ ID NO: 266497 - DNA, 25 bp, Artificial
  probe
  misc_feature (1)..(25): SEQ ID NO: 557; WAN024F2K; Start 129; Stop 153
gataaggacatctttgttggcatct

SEQ ID NO: 266498 - DNA, 25 bp, Artificial
  probe
  misc_feature (1)..(25): SEQ ID NO: 557; WAN024F2K; Start 65; Stop 89
tttcaagtgaggctttggtaattcc

SEQ ID NO: 266499 - DNA, 25 bp, Artificial
  probe
  misc_feature (1)..(25): SEQ ID NO: 557; WAN024F2K; Start 130; Stop 154
ataaggacatctttgttggcatctg

SEQ ID NO: 266500 - DNA, 25 bp, Artificial
  probe
  misc_feature (1)..(25): SEQ ID NO: 557; WAN024F2K; Start 56; Stop 80
aactgtttgtttcaagtgaggcttt

SEQ ID NO: 266501 - DNA, 25 bp, Artificial
  probe
  misc_feature (1)..(25): SEQ ID NO: 557; WAN024F2K; Start 60; Stop 84
gtttgtttcaagtgaggctttggta

SEQ ID NO: 266502 - DNA, 25 bp, Artificial
  probe
  misc_feature (1)..(25): SEQ ID NO: 557; WAN024F2K; Start 134; Stop 158
ggacatctttgttggcatctgtaaa

SEQ ID NO: 266503 - DNA, 25 bp, Artificial
  probe
  misc_feature (1)..(25): SEQ ID NO: 557; WAN024F2K; Start 184; Stop 208
atgagaagatctgtatcacctggat

SEQ ID NO: 266504 - DNA, 25 bp, Artificial
  probe
  misc_feature (1)..(25): SEQ ID NO: 557; WAN024F2K; Start 77; Stop 101
ctttggtaattcccataaggactgg

SEQ ID NO: 266505 - DNA, 25 bp, Artificial
  probe
  misc_feature (1)..(25): SEQ ID NO: 557; WAN024F2K; Start 128; Stop 152
cgataaggacatctttgttggcatc

SEQ ID NO: 266506 - DNA, 25 bp, Artificial
  probe
  misc_feature (1)..(25): SEQ ID NO: 557; WAN024F2K; Start 183; Stop 207
catgagaagatctgtatcacctgga

SEQ ID NO: 266507 - DNA, 25 bp, Artificial
  probe
  misc_feature (1)..(25): SEQ ID NO: 557; WAN024F2K; Start 147; Stop 171
ggcatctgtaaagtcattgatatcc

SEQ ID NO: 266508 - DNA, 25 bp, Artificial
  probe
  misc_feature (1)..(25): SEQ ID NO: 557; WAN024F2K; Start 140; Stop 164
ctttgttggcatctgtaaagtcatt

SEQ ID NO: 266509 - DNA, 25 bp, Artificial
  probe
  misc_feature (1)..(25): SEQ ID NO: 557; WAN024F2K; Start 57; Stop 81
actgtttgtttcaagtgaggctttg

SEQ ID NO: 266510 - DNA, 25 bp, Artificial
  probe
  misc_feature (1)..(25): SEQ ID NO: 557; WAN024F2K; Start 133; Stop 157
aggacatctttgttggcatctgtaa

SEQ ID NO: 266511 - DNA, 25 bp, Artificial
  probe
  misc_feature (1)..(25): SEQ ID NO: 557; WAN024F2K; Start 132; Stop 156
aaggacatctttgttggcatctgta

SEQ ID NO: 266512 - DNA, 25 bp, Artificial
  probe
  misc_feature (1)..(25): SEQ ID NO: 557; WAN024F2K; Start 131; Stop 155
taaggacatctttgttggcatctgt

SEQ ID NO: 266513 - DNA, 25 bp, Artificial
  probe
  misc_feature (1)..(25): SEQ ID NO: 557; WAN024F2K; Start 137; Stop 161
catctttgttggcatctgtaaagtc

SEQ ID NO: 266514 - DNA, 25 bp, Artificial
  probe
  misc_feature (1)..(25): SEQ ID NO: 557; WAN024F2K; Start 135; Stop 159
gacatctttgttggcatctgtaaag

SEQ ID NO: 266515 - DNA, 25 bp, Artificial
  probe
  misc_feature (1)..(25): SEQ ID NO: 557; WAN024F2K; Start 76; Stop 100
gctttggtaattcccataaggactg

SEQ ID NO: 266516 - DNA, 25 bp, Artificial
  probe
  misc_feature (1)..(25): SEQ ID NO: 557; WAN024F2K; Start 71; Stop 95
gtgaggctttggtaattcccataag

SEQ ID NO: 266517 - DNA, 25 bp, Artificial
  probe
  misc_feature (1)..(25): SEQ ID NO: 557; WAN024F2K; Start 139; Stop 163
tctttgttggcatctgtaaagtcat

SEQ ID NO: 266518 - DNA, 25 bp, Artificial
  probe
  misc_feature (1)..(25): SEQ ID NO: 557; WAN024F2K; Start 138; Stop 162
atctttgttggcatctgtaaagtca

SEQ ID NO: 266519 - DNA, 25 bp, Artificial
  probe
  misc_feature (1)..(25): SEQ ID NO: 557; WAN024F2K; Start 148; Stop 172
gcatctgtaaagtcattgatatcca

SEQ ID NO: 266520 - DNA, 25 bp, Artificial
  probe
  misc_feature (1)..(25): SEQ ID NO: 557; WAN024F2K; Start 146; Stop 170
tggcatctgtaaagtcattgatatc

SEQ ID NO: 266521 - DNA, 25 bp, Artificial
  probe
  misc_feature (1)..(25): SEQ ID NO: 558; WAN024AQZ; Start 113; Stop 137
ttcttcaacaatatcttccatccga

SEQ ID NO: 266522 - DNA, 25 bp, Artificial
  probe
  misc_feature (1)..(25): SEQ ID NO: 558; WAN024AQZ; Start 116; Stop 140
ttcaacaatatcttccatccgactc

SEQ ID NO: 266523 - DNA, 25 bp, Artificial
  probe
  misc_feature (1)..(25): SEQ ID NO: 558; WAN024AQZ; Start 115; Stop 139
cttcaacaatatcttccatccgact

SEQ ID NO: 266524 - DNA, 25 bp, Artificial
  probe
  misc_feature (1)..(25): SEQ ID NO: 558; WAN024AQZ; Start 114; Stop 138
tcttcaacaatatcttccatccgac

SEQ ID NO: 266525 - DNA, 25 bp, Artificial
  probe
  misc_feature (1)..(25): SEQ ID NO: 558; WAN024AQZ; Start 112; Stop 136
attcttcaacaatatcttccatccg

SEQ ID NO: 266526 - DNA, 25 bp, Artificial
  probe
  misc_feature (1)..(25): SEQ ID NO: 558; WAN024AQZ; Start 107; Stop 131
ggcttattcttcaacaatatcttcc

SEQ ID NO: 266527 - DNA, 25 bp, Artificial
  probe
  misc_feature (1)..(25): SEQ ID NO: 558; WAN024AQZ; Start 117; Stop 141
tcaacaatatcttccatccgactcg

SEQ ID NO: 266528 - DNA, 25 bp, Artificial
  probe
  misc_feature (1)..(25): SEQ ID NO: 558; WAN024AQZ; Start 108; Stop 132
gcttattcttcaacaatatcttcca

SEQ ID NO: 266529 - DNA, 25 bp, Artificial
  probe
  misc_feature (1)..(25): SEQ ID NO: 558; WAN024AQZ; Start 119; Stop 143
aacaatatcttccatccgactcgac

SEQ ID NO: 266530 - DNA, 25 bp, Artificial
  probe
  misc_feature (1)..(25): SEQ ID NO: 558; WAN024AQZ; Start 118; Stop 142
caacaatatcttccatccgactcga

SEQ ID NO: 266531 - DNA, 25 bp, Artificial
  probe
  misc_feature (1)..(25): SEQ ID NO: 558; WAN024AQZ; Start 111; Stop 135
tattcttcaacaatatcttccatcc

SEQ ID NO: 266532 - DNA, 25 bp, Artificial
  probe
  misc_feature (1)..(25): SEQ ID NO: 558; WAN024AQZ; Start 122; Stop 146
aatatcttccatccgactcgacgaa

SEQ ID NO: 266533 - DNA, 25 bp, Artificial
  probe
  misc_feature (1)..(25): SEQ ID NO: 558; WAN024AQZ; Start 75; Stop 99
agttatttgtaaacggtttctatca

SEQ ID NO: 266534 - DNA, 25 bp, Artificial
  probe
  misc_feature (1)..(25): SEQ ID NO: 558; WAN024AQZ; Start 121; Stop 145
caatatcttccatccgactcgacga

SEQ ID NO: 266535 - DNA, 25 bp, Artificial
  probe
  misc_feature (1)..(25): SEQ ID NO: 558; WAN024AQZ; Start 81; Stop 105
ttgtaaacggtttctatcatattga

SEQ ID NO: 266536 - DNA, 25 bp, Artificial
  probe
  misc_feature (1)..(25): SEQ ID NO: 558; WAN024AQZ; Start 120; Stop 144
acaatatcttccatccgactcgacg

SEQ ID NO: 266537 - DNA, 25 bp, Artificial
  probe
  misc_feature (1)..(25): SEQ ID NO: 558; WAN024AQZ; Start 110; Stop 134
ttattcttcaacaatatcttccatc

SEQ ID NO: 266538 - DNA, 25 bp, Artificial
  probe
  misc_feature (1)..(25): SEQ ID NO: 558; WAN024AQZ; Start 109; Stop 133
cttattcttcaacaatatcttccat

SEQ ID NO: 266539 - DNA, 25 bp, Artificial
  probe
  misc_feature (1)..(25): SEQ ID NO: 558; WAN024AQZ; Start 80; Stop 104
tttgtaaacggtttctatcatattg

SEQ ID NO: 266540 - DNA, 25 bp, Artificial
  probe
  misc_feature (1)..(25): SEQ ID NO: 558; WAN024AQZ; Start 123; Stop 147
atatcttccatccgactcgacgaaa

SEQ ID NO: 266541 - DNA, 25 bp, Artificial
  probe
  misc_feature (1)..(25): SEQ ID NO: 558; WAN024AQZ; Start 76; Stop 100
gttatttgtaaacggtttctatcat

SEQ ID NO: 266542 - DNA, 25 bp, Artificial
  probe
  misc_feature (1)..(25): SEQ ID NO: 558; WAN024AQZ; Start 74; Stop 98
aagttatttgtaaacggtttctatc

SEQ ID NO: 266543 - DNA, 25 bp, Artificial
  probe
  misc_feature (1)..(25): SEQ ID NO: 558; WAN024AQZ; Start 71; Stop 95
ttaaagttatttgtaaacggtttct

SEQ ID NO: 266544 - DNA, 25 bp, Artificial
  probe
  misc_feature (1)..(25): SEQ ID NO: 558; WAN024AQZ; Start 73; Stop 97
aaagttatttgtaaacggtttctat

SEQ ID NO: 266545 - DNA, 25 bp, Artificial
  probe
  misc_feature (1)..(25): SEQ ID NO: 558; WAN024AQZ; Start 79; Stop 103
atttgtaaacggtttctatcatatt

SEQ ID NO: 266546 - DNA, 25 bp, Artificial
  probe
  misc_feature (1)..(25): SEQ ID NO: 558; WAN024AQZ; Start 72; Stop 96
taaagttatttgtaaacggtttcta

SEQ ID NO: 266547 - DNA, 25 bp, Artificial
  probe
  misc_feature (1)..(25): SEQ ID NO: 558; WAN024AQZ; Start 124; Stop 148
tatcttccatccgactcgacgaaaa

SEQ ID NO: 266548 - DNA, 25 bp, Artificial
  probe
  misc_feature (1)..(25): SEQ ID NO: 558; WAN024AQZ; Start 70; Stop 94
tttaaagttatttgtaaacggtttc

SEQ ID NO: 266549 - DNA, 25 bp, Artificial
  probe
  misc_feature (1)..(25): SEQ ID NO: 558; WAN024AQZ; Start 13; Stop 37
tctcaaattagagatttatagcaac

SEQ ID NO: 266550 - DNA, 25 bp, Artificial
  probe
  misc_feature (1)..(25): SEQ ID NO: 559; WAN0249HA; Start 4; Stop 28
gggaagaaagtggctattttattga

SEQ ID NO: 266551 - DNA, 25 bp, Artificial
  probe
  misc_feature (1)..(25): SEQ ID NO: 559; WAN0249HA; Start 3; Stop 27
agggaagaaagtggctattttattg

SEQ ID NO: 266552 - DNA, 25 bp, Artificial
  probe
  misc_feature (1)..(25): SEQ ID NO: 559; WAN0249HA; Start 41; Stop 65
tgtggtataatagataaagtgagga

SEQ ID NO: 266553 - DNA, 25 bp, Artificial
  probe
  misc_feature (1)..(25): SEQ ID NO: 559; WAN0249HA; Start 2; Stop 26
tagggaagaaagtggctattttatt

SEQ ID NO: 266554 - DNA, 25 bp, Artificial
  probe
  misc_feature (1)..(25): SEQ ID NO: 559; WAN0249HA; Start 5; Stop 29
ggaagaaagtggctattttattgaa

SEQ ID NO: 266555 - DNA, 25 bp, Artificial
  probe
  misc_feature (1)..(25): SEQ ID NO: 559; WAN0249HA; Start 40; Stop 64
ttgtggtataatagataaagtgagg

SEQ ID NO: 266556 - DNA, 25 bp, Artificial
  probe
  misc_feature (1)..(25): SEQ ID NO: 559; WAN0249HA; Start 42; Stop 66
gtggtataatagataaagtgaggaa

SEQ ID NO: 266557 - DNA, 25 bp, Artificial
  probe
  misc_feature (1)..(25): SEQ ID NO: 559; WAN0249HA; Start 1; Stop 25
atagggaagaaagtggctattttat

SEQ ID NO: 266558 - DNA, 25 bp, Artificial
  probe
  misc_feature (1)..(25): SEQ ID NO: 559; WAN0249HA; Start 6; Stop 30
gaagaaagtggctattttattgaaa

SEQ ID NO: 266559 - DNA, 25 bp, Artificial
  probe
  misc_feature (1)..(25): SEQ ID NO: 559; WAN0249HA; Start 22; Stop 46
ttattgaaaatttcccttttgtggt

SEQ ID NO: 266560 - DNA, 25 bp, Artificial
  probe
  misc_feature (1)..(25): SEQ ID NO: 559; WAN0249HA; Start 30; Stop 54
aatttcccttttgtggtataataga

SEQ ID NO: 266561 - DNA, 25 bp, Artificial
  probe
  misc_feature (1)..(25): SEQ ID NO: 559; WAN0249HA; Start 24; Stop 48
attgaaaatttcccttttgtggtat

SEQ ID NO: 266562 - DNA, 25 bp, Artificial
  probe
  misc_feature (1)..(25): SEQ ID NO: 559; WAN0249HA; Start 31; Stop 55
atttcccttttgtggtataatagat

SEQ ID NO: 266563 - DNA, 25 bp, Artificial
  probe
  misc_feature (1)..(25): SEQ ID NO: 559; WAN0249HA; Start 26; Stop 50
tgaaaatttcccttttgtggtataa

SEQ ID NO: 266564 - DNA, 25 bp, Artificial
  probe
  misc_feature (1)..(25): SEQ ID NO: 559; WAN0249HA; Start 25; Stop 49
ttgaaaatttcccttttgtggtata

SEQ ID NO: 266565 - DNA, 25 bp, Artificial
  probe
  misc_feature (1)..(25): SEQ ID NO: 559; WAN0249HA; Start 23; Stop 47
tattgaaaatttcccttttgtggta

SEQ ID NO: 266566 - DNA, 25 bp, Artificial
  probe
  misc_feature (1)..(25): SEQ ID NO: 559; WAN0249HA; Start 21; Stop 45
tttattgaaaatttcccttttgtgg

SEQ ID NO: 266567 - DNA, 25 bp, Artificial
  probe
  misc_feature (1)..(25): SEQ ID NO: 559; WAN0249HA; Start 34; Stop 58
tcccttttgtggtataatagataaa

SEQ ID NO: 266568 - DNA, 25 bp, Artificial
  probe
  misc_feature (1)..(25): SEQ ID NO: 559; WAN0249HA; Start 33; Stop 57
ttcccttttgtggtataatagataa

SEQ ID NO: 266569 - DNA, 25 bp, Artificial
  probe
  misc_feature (1)..(25): SEQ ID NO: 559; WAN0249HA; Start 32; Stop 56
tttcccttttgtggtataatagata

SEQ ID NO: 266570 - DNA, 25 bp, Artificial
  probe
  misc_feature (1)..(25): SEQ ID NO: 559; WAN0249HA; Start 7; Stop 31
aagaaagtggctattttattgaaaa

SEQ ID NO: 266571 - DNA, 25 bp, Artificial
  probe
  misc_feature (1)..(25): SEQ ID NO: 559; WAN0249HA; Start 27; Stop 51
gaaaatttcccttttgtggtataat

SEQ ID NO: 266572 - DNA, 25 bp, Artificial
  probe
  misc_feature (1)..(25): SEQ ID NO: 559; WAN0249HA; Start 13; Stop 37
gtggctattttattgaaaatttccc

SEQ ID NO: 266573 - DNA, 25 bp, Artificial
  probe
  misc_feature (1)..(25): SEQ ID NO: 559; WAN0249HA; Start 14; Stop 38
tggctattttattgaaaatttccct

SEQ ID NO: 266574 - DNA, 25 bp, Artificial
  probe
  misc_feature (1)..(25): SEQ ID NO: 559; WAN0249HA; Start 29; Stop 53
aaatttcccttttgtggtataatag

SEQ ID NO: 266575 - DNA, 25 bp, Artificial
  probe
  misc_feature (1)..(25): SEQ ID NO: 559; WAN0249HA; Start 20; Stop 44
ttttattgaaaatttcccttttgtg

SEQ ID NO: 266576 - DNA, 25 bp, Artificial
  probe
  misc_feature (1)..(25): SEQ ID NO: 559; WAN0249HA; Start 12; Stop 36
agtggctattttattgaaaatttcc

SEQ ID NO: 266577 - DNA, 25 bp, Artificial
  probe
  misc_feature (1)..(25): SEQ ID NO: 559; WAN0249HA; Start 15; Stop 39
ggctattttattgaaaatttccctt

SEQ ID NO: 266578 - DNA, 25 bp, Artificial
  probe
  misc_feature (1)..(25): SEQ ID NO: 559; WAN0249HA; Start 35; Stop 59
cccttttgtggtataatagataaag

SEQ ID NO: 266579 - DNA, 25 bp, Artificial
  probe
  misc_feature (1)..(25): SEQ ID NO: 559; WAN0249HA; Start 8; Stop 32
agaaagtggctattttattgaaaat

SEQ ID NO: 266580 - DNA, 25 bp, Artificial
  probe
  misc_feature (1)..(25): SEQ ID NO: 559; WAN0249HA; Start 28; Stop 52
aaaatttcccttttgtggtataata

SEQ ID NO: 266581 - DNA, 25 bp, Artificial
  probe
  misc_feature (1)..(25): SEQ ID NO: 559; WAN0249HA; Start 9; Stop 33
gaaagtggctattttattgaaaatt

SEQ ID NO: 266582 - DNA, 25 bp, Artificial
  probe
  misc_feature (1)..(25): SEQ ID NO: 559; WAN0249HA; Start 16; Stop 40
gctattttattgaaaatttcccttt

SEQ ID NO: 266583 - DNA, 25 bp, Artificial
  probe
  misc_feature (1)..(25): SEQ ID NO: 559; WAN0249HA; Start 11; Stop 35
aagtggctattttattgaaaatttc

SEQ ID NO: 266584 - DNA, 25 bp, Artificial
  probe
  misc_feature (1)..(25): SEQ ID NO: 560; WAN024AIZ; Start 36; Stop 60
agtttgcttgttaccctttaattga

SEQ ID NO: 266585 - DNA, 25 bp, Artificial
  probe
  misc_feature (1)..(25): SEQ ID NO: 560; WAN024AIZ; Start 35; Stop 59
gagtttgcttgttaccctttaattg

SEQ ID NO: 266586 - DNA, 25 bp, Artificial
  probe
  misc_feature (1)..(25): SEQ ID NO: 560; WAN024AIZ; Start 34; Stop 58
agagtttgcttgttaccctttaatt

SEQ ID NO: 266587 - DNA, 25 bp, Artificial
  probe
  misc_feature (1)..(25): SEQ ID NO: 560; WAN024AIZ; Start 33; Stop 57
aagagtttgcttgttaccctttaat

SEQ ID NO: 266588 - DNA, 25 bp, Artificial
  probe
  misc_feature (1)..(25): SEQ ID NO: 560; WAN024AIZ; Start 37; Stop 61
gtttgcttgttaccctttaattgaa

SEQ ID NO: 266589 - DNA, 25 bp, Artificial
  probe
  misc_feature (1)..(25): SEQ ID NO: 560; WAN024AIZ; Start 38; Stop 62
tttgcttgttaccctttaattgaac

SEQ ID NO: 266590 - DNA, 25 bp, Artificial
  probe
  misc_feature (1)..(25): SEQ ID NO: 560; WAN024AIZ; Start 32; Stop 56
aaagagtttgcttgttaccctttaa

SEQ ID NO: 266591 - DNA, 25 bp, Artificial
  probe
  misc_feature (1)..(25): SEQ ID NO: 560; WAN024AIZ; Start 39; Stop 63
ttgcttgttaccctttaattgaaca

SEQ ID NO: 266592 - DNA, 25 bp, Artificial
  probe
  misc_feature (1)..(25): SEQ ID NO: 560; WAN024AIZ; Start 31; Stop 55
aaaagagtttgcttgttacccttta

SEQ ID NO: 266593 - DNA, 25 bp, Artificial
  probe
  misc_feature (1)..(25): SEQ ID NO: 561; WAN0249LQ; Start 242; Stop 266
tctagtaatgtgttgtaactctgct

SEQ ID NO: 266594 - DNA, 25 bp, Artificial
  probe
  misc_feature (1)..(25): SEQ ID NO: 561; WAN0249LQ; Start 241; Stop 265
ttctagtaatgtgttgtaactctgc

SEQ ID NO: 266595 - DNA, 25 bp, Artificial
  probe
  misc_feature (1)..(25): SEQ ID NO: 561; WAN0249LQ; Start 243; Stop 267
ctagtaatgtgttgtaactctgcta

SEQ ID NO: 266596 - DNA, 25 bp, Artificial
  probe
  misc_feature (1)..(25): SEQ ID NO: 561; WAN0249LQ; Start 245; Stop 269
agtaatgtgttgtaactctgctata

SEQ ID NO: 266597 - DNA, 25 bp, Artificial
  probe
  misc_feature (1)..(25): SEQ ID NO: 561; WAN0249LQ; Start 244; Stop 268
tagtaatgtgttgtaactctgctat

SEQ ID NO: 266598 - DNA, 25 bp, Artificial
  probe
  misc_feature (1)..(25): SEQ ID NO: 561; WAN0249LQ; Start 250; Stop 274
tgtgttgtaactctgctataataga

SEQ ID NO: 266599 - DNA, 25 bp, Artificial
  probe
  misc_feature (1)..(25): SEQ ID NO: 561; WAN0249LQ; Start 246; Stop 270
gtaatgtgttgtaactctgctataa

SEQ ID NO: 266600 - DNA, 25 bp, Artificial
  probe
  misc_feature (1)..(25): SEQ ID NO: 561; WAN0249LQ; Start 42; Stop 66
actaaatgattgatgctatgtggaa

SEQ ID NO: 266601 - DNA, 25 bp, Artificial
  probe
  misc_feature (1)..(25): SEQ ID NO: 561; WAN0249LQ; Start 46; Stop 70
aatgattgatgctatgtggaaatac

SEQ ID NO: 266602 - DNA, 25 bp, Artificial
  probe
  misc_feature (1)..(25): SEQ ID NO: 561; WAN0249LQ; Start 41; Stop 65
tactaaatgattgatgctatgtgga

SEQ ID NO: 266603 - DNA, 25 bp, Artificial
  probe
  misc_feature (1)..(25): SEQ ID NO: 561; WAN0249LQ; Start 48; Stop 72
tgattgatgctatgtggaaatacaa

SEQ ID NO: 266604 - DNA, 25 bp, Artificial
  probe
  misc_feature (1)..(25): SEQ ID NO: 561; WAN0249LQ; Start 249; Stop 273
atgtgttgtaactctgctataatag

SEQ ID NO: 266605 - DNA, 25 bp, Artificial
  probe
  misc_feature (1)..(25): SEQ ID NO: 561; WAN0249LQ; Start 43; Stop 67
ctaaatgattgatgctatgtggaaa

SEQ ID NO: 266606 - DNA, 25 bp, Artificial
  probe
  misc_feature (1)..(25): SEQ ID NO: 561; WAN0249LQ; Start 47; Stop 71
atgattgatgctatgtggaaataca

SEQ ID NO: 266607 - DNA, 25 bp, Artificial
  probe
  misc_feature (1)..(25): SEQ ID NO: 561; WAN0249LQ; Start 82; Stop 106
tttgatacgaagttgacctgtattt

SEQ ID NO: 266608 - DNA, 25 bp, Artificial
  probe
  misc_feature (1)..(25): SEQ ID NO: 561; WAN0249LQ; Start 40; Stop 64
gtactaaatgattgatgctatgtgg

SEQ ID NO: 266609 - DNA, 25 bp, Artificial
  probe
  misc_feature (1)..(25): SEQ ID NO: 561; WAN0249LQ; Start 251; Stop 275
gtgttgtaactctgctataatagat

SEQ ID NO: 266610 - DNA, 25 bp, Artificial
  probe
  misc_feature (1)..(25): SEQ ID NO: 561; WAN0249LQ; Start 248; Stop 272
aatgtgttgtaactctgctataata

SEQ ID NO: 266611 - DNA, 25 bp, Artificial
  probe
  misc_feature (1)..(25): SEQ ID NO: 561; WAN0249LQ; Start 247; Stop 271
taatgtgttgtaactctgctataat

SEQ ID NO: 266612 - DNA, 25 bp, Artificial
  probe
  misc_feature (1)..(25): SEQ ID NO: 561; WAN0249LQ; Start 49; Stop 73
gattgatgctatgtggaaatacaaa

SEQ ID NO: 266613 - DNA, 25 bp, Artificial
  probe
  misc_feature (1)..(25): SEQ ID NO: 561; WAN0249LQ; Start 45; Stop 69
aaatgattgatgctatgtggaaata

SEQ ID NO: 266614 - DNA, 25 bp, Artificial
  probe
  misc_feature (1)..(25): SEQ ID NO: 561; WAN0249LQ; Start 44; Stop 68
taaatgattgatgctatgtggaaat

SEQ ID NO: 266615 - DNA, 25 bp, Artificial
  probe
  misc_feature (1)..(25): SEQ ID NO: 561; WAN0249LQ; Start 39; Stop 63
tgtactaaatgattgatgctatgtg

SEQ ID NO: 266616 - DNA, 25 bp, Artificial
  probe
  misc_feature (1)..(25): SEQ ID NO: 561; WAN0249LQ; Start 236; Stop 260
tctctttctagtaatgtgttgtaac

SEQ ID NO: 266617 - DNA, 25 bp, Artificial
  probe
  misc_feature (1)..(25): SEQ ID NO: 561; WAN0249LQ; Start 252; Stop 276
tgttgtaactctgctataatagatt

SEQ ID NO: 266618 - DNA, 25 bp, Artificial
  probe
  misc_feature (1)..(25): SEQ ID NO: 561; WAN0249LQ; Start 240; Stop 264
tttctagtaatgtgttgtaactctg

SEQ ID NO: 266619 - DNA, 25 bp, Artificial
  probe
  misc_feature (1)..(25): SEQ ID NO: 561; WAN0249LQ; Start 38; Stop 62
ttgtactaaatgattgatgctatgt

SEQ ID NO: 266620 - DNA, 25 bp, Artificial
  probe
  misc_feature (1)..(25): SEQ ID NO: 561; WAN0249LQ; Start 233; Stop 257
aaatctctttctagtaatgtgttgt

SEQ ID NO: 266621 - DNA, 25 bp, Artificial
  probe
  misc_feature (1)..(25): SEQ ID NO: 561; WAN0249LQ; Start 239; Stop 263
ctttctagtaatgtgttgtaactct

SEQ ID NO: 266622 - DNA, 25 bp, Artificial
  probe
  misc_feature (1)..(25): SEQ ID NO: 561; WAN0249LQ; Start 238; Stop 262
tctttctagtaatgtgttgtaactc

SEQ ID NO: 266623 - DNA, 25 bp, Artificial
  probe
  misc_feature (1)..(25): SEQ ID NO: 561; WAN0249LQ; Start 237; Stop 261
ctctttctagtaatgtgttgtaact

SEQ ID NO: 266624 - DNA, 25 bp, Artificial
  probe
  misc_feature (1)..(25): SEQ ID NO: 561; WAN0249LQ; Start 83; Stop 107
ttgatacgaagttgacctgtatttt

SEQ ID NO: 266625 - DNA, 25 bp, Artificial
  probe
  misc_feature (1)..(25): SEQ ID NO: 561; WAN0249LQ; Start 81; Stop 105
ttttgatacgaagttgacctgtatt

SEQ ID NO: 266626 - DNA, 25 bp, Artificial
  probe
  misc_feature (1)..(25): SEQ ID NO: 562; WAN024A5S; Start 177; Stop 201
atacaaaggacgaatagaaagcgat

SEQ ID NO: 266627 - DNA, 25 bp, Artificial
  probe
  misc_feature (1)..(25): SEQ ID NO: 562; WAN024A5S; Start 178; Stop 202
tacaaaggacgaatagaaagcgatt

SEQ ID NO: 266628 - DNA, 25 bp, Artificial
  probe
  misc_feature (1)..(25): SEQ ID NO: 562; WAN024A5S; Start 157; Stop 181
tcagggcgacattaaataagataca

SEQ ID NO: 266629 - DNA, 25 bp, Artificial
  probe
  misc_feature (1)..(25): SEQ ID NO: 562; WAN024A5S; Start 3; Stop 27
ataagatattaagggtgtcaagcgg

SEQ ID NO: 266630 - DNA, 25 bp, Artificial
  probe
  misc_feature (1)..(25): SEQ ID NO: 562; WAN024A5S; Start 174; Stop 198
aagatacaaaggacgaatagaaagc

SEQ ID NO: 266631 - DNA, 25 bp, Artificial
  probe
  misc_feature (1)..(25): SEQ ID NO: 562; WAN024A5S; Start 274; Stop 298
ttcagttacataaattctccgacga

SEQ ID NO: 266632 - DNA, 25 bp, Artificial
  probe
  misc_feature (1)..(25): SEQ ID NO: 562; WAN024A5S; Start 273; Stop 297
gttcagttacataaattctccgacg

SEQ ID NO: 266633 - DNA, 25 bp, Artificial
  probe
  misc_feature (1)..(25): SEQ ID NO: 562; WAN024A5S; Start 156; Stop 180
ctcagggcgacattaaataagatac

SEQ ID NO: 266634 - DNA, 25 bp, Artificial
  probe
  misc_feature (1)..(25): SEQ ID NO: 562; WAN024A5S; Start 184; Stop 208
ggacgaatagaaagcgattgaattt

SEQ ID NO: 266635 - DNA, 25 bp, Artificial
  probe
  misc_feature (1)..(25): SEQ ID NO: 562; WAN024A5S; Start 182; Stop 206
aaggacgaatagaaagcgattgaat

SEQ ID NO: 266636 - DNA, 25 bp, Artificial
  probe
  misc_feature (1)..(25): SEQ ID NO: 562; WAN024A5S; Start 158; Stop 182
cagggcgacattaaataagatacaa

SEQ ID NO: 266637 - DNA, 25 bp, Artificial
  probe
  misc_feature (1)..(25): SEQ ID NO: 562; WAN024A5S; Start 176; Stop 200
gatacaaaggacgaatagaaagcga

SEQ ID NO: 266638 - DNA, 25 bp, Artificial
  probe
  misc_feature (1)..(25): SEQ ID NO: 562; WAN024A5S; Start 175; Stop 199
agatacaaaggacgaatagaaagcg

SEQ ID NO: 266639 - DNA, 25 bp, Artificial
  probe
  misc_feature (1)..(25): SEQ ID NO: 562; WAN024A5S; Start 181; Stop 205
aaaggacgaatagaaagcgattgaa

SEQ ID NO: 266640 - DNA, 25 bp, Artificial
  probe
  misc_feature (1)..(25): SEQ ID NO: 562; WAN024A5S; Start 183; Stop 207
aggacgaatagaaagcgattgaatt

SEQ ID NO: 266641 - DNA, 25 bp, Artificial
  probe
  misc_feature (1)..(25): SEQ ID NO: 562; WAN024A5S; Start 154; Stop 178
ctctcagggcgacattaaataagat

SEQ ID NO: 266642 - DNA, 25 bp, Artificial
  probe
  misc_feature (1)..(25): SEQ ID NO: 562; WAN024A5S; Start 155; Stop 179
tctcagggcgacattaaataagata

SEQ ID NO: 266643 - DNA, 25 bp, Artificial
  probe
  misc_feature (1)..(25): SEQ ID NO: 562; WAN024A5S; Start 4; Stop 28
taagatattaagggtgtcaagcgga

SEQ ID NO: 266644 - DNA, 25 bp, Artificial
  probe
  misc_feature (1)..(25): SEQ ID NO: 562; WAN024A5S; Start 159; Stop 183
agggcgacattaaataagatacaaa

SEQ ID NO: 266645 - DNA, 25 bp, Artificial
  probe
  misc_feature (1)..(25): SEQ ID NO: 562; WAN024A5S; Start 161; Stop 185
ggcgacattaaataagatacaaagg

SEQ ID NO: 266646 - DNA, 25 bp, Artificial
  probe
  misc_feature (1)..(25): SEQ ID NO: 562; WAN024A5S; Start 160; Stop 184
gggcgacattaaataagatacaaag

SEQ ID NO: 266647 - DNA, 25 bp, Artificial
  probe
  misc_feature (1)..(25): SEQ ID NO: 562; WAN024A5S; Start 236; Stop 260
caagttggtttctctacattctgag

SEQ ID NO: 266648 - DNA, 25 bp, Artificial
  probe
  misc_feature (1)..(25): SEQ ID NO: 562; WAN024A5S; Start 275; Stop 299
tcagttacataaattctccgacgag

SEQ ID NO: 266649 - DNA, 25 bp, Artificial
  probe
  misc_feature (1)..(25): SEQ ID NO: 562; WAN024A5S; Start 2; Stop 26
tataagatattaagggtgtcaagcg

SEQ ID NO: 266650 - DNA, 25 bp, Artificial
  probe
  misc_feature (1)..(25): SEQ ID NO: 562; WAN024A5S; Start 269; Stop 293
ccgtgttcagttacataaattctcc

SEQ ID NO: 266651 - DNA, 25 bp, Artificial
  probe
  misc_feature (1)..(25): SEQ ID NO: 562; WAN024A5S; Start 270; Stop 294
cgtgttcagttacataaattctccg

SEQ ID NO: 266652 - DNA, 25 bp, Artificial
  probe
  misc_feature (1)..(25): SEQ ID NO: 562; WAN024A5S; Start 237; Stop 261
aagttggtttctctacattctgagc

SEQ ID NO: 266653 - DNA, 25 bp, Artificial
  probe
  misc_feature (1)..(25): SEQ ID NO: 562; WAN024A5S; Start 267; Stop 291
gtccgtgttcagttacataaattct

SEQ ID NO: 266654 - DNA, 25 bp, Artificial
  probe
  misc_feature (1)..(25): SEQ ID NO: 562; WAN024A5S; Start 266; Stop 290
cgtccgtgttcagttacataaattc

SEQ ID NO: 266655 - DNA, 25 bp, Artificial
  probe
  misc_feature (1)..(25): SEQ ID NO: 562; WAN024A5S; Start 272; Stop 296
tgttcagttacataaattctccgac

SEQ ID NO: 266656 - DNA, 25 bp, Artificial
  probe
  misc_feature (1)..(25): SEQ ID NO: 562; WAN024A5S; Start 271; Stop 295
gtgttcagttacataaattctccga

SEQ ID NO: 266657 - DNA, 25 bp, Artificial
  probe
  misc_feature (1)..(25): SEQ ID NO: 562; WAN024A5S; Start 268; Stop 292
tccgtgttcagttacataaattctc

SEQ ID NO: 266658 - DNA, 25 bp, Artificial
  probe
  misc_feature (1)..(25): SEQ ID NO: 562; WAN024A5S; Start 180; Stop 204
caaaggacgaatagaaagcgattga

SEQ ID NO: 266659 - DNA, 25 bp, Artificial
  probe
  misc_feature (1)..(25): SEQ ID NO: 563; WAN0249DI; Start 3; Stop 27
ataatagcaaagctgggaattttcc

SEQ ID NO: 266660 - DNA, 25 bp, Artificial
  probe
  misc_feature (1)..(25): SEQ ID NO: 563; WAN0249DI; Start 2; Stop 26
tataatagcaaagctgggaattttc

SEQ ID NO: 266661 - DNA, 25 bp, Artificial
  probe
  misc_feature (1)..(25): SEQ ID NO: 563; WAN0249DI; Start 1; Stop 25
atataatagcaaagctgggaatttt

SEQ ID NO: 266662 - DNA, 25 bp, Artificial
  probe
  misc_feature (1)..(25): SEQ ID NO: 564; WAN0249ML; Start 13; Stop 37
gcttcagttgtcttatttctaggtt

SEQ ID NO: 266663 - DNA, 25 bp, Artificial
  probe
  misc_feature (1)..(25): SEQ ID NO: 564; WAN0249ML; Start 12; Stop 36
agcttcagttgtcttatttctaggt

SEQ ID NO: 266664 - DNA, 25 bp, Artificial
  probe
  misc_feature (1)..(25): SEQ ID NO: 564; WAN0249ML; Start 21; Stop 45
tgtcttatttctaggttactgagtt

SEQ ID NO: 266665 - DNA, 25 bp, Artificial
  probe
  misc_feature (1)..(25): SEQ ID NO: 564; WAN0249ML; Start 20; Stop 44
ttgtcttatttctaggttactgagt

SEQ ID NO: 266666 - DNA, 25 bp, Artificial
  probe
  misc_feature (1)..(25): SEQ ID NO: 564; WAN0249ML; Start 19; Stop 43
gttgtcttatttctaggttactgag

SEQ ID NO: 266667 - DNA, 25 bp, Artificial
  probe
  misc_feature (1)..(25): SEQ ID NO: 564; WAN0249ML; Start 136; Stop 160
atctcaaaacagcactttcaaacat

SEQ ID NO: 266668 - DNA, 25 bp, Artificial
  probe
  misc_feature (1)..(25): SEQ ID NO: 564; WAN0249ML; Start 140; Stop 164
caaaacagcactttcaaacatcttt

SEQ ID NO: 266669 - DNA, 25 bp, Artificial
  probe
  misc_feature (1)..(25): SEQ ID NO: 564; WAN0249ML; Start 139; Stop 163
tcaaaacagcactttcaaacatctt

SEQ ID NO: 266670 - DNA, 25 bp, Artificial
  probe
  misc_feature (1)..(25): SEQ ID NO: 564; WAN0249ML; Start 135; Stop 159
aatctcaaaacagcactttcaaaca

SEQ ID NO: 266671 - DNA, 25 bp, Artificial
  probe
  misc_feature (1)..(25): SEQ ID NO: 564; WAN0249ML; Start 142; Stop 166
aaacagcactttcaaacatcttttc

SEQ ID NO: 266672 - DNA, 25 bp, Artificial
  probe
  misc_feature (1)..(25): SEQ ID NO: 564; WAN0249ML; Start 134; Stop 158
aaatctcaaaacagcactttcaaac

SEQ ID NO: 266673 - DNA, 25 bp, Artificial
  probe
  misc_feature (1)..(25): SEQ ID NO: 564; WAN0249ML; Start 138; Stop 162
ctcaaaacagcactttcaaacatct

SEQ ID NO: 266674 - DNA, 25 bp, Artificial
  probe
  misc_feature (1)..(25): SEQ ID NO: 564; WAN0249ML; Start 137; Stop 161
tctcaaaacagcactttcaaacatc

SEQ ID NO: 266675 - DNA, 25 bp, Artificial
  probe
  misc_feature (1)..(25): SEQ ID NO: 564; WAN0249ML; Start 18; Stop 42
agttgtcttatttctaggttactga

SEQ ID NO: 266676 - DNA, 25 bp, Artificial
  probe
  misc_feature (1)..(25): SEQ ID NO: 564; WAN0249ML; Start 16; Stop 40
tcagttgtcttatttctaggttact

SEQ ID NO: 266677 - DNA, 25 bp, Artificial
  probe
  misc_feature (1)..(25): SEQ ID NO: 564; WAN0249ML; Start 15; Stop 39
ttcagttgtcttatttctaggttac

SEQ ID NO: 266678 - DNA, 25 bp, Artificial
  probe
  misc_feature (1)..(25): SEQ ID NO: 564; WAN0249ML; Start 22; Stop 46
gtcttatttctaggttactgagttt

SEQ ID NO: 266679 - DNA, 25 bp, Artificial
  probe
  misc_feature (1)..(25): SEQ ID NO: 564; WAN0249ML; Start 14; Stop 38
cttcagttgtcttatttctaggtta

SEQ ID NO: 266680 - DNA, 25 bp, Artificial
  probe
  misc_feature (1)..(25): SEQ ID NO: 564; WAN0249ML; Start 141; Stop 165
aaaacagcactttcaaacatctttt

SEQ ID NO: 266681 - DNA, 25 bp, Artificial
  probe
  misc_feature (1)..(25): SEQ ID NO: 564; WAN0249ML; Start 129; Stop 153
aatcgaaatctcaaaacagcacttt

SEQ ID NO: 266682 - DNA, 25 bp, Artificial
  probe
  misc_feature (1)..(25): SEQ ID NO: 564; WAN0249ML; Start 128; Stop 152
taatcgaaatctcaaaacagcactt

SEQ ID NO: 266683 - DNA, 25 bp, Artificial
  probe
  misc_feature (1)..(25): SEQ ID NO: 564; WAN0249ML; Start 127; Stop 151
ttaatcgaaatctcaaaacagcact

SEQ ID NO: 266684 - DNA, 25 bp, Artificial
  probe
  misc_feature (1)..(25): SEQ ID NO: 564; WAN0249ML; Start 126; Stop 150
tttaatcgaaatctcaaaacagcac

SEQ ID NO: 266685 - DNA, 25 bp, Artificial
  probe
  misc_feature (1)..(25): SEQ ID NO: 564; WAN0249ML; Start 11; Stop 35
aagcttcagttgtcttatttctagg

SEQ ID NO: 266686 - DNA, 25 bp, Artificial
  probe
  misc_feature (1)..(25): SEQ ID NO: 564; WAN0249ML; Start 133; Stop 157
gaaatctcaaaacagcactttcaaa

SEQ ID NO: 266687 - DNA, 25 bp, Artificial
  probe
  misc_feature (1)..(25): SEQ ID NO: 564; WAN0249ML; Start 132; Stop 156
cgaaatctcaaaacagcactttcaa

SEQ ID NO: 266688 - DNA, 25 bp, Artificial
  probe
  misc_feature (1)..(25): SEQ ID NO: 564; WAN0249ML; Start 5; Stop 29
agagtaaagcttcagttgtcttatt

SEQ ID NO: 266689 - DNA, 25 bp, Artificial
  probe
  misc_feature (1)..(25): SEQ ID NO: 564; WAN0249ML; Start 125; Stop 149
ttttaatcgaaatctcaaaacagca

SEQ ID NO: 266690 - DNA, 25 bp, Artificial
  probe
  misc_feature (1)..(25): SEQ ID NO: 564; WAN0249ML; Start 8; Stop 32
gtaaagcttcagttgtcttatttct

SEQ ID NO: 266691 - DNA, 25 bp, Artificial
  probe
  misc_feature (1)..(25): SEQ ID NO: 564; WAN0249ML; Start 7; Stop 31
agtaaagcttcagttgtcttatttc

SEQ ID NO: 266692 - DNA, 25 bp, Artificial
  probe
  misc_feature (1)..(25): SEQ ID NO: 564; WAN0249ML; Start 6; Stop 30
gagtaaagcttcagttgtcttattt

SEQ ID NO: 266693 - DNA, 25 bp, Artificial
  probe
  misc_feature (1)..(25): SEQ ID NO: 564; WAN0249ML; Start 130; Stop 154
atcgaaatctcaaaacagcactttc

SEQ ID NO: 266694 - DNA, 25 bp, Artificial
  probe
  misc_feature (1)..(25): SEQ ID NO: 564; WAN0249ML; Start 4; Stop 28
tagagtaaagcttcagttgtcttat

SEQ ID NO: 266695 - DNA, 25 bp, Artificial
  probe
  misc_feature (1)..(25): SEQ ID NO: 565; WAN0249QL; Start 314; Stop 338
actgtctaatcttgtaagctgaact

SEQ ID NO: 266696 - DNA, 25 bp, Artificial
  probe
  misc_feature (1)..(25): SEQ ID NO: 565; WAN0249QL; Start 316; Stop 340
tgtctaatcttgtaagctgaactct

SEQ ID NO: 266697 - DNA, 25 bp, Artificial
  probe
  misc_feature (1)..(25): SEQ ID NO: 565; WAN0249QL; Start 315; Stop 339
ctgtctaatcttgtaagctgaactc

SEQ ID NO: 266698 - DNA, 25 bp, Artificial
  probe
  misc_feature (1)..(25): SEQ ID NO: 565; WAN0249QL; Start 313; Stop 337
aactgtctaatcttgtaagctgaac

SEQ ID NO: 266699 - DNA, 25 bp, Artificial
  probe
  misc_feature (1)..(25): SEQ ID NO: 565; WAN0249QL; Start 311; Stop 335
agaactgtctaatcttgtaagctga

SEQ ID NO: 266700 - DNA, 25 bp, Artificial
  probe
  misc_feature (1)..(25): SEQ ID NO: 565; WAN0249QL; Start 312; Stop 336
gaactgtctaatcttgtaagctgaa

SEQ ID NO: 266701 - DNA, 25 bp, Artificial
  probe
  misc_feature (1)..(25): SEQ ID NO: 565; WAN0249QL; Start 73; Stop 97
ggctaattcatcaaacaggtcattt

SEQ ID NO: 266702 - DNA, 25 bp, Artificial
  probe
  misc_feature (1)..(25): SEQ ID NO: 565; WAN0249QL; Start 237; Stop 261
gatgatacccattgaacctgataca

SEQ ID NO: 266703 - DNA, 25 bp, Artificial
  probe
  misc_feature (1)..(25): SEQ ID NO: 565; WAN0249QL; Start 236; Stop 260
agatgatacccattgaacctgatac

SEQ ID NO: 266704 - DNA, 25 bp, Artificial
  probe
  misc_feature (1)..(25): SEQ ID NO: 565; WAN0249QL; Start 235; Stop 259
gagatgatacccattgaacctgata

SEQ ID NO: 266705 - DNA, 25 bp, Artificial
  probe
  misc_feature (1)..(25): SEQ ID NO: 565; WAN0249QL; Start 72; Stop 96
tggctaattcatcaaacaggtcatt

SEQ ID NO: 266706 - DNA, 25 bp, Artificial
  probe
  misc_feature (1)..(25): SEQ ID NO: 565; WAN0249QL; Start 226; Stop 250
ctttaggctgagatgatacccattg

SEQ ID NO: 266707 - DNA, 25 bp, Artificial
  probe
  misc_feature (1)..(25): SEQ ID NO: 565; WAN0249QL; Start 71; Stop 95
atggctaattcatcaaacaggtcat

SEQ ID NO: 266708 - DNA, 25 bp, Artificial
  probe
  misc_feature (1)..(25): SEQ ID NO: 565; WAN0249QL; Start 70; Stop 94
aatggctaattcatcaaacaggtca

SEQ ID NO: 266709 - DNA, 25 bp, Artificial
  probe
  misc_feature (1)..(25): SEQ ID NO: 565; WAN0249QL; Start 234; Stop 258
tgagatgatacccattgaacctgat

SEQ ID NO: 266710 - DNA, 25 bp, Artificial
  probe
  misc_feature (1)..(25): SEQ ID NO: 565; WAN0249QL; Start 228; Stop 252
ttaggctgagatgatacccattgaa

SEQ ID NO: 266711 - DNA, 25 bp, Artificial
  probe
  misc_feature (1)..(25): SEQ ID NO: 565; WAN0249QL; Start 227; Stop 251
tttaggctgagatgatacccattga

SEQ ID NO: 266712 - DNA, 25 bp, Artificial
  probe
  misc_feature (1)..(25): SEQ ID NO: 565; WAN0249QL; Start 317; Stop 341
gtctaatcttgtaagctgaactcta

SEQ ID NO: 266713 - DNA, 25 bp, Artificial
  probe
  misc_feature (1)..(25): SEQ ID NO: 565; WAN0249QL; Start 373; Stop 397
acgaaactggatgaagatgatatag

SEQ ID NO: 266714 - DNA, 25 bp, Artificial
  probe
  misc_feature (1)..(25): SEQ ID NO: 565; WAN0249QL; Start 9; Stop 33
ccttggattctaagtaagtaggatt

SEQ ID NO: 266715 - DNA, 25 bp, Artificial
  probe
  misc_feature (1)..(25): SEQ ID NO: 565; WAN0249QL; Start 370; Stop 394
tttacgaaactggatgaagatgata

SEQ ID NO: 266716 - DNA, 25 bp, Artificial
  probe
  misc_feature (1)..(25): SEQ ID NO: 565; WAN0249QL; Start 233; Stop 257
ctgagatgatacccattgaacctga

SEQ ID NO: 266717 - DNA, 25 bp, Artificial
  probe
  misc_feature (1)..(25): SEQ ID NO: 565; WAN0249QL; Start 238; Stop 262
atgatacccattgaacctgatacag

SEQ ID NO: 266718 - DNA, 25 bp, Artificial
  probe
  misc_feature (1)..(25): SEQ ID NO: 565; WAN0249QL; Start 139; Stop 163
ggctgtatttccagttcaatttctt

SEQ ID NO: 266719 - DNA, 25 bp, Artificial
  probe
  misc_feature (1)..(25): SEQ ID NO: 565; WAN0249QL; Start 137; Stop 161
aaggctgtatttccagttcaatttc

SEQ ID NO: 266720 - DNA, 25 bp, Artificial
  probe
  misc_feature (1)..(25): SEQ ID NO: 565; WAN0249QL; Start 136; Stop 160
caaggctgtatttccagttcaattt

SEQ ID NO: 266721 - DNA, 25 bp, Artificial
  probe
  misc_feature (1)..(25): SEQ ID NO: 565; WAN0249QL; Start 240; Stop 264
gatacccattgaacctgatacagtt

SEQ ID NO: 266722 - DNA, 25 bp, Artificial
  probe
  misc_feature (1)..(25): SEQ ID NO: 565; WAN0249QL; Start 229; Stop 253
taggctgagatgatacccattgaac

SEQ ID NO: 266723 - DNA, 25 bp, Artificial
  probe
  misc_feature (1)..(25): SEQ ID NO: 565; WAN0249QL; Start 371; Stop 395
ttacgaaactggatgaagatgatat

SEQ ID NO: 266724 - DNA, 25 bp, Artificial
  probe
  misc_feature (1)..(25): SEQ ID NO: 565; WAN0249QL; Start 138; Stop 162
aggctgtatttccagttcaatttct

SEQ ID NO: 266725 - DNA, 25 bp, Artificial
  probe
  misc_feature (1)..(25): SEQ ID NO: 565; WAN0249QL; Start 140; Stop 164
gctgtatttccagttcaatttcttg

SEQ ID NO: 266726 - DNA, 25 bp, Artificial
  probe
  misc_feature (1)..(25): SEQ ID NO: 565; WAN0249QL; Start 374; Stop 398
cgaaactggatgaagatgatatagt

SEQ ID NO: 266727 - DNA, 25 bp, Artificial
  probe
  misc_feature (1)..(25): SEQ ID NO: 565; WAN0249QL; Start 239; Stop 263
tgatacccattgaacctgatacagt

SEQ ID NO: 266728 - DNA, 25 bp, Artificial
  probe
  misc_feature (1)..(25): SEQ ID NO: 566; WAN024A2N; Start 167; Stop 191
tttaatcctctgtaaccgttgattt

SEQ ID NO: 266729 - DNA, 25 bp, Artificial
  probe
  misc_feature (1)..(25): SEQ ID NO: 566; WAN024A2N; Start 144; Stop 168
ccgttttaatcccagttacagtttt

SEQ ID NO: 266730 - DNA, 25 bp, Artificial
  probe
  misc_feature (1)..(25): SEQ ID NO: 566; WAN024A2N; Start 137; Stop 161
aatgttcccgttttaatcccagtta

SEQ ID NO: 266731 - DNA, 25 bp, Artificial
  probe
  misc_feature (1)..(25): SEQ ID NO: 566; WAN024A2N; Start 138; Stop 162
atgttcccgttttaatcccagttac

SEQ ID NO: 266732 - DNA, 25 bp, Artificial
  probe
  misc_feature (1)..(25): SEQ ID NO: 566; WAN024A2N; Start 136; Stop 160
aaatgttcccgttttaatcccagtt

SEQ ID NO: 266733 - DNA, 25 bp, Artificial
  probe
  misc_feature (1)..(25): SEQ ID NO: 566; WAN024A2N; Start 143; Stop 167
cccgttttaatcccagttacagttt

SEQ ID NO: 266734 - DNA, 25 bp, Artificial
  probe
  misc_feature (1)..(25): SEQ ID NO: 566; WAN024A2N; Start 140; Stop 164
gttcccgttttaatcccagttacag

SEQ ID NO: 266735 - DNA, 25 bp, Artificial
  probe
  misc_feature (1)..(25): SEQ ID NO: 566; WAN024A2N; Start 142; Stop 166
tcccgttttaatcccagttacagtt

SEQ ID NO: 266736 - DNA, 25 bp, Artificial
  probe
  misc_feature (1)..(25): SEQ ID NO: 566; WAN024A2N; Start 141; Stop 165
ttcccgttttaatcccagttacagt

SEQ ID NO: 266737 - DNA, 25 bp, Artificial
  probe
  misc_feature (1)..(25): SEQ ID NO: 566; WAN024A2N; Start 6; Stop 30
agaaagttggctctctaattaaatt

SEQ ID NO: 266738 - DNA, 25 bp, Artificial
  probe
  misc_feature (1)..(25): SEQ ID NO: 566; WAN024A2N; Start 170; Stop 194
aatcctctgtaaccgttgattttac

SEQ ID NO: 266739 - DNA, 25 bp, Artificial
  probe
  misc_feature (1)..(25): SEQ ID NO: 566; WAN024A2N; Start 168; Stop 192
ttaatcctctgtaaccgttgatttt

SEQ ID NO: 266740 - DNA, 25 bp, Artificial
  probe
  misc_feature (1)..(25): SEQ ID NO: 566; WAN024A2N; Start 166; Stop 190
ttttaatcctctgtaaccgttgatt

SEQ ID NO: 266741 - DNA, 25 bp, Artificial
  probe
  misc_feature (1)..(25): SEQ ID NO: 566; WAN024A2N; Start 139; Stop 163
tgttcccgttttaatcccagttaca

SEQ ID NO: 266742 - DNA, 25 bp, Artificial
  probe
  misc_feature (1)..(25): SEQ ID NO: 566; WAN024A2N; Start 169; Stop 193
taatcctctgtaaccgttgatttta

SEQ ID NO: 266743 - DNA, 25 bp, Artificial
  probe
  misc_feature (1)..(25): SEQ ID NO: 566; WAN024A2N; Start 5; Stop 29
tagaaagttggctctctaattaaat

SEQ ID NO: 266744 - DNA, 25 bp, Artificial
  probe
  misc_feature (1)..(25): SEQ ID NO: 566; WAN024A2N; Start 7; Stop 31
gaaagttggctctctaattaaatta

SEQ ID NO: 266745 - DNA, 25 bp, Artificial
  probe
  misc_feature (1)..(25): SEQ ID NO: 566; WAN024A2N; Start 4; Stop 28
ttagaaagttggctctctaattaaa

SEQ ID NO: 266746 - DNA, 25 bp, Artificial
  probe
  misc_feature (1)..(25): SEQ ID NO: 566; WAN024A2N; Start 36; Stop 60
tcattatatatatcaaaagaccgca

SEQ ID NO: 266747 - DNA, 25 bp, Artificial
  probe
  misc_feature (1)..(25): SEQ ID NO: 566; WAN024A2N; Start 175; Stop 199
tctgtaaccgttgattttacaaagc

SEQ ID NO: 266748 - DNA, 25 bp, Artificial
  probe
  misc_feature (1)..(25): SEQ ID NO: 566; WAN024A2N; Start 173; Stop 197
cctctgtaaccgttgattttacaaa

SEQ ID NO: 266749 - DNA, 25 bp, Artificial
  probe
  misc_feature (1)..(25): SEQ ID NO: 566; WAN024A2N; Start 171; Stop 195
atcctctgtaaccgttgattttaca

SEQ ID NO: 266750 - DNA, 25 bp, Artificial
  probe
  misc_feature (1)..(25): SEQ ID NO: 566; WAN024A2N; Start 172; Stop 196
tcctctgtaaccgttgattttacaa

SEQ ID NO: 266751 - DNA, 25 bp, Artificial
  probe
  misc_feature (1)..(25): SEQ ID NO: 566; WAN024A2N; Start 37; Stop 61
cattatatatatcaaaagaccgcag

SEQ ID NO: 266752 - DNA, 25 bp, Artificial
  probe
  misc_feature (1)..(25): SEQ ID NO: 566; WAN024A2N; Start 176; Stop 200
ctgtaaccgttgattttacaaagct

SEQ ID NO: 266753 - DNA, 25 bp, Artificial
  probe
  misc_feature (1)..(25): SEQ ID NO: 566; WAN024A2N; Start 174; Stop 198
ctctgtaaccgttgattttacaaag

SEQ ID NO: 266754 - DNA, 25 bp, Artificial
  probe
  misc_feature (1)..(25): SEQ ID NO: 566; WAN024A2N; Start 35; Stop 59
ctcattatatatatcaaaagaccgc

SEQ ID NO: 266755 - DNA, 25 bp, Artificial
  probe
  misc_feature (1)..(25): SEQ ID NO: 566; WAN024A2N; Start 177; Stop 201
tgtaaccgttgattttacaaagctt

SEQ ID NO: 266756 - DNA, 25 bp, Artificial
  probe
  misc_feature (1)..(25): SEQ ID NO: 567; WAN024ANB; Start 75; Stop 99
caattatgatggatagcttcttggt

SEQ ID NO: 266757 - DNA, 25 bp, Artificial
  probe
  misc_feature (1)..(25): SEQ ID NO: 567; WAN024ANB; Start 76; Stop 100
aattatgatggatagcttcttggtt

SEQ ID NO: 266758 - DNA, 25 bp, Artificial
  probe
  misc_feature (1)..(25): SEQ ID NO: 567; WAN024ANB; Start 14; Stop 38
gcagaatactctttcagtttcattc

SEQ ID NO: 266759 - DNA, 25 bp, Artificial
  probe
  misc_feature (1)..(25): SEQ ID NO: 567; WAN024ANB; Start 13; Stop 37
tgcagaatactctttcagtttcatt

SEQ ID NO: 266760 - DNA, 25 bp, Artificial
  probe
  misc_feature (1)..(25): SEQ ID NO: 567; WAN024ANB; Start 15; Stop 39
cagaatactctttcagtttcattca

SEQ ID NO: 266761 - DNA, 25 bp, Artificial
  probe
  misc_feature (1)..(25): SEQ ID NO: 567; WAN024ANB; Start 74; Stop 98
ccaattatgatggatagcttcttgg

SEQ ID NO: 266762 - DNA, 25 bp, Artificial
  probe
  misc_feature (1)..(25): SEQ ID NO: 567; WAN024ANB; Start 73; Stop 97
tccaattatgatggatagcttcttg

SEQ ID NO: 266763 - DNA, 25 bp, Artificial
  probe
  misc_feature (1)..(25): SEQ ID NO: 568; WAN024A9F; Start 4; Stop 28
ttctcccttgttctcatattatccg

SEQ ID NO: 266764 - DNA, 25 bp, Artificial
  probe
  misc_feature (1)..(25): SEQ ID NO: 568; WAN024A9F; Start 85; Stop 109
tataccataaatccgctttcaacga

SEQ ID NO: 266765 - DNA, 25 bp, Artificial
  probe
  misc_feature (1)..(25): SEQ ID NO: 568; WAN024A9F; Start 89; Stop 113
ccataaatccgctttcaacgataaa

SEQ ID NO: 266766 - DNA, 25 bp, Artificial
  probe
  misc_feature (1)..(25): SEQ ID NO: 568; WAN024A9F; Start 87; Stop 111
taccataaatccgctttcaacgata

SEQ ID NO: 266767 - DNA, 25 bp, Artificial
  probe
  misc_feature (1)..(25): SEQ ID NO: 568; WAN024A9F; Start 6; Stop 30
ctcccttgttctcatattatccgtc

SEQ ID NO: 266768 - DNA, 25 bp, Artificial
  probe
  misc_feature (1)..(25): SEQ ID NO: 568; WAN024A9F; Start 5; Stop 29
tctcccttgttctcatattatccgt

SEQ ID NO: 266769 - DNA, 25 bp, Artificial
  probe
  misc_feature (1)..(25): SEQ ID NO: 568; WAN024A9F; Start 86; Stop 110
ataccataaatccgctttcaacgat

SEQ ID NO: 266770 - DNA, 25 bp, Artificial
  probe
  misc_feature (1)..(25): SEQ ID NO: 568; WAN024A9F; Start 7; Stop 31
tcccttgttctcatattatccgtca

SEQ ID NO: 266771 - DNA, 25 bp, Artificial
  probe
  misc_feature (1)..(25): SEQ ID NO: 568; WAN024A9F; Start 84; Stop 108
ttataccataaatccgctttcaacg

SEQ ID NO: 266772 - DNA, 25 bp, Artificial
  probe
  misc_feature (1)..(25): SEQ ID NO: 568; WAN024A9F; Start 88; Stop 112
accataaatccgctttcaacgataa

SEQ ID NO: 266773 - DNA, 25 bp, Artificial
  probe
  misc_feature (1)..(25): SEQ ID NO: 568; WAN024A9F; Start 8; Stop 32
cccttgttctcatattatccgtcaa

SEQ ID NO: 266774 - DNA, 25 bp, Artificial
  probe
  misc_feature (1)..(25): SEQ ID NO: 568; WAN024A9F; Start 9; Stop 33
ccttgttctcatattatccgtcaaa

SEQ ID NO: 266775 - DNA, 25 bp, Artificial
  probe
  misc_feature (1)..(25): SEQ ID NO: 568; WAN024A9F; Start 78; Stop 102
tgcttattataccataaatccgctt

SEQ ID NO: 266776 - DNA, 25 bp, Artificial
  probe
  misc_feature (1)..(25): SEQ ID NO: 568; WAN024A9F; Start 77; Stop 101
atgcttattataccataaatccgct

SEQ ID NO: 266777 - DNA, 25 bp, Artificial
  probe
  misc_feature (1)..(25): SEQ ID NO: 568; WAN024A9F; Start 3; Stop 27
attctcccttgttctcatattatcc

SEQ ID NO: 266778 - DNA, 25 bp, Artificial
  probe
  misc_feature (1)..(25): SEQ ID NO: 568; WAN024A9F; Start 83; Stop 107
attataccataaatccgctttcaac

SEQ ID NO: 266779 - DNA, 25 bp, Artificial
  probe
  misc_feature (1)..(25): SEQ ID NO: 568; WAN024A9F; Start 76; Stop 100
aatgcttattataccataaatccgc

SEQ ID NO: 266780 - DNA, 25 bp, Artificial
  probe
  misc_feature (1)..(25): SEQ ID NO: 568; WAN024A9F; Start 79; Stop 103
gcttattataccataaatccgcttt

SEQ ID NO: 266781 - DNA, 25 bp, Artificial
  probe
  misc_feature (1)..(25): SEQ ID NO: 568; WAN024A9F; Start 90; Stop 114
cataaatccgctttcaacgataaaa

SEQ ID NO: 266782 - DNA, 25 bp, Artificial
  probe
  misc_feature (1)..(25): SEQ ID NO: 568; WAN024A9F; Start 82; Stop 106
tattataccataaatccgctttcaa

SEQ ID NO: 266783 - DNA, 25 bp, Artificial
  probe
  misc_feature (1)..(25): SEQ ID NO: 568; WAN024A9F; Start 81; Stop 105
ttattataccataaatccgctttca

SEQ ID NO: 266784 - DNA, 25 bp, Artificial
  probe
  misc_feature (1)..(25): SEQ ID NO: 568; WAN024A9F; Start 75; Stop 99
caatgcttattataccataaatccg

SEQ ID NO: 266785 - DNA, 25 bp, Artificial
  probe
  misc_feature (1)..(25): SEQ ID NO: 568; WAN024A9F; Start 80; Stop 104
cttattataccataaatccgctttc

SEQ ID NO: 266786 - DNA, 25 bp, Artificial
  probe
  misc_feature (1)..(25): SEQ ID NO: 568; WAN024A9F; Start 2; Stop 26
tattctcccttgttctcatattatc

SEQ ID NO: 266787 - DNA, 25 bp, Artificial
  probe
  misc_feature (1)..(25): SEQ ID NO: 568; WAN024A9F; Start 10; Stop 34
cttgttctcatattatccgtcaaaa

SEQ ID NO: 266788 - DNA, 25 bp, Artificial
  probe
  misc_feature (1)..(25): SEQ ID NO: 568; WAN024A9F; Start 74; Stop 98
acaatgcttattataccataaatcc

SEQ ID NO: 266789 - DNA, 25 bp, Artificial
  probe
  misc_feature (1)..(25): SEQ ID NO: 568; WAN024A9F; Start 1; Stop 25
atattctcccttgttctcatattat

SEQ ID NO: 266790 - DNA, 25 bp, Artificial
  probe
  misc_feature (1)..(25): SEQ ID NO: 569; WAN024A2S; Start 59; Stop 83
tcagactatatatgcacatatacac

SEQ ID NO: 266791 - DNA, 25 bp, Artificial
  probe
  misc_feature (1)..(25): SEQ ID NO: 569; WAN024A2S; Start 60; Stop 84
cagactatatatgcacatatacact

SEQ ID NO: 266792 - DNA, 25 bp, Artificial
  probe
  misc_feature (1)..(25): SEQ ID NO: 569; WAN024A2S; Start 58; Stop 82
ttcagactatatatgcacatataca

SEQ ID NO: 266793 - DNA, 25 bp, Artificial
  probe
  misc_feature (1)..(25): SEQ ID NO: 570; WAN024AKY; Start 120; Stop 144
ggaggtgaataagtgagtggtacag

SEQ ID NO: 266794 - DNA, 25 bp, Artificial
  probe
  misc_feature (1)..(25): SEQ ID NO: 570; WAN024AKY; Start 9; Stop 33
aattcattcctttcgtttcactcaa

SEQ ID NO: 266795 - DNA, 25 bp, Artificial
  probe
  misc_feature (1)..(25): SEQ ID NO: 570; WAN024AKY; Start 10; Stop 34
attcattcctttcgtttcactcaag

SEQ ID NO: 266796 - DNA, 25 bp, Artificial
  probe
  misc_feature (1)..(25): SEQ ID NO: 570; WAN024AKY; Start 8; Stop 32
taattcattcctttcgtttcactca

SEQ ID NO: 266797 - DNA, 25 bp, Artificial
  probe
  misc_feature (1)..(25): SEQ ID NO: 570; WAN024AKY; Start 121; Stop 145
gaggtgaataagtgagtggtacagc

SEQ ID NO: 266798 - DNA, 25 bp, Artificial
  probe
  misc_feature (1)..(25): SEQ ID NO: 570; WAN024AKY; Start 7; Stop 31
ataattcattcctttcgtttcactc

SEQ ID NO: 266799 - DNA, 25 bp, Artificial
  probe
  misc_feature (1)..(25): SEQ ID NO: 570; WAN024AKY; Start 25; Stop 49
ttcactcaaggcacaacacagaatg

SEQ ID NO: 266800 - DNA, 25 bp, Artificial
  probe
  misc_feature (1)..(25): SEQ ID NO: 570; WAN024AKY; Start 27; Stop 51
cactcaaggcacaacacagaatgaa

SEQ ID NO: 266801 - DNA, 25 bp, Artificial
  probe
  misc_feature (1)..(25): SEQ ID NO: 570; WAN024AKY; Start 122; Stop 146
aggtgaataagtgagtggtacagcc

SEQ ID NO: 266802 - DNA, 25 bp, Artificial
  probe
  misc_feature (1)..(25): SEQ ID NO: 570; WAN024AKY; Start 6; Stop 30
tataattcattcctttcgtttcact

SEQ ID NO: 266803 - DNA, 25 bp, Artificial
  probe
  misc_feature (1)..(25): SEQ ID NO: 570; WAN024AKY; Start 24; Stop 48
tttcactcaaggcacaacacagaat

SEQ ID NO: 266804 - DNA, 25 bp, Artificial
  probe
  misc_feature (1)..(25): SEQ ID NO: 570; WAN024AKY; Start 99; Stop 123
tatcactactacaaatcacggggag

SEQ ID NO: 266805 - DNA, 25 bp, Artificial
  probe
  misc_feature (1)..(25): SEQ ID NO: 570; WAN024AKY; Start 98; Stop 122
ctatcactactacaaatcacgggga

SEQ ID NO: 266806 - DNA, 25 bp, Artificial
  probe
  misc_feature (1)..(25): SEQ ID NO: 570; WAN024AKY; Start 28; Stop 52
actcaaggcacaacacagaatgaaa

SEQ ID NO: 266807 - DNA, 25 bp, Artificial
  probe
  misc_feature (1)..(25): SEQ ID NO: 570; WAN024AKY; Start 119; Stop 143
gggaggtgaataagtgagtggtaca

SEQ ID NO: 266808 - DNA, 25 bp, Artificial
  probe
  misc_feature (1)..(25): SEQ ID NO: 570; WAN024AKY; Start 26; Stop 50
tcactcaaggcacaacacagaatga

SEQ ID NO: 266809 - DNA, 25 bp, Artificial
  probe
  misc_feature (1)..(25): SEQ ID NO: 570; WAN024AKY; Start 97; Stop 121
cctatcactactacaaatcacgggg

SEQ ID NO: 266810 - DNA, 25 bp, Artificial
  probe
  misc_feature (1)..(25): SEQ ID NO: 570; WAN024AKY; Start 23; Stop 47
gtttcactcaaggcacaacacagaa

SEQ ID NO: 266811 - DNA, 25 bp, Artificial
  probe
  misc_feature (1)..(25): SEQ ID NO: 570; WAN024AKY; Start 123; Stop 147
ggtgaataagtgagtggtacagcca

SEQ ID NO: 266812 - DNA, 25 bp, Artificial
  probe
  misc_feature (1)..(25): SEQ ID NO: 570; WAN024AKY; Start 5; Stop 29
ttataattcattcctttcgtttcac

SEQ ID NO: 266813 - DNA, 25 bp, Artificial
  probe
  misc_feature (1)..(25): SEQ ID NO: 570; WAN024AKY; Start 29; Stop 53
ctcaaggcacaacacagaatgaaaa

SEQ ID NO: 266814 - DNA, 25 bp, Artificial
  probe
  misc_feature (1)..(25): SEQ ID NO: 570; WAN024AKY; Start 18; Stop 42
ctttcgtttcactcaaggcacaaca

SEQ ID NO: 266815 - DNA, 25 bp, Artificial
  probe
  misc_feature (1)..(25): SEQ ID NO: 570; WAN024AKY; Start 19; Stop 43
tttcgtttcactcaaggcacaacac

SEQ ID NO: 266816 - DNA, 25 bp, Artificial
  probe
  misc_feature (1)..(25): SEQ ID NO: 570; WAN024AKY; Start 11; Stop 35
ttcattcctttcgtttcactcaagg

SEQ ID NO: 266817 - DNA, 25 bp, Artificial
  probe
  misc_feature (1)..(25): SEQ ID NO: 570; WAN024AKY; Start 100; Stop 124
atcactactacaaatcacggggagg

SEQ ID NO: 266818 - DNA, 25 bp, Artificial
  probe
  misc_feature (1)..(25): SEQ ID NO: 570; WAN024AKY; Start 4; Stop 28
tttataattcattcctttcgtttca

SEQ ID NO: 266819 - DNA, 25 bp, Artificial
  probe
  misc_feature (1)..(25): SEQ ID NO: 570; WAN024AKY; Start 54; Stop 78
agtgttgtgatctttattttgtttt

SEQ ID NO: 266820 - DNA, 25 bp, Artificial
  probe
  misc_feature (1)..(25): SEQ ID NO: 570; WAN024AKY; Start 53; Stop 77
aagtgttgtgatctttattttgttt

SEQ ID NO: 266821 - DNA, 25 bp, Artificial
  probe
  misc_feature (1)..(25): SEQ ID NO: 570; WAN024AKY; Start 118; Stop 142
ggggaggtgaataagtgagtggtac

SEQ ID NO: 266822 - DNA, 25 bp, Artificial
  probe
  misc_feature (1)..(25): SEQ ID NO: 570; WAN024AKY; Start 101; Stop 125
tcactactacaaatcacggggaggt

SEQ ID NO: 266823 - DNA, 25 bp, Artificial
  probe
  misc_feature (1)..(25): SEQ ID NO: 570; WAN024AKY; Start 12; Stop 36
tcattcctttcgtttcactcaaggc

SEQ ID NO: 266824 - DNA, 25 bp, Artificial
  probe
  misc_feature (1)..(25): SEQ ID NO: 570; WAN024AKY; Start 52; Stop 76
aaagtgttgtgatctttattttgtt

SEQ ID NO: 266825 - DNA, 25 bp, Artificial
  probe
  misc_feature (1)..(25): SEQ ID NO: 570; WAN024AKY; Start 51; Stop 75
aaaagtgttgtgatctttattttgt

SEQ ID NO: 266826 - DNA, 25 bp, Artificial
  probe
  misc_feature (1)..(25): SEQ ID NO: 571; WAN024ACW; Start 4; Stop 28
tttcctccaactatttctatttcaa

SEQ ID NO: 266827 - DNA, 25 bp, Artificial
  probe
  misc_feature (1)..(25): SEQ ID NO: 571; WAN024ACW; Start 5; Stop 29
ttcctccaactatttctatttcaaa

SEQ ID NO: 266828 - DNA, 25 bp, Artificial
  probe
  misc_feature (1)..(25): SEQ ID NO: 571; WAN024ACW; Start 3; Stop 27
atttcctccaactatttctatttca

SEQ ID NO: 266829 - DNA, 25 bp, Artificial
  probe
  misc_feature (1)..(25): SEQ ID NO: 571; WAN024ACW; Start 6; Stop 30
tcctccaactatttctatttcaaaa

SEQ ID NO: 266830 - DNA, 25 bp, Artificial
  probe
  misc_feature (1)..(25): SEQ ID NO: 571; WAN024ACW; Start 39; Stop 63
ctatattgtatcacaatcagacaca

SEQ ID NO: 266831 - DNA, 25 bp, Artificial
  probe
  misc_feature (1)..(25): SEQ ID NO: 571; WAN024ACW; Start 38; Stop 62
actatattgtatcacaatcagacac

SEQ ID NO: 266832 - DNA, 25 bp, Artificial
  probe
  misc_feature (1)..(25): SEQ ID NO: 571; WAN024ACW; Start 40; Stop 64
tatattgtatcacaatcagacacaa

SEQ ID NO: 266833 - DNA, 25 bp, Artificial
  probe
  misc_feature (1)..(25): SEQ ID NO: 571; WAN024ACW; Start 41; Stop 65
atattgtatcacaatcagacacaaa

SEQ ID NO: 266834 - DNA, 25 bp, Artificial
  probe
  misc_feature (1)..(25): SEQ ID NO: 571; WAN024ACW; Start 37; Stop 61
tactatattgtatcacaatcagaca

SEQ ID NO: 266835 - DNA, 25 bp, Artificial
  probe
  misc_feature (1)..(25): SEQ ID NO: 571; WAN024ACW; Start 33; Stop 57
tccttactatattgtatcacaatca

SEQ ID NO: 266836 - DNA, 25 bp, Artificial
  probe
  misc_feature (1)..(25): SEQ ID NO: 571; WAN024ACW; Start 42; Stop 66
tattgtatcacaatcagacacaaaa

SEQ ID NO: 266837 - DNA, 25 bp, Artificial
  probe
  misc_feature (1)..(25): SEQ ID NO: 572; WAN024A3S; Start 24; Stop 48
tctaatcctatccattataacacgt

SEQ ID NO: 266838 - DNA, 25 bp, Artificial
  probe
  misc_feature (1)..(25): SEQ ID NO: 572; WAN024A3S; Start 37; Stop 61
attataacacgtttcaagtttggac

SEQ ID NO: 266839 - DNA, 25 bp, Artificial
  probe
  misc_feature (1)..(25): SEQ ID NO: 572; WAN024A3S; Start 36; Stop 60
cattataacacgtttcaagtttgga

SEQ ID NO: 266840 - DNA, 25 bp, Artificial
  probe
  misc_feature (1)..(25): SEQ ID NO: 572; WAN024A3S; Start 34; Stop 58
tccattataacacgtttcaagtttg

SEQ ID NO: 266841 - DNA, 25 bp, Artificial
  probe
  misc_feature (1)..(25): SEQ ID NO: 572; WAN024A3S; Start 29; Stop 53
tcctatccattataacacgtttcaa

SEQ ID NO: 266842 - DNA, 25 bp, Artificial
  probe
  misc_feature (1)..(25): SEQ ID NO: 572; WAN024A3S; Start 30; Stop 54
cctatccattataacacgtttcaag

SEQ ID NO: 266843 - DNA, 25 bp, Artificial
  probe
  misc_feature (1)..(25): SEQ ID NO: 572; WAN024A3S; Start 28; Stop 52
atcctatccattataacacgtttca

SEQ ID NO: 266844 - DNA, 25 bp, Artificial
  probe
  misc_feature (1)..(25): SEQ ID NO: 572; WAN024A3S; Start 23; Stop 47
ttctaatcctatccattataacacg

SEQ ID NO: 266845 - DNA, 25 bp, Artificial
  probe
  misc_feature (1)..(25): SEQ ID NO: 572; WAN024A3S; Start 35; Stop 59
ccattataacacgtttcaagtttgg

SEQ ID NO: 266846 - DNA, 25 bp, Artificial
  probe
  misc_feature (1)..(25): SEQ ID NO: 572; WAN024A3S; Start 13; Stop 37
tctttctaagttctaatcctatcca

SEQ ID NO: 266847 - DNA, 25 bp, Artificial
  probe
  misc_feature (1)..(25): SEQ ID NO: 572; WAN024A3S; Start 25; Stop 49
ctaatcctatccattataacacgtt

SEQ ID NO: 266848 - DNA, 25 bp, Artificial
  probe
  misc_feature (1)..(25): SEQ ID NO: 572; WAN024A3S; Start 33; Stop 57
atccattataacacgtttcaagttt

SEQ ID NO: 266849 - DNA, 25 bp, Artificial
  probe
  misc_feature (1)..(25): SEQ ID NO: 572; WAN024A3S; Start 31; Stop 55
ctatccattataacacgtttcaagt

SEQ ID NO: 266850 - DNA, 25 bp, Artificial
  probe
  misc_feature (1)..(25): SEQ ID NO: 572; WAN024A3S; Start 27; Stop 51
aatcctatccattataacacgtttc

SEQ ID NO: 266851 - DNA, 25 bp, Artificial
  probe
  misc_feature (1)..(25): SEQ ID NO: 572; WAN024A3S; Start 38; Stop 62
ttataacacgtttcaagtttggacg

SEQ ID NO: 266852 - DNA, 25 bp, Artificial
  probe
  misc_feature (1)..(25): SEQ ID NO: 572; WAN024A3S; Start 7; Stop 31
gttcattctttctaagttctaatcc

SEQ ID NO: 266853 - DNA, 25 bp, Artificial
  probe
  misc_feature (1)..(25): SEQ ID NO: 572; WAN024A3S; Start 32; Stop 56
tatccattataacacgtttcaagtt

SEQ ID NO: 266854 - DNA, 25 bp, Artificial
  probe
  misc_feature (1)..(25): SEQ ID NO: 572; WAN024A3S; Start 14; Stop 38
ctttctaagttctaatcctatccat

SEQ ID NO: 266855 - DNA, 25 bp, Artificial
  probe
  misc_feature (1)..(25): SEQ ID NO: 572; WAN024A3S; Start 12; Stop 36
ttctttctaagttctaatcctatcc

SEQ ID NO: 266856 - DNA, 25 bp, Artificial
  probe
  misc_feature (1)..(25): SEQ ID NO: 572; WAN024A3S; Start 8; Stop 32
ttcattctttctaagttctaatcct

SEQ ID NO: 266857 - DNA, 25 bp, Artificial
  probe
  misc_feature (1)..(25): SEQ ID NO: 572; WAN024A3S; Start 76; Stop 100
aattaaatcgttttcacttgacaaa

SEQ ID NO: 266858 - DNA, 25 bp, Artificial
  probe
  misc_feature (1)..(25): SEQ ID NO: 572; WAN024A3S; Start 75; Stop 99
aaattaaatcgttttcacttgacaa

SEQ ID NO: 266859 - DNA, 25 bp, Artificial
  probe
  misc_feature (1)..(25): SEQ ID NO: 572; WAN024A3S; Start 39; Stop 63
tataacacgtttcaagtttggacgc

SEQ ID NO: 266860 - DNA, 25 bp, Artificial
  probe
  misc_feature (1)..(25): SEQ ID NO: 572; WAN024A3S; Start 15; Stop 39
tttctaagttctaatcctatccatt

SEQ ID NO: 266861 - DNA, 25 bp, Artificial
  probe
  misc_feature (1)..(25): SEQ ID NO: 572; WAN024A3S; Start 6; Stop 30
tgttcattctttctaagttctaatc

SEQ ID NO: 266862 - DNA, 25 bp, Artificial
  probe
  misc_feature (1)..(25): SEQ ID NO: 572; WAN024A3S; Start 26; Stop 50
taatcctatccattataacacgttt

SEQ ID NO: 266863 - DNA, 25 bp, Artificial
  probe
  misc_feature (1)..(25): SEQ ID NO: 572; WAN024A3S; Start 77; Stop 101
attaaatcgttttcacttgacaaaa

SEQ ID NO: 266864 - DNA, 25 bp, Artificial
  probe
  misc_feature (1)..(25): SEQ ID NO: 572; WAN024A3S; Start 74; Stop 98
gaaattaaatcgttttcacttgaca

SEQ ID NO: 266865 - DNA, 25 bp, Artificial
  probe
  misc_feature (1)..(25): SEQ ID NO: 572; WAN024A3S; Start 73; Stop 97
agaaattaaatcgttttcacttgac

SEQ ID NO: 266866 - DNA, 25 bp, Artificial
  probe
  misc_feature (1)..(25): SEQ ID NO: 572; WAN024A3S; Start 40; Stop 64
ataacacgtttcaagtttggacgct

SEQ ID NO: 266867 - DNA, 25 bp, Artificial
  probe
  misc_feature (1)..(25): SEQ ID NO: 572; WAN024A3S; Start 41; Stop 65
taacacgtttcaagtttggacgctc

SEQ ID NO: 266868 - DNA, 25 bp, Artificial
  probe
  misc_feature (1)..(25): SEQ ID NO: 572; WAN024A3S; Start 44; Stop 68
cacgtttcaagtttggacgctcttt

SEQ ID NO: 266869 - DNA, 25 bp, Artificial
  probe
  misc_feature (1)..(25): SEQ ID NO: 572; WAN024A3S; Start 72; Stop 96
tagaaattaaatcgttttcacttga

SEQ ID NO: 266870 - DNA, 25 bp, Artificial
  probe
  misc_feature (1)..(25): SEQ ID NO: 573; WAN024ARC; Start 50; Stop 74
ataaagcgtttccaatgacaattcc

SEQ ID NO: 266871 - DNA, 25 bp, Artificial
  probe
  misc_feature (1)..(25): SEQ ID NO: 573; WAN024ARC; Start 49; Stop 73
aataaagcgtttccaatgacaattc

SEQ ID NO: 266872 - DNA, 25 bp, Artificial
  probe
  misc_feature (1)..(25): SEQ ID NO: 573; WAN024ARC; Start 48; Stop 72
aaataaagcgtttccaatgacaatt

SEQ ID NO: 266873 - DNA, 25 bp, Artificial
  probe
  misc_feature (1)..(25): SEQ ID NO: 573; WAN024ARC; Start 8; Stop 32
ctgtgctaagttggcttatttgtta

SEQ ID NO: 266874 - DNA, 25 bp, Artificial
  probe
  misc_feature (1)..(25): SEQ ID NO: 573; WAN024ARC; Start 9; Stop 33
tgtgctaagttggcttatttgttat

SEQ ID NO: 266875 - DNA, 25 bp, Artificial
  probe
  misc_feature (1)..(25): SEQ ID NO: 573; WAN024ARC; Start 10; Stop 34
gtgctaagttggcttatttgttatc

SEQ ID NO: 266876 - DNA, 25 bp, Artificial
  probe
  misc_feature (1)..(25): SEQ ID NO: 573; WAN024ARC; Start 11; Stop 35
tgctaagttggcttatttgttatct

SEQ ID NO: 266877 - DNA, 25 bp, Artificial
  probe
  misc_feature (1)..(25): SEQ ID NO: 573; WAN024ARC; Start 51; Stop 75
taaagcgtttccaatgacaattccc

SEQ ID NO: 266878 - DNA, 25 bp, Artificial
  probe
  misc_feature (1)..(25): SEQ ID NO: 573; WAN024ARC; Start 7; Stop 31
gctgtgctaagttggcttatttgtt

SEQ ID NO: 266879 - DNA, 25 bp, Artificial
  probe
  misc_feature (1)..(25): SEQ ID NO: 573; WAN024ARC; Start 12; Stop 36
gctaagttggcttatttgttatcta

SEQ ID NO: 266880 - DNA, 25 bp, Artificial
  probe
  misc_feature (1)..(25): SEQ ID NO: 573; WAN024ARC; Start 47; Stop 71
aaaataaagcgtttccaatgacaat

SEQ ID NO: 266881 - DNA, 25 bp, Artificial
  probe
  misc_feature (1)..(25): SEQ ID NO: 573; WAN024ARC; Start 52; Stop 76
aaagcgtttccaatgacaattccct

SEQ ID NO: 266882 - DNA, 25 bp, Artificial
  probe
  misc_feature (1)..(25): SEQ ID NO: 573; WAN024ARC; Start 46; Stop 70
taaaataaagcgtttccaatgacaa

SEQ ID NO: 266883 - DNA, 25 bp, Artificial
  probe
  misc_feature (1)..(25): SEQ ID NO: 573; WAN024ARC; Start 45; Stop 69
ataaaataaagcgtttccaatgaca

SEQ ID NO: 266884 - DNA, 25 bp, Artificial
  probe
  misc_feature (1)..(25): SEQ ID NO: 573; WAN024ARC; Start 65; Stop 89
tgacaattccctcattttcctaaat

SEQ ID NO: 266885 - DNA, 25 bp, Artificial
  probe
  misc_feature (1)..(25): SEQ ID NO: 573; WAN024ARC; Start 53; Stop 77
aagcgtttccaatgacaattccctc

SEQ ID NO: 266886 - DNA, 25 bp, Artificial
  probe
  misc_feature (1)..(25): SEQ ID NO: 573; WAN024ARC; Start 44; Stop 68
tataaaataaagcgtttccaatgac

SEQ ID NO: 266887 - DNA, 25 bp, Artificial
  probe
  misc_feature (1)..(25): SEQ ID NO: 573; WAN024ARC; Start 15; Stop 39
aagttggcttatttgttatctattt

SEQ ID NO: 266888 - DNA, 25 bp, Artificial
  probe
  misc_feature (1)..(25): SEQ ID NO: 573; WAN024ARC; Start 6; Stop 30
agctgtgctaagttggcttatttgt

SEQ ID NO: 266889 - DNA, 25 bp, Artificial
  probe
  misc_feature (1)..(25): SEQ ID NO: 573; WAN024ARC; Start 64; Stop 88
atgacaattccctcattttcctaaa

SEQ ID NO: 266890 - DNA, 25 bp, Artificial
  probe
  misc_feature (1)..(25): SEQ ID NO: 573; WAN024ARC; Start 54; Stop 78
agcgtttccaatgacaattccctca

SEQ ID NO: 266891 - DNA, 25 bp, Artificial
  probe
  misc_feature (1)..(25): SEQ ID NO: 573; WAN024ARC; Start 55; Stop 79
gcgtttccaatgacaattccctcat

SEQ ID NO: 266892 - DNA, 25 bp, Artificial
  probe
  misc_feature (1)..(25): SEQ ID NO: 573; WAN024ARC; Start 57; Stop 81
gtttccaatgacaattccctcattt

SEQ ID NO: 266893 - DNA, 25 bp, Artificial
  probe
  misc_feature (1)..(25): SEQ ID NO: 573; WAN024ARC; Start 4; Stop 28
aaagctgtgctaagttggcttattt

SEQ ID NO: 266894 - DNA, 25 bp, Artificial
  probe
  misc_feature (1)..(25): SEQ ID NO: 573; WAN024ARC; Start 5; Stop 29
aagctgtgctaagttggcttatttg

SEQ ID NO: 266895 - DNA, 25 bp, Artificial
  probe
  misc_feature (1)..(25): SEQ ID NO: 573; WAN024ARC; Start 3; Stop 27
caaagctgtgctaagttggcttatt

SEQ ID NO: 266896 - DNA, 25 bp, Artificial
  probe
  misc_feature (1)..(25): SEQ ID NO: 573; WAN024ARC; Start 56; Stop 80
cgtttccaatgacaattccctcatt

SEQ ID NO: 266897 - DNA, 25 bp, Artificial
  probe
  misc_feature (1)..(25): SEQ ID NO: 573; WAN024ARC; Start 43; Stop 67
ttataaaataaagcgtttccaatga

SEQ ID NO: 266898 - DNA, 25 bp, Artificial
  probe
  misc_feature (1)..(25): SEQ ID NO: 573; WAN024ARC; Start 16; Stop 40
agttggcttatttgttatctatttt

SEQ ID NO: 266899 - DNA, 25 bp, Artificial
  probe
  misc_feature (1)..(25): SEQ ID NO: 573; WAN024ARC; Start 2; Stop 26
tcaaagctgtgctaagttggcttat

SEQ ID NO: 266900 - DNA, 25 bp, Artificial
  probe
  misc_feature (1)..(25): SEQ ID NO: 573; WAN024ARC; Start 1; Stop 25
atcaaagctgtgctaagttggctta

SEQ ID NO: 266901 - DNA, 25 bp, Artificial
  probe
  misc_feature (1)..(25): SEQ ID NO: 573; WAN024ARC; Start 66; Stop 90
gacaattccctcattttcctaaatg

SEQ ID NO: 266902 - DNA, 25 bp, Artificial
  probe
  misc_feature (1)..(25): SEQ ID NO: 573; WAN024ARC; Start 42; Stop 66
attataaaataaagcgtttccaatg

SEQ ID NO: 266903 - DNA, 25 bp, Artificial
  probe
  misc_feature (1)..(25): SEQ ID NO: 574; WAN0249XD; Start 10; Stop 34
gataatccactccctctagtttagc

SEQ ID NO: 266904 - DNA, 25 bp, Artificial
  probe
  misc_feature (1)..(25): SEQ ID NO: 574; WAN0249XD; Start 9; Stop 33
cgataatccactccctctagtttag

SEQ ID NO: 266905 - DNA, 25 bp, Artificial
  probe
  misc_feature (1)..(25): SEQ ID NO: 574; WAN0249XD; Start 20; Stop 44
tccctctagtttagcacatttccat

SEQ ID NO: 266906 - DNA, 25 bp, Artificial
  probe
  misc_feature (1)..(25): SEQ ID NO: 574; WAN0249XD; Start 11; Stop 35
ataatccactccctctagtttagca

SEQ ID NO: 266907 - DNA, 25 bp, Artificial
  probe
  misc_feature (1)..(25): SEQ ID NO: 574; WAN0249XD; Start 17; Stop 41
cactccctctagtttagcacatttc

SEQ ID NO: 266908 - DNA, 25 bp, Artificial
  probe
  misc_feature (1)..(25): SEQ ID NO: 574; WAN0249XD; Start 12; Stop 36
taatccactccctctagtttagcac

SEQ ID NO: 266909 - DNA, 25 bp, Artificial
  probe
  misc_feature (1)..(25): SEQ ID NO: 574; WAN0249XD; Start 8; Stop 32
gcgataatccactccctctagttta

SEQ ID NO: 266910 - DNA, 25 bp, Artificial
  probe
  misc_feature (1)..(25): SEQ ID NO: 574; WAN0249XD; Start 19; Stop 43
ctccctctagtttagcacatttcca

SEQ ID NO: 266911 - DNA, 25 bp, Artificial
  probe
  misc_feature (1)..(25): SEQ ID NO: 574; WAN0249XD; Start 21; Stop 45
ccctctagtttagcacatttccatg

SEQ ID NO: 266912 - DNA, 25 bp, Artificial
  probe
  misc_feature (1)..(25): SEQ ID NO: 574; WAN0249XD; Start 18; Stop 42
actccctctagtttagcacatttcc

SEQ ID NO: 266913 - DNA, 25 bp, Artificial
  probe
  misc_feature (1)..(25): SEQ ID NO: 574; WAN0249XD; Start 16; Stop 40
ccactccctctagtttagcacattt

SEQ ID NO: 266914 - DNA, 25 bp, Artificial
  probe
  misc_feature (1)..(25): SEQ ID NO: 574; WAN0249XD; Start 14; Stop 38
atccactccctctagtttagcacat

SEQ ID NO: 266915 - DNA, 25 bp, Artificial
  probe
  misc_feature (1)..(25): SEQ ID NO: 574; WAN0249XD; Start 15; Stop 39
tccactccctctagtttagcacatt

SEQ ID NO: 266916 - DNA, 25 bp, Artificial
  probe
  misc_feature (1)..(25): SEQ ID NO: 574; WAN0249XD; Start 13; Stop 37
aatccactccctctagtttagcaca

SEQ ID NO: 266917 - DNA, 25 bp, Artificial
  probe
  misc_feature (1)..(25): SEQ ID NO: 574; WAN0249XD; Start 22; Stop 46
cctctagtttagcacatttccatgt

SEQ ID NO: 266918 - DNA, 25 bp, Artificial
  probe
  misc_feature (1)..(25): SEQ ID NO: 574; WAN0249XD; Start 23; Stop 47
ctctagtttagcacatttccatgta

SEQ ID NO: 266919 - DNA, 25 bp, Artificial
  probe
  misc_feature (1)..(25): SEQ ID NO: 574; WAN0249XD; Start 7; Stop 31
ggcgataatccactccctctagttt

SEQ ID NO: 266920 - DNA, 25 bp, Artificial
  probe
  misc_feature (1)..(25): SEQ ID NO: 574; WAN0249XD; Start 24; Stop 48
tctagtttagcacatttccatgtaa

SEQ ID NO: 266921 - DNA, 25 bp, Artificial
  probe
  misc_feature (1)..(25): SEQ ID NO: 574; WAN0249XD; Start 4; Stop 28
aatggcgataatccactccctctag

SEQ ID NO: 266922 - DNA, 25 bp, Artificial
  probe
  misc_feature (1)..(25): SEQ ID NO: 574; WAN0249XD; Start 25; Stop 49
ctagtttagcacatttccatgtaaa

SEQ ID NO: 266923 - DNA, 25 bp, Artificial
  probe
  misc_feature (1)..(25): SEQ ID NO: 574; WAN0249XD; Start 3; Stop 27
caatggcgataatccactccctcta

SEQ ID NO: 266924 - DNA, 25 bp, Artificial
  probe
  misc_feature (1)..(25): SEQ ID NO: 574; WAN0249XD; Start 1; Stop 25
atcaatggcgataatccactccctc

SEQ ID NO: 266925 - DNA, 25 bp, Artificial
  probe
  misc_feature (1)..(25): SEQ ID NO: 574; WAN0249XD; Start 5; Stop 29
atggcgataatccactccctctagt

SEQ ID NO: 266926 - DNA, 25 bp, Artificial
  probe
  misc_feature (1)..(25): SEQ ID NO: 574; WAN0249XD; Start 6; Stop 30
tggcgataatccactccctctagtt

SEQ ID NO: 266927 - DNA, 25 bp, Artificial
  probe
  misc_feature (1)..(25): SEQ ID NO: 574; WAN0249XD; Start 27; Stop 51
agtttagcacatttccatgtaaaat

SEQ ID NO: 266928 - DNA, 25 bp, Artificial
  probe
  misc_feature (1)..(25): SEQ ID NO: 574; WAN0249XD; Start 2; Stop 26
tcaatggcgataatccactccctct

SEQ ID NO: 266929 - DNA, 25 bp, Artificial
  probe
  misc_feature (1)..(25): SEQ ID NO: 574; WAN0249XD; Start 26; Stop 50
tagtttagcacatttccatgtaaaa

SEQ ID NO: 266930 - DNA, 25 bp, Artificial
  probe
  misc_feature (1)..(25): SEQ ID NO: 574; WAN0249XD; Start 28; Stop 52
gtttagcacatttccatgtaaaatt

SEQ ID NO: 266931 - DNA, 25 bp, Artificial
  probe
  misc_feature (1)..(25): SEQ ID NO: 574; WAN0249XD; Start 33; Stop 57
gcacatttccatgtaaaattatagt

SEQ ID NO: 266932 - DNA, 25 bp, Artificial
  probe
  misc_feature (1)..(25): SEQ ID NO: 574; WAN0249XD; Start 32; Stop 56
agcacatttccatgtaaaattatag

SEQ ID NO: 266933 - DNA, 25 bp, Artificial
  probe
  misc_feature (1)..(25): SEQ ID NO: 574; WAN0249XD; Start 29; Stop 53
tttagcacatttccatgtaaaatta

SEQ ID NO: 266934 - DNA, 25 bp, Artificial
  probe
  misc_feature (1)..(25): SEQ ID NO: 574; WAN0249XD; Start 30; Stop 54
ttagcacatttccatgtaaaattat

SEQ ID NO: 266935 - DNA, 25 bp, Artificial
  probe
  misc_feature (1)..(25): SEQ ID NO: 575; WAN024FY4; Start 67; Stop 91
ctggtctgtaatggattcttggtag

SEQ ID NO: 266936 - DNA, 25 bp, Artificial
  probe
  misc_feature (1)..(25): SEQ ID NO: 575; WAN024FY4; Start 124; Stop 148
tgttacatcaatatctgctccgaag

SEQ ID NO: 266937 - DNA, 25 bp, Artificial
  probe
  misc_feature (1)..(25): SEQ ID NO: 575; WAN024FY4; Start 123; Stop 147
ctgttacatcaatatctgctccgaa

SEQ ID NO: 266938 - DNA, 25 bp, Artificial
  probe
  misc_feature (1)..(25): SEQ ID NO: 575; WAN024FY4; Start 66; Stop 90
actggtctgtaatggattcttggta

SEQ ID NO: 266939 - DNA, 25 bp, Artificial
  probe
  misc_feature (1)..(25): SEQ ID NO: 575; WAN024FY4; Start 125; Stop 149
gttacatcaatatctgctccgaagg

SEQ ID NO: 266940 - DNA, 25 bp, Artificial
  probe
  misc_feature (1)..(25): SEQ ID NO: 575; WAN024FY4; Start 68; Stop 92
tggtctgtaatggattcttggtagc

SEQ ID NO: 266941 - DNA, 25 bp, Artificial
  probe
  misc_feature (1)..(25): SEQ ID NO: 575; WAN024FY4; Start 122; Stop 146
cctgttacatcaatatctgctccga

SEQ ID NO: 266942 - DNA, 25 bp, Artificial
  probe
  misc_feature (1)..(25): SEQ ID NO: 575; WAN024FY4; Start 65; Stop 89
gactggtctgtaatggattcttggt

SEQ ID NO: 266943 - DNA, 25 bp, Artificial
  probe
  misc_feature (1)..(25): SEQ ID NO: 575; WAN024FY4; Start 61; Stop 85
ataagactggtctgtaatggattct

SEQ ID NO: 266944 - DNA, 25 bp, Artificial
  probe
  misc_feature (1)..(25): SEQ ID NO: 575; WAN024FY4; Start 118; Stop 142
ttcgcctgttacatcaatatctgct

SEQ ID NO: 266945 - DNA, 25 bp, Artificial
  probe
  misc_feature (1)..(25): SEQ ID NO: 575; WAN024FY4; Start 126; Stop 150
ttacatcaatatctgctccgaaggc

SEQ ID NO: 266946 - DNA, 25 bp, Artificial
  probe
  misc_feature (1)..(25): SEQ ID NO: 575; WAN024FY4; Start 119; Stop 143
tcgcctgttacatcaatatctgctc

SEQ ID NO: 266947 - DNA, 25 bp, Artificial
  probe
  misc_feature (1)..(25): SEQ ID NO: 575; WAN024FY4; Start 69; Stop 93
ggtctgtaatggattcttggtagcc

SEQ ID NO: 266948 - DNA, 25 bp, Artificial
  probe
  misc_feature (1)..(25): SEQ ID NO: 575; WAN024FY4; Start 64; Stop 88
agactggtctgtaatggattcttgg

SEQ ID NO: 266949 - DNA, 25 bp, Artificial
  probe
  misc_feature (1)..(25): SEQ ID NO: 575; WAN024FY4; Start 116; Stop 140
atttcgcctgttacatcaatatctg

SEQ ID NO: 266950 - DNA, 25 bp, Artificial
  probe
  misc_feature (1)..(25): SEQ ID NO: 575; WAN024FY4; Start 115; Stop 139
gatttcgcctgttacatcaatatct

SEQ ID NO: 266951 - DNA, 25 bp, Artificial
  probe
  misc_feature (1)..(25): SEQ ID NO: 575; WAN024FY4; Start 27; Stop 51
ccaaaggataagtaaaggtcaagat

SEQ ID NO: 266952 - DNA, 25 bp, Artificial
  probe
  misc_feature (1)..(25): SEQ ID NO: 575; WAN024FY4; Start 105; Stop 129
tattaaagacgatttcgcctgttac

SEQ ID NO: 266953 - DNA, 25 bp, Artificial
  probe
  misc_feature (1)..(25): SEQ ID NO: 575; WAN024FY4; Start 104; Stop 128
gtattaaagacgatttcgcctgtta

SEQ ID NO: 266954 - DNA, 25 bp, Artificial
  probe
  misc_feature (1)..(25): SEQ ID NO: 575; WAN024FY4; Start 97; Stop 121
catccctgtattaaagacgatttcg

SEQ ID NO: 266955 - DNA, 25 bp, Artificial
  probe
  misc_feature (1)..(25): SEQ ID NO: 575; WAN024FY4; Start 96; Stop 120
tcatccctgtattaaagacgatttc

SEQ ID NO: 266956 - DNA, 25 bp, Artificial
  probe
  misc_feature (1)..(25): SEQ ID NO: 575; WAN024FY4; Start 70; Stop 94
gtctgtaatggattcttggtagccg

SEQ ID NO: 266957 - DNA, 25 bp, Artificial
  probe
  misc_feature (1)..(25): SEQ ID NO: 575; WAN024FY4; Start 114; Stop 138
cgatttcgcctgttacatcaatatc

SEQ ID NO: 266958 - DNA, 25 bp, Artificial
  probe
  misc_feature (1)..(25): SEQ ID NO: 575; WAN024FY4; Start 60; Stop 84
tataagactggtctgtaatggattc

SEQ ID NO: 266959 - DNA, 25 bp, Artificial
  probe
  misc_feature (1)..(25): SEQ ID NO: 575; WAN024FY4; Start 53; Stop 77
tgtccattataagactggtctgtaa

SEQ ID NO: 266960 - DNA, 25 bp, Artificial
  probe
  misc_feature (1)..(25): SEQ ID NO: 575; WAN024FY4; Start 52; Stop 76
ttgtccattataagactggtctgta

SEQ ID NO: 266961 - DNA, 25 bp, Artificial
  probe
  misc_feature (1)..(25): SEQ ID NO: 575; WAN024FY4; Start 113; Stop 137
acgatttcgcctgttacatcaatat

SEQ ID NO: 266962 - DNA, 25 bp, Artificial
  probe
  misc_feature (1)..(25): SEQ ID NO: 575; WAN024FY4; Start 36; Stop 60
aagtaaaggtcaagatttgtccatt

SEQ ID NO: 266963 - DNA, 25 bp, Artificial
  probe
  misc_feature (1)..(25): SEQ ID NO: 575; WAN024FY4; Start 107; Stop 131
ttaaagacgatttcgcctgttacat

SEQ ID NO: 266964 - DNA, 25 bp, Artificial
  probe
  misc_feature (1)..(25): SEQ ID NO: 575; WAN024FY4; Start 106; Stop 130
attaaagacgatttcgcctgttaca

SEQ ID NO: 266965 - DNA, 25 bp, Artificial
  probe
  misc_feature (1)..(25): SEQ ID NO: 575; WAN024FY4; Start 103; Stop 127
tgtattaaagacgatttcgcctgtt

SEQ ID NO: 266966 - DNA, 25 bp, Artificial
  probe
  misc_feature (1)..(25): SEQ ID NO: 575; WAN024FY4; Start 117; Stop 141
tttcgcctgttacatcaatatctgc

SEQ ID NO: 266967 - DNA, 25 bp, Artificial
  probe
  misc_feature (1)..(25): SEQ ID NO: 575; WAN024FY4; Start 98; Stop 122
atccctgtattaaagacgatttcgc

SEQ ID NO: 266968 - DNA, 25 bp, Artificial
  probe
  misc_feature (1)..(25): SEQ ID NO: 576; WAN0249HR; Start 75; Stop 99
ctgcccacataggacaacttctttc

SEQ ID NO: 266969 - DNA, 25 bp, Artificial
  probe
  misc_feature (1)..(25): SEQ ID NO: 576; WAN0249HR; Start 2; Stop 26
tcactcaaaatgactttcgtctaat

SEQ ID NO: 266970 - DNA, 25 bp, Artificial
  probe
  misc_feature (1)..(25): SEQ ID NO: 576; WAN0249HR; Start 1; Stop 25
atcactcaaaatgactttcgtctaa

SEQ ID NO: 266971 - DNA, 25 bp, Artificial
  probe
  misc_feature (1)..(25): SEQ ID NO: 576; WAN0249HR; Start 3; Stop 27
cactcaaaatgactttcgtctaata

SEQ ID NO: 266972 - DNA, 25 bp, Artificial
  probe
  misc_feature (1)..(25): SEQ ID NO: 576; WAN0249HR; Start 6; Stop 30
tcaaaatgactttcgtctaatatgt

SEQ ID NO: 266973 - DNA, 25 bp, Artificial
  probe
  misc_feature (1)..(25): SEQ ID NO: 576; WAN0249HR; Start 4; Stop 28
actcaaaatgactttcgtctaatat

SEQ ID NO: 266974 - DNA, 25 bp, Artificial
  probe
  misc_feature (1)..(25): SEQ ID NO: 576; WAN0249HR; Start 5; Stop 29
ctcaaaatgactttcgtctaatatg

SEQ ID NO: 266975 - DNA, 25 bp, Artificial
  probe
  misc_feature (1)..(25): SEQ ID NO: 576; WAN0249HR; Start 7; Stop 31
caaaatgactttcgtctaatatgtt

SEQ ID NO: 266976 - DNA, 25 bp, Artificial
  probe
  misc_feature (1)..(25): SEQ ID NO: 576; WAN0249HR; Start 9; Stop 33
aaatgactttcgtctaatatgtttt

SEQ ID NO: 266977 - DNA, 25 bp, Artificial
  probe
  misc_feature (1)..(25): SEQ ID NO: 576; WAN0249HR; Start 8; Stop 32
aaaatgactttcgtctaatatgttt

SEQ ID NO: 266978 - DNA, 25 bp, Artificial
  probe
  misc_feature (1)..(25): SEQ ID NO: 576; WAN0249HR; Start 70; Stop 94
aaaagctgcccacataggacaactt

SEQ ID NO: 266979 - DNA, 25 bp, Artificial
  probe
  misc_feature (1)..(25): SEQ ID NO: 577; WAN024AGF; Start 44; Stop 68
atacaatgtagctctaacacttctt

SEQ ID NO: 266980 - DNA, 25 bp, Artificial
  probe
  misc_feature (1)..(25): SEQ ID NO: 577; WAN024AGF; Start 43; Stop 67
aatacaatgtagctctaacacttct

SEQ ID NO: 266981 - DNA, 25 bp, Artificial
  probe
  misc_feature (1)..(25): SEQ ID NO: 577; WAN024AGF; Start 48; Stop 72
aatgtagctctaacacttctttcct

SEQ ID NO: 266982 - DNA, 25 bp, Artificial
  probe
  misc_feature (1)..(25): SEQ ID NO: 577; WAN024AGF; Start 47; Stop 71
caatgtagctctaacacttctttcc

SEQ ID NO: 266983 - DNA, 25 bp, Artificial
  probe
  misc_feature (1)..(25): SEQ ID NO: 577; WAN024AGF; Start 50; Stop 74
tgtagctctaacacttctttcctag

SEQ ID NO: 266984 - DNA, 25 bp, Artificial
  probe
  misc_feature (1)..(25): SEQ ID NO: 577; WAN024AGF; Start 46; Stop 70
acaatgtagctctaacacttctttc

SEQ ID NO: 266985 - DNA, 25 bp, Artificial
  probe
  misc_feature (1)..(25): SEQ ID NO: 577; WAN024AGF; Start 49; Stop 73
atgtagctctaacacttctttccta

SEQ ID NO: 266986 - DNA, 25 bp, Artificial
  probe
  misc_feature (1)..(25): SEQ ID NO: 577; WAN024AGF; Start 45; Stop 69
tacaatgtagctctaacacttcttt

SEQ ID NO: 266987 - DNA, 25 bp, Artificial
  probe
  misc_feature (1)..(25): SEQ ID NO: 577; WAN024AGF; Start 42; Stop 66
aaatacaatgtagctctaacacttc

SEQ ID NO: 266988 - DNA, 25 bp, Artificial
  probe
  misc_feature (1)..(25): SEQ ID NO: 577; WAN024AGF; Start 51; Stop 75
gtagctctaacacttctttcctagg

SEQ ID NO: 266989 - DNA, 25 bp, Artificial
  probe
  misc_feature (1)..(25): SEQ ID NO: 577; WAN024AGF; Start 41; Stop 65
aaaatacaatgtagctctaacactt

SEQ ID NO: 266990 - DNA, 25 bp, Artificial
  probe
  misc_feature (1)..(25): SEQ ID NO: 577; WAN024AGF; Start 3; Stop 27
cacttctcttttcttacaaatatct

SEQ ID NO: 266991 - DNA, 25 bp, Artificial
  probe
  misc_feature (1)..(25): SEQ ID NO: 577; WAN024AGF; Start 2; Stop 26
tcacttctcttttcttacaaatatc

SEQ ID NO: 266992 - DNA, 25 bp, Artificial
  probe
  misc_feature (1)..(25): SEQ ID NO: 578; WAN024AO5; Start 141; Stop 165
atggatcaagattgaggaggaagaa

SEQ ID NO: 266993 - DNA, 25 bp, Artificial
  probe
  misc_feature (1)..(25): SEQ ID NO: 578; WAN024AO5; Start 138; Stop 162
aagatggatcaagattgaggaggaa

SEQ ID NO: 266994 - DNA, 25 bp, Artificial
  probe
  misc_feature (1)..(25): SEQ ID NO: 578; WAN024AO5; Start 140; Stop 164
gatggatcaagattgaggaggaaga

SEQ ID NO: 266995 - DNA, 25 bp, Artificial
  probe
  misc_feature (1)..(25): SEQ ID NO: 578; WAN024AO5; Start 139; Stop 163
agatggatcaagattgaggaggaag

SEQ ID NO: 266996 - DNA, 25 bp, Artificial
  probe
  misc_feature (1)..(25): SEQ ID NO: 578; WAN024AO5; Start 24; Stop 48
aaggtattcagagaagattgatcct

SEQ ID NO: 266997 - DNA, 25 bp, Artificial
  probe
  misc_feature (1)..(25): SEQ ID NO: 578; WAN024AO5; Start 25; Stop 49
aggtattcagagaagattgatccta

SEQ ID NO: 266998 - DNA, 25 bp, Artificial
  probe
  misc_feature (1)..(25): SEQ ID NO: 578; WAN024AO5; Start 19; Stop 43
gaactaaggtattcagagaagattg

SEQ ID NO: 266999 - DNA, 25 bp, Artificial
  probe
  misc_feature (1)..(25): SEQ ID NO: 578; WAN024AO5; Start 26; Stop 50
ggtattcagagaagattgatcctaa

SEQ ID NO: 267000 - DNA, 25 bp, Artificial
  probe
  misc_feature (1)..(25): SEQ ID NO: 578; WAN024AO5; Start 23; Stop 47
taaggtattcagagaagattgatcc

SEQ ID NO: 267001 - DNA, 25 bp, Artificial
  probe
  misc_feature (1)..(25): SEQ ID NO: 578; WAN024AO5; Start 20; Stop 44
aactaaggtattcagagaagattga

SEQ ID NO: 267002 - DNA, 25 bp, Artificial
  probe
  misc_feature (1)..(25): SEQ ID NO: 578; WAN024AO5; Start 21; Stop 45
actaaggtattcagagaagattgat

SEQ ID NO: 267003 - DNA, 25 bp, Artificial
  probe
  misc_feature (1)..(25): SEQ ID NO: 578; WAN024AO5; Start 143; Stop 167
ggatcaagattgaggaggaagaaag

SEQ ID NO: 267004 - DNA, 25 bp, Artificial
  probe
  misc_feature (1)..(25): SEQ ID NO: 578; WAN024AO5; Start 137; Stop 161
aaagatggatcaagattgaggagga

SEQ ID NO: 267005 - DNA, 25 bp, Artificial
  probe
  misc_feature (1)..(25): SEQ ID NO: 578; WAN024AO5; Start 142; Stop 166
tggatcaagattgaggaggaagaaa

SEQ ID NO: 267006 - DNA, 25 bp, Artificial
  probe
  misc_feature (1)..(25): SEQ ID NO: 578; WAN024AO5; Start 84; Stop 108
agggtcaactttctatttatatcgt

SEQ ID NO: 267007 - DNA, 25 bp, Artificial
  probe
  misc_feature (1)..(25): SEQ ID NO: 578; WAN024AO5; Start 22; Stop 46
ctaaggtattcagagaagattgatc

SEQ ID NO: 267008 - DNA, 25 bp, Artificial
  probe
  misc_feature (1)..(25): SEQ ID NO: 578; WAN024AO5; Start 88; Stop 112
tcaactttctatttatatcgtagcg

SEQ ID NO: 267009 - DNA, 25 bp, Artificial
  probe
  misc_feature (1)..(25): SEQ ID NO: 578; WAN024AO5; Start 18; Stop 42
tgaactaaggtattcagagaagatt

SEQ ID NO: 267010 - DNA, 25 bp, Artificial
  probe
  misc_feature (1)..(25): SEQ ID NO: 578; WAN024AO5; Start 16; Stop 40
aatgaactaaggtattcagagaaga

SEQ ID NO: 267011 - DNA, 25 bp, Artificial
  probe
  misc_feature (1)..(25): SEQ ID NO: 578; WAN024AO5; Start 17; Stop 41
atgaactaaggtattcagagaagat

SEQ ID NO: 267012 - DNA, 25 bp, Artificial
  probe
  misc_feature (1)..(25): SEQ ID NO: 578; WAN024AO5; Start 85; Stop 109
gggtcaactttctatttatatcgta

SEQ ID NO: 267013 - DNA, 25 bp, Artificial
  probe
  misc_feature (1)..(25): SEQ ID NO: 578; WAN024AO5; Start 136; Stop 160
aaaagatggatcaagattgaggagg

SEQ ID NO: 267014 - DNA, 25 bp, Artificial
  probe
  misc_feature (1)..(25): SEQ ID NO: 578; WAN024AO5; Start 94; Stop 118
ttctatttatatcgtagcgaagtca

SEQ ID NO: 267015 - DNA, 25 bp, Artificial
  probe
  misc_feature (1)..(25): SEQ ID NO: 578; WAN024AO5; Start 83; Stop 107
tagggtcaactttctatttatatcg

SEQ ID NO: 267016 - DNA, 25 bp, Artificial
  probe
  misc_feature (1)..(25): SEQ ID NO: 578; WAN024AO5; Start 133; Stop 157
tgtaaaagatggatcaagattgagg

SEQ ID NO: 267017 - DNA, 25 bp, Artificial
  probe
  misc_feature (1)..(25): SEQ ID NO: 578; WAN024AO5; Start 95; Stop 119
tctatttatatcgtagcgaagtcat

SEQ ID NO: 267018 - DNA, 25 bp, Artificial
  probe
  misc_feature (1)..(25): SEQ ID NO: 578; WAN024AO5; Start 134; Stop 158
gtaaaagatggatcaagattgagga

SEQ ID NO: 267019 - DNA, 25 bp, Artificial
  probe
  misc_feature (1)..(25): SEQ ID NO: 578; WAN024AO5; Start 87; Stop 111
gtcaactttctatttatatcgtagc

SEQ ID NO: 267020 - DNA, 25 bp, Artificial
  probe
  misc_feature (1)..(25): SEQ ID NO: 578; WAN024AO5; Start 131; Stop 155
tgtgtaaaagatggatcaagattga

SEQ ID NO: 267021 - DNA, 25 bp, Artificial
  probe
  misc_feature (1)..(25): SEQ ID NO: 578; WAN024AO5; Start 135; Stop 159
taaaagatggatcaagattgaggag

SEQ ID NO: 267022 - DNA, 25 bp, Artificial
  probe
  misc_feature (1)..(25): SEQ ID NO: 578; WAN024AO5; Start 89; Stop 113
caactttctatttatatcgtagcga

SEQ ID NO: 267023 - DNA, 25 bp, Artificial
  probe
  misc_feature (1)..(25): SEQ ID NO: 578; WAN024AO5; Start 132; Stop 156
gtgtaaaagatggatcaagattgag

SEQ ID NO: 267024 - DNA, 25 bp, Artificial
  probe
  misc_feature (1)..(25): SEQ ID NO: 578; WAN024AO5; Start 130; Stop 154
atgtgtaaaagatggatcaagattg

SEQ ID NO: 267025 - DNA, 25 bp, Artificial
  probe
  misc_feature (1)..(25): SEQ ID NO: 579; WAN024D9K; Start 391; Stop 415
tcttactctcgtcaactctataaca

SEQ ID NO: 267026 - DNA, 25 bp, Artificial
  probe
  misc_feature (1)..(25): SEQ ID NO: 579; WAN024D9K; Start 394; Stop 418
tactctcgtcaactctataacagtg

SEQ ID NO: 267027 - DNA, 25 bp, Artificial
  probe
  misc_feature (1)..(25): SEQ ID NO: 579; WAN024D9K; Start 392; Stop 416
cttactctcgtcaactctataacag

SEQ ID NO: 267028 - DNA, 25 bp, Artificial
  probe
  misc_feature (1)..(25): SEQ ID NO: 579; WAN024D9K; Start 101; Stop 125
cttggagtcagattgatgttcagtt

SEQ ID NO: 267029 - DNA, 25 bp, Artificial
  probe
  misc_feature (1)..(25): SEQ ID NO: 579; WAN024D9K; Start 395; Stop 419
actctcgtcaactctataacagtgt

SEQ ID NO: 267030 - DNA, 25 bp, Artificial
  probe
  misc_feature (1)..(25): SEQ ID NO: 579; WAN024D9K; Start 393; Stop 417
ttactctcgtcaactctataacagt

SEQ ID NO: 267031 - DNA, 25 bp, Artificial
  probe
  misc_feature (1)..(25): SEQ ID NO: 579; WAN024D9K; Start 102; Stop 126
ttggagtcagattgatgttcagttg

SEQ ID NO: 267032 - DNA, 25 bp, Artificial
  probe
  misc_feature (1)..(25): SEQ ID NO: 579; WAN024D9K; Start 396; Stop 420
ctctcgtcaactctataacagtgtt

SEQ ID NO: 267033 - DNA, 25 bp, Artificial
  probe
  misc_feature (1)..(25): SEQ ID NO: 579; WAN024D9K; Start 390; Stop 414
ttcttactctcgtcaactctataac

SEQ ID NO: 267034 - DNA, 25 bp, Artificial
  probe
  misc_feature (1)..(25): SEQ ID NO: 579; WAN024D9K; Start 104; Stop 128
ggagtcagattgatgttcagttgaa

SEQ ID NO: 267035 - DNA, 25 bp, Artificial
  probe
  misc_feature (1)..(25): SEQ ID NO: 579; WAN024D9K; Start 103; Stop 127
tggagtcagattgatgttcagttga

SEQ ID NO: 267036 - DNA, 25 bp, Artificial
  probe
  misc_feature (1)..(25): SEQ ID NO: 579; WAN024D9K; Start 404; Stop 428
aactctataacagtgttgtcagcaa

SEQ ID NO: 267037 - DNA, 25 bp, Artificial
  probe
  misc_feature (1)..(25): SEQ ID NO: 579; WAN024D9K; Start 3; Stop 27
catgacttggattattcttggagtt

SEQ ID NO: 267038 - DNA, 25 bp, Artificial
  probe
  misc_feature (1)..(25): SEQ ID NO: 579; WAN024D9K; Start 171; Stop 195
aggttatgccaaatatgaaggttct

SEQ ID NO: 267039 - DNA, 25 bp, Artificial
  probe
  misc_feature (1)..(25): SEQ ID NO: 579; WAN024D9K; Start 170; Stop 194
aaggttatgccaaatatgaaggttc

SEQ ID NO: 267040 - DNA, 25 bp, Artificial
  probe
  misc_feature (1)..(25): SEQ ID NO: 579; WAN024D9K; Start 169; Stop 193
aaaggttatgccaaatatgaaggtt

SEQ ID NO: 267041 - DNA, 25 bp, Artificial
  probe
  misc_feature (1)..(25): SEQ ID NO: 579; WAN024D9K; Start 464; Stop 488
ttatcgctggaatgtttggatttaa

SEQ ID NO: 267042 - DNA, 25 bp, Artificial
  probe
  misc_feature (1)..(25): SEQ ID NO: 579; WAN024D9K; Start 463; Stop 487
attatcgctggaatgtttggattta

SEQ ID NO: 267043 - DNA, 25 bp, Artificial
  probe
  misc_feature (1)..(25): SEQ ID NO: 579; WAN024D9K; Start 462; Stop 486
tattatcgctggaatgtttggattt

SEQ ID NO: 267044 - DNA, 25 bp, Artificial
  probe
  misc_feature (1)..(25): SEQ ID NO: 579; WAN024D9K; Start 172; Stop 196
ggttatgccaaatatgaaggttcta

SEQ ID NO: 267045 - DNA, 25 bp, Artificial
  probe
  misc_feature (1)..(25): SEQ ID NO: 579; WAN024D9K; Start 461; Stop 485
atattatcgctggaatgtttggatt

SEQ ID NO: 267046 - DNA, 25 bp, Artificial
  probe
  misc_feature (1)..(25): SEQ ID NO: 579; WAN024D9K; Start 439; Stop 463
aaattagaaactttcccgagcaata

SEQ ID NO: 267047 - DNA, 25 bp, Artificial
  probe
  misc_feature (1)..(25): SEQ ID NO: 579; WAN024D9K; Start 100; Stop 124
gcttggagtcagattgatgttcagt

SEQ ID NO: 267048 - DNA, 25 bp, Artificial
  probe
  misc_feature (1)..(25): SEQ ID NO: 579; WAN024D9K; Start 440; Stop 464
aattagaaactttcccgagcaatat

SEQ ID NO: 267049 - DNA, 25 bp, Artificial
  probe
  misc_feature (1)..(25): SEQ ID NO: 579; WAN024D9K; Start 173; Stop 197
gttatgccaaatatgaaggttctac

SEQ ID NO: 267050 - DNA, 25 bp, Artificial
  probe
  misc_feature (1)..(25): SEQ ID NO: 579; WAN024D9K; Start 544; Stop 568
tttagcggtttaggtgactaactaa

SEQ ID NO: 267051 - DNA, 25 bp, Artificial
  probe
  misc_feature (1)..(25): SEQ ID NO: 579; WAN024D9K; Start 358; Stop 382
caagaggagttgacaaacacagaaa

SEQ ID NO: 267052 - DNA, 25 bp, Artificial
  probe
  misc_feature (1)..(25): SEQ ID NO: 579; WAN024D9K; Start 106; Stop 130
agtcagattgatgttcagttgaaac

SEQ ID NO: 267053 - DNA, 25 bp, Artificial
  probe
  misc_feature (1)..(25): SEQ ID NO: 579; WAN024D9K; Start 545; Stop 569
ttagcggtttaggtgactaactaat

SEQ ID NO: 267054 - DNA, 25 bp, Artificial
  probe
  misc_feature (1)..(25): SEQ ID NO: 579; WAN024D9K; Start 105; Stop 129
gagtcagattgatgttcagttgaaa

SEQ ID NO: 267055 - DNA, 25 bp, Artificial
  probe
  misc_feature (1)..(25): SEQ ID NO: 579; WAN024D9K; Start 107; Stop 131
gtcagattgatgttcagttgaaacg

SEQ ID NO: 267056 - DNA, 25 bp, Artificial
  probe
  misc_feature (1)..(25): SEQ ID NO: 579; WAN024D9K; Start 97; Stop 121
gaggcttggagtcagattgatgttc

SEQ ID NO: 267057 - DNA, 25 bp, Artificial
  probe
  misc_feature (1)..(25): SEQ ID NO: 579; WAN024D9K; Start 444; Stop 468
agaaactttcccgagcaatattatc

SEQ ID NO: 267058 - DNA, 25 bp, Artificial
  probe
  misc_feature (1)..(25): SEQ ID NO: 581; WAN0249L9; Start 62; Stop 86
gccttttgggtaatagaatctcact

SEQ ID NO: 267059 - DNA, 25 bp, Artificial
  probe
  misc_feature (1)..(25): SEQ ID NO: 581; WAN0249L9; Start 63; Stop 87
ccttttgggtaatagaatctcactt

SEQ ID NO: 267060 - DNA, 25 bp, Artificial
  probe
  misc_feature (1)..(25): SEQ ID NO: 581; WAN0249L9; Start 64; Stop 88
cttttgggtaatagaatctcacttt

SEQ ID NO: 267061 - DNA, 25 bp, Artificial
  probe
  misc_feature (1)..(25): SEQ ID NO: 581; WAN0249L9; Start 65; Stop 89
ttttgggtaatagaatctcactttt

SEQ ID NO: 267062 - DNA, 25 bp, Artificial
  probe
  misc_feature (1)..(25): SEQ ID NO: 581; WAN0249L9; Start 56; Stop 80
aaatcggccttttgggtaatagaat

SEQ ID NO: 267063 - DNA, 25 bp, Artificial
  probe
  misc_feature (1)..(25): SEQ ID NO: 581; WAN0249L9; Start 57; Stop 81
aatcggccttttgggtaatagaatc

SEQ ID NO: 267064 - DNA, 25 bp, Artificial
  probe
  misc_feature (1)..(25): SEQ ID NO: 581; WAN0249L9; Start 61; Stop 85
ggccttttgggtaatagaatctcac

SEQ ID NO: 267065 - DNA, 25 bp, Artificial
  probe
  misc_feature (1)..(25): SEQ ID NO: 581; WAN0249L9; Start 32; Stop 56
ttcacactgtactattatactacaa

SEQ ID NO: 267066 - DNA, 25 bp, Artificial
  probe
  misc_feature (1)..(25): SEQ ID NO: 581; WAN0249L9; Start 58; Stop 82
atcggccttttgggtaatagaatct

SEQ ID NO: 267067 - DNA, 25 bp, Artificial
  probe
  misc_feature (1)..(25): SEQ ID NO: 581; WAN0249L9; Start 55; Stop 79
aaaatcggccttttgggtaatagaa

SEQ ID NO: 267068 - DNA, 25 bp, Artificial
  probe
  misc_feature (1)..(25): SEQ ID NO: 581; WAN0249L9; Start 42; Stop 66
actattatactacaaaatcggcctt

SEQ ID NO: 267069 - DNA, 25 bp, Artificial
  probe
  misc_feature (1)..(25): SEQ ID NO: 581; WAN0249L9; Start 59; Stop 83
tcggccttttgggtaatagaatctc

SEQ ID NO: 267070 - DNA, 25 bp, Artificial
  probe
  misc_feature (1)..(25): SEQ ID NO: 581; WAN0249L9; Start 60; Stop 84
cggccttttgggtaatagaatctca

SEQ ID NO: 267071 - DNA, 25 bp, Artificial
  probe
  misc_feature (1)..(25): SEQ ID NO: 581; WAN0249L9; Start 40; Stop 64
gtactattatactacaaaatcggcc

SEQ ID NO: 267072 - DNA, 25 bp, Artificial
  probe
  misc_feature (1)..(25): SEQ ID NO: 581; WAN0249L9; Start 41; Stop 65
tactattatactacaaaatcggcct

SEQ ID NO: 267073 - DNA, 25 bp, Artificial
  probe
  misc_feature (1)..(25): SEQ ID NO: 581; WAN0249L9; Start 39; Stop 63
tgtactattatactacaaaatcggc

SEQ ID NO: 267074 - DNA, 25 bp, Artificial
  probe
  misc_feature (1)..(25): SEQ ID NO: 581; WAN0249L9; Start 43; Stop 67
ctattatactacaaaatcggccttt

SEQ ID NO: 267075 - DNA, 25 bp, Artificial
  probe
  misc_feature (1)..(25): SEQ ID NO: 581; WAN0249L9; Start 33; Stop 57
tcacactgtactattatactacaaa

SEQ ID NO: 267076 - DNA, 25 bp, Artificial
  probe
  misc_feature (1)..(25): SEQ ID NO: 581; WAN0249L9; Start 31; Stop 55
tttcacactgtactattatactaca

SEQ ID NO: 267077 - DNA, 25 bp, Artificial
  probe
  misc_feature (1)..(25): SEQ ID NO: 581; WAN0249L9; Start 44; Stop 68
tattatactacaaaatcggcctttt

SEQ ID NO: 267078 - DNA, 25 bp, Artificial
  probe
  misc_feature (1)..(25): SEQ ID NO: 581; WAN0249L9; Start 38; Stop 62
ctgtactattatactacaaaatcgg

SEQ ID NO: 267079 - DNA, 25 bp, Artificial
  probe
  misc_feature (1)..(25): SEQ ID NO: 581; WAN0249L9; Start 46; Stop 70
ttatactacaaaatcggccttttgg

SEQ ID NO: 267080 - DNA, 25 bp, Artificial
  probe
  misc_feature (1)..(25): SEQ ID NO: 581; WAN0249L9; Start 52; Stop 76
tacaaaatcggccttttgggtaata

SEQ ID NO: 267081 - DNA, 25 bp, Artificial
  probe
  misc_feature (1)..(25): SEQ ID NO: 581; WAN0249L9; Start 47; Stop 71
tatactacaaaatcggccttttggg

SEQ ID NO: 267082 - DNA, 25 bp, Artificial
  probe
  misc_feature (1)..(25): SEQ ID NO: 581; WAN0249L9; Start 54; Stop 78
caaaatcggccttttgggtaataga

SEQ ID NO: 267083 - DNA, 25 bp, Artificial
  probe
  misc_feature (1)..(25): SEQ ID NO: 581; WAN0249L9; Start 53; Stop 77
acaaaatcggccttttgggtaatag

SEQ ID NO: 267084 - DNA, 25 bp, Artificial
  probe
  misc_feature (1)..(25): SEQ ID NO: 581; WAN0249L9; Start 51; Stop 75
ctacaaaatcggccttttgggtaat

SEQ ID NO: 267085 - DNA, 25 bp, Artificial
  probe
  misc_feature (1)..(25): SEQ ID NO: 581; WAN0249L9; Start 45; Stop 69
attatactacaaaatcggccttttg

SEQ ID NO: 267086 - DNA, 25 bp, Artificial
  probe
  misc_feature (1)..(25): SEQ ID NO: 581; WAN0249L9; Start 49; Stop 73
tactacaaaatcggccttttgggta

SEQ ID NO: 267087 - DNA, 25 bp, Artificial
  probe
  misc_feature (1)..(25): SEQ ID NO: 581; WAN0249L9; Start 48; Stop 72
atactacaaaatcggccttttgggt

SEQ ID NO: 267088 - DNA, 25 bp, Artificial
  probe
  misc_feature (1)..(25): SEQ ID NO: 581; WAN0249L9; Start 50; Stop 74
actacaaaatcggccttttgggtaa

SEQ ID NO: 267089 - DNA, 25 bp, Artificial
  probe
  misc_feature (1)..(25): SEQ ID NO: 582; WAN0249PO; Start 76; Stop 100
cttgccctttgtccattatgatata

SEQ ID NO: 267090 - DNA, 25 bp, Artificial
  probe
  misc_feature (1)..(25): SEQ ID NO: 582; WAN0249PO; Start 75; Stop 99
gcttgccctttgtccattatgatat

SEQ ID NO: 267091 - DNA, 25 bp, Artificial
  probe
  misc_feature (1)..(25): SEQ ID NO: 582; WAN0249PO; Start 77; Stop 101
ttgccctttgtccattatgatatat

SEQ ID NO: 267092 - DNA, 25 bp, Artificial
  probe
  misc_feature (1)..(25): SEQ ID NO: 582; WAN0249PO; Start 78; Stop 102
tgccctttgtccattatgatatata

SEQ ID NO: 267093 - DNA, 25 bp, Artificial
  probe
  misc_feature (1)..(25): SEQ ID NO: 582; WAN0249PO; Start 74; Stop 98
agcttgccctttgtccattatgata

SEQ ID NO: 267094 - DNA, 25 bp, Artificial
  probe
  misc_feature (1)..(25): SEQ ID NO: 582; WAN0249PO; Start 62; Stop 86
taatttcttgacagcttgccctttg

SEQ ID NO: 267095 - DNA, 25 bp, Artificial
  probe
  misc_feature (1)..(25): SEQ ID NO: 582; WAN0249PO; Start 61; Stop 85
gtaatttcttgacagcttgcccttt

SEQ ID NO: 267096 - DNA, 25 bp, Artificial
  probe
  misc_feature (1)..(25): SEQ ID NO: 582; WAN0249PO; Start 79; Stop 103
gccctttgtccattatgatatatag

SEQ ID NO: 267097 - DNA, 25 bp, Artificial
  probe
  misc_feature (1)..(25): SEQ ID NO: 582; WAN0249PO; Start 60; Stop 84
tgtaatttcttgacagcttgccctt

SEQ ID NO: 267098 - DNA, 25 bp, Artificial
  probe
  misc_feature (1)..(25): SEQ ID NO: 582; WAN0249PO; Start 73; Stop 97
cagcttgccctttgtccattatgat

SEQ ID NO: 267099 - DNA, 25 bp, Artificial
  probe
  misc_feature (1)..(25): SEQ ID NO: 582; WAN0249PO; Start 80; Stop 104
ccctttgtccattatgatatatagt

SEQ ID NO: 267100 - DNA, 25 bp, Artificial
  probe
  misc_feature (1)..(25): SEQ ID NO: 582; WAN0249PO; Start 63; Stop 87
aatttcttgacagcttgccctttgt

SEQ ID NO: 267101 - DNA, 25 bp, Artificial
  probe
  misc_feature (1)..(25): SEQ ID NO: 582; WAN0249PO; Start 56; Stop 80
taactgtaatttcttgacagcttgc

SEQ ID NO: 267102 - DNA, 25 bp, Artificial
  probe
  misc_feature (1)..(25): SEQ ID NO: 582; WAN0249PO; Start 55; Stop 79
ataactgtaatttcttgacagcttg

SEQ ID NO: 267103 - DNA, 25 bp, Artificial
  probe
  misc_feature (1)..(25): SEQ ID NO: 582; WAN0249PO; Start 57; Stop 81
aactgtaatttcttgacagcttgcc

SEQ ID NO: 267104 - DNA, 25 bp, Artificial
  probe
  misc_feature (1)..(25): SEQ ID NO: 582; WAN0249PO; Start 72; Stop 96
acagcttgccctttgtccattatga

SEQ ID NO: 267105 - DNA, 25 bp, Artificial
  probe
  misc_feature (1)..(25): SEQ ID NO: 582; WAN0249PO; Start 54; Stop 78
aataactgtaatttcttgacagctt

SEQ ID NO: 267106 - DNA, 25 bp, Artificial
  probe
  misc_feature (1)..(25): SEQ ID NO: 582; WAN0249PO; Start 53; Stop 77
aaataactgtaatttcttgacagct

SEQ ID NO: 267107 - DNA, 25 bp, Artificial
  probe
  misc_feature (1)..(25): SEQ ID NO: 582; WAN0249PO; Start 59; Stop 83
ctgtaatttcttgacagcttgccct

SEQ ID NO: 267108 - DNA, 25 bp, Artificial
  probe
  misc_feature (1)..(25): SEQ ID NO: 582; WAN0249PO; Start 58; Stop 82
actgtaatttcttgacagcttgccc

SEQ ID NO: 267109 - DNA, 25 bp, Artificial
  probe
  misc_feature (1)..(25): SEQ ID NO: 582; WAN0249PO; Start 64; Stop 88
atttcttgacagcttgccctttgtc

SEQ ID NO: 267110 - DNA, 25 bp, Artificial
  probe
  misc_feature (1)..(25): SEQ ID NO: 582; WAN0249PO; Start 71; Stop 95
gacagcttgccctttgtccattatg

SEQ ID NO: 267111 - DNA, 25 bp, Artificial
  probe
  misc_feature (1)..(25): SEQ ID NO: 582; WAN0249PO; Start 52; Stop 76
aaaataactgtaatttcttgacagc

SEQ ID NO: 267112 - DNA, 25 bp, Artificial
  probe
  misc_feature (1)..(25): SEQ ID NO: 582; WAN0249PO; Start 70; Stop 94
tgacagcttgccctttgtccattat

SEQ ID NO: 267113 - DNA, 25 bp, Artificial
  probe
  misc_feature (1)..(25): SEQ ID NO: 582; WAN0249PO; Start 69; Stop 93
ttgacagcttgccctttgtccatta

SEQ ID NO: 267114 - DNA, 25 bp, Artificial
  probe
  misc_feature (1)..(25): SEQ ID NO: 583; WAN024ADP; Start 37; Stop 61
taccttctaagaacgctataactgc

SEQ ID NO: 267115 - DNA, 25 bp, Artificial
  probe
  misc_feature (1)..(25): SEQ ID NO: 583; WAN024ADP; Start 114; Stop 138
gcttctataccaagtgatacatctt

SEQ ID NO: 267116 - DNA, 25 bp, Artificial
  probe
  misc_feature (1)..(25): SEQ ID NO: 583; WAN024ADP; Start 39; Stop 63
ccttctaagaacgctataactgctg

SEQ ID NO: 267117 - DNA, 25 bp, Artificial
  probe
  misc_feature (1)..(25): SEQ ID NO: 583; WAN024ADP; Start 38; Stop 62
accttctaagaacgctataactgct

SEQ ID NO: 267118 - DNA, 25 bp, Artificial
  probe
  misc_feature (1)..(25): SEQ ID NO: 583; WAN024ADP; Start 40; Stop 64
cttctaagaacgctataactgctgc

SEQ ID NO: 267119 - DNA, 25 bp, Artificial
  probe
  misc_feature (1)..(25): SEQ ID NO: 583; WAN024ADP; Start 42; Stop 66
tctaagaacgctataactgctgctc

SEQ ID NO: 267120 - DNA, 25 bp, Artificial
  probe
  misc_feature (1)..(25): SEQ ID NO: 583; WAN024ADP; Start 36; Stop 60
ataccttctaagaacgctataactg

SEQ ID NO: 267121 - DNA, 25 bp, Artificial
  probe
  misc_feature (1)..(25): SEQ ID NO: 583; WAN024ADP; Start 41; Stop 65
ttctaagaacgctataactgctgct

SEQ ID NO: 267122 - DNA, 25 bp, Artificial
  probe
  misc_feature (1)..(25): SEQ ID NO: 583; WAN024ADP; Start 113; Stop 137
agcttctataccaagtgatacatct

SEQ ID NO: 267123 - DNA, 25 bp, Artificial
  probe
  misc_feature (1)..(25): SEQ ID NO: 583; WAN024ADP; Start 43; Stop 67
ctaagaacgctataactgctgctcc

SEQ ID NO: 267124 - DNA, 25 bp, Artificial
  probe
  misc_feature (1)..(25): SEQ ID NO: 583; WAN024ADP; Start 176; Stop 200
cagaattattacatcctgtctccct

SEQ ID NO: 267125 - DNA, 25 bp, Artificial
  probe
  misc_feature (1)..(25): SEQ ID NO: 583; WAN024ADP; Start 35; Stop 59
tataccttctaagaacgctataact

SEQ ID NO: 267126 - DNA, 25 bp, Artificial
  probe
  misc_feature (1)..(25): SEQ ID NO: 583; WAN024ADP; Start 44; Stop 68
taagaacgctataactgctgctcca

SEQ ID NO: 267127 - DNA, 25 bp, Artificial
  probe
  misc_feature (1)..(25): SEQ ID NO: 583; WAN024ADP; Start 158; Stop 182
aagttaaacagaaacagacagaatt

SEQ ID NO: 267128 - DNA, 25 bp, Artificial
  probe
  misc_feature (1)..(25): SEQ ID NO: 583; WAN024ADP; Start 168; Stop 192
gaaacagacagaattattacatcct

SEQ ID NO: 267129 - DNA, 25 bp, Artificial
  probe
  misc_feature (1)..(25): SEQ ID NO: 583; WAN024ADP; Start 167; Stop 191
agaaacagacagaattattacatcc

SEQ ID NO: 267130 - DNA, 25 bp, Artificial
  probe
  misc_feature (1)..(25): SEQ ID NO: 583; WAN024ADP; Start 29; Stop 53
tctatttataccttctaagaacgct

SEQ ID NO: 267131 - DNA, 25 bp, Artificial
  probe
  misc_feature (1)..(25): SEQ ID NO: 583; WAN024ADP; Start 164; Stop 188
aacagaaacagacagaattattaca

SEQ ID NO: 267132 - DNA, 25 bp, Artificial
  probe
  misc_feature (1)..(25): SEQ ID NO: 583; WAN024ADP; Start 156; Stop 180
ttaagttaaacagaaacagacagaa

SEQ ID NO: 267133 - DNA, 25 bp, Artificial
  probe
  misc_feature (1)..(25): SEQ ID NO: 583; WAN024ADP; Start 45; Stop 69
aagaacgctataactgctgctccaa

SEQ ID NO: 267134 - DNA, 25 bp, Artificial
  probe
  misc_feature (1)..(25): SEQ ID NO: 583; WAN024ADP; Start 169; Stop 193
aaacagacagaattattacatcctg

SEQ ID NO: 267135 - DNA, 25 bp, Artificial
  probe
  misc_feature (1)..(25): SEQ ID NO: 583; WAN024ADP; Start 165; Stop 189
acagaaacagacagaattattacat

SEQ ID NO: 267136 - DNA, 25 bp, Artificial
  probe
  misc_feature (1)..(25): SEQ ID NO: 583; WAN024ADP; Start 157; Stop 181
taagttaaacagaaacagacagaat

SEQ ID NO: 267137 - DNA, 25 bp, Artificial
  probe
  misc_feature (1)..(25): SEQ ID NO: 583; WAN024ADP; Start 155; Stop 179
attaagttaaacagaaacagacaga

SEQ ID NO: 267138 - DNA, 25 bp, Artificial
  probe
  misc_feature (1)..(25): SEQ ID NO: 583; WAN024ADP; Start 159; Stop 183
agttaaacagaaacagacagaatta

SEQ ID NO: 267139 - DNA, 25 bp, Artificial
  probe
  misc_feature (1)..(25): SEQ ID NO: 583; WAN024ADP; Start 75; Stop 99
ggtattccgtatgggcttaataaaa

SEQ ID NO: 267140 - DNA, 25 bp, Artificial
  probe
  misc_feature (1)..(25): SEQ ID NO: 583; WAN024ADP; Start 34; Stop 58
ttataccttctaagaacgctataac

SEQ ID NO: 267141 - DNA, 25 bp, Artificial
  probe
  misc_feature (1)..(25): SEQ ID NO: 583; WAN024ADP; Start 112; Stop 136
aagcttctataccaagtgatacatc

SEQ ID NO: 267142 - DNA, 25 bp, Artificial
  probe
  misc_feature (1)..(25): SEQ ID NO: 583; WAN024ADP; Start 166; Stop 190
cagaaacagacagaattattacatc

SEQ ID NO: 267143 - DNA, 25 bp, Artificial
  probe
  misc_feature (1)..(25): SEQ ID NO: 583; WAN024ADP; Start 115; Stop 139
cttctataccaagtgatacatcttt

SEQ ID NO: 267144 - DNA, 25 bp, Artificial
  probe
  misc_feature (1)..(25): SEQ ID NO: 583; WAN024ADP; Start 154; Stop 178
aattaagttaaacagaaacagacag

SEQ ID NO: 267145 - DNA, 25 bp, Artificial
  probe
  misc_feature (1)..(25): SEQ ID NO: 583; WAN024ADP; Start 170; Stop 194
aacagacagaattattacatcctgt

SEQ ID NO: 267146 - DNA, 25 bp, Artificial
  probe
  misc_feature (1)..(25): SEQ ID NO: 583; WAN024ADP; Start 163; Stop 187
aaacagaaacagacagaattattac

SEQ ID NO: 267147 - DNA, 25 bp, Artificial
  probe
  misc_feature (1)..(25): SEQ ID NO: 584; WAN024AL8; Start 2; Stop 26
tcctttgtatagcttgttttatagc

SEQ ID NO: 267148 - DNA, 25 bp, Artificial
  probe
  misc_feature (1)..(25): SEQ ID NO: 584; WAN024AL8; Start 3; Stop 27
cctttgtatagcttgttttatagct

SEQ ID NO: 267149 - DNA, 25 bp, Artificial
  probe
  misc_feature (1)..(25): SEQ ID NO: 584; WAN024AL8; Start 4; Stop 28
ctttgtatagcttgttttatagctt

SEQ ID NO: 267150 - DNA, 25 bp, Artificial
  probe
  misc_feature (1)..(25): SEQ ID NO: 584; WAN024AL8; Start 5; Stop 29
tttgtatagcttgttttatagcttt

SEQ ID NO: 267151 - DNA, 25 bp, Artificial
  probe
  misc_feature (1)..(25): SEQ ID NO: 584; WAN024AL8; Start 11; Stop 35
tagcttgttttatagctttatttca

SEQ ID NO: 267152 - DNA, 25 bp, Artificial
  probe
  misc_feature (1)..(25): SEQ ID NO: 585; WAN024A6D; Start 10; Stop 34
tcgtttcttttgtaatgacctacct

SEQ ID NO: 267153 - DNA, 25 bp, Artificial
  probe
  misc_feature (1)..(25): SEQ ID NO: 585; WAN024A6D; Start 9; Stop 33
ctcgtttcttttgtaatgacctacc

SEQ ID NO: 267154 - DNA, 25 bp, Artificial
  probe
  misc_feature (1)..(25): SEQ ID NO: 585; WAN024A6D; Start 17; Stop 41
ttttgtaatgacctacctatgctct

SEQ ID NO: 267155 - DNA, 25 bp, Artificial
  probe
  misc_feature (1)..(25): SEQ ID NO: 585; WAN024A6D; Start 15; Stop 39
tcttttgtaatgacctacctatgct

SEQ ID NO: 267156 - DNA, 25 bp, Artificial
  probe
  misc_feature (1)..(25): SEQ ID NO: 585; WAN024A6D; Start 16; Stop 40
cttttgtaatgacctacctatgctc

SEQ ID NO: 267157 - DNA, 25 bp, Artificial
  probe
  misc_feature (1)..(25): SEQ ID NO: 585; WAN024A6D; Start 8; Stop 32
tctcgtttcttttgtaatgacctac

SEQ ID NO: 267158 - DNA, 25 bp, Artificial
  probe
  misc_feature (1)..(25): SEQ ID NO: 585; WAN024A6D; Start 14; Stop 38
ttcttttgtaatgacctacctatgc

SEQ ID NO: 267159 - DNA, 25 bp, Artificial
  probe
  misc_feature (1)..(25): SEQ ID NO: 585; WAN024A6D; Start 11; Stop 35
cgtttcttttgtaatgacctaccta

SEQ ID NO: 267160 - DNA, 25 bp, Artificial
  probe
  misc_feature (1)..(25): SEQ ID NO: 585; WAN024A6D; Start 5; Stop 29
atgtctcgtttcttttgtaatgacc

SEQ ID NO: 267161 - DNA, 25 bp, Artificial
  probe
  misc_feature (1)..(25): SEQ ID NO: 585; WAN024A6D; Start 6; Stop 30
tgtctcgtttcttttgtaatgacct

SEQ ID NO: 267162 - DNA, 25 bp, Artificial
  probe
  misc_feature (1)..(25): SEQ ID NO: 585; WAN024A6D; Start 57; Stop 81
tttccgacgtttccttaatttatta

SEQ ID NO: 267163 - DNA, 25 bp, Artificial
  probe
  misc_feature (1)..(25): SEQ ID NO: 585; WAN024A6D; Start 7; Stop 31
gtctcgtttcttttgtaatgaccta

SEQ ID NO: 267164 - DNA, 25 bp, Artificial
  probe
  misc_feature (1)..(25): SEQ ID NO: 585; WAN024A6D; Start 4; Stop 28
gatgtctcgtttcttttgtaatgac

SEQ ID NO: 267165 - DNA, 25 bp, Artificial
  probe
  misc_feature (1)..(25): SEQ ID NO: 585; WAN024A6D; Start 58; Stop 82
ttccgacgtttccttaatttattat

SEQ ID NO: 267166 - DNA, 25 bp, Artificial
  probe
  misc_feature (1)..(25): SEQ ID NO: 585; WAN024A6D; Start 54; Stop 78
ccttttccgacgtttccttaattta

SEQ ID NO: 267167 - DNA, 25 bp, Artificial
  probe
  misc_feature (1)..(25): SEQ ID NO: 585; WAN024A6D; Start 3; Stop 27
cgatgtctcgtttcttttgtaatga

SEQ ID NO: 267168 - DNA, 25 bp, Artificial
  probe
  misc_feature (1)..(25): SEQ ID NO: 585; WAN024A6D; Start 13; Stop 37
tttcttttgtaatgacctacctatg

SEQ ID NO: 267169 - DNA, 25 bp, Artificial
  probe
  misc_feature (1)..(25): SEQ ID NO: 585; WAN024A6D; Start 12; Stop 36
gtttcttttgtaatgacctacctat

SEQ ID NO: 267170 - DNA, 25 bp, Artificial
  probe
  misc_feature (1)..(25): SEQ ID NO: 585; WAN024A6D; Start 55; Stop 79
cttttccgacgtttccttaatttat

SEQ ID NO: 267171 - DNA, 25 bp, Artificial
  probe
  misc_feature (1)..(25): SEQ ID NO: 585; WAN024A6D; Start 59; Stop 83
tccgacgtttccttaatttattata

SEQ ID NO: 267172 - DNA, 25 bp, Artificial
  probe
  misc_feature (1)..(25): SEQ ID NO: 585; WAN024A6D; Start 56; Stop 80
ttttccgacgtttccttaatttatt

SEQ ID NO: 267173 - DNA, 25 bp, Artificial
  probe
  misc_feature (1)..(25): SEQ ID NO: 585; WAN024A6D; Start 53; Stop 77
gccttttccgacgtttccttaattt

SEQ ID NO: 267174 - DNA, 25 bp, Artificial
  probe
  misc_feature (1)..(25): SEQ ID NO: 585; WAN024A6D; Start 2; Stop 26
tcgatgtctcgtttcttttgtaatg

SEQ ID NO: 267175 - DNA, 25 bp, Artificial
  probe
  misc_feature (1)..(25): SEQ ID NO: 585; WAN024A6D; Start 60; Stop 84
ccgacgtttccttaatttattataa

SEQ ID NO: 267176 - DNA, 25 bp, Artificial
  probe
  misc_feature (1)..(25): SEQ ID NO: 585; WAN024A6D; Start 1; Stop 25
atcgatgtctcgtttcttttgtaat

SEQ ID NO: 267177 - DNA, 25 bp, Artificial
  probe
  misc_feature (1)..(25): SEQ ID NO: 585; WAN024A6D; Start 52; Stop 76
cgccttttccgacgtttccttaatt

SEQ ID NO: 267178 - DNA, 25 bp, Artificial
  probe
  misc_feature (1)..(25): SEQ ID NO: 585; WAN024A6D; Start 50; Stop 74
tacgccttttccgacgtttccttaa

SEQ ID NO: 267179 - DNA, 25 bp, Artificial
  probe
  misc_feature (1)..(25): SEQ ID NO: 585; WAN024A6D; Start 49; Stop 73
ctacgccttttccgacgtttcctta

SEQ ID NO: 267180 - DNA, 25 bp, Artificial
  probe
  misc_feature (1)..(25): SEQ ID NO: 586; WAN0249Q2; Start 77; Stop 101
tatatcataatggacaaagggcaag

SEQ ID NO: 267181 - DNA, 25 bp, Artificial
  probe
  misc_feature (1)..(25): SEQ ID NO: 586; WAN0249Q2; Start 78; Stop 102
atatcataatggacaaagggcaagc

SEQ ID NO: 267182 - DNA, 25 bp, Artificial
  probe
  misc_feature (1)..(25): SEQ ID NO: 586; WAN0249Q2; Start 76; Stop 100
atatatcataatggacaaagggcaa

SEQ ID NO: 267183 - DNA, 25 bp, Artificial
  probe
  misc_feature (1)..(25): SEQ ID NO: 586; WAN0249Q2; Start 75; Stop 99
tatatatcataatggacaaagggca

SEQ ID NO: 267184 - DNA, 25 bp, Artificial
  probe
  misc_feature (1)..(25): SEQ ID NO: 586; WAN0249Q2; Start 92; Stop 116
aaagggcaagctgtcaagaaattac

SEQ ID NO: 267185 - DNA, 25 bp, Artificial
  probe
  misc_feature (1)..(25): SEQ ID NO: 586; WAN0249Q2; Start 91; Stop 115
caaagggcaagctgtcaagaaatta

SEQ ID NO: 267186 - DNA, 25 bp, Artificial
  probe
  misc_feature (1)..(25): SEQ ID NO: 586; WAN0249Q2; Start 79; Stop 103
tatcataatggacaaagggcaagct

SEQ ID NO: 267187 - DNA, 25 bp, Artificial
  probe
  misc_feature (1)..(25): SEQ ID NO: 586; WAN0249Q2; Start 74; Stop 98
ctatatatcataatggacaaagggc

SEQ ID NO: 267188 - DNA, 25 bp, Artificial
  probe
  misc_feature (1)..(25): SEQ ID NO: 586; WAN0249Q2; Start 93; Stop 117
aagggcaagctgtcaagaaattaca

SEQ ID NO: 267189 - DNA, 25 bp, Artificial
  probe
  misc_feature (1)..(25): SEQ ID NO: 586; WAN0249Q2; Start 80; Stop 104
atcataatggacaaagggcaagctg

SEQ ID NO: 267190 - DNA, 25 bp, Artificial
  probe
  misc_feature (1)..(25): SEQ ID NO: 586; WAN0249Q2; Start 73; Stop 97
actatatatcataatggacaaaggg

SEQ ID NO: 267191 - DNA, 25 bp, Artificial
  probe
  misc_feature (1)..(25): SEQ ID NO: 586; WAN0249Q2; Start 90; Stop 114
acaaagggcaagctgtcaagaaatt

SEQ ID NO: 267192 - DNA, 25 bp, Artificial
  probe
  misc_feature (1)..(25): SEQ ID NO: 586; WAN0249Q2; Start 97; Stop 121
gcaagctgtcaagaaattacagtta

SEQ ID NO: 267193 - DNA, 25 bp, Artificial
  probe
  misc_feature (1)..(25): SEQ ID NO: 586; WAN0249Q2; Start 98; Stop 122
caagctgtcaagaaattacagttat

SEQ ID NO: 267194 - DNA, 25 bp, Artificial
  probe
  misc_feature (1)..(25): SEQ ID NO: 586; WAN0249Q2; Start 96; Stop 120
ggcaagctgtcaagaaattacagtt

SEQ ID NO: 267195 - DNA, 25 bp, Artificial
  probe
  misc_feature (1)..(25): SEQ ID NO: 586; WAN0249Q2; Start 81; Stop 105
tcataatggacaaagggcaagctgt

SEQ ID NO: 267196 - DNA, 25 bp, Artificial
  probe
  misc_feature (1)..(25): SEQ ID NO: 586; WAN0249Q2; Start 100; Stop 124
agctgtcaagaaattacagttattt

SEQ ID NO: 267197 - DNA, 25 bp, Artificial
  probe
  misc_feature (1)..(25): SEQ ID NO: 586; WAN0249Q2; Start 99; Stop 123
aagctgtcaagaaattacagttatt

SEQ ID NO: 267198 - DNA, 25 bp, Artificial
  probe
  misc_feature (1)..(25): SEQ ID NO: 586; WAN0249Q2; Start 94; Stop 118
agggcaagctgtcaagaaattacag

SEQ ID NO: 267199 - DNA, 25 bp, Artificial
  probe
  misc_feature (1)..(25): SEQ ID NO: 586; WAN0249Q2; Start 95; Stop 119
gggcaagctgtcaagaaattacagt

SEQ ID NO: 267200 - DNA, 25 bp, Artificial
  probe
  misc_feature (1)..(25): SEQ ID NO: 586; WAN0249Q2; Start 89; Stop 113
gacaaagggcaagctgtcaagaaat

SEQ ID NO: 267201 - DNA, 25 bp, Artificial
  probe
  misc_feature (1)..(25): SEQ ID NO: 586; WAN0249Q2; Start 82; Stop 106
cataatggacaaagggcaagctgtc

SEQ ID NO: 267202 - DNA, 25 bp, Artificial
  probe
  misc_feature (1)..(25): SEQ ID NO: 586; WAN0249Q2; Start 101; Stop 125
gctgtcaagaaattacagttatttt

SEQ ID NO: 267203 - DNA, 25 bp, Artificial
  probe
  misc_feature (1)..(25): SEQ ID NO: 586; WAN0249Q2; Start 83; Stop 107
ataatggacaaagggcaagctgtca

SEQ ID NO: 267204 - DNA, 25 bp, Artificial
  probe
  misc_feature (1)..(25): SEQ ID NO: 586; WAN0249Q2; Start 84; Stop 108
taatggacaaagggcaagctgtcaa

SEQ ID NO: 267205 - DNA, 25 bp, Artificial
  probe
  misc_feature (1)..(25): SEQ ID NO: 587; WAN0249HI; Start 24; Stop 48
aagcaatctaagtaactaacgccaa

SEQ ID NO: 267206 - DNA, 25 bp, Artificial
  probe
  misc_feature (1)..(25): SEQ ID NO: 587; WAN0249HI; Start 26; Stop 50
gcaatctaagtaactaacgccaaat

SEQ ID NO: 267207 - DNA, 25 bp, Artificial
  probe
  misc_feature (1)..(25): SEQ ID NO: 587; WAN0249HI; Start 29; Stop 53
atctaagtaactaacgccaaatcct

SEQ ID NO: 267208 - DNA, 25 bp, Artificial
  probe
  misc_feature (1)..(25): SEQ ID NO: 587; WAN0249HI; Start 286; Stop 310
cctaaccaaataatagacttcctgc

SEQ ID NO: 267209 - DNA, 25 bp, Artificial
  probe
  misc_feature (1)..(25): SEQ ID NO: 587; WAN0249HI; Start 22; Stop 46
caaagcaatctaagtaactaacgcc

SEQ ID NO: 267210 - DNA, 25 bp, Artificial
  probe
  misc_feature (1)..(25): SEQ ID NO: 587; WAN0249HI; Start 30; Stop 54
tctaagtaactaacgccaaatccta

SEQ ID NO: 267211 - DNA, 25 bp, Artificial
  probe
  misc_feature (1)..(25): SEQ ID NO: 587; WAN0249HI; Start 33; Stop 57
aagtaactaacgccaaatcctattc

SEQ ID NO: 267212 - DNA, 25 bp, Artificial
  probe
  misc_feature (1)..(25): SEQ ID NO: 587; WAN0249HI; Start 28; Stop 52
aatctaagtaactaacgccaaatcc

SEQ ID NO: 267213 - DNA, 25 bp, Artificial
  probe
  misc_feature (1)..(25): SEQ ID NO: 587; WAN0249HI; Start 25; Stop 49
agcaatctaagtaactaacgccaaa

SEQ ID NO: 267214 - DNA, 25 bp, Artificial
  probe
  misc_feature (1)..(25): SEQ ID NO: 587; WAN0249HI; Start 23; Stop 47
aaagcaatctaagtaactaacgcca

SEQ ID NO: 267215 - DNA, 25 bp, Artificial
  probe
  misc_feature (1)..(25): SEQ ID NO: 587; WAN0249HI; Start 34; Stop 58
agtaactaacgccaaatcctattcg

SEQ ID NO: 267216 - DNA, 25 bp, Artificial
  probe
  misc_feature (1)..(25): SEQ ID NO: 587; WAN0249HI; Start 21; Stop 45
gcaaagcaatctaagtaactaacgc

SEQ ID NO: 267217 - DNA, 25 bp, Artificial
  probe
  misc_feature (1)..(25): SEQ ID NO: 587; WAN0249HI; Start 31; Stop 55
ctaagtaactaacgccaaatcctat

SEQ ID NO: 267218 - DNA, 25 bp, Artificial
  probe
  misc_feature (1)..(25): SEQ ID NO: 587; WAN0249HI; Start 27; Stop 51
caatctaagtaactaacgccaaatc

SEQ ID NO: 267219 - DNA, 25 bp, Artificial
  probe
  misc_feature (1)..(25): SEQ ID NO: 587; WAN0249HI; Start 35; Stop 59
gtaactaacgccaaatcctattcgg

SEQ ID NO: 267220 - DNA, 25 bp, Artificial
  probe
  misc_feature (1)..(25): SEQ ID NO: 587; WAN0249HI; Start 285; Stop 309
acctaaccaaataatagacttcctg

SEQ ID NO: 267221 - DNA, 25 bp, Artificial
  probe
  misc_feature (1)..(25): SEQ ID NO: 587; WAN0249HI; Start 284; Stop 308
cacctaaccaaataatagacttcct

SEQ ID NO: 267222 - DNA, 25 bp, Artificial
  probe
  misc_feature (1)..(25): SEQ ID NO: 587; WAN0249HI; Start 283; Stop 307
tcacctaaccaaataatagacttcc

SEQ ID NO: 267223 - DNA, 25 bp, Artificial
  probe
  misc_feature (1)..(25): SEQ ID NO: 587; WAN0249HI; Start 32; Stop 56
taagtaactaacgccaaatcctatt

SEQ ID NO: 267224 - DNA, 25 bp, Artificial
  probe
  misc_feature (1)..(25): SEQ ID NO: 587; WAN0249HI; Start 144; Stop 168
actaaagttcctaattgttagacgc

SEQ ID NO: 267225 - DNA, 25 bp, Artificial
  probe
  misc_feature (1)..(25): SEQ ID NO: 587; WAN0249HI; Start 145; Stop 169
ctaaagttcctaattgttagacgct

SEQ ID NO: 267226 - DNA, 25 bp, Artificial
  probe
  misc_feature (1)..(25): SEQ ID NO: 587; WAN0249HI; Start 147; Stop 171
aaagttcctaattgttagacgctag

SEQ ID NO: 267227 - DNA, 25 bp, Artificial
  probe
  misc_feature (1)..(25): SEQ ID NO: 587; WAN0249HI; Start 120; Stop 144
cgtcgtaatcttaaagttattggaa

SEQ ID NO: 267228 - DNA, 25 bp, Artificial
  probe
  misc_feature (1)..(25): SEQ ID NO: 587; WAN0249HI; Start 289; Stop 313
aaccaaataatagacttcctgcaaa

SEQ ID NO: 267229 - DNA, 25 bp, Artificial
  probe
  misc_feature (1)..(25): SEQ ID NO: 587; WAN0249HI; Start 146; Stop 170
taaagttcctaattgttagacgcta

SEQ ID NO: 267230 - DNA, 25 bp, Artificial
  probe
  misc_feature (1)..(25): SEQ ID NO: 587; WAN0249HI; Start 36; Stop 60
taactaacgccaaatcctattcgga

SEQ ID NO: 267231 - DNA, 25 bp, Artificial
  probe
  misc_feature (1)..(25): SEQ ID NO: 587; WAN0249HI; Start 287; Stop 311
ctaaccaaataatagacttcctgca

SEQ ID NO: 267232 - DNA, 25 bp, Artificial
  probe
  misc_feature (1)..(25): SEQ ID NO: 587; WAN0249HI; Start 119; Stop 143
acgtcgtaatcttaaagttattgga

SEQ ID NO: 267233 - DNA, 25 bp, Artificial
  probe
  misc_feature (1)..(25): SEQ ID NO: 587; WAN0249HI; Start 288; Stop 312
taaccaaataatagacttcctgcaa

SEQ ID NO: 267234 - DNA, 25 bp, Artificial
  probe
  misc_feature (1)..(25): SEQ ID NO: 587; WAN0249HI; Start 273; Stop 297
cttcactaattcacctaaccaaata

SEQ ID NO: 267235 - DNA, 25 bp, Artificial
  probe
  misc_feature (1)..(25): SEQ ID NO: 587; WAN0249HI; Start 282; Stop 306
ttcacctaaccaaataatagacttc

SEQ ID NO: 267236 - DNA, 25 bp, Artificial
  probe
  misc_feature (1)..(25): SEQ ID NO: 587; WAN0249HI; Start 40; Stop 64
taacgccaaatcctattcggacttt

SEQ ID NO: 267237 - DNA, 25 bp, Artificial
  probe
  misc_feature (1)..(25): SEQ ID NO: 587; WAN0249HI; Start 247; Stop 271
cgtaaccagagacacttgcctaaac

SEQ ID NO: 267238 - DNA, 25 bp, Artificial
  probe
  misc_feature (1)..(25): SEQ ID NO: 588; WAN024AGP; Start 24; Stop 48
tttagaccaagggaactacttctcc

SEQ ID NO: 267239 - DNA, 25 bp, Artificial
  probe
  misc_feature (1)..(25): SEQ ID NO: 588; WAN024AGP; Start 23; Stop 47
ttttagaccaagggaactacttctc

SEQ ID NO: 267240 - DNA, 25 bp, Artificial
  probe
  misc_feature (1)..(25): SEQ ID NO: 589; WAN024A7C; Start 86; Stop 110
atattccaattgttgcgagttgtag

SEQ ID NO: 267241 - DNA, 25 bp, Artificial
  probe
  misc_feature (1)..(25): SEQ ID NO: 589; WAN024A7C; Start 85; Stop 109
aatattccaattgttgcgagttgta

SEQ ID NO: 267242 - DNA, 25 bp, Artificial
  probe
  misc_feature (1)..(25): SEQ ID NO: 589; WAN024A7C; Start 84; Stop 108
taatattccaattgttgcgagttgt

SEQ ID NO: 267243 - DNA, 25 bp, Artificial
  probe
  misc_feature (1)..(25): SEQ ID NO: 589; WAN024A7C; Start 83; Stop 107
ataatattccaattgttgcgagttg

SEQ ID NO: 267244 - DNA, 25 bp, Artificial
  probe
  misc_feature (1)..(25): SEQ ID NO: 589; WAN024A7C; Start 87; Stop 111
tattccaattgttgcgagttgtagg

SEQ ID NO: 267245 - DNA, 25 bp, Artificial
  probe
  misc_feature (1)..(25): SEQ ID NO: 589; WAN024A7C; Start 37; Stop 61
ttgcttgataaaaccccatactaat

SEQ ID NO: 267246 - DNA, 25 bp, Artificial
  probe
  misc_feature (1)..(25): SEQ ID NO: 589; WAN024A7C; Start 36; Stop 60
attgcttgataaaaccccatactaa

SEQ ID NO: 267247 - DNA, 25 bp, Artificial
  probe
  misc_feature (1)..(25): SEQ ID NO: 589; WAN024A7C; Start 89; Stop 113
ttccaattgttgcgagttgtaggta

SEQ ID NO: 267248 - DNA, 25 bp, Artificial
  probe
  misc_feature (1)..(25): SEQ ID NO: 589; WAN024A7C; Start 16; Stop 40
aaatcgggtgatagataacaattgc

SEQ ID NO: 267249 - DNA, 25 bp, Artificial
  probe
  misc_feature (1)..(25): SEQ ID NO: 589; WAN024A7C; Start 18; Stop 42
atcgggtgatagataacaattgctt

SEQ ID NO: 267250 - DNA, 25 bp, Artificial
  probe
  misc_feature (1)..(25): SEQ ID NO: 589; WAN024A7C; Start 17; Stop 41
aatcgggtgatagataacaattgct

SEQ ID NO: 267251 - DNA, 25 bp, Artificial
  probe
  misc_feature (1)..(25): SEQ ID NO: 589; WAN024A7C; Start 35; Stop 59
aattgcttgataaaaccccatacta

SEQ ID NO: 267252 - DNA, 25 bp, Artificial
  probe
  misc_feature (1)..(25): SEQ ID NO: 589; WAN024A7C; Start 82; Stop 106
tataatattccaattgttgcgagtt

SEQ ID NO: 267253 - DNA, 25 bp, Artificial
  probe
  misc_feature (1)..(25): SEQ ID NO: 589; WAN024A7C; Start 81; Stop 105
ttataatattccaattgttgcgagt

SEQ ID NO: 267254 - DNA, 25 bp, Artificial
  probe
  misc_feature (1)..(25): SEQ ID NO: 589; WAN024A7C; Start 21; Stop 45
gggtgatagataacaattgcttgat

SEQ ID NO: 267255 - DNA, 25 bp, Artificial
  probe
  misc_feature (1)..(25): SEQ ID NO: 589; WAN024A7C; Start 22; Stop 46
ggtgatagataacaattgcttgata

SEQ ID NO: 267256 - DNA, 25 bp, Artificial
  probe
  misc_feature (1)..(25): SEQ ID NO: 589; WAN024A7C; Start 38; Stop 62
tgcttgataaaaccccatactaata

SEQ ID NO: 267257 - DNA, 25 bp, Artificial
  probe
  misc_feature (1)..(25): SEQ ID NO: 589; WAN024A7C; Start 20; Stop 44
cgggtgatagataacaattgcttga

SEQ ID NO: 267258 - DNA, 25 bp, Artificial
  probe
  misc_feature (1)..(25): SEQ ID NO: 589; WAN024A7C; Start 19; Stop 43
tcgggtgatagataacaattgcttg

SEQ ID NO: 267259 - DNA, 25 bp, Artificial
  probe
  misc_feature (1)..(25): SEQ ID NO: 589; WAN024A7C; Start 94; Stop 118
attgttgcgagttgtaggtactcaa

SEQ ID NO: 267260 - DNA, 25 bp, Artificial
  probe
  misc_feature (1)..(25): SEQ ID NO: 589; WAN024A7C; Start 93; Stop 117
aattgttgcgagttgtaggtactca

SEQ ID NO: 267261 - DNA, 25 bp, Artificial
  probe
  misc_feature (1)..(25): SEQ ID NO: 589; WAN024A7C; Start 90; Stop 114
tccaattgttgcgagttgtaggtac

SEQ ID NO: 267262 - DNA, 25 bp, Artificial
  probe
  misc_feature (1)..(25): SEQ ID NO: 589; WAN024A7C; Start 88; Stop 112
attccaattgttgcgagttgtaggt

SEQ ID NO: 267263 - DNA, 25 bp, Artificial
  probe
  misc_feature (1)..(25): SEQ ID NO: 589; WAN024A7C; Start 91; Stop 115
ccaattgttgcgagttgtaggtact

SEQ ID NO: 267264 - DNA, 25 bp, Artificial
  probe
  misc_feature (1)..(25): SEQ ID NO: 589; WAN024A7C; Start 39; Stop 63
gcttgataaaaccccatactaatag

SEQ ID NO: 267265 - DNA, 25 bp, Artificial
  probe
  misc_feature (1)..(25): SEQ ID NO: 589; WAN024A7C; Start 99; Stop 123
tgcgagttgtaggtactcaaataat

SEQ ID NO: 267266 - DNA, 25 bp, Artificial
  probe
  misc_feature (1)..(25): SEQ ID NO: 589; WAN024A7C; Start 98; Stop 122
ttgcgagttgtaggtactcaaataa

SEQ ID NO: 267267 - DNA, 25 bp, Artificial
  probe
  misc_feature (1)..(25): SEQ ID NO: 589; WAN024A7C; Start 100; Stop 124
gcgagttgtaggtactcaaataatc

SEQ ID NO: 267268 - DNA, 25 bp, Artificial
  probe
  misc_feature (1)..(25): SEQ ID NO: 589; WAN024A7C; Start 97; Stop 121
gttgcgagttgtaggtactcaaata

SEQ ID NO: 267269 - DNA, 25 bp, Artificial
  probe
  misc_feature (1)..(25): SEQ ID NO: 589; WAN024A7C; Start 56; Stop 80
actaatagtagaatggttttgggaa

SEQ ID NO: 267270 - DNA, 25 bp, Artificial
  probe
  misc_feature (1)..(25): SEQ ID NO: 589; WAN024A7C; Start 101; Stop 125
cgagttgtaggtactcaaataatct

SEQ ID NO: 267271 - DNA, 25 bp, Artificial
  probe
  misc_feature (1)..(25): SEQ ID NO: 589; WAN024A7C; Start 80; Stop 104
attataatattccaattgttgcgag

SEQ ID NO: 267272 - DNA, 25 bp, Artificial
  probe
  misc_feature (1)..(25): SEQ ID NO: 589; WAN024A7C; Start 57; Stop 81
ctaatagtagaatggttttgggaat

SEQ ID NO: 267273 - DNA, 25 bp, Artificial
  probe
  misc_feature (1)..(25): SEQ ID NO: 590; WAN024AB3; Start 98; Stop 122
tcgtagtaacctaagataccattgt

SEQ ID NO: 267274 - DNA, 25 bp, Artificial
  probe
  misc_feature (1)..(25): SEQ ID NO: 590; WAN024AB3; Start 99; Stop 123
cgtagtaacctaagataccattgtc

SEQ ID NO: 267275 - DNA, 25 bp, Artificial
  probe
  misc_feature (1)..(25): SEQ ID NO: 590; WAN024AB3; Start 97; Stop 121
ttcgtagtaacctaagataccattg

SEQ ID NO: 267276 - DNA, 25 bp, Artificial
  probe
  misc_feature (1)..(25): SEQ ID NO: 590; WAN024AB3; Start 100; Stop 124
gtagtaacctaagataccattgtca

SEQ ID NO: 267277 - DNA, 25 bp, Artificial
  probe
  misc_feature (1)..(25): SEQ ID NO: 590; WAN024AB3; Start 96; Stop 120
cttcgtagtaacctaagataccatt

SEQ ID NO: 267278 - DNA, 25 bp, Artificial
  probe
  misc_feature (1)..(25): SEQ ID NO: 590; WAN024AB3; Start 176; Stop 200
ggaatagatgagcctgttggtactt

SEQ ID NO: 267279 - DNA, 25 bp, Artificial
  probe
  misc_feature (1)..(25): SEQ ID NO: 590; WAN024AB3; Start 174; Stop 198
ttggaatagatgagcctgttggtac

SEQ ID NO: 267280 - DNA, 25 bp, Artificial
  probe
  misc_feature (1)..(25): SEQ ID NO: 590; WAN024AB3; Start 102; Stop 126
agtaacctaagataccattgtcaat

SEQ ID NO: 267281 - DNA, 25 bp, Artificial
  probe
  misc_feature (1)..(25): SEQ ID NO: 590; WAN024AB3; Start 101; Stop 125
tagtaacctaagataccattgtcaa

SEQ ID NO: 267282 - DNA, 25 bp, Artificial
  probe
  misc_feature (1)..(25): SEQ ID NO: 590; WAN024AB3; Start 173; Stop 197
tttggaatagatgagcctgttggta

SEQ ID NO: 267283 - DNA, 25 bp, Artificial
  probe
  misc_feature (1)..(25): SEQ ID NO: 590; WAN024AB3; Start 175; Stop 199
tggaatagatgagcctgttggtact

SEQ ID NO: 267284 - DNA, 25 bp, Artificial
  probe
  misc_feature (1)..(25): SEQ ID NO: 590; WAN024AB3; Start 95; Stop 119
tcttcgtagtaacctaagataccat

SEQ ID NO: 267285 - DNA, 25 bp, Artificial
  probe
  misc_feature (1)..(25): SEQ ID NO: 590; WAN024AB3; Start 85; Stop 109
atcatctatatcttcgtagtaacct

SEQ ID NO: 267286 - DNA, 25 bp, Artificial
  probe
  misc_feature (1)..(25): SEQ ID NO: 590; WAN024AB3; Start 128; Stop 152
tttgtagcactaattctaggagttt

SEQ ID NO: 267287 - DNA, 25 bp, Artificial
  probe
  misc_feature (1)..(25): SEQ ID NO: 590; WAN024AB3; Start 115; Stop 139
accattgtcaatatttgtagcacta

SEQ ID NO: 267288 - DNA, 25 bp, Artificial
  probe
  misc_feature (1)..(25): SEQ ID NO: 590; WAN024AB3; Start 114; Stop 138
taccattgtcaatatttgtagcact

SEQ ID NO: 267289 - DNA, 25 bp, Artificial
  probe
  misc_feature (1)..(25): SEQ ID NO: 590; WAN024AB3; Start 127; Stop 151
atttgtagcactaattctaggagtt

SEQ ID NO: 267290 - DNA, 25 bp, Artificial
  probe
  misc_feature (1)..(25): SEQ ID NO: 590; WAN024AB3; Start 103; Stop 127
gtaacctaagataccattgtcaata

SEQ ID NO: 267291 - DNA, 25 bp, Artificial
  probe
  misc_feature (1)..(25): SEQ ID NO: 590; WAN024AB3; Start 86; Stop 110
tcatctatatcttcgtagtaaccta

SEQ ID NO: 267292 - DNA, 25 bp, Artificial
  probe
  misc_feature (1)..(25): SEQ ID NO: 590; WAN024AB3; Start 116; Stop 140
ccattgtcaatatttgtagcactaa

SEQ ID NO: 267293 - DNA, 25 bp, Artificial
  probe
  misc_feature (1)..(25): SEQ ID NO: 590; WAN024AB3; Start 113; Stop 137
ataccattgtcaatatttgtagcac

SEQ ID NO: 267294 - DNA, 25 bp, Artificial
  probe
  misc_feature (1)..(25): SEQ ID NO: 590; WAN024AB3; Start 126; Stop 150
tatttgtagcactaattctaggagt

SEQ ID NO: 267295 - DNA, 25 bp, Artificial
  probe
  misc_feature (1)..(25): SEQ ID NO: 590; WAN024AB3; Start 112; Stop 136
gataccattgtcaatatttgtagca

SEQ ID NO: 267296 - DNA, 25 bp, Artificial
  probe
  misc_feature (1)..(25): SEQ ID NO: 590; WAN024AB3; Start 105; Stop 129
aacctaagataccattgtcaatatt

SEQ ID NO: 267297 - DNA, 25 bp, Artificial
  probe
  misc_feature (1)..(25): SEQ ID NO: 590; WAN024AB3; Start 111; Stop 135
agataccattgtcaatatttgtagc

SEQ ID NO: 267298 - DNA, 25 bp, Artificial
  probe
  misc_feature (1)..(25): SEQ ID NO: 590; WAN024AB3; Start 87; Stop 111
catctatatcttcgtagtaacctaa

SEQ ID NO: 267299 - DNA, 25 bp, Artificial
  probe
  misc_feature (1)..(25): SEQ ID NO: 590; WAN024AB3; Start 335; Stop 359
ttgaactagtcgttgtactttcttt

SEQ ID NO: 267300 - DNA, 25 bp, Artificial
  probe
  misc_feature (1)..(25): SEQ ID NO: 590; WAN024AB3; Start 334; Stop 358
tttgaactagtcgttgtactttctt

SEQ ID NO: 267301 - DNA, 25 bp, Artificial
  probe
  misc_feature (1)..(25): SEQ ID NO: 590; WAN024AB3; Start 172; Stop 196
ttttggaatagatgagcctgttggt

SEQ ID NO: 267302 - DNA, 25 bp, Artificial
  probe
  misc_feature (1)..(25): SEQ ID NO: 590; WAN024AB3; Start 104; Stop 128
taacctaagataccattgtcaatat

SEQ ID NO: 267303 - DNA, 25 bp, Artificial
  probe
  misc_feature (1)..(25): SEQ ID NO: 590; WAN024AB3; Start 125; Stop 149
atatttgtagcactaattctaggag

SEQ ID NO: 267304 - DNA, 25 bp, Artificial
  probe
  misc_feature (1)..(25): SEQ ID NO: 590; WAN024AB3; Start 120; Stop 144
tgtcaatatttgtagcactaattct

SEQ ID NO: 267305 - DNA, 25 bp, Artificial
  probe
  misc_feature (1)..(25): SEQ ID NO: 590; WAN024AB3; Start 2; Stop 26
tctaggcttgctttatatttatgat

SEQ ID NO: 267306 - DNA, 25 bp, Artificial
  probe
  misc_feature (1)..(25): SEQ ID NO: 591; WAN0249VX; Start 150; Stop 174
cactgtccaagctaacatattcaat

SEQ ID NO: 267307 - DNA, 25 bp, Artificial
  probe
  misc_feature (1)..(25): SEQ ID NO: 591; WAN0249VX; Start 179; Stop 203
aaatacaaagtgctttcattctcgc

SEQ ID NO: 267308 - DNA, 25 bp, Artificial
  probe
  misc_feature (1)..(25): SEQ ID NO: 591; WAN0249VX; Start 149; Stop 173
gcactgtccaagctaacatattcaa

SEQ ID NO: 267309 - DNA, 25 bp, Artificial
  probe
  misc_feature (1)..(25): SEQ ID NO: 591; WAN0249VX; Start 151; Stop 175
actgtccaagctaacatattcaata

SEQ ID NO: 267310 - DNA, 25 bp, Artificial
  probe
  misc_feature (1)..(25): SEQ ID NO: 591; WAN0249VX; Start 147; Stop 171
aagcactgtccaagctaacatattc

SEQ ID NO: 267311 - DNA, 25 bp, Artificial
  probe
  misc_feature (1)..(25): SEQ ID NO: 591; WAN0249VX; Start 152; Stop 176
ctgtccaagctaacatattcaataa

SEQ ID NO: 267312 - DNA, 25 bp, Artificial
  probe
  misc_feature (1)..(25): SEQ ID NO: 591; WAN0249VX; Start 146; Stop 170
caagcactgtccaagctaacatatt

SEQ ID NO: 267313 - DNA, 25 bp, Artificial
  probe
  misc_feature (1)..(25): SEQ ID NO: 591; WAN0249VX; Start 148; Stop 172
agcactgtccaagctaacatattca

SEQ ID NO: 267314 - DNA, 25 bp, Artificial
  probe
  misc_feature (1)..(25): SEQ ID NO: 591; WAN0249VX; Start 178; Stop 202
aaaatacaaagtgctttcattctcg

SEQ ID NO: 267315 - DNA, 25 bp, Artificial
  probe
  misc_feature (1)..(25): SEQ ID NO: 591; WAN0249VX; Start 181; Stop 205
atacaaagtgctttcattctcgcat

SEQ ID NO: 267316 - DNA, 25 bp, Artificial
  probe
  misc_feature (1)..(25): SEQ ID NO: 591; WAN0249VX; Start 182; Stop 206
tacaaagtgctttcattctcgcatt

SEQ ID NO: 267317 - DNA, 25 bp, Artificial
  probe
  misc_feature (1)..(25): SEQ ID NO: 591; WAN0249VX; Start 180; Stop 204
aatacaaagtgctttcattctcgca

SEQ ID NO: 267318 - DNA, 25 bp, Artificial
  probe
  misc_feature (1)..(25): SEQ ID NO: 591; WAN0249VX; Start 145; Stop 169
gcaagcactgtccaagctaacatat

SEQ ID NO: 267319 - DNA, 25 bp, Artificial
  probe
  misc_feature (1)..(25): SEQ ID NO: 591; WAN0249VX; Start 153; Stop 177
tgtccaagctaacatattcaataaa

SEQ ID NO: 267320 - DNA, 25 bp, Artificial
  probe
  misc_feature (1)..(25): SEQ ID NO: 591; WAN0249VX; Start 77; Stop 101
gcgaagcaattaaaatagtactcca

SEQ ID NO: 267321 - DNA, 25 bp, Artificial
  probe
  misc_feature (1)..(25): SEQ ID NO: 591; WAN0249VX; Start 76; Stop 100
agcgaagcaattaaaatagtactcc

SEQ ID NO: 267322 - DNA, 25 bp, Artificial
  probe
  misc_feature (1)..(25): SEQ ID NO: 591; WAN0249VX; Start 74; Stop 98
acagcgaagcaattaaaatagtact

SEQ ID NO: 267323 - DNA, 25 bp, Artificial
  probe
  misc_feature (1)..(25): SEQ ID NO: 591; WAN0249VX; Start 75; Stop 99
cagcgaagcaattaaaatagtactc

SEQ ID NO: 267324 - DNA, 25 bp, Artificial
  probe
  misc_feature (1)..(25): SEQ ID NO: 591; WAN0249VX; Start 144; Stop 168
tgcaagcactgtccaagctaacata

SEQ ID NO: 267325 - DNA, 25 bp, Artificial
  probe
  misc_feature (1)..(25): SEQ ID NO: 591; WAN0249VX; Start 78; Stop 102
cgaagcaattaaaatagtactccaa

SEQ ID NO: 267326 - DNA, 25 bp, Artificial
  probe
  misc_feature (1)..(25): SEQ ID NO: 591; WAN0249VX; Start 154; Stop 178
gtccaagctaacatattcaataaaa

SEQ ID NO: 267327 - DNA, 25 bp, Artificial
  probe
  misc_feature (1)..(25): SEQ ID NO: 591; WAN0249VX; Start 80; Stop 104
aagcaattaaaatagtactccaagt

SEQ ID NO: 267328 - DNA, 25 bp, Artificial
  probe
  misc_feature (1)..(25): SEQ ID NO: 591; WAN0249VX; Start 79; Stop 103
gaagcaattaaaatagtactccaag

SEQ ID NO: 267329 - DNA, 25 bp, Artificial
  probe
  misc_feature (1)..(25): SEQ ID NO: 591; WAN0249VX; Start 139; Stop 163
atcattgcaagcactgtccaagcta

SEQ ID NO: 267330 - DNA, 25 bp, Artificial
  probe
  misc_feature (1)..(25): SEQ ID NO: 591; WAN0249VX; Start 138; Stop 162
tatcattgcaagcactgtccaagct

SEQ ID NO: 267331 - DNA, 25 bp, Artificial
  probe
  misc_feature (1)..(25): SEQ ID NO: 591; WAN0249VX; Start 81; Stop 105
agcaattaaaatagtactccaagta

SEQ ID NO: 267332 - DNA, 25 bp, Artificial
  probe
  misc_feature (1)..(25): SEQ ID NO: 591; WAN0249VX; Start 141; Stop 165
cattgcaagcactgtccaagctaac

SEQ ID NO: 267333 - DNA, 25 bp, Artificial
  probe
  misc_feature (1)..(25): SEQ ID NO: 591; WAN0249VX; Start 84; Stop 108
aattaaaatagtactccaagtatgc

SEQ ID NO: 267334 - DNA, 25 bp, Artificial
  probe
  misc_feature (1)..(25): SEQ ID NO: 591; WAN0249VX; Start 82; Stop 106
gcaattaaaatagtactccaagtat

SEQ ID NO: 267335 - DNA, 25 bp, Artificial
  probe
  misc_feature (1)..(25): SEQ ID NO: 592; WAN0249LV; Start 7; Stop 31
tcctcctagaaatagattgagccta

SEQ ID NO: 267336 - DNA, 25 bp, Artificial
  probe
  misc_feature (1)..(25): SEQ ID NO: 592; WAN0249LV; Start 6; Stop 30
atcctcctagaaatagattgagcct

SEQ ID NO: 267337 - DNA, 25 bp, Artificial
  probe
  misc_feature (1)..(25): SEQ ID NO: 592; WAN0249LV; Start 5; Stop 29
catcctcctagaaatagattgagcc

SEQ ID NO: 267338 - DNA, 25 bp, Artificial
  probe
  misc_feature (1)..(25): SEQ ID NO: 592; WAN0249LV; Start 4; Stop 28
tcatcctcctagaaatagattgagc

SEQ ID NO: 267339 - DNA, 25 bp, Artificial
  probe
  misc_feature (1)..(25): SEQ ID NO: 592; WAN0249LV; Start 8; Stop 32
cctcctagaaatagattgagcctat

SEQ ID NO: 267340 - DNA, 25 bp, Artificial
  probe
  misc_feature (1)..(25): SEQ ID NO: 592; WAN0249LV; Start 2; Stop 26
tctcatcctcctagaaatagattga

SEQ ID NO: 267341 - DNA, 25 bp, Artificial
  probe
  misc_feature (1)..(25): SEQ ID NO: 592; WAN0249LV; Start 1; Stop 25
atctcatcctcctagaaatagattg

SEQ ID NO: 267342 - DNA, 25 bp, Artificial
  probe
  misc_feature (1)..(25): SEQ ID NO: 592; WAN0249LV; Start 9; Stop 33
ctcctagaaatagattgagcctatt

SEQ ID NO: 267343 - DNA, 25 bp, Artificial
  probe
  misc_feature (1)..(25): SEQ ID NO: 592; WAN0249LV; Start 3; Stop 27
ctcatcctcctagaaatagattgag

SEQ ID NO: 267344 - DNA, 25 bp, Artificial
  probe
  misc_feature (1)..(25): SEQ ID NO: 592; WAN0249LV; Start 20; Stop 44
agattgagcctattttatcacaaaa

SEQ ID NO: 267345 - DNA, 25 bp, Artificial
  probe
  misc_feature (1)..(25): SEQ ID NO: 592; WAN0249LV; Start 19; Stop 43
tagattgagcctattttatcacaaa

SEQ ID NO: 267346 - DNA, 25 bp, Artificial
  probe
  misc_feature (1)..(25): SEQ ID NO: 592; WAN0249LV; Start 18; Stop 42
atagattgagcctattttatcacaa

SEQ ID NO: 267347 - DNA, 25 bp, Artificial
  probe
  misc_feature (1)..(25): SEQ ID NO: 592; WAN0249LV; Start 37; Stop 61
tcacaaaatataagagaaagctatg

SEQ ID NO: 267348 - DNA, 25 bp, Artificial
  probe
  misc_feature (1)..(25): SEQ ID NO: 592; WAN0249LV; Start 21; Stop 45
gattgagcctattttatcacaaaat

SEQ ID NO: 267349 - DNA, 25 bp, Artificial
  probe
  misc_feature (1)..(25): SEQ ID NO: 592; WAN0249LV; Start 17; Stop 41
aatagattgagcctattttatcaca

SEQ ID NO: 267350 - DNA, 25 bp, Artificial
  probe
  misc_feature (1)..(25): SEQ ID NO: 592; WAN0249LV; Start 23; Stop 47
ttgagcctattttatcacaaaatat

SEQ ID NO: 267351 - DNA, 25 bp, Artificial
  probe
  misc_feature (1)..(25): SEQ ID NO: 592; WAN0249LV; Start 22; Stop 46
attgagcctattttatcacaaaata

SEQ ID NO: 267352 - DNA, 25 bp, Artificial
  probe
  misc_feature (1)..(25): SEQ ID NO: 593; WAN0249LJ; Start 72; Stop 96
gaagcagtaagtggttgtaggacta

SEQ ID NO: 267353 - DNA, 25 bp, Artificial
  probe
  misc_feature (1)..(25): SEQ ID NO: 593; WAN0249LJ; Start 73; Stop 97
aagcagtaagtggttgtaggactag

SEQ ID NO: 267354 - DNA, 25 bp, Artificial
  probe
  misc_feature (1)..(25): SEQ ID NO: 593; WAN0249LJ; Start 83; Stop 107
tggttgtaggactagcttaacttac

SEQ ID NO: 267355 - DNA, 25 bp, Artificial
  probe
  misc_feature (1)..(25): SEQ ID NO: 593; WAN0249LJ; Start 82; Stop 106
gtggttgtaggactagcttaactta

SEQ ID NO: 267356 - DNA, 25 bp, Artificial
  probe
  misc_feature (1)..(25): SEQ ID NO: 593; WAN0249LJ; Start 70; Stop 94
ttgaagcagtaagtggttgtaggac

SEQ ID NO: 267357 - DNA, 25 bp, Artificial
  probe
  misc_feature (1)..(25): SEQ ID NO: 593; WAN0249LJ; Start 67; Stop 91
aatttgaagcagtaagtggttgtag

SEQ ID NO: 267358 - DNA, 25 bp, Artificial
  probe
  misc_feature (1)..(25): SEQ ID NO: 593; WAN0249LJ; Start 81; Stop 105
agtggttgtaggactagcttaactt

SEQ ID NO: 267359 - DNA, 25 bp, Artificial
  probe
  misc_feature (1)..(25): SEQ ID NO: 593; WAN0249LJ; Start 80; Stop 104
aagtggttgtaggactagcttaact

SEQ ID NO: 267360 - DNA, 25 bp, Artificial
  probe
  misc_feature (1)..(25): SEQ ID NO: 593; WAN0249LJ; Start 79; Stop 103
taagtggttgtaggactagcttaac

SEQ ID NO: 267361 - DNA, 25 bp, Artificial
  probe
  misc_feature (1)..(25): SEQ ID NO: 593; WAN0249LJ; Start 78; Stop 102
gtaagtggttgtaggactagcttaa

SEQ ID NO: 267362 - DNA, 25 bp, Artificial
  probe
  misc_feature (1)..(25): SEQ ID NO: 593; WAN0249LJ; Start 68; Stop 92
atttgaagcagtaagtggttgtagg

SEQ ID NO: 267363 - DNA, 25 bp, Artificial
  probe
  misc_feature (1)..(25): SEQ ID NO: 593; WAN0249LJ; Start 77; Stop 101
agtaagtggttgtaggactagctta

SEQ ID NO: 267364 - DNA, 25 bp, Artificial
  probe
  misc_feature (1)..(25): SEQ ID NO: 593; WAN0249LJ; Start 29; Stop 53
gctaagttaggaatacaagggcaaa

SEQ ID NO: 267365 - DNA, 25 bp, Artificial
  probe
  misc_feature (1)..(25): SEQ ID NO: 593; WAN0249LJ; Start 66; Stop 90
caatttgaagcagtaagtggttgta

SEQ ID NO: 267366 - DNA, 25 bp, Artificial
  probe
  misc_feature (1)..(25): SEQ ID NO: 593; WAN0249LJ; Start 76; Stop 100
cagtaagtggttgtaggactagctt

SEQ ID NO: 267367 - DNA, 25 bp, Artificial
  probe
  misc_feature (1)..(25): SEQ ID NO: 593; WAN0249LJ; Start 69; Stop 93
tttgaagcagtaagtggttgtagga

SEQ ID NO: 267368 - DNA, 25 bp, Artificial
  probe
  misc_feature (1)..(25): SEQ ID NO: 593; WAN0249LJ; Start 58; Stop 82
caagtggtcaatttgaagcagtaag

SEQ ID NO: 267369 - DNA, 25 bp, Artificial
  probe
  misc_feature (1)..(25): SEQ ID NO: 593; WAN0249LJ; Start 84; Stop 108
ggttgtaggactagcttaacttaca

SEQ ID NO: 267370 - DNA, 25 bp, Artificial
  probe
  misc_feature (1)..(25): SEQ ID NO: 593; WAN0249LJ; Start 71; Stop 95
tgaagcagtaagtggttgtaggact

SEQ ID NO: 267371 - DNA, 25 bp, Artificial
  probe
  misc_feature (1)..(25): SEQ ID NO: 593; WAN0249LJ; Start 64; Stop 88
gtcaatttgaagcagtaagtggttg

SEQ ID NO: 267372 - DNA, 25 bp, Artificial
  probe
  misc_feature (1)..(25): SEQ ID NO: 593; WAN0249LJ; Start 59; Stop 83
aagtggtcaatttgaagcagtaagt

SEQ ID NO: 267373 - DNA, 25 bp, Artificial
  probe
  misc_feature (1)..(25): SEQ ID NO: 593; WAN0249LJ; Start 65; Stop 89
tcaatttgaagcagtaagtggttgt

SEQ ID NO: 267374 - DNA, 25 bp, Artificial
  probe
  misc_feature (1)..(25): SEQ ID NO: 593; WAN0249LJ; Start 25; Stop 49
caaagctaagttaggaatacaaggg

SEQ ID NO: 267375 - DNA, 25 bp, Artificial
  probe
  misc_feature (1)..(25): SEQ ID NO: 593; WAN0249LJ; Start 26; Stop 50
aaagctaagttaggaatacaagggc

SEQ ID NO: 267376 - DNA, 25 bp, Artificial
  probe
  misc_feature (1)..(25): SEQ ID NO: 593; WAN0249LJ; Start 60; Stop 84
agtggtcaatttgaagcagtaagtg

SEQ ID NO: 267377 - DNA, 25 bp, Artificial
  probe
  misc_feature (1)..(25): SEQ ID NO: 593; WAN0249LJ; Start 63; Stop 87
ggtcaatttgaagcagtaagtggtt

SEQ ID NO: 267378 - DNA, 25 bp, Artificial
  probe
  misc_feature (1)..(25): SEQ ID NO: 593; WAN0249LJ; Start 24; Stop 48
tcaaagctaagttaggaatacaagg

SEQ ID NO: 267379 - DNA, 25 bp, Artificial
  probe
  misc_feature (1)..(25): SEQ ID NO: 593; WAN0249LJ; Start 2; Stop 26
tctcctttctgactctactatatca

SEQ ID NO: 267380 - DNA, 25 bp, Artificial
  probe
  misc_feature (1)..(25): SEQ ID NO: 593; WAN0249LJ; Start 86; Stop 110
ttgtaggactagcttaacttacatg

SEQ ID NO: 267381 - DNA, 25 bp, Artificial
  probe
  misc_feature (1)..(25): SEQ ID NO: 593; WAN0249LJ; Start 85; Stop 109
gttgtaggactagcttaacttacat

SEQ ID NO: 267382 - DNA, 25 bp, Artificial
  probe
  misc_feature (1)..(25): SEQ ID NO: 593; WAN0249LJ; Start 28; Stop 52
agctaagttaggaatacaagggcaa

SEQ ID NO: 267383 - DNA, 25 bp, Artificial
  probe
  misc_feature (1)..(25): SEQ ID NO: 593; WAN0249LJ; Start 27; Stop 51
aagctaagttaggaatacaagggca

SEQ ID NO: 267384 - DNA, 25 bp, Artificial
  probe
  misc_feature (1)..(25): SEQ ID NO: 593; WAN0249LJ; Start 74; Stop 98
agcagtaagtggttgtaggactagc

SEQ ID NO: 267385 - DNA, 25 bp, Artificial
  probe
  misc_feature (1)..(25): SEQ ID NO: 594; WAN024A2P; Start 112; Stop 136
aataaggctaattggaatattgtct

SEQ ID NO: 267386 - DNA, 25 bp, Artificial
  probe
  misc_feature (1)..(25): SEQ ID NO: 594; WAN024A2P; Start 114; Stop 138
taaggctaattggaatattgtctaa

SEQ ID NO: 267387 - DNA, 25 bp, Artificial
  probe
  misc_feature (1)..(25): SEQ ID NO: 594; WAN024A2P; Start 129; Stop 153
tattgtctaaaagggatagtgtgtt

SEQ ID NO: 267388 - DNA, 25 bp, Artificial
  probe
  misc_feature (1)..(25): SEQ ID NO: 594; WAN024A2P; Start 113; Stop 137
ataaggctaattggaatattgtcta

SEQ ID NO: 267389 - DNA, 25 bp, Artificial
  probe
  misc_feature (1)..(25): SEQ ID NO: 594; WAN024A2P; Start 115; Stop 139
aaggctaattggaatattgtctaaa

SEQ ID NO: 267390 - DNA, 25 bp, Artificial
  probe
  misc_feature (1)..(25): SEQ ID NO: 594; WAN024A2P; Start 128; Stop 152
atattgtctaaaagggatagtgtgt

SEQ ID NO: 267391 - DNA, 25 bp, Artificial
  probe
  misc_feature (1)..(25): SEQ ID NO: 594; WAN024A2P; Start 111; Stop 135
taataaggctaattggaatattgtc

SEQ ID NO: 267392 - DNA, 25 bp, Artificial
  probe
  misc_feature (1)..(25): SEQ ID NO: 594; WAN024A2P; Start 124; Stop 148
tggaatattgtctaaaagggatagt

SEQ ID NO: 267393 - DNA, 25 bp, Artificial
  probe
  misc_feature (1)..(25): SEQ ID NO: 594; WAN024A2P; Start 125; Stop 149
ggaatattgtctaaaagggatagtg

SEQ ID NO: 267394 - DNA, 25 bp, Artificial
  probe
  misc_feature (1)..(25): SEQ ID NO: 594; WAN024A2P; Start 17; Stop 41
atcccttttagatataaattcgctt

SEQ ID NO: 267395 - DNA, 25 bp, Artificial
  probe
  misc_feature (1)..(25): SEQ ID NO: 594; WAN024A2P; Start 127; Stop 151
aatattgtctaaaagggatagtgtg

SEQ ID NO: 267396 - DNA, 25 bp, Artificial
  probe
  misc_feature (1)..(25): SEQ ID NO: 594; WAN024A2P; Start 121; Stop 145
aattggaatattgtctaaaagggat

SEQ ID NO: 267397 - DNA, 25 bp, Artificial
  probe
  misc_feature (1)..(25): SEQ ID NO: 594; WAN024A2P; Start 116; Stop 140
aggctaattggaatattgtctaaaa

SEQ ID NO: 267398 - DNA, 25 bp, Artificial
  probe
  misc_feature (1)..(25): SEQ ID NO: 594; WAN024A2P; Start 1; Stop 25
atctcctttctttaatatccctttt

SEQ ID NO: 267399 - DNA, 25 bp, Artificial
  probe
  misc_feature (1)..(25): SEQ ID NO: 594; WAN024A2P; Start 126; Stop 150
gaatattgtctaaaagggatagtgt

SEQ ID NO: 267400 - DNA, 25 bp, Artificial
  probe
  misc_feature (1)..(25): SEQ ID NO: 594; WAN024A2P; Start 123; Stop 147
ttggaatattgtctaaaagggatag

SEQ ID NO: 267401 - DNA, 25 bp, Artificial
  probe
  misc_feature (1)..(25): SEQ ID NO: 594; WAN024A2P; Start 118; Stop 142
gctaattggaatattgtctaaaagg

SEQ ID NO: 267402 - DNA, 25 bp, Artificial
  probe
  misc_feature (1)..(25): SEQ ID NO: 594; WAN024A2P; Start 117; Stop 141
ggctaattggaatattgtctaaaag

SEQ ID NO: 267403 - DNA, 25 bp, Artificial
  probe
  misc_feature (1)..(25): SEQ ID NO: 594; WAN024A2P; Start 105; Stop 129
ttgaattaataaggctaattggaat

SEQ ID NO: 267404 - DNA, 25 bp, Artificial
  probe
  misc_feature (1)..(25): SEQ ID NO: 594; WAN024A2P; Start 18; Stop 42
tcccttttagatataaattcgctta

SEQ ID NO: 267405 - DNA, 25 bp, Artificial
  probe
  misc_feature (1)..(25): SEQ ID NO: 594; WAN024A2P; Start 58; Stop 82
cattgcttttctattatacatctgt

SEQ ID NO: 267406 - DNA, 25 bp, Artificial
  probe
  misc_feature (1)..(25): SEQ ID NO: 594; WAN024A2P; Start 120; Stop 144
taattggaatattgtctaaaaggga

SEQ ID NO: 267407 - DNA, 25 bp, Artificial
  probe
  misc_feature (1)..(25): SEQ ID NO: 594; WAN024A2P; Start 57; Stop 81
tcattgcttttctattatacatctg

SEQ ID NO: 267408 - DNA, 25 bp, Artificial
  probe
  misc_feature (1)..(25): SEQ ID NO: 594; WAN024A2P; Start 2; Stop 26
tctcctttctttaatatccctttta

SEQ ID NO: 267409 - DNA, 25 bp, Artificial
  probe
  misc_feature (1)..(25): SEQ ID NO: 594; WAN024A2P; Start 16; Stop 40
tatcccttttagatataaattcgct

SEQ ID NO: 267410 - DNA, 25 bp, Artificial
  probe
  misc_feature (1)..(25): SEQ ID NO: 594; WAN024A2P; Start 122; Stop 146
attggaatattgtctaaaagggata

SEQ ID NO: 267411 - DNA, 25 bp, Artificial
  probe
  misc_feature (1)..(25): SEQ ID NO: 594; WAN024A2P; Start 119; Stop 143
ctaattggaatattgtctaaaaggg

SEQ ID NO: 267412 - DNA, 25 bp, Artificial
  probe
  misc_feature (1)..(25): SEQ ID NO: 594; WAN024A2P; Start 4; Stop 28
tcctttctttaatatcccttttaga

SEQ ID NO: 267413 - DNA, 25 bp, Artificial
  probe
  misc_feature (1)..(25): SEQ ID NO: 594; WAN024A2P; Start 3; Stop 27
ctcctttctttaatatcccttttag

SEQ ID NO: 267414 - DNA, 25 bp, Artificial
  probe
  misc_feature (1)..(25): SEQ ID NO: 594; WAN024A2P; Start 19; Stop 43
cccttttagatataaattcgcttaa

SEQ ID NO: 267415 - DNA, 25 bp, Artificial
  probe
  misc_feature (1)..(25): SEQ ID NO: 594; WAN024A2P; Start 104; Stop 128
tttgaattaataaggctaattggaa

SEQ ID NO: 267416 - DNA, 25 bp, Artificial
  probe
  misc_feature (1)..(25): SEQ ID NO: 594; WAN024A2P; Start 96; Stop 120
acaatagttttgaattaataaggct

SEQ ID NO: 267417 - DNA, 25 bp, Artificial
  probe
  misc_feature (1)..(25): SEQ ID NO: 594; WAN024A2P; Start 102; Stop 126
gttttgaattaataaggctaattgg

SEQ ID NO: 267418 - DNA, 25 bp, Artificial
  probe
  misc_feature (1)..(25): SEQ ID NO: 594; WAN024A2P; Start 103; Stop 127
ttttgaattaataaggctaattgga

SEQ ID NO: 267419 - DNA, 25 bp, Artificial
  probe
  misc_feature (1)..(25): SEQ ID NO: 595; WAN024A6R; Start 22; Stop 46
gtttcacctgtctttgtatctgatt

SEQ ID NO: 267420 - DNA, 25 bp, Artificial
  probe
  misc_feature (1)..(25): SEQ ID NO: 595; WAN024A6R; Start 23; Stop 47
tttcacctgtctttgtatctgattt

SEQ ID NO: 267421 - DNA, 25 bp, Artificial
  probe
  misc_feature (1)..(25): SEQ ID NO: 595; WAN024A6R; Start 24; Stop 48
ttcacctgtctttgtatctgattta

SEQ ID NO: 267422 - DNA, 25 bp, Artificial
  probe
  misc_feature (1)..(25): SEQ ID NO: 595; WAN024A6R; Start 4; Stop 28
tctagtataacacagaaggtttcac

SEQ ID NO: 267423 - DNA, 25 bp, Artificial
  probe
  misc_feature (1)..(25): SEQ ID NO: 595; WAN024A6R; Start 21; Stop 45
ggtttcacctgtctttgtatctgat

SEQ ID NO: 267424 - DNA, 25 bp, Artificial
  probe
  misc_feature (1)..(25): SEQ ID NO: 595; WAN024A6R; Start 3; Stop 27
ctctagtataacacagaaggtttca

SEQ ID NO: 267425 - DNA, 25 bp, Artificial
  probe
  misc_feature (1)..(25): SEQ ID NO: 595; WAN024A6R; Start 25; Stop 49
tcacctgtctttgtatctgatttat

SEQ ID NO: 267426 - DNA, 25 bp, Artificial
  probe
  misc_feature (1)..(25): SEQ ID NO: 595; WAN024A6R; Start 5; Stop 29
ctagtataacacagaaggtttcacc

SEQ ID NO: 267427 - DNA, 25 bp, Artificial
  probe
  misc_feature (1)..(25): SEQ ID NO: 595; WAN024A6R; Start 2; Stop 26
tctctagtataacacagaaggtttc

SEQ ID NO: 267428 - DNA, 25 bp, Artificial
  probe
  misc_feature (1)..(25): SEQ ID NO: 595; WAN024A6R; Start 1; Stop 25
atctctagtataacacagaaggttt

SEQ ID NO: 267429 - DNA, 25 bp, Artificial
  probe
  misc_feature (1)..(25): SEQ ID NO: 595; WAN024A6R; Start 26; Stop 50
cacctgtctttgtatctgatttata

SEQ ID NO: 267430 - DNA, 25 bp, Artificial
  probe
  misc_feature (1)..(25): SEQ ID NO: 595; WAN024A6R; Start 27; Stop 51
acctgtctttgtatctgatttataa

SEQ ID NO: 267431 - DNA, 25 bp, Artificial
  probe
  misc_feature (1)..(25): SEQ ID NO: 595; WAN024A6R; Start 7; Stop 31
agtataacacagaaggtttcacctg

SEQ ID NO: 267432 - DNA, 25 bp, Artificial
  probe
  misc_feature (1)..(25): SEQ ID NO: 595; WAN024A6R; Start 9; Stop 33
tataacacagaaggtttcacctgtc

SEQ ID NO: 267433 - DNA, 25 bp, Artificial
  probe
  misc_feature (1)..(25): SEQ ID NO: 595; WAN024A6R; Start 18; Stop 42
gaaggtttcacctgtctttgtatct

SEQ ID NO: 267434 - DNA, 25 bp, Artificial
  probe
  misc_feature (1)..(25): SEQ ID NO: 595; WAN024A6R; Start 17; Stop 41
agaaggtttcacctgtctttgtatc

SEQ ID NO: 267435 - DNA, 25 bp, Artificial
  probe
  misc_feature (1)..(25): SEQ ID NO: 595; WAN024A6R; Start 8; Stop 32
gtataacacagaaggtttcacctgt

SEQ ID NO: 267436 - DNA, 25 bp, Artificial
  probe
  misc_feature (1)..(25): SEQ ID NO: 595; WAN024A6R; Start 19; Stop 43
aaggtttcacctgtctttgtatctg

SEQ ID NO: 267437 - DNA, 25 bp, Artificial
  probe
  misc_feature (1)..(25): SEQ ID NO: 595; WAN024A6R; Start 16; Stop 40
cagaaggtttcacctgtctttgtat

SEQ ID NO: 267438 - DNA, 25 bp, Artificial
  probe
  misc_feature (1)..(25): SEQ ID NO: 595; WAN024A6R; Start 6; Stop 30
tagtataacacagaaggtttcacct

SEQ ID NO: 267439 - DNA, 25 bp, Artificial
  probe
  misc_feature (1)..(25): SEQ ID NO: 595; WAN024A6R; Start 20; Stop 44
aggtttcacctgtctttgtatctga

SEQ ID NO: 267440 - DNA, 25 bp, Artificial
  probe
  misc_feature (1)..(25): SEQ ID NO: 595; WAN024A6R; Start 10; Stop 34
ataacacagaaggtttcacctgtct

SEQ ID NO: 267441 - DNA, 25 bp, Artificial
  probe
  misc_feature (1)..(25): SEQ ID NO: 595; WAN024A6R; Start 15; Stop 39
acagaaggtttcacctgtctttgta

SEQ ID NO: 267442 - DNA, 25 bp, Artificial
  probe
  misc_feature (1)..(25): SEQ ID NO: 595; WAN024A6R; Start 11; Stop 35
taacacagaaggtttcacctgtctt

SEQ ID NO: 267443 - DNA, 25 bp, Artificial
  probe
  misc_feature (1)..(25): SEQ ID NO: 595; WAN024A6R; Start 12; Stop 36
aacacagaaggtttcacctgtcttt

SEQ ID NO: 267444 - DNA, 25 bp, Artificial
  probe
  misc_feature (1)..(25): SEQ ID NO: 595; WAN024A6R; Start 14; Stop 38
cacagaaggtttcacctgtctttgt

SEQ ID NO: 267445 - DNA, 25 bp, Artificial
  probe
  misc_feature (1)..(25): SEQ ID NO: 595; WAN024A6R; Start 13; Stop 37
acacagaaggtttcacctgtctttg

SEQ ID NO: 267446 - DNA, 25 bp, Artificial
  probe
  misc_feature (1)..(25): SEQ ID NO: 596; WAN024ACU; Start 45; Stop 69
ggttaaggaagagactttagagcat

SEQ ID NO: 267447 - DNA, 25 bp, Artificial
  probe
  misc_feature (1)..(25): SEQ ID NO: 596; WAN024ACU; Start 42; Stop 66
atgggttaaggaagagactttagag

SEQ ID NO: 267448 - DNA, 25 bp, Artificial
  probe
  misc_feature (1)..(25): SEQ ID NO: 596; WAN024ACU; Start 41; Stop 65
aatgggttaaggaagagactttaga

SEQ ID NO: 267449 - DNA, 25 bp, Artificial
  probe
  misc_feature (1)..(25): SEQ ID NO: 596; WAN024ACU; Start 46; Stop 70
gttaaggaagagactttagagcatt

SEQ ID NO: 267450 - DNA, 25 bp, Artificial
  probe
  misc_feature (1)..(25): SEQ ID NO: 596; WAN024ACU; Start 40; Stop 64
aaatgggttaaggaagagactttag

SEQ ID NO: 267451 - DNA, 25 bp, Artificial
  probe
  misc_feature (1)..(25): SEQ ID NO: 596; WAN024ACU; Start 44; Stop 68
gggttaaggaagagactttagagca

SEQ ID NO: 267452 - DNA, 25 bp, Artificial
  probe
  misc_feature (1)..(25): SEQ ID NO: 596; WAN024ACU; Start 43; Stop 67
tgggttaaggaagagactttagagc

SEQ ID NO: 267453 - DNA, 25 bp, Artificial
  probe
  misc_feature (1)..(25): SEQ ID NO: 596; WAN024ACU; Start 47; Stop 71
ttaaggaagagactttagagcattt

SEQ ID NO: 267454 - DNA, 25 bp, Artificial
  probe
  misc_feature (1)..(25): SEQ ID NO: 596; WAN024ACU; Start 39; Stop 63
aaaatgggttaaggaagagacttta

SEQ ID NO: 267455 - DNA, 25 bp, Artificial
  probe
  misc_feature (1)..(25): SEQ ID NO: 596; WAN024ACU; Start 48; Stop 72
taaggaagagactttagagcatttt

SEQ ID NO: 267456 - DNA, 25 bp, Artificial
  probe
  misc_feature (1)..(25): SEQ ID NO: 597; WAN024AEX; Start 65; Stop 89
gcttcaattaactatatctatgcgt

SEQ ID NO: 267457 - DNA, 25 bp, Artificial
  probe
  misc_feature (1)..(25): SEQ ID NO: 597; WAN024AEX; Start 64; Stop 88
agcttcaattaactatatctatgcg

SEQ ID NO: 267458 - DNA, 25 bp, Artificial
  probe
  misc_feature (1)..(25): SEQ ID NO: 597; WAN024AEX; Start 67; Stop 91
ttcaattaactatatctatgcgtca

SEQ ID NO: 267459 - DNA, 25 bp, Artificial
  probe
  misc_feature (1)..(25): SEQ ID NO: 597; WAN024AEX; Start 66; Stop 90
cttcaattaactatatctatgcgtc

SEQ ID NO: 267460 - DNA, 25 bp, Artificial
  probe
  misc_feature (1)..(25): SEQ ID NO: 597; WAN024AEX; Start 49; Stop 73
tcagatttcaaacaaagcttcaatt

SEQ ID NO: 267461 - DNA, 25 bp, Artificial
  probe
  misc_feature (1)..(25): SEQ ID NO: 597; WAN024AEX; Start 48; Stop 72
atcagatttcaaacaaagcttcaat

SEQ ID NO: 267462 - DNA, 25 bp, Artificial
  probe
  misc_feature (1)..(25): SEQ ID NO: 597; WAN024AEX; Start 47; Stop 71
tatcagatttcaaacaaagcttcaa

SEQ ID NO: 267463 - DNA, 25 bp, Artificial
  probe
  misc_feature (1)..(25): SEQ ID NO: 597; WAN024AEX; Start 46; Stop 70
ttatcagatttcaaacaaagcttca

SEQ ID NO: 267464 - DNA, 25 bp, Artificial
  probe
  misc_feature (1)..(25): SEQ ID NO: 597; WAN024AEX; Start 50; Stop 74
cagatttcaaacaaagcttcaatta

SEQ ID NO: 267465 - DNA, 25 bp, Artificial
  probe
  misc_feature (1)..(25): SEQ ID NO: 597; WAN024AEX; Start 45; Stop 69
tttatcagatttcaaacaaagcttc

SEQ ID NO: 267466 - DNA, 25 bp, Artificial
  probe
  misc_feature (1)..(25): SEQ ID NO: 597; WAN024AEX; Start 53; Stop 77
atttcaaacaaagcttcaattaact

SEQ ID NO: 267467 - DNA, 25 bp, Artificial
  probe
  misc_feature (1)..(25): SEQ ID NO: 597; WAN024AEX; Start 52; Stop 76
gatttcaaacaaagcttcaattaac

SEQ ID NO: 267468 - DNA, 25 bp, Artificial
  probe
  misc_feature (1)..(25): SEQ ID NO: 597; WAN024AEX; Start 51; Stop 75
agatttcaaacaaagcttcaattaa

SEQ ID NO: 267469 - DNA, 25 bp, Artificial
  probe
  misc_feature (1)..(25): SEQ ID NO: 597; WAN024AEX; Start 43; Stop 67
attttatcagatttcaaacaaagct

SEQ ID NO: 267470 - DNA, 25 bp, Artificial
  probe
  misc_feature (1)..(25): SEQ ID NO: 597; WAN024AEX; Start 54; Stop 78
tttcaaacaaagcttcaattaacta

SEQ ID NO: 267471 - DNA, 25 bp, Artificial
  probe
  misc_feature (1)..(25): SEQ ID NO: 597; WAN024AEX; Start 63; Stop 87
aagcttcaattaactatatctatgc

SEQ ID NO: 267472 - DNA, 25 bp, Artificial
  probe
  misc_feature (1)..(25): SEQ ID NO: 597; WAN024AEX; Start 55; Stop 79
ttcaaacaaagcttcaattaactat

SEQ ID NO: 267473 - DNA, 25 bp, Artificial
  probe
  misc_feature (1)..(25): SEQ ID NO: 597; WAN024AEX; Start 56; Stop 80
tcaaacaaagcttcaattaactata

SEQ ID NO: 267474 - DNA, 25 bp, Artificial
  probe
  misc_feature (1)..(25): SEQ ID NO: 597; WAN024AEX; Start 44; Stop 68
ttttatcagatttcaaacaaagctt

SEQ ID NO: 267475 - DNA, 25 bp, Artificial
  probe
  misc_feature (1)..(25): SEQ ID NO: 598; WAN0249IO; Start 14; Stop 38
agctgaaatttgatatagtagtcct

SEQ ID NO: 267476 - DNA, 25 bp, Artificial
  probe
  misc_feature (1)..(25): SEQ ID NO: 598; WAN0249IO; Start 30; Stop 54
agtagtcctatgtaaaagacaaagg

SEQ ID NO: 267477 - DNA, 25 bp, Artificial
  probe
  misc_feature (1)..(25): SEQ ID NO: 598; WAN0249IO; Start 15; Stop 39
gctgaaatttgatatagtagtccta

SEQ ID NO: 267478 - DNA, 25 bp, Artificial
  probe
  misc_feature (1)..(25): SEQ ID NO: 598; WAN0249IO; Start 13; Stop 37
tagctgaaatttgatatagtagtcc

SEQ ID NO: 267479 - DNA, 25 bp, Artificial
  probe
  misc_feature (1)..(25): SEQ ID NO: 598; WAN0249IO; Start 36; Stop 60
cctatgtaaaagacaaaggagaaaa

SEQ ID NO: 267480 - DNA, 25 bp, Artificial
  probe
  misc_feature (1)..(25): SEQ ID NO: 598; WAN0249IO; Start 38; Stop 62
tatgtaaaagacaaaggagaaaaca

SEQ ID NO: 267481 - DNA, 25 bp, Artificial
  probe
  misc_feature (1)..(25): SEQ ID NO: 598; WAN0249IO; Start 2; Stop 26
tcttgtaaaagtagctgaaatttga

SEQ ID NO: 267482 - DNA, 25 bp, Artificial
  probe
  misc_feature (1)..(25): SEQ ID NO: 598; WAN0249IO; Start 37; Stop 61
ctatgtaaaagacaaaggagaaaac

SEQ ID NO: 267483 - DNA, 25 bp, Artificial
  probe
  misc_feature (1)..(25): SEQ ID NO: 598; WAN0249IO; Start 11; Stop 35
agtagctgaaatttgatatagtagt

SEQ ID NO: 267484 - DNA, 25 bp, Artificial
  probe
  misc_feature (1)..(25): SEQ ID NO: 598; WAN0249IO; Start 12; Stop 36
gtagctgaaatttgatatagtagtc

SEQ ID NO: 267485 - DNA, 25 bp, Artificial
  probe
  misc_feature (1)..(25): SEQ ID NO: 598; WAN0249IO; Start 3; Stop 27
cttgtaaaagtagctgaaatttgat

SEQ ID NO: 267486 - DNA, 25 bp, Artificial
  probe
  misc_feature (1)..(25): SEQ ID NO: 598; WAN0249IO; Start 1; Stop 25
atcttgtaaaagtagctgaaatttg

SEQ ID NO: 267487 - DNA, 25 bp, Artificial
  probe
  misc_feature (1)..(25): SEQ ID NO: 598; WAN0249IO; Start 29; Stop 53
tagtagtcctatgtaaaagacaaag

SEQ ID NO: 267488 - DNA, 25 bp, Artificial
  probe
  misc_feature (1)..(25): SEQ ID NO: 598; WAN0249IO; Start 33; Stop 57
agtcctatgtaaaagacaaaggaga

SEQ ID NO: 267489 - DNA, 25 bp, Artificial
  probe
  misc_feature (1)..(25): SEQ ID NO: 598; WAN0249IO; Start 34; Stop 58
gtcctatgtaaaagacaaaggagaa

SEQ ID NO: 267490 - DNA, 25 bp, Artificial
  probe
  misc_feature (1)..(25): SEQ ID NO: 598; WAN0249IO; Start 31; Stop 55
gtagtcctatgtaaaagacaaagga

SEQ ID NO: 267491 - DNA, 25 bp, Artificial
  probe
  misc_feature (1)..(25): SEQ ID NO: 598; WAN0249IO; Start 35; Stop 59
tcctatgtaaaagacaaaggagaaa

SEQ ID NO: 267492 - DNA, 25 bp, Artificial
  probe
  misc_feature (1)..(25): SEQ ID NO: 598; WAN0249IO; Start 32; Stop 56
tagtcctatgtaaaagacaaaggag

SEQ ID NO: 267493 - DNA, 25 bp, Artificial
  probe
  misc_feature (1)..(25): SEQ ID NO: 598; WAN0249IO; Start 28; Stop 52
atagtagtcctatgtaaaagacaaa

SEQ ID NO: 267494 - DNA, 25 bp, Artificial
  probe
  misc_feature (1)..(25): SEQ ID NO: 598; WAN0249IO; Start 4; Stop 28
ttgtaaaagtagctgaaatttgata

SEQ ID NO: 267495 - DNA, 25 bp, Artificial
  probe
  misc_feature (1)..(25): SEQ ID NO: 598; WAN0249IO; Start 5; Stop 29
tgtaaaagtagctgaaatttgatat

SEQ ID NO: 267496 - DNA, 25 bp, Artificial
  probe
  misc_feature (1)..(25): SEQ ID NO: 599; WAN0249T5; Start 161; Stop 185
gttatctggcttgactttcttgatg

SEQ ID NO: 267497 - DNA, 25 bp, Artificial
  probe
  misc_feature (1)..(25): SEQ ID NO: 599; WAN0249T5; Start 162; Stop 186
ttatctggcttgactttcttgatgg

SEQ ID NO: 267498 - DNA, 25 bp, Artificial
  probe
  misc_feature (1)..(25): SEQ ID NO: 599; WAN0249T5; Start 160; Stop 184
agttatctggcttgactttcttgat

SEQ ID NO: 267499 - DNA, 25 bp, Artificial
  probe
  misc_feature (1)..(25): SEQ ID NO: 599; WAN0249T5; Start 157; Stop 181
ttgagttatctggcttgactttctt

SEQ ID NO: 267500 - DNA, 25 bp, Artificial
  probe
  misc_feature (1)..(25): SEQ ID NO: 599; WAN0249T5; Start 156; Stop 180
tttgagttatctggcttgactttct

SEQ ID NO: 267501 - DNA, 25 bp, Artificial
  probe
  misc_feature (1)..(25): SEQ ID NO: 599; WAN0249T5; Start 159; Stop 183
gagttatctggcttgactttcttga

SEQ ID NO: 267502 - DNA, 25 bp, Artificial
  probe
  misc_feature (1)..(25): SEQ ID NO: 599; WAN0249T5; Start 163; Stop 187
tatctggcttgactttcttgatgga

SEQ ID NO: 267503 - DNA, 25 bp, Artificial
  probe
  misc_feature (1)..(25): SEQ ID NO: 599; WAN0249T5; Start 158; Stop 182
tgagttatctggcttgactttcttg

SEQ ID NO: 267504 - DNA, 25 bp, Artificial
  probe
  misc_feature (1)..(25): SEQ ID NO: 599; WAN0249T5; Start 164; Stop 188
atctggcttgactttcttgatggaa

SEQ ID NO: 267505 - DNA, 25 bp, Artificial
  probe
  misc_feature (1)..(25): SEQ ID NO: 599; WAN0249T5; Start 168; Stop 192
ggcttgactttcttgatggaaatta

SEQ ID NO: 267506 - DNA, 25 bp, Artificial
  probe
  misc_feature (1)..(25): SEQ ID NO: 599; WAN0249T5; Start 167; Stop 191
tggcttgactttcttgatggaaatt

SEQ ID NO: 267507 - DNA, 25 bp, Artificial
  probe
  misc_feature (1)..(25): SEQ ID NO: 599; WAN0249T5; Start 215; Stop 239
attacaacgagaaaagaggaccatt

SEQ ID NO: 267508 - DNA, 25 bp, Artificial
  probe
  misc_feature (1)..(25): SEQ ID NO: 599; WAN0249T5; Start 216; Stop 240
ttacaacgagaaaagaggaccattt

SEQ ID NO: 267509 - DNA, 25 bp, Artificial
  probe
  misc_feature (1)..(25): SEQ ID NO: 599; WAN0249T5; Start 214; Stop 238
aattacaacgagaaaagaggaccat

SEQ ID NO: 267510 - DNA, 25 bp, Artificial
  probe
  misc_feature (1)..(25): SEQ ID NO: 599; WAN0249T5; Start 166; Stop 190
ctggcttgactttcttgatggaaat

SEQ ID NO: 267511 - DNA, 25 bp, Artificial
  probe
  misc_feature (1)..(25): SEQ ID NO: 599; WAN0249T5; Start 169; Stop 193
gcttgactttcttgatggaaattat

SEQ ID NO: 267512 - DNA, 25 bp, Artificial
  probe
  misc_feature (1)..(25): SEQ ID NO: 599; WAN0249T5; Start 155; Stop 179
ttttgagttatctggcttgactttc

SEQ ID NO: 267513 - DNA, 25 bp, Artificial
  probe
  misc_feature (1)..(25): SEQ ID NO: 599; WAN0249T5; Start 3; Stop 27
ctttgcttttcactgagtatcaagt

SEQ ID NO: 267514 - DNA, 25 bp, Artificial
  probe
  misc_feature (1)..(25): SEQ ID NO: 599; WAN0249T5; Start 2; Stop 26
tctttgcttttcactgagtatcaag

SEQ ID NO: 267515 - DNA, 25 bp, Artificial
  probe
  misc_feature (1)..(25): SEQ ID NO: 599; WAN0249T5; Start 4; Stop 28
tttgcttttcactgagtatcaagtt

SEQ ID NO: 267516 - DNA, 25 bp, Artificial
  probe
  misc_feature (1)..(25): SEQ ID NO: 599; WAN0249T5; Start 1; Stop 25
atctttgcttttcactgagtatcaa

SEQ ID NO: 267517 - DNA, 25 bp, Artificial
  probe
  misc_feature (1)..(25): SEQ ID NO: 599; WAN0249T5; Start 6; Stop 30
tgcttttcactgagtatcaagttaa

SEQ ID NO: 267518 - DNA, 25 bp, Artificial
  probe
  misc_feature (1)..(25): SEQ ID NO: 599; WAN0249T5; Start 5; Stop 29
ttgcttttcactgagtatcaagtta

SEQ ID NO: 267519 - DNA, 25 bp, Artificial
  probe
  misc_feature (1)..(25): SEQ ID NO: 599; WAN0249T5; Start 213; Stop 237
taattacaacgagaaaagaggacca

SEQ ID NO: 267520 - DNA, 25 bp, Artificial
  probe
  misc_feature (1)..(25): SEQ ID NO: 599; WAN0249T5; Start 165; Stop 189
tctggcttgactttcttgatggaaa

SEQ ID NO: 267521 - DNA, 25 bp, Artificial
  probe
  misc_feature (1)..(25): SEQ ID NO: 599; WAN0249T5; Start 212; Stop 236
ataattacaacgagaaaagaggacc

SEQ ID NO: 267522 - DNA, 25 bp, Artificial
  probe
  misc_feature (1)..(25): SEQ ID NO: 599; WAN0249T5; Start 84; Stop 108
tgatgaaaagtttgataatatgcgt

SEQ ID NO: 267523 - DNA, 25 bp, Artificial
  probe
  misc_feature (1)..(25): SEQ ID NO: 599; WAN0249T5; Start 127; Stop 151
actttatattatcctgaaatggtgt

SEQ ID NO: 267524 - DNA, 25 bp, Artificial
  probe
  misc_feature (1)..(25): SEQ ID NO: 599; WAN0249T5; Start 83; Stop 107
gtgatgaaaagtttgataatatgcg

SEQ ID NO: 267525 - DNA, 25 bp, Artificial
  probe
  misc_feature (1)..(25): SEQ ID NO: 599; WAN0249T5; Start 7; Stop 31
gcttttcactgagtatcaagttaaa

SEQ ID NO: 267526 - DNA, 25 bp, Artificial
  probe
  misc_feature (1)..(25): SEQ ID NO: 599; WAN0249T5; Start 82; Stop 106
ggtgatgaaaagtttgataatatgc

SEQ ID NO: 267527 - DNA, 25 bp, Artificial
  probe
  misc_feature (1)..(25): SEQ ID NO: 599; WAN0249T5; Start 85; Stop 109
gatgaaaagtttgataatatgcgtt

SEQ ID NO: 267528 - DNA, 25 bp, Artificial
  probe
  misc_feature (1)..(25): SEQ ID NO: 599; WAN0249T5; Start 211; Stop 235
aataattacaacgagaaaagaggac

SEQ ID NO: 267529 - DNA, 25 bp, Artificial
  probe
  misc_feature (1)..(25): SEQ ID NO: 600; WAN024B2G; Start 230; Stop 254
aaccttacctagctgactacatcaa

SEQ ID NO: 267530 - DNA, 25 bp, Artificial
  probe
  misc_feature (1)..(25): SEQ ID NO: 600; WAN024B2G; Start 229; Stop 253
gaaccttacctagctgactacatca

SEQ ID NO: 267531 - DNA, 25 bp, Artificial
  probe
  misc_feature (1)..(25): SEQ ID NO: 600; WAN024B2G; Start 212; Stop 236
atgataaagagacggacgaacctta

SEQ ID NO: 267532 - DNA, 25 bp, Artificial
  probe
  misc_feature (1)..(25): SEQ ID NO: 600; WAN024B2G; Start 205; Stop 229
tacatcaatgataaagagacggacg

SEQ ID NO: 267533 - DNA, 25 bp, Artificial
  probe
  misc_feature (1)..(25): SEQ ID NO: 600; WAN024B2G; Start 228; Stop 252
cgaaccttacctagctgactacatc

SEQ ID NO: 267534 - DNA, 25 bp, Artificial
  probe
  misc_feature (1)..(25): SEQ ID NO: 600; WAN024B2G; Start 208; Stop 232
atcaatgataaagagacggacgaac

SEQ ID NO: 267535 - DNA, 25 bp, Artificial
  probe
  misc_feature (1)..(25): SEQ ID NO: 600; WAN024B2G; Start 207; Stop 231
catcaatgataaagagacggacgaa

SEQ ID NO: 267536 - DNA, 25 bp, Artificial
  probe
  misc_feature (1)..(25): SEQ ID NO: 600; WAN024B2G; Start 204; Stop 228
ttacatcaatgataaagagacggac

SEQ ID NO: 267537 - DNA, 25 bp, Artificial
  probe
  misc_feature (1)..(25): SEQ ID NO: 600; WAN024B2G; Start 211; Stop 235
aatgataaagagacggacgaacctt

SEQ ID NO: 267538 - DNA, 25 bp, Artificial
  probe
  misc_feature (1)..(25): SEQ ID NO: 600; WAN024B2G; Start 213; Stop 237
tgataaagagacggacgaaccttac

SEQ ID NO: 267539 - DNA, 25 bp, Artificial
  probe
  misc_feature (1)..(25): SEQ ID NO: 600; WAN024B2G; Start 227; Stop 251
acgaaccttacctagctgactacat

SEQ ID NO: 267540 - DNA, 25 bp, Artificial
  probe
  misc_feature (1)..(25): SEQ ID NO: 600; WAN024B2G; Start 206; Stop 230
acatcaatgataaagagacggacga

SEQ ID NO: 267541 - DNA, 25 bp, Artificial
  probe
  misc_feature (1)..(25): SEQ ID NO: 600; WAN024B2G; Start 210; Stop 234
caatgataaagagacggacgaacct

SEQ ID NO: 267542 - DNA, 25 bp, Artificial
  probe
  misc_feature (1)..(25): SEQ ID NO: 600; WAN024B2G; Start 216; Stop 240
taaagagacggacgaaccttaccta

SEQ ID NO: 267543 - DNA, 25 bp, Artificial
  probe
  misc_feature (1)..(25): SEQ ID NO: 600; WAN024B2G; Start 209; Stop 233
tcaatgataaagagacggacgaacc

SEQ ID NO: 267544 - DNA, 25 bp, Artificial
  probe
  misc_feature (1)..(25): SEQ ID NO: 600; WAN024B2G; Start 203; Stop 227
tttacatcaatgataaagagacgga

SEQ ID NO: 267545 - DNA, 25 bp, Artificial
  probe
  misc_feature (1)..(25): SEQ ID NO: 600; WAN024B2G; Start 232; Stop 256
ccttacctagctgactacatcaaac

SEQ ID NO: 267546 - DNA, 25 bp, Artificial
  probe
  misc_feature (1)..(25): SEQ ID NO: 600; WAN024B2G; Start 214; Stop 238
gataaagagacggacgaaccttacc

SEQ ID NO: 267547 - DNA, 25 bp, Artificial
  probe
  misc_feature (1)..(25): SEQ ID NO: 600; WAN024B2G; Start 231; Stop 255
accttacctagctgactacatcaaa

SEQ ID NO: 267548 - DNA, 25 bp, Artificial
  probe
  misc_feature (1)..(25): SEQ ID NO: 600; WAN024B2G; Start 233; Stop 257
cttacctagctgactacatcaaacg

SEQ ID NO: 267549 - DNA, 25 bp, Artificial
  probe
  misc_feature (1)..(25): SEQ ID NO: 600; WAN024B2G; Start 226; Stop 250
gacgaaccttacctagctgactaca

SEQ ID NO: 267550 - DNA, 25 bp, Artificial
  probe
  misc_feature (1)..(25): SEQ ID NO: 600; WAN024B2G; Start 215; Stop 239
ataaagagacggacgaaccttacct

SEQ ID NO: 267551 - DNA, 25 bp, Artificial
  probe
  misc_feature (1)..(25): SEQ ID NO: 600; WAN024B2G; Start 234; Stop 258
ttacctagctgactacatcaaacgt

SEQ ID NO: 267552 - DNA, 25 bp, Artificial
  probe
  misc_feature (1)..(25): SEQ ID NO: 600; WAN024B2G; Start 225; Stop 249
ggacgaaccttacctagctgactac

SEQ ID NO: 267553 - DNA, 25 bp, Artificial
  probe
  misc_feature (1)..(25): SEQ ID NO: 600; WAN024B2G; Start 217; Stop 241
aaagagacggacgaaccttacctag

SEQ ID NO: 267554 - DNA, 25 bp, Artificial
  probe
  misc_feature (1)..(25): SEQ ID NO: 600; WAN024B2G; Start 202; Stop 226
ctttacatcaatgataaagagacgg

SEQ ID NO: 267555 - DNA, 25 bp, Artificial
  probe
  misc_feature (1)..(25): SEQ ID NO: 600; WAN024B2G; Start 192; Stop 216
aaacgataaactttacatcaatgat

SEQ ID NO: 267556 - DNA, 25 bp, Artificial
  probe
  misc_feature (1)..(25): SEQ ID NO: 600; WAN024B2G; Start 201; Stop 225
actttacatcaatgataaagagacg

SEQ ID NO: 267557 - DNA, 25 bp, Artificial
  probe
  misc_feature (1)..(25): SEQ ID NO: 600; WAN024B2G; Start 235; Stop 259
tacctagctgactacatcaaacgtt

SEQ ID NO: 267558 - DNA, 25 bp, Artificial
  probe
  misc_feature (1)..(25): SEQ ID NO: 600; WAN024B2G; Start 200; Stop 224
aactttacatcaatgataaagagac

SEQ ID NO: 267559 - DNA, 25 bp, Artificial
  probe
  misc_feature (1)..(25): SEQ ID NO: 601; WAN024D2H; Start 440; Stop 464
atatctctgatacagtcacagcagt

SEQ ID NO: 267560 - DNA, 25 bp, Artificial
  probe
  misc_feature (1)..(25): SEQ ID NO: 601; WAN024D2H; Start 236; Stop 260
ttacagatattcgtagtgctcagga

SEQ ID NO: 267561 - DNA, 25 bp, Artificial
  probe
  misc_feature (1)..(25): SEQ ID NO: 601; WAN024D2H; Start 441; Stop 465
tatctctgatacagtcacagcagtc

SEQ ID NO: 267562 - DNA, 25 bp, Artificial
  probe
  misc_feature (1)..(25): SEQ ID NO: 601; WAN024D2H; Start 237; Stop 261
tacagatattcgtagtgctcaggag

SEQ ID NO: 267563 - DNA, 25 bp, Artificial
  probe
  misc_feature (1)..(25): SEQ ID NO: 601; WAN024D2H; Start 748; Stop 772
gatcttcgtaatggtcgtattgttg

SEQ ID NO: 267564 - DNA, 25 bp, Artificial
  probe
  misc_feature (1)..(25): SEQ ID NO: 601; WAN024D2H; Start 749; Stop 773
atcttcgtaatggtcgtattgttgc

SEQ ID NO: 267565 - DNA, 25 bp, Artificial
  probe
  misc_feature (1)..(25): SEQ ID NO: 601; WAN024D2H; Start 439; Stop 463
aatatctctgatacagtcacagcag

SEQ ID NO: 267566 - DNA, 25 bp, Artificial
  probe
  misc_feature (1)..(25): SEQ ID NO: 601; WAN024D2H; Start 437; Stop 461
tcaatatctctgatacagtcacagc

SEQ ID NO: 267567 - DNA, 25 bp, Artificial
  probe
  misc_feature (1)..(25): SEQ ID NO: 601; WAN024D2H; Start 438; Stop 462
caatatctctgatacagtcacagca

SEQ ID NO: 267568 - DNA, 25 bp, Artificial
  probe
  misc_feature (1)..(25): SEQ ID NO: 601; WAN024D2H; Start 239; Stop 263
cagatattcgtagtgctcaggagac

SEQ ID NO: 267569 - DNA, 25 bp, Artificial
  probe
  misc_feature (1)..(25): SEQ ID NO: 601; WAN024D2H; Start 447; Stop 471
tgatacagtcacagcagtcaatgat

SEQ ID NO: 267570 - DNA, 25 bp, Artificial
  probe
  misc_feature (1)..(25): SEQ ID NO: 601; WAN024D2H; Start 435; Stop 459
tctcaatatctctgatacagtcaca

SEQ ID NO: 267571 - DNA, 25 bp, Artificial
  probe
  misc_feature (1)..(25): SEQ ID NO: 601; WAN024D2H; Start 166; Stop 190
tatcaattcgttacggttggtgttc

SEQ ID NO: 267572 - DNA, 25 bp, Artificial
  probe
  misc_feature (1)..(25): SEQ ID NO: 601; WAN024D2H; Start 165; Stop 189
ctatcaattcgttacggttggtgtt

SEQ ID NO: 267573 - DNA, 25 bp, Artificial
  probe
  misc_feature (1)..(25): SEQ ID NO: 601; WAN024D2H; Start 448; Stop 472
gatacagtcacagcagtcaatgatc

SEQ ID NO: 267574 - DNA, 25 bp, Artificial
  probe
  misc_feature (1)..(25): SEQ ID NO: 601; WAN024D2H; Start 436; Stop 460
ctcaatatctctgatacagtcacag

SEQ ID NO: 267575 - DNA, 25 bp, Artificial
  probe
  misc_feature (1)..(25): SEQ ID NO: 601; WAN024D2H; Start 238; Stop 262
acagatattcgtagtgctcaggaga

SEQ ID NO: 267576 - DNA, 25 bp, Artificial
  probe
  misc_feature (1)..(25): SEQ ID NO: 601; WAN024D2H; Start 240; Stop 264
agatattcgtagtgctcaggagact

SEQ ID NO: 267577 - DNA, 25 bp, Artificial
  probe
  misc_feature (1)..(25): SEQ ID NO: 601; WAN024D2H; Start 241; Stop 265
gatattcgtagtgctcaggagacta

SEQ ID NO: 267578 - DNA, 25 bp, Artificial
  probe
  misc_feature (1)..(25): SEQ ID NO: 601; WAN024D2H; Start 235; Stop 259
tttacagatattcgtagtgctcagg

SEQ ID NO: 267579 - DNA, 25 bp, Artificial
  probe
  misc_feature (1)..(25): SEQ ID NO: 601; WAN024D2H; Start 115; Stop 139
attcgccaagtccttaaagtaaatg

SEQ ID NO: 267580 - DNA, 25 bp, Artificial
  probe
  misc_feature (1)..(25): SEQ ID NO: 601; WAN024D2H; Start 111; Stop 135
agatattcgccaagtccttaaagta

SEQ ID NO: 267581 - DNA, 25 bp, Artificial
  probe
  misc_feature (1)..(25): SEQ ID NO: 601; WAN024D2H; Start 442; Stop 466
atctctgatacagtcacagcagtca

SEQ ID NO: 267582 - DNA, 25 bp, Artificial
  probe
  misc_feature (1)..(25): SEQ ID NO: 601; WAN024D2H; Start 360; Stop 384
tggtaaggatatcgaactcaagtac

SEQ ID NO: 267583 - DNA, 25 bp, Artificial
  probe
  misc_feature (1)..(25): SEQ ID NO: 601; WAN024D2H; Start 116; Stop 140
ttcgccaagtccttaaagtaaatga

SEQ ID NO: 267584 - DNA, 25 bp, Artificial
  probe
  misc_feature (1)..(25): SEQ ID NO: 601; WAN024D2H; Start 359; Stop 383
ctggtaaggatatcgaactcaagta

SEQ ID NO: 267585 - DNA, 25 bp, Artificial
  probe
  misc_feature (1)..(25): SEQ ID NO: 601; WAN024D2H; Start 110; Stop 134
aagatattcgccaagtccttaaagt

SEQ ID NO: 267586 - DNA, 25 bp, Artificial
  probe
  misc_feature (1)..(25): SEQ ID NO: 601; WAN024D2H; Start 109; Stop 133
gaagatattcgccaagtccttaaag

SEQ ID NO: 267587 - DNA, 25 bp, Artificial
  probe
  misc_feature (1)..(25): SEQ ID NO: 601; WAN024D2H; Start 134; Stop 158
taaatgacacagaagataaggaagc

SEQ ID NO: 267588 - DNA, 25 bp, Artificial
  probe
  misc_feature (1)..(25): SEQ ID NO: 601; WAN024D2H; Start 494; Stop 518
acttgattgattacgtcagttctca

SEQ ID NO: 267589 - DNA, 25 bp, Artificial
  probe
  misc_feature (1)..(25): SEQ ID NO: 601; WAN024D2H; Start 112; Stop 136
gatattcgccaagtccttaaagtaa

SEQ ID NO: 267590 - DNA, 25 bp, Artificial
  probe
  misc_feature (1)..(25): SEQ ID NO: 601; WAN024D2H; Start 444; Stop 468
ctctgatacagtcacagcagtcaat

SEQ ID NO: 267591 - DNA, 25 bp, Artificial
  probe
  misc_feature (1)..(25): SEQ ID NO: 601; WAN024D2H; Start 434; Stop 458
ttctcaatatctctgatacagtcac

SEQ ID NO: 267592 - DNA, 25 bp, Artificial
  probe
  misc_feature (1)..(25): SEQ ID NO: 602; WAN024FJF; Start 396; Stop 420
taagaaggctcagaaggataaggta

SEQ ID NO: 267593 - DNA, 25 bp, Artificial
  probe
  misc_feature (1)..(25): SEQ ID NO: 602; WAN024FJF; Start 397; Stop 421
aagaaggctcagaaggataaggtaa

SEQ ID NO: 267594 - DNA, 25 bp, Artificial
  probe
  misc_feature (1)..(25): SEQ ID NO: 602; WAN024FJF; Start 391; Stop 415
attggtaagaaggctcagaaggata

SEQ ID NO: 267595 - DNA, 25 bp, Artificial
  probe
  misc_feature (1)..(25): SEQ ID NO: 602; WAN024FJF; Start 392; Stop 416
ttggtaagaaggctcagaaggataa

SEQ ID NO: 267596 - DNA, 25 bp, Artificial
  probe
  misc_feature (1)..(25): SEQ ID NO: 602; WAN024FJF; Start 395; Stop 419
gtaagaaggctcagaaggataaggt

SEQ ID NO: 267597 - DNA, 25 bp, Artificial
  probe
  misc_feature (1)..(25): SEQ ID NO: 602; WAN024FJF; Start 393; Stop 417
tggtaagaaggctcagaaggataag

SEQ ID NO: 267598 - DNA, 25 bp, Artificial
  probe
  misc_feature (1)..(25): SEQ ID NO: 602; WAN024FJF; Start 387; Stop 411
caagattggtaagaaggctcagaag

SEQ ID NO: 267599 - DNA, 25 bp, Artificial
  probe
  misc_feature (1)..(25): SEQ ID NO: 602; WAN024FJF; Start 381; Stop 405
tacagtcaagattggtaagaaggct

SEQ ID NO: 267600 - DNA, 25 bp, Artificial
  probe
  misc_feature (1)..(25): SEQ ID NO: 602; WAN024FJF; Start 386; Stop 410
tcaagattggtaagaaggctcagaa

SEQ ID NO: 267601 - DNA, 25 bp, Artificial
  probe
  misc_feature (1)..(25): SEQ ID NO: 602; WAN024FJF; Start 195; Stop 219
ttcagaagtatcagtggtcttgact

SEQ ID NO: 267602 - DNA, 25 bp, Artificial
  probe
  misc_feature (1)..(25): SEQ ID NO: 602; WAN024FJF; Start 390; Stop 414
gattggtaagaaggctcagaaggat

SEQ ID NO: 267603 - DNA, 25 bp, Artificial
  probe
  misc_feature (1)..(25): SEQ ID NO: 602; WAN024FJF; Start 394; Stop 418
ggtaagaaggctcagaaggataagg

SEQ ID NO: 267604 - DNA, 25 bp, Artificial
  probe
  misc_feature (1)..(25): SEQ ID NO: 602; WAN024FJF; Start 388; Stop 412
aagattggtaagaaggctcagaagg

SEQ ID NO: 267605 - DNA, 25 bp, Artificial
  probe
  misc_feature (1)..(25): SEQ ID NO: 602; WAN024FJF; Start 385; Stop 409
gtcaagattggtaagaaggctcaga

SEQ ID NO: 267606 - DNA, 25 bp, Artificial
  probe
  misc_feature (1)..(25): SEQ ID NO: 602; WAN024FJF; Start 384; Stop 408
agtcaagattggtaagaaggctcag

SEQ ID NO: 267607 - DNA, 25 bp, Artificial
  probe
  misc_feature (1)..(25): SEQ ID NO: 602; WAN024FJF; Start 194; Stop 218
cttcagaagtatcagtggtcttgac

SEQ ID NO: 267608 - DNA, 25 bp, Artificial
  probe
  misc_feature (1)..(25): SEQ ID NO: 602; WAN024FJF; Start 712; Stop 736
aattcaagtacaagcagttcatcgg

SEQ ID NO: 267609 - DNA, 25 bp, Artificial
  probe
  misc_feature (1)..(25): SEQ ID NO: 602; WAN024FJF; Start 657; Stop 681
tgatacaataatgaaggtgactaca

SEQ ID NO: 267610 - DNA, 25 bp, Artificial
  probe
  misc_feature (1)..(25): SEQ ID NO: 602; WAN024FJF; Start 380; Stop 404
ttacagtcaagattggtaagaaggc

SEQ ID NO: 267611 - DNA, 25 bp, Artificial
  probe
  misc_feature (1)..(25): SEQ ID NO: 602; WAN024FJF; Start 383; Stop 407
cagtcaagattggtaagaaggctca

SEQ ID NO: 267612 - DNA, 25 bp, Artificial
  probe
  misc_feature (1)..(25): SEQ ID NO: 602; WAN024FJF; Start 382; Stop 406
acagtcaagattggtaagaaggctc

SEQ ID NO: 267613 - DNA, 25 bp, Artificial
  probe
  misc_feature (1)..(25): SEQ ID NO: 602; WAN024FJF; Start 191; Stop 215
ttgcttcagaagtatcagtggtctt

SEQ ID NO: 267614 - DNA, 25 bp, Artificial
  probe
  misc_feature (1)..(25): SEQ ID NO: 602; WAN024FJF; Start 402; Stop 426
ggctcagaaggataaggtaaagatt

SEQ ID NO: 267615 - DNA, 25 bp, Artificial
  probe
  misc_feature (1)..(25): SEQ ID NO: 602; WAN024FJF; Start 41; Stop 65
ttgcttgtgtcttatttgtctatgc

SEQ ID NO: 267616 - DNA, 25 bp, Artificial
  probe
  misc_feature (1)..(25): SEQ ID NO: 602; WAN024FJF; Start 399; Stop 423
gaaggctcagaaggataaggtaaag

SEQ ID NO: 267617 - DNA, 25 bp, Artificial
  probe
  misc_feature (1)..(25): SEQ ID NO: 602; WAN024FJF; Start 379; Stop 403
attacagtcaagattggtaagaagg

SEQ ID NO: 267618 - DNA, 25 bp, Artificial
  probe
  misc_feature (1)..(25): SEQ ID NO: 602; WAN024FJF; Start 401; Stop 425
aggctcagaaggataaggtaaagat

SEQ ID NO: 267619 - DNA, 25 bp, Artificial
  probe
  misc_feature (1)..(25): SEQ ID NO: 602; WAN024FJF; Start 46; Stop 70
tgtgtcttatttgtctatgctacgg

SEQ ID NO: 267620 - DNA, 25 bp, Artificial
  probe
  misc_feature (1)..(25): SEQ ID NO: 602; WAN024FJF; Start 42; Stop 66
tgcttgtgtcttatttgtctatgct

SEQ ID NO: 267621 - DNA, 25 bp, Artificial
  probe
  misc_feature (1)..(25): SEQ ID NO: 602; WAN024FJF; Start 403; Stop 427
gctcagaaggataaggtaaagattg

SEQ ID NO: 267622 - DNA, 25 bp, Artificial
  probe
  misc_feature (1)..(25): SEQ ID NO: 602; WAN024FJF; Start 389; Stop 413
agattggtaagaaggctcagaagga

SEQ ID NO: 267623 - DNA, 25 bp, Artificial
  probe
  misc_feature (1)..(25): SEQ ID NO: 602; WAN024FJF; Start 45; Stop 69
ttgtgtcttatttgtctatgctacg

SEQ ID NO: 267624 - DNA, 25 bp, Artificial
  probe
  misc_feature (1)..(25): SEQ ID NO: 602; WAN024FJF; Start 43; Stop 67
gcttgtgtcttatttgtctatgcta

SEQ ID NO: 267625 - DNA, 25 bp, Artificial
  probe
  misc_feature (1)..(25): SEQ ID NO: 603; WAN024CQT; Start 831; Stop 855
ttatacggctaatgatacaacaggt

SEQ ID NO: 267626 - DNA, 25 bp, Artificial
  probe
  misc_feature (1)..(25): SEQ ID NO: 603; WAN024CQT; Start 832; Stop 856
tatacggctaatgatacaacaggtt

SEQ ID NO: 267627 - DNA, 25 bp, Artificial
  probe
  misc_feature (1)..(25): SEQ ID NO: 603; WAN024CQT; Start 1641; Stop 1665
tattcttattccgtcttacactggt

SEQ ID NO: 267628 - DNA, 25 bp, Artificial
  probe
  misc_feature (1)..(25): SEQ ID NO: 603; WAN024CQT; Start 1639; Stop 1663
cgtattcttattccgtcttacactg

SEQ ID NO: 267629 - DNA, 25 bp, Artificial
  probe
  misc_feature (1)..(25): SEQ ID NO: 603; WAN024CQT; Start 837; Stop 861
ggctaatgatacaacaggttctaac

SEQ ID NO: 267630 - DNA, 25 bp, Artificial
  probe
  misc_feature (1)..(25): SEQ ID NO: 603; WAN024CQT; Start 1642; Stop 1666
attcttattccgtcttacactggta

SEQ ID NO: 267631 - DNA, 25 bp, Artificial
  probe
  misc_feature (1)..(25): SEQ ID NO: 603; WAN024CQT; Start 836; Stop 860
cggctaatgatacaacaggttctaa

SEQ ID NO: 267632 - DNA, 25 bp, Artificial
  probe
  misc_feature (1)..(25): SEQ ID NO: 603; WAN024CQT; Start 833; Stop 857
atacggctaatgatacaacaggttc

SEQ ID NO: 267633 - DNA, 25 bp, Artificial
  probe
  misc_feature (1)..(25): SEQ ID NO: 603; WAN024CQT; Start 1640; Stop 1664
gtattcttattccgtcttacactgg

SEQ ID NO: 267634 - DNA, 25 bp, Artificial
  probe
  misc_feature (1)..(25): SEQ ID NO: 603; WAN024CQT; Start 1760; Stop 1784
ttgtagaattgagtccaggagtaat

SEQ ID NO: 267635 - DNA, 25 bp, Artificial
  probe
  misc_feature (1)..(25): SEQ ID NO: 603; WAN024CQT; Start 838; Stop 862
gctaatgatacaacaggttctaact

SEQ ID NO: 267636 - DNA, 25 bp, Artificial
  probe
  misc_feature (1)..(25): SEQ ID NO: 603; WAN024CQT; Start 835; Stop 859
acggctaatgatacaacaggttcta

SEQ ID NO: 267637 - DNA, 25 bp, Artificial
  probe
  misc_feature (1)..(25): SEQ ID NO: 603; WAN024CQT; Start 834; Stop 858
tacggctaatgatacaacaggttct

SEQ ID NO: 267638 - DNA, 25 bp, Artificial
  probe
  misc_feature (1)..(25): SEQ ID NO: 603; WAN024CQT; Start 437; Stop 461
tagatgtgttccttagagacaatgg

SEQ ID NO: 267639 - DNA, 25 bp, Artificial
  probe
  misc_feature (1)..(25): SEQ ID NO: 603; WAN024CQT; Start 435; Stop 459
tgtagatgtgttccttagagacaat

SEQ ID NO: 267640 - DNA, 25 bp, Artificial
  probe
  misc_feature (1)..(25): SEQ ID NO: 603; WAN024CQT; Start 434; Stop 458
atgtagatgtgttccttagagacaa

SEQ ID NO: 267641 - DNA, 25 bp, Artificial
  probe
  misc_feature (1)..(25): SEQ ID NO: 603; WAN024CQT; Start 1769; Stop 1793
tgagtccaggagtaattcaagcata

SEQ ID NO: 267642 - DNA, 25 bp, Artificial
  probe
  misc_feature (1)..(25): SEQ ID NO: 603; WAN024CQT; Start 436; Stop 460
gtagatgtgttccttagagacaatg

SEQ ID NO: 267643 - DNA, 25 bp, Artificial
  probe
  misc_feature (1)..(25): SEQ ID NO: 603; WAN024CQT; Start 981; Stop 1005
tgatgataatggtaagacatggact

SEQ ID NO: 267644 - DNA, 25 bp, Artificial
  probe
  misc_feature (1)..(25): SEQ ID NO: 603; WAN024CQT; Start 980; Stop 1004
gtgatgataatggtaagacatggac

SEQ ID NO: 267645 - DNA, 25 bp, Artificial
  probe
  misc_feature (1)..(25): SEQ ID NO: 603; WAN024CQT; Start 979; Stop 1003
agtgatgataatggtaagacatgga

SEQ ID NO: 267646 - DNA, 25 bp, Artificial
  probe
  misc_feature (1)..(25): SEQ ID NO: 603; WAN024CQT; Start 1761; Stop 1785
tgtagaattgagtccaggagtaatt

SEQ ID NO: 267647 - DNA, 25 bp, Artificial
  probe
  misc_feature (1)..(25): SEQ ID NO: 603; WAN024CQT; Start 439; Stop 463
gatgtgttccttagagacaatggtg

SEQ ID NO: 267648 - DNA, 25 bp, Artificial
  probe
  misc_feature (1)..(25): SEQ ID NO: 603; WAN024CQT; Start 438; Stop 462
agatgtgttccttagagacaatggt

SEQ ID NO: 267649 - DNA, 25 bp, Artificial
  probe
  misc_feature (1)..(25): SEQ ID NO: 603; WAN024CQT; Start 433; Stop 457
tatgtagatgtgttccttagagaca

SEQ ID NO: 267650 - DNA, 25 bp, Artificial
  probe
  misc_feature (1)..(25): SEQ ID NO: 603; WAN024CQT; Start 432; Stop 456
ttatgtagatgtgttccttagagac

SEQ ID NO: 267651 - DNA, 25 bp, Artificial
  probe
  misc_feature (1)..(25): SEQ ID NO: 603; WAN024CQT; Start 431; Stop 455
gttatgtagatgtgttccttagaga

SEQ ID NO: 267652 - DNA, 25 bp, Artificial
  probe
  misc_feature (1)..(25): SEQ ID NO: 603; WAN024CQT; Start 430; Stop 454
agttatgtagatgtgttccttagag

SEQ ID NO: 267653 - DNA, 25 bp, Artificial
  probe
  misc_feature (1)..(25): SEQ ID NO: 603; WAN024CQT; Start 34; Stop 58
ggtactgtagtggtattatcagcat

SEQ ID NO: 267654 - DNA, 25 bp, Artificial
  probe
  misc_feature (1)..(25): SEQ ID NO: 603; WAN024CQT; Start 440; Stop 464
atgtgttccttagagacaatggtga

SEQ ID NO: 267655 - DNA, 25 bp, Artificial
  probe
  misc_feature (1)..(25): SEQ ID NO: 603; WAN024CQT; Start 33; Stop 57
aggtactgtagtggtattatcagca

SEQ ID NO: 267656 - DNA, 25 bp, Artificial
  probe
  misc_feature (1)..(25): SEQ ID NO: 603; WAN024CQT; Start 1643; Stop 1667
ttcttattccgtcttacactggtaa

SEQ ID NO: 267657 - DNA, 25 bp, Artificial
  probe
  misc_feature (1)..(25): SEQ ID NO: 603; WAN024CQT; Start 1102; Stop 1126
gcaacctatattgactctgttattg

SEQ ID NO: 267658 - DNA, 25 bp, Artificial
  probe
  misc_feature (1)..(25): SEQ ID NO: 604; WAN024EYU; Start 1449; Stop 1473
tattacttactatgctgccaatgct

SEQ ID NO: 267659 - DNA, 25 bp, Artificial
  probe
  misc_feature (1)..(25): SEQ ID NO: 604; WAN024EYU; Start 1448; Stop 1472
atattacttactatgctgccaatgc

SEQ ID NO: 267660 - DNA, 25 bp, Artificial
  probe
  misc_feature (1)..(25): SEQ ID NO: 604; WAN024EYU; Start 1450; Stop 1474
attacttactatgctgccaatgctt

SEQ ID NO: 267661 - DNA, 25 bp, Artificial
  probe
  misc_feature (1)..(25): SEQ ID NO: 604; WAN024EYU; Start 882; Stop 906
tatctattacacacaatcaggctct

SEQ ID NO: 267662 - DNA, 25 bp, Artificial
  probe
  misc_feature (1)..(25): SEQ ID NO: 604; WAN024EYU; Start 1451; Stop 1475
ttacttactatgctgccaatgcttc

SEQ ID NO: 267663 - DNA, 25 bp, Artificial
  probe
  misc_feature (1)..(25): SEQ ID NO: 604; WAN024EYU; Start 438; Stop 462
ggcagattatctatcaggaacttca

SEQ ID NO: 267664 - DNA, 25 bp, Artificial
  probe
  misc_feature (1)..(25): SEQ ID NO: 604; WAN024EYU; Start 437; Stop 461
tggcagattatctatcaggaacttc

SEQ ID NO: 267665 - DNA, 25 bp, Artificial
  probe
  misc_feature (1)..(25): SEQ ID NO: 604; WAN024EYU; Start 435; Stop 459
cttggcagattatctatcaggaact

SEQ ID NO: 267666 - DNA, 25 bp, Artificial
  probe
  misc_feature (1)..(25): SEQ ID NO: 604; WAN024EYU; Start 317; Stop 341
ttacctctgatggagaagaatatgc

SEQ ID NO: 267667 - DNA, 25 bp, Artificial
  probe
  misc_feature (1)..(25): SEQ ID NO: 604; WAN024EYU; Start 862; Stop 886
gcagaagaatacaaggacaatatct

SEQ ID NO: 267668 - DNA, 25 bp, Artificial
  probe
  misc_feature (1)..(25): SEQ ID NO: 604; WAN024EYU; Start 436; Stop 460
ttggcagattatctatcaggaactt

SEQ ID NO: 267669 - DNA, 25 bp, Artificial
  probe
  misc_feature (1)..(25): SEQ ID NO: 604; WAN024EYU; Start 881; Stop 905
atatctattacacacaatcaggctc

SEQ ID NO: 267670 - DNA, 25 bp, Artificial
  probe
  misc_feature (1)..(25): SEQ ID NO: 604; WAN024EYU; Start 1957; Stop 1981
gaattggcaagtcatgtgaagtaac

SEQ ID NO: 267671 - DNA, 25 bp, Artificial
  probe
  misc_feature (1)..(25): SEQ ID NO: 604; WAN024EYU; Start 1956; Stop 1980
agaattggcaagtcatgtgaagtaa

SEQ ID NO: 267672 - DNA, 25 bp, Artificial
  probe
  misc_feature (1)..(25): SEQ ID NO: 604; WAN024EYU; Start 1955; Stop 1979
aagaattggcaagtcatgtgaagta

SEQ ID NO: 267673 - DNA, 25 bp, Artificial
  probe
  misc_feature (1)..(25): SEQ ID NO: 604; WAN024EYU; Start 883; Stop 907
atctattacacacaatcaggctctg

SEQ ID NO: 267674 - DNA, 25 bp, Artificial
  probe
  misc_feature (1)..(25): SEQ ID NO: 604; WAN024EYU; Start 434; Stop 458
gcttggcagattatctatcaggaac

SEQ ID NO: 267675 - DNA, 25 bp, Artificial
  probe
  misc_feature (1)..(25): SEQ ID NO: 604; WAN024EYU; Start 879; Stop 903
caatatctattacacacaatcaggc

SEQ ID NO: 267676 - DNA, 25 bp, Artificial
  probe
  misc_feature (1)..(25): SEQ ID NO: 604; WAN024EYU; Start 880; Stop 904
aatatctattacacacaatcaggct

SEQ ID NO: 267677 - DNA, 25 bp, Artificial
  probe
  misc_feature (1)..(25): SEQ ID NO: 604; WAN024EYU; Start 1961; Stop 1985
tggcaagtcatgtgaagtaactaat

SEQ ID NO: 267678 - DNA, 25 bp, Artificial
  probe
  misc_feature (1)..(25): SEQ ID NO: 604; WAN024EYU; Start 1959; Stop 1983
attggcaagtcatgtgaagtaacta

SEQ ID NO: 267679 - DNA, 25 bp, Artificial
  probe
  misc_feature (1)..(25): SEQ ID NO: 604; WAN024EYU; Start 1745; Stop 1769
ttattcctgctatggcttcttctgg

SEQ ID NO: 267680 - DNA, 25 bp, Artificial
  probe
  misc_feature (1)..(25): SEQ ID NO: 604; WAN024EYU; Start 1452; Stop 1476
tacttactatgctgccaatgcttca

SEQ ID NO: 267681 - DNA, 25 bp, Artificial
  probe
  misc_feature (1)..(25): SEQ ID NO: 604; WAN024EYU; Start 439; Stop 463
gcagattatctatcaggaacttcaa

SEQ ID NO: 267682 - DNA, 25 bp, Artificial
  probe
  misc_feature (1)..(25): SEQ ID NO: 604; WAN024EYU; Start 217; Stop 241
gataattacggtaatcttgctcctg

SEQ ID NO: 267683 - DNA, 25 bp, Artificial
  probe
  misc_feature (1)..(25): SEQ ID NO: 604; WAN024EYU; Start 216; Stop 240
cgataattacggtaatcttgctcct

SEQ ID NO: 267684 - DNA, 25 bp, Artificial
  probe
  misc_feature (1)..(25): SEQ ID NO: 604; WAN024EYU; Start 1721; Stop 1745
catggttgacagatagttcactctt

SEQ ID NO: 267685 - DNA, 25 bp, Artificial
  probe
  misc_feature (1)..(25): SEQ ID NO: 604; WAN024EYU; Start 1960; Stop 1984
ttggcaagtcatgtgaagtaactaa

SEQ ID NO: 267686 - DNA, 25 bp, Artificial
  probe
  misc_feature (1)..(25): SEQ ID NO: 604; WAN024EYU; Start 214; Stop 238
aacgataattacggtaatcttgctc

SEQ ID NO: 267687 - DNA, 25 bp, Artificial
  probe
  misc_feature (1)..(25): SEQ ID NO: 604; WAN024EYU; Start 872; Stop 896
acaaggacaatatctattacacaca

SEQ ID NO: 267688 - DNA, 25 bp, Artificial
  probe
  misc_feature (1)..(25): SEQ ID NO: 604; WAN024EYU; Start 215; Stop 239
acgataattacggtaatcttgctcc

SEQ ID NO: 267689 - DNA, 25 bp, Artificial
  probe
  misc_feature (1)..(25): SEQ ID NO: 604; WAN024EYU; Start 218; Stop 242
ataattacggtaatcttgctcctgc

SEQ ID NO: 267690 - DNA, 25 bp, Artificial
  probe
  misc_feature (1)..(25): SEQ ID NO: 604; WAN024EYU; Start 1454; Stop 1478
cttactatgctgccaatgcttcatc

SEQ ID NO: 267691 - DNA, 25 bp, Artificial
  probe
  misc_feature (1)..(25): SEQ ID NO: 605; WAN024BGQ; Start 195; Stop 219
cctagaataccgcacttatgaagaa

SEQ ID NO: 267692 - DNA, 25 bp, Artificial
  probe
  misc_feature (1)..(25): SEQ ID NO: 605; WAN024BGQ; Start 189; Stop 213
attaagcctagaataccgcacttat

SEQ ID NO: 267693 - DNA, 25 bp, Artificial
  probe
  misc_feature (1)..(25): SEQ ID NO: 605; WAN024BGQ; Start 188; Stop 212
aattaagcctagaataccgcactta

SEQ ID NO: 267694 - DNA, 25 bp, Artificial
  probe
  misc_feature (1)..(25): SEQ ID NO: 605; WAN024BGQ; Start 190; Stop 214
ttaagcctagaataccgcacttatg

SEQ ID NO: 267695 - DNA, 25 bp, Artificial
  probe
  misc_feature (1)..(25): SEQ ID NO: 605; WAN024BGQ; Start 192; Stop 216
aagcctagaataccgcacttatgaa

SEQ ID NO: 267696 - DNA, 25 bp, Artificial
  probe
  misc_feature (1)..(25): SEQ ID NO: 605; WAN024BGQ; Start 191; Stop 215
taagcctagaataccgcacttatga

SEQ ID NO: 267697 - DNA, 25 bp, Artificial
  probe
  misc_feature (1)..(25): SEQ ID NO: 605; WAN024BGQ; Start 194; Stop 218
gcctagaataccgcacttatgaaga

SEQ ID NO: 267698 - DNA, 25 bp, Artificial
  probe
  misc_feature (1)..(25): SEQ ID NO: 605; WAN024BGQ; Start 193; Stop 217
agcctagaataccgcacttatgaag

SEQ ID NO: 267699 - DNA, 25 bp, Artificial
  probe
  misc_feature (1)..(25): SEQ ID NO: 605; WAN024BGQ; Start 290; Stop 314
ttcaaagtggtgttacgatttcaag

SEQ ID NO: 267700 - DNA, 25 bp, Artificial
  probe
  misc_feature (1)..(25): SEQ ID NO: 605; WAN024BGQ; Start 292; Stop 316
caaagtggtgttacgatttcaagaa

SEQ ID NO: 267701 - DNA, 25 bp, Artificial
  probe
  misc_feature (1)..(25): SEQ ID NO: 605; WAN024BGQ; Start 33; Stop 57
aatagactccctgcgaaattatgaa

SEQ ID NO: 267702 - DNA, 25 bp, Artificial
  probe
  misc_feature (1)..(25): SEQ ID NO: 605; WAN024BGQ; Start 291; Stop 315
tcaaagtggtgttacgatttcaaga

SEQ ID NO: 267703 - DNA, 25 bp, Artificial
  probe
  misc_feature (1)..(25): SEQ ID NO: 605; WAN024BGQ; Start 34; Stop 58
atagactccctgcgaaattatgaag

SEQ ID NO: 267704 - DNA, 25 bp, Artificial
  probe
  misc_feature (1)..(25): SEQ ID NO: 605; WAN024BGQ; Start 32; Stop 56
caatagactccctgcgaaattatga

SEQ ID NO: 267705 - DNA, 25 bp, Artificial
  probe
  misc_feature (1)..(25): SEQ ID NO: 605; WAN024BGQ; Start 31; Stop 55
tcaatagactccctgcgaaattatg

SEQ ID NO: 267706 - DNA, 25 bp, Artificial
  probe
  misc_feature (1)..(25): SEQ ID NO: 605; WAN024BGQ; Start 293; Stop 317
aaagtggtgttacgatttcaagaac

SEQ ID NO: 267707 - DNA, 25 bp, Artificial
  probe
  misc_feature (1)..(25): SEQ ID NO: 605; WAN024BGQ; Start 45; Stop 69
gcgaaattatgaagcaagtaaacaa

SEQ ID NO: 267708 - DNA, 25 bp, Artificial
  probe
  misc_feature (1)..(25): SEQ ID NO: 605; WAN024BGQ; Start 186; Stop 210
taaattaagcctagaataccgcact

SEQ ID NO: 267709 - DNA, 25 bp, Artificial
  probe
  misc_feature (1)..(25): SEQ ID NO: 605; WAN024BGQ; Start 185; Stop 209
ctaaattaagcctagaataccgcac

SEQ ID NO: 267710 - DNA, 25 bp, Artificial
  probe
  misc_feature (1)..(25): SEQ ID NO: 605; WAN024BGQ; Start 184; Stop 208
cctaaattaagcctagaataccgca

SEQ ID NO: 267711 - DNA, 25 bp, Artificial
  probe
  misc_feature (1)..(25): SEQ ID NO: 605; WAN024BGQ; Start 183; Stop 207
acctaaattaagcctagaataccgc

SEQ ID NO: 267712 - DNA, 25 bp, Artificial
  probe
  misc_feature (1)..(25): SEQ ID NO: 605; WAN024BGQ; Start 299; Stop 323
gtgttacgatttcaagaactcctct

SEQ ID NO: 267713 - DNA, 25 bp, Artificial
  probe
  misc_feature (1)..(25): SEQ ID NO: 605; WAN024BGQ; Start 187; Stop 211
aaattaagcctagaataccgcactt

SEQ ID NO: 267714 - DNA, 25 bp, Artificial
  probe
  misc_feature (1)..(25): SEQ ID NO: 605; WAN024BGQ; Start 199; Stop 223
gaataccgcacttatgaagaaattg

SEQ ID NO: 267715 - DNA, 25 bp, Artificial
  probe
  misc_feature (1)..(25): SEQ ID NO: 605; WAN024BGQ; Start 294; Stop 318
aagtggtgttacgatttcaagaact

SEQ ID NO: 267716 - DNA, 25 bp, Artificial
  probe
  misc_feature (1)..(25): SEQ ID NO: 605; WAN024BGQ; Start 298; Stop 322
ggtgttacgatttcaagaactcctc

SEQ ID NO: 267717 - DNA, 25 bp, Artificial
  probe
  misc_feature (1)..(25): SEQ ID NO: 605; WAN024BGQ; Start 295; Stop 319
agtggtgttacgatttcaagaactc

SEQ ID NO: 267718 - DNA, 25 bp, Artificial
  probe
  misc_feature (1)..(25): SEQ ID NO: 605; WAN024BGQ; Start 209; Stop 233
cttatgaagaaattgcggctgattt

SEQ ID NO: 267719 - DNA, 25 bp, Artificial
  probe
  misc_feature (1)..(25): SEQ ID NO: 605; WAN024BGQ; Start 208; Stop 232
acttatgaagaaattgcggctgatt

SEQ ID NO: 267720 - DNA, 25 bp, Artificial
  probe
  misc_feature (1)..(25): SEQ ID NO: 605; WAN024BGQ; Start 196; Stop 220
ctagaataccgcacttatgaagaaa

SEQ ID NO: 267721 - DNA, 25 bp, Artificial
  probe
  misc_feature (1)..(25): SEQ ID NO: 605; WAN024BGQ; Start 182; Stop 206
aacctaaattaagcctagaataccg

SEQ ID NO: 267722 - DNA, 25 bp, Artificial
  probe
  misc_feature (1)..(25): SEQ ID NO: 605; WAN024BGQ; Start 197; Stop 221
tagaataccgcacttatgaagaaat

SEQ ID NO: 267723 - DNA, 25 bp, Artificial
  probe
  misc_feature (1)..(25): SEQ ID NO: 605; WAN024BGQ; Start 15; Stop 39
gacacctaccaaagagtcaatagac

SEQ ID NO: 267724 - DNA, 25 bp, Artificial
  probe
  misc_feature (1)..(25): SEQ ID NO: 606; WAN024G46; Start 63; Stop 87
taatgaaccaatcctagcagcatat

SEQ ID NO: 267725 - DNA, 25 bp, Artificial
  probe
  misc_feature (1)..(25): SEQ ID NO: 606; WAN024G46; Start 62; Stop 86
ctaatgaaccaatcctagcagcata

SEQ ID NO: 267726 - DNA, 25 bp, Artificial
  probe
  misc_feature (1)..(25): SEQ ID NO: 606; WAN024G46; Start 194; Stop 218
ctgtagaaggtaacataggaactgt

SEQ ID NO: 267727 - DNA, 25 bp, Artificial
  probe
  misc_feature (1)..(25): SEQ ID NO: 606; WAN024G46; Start 193; Stop 217
actgtagaaggtaacataggaactg

SEQ ID NO: 267728 - DNA, 25 bp, Artificial
  probe
  misc_feature (1)..(25): SEQ ID NO: 606; WAN024G46; Start 192; Stop 216
aactgtagaaggtaacataggaact

SEQ ID NO: 267729 - DNA, 25 bp, Artificial
  probe
  misc_feature (1)..(25): SEQ ID NO: 606; WAN024G46; Start 1136; Stop 1160
ctggtaataatatcaactcattgcc

SEQ ID NO: 267730 - DNA, 25 bp, Artificial
  probe
  misc_feature (1)..(25): SEQ ID NO: 606; WAN024G46; Start 61; Stop 85
cctaatgaaccaatcctagcagcat

SEQ ID NO: 267731 - DNA, 25 bp, Artificial
  probe
  misc_feature (1)..(25): SEQ ID NO: 606; WAN024G46; Start 191; Stop 215
taactgtagaaggtaacataggaac

SEQ ID NO: 267732 - DNA, 25 bp, Artificial
  probe
  misc_feature (1)..(25): SEQ ID NO: 606; WAN024G46; Start 189; Stop 213
tctaactgtagaaggtaacatagga

SEQ ID NO: 267733 - DNA, 25 bp, Artificial
  probe
  misc_feature (1)..(25): SEQ ID NO: 606; WAN024G46; Start 1135; Stop 1159
tctggtaataatatcaactcattgc

SEQ ID NO: 267734 - DNA, 25 bp, Artificial
  probe
  misc_feature (1)..(25): SEQ ID NO: 606; WAN024G46; Start 190; Stop 214
ctaactgtagaaggtaacataggaa

SEQ ID NO: 267735 - DNA, 25 bp, Artificial
  probe
  misc_feature (1)..(25): SEQ ID NO: 606; WAN024G46; Start 64; Stop 88
aatgaaccaatcctagcagcatatg

SEQ ID NO: 267736 - DNA, 25 bp, Artificial
  probe
  misc_feature (1)..(25): SEQ ID NO: 606; WAN024G46; Start 208; Stop 232
ataggaactgttcaagtgggtaatg

SEQ ID NO: 267737 - DNA, 25 bp, Artificial
  probe
  misc_feature (1)..(25): SEQ ID NO: 606; WAN024G46; Start 207; Stop 231
cataggaactgttcaagtgggtaat

SEQ ID NO: 267738 - DNA, 25 bp, Artificial
  probe
  misc_feature (1)..(25): SEQ ID NO: 606; WAN024G46; Start 65; Stop 89
atgaaccaatcctagcagcatatgt

SEQ ID NO: 267739 - DNA, 25 bp, Artificial
  probe
  misc_feature (1)..(25): SEQ ID NO: 606; WAN024G46; Start 200; Stop 224
aaggtaacataggaactgttcaagt

SEQ ID NO: 267740 - DNA, 25 bp, Artificial
  probe
  misc_feature (1)..(25): SEQ ID NO: 606; WAN024G46; Start 201; Stop 225
aggtaacataggaactgttcaagtg

SEQ ID NO: 267741 - DNA, 25 bp, Artificial
  probe
  misc_feature (1)..(25): SEQ ID NO: 606; WAN024G46; Start 198; Stop 222
agaaggtaacataggaactgttcaa

SEQ ID NO: 267742 - DNA, 25 bp, Artificial
  probe
  misc_feature (1)..(25): SEQ ID NO: 606; WAN024G46; Start 199; Stop 223
gaaggtaacataggaactgttcaag

SEQ ID NO: 267743 - DNA, 25 bp, Artificial
  probe
  misc_feature (1)..(25): SEQ ID NO: 606; WAN024G46; Start 206; Stop 230
acataggaactgttcaagtgggtaa

SEQ ID NO: 267744 - DNA, 25 bp, Artificial
  probe
  misc_feature (1)..(25): SEQ ID NO: 606; WAN024G46; Start 195; Stop 219
tgtagaaggtaacataggaactgtt

SEQ ID NO: 267745 - DNA, 25 bp, Artificial
  probe
  misc_feature (1)..(25): SEQ ID NO: 606; WAN024G46; Start 66; Stop 90
tgaaccaatcctagcagcatatgtc

SEQ ID NO: 267746 - DNA, 25 bp, Artificial
  probe
  misc_feature (1)..(25): SEQ ID NO: 606; WAN024G46; Start 197; Stop 221
tagaaggtaacataggaactgttca

SEQ ID NO: 267747 - DNA, 25 bp, Artificial
  probe
  misc_feature (1)..(25): SEQ ID NO: 606; WAN024G46; Start 202; Stop 226
ggtaacataggaactgttcaagtgg

SEQ ID NO: 267748 - DNA, 25 bp, Artificial
  probe
  misc_feature (1)..(25): SEQ ID NO: 606; WAN024G46; Start 196; Stop 220
gtagaaggtaacataggaactgttc

SEQ ID NO: 267749 - DNA, 25 bp, Artificial
  probe
  misc_feature (1)..(25): SEQ ID NO: 606; WAN024G46; Start 209; Stop 233
taggaactgttcaagtgggtaatgg

SEQ ID NO: 267750 - DNA, 25 bp, Artificial
  probe
  misc_feature (1)..(25): SEQ ID NO: 606; WAN024G46; Start 72; Stop 96
aatcctagcagcatatgtccctaat

SEQ ID NO: 267751 - DNA, 25 bp, Artificial
  probe
  misc_feature (1)..(25): SEQ ID NO: 606; WAN024G46; Start 212; Stop 236
gaactgttcaagtgggtaatggagt

SEQ ID NO: 267752 - DNA, 25 bp, Artificial
  probe
  misc_feature (1)..(25): SEQ ID NO: 606; WAN024G46; Start 76; Stop 100
ctagcagcatatgtccctaatgaac

SEQ ID NO: 267753 - DNA, 25 bp, Artificial
  probe
  misc_feature (1)..(25): SEQ ID NO: 606; WAN024G46; Start 67; Stop 91
gaaccaatcctagcagcatatgtcc

SEQ ID NO: 267754 - DNA, 25 bp, Artificial
  probe
  misc_feature (1)..(25): SEQ ID NO: 606; WAN024G46; Start 73; Stop 97
atcctagcagcatatgtccctaatg

SEQ ID NO: 267755 - DNA, 25 bp, Artificial
  probe
  misc_feature (1)..(25): SEQ ID NO: 606; WAN024G46; Start 71; Stop 95
caatcctagcagcatatgtccctaa

SEQ ID NO: 267756 - DNA, 25 bp, Artificial
  probe
  misc_feature (1)..(25): SEQ ID NO: 606; WAN024G46; Start 75; Stop 99
cctagcagcatatgtccctaatgaa

SEQ ID NO: 267757 - DNA, 25 bp, Artificial
  probe
  misc_feature (1)..(25): SEQ ID NO: 607; WAN024G48; Start 1109; Stop 1133
ttggtaataatatcaactcattgcc

SEQ ID NO: 267758 - DNA, 25 bp, Artificial
  probe
  misc_feature (1)..(25): SEQ ID NO: 607; WAN024G48; Start 945; Stop 969
tgcgattaaacttgaagaaattagc

SEQ ID NO: 267759 - DNA, 25 bp, Artificial
  probe
  misc_feature (1)..(25): SEQ ID NO: 607; WAN024G48; Start 894; Stop 918
actcgaattgaatgaaggtttagaa

SEQ ID NO: 267760 - DNA, 25 bp, Artificial
  probe
  misc_feature (1)..(25): SEQ ID NO: 607; WAN024G48; Start 946; Stop 970
gcgattaaacttgaagaaattagct

SEQ ID NO: 267761 - DNA, 25 bp, Artificial
  probe
  misc_feature (1)..(25): SEQ ID NO: 607; WAN024G48; Start 893; Stop 917
aactcgaattgaatgaaggtttaga

SEQ ID NO: 267762 - DNA, 25 bp, Artificial
  probe
  misc_feature (1)..(25): SEQ ID NO: 607; WAN024G48; Start 895; Stop 919
ctcgaattgaatgaaggtttagaaa

SEQ ID NO: 267763 - DNA, 25 bp, Artificial
  probe
  misc_feature (1)..(25): SEQ ID NO: 607; WAN024G48; Start 1108; Stop 1132
attggtaataatatcaactcattgc

SEQ ID NO: 267764 - DNA, 25 bp, Artificial
  probe
  misc_feature (1)..(25): SEQ ID NO: 607; WAN024G48; Start 943; Stop 967
gatgcgattaaacttgaagaaatta

SEQ ID NO: 267765 - DNA, 25 bp, Artificial
  probe
  misc_feature (1)..(25): SEQ ID NO: 607; WAN024G48; Start 749; Stop 773
cctcagttgatggtgttttgttttc

SEQ ID NO: 267766 - DNA, 25 bp, Artificial
  probe
  misc_feature (1)..(25): SEQ ID NO: 607; WAN024G48; Start 944; Stop 968
atgcgattaaacttgaagaaattag

SEQ ID NO: 267767 - DNA, 25 bp, Artificial
  probe
  misc_feature (1)..(25): SEQ ID NO: 607; WAN024G48; Start 750; Stop 774
ctcagttgatggtgttttgttttca

SEQ ID NO: 267768 - DNA, 25 bp, Artificial
  probe
  misc_feature (1)..(25): SEQ ID NO: 607; WAN024G48; Start 892; Stop 916
aaactcgaattgaatgaaggtttag

SEQ ID NO: 267769 - DNA, 25 bp, Artificial
  probe
  misc_feature (1)..(25): SEQ ID NO: 607; WAN024G48; Start 951; Stop 975
taaacttgaagaaattagcttacca

SEQ ID NO: 267770 - DNA, 25 bp, Artificial
  probe
  misc_feature (1)..(25): SEQ ID NO: 607; WAN024G48; Start 947; Stop 971
cgattaaacttgaagaaattagctt

SEQ ID NO: 267771 - DNA, 25 bp, Artificial
  probe
  misc_feature (1)..(25): SEQ ID NO: 607; WAN024G48; Start 748; Stop 772
gcctcagttgatggtgttttgtttt

SEQ ID NO: 267772 - DNA, 25 bp, Artificial
  probe
  misc_feature (1)..(25): SEQ ID NO: 607; WAN024G48; Start 744; Stop 768
gtttgcctcagttgatggtgttttg

SEQ ID NO: 267773 - DNA, 25 bp, Artificial
  probe
  misc_feature (1)..(25): SEQ ID NO: 607; WAN024G48; Start 896; Stop 920
tcgaattgaatgaaggtttagaaaa

SEQ ID NO: 267774 - DNA, 25 bp, Artificial
  probe
  misc_feature (1)..(25): SEQ ID NO: 607; WAN024G48; Start 751; Stop 775
tcagttgatggtgttttgttttcaa

SEQ ID NO: 267775 - DNA, 25 bp, Artificial
  probe
  misc_feature (1)..(25): SEQ ID NO: 607; WAN024G48; Start 752; Stop 776
cagttgatggtgttttgttttcaaa

SEQ ID NO: 267776 - DNA, 25 bp, Artificial
  probe
  misc_feature (1)..(25): SEQ ID NO: 607; WAN024G48; Start 950; Stop 974
ttaaacttgaagaaattagcttacc

SEQ ID NO: 267777 - DNA, 25 bp, Artificial
  probe
  misc_feature (1)..(25): SEQ ID NO: 607; WAN024G48; Start 1072; Stop 1096
gttatgaacggtttaccaaaattaa

SEQ ID NO: 267778 - DNA, 25 bp, Artificial
  probe
  misc_feature (1)..(25): SEQ ID NO: 607; WAN024G48; Start 747; Stop 771
tgcctcagttgatggtgttttgttt

SEQ ID NO: 267779 - DNA, 25 bp, Artificial
  probe
  misc_feature (1)..(25): SEQ ID NO: 607; WAN024G48; Start 746; Stop 770
ttgcctcagttgatggtgttttgtt

SEQ ID NO: 267780 - DNA, 25 bp, Artificial
  probe
  misc_feature (1)..(25): SEQ ID NO: 607; WAN024G48; Start 745; Stop 769
tttgcctcagttgatggtgttttgt

SEQ ID NO: 267781 - DNA, 25 bp, Artificial
  probe
  misc_feature (1)..(25): SEQ ID NO: 607; WAN024G48; Start 1074; Stop 1098
tatgaacggtttaccaaaattaaaa

SEQ ID NO: 267782 - DNA, 25 bp, Artificial
  probe
  misc_feature (1)..(25): SEQ ID NO: 607; WAN024G48; Start 1073; Stop 1097
ttatgaacggtttaccaaaattaaa

SEQ ID NO: 267783 - DNA, 25 bp, Artificial
  probe
  misc_feature (1)..(25): SEQ ID NO: 607; WAN024G48; Start 743; Stop 767
cgtttgcctcagttgatggtgtttt

SEQ ID NO: 267784 - DNA, 25 bp, Artificial
  probe
  misc_feature (1)..(25): SEQ ID NO: 607; WAN024G48; Start 753; Stop 777
agttgatggtgttttgttttcaaaa

SEQ ID NO: 267785 - DNA, 25 bp, Artificial
  probe
  misc_feature (1)..(25): SEQ ID NO: 607; WAN024G48; Start 754; Stop 778
gttgatggtgttttgttttcaaaag

SEQ ID NO: 267786 - DNA, 25 bp, Artificial
  probe
  misc_feature (1)..(25): SEQ ID NO: 607; WAN024G48; Start 755; Stop 779
ttgatggtgttttgttttcaaaaga

SEQ ID NO: 267787 - DNA, 25 bp, Artificial
  probe
  misc_feature (1)..(25): SEQ ID NO: 607; WAN024G48; Start 756; Stop 780
tgatggtgttttgttttcaaaagat

SEQ ID NO: 267788 - DNA, 25 bp, Artificial
  probe
  misc_feature (1)..(25): SEQ ID NO: 607; WAN024G48; Start 1071; Stop 1095
cgttatgaacggtttaccaaaatta

SEQ ID NO: 267789 - DNA, 25 bp, Artificial
  probe
  misc_feature (1)..(25): SEQ ID NO: 607; WAN024G48; Start 757; Stop 781
gatggtgttttgttttcaaaagata

SEQ ID NO: 267790 - DNA, 25 bp, Artificial
  probe
  misc_feature (1)..(25): SEQ ID NO: 608; WAN024DDD; Start 396; Stop 420
ctatctgacggttggagtgattatt

SEQ ID NO: 267791 - DNA, 25 bp, Artificial
  probe
  misc_feature (1)..(25): SEQ ID NO: 608; WAN024DDD; Start 187; Stop 211
ttattcgctgtcattactctggttg

SEQ ID NO: 267792 - DNA, 25 bp, Artificial
  probe
  misc_feature (1)..(25): SEQ ID NO: 608; WAN024DDD; Start 186; Stop 210
gttattcgctgtcattactctggtt

SEQ ID NO: 267793 - DNA, 25 bp, Artificial
  probe
  misc_feature (1)..(25): SEQ ID NO: 608; WAN024DDD; Start 196; Stop 220
gtcattactctggttgtcgtgatag

SEQ ID NO: 267794 - DNA, 25 bp, Artificial
  probe
  misc_feature (1)..(25): SEQ ID NO: 608; WAN024DDD; Start 188; Stop 212
tattcgctgtcattactctggttgt

SEQ ID NO: 267795 - DNA, 25 bp, Artificial
  probe
  misc_feature (1)..(25): SEQ ID NO: 608; WAN024DDD; Start 185; Stop 209
tgttattcgctgtcattactctggt

SEQ ID NO: 267796 - DNA, 25 bp, Artificial
  probe
  misc_feature (1)..(25): SEQ ID NO: 608; WAN024DDD; Start 199; Stop 223
attactctggttgtcgtgataggtg

SEQ ID NO: 267797 - DNA, 25 bp, Artificial
  probe
  misc_feature (1)..(25): SEQ ID NO: 608; WAN024DDD; Start 198; Stop 222
cattactctggttgtcgtgataggt

SEQ ID NO: 267798 - DNA, 25 bp, Artificial
  probe
  misc_feature (1)..(25): SEQ ID NO: 608; WAN024DDD; Start 195; Stop 219
tgtcattactctggttgtcgtgata

SEQ ID NO: 267799 - DNA, 25 bp, Artificial
  probe
  misc_feature (1)..(25): SEQ ID NO: 608; WAN024DDD; Start 395; Stop 419
gctatctgacggttggagtgattat

SEQ ID NO: 267800 - DNA, 25 bp, Artificial
  probe
  misc_feature (1)..(25): SEQ ID NO: 608; WAN024DDD; Start 197; Stop 221
tcattactctggttgtcgtgatagg

SEQ ID NO: 267801 - DNA, 25 bp, Artificial
  probe
  misc_feature (1)..(25): SEQ ID NO: 608; WAN024DDD; Start 397; Stop 421
tatctgacggttggagtgattattt

SEQ ID NO: 267802 - DNA, 25 bp, Artificial
  probe
  misc_feature (1)..(25): SEQ ID NO: 608; WAN024DDD; Start 194; Stop 218
ctgtcattactctggttgtcgtgat

SEQ ID NO: 267803 - DNA, 25 bp, Artificial
  probe
  misc_feature (1)..(25): SEQ ID NO: 608; WAN024DDD; Start 214; Stop 238
gtgataggtgccatttggtatttac

SEQ ID NO: 267804 - DNA, 25 bp, Artificial
  probe
  misc_feature (1)..(25): SEQ ID NO: 608; WAN024DDD; Start 215; Stop 239
tgataggtgccatttggtatttaca

SEQ ID NO: 267805 - DNA, 25 bp, Artificial
  probe
  misc_feature (1)..(25): SEQ ID NO: 608; WAN024DDD; Start 189; Stop 213
attcgctgtcattactctggttgtc

SEQ ID NO: 267806 - DNA, 25 bp, Artificial
  probe
  misc_feature (1)..(25): SEQ ID NO: 608; WAN024DDD; Start 216; Stop 240
gataggtgccatttggtatttacat

SEQ ID NO: 267807 - DNA, 25 bp, Artificial
  probe
  misc_feature (1)..(25): SEQ ID NO: 608; WAN024DDD; Start 220; Stop 244
ggtgccatttggtatttacataaac

SEQ ID NO: 267808 - DNA, 25 bp, Artificial
  probe
  misc_feature (1)..(25): SEQ ID NO: 608; WAN024DDD; Start 219; Stop 243
aggtgccatttggtatttacataaa

SEQ ID NO: 267809 - DNA, 25 bp, Artificial
  probe
  misc_feature (1)..(25): SEQ ID NO: 608; WAN024DDD; Start 213; Stop 237
cgtgataggtgccatttggtattta

SEQ ID NO: 267810 - DNA, 25 bp, Artificial
  probe
  misc_feature (1)..(25): SEQ ID NO: 608; WAN024DDD; Start 223; Stop 247
gccatttggtatttacataaacaca

SEQ ID NO: 267811 - DNA, 25 bp, Artificial
  probe
  misc_feature (1)..(25): SEQ ID NO: 608; WAN024DDD; Start 222; Stop 246
tgccatttggtatttacataaacac

SEQ ID NO: 267812 - DNA, 25 bp, Artificial
  probe
  misc_feature (1)..(25): SEQ ID NO: 608; WAN024DDD; Start 221; Stop 245
gtgccatttggtatttacataaaca

SEQ ID NO: 267813 - DNA, 25 bp, Artificial
  probe
  misc_feature (1)..(25): SEQ ID NO: 608; WAN024DDD; Start 234; Stop 258
tttacataaacacatggaggactca

SEQ ID NO: 267814 - DNA, 25 bp, Artificial
  probe
  misc_feature (1)..(25): SEQ ID NO: 608; WAN024DDD; Start 236; Stop 260
tacataaacacatggaggactcatt

SEQ ID NO: 267815 - DNA, 25 bp, Artificial
  probe
  misc_feature (1)..(25): SEQ ID NO: 608; WAN024DDD; Start 235; Stop 259
ttacataaacacatggaggactcat

SEQ ID NO: 267816 - DNA, 25 bp, Artificial
  probe
  misc_feature (1)..(25): SEQ ID NO: 608; WAN024DDD; Start 296; Stop 320
gtggtcttggaaactttattgacag

SEQ ID NO: 267817 - DNA, 25 bp, Artificial
  probe
  misc_feature (1)..(25): SEQ ID NO: 608; WAN024DDD; Start 239; Stop 263
ataaacacatggaggactcattctg

SEQ ID NO: 267818 - DNA, 25 bp, Artificial
  probe
  misc_feature (1)..(25): SEQ ID NO: 608; WAN024DDD; Start 238; Stop 262
cataaacacatggaggactcattct

SEQ ID NO: 267819 - DNA, 25 bp, Artificial
  probe
  misc_feature (1)..(25): SEQ ID NO: 608; WAN024DDD; Start 218; Stop 242
taggtgccatttggtatttacataa

SEQ ID NO: 267820 - DNA, 25 bp, Artificial
  probe
  misc_feature (1)..(25): SEQ ID NO: 608; WAN024DDD; Start 237; Stop 261
acataaacacatggaggactcattc

SEQ ID NO: 267821 - DNA, 25 bp, Artificial
  probe
  misc_feature (1)..(25): SEQ ID NO: 608; WAN024DDD; Start 217; Stop 241
ataggtgccatttggtatttacata

SEQ ID NO: 267822 - DNA, 25 bp, Artificial
  probe
  misc_feature (1)..(25): SEQ ID NO: 608; WAN024DDD; Start 343; Stop 367
gatatgttccaccttgactttatca

SEQ ID NO: 267823 - DNA, 25 bp, Artificial
  probe
  misc_feature (1)..(25): SEQ ID NO: 609; WAN024G4A; Start 3740; Stop 3764
ttgttaatgaagatggagaggttga

SEQ ID NO: 267824 - DNA, 25 bp, Artificial
  probe
  misc_feature (1)..(25): SEQ ID NO: 609; WAN024G4A; Start 3739; Stop 3763
cttgttaatgaagatggagaggttg

SEQ ID NO: 267825 - DNA, 25 bp, Artificial
  probe
  misc_feature (1)..(25): SEQ ID NO: 609; WAN024G4A; Start 1679; Stop 1703
gatatgaagcggatgaaggtactaa

SEQ ID NO: 267826 - DNA, 25 bp, Artificial
  probe
  misc_feature (1)..(25): SEQ ID NO: 609; WAN024G4A; Start 2951; Stop 2975
ttggtggagaacatggtatagataa

SEQ ID NO: 267827 - DNA, 25 bp, Artificial
  probe
  misc_feature (1)..(25): SEQ ID NO: 609; WAN024G4A; Start 1678; Stop 1702
ggatatgaagcggatgaaggtacta

SEQ ID NO: 267828 - DNA, 25 bp, Artificial
  probe
  misc_feature (1)..(25): SEQ ID NO: 609; WAN024G4A; Start 1214; Stop 1238
gtaactatgcgacttctgcttcaag

SEQ ID NO: 267829 - DNA, 25 bp, Artificial
  probe
  misc_feature (1)..(25): SEQ ID NO: 609; WAN024G4A; Start 2950; Stop 2974
attggtggagaacatggtatagata

SEQ ID NO: 267830 - DNA, 25 bp, Artificial
  probe
  misc_feature (1)..(25): SEQ ID NO: 609; WAN024G4A; Start 616; Stop 640
attggagttgaggaagctattgatt

SEQ ID NO: 267831 - DNA, 25 bp, Artificial
  probe
  misc_feature (1)..(25): SEQ ID NO: 609; WAN024G4A; Start 615; Stop 639
aattggagttgaggaagctattgat

SEQ ID NO: 267832 - DNA, 25 bp, Artificial
  probe
  misc_feature (1)..(25): SEQ ID NO: 609; WAN024G4A; Start 618; Stop 642
tggagttgaggaagctattgattac

SEQ ID NO: 267833 - DNA, 25 bp, Artificial
  probe
  misc_feature (1)..(25): SEQ ID NO: 609; WAN024G4A; Start 617; Stop 641
ttggagttgaggaagctattgatta

SEQ ID NO: 267834 - DNA, 25 bp, Artificial
  probe
  misc_feature (1)..(25): SEQ ID NO: 609; WAN024G4A; Start 619; Stop 643
ggagttgaggaagctattgattacc

SEQ ID NO: 267835 - DNA, 25 bp, Artificial
  probe
  misc_feature (1)..(25): SEQ ID NO: 609; WAN024G4A; Start 967; Stop 991
aactttaacggcatagatggaattg

SEQ ID NO: 267836 - DNA, 25 bp, Artificial
  probe
  misc_feature (1)..(25): SEQ ID NO: 609; WAN024G4A; Start 493; Stop 517
tttaacggtagtgccatagaaacaa

SEQ ID NO: 267837 - DNA, 25 bp, Artificial
  probe
  misc_feature (1)..(25): SEQ ID NO: 609; WAN024G4A; Start 931; Stop 955
attcttgctggaaatgatactgaac

SEQ ID NO: 267838 - DNA, 25 bp, Artificial
  probe
  misc_feature (1)..(25): SEQ ID NO: 609; WAN024G4A; Start 966; Stop 990
aaactttaacggcatagatggaatt

SEQ ID NO: 267839 - DNA, 25 bp, Artificial
  probe
  misc_feature (1)..(25): SEQ ID NO: 609; WAN024G4A; Start 1645; Stop 1669
aatagagataattggacagagcttc

SEQ ID NO: 267840 - DNA, 25 bp, Artificial
  probe
  misc_feature (1)..(25): SEQ ID NO: 609; WAN024G4A; Start 930; Stop 954
gattcttgctggaaatgatactgaa

SEQ ID NO: 267841 - DNA, 25 bp, Artificial
  probe
  misc_feature (1)..(25): SEQ ID NO: 609; WAN024G4A; Start 2045; Stop 2069
ttaatggcaaatcaacttatggcta

SEQ ID NO: 267842 - DNA, 25 bp, Artificial
  probe
  misc_feature (1)..(25): SEQ ID NO: 609; WAN024G4A; Start 932; Stop 956
ttcttgctggaaatgatactgaaca

SEQ ID NO: 267843 - DNA, 25 bp, Artificial
  probe
  misc_feature (1)..(25): SEQ ID NO: 609; WAN024G4A; Start 2046; Stop 2070
taatggcaaatcaacttatggctat

SEQ ID NO: 267844 - DNA, 25 bp, Artificial
  probe
  misc_feature (1)..(25): SEQ ID NO: 609; WAN024G4A; Start 929; Stop 953
ggattcttgctggaaatgatactga

SEQ ID NO: 267845 - DNA, 25 bp, Artificial
  probe
  misc_feature (1)..(25): SEQ ID NO: 609; WAN024G4A; Start 607; Stop 631
agaaaggaaattggagttgaggaag

SEQ ID NO: 267846 - DNA, 25 bp, Artificial
  probe
  misc_feature (1)..(25): SEQ ID NO: 609; WAN024G4A; Start 1213; Stop 1237
ggtaactatgcgacttctgcttcaa

SEQ ID NO: 267847 - DNA, 25 bp, Artificial
  probe
  misc_feature (1)..(25): SEQ ID NO: 609; WAN024G4A; Start 3122; Stop 3146
attcaaatggaaatcctcaagatgc

SEQ ID NO: 267848 - DNA, 25 bp, Artificial
  probe
  misc_feature (1)..(25): SEQ ID NO: 609; WAN024G4A; Start 1103; Stop 1127
atgttgtttcggtatcatctggttt

SEQ ID NO: 267849 - DNA, 25 bp, Artificial
  probe
  misc_feature (1)..(25): SEQ ID NO: 609; WAN024G4A; Start 606; Stop 630
cagaaaggaaattggagttgaggaa

SEQ ID NO: 267850 - DNA, 25 bp, Artificial
  probe
  misc_feature (1)..(25): SEQ ID NO: 609; WAN024G4A; Start 2554; Stop 2578
aaatctccagatggtaagcaaattg

SEQ ID NO: 267851 - DNA, 25 bp, Artificial
  probe
  misc_feature (1)..(25): SEQ ID NO: 609; WAN024G4A; Start 620; Stop 644
gagttgaggaagctattgattacct

SEQ ID NO: 267852 - DNA, 25 bp, Artificial
  probe
  misc_feature (1)..(25): SEQ ID NO: 609; WAN024G4A; Start 494; Stop 518
ttaacggtagtgccatagaaacaac

SEQ ID NO: 267853 - DNA, 25 bp, Artificial
  probe
  misc_feature (1)..(25): SEQ ID NO: 609; WAN024G4A; Start 3126; Stop 3150
aaatggaaatcctcaagatgctcaa

SEQ ID NO: 267854 - DNA, 25 bp, Artificial
  probe
  misc_feature (1)..(25): SEQ ID NO: 609; WAN024G4A; Start 935; Stop 959
ttgctggaaatgatactgaacaaga

SEQ ID NO: 267855 - DNA, 25 bp, Artificial
  probe
  misc_feature (1)..(25): SEQ ID NO: 609; WAN024G4A; Start 933; Stop 957
tcttgctggaaatgatactgaacaa

SEQ ID NO: 267856 - DNA, 25 bp, Artificial
  probe
  misc_feature (1)..(25): SEQ ID NO: 610; WAN024FRC; Start 704; Stop 728
atgatgatatagtggttaagcgtcc

SEQ ID NO: 267857 - DNA, 25 bp, Artificial
  probe
  misc_feature (1)..(25): SEQ ID NO: 610; WAN024FRC; Start 708; Stop 732
tgatatagtggttaagcgtcctcta

SEQ ID NO: 267858 - DNA, 25 bp, Artificial
  probe
  misc_feature (1)..(25): SEQ ID NO: 610; WAN024FRC; Start 706; Stop 730
gatgatatagtggttaagcgtcctc

SEQ ID NO: 267859 - DNA, 25 bp, Artificial
  probe
  misc_feature (1)..(25): SEQ ID NO: 610; WAN024FRC; Start 707; Stop 731
atgatatagtggttaagcgtcctct

SEQ ID NO: 267860 - DNA, 25 bp, Artificial
  probe
  misc_feature (1)..(25): SEQ ID NO: 610; WAN024FRC; Start 702; Stop 726
caatgatgatatagtggttaagcgt

SEQ ID NO: 267861 - DNA, 25 bp, Artificial
  probe
  misc_feature (1)..(25): SEQ ID NO: 610; WAN024FRC; Start 705; Stop 729
tgatgatatagtggttaagcgtcct

SEQ ID NO: 267862 - DNA, 25 bp, Artificial
  probe
  misc_feature (1)..(25): SEQ ID NO: 610; WAN024FRC; Start 703; Stop 727
aatgatgatatagtggttaagcgtc

SEQ ID NO: 267863 - DNA, 25 bp, Artificial
  probe
  misc_feature (1)..(25): SEQ ID NO: 610; WAN024FRC; Start 701; Stop 725
tcaatgatgatatagtggttaagcg
